United States Patent Application Publication US 2006/0134663 A1 - sequence listing, part 48

SEQ ID NO: 100296 - DNA, 549 bp, Homo Sapiens
  misc_feature (538)..(538): n is a, c, g, or t
tgcggccgccaattctggcagatatcaggcccccagttcagccccagtcaccctcttttacacatgtgggtcaaccactgtgtgctcagagggtcagtcccttcctctgctgtgtttttcttgagtccttgcactcacttcccctgccccagtcacgatgacccctaaagcttcctttgcccttgctttctagggcatccctagtgaaggggcaaacctgagatttctccgtggacctgacagccaaggcagggcactgtctcctgaggccagtgccagcacgtgcatggttcacagaaaaggatcctgggctcagaatctcgagaaccgcctgctcctaacaattcagcaagtcaggggcttcctctctgttagtccccaaatccttacttattttaaaaagactagaccctctctaaagactgttccattttaacatgtcctgattctgcatccgtgggttttgtgaaagagagctagctggcggttagagcctggaagaaggagggaagtggcacctcactagcatttatcactnttttccttctc

SEQ ID NO: 100297 - DNA, 760 bp, Homo Sapiens
  misc_feature (621)..(621): n is a, c, g, or t
  misc_feature (749)..(749): n is a, c, g, or t
ttacctataaaccagtggaaataaatacataagattagttaggggtttattgaggcttgaattctagaaagaggggaattactatattatacacaagtgccagttaaacatgtaccaatctgaagaagatctttctatacctgctactaatcatggaaaacaattaacttactggtttttgttatataaatacatattaagatctgaaaatctcagcagttagttttatttataatcagaaagacagatgttaacagtcactgaaaatctttatgttttaaatgaacgcaccttcacttttacttgacttctacttcatcagcataattggagaaccatagattctttccccatgagtgagggcaaaacatacatctgcagtgttcttagcatgaggatcattaagatggcagaccttgtagatcaaacaatttcctcccatacaccctcattctttcctagaaaagcattgagacagctctgaaattagacctggaaagcatgtgctaaggcaagaacaaatatcttgaaaattttatcataatgttgctttttaaagtcctaaatgtcctctaaaatgaaattcttttgtattaaccttctttcatatgctggctttcnccagactgcagaattgcctgatttgactttctaatgtaactgtaatgaatcttctgggaagctgaaacgattgaacacacatactctgcaactccataaaatattcagtcagtactgtcgatgctgcnattaaaaaagg

SEQ ID NO: 100298 - DNA, 298 bp, Homo Sapiens
tttgtgcttctacatccagtttatacacagctctatacaatatacagaaacctttatatacagatatatttatagaataagctatattaatttgtctctcctttttacagcaatattagtttggatctttcatacattaagtacaaaaaaagtctggggagaatggcacgtaagagagtgcatgagggtctgtggggcccggctgctcgctactgattgcatatggagtcgcccaggcccctgggaggacaggcccgcgcacttgtgctgcaggtctggggatggagtgggggtcgga

SEQ ID NO: 100299 - DNA, 518 bp, Homo Sapiens
caggtgctgacaacacagcttcaggtccaccacaggcagaggagctataggtgaaacctctgggtaaagcctttagtaacttctcttgtccattaaaagggggttgaagaataaacaatgaaagggcttatgttgtctctggaaccacaaggagaaataaaaatcccaggcctatgttctatgtggatgtggggtcaaaatttactgtgtggtatgggaatcacatgctgaaaaattaaaagctgggacagaaccattgaaacctatagaatctcagcaaaagcaaatgcaatacatttttatgatccagggtaatggaaccccacagaaaaagaaaggatctgctgaagatgggctcagaaataagcaacaataaaaatcaagtccttgcatataaatgatacgccatgaaggagagtcaccagttgccataaggagaattagtacccccaagaaatactgctgagaagaactgctactctttttttgagagtgaaatgaggaaattttcagggaaa

SEQ ID NO: 100300 - DNA, 531 bp, Homo Sapiens
tgcggccgcctctagcgcggagctccaggcccggcccgccccgcggccccgcagccccggcgcctccccggcagccagctccccggaggggctctcgggctccacccagtccagcctcgcgagggagccccgcgcccgaagcgcatccccagccgggaggggacgcggccgggacgcgagggtccggcctctggggcggcggcctccagtcttcctttccggccggggcctgctttcccagccccagacctgaggcccgatgcaaatgatctttccggccctcaggaaatcatttccatttcgtggcgggaaggtaacccaaaagttgcgtggctgcacctgtgataactgggatccgggatgtctgcctcactgtcagctccgggaagccctccctgctgtcagggtgagaaacggaggcgattccccgcgtccaggctcccctgcgtgctccacggggcttccctgttgttcgaggcccctcctcatcttgtatgtacagttcggtccattccctgctatggctcattg

SEQ ID NO: 100301 - DNA, 561 bp, Homo Sapiens
tgaaaagtaacatgtttggtttcccagaacacaatacagactctggagcttttaagcacctttatatgttattagttaatgcttttaagtcagagtagtttatcaaaggaaaatttgaatgattggaataaggactccacagcatctaattgtagatgtccaattcttctcatactacaaatcatttccaggaaggaaaagataggacctttgaaaaatctgatggatcggccatgtgtttttatccaccatcactaaatgatgcatcttttcctttgactggattcaataaatgtgttgttttgaatcagtttctttgaattgaaagaagccaagaaagacaaaaacatagatgctttcattaaaagcataagtacaatgtattggctggatggtgttcattccggaggaaggaatactggagttacttatccacaagtcttgaaagaatttgcacaaacaagaattattgttcacacccatggaacactttaccaagtatgtgatctaatgagatcttgcattggaaaggagcaaaataaattttttagatacttgggg

SEQ ID NO: 100302 - DNA, 493 bp, Homo Sapiens
  misc_feature (200)..(218): n is a, c, g, or t
cctgtgaggatctgaagagtaaagggctgggtctgcctcagaaggcaccagcaccagggcacaggtattaaggctgagagtgaaggctgccaatgtcagctttggaggtcccagaagtcttctgttctctggcctcaccccctcagtcgccatagagctgggcctggccttgctggaatggaggcatccttccaaacctnnnnnnnnnnnnnnnnnnntggtagtggtgggagggaaaccatgtcttgctaaacctgtttctggtgcctcccatccccagacccaccagacaccacacagcagacaatacacacccactcgcacaagcttccatccacatgtgttgtactttcagctctaggcatgcagacaaccccacacggccacaccaccacatgcccaagtgtacacacacagagccacaccgtccctctgggcctgctggctcctcccttggctttcccttggcccacttccagggcccaggtgctgc

SEQ ID NO: 100303 - DNA, 639 bp, Homo Sapiens
  misc_feature (183)..(206): n is a, c, g, or t
ccttttctttttaataaaaattacactgcaactggaacagtttctgatctcaaaaggcaagcctcttcccgtgtgatctttataatttacactcttttccgtgagctttcttacctccctttttttataactctccatattctctattcatacatatatccattatattagtagtggaataannnnnnnnnnnnnnnnnnnnnnnnggctttagtacttgcaccctcacacacactctcccgagaaccagaagtcggttgggtgtttatataatgaagaattatggggctgtttgatcgaggtgttcaaatgcttttaaccaccgttggtgctttcgctgccttcagcctgatgaccatagctgtgggaaccgactattggctctactccagaggggtttgcaagaccaaaagtgtcagtgagaatgaaaccagcaaaaagaacgaggaagttatgacccattccggattatggagaacctgctgcctagaagggaatgtcaaaggtctgtgcaagcaaattgatcacttcccagaggatgcagattacgaagctgacacagcagaatatttcctccgggccgtgagggcctccagcattttcccaatcctgagtgtgattctgcttttcatgggggcc

SEQ ID NO: 100304 - DNA, 818 bp, Homo Sapiens
cctttccaccttcgtctccataatttcattggctttccattaaatcacctggaacaccacttttctaaaagactgtctcctttgcctatgaaaactagctaccacttgtttttagtaataaagcctttctaaaatgctttgcctaattaccacatcactctacagatggtcacaacacaactgcatgtttcaagtacaatcaacttacagatattctcaagctaatcccaaaatgccattaagtgcttatcactttaattttccaaaggtagatttgaatccatcagtgggtgatccttttttttaagaactcacagtgaatccaacatgaaaaaccataattaagaggtttaaaacaattttattaccaccactgcacaaagtaagggtgaacaagttatacttcatgtcacacacacgtgtgtgttcgatgaataacaactcaagtggtccaggtgaataaagtaaagaacaccaaagacttgacaatcacaagagaaaccaacgtctaagaatttatgaaactgggcaagttatttcctgggactcaatggtaaagacacagcagtaatccaaattttccatctttgaaattttccatctttcagtcaatattagtaatacctgggtcaaaggggagagttaggcataccaattaatgatcatcagaaatgacatagtcctacaaaagcaaagaaaatttagagacactttcttaaaaatacgactcttggtactgttgaagaaaactgtatgaggaagaacgtgatgtaaaaataaaaatggggaaccttccatctaaaaaagagaaaagtaaa

SEQ ID NO: 100305 - DNA, 468 bp, Homo Sapiens
tgaaacatgattaaatgacagagtaaataaaagcccctagtcaagtgaattctaatgggggaaataagaggactatataaaaattgaacctctgttttgaaaacaaatctttccaggaagtggtaccactctggggtcaagagaaattgtaagaacaataaaatgagcacacatgaccttcctttcctataaaaatatgaagcagaaaactcccccatgatttcctcatgttgcttagaatagtgtgtatttcagaacttttccatttaatatttttggaccacagttgactgaaactgaggatgggaggaagggatgcttaaaaccttggatagtaccaaaccctatatatattatgtttttttctatatatacacagctatgataaagttcataaattaggcacagtaagagattaaaaatattaaattgggccaattaatatattgtaataaaagctatgttaaa

SEQ ID NO: 100306 - DNA, 546 bp, Homo Sapiens
  misc_feature (43)..(104): n is a, c, g, or t
  misc_feature (324)..(384): n is a, c, g, or t
aggctacttgggtggctgaggcacaggaatcgcttgcaccctnnnnnnnnnnnnnnnnnnnnnnnnnnnnnnnnnnnnnnnnnnnnnnnnnnnnnnnnnnnnnnagactcttaaaaaatatatatatattcataccatggaatgcaagggtttaaaacaatgaaatggaactttatgtactgacatcaaaagctttttttatatgaacatgattgtaaaagagtaaatataatttcaatctgctattttaaaacagtacatttctagatacatattaaaagtatggaatcagcttcacaaagtgcatctctagattacaggccnnnnnnnnnnnnnnnnnnnnnnnnnnnnnnnnnnnnnnnnnnnnnnnnnnnnnnnnnnnnnaatgtatgttagtttgcagagataatataagtaaaactcaaattgtataagtgagtttttcagacaatttattaatcttgggcagaaacaattaagtgttaaccatttggaatacaaatgtttgtacgttatgatatgtaatactaagcataattaaaactt

SEQ ID NO: 100307 - DNA, 264 bp, Homo Sapiens
gtgttagccaccgttcccagccaggacttctcaacagcaacaatacgagatcatactctgtaattctgtttgcaaagcttatagacttccctgtactccttccactacttgaagttgcagtagacattggactagctgccgtattattcatcccacagagaacacagcggatcttttcctctttctggatgctacactcccactaactacctaactcttctctcgccgtgccataaagcaacaatttccctctttaatgattcc

SEQ ID NO: 100308 - DNA, 462 bp, Homo Sapiens
gaaactgccagagtttgaaacaatactggaatcctagaaattcttcagaactttctggattagtaaataccatttctattttaaagtcgctatgtgaacacagtactgctttagacagcttggaaatattgaaaaagaaaaatactgtctttcagcaaggaactcaacagacgtatgagccagatagccctcctgaagtgaggaaaccatttattacagtagtttcaccaaagtctcctcatctgcacaaggattctcaacagatactaaaagaagatgaagttgaactaagtgaaccacttcagtctgtgcagttctcttcctcgggaagtaaagaagagactgcttttcaagctgttattcctaaacaaatagagagaaaaacctgtgaccctaaggtaaaatttgtgaagaacatcgatttatttaaccaactacattttcttttctgtttaaaacaaa

SEQ ID NO: 100309 - DNA, 568 bp, Homo Sapiens
tttcagacacaataaaatgacatgacaagaagagacctaaagatcttcattatatcttctttcattaaatgttcctattacaccctgatgagcgggtctaccgttggttcgcatcaagttgtcaaaataaatctgaagatagtcatccccattacataaccaaatggtcaattcattatatagttactctcctggcttcacagactatataccagcatgctacccaaggctataaagatagtcatccccattacataacctaatggtcaattcattatatagttactctcctggcttcacagactatataccagcatgctacccaaggctataacacaaaaaaacatctcttgccagcgcttctaatgtgagaaaaagctcaaaaaaatgtttaaacataaccacattaacaaacataaaggcgtgtatgggtttatgtctgtcttatatccgatttgagaatgaaaaaaataagatagtaaaatcctgcacatatctatttttttattgtgtattgagtgtaaaccatgttttataaaatattttaagaggatattccacagttgcc

SEQ ID NO: 100310 - DNA, 232 bp, Homo Sapiens
gagtagcaaatatcagaacagaaccaatcacggattatggaattaaacactagctggaactcatgttcaccacagctaaaactacaagagtagtgttgcagctgtgtcatctgtaatgactgtggttaaaataaaacgctgtaacaaaaagagatatgcatgcatgccagagggatgtggactacaatggagatgaagcaagtttagattcattgatcagtggttaaaacat

SEQ ID NO: 100311 - DNA, 400 bp, Homo Sapiens
tcccccgatgagaggaaacaggctgagagaagaaaaatgactgctccaggattataccacagtggagagcgggtcacaggacatgatgcagggtccaggtttctgttttgatcaagtcttacatgcccattcagcttttaggcccccctcacctccctgccctcattcacaagtggccctgagacacgtgaacacctccctcctatgcatcacaaaccttctccaccgagctttggtgctttggcctctggcacacctaactagcattggcagaggagagtctacactctcttcctcattcagggaagatgctttaagaaatcctgcctctgtgcagcagaggagctggaggcagctccccaggcatccctccccaaataaaggcttatgtactggtaaa

SEQ ID NO: 100312 - DNA, 479 bp, Homo Sapiens
tttagagagaacacaaagaaatcatttatttaaagatcagactaaatccaaaacaattaggttcacaaagccaatagaaatgcaagatacagacatacacagccaacattctcttaagtcaatttcaaaatgttgaaagctatttcggcaataaaaatcacaaactttctgcactgccaaggtgagggaaattacatttcaaaggcgattccaaaaaaacctaatcaagactttcctcaggatcaatttttggtattcacatttccttagcatgtaatacaggtgcctgtcttcggcgtacggataaacccagaaggccacgagcaaaaatcgtgattaactttaaagagtttaacttgcaccccttgtatgatgccacaggatacaatactataaaccgccactcacacaagatgagttacagttgccatgggttaaatctgctgcctgaaaaacaaattttaagtcctccacccaga

SEQ ID NO: 100313 - DNA, 497 bp, Homo Sapiens
tttgaggcataattataaatcaagttcttgatcaattttacaaatctttcccagtgacaagctcatatttccaataaaaagtgctcttttgctttcctaaggccacactaaatctccctggggtcacctaagtggtgcccaagcatattgaagttttgtcatctgcttactgcaagactctggattttccttctgcctgttaccttgtctgtaaaacaagtggaaatgtgtagatgttatggcacatggttactatggatgtcgacctgatgcccttagcacctggctcttcaagaaatcctgtccaaccagctgcttcctcttcagagaatgtacattttgaaaaatggttatccattattttgcatattcccaaactttgtgctactaatttagtaccatgtatttcccagagaagcaagtaaagaggcactgttggctacagggcactttattctgagttgattaaatgatatttgaaaaagttggcggccgca

SEQ ID NO: 100314 - DNA, 374 bp, Homo Sapiens
  misc_feature (349)..(349): n is a, c, g, or t
gacaaactttttaaataaatcctaagcaagggcaatcatttaggttgaatcacacacacacaaaatgcgctgacttttgactattttttatctcccccaaatggtgatttcatgtaattcaatctaatacaaggctcctagtggctctgggcacaatgtggaaaaagtcagaaggagaagaatgttgattttgccaaatactttgcagatggagctgattacatgcaaggtggtgctgcagggaattaaacaaagacgtttgcaggctcaggtgctgcaatcatgccaggtacatgctatcatgaaacatgtaaacctgtggccttacaagatacaaagcccagaccangcataaagaatcttaaactcacatc

SEQ ID NO: 100315 - DNA, 219 bp, Homo Sapiens
tttgaaaatttggccttgctgaacaagattggagtacccacaataacctgtcagtatcctataaaaagctaacttatcatactgaatttgggtgtttgacaaacttttagttttgccataaaataaatgtattcattgctgggcgcagtgagagaaatgaaaacgtgtccacataaaaaccagtaaacaaatgtttatagtggctttatttataatagc

SEQ ID NO: 100316 - DNA, 519 bp, Homo Sapiens
  misc_feature (22)..(22): n is a, c, g, or t
tcaagacacatcataggactanattcctattatttatccactcaggattgaccacccctttgggccagatagttgtacccccatgtaccaggtgggcacatgaagacacaagaagtgctgtgatggttcattttgcacgtcaccttgcgtggagtatgccaactcattgtttggtcaaacactagtctggacatggtggtaaaggtattttttagatgagattaacgcttaaatcagtaaagcaggttacccaccatactacgggtgggccctgtccaatcagttgaaggcattaagaacaaagattgaggtttcctaaagaagatggaattctccttgagactacaacatagaaaccctatctgagtttccagcctgttgccctgtggaattcaaactcaggactccggtctatggcattaaccctcacttaacttttcagcctgccagcctgccctatggatttcggacttgccagccacacaattccttaaaataaatctctccgtctctgtcaaa

SEQ ID NO: 100317 - DNA, 782 bp, Homo Sapiens
ccaccggcaggttgtactgctggagcccatccagataaaactgccccatactgagaggtgttttctacacccagctagaggagcacactccattttcccatgtctgacttcgtggtgtgagccctgggccctactgaccatggcgcaggacagctgtccttcagaaagcacacggtcaatccacgtggaccgtctccctcgcaggaactccgcatccttgtccctctctgcattcccagtttccgcaggagccttgatcaatggggaagcctgggtgaggatgggccaggtcccaattcccaaagctcctggaagagcctgaagacattgggaaaggctgggcctggggaggaggcagccctgggcccgctgcccatgcctctggtcctgggtggagcaggaatagttccactgtattgtcacagtgtgtttgcactttctgaggttctagctagtacagattgtatattgatagtacatattgctttgtttatgtctttgagatgagaaaggcttaaaacttgagaatatatatttggaatacagccttagaacggtttctgtacacatccacgtgcacttcacgggtgatcagttctagtacctacttgaaacagtgtctgtctgctactttattttcccaatttgatacataccctgatttgatgttttggtatttgagatgaactctgagtatgaagctgtaccataatgcaggacgtcagttttggtgtgactggacatacttgcttcaataaaagaatacatcactcccaaaaaaa

SEQ ID NO: 100318 - DNA, 484 bp, Homo Sapiens
  misc_feature (297)..(404): n is a, c, g, or t
tttttctgatgccaggaattagtattcattgcctctttaagaggccaatgcaaaaaaaggtagaaaaagccctagcccaggagttgggattgccagttgtagtccctgggttgccttgctgggggtgcctaagtcagtgccataacctcagtttttctaatctgtgtaacatggggatagagtatatgatttccaaggtcactttcacctctgtgattgagcctctaagaaagccaaatcttttcactttgtaatcatgacatttttaaaagatggagttaatatgaatgggaaacnnnnnnnnnnnnnnnnnnnnnnnnnnnnnnnnnnnnnnnnnnnnnnnnnnnnnnnnnnnnnnnnnnnnnnnnnnnnnnnnnnnnnnnnnnnnnnnnnnnnnnnnnnnnacacaccactgcacctggctaaagactatattcttaaagaataaaagtactgcacttcacctctatctcctggtatctct

SEQ ID NO: 100319 - DNA, 609 bp, Homo Sapiens
  misc_feature (552)..(560): n is a, c, g, or t
tttgctgacaagtccaagatggcagtcggaactctgacccataaaaccagaaggcttagatgaagaacaaaaagaagggaaaccaaccctgcttccttttgcctgttattaatcgctgcaataaagccattagaatctaccaacatatcacccaacttgaaaagaagagagattctgaaaaatagtcagaaaagaagggtaaatggaaatgatgagtccctcccctttatggctattttaagaagcacaccatgttattcatatggcccgtgcttagcccactccctgaattgtttgattttagtggatataaaaattcttcctaagggctttcttagttccactgccagcagtagttccccatttctatttctcgttaggtctcaactcttccgtcatgagttctatgttccccaggattccaagagcccaaatcctgcggtgggagtgaaggggaggcagatgctggctactgattgggctctgggactcagagtggagtcactgtggaaatcactatttccaagttctttggcagtgggaaggttgccnnnnnnnnnaaggtattgaagacagaaatccctctacatcagttctccatggctgagg

SEQ ID NO: 100320 - DNA, 522 bp, Homo Sapiens
gtttgtaaatggagggtacgaggacaaaattaaaaaccaatgactaggcagaaatgtactaaatggaaagtaacaagatgatgttcataaatactgcaatcctctaagatcacagggaggaccaagcaaagaaatgagcaaatccaagggaacactccactggagcctccagcagcagaaatgactcgtgtctttatgtaaccgcagtagtgttgttggaagcaggctttatgctgccttcacctatgagatgtgatgggaatcctgcttttcaaagggaaacttgagaaataagaactaaaaacaaggattgtgaaagattcctcacaaaaaggattagaggattgaggagtaaaagatcagaaagacttaaacccaaagactctcagaacctcttgatggactgaatttttctctgagctggtgagtttccaggctcctctcaattaaatgctttttaaatgggaattatttaagtatcaggagctgaggagaacctgaaagctcaggaaaaaatgatga

SEQ ID NO: 100321 - DNA, 489 bp, Homo Sapiens
tgggaacagagtctcttctcccttcctcaccacagtgggcaagagggaggctccctaaagggggaaggggaggaattttgaaaaggaaagaagaaaagcaggagtggttggaagcagcccacatgccctcactgccgccagtaaggagccatggccacagactggtctggtctgccctgcagggataagaggggagggaatcaagtttggaatcaatctcaaaacaaataggactgagtcctagataccaagaagatcgttctagagagaaagtgactgagagtcatggagtccagaacaggagggtttagggctctctacccatcagagaagaagggttccacatagtagactcgggtggttatcccaaacatgcctggaaccccatcttagctggaaatactcaagtttcaccatcaagtatgatgctggcttcagagacggataaaaaacataacattaagttttccatctgtgtttccttaaaaa

SEQ ID NO: 100322 - DNA, 449 bp, Homo Sapiens
tgaaattaaaaatagagaacaacaattaggtatccacatgggtggggataatatttacaaagtattggtatggggcttaaatggcttatgtatgtaaatatcaagcattgtatacagcatataacagacataatagtaaataacagtagctattataattaataataaatgtacaagtcgtattagtatacccactagtagtatataatctcttggagctagaatagctctaaaatgtcattttgcccaaaacgcacatcaacaaattccttctatagattttaagcaggaatcatctagcaataggaatggttactacctgaatcctgccagtgataggacaggtcaccacttaatgctaacatgttttcctcataacaagttgaagtctgtctccctgtaatatctacccaccaaatctatacaataaaatcaatactcctgcaaaa

SEQ ID NO: 100323 - DNA, 518 bp, Homo Sapiens
agaaatgatagtaaaggttaacataaaaagactataaatatataattgctccccattctaacctcagcttctttaaaatatataaaattatataaggtaataattataagaatatgtcattggggtttgtaacactcatagatgtaatatatataacaatattaccattaaaaaggggaaagggaaggtagctatgtggcaataacatttctatatgttactagcattaagttagtatgaaattgaatcaaactgaatctgattataatgagttaaagtgtgtatggtaagccctaagaaataattaaaagtatatagggaaaaataattaaagatattaaaacactaccttaaaattttacttaatgtgaaagaaggcatagagaggaacagaagaacaaaaaccccatgatacacacacacaaaaatggtagacataaattcaactataccagtaataacattaaatgtgaactgattaaacaatccaatcaaaagagattgtcagactggataaa

SEQ ID NO: 100324 - DNA, 511 bp, Homo Sapiens
gccgccaactttttctttgttccattgtacagtgtaaataactaagttgttaactgtcaagtccagttatgtattctgtaagttgtgttctagtctttgactaaaatttatcatctcttataatgggacttaatctttctctaaaagcatataagagcttgtcaatagagcaatcaatcaaaaagattttgtgattcataacattgaagttagtctggttaagagttttggtttagacttcatttatattttccttactaatatctaatatttaatgaataatgatcaattttttataaagttattaatatgatcagggaaacctttgggacttctgacaggcatctggtgaagagacaattcaagccttagtgactatttagaatagccagtgatcactagctaattctcatatccatgcctttttgtcctgtttacagtcttaaaagaggtaaaacagcaaatatttttttaagggaactataaccttaggattcctgaaaagaatttc

SEQ ID NO: 100325 - DNA, 354 bp, Homo Sapiens
agaaaaaaatctgcttccaagttcagtggtacagttagcacaattcagtcccttgtggttgtggaactgaggtcccatttccttcctggctatcagctaggaatttctctcagcaactagaggctgcttttaggtactcttcctggggccacaattgtcactttacaacacagatgctatgcctaaaaacttaacaataaatattatcaaatatccaggtaagattaaaatttccctgattgtctcagaaatggtcttgcagtttgttaacagaaggatccaatcaggattcaaacattgcctttggttgaattatgtcctaaatcttcaaaatataaaacatttctccagttc

SEQ ID NO: 100326 - DNA, 220 bp, Homo Sapiens
ggaccaaaaatcaatctttacctcaaaaggataagcttccaggatgcaataacatccccttccacccttttctacatcctaaaacagtaatattcacggtaacagcaaagcggaaatcagcttttcctgaacatgtactgaattctagtcacattcacacacgttaattcatttaattccagccacaaggtaggcagcctctcttaacattttacaattg

SEQ ID NO: 100327 - DNA, 457 bp, Homo Sapiens
cagcccccagttcttacatagacccatataagtggcaggcagaataatagcacgccctaaatgtccacatcctcatctccggaacctgtagatgtgttgtcttacacagtaaaagggactttacagttgtgattacagtccgggtcttgatatggggagatgatcctagattatccaggtgggacgaatgtaaccacaggtgtccttatcagtaaaagcaagcggcaggaaaatcagtcagagccagagagagagagactggaagatgctccgcagctggcttgaaggatgaaggatagggttacatgccaagaacaggaggcaacttctagaggctggaaaaggcagggaaggattctctcctagatggtccagacagctctgctgacaacttgattttagcccactgaaacccatttcagatttcatcgagaataaaattgtgttgttttaaaaa

SEQ ID NO: 100328 - DNA, 477 bp, Homo Sapiens
tgtttgtttgctctttaatttcttacgacttttcgaaacatcttgaagtttaaaagttttatgtaaactgaactattagtattttcctgtatggtttccaccttggataccatgcttagaaaagcccttcctctaagattacagaaatattttttcctactacatactgattgattttctttttgtttctcaaataggtacgtttgcgggagcacatgggtgaaaagtatacaacttacagtgtgaaagctcgccagttgaaattttttgaagaaaacatgaatttttgagcatttgtcctaatctgctgccagaattaaagacctatttttagaggattttggcttaaaaagcaagggcaaacagtcatttggaagccactcaccactgttttatatctcttttttatatctctttggcgtttccctacagaaaagaaattggacagaacagaataatatgaagcaggatcacaaa

SEQ ID NO: 100329 - DNA, 531 bp, Homo Sapiens
tgaagtgtcatagggtgggtttctgctggctgaggtgaagatggtgaagtggctactgattgatggttctgcgtgggcaatggcgttggaggaacaaaggtagagaccattgttgtcattggaacacttgttttcattgaaatgctcgttgttgttggaacagtctttgtcgttggaacagttgttgtcgttggaacgcttgttgtcattggaacagtgatgctcgttcaaacagtagtggcggttggaacagttgtgacaattggtgtagtcgtgaccctgggtggcacaatctccaatgatagagtgattttcatgtcattgaaccacccactgtgctcaacatggcaacaatataagccactgtcagacacagctgtattttctatagtcaaagggacatcccttcttgaaaggtcccccaataccttatagtgtgtgtccttccgataggtgacgtgggttccattggtccagacaatgctatttcagcatgtgaataaagaacgtgcgcctctattccagcaaaaa

SEQ ID NO: 100330 - DNA, 495 bp, Homo Sapiens
agggacagggcacagcagtgctaggccaggatgatggccagactcccacggtgttttaagacagacctgccaaggccctgctcttgaaggactgagctgctggcaaaggggaaggaggcatgggaggcggccaaaccagcatctgaggtggtcttggaggcaacagggtgccaggttctacctgggctctgccaccatctctgcaggatcctgagcagcttctgctcctgcaccaggaggacctggacctctggcacgaggaggctggatgtcatcaacactgagccctcagtgtgctctccactgccccctcttcctcgtagctcagcagtcgggagccctctgctcagtccctttaacctagtcctgccacccaccagctcctcaaaggttttgccaaaaaacctgaacacaccaggatggcactgaggaagaactgggctacctttgttgtactatctcttgcaagattttaaatttgggaaaggcaaaaaa

SEQ ID NO: 100331 - DNA, 605 bp, Homo Sapiens
cactcccgccctctgacatcagattgtgggcactagatcccgcttggtggtgaaccgggtgcgtcagaacccagggattaaatagctttcgaaatccatcggcttgtccttgaccagccagagggccagggcacgtgcccagacctcctgccagctcagggataggggaaaacaccatccatgcacacattcgaggcagctgcagagagccgcccacagtgggtcacagcccaggcccaagactgatggtcctggcccaaagtgctctggagacctgagctcccgagacgggggttggttggaggctgggggctgtcagaacctctctccaggcacccagctaggggctgaggaatctgctctgccagctgttttcacagtgggaagcaggtggcttgcacaggcctttgggggaccccatatgttgaggtaggaaacgctgtggtgtggcgggggagggagcaaggggtatccttcctctgcacccaggggccatctgctttcaaatccagccacttgtcctccttcctggtagcaatatggagccacccagactctgctagacatatgagtgctaaagataaaaatactcaaaggaccaaaaa

SEQ ID NO: 100332 - DNA, 767 bp, Homo Sapiens
ccaaccaccgccgagtcaagattcagcgattccaccgcaatcgccctaatgacaacagcctcataatatctcccctaaatccacaaattcagctgcctctctgaggagtggtggaggagctgcgggagccgagaagcccaagagccctctggacccagaaaagtcctacagttgcccactcctcaccacacaacagaaggagctctggtcctgcctgccagccccagagggcactcaaactttggaggccagccacccggatgaagtgaataaggcctgaaaattgcttgtttgctcgtattgtaaaataataataattaccattattatttttaaactgtctaatttctctagggaaagtaacatcgaaagcctaaaacagacgccaaaaggcccatagaacacagagggccctctctgcctctggccaccacagcccctaggccaggcatgggtatttattcttaggtatgttgcttttaagaagatgtaatcagcatcttgagccgggcctccctttgtgaggcttctgtaactatggaagtgtgatttacgcagatttgtcggggtcagagacgtctttccctgagcactgtgtatatttagacaggactcggtttggtgttaaaaagtgtatatgttgaatggattcacacacagtagccaacaatgaccacattgtcggcccgtgtacaacgcgtattgaaacgcagcgcccagacttcaactaatctgccctcaataaagctgaaataattatcctaaaa

SEQ ID NO: 100333 - DNA, 511 bp, Homo Sapiens
cagaaagataaaacagtattacgaccaaatttatcagagagattacatttcttaatttggaaatgtaaaatttttagtagttttgacaaatggttgtaaccaaaaggttatcagctaggatagaaataaaattaggctgctggtagattaggaaatcatgtagaattagacgatgtctggtaaaaattttgttttcctttcaactttgaggcagttagtctaatagaaccctcagtggagttagaagtgcccagaattattaggaagtgggcaggggaggctgcctcattacttccttcagctttcaatcagtacaaaatggagcttaaaatcaggctttcagcagacagcaggatgttccatatctacctatccacaaatattcctcattatttttagcctgtaactgtcatatagcacttaaacttatttttaaatgctttgctaatgtttcacttgagtagaaaaacgcacatgatattctataaaatttacctgcaaatatactaaa

SEQ ID NO: 100334 - DNA, 444 bp, Homo Sapiens
ggaaacctccattccccattcccctaccctagcccaaagacgagaggtttgctttccagaatagatgaaccagagggcctctgggggagcaccccagggataactggcaaggcgactggggtctggtcctcataccgaatcccccagcaccggggactatatcttggcctcatctgtgtttgggaagcctaaggctagagtccctatatgattaaatgaaacaaacttctcccatgaaacgcaaagaacaaaacaaacaggaaaaacagaaagaggaacctggaagaaaccaaaacagttcagggagaataaaactttaaaatactcagcatttccttctactcagaaagctaagagacctcgtgcatgtgatgagagggtgctttacaaaggaacttgccaaccacaaagaaagctctgggaaatttaagatacaatagcaaa

SEQ ID NO: 100335 - DNA, 557 bp, Homo Sapiens
  misc_feature (88)..(88): n is a, c, g, or t
gccccatcggctgcctcccagatgaagcgaaccggagcgatcaagcctcgggctgtcaaagtggaggagagtaaggcctgacagtgcntggctgccacctcgcctctccctactgaggacggtgccgccatgcggcctcgacacagccgacactcgggagcctcaccagatccaccgtccaaatgcgtggcccagactgagagacctccctcctctccactcccgaaagctccgttgtcaaccagcttgcacccgtggatatatggcattgacccgcttgctttgatacgaaacaaaaaagcagacgactccttcatcccatctgctcctaccgtgactgtggagtgacgcctcctgtgcagtgcagatttgccctccctgcctcctccctgtcctgccgcgcagccagggcgccttctcagcagtgcttccggcccagccgcccatccctaggcacagtgatttggcagcagggtcattttactttgaggctttttgttttaaaatgtagccaaagtttttacaaaggggaaaggaaaagaaaacaaaaacgcaaa

SEQ ID NO: 100336 - DNA, 696 bp, Homo Sapiens
tttcctttaagtgttctagtttatttaaatatcaatatatcacaggtaaaatacttttctctctttcaatcattcaaaaattttattaagagcctataatattccagtgactgtgtgaatcattcaataaatgagggagctgttgagaaacagaactcaagcacctttataaaaaagcattgaaaagtctagggaaatgaaagggggaaaaatagaagtagtcagtgcaaaaaaatagagtgagtggtgctagataaatttttctccctaaaggcttgtttctaagtgaatcctaaatgctccagaaaattttaaaaacagcaataccaagctatgtttgagggttctaaaggtaaaggacaaagacatgtactccctcaaattttttggattttaatgaagtgctcaaagttaataggttattaataattttaaaagattttaaagggggggactggaataagcagagggctcttaaaaaaactatttgaaagagaaagcatgatgaattagcatgcctttgaaaattgctagacatgtattatttatctacatttttgaatattaatgattgacttttgacaaaaatttattagagcacttatgatgttagtgccttgtagaatccaacagttaaaattcttacaatctctaaagactaatacttttcatatgtcaacacttgaaagaagtata

SEQ ID NO: 100337 - DNA, 443 bp, Homo Sapiens
gtacatacacacaaaaacttgtacaccaatgttcatagcaacattatttgtaatagccaaaaagtggaaacaacccaaatgtctaccaactgatgaatgggaaataaaatgtggtctgtccacgcaatggaacattattagactctaaaaagaaatgaagtactcacacatgccacaacatggatgagccttgaaaacttgctaagtgaaagaagccaggtgcaaaagcccacatattgtctgactgcattgaaatgcaatgtctaaaatggacgaatctatatagagtgaatatagattagcgtttgccagggcctggaggctgtgagagatgaggcatgactactaagggtttggggtttctttttcgggtgatgaaaatgttctgaaattagtggtgattgtgcacgattttgagaatgtactaaaaaccaatgaacttt

SEQ ID NO: 100338 - DNA, 233 bp, Homo Sapiens
tcaccacttttattcaacatagtactggaaattctaacaagagcaattaggtaagagaaagaaacaacacccaaattgggaaggaagaagttaaattctctttatttgcagataatatgattttatatttagaaaaaatctaaagatcccaccaaaaacgaactgtaactaagaaactgattttatttataaaaccaacatacaaaaatcagtagcacaaaaaaccaactgtg

SEQ ID NO: 100339 - DNA, 716 bp, Homo Sapiens
  misc_feature (129)..(130): n is a, c, g, or t
  misc_feature (244)..(244): n is a, c, g, or t
  misc_feature (290)..(290): n is a, c, g, or t
acagaaatatctcaagaaactgggagtatttttccaagtttaaagcttgccgagatactattatttctgaagtagctacattaatttctcaaaatgaatctcgtccacattttcctattgaactcttcnncatgagctgcagctactaaaccacagactacttgagacagagggctttatatgcattgcaggacataggtatccagacatatttctgagagccatgaaaaaggagaaaatgtanagtcagtaaactctgggacttggatagcatcaaactcagaactaanctcctagtgagagccttgctactactgatgatgtaagctgataatgattagtgaattgtagatataattttagtatgcagtaaataaaagttaaatagattattgtcaaattgtaggtagacctaatatatttgattttcagctttttttaaaacttgggtataatgtgttattttattttgagggcgagatataatatgcaatcaaaatatggtagcaaacaccaaaaattatgtatgtatgatagattatgaggtctgagatagccatatttatgttgttattacccagtataggggctgactcttaaaagacatttacaaatgtatgttgtatttatttaagacattcagtaaaacagctatcatattacagtaaaaacacttgaatgaataaatacaggataaatcaggtctttgggttaaa

SEQ ID NO: 100340 - DNA, 563 bp, Homo Sapiens
tactctctctcgccttgttgagccaactcctctgaaaaggtggggccgcgcggaggagaagtagtggggcagagcaggggtgaagcgcagcctacagtcctaggggagccaacaaaggccgagatttgaggtcaccagctctaggcccaggctgagcctaatgttgtttagagtcacagactacgcagaagaaaaccaaggccggggaggggccgtcacttgcccagcgtcgtgctagatctcgggcctccgcctctggctgtgtagtgctccccactaagcccctcgtccccggagtgccacctgcatccacgctaactaggatgctggctgcaactcgtgtttcccgcggccggtgtcgcgggctacctcctccttggaactcgaaaagtgaaagtgtccggaacaaacagacgccgagagggaaacgaaaaaatctggagaaagtcatctctcagtgttaaactgtaaaaaaatataaactgtgtgtagcataccctttgacccagtaatcatatttcggggaaagaaccccttagaaattaaagcatcaattcatgaaa

SEQ ID NO: 100341 - DNA, 168 bp, Homo Sapiens
aaccacaattaaaaaaataaacccaaatggacattgtaaaagtggaaaatacctaaaattaagaaatcaccagagggactagcaggagactcaggtatagcagaagggatcagtgacaaagacaggttgataaaatataccctaaatgaagcaaagagttaaaaaaaa

SEQ ID NO: 100342 - DNA, 560 bp, Homo Sapiens
actaagctcatgaatatgattttggttatatgcagcttttgactagcatgtattgtgtctttttctcctctatgaataattttatatttcatgctacttcttgaaagtttactctttgatgctctaagagaacagccagatggtttatatgaataatctttatctgcaggatggtggattggtaaattaggagaatgttgtttgagatatcaagatttatgtctgggaactaaaatatataatgccaaatgtgtttttgtcaattactagagaattctgtgcaaacatatcatctcttcaaatgctgcacactttgcttttgttaaacagcaggtagtagacagaacaataacagtttcgcgttaagacttttaaaggaaatagaatcgtgattaagaaatcagaatttatagatatattgggataaatgaagaaataaaaatgtttgtctagaatgtagcatctagtgactttttaaagccctaacgtttacataaagaagctctagttcttatagaaataacaaagcaaataaaagttcttaacaatcccctcaaaaa

SEQ ID NO: 100343 - DNA, 483 bp, Homo Sapiens
attcaaatgagtgtccaggttttcagggtggttgctaaaccccaaaagaccgatagcttcgggcaaaagactgcagaaagaacagctttacatttttacggaagcaatgggaaatataccctgtaagccttgaaaaattcccgaagggattcctgttcattcctgtggatcctaatgggccagcatagacctgttagtcaaaagaggatttatctacattgcacactcattcaggcaggcagggaagtcaacgccactttcagatgtttgtagagcatgaactctgtccgttcccacgccctccaaaggctgttacacagggatgcccgcttttggacagaagtgattcatgcaggatgagaaccatgaccacagaagattttgtgcatgtggttatttcaatatttaatttaagtgtatgcatgagtgttcaggataaaaatgcttggagtgtactttaattccattaaaaatgtatacatt

SEQ ID NO: 100344 - DNA, 484 bp, Homo Sapiens
aggacttttggctaaagaattctagctaagggccacaatgtacttctcgctagcattctcatagaacacatgtgaatgtagagtagagattaaaaagaatgactcagtgagttacactacccacaaggtcaatgggccggaatgaaaattcaaccactggcctatctgtgcttagtgaacaacccagaccttttttcccgtttgcaccttttttggataccaaatgaaatctgagcagctgccccttacccacccacataagtgatgtgagacaggtgacattatgtaaccgctgggtcttcctgacttcctctccagtttaagaacaggaagagcagtgcacaaaaatgttctgtcgagctgaggatatcggaacttaaccggcttccacttggacagaatacatttgttccagaacactgtgtacattctgggttttccaaatatgagaaacagatggagtcattaattcaagataaataaa

SEQ ID NO: 100345 - DNA, 505 bp, Homo Sapiens
ctaagtgcttcagatggatgatctcatttaaccttcataacatcccggtgaggtaggaactattaatatcagcctcattttagaggtgagaaaatagaaatgaagcactttccccaccaccaccaaaaagtaagtggcacagccaggatggagttgaggtatccaggcccttgaacctgcctcttaaccatgatgtctctctctctatggactgcacactaacacctttctaatcaggatgaaaaattctgctgttatacctggtggtctgaaataaagcaaaaatttggctggctcaagtgttccaagttgctcaaaaagccatgcaattcaatcctctctgtaacggtgctgtatattcctggaagcatcctagagggaacagggagcgctgggctgatgggggaaaatgagggtcgagaatgggagaggccagcctgcattatttgtaggctcagaggaagggtcctgagtggaggactaaaggagccactgtggctagacc

SEQ ID NO: 100346 - DNA, 451 bp, Homo Sapiens
agggttacattacaatttagtgctttatgtggaccaggaaattggaggaaggtcctctggtcttcagttcatcatgactgcaattgggaagttcaattgtccaagctggttggtctgtttgaaatcaatgtgcaacagggaccaggatcttgctcttggaggtgagtcctcctggcacccactcagcatcctctcatgggtcctgtcacactcagactctgcatggtggagggacagtcacccctttctcccatgtttgaagacacatatcagtctcaggacagattttcaacttccagggctgatatcacaggacattctagcaactctatgtgtggggactttcaacccaggccagagagtcatgggatacaaataaaacacacaaacaagctttaatgctgcctttaagtctcagtaaggaacaaagagaagggtcccaggacaaaaa

SEQ ID NO: 100347 - DNA, 487 bp, Homo Sapiens
ctcaaaaaggtgatctggttctttcttcagagatttctacggggatagaaaatcgggagtctgccctcattaatctgtgactccacctcttgcatcaaatcaatatctatttgttgagcacttattgattaagaccttgcatatgtctgtccattttgatttgagatacaactttttgtgtgggttgaatgacaaatcactccaaacaaagctgggcacagagaatcagctaggagaccagttattcagggtccatttctcttggatgtaaaggagtcctgggtaaaatgtggctgtaacctaaaccaactagtccttgtgatttgtttctgccctctgtgtttcctgttgtcaaatgctaagtgtgtgttttgcagtcatgaactaaagcacaaaaagatgcatgagacattgtagtcatatgtctggtgtgacactttggagcaaaaaccttgcagtggtaaataaaaaatttccaacagggaaa

SEQ ID NO: 100348 - DNA, 391 bp, Homo Sapiens
aaatatacagtaaaatatttcgtgggaacctaacactcacatagcatatggtttattaataatgcatatcctttctaatcacttcttcaattctttttgctgcagttctgtgctaaaatggggttgtggttaagtgaacgagaactctgcctacctaagaagttcattgtgttctaagtggaaggagagttactgaagggaatgtgaatttttaccgtttgtacttaagatacatttgttgtctaaaatggctctggataacatttttgggttaaaaaatgtaatttaaagccaccatagaaagtattttctgatttactgtccaaatgaattttgttgttaattgagaagtcaataaaatggattaaactgacagaaaaaaaacataaaa

SEQ ID NO: 100349 - DNA, 603 bp, Homo Sapiens
gaggtaccagctagcagtcagtgtgagtatgcatgtttgtagcctgattccatagcaataaaactgtctgcttctccatcggactctcccccttggctgtgagctcccagaaggcagggcttcccctgccttgtaactctatctgcagtttctggcatcatctggctgagacttcatttaatacaatttactcctctgtaccagacactgggctgagccccagaaggaacagtggtgagtaaggctgacttgatgcccgtctgcatggtgcttgcagaagcctgctaggctctcagaagccaaggctctcagaaagtgtctgctgaatgaatgagcttgtgtaagaggtggccatcagggggactggggcagctcgtgtgtgctgtggggggcttagggtccagtgatgatgggtctttgggagcagactacttctgtctgtggggaaaaaaaggaggctctttgcctttcacaacgggaaatcgggtcaggacccgagtgattataggatcataagtaattataggcctagatctccccgtgatccatccctccctttcctcgaagggcctggagccaggggttacagctggggcggccgca

SEQ ID NO: 100350 - DNA, 532 bp, Homo Sapiens
cagtctccagaattcgctgctatcacaccaagtcatgctgttgccctgtgacctcacacttcccattccatggccttgtcttggcagggagtaaaaaatcccacttctttttactttagtgggtctcaactgcagcatttcagaaacaaattttgatttgacactcaggagaataaaaacaagttgagggcagaatgtatttggaaaagcttaagacaaatttactgatattattttatgatcatttaggattacagatcaatttacctccataaatctttgaattgtcactgtgaccacaggatgaaaatcctttattagccattttataggttaaaacaaaaaattgactacacagccgacttccctcagataactatgaagtctattatgagtactgaatgaccaaagaacatggaaaaaatgcatatgaataaatactgaaatgtttatgaaagatatttatgaaagatattaagacttctgtgtttaggtatgcacatatgataaaataaatctaaaaacattaaaa

SEQ ID NO: 100351 - DNA, 599 bp, Homo Sapiens
tcatgacgggcagtgactaataacaggagttaaaaaataacccagcccagtgcagccccccaatggcatccacatgaaatggatggatacatgagcccccccagtccacagccgcctgtgtgtccttgccggggaagtggggagaggggtcaggaggagaggtgtgcacccagcagtgttgggaaaccgcatgtcgtgcttgtggctaatagcaaaagagagtgctttagtgggaggcatggtagaccccagagaagtgacaattaaattgactttaaatcctggctccttctcatctcagttctgcgggtgtcccaggctgagtgctgtaccatgtggctcactgagtcacatcctcacacaaaccttcggagagaagtccgttattcttctcattttacccatcgggaagctgaaattccagaaacagtaagtcacttgtccaagaacacccggaccggaagggcacgtttccatgtctgcatctcaaaatgagtaagttgctagaccacacaaaattgtgttacccctaaaataagacactggcacagcagctggtacacagtaagtgctcaagaaataagtagaatgaaagaccc

SEQ ID NO: 100352 - DNA, 436 bp, Homo Sapiens
  misc_feature (105)..(116): n is a, c, g, or t
tttaatgaagacaaagaacatgagctcttgaaaaattcaaaatgagagccaaaaaaattcaacggaaggtggggaatggtaatgttgggggaatctttcggaagnnnnnnnnnnnncaaagatttttaaaagaaaatctgaaagataaaaagagaatcaatccatgaagctcagttatgatggggtgacagtagctaaagcccagagccctcgaagttgggctctgataaaccaccttctagcttgcagctaggatatgaatgactattcccacagggttgggagaaaagatgggccaaagtaaaacaggactcccaggattgtctcatcacctggtggtctatgtggtcccagactgttagcattcctaggcacctggtagaacaaaaaaatcttctctggtgagtaatgccttgttcataagaatcaaatattc

SEQ ID NO: 100353 - DNA, 558 bp, Homo Sapiens
ggtctctcaagcccaggagcatggactgagcccctcatgactcgcaacaactttctttagaataattcccgcatgagtccttttttatattctttgtgtatattttcaagggtttggttaatttgtcctgcagcagcatcgtccctgattaacatcgtgatattaagccattcactgtgtcctgtaacagtctctaatcgttcataaacacatagtagaaagtgggccccaattacccccaaaattattctctacaatacatgtcagctaacaaatggaactttctggaaattttcttcttgtcacttccaacactgaattgtgatatttggcctttaacaggacattcttgatcatggacaaaacaaattttccagataaactctcgctcttggatcctctaagctcttaaacttcctgagataacactttgcctggtcttacccaaagcagcaaacatgggacgttttgaaaagaaaatccatcacttcattgtctaattatgtataatatgtaaactgaaactggattaaaatttaacgtgcacctgaaaaaaaa

SEQ ID NO: 100354 - DNA, 458 bp, Homo Sapiens
cagctttcgtgctcatggtggcttggctttgactctccaaagagcaataaatgccacttggagctgtatctggccccaaagtttagggattgaaaacatgcttctttgaggaggaaacccctttaggttcagaagaatatggggtgctttgctcccttggacacagctggcttatcctatacagttgtcaatgcacacagaatacaacctcatgctccctgcagcaagacccctgaaagtgattcatgcttctggctggcattctgcatgtttagtgattgtcttgggaatgtttcactgctacccgcatccagcgactgcagcaccagaaaacgactaatgtaactatgcagagttgtttggacttcttcctgtgccaggtccaagtcgggggacctgaagaatcaatctgtgtgagtctgtttttcaaaatgaaataaaacccactattttttgac

SEQ ID NO: 100355 - DNA, 540 bp, Homo Sapiens
agccggttctctgtgtcgcccaaggaggtgctgcccttcgctttcccagactgcagcccaccccaggactccaacgagttggctcctgatggccttggactggtcccaattaagtcttcagaagttcaaatcaagcagagttattccttcttcaatctgcaggttcctcaactgtacaaaattaagagatatcagccattctctgtccacaagtcttcaacaagttacagacctcaaaagcttgcccgagccctaaagcaaggagctgaggatgaagtcaccaccatcacagcccttccgaaacaggactccacaactcagctctctggcaaaacatcaatcttgagcatgaaaccacctgaggccttagccatgtctctagattatgatcctctgtatgtttttgtaagtgacaactggcagaagccttgttttctgtgttcctttatttcagcaattactctataggaaacagagcactcattgggaatattttttctctttggaatttcaagtgttaaacaatatctgacctttaaa

SEQ ID NO: 100356 - DNA, 700 bp, Homo Sapiens
tgcggccgccgcgactcttgcctcccgggcgtcgttgctccacgggcctgcctccacccgcggggacaggtgccccggctggggtctgttgggaagatggcgaccccgggcatgagctggcagcagcactattacggcggctcggcggccaaattcgcgccctcgccggccaccgcacagctggctgggcacagcatggactacagccaggagatgcacctgaaaatgagcaagaaaatcgcccagctcaccaaggtaatatatgctttaaacactaaaaatgatgagcatgaatctgcaattcaagccctcaaagatgctcatgaagaagaaattcaacaaattcttgctgaaacaagagaaaaaatattgcagtataaaagcaaagtaacagaggagctagaccttagaagaaagattcaagttttagaatcatcattagaagatcacataaaaatgaagcagcaggctttgacagaatttgaagcttataagcacagagttgaggacatgcaactttgtgcagaagcccagcatgtccaacgcatagtgaccatgtctagagaagtcgaagagattagaaggaaatatgaagaaaaattacggagctgtggacaacttcaagtacagtttgaaaaagacaaacgattggcattggaagactttgcaagctgctcacagacaagagatacaagagcta

SEQ ID NO: 100357 - DNA, 531 bp, Homo Sapiens
tgcattgcttatatatgactttgtatggagctctctaaacttaaccccctttctttcactcattcaaacaactgcttttataattttggataacatgaattcttaaaaacatacttatgctatatcaaataagactgtcctatagggtcaccagtgtgtgtatccccgaagccaacagtactcctacctacatagttgcggctctagcaacagaagtcaggtgtcaggactgcaaaatgcacatgacagaaataaagacatgagtgactatgactgccaaaggaatctggattgtttccttcaccacagtgttcttccatagtgagaccctgaaaataataggctgggggagggtagaagataacaaacagatttgcaagtccttcacctataatgagaatggataattcaattatatgccagaagaaaaagcacaaccccgttcagtattaattgtgctggaacttccaccataagtctgggtccagtcaatggggtaatttccaatatcccaaaagaaataaaattgat

SEQ ID NO: 100358 - DNA, 578 bp, Homo Sapiens
  misc_feature (155)..(198): n is a, c, g, or t
  misc_feature (221)..(270): n is a, c, g, or t
  misc_feature (336)..(469): n is a, c, g, or t
taaaaactaatcttgacaatttgaagaatccacctaagtacaagtttgtaccacactggtgactagtgtttttccctagttaacaagtgaaagatcatgtatacccagcgggcctgggcccagccccaccatcccgagcgcacagcagcagtgtnnnnnnnnnnnnnnnnnnnnnnnnnnnnnnnnnnnnnnnnnnnnacttctgaagccttgagcaattnnnnnnnnnnnnnnnnnnnnnnnnnnnnnnnnnnnnnnnnnnnnnnnnnngattgtagtgttggttgatctgataaacacacaaaaggcttactctggctgggcgtggtgggtgannnnnnnnnnnnnnnnnnnnnnnnnnnnnnnnnnnnnnnnnnnnnnnnnnnnnnnnnnnnnnnnnnnnnnnnnnnnnnnnnnnnnnnnnnnnnnnnnnnnnnnnnnnnnnnnnnnnnnnnnnnnnnnnnnnnnngtgtacctgtagtcttagctacccaggaggccaagttggaggggaggtaagaggttgcagtgaacccaaacgacaccactgtactccagtgagacctgatctcaggcaa

SEQ ID NO: 100359 - DNA, 489 bp, Homo Sapiens
tttcagtttatacttggagtttaacaataatcataagcccaagatagcattttcagggatagaaatgttctttttaacaagaagcacaactaaacttttccacagatttaaaaattaaaagtaaatgaaactatattcacatttgttgttgattattttgtttgccagattcttgctcaaaacaatgtttgaccaaaaatggcattagggtcccaatggcgagacatctcctcagttactttgcagcaatcctcttgttcattggtgtgaatttctaccttattacccctttttctttctcaaaagagaaactctgaaacttgagattctcacaaacattaaagagttcatcttgtaaataatctgttctccccaatatactcattattccttggcttctaaaccaaagcctcttcccagtgctacgcagacttaggtcaatggttgaatctataaccgtgcccccaacccctgcaagtattgggttac

SEQ ID NO: 100360 - DNA, 501 bp, Homo Sapiens
  misc_feature (39)..(39): n is a, c, g, or t
  misc_feature (55)..(80): n is a, c, g, or t
  misc_feature (101)..(115): n is a, c, g, or t
agacactgcgatgaagttaacatattagctatactatanatagtgtttgtaactnnnnnnnnnnnnnnnnnnnnnnnnnnaatacatacatatattctgtnnnnnnnnnnnnnnnctttttaagatccttgggtatgtgtttgctttactccatttcagaagaaaattacttttcttctaacaaaattattttatagcttctccatttttaaaacttgtgagagcattgagaagagaactctgactgtgttaacagaagagagttgaattggagtctctgttgtgttaaaatgacctctcgttactccacagtagttatttgagccagtgactgagtcgcgttgaggaattctgaacccggacctctgacgttgttgggaggtggctgttacccacacccagacctcttgagtaaggacagaaacgttatcattggggatataatgagatttctttcttaacaattgaaagtaataaagagttaattttcaaaataaaaaa

SEQ ID NO: 100361 - DNA, 510 bp, Homo Sapiens
tttattttgcattcacgttaaaagaaagaaaaataaaattaaaactttttcattaatgtgaatctagaaataatttctgctatgagtagaatagcttttatttatgacttcacttgtggtattatctgctgaaagaaagaatgtagcagacaaatgcatatcactatgggaatgaattttaaggaataataataattcttgtctcgcatttctctactaaactataattatgagttaaagcaccaatttgatctatttggcatcttcataaccattttacctattacaagccccctttcaacaatggtatagccatcagtggacattcagtatctagtattcactagatactggtgtattaccccctatcattcatttactgcctttctcctggggctttcaaaagcagttaatcttcattccatccctgtgaacctcttgctagatggagaagctgtgcttgcacggattgaaccacagaattttaaaggcaaaaatatgttacccatt

SEQ ID NO: 100362 - DNA, 720 bp, Homo Sapiens
  misc_feature (429)..(461): n is a, c, g, or t
gatcaatgaccctcatccctgtctacaatgccctcctcatcggtcaatgcaaatcttttctgtcgttcaatcattcatgcattcaccgtgcatccattcagtctttctttctatgtaaatacttatttttacacttctcgaaggcaggtgcacctaactggatacatcgtaatctgcaactaatgggccctctctctgtggccccactcctccctcccatgtgtatgctttgagccgttccttagttgagtaggtgattgaccataccagcagcactggtgccaattaagcggtctgcttggttcacacagcctttcattcctgttctagcatggctctgtcttaaatctgcatgcatgtatttattccttaatatattacctctcttcctttcttactatttacatttcttcccattttttattgttnnnnnnnnnnnnnnnnnnnnnnnnnnnnnnnnntgcactttgtcttcggagctcattgccatggagtggcttggctgtacgcatcaaaaagccacccgcaaacgtccatccttggccgtgcggttccacgtctcactcattacttccttcctgcattcatagcatccttccttcctgcttgctctctttttattaggcatttattcctctattagtggagtcaggtgcccttatgacaagtcctagcctaactcttctcgtggatctacccatttatccatttggcggccgc

SEQ ID NO: 100363 - DNA, 548 bp, Homo Sapiens
tgaaacctatgagctccactgacctgccggtgcccgatgcgcgcgccgaaaccgctgcccgggcgcgccaactgcaactgacgaagccacccgggtcgctgggccgcctcgaagagctggcgtgttggttcgccgcccgcagcggcaatcccattcctgagatttcgcgcacggaagtcttcgtgtttgcggccgaccatggcgtcgcggcacagggcgtatccgctttcccaccttcagtgaccggccagatggtcgccaacttcgccgccggcggcgccgccatcaatgtgctcgcccgcctcgagagctgccccatgcaggtggtcgatgtcggtgtcgccggcgatgccgagccaccgcccgccgtgcgccgggaaaaagttcgggccggcacgcgggatctcctcgtcgaagccgccatgaccgaagacgagttgactgcagcactcggtgtcggagcgcgttgtgctcgcgaagccattcaacgcggtgcccaactgctcatcgccggagacatgggaatcgccaataccaccgcggccgca

SEQ ID NO: 100364 - DNA, 428 bp, Homo Sapiens
gactcgccggcatgtaatgggcgtgtgggtggccatccgctcgagcatccccggcggggtctccgactctttgaggcggtggctgaggggtttgtccagctgggcgatcatggccagggattggttcgaggcgttcggaagccgctctgtcagctgtagcaccagcacatgttcctccatgtgctccagcacagcgttcgcggtctctgtgtcctccagcagcgcccccacatcaaaaagattgtccagggacgccgggatctgcacctgccgcttgtcactctcggtgagccgaagcctctgtcccccagatggaaggagtggggtgaggcctggtgtgtgtgtgggggggagtctttccaaaccacccccctgccaccactgccatccagaggaaggggcctgagccctagcctactttttctcta

SEQ ID NO: 100365 - DNA, 439 bp, Homo Sapiens
ggcacgagggcctacacacatccttcgagatcatcaccaatgtccctgggctatcatggggatctgtgggggtctgacaatctcacaggaaaagtcctcagtactgtaaggctaccctcgaaaaagcgaccaaggaaggcacgtttttaaaactactctgaaattatagcaaatccaagctaccacgggttagataaattacccagaaagaagtaaaaatgctgacattggcaacttgccgtgtctctgtgctacttttctcttttcctccatatcagatgcctacaatctaagggaacagaatggtaaccacagggcctcaaggagctccgtctacaggaactgcggggggaacagcaaacatactgatgctgtacggaaaggcttcgagaagaccgtgaagccatcttcatctcacaataaatccaactgcttatcc

SEQ ID NO: 100366 - DNA, 470 bp, Homo Sapiens
agcatgttcatagtagcattattcacaataaccgaatggcagaaacagcccagatgtctatcaagtgatgagtggataaaccagttgtagcatatacatacagtgaaatattattcatccatgaaagtgaatgaggcactaaactctacaatgtgattgaacctcaaaaacattacgcaaagtgaaagaagccagacaaaaacagtcacatattgtacatttccatttataggaaatactcagaataggtaagtccacagagacaggacacagattggtgttctggggctgggttgaaggtaatacgggcagctactgattaacaggtacaagattactttggtggtgataaaaatgctttgggactagatagaaatcgtggttgcgtaacattgtgtctgaactaaatgccactgcattgttccctttaaatggctggctttatgtgaatttcaccccaatagaaaaaa

SEQ ID NO: 100367 - DNA, 440 bp, Homo Sapiens
tagttggtcattcccatcatctaaccagaaatgcatactgagacattaattacctattaaaaaatggaagcatcctctatatccaatggtatttcatgacactgaatacattttgatacaactctgtgttaaaatgagatgcatccattgataatcccatttccacagcagagttaaggatgtggaacatactgtactgagagtacaaagttgagttgagaaaggcaaggtatacaacagtttcagtgtggactgaattttaccaaaaatacataagagttttgcacaaaaaagcatggaaagaagtgttaacatttgttaacatggggtgctaagaatccagtcaattttgatttttttcttatactgtcttgtatttttgaaatgttctacaatgaacatgtattccttttataacttaaagctttaaataagaaaaa

SEQ ID NO: 100368 - DNA, 660 bp, Homo Sapiens
atgaagagcagcactttgagaaaccttgtaatttctcaccagaagggtatctggtcttccactcctagtaatgaacggaagctaaatcgagccttttggcaaaccagcatagtttacttggtattttctgttcaaggatctggacatttccagggattttctaggatgtcttctgagattggaagggaaaagagtcaggactggggctctgctggactaggaggagtatttaaggtggagtggatacgaaaagaaagccttccctttcaatttgcacaccatttactcaatccatggaatgacaacaagaaagtgcagataagcagggatgggcaggaactagaacctcaggttggtgaacagttgctccagttatgggaacgtcttcccttgggagaaaaaaacacaactgattgacactcagaactcttagctgtggaagaacatcatgcctatttataaccactgaatgcactgactttcaaaaactgaggtggggtgtgtgttacgaatgggctttttaacacttttagagtgttgctttagaactaccatcttcatatacaggagaaaggaagcatttaaatttttatagtgattatagagaatgattatatgatgtttgtaatgaataaaatagtagtttcattaaaagaaaaa

SEQ ID NO: 100369 - DNA, 457 bp, Homo Sapiens
ttgttttttttccttatatgtcaatggcccatgtcctccgggaaaattagaaaagcaaaatgattacaaagtgctgttagatttcttgtgctgggccagccaagtagaagtggacttgacttggacctttaactattttattacagattggacatttgctgttcagatgttttttaacagagggattatctcagaatcctgtgacctccaggttgttttataatctatttttctctatttaacattcctcagatagataggcaaataggacattccttctgtgtcacagaagtatcgtggtagtggcagtctacagtttatatgattcattgtaactatgagataaagaacaaccagtcatgtggccaaaaggattagatttgattggatgttcacttggagtttactttttgtacatacaagataaaataaatattggatttgtaaaataaaaaaa

SEQ ID NO: 100370 - DNA, 568 bp, Homo Sapiens
ggataaaggcaaatgatttgtgagtcttctagttactggaccgagttttctgctggatctggtgggaaggcagctcggtaaagtttccctcctgctccccccgcccgactttgactctgaatcagcatttggtcctattcagaggactcttaccacgacgtttctgttctacacttgggtggagaccagttgaccatagagcatttgcagagcctcattgtttgatttcttgtgactattctaagaatgaatgcaatcagattttaaaagtaactaaatatacttcagcacttttttgctttaaactagatcatcttagacttgtttataccttccagatttgattgttttactcccaatgactgcactatatgtatgcataagaccacttttgagcgctgtgttcccccttctgagtagtcctttgacgacgtgttgtgttttctgatgttgacttgagttccatttagtagcatctcttccttccatgtcttgatgttatgcaggaagtacagacgtactttaaatttttgttatgaaataaaaaaaagatgggttttgtaaaaat

SEQ ID NO: 100371 - DNA, 766 bp, Homo Sapiens
  misc_feature (626)..(626): n is a, c, g, or t
  misc_feature (652)..(652): n is a, c, g, or t
  misc_feature (694)..(694): n is a, c, g, or t
  misc_feature (710)..(710): n is a, c, g, or t
  misc_feature (722)..(723): n is a, c, g, or t
tgcggccgctctgcgagtctgtggccacatcctccaactcggtgacacagagctccaacagcatatctgccacctgtgggtaggcggtccccatgccggaaagcaccgcggagagcacatccctgcccctgtccccggcccggctgcacactgacagcttgagcaggtctaccaccacacgagtgtcatccgcaatcagcagactggtgaactcatccaaggcctgaggctccggacctgctgctttattttggctttcaacatcctctttggttttggtcatggtttctgcaatgatgcttgcggctcccaggtcatccgtcactgggataaaaggccgagcggaggctgagggggccgacggagtcactgcagagggggtcactgcgtcctcagaggaaacaatctctctcttttcttgccatggatttggactcagtctgtcttcgatatcaacagccagcatgcattcttctccattcatgggactagccatcgcagatgcgtcggaaggggccgccgaggagaacgaggggcactccaccggggcgatcatggcggccggcatcagggccccgacaacagcatctctggcatacatgatttgcaatgctgtaagaatatgncgataggcctgctgtttggccagatntccatccaaatgacagagaaatctgggcagagaagggcgatntggcttagaattactngcaccacttatnntattactggcagcagaagaatcagcatctggaagcacgcctaa

SEQ ID NO: 100372 - DNA, 603 bp, Homo Sapiens
tttgtctttaagaaataagttcttactaggcactcccaaaccttgctgttttcacccagcaggcaaaataggtataaacgtgtgcatatgtaaacatgcatattactttaaaacttactgatatcttatagctatttacagttgaagaaatgatgcctcatattcaacatctgaaaggagcacatagtaagaacttatttcttaaagacaaaaagaaaaagaattattggctggtgacagttcttcatgatagacaaattaatttaaatgagcttgccaagcagttaggtgttgggagtggaaatctgcgatttgctgatgaaacagccatgctagaaaaactaaaagttggtcaaggctgtgccacacccttggcacttttctgtgatggtggagatgtgaagtttgttctggattctgcttttctcgaaggtggacatgaaaaggtgtactttcatccaatgaccaatgctgcaaccatgggattgagccctgaagactttctcacatttgtgaagatgacaggacatgatcccataatactaaattttgataaaaacaactaattgggccaatgtttagaataaatttctttctgaaaaa

SEQ ID NO: 100373 - DNA, 545 bp, Homo Sapiens
gaaatgctcagagcgtcatggagaagccagcacaaccatgagccccagagggcctgctgaaggccagcccaggggataggaccagtcagacaaggtcctgctgttgaggagccccagtctagatcaaaaggaggtaaacagcctctgggacagtgaatggaaatgggagattgaatcagagccccagataaccagaggccaataccatcccatggtccacaagagtccctgggctgaatgtcaagggtgaatgaacacagggcaggcatgttcctggggatgctcctcaaaggaaacagaactgggagagtttgagaggagaggaggggcacctctaacccacattttcaggtctcctgggtccactgtgctgtgccctttgtcaccagggcagcaaagaccctggaggtctgctaacagccaggaatccactctgaggagggcaactccccaagcctgcaggctgggtagagctaattaaccacacaggaaccagaggcatgttgatttaaatctgtggaaagccatagctcctgtggtttcta

SEQ ID NO: 100374 - DNA, 553 bp, Homo Sapiens
tgcggccgccagggacgcggggggcggcggcgcgcgggggacccactccgtttttatttgacctcgggtgactgcctattgtcatggtttgcgatctcgcgtggggaccgcccagggcctcggggccctggatgtcccgggtggcgccgccgtaatctccgtgccctccgcgccgcccccaccccgcccccacccgggccgactcgagcggctgcagcctccaggctgaggggagggacccgcgaccgcgctctcctccctgggccggagagccactgtcgatccccacctgcttctgtggggcagcccccggaattgcctggaactctctcgctacccagttcccctgtgcaggccactgcgggccccctgccggactcctttccacttaccccaagggaggagacagaagggacttcgcctacttgcaacaacgtgaaataaaaaccaacccagaccagactggggcgctttttctgacgggaggaaatacccttttccgtggagatatatgttatgaaggactaagcggtctggggataggctgtgctgc

SEQ ID NO: 100375 - DNA, 623 bp, Homo Sapiens
tgcggccgccaggtcaccagataccgcaatggagacgcctataccaccacccaggtctaccacgaacgcgtcaacacgcacgtggcggaggctgagttcgactacgcgcgctgcggcgttcgcgacgtgtccaagacgctggtggggctggagggcgcgccggccacgcggctgcgcttcaccaagtgcttcagtttcgccagcgtggaggccgagaacgcgtacctgtgccagcgcgcgcgcttcttcgcagagaacgagggcctagacgactacatggaggcacgcgagggcatgcacctcaagaacgtggacttccgtgagttcatggtggccttcccggacccggcccggccgccctggtacgcctgctcgtcggccttctgggccgcggcgctgctcacgctgtcgtggccgctgcgagtgctggccgagtaccgcacggcctacgcgcactaccacgtggagaagctatttggcctggagggcccgggctcggccagcagcgcaggcggtggcctcagccccagcgatgagctgctgcccccgctcacccaccgcctgccgcgggtcaacacagtagacagcacggagctcgagtggcacatccgctccaacatcag

SEQ ID NO: 100376 - DNA, 601 bp, Homo Sapiens
tttaacaatgtactattgttgggagatttctaagagttggacctataaaggtgtcttctcctttagcatgtggcactactaaagacaatggtgagattattgtctggctttcctaaataatgaggactagattggcatgatttagaactgaggtttatttacatctggatgagccagaaatctgatatacagaatgaagtgctttgattaatttgtattgggaataatatcaagaaatgatgtagaaaaataatttattgttagaattcaaaacataaacatgcattttcctttggacaaaactgagctaactgaatggataaaatcatttaagatatctttacttaaggtattatttcataatatcatgtatgttttaaagaaacactgttagttgggaagtttatttttcattccttttatgttaaacttaggtccctctaactgtcagatagcttcacgtggatattggtacaaagagtttatactcatatggatttgactacacccactatatgtgttaacatatgtgtccttttaaaggattgactattttaaataacataaattctgaacaattttagagatactaagatcatca

SEQ ID NO: 100377 - DNA, 545 bp, Homo Sapiens
tgcggccgccaacttttttaacatataaactcaataccattaaatcaacaataattcattaatattaaatattcagtaagagacttcaaattctcaactgcttcaagaatggcataattttattttataatgtgtttgtttcactagggatacaaatgaagtccacatgtaattgattggtaagtcttttatgtattttatataggttcccccaccccttccttgcaatttgtttgttgaggaaaccaggttttgggtcctgtagaatttcccatagtctagatactcctcactgcccatctgtgatgtaatttatcatgtatttcctataaatcagtagacaaatccagacactgctggcttgttttaaaaccacatttgccacttactttattactatttccattatgtcatcttacaatttctcagaagtgttacatttgtctaaatatcaatgtctcaaatcttgcaacattcttttaaggtaagaaacatttcataggtttattccaaaagggctagccaccttaaatcaaatattagag

SEQ ID NO: 100378 - DNA, 797 bp, Homo Sapiens
tttttttagcttctgcaactcctaggtaagaagtttctactattttcctaataactaacttctctggtctttataggggtcttatcatatatgatgtaaggccagggtcaaagggatacttttgcagaaatgtgaggccctaacagcagggaaggattttgtgtggttggggaggttggcaagggaattctgccagcaactgacaaggaataggatccttctagtagcaaccagcatttcagtttaaattagtgagcaaaatccctttctagtgggcatgcaaagagacacagttataaggtctgctggaagcaggaggcacatatcaccttccagcctgcctccttccacttagtgcacgaaaatgacaagtatctgaatgtagtcaagttttcattttagggacctgcccaggacagcttatcaaatgcccatggaaaaaaaatggaaacaatatggcccaaggctgtggctacctgatgagttagacttcaggattcactggtcatcagcttctaatggctctgcagtagacttctcacattagatgtgtgacttgtggagctggcatgccagataaattagctagtcatttcctcccaggcttggcattcttggatcttattagtattcctaatgagttttagaggctgtatccaaacagcaaactgtaccattagatcagatgaggacctaagaacagcatctttaataaaaagcataaccatagtgggcacgactgcagcctaggcagctattagggttatggcttcacagtttctcaaacaatggctcca

SEQ ID NO: 100379 - DNA, 207 bp, Homo Sapiens
atatcacttgagtccactagtagtacttccttgctctgtttgacttgtcagatacaaagacacgggattagattttgggtggtaaaattgtgatacgcatggctgttgatggagtggaacatcttagtgatgtgagaaaggtcattttagttataaatgtaaaccaattactttagcacaacaataaagatgttctggaaattaaaa

SEQ ID NO: 100380 - DNA, 483 bp, Homo Sapiens
cgctgctatttggggcactaaaaggaagccggccagaggtggcgggttcatgcgtcccccgagacccaggccgcgtcgggggccaagagcccttacagccttctcccgcgccgtcgggaggtcctcccggaactgggccggagcgcagagaacgcagtgtgagaagggcccatgggttttaggtcacctccttcgcgctggacgcgggcagagcggtgtccctttgtctctgccaagagacgtggagggagggagaagggaggatggcttgtgctgaaagaaacaagaatgaagtcgggcagccgggatctgagaaatgggaaatccatggcccttgttcgggaccacaggctttgccgacgtggtctctcctagttccgaaattgcccaggcccgcctccccactctctgcaagcagcgggaacgacttccacatcgcttaatttctttattaaacttttcacctattctcttctaaaaaaa

SEQ ID NO: 100381 - DNA, 581 bp, Homo Sapiens
attggtaaactataaattggctgtatttccttgccggttttaattttaaggaagcatttacatgaaaagaaaaaaggatcctagtagtctgaatttcctctcaagtatgctagaaaatactttctatgaatttacaattaactgcaataagaagtgggttagcattcaagtaaggtcaataccccaaatgagaaactcttcagttagaacacattagtggttgtaacacagaggcagtagataaatatttgaaatgtgagcatttctaaacttggtaccaaatggaaagggtttcatgaggtgacagtggcttttaaacattcatttgaccgattattctaattttccttgttaaatcattgcaacagttgcatgggggagaatggatattttttgaagaattgcttattccactttcaatttttaaaaatcgaggggattaaaatattactttttaaatatgcataaaagtatcttaactgtaattacattttcagttgctttgttatagtagcatgcatattaaatataaaatgcatttatgaaaatttttgtaaaaaataaaagatttttcatttctc

SEQ ID NO: 100382 - DNA, 383 bp, Homo Sapiens
agaaaatcaagttgtcacccagggtgcagtgataaagccacagcctcatttctctgttggtgccctataatagcaaatgccagacagctggatggatgggaggctttggattaaggccttgatgcactctggccagagaattagtagttgctgtttccgtgtgcatatcctgttcaaaacaaacatctggagagaggcaagtttcctgggacagaaatgtcctttgcttcttctagaatcaaagaaaacagccaaaggagagtggtatttcctttctcataagattccaactctaaatttgctatgaactttatcaaggacctagagctatgtgaagtttaagaagttggcaaaaagtccaggaccaagacaaatcttgggga

SEQ ID NO: 100383 - DNA, 444 bp, Homo Sapiens
tttgtcttaatgggtgttgacaggttttaaaatgtttcctgcttatttctacttgcaattttctgatctctgtaatttaaactaattgcatctactttgttatttattccattttttgtactcatttaatagaaaaaataataatttctccaacatcagtcttttgtgtttgccgaaacccaccctggcctcacatgttcaagttaagccctgcccccaccttcctcacactcccatagggtcacagaccatgcactgatttacctgcctttaggagcccccaaactccttccttttgagatttttctttgtaatgaatgtcctcgccatgatcacaacccaaataaaaactcttcagtcgtctgctgtattttgtctttaacagtgaccagaattcaattcgaattttgggttcacatttagtcttataatttaagaaagaat

SEQ ID NO: 100384 - DNA, 948 bp, Homo Sapiens
ctgtctccatggatctgcctatatggactgatcatttcttggtatcctaaattgtttttgcagcctgtttttcttaacctactcctgcactcctgtttttacccaaagcattgcagaacaaagctggcattgggatgcagttgacaagatttactgaacgcttgatgccacctactataagggcatctcaatgtagaaaaggaaaacgtgaaagctaatgtcagaagtccctgcttggagtttctcggtcctccctccttgggcccttcctgctgctgtgtgactgggccctctgtaaatcagaacagattcttttttcataattactcttactctagactcaaggacccagttcttcatcttctcaagaagaaaccagaaaggctaaacagtgttctctaaaactaaagaacagacactctccaacataattctttgtcacttcccagaatgtggaaaagtcattgttattaaaacatcaccccttttccgtcccactatgcaaaactcatatgctgagtggagacttaccctggaaaatgttacaaccaatgcaaagttggttgtctgcccatttgtcaccgcccccaaccctccacccaccaattcttccttgcactcagaactccagatttattcaggtacaagcagcaatgggaagcggaagggaaggaacatggacaacatccgtatcacttgtttaaaactgctcgttgatgaaaagttttggaaataagtagtagtgatggttgtacagcattgtagatgtaattactgccactgaattgtacacttaaaaatggttaaaatgacaaaatttgtgttacatatattttaccacagttaaaaatattaataatgtaatactaaaatctgttgacttgtacactttaaatggatgaattgtatggtatgggatttatatcttaataaagccacttaaaaaaa

SEQ ID NO: 100385 - DNA, 592 bp, Homo Sapiens
gggccccagctgcctttagggcccccattgttcataacagcatatgcatttccccaccgcgttgtgtctgcagcttctttgccaatatagtaatgcttttagtagagtactagatagtatcagttttggattcttattgttatcacctatgtacaatggaaagggattttaagcacaaacctgctgctcatctaacgttggtacataatctcaaatcaaaagttatctgtgactattatatagggatcacaaaagtgtcacatattagaatgctgacctttcatatggattattgtgagtcatcagagtttattataacttattgttcatattcatttctaagttaatttaagtaatcatttattaagacagaattttgtataaactatttattgtgctctctgtggaactgaagtttgatttatttttgtactacacggcatgggtttgttgacactttaattttgctataaatgtgtggaatcacaagttgctgtgatacttcatttttaaattgtgaactttgtacaaattttgtcatgctggatgttaacacatcttactctaaataaacaaggtgttgccacaaaaa

SEQ ID NO: 100386 - DNA, 446 bp, Homo Sapiens
cagtagaatatgagaaaaagatttaagcactttacagaaaaggaaacacaaatgtaaacatatggaaatgaggtttaatctcattcatcattagtgatatgtgaattaaaatcataggtatatttcatacctaaccagattggtaaaaattaaaaattttgcaaataagagttggttggaaagtttatcaccgactcttaagcactcctagggtaatgtaaatgagtataatcactttggaaaacagtttggcattatctagtaaatttgataggatgacttaacttttgacccagcaattccatttctaatgatatacttgatagaaatgtgtgcccaggtacacccagaaatatatgcaagaatgttcatagcagtgttattcgagatattcaaacatcagagacaaccataataaattgtggtatattcatacaatggaatac

SEQ ID NO: 100387 - DNA, 537 bp, Homo Sapiens
cattttggttttgttttattttgcatttcatatattatccagtttcacattctcacaggatcagcaatgacaacagccgcctcatctcccaagtctgaaatggccagacggtcacagctgcggctgacagtaaagcactgatatgctcaaaacaaaaaacattgcacagtgtttccttcatttcattttcttaaacaaatgccagacacaaaggcgtactgctgaagaatggaaacccttttcttcttcatgcctcaaactaaacattaaacttatctgacagggcgaacgaggtcgctttaataattaatggtacgcacatgaaaaatcctttatgatgcataaatattttgttacacagggtacaaaaatacttctcacgttttggttggtttcgaggtttggaaagaatgaggagcagcggcgggcggggtgcgctgtggagaggtgaacagaacgggcagagagggctttcttacgactgttggcccatccgagaaggcaggagcggaggagccccatgtgaaatgaaaaagc

SEQ ID NO: 100388 - DNA, 465 bp, Homo Sapiens
  misc_feature (198)..(213): n is a, c, g, or t
tttactgtccagtgcaggaaaagtctcacaaaatttcacagacctaaaatgtgcaagctagttctctttctatacagcaatattgggattcttttgaaattagcccagaaatgaattatttacacacatgaaagatgcatgcttggggttcttttatgtaagaaagagcagaaaaacttctaataaaaatagattaannnnnnnnnnnnnnnnttatactgggtaaggaaaacaaaagtttagtctctcctagtcacaaactcattctctctacccacaacattggattttagacagcacacatcaccatcacggctctaatgagaagctaattatagggcttgatcattaggtggcatgcccctcctccctaccctccccccaggtgcagccacgatcagctcacgtggctccatgattggtcgcaggcaaggttcctagattctttagttttagaaaacccca

SEQ ID NO: 100389 - DNA, 443 bp, Homo Sapiens
gcagtgaggtagcaaatattatgcctgtttattttcatctccatttcaggcttgcgcgcctttcccccctcgggacttcccgaggacacccctgcagcagtgagcccgagtcctggctttggctgcatgttaaaaaatattaatcaaaatgaatgcgtgccctttaagagaaaaaaactgtgggtccttcagcctttaaaaaccatgccgtggtttaaaaacttaaaactatatttcggcagaacgctgagcatttcttcaaatcactctgagaagcttgagtgtctttaatttcaccggtctgtcaaacgtaacgcgtctctccctcaccccacattttaagtttccaaggagcggaagaagggcctccgggggtcccggccgccgcaggctgctgggggtgaggacacaactcggcctccgtccgactcgagggtgtcgcg

SEQ ID NO: 100390 - DNA, 368 bp, Homo Sapiens
gtgtaagccaccatgcccaatctgtttcacaattttaaattttatttgcaagctaagccctgatcagcctcccctgtcccacatcatttgctatgactttttggtgcctttccaaaaccctgcatcctccacagccaggctctcctgcccttgaactgcggccaggttcagagtctctacgaggcatggaatgggagcagaggaggacagggccaattcttcttggggatggggacttgagtcagtcaagacttcatggatgagctgagcctgaggtgaggtgctggcttggctggcaaaacagggcatgcgtattggaggagggtcataagcaggcatggtggcataaaaccgctttgaaggtcctg

SEQ ID NO: 100391 - DNA, 483 bp, Homo Sapiens
  misc_feature (11)..(11): n is a, c, g, or t
ttggttggccntcatcatctctcacctggcccacagcagccatccgtttctaggcacacactactaagtccaactcactcataatcaccaaagggattccagcatgattctggtgtcatttttctggctttattttctagtacttcaccacatattcaatatgtactggacttaatgaactacttattgtccctataatgggccatgttctttcactttattcttttaaacatgtttgttccttttcatttgcctctggaaaacacctacttatccttcaatgctcagctcaaagatcctctcaagacagtatccggctctgctcctttcatctgaaatgactcacatagttttcgcccgtgaaatccataaagtaaatcagccacaaggtggcggcataatgccaggtaattaacggttcgaagcatgacacctgtggtttcagtttataacctagcattgatctgaaattccatcttaaaa

SEQ ID NO: 100392 - DNA, 560 bp, Homo Sapiens
atgggtgagtgtgtttctcacaaatgcaccactgcacccctgcctaggtgacagagacagactgtgtctcaaaaaaatgaaaatatcagggaactcaatgcaaaagactgcggcgctttagacttgagagtaacctgcccatgacccttggggctccgtgaggaagacaaaagacccccaaaaggagggtgtatggcacctttttctggtttctcaaggggtctcaggactgctagaagttccctctcgatttcttcgtgtgttattgaaggtggcagaaaggaagaagggccaacagtaaatgggaaaacaattcttagagggctcaatttgggaagattttaaacttcccaaaaaggccaaggatgttttacatttttctcagtaaaaatcatgccgacaacaacaacaacaaaaaagtgaacagatggaaggaacataaaattgctttttaacaaaatttcagttgactgaaaagaattcccagggtaggaacaggatccaaagagaaaaagcattgctctatatatctgccagggaaaaatcccccaaaaactaaa

SEQ ID NO: 100393 - DNA, 578 bp, Homo Sapiens
gcatgaaggtgtctttgacaggtccagttcatctcggcaaagagcattcaggcccacccacgtccagcacccttggagggctcctggccaggagaagcgtcctcaggccagccacggccagcaagagccttcagaggccagcctggggtccggaattggacctgggcaattgcaaactgatcgtagaaggcggagttgtccacgcccagctccaagtcgatgtcctggagctcttcacagctgtggggtacggtgcccttctcggtgatggtgtcgcaccacatggtgaagcccacgctcacgatggtgctggcaatgaagaccaggaagaccacgaaggcgctgaccaggaggttcaggaaggcggagaagaaggagccctcgtgtcccttgcataggaagaagagcgtgcgccaggcgtgcgcggcggccagcagcagagacaggaggctggcgagcaggctgaagcggcaggcggccggcgggccccactcctgcaccgtgaagcgctcgcgctcctgcaccgtgaggttggcgctcagccacatgccctcggtgaagagcaggcagcggccgca

SEQ ID NO: 100394 - DNA, 352 bp, Homo Sapiens
ctctggcctttatgaaaataaaaatatcaaggattaaatcaaatctctagccccctaacactgtggttaacgagtctatgaatatcaatttttatattcgcatgcacaagcacccccaacaacacataagttattcccttccccccagaatgttcacattcctcagtgccatttctgtattatttcaaacattccttgtttctattttgattcttgataagcagaaagaagagattcagaggctttttccttgttagcttcacagcagggattttttataaatatggaaactacagcagagttcgattgtgtgtgtgaactgaaaaccagcagcccctttaaagcctaattt

SEQ ID NO: 100395 - DNA, 546 bp, Homo Sapiens
aatacaaagcagtaagaaccagcatctacaccaaacatctggaaaggtggttgaaatactttccaattgagcaatttcatgtcgtcgatggagatcgcctcatcacggaacctctgccagaacttcagctcgtggagaagttcctaaatctgcctccaaggataagtcaatacaatttatacttcaatgctaccagagggttttactgcttgcggtttaatattatctttaataagtgcctggcgggcagcaaggggcgcattcatccagaggtggacccctctgtcattactaaattgcgcaaattctttcatccttttaatcaaaaattttaccagatcactgggaggacattgaactggccctaaaataatatgtcatacaacactatgtgttgtgcctggagacacacaatgtctcctgtagattaaaatatgcacttttcctaggcagagctatccaagtcatttttccatgtatatttgtacatacgcagtgtgtgaccaaatataagatcagttctttttctactgaaaatttacgaaa

SEQ ID NO: 100396 - DNA, 352 bp, Homo Sapiens
tttaaccatgggaggacaaaagatttaattccttcactatcttttcgttggagaaactgaaaattattgccatattatgggatgcactccctcagcaggaatccacgttcactaatctgcattgttttaaggagcaaatacttgtcaattcttcagtgaaaaaacttttgtcttgtttaagtctaaagttacttccatattcctcagctgaatttggtataatttcaatagaagaatgaatgaaaatgaaagctttgtcctgtggtccatgaggacctggaccagattagtagagaaaacataagtatgtgtgctaatacttggtggcctagagtccccaaaataaacaata

SEQ ID NO: 100397 - DNA, 487 bp, Homo Sapiens
  misc_feature (420)..(420): n is a, c, g, or t
tttaatctcgtttgtcccattccgactgctcctcctgatctctattataaaaaaccgaggttgccaagttcaatagggtgtcttaagttttgctccaggcctaaggtggacttttgaagtttgttttctaatgtctgcagctgaccgagtgataaacttaatctttaagattagttggccttcaatagagtcaggtgacagggaggtatgcttcctcagtgcctcccttagtctctccagaaaggcagtaggattttcttcctttccctgtgttacagtggacatcactgaaaaattcacagccttcttcctggttttccttagtccttccagcacgcaagttagtagaattgggttcgttggccaaggcaccaatctccatgttctgattctgtgtctcaatgagggtctgcactgggnaactgcctgctggcctgtagggaatcgttctctttcctctgttgtcatcctatcattgacctgactg

SEQ ID NO: 100398 - DNA, 400 bp, Homo Sapiens
  misc_feature (184)..(193): n is a, c, g, or t
tacctagttgaccagggtcagctaggtagcaataataaagtaaagtaccagaatcaggaagaggaaagacatgaggtcctgaacaggtataatactgtttactggacaggatcactggaagacttcaggtgtattaatgcatactgatactaccaggaacttactagctacacactctagtcannnnnnnnnnaattcagtaatcctgaattctcacaactattagctgaaccatctgaaagttcaaacatatcctagagataatactgaagaaatgaacagggccctattttccattttcaatcaattggtatacaagcctttacagacagataaatgcaagtcctttaaacaattcagaacgtcttactagtctgtcgacatatggtgtcagagaacc

SEQ ID NO: 100399 - DNA, 583 bp, Homo Sapiens
ctgtcactttgtagagaaacgaatagactggacactgtgtggtcactgtttagatttgcccatgggtctgtttaaatctatgtcatggatcctgagacacaaatataattaagacaggtctagagacaggagaagcagaaataagttgacccaggagtacagtctcaagtagttcattaatgagaaaattgacatctgacaagagtctttttactttatgctggatgaaaatccaaatcttgttttattttttccactaaaagtgactaaaataataacgaatttcatttgttcttgggttcttttttcctttaatgattgtgctataacttaaaataatgatgttacctttgaacaaacttaaagaaatatttttaaagcgtatctgaaaacgattgatgtttataactctcttttggcttcaaaataagattgtgttatcaccattttggtagatgaggttgtctggtgaaaatgatgcatatgagttgtactgttcagtgtacatcctgcagtagtggatgattgaaaacatatataagtggagtataaattaaaaattaatttggtttcttctaaaaaa

SEQ ID NO: 100400 - DNA, 331 bp, Homo Sapiens
ctgtccatataaagtaacactcttgaactcactatccagacttgaggttttgttaagttactgttaaaattttgtcaattttgctcttgagttttcaaaataaacaggtcattacagataaagttgaagttccctttgtcccttccccagtaccgttcccctccctttcagaagcaccaccatcatatattttttctatttttatcatagatatatatccatggataacattataaggcttcagtgcattttaaaaagaggtccaatggttatgatataatttataactttagttttccatcgcacatttttaaaaaagttggcggccgca

SEQ ID NO: 100401 - DNA, 549 bp, Homo Sapiens
tgcggccgcacctgcccatccaacagccttttatccaacttggctgggtgctattattcagctctgagccatcaccaggagctgcaaagcagttaattacagaagtataatccccttcttcacaagaagctgatcttctagggttgcgagaagataagatttatgcctctttcaattcctttattctctcatcaacatagattcatatttcagtttcctgcattggaaacaaaaaggaaactcgctcggcccactgctgcctgagagagataaattaggctacacaaagaaccagtcctataaactcaatctcttccccttcctttcatgtttgtgattataaacagagtcaagggcagttgaaatacaaccctctgcctgcctgcctgtcttgtcctaatcaaagagaggagacaaatgcagtgatagcaatccatgtggtgccaggaaagagggacataggccccccacgatcccatgccagcctggtgagcagatcagatagaaagacctttgtctccaaccattctctggtcacaaaattgtttc

SEQ ID NO: 100402 - DNA, 936 bp, Homo Sapiens
aggattcctgagtctgcagtgcatggctgaatgtgagcagcacctaggctgagtctgcccctccctctggtctccttccaacccctcaagggactgatggaaaactgagtgggtcctgcctcttcccctgcctgggggtacctctgcagcatcattgtcagtggtgaccaccaaaattatccagttccagcatggtcaagaagctgaatgttctcctgcagcccccagggtaccacgcacggggctgggcacactgcaggctcccaacatatggagaaggcagggaagccatcctctcccaggaaggacagagtgtccctccgtccagccactctgcctgcctcctccagcaggacatcatagaaatcacagcatcttgggacagacagacaaacgcctgatctctatggctgggttgtggagaggacagtgagaagagactacaaggagtaaaacagtagcagagacaaggagggggctcccctgcaacccctgagctctggcccacacctccttttctcccacgcgttccctccagggcatctcagatccattcaactgtgtgggttgaatggcagccctcaaaatatacgtcctcgcgctaatccccagcccctatgaatgggacctaaaagggtctttgcagatgtgattaaattaaagaacttgagatgagatcatcctggattacccgggtgggccttaaatccaatgacaagtatccttatgaagtgacacaaaagagagagacagaggagaggtgaggggagacggaggccaggatgggagtgacgctgccacagctgagcatcatctgagacaacaggagctggaagaggcaaagagggactctcctctagagtatctggagggagtgtggccctgataccttgatcctggtctccagaactgtgaaaataaatgcccactgtctta

SEQ ID NO: 100403 - DNA, 314 bp, Homo Sapiens
gtgggcttagtgtcgaccacgccatgtcaccattgccaggcgggctggtctgcgtgccagcaggcacaagcgccggtcactgctggtcagcccagcccgaccacagcagggagtgaagcaggccaaacctgaccccacgcatagccgaggtacgccgtggacgctcgtttcgtctggaccagcttcctgagctttcgtgattgtagctatcaccaaagccctatccagtgttgtgccgaggtgaggcaccctccttcctgctggagcgccatccggtgccctggcctgtgatccatgggtacccatgagccctg

SEQ ID NO: 100404 - DNA, 735 bp, Homo Sapiens
agaaaaacatttttctgaagcttatactttcacatttcctagagagcatatttgtgtggatgggggtgggtaaacactcaacaaaagtttctttaaaaagaagaaaccatcctggtttgatgtaatcaatggttgcccactgctcccttcctgtgcctgtgacccttcccaaactgccctgttgcttgcaggctcgcctgagctgaaaggcagccctcacatcccgtcggcacctccctggggccttctttacaccctggagaacttcacagggaatctgtgtctgtaacacaaaggcttcctggtccagatgtagatactaaggctgactggttatttaagtcctgcggacttactctgccaaaattatttaatcatgtaaaaataatttataattcttataaagtatccccttcataatataatgaatgttggtgctattacatttaagtgcacatgtacagtatacaagattattaataataatgttttcaaatagttattgtcaaagctatttttcttatgtttatgaaagtgcttataaaattcatgttttatgaggctggagatgtatattttgtaatttcattctgatatttgttaatattcgcttccaatgctggttttgtttgatgagactgacattgcctaatttcaagctttttgaatgtgtattctttcagggcaagtatgaaataactagtaaaaaatatacaaatatgcttaacaataaaa

SEQ ID NO: 100405 - DNA, 531 bp, Homo Sapiens
ctgactgaaatcaggcttggatttgtgaatcactgttttttccccctgtggtcactcctgtgatgaggtcaactgcttcaatcctttaggttttgtagacaggtttccggattccaggagtcccagaaggtccagggagcgctccccacattttagccagaagtaattaactaaaacataaaggccccactttctcttttcacactttgagccacagatcatctaattcctagcttgagacatcagatttcagatcattagtgcaaagcatcttccacaggaggcaataaaatgtcactttatgtaactcagctacagttacactgccttcagaaagcaggaatctccctgaaaacaaatttacatgaaaacagtcccattgtttgagaatttatgcaaatgttgcacaaaggggtttgatagtgattttaaaaacttaaatctttatcactgcctcaaagatatcctgagaaacttggttacctctaaagaattccattgcacttattttttaaaatgcctataatatag

SEQ ID NO: 100406 - DNA, 581 bp, Homo Sapiens
  misc_feature (61)..(103): n is a, c, g, or t
  misc_feature (257)..(292): n is a, c, g, or t
aattgtaaaaaggctttctctatatgtaaattatgctgttatctttttctatacacaaagnnnnnnnnnnnnnnnnnnnnnnnnnnnnnnnnnnnnnnnnnnnagactaattcttgtacagaccaacgcggaccgatggtccatattcttttctccatgtttgtttgtgtcgactgttgcagagtgagttgatgtaagaaggtggtttcatgttttcttttggggggccacttctttcttttcctttccgtttctannnnnnnnnnnnnnnnnnnnnnnnnnnnnnnnnnnnacttgttgccaatgtcttgttgctgagaaggaacactctattcagatgccatccaggaaagaaaggccagatggatggagggtccactgtgtatatttgtacagaatcatttataaagttttctacacttctaaaaaaagtatttctaacttgggctgttggacagtttgtgtgcctctgagccggcaagcctgttgtttcttgtgtttagtgcaatgtttagtgagaaaccaatgtctgaattatttatgccaataaaaaatttgagaattactgcaaaaaataaaaa

SEQ ID NO: 100407 - DNA, 702 bp, Homo Sapiens
  misc_feature (484)..(484): n is a, c, g, or t
tgcggccgctccgaggccggggcagtctgacttccagtgcctcatttgttggcagttagggcacgggcgtgttggcggcttggggtttgggcactgttttgcccaatgacctggattgccacacttgaaacagttgcaaggcgggcaggacggttgctgttggctagggcaccggctggcccagtgtcctgagttgccgcacttgaagcaggtgccagacggggcctgggagattgtacctccacctctcctgctggggctcttagggaatgcctgttgcagggcagctgccagggcttgggtttggagctgaactttttgtttcagtcttgcctgtcgttgtacctcagccgcctcctctcgggaattaaaaactttgaacgccaactttactaagtcctggataggggtttgggggccctccgctgcctcatccaggattagcggatatcactgcccgcagcgaatgtgttaggagttgtanatgtagtgaactggtttgcactacagggaggtggaaataagatgggggtaatacgtatccctaggagtctggttggctgggttaaagaaccaaatggtactctcaggagttacaatggcagcaatatgggggcatagtacttaaaggtcctttgtccatatcgttcgccgagaggccatattcactttgtgagtggatgaatttcgtatcgtgtatcg

SEQ ID NO: 100408 - DNA, 462 bp, Homo Sapiens
actgatcctgagctccccaggcaagcagcatgtgggtaaggacggttctccgtgttgtggtcaccacggggtaaagagcgcctccaaaatgattatagaactggaactgcagtacagtgggagtatttgtccattttgtaaaggacaaagcattcctctaaaaaaaagtgagcacaataaaatccccacgcaaatgcgagtgtttaggtcaaattgtgacctcctgggtattatttaggcgtttacatatacattatattattacttccaaggaattccaaatgtacttaaaaaaataaagttcaaattaaatgaatatatatgtatgtacacacacatatatacacacatattcatgtaatcattccctatgagtttatcatagttgtgttaataataaattcttagttaaaattcacccccacataccttaccttacattaagaagaaagaaatctgaaa

SEQ ID NO: 100409 - DNA, 506 bp, Homo Sapiens
caaaacaaatatctttccgcttctacacatacgcccctatcgtactagtctcttcttccctagtgtcaggaatcatgagtaattggcttacaatacaaaggaaaaaagaaaaccttgggggatactcttattactagaactgtttaaatggatttataggggacgtttaatgagagcagaaattgaaattgcacttgactgcatttcagggcagcagatttttatttagcagccagaaggggtgcaagatatgttaaagaataacgaaaaaatgtaaacctgcccgtagggagcttaaaatctgattaacttagccacgctaatgatagagcaagaaaagctggctgagcaaagaacactgttcagatgccaccgggaaaaatataacagactatcgaaaagtctacatttgttacagctaaaaggtaaatgtttaaattaaaacaattatttcattataaatgcaatgtatggccattgaagaaaaaaatgataaaattagcaaa

SEQ ID NO: 100410 - DNA, 379 bp, Homo Sapiens
  misc_feature (231)..(286): n is a, c, g, or t
  misc_feature (298)..(298): n is a, c, g, or t
agggtaatactggcctcattgaatgagttggggactatttcctcctcttctgttttctggaagagactgtgtagaataagtactaatttttatttaaatatttaaatatttggtagacttctccagtgaagccatctgggcctggaaacttccatttggaagctttttgatcatggcttcaatgtctgtaatagttatgtaactattcagattatctatttaatatcattnnnnnnnnnnnnnnnnnnnnnnnnnnnnnnnnnnnnnnnnnnnnnnnnnnnnnnnnaatccaaaactntctgagtgccaacataatgccacaagcaaaatttcacacctgattgtgtgacaggtcacagtcaaaatgcagtgaaaactt

SEQ ID NO: 100411 - DNA, 421 bp, Homo Sapiens
tttaaatcaggctttcacaaacagatcttgtgcatcagtctcctgggtggaggcaggtagaaggggctgacttgttctcagaaatggaagggacattctcaagaatagcccagacccgcccactttgaataaacccagctaagtcctcacctaagcaccaagacataaaacaaaacaacaacccggatagcgtgcttgcctctccaaagtgcagtcttttattttctcagttgcatcctaaccttgatttcaaccagaaacgggcccctgttcatacggataggggttctggactgttgactctagccctggtcttaattcactggcaatttcatagcctcactggttacccttgagcttcactttcctatttgcaaagagttatttataatttttttgagatggagtcttgctctgtcac

SEQ ID NO: 100412 - DNA, 450 bp, Homo Sapiens
  misc_feature (119)..(140): n is a, c, g, or t
  misc_feature (295)..(401): n is a, c, g, or t
gatgtccttgataaagctgtctttaacattaagaaggactatcattttatgcagttgcccactgctttttggttgttttcagaaaagcaaaggagaaataatgacttattttgcaaacnnnnnnnnnnnnnnnnnnnnnnagagacaaagtgttgctctgtagcccaggctggaatccagcagtacagtcatagctcactgagccttgacctcctgggctccaagcatggttgaggaatagctgggaccacaggcacacaccaccatgcccggctaattttaagatattttaaannnnnnnnnnnnnnnnnnnnnnnnnnnnnnnnnnnnnnnnnnnnnnnnnnnnnnnnnnnnnnnnnnnnnnnnnnnnnnnnnnnnnnnnnnnnnnnnnnnnnnnnnnnatgagccactacacctggcccacttgctcacttctaaaataaggtttta

SEQ ID NO: 100413 - DNA, 169 bp, Homo Sapiens
ttctctacagaggtaaatttagagcttgaagaattcagaacaaggtcagcaaacattctagaaagggccagatagtaaacattttaggttttgccagtgaaagcaactatagacaatatgtaaacaaattagcatgactttattacaaaaaaattgtattttaaggcaa

SEQ ID NO: 100414 - DNA, 741 bp, Homo Sapiens
aaggcaggttttatcgtgaggtttgaggccaaggaaagagggttagaggaaggaggagttcttctgtggcccttgggtggaggtagttgccgggagcagggtcacctctctggtaaaggaggtgaacagagtgaccacttgcttgtaattttaattgcagataagtttttggatgtgcttccagcattttgtccgttggcagtaaatcagatgttgaaggcaacctcgctcatcaacatccatcacatagaacgctggccaaatactgggagccctccccattttccataagctgatgtatttcacccttagtcatttaaactaaacacagatgtttttataggcctgattgacgcttcagccattgtgattttgctctaggttccaacgaaattctataaacctgtcagattaagtttcttaactctgaaagaatattgcatgttcccgctcccccttttctgttttctttccccgccaactttttccccattactccctgccttcctccctctttctttcagctgtaacagctggaaaccagtaacttgagcttccaatagaatacatttactttctattaaatgttctcaccacaaagaactgataaaaatttgagataatgggtacgctaattactctgatttgatcattccacatgtatatgtgtatcaaaatatcactttgtacctcataaatatgtacagttgtcaattaaaaataaaataaaactgaaaaata

SEQ ID NO: 100415 - DNA, 580 bp, Homo Sapiens
cctgccccctccctccgctcctcaacgcccgccgggtgcaatctgctctctccgggagacgaacgcgaagcgacgtggaaacccttccaccaaaatgagctgtgatatccttttgatggctataatttattccaaatcgtccctggactgaaacgatcaattagcagcccgaaacgcactgtgaagtaaattgtcacactctctattacaggatggttatcatatatttataaggtgtgttttctgcaatcagaaccaacaaggtgttgagcgatcagtcataaacgcacttcttcaaaaagagagggagagaagctcagcattgtgtggcgggggaataatcctcatgacagttctctccccacccagtgatgttttgtcttggcacctgggaagtgcagtgagggctggagctctggacggactctcttcgccacgcgtgcccctggaagcagggtccctgtgaactacggagagaccccagaggagagatttccttattgtgtaaacacaaatcagtcagttacacctgccatctagcaaaacagacctcacccaaggtcaatgatggctgctaacc

SEQ ID NO: 100416 - DNA, 493 bp, Homo Sapiens
gttgctaatgtgcagaggattgacctgtgcatgcttttgatctctcattcaaaggatcaatattaaataaaattgtcatgagctgtgttgaagacagggtgctttcaaatagaggtaatttgctcttgtgttgtaagaggaacatgtcaacaaagatagggaatgagggtgatcgtgcagatggcttgtatcttatatatgcaaaggagccaatctcagaagcacaaagaaaaaagtgtgcataccttattttgtacatttaaagatgatgtctttttgttattgtctgtctgttttgtatgtgtctgagataagggatagagaggaaacatccgtcaggctaatttaactacattttattttaaaaatagagaaacataacctctagatgggacagcagaggacagttagtagaggccacaaactgttatgggctgctgtgttttgttctaaaatcaatatggttggagcatgtatatgttaggtgatcatt

SEQ ID NO: 100417 - DNA, 667 bp, Homo Sapiens
aaaacagatgaatgatttagtagacctgacaaatcaactaccagtcatgaagtgggaagagctgagaatcgatcctgttcagactgtgggactagaataaattctgtttagatggtgggacatatagaggcatctgaaatgtcaatcctagttcctcatgccaaataagaaggattgtgttaaagattcctgtaaagcagttaaatctctagcagttagatcacatttccccattccagtcactgagtaacctacctacccccttgaccctaacataagtctggagttttattttctgaagagcgcaaaaaggagggttattatatgagaggttctgccaacaaaatggaggtcatgggtaatatgggtagcaaaagtaagtaaccatctaaatattgaattctggttgattgttaaaatgctgtgatagtcatttgaaccaatcacaaatattttggttctccccttcttggacatatggtagaatttcaattctatttctgtttaaaattatgtgtagccatgtaatttcctttggctaataaaatgtgagaagtgacatatatccattctgggctgaagtttttggaggcacggtttaacacatttcttttcccactacagtgatcacggaagtatatgtgaagatggaatctccacaaaaaag

SEQ ID NO: 100418 - DNA, 511 bp, Homo Sapiens
tctggcgtaccgggcttgcggcagatcctgctgtttctccacccacccgcctttccctctccttgtttccgaaggagagcctgcctctcgccccgaggttgaacattccagctccttgctctccccggcaggaagccccaattctgccctgcagtggttgcctggacaccctcgtaacccagctgagcctgcacccccggggcatgggccactctgctgctctgtcttgcacccttgacttcctttgagggttgactctggacccttaagcctcctccttccttgcctggagtttacccacctaggccggccgcctggcaaggactggctggtgcggggcctgaaagcctggccctcgcctcaaggtgggactgtatgggctgtcactgatgccccagagctcccgagggatcctttgcctggcttcttcccgtcgtccccgtcctgtttccccactctcttcccgcctgtcccagactgctaccttcctaataaatggcttgtacagaaa

SEQ ID NO: 100419 - DNA, 572 bp, Homo Sapiens
gttttaagaacattttcgcaaagaggaaatgacagctctccagcgtataggatattcaataaaggatgtaagagaactgtttatccatttgaaaattaaagttatatatccatgtcataccacatgcaaaacacagctgccagataaatatttaatgtttaaagtattttaaaaatcaagaaaatataagcaagtatttatataacctaggggatgaaaacctttctaagcatgacaccaaggaagaaaccaaagataagaagatggatttggcaataaaaagaaaacttagaggtggcaaaaacactaagcagtaaaatgagaaaatacatttgcaacatactttctctttaatttgaagggctaattttctcaatataaagaatttttagaaattagtaagaaattccaacatccaacagaaatataggttaaggaaaaatataatttactaaaggaatgtatcgctaaatacatttaaaaagctcagcagtaataacacaaatgatactgattttttacctattattaaaaatactgcaacttatggtgtcaacattgccaaaaacaaa

SEQ ID NO: 100420 - DNA, 517 bp, Homo Sapiens
agttgtatcccggtgcaggcgtccttaaatggagagtactcagaatctgccagccttaacctgcccactagccaccctaatcaagcattaaatatctgatccaatctggccactggtgtaactccgtaatcagacatcctgtttgtaaacagctcctccttctctccctctccctctcagagacagaagtggtgatggggtttggagtttgaaaataaccttcctatgacaggaagtgggcttttgctattagttgcccaactcttagaggatcccagcttgtgtctttagacaaaactgacagcctttggaacgatcgcatggtggcgctgccttccagccaacagttctggctcagcagcagaatttatccagctatgtttgtagaatttttttaagatcctactgcattttgctcttaagcttttataaaaatttgacgagaaaatgtaaaaatgatacttggcaataagacatttagttttcatgcacctaataaaaatgtgtcaaagctaaa

SEQ ID NO: 100421 - DNA, 558 bp, Homo Sapiens
  misc_feature (49)..(88): n is a, c, g, or t
tccactgctgaatatatacacaaaagaagtgatagcagtatcaaagagnnnnnnnnnnnnnnnnnnnnnnnnnnnnnnnnnnnnnnnnagttaaaatgtggaagcagaccaagtgactattggtggatgactgaataagcaaaatgtggtaaacacatacaatggcatattattcagccttaaataggaaggaaattttgatatatggtataacatggatgaatcttgaggacattatgttaagtgaaatgagacaataacaaaaaggcaaatactgtattattccacctatatgaggtacttagagtagtcaaatggtggttgcctggggctgagcagagggaagaatgggagttattgcttaatgaatacagttttgcaagatggaaagacttctggagatgggtagtggtgatggtagcacaacaatatgattgtacttaatgccactctactgtacacttaaaaatgattaagatagtaaattttatgttatgtatgttttaccacaattaaaaattgtggtaaataaataataaagttaatataaatgttaaa

SEQ ID NO: 100422 - DNA, 506 bp, Homo Sapiens
cgcgctgcgcttccaggcggggctgcgggcttcgctcctggccgctctgggcctgaaaggctgcaccgccacctgcgtgaggccaccggacaggactgtgaggatcacagtcggtgaagcagagtgctttgtaaacctcagagtgcggtactcgtggtgctggagccgagaaaccagcagcagctgctgagagccgactgtgaagaaatgggaggaactccgtgttgggagcgagaggcttcgaaagaactggccacgcagtcaagtgtgtgtggcggggcaagtttcccggagaaagcgagcagtttatgttggagcttgagggtcaggataaccagttttgccttttttctgtgaaccagctccaaaacaatgctttacttcagcccggtctttttgcaggaagaccatctgcttagcttagttctacaaactttttcatttttaatgtgcaaagaacaggcggggagagccaaaataaatcttacaacgcaaatttaaaaaaa

SEQ ID NO: 100423 - DNA, 338 bp, Homo Sapiens
aaccaggcactcctgttccctaagacttaaagagagctagtcacatttcacagtttaagggaggctttgaaaaatagtttccccatcttttcagcttatcccgacccaggagatgctattctttgctcatgaattatctggagatgggtcaagtgagtcatcctggagctggatggagacaaacaggaaatgtttgggtggggcctgggaccctgtcctcccctgactctcccagcagatgctccagctgtctcagaaccatctagttccaaatgtctctaccctgtaggatacatgtatctccctacagagtggagctaagctcagaatttctcctc

SEQ ID NO: 100424 - DNA, 551 bp, Homo Sapiens
atataatatggccatattacatgatgacatttaattattcagtctcttgataaccaaactatattagaatttaattaaaatatattattgagaagctaaagtttgaatatatctgtggcaatgattttcatatgttaatatttcttagtctgtgctggcaggtgactgagtacttgctgtcatatcatgcttatgtgacttgttatatgtgctttgcatgatggagttgacacatggccttttacaaactaaaccttcaagattcagaatgctaggcagctcattaacatatggcctcaatccaggtgaccaagcagtgagtctggagtcctggtcaatttagcaatttgtgatctgtcatcttaatataacttcctctcatttaactttctttaagagaaatagactacctcacccatagtaatctggttttgacgaggtaacaaaatactcatttctattgtatgaacttaaaatatagtgtacatttatttttgtaagtcttacttatatgcctaaattttctataataaactgatttaagtctaaaa

SEQ ID NO: 100425 - DNA, 633 bp, Homo Sapiens
  misc_feature (241)..(249): n is a, c, g, or t
gcacgaggcatatcagagaacatttgtacaattccccatgaaaattgctccaaagttgataacaatatagtcggtgcttctagttatatgcaagtactcagtgataaatggattaaaaaatattcagaaatgtattggggggtggaggagaataagaggcagagcaagagctagagaattggtttccttgcttccctgtatgctcagaaaacattgatttgagcatagacgcagagactgnnnnnnnnntttactttgatctctgtttttgaattcttattatttatattttgcttactaccttttttgccttttgtccttttgtggagagggcgatgaattaagagtagtggggtgggtggcgagtaagtaaaatttcaaatagcattttagtgaatgcaattcagtagtcctgaagcctgacttaataaaacaaaattcatttatggttgtttcatgaaagttattagataggatcaagttttgtttgtatattgtttgccttgctctggttttgcttttgtgcttaggcaagtgcaaaatactctatggaaatcataattgtcatcttcttcatggtgttagggatatattgtcacatgatttcaataaatcctttttttgctttaaaaa

SEQ ID NO: 100426 - DNA, 478 bp, Homo Sapiens
ttttttttcagccaacaaatatttattcaaggtttgccacgagccagaccctgtgcttggcctgggctggaacagtaagcgaggccacccaggtccttgttctctaggagctcaggtcctagtggcaatgcccagcctctgctcaggggccccacacactgaatgagtgggagcacccccaggtgtgctgagccccagattgtttgctttctacctctacgatgacagcaggtcagaggtcgggccacccacgtggcagtcagagtcaggagtggggggtttgcccaaggtagctcacccactcagtggttctttgaaatgcagtgtccctggacacgtgcagggctgccagcactctgaacacgggggtctcttccaggagggtgggctctgattggatgggcagagaccaggggcagactgggtgggaagatcaactcccaccccccaaaacaaacccccaacatcagaatggtaa

SEQ ID NO: 100427 - DNA, 533 bp, Homo Sapiens
ccaaagaagtaaaataattgggtcaatataaaaagaaagtagaatattgcccagagaggagatgtggataattcctaacacggatcaaaggtgagctgtgtctaagacagtcagacctgcaccgtcccgtgcagtagacaccgtggccgctgtgtctgagatattcagaccctcgccgtcccgtgcagtagacacggtggccgctgtctgtaagatattcagaccctcgccgtcccgtgcagtagacacggtggccgctgtgtctaaaatattcagtcccgtgcagtagacacggtggccgctgtgtctaagatattcagacctgcaccatcctgagcagtagccacagtggcaagtagcctctgcactggacagtgcagctacagaatgatgctatcactagaaagttccatcagccagcactgatgcagacctttgcaaatgcccctcacactgaatagcacctagctgatagattgtccactactcagtgaaaagcctgtgttaaaagcagtatttggtagaaaagcaaa

SEQ ID NO: 100428 - DNA, 523 bp, Homo Sapiens
taatgtatttcttacatattgattgatgtctcgtgtctccctaaaatgtataaaaccaagctgtgccccgaccaccttgggcacatgtcatcagaacttcctaaggctgtgtcacaggtgtgtcctcaatcttggcaaaataaactttctaaattaactgagacctgtctcaaatttttggtgttcataggacaaaggaatttttggtgttcacagaaaaggctatcgccttttcaacaaatagtgctggaacaagtaaaccttaatccaggcctcacaccctataataaaaattaacctgaaaagagtcacagacctaaatgtaaaacctaaaactatgaaacttctagaagaaaggataggagaaaacctttgtggcttcatattaggcaaagatttcttagatatgacatctaaagcacaatccataacaggaaaaaaagatcaactggacttcatcaaaattaagaacttctgcatatggaagactattagaatggaaagataagccacaaactgaaaa

SEQ ID NO: 100429 - DNA, 345 bp, Homo Sapiens
tttaagttcacttgatcaatttaggcctacagtaacagtgcattttttaatctaaggctcttttgccaggtaggctgtttgggtactaacatggaagcttacatgtatatctctagagaagaagtattaaacttttagatttagagtgcagagtacaaaaatagaaatgaagatttgtttgagatgttaaagatacgttacttgatagggagtacttaaagtcatttagagtcaaatagattctgcagatattctcactgttttgattttgtaatagtcaggacaggctaaccattcactttattaagaccatgcatatatccccagaactagttctttcctgag

SEQ ID NO: 100430 - DNA, 921 bp, Homo Sapiens
tttctccatcaatatttctgatttttctaaaatagacaactattcttaggttccaaaaggcatttttacattcttttttaaaacttccactaaatattaaaattccttaatcccctggaaacatttttctaataaaaatacatggctaaaattatggtttcagtacagctggtacccactagtttaaataaaatttgggaatgtctcagaagagagatttcacaacagtcaataattaaggcagaaataattaaccccaaaaggaaaataatcttagcctacaacaaaagacttagtagcacagaagttccagggatttgggtgttctttttggttttgcactgtgagtgagcgtatttgtttttattacatgcatacattattctgttttgaaatcttgctaaaagatcacaacccctcctaccactcagctattcccctagggactaggcagcctgccacataaaaataaatgcaggaagtgaagaagagctaacaaagacatcagcaccatatggaaatcacgaaactgttgaccaaataaattaacagcctggatggggtgggtcacacccagagacttgggagtagaccctcaaaattattatccattattctctacatttgctttatttttaaataaatgataccccacatttctgttatttatttctaaggcacaattacaatgttaaaatgatagtgacatattattgtgttattctttttttgaagcctttcctctctagttttttggcctcaggaaccattcctcttccccttaaaattataaagttgttttgctttgtttaaattcaaactagtataatgtgtagtgggctacgtgactgtcacttctatataacagtgctaaactaaaggttatgactaacatgagagcactcaagtatacatatttat

SEQ ID NO: 100431 - DNA, 552 bp, Homo Sapiens
gaagccttcgcggccacggagaagggcgagaagaagaaggagaaaaacgtttcttcatttcaactcaaacttgctgctaaagcgcctaaatctgaaaaggaaatggacccagaatatgaagagaaaatgaaagccgaccgagcaaagagatttgaatttttactgaagcagacagaactttttgcacatttcattcagccttcagcacagaaatctccaacatctccactgaacatgaaattgggacgtccccgaataaagaaagatgaaaagcagagcttaatttctgctggagactaccgccataggcgcacagagcaagaagaagatgaagagctactgtctgagagtcggaaaacatctaatgtgtgtattagatttgaggtgtcaccttcatatgtgaaaggggggccactgagagattatcagattcgaggactgaattggttgatctctttatatgaaaatggagtcaatggcattttggctgatgaaatgggccttgggaaaactgtacaaacaattgctttgcttggtacctgaacactaccg

SEQ ID NO: 100432 - DNA, 306 bp, Homo Sapiens
aacatttatttaagtaaatagtttgttctgtattttgcagtcctcccacaaacacattgtactgttaaaatgttttctcaaattgttttcaatagtgtctcagatgtgtggttacattaattgcattcactgggttatgatctactcctggctggatctactcagctgatgacggtctttacagcacacttctggttagactgctgtagttgaaaggtgattccatcccttctccaaagtataatggagaaggatttgaaaaagggcagaatgggaaaataaagatatttcgctattttttctctg

SEQ ID NO: 100433 - DNA, 464 bp, Homo Sapiens
tctccataccttaaattgttggtagatccttggatgtaagagataaaaattcattatgatgctagaggcattggggggtccatgcgaaaggttcaaacagcctattacattaatgcacatgtggaaagaacaaaaattttcaagctaagtcttaagttcaaatctataatttttttctcttcagttctgttctttgtatgataatccttaaaaaagtagttgtcttcttttcacatacacctctttaaagctatcatcttataataagtggaattggatgcttattgtgtgcccagcacagtttaggaaaaaaataattggcactgtttgtccagttactggagatcttcattttgatgctttgtactttgttccaggtctttaattctcagtccatcttttcctatgattgtgtacttcacatgatacattccatataaagagctcttttaaaatgaaaaaaa

SEQ ID NO: 100434 - DNA, 545 bp, Homo Sapiens
  misc_feature (107)..(107): n is a, c, g, or t
gcatccatggcttgcacaatcctgttccagtcatgactgaacatttgctccttcttcatgtgccgttcggaaatgttgttgtgatacctgttacacagtgcatggtngaaaaacaaataaaacaaaacaaagagtatctgtatatagtagagtatagtacatactgttctcccatttggcaatgttgattggacattgaagacataagtgagttttcttttcacctgagttgttacttttgtgctgttattgagtttgattaattactagggataaaaggagaaaatggattattgttcacggttctgcacattcatttctaagaagcaataactgtcatgtggggagaagttaaagctattgagaggatagcaggcaaactacaaagatcttcatggaaaattagccatgtggaacacatcagaggcctctaaaaatcacccattaattcaggaaggccaaggagaaaggccttatagagacgttgatatgttggatgtgcctaggctttcagagccaccctttccacaacacccctccctgca

SEQ ID NO: 100435 - DNA, 595 bp, Homo Sapiens
  misc_feature (72)..(72): n is a, c, g, or t
  misc_feature (314)..(364): n is a, c, g, or t
attcaagaggtaatcagtcttagtgaggatgcagaataaagggaacctttgtacactgttggtggcaatganaattgatatagccattatggaaaacagtatggaggtttctcaaaaaattaaaaatagagctaccatatgatccagcaatcctaattcttggtgtatatccacagaagatgatgtgtatccacatcagaagatgatgtatatccaccacagaagatggtgtatatccacagaagtagtgtatatcaaaacatcacactgtacaccttccagtatatactatttgtatttgtcatacatcggtnnnnnnnnnnnnnnnnnnnnnnnnnnnnnnnnnnnnnnnnnnnnnnnnnnngggctctgaaagggaaaaagaaaacacaaacagcagccatcttagtggtaaccaacaaagtggaaggcaggttggtttaggttgttacctaaatgttcatcctcacactgcccaacccatctgttttccaaatattcattaaattcagacaactacagaaatgtaggatcatttctctctagagagttgtcagcgcagtcatcccatcttcttccatacataaatgaaaaa

SEQ ID NO: 100436 - DNA, 614 bp, Homo Sapiens
tcattcctaactttgtagttgggacagacctctgattaacaagagaaaaacaagcaagtttactaaggcatgcagcccacagcacgtgggagaaacctcagtgaaactcaaagcgcagtggcttagaagtctggctcatcttcaacaatacatttgtggagaaatgacaggacaatggaaagcaattttaggtgtccgaaggcaagaaaccgtgggaagataaatatatgggaagaaactagtggaatacgtgtgtttgtacattcttctgctgacatccctgagctggtaagaatggtctccggtaaaagagaatttacatcctgtctttagatgaaaagaggggaggatctagagagctcttcctccattggctgcttcttaattgcctttacttcaaaatatttgtcaaaaaggcatatttgggggtgacatattctgattaccttcagaagcttgtctttatacacatttatttcttttagggtagattttactttcatttgtcactaatatgattgcttcagtacacagcattctgtggcatggcttcatgctttagcactgtggctctgaattaaagcctgaaacaatttataaaaatactggtaaaa

SEQ ID NO: 100437 - DNA, 717 bp, Homo Sapiens
cggagactcaggtcagactaaactggttcagagccaggatacccctttcaacctgggttacatttgtcatcattcatgtaaatgtttctgttagatggaaacaggttcaaaacccactacctacttccattctggctctaatagagtatcttgtagccaactgatatttccacaaagagcaactgtaaaacctgggtaaaattttgtttaaaaatatgtttgagggattgagaggctgcagaggcagccaggacttggggagccaggttctggaattttacagaggtgagccccacaatctgcatttcatggtgaagtattgaacgctttgccgctgaggtcaggaacactgttctcatttctattcaggattgtgcttggaggtaccaggcagacaacaagacaagaaaagaaaagtcttaaggattgaaacagtaagaaacacaggtatcattcattatttgtagacaatgtggttgtgtatgaagaaaatccaaattaagtaacagtcagactcttaagctgagtaagtaatttagcaagatcaatgggcaggggtcaatatactaaacttaattgtattttagtatttttatatatatcaatgatgtacaattggaaaatgaaatttatagatatcacttataatcacatcaaaattgagtacataggaataaaatcatatctaataaaagacgtgcaagacttctaagcaaa

SEQ ID NO: 100438 - DNA, 1308 bp, Homo Sapiens
aataaagagccaaagaaaggaaaagaagaaaaatgttaaagttaatgaagcatagtacttgtcccaagtaatattatttaataagcttaattttatgagttatcattatcaataatttctatttctaccaagcttaattatggtaaaggttaattttaaacatgttcacacattcttttttaaaaaaatgccctaattgaggtatatttctgaatagtttcagcaggttattttttaattttaaaaaagcaaattcacaaacctagacccatttattttatactcagcagaagacagggaaatttaaattagacaaagttgaaaaagaatcagaatttatattttacaaagcttctaccactctgaatcaacaaaatcaggaatggaccaaaaaatttctgtatctgctgaattattaatgccactatagtattatatgctaaatatgaaagcagtgctgccatcagtttcacttctgccttggaatcttgctcctaagttagctctgtggcataacaaaattccagttaataaaattttcatttaaatgtcttttgtatggctaaatgaatatacagattcttaaacatctaatttttatatggatttctcaaagaatgccttacagaagagcattctctgattaaatgcaattacagttggagtctttgattcttcacagaattctgtagttgaagccagaaaacactgtcatttaggaaagtgttcctaaaggtttgaatgctttaacatgctcaactcttacttcttgaagtgtttgattgtcagtaaattttcgaagaacattaaagttctaccaatgtagaagcatgaggaataaaagatggtctggatcaagaatgcaggaatatgatacttgtactttgtttttgataattttcattgcttataacaatgaaaaactttaatatttgcaggagactaatatgaaatgctacatttcataacttttattctgcgtggcaactttgatttgtggtggctgcctagaatgctttattgagaaggattctgaggttacatccaggatccagggggaaaaagttttctggatccactggcattgacccttatatagaggggaaggagggtcttaagggaaaattagccatctcagatatttgccatccttggataagagcgcagaaaatcattcatgttttagaaactggtatcgccatttgttgaggggaacaaaatgtagtttcctgactataattaataatactatgatatagtccaatttagctatgatataattaataataaactactttccagtcttaa

SEQ ID NO: 100439 - DNA, 468 bp, Homo Sapiens
tgcggccgccatgctccttggccggctgcagtccagggcgctgcgcctgacgccttcgtcatacccaaattacggcagcttgctgcctccaggccctttcctccgtaaactctgtggcgcagtttggagctgcgggctcgggtggtgggggggcttgacatgatgggcatccgcaggagcaaatagagcgctagcgcaggcattcgcgtaggccaatggagagccggcggaggcggggcgccgcgctccggaacccccagcggggccgaacttaactactgaattgctggagttggttcgtgggccggggcctgtgaggtctcttttccttcccttcgcaccccctcgcccttcgctgacgggatcagaacttctccccttttctgtggttgtaccagtgtgtctgtcggaacatgattcccataacgcaggaataggttgagggggtaaaaaaggaatagaaaaaaa

SEQ ID NO: 100440 - DNA, 471 bp, Homo Sapiens
atggtcattcagagaaaaggttacttcagtgtctctgctgctgttccttagtgagaaaatgacttctaaaagggaggcaaagaggcatgagaggcaagtctactgaagcaggactggtttcacttctggcaccaaagtcgatggcaacaatgacggatctggagacatgccttatgataaataccaaaaggcagcgacatcgtaggcatggcagctacaggcactgcagaccaagaagcagagcttcaagccccacactcacaaggctaaaacgtttcctcgtgtgagaaacagaaccaccactaacaatttttggaaataatatttgagtcttggctcccaactggataattttgttctgcaccaaaagcaattccattcaaattcccaaagtcttcaagcggcttcagactaatttcaagacacagtttccttccaagcccaatgaaatgaaaggcaaaaaccaacaaa

SEQ ID NO: 100441 - DNA, 590 bp, Homo Sapiens
tttaagttctaaaagcgaatgtgtcattagtctggtttttgattatagagattcaaacttacaaaacgctccttcatattacttctcagctttgcaacgcagggccatgtcacttaaggaaaacaccttatatctcacaagaggccttctagaattgtagtcacctgccgaatttccaagatccacagactaatcctcacagggtcaacaaaacaatctattaatgaacagagccatctctggagtcagtttcaaagaactgaaccattggactaaaaccaaaatgccaactcgacaatgttaagtgaaaattataacctcagagaccaggagatgttagaatcctggggccgatgtatgtgcccctcccacaagccccacaaacaagtcatgttggaaactgatataaaccaaagggacccagatgatgaaatcattggctcagtgtgttccctccatgtaggcatgccacacagcaaaccagctgtaatccaatgtttattgagcaaagaaatcaaagcaactggtcatctaacatatatttaacaacatcagggtaagtttgtcttgtgtatcattctccacaacag

SEQ ID NO: 100442 - DNA, 580 bp, Homo Sapiens
acagcagctttattcataacaataaaacatgcaggattattcacaatagccaagatatggaatcaacctaactgtccatcggtggatgaatggataaagaaaatgtggtatatctacacaatggaatactattcagccttgatgaggaaggaaattctgtcatttgtgataacatggatgaacctggaggacagaactcaaatgtttgtaaacagaatagaatttttaaattgtggtatattcagactatggactattacacagcaattaaaaagcataaactactgataatacaacatagataaatctcaatgacactatattaagtgaagaaaacagacacaagagggctgtttatggttccatttacatgaacaggaaaaacaaatctatggtgatagacatcagaatagtgataacctttgaggatgaggtggggcccaagggaaatttctgggacgataaaatattttgatggagaccgtggtgggtatagacatatacaaaattcaccaaggtgtaccctaagatttattaacgtttatgtaagttatacctaagagaactttaaaaccaaaaa

SEQ ID NO: 100443 - DNA, 530 bp, Homo Sapiens
  misc_feature (166)..(176): n is a, c, g, or t
  misc_feature (401)..(411): n is a, c, g, or t
tgctagccagtcgggacaaatacagaatgtgaggtcctgttccagtcaatggaaactggatacagcagtagggtggatgcggcaggttataaatgatgctgtctcctttgtttggtgtacactcgtggcaaaactgctggtgagtataccctttctgcaggaagtnnnnnnnnnnntggccacactaaataaatctatgttcaagtgctatttttttatggcactggggaacaagcatttcaaacaatttggtggcagtctgtatggggatacattctcctccaggggtggtctccagtcctctctcatgagggagtgcactcccctacctcattaaaggggccctcaggaatgacaaattgaggcaaataaacccagactctcagcaacacagagagagnnnnnnnnnnngaaactggccagcaacctagcttaaaggatcctcacatactgtggcgacaactttgtgcacaggccaagaaagaagaagctgtgggagccaataaagtatttccttggtgatcgggact

SEQ ID NO: 100444 - DNA, 612 bp, Homo Sapiens
  misc_feature (517)..(570): n is a, c, g, or t
aagatggaattaaaaaaacctcactttaaagtggaaagctcaccagagatcctaaagaatgaagatttttctagcagccgtgctattacattgtacaaagacaagcgtcaagaatctgtagaccagctgtctttgattttgtcttatgagtgccagatttctcagaagctctacattcctcgaagtacagccactgctgccttaggtgctgccgcacggttagctacatccaggagcctcctacactggtaccccagtgtgaaaaggatggaagcatgagggagggagggaggagggagaaaaacagaatccagccgcttaggctttgatgaactcccaggccaaaatgaggagttattgaagcaaaatagtatcttgatcattgatacttttgtctttctgtgactatatgttagctttattatgctaacagtctactttgatgtgtaagtaagtattgatatttactgttaatcttgatttttcttgattttattctgtgtcattttgttcaccnnnnnnnnnnnnnnnnnnnnnnnnnnnnnnnnnnnnnnnnnnnnnnnnnnnnnnacattatcatgactgataaatgaaaattgaaaaactaaaaaa

SEQ ID NO: 100445 - DNA, 618 bp, Homo Sapiens
agatgcatatggaggcagacacatggatagattcttccaaaacgtcagctggtgcttttccagccaattaagaacactcatgaaaattctttctgaagtaccaggacaaatctcttaagagttgggtatgggattttggagtccttttgatgtgctactctttagccctcaaaggtgattgagaggtggtcacatttcatgaacatctaacaacgctggagccaccagtaatctctggttaccaggtttaatgctttgtggaagccatcatggcatgatgatggtaaggtgttgtgtcaaagccggagtcattgggtacatgtgatttgcaccatgatgtgaagacatagtcttaacatgcaagagtccatctgagagagcactttcttttcaggcctgagatgtttcatgtcacaagggtttttcctgctcctgggagaaccagtcgagttgctgctccttgagaattaacagaaccatggaaatggagtttgaagacggtgaagtttctaagggtgcagcgagaggatcacggaagcctttccacactgcaccgataattttggcttccttaataaggcctcagtcctccagtgatttaaaaagttggcggccgca

SEQ ID NO: 100446 - DNA, 488 bp, Homo Sapiens
tgtgaatacatgattattgatacttctggacaatatatttaatatgaggtaaaactatcacatggctcaaaatctagtcttaaaaatataaaaaaggaattacaaaacgctctaaatgtgtagcattttaatcaagcctaagtccatggtaacaactgtgaaagtcacacatccctacatatatgcatgccggcttgcctgttaaaattccagttaaagtgaattttcacacactctttaaaaagattaaaaatgacattccttctatgtttgttcttctgagtttatcatgatctttcaaaggaattcagctacatactgtatttttgggggggccttaatttgacctttagaaaactgaggtggacctaactcaaaggagaggtaaagaagctgagaaaccacaatcataggaaaaaactaagattcccaggattactgtgggcatgaacaattacactatcatccctatcccaggaaaactttaa

SEQ ID NO: 100447 - DNA, 503 bp, Homo Sapiens
ctccaccagcgccctgcctcaggagcgaggctccctgcttcatgtgggcaagagctgcccttgttttcccagcgggcagttgggggtctggagcctaggaagcaaagtgaagcacacactcctgcttccttccttccctgcagttggggatcctcatccatcagctgagggcccaaatagaacaaaaggctgagttggagggcgcccctcctgcatgaccaactttcaagtggtgacatcagctttcttcctgtttttggacttgaactgaaacatcagctcttcctggatcttcagcctgctggccttcagactagaactacaacctcggctctcctgggtctcggcttgctgactcaccctgcagaacttgggacttgtcagcctctacatttgtatgagccaattccttataatgtctttctgtatatatacatatatctccacatcttattgttctgcttctctggagaaccctgagtaatacagcatcattccggaaa

SEQ ID NO: 100448 - DNA, 498 bp, Homo Sapiens
tgcggccgccaacttttttgaggtataatttatacataaccaactgcatccattttaagtatatatttggcgagttttgagttctaagtatagttttggtgagtgtatacacttgggaaacaccaccgtgatcaagatggaacctttaccctaccccaaggcacccacatgcccatttgctatcagtaacccaccccagtcccagacctggggaaccactgacctgctttctgcctcaattggtcagatttgccttttttcagaatctgaagtcattccgtactgtatgtacacatttgtgtctggcttggctccagataaagtttttgggattcatgaatgttgttgcacgtattaggagagactcctttgtattgctgagtagtattcccctctgtggttagaccatgatttatttatccatctacctgttggtgaacattttggctgtttctaattcttggccatcatgaataaaactgctgtgaatgttcctac

SEQ ID NO: 100449 - DNA, 536 bp, Homo Sapiens
cagtggtaaatatctctgaccacattcttgcctcttggttttataaatgcaagagaaaagagatggtttctggtacatctgaatttactttttcatgaaaattctgaagttagaaaaaagactatatgatttccaataagttttggagggactgaccctagcaccccaattttcttttaatctcttcttaaatcaaatctttgtaaataatgctttcacattctattaaaaatgtatagagaaatattcacccaattatgtgaggatcgtaaaccagtcattacaatatgtgctagcatacccttgttttagtctgtgaagtgtaagttttgctaccctaaacctctgactaccctgctgtcgtcctgcctcacttccatgaggaatattttgtctgggtctatagattttcccagtccccggtgtgttaatgtgagaattgagtctccagtaagagctgttactcttccacatctgctcctttccttgtaggccgccaagtcttctgaactaaggaaagaaaaaaactctataaa

SEQ ID NO: 100450 - DNA, 256 bp, Homo Sapiens
ttggccaggtagtaagtctgtttcaaagcaggtgatgctaaaaagtatttgttcaaataagctatactcttaaagggttgttgatgaagcatagaaacaaagtcccttcacaacacattattaagcctttagactttattttcactttagtttcctgaatttgcatgacaagaacacttctagtttgcctaattctgttgcctaatacgtaattctttaacagattttttaataaactcgtgaatgcatttaaaaa

SEQ ID NO: 100451 - DNA, 466 bp, Homo Sapiens
  misc_feature (87)..(87): n is a, c, g, or t
  misc_feature (95)..(96): n is a, c, g, or t
  misc_feature (98)..(98): n is a, c, g, or t
ctgcctcctggcttaatctccaacagcctagaatggacataataccctaacattggatagttttcttcctcctgggtcaactcagcntgtccctnnantagggcacccacctaccccccttcacctccccaacacttcctaatccctaaactaagctcagggaggcatttgtcatctctgcctggctcagatgagatgctctgccctgagtactatgagagattgggaagcaggattctatgtaggatggttaggagcctggggcttgtcatgagtaagaactgggtttgaattccgtatcctcaactttcaaatgttgggacctctgaaattgctttaacttctctcagtgccagttttctcatctgaaaactgaggatagaatacctacctagtaaggggggtatgggaaatgcatgtaaagtatttaataagtgctcaataaaataaaaccattgatttatct

SEQ ID NO: 100452 - DNA, 343 bp, Homo Sapiens
gagatggagtctcactccagcctgggtgacagagtaggactctctcaaaaaatgtctttgatgagcagtaaagttactagtttcattaaatatggacccttgagtacgtgtcttcttaatatggtgtgatgaaaagggaagtatgcgtgaagcagttctgcaaactgaattttaaattatcttgaggaaaatcacctgtaacattgtcagcaagctgtactgctcactttttaaaatttacaacattatacttagaagaataactaatagacaagctacagttttttacacttgggtattgaccagatatgtttttctaaataaaatgggcttatcctttcaa

SEQ ID NO: 100453 - DNA, 427 bp, Homo Sapiens
gaaaggaaaatcttggggccccaaaatcactaagctaaaggaaaaagtcaagcttcggagaactgcttagggcaaacctgcctcccattctattcaaagtcatccctctgctcactgagataaatgaatatctgattgcctcctttggaaagggtaaccagaaactcaaaagaatgcagtgatttgcctcttatctccctaaaacctggaagcccgccccctgttttgagttgtcccacctttgcttcaagtcgtcccaccttttctggactgaaccagtgttcatcttacacacgctgattgatgtctcgtgtcttcctaaaatgtacaaaaccaaactgctctgaccacctcgggttctgacctcctgaagctgtatcatgggcacgcatcctcaaccgtggcaaaataaactttctaaattaaa

SEQ ID NO: 100454 - DNA, 519 bp, Homo Sapiens
gacaggttgcccactagatggagtgagaagtaccagactccttttttctctaaagcagatcctttcaggatctgagtcactgggcagtttctctaatgcgagcagacagaccctgttaaccaagcaaaggaaagtatatttaaagaggctaaggtgtttggccacatattgctttaggttcatctccattggtctcagtgtggacataactcctggaattcactccagtgcaaagtttaaataataccagcatgagaatgtacttgaaggtttcccaaaatgtgctagacaagaaagagaaaaggtcccagctgagagaaaaatccacctgtctcccatctggggctctttggcctcactgatagaaaaggaaaaggggcccaagctaagcttactttgagggttcatgatgttcagagatgctcaggggacttctccgctgcaggaggtggggtgaggacattggattcatttcctcaaaatatggagagaaaggagaaaaatcagaattctatttgt

SEQ ID NO: 100455 - DNA, 444 bp, Homo Sapiens
  misc_feature (100)..(100): n is a, c, g, or t
  misc_feature (119)..(119): n is a, c, g, or t
gaacattagtgtcaccaaagacacatacttattatgttctatgcaagataagctaattttgggttacatgccaaatatatttccattagttgagacaggngctgtttcctgcactacanctggtcatctgaccacctttctgcaatgctaagaaggtattctttgaccaaacagcagtccacatacaagtttaaaaggggccctgtttatgtaggaacaacactgaggtggtgcgtagccaggtacaagacgcccaaatatttccagtttatcttacggctggactcctattctcccacactgtttcctaaagaaggtccacattattttggttactagcctagtttaagtggagatactgtgggcaacttgaaagaaatgacatcaggcacacaggctgagcttgaaaggaaaaaaagaccacagataatgtctttggggatt

SEQ ID NO: 100456 - DNA, 543 bp, Homo Sapiens
taaatggctgtgtggtatttgcccaggaacttggtgctctgctaagagctttaataaccacatagtctccatatcttcttctcgtaggggacaaagaaagaaaaaatctcttgggcgtggctgcatttgctggcatcagggatagagagaaatgccagcactccctggggtagataatttaggggagtcctctgcatctgtcctgtggtctttcacagctcatgttttctcggaacgatggacgcacaatgacgtcctcagatggtttctcaggcaagtttccagtgaacatgactttgtcccattcatttgtaactgggcagaagctgggtcccagattcttcctggtggaggcattcggagagcaacaccctggccttaacacactacatatctttgaatttcacacgggggcagccttctgggaaaaccactgacagatttctcatggaggagtcagctggggttgggaagagttgagcgctcatgatcctctcgtgggaaatataacattaaataaaatatttctcgaatcctagcaaa

SEQ ID NO: 100457 - DNA, 552 bp, Homo Sapiens
  misc_feature (527)..(527): n is a, c, g, or t
tttgcttcacaaaatttcattgtgacttcaattaaaaataattttgtattaaataagtcatgtgcctttttagggggtagaaaagcatgtttaaaatgtttgaatctctgtttaagataattatgcctataagatgtctaactcttcagtcactaagccattatcaaaatgctgtaacttactggtggcagctaatgctaattacggacaaagatcccaacagtcaatagctttgtgggtgctggcactgccgaattaaggccacatacccaagcagcaagtgccaattttgtattcacagaagataactgcatatttcaaatcctaaatatcagctaaatatcgaacactaattttatttttgtcagactgttgtgaacatacatatctgactagtaaacagttttgaatctgtattttttgagtcacgatcaatgaattagaatagaataagaaatgaaaaatgttagctatatatgcagggttctaccttcaaaacaccctaataattttgggatctatattgntactttactctcaaactatttacta

SEQ ID NO: 100458 - DNA, 507 bp, Homo Sapiens
gcaacagagtaagactttgtctcaaataaataattaggtaaataaataaatttaaacaggtggtcctccctgagtttgtttaacagctcagttgtgtcatcaagaactcaggcttcttaaaacatctccccttcccccaccattttgttggcttttcttatttgagcttgtcacctcgtggtcccaaaatggccgctgctttctcagtcatcacatcctcataatgtctcatccacaagcatacgagggagtctcataggagtacaggaagagcaatgttactagtgtttttagttcaaatagctttttatatgatttgttatgtgaactatagattacaccaaaaagcagtaaagctaattttgaaaacacataaaatacagaaaagaataaaaactcatttagaatctcaaagctgggtaggcagcaggcaaacggaggcaggaatgtgagagtttttttctacattccctattgtggcatatgtgcattctgatgcaaaacctg

SEQ ID NO: 100459 - DNA, 534 bp, Homo Sapiens
ggaactacggcctctctccgtgcacacggcacgcgaattcatgaacttgcttttaaacctgcacaagagtctttctgatcattagttcttaaaattctacattaccatggaaatatcacggaggctctaaggctccccttaaagtgaccaaaaaactggataggcgtagcgtcctaaaacctcatagaaacatacggaaatggctaagagggaagcaatgtcaaaacagggaaccacataaaagctttcaaaaactactgggaaagagcccgcaagatggaaaaactcataagaggtcgaggacaatttacacaatttataacaaaggaatggagcgtcccaggcactcaggagtccgtaaatgactcctccttcctacgagaaatgggatgtctcctacagtcgcaagtcagcccgtgccttctggagcttttctagatacgtctcttacaaacgcttcttttaaaaaaaaggcgagaatgtgtggcgtagctaatattctgtcttcaaactcagtaggaagtcaacaaagaa

SEQ ID NO: 100460 - DNA, 623 bp, Homo Sapiens
  misc_feature (55)..(55): n is a, c, g, or t
acgagaggggtctatcattccatgcttctctatgctctgatcaaaagaacaacgnaggctttgtgtgggtgttctaacagggcggccacacatcatatttacctgttccaataatttttgtccattgaggtgagcctgtaacacagcatcattaaaaaacaagtgacaggtcagcagcacgtgacaaatgtcgaatgttccatgcattgaatccgaaagttcttccaacgacagaatataagcatgccagtgtgaattaagctccgccatgtgcgacaggcagcatcgcatgacattgagacagcatcccacacaaggcttagtgagccacaggccttggcagtgcgggcagaactgcatcatcagcagggctctgctgcactctatgaaaaagcgcagatagtctgtggtgttaatgacttcaatgcccagattgagtgcctgacaaaaaagtgcggctgggcagcagggacctccccatctgtcccattactctttggggaatattaccaaatggactcacatcccggcgagccatccggatgcattctgagtattccagggaactgtcagtcacaccagggttaatgaggtggttgtagaccagaggaaaaagactgtca

SEQ ID NO: 100461 - DNA, 799 bp, Homo Sapiens
tgcattgacctctacctgctaggtggcccaggggagtcgatcaagtctgggtgcccgcagcatgtcagacattcgcagcggccccagccaacacttggacagccccaacattggtgtctatgaggtgagcctgaccccagccagacagagagacagtgggggaagaatgctcaggccctgggcagaggggaggcgcactctcaggaggacatgtagtcatgtcaaatcctgcaggctccaggagatgggggatgggagcccagacaggatctagggaaaggtcatggatccctcaaagggaagcacctaggaatcttccctccccaaggatttttctctagccactatctgggtaagggctcctcaaaagctaaccacagtgacccagagactggaggctggagctgccagggagcatgctgggaccagcaggtaacatggtgtggccactgagaccatctccggcctggtcagagcctctggccctgcccctcagcatttccacccaattcagaccagactcaggaatagcaacccctagagggggaaaagaaagtcacaaaaaagtattaggacattaactttggggctggtaaatctgaatgcggtcaagtggaggggagatgatgagaacagattgagagagagctgagagtgctgagcaaatcaagagagtagaaatttagagctcctgggcttcaggtcatgggaaggaatgcagaggctcctatcatgtcacctagagatcatcatggccaattctcagaggaggcactattgtcatttggggcagattgtc

SEQ ID NO: 100462 - DNA, 588 bp, Homo Sapiens
  misc_feature (78)..(78): n is a, c, g, or t
cagaaggactgaaaggaatagccagtgaatatgtttcagtgggtgaggtgtgaaaccttgtctaatatagatgtgtcntatggcctgtgactgcttattctttatcaatgagaactcagcaaactagtttctttcttgatctgaggaaccacacagctcacatcagaatataatagtggaactagggtgacttcactccctttcacctgatgtctatcttggccttttagcaccttgactatccctgaaaagactgggtctttgttttcccagggaaaaaacgaagtgatgtagatctaagaaatagtgcctctttaatatttaattcttacatgacaactaacacacagggaaaaggctatgttaagttgattatagctcctcttaaaatgtcctatgctgtcagttggtcttagagacatgggaataaccaagcaatattcagacatctgcactatctggggacagcgctacatagtacaatgatgtcagcagttcagttacttggaacaattaaagattacccttaacagccatgttaatacatctaaatgctaaaatatactacgagtttttcatagtcaaaaa

SEQ ID NO: 100463 - DNA, 496 bp, Homo Sapiens
tgcggccgccccaacatcagaatggtaacacaccttctgcagctcaaagtctctgcagaaggtgtgttacctaccgctcaacaccttcctcctgcggccactgcaccggctcatgcactacaagcaggtcctggagcggctgtgcaaacaccacccgccgagccacgccgacttcagggactgccgagccgctttggcagagatcacggagatggtggcacagctccacggtacgatgatcaagatggagaatttccagaagctgcacgaactcaagaaagatttgattggcattgacaatcttgtggttccgggaagggtaagcagcagtggcctcactatgcactgcgcggggagcagaaaggaggcatcggagggacttacatttgaaccttttgaagagagacccttgcaaagcaaaatgtcctctttccatccacctgggagacaactggaaaaacacaacagtgtcgttagttcagaatcattgtgttcg

SEQ ID NO: 100464 - DNA, 699 bp, Homo Sapiens
aacgggtgatgcggttgagggccggaggaagagattcccaactgataaagcgtacttcatagctaaggaagtgtctaccaccgagcgaacatatctgaaggatctcgaagttataacttcgtggtttcagagcacagtgagcaaagaggacgccatgccggaagcactgaaaagtctcatattcccgaattttgaacctttgcacaaatgtcatactaattttctcaaggaaattgagcaacgacttgccctgtgggaaggccgctcaaatgcccaaatcagagattaccaaagaatcggcgatgtcatgctgaagaacattcagggcatgaagcacctggcggctcacctgtggaagcacagcgaggccttggaggccctggagaatggaatcaagagctcccggcggctggagaacttctgcagagactttgagctgcagaaggtgtgttacctaccgctcaacaccttcctcctgcggccactgcaccggctcatgcactacaagcaggtcctggagcggctgtgcaaacaccacccgccgagccacgccgacttcagggactgccgagccgctttggcagagatcacggagatggtggcacagctccacggtacgatgatcaagatggagaatttccagaatgctgcacgaactcaagaaagattgattacactgacaatcattgtgtttgggac

SEQ ID NO: 100465 - DNA, 718 bp, Homo Sapiens
attgaagagttgaggatgtggcacaaagttggtgccaagcttcttgaataaaacgtgtttgatggattagtattatacctgaaatattttcttccttctcagcactttcccatgtattgatactggtcccacttcacagctggagacaccggagtatgtgcagtgtgggatttgactcctccaaggttttgtggaaagttaatgtcaaggaaaggatgcaccacgggcttttaattttaatcctggagtctcactgtctgctggcaaagatagagaatgccctcagctcttagctggtctaagaatgacgatgccttcaaaatgctgcttccactcagggcttctcctctgctaggctaccctcctctagaaggctgagtaccatgggctacagtgtctggccttgggaagaagtgattctgtccctccaaagaaatagggcatggcttgcccctgtggccctggcatccaaatggctgcttttgtctcccttacctcgtgaagaggggaagtctcttcctgcctcccaagcagctgaagggtgactaaacgggcgccaagactcaggggatcggctgggaactgggccagcagagcatgttggacaccccccaccatggtgggcttgtggtggctgctccatgagggtgggggtgatactactagatcacttgtcctcttgccagctcatttgttaataaaatactgaaaacacaaa

SEQ ID NO: 100466 - DNA, 607 bp, Homo Sapiens
  misc_feature (95)..(112): n is a, c, g, or t
  misc_feature (532)..(532): n is a, c, g, or t
ctttgattcaaataattactaatggtaaaacgaataaaatttcaacccaagcgcattcacatgtgtgaagcaccacagtcaaagttagggcagtnnnnnnnnnnnnnnnnnncaacttgcctccaaataattcacacacttgttcatggggaaggagaaaatggaagacagacttctcaataagtacaaataagcagaaaagaagggacactgagatcccagccatgacacccaaggagtacactcaaccacccctcaccttcccaccaccccacccctttgatcaatatcccatgtgcttctaaagatgactgaatatagcttctagcccatccatgagtctctgctgagaaaggatttatggatgagaagcaggagatcttaagagattttccacttcaaaggaagtgaccatttcttaaggtaaacttaagtatacacagaaaattccaaattggtggctctggggctaaaaattcagggatggcctcagataagcattctcaaaatgtttttagggatgtgaaaactntcagaaacgtttcttacccattcaattaccactcaaagattgacttttcttatcaaacacagagtatgggcgacg

SEQ ID NO: 100467 - DNA, 589 bp, Homo Sapiens
caattctgaacactgtgttgcataatatcaccaagacaaaaaatatgttcacaggtacactttttgttattttctttctagagcacatctttgaggtcataagaccgcatctggttaaaataaagtctcttgcccttgcttcccttccccctcaaagtgattcaaccctgaattccaaaaaggaatattcaatataacaacttgaaaaccagttgtaacacttagaccataaggaaactatatgaacattatggaaaactacatgaaagagggagctgccacttgccacccacttcacttccagctttttaagcatgtacccagctagactcctatctcactgacttcagtgaaacaaactaacacaccaaatctaggccatctcaggctggaagttaaaactcgaagacatcatttcatatacacatacatatatattccctatcctaagctttaactttgtctatttaaacagtttaataaagctcacatttacaaaggattttattggcaaataaaggcccatattaaaaattttatcagaacaaatttttgttttatacagctaacattaagaaatattttcttg

SEQ ID NO: 100468 - DNA, 493 bp, Homo Sapiens
gagcaggttctagctacacccagacacagtgaaagggcaattgctagaattatgtgaagcacctggaacaagttctgctccataaaactgcagccagccccactcagatgaactcccaccaataaagtcatccacaactgcaaagatggagaggtggcctccagccaccaagcatctccaagggatgcatccatttacgtacttgctcatatcctttgaaagcagtgagattagaaggaaggcagagaagcctggcagaaccatcaaggggcagcagaggacgtggtaggcactaggaagctaggcttaactgcagggggtaagaaatggcacaaactggggacatagaagcgggagagctgaagacaccactaaggtttttcctggaagttttaaatattctggaaaaatagtttagatacaattctaattgtcacattttaatttttaatacatgtataattttaagttattagaacgtttcacaagcaaa

SEQ ID NO: 100469 - DNA, 481 bp, Homo Sapiens
ttaaaaaggaaagcatacaatcttagttgctgggccagttcttctgaatcaatttgaaatcaccttttttctctttcataataactacttattttaatcaatgagtcaacaatcattagatattaacttattttttctagttaaaattttgctatctttcaaataattccaactcttacacacacatttaatgtacataactgtaacatatacatacataagcacaggttaagccagatctaacatgaatttagatatgccaagaaagccacatgaccattatttacataaatatgaccagtgttcacatttatcaaggccaatgaatattaaggtgattgcttcaataagaaattaggtgaagaattatttgttgaatattgtcaaacactttttttacctgttaaagttatttaagcctgacccaaataatttttaaactttttattctatcatgcctatagacagcttcatatattaa

SEQ ID NO: 100470 - DNA, 501 bp, Homo Sapiens
ttttcctcccccagggcatttaacagaagaaaattgatagcgttaacatttgagctaaccttgccgctccttgctgtgttttatatgccaagagaaggagaaggagacgctcagtaaatacaaatccgtgggcattcatattatttacattccttggagaccttctctatttaaaatgataagattattcaatcagaatggcgaaataaagagatcacttaatttgaccatagggaattctgttccacttggttagctcagacacggttctctgtcctaaccaatttcattctgaacagggaagacagctcctagcacatgcaaatgaccctcttccaactccggctccagcaacttcgggcgggggccagccgggtcggctgaatgcgagggggatgcgaccctggcctcccagtctttctgcttccctttctcagacacccggaagtccccgccgcagcccatggtctcctgcagggcagcttcggcggaccccggaga

SEQ ID NO: 100471 - DNA, 625 bp, Homo Sapiens
  misc_feature (32)..(32): n is a, c, g, or t
gtttggtctgggctcagtgggagacggcagtncaatcctgatgagtgatgtctgccaggcaccgtaagtttgattagtgatgtctgccacgggcagggatggaaggagcagtgtgatgtctgctctcttctctcccctctgtccctcttcaggaagaaagagctcattctgtctcacaagccaccggcatcctgtatcagcttccagcctcccctcaggctttccagtcaccagggacactcggagccacagcctagagccccgtgttccctggcctgtgcgtctgcccccttctgagatgcagccagaagctctgtgcctgctgcaaagattcaggtggaccctcctctaatctcctcctgctgtgcccgccagtccttgccctcccaccaggtctctgagctcagtcttaccaaattcgccctttaacagcttgctctggcaaccccataaatgacacctgagctccgtagaagctaagctcctgagacccagggggacctgccactggtaccgcggcccagcctggggcctgggggctgcccctcttgaaccacccacatgcttagccccagctttttggaagaggcaaatggctggtctgaggatgacacacaaaaacaaa

SEQ ID NO: 100472 - DNA, 590 bp, Homo Sapiens
ccagagtgttatatatatcagaaatgcacacaacagaacataggcaacaccaacacaggaagaaatagaagtcacctatgaaaactggaatggcccattcagaaagacaggagaattaggagagagtgagtgaaagaagccaagggtcaagaatgcagaagcaaaggaaggactaaaaagcctccacggacatcgataatcaagagattattaagatctttgctagaagagttcctttacctgtacttaactcccttaaaaagagaaaagtgatggaatgacttctgcaactgtagtcccagcaggaactgtgaagaccagctgccctgcaggatccagtttttcttgggaggttgtatctggtcataaggtaaacattctatatattctatgcctgctctagaattgaaagacttcagcagtattaaagcattttttaatcttatttgagctttcatattcttcaatggttcctttcgtaatacctgagttaataaaagtggtctgaaagagctcttacggtttctgatagaactatataggactaccttttaagattaaatataagcatctgtacgtaaatgtaaaaa

SEQ ID NO: 100473 - DNA, 473 bp, Homo Sapiens
tcccctttttgtccctttccccaagccaccaattggatggatgaatgtttgacggggaagaggaagggtaggaggatgcatggatgagtggatgagtggatcgatggatgtattgataaatagatagaaccagtcatctgaagcaacttaagaattgtagccttgactccttgagactgtagatttcgatccaggaaacatttatttagcacctgccagatgccagaaatttataccatttaaaactcagtaagtcttttaaatatcaggaaggagagaagcgacatcatgatacatcctatgggtattaaaaagccaatagaatattatgaataattttatgctaataaatttaacaacttcaacatcataaacaaattccttgaaaaataaaaagtaccaaaattcattcaagaagaaatagataccagcctgagcaacatggcagaatcccatctctacaaaacatcaaa

SEQ ID NO: 100474 - DNA, 494 bp, Homo Sapiens
  misc_feature (52)..(61): n is a, c, g, or t
ttaggcttcctggaaagaaatcctccagggaattagaatcagagtaaagaannnnnnnnnnctatgatcgttaccattcaacatgtagatttttcagtatggaacctctcactgttttgtggtgttggcatgtactatttctgctctcacctatgcctaatatcccagaatttgaagtctctccgtagaataagcgcttaatcctaatcagcagtcaccctgctacatggggtggggaacagtttccaaggctgtaactgctttttatacagattttcgatgaattctcttgttcttagttctatactcctttcccccaaacccacctcctggttcagaagtaaatgttatctctaattcttgaactattttagggtcttgacgtcctaatcagccaaattttgaagttttcatgccagagacatagatctcaactttccctagtctattaaagtagtaatttatgtgttttctggcctccaaactgctactgc

SEQ ID NO: 100475 - DNA, 498 bp, Homo Sapiens
atatagactaatactcgtttcacatatgtgttatttgttgagtgctgtgtgtgagatgggtgaaggttttgtttacacgtgtgaaacaaacttttgtgtgattgtcattactaattgaagggcaaccaggttgtaaaattcagcgtatttattttcttaacagtattcatctttaggactgtcgtttgaggatagcataggaatatttggtttgcattactgagaaactctaggtttgctgtgatggttaagaccacagtgaagttggtattaccagtttggttccagttcctcaaatatttgaaaattggcagcatctcctttacataaacttaatgtaactgaatcacatggcttttttgtagggttaaagtaactttggtaaccacttttggcccagatcactgataataggaagaaatacaacttatacttttgtagcttatattaagcatgtggtgggtggaaagaaaagtttagtctgagtcactttggaaa

SEQ ID NO: 100476 - DNA, 326 bp, Homo Sapiens
  misc_feature (99)..(99): n is a, c, g, or t
  misc_feature (114)..(114): n is a, c, g, or t
  misc_feature (132)..(132): n is a, c, g, or t
gaatattgaaaacattcttgataaaatgtgttagtccatgttggaaacaaccgaaagaacagaattcaagttctagttctgatgtttattatatatgtntggatcttgggcaancttacattgatttctcgngaaattcatttgttactgtaaacgtgaaagctattaagattcaaatgaatggttttacagcaggtaacatgtgagaagacagctacatatttgtaaagccaaaccaacaaagaaatatagcaaaattcacaggtagatttattacaagaaatgtcctttcatgggggaagtaacattttcactagtgaaaaagc

SEQ ID NO: 100477 - DNA, 287 bp, Homo Sapiens
aaaccaggtaacatcttacacgcttgcaaaagtgtgcatcacaccacaaacatgtccttgatggctggatccagaaaaggcttgatggcagccatgatcctgcctggcaggcagccccacagcttctctgatgttccttggtctgaaagacacagcttgagtcagtccttgtgcttgtcatctcccagggctttgtgcattttctcaaagaggaagccagtccaggagaggcgaggaggcagaaggctgtgtctcatgcagctttgccttttccagaatggggccag

SEQ ID NO: 100478 - DNA, 245 bp, Homo Sapiens
tgcggccgcttcttcatctcaggaatctctcggaccgcggatcctcagcccccgctccaccagcccgccccagggcgtgggtctgtttgggaggcctgggccggagcagagcagaggtgatccggcccctgcctgctgggccgcccgggttggaagggagggcagtgtgggcggagatctgctccttcggtgggggcctctggctcagatttggggccaaggaggcctctgtcattttaaagact

SEQ ID NO: 100479 - DNA, 421 bp, Homo Sapiens
gaagccataacttatcatggtctccaagagatccctgagcccagtctgttcagaatcatgatagaaaggaatgcttgattgatattcagctattcagtttgttaaaatacatttatgaaagaacaagggacactttatttagcagctatgcttgtaataaattacactaatgcaaaatatattgccagtgatcttttcccccttaccttaacagtacttttatttgtactttgctgaaagtgactaaattacatatatttacaattcatccatgatagcttttccgtgagactttaatccctcccttttgtgaaaatgaaataatgaagcttaaactatttaaaataagaatgttattcctccatttatttgggctttacttttccttcttgagaaagaaatatataaaatcatagggaaa

SEQ ID NO: 100480 - DNA, 926 bp, Homo Sapiens
  misc_feature (629)..(662): n is a, c, g, or t
ccaaccccctaaatcagaatccctggggttgggcccaagagtctccattttttgacaagctcctccaggagattcctccagacatggaaatcctcacttgactcttcccccataacaaactgccctgatgtctgcagagagagggtctgctgtagacagggattaagaaaaagcaggacattttcagataggatgcccaaacccagacgcagattaggacccatgaagtagggggtagagctgaccctcaggaatgtgcccagacagagcttaagctttcaggaaaattaagaaagaccctcagacccagagtctgtctgagtttagcttcgcagcatgaaggctgccttgagaaagctgatataacaagaagcagcagaaatttaatactttggaggggcccagcaacccactcagggccaccctgggagaccccacagaccccaaggctatggtccagacctgttcactcaacacctggccaggcggggcctccagctggacctagagctacagatgccccaccaccactaccaagcccggctacccagaccaagacacggcttttcctggaggagagagagagcaaaggccctgtctctacccaagacctaacggcccctgttgannnnnnnnnnnnnnnnnnnnnnnnnnnnnnnnnntcacagccaggaccacatacactcttgggggccctgctgagactgcaagagtcatgaattctaacgttccacaggtgaaagattccaagattctaggattgcaaaaccccatcattctaagattccaatggaatgattccatgtttctaagattccatcacactatgattctatgctgctaattcttgaaatttcgagtctcattgttcgttgctgttccccagacctgtgggccctagcatttttttaaaagcacaaaaaaaa

SEQ ID NO: 100481 - DNA, 528 bp, Homo Sapiens
  misc_feature (42)..(72): n is a, c, g, or t
agcaggagaatcacttgagcccaggagttggcgagacccctnnnnnnnnnnnnnnnnnnnnnnnnnnnnnnntgagcagaggcattcataggagccacttctcatcaactaaaacagaacccatgattatcatactaggtggagccaaagaaggcctcactgtcataagggaacaggcaggcagaaatgatatctccaaaaactgagctcagcaacttttaacagtaaatcagaaacattacttcaaataattgatttcaatatttagtcttaaagaatttatggcattctgtaagagctgctgggtaattctgatactctctagtaagtatcaattaagatactgggtcatttttctatttgtatgttacacaaaacacattttactgctatgcaaattattcaaatctcaaagtaaatcattttggtgtaattcgctactgttaaatgtgtactgctattttttaaagtcctgaatatatatactttgtgtagaagtcaagacaccttgaaaagtgatgacaatac

SEQ ID NO: 100482 - DNA, 903 bp, Homo Sapiens
  misc_feature (106)..(232): n is a, c, g, or t
atctttattctaacaccaaatatatggagtttgctgaacatcaaccattctccaacacaaactgggtgtccaacaactcaattctgaaaacacccaggtcagcatnnnnnnnnnnnnnnnnnnnnnnnnnnnnnnnnnnnnnnnnnnnnnnnnnnnnnnnnnnnnnnnnnnnnnnnnnnnnnnnnnnnnnnnnnnnnnnnnnnnnnnnnnnnnnnnnnnnnnnnnnnnnnnncctcaagttaaaggatttgataaaactactcacagaacttggcaaaaacactttacctatgtttactagattattatattggatacaactcagtaaatgctaagaggaaaaaacacataggacaaagaaaagcagggaaaacatgatgtgggcagtgaatcatggtagttacgactaacatctctcaaatcctttgtgttctgcaagaaaagcttactgcaaagaaatacccttttcattatgacttttatgatactccctctttaggtatcacaaattcacagattctacattctcatttttccctcataaataattaataattttgtcttcagtgttcagaatacttgttaaccaaactgctcaagtttctctccttctcccaggcccctggactatgctccaccttcagtctaagccagcatacaaccctcttgatgcccctcccaagaacaggctgacttcagggtgaaacattctctaatcttgaatctgattttgccattctcattctccattctgccttctccctcccatcttccttctaatcgtttgatcctccatatgaaaaatcacccttatctgtctcattttggaggtgcttgcagatcttgtgcttagtgctttttccattgcaatactccttaaaataaagtcacttcttacctaaa

SEQ ID NO: 100483 - DNA, 561 bp, Homo Sapiens
attctaatatttttaccatgcattgaacgcaacaggagggtatttcagcaaattcacgacaaggtaatcgtcttatcactttttgtaggccattaatggtcaggaaattgcccatactctgtcattattgtttaataaatcattaaattatttcattaaaaaagaaaaacaggtatggtcaaacgaggaagcatatgtgacataaaaaacatgaaggatatcttattttcactatttgagaagaatatattttatttttagtactgtggcataatatttaactttttataatataactgtatgcattatgtagtatagcttttaattgtatcattcatcacagttatatgtaaaaataattgacatgtatatgccataccatgaagcatatgatgttgtgcactttctcctccatttttcatttggaatacattccacaacatgatccaaaacataagaacttacgacttgtaactcgtttaaagccattaattgtgcagtaatgtgctaccggattcaatcagcttctcttaagaaacaagtgtcattgtatcagtttcc

SEQ ID NO: 100484 - DNA, 536 bp, Homo Sapiens
tgcccaccatgaagggaacctgtgttatagcatggctgttctcaagcctggggctgtggagactcgcccacccagaggcccagggtacgactcagtgccagagaaccgagcatccagtcatctcctataaagaaattggcccctggttacgggagttcagagcgaagaatgctgtggatttctcgcagttaacatttgacccaggacagaaagaacttgttgtaggagcaagaaactacctcttcaggttacagcttgaggatctgtctcttatccaggtggccctgtttgttccgtggatgtgatcctgatttgtccttccttagatgacagaccattcaaggaacattgcttcaaagcctggacacattccttcccccacagttacagcaatcatcgattatttagtttgatgcatccgggcatcaatttcttgtaaaacagctttgtttcctctttataatttatattaacataaatatgaatacttgggttaaaagctatctataacaaagaataaagggaaatagatcaaa

SEQ ID NO: 100485 - DNA, 473 bp, Homo Sapiens
agaaatagctggttatttctaagccttagaaggcataactataaatatttttcacaaaggaaccatatacaagggaaagaattcagccaactcttgtggatgggtgaggtcactaactagcttggctaccctcttttgagaaacactttagtacttttggggtgtggtcaataaaaaaaagaacttaactgagatcagaagattgaacaagggtgatttattaaagatttttctccttccttctttggtgccaactttttaaacacgcggtacatattaagttgtaattgcttatttcccatgtctgaacaaggcaggtggttccctaatattgcatattaatcctaattcaatttattgccttacaagtaaaatttggccctaaaatgaggatggcaagtaaaaattcgaaagttgatcactaatattattttcaactattgctttaatattattaaaaaataaattccaaa

SEQ ID NO: 100486 - DNA, 344 bp, Homo Sapiens
tttcttgggcatttgggggtggcttttaatgttggatgtatgtcaacaccaatggagccactgcttttctgggacaaaagaacagtccctcttcctcaggaaaggtccaatgtgtccacacatctatccccatagccttctatcatgagagagcccctcacagatccagccactggccagtgacttgctgtgaatgatgccaagtgggagtgtctgtaccctgcccaagtctgtgtggtttcctatgctctccttctttgccatcacataaatttacaaatataatgcaagcatgtttatatacatgttcttttaaggtaagaaaacctcatcatgagaaaaat

SEQ ID NO: 100487 - DNA, 471 bp, Homo Sapiens
tagatcagggccaagaatttcctcttggtcggcaagatgaacataaggtagagctggcctccagagctctcatcacccccgtgaaatcagctccaaatttagctcctttacactcatccctctgcttacaaaggctcaattatagacgtgaataaagggaaggaaaccaaattcaggaggcaagtgtgttggcttcctgccaccctcatatgcaaacggcaccggtcctcctcctaaggaggatggctcctctccagtgagaggctgccgccgccgctgctgctgctgctggaattaaatttccctctattattaggtgcttgttaccataatgtgcccacattagcataagtgctggtgggatcctgagctgagaggccactcatgctgtatggaaaagacaaggagcaagggcttgccttaaacctgatcttccagagcaaaaggctcttccagagcaaaaggggggat

SEQ ID NO: 100488 - DNA, 538 bp, Homo Sapiens
ggaatcccagtgattcaagatgcattggagagaaatacagactgaagataattggttacccatctagaaagagatatatgaagtctgggggtaagacctgcagtaatttcccttaagttactgatcgtggagcctctccaggactacaggctcttcctcagcggctgccaagctcctcttagggaagccggggaacttcttgaatgcccaagtataccctgctggaggcacaggaatcctcttggaagctttgtctggacatgctttaataccgtccatttctactgttgccataccaagccgctactggtcaccactgtaaatctttctgctgttttttataaccacaaagtatagcacaatttctgtctgctttcatgcacctaaaactattgtggtttttgcctttcccggtctcattagctaaaacaaagagttgataaaggcacaggccctttctcaagaaacaaaatgttgtctgtcttctttctgcagtgaaacagaatgcaaagtccagaaataaacgtgtaattaaaaa

SEQ ID NO: 100489 - DNA, 386 bp, Homo Sapiens
atcgggttgctccgcctgcattctgcccctgtggaggagacctctggttctgcaactgcctgggagagtctaagtcggtgatggagagttaactggcctggtggacacatacctaccatgtcctgcaatccagcttaaagcttacactttaagaaacagaataacaagaatagattctagagctgagtttaaaccctggctccaccactgataagctgtgtgaccttgggcaagttgttagctggcacccagacacattgagaagatggtcatctgaaagccaggaaaagagactgctccagaacctgaccatgctggcaccctaatctcagatttccaccctccagaactgtgagaaaatacatttctgatttttaagcccccaa

SEQ ID NO: 100490 - DNA, 543 bp, Homo Sapiens
tgcagatttgtgggataagtgattctgattcacatggctggaatgaggcccagagattcttattttaacaatcacttcatgtggtttggctgcaggtaatctgtagaccatgctgaaggaaaacattttgtccaggtgactagcttgaaaaatcagaaacactaaaatagacatgtcacataggtggcatagaaatattttcgtagtacaatggagaaagggaatcattaaaaatcagagtggagaatggttatgtatattgtatatttcagttagataaattgaggaagctagtataataattattgaaggtctcaataattttccacaaaattctttaacttcttcagctcaaccatttctgtacttctctactatgaatcagaggatgaggttgtataattcaaaagcattgccttagtctagaaataattattgtacctatcatttagttttagaaataaaaagcaagctgattttttttgatgaaccatttatatctgtgatggaataataaaatttcacacttccggattcaaaaaa

SEQ ID NO: 100491 - DNA, 511 bp, Homo Sapiens
tgcggccgccaacttttaaaagtgaaaagtctggagctggagcagccgccggccagtcagcatcagaaatccatgcacaaagacctggctgccatcttggaagagaagaagcaaggagggcccgccattggtgccaggattgctgagtattcccagttgtatgaccagattgtattcagggagtctcccttgaaaattcagaaggatggctgggccagccctcaagaatcctccctcctgaggtctgtgtcaccttcccaggtccaccatggtagtggagactggcttctgcattcaacctatagtaatggagagttagcagatttctgtctcccaccagagcaagacttgaggtcaagatatcccacgtttgagatcaatacaaaaagtactcccaggcaattgtccgcagcttgctctgtgccttctcttcaaacctctgaccctctgccaggctctgtgcagagatgcagcgtgggtagtaagtcagcccaacaaagagaactggtgt

SEQ ID NO: 100492 - DNA, 403 bp, Homo Sapiens
  misc_feature (214)..(227): n is a, c, g, or t
ccatgcccagccggttaataattcttaatcagtaaatcattattcaaagacatagttaatatcttcatgacttcttaaggatgctcaaaagctggtcttcagaatacctacatttctttatctacatattctgtcatttggagttatacaagtagtaatgacacaccaaaatgtaaataattattgttagcttttaagttggcttccaaattcnnnnnnnnnnnnnntcctgaattctctaaaggaacatatgatagagtccatatgttaattcataggaagtgtttaaggtactatggtctattttggtctaatctttgttttactatgtaatatatatttatgatttacaagtttgttattcagtgggataataaatgaacacaaaatttatgttctcaaa

SEQ ID NO: 100493 - DNA, 258 bp, Homo Sapiens
ggaatctctttggctctgtgaggcaagttttattctttgttcatgcctgctaagtgccagtaattgtgcccatgttgcagatggataacccagaactcagataatttatgaagtatccaagatcaaatagggcataaatgacaggaaccaggagtcaattgagatttgtaacttcagaccccacactcttccatcttccaccttgactcttgtgtcttatgtgtagcaggtgctaccattaaaattgaggagtttttt

SEQ ID NO: 100494 - DNA, 530 bp, Homo Sapiens
ttttaatgtcaaaattgcacaaacatggcgctctaccaggaaggattcgaggtagataggctcatgccacactttaaaaacaaacacacaaacaacaaaaaacgggtattctagtcatcttggggtaaaagcgggtaatgaacattcctatccccaacacatcaattgtattttttctgtaaaactcagattttcctcagtatttgtgtttttacattttatggttaatttaatggaagatgaaagggcattgcaaagttgttcaacaacagttacctcattgagtgtgtccagtagtgcaggaaatgatgtcttatctaatgatttgcttctctagaggagaaaccgagtaaatgtgctccagcaagatagactttgtgttattctatcttttattctgctaagcccaaagattacatgttggtgttcaaagtgtagcaaaaaatgatgtatatttataaatctatttataccactatatcatatgtatatatatttataaccacttaaattgtgagccaagccatgta

SEQ ID NO: 100495 - DNA, 356 bp, Homo Sapiens
taccagttagagttagattgttatcagcttaaaatagcctgttatcactataagatgggttttgtaagtctcatggtaatcataaaggaaaagcctaaagtagattcacaaaagataaaaagtaaggaatcaaagcataatagtacagaagataatcataaaggaaaggagaaagagaaagaagcaaaagatctacaaaacaactagaagcaattaacaaaatggcagtaggaagttcttacattacatgtcggtaattaccttggatataaagggattaaattctccaaagacctggagtgactgaatggattttttaaaaaagagccaactatatgcttcccacaaaagacttg

SEQ ID NO: 100496 - DNA, 449 bp, Homo Sapiens
  misc_feature (138)..(138): n is a, c, g, or t
  misc_feature (160)..(160): n is a, c, g, or t
tgctggtctcagtgtccagtgataatgaatctggttcaaggcagcccaggaggggggcaccctttaactgacttcccagatcgtggagctcaggaggtatacccattcgccgacactcacctgtagccacctcactanaccattcgactgagcacacttntcatatttgtatcagcttttgtgctaaaactctctaagtacatccacctgtgtaataggaacctgtgaattgtactggatgattaatacaaacgtgattgttgtatttggagtataaattactgattgtatgtgacctgaaaattcactgctataagaaaggtggagtcagtttgtatcagttaataggatgttcatattccaaggatattagttgtttttttaatcatcctatatggctaacattgtttaatgaaagtaataatcaataaagcaatagaatctaaaaa

SEQ ID NO: 100497 - DNA, 635 bp, Homo Sapiens
tggctgcaaactggctctcaggtgcagggctggtttcctcacatgagtagggactgaagccttatctgggagccagtttgcccccagttgtttcaagaaataaagtgtcctcttggtcacagacagcagcagtaacaactttttcctgcggactggcagcattttccaagcacctgctcttcaagtgggagttacgggtcactgtcttcattccagacgggcggctctttgagtcatggcatgccagcttctgagtggctgaggactagatccagacaaggatttttcagtcccaaacactcttccttccctcagaagtcctggcatggttcctttcatcttgccacagccactgataatcactttcattttctgtgtaactcaccaggcaagaagtccatgcagatttacttttagtagttcacatgacaaataaatactgcgtttgatttccaaacattaaaccatagtatattatagatagatatagagttatcattcaaagtatgatatttcaatctcaaaaggcttcccctgaagaatattacaaactcttcctctctttaagatctgctgggtaggaaagatgggagaaaatgaattaatgtttacacagaaaggaggataatgggggc

SEQ ID NO: 100498 - DNA, 449 bp, Homo Sapiens
tcaggtgtcaagaagcatttgggagtcaaaaagggtggaggagattggtgtagggatttggctaaatctctgggtgagcagcagggggcgccctgatcagggcagggaatgttgagttggatacacagccataagggggtgtcatggggctgtgggaagtccacggactctgcctcagaagggaaattacttgatctctgtatgcctcagcgtcctcatctgcaaagtggacatcagagctcctacatttattagcctgagaacaaaaatcaggcagaataaatgaacaaccacagcagcaacaacaaacaagaacaagagccaaaagcaaacagagagatgagcccttatatcatcggaccctgaaatccagccaccgttgaagccaggtctacccctctgatttccaagacaacagaaatcaatgctttttttcattaaaagccaaa

SEQ ID NO: 100499 - DNA, 698 bp, Homo Sapiens
  misc_feature (548)..(590): n is a, c, g, or t
aagttggagtaacagcaccttagagccctggataggatgtgtatcacgtgcctatataaaaaatatttctaaatgaaacttagtcaatcgatacaactgagaattgttagctatggagtatttagctgattgaaaatcatggctacaatattttgtagctcctcctgcgaagaggtggagtctatttccccaccttcaatctggcctggcgttatgcttgctttgatgaaggaaatatgacaaaatgtatgttgcatgagttccagaacttaggcataagttgctttgtagcttctctctttgcccacccactcatagcatcctccaccaccatgtaaggaagcttgggcaagactaatgaatgataaaagaccctgtgagagagaggcccagtctatagcccgcattaggcttcagacaggtgagtaaggccatcatagaccctccaaccccagtcaagctgccagataactaacgtctcatgagaaagcccaggcgagaccagcagaagaactgcccagctgagcttagcctgaattgcagacacnnnnnnnnnnnnnnnnnnnnnnnnnnnnnnnnnnnnnnnnnnnagcaatagataagtgatatagtatactctgtataattagaatttatcagtggccctttcactgactctctgcatatttttgatgtaaagaaataaaacataaccagag

SEQ ID NO: 100500 - DNA, 478 bp, Homo Sapiens
tttaaacacagcaaaaagccatttctcaggtttgatccgattactgtgatctattttttgatcctgtagccactgactccagatacatctttattactgtacaaggaaaactgttaccctgaggtttaaatttccgtatgttcaccatgcctcttctaagaatatatatatctcagttttaagacaagcctctcatgaaagctgaggtgaagaggaacagatgacctcagagataagtttcttggtttgttgcttcaactctaaagtgacgatatagcctcagcaatgactcaaagtctaggtatcccaggactgtgaagtgattaaataaatggaaagagattctcttatctggactgctagactaaatctctttaatgattgcccaacaaccaagtatgaacaaacacactagaagtcattccttcaagatacaaaagtcaggcacgttgatagctcttcattcattatgggagaa

SEQ ID NO: 100501 - DNA, 540 bp, Homo Sapiens
gaggtcaccacacaggaggaggagctggtaagggcctgcattgcccattaattttgaggatttatggtaccctggaaaccaaaaggacctttcggccagacaccaacacatctctcaggagcacaacacagggcagaagcagccgggatgtggggaccgcgggctgtaaactattaatgcaagatgccaggggcagcacccaacctccagaggtttttcccgctgatctcagtgaaaggtaggcactgacagtatccacagtgtgagagggcaggggctccttaacagttacagatctctgtatgcaaatgaaagtacacaaagccagacacttaggaagaaggcgcttcaacaggcacaggtgttactgcttaagccaagacagatgagtataatgtagagaaaccctgtattacaggagggattaagccagaagggtgtttgtgggagggaatgaaccttcccttcatcaaaaatcactgcaaactgtgtgcataacacccatctgtgtgtttaaaataaaaaatttcatttactaaa

SEQ ID NO: 100502 - DNA, 551 bp, Homo Sapiens
  misc_feature (168)..(180): n is a, c, g, or t
aactactgtccttatatattatatacattgttttatatgtatagttagatttgtttgtccttatatgctgtgtacatttgttttgtcactatatattatgtatactgttttatatagatagatagctacctatatataaaaattatgaaagaatggtaaagttgtgannnnnnnnnnnnncccacacactccactttggggactaccattgtaagcagcagacaacacctgggtcctctgaggtattagtagactatgagcctcaaacaaaagtttctgcaataaaattccataattccttgatttgaggagacagtggataagatgcactacagcttaataatcacttctaggcacacaaagaataccatcacaacagttgtacacataaattgtaaagatttatttctatttcagaaactgtgaaattgtgtgtctttgacttatagaaatgtgataagttgaaaaaatattgacttatataaagttatacagattacttacaggacttcttagagtttttgatatttgaattggtatgctgaacattg

SEQ ID NO: 100503 - DNA, 473 bp, Homo Sapiens
  misc_feature (355)..(384): n is a, c, g, or t
ttgccctaatactatagatgctaatacagtatctgccacaggtataaaacttgtagatactgtcattcaattaagattcttatctgtacagatatacaaatcagaaacttttaaaataaattgaactaatggaattttggctccaatatttagtcactacaatggaaatattaaagcaaggaacatgaagtcattgtagggttttaaaatggctactgactgacatgaattcagagtttcaaacagtctaaattctaaaaacttaactttacacgcttttcctcctaaataaccactctaataattcatacattcatatcttcaggtaaagaaaactgaattttaaacaattgannnnnnnnnnnnnnnnnnnnnnnnnnnnnngaatataaggacttgagtataaaatttgaaaactacatggggaaatgtctgtatcatgcatctcttgatagtctactgaaaactattaa

SEQ ID NO: 100504 - DNA, 665 bp, Homo Sapiens
ttctcaaagacctgggagagagaagtgtccaaggcacctgctagagttttacctaagcaaaggggtgggaaggtattagcgctgttgactaagatggaaaacacgggagaagaggggcttgtggagaaaccacacctccattctagccacgtccactgcgaatgcaggtgacacatggaagcggccggaacacccctgagcatcttcatggagtttggatcaagatggaagaaaagcccatgcgttgtctaaggctgcctcatctcagaagccaatgggcggtgtaattagtgctgaaaggtgggctgggggatgactgcattgctctagcaaggaaggaggagcagggagctgaagggagacaggtggaggaggccaagcaactggctaagcccatgagggctaagggaggcctaaaatgcgggacattggagaggaaatgttctggaagcttctacaggcaaactgcattgtactggaaggggccgatgaatagtgctgggtcaagggtttttaagtggaattgagaataagggaagcagaaaggtggtttgaagaggcgaaaaaaggaaaatggactgaaccgaaagggccttgggagtgttatgggattggagaacttttcctaaataatttaggagctccagtagaatttatgtttatgt

SEQ ID NO: 100505 - DNA, 483 bp, Homo Sapiens
cagttccaccctggctgctggtactactctaataatggaaaaaaaatttaaaagattggggacaacaggaaacacattggatcccaaggggaaacggcctggaagctacagtagagacatgggtgacccaagggctctgttcaagtcctggggctgttccctttattcctccaagcctcagctccccggatttaaagtgagaacagcacccagcccagcccactgtcaagggctgttgcaggaatatgacaacagccaccaatatttgcatagcagagatgcccagtttcattttctatttgaaagtttctctgaagggggatgtgctagagacacgagaacaactgctaccatcttaataacttttctggcaatacacgacgatgattgtttatgttaatctcataactattaacaataattcatttcattctcataatgaattatatctatttgacttataataaatagaatcatatcaaa

SEQ ID NO: 100506 - DNA, 369 bp, Homo Sapiens
tggtgggaaagattcgggtggttgaaattgctgtgattatagtgagtgaggtcttgaaggcaggttaagttctaaagcccgaacaggacaaaaatctctgatcaaaataacccttaagagtccactcattaggaagaggcttggtgaatatgcagcaccatctcccagcagctcaacataggcaaccttcccttcaatcctggacagatatgtcattcatgtgaatgtggggactatatgaaaatgaaaaatactggcatctcagcatgtaacatgttaatcccaaggtccttgccaagagacaaggaaaaacacccactgagaacttcattcccagtcacattctgctcaaggtcataaacttgtaaa

SEQ ID NO: 100507 - DNA, 548 bp, Homo Sapiens
tttcttttttcacaagtatataacactttagagtttacagaacactttagatctaagctgtttcttctcatatcataatgaagttacctattgaagtctaaacaccctaaaagcgcatgagtctgataaggccagtgtcttactaatttttggatcctaccatgcctaggcaagtgtacttaacaaaagtttgcttgcattcatcctctcaacaaccctgacaggttggaagaagtggtattatcctcgttttttagctaaaaaatccgagacctggggaattcatgacttacccaaagtcacggatggcaactgacagacctggggcttgaacctcaggcttaggtcttcccattgagcactcgggctgctgccaaagacaggggagaatatagagctttaaatccttgaagcaaaggagctgtaattcaaggatttacaagacatttctgcatgacagaggagtgattaggatttgtcttcacatgggagtctccctgtattgggtgaaccttcttagtcttgtcaatataaagtacatgcatacc

SEQ ID NO: 100508 - DNA, 549 bp, Homo Sapiens
actacataaatcttggcttactatacataaataaaagttatacctcaccaactgtcccttgtctcagaggtataaaaccaaggccttaaactggacagagagtctagtgcttccattattctggtaatttaggaaacatatttgagtgtatttatatttgttaaactctcaaagttgttcgctaccaacaataggtgctctttcaactcacaatggaaagggagcaaacgtctgcgtagattagtggacttggagaatatatttgtaaaattggcatcacctccaaagttcctaggaggagataagaatctaaatggcccatggcataaataataagtttggaaaattattatatcatcaaactctgcatgtatttccttctccacagtttccaataataccacttccttgcctggatctatgctcctgtgtgacatgatgaacaagctgcagtacttgtgttacttctatcctggacataggaacaggtgataggttaattataccttcaagaagaattcttttcttgctgtcaaaacagtagtgaaa

SEQ ID NO: 100509 - DNA, 569 bp, Homo Sapiens
aacatctctccttccaatcgatgagacaaatccagatttggaagagaaaatggaaagttcttttggttcaccatctaaacaagaaagtagtgagagtttgccaaaagaagcctttctggtcctctctgatgaagaggatatttcgggtgaaaaagatgagtctgaagttatatcgcaaaatgaaacgtgctctccagcagaagtagaaagtaatgaaaaggacaacaaacctgaggaagaagagcaagtaatacatgaagatgatgaaagaccttctgagaaaaatgaattttctagacgaaaacgttctaaatcagaagacatggacaatgtacagtctaaacgtcgtcgatatatggaagaagaatatgaggcagaatttcaagtaaagattacagccaaaggagacattaaccagaaacttcaaaaggttatacagtggttgctggaagaaaaattgtgtgcgctgcagtgtgctgtatttgataagactctggcagaattgaaaacacgagtggaaaagattgaatgtaacaagaggcataaaacagttctcactgaactacagg

SEQ ID NO: 100510 - DNA, 549 bp, Homo Sapiens
  misc_feature (497)..(497): n is a, c, g, or t
tttcatgattacaaagggaatagattacaagtatattcccctctgctaaaagaaatcggcccttaaaaaagaggtccagcagtcttcatattctctctcacaccctccagcagtgggttgtgctgctcctgggaggaggctgagatcactcacatattctgtcaaggaaggaccacttagtggctgtcaattagcaacatccaaggtttccaggagacccgtcttctaaaaagtgagtctattagactagacaggacaaaaagctatttctgtctgtcttggggtatagggaacccacggttttagaccttgacatgactgtccaccagtttccgtgtcgttcacagccacattaccatcaacacaaattaaagcaaacaatggttaaaatatctaggtcagaggctcaaagggtttttttccaacaggaattgggtgacaaatattatgcctcactgttcaaaggactccatctggccacaaatgataaaatactntcttgcctgagcaattgtaaagtgtcaactcctgcacccaaatgtgtaactg

SEQ ID NO: 100511 - DNA, 510 bp, Homo Sapiens
tttattgctgaataatattccttgtatggatatgccacgttttgtttattcacttgttagttgatagaaattagggctgtttcaattttgggctattataaataatgctgcaaagaacatctgtgcacaagtttttgtgtagacatttgtttttatatcacgtgggtatccaccaacagtgcatgagggttccaatttctctgcatcctcaccaacacttgatattatcactttgattatatatctattccagtgagtgttaagtgatatctcattgtagatctcatttgcatttccctgatggctagtgatgttgagaaccttttcatgtgcttattggccttttgtgtatcttctttggagaactgttaattcagatctcttgttgatttttaaaaattgaattatatgccttttaattattattgtaacagttctttacatattctaaatacaaattcctcccttaactaatacatgattttaaaaaaattatctcattctgtgggt

SEQ ID NO: 100512 - DNA, 674 bp, Homo Sapiens
tcacggtggagacggacacgggcgtggggcggccgagacctgcacggcccagcgggcaccggcactgcggggtcttcgttctcagaggattactgtttcatattgaagctctctcttttgtacattcagagtttgatgcatttctaatcaccgtgatacgtcgatcccttaattgttttaattatgcaaattacttgtaatatacacaaattatcaatccactgcaggactgtggggaagcaggaacgggagcctctgtaacaatctcaaggcatttgtgtcatcacctaagacgattggcgaaaacttttctgaaaacctttgtgaattacttcgttcctccaggattcccgcagtgttgaggaattccttactctgtccctaggtctcagtctcgtttctgagtagcagcaatagggttttcatcattcatcatagtgacaactgtgagcattccacacctggaccgtggatcacttacaggtttccaagggtggccgcgcgttcctcccagaggggcgtcccggcctggagcagggagccgtgttggttgccaccggtcctacttcaaaagaattattttgtacaaaatcatcatattaatatttgagttatttttattgtatgcccggagtttgcatgagattttttctcatcacctttgtataaaaaat

SEQ ID NO: 100513 - DNA, 502 bp, Homo Sapiens
tgcggccgccaaaaactacaaaggaaggagattcaagggcagggagcacatccccagccagcatcccagtgaggaccccaggccaaactaccgcagaaatccgaagcccagcattgacttggggcacaccattcatttttttaaaaaaagatttgttgctttattagaaaatcctttgagaaaacagcctccactgtttccattgcagattcgctaatatggtacgttcagtaactttgaatgaatgatgagaagttattgggtggtagagggggttatgtaatcaacgaatatttatcgagagcgtaccatgtgtcaggcattgtttctgtcactgggatgccctaacaaaggaaagagagactctgcacccactccccccgccccgcatatttaatgttgtcaattaaagcttcttacctaagaggcctatcatttgtgagcacccatcatagtggaaatcttaatgccgtagtgtctattcaacaataaaaacatcttt

SEQ ID NO: 100514 - DNA, 545 bp, Homo Sapiens
tgtaaatgctggaagctatcctccaagcctttcctttttctatagcacttgctgctaaggataattatatggtttctcatcaacagaatgtaaattctcccagtgcccatgaatacatactggcccagaggaaaacaggtgagaaatatgtcaaaagaacttgtaatacaagccttcatatacatggcaggggaaggcctggtgcctccttttcttacaaaataggaaaaatagcacctaaacctgcaggtttgttgaggctcacactgtttagaatggcattgaacaaacatctggcacaggaaatgcccattataagtcacctgtttccatttatgtctcaatctcaaatgtggtgagacgtgccacagcgattagtatggcagattacaggggctgatccccatcttttactcacaaccctgtaactgtttcttcttgataaagtaatggtgatagatagggacactacacacaaaccattcatggattctcccctaagtctgtgcaatcgtccgtatatgtattaaatctaaaagcaaaaa

SEQ ID NO: 100515 - DNA, 332 bp, Homo Sapiens
tttttctataaatacctcttgtttttattattaagacaatgcagacataaaacacttcatactgtagtttctacattgcagccaaaccacttatcaatggccaataaattacttcactcctatgatagatacaaatgctcgattcaagttcaattaatagaatagtgtcaggatatcatgcagacagcttgcataaatactcgaggaataatagcataccttcagtagattctgtgatttttaagcatgaaaactttgtcttattccaaatttcaaaagatggaataaagaatgttttcatataaaatacatttggaacagttttccttctt

SEQ ID NO: 100516 - DNA, 511 bp, Homo Sapiens
acaatgcaatgaggagaggtgacctaatttgtgcctgtgaaagccaatgccacaaattagagttggcctatgatgacgtctatggtgaacccaatgctctgtccacttaaatgagagctgccagcttcaatgggggctaataacagtgtttacggaaccaggcaaagcagaaaattgagtttgtgtttacttttccccccaatatgctttagtatgccaaaatgccttaataacagctgggtggttgaagcaaagcaggcctcccaaataacaagggcattttcagaatcaatgtgggccgagcctgtgaggtccaaggagaggccttcatctcagatatgtaactgatctgtacttgacctgtgaatttatccccatgttctttaagcagctcacacccttccccacattccattcaatatcaccagactagattgtaccgtatgtgaacgatttaggaaaaaaacctgaaaccaagaaagttgaaacaaataactcacaacaggggaaa

SEQ ID NO: 100517 - DNA, 463 bp, Homo Sapiens
tttcagactagtcaagtgcagcagtgagaagcggggggaagacgacaacaaagagtacgatctgtaactgactgaacaatcaattaacataactcactaccttccaaccagccgattatgtgtcttatttacaggaaaaactacaacatatttctgttaacttaaacctaagtatatggtaggaatgaatgatacagagaaatggttgagtgacaatagcaggagactttggcctatgtaaaacaattaatatggaatttatagaacctaataataaatgtactggcaagggttaatgaaaatgtttctcttaagaatctgaaaatgtttcagaaaatataaattcatgaacttacttctaaaatgtttttaacttgaagatgtaatgttagtatgtcagaagtaaacatgaaacttttaacttcctcctccttgatatcatgcaaactatgctactgagaca

SEQ ID NO: 100518 - DNA, 255 bp, Homo Sapiens
gtgtgagccactgtgaccagcttggtctcttaagcttcctgtttcatgcattctatttaattgtggtcattgcttattagcattttttggagacttagctatgtatcattttctgaaagctcttacatacagacttggattattttcatagaatactgccaaaagggtgtagtgaacagcaatcatgttggcttttcaattatgtatttattttttcatgaaaactttttttaattccaaaaaaagttggcggcc

SEQ ID NO: 100519 - DNA, 348 bp, Homo Sapiens
tccagaggctcaggccactaaaagaataagatttaatcataaaagtataaacagattctcctccaacactttactaccacatcaacagggctccagtataataacagaagattataagtgagagagctacaaggcacagaacctatttaaggagttcataaggaaacccaaagacaataggaaaggagagaaaaaaacactagagaaactgaagtctctggcacctatagctacaataagcattaaacacaacccagctcctagccaaattaacataaagccgcataataaaagcctattacctgatacataatatctctctttcaactaaaaaattacaaggctaaa

SEQ ID NO: 100520 - DNA, 560 bp, Homo Sapiens
ataggagctgtcattcattgccggtagagatgcaacatggtacagccactgtggaagacaggtcagtggtttcttataaaactaaacatactatacaattcagcaatcgcactcattggcatcaatacaaaggagcagctttattcacaattacaaaaacatggaagtaaccagtatttccttcagtaggtgaatgtataaacagcagtacatccagacaatggaagattattcagtgctaaaaagaaatgagctatcaaacaatgaaaaaacatggagacaacttaaatgcatataaatatgtgaaagaagctaatctgaaaagactgcatactgtatggttctaactatatgacattctagaaaaggcaaaaacagacagtaaaaagatcagtggttactaggagttaatgaggagggagggattaactggtgaagcacagaggatttttaagtcagtgaaactactctgtccatactccagtggtggatacatgccactatacatttgttcaaatctgcagaatgtacatcaaaaataaatcctaatctcaactaaa

SEQ ID NO: 100521 - DNA, 312 bp, Homo Sapiens
actgatggaaaaaataagagtaagctaggttggatgacatgtgaattttggtatctagataaggctttcgccatcttttttgtacaacacagtcactaattgtctgaaggtttaaatgacggtctatgctatttccccactccccccaaaataaaacatctaatattttagctatagaatcactaaggcattgatcaaggatgtactttgccaaataagtatttggtaacatcacttaacaagttgatcgtgtattgattctgttaacatatgtgaacctgaaaagtaaagttaccaaaagcgatttggaaa

SEQ ID NO: 100522 - DNA, 513 bp, Homo Sapiens
ttttttttaaagggcaaaacaatatagctgtttattttacaggctaaaatatcaagatgaaaagctctgatcccaaatcatccattttacctatattctgtcacttttactaaaagcagagttctactcatcccagtgaaaaaaacaatgaattaaaagtaatttctggcgttaacccaagtaccgagttaagactccttaagaatatagaattatgtaatcaacttagataattcaaagcccaatgatataactaagttctttgacgattgagcacacattgtttccttacttatctttaaacattcctagtccaattactccctagcataataccatttataaatgaggatgagtttacaatggtttctgtaaccaaaaagtatttctaatatctgtcctctgccacatatttttaaattatcttttccattagcagaaatgggcaacataagcaataaatcatgttaagtctgttgctacaaatttactttgccaaaatttttgttcaga

SEQ ID NO: 100523 - DNA, 340 bp, Homo Sapiens
caaagaaactaagtaagtatgattatcaattttctccttcttaaattcctccatgatttcagagaggacattatataaggtataaaatatacgcagacatggaaaaatatttttttcaggctagtccactagaagcagtgggaatagagccaacaattttaaatggtcactagtttcttttttcaaaaacccagatttaggaattctataaagaatatgattgttaaaaaatatcgctgactttagaggaaaattatgtgacagttttcattaagggtgtcatttaaagagcttattattctctaggtcagtaagaataggctaaaagttggcggccgca

SEQ ID NO: 100524 - DNA, 416 bp, Homo Sapiens
tgcggccgcagatcccgatctggaaagagagaagcaggcaccgccactgggactctggggctgctgggaatagcctctatgctagctctgggtgtgtgtgcaggtgtgggaggtcacagggtatctttttggcctggttttctgactagtttctctttgcacaccacacctttgcccttgtttcctgcagtgggtccagagagggcttacacagggaccggcacgcaagtgcaggcatggatgtccatttgcctgggccttggtgtgggtctgggtgtgccgggtacttggctgaaggagagctggggggcagtggtgtgtctctatgggcatgggtgtggcaggaggacacaggggcagctgagagtggtatgcatggatgtgtctgtgtgccccgccctacaatggagccacct

SEQ ID NO: 100525 - DNA, 437 bp, Homo Sapiens
agagatgtgccagcaagggactcagcgagacggcgacacaaatgtgccgacaaacatatacagagacagacagagataacccaggcaaaggcgcggacttgaggcgacaagctcctggtgaatacccggacccagcctcgccgtcgcccccgtcgtccagcaggggtcgctgttacccagcgaccgcgccctccgggaccttggggccagatactggccaccaccccttgggaagcccttctgtcccccagtgccaagactgggagttcggagggctcggacactctcctctccaactttgggaagcatggtgggtttggcctcacctgtgtgaacatggaggagcggcgagggagctgaaaagcgctttaactgcccccctctccaactaccagctaatcgctcctataaatacagacggcctggcatggcaaaaa

SEQ ID NO: 100526 - DNA, 482 bp, Homo Sapiens
gtcaggaagggaaagccagaaggggcacgcctgcccagcctcgcatgccagagcctggggcatcccagagcccagggcatcccatgggggtgctgcagccaggaggagaggaaaggacatgggtagcaattctacccagagccttctcctgcctacattccctggcctggctctcctgtagctctcctggggttctgggagttccctgaacatctgtgtgtgtccccctatgctccagtatggaagaatggggtggagggtcgccacacccggctccccctgcttctcagccccgggcctgcctctgactcacacttgggcgctctgccctccctggcctcacgcccagcctcctcccaccaccctcccaccatgcgctgctcaacctctctccttctggcgcaagagaacatttctagaaaaaactacttttgtaccagtgtgaataaagttagtgtgttgtctgtgcagctgcaaaaaaa

SEQ ID NO: 100527 - DNA, 542 bp, Homo Sapiens
gagagtataagaaacagaatggaggcaggccccaggaggattcaatcaggaattctgaccttggggccataaataggtttcatatcttcacagaaagggtttacacaacttttgtatatcattttctgagatgtctgaatcctagaaaaagataaagaacatcagtatgtgaaaaagccaagggctaaggtaatggtaatcagactacagttctagaaatgcctctggatctttaatacatgactggcagctcttctaaacctctatgttacctctattagaatattatttctgatgtagtttgtggagaaacaaagcaggaatggaggagaacactgtatacagtatactttataagcactaaataaatatgtaaaaactctgaaatataatctgagtttatagtcataatgaagattattagctcaataatctagggtagaggtgtccaatctttcggcttccatgggccacgttggaagaagaattaccttgggccacacataaaatacactaacactaacaataactgatgagttaaa

SEQ ID NO: 100528 - DNA, 505 bp, Homo Sapiens
acttggaaacaaagcagcacacttctcaataatccatggagcaaaaaataaattaatcagagtgaaaataaaaatacaacatatcaaaatttgtgggacacagctaaaggagtattgagagggaaacaaatagcagtaaatgcttatatcagaaaaagggaaagatacactaagatcagaaacaaggcaaggatagctgctctcatcactcttattcaatgtagtatagtactagaaattctagccagtataataaggcaagaaaaagaaatgatgggcacttgaattggaaaagacaaaataaagccctcccaatttgcaggtggcatgattgtctatgtagaaaatcccaaagaatctacaataaaacttctagagttaataattgagtttagtaaggttgcaagacacaatgtcaacccacaaaaatcaactacattttcaaatactgtgaacacatcaaaaccaaaattcaaaacacaataccatttacagttgctacaaa

SEQ ID NO: 100529 - DNA, 697 bp, Homo Sapiens
  misc_feature (12)..(12): n is a, c, g, or t
  misc_feature (24)..(24): n is a, c, g, or t
gggtctctgagnagacagggcagnagtctggacagcagctggttcatcttgctgatgactagttcggtgatgagttgcctgtcctccacctgatgttccccaatcagtggcatgctacagtccatgacctcaaaaatgtagtctttcccatctttgccatgtacagctttgacagcacagatgtccaggccgccaaacatctcagagcaggtgtccacccacagtttgtacctgtctgacatggcaatctgctccagcatcgcagagccagtgttcgtcttccagttccctgagatcgatgtcctcatgtaagccttgtagttgttgccaatcttctggacccggatgtcatacttggagtcaatgaaaggctctgcagtggcataggtctgggtgagagccaccacgctggcaatgtcctggaagtcgtagtggttttccactttgaccttgcccatgcctgagtgagcgtggccaatcttcaccaccacagggaacgtgggcagtgtcagcatctctttgtggttggggtagtatgtctgttcaatgagagggaacttttctcctcccagtgtcttatagatagcgaccagctgggcaaacacccatggcttgtcacagaagttgtatatggattccagtgagttgatgctggggaggcctgcatactgcataccaataatcaggtggcggaagt

SEQ ID NO: 100530 - DNA, 557 bp, Homo Sapiens
cttttgcagcaacatggatggaactagaagtcattatgttacgtgaaataagccaagcacagaaagacaaataacacatgttttcactcatgtgggacataaaaaagtgaatctcatgaaaatagagagtaggctggtggtcatcagagaccgggaagggtagggtggaagaggggtttgaaaagaagttgattgatgggtacaaatatatggtttgatagaagaactgagaactaatgttatattagtatggtgactatagtttacagtaatgtgttgtatatctcaaaatagctagaagagaattcaaatggttttagcataaagcaaagacaaatatttaaggtgatgaatatcccaagtacactgatttgatctttacaaattatatgaatgtattatatgatcatatctacttctaaacactatgaacatctatcacacattagtaaaaaaggggaaaaacccctgctgacatcctgattttagcacagtgagacctgtgtcagatttttgacctccagaattgtaagataataaatttattgtgttttaaa

SEQ ID NO: 100531 - DNA, 1179 bp, Homo Sapiens
  misc_feature (437)..(750): n is a, c, g, or t
  misc_feature (768)..(974): n is a, c, g, or t
  misc_feature (1060)..(1060): n is a, c, g, or t
  misc_feature (1116)..(1116): n is a, c, g, or t
cccgagtctgcgggcagttgctgtcccagcatctgctggtcatttcgccctgacagtcccaaccagaacccctgggacttgaatccagagacgtcctccaggaacccctcaacgaagctgtgaatgaagaggtttcctctttaaacctgtctggtgggcccccagatatcctcacctcagggcctcctttttttgcaaactcctcccctcccccgagggcagacccagccagctgctaagctctgcagctccccagtggacagtgtcattgtgcccagagtgctgcaaggtgaggcctgctgtgctgcccgcacacctgagtgcaaaaccaagcactgtgggcatggtgtttccctctctggggtagagtacgccctctcgctgggcaaagaggaagtggcacccctcccctcaccacagatgctgagatggtagcnnnnnnnnnnnnnnnnnnnnnnnnnnnnnnnnnnnnnnnnnnnnnnnnnnnnnnnnnnnnnnnnnnnnnnnnnnnnnnnnnnnnnnnnnnnnnnnnnnnnnnnnnnnnnnnnnnnnnnnnnnnnnnnnnnnnnnnnnnnnnnnnnnnnnnnnnnnnnnnnnnnnnnnnnnnnnnnnnnnnnnnnnnnnnnnnnnnnnnnnnnnnnnnnnnnnnnnnnnnnnnnnnnnnnnnnnnnnnnnnnnnnnnnnnnnnnnnnnnnnnnnnnnnnnnnnnnnnnnnnnnnnnnnnnnnnnnnnnnnnnnnnnnnnnnnnnncctcgtgccgaattcttnnnnnnnnnnnnnnnnnnnnnnnnnnnnnnnnnnnnnnnnnnnnnnnnnnnnnnnnnnnnnnnnnnnnnnnnnnnnnnnnnnnnnnnnnnnnnnnnnnnnnnnnnnnnnnnnnnnnnnnnnnnnnnnnnnnnnnnnnnnnnnnnnnnnnnnnnnnnnnnnnnnnnnnnnnnnnnnnnnnnnnnnnnnnnnnnnnnnnnnnnnnnnnnagctgcattatgatcggcacgcgcgggaaaggcgttgcgtatggcgtctcggctctcgccatgatcgtgcctcgtctttcgtgcgngacgtacaccatcaagcgtatacgtatcaagatcaggatacgcagaaaattgacanagccacaagcagacgtaaagcgctgcgggtttcatagcgccctgcagacaaatcagcatcaag

SEQ ID NO: 100532 - DNA, 462 bp, Homo Sapiens
tgtctacaaagcctggctctgttcccagtattttgaagtcacacagtttaactgcagaaagacaattccttgcaagcaatactgtttggaggttcagacgaggtgtccatttatattgcccgacaatgatgaagtcatctacggaggcctctccagtttcatctgtacagggctttatgaaacctttctaaccaatgatgaaccagaatgctgtgacgtcaggagagaagaaaaatcaaataacccatccaaagggaccgtagagaaaagtggctcctgtcacaggacatcgctcacagtgtcatcagcaacaagactgtgcaacagcagactcaagctgtgtgttcttgtactgattctcttacacacagtgctcacagcctcggcagcacagaacacagccggactgagctttggaggcatcaacacgctggaaagaaactcaaccaatgaggagtaacg

SEQ ID NO: 100533 - DNA, 564 bp, Homo Sapiens
  misc_feature (527)..(527): n is a, c, g, or t
  misc_feature (535)..(535): n is a, c, g, or t
tgcggccgcggaaagaatgcgcgccgcccgtgcgctccgcctgccgcgtctggccacccgcagccgccgcgtccgcacctgaccatggagtgcgccctcctgctcgcgtgtgccttcccggctgcgggttcgggcccgccgaggggcctggcgggactggggcgcgtggccaaggcgctccagctgtgctgcctctgctgtgcgtcggtcgccgcggccttagccagtgacagcagcagcggcgccagcggattaaatgatgattacgtctttgtcacgccagtagaagtagactcagccgggtcatatatttcacacgacattttgcacaacggcaggaaaaagcgatcggcgcagaatgccagaagctccctgcactaccgattttcagcatttggacaggaactgcacttagaacttaagccctcggcgattttgagcagtcactttattgtccaggtacttggaaaagatggtgcttcagagactcagaaacccgaggtgcagcaatgcttctatcatggatntatcaganatgacagctcctcctctgtcgctgtgtct

SEQ ID NO: 100534 - DNA, 176 bp, Homo Sapiens
cctcagccaatatccttctaaatatgtacacataggcaattggaaatagatgtaatcaataatttaaatgtattaaaatatttattgttagaatgttaatttacctgtaactctgcttatagtacaaagctttatatatatatcacatttccttaaaacattaagaagtgtgggtt

SEQ ID NO: 100535 - DNA, 524 bp, Homo Sapiens
  misc_feature (38)..(38): n is a, c, g, or t
tttggtggagaaactgacaaaccagaagaaatacttgngaactcttacccaaagggctaacttataaaaaaggtacaaatcaatctaaatagaggtcaacatcccaaaagcaaatgggcaacaaatatgaacaattcacagaaaatgccaagctcctgatgctgaccctccctcataagaaaactgctaataaaaactcctggagaggatgctcacaccaccctgggagggaacacagtggtctctggaggaaggcacagcatatgctttcgagttaccaaggcacacagcattgtaggccaggcatctggcctacaggatactcacccagtctttacggagcaactgtaaaaaacaacaactgtttacaattagcatagtatcacctggaatctacgaacatatcgatcctctcatttcaagagaagaacttctccaatgcacgtcctaccatactgtggaaactgggaactcattctgcatctagttggataggagattaatttctaaacccacagccctta

SEQ ID NO: 100536 - DNA, 297 bp, Homo Sapiens
actatgcaaagatgggaaatgcacaaacttttcaaagactagtgtctgaagaactttacaaacaatacttgaaccctttctttaaagttatcccatcatgttttatagtcattgttgcttccattgttagtttccattttcaagtgctttgtaattttttaagtgcactacctgaaattttgtttgaaattaataaattcattcgtatcttgttggctgcctatgaatggagattcagtagtcattgtatgcatctttaagtcaaatgtgtattaaaactttcgttaacgtaaaaaa

SEQ ID NO: 100537 - DNA, 540 bp, Homo Sapiens
aaatgtaacctagtttagggtgggtatttttctgaagatacatcaatacctgaccttttttaaaaaaataattttaaaacagcatactgtgaggaagaacagtattgacatacccacatcccagcatgtgtaccctgccagttcttttagggatttttcctccaaagagatttggatttggttttggtaaaaggggttaaattgtgcttccaggcaagaactttgccttatcataaacaggaaatgaaaaagggaagggctgtcaggatgggataatttgggaggcttctcattctggcttctatttctatgtgagtaccagcatatagagtgttttaaaaacagatacatgtcatataatttatctgcacagacttagaccttcaggaaacataggttaagcccccttttacaaagaaaaagtaaacatacttcagcatcttggagggtagttttcaaaactcaagtttcatgtttcaatgccaagttcttattttaaaaaataaaatctacttataagagaaaggtgcattacttaaa

SEQ ID NO: 100538 - DNA, 505 bp, Homo Sapiens
ccaagtcagcagatttggaagcattgtggtaaagtctaaggttttcatatccatagtgctgtttggtgagtaccggcagtacagttgaggggagcagggaacagcattgccccgtattgaaggtggagatggttacattcttcactgctttttgcattttgagttgtgtgcctataaaatttggccaaaccattttattattttgttcaaacttgactaagctgagtgatctaaaattatacagaacctaaatcaaagaagagaatgtaaagtcctttagttacttctaagaatttgaagtcaagcacgaatctaagacatagattatttttatatagctaatgaagagtatgttacgaaattgttgggtttttggggtattgagggtggcaaattttgtgaatcatgcatgcttcacagaaacaaccaggtttttccagaattagtctggatcagtgcctaacaaagctgttattaattctccacacatgagtctggctaactg

SEQ ID NO: 100539 - DNA, 427 bp, Homo Sapiens
  misc_feature (259)..(285): n is a, c, g, or t
aaggctgaggtcggcagtcccggggactcgcagctgttgagcctgtggagacgcggccccgtgaccgaggcacccttcagcaacccgggggcagcgttttccccctaccggaaatctgatgggcttatgacatcatggctggctgctgagcgatgaagtggatgccacaaagaaatccgacatatcagatagattctgaaatcggtttccctccagctgtagtaacaggcgtgaagtcaggagaatttgagctttgttnnnnnnnnnnnnnnnnnnnnnnnnnnnccataacaaagtcttgccctgtattaaatgcaattttcttaaaaacaagcaaaccttttggacatcattttattttaatagaaatgctgagttttatgaaactaaagtggctaataaatcagacctgaagctttgaaaaaaa

SEQ ID NO: 100540 - DNA, 308 bp, Homo Sapiens
tttataataaagtgctgaatatctgtcatttattgaattgaatactgtacattacatcaaaattgcaactgtttcacatcatcataaagtcaatatgtcatgacgttgcaccatcagaagttggggaccatctgtataagttatcaccttagttcatagactacgtaggtgtagcatgaaagagttaaacctccctccccacacatacacagggcacagggctgctgcgctgggtgggagggtgcacttaagcaacctagaaaacagcttagtatgaatttgggtaccatgtatatagaagaagtaga

SEQ ID NO: 100541 - DNA, 533 bp, Homo Sapiens
tgagttcgaacatgatttcatggtttctggctatgtacatttcttcttagaattttaaatttatttatttttctcatttccctatttgaagtttagtggtttctctcagtgagctttttatatattaggtataccgatcctttgttttgaaaaaatgtccaggttttgaaggattattgtcacttttggaacaatgctatataaaggcattatgctttacaaagatgacactttttatttgactcactgataaggaaacagaggcttaaaatgtgtatgtgtttcctcttttttaggtaaaaccttttatacagtcaaatgcataaatcttacatgtaccatttcatgaattctgacaaatgtacgcacctgtgtcacacaagtttttattaaaatgtagaatattgtatcactctgaaaaattcttttgcatgcttttctaatcaatgttgcctttgccctatcccaaccttgaaaggaaaccattgtcctggtttagaacttcatataaatggaatcatacaacatgtact

SEQ ID NO: 100542 - DNA, 421 bp, Homo Sapiens
  misc_feature (342)..(377): n is a, c, g, or t
gcataatctttgtcatctgtttttttcccctagacaatatcaggttaccgtcaacattaatccatttaaaaggacatggactgttgccattaatacttttggattccatataacccttaacacaataacttctagaaaatgtgtgtgccgtagacacaaagaagggaacaatagacaccagggtatacttgagggtggagggtggcaggagggtgaagattgaaaagctgcctattgcgtgttatgctggtttcctgggtgacaaaattacctgtacaccacacccctgtgacacacaacttactcatgtaacaaacctgtgcatgtaccccttgaacctgnnnnnnnnnnnnnnnnnnnnnnnnnnnnnnnnnnnnatattaagttgacccaaataataacgatgaatcattataaattc

SEQ ID NO: 100543 - DNA, 439 bp, Homo Sapiens
atcattggtgccaccaatatatcccatcccatatactcttctcacaatatggagctgacactccttcctcgactgtggttggagtggaagtgatgccatgggacttccaaggctaaattggtaaccagtgaaacagcttcctctgcaaatgcacacccctgggacccagtcaccatgctgtgaggaagccatgcagccacaggacaggccatgtgggagtgttctggccaacagccccagctgaagccccagccaacagcagtgtcaagtgccagccacatgagtgaatgaggttcagacaactcctggcccaggctttgggccgccccagctgaccaaaatggagtggagcaagatgagccctccccactaagcctcaccgaaattgccaatttgtgaataaaataaaagttgggattgtttttaagccccttgaaaa

SEQ ID NO: 100544 - DNA, 320 bp, Homo Sapiens
ggagggctggcttcatttagattcctaatcattcctccagggagtcaattttttaaaatcacattgacaagctcattcacccatttcttcattcaacacatatttagtacagggtgattggacttctaggctgtcagagctagaaaaggccttatgcatcttttaccccacacccttcattttacccaagggagatggaggcagggctagccctaaacccagagtctctcagcctcacccctgatctaatcatcatctcaccaccccaaccaagcacttagcagtataaaaccttgtgcaaaatatatgtactttttcac

SEQ ID NO: 100545 - DNA, 536 bp, Homo Sapiens
caataaactttagcagtaaaaagcaaaataaaacatacctcccaactcctgctgcagcccttgagcctgtcgaataaggaatttgataggaatctgatccattaaagaagaagaatatgatttgggctttctttgcatggcagctatcaaagataaaaagtgtaaaataaataaaatgtccagaaacaacagaaatcttaaccttcaacccaaatggaaacaaaaacaaagtcaaattacttttaatgcaattaacctgcgaatatagcatataaaagatgaagaatcattacgaaaacaagtggctacacaggaagaacaagaacatacctggagcaagatctggaaaatgtcctgaaatttaaaactagacagaagaaaattcataacaggttgagagaagccatgtgcaaaagtgccctacactaaaagaaccaacaagtgagtcaagattttccaaaacctaatgacaagatcaaatgtgatcatgaacatacggcctagagcttcatgattaaaaagcatcttataataaa

SEQ ID NO: 100546 - DNA, 469 bp, Homo Sapiens
attttaaaacatttttagccttttcaagtacttctaaaacttaaaaattatagaagtacagatacaaaaggatgaatacatgactccacttaattgaggtacctagagtagtcaaattcttagagacaaaatagaatggttgttgccaaaggctggagagaggagagaatggggagttactgtgtagtgggtacagagttttagtttggaaagatgaaaacgtactggtgatggatggtggtgattccacaacagtgtgaatgtagttcatgccactgaattgtacagctacaaatgtttaaaatggtaaattttatgttatgtatatttttaaaaaatcaacatatacgcccctccttatgcctgcagaatcatcccttatttttttccctcagctcagagatggcagctgacctcactcttttagagtgagaccccaaaataatagtttatgtgatataaatttaaa

SEQ ID NO: 100547 - DNA, 479 bp, Homo Sapiens
aataagagtgacgagagtttaacagacattcattatggacttcagagaaaatgatgctaaactggtcttagaatcttctttaattttgttaactaggtaaataatctggacattttagtcaaagcattagacagacagagaagttggtaactgaccactaactaacaaactataaattcacccattgtgggttgacctggtaagttcccccagggatgtgtccttggcccctcctttgatattagtgacagatgactttttttatgccttacccattccacaaaagaatttgaagccatttacacaagagatagtactagtaaattaggagtgctgatcaaatttttagataataagaaacccttaggaaggatgacaatttagaatccaaatttaggatccaaacaaataccattacaaactataaaaatgagcagaatctaaatgtaacatttcaataaatgcagattgataataaa

SEQ ID NO: 100548 - DNA, 468 bp, Homo Sapiens
  misc_feature (53)..(115): n is a, c, g, or t
  misc_feature (223)..(223): n is a, c, g, or t
caaagagataagagaaggtgttactttcatgaataaaggcagtaaactacttnnnnnnnnnnnnnnnnnnnnnnnnnnnnnnnnnnnnnnnnnnnnnnnnnnnnnnnnnnnnnnnatttagttttaaaaagatgataaaatagaggcaaactcccagaaagtagagcagaaagacaaagaatagaaaatttgaaagaaaagaaaggggtcatgttcaggaggncccaatatccaaataataggaaattcagaaagagagaacagaaaaaagtagaggatagcaaatcctcgaacagtattttctagaactaaattgatgagttttcagttgacaggcctctcaagagctcaatacagtggataaaaatattcccataccagcaggtatcattactaaaatgcagtgctgcaaacagtggaagattctgcaagcttcctgagaaaaaaaattaaagcttcctgaggaaa

SEQ ID NO: 100549 - DNA, 405 bp, Homo Sapiens
agtgcccacagaaatgggcttgaggatggaccacaagaactgctcaaagcacctggactagtaacaagagatgacaagctgaggcctacgatgatttaggctgaggataccatctgcctgagagaaccctcctcttggagtcttgctcctcaaaatgtgacttcagagccagcagcattggcatccctggaagcgtggtaccaatgcattcttggacctcaactcagacctattcaatccaactctccagtttagcaagatccccaggtgatttttatgtacattaaagtttgaaagcaatactctaaagaaccagaaatgccagaccagggtccaacagggaaactgaatgcctaagacattcattcattcatttacccattcaataaatacttaataagcaaa

SEQ ID NO: 100550 - DNA, 825 bp, Homo Sapiens
ttattcactcttcatagaatcacaattacctttatatatcatatgttattggaagagattcctcagtaatctccaatctctcatagtgcctcacagggttggtcaatggcttttggaactggaaggaccttagaacttatctgttatgctcctgatagccaatagcagatagaagcttgcaatcaagagggtaggacatgtgttcttcaatggatatcaaaggaagaggttgcaaaccaaagccatttggcaagccctgtagcctgggccatttaagacaggggcggtctcagccaaattgcacccatttaactatcccaaagagccacagtgcctacaacccaggccctaagttgatgaagaaaaagtcaaggaaggaggtgatacaattggaaatattcccatcaaatggttaatcttatttagaaaatgggcatattagaaaaagtccttccaagatgattttggataataaaagttgtatttgtggaaattggtattatctctgttttatgcacttacatttatcccttacattttgtttttagtgaccctacatgacattaaatttaaagtaaaacattgtttaatgttaccttttggcttgagaatgtctttcagctccagaattattgttactcatattttaatcagtaagtcatttaagctatgacagagtaggaattgagaaattatttcatatgctacagtattgaaatgtggatgctgccttgttttataagaagatgatcaaggtttgtgtgcccattacctttcctctgcctgaaccacgtgtctcaagaaaaataaattcactatttgatg

SEQ ID NO: 100551 - DNA, 548 bp, Homo Sapiens
gtaacccacagaattatcaggatgtctcagaatacagacaagaacaaagggaggctccgcagccaaaagtccctcctctaaaccactttgatgaggaccaaacaggtgctactgctgaaagctagacaccacatcctactccacaaccaacgctggaactccccagacaccccgctggctctgccgcccctaaaccggatgcggcagccaccgcggaccccacagcggattctccaccaccccatttctttgcattgcatcaccacctccagagtgtgcctaattggcaccccgctgcttctgatgcaaaactccaagctgtactgggcaaacgcgcagcctctggcaccattcccagtgctgctgagcatacagacctgagcacagcggagggggagggcttggtggggagggggacttacaattcatccacgctgttgaaatcccatcaaacacacacgacccagtttggctggtgcagccttttctctcccctcctgatagcatttcagcctctcttccaataaaaaatagtagctactaaaaaa

SEQ ID NO: 100552 - DNA, 480 bp, Homo Sapiens
  misc_feature (73)..(100): n is a, c, g, or t
  misc_feature (446)..(446): n is a, c, g, or t
ctccaccgctcgtatctgtgtggtttcagtctgttcttggtgtggtcctcatacacagagctccctgtctagnnnnnnnnnnnnnnnnnnnnnnnnnnnntcgtcacacaggtaaccttaaagacagacccctctaaagaacgctttgtaaatacatgtgaggtatagccaccactgttttccttgctgttatttttccaagtcttggggagaaaacatcctcctctgatggccaaagccctggaatcaagggtttccacgtaccctgcctaatacccgacgtagctcttgatgcaccgtccttgtgctgtggctggcggtgtctcagcctgaaacataaaccccacatgccccaggagcgatgtgctccctgaaacagacaaccacacgctgttggggagagaaggatggagataggatggagataggatggagatgtggctctnctcatctttgaagccagcagggcatcccggagca

SEQ ID NO: 100553 - DNA, 658 bp, Homo Sapiens
caaaaataagtgggaaaaaaaccctattaggtaccgatgcatggacaatattgaaagtacaagaagtaataagataaaattttggataaagttgtaaagaaaaaaattgctagcctggaaagcaaggacaatatatattgaaatttaaagtacatataatttcacattgagcaaattcgttctgaatatagtttttactaggggctgtgggatacccaaaagttgattaacaaatacaaaagtacagctagataggagtaataagttctagtgttctctagcactacagggtgactataattaacaatttattgtatattttcacatacctagaagagcacattttgaatgtttctaacacaaagaagttacaaaagttttgagatgttggatacgttaattaccctgatttgatctttacgcattgtatacttgttgcacaatgtcatgttgtaccccataaatacgtacaattgttgtgtgtcaattattaatagaaataagaaaaagttaactctcaattccattttcaaaaaaatactctatcaggtaaggattatatgtactagaacaattattctagttttgttcctgatagcaaaacagttacaaaaaaacctggaactctcatcagtaaagaaatggttaagttaaaaaa

SEQ ID NO: 100554 - DNA, 625 bp, Homo Sapiens
  misc_feature (62)..(62): n is a, c, g, or t
ttttaatttttttctgaagttccttggctgtaatacatttcattgactctcggctgtgatcngtggacaatgactgtgcacacctacagactcactcctcatcttcgtgaggctgggataaaggtacacacggaggctggtcccacatctgtaaaggcctcacatgcatggctacgggcatctcggccctcatgtccgagctccatccaccctgccccttaatcaactctcccaaccccaccccacctcaggtccaggatgaacattccagcagtgtggtctgcccacaggggagacccagggaagaggcctgcacagtccttagaaaaaggcttagggtttgagggtgaggaatcccaggatcccagacacctggtgtgggcttcaggtgggctcgtgcccttggccctcccagctaagtggttctgctggaggaggcagaccagagtgggaccctcaaagtcacagagccctgggccgagacccccaaatgctcaactttaagggtgatactatcctcaggaatccttgcaaagtaggaaaattgaacccagtgattgttttcaagatagctttatgttaatactcaatttaaccaattaaagaaatcgacataaaatcaaaa

SEQ ID NO: 100555 - DNA, 436 bp, Homo Sapiens
ctccccagcccagggcatgcagacggcccatgaacgctcatcttcctgaacctgcttccagcacactccctttctgctcttgggctgagctgagcttggagatgagcaggctgctgttggtgcaggggatgggttgaagcacagcctgcctggagggctcatggcctggcccacatagatgacaaccgggactgcaggaatggggaggccaggcagacggcactcctggggatacaagagcttccggagaccagcaacggcttcctcagtagcagcacctgacaggcacatcagcgcctctccgtgtgctggagttgcttctggagctctgggaagtcatcatcgactgcatatttattgtcagcgttgtttaaattctggtgcatttttctgtgataatgtaacaataacataaacatttgctgggtgctaaaaa

SEQ ID NO: 100556 - DNA, 860 bp, Homo Sapiens
ctggtggcatttggaaactctgaataatgcattttcctcatgtcagaaaaaaaatcttgtttcattaatttttatatgaaacctcttgttcttgacacacacgactctgtaagacaggcgtctcggggagcagagggaagggcttgctctgtgaggcttggtcctgtggagttggtggcatccacagcagcctgctctttgggctggggaggctcacatctttgctttgccagtgaaagccagtaggaccgggagcccaggcagaagcaatgccataaacaggcgctcctcagagcagagacctccaggctccaggggtcagtctggcttctgcatttcagtgagcaggcagggcccattatgacttgctttggagatggggaatgctggttgacagttctgaaaaggactcgaagacaaattacttccaccatggaggcaacattcaggcagcttggagaggaggccaatgctcaggcatcacatctctcaacccagcagagcccatggctgcctagacaacgagaaggccctagcacacgctctggcacatgctccaggcagcagggttaatgcaccctggagccgggatgccccagcatgaggactgtcttcctgggagctggcatcctggccagcactcaacacatgctgctcagtgacggaacccatccgtcatcagttatcagcataatttattacccactgacacagtaaggtctggaaggacttttgaaataagatgacttttaaaaactatacctgtaaaccctgtttaccctgacgtgattattatgcattgtatgcctgtatcaaaatctcatgtaacccataaatatatatacctaatatgtacccac

SEQ ID NO: 100557 - DNA, 402 bp, Homo Sapiens
cacaggtgtgaagggcaacccaccccttcatatgaacctttgggaaaatgtcagcctctgaaaagactttcttggcttgtgacagtggtgttttgtggagggcaggaattggggctgtttctctggcttgggaagaacagtcagtgaaaggatccccaaaatgaagtaaattaaccatagcaggaggtaaccgggagaaatagaaaccctccatttgctgttacccaagaatacccaggagtatggagtcttccagtgtatctgggaagcgagtttcaatctaaaaggtccatccaggagactcccattaccatttgggttccaattatgtgacatgagaacatttcatagtgaaggtggatggcatgcagtaggtaccaaagaaatgcctttcaattatga

SEQ ID NO: 100558 - DNA, 907 bp, Homo Sapiens
gtccccactgtccactgggcctctctgatcttgtccctcatggcactggcttgtacttgtctgttgtttgtctttcttccccactgatgtgtgaaccccccaagagcaggaatcatgtcctatatacacccttgactccccaggtcctagagagcatctgattcattgcatgggcttagggaatatgtctgaatgaatgcagctgtgaatgagtgaatgaatgaatgagcacactgagcttctcacagaagcagctgatcccaaggatgttgattgctagactagaactttctcttccatgtaccctgtccctcctttccttactctctctgacctggcctttctctccctacagttgcccccaaaggacccaaaattgtgatgacgcccagcagagcccgggtaggggacacagtgaggattctggtccatgggtttcagaacgaagtcttcccggagcccatgttcacgtggacgcgggttgggagccgcctcctggacggcagcgctgagttcgacgggaaggagctggtgctggagcgggttcccgccgagctcaatggctccatgtatcgatgcaccgcccagaacccactgggctccaccgacacgcacacccggctcatcgtgtttgaaaacccaaatatcccaagaggaacggaggactctaatggttccatgggccccactggtgcccggctcaccttggtgctcgccctgacagtgattctggagctgacgtgaaggcacccgccccggccactccatcaggcactgacatctccacgaccggttttcatttcttttctaaactatttccagtcttgttcttagtctctttccatctgtgtcttggcttcttcagtcggtttaattaaaacaaacagaacaattttccccaaaaaaa

SEQ ID NO: 100559 - DNA, 537 bp, Homo Sapiens
tttgtctacattactcatgcagtaacactttatacatccttccaacagccaaggaggctatgacaggtagcttctataccttcccattaagccacaataataaactattgttaaccctgtatagaaatgaatgaaattatctttctaagaagtctatacctacagttctctgagctaatcaatggaaaagatgatcaattctgactaacaaagagtatattgattccattttccttcctactcctcttcattcaaataatcatatataggcacttaaagctggaaaaatgtggcacccttctttaaatatccaatcagaatgccagtagaaacttctttcttctgatataagagtgccactgaatatattgctaagcttgaagcagaggctaaacggtctggtgggaatagttttcaggagagaggtgaacatcttctcattagtttgtgattgttgtggttcaagttcttaaaaggttgaaaatttcgctaggtccttctccatctcagcatattgttctttaagcctttccatgg

SEQ ID NO: 100560 - DNA, 541 bp, Homo Sapiens
aaagattgcaggaggaaggtttcaaaaattatcgctctactacctcaaagcttcttagataaacatgttcctcaggggcacgataccatggccttttgagaaaacaaagctgaaccccaataaacatttgatccttgaagaaggaagggcaagcattttaaagctccagggccgggatctgcatctaaaccctctccaagagaaaggcacgggtgtttaatgcagatgtgggtgttggaggggatacaggaatgggcataaagggagcattttcccaccagggaaaggcagtcctgttgttagcagtggaagtaatgttaggggaatatggccttgggatgccttgatgtcctccatggattcctgagggctccatgctcctgcctgccatccacaacttggatggaattaaacatgacatccaatggtgccgtcataaggctccagggtactcatcctcggaggtgatgagatgttcccttttccttctctgtgcatgagtctgccgtcttcccctgaggcggtccagttccctttacag

SEQ ID NO: 100561 - DNA, 470 bp, Homo Sapiens
tttacagaagatggacctgtaattgacactgtgctgtatttaactgccaaggatggtaaatgtcttcaggaaacactgcaccacgttttgaagaagttcaaacagcgtccgtgcagcaggtgcgttctgccgtgcctctgactgggtggtggtcactgccagactgaatggtccacaccagccccgcaccctccaggacaaagcccgaaggacggtggtaaccggcttctggtggtggagtgcagctggtcagatgcctgggagactcaggttccagggcaggagctgcaggaagaccagggaggtctctgcccatgtctcttctggaggctccaagatccaccttggcaggggccgtgccattgcttgcagtcccatctgatttctacagaaagccacgtggaagttgtccactccgttttgcagaggttaatggctctctgaagtggttcaactggggctggcaaggc

SEQ ID NO: 100562 - DNA, 357 bp, Homo Sapiens
tttctgaatgagactgatatccataaaaatgatctttccttgtatactctaactccctgctttctgggcgcttggcttctcaattaaaggctaatttaccagcttctcttgcatctgggtttgtccaaagtttggggccaatgagatgtgaacggaagttgcatgtattatttctagtttgtgccctaaaaaagaatatgtatgtgttaccattgccctcttaccctctccactggctggggtgcagatgtgatggcaggaattggggcaactactttggacccagaggcagaagccctgtgatgaggatggcagaactgctctattagccctggactgttacatgaaagataaata

SEQ ID NO: 100563 - DNA, 494 bp, Homo Sapiens
ggtctgactttgaaatacctcggagcagctgaaataattgaaggcagccctgtaagaagcagcacttccagaccttctcacgggcaaaccctctgctgggaccgccaagggcccccgcgagacacctgagggtcagcacagcccctccctccctgtgccgtgctggccgtgccgcagctggtcacccgcacgaggacctcgagattgccctgcggactggcacttctcgagggaagtcatcgcagctgccatggagccagcatttgtcggggacctggcacgcaggccaccggctctgggagagggctgaggagccgtggggctcacgtttcagggattagcttgtgtaacttgacttgttcccccaaattctacaagtacagagaatatgcagaaatctgtgagagaaacaaccttctgcagctcgttgttgtggggattatattagtaagatgcctagaaaatacgattcagaaggaatgtgggtgcgtgtg

SEQ ID NO: 100564 - DNA, 257 bp, Homo Sapiens
  misc_feature (86)..(127): n is a, c, g, or t
caggggggttttttgggggaaaatttttttaaatggaagcttctagcaagccccccaccccaatcaacctctatgctttcttcttnnnnnnnnnnnnnnnnnnnnnnnnnnnnnnnnnnnnnnnnnnccagaagccctgctgtctgtctgtgcccaagcccttccaccagaaaagctagtctaggtgtgagagcccacattgtctgtagccatcaaaaataataataataaactggacagtttacaatcaaaaaaaa

SEQ ID NO: 100565 - DNA, 468 bp, Homo Sapiens
gtgagtcaggcctcaccctggtgcaagggcacagactctccctctccccctccctcctcaccatccatacgcgtctcctcaccatccctacgcgtgactgactttcctgataaaaatgggatacttcctactgggtgtcagcactgtcatcctaaggcaactcagacgtgatagttttagactatgatcaaatctcacacaaaccattatcagaatcttgtttcacaccatctctcttttcaggcagttatgaaaagaaactctgacctggccctaaatcccatcagcaaagctgactaaggtggtctgagatatgttcttactcctaaactcaaactttaaaagtttcaatagctccctgggggtccaagccaaaggctccctggcctttgtgtattatgcatcccaaagaaaacacgccaccccaggtgtctagatagcaagtcacctgaataaaagcctcagcat

SEQ ID NO: 100566 - DNA, 175 bp, Homo Sapiens
  misc_feature (39)..(39): n is a, c, g, or t
tttaaattcaacacacaggaacataatatacattgtttntttttttaaaaaaaggttaatttaggaatgatttcatcttcaaccacataaagtatctttttaagaccatgaaacctcttgtcattgcaagacttttcagttcatgtttctatttcccagttttaattcttaaagg

SEQ ID NO: 100567 - DNA, 423 bp, Homo Sapiens
ggagctctctgcctaagagtctgcgctatttaaacctgcctgggagttaggacggatggttttaggaatgaccggaaaactacccctaaaactcccccgacattccagcctctagaatgctctgatccagagctcagtggatgattcccagctggtggactcctgtggctaccccatcagaacaagggctaagggtttatgggtcaagagtatttgatcagaattttaaagggtggtatactctgaaacacagcccaaccaaaccattgtttggccgctttctcttttcctctaccttcctcatccccacttttttccctttctctctacttcctcttcttaattggctttggaattgaaatatatttttaaattatttgttgtatttattgaataaagtttttaatgtgccctgttcttaaa

SEQ ID NO: 100568 - DNA, 431 bp, Homo Sapiens
caacttgagaagtactggagcagaatgtgtggctgcctgcagaatcttgtgctgggtgttggagtcccagggagctagaggtagcagggactcagggctctgagactggcaacagtgtgcctgaggcattgtctacgctctgcagaagaaaggtgggaataattctaggagcaaagcaaggaaagtgggtgcagagagaaccgatggaatttctttaggcttgaaaacttgagggggttgtgaagagaaaataagttgttggagaaaaaaatccagagtagaggttgtctaacatgtatgaaacatgctgtttttgttagatcatcaaagtgactttagagaccgacagtggcagtacatgccctgttacacaaagaggtgtttccttccataaccactgcttggttttaaaaaatttaaaaagaagcaaa

SEQ ID NO: 100569 - DNA, 552 bp, Homo Sapiens
  misc_feature (76)..(76): n is a, c, g, or t
aggctacttgggtactagctggaataacgagcatttacttttaccacaattcctcaaaataaatttattctaacanttgaaaataacattacaagttaatcattagcttgatgcatgctaaaatgtagcttttaaaaagcattctgcattagtactaaaataagccatcaatgccagtccaccctctctattcatggctaaatatttaaaggttatttatagcttctttaatgaattcttcttaaacaaagtgaaattatgtcctagaaaagtagaagctattcgtaactagagcagtgcaactttaaagttttatgaatatgtattttaatgacaagggggcgagcttgcatccccactagttaatggataattcaaaccgaggactgattttgaaagatcacctaaaaatgtagatttgttctttagtaaatttagatcaactatgcatatattttgtaggtaaatctttcagtccatgccccaaccctcaccaaaaccaaagcagaaattacacacacaaagatgctcccgttaggaattgctattcac

SEQ ID NO: 100570 - DNA, 646 bp, Homo Sapiens
ttttaaaagtgaaaaattcttcgatagatgggctaatgctctctctactgtttctccctctggagatgaacatctgcaacaagccctccaacaagacggcccctgagaagagtgtgtggacggcaccggcacagcccagcggaccctcccctgagctgcagggccagcgatcccgccggaatgggtggagctggccccctcacccgctccagattgtggcctggctgctgtacctcttctttgctgtgatcggctttgggatccttgttcccctcctgcctcaccactgggtgcccgctggctacgctgtatccttgggaaagcgtagggctggtgtgtggaagtggggaggcaaaggatggctggcacagcggaggcccaaagccgggttgagagccttggggagcacagtcaggagagtggagcagggtgggcccagtcctggggacttgctgcttcccagcctgtctccagcctccacctgacctctcgcacctgatagggtgagtgggcatgcctaaaatacctaggagcatatgaagccccacaaagatgtgaatcctgtccacagaggcaccacaggagcagtcatagaaggaggagcctcaaaccatcctgatgctaattgtgttcagagctgaacaaa

SEQ ID NO: 100571 - DNA, 264 bp, Homo Sapiens
acctaaatcatcactctttatagaatgttacatctctcttttcccaggggcatctttccctttgccttcaaaactgcacaccttcatctgaataatgattaaactctgctgctcaccattaaaatgggctgattgctccaagcagtatctagaaagaaactgtttctagttcttcacccctaatcatttttctagatttttgcaaagaataatcattaaatatttcatatgtataaaaaaataaagaatagtttatatagtaaa

SEQ ID NO: 100572 - DNA, 428 bp, Homo Sapiens
tgtgaggctttaactaaatgttttgtaaagcgttttgagatacagaggcaaaggcgctagggaagggcaaagtattattggacttaaggaagctgaaatggtaccataaatgctgctattctgagagccattttaaactgcactgctccaaccacccccgcttctcatcaccaggacagcaggtcgagaaaatgtctttcctttcacttgcttctggggtttgtgattattcaagacaattttttccccttgctgtatctccttccctcacctccgcgacttgttccctgttctgtttatgcggaaatggcagaaatgcttgagaaatgagaatgtgtaagtggattggaagtttatagtatgaaatttcaattttactttgtactgtacatctttttactttagaatttgcaataaagggttacgtc

SEQ ID NO: 100573 - DNA, 457 bp, Homo Sapiens
cttcaagctctcccgccactctaagggcctccagatcctgggccagaccctcaaagctagtatgagagagctagggctgctcatctttttcctcttcatcggggtcatcctgttttctagtgcagtgtactttgccgaggcggaagaagctgagtcgcacttctccaggatccccgatgctttctggagggcggtggtgtccatgaccactgtaggatacggtgacatgtaccctgtgacaattggaggcaagatcgtgggctccttgtgtgccatcgctggtgtgctaacaattgccctgcccgtacctgtcattgggtacaatgtcaactatttctaccaccgagaaactgagggggaaaagcaggctcaggtgctcccacgtagttcccctaacttagcctctggcagtgacctcagtcggccgagttcctctactatgagcaagtctgagtac

SEQ ID NO: 100574 - DNA, 502 bp, Homo Sapiens
  misc_feature (22)..(22): n is a, c, g, or t
taaatataaataaataaataanaatgagggtcctcagctgttctcttcatatcctattacagtctctcagattcttgtgggggcactcttagatctcccttggagacaaggttatagttatatgttgttaatctcgcagagcttccttttagtcacaatagccttcattttctgccatgccccttcataagggagaaggatgtttgtaccatgatcctccccgcataatctatggaattaggagtcctgtgtggagtcttatcaataaatatgcacattcatcaaatgtctacttaaatgtgagtattctaccagtgagaaaaaacacataattttcaaggtaatcattgttaaaccaacagcaaacttctttcttatcagcaccataaagtccagaagacagtagaaaagtatcttcaaagtgctgaggaaaataagtatcaacttagaattttatgtacaatattggaggcaaaataaagacatgtttagacatacaaaa

SEQ ID NO: 100575 - DNA, 666 bp, Homo Sapiens
  misc_feature (227)..(227): n is a, c, g, or t
tttgtatttcttcttctttttcctgggtattttgaatctgaggcataaacggaagtctgtccagacctgatagggtactcttatgagagtctggaagaaagaagggaccaactgctaactcaagcctacggccatgtgtcagattaaagcttgctgatgctttaatctgagcttaaagcatcagattacagaggtgtatgtgtggaggggaggttgggggacaaaancaaagagaggcagtttctgccctttaggagtagtttcctatcgattaggggaaacagtctggtataagacatggttgggaatcaggggactaggttctaattctgactgtcatgcattggccatgtgattgtatagggtggaatcggtcacttacaaaatgaaggaatcacatgaggaggtgaaactgtaaaacgaaggaattaaatgtgatagcatttctctaggtaaatgccaaattaaaaaatatggttaaataaatttggaggcccccacgcagcaccagatagattcacagagcatttagtgtagcaaaggctctcaaagccctgctgtaagggagatttttgaatttgtcaattcctaaacttagtttctgacatgacacctgttaatatttgcagaatattattgagaaaagaatggtctctatgccccttc

SEQ ID NO: 100576 - DNA, 537 bp, Homo Sapiens
tggagctctgctgttgctgcctaagacgggtagccagccccgacttgcatgagcagtcttgtttggatatctgcacatgtttgctttctattggttcagactcaccttggaacagagctgggtctgttaagtctgagaccttgcttctggtactatacacatagggcattaggaagtggcccaatgttttgctcatcctaaagtcactcaatgacttgcagcagccttcagccttccttcagttgcgagaagtttgttttcaaatcttcccagattggtagaccaagccctcagggccttgttcttcccagttagcaactttctagctctcccatcctagatcctctcttttcttagagagcctcaggacatgaccaagattgtgcccattgcaaagcagagattggtacttaagccccattctggaagcatatatgaagagtgggtttggattctatttttagagtgaaggaggaagttggaatctaactatatatattttaactctgacttttggccataccatttagggaaaaa

SEQ ID NO: 100577 - DNA, 544 bp, Homo Sapiens
cttcttaaaaggcaagagtcacaacgtccaatccatcacaaacaatattaacacagtgcacaagcgcaacattaaattcaaagtaatgcaagcaaatggccctttttttgggaattacttaatgacagcttatctactacaggagtattaattaatgtatggtgatactcaaattttaaaatgaaatataaaaaaccaaaaacacatggctatgtcattagaactttgaaaattggtttacatggccaaaaccatgctattctcagtagtgtaaaggtatcagagagacacagtctaatttaatacacagctctactttctattataggaaaaaccacagtacggaatttcacacattcgacaaagaacaaggcaaatacataaaggcacaaaactgcacatcatacagaccccttttctttatcttagtctatttcaagtaatattaatattattaaatgatagtatcattgtagtagtttcaatgatgcaagatggacagtgttacacactaccccacaactgcaaaaagttggcggccgca

SEQ ID NO: 100578 - DNA, 564 bp, Homo Sapiens
ttttaagatccttaaaaagtatctttaattgatgccaaatatgaacagatcgtaaagtgacagaagcaagtaaaattgcatagatgaaaactatgcgcatcaattaggttctcaattcataacattcaatgtccttgacctgacatattacacagttagagaagggagaatgcgcagtaggtgaagatgagacacgtccttaactcaaggtggaagcaactggcaaactcaagaaataaaatagcgttttttcagcttaaatggtttgttgtcctgatggtgcactttaaattaatactactcaatttttatttttaacctcagtaatactttatctttactattagaggcatgtcacatggagtccatgttgtctacttacatctgctgcataaacagtcccaaaacagtgcgctgaagagaagaaaggtgcttctgcaaggtttggagaggagacaactttgacctggccggctggcttggcgcaggggcggtgctgagtcagcggagagcccgagtgggaatgcggcaggtcgtcgttgcagtgccctggcgggagccgaa

SEQ ID NO: 100579 - DNA, 609 bp, Homo Sapiens
aaaacaacgtgacaaatgccagacaggacccatcagccaggcactgtgagagcacagagcagggaggttgggtcctgcctgaggagacctggaagggaggcctcacaggaggatgaccaggtctcagtcagcggggaggtggaaagtgcaggtgcatcaggggcaccctgaccgaggaaacagctgccagaggcctccactgctaaagtccacataaggctgaggtcagtcaccctaaacaacctgctccctctaagccaggggatgagcttggagcatcccacaagttccctaaaagttgcagcccccagggggattttgagctatcatctctgcacatgcttagtgagaagactacacaacttttctaagaatctgagattttatattgtcagttaaccactttcattattcattcacctcaggacatgcagaaatatttcagtcagaactgggaaacagaaggacctacattctgctgtcacttatgtgtcaagaagcagatgatcgatgaggcaggtcagttgtaagtgagtcacattgtagcattaaattctagtatttttgtagtttgaaacagtaacttaataaaagagcaaaagctaaaaa

SEQ ID NO: 100580 - DNA, 450 bp, Homo Sapiens
agtgtttggttttcctcgaagcatgggacatcatcgatcatggtattcaaaatgtcttttgcactgtacaagtttatggaaaaaagatcatatgctgaaaagtctcaaagcaaactttgtattaaatacaaaagttcttttatgaaaaacgctgagacccacaaagtgcttagcagttaagaggctgacatccaattaaataagctcttattaagtgggattactagtgctgttgtcttggggaaaaaataaccaccttttctcacctgtgatactgtagggtttcagaatggctttctgtttgggaaagcaagacttgctgttaaaaggctacagtatatattgtgactacaggaagacaatttggtttaaaatcacactgagtacatctcaatatacacatcataaggttcattcggatctaaatagtgcagagaaaaaggctattct

SEQ ID NO: 100581 - DNA, 487 bp, Homo Sapiens
tataatttctacacttgtaaggcttacaaacaagttaaaaagaaaattgcaaataacatttgtccctttcagtcttcacctagttgtgtaattattttaattcactttgcctttgcagaaatttgggtattttctttgtagtgctattgagtctcatctggaaagattatataaattgcattctccttgcttatgtgggtagaatgggagaagaaggcaagacaaagtatacttaaattctatgcatatttctgttatgctttctgttttttttagttgattctgaaatgaatatgccctattcttttgaaagaatggccttttagttgtatagccaaagacatttagtattttccggttccttaaggtattactgtaccattttgtaaaaggaatattattattattatttttaattatttggtaaatattttgtcatatgaccttctgaagcagccacaacttagataatgtcagaactaaggtg

SEQ ID NO: 100582 - DNA, 528 bp, Homo Sapiens
gcaaacagacaggatcttctggaccgctctaagaatttggactttacttttactctagagcaaaagtaggcggggaggtgccattagcatccagtgggtagaggccatggatgctgctaaacatcctacaacacacagagtcctcacagaaagaattatctggccccaatgtcaacagtgctgagatgaagaaactctgcaccaggggtttggagcagagaagtgatatgatcagacttctgttttaaaagaaccactccagcccctatgctgagaatacactagaagcaagaagattagttagggggctactgcagtgattcaggaaagaaataacagtggtggtggcttggagtagacagagtgggaactgggaaggtggtgagaagaggctgaattctggatacattacaaaggtagagtcaaaactgttttctaatgaattgaaaggaggtgtgagaaaaaagagaagcagtaaggtttttgatctgagcaccggaaaacagccttgcctttattgagatgagg

SEQ ID NO: 100583 - DNA, 464 bp, Homo Sapiens
gcggccgcgtctggggtggctcctcatccctcaatgccatggtctacgtccgtgggcacgccgaggactacgagcgctggcagcgccagggcgcccgcggctgggactacgcgcactgcctgccctacttccgcaaggcgcagggccacgagctgggcgccagccggtaccggggcgccgatggcccgctgcgggtgtcccggggcaagaccaaccacccgctgcactgcgcattcctggaggccacgcagcaggccggctacccgctcaccgaggacatgaatggcttccagcaggagggcttcggctggatggacatgaccatccatgaaggaaaacggtggagcgcagcctgtgcctacctgcacccagcactgagccgcaccaacctcaaggccgaggccgagacgcttgtgagcagggtgctatttgagggcacccgtgcactgggcgtgggatatgtc

SEQ ID NO: 100584 - DNA, 274 bp, Homo Sapiens
  misc_feature (52)..(138): n is a, c, g, or t
tttgtctgtccaccctcaccagagtttaaactctgtgaagacagaggtttannnnnnnnnnnnnnnnnnnnnnnnnnnnnnnnnnnnnnnnnnnnnnnnnnnnnnnnnnnnnnnnnnnnnnnnnnnnnnnnnnnnnnncgaatggttctaattgctgggcaccctcccaccaggcctctggtcctgacctgatgtggctaagcaggattctgatggccaaacatgaggaagctggataaggggaaggctggggatggggtgggggaagtggggc

SEQ ID NO: 100585 - DNA, 461 bp, Homo Sapiens
  misc_feature (174)..(219): n is a, c, g, or t
ggagagggatgggccacgctgccgcctggtgctacctgctgctcagcccgaggacgggggcgagtttgtatgtgatgctggagatgactcggccttcttcactgtcactgtcacaggtgggcagtctctgcagcacagagaggaggtagagaggtagggggctaagggacagannnnnnnnnnnnnnnnnnnnnnnnnnnnnnnnnnnnnnnnnnnnnntatccagcttcctcatgtttggccatcagaatcctgcttagccacatcaggtcaggaccagaggcctggtgggagggtgcccagcaattagaaccattcgttcattcatccattcgttcaatactcattgagcaactactatgtgcttggcactgttttagatgctggggatacagcagtgaaccaataagactaaacctcttgtcttcacagagtttaaactctggtgagggtggacagac

SEQ ID NO: 100586 - DNA, 923 bp, Homo Sapiens
agagtaacaacacagcctatctaatatacaatgatggagtccctaaacctgtgaattacagcagaaagtatggacacaccaaaggtttactgctgtggaacagagttcaagggttctggctgattcattccatccctcagtttcctccaattccggaagaaggctatgattatccacccacagggagacgaaatggacaaagtggcatctgcataactttcaagtacaaccagtatgaggcaatagattctcagctcttggtctgcaaccccaacgtctatagctgctccatcccagccacctttcaccaggagctcattcacatgccccagctgtgcaccagggccagctcatcagagattcctggcaggctcctcaccacacttcagtcggcccagggacaaaaattcctccattttgcaaagtcggattcttttcttgatgacatctttgcagcctggatggctcaacggctgaagacacacttgttaacagaaacctggcagcgaaaaagacaagagcttccttcaaactgctcccttccttaccatgtctacaatataaaagcaattaaattatcacgacactcttatttcagttcttatcaagatcatgccaagtggtgtatttcccaaaagggcaccaaaaatcgctggacatgtattggagacctaaatcggagtccacaccaagccttcagaagtggaggattcatttgtacccagaattggcaaatttaccaagcatttcaaggattagtattatactatgaaagctgtaagtaaacttggtgaaaggacacaggtactatcattgaaaaccttgacaatgggtcttcttccattacaccttctttatattttaaaggcctgtgaatatacttataacctgcatatcacaaaataaaacatttttctctcaaa

SEQ ID NO: 100587 - DNA, 515 bp, Homo Sapiens
  misc_feature (274)..(312): n is a, c, g, or t
  misc_feature (334)..(339): n is a, c, g, or t
cacaaaacacctactggaattacacttaacaatggcgccctctagtgggccactgcaaggaaataatcaccaataattgcttttagataagcaattttgtgttagttccacttaataggtaatcaccattcagcagatactggatgaacagcatgggctggcaggctgggagacaccaagtgaggagggtaaataagctgacatatggccctggggaaaaccaaacccagctactcaggaggctgaggcaggaagattggctgagcccaagtcnnnnnnnnnnnnnnnnnnnnnnnnnnnnnnnnnnnnnnnattacagagaccttgtctcttnnnnnnacaaaaccaaacttgactcagactcccactctttgccattcccttctctccagagatatacagcctggataacctcaaaaacatgacaggtcgatccatctaaagctgcaacacagcctatagaatattcaattgtctgcaaactccccaaaactagtaatacaacttgggatagg

SEQ ID NO: 100588 - DNA, 409 bp, Homo Sapiens
tttcacagatttcattagatagtcctgttaagccctggcaataaaaagttaagcttcttaaaaacttaatagaagttaatcaatgttacgtgactactaaaccaagtaaaagttaaggctttattactaacctcttgttggttttttgaaggggaggatcacaaaataaccaatgcacttattaaaaaggtctaagtaatatattagtattacagtagagttcaattgtcagttactaacttactgtatcactgtcattgagtcaattcgaactagctcttcttccacttcacctaccaaaatcccaggctccattaaggtaaaattttacttcctagataactcttaccacactgttttatacttatttacaataataagtacatatggaaatacagtatgatgttat

SEQ ID NO: 100589 - DNA, 439 bp, Homo Sapiens
tttgtaaaaacagcagtcttggtggttagcaggacaaggtagggtccttcccaggcgggctcaagtttttcttctttccaccctttgatgagaacgtgatcttcaggctggtgctgatttactggaaattctagcggtggtacatgtgctaaaagacttttagtttttgagagaaaggaaagtggaagataaaccaagtatataatttttaagaaactgaccttttgttttaaatgtggggaccttggcagtggactttatagtccttagtgtctttttactgagaaatttcctttagcacctatttttattagtttttaaaccaaagaaagccaaataccattttacatttaacaatgcttcttgtatgatttttataccagataagctaaatgttatgtttatattagtgtgttattaatgttaaacctaattttaa

SEQ ID NO: 100590 - DNA, 390 bp, Homo Sapiens
actcgggggtgcagaggaggggggaccacgggcgagctgccaggagacctagaaccctggagcactcggagtcggcacacagctggggctctggctctccctggacggcgcctgcggagcctgcctcacttgcgggcctggagggagccaggagcctgcctcagctgcagacggccccccgcagagcccgggcagagtgagcgactgtcactggggccagcaccgtgtgcaagcccaggttatctagcaggcgactgagtgccgagaaaatacctggcagaggtgggcacaaggcggggcccccacggcaaagacgcacgccgggaaccggaaggaggtccatacccaactcgtgcaataaataaaacttttattcaaacaagtaactgc

SEQ ID NO: 100591 - DNA, 472 bp, Homo Sapiens
  misc_feature (51)..(72): n is a, c, g, or t
tgtacaaacttgaataagtcagttactccttctttgccttagggactaggnnnnnnnnnnnnnnnnnnnnnntaggcaggactgttagcataaaccagaccagggacctgaaaagattaatattttccatggtcagatgaaagatggtacataaatgcaaaatggctcactgtacattattacatttcaattacacgtgaattagttatagagtgacattttgactgtttcctctgggtaattctcataactccacctgtctgacatttccttcctctctcaggtccatatagaacaggtcccactttgtaggagagaggccaccctgcagaatttcaaaacacacaccaggggaggccattgctgaggcacatgcgggaagtttcaaacactcacagatatcaagaggttaatcgcccccagggcttgatcattgaagaactacccactgaagaacagagaaagttcttca

SEQ ID NO: 100592 - DNA, 453 bp, Homo Sapiens
ccatcatcaaaaccatcaagtttaagaataagcagaaacactaacaatatattaaatggagggctacgcatttgtatttctgacttttcagtatataaactgcacacatgaagactatctcaggtcatctgatcagaaaccagtataaagcactaagccttccattagagacccatactgataaaatattccatttacagtacaaactcaagcaaacctaagatccttaaattgtggatatatttcatggtaataacagaagatctaacaaatgaaaactttttgctaatttccacttagcatcaagatagcaaatcagcccacgaatgaagcacacagtatatcttgatatccttcagcaacgaaattggaataatattaagttgtccatgaactaaatggatatataaaatgccaagaggtccagctgaaacagagacctcttttttccct

SEQ ID NO: 100593 - DNA, 592 bp, Homo Sapiens
ttttaactttttaacactttattagttctaataacatatttattcaatcaaaattataaatgttgacccagcagtatgaataatttcattaaaattttggccataatttcccataaagccaattatttttagttataaggaaattgccatgattacataagaaaaaagagcatttgttaccaacaaatacttacagaatgacaaacttgtactagacttaggggaggagaatgaagtttgaactaactttcctatcctcagaagagcttacaatttttctcacttctgccatgtgtttagcaattggaaagcatgaaaaataactccaaataaaggattccatttcagtgaattattcatctggcataaatcataaattgtggtcagctaagtgctaatgtgcttaggcagagttgcttactctgcagcactaatcaatgtttatgaatatagcaagaattactggaacattctctatgacctattatctccaatggattaagtgctgactcattgactcaacagactcaaaattctattgatagttgtgctttgactaacttgttattgcaacaagttttgcaattaaaaa

SEQ ID NO: 100594 - DNA, 540 bp, Homo Sapiens
ttacatggcactcctaaaatcctgatatgtcttagtatatgccattagtaatatgtgtattatgttaaattgttgtatgccacagaaataaccagatttccttgacaattgtatatttaatgtgtctttgactagaatgtcttaaaaattttatcatctacaattattgttttattggattcttctcaaaaagcggcttacagtcaactacagtccaaaatttgctccttggaagactcctgaatgcaggtttctgatgatgtcagaaagactgtgctgttggattagacagaaaacttctaggactctaattaaaaggctgatgtggtcataaagattgctaacccagtatgaagcaaaacaagagttaattgcatggactgagctaatagaggactgaactgattcttttgtggcttttttggtttgaaacattgctgattctttttgttgttcagtgtcaaattttttttctcttgagctatttgtagcccttaacaattgagtatactcttgtaaataaaatttaaagcagaaaaa

SEQ ID NO: 100595 - DNA, 516 bp, Homo Sapiens
ttaagaaggaattcgacatttccatttttcaatgagccccacaaattacgcagctagtcctgggcttctctactctgaaattgggcaggatctctcttgatctagaatttactaaggcataataggggcaagaaaatcttatgaaataatggggggtagggaagagatgggaatggagcatgagatccagcttcgttattctctacttgagaaaaataaggccccaaagattaaacaacttgcccaaggatattgcttgttagtgtcagaactgaaaccagaaaccaaatgatcatatccctagacttttagtctgctttctcttccataaaatgaaacttataatgtttctaatccattgctcagacaggtagacatgaatattaattgataatgactattaattgatctggaaaatacttgtttggggatcaataatatgtttgggctattatctaatgctgtgtagaaatattaaaacccctcttattttgaaataaaaaagatacccactta

SEQ ID NO: 100596 - DNA, 562 bp, Homo Sapiens
tttttttattttaaaattgttattatttaacatgtatccaaaaattcagtcagattagaaaataaaaaaagttacaatattagtaataatgatatatatctgcagaaatcaaaatgattagcaacattaaaacatttagtaaggcagcagataagaaataaatacataaaaatcaagaggactttttacacagcagcaataaccagattgtaggaagagggctcactctttaccagtttacactgggctgggactcggcctccgaaggttcaatctactgctggaaattctgctctggagcaacatgtctaggtagtcttcctctttcctgacagcaaagacagcaaccaagtttctcagaatgtctcgtgtggggctgaagggtctccttgataaacaactgcattttcccaggtggaataagttaatgttcaacaagattgcaggaaatggtacaaatacttgaaaacaagccttccaagtactctcaagtttcctttcttggaaatatcatttatacacacactattggtaacctaattataaaccactttaacttttt

SEQ ID NO: 100597 - DNA, 646 bp, Homo Sapiens
  misc_feature (42)..(52): n is a, c, g, or t
  misc_feature (328)..(385): n is a, c, g, or t
aagaactttcctaccctttccagcagcttatttccctaattnnnnnnnnnnnttgtcaagacaacatttctggagtgtaagtatgttgctctcaatttgggaatgaaagtgccaagtggtttgatggtagatggaatagaaagacctcccaacccaaggctgatgaaagaacgataggagcagagagtatcttctgtgatcagcagtttcacagttgcattcaaaataaagaggactaagtctagtatccacaggaggaaataactgttttctggttcaggggccactggtactggcttaagggagttctgctactcctttgagacannnnnnnnnnnnnnnnnnnnnnnnnnnnnnnnnnnnnnnnnnnnnnnnnnnnnnnnnntcacacctctccgtgggttttttacaaattgaaggtttgtgataaccctgcaatgagcaagtcatcagcgccatttttccagtggtatgtgcccacttcatcatgtctgacattttgataattctcacaatatttcaaatctcttcattatatctgttatggtgatcagtgatctttgatgttactattgtaattgttttggaggcccacgaactgtctgtataagagagcaaacttaataaatgtgtgtatactaactgc

SEQ ID NO: 100598 - DNA, 531 bp, Homo Sapiens
gccctagaagtccaattcttcttgtcttcctctcagagtaaagtgaggtgggaagagaatcccaagtgcaatagggtatctagtctcaagaggcagcaccaccccctgaagcacagcatcttcagtgacctttcctggcttagtaactatgtgaatgtctgttattcagagttaccagatttcaacaaccagagaaaaaggcacaagcatttcctatttccattctctagagatttgctttgttaggaaagcaagactcttagtttctgtcacatggtgtattaagttttattgttgaagaggacgttatcttgagaccaagaatgcaaacaagattctatattagttctaaattgtagatggcccagtttatccagtctcatgttttaaaaatgaacacagctcaatggcttgcaagttgctacttacagatagtttcttcccattgtttgagagccttatgtcacattattaactaaaataaattcaagatagattaaaagagttacatgcagaagagaaaaccataaa

SEQ ID NO: 100599 - DNA, 160 bp, Homo Sapiens
  misc_feature (73)..(81): n is a, c, g, or t
tttttataaagaaaaagtttattttcatcacaagaagcacacacactatatacaatacacaccaacagaagtnnnnnnnnngtgcattctgcatcttctactgcaaattcacagtacaaaagatactgcctttaaatatattatttaaaaaaacaagaag

SEQ ID NO: 100600 - DNA, 588 bp, Homo Sapiens
acggctttccccctatcctgacagcatcttaactcctcaatatttctccacagcaagattcctaaaaaaggctttgtggaggtaactgaactcacagatgtaacatacaccagtaacttggtacgtctgaggccaggccacatgaatgtggtcctcatcctgtcgaattctaccaagaccagcctactacagaaatttgctttggaggtctacacatttactgggagcagctgcctacacttctccttcctgagtctagataaacacagagaatggctagaatacttactagaatttgctcaagatgcagctccaatcccaaaccaatatgataagcatttcatggagcgtgactacactggttatgtactggctctgaatggccacaagaaatacttctgcctcttcaagccccaaaagacagtcgaagaggaggaagccatagggtcgtgcagtgatgttgactctaccctctacctgtgcgaatctcgagggaaaccttcctgtggtcttggatccaagtccatcaaacgatatgtgagcaagctctcattatggattgaacgcctgcttgagggctcctcacaa

SEQ ID NO: 100601 - DNA, 594 bp, Homo Sapiens
  misc_feature (551)..(551): n is a, c, g, or t
tgcggccgctccaacatcagaaaggtgccttggattgattaagttgtatacccagaaagtgacattaatacacttcttgaaacattaccctttccgattacacaaatattctagccgacaaatctgatcatgctaatttcctatttaaagcctttttaataatttctcattcccttaagataaaatcattttggagatcttcctgaccatctaacctaggttataaacctcgtgcgtgcttctacaagctcccatacttcctctttcttaacacccatcctacttttactttttcaatatatatctttcttgataaatttgaactccaaattttcaacacatagcacagtgtcctggacataggtgcttcataaatatttgcatgagtttgaattaaatgcatgtcgtatttcttacttgaaaatcagtaaattgttattctagtttacacagttccttttttttgagatttataaatttgagactactctaaaaaatgaacccactgttgggcttacaataccaatttctagttctacagagccaggctntcgaacacagaaaattcaccagtaagtactgtcttgtcatatc

SEQ ID NO: 100602 - DNA, 632 bp, Homo Sapiens
ggccgcggggcccggaggccggagggactgctcgctgccagggggctcggtgcccaccgtggcggtcttcatgctcaaaattttcatgtcactggtggtggggatcaccagcggcgtctgggtgtggagctccaagactttccagacctggcagagcctgtgctaccgcaagatagcagctggccgggcccgggccaaggcctgccgcgcccccgggagctacggacgtggcacgcactgccactataaggctcccaccgtggtcttgcacatgactaagacggacccctctttggagaaccccacacacctctagccacacaggcctggcgcggggtggctgctgccccctccttgccctccacgccctgccccctgcatcccctagagacagctgactagcagctgcccagctgtcaaggtcaggcaagtgagcaccggggactgaggatcagggcgggaccccgtgaggctcattaggggagaatggggtctcccctaatgcgggggctggaccaggctgagtccccacagggtcctagtggaggatgtggaggggcggggcagaggggtccagccggagtttatttaatgatgtaatttattgttgcgttcctctggaagctgtgact

SEQ ID NO: 100603 - DNA, 552 bp, Homo Sapiens
caattgtgtagcattttagtagtctggcaagaagttggagtgtctaatgtgtaattacgagaacagtgagaaataaaattctacagattgttttattctggtgtgctgttgtgttctcatatggttgtctttttggtcttgatagtgtatcagtaacagagtacgagtaacaaacagggatctcttctgaacggcgtgacattagaaaagctgtttacggcctcaactttgctgtggtttattaagacacagatatgtgttcattctggggccaagcagtaactggagagtggcacttattgaggccagtatggaggcagtacagagattattgagattaaaagaaagaaacaggtggaacggatctatgtaatggaaagctaaacagaatagttcgtggtacacagtagaaaagcattacatgtttattaagatatggtcatcttccatttattaaagttacatgttttataatttttagagtatatagaaattctctaccctatcatgtttgccaaagtcagaacaataacttcatttattaaatataaa

SEQ ID NO: 100604 - DNA, 274 bp, Homo Sapiens
gggagggaaaaagacaagcagcagactgggagaaaataattgcaaatcatatatctgacgaagacactggatccggaatatataaagaactacttcaacttaataagaagatgacaattcaaattttaaaatgagaaaaatatttaaatcagcattttatccaaaaagataggtgaatggctaacaagcacatgaaaaatgtttaacattattagtaataagaaaattaaaaccacaatggcataacaacactaaccagaatggctataataaa

SEQ ID NO: 100605 - DNA, 590 bp, Homo Sapiens
  misc_feature (364)..(403): n is a, c, g, or t
  misc_feature (438)..(460): n is a, c, g, or t
atcctgactgcaaggcccacctgcccctcccccacagagcctccagagctagctgaggccaacgcaggcccatccgtctcttcactctgtcgcaggccctttcatgggcttcgtctgccatctttgtgggtgccctagacttagtccttatcttgtcctggtttcctttcttgtgaccatctccccatgaaagtgctgtacaaattccacccgccccaggacccccgcacctgccctctggcaccagatgccagggaagggacagaggaaaacagccacaaacaagccaaggtggctccccggagccccaggggtggggattggtggccactgtttgtatgttcttgagtgcaagtgttttatnnnnnnnnnnnnnnnnnnnnnnnnnnnnnnnnnnnnnnnnttttgcagcgaagagaaatgaagaaaaactgaagnnnnnnnnnnnnnnnnnnnnnnngaaccatacaaaatttttccaccacacataccctctaagccagcaagatttcctctttgcaaaatcatatttttgtgggaatgggccctgctttttgtggcaaggcctgttctgattaataaaggatcgt

SEQ ID NO: 100606 - DNA, 470 bp, Homo Sapiens
  misc_feature (117)..(126): n is a, c, g, or t
ctggaattgtaggtttggccaggagtttgccaggattgctcgaaggtcatcttccaatcccaggaggctgggggtaaggggaggttcatcatagttctcaaaatagatctgttgagnnnnnnnnnnacagattacatgtcagctacaaccagtaaatgtggaatttgaggcttggggttagcacaaaagagccctccagttgccaggagtaaggtagggctgccagaataccagtgacccagtgatcaccctgtccctgggccccttcttaacaagcccagatgcagtgacagcaaaagctccagaatcccaaggcaggaggtgccaaaaacaccccccaacaaccattaccaaaaaaaattttcagtaaaatgttctcacccctagaggggaaaacctgtccatgcctgaagcagcttgaccccagcaaacaccctgcctccatggagtgaactgcaaatctccaaaaa

SEQ ID NO: 100607 - DNA, 564 bp, Homo Sapiens
  misc_feature (111)..(312): n is a, c, g, or t
tttctgtaactttaagagcatgaactcatcctaatgaggtttgacagcagctttgtcacacattagatgtttcctcagctgtaaactgggtcagaagcttggagtcactgnnnnnnnnnnnnnnnnnnnnnnnnnnnnnnnnnnnnnnnnnnnnnnnnnnnnnnnnnnnnnnnnnnnnnnnnnnnnnnnnnnnnnnnnnnnnnnnnnnnnnnnnnnnnnnnnnnnnnnnnnnnnnnnnnnnnnnnnnnnnnnnnnnnnnnnnnnnnnnnnnnnnnnnnnnnnnnnnnnnnnnnnnnnnnnnnnnnnnnnnnnattattattattatttccacccctccaggctgcctccacaggacagtgttgtgtacttctaggtcgtggtttgtagcacagatctaaacttaagagtatgtgcttatataaatacccagcatattgacccccagcctgtctaaactcagtctcacagctcccttagcttaaaagacaagaaagggttagaaccccggatcagagaccaggcagccactgcttgcagctcatggaacattcactgcctcttca

SEQ ID NO: 100608 - DNA, 495 bp, Homo Sapiens
  misc_feature (111)..(312): n is a, c, g, or t
tttctgtaactttaatagcatgaactcatcctaatgaggtttgacagcagctttgtcacacattagatgtttcctcagctgtaaactgggtcagaagcttggagtcactgnnnnnnnnnnnnnnnnnnnnnnnnnnnnnnnnnnnnnnnnnnnnnnnnnnnnnnnnnnnnnnnnnnnnnnnnnnnnnnnnnnnnnnnnnnnnnnnnnnnnnnnnnnnnnnnnnnnnnnnnnnnnnnnnnnnnnnnnnnnnnnnnnnnnnnnnnnnnnnnnnnnnnnnnnnnnnnnnnnnnnnnnnnnnnnnnnnnnnnnnnnattattattattatttccacccctccaggctgcctccacaggacagtgttgtgtacttctaggtcgtggtttgtagcacagatctaaacttaagagtatgtgcttatataaatacccagcatattgacccccagcctgtctaaactcagtctcacagctcccttagcttaaaagacaagaaag

SEQ ID NO: 100609 - DNA, 526 bp, Homo Sapiens
accattgatttccaagagatacacgacaattcatctctgtattaatctaaaaattaaagttttctgttaaaaagatatcttacagatttcctttcactttaatacacattattttttaatgcatttacagaaaatgtggaaatgtacatcggtttccacagaacgactgctaaccccctctaagctctaaaagccttttaaaaaggacaattattaatggcacccaaattcaggagattgttgacttactggtatacaaatacatgtctgtgttcagaggaagcctgtattttttaggacaattccctttaccacacacacagatgggagcaaagtgggaggtaatatgcaatgaaacagccactgaacgaccaagcatacccgcttcacataaatacagccccactgtatttaactcccgggagagtctagcatcgcagctaacaatggatgaaaccacggaccagaattccaagttagaatgcaatatacagagggtgtaaatatactacagtgttctaccaca

SEQ ID NO: 100610 - DNA, 685 bp, Homo Sapiens
  misc_feature (570)..(622): n is a, c, g, or t
gcagtgtggtgcctatccaacatcactgcaggaaatcagcagcaggtacaggcagtaattgatgccaatcttgtaccaatgataatacaccttttggataagggggattttggcactcaaaaagaagctgcttgggccataagtaacttaacaattagtggaaggaaagatcaagtggcttaccttatccaacaaaatgttatcccacctttttgcaacttgctgactgtaaaagatgcacaagttgtgcaagtagtactcgatggactaagtaatatattaaaaatggctgaagatgaggcagaaaccataggcaatcttatagaagaatgtggagggctggagaaaattgaacaacttcaaaatcatgaaaatgaagacatctacaaattggcctatgagatcattgatcagttcttctcttcagatgatattgatgaagaccctagccttgttccagaggcaattcaaggcggaacatttggtttcaattcatctgccaatgtaccaacagaagggttccagttttagaaagatgttgtggaagttaggtacaatgcagcactgagnnnnnnnnnnnnnnnnnnnnnnnnnnnnnnnnnnnnnnnnnnnnnnnnnnnnnaaaaggtttgatccatcaagcttggctcatgggatctgctgctgcatttaatcgggaaagaaa

SEQ ID NO: 100611 - DNA, 472 bp, Homo Sapiens
  misc_feature (160)..(160): n is a, c, g, or t
acccagaaaggtgagatgatttgcctaaggccataaagcttcaagcggcagaaatgaaaatagaatttaggctctgactactgactactgctccactgtatccatgctgtctcctcccatatcccttgtatattttgaaagtaattaagttcttacctgnagctaggttttatccaaatgttcaggttggtaaaatagcagtaaagtagtgccaggaagaggcaggcagaggaagaagagatttagcaggtgaaatgaggttgggagcaggctactgggatccaaatagtcagaaagaaaggaaggaagtgctggtaagaaggaagggaggagcgtatcctaaagaactactcccaactatacaactgttgttttcctcccaattttcctagggattcctcataattatctcctttctcttcataaattctacttactgacctgaaataaaatttctcatttggttgtcaaa

SEQ ID NO: 100612 - DNA, 481 bp, Homo Sapiens
aaacgtttggaatgcagcaaaagcagtgctcaaaggcaattttatagctgcacatgcctacattaaaaaatacctagaatcagcaacctaaccttccaccttcaggaactagaaaaagaagaggaaatcaaacccaaagctagcagaaggaaggaaatagtaaagactggagtagagataaatgaaatatacagtagaaaatagaatccacaaaaccaaaatttggttgtttgaaataataatgttcacaaacccttaaaaagactgagcaagacaaaaagattcaggttactaaaatcaggaataaagtggggacattactgccaatcttacagaaataaaaaggattgtaaggaaatactattaacaattatatgctaacaaattagataacctagataaaatggacaaattcctagcagcacacaaactaccaaaactaactcaagaaaaaactaaacctataacaatactagttaaa

SEQ ID NO: 100613 - DNA, 544 bp, Homo Sapiens
ctatgatgttgccaccggaggaaggtgccaaggatatcggcttcagagccagctaccatgtgaaaagtccagcttgatgacctagaaggacctttacctgcagaaggacaaggcttcaactctgttctgcagattctccttcagtaaattgggagtgcccttccacactggtcaacaggcccctccctgctgctttggatcaccaccttaagtcaaacacaattcaagtgccttcaaaagagcagcacatggactggcaaatcgtgactggtgaaaatgggcacaatcaagtagttaacctgcacctattctcactttttgcagacttccaaactcgctgaatgcacagaggccttggcctggcttatctcctcctcgctcacttatcctgaagaattgctttccctttagacaaacattctgtaaaggatcagatggtaggtctgtggcagctaatttcccatcttagtccttatgcctgactaagcagtcaatgaaagaaaaataaacctgaaacactcacacgaggcataatcaaaaaaaa

SEQ ID NO: 100614 - DNA, 586 bp, Homo Sapiens
tttcattgtttaggattttaactcaaaactttatgtagaacatttcagtatatttgagttgaatatttttttattaactatttatttgctagttccataaaccagctctttaacatagcttatagtaattgatattttcttagaataagtacagagcaatatatcattaaagggctatgaaggggcaaaagaaatcacaccataaaagttagtactttttcccaatctgaaatgtcagatagagctagaagtcagatatttaggctgtttaaactttctgagagtttaatcaaaaggtgtgtatttctagaaggatgactagaaaaatgatgtgtggttgcttctgaatgggaaacaggagtcagggctgacaggaaaacttagagtggctataacatttttaaaataatcttttgagttgtaaaatagtaaatcacacattccaacttttccatagaaaggaaaacatgtaaacaggtaagaactaagtattcttaattaaatgacccagtcattgtagtacatcttaagaataatgaagagatgtggagaattgaactgagtaatgaatgatattaaagaactg

SEQ ID NO: 100615 - DNA, 510 bp, Homo Sapiens
ttggttttctcatctgtaaaattggagtaattctacttatcttaaagggttgtgaggattaaatgcatttaaagtggtaagaacactgccttatacatagccctgtgttttcatcctcataaaagctgaaaataaggttcaagtagtattttgatactacttatagatctaaaatggatcagggaaaatatgtgattacttgatgtatgttatttttatagctgagattatacaagacagctatcataatctcccttaggtaatgccactgtcaaagataatgaagaactgggtggatcactggtgagaatagaagtgtaaagtgttgctttttattaaaatatgatttacttggttgctttcaaagaacccaatataattttctttgtaaaatgattttgacacgaagtagcagaaaaagctccaaacattagaatatgaccagtgtcctggcttcacagttaaactatctttgctcagtttccctacttgcaaaataaagtgaagtaa

SEQ ID NO: 100616 - DNA, 469 bp, Homo Sapiens
agtgtgcttcaaaggcatcagacgatgaaagcaacataccacaactaggagttatttctcaaacttaaatgtcctctgggaatccagacttaaaaataagagcaaacttaacacactatccattttcgagcaaacttaacccactatatccattttgctcatgtgttttatgcaaccagctttccatcaaatcctcaatccttgaatccaggtaaaaggttaattatcctaggattagtgaatgattcaatgaagctttcttgaaaacaaacataggagtgtaatgtactattatgtttgtatcctgttttagtttataaagcactttcacatacattatggtatttcttcctcacaataaccttgtaaattagtcaggaaatgtaaattttatctgactcatagaactaatggaagctgaaagccaaaaataaagtttataaccaggccttcaaactctcaaaaaaaa

SEQ ID NO: 100617 - DNA, 474 bp, Homo Sapiens
gccagcccattggtgggcgtgcggtgcgggaaggcttaggcgggaagaggaggtcttgctcagatgagtgttattcctttgtttggacagaggaggttgggcaaattggagtgtaggatatttttgcctggagatttttacttgatgaaatcatcccatgaaaaaaatccccaatttttaaaagcatgctactttgacacattaaactcatcattttaacattgatagaaagtatttaaaatgggcctttgcctgaaaataaacgtcagtggattggaagcactgagggccttcgtccgttctgtcccaacctttatgggcgctgcacattttcactgtggaatctacagggacgaactctgtcttgtgtttactttctacttgtttctcttgaacacacacatgcattaacactgtaatgtatttattactttgtatgtcattaataagaatatatttagataatattgaaaa

SEQ ID NO: 100618 - DNA, 478 bp, Homo Sapiens
aattgagtggctctgggctcctatacccctttcattccacagcctgtgatacacccttagagtcaaaatatcaaattcagtgggccatgagtcttgcccaaaagtataaatctttttttcatatggactatttgggtctattttcaaaaatccctttttcttctctaaactatctcaattccacatttcactttgcaggtgtagacatgacttttaggttgttgatgatttaatgctattgaaatgttcttatatgcaaaacacctagatagatgcagagtgtgggacaaagacaaccagcacattgctaagcccaagtagcaaatttcctgaccccattttaaaggttctgagacagataggcggaataggtccccctgtctttgagtagaagagttggcaagcaagctggactaaatgggccatgtgcaattttgctgtctgttcacatttcaaataaactaatgtgttatgaaaa

SEQ ID NO: 100619 - DNA, 549 bp, Homo Sapiens
caattcgaagtacaaatatttcaaacacatgtgaaaaccatttggaaagaagaaaagaggtatctggaatgatttcatgacagaaatgaaaaaaataaatttagttctaatcttcctggcaacaaagccccagaggagaaggtttcattgtctgaagataaaaacacacccgtttgcctggatatgaacacatattcctgcaccaaattctagaaagaatatactttcttctaacaagccaagagtttttcttgtactcattaaagggggctttaatctaaatatttttaaatcttattaaaatgcataaaagtaaaaagatatttcacatagaatcaagcctatgaaatcataaatctataactctaacaaacgataaagacaaaaacaaccttgttttcacaagttgatttttaaactccaaattcctttatcgaagcagctatctgctaatattactgaatgacaagtctttggaaatgatagttaaccgaaaatgcagaaagaatcataacaactaatgataatgacgggtaaaggatagaaaaa

SEQ ID NO: 100620 - DNA, 500 bp, Homo Sapiens
tcccagtgtggcccaaggaagccaaaatttagacaaccctgctctagagggtttgattcatgtttccactgggttatgcttattgcctgtaattccatttgatattttccaaatttgattttttaaaaagcgttttcctgaagcaccctaaagctttcctaataatatgggaacttaaaccagattggatgtgacaaaaccctgctggaatcctgcaacttctaaccttaatgttagatcaagaagcaaaacacccaccagtccaagggtcagggaagatgaagatcatgcctgagctgtaacaacgcccttcccagtatacaaaagcgtgtaacagccactcgaattctatcttccaagtgtctcctgttgcccaggctaacctagagctatctaaagatggcaaatctgggaaatgtgcattcagcttggcaaaactgatacattacaaatccaccacagtccacttcttctcaaagtggcatcaatgtgcaccttcc

SEQ ID NO: 100621 - DNA, 388 bp, Homo Sapiens
gctaagctaaatgttatttctttttttccattgactttgtacaagttgataagttaaatgttacatatgtaagttcttatttcttagatgatcttttaaaattccattgcttttctttaattttagaaagagcgaaaaggaaaggatgagagaataccaacgagaactagaagaaagagaagaaaaattaaaaaagaggccactgctatttgaaagagttgctcagaaaaatgcaagaatggcagcagaaaagcattattctaataccctaaaagcactaggaatatctgatgagtttgtttcaaagaaaggccaaagtggaaaagtacttgagtacttcaacaatcaagagacgaaaagtgtcactgaagacaaagaaagctttaaa

SEQ ID NO: 100622 - DNA, 573 bp, Homo Sapiens
tgtagatgtagagggggagaggactaactacaaagggcatcaggaaactttttaagatgattggcatgatagtttcacaaaaacaatatttctcaaaatgttaaattgtactgttaattttgctgagtgaaaattatacctccataaactgactttttaaaaaatggatttaatgattatccctacataggtgcctcttcctcaagtttctttacctcaaaaaatggcatcactatctgcctatttactaaaacctgaaaccaggcaatgatacttgggacttcctttttccttcacaccccacccacatccaatccatctctgaatcccaacaattctacttccaaaatgtattgcaaacccatctcctaaacttcctatctgagcttgcccctggtgcaagccaccatcttctctcacctagactattacaatagcttccctactggtctccctgcttccattcttgtctacctccaatctattttctgcatagctccagaataatgactttaaaagaaaattaaatcatgtcactgtcttactgaaaacttttttgtggctccatttcag

SEQ ID NO: 100623 - DNA, 683 bp, Homo Sapiens
  misc_feature (315)..(322): n is a, c, g, or t
  misc_feature (571)..(607): n is a, c, g, or t
tgcggccgcggttcccaagcccacgttttcctggctggagttcgatgggattaacttcctctccgagtagaatagcgctctctcgacgtcactgtgtcccggcttacaactagaggtgtcgcacacacccacttgggtgcctccccttccaaaaccaagcagaaaggcgtctagaaaattagaaggttttgccagttggtgctggcgtagaggacgtttcgaaggcgcttggagcaccccaccgttgcactggatgtagctaccccggcttgtggtcaatagagctccacctggcttttggggggtggcgggggnnnnnnnnaagagttgttttttaatccatactttatccacttttcctgtgccttctttccatcccctaatacatacaaggggaaattacctgggtggactttttagtgaacgtaaatgttcctttatgaccgtgatttaatcaatgcactgtttgctttctattctttttaaactagttattgctatggctttaaaatatcgtagactgtatagttttactgactgctgtttttcatcaaacaggattttattgttnnnnnnnnnnnnnnnnnnnnnnnnnnnnnnnnnnnnnctacatattattgcgagtcattgcctctcaacactgttaaatatttaaagaaataaatactgcagaagctgggaaa

SEQ ID NO: 100624 - DNA, 621 bp, Homo Sapiens
gtggggatcaatcagaggaaaggccagttctcaatctggtctgaggatttaacctgtagcttggctttcaggctttaaactgtctttggcttggaagtggggtttcactgggggtcccaccccctatctgcctaggcatttggctgccctcctgtcactgttaccagggccatagtttgagctgccttcctgcccttcaggtcctgcacagtgggtctgactgagcaagaggaacctggaccagttggctgtgcccgaccttgccctccctccctgattcatggcctgcccttggcttgtttcttcagtcaatgacagctgagtttgagatggtatctattccagcatcttcatgtacatttcagattcatattcttcaagaataaaacaagacttcacggtattaaaaatggaacaccagtggattgcatttccaaagcagttgagaattgtcgggactgacagctcacttcagttcagaataagactggaaaagtattgcttgcacagcaaaaacgatgtagatgcttaaatcaatgtgtggttcctgattgcgtgacaaaagtatagaattatatttgggtattgtgaaataaagttttggaaaaaggatagaaaaaa

SEQ ID NO: 100625 - DNA, 597 bp, Homo Sapiens
  misc_feature (155)..(155): n is a, c, g, or t
  misc_feature (449)..(473): n is a, c, g, or t
atctcggactgtgcatgtgatcactgtgctcgtgttgcaaagtagaaggatgtgttttttgacactgacgttttgtctcttgttccccagcccccagcccatgttatcttgggtgtcgaatgtgtccattccatgcagaaccacagccatttccncaggcagtgttgggtcgagaatccacttttctaaacccacacagcctagctggcttgtctagactcttctaggcattggaattgatgaaaactacagggagcggggaaaggagacattatgtcttgttttcctgactttgggttttgtttctcactgtgtcttctccggctatcatatatgtcccctgaatctcatagtgagctgccaaatttgaagtgcatcacccagttgtctgcatctggaaccagtcaagcagtggctgtagtttgaacaagttatgtgtgcatgtaacnnnnnnnnnnnnnnnnnnnnnnnnnagtatgtgcatgataatgtatatcttcgtactttttgatacaatgtattcatttgttaatttttaattatatttgatataaatcaaaggtttgttgcaaaactttatatttaagaagtgttaaa

SEQ ID NO: 100626 - DNA, 305 bp, Homo Sapiens
gtaatcgcttcccctcgggagccataatgtaagaacaaattcacattgaaaactcgactagaaaatttgttcatataccctgtttctgatcaaagagtggagaaggtaaagggtgcagggccagtggcctatcgaggagcaggaagagataaatatcgctatgatacagccattccagcaaccaagattgctacgtcacataaactataaaaacgccttaccaacgaggggggaaaccgggaaacggagtgcggggcggaaaagagaaaaaaggaaggaaggaaaggacaggaagaacctaaaaa

SEQ ID NO: 100627 - DNA, 360 bp, Homo Sapiens
ttccccttcacctcccaaaccactaccacctttaatatattactttcgctttttgtatttatcagtgattcaattttattttactgtgattttggtaaacatccgtagtgttcaactacttggcagatttgtccccctttttgtgataatagaactgtaacacttcttggttacatcacatgttttactatctgatgattatgttggtcatcaatccttcttctgcaaggaacacaatataacaacattacaatgcatctttgttttgtttttgctgatttgggtagaacatagcaaaaataaaaatgcgttcattttctgtcattttggtaataaatctgaagccatgcttaacagaaa

SEQ ID NO: 100628 - DNA, 512 bp, Homo Sapiens
ttttttaaaataattttattatatataataagcagagccactggaagaaaaaaaatcttgtccagaaacggagcatgagatatatactaagtccaggtcttatatctaattcattaggcaaggcaatactatctgcaaattcacaggcctagtgtctgatctatcactgacatctgattctggaaatctgataacggtgattttgtagaacagcaaatgcctcaatctcatctcttttctgccaagagtctcaccttcaaaacagtttacttgtccgcacatatgcacagaaacatgcaagaaggggaaaagggctcatgggaggatggagagagaaaattttgaaaagggaattcagagaaagaactatgtggttttgaaaaaacaacaaatctgttcctaaacacttgctaaacaccttcaggaaactgaaaggcaatacttgcctttagatatctgctttgtgattgttaaaatacaatcagaaaatgactcctctatacataatacat

SEQ ID NO: 100629 - DNA, 381 bp, Homo Sapiens
  misc_feature (43)..(54): n is a, c, g, or t
aggaaattagttacagatggaaataacacaccatgttccaagnnnnnnnnnnnnctgacacagcatggtagctactgatctctatcccagttaagtcactaaacattaaagttaaagaaagaattccttgaacacaaccaaccagacaataaagcaagttgcctaaaaggggtgaagcagagttgggaattggacttatctcagacctctctgaggcaaggttcaatgccagaaaaacatgaaacatgccacaaatttcagagacaaaatgtggcccaagaaaatgatacccagtcaagatgttgttcaaatataagaaaaagagatagtctcaacatgaaaaaaatccaaggaatttaagacaaagagcttttctaaaaa

SEQ ID NO: 100630 - DNA, 531 bp, Homo Sapiens
ccacaatctcaagtgttgagggttgggtcagcctactcagcagacaggcttactatacagcctgacacttggggggatctggggggcctctcacttgggaaagctaattctgaacccagccatcacaattgtcccttgcactttaccagatacttaaaaggtgcaaggccctctggggagcaggaacccctccccggcacatcccaggccagacccctgctccactggggaggttggagcagctctgcacacctctggaaactatgtggatttcaagtttgcagcactagtctaaggaaaagctcaatgggtgtgctaatttgggttggggagtgaaaacagaaggctgtgccgcctgccatctagtgggtgttgggttgcatcactcccaggcctcccaggctcctcctggactgggaaggagaatggagaagcacagcccttccttaattcagctctttctgtttctctctagcttgaaccaggcagggctttgccatcccccaatgacctcaaaagaaaaatactcat

SEQ ID NO: 100631 - DNA, 607 bp, Homo Sapiens
ctgtactcagtgctgggatgacatgtcacttactttgtccaatacaagtctcagtaccatctcatgaggaaagaacatgattaatccaccttcacagaagtggataaggaggctcaggggtcctgcagcattttcgtggtcacatggctgctaagcagcagaaccaggaataccaagtctgtctgataccagagctggattccaaccgattccctagacatcctccccccaggccaaatccattgaacatcagctgcactcagagacggcaccaaccaagcacttcctgtgtatctttgaacttaaatgaaatctaagtactctgcagccttgttctgtctcaaaagcccaataatctccatttctcccacaattctcagcaattagctaacataattcttatgcctttatgaacatatattcatataaaattatggactgaatttcccatatctaccataggacaaaaataaccccatgaaattctggcattttttgctttcaggcctattattctttctagacattaataatgattataagcagaagaagtttagtccaaagaaatgagcaatgggtacaaaataaatagaaagaatgaaagacc

SEQ ID NO: 100632 - DNA, 614 bp, Homo Sapiens
agctaaagtctgttaagatatgttcatgcctagaaatagatgtggatctcagtaaggagtgacatatgtggcaatgatacctttccatactgtggatatcattggcacagagtaaatactaaaagaggggagtgggggacctcaatgattggaaagttttcattgcgcaaaaagtgtgatttggtcataagtaagactccatgtcctgtgcacattatgaatgatgtaaggcaacttaacaattgtcagctatttcttttcattgttcttattttgggaaatgggtgaaatgtcagtaagttgttggaagaaaaaacatacccttttagatcaatatgacatttgcaatgattagacctgattacagttgaaaatgttgctatggttacacattgtcgacatagtgttctgtaatttagatggacaacttttagggtttagagcatatagtcttttattttgttcagtatccatagttggcagagtagtttttaaattaggaaattatcttaatatcaaattctgtactggaagttttaatatttcaaattatattttccccttgactataaaatattatatattagttgtgaaaaatatagaaaatacagaaa

SEQ ID NO: 100633 - DNA, 565 bp, Homo Sapiens
tttctattggatgccacaaaagaaggaaatgtcggccgcttccttaatcatagttgttgcccaaatctcttggtacagaatgtttttgtagaaacacacaacaggaattttccattggtggcattcttcaccaacaggtatgtgaaagcaagaacagagctaacatgggattatggctatgaagctgggactgtgcctgagaaggaaatcttctgccaatgtggggttaataaatgtagaaaaaaaatattataaatatgtaactaacgcctgtttgtgaaattagcttatcaggctgaaattaaagccatgcaaaagaaggtctaggtccatcaaggaaattcccctccgttttcctttgtcatggggtttatgttttatttcagattttatttgtgtgacttagaaattccaggaacacaattaggatattttcatacacatagggtatcttgttacactgctgtgctcactttacatgagtaggatgcaagtgtatattttatatgaaataccactgtacaatttataatttatttacaaattatatattaagagaaacaaa

SEQ ID NO: 100634 - DNA, 458 bp, Homo Sapiens
  misc_feature (72)..(130): n is a, c, g, or t
gtcctccaaatggctctgcaaataattcatcatacacatttaggaatggaaaacagggagagttaaggaatnnnnnnnnnnnnnnnnnnnnnnnnnnnnnnnnnnnnnnnnnnnnnnnnnnnnnnnnnnnatatttgaatctaaatatatgattctaaagcttatactttatctactttcccgacaattactcctcaagaaactcacagtctagcttggttggatcaaattcatccacagtgcagagagcctgaagtttttaatatacaccacgtgtacacatgtgcacacaaaagtaacataaatatcagacatcaagcaaacaagctttcttcagttaatcaactgagattacctcaaataactttatgaataattttatgctattcaattatgagtccaccaaaattacaacctggaactggggttattaatcaaagaaaagttggcggccgcaa

SEQ ID NO: 100635 - DNA, 839 bp, Homo Sapiens
  misc_feature (110)..(123): n is a, c, g, or t
  misc_feature (745)..(745): n is a, c, g, or t
ttagcatggaagcctgtgtactatttgtaaattcaggttcaattagttctcattgcagttattggaacagtttctatgaagtttcctttaatgatagtgtttactgttgnnnnnnnnnnnnnnagcctcaaaaggtgcatctggacttattgatatgtgttatcaatagaacatcattatgattattcttatttccagacacgtactccatcattctccacatatcatactcctcaaaaaatgatatagttcccaaagagaggtgtcagtgtcttgaaccgtcaagttcaagaggccatcagactcaatatttactcattccttcatgaaataagtacttaacaaaaagctgctgcatgccaagtcactgtgctaggcattgaggattcagctctacacagggctgtcttggtccttgctatcttttagctaaaatgtagacacataaataaacaattacatatagtgtgacacattctacagtgggggaatccagggttctcaggcagattgtaggagagccacttcatctagatcacttattttcagtgcttcaactgtgttttcaatgaagatgtcactttgaaaataatacttctaatttatgccccaagtgttattgcttttaacttaccatagttttactacataaaataaatgaactgccctcatcaatagaccatgtaactacattggatagagcttgtaataggttttgtgtccttttctgtggaatatctgcttntaagtatcaactgagatatttcctgcttcttaacaagatttcttagtcctcagtatttacatttaaaaatccaaacagctttgacaacaattgt

SEQ ID NO: 100636 - DNA, 569 bp, Homo Sapiens
  misc_feature (300)..(334): n is a, c, g, or t
aactaaagtaattgcagggacacattaaaccaaaggggtgaacaaaagaggtttaaagtttgtatctagaaatgaaaaataagaatcattggtaagactagtaccgattattggcaattggtaattgataattggtaagagtagtaccaaatagtgggcatttttcttaaaatacatacctctaccccaaaccccaaatgttaatttagaatcctgaaacaggcaggtcaggctctgactcttttgtttaaggaaatgtaatactgtgtcaactaaactggcattaggttcttagtggannnnnnnnnnnnnnnnnnnnnnnnnnnnnnnnnnnagaggtatgtttgtgatgaaaggttttgcactgttgcataaagaagtttgattttgtgatttttaaaatgatattcatttggagactttttaaggtaatttaaaagatgtataatttccgtgtgtttaatgaaatctgttgtcgatgtactaatcttggtttacagcatcttgaatacttgattattgaaaattaagaaaaaagttaaaaatgaataaagtgtgttggactgaaa

SEQ ID NO: 100637 - DNA, 504 bp, Homo Sapiens
gattaacatccttattaaaaagacctggagacgtcccttcctcctactgccatatgaggatgcagcacaaatatggtgggtgtctataaatgaagaaatgggctctcaccaaaacctgatcctgctgacaccctgatctcaaacttccagccttcagaactgtgagaaataaaggtctgttatttataagttattcagtttataatattttgttatagcagcctgagatgactaagacacagccagtttactggctttttgataaataatagataactgattattttaaaactcatgtgggtatgggagcaatagggagagaaaagaggagataaaatacacacggaagttggcacatgctctccagggttttgcagaaaccaggtggtagccccaaaggaaaatcaataaccactgcttctatttgtggctctgtttccacagaaacatgtttgtgggtgaatttggaaggcagatttacaatgccaaaacaatcagtccaaa

SEQ ID NO: 100638 - DNA, 559 bp, Homo Sapiens
  misc_feature (510)..(510): n is a, c, g, or t
agatcttaatgcaacacctagttcagataaaatgagtgaaattcatacagttctgagtgaagaacctagatataaagctttacagaaacttgcacctgatagggaatcccttctacttaagcatataggatttgtttatcatcccactaaagaaacatgtcttagtggccaaaattgtacagacattaaagtggagcagttacttgctagtagtcttttacagttggatcatggccgcttaagattatatcacgatagtaccaatatagataaagttaacctttttattttagggaaggatggccttgcccaagaactagcaaatgagataaggacacaatccactgatgatgagtatgccttagatggaaaaatttatgaacttgatcttcggccggttgatgccaaatcgccttactttttgagtcagttatggactgccgcctttaaaccacatgggtgcttctgtgtatttaattccattgagtcattgagttttattggggaatncattgggaaaataagaactgaagctcctcagatcagaaaagataaatac

SEQ ID NO: 100639 - DNA, 490 bp, Homo Sapiens
tgcggccgccaacatcatagacatctcaactggttcagcttactcaattctgactgaaagttaaagttgagcaaactttccactcaatgagtgtcgaaaccctcatgcccagatcagctgcagacaagagcagaggtttcaatggaaattttaaacaagtgagattaagatcctgaagcatttcttgaaagaattgtaacaggagataaaccatggcttcaccagtacaatactgaagactaagcacaatcaaagcaatggctaccaagaggccgaagtggtcccattaaggcgaaagtggaccagtcaagagcaaaggtcatggcaacagtgttttgggatgccaagacattttgctcgttgactttctggagggccaaagtgcagtaatgtctgtttattatgttttgagaaagttggccaaacctttagtagaaaaatgcccaggagaacttcactagagtgaccttcgttcaatttcagatcacca

SEQ ID NO: 100640 - DNA, 451 bp, Homo Sapiens
ggaaaagcaaatccatctgatctcctggagctgggacactcttctgcctgtggacatcagagtctaggatttctagcccttggactccagggcatacaccagtggcctcccgaaggatctaaggattttggccttgaactaagaattacaccatcggcttccctgggtcttaggtttttgggctggattaagtcctgcttccagcatttcagggtctctgctgtgcagatggcctgttgtggaacttctcaacctccattatcagatgcattaattcctccaataagtcccatttcatatatagtcatttaccccacaacatttcagtcaagggaacagcatataagatggtggccgtccagtaagctaaggttaatttattaattatttaatttatttaccttgagttcaagtcacaattaaagtacatatacctttggaaatttgaaaa

SEQ ID NO: 100641 - DNA, 456 bp, Homo Sapiens
  misc_feature (230)..(238): n is a, c, g, or t
cttgtcattccagttaaagagacaccatttgacattttagagatggctgcatgcaaactcttgaaacatttgagtaagtacagtacaccagggagactcttatgactattgggataacaccaagatgtggtatatgctccttactcagggtccccataaatcaaaccaccaaaaatcaaatagattaaagaatgcattagataaagggtttacttgcttaactaagtggnnnnnnnnngttaattccctacaaccaaatctttataataccccatgttttctccacatgctgtaagtgttagcagctgcacagatacttaagataagagtctcatgatagtagagaagtcttgatctgtgatcttgggaaaagctgttcacattaaggatgccatcttcctctggggggaactgtccgtgttagctttaccttaagggttccaataggcctatggt

SEQ ID NO: 100642 - DNA, 483 bp, Homo Sapiens
  misc_feature (95)..(112): n is a, c, g, or t
actttggacttctttacccaaccagtcatcttgcacaaacagtaaactccctcaaaactttctgttcccatgggacccttgagaaaacaaaatgnnnnnnnnnnnnnnnnnngcatgattgaaatctactttcttcggtcaacatcctaacattgagcaatttcttcacatcttaaaagggactgtcctggcgtcagattaagagttagtgaactccctattgatcaaataactggaactagtagtaaccagagtcagaattccgagattacaaacacttgttccgtaatcatttcccgttcctccccatagcatcatgaagcccttattcatgttcaattcacctttggaaagcaatggtttctaaatttttagatcacatgtggtaaaaatttttgaacatgtccatcctatgtattctcatttataaattacatatgtattactctattctatgcatcaaaaacacatgcaccaaaaaaa

SEQ ID NO: 100643 - DNA, 390 bp, Homo Sapiens
taccaagtcatgaaaaaaacacagaagaatcttcaatgtatattactagtgaaaatgcatactactgctatggtttgaatgtgtcccctaaagttcatgtgttagaacacttgatccccaatgtggtggtcttggagatgggacctagtgggaagtgtttgggtcatggggccactaccctcataaatgcattaatgccattctcaaaggagtgggttcattatagagcaagtagttttcttataaaagaagtttgccttcccaccctctctttgcccggcctctgggttgatgaagcaagaaggtcctcaccaaatgccagctcctcgatcttgggcttcccagccttcagtcccacgagccaataaattaaagtgcattataaaaaaa

SEQ ID NO: 100644 - DNA, 489 bp, Homo Sapiens
tgcggccgcgtcaggttagcgcggcatctgccacctgggcctctgcatcccggaccccgagcctggtcctggagccatcctggagccggggcgttccctgcatcagctctgaccgatcgtcagttatcttattccagcacgttttgtgctgatgaagagtttttcctgctgtattttcctaacttgttattactggcctaaagaaatctctcgggtcttttaactgcgtttgaagccagcctctcaatgaactttctctgagctccagtaaatggtgagttgagttgtttcaggtgccaagaggagcagtgctgacttgggtaaatgctgtcccatgtcctggcgctggaccgagagctgcgcctgcaccgtccgcattcaccctcacacgccctcccctcagcagcctcgcctcacactgggagggtgccccgctgtgctacaagggtcatttatttgcatgttaacgatgtaagctcattccttgtt

SEQ ID NO: 100645 - DNA, 987 bp, Homo Sapiens
  misc_feature (121)..(526): n is a, c, g, or t
  misc_feature (544)..(558): n is a, c, g, or t
gaaccgtgtatgtaaagccgtggggttcccccaatgacatgagcaagattttggatgctgtcaagggcggcgcctatggacaaccccagcacagcgccttttaacgtcctgccctttgctnnnnnnnnnnnnnnnnnnnnnnnnnnnnnnnnnnnnnnnnnnnnnnnnnnnnnnnnnnnnnnnnnnnnnnnnnnnnnnnnnnnnnnnnnnnnnnnnnnnnnnnnnnnnnnnnnnnnnnnnnnnnnnnnnnnnnnnnnnnnnnnnnnnnnnnnnnnnnnnnnnnnnnnnnnnnnnnnnnnnnnnnnnnnnnnnnnnnnnnnnnnnnnnnnnnnnnnnnnnnnnnnnnnnnnnnnnnnnnnnnnnnnnnnnnnnnnnnnnnnnnnnnnnnnnnnnnnnnnnnnnnnnnnnnnnnnnnnnnnnnnnnnnnnnnnnnnnnnnnnnnnnnnnnnnnnnnnnnnnnnnnnnnnnnnnnnnnnnnnnnnnnnnnnnnnnnnnnnnnnnnnnnnnnnnnnnnnnnnnnnnnnnnaagaattcggaacgaggnnnnnnnnnnnnnnnaataaaacccctcgtgtcatttgggtcctgttagtcctgtgatgagaggtgtcaccaggaggcaggctggcgctggtgtgcacagacatcctgcacgctcctgagggaggaggagaggagggggcagctgctccctaggacagacctatcccctggcacagctaactggaaagagaggaggaaactaaggttgtcattaaatgacagataagtaaaaaataattgctttaagaaaatatttgaagtttcagggagaagaaaagggagcgagtgctcagctacctgactctgagtgccaggagcacagccaagctcggccagggctgctgtgcaggggccacatgcacaccagctcagagtgttcacaacggaatggcccaccccttacctcttcaaacaggttttcaaacaagcacagaagacgacggc

SEQ ID NO: 100646 - DNA, 535 bp, Homo Sapiens
ttggctcagagtttctctgcatgttgggaccctgatctttgatattgggtactgtttcaacacttgaggctaaatgaagcaccgtgtactgatgtgtaatgtcgtgtatcacaatctcaggataacactagatagccaagaatggcagtacctgttttgtctgtctacacgaattggacctcattgtttctgccacaatgtactgctccataaattccgccttatttccatggtattgtctgtaagttttgaaatctaactggtcatgaaaagccatttttcaggcagtatttaaaagctttttcccacaagtagaactggtatctaaaacattttttcattcaagtttggtaaggtgggagatttgaaataaggtacaacagtggttttggaaatcagctatcaagttttagttttaggggccaccacgtgacagaaatgatttatagagagagtaaaaattgtattccatttctcttggtattttagtgcatataaaaactaaataaaccactttcatatatcattaaaaaaa

SEQ ID NO: 100647 - DNA, 467 bp, Homo Sapiens
tcattcagagaaagaaacttcctacctggtcagctttttcagcttctccaacaaatgggagttgagccagtaggagtgtggggttcttgggaagacgatggggccttgtattaaggagaaataatgaactatcttcttgattcttccattgagaaaagcatatgaatcctaggaaagggctcagcctgtgataggcattcaataaatactccaatgctgtcattcctttgtctacagcatccccaaacaatgtaccagtgatgggctacctgagctcatctagtcgccaagcagtatctcctgcttgctgctgctttactacattccagatgcccacctcatccaatttccagagccactatctctgctgtccactttccttcaggctctgtgaatacttcaacctgctgtgatttggggccgtttgtactctgcatgtattcaataaattcaattcagcaatagtt

SEQ ID NO: 100648 - DNA, 402 bp, Homo Sapiens
tgcggccgcgcctttgagctctctatcaatatcagctcacatcattgaaaagataattttgaagacatgttttgctgaaaagacactaagaaaaattttacgaatgggatgaacatgctccagttaattgactacctactgcaatttgaatgttaacattacccatctggtacagttacctagtgatgtacctattttcacaataccctgtttcagtgtgcttgtcttgattaaagaattcaaagtggagtaccgcaaacttgatatggaaaataaaaagaaagacaaggacaaatcagatgataaaatggcacgacctagtggtcgatcgggacacaacactcgaggaactgggtcttcatcgtctggagttttaatggttggacctaactttagagttgg

SEQ ID NO: 100649 - DNA, 407 bp, Homo Sapiens
gatgatagtacttcttcctctgcagaatttttaagttgttcttcttttactttaatatcttcattcagttcttcttctaaaatattttcatcagaatcactacaggaaccttctccactgtcctttgaagcatcttcacttccattaccactcccttcagaatctgaggcatctccaactttaaaatcactgtcatctgaactatcataatcaagagcttccagcagagaagctgccaaaggcttcacctgcctcctcttggagctgcgatccataaggaatccgtgaggtggtcgtttggagaagacttagggagaggctgcaggagcccaggcagcgccgaggtcggggactggggccgcgaagacaagtccgaaagatgctatttaaaaccggcgcgcagccag

SEQ ID NO: 100650 - DNA, 420 bp, Homo Sapiens
gaaacccatgttcttagagagtcgtctggctactgcgtagtcctggaatattctttttttcaaaaggcctcttccagttgattccaaccgggttcgggttattgttctcaccaccgatagggggcagcaggtgtcctgcgatgccccggggatgtgcgcgcagactgccctgctgtccccgggaatccgactacactgaacgtttggggcagaagcaggagctgctgcctctaagtccaccgcagcagctgccgggacttgggcctcccagcctgggcgcctggggggggcttgccctgtgcaaagggtgggcgaaaccatttgtgcaccaagcctgcccctaaacttagcgtacagcatagataaataaactcagttgtatgcaaatgctataattaaaatatacagtcatttgaaagt

SEQ ID NO: 100651 - DNA, 387 bp, Homo Sapiens
gcttgaaggactctcaaaatggacaagccaaatcacaccttttaatatgaacccagtcctttcaacctttccatccaaaaaggcttgactgaaaaatacattaagtttttggacttttgggactaggatgtgactaactttataagtcactgttctttacctgttcctggccaaatttcctgatggccagcccttcatttttaaggactaataaatggaagcaccctgcgggtgttgcatcatgggattttgggagggacccatttttgacgacatcattgcattgggaggactaaacactcgaccaaaggctggatttggttgttgtcccattccttacaaaaataaaacagaagaaataaaaatgcccaaatgccttttccttag

SEQ ID NO: 100652 - DNA, 511 bp, Homo Sapiens
ccttttcaaatatctacatgtagtggtggaatgagcggaggacaggaaagaccctgggaggcaggcctgtgtctcaccccactgggcctagtattccaaccaccgcacaagactaattcaagaataataggcctgggttccagccttaatcatttccattttcattatggtttacacattaattgtaaatgaccagattgattagggactctttaaagccaaacagattgggaggcagtgcagggtagtgctaactgtatatgtttgacatttccatagacctggactaaacatccagacctgtcatttactagctgtgtgaccttgggaaagtcactaggcttctctgagcctcatattttccttacctatacaatagggattgtaactacctgtatgaaaattagtgtgaataaaatgaaacaatgtatggaaaagatttcgcatagtgcctgtaaccatcgtttattgaataaaagactgtaatgcatactgctttgatatgtgtggc

SEQ ID NO: 100653 - DNA, 384 bp, Homo Sapiens
gttgtgggtcattccatgcttctcttaaggtatctttttactctgttttactgttatattttagaagatagttttaagaaacataaaaaccatgcttgttatcttaacgtagtagtagtgtacataatagtaaaaagggcaagccagccccctctgccctcgaaaaactgtattctccaactcccactacattttctcatattgaatctgttccacctgtgatttattgttttcctgaactttgggagttttaagcaatgatacagttgaagggactgtttataattttcacatgtttaagttgtgaggctttaaaacttaaatataaggctttgtctaggaagaaaatgatctttaccttcaataaatttataatgtagcact

SEQ ID NO: 100654 - DNA, 446 bp, Homo Sapiens
tttagaattctaaacatcataaatgtgaggaggtaaataaaacttttttgcatcgtaactttttggatgtacagctctgagttgtaacatttgtaaagattaatgtatctaccaccacaatcaggacacagggcagttctatcacctaaaaatcccctcatgcttcccctttgttaccccacccctcctcttccaaacactcatctgttctctgtccctgctgccctttccagaatgtcacatagataggatcatacatgatataacctggaggctgccttcctttacttggcataatgtctttgagattcatctatgccgttgcttttaacagcgagtagtatttcatcgtattgatgtaccaatttgatttacatcattcaatgaaggatacttggtttgtttacagtttttggcgattaggaataaagctgctataagcacgt

SEQ ID NO: 100655 - DNA, 504 bp, Homo Sapiens
aaaaaaacgaaaccaaaacctgcctgctcgctcctctccccatcgcctgcgttccgctggttgtgggcttcctgtggccgctgagggcgcgtctcccctccgccatggcatcagttttgaatgtcaaggaatccaaagctcctgaaagaacggttgtagttgctggtcttccagttgacctttttagtgatcaattattggccgtattagtgaagagccacttccaagacattaagaatgagggcggagatgttgaagatgtgatatatccgacaagaaccaagggagttgcatatgtaatattcaaagaaaaaaaagttgcagagaatgtcatcagacaaaagaaacactggctagcaaggaagactagacatgctgaactcacagtctctctcagagtctctcattttggtgacaagatcttcagctctgtaaatgccatccttgatctttctgtttttggaaaagaagttactctagaaactctggtaaaagacctgaaaa

SEQ ID NO: 100656 - DNA, 537 bp, Homo Sapiens
  misc_feature (380)..(380): n is a, c, g, or t
gcggccgcggcgtcggcggctgggcccggggggctggtggctggcaaggaggagaagaagaaggcgggcggcggcgtcctgaaccgcctgaaggcgcggcggcaggcgccccaccacgcggccgacgacggcgtcggggcagcggtcacggagcaggagctgctggcgctggacaccatccggcccgagcacgtcctgcgcctcagccgggtcaccgagaattatttatgtaaacccgaagacaacatctacagtattgatttcacccgcttcaaaattcgagatttggagacagggacagtactttttgagattgccaaaccttgcgtttcagaccaggaggaggatgaggaggagggaggtggagacgtggacatcancgcaggacgttatgtccactatcagttcacaccgacatttgtccggctgcggacagtcggggctactgtggagtgcacgagtggagacaaacctatttcaaacttgcggatgatcgaacgggactattgccgggagcacttgctgaaatgcatagat

SEQ ID NO: 100657 - DNA, 489 bp, Homo Sapiens
gcttcttgaattgccagcatcacaactcttgtgttttggggccattattaagtaaaataaggttacttgaacataagcactgtgataccacagcagtcgagctgataaccgagatggctacacagtgactaacggcaggtggtgtatatagtgtggatagactgaacaaaggaatgattcatgtcccaggtgagaccagataggacagaagtggatggcatgaatttcatcacaatactcagaatggtgtgcaatttaaacttatgaagtgcttatttctggaattttccatttaatattttctgacctcagaaccatacgaaagcaaaaccgcagataaggtgagggactacggacaactaactctacttgtgtacgctgacctaaaaatcaaaatacagatgcacttctaagattaaagattatatacacaagtttagaatgaatgtacttgcttaagtttcccttctctttaaaacttagttagaa

SEQ ID NO: 100658 - DNA, 443 bp, Homo Sapiens
  misc_feature (132)..(132): n is a, c, g, or t
  misc_feature (142)..(142): n is a, c, g, or t
ttgagtctacagagaacagaaagctatctaagaggtagaaagctgtcaaatacctattatcaaactctgaattctcctataatatttcataaagctattataacagccttaatacgcttactgtcagtgtcntgtttgcagncctttccacatttcttctacataattgaaacagtcttgatattcttttgccattgggactgcttgtcagacacacttcattgcagccttttattggctatttggaaaggaagcaaggggtacagtgggggcgcacacaggcctggagtctggttcattctccagaatagaaataaaacccccccagtctctgcccttaatgccttccatccagttgttttgctgtatctcatgccaactttttaaaaaactgccttaattttctaatctttctcatccccaaacacatataatctagtgaa

SEQ ID NO: 100659 - DNA, 605 bp, Homo Sapiens
  misc_feature (521)..(565): n is a, c, g, or t
aaggagggtcacagcattggagctgacggagggacgggtggcacagcctgtgagcctggcggtgactcgaggctgcctgcggccagcactccctcacagcaacaggactccaccgcaagagccgacacgcaaacgcgacacgagaaacacgcccaagcacacacatctgcgctacacttaaataataataaatacagaattccatttgctgttatccgtgcctgaaacaaaaggaacccaaaatggaaaaagaaaaccaaaatgtctttctctccattagaccaagggaaaacaaaatccccaaattatcaaaattcctcagttacaaaatactttttaaaaaaattccattattaaaagaataaataacaaaatatataaaaaataacttggttgcatcaaaattataactaggagttatatcaagattttttgtggcctatattatagtcaaatagttatttttgctttgaattcacttttttcccctcttagggtgccctggtgtggggtctagttgnnnnnnnnnnnnnnnnnnnnnnnnnnnnnnnnnnnnnnnnnnnnncgttaacataagaggctgtgaatataaatacttacatctt

SEQ ID NO: 100660 - DNA, 387 bp, Homo Sapiens
aaatccaaacccaaaacacatcaattgctctttacatgtttggaatttgcattcttttctctttcttccaacaggacataataaaaagtacattaagtttatatgtataatatacacaaatttgagttctgttttgaatgtttcctaactctttctccacaataaaactgcatagcccctataaaaaagtgaggataataacagccatcttctatttgacagaaatgtgaaaattcatatcacattaatatataaagaaaacatctgtcaactgtaaactttcacatataacaataatatcattaatatatccttgtaaaatgatccacaatatcaataacactagcaacaaacttttattactctatttgttggatattgaatgtg

SEQ ID NO: 100661 - DNA, 339 bp, Homo Sapiens
acctggttctaaacaaagtccattcaatgaactaacactctactgcctccttttacctgtgagagatcctatccactatcctgtttgccctgacatcctgaagtcattgatttacctttcttcctttatgaccttatttacagcagctggttctggattttacccaaatctggatgcagtaactgctttctataaaaagtgagaagcagaaaatctctatagatttatacataattacaggggtctatatacgggacattgtcacaggggatgtgacaaccaaagtgaagagagatgtgaagatgtgaggctgctggattaaagagaccatgagtaaag

SEQ ID NO: 100662 - DNA, 504 bp, Homo Sapiens
  misc_feature (92)..(285): n is a, c, g, or t
gaggtccaggctgctttgagccatgatcatgtcactgcattccagcatgggtgacagagtgagaccctgtctcacaaaaataaatacatacnnnnnnnnnnnnnnnnnnnnnnnnnnnnnnnnnnnnnnnnnnnnnnnnnnnnnnnnnnnnnnnnnnnnnnnnnnnnnnnnnnnnnnnnnnnnnnnnnnnnnnnnnnnnnnnnnnnnnnnnnnnnnnnnnnnnnnnnnnnnnnnnnnnnnnnnnnnnnnnnnnnnnnnnnnnnnnnnnnnnnnnnnnnnnnnnnncacaagtgtaagtagcctaacttactgttcctgttctgtacttcctgtgagatccagaatgagggaagctagaaacttctgttaggggggtatctttctcagctaccctgcttccttcccctctcctgaaggaaactttggggatgtccaggttaatagatgtatgatcatatccttagattaataatgctaataattgaaaatctactctcaaaaaaa

SEQ ID NO: 100663 - DNA, 288 bp, Homo Sapiens
  misc_feature (81)..(92): n is a, c, g, or t
ggcttcaggcgatcctcctgcctcagcctcccagaatgcttggattataggcgtgaacaaccattcccagccaaaggctgnnnnnnnnnnnngtgcaccattctctcaaagagcactggtgttttgatagcattcctcaaatagcatttcaaggggctcgaggattggggaatggagaggacatcactcatgcctgcatcatcaagagtaatgctacctacctttatccacatatgggctctggttccaaagcaataaatgtttgaaaatagctagcctgggtgacat

SEQ ID NO: 100664 - DNA, 771 bp, Homo Sapiens
tttccctactcattagctggccccttttatgaccaatgactcataaggcaagatgtgtggtggcatcttcggacaggcggcaggctttaatagggcagcctgggttggtggaggcaagcaaagctaattggcatgcgtgggaatcaaaccccaggccctgggctcattagcccatggtcaaaacaactgagccagaggaggtaataatttgcccaagaatatcagtagttcctttattagaagaaaatggctgatatggaagttggggaatctgaattgccagagaatcttgggaagagtaataagctcttagtctcaacaaaaagtgttttttcatctcagcgcgtaaagggtgctatatgggaacaaagaagtattttaaaattataactactcattctttctttagccttagttaatttgagcagaagccacaacaagcaaaccacaataaatttagaattggcagaaatccacattaactcctcttcccaagtttccacactactaccatttacagttgtaggtttgtaatgtataattatgtaatgcagaaactagctttgacttgtgtaacgatgcactgtcaaagtaagcaaagtaagaattgaaattccacattcccagaatttaacactcagctgctcctctagtaataagttcctggggataatacattaaccaacattggttgaaacatacctgagtaatcatatcaggatgcatgttaagctgataaaacaataagatcccaaaatgcagtagctcaaa

SEQ ID NO: 100665 - DNA, 633 bp, Homo Sapiens
  misc_feature (488)..(488): n is a, c, g, or t
  misc_feature (492)..(493): n is a, c, g, or t
  misc_feature (520)..(520): n is a, c, g, or t
tttggcctgggggggaaaaaacccacaaatgtctttccccagtttcctccagtaacacagatggaaatagtagtttatacttgggatggtgctcggggaaatagtgtctcagaaccaattactgaaatgaccagaatggatataaaatgtggctgcataatttcctaagtcccatttctcagggtaaaaatggttcagaccatccaaatgcttctccgaagaaattacacaagcgagatggaaaaagaaagtattggtttctcagcgctggtaataattaggacttgaatgagtggtgataaacccatttacagacaggaagtgtgaaggcctgaatggccaggagatttgctaagtgatgacaagatcaagatcaggcctctggcctctgagcccagctccctaagcctagtgaactttgaatgacacctgattttttgccccatccagcacccattttctgaatgcaatttggaggaatgaacatncganncagaacctggccaatcagaatattctnccgccacctcttcccctctcccccaccatggtaatcagttcagccatgggcaaattatccaagttgaggcaataatactcagtcccatgacttccattgaaacttctaatgaa

SEQ ID NO: 100666 - DNA, 712 bp, Homo Sapiens
  misc_feature (264)..(273): n is a, c, g, or t
  misc_feature (487)..(499): n is a, c, g, or t
ggaaagaaaatccagggaagggaatattatttagaaaggaagcctgtgatactcttaaggtctgtcactacagcttgctggacttcaggatggggataggagatgcagaagacaagagaggaaaaaacagagaaggactctgggggagggaaggtagattaagagcattgcagactggctttatttaatttgtttgtttgaagtaaatgccttgacattatctggacgacaagacattctaaaaccaaatggagataattagannnnnnnnnncaatcaaggagcattacccgtgcatctctatcaggtaaacaagagatggcagtgaaaaattacagttgtttacatgaattattcattgtctcactgggtcccagatgtaccaatggaatgcatggtgaattcatattcttgagcctgaagaggaggtttaaaaattctcctttgcactttttccaagagaaaaaggcatttacagattgatttnnnnnnnnnnnnngctcaattatgtttccttctaatataaaggctgacaaggaaagcaaagcaagcaactagaagacatttgctgtgctcttgactttgggaaagaccatgggcaaattatatcacttttaggaaatttaatttccttacctacagaaataaggcatgtgaatcaactgattcagcaggctgtcttcagcaataaaattttgtacttatcaaaaaa

SEQ ID NO: 100667 - DNA, 224 bp, Homo Sapiens
aaactgccctccaccctaaatagcttgtgattgttatattcccttaaaattttcaaatattatttacaagagagctgttttacaggagagctgttttctccatatagctgatgtacagacagcacagccctcttcagatttagtaatgagaccaagaagtctttaaatattggtgaatggcatttgtccatttgaggtgaatcatgaataacttgaacaaacat

SEQ ID NO: 100668 - DNA, 561 bp, Homo Sapiens
gaaaggaaatgtccctagtagagatatttgatttaaattacaaggaatttagttctaagggataatcgacatatttcataaataaatgcagatatctctagatatcaaatgataaaagatcttgagcagtgatggattactgctaatgggtttctgtctgctactctgagcacagttcaggctcaagaactgacatgaagggtttgagaatttagtcaaaatctggaagtaggcaggtggtcacaggctaagagttcataaccggatgcagtcgttgaaggacaattgtgaagaaaaaatgctgatggtgaaacgaatgcaaaaaccacaaacacattgaagaggcctatattcctgggaacaaagaggaaggttatcaatgatgtgcttgtagaaaacatattaatactggaatatggtcttctttcccatcatttcaggtcagttagcttagattactattcagctagaaaaaacaaatgatacccttgcaaggactctgaacaatattggaattcagctgttttgtttctaataaaacatggtttaactgttaaaaaa

SEQ ID NO: 100669 - DNA, 731 bp, Homo Sapiens
  misc_feature (147)..(155): n is a, c, g, or t
agaaggagaagctgttgaaatgagggccgtgaaatcagtttctgttggtttgcggttgtgtttggttttgtttgtttctttataaaaaattcaatcgggcagctcccttttccacaagcctctttgtgactgtagaactattgtagnnnnnnnnngttcttttctatattataaaagaaattatccaacacagtaatattggtacctgtcattttttcacttctgtttaaaaaaaatgtatttttagcaagataacttgggtaatcttctaaaaaagaaatttaaaaactcactgttagtgactttgatgccttttaaaataagagctttttcatttcattccatctttaaaattttttatctttgttgtagaatattaaaaactattttaagaaagataaattctctttaaagagatctctagcgtgtgtgaatagagctccagatgcctctaaaagccgcatgtacaaaggaagccacgtctatcctgtctgtttatatttgcttttcctgttttgtaacctctttgtactttgttcatggtgacttgtaagctaaggggaaggggtgcctagatgcctttgtatctctccatgtcacgcgctcctgggccagccggcctcccttcctctccttgtatgtaatacctttttttcccctttctagcaagtactttcaaaagaactctgtacattttaacataaaaaataaattatgttgagaaattatga

SEQ ID NO: 100670 - DNA, 329 bp, Homo Sapiens
tttagataatgtaactttaatgcaaaacacagacgaaaagtttacaatactgtaatgttgcaccaagatagtatataaatagatttaataattttaaaattagttctggggcaggagtgtcaggggcaccagcaggcagtgttccagactgccttaagtggcagctgtcacaggagctgtagcattcagtgttcaatgttagcagtgactgcaggttcgataaaataggccagtggcagggcttaggttgtgatcctgattattgtttaggcccctttattttgcctattttctgagtgtatttctccaggcttcctagagcaatggct

SEQ ID NO: 100671 - DNA, 655 bp, Homo Sapiens
aatagatacacatttccctgtgggactaagaactacaattcttcaaaggaacaaaccttataaaacacatgaaacgcacatgagtattggcaatctaataatttctcagcatatcagataaagcattgattttcctctacctcaaaataatgagttcttgttaatttcataaaagaatacatcacaagaaatcataaaaattcatgttgcgataaataggttacataattacaggcttaaccctgataacaccaagacattctacatagcgtaggattcctgagctttgtccattcattttctccattggcccttccacagcctttcttccagaaattcttgcatgttctattgaacatcttcctccctgatagcccatgtctttctatgtttccttcctctgcttcatttctccattgggctaacctcagggagaattgtctgcacacataaacgacctccttctttaaaaatatagcacaactgggtgatttttccatcatccttttccccagttgactagcactgcctcagcctaatctcatccccccaccggcttatctgacatactgttactttatcgtacatagagaaaaaaggggaattttaaggacaacagtgtgaatgtgctgcaaccaggttttttattttactg

SEQ ID NO: 100672 - DNA, 491 bp, Homo Sapiens
  misc_feature (197)..(246): n is a, c, g, or t
tgcggccgctccacctgggaaagcgccttcaagagctacctctggcggcacctggccctcagctgcagggaaaccgcactcaaacctgccgccgagcccgggtttttctgcaaaactcagaggacctggctcttgcccgaggtgccctgaaccattgtgtgaataagctggggaagcctgactggagtgttttttcnnnnnnnnnnnnnnnnnnnnnnnnnnnnnnnnnnnnnnnnnnnnnnnnnngcgaagtttgcaatactctctacctcttcgcatcctctcttgctcgtggagtcttttttcctcctcagctataaatattttttactatcggcggagcagaccagggatgaacgtcttttaattgcaagtataactgttaaaaccacgtcgggatagtagtcaagatggataaaaagtcctttgaaatggtgctggatgaaattagaaaggtggttgatttgctgagatatttttcctgggccgag

SEQ ID NO: 100673 - DNA, 361 bp, Homo Sapiens
ctcaggtaatagaaaatgaaatttgtatgtatgtttataacatgtacatttatacctgtatatacatattcatatgtatttttaatcatagggaatgaacactagaaagtaaatgaaaaatgagttgaaaaactaagcatttaaaataaatcaattgacttttgatatattaagatattaatttcaaggttaattatagcctcctcttagagatacaactgttcaaagatacatcatcacagctgattgtcaggcctagatgcctgtgaggagagagactcagcttcagtaacctgttgaagccagaacatagaaagtaaatgaaaactcaattgtaaaaacattcattagtttaaaccct

SEQ ID NO: 100674 - DNA, 382 bp, Homo Sapiens
  misc_feature (75)..(75): n is a, c, g, or t
cctcacttgactaaagggtttacagccagcagggtggaaatgaaccagatattacaccccctctctcccagcccntggcccaccttctggccagtaccagtgaagcagaagccactctcccacccccaggctgtcccaaagccctgaagacccaagaaagcagagccaagtggagtgaccctgataccagggccagctgcccagtcccctgtagctggggaggaccccctcttcttgtgaggcagacactgggagtgacccctccctgcaagggagatttctcatcccccagggttcccagagggttcccagaggaaatacaggatacccaatacatttgaatttcagataaaaaataaataacgttctgatacaagtcaaa

SEQ ID NO: 100675 - DNA, 510 bp, Homo Sapiens
tttgtgtgatagaatcgtaatttgtagctgggcacattgttgctatgtaggtctgtgattcattttcagtcgatttttgtgtatggtgttaggaagggttccaacttcatttattattttgcatgtggatatccagttgtctcagcatcatatgttgaaaagactattcattctttctctattttattgtcttggtactcctggcagaatttgcaggataattgcccagaaccagcatattgatccagatttttatgttatccatcccattttgtttcatccaagctgtaggagatcgccacttgattcacaggaataagcagggttagtctaaaatgtaggcaaaaagcttaaaaacaattagactaggatttaatgacaaatgtatgataagctttggagcacaatttctctctccagtcctcattttttgtaaaaacaaattatgataggaccgtgtgtgttgtttgtagaataaattttagtcttatacttggcctgattatttgc

SEQ ID NO: 100676 - DNA, 474 bp, Homo Sapiens
tgctgagtgaaagaggccaggcacaagagagtacctgctagatgattctatatacaattcttaacaatacaaactaatttgtagtgacagaaagcagatcagtagttggggtaggaagggtggatagaaaacaaaaggacataaaactttttggggtgatgggttatctagactgtagtaatagtttcaagataggaatatattaaaacacttcaaattgtaccctttatattaggtgtatttatgtaaatcagttttacaacttaataaagctataaaaaaattggaaaagaacacatactataattccattaatataaagtcaaccaacaatagtctagagtggcagaaatcgtatcagtggttgtttttcaggtgggaattgattgctgagggccacaggggaattttctgggtgatggaattttattgtgtgtaaattgtaccacgacaaagttgaattaaaacataaaa

SEQ ID NO: 100677 - DNA, 559 bp, Homo Sapiens
gaccgcggggtggtctgggtgcttgccgggagtcctcttggccagctccttaaggaggagcgggtacttgcagatcctctggatcggagacaacaggtagccttccaaagggatgtccgtggtcttccggcctcccagaagcatgcagctcaaaaggaaggcgcgcacggtagggatcttgttcagctccaccagcagcctcagggctttctcatggttgctgcaatactcctcgtacacgcagaacttgtccttgaattttaagaaaacattcccaagttcatgctgagactgcggctccgggtgtaaacaatactccaaggcggccaagaaatccttatgaacttccaggatgtcttcgatgttcgagaacaggaccttgacattctcctccgtgaggcccttctccactgagtcggccacgttctgccggatgcgatgcaggaatgccgactgcaagaagcgcaaggtgcccacgtagtccctctcggtgcccaagatctcgttgaggacgcagaggcggaggcgcagctggcgctcggactcccgggcggccgca

SEQ ID NO: 100678 - DNA, 551 bp, Homo Sapiens
gtggatttggagttgcttaaaatagactccggccttcaccaatagtctctctgcaagacagaaacctccatcaaacctcacatttgtgaactcaaacgatgtgcaatacatttttttctctttccttgaaaataaaaagagaaacaagtattttgctatatataaagacaacaaaagaaatctcctaacaaaagaactaagaggcccagccctcagaaacccttcagtgctacattttgtggctttttaatggaaaccaagccaatgttatagacgtttggactgatttgtggaaaggaggggggaagagggagaaggatcattcaaaagttacccaaagggcttattgactctttctattgttaaacaaatgatttccacaaacagatcaggaagcactaggttggcagagacactttgtctagtgtattctcttcacagtgccaggaaagagtggtttctgcgtgtgtatatttgtaatatatgatatttttcatgctccactattttattaaaaataaaatatgttctttagtttgctgctaaggaaa

SEQ ID NO: 100679 - DNA, 539 bp, Homo Sapiens
ctcacctgcttcaaactcagattcttgtcaagactaacatgattgaattcatttaatgtgaataaataagtgatgttagcttaaaacagcatctatcactagcacattcttttctactgatttcgaccagacgttcattctctagataaaaaatatttatgttgtgaattcactgaattaacatcggtcactaatcacccagttaagttacaatcgtatatattctggctggtgttgcaatttaaattgccaaaaaaataggctaatcattagctaatgaactatattagacatggtttgtctgttaatgacattatctttatcctttaatgacattatttacaagagattcagtgtttgtgaaagcaaaaagctctattcactcattgtgacaagaaattttgacacgtaaatatgtatgtcatgttttaaagatatacatactactttttaaaagacaggagagtctttcaggcaccaaacttgcaaaaaatctcacagttttttttaacagcataattcaagtatatgagtaaata

SEQ ID NO: 100680 - DNA, 501 bp, Homo Sapiens
  misc_feature (290)..(290): n is a, c, g, or t
tgcggccgcagggaggcagccattttccgtaggcggtggccgcggcgcttccgggccgcgcggctggagcctgaggcggggccaccgtcgggcacgagaaaccattctctccccgcttttcgcagctgtatcccagaggcgcggctgaagctcgctgggacactgcccgcttgcccagtgcccacgggcacgcctgtcgcagacacaggctgtggcgaatccgagtgctggcgggcagcagtgcctgcagctgcgcccgcagactctttcccgcctccgccggcatttcncgtgtccggccgatgtcatgcggtcggttgagcctcagggctagcagcttctactgatgcaaaaacataggaagtgtctctttgcttctggaaccggggtgggcagcaaggagctggccacttctttgaataccggtggcatcctgggcagaatttcggtgccgtttctgctggctcacttcaggaaaagtgaggctcacggctctcctca

SEQ ID NO: 100681 - DNA, 538 bp, Homo Sapiens
tttaaaaactcatatattgggactcagaccaacagatcaagtaaccgtattttacagaacgtttacgtgggatcatgattattctcattttaaaaacaatttgcatggaaacaggaaatggcatacacaatgaggacagcaactgagcccttccataattcattcagtcaataagccatgaaggcctactacatgccaaccccttaattagagaaaagaaataaaaaaggtcagctgaattcatggatggatggagcctgctgaataaactacctttaccctacaaccgtatgagaaaaaatgaaaccctcttatttcccataacggcatccttcctagaaacaccaggaagactgtcagggctgacacggcgcttaagacaataccattttaagttctttacacaaaacaacgctggattaaagcctaagcggcctacaaccgctgattaccgcactccatcctccacccagtgtccgtctcccacctgccgttacagactgagcagcaaccccacacgcatccgtgaccacgaact

SEQ ID NO: 100682 - DNA, 516 bp, Homo Sapiens
aagagtgatttctgtgatcacagagttcaattcagatttattcagaaagagctactcagaagctctatagttcatgagctacttgatattttctagagatcattttatgttaagctattatacattgttgatgatgtcatagaagtaggaaagaagcctttataatacagttttatgaaagaaatgggagccttttttcccatttatgatattaaaaacaacacaggtatttggtgtttagtctcaaaaatttgtttggttcaccttagtgattcttaggtacaaagtcttcatcactcaattttaacaaagaaaatagggcttataaagttatacttttgaagcatgagttatgagctaattttaagatgtatagttttggtagagtacttttgtctcagtaaaatgaaagatttgggtaactccccaaatgccctgtaaaacaaatgggtttgtggaaggttgtggtgtcagcaaaatatatgatagaataaagagttttgtacctaaaaaaaa

SEQ ID NO: 100683 - DNA, 468 bp, Homo Sapiens
agccccaaaaatgtttaaggtttcaataagacacagacacacgccttctcgagatcgaaaattcttgtgtttaaaaccagaagccaactgctcccaaatgtacataggtggtgctacttgatccattaacttcaatatcagagtctgagcttcatctcgaaccttgtctttggcatctcccactctgtctattaaagctacaaataaccattgctacataggatttaaagcgtgttgataatctgtccacaaaggcacttaaaatttccaatcccattaatgatacccggtagttgctcgaacccacccagccggtgagcgcgtcgactgtcttgcctaggcggcccaggtcctcctccaggtccgagatggcgccgggggcgccaaggtagagcaggagctcctggccgacctgcagccggccgccgacgtccttctgctgcacaaaagcgcagaagtactccaaac

SEQ ID NO: 100684 - DNA, 575 bp, Homo Sapiens
tctacttaagacttcatgaacacatacagtcttgaaatggctagaaaagctccaactacaatgataaaaatcaacagatcaattgattttggcatttcggcagcacccattccttttctttcctgggtatcttgcagtagatattaattagaaatacccaaagaatttaattaaactaatttattcccagccttattccaaaaaggatttgaggaggcaataaggatttgtagtacaaaatgcatggtcttcatctgcaatcaataaaaaaatctattctttggccccagacctgttagtttaggtaaaaacgggtttctttctcaaggaacaggtttttgttttaactgttctatcctcaaagtaaagagagaatttctctcttaaaagctcatgagtgctatttgaaatggaagataagattttttggaggaaaaattccttcatggtaggatggaaggcttttctttctaaggggaaaataatacagtaagggtgagcagttatttgactgtccatggacagtaacaaattaagaaataaaaatccttaaatatcttgagaagaaagaaagg

SEQ ID NO: 100685 - DNA, 558 bp, Homo Sapiens
tttataatataggcttttattcagattacttcactttacatcattccccacctaacaattcattacatttttcctgctgtcaatgtgttgaatccctgtaatttgtactgaatcccctcacatgtactcgaaatcttcagaaatccatcacaaatatcttcataagtttattaggaaaccaggactgaggagcaaacacaggttccatacaaactgataaaatcttgggcctttaaattagagatttagggttctcaaaacaggcactacagacaggggtagctataaacggtgttaataactgtttcacacaagcaaatattgaagagataactataatacttttccccttgagaaagctctggtatatgactaggattataaaatactgcaatgactactttactcaagacttacattataattttacagaattaagatagtcgttattaagatagaaaaagcaatgtgctagttaattcaccatttttaataataaaataaatattctatcatacaatgcagcgtctgagaagaggtacaaaaattaaaatgcag

SEQ ID NO: 100686 - DNA, 532 bp, Homo Sapiens
  misc_feature (111)..(180): n is a, c, g, or t
acacacaataaaaagtagccacagaaagagacatgagtgaataccagcaggagcttctatttaaacatctgtagggacctccagatattggagttttcagagacaagcttnnnnnnnnnnnnnnnnnnnnnnnnnnnnnnnnnnnnnnnnnnnnnnnnnnnnnnnnnnnnnnnnnnnnnnaaaatgaaacagctagatgggggggataagttctagcattcttctgcactgtaggatgactatagttaataatatatatttccaaatagaggatattgaatgttcccaacacaaatgagaaatgttttgagttgaagaatatgctgatttccctgatctaatcactgtgcagtaaatgtatcaacatatcaccatatatgccataaatatgtacaattattttgtgtcaatttaaaaaaaattttaaaggaaacactagaactgaaaattagcatgcttgaaattaggagactgatggatagaattgacagaacaggcatagctgaagaaagaattggtgaatgaacacaaa

SEQ ID NO: 100687 - DNA, 153 bp, Homo Sapiens
aggttgtggtctagaaagcatattgtgatttgtacaagaagcacattcccattttacaaaagtacaaaagcacattttggacttttaacaaattcaactgttttgtgttctgtgtgagtaaattttaggttgcccatcattgaaaaccagttt

SEQ ID NO: 100688 - DNA, 662 bp, Homo Sapiens
gctcggtaccgactttcagtagtagggagaaaagatttttcaggtgtagctaccataatcaaaggtatatagctacatacgcatgtatatattacagcttatctgtaagaagaaaatgcattttaaacacaactcttctcagtagcattttatgacctttggatatgtttgtaatcatttcgaatcaaaatattgatttaattttgacctctggtttaagatactgctttaactactgttgacaaccaagtagagtgacttaagctgaacagtaactaactggaaaattagataagcacctggcatctaatggcaggcaggcactcaagaaatgaattaactacataatggaaaagtatggtttaatgtgtccaaatgaaagccaggaagatggtaaacatggaaaaattgtgtttacaattttataatctcagttgataagactataagaaagctgattatttaaatcactatatacaatacacccttaatttgttcattccagaaacatactgagatgtcagctacttaaaaatggtcacaaaaagctactgtttatatttttcctcctgctattcttctcccaaattaattattaataagtgttgttcatttactgcactgctgagaactaattaaaattatatattccaaaaagtaaa

SEQ ID NO: 100689 - DNA, 404 bp, Homo Sapiens
  misc_feature (224)..(232): n is a, c, g, or t
gagtgagtcggctttgcacagtgttagaaatggagattttcgtttaatgcaacagttgccaccagtttccacggcaaccttgatatttgggagaggccatcctagttctcaaactgagcctctgcgtgttttccttgggctggacaaaggcgtcccatggctgaaacagaagaatggtggccttctaccagttatcaagaaaaattaagtctttttcttatgannnnnnnnncaaccttaacacctgctgttgtatgtcttgtggtaaatgcttgcaggtaacaaacatattaaacattcagaatccttcattctactcagtcctacggttagttttttaataggatgagtgttcgtaattgtgattccctattataccttgtaatatttaaatttaattaaaa

SEQ ID NO: 100690 - DNA, 540 bp, Homo Sapiens
ccatcctctagggtcccagcactccaaagtctaattcagctcccggcccggacccccttctcccagtgggagacgagtgctatgatgagcttgcctttcagaccatgatcatttgccacagaaccttaacaggattactatacagctgaggggaaaatggctttgaagactacgtaacaacttgggaaaagtacttataataaaatattaagtggaaacaagaaaacaaaatgtctatgtatcaggatggccatgtatgatcatactggggaaagcttggaaagaagcacagagtggttaggataatgtgtacttggtaggtttccctctgtgttctaaaattttctgcatggtttgctatgttttgatttttgaacttgaaagtctattattcaaactaaaagttacaatgaaattgaccaaaagaccaaactcatctcaacagggtaatagccaagaatataccccacatcattgcccctaaaagggactatcttggtgacccactacctaccacccacgcatcttgcaaaaaaaaca

SEQ ID NO: 100691 - DNA, 564 bp, Homo Sapiens
cagtcatcatctctcttcgggaaaataactacaaagtgagtgagcacattagtgaaatagaaagattagcgcttgcaggaccaacaccaaagctgtagaaacaacattgaaaccattcttccactagctgccttgcctgttgctctacctgtcttctgcacctttcttcaccagctttatccttcattccctccttcctctttcaggttttcacctagttattttaagaaaaggttctaaactatttctctagactcatctgtgtgttttcttgtcctgtgatgaattcctgtgaattatggtaactttggcattaattttaatcctcctctagcacacgcagactccttgttgagaaagcttaaattctttctgtatttgagatgtaaatttgccaccctcttttctctaaaatttggtaagggattttgctatgtgggacagatacatttcaacttactttatttacagaaacgctggttgaatctaactgtcttctaaacaagggggttttacccgactcatggctcaagttttaaaataaaagctaaaagatcattaaaa

SEQ ID NO: 100692 - DNA, 582 bp, Homo Sapiens
  misc_feature (32)..(32): n is a, c, g, or t
caataatttcaagaggaaaatataccagtganaattgtgtggctattttgagtagaattggtcagttgattattttgtgtaattgagatatatgtagtagtttaagcatgattcttgaagaaagcaatagtgacttttgcatagggagattttggtagaaacttcttgggactaaacaagtttagagatgcatttaagaattattcacaaaatgtgtaattctaaattaaaacataaatatattttcaaaagcatttgatttctctgaagcatgatatagctggtcttacctagtgaatcaggattggtcctcaggtaaatgaaatcatgatacattattgcagggaattccagtgcaatactttgtaagacatataattcctatgattttcacatttttatatcttatatatgggaaaagccaaattaaattgaattcagattaattccagcattagactaaatgagcaaacttaagtaaatgtacaaactaggtaagtataaaaccacaggttaacaatattggagtacttttagaattacattaaaactgtcttaaatgtcctataaaaaatctaaaaa

SEQ ID NO: 100693 - DNA, 475 bp, Homo Sapiens
  misc_feature (456)..(456): n is a, c, g, or t
tgcggccgccggggggagcggagtcagggacagacgacgacaggcgcccgaggagggcgggccccacaggccacctccacgaggggtcttctcttttgttcctcgtctacacctacgtcttcggcggacgtcatggtgctgaaccatttccaagactcacgtaaagatggaagcgatgtcgctttcgtctcgccctggcggttcttagtgggattacaactgaggatgttggttattttcccacccaaatggatgggcgacttctcaatttcacgattatctgacaccattgcctattaataaacatatatgataatacagtttcaagttcaacacaatattgatgaacatgaagtttttagtgaggttaatcacccgtgaaagactgatgtgtaaactaatagacgcaacttacagaggataatctagtagaagttgaattcattcactcattanaaaaaataaatcaagtagg

SEQ ID NO: 100694 - DNA, 480 bp, Homo Sapiens
caggtctacagagaagcagttccacggcaaaagagctgtggggcagttgaataatccatccaaacaatgaggagtaaaccctgagtcaagaaaccagcaaaaagcagaagactgggtcagcaaataaagggagaagatccttgcctccttcagtgcccctagcatgatattctgaaaggccctccactaaaatacaactacagttttaataaatttactaaaatagagaatagaagtagtatgtaagttgggatagggtgatctgaattaagtgttttaacattcatgaactgttcaggacaaaagctgtaagatattggttaacctcaacattgttaaattaagtgtgcactgtagtatcaaagatactcataagaatggagagagctaattcttctaaatagtggagggaaaataggaattaatttttttcaaaagtgggacttaagttgtctaaagaaaggccaaaaaaagcataaa

SEQ ID NO: 100695 - DNA, 402 bp, Homo Sapiens
gcaaacaaacagtgcaatcagtgatgcttgccacagggcggctgggggtgctggacaagtgggcatctctctgtggtctcagggcctcccccaccatatagtctctgcactggccagcttgggcttccccacagcatggctgcctcaaggtagtcaaactttatatggccgctgaagacccaggcagaagctgcatggccttttctagctcattttgggagttccgcaacttcacttcagctgaattctgttggttgtatgcaagtcaccaaactgcacagatttgagaggagggtgccatagaccccagctcttgatggaaagagtatcaagctctcattgtggaaacacacatgggatgaaagacactgtcacaacatggcaaaaccccattcctacaaa

SEQ ID NO: 100696 - DNA, 584 bp, Homo Sapiens
atttccccctcttctccctatttatgtccccttagaatattttagggagcctataattattttctaaccaaggaaaaacttaagtctctttaagaagcaattacttttcataacatcagattgaataacccaccttgctgttcagcccacatcctactggaaacaaaaggtaagaaacccattttctggttcttgattgtttgggtctgaattttgtttttaaaactaagctaagtttaatgttttttaaaatgctgtttggaatatgaatagattccccgtaaaatgatttttcctaagttttatgctttagtaaatattcaggtgctcacgtctgtgcatcatagtgcttgcgtttaatatgatttattgtagaatctcaacttttcttggtgtttgttgtctttgaaacattgtcttggtcattagggctggtgttttcacatttctgtggtcaaggtggatttcttatgtgtgcctttttgcttactttgtatatgaattttgtaatttaaattgcaagtaagttatatatatgtatttaccataaatagtattaaaagatgagaaactgttaaaaaaaa

SEQ ID NO: 100697 - DNA, 563 bp, Homo Sapiens
tttttcccatattagccagaaagcagatactagttttggtaaatgacttctctaaagaaaacactatgatttgaaaagactagcacacaaggacaaatatggaattaaataattcttctgagtagacctgtgttctctgtttcaagtatggaactgcataatggttcagtttgtatataagataataacttttttattgaaaaacttgtgaaggggaaagtcttgctatatccttgagccaggaatcaaggtctccattgttatcctagccccatagatgtttttacttagccctaagtttctaaagttttatgtagggttaatatgcagtacagtaatgaggcaggaatttgaatattttcttcattattggaaatgagtcttgtaatttaaagacaaaagcttgttttgagaagtaatattcatatacctgctgtaactgtgaatgtcactgctcttttctggttgtgctttgccacaaattttattgtgaattgtaaagatttgaaactcttaaaattagccatttatattttgaaaaaaaggggtgtgattattttaaa

SEQ ID NO: 100698 - DNA, 645 bp, Homo Sapiens
  misc_feature (556)..(556): n is a, c, g, or t
tgcggccgctatcccctccggaccatggccgacgacgacgtgctgttcgaggatgtgtacgagctgtgcgaggtgatcggaaagggtcccttcagtgttgtacgacgatgtatcaacagagaaactgggcaacaatttgctgtaaaaattgttgatgtagccaagttcacatcaagtccagggttaagtacagaagatctaaagcgggaagccagtatctgtcatatgctgaaacatccacacattgtagagttattggagacatatagctcagatggaatgctttacatggttttcgaatgtatggatggagcagatctgtgttttgaaatcgtaaagcgagctgacgctggttttgtgtacagtgaagctgtagccagccattatatgagacagatactggaagctctacgctactgccatgataataacataattcacagggatgtgaagccccactgtgttctccttgcctcaaaagaaaactcggcacctgttaaacttggaggctttggggtagctattcaattaagggagtctggacttgtagctggangacgtgttggatcacctcattatatggcaccagaagtggtcaaaagagagccctacggatagcctgatgacgtactggggtgccgtgta

SEQ ID NO: 100699 - DNA, 545 bp, Homo Sapiens
catcctcagagctcctcatggatgaattcacacactttaaagtgcaccaagcactagaatattcagaatgattatgccacgtttatttactgcatagctgtagctttcatcttattgtagtcctcttttctctgaagcatcaatcccctaataggactgaagtaagttctcaaacatgttatccccttgtcctgactatagagggttatgtctatctcaaaatcactcacacattttcagagaatctgtacctgattatgcaaccctttgacgtttaacccatctcccatggttgaatgtccccttggaatccagaaggcctggatatcctggcacttgcccatgtgtcctttgttgtttagggctataccatgaatacattcaaaaactatcttgttaatatcctttggaaggactgtaaaaataatgacttttcactttaaaataattcaaggaatagttgtttttaaaagaaaatgttaaagactgcctaattcaactttctttttgtgtggacaaaacaaacaataaagaaaccaaacaaa

SEQ ID NO: 100700 - DNA, 238 bp, Homo Sapiens
gtaaagacagggtctcgctttgctacttagtctggtcttgaacttctggcttcaagcccttcctcctcagcctccaaaaacgctgggattacaggcatgaactgctgtgcctgggcctcagcaatttttaaaagaacttttcaagtaattcagtcgttgtaaagtcatttaatgtggagcataattaacactttccttaaaaagtgtgcctcttgaggataaagcaaactttaaataa

SEQ ID NO: 100701 - DNA, 159 bp, Homo Sapiens
ctgggagagggcagaattaaccaagaaaatatgtgtgtaagtgtctaataacaaattggtaagcagtgtgaaggaaagtacccagtgctttgagaagttacatcagtaaggacactgtgtgtatgggatgattattgagactacagaggctaaacatta

SEQ ID NO: 100702 - DNA, 266 bp, Homo Sapiens
aaggcctgtcatgatgacatcacagatcccaaaagaataaaaaaatgtggctgcaaacggcccaagatgtccatctacaagagaatgagacgggcatgttgttttgattgcggacgttctgagcgtgactgctcatgcatgtcaggccgtgtgcgtggtaacgtggacacccttgagagagccttcccactttcttctgtctctgttaatgattgctccaccagtttccgtgcctttgaagatgagcagccgtcaacactatcacc

SEQ ID NO: 100703 - DNA, 534 bp, Homo Sapiens
catggcttctggcttcaaattcacaattcctaaggtccccctttttttacctggatgcttgagcaaaaggatattcggtttggaggctagagaaggaagcaatgatgctgcctgggtatttcacaggcatttgtataataaatgaaatgaacttggaaagcatttaaacaccagccacccatcagtgtgaactaagtaacaggtgaaatcataaggatggcacaatgtgtttgtcgttgtaacttgtttaaactaacttcactgttgtgaggttttcacggttcttctccgagggtcacttgtcagcttgggaggaggtggaacctcagctcttcacagttcctgatgatacataaagcaaaaaactgtttgactttctaaaaccttttcaacacaagccaaagccaaactacagaatggtaacacatatttctgccctatatgtgttaccaattttaacacataaaattagaaataggttttttaaagcccatattgcaaaacaaagaagaatacgaacagattattcactaa

SEQ ID NO: 100704 - DNA, 389 bp, Homo Sapiens
gaccacccccggattcggaggcgcccgggccggaccacctgtgctggtctccacctcctcggcaaccccgggtcaccggagatgctgcagctcgagggtcccgcctgcaccatccatggctctcgagatccttcagagcgcggacccggccgagaccccgcggagccgctgcgcgtggctggtgcccgcggtcgccccgcagtcccgtatgcggcgaaaccgccggggctgcttacctggcccgcaccctcacgctcccgtccgggctgcgcagccgcttctctcacacattttgcgataacatcgatggcgaaagaaaatgttgtaaatcctcctgcggccacgtggctgtccccccacccccttctccctttctctggccctcagga

SEQ ID NO: 100705 - DNA, 571 bp, Homo Sapiens
tttcaaaaatacacatttcctagctgtgcctcttcaaaagatgagcaatcagcatcactaacggggaaaaactaacctactcctaaggaggctgtgagcctcctcatgtgacgaggcaaagcacgaagccctctccggcctcccatggggcacgcctgccaagactcaggcttgaatcgaatcaagcctctacggctaacttccagttactggaaagccaggacaggtaatgatggcagaacaagttacacaaccacaccgggaagcaaaccaagaatggggacgctctgtaggatgaatgacccagtttatgcaatgagacaagagcatgggaaaagcagggagggagtcccgtacagctctctatttaacttaagagacaagcaaccaaatgttggtttggactctgacttgaacaaatcaactgtaaaaaggcatttctgagacaatcataaaagtataattatggatccggtagtagaggccacatattataacatttataaaatacgaaaatggcatggtagttacggggaaaaaagtacatattttttggagatgtgtacatata

SEQ ID NO: 100706 - DNA, 722 bp, Homo Sapiens
  misc_feature (46)..(46): n is a, c, g, or t
  misc_feature (601)..(656): n is a, c, g, or t
tatatatgaaggatttcgattcacaatagcacttcaccatgtaaangagtcatctggtagatttttacgaatgaagatgtctaataggttattccctatttgtttcctcctgtatgttagggtgccctggaagagaggaatgcctgtgtgagcaagcatttatgtttatttataagcagattaaacaattccaaaggaatctccagttttcagttgatcactggcaatgaaaaattctcagtcagtaattgccaaagctgctctagccttgaggagtgtgagaatcaaaactctcctacacttccattaacttagcatgtgttgaaaaaaaagtttcagagaagttctggctgaacactggcaacaacaaagccaacagtcaaaacagagatgtgataaggatcagaacagcagaggttcttttaaaggggcagaaaaactctgggaaataagagagaacaactactgtgatcaggctatgtatggaatacagtgttattttctttgaaattgtttaagtgttgtaaatatttatgtaaactgcattagaaattagctgtgtgaaataccagtgtggtttgtgtttgagttttattgagannnnnnnnnnnnnnnnnnnnnnnnnnnnnnnnnnnnnnnnnnnnnnnnnnnnnnnncttatgtcagacctatttgacataacactataaaggttgacaataaatgtgcttatgtttaaaaaa

SEQ ID NO: 100707 - DNA, 570 bp, Homo Sapiens
tacactatgcagtaaaagatacgaaatccaatattagactaggtatgtaaaatcagaaatatttttctccagagacccagagaacttgaggtagtcattgtcctcaaagccctttgcacatcaagatatgcaaggtccaactgcttcacttggaattcaagtcttccaaaatatagtcccagctttatgtgctactaaagatctgcattcaacctttcaaggtccttaacactgatatgattatgatgtctcacctctatcctccataaatataaaacaggatcacaagcataggcaacaaaaacaacactagacaaatgggactatgttgaactaaatagcttctgcacagcatctacacacaatcaacagtgtgaagagacagcctggtgaattggagaaaatatttgcaaactattaatgtgacaaaggactaatatccagaatgtacaaggaactcaaacaacccaacagttgaaaaaaaacccatataatcccattaaaaagtgagcaaaggacatgaatagacatttctcaaaagaagacatacaaatggccaacaggtacatg

SEQ ID NO: 100708 - DNA, 549 bp, Homo Sapiens
atccttcaatttagagttaaataactcagctttgtatagtagagttagcgctccagtatctaacaatctcagaatcatctctgaaaactggtaactatgcttccatttttaattttgtcctaaatatcagatgtctttgatgtaagggtagggaatggagaaatattttcaattgtgtatttgtattacaaagaacttgaaatttactttcttagttgattatattaaatgatgtatatattatatgtggtttataagctcaacactggccatttttttagttttattgttaaatggtatttttctatgtttaattataatagatctggctttttctggatagcataaagatcactgaactatatatatataagaaacaagagttctattttagcacaaaggcattttatattatttattgaatccataagtttgttttcgtcaaaaacattccatattatttctgctcctttttatttgtatagtttgttatttaaagaaatggcagtccttcctgttcttaatacaataaaattgaaataatgcaaa

SEQ ID NO: 100709 - DNA, 512 bp, Homo Sapiens
aggcgtcggactcctggacggggttgggaaacggtcaccagtttcggctcaaagcagcctgtttccaggagaccgccatggtcgaggcagcgtcctggtcccacggtgcggggccggacgatcatttatgggatataaataaaaggactatgaggtggtaaataaaagactacccaactagaagccatagggagtcatttgaaggagaaataggcacggctcatctgtggttgagggaaagggatcttgaaagatgattaggagaacttgggttctggggaaagtgcgggaagacattctggcagagaagcaaacgtgaggaaaggtaagaaggcaagaatctcccattacaaagggtttggtgaaaccctttgcctgtccttttcgctcccttcgggagcagtcggcaataagctggaagggtaatggggtgaaaatgcccgtggtcagttccctggctctgcgactcactagatgtctgacaataaacaagttacttagcttctgggaaa

SEQ ID NO: 100710 - DNA, 484 bp, Homo Sapiens
acagagggatccaaagaaacagccaggccacctgatcaggacagaagacaatggcctctaatctgttcccaaactagatctgaaacagtcacaataagctaagaatagaaattcagccatctctgaatcaaacaccatcacctaaatggtggcagaaagaaaagtcaccgagctgataatctgctgtaggctgaaaactggaataaatttccaaagcgcactctcttttctctctagcttgaggcaggtattcaataaatacttgaatgaacaagtgaataaatgaatacatggagaccatcgatgaatgttcagttccatgacagatactggttctgttcaagatccatgccgaggacacttttggggtctaaattctttttgtcccactgtgctgggactgcagatatgtcacatcgtgcccctggcaaataaaatagagagaggtgcagatttaaataataaaatgtgtctgattggtaga

SEQ ID NO: 100711 - DNA, 648 bp, Homo Sapiens
taaatcagcacgcaccatgctctctcttctcagggattcaacattgctctccagagcttggctggtcgagataaatagcctggcactctcaagactaagaagtccgaaaatgctggagtctctcagacacctatgttttgggggtagatgttgaaatttggaaatatgtctgggatgtggttagtgatgttgctgcaagattcaaaggcagcaagtgtctgacagccagaagttgtgcctagaaaatgaaatatatttttctgccatggaaattggccaatgctcagtccattaaatgtaaataaaatgcaaataagcctttactgttagcacttgccttctagtgatggctcgaaccatgttaagatgtggtttgaagtatgtccagccatttctactcaaagtctatcaggatgattctccaggctctccttttaagttcatcaaaggcttcctgtacccaggtacaatgccaaaccacagatagaggcaaagaccctgggaggtagagaaggtgctagatgaggtgtcagcagaagcaaaaccagctctgaggtctccatagaaatcaaggaaatgcagagcattcttcagccaaaatcatgcagaagaagcacttcaccgttccccggcggggcgaaaaataaa

SEQ ID NO: 100712 - DNA, 510 bp, Homo Sapiens
  misc_feature (102)..(445): n is a, c, g, or t
ttttttgagacggagtctctctctgtcgcccaggccggactgcggactgaaaatttttcatttttacctacctccttatacgagggaaaatgatttggaggnnnnnnnnnnnnnnnnnnnnnnnnnnnnnnnnnnnnnnnnnnnnnnnnnnnnnnnnnnnnnnnnnnnnnnnnnnnnnnnnnnnnnnnnnnnnnnnnnnnnnnnnnnnnnnnnnnnnnnnnnnnnnnnnnnnnnnnnnnnnnnnnnnnnnnnnnnnnnnnnnnnnnnnnnnnnnnnnnnnnnnnnnnnnnnnnnnnnnnnnnnnnnnnnnnnnnnnnnnnnnnnnnnnnnnnnnnnnnnnnnnnnnnnnnnnnnnnnnnnnnnnnnnnnnnnnnnnnnnnnnnnnnnnnnnnnnnnnnnnnnnnnnnnnnnnnnnnnnnnnnnnnnnnnnnnnnnnnnnnnnnnnagatttgacagttgagagaaggttgggcaaatgtcttaaaatgaaactacttcataaaagatcct

SEQ ID NO: 100713 - DNA, 536 bp, Homo Sapiens
  misc_feature (263)..(275): n is a, c, g, or t
atagacaaatagatgacagatgaggaaatgaatacatactaaacaaatgtatatttcccagctctgtccactcagagcatctggaagcagtgacaaaccagtagcatagggtacacccaggtccatgtttggtttctgataccattctacaatgaaatgaaccaaggctccttggagaaagggcttgatttctaatgctgatacaaggaaaatgcaagataagcctggaacatcttgtaatgtcagaaaataaagaagtgctnnnnnnnnnnnnntgaaacgaagaggaaggcaagttcagcctgcaagacctgaaagagggtcaacaggaaagagctcataatggccaaacctggaacaatttgagcaacaaaacaagaaatactggatcggaaccccaagaataaaataaatatccacgagtctaatctgataaataaatgattaaataaataaagcatccttacagtgcttttccaaaaaaattgtaggtatgcccccaaaacttctatacttaagaaaacaacccaatagaa

SEQ ID NO: 100714 - DNA, 563 bp, Homo Sapiens
cagtgcatgttctcactcatatgcgaaagctaaaaatagttgatctcatagaagtaaaaagtaggacagaggatactagaggctgggatgagagtgacagagagatttgttaaaagatacaaaattatagcgagataagagaaataagttctagtgttcgacagcactgtagaatgactacagttaataataatacaatatatagtttcaaatagctggaaggatattgcacattctcaacataaagaaatgataaacatatgagatggtggatgtgctaattaccctgatctgataactataaattatatgtatggaaatataattatgtgctctcaagaatatgtacaattggtatttgtcaatttaaaaaataaatttaaaaactgtatcattgaatccttaagatgctaaagttcatttacttatataacaaattaaaaaattatttcttatgctgtttttcaaaaatcatagcttttatgactttacataaatatatctaaaataataattgtatgatatgtttttgtagtctaataaaatttgcactgaattccaaa

SEQ ID NO: 100715 - DNA, 561 bp, Homo Sapiens
atcaaacctaatccacgagacttgataaggttctgtgctacaaattaatgtttagataaacttcagtgaaatgactcttcaggaattggtgcataaggctgcctcctgttatatggacagagtagctgtatgttttgatgaatgcaacaaccagcttccagtttactacacctacaagactgtggttaatgctgcttctgaattatcaaattttctgctgttacactgtgactttcaaggaattcgggaaattggtctctactgccaacctgggatagacttaccctcttggattttaggaattctccaagtcccggctgcttatgtacctatcgagccagattcaccaccgtcattatcaactcattttatgaaaaaatgtaatctaaagtatatccttgttgaaaaaaaacaaattaataaatttaaatcttttcatgaaacattattgaactatgatacatttacagtggaacataatgacctagtgctcttcagacttcactggaaaaatactgaggtgaacttgatgctaaatgatggaaaagagaaatatgaaaa

SEQ ID NO: 100716 - DNA, 387 bp, Homo Sapiens
attgagaaccaaggactttatatctggccaatctgtcattcaagtatagacgttattttaaaaagtttcaaatatgcaacaattgaggaaataacagtaactttcctaaattaaaaaagtttaaaataaaagagaatcatatacagaaacaaagcaaatatagtcaaatacacataaaacttacaacaagggttttcacattatctcacaaagcaaagacagactcaatttatgctacacagggaagacaaacaaaaacagattcagaaaggtgaaaaatagaatgatggcagcagcatggcaggcaaatgccatttccatatggaaactaaggaatacatttaaagcaaggataagaagcaaattcatggcttcaaaagctttatc

SEQ ID NO: 100717 - DNA, 643 bp, Homo Sapiens
  misc_feature (60)..(73): n is a, c, g, or t
  misc_feature (278)..(377): n is a, c, g, or t
ttttactaagtaacttttttgcccattggtgtcatttaaccaaaagaagaagaaattccnnnnnnnnnnnnnntcaactgaaacaaaagaatagactgaatttgccaaaagagtgcttaaatggagacctaagtcttcaaagctaaggtgatgagaaaagaacaggtcttaaatttcttcagagcttcaagaggcaaagcttgaaagaagaaaaaattttattcttaggtaagatgtaggggtagaatggtggcccctgcaaaaggtaagccttcctnnnnnnnnnnnnnnnnnnnnnnnnnnnnnnnnnnnnnnnnnnnnnnnnnnnnnnnnnnnnnnnnnnnnnnnnnnnnnnnnnnnnnnnnnnnnnnnnnnnntggactgtaaagtcaatgacatgtattcatatatgacagaagagaagacatggagaagaggagggagtagttgtgaccgtggaggcagagaatggagtaatgtgatcataaatcaaggaatgctgacagccactaaagctggagaaggccaaggacagatattcaatcctcccgtagaagtacagccctgctaatgcattgattttggacttctggcctcagaactgtaagagaataaatttctattgttttaagccttcaaaaaa

SEQ ID NO: 100718 - DNA, 469 bp, Homo Sapiens
cgcacccctgcgccctcaagccatgctgctccttgtaaatacccgctgctgcggtggccctgagcgaggaacaagccattcggacccgaccgatgtaaatacagccgcccgtccgcccgccttcctaccgggctccccggccttgcccgccccctcccgggcgtccctgtccagggccccggcttggtttccaagtgtaaataccgcctcgcgcctcaaatccccctaccccgtgtgaactctagggcatcggacctcaaggggttaactggacagacggggggcgggaggggagagcgccccctcccattgtatagccttgaacccgattgtgaatacaatgtagcaacttcgctggcgcctgccccgcactccccgtcccgtcaacttctgaaactcctgttcctaatgacaaagtggctatgtgcaatggatataaatgtactgtgagtctctcggttcaaaaaaa

SEQ ID NO: 100719 - DNA, 432 bp, Homo Sapiens
tgaagctcagcactccggggggtcttcacacgggcaggtcctggagggaaggaggcggccaccgcgcccacctcccatctgaaggcacagcaccgcagtggtggcctgtgccagaggagggggtgaaggatggaatgtcctcatggtgagtgctgtcagaggcaggcctgaacgagaagacaggccgtggcaacggtcccgaggctgtgagtctaggcagcctgcctccgggacccccaaagccaggcggtgcaccacagcacacaccgtgggacctttgcttttcactcaggaaaagaaagaacatgtgagtgcttctgaaaacacagcaagaggacttgagcacaagctaaaggaaaaacaaccctatatagtttcttcgagtgagaaaaataatgccaaacaaaataattttatgtaactacctcgaaa

SEQ ID NO: 100720 - DNA, 388 bp, Homo Sapiens
  misc_feature (284)..(292): n is a, c, g, or t
ttaaaaaacctggtagttcccaggcaaatagtttaacttggaatctttgaaatctaatattaaagaaaggtcttcattttattccaaattttagaggatttaaagagctggcaaggaacaaaaggagctggtccattttaaactcagcagaaaataaatgttcaaccttggctgaagctcctgtgtaatcttacagctaacagtgtttccaatgactaaaggcaaacagaaatagcagacggttcaatatccccatgctactgcaagtattttgctccaagtgnnnnnnnnntcatatacttagatattttgtataagacatgcgtatatactagatacacacatttactaagtgaatatatagtactccaatactttaatcatttta

SEQ ID NO: 100721 - DNA, 548 bp, Homo Sapiens
tttgataccgtaattcatttggcagcaaaatctgacttgaactgatgtgagagtattgtactttatatttatgctacttcattgtgacttaattttccctgaagaaatatccatggatttgattataggttttcccttagatgctgtggaggtgttttgtaatattcaaaatatgcccatattgcctttttaaaaccccaaagattatgaattctgaaacacatccagcccagcgggttttggataaggggttgtaggcatttaagcagcctcacataatgggctgacttcatccaaaacatgaaaatattacaaggcaaattctgttttttatattttttggttcaatgcttgaacaacttgtttttctgctgggggaagaaaaaaagaaccaaccctgagtgtgattgttacggaaactaatgactttgtttttaaaggatcacattgattcaacaccttctattggacccagaagtgcgtaaatattacctatggtagtaaacgtttaattatcattcagtttaaatgttggccttctgtatgta

SEQ ID NO: 100722 - DNA, 542 bp, Homo Sapiens
ttatgacagttaattaatagcaacctgttttaatgaataaagtcactcagagtccttcagcacttcctaagtagaggccagaaatctgtagggcttcttttccccccaattgtatagctcctagactccaagcactatataggcccctgtatagaaatgctcactaatgaagagggagggctagaagcttcgctgcattcaaagatcactggtgagtcattcagcaagaaaagggccccttaccagggaatagtcacagttccgtggcattgtactagcaaaagggtctgatcaaaggtctcctgtggagcttgcatggttccctttcatactacgaccataattaaaaccactaattctcttttaaaatgctgcaggatgccatgtaggcatctgtctggagtgtcctttgtgatgtcataagctgttaaggaccagtgccgagggcttttgagtgaaatgccagtcatgaaggtgcttcaagacaagggtgcctctaaaagcttgacagggccttgactgcacaattcgagctgaatttg

SEQ ID NO: 100723 - DNA, 351 bp, Homo Sapiens
  misc_feature (24)..(24): n is a, c, g, or t
tctatgcaatctgcaattctaagnctcattctattaaaaaatgtatctcttaattttaaagaccacctgaagatttacattttctagctgcacatatcctatagagggaaatatttatttcatctctctgggatttttccaggaactaaaacctcaggcaccaaaacctcaggcaccatctgcacttcacccgggggtctcctgtcagatacagattctgcagctctgccctctggctgtccacaccattggtgctgcaccagagctgacccttcacagctacttagtggttacttggagttggtaaaataatggatacttggacctaaatcaaactttttatttatcaaa

SEQ ID NO: 100724 - DNA, 501 bp, Homo Sapiens
tggcacctgcagttaaaaccctaacaatatacattgtcattttacaaaataaaattaatagcttcacttctacttcattttaaaataagatcatctgcactctgaggcagcattcgtctgcccttgcaacgtgtaactgtcagagtggggtactacagaggactacctgcattatattccctcaaaaacggttttccactcaggaaagttattttcaattgggaaatctgttctgcccattcaaaaagtcttacagccactgatccatggccacagactgcactggaataacctcagaaataataatattagcagcttctatctattgtctactatgtgccaagaaataaacagatagtaaacaactgaattcttaacagcaatccttaaaagtaagtgatattatttctgtcatttctctcaggggtctacaaattatggcgtggacctaatctgaccagcctcctgatttataaataaagctttattggaacagtaaaa

SEQ ID NO: 100725 - DNA, 496 bp, Homo Sapiens
ctttggtggcctgtttgagtagcacaagggacgtcatcctaaatgtgcagttgccatttgttctgtagtgacttacagggatctcagtggcaaagggcgtcagtgagacaacaactgagcaaaaagaactagacgaggcttgcgcttggaaagtcacggtaggattggacctgccggccacatggctcagggagtattgacggatttgcacattggcaggaaactctcccgtttgggattctttaaatggggcacagaaggccacttttttgcatttctgggtaaaaaacagtcatcccccatgactgcctgcatcgggtttgtcttgtgccaaagttactcttcctttgtttttactttgccttgatttttagcattagctggtagtttggcttggaaatgtcctggatagccgattccctaagaaactgaaacatttaatattggcttaggatgtatcagatggggccaaataaagcttctttacaatagtaaa

SEQ ID NO: 100726 - DNA, 906 bp, Homo Sapiens
tgcggccgccaccaccctccccccttgggcccccagggacccctaccttctatgacttcaacccacacctgggcatggtccccccctgcagactttacagagccagggcaggctatctcaccacaccccaccctcgagctttcaccagctacatcaaacccacatcctttgggcccccagatctggcccccgggactccccccttcccatatgctgccttccccacacctagccacccgcgtctccagactcacgtgtgacatctttccaatggaagagtcctgggatctccaacttgccataatggattgttctgatttctgaggagccaggacaagttggcgaccttactcctccaaaactgaacacaaggggagggaaagatcattacatttgtcaggagcatttgtatacagtcagctcagccaaaggagatgccccaagtgggagcaacatggccacccaatatgcccacctattccccggtgtaaaagagattcaagatggcaggtaggccctttgaggagagatggggacagggcagtgggtgttgggagtttggggccgggatggaagttgtttctagccactgaaagaagatatttcaagatgaccatctgcattgagaggaaaggtagcataggatagatgaagatgaagagcataccaggccccaccctggctctccctgaggggaactttgctcggccaatggaaatgcagccaagatggccatatactccctaggaacccaagatggccaccaacttgattttactttccttaaagactcagaaagacttggacccaaggagtggggatacagtgagaattaccactgttggggcaaaatattgggataaaaatatttatgtttaataataaaaaaaagtcaaagaggcaaaa

SEQ ID NO: 100727 - DNA, 673 bp, Homo Sapiens
actctttccaatttaaagggccaaaccctaccaaagagagggagttgactggcttttaaaaagtatttaaataccacaaatgacatttaatttcactgtattcagctttaagttgttcacaatgaaaccacactttcaaacaagcaggttcaagctgctgaatagacattatttcttgcattaaaataccactaatgcattctcttgcaacactgccagacatgggattgtcaccatagaattagttggtactatgccatctttcactctttcacaagtcagtgatggaacctgctttatgaccaagattcatcctcaaataagccacatgtacccttctgacaaagctgtgtaaagtattagaatctgatgctctagaaagatcctagttgcctttgtgtatatttactgcctgcttgagtgtttctatgtgtgggttttccctgtatcttgtagaaatgttggggtgttttcctctgccatatggctcgtggcctgcgagccaactatttcagctgtattttaccttcatttttgatgaggtgatttaaattttgtttcactttgtgtagtgaattccacagtagttttctgattgttgttaaaaatgacttaacatattacacagatattcaataaaaatgttttatttcctgttaaaaaacctcgtgcc

SEQ ID NO: 100728 - DNA, 580 bp, Homo Sapiens
agacactcattgaagtaacaggcaaaatctagaatcgtgtgtgacttttcacataattctaggccagttttcacactaattttaactaataaaatgaaaattcttaaaattccaacaatctattcattaaatcctgaatttggtacattagctaattgacacaggttaacactgaagttatttttgttaacctgaggtaattggttgttacagacattgagactggaaagaaaaagtgaaaaggaaatggggaggtgtaggtcaaaaaacacaaggtagcattatttaggatgaactgtccaaaaacccaacgtacaacacgaggactagagcggacaagagcgtgctgggctcagagtttttgccgcactgagtggacaagagcgtgctgggctcagggttttgccgcatcgagtaggttatggctgctcctgcatgggtgccaggggagagaatgggaaatcagtgagatgtgggtgtgttaatttgttgcactctaataacaatttcactataaaaatatgtatcttataacatcataatatatgcctcaaatatacacaatacaatttatttttaa

SEQ ID NO: 100729 - DNA, 439 bp, Homo Sapiens
ttctgccagatgaaccttcttgctgtgattcataaacatggctgtacctctaaatagactgggacttccttttgctctatccccatttcctaaagaagaaacctgatccttggaaatgttcagtggctgccccaagatgtcggcacaacctcttgtgctcttgcctcctgccacaaaaacattatgtcccagaaaagggccactccatcagcctaggtccagaaatgagaggacacatggactgaacttgaagatggcccacagcagacatgcagtcaactctcagcctttatgtaatgcgggaaagaaggaaatgtgaatattatagactactaaaattctaaagttgtaacagggcaaaatgatcgatacaattagcagtggctatcagtctagcatattgtcatgctatatgcatgctataaaactattgaacaaa

SEQ ID NO: 100730 - DNA, 353 bp, Homo Sapiens
ttacatgttctaatgaagtattcattatgaaaaggaattttaactgtctagccaacagactgctatctatgctaattattaccccaaaagattggaaagatttgaagatttattggggggagtggacttgctataagcaatcaccatgagaaaaaccttaccatccaggtatggagagtttttggctccagcctctaattatgcctttcctgctcagtggagcttcctagtcaagtctgtccattttcccactacactcacttctactccattagggaaatgtgctaaagccagatgccccacagtgctaatctgatgagctccaagatgcatgtctgctcttcctggcccct

SEQ ID NO: 100731 - DNA, 113 bp, Homo Sapiens
atatgtgggggaaggaaagaagtagctagcagggttaacatggaaagcaggagattatagacaagcatcatttgagcctttggatactacaaataatcttcaaaaatgacagg

SEQ ID NO: 100732 - DNA, 466 bp, Homo Sapiens
aatgtattaatttaattaaaccttaatccttaaggaaaaggcttttcaacattctgtctgataaagtgggaagtatgcataagacattttgcataccaaagtatgatggttttctggaggaaataacttaggccattctttgagttgtgagctgaactagctgctcttttatggaatgccacgtttactcaaaagaatggccgacaaaactgtggttatcagatttaggtagctggcagaacttttctaaaaaggaacaaagtgagtctgtcacttcagggaaaaatctgacagtgtttgttgccaatgatataattcaagctttcaagtgaaaaatcgaattttggaacacttgtatttgctacatgagcttcacagcttcccaaaatttaaaacttaaagactttactgttctccagtataatactatgaagaaaaacaaagactttactgttgaaacctaaaa

SEQ ID NO: 100733 - DNA, 533 bp, Homo Sapiens
aagtcaaactcatagaagcagagcgtagaacggtggttaccagaagctgggccatgaagggattgggaagatgttgttcaaagggtacacactttcacttataagatgaacaagttctgggggtctaatgtagcacatggcaactatggttaacaatactgtattgtatacttgaaatttgctaacagagtagctctcaaatgttatcacacaaaatggtaactagatacagtgatcagtgtgtgttaactgacttgattgtggtaatcatttcacaatgtatttgtataaaactcatcacattatatatcttacatttatacaatttgtcagttatacctcaataaagctgcaaagaaatatcatttctaggttgtgcccatcacaacctgtaggagttaagatttcagcctgagtttcagtttcaattccaataccactactttctatgtaatactgaacaagttttctaacatctctaaactttaatttcttcctctataatgggaataaaatcaaattattttttcaaa

SEQ ID NO: 100734 - DNA, 518 bp, Homo Sapiens
agctattggaaatatcaggccaaactttgctaagaacaagttttaccttttccagagattacatggttggagttgatcaaaatttaaataaaacatttaattacttaaaagttgatgacttaccacacaatggacaagaatgctgaaaggaatccaaaatatcaaggagaaaaccaggacagacccaacgatgttgtctgctaaaaactttcctgtgaacaattccaaacagttaatgtcttgaccaagtacttcacaaatctaaagtgaaatgctcttaggatattaccattgtgtcaaatgccagagctgctggctagacatactaccgagagcagaatgtctgtgctgcctgtattacaccacaccatctctccataccaagtgcttttaaagaaatagccctcatatactggctgacaggaagagattgcagaatattcaacatgttacctggagtagctgtgtcaacagattaatatggaatgctactactagtaaatgcttaagaagacaaa

SEQ ID NO: 100735 - DNA, 633 bp, Homo Sapiens
gcctgcctgcaggctcaaacacactacctgtagggctacacaaaaagctctcaggttcttggggcctctgtcactgaaggctgaggagtgtgacctcagaaactactccttggtgggggctatggatagtattagctatttaaataaaaaataaatgtgatttcttacctcttttgggagcatggtcagggaggaaagaggaggcaggaggagaggcaggtctcagaaccatcccgctgtccatgcgtgttctctgttccagaaactgaccactcctgcaaggtgtgctgcagggacctttccggccgctgtgtgccctatctcgatgctgaaccaaagaacttatttttgaggaaaggaaagccctgtacagtaggattttgtgacatgaatggccaatgtgagaaacgagtacaggatgtaattgaacgattttaggatttcattgaccagctgagcatccatacttttggaaagtttttagcagacaacatcgttgggtctgtcctggttttctccttgatattcttggattcccttcagcattcttgtcccttgtgtggataagaaagttggataaacagtatgaagtcgccggtcgtctggttcaccccgtaacgagtcgagaacata

SEQ ID NO: 100736 - DNA, 773 bp, Homo Sapiens
tttaacacaaagcctattttataataaaatattgaatagctcatgtaatttattgaaaactatactaaaagtgaaaaacagaatggttgcatgggtacctgaaatatggtttctaccaaatgtgtattgcctttgcaaccatcttaagtcaaaccatcataagctgggaactgtctgtatttagaaaaaagcaaagatggagaggtattcctaaccccctgggttcctaatttctcacagatttctcatttcagcactagctgaggtctggctatcagcctgtcacagagttaggagtatgtcatcacagtgatttttctttcccctcctccagcctatttgaaggaggccctgttatgtgttaccattagggtctttactaagcaatgtctagtttttttccttgaaaaacttgaaatgcgaatggctctctcaacatgcttctctttgtaacagccacattgtgaatattaatggcagtacttaagcaggtcgattgtgcactgagaatatgaaatatgcatgtcacttaaaaacaaatgattgtccatacagtgcttgggctgaattattctccctcaggttgtcacacctgatgcagagggaagctaaggcaatgcatctgtgccagactttatagatcccaaggtcaggatcaaaatgtgcagattcaggaagatgctttttcactaatgatttgttaccattaacttgacgcactgggtggatttatatagagaaaaatgttaataaaatgttcttcgagctacaaa

SEQ ID NO: 100737 - DNA, 140 bp, Homo Sapiens
acctaataggacagaaaataaagagtagcttccagtatcagattattcaaatgaatgcaggaccagtctgcaggagcccttgccaagacccacggagactctgcttggcttttagttgactctgtgacctgcttcaagtc

SEQ ID NO: 100738 - DNA, 503 bp, Homo Sapiens
ttctgagaagagtcacagagcataggcccccctagggtacacagagatttcattagtccctagatgtttcctgatccttttaaaaactggttaaattcagagactctaggcaattacttctttcagaacctgtgaggcaaaaacgaaagaagaaggcaggacacgcagtgtaacaaaccttggaatggtaagtaggaaatatgagttagttttttggctaagctatgaatttaccttgtgcctgccagaaatcactcagtcttttgtgactgtaaattttctgtaagtgttaattggtttggtttattattgcaagaagcaagggagcaatgttgtgtattataatttcattgtgtcaattttgccaaattatcttgcattttgttattctatgaactcataatgggataaggagtataggctttgattcagaacatatgtgatgttgctataaatgcttcatggaaaaccctaaatatattttgaagcctacatagtcaaaa

SEQ ID NO: 100739 - DNA, 547 bp, Homo Sapiens
gcggccgctgccctacgaccgcttctgctatgggctggccgtggtcgaggagacagcgttgctgctgggcggcctcaagtggcgggactcgcgccaggtgcctacccgcaacgtagtgggctacgacctcgacctggaccgttgggaggacatcggctgcgcgttgccctgggcctggagcggcctgcggtgcgcagtgctgcagctggccgagggtggggacgacgagagggagggagaggttggagaggcgctagatttggtgctgggctgaatgggtcagtccggtttccttccgcaatggaggagaaagtcgcgcttggttagtcttacagagcaacggatgggctttttctaagaaagggattctgggagcagagtggcttctgaaggttaacaggcaaacaaggccttgagcaaagagaaacatttctccttgagctgagaatgggagacagcggggcggggggtcaaatagaaggctatatgaatcaacttcagtgagctggtgaaagaaaatttttagaaaggctcacgcaaggctaga

SEQ ID NO: 100740 - DNA, 664 bp, Homo Sapiens
cccttggtggggaggggggtgtttaaggatctagactgggtctctgtccaaagggaagctcacccaatctgagagtggcttgattgcttccagtgcttcaggaaccctcccacccccagctccttatgatccagtataagacaaagttatcttccatgaacagaagagatctggaattttaatggtgcttggtaattatgtacagcaatttttagccccaagaagacttatttgatagggggctgggagcactgggcaccagagtggagagaaaccctacgctggggttttgaagccaggctcaccttccgcagctcacccccttttctctgggccccaggctcctcacctatgaaagggtaatgaaaacaatagcccatctacccagtgagtcatggtgatctagtgaggtgaggaccgtggaatcccttggggaaatcaagatgggaaggttttgaaggtcacaggtcatggccagtgatgggctttggtgggcttcgggtacagataagtccccagctcatgatatttcaacttaatgattttttgactttatgatgatgcaaaagctatgtacatccagtagaaaccatactttgagcacacatataatcattctgtttttcactttcagtattcaataaattacatgagatggtcaaaa

SEQ ID NO: 100741 - DNA, 147 bp, Homo Sapiens
caagaacccttggatttatgtgaggtcaaaaccaaactcttattctcagtggaaaactccagttgtaatgcatatttttaaagacaatttggatctaaatatgtatttcataattctcccataataaattatataaggtggctaaaa

SEQ ID NO: 100742 - DNA, 238 bp, Homo Sapiens
agaaagttaagcaggacttgacaatttgggagtttgggtcagatttgcttggagtttgtaaaaattatactgggaggagttccacaatctccctgatggctagaaacagtaatatttactaggttcttactgtgtctacgccaatgttctgggcacagcagggaaaaataaacagtagtagagatggcctctgtttatgaagagcccaactaataatcaagggcataaaagacataaa

SEQ ID NO: 100743 - DNA, 252 bp, Homo Sapiens
cagactagaggatgagtaatgagtaactctgtaaggaggaccatgtcagactattgtaagctaagcattaggactgatacaaataatatatgctcctggcatagaaaaataaaccacagagaacgagttcaaagaatagcaaagaaagaaagaggacccagtgggcgaaagatgagagtgtacttttaccaaaagttatctaagcctgagcacttgaagtctgcacataaataaataaatgacaaaaaaaag

SEQ ID NO: 100744 - DNA, 447 bp, Homo Sapiens
taaagccacaataatcaagacagtgtggtactggcttaaggatagacaaatggatcagtacaacagaatagagtccagaagtagacccatacgtatgtggtcagttgttttttgaccagggtaccaagtccaacggggaaaagaaagtttttaacaaatgatactgaataactggatatctcaaacctttctcactgtttactgaaacattaatttaagattgattacaggtctaaatataaaatccaaaagaataaggctttgggaagaaaacataggagattatcttcacaacattgggataggtaaagatttcttggacatgaactaaaggcagtaatcatcgaagaaaaatatggataaataggacttcaaaaaagttacaatttctgctcattaaaggacttttaaaaacatagacattgccaggttcagtggctcacacca

SEQ ID NO: 100745 - DNA, 460 bp, Homo Sapiens
caggagaaagaagaactccgggtgggtcccattcctttaaaaggtcgccacccactcgactgccaagctgagatcctaaggacctccccaaaggaggaggtcgtggccttcccaaagcgcagtagccacggtggaaacgaaagcgtgccgcataagcctaccgtctaccgcccgcacatcaggaacctcacggtacttcagggaagcagttaagtcaagccggcgcgtcacaggcactcggcgtgcaagccgccccgcaggtgctaccgtctcttacctccctctacttttaggaaacacgttgtatccccggagggggtgcaccgttcctggaggtactgcaataccaggtcgatgcgtggagtggacggagcaagctcctattccatctccctgctccaaaaatccatttaatatattgtcctcggatagaggacgtatcagatattaaactgataag

SEQ ID NO: 100746 - DNA, 515 bp, Homo Sapiens
gttaaaaattgacttaccatttgacccagaagttttgctcataggtttgtacccatgagaaatgaaatcatatgtatataaatattcatagcagcattattcatgacagccaaaagatgaaaacaaccaaaatatccatcagcttatgaatggataagcaaaatgtggtaaatccttacaaggaaatagtatttgaccataaaagtaatgaaatactgattcatgttacaatatgaaagccagttacaaaagactacatattgtacaagtgcatttatatgaaatgttcagaataggcaagtctatggagacaaagtagattagtggctacatgtggaggggaaggatgggggtattgggggcgacgggtaaaggatatgggatataaccattctaaaattgattgtggtggtagatgcacaactctgaatgtactaaaaatcattgaattgtacacattatatgggtgaattatatttcaataaagctattaccaaatttttctaatcttaaaa

SEQ ID NO: 100747 - DNA, 459 bp, Homo Sapiens
ctgctaccccaatcctctcctccccctcttcctgccacccctcaatttatagataaggagactaagactaagaggtcaaataatttgttcaaggccactggcactaggaactaatggagctgagatttaaattgtggtctgactgcaaagtccccagcgcttaacccgtctatcagctcacactcactaagcacctttgtgccccacagtactcttgagagatgtacaacagacaaattagtgcagattctcagctctttaatcaagggacttgccatctggtttaaatggtgcatggtccacaatgctttgacataaatggcccagggtatcttcagtgggcctaagaacacttcctccaaccttatgtccagacacacaatggcacttcattacagtttgtgggagtccagtaatttttaatcactggaataaagactttgatgatgtgaactaaaa

SEQ ID NO: 100748 - DNA, 564 bp, Homo Sapiens
tgcggccgcctttgtgagcaacgcggcaaccggagcccggcgggcagccggggaggccgggactgagaggggcgagccgctggtgctccccggcggcagagggccgcgtcggccacgggcccgggagagacgcgctccagccggccccaggatgtaggcgatcggcggcagcgctcctgcaggcggccggctcatcatgaagaagcactcggcccgggtggccccgctcagcgcctgcaacagtccggtcctgacccttaccaaagtggaaggggaggagcgcccccgggactccccgggcccggcggaggcccaggcaccggccggggtggaggccggcgggagagcgagtcgccgctgctggacgtgctcccgggcgcaactcaagaagatcttctggggcgtggcggtcgtgctgtgcgtgtgctcctcgtgggcgggctccacgcagctcgccaagctgaccttcaggaagttcgacgcgcccttcaccctcacgtggtttgccaccaactggaactttttattcttcccgttgtactacgtggggcacgtctgcaagtc

SEQ ID NO: 100749 - DNA, 472 bp, Homo Sapiens
  misc_feature (99)..(114): n is a, c, g, or t
ctgtgaattggtggtgcagatgtgtggtgacttttgatgaatgactttcttcttctcccagccctcaaggaaaccagcaaatcaaaagggtctcctgcnnnnnnnnnnnnnnnngtcctccagcatcaccaacttgaagtactggggccgttgtgaaccaatcacctccaagacactacagcttctcaatgacctctccattggctacagtagcgtaaggaagctagtgaagcttagtgcggtacagttcatgctgaacaatcacacggtgagtgattctagctttttttcctggccctcctaccacccacacatacactgtctcgacacataaaggagatatgtaaactgaggtcccgggtattgctacagcaaagacggtggtcctgattcccacgatactgccagattatacttacgtcatcagagtggctctttgagatccagatgatgtgagttatggtgaagtcac

SEQ ID NO: 100750 - DNA, 495 bp, Homo Sapiens
ctttgctgatgccaggaagactggacggcttggtcccaagaggtattccccacagcgcagcatactggctgtggcagatcatggccagactgcctctttaggctgaccctgacccatccctcctcactgggtggggcctccctgcaggaactccagcaactcaagccagggaattagggagagaactctgatctctctaggtctgagtccctagtgggaggggtggctggctgttgtctccacaaaccggaagacttgttctttccccctgctcactctgaggattccaggcagcccagatgagtgggattttccccggcacagcatacccccttcccaaagggacaatcaaagtgcttcattaagcaagtcctggatcctgtgcccctcaactgggtgaaacaccccagtgggtcaccagacaccttatacaggagcatttctactggcatcaggtgggtgcccctcaaggacagagatcccagaggaaggagt

SEQ ID NO: 100751 - DNA, 522 bp, Homo Sapiens
tgtatcaggtggacccagccgaactccgcagcagcccaggccagcgccccacctccgggtcaccggcatgatccgcctctccccgggcccccgcggccctggcacccgaggtcagcgggccgtgggtacagctcagccgcggaccctgctccgcgagtgcgggagctttggacttgaacgcgacgtgctcgcccggctcccaacaaacttgcaatttccgcgcgcaccccttaaacaggaactgttccccaaaccttgacccagctaccccgctgtgctctggcccgcggacctgtgtccgaacccgggctcggctgccggaaccggtttgagaaaacaaaagagttgtggggcagttttccctgtggggggcaggggcgcctcccaggtccctgcaccccgactcccggctgctcccctggcaactaatccggagaagggaagtggtgccacgagcccccactgcccggggagggagggagagagaagggggaactgggaaataaactgaattctcttaaa

SEQ ID NO: 100752 - DNA, 484 bp, Homo Sapiens
gattaatacactgaatggccaacgacaattgaggtggtacagttctgataatacatcactcttctatgatcctccttatcatcatgtctaaatcaatttagtttggcacaacttatgactccacccacccgtgtcagtatgtaaaattattgtaagatatttcatgtatgagggtggagagattaaggactgataaaagaacaataatgaagaatttcactgtatactgtgggtcctttttgtttgtactcatcacatttgatgtttgcatatcactagtgacatgatgcctttcatgtgtgtgacttgatgggcggatattggatctgtaaaactgtggggctgtggggtcattttctgactaccaagatatgacccagtaaaaccagcacttgcagcaggattaggattgaattctaattcagcattctaccttgaattactcaactgccaacacagaactggtgtcactggactgttctga

SEQ ID NO: 100753 - DNA, 570 bp, Homo Sapiens
tgcggccgcgcctgcctgccccacctcgtaagggcctgtgacctcacgaggccagccgccgggcgctgcattcgagcggtggggctcctgtccgtgcgctttcctcccgcagccccggccgggattccgccctccgtccttgccacccgctcgccactcttccctaatcgctgttcattctccggtgcgctgtcccgccatggtctgaccccacttcaatcttaccttcggtccgtcctttgaacaccccgacccccgacccctttcttccaaaacattccatccttcttggcttctgctactcaataatggacagcagctcgaaggccatgtgtcccacggctttgctgaaatttgtctcgggttgcctttaaggagactgtcgtttccttttgaaagagatactttggttggtttggttttcttctgtgtgtttgtttttcctatgtatttatcgtatgcagttgggcaaaatacttaacgctccctgagtctcgattttctcattcttccagggttgtgggaattcaaaaatatatacgtagtgctcaataaatgttacaatattta

SEQ ID NO: 100754 - DNA, 549 bp, Homo Sapiens
atagaattcaatccataatatcctcctactgttggaacccaagcagaaaccaaagcccaggagaatgcttggatgccagccatatgaatcagccttgctaagcataggacaagatggagaaggatggagaataggtctgggtgggacaaatggatgacatccagtatacccaatctccataattcctccccagccacatgaaaggctctgactttactcctagggactcaagactggaatgggaagagcatgaaattgagctgtctatccccctggatctctcattgccacctgcccataggttggctgcacccctccaccaaagaaaggccatgactccttcctggcagccctgtcttacagctactctctggtgatctgggaaccactccctcccttaccccttgatgcctagggctagtgccagcaccttgttgttgttagcctcagaggcacttgcactgttccttgatggttttcccaaatcttgccctcatctttgtaaatactgtttgccgtttattacactgtcatcatattacccaaaaa

SEQ ID NO: 100755 - DNA, 562 bp, Homo Sapiens
ttgggaaaatctccagtaagcagggaaaacgtcctccaagctgaaagcctttgccggcacagaggcagcaactgcccccagattcccaaataaaggtatcagcctcagttgaagggaggtgctggccccaaagaaggggcgcgcacaggggcctctgtgttgtggggacttcacccgattccagagaaagccgctcaaaggagagatcttgctgagccctgctcctgacaccagctgtgttcacgaagaaaagattgacacggaggtagaatgaatgactgcttatttgggaaacaaagactgcagtttgggtacactgagtcagccctgagcagtgtcctgaaggcaagcgctgggaaggcttttatagggggttccacaaaggttgtttctggaggccgttcattggctgggcagaaacccttaattacaaacccgtgctgattgtcagttggtgaggatgctccccgtgggatgtgacttcagcggtgtgtcccagcctctgggcaggtcctgtggactggccgttagcaggtgtgagtccagtccccccgcggccgca

SEQ ID NO: 100756 - DNA, 555 bp, Homo Sapiens
tcttgctgtgcactcagctggcccattgtatgtatactcatcttaatgattacataacttcacaattcaaacatcagctaagtaaggcctttcctggctgcccatcttacggaactggaggtcattattctaagtgaaataagtctggcacagaaagacaaatatcccatggtctcactcatgtgggagcttaaaaagttgatctcatggagtagagataagtaccagaggctgggaaggtggagttgggggagggagggaagagattggttaatgggtacaaacgtagatagaaggaataagttcaagtgtttgatagcacagtagggtgactatagttaacaatatgttatatatttcaaaataactaggagattagaaatgttccaaacacaaaaatgataaatgtttgaggtgatagatatcctaaacaccctgatttgatcattacacattgtatgcatatatcaaactaccacaccccataaatatgtacaaatatgtatcaatacaaacataaataaaattgcaatttcctgcatgcactataaaaaa

SEQ ID NO: 100757 - DNA, 543 bp, Homo Sapiens
  misc_feature (508)..(508): n is a, c, g, or t
  misc_feature (516)..(516): n is a, c, g, or t
aatgtacttccaagtcccagaccagcccgttctagtaaaattcaaaaatgtaggtatttccgaagagcatcttgtaaaaggtcatgacctaggaaagttaaccactgcacatccttcctaagagacaagacataattttaggataactttacagatggagactttatagattagccccaagcaacccacttctcagacaatccgcttctcaagcaacccacttctcaaacagcccacttctcaacttttaaggctgtgtgtctttcccaccctgacctacctcaattccctcctaagtcagagaatccctgggctttgtatctggaaggaaccttaaagaaccttaaaggattcttaaactgggctcttccatgccccaagctgctcgggagccactgcaggggtaagaggaaggggtcagaaggacagtgttctgggtcctcaccccagctcccacttagagcagtctgttttcatctaacttttatagtagatattggcataagantttcattnttttaaaattcccaccaggaaaaataa

SEQ ID NO: 100758 - DNA, 411 bp, Homo Sapiens
  misc_feature (127)..(135): n is a, c, g, or t
cgggcactccactaccaacccagctccacccagcagtgtcatggggagaaggaaggatgagcctctccccagccttcatgccttccccaccctccagctcctcttggagaagctgttgctgagacannnnnnnnnaagtcaatcagaaccacaacaggttggtcatcaggatggccaccctcccaggatcatccttcctctgttcctctttccctgccacgtggaaacaatcatcagatccttgccccaccccttgcttccagaaagggttttaaagcccatgccccaactctgccagcccccacctgccaggacgttctagcaggacatcggtgctttgctgtccatcttcccatgctgcaatttcttcctgagatttctataaatataaatgtatgtatgtgttatccc

SEQ ID NO: 100759 - DNA, 438 bp, Homo Sapiens
tttgaacagtgcaaatgtcaccttctctataaagccttcccttacatctcctcccaggtttgtttatagcatatctcactgtagtgttattttacttcttatgtgtctgtctcccttgctaatttcaaactcctcagaggaagactgtaatttattcatctctgtttcctcaggacctagcagtgtttttgtatatgttaggcagcttaatacatgatcttcgcatgaactggtttaccccctgtacatgatgagagactagagttgccaccaagttacctatccgggggccagcctgtgggatcagatgggcaggattgggtgggcccccttaccatggtgtgccctggaaaactgctcatcttgctagattgaggatatagagctggcttccaacagaactttggaaccatcctgccagcaaggtcagactgtcaa

SEQ ID NO: 100760 - DNA, 491 bp, Homo Sapiens
gaattcactactgatcccatcgcctggccagtagaacagtcattactccattaacatcctcactgtttagacacataactgtggtacagtgtattggaaattttataaacaaaagtgaaagtgccaacaaattattgatagctgataatgtttcattatctgcaactgcttgataagtatgttgcattttaagagcttataattgtgtataatttgttaacactagaaacctattagtattgtgaatgtagattttactgtgaagctatctgtgatttagctgtttgctcccatgatggagtctttgcagcatggcgctagcaaccaatgcagtttctaatactcggtaatttgcatgttttgtggagcatttatatgtcaccaaccagacagtatttcctgcatgcttatttagaagaggcagcttatcttgagaggtagtgttatctacctttgtcaggctttttgacaggtcatttcagagtaagcct

SEQ ID NO: 100761 - DNA, 513 bp, Homo Sapiens
tctctactaagttaatgaatggtggcctggacttcagatggctagacagttatgtgcagtatctggagggtgtgatgaagcccagaaatattcccagtccttgaatttcgctagttggtaaaatgcgagctccgtttacccttgctaaggctgcctctgcagggtctctccctttataccttcatacccagtcccccaccaagatgaatgctggctggggagcagggctgcctccaggtgaaagtgtcaccagctctggtggctttggactccaggagccacaattgtgtgtaggcactaggcttctgttgggtgtttggatggtgcatttatatttacccacggtaaatataaatttacctttataaatttggtcaagcttcatgccttgcaaaataattggggtgactatatgaggacagaatactatatagtgagccattcaagtgccacttaagtgcagatgtttaagaagatacataaagtgatgaaaatgaatttaacttgaagaaa

SEQ ID NO: 100762 - DNA, 656 bp, Homo Sapiens
cgtgtgtgcatagcataggaatcagtagacaacaccactgaggtcgttgcgatcaacgatatccacagtctctttttagtctctgtgacatgaagtgttattccagttacttttcatggaatgacctattttgaacaagtaattttcttgacaagaaagaatgtatagaagtctccctgcaattaatgtccaatgtttacattttttaactagactgtggaatttctacagattaatatgaaatggagctcatggtccgtttgtgtgttagatatgctgtagctgaagccctgtttgtcttttaaacactagttggaagctctcaataaaaatgcctgctgctcacagcacagaaaatggggcagggggagcctcaagcacaatctagctgtcctcctaaaaactctggtaatgctcactcccctcgcgttctcccggcgctgtcgggaggctgtgctggtggtcgtgtaaaggtccttctcctttcacatggtgcagagagcgaggacctctcctcctcgttcagttgcacttcagtattttcacggatatgaatgtaaaatatataaatatataaacctgcggctttaacaactgtaatacaaccttttgaattagttccgtgtatagataattaaattcttcatacaaaagtt

SEQ ID NO: 100763 - DNA, 446 bp, Homo Sapiens
taatctttgtagctatcttattcaagaataaaatgagaggcaggtttgctcgatgcaattcccaacttgacttttctttttggcttagtgattttggggtcctgagatttatttttcctttcacaaactcatgggtagtgcagtcctgtaatttgcttaaattcctgtaaaccaagaaagtacctgagacaggtctcaatcagtttagaagtttattttgccaaggttaaggatatgcctgtgacagcctcaggaagtcctgatgacatgtgcccgaggtggtcaggctacagcttggttttatacattttagggagacagaggatatcaatcaatacatgtacgatgtacattggtttgatctggaaaggcaggacaacccaaagcgggctggggacagttccaagttataggaggttttccaattggcagttcgttgaaagagt

SEQ ID NO: 100764 - DNA, 352 bp, Homo Sapiens
tctcttacgaacacacccacaccagagaaactccaacaagaggctctagagaagaaatgaattttaatagacgatgctttttaaatagccctgctaacgttgattaagtcctctttattacaggctctttgtagagagatccacggagagggcctccaactttcaatcgaatcttccacaacttgtatttatcgtgctattaattatgtttcaccgcagttgactactgagaacttgagagctaagctcaacagaaaggatccttgaccttaaagtttacaaccaaagccacttgtcctgatttgcctctttggacttaagaggcagaaagaaaaacatgtataaaagaaaa

SEQ ID NO: 100765 - DNA, 415 bp, Homo Sapiens
ttatcaatttaatcatcaccaccggtgtttccatattttttcccaagtatttaatatagctctcttatggtggtggcctggtgatggggaccgtctttcttttactaacacatgaccaatcatatggtattttcaagggaattttaagattcatcttttcagtttgatagtagactagttaaggaagaactctttcattacttgcatcgtgtaaatcatctctgtagacatgtgttcatattaatgaacacattttttctcaacattgtagcagaaatcattttattcgtcatgatcaatgaatatgtgatttgctccagatcgttagaaggaaaagtaagatttcagtcatcaaaaatgtttttaccgtagccctcatctaacttacacgtggtgcatattaaaataagcagag

SEQ ID NO: 100766 - DNA, 318 bp, Homo Sapiens
ttgtaaacatcacttatattactttattgcagcttcatcaccagtacattatatgttgtaatatttatttacctgatcattttgatcattttctgctttattttgctaataaactgtgatgttacttctagtgctaaacatggcatatttccacctatgattcgtgtttacctggtattaggagctcagaatggaatgcataaagcttcactggaagtgtatacaactgtggtgtagaatctgttattattatcattattattttatttagacttgactatctcttatgtttattaaagaacatgttttcctaaaaaa

SEQ ID NO: 100767 - DNA, 242 bp, Homo Sapiens
ccatttgataaggctttcagggtaggcagaaattcttttgtcaccaggcatcataagggtcatcagctcctgctgtagccttttggctacagggccccaggcagtgcccctgctgggctcagctcctttatgggcggtggcgacactaacagtggctgggtcaaagttttgtgaggctatctgggtggcactggcagagagacaagaactcagaaaatgtgactgcatctgtgatcatcatg

SEQ ID NO: 100768 - DNA, 344 bp, Homo Sapiens
tttgcctagtcttcattttcaaaatataatttagtgcggttgtattacttttatattgagaaaatcttaccaatgaaaaactattatcactttaacaatcttgctatgaaaagggcaaattttaattcacatgttttcagttcaggatcctcattttacaagcgagaggtctctaacagctgatcaattaaaagaatagcccaagaccttgcgttttataaagggaatattctaaggttcttaaccaccagacaagggctctttcttcctaacagtggtctccaaactcttttgatcatgttcccctaaccgtaaaaaattacgtgagatcacactgctaacag

SEQ ID NO: 100769 - DNA, 588 bp, Homo Sapiens
acaaatgtgatgctaaccactcagagttagcatcaaattgcacaaattaagggctcagtcttccacaagattggctctacttcagatgccagctgcaaatggggctgtgggacaccagcacttctgaccagccagttacaagttcagtggttcccacaaccctctctaggtttgataacttgctagaatgactcacaaaacttcaaaagtgctatccttacaattacaattttattataaagaatacaatccagcagagccaaatgaaaaggcccataaggaaaggtctgggagggtcttggatgcagagcttccttgctatttccagtggagttagcgagtaccaccatcctgccttgtcaatgttttcaccatccaggaagctctactgagctttcctgtccagagtatttatcaaggtttcattacataggcatggttgattaaaccattggacacgcgattgaactcagtctccagcctcacttccttcccagatatcccctggctggcttaaagttccaactttctaatcatgtggttggtttctggtgaccaggccctatgattaaaaagttggcggccgca

SEQ ID NO: 100770 - DNA, 531 bp, Homo Sapiens
cgccatgcccgaccagtttctgcttttattaaaattgttcacagttttatacattcatgttcattaaaaatgctatttagaaaagagtttgataaaataaatattatacaaaattcgaagaaaaaagaaaagagtttctgtttcagtcacaaattagggttattgtgatgtgtatttatgatgaccattgaacaaatgtgaagaatactgtgaattctatgactttatcaaaatcagccacatccaggagcttgcagttgttgaccaaatgaatgatgacatagagtagttcagatctatcatgtgctcttctatctaatcagtcaatatttccttggccctcaagccaacattcattttttatgtataaccttcttcatgattttgaaattttgatagggtaactgctaatgagttcacaaatgtagcactttaaaaggaaaataaatggagagtgaaaacaacttggctacgtataattgtgggttttaatttttctgtttttaaaataaaaaatggcattgatagttt

SEQ ID NO: 100771 - DNA, 768 bp, Homo Sapiens
gcacgagggaaattattttcaacttgtctttcaggtagatgtctcatacttgaatgtaaacaggtcatactaattttaaagttgcccaatagaagaatgggcaaaggaaacaataagaagtttaccaaaatagatatatatggttcttaaacaattaaaacgataaaacatctgaattaaaagtacactgagatgcgttttttcacttatcagattgacagagaccaaaaaacttgataaagcacttgatcaggctgtgggggaaaggtctccacatacattacagataggagggtgcattggattgtaggtatcaaatgtacacccacaaaatggaatagtatgtatctacgtaaaagcataaggaagctcctttttgatttagaaatatatgaatttattacctatttgaataaataaattagtttttaaaatagttgaatggctttgctgatgtactattgaagttgactaaatttaagtagtacagcatagagaaaagacaaaaattcttaagtgtcaatcatttggttttaagagactttagagacagacacctggattcatttgctagatctggctatttatggtttgattttaaggcaagttatttaagcttttcttgcctcagttttctcttctggcagtggagtaatagtacatagttcatagtattgctgggaagattaaatgaaccatgtaaaatgtttataatagtgcctggcacatagtgaacactcaataaatggcctcttgtttttttcttaa

SEQ ID NO: 100772 - DNA, 439 bp, Homo Sapiens
gcgtgagctactgcacccagccagtcacttacaagtgtgtctgatttccacatatttgtgagtttcccaacttttcattgttttctaacttcatcccatgtggtcagagggcatgctttgcatgatttcagtctacttatatttattaaggcttgttttatgctttaacttatgacctattttggagatgtttcatatgcactcgagaagaatatgtattctgatgttgggtggaaagttctatagatgtcttttaggtcaatttgccttataatgttgttcaagtcttctatttcctggtttatcttctgtctaggtgctctattattgaaaaaggggtattgaatattccaactctttttatggacttatctgtttctcctttcctttcagtttttgcttcatgtatttagggctctactgttagatgcatatatat

SEQ ID NO: 100773 - DNA, 478 bp, Homo Sapiens
tggggttatttagagtttatttaaacaactatcttaaacatataattataacacatttatttgacatttatagagctctaattgtgtgcaaggaactgtgcaagatgctagggcaacagcagtcaacaaaggagacacatagtcctagcctcatggaaggtacagccaagcaggggtgacacatggtaagtcagtgctgggaaagacaaacatgatatgctgaggacatggaaaaatcaagggcatccaggcagaggctgagtggaggaggagtttgcaaggctgtgccaagaacatttttcagggtagaatctaccccccaggcagagatgtggggaataaagaccaaaatggaaacagcactggccaagtctgagagccatgtgaaatagcacagcacacttagggatctggggatttgggattgctggagtcaaagtgttgagtgtgagggggtagaaaagcataattatatgta

SEQ ID NO: 100774 - DNA, 170 bp, Homo Sapiens
tttttttaacaaataatacttataagcaatatatctttaaggaaataaaagcatcttcaatgatgtttaaacaaaattggcttttgttttataaggacttattatttaagctcgtgtttttcacctgttatactaaaacaacgtaacatcctttttagaaaacgttaagt

SEQ ID NO: 100775 - DNA, 491 bp, Homo Sapiens
caggagcatcctaaacatttctcagcattcatctcatcacactttcgttcattctatgtaactgcagccaatcttatattccacagtcctttacaacaactctttgttttgagctttattatagtggaggtagacttttatgagtattttgtcaagagcgagccagggaacttccatattatcctttcaagagaattggcttccaaagtgacttttcaagagaaccagaagggtcatcccatgccttagtagtagagctaaactatcccagaatagaggctacttcaaacctaccctaaacacgtttaaaaagaagccatgaaaggatcaaacaaatctgattttccagtaacttaactgtcttctaacgaagccattctttaagggaacatggcaaagttcagatacttaactcaatgtccaccagccaataaaaaattactagacatgccaagaagcaggaaaatgtgacccataacctagagtaaaaa

SEQ ID NO: 100776 - DNA, 427 bp, Homo Sapiens
tttgcttaagtaaatccttcattgcaccacagccagttaccatcttaccatttttcattcccttacttcttcaaatcagaagaattaagaattcttaataattatcccaggagaactaacaattctcattaatatttcattttttgcttttgaattatttgtgtaccaaaattccaaataatagttaaaaataacctcaacaagtaaaatttgtatactgaataaataccataaacattggcaacacaatgccttttgtattcaattatagacatgacttttttcccccctcaatacctgaaatttatgcacaggaagaacatcaaaaaattcatgtgcaagataaaagctgtaccctatttaaaaagaggaaaacaattaatgtttccacatttcacaggaattaattcttttgaatattaactgt

SEQ ID NO: 100777 - DNA, 772 bp, Homo Sapiens
tttaaagacctcattagtcttaggagtaatacgctttctctgttcttctacattcatttcactagtcttactttagaatgtctcaattcttgtttataatatttctgattttcactgtgcactgaaactgttgaggcagtgtgctccaaacttgttgctttctgcaaagttagccgactttaagatgttctcctcttttgtagactctttaaaggtgggtgcagaatctgtatgggagttccaaatctcttttgtgcttcatgccaattagctgcagttttactacctttgtctttagttggatttgttacttcactgacagcagagttggctcctgcgtggtggaggtgccgtcggtgcccgagactgtgttgtgatgtggctgcctgaatgttccttggagaataggtttgagattttcaccctgagacacccctagctctagtattgaaagatttcaaatgagagatgattgtcagtttgctttgctgcccttgtaacattttgtctaatcactgttggtccgttgttttggcagtatcctgaatgatttttctgaacaagtccaagactgaatatggggatagtgtaaaacaaagatcaggaagaagaaatatggatgcagaattatgacaaatgaagaagtcctaagcagcattgctcattgccatttctagtgttttggtatacagagtcagagagttttcaaaaagtggagtatggcggttttttctacggctaaatttagccattgctttggaacatcagaatg

SEQ ID NO: 100778 - DNA, 328 bp, Homo Sapiens
ttgacactggaatgagttgaaaaaatgtgccattttgcattttcatctactcatttaaagtattttattcttattcaaagaaatatctgagctctttgcactacctgttatcagtagtgcctttacttcaggcttgataatacttaggtgtgattataaaatcatgaagcaggtaaagggaggggcaagcccccaaactgctgtggggacattttataatctatatgctgcacccacttaatctactgtggtgttttgtttattagttttgcataatttcagcttctatatattgtatgtatatattttttaaaaatctatattttgg

SEQ ID NO: 100779 - DNA, 578 bp, Homo Sapiens
ttctcattttaaaatagaagtaatccatgtaccttatttagaaaactcaaatcagtaaagtcaaatcactacagacggactcgtgaaaagcaaaagtctactgccccacacatcccaacccccactctcactttttgccaccacttttagttatttattctgatttttatctccatacctacataatatgtgggcatttaaaaaatcattactttcagacattacccattgatgtcctgctatgagaaatgaggatttagatcatttacagcaagttcaactccgtcctgcttctagtatagtttagtttttctgtgggttattgagtaatgcctttatttcctgttccatgaactacagacaatatttctaaactagaactttgttagatgagagaataccctttcctatagcccccttccgcaccattaacctcccaacttctgtcatctggtcttttatattgtcaaaacataatgttaaattctgttctgtaatcataattgagtttttttatgtttgtctatagttgggttctaaaagttgaaaagcaataaactgctgttaatatgaaaaaa

SEQ ID NO: 100780 - DNA, 506 bp, Homo Sapiens
ctgcctctacaaactggaaaatggaagaaaacagattctctcctagagattccagaaggatcacatccctattgacccatttttggacttctgacctccagaactataagataataaatttttgtcatttaagccactaaatctgtgctaatttgttatagcagcaatgggagattaatgcacttgctttatgtttttcttagcacttattcccgtctaactcaccatatactttagttatttatcttgtgtatggtttgtgtcccccattaaaacataagctccacaagggccaggattaatttttgtctgttttgctccccattctattccagtgtctataacagtagctgacacatagtagctacccaataaatgtttggcaaacaaacagcttccccattaaattataattgtcatgaagacaaggaccatatttctcttgcacagggcttggagcattataatgcaacaaacgttcaataaattaattaatcaacaataaa

SEQ ID NO: 100781 - DNA, 627 bp, Homo Sapiens
gaattatgtttcatcaatgtgcagaataatcccaatgtgaattatcaaattctcctcaatgccccccccgcccagtcctttggtgctatcccctgtgatttttatgcattaaaagcacatttcatgtgtattcaaccctaagtaaagttgaatgaaacttaacagaatggaaattgctatgtctttttaaatggtccattttcaaaagacagtgttgaataaacatacctgtgtgataaaacacagaatttacatatacactgaagatgagtttttaatctcttactttaaaaagatttatttagaatcgtgaattgacataatcttgggtaatggaacggagatctgcaacatatcttttaacaacacttttttctaaattatttctaaggttgtgctaattcttttggttgtgaaaagttgaatttttctgttgccttcgttttcatcttctagtttgtctattttaataaatggccttacattaaaaaattgtaaagaaatgtataccaccaatttagaaattgttgccttttctgtaattaaactcgggtacaaattggcataacatgaaaacctatggaactagaattattattaaagaaatattagatgatcatagcaaaa

SEQ ID NO: 100782 - DNA, 554 bp, Homo Sapiens
aagtaagcgtatatacttagaagaaaacaaaaatattataaaccaatggagcccttcttggaagctaatacaggaggtaaagaatgaaagtaattttatgtgctagtaataagcccatctgtattgctggcaagcacttctaggggccaaattggacgtgactcatttctatgaagttaacttgtggcattgggcctcaaacagtagagtcacttcatcattgaatgggagtgaataaagacactctcaacaatgagacacatttacaaaatgaaaatcaggctattgtgaaatctataaaagattttctttcataaatggagtctagatagtgatcccagattatcatgacaatttggttacttgttagatatggaacatcagcgtctatttgggggggatatttatttacctcagtttgtattgaaataaaagttcaaatattctgaaaatgatgcaatgtgatggaactttgatccaaatataaaatctaaggctgcaatctaagtgtacagcaagtggaaacttctcaataaatggatgttagatcaaaa

SEQ ID NO: 100783 - DNA, 870 bp, Homo Sapiens
  misc_feature (27)..(27): n is a, c, g, or t
  misc_feature (40)..(40): n is a, c, g, or t
  misc_feature (74)..(74): n is a, c, g, or t
  misc_feature (102)..(102): n is a, c, g, or t
  misc_feature (231)..(231): n is a, c, g, or t
  misc_feature (730)..(747): n is a, c, g, or t
cacagctccatgaacgtgatctgcacntggttgacggacnggatggacttacagcttcatatttatcagttganacactaatttaggatggtaaagaaaacntacagagatttccgattgcaaggggtcctggactccaccttaaacagcaagacctatgaaacgatccggaaccgtctcactgtggtaggaagccacagcatcagtgagtgaaggtggaggactgcaagngcatcagcatgaaggacagcgatgaggaagacgaagaagacgattagaccatttggtcctagagtctgctgggacagagtcctgtaatcagtgcatgtccttagtctgttagttaaacccattaggaattttctgtcaactaccatgcccatgagatgtttatcaatacaactgccattttagctatgtggtaccaagattagcaaatgaccttcatatccactgatttcctgatgtccatgtctatatgtttacaagcaatatggagcaccattctttaaatactgttcatggagaatacatagtctaaccactaggcgtgtccctgttatcagcaaagatcaatgatgcttcattcatgtactatgtatgcattggtggtaaatggatgtgagggcaagtacatcaagtacattcactctgtttcacgtatgtggatgccagttaattaaatgagtacgtaaataaattaattaaaacacatagatctgctttgtgnnnnnnnnnnnnnnnnnngaaaaacaaaaggcaagtctccaacaattaacttttgatgctttctgttcccctaaaaccaaaaaatgaaccccttgtgtcgttgttaacccatcctttcatttactcatataattagccaaa

SEQ ID NO: 100784 - DNA, 543 bp, Homo Sapiens
taaacctgatccagtgtcttcaatcaatttacctctgcccccacttatagctgaccagaggctaaatagattatggaatacaaaaagtgatcttcatcaaaacacagtgtccattgatccaaaattagcagccaaagccaaaattaacacaacaaacagagaaggctacctagaacaatttggagactcacacggttcaggagctaaattaggagatcctagactacaaaaaaattttgatcctaggcttcacagactgcccaatacagagtctcatcaagtggttatgaaggattcacatgcatcaaagggtgcccctcacttacccagatcaaaccctggttcatcacagccctcaggggcaggaactagcaattctggttccggggctctgcctccatatgcccctaaactctcttcctcagctggccttccactgggaacttccacttcagttcttagtggtattagtttgtatgaccctagggatcacggttcatcatccacatcagagctagcaacagcttcttcaggagaaaactc

SEQ ID NO: 100785 - DNA, 462 bp, Homo Sapiens
gttgaggagtggggaggaaaacaatctttattttaccccatctattgaagagtattattacatttgaaataaaactcccatcagtacagataaccacatgtgcaatgttgggatgttattttgggcttggcttatcgagtagtcaatggaaggattcccgtcccctctctcggcagcttagtaactgctgtagccagctcggctcccttccctgtgtatctgtgtcctgctaacagccaagagatgttgcaagggaggaaatgtgagagaccttgaacctgtcaggtttatttgttttgtttttaaaggcatgttgaagtttagttctttacccttctcctaaaatctttttttaatcagcctcaaggttaaaataaggagtgactacagtatgtaaaataaggaaaggaagcattaatggtgtgatgtgacctgcctgtttttttgtaaacaagagaatag

SEQ ID NO: 100786 - DNA, 514 bp, Homo Sapiens
  misc_feature (28)..(28): n is a, c, g, or t
tcttcctcctcctttaaccatttttctntgttgcattttcacttgaacatctccggggggaccaggagggcttccagttagtccatcctgtctttccagacactcttggtgaaaggctttggataagagagaggatggaactacctgatttataaaagactggagggtacctatgggtgtgttaccttgtttcccatgagcagagatgattgagacctgggtccatctgattacatattgctgttgattttgtgagcataatcgttggctggtttatgcactgaacctccttgctctgggatcataatcatatttgagtataagttatggtattcacatttgtatttgctacccaatacatttatttgttatatctgacaagcactgggaaatgaaaataattatttgcattacaaactcattattcatgtactttgaaagctttatctaacagcagtttttatatgggctatctgaatcttatcttctaaataaaaactagatttgtgaaaaa

SEQ ID NO: 100787 - DNA, 472 bp, Homo Sapiens
tttgctaggtagggtgttaaatgtaactgcctccctgtggagatccttggaggtcctccagcctgctccaggccagccaccttgtctctgcttccacaacatccttgaggaaatacgcatttaaaacccgacctctacattccctgtagtttctcttcacatcgcctactccatattttccagcttttcaatttctctcagaacaaaggttttatttctgggcagggcactgacggcggtgacactaatatcggtacctccgggccacttgagggacgtccagacctgagtctggtctgatgctttctttaggatcccaaacatcgctgccgcctccgcagcgccgtcggatccctggggagagcatccaaaatgtgaaccaagtattaaaaacattggaatataactgtttttaattcttatgctgttttttggttatttgtaatttttgttgttgttgctattttaaacc

SEQ ID NO: 100788 - DNA, 758 bp, Homo Sapiens
  misc_feature (662)..(696): n is a, c, g, or t
gagaacggtggaggagtgggggactgcattatctttttaagaagctgatcttaaaatgataccacctcatagttaataccagcaaactgcgtagtcaaaccatactatgcggccctccacccaagagcattgtttgtgcaggtaggatctgcagtgtggatggagggtaatggaaaattgtggccactgttagctggtcagactgatatttactgtatgtcaggtactgtgctgagtccttcatgggtatcatttcgtttggtccttgcaataaccctatagggcaggtcctattattagatgcattttttagctggaggtgatcacactgctgaaaagtgacaaccagattcaaatgcagagtttctgactactgtgatatagggtcccggatggcacgtgcttaccagcagccaaagagagtccatttggccttggaatttctaactcagagactgaaacacagagggacttgtaggtggaaccaaggtttaaatgacttaattggatgggcttacctttggaggaacaccatagaagcaaatgtgtttttcaaagatcttccactagatgtcaccaaaaggactgagaactagagaaaagggctgcgatttctgctctccttgtaagattgcacaaaagaataaattgcatttatcgcnnnnnnnnnnnnnnnnnnnnnnnnnnnnnnnnnnnggcccgcgtatgcggccgcaagcttattccctttcagtgagggttaattttagctctggcac

SEQ ID NO: 100789 - DNA, 536 bp, Homo Sapiens
cagggcacctggctgtgctgcttggggtttagtctttcctaaactcttctcccatcttcctttcccttagttcctccaccagcatttgcttcttaatttcttctattgggcagtccatgcctccctgattggttctttcccagcaaggaaaattcccaagtactcgcttgtgcctgtctctcacagtggacgggagtagctggggttcagggtgagtgagagattcgaagggaggtgaactgtagggcacagtgagatagagccagatcccccagggagggcaaatacctggctgaggaatttggactttaatcctaaagtatctgggagccataaaatgtttctgggaggggagaaactcaaggtacttttgataaatgacatggacttggtccataggatctctagggagaggctttgcctaagaatcttggaaagataagtctttaagtctcttgaagataaaaggatctggtcaaatacaaacaacagttaatggctgttgatgtttactgagtatgcatcacagctggcac

SEQ ID NO: 100790 - DNA, 250 bp, Homo Sapiens
tgcggccgcccaccaagccagacacgttgtaaatgctgcttcctattggagcccagaaaaaaggaaaaggaaagattaggctttctttgtcctttgtgtggaagcagggaattggattgaagactttcatagttgtaacataaaggcaaatcctgaggaactcactgatggagatgtgaaatggcagtaaggaagaaaacagaataactgaacaaatatattagtctagggccacttaatttagaggaag

SEQ ID NO: 100791 - DNA, 626 bp, Homo Sapiens
  misc_feature (64)..(106): n is a, c, g, or t
caacttagactggcagtgccaggctggcagggacagcctgtctggtcaccactgtattctcagnnnnnnnnnnnnnnnnnnnnnnnnnnnnnnnnnnnnnnnnnnncaagatgagtgactgaggtagcctgttcccagtatgatcctgagctcctgactctcatgtccttgtagcgcctactctctttgagtacgggctaaacttattgtttgcctctaatttagcaataggatgccacttctgagattaggttataaaaaagactatggcttctgtcttgtccctctcttactctctctctaacatccacagctgtgatgccacgagaatactcagatagcacacggacaggcccacatggcaatgaattgcaacttgccagcaaccatgtgggttagcttgaagtgaattctctagtcctgtgtcttcaggtgactgtagccctggctgaccatgtgactgaacctgaggagaagctgagccaaaggcacacagataagctgcacctggattcctgactacagaaactgtgaagtaataaatgtttgctgttcaaagccaagggttggcaaaatatattccacttgtttctgtaaataaagttttactggaacacgaaaaaaaa

SEQ ID NO: 100792 - DNA, 306 bp, Homo Sapiens
tatttaatgtctagaatcttcacaaaatcaaatcacagtcatcactctagtggcatgtacattaaactatgtgcatcaaattccggcccttgaagaacaaggaagcctacggatctggacagagaaaaaggaaaaggaattgcaatggaaattcatgtaagaaaacaattgcagaaacagctcaatacctttgaaaaagatccctatagtaagtaagaaggtaagatccaagccatgtagttatgcatgcctcagagcacacctgactttggtcaaagtcactaagaaatttccaaggtaacaatg

SEQ ID NO: 100793 - DNA, 510 bp, Homo Sapiens
  misc_feature (109)..(129): n is a, c, g, or t
agttttctgtttttactttgtacattgagcattgcttatttccttttaagaaatgtacagaacgctgaaatgtagaaatgaagtgatgttgacataccacttttaaagnnnnnnnnnnnnnnnnnnnnngattatctgaatcaatccaaagtatagtttattttaagatcctcactggatctccaatcttaattaagcagacatattattcctgggttttaaatacactgcagttcttttctcaaaattttgatatcattctttaaacatttatttaatgggagagatcaatcattcccagcctttgcattcaactgcacaactgatgatgatactttctgaatttactgccgcactctgaaggatgtggcaaagggaagggaggaaagtcaactttgcatggaacatagtgcaatccatttgtagattcagtaccataacaattccatttccaactagttcatctggaggtagggaggctccactggaaaaataaatatttttgtcaaa

SEQ ID NO: 100794 - DNA, 317 bp, Homo Sapiens
accaccctatcttaattactgtagctttatagtgagtcttaaagttgggtaatatcagtcttctgacctttttctctttcaatattgtgccagctattctgggtcttttgcctttccatgtaaactttagaaccagtttgtcaggatccacaaaatactttgctgggttttgattgggattgcattgaatccacaggtcaagttggcaaaaactgacatacagcaatgccagtttattgttttgtgatagccttaatccagctagtttcttcacaggatgatgttgaaaatatgggatgctcataatccctgaatat

SEQ ID NO: 100795 - DNA, 1007 bp, Homo Sapiens
  misc_feature (94)..(445): n is a, c, g, or t
tttcatgaccaactggaatttatctgaacgcaggggataagtgtcttttcaatatctgaaagtcaattaatgtaacacaccacattactagaannnnnnnnnnnnnnnnnnnnnnnnnnnnnnnnnnnnnnnnnnnnnnnnnnnnnnnnnnnnnnnnnnnnnnnnnnnnnnnnnnnnnnnnnnnnnnnnnnnnnnnnnnnnnnnnnnnnnnnnnnnnnnnnnnnnnnnnnnnnnnnnnnnnnnnnnnnnnnnnnnnnnnnnnnnnnnnnnnnnnnnnnnnnnnnnnnnnnnnnnnnnnnnnnnnnnnnnnnnnnnnnnnnnnnnnnnnnnnnnnnnnnnnnnnnnnnnnnnnnnnnnnnnnnnnnnnnnnnnnnnnnnnnnnnnnnnnnnnnnnnnnnnnnnnnnnnnnnnnnnnnnnnnnnnnnnnnnnnnnnnnnnnnnnnnncacaaatgacacgcttttgtataaaatcccaaggaatccactaaaacactagaacaactaataaatgccactaaaagacaagaagaactaataaatgggtttagcaaggttgcaggataaaagatcagtacacaaaaagcccttagagtcacacttgacctttccgggtcacactccacatcccatataacagtagatggcctcctgcctcctcctcagcccttcctagtctgttcttcacccaggagtcagaatgacccttttaaagggttagtcatatccttccgtgtgctcagtcttccgaaggctgcccatttcctgcagagaaggggccacagttctgactgtgcaggacctgtctgcatccctccatgtccccacctcccatttcctaccagtccttccagctcctgcgttctcgacttagtggcctctactgtgtttcttacactccaggctctcgtgtctcagaggctctgtctgccgtgctccttgctcaagacagtacttctgcagatatccttaccctcgacgcccacgtcccgccggtactttgctcaaa

SEQ ID NO: 100796 - DNA, 468 bp, Homo Sapiens
ttttttccatcatcacttacaccccacctgtcactgagctaaggcagattctacttccactttagaaggtgattttccccctttttcctttgcaactgtccctgccttcattcagaaccatcacttctcacctactaattacaacagtttcatagattgtctagttgtcaacagcactgttcccacatttaatcccttcggaaggttgctgccagattcacctttctaaaaatgcaaatctaatcatataagtttcctactcaaaatctttccttgttccctgatagctttcaggataatatgaagctccttatcctagcacaaaaggccattcctattctagccccttcctatccctctgggctcacttcctgtcactcctccccttcctccactatacagagggtgtagtcttcctacttccaagatctaccctcagcctgggcaacatgataaaaccaaaaaaaa

SEQ ID NO: 100797 - DNA, 508 bp, Homo Sapiens
agctgggcggggaggagggggcctcagggggctgttatgataagcaagagctcagtctaaagacatgttcccaagctgaaggtttcatttcctgccaggcaactcacccgtttgaatcaaacacagaatttagtattcaccatagaacaatcatatgacaaaaactttgcagagtttacccagatgtaggttttccttaaggtaaaagaggagtcatattaccgaagcctcatcttctcacgagttcaaaacctctccaacctctcaggagaaaccaagggccggaaaggttaaaggcctcaccctcaaggtcccaccaaagaatcgaagctggtgccagctctccgactcctacccagcaacccgccccaggtggccagcagctgcctctgagaatgcagaaggccgaggggggctgagagtgtttctaaatcacagcacacttgctccatcccgatggccttgtgatgcctgaggcatgagggcaggccaggacaggagccaaaaa

SEQ ID NO: 100798 - DNA, 507 bp, Homo Sapiens
  misc_feature (20)..(20): n is a, c, g, or t
gcaacacaaaccacaggcanaatgaaaaacagatgccccagacagcacccaaccacatggcacacacttaataaggaacaaaatcctacagggtgctgacataactcgctttaagcatgcaatgattcctgcagtgctccctggcaatcaacctctctgcaccctggggctggatacttcaaagtctttgttctcttaacaggtttgaagtcaacatggcaagttaaggacaagttagatgagatccccctagttcataacgtgagttcctcttgctctccaatgttcatccacaagtacagggtccaatcccctataagagatggcttaagcatcccaatggggaaacagcctgccagccacatgggcagattctatatatttccaagtcccgcagccacaagactgaaagccatagagaattgacagctcaagcctcacctgaacaatgtgttgaaaggggatctctcaggacagacactttgatttcaaaagttggcggccgca

SEQ ID NO: 100799 - DNA, 559 bp, Homo Sapiens
cccagcatccatttatttagcactctctatactctgcaaagtgctctacatacataattttaattaatccccacagccttatgaggtaagtatcatactaattttccagatgggggactgaggttcagagagattatttttcctaaatcacacagaaactatgtatcttagaactggagtttgaacctaggtttctgacttctacattcctgtactccacctatcaagaagtacaaagaagggccttttcagcctagaaacacatgtgataaaactcctatgagaatggtgctccttgttcatctgtcatctgctgtgctggtaaggtggctagtaatagtgggtacccaattaacatgctgaataatgtgaaaacgtgagtggaaaacaaaactttatttaaatggttgattcagaatgatgttttagaaataaatattaaatgctgttatgttttgattttccttcatttaaacttaaaacagttagtggtactgtcagcctttttgaggggcccatagtaggtgggctcaattaaaaattaatttgaattcaaaaa

SEQ ID NO: 100800 - DNA, 181 bp, Homo Sapiens
ttttatgtgaaaaagatatttaattgcaaaatagaaaagtaggccagagtacagttttaagggtaattgcttttttatacagtatagataacctagagggatttcagggttaaacagttcataaagcaataaaacactgaaaaataaagcaagaaaaaggggtttgaagtaatattttacc

SEQ ID NO: 100801 - DNA, 568 bp, Homo Sapiens
  misc_feature (37)..(37): n is a, c, g, or t
aaagaaccatatgaatgaacaagattattcaaaatanatttaagcctgagttacttaaataatcctgagattgagttactgtaatttaaatagctgatatgactcctagaatctatattacttaagaaaaagtagattatgggtaggaagagtggaagaaactgttgacattcattgtaccattcgaggtatagaaatttccaaagcaaagaaacatttcaaaatgtatgcatgtcaactaatctatagaccaattcaaaaaggtaaagaatgaaatcggtatatttttaaatattacattaataaattggtaaggccataaactaatgttttcctccatccccacatattctgttttccccacttaatcttagaaaccatctaagaaaaataaaaatgagtctgcacttttcaaatttggatttactctcaaaaatctttgagaagatgattaagcaatattaaataaagcttataaaaataaggatttttaaatcttttagaactacttttataatcttttaaactagggcttttgttactttaaaagaaatatatgcaaatacta

SEQ ID NO: 100802 - DNA, 102 bp, Homo Sapiens
aaggaaacttcctgtttaatggaatctgaatccaagatttgctttaatttcactctattcttcccattttcccttattcttcttgttgtctctctaattaaa

SEQ ID NO: 100803 - DNA, 767 bp, Homo Sapiens
cttttttaatacattaaaatgaatattcatattaagaaaggaaaaactaaagtgaaaagagaaatagcaaactgatagaaagtactgctggtactatgacagtcaatgtgcttattattcaggaaaaatactccaaaacttgtcagatatatgattatatgacctttcctacatcatctgtataatttttaatttttctgatcactcggataatgacagttaagtttgctgattctgtaaagttacagggtaacttacaatggtgttattttggcactatccacatacatcccaccttctcatacctgcactgaaccagctttgtcatcctgccagtaacctcacttatgagttaaataaaatcctaacatatgctcccattacattaaacattcacactttcagaagtcagtggtagacaagaagccttttattttaattcactgacagacaaatcagcaagcaattgatatgggggcgagagaagggagttgataatgggctgaacattagcatcccccccaaattcatatgttgatgccttaacccccaatgtgatggtatttggaggtggagttgtggggagataaacaggtttagttgagatcgtggggtgagcccatgagaggacacagtaaggaggcggcagcctgtgagccaggatgggggaccctcacaatgaagcaaaggtgccagcaccttcatcttggaatttcccagattctagaactgtacgaaataaatgtctgttgtttaagccaaaaaaa

SEQ ID NO: 100804 - DNA, 599 bp, Homo Sapiens
agagttgaatgtggcaggtgctttctgcacttcattgaacacaccaggagaagacatatctggttgggtggtctcatgctcacaaacctgcatcagggcttcggcagctgccctggggctgaggtctggttctgcaggggcacctgaaaagccattggcattcttacacaggagagctggtcgatgccgaggtgaggcagcctgtggctctcctagatcgtcttcttttccggaagctgcaatcagggaagttttagctgatctcagagggtcaggtacagtccccatggaatttctcttcaggagcactccagagctctcttgagtactggtcccactggtgggggaggggagcgcagtcagagctcagagtgatgacacagtcagggatgattcctctgaagaaccagcctgtgaatcaaggaaacagcatcattaatacagtacgtcgcttaaggattgaaaaataaaccaaactgtcgtttttataagagcacattaaaagcttttcttcccatacctgttgatacaaaaatagaccttgtggggagggagaagaaaaataaataaataaaaatagacttgagaaaaagattttg

SEQ ID NO: 100805 - DNA, 702 bp, Homo Sapiens
tgcggccgccatgaggcgcgctgagtttgacacgtctcccggtagtgcgcccgccctttaatccttacggagaagcgggagtttcggctgcaggttttggctctgccggcgcgcacgtaaccaggaaaccgggagccacgcgcagctccccgtcgacgccgccttcagaagccgctgtgcactgcgctgctgccgcctcggcgccggggaacgcaagttcctttacctcgcgcgcagtcgcccgcctcccaacccgggaggtgaaggcggggacggcgagcgcgaactcgaggggatggctgtcccgagtggcaacggccgagcccggcccgcgcagggacccttgtggaggggccctcggggagaggccgcagcacgctggggtcgtcacgctggtccacgccgggctctcctcccgggagagcggacccggccgcgtgcgattcggacccgcggggctggtgaagccgctgtccggccccgcgggtgctgtcgggcgtgcgtcactgctttttgtagaacatgacctgacttccgatggcagctactgacgtcagagctgctccctagactctccctaagcgtctttccagaaggatctgcttggaaaccaaagctccagccgagtgtttcttttcccctacatttttagtgattcccttctgatgatgcctttgaaagctcggagaaataaatacgttt

SEQ ID NO: 100806 - DNA, 510 bp, Homo Sapiens
  misc_feature (460)..(460): n is a, c, g, or t
tttcagtcaaatccctaagatctagggctttgcaataaatatataaagaaatcccaaatatccacactgaaagtataaaagaaatgctaattgataattagagaactacaacttttccttagctttcaagtaatctagaaacaaagaaactttctaatatttagacagacactacaaagtaccttacaaggaaagacgtgtaaggatggcatgactcaccagcagccctgggtttgtccacagtacccccatgatgaaacagcaactccattgtgtaaatgctcatgaacaaactattacaggacttttccagtttagacacactgtattttctttcagacaattcttcaacttgtttacgtagatcagtgatacgactattccatttttctgaaaactggatccttataagagcagagcaggtgatggagagcggtgggaggtgtagtgatgaaagcangaaacgcgagtcattcgagaagggcagcacaagctgaggagtacaggccg

SEQ ID NO: 100807 - DNA, 509 bp, Homo Sapiens
tgtatctagtagagtataaagaaaagcagatgcctatagatgtctggagcatattttcatttgtgatctaatgttttaatttgtaaagtgtacaagtcatttttaatgttaaaaattagtgaatctaacaaaaggaataaattagcaatatttgatgtggttatgaaaagttgtttttgtttctaggttcctagtttcttaaggattcagggcatgggaagtaaaacattgactatgtgccaataatggaggtaagtattttacctgactctctgtctgcttatttagtaagtcaaccccctttcaaatgaagtctggacctcctctgaatgatagtgtgaagtgatagtctaaagactatcgtagtctaaatggtagtctatgttcaatgtttttcataattttaaacgaaaaagtaaagttagtattttctttactttgtagatttagaaaatgagattattctacaatttggataacttatcatgtatttgaaacatatcagttat

SEQ ID NO: 100808 - DNA, 523 bp, Homo Sapiens
tgctggccctttgggacctggtggcagagggaccccgtgtcaacctgtctttggcttcctttgtggccccgtggtcactgaaaagccagaatgaatattcttcctttcggaataaaaattgagctgtggaagttttgtttgctttgatgaattacttccaggctgctgtttatttggagagcaaagctccccagctgcagggtgggtagaggctgcggtcactcccctcgtcaatgctggttcctgttcctgaggccgagagaactcctgacagcagagtgggcatatcttggtagttacagcttttcaagacagtgtggcccagtggggagagagcagaaaacctgggttatgctggctctgccatttatcagctgtgtaaccttgggcaagtgatacaacctctgtgtgcctcagtttcctttcctcacctgtccacaggggatcataatcttggccctgcatgccttacaggagcgttaagagcatcaaatgaaacaataaaaatgaaaacatttataaa

SEQ ID NO: 100809 - DNA, 585 bp, Homo Sapiens
actaggttcattcaaaaacctgtgcatgaatattcatagcagctgtatttgtagtagcacaggttggaagcaacccagtatgtctttaaatggacgaatgtttaacaggctggtgcatccatgccatgaagcacaactcggcaataaagaggaatgagtggctggcgcttggtgagtggctgacgcttggaaccacctgaatggatctcaagggaattatactgagtaaaaaagccaatcccaaaaggtcacatattacatgattctatttatgttacattctgaaaatgacaggataaagagatggataacagattaagttgccagggatttgggacagcacaagggaggtcttatgtggagagacagttttgtttcttgatggtagtggcaggggctacacaaacccaccaggttttgaaattgcctagaacctgaataaggattgtggatggcactgatgccagcttcctggtttggatattgccctgtagtatgtcagatgttacccttggtgaaggatacatggggccctctatcctatctttgtcaattcctgtgaatctatagtcgtttcaaaataaa

SEQ ID NO: 100810 - DNA, 540 bp, Homo Sapiens
ctggtctggaccaatccaagagcgacagctaaccgggaaaatcctagaatggcctgctgaaggctggtcctggccagccacaggcctgcttcctgttcattgcgaggtgtaaactgacgctgggagtggccactagatggcggcaaactcagccaagtttggcatgggcttccgttggcgctaccaactggcaagctgtgcaggttcctggcatccatttcattagcttcaaaataacgcgaccacgaatagttgattgaattttagaccccacgtaaaattcttctggacctcacttattgtgttggggcagggatttactgttctttcaattcacttggtctttaaagcatagagggcaggcagcaaaattaccctccacgtcctgacatctctaagggaataaagcttgggactgctataaataaggaaaacttgttaaagttcatgaaatcagctatggaaattgtggaacataagtcatggttccatttgttttatagaagtgtaaaaaatgaaatctgttcttcaagatagaaa

SEQ ID NO: 100811 - DNA, 902 bp, Homo Sapiens
ttctttttttctgaaatggtggcatttaacatagaagttaggggaaaaaaaactgtgaaaagtatgggaaacagtacagcaaacagagggagcttccagtgcagaaatctattttaatacattaattttatgtatgtctcatttctttctaaaattacactttaaaaatgtatttgcttataaaaatctgagaaataaaagacctgatgattcctgaacttaccagctaaaatatgctcttcttatacatttattattatcttaaagacagaaaactcctaataaatatctagggtcaaatgcatgcatatcaaacatgaaacaattcagtttatttataagtggtgttggtggatgattatttgtaaattattacacccgttgaaagtataaaacccattttttttcttaaagaacttgtttcattggtttgacaatggttaataactagtgactcttctgctatatgttgatggacaaatacggggacttggcaatgaaagaaaagacagaagaaccaaaaacctcgtgatttctttctggtcaaacttttaaatctggtctgcactcctactttctcactcataaaagaaattatgctagtgaaagtcttgaggttgtatatatttttagtttagaataaatgtaacaggcaaatgctatacctcatctttacagtaacagtaataactactttgtaaatttcactttgggcaggtctctaggatgttttatatgatgatgacatgttccatattgttaccgtgaaaatgaatcttaacattaatggacttgagtttcatcatggttatatggatggagaattaatgattatattttatgttgaaatgtctcatatttgtgtaaacacctcttaataataaacatttattaacctcgtg

SEQ ID NO: 100812 - DNA, 521 bp, Homo Sapiens
aaaggttctgactctcctttgatcctgtttgaagctcaactcattttgattgaaagagatttgagacaagaatttcagaagagaaaaatgtgtgttacacctggacatatatacacatgtaacagggattgtattccttctagtctaagacaagagattctatggtaaattatttaaaaaaattagttttttttctagcattgtattgtcaccagaaagaagagtgctgaattctctgtttctgcatttcccaataataaatctcctaggagagataactttttgcagttgtgccccccacccattttctctgtggcttgctttatttcccacatatgaatacacacacagcagatacatcatgcacaaactttttttatgtgtaatctgtaaatctaggcccattaagttttcattgaagttgggaaactgttgaggacttacttttgttcttcaccatgcgtgcactttgccaaggatctttggtaaccaataaaacgatcatgttcactctgaaaaaa

SEQ ID NO: 100813 - DNA, 525 bp, Homo Sapiens
cagaccctgtatgacaagtggggtctttcagaacacgacagaaacaggggagcccttgtaatgccactcatactcagagcattattcttatttggacagccaagggcagatcacaggttattgtaggaataaagactagtttacaaaggagaaagaggccctggacttcccaaggaaagggtcaggttagggctcctgtacccattctgttccaccactgtttgatctctctggcctcccaccaggaatgccgtttcttttttatggatctgttgggaaccagagagaatcaacagatcaatgacataggatccgaagtgcaatggtagtcacttctagtttggcatttcacaaactctgtacagcaaggtattggtaggttactcaatttcaaaagggccccatggccaaatatgtttaggaaccgctgtttgtatttctttttttggagacgcattgtatataatatatgtcaaaggctttcggaattcctgcaggaaagaaatcagctttgttaaatccaaa

SEQ ID NO: 100814 - DNA, 453 bp, Homo Sapiens
  misc_feature (159)..(159): n is a, c, g, or t
caccaggcccggcagggaagcaggagtgtcgtgcaggtgtccccatgcacggggagccaggtgggttgggcagagccttggggccttgtctccacaccaacagctgctttcctgccgccctgaaggggaggggaggggggaggcgcagccggccccatnccctgcatctcatacacgcaaagggtaggcaggcggcacaggcccttcatcagccacggagaggcgcctcccgggaaacttcccctccacccaagcccctgctggcctcctgccccccaggaggtcaccttagagtagatatttttctgtaaaaagccagatggtacatgttcccacctcatgggatctctgttgtaaccctctcagcatggcggttacagcccccacagtagacattgacaacatgtaaaaaatgttcctgtgtgccaataaaactttatttacaaaaacaaa

SEQ ID NO: 100815 - DNA, 517 bp, Homo Sapiens
  misc_feature (294)..(303): n is a, c, g, or t
gagattaaaataataaataactatgcccccaaaagaatgtataaagatatgtaaacttgtatccagcttataaatactaaactaaacatcactgagcatttggaagagcagaattgatactgcagaacacaaagtcaggaattctaaactaatatagaaattccagttatataaataggtgtattataggtctagaatcacaagtctacaaaaagaaaaagagtatctaatttagaaataagaaggataagaaagaaaagataaaatgtcagaactgtacaaatcatgatcagnnnnnnnnnnttttcaaagaaaacgatgccttcagcctggttaacaagagagggcatagagcatttctcagcaattatccttaaagaatgaccccagacatttatttgtcaagttttaaacttttaaagacaagatcttacattctgttaagaagaaaggtggtgtaatatatgaatgcccttgacctcatttatcagatctctaagaaaggagaagctaaaaa

SEQ ID NO: 100816 - DNA, 484 bp, Homo Sapiens
  misc_feature (383)..(441): n is a, c, g, or t
ctcctctgcaaggaatgcagagccagacagacagatcctgaggccccatgctcaggtggtgaggccaatatcaggcactgtctttctccccttataaccaccaaacacatgctgcttcctgatagctcagtactttgcctcataaatgtggaaaacacactagaattcacctatataaaggtacttcggaaaaatgtcttaaggcaagtgcaaaaacaaaatcaaatctaagtgtcaattagttgcatgcagggtgttaggaaaagaataacaaaacactactagagaagatacaaaataggctggcactctagtgaagatggcaattagggggctaccaaggccatcactacttctacctaagggagacttacttacttacnnnnnnnnnnnnnnnnnnnnnnnnnnnnnnnnnnnnnnnnnnnnnnnnnnnnnnnnnnngtaagactctgtttcaaacaaacaaaccacccccccacaaaaa

SEQ ID NO: 100817 - DNA, 379 bp, Homo Sapiens
tttgctcagtctagggaggctatcttgggctgtgaaagacatgtcaccaaccatcacagctgctgagtgattgcacggttagtcagtaggtgccaacgccctgctagaagagctgtctgcagattccaaagccgggcgttcagggactcccgggaaggagccagcgttacctcagcctctccgagggacacgcgcgccctgaacactcccctcttgggattcaggccaattcgttcagctcccatgacttcatccgagcaggtttgtcacctcacgcagctaattaaactgtttacctagaagatgatccaaaggaatttccatttccttccagagggaatacaaggttatgataaccgagagagcgagaggaaaaaag

SEQ ID NO: 100818 - DNA, 194 bp, Homo Sapiens
gcagcagggtagtcacactaacatccatctcctggtaactacatacaatctgagggatgccccagctgaatctgttgcttaccatgcccaaaataatcctccagttcctccaaagccacagccaaaggttcaggaaaaggcagatatccctgtaaaaagttcacctcaagctgcagtgccctataaaaaagatg

SEQ ID NO: 100819 - DNA, 470 bp, Homo Sapiens
aactcagtctgtgggagctcagctcgctgcccagggataggtatgacctatgtctgccttaggctgctgggagatgccattctccagtttcagaagcaggcagggcaaaggtcaagactgtggtattggggtcttttggctctgaaggatcctggaaccactgattttggtttattccctccagggtctaaagagaacaagaggtgctagctcttaccaaaacagatggtagagagagttgctggctatttaaaaagctctttcatcttttaattcacctcttcttttcacctctttaaccactcctcaggaacagaacacttctaggactgggggtcttttagctccataagcaagtgagcagatgggacaagttagtcttttctccctagaaacaaaggggatgcccagtggtttccctttgcttcccaacctaaaatttcaagtttaataaaatagcaattagcaaa

SEQ ID NO: 100820 - DNA, 537 bp, Homo Sapiens
tttagaaggctcttggtacatttctcggtaattaatcctccccaattcagacccataaaaaaattatttggattgtatacctgagaatctggaagattttgaaggaaagttcagaagactacggagtgtaggtccccaggaatctcaccctagtccacatctgccgtttaggctttcatagcatttaccatgtgtgtgctctcaccaactcgtgctttcttcaagttcttttccagttcagccagtgtcacctctgatcctggacatgtctgtatcttcagtatttggaatgggtaatttcccttgcaatttcaattccttgatagatttcaaaaattgttgatgttcaaattgtgcagatgttttttgacataagaatgagcttgatgactttcctaatccttacatgttagagcatgtaaaggtgatctgatgtgtgtatcctgaatgctatgtgtgatgttatgtatgtaaaagttatgtaaagcttatgatgtaaaggttatgtatcagatgatatcatggtcttacaggtgt

SEQ ID NO: 100821 - DNA, 495 bp, Homo Sapiens
tttttttgtaaaattaatcaactaaatgaacaaatgtaaacaaggcacttaactgtattcctgatatagagtaaatgcttagtacactacccagccagtttttacaaatcttgtttcattattcttcacagatgagtcccaatgagttcaggattctagattccaagtttagctctatgcccaagtatcttgaggtgttggaacctctgagttctaggatctctcaatggcaaaaagagggggtgataagacatgtgtgccttttacgggtattttaaatattaaatattaactgtcaaataagaaaatctatggatgaaagactgtataaaagtacaaggcattagaataaagatgtgcgttgcattttgccatatttattgcggaagtttgttgctattggcaaccttgacttcaaggtaagaaatcctcgagcatctgctgaaattaaaaaaggcatttttgtttgaactctattcacaaattgattttttt

SEQ ID NO: 100822 - DNA, 493 bp, Homo Sapiens
gaatccctatgggaaatccgtggtttctcatgaattagatcataatttaacattgtaaaatttcagaaactattgtgctaatatttagatttcaggaaggaatcagactaaatcaattacctccattcattgttagaacagaagatataatagcttactaactgatatgagttatgaatgtcactatgacacaaaatttgctgtgatttgctaatctggctacaagtgcagtatttttcatgaatgacaacacacagcatttccaacttgtaacatgaaactccagctcataaagagtgtattgtgtgacttgaaaaagtctgattgtaactaagtaacaaccgttcccctgaaaaaacgaacaaaatccattaggaaatcaggcacagacggtattgatcggtttttcttcctttcctcctgtggttttgtttctcaagacatataggtggttccaacagaagccaacacttgttacaaaataacacagcta

SEQ ID NO: 100823 - DNA, 670 bp, Homo Sapiens
gataaatgactcggcgtcgggtaatcttttatacccacacaaatggactgagacagtatccaaatagtttgacatgtgaattgttttactcttaaaaggtaatcaaaatgtcacctatgtcttattcttaccaaaatgtttaaatgtaacctgaatccattcatgagaaatcaaacaagtccaaactgtaggatattctataaaacaactggccatggaagggaaaaaaaaggggatatgggcaaaggaacggttatagatcaaaggagactaaagagacttgacaactaaatgcagggagtaacaggattctgccctgagttgaaaatgaaggacgctgagacaaatgtggagatataaatatgcaccatattagatattattgtggcagtggaatttctctaatgtgatcactgtggttctataggcgaatatcccactttctttggcatgtatctcctaagtacttagcggtaaagtatcattcaggatatctgcaacttcttttcaacacagaaaaaagagaaagcaaatatataacagcaaaatagtaacaattagtgaatctaggtcaaaagtttaagtgttcataatactattctttcaactctgtatttcaaaataaagttcaaaggaaaaaagcaatagcaataaagcctagtttaaaaaa

SEQ ID NO: 100824 - DNA, 526 bp, Homo Sapiens
agtgcccttggagcgcagaatgaagtgaggggaggaggagggtcacgagccctggagcgctgggaagacaggctgtaggccgcaggccccgatcctgcctgggacgaggttcaacagaagtaggatggtttcatcatgacctggcaggaaaaccaccagacctggaattttgcttttacaactgtttaacttctgtttcatacaggatggaaaccggtgaattgtaatctcacataaccgagcaagatctagtagtcataagcactttgtcagagcaaagcagacaaggcaaagtgttggaaatgtcatcggatcttcacagaaccttagccaagcagcctttcaatgcgagaaacaaaataacatggatttttatctagtaatgaagtcaacaccattgtccaccctgggttaacacattcacatctcaaagcgaatggggctgcagacactcgtgttagagagccttggaatgtcctgcctttttacgtttaattaaaattaaataaaacatacaaaattcaaa

SEQ ID NO: 100825 - DNA, 364 bp, Homo Sapiens
caaattgatccataaattcaatgcaatcccaaccaaaatccaagcaagttatttcatggatattgacacactcattttaaagtttatatcgagaggccaaagatttagaaataatcaacacaatatggaagtgaggatggaagtcagagcactacactacctgacttcaagactaactacaggctttagttttagacagtacggcagtggtgaaagattggaataacacatcagtggagcaggatagagagtccagaaatagatccacatgaatatagtcaaagatcaactttgacaaaggagcacaggcaatgcaatggagggaagataaatagtgcaaggacactggacatctacatccaaa

SEQ ID NO: 100826 - DNA, 556 bp, Homo Sapiens
  misc_feature (283)..(283): n is a, c, g, or t
  misc_feature (477)..(490): n is a, c, g, or t
  misc_feature (544)..(544): n is a, c, g, or t
tgcggccgccgcaggagcggctccccgccttagcccgcaggccgcgaggtgcacggccctctctaccgagaagcctgaccgccccaggcctccccgtcggcctccagcgcctacaccagtttcggcgcccactcttcgttctgcgcccctagatgcccatcggctgcgggagaggctcccggaaagctcggtggggccccgcgcagagcccgcccgccggagccgcaatgctgccatggtttccccgcgccaccagccagcgacattcacgagagagacgaantaggacacggtcatccgagtgccgaggcgcggaagcgcgaactgcccggagcgacctggcttggcgcacagactcattaaccaagcccgagaggaggcagcaatgcgtgtgcgggaaagggagcggttctcaaaatacaaagtgataaaacagcttccagttatattgaaaaacgatgcaaaccctcaattccnnnnnnnnnnnnnnggacctggccggacctggaaatgccggttataaacaagaataaaaacttgaatntattgggtgaag

SEQ ID NO: 100827 - DNA, 547 bp, Homo Sapiens
  misc_feature (47)..(153): n is a, c, g, or t
  misc_feature (437)..(437): n is a, c, g, or t
  misc_feature (513)..(513): n is a, c, g, or t
gcccaggtgaccctcccacctcagcctcctgaataactgaggctaannnnnnnnnnnnnnnnnnnnnnnnnnnnnnnnnnnnnnnnnnnnnnnnnnnnnnnnnnnnnnnnnnnnnnnnnnnnnnnnnnnnnnnnnnnnnnnnnnnnnnnnnnnggtgtgagcagccactgtgcctggccaatagaattcttaagggatcttatttccttatttcattacagtcttttcacagtcaagaaatagttctgattattattgtcttctcttccctatttattttatttattcttggttcagtttattgtttcctgaactgaattgggaagggaaggaaagtcatcaataaagccaatttcctgtttctgaatatttcacaagaccagtctaggaaggggaagaagttcaatgtcttggggcaaagtttaggcttatctgtnggagttgagggcccctgcagcatcaactgggtgggaaggaaactggggcagggataggaaagggaggatgggccanagcaatggggctcctagactctggcaccagcttg

SEQ ID NO: 100828 - DNA, 413 bp, Homo Sapiens
tttgaatgggaaaaactattgtttaatacacgtagtttgataggccaaaattttcaacacatgaagtcaaccagaggaaaaataaacgaagtccttcgagtacaaaggataagctagacccgctgactagagaataagagttctcctcaaaagagcccttttagagaccaagggtgactagggagatgggaggttttcggcaaaacggcaaggccacagagaggcaaagggaactcaggacttccactccaactagaaactctagtttagaaaataaaaccctaattatcagaatcctaaaaggaaccatgttctccctgtatttcatcctagtttgaagcaaataaaagaatatgtattaacattacattgtttagaagtacctcataaaactacacaggtacatttaaaga

SEQ ID NO: 100829 - DNA, 861 bp, Homo Sapiens
  misc_feature (341)..(363): n is a, c, g, or t
gtttaaggaggagaccattatttctagctataaagaattaggttgttaggttgaataattgtaaagcctgtgcccgagccgccagttggcgatgcaggtggttgaggggagatgtgggtggtatataagaagcaaaggactctcagcccctgatgtgccccgcgtggtcttcttagggaggctcaatgcataaagacagaagaaaatgggatcctccacagagatttaatctgtagaagatcaaacacctgttgcctggtcaccttagtctaaaaagtagtggagttttgttttgttatttttttaaagcatgattctacctgaagccatcaaaagcctcnnnnnnnnnnnnnnnnnnnnnnnaatctaagaggagaacagatgctaacagatgagatttcactggctgattcgtttgtttcagatgcttgaacggatgctttagaattttctgcctgagctacggcaccaagctggttagtcggaaggcgtttgtggctaaggccttgaaagggaaaagtctcaagtgggcttatttctactgaaacagcatttcagaagaaatgcaggaaaaagcagacccaaggccccagggagaccccttccaagcaaagcactcctccggaaggtggaagcggggccgtggctcatctgcggagccagggctgcctgtcgcggacgttgctcacggtggttctttttcgtgaaagggaacgtacaaagcttaacagttttcccttccaagcagagactcagagaaagggaaagagtgagagagagcaaaggaggggggcagctgccccacagagaaatgaaatgaacacaacttcctgatgctggccagtaaaacaaaaaattaaa

SEQ ID NO: 100830 - DNA, 362 bp, Homo Sapiens
ttaaaagcaagtttaccaatagacttcagttggtgactctgcagaccttgaattttgcagagaaccacccagggtactgatgtcttatctgagtacatgcagaaagaagtttctaccaagataactggcaggcagcttcatctaacttctaacctgggtctatcagttgctggagacaggatcagacatctctcctgcccctgcgctctccttactcctcaaggacagttaactaagtagaaggtgaccttgtatcaagtcattgaatgccccagggataaattctttgatttttgtctactttggtttattccacaaattctgtattctaaatgtttatttctgcttgtacatgactttgc

SEQ ID NO: 100831 - DNA, 534 bp, Homo Sapiens
gcagttccaagtctatgaatctggcttatggatatactcccatgtgaacaaaatgatgtatctataaggttattcactgcaacattgtttataatagcaacagatgggaaacaaaataaatgcccctcaaccgggaactggttaaacaaattttggcacagccatacaatgggatccagtacagctgtaaaaatgatggagacacctctttgtgtgctggtatggagggaatcccaagacatattgttaagcagaaaaagaaatcaagatgtagaacagtgtataaatagtctgcccttcatatgaaaatgagagaaaaagaatatgtgtgtgtatgtatgtatgcatatataaatgcttgtatttccctgaatattcatgaaatacctttgtagaaaggaaattggtggtgagagacaagagtgggaagaaaactttttactgtatatcctcttgtgcctttggaatttcaaactctgtaaatatatttcctgttcgaaaaattaaattgaaatgaagacaactcataaaaaa

SEQ ID NO: 100832 - DNA, 605 bp, Homo Sapiens
  misc_feature (313)..(313): n is a, c, g, or t
ctcttgcccaacactaccatgcatggctgatagggcactgttctgccccatatcccatgggttctacttaacccagagctggcttacctggaaaccaagcttattctgtagtggcagacctcacgccatcttgcttaatagccttcagttttcctttagttgattaatgtatcactcaatagattatgcaagacctactctgctaggcactgtactaggccctgtggtttatatttaaatgaagagggaatgatctcctgactttaaaatgctggaagaagagatgagatgcatcaagaccgtcaaaccacanagtgataagtgctgtcagagatgtgtggatcactggctcagggagttccaaggatagagacatattatctgtttgggaagggcttggtgggggaaaggcattcagccgggccttgaaaatcaattaaagtttgaatatgaggaaagaaagaagagcatctcagacaaggacatggcatggatgaaggcacagaggtatgggcgtgcagggcatctgtggaaatggacagctcagttctcgccgagggagggagttggtgcagagcctgggggccctgccttcagaagataaa

SEQ ID NO: 100833 - DNA, 583 bp, Homo Sapiens
tgtgcacacacaaatgttataagcaatttttaagaattaggtttgagagaaaaagaaacccatggccccttttcataatatacggcgaccttctacatttctacaatagttctgttaaaaaatgctgttacccttgggaaaatcattctctcccttacgttcctgcaggatcttatgttcctaatgtttatctcaaagtattagagatagtttttatctgcctttctcttaacagtgagttcccttagagtaggaaccattcataaacatgaattcatgtttataaccccacactgaagaggaagcaacagtgaggaaaagccaaaacgacttgcaatttcacatttagatgtgctatgggtctgtttactatcagggaaatcactaacacctccctcagagtaatgccttcccatttctcaagccaggtaactgacaagagcttcattttccttttacaacacagatagttttaagtggtgggtcaggaggaaactgtatttttatttgaaaggtactcattgctactaaatagaataggctgccaatacagttggagcactattgaaaaaaaattaaaata

SEQ ID NO: 100834 - DNA, 789 bp, Homo Sapiens
tttccaatgaatatttttctgagcgtacaccagcccttaaataacctgtggttacctttaagaaaaacgaaaccaatggaattgtataatgcattaaaaccattagaaccaatttaccttcatggaaggggtcaaatatcccgggtgaggattgaaagagaaagaccgattccggtgggacatggcactggggaatgctgcgtagtgaaatcttctctcttcctagaaaaccaatacaactgagtctaaatgagcctaaccacacagcactgggtttgacttgaaggaagatggctgtgagggcagaatagagaaggaaagtccaggggaggaaggggaagtcagtgggaataaagctgccaggcactgaagcttttgaggaagcacctttgctttttttatgtccccagcccctcttgtaaagaaaagggcaagctgatgccttaggaaattgaaaattcaactgttcttagcatgtgaaggtaacctaatgcagaaagttagtaattaaggcaaagaaagaaaacccccaggtatgcaaaggattttgccgcctttcttcctctgtcttgtttgacatttgtgttgcctaacatatacaaacatagggagagtaatgaaatccatccccactttacctataataactatatggccgatcttgtttgtgtgtatcattttccacttttttctctgctgctgtattattactaaattccagttattacataatttttctctgtaaaaacatcagtatgtatttcttagaaataaggattactttaaaaa

SEQ ID NO: 100835 - DNA, 442 bp, Homo Sapiens
gttcctgcgtcctcgggaggaggctctgcgcgggactgcaggttctgccccgcatcggagtgatcgctgagcctgacgctctcgaaggctgggcctggggccagcaatctactccggaggctttcccactgggcagggtcgctagcagggaggaagcattcccatgtgaaagatgagctccctataaaagcaacgctcttatcatcgagaacagaaagttgaagccaagagagagctccacaagctgaccttgttaaactaacccttatcttcttagtcgcttctttacccaattaactaccctagccgaagcccctttgccttattacattttgcaacagtgttcgttgtccaattcagtatacaagtgagtgactctggatgctttttggggtcttcgtttccttatgagggcttctgtgccatgtaaaacttgtattaa

SEQ ID NO: 100836 - DNA, 118 bp, Homo Sapiens
tttcttaacctgaaataggcttaaattctcacattgtcagatgagtcttaacactttagtatttgctaaatttagcatattaaaaatttttaaaaggagtataagggccctaaattgg

SEQ ID NO: 100837 - DNA, 461 bp, Homo Sapiens
agagctggcctcatcctcaaaagtgatcccacatctaaccaaattaaaaaatccacatgaggtttctcaatacctactgtaaacaatttatcaagatacctggttagcacttcgtgtacaaagtgataaccagacgtcatttttcttggaaaaatcggggttggaaccacagctttgacttcattatcaatatatttaaccaacaatctgggctcctctatggaagtggcttaaatgccttgcagattaaccatggactaagaactttctttgatcttgaatactgttccaaaacacacaaccccagggctccatttctcacccaatataatcattcctgagcagagcattatcaaatagtatcaagccaggaaactggcttagggtactaaggtgaaaggatttagccaagtagcaacccaaatatgaacaaggaaatgagcttaagacacattaagcat

SEQ ID NO: 100838 - DNA, 165 bp, Homo Sapiens
tttaaaaactccatggactaggaacagaacgcattttatatattttgggatacttgtatgttttatagaataaatttatggaaatgaaattgctggatcagacattatgtatatttaaatttgataccactctgttgcttctgaaaagatcacaccaggtttttt

SEQ ID NO: 100839 - DNA, 498 bp, Homo Sapiens
agctttctaaacaacttagttgcacatcctactttagagaaaagacaagtgttaagtgatggtgacttgaaaactgtaaagtttattgtttggaaaaccgcatgagaaaaatggccagaacatatttgtgctaaaaagagttaacatagcaggccttaagactgctatccttagaaaggactgcttgcaatgttggtgcttgtttggcatctgggaacttagatttttgggtttgtgctgaacagtatgttttatgccgaaattaccagcttctgtaaaaatccgggacaccaagtctttaatgggcttccctgcgcggaaactgctgcattttcactgatggaggaaggatgtgttttgtttgacccctcttgggagggagaccgcataaggagcctacacgtgattcctccagactccgcttgtgtctttttctattatgatgagcctttatatccatactgcattgtgtaataaatgtcagccatgaattcaaaa

SEQ ID NO: 100840 - DNA, 453 bp, Homo Sapiens
gacaccaggaagcagctgatctttgctcagatgtcactttctcagtaaggacttctctaactttccgatttgaaaatgaaatccacagcctcagtaccatcagtgatgctatactgttagtttactttttaaaaatttgaaaatgaaaaggtgacatttaagcaaagacaaaattttaagaatttaaaaatgtgtttattattgtctctcccattggaatgcgagttctaccaggaactgcttgttcattcctgaatctccagcctggagaacagggccagcacatagtagattctaggtaaatgtttctaaaataagatgaataaatgagtcagtggagcggcggcgaaggaatgagtgagaaagcacatctgtcaagacgtcttgctcccctcggggagctgggtcctactcactgcatttctttccctcttgccacagaataagaaaaaa

SEQ ID NO: 100841 - DNA, 530 bp, Homo Sapiens
gtatcctagaaaaacttttaccccgtgtgaatgggaaaacatacagcaatgtaaatgctgcattattttgaaatactaaaaacttaggataaattccatataatggaatgcttatgcaccaattaaaattagagctacaacacaaataactctcaaaaacataagattgacaaagaaaaaggaagctgaagcaggttatatacagtataccatttatgtgcttttaaacatgaaaaattatattgtttaagtgatacattaggaatgcaaaacattcaagttttagataatggctacctcttgaataaaggggatttcagccatatctagtatttattttttaaaagtaaatatgataaaatgtttccttttgtcaaaggtttccttttgtcaaagctaggtgttttccctatactctttatgttcaaatgtgctttagtgggtaacagagagtcatcagtaacccagtcttgaaagccatcagttgcagtgggttctgcctataaacccagaggtgaatgcaaagcaaa

SEQ ID NO: 100842 - DNA, 718 bp, Homo Sapiens
  misc_feature (308)..(316): n is a, c, g, or t
tttagatagcaaaacaagcaaatggacttggaattttatttgtacagatctgattaactaagagtttcccttttgatgatggacaatggcactagaggaaaagaacaggagtggggttctctgtgcccacttcttttcaaaagggtgattttataaaagtgctttccacataaggaaataaaatacactttaatgagtaagtacatatagagagggtgaccatgaggcatgttgtcatgttagtgcaggggcctttatttattttatgaacaatatcctaaagttaataaagaactatgctttattannnnnnnnnaatctaggaagccaaggaaaaccagctgaacatattccattggctgcagccttcaatttaaacatcagaaagaaaggtaagctgggcacacccagattgtgtccagcttgtcagcacacttatttctgattatctgaaaataaacaacatgcttattctagagacagaggacctgctgaaagcttatagcacacaagtctattcaaaatgattccatatgttacactgtaggattgttgtgtagttatacaagggaaagaaatcaaaaccctgtacagacacctgatatcagacttgaaatgccaagtggaaacagaactattcagcatcttcatttatacacaatttacaatatttgattcaaaataaaaatcacaagaaaaatacaacagaatggtaaca

SEQ ID NO: 100843 - DNA, 706 bp, Homo Sapiens
  misc_feature (451)..(556): n is a, c, g, or t
tgtttcctctggggataagttagtaccagcttaacctgagggtgggcaaaaaaaggacatgcagaattcaacgcaacacacatcctgacaagtttataaggaccacgagaagtttagaggcaggaaataaatagtaacaccaaccataaaaaggctgtcactcactctagagtttaaaatgctcgtacgcaggtggcggtgggccttaggcaagccagcatgacagcaaagaaaggacggacccagaggagactccaaggatgtaaaaacatgaatgaaacaaaacatacaaccaagcctcaccacaaaaatgacaaccgtgtgaggtaatgcatttgtgagctagatttaaccattcccaaagcattgtgttgtgcgtgataaatgcgcactgttacgtctgtcaatttaaaaataaaaatgagaaaggccgggtgcagtggctcatgcnnnnnnnnnnnnnnnnnnnnnnnnnnnnnnnnnnnnnnnnnnnnnnnnnnnnnnnnnnnnnnnnnnnnnnnnnnnnnnnnnnnnnnnnnnnnnnnnnnnnnnnnnnatagaaaaaatgagacgggtctggtggtgcacatcagctactgtggatgctgaggcaggaggatggcttgatcctaggaggccaaggctgcagcgagctgtgatcacaccactgtgcttcagcctaggcgacagagcgaggccttgtctc

SEQ ID NO: 100844 - DNA, 571 bp, Homo Sapiens
  misc_feature (381)..(426): n is a, c, g, or t
ctttaagatgcggtagaaaactctaatagctcagcaatactggagagagaaaccacatttacaaaggactaaggccacactgagaagagctggagtgaagaaaactagctttcactttgtaacttgtgcatttggaacaggcaaatgcaaatgattatcaattcacataaaatacgaagtatttttattcagcaaacgtcttcatcaagaaggccttccttgtttctacccatttcattttactgtccaaggaaacaaggtagttctttgtctcttaagtgcctcaatatttgaaaattaattattccagatagccctagggcagcatagactagtgcagggttcttggacttttttcatcataaattcctcttacaattnnnnnnnnnnnnnnnnnnnnnnnnnnnnnnnnnnnnnnnnnnnnnnattgtgcacctacatgcaattttgtgttcactttcaggggagttatacatctgaggactctattccttcatataccaactactgatcaaatgtctattacatgccaattactgtgaaggtgtgaacaaatctttactggcctagg

SEQ ID NO: 100845 - DNA, 516 bp, Homo Sapiens
atttttagttcttttaatctgaaattgtttagactatcttcagagaaacttctcaactgttttcttactggaaatagttgaaaagctttataaggccaaggttacccaggcagtttgatttatatcttctttaagagagacagagcgagagaagaaacgaagtaacagcaaacatttgtcaagcaaagggctgagagctttgcagagaaataacagatacatttgactatagagatcttccaccttcgtttctagaaatcaggtttgcttggtgtaccttggagaagtaggcgctttcaaatggtcctcccacaagtctcagcagccaaccaaagccaatgattatcagccaactaacccaaggagttctttaaagttaaccaggacctctccacaaaatctcatacaaagtcctgtaacaagaagccacagaaatctcataaaataaaatgcagtaaattaaatgtaagaccagtagcagcccttgagcgttataacaggaattaaataaccaaa

SEQ ID NO: 100846 - DNA, 471 bp, Homo Sapiens
acttaaaacatactgtttgatttttttatttcctcttacaatccatgttttcaggtagaattatgactttccccccattgttacacatttctttacaaaggaggcctgtagaaattggacacgatcatgcttgagcatgtgagttagtcaaattatgagtccctgcctattgtccattacacaccgaatgttaatttaagaaccagaggcagaagttctggcttcctgcttgaaacccaattcttatatgaaattttttaaaagcagaaacctagcagcccatctgctttttctcttttgtcggtgtatttggtacccctccaatgctggtctttttgtagaaactcagtagagaaagtctagctaagcagtgttgaaaagcctgcaagatttcagtttacatatcgacagcatatccactgatttctaaatgggctggtcccatcatctgaagattctgtatagaattat

SEQ ID NO: 100847 - DNA, 563 bp, Homo Sapiens
gactagcagattcttatctgtgggggaggacacaggagcggatgacacagacccctgctcagggaccggctagagggcggaatgcctgggccccggccctgtctgcttcctgcttcttccccgaagttcatggcctgtccgtccacatgggcgggaggtgtcccgcgagcagccctcaccctgaccttggctgctttctccattccattccccacccctcctccctcctgacacccatggcattttttcagataagttaatacctttgattaggttccagccaaacctcaccctttctctttccccatgcctttgtgtctctcttcgtctgatgtcgagtctacaacctaatgctttgaagacagactgacttccccgtccttggtcagggggttgctgctgcgtggggggggcggtaaccataatcttgcccccgtgtctcatacacaagctgcaagcttagctcagaagctgtgcctgtcttggctgctttttcttgctgtcttccctatttttgcaggagttttgcacacggtcataaaagttcaggagaaacatgaaaa

SEQ ID NO: 100848 - DNA, 576 bp, Homo Sapiens
tttctaattgcccaaatagttaccagccatgggccaagtaggtacctgcattatacatagaatttctacaaagaaaatctgcagttaaaatttgctccaggatgtattaaatgcccttagcaattcaagggccacacccagtgttgctataggaaccaaagcacagtaccttgacaacagagttgcagttgtcccaacagccctacacaaactttacactttgaaacagcagccagcatgtcagtccagcatgtcagtgaattgtgctgattaaattaacatagaatacaatttcacaatatacatcacaaacaaattacaacgtcgggggaaataaaagagttacagtaagataagttatgtagtaacagcttataagcttgtctaaggtaataaaaattttacatggcaaatacaataatgaatgaacataaatgctaagcattctaatttgctacaagctggaggagggtacaataaagactgcactttcaaaaaagcaaaaacacatatgacaaaggaagacaaagggagaatgcacatgagcagacctgcaatgtgcagcatacaaaacag

SEQ ID NO: 100849 - DNA, 389 bp, Homo Sapiens
cttaaacccagccacatcaatagtaacagtaaattaaaatgggctaaaaattccaattaaaaaaacccattagactggataacaagaagacccaaattacatctacattctgtgtacaagaaactcaccttaaacataaacacacagaccagtaaaaaatacaagaaaacaacagagcaagctgacactggtcatgacaaagctgagtgactctgttagcaccaatgagaccgcgtcaactttaagacaatgagcatcgctagagagaaaaagggactgctgtctgtgctttgtgggtcacctccatcacaaaccatgactcccgtactcccccgaaccctgtaccccatgctaagtcactgaaataaatgactcatttaagcctcaaa

SEQ ID NO: 100850 - DNA, 632 bp, Homo Sapiens
  misc_feature (315)..(315): n is a, c, g, or t
aaaaaagaaaagaaatctacctcagttgacaggattccacctttagggtttcttcaacttttaagtcttacctgttgagtgtaacttttgtagcatcttgcttttccaagcaagctagtgaggcatgacagagcagaagtctgtaaatgtccctgtgatggacctctttaaagcatgttgcagttttatttttaataaattggtaagtgaaatgaacgtaaaggtaattgtgtacgttttagacatgacaatgaaaatttaaaatgtagcttccaaacttgtgcataattccaaagtattttattttttatcaancagtgttaaatagctttttgtacaggcttcaatccatttttcgaagtgtgctgttttttaatgaaagtaactataatcttttcacatcccatggaactgccgtttacacattgcaactttttaaacttaaccatatttttcaaaattaacgtctccgcagaaagaaaaatccccgcttgataaatgaaactaaaccgttgtttgggctcttataattaggtcctgagattttataaaaatttagtctgtagctttttaggttcttcactagagttggttgcacataaaaataataaagaatataaagcaccccaaaa

SEQ ID NO: 100851 - DNA, 495 bp, Homo Sapiens
tttgtgtattactactttaatatattgaatttatttcatacctatatattttatgagggaaaataagatacatgacattattataacacatctaattgttctatatttatttatgagagaaataagtgcaatttaacatgatgtaagattaatgcacgagatgaattctatattaagacagtttaagggattaagttccagctaactaagaggtgtgtacttcccacactgagggacccattttaaaatatgcaaagggcctgtctagtcctctgtgtcacaacctatgttggctcctggcttatcctgacaattgctgcctctgggtgactggtactctaaatcccggtcctgttggtccaggggaaagtctggaggcccaggaaataaactgctttttgagaagggcagcatctgccggggagatagccccgtagtgtctgtttctgagcgggagaaatattaaagaaacctaaggaggatggatggctttcc

SEQ ID NO: 100852 - DNA, 491 bp, Homo Sapiens
catttttgccacatcgtggcccgcagccccagagtcactgtccatgtcaccatccttctcctcctttggaatcctctccgcacactgtggcccttgtctcagggcccacaagctgaactgtggcatagctctctcttcttctccaagaagactcagcagcctacattcccattcctggtatgtgccattgggttggatgtccccactacttccgttaacccttcccattgtcaagatgtgccacgggtgccactgggggcacactgaacttgtagggagtgtgattttgttggaggtgcacatggtctctgaatttgacagagaacaccttccctttccttgccatgtcaccctccagaggaagtcacacctcagcgaggtggtttggcatctggggccaactccattacagctatgagctcactgctgtcagtgacgtttggtgttttctgtactgtgtttcaataaaaactccttcaaggttaaaaaaa

SEQ ID NO: 100853 - DNA, 579 bp, Homo Sapiens
  misc_feature (566)..(566): n is a, c, g, or t
aaatgcttgcatattttaagtaaaattaaaaatgtttactgaatttatttttttatttgaatattttgggattagttacaaaatatttagagattaaataaataatagctttgtttgtgttagacttcacttctacttgtattttctttcttgttaaaagtctagacaactgagatttacttactttgaacttgttccaatccaaaagtaagcactaagtctcattttatgagaccaccatttcttaatatcacatccagtgcacctttgtctttctgccatatctgaaataaaactatcagtaattcacatagataaacataagactaaagaagtatatttacattatctggagagttttgttgcagctacgagtttgtatggcaaattcaataataaagtattgtttatgcaaattgccatatgtaattcagtgctattcaatttattgaagccttgcatttttaaaagattctcactgattatattatttttaatgggatataatcgaatcctttgtagtccttcagcaccctcttagttgtaaggtgatatccggataattntacagtgctacag

SEQ ID NO: 100854 - DNA, 436 bp, Homo Sapiens
ctcggaaatctttgctgtgtacatgtagttcaggacctcttcaaatatatcagaacgaagaaaatctatttctatgaccgaagaactatcaacctcaagcttcttgaaaagctttttaaagtaggtgctgcaggcagcaagaacacatctgtgtgctctgaatttcacatcctcaaccacaatagcaatatcacaaaattctccttccaggcgttgttcatttagtgttttcagaaacagagttttatgatcatcgtcattatatttaatggtttcagacatactgatgaaaaactccatgaacaactcagcgctattatcttaatgccttgaacgccaaaatcttcagatcagagtaactatgatcaggagcacgccagaccggaagaactccatcctgcagacccatatccgcgccgcgccgctggcggccgca

SEQ ID NO: 100855 - DNA, 816 bp, Homo Sapiens
  misc_feature (111)..(141): n is a, c, g, or t
atccttgtactctccaagctcctgtctttctttcctctcccaccacgctacccttgcccagtccacccagtcacatccgtgcagccctctcttggcttgcaagataacgcnnnnnnnnnnnnnnnnnnnnnnnnnnnnnnncttaagcacaactgtgtgagagtgtagaagggaaggcttctcaggaggaacgtgacagtggattgggtggctggagtagactaaagcagtcatgtgacgaggaagaggtgatctgacccattttgataagtctttataaggaagaataaaataaacgtgtaagcaaaattttcttttgtaaaagcaaaagccacatctcttttctggatccttcaggactggggtttgtttgcttccttttctgtttctgtcttctcgctgctctgtgcccttggttgttttgtggtggtcctgtcgtccctcgtgcccctcggccacctgctggcagccgatgggggcactcggacatctacaaccctgcaactttgtacagagaaacacaatcagctctttctgcatgtgctggtcaaatccaaacccagagaacagaagcgctttctaagaatgaacaaatatgtgaaataggatgttttgtgtagataaagcattcttgttacatactggtcaatttgtgatatgttttaacttaatgtctgtgtttatttatggaattcggttttcttaataaatgtttgagctaatataaagcatattatttgacttttccggacaagtttatatcaagttaaatgtaaatggataaaataaaatcattttcagtatgtgatacagaaa

SEQ ID NO: 100856 - DNA, 532 bp, Homo Sapiens
  misc_feature (472)..(472): n is a, c, g, or t
  misc_feature (499)..(499): n is a, c, g, or t
ttggaactttccaaaggaacgatgatggtggcggtaatgtcacattagtatggagcccttaaattcagcagtgttcaacctgagggaagacagagtaggtcaattctcttggcagcagctgagggaaggagagagcagggagcagggctcagataaggtttgtttggcagggtccaagcacttcatggaatggagacctttggctgtcagagatctgaggaagatttgtcagggcctgctacactctgagggcttgcagtttggatggttgggaacacttcttccttgcactgatggtgctcctatttctatgacacgtgtactagttcagacacaatttattgtgttcaccaattctatgcacagcaatcagactgagattgaaatccagtataatattaaaggtgatctgggccaggcgcagtggctcatacttgtaatcccagcactttgggacgctgagttagggggnatcacttgagcgccaggatgtttgggnaccagcctgggccagaaaatgagaccccatctg

SEQ ID NO: 100857 - DNA, 567 bp, Homo Sapiens
  misc_feature (226)..(242): n is a, c, g, or t
tttgctgaattaggaaaaaccagtactagggaaggaaacgtcctggagaagtgaacacttggctcctgctctctgaggcttttgtcatttcccccccgccttagctagcacatcaggttgtatttttgttttgttatcatcagtcaaaatcaacacttaatttttgaagcagggtttgcgttagaagaaaaacaaaataagaactgcagagcaaatccaaatgggnnnnnnnnnnnnnnnnncctgggtttagctcagctgaagataaatccagatggtctaaaagcaagctaagcccagaccaatatgtgtgtaatgatatcagatgctgatagacaaaagctttactggccttccgtctcactgaaatgtctttccaactctgcccatctctgaacatatcatttatttataatgtatcctccccttgcttccaaatggatttgaagcagctcccagatagatttaaggcaacaaacagtagttgacctgaaaatggcaaagcagttaacatagaaactgaagaacagaaatggcaagaatgaggaagaagtaaaaatgctattt

SEQ ID NO: 100858 - DNA, 573 bp, Homo Sapiens
agaactgacaagctttgtgtccttaaaacaaaggaagtagttaaaccaaggccccagaaaggtaagaattgacttaagaaacaaaggccatagttgtcaagcagtggagttcaaaatgcagttttgttaataaaagtagcttaaagcaacatttgaaagcctctctaaagattagatacatacactttcttttggctaagatttctttagtttattctaaatatacctttagcagcattcaagttcctttgatcttagatggaattttatcagtttaatgagttaacctccatttcacataaagtataaggtttaataatttgattaatatgtaatcagtaagaacttggaaaaccaaatttagtaagcttgctttcctgtaagtattcctttcataattagagtccattgaagaaaataatataagggaagcaaaagtttgggaatctgaactctggtaaggaaagtggtggagaggggcccttgggtcttcttgctttcattcctgaccctccgtgtacaactagattggaaaccgtagtcagctttgtcacctcaggtggcaatttactc

SEQ ID NO: 100859 - DNA, 512 bp, Homo Sapiens
tgcggccgctccaacattagaatggtttggcggaaaaaattgcacatctagctataattttactgaagctaatgtggctgttttggttcactgaacttgtttacatggtttgggtctctatgctgctcccatgttgaataggagggaatgaaaaataaagcaatttaggatttttacccccacaagggaaaggtgcttcagacatttgccttcagggaaattttaagaaaaatgggatcagttgattttaatgaataacgagcttttatttttaggatgtatgaatggtaattcagagttaattaaaaagttgttcacattgaatgcttgctataatgaaaagaacatagatatattacttacaaaactgaaaaaagaagttgcaaaggctttaagtgacttagggaaaaacttttacttttcccctgaaattgaaactgttttccttacacatcttttaagaaaatcaataactggatatacaactatcctgaaggtatttttgagcctca

SEQ ID NO: 100860 - DNA, 524 bp, Homo Sapiens
ctagtaggtattgggattaaattatttaaaacacagttcttgtaagtagatacttccgtatcaataaaaccagtgctgtaataggggcatgtacaggttactattggaacacaaaaaagggccacttagtaccaaatgtagggggagctacttcaaaagatggcacttgagcagtactatggtgagcagggactggtcaaggaatgattctgaggagggaagaaaatggttcagatcagaggaggcagcacatgcaaagtggtgccatcaataattcagaaacccataatcaatctggctaaatggaaccaggtcccagaaaaggttagaaaagataggattgaaattaaagttggcaagattttatactaattgttcaaagttcacagataatattgctattaacaattttatgtccttagctccagctcaaacttttaaaaatttgctgcagagcacattggtgtaactcaagattttaagaacttgcctatcctttaataaataccctgcaaatttaaaaa

SEQ ID NO: 100861 - DNA, 561 bp, Homo Sapiens
taaacaatatagacaccatgtctcctgtgtttacagggatagctcataggtacagccatcagggttggattgcctccaaaagtaggccctacaaactcccgtaggccagggcctggcagtataccccattctcaccaccatcctttgaagaaagttctaagagttaaggttatcccacaggctactaggtagatttccaaatggcctcagggaaagtggaattctgccaacagtaaaggcaactccccaaacagtgctaatgctgagaggatcaagggaaggactttgatatacacatatatgtatggataaaagagttaagctacgtaacatgaaacaccaaaaatatacttgctggtacatcaagagttcctcacaaacactctgaagttaaaatctaaaatgctccactttttacccaaaatataaatgactcaacctcattttgtattatatactaacacagaaatgagttttttaaaaaggttggctgctatctatctaaagcaaacagtttatgttttacacataaaaaaatttatttgcataaaagtttttatg

SEQ ID NO: 100862 - DNA, 526 bp, Homo Sapiens
tgggcctggtggctgacaagtttcttttgacatcaattataaaaggcatctcgatttcagaaacataacactgtgaaaaacacaaccatgtaggatcaagaaaattacatataaatgttatacaaaatcactgtagcctttactttagagcactaggttaactgtttctttgtatttatgggagagttattatcttttattgtcactgctatttgtatacactgcggtcccatggaaaattttatttgaaaattgattacagtattgttttttaaaaaaattgtgaaaaacattgccctgggaaaatgcaagacacaagatagataagatagagcctttgccttgaaggacacattaaaagatgcatattccaaaaaaagaggcaatgaaatggtcaacagagacttataagtcaaaaattattctggacaataatctaataactgttaagctaccattttcttcttctgaaaagtccattttgcatgtctaaatgtttcacttacttttaaaattattcagttac

SEQ ID NO: 100863 - DNA, 501 bp, Homo Sapiens
  misc_feature (222)..(259): n is a, c, g, or t
tttagccaagcacgttagatttactagggtcatgtctgcaggtgaggtaacagcacacacatacagaaattcacgggcagagatgccaccgcagcatcaccatcagacaccaaagcagcaggagggctcaggaagtggctttggaaagttctcgtgaaaatcaaagggcagctttggtgctcagagattcaaacagaaaactatacaaaaccaacccataannnnnnnnnnnnnnnnnnnnnnnnnnnnnnnnnnnnnnaaattgcaaaataaaagcccaagaaactaaccacccatctgcacgtcagtggctcaaaaagtgttagcatagagaaaggcaaaaccatctgtgggggtgatgcatactcaagggggccggcatttcagtagcagaaagagtatttacatggaacccctatttgaaacctcacaatactaggaaaagctaaacacagacaatgtatgtacaagggaagacagtaagtactcttgcgtgacgat

SEQ ID NO: 100864 - DNA, 559 bp, Homo Sapiens
  misc_feature (67)..(90): n is a, c, g, or t
tcttttctccgtctgaagaactcctgaatacgggcaacagcagagcgtctatatgaattacatattnnnnnnnnnnnnnnnnnnnnnnnnattcacaaagaataatgagaaacttatgaaaatatagtaagtctaggaaatacataaacacactatctcaataaggcacccccaaccaaaagcataaaaacgcagacacaacagtgagaagtcagactagttgagttactacaacaaagtattttagttaagagatcacttagaaatttggtactggatgaaaagtaaaggcaatagcatgcggcaaactggtttttaaagggctattttataaaaacataatacagacaaaattcatgtgcaattttactacaaatataacaaattttatccaatgttctttcccctcttctccatattaagaaaacacataaagagaaatgaaaagaaactaaaggtaatatataatagcagtggatagacttctattttgatattttatttaaaatgtggtttaaagatgttccaaaaacagactactttaggtaaaaagaataat

SEQ ID NO: 100865 - DNA, 596 bp, Homo Sapiens
cagtagtgatctgtttccatgtctacatcattactgaaaacgaaaaaacaaacctaattttagaaatatcatacttgcagcttagtttaaaataaatcactactgaactacatagcctacgaataaactaatttcataaggcaacagaaatctgcaaaaaaggtatttagttaaatcttgaacgtattcaaagccaaacatgtcgctgacttttaacaaatttgtacccccggaggtaagggaggaaaaaaagtacatatgctaaaatgtagtggttttatgactttacatcaatatggagaaatcatacttccacacaatcctattatttttcaaattcagatctgtacgtcttcgttaatcaactgctgccccaccaactccccagccagccctctccccctacccccagcactgatttctagtatgtaaggggaaaacctcactctcaaaacaaatacatctcactcctggaacccgcttcacctcgttccggacctcatactcaatccactcctaggctgtttttaaatagcattctggcatttgtcctcactacttaaaaatatacattctttcaagggtaactgataact

SEQ ID NO: 100866 - DNA, 287 bp, Homo Sapiens
tcagcttcatagagggatgttacgttgctgctacgtcagaccctcactgaagctgaaaagcagaaagttctgcaggcagcagaaaaatatggagatgagcaacatgcctcctgtagcaaaccgaggagacaaagaggagatagggaaggtgaggaagaagtggaaactccattcctactaggaaaggaagcagttctggtagacaaccctgactggaacaccagtaactcaggaaatgaatggaaaaggaagcacttttaaggtgtgtattagagggcccatggaaa

SEQ ID NO: 100867 - DNA, 589 bp, Homo Sapiens
agctatctttaggaaattcttaagtatcaaaaatccaatttattccattttcagaagacaaggaaaaagcactcataaactctaggccataaaaaaataggtttcataagtagctcctttaacatgaagaaaatgacaataaaaatatcttacttgcatgttacttctggaataatgtcaaaaatctatgtagatctttccattttaaatgatgttaaaatagtgtcagcactgtgactgactcatagcaagtatgggtatctatccaaatatttgtctttgaaacaagaaacaagtgaccatccgatgaaaagtgcatgcctcttaacagtatctttctgtaagaaaaattaggtgatctatatttacatttgggcagtggggggatgaaaactgctcttaccaagatggctgacttgaataaagacagtcaatatttttcaaaaaattcactgctctggtactgagatctccatgataacagattacagttaaacagaaaatgctgtgaaataccttttacagaacacagcctgactttgcagattaacttaaagatatatttcttgattatttcactgttaaaaat

SEQ ID NO: 100868 - DNA, 575 bp, Homo Sapiens
tgctaaagttaatcccaaccctggaaatagtttgttgtacttgctccagttttctctaatttcttcctgtaccagtgaggtagaaaacaccagaatagtgttgtaataaaagcatacacaccctgtggcagaggttccctggttgtcctccaaaatccattctcccttcttctgtagtgggaaggatttatgtggtctgtggccgcgcaggataagaactaacttcccagcttgcctttgcagccaagagaccaagttgtgttcagaaggatgtgagcaaaaatgttacgtaaaaccttagggtcatggctataatgccacctcttgctcttttcttcttctggaatgtggatgtggtggtgagtcagccactggaccttgtgaatgagggcaacaccaggatggcagagcagtaaaataaggagcaagggccctgacaccatggagctgacatattagccctggaatgcttacattggactgtaagagagaaataaacctaatcttatttaagccactgctattctggatcttgttacagcagctaaattaaaattataatacaattcccaaaa

SEQ ID NO: 100869 - DNA, 494 bp, Homo Sapiens
ggaaaaccagaagattgaaagcagcccaggtgaacgatacttatccttgagttttacaagactaggagggactaaaggagatgtgaggttgctttattctgtactttacattcctgctggagctgtggaccccttgcaagcaaaagaaggcatcttaaatatatcaaggagaaatgacctcatttttccagagcaaaaaactcaagtcactacaaaattaccaataagaaatgatgcattccttcaaaatggagctcactttctagtacagttggaaactgtggagttgttaaacataattcctctaatcccacccataagccctagatttggggaaatctgcaatatttctttactggttactccagccattgcaaatggagaaattggctttctcagcaatcttccaattattttgcatgaaccagaagattttgctgctgaagtgggtatacatttccaacatcagaatggaccctcgtgcccgaattctt

SEQ ID NO: 100870 - DNA, 515 bp, Homo Sapiens
  misc_feature (385)..(404): n is a, c, g, or t
ttggtgtgctgagcgccggtcccctggacccactgttgtttctctatactttgtctctgtgtcttatttcttttctcagtctctcgtcccacccaactagaaatacccacaggtgtggaggggcaggccaccccttcagtgagggaaagaatcagtgcctaataaatgtaggcacctacccccacactccaacttgtgctgtctgaagccttgggcacaatgggcaattcgtgagagtaaggaagtggtggggagggacaagagagagaatcatgaggaactgtgcttagttttgggaaggaggcagccccagaaaagggcactcctccccgtgggcttggaagtgtcactttttacatgacagtgtaagatatttggttgaatnnnnnnnnnnnnnnnnnnnntgcatatatgtctatattacatgtacatgtagattatatataatatacaatgtactttttccacgtgtatgtataatcaacaataaaatgttttaaaattgagattataaa

SEQ ID NO: 100871 - DNA, 293 bp, Homo Sapiens
ttttttggtcagctttaatatatttatgccagaattttaaaaccaacaaaattttcttgttcaagcgtgcattgaagaaccacatttattcaatggttgatgttgttttgtgatatttgtacacaaattttcttttctcagttttataaacacagaatataacaattcactttaaacttttattaccacagttgctgcctcctccagaatttttgaattttaataaaaggcaaacttttgagctgcaggaaggacaatgttggttaataataaatctcaaagttcatttgtag

SEQ ID NO: 100872 - DNA, 604 bp, Homo Sapiens
  misc_feature (80)..(96): n is a, c, g, or t
atattgcacctatagtcaacaatactgcagtgtacactgaacaatttgttaagatagatctcaccttgtgttcttactgnnnnnnnnnnnnnnnnntagaacagaaaagcaattggattttaattctggaaactcctttctcttccttacatccaggaaatttgctgtttattttgaaaagcaaatttaaacctatttaagggagagagagctcttgtaaaaattcatttattagttctggaccaatgttatttataagctattatttcaaatgataaaaaataaatgcataatacatttgatgatagaacatttttctttttaaataaggcctgatttttcaaaaagcattgaatatgtttgtttctaatttccaaagcttgacagtttcttatgtttcattaaaagcagaagaattgttatgtatgcatgttcatatcacttttgaatgactcatgtggctacaaatgcagcaatctgtggttatcatggaccatgaactagataaacattcctgcttttcttaacattcctttcctgtgcctcattaactaatgtacataataaaacatctttatttcatattctttgcaaaaggaaaaaa

SEQ ID NO: 100873 - DNA, 619 bp, Homo Sapiens
  misc_feature (46)..(328): n is a, c, g, or t
ccataatgaatgggtttgtgtatatgtatcatgccatgtatgagtnnnnnnnnnnnnnnnnnnnnnnnnnnnnnnnnnnnnnnnnnnnnnnnnnnnnnnnnnnnnnnnnnnnnnnnnnnnnnnnnnnnnnnnnnnnnnnnnnnnnnnnnnnnnnnnnnnnnnnnnnnnnnnnnnnnnnnnnnnnnnnnnnnnnnnnnnnnnnnnnnnnnnnnnnnnnnnnnnnnnnnnnnnnnnnnnnnnnnnnnnnnnnnnnnnnnnnnnnnnnnnnnnnnnnnnnnnnnnnnnnnnnnnnnnnnnnnnnnnnnnnnnnnnnnnnnnnnnnnnnnnnaaatatcaatagtttatataggcagttttcctatctataagcaataagcattttgaaattttaataataaaaaacctgttcgcaatagcaagagaaacgaataaaaatacctagaagtaaactataaaactttattgacgaataccataaaagaacatctgcatgaaaagagaaggaatactatgcttctgaataagaaggctcaatattttagtgatgtccatttttcctatattggtttatacagttgatgcaatttcaataaatataccaagtttttttggaaaaaaa

SEQ ID NO: 100874 - DNA, 428 bp, Homo Sapiens
cttgctacctttttcctccttcatgtagaatttgtaatcaagagcccaattttgtcatttggaaatactaattatctaatcacggcatgctgtataacgtacttgtctgcccaattagctaggacaattattaaaattcagaggcctaattatgtctcaatttaatgctggcaaacttgcatacagagcagtaattaaaatcctctctttccctctgcctttagggcaggggatgattaggccctgtcagggggtgtactgaaccaaaccagtgaagcgtattgtgcaacatgaccctgcattgttaagtgtgtcaacatattaacctgaattcccttcagcccccacataatcacatttggtggaagaatgaaggagctaaaacatgaagcatttttttaaaaaaacataaattcattttaattaaa

SEQ ID NO: 100875 - DNA, 416 bp, Homo Sapiens
ggtgcggctgtacgcgctgtgggcaggggcgcaggctctctagtctcgctggaggactcgaacatcggtacttccgagaccagctgctggaagtccaggtcctgggtctggctagctcccaggccttgaagccccaggtcctgcagacacacacgacgacgtgttcgagaagggccttggtactgggagaagggggcggggagctgagggagtgtttttttccttctgggcaagagaattaattgctcacagttgaaaggcaggaagtacccgcacagcctcccctccccagatctgcaggtcaaggtcatgtgtgcccgcatttgcacagagcctgactctgacatccgtgcacacacacgcctagtacccctgcactagtgcccccacgcccgccttcggaagaaaaaagaaaa

SEQ ID NO: 100876 - DNA, 449 bp, Homo Sapiens
aactgctactgtagagtctaggaatgtcacctcaccccctaatactaaagaggctaaaaaataagacaaaaatttaaaaagggcagcatcagagacttaaaaaaaattggcataggaaataatagtactactcagaaggggtagtacttctgagatatagtcaccacataaaatagagacagataagagcctagagtgcatacaggtggtcatcacatatagtccattctgaagttccttttctagctatccagagatgggtttgcacaaggagtagagaagaggaagccttctctaataaattaggacaaaaactgattcccactccatattaaactttcaggaagagttcagtaaatgcatcaaattttccagctctggaggtctgtaatgataggagagagccacacaagctttcttaaaatggtcatcatcatactggtgagaaa

SEQ ID NO: 100877 - DNA, 430 bp, Homo Sapiens
tcagttgaacaggttcttccttaatggttaacctcttttgctgccatggcaatgctgcgtaacaacttaagagaaacgtgaagcaacttcccatccgggattgggtaatggcttggtccagagctgttctgtgtgactggctatttttgaaaatcctttcttccctagtacagacaatttcaaacacctctgagattgtgggcatagtgaaacaaaggagtctaattggggagatcccagccccttgaggagcctgagttgtgaataaacatgtgaatccttattcttgatgcccctatctcaagaggaaggctcaatggcttgttctaggggagccaaagtctttgtgcatgttgttcaggctggaccagcaaggtagtttgtttggagggaggagggagctgtttaagaagactacatatgtaagttt

SEQ ID NO: 100878 - DNA, 337 bp, Homo Sapiens
ctcagggagagtgacactgaatgggaacaagagccaagactgtgcagggaggaagaggcagaaggaaagagaaggaaggagaaatagcgccggtctcctaaggtgttgaaggcagagctggaatcttgtggaacacagcctggctgttgttacagatttaacacccacagattgtattgtcttacctcatctagtccgtcacacagcaaaacttggactacacggagatggggcttggggatctaatcaaaaatgagatgtaccttaccacctggtgctctgaaaaaagcctgctgtttggggcacattttgtaatatgtcactattatacttaaaa

SEQ ID NO: 100879 - DNA, 531 bp, Homo Sapiens
tgcggccgccaggcctgagccagcatctgggagggagggggaggtccaccgtccctgccctcgaagggctcttcatctagttctatgttctgtcctctgcctctggactccctttgtcaaaagcctcctcatctttcgaggtcctgctcaaatgccaccccatccttaaaggtctccctggtgttcccccctcccctcacccctcaacacacacacacaggaacagtctctcctttgatggagaacacagtcgcctcatgttagattaatcatagagcacatcatactgagctgggagaggtactgtctgctttagggttatagagggtcctcagagcagacccccgacggggatgtgttcctagctgcatacactgtcaactcccttctcttttcctggtgctctcaagtcattagattctagctgaggtgtcttgcagccctatttctacagctgtccacatgcccatgggtgtttctgatgcccttaacagtttctgtatttagctgcctgctcacctcactctctgt

SEQ ID NO: 100880 - DNA, 579 bp, Homo Sapiens
  misc_feature (185)..(213): n is a, c, g, or t
agtagagccacaccggggcatcttggtgcctcctgggtgaagcagccatttcctactatcaagggttgtgaaatcatcttccaagaccgtattaccagaaatatttcctccaataagaatctgaaatgtatttttaaaaaatcccaaattttccatttagttttaagaaatggaaagttctgccnnnnnnnnnnnnnnnnnnnnnnnnnnnnntctgttggcctgctcagaactggcactggacggccagcagaatgtgaggggcctttcagaatgctcttgtttatgtctgcttgcccatctggcaagaaactacacaaaacaaatcaaaggattgacaaaaccattcacagcctacattggccaaactgtgcctttgcaaacgacatgtacccaagctgggaagcaaaatttggcttatgtgtgattattttccatgtaaaatttctatttaaggacagttgtaccctaaggcatttcagttccaattctttgcatgaactctacggtttgttaacaggttctttgagttctatttgatatacatcttattatgtataaagatcctttggagcagtc

SEQ ID NO: 100881 - DNA, 371 bp, Homo Sapiens
tttgctcttggtgattgaaaatatgaatgatatggaattatcagcccacctaaatgactgagctttgtatttgtttttgggtcaaccaagggaaggtgagaaggaagtcaagcaagccaagaaactgttctcatgcctttctgtagttgcttgtattcacaggacaagggtccctaaatgtcttcagttttttatccttagcatggttcccattttagaagctgaggcctcagactcccttctgcttacataaggggtgtcaggcaatggagtgtgattaaagaaaatttaatttttttataagtcacttcaataatacttcctgcggactgtatgatctcacgctgataataaaggggacagtggaaatg

SEQ ID NO: 100882 - DNA, 442 bp, Homo Sapiens
caagcgtggagcctcacagggaatctgagatgggagccagtgagatgggggcaggacccagaggggagaagaggtcctggggatgctgtggatctggatccagcgtgtgggagctgaggttccggagtgaaacactgcctttcatggaagcacgtcttcctgtcacccatcggcttcattttaaaggatgaaaatgtatcagacattcaaggagagctgcatcacataaaagaaagaccaggcaaagaaacggaaaataaatggattgagaaatgtgaatgactccaatcattccaatcattggaatgaatggattggataaaactccaatccatagactcagattagggagatatatttatataataagaacaggaaactgtgaagatgaaataagacaaaaaagacacttttgagattaaaaaattactgcaaaaataaa

SEQ ID NO: 100883 - DNA, 880 bp, Homo Sapiens
  misc_feature (32)..(33): n is a, c, g, or t
  misc_feature (55)..(55): n is a, c, g, or t
  misc_feature (670)..(670): n is a, c, g, or t
  misc_feature (711)..(711): n is a, c, g, or t
  misc_feature (719)..(719): n is a, c, g, or t
  misc_feature (799)..(799): n is a, c, g, or t
  misc_feature (844)..(844): n is a, c, g, or t
cctcagcactcccaggtcgtggctggggcagnnaggcaggaactgtaactatgtntctgatgcaccacgtgtttagacacagcacagtccttttttctgttcctactgtggaagtagtttctctttgggcatgctgacagcagtttttcatagcctcacggatgagccctttctacgggagtgactccatgcttgtatacagagtatttatacaaatgttttagcatcttcatatgcggtgttaacccctagttctgtacagcatattctgttcaagtatttttttacaagcttgtgctgtaggcacatgccttctgccctggaactcgtgcaggtacgtagtagctgctactgccacaacggcaacaccaagcaagagatggtccatgcttttctgacgttctcagaatagtggctagcttcaaacctgacaagcgctgcttgaagccggaacactagagaatgttgctgagagcagaaacggccacgcgggtcacgactatgcgtgggaaagtctcaagcttccctcctgccagcaacaagaaggctttggagtaggcatgatgttttcacgtgtgcgtgccgtttctccaagcactgcaggttcaccgtgtgtcagaggtgcaagttaacatcctcctgcctgaaaccataggtcctttgctgaagnagggtaaaaaagacttttgatcttctcagcagaagaggggnggggtttntcacgcggcaactgctcgccgctacttggggtattttcagtctgctgcagcacgactcccgctgggcactggctcacagncctgtctttttggggacaggacgggggatgggttaactctgctcnaatggaaaaaatggactaagcactattttgttctta

SEQ ID NO: 100884 - DNA, 648 bp, Homo Sapiens
  misc_feature (35)..(35): n is a, c, g, or t
  misc_feature (139)..(139): n is a, c, g, or t
  misc_feature (332)..(389): n is a, c, g, or t
tgaggaaccggtttattgaacagcttaaggagagnaaaaatagtggctttagctacattttttacacactgagcaggaaagtctaaaccatcccgttcccctgtaccccaaagagaacagggcttgctggaggccagtnccaagggcggagtcgtgctcgcagcagacttgaattaaccccatgtaggccggcgagcagttgcccgcgtgaaaacaccaccctcttctcctggctgagaagatcaaagctctttttttaccctcttttcagcaaaggacctatttgttttcaggcaggaggatgttaaacttgcagcctctgacacacggtnnnnnnnnnnnnnnnnnnnnnnnnnnnnnnnnnnnnnnnnnnnnnnnnnnnnnnnnnnaagccttcttgttgctggcaggagggaagcttgagactttcccacgcatagtcgtgacccgcgtggccgtttctgctctcagcaacattctctagtgttccggcttcaagcagcgcttgtcaggtttgaagctagccactattctgagaacgtcagaaaagcatggaccatctcttgcttggtgttgccgttgtggcagtagcagctactacgtacctgcacgagttccagggcagaaggcatgtgcctacagcacaag

SEQ ID NO: 100885 - DNA, 567 bp, Homo Sapiens
  misc_feature (545)..(545): n is a, c, g, or t
tttgacactattaaaggtaatgctaaggtgcagggaaggttggcattgcttatatttgtaattctgctcccaataagctccaggtttcttacctggacaatataaaacagtaaataccatgctgactgcccagttcaatacactgggctttaaacaaaaggaaaaaataaatcaggagctgtgagtcctcattctgtctgctgctttttagctgtgattcaggcaagtgactagacgcctctggatcagcctcctgtcctctacaaccagatcttttctacacagttctaaactactgcaccaccaggatttgcagagtggccaatgacagttcacaaaggcggaggtgccgtgtctgctaagcttctaagccacatggaagtgcttcagccaacaaatccatgaacattactgtggtccactttcaacacagaaaaatgactagagcttttatgaaacaaaaaagctgcttatctcaggttcagaaacccttgattccaaagaccaatacagaattaacaagtacaatcattatttccaaactntacattatactatacacctcaa

SEQ ID NO: 100886 - DNA, 641 bp, Homo Sapiens
aaaaatgaggcagatcagatgcccctgagctgcccctttttttctgattcccaactgcaatgtcctcagtcagtgttgtccctctgcccggctccccagctctttgccaacctcttcacactccccttgagctgagcatcagtcgcctgtgacgtggccaccttctgtcctgctcccactcccgacccatgctggaccccggaggacctcctgccccgcccccaccacacacccatatcccccaccattccaatttgttctttcccgtggggaattttttttcccagcgtctccatcccttcgtacatatccacacacacacaaattggtctgatcttttttccattggttaaacatttaactccatgccagaccttgttttaacccctctcacatcatgttctttccttttttgcgagttattttgcattaaccaactttgtcagtgacagatgcgtatctgagggtgtcacacacgaccttcagcagggaagacttctgggccatggagggccgtctaatacatggacttataaactgactgcatgagcaatgaaaaggccaaattattctgaattttttttgaatcactgtaaaaaaactgatttcttttgtatagagaacactaaacgtataataaa

SEQ ID NO: 100887 - DNA, 861 bp, Homo Sapiens
cctgcaagacttggtgttggcggcactgttgtagtttaacttcaatcccaaattccatgaaatagaaatcagaagtaaaggttgagaggggaggaaggagggaggcaagccaaggaataaacaagagtttgactagaaaaaaagaagagggtatgtgtggtgggcattcctgggcaaggccattccttgagggagggggttggcaggcagcttgcctctgcctcatgcaggggagggaggaaagatcccctggggaccctgcagtcccctcttcctagggcttcctgctcccaggggaaaaactaataccagagagggatcagccacaacctcaaacagggctctccacccacctgtcacccgggtttgactcccacctctgccctgcctgggaagcatgtgagatcagctatctttgatcccctccttctgttgttttcccatttcacaagattctgatgtaaagggggaagggatataacccattttgggactactaaacttgtcacagcttctgcttccatgtgagctcctgttatcttgtctggtcctatcccccagaagtgcctcctcccaccacaactcccagagttgggatgtgggggccttgctcaagtgcctctaaccctctgcagtagaaatgtcttcttcaggccccttaggaatttaatcaaaggccacaagtgagtccagaccaaccaaataaactattatgggggagacagaagggtgggagaagtcagtggcaaagtctgggcagggtggacttgactgcattggatattctctgttcctttacacgttgctcttggcatggcatgccaccagagggggctggaggaggggctggccgatgaggag

SEQ ID NO: 100888 - DNA, 555 bp, Homo Sapiens
tttagtagagacaaggtagtagggcttcgtataggatatattcctgtaagagggaataactgcgtcaagggccattgcattttaactgtaagagatgacagattatttataaaaatgtggcaatacgcattcctattatactgtttgggtgcatccattttgctgcatcttcaacaatcccagatattatatatgtattgtattatatttttgcaatcagatgagctaaaaatgacatttgttttcctttacagcttctgggaagtcttttcccacattgagattatatttcctgtattttctctcaatatttttatagtttcaagtttttatatttaaatctttagttcatgtgaacatttgaatatgtgaaggatctatatttctccatataaattacatcatcccccactaatgaaagcttattcctcatgtttatcataattgaattcccatttgtctgaatctattctgagattctttattctgtaattgtgtatttctataccaatatcaaaaactgaaagaggacaaggagcacaaacctttcatcta

SEQ ID NO: 100889 - DNA, 515 bp, Homo Sapiens
tttaaagagaatatggaagacataaatctgcaatgaaatcagttatgaaatattaaacctctacttctcaggagtgacactaatcatggtctggaagctagcctatcgcattttaaaacacccttaaatcaatgacgtagaaactttatagtctaagggctgcccaagcaacttgtcaagcaacccgaaaggctgcacctgatttgcaaacacatacacagaacctatttgtttgaaatcgaatatgattaaatgaatacaatttggcttgtacctgtctttgtcttaataaaactaggatggacttatttattacccgaggaaaagaatcaatacaattaaaaagaaaggactgaaagacagcaaagtgtccctccctctgtactctggcctgaaacactgagcacttaaaaatttcattgacattctttgcttgttgtctaagagctctcctgaaaaagaacatactcatttttccattcctagcatttaacacaggttaacatggcacatgg

SEQ ID NO: 100890 - DNA, 192 bp, Homo Sapiens
ggaaaggatttaaaactgtagcatgaagtgaaatttttgaatgactgtggattttgtttatccgttgggcttgttctccctacatcagtgatggttccattccgtcaaacccataccctcccagcccatcctggaaagacacaagatggccataacgtagtaatatctaaaatctggaaaaagttggcggcc

SEQ ID NO: 100891 - DNA, 475 bp, Homo Sapiens
tgcggccgcccacacacaggccaccgcccccaccggccggacggcgcggggattcccagtcctggctccgccccggcctcggccccgcccctgcccctgccccggggcagcctgtgctgttccgtgtgcgcggcgcatacgcacctgggttgtctcgagcctgcggtagtggccagatcccagacatccgagtagatcccgtgaaaaggtctcccacgtgggctgtggacagggcccaagggtagcagagctagcagaggcagtgacggactgtgtggcaggtcatttgcaaggagaaaagccgtctgcctcttaatttgtggctcaagtttcagaatttttttcctgagggactttagaaattacttcaggcttgccacctaaccttaaaccacccccttggagactggctaagtgttatttgtgttttctgtttagttcttatcaccatcgatacttggttatgacaatggtt

SEQ ID NO: 100892 - DNA, 391 bp, Homo Sapiens
taactgaagatcgaatatttggctaatgtgttcgagaaaatcaatataaggcaatgtttgtaattgatttccacgaagatctagatgggttaaaggaacaaatcggaagatcgttcgcaggaagactctcaatagcattgtcatttaaaattaacactttgagtctgttgagcctgctaaaggcacttggttcaatcactgtgataaaattgttatctgcttgcaggaattccaggttttccagtccatggaaagtatcctctttaagaatttctaaagaattgtgattgatatgaagttgtttcaggaggccaaggccattaaatgcacctatcccacatatctgcaatattgttaaatccaaggtgtattgaaatagcattggtaagcc

SEQ ID NO: 100893 - DNA, 788 bp, Homo Sapiens
tttttccatttgtgccatctcctatgtaatctgtagattgacagtctgtgcctaaaggattcctccttatttcttcagaaaacttacataactcatgtaaaattacagaatatagttttaatttagggcaataagctcaatatatttcagaaataattttaaaacatcaacctgaatttaaagtcatatcaaggttcaatccaagtcacaaatagtgactggcacaatcacagacaaaaaatgtttcaagtcgctacaacactattatctgatgctgacaaagtttcatatgttcccagtgttatctctatttcttgtatcttaaagcatatgaaacaaggtcttaaatgatttttcccaccactgttatcttaagttatggaacactttcttgagtggcaaacaaggatattatgatccagttataccactctttgagaatcaatttactgaaatacagcttagaaatctaagaggaatgaataggtatgatgccctttatccttattcaaatgtaatccaaattttagcaagcataaactacagaaaactcaaacagtacatagctataacaaagttttgttgtcctagtaaggcctcaattattcttctctttatttttacttgtaattactatgaaggagggtttcagtgattcttacagcaaatatgagtgtttgcataaaaattaaatggcctaaaattactgaggtttaagtttttatcttgatcatctttttattttctatatcttttattatactatactataaattagtgttctttat

SEQ ID NO: 100894 - DNA, 453 bp, Homo Sapiens
tttaactaatgaactggtttatttgggaaacgatcagaagtgtcagggattgaagaacatttagattgcctctatgagttatgctgaagcaacatctgcttgttttttcttcaatcaacgtgcaccctgtagggtcccaaattcaaaaatgattacatttcatgtcatttatgtgccttacagtttgacaaatttaacttgtaagaataaatgattccatgttcaatttacattaatcccattttcatccaaacatccaaagaaagagaaccattatagattgataaaagctgctgattgatctattaatttccaaaccttaaatctcctagggaagtctttgtaaagttcatgttcataaaattcttgttctgccacaaaagcttccagtggattgtgtttctcaactacaaagaaaatcatcaaggacaaacccagaaaatgtttctttag

SEQ ID NO: 100895 - DNA, 735 bp, Homo Sapiens
gaggtatgaaagagttgagtagaccaagtcaaaagaggtgtggggatttatgtttatttttatttgtttggggttgtttggttggtggctgggtttcttgtaacagacctattctggaatagcaaagaaggataccttggtgatctgcaatgtttctgaatctgtttctctttaggaagtgattgccatcaaatttagtgatatgatatttgagtcaaaaatctgaggttatagtaccagctgtcttttctctctggtctcctttttgtcgtctttctctttctgtctaaattggcctctgtcttttcctaaggacttaaaatataacccaaattaatgaagaactgccccaaaacttcagtgaaagccaaggaggtacagaattttttcaggacatctttaaccaatacaaaatttatgtcttaagaagataatttttacaatagtgtagtaatctgataaatgaaaactattggaagtcaatagttttttatattccagctttctgtattcaaacttgtgccttcagcaagcatctcttcactttctttcccttgtcaattgaaacatgaatgtttggctaactcatgatgtaaagtgtctgttaagttaataatacataatttaaagcacttagtctccacaaagcaatttagaaaaatcttcacttgttagatcccatgaagtacctatgaaattctcagcattgctataagcatttgattttttttaagg

SEQ ID NO: 100896 - DNA, 583 bp, Homo Sapiens
tgaagcagccatttggaaggcttcctgttggattcctcttcatctagaaagccagccaggcagctgtcctggagacaagagctggagactggaggtttctaaccagcatccagaaggttcgttagccaggtggtcccttctacaatcgagcagctccttggacagactgtttctcagttatttccagagacccagctacagttccctggctgtttctagagacccagctttattcacctgactgtttccagagacccagctaaagtcacctgcctgttctaaaggcccagctacagccaatcagccgatttcctgagcagtgatgccacctccaagcttgtcctaggtgtctgctgtgaacctccagtgaccccagagactttgctgtaattatctgccctgctgaccctaaagaccttcctagaagtcaagagctagccttgagactgtgctatacacacacagctgagagccaagcccagttctctgggttgtgctttactccacgcatcaataaataattttgaaggcctcacatctggcagccccaggcctggtcctgggtgcataggtctctcggaaa

SEQ ID NO: 100897 - DNA, 356 bp, Homo Sapiens
cagagaatttgaactggagatgaactttattatccaggatgctgagagtataacatgcatgacagagcttttagagcactgtgatgtaacatgtcaagcagaaatagggagcatgtttacagccattctatgaaaaagtgttcggaatgtacagactagcacagaagctggactaattgaacaagtattgctgaaaatgagtgctgtagatgacatgatagcaggtatggggttgtctgtcaggaaagtataacttaaatgtttataaagtttcacatacttctctttatattctataggtaatgtagatttgttgacactgctttgatttaaaataaatggaaatgtatagaaaa

SEQ ID NO: 100898 - DNA, 226 bp, Homo Sapiens
ccaatctcttaccactacagtacttgcctgagaaatgccataaacgtataatatattcttcattattaagaaaaatccaaagttataagtttctcatcactgacattctcattacttttccaatgacaagatataatttttcaaatacaatgtctcaattatgaaaataaagttaaaagaccaagggtaaacttattcaaaattctgaattataaatgattcggga

SEQ ID NO: 100899 - DNA, 601 bp, Homo Sapiens
  misc_feature (587)..(587): n is a, c, g, or t
tttaaactacaagctttatgtgcatggcttggtcctcatgttgctgccctagctccggggcagatcattatccgaggacaccatcttgcattgcactaagaggtcattattaatgtctcagcaattaagctccttcccccaggctggtccactgagttgacactgcggcaaccctgaaatcacatgttccattgcagagagcactacacaatactctctggtacttggatgtgcttttcttctaattttgaatgttgtacattttccttcctctttgtttttgcttctgagtacaactttgtgatgtagttcatgcaacgcatagggtgggaagattggccatttttctcttcagatgatgtttcttcattatttgaccttgatctgtaactttctagtgtgtgttctgaaacttcgttttctttcttccatatcacatgtgctttcctcagcttcatgatgaagagctggactatgatgaagagtatgaaaatgaggaaggacaccagcgtgagcagcaggatgccacttttctctcttgccagtcctaaatactgaggatttgcttcggtggtcaagtcaggatncttgagtggtttgt

SEQ ID NO: 100900 - DNA, 502 bp, Homo Sapiens
ttaagggatatttgacaattaaagattgtatatatttaaggtacacaatttgatgatttgatatgcttatatacattgatctccagaacttactcatcttgcataactgaaactatgtaccccttgaccaacatcccatttgccccttcccctagtccctgatagccttcctttaaatatatgctcagaagtgggattgccagatcataatatagttctatttttaacttctgaggaaactacatactgttttccatatggctatttacattcccaccaacaatgttcaagggttcccctttctccacatcctcaccaacatttgttatctttcacctttctgacaataatcattctagcaggtgtgagatagtatctcactgtagttttgatttgcatttccctgatgattaataatgttgaacatttttccatatgactgtacctgttggccacttgtatgtcttctttcaagaaatgtctattccagtcctttgcccat

SEQ ID NO: 100901 - DNA, 370 bp, Homo Sapiens
gttgaatgtatgtaagtagcatttggtaactgctaagaggttacaaaaacattattggtaaaaaaaatttccttagttctgatctggttggataagattttatcataacttttctgggtctcaggctctgatgtttgaaaaagaagggaatatattgggttttaaaaaagtgtattgtgacttaaactgttataagttatccttccacagaatacatcagagctatcagtgctttgtacatttagatgtttttacttgattattgtttaagaaaaatatactgaatttatagaaagcaagtattctcctaattagcaaaagttaaaattttatctctaccattaaaattacaatagattttgataaaaaa

SEQ ID NO: 100902 - DNA, 532 bp, Homo Sapiens
  misc_feature (475)..(475): n is a, c, g, or t
aacaagtggaagatctgctgggtttcaggaaaaggctggtagaggcttcggctgctgtctggacgtctggaccctgccatgtggattataaacccaaagtgtacagccctaggcgggagggggtggcgcttctcagccggctgtcccagccagccccgcagagcgcccacggacagtgtccactctggcaaggtgggaaaaggcactccaagtgcatcctccactggcaacagtgggacaattgcccccgacggcggcaccggggctctgtggaatcccgatcgttccgagaggtctggagggccccgtggttcctggagaaagcaggacgcagagaagaacaaatgaggctcacccacgaggctgggtggccagcagtctgggcacacacgagcaggtggcatcttggctcttgcctgaggccagtcaccctgccctgaattctaccctactccaccttcagcccctcccgcgngggtagcgcctctcattcctgatgtctcaggcaaccctggcagacccaggtccaact

SEQ ID NO: 100903 - DNA, 576 bp, Homo Sapiens
tttgtcccctaaagaaaccttgaagtgcaggttttggtgttaagcagagaaaggtttcttttcaacatctgggtggtgggatgtgggccagaagttttaggcaggatgtgattgtgccacctgggaatgcaacgtttttaattaggatttcccaacagatctgggtttgtgtttgaaatgttgcagttctggtcaaaggcgtgtcaggctgcattgagcggaaggaaggggaggagagcgagcgctctggggcagatgggactctggttttgtgtggaagtgaggctcagtccaccttgcgggcggggctcctgtccctgccagctgccttcccacgctgaccctgagtcccatgggagggaagcactgggtcactcccgcaggcgtgtgtcaatgccttgtgtacatttccatctaagattctaaacagtggggcccggtagtgcttcccaaggcaggcatggccgagagcattggtgtcacttctgcccctgttctgttaactagcaagaggaggagaagcagcagcacagaagtcctcaagggataagcaaaggaaacctttctaaactgaaa

SEQ ID NO: 100904 - DNA, 372 bp, Homo Sapiens
  misc_feature (285)..(285): n is a, c, g, or t
gtgtgagccaccatgcccagccagacctttcttgtttttgatgtaggtgtttattactaaatacttccctcttaaaactgctcttgctgcatcccatacatttttatatgttgtgtttctgttttcactcattttaagacatttaaattttgtttcttaatttcttcattacccattggtcattcagaatcatgttatttaatttccatttatttgtgctgctttaaaagttcctcttgttattgatttctaggtttaatttcattgtggtcagaaaggtacttngatgtggattttaaatcttttaaattttgtgatttgttttgtggtttaacatgtggcctctccttgaaaatattgcatgtgcttatg

SEQ ID NO: 100905 - DNA, 537 bp, Homo Sapiens
  misc_feature (18)..(18): n is a, c, g, or t
ggaatctaattaaactanagagcctctgcacagcaaaagaaactatcatcagagtgaacagacagcctatagaatgggagaaagtttttgcaatctatccatgggacaaaggtctaataaccagagtgagtctaagaagaacttaagcaaatttacaggaaacaaacaaccccattaaaaagtgggaaaaatatgaacagacacttctcaaaagaagacagacatgcagccaacaaacacatggaaagaagcttaacatcactgattattagagaaatacaaatcaaaaccacagtgagatattgtttcaccccagtcagaagggtgattactaaaaagtcaagaaaccacagatgttggtgaggttgtggacaaaaaggaacatttttacactctgggagtgtaaatcagttcaaccgttgtggaagacagtgtggtgattcctcaaagacctagaggcagaaatactatttgacccagcaatctcattactggctatatgcccaaaggaataaaaaccattatattaatattaaa

SEQ ID NO: 100906 - DNA, 347 bp, Homo Sapiens
  misc_feature (312)..(312): n is a, c, g, or t
ggcccccagagcattgaagatgaggtcatacagctaaggtgatgaggccaatattcaaactcaagcatctggattgcaggctgcactttttgatcgccatgtctagcctcctctatacacctgctctgaccgatttggtattcaccacgcccaagaggatactgaacacctgaaatatggctggctggagttgtgatgtactctaagtataaactacacaccctatttggaagacagtatgcaaaaaagaactataaaaagtctctttggcaattctttatatcaattacatgttgaaatgataatttggantatattgggaataaaaacattattaaatttaaaaa

SEQ ID NO: 100907 - DNA, 512 bp, Homo Sapiens
tagatcttgattttacaggtgagggtggttgccaaaggtgataagaaaagcagccaacaggctccctctcacttaagagagttctaattaataacactaaattcttcctgagaaatgactcctcttggtttggtttgaagtttatcagtgaaggaaaaggcctgagataggaagcagtgccctcgcttcatgaggtggcacatcttcggtggccgttggcctggtcgagctttggtcagctgcgtgggtgcctgtctcctgtctccagcggcagggcatggttcttggcagcctggtgtccacacggtgcattcctgtccccctcggccccaggctggctcagctctccagtgctgcggcgctgtctttgcagcattgccatgtcaccgtagcccccttcactcttggaagtttggggcttcaaggtttattctggcaagaacacctcggagccactgcattgttttgccaaaaacttactgcagattaagtaaagaacttagatgctaaaa

SEQ ID NO: 100908 - DNA, 142 bp, Homo Sapiens
aatgtggattatctgctagaataaaatttagtagatgtctataaattttctacattactagaatgctgttcaatcagatattgttcaaaataaatcatactgctcctgagaaatatttttctcaggagacaacctaaccaaa

SEQ ID NO: 100909 - DNA, 389 bp, Homo Sapiens
ccctaggcacagttcgagtgacaactgctgcccatcttgcactgctggtggctaaaaacatctccttctttcccagcaatgtggagcaattttctgagggcaacattgatgtgtggtggattgtgcatgatggggggatgcttatgctactaccattcctactgaaacagcacaaggtgtgggcaaaagtgcagcatacggatcttcacagtagcccaattagaagacaacagtatccaaatgaagaaagacctagccaccttcctatatcacttacgcattgaggcggaggtagaagtggtggagatggtgagaaagctgagtttgagatacaagaagttcattcccccattcctctccctgtctttcttgaatctttgctggtttgg

SEQ ID NO: 100910 - DNA, 641 bp, Homo Sapiens
ctgtaatatcaagcgcttagattaagcactctcttgagtctcatccaatcctgaatttgtgtttataaaaccgatccagagagtgtgagtaaatctgtgaacagctacttcagccccgaacccagtggtgttgagtggactggtcctgcacagagggacaatgcacctgcatgggcaaaaactggggctgggccagagtcatgggcttcaatccctgcttttcagccactagcaagttgttcatcttctctgaacttcaatatcttcattcgtaaaatgtggacagtaatagctcctttggccgtttcgagtttaaattagataatgcaagtagaagacatagtacaataatatctaataactaccatgttcaggaatataagtaccaataaaatggtacctattgtattaatagcatttgagtgagaatttttaagtctttttatttctcatcttttcatttctacctttattggatttgtagaatctattacagtcaaatcatatagtttggtgttgtggtggtgatgttttttgtttgctttttaacacacttgcctttacttgttttggcagaagggatcctaattcattcagctttctcgaatgtcatataaaaacacataacacatgttcaaaaa

SEQ ID NO: 100911 - DNA, 435 bp, Homo Sapiens
tcttacaggacttggcttcaatgtcaccttaactggaagcttctctccctctccagaagagcttcccattgcacttgatgcatgcactattatttgatcatttttgagttacagtccaagtctttttgtacctgaataacatgttgcccagtcagtttctcttcctggattcagaagtctttcatggtaggtccagaatgaaaggtgatgtttggggctcaggtgtgttgaggtccccatgcctggactatgggtgctgagtgggatttacttgtccatccattttctatattccagcactgggaaactagtatttatcgatcttgataagatgtcatttaaattccacttcgcaagaaccacaaatggaagaaaggccatgaaaccgcaggacagtacttgttctcaagggaatcttcagcttaggtggatctt

SEQ ID NO: 100912 - DNA, 567 bp, Homo Sapiens
aagaaacttatttttgttctgtttgagcaaggggtgaggatggagtcaacgctataattagacttctgaaaatgagcaactactagagaatcccaagagattctttcaggaactggaaaggagcagagcatatgaaaataaagacattgtacagagtcagcaaaccatgagatgcactggccaaatccagcccaccggcttgttttcaaacagcttgcaagctagaaatggattttacattttaaaaattattggaaaaaaatcaaaagaaattaatatttcacaacacacgaaaaattatatgaaatttaaatttcacagaccatagataaagtttcattgtaacgcagccatgctaattctttaggtattatctatggctgctctcatgctacaatggcaaacttgtgtagttgtgacagaaaccacagggttcaaaaagtctaaaatactatgtggccttttacagaaaaaagtttgataaaacttggtctattttaacaatgtaataacaattcaccacagacaaacccaaaattacaaaattctcagtctgcagtattcttt

SEQ ID NO: 100913 - DNA, 503 bp, Homo Sapiens
  misc_feature (417)..(455): n is a, c, g, or t
tgcctgtgtgtgacctctaactatgtgcctggaaactgaattacatgtaattaatgctgcaaacaggattttcttattgcctaagcatgaacttggtatgaaaataatagttaataatttactatgtaacttggattcttataacctggactgtaagtttgttttagctccagtgggagtttccttttcaaagtatgatgaaaccatcctcatcttttctacccctggactaatcatttaaaatggatacagacactttaaaactgctgaagttatcttgtgttaagcaattaagacttctctgtctaatcatgctacttgttctgcttttgtcaattgatactctcatagcccttttgaaaaagtatgtttttgtagaaattaagttgtatgccctcaggacgtacaacttggttnnnnnnnnnnnnnnnnnnnnnnnnnnnnnnnnnnnnnnnagttctgaagcatgtttagaattttctgtacttgtataggtctgattg

SEQ ID NO: 100914 - DNA, 549 bp, Homo Sapiens
gcaggaatgttacctttcctttactacagaggaggcaccagcaggggaactctcttggcacacagttggagtcctcagaaaatgttgattctcatggactcttctctgtctctaatgtacaagcagtttcaagcaggggtcttgttggtattttagggggaaattgatggtattactttgggattaatttgataagactaacggtcattttacaaagagaaagtcatcccataagtagtatggctgggaagggagaaggaaggagggcgcaggggacctgagcaagcattgaaatatctaaacgagaggtaagaaagcaagggcagttatgctgtgattgaagatgacacttgcacccctatcatctccccaccaacctctggcccagatgacttactggccacaagtgaatcaatgaattcttctcaggaagaaaaccagtttgcctttttaaaatgctgacagtgaaacccaagtgaggaaactcacctgctgcacccagcgtgcagcccacactccttcagtggtcctttaggagttggcggccgc

SEQ ID NO: 100915 - DNA, 567 bp, Homo Sapiens
aatcctatccaagtatgcagtacgctcttgggtcgtctcatgagacccaggggcatgttggaaagaactgagagaaagagcaacaaagcggcgagtggtgtgagagggcagcacgcgctgtggggcccttccagagaaatgtactgaaaaagtctacgcaatgtctgggatttgctaaacaatacctggaaagcagacaggtttttttgccattcctccaggacatccaccataaggaaaggagaccctggaccaacattctctaagatgtttatatggaccagtggccggacctcttcatcttatagacatgatgaaaaaagaaatatttaccagaaaatcagggaccatgacctcctggacaaaaggaaaacagtcacagcactgaaggcaggagaggaccgagctattctcctgggactggctatgatggtgtgctccatcatgatgtattttctgctgggaatcacactcctgcgctcatacatgcagagcgtgtggacccaagagtctcaatgcaccttgctgaatgcgtccatcacggaaacatttaactgctccttcagc

SEQ ID NO: 100916 - DNA, 586 bp, Homo Sapiens
tttttttactataaaaacccatttttattagcatgagtggggcttaattccagttctgagcagaaggaaacagtttttcatctactaacatgtatcagcagacagatgtgacagtttccaaaccatcatctgtacttcttatactcacaaaaatcagggcatctacttcatactacccttttatgaagtttggcaattctctgtatgtgaatatctacagagggcaaattgtctcatcagagaattattttctcaaagatggaaaccatatcttctctggataccataccagtgggcaagaatattaaccatttctaaatggctattgaagatgactatacgattgtccccctaccaatttaaacagtttcaaaatcacaaatggagaagaacatatagaattttgtgtacctacattgcaaaatcttgatttttcatgtggtattatgaaaacatatggtgttttgacttattcatttgaaacactgcatatagcttcattcattaactggattaaaaggcacatttcgaaaaatcttcattaaaagtaatactgtgaaaagtttatttgcatcgattaattcct

SEQ ID NO: 100917 - DNA, 355 bp, Homo Sapiens
gtatgagccactgcacctgcccagataatcaaattttttcatcaagtgttttgtgtttcatgccagctaaaagtaaagcaaattaaacttcagaatggataattctattacacctaaactaaaatctgaaatcttgcttcaaatattcaacagtgtaccaaactgataatattgtatatttttagatataaaaattcaaagtttgctatcatccaaaattttcagggtgatgaaaacctaggtcttctcagatattagtattcaataccgactgcttgtttagactccacaacatttgttgaaaaagtcaaggctcattaataatacaatgaggccaacaagagagctgtgttct

SEQ ID NO: 100918 - DNA, 564 bp, Homo Sapiens
  misc_feature (153)..(251): n is a, c, g, or t
ttcaaggtatgtaagtcagaaagtgaagaagctggtgaatccactacgatattgtgaagttttagctcacttatttatagatcaagcaaatgaaatgttaggaaagacaagacaactaataaaataactaataaacttgatctaagggcaatnnnnnnnnnnnnnnnnnnnnnnnnnnnnnnnnnnnnnnnnnnnnnnnnnnnnnnnnnnnnnnnnnnnnnnnnnnnnnnnnnnnnnnnnnnnnnnnnnnnaaaccttcagttattatacatgtttccctccagaactcatgaaatagacctccccagtacattttataaggctagtatgatcttgatgccaaaaccaaagacaacttggggaagaaaaattataggtcaactttatttataatttagatgcaccagtctcagtcaaaatatttacaatcaaattcaacaatgtttgtaaaatacaacacattataaccaagttgggattgaagatcaatttaaaattggaaaaatatgctgatgtatcaaaaacctaagatcacaccaatagatgcagaaaaaggattggaaa

SEQ ID NO: 100919 - DNA, 469 bp, Homo Sapiens
  misc_feature (235)..(235): n is a, c, g, or t
tttaatcatgaagggatgttgaatttcatcaaatgcttttcagcatcaattgaaatcatatggtttttgtccttaattctcttgatatgatgtatcatactgattggtttgcatatgatgaaccatccttatatcccagagataaatcccacttggtcatgataaatttggtatgctagtatttttgttgagaatttttgtatcaatgtttatcagggatactggtctgtagttntcttttttttgatgtgtctttggttttggtatcaagataatactggcctcattatagaatgagtttggaaatattcctccctcctttatttttttgaacagatttaataggactggtattggttctttaagtgtttagtaaaattaagcagtgaagtcattgggtcctgggcttttgcttgctaggagacttatgattacacttgatcttagccaaaaggctgagaagtgatag

SEQ ID NO: 100920 - DNA, 540 bp, Homo Sapiens
aagcatgaagtgcctaacccagcttagcggtgtagaggtggggtcagcaaataagggagatcttcctggagaaggcatatacctaagctgatttaggagagaccacttttggctaggtttattgtactacttgattttcaagtaattgggcttatttattctagagaaaaagtcttcagtctcttgcttctgcctgcaaagcaaggcagagtcagcaacatgggcagtctccccactggagaacgctgagtcatgcatgggcttctccaagtttccatcagatgggatccagtgttgaatccagtgcaggactggagtctagctggcaaagggtaaatgcccccaaagccttcctgccatatggtttccacgaaggcctgagagtcagctgtacaactgtcttgtcttggccatgtccctgtttggtccctgccttgttctcttccctttctcaatttccaagctccacccactcctaaaaacaccagtcattctgaagtaaaaaatggacaataaacatgaatattcaagattcaaaaa

SEQ ID NO: 100921 - DNA, 495 bp, Homo Sapiens
tttaatagtgatttaaaaatctatttgcagatgaagtgtgtttatctgcaaatagtcatctcaactcaacgcgaatgcacaaagaccgataaactggaactaggatatccctaccaaatggccttatacctgccttcaaatgtcatctaagtaagatcttagaatctttcgaatgagttcattactcacccgtaactccctatcttaaatgcaaatagctcactgttgaatagttcttccttacacatgtaaagagttcctcaatatgggctgttacatttattaaagcatacagtgaaagaggcaatatctcttcccttagaaatgttaccattggaagagatattgtattgcataggtataaatatagatttttccaaatctagaaagccaatgtgaatttattctatttacagtataaactcaggttacagtgcaaataatagaggttctttttctattcctttcgtaaacttctgtttaaatagcatcatc

SEQ ID NO: 100922 - DNA, 415 bp, Homo Sapiens
tttgagatggagtctttgctacattgccaggctggctgagtatctcgattctcccacctcagcctcccttataactgagattacaagcacatgtgcccagcttaattctgctttttatataatacttcccactaggcataatctaattgcagtgtgggtcatcttaatataaatcagtaatctaaaaacattttaaacaactaatttggtgacatcctagaaaagtatgcatggtaacacaaatcccagaatatatgactctgatttatataacaaaatttaaccaattagcttttctatttaatgctttaaaataaaatgaggaataatttgaaaattgaataaacctagagaaattgtggcattctatatgtaatcctaatttacaaaaaatgtgagtaaaacagtttttact

SEQ ID NO: 100923 - DNA, 576 bp, Homo Sapiens
  misc_feature (454)..(469): n is a, c, g, or t
cttgaacttgatgtgaagtttgtaattggaaagggcaatgatggcatcctcggcacggcccacacactctgtgctttttccatgaagttcaaggaaaggaacctgaagattctcatcctcccggatcagctgcttcctgggaaagatctgattggcctggatgcactcaaggctgtgccgagtctcttcatcctggaaaagtccaaaaccttaaaataatttcaaagcttctaatcattcatatttggtttttctgccatatctgctagcataatcacaatgaaagtacaaagaccaaggtgaacaggcagaaaagctcaaggaaacaatattgatcttaaaaagtttttctatccaatacattagttacatctagtctgaaaacacattgatgcaaaaaaaatgtcaaagaggttagaatatttctattaggcactaacagcttcttaatacnnnnnnnnnnnnnnnngagacagaatctcactatcacccaggcagtggtgcactggtagtgtagtgcacaggtagtgcggtggtgtaatcttgggcaacaagagtgaaactccatttcaaaaa

SEQ ID NO: 100924 - DNA, 487 bp, Homo Sapiens
gtaaacaatacttaaaatgggaaacacatctcagcacctagaagcgaaattagtgacaaatgcgagcagtttttgctcacagctacatcacttatgaccattttaagcacagaagtttcattttctgacccactaactggctcttccttgctcttctatctccataatctcacctttaaaagaatctaatagatggtttataatgtaaaaagtatgtccatgttaggtgggaggagaatggtaagtatccagttacaggttattcaattttcatttcaatgtgtattctataattgggttctctaaatactaatacttgagacattcctccaaccctgttagctgttatcataaatcactgttacatacacttgggtacaccataatttggccacaataccattctaaagcattgtgttggcttctagagtgccaccgcacccagcaaaactactcttttaaataaatgtacgatgtgaattggaaa

SEQ ID NO: 100925 - DNA, 490 bp, Homo Sapiens
tttttcaagagattagaaaaattttattcatcatcccaaactggattatatattacaaattctgatgaaaataatattaaaggtattttcaagtagtaccacaaactatctgtacctgaagataaaaccacacagtaaactggtaagtacacattgaatcaattcatctttaaaatatcactttgtttagaaattcatatatatgtttttgtagttatgaagtgggagggacacacaaatagctacataagattttcatttaacaaacatatgaactattccccatgctttgaatgaatcatcagaaggctgtaaaatcctgttatttttttcaaaggtgcatgaaacaatatttcatttccaatagcaaaaatacagtacttctaattttccttatattctctttcaaccctactgtgagagctgcttataattatataggagcttgttaatgggtccctacaaaatctctgtattaggttgggttaga

SEQ ID NO: 100926 - DNA, 590 bp, Homo Sapiens
  misc_feature (477)..(503): n is a, c, g, or t
tttgtgggctggtctcatcatccagtcctcacctcagattatttgggctcagtcccaagagaactttccaataatctttttctgccaatggttagtggactcctttgagttatcagggggtttgacaagggtttttggccagctggacatctggccaccatgatcagtgactgtgttttctctttctcgttcctctcaacagatacagttggatataactctgaaattattttttaaaaaccaaacaagttgttcttccaactgttcccttaaatatttgtggatttttattacatggaactaaattaaatggtaggaattggtgaagataacttctttactgtctcttttgctgtttagtagttctgaagtgatagcgtgccttctaggctctagagcagggattggcaaactacatcccatgggcaaaattcagcccattgtctgtttttgcaaataaagttttattgaaagacnnnnnnnnnnnnnnnnnnnnnnnnnnnggggggtgggaggggaagaaaaactctatttttgtaaaaagggaaaaagacctcgtggagaatttttactggggattcttgaacttg

SEQ ID NO: 100927 - DNA, 540 bp, Homo Sapiens
  misc_feature (298)..(298): n is a, c, g, or t
ttcttcctgcttatcaggactatatgatcaaccaaatattctttaaagttccttctaaggagtaagactatcaggttgtcttccttaaataagctcccctcagacacaagctgcaatcaacacggggagtcctaaatttttgtgttcacaatgtaatacaattgagaatcttccttgtgtgcactttaaaaacaccctatcctctgcctccaatcagtctctggcaatagcttgctattgggggacacatccctaaatggggctccactccccagagctggggctatgccacatcagncagggaattctgggaccagaatctgaaccatccttcttgctgacccagtgtgtaccactgaccatctcagtctcattggagttaggctcaacagatgtttcccaagcattctgccatgtctgtgattgatgtggaacgtgtcattccttaaaaccttgagcttggtaaaattttctacttcccgcagatttgtcaacagagccctgtgcattcattcccaggaggtaaagaagtggcatgca

SEQ ID NO: 100928 - DNA, 518 bp, Homo Sapiens
caaaggttgttaaaaggtgcagatgaaatgttggggtggaaagttggatctggggcatatggataaatagcctgctcccatgaatattcattatgatgagacaagctaagaaggtctgagagaccttctgataggagattgagatgcaatctcttagcatagctagttggagctttttgtagctagagagactgaggtgctaattaaagaataaagcagtatccagtttattgagtttctgcagtggaatgtttaaggataaattgttttgacatcatgctctgagcttgttggtcaaacttcatacctctgagaggactggatggaatgattagctgagcctcagtttattcagtttattatttttatcactgttttaaccttatgcagaatattgatctgtctgcaattttagcatatgcttattttagtgtagttgtctttagaaattctaaaacaagattgctagatttctcattctccttagcatagatatttgaaagtattaataattactg

SEQ ID NO: 100929 - DNA, 628 bp, Homo Sapiens
  misc_feature (204)..(224): n is a, c, g, or t
gctgggattataggcatgagccactgcgactggcccaaaatcatattatttaaaaatcaaaaaggactagccagatctgtaggatacagaaggaactaataaccctggctacctgtggggagggccccagaggtggaagtgagactttttattgcatatttttaatactttctcaattctgaaccacatgaatacattaacaannnnnnnnnnnnnnnnnnnnnaaggtgagttgaagtcttgggaatagactgaaaactaacaaaaccggccccatcgctgaggaccaggtgagcctcttcagaatgcatcatttccacccatactaaatgactacatcatctctttggacatcccaattcacaaaagtctgaagtagttcccagtaactgcagggttcttgaccatttcaatgtcctctgtccacaggatgggacaaaaacaagggcagatgctgtagtctgcaagctcatatcctcaaagagaccaaaatgccatttataattttactgtcatattcactgcagccatgttatttaaatagtcattacagaatcatgaaaataaccacaagaacttttaagtgtgaaataaaggtctcataaatttctgttcctaaaaacccaaa

SEQ ID NO: 100930 - DNA, 524 bp, Homo Sapiens
cagtatctctgatgaatattgtaaaaatcttccacaaaatactagcaagatgaattcaataagacattaaaaggatcttacaccatgaccaagtggaatttatctctgggatgcaaggatggctcaacatatgaaaatcaataaatatagaatatatacaatattaacaactgaggacaaaaatcacatcatttcaactgattcagtaaaagtactgacaaaacataatacctttttatgataaaaacactcaacctaggaatagaaggaaattatctcaacataataaaggtaatatgtgaaaaactcacagctaacataatcattagtgaaaaatgaagtttttcctctaagatcaggaacaaggcaagaatgcccactcatcactttcttcaacattgtaatagaaatcctagctagagcagttagacgagaaaaagaaataaaaagcatccaaattggaaaggaggaagtaagattatccctaatcacagatgacttggttttacgtgtacaaaaccaaa

SEQ ID NO: 100931 - DNA, 721 bp, Homo Sapiens
tttgctcagtggtcaaagttctcaacattcaagcttataaataaatgcatatcttggcaggtatgattgtatctgtatattatcattacaagagagttcagtatagagaatgatgtcgaggtgactttagggtaactcatagtaaaagtggcttgttaaagtgaattctctttgtagagaattactcacaagaaatactttcttaatcactggttttataacaatgattcacgataacagaaactcctgtgttccctggtgggaggggaaggttgagctgaactgtggactatgaacattgtcctgccaaaaagctgtaattcattttgaatttctctgtccaccaccatttcaaatatctaaaaattaacttagctaaattcctaaaccacctacaaaaactgaaccacatacaaggatccagaaaatgtaaaagggaaggctgttttttctccccccattggctccaaactgattttttaatttcaaaactcaatccagaaagacttcatacctgtttctgttgtttcttactgtttgagaatattatttccaattatatacccatcactaatagaaaaataaggaatttctgtgtatttcctgaaaatggagttttaaaactcacatcctgttaaatcacccaaagaattcatcattaagacaagataattctgttaatgtttatctgctcataccatttcatctcaaccgcttttcc

SEQ ID NO: 100932 - DNA, 431 bp, Homo Sapiens
tgaaaaacagtaacaaaggaagccccagctgtccatatggtaaaggaagccatatatcaaggaggacagaacctactgttccacctgtgttcccaaatgacctcgtggaacagaaaccctttcttagcctgaatgtcatgtgaaacaaacaaataaacaaaaacaaactcctgtgttgtctgaatctcagcattcttgtgaccttctagacaaaacaacatatatcctaacatgtgcatttcattttcaggggtaacacgattagataccctaaaaacaacaggcaagaaaaatgtcgaattttacaaacaaattatctaatcttgtaactgaagattgcagttgaaattaaaataaagaaactagtacctaggggaagaaaaaagaacacagagagaaggggggtataaagagtttaaaagtgacaaaaa

SEQ ID NO: 100933 - DNA, 145 bp, Homo Sapiens
gctttggctagataggccagagtttgaacccagcaatttcagggcagataagctagtgagaggccaggcttgggacaatgtcttctccctagactacacttccctctggctagatctctgggttttaaactgtcagggccaagac

SEQ ID NO: 100934 - DNA, 441 bp, Homo Sapiens
tgcgctgtattatctacaggtacaatcaatggaccaatagttcctaaattagtaataaggcttaccttacaaaagtaatgaaataacactgatatttctctttcaaaggctaacagcaattcttggtcctgagctattcagttcatacaataactactgtacatgctacaacatctgaatattaatggttttgctgcagattctgggtatgaggattagcttgaaagcaatacatttgctaacatgaatcatgactcacattatccccgtgtgctttactacctgtatatgaatgcaaatgttgttacagaaaatatgcttgaaatgtcaatacagtgtgcaattagcgttgcattgtcatgctccagcatgtgatatctgtatggtgaagttatttcaattactctgatacattactataataaaaaagtttaacctaaa

SEQ ID NO: 100935 - DNA, 509 bp, Homo Sapiens
gtttgatcccaaatggtgcttatcttgattgaacattcagaacaaggatattattttcagtgattttgtgagatcagctgaaccacttatgataataataataaaaaagactgctttgccctcacgtcagttgtacatggcatggaactttaaaaattttaatataaactttcatccagttagcttcataacttttacgttccagaattttgtttattttcctgtcaatgaaagcaatttttaaagataccagtgggacaggtttggttttttaaaaatctcatgtgttcaaattaacataaatattacacgtcaatacactgtacatggtggtaatagactctaagcaattgccaagatgtattctatttttatgaagtgtatatatattaccttagtgtgcattttctatataatatcttgatggactcttttataaaattattttataaaaaacaatgttacactaaaatcagcctaaataaattttcacaactttttttcataaa

SEQ ID NO: 100936 - DNA, 750 bp, Homo Sapiens
  misc_feature (446)..(471): n is a, c, g, or t
  misc_feature (558)..(558): n is a, c, g, or t
cccggctccatgttcgagagacagagctgctgttcctacggcggttgcaggatgtgcgggcagaggaaggccaggacgtgtgtctcgaagtggagacaggccgagtgggtgcagcgggggccgtgcgctgggtgcgaggtgggcagcccctgccccacgactctcgcctgtccatggcccaggatgggcacatccaccgcctcttcatccatggtgtcatactggccgaccagggcacctacggctgtgagagccaccacgatcgcaccctgggcagggctcagcgtgaggcgtgagtgccccgtcctctcttaatgcattacccaccctacaccacagccttttctggctgtcctggagtccctcaggcccccaccaaagtgcccctcatcgctgagaaaagtcacccatggccgtcccagcagcagcttgcccaaagcaaaacnnnnnnnnnnnnnnnnnnnnnnnnnnaccttagaaatccatgtggattttgcattccattgcatatttccaagtcggctttgctataaacacaaatattctccagaaagactntccatgggcatccttcaggcatgtattctagggatacacatacccacttaagtagcagggatggctgtcaaacagcaccccacacctcccacccaaagctggagccctctgtttcctatgtgacctcatgcaagttaacctctttgagccaagtctccttaaaaatggggctgagaccaggtgcagtcgtca

SEQ ID NO: 100937 - DNA, 383 bp, Homo Sapiens
agaaataaactgtcactgatgtgacagcgttctttctttattctaataacatgtatagatctaaagcaggttgtgttgtttacatgtttctacacatttcatcctttaaaaagttgttgagagaggttgtatttaccttcccaaggttggaaagcaggggaatttcccagtgtcctagttttccaccagaggaatatgtgtaagtagcaaagtatttgctgcttacatatagtgtgtatgtatgtatatatgtaaattgtgtgttaaagagctgatactgattttcatatgacaatgttaggcaaaggcctccctgcatttgaagagcaggttttcatttatatgtatttttgggataaaaaaataaaatttgtaaatataaa

SEQ ID NO: 100938 - DNA, 610 bp, Homo Sapiens
tgcggccgccaactttcttaaaaatttcaggccatcagcaagcagtttattgtcccatgttttcttcaaacaggtgagctgatctatcatccgttgtctcgatgtttttaattactattaaaaagtcactttattttgttggcttgatgagatattttggttaccaaggttcttactaataactttgttacaaaataaagttaaaaacaagaaaacttttggtagttcaattatagactttctaaaatactttcattcttcaaaacagaatgagtaaaaataaaatggactatcatcacattactgatgcttggtgtatattttgattaatttagagacattttctatgttggctagaaatgatgaaagggcaaagtaactctgataagaagtcagtttctttggctcttcttcctgttttcagatgaccagaatcaaaggcagttttaggggaaatacctgaaaacaattttaaacacatttaacataaattctttaaaagttatttattgctaacaaaactgatatattgaaatgatatatcaacagccttattttgagtttctttaacagatgaaagaagaaagccaggattcaatactttcactgt

SEQ ID NO: 100939 - DNA, 629 bp, Homo Sapiens
tctcacttttttgagaataggtttgataaaaaggcagtaatggtaaaacagactatatctgaaatctggagagtattaagagccatatattatgttaagtacccaacattaatattatctaatttaaccatcaccacaagcctacaaaattctgatactcttcctcactatttagatgggaaaaaatgtagatgtaaattttttaaaagcaggttaaaaacagtactcagtccctaatcctacagttattaacatacagatgtaacacagaattgagaaatagtagacaatggtctctacatagtgaaaaagcaggtgatttttatttctttgtgcacctgtgtagtttttaaattttttcctccaaaattttaaaatttcattaacattaaaatagtttagccagatcaaatgattgtaaacacactcagggaactcctatttaaatggtattctattataaagcaaagagaataatcaatgctcttctattataaagcaaagaaaataaaccccaaccttactataaagtcatagaatttaaatatctatatcaaaaaaagtcaaaggagattctttaactttcttcttaccaatcagtgaatctcagacagggaactaaagaatta

SEQ ID NO: 100940 - DNA, 567 bp, Homo Sapiens
  misc_feature (152)..(228): n is a, c, g, or t
catattctggatatgatacttaaagagccatgagcagctacattctgcctatcagaaggcatttattaaatgactgcttgctgaagatgtgtccaaagagatcctacattaaggtcatttgtcagaatgatgtttgtgtttgtttagagttnnnnnnnnnnnnnnnnnnnnnnnnnnnnnnnnnnnnnnnnnnnnnnnnnnnnnnnnnnnnnnnnnnnnnnnnnnnnncggccatgtgttttatttatagctcttaaagcccagatgaagaaatcacatttttgcccatagtgaagaaacatttggccattgattagtccttattttcagtgactgtcctgttttcattagattagagagaccctgtgtgggccacagttaatataaaccattatcacttttaagtaaacctgcacatcttagatttcataatttccttattgttctgactcaaaatgaactaagagcttttcactttttgtttgtaagttctcagagagtcgggtctgcaagtgcttttgcctgccaggattttgtactcaaataaatgctatttggcaactaaaa

SEQ ID NO: 100941 - DNA, 519 bp, Homo Sapiens
agatgaagtcctactagagtaaggtgggcccctaatccactatgactagtgtccttataaaaaggggaaatgtggatgcagacatgcacaatgaaagacaccatgtcaacatgaagggagagatcaaggttatgcatttacaagccaaggaatgccaaagattgccagcaaaccaccagacactgggagaaggcatggacagattctaacagccctcagaaagaataacacccgcttacaccttaatctcagacctccagcctccagaacctgttaaggtacccaatttgtagtactctgtcatggcagtccttgggaactaatacacttactcattattattaatatctatgttcattaggttataatttggtccccatctctttaaatactcaatctcctctccaaggagtctgcaatggtgcactaccagtgagaattcttcaagcatctagaaaaagtgggaaaaaaaatccagtgaaattatgaaaacatttcaatgcttagtggctcacttac

SEQ ID NO: 100942 - DNA, 145 bp, Homo Sapiens
aactctcctctggaagtactgtaattacagatgtgtgccccactcctggcctcataagttcttcttaagtttacatcttatattcattgtctattaatacctaagaaattactccaaaaggtagtgacttgaaacaacacttaaa

SEQ ID NO: 100943 - DNA, 175 bp, Homo Sapiens
ttgggggtgggaaggaggcatatttatgtgcaagctgccaaatatttgagataaggacatagtctttgaatgaaaaacagggatatgagaggattgattcagttagccgtcttggccaacccaagttaactgtacttcatcttagtctatgttggtgttagaaacaacaaaaagg

SEQ ID NO: 100944 - DNA, 475 bp, Homo Sapiens
  misc_feature (72)..(84): n is a, c, g, or t
ttttgtttctaagccaactctttaataaaaaattcataataaaaaagcaacctcaaaaaacccaaaacacannnnnnnnnnnnnacccaagaaactggaaatctgtgtcaccctgggcaggcattcagtcctattgtggaaacaatcagctggagctgagttgtgggtcttggtgggatatgtcctcaagtttactgtagatcttctggtcacctaagtatttacccttaaacctggttgatctcccttatgctgtcacttttctaaaccatataagtatttaatattttaatctgatctctcccaatttcttctccttatatttaaaggtacaacaacacaattttaacatttgaacacttacagggttcctagctcagtgcctcattaaccaaccagtagcaggaaaggggtaaggataaaccgtcaaagaaacaaatcctaaagccgtcaatgcctgtttttagtccatttt

SEQ ID NO: 100945 - DNA, 530 bp, Homo Sapiens
tttttggacatgtccattttggaagaaacttttgtgttaaaataaactaatatattatgggctagaacataaaattcaccaagaatttcaagataaaaatactaatgttttgcttgtttgggttatttcaaacaataactttgaaatctataattttttcaccaccgaccctctacctccttgcatgctcattctcctgtgtggctagatgcatttcggaaaagtgttttgaatattatttcagagcaagtatcattccagaaaataagtttaaagtttgaaatgtttattttttgtaacccatgaatcttcaacttaagtatcttctgacataaaagcattttcataattataaaagtgctgatattactctccacagtattatatctgatcctgcaaagtagttcagataccagagaatactcttaaacattttgactcacgcatttaattatgtttaaaatttatgtaacaagacattaaatgagaaagaatggaatgaaaaatgggttaaaagaatgccaaatcgc

SEQ ID NO: 100946 - DNA, 471 bp, Homo Sapiens
  misc_feature (181)..(195): n is a, c, g, or t
agagacaagaggtgtgtcccacgccctgtgcagtgagaagccctggaactccaggaccctgcttttttaggcagaatgctatggatgggccactccaaagagaaacgcggctggggccttctcactggggttgcaggccgtgggatggtgtgaacactccatgtttattcacatcttggannnnnnnnnnnnnnnaagggaggggtggccttgtctttgcaagaaggcttctgagtccttagaggtgaagctgtgtcctcattccactccccactgatacccaagccaacaaggagatgccctgacccactcatggccaaggacactcatggaaaaggccttcgtcctctcagtacagactgtgccaggcaggccaggaaaagccaagaaaatatggatggaacagataggttcctagcaaaatactaaagctgagccaaagtagaaaacttgaattaactaattgccaaa

SEQ ID NO: 100947 - DNA, 524 bp, Homo Sapiens
caggtaagttccctgggaacttatcaaaaatgcaaggtctcaagccctacccccagaccctctgaatcagaaactctgagggtggagccaggaagctgtgtttgaacaagccctccaaaagacactgatgcatgctgaagttagctgctgctttagagaaactgttaatgagtttggggaaataagagatacatacatgaaatggctggaggagactcaagcattatgcatgacatttagtgaacgtaaaagacggagtctagacaactttatttccataatattaacaaaggacaatcctctcttaaaattcctggggtcagatgaatttctaaattcagattttgtttttcaatttagaaaggtaaaatgtgcatgtaccatatattacataatacctttggtaaggtctggggtgacactctaatatactaattttctgcaagggaaatcatgaatgacataagtgtatgcttggattatctactgcaatgtaataaatgttcccaaaataataataaaaa

SEQ ID NO: 100948 - DNA, 555 bp, Homo Sapiens
tttgggctttgccttaggttgagagagccgttttttctccaattcaatactttttttgccttgaggaggccgggaatgatcttgcatggaagtgagccacttgtgcacacaaaagtcatctgcccctgaatagatgcagtctggatccaaaggagaccatgccacacaaagcagtcgaccttgatgtcctcggaaattgcacaggggctcttcccggagagcatcccacacctgggctgtaccatcataggaagcagataccagccttccatcatgatgtgggctccacgccacactggtaatcttggccgtatgccctgagagggtccggtagggctctgtaatggtcactggagactcagggctgctctctatgacagtcttcaggttgtgcacgtaaatgactgcattgttggagccagaggccatcagatagctcaattctggctggctgccatgctcatgatgccagctaatggtattcacaagcttgtgatgctgttggatagtacagatcagtttcaggttgggaatctgaaatatttccctcgtgcc

SEQ ID NO: 100949 - DNA, 566 bp, Homo Sapiens
  misc_feature (551)..(551): n is a, c, g, or t
tgcggccgcccccgcccgcccggggaccccgcggtgaccgcgctgctgggggttgagggacgcgttgcgagccccggatacattgtaccctgggggtacataatgaaggatgctgtacctgaaaggaaaagggcatctccaaaaggggacttcgcgggtggaatttccttccaaaatcctcgaggaacaaggtgtatttccgacctggattaatgaatcccccctcctatcccgcacttcctgtggaaacagtgtcaggatgtggcgcggacctatgtgcgtcccttataccaggacttgccttcaacgctgaaggtgaaccctgggtcatcctcgctgtattcaggcggcgctgcaaaggcttctgggcagccaataggcccttgagcgcctcagccccatcttgcttcagtaggcaaacggacgggtgtcttcatccacctcctaggccgtggtctacccttcgttcaaatgtttcttcctgctagctgactgtccaggtccttagctgtatcacattgttcaaatgtgtgtgcgcaggtgtttctttntcaactaatcatgca

SEQ ID NO: 100950 - DNA, 559 bp, Homo Sapiens
  misc_feature (43)..(135): n is a, c, g, or t
agtactacctgtactactagtagtagtaattactgaatacttnnnnnnnnnnnnnnnnnnnnnnnnnnnnnnnnnnnnnnnnnnnnnnnnnnnnnnnnnnnnnnnnnnnnnnnnnnnnnnnnnnnnnnnnnnnnnggcttatctgcttttatgtggtcacatagctgctgagtgatggagtgaagacttgaacccacactggtaactatcacaacaacccaaactttgcatctgtcagattgttggcagttggtaaggaccagggaaacagaaagcttcatgccctgctggcagaatataggctggtgcaggtgtcctggagataagcctgggaaagttgagctcaactaaggatgctttgacctgaggactgaagccctggtcaccaggggatgcgaacaagaaattgggtgcagatgaggtacatatccccacgggtatggtaagacaaaaggaggcatgtggaccacagaacaccaggcagctgcagtcaaaactgagacttagagggtcatacagcatcacaagcaagtctttaaaacataaggtaagttttttg

SEQ ID NO: 100951 - DNA, 443 bp, Homo Sapiens
  misc_feature (297)..(378): n is a, c, g, or t
  misc_feature (390)..(403): n is a, c, g, or t
atatccaagggtgagaaattaaatactgtgaacaaaaatgtaaacaggagactgacccgaagaagagaacccaagagattctgatccccattcctcagtcctggcaaccggtcaaaaggaaccccccaaaacaaaacaatataaagtcgtaagagataaccctgatagggctaggctatggagacactggatctacaggtactttcatttcttttctctgtttttccatgctgtgacatgttataaaatttcacaaatttaaaatgaatgaggccaggtactggtggctcgtgctgnnnnnnnnnnnnnnnnnnnnnnnnnnnnnnnnnnnnnnnnnnnnnnnnnnnnnnnnnnnnnnnnnnnnnnnnnnnnnnnnnncctgtctctacnnnnnnnnnnnnnngttggcggccgcaagcttatcctttagtgagggttaattt

SEQ ID NO: 100952 - DNA, 462 bp, Homo Sapiens
tgaccctcagtagatgacatatttcatgggtgtagggacagtgccatctatctcccttggggtgttcttacattcaagaaatgggttttcacacaagtcctgtcaaatacttaattccttacacaatataaagggattgagtttttcaaagataggctgactacttggaatgaaaagcatttaaatactgaagagagaaaaaggattctcttttcaacccttcatattctcggaaggaaaactgaaataccgagttagtatgtcctcaaccctggttaatttcccttgcaaacaaagagggacaggccttggtgtcagaagctttgccataagatgttacctagctaggatttttaaactggttttcattgtattttattaccttcaattaagaatagtttaaaacaagtagttttccatttatagcagtaaaataaatttgttcaagtatagcactgaatg

SEQ ID NO: 100953 - DNA, 164 bp, Homo Sapiens
gtattgatggaaataaatgctctggaattattgacgatgttcagaaaaacctcatgaatatattaaaaaccactggcatatgttttttatatgttttaaaaggatgagttttatggcaatgtgaactatatttcaataaaacttatttttaaaagttcaaaaaa

SEQ ID NO: 100954 - DNA, 600 bp, Homo Sapiens
agagtaatgatgaaaccaaaaggtcaaaaagtagaagaatagcgaatgtaagttattaaataaatgagcaagaagtatgtgtcagggaaaataaatgcttcttatattgttaataccgtgattccctgcccgctcaccccgtcactcaacacttgatgcatttgttttggaaagtgccattttatgctgagatactggtattgaaaacttccctctttcccaactctgtcagaagttctcttgctctttggaagaagccgagggccttaacaaatcagactgacctcccttgtgacaggcagcctcgcctgcccttggaaacaagctgccagaatgtgagggccacagagacccaagagaagccagcactgctagactgaggaacttgtaaatatcttctgctttcttggtgaacaaggacagaggcaattgcgtgtatattgtgactgtagtttgtgaagaaaatgcaaccatttgcttcgacagctcctcaaatgtacttgttaagtgtgaatgtgcctgcctcattgccttgtgttccaaacacagtactgaatgcgttgtttttaaataaaccatttcgttttgctttgaaaaaaa

SEQ ID NO: 100955 - DNA, 554 bp, Homo Sapiens
tcaaatcgttgaagaaatattatggggcatttttctaggctttattattaactattattattcgatgagacaacatcctaaactacactttttggcaagctactcaggcagtatctcttaccattttaaataaacataacgtttaacacagcaatcctaacttgggacagctatcccacaaaaacaaaagcacctggataagaggaaactgtaggggaaagtgttttgatggaaaccggcatgagggccctcctttccggttttgattctatcgggtctctgaggccttccgggcttttgggctattttacaacattgtagctgattgcaatgcaaaaatagcccggcccctagacaggtacgtgaattctgttccgtggagattcggttgactacgctccccaactgtggaagaggccagctgtgtgtccatttacacgttcactttgctattcatctataaatgtgtctgttctttggattgtccttggtttaaacatcttcattattgcctcaataatgaattaagaaatttagtacacaattaaaaaaaa

SEQ ID NO: 100956 - DNA, 784 bp, Homo Sapiens
tttggtccactatatcaatattgactaaaaaaacatacatttttgtctttaaaaagtggaagtaaaattgtaaataacagaaaactaggaattattgtatacacagaaaaccaggaaggaaacattcagagaacagtggaaactcgttgaggtcctcgtgtccaagagaacagacaggcccacctctaatatatttttgggacccaagacaaaggaacaaatggaagcctaaatatgaaatatataaatatgtcaggctaaccccatttcaatacattctagcctcctacctagacaaatacataacaacctgtaagaccagatttgaatttcaaatgctcggattccttaggattctgtcctgttggtgcagggagaatcagcccatggacacaacccactcctcctcctctggcttcactctgcaccaccaagaggctcctgtgcatacggacactcggcctggacatcaagtcttgtccataacctctgcaaacaaccattctttgatcgtcttttgttggaggccgaaagagtgagggtcgtgatcaactcagtaaatcactggtggctgtgtaagtaagcagcaaactgttctcatgaaagcaggttgttagcaaactgacaaactgcatctgccgcccagaaggaatgctgagggcagtcatgcccaggcgcaagtgtttcttgtgatcaggcacatctgaagcctgttagcaataatatgaacctgtgatcaatccagcagctgaccaatcattacctcctcctccctgctctttct

SEQ ID NO: 100957 - DNA, 478 bp, Homo Sapiens
  misc_feature (402)..(402): n is a, c, g, or t
tatcagtaaaacagagatactctctcccaagtttgatctataattaaatgagatgattgatgtacataaaaaatgcccagcagaaaatctagccaagactttttcttaaaagaattcaactagacttaaagtcatactcggctgacgtatctgcttattgactcatttcaaaagttcaagttatggtaccccaactcctaaaatttcagatagcctcaaggggccagagacagaaaccaagagacagaggcaaaaagctacttaaccagccttaataaaatccagaaacaaggtctgtcacatgtacaaacactagctcatgtcgcacatgtaaactattactacagcattatgagatcccttccttggtaatcttactaaagcctaaacaataaccagagntgattcttcttcattagcctccaagctttcagggatttgaagtaaatctttacaaaagaatggtcactttctatga

SEQ ID NO: 100958 - DNA, 491 bp, Homo Sapiens
aaattccaagggattccgatcattcagagtatgttctctgatcacaatggaattgatagaaatcagtatcaaaatatccttagaaacccccctaaatatcaagaatctaaataatagactttttagtaacccttgaattaaagaagaaatcaaaaggcaaattaggaagtagtttgaatggaatgaaaaggaaaagacaatataccagaatttgtgggatgcacctaaagcaaaacttaaagaaaaggtgtataggtgctatattggaaagaagaaacttctcaaatcactgacctcagcttccaccttaagacaccagagaaagaggagcaagtaaagcccaaagtaaacagaagaatggaaataataaaaatcagagcagaaatcattgcagtgaaatacagaaagccaacagaaaccaatgaaaccaaaagctggtcctttgagaatttcagtaaaattgacacacctttaatcaaaatgatcagaaa

SEQ ID NO: 100959 - DNA, 269 bp, Homo Sapiens
ccctaaacttgagtttccttagtgatttcaaaatgaagtataagaatatcagatccagttagcaaaagcctaggacttgtttctccaaacattgtactaacattcaacttgttttaaaattatgactcaagaattttaaaaaattattctggacatgaattaaaacttttttataatataagtatttttctgattgaaaaaaggatataattgacttcactctaattgtcatgtatatttccataagtaaatggattttgaagtaaaaa

SEQ ID NO: 100960 - DNA, 541 bp, Homo Sapiens
  misc_feature (464)..(464): n is a, c, g, or t
cttaacccagagacttggtgctaaatattgctcttctcaatctttctgaagcttggaatgaacgtgctcttacagaaaatgtataaattccatccttcttaatctcccagccctctcttcttaagaactaacctacaaacccttttagtcctaaatgtctggaggtgacctcatggctaagaagctgatatatagaattttagtgtgtgggtattgtaatttggggagttgttggtactgttggccattgttaaaacaatatattcactggcattttccttgggggacttttaattttctgtaagtgttcaaagtccagagaaacctgtaacattctacttaaaatgtgatggatatttccaagtatgttaatctacattggggcttgaacaagagccactcattgctatgattacttctacaatgtgttttacagtggttaaatgaggagaaaattatccagnaggcttgtggaaatagttcatccatcgcaagaagaagatgtaagttcacttgtgtgactgtaaacttgattagaaaa

SEQ ID NO: 100961 - DNA, 477 bp, Homo Sapiens
ctcacggctcagtccctacatatttatgccgcgtttccagccgctgggtgaggagctacttagcgccgcggctcctccgaggggcggccgggcagcgagcagcggccgagcggacgggatgaagaaacggaggcaccaagatgctgaagcccttgaccgagtcacgtgtcagtaaatgacagaatcaggatttgaatcccatgcctgtgaccctgaaccatgacattcccctttaaccctttccttcaaacctctgcgacatcagcttatagactgttgaaggtgacaccgttctcttctgtgatttttatttcaggggttatttgcagagctctgttcagtaaagctgactcaggtggggatgtgtcccgcagtgtcgaggtagggtgtcctacaggggcttcccaggtgtgctggtgcaacacgagataaagaccaagccagttcaggtaacccccaggtagagtcactaaaaaa

SEQ ID NO: 100962 - DNA, 695 bp, Homo Sapiens
tcttatcctctacctggctgcgttatctcctatcttactttcacttcttcctttcttttatgtgctccattgtattttgatctcgctttttcttgtacctgtcttctttcagattatctcatttcttctggatctgtctctgtattcctcactcccttccccatcccaaccccttctttctctagattgtttacatatgaagggcttttctctctcagagttgctgtcttctctgagacacacaaatctaagtcagaccattgctccacgccctcccaccttttctttagacctcaacttcgctgcgggtgggggtttggtgtcctaaggagactcctggaagctgaatggagaggaggaagaaaatgaagaaggagtgattgaatgtcgggcaaggcactggctgagctgctgtggctccctagcctaaggggcctgctgtccctctgaggcctagtgaaaaagctgcaggaggtgcatcctccacctctaatctgggaggctattatcttaccttgaagcactgagcctggttactgccgaattccatcctccctgaaagaaagaagggaagtgaaaaggagaaggactccccagcgattgcctcatttgctactagcgaccagcccgtcttccagccgctctgagtggcatgccatgcaagagcaacgtgtaagggacaaaaatttgcaatg

SEQ ID NO: 100963 - DNA, 486 bp, Homo Sapiens
tttaaagcaacagaaatttattctctcagagttctgcaagctggaagtccaatatcaaggtgttggcaggaccacattccctccaaaacctctaggaaaggagattccattgcctcttcctggcttctggtgattccaggtgttccttggctgtaacagccagcagaactccaatcccttcacacgagtcttctccccatgtgtttccacgtctttacatgttctcttataaggacatcagtcatactggattaagggcccaccatactcaagtatgacctcatcttaactaactacatctgcaaataaggtcacattctgaggtactacgggttagaacttcaacatttctttttggagcacacgactcaacccatataacaaggacctagtacagatggttgtgtttagcagtcaagaggtgactggtaaggtttgcaagaacgccatttggctcaaaacatgggaatggaaaccagatggcct

SEQ ID NO: 100964 - DNA, 484 bp, Homo Sapiens
atatgacatttggattaatctccagcttcaacagtacttcttttgtccataaatctcaggaatgttttaggcagaaaactggttttaccctgttgataatcagaaggagtgtgctttaggatttattgcataatactattctttaattgcaatcctaggtatctatagcatgagtggccttagtgagtttgttgaagtgcacatgtttttcaagagtaaaatttaagattaaaaatatatcctatatatagatatctagaaaacttggtttgtggtgcacagttaagtgttggatcactaaataaccattgcaggtaccgtttgtgtaacattactcatttctgtatattccttttatgggaagatattttgccatggtaactaaaacttttcagttctacttttatgatgtgaatgaatgctacgttttattaaatattaccaggtcagtactatttttatactttattaagcaacaggggat

SEQ ID NO: 100965 - DNA, 646 bp, Homo Sapiens
tctaatgataacagtaacacaggctcattgtggtacataaaagacaaacaaatttataattaagtaaacgcgctctcttcagtgttcaccatccccaaccttactacacagagcttgctgtgttcagtgtggaaactttcagtcttttttgtatgtatgtttatacacacgcaaactcctcctttaaaaaaataacaaaactaggatatcatatatatttgtctataatttcctactttaaaaagcgtattatggtaattagccttctagatagtctccagtgatacccgcttcctggtattcacacccttatgttaactcctcccacgctgtaccagggttggtctgtgtagctaacagaacctggcagaagtgatgacggtcactcctgactttaggttatactgagacttccatcttgtatgtccttttttctcttgtatcattgagtctggggaagccgaatgccacattgtagggacattctgcctatggagaatcccatgtggttgagtaattgaggcctgataaccatgtgaatagctgtgatgtcatgagaaaacctgagctcaaacaactcagttgtttctggattcctgaccatagaaactgtgagatgataaatgtgtgttgtttaaaactaaaa

SEQ ID NO: 100966 - DNA, 520 bp, Homo Sapiens
tgaatatggctttcttttaatgcatctccaggatcacttttctctgatctagagtctggaccacctcaggggacaaagcagagctgtcagggaggtgtggacaggagcaggaatgatgtcagattaccagctgcttgcaggacggttgctgggtggctgtggactgacgcggctcttctgccattctcacttgtagttgtcaagaataactttagactttgctgggaatgcaatatcttctgacaaggaggagttggctggaacagcctgggctctgtacctgtccctcagatgtcctttggtgctttagcccagtgactcatcgatctcccaggtataaaacccagggtgggcttctttctggggtccttcggctgcagtacaagtggggcatgcacagatgagactccatctaccctgggaagctctcctgagccttgggggactggcttgtcatgaatccttggctttagttgtcccttgttgtgtatttctaatgaataaacctgttgcatataaa

SEQ ID NO: 100967 - DNA, 522 bp, Homo Sapiens
tttaatcttttagcccaaagtggcaaaaacagctcttttctcatttggcaccaccaataacgcaagttaaaaataatgttgagtttattatacttttgacctgtttagctcaacagggtgaaggcatgtaaagaatgtggacttctgaggaattttcttttaaaaagaacataatgaagtaacattttaattactcaaggactacttttggttgaagtttataatctagatacctctactttttgtttttgctgttcgacagttcacaaagaccttcagcaatttacagggtaaaatcgttgaagtagtggaggtgaaactgaaatttaaaattattctgtaaatactatagggaaagaggctgagcttagaatcttttggttgttcatgtgttctgtgctcttatcatcacacaggtcatgtgttgttactcaggattctggaagtactaagccgtagttaacaggctggatagatcttcagccaatcttctttcattatactgctgcttttctgtttctt

SEQ ID NO: 100968 - DNA, 444 bp, Homo Sapiens
caaaacaatctacaagagttgggttaggatttcagaatgcttgtggtcttactgttggatagacctgtctactggaagctgcaaagtaaataaaataaggttaaaaagcaaatgactccacaatgctcccttctgaatgtaggaggggagttaatttttaaaacctgcttctctcctgaatttttttccaaatgaaagcccagggcttctgtcacaccagtgcagtccttgacggtgctgaagtgacatggctaagggtatcagaggacctgcacccacctcagttcctcccatcccctcctcaaactcagttcatgggagggtcactcaatacaggtggctccaagtgatacgttcctctggttactgccctaagcatacgtgaagtctacaataaagtatgcacttaatactaacagaaggttctgtaacaaaaaaacagtt

SEQ ID NO: 100969 - DNA, 692 bp, Homo Sapiens
tgcggccgcccatcaatagagccaattgcaaacacaagcaccagtgagcctgtgattccttcgtttgagaaaaacaatcattgtgtgagtcgctgtaactacccagagtctgcatagttatgcccacggaagaagaacagtatctacagagtggagaccagcaactgacccgacatgtgttgctgtgtttacttctcatcattggcctgttcgctaatctttccagttgtttatggtggctattcaaccaagagcctggaagactttatgttgagttacagtttttctgtgccgtgtttaactttggtcagggatttatttcctttggaatctttggattagataaacatttaatcatcctgcctttcaaaagaagacttgaattcctatggaacaataaagacacagcagaaaacagggattctcctgtttcagaggaaataaaaatgacctgtcaacaatttatccattatcaccgtgacctctgtatccgaaacattgtcaaagaaagaaggtgtggtgcaaagacttctgctggaactttctgtggctgtgacctggtgagctggctaattgaagtcggccttgcctccgaccgtggtgaagctgtgatatacggagacaggctggtacaacgcggagtcatccgacatattaccaacgagtatgaatttcgggatgagtacttggtt

SEQ ID NO: 100970 - DNA, 709 bp, Homo Sapiens
ttttttaaagagaaaaggaaaataacaaaccagatgctgacatggtactccagttccaatatcctatttattatcatgcattcaactcctcaggtatttaatgacaagctactcatagcttgtctcagagcaccaggaattctgagtcacagtcggggtgtaaagcggggccctgcattcagggagctgagtctgactgggaactggaaaggctcccctacctcccatgaccgtctgtgagcttcacctgtgagtggcaggtgcgcgtggagtcagttcccctccatgcccgcctgcattcctacccggagacctccggccgcggtgggaattgccctgctgttttcattactgcaggtttttcttctgtatttctgaacccctcatatctcagggaaggaaatccagggagaagtatctgttgcgtccccatctgttgcattttctgagtctccacgttaatgaaagagcagccatccagtttcctgcagtgccgagagtcctcgggacctgtcgttgttctaaaggacagaggacactgttcagatgtgacgtctgtcgccatttctgtctcctcttagcaaactttaaagcccggaaaaccttctattttcaaagtcggaaaattagattacagcaaagccataaccctgtatctctcctaaccttgctccctaatcaggaataaaagggaaattatctgaagaaa

SEQ ID NO: 100971 - DNA, 285 bp, Homo Sapiens
ccctaagtctcccttctacccacagaaccaacaacacccttcccagcctttcctttccctcgccctcttctcgtcccctaagcaaacaacatccgcttgcttctgtctgtgtaaccacagtgaatgggtgtgcacgcttggtgggcctctgagcccctgttgcacaaaccagaaacagagcagagccaagggggcctgacaagagttcctttttagctgaacaaacaagtgctctccataataggtggaatcagacagttaacacatttttatgttgaaaacaaa

SEQ ID NO: 100972 - DNA, 482 bp, Homo Sapiens
tttctaatggtacaagaacaatttagtaaataacatcttcaacttaagataaaaagtaggatatatttataatgaaattttcaagtattatttcaaaattaaccctgtacaaatgatatattttggaaattccaatatttgctagagaatattttttaaataccaaacatctttgtggttaatgctaccttaaccttaccaattaaccttctaaaagtatattacatcagaacacaaatagcttaaaacacaccatactgttttctccacaaaacagacaccagacaccgacatgagcacatctggcctggccagtgactcagaacctcatttcagaccagtacatctgcagaggaggccacgcggacccattctctctctcctaactcatataataaatattattttagattttcttagcaaactaggggacaacttacagaccccacctctcccagtcagccagtgtctgcagggtttca

SEQ ID NO: 100973 - DNA, 603 bp, Homo Sapiens
  misc_feature (170)..(184): n is a, c, g, or t
aacagaagcaaaaaaaacctctgggaagggagttctacctgacaacaggtaaaggccaactcatgagcaaagccctgggacattcttgtcctgaagtggattctcagcttgcgccagcccagcagtgctgtgcacctggagcccaacctgccagggaaagactttcctgnnnnnnnnnnnnnnngccggggagtgaaacagctgctggagacttgatcctggcccagatgtagccagggaaggaaaagctaaggccaaaaatggacggggactgactgggctgcccagactcaaaggggccctgggagctgaaagcaggcaaggacagacctgtcacacaccagagcacaaatgcggctgggaacacacatctgtgtctgtcatcaaccgactttatcgaacgccttaaacaatctgcctgcctctgtcgcacgctccccagactcagatttttatgcggattgtaacccggctgcctgaggtgtgatcagccctctttcctggtagctctgcaaagggtcctgcacttacccctagggagcccctctgtgaagccccagaggcttcctcccagaatctcaagacaatgagaaacgcgaaaaa

SEQ ID NO: 100974 - DNA, 498 bp, Homo Sapiens
caaatacaaaagataaatgaagcaaaaagctggttctttgaaaagataaataaaactgacaaaccattagcaagattaactaagaaaagaagagagaaaatccaaataacctcactaagaaatgaaacagaagatattacaactgaaatacaaaagatcattcaaggctactatgaacacctttatgcacataaactagaaaatctagaagagatgggtaaattcccggaaaaataccgtagcttaaatcaggaagaattagataccctgaacagaccaataagcagtgagattaaagtggtaatttaaaaattatcaacaaaaaaaagtccaggaccagacagattcacagcagaattctaccagatattcaaagaagaattggtaccaatccttttgacactattccacaagatagagaaagaagaaacataccctaattcattctgtgaagccagcatcagcctaataccaaaaacaggaaaggacataaccaaa

SEQ ID NO: 100975 - DNA, 468 bp, Homo Sapiens
ttttttaagttaattgatatttaatattaaatatttaatatattaagtgaatacattcaaatctgcaaacaatacagctaggttgtagaagagttaaaaaaatccctccactcagtttttgccaaaacaccacctgtaagcactgagaagcctactgatgcacgcattatcctttgggccaatagaaacaaacgttttaataaaatgctttcccagtggtcaaattgtcttcctgagtaaagctaaacttgctgtagtgagaacaggtagtgtttatttctagcttcttctgggtcccaggttacctaagacccaagggtaatgacaatgggcagctccactttattaaaagccaacatttagcccagacattttattctccaaaaatcagcaagcatagctttacattcaagttgggtataatgactttattttcccagtaattccctaaataaaactattacaaaa

SEQ ID NO: 100976 - DNA, 556 bp, Homo Sapiens
tgcggccgccctctccagattttaaagggttagaaagcagggttggaactccttgggactggcaagggcccagggaggaccgcaagggagcctcctcgacgcccagacaagcgttgcaccgtttccccaggactggcctggcgtgcaaagcaactgggtgctgcgttctgggagtcggaccgtttctgatcttctcctcaaacaggcagtgcctgtgacattgaattcctctcgtaagaatgccgggccctggttctttgctctccctctcaccaacaagagctaggaagtagagcgcttttcaccaagtagtaactgtatttacagagggcgtggccttcgcagaaaaggccacctttttgcatcttgaccgaggttgatgactctgcatcttgaccgaggttgatcacacctgtgttaaatgttttctttgtgcaagcaatcgaatgggggctgtagcgtgattggtgagggtcaggacagttgccgggagagtttttgtaacacacttcgtgagtgaagagtctgggaggcgtcttttcaacaaacctcagcg

SEQ ID NO: 100977 - DNA, 531 bp, Homo Sapiens
tttcatatccattagttatcatttacacatcaaatacatatagcattaagaccaaatatacagaatttccacatttatatacagtagtcaacatagtgcacaattcaaatctatcttacaatcaagtgtacaagtttaaatatggctttataaactactaataactctgctaaagtaactcatagatccagaaataaacactgaaatgccatcttcacattggggtcatcattcagcaagatgctaatcattgtgattgcaaaacagagggtgcaggtaagtgtttccaggtggtgtccgcccattagccccgaaatgtgggttcaaattatgccaacattggcccttcctatctcagatacctaaaaataagtctgcacatcttccacacatttgaagacacaagattataaacaaatagaaaaaaagacatgtaatcagtgagatgatgaattatcaggcattatcaaaacatgtttttcagattgatgctgaaattcacagacaatacatcctgcatttgcattatct

SEQ ID NO: 100978 - DNA, 575 bp, Homo Sapiens
tttttccacaatgccagacttttactgatgctatttcaatcacaaaagccacgaactacatggagtttccaagaaagcaattctccttagtacttcccactcactcagcactcagagtcttggacacacaggctcaaggcactccacaggtcaatcaatattgcaaatcatgcataatggtatacttaatcaacatatatattatagagtgaacattccacaaacaaaataacatttaacattaagagaaaagagataggacccttttctcctttaagtctggagccctcagaatcatctcctttccttcctttttccctctttcctcccccaatttattttttaatctttgtgggacatgacttctaggaatgagccttcctagcaacatggaacatgacttcctaggaatgagccttcctagtaacgtgagacctgaatttcctggaataaaccatcctagcgacaagaaaccagctcaaaaaaggaggaaaaagcgaactgaggccaggaacacatattccttttaaaatgctttctccaaaagatgttaaagaaaaaaagggggaaatgtg

SEQ ID NO: 100979 - DNA, 533 bp, Homo Sapiens
gctgaaaccctgtacttctgttcgcggccgtgtagaactgccccttatgccacagcttcctcatccatacgtaggggtgatgttggcaaggcctccggggcgctcaggatcaaaggcggcggcagtgtcctgccaagtgttcacagctgataagacgtggtccctgaacacagcggttcctgttctgatcactcgagtatccgtgatgccaccgttcccagaaggcagcccgtgcagcctccgggtccccccttcagccatggcagcccgtgcagcctccgggtcgtcccttcggccaagcttccctttccttgagagcagcacgctggcctggccatgcagaacaaaacacaactcagaaatccctcctcagccctcggcagtaaaacttctgaggattcgactttttagttaatttgctcactgtggcagctcactggaaaataaatcgaggatgccagtcctcctcttagaaaaatagccctgcagtggcttgctgattgctcattgtgtcatgcagcttatactatgat

SEQ ID NO: 100980 - DNA, 364 bp, Homo Sapiens
acatctggaaaacagcggcacagccccatctgggtttgtgtggaggggtctgggttgtggacacagaactgtcatcagagagatggtgcccaccatagcatggatagtgttcgggcatggcagtggtgtaggcctggggacaccttcagtttctcatccaacacatatttactgagcacatactacgtgccatggaaggggagagagcaatgccatcctgcaggagaagtgctttccctacggaagcgaggggcatccagctctgtcttggggtgggggctaccaggggagccctctccttgaaggtgtctgttttcttcccaagtgacaacaataggtgggtgggcattagctaggggaggag

SEQ ID NO: 100981 - DNA, 702 bp, Homo Sapiens
  misc_feature (61)..(61): n is a, c, g, or t
gagcagtacaggctcgagaataggccccagagggacagagtggctgccaaaaactcgttgnaggccccatgtcttccatgtaaaaggttctttgcaagaggaaacctttagggacaaagattcccgaagagcacaggcgcaaaatgcaaaacaaagtgtcaggaagtccttgcctggctggagcacaaccccagccggcagagaaggaggagtatgagcatcagaagagggagctggagcaaatctgtcgccccatcttctccaggctctatggggggcctggtgtccctgggggcagcagttgtagcactcaagcccaccagggggaccccagcaccggccccatcattgaggaggttgattgaatggcccttcgtgataagtcagctgtgactgtcagggctatgctatgggccttctagactgtcttctatgatcctgcccttcagagatgaagggcttgggggggtcttccctccaaagctagaactttcttcccaggataactgaagtcttttgactttttggggggagggcggttcatcctcttctgcttcaaataaaaagtcattaatttattaaaacttgtgtggcactttaacattgctttcacctatattttgtgtattttgttacttgtatgtatgaattttgttatgtaaaatatagttatagacctaaataaacttttaaaactcaaaa

SEQ ID NO: 100982 - DNA, 462 bp, Homo Sapiens
gtattaactttcctggttagtaacccccagaaatggcaaataacaggcaagattagactttccatctcctttttagttgcatacggcagttactcagctgtagtaatatcctggttacctgtaggtaagatctcaactatacagaacctaaggtcctagcgcttgaaatagctgttggaaatcctttttgagctttattctgcaatagaggctcatagttggtccttcattagagcagtagttctgaaaccttaatgtgtatatgaatccccagggaatcttcttaaaatgaagattctacttcagtaggtatggggcagaacttaactaaggttttgcatttctactaatgcctaatgcagatctgccagttcacaggtaacactttctgattttacttgtatacatagttaacctggatattctggtttaccacacccaaaattttaaggtagccaaggt

SEQ ID NO: 100983 - DNA, 223 bp, Homo Sapiens
  misc_feature (115)..(125): n is a, c, g, or t
tttaaaggagaaagtctcaagagaagagaagatctttagaagcctcctacacaaaggatatgcagtcccccttgcttggtggtgagttagaaacctgcctggagacaaggcggcnnnnnnnnnnncggtgcggaatctaaatatacttattacttgtaatggtttctcagcagctgaacacatagtgtcttgagaaaaaggtgcttgcttataacttacacca

SEQ ID NO: 100984 - DNA, 391 bp, Homo Sapiens
gtttaccactatattaaggctttacaaattaaaataaaatagtggtactgtgaattatgtagactagatttgcctcagttaacacaatttactgaagctagctacatgatatatacttggtttaaccatattttgtgaagaacaatcaaagaaataccttgcattgcaacagtttgatgttaaagtatttgacagttttctcaaaagccaacagttttggttgcccagacattacaccattcagtttatgtgaatccatgtgcaagtgaactaagactgaaggcaacagaatgaaaacagtaatcccttcactttatatcagaaccattaaaaaagcattggagagaaataaccaacccatatctgaagtttttaaaaaaaacaattatca

SEQ ID NO: 100985 - DNA, 411 bp, Homo Sapiens
  misc_feature (52)..(71): n is a, c, g, or t
gaggtcacaccatgcacttccagcctgggcaatagcgtaaactccatctctnnnnnnnnnnnnnnnnnnnnctgaagaactcactaactgctgaactgctgtcagagaacagttataaaagcattgataggtcttgatggaatacagtatatggccattagaagtgatcactgtcatgccagcagcagcctagatgaacacgcagtgaagtgccagagcagggaatggtgtgtgctcgggtacagcagttgggaggatatgacatgtacgtggagcccgcctctcgctaggcgcaggactgcacaagagtggaagttgtgacggggtggtgggatttgggtgcctttccttaggcttcttttaatattgtaaaatcaggattaaaagtctcactggagaattgctggaaca

SEQ ID NO: 100986 - DNA, 473 bp, Homo Sapiens
ccccaaatcaactaaactgccaaaaaagaaaatcagtccaaaggaaactgctttacatccctccaaacactcaagccattgatctgttactaacagctgtaagacctatgaaattcttaggccagtgtccaaaactgtactcaaactgaaatggaaaacaatctgaattgctctaaaatagcaattgtgaaattcttaataaccgtaattgagtcactcaagaaaggccatttaagtgaattttagaactttgttgtttactcagggaaaaaaggactgcaaaagagccccaactcaggagctgccaaaggagatcttcacggggtgcctgcctctctgtgctgagcattggctgctgggcacctggcatgtgctgtctgtggtcctgacacagtctactgaagacagagtgggtaagtaatttgcttatgggtctaatgcagagccaggattcaaaactaagcctgtatggc

SEQ ID NO: 100987 - DNA, 588 bp, Homo Sapiens
tttgtaaatgaatttgtaggtatttggtcaccaaatgaaaagtatttcccaacatgttcaatgaatgatttccttgactgcctcatgagagctaaattcagttttcctgttattaacatttacactttctccttcctttacatggcctgtgctcacattcaattttcacttccaaaccaccacaacttctattagaaacagaggaacatacatcttaacagaaatgtaatatgtaacatgaactaggggttttcatttttcacgtgaaattgacaaaacgtatttaagaaaataacccaccccctatttaatctggccatgttttctaaatatggatttctctgtttaagattttgaattttcttaatagatgccatagttttcttaatagatgggttggagcatgttggctacaaatcacttcaccagtctcataggcgaagaacttcgggtcttcctacttcaaataattcagtttcaccacatcctaataagtattgtgaacttattcgatatagtcacaatttttaagattatttggggcaaacacagcatgagagttgaagtgcaatcaagtgttctgatgtg

SEQ ID NO: 100988 - DNA, 468 bp, Homo Sapiens
tttaaatcaaaagtaactgtcctaacttatactgccgaatagatcttctctgtggtatgtagctgtcgatgtctccactcagttttttaactcttatttgtagttattagcctcacttcctgctggttgtccctgtgtctacatagcttagtgctcaatcagtgattaggtcagagcttgtgcttaaacaccttgagtctatagggcttctaccctctgccagttgctctgtgtgtgggttgggagcaccttcaaagttatagccagttctcagtccaccttcaatttcaccttccaccaggccctcactggtcttccctgcacatgtgcctagtttcccagtcagccagggatgtgtggagtgcttatttggcccttctattactatttcagttataggatctctcttttaaatttctgactgggttttcctcgttagttttctactaagttggccattcaaaaatt

SEQ ID NO: 100989 - DNA, 501 bp, Homo Sapiens
atagtcagtccacagtacgccggcaccagcaccactctccctcttcacattctccatcccatgaatctttgccttaggaaaccaaagcttcctaaaagtagccatgcctgagtccttgtctaggcccctggtatccaattagccagaatgggatgtaggaggcgagattcaaaaacataaactagtttgaaaattgccttcagttttctataatgcttcgcttcatccatgttcccttaaacttctaaagataaataggcctatagtaatacaaaattggattgatttaaaatgatacctgtgatctggtaggatctggaacttactagaacaccaagaatacaaattaattggtatgattttgaatttatagacctgggctgggtttacattcaattttatgtcataagagtgggtttaataacaatatttattgtctaacaacatacaagatctacttaacaaagtatttcaaatatttttcataagttggcggccgca

SEQ ID NO: 100990 - DNA, 616 bp, Homo Sapiens
  misc_feature (115)..(115): n is a, c, g, or t
  misc_feature (117)..(117): n is a, c, g, or t
  misc_feature (120)..(121): n is a, c, g, or t
  misc_feature (123)..(123): n is a, c, g, or t
  misc_feature (127)..(127): n is a, c, g, or t
  misc_feature (130)..(130): n is a, c, g, or t
  misc_feature (132)..(132): n is a, c, g, or t
  misc_feature (136)..(137): n is a, c, g, or t
  misc_feature (139)..(139): n is a, c, g, or t
  misc_feature (142)..(142): n is a, c, g, or t
  misc_feature (144)..(144): n is a, c, g, or t
  misc_feature (445)..(445): n is a, c, g, or t
  misc_feature (473)..(473): n is a, c, g, or t
ccagccatccagggcagccacatctctcacgtcaccatcttcatgtgttctatagagcctttcaccaccaccccccaggtgctggacatgatgttaaaaagggaagcatgagccntncanngnacanggngnacanngnccntngccccacccccacctggctgcgggtcttggcaatgctgattcacctctctgagcctcgctttgctcatatgaaagagaaactggagtgctaagaggacctcatggggttgtcaccatgcctgggcgggatgaggcgtggaaagtgctccctcaacgcctggccctgtagggaatgggctgcggggctgtggtgctcgtttttatgattttcctgtcccccatggggaagctctctgccccaagcctctcttgtatgtggccttgggcgaagcagttttcccacttgtcaaggagattccgngattctatctgggggctgttggaagggnacccaagagggccgctcaagataagctgggaaaggaagctgggttgggcacttattcacttgaacacaaatataatatgaaagcacctatcttgtgtgctggccccctttttctaggccaatttaataataatttgaaatgaa

SEQ ID NO: 100991 - DNA, 467 bp, Homo Sapiens
gagctgatggctccaggtggctggagtcaggagcatgaccggcactggggcaggcagcgtggctgtctcctgaggctgctgagtgagcccccatgggggtagcggcagccagcgaggaagctggcctgtcatccaggtgagctgggctttgactggagtgtccagctatggaaagggggctgacacctgtgcttcctctccaggcctctcaggaacctggagctcctcggccaacagcatcctccacatcgaccccaagacgggtgtggctgtggcccgggccgtgggatccgtgaccgtttactatgaggtcgctgggcacctgaggacctacaaggaggtgggctctaagcagccggaggcacatgtggctcagtggcctgtgaggcgggcctgaccttctgggaggattatgaagacttttccttttagggaaaagccgtctgaggggttgggtctgggagaaa

SEQ ID NO: 100992 - DNA, 454 bp, Homo Sapiens
taatataacatattttaatacattgtgtgtaatgtacatatgcatattgtctatgtactatatacacattgtttataatattgttattacagtttgtcattcacctgaaaggagaaggaaaagtacgaaaggtttctctgcttgggaaaaggtgaatgttgttatatcaagaacgattacacacatggatctcatacatgtttttagaacattgttcttctgattgaagaagtctgatgctcctgaaaaatcttaaaatatctgacttgtattgaagaaaattatttaattaaatttttaaaggctggttgaaaaagtctgacagttctgagaattttttaaatgtctgaattgtaataaaaaaatggtttactttaaacttctaaaaactaatgaccttgtgactaaagaaaaatcatttgaagtgtattaaaaaatagcaaaacctttaaaa

SEQ ID NO: 100993 - DNA, 297 bp, Homo Sapiens
tgcggccgcgaaggccggaacacggcggacgggcgcggggcgagcggcgccgggagcccgaggcccggccgggcgtcctgcgcgaggcactgcgggctcctgcctgcgagattaggcgaggggcggaaagggaggcaaggagaggccgagaggagacaggcgatcggattttccaggagtctggtgtggaagaaaaacccacctcgaactcaaatccacaataataatccgaacgaataataagggagccgtctttctggccgggcgagagagagggagagagaaggcggaacggga

SEQ ID NO: 100994 - DNA, 368 bp, Homo Sapiens
tctcaccatgaatcacgtctgcagtgaagggttctgacatctagcaaggaactgacaagtaacccttttgtttttctctgtctcaacagtctggccaggtcacagggggacacagtgccaacaacatggatttttaaattagaatttgaggagctccccgcaggcatactggctcagttgcccacacagtccaagaacacccacctgaggaaggctttatggagctctctcattttgtttattccagttaatgaaagacaattcttacattcctaaaacaatgttcacacacatcagccatgatgtgatatgataaaggatggcttaaaaagctcccaccccattcgaatggtgggaatttaaaaaaa

SEQ ID NO: 100995 - DNA, 140 bp, Homo Sapiens
aaataatagtgtagtaccttgaaacaactgcagttctaactcattgtcaccatttctgtttgacacgttccacttcctttgcaattattgtatttagttgtgcactagtgtcaataaaattgacatttgtgaagcaaaaa

SEQ ID NO: 100996 - DNA, 123 bp, Homo Sapiens
tttttagccccgatcatgggcaagggcagcctttcaactgtttttgaacaaagaagacagtaattactaaatatgcagtgttaacatgtatatccagattctgaaaatgtgccctcaaaaaaa

SEQ ID NO: 100997 - DNA, 536 bp, Homo Sapiens
ccagatgtctcagcagatgcctgcgtcagcacattcagtccatccatacgatgggatgttactcagccataaaaagtaatgaaattttgacctatgaacagcatggatggacctcgaggacattctgctgagggaaagaagccaggcacaaggacaaatcctgtacgatgtgaccgatagaagccatcgagagtagggagattcatagagacagaaagtagactggagattccctggggctgggggatggtattttgcctcatgattgtagagctttgttttgggtaatgaaaaagttttggaaatagtggtgattgtgaatgtgtttaatgccacaaaactgtataaaatgttttaaatggcaagtttggttatatattaccataacaacatttaaattcttagtctttcatattaatacacatttttccaacaacaaagtgatcacactcctcatagtaattcaactcctgcctcatgtcacattaaactttcactgttttctcattaaatattattctttgaaacacctaaaa

SEQ ID NO: 100998 - DNA, 583 bp, Homo Sapiens
tgcggccgccgcacccagccgcgccggcgaggacatgggcagccgcggcgcgcccaccccccgcgccgatgtgaattattaaaaagaaaatggcccaacggagcactgtatttccttctcgtgtcaccaaggaaaggtataatatatggaaaatatgcatctaaggcgagtgagaaccatgccccgacacagccagtccctgaccatggcaccatactcatctgtaagcctcgtggagcagctggaagacaggatcctctgccatgagaaaaccaccgccgccctcgtagagcacgcctttcggattaaagatgacattgtcaacagtttgcagaaaatgcaaaacaaagggggaggtgaccgcttggccaggcttttcttggaggagcatatcagaaacataactgccatagtgaagcaacttaatcgggatatcgaggtaaggtttgtgaaagtcaggtggcctatgtccctttccacagaattgctccatgtcaggaggtcacccacatctaactcctacctcccaggcagtactgcatttagaacaaagctgtctgtcttgtctattcttaatgatcgc

SEQ ID NO: 100999 - DNA, 315 bp, Homo Sapiens
gtagacagggtctcactctatagattgctacagtaagtttaaatattgttaaaatgcccagactacccaaagcaatctacagattcaatgcaatccctatcaaaataccaatgacattcttcacagaaatagacaaaacaatcctaaaatgtatgtggaaccacaaaatcataccgggaaattctccagcacattgagcttggcaaagatttcttaagtaatactccagaagcataggcaaccaaagcaaaaacggacaaataggatcacatcaagttaaaaagcttctgcacaacaaaggaaatgatcgacaaa

SEQ ID NO: 101000 - DNA, 482 bp, Homo Sapiens
tttaattctcagaacttccaggtaaacatggtcggctactcatgtgttatctccacacccccaagcaacatgaactgcaccatcactgacttctaaagatgataaaacctcccaccgaagggcacgtagttttggaagatggacacagaagggctgacagctaacacagcctccagtgttccctgctccactgagcatcctcagagggagacagcacagggacacctggagcagagcgaggcccagcggagcccaagagacaggggaggggggaaggcaaggaaggaggaacgcagtgggaacggaaggggggtcagcaagagaaaaaaggtgcatgggtttgagtcttttatcacaaactgttagctacattccctctgccgcacctcggatcccaggtctcttttctcatcctcactgataaagagactcctcctgacgcccccgtgcaggacagcgcagcttaacccgtggggacacta

SEQ ID NO: 101001 - DNA, 441 bp, Homo Sapiens
gcggccgctccaacatcagaaaggactctacaaatgctcactaaatgtacctgaggaaactgttcacttagttatttctaatttaaggtagctgttaatttccctattttggagcataggaaaatttaagacatactgtttcatcaatatgaccatctcttgattttatctgtcttgcctccatttctttttttctagtggtagcacctcagttaacttttagagaattaactcatctgcaattgtatagagctttggtgagattgtcagctacttcccttaactttttaataaggatgagacccaaactaagctaattagatgaattctttgaaataatgcaaagaaaatgattgaggtttattcacattgaagatgagaagctaaagtgttccctgtgtctttctgaatctggttcatcagccttctctgctgttatgt

SEQ ID NO: 101002 - DNA, 621 bp, Homo Sapiens
agcacagtgcaaaaataaaatgtacagcataacaagttattttacaacagacacatgtaatcataatgcaactcaaaaaacagaacatttgtaaaacttagtaagttccctgcttaccaaatcactgatatccctcgccctcccttcccaaagctgaccattattttaactttgtgggcaatgatgtctttgctttgctttatactttaacagttatgtatacatccctaaacaaaatataataatcttgcctgtttgggaactataaacagaaacgtatgttacatatccttttgtctgattctttaatgtttttaccaatgttttttccatataaaggtatcttttctccttgtatttctttttatgaatatactgctgtcaacttgtctatttatgtttaagatttagaatggctggatataggaatatgtatattgtcagttgcactaactaatgccaaagttttccatagtggtttttaccagcaatatatgggagctcatttatgcataccttctccaattagccaatctggtggacagtatgttcattttcatgtatttatttgccatttgggtttttcttatgttaagggctaataaaaatatttgatttcct

SEQ ID NO: 101003 - DNA, 475 bp, Homo Sapiens
acaaagttgtgttttatgttttaattaaagctgtgccagtgaaaagggagccagttgactcttgaccttcacaagtaggtaaccatgatgaagtaactatgtctggggatctgagtctcagcttttttgtgtctataaatttgattatattcatttacctatagttggacaagctaacctacccacctggacatcatagttttgactccccaaattggactgggtatccattctatgtgttctctgtgtgcctgtcatggtatttgtcacactgtactgtaattccctctgtgccagtagattgtttgctcctgccatacatatacacatgcacatacatactttttctgctatatgttacacatttcttttgatttattatttgtcatctacatttgtatacagaagttttaattttcattagccaaaatgctaatgaaatcacatagatattaaagggatacttggaacaaaa

SEQ ID NO: 101004 - DNA, 489 bp, Homo Sapiens
  misc_feature (292)..(292): n is a, c, g, or t
gcggccgccaaccatcaccaagcagtcagcgaaggatcacatcgtggacccccgtgataacatcctgattgagtgtgaagcaaaagggaaccctgcccccagcttccactggacacgaaacagcagattcttcaacatcgccaaggacccccgggtgtccatgaggaggaggtctgggaccctggtgattgacttccgcagtggcgggcggccggaggaatatgagggggaatatcagtgcttcgcccgcaacaaatttggcacggccctgtccaataggatccgcctgcanggtgtctaaatctcctctgtggcccaaggaaaacctagaccctgttcggtggtccaagagggcgctcctttgacgcttccagtgcaaccccccgcctggacttccatcccccggtcatcttcttggatgagcagctccatggagcccatcaccaaagacaaacgtgtctctcagggccataacggagacctatactt

SEQ ID NO: 101005 - DNA, 549 bp, Homo Sapiens
  misc_feature (17)..(17): n is a, c, g, or t
  misc_feature (31)..(31): n is a, c, g, or t
aattggggctggaatcncaggcttcctatcncagggctgagctcatccccatagtgttattctgtctcataacataggagacatatttagggaaagcagccacccaaaagtaagatagaacacaagggacctgtaagcaactccttcactgaaatgagcctgggagtgtgaagagcagaggatggagagccttgcttctgaaggccttggtcacaccctcacactgttcaaagtggaagagattcattaacttttatcattatataagatactacttatttctttaaatctcacctcaacccccaaaactgaaagttagcaggagaacacttttggccaataagaaaacagaaaataaaattaaaatggtagattcagtttcctgcaatacctcagtttcatgcaaagacagtggctctgtgaaactcataataaaacttttaaacatcccagaaatatctttaaaaacataaattttactgtttatctttccttttataaaatggtacatgttcattatggaaatttttaaaaaagacaaaattatgc

SEQ ID NO: 101006 - DNA, 465 bp, Homo Sapiens
ttctgccccattccaccctgtgtggactttgagatccaggtgggcgccatgggaaaggtagcagggtgggtcagtgctgtctggaaagattagataaggaggaggaagggagctagatagaagtggggcaggtgactatcaaggagcctgactcaaaacctaccaccttggccaccatcagagcaccatgggagggggaatgacagactgggggaatgacagactggggaaatccccgagggaccctgaacaaccctccccccgcccccattcagctgtggatgagaaaactgtccctggggcatggaggagaaactgacccgcccaggtcacacaagttaatggaacagcaagttccagatcccaggtcttctggctcccagccccagacactggctgtgggtggaggattacccaggtgccaaggcaagagactgaaggcacaaactgtttcagtataataaa

SEQ ID NO: 101007 - DNA, 127 bp, Homo Sapiens
aggttgccaggacaccattgatctgctcctcctcctcctctaaatgttggcctcaatccacccacatgcctctctaacctgggtgatctcatctcattccatggaattaaatgccatctgaatgcta

SEQ ID NO: 101008 - DNA, 432 bp, Homo Sapiens
aatattttcatcagcctaccaaatacagaaccttattttatgtgtgattctatttaaagatactttatttttacatttgcaccatggaatactatgcagccataaaatagatgaaataatgtctttgcagcaacatggatgcagttagaggccattatcctgagcaaattaacacaggaacagaaaatcaaatactgcatgttctcacttataagtgggagctaaacattgagtacacatgcacacaaagaggggaatgatagacaccagggcctaattgagggtggagggtgagaatcgaaaaactacctatcaggtgtatgcttactacctgggtgatgaaatcatttgtacaccaaaccccagtggcatgcaatttacccatgtgacaaagctgcacatgtacccccgaacctaaaataaaagttgaaa

SEQ ID NO: 101009 - DNA, 318 bp, Homo Sapiens
gcaaggatccctggatcctcattcctgatataagactagttctaggtaagtgcacattcatgtgatatattggttccatactaggcaatggaagtgccacattatctgtaaggagcaggagaagagccattagccccagtcctgggaacgaactttctgtaactttaagaaacataaaactttaaatgcaactgaaagattatattctgtcacctccaactactcacccataaatacaataggcaccacggaggctaggataaagtgcaaatttaagattataagtgtgcttataataaatattgacaacatcaaaaa

SEQ ID NO: 101010 - DNA, 638 bp, Homo Sapiens
  misc_feature (87)..(87): n is a, c, g, or t
tattaagaaagtgaaagcacatgctacagattgggagaaaattacttgcaatacatatatccaaaaagggactaatatcagaataanaacaatctacacaaatcaataaataaaatcagacactctaattaaacatgagagaaaactatcatgaaaagtacacttcacaatcaagatatgctaaccatagggtgctaaccatagagagatgctcagcatcattaattctcaggaaaatggataaaaatgagaagaatgacaatatggcataatgaggaggaggcagagcaacgtggaaccttcatacattgttggcaggactgcaaaatgctaaaccctttgaataatttccaatatagttaacactctaggtcctagtattcctactcctaagtgtttacccacgagaaagacattcagttaaagacttgtgaacaaaaaagttggtagcccccaaatgtttatcaacagtacaaaagatgagcaaactctgtacatttatacaatggaatactatcggcaataaaagaaaatgagcgactaatgtaatcatacctatccctcacattctacgtaaagctaaagaagctagacagcagaaagtatatactctatgaaaacatgtacagaatgttcaa

SEQ ID NO: 101011 - DNA, 437 bp, Homo Sapiens
taaagacaaaagagtatatttgaaagaagggatcagggggctccttgcttctagtgaacaagggccctgtacttctagctccattcgtatttattgagtaaaggagatagggagaaagaggtgggttgtcagtcagctgcttgacttggtgcaggctgcacgaccgcattctctgaacagtagtctccagaatgttccaacagataacctcaaggagcacggcgtcagggagtgattgcccccagcaaaccttctggtggcaggtgcagtcgcaagtttgcccacatcctgcattcatgataaacagtttgctgtttgatcatatagcctccagtggaatgctgagttggtcatgatccacaggccttcaactccctacaaaatagatgtttgctctagtaactaggcttagggcaacaggtaatgtcttgggtttc

SEQ ID NO: 101012 - DNA, 376 bp, Homo Sapiens
  misc_feature (41)..(41): n is a, c, g, or t
  misc_feature (83)..(83): n is a, c, g, or t
  misc_feature (128)..(128): n is a, c, g, or t
gctgatgggagcttcaggtttcccggtctgggacttccaancataacacaggcctgacaccaagaaagatgtatccaactatnctaatcctagtacttttgaccccagaaggcatggccagtactganaaatggtcccttccactttgattgtaattattgagcaggtgatccctccttctatgttttaacaggtaccttgtctgttggcctgattttgggttggtggttagttcctggtgtggggagcttttgagttccaaactcttgtaaagcctgctgaaataatcccaggttaactaggtattttactaaactggatgtttctggatcagagattagatcattagttaaaaatggccttttgtataacaaaa

SEQ ID NO: 101013 - DNA, 635 bp, Homo Sapiens
cctcacgcgggagacctcacgacagcagctcacaacaattctgaaaacattcccctccacaagtcacggccgcagacgaagccgtggtctccaggctccaacggccacagggactgcaagaggcagaaacttgtcttcgatgatatgcctcgcagtgccgattattttatgcaagaagctaaacgaatgaagcataaagcagatgcaatggtggaaaagtttggaaaggctttgaactatgctgaagcagcattgtcgtttatcgagtgtggaaatgcaatggaacaaggccccatggaatccaaatctccttatacgatgtaaacagaaacagtagagctcatcaggtatgctatgagactaaaaacccactcaggccccaatgccacaccagaagacaaacaactggctgcattatgttaccgatgcctggccctcctgtactggcggatgtttcgactcaaaagggaccacgctgtaaagtattcaaaagcactaatcgactatttcaagaactcatctaaagccgcccaagccccatctccgtggggggccagtggaaactccgtggggtctcagggcagcctctccaacgccagcgccctgtccccgtcgaccatcgtcagcatcccaca

SEQ ID NO: 101014 - DNA, 636 bp, Homo Sapiens
tgttctgtgcctgagggtagaccaggaaggctgcctggaggagggagctgtatcctaaaggatgctcaggagctggcattgaggccagtggcatagcctgcacaaatacaggaggacctggggaggccaggggtggggctgggggtattgggtggggctggccgcattctccgtcttaaccagctcgctcctaggtgcttttgtggcttctgcactctaccagcttggagccaggggcctcattctctcttgcagtaaaatgaggctgatgactgagcctaggagttgctgggcatctggtctgctgattaccaccttggtgcccaatgtctgcctgcctatccactgctttcaaacaaggaggctgcctgacaccacccagggggacgcctcccacccttgcccagcctcagccaatctcctctttctcttcttcagagctggagttgtgccctcctatcctctctctgcccaccccatcactgctgtacaccctgccccttggcacttcggccccggacttgctcctcctggcaggcctgggtgcttgtgaagccgggtgccagagggcccagcacggcacggcctttgattctgttttctgtaaatcgacgacaataaattctctttttcctt

SEQ ID NO: 101015 - DNA, 383 bp, Homo Sapiens
cccttcactttcaaacatcataaaagcctacactcacttgatttcacttctccacctacaactcactactcactgcacccactgtctctggcttcagcagcaccggccagttggctgagactgctaagttccttggcgcattgctcaaatgctgcaacttctttctgacgttccaggactccccctgcagccctcccacaactaagattaatggtttcatccctaaccttccttaaaaattaaggtggacccataggaaatggctgttatggagttctaaaaggattgaattttggcaattttctgtggctcagcctaattcccttttcacacttcttttgtaactaatttcactttattgcaaatgttggcaaatgtggtta

SEQ ID NO: 101016 - DNA, 627 bp, Homo Sapiens
gactaagaaatctgatcatgtccaggcttttaacaccctcctcccccaaggaacaataaaacacaccagcgaaaacaaagaggctgccctgaaaaggttgcagtggtggatgatactggcagaatcagaaaggaagctaagagaaacaggcgcgtcctcagccgggcctcgcgtgtcctgacactgcagcaggcacgggatgtgggctgtcccctccagcacagtgcgggaaggtgctggggcatccaaacagcaaaagcaaacctgagaccccaaaacaactgcgtctggcccaggggagtgggcaaaaattccaacagggagagaccgtctctggcttatttacagacaggaagaaagctattagtgctccatgtaaacaagcacgcccaattcaagttggaactctttaaattctggaagacagcacatcacatccagccacgagggggcgcagccgagcagcaaggagcgcaaaagtctcattcttcactgcaatttctacctacagctctctcaaagtatacacattttcaagattgtttccaaattcaggtatccacaggacactgctaagcaagctgggagctttgccaaggccaaaataaattaaattatggtacggtt

SEQ ID NO: 101017 - DNA, 798 bp, Homo Sapiens
ttttaatttattaatactgatagcaatgaaaagaagtaaacccaacatttagcttagaaaagaaacttctattaaataataagaaaaaacatgctaagagatcagaaacaggacaaagagcaagaaaacagagacggtctgcatcgactcaggtgataaagggagctccccaccctgtactaattgtttttccttgttatatttcaaatggttggtttcccaagctgttaatgctatttctccacaaggtcaatctattctcttagaacagaccattcacctatttattgtgaagtgttatttaagcatatttgagaattagtatattttatttaaaagactgataaacagctaaaggacaatattcacaaatcatttacctatcaggcacccttggagcaaaacaggatgtagtagaatgaatacacagaatgcaatcaggcccaagttcctggactttagcctccactgctttcaggtctgtacgcagctcgtcaccttccaaaacattttctatcaccacaggctcaaaacctgcagtgatcatggatttaaagcaggacttctggtctattcgtggccatataatatactttgcctttggtcttttgtgtcgtaatgttaagaaacacagagttagactcataccagttgccataggaactacaaagcagttggctactgtatggacacctacaaataagaagcaaaacagaaatctgttatcccgctaagcacccagcatccttcttgaggaaataatatatttcatatataaaatagtaagagtcgtagccc

SEQ ID NO: 101018 - DNA, 598 bp, Homo Sapiens
aatataataattcctttccctttggttagatacccaatagtggaattgctggatcaaatggtaattctatttttagttctttgaaaaattgccatagagtttacactaacttccattctgaaatgggcatttttgaatgaaaaatttaaagactggtttagaagagcacttcaggtgaaagaatataaacttcagcttaatatatcacatatatagtatagataaaataatttgttgtgtagtataatgaggaatgtggttataaatatactattttaagtggatttatacgttgtatttgttctgcttataatgggaaaaaaagtctttacatataaaaatagtggcaaattccatttgtattttttaatctctgaaatttgggaagcagaaaatatcaaacgaagaaagaaaccagagtctcaacctgctggacactattggaagtccatcatttaacatgtttttagtatatactgttagcaggagacagctctgagtcaactgtgttgaggtgccaccacagcgagtttaggcactcagatccctgcatactcatcacattgggccataatggcaaatagaattttttgttttg

SEQ ID NO: 101019 - DNA, 152 bp, Homo Sapiens
ctttggataagtaagatgtgtgaccctgcaaggaataacaaaaattattctgcttatatattcttagaggatacattaatgtctcagtgattgtcattcatctttcacagcgcccagcaaaatactcaataaatttgtgctaaaaggcaaaa

SEQ ID NO: 101020 - DNA, 273 bp, Homo Sapiens
cattagatccaaaattcaagacaaatggtaaatgccattgagagggaaagagaaaaacttgattttttttgtgtaatgaaggatttaagaatgggttgacattaataagaatgctttagaacagaagacaaactgtattgcattgtggtcagacatggttcaaagtcttgtactgccacttcctacctatgtatctttaagccagttatttttcatctccaagcctcaaatttctcacctgtaaaatgagaaataataaatagtatctacctc

SEQ ID NO: 101021 - DNA, 455 bp, Homo Sapiens
  misc_feature (157)..(188): n is a, c, g, or t
tctagagctgatgatacagtcaggtatttaccaacactcatgtatatatgtagagtttcaagaaataattgcttatccttaccagattcaacatattctaacgtttcacatattatttttatttcttaatatttttttaaagatggggttttactcnnnnnnnnnnnnnnnnnnnnnnnnnnnnnnnnaggatttcgaccagaagtttgactgcagcctcgaactccttctaacaaacaatcctgctgccttagcctcccgagtagctaggactatgggcacatgccaccagatctggcatattttaaaatttttgtagacatagggtctcgccatgttgcccaggctgattctgaactcctgttctcaagcaatcctcctgcctggtcttcccaaactgttgggcttacaggtgtgagtcattgagcccagcttgtattcttttgatttaaaaa

SEQ ID NO: 101022 - DNA, 539 bp, Homo Sapiens
acccaacccatacttcagaaatgaggtgctggtgaagacatatataataaaggcaaaaccagatcacaatgatcccttcttttcttggggatgggaaattgaagattgcaaaggctgcaagatagactggagaagaggaaaagatgttactgtgacaactacccagagtcgcacaactgctactggagaaattgaaatccagccaagagtggttcctaatgcatcattcttcaacttctttagtcctcctgagattcctatgagtgggaagctggaaccacgagaagatgctatcctggatgaggactttgaaattgggcagattttacatgataatgtcatcctgaaatcaatctattactatactggagaagtcaatggtacctactatcaatttggcaaacattatggaaacaagaaatacagaaaataagtcaatctgaaagatttttcaagaatcttaaaatctcaagaagtgaagcagattcatacagccttgaaaaaagtaaaaccctgacctgtaacctggacactattat

SEQ ID NO: 101023 - DNA, 447 bp, Homo Sapiens
ctctttttgtagaatctatgaaaaaacatttctgagcccgttgaggcctattgtgaagtgaatctcttgcaataaaaagcagaaaccagctctctgtgaaataattttgtgatgtacaaatttatcttgcagagttaaaactttgttttaattcaacaagttgaaaccttctttttgtagaatctgcaaagagacatttctgagcccattgaggccaatagcaaaaaaatgaatatcccccaataaaaactagaaacaaaacagctgtgtaaatgctttgcaatatgtggattcgtctcactgagttaaacctatgttttgattcaacaagttaaaaaacttgtctttgtagtatcttcgaagggacaattctgagcctatggagattatagcaaaaaactgaatatcctgcaataaaaactagaaacaagatatccgtggaaaaaa

SEQ ID NO: 101024 - DNA, 421 bp, Homo Sapiens
atgattagtgacttaactctacccagtgtggcactagcgctggatttccaagaccacctgcaggttcaatgattcctgagagactcaagggactctacgtatagttatacttaacagttctgatttagtacaacagaagcaaaatcagcaaagggaagaattacatgggacaaattccataggaaaccaggtggtgatgtccaagaggcctctcccagtggaatcacacagaacacacttcattcttccactgccaaattgtgcaatacgtataaaatgtcaccaatcagggaagctcattagaggtacccagtactcaaggtttttaccatgacatgctggtcatgtaggcaccctctgcctagcacataccaaaactctggaatcacagagggaaagctggtgttctgcataaagtatc

SEQ ID NO: 101025 - DNA, 435 bp, Homo Sapiens
gccccaactatggcagcaagaggcaggggagcctggctccagagccaacactatttttgcagtaaagagcctttcctaatgagccaatctgtctctacttctattggcatcctgggaaccagggtgcagcagagataatttgcttcacacaccccccgcccaaacaaagcaccattacctccaaaccattacattagcctttatcagccttggaagctctcagtcatcctccatgagctgcagtaatttcagctaatttcttaagtgttctaagagcctctgatgtgttatgagcctagtaattgttgactggttccttttctgttgtggcttgatttcataccttgtatctgagctgatgcgtgctttgggtactttattataatgaggctttttgcaaagactcacattaaaaaataacattaaatactgaaa

SEQ ID NO: 101026 - DNA, 505 bp, Homo Sapiens
  misc_feature (21)..(21): n is a, c, g, or t
aataataataaataacattanagttaaactcgactctaattttcagtttacagaaaataaggatgatggaagaacaagctaaatgacaccatagatgctaactggaaaaacgtacctattaaaaaaggacattgctgtgacaatcaggaaaagttgaacataaagtggctatcaaatgatacaataaaattgtcgtcaattttcatagatttggaaatggagttatatttaaaataagttcttaactgtcagagatactactgaagaagtataagtgacatgataggatgtctgagacttcttttaacatgctacaggggtaaaaggagtgtgaaaggtaacaaaaagggcaaaatgttggctgatgcacatacggatacatgcatacaaaatgctgactgatagatatatggagggggttgttatattgtttctctaatattatgtacatttaaaaattgccataaattttttaaacttaacaaacaaaaaagacagaaatcac

SEQ ID NO: 101027 - DNA, 466 bp, Homo Sapiens
acatatatgtcatatgcatttgaatgtgttacatactcaatttgtaagccacttaattggaatgtgacatatatcttcctatagaaatgagagttaatagtgcctacattctcaggctagccctcaaaagcctattaaacatctctttgaggaaacactgggcaatggtcaaattcagagctctggttctgatgatgtaaaacgaggttaggccctctgaggcaaagattggaaatgaggtggtagggacagagtcaagcaatgtctctgaggctctcgtgctatacaaaggaaagagctagggctttgaactcaaacagactagggtcatgtcagatttaccagttactagctctgcagtcatcaagaaattatgttctctttgccttcacatagttacctgcagaaggggaatggcttgggagcactgtgaggatgaagtaaaacagcatatgcaatgcacctc

SEQ ID NO: 101028 - DNA, 502 bp, Homo Sapiens
taagccatctttgctatgccttgtctgaattctgactgagagggtaattttatatttttcaaagggtgaaagtataatgtttgatcctcacaatgatagtttggcaggttgggctagcattattataaccttcattttatagattaaaaaacaaaacaacaaacagggatttaagcttacctgctttgagattgtatagctaaggtgtggagtgctgacgctaaaatcctgatctttggactccaaagcttatgctttctctcgtttctcatctggatactgtaggactttagaatggcctaaggaagtaaaacaggatatatccagaattttaaggcaaggtcagaaaatgtcaaatgagtagaacgctaagaagaatcaatattaaatggatgagaccagtcatcctgtggagaaataatcatggaagatctgaactacagactgatactgacaaataaggctagaattcaaaatggaaccaatgtgaggataaaagcct

SEQ ID NO: 101029 - DNA, 479 bp, Homo Sapiens
ctatatactatatggtttatataacatttataatggccctttcagacccatatacttacaaatgacattgtataactacctacatatgtattaatgtgacagaatttagtcctttatggaaagtcaaaccaaattgctagcagttttgagttgaaatgaatgataacaattaaagcttttaagaaattggtaaaggtaccgtaacaaaaactcagcagataaatttaaaagagagggaccatttttgaatgccattttcagagttgacatctaaactagatggtgtgtttaaaaggattttagtggttttgattcatcctttctctgcattcatatcatttagcaaattaatgggacatatgtcatggtttttgtaaaaaagaccattgggttgtcatgattcagtttgtgtttggacatctatggctttcattaaaaacgtgtttattatcatgaataaatattaccatgttttccaa

SEQ ID NO: 101030 - DNA, 565 bp, Homo Sapiens
caatatcctggcttatacagttgatgttagggtgatttctaccagtcagcagttaaacgttaaacactcatctaacctgagctaagagggtgtacatgatcttatgctaacagaattaaaagcctgttgattaaaaaacaaaataagataacacaattagaaatgcttcttaacctgataaccatttacctccagatctaagggttgtcttctgggactctactaaccttctaacacttgatgcaaattgttatttgggcaagggagttattggttttcatcacattttcaaaggggttctgaggcccagaagaggttaaagagcagggtacccgaaggcagtaagtacgagttatgtactagcgggtgaatgagtgaatcaaatgcaggaaactgtttcccatgtgtaagtgattaaatattaatcaagtctactcatatataaatctatttaaagctgccagttaatgagagtttacagaaaggagtaacgcgtccacttaggaatcaggactgtaccctctcttctgtatccctcatcaaaaaatatgtttaaacttttcca

SEQ ID NO: 101031 - DNA, 477 bp, Homo Sapiens
tccgtctcacctcccactccccacccaagaatcaaggggaaagatcatctttaccaggtttgagacctgatccatttcagctgagctgcatagcgagtccagaagaggatctttccttgaagggtgcacgcttcctgcaagatgcatctgtaggtgtttgagatcatgtcctgtagttcattccttgtgcaggagggtgagcccgctgaggatggggaaaatttctcgtctgtgttatggtgcccagtaacagtgatttattattcagatctgctccttatttttcatcttgcttcccgctctgaacccaccagagtgagattacacctggactggcctactgagacttcaccctaagaacttggtcgaatgtgccagttgctgtggtcttaacaatccagatgggatgctatttctaaggctgttgtcagagtgttgcattttccccggacaggtattaaaataatataaaggcaa

SEQ ID NO: 101032 - DNA, 875 bp, Homo Sapiens
acaataataactttaataatgataacactaacatacattgataatattgtttaaaataacaattgccataaaacaatactaaatgtttataaggtttttatgaacaacaggtgaattactacagtgaccataataaagtgatccataataaattccaaatatctcttagctggtatgaataactattcatagtattaactaataaagattttgtacttgtttcctattgctgctataacaaattattactaattttgtggcttaaaacaacagaagcttattatcttacagttttggaaatcagaagtctgtgaagcttaaatcaaagatgttaacaaggctgcattccatctgcaggctctaggggagaatctattgctttgcttttcattacatttaaaactagatcagttgatttcacaacagtaagacaaagaaagtcagaaaatataagctacttactggtagtttcaagaaatcatcaatgtttaccttacagtgccttttcttgttcttttgcacccagtgacagatctctaacctgtgagatcagagtatttggggatgagtgggatccagggaagctggtggggaagaatatctgtggatcactaatgaaagcagcatgcctctctggtttttggtgggggagatataatagcaaaagttaaattagactagaaatcaactactttgtaacatggtctaggttaacagtaacaaggtgtgaaaccttaaatgacttaattttctgagtctcaggattttaaaaaatttctttaagatgggtaataaagatatcaatatttaatttggagatagagctattaatattactgataacatttccttggatgataaaatgtatttttttc

SEQ ID NO: 101033 - DNA, 474 bp, Homo Sapiens
  misc_feature (303)..(303): n is a, c, g, or t
  misc_feature (352)..(352): n is a, c, g, or t
ttttttttgatggtttttaacagagattttattacaatactatacacaggaagataggaaacaaatattctccctgaataatatttttaaaagaatttatctcaaagctagagtcagtattacgtttattgttaaaacactagaaaacactccatttgcaaagacagcagttacgatcaggattacttaacactttgaatgttcaaaccatttcattatacaactgataccaaaaaagaattacaagtagtaaaatggagaagtaaaataatcattataagtcactatatgcagatgatatanattttctatctgcaaagccaagagaatgagcaaagcaaatgtgggtagntttagtaagggcagctggccttctaattcaacaaacgaagcaaattacttttttgcatacacgctaatcaggtactaaatattatacaaaaattaaaaacacttaatataggtactaaaatt

SEQ ID NO: 101034 - DNA, 586 bp, Homo Sapiens
tatattcacagctgaaacatgatagcatcaagaaggttcagatcaaatgcacaccattagtatgcttaaaaattgttgatttttgctactctgtagcaaaatggagatgtcagttgattttagaaggtatacctacagacaggcccaacaggtgggaaacgacgagtcaaaacactcaattcccttttcataggatagaagccacaccaaatataggtcaaagtcctacacatcactaaaacgtgcctaaagcttcaaactacaagtctgattcctacttatggcaaataccagcttaaagaatgagtttgccatttgattattctcacttggatgtagaataatcagatacattatctagcatctagaatttggatttgccatgcactagagttcaaaagcacctaaatctacttattgccaaaggtaattccacataatactaacagcattgactccttgttggcaaccgttatctgtttaggttaccacacaccgagttcttctatgttgccaaagtattcctcaatattacatatttatgtatgaaattggtaggggaaactaaaagaggtccagtcaccta

SEQ ID NO: 101035 - DNA, 553 bp, Homo Sapiens
aattttattcattaccgatgtggttgcagcatgcagagatactggatatgactggtttgagcaactgcttcaaaacttgttgaagtccgaagaggattcctcatataaacctgtgaagaaagcttgtactcaacttgttgataacctagttgagcacattcttaaatatgaggaatctctagctgactctgacaataaaggtgtgaattctggaagattggtagcttgcataaccactttgttcttattcagcaaaataagaccccagctcatggttaaacatgcaatgactatgcaaccataccttaccactaaatgtagtacgcaaaatgatttcatggttatctgcaatgttgcaaaaatcctagagctagttgtaccactgatggagcatccaagtgaaacttttcttgccactattgaggaagatctaatgaagctcatcatcaaatatggcatgactgtagtgcaacattgtgtgagctgtcttggagctgttcgtaataaagtgacacagaatattagatatgtgtgggcttgtgtcaatagatac

SEQ ID NO: 101036 - DNA, 521 bp, Homo Sapiens
  misc_feature (263)..(286): n is a, c, g, or t
  misc_feature (492)..(492): n is a, c, g, or t
aggacagattgctgagggaaagggtattatgcatagtttttaaagcacctttcatgtgctttgccaagttgctctccagaaaaattttatccatatgtaactccatcagcaatgtacggaaaggcctctttcttcacatccttggccagcattggatgttccttttctaaaaagtcttttatcccaatagattttgacaaatcaggtttcttttctgagcattctggtttcacatggcttatgtgctcacccaatgctaccgnnnnnnnnnnnnnnnnnnnnnnnngctaaataggagtaactgagtaccctgcatccactgagaaatcttctgcttcctgaaagctctaaggtaaagataattagctgaatgctctgttataacaggatggaaaaagaaatggtggcctcaggtagccaatccactgagtctctccaggtaaaattacactggtttcgacaagttatgttacctttcatagaatgtaattntaaaatgatattagtctgggtgggtagta

SEQ ID NO: 101037 - DNA, 548 bp, Homo Sapiens
cctatgacccagcaatcccacttctaggtatacatatgtgagagaatgaaaacatacatccacacaaaagcttatgtatgcatattcatagcactattcataatagccaaaaaataaaaataaccaaaatgcccattaacaaatgagtggatcaacaaattgtggtatatccatacagtggaatattactctgtcattaaaaggagtgaagtactgatacatgctatataacatggatgaatttaaaaaacattacagcaagtgaaagaagacagtcacaaaaaaacccacatagttgatgatcctatttttatgaaatgtccagaacaggcaaatccacagagacagaaactagacgaatggttgcctgagggtgaggggaaacagggagtgactgatgatgggttttgtgtgggggcaatagaatgttctaaaatttgatagtaatggttatacaactctgaatatactaaaagccattgtacacacgttaaaaagggtggattgtatgtgaattctatctcaataaagctgttcaaaaattcaaa

SEQ ID NO: 101038 - DNA, 569 bp, Homo Sapiens
  misc_feature (313)..(421): n is a, c, g, or t
cccttggtggtccaggtcttcatgctgctgtgggtgatattactggtcctggctcctgtcagtggacagtttgcaaggacacccaggcccattattttcctccagcctccatggaccacagtcttccaaggagagagagtgaccctcacttgcaagggatttcgcttctactcaccacagaaaacaaaatggtaccatcggtaccttgggaaagaaatactaagagaaaccccagacaatatccttgaggttcaggaatctggagagtacagatgccaggcccagggctcccctctcagtagccctgtgcacnnnnnnnnnnnnnnnnnnnnnnnnnnnnnnnnnnnnnnnnnnnnnnnnnnnnnnnnnnnnnnnnnnnnnnnnnnnnnnnnnnnnnnnnnnnnnnnnnnnnnnnnnnnnncttcgctgatcctgcaagctccactttctgtgtttgaaggagactctgtggttctgaggtgccgggcaaaggcggaagtaacactgaataatactatttacaagaatgataatgtcctggcattccttaataaaagaactgacttcca

SEQ ID NO: 101039 - DNA, 515 bp, Homo Sapiens
ttttttaaatttagtagagtttaattgagcaaagaattattcaccaatcaggcagacttccgagccagagtggcctcagagagactccggtgcagctgcctggtagaagatttatggacagaaaaaggaaaatgacctataaaaaacagaagtgaggtacagaaatggaagtgttggttacagcccagcatttgccttattttaacatggtttgaatggttggccacctttgattggccaaaactgtgagtggcacaggagtaggttacagtctgtttacacatccagttaggttatagtttactatgtacagaaaaactgtcagggtgaacttaaaatatgcaaggaggcagctttaagtgaaacttaattcaacactaatattgattgagaatttttgctcagggctttataggacttacctaatttactccattttacactcatgtgaaatatggccatttaacagatgagtaagagaagattcagagaacttaagtgatatgcccaaggac

SEQ ID NO: 101040 - DNA, 458 bp, Homo Sapiens
gaagaggcaatttaattgaccaagttgagaaaagtcattgtgaatgtgtgtatacatgattgtggccagttactcatttaaaaagaaactaaaacaaagccagaaggaataacatcctagaaagtgacaaatgactcctgcaagatacataaacctaaccttctagatacatacacagaaccttccatattgttttctgcaagaaacaatatgctctggcccatgatacttctgcagagcagcctccgtttttggcaaattcacttcaaattcagcccagctttatgaccccccgtctggttggtcctgtaaaatctgatagccgatatactgaacacctcctgtgagcgtcctgtgttacatactacataggtttccccttgagccttaacacctctgagacacaggtattattatccctatcttatagataaggaaactaaggctcaggatggtta

SEQ ID NO: 101041 - DNA, 580 bp, Homo Sapiens
tgaaaactagcctgaataaaaacacattacagtaaatgttttatggtcaagcttcccttactctttttcttaactccatctatcctttccatactattgaaagagaaaacaagagggaaggctgtactggaaacctacctcagcttctaaatgcctcagatgaaatatacaggttatgtggcagtagaacatgggcaaaacttcttgtagtgagtgaggactgggatttggtcaggaggattttgcttgagggtgaagagggatgggacagaaaccgttagttaaacaccttagatctgtcagaagaccctggaggatttacttggggcttgtttcctgacaccgttatcatcagcctctatttttatttcctggttatcttaatctattttctttaattttctgtttctaattactaacattattttagctgaaattttattgactatcaagaacatgtcacttggaatcatgtagctgatgtatgcatattggataaagaaaacccacttataaattaaatgaaagaaatggtgtttcttgctctcaacaaagttcttcaataaataagaacaacaaa

SEQ ID NO: 101042 - DNA, 421 bp, Homo Sapiens
gagttggtagtaggtgtggggaatctaataggaacaattagagttagctatgagaactgaccttcacaaaaagggaaattttcacacaaccccaattttcagcttctaaagtgatatattttaaaagcttcatttgtatccttgtctgccagttacacagtatattactgttcaaacccagtagggtctgcaatcgaaaggtgctcttgcagcctgacattcacaaaccaaactggtcattctctttagtgtgattcagtaaaatctcagttaatgttttgggaaagggattctgatttatgacatttctgatttacaagggctttccttagaaaatacctttcggtttgatacttaccactggaaattggttcgatacttaccactggaaatctttataaaatatagtgatctgtttgct

SEQ ID NO: 101043 - DNA, 533 bp, Homo Sapiens
  misc_feature (389)..(415): n is a, c, g, or t
tttaagcagaggtcagtgatcctagcctagcccttggctcttcctgtatataagataaattctgagggattagtgactatgcctctgtaatcagtaacaagatgtactctcacacccaaactttgatggcactttgctctaacgtaacttgtgagcatgtttaatgtaacttatgagcagatgcagaactgccaccccctgatacaggggctgaaatactgcttgggaatctctctgaaagattctcctgggttacagtcttcagtaagactgaataaaactaaattttcttttttaaaagcctgatttttttcctttagttgacaatccatttgaagtttgtactattctgtgcctcttagttatgccatagacatggattatgaggnnnnnnnnnnnnnnnnnnnnnnnnnnnagcaatacccatgtagcctcatctcttcattatttttaaagttttatggaggttatgtggaggcatttggatttaggtggttaccatgttttttaggggaagctatagttctcttctg

SEQ ID NO: 101044 - DNA, 280 bp, Homo Sapiens
ctcacttcagcagtaagtatctggtttgctcatagtcttttgattaataggtagtttgaatatttttcaaagaatcagccaacatgtgattattttaaagatttaaataccagatagatattaaaatgcaaggttattgctactagatattacatctagctaaatcaaccattgtgaaataattgagaagtagagataataaagacataaaccaataaatctttgcttgaaaatcacaggtatgggaacagattgtgaggacagaaaaataaaaagtaaa

SEQ ID NO: 101045 - DNA, 532 bp, Homo Sapiens
ggacaaaagctgtaagaaaaggtatggaaatgacatggaaaatttctccccaacctccacccttggctgccccaggtgcctccaacctgacaaagccaccagcaatcaaaaccctcctggcattgtggctaagtggttttccttgtgtatccttgagatgtttcttatgtgaatagtttaaagtgtaagggggagccaaaaagtattttaggatggagcgttcaatttaaatgatgccgagcctcagacctttgattttacaaggaacataaagcactggtctttgaacattatttgcaaaccatgttttatcttagttacacagagaagagaaggaaggctacgaatgaaggaaggctgataacttaagctttacactggattgtgaaagtgtaggggaataacaaagggtcatagtcctgggccatgagagttttgtacatatcgtgtagatgaatccatggctgaagtctggagacttcttatgaagaagtttattttaatcaataaatgttttcccatattcaaaaaa

SEQ ID NO: 101046 - DNA, 400 bp, Homo Sapiens
ggcacgaggtttttgtgtagttatattacagtaaaaggaatattctttagttttgaaaatcttacatataaaagcagttttctgacgaaaataaagttagtagctaagaagaaaaattaagaatcccactgagtagtgcaaaaaacatatgtaacagatgtacacatatgactcaaggaaaaattttacaatgtgtcaatgaaacagctaattcttcagttctttttaaaaatttggtttcctgttggttacctgtagccacaacttgctgttcctttaaagagctctctcattattatagagctagctgctttgtaatttacacacactttcaaggtgattttcccccagggtcaagactgttttcccttggaactggaggcaggaaaaaaataaaatg

SEQ ID NO: 101047 - DNA, 458 bp, Homo Sapiens
cagcaatctatataagcctggaagcagattcttccccaattaaacctctagatgagaatgcagccaagcaacagctgacaccacagccttgtaagaccctgagcaaaggacccagtaagtaatgctgtatctgaactcctgagccacagctaagtttatggtaatttgttacacagcaacagaaaatgaatatatccagtgtgaagtattcatctggatccattgaaggggataaacatacctagagaagccaagccttatgatcacccacagtctctcttgactctatacaatggggagtcagtctcaatagggtcgggggttcatgagttaattagactttggctagagcaaatggcacattagaagataagagtaaaaagacagtctggagaaaataaactggtactctgtactttctgctcaattgttctgaaagcctaaaaaaatggtctacg

SEQ ID NO: 101048 - DNA, 588 bp, Homo Sapiens
ttttgattatttttgtaaaaagaattaaaaattttatttccagttgtttgttactagtatatgaaaacacaattaatttttggaatttggacttgtattttaccatcttactaaattcattataaattctagttatttttggtagaatcttaaaaatgtagatatcatgccatcttgcagagacaattttagtgctttctttgtaatttttatgtcagtttacttctttttctagccctattgtactagttaacaactccaatataatactgaatggaagtggtgagagtggacattcttgtcttgctctcagtcttaccgtcttagtttttcatcactagatgtgatgttagctgtaaatttataataaatgccccttattgagttcaggaagttgcattctattctgagtttttggagattttttaaaagaatgttacattttgtaaaattctctttgttctatatctacttgaatatcttatataaattttctgtttttttcttataatgtgttgaatcacaatggttgattttcaaatgtcgaatcaatcttatattcctaaaataaagctcatttatttaaaa

SEQ ID NO: 101049 - DNA, 457 bp, Homo Sapiens
aggcagttctccgtgacatgcatcggctcagctctgtgattctaaacacgggctgggcctgtaggaatgtccgtgacaccccatcaccaagctcccagtgcccagccagccccattctgtagctggcagcatgtcacccatcagcagcccaaatccctgtcccttggcctatggcaggctcagaaaccctcaagacttgagatcctgagcctcctcactggaggctgctgcagaaagagttcatctctgtataggtacaggaggtttggggcacacctgggaaccccaccatcccctcatgctgtacattcaacacaaccgcttcctgcgctcccagcccagactcacaactgaattcaaatggaacctctgatgggtaagtggaagactcttccacatttcccagcttgtcttcacccacagggcagtgagcctaaaatgtatctaaactgtggcc

SEQ ID NO: 101050 - DNA, 346 bp, Homo Sapiens
cacatgactacaaaatgtgttacatgaattaaaggaagtaacataatatataacagaacacaaaggtaagggcaaataatcttaggaagatcagggaaagcctcacaaaggacaattgagatagttcttgaaggataagcaggtgatccccaggataaacgaagtaagggaattcacggcagaggaacaacatgcacaaaggcaaaaaagaacaaaatcataaggtgggtgcaaagaattaattatgacaacaaaagcttatagccactgaacacttcctatgttacaggaactgtactgagtgctctaaatacatcatctcacttcatccactcagcaaaataga

SEQ ID NO: 101051 - DNA, 477 bp, Homo Sapiens
cgcttgcagacctttggagttagatgaccaagactggagagagctggctggaaaccatcagggaagtcaggtgtcgtccagcaggaatagcgagaccacgacatctcagccaagcatcatctctcagaggacccaagccccgcagcctccctccgactccctttttattctcccctctttcctgttccattcctgtgtctcaggccccctgctcatgagccattccacaacagctcctaccattcaaggagcaactgacctgaccgctacacgagcccctaccccgtggtctttgcccgtgccgctttcctgctttggggtacaagccagaagtccttcataggccagatactactatgtcctcccaaactggcgtgtaggcaaagaaattttgttcaagaaagtcactagctgccttggtttctctccaaaattatagagatcataaaacagagatgcttaaaaattcaagggaaa

SEQ ID NO: 101052 - DNA, 372 bp, Homo Sapiens
agaatggcatgatacgcagattcaaaaggccattaattactggcaaactgcaaatgcacgcaattaaattgcgtgactcttttatcattaggaaatgtccctctttgtccttggtaataccctttgtcctcggtaataccctttgtcctgaaatctactttatctgacatttctatagccagtccagttttcatggtattgtgtggtatgtacatctttttccatctgtttactttggtaaaagagtgactcttttatcattatgaaatgtccctctttgtcctatggtaataccctttgaaggtgtaacaatccaaaatgtatgcagaaattcaaattacatgaaacaaatccctacacaactaaaaggag

SEQ ID NO: 101053 - DNA, 560 bp, Homo Sapiens
gaaaagaaagggttctaacccattggctcaccaatttctttttacttaagcagatgctatggtctgaatatgtttgtccctctcaaattcatgtgttgaaacctaaccctcaaagtgatggtactaagaagtggggcctttgagaggtgattacatcatggggatggagttctaatgatgggattagtgctcttgtaaaacaaggtcaaaggaaatgccttgcctatccactatgtgagtgtagaggtactgtctatgaggaagccggctatcatcagacactaaatttgtctgagacttgatcttggacttctggcctccaaaactgtgaggaatacagatgatcctcaacttacaatggggttatttcccaacaaacccatcagtaagttgaaaaatattgtaagtcaaaaatgcatttaatacacctaacctattgagccttatagcttatcctagactactgtaaacatagtcataacacttaggctacaattgggcaaagtcatgtaacacaaagcctatgtcagaataaagttataaagaatttttgaatcaaa

SEQ ID NO: 101054 - DNA, 310 bp, Homo Sapiens
ctcccaaccttagccctctcccctgcaactgtggtgctcttgagactgaggtttctgcagccagtaagtcacctgctcctgtccgcaagcttacctaccttgtttggttgggtgattaagctgtcaccccttttcaatgagaatcctttgctttcagtaacgtcctcatatttctttccattcttacctgtgtcatgttctgttgaatactgcagccgctgcccgcttccaaatccatctgcgtgtagaatgtactgtagattgtaagaatgtaatatatatttataaacttactgactgtaaatataaa

SEQ ID NO: 101055 - DNA, 458 bp, Homo Sapiens
tatgtaaactataattcaataaaattgataaaaacaactagaaagaatccaaatgttcaacaacagtacgatgaataagtgtggtatagttatacattgaaatagtccataacaatgaaaaacagtgtcacttctgctacacacaacacaggctttcacagacataagggtgaatgaaggaaatcttacacagagtacgtaacatagcactctgtttacgtgaagtccaagaaaaggcaagactgatctatggctagaggtccacagcggggtggaatctgtggtagaactgactgggagggcacaagggggtcctctgggtcttagcattgctttctagcccccgtctgggtggcggttacatgagtgtgtgatatgcaaaaattcttcctgctgtatacttgagattcgcacaccgtttggtacataagttatacctcaataagaaagttaaaaaa

SEQ ID NO: 101056 - DNA, 402 bp, Homo Sapiens
actctttgcctcctgccacagacagagagagagagcgctacgctaccacagccagcttcctcccagggccaggaaagcttcaccttgtccccctctcacagttcctaaaattcttccattcatctatttggcctcttaagtatttactctgttttcaaatacatatataactccagcttataataccaagtcaaaggtagtctttcacaccatagcatgaatttgattgtcagctatttaaggaaggaggcagggaaagtggaatggggggtactctgaagaggccaggcctgggtattggaggttggagaaccacccaaaaaaagcctgaggggagaaggaaatgtaagcagacacgacacataggtaaaacgaagaaaggtacaggagtctcctattagg

SEQ ID NO: 101057 - DNA, 119 bp, Homo Sapiens
aagagaagaggtgtgaacatgccggaatgtcttccagaggtaagttaataacttcattaggatgtatttacttggagggtatatattagaatgacatttttttaaattacaaatcaaaa

SEQ ID NO: 101058 - DNA, 692 bp, Homo Sapiens
gagagacaaaaattatatttcagaataaactacagtacacctgctattagattatagtgttgcccaatgtttttgaatttttattattttctataatttggactgaattataaattgttttctggctacgaatctccaaaataatgttttcaaatttttccttctttctttcctccctaccccacccccacagttttcctaaattgaaatcactaaaaatgaagccatgctttcctgaaagccctatgaactgaagctagaccacttaatctttagaagaaagtaacagcaacctatttatatacataaatcatttttatagctgcctactcatgtatggacttcatttggggagctggggagactgagggaaagggtaaaaagtcaggaagtttacaggaaccagaacacacacatccagcttcctaagcacagaaaactggagaagaagcatgctgcttccattatgaaaccactctgttggtaatccgtactgttatttgatggtctattatttcgatgtctaaacttaaagcttaagaaacttagagaaatctttaaaaactactgaactaaattttttattactactttatttatttacttgatcgaagtttattattagtgatcacttccataatatctttatatcttatgtaacaataaatccagatgtaagaaatttaaaaaaa

SEQ ID NO: 101059 - DNA, 541 bp, Homo Sapiens
actatagggaatttggccctcgaggccaagaattcggcacgaggcggcacgagggagctgtgaagacaccatcccccacccgcctcctgtggcgagtcatgggttaatactattggtcttactcattccgataaagctttctctcctattcctcctgacaagtgctcagaaagctttaggagtagcttgtttccaccagagacttccttccagtgagggtgaagtggaggcttctggagtatcctcacctgagggcctaaggacctgcagctcagaaatagcccaggctggtcagcagccagacggcagtggtgtcgccagaagcgtatgcagaccctggcctggagacagcacagaaccagtctccaaaattggcaatggccactgaggtcctgagggctcacactattcacaaatacacttctgaataggttggttataatcaatgtagtaaatggaatcattgcttaaatgtatccaaagagcccactatgcaaagagagatattcattcaataaacacttattgtactgaaaaaaaa

SEQ ID NO: 101060 - DNA, 850 bp, Homo Sapiens
atcaagacaaagacaagagctctaaatcctcaatcatgtcaagatcaaaattatgtagacatttccacttagaaaagctaaaaatatacaaatgaagaaactgtaaatagcaagacaaggtgcttgatagtagtactatggcagaaattcatggtatttggtaacatatacaataagtgacacctgggaaaaactttattgctcttgatggaatatagcaccactttgaagactaaaagatggttagaattaaccaccttttaatcaacaataggcattaataggaaaagtgcttaaagaagtagttctggaaaaaggtaagttagagaaaatttttgtattatatattttaaatgttacccacttgtcttcgttaaatagacaatcagcagtctattttagtaatgtatgatcagatttgctactatcagtctgattatcactcaacaatataaaatcaagggactgaaaagtcattcaacttataaaacaagttagaacattataattttttatgccaaaacattcagataattattgcttagatatacaataatgacacctgtgaaattttccaaatcagaattgagaaaatttcttttgtgtgctgtaacatttatcctatgggagagaggagtatctaaggatgtgtagcaattgctagccactatggaaaatagctcaattttcccctgaacaatttctaaacactaatgctaccatggtcattcaggaatcagaagaaaacatgattacacacatgctagaaaagagccaaatgatttcaagataatttgcagctagcactttgttcaatctttagaaagtagattttaagtttccttattct

SEQ ID NO: 101061 - DNA, 480 bp, Homo Sapiens
ctcacatgacaggtgcaccaaaatctcagaaatcaccactgaagaacttattcatgtaaccaaaaaccacctgttccccaaaaactattgaaataaaaaaagaacctcatgaatattttttaaaagcctatgggaaaaaaattacaatctaagttatgactattaccaccctttcaccatttctgaaagctcagctgattctatatgaacttctacaacatcactacccagtagaactttgtattacgcaaaccaattattactaggccgctctccccataactcaattctgcctatggactcacttggagtggagtggaacagttgattaaactgcttataggattttctcagatgttcatatatgtaattcacacactcaaaactctgaacaagtgaataccttcctatgtacaattaactatatttgtatttttggattggcaggcaaatgaataaaagaacatcttttatttaaaa

SEQ ID NO: 101062 - DNA, 527 bp, Homo Sapiens
taggagttaaatgtattaggaggtaaatgtaaactctgtggtttatcatttattcacaattgctcttaattcttggggtatagtttgcctcctacatgatgcaattcagtgaaattcccaggagacaaaacaagattttaacctgaataaaccacttattgttgtaattcacaagtgagtttattcttcctggcacacttccaggtaatatccattaggctaaggattttgtttgttcactgttctatccccaagcctagagcactgcccagtgcggaatagctaataaatattgttgaatggatagatgaatggcaattttgttggtatgctctacatagtcagcagtcaataaaggaaacatatattcgttcctgataataagatgattcactttattgcccataaattgggctttttcaggccatcatgcacgttgattgatccagagatccctcaagcatgaaaaagcagagacataggtggtatagttattatcaatagagataagaaatgtagctggcaaa

SEQ ID NO: 101063 - DNA, 208 bp, Homo Sapiens
agcccggctgggtcccgcgaggctgcgccggggcgggcggcggcggcccggggacgagtccagtccgcgttttgcgagtgcgcgggagtaatgcgagcgaagtggataatagttgctcgagctcgcccgctgcctctcaagccatgctgggcccgataggctcagctagtcgtttatttacccatatccgggctagagaggaaaagag

SEQ ID NO: 101064 - DNA, 267 bp, Homo Sapiens
tctaaagatctctaggtattaactataagccggagaccaatacacacacaccaaagtagaatttgagttacataattatctcactctccctctccccccatccttttttgaatattgagtttttaccagtttaaattaccactatttggaaagcctgacatttagtatcagtctgtgttaagctatagatgtaatttctttaaagcttgtttttctgttgttttttatagaactttcctttttcccccaaaaatatgcctgagaggg

SEQ ID NO: 101065 - DNA, 572 bp, Homo Sapiens
cctgggaaataaaacaagctcatggaacaagcagaaggctttaaatgaactgtagtaacttcagagggcaaggagaatattgctgctatgaaataataacagactatttttaaaataattggatgttaagaaaatatgaaattttcccaaaattaaaacctcagtagataggctgaatagcagaacaaacacagctgaaatacaaaataagtttgaagacaaggccaaggaattctccaaagaaagttgaacaaagaacaaatatatatattttaaaattctttaaagaaacatggagaacacaggagtttcacaatgctgatactgcatctaacaggaatcccaggaggagaagacacaggggatctttgtgatggaatgtctgtctcttgactgtatcaatgtcactgtatcctggttgtgattatcctagagtattgtaagatgttattattggagaaaaatgggtaaagattctctgtgatgtagttcttaatgatggcatgcaaatttacagtgatatcagatacaaaagtttaattaaaaaatgagttgtctgctccctaaaaaga

SEQ ID NO: 101066 - DNA, 675 bp, Homo Sapiens
gataaaatacacataatataaaacttaacatcttaaccagctttaggtatacagtttagtggcattaagtagatttacattgttgtaccactatctagctctgtgtaactcttttcctcttcctaagctgaaactctgtactcattgaatagtaactctcctctccccctcccccagcccctggtgaccaccattctacttgaaaatccagggtttgggtgggagaagagtgagaaacagtgaaagggcaatctgaagccacatcagggaaggtcttggttacaagtcaaggactttgtatactatttggtcaagaactggaaggcagtcaaagtttttgagtaggagaggtgcataattatagcaaggctttaagaagactaagtgggcagcagggtgcaaaatatataatctaaggagaatttgggaaggagaaagttcagttagaggctcctgtatagattggaagaggaagtaacattaattcatgtcatcgcagtgggactggaaggaaaatgacatttgtatagtgctttagagtttacaaagttcttgttcgcattaattacttcatttgcatatggcacttgtggaaagtaagttagctcaaagaaaaacagaccataagacagtttacagtcaataaatgtgaaatgaaccttgtgccgaattctt

SEQ ID NO: 101067 - DNA, 456 bp, Homo Sapiens
ggtgatccacgggagacggctagcctggaccaagcagttggcaatggataagagcctactcctcaaggataagatgctgaagcagccacgtgctggtgttgtaccttggacagttccatatgatgagctcagctttcacccattctgcaggagctgtggttctgcagctccctgaccagggacagcttcatcctgcacaggaccatgcatgcagggtgtgctcaatcatcagtggtgactgccgaactccttccatcattctcacatgctccacagcaaccacaaacacttgtttaacctggaaagaggaaaaggccaccccggaatagtcatgcttccctctcactgaagtgaaccagatggggccacatgcaatcagatggactcctaaacagaacaaaatgtcactctccttgtatcatggttgtctcatgggttgacatacccaacactaaa

SEQ ID NO: 101068 - DNA, 474 bp, Homo Sapiens
  misc_feature (461)..(461): n is a, c, g, or t
tttctaatcattccatccaaaatttctggtgaattacacagaaatttttggaaatgggactttgtgcaggtaaccaccctgcacttcaggtaatgttcctgtcacagctgtcgactaccccacgctgcaggaaatccattcagaaatgagctaacagtctccagtgtagcaggagagccagtcacttccctccccaggccccaaagcaccccaaggctggtattccttgagtcataggtattaataataaaagcctcaatgcagcttctccatgtagttcctctcctacaagccaggtggattctggtcctaactaaagagatgggagttcacctgagggcaagaagtacccaggatgcccaaacagccgcacaggtgtcctgtgcttcctgtgagacttcctgggggaaatatacaaactaatatattttttaatgtttacgtcatttacactgctgctnttctcatattctg

SEQ ID NO: 101069 - DNA, 562 bp, Homo Sapiens
ctgacttcttccggggaaaagctcctcctctaccacacagaagagacaataaaaatcaatcagaagtgctcctatatacctaaatgtggaaaaaattttgaagaatccatgtccctggtgaatgttgtcatggaaaacttcaggaagtatcaacacttctcctgctattctgacccagaaggaaaccagaagagtgttatcctaaccaaactctacagttccaacgtgctgttccattcactcttctggccaacctgtatgatggctgggggtgtggcaattgttgccatggtgaaacttacacagtacctctccctactatgtgagaggatccaacggatcaatagataaatgcaaaaatggataaaataatttttgttaaagctcaaatactgttttctttcattcttcaccaaagaaccttaagtttgtaacgtgcagtctgttatgagttccctaatatattcttatatgtagagcaataatgcaaaagctgttctatatgcaaacatgatgtctttattattcaggagaataaataactgttttgtgttggaaaaaa

SEQ ID NO: 101070 - DNA, 290 bp, Homo Sapiens
tttcctgaaccatcctgagcccaagtctcactttgctgtcttccctatttcccagtatcatttaactgagaatttttgtttttatggcattcacacatttttctatttgaccgaaacgactagtttatgtaaagttatggtttggttagacatcgtgtaagtaaaatgacagactgtttcttgctaggaagatattcaacatttagggcaggttctagttgtaaaacaaactaggtaaagttaattacttagcataatgataattccatcataattaagattactgccca

SEQ ID NO: 101071 - DNA, 539 bp, Homo Sapiens
  misc_feature (321)..(358): n is a, c, g, or t
aagtgctgggattgcaggcatgagtcaccgcacccagccttaggtgaattcttaatactggttaaatgagaataactacatgacctttcttagagactacaagaatatttaacaaaattcaatatccagtattgatatgataaaaacatatttaagtttaaaaatagcatcttgtttaatgttgcacactagaagcattttccattaaagtcaggaacagggtaagagaaataatatttccacttatttaatattattctaggtatataaagataaaaaatacaaattttaagaattacaaagtggagacaacataatgannnnnnnnnnnnnnnnnnnnnnnnnnnnnnnnnnnnnnaagagtactcctggaaagtctctcataaacaatgagttaagtcagtaatgtagttggttacacaatcaacagcacttctatgtttcagggaaaaagctaggaaacaaaatggaagaaaaccttgtacttaaaatagcaccaacgctcacacttacaacatcagcaacaacaaaaatgtagg

SEQ ID NO: 101072 - DNA, 515 bp, Homo Sapiens
ggtggtgaaggaggaggcctaatgtccagaggactgtttatccctgaagtatgatatactaaaatatttcttattatttgtatcaattttccttggagctcaatgtgcccttgcagtcttcagactttattttaggaaaatatatttgcatgttttccccccattctcaatgtttggtgtcctggttcatcataccccacagaatgttatgtttatgtatcataccattcctctgtggacatgcatttactttgtttacaggttttggtttgggggttctctttttcctactctggacagtgcatgtacatttactttgcatgctggtgcttttttttctatagcaatagtgtctgatagacatatgcaagtcacatgtaatttaagatctagtagccacgctaaaaaacaagtaaaattaattttaatatatttaactcaatacattggagatattatttcagtaagatatttttcattcttatgaaactaagtctgtctggtttgcatatctc

SEQ ID NO: 101073 - DNA, 542 bp, Homo Sapiens
tttttttgaatctctaaatctactttacatttaccacttttctgtaggtgtatcatacttcaaaaaaaagacctaaacagtgcaagtaacactgggcgaggaattagaaaacctgagttctaaagttcaaatttgcaactgaatggcccttatagaactttgttaatctttattatttaattttttaaagtatcttaatagataagtatcttatttccagatgagtatatataattttgtgctatatttgagaggggaggggggcatcagtgaacatataatagtgatttcttaaaatgaagactagcgtagactttcttgctatggtggtggggctgccacattaggtaggagcccttgttaggtgctttctatgattttaagaacctatcaacttacctcgactgtcacactgtcacattaactgtacggatcttccctaaggacactccgcgtgctgttagacaatctaatctcaaactatccagtgccctgttttaatcaaaagctgaatcataagaagacaattcttttatacttct

SEQ ID NO: 101074 - DNA, 298 bp, Homo Sapiens
  misc_feature (66)..(80): n is a, c, g, or t
aactcttacctaaactgagctgaatgtttgtttcagtgccatatggaataacaactttcagtggcnnnnnnnnnnnnnnnctggaaacatatgtgagacactcagagtaatgtctactgtatccagctatctttcttggatccttttggtcattatttcagtgtgcataagttcttaatgtcaaccatctttaaggtattgtgcatcgacactaaaaactgatcagtgtaaaaaggaaaacccagttgcaagtttaaacgtgttcgaaagtctgaaaatagaacttgccttttaagtt

SEQ ID NO: 101075 - DNA, 357 bp, Homo Sapiens
gtgtgagccactgtgcccagccaacgcagaaaaattctaagtttattattttataaatcatattccctataatagttgttcctaatattccaaatctttgtttcttaacagctttattgagataaaattcattcagacccttcttaaacagggtgctaatcatctaagttcatacgtcaaagattacttctcaaacaatgtaccttttcacccttaatttaccataacctagtaaacgccacgtttccaaagcaaatccttaagacccattacaaacatcatatatgaaataacaactcacacttgatccaagtttgatggatatggctgatgctttctttgtcgtctgactaccta

SEQ ID NO: 101076 - DNA, 394 bp, Homo Sapiens
tttgaagaagcacacaacaatagcttatttattttccttatttagtacacaataatgcataatccttctgttgaggaagtcttccttaatgatgatgcatgtttttctcctaacttgttggtaagttttctcttgaaaatccacttcaagggatttatctaaggaaataatcaaacatttaattccaaagtatgttcatcagagcactgtttacagcaatgtaaagttgcaaagaacctgttgacatgttgaattatattgatccggccaagccagttggacttttaactgacctctgtgttcaacaaaaaagtcaactaatgtcctggtcacagttgctgaagtgtggaagaaaaatgcagggatccaaagaatggccccgtcaagctttttt

SEQ ID NO: 101077 - DNA, 219 bp, Homo Sapiens
ctttaaatagtgagctaagtatttgaaaaatttgtgaactttactatctatacaaaaattagtcaaagtatatgttactgaaaataaattagaagtatcatctttatatttatttaaatccccaaacatactacaaaatagtcgaaatctcctctcattgtttattgtacccttcataagagttagaaattttcacagaataatggtatgtctgcaaaa

SEQ ID NO: 101078 - DNA, 428 bp, Homo Sapiens
tttcctaaccaggggtcataatttcccttgcccttctaaaacattcacaaggtcactttactaaaaacctagctaacctgtatgtacaaaatctaaacaatgtaatacaactttctttgtaaattattaaatgatgctacgaaatgtaagcaaaatatgtgaatgggtaagtaaaaatgaggcactataaaactagttttattcttataatatgcctaatgatccaccatctactgtcttccccccaccccttatctaactagtcacaatacttggtacttctttgcctgaataaaaataactctgaatttctgaaaccttttttaatagctggaggtggttcctggaataaagctgggcagtatggaaaagggttaaatgattatccagatgatacatgtggataatttaaggtattacaaagcatg

SEQ ID NO: 101079 - DNA, 324 bp, Homo Sapiens
atgagccactgcacctggccgcgaatgtctctatttattcaagccttgcagtaagttagcttcacaggcctcttcacctagtacttgcacagtttctatggtagctattattgctattttcccagtactctttctaactggcaattgactatagcttctttatcttgtaacctgccacctccccaccttgcactatttctgtcctcagcaatgtcgtgtgcccttgatggtagaaagtacctgccaagttgtcctcatgtccttgggacccagctcagaaccctgcacatcgcaggtttgtgtggtgaaggcttattaaattag

SEQ ID NO: 101080 - DNA, 548 bp, Homo Sapiens
  misc_feature (293)..(354): n is a, c, g, or t
  misc_feature (383)..(465): n is a, c, g, or t
aacagccactctcacacctcttacagggaggaaaacagccagcgggagagagtcagccctgagctggggggaaaggaaggctggccctctgcttttggtgtcaggattactatttaatgcagtagtcctctattttccttcttcccccaaataaagtgttagtatatgtaattttcaaaagacattttaaaagagcctttccccacacctcaaaaaatttgatgtggaaaggcagattggcggttacacccctaatttttcctacccctttaaaaaatgaaattatatatatnnnnnnnnnnnnnnnnnnnnnnnnnnnnnnnnnnnnnnnnnnnnnnnnnnnnnnnnnnnnnngtcctttcttacagtctcactctcacccnnnnnnnnnnnnnnnnnnnnnnnnnnnnnnnnnnnnnnnnnnnnnnnnnnnnnnnnnnnnnnnnnnnnnnnnnnnnnnnnnnnagtctattccttttaaccaaaattcataggtagtgcccagagagagtacaagctctgactcatatggcagtatttacttaaaa

SEQ ID NO: 101081 - DNA, 561 bp, Homo Sapiens
accataatattgatgccagcaaattggtgctacagctacatgaatgaatgttttgctcagttttttctggtttacaaagaaacaccaagcaactgacctgcaaaggggaccgaagtagacccaggccagacagttgttgattaattacatcataactgaaatagcaacatggctcttgcaccataaaacatctgctcactagcactgaaattaaatagtgtcaagaatttttttctgtctaatttgaaaaaagatagctaatatgacaaggctttgttgtatttacatcttgaatttctgtggaaaaggataaacatttttcaaagcaattgagtaagcatttttcagagcacaagagggaagctttttagatttaaactcttagaataataactgacactaagctaagcatcttatagccatgtatcatattactagtagtattaccaataactattgaccacaaagactaacattacttcataaaaaaattttgatacagtgttcattgaaagaataaaacaagatttaaattgatgtgtaacaaatcattatagcttt

SEQ ID NO: 101082 - DNA, 296 bp, Homo Sapiens
tcctcgccccagggtgcccctgggaaagcctgaggctacttgtacgcgttggccttgtgcttcggcaagaaggcgaagctggggggcactggcccaaggagcatctcgctgtgggagagcaggtggaaagcgaggtcaggcccaggacctgcaaagtaccctccgtgaccccgggcccccgactgcagctccccaactccagcccacccaggcacctgatgcggatccagtcggctgccttctggctggccatcagcgtctccaggtagtcgcggcccaggtagtagggcggccgc

SEQ ID NO: 101083 - DNA, 203 bp, Homo Sapiens
  misc_feature (188)..(188): n is a, c, g, or t
gcggccgccctactacctgggccgcgactacctggagacgctgatggccagccagaaggcagccgactggatccgcatcagcgagatgctccttgggccagtgccccccagcttcgccttcttgccgaagcacaaggccaacgcgtacaagtagcctcaggctttcccaggggcaccctgggcgaggnagagtacaataaatt

SEQ ID NO: 101084 - DNA, 456 bp, Homo Sapiens
gttaaccaaactatgtcttcattgttttaattagtgacgctgcagccagaagagcaaaactttgcaaaacaacctagttctattactgaacactgttgtgtggcctcttaaggttaaggcccgagagtcacatttagagtcctaccccgtcttcatagtcccccaatacatatttaatgactaaagtaataaatgaatattgggcaggaaaggcaagaaatatgcctaacactagcaagaagagacttaaggggaaaatggtaaacactcttagcacttcatgtacatcttgcctctgaaataagattcaagagctgattcaactgatttttactagtagaagcaataagtataagtagatgagaaggaaataatagatgtaaaaggcatggaatatgcatacaaaataatattactgcttaattatgacaaataaatatatttgagagcctaaaa

SEQ ID NO: 101085 - DNA, 237 bp, Homo Sapiens
  misc_feature (112)..(122): n is a, c, g, or t
ttttcagtattaatgtttatttattcatctaatatgctgttctatttcctatgcaaaagatcttaactaaagcaattaaaatccactttgatgtcacaaatacatataaggnnnnnnnnnnnaaatctctctttacaatatattcacccacaaccatcaatatttgggttgatacaggaaatatgaagagtaattaaatgtaaaatctttacattaaaaaagaagaaaagtggaaag

SEQ ID NO: 101086 - DNA, 469 bp, Homo Sapiens
caaatacaccaaaggaattagaaaattctgtttaaaattccatttaaaaagcttttataagaataaagatagaaaaatagatatgattatcttgatcattgacatttggaaaacacacaaattcattggtgaggtaaacaatctattatgggacagaataaacattcaataggtggtaaactggatttctcattatagggtgatttaaaattacctaaggctatgcaagtttctgtcataattcttcctcatatttacaaagaagaaagagattaaatgttgaaagggctgcgtagttagtaaagaaagtaatttgaagaagaaaatgtgttacaaactcattaagaataggagataagagaaagattttctgaaatatttccataaaaccccttataacttgtcaggtcaaaaagtaatagtctaaatgcaatgtggtatgtgtactggttttgatcgtagaacaaaa

SEQ ID NO: 101087 - DNA, 466 bp, Homo Sapiens
aacagtaggtgtctcagctcagccaaaggcagggcctctgtctacctggattggcaagggaaaggctcaggtggccagaactccctctttcttcccgcctggggaagcagtggttccacaggaaaggcaatcccactcttgctggctagggggcctcccgggatggcaaaggccagggccaacctgagctctgcctggggcctcttctgggatgcactctgagtttggggattgtggattgtgggttcactgcttccataacgttctaattacctgcatgtgagcctagacctcaaatccttaattatttttaaaagggcagggtgggggagtggcttaagagggaatgagacacagaacaatctttccacagcccccatctgcctaggctggggctgtcaagggtctccttcaccctgtctcctagggatatttaaaggcagcttttatgagactctatactgtc

SEQ ID NO: 101088 - DNA, 531 bp, Homo Sapiens
tagaatgatatgtttatgcctgtgaacatttatcttgttagattatgctcactaagccattggggtgtttggggaatttgatcaatgtatcttttctgtctcttttcagtttcgaaaactatccctctgctgctgcttttcttccacttgtcttttctcaatagctgattctagtttgtgttgcttcgatagatacgtatggctaaacataaaccttagacaatagaaaaacgtattcatttgcaaagctgccagggtgtttggagtgcttgaatcatattgaacttcaagaaccattatgtttctttgtctttttgacagttattggagccaatttgtgtgttttcagtttctcttaaactttcagtatgtatttgaaaagcttgcaggccccagttactgtgtctataatgcctagtaagtaaaatgacccacagaccagtcaataagacagggcttaacaggagagtaatccttggtcctcagtttcccaactgtacagtgaaatacttggattaatcaccatgtttc

SEQ ID NO: 101089 - DNA, 447 bp, Homo Sapiens
agtcaaagttagcaattttgatacgtaaacacaatacttcattcttcctcatctgagctttccttccttcttccttttctatctctaccttctcataaaggtgctgctgctgctgctaaggtgcccggagtccagaatgtccattaatcactcaggcacgagcctggcactgccacgtcagcccccagcatgaccaaacccaggtttctcttgcttggggctgagaactgtcagatttttctcatcaaaaatgttttccaaggaatcagtggattacagtttttctgcattgaaaatgcactttaaaaaataaaataaagctccagactgtttaaaatatacagagggagcaggggaaagttaagcatgtgctagtgtctgaacccagttcagtttatctccagttgaaacgatatacactatattatgtataaatgtatacacact

SEQ ID NO: 101090 - DNA, 546 bp, Homo Sapiens
caatcttaataaataaaacatttaaaataaaatatatttcacatttataataagagcatttagaaaagagaagatattgagggaaaaaaagaagtgaaaagatggcccagagtggccaagaaggaaagaaaatggtgcccaacgttcacctgaactgcctgtgaatttaggttgtagaactgagttgtttaggctacccaggatccaggttattatggccattgaagtgctatttgcttcctaactgttgttcaagctcacaaactattttattttaaatttgtaaatacttagggcctttcctagtgacaaggagaagtgcccttgacttagtggtggtgaccagaaaaatcttttgagcctttgatcatcttataacaggatcaaagctgccttcaaaccaagcggtatgctttgtattgcaccatcaaaattcaggaactgagacatttgacccttaacatgttatcgcctgcttgatttcacaaccttcactttatcttcacccttcctaaaatgtaccgtggccaaggggaaaaagaaaaa

SEQ ID NO: 101091 - DNA, 187 bp, Homo Sapiens
tttacgcttgtaagggaggcttccttcatgatatgaccgtaggatgctgtcaccctgacccggttcctgatgcgtgatgtttctaagtgctcagtaagtaccaatctactcccacactgcagtatgtgggcgtgtgatgctgaacagagagagcacgatgtgatcatagttaattccctctggtatc

SEQ ID NO: 101092 - DNA, 337 bp, Homo Sapiens
  misc_feature (218)..(235): n is a, c, g, or t
  misc_feature (260)..(260): n is a, c, g, or t
tgagccagcacaccgggccaagtgaagaatctaatgaatgtgcaacctaattgtagcatctaatgaatgttccaccattgctggaaaaattgagatggaaaacaaaccatctctagttggccagcgtcttgctctgttcacagtctctggaaaagctgggggtagttggtgagcagagcgggactctgtccaacaagccccacagcccctcaaagacnnnnnnnnnnnnnnnnnngagcagacaggctaaaatgtgaacntgggggttgaagggatcactgcccaaaatggtacagctttctggagcagaaactttccaggggattccaggggacac

SEQ ID NO: 101093 - DNA, 290 bp, Homo Sapiens
ggcaccgctccaacatcagaatggtaaccatggtggaaagcgagggccagggcagggcacagtcatgagcctcctgctgccccagtgttgcagcatcagccactggctttcagtaagagcccagtcaacaaatgggtgccctgggtgggggtgaggtggggggtagttttgataagatgctcagtcctttcctctccatcagcgtctgcaaactgtggccctcccagccaactctggcctaccacctgattttgcaaatagttttattggaacacaacccatatccatac

SEQ ID NO: 101094 - DNA, 556 bp, Homo Sapiens
gcggccgctgagggcgcgtctcccctccgccatggtggcggcattgcgcgctcctgaaattcacgtacggcggtgcagtataggcccgctccagaggctcaggactaggctgtcacctcccacacccactgcccaggcgacggggacgccgccgttcgtcgaggagctgcttcgcaggctgttagggcttaactgttgtcctcccacgcctcggggggaacaaaagtggcctgattagccagaaatggaggtcacagctgccttttgaaaagggctaataagaacgattcgagccaaggacgcaagtcaggaagacatcctcatgtcttatgtctgccttggtgcgaattcttgtcttagcaaattcaaaatttatccttctgtgttttgttttgtttcaatcaatcgcttaaaagccttggcaaggcctttaattcctgctctgaaatgctagagtcccggaaatgcaaaagcaagtacgtttttgttgacctggtggcggtagaggcgtcgtcattgaaaataaacaactgattttgagaaaatcaatataaac

SEQ ID NO: 101095 - DNA, 546 bp, Homo Sapiens
cattcagtgttctgtcttgtcatgagggtgggggagtgggaaggacaaagcactgatcccctttggtgagtatcacccagagtacagacattgcagaaagataagaaggcttctctttctcctccaatacaataagggacttaatttctgcaccttcagacccctttcctatatcagaacactctggagctgaaccatacttcagattagactttatcttcattcagcatcaggatctgtagggggagatggctttcctagtggccaaaggggtctgctgccctgagatcagagaccctgtgccctgagtctcctgccaccttaatttccattcacagctgaaggccaggccagtaccacctttgctgaagctcaagacctatgtatgttctcttgattgtgtgttgtctctctgtaaaaagaagatatgactcatctctttgaaaaccaatttatgctttctctttggggagagggattgatattaaaagtgaaactaggattttcattggacaaataatttaataaagttatatttttaacttt

SEQ ID NO: 101096 - DNA, 386 bp, Homo Sapiens
tagaggatgagcatgtaagatgagatcaggagggaaattgggtgctctgcctcaggctgttaaaatgctgctacctgcattctaaaacgtgcaagtcatgccccacaagacacctccttagggcagcatccactgtggtgtgccagcctgacacccctgcagtcacggtgtttgaatggcagctgatgctggcccacccagagtatcggtgcatctctcctaaagccacagttcagcactgcatgttgaccaggcggatatcctataatatagatgctcgtttggatccaaaaggaaaaccattaaaaataaaagaaagatgaaaaactttaatgttttgggggggataaaagaaaagaataaataaaaccttgttgtaaagaaaa

SEQ ID NO: 101097 - DNA, 489 bp, Homo Sapiens
tcagatcagagctcagtagctgtgtcaatttgaagttcaatcagtgtagttgtcctggggtgatcgctgactctgctctgtttcatatttcagttgcttgctccaaggagagaatttctgagaacaatgggtgttagcaactttaagttactccccaaacgtttgctggccacattctcatttctaaacatctggatctgggtaaaggtttgaatagatgtagggaacaaaattggtttttccatggtgtagtctaattttgccaaatcacccaagaaagaaagtatatgacgtgtggagtttgcatttcttggatgggacctatcgggtcacccagcccagtcttacagtcataaattcctacctcttagttcctgccaaagggccttcagcctctgtgtgcacacttattgaatgaatgctttgcctaaagtttggccttttgaagaaaaacagcatgtgataatataaaaatatgagagtttaaaa

SEQ ID NO: 101098 - DNA, 214 bp, Homo Sapiens
tttaaatcacttgtttagatacaactttatttttttatacctacatagcacatgactggggggataaagcatgtataagttgggagagggtaaagaatgtgtgactatgtatacagaaaatagactaaaatgtgcagcaaaatgatatatactgtaatctggtttttgaagtatctactattctggaatattgttaaacaactttttgcttttg

SEQ ID NO: 101099 - DNA, 442 bp, Homo Sapiens
ctggaagccactcatcccttcctcctccaacccatgcagctcctttccatccttctcttgcatttcattggccggaattaggtaacttcctcacctctgaaccaatcacagggaatttagttcaccggaacggaagcagatctatcatatctcatcatctggagctgagcacattgctccctgaacaaaattggtgttcttaataaagaagaagagggcattgactgttaggtaggcaataactgggtctaccaggctgactgactgattaaccagctaccatcccttatgaggagacaattgccagcctgtctatcagagtcacaaagcctggaatctctcacaacaaaaggctatacaattctgaggccttggtcctatgttaatttaatgtggattaatcttttgagataaaaccatttagtcatgtgttggcatctgc

SEQ ID NO: 101100 - DNA, 428 bp, Homo Sapiens
ggagggtaaactagttatattttaataatgaaaacatgtgttacataagcacatagtgagtactcgaatcaacctcggactctccgggcgtgaggggtgggtgaggggaccggcaggtggtcacagccccatcaaaagggagttggggctgggggatgtcgcggtcaactgggaaaggagagccaatcagcaagtggcgcgtcccacgccgtctgtcaaatgcatctgggggttagctgtactcatacatcttgtgggtgactaggtgacttccgtgttcaagacacaagcgagctaagcctgggatttcagtttgcacagcgctttgttaagttttgtctctcaatcttgctgtccaagagcgaacctggaggtcgtctgttagcggtaaattctttacccacattccgaaaaggaaaacggaggcc

SEQ ID NO: 101101 - DNA, 511 bp, Homo Sapiens
tgaaccagctgggcttaattatgtaaagttttgagcctgagataagcacacaatcacaaaacctacccaaacaagttttttgtttcacttcatctcttataaaacaatgttctaaagtaagtgatagggatgctcatcattctgctacctattatcacaatgaaaacaatcataaatagtacacaggaaaggtgagaaatagcggatagttcttatttcatagtactgtatatggaaataaaccaaatttgctcatagagatactattttattacctcaaaaatatataaaaatgaaaacgttatgaaaatattttaaaatgggatttaaaaataattgagaacatcacagcaatttagaatactaaagagcaaaactttaaaatgatagtgctgagaactccccacctctaccccaccacctgtaggcttctttgacaacttacaaatgttctctagtttgtatctagaatcacttatatatattcaaataaaccaacttggtgaacaaa

SEQ ID NO: 101102 - DNA, 516 bp, Homo Sapiens
tccaccccctattctgttgttatttcttaccatttgggaaattctttcaaattcttttactttttccttacattttatataaacaactacaaatagagatgaaaacaagtaccttttataacaacgaggcagcatcttctcccggagagtgatccggtacttgtaacagtaaaggtaataggcgtatggtgaccagatcgggtagaggtagttacgtgtttttcccctcttgatataagaaagggagtagacagaggggcgacacctcttacaaggcagtttttcagttcagtgcctccctgtggcaaagtgaagttcacaggtgggtggcagaggtttaggcaacctggtggcattgtgacccagtgggcactatgacatggataaggggtcagcccttatgtcacctcaggactccactctgctgcttatctaccctaatcccttatccaaggctcatattcgactagtatgcatgttatggctgtatgaatgattaaaaaatagaacttgaaa

SEQ ID NO: 101103 - DNA, 552 bp, Homo Sapiens
  misc_feature (335)..(351): n is a, c, g, or t
tttctaacaaacatgggtgatgtgccaaatggctggggtggtagctcattataccttcagagagaatccaagtttgaggcttatcttgggttctcacacgtagcagcaaaaccttggagtattatcaagggttacaaagggcagatcaaataaatgtctgtattcagtgaatccattcagagaagcactagttgttcagtaatctaataagcaatgcactagtaatctattgatgaatgcatcttattgtaattttattaaataacagaacccacatatctaaaatattcaaaccatttcacaagaagcccttgtgctgcccagaaaatgtttcnnnnnnnnnnnnnnnnnagagcagttttaggttcacagcaaaatcgagaggaaggtacagagatttcccatgtacaccctgaccccacacatgaacagcctccctcattatcaacagcctcctccagagtgatacattgactgcaattgatgataagcctacattgagacatcataatcacccaaagcccatagttaccttagggttcaatcttggcc

SEQ ID NO: 101104 - DNA, 537 bp, Homo Sapiens
tagggtgaggatgtttgtggcctagttttgtggaggggaatgaggcagagtggtagaatagaaaggagtgcagttcgggaggtatgaaaagaaatatattgagaaaaatgctaactcttatgtgatatgtatttcctcaaatcactttctaaatgaaatagttgattggaggaagagagcagtaaacatgtccatataccatatgtagtaatctgatataaagagattaaatcttttgcctaattatatctcttccttcagatccctttagaagtacattttcagtcaaaaggatggtttgaattgtttccaagcttaggcttatatttaaaactgtagggttgacttgagaataatctgaacttcatggaaactgaaatttcagaattgcaactaccaattgagaaacaagtgacatgcttatggtgattatcttaattgtaactgctggactaatatataaactaagaatgtaaatcttttagtttgattcttcttatccttgaaggaaaattagcttatggtataacacgtaaa

SEQ ID NO: 101105 - DNA, 435 bp, Homo Sapiens
ttttgaaattgtccaacgtgtgctttgaaaaaaagaagggatgttttctgtgtcaaatgaaggtaatcatagatcaaatttgcttattgtcttgttcaaatcctagaaaaccattagcatttttctttgcttgtaatatgagaatctaacactcatacagaatattgaaaggttaccctacaattgtaaatttgaaattctccttctaattctgtcagttatttattgacatagtagtggttctgtagtcaagtgcatataaggttttgaatgttacatcttatttttggatttttattttatcattatggagtatagcaaagttctattttgttctttttcaaatgtacttggttttgattatcccttggtccttgattgttttattattctattttttatttcattaaactttcagtaaatagtgaaaaaaaa

SEQ ID NO: 101106 - DNA, 485 bp, Homo Sapiens
agtctgtttataataatcagaatcaaatgttgtttgtttcttctaaacgttaatggagaaaattgaaggtggtaaaatgtcatgtttattcaggctgggaactgtattcacagtagaagtttcagtggtcaacatatctatgactctttaggctgctgtagttttacagtcaattatttaaaagtgagtagttacatttataagagcctgagaatacttagactcagtcatttgttagtatttttaccaaaatctcttagtttcagacatgtcagaagcagctatatagcatatcttattctatgatatacatcaggctatctcaagttcctgtctcacagttaattcaaagaaggattaggatttctgtattttttctcatttgaatctttatgtgcatttggtttgtgtacatgctttttgtagtgtaagatatgaaattttatattttttcagaaaataaaaaccctttgaatacagttaaa

SEQ ID NO: 101107 - DNA, 573 bp, Homo Sapiens
ctgctgatgccccccaaccatgctaaataggtctgaggcacacattacatttggttgaatgagcccgttaatatcctaccacagatgaattcaatgaggtgacaggaaaacctaggaaccatgacttacgaagactggctgttaaagtagcatttatgaaaatggggtaagcacaaggctgataaaactaaaggatctggaagctcatggctagacttagtctgcagagaaaacccacccagttctacacaaagccatctccccacttttcaaaaataggtttttcacactagaattctggaaatgacttcatttggctttcctggcctgtatggatatgggtttacataacattggttacaatatatttattcccccttatgccttattccattaaaaagaaataattagagatgcaaaggaaatcttccaaagtgatcattacagccagagattatacaaatagatatcttagggtagagaaacattacttcattgcccagaggcaaagttctaaagatttcagtcaatactagctcagcaaggttaaagaatatataaaaataatacaaa

SEQ ID NO: 101108 - DNA, 930 bp, Homo Sapiens
tactgaagtaatagaacatcaagttaattgaatgactggaagagatctaaaaaacacattttccaaaaagaaattagattagaattaaggtacattggtcagtaatttgcctccaagatgagaagtagaagtgtcctgcttaggagttctggctactgagttaaatccagtctcttatacttgcatagttatttgaatagatctgtttgggtagtttgtgtcactctgagcaagttagctagtatttctttgctaaatttctcctactgaggaaaacggcttttaattcagtgctttgcaaggattagatgagatactgcatgtgaagctctctgcatcatttttggcacatagaagcagcttgataacctgtggctgctgctgctgttactgttattggctattgtaattttgtctcagccactgaactcagtccagtagagtcctcgtgattcccggtagaaaagatgcatgcttatggtaggcaaaatcctcaaatgaccgatagccttccccaaaaacttctcaatagtgttatatggtttcatgcaaactctgaaatggcaattaatccagggaaaagaaaaattaaaaacagaagaattaatcagcacatggcaagaatttgaagaaaggaagcaatatcttaacctagatagagtgcgctagcaaccaagccacacagtaaacagtcatgaagccaaatgtatcgcaggggataagtgaagatttgaaagtcaaacaaccttcccataattctgtaaccgatcccccaattcctcagcaaaacctggcatggtccaaaccccaaccctttggatctaattgcagaggcttttagaaaagagcagttatgctaagtcatgcagaactttctcataatcaaagcactgcaggggttggggattgggggtaggcaacaaaaacaaa

SEQ ID NO: 101109 - DNA, 536 bp, Homo Sapiens
tttacaagtgcttgccaattagaaattgttttcaaattcattacattattcagaaaataatttgggaggtagatcattactcatcctacagatgagtaaacagactcataaaagttaactgacttatccaagttccgtaagtggcagcactgggataaaaaaatatagacctttaggcatccagtcaggtattccttatactacttactcttctctctcataaaactttgcttcttccttcaggaagaaagactgaagctgcattttaaaaagtcctcttgattaaactaatgttggtacagaacaagtgattgacagattattataatgaatatgaaagttttatttctatatctacttgtaccttaatattttctgaaaatgaataaaatttatacatacagctttagccatcacatcatgcactaaagttgaacctgataatacgataaatatttaacatttctagtattttacagtttattacaagatttacaaaaagtttaggataaaaaattataaacaatttctaagag

SEQ ID NO: 101110 - DNA, 479 bp, Homo Sapiens
  misc_feature (391)..(419): n is a, c, g, or t
aacctcggtctcttcaaaggccctttggggtcttccgactgtgtggaagggggagcggggtccgcacgggtaggactgggccccgcggcccccaggccaggagcgtttaagtgcgcgttcccctaccccgccaagggtcctggcccggttcgggggcggaggcagcggagccagtcccagtgcccagtgcggcagcgggcagagtgaggagggtgcctctccagccgcgcgcccgccctgggccgctagcgaacctttgcgtccttctggctccagggaaaagttcgctgtttctccgccttttggccaagatcaaggatagtatggagcggggacgaggggtggggggcaaagttcgcgggtcactggcagaaaacgcctctgatcgcgnnnnnnnnnnnnnnnnnnnnnnnnnnnnnaacttctggagcattcagtggtgctgataacgctcctcagtcctctgctggtaaccatca

SEQ ID NO: 101111 - DNA, 523 bp, Homo Sapiens
aatttccccccaccatgggctgtgggagagttgaccgtattctgggcaagactccatgacccctctgattctgcagtgtacagctgtttgagagcctcatcattttacttttgaaacaggaatgatttctccttaattgcttaaggccggggagcaaagtgtcttaacttctgtctttgactttcccagcgttgagtcatcaacactttgccaattagctcatggtcctggcaacctcagaaacccctgaagttttaaaaactttctcgctccccacgaccccagaatgaaacagctttaaaaatagccttaagcaaaaggatgttatttcattaaatttggtttaatggaaagaataaaagtaaatgaaaaacacaccctacacactagactccgaacactggtaatcagtactgcatagcaaactctttgggaaagaaaacgaaaatgttattgcacatgtaaaatatgaaaacttaactctgctgtgtgttaggcaatcctgtaatacttttttgactct

SEQ ID NO: 101112 - DNA, 554 bp, Homo Sapiens
aatttatgggccatagaagatgctagtgaagcctttgctggactcacaagtctcactaaactaatcttacaaggaaaccagattaagtcaattacaaagaaagcattcattggtcttgaatcccttgagcatctagatttgaacaataatgctataatgtctatccaagaaaatgctttttctcagactcatttaaaagaactttacggtgctgtgactccgataggatcagattcatcattggacccccagacctctcacccaggaccccaagtgtgcacctttgaagccattgtcttcactcctgactgatagatcggggatccaatggattctgaacacaagcagtttgctctgtgactgccatttgaagtggctacttcaatggttggttgataataactttcaacattctgtgaatgtaagctgtgcacaccctgaatggctagcagggcaaagcatcctgaatgtggatctgaaagattttgtctgtggtttgtatttttgttttaaaattttatatattacacacttataatcttaacagaattaaa

SEQ ID NO: 101113 - DNA, 884 bp, Homo Sapiens
tttaatattgattcttctcttaggaattaactacataatcagcttgctagtgttctgtatttagaccacattggtggtgcagttttagtgtcagaacgaatctcagaaatatttttctagagaaatgattctaattatgattgtgtttggatgtttccaaactaaataatcaatcgattatttcatcatgattatctttctttttgatgaaggaaaaaacagtcatggcaggaatttccctaaatggttccatccattccatagttgtgaaccaataacttcatgaaggaactgcttatatgactaagtattgcacaggattatgaaaaagttatttttgggttaatacctttagtatgcaaagagttgactgtataggaagcaatgtcaatataaatgaaaattatatacttataaccaaatgtataatatttagttgaagatgtctattcattcataattagaattaagagagggtctggaagtccaagtaatcatatctatcagataagcaatgggatataagcagcaaaactaatttggagacaggacacagcatagacatttaaaaataaatggctataagatttttgaaagtttttaatatcaataagcagtagcatttaggggattctcagtttttcacataagcctgccttcatcacttgaaaaatttctatattcattaactttcttgtaatcttgccagagcacgttacaaattgttcccttattcacaaatcgaagccttataattgacttaaaaatttttgttaagccatatgaggcagtttgtgattacccataattgttttaaaaagtttcatttcctgaatattaacacatgcaactcaacttaatttaaaaatgtatattacacattt

SEQ ID NO: 101114 - DNA, 565 bp, Homo Sapiens
aaatgtgaaataaaaatgctcagtttaattagttaagaattcaactacattcaaatgaaaataaaagccatttgtcatccttagaaagaaaaatgataaaaacaggagtaaaatcctgtgcgtgaggccaaaggaaattggacactcttgtccctcacatggaggagggcaaagtactaaaacctttccgaaaaatatctattaaagtaaaaacaggcacactctaaataagtcatcccacttttgcgaatctgttctgtggaaaatgcatgttcttcctaacctttgctaagcatttaaacacactcatatatattatgacgtataaatgtttgtgcagtgatatctattatggcactgttcattgtggcaaaaatccggaagcaaccttatgtccattaaaggtgagaggattgaataaattatgcatatctgcactatggaatattttgaagctattaaaaaagaatgatatgattttataaatacttaattggagaaatgttcatgacattggtaatgaaaatgaaagagtaatttgtaaagcatgaactgattgtaaaaa

SEQ ID NO: 101115 - DNA, 574 bp, Homo Sapiens
cccaaactaaataatcaatcttgcattctcactgtgaccactctaaatactctggactattatgattgccttgtaatttctcttttgggctccagtctctgccatattaatttttctaaagcatagctgtgaatagaaaccatacctctgttcagaatatataccatatgtctgttctgtggttccacattactcaagaaaatatagaccactttgtccagcattcagatttgtctgtaatctcatccaatttatcatttcattatttctcacactgcctttatctgaacccctccctccaggcaatccagagtacttacattacattctctgtgacatctttcccatctatatcttttcctggaatgcctctacctacatttctgccgtctaaatcttatttaaatgccattttctaatttctttaaagtcttttttgaatctcccccgaaagtaatatctccctccttttaactcttctactactttatatatctcctaaggatttaatttatacacaccgctttgtattatagttgtataagtggctactgttttttcttctggactggaa

SEQ ID NO: 101116 - DNA, 913 bp, Homo Sapiens
  misc_feature (761)..(865): n is a, c, g, or t
caaactagaataccccaatagaaagatatcagaaaagtctccaaacacttgaaaatcaagcaccctatgtctaaataatttacatgtcaaagagaaagaggttagggaaaggggagatgagaggatggtgggttggttataaaagggcaacagaagggttctctgtggtattggaactgttcggtatcttgactgtgatggtggatacaggaacctacaaggtgacaaaattgtttaatatttaatacacacacacaagtacacatgcaatgagtacaagtaaaaccagaaaaatctacataatatcaatgggttttattaatgtcaatatcatggttgtaaaattatactatgttttggagaatattatcactggggggaatctgggcaaagtatataagggctatatctctctgtattatttcttaaccactgcatgtaaatctgtgggatatagctaaagcactgcttaggggagatttatagcaataaaaagctcatcctttaacccaagttgccactaatttttgctcagaaagctctgactgcaaaactatgaaaatattagctgtattagtcgtattctagacaaatagatcatagatttaaatgtgaaatgtaaaatgatacaacttttagaagaaaacaggtgaaacttttggtgatctagggttaggtgaccagttagacatgacatcaaaagcatgagtcataaaagaaataatgaattatagtaggtcaaaatttaaaatgtttgtctnnnnnnnnnnnnnnnnnnnnnnnnnnnnnnnnnnnnnnnnnnnnnnnnnnnnnnnnnnnnnnnnnnnnnnnnnnnnnnnnnnnnnnnnnnnnnnnnnnnnnnnnnaattctaaactcaacagtgactcaaacaagccaattagtaattgtgta

SEQ ID NO: 101117 - DNA, 529 bp, Homo Sapiens
ccgaaggatggagaccatgtctgtgccatctctgtttcccctgttttcccacatactaggtgctcaattcatgcctgtgaatggcgtgagcccataatggatacacagaggttgcagcagatggtgtgggtacctcacccagatatcatccaggcccaaggcccctctccctgagtgaggccaggtgttggcagccaactgctccaatctgcctccttcccctaaatactgccctggtctagtgggagctgccttccccctgccccacctctcccaccaagaggccacctgtcactcatggccaggagagtgacaccatggagggtacaattgccagctcccccgtgtctgtgcagcattgtctgggttgaatgacactctcaaattgttcctgggatcgggctgaggccaggcctctcctggaaccacctctctgcttggtctgaccccttggcctatccagttttcctggttccctcacaggtttctccagaaagtactccctcagtaaagcatttgcacaagaaaa

SEQ ID NO: 101118 - DNA, 369 bp, Homo Sapiens
aaaaatgaattcattctcctgacatgtctgggacttggtttaggaaaaggaagcaaagggatggagaaggaccaagtacagccgtaaaactccacaagtgtgtcaagttccgctttgtgctgatcctacgactacgaaatttaccaaaacagtccaaaaggttctaaagaatgtatgctcagcatatccatactagttttaagaatcctaggaaaagatgtaactaggaggtaagatgtaaggaacaggtcctaccaatccaaagcatcattagcttaaaactttaaagagacaactgggtctcctattttctattttccatttccaaaaacaataaataaaacgaagagtagtgtgcaaagtaaaaaa

SEQ ID NO: 101119 - DNA, 378 bp, Homo Sapiens
acatcagtggtcttcaaactcttctgttcctagacccaaataattgttttttaaattatgtaactccctgcacatctttaaatagacatctataatttttcatcataaatttgttccttatttcttgttaacagcagatagaaacagtattttataagatgaaatattgtgaggattgactgcaattggagtatttcatggtatggcttgataaaataagttttaactaccttatccataatacactctgatcctcaaataagtaaaattttaatccatgtgttttgaaaacccatggattaaacacacagattaggaaggagtacctatggaatgtgaagacctggaaacggattgcctaagagttatccaagcaaa

SEQ ID NO: 101120 - DNA, 552 bp, Homo Sapiens
gaagtggtcataaattacatttgtctactgaaagctgccgaagcagccactggaaagaaccctggggaccctaatgttggactctcggcgcgacactcaaccaccatggccgctctcgtaagcacactgacacgttctctcaagaggcttttaaacaaataaatatggaagtcacgtcataatctacctttgcaaagccatacatgaacttttatttactttgtgtgtatgatgaacagatgtctcctttcttctctctgtatattttgttattttatataaaataggagataaaagtcacactgatgaaatgttgaaatgtactaatcagatgtattctgtttatattatacatatatatacacgtaaaagaaatatccaagaaagtgatgacatttggctatttttcatatagttaaaactccaggtatatgatgtgaaattttaaattctaccatgttagagcaaaacaatgaatcctatcccctttctttccaagtagctacttggaaaccatatcattcatatttagaagtaaaacagaaatcaaaa

SEQ ID NO: 101121 - DNA, 477 bp, Homo Sapiens
cacgtcactctgctgtgaaggctgatggcctaatccaccctccccttccctccctcatccgcacctctgtggagatcattcccccaggtcacgactgccttgctgttctccagtaatcgagaatattccagccttaaggcctttgcattgacagttccctctgcctggaaggctttctccctagatgcctgcaaagagaactaaccgcctccccttcagtatcctctcggtataacagggttttactatttatgctcaagaagtgtagtgaagattcaattatatagaagagacatgtgcatagcagttacacgtggctgttcattccttctgtaccttgccttcacctgcctgtcagttccttcagtgactgtgactcccttccccatgaagagataaagcctgtggctaaaaaatgtcttaagaagtcataatgatttgaccttaacctcattaaaaccaaaaattatcaaaaaa

SEQ ID NO: 101122 - DNA, 436 bp, Homo Sapiens
agatttagtttgattcaaacctgctgataaaacaaatgcttatatgcaagaaaaactagcagcaagatatgaataaatctccccattatgtagttaaaaactaatcagcatgacacatttatatttaggtatttcttctgcagaggattgccagaaatttcttaatgagagtgataatttggtgatccacctatgtaccttttgatgtctcatcacagagattagtgcttcctctgataatacatttgcttgatcctgctaataagaactcacctttctttttaacgaaatcaatttgtgttaatttacatagggaaaaacgttccttgagagggaggagaggggtgtttaccacccacaggagcagttccatccctggttacccaccagtatccctgccagatgttagactggaattagaatgggaatttaaaaa

SEQ ID NO: 101123 - DNA, 430 bp, Homo Sapiens
aatctagacataaactgaagagtagttactttgagagcagaagattggggtcgtggagagtggggaggtcagtgagtatggaaggagactttgcttttactgtacgaccctctgtaatgtttaaaattttcaaactttatatcttgatcatgtttacaatcgctacatttttaatttaaaaagattgtttctatcagtgaatcttgccaagaaaaacaggtggcgatagagaaaaagagcaacaaatcaaaagagattatgattatattgcaataaagctgttttttaaaaagaggatatggattttagaacattaggaaacattgtcctaagccatagaaaccactgtttaaaacctgggtacgactacatggcattaatgagtctagtgctgctcagaagagagaaatgctaaaggaccagatatttg

SEQ ID NO: 101124 - DNA, 416 bp, Homo Sapiens
tagaattccagggcaagtaaaatgtaaatgagtgatgaaacaacatcactcctcacaacccgggtgatttgcaaagtcaccagggaatttcaggacacctggattacaaaaccatagcaagacttggagtccgcattagcatagtgaagtggaagctgccagctcagttaagggctatgcctagaactggcatagcaccacttctcccatgttctcgtggtcaaaggagttacaaggcccacccagatgaaaagggatggagaaatagattctacctctggatggggactggcaaagtcacattgaagagcatgtggaatgggaattgtgttgtatggtagccattttggaaaatacaatctactgcaacagatgattaaaatacttaaaaagaaattttagtgtgttatcgtctt

SEQ ID NO: 101125 - DNA, 450 bp, Homo Sapiens
ggaaagagtattcctgacttacagactggggtagggggtggggaaaggagcaaacaaagcaagtggcttcatcaacatcccagagggaaaggcaggctttggaaaagaaccaagtgtttggaagttgacgaggagggtccacagccagggaccgcgcagtagagacgacagaggaacgcgacctttttttctaagtgcatctgaacttgcctttacttcggggctcccagtccccatcctttgggtcaacctagcagatcttcttgaaggctgacacccttcacatacctgtaggtagttctcctccccaccctgacccctgacccctagttccagtgggactgtcctccactgtagtcatacaaggagtctgcctcatctgcccctgtgcctcagccacagcccactgtgaatcactcggctccaaattaaaactccttccctctccgg

SEQ ID NO: 101126 - DNA, 698 bp, Homo Sapiens
taagaaaaataaaagcatcagtattgcaaagactttccatgatcctacacccacctcgaaagccccctctcaccacaggaagtgcactgaccactggaggcataaaagaggtcctcaaagagcccgatcctcactctccttgcacagctcagcaggacctcagccatgagacttctcatcctggccctccttggcatctgctctctcactgcatacattgtggaaggtgtagggagtgaagtctcagataagaggacctgtgtgagcctcactacccagcgactgccggttagcagaatcaagacctacaccatcacggaaggctccttgagagcagtaatttttattaccaaacgtggcctaaaagtctgtgctgatccacaagccacatgggtgagagacgtggtcaggagcatggacaggaaatccaacaccagaaataacatgatccagaccaagccaacaggaacccagcaatcgaccaatacagctgtgactctgactggctagtagtctctggcaccctgtccgtctccagccagccagctcatttcactttacaccctcatggactgagattatactcaccttttatgaaagcactgcatgaataaaattattcctttgtatttttacttttaaatgtcttctgtattcacttatatgttctaattaataaattatttattattaagaaa

SEQ ID NO: 101127 - DNA, 354 bp, Homo Sapiens
tttaagatatctgtggttaggtccttgaaatctagttccctgtgagctaaaaagcattcagggcaaaattcagactttgaagatggaagagatttcagaagttatgtaatctaacactcagtttaccaagttagaaactgaggatggataggtcatatgattaaggctataatggcagctttggatactttctaatggtctttccatcaaggccaaacctatctggcctgagggcctgatctggaagccaatttcaccgtggttgccttcagtagttttctgactttcttctcattaactatctaattcaccccaacaacagttatatacctctctactttcctcgtattttat

SEQ ID NO: 101128 - DNA, 706 bp, Homo Sapiens
atcttccacagcccctaggtcctgtcttctcggccttcgtcccttggcagcttttcaacctctcagcaggccacaggcgcacgtggctggcagctccccggcctccggctctgacagtccgggggcaaccaggcctgcagttctcgaggaaacccccagccccccacgtctcgttctggaccaggaaccccctccccaacaaccgcgcagcaagtggcgactctgggagctgaactggagtggagctcgaagtggctggggcgggcaaagactcccgcttcactctgggacacaactgggacggcgcttcaacctctgcctgcaggcgtgcttctcgcgcgcaccagcaagctctctatccacctcgcctgggcctttgcagcgccctgccgcccaggctccagcgcctctactaccctagccccttctcaacacgcggctctgccttcttccccagtaccactgcactgccgaaaataagcccggagactaaggcaccttgtagggaagagaaggacatctgtatctccaagcttatccaagcaaaggcctccagagtccctcccatggcccgaaacacctccctctgaccgaagagcgtcctttctttccgccgcctcctggactcatcctaaatagggcagacccgggctaaaccagtgatttttttccatgaatacgaagaaccccgattgcactttgaaaa

SEQ ID NO: 101129 - DNA, 552 bp, Homo Sapiens
gtcatttgattcagcaattgcatttctgggtatatacacaaaataattgaaagcggaggcttgagggtatatttgtataccagtgttcactgcagcattattcacagtagtcaaaaggtagaaacaacccaaatacccaacagatgaatggatagacaaaatgtgttatatccatacaatggaatattattcagccataaaaaggaaatccttctacatactacatcatggatgaacctttcagacattaagtaaatcacaaaaggacaatactatatgaatccactgatgtgaggtacctagactagtgagattcatagagacaaagtagaacaaagattacgttttgtcacagggggcaggagggaatgggaatttattgtttaaggggcacagagattagtgtgggatcatgaaaaagttccggaggtgcatagtggtgactggtacatacaacgaatgtatttaatgcctttaaactgtaacttcaaaatggttaaaatttaaatcttacgtacattttgccacagtaaatttttaaaccgccaaaaa

SEQ ID NO: 101130 - DNA, 547 bp, Homo Sapiens
cgaggaacattgcatcataggccttgctgagaaattggaatgaatgacagtatttgaataacgctttgctcagttctgtagtttcgattcgaaatgcagacttaaaaagtcgatgaacattcagacatttctctttaaacaagacttccccttctattctttagagttggaaattattctctgcttgggaatagttttcaatatgttccagacattataaatgacttcccttctatttccatgtatttcccatgttgattacagccaggctgatcagagtaaagcaccaggtgtcatagcatcctaatattatatgaatcatgcatttatccattcatctatgcatgtatccagggaaaacagatttttccccctactttatcggttctacagattcagattcctgtatatttaggtaacattccaaggggatagatgtgctcttataaaagactgcttacttcagcaagacagtttctaaaccctttacttttgagcccaattctccaggtattctcgggggcggtgggggctggagggaagcaaa

SEQ ID NO: 101131 - DNA, 523 bp, Homo Sapiens
acgaggtgaaaaattacattacagaaaagttgctgctagatacactaatttggtgcttcctgtggtagaggtgcttttccctctgaaatagtttttcaaggatgaagctagaggtggtaggtcctgaaggattctctagataaggatgggcattttctgctgtttggcatggggaaaagggtctctcctgcattatagaggtggacaagaatataccgaaactattaccagaagtattcatttttttgtcatggcttttcagagaatttatgcttcagagactagttctgaaaactagttccttccatggaggaagattgtattggacttgaggaattgttgactttttcagttggctttttatgagtatatttgaataaacctgaatgtccatgacatacctacttagaggttatagctatagtttgaagtggatctctattttgtctggaaaaactatatatgtttcaaaaatatatttccatttgcctcttttttggcatgttaatgaccaagaaccaaa

SEQ ID NO: 101132 - DNA, 524 bp, Homo Sapiens
  misc_feature (47)..(194): n is a, c, g, or t
tgtactaaagcaatcctcccaccttagccccccaagtaataatatannnnnnnnnnnnnnnnnnnnnnnnnnnnnnnnnnnnnnnnnnnnnnnnnnnnnnnnnnnnnnnnnnnnnnnnnnnnnnnnnnnnnnnnnnnnnnnnnnnnnnnnnnnnnnnnnnnnnnnnnnnnnnnnnnnnnnnnnnnnnnnnnnnngtgtgagctgctaccatgcctagccccagcttctactgcttgaggctctctttggcatctccacacatcatccttagcagcccagactgcatttctgtagcagcctcttccctggtctcttctttcagtctctctgcctctaatccagtggctttaagaattttttggctgtgacttccagtaagaaatacaatttacattgtgacctagtaaatatgtgtgtagatttattaactgaaataaaaatgttatgatttaatttttatccttagtgggagtgatacactgatattttctattatatttcattaaaaaatgccttggactaaa

SEQ ID NO: 101133 - DNA, 532 bp, Homo Sapiens
ggcggagaggcactcattatattcctcctcacagtagaggccatggtaacctggatcacagaggcatttgtagctggtgcccacgctgcggcacgtgccatgagcacaggggctgagggcacagaagtcaataagctgggcacaggtcggccctgtgaagcccgggctgcagttgcaggtaaagtgtaccccgtccacatagcaggtgccgttgttctggcacggagacgaggcgcaggggtccaccttttcttcacaagcagatccgaagtatccttctggacactggcaggtgaatccactgagactggaaatgcatgttgctccatttctgcatgggtctaggatgcagtaatcaatcttccactggcaaagctctccagtataaccagaaaggcaaacacaggtgaaattgctcccatcttgcttttcatttgcatcaatacagctcgcgttgttttggcaaggtttcctctggcaagcatcgtattcttcacagaaagtacccacgtactgctcctcacaggtacag

SEQ ID NO: 101134 - DNA, 463 bp, Homo Sapiens
aaccacttttgtttaaccagcaaaagagcagtggtctccattcggttcatcagttctcccaacggcttgttagtgtctgggcagtgcggtgagacagaaagcccaggggtgtctggaatcagataggtccaggtttgaattctgctcctgccccttactgatccagtgacttggaataagttacccaaggaagaaagaacattaacttgattgagtgccttctggagccaaaggctttatcgatgctatctcattaacatagcttcttgaggcccaattaattcacctgtcaagtggggatcacaaaatcatccttgaagggttatagtaaagattaaataggatgaggcattgaaagtgtttggcacatcacgagagaccttctttcctcactctaaactcttcagagtttgtacctgtatatctgccaaatcaacattattttatctctcaaaaaattaaa

SEQ ID NO: 101135 - DNA, 554 bp, Homo Sapiens
taacatgaagactctaatagtggtttgactggtagaaaatgaaagagctctcagtcccaaaccaaatggtgattacataaaaaagttggcattgtcaaatcaggcagatacaatctaaagtaaaaagagccagcagcggtggctcagcctgcaataggtattcaaaatcctccctaagagaaaataattgtgcctcgctatctaccaaagacattggttaaaaaaaagtctcagcagttacaatgtacagtatcaccttcccttctgtaaccaaaatacttattaaatatatgaatgctagttatcagattattttaaaagtttattttcattctctaataataaggtaaaatacattttggaaatctgcatggaatgttcccaacaagttatttcattttagcagggtctatgacatacagcattagtcattctttcaattacttggaaccacagaattctccaaaatacaaaaattaaattttcagcttttatatcaaataatggtctcaaccatttaatacaaagcaacatactttctcaggtttgctgtt

SEQ ID NO: 101136 - DNA, 484 bp, Homo Sapiens
  misc_feature (411)..(441): n is a, c, g, or t
agatggaatattcccaaactcattttacaaggccagcattaccctgataccaaagccagtcaaggaaactactagaaaagaaaatggctggctaacatccctgatgaacatagacacagatatcctcaacatagtactgaaagtctcctatataagagaccgacatctcttccctcaataagaacaatactgccagtttttgtcctccagtgtttctatggttgagaaccaaatgaaacagttggtttggataaggatcgccttgtacaaaagtttgtctcttcaagcaccagatatagatgcacacactactggaggcatacggaaactaagatggccttcagagatagcagattcatgtctcctatcacatgaaatggtggatagaatcgccaattctttatatttacnnnnnnnnnnnnnnnnnnnnnnnnnnnnnnngctaatgttttgttaatatatgtaaaataaatacgcaaatgac

SEQ ID NO: 101137 - DNA, 476 bp, Homo Sapiens
tttactgtataccaggaacacaaattcattaaatcctcacaactttgagacaggcacaaatattatctgtttactagtgaggaattacctacggtttactagtaaggaacactgagacccacaggttgtgacttgctcaaggtcaagctggtggagccaagacaaggtgcaggcagtgagtcctgccctagagtctgacccgaaccacatttaacgtctatgtggtgtgtaggttattgccatgagtaagaatcagaattgttaacgcgcattccaggaaggcagggacaccactgagtgttactgctgtactttaggggccagagcagggcaggctggatgcgcggaggaaactcatagttaggtcaaaagcctggcaagacaagggaattttctggtcgtcgtccacctctccaacctcacatcctactagtcttccaagaggattctaactgcacatgaatccctagtttccg

SEQ ID NO: 101138 - DNA, 240 bp, Homo Sapiens
gtacacatcacataaatttgcataccgtttctcctattaatccatctgtctcatgtcagtgacttctcagcaaacctttaggggccaaggggccccacactctccagcggcaggcacaatgggcctggggtgcagttgtggacactcggaccctccttggagctggtttagctgtgctgtgtgcttgtgggaatggattgccatgatttctgggctctaataaattgtgcatcaatcgaa

SEQ ID NO: 101139 - DNA, 560 bp, Homo Sapiens
  misc_feature (489)..(489): n is a, c, g, or t
gagggagaagcagctggtgatgaagcctagaaacgaatcaggtctgcttccttgcttggcattcggtgccattgacagcagcctcccctcagcaagcaaaacttgctccaaattgagctgcgagtttcttgcagggtggagctgccctcggctgagtggagccaggagggtgaagcaggagtgtgaacggtgtgaagcacccattacaaatttctggccgccatcctaattttagaggcttcatgtttcaatatgaaatgctgttgttcgtgccacaaaaggaggaaacaaacagaatcgtgccaggagaaaccccctcccccaccaagtttgatgctgtaaaaatgtctaatggggaaatcttttcagtggtaaattaccccactgccttcttttccatctcattttgcatcggaagctctcctcagttcctactggaagatgttcaaggctgggccaggagaattctagagactttttcccctaatnaggcaccgtgtttgtggagaagtccactaagaatcccagacttgacatagccctggcattcagcggccgca

SEQ ID NO: 101140 - DNA, 525 bp, Homo Sapiens
acgctcttatcttcactttagagctcatgagaggcctctaatcgactagtatgagttttgagctaaatatgtatttagttattagtgagaaaatggacaatgggcaattgtgagtcaaataaatgctaaatttttgcctctccaagaaggcagcaggtggctgaaatcctggtgtgatatggctgaataatgcatgatctgaggaccctgtactggttactcctgtacacgttcacaatttttctgtaaatgtattaatatactgagcagtccaggagcagccattaggcaaacaccactccttgcttccttcatgtgacctatcactgagctcaccagctgaggtcaattacattcttcccaacctggagaacagaatttgggtctgctcagaggcatgatgtgaaacatgtctgggataaaagctttgttctattgacagcaaacctttttgtgttaaggggtaggggaagagcaagtgaaggatgcagattaatttctatttaggaatatacttttatatat

SEQ ID NO: 101141 - DNA, 392 bp, Homo Sapiens
aaacttaggttgtcttgtccgtaacaccctatcattgaaataaaaatcctcttaagagggttcatcccttcactgctaataacttgctgtgattgaaaggtatgaactagtaaactctaaaatgctgtaataataaacccttaacactgtgggtgctttgatatttctctaattttaatggtccttaaaataattaaaatcattaatgatcttcatctctgtccttttatgctatgttgttatgaggtgtaagcctttctcttccccttgtatggtaatatttccaataaatgtagatgatgcttctaaaaggtgggtaaatattgagtatctgattttgctgtgtttgttgataagcctacccaataccaattatttgcattgatttaaaa

SEQ ID NO: 101142 - DNA, 433 bp, Homo Sapiens
ggtgctgacgcggcatctgctgcagcggcgcctaccgaatagagacctccttctgcgtgccctacagcgccgtccgcaacgaccagttcggcctctcgcacttcaactggccggtgcagggcgccaactaccacgtcctgcgcaccggctgcttccccttcatcaagtaccactgctccaaggctccctggcaggacctggcccggcagaaccgcttcttcacggcgctcaaggtcgtcaacctcggtattccaactttattatatggacttggctcctggttatttgccagagtcacagagactgtgcataccagttatggacccataacagtttattttctcaataaagaagatgaaggtgccatgtattgaaagtgtgcgtcaaagaacataaatatcagtggattttctctgtgtatatgtgcagtatt

SEQ ID NO: 101143 - DNA, 549 bp, Homo Sapiens
ataagaaacaaaaatgcagtttaggaagcctcctccttgcttaaatgtttagaatatttcttctccaaagactgcatttgcctcagtgatgtaaattttccatcatggttggcataatatctgtaaacatctcactaaatgcaaaatggagtttacatttatgtgcatactagcagaaaagaagtaaactattctcatttgcatgtagctatgctgttcaaatgtcgccaaccaaaatttaggaaagaatttgttttcacccagcatgtacatctcacttttctcttggcaaggaagctggtgttaacgttgggtttaggtttaacatttacaccagcgaaaatgtttatgaatattatggaaaacttattttaaaccttgatttcttttgagcacatttacatgctgcgtgctgattaataaattaggcaccaatcatgtgtaaatcaatgtaaatcactagtttatgtacataatataaactatgtaaacttcatttttcatgcagtgcccaactactgctaaggtttactatgattcttaaggaaa

SEQ ID NO: 101144 - DNA, 545 bp, Homo Sapiens
tacacagtaagtacctaaaatttgtaaattgaatacttttgaatgtaagcagttgaagtaaaacctgtagtgagttcttcagtcagtcaacactaaacctgttttgtaaatttgatgctagtattacactggactttctcaaaatgaagtacacctatatatgcatatagtatatgagcatgcgtatttgtacaaaagcccttcaaaaggagttcagcttttataaacaccaaaacactctctgcctgtaaaatgtttttgctgaaatttgtatcattaactctcaaatttacatcttcatgtttgagatacgcttttaggactgtctatgcatgtagactttggtcaactctctcctcctccctcaataaatcagttaacttaaaaaatatattgtgaccatttttataaaatacatgttcataaaacagatcaacatatttagcttatacagaaataaaattaagtcaatccactcacaaagaatttctattttgtaaaaatgtagcttgtatttcagtataataaaatctgatgtaagaaaa

SEQ ID NO: 101145 - DNA, 763 bp, Homo Sapiens
aaaagatactaaatatggaatcacttaacttcttgtagacttacctgtaaaacatggatttaatagctatattatagagtttctgagaaaataaaatgaattgataaatgtgaaattactaagtaaccataatgcataatatcaattgttcttaaaattaaactcttttaaacaaatgcatagatgtagacaggaaaggaagttgtgaccagatgcctatttgaaatgcacaagattgtctttatttctaagtaagaaccatgtatacaaggcatttaagcttagctgggttgcatctccacatggtaaccaagtctagggcaccagaggactttgctgaccatctcctgctcattggcttaatagagtttcaacatgatgttatcttttgacctgaacattattcctattattgtgcagacttctgctagacttgtgagtcattcacacaattataatgcaatcagttgttacaatgatctctgccatgctgcaagctaggccccagtagggactctaaggctctgagttttcctctttgttatttatattcttggataccatgaagcatatttgaaatgcacacttaactagataagaaaggaccttcaccctgaaatgttagggagaatgcttattacatccttcctagaagatagagaagaatgccataaatttactttaaccatctaaatatatgagagatgtcaaggcttgtacagaggctatgccaaaattctttcttgctttccattaaaaaaaa

SEQ ID NO: 101146 - DNA, 546 bp, Homo Sapiens
cagagggaagggccatgatcaaatatatttgaaaaatgctgagttaaaaatgttaagtacattttcctattggcatgatctctcagatcctttaatacagtaatgtacactaatatggtaatgtacactacatgaagacagagcattcaacttcattcatatttatattactctcaaatcctttaggttatttacaattttggccccaaggaatacatattgacccttgttggaaaatattttcctacagaatagtttgaaaaccatcatattagcataatagcagagttatttgtatgatattaattttttcctatagatgcaacagatcaaagagctggtaatggatgaagacaacgatgggtgtactcctctacattatgcatgtagacaggggggccctggttctgtaaataacctacatggctttaatgtgtccattcattccaaaagcaaagataagaaatcacctctgcattttgcagccaggtaagggtcagtctagcaatgtatgaacatgtcttctttctgtttaatatttgcctt

SEQ ID NO: 101147 - DNA, 586 bp, Homo Sapiens
gtgagccaggttggtttgactgtgctctctcactcagggtcctgtaatccaggatctagagtttccaagtgtggcttcctaggccttttgggcctgctcttcttccattgccttccccacctgggctccctctatctcaagattagggttcctcccagggccccctggaggccagctttcattttcatcttgagcagccgtggaaaagtaaggactcaaccactttaattttggggtcttagtaattatctgacaccacccactcaactctacccactagttattacaataataacaataataatttagagaagcgatggcaatgatcacagcgtttacagaatccgggactgggcggagatagatatagcctcacacttcctttttctatcagtgtggtactagttttgggagtaaggactgttggagtctagtcagttctggcaaggatgccatatatcacatgactgaatgtgcccctaaatgcctgtgtaccttcatttccccctctgtaaaatgtgggaaaaagtcttgcaagacgatgtgctttcagcttcctgaaataaagtcatgataagcaacaaaa

SEQ ID NO: 101148 - DNA, 522 bp, Homo Sapiens
ttagcggcagaggaaagagtagagtgtctttctgttttaggggagggagaccctggcgcatgtctctctgacttcagagagggtgacgcagctggatgtggcctgtgggtggtcttttttggcacgtcctccttgcctttgacactgatgggcaacttgcttcgacctttctgttcatcttccactcgcttctgaagggcctttactttgtcctttatggaaccaatgggagtttcttctatcaaaggagatgtggccttgacagtgggaaggggttcaggggctaaacctgggtcttcacctaatgactcttctgaactaccttttttaagttcagctttctctgcactagcttgtaaaccttcctctttttgattctgctgtacttttaattaccttcttactgactactttattcccaaacttgggtagtgctggaactgggtactctgggtctcatctggggggatgtctttcccgttcgtaacaaaactgctgcccaaagccagaggctcacatttc

SEQ ID NO: 101149 - DNA, 506 bp, Homo Sapiens
ctcagataatctcatgaattgtctcatgtttctcataccagtgagcctcaaatctgccattgccctatagctgctatgctcatatacatgctgatcacctcccactttgactattatactttcctaccaactggtctcctgttctcctgcccctaccttctccaaacaatccagcccaagaatcttctgaaagccttgttttcattttatcattttttgtaattatcaaaaaagaaattcaaaggctctccattaccttccagataaagtttctactgattagctgaatttcagggatctgtttccagatctcactgtgttaccagactctttccataatatcataaacctttataagggatggatggcaaggatgtggagaaaagggaacccttgtacattgatggatggccagaatgtaaattggtacagccattgcagaaaggagtatggaagttccccccacccaaagaaaaagaataaaaatggaactaccgatatgaaaa

SEQ ID NO: 101150 - DNA, 485 bp, Homo Sapiens
  misc_feature (204)..(243): n is a, c, g, or t
ggcagaggagctgaggtagctctctcccttcctcctgaaaagaccacagtgcatttcactgagaattctcccagctacctttgtcaaggccgtgatctctccccaacattgggtattgcatctacccacatactttagctacatctggtttttacccccagacacctcccctactggcctgaagcctgaacatttcaacccagnnnnnnnnnnnnnnnnnnnnnnnnnnnnnnnnnnnnnnnntgcacaccaatggggaacaagataagcttccagaaacttctgccattctagccctgcaggagacagtgaacctgctcacacaccaagcacattgccaccacaaccagcatctgagaaagccatcatacaaagactttctataaccagagaaactcatacagagtcttcacctctgaaagcgcccagagccaaattaggttacaaaaactgtaatcattaaagtcacaacttaagagacaaaa

SEQ ID NO: 101151 - DNA, 1100 bp, Homo Sapiens
ctatttagaaaaaaccgtttggaaaaaatacttactctagtttagtatttttcatgctgtgcctccagctttatgttatggtttaatagtatccctttggcttggggttgggaagatttagaaataagagtatattagatatgtaataagcttgaaaagacatcttgtggaaatagatccttgggaaaacacttagatggaaacaacatttagaactctgtgaaatggaatttactgaaaacttagaggtgctactgttttcctaagcactctacttgtgacagttaagtgtagattgagcccagggctcagcacattagagacttaaggaagaaatcatttcttcaatttttcctctgcagtggtggtgaccgcggtggcttcaaaaattttggtggtcacagggattatggacccagaacagatgctgattcagaatctgataattcagataacaacacaatctttgtgcaaggacttggggagggtgtgtctacagatcaagttggggagttctttaaacaaataggaattatcaagacaaataagaagaccggaaaaccaatgataaatctttatacagacaaggacacaggaaagccaaagggggaggcaacagtgtcatttgatgaccctccttcagctaaggcagccattgactggtttgatggaaaagaattccatggcaacatcattaaagtgtcctttgccactagaagacctgaattcatgagaggaggtggaagtggaggtgggcggcgaggccgtggaggatatagaggtcgtggaggctttcaagggagaggtggagaccccaaaagtggggattgggtttgccctaatccgtcatgcggaaatatgaactttgctcgaaggaattcctgcaatcagtgcaatgagcctagaccagaggactctcgtccctcaggaggagatttccgggggagaggctacggtggagagaggggctacagaggtcgtgggggcagaggtggagaccgaggcggctatggtggagacagaagtgggggtggctatggtggagacagaagcagcggtggtggctacagcggagatagaagtgggggcggctatggtgg

SEQ ID NO: 101152 - DNA, 361 bp, Homo Sapiens
aaacaaaacacaaatttttgtcatgtcccataaccttctcatgacttcctcattaccccagcaaagtcctaatattccctgctatccatgacctagcctctgcacctcactccaacttcacttcctgccatccttcacaatcctttttcagtcttcggtccattttggaagtagtgctgggcacaattaatccccattttgtctgtttgaccacccttccctacagccatctgtgtctgaggtcttagacacatttgtaatccctgattttcccatctcatatgagttccttggaggcaggacctgttaacagagtggatactcaattaatgattattgaatgagcaaaagaataaatggc

SEQ ID NO: 101153 - DNA, 203 bp, Homo Sapiens
agaaagcacaaaagagcattcctgttctgaacttaattgtttccaataaagaagagctagttggtgacatagaagtgacaagaaccttatgaggaagggactcatgctagagcttaaaaaaccactggacataattagagatttttagaaaagtaggtatcagaaacatctcagaaaaaaagatataaatccatacctctaaa

SEQ ID NO: 101154 - DNA, 589 bp, Homo Sapiens
atagacttcacacacaagagtgaaggagtcaggctaaaaggcagacagaccagcataatcatgttcagaacagcccaatacttttaaaatacatataaaggtatttatgattcttgttgaatatttaacaatcttctttgacttctttgctatttaaatatttcatacaattatacatagataatttgaagaaactggaacaaagcacacacatatatagagacgcgccaatagcccagacacttgtaattaccaaacataaggcctctaatgctaatttagcagcataatttttaacaggtgaaatatatcagcttggaatcataaaaccacttaacatttatattcctgcacttgagaattatttcagcattaactgtaaataacatgataatattgtaaaacataaaagagtaaaagaggtcatttactgcctcaattttctttcaattgttagatctgaaatttttagttttgttcttttaactcatggatatctttcattctcttagtgaataggaccataaccccaagttatatttgaaattataaaccacagtataaagtatgcctatttaataagcaattc

SEQ ID NO: 101155 - DNA, 460 bp, Homo Sapiens
tttaggtaagtagacttctaatccagtttggaacaaataaattttcgatgtcttgtttttgtttcaatgatcttaattaaaatatattcaaattattttaaaatgttgtgtaaataaacaagaggctaatctgacaaaattttcatactaagatattaagagcactttaaataaaatctacatgtactctttgccttggtcttattagtagataaaggacattgttacttcacataatacacagacttgtttacccactccaacacataggtgcttgttaaatgactatttggggcactagtaagcttgaagaactccggccagaagtgaagagcagcagcaaagagccatttacagccagactctaaaagtgaacaatttactcaaacaatagaggcatttattggatttaaaacactagtcaaaataaagcccacaatttaaagaaattctatgtggt

SEQ ID NO: 101156 - DNA, 443 bp, Homo Sapiens
ttgggagcagccactgatctacccaaaccagtttctgagttttccaagtcaaagggatgggatctggagacttgatagtgaccacttctaaaaagaataaccaagtcctgtagaatctggtttatgggtaggtataataggctcggtgatgccttgtgctgattttcccaagcccatatcttgaacaaatcccatttttgtcataatgtctttactttgctggctgtaactgccttgtggaaaagaaatctatgtcccccattgatataaaagatcttttccccacaggttaacaggaatgggtgtaatgagggggcagatagttcccatttgtccttcagggcccatgcaatgtaaaattgtggagcttgcatatacttctgaagcgtcaccaacaccaactaatgctgtggacatatgctcctttagccagtgttggggcc

SEQ ID NO: 101157 - DNA, 430 bp, Homo Sapiens
cttgctgtctgccttctccggacctggtgtcaggggtggtcctatgcccaagctggctgaccggaagctgtgtgcggaccaggagtgcagccaccctatctccatggctgtggcccttcaggactacatggtccccgactgccgattcctgaccattcaccggggccaagtggtgtatgtcttctccaagctgaagggccgtgggcggctcttctggggaggcagcgttcagggagattactatggagatctggctgctcgcctgggctatttccccagtagcattgtccgagaggaccagaccctgaaacctggcaaagtcgatgtgaagacagacaaatgggatttctactgccagtgagctcagcctaccgctggccctgccgtttcccctccttgggttcatgcaaatacaatcagcccagtgcaa

SEQ ID NO: 101158 - DNA, 566 bp, Homo Sapiens
aaaagcatccaagaactgtgggaaaatatcaaatgatatcatatgcatgtaataggactcccaaaagaagaagaaagaacaaatcataaaaaatgtttgaagagaaaattaccaataattttcccaaaataatgaaagacctgagctcagagcacacacaaaacttgataaatatgagcccctgcctgacacatgcagtgtattcaaactgtggaaatcagagagaaaaccatgaagatggccggagaaaaaagatacgttaaatacagtaacaaagaatcgcagcgtgtgtgtctctcttcaccataccgcacgggtcctgctcgctgacccagcccgcctgctgtacagggcttactctgtctctgctctgggacctccccatggccacgcattccgccgcatggtctggatccctcgcggtgtctgggttcagccatgctcagcctctgtgtcggtcaccagcctagaaaccctggagcaccccgggccggaacccttccctcagatctgtcgtgagttccctttcagagatcaagcccagcctggctcagtcttgcacccct

SEQ ID NO: 101159 - DNA, 319 bp, Homo Sapiens
tctggctgactacggcggaaggaatgttcatgacatcaacattccttcccctaggattgagaccctctcatgggaaggtctttaagacccactgtgaaaaaggtgggcgaacattagtgaaaggatacccagaggtcacaggcctgtcccaagccctaacatacccagtattctaacaaagactggaacaaggactatgagagttacgagtcaggaatgctggatgaataccaatatatatcataacaccacacccagcattggcactcaacacacaggtgttagaaacaagttactcctaagcactcttcctgcgtgg

SEQ ID NO: 101160 - DNA, 412 bp, Homo Sapiens
aattaatctgggccagaatttcaaacggcctcactaggcttctggttgatgcctgtgaactgaactctgacaacagacttctgaaatagacccacaagaggcagttccatttcatttgtgccagaatgctttaggatgtacagttatggattgaaagtttacaggaaaaaaaattaggccgttccttcaaagcaaatgtcttcctggattattcaaaatgatgtatgttgaagcctttgtaaattgtcagatgctgtgcaaatgttattattttaaacattatgatgtgtgaaaactggttaatatttataggtcactttgttttactgtcttaagtttatactcttatagacaacatggccgtgaactttatgctgtaaataatcagaggggaataaactgttgagtcaaa

SEQ ID NO: 101161 - DNA, 121 bp, Homo Sapiens
ttttttaaatgaaaagtatggttttattgtatcttcttgtcaaacacctttacttgaggcaacaactgaagtataatttaattcagcaggaaatatcacacttggagggaaaacacacact

SEQ ID NO: 101162 - DNA, 352 bp, Homo Sapiens
gaagaagcagctttatcttgtttactgaaaaataaagtcatttattatgtatttcttcataaagcaatgtttttgaacactgtcaaaataaagacgtgttctaaaaaataaaaagtcaaggtacatttgcccaccaaaaaggaaaacagtccaagttcccaatcctcgctatggcagtaaaatttaggaggaggccattttcttaggcaagattctgagaaactctggaatcacatactaaaagatatctatcaactagttttagtcctggctgtcattattttcatctgttcatatctcttgcctgtttctagtttaaatttaagtatttttattaacttgtaaaagtacc

SEQ ID NO: 101163 - DNA, 450 bp, Homo Sapiens
aatggggagcaaaaagaaattcactgtcttttaatagtgatttcaaatagcttattaaaataactccattcaaattttacattataaagcaatgtagagagagttccaaaccaccaattttataatttcccttgttgaatatattcatataatgtgttctataatatgcccaaagcagctttgtctatagttaacaaagttttaaggatagacaagaatgtgttttctttaataaatagtaatatatcatctttttagggatatagtactcaaatgaaagtaatttagttcattttctgtgttgacatttgcaattaatatttcaatattttatgtgcttatattggccaaaatatggacacaaatatagactaatatgggtaattaccctttggtttatctaaagtgtgttcatgatgactgaggaaaaaaattaaacctatgccattt

SEQ ID NO: 101164 - DNA, 338 bp, Homo Sapiens
gatatatggagtaaaaactccaggtcactgcagaccacgctttatgtgtccaagtttgacactgtgctggcacctggtccccacccccaagcatatggatgtatgagtcacatcacacctctagcttgtcccaaggtaaatataatagtagcctcaggaatagtgaagaggccaacaattgagtgctttccattcaaaggagcttcaattttgatttattgtaacaaagttcatttcacccagaaaagaagccctttcatgtttagcctcatggtgcatgcttcctatcaaagtgaaacttctttattaaattggtataagaatttatgaacacatat

SEQ ID NO: 101165 - DNA, 495 bp, Homo Sapiens
caatagaaatatggtcaaggtattaattgttgttaatatttttatcctccaggtccatgttgtgaatatggtgaaaccttattattaaagcctcttttagaaattaggatctaattcactttatataggttagatttaagacttggcttacttaatatgtcaaagtctgctttgtagtaaagtaacataaaaaatacagtaatgattaaagatttaagaagtgtgaaaataacttgaaatttattggtaacatttttcctatttatttatagaatatagcattcctaggtcagtggcctttttttaaatccagaatggaaaagaactacatttctgaaaacaatgtatggatttctgttttagatagcatttatgggaaggcatcattaagattcttcaaatgcaatgattatatactgttactgacatatttttaatttctctttggaaattttaggtggcagtagtatggcttattagatactgccgagctta

SEQ ID NO: 101166 - DNA, 492 bp, Homo Sapiens
ccagtcaggaagtcctaaagctttcactttcatcaggaggccacccagtcccacttcaaacattcgtctcggaaaccccgcctcttacagtcacgagctcttcctgctgcccacattcctgcaccccctcatgagggtagtcccagagaccaggcgatggcatctgcactattcacagcggattcccaggcaatggtgaagatcgaggacatggctgtgtccctcattctggaggaatggggatgtcagaatctggctcggaggaatctcagtagggacaacaggcaggagaattatgggagcgcatttccccagggtggtgaaaacaggaatgagaacgaggagtcaacctcaaaggctgaaacctcggaagattcagcatcacgcggggagacaacaggaagatcccagaaagagtttggagagaaacgtgaccaggagggcaaaacaggagaaagacagcagaaaaaccctgaggagaaaaccaggaaa

SEQ ID NO: 101167 - DNA, 574 bp, Homo Sapiens
tttgataaaggagatctaagatggaaaattgggtatcaattcacttcaactctaaaaccacgatatggattaaaaatatctttcttctaatgccaagaaataaagacacatttcacaggtctacaaaactagactggtgggtcttgtctttcaatttatttttttattttggtagcaggaagagatggtaagatataagtccatcctgcaagttatgctgccgcctcactggctgaccttcctattcaagagggcactgtgtgcacctcggtcatgggctgtccgcacatctggaatctggggccagactctcaggtgcaggggagtagatgatgccttgctctgagaactaatacagtcttaagatgtatattctctaaaaaagtcaagaataatgacgccattatattttggaatacttaatcatatttagcaaaaattctcagactaatggaaaagtatggtaataatgtattttctttgaaagagagggaagaagtggtttatgaaataaacaagtcctcttattggtattttaaaaatactcaacagatgtagcatatataataataaa

SEQ ID NO: 101168 - DNA, 727 bp, Homo Sapiens
  misc_feature (344)..(354): n is a, c, g, or t
aacaacagacactggggataactagagcggggagggagagagaggggaagggtgtttctaactatcaggtgcttacactcaatacctgggtgacaggatcaatcataccccaaaccccagcacgttacgttacacccatgtaacaaacctgcacatgtactcccaaatctaaaataaaagttaaaattatatctagggaagagagtgggaggagggagaggatcaggaacaataactatcaggtactgtgcttagtacctgggtgaagaaatggtctgtacacgagacctccgtgacatgagtttgcctttgttaacctgcacatgagccccagacctaaaatnnnnnnnnnnnttaagaattttaactcaattagatcatagacttaaatgtaaaatgtaaagtagtaagacttttaggagaaaaaggaggggaaaattttcagggggatatgaagagaggttgattaatgggtccagatatacagtttgatagaaaaaaataagatctgtctgatagatcagtaaggtgactatagtttacaatcatcaatcgtgtatttcagaatagctagaagagaataattggaatgtttctacaataaaagaaatatttaaggtgatggatataccaattacactgattttttacaaattatatgaatattacattactgaatgtaccctgaaaattttaaaaaaatgtatgattaacaattttgagcaaa

SEQ ID NO: 101169 - DNA, 538 bp, Homo Sapiens
tgcggccgccaacttttttcaaaaaattaactgatcactgcactagattgtaatagacttgataggaaaagatagaatccttaatgggtaggagaggaaaatcattctctacagtgttttttaaaatttggcaatgtgaggtccaaagtaacattctctatattcttaaccaaggacctagaaagactttctgctacagagtgataaatagtagaataggaaacagtatacctcttatttcactgtgtgctgcagatgagccatttagctgaccttctctcaccatccctgctaaatagaggacatcagcatcagacattagactgaaaagctaaaactattaatagcaaaaagaaaactaaagggagatgaggacatatggtacgactgaaaaggaatgggcatttagaaatgaaacaatcattgagaagataaggaggcagagaggataaactggagtagtctttagacttgcattacctaacagggaagcagtgagtttccacagtgcactacgattgcttgtagacaaaacatt

SEQ ID NO: 101170 - DNA, 442 bp, Homo Sapiens
ggagaaaatctgaggaagctcagaatattttagcttattgaatagtagttctaacatacagataagaaatgtcatttactgtgtactgtgtactggctaccaggttaactcagagcacgtttacaatgagggaacaagggcattgggaagagcatcattttaacagctgctaaatgatggagagaatgctcatgggagcatttcctctagaaacatatccattaagattcctgcaaacatacacacaagttttatatagagcattctttgggaatgctcttaacttcagtagagttgacctattagaattaagtcatatgatgtagtcttttagctgagagatgggaattttttaaacatggatgataaatgattcctataagcttataattcatgttcttgcaaaaagaaaaaggatttccattttattttctgcatgaac

SEQ ID NO: 101171 - DNA, 602 bp, Homo Sapiens
ttcctgtctcttacgttgcctagtttctgtgagagtttgtttgggtgagagtctccaggaatcactgtcaggcaggtgacagacagcccatgatatcatcactggacctggtcactgtcttgtgattgcaaagggagatagaaggtgagatataccaagggagatgatttggagactcagatttctgcttcaaaattttgattttcaggaatggagtagggcccaggaattgacattttaaaagccctttagggattgttgatctagataatccacatgcctatctttgaaaaaccttaggatggaaataaatataatatgtagtcagagtaatgaagaatcctgagattaggatacattccaaaagtaaggaataacataaactatggagcacatttcatttctccaattcatatagaagtatgtttttaaaacgcaggattaaggaaactagcaggcttcttgtctctattgaaataaaatagatgtttcagaaaaatagttgagtctgaaatgccgcaaatcaaatgagggtaactatgcttcatttgtcgttgctagcttaaatcatggttctttacagaagggagagtttggcaaaa

SEQ ID NO: 101172 - DNA, 477 bp, Homo Sapiens
ggtgatcatatgaagaagggtcctaccaggccacctagaccaagcaccccagacctttctaaggcaaggggttcccctccaacttccagtaatattgtgcaaggacagattaaacaaggttggagtcagttagctgctatgcactgtgttatgctgccagacctactgggattggataaatttaggcctccccttctggagatgctggcccgaagatggcaagatcgatgcttggaggtgagagaagccgcacaggccctgcttctggcggaactgagaagaattgagcaggcaggcaggaaggaagccattgatgcctgggctccttacttacctcagtacatagaccacgtcatatcacctggagtcacatcagaagccgcgcagactatcaccacggctcctgatgcctcagggcctgaagcaaaagtccaggaggaagagcatgaccttgttgacgatgacatcaccactggt

SEQ ID NO: 101173 - DNA, 795 bp, Homo Sapiens
  misc_feature (18)..(18): n is a, c, g, or t
  misc_feature (39)..(39): n is a, c, g, or t
  misc_feature (72)..(72): n is a, c, g, or t
  misc_feature (76)..(76): n is a, c, g, or t
  misc_feature (82)..(82): n is a, c, g, or t
  misc_feature (110)..(110): n is a, c, g, or t
  misc_feature (150)..(150): n is a, c, g, or t
  misc_feature (198)..(198): n is a, c, g, or t
  misc_feature (245)..(245): n is a, c, g, or t
  misc_feature (272)..(272): n is a, c, g, or t
actatttccttcatcagnaaagtccgaaagcaaacttantttgaaatacagccttaatcccttacaagatgnagancacaanataagtcaaaattatctgaaatgacagnatatgagtacatctcaagagcataatggtaatctttgggngtcatctttgatttagagatgatatccccatactctcaattgagttanatcagtaatctgtcgcatttcatcaagattaattaaaatttgggacntgcttcattcaagcttcatatatgctntgcagagaactcataaaggagcatataaggctaaatgtaaaacacaagactgtcattagaattgaattattgggcttaatataaatcgtaacctatgaagtttattttctattttagttaactatgattccaattactactttgttattgtacctaagtaaattttctttaagtcagaagcccattaaaatagttacaagcattgaacttctttagtattatattaatataaaaacatttttgtatgttttattgtaatcataaatactgctgtataaggtaataaaactctgcacctaatccccataacttccagtatcattttccaattaattatcaagtctgttttgggaaacactttgaggacatttatgatgcagcagatgttgactaaaggcttggttggtagatattcaggaaatgttcactgaataaataagtaaatacattattgaaaagcaaatctgtataaatgtgaaatttttatttgtattagtaataaaacattagtagtttaaacaaa

SEQ ID NO: 101174 - DNA, 629 bp, Homo Sapiens
aactcaggcgagcctgaacatgaatcccgagtcctgtacaagcgactctaccggccaggagagtccctcactttcatgtgctccataggctttgagatcatgggtgaagtgaccatccgcagcatcatgggacagccatcccaatggaacgggcccctgcccgtgtgtaaagttaatcaagacagttttgaacatgctttagaagtagcagaagcggcagcagagacgtcgctgaaagggggaaacatggccctggctatcttcatcccggtcctaatcatctccttacagctgggaggagcctacatttacatcacaagatgtcgctactattccaacctccgcatgcctctgatgtactcccacccctacagccagatcaccgtggaaaccgagtttgacaaccccatttacgagacaggggaaaccagagagtatgaggtttctatttaaagagagctacacttgagaaggggacttgtgaactcaaccacaatctcctcgagacattcatccagagaccatgtggcacttgattgaaaccccagaatgtcgactgtcttttgtttagactctttatcaaaggtttactgttttcttccctgtatttattatatttaaaagtgaaa

SEQ ID NO: 101175 - DNA, 397 bp, Homo Sapiens
tgggtgacagagtgagaccctgtctcaaaaacaaacaaataaataaaaccacaacaaggtacatttaggcaaaaatataaagtctcacaatgccaattattggtcaagatatggaataacagaaactcatatactccttggaaggctaaattgatagaatcatcttgtggaaagtttgttattacctatcagcgtatggatccaatactctaagaagacctcataattttacacctaggtaaatattaatattttacaaacttcacatatgtccataaagaaacacaagtaaaaatacttatagcaaaaaactggaaataactaggtccactgataggaaaaataataaaaatggaatgacagtcctgttagaaaataacaacagcatgtttataaa

SEQ ID NO: 101176 - DNA, 505 bp, Homo Sapiens
cagacaggaagaacaagagagagaagaataaggagttttaaaaacttaaatattaaaaaattagctttgaagttttggggagattagacatataatactttgtctatttggttttaaaacgtatgtaagtttaatttgctcaccaagttatgtttggcacattaaatgtaaagtgctgtttcaataatgaatgtactaattacagtacttggaaatgtttgcaggttttaacaaatggggctgcaagatgccaaactcaaagggctttagtatctttctttttgttaatttttgtcagtttgtggcaaaatgggcaaaacctgagactggaaaaaaggatcagcctcttggtaaaaccaagaaaactcttattttcaatggaatttcctcctttgtgtcaaacataagcaagaagtcattttcagggaaaagatcaaagtgagggaaaaaacttccctctagagctcattgatctgtaagttgttttctgctctttggcattaaa

SEQ ID NO: 101177 - DNA, 386 bp, Homo Sapiens
ggagtctcattctgtcacccaagctggaatgcaatggcatgatcatggctcactgcagccttgaactcctgggctcaagcgatcaccctgccctggcctccaaaagtgtgattacaggcatgagcgaccatgcccggcattgatttccaggtttagtcattaaccacagatatggggctaactatgtacccagcactgtgctaagtacattatctgctttacttagtttgatcctcatgacattcctatgaaataaacttattgccctcatttatactgaagatgttaataaacttgacaaaagacataatgctaataaataaaggagcctcagtttgaaatcagctttctttctttctttagttagttagttcctcttcgtaaca

SEQ ID NO: 101178 - DNA, 446 bp, Homo Sapiens
cgatccccactgagtaaaggtaacaccactgctctgaattttatcatttcctattcgtcagagttgtatcacatatttgaatctgtaaaaatacattgtttggtttctcatgcttttcagcacgcagacatgtctgtttttttgcgcttcactttactgtgctctgtagagactatatttttcacaaattgaaggtctgtggcaaccctgcatcgagcaagtctgtcagcgccgtttatccacagcatgtgctcactttgtgtgtgtgtgtcacgttttggtagttctcataacatctcatattttttcgttattatatgttatggtggtctgtgatcagtgatctttgatgttactactgtaattgttttggggcatcaagaactacacccgtatgaggcagcagatttaatgtataaatgtgtgtgtgctgactgcaaaaaaaa

SEQ ID NO: 101179 - DNA, 585 bp, Homo Sapiens
agaagctaatactgttttgagatagaaggaaatattttgtggggcatgtgacttttgtgttaaggcagtttacccatcttggctgatgtggggaaagtgcaaacttccagtagaatcccggtcttttcatccaagtgcttgcaggggcagccttgtagtctgcaaagaaccatgcagaaaccaaagagcttgcttttttgtctttgtaattccttagggtctgtgatatatgccaggaagtctgattgaaactaatatgctttttattctcccattattccctaaattgttatatcacaggcacttgcctacattgggaaagtaaggacaaataatacccatttaaagtaacttgcctatattttgactgtctttcgtaagcacttgctgaactgctgacttaactcagttttaagatttcctctttccccccaacttttccacatttcttaaatgagggtgtaatttactgcaaacatgtacatttaatataatattgctgttagattcatggtacactttatgaagcaaaaacatgaaaaggaaaccacaactctaataaactttaaattaaagattaaaaaa

SEQ ID NO: 101180 - DNA, 746 bp, Homo Sapiens
gcacgaggctccagtcactaatggttgtaagagacttcggggacactaatcttaatgcgccatttcctataggtcttgttagttcctaaaaccatctgtaagaagttattgtatttggctttcttcagccatattttttaagcacgacatttaattagtgcttgttaagatgtttcaagtgctttggccacttctctcacccctgctgtttcttcatggtcagcatattttctggaaatgttgttttcgggaaagggcatcagatgcgtctgtgtctggagaattgctctgtgtatccatgtgaagcaagtctctgagagcaactggagggactgtcaggctggctgtggggcctccgtgttcacagcagctactttgaaaggcctccagttttgacgttctcatggaaaaagcagagacctcaaaatgggtttggaaccgacaacaataggagggtacactggagccctggagaagaatgtcacataagtgaaatgtatttgaaatatttaatctaggaacctttggattaacttcattaaaaagagtttgcttgaaagggcataatttttgctcgaagagaccttatgaaaactgcaaaatggttgatggtactgaaatatccacccatgctcactaaaggaataaataggttgaatataattccattatttttgcaactgtttaataccataaaattcattaaaatttcaaactgctttacaaaataagacattttttctaaa

SEQ ID NO: 101181 - DNA, 777 bp, Homo Sapiens
  misc_feature (34)..(34): n is a, c, g, or t
cccaaggaaaattattataattaatggaaacttnagggaaagatgaataatccaaggagctcagaactaacccaaaatgaaaataataatagtaaatgcagcatcctctctgataaaatcttgggcccaaaactgcaacaaaatgagaaactccatttaggtggaacatgggtgttttatcttacctctttgaatgttgaaggaaatctgctccagtagaatgagttactttgtatgagatagaaggtgaaaaagagagaagaaattggcaacactcttagcccactgaaagcagcctgcttcagaacctaaggccttgtggttatttttactcgcttgcaaaagtgaggaaggatgttataggtctctttgagcctctttgcttttaccctttatttctatatgatctacatttatattaataaattattacatgccatataagttccagaatcattccttttgacagtcccatgggatttaatcccctcctaaatcccaaaatatagaaagagaaaatgtttgggtacagcactggggcatcatgcatactgaatattcaacaataaccatttgaatgagtggatgatttgggggtcattccttactatgtgactgctcttctctcaggcagtcttagtccctgtgtcactctcctagtgtgtagccgggctgctgcctgagtgtaatcctagcctttcaagataaccatttattatatggtgctgacccctaacaacacaagccagctccatcctctggtactcagcaaaaaaa

SEQ ID NO: 101182 - DNA, 425 bp, Homo Sapiens
tgagcccagggcttttatgctctggtgtggcgacagcataccccccgctaacagtgggaaggaaacacaaatgctggtggcttctggggtgttgagagggtcccggtgttcttggggcccattttgtacaagcgataactattgaagaaaagagaagaatacagttcttaaccctttccttatgcctcacaaattcagcttgatttaaaagcctactaggaccataattttaaaacaaaaagcttattaggaatatggtgtctggaatttgctccacaattgcaggagtagttgcagttggggggagggggagcaggatttcagaggttggtggttcttggttatgggtggtggacacatggcatttcatgatattatgctgtctgctctgtgatggttcaaaattctccgtaataataaagttt

SEQ ID NO: 101183 - DNA, 491 bp, Homo Sapiens
  misc_feature (191)..(224): n is a, c, g, or t
tttaaatgtatcatggctcactgcagcttgacctttccgggctcaagagaccttcccacttctgcctgccaagtggctgtagctaggactacactgacgcaccaccacgctggacaattttttttccataaagacagagtcttgctacattgcccaggctggttttgaactcccaagctgaagctattccnnnnnnnnnnnnnnnnnnnnnnnnnnnnnnnnnngcatgagccactgtacctggacaacccgcttgactgcttacatttcaacatcactgccagggacctctccttacatttcaatggctacaattgtgtcacaaggccacccccactgcagaaaagatgggcagatttttaatttttagctgaatgctcagcttcctcaagtaaaatcagtgttctgttagtaaataagaggaaaaggatattatataggttacagtagttgttatctgtaattgcaatctcaaaattctttaattgtag

SEQ ID NO: 101184 - DNA, 540 bp, Homo Sapiens
  misc_feature (523)..(523): n is a, c, g, or t
gggttttgtttttgttttattgagatacagttcacttaactatacagtttacccatttaaggtatacagtgttttttagtaaatttacagaattgtgcaactattacaattttggaacatttttgacacctccccccaaaaaaacccctatgccccttagcagtcatcctcagtctcctcagccctaggcaaccactcatctactttctgtctttatagatttgcctatttgggacatttcctataaatggaatctgtatgtggtctttgcttggttttgtttttggggtggtgggggctgactacttagtcttgacaagccaaggtcccaacccagcagtagaaatataaggagtcacggctgtgaggatggcctcacaatgggctcagggtagtgaacttctgtcccctaagttatctcagaaatgaggccaactctctgccctctagaatggatggccctgagggagagaaaggttcatgtccttcctggctggtgacagaaggctggactgtgcctganatcaaagcttctcacct

SEQ ID NO: 101185 - DNA, 102 bp, Homo Sapiens
cttgttttacatgttttctccagatcttgatcctcaaaattgaaaatcagttgtgagtattgcattattatgcctgtaaaaattatccttaacttcacaagc

SEQ ID NO: 101186 - DNA, 223 bp, Homo Sapiens
ccaggtagataatcccagcaaaaggtactactttattatcaagtggtacttaaatattcctaggaaaaacagccacatgttttaagaactgcagcctccaaaagggacaatcaatgtatcaactctgatttatgaagtcttaagccaaaagttttaaatggcctcacaaccgaccatacaaagaatcttatctgtaggaggcgggccaccctcaaaaccacta

SEQ ID NO: 101187 - DNA, 373 bp, Homo Sapiens
acatcagtagcaaaagcaagacacaacccaagcataggggaggaaagtgttggtggaataactggcagtttgaagtgcaagtggaagccacatggatcgaataggagccatccgagacaacctgagtgaaacggccagcaccatggcactagctggagccagtataacggggagtctgtcaggaagtgccatggtaaactgttttaacaggtgtgtgttttggtttggtttggttctgctttctggtaactacaaattattaattaggtgagaattttgaacataaagcatgatgattatatataaccctactatgtcaaggttcaaaatagtaatgttaaaaatgaaatttggggccaggtgcagtggctca

SEQ ID NO: 101188 - DNA, 490 bp, Homo Sapiens
gcggccgctcgcctgccgtcccgagtcccaatcggccgggccccgcgcggcgcgggaagcgctccgccagcagcaagaggagcgcgcgggccccgccaccctggttccgtgccccggggctccagcgcagactcgggtcctggaccccggccgcctcggggctcctctggctgctcccagggcacagctgtaccaggagcagcagcgcggccagcagcgctgcgcgtcccgcctgcctcatggtgccgccggccaggttgtcggcgagcgtctgtacggtccaagattgagctccagtctctgtccctcggggcaggctgaagacgccttggggaacacagggtctgtcccggggctgtcgccagccttatatagtgccaggacagctccgactgacgtcagcgaagaacatgcactgattgtagaagcaatgacagccacagcttcgagtctgacggctggcgggcccccggaggggcgcacctcccta

SEQ ID NO: 101189 - DNA, 741 bp, Homo Sapiens
gttgttccattccttcccaggattggctgctacaccaaatcgttggacaccagccgcttcatctgtgccaaatgcaaggggtctctggtcatggtgccattaactcagaaagatgggacccgtattgtgccccacgtgtgaccatttgctgtgtatgtgcagaagtattatagaaaaattatgcaggagatggctaggattagccttggggatgtgatgaaaacacttggcaggaattacaaggcaatgaagaattcttaaggttatcttagagtatattaatgtgagctatatcctttactggtaagaagttttagaaaagtttgttttgtgaagttaggaatattagaatttaggtactgttaagtaagtaatgttagaatttaagattcatgttattaacgatgattgaccttaaatagggactctattgctaaccattctgtgcccttgacagggtatttctgaagcccttgggatctaccttgggtcttacttgagttccatatttttcacatgtagaacaaaatgcaaaagaaaagtgagttttcaagagtggcaggttgagagaggagaatgctggaaagaggacaagtttgagaggcaacacttaaacactagggctactgtggcatctatgtagacaggaaagacaaacgtgtttcataaaattcgttgttgatggtattgattgaaactatctgagccatgtaatcaaaaaataaaagttttctgcatctt

SEQ ID NO: 101190 - DNA, 598 bp, Homo Sapiens
gtacttatatttttgctatttcagttctatttccataaaatttattttatcatcttttctcataaaattgtgccttctattttactcccagtctgtttaagatgaacaaatcttacaaggtcacatagctgactgtgatatcagttggactccaggaaggagaacctaaagaaaagttcaagtccaagcagaaaccgtgattccttccggatgatggctcaagagtgctgtttaactgggatgcaacctgctgacctcagcaaatcctagttatatgtatgtgttcacattacaggctcattagcccaggccgacctctgcatgtatctcagaatattttctatggagaacatacatgataatgtctgatttcagaacaagaatgtaattctcaatagcaaggaaatggagtagggtagacagctagtaactaaactcacttgtgcgttaagaagaaattaaggaaaaaagaaaataagagaacatattactaaataaagaaacacacattaaatatttgctatagtttcacactaagagaataaaggaaatgcaataaagtggcctgaaaggtaaaggatgagatgtgtaaaagagg

SEQ ID NO: 101191 - DNA, 468 bp, Homo Sapiens
  misc_feature (276)..(290): n is a, c, g, or t
aatgaatagaaaatgcatgggaaaacaagatggacagagctttagggacctgtgggactatgaacaatgatctcacatctgtgtcataagggttccaggggagatgggaaaaagtgtggggctgaaaaatcaaagaagcaatggctgaaaatttcccaaatttgacaaaagacataactctgcagacttcagaagctgaacgaatcccaaagagaataaatccaaagaaattccacactaaaacacttgagttaaacttctgagaactattaaatnnnnnnnnnnnnnnnttaactgagcatggtagctcatatctgtagccctagctacctgggaggctgaggtgggaggattgcttgagcccaaaagttcaaggttacagtcagctatgattgcaatgctgctctgcagccagggcaatgaagggagaccctgtctttaaaataataataataatgataatcatta

SEQ ID NO: 101192 - DNA, 442 bp, Homo Sapiens
atggactaaaaccacatcaccaggccttcaatgacgtccaatgtctgccatcttatttccactccagctccgccccaggcatagttgcctttctttttattgaagccttctccttgccaagttaattaaagagaatgttttcttcatcaaattagaaattacatcctcagagctttccagtatttgtagttcttacaggccacatttattacaagtttatagactccaaacttctccactgaacagttaataaaaaggacacaggcttattgtaaaataattcatttagtgcctgccattctgattacactagaaatttagttctcctgctcagcgttctgttatgtgactgttcaatgcattacttaaaactgcaagattgaatagagagatcagcttctgacactgatgaatgcaaaccacaagaaaccaagtctcctct

SEQ ID NO: 101193 - DNA, 541 bp, Homo Sapiens
  misc_feature (115)..(115): n is a, c, g, or t
agcataatccttaggccttagaggtcttgctcagacatttttctggagaggaatatttcccttccaattagtgaagtattgcaacagctgtgagagctagcccctaaagcccttntgggtcccattctcattcatgtaggctgtgccatgttaatggtgcccagtgagccttctagctcacagcactctgttagtggtcctgagaaacagatccatctccttcgagctgccgttgcccactttcttcccttcaggccacagcagacttttacgccacatgcttccaatctccctgctctgcagggacaggacagaacctaaggaggctcagggaagggacctgggagggaacattgcaaggaagagatgggccatggagaggaagtatacaaaagtgacccagacaaagagattctttgggctttcatccacgtgaatgtgctgcttttcctctcctacttcgatacttccttctgattttacacatgttttgggattattcatgggcctggatatgatataaaaattaaagatttaaacc

SEQ ID NO: 101194 - DNA, 426 bp, Homo Sapiens
  misc_feature (194)..(202): n is a, c, g, or t
tttgtgtgtgtatacattatgtacaattaattggctctttccctttgaaaaattaatgtggtcctttaaattaaatttggttttggtgaaatcaagaaagcaagtaaatactggtaatacacagtgagtgacaacaccgatttttagtgcctaaacagagaatgacttcaacttgacctgtgatgtgttaacannnnnnnnnccctaaaagctacagtacctccataacctctctttggggaaggggagcagaaagctatgctacgtgaaatagggtgctttgaaatgttggcattggtaagattcctgtgggcccttttgtcaaagcctggtggagaaaacagtttattcctgactgcagtggttctgggaagagattattgcctgcctgttgaagctgccaataggtttctttagggagtgagc

SEQ ID NO: 101195 - DNA, 505 bp, Homo Sapiens
gtagaactaagtggtgaatttcacaaagtagacctaggcaatttcaaattggctgctatacttttcaaggtaaaggacacaaaccaaaggtacctatatattcttttcatgatatttatttcaaggagacagatcaaattaaaaacttcaagaatgttttctgcctggtaaataaatattccagcaacccacataggcacagactcagacacttagtccaatagaactccaaagaggttttcctgacactgagaagagggggtgagttttgggggaaaaatttttaaaaataaagtacttccagtctatatattgtaaactcacctattcatggatttgtgaaatttagaaacagcctaataaaaattctaggacaactgagttgtcacaacgtcacaagagcacaaattcatattgagtgacttttctagtaatatgaacaaaaccaacataaatttccctcaacatatcagaaataatatatattctatttagttccaagaaa

SEQ ID NO: 101196 - DNA, 148 bp, Homo Sapiens
ggtcctctgcagcttggaatacatgaggaagaagagtgggagacaggaggaaaggtaaggttgggagagggcaagaggaaaggaggagagtagagggaacactccatcgattgccagcacaataaactgtatcatggactaaaaaaaa

SEQ ID NO: 101197 - DNA, 453 bp, Homo Sapiens
ccttattgaaaggaatcagtggaaagctataccatatttatgggtgggataattaaaaatcattaatttgatatcctgcatttttctttatagcatttacttctaccagccacactctaaatttgtttacttgcttatcatgtctatcatgtctctgtctcctggaatataagctccaagccgggaacttgttttgtttcttgctctattctcagttcctagatcagtacctttcacatgggagtggattaataaatatttatttaatgaaggatgaatgaacgaatgaatgagaggtattaacactgtttactctgctacaggagtccttggctaaaaagattgagaaccagtaagctatagaacactctatgcaaaacgaaaaccacccatacttttcacatggaagcataagacagttttaactaaataaatgaaaacttttcttcaaaa

SEQ ID NO: 101198 - DNA, 544 bp, Homo Sapiens
acagtaaatgccaactgtggtcatagagaaatcaaagaaatggagagtttaatagaaagcaaccacaatattcactgcactggtagtacattttaggacatggtatttatagaactttctgataaatacagcttaggtaagtagcgagtgagccaattaagactatagcttttaagactacatttagccaattcaattttaagagttccctattcacagtactcattttgacggcactctaatgagagctgatcatatgtctgcagaaattggcaaagtgtaaactttattatcttcttgtatcctgaacatgcatatatgaaatttttaaaatgtgacatgtgttcatgtagtgtgtacttgtagtggtgttttctgtccttataaatatcttttgaattctgtagagatggtgagtttagtatagtgtagtctggggattatattttcccttacagtaataatatctaaacctaaaattgtttcctttaggggagatcatttcaatcattttcttcatttatcttcatagtacagggtctca

SEQ ID NO: 101199 - DNA, 699 bp, Homo Sapiens
  misc_feature (318)..(329): n is a, c, g, or t
  misc_feature (581)..(592): n is a, c, g, or t
tttccattccaccgtctggataatagctcattcaaagagaactgtccccacagagccacggtcagtttgtacattaagcgtgcattcgcttttgtgtcgatttcactttttaagaaatccatgttatacttgatgatttgagaacagttaaatagtaaatgtgtaggaattgttatggtttcctttggttttgtatcttaaattattttacccttcaagtgtgtggttgaaaaattttaaaatagcactgttacagctaaaagccaggttaattctaatccctgtccatttggatgtgtgggaggtggggcatatggnnnnnnnnnnnntatgtgttaactgaatgtaaactgactttttgcgttaaatgctagacagaatgtaaagaccaagagagggcagaatgagaaaaagtgcaattgcttttatttgagtacttagcatcaacaagaaaaataatacagaaaaaatttcagtgaaactcgtactgaaaggcatcagccccttttccagctaagacaagtgccccttgtcccccatatcataaatacctgaattgatgttcttttaaaactgctccnnnnnnnnnnnngagattagaggattggactactgttgtataagtataaacatttctgcctagactaaaatattaaattaatatgtaaagtggaaattacaataaagtgtcctggaaat

SEQ ID NO: 101200 - DNA, 502 bp, Homo Sapiens
ggacaatgagatccttgagggctgggagtatgtcttactaatctttatattctctttgctggaacttgtcttatggaaaaaaatcttacgtgcccagtacttcctcaaaggaaggaagaaggggtcttatttgagctgggaaataatacacattataattctgatgagactgaaattttgaaacagactcattgattcagacaaaaatatgtcaatataattccaaattgctgatatttctaggagaaagttcacatatttaatttataaatcgcaattatatactttaatatctagattacctcttcagttgtaacttggaaaatcttagatcttcacttataatagaacacctaaaggtccttattttgctgccagaacagacacattgttttacagagtttccttctttcctttaataatggcaaaaccttaaaatggctttacacaggcagatgctagcaacttaaaaacaaaatttaaatataataaatgtttcctt

SEQ ID NO: 101201 - DNA, 429 bp, Homo Sapiens
aaatgtaaagaaaaacgtgtttatcacctttggatagaattcttaagcagaatctaaaaagattgaagagtttgaatatattaaaattatagatttctgtgcaagacactcccctcccctaaaaaacaagtgactgatgagattttccaatacatgtaacaagggtttagagaaatgagtactgatgtcatgctgacagaagtgcaaatatttatggccattttttacagctgttgacaagatccactaaaataaaaattgcagatatcctgtgagcccaattctatttttttggtaactttatagtatcatacaggtgattcactttaaaatacctctgcatggacaacgtgatatgtatgcgaagaaacattcacatgtgtacaaggaagcaggtagaaggatgtttactgcactgctgcttataaa

SEQ ID NO: 101202 - DNA, 689 bp, Homo Sapiens
  misc_feature (124)..(159): n is a, c, g, or t
  misc_feature (440)..(473): n is a, c, g, or t
tttaaagatcctaacagaacatagcgtaacaatattggtcttccaggtgttactcatttcaattatgtgtagtataccaggacagacctattttcatgtcttatttctttaaagagctgcttcnnnnnnnnnnnnnnnnnnnnnnnnnnnnnnnnnnnnaagtgctgcaattacaggcatgagccactatgcccagccacattcttaaccttaaagggctctgaatatggagatagaacactggagtcgaagtcccagccccctctgtcgctctctctgaagctcagtgactactccagtattaaatgatgcatgtataaagttagtcactctatcattatctgtaatagcagatgattggaaatgacctaaatgtctcataataaggaactagttttaaaaagcatgttccattcatgccttgaaatactatacattgnnnnnnnnnnnnnnnnnnnnnnnnnnnnnnnnnncagtgtgtatattatactacgacttacttctttgtgcatagatgttctacaaggctatataaaagattgttaattatggttgtctcttgggagggggagtttagattgtataatggggtagaaggctgacttttcgttgtttactattctgcaccttctggattttgtactatgtatatattttatatattaaaatagcttaatataaataaaact

SEQ ID NO: 101203 - DNA, 500 bp, Homo Sapiens
cccatttataattcaaatataatataaacgtcttattcatttagtcttcagcattttaagtattcgacacgaacattaaagatttggtgttgaatttaataaattacaccaaaaagtctcagtagccaattcactaacatcttttgatttggtaatcttcacagaatcaacaactgttaacacttctgtgcaaataaatttcagttgtgcttatatattataatattcactttaggaatccacctgtcaatttgcaattcaattataaggtatattttaagtgatatctatgtattgtatacacatattccattgaaaggtgagaataattagaaagtagtaatataaaaatgtgtatgaaataagaactttcttaaaagacctagtttagctaaatatatgacaatataaaatgtctgcccaatgtttgattatactttgtctaatgacctttaaatttaactgaaattaaaaccgtacttttgcagttgatatttttg

SEQ ID NO: 101204 - DNA, 259 bp, Homo Sapiens
tgtaatgatacaatcagatttgcgttgtcttcaagttaccatggtaaccgtacttccacccaccaagagtggattggagaaggcaaaactagggcagagaagccagggagtgttgagaaggtctgaacccagacagtgggcagctgggccccaagacggatgggggactccagaagcgtggagctggcagagagaaacctgcccggggcatcagagaaaagggcgactgtgcaggaacagagtagatgaggtgggggaa

SEQ ID NO: 101205 - DNA, 468 bp, Homo Sapiens
  misc_feature (326)..(334): n is a, c, g, or t
agctatggttaactctctgtgggccagtggctagattccccaacacagatgacaactgaacaatacacatgcagcgtaagaatgttgtcgctgccaccagccacttacagatacaccattgataaggtccacccaactggactgtttccccctcccatagactaagccccaaaggccaaaaagtaaaacccgctacccaaaacctgcctgtaactgtttgaccagaggccagctgtcccaggatgcggttaagacgtctactttgcacaagagaactggcaagaaaaacatctccaggaagcggtcagacacatggcacaaaggannnnnnnnnttttctttttccttcaccctgatccagttctatgtcctataaaaccttgctctagcctataagtggggctgccttctctgcttttgtcaagaggtagccaggcaggactgacaataaatcagcttgcctgaaaa

SEQ ID NO: 101206 - DNA, 325 bp, Homo Sapiens
ttaacattacacatcaaacaattgaaagaatcagataacagcagaaccccactatacttctgcccatgcactcacactcatgtactgtgcatagcaacatactaatttttctacccacgttccttcctttaattcaaaatctgcaaatcccacctttctcacctactgaaggatactgttccagaatttctaccatcttttgcctgtatttaatattgttcgtttgctgttgtataaaaatatttctttatttcttctatcttaacctaccgtaacaaaagcaacctctattttcctcacttctcgtatttttctgatgcctttt

SEQ ID NO: 101207 - DNA, 478 bp, Homo Sapiens
tttgagaagggacttgctatgttgtccagccaaactcctggactcaagaattctcctgcctcggccttctgagtagctaggactttatatagcttattcttataagggtacaaatcccattcctaagggctccaccctcatgacttaattacactcaaaagccccaccaccaaataccatcatattgaaatgacaaattcaacatacaaattttggggggacacaaatatccaattgcttgtatttgacaggtaaccaagtcaaagttagttcagaattatataaaaagggccaggcagaaaagtgatgtttcttcccattacttttatcattttcaccccatttctttccattttctctagataaccaagcttgttaggctatactttatcctatgtgatttatttttgcaataatatgcaaataccagtatatttaactctcccctcctattttacccaaaataccatggtaaatg

SEQ ID NO: 101208 - DNA, 398 bp, Homo Sapiens
ggataatacctgcagaataaggtccattccacatattatcacatttaacactacatggcctaattctgctgtgacccacttttctcatcccagcatggcctctttccttccatggaaaatgggatccatacagcctgctggaatgcccattttctcctacagctggaatgcccattttctcctacagcatttacagaactgacttggctcagtttcctcttcctggaatactctctgcctcatttccttctggaaaaatctccattcagcaggcatcttattgaggatctcctttgtgccaaagactgctcactggtagggagctcaaagatgaatgaaatctgggccctgttctcaatatcacagaagtgttatgagcaaaaaagttggcggccgca

SEQ ID NO: 101209 - DNA, 543 bp, Homo Sapiens
  misc_feature (94)..(114): n is a, c, g, or t
taatgataagcattttttaaaaaatcatttttaggtaatggtaagcattttatgccaaatgtggcataacagagtttgaattgaagggcaaagnnnnnnnnnnnnnnnnnnnnnggccccttgaatggtataatacagtcctctccggtggaaagaagagaagagaaggtggacagccctgctcttagtaggtgctgcaggtgtaaacttgacgtgtatccctgcctgacaaggttgaactgaaagatctatatgttaagctaacatgaaaattcatattctgcaacatagtagatttttctaatgcatgaaataagtacccagcacagtaaaaatactctgacttatgtccctaaatggttgttttgatacaactatatagaaaagagccacaaaataaagataaaagttattgtggccatctctgaaaaaaatatataaaatatttaagaataattatatcttaggaaattatttttacagtgtgtttgaggctacaaacataactcccccattaatacaaattaaatgtgagagctcatt

SEQ ID NO: 101210 - DNA, 429 bp, Homo Sapiens
  misc_feature (43)..(43): n is a, c, g, or t
ataatatatgtcatcaaaggaagcatagccaacaaacccaagnatacagtgcagatcaccctttccatttctaaacagtgtgtagagagcatagtattgtctgcaagagatgtcagaattgggaggagtccgtagcgctggtggagatgttggttaaatcggatgcattttttggtggatatgccaaatcctcaccaggtgattagtgcctggtgtgtggtccaccagttgtaaacctagttaagaagtatactattcatttttactgtttaacaaacatacttctcttcacccttctcagttgtatttttttagttttgtcttgtttttgcagtaagttctagactcatatcagaaaatataattaatgaaattaataatgaatcagaatcccttgttatccatgatgttcatgtagtaaaatgataa

SEQ ID NO: 101211 - DNA, 289 bp, Homo Sapiens
gcgggggggatagttatgaacccatgagatgtgagttgtgtaacacatttcaacccatttcagccccacctgtggccagcaggtcccttcccctttggtgtgtgtccttttgacggactagagtattggtaagtcagatgtccaggctctgggccggccatctctgaggaggaaccaagatgtttggctgttgtgttcaccctgtacaccagcagcgttctataaatgccaggtgaatgaatgggctagcgaaggcgctgattgaagtctcatgtacagatacgactga

SEQ ID NO: 101212 - DNA, 696 bp, Homo Sapiens
gcggccgccaagaaagaacaattggcaagaaataattaaattaccttaaaaagaattaagaggcactccagccagataacacctcccaacaacatgaaatttagttagtgcttagtgaaattccttaaatatatatgtatatgttttcttcaacattatttaatataactactgcttttatattttttaatggtgttgcaaccacttgtacacctgctacaccttactgacaaaactgggcagctgaaaataaaagagaataaattctattccactgtaagaagttgatttcttttcagctttctttgtatatcagtaaagaacacgaattgtttgaaaataattttaagtctgataagtatggatagcatgttacctaagcttttaatttgtacattttgatgtctgatcatttgcatggaagagacaatagtgccacgtctgaattgttctcttgtgcttggttaatatgtacttctctagattgttcaaaaagtttcaaatgacattccttactctttggttttcagaggcattcaagcaaaatatcacagtggtcttttattttctgaccaatctaaaaatacctgtgattaaatttaatttgttagtgtaaataaatttcttgccaatgagtattattgttgttagacaacgaatgcaataaaaagaaatactgaggtctgttgaagcaaa

SEQ ID NO: 101213 - DNA, 826 bp, Homo Sapiens
agacctctcacttgactatgcctctcagccagcaaatcttcagttccctcacataatgccccttgctgaagacatcaaaggttcttgcttccaaagtgggaataaacggaaccatgaaccttttattgctccagaaagatttggaaacagtagtgtgggctttggcagtaattcccattcccaagcaccagagaaagtgacgcttcttgtagatggcacacgttttgttgtgaatccacagattttcactgctcatccggataccatgctgggaaggatgtttggaccaggaagagagtacaacttcactcggcccaatgagaagggagagtatgagattgctgaaggcatcagtgcaactgtatttcgcacagtgctggattattacaaaaccggtatcatcaattgtcctgatggcatctctatcccagatcttagagatacttgtgattatctctgcattaattttgacttcaacactatccgatgtcaagatctgagtgctttactccatgaactgtctaatgacggtgctcataagcagtttgatcactacctcgaagagctcatcttgcccatcatggtgggctgtgccaagaaaggagaacgagagtgccacattgttgtgctgacggatgaggattctgtggactgggatgaagaccaccctccaccaatgggggaggaatattcccaaattctttatagctccaagctctacagattcttcaaatatattgagaatagggatgttgcaaaaacagtgttaaaggaacggggcctaaaaaacattcgcattggaattgaaggttaccctacctgtaaa

SEQ ID NO: 101214 - DNA, 519 bp, Homo Sapiens
agggactgttgatattcagggatgtggccatagaattctctccggaggagtggagctatctggaccctgctcagcagaatctgtatagggacgtgatgttagaaaactacagaaacctggtctccctgggtattgctgtctctaagccagacctgatcacctgtctagagcaaaggaatgagccctggaatgtgaagaaacatgagacagtagccagacacccagctgtttcttctcatttcacccaagacctcttgccagagcatggtataaaagattcatttcaaaaagtgatactgagaagatatggaagctatggcattgagaatttacaattaaagaaagattgggaaagtgtgggtgaatctaaggtgcagaaagaatgttgtaatggacttaaccaatctttatcaactacacataccaaaatctttcaatttaataaatgtgtgaaagtctttagtaaatcgtcaaatctaaatagacataagataagacatactggagagatatcttcca

SEQ ID NO: 101215 - DNA, 546 bp, Homo Sapiens
ctcttagaaattcttttgtctaaaagcctagagattcttctggttcctttagaaacatgtaacaaacttgggccaggggtgctgaggcatggggaggactgcttattggcaggaacacagagggggtgggcatcaggtagggtggaactggatgaccttccagaccccctcctactcagaagtcagcatgcaagcagcgcctgctgtctcccgatgcctgcagggaggaaaatgtctgtgaaggacactttaatgaaggacgaagctctctgctgctccctcaaagctgagttcactgtggcaggcaggaagcagagaagctcctgcccgccaaacccactgcacaggtggctgctgctggtatcagattctcctttttaagtgtcaatttctgttcacagacagtttgttttcaatatggctgatttaccctttcacctctccaccatctcatttaatttgtaaatttttagttctgtcttttctcattttaacttttaaaaaatctccttgctttttaaaaataaatattacccacataaaaaa

SEQ ID NO: 101216 - DNA, 570 bp, Homo Sapiens
tgcggccgctgaagttacacctgccgggtgagtagggctgccgggaccccaccttgagtgggagacccccagtgtatcccagaagtggttaacaagcaaactgctttccatgagcctccttgatttgttaaatattgaaggcacttacctaaatactgccgtgttgccagtagcgtgccggttaccagtttggccgttcttgtacacaatgtgtgagtaatgctgtgctcgtcagaggggagacttttatattcagtaatttgttttataaattaaagtgaaggatgtattgaagtgtggtttgaaaaatcctgatatttgctaatggctccggtcacgacggtgtcttttggaagtggttctcgaaaactctggtgacttgggggctgcacagtgggcctgcgtgggcgcggtgcggggcaactgcccatggagcccgtggctggccggctctcctgtggatgacactcacccttgactgccagggtcattcaaagtcttgcacatccatgaaagactttaatggaaatgttcacattattattttcattaaaagcaggtgtttccaag

SEQ ID NO: 101217 - DNA, 678 bp, Homo Sapiens
  misc_feature (600)..(626): n is a, c, g, or t
tagtgcagtagccatggaaagccagcggcttcacagccaatggatatgactgacctccttggagctgcatgaaaatctccatccctattactatcaacattttgtctgaactagcagctccctggaaaatcttcattctcagcatcttggctatttcatttgactagggcattaccaaaaacaacagtaatctgctggcaacatctcagctacctaagcatgtgattaaaggtggaggaaacaagatcctgatcaaaatataagaggaattcttagaaaactggaaaacatacgcagctttgaaaagctacaacatatttttggggatctagaagactttgcaaattcctagaaaggaaaacacctcattcaaataatcagctcccttctgcttcaccatgaagccctgcgtaagcaggaaatgaaaactaaggctgtcattttctgaactttgaaggcatgccttcacacacaaatcactttgacaaagggtgggagatgtacaggcaagagatttagggaaatcttacaacaaatcactggctgaccactaaataatactgacccaggtatgccaagtaggaagccagatgtagaatnnnnnnnnnnnnnnnnnnnnnnnnnnngaccatggggcacctgctgcagggaatacagaatccacaaaattcactacat

SEQ ID NO: 101218 - DNA, 779 bp, Homo Sapiens
  misc_feature (532)..(555): n is a, c, g, or t
  misc_feature (559)..(559): n is a, c, g, or t
agtagaattttaccttaattcacttaaagaaaattaaccattttttggtccaacttcagatattttcttaatccagaagctgtgactgttcccagaagaaacctcttatatcacatttaaaacataaaaaataattacactttcactcattctaatgggtaaattgttgaattgtaataaacaactgtatatttacaaacaggtttataaggtatttgtctatcaaattaataataaaataaaacttacggggtctgcaaggaaaactatgaaggccacttaaagtggttcaggtatccctttgtcttgtagggcatagctgttggtttagccaggcttttacagtatttaattttaaagtatcctataactatcaacttcccaggttgaagacgatgtgttgagtttcctactgattgattgattcctgtcctccccagtgtttccgtcactggttcactaaaacagtatttatatagctccactggctctaaagctcttagtccttctaatattttggattttacaagtnnnnnnnnnnnnnnnnnnnnnnnngagncaatcaaatgcctggagcttaaaacaaagtatgtgcaacctaccatctcacttgaaatttaataaaataataagtaattatgtaaatataacatagagttatagatttatattttgttcataacacatagtgtaatataagttgtatattttcatgtttttggttttatgttatcattcatgccacaataaaaataaaacaggagtttatgtgctcttaa

SEQ ID NO: 101219 - DNA, 419 bp, Homo Sapiens
  misc_feature (99)..(136): n is a, c, g, or t
  misc_feature (252)..(265): n is a, c, g, or t
aaccacctcatcccaggagccacaaacaggagtccctaataccaaatggcctttcaacagcattgcttcacagcccagaaagttccaccacagaacccnnnnnnnnnnnnnnnnnnnnnnnnnnnnnnnnnnnnnngtggatttgagtaggtgtgtagccaaagcacccaccccaagtccagttcaaccaaactagctctgttttcattcatttcataaatcaggcctttattagaagacagagcgctgctnnnnnnnnnnnnnncaaacaaacagaaaacccttacaaaaattatctgcctatgctatgttctctgataattctgaaatgtccaagtaacattgtgtatctgttctgaatatttactacatatctttctgtaataaaagtcaagacccaccatgtaatttaaaaaaaa

SEQ ID NO: 101220 - DNA, 603 bp, Homo Sapiens
  misc_feature (507)..(507): n is a, c, g, or t
  misc_feature (568)..(568): n is a, c, g, or t
caaagactgcatcaaagaaatcttcaaagcacaaggtacatctaagtgagcaggaagttttggaaggcatacaggaaaagtctccaaggatctaaattgtagtcttctttttggtctagatgagagaggtggggaagagggacttaaatttctgttagctgggcatgccttattcctatggaagcatttggcccgttagcttgcaaatccctccagtactcctgtgaagtaggtgtatctaaaatagtataccccgaaggaaaaactgaggcactaagaggttaagagtccagtctatatagttcatcagttgcagaaaagtgattttcgtgtgtttcctttttgactgttgtaaaaacagtataaataagttttcattttatatttcaaagcaccctatgaagcagacactagatatcctcagttaaacaaaaatgattacaaaggaatacatttatatgattgaataaaaacctgattaatcatctacaggctcagaatacactnttaaacctacatgaagctcattcttcaccatatccatcagtgggttatgtctagcctgcanatcatttgtaaaaactcagtctggtacataggact

SEQ ID NO: 101221 - DNA, 484 bp, Homo Sapiens
cctaataccactttagttttttattttgacaaccacatatcactgattcactttatgtcactaaaaccttaaatcttcaatatgtagtgctgttaaattatggcttacccttcacatatgaaattgatttattaaaccaaactcttaagacatttttcctatagaactccatcttgttagattttagtttattgattcatcttgtctagctaaagctgaatcttgattttcatgcagtatatttctcctgtgtcttctatatcatatatgtcatcagtaagtatcacccaaaaatagcctcatgctagtcatgaagaacacaaatggagtaacccagtgtcaaccagtgcaatttaatagtctttctaacaggatagacagaaaagagtaattcctaaaacaataacatggatagtacatgtcgatgtgagcaatgtgaacaagttcagtactgaaaagacctatctaggtaaaataccctaaa

SEQ ID NO: 101222 - DNA, 339 bp, Homo Sapiens
  misc_feature (148)..(181): n is a, c, g, or t
tggcagtaggcatgtccctgtgagggaggagatcagcaggatttttccaagcacctgtcaaaaccctgctgatcaaaacagaacataacaataacaaagaatggccaaaaccagctcggaataggaattaaaatgcatttgcataagnnnnnnnnnnnnnnnnnnnnnnnnnnnnnnnnnnatcccacggcaataacccaggaattatcttatatggttccaggaacttcctgttcctagtttatgaataacctgcctcttatttagcatataattagcagtgggtataaatatagctagccagcaatcctggagtgctattctacctgtggggtagcc

SEQ ID NO: 101223 - DNA, 507 bp, Homo Sapiens
  misc_feature (117)..(126): n is a, c, g, or t
  misc_feature (492)..(492): n is a, c, g, or t
tttctgatctttggacagattcaataaatgttatgatttctagtgattatctacaacttccaaaatcataccaaccataataacactgtaagtatttaatgcagcaaaaattcaagnnnnnnnnnnccaattttgacttttcaaatttaaatgctatatatagatatttggttccttacaccaatgcccattaggctggtgatataaggctcacacacattttctggaaatataaaaaatctaaatgagttgtcttgtatttttggaaaataaactcaagtgattgggtaacagggtcacaattgtactggaaaaatgctttctgacaaaatgatactttttccccccgagtcaatctagataatcaagattggctacagccaaattatggtggagctggcccaaattttcataactctgtgttcagtgatgtcatattagtagtttgaaattggtcaaaggtaggagtatttataccacagaaatcagcanaagctaccaatcaga

SEQ ID NO: 101224 - DNA, 532 bp, Homo Sapiens
agccaattagtaattgtgtaattagaaggatgtggacaggcactttaccaaaggagatatgtgggtggcaaataaatacatcaaaagctatttaacagcattattatactgggcagaataatggtctccaaaagatttccaccccttagttcctggagcctgtgaatacgttgtcttacttagcaaaagagactttagagatgtgattgaggttaagatgatcccagtctaatcatatgagtccttaaaaggtgacaacttttcctggctgcagtcagacatatgtgaaaacagaagaagggtcacagagatgtgatattgctggctttgaagatggacgaaggggagccacaaagcaaggaatgctgggagcctctagaagctagaaaaggcaaggaaagattttcccctagatactccagaaaaaaacacagccttgcctatgctgtgatatcatcacagtgagacttgtatcagacttctgacctacagaactgtaaaataataaatctgtgctcctttaaactgcaaa

SEQ ID NO: 101225 - DNA, 492 bp, Homo Sapiens
aggctttcagactcaaatcctgtgttctcttttcatccccctttagtttcatctttcctactgccaagggtagggaagctgtcagggacagaaggttggaatgggaccccaggacaagactgagcagagatttgaatgtggggctgaatgtaggggagctcagaaggctcctgggtggccccgagtgttagggagatcatccgagttagggagatcattccagtgcagaggcaccatcttccccatctacctgggcaaggcaaggaggcccaaggggaggttggggcaacaatagtctggtcctggactatgaaatcacaacccgatacagggaaggaagacccagaagaccaggtgggaaagaaaagggctggctccgaattaataagagcctacaggagcctatgtgttctgctggggatcacagaatgttctacatcttagaatgtgattcatcaaaagccattacaataaaaatgttgggtacttaaa

SEQ ID NO: 101226 - DNA, 341 bp, Homo Sapiens
tatacggctgcgagaagacgacagaagggctcctttgcagtgagtactccctaggagttccagcggccggtgacattgatctgttttctgtcactgtagatgagatttgtctgttatatacaatttttaaaaattaaatgatatgtatggcttcttttgcttagcataatgtttttgagcttattcatttgttgcatatatcaatactttgcttctttttaccacctgtacttcatttatggatacgttgtttatccatgtgtttatccccaatggacattgggttgtttctgattttttggttattattatgaataaaagtgctatgaacattatcgtac

SEQ ID NO: 101227 - DNA, 535 bp, Homo Sapiens
  misc_feature (483)..(495): n is a, c, g, or t
caagtacaagtactaggaaatcactttatacatctgtttataggtttatggatgcagaggctgaagataaaacgctgcgtactcgctctaaaggaaccgaggtgccaatggattcactaatccaggagctcaggccagacctgaacattagaatccaagaaactgacaccttcaagaaaacccttttacctataagccactttgagagggactcaagactgatcacccaagaagctgatgataaaaattaatttagaagagaagtgtccctccagggtgtggcagaggcatctgtagggttcagccaccccggcatcggccttgtccatgcctctgtgtgatggaggggctccgtgtggaacatgaagctggaggcctcacaccaacagaagcattccagagattattttatgtttactgtactgttcttactagggcagaaaagtgtcttaaaatatattggggaagctttcaataagaatnnnnnnnnnnnnngactttgtaatttaacaagtaaagccgatgaactctaaaa

SEQ ID NO: 101228 - DNA, 761 bp, Homo Sapiens
gcagtgagaagctgagaaagagctggagggtctggtaggaactcatgtgttctagcttccccattctgcctcaaaggcaaaggggtccctcacttcaactccccaccaccccactaatgactcattttggatggatgcctagttgcttggtctgatggttccttggccccaccatgctagccttgtattcagtcattagggttcgaggtgggggaagcaatggaccacccccacctttgtggagcccattttctcctttgatggttaccaggcccccactcagctctctctcctaccctttgtgctgtgcctgcagcccccgtgcccaagaataccaagcaactggctctggccccctgcccagttcccaggctggctgggtggtggggggaggggactttagatgcggctttgggagaatggcaaaaggggactgcccccccttctcgtatcgtatcaacatcctactggcactaccttcagcatggtctgatgagatcagcaaggccagatctcacctaggctttcaccctatccctctttcatgatccttaggtgagaagtagagaacattcaaggccttccttccactaagataggaactgtggctaagacagaagaaagaaggtcagatgtttgaatggactttctggatttgataaaatgtgacactagtggtaagctcaaaaatggaacttatttccacaatgagtatctatttccttttagtcagaaaagtaaagcatgttttaaaaagtaaa

SEQ ID NO: 101229 - DNA, 419 bp, Homo Sapiens
  misc_feature (35)..(35): n is a, c, g, or t
  misc_feature (47)..(47): n is a, c, g, or t
caccattcagtggattcctaagggacattttgcanacattttagttntgttctctcttcctctcccctccttcacttcttcacatctgggttcccaaaagcaaatggtcagcttactagacaatggtatggtttgagatggaaacactgctctaaaagagtggctcctagatgccagtgtatgaactccagttgtgtggtaacagagttttcactggtgcaagaatcataataatgaagttctttttcttaagtgctaaatgtattcagttgtttcattatgaaattacattgttctctctcatcttttggtgttaaagtgtccctttgtaaaatgatgtttattatagatgattgttctgtcattattgtattttaatatttttagtaggcaataaaaagaagccaaatctaaaaaaa

SEQ ID NO: 101230 - DNA, 598 bp, Homo Sapiens
ctgggctctgaacaactatgctttagctgtctctcacatgatgttgaagaagatttagaaaagaaactcatatattgatgaatgtataaactggtatgaccttttcatggcaatcagtgcaaaaatacttaaaagatcccttctctttgactcagctccacgtctaggaatttcttttaagtaaaccttaatgaatgtgtgtaaatatttggctacaaggatgcttatcatatcattttaatagagaaaaaattagaaacaagtgagcaatatgaatttggtttaaccagtttaattgtgatgtcataaatgaaatcagtgtagacatctaaagttatatagcagaagaatatatgatgagcatttttccatcacactgatgaaaaaagcaggttagagaacagtataaatatattttttaccaagatattaacattttttaaaaagactactgaaacaatacaccagtagctgggtgcagtggttcatgcttgtagttccagctgttaggagggagtcctgggcaggagattgcttgagcccaggaggagttcgataccagcttgggcaacagagcaagatctcatctctaaaaaga

SEQ ID NO: 101231 - DNA, 427 bp, Homo Sapiens
tcctctacagtttactctgtgattaacttccttctccctcaccccaaaatacagaagagtgaaatctctgaccagaaagttcctggcacctaccttgggttctgtgaaaaaataatggccctggttttcaatgctgccaaagttaagaaaagttttcaccccttcattttaaagcagccataaagtgccatgtgtttaaccgcaggaaaaaaagggtctttttaactattgagaagtagcttttcatatccccaccaggggaaggaaagagcgggaaccaggagactcgtgaggactgcaaagatggtcctccctgggtacttctgctgctctcttctctccagagctactttgtgattggcctgatggtcagacctataaaatcccacactgctaaaaatgctgtccttttccaaaaaaagcccct

SEQ ID NO: 101232 - DNA, 343 bp, Homo Sapiens
cccaactcggaaacttgcaacttgccgtgtcctggaggttgagacaatttggggtctcttggctgccgtccaacagatttatctctgagggcagtgtccttggtgagaggtccaagtaggtgtgggcgacattttcctccatctcatgagggagcagccctgcacactagggcccaaaactctgcgaaggagcttggaagttcttcatccgttccacttgttttgctactccacacacccttctaggacatgttgattgccaactgctctgtgcagctttcccatagctggtctgttcccgtgcatttcggagcaccaagcaaatacgagcagagagacctgg

SEQ ID NO: 101233 - DNA, 386 bp, Homo Sapiens
atataatcatggtgatgaagatgatgattccagtaagctataggcactcacaacacacacgtgagttcacacagcttttaaatttcaagtctccatcttgcattttcgttttgttttcttttgttttaccacaaagtagcctcattgaggcaataattcaaacaattgggagcagtttctcacagctcctgctgtgccccctggtgtgtacaaagggaatcgaaccttctggtgatggacatgcccgcctggctagaaatcactttattgattccaccgaggttcctggaatgcctgtcagggactgggcacctgtgcttggagctcagggggctctacgctgccagtacaaagccccagggtgtgagactgaggggagggggttg

SEQ ID NO: 101234 - DNA, 798 bp, Homo Sapiens
actggaaaaatacattaaatttattcttaaatgcaaaggtggcctttctaagcaaggcaaaatctcagaagctgtaaagactaagtttaactacataaataaaacttaggaaaatattattaaacatgacaatggaccaattttcttagcttacaaaaagctcatacaaatcaataaaacacataccacctaatagaaaacagaacatgactacacatttcacaggaaatatcagtaatcaataaacatgaaaatgtgttccatctccttcattaaaatgtaccagaccttcattaaaatgcattagaacttcattaaaacgcaagataccatttattcactttcacatgatcagacttcaaaaagtttagtacccagtattggcatgggtttggtaaataatcattctcatacattatatgtggaagcatactgggcaaagatttctagaggacaatttggcagtaactactgaactgaaaataaaaaataccctctgatccagcaatttgtattgctaggtacactgtagaataaaaactcattatatgtacaagtatattcaccacaatgtgatttaatattggaaacaacctaaagagcctatcagtgtttgaacatttgtaacacattcaaacattagaataccacacagccgctaaaaataatgaggtatttttatatatactgatacagaaagatctcataaaacacaggtagcaaaaaaagcaaggtacagaagagtatatatagtctgattctattaatgtgaaatttttaaagtacaaatttgctgat

SEQ ID NO: 101235 - DNA, 467 bp, Homo Sapiens
cagagctttctgtaattggaatcgaagaactccctgagagctctacaacttgtctaggagttgcttctacccagctttctttggtagacaacaggtcatctggccaagggatttcctattagggtaactgcttcttcctctgaaacatatgctgatgcagaacttggaactatagtgggagtgtatgtgacagaagtacttttttctacctcttcaccaaatgttacttctgtagcccttgcaaaggctattttctgagattcttggtcaatggcaatctctcctgaagactcttcaggaaacagagatacaggttcagtatgttcatgtgcctgatgaccaacttcagtatctctctctgtgactgattctgccccttttttggctgttccacattcaaattcctcatggaatgggactgtggggaaaacaaaaggctcaccacctgaaaaaagttggcggccgca

SEQ ID NO: 101236 - DNA, 475 bp, Homo Sapiens
  misc_feature (202)..(202): n is a, c, g, or t
tgaaatacttgtaatttcttagatctattatgctttttcttgattctctgaatgtatagtagtgcttctttagctaagaacacagttccccatcaccaagctttgctttgcccaacagaccccttctcccttaggatgagattcagtggataatcacatcataatcacgaccctctgggaagccgcctctctcatcctgggnttgtgtgttgtgtgtttcctttccacactccctcagcagcctttgcctcccactttcatagaatctaccatatgggattttaactgtttgtcttccactagacaataagctccttgaagactgaatttccaggaacttctgttggatctgcatgtttgtgaagtgaattactgaagcgctgcccagtttcatctgatcctagtcaaaacctaaatcccttatttctacgctaccttttgccaggtaaaaataaaacatgtaaaccatcaaaaa

SEQ ID NO: 101237 - DNA, 664 bp, Homo Sapiens
  misc_feature (339)..(386): n is a, c, g, or t
tttgttgttttaaatttttttaaatgatattcacccacatccctagtacagtgacaaagattctgcaaacataaaacacttctttaattaaataatactcggaggcacaaagcaaacttcaggaatatgtgggtgaacgtttacttaaataattactacattctaacatcttccatgtgttttaccatttaatgtgaaacgtcctcattaaacagccagagatacagtaagaattaaatgttttgttgcaaatagaacattcttttcacaaaacataacaaatgtctaaaataggttcttaaatctagataggaaaaggtaagctttccacttcacacnnnnnnnnnnnnnnnnnnnnnnnnnnnnnnnnnnnnnnnnnnnnnnnngattttatgttcacacatctgcgcacacatatatagcacatggtatgaaatattgcttctatactacttttcattaggctaagaaaacacaagatttgcaccacagttacaaaaaattggcttctacaagaattttcaaaactcgaatgctgctcaaacaattgaggaaaaaataatttgcggtatcaaactgttctaaaaattctcttcttcaaaaacgtattctcccgctttgttttaaaaagacacaacatatcatcactatcaccgttatctga

SEQ ID NO: 101238 - DNA, 690 bp, Homo Sapiens
ttaaattttttatagagaccgagtctcaactatattgtccaggctggaaaagaacttctttccctccaagtgataaccttttccagacaagtcagcttaaaaactgacccaaaggccctgaagtacacagttttcttggagaaagaaaaaaataagtgaaaaggacttgctgacttgctaattcattttggggcctgtgggtaacatcagaatggcaaagcacttggggcttttttctaatttgtatttttttaatcttctgagaaatgacttttatatgccaagattcattccatgattagtttcttatgaccaagttatgaacgctgttgaatatggggacctagaatagaaatgctaacctacctgcaaggagagctctgtgattggcatccccatcatgctgtaactgacacaaaataaacttagggtaattgccgcatagtgtaactttaatgtgtgagcatactgtaacatctgacaagcttcttgatctagatcagcaatgtgtaacccattcattgttgtcactctcaacaaggccttatggtcaaacatcatcactctcactaaagagatagtttactgaaatatactgagattttgaaactggagtcaagaggtagcacactgttttatgttgatccatttaatggtccttgacagccaataaaaagaccctggaagaat

SEQ ID NO: 101239 - DNA, 466 bp, Homo Sapiens
gtgatgaccacacaatcaacacaataaactctagcattcacattgtagtccagctcattcaagcaaagctatctccaatagggagtttaccctgtacagaacacgtgcatttccacctgttctcagactgaccctttgctcatcacaatagtgaaaaaaaacacagccctgggtggagatttaagatgctaatgagtcatgagatgtatgaacaagcatgtacagctactgcacacgtgcacccagaagaccgcccagaacatgcttgctagtaacacctcttcccacccacctcctgtgaataatcatgtaagactcccataaagggagtttctccagcagtgatcaatgctgtctcatccttaggagcagcccaccctgaatcctctcagggtgtacagtttattttgcacttaactttcaaaataatatttttcctttgtaataaattgctttgtacttcaaa

SEQ ID NO: 101240 - DNA, 389 bp, Homo Sapiens
  misc_feature (209)..(255): n is a, c, g, or t
gtgaagtaagggctggcgttgggtagggggagacgccagcagtgatgctgatgcccaggctgtaggtgtataggtgccatccacctggtaaagagagagctgtagcgcaggaatgaggttgcacatgtagaagaagggaaggatacaggggagagaagtgtcttctagtcctaaaaaacagcctgtgggctggcatggtggaacaaacnnnnnnnnnnnnnnnnnnnnnnnnnnnnnnnnnnnnnnnnnnnnnnnttgagcccaggagttcaagaacagcctaggcaacatagtaagatcccatccctacagaaaaattaagaaattagccggatgtcgtggcacacacctgttgtctcatgctacttgggagcgccgatctctggagc

SEQ ID NO: 101241 - DNA, 546 bp, Homo Sapiens
  misc_feature (54)..(165): n is a, c, g, or t
gtttttttaaaaaatagctgggtgtgctggtacacgtatgtagtcccagctacnnnnnnnnnnnnnnnnnnnnnnnnnnnnnnnnnnnnnnnnnnnnnnnnnnnnnnnnnnnnnnnnnnnnnnnnnnnnnnnnnnnnnnnnnnnnnnnnnnnnnnnnnnnnnnnnaagcaagaccccatctccaaaacacacacaaacatcctcactgaaattccttactgtatttgacaattaaaaagaaaagcattactatttttcttgtatatattatactttagggcaaccctagttggcagctttgagagaagttcttcattacagaagaattccattaaacatggaaggaataactaaactaaaaatcatcactttgcaattctgaatgaaataactgactcaggaaacaatttattattggataaaaccatcagatataaggttaatagggaacttgacagcagacagagggaagaggttgtccctgtgcagctactgattaagctcaccattactaagaacaggacaaccaaatatctgcttgccaaa

SEQ ID NO: 101242 - DNA, 600 bp, Homo Sapiens
tttccacgaatttgtgtgtcatcactgcacaggggtcatgctaacttctctgcatcgttctaattttcagtatacgtgctgctgaagcgagcaccttttagctttgcttctgctcttgactagaatgcatcccctccttgatttcagttaatcctgcaaagtgcttgacttcaaatctcagcttacctgtctaacctttactaaataatataacaacttttggctctaatcttagcccttgtaaaataaggataacaatgcctatgaggttattgtaaccatgagttaaggtttgtgaaaagtacatgaaagtctatacaaaactaattattcctatattagtcttctttaaggcctagctagatagtaggctctttaagaacagtcaccatgtctttgtatattcttagtgcctggagtgaggatgaattcatcatatatatttgttaaataaacacattatgctatttgcttataccttccttcagacaatagacagcaagatgtctgaaggaatcttatatgaccaggggcttaaggtacgtgatggcacatggtactgtttgtggaatgaatgaacatttaacatctgttaacgac

SEQ ID NO: 101243 - DNA, 640 bp, Homo Sapiens
accataagaaagctggtgtagcagtatcgatgacctgaaatggaattcaggacagttcatagagtaaagggggctgcgtggcaatcaggaactcataagccactgactataaagctcaaaacacagcaaagttggcagtcggcagacagcaatgttgactgtcatgaaaagtgatccctgtttgcccctaaacgtagagaaatctgcgttattttccagcacacatggagcacaaacaaaatatttgcaaaacaatgggaagatcattgaaacactgtttggcaatttaaaagcttgtttctaactcacgggatgcgggcagtctgctctctagaactggacagcgtgcacagagccacgggagggagcagccacggccagctcagattggtgtcgacagcttagtggtgtctgattttatacatgacaaaatgaacgagttaaccatttaagccaaaaaaataagaccagcgtaacccaaagaaagtatttaaatacttctgtcaattaggacagttgagaaaagagaataacaaaatcaaaagcaaaactcaaactttgtacctgaaaaatctaataaaactgactaatttatagaaaacctaagaaactccatatcaaataaaaaatattaaatatg

SEQ ID NO: 101244 - DNA, 510 bp, Homo Sapiens
  misc_feature (456)..(456): n is a, c, g, or t
tgcggccgccacaagaatatatgatggtaggatccatctgttcaattgtgtctgaaagaatctttattccaaagcgaaacctggggaaatgttttaccttcagccagatgctgtgtgtgtacttgggtcccttgtctttcctctaaggagaggtgcttgtggaaagtggaggttgtgggcatcttttcaaccttttcaatctgacctttcaacaggtcaggtgagagaaaagacaaagctatttgaacctatgtttttcttatgtccagaaatccgttctttcatcaaaccactaaaccactcgccttagcctcttctgcagtttctggtggctctatctgtgggcaagggactcctgcctgtgagaagtggccaggccctccaaagcaacggggtctggcttcagggagcagtggggtgtggggaaagcaatgttcatcttggctgctccattantataccatccatcaaggactcttgcgcttctctccacctgtgacgtagcagcat

SEQ ID NO: 101245 - DNA, 505 bp, Homo Sapiens
tctttacatctgccagaaatagggctcatgggagcacgtgggagggtgttcccctcgctcagcacatggaataacactttatgaatacttaatacatataaatcggcatgctaaacattgtaaatttatcatctaacttaatcccaaggaaagaaaagaacttttatcgaggaatgtgggctctttcaaattattaggcccagagaagcattcaaatgatacggcaatcacatcttattctccccctttagagctatgtattcatctgtcaaaactgcctgctattgccacaagtagctatgaattaacctaataacacctcactggacacaacatcccacactctaaggcttaacaatgggtagccaatcactaatcaatgttatttctgtaaatcaatgagaatccgcggcagaactttgtatcagtccaatccttgtccccctccttttttgcctttaaaaatctgcctgtaataaaggccaagtggagctcataaaaaaaa

SEQ ID NO: 101246 - DNA, 421 bp, Homo Sapiens
aagaaataacaacaaaaaaacccagtgttaaccctgatctttcatggttgactccctgagtcaaaggtcaggctttatatgtgaccagcacacaagggccaattggtggtattcttagaacaatgacccgggcccacagcagtcactggcaatagtaacagctgcatagggtctgcttaggtctggatgttggggatggatctggcatggctttttgtggaagacatgttggaactcaggtctgtgggagaggaaggtgtcccctcccctcggcaggtttgtctccttgccttggatatggggaaggccagaggcacaaggggaaacagggtgtcaggaggttgagaagaggcctgtgttgctagaactcagagagtgaggggagcagggccttgtaggtccctggaaaggtttgataaaa

SEQ ID NO: 101247 - DNA, 523 bp, Homo Sapiens
ggctgaagcacagcatggcagagcagaaagagcacacccttgaaccagactaggtttccagcctcttctattcatgatctgtgaggccttcgcttaatctccccaggttcctgtttcctcctttgtaaaatggggatactaatatcttccttagggcactattgtgaggattaaatgagatcgagtgaacaaagcttctgaagtcctgctgggtgaacgtcttcataagcggccaagacaataacaatgatgacaaatctgggcaggtcagatcagcagcacatccaaggttcacttcgaagcctgtaggacgatgcctggcgctcaatagcaaatgttagttcccgtctccttcttcctgctttccccgggagtgtttagtccctcaaatagaatcctctgctgactgcatctcaggcgatgcatgacataatgggaacaatgagagcttcggaaagccatagtttgcttttttggcccaataaccccatctctgagaattagcctaagaaatcacctgaaa

SEQ ID NO: 101248 - DNA, 487 bp, Homo Sapiens
ccttcccttcaaaacctaatagaaacttgggtggctagcgatctcagctctccggcagggggtgcccacagctccttagctgccaggagcgcccaagtttaagaaaggaaagaagctcaggtttccggagtgcctgctgtgctctaccaggcgcctgtgtgaagtggggtgggcagtaggaggtgccaccactgcttcatacatgggcagatgggccttcaggttctttctagacagggaggtaggaggtgggaaggagagaggagcaaggcagtggccaaaaccttcccctactggggttgaacagggggaagaaaggagaaattgtaaatttaaattcagattttactacttcttatttatgtgatcttgggcaaattactagctgtctctgaacatagtttctcatctataaaatggctgtaatcatttgcttctcaaggtgattgggagaacaaaataaattaatatacatgaaagtgaaaaa

SEQ ID NO: 101249 - DNA, 487 bp, Homo Sapiens
ggcacgaggcagatgaataaatgtattaaaccaatttcacaggcaagtttcccttgaaaaacaactccttgccataatcatcacattcattgagtgaccatctaccaaatgctttactcccatgatttcatgtaatattgacattcaccctacaaagtagatggtattacagtgtctgttttacaagtgagaaatccgaggaacaggaagtcaatttgccaagtgttgcacagctaaatcgagattccagagaatgtcacctcaaagcttctagtggggctgtcatgtaggttgtggtcgctttggataacaggagacgctaaggaaaatcagtactggttactgaggatggaagaggcgcagatatttcaccacaggcgacgaaaaccccacttttaggctggccacacaggagccccgaggaaactatgcgtccccttcctccccgcccccacactgccctggcctgggcggagcagcggccgca

SEQ ID NO: 101250 - DNA, 545 bp, Homo Sapiens
gcggccgccgggggcaagaaggtgaaaaatgcggtcaatctcaacttcccaatgactggagggtcccttattggacattagggctctaagggcactgtctaacaagaccacttaagtagcatctgatattctaggaatggggaggcaaatttttttctataaagggtcagataaatatttaaggctttgaagccatgtggtctctgttaccactactcaactctactggtgtcatgcaaaaagctcataagtgataataagataacacataaatgaatgtatgtgactatgttcccataaaactttatttacaaaaatgggcagaatttgatctgtgggccacaatttgccaaccactactctgggggaatttgtatgactttctattgattaagggtctaaactctgtaaagttatatgttaacttgttcagaaccaatgcatcgaaattattgtttgttgggtagacataaaatcccaaaagttattgctctgaatgttattaactgtttttctctataaattcatcattttcatctagaatt

SEQ ID NO: 101251 - DNA, 466 bp, Homo Sapiens
ttgttcataattctgtgggtcagaaacatgagctggtttcaattgaatggtttgtctgctgacctcacattaggtcactcatgcagatgctgtcatctggaggtcacttgggatgcatggtccaagatagccttactcaaaagtctgctgagttggtgacagctttggctggccttctgtctccatgtggtctcctcatcctcaaggagactggctggggcatcttcacatggtgatggcaacattccaagaggataagagcaaaagcttcaaaggtttcctgatgcctaggcttagaagtcccaaaatattacttccattgcattctattggtaaggcaggtcagaacgccagcccagttttaagggtgcagagaaaggatttcaccacttgatgaaagaagtagcaaaatcacagttgcaaagaaatgtatacagatgggaagccgggagctgtggcggccgca

SEQ ID NO: 101252 - DNA, 486 bp, Homo Sapiens
agctgatacgtttaactcatttccttgagcttatacaaaacatagaaaagcaaactgttaaagtagtcaataattatttgtctcagatcccagattctatgatccctgcttaaaagaaaatgttcactgcatgtaggttgatttcttatgttttgtagactcattgttatttttcaatccccaaaagtcttggcctaaaccatccctaggggagcggattaacctaccactacattgcacagggttggtgactcgacgtggtgaatgtgcacacgccctgcctggtccgccatgttccaaagaagatgatttaatggtagaacggatacctgctgctagacctgatggaatgttacctgtccgtgttacataatcaagtgcaatatactcagttctcatgcaggtgacattctaccatgaaacgcagaagataagccatgtttctgtattgtacatgtaaagaaaaataaaactgtttatgataaa

SEQ ID NO: 101253 - DNA, 540 bp, Homo Sapiens
tttaactcttcattagacagggtgatgataatttctgtttagcatttataagatgactcactattagtagtcctatccccatattatttaagctctaaatttcctgtggaaatttagacttggaatatagacttggaaaacccctcaagcgttgcttctcaatgtgctctccatattttctaagagatgcttcttactaagcatatattttattgactaacagcataactatatacacagaataacaaacaccatttatactgtattacttaggatcctttttatggtccttttatcgtttttaattataccacttatctttctaatattttcctatggtgacagattttaatgtagagtatattcagcggggtggcttgagagatcctctgattttcaagaattctgatggactcggaataaagtaagtgttttcagcctggctggatgtagttgcaaaatggcctcgttacacccagggcaataaacagtggtggtattgataacccaaaacaatagtaattgaaaataatttcccac

SEQ ID NO: 101254 - DNA, 476 bp, Homo Sapiens
tgctgcctccccctctagcctgtggccttcttgtgggtggtaatatgtcttgtccccagctgtgtcccctgatcccagcccagaacctggtataggacaggcagtggggaaatgctgtggaagtcatggaggcctgcatggaggaggtggtgtcttagtgggccttgaaggatgaacaggatttggatgtgtttcagtgagatggtgatggagcagcagtcatgaagccatcaatcctgaggcagtgagtgctgccactcactcacggggatgaccaggctacgtggtcttttgtcccccagcaggcgagcctggactcatgcaggtggcatctcggtgggaagtgcagagggccgcatgaagtctgggtgaaactgccacggcattctcttgcccagtggaatcagaagggttattgctgttttgttccctgctatgtcctcagtgcttaaaaaggaacataataggtgctcaaa

SEQ ID NO: 101255 - DNA, 529 bp, Homo Sapiens
accgaggtaggtcctctctataaacatggttctctgcgaaatgcagattcagaaataaaacattatacaccgtctcctaccaaatattcactatcaccaagtaaaagtaacaagtattctcccgaaacaccacctcgatggacagaagatcggaattctttactgaatatgatttgccaacaagtagaggccattaagaaagaaatgcaggagttgaaactaaatagcagtaagtcagcatcccgtcatcgttggcccacagagaattatggaccagactcggtgcctgatggatatcaggggtcacagacatttcatggggctccactaacagttgcaactactggcccttcagtatattatagtcagtcaccagcatataattcccagtatcttctcagaccagcagctaatgttactcccacaaagggttcttctaatacagaatttaagtcaaccaaagaaggattttccatccctgtgtctgctgatggatttaaatttggcatttcggaaccaggaaatcaaa

SEQ ID NO: 101256 - DNA, 469 bp, Homo Sapiens
cgaaaggtctgcagtgagacagggagaggactggggcaaagaccagcctgaggggtttcatccaagcagcaggcaagactgccttccctgagccattgcaggacatgaggacatgagctccagaatggtgactcggggggtggcagcttcagagtcagggccttgctcaggaggcagcccccactgccccacccccagcaggcctggttctccccagctaagggtcctcatgtgtacagtgggggctggcagcccggtccctgtgcagatggagggcaggggcttcatgaaacagcagagacccacaaggcacctcgggagcagagtgggggccgtggtggggaaaggcggggctgggagggagtcagaaccacccctgcatctcttacggacggggaagagggtacagcttgtggggccactccatgctgctgttataaagcgtccggagtcttcaccctttagaaaa

SEQ ID NO: 101257 - DNA, 595 bp, Homo Sapiens
  misc_feature (60)..(71): n is a, c, g, or t
catctaagccttctggttttatgggtcagagttccgactgccatcttggacttgtcagcnnnnnnnnnnnntaataataataataaggcctgctgtgtaagctgacagtatttgtagctgatagggggttgggaggaaagtgtctactaggagggtggggtgagattctgtgttgatgtaggaggccgagaaggcccttaactcaaagtagcttatttatccaaaatgttctggatgcatcatctccaaccaaggaccccttatttatcatgcctttgttctcttttccctcagatgtatatttctttaaaaataattttcctaataacaaaacttatttctaaaacagcttaaaaattcaaagaaaaaccccaaacactgacattacctacacttccactacccaaagacaaaatgtgcccactgtgtgcttttgagtgtattttcttttagtttgttttttgttgggtgcatatttatgataataacaatgatggacttcaattgtactcactgttctattgttggttttaattagcagcaagttgtgatcactttcccaggtgaataaatcatttcaaagcattaaaaaaaa

SEQ ID NO: 101258 - DNA, 503 bp, Homo Sapiens
gcacgagggtgaactcatgattgatgtcagagagtaggtgatctttatcctaggttttgatgagagggcaggtccttgataggaagatacagagtacagtataaaaatagatcagcaacagcaatagaaacattttaggaagagtttttttggcctctctggaaagatttacacggggaaagaatgttctcttcctcattttgttaattttacatcagcaaccagaatgaatctctcccctccctggttcccagcacacctcccctgcacctccccagcagcttccctgcagcttcgaggtctttctattcttattatagttatggtgcatgctcctgtctctccctctagtatgaattcattcagatcaggggctgtgtcctgttcggcttcttattcttgacaggccttatcttgccgccttgcccttgtaagcacttcataaatgcttgttggcttgaattttcaccaggaattaaagaaaaaagttttacacagataaa

SEQ ID NO: 101259 - DNA, 531 bp, Homo Sapiens
ttattctgtgttggttttttaattacagttaactacaagctaacttccaatatcttttaaagttacttgaacttttgaagaacagcaggtgtacgaattaaatttaaaacttctccatagtagtttggcaaacctgacacatcagctaactgctatctcctttatactttaaaatggtaaagtctgaataaaacactgactcaggagggcatgaatcttatctaagctttataaagaaaaacgaagcacactaatgtaaaacattaataattccaacagttgaatggggcagacactttaaaagtgatctattatttttgctgtcagtcactcataaagccagacagaaaaatgtaagaattatcaaacttccaaaccacctttttccctgttcatgcacatatctccctcgtacgttgatacttcctttgatgagttaccataaatgtcgatcttgtgactgaagtgttttttagtcaaggaaaactgattatcccaaaattaaagtgcaaaacgatagcatgcctgagt

SEQ ID NO: 101260 - DNA, 421 bp, Homo Sapiens
acaagccaccgcacccggttacaaattaccctgttttgttgagtttttttctggaagttagaagagatggatatttctgagtatggtaattcagccattttcagctctgtagatcctgaacacacaatcattcttcatttaatcttattagtcgtttgatctcttatagtaaaagagttatttgatctcttatagtaaaacacttcaaatcactggagtatctaatcctagatttttatattattaattaacacaaacgccagtgcttttcagatcgttcttggtaggaccctgagcttctcggagttgggatgtgggctggagggagcagggggagctggcaggggcgatgaatggaggcgaggagatgggctccagactctcagtctcactgtaggctgagccacactgctctcatctg

SEQ ID NO: 101261 - DNA, 397 bp, Homo Sapiens
  misc_feature (122)..(332): n is a, c, g, or t
tttgatcaaatagacttcattaaaattaaaaacttctgttcattgaaacatatcattaagagagtgagcaatgatctacagattaggagaagaaaaatgtaaaacaactattgacatatgannnnnnnnnnnnnnnnnnnnnnnnnnnnnnnnnnnnnnnnnnnnnnnnnnnnnnnnnnnnnnnnnnnnnnnnnnnnnnnnnnnnnnnnnnnnnnnnnnnnnnnnnnnnnnnnnnnnnnnnnnnnnnnnnnnnnnnnnnnnnnnnnnnnnnnnnnnnnnnnnnnnnnnnnnnnnnnnnnnnnnnnnnnnnnnnnnnnnnnnnnnnnnnnnnncagcactactacttctatacattgttggtggggtttaaatgggtacaaccactctgttcctccca

SEQ ID NO: 101262 - DNA, 434 bp, Homo Sapiens
ttttcaaggagttgtgactttttaatagaagttggttcatgtgtaggcattttattcttccattaatttccatctaaatgaggttttcctggagataaccagtgttttagttccatttgagtctaatttgtgtgactgaagcctccatttctgccaatttcaatttgcttggtgattctagcactccttacctgggcagtaatgcccttgctgcagacagcagcacctggagctgggagatggaccaattctcaatagcaattcagggaaagaggtggtccttctcttttcccaatattactcaataaatacgaaataaattattaaataagccatgttctgatgggggtcccccatcatggtatttacaatgcaaaacaacagccatcaaaagaactaaaaaaacacaccacaggaaaactttttagttgccg

SEQ ID NO: 101263 - DNA, 512 bp, Homo Sapiens
gcggccgctccaacatcacctctctctcctagacgcccaggaccggccctgtgagccgtgctggccccacccgaggccgcgggggccccagggcactcgcccccctccttagcattttcttttgtagaagtttctcgaaggtgcttggcggtcttgccttccccctccccacaggctctccttgtggggtcccaggtcctgctgccaagagcccctcaagagaagggctgaacctggggagatgtcactgccagggtgaggtggagccacatggcagggacaatgccggcagcctgagcccaggcaccccagtgcccgctgggcccagcctggggacagggaacctgccgggctcacagtgtgggagcagctggacaccaggcttcttggtgaaccggcgaggggccgagtcccgcctggtgggcatttgccgccgcctccccaccaccagtcactgcctcgcagagccctacactcccgcagccgctcctcagaggcctgtgcccatcgca

SEQ ID NO: 101264 - DNA, 540 bp, Homo Sapiens
ctttgcagctttagtaaatttagcagcattgtagtctccccccattcgtaacacatcctcggtgcagtagtagaattcggagaagccatagaattcactgttctggaagtgaattgggggctggtagaccccattgagggaagtctgggtctcgtttgttttattcatgaaaggctggatagtctctcgacacaggtcaaagtctccagtccctcgtaggtatatggtttgtccattttgctggatttcatctttaatgtctaggggtaggcaggggtccaagtacggcatatcaggagtcagaccagtctgtttacccaggagcctgttcttttgaatggtgttggcaaatattctgtcttcgtatctctgtcgagcagcattgccaccaaacccaagaaacgtggccacatagactcgatacacatgctcagtttggtgaacatcacatcccaagttaaattcagctaacaagtttttagctacttcttcctgcagacataagcataacaaaccttaatagcttaagctactttagcc

SEQ ID NO: 101265 - DNA, 578 bp, Homo Sapiens
aaggcatacatactaacttttttgattaattccacccatgtaccctgatttgggcagaattttaatctcactgtgaaatcagagctttgttctagagcctttcttgggggttccatggatcagtgggtcagccgtcacttgtgccctggcccatcctctgtccagcttgggcagcatgcatcattcattctgattccttaatttgccatatgtgaaaacatggtaatctatacattacttgggtgctattattatatataactagctttggagtcagaattagcgtctcatcctggctctaccactttccaactgtgcgactggccaagtgactccccttctctgagcctcagttttcctcttctgtaaaatgggggtaaagggataagaactatagggggatctcaggggatggttaagagaaatccatgagataagcaaacacattatctagtttagtaaagctaagcaatgaagacttaacagccccatggtgaaggcttaatacatggtagctataatgattactattaatattgtgaaataaaaggttgtgatgaaccaaccatatcttcaaa

SEQ ID NO: 101266 - DNA, 255 bp, Homo Sapiens
gatgtgtgcacagacccaggccatgcagatactggtgcctctaacttcgtcagcccagaacacctcacctctggcccccagcacaggaaagcagcgtggtcaggaggggttaaacttcggctgaagcacaggcgcagtgagcctgcaggccgacctcactcgtggcacacaactaaatctggggagaagcaacccgatgccagcatgatgcagatatctcagggtatgatcggccctccttggcaccaaagctac

SEQ ID NO: 101267 - DNA, 482 bp, Homo Sapiens
caatatgtctgagaaatgtcttacaaatagactcagtgtcacaaatagatgatttacaaatagactcagacccactgtagcgttaaggatggaacctggattatgcattcagtgcgggcatcaattttgacactcagagaccaggtgaaggtgtccaagagacgaaagctcagctctctcatcactcaggtgaaggagaaaggggaccagtggttccagcacgtgttccgcaggccggcagcatcagcatcacctggaactttttaggaacggagatcggaagtcccaccttgacctgccgagatagctctggggtgggcccagcaacccaggtctaacaaattttccagtgactctcctgctggttcaaacttcagaaacagtgaaagagacaatctcttagggtctttgcagcgtcgactcttaggaattttacaggagagcaatacaaagagaaaaggcaacaagtttaagaaacaaac

SEQ ID NO: 101268 - DNA, 567 bp, Homo Sapiens
agattatcatattcataattctctgagatagcttttattactccattccatagacaaagataccaaggataacagaggttaagtaccacaattaccatgtcatccgtctgactccaaagtccttgttcttaactactgcaccacggtacctctccgtaacaatgattacacccatccataatcaaatctgaatctagtatgttaatcaaactttatgtcataagtactattttcagagcaaggtttaataaaacattgatataatccatttaatcagtgcttacttataatttgctattaaaatcttttatcactatttttaactaactttaaatttacgattaatctatttatgagaagtaacagtgactcatttcagtcaacctcaatatttcacttgccttaaaaataatgaatgtattcagtctttattctattatttgattttcctagatatgactgattccacatatataggcttttatattataggatcttagtttatttctaatatgattctaaattagaggcattggggaaaatttttcaaagaatttggcggccgca

SEQ ID NO: 101269 - DNA, 956 bp, Homo Sapiens
  misc_feature (52)..(52): n is a, c, g, or t
  misc_feature (88)..(88): n is a, c, g, or t
  misc_feature (104)..(105): n is a, c, g, or t
ccaagcgtaagcttcctaatgtgctgtgcgtgcttcctacccacccaccccngagcagcctgggccgggcaggactgggggctccatnggggactgtcaccctnnggccctggaggtgcagccgctggcagcagcctcagcaggctggggtgggaggcaggagaaggcagagctgggaagccctccacccctgcctggctcctgcagtcgctgacttgctctgtcccatgtcccatcctcggctgtcagggctgctgactctgctcagccaacagctagctccctcgctcgcctgctctcttcccctctgttcccacgccagctcctgcccctggaaccagagatgacaggcccagggcagtgaatagcacattcaggaactctagggcacccggacccccccacccacttgcctcctgaggcctcagtggggaggggcaagcaggggtcttccccaaaggcacagatgaagccactagcttcagcctagaaacccggagaagggaacagcctgcggtgggaggaaccaatctgcagcgcagccacccccaaggctggatccttaagtgaaggaccaagccaggcctcagggtgactgtgatcaggactgaggggtggacaaggtggcccaagtatggcttccagaccccgaagccccacgacctcccaggtgcccgccatgatgaccctcaggtggcagtgaccccgtcactgttataagacattttctcctgctgagcagaaggatcatccctggcacttactcttccacgtcttctcccctggtacaaaaagacctgtactccctctcccctcctcctgccatgcatggcctggtcttgaactgagggaaagtcggcccaggtgggtcccttccccccaaccccgtagatggctcctgagttcaattacccctgccgtcttggctggcaactggggggaacacccctttggtg

SEQ ID NO: 101270 - DNA, 502 bp, Homo Sapiens
tacatagaactatttagaaaaagtataacacttatgtattggacttatatattgattatatatacatggcaatagctcagaaggtggggtggggtgggggaatttattggagttatattgctgcaagtttaccatattttacctgaaacaacttagattattacccctaagtggactgcaatgagatttatagtgtaatcccactaaaatataatgtgagaggattgcctgaggccaggagtttgagactagcctaggcaacatagtgagaacctgtcgctacaaataataataataataatcaaagctctcacctcaataacctaggaaaaaaatagcaaaataaatccaaagcaagcagaaggaaggaaataataaagataagaacagaaatccatgaaattagaaaccgaaaaacaatagagcaagccaatgaaacaaagggctggttctttgaaaagatcaataaaattacaaacctctagcaagactgacaaaaaaa

SEQ ID NO: 101271 - DNA, 606 bp, Homo Sapiens
agccttggcgctccaggagaacagcacggccaggccgcgcccgtgctgaaattaatgactggagcagtgactggaaggtgcttagtcactgccgaggggattaggagccattccaggggacgagcagccagccgatgctgatgagtcgggggccggatgccccaaccagagctctgtgattaaccagctgagtaagcctgcttggacccccagatcagaaagagtccatctccctgagcttaccacagtatgcactgacctatgatggcacagatttctctaaacatgctgtgcaggtcatccagcaatggagaatatagaaaacttccagagatagagaagcccttctgcttccagccccctgataaggtataagagagacagatttttaataatgtatatccaaataggagagaaaaagattctgaaactctaaccttgagacgactctaaccctacatatgatatatgaccagcagccacatgttttccatcattttaaaatagacttttatgtattttagaaatgttttccataagcatgtatttcttcaacaatcacaaaacattaaatttataataaaacgaatatgaagatgaaaaaaa

SEQ ID NO: 101272 - DNA, 491 bp, Homo Sapiens
aaaaaatgagagaattggggaaacaccaaaagcaaagagagcagctctatgttcattcatgtctggagatgagccaatttgagcaccactgtaggccaactctaaatttattcagatcgttaacatgggtaacccagcaaatatttcccagcagtgacaatctacaccctttatctaaataaatattgagatgtgcttttttcctgtgttagttcaaagaatctcttcttgcctcccattgctgattttctgtattgatggactcatttctctcaagagattggacaagctaaaattctagagagttcaaaagtgtttgaaagtacatcttaagtgttctcaccacaaaaaatgctagtgtgtgaggtgatacatatgttaattagttcaactgatccattccacaatgtatacatatttcaaactatcgagttgtacatgataaatatatacaatttttatttgtcaaataaagaacgtctataaataaa

SEQ ID NO: 101273 - DNA, 481 bp, Homo Sapiens
tggcaagaccagtctccctcctctccccttctcagcctgcttaacaaaatgacaaggatacagacctttatgatgatccatataatatagtgaattatatttactaaatataatttctcttatgattttcttaatattttctctagctttattataagaatatagtgtctaatatgtataacataaaaaatatgtgttaatcgactgtttcagtaaggctctggtcaacagtagactattagtagttacatttttggggagttaaaagttatacatggcatgggggttggtgcccatatgatgggactgatggctttataagaagaggaagggagacctgagctgacatgcatgctcttgccatcttgccatgtgatgctttccatcatgttatgacacagcaagaaggccagatacggcccctccacagttcccagccctcggaaccatgagctaaataaacttcttttctttataaatt

SEQ ID NO: 101274 - DNA, 647 bp, Homo Sapiens
caacaatgaatctgaaattcttagtataaccaaatctgatgcatttacaattttatgtacacattggtgtgtttcattttttagaaactgtgaagcctcattcagatagtattaaaatacaggattttccttttcattaatgagtcctatgatgtaagtgttatattgatgttaaaatgaagtagttttgtaccctgggtgcataaaattgtcagagagaattaaaggagaaagaactcaaacttcatcagagatcttgatttaattcatgtgaagagtgtggattacccccaacccccaaccccatgactctaatacacattagagtgtattaactagggatggtgtgtttatttctgccttagggcactagctttccaaataacttttggtatgggcttgagccatccctgtattcatgcacagagtttcaaggcagaaatttgagctaccctgtaacttaacagttgaaaaaaaccctgcttcctgtgttatctgtcttacttacactgccatagcttgcagtttagcacttgtctttcttttacctaaggaagtaatttgttgagggaactagcccttttgcttattgaaactttgcagggtggcactagtggaacgtagtactactcccatgtgtgcctaca

SEQ ID NO: 101275 - DNA, 521 bp, Homo Sapiens
atcagcatagcggaacttttcatgagaaacacagtgcagggagcacagccttttccgctttcgtgccagttttacaacaccaaccagaacaccaccgagaagcccttccatttgaattaccacgtagatcacttggattcctccaatagtttttccgtgacaaatgctttctgctcccagttctagagaggggagtatgccatctttggattctatgaccaaatgtcaatgaacaccctgacctccttctgtggggccctgcacacatccttttgttacgcctagcttccccactgacgcagatgtgcagtttgtcatccagatgagcccagccttgaagggcgctattctgagtcttatgggtcattacaagtgggagaagtttgtgtacctctatgacacagaacgaggtaagaagaggcacctgctctgctctttagatattcatgtaattgtgttcaaacttcctcagcttatgtgccctttgcttccaataaattaaaacctaattctgttttaaa

SEQ ID NO: 101276 - DNA, 424 bp, Homo Sapiens
atccagtgtccaaaatatataagtaaatagctgtagagtcacatatatgaagtgaatagcatatgtgtcatttagtctccctgaagattcttttcaagatcctgttcagggtcctccaggcatcagctgttgtgtcctctctttgtaacagtggacaggacagaccacccagtgctgcaggagacaggccactgcgtcacctgtgagtggtcaggggctgatgtggcaacaccctctgccaagagacagagctgtcctgagaatgctttgtccttctgagcccatgttttctgctcagtagcagcttggaagcagatttggaatggtttattattttggctgctcttggggactgcgagaagcagagagaatgagagaccagtggcaactgcctgcacagcagagataaccctcttcccttgct

SEQ ID NO: 101277 - DNA, 611 bp, Homo Sapiens
gtctccgtgaggaagacaagctgttgcattatcatattcctctgtgctgagcagctcaagactcagccacaatatgcaaattgctttaatgccatattacggcagttgatttagacatttgccagtgcaccaaaccatgagagattgtccgacctaatgccacctggcagatgtgtacccagagatttttctgtagctccatgtttcccataaagggcattggaaatgcacagatgaagatcttcctttggaaccaggcacatttggccccttctcagtgactgcactgtggaactcttcttaagaaaatattgaaaacagcttaatgctttcatatagtgaccgacatttagttgaaaactactgctgcatagcaaatattgtgactcttcatgtgtccacaggagctcttgtgtgggtttaaagctatgaagtgtattcacattgtgaagttttaattatctttattgaaattaattgtgtaaaaatgcgtatgtgctctattgaggtattcacgtttgtatgtgaattctatatagaaagtggtttttgttctttgagtttgttttatttcttgaagattacaataaatatctaagacgactataaaa

SEQ ID NO: 101278 - DNA, 462 bp, Homo Sapiens
tttctggaatccgggagctctgcttctgaggtctgtactctctgttgtagcacccagagcatatttctctggcactgtcactttggggaatccctggcctttttcaacagtgagacagtgattataataatggtggctaaaagcaaggtctttatatgcattacctcactgagttctcaccactcccaaaaccatccccattttatcgacaaataaaccaggatttagggaggttaagtatcctgcctggaaggccacaacaaaaaagtgacagagctaggattcaaacctgtgtctgtctgaccccaaggttcaagcttttaatcataacctacactgcttcctgcataggtcattctatattctaattggcttaaatgttctatttgttctttcaccttttttaaaaaacattattaattcttctgttgaactgagtcagcacctggcctggactcctgg

SEQ ID NO: 101279 - DNA, 679 bp, Homo Sapiens
tttaaaaagagggtggtttgagtgtaacaatactgattcaaaactgaaatggaagacagtttctccctagaatactttagggtttttcagagtccttttccataaaaggaatataattgaaacacatctcagttaggtgagatgagattgctaaaatacatacagaactaaaaaaacagccaaaacaaagtcagtttaatctcttcaactcctattgatttccgttggttgcagtctttttttcctaaagcctattgcataactgcaaggaatttgctttcttccgctagggaggtcagcaaagaactcatgtccccgatagccatgttggtggtgctcatggacagcgctgggaatgggagggacgcccgaggcgtggtgaggcgggaggagctatgggaaaggttctgaatgatacttgggctcagggcccccgacatcaggctggagtggtccccatcgtctatgatggcaatgaagtcaatctgtaccccttccaggtcatggctgtcgaggctgtccactgtgcttgtgacctgattaacacctggggaaagtaacctcagagtctttggcgctggtcccctgtcacaggcagcttgcgtcttgaatagagaattaactcgctttcgtgtcttgcttaccgaaggcctagggtttgggcatagaactgaccaga

SEQ ID NO: 101280 - DNA, 503 bp, Homo Sapiens
aaaaaaacccacaagtgaaaaacattgccagattaagcactagtgacacaccccgtgccaccctcttcctccaggtgggggtgggggcgggcgcacaagtcggaggggtggaagcaccactcctctctctgactttcgcaatatgggtcactgtgtagacgactcacccagtctgcatgtggttcaaggccccagagttctctcagtgatgctaatgggtgatccgtgctggagtttgtaattggcacctctcaccagctccatttccatgttcaagactgagggcctgagggggagccaggtggggggccagcacctcccagtggcgggcatccaccttcccccagccccacagagtgacctcaggaagcagtaggcctcgcctggctatgactgacccggctcagagctggtgagacccaacgcagtccaagtcatttgcttacatttgccaaaaacattttgccatttttaaaagaaaaaaatacaatccatatgaattt

SEQ ID NO: 101281 - DNA, 537 bp, Homo Sapiens
  misc_feature (107)..(135): n is a, c, g, or t
tttctagacatgtggttcacactaaatgtcttaattttttcaagatactaccatttgttttaattatgtccactgagtagcttctatagaaaatgtgctttgctagnnnnnnnnnnnnnnnnnnnnnnnnnnnnncagataagggtctcactatgttgcccaagatggctgcaaactcctgggctcaaaggatcctcctacctcagtctcccaattagctgggaccacaggcatctgccaccacgtctggctataggagctgtgtttttaatttttgttttaatgagaacatgtttaaggtagtttgctgaccctatcagtttgtctttcgaatgacagcaaagaaattaacttcatatcttgataagtttattataaatggtcgacatctgcttgacacaatttacaaaatggatctttttataacctaagaacagctgataacttaaaagacaatgtaaattgcccaagatcacagaattgctaagaatagaatccagatctatccaactgactagatgtcctcaattccccatt

SEQ ID NO: 101282 - DNA, 487 bp, Homo Sapiens
tttatcagccatcgctcacattgctatctctgaacagttttcaaatgttattattcaatgctattaattcttactggttcacatagactatttaacaaaacaaagctttaacatattttagcacaactactatataccacctattatattaaggtgatttctgacattcattaactcactacagaactatttgcagagattttataatgggtataggggttaacctggcctggaggcagagattagagaagtgagcaaggcacagagaattcctgtacccacgtagcttcttacctgaatattgggagttcagagtaaattaaattaagtaagatatcttgccaaccaaatcatctaggatatcaatggtttttactaataaaattttattatattatcaatgcattgaagtagtgaaaaatttatataaacaatacaaagaaatacaaaataaaatgctgtctaaatagtcacagttattcgcttg

SEQ ID NO: 101283 - DNA, 437 bp, Homo Sapiens
ataacaaagacatggaatcaacctaaatgctcatcagtggtggactggataaagaaaatgtagtgcccatacaccatggaatattgtgcagccataaaaacgaacaggatcatgtcttttataggaacatggatggagctagaggtcattatccttagcaaactaacgcaggaacagaaaaccaaataccacatgttcttacaaggggagctaaatgatggcaacacatggacccatagaggggaacaacagactctgaggtctattggagggtggagagtggagggtgggagaagggagaggatcaggaaaaatgactaatgagtactagacctaatacctgagcgatgaaatagtctgtacaacaagacttcgtgacacaagtttacctatttaacaaaccttcacatgtgcccctgaacttaaaaattaagaaa

SEQ ID NO: 101284 - DNA, 434 bp, Homo Sapiens
taaatacttctctcagtgatgtccaaaatgtcatgggttgccctgtaagtccggtttttctaatcactaaaggatgagtagctttaatctacttggcagtcacaacagatgacctagaatcacagatgattaggtatggaaggcacattggaagatacctaggatgacatgcttgcagaagaagaaacggtaacccaagattgtgggtcatttacccaaggcaacctggatggaagtggtgagccttggactagacccaggtctttcaacttaaaggccaatgttctttgctctgtattacatttccttccaaggaacttctaaaatcctgtttcctgatattctgtttttactctttagacacacatctgttcttttaaataaggtgtttttaaacaattcaacaagtgtttttaaaagaacagatgtgtgtc

SEQ ID NO: 101285 - DNA, 602 bp, Homo Sapiens
  misc_feature (39)..(39): n is a, c, g, or t
  misc_feature (61)..(61): n is a, c, g, or t
tgtgatgtggtgataatgactctaagtagtgaacgccanagattttatattctgcctgcanatcatgatgggttctaatgacacagcatataaaagttctcaagtattgctttgccacctccactgctcattaacttaacttggtaggagtttcttgatggaagacaatcaaacatttttatgaatgagtcacaaatactatcacactgattctttggcaaatataaattcttattgttttataagaaaaccagtttcatcacctggcaatagactggatgtttgtgctctccctccacccccaaccaaatttatatgttgaaatgttgaaattctaacccctagtgtgtatcaggagatgggacctttggaaggaattaaggtcatgagggtggagccttcatgaatgggattaatgtccttacaaaaggggaccccagagagctctctggccctccttctgctatgcaagaatacagcaagaagatggctgtgtctgaaccaggaagtggaccctcagacaccgactttgctagagccttgctcttagactccccatcctccagaactatgagaaataaatctgttgttgaagccaaaaa

SEQ ID NO: 101286 - DNA, 646 bp, Homo Sapiens
gctcacgtgtgtgagctccaggcccagctgctggcaaatggtgatctgcatctccttgacggacgattgttctccatgagtatgacgatgagtgatcggcgttgcaggtcagtaatcaccagtcggacctcttctgggaactgttcctgtcttgtctggttctcgctctttgcgtatgcacgctgccaggcgtaaggcggacatgcgatggcactcgggctcctgaagccacttccacatcatgcggaaggtctccctgccagatttgagttcactccacggttttggattccggagcaggtcggagagagtcccctgagaccggcacagcaccctctgcgcaaagatcgcctgagggatactgtagcgcttcagctccgctgtgatgcgctggaccacctctttggtgttgatttcttccagctggcccgacgtggccacctgcgagcccgatgaggacgagggtggccgctcgcgactgggtgccagcaccggcccgtgagactgagtgtggcccgggtggtgcaggccgttcaggtacgacatcatgaccgcaggtggggtgcccaggccgcgggacaggtgtagctcaccgcgggtcagcatggcagtgtggtgcgcgtccaagttggggctgagcattttg

SEQ ID NO: 101287 - DNA, 649 bp, Homo Sapiens
atataagaattgaagtaacggtgccagatgcttcaggttgacgggtaacatcagtgagactgagcattcgtcgatgtaggaggctatgtagtcgctccgggagacccaattggacgaagtacagttcccggtggactcagcagcactgtcatccagctccatgttggatgagaggctggcaaagccatgggacagctcatcccactcatcaaaccgaatgcctgtgccgagggagtagcggccctcagcgcatggcttacatgactggtccttcatatccagaaactccccggcgttgcagaagaaggagcactcggtgcccttgacggggtcaggcaagatggtgcgcaggcccagggtatgcggcacggcgaccctccacctggaacccgtgctgtcacacgccgtgtactcatagtggtactcagactctttgcaggcatgaagctccggtcccgttccctgggtcacctggaaggcggtcccagcccagagcagcagccgccacagccggggtatgcgcctctcagttcttcccctgactctggcggagagatggtggctgtgccaaggctcagccatagcgttgtcctgagtgagcggcagtagcggctcaggtgctgcggctgctgcttctgctggcagaagg

SEQ ID NO: 101288 - DNA, 882 bp, Homo Sapiens
tgcggccgcccccctgcctctgtcccgccaactctaaacgccaccgcggctgttctcactaactcggctgcccagcgctctccgccgcccgttgcggcctctacctgggaccaggctaaccctcctgcgggccggcccacggcgctactaactactccttgctttgttcgtgtcttctaataagagcaagccgatcattaaccttctcaacgcagcgtcttttggtttcttccatttccaaccagcagaatatcttcttggaactttcttttttaacctctgccttcctcacgcacctattttttggagggttccttttccctgctctctacctcctgtttaaattgaaacctgtacactttaagctttttgctcatcgcttggttttgctcttttatgccttaaattatctttgcggcatttttgactcatctgctggggaagaccattccctcaagaaaacttccaacagcaactcaaagcaaactaagatgaaaaaatggggggaaagaatctgtccactgggaacgctttacgtcaccgtgttgctctggaagacagagactgctctgggcacctggcgaggcggctctgcagtgcaggctggggccggtccctgcggcctgctgggctctggcctcgtttggcccatcactcatgctgccgtctcaagcacaagggttgctgtggtgggttttccctctgtttcctgcttcctcactgtcctacccacctgtttcctacagggcagatggcctggcccgtaacactttcctgaaggcatgcgtgagtgaatagaactgttctaatgagtgtatgtttgaacgctttataaatttttaaatacatttctctaaaagggtctgtgtctctctttatatt

SEQ ID NO: 101289 - DNA, 299 bp, Homo Sapiens
  misc_feature (179)..(193): n is a, c, g, or t
caaagaaataaacaaaactcgggtgggagggctgtggtatggggacccaatttagctccatgtccacacttttgcaatgcctcttagggacctcctcaaagagaaatggtcccatttcctcccctctatccaaggtcctctccccccagagcggctcagttccaaggaagtttggcacnnnnnnnnnnnnnnnaaatggggaaattggggagagagagttgagacatttgaggaaaggaggaagacagacaaagactaagatagagacaggacagaaaacaatgggaaccacacggagg

SEQ ID NO: 101290 - DNA, 514 bp, Homo Sapiens
tttgatcatctggccatgtacttagagaagactcagttccctgaaaatggattactttgaatattctctgcaataatttaatgtagtactctccatttctctaccaactgcctgttgctaagccaccaacacttaactgtccttaggaagaactaatatacaataatcaactttgtggaaggcacatctatgtacataaactttaactgggaagttgtctttaaataaaaatgacacaatatgctccaaagctgtgtgtgattacagaatgagaagctgaaaaactactcacgtttatcaagtaaagcctcagagaaatattacggtttcaccactaggtggaaatagagtaattttgagtacgctttttcaaggccatgaacttctactgcaggagtacttcataaactgaaggggacctaaaaaatcatttagtattaattctcatctccttaaattcatagatgataaaactaagcttcagagatattaagtaaaattgcatctgtcttga

SEQ ID NO: 101291 - DNA, 494 bp, Homo Sapiens
caatgccatcaaacaactgaatctaatttacattcatagaatacttcatgaacaacagcagaatgcacattctttacaaattcacatggtctattcaccaagactatattctggactataaaagacatctcaagaaaattaaaatcatagacatcatataaaatatggtcttgattataatgaaattaaacttcaatggaattaaatttaataacataaagatagctgcaaatctctaaatatttggagaataaaaatacacttccaaataacacataagtcaaagcagaaatctcaagggaaatttaaattatttgtaactaaatgaaaatataacctatcaaaatgtgggatgcaatgaaatcactgcttcacagaaacttataacattgaatgcatagattaggaaagaaaaaagatttgaaatcaatagtcgaagcttccaccttagaaaactggagtaagaagtgcaatatcagcctaaaacaagcaaa

SEQ ID NO: 101292 - DNA, 284 bp, Homo Sapiens
  misc_feature (19)..(19): n is a, c, g, or t
agggtcagatgaaccctgnctttaagcccagccgtctgccatgcccaggtggatccgatgaggtctgagaggcagtccctgcagtgccacagcctgggctgtcgctgcagcaggccacacgggagcaagatgcccaaggggaggccaggctgggtggctgttccaaagtaccccaactcaacacatataaaaccagccccacctgggactgctgtcctcgtggaagtcctcatgaccgcataagctgtccaagccagaaacctggaaattgctctagagctgca

SEQ ID NO: 101293 - DNA, 526 bp, Homo Sapiens
  misc_feature (83)..(83): n is a, c, g, or t
ataaacttaattcaaggagcagcaatatgatttgtacctacatgtcaaggtttagtgtttatctgacacaagtcttgagcccntaaatgtcagacactgcaacatctttgtattcctcatgtacgcatcatggaatgtccatgatgcttcaatgtacaggaggtactcaatgtgggttaagctttctaaggatagtatttaagctcaagagctaattcagtacatcttcctgccctcagataacacataaaggaagagggaaatatatttaaatcagcaacacattttccaatccttctaactctttgtaaggatagcaaaacattataaataaacctacagaataatgtacaacatctagacttatgctttcagttttaactggcttgttttcatttctaaattatctattaataggtcatgtttatttggcttttaagaacttagagatgttgatttagccaacagatcaggatcaccaaggaagaacagttgaaggaaattccagtcaggaaaatctacatta

SEQ ID NO: 101294 - DNA, 456 bp, Homo Sapiens
tttacaaagtctcttaaatatagttcaggctggcaaaacacctctttgcacagaaccgtacagatttcgctgcacagtccattcttttaataataaatttctacgtttccttctctctggattacagctccatgtgctgggcaaaatctcattgactctttcttcacttaaggagagccatccattgtgtggcacagaaagaaatgtttaaacttccattgtaattaaaaaatatcaagtgtccttggctgagtttcagaagtgtcagctgcttccatgacgttggaaacacccggggccttgaaatggtgatgtcctatcacactaaacattgattggagtggtagagatcttaaagcagttattttaacagaaatgtgtacttctcacatttcacagggtcagaagttgatcttgtaatactggaaaacaccaacgataagggtctgccgggat

SEQ ID NO: 101295 - DNA, 529 bp, Homo Sapiens
tttaaacaccattacatgttcctttacccaaggttgaaaacatttgggaacttgatttccaacatcaaaatccagatcaaaacccattcaacaatcgccatgataccccttgcaacaacacctttcctggccagtatcacagggtgccgaccctcacagggtctcacaattcaacaattcagtgagagaggatgcagcaacaaagactgtaacgaaaaaacaagagagtctagggtctcacatcaacaattcagtgaaagaggatgcagcaacaaagactgtaagggaaaaacaggagagtctacagctgaagctactgctactcaaggtgggcagagaacggaagagacggattctgttggaaactaagaggggaaatccaggaaggcttcctggtggagctgatctttaagctgaaccttgaaggactggtaagatgaacggatgttctggaacctgagaaacacccaagtaccagagagacagcatccatgtgtgaactactctagacagaggctacaggcgtggt

SEQ ID NO: 101296 - DNA, 925 bp, Homo Sapiens
  misc_feature (386)..(400): n is a, c, g, or t
gccagaagggggagtttcagaggcttccacttggatttccccactatgatagctcttacctcacaggataaagggcttgtgtcaattactaagtatgtcaattacagttatacatttggagaccactgacggtgggaccatggactgtgggtgagctggacctaagctagaactccatttatcacctggctcccttaggaggggccatgctaatgctctgggtttccccttccccagtacacagttatctgagtaacgctgggaagaaatggaggaatcctcgctgtgtgcagtcatggggttcttcctcctggggacataggctttctgtctatcaagtttccacgtccaagaacttgctcagggatggacattgcggaagggannnnnnnnnnnnnnnaaattaaggtgactgtccttagcttcccagccatccatccgtgctgtttttgattatgcagatacagtagtatccttattggctccatatctatgtggcccctaggggtgccaagttctattcactccacaggtctctgtaggtcaggctcccctggcctcctctctaccctaccactcaccacaatgacatcttcctgccttctgatggtgccatggtctgaatgttggtgtctccccaaaattcatacgttgaaacctgaccaccaatgtgagggtatcaggaggtggggcctttggaaggcgattgggtcatgaagatggagcctcatgaatgggactagtgccctaatgaaaagatgtcccagcatgctgccctgcctgttctacactctgaggacacagtgagaaggcaccatctatgagccagaaagtgggccttcagcagacaccaaatctactttgatcttggacttcccggcctccagaactgttagaaataaatttctttataagccaaaaaaaa

SEQ ID NO: 101297 - DNA, 461 bp, Homo Sapiens
gacgagcgacgagaagtgcggagaggctagggctgcgggtgttaaccgccctgccgctaatttaaatgctttttatcacctcttaaaaagagaatgaggaaaaaaacctctaaaatccctgcagtcataccccccgaaaagccctaaaattgcaggcgatgaagggagaaaacggcttggagccatgagaatggtctttccactgttttgtgtgcaaaatctggtagaagtgggcggaccctcccgcccctagctgggtgttggagaacagctgtcagcattgactgaaggctgcgaggcgcgcgtcggcaggaggcgctgcacgcgggcgctcgtcggtctgatcggttataactcgtttgtaacctgggccctttactgacttgcctgtccctgtaagtccctgctccggttaaatatgttttaatccttccatataaaatctcatcctccatcccaaa

SEQ ID NO: 101298 - DNA, 567 bp, Homo Sapiens
  misc_feature (553)..(553): n is a, c, g, or t
tttaaataaattgccctttgccctttacactcatttttttaaagagcaatcaaatgttttaatatgaaaaagctaccttaaaagacagctagctattcaaagaatattgatactcccacagaatgaaaatgttagatttaatatgctattcatctgtattttaaatgcttttaaatcgagaatgagcaaaagactaagtagctagcttcctcgtttgtattttaagaatggtgaaaactgcctgaaataataaacaagaatcttatatgttaattcagagaagatacaaacctggatacacattctggggcaaatcaccatggtttcctatgtaaaacagcgatttctccacatttgttcagcatatatactaacagtgctttgctgatgtggttacaatgaattctccacaattcaattcaacaagtatttattgaccgcctccaatccgcctagcactggcccgtacaataaatgctttctttggtcccaggccatggaacagccactctctataatgaaagtatcttactgtgtacagggggcactgcangaaagggaggggag

SEQ ID NO: 101299 - DNA, 181 bp, Homo Sapiens
cggctgcgagaagacgacagaaggggaggcaggcgctccaaaactgggcgaagattcctatcctaatttctaactcgagcctcccaccgtcagtgcgcttaatggcgctgctggccggatggataatcgagctctctggagggacagacgcggccgccatccctaataaatcgtgaataac

SEQ ID NO: 101300 - DNA, 208 bp, Homo Sapiens
cggctgcgagaagacgacagaaggggtgcaggaagacccactgggctccaggtaatctgttctcacaaaccactcagcccaggttaagacacaactctacggcctttcaccatgggggccagttttgaaggcaggaaaaactggtaagagatcgttggaaaggatggaagaaattgcagagaaaaataaaattatttcataattcccc

SEQ ID NO: 101301 - DNA, 185 bp, Homo Sapiens
gcctactactactatacggctgcgagaagacgacagaaggggcctgttgccattgtgttttaaaagcatgcaaggtctgtatagcttgggcatgagaatctttcagaagatgtcagagcatcagaataaatgacacctattggaaaactgaatttggggtgaaaaacaaaagagattgagagagg

SEQ ID NO: 101302 - DNA, 240 bp, Homo Sapiens
cggctgcgagaagacgacagaaggggatgggactccctcgctggccacaacagagagactttgcagatttgccctttcgccccagaccagatggcaaaaacagccacaagccccaggcctgacttcagactgcaaatagaaacagccccggaatgcacgtctaggtccactcagagagagaacgctggctcaaaataaaataaaaatgagcaattgttttagaaaactaaccaaacaact

SEQ ID NO: 101303 - DNA, 162 bp, Homo Sapiens
cggctgcgagaagacgacagaaggggcgggcagtgtacgaggtcttcaaggacctgggcggcgaccagcgggcgcagatcatcaagtcgttgatgatgaaggctttcggcaccttgtcgttgtaagagtactaggcttcgcaatgcacacagatcgcacgcc

SEQ ID NO: 101304 - DNA, 183 bp, Homo Sapiens
ggttgccatacggtgtcattcgtatgtacatgaacagtgctatgtacatacaaagagtatgttataggggctgagcagacactacagcatttagtcaaagagaccaaagcccatgtcaccatccgactcctcctcgggctcccccttctgtcgtcttctcgcagccgtatagtagtagtaggc

SEQ ID NO: 101305 - DNA, 290 bp, Homo Sapiens
cggctgcgagaagacgacagaaggggaaaggggccgtattgccgggagctgtcatattgactgttacagaaaagatctgtatttaagcagtaccagtgcactgggatctcccaggcaggatattaatgctaattcatccgctcaccccctgctgtgagtgttatttgtttaaatctgtagattcccacagcgcgtttatatcctcactagagtgagctccgctccctgtaattatttaacattatatgctgatataaattgtaacagttaaagaatggtaatgagtagcc

SEQ ID NO: 101306 - DNA, 144 bp, Homo Sapiens
cggctgcgagaagacgacagaagggaaaagctgctccctaaaccctgaagccatttgctgtttgtaaacaagaggcaggaaaaggttagtgaggagggatcagtaaatgatgactgatgccccaagccttagtgtgttctaaac

SEQ ID NO: 101307 - DNA, 244 bp, Homo Sapiens
gcctactactactatacggctgcgagaagacgacagaaggggaagaaagtcagcaacctgtagttcatcacaaacaaccacatggataaaagcaaatttcaaaatggtagttgaaaaggttacagaataaagtggacaatgcttgtggaaaaatgtaaatggtaaataaaattggaaatcaccttaagataacaactatgtaaataaaaaatagaagatctgaatgaattggtagtatcgatgt

SEQ ID NO: 101308 - DNA, 166 bp, Homo Sapiens
tgctacgatctttaaaatgaaaacctaatcttggcacatctcggcctaaaaatcaccatgacccttattgccccccaagtccaggagctttataagaactagaaaactgcccctcccgcaagtctcatgtctcttttcccttctgtcgtcttctcgcagccgtata

SEQ ID NO: 101309 - DNA, 309 bp, Homo Sapiens
gtctgaggagaatctggttcaacagcttcactttagcatactgcttgtgatagggaagcaatggaggagatgctccaccagttgttggctgcaatttagcaagggccacttggcacaaatttaatggctccatacaccctccagaggcgcctttttgtcctagattctattccaaggttcagtctgaagccctaaaagaaaatcagatctgagggatccagaggcagtcaacagtagaaggctagggcacagcccaggtgagcatgactatcccttctgtcgtcttctcgcagccgtatagtagtaggc

SEQ ID NO: 101310 - DNA, 369 bp, Homo Sapiens
  misc_feature (337)..(337): n is a, c, g, or t
ctatacggctgcgagaagacgacagaaggggacagtcagatggagacttcacagctggacataggtgtggtcatgctggctgggattgacagggtcagacataaaggtagcaggtcgctacacttacttctaataggaaaacattagagacaacccaagtaagctatgataccttaacatgatggatatcggtcacttaaaaattaacatttgaaaagagttaatggtatggaaaacacccatgaaacaaaactgcttgaaaaaaccaggatgtacaaatgtataaatgtgctaattttattaaaatgtttctacgcattaaaaaaagacttgggcntgggtaccatggctcacacctgtaatccagca

SEQ ID NO: 101311 - DNA, 157 bp, Homo Sapiens
  misc_feature (11)..(11): n is a, c, g, or t
cggctgcgagnaagacgacagaaggggaagtgaaggaagagcccaagaggagattcttgcaattgtcatctaaacctgctcctacaaaagcagaaatgaagccaaaaaaggcagtcatgaaaggataaatcttcagacacaaagtgcaaaccgaagc

SEQ ID NO: 101312 - DNA, 229 bp, Homo Sapiens
cggctgcgagaagacgacagaagggtggcaatgatggtgctgctaccttcagcggtgtgcctgccgtggtcgccggtgttgttggcattgccattgccgccttgatctaagtctacggtgacccagtgctatcgtagtatttagtgtataagccctacgcttgtttattgttctgatttgtgacatccccttttgttaatcgtagtagtaaattttgcgtgggaactca

SEQ ID NO: 101313 - DNA, 160 bp, Homo Sapiens
cggctgcgagaagacgacagaagggcgcccagctgagcctgccattccagcctgttcgggggaaacagctcccaatcctagactgtgctgctccgggagggctgctggtggatatttgggctgttttcaccatatagctgtcatgaaaaatgcttccgca

SEQ ID NO: 101314 - DNA, 146 bp, Homo Sapiens
cggctgcgagaagacgacagaaggggttaaaatgagtggtagttgggatcctttgggtgcgttgtaggaatgttaaagtgacaatcgggtagttgtatgaacgttatattccatttagttgtaaagcagaagacgcataatcacac

SEQ ID NO: 101315 - DNA, 116 bp, Homo Sapiens
cggctgcgagaagacgacagaagggtgttctagagatggatgagtcagactgcaagagagcaaagatatcttcctgaatacattcaatatcaaagcatcatgtgccctgtgtgtgc

SEQ ID NO: 101316 - DNA, 125 bp, Homo Sapiens
ctagagctggccgcctactactactatacggctgcgagaagacgacagaagggggactatgagaatcgaacccatccctgagaatccaaaattctccgtgccacctatcacaccccgtaaaaaaa

SEQ ID NO: 101317 - DNA, 123 bp, Homo Sapiens
gttgcaagaggtttacagacaaaactttacatagatgtgctagaagaattccaaactgctgtcaaagagagtataggaatcggtctgaagagaactccgcccagtcccttctgtcgtcttctc

SEQ ID NO: 101318 - DNA, 257 bp, Homo Sapiens
gcggccgcctactactactatacggctgcgagaagacgacagaaggggtctccaggcctcagactgtggagctttcacgctcgcacaacctcacagactgtgcctgatttatggatgacattttaattaagatgttacatctaactttaaagaaaagtagttatttagaaccattgtgtatgtttaaagcacggtacaaatatagcacatttcccaaaccaaagaacagtgcattgcaggaaaaaatagcagctcac

SEQ ID NO: 101319 - DNA, 517 bp, Homo Sapiens
  misc_feature (385)..(385): n is a, c, g, or t
gcgaaataaaaaatgaatcctgagaagaataaaaaagagcaagcaagttccatctattgaaaggggtgggcaaagcacaggctgcaggggtcgtgcaggctgcagctccgagtccccttcgtcggctccgggaaagcgtctcatgcgctctcaggatctggcacttgcccccatagagatctgtcctctgaggcaccgtgaccacagctgaccagccgatgacggagcaaagaggggccgtggtcacctctgccccacctggtgctgggctgtgctgcggcgtccccctggggtggtgcggtcagcctgtctttggggactgggtgctccacctgcggctgagatgaggttcccctaagtccctagaccacccccagggtgcaangtgtcctgaggccagaacggggtggccggtgcttgcttgtcttcatggtgcccagttccaccctactgccagtccttgcccgcctgctcctgggagcctggccttggggctgtcctggggcctgggctgtgg

SEQ ID NO: 101320 - DNA, 182 bp, Homo Sapiens
atacggctgcgagaagaagacagaaggggggcgagcgcacttgatttcgacctttaagggagccccagatgctgccaggcccctcagtttaccttgcgaagttacttacggatcagcagcatttggtcctcgtcgggtgagggagaaacctaagcatcaaataaattctgtttcacagatac

SEQ ID NO: 101321 - DNA, 147 bp, Homo Sapiens
cttggaggcataatttagtcatctcacctaaagcacttttcactttatctctggcaaccaagggttacagaaaactcagcaccaaaggatgaaaggggaacttgtccccttctgtcgtcttctcaaagccgtatagtagtagtaggc

SEQ ID NO: 101322 - DNA, 138 bp, Homo Sapiens
gcggcgcctactactactatacggctgcgagaagacgacagaagggtactaaaagaattagagtcattgttctaatgtaaatcattaaaaactatccctaaggtacactgaatttgttaacttacaaaataaaatcct

SEQ ID NO: 101323 - DNA, 194 bp, Homo Sapiens
tatacggctgcgagaagacgacagaaggggggtcaccaggatcaaccgcaggctttcttcagtcccttggtcagaccataaactgcatttttgattctttgtggattcaaaccctaggatccatcagtcttgcaaggacattgaatattaggaggaaaaagtcatggaaaaaataaagccatttagaacctggt

SEQ ID NO: 101324 - DNA, 224 bp, Homo Sapiens
gcggccccctactactactatacggctgcgagaagacgacagaagggagcaagtatttgaaaaacattgcctggtacacagtacctctcaaactgcaagaacgtaagaaatttttgttcactataaaattacagacctgtacaaactttttctaaaaagtaatgtattctcttaaaacaatggcttttctcttttgcaaaagcacagctactttttcctggcag

SEQ ID NO: 101325 - DNA, 134 bp, Homo Sapiens
gcctactactactatacggctgcgagaagacgacagaagggttaagttgttgcaacagagactatatggctagtgaagtctaacatatttactactggccatttacagaaaaagtctggactgcaaggaagacc

SEQ ID NO: 101326 - DNA, 126 bp, Homo Sapiens
gcctactactactatacggctgcgagaagacgacagaagggccaaggagggcatacaatggaagatgagagctgtgctcccgggaggcttgtactcatcaagaaagaaaggagaaagagggggaag

SEQ ID NO: 101327 - DNA, 969 bp, Homo Sapiens
gtgtgagatttatggaaatacactaaatgagtaattcaggttcagtacatttattacaaagtgaaatcaggggatattcatttgtaaattttattcttagtgaatgaactgtataattttttttatcaggagagcatttataaaattcaatttataaagatcatatacccaaatcataaagatttagttgatacattaacactaagatactctgatttttagccgaactaaacaaagtgcttctactgagaggcctttataccaccatgtacagtaactctaagtgaatacggaagaccttggttttgaaattctgccaccttgtttctccctgctcatgaggtcgcaccttttgctcttgctgctaattgcccattcgtagtgggtgtaattccaggtggaatggtttcaacaagtcaggtggaaaccatcctttattgttgctggcacaacttgatatatagtctgactcagaactgaagctcacatctcaaattcatttcatgccagtaaatgtggcaaagagaagaaaggcccaagagcgagacaagaagaatagagaagggggcagccaagaagaacttctgggttcagggtgctgtttatttgctcctcctcttcatgcctgtggctggatgtcccaaacactataagaaataaagtcaaggctttgtgttatgaggactacagatgcatcttttaccaaatcagagtgccaatgaaagcagttattcatacgacaagacccgtgaatgttaggggtagcttaacgtaagagcagaatctcctttcaatcgagagaaaaccatgtgtgcaactggatatgctcaggtgaattgaaggcatggagccagtggaatctcgtgggattgggtgcggattcactggccatatcattttgctcgtaaggtgcgtcacgcacgtcccgagcgtgtgtccgcgggttagaagtgtgcaatggctgccgcg

SEQ ID NO: 101328 - DNA, 211 bp, Homo Sapiens
tatacggctgcgagaagacgacagaagggcacgcaggactccctgggacccggggtggccggatttggcaaatgaaaacgtgggaggcttagtttgactgtgaggttagggtgaatttgaccatcaggaaaactgttagtagtaattgtttagtacgagtatatcccaacaatatttgggctatactgacactaaaaagagcattggctgg

SEQ ID NO: 101329 - DNA, 314 bp, Homo Sapiens
tatacggctgcgagaagacgacagaagggggttgctgtgggggcaagtcagcagtctaggaggtggcacagagatgacatgtgaataatgaccaaggagccggccctccaagactacagggaaaaataacaggggcatcccaagaagagggaagagctggcatgaggctctgctgcagaggccactgaggcaagtgcaagaacagagaggagcaaagcgcggctggagtgagacccagtgaggcagcacgcagcacctcctgggtcactccaagtgtgagggcaggccctggcacactgcttttcttaagaatt

SEQ ID NO: 101330 - DNA, 146 bp, Homo Sapiens
gactgaatctgttggggccatggtggaagccatacccatgtctatgcccagggaggacaagggtcatcaaaccctatgatttataaaagattgaccaagataccaaggatcccctgtggatgggaaaagtggtgaatcccacccaa

SEQ ID NO: 101331 - DNA, 174 bp, Homo Sapiens
aagggggacaccttctcctgcatggagggccaccaggccctgcctctggccttgacacaaaagaccatcgaccgcttggcgggtcaacccacccatgtcaatgcgtctgacgccatggcggaggtggactgaccctgctactgagccgtccgcctgtgcccacccgtgaataaa

SEQ ID NO: 101332 - DNA, 144 bp, Homo Sapiens
ccactgatgggagcaccgtggattaatacagagggccctacagaatgttcataggggcccaactataaccccacccacgggagcctggacctgcaagatcccaagggaggcgttctctggcccatcccaagtcatacacccctt

SEQ ID NO: 101333 - DNA, 176 bp, Homo Sapiens
tttatccatgggtcgagaacagccgggcggctcagtagcaggtaccgtccccctccaccatgtcagcagacacattgacatgggtgggttcacccgccaaacggtccatggtcttcccgtgtcaaggccagcggcacggcctcctgcccccccaagcagaaaaaggtgtccccctt

SEQ ID NO: 101334 - DNA, 336 bp, Homo Sapiens
gcggcccctactactactatacggctgcgagaagacgacagaagggatgatggagtctctacaaaggtaggaagattactgtcagacttgttatttcctttctttgtaccacaaattatcaaggactgacttcacagaaaatgaactagtaaacactgctgcagatctcacactgtcagaggctggcaagaatgactagctcttagtcattcctatctttctgcacgtcttgtcattctatccttcaggcaaacacataccagccgcccttctacctgcatatgatcccaattccttgcagaaagcatgtttcaggtggaggcaatgggtcatgcc

SEQ ID NO: 101335 - DNA, 140 bp, Homo Sapiens
gggcaccaacactttaatgataattaaactgccatttttcttccctcattacacagattactaaaagtgatttttaacctttgttagggttgtcacgattattttcagcctagatcccttctgtcgtcttctcgcagccg

SEQ ID NO: 101336 - DNA, 260 bp, Homo Sapiens
tacttgaaaaaagtcacttgtagcaggaagaatagcatgggaaaagattcaagaccacatagttaagtctcagatttctagctggtgcatacatcaactgcctcttctcaacatacaccctgcaaatcctttattccagatcctttttgtgaaaaatcaaactattattccctatgataagatctaaaagaactgacagatgttactctatactaacaattccattttcacaaagaagcatctctgagttagtaaaaaaa

SEQ ID NO: 101337 - DNA, 221 bp, Homo Sapiens
ctggcaaggcatatgcaatattgcaatctcagacaacaggcaaagtccaagagttggtgtacaggctgctgaagatctatagagtcccatgatgtctctactcaagtggtctccgtcgaaaggtgatcgtctcagacacggttgtcacgggcagcttttgctgcaccgcgagtcttctcccccttctgtcgtcttctcgcagccgtatagtagtagtaggc

SEQ ID NO: 101338 - DNA, 161 bp, Homo Sapiens
acctatgtatgttaacattaccagttccttggctcctcactttttatttggattgtcactctagttgcttaatttcctcatttctatttttactctttctccagtttatcttgctgtctagtacccttctgtcgtcttctcgcagccatatagtagtagta

SEQ ID NO: 101339 - DNA, 171 bp, Homo Sapiens
tatacggctgcgagaagacgacagaaaggagctcacacagcacattcccgaagctgcagcactgctctgcaggctgagggggtccttggtctggacagagggtggaggcagaccccacccaccaagcataaagcctcaggcttggagatcacaggaagtgcctgtgtggac

SEQ ID NO: 101340 - DNA, 217 bp, Homo Sapiens
cggctgcgagaagacgacagaaggggatgaaagcgaagctttaacaggagacaggaaaagaaggatagttatgggtaacatttctaaatattgaggagcgataagggtgcctagcaggagcaaagggagttccctccagattgcccctactttcttggtgaagtaagaggtaagccatcttgtaaaagctaacaggaaaatagtaagaagcactgga

SEQ ID NO: 101341 - DNA, 390 bp, Homo Sapiens
  misc_feature (265)..(320): n is a, c, g, or t
gcctactactactatacggctgcgagaagacgacagaaggggataagggtgtacatgtgtgcacacatgtggatgtcagtgtgcatgtgcatattcatgtatgaatgcagacatgtgtgcatgtatgtgtgcaggtgaatgtgttcacatttgtgggggtgttcacatgtgtacatatgtgtccatttgcatgcaggctgggcgtgcctgtgtacacacacgtggggcatgcatgtctgtgtgcaggtgttcacgtgtggtagcnnnnnnnnnnnnnnnnnnnnnnnnnnnnnnnnnnnnnnnnnnnnnnnnnnnnnnnngcctatgggtgttctatgcgtgtggtaggctacatgttttattattgttttgtattattatttttgtatt

SEQ ID NO: 101342 - DNA, 115 bp, Homo Sapiens
acggctgcgagaagacgacagaagggagtagacattttaaagtgctgtaagaactaaaacccagaattttgtatcaagtgataatacatatattttttgagatggagtctcgggc

SEQ ID NO: 101343 - DNA, 156 bp, Homo Sapiens
gtcttgggtgctgcagcttgctccaaagttatagcagtcgagtcagagtagacttggttaattttcttatcccatcaccttctgaaagctgttcaaatctacagagtgtgaccatcacctcctctttcccttctgtcgtcttctagcaaccgtata

SEQ ID NO: 101344 - DNA, 240 bp, Homo Sapiens
tatagatttatatgtatatatataaaatcaatttttgatcataaagctgctttctagattatatgtcaaattgttagatcacataacaaattgtcccataaattgaatcagctaaatctgcagctctaatattttgaggaaaacacatcatgtcacataatattactttgtcaaaggtataatgaagttaacagtgttttgtcttctcaaccccttctgtcgtcttctcgcagccgtata

SEQ ID NO: 101345 - DNA, 140 bp, Homo Sapiens
cggctgcgagaagacgacagaagggatttgcaagtgctcacaatttggggacaagtttttataaagatcttttaaagcaaatgcaagaacacttacagataagggctgtaaagattaaagataaagtatatgagcatgta

SEQ ID NO: 101346 - DNA, 144 bp, Homo Sapiens
tatacggctgcgagaagacgacagaagggggaaattaatattttttttgaaaaggagcaaaaagaaagaaaggtcagggatagcaagcagagagagggagcgagccggctgccacacacgccaggtaaacaaaagccaacaaaa

SEQ ID NO: 101347 - DNA, 306 bp, Homo Sapiens
cggctgcgagaagacgacagaagggggagcatctgagcaagggaaatagaacaaatctgtttggatggataagcagtatgtgacgcccacatgaatgtcaaacaggtcattacagtacgtttgagtctggtgttccagagaaaggtctaagctgaaggcctagaggatcttccaaatatttgcaataattaaggctacaggagaagaggaagtcacttaggaagagaggatcagacaggattatacccaaggatattctaatatttggaagtttgatacaagtggaggagtagccagagatggcag

SEQ ID NO: 101348 - DNA, 152 bp, Homo Sapiens
gcctactactactatacggctgcgagaagacgacagaaggtgatttccacaactttgaacaggttgttacaagtatcagcaagaatgtgtccttttcagaaataacagtcaaatcaaagaaggttaataaaggctttaatttcgtgcgcagg

SEQ ID NO: 101349 - DNA, 185 bp, Homo Sapiens
ttggtcgcctactactactatacggctgcgagaagacgacagaaggggaaaggggtgtggagggggttagtggaattagagggctcaatcctattcttccacagtacaaagtaagcagattatgtataaaatacaaaaccaaaaaagaacagcatagactgtgtagaactgtagaagcaaaagcc

SEQ ID NO: 101350 - DNA, 199 bp, Homo Sapiens
tatacggctgcgagaagacgacagaagggcctcgggtcttaatcacagacttagggaaatcataaggaaaagaggcatgaaggtgctaaaaaaatcttaaagacaacagtttgagaactcccaggagtcaatatccctatttccctgacccactgtgcccaaccctcattattcaactggcaaacttcaccaacaaacc

SEQ ID NO: 101351 - DNA, 399 bp, Homo Sapiens
tatcggcccctactactactactatacgggtgcaagaagacgacagaagggcagctttaaagagaataggtaaacaaaacagaatagttcgatttgtatgccacttcccctacttgctcagtttaagaagaaaagaagtcctgcttctgacccattttacaaagggtgtggaagaagaaggggttggcaaagatgatgtaacccaaattccaaatcaaacagaagaaaccaaagtggagactaggaatgactgttcatacactttaaggccaccatcctggagagaggagtgccacattcctctcccccaaacaggcaacagcagaactgtgggaaacaagaggtcatcagggctcttgctcctgccagacattgcttttccttcaacttagttcccag

SEQ ID NO: 101352 - DNA, 263 bp, Homo Sapiens
aaatctcggaatttggcctttagtaagcatagaatagcaaagtgtaatacctgagctgggggaaaaagtccttgaattctttaggaaagacttaattggtgggtacaaagtgaaatgctcactggaatcaggaatcagaaaccagttctgatcacctatccctacatatccttcttcactctgccctggcatatcatggttgatgtacatagcaatgatcatcccttctgtcgtcttctcgcagccgtatagtagtagtaggc

SEQ ID NO: 101353 - DNA, 299 bp, Homo Sapiens
gtataaccagggtaaattctgacttctaaggtttcttccttaagtagtgtatagcttgctcaactcaacatttaaaactgaattttagtagagccagtaactgttttcatacaagggggtccatcatttccaactccctgtgtcttcctcagcggatgttttcaagttctaaggaacaaagctaataagtaatgtggatgaggctttttcttgacggttttgttttgctgtaactccctcttcttctatactcccttctgtcgtcttctcgcagccgtatagtagtagtaggcggccgc

SEQ ID NO: 101354 - DNA, 313 bp, Homo Sapiens
gcctactactactatacggctgcgagaagacgacagaaggggaagattaaagtccatgaatgtgaagaatctctgatacactctgagaagtaacatccaataaattcaccataaaactggctcccagaagggccctggagaagaacgggtgtagggtagttccttcagttatcccaacacaacatggttttctctctgtgtcctgaaaacccgtaatgtacaaatggcaatctcaggtctctaagatcatgttgctaagcatgttttctctctgcactattttcattaaaacttctctagaaggctccagatt

SEQ ID NO: 101355 - DNA, 192 bp, Homo Sapiens
acaaaggcatttctatgctaggtcgttcttgttcctttatctgagtgagctggaggtttctacaagtttttatccaaatgggccagaggtttttctatctgtgcagccacgggcatgtctccaagcacaacaacatatgctagttcccttctgtcgtcttctcgcagccgtatagtagtagtaggcggccgc

SEQ ID NO: 101356 - DNA, 129 bp, Homo Sapiens
gcctactactactatacggctgcgagaagacgacagaagggaacataaggtttctacaattcgaataataaacttacacaaataaaacctttctactccaacacataaatgattttaaaagatgaggga

SEQ ID NO: 101357 - DNA, 225 bp, Homo Sapiens
gcggccgcctactactactactatacggctgcgagaagacgacagaagggaacatctggactacagataatactgtttcttattcttgatgctgtacttgatcttagttatacagatgttttaaaatttgaaaaactcatctaggtgtgaaattatgatatgtacactttttcttaatgagtattatagcttaataaatacttttttaaaagattaatggaagtc

SEQ ID NO: 101358 - DNA, 200 bp, Homo Sapiens
agcggccgcctactactactatacggctgcgagaagacgacagaaggggaactcccctccagctgcgctgggaccccaggaccctgccccggcctgaaggccagggcacccagatgtgctgctcaagggagccccaagggctggaagggggttgtgaaaccgaaataaactgccaagcctggtctgtcctccagggtgcc

SEQ ID NO: 101359 - DNA, 149 bp, Homo Sapiens
gcctactactactactatacggctgcgagaagacgacagaagggcaagagtgaaagcagaaaatattgctagtatataactccaggtaagaagtatcttctgtgtgtccatatgtctatatgcgttatatgtatgtgacaatagttggt

SEQ ID NO: 101360 - DNA, 106 bp, Homo Sapiens
atttccacatttatatcacaaggtgtccacttactggaccaaatagcaaagttgctcccttctgtcgtcttctcgcagccgtatagtagtagtagtaggcggccgc

SEQ ID NO: 101361 - DNA, 414 bp, Homo Sapiens
tatacggctgcgagaagacgacagaagggttgacctctacacagtaaagaatggcatagagaaggaaggggatcaaactagcatttattaaatgtctgataatgtaccagacaatccagatgtcattttattagtgttatctaataagagttccgagaggcagaagaacgataaagggaggaacctctttgctgcctcagggccctcacacaggcagttccttctgcctggaatgcttttgtctctactctaagtgcagacgcacaattcatcttttaattctcaccctaaacactgctacactcaaaattaaggtaatggtggtggatttttatgacactttactcagtcatctcaaatgctatgtaaatgacggagagagacctgagttaacagaaaatagggtgaattaac

SEQ ID NO: 101362 - DNA, 450 bp, Homo Sapiens
gcctactactactactatacggctgcgagaagacgacagaagggaagcaccttgtagcacctactccgaattctctctagcaacaagaataagctgatgccacagacctgcttacaagctcagtggactggttttgcctgctggtgctcctcagctgaggggtgattcagaaggcaatcattgcaacttctgctttatcccagacagacttcttgatgaagatacgtgaacaacctgagcacccactactcagaaagttacagaaatgcagaggcagatgaataaatgaagaaagagggcctggagaaaaacaaaggcattggggtggaggtggtgtccaaagcaccaagaacagatacaaagccagaggatctgatgtgtctgcaaaaggcctgaggaaggtgagattttatagcatagggctgaacccaaagaagcaggactggaggc

SEQ ID NO: 101363 - DNA, 182 bp, Homo Sapiens
tatacgcctgcgagaagacgacagaagggcctaacttaagaagctatgcaaaagaaaaaagttagaaaggatgtgtgagatgacagcaatgagaacaagaaaggagagccaaccaatgaaaaattcctggagaaaaaaacaagagcaaaacaaaaggcaccaacttaatattttcctcagct

SEQ ID NO: 101364 - DNA, 178 bp, Homo Sapiens
tatacggctgcgagaagacgacagaagggtgaggaatcctggaaaagttgacaatacaagacaataaaaacttaagggtcaaactcaatatacaaacctaagtgctataggaattcctggggaaaagataagactacaaatgggcacagtaggagaagcctttaaaaggtgggattga

SEQ ID NO: 101365 - DNA, 237 bp, Homo Sapiens
gcctactactactatacggctgcgagaagacgacagaaggggtcattgtccgagacttcaagactttggttgcatgaccatttggagtttgatggtctgaaagtaagaagagacaaactgggttattagaaaacatgtattaaaatgaaacaagaggagggggctgaggacaactcaaaaatcctgaggccttttaccagtttgcatggggagaggaagaccaaaagcccaactggt

SEQ ID NO: 101366 - DNA, 660 bp, Homo Sapiens
  misc_feature (11)..(11): n is a, c, g, or t
aacgggtgatncggttgcaccaagagccatttggggaaatcagttcaaggtacaaagcggatctgagcccggaaaatgctaagctcctcagcacattcctaaatcagactggcctagacgccttcctgctagagctgcacgaaatgataatcttgaaactaaagaacccccaaacccaaaccgaggagcgcttccgccctcagtggagcctgagagacactctcgtaagttacatgcaaactaaagaaagtgaaattcttcctgaaatggcatctcagttcccagaagagatactgctcgccagctgtgtctcagtgtggaaaacagctgctgtgctgaaatggaatcgagaaatgagatagaattatttcctcagctatctttggatgactttggagagaagactcctctctcctcgtctgcggcgtggacttgatcatggactggtgcctttgcattcagaaggagagctgtcagcgtagcaccgaattcaagaccaaggcgtgctacctgagctgacagctttttgaaagccgagctgtttctgaaccatgtacatacatgttctgaaactttctcatcattttatgagtactgttcattgagagatgacaatgaagattagatgaaattggaaataaaccaacattgtttacattc

SEQ ID NO: 101367 - DNA, 425 bp, Homo Sapiens
gcctactactactatacggctgcgagaagacgacagaagggtgtgactcagggacactgggtgttcctggcaaactgccacctgtcactgtcttggatgcctaatctggacaagctggtggagcagctgcaggtggaggatcctcatccatccttccgcctctggctcagctccatcccccacccagacttccctatctcaatcttgcaggtcagcatcaagatgaccacagagccaccaaaggtatgtggccatagagaaccagcatcatcagggccatctggtccaccttacctcctgctagcaccagagagagggcttaaccaacaacaacatgatttgattgtcctcaaaaattccacctcattcctctcctgtttgtgccaaactcctagaacacaataataagagctaacatttcttgt

SEQ ID NO: 101368 - DNA, 178 bp, Homo Sapiens
attgaccaaccgtatcttacagaggtccttactctcttttctcctgtctcagaagacgactttaaaagtgaataagatacctgggaccccaaaggaagacagtgatagtgaccatagttatcaaagtattgaaaagacccttctgtcgtcttctcgcagccgtatagtagtagtaggc

SEQ ID NO: 101369 - DNA, 109 bp, Homo Sapiens
gcctactactactatacggctgcgagaagacgacagaagggggataaaatacattctggtgttaattcaaggaaaataaagtaatccataggaagtattcagttataag

SEQ ID NO: 101370 - DNA, 292 bp, Homo Sapiens
gcggccgcctactactactactatacggctgcgagaagacgacagaaggggagaagaatggaataggaggtcggtctgcattctctaaaagcctctgtacccgtcattggtcaacatctaaaaccaacccaccactgggaccagtgagcttcttacggacaccagagatggatgacagcaaaggataaaggaggtgggtgagatggcagaaaagggcaagagaatacgggctctttgggaattaactgaagtacatacgagtggtaactcacacctgtgatcccagactttg

SEQ ID NO: 101371 - DNA, 173 bp, Homo Sapiens
gaaaccattggcatctgaacctgtagctctctctggtagtgttgtgtggttttaaatgtcatgtgagctgagttactgacctcaacctactgccagatgaaggtgtgatcctgtgataccaatcttgagggtcccttctgtcgtcttctcgcagccgtatagtagtagtaggc

SEQ ID NO: 101372 - DNA, 202 bp, Homo Sapiens
gcctacgactactatacggctgcgagaagacgacagaaggggtgaattagaaaaaccaaccaaggccttacttaattagcacaatcccactgtggttacacatgagcaacaagtgtgagcatcactctgaatactcaattaactgattttctgagctggaaattgagaggaaaaaaactacctaactccatttctgcccgtc

SEQ ID NO: 101373 - DNA, 166 bp, Homo Sapiens
caatcctacggagaatttctagcccattagaagaacacatccatgaccccccttctcctttacctgccatatgcaactgattgccagattttgctgctttcacattaaagttaaccctcgcctttgccccttctgtcgtcttctcgcaaccatatccctagtagta

SEQ ID NO: 101374 - DNA, 128 bp, Homo Sapiens
gcggccgcctactactactactatacggctgcgagaagacgacagaaggggaagagaacagcattgaagaacccatatagatttggaacatgtagacacatggaggaatattatttaaccaagaaagc

SEQ ID NO: 101375 - DNA, 765 bp, Homo Sapiens
attccattccagcgtaataaagaatatgaaatcaaacaacctcctctaaagtcttcctggaactagagaaggaagagcacagctactaccaacctgccccaacctcacattaggacccagagaagtagtcaccgcctcctagggcaggaaggcccatccctgggggacctgtttttagccctaaaatgctgaacttcttttctgagggattcccctgcacccttctccccaccgacaaagcccagagaaaaagagtgaggagcagggaaagaagatggaaaacccaagataatctcctccttacaggatgatataaagtaactgcaagcagacaattcaaaggaagccccaaagtcagctacgagagatggagacagaagggaagtaaggaagagtgcccagaggagcacagcactctcacagagaggaggaagtaccacacagcaggaatgcaggtaaatggtctgatgtccgagaggatcctaggatactgcgtcccgccccacctgaacagtcacagccaaaacagcctccccaatcccgggacatgttccctctgccacacggctgctaagatctaatggttatggtcccagcagtccccagcatctgctaaatgctgggctggtcttggggtctcatccaccctggcagtctctcaggaacatctcagcttttcaattaattatgccacagatatgcccgttaaatgtggtataccctagacagtgactctctggcattcagccttcatggaccaaaaaa

SEQ ID NO: 101376 - DNA, 185 bp, Homo Sapiens
aaaagctgtttaaaggaggattctgatcagccaggttcagaaatcagtgtatcagatcagagaataagagtttgtccctgttctcctatggccacttaaatccagaccttttcatctgaaatgcaaatatgtttggcatttttcatacacattcctgtcttttttcccccttctgtcgtcttctc

SEQ ID NO: 101377 - DNA, 199 bp, Homo Sapiens
tatacggctgcgagaagacgacagaaggggcttgtaggctattaaggtacaaagacagggctctaaaatgttaccttagcaatactcaagtagttttgtacatatggaggctgtctctccatataagctgaaagatttactgaatgcctaacctggaagtggcctactaattgacaggatgaaaagaacagtgactgtt

SEQ ID NO: 101378 - DNA, 142 bp, Homo Sapiens
tatacggctgtgagaagacgacagaagggaaatacccagactgttactacaacctcgggcgtctggtaagcgcggggtgccctgtgcctgtggaaggaaagatgggttatttttcttatttataataaaatgacatagtgac

SEQ ID NO: 101379 - DNA, 160 bp, Homo Sapiens
caagtcaagtcctggacttgaggcaaattgggcttctccatacccctctatgcagtgtcttttcacaccccagtgctccagttaggccactccctgtgcctctggagacccaccccttctgtcgtcttctcgcagccatatagcagtagtagtagtaggc

SEQ ID NO: 101380 - DNA, 184 bp, Homo Sapiens
ccgcctactactactactatacggctgcgagaagacgacagaaggggaagacgtgtgcggataggagctgcacacaattttcctccatgtattgtttattttgctttttcttttggctagacattaggaatttcagttttcccaagttgtatttttccttttctattttaaaattatcatgcag

SEQ ID NO: 101381 - DNA, 147 bp, Homo Sapiens
ctactactatacggctgcgagaagacgacagaagggaagacctaaatccaaacatatccataattatattaaagtgagtcatgtaaacacaccaattaaaagactaactctcagaatggatttttaaaatgaatacaaggccagatg

SEQ ID NO: 101382 - DNA, 205 bp, Homo Sapiens
acggctgcgagaagacgacagaagggaaagaactggcgatggaactacttggggcaggtggtggcaggcagggagaaaccagcttcccatgagctatgagcaaaggaagggcataaagtaaggagccaacttcattttagcgtggaggatgtctcagtagagtaaggggctggaagttcaggtggtggttaaaagtcaagctgtg

SEQ ID NO: 101383 - DNA, 312 bp, Homo Sapiens
gaaggtgagggtttcatcagctgaaatgctttgattagcatcttctgattttctttttaaacagttttctgtgtctctgtttggcttttttgggtatacctcttcattttctacttaaaacattccatagccccctcctgtgcagtagcttttatagatgatgttggggccaccacacgggtttggtatatcttgtttctccttcatttctgttggatcctttctgtttttcctcttgtttctttctttccctttactgcagtgtttccaaatgtacctacccttctgtcgtcttctcgcacccgtatagta

SEQ ID NO: 101384 - DNA, 222 bp, Homo Sapiens
gagaagacgacagaagggatttactattaataagtacattagataactagggcagaatttaagtaagcatttcccacagtgagtttccctgatctagtcccatgagatattaatgattctacggtcttaaaagagtgagcatgggagggcaaggagagaggatttgcttgagccccaggagcttgagaccagtctggcaacataggcagaccctgtcactac

SEQ ID NO: 101385 - DNA, 156 bp, Homo Sapiens
gagaagacgacagaagggaattatggcgatgaagaatcaagagctcaaacttacattactgtattgaccaggaagtcctataaagaattatatttctatagaattaaaaatgcagttctgtcagcctggacaacaaagtgagacccccatagctac

SEQ ID NO: 101386 - DNA, 264 bp, Homo Sapiens
gcggccgactactactactatacggctgcgagaagacgacagaagggaggccaattaaggtactaaaactatttacccccccttcctggcttccagactctcctttatgtacatctttggttgctgatgactgttgggagtgagagtaactgtcattacgcagatctgagtctgtaaagctcaggaaatcctggggagactgcactgaacttccagaagatgactttacactgcctggagttcctgaaaaactgcctgtagttt

SEQ ID NO: 101387 - DNA, 373 bp, Homo Sapiens
ccgcctactactactactactgggcggctgcgagaagacgacagaagggttgactggggctgaaggatctgcttccaagttcactgtgagctttttccttcctctttcatcagcaagctgttttgtactttccattgataaaatgcattcgcattatacccattatatataatatatgtgttcctattcgtaaaccgtgatacagttttttgtaaacagtaaattttgcttgttgaggtcgctttaaatttggatcatcatgtaaatacttcaagtaatcttttgatttttcactttgctcacgacactttattagcaaactaatccttttaaaatctgaactcatcatgtaaaatgtagagttagtaggttc

SEQ ID NO: 101388 - DNA, 156 bp, Homo Sapiens
ccgcctactactactactatacggctgcgagaagacgacagaagggggactgaagtctacacgttcaaggagtttgtctcagaaggaaactgcaaaataaagaccatccctgacatgttgacattgatgctgaaagggagagagagccctgaaggc

SEQ ID NO: 101389 - DNA, 140 bp, Homo Sapiens
tatacggctgcgagaagacgacagaagggacactggattgtattatagtactatagaatcaaactcaagtttgattgaccataaccatatatttactgaaaacttcacttagaattccaacttggaatgttaagaaacat

SEQ ID NO: 101390 - DNA, 251 bp, Homo Sapiens
  misc_feature (111)..(177): n is a, c, g, or t
gagaagacgacagaaggggaagagcaagcagaagggaaagtaaatgatctaacataacaattaaaaggcaaaagctgtcatttcgctttttgatttttaagagacagggtnnnnnnnnnnnnnnnnnnnnnnnnnnnnnnnnnnnnnnnnnnnnnnnnnnnnnnnnnnnnnnnnnnnttcaagcaacccagtcacctcagccttctgagtaactggaaactggtgcaccaccatgccatgcctgactaatc

SEQ ID NO: 101391 - DNA, 182 bp, Homo Sapiens
gagaagacgacagaaggggctttggaaggtgagtctggaaattaaaactggggtaaacgtgatggaccctgaacatcattatactgcttaagatgctaatcttaatcctgaaggtaatgggaaaacctcctaaggtttatgttattttctttctacttaggctatttaaaaagtggagtgac

SEQ ID NO: 101392 - DNA, 178 bp, Homo Sapiens
tactatacggctgcgagaagacgacagaagggatagagggagagtgaggagtgaatattaaacaagtaaccttcatgtacactatgacaaattttttgccaagtatagcaggagtcacattagaagcaggaagtcctaacaggagcaaggacaacagaaagggaaaaaaactaacatt

SEQ ID NO: 101393 - DNA, 189 bp, Homo Sapiens
acctggctaagaaaatatctttatgcgacttttcctcagtcatcatttgactctacagagcactatgttaaatactttctcaggaattttgtaggcatttctctgttgtcttctggtttttaatttgctgttgaggaggtagatacccttctgtcgtcttctcgcagccgtatagtagtagtagtaggc

SEQ ID NO: 101394 - DNA, 762 bp, Homo Sapiens
gcggccgcctactactactatacggctgcgagaagacgacagaaggggacatattggtgatagagaggagcaactcgaccttaaggacccttctttcttctggactatgaagtccctttcactattgggggccttctggggctaagggaggcccctccccacattccaggctggacccgaggtcagccgtgagatatcagagaagccggggaggagagagttggccgagatggagtgagggggctcaggatagaatttgggatttccttgtgcccatggaacacagactgggaaagaaaatgtcttcttggctctttggtgagaaccagatagactccaccccagaatatgatgctgatgctccagggagccacttaccagagactgtgatgctcttgactatggaattattgcggccagtagccaagttagagacaaaacaggcataggtcccgttattatttggcgtgattttggcgataaagagaacttgtgtgtgttgctgcggtatcccattgatacgccaagaatactgcggggatgggttagaggccgagtggcaggagaggttgaggttcgctcccgaaaggtaagacgagtctgggggggaaatgatgggggtgtccggcccatctggaacaaagagaacaaagccacaggtgatgtcatcagaggaaaggggaagctcctgattgtagaagggccacagtgtccctctgaatcctgtcccaatcctgtgttaaaaagtccaaatcggccgga

SEQ ID NO: 101395 - DNA, 267 bp, Homo Sapiens
acggctgcgttaagacgacgggggggatgagaaacctgtctgagccgtagacacatgaggagttgatatgggaatctgagagacagggtactgagggagcaagggagtagggagcggctgtcccactggaaggaaatgagcaccagagtggactggaacaaccgagggttgtgtcgcaactgggatctgaggttcgccttggatagttggtactggctgggaaactggaagctgggaaggtaaagaaaaacaaaacagacaggcccg

SEQ ID NO: 101396 - DNA, 204 bp, Homo Sapiens
gtgaggaagaaagcaaggtcagcattagctttgcattttcttcccaggttgttgttccttgaatggagtcagagttgggtcagggtcaaaaatactgactactactgctactactacttcttcttctttagctaaaatattgtagtagaatctacatatttttgataaaaaccccttctgtcgtcttctcgcagccgtatagta

SEQ ID NO: 101397 - DNA, 295 bp, Homo Sapiens
cagcagttgggatactagtttcctgggacagtggttagggtgtggtcccactgcgcctcttctctaggtgcttacctaaagacaccataaggggaacactgggctccagggcctccctcgggacctggggatgggagaagtagaactaagaccccaagcatctgggacttgggcctcagaaggcacaaggccagtgagcctgtgctgttggctctcatagcaggagagggcagccagctggtcaggcagaccctggcactggggcgatgcagtaaacaggtggtgcagttacctc

SEQ ID NO: 101398 - DNA, 185 bp, Homo Sapiens
actactatacgggggcgagttatacaacagaagggagactactatgattgctcaggcaaggtatgatgttacgttagactatactggtggcaaagaaagcaggggaaacagactttagacatattttaaagaaaatgttaataggacttgctaatgaattcagtggtgatgggggtaagtgacag

SEQ ID NO: 101399 - DNA, 211 bp, Homo Sapiens
ccgcctactactactactatacggctgcgagaagacgacagaagggcacgcttcaactcaagctttctaaccatcagacctaactaaaaaggtggttcttaccttggattacctctaagagcccactgagatatgagtgttaaaaaattacatgcgaggaaatggcaggtatgttacagcatggacaaatgaaaagtaaggcatttacagg

SEQ ID NO: 101400 - DNA, 551 bp, Homo Sapiens
  misc_feature (44)..(118): n is a, c, g, or t
aatatgctcctatactggcattaggcgtctcctcatccctcacnnnnnnnnnnnnnnnnnnnnnnnnnnnnnnnnnnnnnnnnnnnnnnnnnnnnnnnnnnnnnnnnnnnnnnnnnnnccagagtaatggtttcttgactttctgtagcccttgttccttagtctgctgtgatatttatgttgacctttatcattttctattctgaacccctcttagcatttaatgtgaaatctaagaaattagaagtagaatggcttttattgttttgacacctttgaaattattattaataatttttccagagcaaaaaagcaaacacgctcaataagactaaacaaaacaaaatataaatgtacatcatttaatgtcccagtggctctattctacctgtaagaaaatgatacaaaaccacctaagatattttgaagcctgacaaatcagcttcatggaaaaaggtaaaaaatgcatttttcaaccgaaagggcagatccaatagaagacccgctccttaaataaacataaaatgtaaaaagttggaaaattaagagta

SEQ ID NO: 101401 - DNA, 488 bp, Homo Sapiens
ggctcgcgagcagatacgcgcgtctgtcatcacccacacggcctctgccaccctcacccacgatgcccccgccaccacctttagccagagtcagggccttgtgatcaccacccatcaccctgccccgtcagcggccccttgtgggctggcactgtctcctgtcacccggcctccccagccacggttaacttttgtgcaccccaaacctgtatccttgactgggggcaggcctaagcagccccacaaaatagtgcctgctcccaaaccagagcccgtgtccttggtgttgaagaatgcccgtatcgcctcaggtgagccaggcggggagactcagtgcggggctccccccgacccagagggatgttttcccatcccaaaggctttcaaacttgtgaccaccaccaccaccctggtgtgcacgtgcatgcgcacacacatacacttaaatgaaacaaaagtgtcatgaaataatacatggccatgatcta

SEQ ID NO: 101402 - DNA, 441 bp, Homo Sapiens
agaggtgcagcttccaccttggaaacctttggatttgatgtagaggaagctttgcagacactgcttagaaaagaaagaaaacaactctgaaagggacagtttttaaatgtgtataagctgctgtctttgattactcgtgttcatgatttggtgtggctgtattttcttttaactttcatcctattagtaatggtccttggggggtctctgtaaaatatatggacaccacgaacagtggggctgtacctcccaggtaaccaacacatgttgtgtttgagtctgctcatttccaatactggatgatgtatgtaaacatcttatgtctcttagtgcaaaaagaaacatcatttttttagggctcgctcactctgtcaggcctaatctaaaggctagatataaggtcatgtgactgctgcttccataaaaacaaattcctcttcg

SEQ ID NO: 101403 - DNA, 300 bp, Homo Sapiens
gtgtgagccaccacacctggccaagtctgattctttagtggggcctctgaggcccaccatgacccagcctgggccacctttctaaattaacctcccgtgcctcctccctgggcccactacctcccttaatgatccagccctcagggaggactctgctaccaatacaggccgcacacctgcctacttccctgcctctgcctggtctttatgttttcaaaatgtttactgagggcataacttctataaagtaagaagcacaaatctagaatagtcaacttgaatttttatgcaaatatgccc

SEQ ID NO: 101404 - DNA, 300 bp, Homo Sapiens
cactcccggtcccctgtgctttacctccttgcccttgtgtctcaggtgtggtccctgcctgcttgatgaagttgctctgttcaagcctttggtgggatcatgtgtttgggggcttttaggggacccagctgcactggggcactgcccgtggcctgggtaggacatttcccagcaagggctggaggagttgccgtgccttcagcctgaatcgaatgtcaaaaccagccagcggtgcttcaccctcttggggataacttgcttagttttttaataaatgttcctggttggttttcacaaaaa

SEQ ID NO: 101405 - DNA, 555 bp, Homo Sapiens
tttaaggccaagaaagtcagtttaatcttacaatataaatatatcatttagtcacctcagcttatccccagaggtgtttacacaattcccaatgaccagtgcagcttggaagggactgaggctcgcaagtgggtggcacagtcggctcttcagtggctccaaagtgagcccctcacaacaggagacacttcagagaggtctgtccccagccacgcactcatgattgctttttagcagaagtcatggtcgctgaggccctgggtttggcaaaagcacagctgccagcagagcacagttctggtaggtggggccacggctgacctggccccagagctacaggaacaggcaggggccagcttggcttgcaacaccatgaaacaagcctgtggggcccttagtgtcttctcccgcagagcccaccagaaacacttctgtgagtaacagaacctggaaggaaaaggggcaggggtggggccttggtggcaacgcacaggacgtgccccaggcttcctcctcagctgcactgccacgtgcggccaacaagagcccgcagcc

SEQ ID NO: 101406 - DNA, 411 bp, Homo Sapiens
  misc_feature (51)..(51): n is a, c, g, or t
  misc_feature (59)..(82): n is a, c, g, or t
catttcactcagttgcacttagtcgtatgtcttgcatgcttagtctaaagnctgtagcnnnnnnnnnnnnnnnnnnnnnnnnttagattttacatatctttgcaggtatcacagccttgcagaagaaccaactggaaaaaaaattctcaggctttacagcaagcaaacttcactatgatttttacaattctgattctgtatcccctgggggttatcccagttgcttctttaggatggggtttattacgttgtacatatatcccgatgtgtctgtgtgaatctttgtcttttttgggggagggcagagggcggttctttttttagatattgttcctaaaaaggaataaatgcatacacctgtttgtcaaaacacctttgctttttgtgcaactgctttatattaacgatact

SEQ ID NO: 101407 - DNA, 344 bp, Homo Sapiens
aggaaaaaaagattcattccttcatccttccaaataaggtacagtacaactcaataacaatgcacattactgaaaaacacaattgcgtcttatattgctcactactctttaagtataattcagatattaaggaaaataactgctaatcacattaacacattacagaaatcaaaattaacttaccacacaaaataaattaaaacattaaatattaacctttttagaaccccttactctgatgtctgtatatgttgcactgaaaaggttaatatttaatgttttaatttattttgtggggtaagttaattttgatttctgtaatgtgttaatgtgattcccccccc

SEQ ID NO: 101408 - DNA, 449 bp, Homo Sapiens
gtgttctgacttactgagccaggcccagtaccatgtggcccgggcacgcaaacaagatgaagaagagcgggagctgcgggccaagcaagagcaagaaaaggagctgttaaggcagaaacttcttaaagaacaggaagagaaacgtctcagagaaaaggaagagcaaaagaaacttttggaacagcgggcccagtatgtggagaagaccaaaaatattcttatgtttactggtgagactgaagcaacaaaagagaagaaaagaggtggtggtggtggacggcgttctaagaagggaggagagtttgatgaatttgtcaatgatgacactgatgatgacctacctatatccaaaaagaagaagagaagaaagggtagtggcagtgaacaagaaggtgaagatgaggagggtggtgagagaaagaagaaaaagaggagaagacatccaaagg

SEQ ID NO: 101409 - DNA, 399 bp, Homo Sapiens
gcgccccagccttggggcctgtctttgaatgggaatgagactgtgcaaaccgtggactaccctgtgtcacccacagctcagtggcctgcctgccggccctcaggggctgctgaccgggagaccagccagagcacgagggggtcagggctgtgtgggttttggcctgattctgcatttggttgtttctgggggccatgtagcctgcctgcattaggaaagcgctgtgccatctgatcatgagcacctctgcaccccctggtaaggtgaccttgcagcaggagctgtgccctgcctgggtaggcacccactaggtaggaccggagcaatcctggcagccgccacctgcacccgtgcacttgtttctcctcacagtttcaagtaaatccgtttttgaaggct

SEQ ID NO: 101410 - DNA, 315 bp, Homo Sapiens
ttttttttagtttctttagtagacaatttattttgataaacttgctcaataacaaaaatacaagtgaggaaaattatgttcattttatacagttgtattaacaatttgttttgaaactattaattgaaaaatgttataaccaattagaaaacaattcttaataaagtttgggataatatacagaccttgatcacaaacttcaaaatctcttgaggtgatacaactaaaagtcctgtgtagggaatcctacctacacgggccacttttttccttcatgtttttatccttcaaaaattttctgaaagacagcttact

SEQ ID NO: 101411 - DNA, 838 bp, Homo Sapiens
  misc_feature (57)..(121): n is a, c, g, or t
  misc_feature (378)..(386): n is a, c, g, or t
ctagctattatgagtaattctaccatgaatatttgtgtataggtttttatgtgacgnnnnnnnnnnnnnnnnnnnnnnnnnnnnnnnnnnnnnnnnnnnnnnnnnnnnnnnnnnnnnnnnnagtctcaaagatgacagatgactaaacagtatttttaattgagttgacaatcatttggtctgtttgtccactgctttatctgtcacttagggcagagtgtagcatactgtagaccctaattaatatttgttaaagtggaaaagaaaaaccaaactccttcagcttagaaacccaatgaaaagatgtttcttttcataatgaaggcaccatttcactagggattcaagatccatacagaagtgtgctatatctttagnnnnnnnnnctttttcagacaatttttccaagtttgtgcctgtcgtcatcatggtgatggtgttggggctggtgaaacactgcccactgcatcaattccagagtaaaaactagattgaatccaaaattttctataaattaatgttgacctttactgagttctgagatcaatattaattactgctgtgctttgtaattataaaagggctatttgatgtttcacaccaaggatatgggtggagagagaaaagaacttgtattaacaccatctgtggtttctaactttgtaattaaggccaattcctctgtggaacattttagttattatatatcatgattattcggtctattaatatccagggaagtaccacagtttgagagccattcattctggtttacttggggagtcctattctatacctgttttgctggcataattattaaaagcctctttaactcaaa

SEQ ID NO: 101412 - DNA, 652 bp, Homo Sapiens
  misc_feature (24)..(24): n is a, c, g, or t
  misc_feature (285)..(285): n is a, c, g, or t
  misc_feature (465)..(546): n is a, c, g, or t
gggttcccatctggaccccacacngaaggctggcaggctgtgggtccatcgcctactttttcttcaccaaacggcacgaggtcaagaagaatgacgcggacccggagcgggtacacaagcttcatcccaaacctaaggaacgtggtcgctctgaacacggaggggccaagcaatagaatctactggtctgacctgtcccagagaatgatctgcagcacccagcttgacagagcccacggcgtctcttcctatgacaccgtcatcagcagggacatccaggccccngacgggctggctgtggactggatccacagcaacatctactggaccgactctgtcctgggcactgtctctgttgcggataccaagggcgtgaagaggaaaacgttattcagggagaacggctccaagccaagggccatcgtggtggatcctgttcatgggtgcgtatccacgacgctgagnnnnnnnnnnnnnnnnnnnnnnnnnnnnnnnnnnnnnnnnnnnnnnnnnnnnnnnnnnnnnnnnnnnnnnnnnnnnnnnnnncaaaaaaaatagaaccccagtcttcattaccatctactatagttactgacccatggctgatcttgttctttcttccttccctctctttcccaagtattttgaagtt

SEQ ID NO: 101413 - DNA, 452 bp, Homo Sapiens
  misc_feature (245)..(384): n is a, c, g, or t
gggggaaaaattggtgacaactttaagaaatactgtttatatcccgtcctcaaatattgcttgactcaaccctctactgaaccagtagtccagggtggctcacaaagaccactttgaggctcttgctctgctctttagccaaggagtctcccttcctgccttcagtaacaacattacaggaagagaggagagaaaggtaggagttaaagatccagtcatttgtttccatctaaagtgccctatannnnnnnnnnnnnnnnnnnnnnnnnnnnnnnnnnnnnnnnnnnnnnnnnnnnnnnnnnnnnnnnnnnnnnnnnnnnnnnnnnnnnnnnnnnnnnnnnnnnnnnnnnnnnnnnnnnnnnnnnnnnnnnnnnnnnnnnnnnncagactcagctgaaaaataataatattattaaaagaatttaaaataaagtgttccatagatgtgaaaa

SEQ ID NO: 101414 - DNA, 137 bp, Homo Sapiens
cttagtatttctaagtatctcattaaatacctaaaatggtataagatttatcaattgtagggttatggaatctagtaataaaatttcaacagcacttaaactgaagtttgggttgctcatacaataaacagattgaa

SEQ ID NO: 101415 - DNA, 501 bp, Homo Sapiens
aatgctgaagtcatgtcaagtactgtctggagggtttttttaagaaaaggcatttggcatttaactgtctcttgttttatttttaagtttttggaaaccttttgacataaaatgctgccaagtatctaagaaatgtatatactgacagaagatatttgaaagtggaaaattggaaatgaaatatgttgctgggtgcgttaatcacctccgcccaggatttagtcacttgcaggacctctttatagtctaggatggcagagcagaagattttaatatgcttttattaagtgatgtaaaataaatgctttttggattatcaatgaaagcaattttatgtgtgcctgaagcaagaaaatagcgtttttggttttatctcatattttcttggcaaaattgagagaaattaggaacactgctatttttttcttaaaaatgtttttaagaatatgttcgtttctttgactattaagaaccccttgtggtattagtgtgcgaagaaaa

SEQ ID NO: 101416 - DNA, 468 bp, Homo Sapiens
ttcaaaactgaaaaactcatatattcagtattttactcccacagcacctccccccaatttgacccacagggacccccatccaggtgcagggtcctcgcctgtgtacagggcacacctttggtcactccaaattcccagagctcccagggtccttctcagggtctccacctggatggtgggggtggaaggcaaaggagggcagggcgaggggtgaacaatggcgaatctggggatggactattcctatgtggggagtggaagccgggctcctggtgaggaaaagctggccctggggtggagccgagcgccagcctgtggggaagtgaagacggcaggtgtgctggacactcagcccttggctggacactcgctcaggcctcagccggacactcagccttcaaccggacatgcaggcctcggccaaacactcactcaggcctcagactcccagcggtgcgggcctgggtg

SEQ ID NO: 101417 - DNA, 459 bp, Homo Sapiens
ccgtggcctccggaaggcctcggccaggagccccaggaaccgccggtcggccacactccgtcccaggccgccgcgcctgagtccgtgctgcccccgccggcgcccccctcctactcggacaagggcgtccagactcccagcaagggcacgccggcgccgctgcccaacggaaaccaccggtactgccgtctttgcaacatcaagttcagcagcctgtccaccttcatcgcccacaagaagtattactgctcctcgcacgccgccgagcacgtgaagtgagcgcccacactacagccgcagacgctttgcacgccccgctgcgatgcggggagggggccgcccccaggccgcacggactgccgctcctgggaaccccgccacgcacaggcctcggcggagggggccgcagggggcagcgcccgcctggacccttggcacttaataaagaagttcagtttg

SEQ ID NO: 101418 - DNA, 705 bp, Homo Sapiens
  misc_feature (60)..(60): n is a, c, g, or t
  misc_feature (657)..(657): n is a, c, g, or t
aagtgtgctcaaaagccccatgcttccgaggggcaaaaaagcaagaattgaaggccacgnttggaagcacaaaattttccagggcctcccttctggtgtacggggcctcagagggcaacattaccatgaactgtcctgcacacaccagctggggaaagcctcaagtgaacaaagatgaaaacacggtgggaaaagcaaaagcaaagccgagcagcaggcagccatctgtatctgcttccaggggcagagtacaattcaacaacagacctttacatgtatttttgaagaaatccaattttgccaaggcctcctaacataagaagggcgctttcacaaccacgccttccgggccagctcctctccagatctgcactggcaggaactgctacacatggcttcacccttcgcctgaacccacttctcagccagctgtcctagcttcagagcacagcttctgcctggcctgggtgcgaggctgacccctggcagtggtgtgccctcacccagcaagggccagacagctgctgtctgggagaggcacgacgggggctcaggaacacagccaggaggccgtggccccttctgagtggtcagtgacaatcaaaaggtgtcacgctgcagggataatggtgagtaggcctcttcactttatccatngccagaacatgtggggtaacatgctggaaaaccaggatatttcttctg

SEQ ID NO: 101419 - DNA, 540 bp, Homo Sapiens
ttttttttggaaatcagaggtgaatatttatttaattcatatataaattttacataatattcatggtgctataaatataggcacattttttaaaagtccagatacatccaaaaattaccccctcactgtagcctactccaatcccctcaagacggaatatctaacgtgtttggaaaacagggtccagaaaggccctgcccattaattttaaaactttctgaccatcaagaccattctttcctgcttcaaccaagcagagtcaacaaggatcatgtgttttcagggttttaattgcactagttgatgaattaagtaaatgcctctgcctgggtagtttgtaataggtttatggtttggtttctcctacttagttcaagtcagagaaagaaaaaccaatatctatattcctattggccttctttaaatccctatgagatggcttaaaaggatgtcactgcaccagaggactcacttaaccacatctactgacaaataggcaacttcccataaagtacagattaaaacatcattcatttatat

SEQ ID NO: 101420 - DNA, 449 bp, Homo Sapiens
aagaagtttacttcctaaacctttttattatgatcttgaatgcggacaattggggccaaacgaggaaggacacagacccaaaagccagacccaggtcccagcgcgcttctgggctctaacctgggagactcgcatccagcccggcggaagctacagtctctaccctgagctccgtggcgcagagcgctccacgcgcattcacgccccgctcctcgcctgcacccccaccccgtctggagcctgccctcccggccggggagcctccaggcacacacccgcttctggacgtcggggacccagcggttgggctcaggccacaacggcctgagattgccccggggcaacccgtcggctcggcctggaggccgggtccccgatgtcgctggggcccctaccccctcttgcgaagacggtgactttttttccaataaaatattttatgacacaaa

SEQ ID NO: 101421 - DNA, 482 bp, Homo Sapiens
caggtcaccctggaagtttgcagggtttgctgtgggccatctgtagatttctcgatctcgttagattgcaggcatcctgacatcttggcaactgcctagttaatgccagtggcctgtaccatattatggaaaactgttaactgcttaattgggtaattttcaaagaaagtaatgttgttaaatggggcgaaataagaagttaaatttgaaagtgaatgtgttcaaatgaaaggtttgataattgcatctgttaccacttagtttcataggctttaattctagtatgcattaaatattgggcaaaattgcacttgactaattttttgaagaaaagtaatttattctgtcaagaaataaaaaaataggctttgggtatggttaaactgtaaatcttatgtttacaaaatactgtaattttcaggaaatcactgtattaggaatgggcaatgacttatataaataaaagccatttttaaaactga

SEQ ID NO: 101422 - DNA, 466 bp, Homo Sapiens
gaaggagcaggactgaaaggaaccttcctccttccggatgtgcctggggatgtagaaagagttgcactggccgtaacagaagcggttgatgatggtgcgactgttgcagccttcctcgtggatggtctgcttaagcggctgggttttgcaccagtctcgcttcaggtatttgcgctccgtcacatgcagggcctcttggctggactccagcacctcctccccgggcatggcagtgccccgcccttgggccccgcccccggtttcctggagccaggctgctggggcgactgagtctgctctgagtcattgtgctgggccttgtctggcggggggatggcaccttgggaccctttctttttcccttcagcagccggcagcagggtccccaagaggagaagcagggctcccaccgtgtaggctgtgcggctcatactgtcagtgcggcgggtcctcggggcctgcgctt

SEQ ID NO: 101423 - DNA, 355 bp, Homo Sapiens
tcccacagtcatcgaaacacaaaaggggtctcagactcccctgagggtggaggagctgtgcctgcatgctggcaggccacagcccctggctttgtgcccacttaggcagtattatcaacaaggtcctgctcagtgtccagccccccgctgagttcagaaatgcatctgccaatcagcagcaggattctgcagctccttttgtgccaagcccgttcccaccaggcaggctcgagataaagtcatcacagccttccctcatctgcagggagagaagttgctgtcagatgaatgtgagcagtctagcctggatgacatatttttcgttttgaattaaaagccctggctgtgtgatttt

SEQ ID NO: 101424 - DNA, 614 bp, Homo Sapiens
  misc_feature (183)..(231): n is a, c, g, or t
cctcagaaacaaggttgcttcgtcgtgctcaaggtatgatcacagcagggccacagcccaagctcaagactcaaaaaacttttggaataatcccaactggactgcagtgaaggacaacaatgctctagacagagaaataaccccagagtaaactgtaaatctaaatcactggctgcaatgagnnnnnnnnnnnnnnnnnnnnnnnnnnnnnnnnnnnnnnnnnnnnnnnnngtacaaaagactttgagatatcaggcaccattaaaccacatttccccccttataaatgcaactgttcaagtacactgggaacagttttaaggtacacctgcagtacaataggagaagcatgagtggataatctaaacacaggatcataacagtgatacgctgcaacacctctgtgaattccattagccaagttctgtcattaaaacatagaaaactactgctcctcaaaataaaagttttaggaaacaaaaatccctaagtagtgaactgttttccaagcagagctcctaatgtttcatttcctgtcctacaaccaaaggggacccagtggagctgccgtttggaaacgtggccagcatcacatcacaacacggaggaatcag

SEQ ID NO: 101425 - DNA, 1096 bp, Homo Sapiens
  misc_feature (976)..(976): n is a, c, g, or t
  misc_feature (1036)..(1036): n is a, c, g, or t
tgagggactggagacccggaaacatatgtgggggtatagagacccaggacagagatgaggtattggggaccagaaaacagaagctgggggttcaggagtttgcagacaagaactacgatagcagagactgaggtactggtgacccaggagatatctggggattcagggccactgaagatagaagatacaatacagtctgaggatgctggggacccaggagacagaggtggaagcttctagggtaccagagtcagaggctgaggggacagaagctaaaatattagggacccaggagataacagctagggattcaggggtcagagagatagaagcagagatagcagagtctgacatattggtagcccaggagatagaggtgggacttttgggggttctgggaatagagactggggcagcagaaggtgcgatattggggacccaagagatagcatctagggattcaggggtcccagggttagaagctgatacaacagggatccaggtgaaagaggttgggggttcagaggttccagagatagcgactgggacagcagaaactgagatattggggacccaagagatagcatctaggagttcaggggtcccagggctagaatctgaggtagctggggcccaggagacagaggtcgggggttcagggatctcagggcccgaggctggaatggcagaggcccgagtactgatgacccgtaagacagaaattatagttccagaggctgagaaggaagaggctcagacttcgggggtccaggaagcagagactagagttgggagtgctctcaaatatgaggctttaagggccccagtcactcagccaagagttttaggatcccaggaagcaaaagcagagatttcaggagtacaagggtcagagactcaagttctgagagtccaggaagcagaggctggggtttgggggatgtcagagggcaaatctggggcttggggggcccangaagcagagatgaaggttttagagtctccaaagaacaaatctggtacttttaaggcccangaagcggaggcttgggtcttgggaaatgaaaaggggaaagaagctgagggaagcctcaca

SEQ ID NO: 101426 - DNA, 879 bp, Homo Sapiens
  misc_feature (869)..(869): n is a, c, g, or t
tggaatgccgtttaccgcatcatcagtggggatccatccgggcacttcagcgtccgcacagatcccgtaaccaacgagggcatggtcaccgtggtgaaggcagtcgactacgagctcaacagagctttcatgctgacagtgatggtgtccaaccaggcgcccctggccagcggaatccagatgtccttccagtccacggcaggggtgaccatctccatcatggacatcaacgaggctccctacttcccctcaaaccacaagctgatccgcctggaggagggcgtgccccccggcaccgtgctgaccacgttttcagctgtggaccctgaccggttcatgcagcaggctgtgagatactcaaagctgtcagacccagcgagctggctgcacatcaatgccaccaacggccagatcaccacggcggcagtgctggaccgtgagtccctctacaccaaaaacaacgtctacgaggccaccttcctggcagctgacaatgggatacccccggccagcggcaccgggaccctccagatctatctcattgacatcaacgacaacgcccctgagctgctgcccaaggaggcgcagatctgcgagaagcccaacctgaacgccatcaacatcacggcggccgacgctgacgtcgaccccaacatcggcccctacgtcttcgagctgccctttgtcccggcggccgtgcggaagaactggaccatcacccgcctgaacggtgactatgcccaactcagcttgcgcatcctgtacctggaggccgggatgtatgacgtccccatcatcgtcacagactctgggaaccctcccctgtccaacacgtccatcatcaaagtcaaggtgtgcccatgtgatgnaccacggggc

SEQ ID NO: 101427 - DNA, 429 bp, Homo Sapiens
gctgcccccggagcggttcctccacctgaggcagactccacgtcggctggcatgagccggcgcccctgcagctgcgccctacggccaccccgctgctcctgcagcgccagccccagcgcagtgacagccgccgggcgccctcgaccctcggatagttgtaaagaagaaagttctaccctttctgtcaaaatgaagtgtgattttaattgtaaccatgttcattccggacttaaactggtaaaacctgatgacattggaagactagtttcctacacccctgcatatttggaaggttcctgtaaagactgcattaaagactatgaaaggctgtcatgtattgggtcaccgattgtgagccctaggattgtagaacttgaaactgaaagcaagcgcttgcataacaaggaaaatcaacatgtgcaacagaca

SEQ ID NO: 101428 - DNA, 694 bp, Homo Sapiens
caccttctcctacattgcccaggaataaagaatcgtgaacctgttgcatgttatgtttcaacgtgtttatttttcaattgcagaaaatttcaagtcatttttcattcagtagtatagccccaccaccacatagcttatattgatcaccgtaccttaatcaaactcacagaaccctagtattcaacctgccacctccctcccaacacacagagtacacagtcccttctccccggctggccttaaaaagcatcatatcatgggtaacagacatattcttaggtgttatattccacacggtttcctgtcgagccaaacgctcatcagtgatattaataaactccccgggcagctcgcttaagttcatgtcgctgtccagctgctgagccacaggctgctgtccaacttgcggttgctcaacgggcggcgaaggggaagtccacgcctacatgggggtagagtcataatcgtgcatcaggatagggcggtggtgctgcagcagcgcgcgaataaactgctgccgccgccgctccgtcctgcaggaatacaacatggcagtggtctcctcagcgatgattcgcaccgcccgcagcatgagacgccttgtcctccgggcacagcagcgcaccctgatctcacttaaatcagcacagtaactgcagcacagcaccacaatgtcgacgcggccgcgaattta

SEQ ID NO: 101429 - DNA, 348 bp, Homo Sapiens
caactccgcgtatttactgatcctcttaagccaattccagaactctttacattaacaattgctgctatagaatctcactttatttgggaggccaaaattataaatttcacatcaattacttcccttacttaccagccttagcagcaagagactttgtagtatttaaaaaattaaactccaacctcgaagaaaaaaattagtcagcattgaaaatatttaacataatactacatactaaggtttaaaagcaattaattccaaaagtgtggttctaaaaaagtgtttctgcaatagcaggactggtttggtatatagtctaccaaggtaacaacttctaaggtcgaaaag

SEQ ID NO: 101430 - DNA, 173 bp, Homo Sapiens
gcgtcgacattataatatcataattattactggtgccagggtgacactgtaatgccaccagtaataataggcttcccacccttgtcctctgcattgtgacctgttagggtgatcagatgcatgatttacctccaactctcagttttctctacttgggggataaaaggggaggt

SEQ ID NO: 101431 - DNA, 384 bp, Homo Sapiens
gcgtcgacgtcaacttgcagcaacgtctgtatcttgaccgactatccattcagcctggatcttggcacgccgtctgacgcgcaatttacccatgattttgcccaagcgatggggcaggtaccgattgctgatgggttagtggacagtattaaggccggctaccagagtggcgaactgcaaatcagcactgagcgtgacgctggttggcagcagcctgaactgttcttcgacaccctggaagatgctgacctcggcaagccaaaggtgagtcgcgacggtgtgcgcatgttagcgcgggtaccggtcagcgatggttggggggacagcgcaccggatctacgtggtaaaaccttgacgctggtgatcagtgatggcggggtcgac

SEQ ID NO: 101432 - DNA, 423 bp, Homo Sapiens
tctgatacggcagcatctgcaacatgatatttattagtctggtggtcttgtatatttttcaccgactgagcaataaaggttcccttagcacctttagccaccagcaatccttcactaatcagcaactgatatgcgagttctatcgttcctcgagccacatttaattcactcgcaagagctcgtattgaaggaatacgctggaaagcctgtagctgcccattatttattccttcatgaaaacgttgataaacttgcaaataaagtggtgtattagctgctgtatcaatttgtagaaacatttttaacacatcttgtcctagtgatattttttattcttgcccctttattataggccaagatgctttaatatgcgctacagttatttaaatgtgctaaaacagagtcgacgcggccgcgaattta

SEQ ID NO: 101433 - DNA, 407 bp, Homo Sapiens
gctgtgtaaaattttttatgccagacctaaattttattcatgctttcaatgcctgtactttgtgtatttttaaaagctatttgcattgtaagtttgaaagtgagttatgttctctggtgtactcttagtatcttagtatcttgagtgtgttgaacttaattgtaatttatactaatttcctctctattcctttcatctcatctttaaagtgctgagggaaaggaagaggacttggtggcaagagccaagacaaaagaacaatgtgtgtgtaatttgttcagaaggtacaaagttagatttgtgatttgttgatgcattatctcatttctcaagtaattccactaagtaggcactattattcccattttatagaaaacaaaatgtagtgacagagcgagactctgctt

SEQ ID NO: 101434 - DNA, 377 bp, Homo Sapiens
tgtaaaccgcattatctaccaagagaattctcttcgattataatcacagcggtatataaccccccctcccaagaagacacatcgatgaacgaactttatttgactctttgcaaactggaatccatttattccggaggctgcattcattgaagctggggattttaacaaggctaatctgaaaacaagactccctaaattttatcagcatatcgattgcgcaaccaggggtggaaaaaccttggatcattgttactctaacttccgcgacgcatataaggccctgccccgcccccctttcggaaaagctgaccacgactccattttgttgatccctgcctacagacagaaactaaaacaagaggctcccacgtcgacgc

SEQ ID NO: 101435 - DNA, 401 bp, Homo Sapiens
ctattgtgtgttctttcacatcatttgtaacttattttgtacataatgtttctgccatcgtctcttatgatcgaaaagagcttcaagataccaggacagcgattactcaccccatactgtcggacacaaaggatttactccagacccccgacaaggccctcatctccgtcattcgcaggagaaagagacagagatatctgggacgtaggtctgggtgccctgtaagtatctgatggcaagtgggtaatctgccttaccatcgatcctattagccaatgtacaatcacatgataacaaaatagccactacgagcaagagtttgtaactgctctaattaaatttcaggcatatggaaaacattaagctaatcttcctgtttattgacaaactaaaaatagagt

SEQ ID NO: 101436 - DNA, 272 bp, Homo Sapiens
gcgtcgacctgaaaagatcggtatatgaccaaagtcacaaatcgatgtatgacaaatatactaaacaaaatttaatgctctaaataattcaaattgtggttaggcggcgaagaagctaatccaacggaacatacaccagtgtataacccaagtagccgagagcagccaacaacactataactcgaagtatgacgagcatactaaacaagagaatgaacaaacatgccttggatccaaataaaacttaactcaaacgctaaacaagcagaagc

SEQ ID NO: 101437 - DNA, 523 bp, Homo Sapiens
gcggccgcctactactactaaattcgcggccgcgtcgacctattatcctgaccagttgtctcaaatatttaaagcttagacagtgtcaccaacttttttctgggagctggggagtctttcataacaaacttgagtacttgactgcagattgaagcaaaagagctaacaatgaagtagtgagagaaagtagttttctactctttgataagtatgattacctcttgttggcttgtccacaactttgaagttcagacaatcagtaatagcaaattcagtgaatctagttatatgactaaacgcccagctaagccccaaggcccagaattttcatgaagtagtgacttaaaagtaccctcccaaccctacagaagaaataaaacctacccagttccaaagtaattatccaaagtatccaaagtcatttccaccaagtatttgtggttgtatgctagatgttatacttattgacctgtatataagtttaaaaaaagaattaaattcacttgtagcattgttaaggtac

SEQ ID NO: 101438 - DNA, 264 bp, Homo Sapiens
gcgtctacacacatttgacagcagcctttgattgtcagcttgggttaacttaactcattcgaatgtaatcacaaatacatgcgatcaattggaatgaaatgctagcatgccgcggggcatttgagaagaacacaggctagtttgccaaggggaatgtgaacaggaacatgtcaaatggtccagcaggctgggtaatgtgtgttccctcctcacagactgagagaaagggaacactcacagctactctctaatgagttactcagg

SEQ ID NO: 101439 - DNA, 192 bp, Homo Sapiens
gcctactactactaaattcgcggccgcgtcgacccttaattatccccagtttacaattgtctcattcatctcccctgtaactgttccacaggtcgctgcagtaaatgagaatgagttctcagttaacttacctggtaaaataagggtaacataaatagagaaagagaagacggtaaaggtcttggcggggat

SEQ ID NO: 101440 - DNA, 551 bp, Homo Sapiens
attcacttctaagcttgaacgtggtatggttgtggtatggaaccaaggcaagactccagtctgcttacatctgactcagagatcctacaagaacatgccgactgtccctgtttaaccaaatgtcagtccaggcagcattgtctgtgtccctgattgtgcctttctctagtctgggaacactgccaggcagtgtatgtcactagatgtaaataaggccattatttgattttatgaaactctttttggaggttgagacttgtatattctgtgtgacactcccatttggatatcccaaaggcaccttaaattcaatatgtcaaaaaactgaagttatcatttctgcagtctctcctttttgccctgaaaaagaacatgcacttgtttttcatatttccttatctcttggaaagacatcttgaccactcaagaatgtaagctggaaacctcagggtcacctttcttctctgtcactaccctggcttagtcacccttacagatgtgcctcttaaatatttttcattcgtgtctctccctattcctactccccaccc

SEQ ID NO: 101441 - DNA, 475 bp, Homo Sapiens
ccatacaccacccaaccaacgggcaccagggtccccagagaccagagccaggagcccctttcagcctggaggcgccctgaggggaggcactggtcttgtggctctctgggttgtccccatccttctcttctggcccccgccgaggggcaccaggaattagcacacacccttcttccctcctgggacctgggtgaaggactgcattcttcgcaccacaccttcagtggacttcactgcacctgcaaccaaccaagatccctttgcctttcaggtgtctgggcctcctgcctggatttcggcagatgctcttctcaatgtcccggcctgtcattctctggtactcattgaaaactatggggatgacagaggcttatattatgaactgaaatgtgtctccccaaagttcatatgtggaagtcccaactcccaggacttcagaatataaccgtgtttgggaacagtgaggatcctctag

SEQ ID NO: 101442 - DNA, 387 bp, Homo Sapiens
gcgtcgacgcttcatcagcaaagagagtccttgagaggggcacagtggggagtaggaagcacttctgagctccctctctgtctctgtctctgtctctgctcctgccccaccctcaacacagaggcatatgggcacattgtgaaaaggcagtttggagaaaagaagccacaaagaaggagcaagtgaatactccaaatcctagcccagctttgctgtttaacttctgggtgaattcagacagatcacctcctttctctcattcttgagtgtctattttataaaatgaggcgccgggtgagatgagtttcataggtacccttcagctctcactccgctggattcttcaaacaagggggagggcacactctacatgactgctggtcgacg

SEQ ID NO: 101443 - DNA, 468 bp, Homo Sapiens
agcaagagccatgctgccctgaccctgccacatatccgacagaaggccccctgggatcagctctgggtatgtttgggaagccaactccatgattctgaggcacaccggacctgaggatagggcatggttgaatggtcttagctgttccagaaggactgaaaagcccaagagatttcatcagtatggatgcaggcacgggcttcccagtgggctactcaggagtgccctgcacaccactcttgtgtgtgggcacaggctcatgtttaattctgcattgtattaagctcattctttttctgtgttcccttatttctcttcataaaacatctttttgaaagtgtagaaaacttaaatgactttttgtatacttttatctgtgccttgtcttgtgtttgaccaaaaaataataagatccccaaaaacaaaaactgcagggtagcctatttggatgatacacacgttgtgctt

SEQ ID NO: 101444 - DNA, 136 bp, Homo Sapiens
taagccaccgcgcccagccttgtatatattcttaaagtttcaattcatctcttcctcaacttctgaaactttcccactctaaagaatgactaagaatagaaaaatctgattataatcaaatggttgaatatctatc

SEQ ID NO: 101445 - DNA, 414 bp, Homo Sapiens
cgtcgaccagtttacaggaaataaatgaaagaaggaccgacaaatgtcgccacaaagatatcgtcaccacatccaaattgtgggagattttatatgacaaatgacccatgtttttcctcaggaataaatagcataggggccaaaagggaaagggcattgctacagaggatcagacactcagctgccatttccagaaaatgcactgggtggactaaacttggatcctgatccaagcaaatcaacagcaaaggcacatttttgagataaccggggaaaactgaagacagacccggcgttaatagatgtgaatgcataaatatggatcttgctgaatgggataatgatattgccatcaggccaaagtagtaaagagcccttatcgtcgacgcggccgcgaatttagtagtagtaggc

SEQ ID NO: 101446 - DNA, 209 bp, Homo Sapiens
gcgtcgaccaaagggttgatggcgaactccggcgtcatacgcagacgcaagctcatcgccaaatgccgcttttcctcgggaagagcgttgcgtagcagagatatcaaaccagcactccccttgccgacgtcgatgatcccgatcatcggcagccgggtgatacccggcgagaggcaaagcgcaaggatcccgtcgacgcggtcgcaaat

SEQ ID NO: 101447 - DNA, 381 bp, Homo Sapiens
gcgtcgacgggagccgaaaggcgaaagtgaaataccactacttttaacgttattttacttattccgtgaatcggaagcggggcatcgcccctctttttggacccaaggcccgcctcggcgggccgatccgggcggaagacattgtcaggtggggagtttggctggggcggcacatctgttaaaagataacgcaggtgtcctaagatgagctcaacgagaacagaaatctcgtgtggaacaaaagggtaaaagctcgtttgattctgatttccagtacgaatacgaaccgtgaaagcgtggcctatcgatcctttagaccttcggaatttgaagctagaggtgtcagaaaagttaccacagggataactggcttgtggcagc

SEQ ID NO: 101448 - DNA, 422 bp, Homo Sapiens
gcgtcgacactcaccaaagccccaggcctgaatcttttgctgtctgtagggatcctttatttggctgtctcccaaagaccagacatgcatgtgaagaaacccagtgcacctaaaaccaaacttttcagcttactgaacaatttcctgattacctccctttccctacacaccatgtgggtaaatggcattaccattctcccatgtcccaagctgaattagtcctttgtcacctttgtttctttttagccccactccacttaactgggaaatatttatgctacaatttgaggatgtagtttgaaggcagatcgaaaaccaaagaaaatgctgattggtataagtgatactcagaaggagggataaatggcctaagaaataaaagtggtttgcttcacagggagaaaacctatcatttgtcgacg

SEQ ID NO: 101449 - DNA, 201 bp, Homo Sapiens
cgtcgaccctagtaaacctcttgctcttggtatctgcttctggagcagctcaaactaacacaccaaagaagtgctgggtggtagagacaagccttttagattccttgtggcactggcctgcctgctctggagcccagctctggggataaggtcaagagaagcatgccctgggttggcagggagaacctggggcgtcgacgc

SEQ ID NO: 101450 - DNA, 527 bp, Homo Sapiens
atcttggggttctgatcaagtcacaaaagggcacaaagcacacactccaggctgggtgaatgcacagagaactgtccacaaggaaagattaaataattactgttaaatagctcatcaaagctttgggggtgggggtaaaaagttaagcttctttaaggagagtcctgctgcaaacaagaaatgcaagcttctcctgaaagcttttgcattggggtgagtagggaggggttaggatagaggtcagggcctggggagttagagctgcaggttggggagacagccggagagccacggtaagaacaggaggaggattttctggattcggggtggtggagtagctggagctgacataggcccctgccctttggatattaccgtggtcctgccagtgacctcccccaacagggccataccccaaggtttcaagtcctttgtaagagtcaggcaagtcgatcccaaatgatacaacacagcaaagcagcattggctccccaggcatcatgaccagacccagaggaggtcgacgc

SEQ ID NO: 101451 - DNA, 212 bp, Homo Sapiens
tctgcagatctttatccttttcctggatatgtaatgcgtctctttttctatggctgattgtcaagttttctatcactggttttcaacagtgtgattatgatgtgccttgatgtggttttctttgtgtttatgctgcttggtgttcattggatttcttggatctgtaggtttacaatttttatcaaaatatatcaaattaaaaaattttcacc

SEQ ID NO: 101452 - DNA, 405 bp, Homo Sapiens
  misc_feature (62)..(70): n is a, c, g, or t
tattgtttaaaaccaggaaaaaaaataatgtaagggtctgttgtaaatgaccaagagaaagnnnnnnnnngcattcacaatcatgacacggtgaaatccaggtctagggtccgattaatttatggtttctgcgtgctttatttatggcttataaatgtgtattctggctgcaagggccagagttccacaaatatatattaaagtgttataaccggtttaatcccttgaatcttttcttccagatttttcttttctttacttggcttacaaaatatacaggcttggaaattatttcaagaaggagggagggataccctgtctggttgcaggttgtattttattttggcccagggagtgttgctgttttcccaacattttattaataaaattttcagacataaaaaa

SEQ ID NO: 101453 - DNA, 802 bp, Homo Sapiens
cagcacatggtctgcagttgggaaatcaagaggctcctgatgacagtacaggttgagagaccaagtcttcccatgatgtttccacaaaatatcaacaacagccattacctgtgatttttaacaagacagggcttgtaagtaacccaatggcaggcccacggttattattatcagtgtatcctccagtccttatctaaagtagaaatattaaccatattacaaaagttagcttctccttggccacaggctgagctttgtcctgggcaggagtccacaggctcattcgttttcccaccatgtccccatggaagcatgtgaggcatttcaaagcccagtgggcctgtttggaggcaggttctcccacagacatggttgtgcaccactgaaaaatagtcacatgacttttctgagcccataaagtagaaatattgccccaaacaatccctctggtcctcaccactccttaaattcagtgacagactctagatggatgttacagctcatctctgcctgcatctccagcacagcagtgctaaccccaatagcaagtttattccttgtccaggatctgttattacagattacaattaaatcaccaggtttatcttcactgctggcaagcattcaaaacacaaacatactcatgatctcagtatgtaaaagagattgaagaattaaaatagttcaggcaagggggctcatggctgtaatccccacactttgagagacaaggcaggaagagtgctcaaagccaggagttcaagatgagcttgggcaacatagcaagaccgcatctacacac

SEQ ID NO: 101454 - DNA, 563 bp, Homo Sapiens
agccaaattctgtgtgtcttgttcacatagtagtaagaagtagcaagaagactataacttaaatagacaaaaagttattgttggggcattgtatatcatatggagctgtactttctagaatttctagggtactttatgtttcttgctccctaaaaagaaaaacaaattagttatataatagtaaattaaaattgtataatataagccctacatgggtatttgtggcaattcaggagtaattgctttatcatcattctgttcagaagtaattgcattgcttttggtgactgtagcttacatttagaattcagtcagttgggtcatatgccatttttataaatggagaatataatgccataaactgtaaatttttgaagatatatggattctgattttgctgaatattttaggttttttgtttgttgtaaaaactgtatttctaccaaaggaatagaatgttaaatgcttattcagtaagaattctaaagcatgagttaagttggaataaatgacttaaaattatttcttaatttgttatgaataaactttttttgaagtttaaa

SEQ ID NO: 101455 - DNA, 479 bp, Homo Sapiens
aatgtttccaacctggagtataatattcagatataaaacagttttgtcagtctttcttagtgcctgtgtggatttttgtgaaaatgtcaaagagaaaacttatatactatttcccttgaaattttaaactatattttctttacaggtatttataatataccaatgcttttatcaaacagaattttaaagagcataataaattatattaaagaaccaaaagttttcctgagaataagaaagtttcacccaataaaatatttttgaaaggcatgttcctctgtcaatgaaaaaaagtacatgtatgtgttgtgatattaaaagtgacatttgtctaatagcctaatacaacatgtagctgagtttaacatgtgtggtcttggtattcttaagggaacttccacattatacatttgatgtattgaccagaatatgtaaaatatgcttataaatcagaaaaataaattgtttctcactaagtc

SEQ ID NO: 101456 - DNA, 598 bp, Homo Sapiens
catttttgacttatggtatttttaacttacaatggctttattgggacatagccccatcaaagttgcggagcatgtgtacatactgtctataagacacttgctttatattcaaagacacaaatatggccaatagtgaaagaatggaaaaagatatttcatacaataaaaattgttataaaacagagaaagacattatagttgtataaagcatcaatttatggagaaaatgtaacgattataaacatatatgtgcctaataagaactccaaaatgtatgaagtaaaaactggcataattgaaggaagatatagagtgttctataataatcgtttgagacttcaatactccactttcaataatggatataacaacatattagaagatcaaaaaggaaacagaaggattaaacaataaactaactagacctaacaaatatataaagaacacaccacccaacaagagaatccatattcatctcaaatgcacatggaacattctccaggatagattatatgttaggctataaaaaaagtctgactaaattaaaaaacaatgaactcatacaaagtatcttccttaaccacaatggaatgaaatt

SEQ ID NO: 101457 - DNA, 468 bp, Homo Sapiens
tttcctgtttaactaggagaatacaaaacctaagtcaggaaggatgcaaagaaagaagcgaagtctgaagtctgaacacatccctgccacagaaatgctactgtctggaggagaaatgggaatatatcaatcacctcatgagaaaagccaagtcaatgtggcagcttctctttaaatgtaaagctcaggtcctctgacccagcaagtcctgccagagggaggtagggagcgatctctggtcctatgggagatgcacgaggatgttcacagcggcaatagacagggcaacaccccggaaatgacaaaggcaccccctgtgcaatggatttgtaccaattgcaagaaggaagtagagacatatacactccagggaaagatccaggtggttaaatgggaagaaaaaaagaaggcaagaaacatgtaatttattattttgtattttaataccaaaatatgtgttaatataag

SEQ ID NO: 101458 - DNA, 655 bp, Homo Sapiens
cacaggtacccaggccctggaaatcctggaaatgccctgctccttctcctcatgccctaggtcccctgtgagtcccagggattctttctttgccacatccattcctgctgtctcatgtctagcctcactccaggctcttgttgtcctcagcctgaataatcacaaaatttcctaactcatctctaggtaactggcccacctttgagccagcgggtctcaccacgccttctccccaccagaactctccagcggctccccatcattttcaggatcagactcaaaccccgtaaaagtctgatctctgaaacctcaccatccactcttccttgtcactcttcaccttccctcctactctggtcacactgcataacacgcattctctttccaggtttccacctcactcctcgtgcctgtctatctttgtcatctctgttgccgtgtgtctaaatcctattagctcagaaggtccatgttcgatgccacctcttccaggcagcctcacatgcgggtgcatccttcatccctccccactgtggtcccacagtccgcttccgtggtttatgtcctcactcaactggaaactccttgaggacagtggtcttatctgactacctttcgcatttccatggtatccaaataaagccttgtacacagt

SEQ ID NO: 101459 - DNA, 535 bp, Homo Sapiens
aaaaacacaatttaaaccttattacaatcctgtgaactagctactgtcattactataatgtagatgaacaaactgggacatggacagttgacaaaacattcccaaccacacactaggaatgagctgggataggaaaccaggcactctggctctattactcctaatgccatacacacgagctgacttaggagaaaacagaaagtactgttcgcacaatactaactggttctaccgccactgttcgcttgcatttgttttttccttcttgttaggaacacgtatctttgaaggaggtatcatttctcccacaattctccatttaacgtttcctacagtgttaagcaccaccgaggcctctcatagccccagagaagaagtaatttgcttcctagaaatcctcactgtatccagattccctcccagaggagccatcagttctcatgggtggcactttttctccagctgattacactttttttctgtaccagttaatttttccaacttttaattgaataaaggcagttttcttaaaaaa

SEQ ID NO: 101460 - DNA, 352 bp, Homo Sapiens
accaaaaagataataaaggaatactactaacaactctacacacataaatttgacaactaagatgaaatggaccaattcttcaagaagcacaaactactataatccactcaacgttaaaacaataatttgaatagccctgtagctactaagtaaactgaatgtgtaatttttaaattcccctgaaagacctcttcaggcttaaatggtctcattggagaattctaccaaatgtttaaagaagaattaacattaattttatacaatctcttccagaaaatagaagaaaaacagatgcttctcaattcatgtcggatccctacgtaactttgataccaaaagagacagacagttt

SEQ ID NO: 101461 - DNA, 487 bp, Homo Sapiens
ttccatcctgaaaggttggttcaaggaaaatgtagtagaatgaataatgcccttcccaccacgaccaccaccaaagatatgtcctggtccccagaccctgtgaatatgttaccttatacggcgaaagagattttgcagatgtgattctgttaaggattttgagacggggagattatcttgtattatcagggtgaccccagtatactcacaaggatacttaaaagtaaaaggaagtagaagagttcatcagaggaagatgtgactgcagaaaaaaggcacagagatgcattgctgctgcctttgaagatggaggaaggggccacaagccaaggaatgcagccaacctttagaatctggaaactgatttcccctagagcctccagaaggatcaccacagccttcccaaggcttccgttttagcccagtgggacacatgtcagactttcaacgtgtcagaactgtgagataataaatttgggttatattg

SEQ ID NO: 101462 - DNA, 442 bp, Homo Sapiens
ggttagtaaataagtttaatgtacatggataaaatattgggtaaagttgacgaccaaaagaggcttaagtgataacttagaaccacattaggaaactttttctgtaaagggtcagatagtaaatattttcggttttgtgggccaatctctgttgcaactactcaactctgcccttgtagtgcaaaagcagacataaataatgcacaaagtaagggacgtggctgtgttccaataaaactttatttacaaaaacagagggtgagccagatttggcctgtgggcaataatttgctgacctcttgcttagaataaaaagacaatgacatgcaatagaataaacataaagtgtgctgttcagttcaagaaaccaactgcacaagcacttaaactcagcatttaaataaaaaatcaagacaaccagggggtgtgagttgtcctgagt

SEQ ID NO: 101463 - DNA, 482 bp, Homo Sapiens
ttttcgcagaaagtccctcaagtttattttaataggctttaaacacaaatatgcaacacaaactgtaggggcaggaaaagggatgttgtgaccccattcattcaactaatcacggccagggctgcccccacccccatccattctgacatccagccagaaccttgtcccagcatgtggtgggcaggggcggcggtcggggggcaggccgcccacgcatctcccaaatgccacgaagagacaggtggtatctggtgggtctgtctgaggcaggtgcagaggctgcagcatccgaacgtggaaacgtcgctccagcctggaaggggacagaggcagacgccacgtggagagaaatccgaattctgatggtgtgggggggtggaagaattgagaaggaggcacagcagctgccgccccatgtgtttcgggagcggtgatggctcagatgaggagccatacatgatgggtgtccgtaacaaaagaaa

SEQ ID NO: 101464 - DNA, 348 bp, Homo Sapiens
aagttctaatcaactagaaaatgtgacgtgggtgcgtactgtgattatttaacattcattattcactgtatgttaggtgcttggttgatgtggatccccagggcctagctgctgttctgtgtcactcctgataatttttaaattgactatgttcttttaaccatgttttaaaaagttgaactaccccaatgtgaacactttccatttttgctatataatgagagtactttcattcctttaatgtttgctttttcctttgatctaacaatttctcttcaaatttcacagttttctgttgctttaggattgaaagaaccgattagcccgctgggagcgtgaaacagactt

SEQ ID NO: 101465 - DNA, 305 bp, Homo Sapiens
tttaatttcagtacttcatttttctgtggcacaagatactctaggctcatcttgtacagttcatatcccagttctagaatcagttcattttctaaggagtcctggttccttttattggaaaccaaaatctgggcaccaggtgtgctcccattctagttgttttctgaccacataactgctaacaaagatgcttcactctggctacactgatgtgaactttgaactttagcagaagagctcagctctagagaacaatgagctcctacattaccttttttcctcaaagaataagtaagtctaagcag

SEQ ID NO: 101466 - DNA, 424 bp, Homo Sapiens
cagttctctgggtgcttgaagtacgtggcgcctggaattggctgtaccagcgtctcccatggaggcctctgctgttagcagccgccccgccctggagatgtttttatcccattttcaaatgaagcctttgatgtttgagacgctgaggaacgctggggaactcgtccagcaagtgtacaggcagagcctgcattgggggcaggggccaccggggaggggactctggggcttcgtggggccaggagagagcccaagttgcggctggctgcaggggccgtggccttgtgcaggaggcagttctgtgctttgccccagggcaccaaccgcatggcagccccacccactgtggacccagaggttctttgaggaaacctggtgtggcacaagttttaatttaataaacagtttgggcacgggggctcat

SEQ ID NO: 101467 - DNA, 462 bp, Homo Sapiens
  misc_feature (214)..(384): n is a, c, g, or t
atcatgcaacagtatggatgatgcccaccacattggtgagggctatcttctttactcagtcaactgattcaaatctcttcctactatgtcctttttctcttccaggagaaaaaacttcatagccacacctagaaataatgttctaccagttacctgggcatacttagcctaatcaagttgacttctaaaaataaccattcataacaaccaaacnnnnnnnnnnnnnnnnnnnnnnnnnnnnnnnnnnnnnnnnnnnnnnnnnnnnnnnnnnnnnnnnnnnnnnnnnnnnnnnnnnnnnnnnnnnnnnnnnnnnnnnnnnnnnnnnnnnnnnnnnnnnnnnnnnnnnnnnnnnnnnnnnnnnnnnnnnnnnnnnnnnnnnnnnnnagcttcaccccttgagtatgggctgaatttagtgtcttgcttccaaacaatagattatgtaaagggaaaaaatagtaa

SEQ ID NO: 101468 - DNA, 404 bp, Homo Sapiens
tccaaagaactggaatgagaaaactcctcacggcacattatgctgcatggaatgacaatcatcctcggggaattagggcagcatcttctaccacttttaaaggctaccacgagacggggtggaaatgccaaaaatggcacctcatctctgatcaaagattcagagcatgcaagtgttgatgccatgaagagtcccagccttctccccactaaaataccaggcaacgcttagcagctgctgtcctaacaggctactttctgcaaccgtgacgcaggttagttcatgtggttaaaggtcagaacgctggccccttacagagctgaagtgctcccacactcatcactggctctggagggaaaagaccactagctgtaacttctacaaaactttttttcacaaaatgt

SEQ ID NO: 101469 - DNA, 460 bp, Homo Sapiens
tttcttcttatatatggttgcctctttctacttgactataatcattaataatttctttggaccagcagaggaaacaggtattgatcacaataaaacattgcatccacaaacacttgctatagcaggttatggtctccatggaaaccctccaatagaaccaatctgaattcaatttcagaagtaatgagaacagataattttacactcaatcaatcactgtcagctgccgttatcagccaatcagtcattatgtcagtcagtcacactctcaacaaacttcttctgtggcatggtcagatgagaatgttttgacatccagaagcaacacgagaaaattggctcatctttcctggcaagatgccaaagacacagcactgcattgtgtttgctaaggcaataaacagtccaatcaaaatacactgtggtagcggaagattctaggcagcaatttcaataattg

SEQ ID NO: 101470 - DNA, 590 bp, Homo Sapiens
gagaaagatagaggcttataaaattttggtatcattggtaaaacttagcttcatcatatactctgcaatatttaacatagttaacaactatcacagataagaccaaaggtcagtttacaaacatctacactgcaaacccaagggaaagtgaatttatactagaataatgaaacactataaaaatgttctttaaaaaacttggagaatgttattttatggaattctctatagaataaaatacaggatgtaagcagtatgtaaggaaacaattcaaggagaaatgaaggacaagatgggtttgaaatatccactaactctcaacctctgatcactaagtcagatgcccagtgtgaatccctgaagttccttttgagcatcctctgcttatccattgtgccttcttctacattttgccttcattttacatgcatggcaggagggaagtataatagtgagatagaataggcgggctactcctttattctaaaggctgtaattcttacagcaaccaatatatgtataaaccattgtacttgtccaaaaatgccaataaattttaataaataaagcatgatcacttccagaaaaaa

SEQ ID NO: 101471 - DNA, 432 bp, Homo Sapiens
tcaagtgtcccaaatcagggtagcaatcttgttgccacatgtgcagcaaacaaagtggaagtatagatcttcttctcccttagggaggctcttgaaggagcaggaggtacagtactgggtagcagtctggccctcctgtcgtctggttggtgttggggcctccagccagggccctctaggggaaccaagcctctgctctcacctgtgggttcttgcccatcagggtaattgtattgagaactcaaatatacgtgcacttacatgtgtggttcgtactcaagtgatctattatctagctgcaaagcctggctttgatttgaaattttgtaaaaatttcatggcacccaaggtttctgattctgacccagcagtggtcctgaagagagatgatggcaagtcttgtagtcattttgattttaattgaagggtgag

SEQ ID NO: 101472 - DNA, 399 bp, Homo Sapiens
cataagccaccgcgcccggccaggaaacacttgattttaacttgctacttggactactctgaaagtcctgtgtaatgattctgaacatatatttcagaatatgacacattaattcatgcataataatatatagtttgaattatgaacttacctttcatgaagtcagagatgcctctgacattcctgcatttatccattcagatggaagcttgatataaaagattataaaacttttaacaggcttaacttcttctaatttgaaatgcatgcactacctctttgtagcttctaaatgaactggcccaaaaccagtcagattttacagttggatggtaggtttctttactgaactatgaaaacagcagtgccaatggggaaaatgtgattgctgcattaaaa

SEQ ID NO: 101473 - DNA, 230 bp, Homo Sapiens
gcatgggagtggggtggggagtcggggtgtgcaccatgttcagctgtttatattatctttaaagtgaccaacaaattttcttttttccaggtaatacggaaaactagagaacaggaaatgaagaattgtttatttttcttcttgagcacttatttcatgtcatttaataattttgaggcaaaaaataaacagaaataatatccaaagacattttcagtttgttcattgat

SEQ ID NO: 101474 - DNA, 511 bp, Homo Sapiens
aaaaaatcctcaagtaggcatttttttaaacttctaacgagccatgttaacttataaggattaaaaaagacttttagttatttctgaatcctttaggagttttctcctcaaatacacaaattgtcttgcatcaacttcatttacatggaccagtttcctggcccccagaagcttcagaccctgaacattgcactgcgctctgcccctagctctccagtaggtggcggtgggtaggcgcagaaacggcctgtgttaggttggtgctggcctgtgcctggggcctctctctgccttttcttctgaattagaaggagtttcctcttggagcaaatagctaatttgcttgcttttgtgttgataggaggagcacagccaaattctttttactgatagataaacacgtgtttctatcaattaagcttttaattctcagtgttttatttttccattatattccaatcagtaatgaaaactgctacaattacattaaagaaaaatggttcttttggca

SEQ ID NO: 101475 - DNA, 679 bp, Homo Sapiens
caaagtgatcatcctaaacatgtgactcactactcgtaaagtctttaaacagagtaagtgatgtggggtgtcaataatgtttcagacttaacggggatgagaaagcaaacacaaagtatattcaagaaaaaaatgaatcactggtcagatccaaaggtaaattatcaaagtggttatgattttaagttataaagaaacactagtgttgctggaacataattaaaaacctggaatcatgcttaatgttagctgtaaaacaaataaacaatctgtacaatcacagttataactatatagctttcatgaaaaatctatcctagactacaaagaaaatttgggtttgaggccaatacaatttcatgattataatacataactgatacatctcaacaacataaaaattgtaaggagaaagagtaacaacagtggtattactttcaagaattgtgttgggaactaaaaaataatttcacaaaattagataaatatatccagtctgacataaacaccatatggtagctgccttaagagataggagttgtatgttacgtgttaaattatgacacagaggtagtagtaagagatggaaagcaaatgaaatttgcacagttgggtctgaagcctaatattttctttttctagataaaaataaaattgcaatataggtatggagtatttt

SEQ ID NO: 101476 - DNA, 466 bp, Homo Sapiens
acatggataccccagtcccagctgtgctgaagtgtcaggaagcctcccccgaccccaccctgaacaacagtgaggggggttaggtgtcctcaaaagatctactctgtcaactggagttgttgagaaactcaggaaagggaactaaaaaggataagaaagtggtgcattccagtgtcttcctgttctctgttgcagagagccagctggtggaccgcagagacagacttccagctcagggccaagcccttcaggaagggagtcatgcaccaaactcagctaacagaccaccagggcaccactgggtctcctgctggggaacagcacacctatgggtgggctctaggggtggggtggcctggttgctggttctgctctgccacttcttagctggacttgagcaatttgtaacatttcttggctcagtttctccacctgcacaatcaaaatatcactaccttcctccaag

SEQ ID NO: 101477 - DNA, 613 bp, Homo Sapiens
tgtctctctatgtcactcatcattcctctcttacctgtctgtctcttgagtatatgtttctctactgtgtgtgtaagttctctaccactagattggtatcgttgttttgaaaccataactccgctctctctcctctttccgcttctgcattataatcctgactgtgaaaccaagggttcctagaccagataggcaaagaaactccagtgtatcctgagctcttgagaaactcccccctaatttgaataattcatggaagggcctgtctgaattaaaaatctgaattacagaattaaaagcagtatttgaaaatgtaaaggatttaatatcctggtatttaacagcctgaattattccagggaactactatgtaagcttaggcaggaacatgttgattaccaacatgtgagaagtgttgacactgtttgcttgaggaagttaaacgcttccttaatgtgtgcatcgttaatttgttaggttaaccctttcttgtgagagaaaaaggcaaatcttaagaacagcatttatcactagctttctgttaagattaaatattccaaaaagaaaagagattgctcttacaaagaacagaatatagaattctggtgccact

SEQ ID NO: 101478 - DNA, 553 bp, Homo Sapiens
tttgccgccagaacacaggtaagtgccgtgtgtggttcccgcgggcctggcctctttacgggttatggcccttgcgtgccttgaattacttccacgcccctggctgcagtacgtgattcttgatcccgagcttcgggttggaagtgggtgggagagttcgaggccttgcgcttaaggagccccttcgcctcgtgcttgagttgaggcctggcctgggcgctggggccgccgcgtgcgaatctggtggcaccttcgcgcctgtctcgctgctttcgataagtctctagccatttaaaatttttgatgacctgctgcgacgctttttttctggcaagatagtcttgtaaatgcgggccaagatctgcacactggtatttcggtttttggggccgcgggcggcgacgaggcccgtgcgtcccagcgcacatgttcggcgaggcggggcctgcgagcgcggccaccgagaatcggacgggggtagtctcaagctggccggcctgctctggtgcctggcctcgcgccgccgtgtatcgccccgccctgggcggcaagg

SEQ ID NO: 101479 - DNA, 870 bp, Homo Sapiens
  misc_feature (692)..(706): n is a, c, g, or t
cgaaggacgaacaagtcacaaaaacttttttcaacctttcactcaggtccaccactgctctttcctccactgaccctctaccccaatttctttttgtttgaagagtgaatagatctctcttcttcactctttctattccccacaccaaggcaaagagaatggggaggtatgactttttggatgtaataatttcagaaatgtgttgtcctaatttaagtttggagaggagaggatttgttagtaaatctggaacaagcggttttagagggagcgtttgagggacagactgtcagaggcaatctatagccctagccgattgagtctcgatgaaattaacactgggaaaaaagccccaacaaaatactgcatgtttcagacagttttaattgtctgcgttaggatttttcccctggaccggtgatgcttgggaatctaggctgcggactaacaataaccgaagatggaaatgtgacagcttctcctccacacccccacccaaggaaaaaatcctaacgcagacaattaacactgggaaaaaagccccaacaaaatactgcatgtttcagacagttttaattgtctgcgttaggatttttcccctggaccggtgatgcttgggaatctaggctgcggactaacaataaccgaagatggaaatgtgacagcttctcctccacccccccacccaaggnnnnnnnnnnnnnnngccatacaatctggagtgggggtggggtctctcttccttgtcagactggggtaaatcaaaagctggtcacgctgggtttttcaaaagcttctcatttaacaagtcctatttgcttttatctttttgttatggaaaaatatattatacaaatgatttcttccttt

SEQ ID NO: 101480 - DNA, 497 bp, Homo Sapiens
ttggagagacacccgcttgtcccctggaaagcatgacacgagaatgtgaggcttgcaggtgccacagtcatttgcaattatgagggaaacaactggagctgttcagagaacgtggtagggatcctcaagatgaatcagacaacaagggaggcagaggggaataacaaaaggaaatggagtccttggcattatcatcagaaccacttgatcaggcctcacctgactgatctacttatggactttcctagggactgatgggtaggagggttatttgaatgggcaagatatagaaaaggcatccttttatcatgaatttttaaaataaatgcactaaagtacagagaccaatacaacaaattctgtgtccaccccagagctaacaatatgctattatgcttgattcagatattttaatttttttaatgaaggaacacatgacagatggaatttggtctgcattgtggtatttctcagtttgatttccctccctctcccct

SEQ ID NO: 101481 - DNA, 429 bp, Homo Sapiens
agagaatgctcaatatttctgacatgcttggaataacaagagatgtaaaagcaactcagaattagattccccttttacgaagccagataatgtggctgaatcactgaaggatttcaatctgagggcacaaagtaggaagcaaattactatttactctctggtaagaaaaacagagttagacaaggtctgcctttgaatcacaatagttgtatgtttaaatggcgtttctttctggcagttagtaatgggacctggcagttaatgatgatgatgacaaacacttagggagcactcactatgtgcccagcacaggtctaagtaccttctatagtccaactctttttatcctcaaaacagccctaaggcagctcttatttctattgcacagatgaggacactgaaggacatattaggtacttagagaatatt

SEQ ID NO: 101482 - DNA, 437 bp, Homo Sapiens
taccatttcatccacaaaacatgaccttccctgaaatcacagtctccaatatgctgggccaggatggaacactgctttctaattccatttctgtgatgccagatatacgaaacccagaaggaactcagtacagttcccatcctcagatggcagccatgagaccaaggggccagcctgcagacatcaggcagcagccaggaatgatgccacatggccagctgactaccattaaccagtcacagctaagtgctcaacttggtttgaatatgggaggaagcaatgttccccacaactcaccatctccacctggaagcaagtctgcaactccttcaccatccagttcagtgcatgaagatgaaggcgatgatacctctaagatcaatggtggagagaagcggcctgcctctgatatggggaaaaaaccaaaaactcccaaa

SEQ ID NO: 101483 - DNA, 414 bp, Homo Sapiens
ttaatatgcaagaaggatggaaacttaagttttaattgtgaatgttacagtggtaaaatttacagatttgacgtaagtatatttttgggggcacatagtcaaaactaagaaattatttaccagctcagaatgtggtaggagctatcagaacttagtgatcaagtgaagtcgtagttactaatttctgatgctcttcccctgcagaagagagctgtgggaagaggactcagccacaagacatttggtcctaggtgttggtaatgccacaatataagggcttccttttcattttattggagaccacatattgataactagaagttttaagggttacatgtatgtttttagacttgcaagcaggttccctaaataaaatttaatatgagagggcagaccttgaaatggaggcggagg

SEQ ID NO: 101484 - DNA, 860 bp, Homo Sapiens
  misc_feature (398)..(406): n is a, c, g, or t
atagcatctaaatgaaaatagcagtttcctgtctggaaagattcctaatagccatagaaatgagaagaccatggggacaaagaggaaatcagactgtgtaggaaatgctgattacaaatattgtatgttggtggctcacaggaactaaaatactaccaagattagagtttttcctgctagtttcctggacagacccaggcggaacatcaaaggctgagacctgctatatgcccatcctgcaccccaggaccagctctgaccacccgacgatcttctctggctgttagtgacagaaacgtcctaagttatccatcaggttctggtactagtcactgaatgtttaaaaaatgtggtgtgatttcagaagccttcttatttcttatatttattcagtagannnnnnnnnggccttcaaaatattgacttaagaaaagcatttagtagttgtctttaagacatttatgactctcccataaaaattctcattcggtctttgatcacaacatatatatcgtgtatattctgtctatggttattttgaaacattcatcagagaggcaacacggctcaacagaacagaccctgtagagttctgggaacctgtatgtgttttctctgtgtctggcatacagaaggtgctttacacatgctgtcatgaagactcacaggactgtgtaagatgtatatcattaaaattcttttttctccacaggagaaaataaaaatttagagaaattaagtttcccaaaattattcagctaatggcagaataataatacccaacatttattggaccctatattgcctatatagacactttatctttatgatctcatttaatcctcctaattgaaaccaac

SEQ ID NO: 101485 - DNA, 661 bp, Homo Sapiens
cattcatctggtcatttattatacaatgcaatagataccagtgaaacaacctctcaacaacaacagcaacaaaactcagaacattcacagtatctttggcattcctgcttcttctcactgagtcaccaaccaaggtacacacagcccacagtccagaaacacacacaaatggcggatgcagagcagagacacagtgaatgttaagtttactcccagatccttctggggctcgcgtcctaaacatactgggggcagatctgagatgagggcccacgttccccaggccccctgggcaaggcaagcgccgcctgttctgcccctctggaccgtggtgaatgaccatccccatgagaaacctgtttcaagaccccagaatacatagagacacacacatggtacatagtctcctggtgggaaacgacggacatggagttcatttttaaataggtggctttgtctgtggcaatataaaaatattttggcctttcaaggcaaatacaaaagaaactacccattaacatggctgagtgtctcagtcccaaacaataaagaacttgaagaggtttagccggaaactttgaagacagaaaatctgcccattatgttttccagacatttcgagggggcgagcggaggtcattggagcttgaagcccatttgg

SEQ ID NO: 101486 - DNA, 366 bp, Homo Sapiens
gtttataatcatttactcatgaaaactgaataggtaactaaggaacaaagatcaaagcactgttaaccttgcattggtatttttattctttctgttctgtaagtcagaagacattgttcatgagatgccaaaggttaaatccatttattagcctaaatggcatattcaattgtttctatcagcgactgggaaacttcagcctgtgggctggctgcctcttctagtaaacacagttttccattgagacaaagccaagccattcatttacatagtatctatagctgctttctaactacaacagtcaaaacagaacctatatggctcacaagtcaaaaatatttattatatgacacttctttaagaaag

SEQ ID NO: 101487 - DNA, 815 bp, Homo Sapiens
  misc_feature (35)..(35): n is a, c, g, or t
  misc_feature (43)..(43): n is a, c, g, or t
  misc_feature (194)..(276): n is a, c, g, or t
ctaaacgcccccttctcaaacatttgggtaggtgntaagcggncataaaacctcagctggggggacttccaggtaaagatgacagattaaactatgcatttacttctgttctttcccgaaaccctactaaaacatcagtgaatggactgaaattttttaaaaggcataaacccacaaagagaaagagatgttgnnnnnnnnnnnnnnnnnnnnnnnnnnnnnnnnnnnnnnnnnnnnnnnnnnnnnnnnnnnnnnnnnnnnnnnnnnnnnnnnnnntgcatgagctaacacacctagcctctgtgagtaattttaagactttccttgactctgccctggcagaagggtaaatagaggatctgtggactagggagcatcaggtatagttgataataaggctacccttcagaaaacacagggttctttataggccaaatactgacacctccctcccccagaccttttttcccactggttcctaaaaaactggccgccagactagtaccctgcaagaagatggtaagatgatccttctctggagaatctgaccagcccaaggagaaggagctaaagacactgacatcagagtcccccaatggtccacccaattcactccatagtgaaccccatactagcaagcatagccacaagtttgtaatcagctagttaaggctttgcttttagctatgatcagacactcagggatcaccaaacacctgaagaatgcccctaacataaaagatggagaccaaaacaagcaagaacaaggcaattcagaggacataagagaatccacagggagaagaaaacttaaa

SEQ ID NO: 101488 - DNA, 454 bp, Homo Sapiens
gtaattaaaaaaaagcacacagaaaatataactacaattagattaactttatcaaaagtaactctttcagaccaaacatccagcaaaaccacccacctcccttcagatataagcaaataatcttgccctttctacaaagtgcagatatctctgtatcccttttatttctcaaactgcagtccccgaagtgaagcaaacctttctctccacttctttccccttcagagattttggtgaaggcaggtttctcttaccacccatggtgaaaaggtctcaccacttgaatttccttgactgagcaaatcttctgcagacagacaccacagagccagcagcagcccattatctgcactggggaatgtgacattattccatctggggtcatatgtttccagaatgttgctttgtacttctatttttaaagctcccctctacccacccactttgcctctga

SEQ ID NO: 101489 - DNA, 634 bp, Homo Sapiens
gaaataaaaggttagtacatgacatttaattgattcggtttactcctacttgctggtgtgtttggagcctcagtgacttcctatttttcaaaaaatcaagaaaggctaaatttaagtggagaaaactaactagtctagtgtcattgcagaggagggctggatgaagttgagtgcttttgagattctcttccacagctagagaactgttccctgtgttctcacacatcagtctggaggttaaatgtctccggctagtcgtttcctgtgagttgagagttttcctttggtcatgccctgtgtactccttcactccgaaatgctgttccacactgttagataacaacagagcaaagctcacttgatgattcaagtgtgagaaatatgactgggggcttatccgaggggttcaggagaacaggagagcaccgtgcagttctgctcccggaggggaaggagaggcagcgtccgcatttcagctggtccttgaagaaggaggaggagctgcttagggtaaggaaaaggcatttcagttggaaaacacaggccagggaggcgttagaggatgtgagacattcatccagaagacgtggagttggttctcttctccgttggggagtccctcactcgtactcaa

SEQ ID NO: 101490 - DNA, 442 bp, Homo Sapiens
gactgctccttcacatttgtggacagggctctgggttcacctctgtcccagcatgtctgtcctgccactgagctggcaggcatttccgagggtgaagaaaaaagagagaagtggcaagagctggccctttataccacttccgatgttcctcccatgttactgggcatttttcaaacgttcatttcatttccaaatgtttagtgagggactcaattcctgccgcctcctggctttcagggcaggcaaggaagcggcagagatgtctgggcacacagtgtgaaggcagctttgctcaaacatgtcctagttgatcagttaattgatagtgattaaaaaccagctctgccttggggaattattactggttttgcgaagttctcaaaaacatcatcttcagtctctaactcccactccatctccccaccaaaaaaagagagagaaa

SEQ ID NO: 101491 - DNA, 682 bp, Homo Sapiens
ggtagggggtgttgagcttgaacttgaaagatgaataagaattttgtgagaacacaagaagggggaagatattccagttagaaaggcaactgcacagagatttgctgctttttcaaaaagaatagcatatttaaggaactacaagcactgcagtggtgctagaagataaatggaaaagaggtgaaaagagatcaagcggaatatctagactaaattattgaagcttgtatgccatgaaaactgttttactactgtagatgataattcaaaatctatgtggtagacagatcacccttgcagtagtgtagagaacaagattggaggggaacaagccaagagaccaatcaagtgactattgctatagtccacattaaggtagtgaaggcctacaaaaggacaatggttatatggacaggaataaagaatactgaggaaagagaataggcagaacttaagtctgaatgttggagggattataaccaatgtttactgagaattttgctaagtacctttttgttggtaatacttcatttaatccttataatactcctaatagggatggaaagcagtccaacatgctaaaagctaatttgccaaagaataagtttgccatatttaccaaatatttgtttttgggaatatttatcctggatatatttaataaatgtatcctggttaactc

SEQ ID NO: 101492 - DNA, 580 bp, Homo Sapiens
gacagtttaaagcacatttatatgcagagaaagacttaaaaatacaatttctgccaagtgaaatattaaacagcatgtttcattatatttgctatagatgccaaaagagttgccattttcaatgaggtatgtttcctgcttatgtaacagtcatttatcatagaagctgtaaaatgcaatctggaatttctcttgccaaattgctgcctgttcttgacattttatattattaaagctataaaatctataaatacttttagcacactttcactaaaagcagcactagtaagtagcaggccttgtcttgtatttcagtagccacgtcaaaacttctgagccaggcgaaatagaaagaggggtcctagggtattttatgcccagggcaacaaacgccaaatgctgacgtagatagcacttattcggttttgccaggagctgtgctaagtgattttcataaaatatgtaatttaacctacaggcaactccatgtggtattattttcacttttttacatagaaggaaatggaagcttagaaaactgaagcaatttaccgaaagtcagagttaacagagcaaggaa

SEQ ID NO: 101493 - DNA, 303 bp, Homo Sapiens
  misc_feature (116)..(252): n is a, c, g, or t
tacgacagaaaggccatggcataaagccctgacttttcttctctcttcactggagcttccagtaaaaagggcgcttgtgagggaatcactgtatcaatagcaggagccaacccagnnnnnnnnnnnnnnnnnnnnnnnnnnnnnnnnnnnnnnnnnnnnnnnnnnnnnnnnnnnnnnnnnnnnnnnnnnnnnnnnnnnnnnnnnnnnnnnnnnnnnnnnnnnnnnnnnnnnnnnnnnnnnnnnnnnnnnnnntgtttattatacccacagaactagcggcgctgcttgccaagtgcgggagga

SEQ ID NO: 101494 - DNA, 522 bp, Homo Sapiens
tactagttagtttaatcacttaactgcttaaccactatatcaccttggtcaaatcattccatgtcaataaaccttagattcatatgtacaaaccaaaacaaagtacagttaatattttgtatctcagaaaaattgcaggttcatttccagaccatcacaataaagcaactattgcaataaagcaagtcacacaaattttttggtttcccagtgcatataaaaattatctttatgccataccatagcctgttaggttgtcaatagcattacatctaaaaatgtacatagcttaattaagaaatcctttattgctgaaaatgctaatggtcatttaatatatcagcaagttgtaatgtatttgctggtggaaggtcgtgccatgatgttgatggcagctgacagctcagggtgatggttgctgaaggttagagtggtagtggaaatttcttaagataagacaacaatgacgtatgcgacatctctatgacttatcggttcatgaaagagttctctgtagcatga

SEQ ID NO: 101495 - DNA, 432 bp, Homo Sapiens
agataacagattatccttgctctggaatgttgggtatggtgtctggacttatttctgactcccagatcacatcatccaaccaaggggacagaaactggatgcctgaaaacatccgcctggtaaccagtcgctctggctgggcacttccacccgcacctcattcctacatcaatgagtggctccaaatagacctgggggaggagaagatcgtgaggggcatcatcattcagggtgggaagcaccgagagaacaaggtgttcatgaggaagttcaagatcgggtacagcaacaacggctcggactggaagatgatcatggatgacagcaaacgcaaggcgaaggtggcaccactgtgctggccacagaaaagcccacggtcatagacagcaccatacaatcaggtatcaaataaaatacgaaatgtgacagatt

SEQ ID NO: 101496 - DNA, 498 bp, Homo Sapiens
gttacgctgctgtcactttctgtccaggagctggcaccccaggtgttctgagaccttgagggacccagacctttgggtccaagagtttcccaaacaaccacgcctctcaggaacccacctggcggttccgtgagctcaggcaggcctgacccggcggcacagcctggcagggacctcgtccccaagcctggcagaatgagaggggttgaggtcccgagcgccactcctagccttgccgccttcaatagagaagaaatccctttgctagatagggtcccccaggcagtccccactggcgggacacaggggtccggctgtggagctcccctgccagcccctggagctccacgagggcctgttggtcccctgttcagaatggagtgcagcccgccagcggaaagtgttcattctgcataggtgtgaggctttatctgcacacaggacatgaaaaccagcagaaaggccctgagctgctgcataaccccatctgatttctgc

SEQ ID NO: 101497 - DNA, 700 bp, Homo Sapiens
gctgtttctataaagctgtgtgatggatattataactgttatatacacatacatataattttgttttcctttttaagagaggattcttttcatcctaaatcttttacctttcaatctttgtatctattattacacgtgctgctgaagggagcatggtttttatctatgatacttagttaacatatatattacatttatagctatgtagtagttcccctaaattcttgtaaaaataaatttttatttgatatttcatatatatttgaaatgtgagaattcagatgtaattttttaccttgttttggcatgtttgtatgttactttaaagaggatgtgtgttctaaaggaggacatgagctgtgtgttttcaagagaacaatagagtgcgtctcttggggaaacataataaaaatgaacttttctcaccttcacagcaattgtgatcatattggtctggattgattatttgctgcccagtgatatttttccttaatggggttgtggttatttgaacatatttattagctctggaagataatcctgtgctgttttttatgtagaaaaaaacataaggctgggtgcagtgctcacacctacaatccctgtggttttggaggtcatggcgggaggatcacccgaggccaggagtttgaggccagcctcagcaacatagcatctacatctatttttaatttttatt

SEQ ID NO: 101498 - DNA, 778 bp, Homo Sapiens
  misc_feature (12)..(12): n is a, c, g, or t
  misc_feature (147)..(147): n is a, c, g, or t
  misc_feature (150)..(150): n is a, c, g, or t
ggctggggccgncgaggaacccaaagagaatggcacgatttgggtgctgttgggcgcatgaccactgctatgggcgggctggagagaaagggctgcacatttcgcacacagtcttacaaatacagattcgcgtggggcgtggtcacntgngagcccgggcccttctgccatgtgacctctggtgcctgtgacgaaaagctcgtctactgcctcaagagaaacctacggagctacaaccacacagtaccaatactttcccaacatcctctgctcctaggcctccccagcgagctcctcccagaccaagacttttgttctgtttttctacaacacagagtactgactctgcctggttcctgagagaggctcctaagtcacagacctcagtctttctcgaagcttggcggacccccagggccacactgtaccctccagcgagtcccaggagagtgactctggtcataggacttggtagggtcccagggtccctaggcctccacttctgagggcagcccctctggtgccaagagctctcctccaactcagggttggctgtgtctcttttcttctctgaagacagcgtcctggctccagttggaacactttcctgagatgcacttacttctcagcttctgcgatcagattatcatcaccaccaccctccagagaatttttacgcaagaagagccaaattgactctctaaatctggtgtatgggtattaaataaaattcattctcaaggctaataaaaaccacattggcattttcctctgcaaa

SEQ ID NO: 101499 - DNA, 475 bp, Homo Sapiens
agtttttaattaatttaaaaaatgatcttcctacttatcagacacaatcacttttaaatatgagcagaaaaacgaactccatagccaaatgcaacattttgtgtcatactgctttacatcatctattctacctccattcactggtcaaagaagcgcagagttaagttggccagtgtggcgtggacacagccaggcgcagaccctcctgccagcgaagccagcgtgaggtctgttggctcaggggtccagtccctgggtccccgaagaggtaagccaaagacatagtgatacttggttcaattcggctccagagagtatcagatgggaaatagatgacttgttttacctggtcaaataagacatcactaaaatctaccatgactggaaattacttaatgcaaccagaggagacttcgcagtcaaattttgcttttcctaaaagacacgaaattaaatttacatgtcactgaatgct

SEQ ID NO: 101500 - DNA, 450 bp, Homo Sapiens
gcggccgctgtcccgggtgctgccacagccgctgcgcgccagcgtcagcgaggggcagactggggagacctcggcgaggcgggaagcgtggcccagaggagttttctgtgtgcatcgattggggttttttttgaggtctggctccagctgaggggaaggaagcggggttcccgcgacgttttcctccaagcaggtgctgaggtcactgcgacctcgagagctcgcgccccgggccggcatcaggcgccgttcacgagcctggggaggggacggcgggggaagggctcctacccgctgatgggctcatttcagcgccttggtagaacctgacgcctgcctgctgaaccgcgccgtacccgggggcgcaccgttcctgcgtagccaagggctagatcgcgggacccaccgtccaggctatgagtgacggctggggagaatgactgctgattg

SEQ ID NO: 101501 - DNA, 462 bp, Homo Sapiens
actgaagtagcttcagtttacggctcacatttaaaacctagaaacgttatttccataaatgttggcagaaactggtcactgtttatttcaccagcagtcataataaaccccttccaactgacaatctaacaaatcattttctgtttgtcactaaggtgggttcaataaaatttttgtgctcttaaaattcccctaataagaactcctgaaagcacacatttccttcctaaggcagcccttgtggtcagtgctcgcagtggctctctttctgaattccagaggtgagcacaacaggttagttgtagtaattagaaagtctcgaaaatcaggaaggtattagtatgttgcatatgtcggtatgtgctcatttcagtcagtcagtcacttttaaatacatgggtgtacacaaacctcccctcagcccttcgcttctccacaagtcaagtgtgaacagtagcagtg

SEQ ID NO: 101502 - DNA, 445 bp, Homo Sapiens
ggagcctaaagcggtagcaacaatgagttagactcaaacccgtctcctgactcccagtctaaggctttacagagactctcttcctgacccaagcatggcttccttgggtactgggcaaagtcctaagtgtcctgcaaccaagtaaagaacaaagaactaatcatgactgccccctctccccccagcagcttaacattgaactgtcttccaaggcaaaggtgaggcaggaggcagcccagtgtagtgaggtggtgtgtgtaaagtctccaaatgtacctggctacatagtgcttgctggaagctaggtactctgcacatgccctacatgggttgttttacttaatgcttgtaacagcctcgaagcgtagattatccccagtttacaatgaagagtgcgaagtgtcttgtcgaaattcaaagagaataaactactgacatagatttg

SEQ ID NO: 101503 - DNA, 199 bp, Homo Sapiens
atttacatagactgaaataaaactggctgtttctcctttgtttccaccatccatccaacctggctcatagcatttgatacagtgtctgtgatgtttggaagcaaagcaatgttgtgtgtcctttttgtttgcgcttaaatatcttttagaatacagaaattataagcacaagtggctgccagttttccaggacttatac

SEQ ID NO: 101504 - DNA, 180 bp, Homo Sapiens
aacgaagtctgcaaaactaatttccctcaaaatagagctcaatttccgttaaagaaagcagcgcttacaaatctcagaattcctgatcaacccccactccaccccacctctgagcaatagaaaacaattcgatctttcacacggatgttattgcgaagccactattctgcagtgtgactt

SEQ ID NO: 101505 - DNA, 293 bp, Homo Sapiens
tgtctaggaagtgttatgtttttctcagtgtgtgtgtggtccttgcactttcatatggctgcaaacactttaaattttgtgccctcccaacatagatatgagttatgttggagtgagtttattttaaaccagagtatgttctcattatagaaatgttacataggatgagaagacctatggaataactgctgaagcctaatttaacccaaagtttagggggaacaacttggggcttcaatgaataaaagaaaactgtttctgcgtgaataaagttttaatggtaaaaagctaaa

SEQ ID NO: 101506 - DNA, 453 bp, Homo Sapiens
  misc_feature (68)..(130): n is a, c, g, or t
gttttcagagcaatgtataggtaattatgattactctgattctgggtatgaaaaaaaatgggactctnnnnnnnnnnnnnnnnnnnnnnnnnnnnnnnnnnnnnnnnnnnnnnnnnnnnnnnnnnnnnnncacctgcgtgactctaaagtgcccactcttctgtgctgcaagagcctcccaactattccttagggtcattatgtgaacatgttgtgggggaaagcacaacgtattcatcattcagggcttagttcagcagccacccgcttccctgacaccctggtctgggctggatgtccctcttctgcactcctggagtcctgggtgcattgcttatcccaggaccagcttcccccgctctgtaccccaacacctgctactgtctgccccctaattcatgtgtaagaaacatttttaacaaataaatttgacaaataaatgatgaaatgaaa

SEQ ID NO: 101507 - DNA, 479 bp, Homo Sapiens
aattaaagaagacataaataaatggagaaatataccatgctcatggattggaagacttacattgctaaactgtcacttctccccagatggatctacagagtccacataatctcacttaaaactccagaagaaatttttgtaaagttgacagctgattctaaaattttacatagtaatcagaataggttgatattaggatagacagatagttcaatggaatagaatgcagagtttagaaatagacctacacagaaatagtccattgattttttaagagttgctttttgataagggtgctaaggtaatgtgatagagaaaggaaagtattttcaattcaaatggctgaaatgactggatatccattgagggaagaaagggactttagcctttcacacaatacacaaaaattatggaattctgaagaaaataagagaaaatgttcatgaacttggggtaggcaaaaatttaatagatgaggc

SEQ ID NO: 101508 - DNA, 365 bp, Homo Sapiens
agtgtgcctaccacatgcttcacgaccagatggagatgctcaatcgtatgtgacgtgtgagaacactttggattcgtttaaaatttgttggacttcaaaacctccaacgggatttgccacttttttggaactacctccatttttcttaaacagcaataaagcaaaacagggaccgcctgctgcagcccctggccccggagatgacggctggtgcccgtgcttgaggcgtcaggccagctcgcggtgccagcactgccaggctcggctggccacaggaaactgtcccaccgattcctgctgtttgttttttcttaaggcattgttcctcagacttcagaaaacccagccacaaaaatccaccagag

SEQ ID NO: 101509 - DNA, 427 bp, Homo Sapiens
gccgattcatccaagtaacttttattgagcacctcattcatgccaggttctgttcaaagtgctgagaacagagatgaacaaggcagaatttgtgcctcagtttatggaacttaggtttcaagagggaaggcaatataggtagaagcagacaagataattttagaggggagaaatactgtgaaggaaataaaaaacaaagtccaagagaaaaggttagcagttccttcaacttgggtggtcagggaaggcatctcagcggaggtgacccgaatgacagaagagccagtccgattggttggaggtggcggcgaaaaagtgctgctgagaattcccagaaagtcccggatatgaagtcactcgcgtgaggtcaccgagcctggttccaagaatcagaagcttgtgggggagaaaggaaagcgcagaaaaa

SEQ ID NO: 101510 - DNA, 428 bp, Homo Sapiens
ggccgctccaacatcagaatcctccgctgtgatattggttttcccagccacctcctctacagcattaccactgttagcaaatatttcatgataaatcagttgactggtacaatccaagtggcccaaaggatagaccgagatgcaggtgaattgagacaaaatcccaccatttccctggaagttctagtgaaggacagaccatatgggggtcaggagaatcgcatccagataaccttcattgtggaagacgtcaacgacaatcctgccacatgccaaaagttcaccttcaggtatgcacactttgaaagttgggctggacattctatctctttggtggccctctgcccttctgcttctctggtatattctcaggagaattataagcatttggagaaacagctcagtagaataaatcgatgtgaactgtt

SEQ ID NO: 101511 - DNA, 409 bp, Homo Sapiens
tgttgtagttaccagtgttgatgtttctcatgaaaccagaggaagagaaccggccccatacacatactcctccccaacaggttcaaccagattatctgacattgtcaagaaccatgtgttttaaggaaagccccagccatccacccttcacactccacagatacccacacaggacagaaagactgcacggcacacagcgtgttctgagggacccccttggggacacggctgacaacacagggccacactcgggggagaggagacagcagctgtctgtattcaggggcatcgaatggagctgcagaaaaaccacccatttcctgtgtagcccagaccgcctatgttttcacagaatgccgttcccaagtgcaggcccttgcatgacacagaactttaaaaacttctacag

SEQ ID NO: 101512 - DNA, 159 bp, Homo Sapiens
aattgtgaaaaatatgaagcaaaccaagaccattattatattacttccactgaaggaaatattatacaaccattaaaaatttatgaatatgaaaaagatttaaaagtagaaaacacaggatttaaaattgcaaatatctaggtattatgactaagtaaa

SEQ ID NO: 101513 - DNA, 551 bp, Homo Sapiens
aagcacagatgtgaaaagccaaacagcctctgcagcctctcatctcacaagcaaggaaactgaggcacagagagcacatgggatcagccaaagggcacatggtggctgaaccgagttcgaaacccagtctgttgatgtattagggaagcagaacaacgcgccacaccagggaccgtacctgatcgccaggccctgcgcaggaaggcaaaggcaaaagacagcgccgctcgggatcccactctggcgagcccctccacacctttgcccgcaggccgggaactgcagacgacacacacggaacatacaaccagtcagcagcagagggtgcagatactacataaaatcaatactatgaaagggtgtgtaccaaaatccgaccaatggttttcttcaagtgacaggatcacaagtggatttttcgttttgttgtttaacaactttcatcaaatgtcttttgtaaaggaaaagttttctctttaagaatcaaagaaatgtataaggaattttaaatgtcttgggaaaatgctcaagaaatgacctcccaaagtgag

SEQ ID NO: 101514 - DNA, 444 bp, Homo Sapiens
gttacagcctttctcaccctgatctgaccacacagcccttgcttctcagaacagcaatttctagttcatgggtgtagtcttccacaaaactctgtgaagggcaggggttcttggcctgaggtcagtggaagaccctgcaaggagcccaagaactgagatagccaagaaaaaaacgacagcttttcttgttctcaagctgacgtttgacatttccttccagttatgcatgttgtcaacagaccacattagtattagcaaaacctgtgactgttaccaatttaatcacagatactttcctcctatcacattaccactgttgcagatctctcaaaatagcataatttatgctcaccactgcttcaacattatgatagtgcttagacccactgcgagaactccctaattaatgccttaataaagaagcatgtgtgttgccaaattaaa

SEQ ID NO: 101515 - DNA, 502 bp, Homo Sapiens
cacgctatggcaaatgaagtgcaagacctgctctcccctcggaaagggggacatcctcctgcagtaaaagctggaggaatgagaatttccaaaaaacaagaaattggcaccttggaaagacataccaaaaaaacaggattcgagaaaacaagtgccattgcaaatgttgccaaaatacagacactggatgccctgaatgacgcactggagaagctcaactataaatttccagcaacagtgcacatggcgcatcaaaaacccacacctgctctggaaaaggttgttccactgaaaaggatctacattattcagcagcctcgaaaatgttaagcctggatttaaaacacagccgtctggccagctgcctcgaatatctgacagcttagcaaaaagggccaaagctttccataggcgtgctgcacttgcttggtaaattaaacagcttttgtatcttcccctttgactttaggtaataaagcatccaaacttgtaaatctgacaa

SEQ ID NO: 101516 - DNA, 358 bp, Homo Sapiens
ctaaaaatgtttcattgtgccctcaatccctaaaggtaatatacctgggtacagaattataaggttttagataaacagaaggtaattctagcagcttttgaaagaagcctttatatgtttcaaattccttacgtttcattgacttttgagcttctctgatgactacgactcaacacattatatttatgaaacttaaagttacaggtagaggagaatgattcctttttcccccaccttaattctaaatgccgaaaccagaaacacccaattatggtaaccagtatgaaatactggcttaagaggaatagctcatatgatgacaatacatatccctatagagcagaaagcaagaaaaaaa

SEQ ID NO: 101517 - DNA, 489 bp, Homo Sapiens
tgcggccgcggctgggaggatggtgacacctgcagtgagtgcagctgcagagagtcaggtgccagcggctcctcttttgaggagctggacctggagggtgaggggcccttggaggaaccacggctggaccctgagactgagcccctgggggctaccaagtggccctgagagcccagtaccctgagaagggcaaggagtaacccatgaccagccccctcctgcggggcagggctgcggaaccgagcagactctccagccatcttcctccttcttctgggggcgaggggttcccaggggacgtaactccccctgctctaggcctcttgtgaagccttctcctcactgtcctttaggctcccagggccaaagcagccaaagactgtatcctgcaccagccctgtgggccgacactcctgttgtatctctttttcagactgtcactggagcttccaggacccagaataaagccaatgacttacttgttcaaaa

SEQ ID NO: 101518 - DNA, 593 bp, Homo Sapiens
  misc_feature (259)..(259): n is a, c, g, or t
  misc_feature (286)..(286): n is a, c, g, or t
  misc_feature (321)..(322): n is a, c, g, or t
  misc_feature (324)..(324): n is a, c, g, or t
  misc_feature (355)..(357): n is a, c, g, or t
  misc_feature (403)..(404): n is a, c, g, or t
  misc_feature (419)..(420): n is a, c, g, or t
  misc_feature (438)..(438): n is a, c, g, or t
  misc_feature (448)..(448): n is a, c, g, or t
  misc_feature (468)..(468): n is a, c, g, or t
  misc_feature (484)..(485): n is a, c, g, or t
  misc_feature (564)..(564): n is a, c, g, or t
ctgtcgaggcgacggggtgagacccagcaccgaggcgacgtaccgctccacatcggccttgctgcgcctcatcgcgccgccaacctggctcccgagacgcgtgcgagcaccgctcagccccgcagcagtcgccacttccaagaggaaagtgcctgcaagccactgaagcagcggcgtagccggcggaggcccactgtgacgagcgtgcggcgccgcccacggaggcccactgtgacgaacctgcgttctgcctcagcanctgtgtatcctcggcagacgtcggcgnctccagcatgcactcggccgggctctcgtggcgcnncngccctgtgagttctgaagggtgttcttgacnnnttgattctttatcttataagaaaacccttaaaatgaaacctcgaannaaaaaaagagcctannaactatcaggtgataaantaaatgaggnttcaaaagagattggtaccnatacgaggtcaactannaaaaaaatgagatggtctacttagtatcaccaggcaaaaggacacaatctcaaaggtaaaagttaaaggtaaacaattncccaattatataatcatatatcaaaaata

SEQ ID NO: 101519 - DNA, 773 bp, Homo Sapiens
ccatctcttcatggggaatgtcacccagatacatgacttcagttcttattttgaatgactcctctatttgcagttataaccctgacatctttcttgaatttttttgccccttaattccaacgaactcctggatgtctatgtagatgtctcataatttaggccaatgctgtacaacttcatgtggcatcatccacatagaatgaataggggttgttcaatatgacagccctgccaagcatctcaaattgaacaggtctataaaggaactcagaatcacttgaatatcacagtccatcagcttcctttcccagtaatttaatttccattaatggtatattaaacatcgtattttcaatcatttttaggtttagtcagctacttaaaaataggctttttcttcacataaataaattgtataccatttaatgtgttttatttcaacagactaatagatcttttaacacttcttagtcctcaaaataaattattaaaaactttgtatttcatgtcatattatataaggaaatagaattttgaagaataattcatgctgttttaaatttttacattgtacattttaatagctaatcaactcttaagtatacatttgatggtaaatagatgctagctaatctggaatcatttgaaatattgattatctgatttatagtttggttgcaaggaaatctactgtaagcaaatcataatagatagcaaatcttagaacatgtagaaaaccaagaaattaaaaaaagcttatcttagaacatgta

SEQ ID NO: 101520 - DNA, 327 bp, Homo Sapiens
  misc_feature (99)..(162): n is a, c, g, or t
  misc_feature (174)..(201): n is a, c, g, or t
agaatcagtgaacttaaaaacaagtcaaatcccagtgtcatggtgcacatctatattcccagctactacagaggctggggtggagggattgtttgggcnnnnnnnnnnnnnnnnnnnnnnnnnnnnnnnnnnnnnnnnnnnnnnnnnnnnnnnnnnnnnnnngagaccctgtcnnnnnnnnnnnnnnnnnnnnnnnnnnnncacatttcttcaacttcacaattttggatagaggtggacttgaataccaggccatctgaattactgggggcagttaaaacagtaggtttaaagggatggtgataacaaatgttttccaagggaccc

SEQ ID NO: 101521 - DNA, 384 bp, Homo Sapiens
agatctattgtactgtctgttccttctcataattaattaattacaggaaaggcgattcaaaccagatcttgaaactattgtgatgttctgagaggtaaatttaacagggaagtgggaggggggatgaaaagggaaattgccaggttcctgtgactttgaaaggactgaggaagcagagagcatttggggacttcactgaaactgactgcatcttgcaattttctttttcgaattggcagaaatattgtatttccatcgattgaagaaaaacaagtgtctggtaattaattaaatgacttgttcatggaaaaaataaataatctgtcagttgtggaatgtaaactgattaaacaattaaataaagaagattatgttgtgtgtttt

SEQ ID NO: 101522 - DNA, 649 bp, Homo Sapiens
  misc_feature (13)..(13): n is a, c, g, or t
  misc_feature (81)..(218): n is a, c, g, or t
cacagatccacgnctaatcagaagtcacagctgttcagaaaagaaaggcaaaattaacaaagacatctctgtctgaaaagnnnnnnnnnnnnnnnnnnnnnnnnnnnnnnnnnnnnnnnnnnnnnnnnnnnnnnnnnnnnnnnnnnnnnnnnnnnnnnnnnnnnnnnnnnnnnnnnnnnnnnnnnnnnnnnnnnnnnnnnnnnnnnnnnnnnnnnnnncctcactaacagcagcacagactttgacaacaacattttgcaccctattctgtctgcagcctcctagctaaagcttcatctgcatgacaaaaccttgctctccacaccgatatcttaacccagacgctcctttctgctgcatctcaggtctttggacaaactcaacccattgtcaaccagaaaacctttaaatttacctgacacctggaagcctccccgccctgccagctttgcgttgtccacctttctggaccaagccactcaccaatgtacttctcaaatgtcttggattggtgtcttatggctccctaaagtgtataaatccaagctgtcccccgaccaccttggcacatgttctcaggacctccagagggctgtgtcacaggccatggtcactcatatctggctcagaataaatctcatcaaatatt

SEQ ID NO: 101523 - DNA, 542 bp, Homo Sapiens
tagaccataacattctgtcattaattaaaatttgaaatattttgacacaattttatttagattgtatttgctgtagagtgacttaacttgtagctacttgtttttaattgtataaaatacatagaacttaagtttggattatatcaggaggaaggttatttttaggatgcagttcttttaaaaaaatcagtgttacaaactatgttatttatagaaagaatagcagagctgaagagatttagtcatcatttaatctcgggatttcggtcctcactatgctttagaatcacctgggggaggctatgtgtggggccccattcccagagattttgaatttcatttgattgggtgtgggactcaggcgtttgcattttataaatgaggcaactagttttgaaagagattgtgacttgtcaaagcacatacagccattcagtggagggagctggatcagttcagtatttccctgtatcattctgcattctacaacctagactggagttggcagacttactccataaaaggctagatgtcatatgtat

SEQ ID NO: 101524 - DNA, 436 bp, Homo Sapiens
tcatttcgactttcatctagaggtatgtttcacacattacaggattgaatctaaaataggtgtcaggaggtaacaggccatcaagcattatatggacttcttctgtatctgtagcactgttgataacattagaaagtttagttttcaagcttgtgtatgttaccgtgtttctcacatcactctcataacgtccagtgcccagggatactatgcactctaacggcacatctggccaaagacatttacactcatgcatagctaatgccgaagggttattcagaagcaaacctccatcttgatgaagatcatttcccaatgcatattctgcaaagtagcctggagcagcagatgaggctctaatggcctgccacattttatactgacagcctcccaaataatgagagttgattccaggaaaatgaccatagtttctgaa

SEQ ID NO: 101525 - DNA, 440 bp, Homo Sapiens
atcacgaatatgttgctcaaaatggaattcctctaagaatcaaggacaggccaatacttgtggaagcaattgatgggcgccccatagcatcgggcccagttgtccacgaaactcacgaccagatagttgaccagggagatcaccgagaggcactgtcatttgatgtgactcagtctccattcttccctgtcgtcctaggggttcgctggctgagcacacatgatcccaatatcacatggagcactcgatctatcgtctttgattctgaatactgccgctaccactgccggatgtattctccaataccaccatcgctcccaccaccagcaccacaaccgccactctattatccagtagatggatacagagtttaccaaccagtgaggtattactatgtccagaatgtgtacactccagtagatgagcacgtctacccagat

SEQ ID NO: 101526 - DNA, 511 bp, Homo Sapiens
  misc_feature (108)..(108): n is a, c, g, or t
cactgtgacagatgtcaagtccaattaagtgactcatgtccaggtttctgtccaataggatttcccattaaatatcaatttaggggaaaaaaattccatcccccttcntaagcctttatctcttccaccatctccaggctgaatcaattggtaccaggagagcccagaagccacacacgcatctctgcctctttgctctggctctcccaccctcttcccgtctttctctgcttccttgtcactgttactccaggagacgttcacttttcaccaacctttctccaagcatctccaagccactgactatatatattttgctacaaggtaaagagaagaggggctggggacgggggatatagccaaaccttgaaagactttgaaactggaaaataggtgtctatttatacaacatacaagtaagtgagggaagaggaagaggcaaccttagctcctagttacagtattgtgttcctgggaactggggagatatcagctgaacaaagccttatct

SEQ ID NO: 101527 - DNA, 1000 bp, Homo Sapiens
  misc_feature (358)..(426): n is a, c, g, or t
agcagtgaatattctttaccacacttagaatgtgacaatacacactggtgtccagttgattaacttggatccattcgaggaaattctagagtccatgtcattacagaaattgcctgtatttttttctagatattgttaattattaatctgtattggacttttaaggggcttgtattataaggactggctataaacaggtttttatttgaattaacagaggtttcttttggcttccttttatttaggtagcggataccccagctaagtgcttgttaatttagttgataactatatcaaaatattattctgtctctgtacacagtggatgaaaggttctagaattgtttcaacaatgtgnnnnnnnnnnnnnnnnnnnnnnnnnnnnnnnnnnnnnnnnnnnnnnnnnnnnnnnnnnnnnnnnnnnnntttagcagcaggctttccaattagatgttttcctaggtgtcactgagggccgaacttggaaacagtgcattcactatgctgttccccacactggctagaattgttcttgtaataggtttgctaccatgtatgtagacataataaagtggattatgacaatagccctttttccaatattgtaaactctttttaatgtagttataaatatattagcaatgaatttaaataatttaaaaagcttcaagatgagcgtactgtttcttacagtttggaaggaaggaggcagtttcagatttgaaacatctttagtggttttctagtaaatgatgtatgtaagttctgaaataggttgttcctttgtggttttaaaagatttacataatagttctagaaagttcttggatcttatgaaagtgttagcatgttatttcataattaagaaacgtgaattgtaaataccatccagctttttattataccagaatgatttagttgttttcatagaatttatactttatggaccaattctccccatacctagtgactttaaataaataatttaaaatttaaaaaa

SEQ ID NO: 101528 - DNA, 449 bp, Homo Sapiens
ccctttaacgctctcaacttaggcaataataaattccttttcatgaattccctccaccaccatgcaccacacagaccacatgcccggaccctctgacttgtgtaaccttttgtgcatagctaggtgggttttctgtcctttgccagttgggtgggagaagggaagaatttagcataaataaaagcagcataagtcacctgaaacctgtgagtttgccctggacgagctgctgctgctaactgcatcacacatagggatcagggattataactgaaaaggacagaaatgagtcttttccctttctgggcagggcagccatccctgttcactccttggccttcagaggataccagagagtggccccagtcagttcccctcaattaccaacgagctactaggaaacggccgctgaaagactgaaaaaggagaaaaggaaaataactcagaaa

SEQ ID NO: 101529 - DNA, 221 bp, Homo Sapiens
acatgtatgtaaaataatgatccatcagtggcatcttagagttggtgaaatatagatgcagtcttttttgtgtcttgaggctttttatattgaaaccaacagaggaaataaatttagtatgtgcagaaaaatctattaaaataagtgcatataaagtctgtgtatacatgttaaagctgtatttagaaatgtattcatgagaaaagctctacacagatgta

SEQ ID NO: 101530 - DNA, 379 bp, Homo Sapiens
atttcctaagctcattcagctaataaacggtaggggactgcttgacaccagtccagttgaccctcaaatccatgatttctgccaccatattcacagaaacaagacaagagctgaaaatatagcctgactcttgaaacagtcaaagaattgtgtatgtttatgaaagttctgattaataagatattctgaggacaaaagacaaggcatgggtagaggggcaatgtgtagattagaatgtatcacaatgcccactaaatagtaaaaccatagaaaatgaaatttaatccttactgtgtagaatatttagagtagattgttttttcctcggtgtcaattactattacaactatcaaagaatgaaattaaacaagaaacggtt

SEQ ID NO: 101531 - DNA, 425 bp, Homo Sapiens
tgccccccaatgctccagggccagtcctaaggagctgagggtctgaggacgcagggagggtggaggtgtcctgaggctgatggacagtgactcgcactggcccccaacatgaccacacgtgggtgctgaactcggggcgccgtgcccaccggcatggtcctcccgagctccgacagcattacctcacccggccccatctgttgccccggtccagccctgatggcgcgcgcctggtctgtctgattcccctagccgccaccccacgtttctgtaccgggtctctgcagtgttaaacggacgtgtaaatagtggtaaatagtgaaagcctgtccttccctaaatgtaaagccatctgtccggcgtaaggacgacaccgtcagctgtccgactcgcacacatttaataaactgagctcttgcattgcc

SEQ ID NO: 101532 - DNA, 548 bp, Homo Sapiens
  misc_feature (228)..(236): n is a, c, g, or t
caactgtactcatgacatctggaacagtgatgtgtgtgtgtagagtgaagtatataaaaagctgagacattactgtaaaggtagttggtattactgatttctgtggtgtgcattgtcagtgactgccacattacatgctgaattgctcggacagaaggctgtttggattactaatcaagaggctataggtggtttgtgcttatttgtcttttcattcttacagatttnnnnnnnnnttatggtgtttcacacacagtgattagtgctcaggaaattattggttgatttcaaatgtcaagggtctgttataactgaagagagacttaaagaatgatagtatcctggacttagaggatgttgaaagttgggcatatcccatttggtccagggtgcaggagagctggatgagggaccaaatggttgtctgtaggaggagatgtgtccaatgaatgaactggtacgtgcctagcagttttttagaggttacctaataaaacaagctaggttttgtatcacacaaaaaattatttatagaaaatattttcttg

SEQ ID NO: 101533 - DNA, 484 bp, Homo Sapiens
  misc_feature (186)..(194): n is a, c, g, or t
tttgccaaacaatatcaatggtgatgccgtcccctgtgcggtctgatgcgccttcctccgtgacgccttcagcttcttttgtcgtggatgcttcgtgggaatgcccagagccccagtgtgcttgtggagagcatggacagacttcgtggtgttcattgtttgatgatttttaatcgttactattannnnnnnnnattctaatgtctctgttctaaaacgtaagactcgggggttggggcaaaagaagggaaacccatccagtcctgtgattctattgcaagcttcaaggggcttttgtttgaaagacaaaactccccacctgggtctgttgtcacacgtgccgtaggtgtgatggatggcaccggatgctggattccccaagaacaagttaccctctagggtgaggctattccagcgagctaggacatttcaccatgggagcccactcccctctcttccccagcaggctgtagtttctaagctg

SEQ ID NO: 101534 - DNA, 455 bp, Homo Sapiens
caaaacaaaaacatgctatgtttggtcactcgctgggtcggccctgagggtcgcgttgcatcaaaccgccagcgcatggcttctcagtaccgtccgctggatgcagcgaggaccctgcgcaggccgaaggctctggactgtggcctggagggcgaggctttgtagggtggccccgggtgcctgtccccgagagtccaccgtggagccccatcccggagttccctactcagcgtcaccgaggaaggctactcaaagccctgtgaccccgtgccgcttagctgaatgggcttaacagattctttcccaaaagctggtttgatggaggcacttgtagaggctctggagacgctggacgccttccttgatgctgacacagccttgcacagccttcctcggccttccagccctgcacatgctgtgccacattactgcaggctttacaggaagcatgactg

SEQ ID NO: 101535 - DNA, 597 bp, Homo Sapiens
agttgagaccgggtaacttatagccagggataatgttcaaagtctttaacaagtggtatggcttgctgaatcagagtagctggaggtaagaatgacatcctggaatcccttcttgtgctaaatgttacccatttagttggtgggtctgggtctaggatagccagggagggggaaacttcaaggggtggggtgcctcagggcagtggctgctgacccacagacctggaagtatttgactatttgaataactggtacaggtttactggtgtctacactggcagagaatctgctgtgcttcctccccttcccttcgtggcaatctagcaggttgctccaggcagcttccccagctcttattccaagaaaacctgcccctggggtggctgcaggtcacagctttgttgtcctgggacaaaggagtgtctggtgattaggcagccccaggggtcctagccaactggaagaagggcttcctgaggaaacacagtcctgggctattttatatgtgtcaggaggatgtagacagttcaacagctctagcaaatgccttaactaatagtggcttaatcaagataggtgattttcttttgtaaaaaa

SEQ ID NO: 101536 - DNA, 883 bp, Homo Sapiens
gagagagctctctgaggtcagcttcttcctatttgatcccccttcataacatgtgacaaagtggtcccctcattactccagggcagtggtgttttaaggtgcacacaaacctttagctttttctagatgttacaaggtattctgaagcctatttatgcaactttctagagcctgtttgcagggttcaagctcggatggggctccattctgtacttgctgcaattttcaatcacatttcattactgttttttcaatgtctggtactatctggagtcttaatttcgtaccctctccatcttatcggtcttagcattttagataccatcttcctcacgcaagctgccaaaaatctttcttgttattctaatcacacctttttgagatatgggccgcaaatctaacatggaggcctgaaagtaggaacagtggcaacgggacactccccgctttctcagggagggtgctggtggctccctcagatcctgggcttctcctggtatatgtggcaccgggggagaatgcctcatatctttggaggtcctgttctaatttatatctaagcccacgtcaatgtccactttgaagactttcctatggacgatctcatctaatgtcgttttacagattttcttgttgtccttatcaccaggactctaaagacaaacatttggactctcctccccatagtcttaggaatttctcctctgctttgatctaagcattgttgaaacatggctgatatactaagacagtaactttttgtaagtgaaaaatatcctaaaggtctattctttcttaatgccactaataaaaagcactttgaagagtgtacagcatggtgacaatagttaatgacaatatattgtattcttaaaaaatgcta

SEQ ID NO: 101537 - DNA, 227 bp, Homo Sapiens
gaggtttagcgtgtctatgtgacaccccaggattttagcagatacacaagtgaaaaaccatgttgctaaaaagtatttcccatcttccaattttcttatcatcatcttggaaataaaatctgtacgtacttgggaataaaatttattgaattatcaaaaatatgtatgctaatgtatgtgagtcattagctatatccacattgacataaaatttgtgaagactcttc

SEQ ID NO: 101538 - DNA, 377 bp, Homo Sapiens
ttgaggaaaaagcccattttcacacaaaaaaataaaagtgtagatttaatgtatgtgactggggtttggggttgcatacctggtggatcttgaggggctgggattagggtggttcaggaaaatgtgatgctgtttccccatgtttagccatggtcaaaaaatggatttctcctttttctaaaatgtccagcaactgcctactgttgatcaaatgttgaagtattcttgtttcccttttaagccaatccatgtgcccacataacattatgcccaagtggagagttcactttaatttccaaagtatgtttcatgcagccccctgtcagctgctctgtggaaaaggggttctgttatgaaataaatgttgcactccctgc

SEQ ID NO: 101539 - DNA, 316 bp, Homo Sapiens
ctcaggccctaacccttggctccaggagacacagggcccagcacccaggttgctgtcggcaggctgaagacactagaatcctgacctgtacattctgcccttgcctcttaccccttgcctcccagtggtatttgaataaagtatgtagctatatctgcccctattttcctgttctgcagccccccaaatccacatgtaactcattactgtctcctgttatttatctcagtagtcccctctcctagccactctagcccctattaactctgcattaagcattccacataataaaattaaaggttccggttaaaaaaaa

SEQ ID NO: 101540 - DNA, 548 bp, Homo Sapiens
  misc_feature (87)..(100): n is a, c, g, or t
aaaactaggaacagttttaaaaaagatatgcttgaagatactagagagataacaaggtagtaaagaactagtgggcctgtagcttcnnnnnnnnnnnnnnggaatccaaaaaggtgagctcaacatttggactccttctaccttgggagcatttattaattctggaggagttagtggagagcctgatcagtgttttagacagtctcaaaggagtggggtaaaaagtcagaatctaggactcatcaagggaaatagcctagcgttgggatgagaacctaaataattgcagcacagtaataagattggactgcaacagaccagttctcacagagatttcagcctcaaatcagctcagtctctggaattggattaaagcaataccaatttgctagaattccctggtgcctggcctaaacaaacgtaaatcctccctagagaaggaaaacatcttcctaggcctcaagttatttctatacaaacaatttttcaaatacaatattcctcagataataaaaataatcagacacttgaggaaacaggaaaacata

SEQ ID NO: 101541 - DNA, 628 bp, Homo Sapiens
aagctgagagagtaaaacaaaagggaactgtttatttattttgaaacagtatctattctaccccaaagtagtggtttttgacctctttccctttcaaggatagctttttccttaaaactgtgatcaagacagagtcttaaaagttgtgtctttattaggatgggaaaagaagaaagttctatgatttatgctcttgccttttgtaatgaaaggagctaatgactttcaacagaagtataattcacaaaaagtaaaatccatttcatttattaccacttaactaagtgctttttctaatttgaaagcaatgctacctcccatgcctggtctgcattttgtatttaatctgaatggtttattcaacagtagttctaaataaattagcaaaaagaatctaacattctctatccatctagccaaatgccgagattggccagaggataaggcaaagctgaagagcgacctcttcttattgactagcaattgttattcttagtttctttatatcaagagacaggcttatcctcatcatcatcaaatcccactgaaggatattatttggagttataacttaacactcttcaacacgggcaagcctgtgaaataaataaaggcagatttttgtgcc

SEQ ID NO: 101542 - DNA, 404 bp, Homo Sapiens
cacctctgcccaaattcttacagaatttggtcataagtgctttctcctgagtgataggatgggaaggaagagatttaagaactggaaacacagagaggattacacatctgttgagcacaaactccagggcttgatttttgtcaggttctgttctggacttgaaaacacattcagtcatgatttgtgcctttaaggagtcactacctgtgcatgggcaatccttctttaagtctggaaaggatggtgattaaagtagatggagtatcaggttctcagcttacctgggctctttctttcacgcacttgtgggactcattgagagttattttattcactcattgactcatttattacccttgaactgcttatttgttccacgttaaaggaaacaaggaattaggaat

SEQ ID NO: 101543 - DNA, 392 bp, Homo Sapiens
tttagtgagataattcacaaccataaaaggcacccttgcaaagtatacaattcagggggtcctagtacattcaaacagggatacaactatcaccactattccaattccagaacattctcatcatcgcccaaagaaaccacatacctattagcaggcactccccatcctccctttctcagcccctggcaaccactcccttaagtgaagagtgacaactttcctgggcattgtgctttcagtagtatgtggctttacatgtttccattagaatttttaacaccaaattcaagcagtgagctttgtaactattctgagattatgaaatatccttttatatacaactatttttgtctcaaacatgtttctttatacataaaaaatagatatttctg

SEQ ID NO: 101544 - DNA, 383 bp, Homo Sapiens
agcaattttcccattcctgcctctccctgccccggaaccacctgtggtgctagtgttgggatcgggggcgtttaacgctggtgggcagcaataaggggcaaatgtgcccagatgcctgcatccccagggtgccgagggcagcaggaaaaagtggggacctcggtgcatttgccccacccctcccctccctgggctaaagcacaatgttctccccgcagattaatgaccctgcaccctccaggcccctactcacatcctcccccaaccggcttcgggtcctcccaccacactctggttttctatgctgttttggtgcaagtacaactgtcgtagtcatggctttgggatgggttctgtttattaaaatcctattgctcctactg

SEQ ID NO: 101545 - DNA, 423 bp, Homo Sapiens
tagcagcgaggacaggaagtgcacgttgcaggcgggcggctgcggggcctgcaggagcgcgacgtcctccagcgcgctgagctctgggatcccggggtactccccgaggagctccccgtccgttcgtgtcgccccccgcgacgttcgccttgacctggcccttgcagtacgcgcccagcgcggggttgaacgcgtgcaggacgggttccttggggtccgccgggcccaggtacgcttctttgaagacgtggaactcgtcctcctcgtacttcacgggggccttcaggccgatgttctccgaagcgaacggaccctcggggcttaagagctccgtcaccatcgcatcctcggggctgggcagcccgcccggcagagggccctcctccatggcgcagggcggcggggcgggatcgcgggggccgc

SEQ ID NO: 101546 - DNA, 701 bp, Homo Sapiens
  misc_feature (13)..(13): n is a, c, g, or t
  misc_feature (131)..(131): n is a, c, g, or t
tagaaagagggcntgaagacgatgaatttgactcctgatttattattcaattcttttttcatttaaagtatcttccgtggtgggaacctcacctcccaagaccagagtcagttggagctggttgttgttgngaagggagtgggttggggaactggataggtgaatgtaggtggacaggtgactgggtggatgttgtggtctctggagaagcactgccattcagcctcctgctccagctgttcacatgcagaaatctctcttcacaggcagagaagcctgtggctaaagcttccacatcccattaactcagtgcttttgtctttttcatgacatggcacatagagaaaatatttttttctagcacacaagagcaacctgaaaggctgctcctggccagaggactctgtcccgggggaccgtgtcctcccccatgtcctgcctaggccctcagaggaccaggggatcatgtctccaggtaacccgactgtagcccctgctggctgagctccagcctgtgcccactgataatagcagggacggccttttctcttagagcagctgataagtttccctacctgatggccccctctgacataaactgcacacctggggtgatggcttaaagccagaaagagctgagggagttaagagggccaaccttagggcacgtgggcattattaaaggtcttaaaagcattgaa

SEQ ID NO: 101547 - DNA, 375 bp, Homo Sapiens
aatgagccactgtgccctgctctccttgtgaattttaggagcataggttcaagagactctgggtgaaagtatgttttacaaagaggaaaggcagtgaagaaacaggggaagcaggcttacatcaactgttctggaatgaagagctgtgcataggcagaggggagagagctgctatacaggagagaggatcaatgaagcagcgatatgtctgaagacccaaaaaggtggattagctgggcatgaagagagattgaggcaacaggagtggaggatggcatgttaggagaggcagagaagctttacagccgctacttgcaaggaggatgtaacagcgaggagggagagaccaaagcgcagcctcaactctccctgacg

SEQ ID NO: 101548 - DNA, 422 bp, Homo Sapiens
aggaacctcacctgctgccttgtgcccctggtggcccacgcaaccctatctgggaaaggctgagggggcagggcctttcctcatttgggccccaatttgggcaaggtagccctgggctggcggggccattggacaatagccactgcaggtctggaagactccaagttggactcaggcaaggatggggaatctatctgtggaaattcccctcttgaaagatcaaagcaacctttctacagagacctctggggatctttctccatcagatggtgacctgcagtggctattgtccaatggccccgccagcccagggctaccttgcccaaattggggcccaaatgaggaaaggccctgccccctcagcctttcccagatagggttgcgtgggccaccaggggcacaaggcagcaggtgaggttcct

SEQ ID NO: 101549 - DNA, 407 bp, Homo Sapiens
gtacctaattgtcatgatacaaaaatttgatactgacattctcttatatgatgagagtttcatttgcgtttcaaaaatggtgttatgatacttattttaaaatgaagattgcttttcatttccattaagttgctaaaatagatagatgtgatctgcagaagttgtttagtcttcatctgaatttcaggctgggagggagcaatataactaaggacaaaaaatgttttgtttttcttgtgtatttatgatcacctaatttcacgttttgtgaaatggacagtaacctgtttcctgaaagattcctgtgggtactttttgagctgtgataatagcaaaattgtttttcggtaataatatcacactaatgcttcttttaaacattaaacctattttccttttttacagaa

SEQ ID NO: 101550 - DNA, 518 bp, Homo Sapiens
caaaatttagtggcttgaaacaacagccactatttatttgctcacgattttacaatttgggcagggctctccaggggtgatttgtttctactctacaaggtgttgattgggcttgattggggctctagggtccaaggtggccacgtgtgtccggggccatggtgctggctctcagtggggacccttggttgtcctccatgtggcctctcataattcagtaatctagcctgagatcctttacatgggagctgacttctaagagcaaaagcaaaaactaaggtaccttttaaggcccaggcctggactggtgccacgtcacttctgctacattctttctgtcaaagcaagtcacatgattcaagggaaggggaaatagactccaactcttgatgagaggagcaccgtgctcatacaaagataggaggaactgttatcatcttctgcagattctatcacagaacaccttcaatatcttatttgtcatcagaagaaaaaaaagataatcaagggaacctcac

SEQ ID NO: 101551 - DNA, 461 bp, Homo Sapiens
gtatatataaaatacatcaagtctgtcttgtgacagtttcatctgaacttaacttaaaaagaactgttaatgttctagttgtgcaaagcagtttgcctgtggataagatgacctgtgtaataatctttgttagtagtcttaaagctgctgccatagtcctccaagaagaaagcaccaagacaacatttcatatgactataatgcatgtactatataagctgatctggctttgaaagatgtgagttggcaagttcctcacatagagtcattgtattccacctgtccttcaatttagttttttctgagcttctttgcagcctttgatgtgtttttaagaaagctgaatgcacaagaggatctgtgacactgacatggctgtggtgtgcatactgtgtagttacatagcccttccaattctgggtccatttgcactagcaaattaaaatatgctttgattcata

SEQ ID NO: 101552 - DNA, 986 bp, Homo Sapiens
  misc_feature (679)..(679): n is a, c, g, or t
  misc_feature (691)..(691): n is a, c, g, or t
  misc_feature (839)..(839): n is a, c, g, or t
  misc_feature (925)..(925): n is a, c, g, or t
tctccaacaccagcaccgagggcttcgggggcatcatgtcttttgccagcagcctctatcggaaccacagtaccagcttcagtctttcaaacctcacactgcccaccaaaggtgcccgagagaaggccacgcccttccccagtctgaaaggaaacaggagggcgttagtggatcagaagtcatctgtcattaaacacagcccaacagtgaaaagagaacctccatcaccccagggtcgatccagcaattctagtgagaaccagcagttcctgaaggaggtggtgcacagcgtgctggacggccagggagttggctggctcaacatgaaaaaggtgcgccggctgctggagagcgagcagctgcgagtctttgtcctgagcaagctgaaccgcatggtgcagtcagaggacgatgcccggcaggacatcatcccggatgtggagatcagtcggaaggtgtacaagggaatgttagacctcctcaagtgtacagtcctcagcttggagcagtcctatgcccacgcgggtctgggtggcatggcccagcatctttgggcttttggagattgcccagacccactactatagtaaagaaccagacaagcggaagagaagtccaacagaaagtgtaaataccccagttggcaaggatcctggcctagctgggcggggggacccanaggctatggcancactgagagttccacaactgggacctcgggcaccaagtgccacagggaaagggtcctaaggaactggacaccagaagttttaagggaagaaaatttatagcatctattgggccctgagtaatcaaacctgtctttgacctggtgagancgaggagaaaagtcccgatcagcgcagacagtgtgtggagctgacgtctagttcccagaggactgatccagactctgtcatcgggntgagtccagctggtttgatccgcacctcaagtcaggatcttaaggtaacccccgggagtat

SEQ ID NO: 101553 - DNA, 615 bp, Homo Sapiens
caaatttcataaaaatgcaaactgtgtaaacagggcctcttatttttataactagtgtaaaaagggaaagcaattcatatttaaagtttaagtatattaaattataatcaagagtaaagaagatgctgaagtcttaactacttgcccctctctacagtttcgcaaatgtggggattgctgaataatcagtcagactaaaaccaaaattgtgattttaagatttcaagactttccgtagttgaactggttaagaatttttgcttagttactctgaatagatgatcttactcatccagtatgggggaatgatacctcacgtcttcctctttacccacaggaatcaaaacgctgagactgagaattttagggaaaaaaaagtccgctgtttagatccagaaggagagttttaatcattgtttatatcatttgagaatgaaaaaataagcttcataaatgaaattctattcacattactgtgtaataaatttccttttggatgattaggattcattgtataaaactgtaaatctttgccattcttggagaagcaaaaggagagttatcaaaaatgtatgtcgtttcatcgttgcaaggtataataaaaactgtaattat

SEQ ID NO: 101554 - DNA, 857 bp, Homo Sapiens
  misc_feature (832)..(832): n is a, c, g, or t
atgacagcggcgaggagaacgtcccgctggatctgcccgagggcttgctctgtcacccaaactggagtccagtggcatgatcatagctcactgcatccttgaactcccaggctgtagggatccgcctactatcagcctctggagtagccatgcctgactaatataagtgtttttgatgtaggaacaaatagccaattaacttataacattgtaaggttagttgttatttacttttggtgcataagcttactacagctggtagaaaatttcccccaaatctgtacttgctctaggattccctgttagtgaatagaatcatacatcaatttacccaatccggaaatctagacttcatccttgattctgccctctatcttttttccatctctaagccgttattaagttttctgctcagaaaatttttttaacttctacttaaacttgcctttctcctcttctgcagttcactctccagagttgtattcctaaagcacaaaaaactgatcatgccattcacttgcacaaatgccttccttaataattatccattgcccaaagatataagatatgttaacttttatctttctaagttaagttaacttatcttagaaagctgttggaatctagctccattttcatttattctcatcatcctgttttctgaagatatagaatttcttgctattccttgagttcattgagaaaagtaccttgttttttcacatttccatgttaatgtacatattgctcttcacattttatatgcctacaagatgtattgcttattgtcaagaataaactcgtgttaagcatctcccctcgtgccgaattnctggcctcgagggccaaattcccta

SEQ ID NO: 101555 - DNA, 183 bp, Homo Sapiens
ggctgggtagagaaatcatataaaacgcaggctgtttagcatggagatgactctcagaacactgggagggtctggcacttgatgggggttagttgcttggcagcctgcctgaagtcccattagagatgtatcaccaccttgtcaccaacaggatgatgtcaccaggtaataaaccttcatcct

SEQ ID NO: 101556 - DNA, 579 bp, Homo Sapiens
  misc_feature (121)..(132): n is a, c, g, or t
  misc_feature (233)..(459): n is a, c, g, or t
catgtctttaattgaatgggatattggcccattttttcttccagtttattacactgaatattgacatgttattttccaatattgagacaatcaatgacaagactttaagagtaacaatgtnnnnnnnnnnnngttgtctgagtttatcaacaatcccctggattagaaccccctaccagttctaggtcatctaatatatagacattgtgttcagtagaaataaatatatatannnnnnnnnnnnnnnnnnnnnnnnnnnnnnnnnnnnnnnnnnnnnnnnnnnnnnnnnnnnnnnnnnnnnnnnnnnnnnnnnnnnnnnnnnnnnnnnnnnnnnnnnnnnnnnnnnnnnnnnnnnnnnnnnnnnnnnnnnnnnnnnnnnnnnnnnnnnnnnnnnnnnnnnnnnnnnnnnnnnnnnnnnnnnnnnnnnnnnnnnnnnnnnnnnnnnnnnnnnnnnnnnnnaatacatttttaaatcatttttaaaggtgttattacattctgattgaacattttcagaaagaataaataatttaatacaagaagtgggccacttcatgtaaaaaaacaaaccaccactac

SEQ ID NO: 101557 - DNA, 444 bp, Homo Sapiens
ttcttaagtcaaaggtttaatcatgatccaagagcccagagagactttaggacaataataggaataaagcaaggcccacaggctccagctcctgatgcccagatgttcggcaggatccggggacagggcagtgcaggcagtagttttccatcctccactcagaggaggagacgagggggcaggagccttcttcacaaaggagaatgactttctaggctgcctcagaacacccagtcctccctaccctaaccctaatctggaatgcaatagagaatggctaacttattagattctggtgatcctggtagtcaagaggaagggctcagaaaggggcttggtggagctggtcaccaccagatgacatggctaaattgtggccaccaaggaggggcagcatgaatcagaagtggagatggggtggagggaatgaggactggaccagta

SEQ ID NO: 101558 - DNA, 852 bp, Homo Sapiens
caaatggcaaatgaagaacattcactggaaaaatgttgccacaaaattgtgccaagtagatgccacagttcaaaaagtgtaatgaagctgccacttgtatataactaaagcttaaagggcagataagagagaaggtgggggaagtttggccagaccacagaagaaggtaaaacatgggcaggtagaacaagaggaaataaaaccattgcagaactgaagtctcagttggaggagagtgtatattggtgtaacctcaagggaaggtaaaatttcaatattgacaaattaaaatttcatatgccctttgattcagcagttccacttttaaggatttatcctacaggcatttccttgcaaatgtgtgaaataatatgttcaagtctgttaattgtattgacatttataacagcaaaacttttgaaatgacctatatattcccttatagagactcattaaataaattatggttatctctacaatggagtattatgcaaccataaaacataagataactgcatgtgactctatatgtatctcaaaataaaaagcttaattaaaaaataataaggcagccttataaatactgttaatctctaaaatatgttgatggtgaaacaaattaacatgtaagataatgtgtatagaatgttagcattgtataaaaaaataacagactatgctgaccttcttttatttccttagtctatctctggagggacatataagaaactggtaaagcagttgtctctggacaaggaaactagctggtttcttttgagtgttgtaacattttataccattgtattattacctattcaaaacaataaattaaacaatttatttaacaataaa

SEQ ID NO: 101559 - DNA, 394 bp, Homo Sapiens
agaaaagcaaacattatctttatttaataatctttgatatttaaaatacaactcattgaacatccacactaacaacagaatcctgtgttcaacagtgctttggaagcccggcttttctaacgaccagacaggaaggcctgtgtgtgtaataacagcaaatgaacttaacgagggagcacacacagaagggctgcagggctgggtcctgagcaagcggcactgccacagtgcacttgtatcatggccaaacaacaatgctttttgtttcagatattttctgtacttgaatttcaaatatttatacagaacagtaatttttaaaaagttattcctaatagcccagtgttgtaaaaattagataatcacatttaaaaatgtatgttttcctctttca

SEQ ID NO: 101560 - DNA, 415 bp, Homo Sapiens
  misc_feature (105)..(119): n is a, c, g, or t
agatgtatccaataacactcacgaagtaattaaaagccactttaaccctgctagtcaaatagctattttatcaaagatgtgtgcatacagatgtatatatatatnnnnnnnnnnnnnnngtactgtacagaaacaaacatatgcatacctactatgaacggccaaggcaagggggatgatggcaacttgactagattctgagaactgctatttgtccacagatagcatgtcaatgttgggatgggttggggagtgagcgtaggctaagaaaaaaagagatgaagtgactatgtgcttttctttaaacttagtagttacagacatagtacaggactctactaataattagtagagatcatgaaagtctgattgatattgaccatgagaccaacagagtgacaactattacttaatg

SEQ ID NO: 101561 - DNA, 437 bp, Homo Sapiens
acaacaggccagagcttcaactagcctgaactcccttcttctttatcatataaattggtaagaaaaagactgcaatctcctcccaccaacaaacaaatggacaaagcatataaatagacaatgggaataaggaaaaaaaacctgttaggaaagaagcttataaagacattcaacctcactggtaatcaaagaaatgcaaggtagataacaagacccatttttcacctattaatttaggaagaaaactggaaatagccaatgttggtaaggctgtggtgaaaccagtattcatcctgcactgccgaaggaaaagtataaattgacacaacctttttgaaaggcaatttggcaagcattaaattatgttcatatccttgacccagaaatcctacttctgggaatttaaagaaatatgcaaaaataaaaaataaagaaat

SEQ ID NO: 101562 - DNA, 544 bp, Homo Sapiens
ggaagctgtatgttggtctttcccatggtggacactggaactaaagctgcaaccaaaaacatggggtgatttcagacttttcccaggaatggatattaaattttatgagatgattttagagcatctgccggatgattatgttgtttttttctttgacctattactgatggacaatattaataaatgtgctactaataagtgaatattatattccaagaataaaatctgcacaatatagtctaaacattatcttgtaatatactactgtatgattttcattggtttagtaaagacttttatatctatctctaaaatgtcattctgggaattataacttggacatcaagttccttacactctggttgccctttattggttatccttcttttttctttttaatgggccaatcaagcacactatgtaactaagatgaaagctctttaagagcacaggtctttgttttatttgctgatttatttactaagatcctagaagtatgcctgatacattattcgtattcaataaatactttttgattggtccc

SEQ ID NO: 101563 - DNA, 738 bp, Homo Sapiens
  misc_feature (218)..(380): n is a, c, g, or t
tgggaactcacccagcgcatccgactgcacggacaatgctgaggagacccccctgactcaaaggaaatagactgcagcactgattggatgactttggaatgaaaaaaagtagttttcctttacaatgaggcttggcccccagggcgatggtgccacaagccagatcactgggaccactcagagaaagggaacacagaagcctggcatgccagcaaaannnnnnnnnnnnnnnnnnnnnnnnnnnnnnnnnnnnnnnnnnnnnnnnnnnnnnnnnnnnnnnnnnnnnnnnnnnnnnnnnnnnnnnnnnnnnnnnnnnnnnnnnnnnnnnnnnnnnnnnnnnnnnnnnnnnnnnnnnnnnnnnnnnnnnnnnnnnnnnnnnnatggtgaatgctggattttgcatgcccgaggccctgggccacactgtatgtttgctttttgcaagggctgtatggctatgactagttatgtggaccctgcattcctatgtaaatgaccctccataaaaaccccagaaatgaatgcttgagtgaacttccctggcttgtattataatactgtgaacatcttgtcacacatctttgctgggggaattaagtgtgtccctatgtgaccgtaatgggagataacacccagagttttgtgcctgctttcatgtggacttcattctatgtgatttttccctttggtgatcctggtctatatccttttattgtaataaactataaccataacaaa

SEQ ID NO: 101564 - DNA, 298 bp, Homo Sapiens
gagcaaaacacaccaagcctagtgccaatcattgacaatattatgaccctgcatgtgatggatcagctgacaccatccagatcggtaaactggttcatctgatcttgtgccctccacccaggaactgactcagcgcaagaagacagcttcgactccttgtgatttcatccctaaccaatcagcactcctggctcactggcttcccccaacccaccaaattgtccttaaaaactctgctctccaaacgctgggggagactgatttgagtaataataaaaccctggtctcctgcaaaaaa

SEQ ID NO: 101565 - DNA, 774 bp, Homo Sapiens
  misc_feature (567)..(567): n is a, c, g, or t
  misc_feature (708)..(708): n is a, c, g, or t
gcggccgctgcaggtccccgctcccctccccgtgcgtccgcccatggccgccgccgggcagctgtgcttgctctacctgtcggcggggctcctgtcccggctcggcgcagcattcaacttggacactcgggaggacaacgtgatccggaaatatggagaccccgggagcctcttcggcttctcgctggccatgcactggcaactgcagcccgaggacaagcggctgttgctcgtgggggccccgcggccagaagcgcttccactgcagagagccaacagaacgggagggctgtacagctgcgacatcaccgcccgggggccatgcacgcggatcgagtttgataacgatgctgaccccacgtcagaaagcaaggaagatcagtggatgggggtcaccgtccagagccaaggtccagggggcaaggtcgtgacatgtgctcaccgatatgaaaaaaggcagcattgttaatacgaagcaggaatcccgagacatctttggggcggtgttatgtcctgagtcagaatctcaggattgaagacgatatggatgggggagattggagcttntgtgatgggcgattgagaggccatgagaaatttggctcttgccagcaaggtgtagcagctacttgtactaaagactatcattacattgtatgtggagcgcccggtacttataacatgaaagggaatgttcgtgtagagcanaagaatacactttgcttgacatgaacatctttgagcatggccttatgaagttgttgaaagagctga

SEQ ID NO: 101566 - DNA, 499 bp, Homo Sapiens
gtatggaaccttcacatgtactccataattatatacaaatattttgtacccataatatttaaaatacagaaaattaaaaggtacattttcctcaaagtgcatgctgcttttgctatgcaaaactgcaggatatggaaagaagtgtattaaaacactaaatcactttatgtggaagataaaagggatggtatccaatgtacgacttcatgtagtgcactgatacattcaatacaaatgatgtattaacttcaagataacatgagaaagttaaattatctaacttatttcaaactaggggatagtatgttctcattattagaagccagaattctgcttatccatttctattattagaaaaaaacataatttttattcttgtcttaaaaatagacaccttgatataattctctgtaaatgtagcatgatagtctgtttacagagtttatatcattccaagactgcacttctaaagtgagaaaatattaaaggatataaactc

SEQ ID NO: 101567 - DNA, 875 bp, Homo Sapiens
gtgaacagcctgtttgctggaatggacctgacgagccttcagaatctccagaatctccagtcgctccagctggcaggcctcatgggcttccctccaggactggcaacagctgccaccgccggaggcgatgcgaagaaccctgctgctgtgctgcccctgatgctgccaggaatggcgggcctgcccaacgtgtttggcttgggcgggctgttgaataaccctctgtcagctgctactggaaacaccacttctgcttctagtcaaggagaaccggaagacagcacttcaaaaggagaggagaaaggaaatgagaatgaagacgagaacaaagactctgagaaaagcacagatgctgtttcggctgctgactctgcgaatggatctgttggtgctgctactgccccggctggattgccctcaaacccgctagccttcaaccctttcctcctgtccacaatggccccgggcctcttctacccatccatgtttctacctccaggactggggggattgacgctgcctgggttcccagcattggcaggacttcagaatgccgtgggctccagcgaagaaaaggctgctgacaaggatgagggaggaccctttaaagatggagagacccttgaaggcagcgatgccgaggagagcctggataagactgcagagtcctccctcttagaagacgaaatagcacagggtgaagagctagactcacttgatgggggggatgaaatagaaaacaatgaaaatgatgaataaccagtaccagttccagttcaagtgtttaaaacttttgacaagtggtagtcctactgtttacactcacagttaatgttcatacctagttttataagctgttctgtaacatagtgtag

SEQ ID NO: 101568 - DNA, 1057 bp, Homo Sapiens
  misc_feature (47)..(78): n is a, c, g, or t
  misc_feature (193)..(201): n is a, c, g, or t
ataaaataaacaactgtgaaatacttagaattgtattgaataacctnnnnnnnnnnnnnnnnnnnnnnnnnnnnnnnnactccacttttccctttataaattatgacaaaatataatgcttgctctttttctcaaatttagttgctatcttataagaatatatgcttattttacaagcttgaggatttgtgcnnnnnnnnngtatgtatatttatataattattccttaaatttctgtatgtgcttctttttttcttaagcataacaaaatactctttcattaattctgaatgctgtatttcgatattacattcaataattgaaattttagtgccatagagatcagggaattcttcacatcttgtaacctaaagatatcaacaaataaaacgtcttgatatttggctttccaaagcaaaacattgaaaagaactcactgtattgctctttaccttttgaaaattgttacccattagacagtggaacaaagtgatactttttcagtagtgttgcctcttagtttcaggattcattttgtgactggttgttatttaagtgtgtgaatggacaagagtattgagacgactttatgggtttgatttttattaaatgattgaaatatttcattgttttccatatttctagtattatgagaagtcatgtgagattaatttccacaccattactgatgctaaattatttaaacatgagagaagtctacttacctatcatcatacatgttatcttgcagtatttctgtacatttttttaaaccttctaaaatgcttccatattaatgcattccctcctagttttggaaccagactttttttcaaatcaaaggtgaacccattttcctttaactttccagctgacttctttgtattggtaatttcgtctatacatccattttaaagagcagtgactatgtagaatcattgacgctgacactaactataaatgtttaataattaggattgatttgatgcatctaaaaccagcaggttatgctgtctttgtattcaaaatgcaataaattccattcatagctaaaaaa

SEQ ID NO: 101569 - DNA, 440 bp, Homo Sapiens
ccaagtacatatagtaggtggggaagagaccccgatccattccccttttatcccggattatccgacatcttactgtgacaccttgaggggcaggactatacacaaagtcctccaggtcgtctatgtctcccaggaggttatcagctggttgggcggcagtagcagaaccggaagtgcctgtatcctgaaaggacagccatacatgagcaacaacaggccgagactcaaaatctgattctctttgaaaaacacttagtggacaaagcaacttagtaatttacccgtgtcttcagtcttctgacagaatgaggaaaactgaaaagttaaattaagtatatgaatattgagagtaatgaaaagtaagtatcaaaatgggacaaagcctcacaatagctgacctgagacagaaaaaattagatcataaactaaatttggcggcc

SEQ ID NO: 101570 - DNA, 285 bp, Homo Sapiens
gcgtgcgccaaggccggcgtcgggggcgcactgtgatggcgctttgctcttcccaggcgaagacaaatatctcgacccgatgtccccatgcatgcgggtgcacaggttctgagaaaatcacgcagaaggcggctgcgatccacggcccgggctgggctacacctgcttggaggtcgctggtgtgtgcgtgcgcgcgtgcgcagcctaactccttccagccccgggtggtgaaattagtttccaatactagtacctttcaagtttccatttattttgactgtaccc

SEQ ID NO: 101571 - DNA, 416 bp, Homo Sapiens
ctttaacatgataataatgataaggccacttaacaaggtttttcccaatctgtttaacttttaggatcccccattgttaacccatggaaaaaatgggcagaggaaaagccaaagccaaagaaatccctggtaagtctccagatgaaattaaaacagagagcagcgattaggaggaaaaagataggaatgaaagagggaaaagggtctaaaagtaggtaattgcctctagcgtgagattttgtggattatgttttatctgatggtgggttttgaactgttgcagatgcccacaaattaaaggttgttacggccaccaaagaaaaatcaagtagtggtcagctcatggggatagtccacaccacacgcatcctcggggagggtggtgcctctacctacatcgagacaactggggccta

SEQ ID NO: 101572 - DNA, 548 bp, Homo Sapiens
  misc_feature (94)..(94): n is a, c, g, or t
cgttggcactctggttagggacatgctgaagatcccggggaggcaaagttggtacttcaaacccggctcttaacacatatctacaccgcgaggngatcacggagctgccgaggactttagagcccagggccgaggactcggctagactgattcccgacagttaagcaatggggagacatttggctttgctcctgcttctgctccttctcttccaacattttggagacagtgatggcagccaacgacttgaacagactcctctgcagtttacacacctcgagtacaacgtcaccgtgcaggagaactctgcagctaagacttatgtggggcatcctgtcaagatgggtgtttacattacacatccagcgtgggaagtaaggtacaaaattgtttccggagacagtgaaaacctgttcaaagctgaagagtacattctcggagacttttgctttctaagaataaggaccaaaggaggaaatacagctattctttatagagaagttgaggatcactacacattgatagttgaaagcactggaaaaaatact

SEQ ID NO: 101573 - DNA, 450 bp, Homo Sapiens
gcggtacagatgaactatgtaaagcatttggcccaatgcctggcactgctaagcatgcaataaatggaagttactatcataatgtgtaacacatataatgatgacaattatatttccaagatattctgggatctttacagtttcataattttgctctttttactatacaacactccttttattgaaacaaatacagattttggagtcagacagacctagtctggatttgaattccagctctccttcttaccagcctggggccatggagaatgttgtccatttccctgagcctcagtgttcttctctgtaaaatgtggatgatacctgactcccaggcattttgccaggattacatgggattcctacacagtgcaatgtctagtgataatataaatactaaaagcaacttgttaaatgtataaataaatgtgatttatttttgctccttta

SEQ ID NO: 101574 - DNA, 714 bp, Homo Sapiens
ttaaaaacacaacccccatagcaaatagggaggtggcaatattttcagcccttttcaggtgggagagactgaagtgtagagttcaggtaacatgtgataagccagtgaaagggacaggggaggcagtttgggaaaggtgatgggttacaagtggcagcctagggaacagctgagaggacactacagtggtccaggggaagatgtaggtcgcttggacaaggacaggggcagtaggataaataaggacaggacaaaagcaagaaatattaggagataggacttggtgatagaaaacatgtaacagattagggaaatgaaggtgttaaggatgctgtctctttctgtctggggcagatgggtggaatggtggtgatatttactacgaaaaagagcactgagacagaacagatttgggaaatggatggggaggcagagcaggaggggaagataagatgttcacttttgatgccttgagcctgagtatgttagagatatcccactgcagatgcccagtgggcaatgggtctcaggagagacatgtgtgtgggaggtaggaattttggagtcaatgtcatcaaactgctcattgatggcacaagcatgaatgaatgatccatggaaacaaaataaagtctaggataaaatttcaggagcgtcaagatttaaaggttggatagaaagaagacctagaaatagcaactaaagagggattag

SEQ ID NO: 101575 - DNA, 472 bp, Homo Sapiens
attaaacaggtgactatcagtaagaacagtggcctttgtgggttgtagctttccctggttcaaccctgccctccagctcagtggtaatcttggaaataagaacctacattcctagttactgtgggagcaaaatgccctcattcgcacagaacctccgttattgaacgtgtctgatggctgcctagaagactcctaccacattggctcagggcttgcccagtgccagctgcctgaggtgatggataacagttgccacaaacaatagactaaacaaaaagctaaaaaggaagagcaagggaatgagatgtccacaggcgctttgaaaagcccaaaacatttttgggaatacaggtcatatacacacggaggactatggatatatactcaggagagacctgaaaaagccctaaactctcacctctggctgaccttgaggctctatacaaagggaagtctgaggaagagaaattta

SEQ ID NO: 101576 - DNA, 563 bp, Homo Sapiens
  misc_feature (354)..(445): n is a, c, g, or t
ggtccatgaacttcaagccttggagtgactgaccttttttacagggacactagaaggcagcaatggccaatctcttaatgcccaatgcacagtgtttcttaaatcccctggtgatgttttgcttggctgatgcctagcaaggctggggggaatggctgggaaactggctttgctgagctctgtcctctgccagagctggaggaaggtggggttatggatgctcttcaaggaaagccaagtcagcttgtcacttgccctctggctctgggctgctcaatctgcttcctgctgaaaccaagttcagtagaaatagagggaggacaaaagatagccttcaagccagagtcaagagannnnnnnnnnnnnnnnnnnnnnnnnnnnnnnnnnnnnnnnnnnnnnnnnnnnnnnnnnnnnnnnnnnnnnnnnnnnnnnnnnnnnnnnnnnnctcgccatcgctgtgatgaggacattgatgccatctctactgacccggtacgaggagctgcatccatactgcctcatcatctccttttggctatttgatggggtctggatgacaaaac

SEQ ID NO: 101577 - DNA, 315 bp, Homo Sapiens
  misc_feature (106)..(126): n is a, c, g, or t
aaaaactgtgtatttcttcactcaaatttcatcagtattgagtttcagcatctgtacctatttcattatttctttttatgctcatcagtctttaatatcttcaagnnnnnnnnnnnnnnnnnnnnngttagtaacaggttatttcaaattatcttccaaagttttcacccactgacttaaaatacagtagttcttaactcttctttcactacagaacaaatggaaacagcagttacctctattttaatggtaacttttggatttatgctgtcttaattcaatgacaaaatattttaatcttggaaatcctcgtgc

SEQ ID NO: 101578 - DNA, 578 bp, Homo Sapiens
tctacgtgagctacatgagcaagacgaacctcccacacagcacagaggaagttgctcagcactggagccagctagccccacatttggaactggactctgctgtgcaaagttgggtgaccctagggaagagccccagcctccctgggcctccgtttccacatcccttagagggcctagccagaccctgcctcacagggccacacacgagactccactaaggtggtgtacaaagacttgcggtggggcctggggaggggtgtcagtggccaggaaagcaagccgggtgaatggtggaccctcccagagggatgtgtgctaccctgggaggtctggactccttcctcccagtgtgtgcctttaggcagatggctgccagcgtaggtcctcaataaagaatgggtccaccccagtatcattcgaggtccccacaggaaacagaattccccccaggtggctcaaatgaagagacacagatggaggggcttgtgactgagttaggcagggttaaggaaatccaaaagggatggggagactcctggactagaacagctgacagctgtccgcagcccgcatctaca

SEQ ID NO: 101579 - DNA, 526 bp, Homo Sapiens
  misc_feature (498)..(498): n is a, c, g, or t
  misc_feature (509)..(509): n is a, c, g, or t
agaagacttaatgcttaagtgcagcaaaacttgggttagtttttttaaaagcaggaagataatggtttacattcagaacctagtagtttaatatttagcacgtcatcagttgtattaagtggattattttacaggctctaggagtttcgtatttttatgacttgaaagttctcattcttaggaaatgtaaaattaatgccagtttttgactagctaacggaaacttgtaacactacctataatttagccttacaggcttctacaataaagtaattcatttttttgtggaattatattaagtgagctatttgggctagttaaatatttactaatgacttctcccattagcacacaagtatattccctattttaaaagattgtaatattactttttcaataactgctcttttgttctcaattccagttcagtagctgctgctttaaacataagttgatttcttccaaagacctgaggcagcagcagtgggctatcactgngccactagctntctccaacatcagaatg

SEQ ID NO: 101580 - DNA, 514 bp, Homo Sapiens
  misc_feature (392)..(447): n is a, c, g, or t
  misc_feature (472)..(472): n is a, c, g, or t
ataaaatatagctctgaggacaccctaggagggcccacacttctagtacaacaaggctgtcttctcacagcctgtggaaactcctgaagaacagcattaagtgatactccgaagagatgatgagaagcaattggccctccaagaccatggtgcgggagtttgttggaaccagctccagctgactcctcttcccctcccaagcctcctagctcatcccaaaaggagctcctcccacaagtaccttaatagtcccactccatttgattctcacagtcctgaaggggcaggctcctgttgccattgtagagatgaaaaaactgaggctcaaaaagaaaattgccttcctcaacgtcatacagcttgtcaatggcagggctgggattcaaacccannnnnnnnnnnnnnnnnnnnnnnnnnnnnnnnnnnnnnnnnnnnnnnnnnnnnnnnacgccaggagttgcttgactccagnagttcaagacctgtctgggcaacatagcaagaccctgtgtct

SEQ ID NO: 101581 - DNA, 364 bp, Homo Sapiens
ctcactttaaggagttataagataacgctgtttaagaagccaaggctaaagaaatgggctccacacacccgccttttagagcaaggttgaaggaaaaaagaaagagaaattcctttactgttactcctttccctggcttcctaagcataactgtgtttacaaatgtctggatttagccagtccttgtttttcttttgacacagctacaagccacaagttatgcactatatgattaactgcttttgttttacttttgtgaagtctgcttataaaaaccccattctgtctttattcaatgctaagctttttaaatgcaaatccactgagctagtgcatacctaaaataaacagtccttcccttctc

SEQ ID NO: 101582 - DNA, 456 bp, Homo Sapiens
cctaggtatttgcccaaaagcaatgaaagcgtgtctacacaaaaactgtccacaagtgtttacagcagcattcttcacaacagcccgaaggtgagagcaacccaagtgtccattgcctgatggataaacacagcatctccatctacacagtggaacactgttcagcagtaaaaatgacgagtgctgaggcatggcactacgcagctgaacctcaaagacacagtgccgagtgagagaagccggacaccaatggacaaataccgtgattccatttataggaagtgtccgggagaggcaaatccatagagacagagagcggcttggtggcgattaatgctggagaggagtcgggggtgacagctcaggggtacaggggtctctctggggagtgacgaaaatgttttcatgattgtggtgatgcttgcacaactctttggataaacaaaaactcacaga

SEQ ID NO: 101583 - DNA, 449 bp, Homo Sapiens
ttgattgaattgaaggatgcaaattattgttcctgggtgtgtctgtgagggtgttgccaaaggagattaacatttgagtcggtgggctgggagagccatactcaccctcaatctgggtgggcaccatctaatcagctatcagcacagccaggataaaaggcagaagaacgtggaaagactagactgactttgtcttctggtctacatctttctcccatgctggatgtttcctgtcctcaaacatcggactccaagtccttcagctttgggattcttggacctttgaccacagactgaaggctgcactgttggcttccttacttttgaggttttgggatttagattgacttccttgctcctcagcttgcagacggcctattatgggacttaaccttgtgattgtgtgagtcaattctccttaataaactcccttttatatatatatctat

SEQ ID NO: 101584 - DNA, 584 bp, Homo Sapiens
gagtttgaaccatggtcctgccacttcctgataatggcacctcaggatgcagcctacatcaaggaagctgcctgctgttaggggaacaggatacctgcagaggctccggtcctgacaatgccttcagctccacctcccaccaaagacctgtgtggtgtcagcagcagccccatttgcagaacttcccagagcaggttatctgcaatggaagcagtgatgcagcacccacatgtcccagaggaagggttgtgagctaacagctcacagctggatcacgctgggggatttttttctttccccgggagaaaatgcatctaatgactgattgagatgacgaacagaagcctggccctttgcgtatctgggctgctgacccaataaaatggagcccctgtgacctgctttcagggctttcacaactggtcccgcatgacgaccctgcctgacaaccccaacttggcttcagccttcctcttgctggatgacttcagcaagtcagacactctccatgcatgtgccttctcgtttataaaacaaagacaggattattgtgagaatcaaataaaataatggatataagcaaa

SEQ ID NO: 101585 - DNA, 642 bp, Homo Sapiens
taattcttgggtacaacagcagtgttaaccgcagacactaggcatttggattactatttttcttaatggctatttaatccttccattccacgaaaaacagctgctgagtccaagggagcagcagagcgtggtccggcagggcctgttgtggccctcgccacccccctcaccggaccgactgacctgtctttggaaccagaacatcccaagggaactccttcgcactggcgttgagtgggaccccgggatccaggctggcccagggcggcaccctcagggctgtgcccgctggagtgctaggtggaggcagcacagacgccacggtggcccaagagcccctttgcttcttgctgggggaccagggctgtggtgctggcccactttccctcggccaggaatccaggtccttggggcccaggggtcttgtcttgtttcatttttagcacttctcaccagagagatgacagcacaagagttgcttctgggatagaaatgtttaggagtaagaacaaagctgggatacggtgattgctagttgtgactgaagattcaacacagaaaagaaagtttatacggcttttttgctggtcagcagtttgtcccactgctttctctagtctctatcccatagcgtgttccctt

SEQ ID NO: 101586 - DNA, 1001 bp, Homo Sapiens
aagggaacttgctatgggatagagactagagaaagcggggggactaactgctgaccagcaaaaaagccgtataaactttcttttctgtgttgaatcttcagtcacaactagcaatcaccgtatcccagctttgttcttactcctaaacatttctatcccagaagcaactcttgtgctgtcatctctctggtgagaagtgctaaaaatgaaacaagacaagacccctgggccccaaggacctggattcctggatcccggggtcccactcaacgccagtgcgaaggagttcccttgggatgttctggttccaaagacaggtcagtcggtccggtgaggggggtggcgagggccacaacaggccctgccggaccacgctctgctgctcccttggactcagcagctgtttttcgtgggatggaaggattaaatagccattaagaaaaatagtaatccaaatgcctagtgtctgcggttaacactgctgttgtacccaagaattaaaaaaatatatatatatgtgtgtcacaacctaagcaaaggcaagggaaagagagggtgaggcttctcaaccacggtgagtggaaacactgaacaaagacgtgtgaaatatttaacctttgtttttctgacctgagtttgtatcatgtcttgcactgtaacaggctccaatgctgtgagggcaggctggggagaggagcgcggccctctcaggatgggtgcccggcctgctttctgcctcgtgcccagagagcctacgggttagaaaacaactaaaggggcaggtgggagcagggatgggggatgtatttataaaaaggcatccaacagttcatggcaaattatgtgatagaagtatccattaccgggaaaagaggaagaaagtcacgcactctagtacaaagcataagaagtttcttggagtgagcagaaaggggagagggtggacctgaaggttttcatagattaaatccacaaagatcaagaacaaaaaaaatagcagc

SEQ ID NO: 101587 - DNA, 335 bp, Homo Sapiens
aatcctcacgctaaccctgtgaggtggcatggatgaggagctgaggctcagaagttacatggcttgtccaggatctcacagcaaagccatagtccctctgaccctattgcccaggctcctacatattcactgcactgtttgtcgctgttgaacacatgtctgtctctctcccctgcctggcatgagctccttcagggtgggacttagatgccaggcacatcaaggacctgctctaaattgtttactggacatggctggaaggttttggaggaaaagaggttgaaatgaaccgaagcaggggaggtacagcatgtgtactaaccgggcaggccatg

SEQ ID NO: 101588 - DNA, 577 bp, Homo Sapiens
  misc_feature (74)..(74): n is a, c, g, or t
actttatttccaagtcattatctagtttctcaatgtggcattgcaactctgattttttactgttcgtgcactanagcatttgagataagcccttagtgttgaggaaatcctaaatcctactgctggggggttaaaagaaatatagtgacaggctatgaaatagtgttgtcataacttatcagtggctagtaaatagggtagttgccttctgacaccattttgagtgaaggcagtttaattgcgttgcctctgtttagataagcatttggaatccacagtcaaatgtgtgaatgctgtggttaaagtatttccattatatgagatttgatttcttaagtgatttttttgtctcaggttccattctacatcaaaaggtatttggaaaatgtctttcactgtatgtgtacatggagaaccataacctataattgtatgtaaatctagtgattgtgaaaaacaagaaacttgcagacacatattaacagttggtgacttatcgccagttggtgacttacttacctacccctgcctctcaaatcttgttataacaattaaacagttcgtattaagactttgt

SEQ ID NO: 101589 - DNA, 661 bp, Homo Sapiens
taaggtattgtgctatttaaagatacacagcaaatgatgaaaacatgcaaaaatgccacttcagttaaaatggctgttaaaattgtgtttatttttcttctgtatcttctcgtttttagtgtaaaaatagtacatatggtataacccattacaaagaaggaaaattgagctgatgtgcagtcatgtgttgcttaatgacagagttctgagaaatgcagtttgggtgattgcatgtgagcatcatagaaaatacacagacctgtacagcgtgttactgtactgagtacaatgttaacacaatggcaagtatttgtgtatctaaacatatctaaatatagaaaaggtacagtaaaaatatagtggtataatctttcaggcttaccatatatgcacatttgattgttgaccaaaatgttacgtgttacatgactgtctttattttgctccaaaaaggaccaaaaaagtgatagcagagttggcgattttcctgttttccagataaaccaaatggggagggattccaaaagttgttaaccataggttcatgtataatgaattggaataaaggcactaaattactaaactttctactctactatcacaatttgatttattttgatttattcaccaccgtttcttagtccaacatcagaatggtaac

SEQ ID NO: 101590 - DNA, 827 bp, Homo Sapiens
gggttcgaaggatctatctaaagaggagaacaaatttcttctggataattctactggaaacagagtggaacaagggatgaaggcagagaggaaggggaagaaaattaagatacaaagggaaaagttcgtcatcatcatcatcattagacatgtctcaactgggtttcagatcagctaaagagagatatactgtatcagcttacagtgaggagtgagtctgatcaaatcttttcctcttggcgtatggctgagctttggacccagaaaggatggttgccccttcctagaatagacacatccagttgagtgttcaaggggagcatggaccccagatgtccaaaagggacatgagggaggaacatgagccacttccctgcgcagctcctaggtgtacctgaatgtcatcgatgtcactaataaatgcagtaatatatccaggaatgctatgtatatcagatacgggagtgtctgtcatcttcttttaagaggtactgactttttggaaatacaaaacaatagtcttatcagtgtgtctatgaaaaaaaaccaaatgtagccacctacctgcacatcccagaggcctttggaggacatgtgagaaagggggctgacaggagcttcaagtgtaggagaagaggaaactatcctccttccctcctcatagtcatcgaacaaggaggactcaaaacaatagttcacttgtctgtcacttctcaccttcctcagtggttccagccctcattgcagaatctagggtagaacaattgttgggacagctgcttgtgaaaaggagaggcagttctaaataaaagcagtttactcaacac

SEQ ID NO: 101591 - DNA, 421 bp, Homo Sapiens
aaaaattcaaatcatatatttaatacaggactcatatccagaatatgaaatacacttacaactacgcaacaaaaagataaataacccaattttaaaataggcaaaatatttgaataaccatttcatcaaaaaggtgtaggaatagacaataaaatacatgaaaagatggtcagcatcatcagtcagcagggacatgcaaatcaaaactacagtgagacaccacttcttacccactagaatgctataataaaaaaggacagtaacacctgggggaagtgaaataatgacgtggaaaaactaaaacactcacgcattgttgatgggacatgcagtcacgttggaaaccagtttggcagtatcttaaaatgttgaagatatatttaccatatgacctagcactatcacttctagctatctaccc

SEQ ID NO: 101592 - DNA, 534 bp, Homo Sapiens
  misc_feature (340)..(340): n is a, c, g, or t
gcggccgctgtggcgcgcggctaccccaagcccctggccgagctgccggggcgcccgcccatcttctggcccggcgtggtgcagggcgcgccctggagggacccgcgtctggctggcccggccccggccggcggcgtcctggacaaggacgggaagaagaagcactcgcgcccgaccttctcgggccagcagatcttcgcgctggagaaaaccttcgagcagaccaagtacctggcgggcccggagcgcgcgcgtctcgcctactcgctgggcatgaccgagagccaggtgaaggtctggttccagaaccgccggaccaagtggcgcaagcggcacgcgngcggagatggcgtcggccaagaagaagcaggactcggacgccgagaagctgaaggtgggcggctcggacgcggaggacgacgacgaatacaaccggcccctggaccccaactcggacgacgagaagatcacgcggctgctcaagaagcacaaaccctcgaacttggcgctggtcagcccgtgcggcggcggcgc

SEQ ID NO: 101593 - DNA, 448 bp, Homo Sapiens
  misc_feature (48)..(72): n is a, c, g, or t
  misc_feature (139)..(170): n is a, c, g, or t
tcagtaaacttgaagacagctcatttgaaattattaagttagggagtnnnnnnnnnnnnnnnnnnnnnnnnntgaggagagactaagggtcttataggacaccatcaagccaaccaatatacacattatagtaattccnnnnnnnnnnnnnnnnnnnnnnnnnnnnnnnntctgtttgaagaaataataaccaaaaacttcccaaatttgaggaaataaatggacatacaaattcaagaagctcaaagaacttcaactaggataaaataaaaaagaattacaccaagacatactgtaatcaaactgtcacatcacaatgaaaaaatcctgaaagcagcaaaagagactaatcacttatgagggaaccaactctgtaagataatcagcagatttctcagcagaaaccttgcatgccagagggagtggggtgatataaacaaagcactaa

SEQ ID NO: 101594 - DNA, 592 bp, Homo Sapiens
cggagcccagcccggaccatgtggtgaaagtggccgagtacaacaaagtgaagctgagcatcttcattgcccgcctctaccacgactgtgacccgggattccagcacgggcttcgcagactgcaggacacagaggcacgcgtgcacatcatgtcttctaaggaatttgaacactgttgagaagactgtgtacaagagagatgtgccatgtcagccttgcaagggacagcgtgaaaactacccatctccggtcaccaagttgcaggaggccaggagccaggaggggaaaccgctcagtttgcaaaacgtcgcttccacaagcctgatggctgaaactgctcactgtaccctgaaaccagctttacctacagcttctgagataaactgctgcaactctgggacccacgatgcctatcacagtggctcatcaatggaacctgccggctcccaacccttcctagggcccatgaactctctgaaaagaggaacagaaatatttctcctttttgtaaaatctttaaccttccctttgttcttcatgtacacgctgaactgcaattcttcttcccaaataaaacattaaatttaaaaaa

SEQ ID NO: 101595 - DNA, 511 bp, Homo Sapiens
  misc_feature (359)..(367): n is a, c, g, or t
acctccttttgaaggacatgtaagatttgtactttgaagatggtaaatgttaaatctatgatgtgacagtaacctctagctgcaaatacaagtttcttctcttaacatttgactcacaaagggagatggatcgtagcaaatatccaagtaatgggtaaggccctcagagctgggttttggctttaacacgctatctatacaattgaccacattctcgaacctctttacaagggggaaaaaagtaatccaatcctttgattgttaaatttaattagaatagatatgtacatataatactgtccaggtcaactggattttatagtgatatataaacaaacattcttcattcacgttgattnnnnnnnnntcaatgatccatttccctgtgtaaatgttatatggccagaagtgagtacacatacactttgtgcttttacacacacaaaagtatactgtaatccactgagaataacctcagctgggtctgtttcctgggttatgttatatcttg

SEQ ID NO: 101596 - DNA, 898 bp, Homo Sapiens
cctttaattccctcttgccatgtaacctaacatattcacccattccagggattaggacgtgggcgtctttgggggccacattctgcctaccacacagtcctctctaatggtgtaggatgcctctctccaaatcacaaatgatgaataaataaaagcatctctacccagggctgttgcatttctacctgagaagaggtcctagcagagtcttccaaatgctgattattcctgacttcttcaacagctcccaccccccggcccctgcccagcctcccctaccaggctcgatgtaaagtgatggtgaagtgaaaacagatttggggcccttgccacctctttctggttggtaactttgtttcttggacaacaatgcagagtttgaagcccatccagggacaacattccatctgccccctgcaagttccggtaattggtcactatttataattatataaataatagaaaaacaagcttaagctgccctccccaaaaacccagtctcctcctatttttaggcagccagcctgccctcctgtagggcagcgtccctctgaggtctgggccactcagctccagccatgggctgaagcaatgatgctggtgacagcagtgattctgccacccaggaaggggccaggggtgattttctaactcaaggttgagtttaaagctctcagagaatgaagagaaggaactattctaaagcccccttgctgcgatcattctcccaagaccaaatctgattctgtaagaactgggagctggacagagattcgagtctgaatttcattgatgtgtctcactgggagtcacgggaccgggagagacgagaggctagaagagacaggagagtcaggctggctataaagtccttgatgtccaactaccacccccctgc

SEQ ID NO: 101597 - DNA, 296 bp, Homo Sapiens
  misc_feature (55)..(172): n is a, c, g, or t
agcaatcctcccacctcagcctctggtgtagctgggaccacagatgctccaccannnnnnnnnnnnnnnnnnnnnnnnnnnnnnnnnnnnnnnnnnnnnnnnnnnnnnnnnnnnnnnnnnnnnnnnnnnnnnnnnnnnnnnnnnnnnnnnnnnnnnnnnnnnnnnnnnnnnntgagccactgcgtccggtccatctgacttctcaaagactttagaccttgacttcagtgatttgttgtagtcttgtatgcttctctataaaattttaataaatgaaatgtcttatttttgtagaa

SEQ ID NO: 101598 - DNA, 486 bp, Homo Sapiens
gggaaaatgcattctaattaccagactactgacttcaaaaatgagtgtttgaaacacaacttgtttgtaaaatactacatcttttactaattttttcatgtagtgtttactatttttctagtaaggcaaagtgaatgatatgcctactgtgtgctaatcagcactttcatgtcattgcatgtaatccacaaacagtcctactaggtagctagtaagaacttcatttaaaaggaggaagttggaattttagaagggtccagtgatttatgcagatagtagctgttgtaatgtagcctctataactccaagctcaaagcttctgctactatcttctgttattaacaggggagaggtttgatacatgtaacaactgttatgctacaggcaccaaccattctggcattatagtggatgccagaatactagaggatccctgttgcaccaggtgttaaccttagggtatatggaggcggaggtggaaagggc

SEQ ID NO: 101599 - DNA, 413 bp, Homo Sapiens
gacggggaagatcagtctattggaggggaccactctaggaagccacgacagcccaaccctgactggcgttactctgcctccctgagagcaggcatgcacagctctgtgcacctagaggaggctggcattctacgggctggtccaggagggcctgatcagcagtggccaacagtatccagtgcaacaccagaaccagaggcaggagaagtgtcccctccagtcggtgcgggtgtcaacagcaacagctggacctttaaatacggaccaggcaaccccaaacaatccggtcccggtgagttgcccgacaaattcattatcccaggatctcctgcaatcatctccatccggcaggagcctactaacagccaaattgacaaaagtgacttcataaacttcggcaaaaaggaggagac

SEQ ID NO: 101600 - DNA, 166 bp, Homo Sapiens
gtagatgagattagtttcgtagaccattacttcacattttgctcctacccttgtgcataaaatcactgcatcatttccgtggggatgaggctactgcaagctacttccttggagattctgtggaagatggacatcttaaaagtaaactactttgggtatggctaat

SEQ ID NO: 101601 - DNA, 410 bp, Homo Sapiens
aggagcttgaccagtgtgccccaaggagtggagtagagcccaatctaagtattccttgctgcttggaaccctccctgtttggaaccctccccaaagaggcagtcaggctgatgctcagtgctttgtgctccctgctccttcccgcgtagccaggtgggcccaagggtgcctggcagggagcactacccctggacccctcctgctcgctctggggaccctgccagggaaggccactgggtgttcacctgcaaagtttctggttgtcactgcacagtggtcgcgtcatccatgggtattaaaaggacactgtcaagtacttttttaaactagtttttagggttttttaaaactctctgttgtttgtaatattctcttaaaagcttgaaaataaaacttctttccctacaaaa

SEQ ID NO: 101602 - DNA, 732 bp, Homo Sapiens
  misc_feature (264)..(318): n is a, c, g, or t
tgggaaggccctggcgctgcatcagatgagcagggcctggcagggacaagcctcttctcctttgggaagccctgcagcctcctagcaagaggctgattccccactctgcccccatctgaatgtccttttcatgttgcacgcagggaacctcaggaaggaggattgcctgatgcctgcctggctccatccttgagctctgggcaccacctagggtgagggagagcctgcagctctggggctaagtctgccctggggggaaagggnnnnnnnnnnnnnnnnnnnnnnnnnnnnnnnnnnnnnnnnnnnnnnnnnnnnnnngaggcttgcggacccatactcacaggcacatgtggcctggggactgggggagcaggaaagacccctccaacatttggcccttggaaggcaccattgccaatgagcctctttgctggttcccccgaccccacctgggggtcccatgggagcccagcccagccaggtgtggggatgggccaccggccattcctgttttccttgtacagacagattctcactacccacccgccatccccagacacattttatttaataacttgtcattgttaaattatttattagcgtttaccacaccaccacccccaccctgccctccactctcaccttccacctcttcccacaacagcagaaaatggaaacaaccaacaaaaaaagatgagacatcagtatatttgtaaataaaccgacctgtac

SEQ ID NO: 101603 - DNA, 560 bp, Homo Sapiens
  misc_feature (37)..(37): n is a, c, g, or t
agcctatctggctccctattctgccactggctacatnttcaggcaataacagaggaggtgcaggcattgtgtggtaggccaaataatcctcccctcccccaaagatgtccatgctataatccctagaatctgtaaatatgttaccttacatggcaaaagagactttgcaggtgtaattaaggttaagaaccttgagaggaggggattatcctggattattcaagtaggcccaatgtaatcacgagtccttgaaagtggaagaggaaagcagaagagttgctgactttgatgattgaggaaggggttcttaaactagggcatgtgagtggcttctgaagctggaaagaaccctcagctgacagccaccaaggaaacagagatttcagtcttacagactcaaggaactacattctaccaatgatcaatgtacaaggaaatagattttccctcgagcctccagaaaggaacctagccttgctgacactttgattttagactggtgaaattcatgctgaacttatgacctacagagttgtaaaataaataaataaataaatttc

SEQ ID NO: 101604 - DNA, 544 bp, Homo Sapiens
ggcttggtgggaagggtggcttactatacagttttaatctctctttccaaccccatatctggttctgtctttctggggttcggcctggtcacttgtctccttctggattctgtgtcaaaaccttaaacacacttcctctaatcttccatttccccactctgttccctttggcaacacatttccatcagtttccactttctagaagtgcatttaagtcacttgaatgctctgggctgctcttccattcttttaactgttattggttcatttcctttggcatttcattttagtgaggttttggaaggggaaaaagacaaattcatgtgctccatccaccatcttgaacgaatgtctccaatattattttaagaaaatacagaaattttcaaatcacactggtttatttttaagtgtaaaacttaaaatattaagtgatggaatttatttgtaaaaagtagccagtgtacctggtaataggtactgttgattccacaaaatgtttatcaataattttaaagcgctcattaaataaagcaagcattcg

SEQ ID NO: 101605 - DNA, 254 bp, Homo Sapiens
cgtgggcaggcaggagctctgtgccactctgcatcttcagtggtatccattttgtttacactatcaaccaaactttctatgctaagaaaagcaagatgcagaatgggtctgaaagaagagattgaatgctgggctggaactcagaccaggattctagccccaagtgtgacatttgtgtgacttgaggcaaatcccttcatgccctgggtctggtttcttggaaataaagtggggaagttggaagacaaaaaaaa

SEQ ID NO: 101606 - DNA, 629 bp, Homo Sapiens
  misc_feature (445)..(445): n is a, c, g, or t
  misc_feature (590)..(590): n is a, c, g, or t
  misc_feature (615)..(615): n is a, c, g, or t
taaaagtggtgtagtgccgaaagtgctaaaatatttagtgcggtattgctctgtgaattcaagttcaacagacttcactttggtcatgtttattaaaccaccagtgacatttaaaaatatatttttagcagtcgtaatgttagtcaccaagggaaggtggtggaatgtctatgtttttgattttactgtgagttaaaaaggcacatttctaccttctattgtttttaaattcaagaatagggaattagttcctggtgttgtttacgagtgtagttctccgttttggggggtcaacacatcagggatttagacatttaactctctgtgccttgataagaatatcatttagagtgtagatacttttgcctttgtaaaaaagccattattttatgagacttagtactcacactgcaaataactagtcaactcagttgtaactttatangtttattgagtttcctttatatgatccatatagatacctcaaaatatttcttcttcttcttttttttaatcttataaaatattgttctaaatatttgcagaaacatttaaaaatacccatcattgtcaagtctacagaaccatanctttcacccaccttaacgaacacanaataaacttaccat

SEQ ID NO: 101607 - DNA, 698 bp, Homo Sapiens
tgggattaaatctgggagtttgttgagaaaggctagatgttcctttgctgcctaagtgaaatccaagatgtggtgctgaatttgaagcaccagaggaactggacattccaaaaacattaaagccttgaggaacttgagctggtgctgtctgtggctcctgctgaaatagttcactattggactggccaccttgaagttgtccatcactaatgctgtgcgttagagtcctacttccattcatcctacttccttctcttccatggtggtaaatgttctgtgattgcaagtccaagttgagagaagtcatgtgattgcgtagaccagaaattccagaatcatctgaaaaattcaagtctccttcaccataaagatatcttgtactctcctgagagagaacagcacagcaggcatccaggttattattattctgtaacatgcacctggatacaacaacttcaggtacttcagggaatttttgtcgcaggtcatgtaaaacctgaaaatcaatttggtggcttccttgggccattcgtatattgcctgatcaggactatttgtacagtaggcaattctaggccttagtggaaatagtactcatctcttctgtccaagcattttcctttgccgccgccgcttccccctcctcctcctcggccgacgccgccgcctctccctctagggcaaccgcatcacccgtt

SEQ ID NO: 101608 - DNA, 609 bp, Homo Sapiens
  misc_feature (367)..(427): n is a, c, g, or t
  misc_feature (441)..(465): n is a, c, g, or t
aaaattgtcaacaatactgttaaagcctattgtgttcgtctcccttcccccattagaaaccattcagaagtagatatttttataatttatttatacttacactatatatgtccatatgcctaaataataatatattttgtatgtttaaaaactatactggccaggcatggtgtctcatgcctgtaattccagtgctttgggaggcagaagcagtaggatcagttgaggctaggagttcgagactaacctgggcaacatagcgagaccctgtctctacagaaagtgaaaaaactatccaggtgtggtggtgcgtgcctgtagtcccagctattctggaggctgaggtgggaggattgcttcagcccannnnnnnnnnnnnnnnnnnnnnnnnnnnnnnnnnnnnnnnnnnnnnnnnnnnnnnnnnnnnaaaagcttgtcttnnnnnnnnnnnnnnnnnnnnnnnnntatacagtatatgtttctgtaatttgcttttttccctcaacattgtaagagtcatccatgttaatacatgtacctctgatttttccattttcactaatcctgtcatcaggtgtgtctaattggccattaaacctatctaccttc

SEQ ID NO: 101609 - DNA, 651 bp, Homo Sapiens
agaagtttacttatcaagtcttgaaagggggacatgtttcaattggtgttcaaacaaaaattccagcttgtattagaaccttgaaatggtgaagttgtggaggttttctttgttccataatacagagacaagttcataatttttagtataacagctaagttgacaaattctaagtttcctcaggtaaatagtcataactgtccttttccctagagaagtgcttgctgggatagtaaaaacatacaccatttcatgacttctgcaaatactttccagcggaagtcagtgtaggtttgtttttggctaacatggtcttgctgcgcaggaatgtaaacactgtgtttgaaactctggaaatcacgtgtgtggggagatggggacgcttcacatgttgtggggagctctgtggctgtgatggctgcagttgccgtgcctctgttggaacgctcagtgcctgcaactcacgtcaatcatagaattgtgacgcacagttggcaaaatagttctttatgctatttctcaaaatttgaggacaaacccagattgggattggaatatgcactgtaaatcaaatttttcttatctacaaagactaatgtaaaaatgattttttcttctgtgcctgattaaattaactgtggtttttaatat

SEQ ID NO: 101610 - DNA, 138 bp, Homo Sapiens
gagaagtgggcctttttatggatccagcaacaaactcccaacctcccaggaaaggttgcttcctgtcatctatataaaactttgtgtctcaggcctttattgcttttttaattgaaataaattatatatatatggttt

SEQ ID NO: 101611 - DNA, 512 bp, Homo Sapiens
  misc_feature (280)..(288): n is a, c, g, or t
aaccagacaaagacattgcaagaaaagaaaatcgcagatcaatatctttcatgaacatagatgcaaaaatcctcaacagaatactagcaaatccaatccaataaagtgttaaaaaattatacaccatgaccaagtggaatttatcccagatatgccaggctggttcagcatttaaaaatcaattaatgcaattcatcacaacaactgactaaaaaagaaaaatcatttcaatatatgcagaaaaggcatttgacaaaatcccacaccaatttatgatttnnnnnnnnnctcccagtaaactagaaataaagggcaacatcctcaaccgtataaagaatatctacaaaaaagctatagctaacatcacgcttaatgaagagaaactagaagttttcccgtaagatcagggacaaggcaaggatgttctttctcatcactctgtttcagcatcatactggaagttctagttaatgcaataaggcaagacaaggaaataaaagatatatagattg

SEQ ID NO: 101612 - DNA, 329 bp, Homo Sapiens
caccctcatcctgaaaggtattgcgcacgatgcacggccatcaagtaccacttttctcagcccatccgcttgcgaaacattcctattaatttaaccaagaccatacagcaagatgagtggcacctgcttcatttaagaagaatcactgctggcttcctcggcatggccgtagccgtccttctctgcggctgcattgtggccacagtcagtttcttctgggaggagagcttgacccagcacgtggctggactcctgttcctcatgacagggatattttgcaccatttccctctgtacttatgccgccagtatctcgtatgatttgaaccg

SEQ ID NO: 101613 - DNA, 447 bp, Homo Sapiens
ggggaggcttctaaaatgaccgctctgggagtgtctgtcttatgcagttgtagataagggatgaaatacaccctggtctcctgcagcgctcccaggcttgctaggattaggaaattccagcctggagaattctagtcagactggtcctctgctcttgaaccctgtttcctgttaagatgtttatcaatgacaatgcatgcacagcgggacatggaacttcattagtgattctaattttgccctggccttgtgatcttgctctactcccatttgccttgtgatattttattgccttggaagcatgtgatctctgtgacccacactattcctacactccttcccctttgaaaatcgctaataaaaacttgctggttttgcagctcaggtgggcatcacggaacctgccgacatgtgatgtcacccccagagtcccagctgtaaaatttc

SEQ ID NO: 101614 - DNA, 472 bp, Homo Sapiens
tacagcatcctcatttacactttccaaacataacttatgacagtgatacgcctaccctgctctgtattttatttttgggaaaccttaaatgcattacaccttagaaatggtctaggtaaatttccagtttgaagatgttagtgagatttctgtaggtggctggggagtttgttctacactttggctttttccagaaggcttcaaattctaaagaatggagggaggttactttacttgggtcttatataatggtttcccagaatcctaagcctttattaatttatctgtggccaaaggaattcagaacatggtacctgacgcacttgatagcatcaatagtttttctactctgtaactatgagaaaactgtctttctctacctactgactgaactactggagacctgccgcctgaactagaagcattttcttgtactttcacttttctagaatttgataataaacctcattat

SEQ ID NO: 101615 - DNA, 551 bp, Homo Sapiens
ctgatgttgaaggttcaagatcaatggaaattacttggattaagatggctgactgggttcctctggcaggaaaaaatatcaagtacccctaaagaaaatccaccaaaagggaagttagagggagtgatctgtcaaccgtaatttggaatcatcactcactgacactgggcaagcatgatttcagcaaagttggcaagactcagctatcctggtagaatagtcatgctttgggaaaagcagctaaccatatgatggaaaaccgtcacagtagtgctcttgagacccaagcagggacatggtgcaaggttttgaacccaaaaaagcacataaccatgaggctgcacaggactggcattcaacagtgccaccatgtggcaggaactggagtatagcagcagtggactgatgagcctctcttgtcctctctgtacttgatgctgaactgatgggtctgaaatgaataatatcccaggtttttggataattacaggtggcatgggaaggtcttacaaggaagacccctgccagtgtggctaagtgaagtcttgagt

SEQ ID NO: 101616 - DNA, 566 bp, Homo Sapiens
ttacgaagaaaagaggtttaattgactcacagttccacaggctgtacaggaagcatggctgggaggtctcagaaaacttacaatcatggtggaatccaaaggggaagcaagcacgtattcacgtggtggcaggagagaaagagagcagaaggggaaatgctacacacttttaaaccatcagatcttgtgataactcactcaccatcacgagaacagcaaggtggaaaactgcccccacgattcatgacctcccaccaggttcccccgctgccacccacaacattgggaattacaattcaacatgagattcaggtggggacacagagccaaaccatatcactgccccagaatcaccagcaatctgtggggcacagcttgacaattactgaaaaagttcatccccaagatttagctgcaaaagtttatgatcctgtctggcagagttgctggagcagcttctagaggtaatagccccaggactccctgagggatgtgcttgatgtccacccaatgccacaccctggcatacataccctacaggtgaacctgacttctcacagtgcact

SEQ ID NO: 101617 - DNA, 397 bp, Homo Sapiens
tttgctattgagttatgaattccttacatattttagatgtcaacccttatcacatacatcgcttgcaaatactttctcccatttcataggttttcttttcactctgttgattgttgcctttgctgtgagaagctttgtgatttgatgtaactttgcttatttttgtttttgttgcctgtgttttgggggtcatatccatgaaatcattgacaagaccaatgtcaaagagcttttcgcctatgttttcttctaggagttttacagcttcagattttatgtttaaatctttaatccattttgagttgggttttgtatgtgatgtaagataaaagtccagtttcccccttttgcacatggatatctgattttctcaataccatgtgttgaagagactatc

SEQ ID NO: 101618 - DNA, 574 bp, Homo Sapiens
  misc_feature (399)..(410): n is a, c, g, or t
ataaatactgaactctgaatgaaatagcaagttatataaatcttgaaaaataaatattacctaggttaacactagacttaaccacaagagatttcaatcatgaaacctgacataacctagttgacaagtatagcttaagcaagtaagacctcattgctgatggagaagaccccttttcctttgcttgtctgttttgcaaaattcatttttccttcatgagagtaaaaacaatttaggggttattgcagatgtccaaatgcagccagcaattttaaagtcattgatgataccgtcagttatcacactcctacaccagcaatgaaaatactgtatacatagtattacatatatccactcttctaaaggcaagtctgagtttttaaagaatcatgttgtttnnnnnnnnnnnngttgcaaatgtatccattaattataattatatgcacttaaaaacatagaaaaagaatatttgaaaaagattgcaactattctgttaagatactggttttacgtatgattttctccattgtattctgttgcattatatttacaattaaataaaaattataaagga

SEQ ID NO: 101619 - DNA, 854 bp, Homo Sapiens
tccgtttaccagcaaagacgggatgcactgaacctagcttctctctcgcctggtcccctctgcaataaaaggcccaggtctacaagatggcaaagaaggggaggaagaacagtatgtacctgcagaatttaaatttttctctgcatcaaagctctaacgttggtcccatcagcataggctccagccaaagaagctcctccacccaaaataagggagagatccaaagggaggcgatacaatgacgtgaaaccatagaggtaagaagcaaggcctcctaatacttgactctatgctaaactgttctgaacttgtgggtagatcttctttggttacaagatgatgcacgatcttggagagcctctgttgtaccaggaatacaatgctggtgggaggattcgtgctcctcatctgcttatttgctctcagatccattcttcactcttcctctccctactctgtctcacaggagctactccggtaaattacatttctcagctcccatgcctgttggtttccagttagatttggtcagtgggaggctctggtgggagactggaggtgagaagagggcagagaagtcaggttttttctctccctacctcctctggcacgagcggcagtggcagtgactattctgtggttctagcttttgcaggtggccccagctcctggactcccacctgctcccttggtctctcctatcctagaggtggtagcagcttcctgctgttgaatcactgtcctctatgctcatttagctctgccaaaacttttgtatctcacccccatgttaaattttttctgttgaactacactggatctgacttgatagaactattaaaaatagtttttaa

SEQ ID NO: 101620 - DNA, 547 bp, Homo Sapiens
agaggatgggaccatgatgtcagaagttgaaattgggagcaattgaaagattctaagccaggaaggaatcattttctattttaggatggatttgagaaagttaagaccaagaggcacttaacatacccctgaaatagaaaagaaatgatgcatgagggcgttggtcataaggatagagaagagacaagatcagaagtatgtaggacagtaaatctgcaagatgaagttggggtgaaataaaaaccacaaaaatctcgtttggggctttccaaggttgtgccaacaaataaggtagggcatacaggctggtagctagattgttaagatgagtaactgcttgcaacaacttgattatttgaagttacagtgcatagatgactgtgggacagtgatctgatgctgcaagattaccaatgttaccaaatgacaaagacatcaagaggggagaatttaaactttcaatgattgaccaaggagttgtgcatttcattttgtaacaagggcgtaagattaaaaaccccctaaagatattacaagaatttataaa

SEQ ID NO: 101621 - DNA, 392 bp, Homo Sapiens
  misc_feature (22)..(22): n is a, c, g, or t
aaccactactattattatcacncagctgggcttctgctttaactggctgtttctgaaggtcaaatacctctctctaatctgccttcctctttaaaccgtcagagaggtgcatgcttctactgaggaatgcatccaacctgtggttaccaatctttccatacatgagatgctccttccaatgcacaaaaccttcccaagactttaccacagtggttgcgtttttatttatcctgactacacatatctggatgtagagctggcagagctgtgcagttccccacctctaggcagaccacaggctcggaggctcagaactcctagaggacttctgaggccatggcgaccttactcataaagctctgaagcaaggctggacacttggctcacgcctt

SEQ ID NO: 101622 - DNA, 570 bp, Homo Sapiens
gtttttaaaaagctgatgtgaagtaatggtggtgccagtgcctcactgtttctaaagaccacatctggaatggctgtgacgtttcatcccgttgctttcggcttccatggacgtgactgcctggtttttcgttgattccccttgtctgtggcatcttgctgtggagtctgttcctgatgtttcactcggatatgtagttttctttgatcatgctctcagggttaggctttggtaatagaatgctggcttcatggagaatttggaagctttcctccttttcctaggctgtggaacagttaacttagccctggaggcagctggtccttaacaggtctggccaaagtcacttgttctttttttgcagggattgttgccccttgctggcttcctcaggctgctatttgttattttatctacttggattttctgtctcctggggattcgttttgataattcttattttcccagaaagccatttactcatctaagttttcagatttggagattttaaaaattcaagaaatagaaataatttctgaatagattatagtgactaaagaaactattaaa

SEQ ID NO: 101623 - DNA, 664 bp, Homo Sapiens
caggcatgagttgtagtgctgttggctgtgagctcagcatgaatgagttaacaatacactccatccagaaaaaggaagaagactgccaatctgtgatgaagctatggagaagtggctacatttgtggattcctgagatgacgacccatttaacaaaaccaaccaaacatagcagacagcactgtgaagctgaaagcccaagaaacttccagtcacgtgatacaggattagaacattgttaaacccttctcagccactgctggtcagcaagcgtgtttcagaaggtgacatggagtgaaaaacatcaagttgcaggtgaggcatgttctgcagatctggaagaatttttaaaatacctgctgagtgatattttaaaagagtcctgtggaagaacaggttttcaatgctaatgaaactggtttgttatgcaaggaagttggcaaatgaacctgtacaagtggcatttcagtttataaaaatgtggccagaggctcataggaacttaaccctgtatttccactaggaacaataatttagtattaacagattcagtgtttgcaatgactttatagaacataactgtggtgaataatgagaatcagctatttcaggcataaagcctgatatttaaaatattaaataatataaagcctgatattataaat

SEQ ID NO: 101624 - DNA, 700 bp, Homo Sapiens
  misc_feature (60)..(60): n is a, c, g, or t
  misc_feature (182)..(182): n is a, c, g, or t
cccctctcaccacaagccacacagctgggttccccactgagacacctcattggcaagacntcagttctcaatcttccacagcagagcattccagcccatattctgaagaccctatagaggatcctctacagccagatgtcacagggatacgtctactttcacttggtgctggagaattcaanagtcaagaacatgctaagcataagggacccaaggtagaaagagatcaagcagcaaagcacaggttctcctggatgaaattactagcacataaagttgggagacacctaagccaagacactggttctccttccggaatgaggccctgggaggaccttcctagccaagacactggttctccttccagaatgaggccctggaaggaccctcctagtgatctgttactcttaaaacaaagtaactcatctaagattttggttgggagatggcatttggcttctgagaaaggtagctatgaaataatccaagatactgatgaagacacagctgttaacaattggctgatcagcccccagaatgcctcacgtgcttggggagaaagcacccctcttgccaacaagcctggaaagcagagtggccacccaaagtttcctagagttagacataaatctctacaagtaagacaggatggaggaaagagtagactgaagaaaagccagtttctcaataagacacgaaa

SEQ ID NO: 101625 - DNA, 526 bp, Homo Sapiens
ttctctgagaacttaaaataaccctcaccacgtggcggggtgggcgaggagggggctcacagcagaagcagagtggccccggggtgggggcgccacaggacactgagggttcacaccaccccagcctgggcctggtaagtagcaggtcagcataaatccaaccccgcgaggcacatccaaaccccacccagaggggttcaaatgacaggagtgggaacagaggggctccctgaggcttcaggccccatccccaggaagactggcccggcctcagccaccttcaagcacaggagtgaggcctcgggttccagggacgatgggggacccagcattaaatatgtcataaataggtgggcggacactgtgcggacaggcggggctcacattcctctagaccactggggtccactgggggaccagggcctgggccctctcccagcgatgccacgggcctgagagggctgctgggaaggagcccgggagccccctgcagtctgaagtccgggccgagggcacaggagcccga

SEQ ID NO: 101626 - DNA, 170 bp, Homo Sapiens
tcaaatcaccaatgattcagaactacacaatgccttgatttgataaaagtattgaaaacagatggtcaacattttccagaaagagttctagcttggaaaaacaagtttagtaaaaggtaaagacaaaggcatcccctaaacataaaagaattgttcatgcatcttaaatt

SEQ ID NO: 101627 - DNA, 430 bp, Homo Sapiens
aaatgaggcagctgaactgagactgaatcttccctgtgattagctcaactcttgaagtagccaggcacctgtgaggatacagggaaggagagaagataataattggtctctcatcttttataattatgtgtgtttcaagtggatgtgaactgtggggtttgagagggctacataaaaggggaaaattctgacgtgaacacttgagtcattaaatctagcattcaaaaggaaaggaagataaaaatttaaacaataggagacttgagcaatagaggccttaaaataataatgtttactgaaaattaggacaattgttcattaatttcatatcttacggcatcttcatcatactaaatagttaccatagctattgactggacagagaatgaactgttttatcctcctttttatacaaaatttctaacgtctc

SEQ ID NO: 101628 - DNA, 970 bp, Homo Sapiens
agatcatggagatctctatctcctaaacaacaaatattgataattttaaattactttttctccacctaaatttacctatttgatacgatgaatgagggtcaacatggattaaaaatttggatatcagtctatcattagagaattaagagactggtatagagagaaaaaaatagatttaggaatacataccttcacgcagtacatggaagaaacacctaactgttgtgacatcaaatatgttaaagcgctttcattaacttaattttaggaatatcaaaatgcaacgtgtaaatccggttaataattagaggggatgccagcatgcacacagctcctccaagatagccagttaagatgatgtgtgagtaatagaaaaatcatttctatttttggaatggtttatataatttttcaacagaaattacaggattagaaggaacctaaaaggatgatatggtccagtaccctgacgtcaataaatgagtggctatttttcctgatttgctcttttcataaaattgttgcagaaatgaaaactgcttgccttctctttttgccattccattattttaaccatctgtgggtcaaggagttattcttaattattactacgtttagtttctttgttgaaatagagaagagttatagttagtatcttttaaattaaacattttttgagtactagctcttactctagtttcttggtaccatatctttcagctttctctcaaaaggtattttcattcttatcaatgcttttcctatcattctggatacttcgttaagtttatcttcatttctctaagaagtgtaaggtgtagtggaagtattaatttagtattcttgtggtttctatttgcctgttttccctttgagagcagtacactccttttatttctgaatactctgcatcagagccccttgtctggcatgtagaatatgttcaataaatgtttattgaaagaataaa

SEQ ID NO: 101629 - DNA, 498 bp, Homo Sapiens
ttagtgattataattagtatatttacaaaaaacacaagaatagacacatacaatcatgagtcccattcacgaagagctattcttctctcactgcttaaggtaccctggtttccctttcagccttaattagcacaactttttaactttttaatttataatgaatgctttcacttaagcagttcctgctagggtttgacagatggttaatgtcaaaagcccatggggatggcttagctttgggttttgtgttttcgaagcaggagaaatgtttgactgtgctgataatttctcagcatgtatcaccatcaacttttattgtccttcaaattccccgttctcccatggacttctcttccactccttgcctatcaggggctggaaaccaggcagaagcacgacataatggcccatgtgataagcctcataaagttatttttctcaattaatggcttcactgacaattttactgctttgctctaagctcccctgttcccttgg

SEQ ID NO: 101630 - DNA, 442 bp, Homo Sapiens
ggacagaacaagaccctgtctttaaaaataaaaacaaaacccataaatagcagtcgtcacatgcactcagatttccacaaatataacaaaaaatctgaacacagccaacatggggacctgggagtaatacagcctgtgacagagaggcctctagcggttatatcacgtaaaatctcgggagttgtgctttaaatgacataaggaataagaaaatgtccaacccagtgggggcttcaccttggcgttctagacttctgtgagcagcatctgcatcttgtttgtttctgaatcagtttctgttgattcatttttctcctgattgtggatcgcattttcttgctttttagcctgtccggaaatttttgcctggatgcgcacattgtaaatagaacactgttaagtgtctgtattttttaggattgaaagaataaataattggtgg

SEQ ID NO: 101631 - DNA, 477 bp, Homo Sapiens
aggttttagccagactcagtctctgggtctgtggtgaaatgtctatagatggactttattttttaccctccggaaaacgtgatgtagtacggaccaaattccttctaataaatattttggtgtagattcctactgtggggctgtaacacatgtagacactgtgtacacactaggttttaattcatagacatactgcctgcaccaagtgaattatttattattatttacacatgccagaattatctgcccatcattccacagggcacagattgaccactgctcaccatgctgagtaggaggaactgaagcattggtgcacttctactagattccgttctgtcttagtggccaaaaatcaactgattataattgggtagtatctttctattttgaccacttgtcttaacactcccctgtgcttttaaatgaaattccaattcatgtatgtaaacatgtttaataaaatttacttttcat

SEQ ID NO: 101632 - DNA, 570 bp, Homo Sapiens
  misc_feature (223)..(246): n is a, c, g, or t
gcggccgcgccctcgcacagatcccagctgggtcacccgcactgagtcaacagactgagcgcgtccaggcctgacagctctgcggctcgggccctgaggtttattcagaaaacatgtccactgcaattagggaggtaggagtttggagacagaccagaacacttctactgaagaattacttaattaaatgcagaaccaaaaagagtagtgttcaggaaattcnnnnnnnnnnnnnnnnnnnnnnnnggttaatattaattagcatgatgcatccaaataagaaatatgaagaagtgcctaatatagaactcaatcctatggacaagtttactctttctaatctaattcttggatatactccagtgactaatattacaagcagcatcatgcagaaagtgtctactgatcatctacctgatgtcataattactgaagaatatacaaatgaaaaagaaatgttaacatccagtctctctaagccgagcaactttgtaggtgtggttttcaaagactccatgtcctatgaacttcgtttttttcctgatatgattccagtatcttctatttata

SEQ ID NO: 101633 - DNA, 406 bp, Homo Sapiens
agagaggggtcttgctatgttgcccacactggtcttgaactcctaggctcaagcaatccgcccatcttgtcctcccaaagtctgggattataggcatgagctactgctcctggcctatggatgccctttatcagtttcaggaattcccttctattcctaattggctgagaggtttattttcctttcatgaataggtattaaattttgtcaaatgctttttctgcatctattgagatggtgatatgggttttgtcttatagcctgttagtatagtaaattatattgattgattttaaaatattaagccaaccttgtattcctgggatgaaactaacttggtcatggtgcattattgtttgtatttactactgtattcattttgctaaattttaaaaggatttttgaa

SEQ ID NO: 101634 - DNA, 423 bp, Homo Sapiens
  misc_feature (246)..(256): n is a, c, g, or t
attatgatggtatttaatatatatttttaaaaattcagtttgttctgattgggaaatactggaggggctttggagcacagatcatcctcagtcccctcacatatgtgcaagtactttgaagagggccctggaaacctttcttctttcctgcacttcctagactttctcctttaggctgaaagggggctgcttcggcaacaaagagcatttcataagcggagcatttcttaagtagacaccccgccnnnnnnnnnnnaaattgaaatttgaatgtggtgagtctgaattagggcccacggcatgattaattacagcaaccatcttaacctgcccgggggctgggcctgaaagaaatgaggccaggctgaagagaaatacagctaaggatagttaggaatgctaacaaaactaagttaactggcc

SEQ ID NO: 101635 - DNA, 486 bp, Homo Sapiens
cgagcaagaataaccatgcctaacaaataaaaactgatggtaatacataaggttacacaaatattcagacatatcatgatccaaaaaccacatatctgttctcttggctatcccatccaagtggagccaaaggctctgcacaggtttccaaacactaatcatagacatgatagcaactgtggtccgctccctcctggttacctgctcacctgaagcaggtaagagcctgcttggcctcctaaggagacacttctgaggcaggagaatagaaaattagcataaactaagggttaaggtggaagcaaaagaacagcaggtgcagcaagttctaggccaggttaagcagcacacaggccacatcctcactcctgtgataacaacacagaagtctccagttcagcctctgagttcagccatgggccaatccttcacagtgtgtaaccaattggaggcctcgaaagggcacttattggtgttatcaaattc

SEQ ID NO: 101636 - DNA, 376 bp, Homo Sapiens
tgttaccattcagatctgggcagaaatgagagtaaaaatacagtcagcatcttcccctgtttctgaactggactaactggacagccataaaatttatgtgaaagagactaataacaaactaattgttaaaaggattaattcttaaaaagtatttttaattttgaaaagtaatacatgcttattataacaaaatcaaagtgtgctgattgaggacgtaaaacatttttaaatttcatgctcatctttctccctcccccagcccatctcctgtgatattcattgttaacagttctatgtctttttctagatggttctgtgtttaccaccctattgcatgaaatgcctaaaaatccagtcaagtgaattttgccattta

SEQ ID NO: 101637 - DNA, 877 bp, Homo Sapiens
ccattctcggccgacacaattattttaaaagggcaaatgaaaagaacacagaaaaggacataaaaatagcctttaaatatacaaaagatgttcaactgattagaaaaacgcaaactaaaatgacagagaaaccatttacctatctggttgtgaaaatgtcaactgctggaccagcctctactgagaggtggggtgggaaacaaaccaccctgaacgtggccctctgagatgcaaggaagaagggctcctaccagcgttaacctggcaaacatcctccaagaagccaaaagccacacgacgtgtgaccaaaccaatcccaatgggaacggaccctgctagaagacggatctccccatgcccaaagggactcatgcacgtgaaattcacagctgaagcagcccggaggagtcggcaggggaccccgcaaagtgggtacatctgtgcagtggaacaccgtgcagccaaaaaaaagggcatgagaacacctccagggtttactattcaagagaacaagatacagcaaggtatgtattgcatgctattatctcctctgttataataagaattgaaattcctatttgcttatattgtaaaaaggagcacaagaaactagcggtccatctgagggcatgggagatgggagagatggggcaagagtttactctgtatgttgttttaattttcgaacacgtgaatgtactgtccgaaaatgaaatgccatgtctatctctgtgtgtgtgtatttatcttaagagcagagcacacactaagttagaaaaggccaaaatcctattcacgtgatcgcttgtgttttccaaggtcgaattcccaccccatctccatattaaaatctctcgatgttaatctaccaaaaaaa

SEQ ID NO: 101638 - DNA, 429 bp, Homo Sapiens
atgagcaccgcgccgggccctcaaatgtaatttatttatttttaattaaatctaggtcacatagtaagcattctctaaaaaaagtcataatttcaagttaatgtcatttatttctttcagttgtagcattcatttgaagaaaactaccaaaatctcatgtatatatctagataaaaatttaaattcttgggaagataatccatgtttttcaatgatggatattgtaaaatacatcaaatttcccaaaataattcatggacttaatatagtttctataacaatcaaaaggatttgagataatttttttcattataaaatgcatcagaatgactagatgaactagaataacaaagaaaaaagtaaaaatcaaagatgtttatcaaagtgtaatttagaatgggggagaaattagaaagggcttacatgttc

SEQ ID NO: 101639 - DNA, 450 bp, Homo Sapiens
  misc_feature (151)..(174): n is a, c, g, or t
aaataaaaaaattagccaggcatggtggtcccagttacttcgggggttgaactgggaggatcgcctgagtctgggaggttgaggctgtagtgagctatgtattactgtacttcagcccccgcaacagaacaagaccctggaccctgtctcnnnnnnnnnnnnnnnnnnnnnnnngttcaatggtgaaatgttagaagctttcaatttctgattaggaatcagacagggatgcccagaatcattatttccactcatcattgttctgcaggtcctagctggtgcattaaaacaagaaataagagatacaagaatcagaagaggagaaaccaaactgtcattgttttcagatgatatggttgtacctataaaacaccaaaacttttatagacaaattaagaattaataagctagcttaccaacttgctcaatcaataaacaaaaattcaattg

SEQ ID NO: 101640 - DNA, 490 bp, Homo Sapiens
ttatatatcatcaagatggaggggtccaataaacatttgcaattcttggaattgaactggaacagtataagaactctaacccgctatgttgaaaacgaccatgagggtagatccaggaaaaaagaacaaaaactgattggtgaccttaagattgccacattctacattccactaaagctcagatctcacaaagagggaaaaacctgggtgaaaaaacaagcatggcacaaatatgtcatctttccagatagcaagcagcctgttcccgctgcctcctttggccacagttaatgctccacataggcctcctatgggatgggtgagccccagccgaaagctgcctgacagtgctagtgtcagacacgtacagaaggctcaggctcgttataccatatccccagccaatccagctctttctccgaaggaaaaaggatggagagaaaaaagacacatagacaagtttaactctagtacttaagaacatgtggaa

SEQ ID NO: 101641 - DNA, 268 bp, Homo Sapiens
  misc_feature (79)..(132): n is a, c, g, or t
acgaccgagcccagcctcgtgtttaaaattttttgtagagacagggtctcactgtgtccagccttgaattcttggactnnnnnnnnnnnnnnnnnnnnnnnnnnnnnnnnnnnnnnnnnnnnnnnnnnnnnnctcatctggcccagaaaatgtttaagctgaatttaattgtgaggaaacagacaaatcagaatgtgggacattctgcaaaacaactggactggacttaaccgaggcaggaggctgttacagattaaaagaggttcgt

SEQ ID NO: 101642 - DNA, 461 bp, Homo Sapiens
atacaatgcaaccataaaaaggaattagatcgtgacatggatggagctggaggccattatccttagcaatactaacgcaggaacagaaaaccaaatactgcatgttctcacttataagtgggagcaaaatgatgagaatcaatgagcacaaagaggggaacaacagacactggagcctacttgagggtggagggtgggaggaaggggagaatcagaaaaaataactattggcttagtacctgggtgatgaaataatctgtacatcaaacctctgtgacacgagtttacctatattacaaacctgcacatgtatacctgagcctaagataaaagttttaaaaacaacgagtcccttaataaaatctctaattttctagatccgaagatgcactttcttcctttttcacgtattaatagtaaatgcaaggtggggtcttgaagtgaataaaaacaagtcctct

SEQ ID NO: 101643 - DNA, 262 bp, Homo Sapiens
  misc_feature (96)..(131): n is a, c, g, or t
gaacctgcatttcccagattccctgcagtcataagtggtcctctaagttttggccgaaagagacctgagaagtgattgcaacttcagaatcactannnnnnnnnnnnnnnnnnnnnnnnnnnnnnnnnnnngttggagtatacatataggaaagtacacaaatggtaagcttagtgaattttcacatgtggacacactcatgcatgggaacatatgccatccagatcaacaaataaaacaattgcaccattgcatcctgtac

SEQ ID NO: 101644 - DNA, 584 bp, Homo Sapiens
  misc_feature (252)..(262): n is a, c, g, or t
gagaaaagagaaagaggtcagtctaaaattgttttatgttagagagttgatgaaattttctaagaaatggaaattttgatagccagagaatttttgcttgaactttatgacttatatatgttggtggcacttactcaggtcttagacattcttctttcaacattgagcaaatatatttagattgtccagcagtcactttgatgggtagtaaagatactaagatgaggatcggtcacattaacagaaatttcnnnnnnnnnnngctgtactttccccattgcccagcacagtggctggcagagtaagcattcagcaagtatttgttaaacaactagagtcaaaactaaagggaagggtggaggatgaccaaaattgtttcttagggaattgagttgccttcgttatctgagacctgaattccttgattttatggtttatcttgacacatatttacttacttgtaccagaatttagctcagagattacattttttgtgccatggatacatttggcaatcaggtaaagcctttagatactttctcagaataatgcttttacatgtataaaataaaatacatggttac

SEQ ID NO: 101645 - DNA, 398 bp, Homo Sapiens
aaggcggcactttttattcttcatttgtttacttcttcatgcgctcttcggtctttacaaaatgtgctcgcgatatccttccgcaagtgtcagtctcaggcactcaccacccgccttgaagccatttctataatcttaagactcgcgagttagcagccgtgggccgacgtctctctttataggatttaattcttttacattttagggactactttttaggaataaaccattcttgcgttagttaataaaggttcataaccttcggaacccctccgctgagaacaaaatacgataatagcctttataacgcaccttttcataaaaatattctgtgaggactctcataggccatcgaatcttctcgtattcctgaaacagaatggtacggtccagaaccc

SEQ ID NO: 101646 - DNA, 476 bp, Homo Sapiens
tgctttattcctttccctcactgacactggcttctcccgctagagtaaatggctttagcacagcactgtcttctggggagcctgctgtcctgcaggcaagtccattaaactctttcttgctttaggactctgaaaacagcaagaaacaaacaaacaaaggtcaagctctaagaaaattactgctcaaacttcactaccctggaagccttactagatatttcttaaggtaacttaaaaattgggctttatttttaaaaagtgataggttacttacagtagcacagaaatgttagcatatttatttaaatagtcctgcagcagagaccctgcgattgtaaagtgatttaagtatttctgggtagtgtttgtgatttacggatttgttactgaaaaaccaaaaaatcactactgtgaatttactactatgtaaccttgtggtcgtatttcattataaataaaataagaattgctcttct

SEQ ID NO: 101647 - DNA, 523 bp, Homo Sapiens
taaaatacagttctgaatatgctgctcatccccacctgtcttcaacagctccccattaccctcaggacaatgtctgaactctccagcgtcgcgtgagaagtccccttccatcccagagggtggtgcttcagggcgcacagcatgagaggctctgtgcccccatcaccctcgtttccagtgaattagtgtcatgtcagcatcagctcagggcttcatcgtggggctctcagttccgatttcccaggctgaattgggagtgagatgcctgcatgctgggttctgcacagctggcctcccgcgttgggcaacattgctggctggaagggaggagccgcctctagggagggacatggccccggtgcggctgcagctcaccccacgccaggggcagaagagacccaaccacttctattttttgaggctatgaatatagtacctgaaaaaatgccaagacatgattatttttttaaaaagcgtactttaaatgtttgtgttaataaattaaaacatgcacaaaaagatg

SEQ ID NO: 101648 - DNA, 454 bp, Homo Sapiens
tgtgcctggctggatcagggtggggctgtagaactgcacatcatagtctgcatccggatcagccctgaatctcaggcactggaaggttaccctgatgggcaggacccactcccatcactaagagaacatcaaaagggcaggtgtgggggtggataggaagatcaggatctctgaaaggaaatttgcattgtggtaacctacagactccacctggacccatgattcatgactcaaccagtccacccagaagctgactcagagcataaggagcattttccacacccctaggatttcatctccaaccaatcagcattccccattctctagcccctgtccaccaaactattctttaaaaaccttagctctaagctttatttatttatttaagtaatacactcctgtcttccacttagctggttctgtatttattaaactctttctctactgccaaaaa

SEQ ID NO: 101649 - DNA, 776 bp, Homo Sapiens
  misc_feature (672)..(700): n is a, c, g, or t
accattctgatcatctttatttaactcagtttttatctctccttcagaaaattctgtaaagacaaagtaacattttgtgagtgcctcctacctgccgggcacatagaaacgtgttttctcctcacaggaactgggcatggagcctagcccgtggtgagcgctcagcaaacatgcacgcagtacacacctcgcttctagtggaaaggacaatactgaccacgaccaaggaaagagggtctaccttgtaagagagatgtactcagcctttttaacagttcaagtggaccattgaattgtaaaataaaattcttgatacttacagctcttgctgctaatgtcattacacacccctgttagaaacgttagataatatcctgggtataccccgtgccaaatggcagagagaatgaacgtctggatagttggactgaaggaggttcgttcataacacaccctagaaaccatgaaaaacatggagagccaagtggagtgagtgacccgagtttacaaagcctgcaatgatcattcttttattacctgacaggatttagggtaactagaaaaacaaatacaacttatcttaggcaatcacttctctatgatctcagggaggctatagctattaagtgtcaaatttaggaacataaagttaattctcatcttcttattggnnnnnnnnnnnnnnnnnnnnnnnnnnnnngtaacttaaatgatcatttctagtatttgggagtctatacaatttacaaaaagagtaaggttgcttttatcctaca

SEQ ID NO: 101650 - DNA, 578 bp, Homo Sapiens
  misc_feature (541)..(541): n is a, c, g, or t
aagacaaatgcctctacctagcagaagtcagttgggttggctagtgcatggtttccaaatgttcagcagagatgaactggggtaggtaattttgcaggaatttgaaccctattgtggaaatactgttatttcccttagcaatcagcaaaaactgagaaatttagtgacttgcatcaccatgacacagtatagcatttggcaggtaattgttcagcgacttaactagatgaattgactttttagaaaaggtgatttcaaattgaagaatttctggaaacaaagttcagatcctgtggtgtggctggccttggtttttacagttcaatcttgcatgcagggaaggattcatcttgcataaccactgtgctgctgcgtgctaaaaccatgatgttgagatcttgctgtgtctcatgggtctcctagtaccattccctcatcacttctgagtcatgaggtgggatcagtatcacctacatattactaccccactaagcctttccttccaacaaagcctccaagacaacccgagtaggctcctcancaacgaagtcatgtccactcaccacgttgtaagaaga

SEQ ID NO: 101651 - DNA, 706 bp, Homo Sapiens
gcggccgccaaccggcgctggccgcctgccctctctcgtgctggtggtgctgctggtggtgatcgtcgtcctcgccttcaactactggagcatctcctcccgccacgtcctgcttcaggaggaggtggccgagctgcagggccaggtccagcgcaccgaagtggcccgcgggcggctggaaaagcgcaattcggacctcttgctgttggtggacacgcacaagaaacagatcgaccagaaggaggccgactacggccgcctcagcagccggctgcaggccagagagggcctcgggaagagatgcgaggatgacaaggttaaactacagaacaacatatcgtatcagatggcagacatacatcatttaaaggagcaacttgctgagcttcgtcaggaatttcttcgacaagaagaccagcttcaggactataggaagaacaatacttaccttgtgaagaggttagaatatgaaagttttcagtgtggacagcagatgaaggaattgagagcacagcatgaagaaaatattaaaaagttagcagaccagtttttagaggaacaaaagcaagagacccaaaagattcaatcaaatgatggaaaggaattggatataaacaatcaagtagtacctaaaaatattccaaaagtagctgagaatgttgcagataagaatgaagaaccctcaagcaatcatattccacatggg

SEQ ID NO: 101652 - DNA, 360 bp, Homo Sapiens
  misc_feature (203)..(211): n is a, c, g, or t
caagaaacatgggcactgcacatttactttgtgggaatggctctacttcgtaacgcaccagttgaaatcagatactgtcttccaatgaaaacgtaaatgattcactgaaattataagttattcaatgccatccctccaaagggattcattttaattgttaattcaacaataattaaatcatgctctttatttctaacagattnnnnnnnnncttaaaggcctattactctacattataattcttgaatctacacagtatcttcacttgagaagggagttagatcagggttctaagttttaaaataaagatagcaacatagacataggaatgactgaaggtcttgaaaattattactatca

SEQ ID NO: 101653 - DNA, 164 bp, Homo Sapiens
ctaattcaggagttcggttattgccagtgaccgagagatggctagagctcaaaattctctcagccccgaagaaggggatagatttctttttataccgtggtctaaatagggcagggggagcctagctgaagcaatttttacagaagcagaacacgcaaaaagtt

SEQ ID NO: 101654 - DNA, 325 bp, Homo Sapiens
taaataaataaacttgtgagctggccccaacccctcctaggaatcacagctccccgtactggtgccgccgcagtggccaagttgcgacactgcccacggcccctccctctgatgcagattcagggcttctcttcgatcatgttgggttttgattctgtttttccttgactgcaaaaccctctttcctctcctcttttgggacaagagccctggttttctacgctgcccttggccaccacactgcctgccccacgagctgggaggcaggttttgtacggtacgttgttattgatatgatataaaacatcaaacgcctcgtgccgaa

SEQ ID NO: 101655 - DNA, 331 bp, Homo Sapiens
tcattaagtctatgtgtcaaaccgaaccagtgaaatttaattcataaaaaggtaaagtcttttcataagcaacttcaagaagttatatattgtgattataccgcagaacttaggtgatgggagtaaagagtgacagctgcctacagagaaaagagctattagaattataggaaggacatttctttctgttttctagtttttaggcaccacatcctggggcaatcaaaactcaaaccacctgacagatctcaaaagcccataaggatatcacctcattatagtatttttgtatttgttatttatagtgatgaacattgagtatcaagaatgg

SEQ ID NO: 101656 - DNA, 557 bp, Homo Sapiens
tttgtctgtatgtctactcttagaaataagtcataatgcgttctcatttaccataagctatataccaaatcatgctgaactttattattattgtttattcttatttattcttttagtagacatttttgccattctggtttaatattttagtacaaaaatggaagacaagacattaactcttgatactatgaagagttaattgtgaagagctaatgcagacatttataaatgaactaaaactatttaaccttatgaaagccaaatgactgcctgttctttcagtttttaatactgatgatttaacctctattaggaacctcccttctagttctttgaaacttatataattatctacttattcattcatttgttcatttatcaatttaagaaaatattgtttattctggaaggtaaaatgctaattgggctcattttgattgccacatctttcagaatttcaaaaagcacccaatttttggtatttcctgcttcccatggggactgttactaactagaacccaatcaatatttgccatgtaaaattaaggaatctgaac

SEQ ID NO: 101657 - DNA, 685 bp, Homo Sapiens
  misc_feature (269)..(284): n is a, c, g, or t
  misc_feature (498)..(565): n is a, c, g, or t
  misc_feature (665)..(665): n is a, c, g, or t
gttaccattctgatgttgggatgacctttctatctcagaaggaactagacgactctgtagagatggtggcggaggcgggatctatgtctggaagggccatgtaaaaaacatggacctggcgtgtttctggtccttatcacttctgagttgtccgattttatagaagaggccttaaaagatgtaagatttggccaagaactcatcgtctgcttctgctccaaaaccacattctactaaaaaaaggtccttacactgaattgtttgaaggnnnnnnnnnnnnnnnngtaaaggatgcagacttaaaaattatttttggaagacagtttgcaagctattagtagagaatgctaagaaaaagctttttggggtggatttgtttaaacaggcccctaactgatgagagaatggctgttttcatgttccttgagaaccgtcgtcttttaataagacagcatcgattctggagtcagaagactagattgggtctcaactctgacnnnnnnnnnnnnnnnnnnnnnnnnnnnnnnnnnnnnnnnnnnnnnnnnnnnnnnnnnnnnnnnnnnnnataagtatcatattaaaatctacttcctggtgtcaggaagagtagatgaattaatgcacatttatgtacttggcattcttctttgcgcttaagcattcanaaaatagtcttacaaaaaat

SEQ ID NO: 101658 - DNA, 542 bp, Homo Sapiens
  misc_feature (40)..(40): n is a, c, g, or t
aagacagtttgcaagctattagtagagaatgctaagaaanagctttttggggtggatttgtttaaacaggcccctaactgatgagagaatggctgttttcatgttccttgagaaccgtcgtcttttaataagacagcatcgattctggagtcagaagactagattgggtctcaactctgacaccgggtttgtggctttgggcaagttctttaatatctctaactctcagttctaattctgagaaatgggataagtatcatattaaaatctacttcctggtgtcaggaagagtagatgaattaatgcacatttatgtacttggcattcttctttgcgcttaagcattcagaaaatagtcttacaaaaatgattacgcctgtttgatattagtgaagagttaatgagaaaagatcaaattgtgcttgagtgttaatttttttaaagcatattctgtgaataatatttctttaaaaagcattttgctaatgttgtctatgtttagctgtttaataaaaagttatatttgtatttttaaaaggaaa

SEQ ID NO: 101659 - DNA, 553 bp, Homo Sapiens
gaggttcagggagcacaggaaggccctgcctcacagcatcacccgggcagctcccactcagccgttcaaggacggcctgtaaatgccactccctccctgcctctgctctgtgtgctagcagtacaacttggaactaacaaggaaaggccttcaagtttctaatgcctgaagatgcagccccatcaatgcaggaggacacaggcctctcctgggtgcagccctggggacacgacatgcatctatcatgtccttggctgaaaagttgccattttaacctggttttacatcttcatgtttgcctagctctgctggctgttcatctccccgcatccacagctacctggagctctggcaggccactccactctctgaaccccagtgagagaacctggagcagttggcttttcctgaagtcagctcagctccataacctactttagagcaagcacctcaaatgtccagactgcactctcctctcggccccaactcttactcctggttagttatgttatagtgttaagtgttctaatggtgaaaatgaagaaggctgtta

SEQ ID NO: 101660 - DNA, 352 bp, Homo Sapiens
caacgccaagttcctacccgggcactgagctcaacgctcgcacaactccaaaggagggcgcaaccatattcccactgacatcctccttggggcagcaagacaagctccgaacagcctgtcttgggccaacaagagaagctggcgggcgcccgatgagcactgtgagccatcttgtgcatccagcggtcaccatggtgaacaagaagccaggaaggaaggaagcaatgtcggcaaaagggctcagatgacaaccaaacagaacggtttcccaccctgggcctcctttccacacacacagcatcgtgggtattttaaaataaacaagatcaacgtccaaacctgcaaaaacaaa

SEQ ID NO: 101661 - DNA, 491 bp, Homo Sapiens
gccttgagaccaccccgcccctgccggtcgcagtcgcgatgtcggtggccgggctgaagaagcagttccacaaagccagccagctatttagtgaaaaaataagtggtgctgaaggaactaaactagacgatgaatttcttgacatggaaaggaaaatagatgttaccaataaagttgttgcagaaattctttcaaaaaccactgaatatcttcagccaaatccagagctaagctaggaatgctgaacactgtgtcgaagatccgagggcaggtgaagaccacaggatacccgcagacggaaggcttgctgggggactgtatgctgaaatacgggaaggagctcggggaagactccacctttggcaatgcattgatagaagttggtgaatccatgaagctaatggctgaggtgaaagactctcttgatattaatgtaaagcaaacttttattgatccacttcagttactacaagataaagatttaaaagaga

SEQ ID NO: 101662 - DNA, 344 bp, Homo Sapiens
tttcacagttaaaatttccgtctgttcctttaaaactctcctgcatgcctggggctcttgggatctgctctgtggcctaggatgtggctgttttatctgcagtataatgtacatcgtgctgacaatgccttggttttgtctgaaacatttacacttctattttccaccagtgttctttagaattgtttctgttttaggtgacttaaagttttaactaaagcatgagtaacgtttgttggcatacagtcccttcaccacaaataattgtcttgcactgtctacaaagcaaggatcagttacctcacttgtccccttccctacccaaataaaccttacacacgcta

SEQ ID NO: 101663 - DNA, 373 bp, Homo Sapiens
aaattatccggcctcaggtatttcttcatagcaatgtgagaatgaactaatacagatgctaatctgccctgttgacttctgattagccctggtcctgtgaaaacctcctgattctcactttatttactgtctttagcgtaagaacatgtcagccttgatgttattgcacaaattataggttatgatgcatgtagcattcttgcctgttctggagggctgcctttaattgtcttgcatagagcatgtataccctttccctgtgatatataagccctgggtctggggagcaacagtgtggagatctacctgttttgctgctctccaagactacacttccatccttaagttccccaaataaatcactctgtactga

SEQ ID NO: 101664 - DNA, 421 bp, Homo Sapiens
tttatttaaaccaaagtcaagaatattacaatgatttacaagagaaatagactctcagggcacatactggcggccaggttcgaaaagaatgaccgtggaggagcggacgagaccacggaacaagacgggatcatcttcaaatctgagtgttttgaggaccttggggctgaagaacggctggctaatcggtcccaaaccctgttatgatttccttaaccagccttcagacacacgtgcacatttaaaacagatcttactatccttttaaacttcttttgaagatctatacattgaaatcagccaagatttttccattcagttcaaaccagaggcaattaaaaaataccctaaaactacttttgcaaatgtgttttcaatcatgcagttcaaacagcctccttggctggacacagtggctcac

SEQ ID NO: 101665 - DNA, 378 bp, Homo Sapiens
ctcctttgggtgaggtggctggaatggataaatgtttcaattctgcatttctaaactctgcatatctatagagtcgtgttgcatgtgttactcacatatgattattgacacatttattaatttacaacaaagttaatttctatggaacaatggataattttgaaaatattctggataaaatgttacaaactcattattcaacgaactcaacaatgcatattgtatttctttggttctaagacactcattttaaatatttttatcatctctggaatctaaatgcaccattaccatcagcggcaacttagaattacaattggcagagttttttctttcatagcagcatgtaaaataaagatgcatcttataaatggcaaa

SEQ ID NO: 101666 - DNA, 466 bp, Homo Sapiens
  misc_feature (350)..(368): n is a, c, g, or t
acatttatatttttattggataagaaattttagcagggttgctggatataaaaattagtttggaaaattagcttattttatatatatttaagcaacaaaaaaggaaaatgaaatattaaaaagatactatttacaatagtgtcagaaatatcaaatatatatagagatataataaaagatcagtgaaacttctgcatagcaacaaatacaattatattaagaaacattacagaagacctaaatgaattgaaaatcatgattggaaggctcaatgttgaagaagtcgctcgtctctcaggttaatgtatggatttgatgcaatatcatccaaaatcccaaaaggccttttnnnnnnnnnnnnnnnnnnncttattgttcatttggttggtttttcttttttctggaacttaagctgattctttgattttctgcgtcgatggcattttgcatttaaaaagatcatctg

SEQ ID NO: 101667 - DNA, 671 bp, Homo Sapiens
tttgcaagtgtttaggccaaacatgtgttgagaaattgcacatatactgtgtacaactcatgtcatcaggaacttatgttaccaaacctcttgtttcacccactatcttatcatctgtattgagcagactaagacctagcaaaccagatgagccttcaggagatctgcagactgataagggcatttgagataaagaaatcccacagagttctaaaaccaaaatgaaaagtatagagatgattgtcctgtgaaatggccccaagcctcagacccattaccatctacctctggcctcacttgggggctactgtagatgctcagcacagaacctcttagctgtggttgtgacttcctggctggccaggcctgtaagaggcggaggaagaagtgctgtggcgagctctgtgactcagaggaaagcagccaggacatgacgtcctgcacgactgcctggggtggctgcagggaggtggcctagggacagatgaagctgcagtggggaccacctcccctgcagaagcagttttcttgtccctcctcatccaaacacactccaacttaaaaaatcattatgcataactccgaaagcaggtccatgctgtacctgtgtgtgtcctgccagatttctttgttcctgggggaaaacagcaataaacatcacattccttttc

SEQ ID NO: 101668 - DNA, 662 bp, Homo Sapiens
  misc_feature (106)..(114): n is a, c, g, or t
tctgcaaacactgtgtatagtgagacttgttctactttggagaacaggttaccttttgaaaatgaggttgagtttcttcctttctgatgcattgatttttgaagannnnnnnnncccccttcccctcttggtcagaatcaatcctttggtgaaagtaagaaccgcaggagttgagttttggtttggtcctgctcagttttggtttttagttgtccatcctcacagtcctacacactcgcctcctcctgctagggctgggggtatctgtgtcctttaaaatggatgaggacctggtcctcgacatgtgggtgagccatggaccttgccttcccttctcgtccttgagggtttagaacacacaccaacacctccagcgtccccgccccagcttccggtggggtgatgcggtcaccctgcaaaagacttgcactttcctcagaaccaacatgacgcagctcaataagggtgagggtcactccctcccagaagccccgtctggacgagccttgcctgacctcttcggtgctgaccttcccaaagtgatgccttactggttttgtactaactgtgttcattttacataagtgtcgtgcctgcctggggtttgttttttttgtcattgttttccccattgaaacaaacagggctaaaaagtcatctgt

SEQ ID NO: 101669 - DNA, 841 bp, Homo Sapiens
atggcttaagcaacagtttattttctcacagtcctggaggctggcaagtcagttcctggtagtatgcagatggccagcttctggctgtgttttcacatgccatatgacatcatttaaccttaattactttcttactccaaattcaatcacactaggagttagggtttcaacatacgaattcgtgggggacacaattcagtccacagcatcctgtaatgttctatgacgtaagcaagaagtcagatgtgtttgccttctactcctgcattctctgagaaggaatcccagtcccagactcttgaactctaatttcactgaatagaagcaattaactaggctctgaggcagaggaagaaagaggacctgggatgaagactgaaaggtcactgatggctggggagagggaagaaagtctgaaaggagaggctcaggcaaggcagattcaattccgataggcaacttagagaaaaatcttgcccctgacccaagaagctgatgcatctaacactaagacctctttcccagtagaagtctgtactgtccatcctttcaaccactaatggtaaaaccagggcagtatgcctttttaaactgtaccctgaaggtcagaaatatactgatttcagaaatgtcaaaggtacattttttaatcacagaaatggggtatttccaatcccagctttaacttggtaaagcctttcctattaccctgctatgggctcagttttatttccctcaaattcttatgttgaagacctaacccccagtacctcaaaaagtgactacatttggagaaagggcctcggaagtaactaaattaaaataaggcagttagaaatcc

SEQ ID NO: 101670 - DNA, 513 bp, Homo Sapiens
acctttcttctttgacggcgagtctactttagctgccggtttgaattctcagggcgcctccgctaaggttgcgttggaaaggtggtcagcatctaacatagatgaaatttgagtactctcaagaggaggttcgagaagctttgccacagatgttgggtcgctacatctgtgtacccagggctctgggtttgggcttcactatggtacagacagtgtcttccatggaagcatccttctcaacttcactgatgaggttgtcctcactgggaattacccgaaaatgagtattttctgatggtgtaattgtagctgtcctaggatgatggtcagatcgttctcttttgctgacctaaaaaagttaaattgtttaaaaattaaactactttcagagtatttgttataatctatttcctaagctggcaatgtgttcattctatttttaacttaacacattcattaaatatcttagtttgtacatgtaaaaattccataataaagtgagaaaaactaaaa

SEQ ID NO: 101671 - DNA, 668 bp, Homo Sapiens
  misc_feature (244)..(277): n is a, c, g, or t
tttcctttcccctcctttatttttactaatgaattggccactgatacacaaatggtgggtggacaggctctcatttctcaactagttttatagaaattaaattaaaaattattcctgtggaacaatgctcattgcccacttctgattcattaggaaaacacatcctattttgaagccagtgttttgaaagacagttgaagttccatttcaaggactaagcatcagaagcactccttatgaattnnnnnnnnnnnnnnnnnnnnnnnnnnnnnnnnnnaattgacaaggcagcactgctgacaggctattaagggaaaccggatatgctagtatttgttgaaatgatcattaatttgcttaaatgctgaaaacttcagatatgtaaacatccacactatttgaacattttttagacatcaaaggattttcaagtgcttctctctggcttgcatttgctaacattgcagcagcaacagcgctggagtagttgaaaagggatgcattaatcatttgtaaaatgagagagcagaacaagattatgctttcttaagcagaaatacatgagccatggatggcttcagggtctttggatcctatgaagccatcaaacaaattttgcatataggcatattcatttttctagggataaactccatggcttttctaag

SEQ ID NO: 101672 - DNA, 389 bp, Homo Sapiens
ctctgggtctgtcttcgtccatgcctgctctgagatgctcccccacccctccctgtacctgggaccaccgccctctggtgttttctttctcctgtgagtccccccctggatactgctgctttctggaaggctgtcctgggttacgtcctgcgctcctctccctcccacgcaaagacaaccagaaggacaagccttgagcacgccgatgccccagctcgtggctccccagaccatctgtttcccgtgaagacgccccgctccccgtgtctgtgtcctgcgtgtatgtgtcgtgtcttgtgtagattgtgagccccctgggcagggatccctgtctgcatacatgttccatgtggcacgaacaggtgcgctaataaacgttcatcttcaga

SEQ ID NO: 101673 - DNA, 916 bp, Homo Sapiens
gcagtctggcatagacttatgtcacagcctttttaatcgacagatctgttttcggatctgtttgtctccctgtaaataacagtacacaagcttgttatggccatttcctcaattctttatccaaaactacatttctttattgaaaaaccatttttaagcactctgttaagcattaggaacacgaagattcatgataataacaacataatcgtagctcccaatgaacacacacagagaaaggcagagagacaaacatacacaggtaacacagcaaataccctgacagtgatattcaccatctatttatcttaggggcacagagaaagaatatctaattctgctagtatcgcaagagtctcaaagtgtgcgtgacacatttgcttggtaaatacatatagtttattgagggcatcgtagtttgttgggaaagagagaaggagtgagcagccagctcatggaatatcccaaaggaagttccctatggactcagtccattttctctccaatctgtatcttcatcttcactctattttgcatctggatcatccatccctctggaacacaaggggcccaaggcaattgtcaagggggagaacagctaatctatgctctgccagtaagtctctggaagttcctgccaccctctgcctctgcctggagctcacacccccggcttgcaattgcagccagcagatgtgtattaagaaataactaatcaagccatggccttcagccacatggtggaggccagtgtggtaactacaccccctgtccatctctctaagtatctgtaaccccaaaaattatggagccaagatgattcatgatgttctctggaccatgagcgcctgaggaatctataaacacacagtccttaacccctttgagccccaaatgcttcatctgtcaaatgagg

SEQ ID NO: 101674 - DNA, 585 bp, Homo Sapiens
caagtgtgaacatgactcatgcactttacaaacattgaagaagaataaataaattatgggatagttgacagtcttcatttcaaacactgtttttaaaggaaaggataaaacccttgtgttcatggggaggggttcagttcagtcctaagtgtttgtccattgaccaaggctgattgatctcgtgttggcaacagaggcaggaggacggttcatttgctcggctataacttgctatgggtaccctgcagcatgcgttaatgtgcactggtatctggaacctcggtttttcccatcaatgagcagaagtggcattttcctgaagtagtcaataatatctgacacagacagaaagtcctctttccctcggagtccagttcccaacaagtaaacttgactttccttctgataacggatctggatggtggtaactttatcttcgtacgacaccatgaggacatatgtgatggttggtggttttttagagctggctctgaccagaaatgtgtcatcaggtgtatctttctaagaagcagctctgcctctggtcgggtaaataagaaacgtccactcttcatttaatgaatc

SEQ ID NO: 101675 - DNA, 604 bp, Homo Sapiens
tttaaaagataaaccaaaaaattgaaacaaaatacacgggaattcaaacatttataccagaatataagggaataccctggaatctaaacacctcttcaggcaagaatgtgtgtcaatacaaatgcctggcacattgttttccttccccctttctttttacccagtttacccagttttaaaagtgattttttaaaatgcacctttaaaagaacatcttttgttaagtgacttaaacttgatacatttcttggattactaaggaggttaaagtcacatttggtgaaaaaggggcctatctcctctttcctcacatacgggtcatcgaatacttttaaaagcattttccaccatgaatgaggggaaatggaagaaaagaggtggtgacaattatttgcattttccaaatggacggaatgagcctccggagggtacacgaggtcaccagcgtgagcccgcggtggagctggaggcgtatttatagctggctgacctcagtcctgttgggccctcgccgctccttatcttatgccgctggaattcgcgggctcgcaggtcacaggagcccgggcgcgccgggcctggcgctccaacatcagaatggtaa

SEQ ID NO: 101676 - DNA, 504 bp, Homo Sapiens
caaacaaaagaggtttaattgactcagttctgggtggctggggaggcctcaagaaacttacaattatggcggaaggcaaaggggaagtaggtaccttcttcacaaggtggcaagagagaacaagcaagcacgcaagtgaagggggaactgttacacttttaaaaccatcagctctcgggagaattcagtatcaggagaacagcataggggaaaaccgtccccatgatgcaagcacttcccaccaggtccctcccttgacacatggggataacaattagagatgagatttgcgtggggacagagagccgaaccgtatcagacctcatgggggcctgcagtaagggaatcagacctactctctcaaacatgagtacaagggaaggagatgtcatcagtccctgaaattcctgccagtgtggtcttcagtgacctcagtcagtgttagatgcttagaaggaaatcttttggatcatctgtcgacagttggcactttcttacatgcca

SEQ ID NO: 101677 - DNA, 470 bp, Homo Sapiens
  misc_feature (374)..(374): n is a, c, g, or t
gggaaggagagacaaagtggtaccacagccctgttcttgccctggcacttggagggcaccagatacccaggggactgtagctggctgtgaggactctaaggccaggccagcatacacagtccccaatagtgagtaggagcccagtcagtccacaccccttcccatccactcgaaatgtaacttagccctcggcttctccttacctttcaggagttctctccttacccccaaagacttcctgaggaccccctaggccagccagcctatccctctctcccctaacccagcatcctgcagtcccctggttcagattggtggtgtctgtgcctgaacccccacgagcctgaaagcccctcaaaggccacatgggtctncccgcctctctgcatctccagatggtggcacgaggcctagcacacaaggaatcccagaaaatgttggctgaaggaataaatgaatggatctaaaaa

SEQ ID NO: 101678 - DNA, 278 bp, Homo Sapiens
gctcccttatactcaaggggcatgtgtctatggtgaagtagaaagagcactggattcagagtccaaagtaaggagcactttgcttggctcacagtagacaattgatgaccatttggggagtggacaaatgggtggatggacggatggacagatgcgtgaatggatgagtgggcaatggagcaatgttataatggtaattctctatctataaaataagtataacaactcattaataaaactgaaaaaagttgtgacttcttagttgctcagtaactcct

SEQ ID NO: 101679 - DNA, 408 bp, Homo Sapiens
gcatataattgaagaaactttaaaatattgaaataactaaagactgaagatttaaaatcactactgtgagaactaaaaaagtagatctcatggaggcagaacatagaatggtggttaccagaagctggacgggaagaagggagataaagagaagtccattaaggggcacaaaaatacagttagatggaaggaataaattctagtattcagtagtacagtagggaaattatagttaacagtagtttattgtatactttagccagaagagaaaaattgtaatattcccagcacaaagaaaagataagtgtttaagatgatggataatccaattgccttgatttgatcatcacacattgtatacaagtatcaaacatgtacccccaaaatgtatacaatattatatatcaa

SEQ ID NO: 101680 - DNA, 638 bp, Homo Sapiens
  misc_feature (212)..(226): n is a, c, g, or t
ttttaactagcaggcatccaattttcattttatttctttttaccttcataatagttattcataccacctttccaacaagaggtttactggaagtacagtcaatgaaatcatttactattactattgtataagtcaatatttgctttcagaaaattatttctaaggttttaaaatatttttccaacacaaatgcccttaaaacaatgcaattnnnnnnnnnnnnnnncttaaggagaaaatatttgcaaatcatgtatccaataaggagcttgtatctagaatatataaagaacacttacaactgagtaacaagacaagtgtactttaaaatgagcaaaggaactattataaataggcatttctgaaaaatgtacagtaaacggccaattagcacatgaaaagatgtataacatcattagtcatcaaggaaatccaaatcaaaaccacaatgagatacataccacttcatacccattgggatggctagaatcagaaagtaagataagtgctgatgagaatgtggagagactggaatcttcatacacacaaaagggaatgtaaaatgatctagccagtttgaaaacagtatggcagttccccaaaggattgaacacagaggttatgcatgactcggcaat

SEQ ID NO: 101681 - DNA, 570 bp, Homo Sapiens
atcgtgtttgaccggcctttaacttaaaggcattacctcttcctcttgactgactttactccttcaattaatatgtttaaccattgctcttatttctatacagagcctatagtgaagtaggaaatggaagaaatggtcttttaaactgaaacacttgattacttattttctccactaaaagtacaggcagaaagagaggctaaatagggggaggaaagtgggtggcacatgacctcagtgtgaaaaagcaatgtgctttcacagagtggctggaagtgaaagctggatcatttcctaactcctcttgagttgattcattatagaggcgtatggagtattgttatactttctgaaaagcataacttaatgtacttctaccttaaaattaagtacagaaaccttttttaaaaaataagcaaacattggtttggaaccaattagtgatggtttgtttataccatggcccctcatctctgcgtgtgtgtgcctgtgctacttacacatgctgctagtacacacaaagggatataggacccagctgcaacagtgctcattagaggccctgataga

SEQ ID NO: 101682 - DNA, 456 bp, Homo Sapiens
ttggtttcctaaaatagtttaattaagatagaattcacatatcaaataattcatcttttagagtgtacaattcaatagttttagatctaatactttttttatgtaaaatatatgtaacatagaatctaccatttataaatgtacaattaagtgacattattaattatatttacaatattgtgcaaccactaccatttccaaaactttttcatcacccaaaacagaaagaaacttgtaaccattaagcaataacatcccatgccctgttttccccagcccctggtaacttctactgtctgtctctataaatttgcctatccttaagtgcctcatgtaagtagaatcacagtatttgtccttttctgtcaaatttcactgagtgtattttcaggttcatcctgttacagcacttatcagagcttaaattcttttgagtagctgggaccacaggcgcgc

SEQ ID NO: 101683 - DNA, 726 bp, Homo Sapiens
  misc_feature (65)..(113): n is a, c, g, or t
gggagtttgggtgctagaggagttaggaagcttgatgctgttgttggccgtgactttggtgacannnnnnnnnnnnnnnnnnnnnnnnnnnnnnnnnnnnnnnnnnnnnnnnnctgaagcatgaaaagtttggggtggtcccttccttctttaacctcccgagactctgtgcctctcacatgtatagattccctgtttgtagacagcagtgctgttatggggacctctgaaggctatctgaatgtgcctgcatttagcaagtcaaggccagaccctccagatgcactggactgtggggacattttgtgtgaatgagactattaagaatttagcagttcattctgacagcttgatagatggagtggttttgcatggcatccatgtaggaattgactaaaaaggaaacattttctgagagtccggctgtgtgtgcatgctgggaggtttttctcaaatcagattttaaaactttgctctgaaagaccaacaacaataacctaatccaatatccttgtatatttgattctactgaccataacatttcttaatttctgcttttggcttctgtagcctaatatactaatgataataagtattagtgttgtattaggaggtagatgctattatccctcttgcattcgttggagtctagttaggggatagaaaccatgctagtttagctgtctgcttaatgagtagccatctttatttctttacttttttata

SEQ ID NO: 101684 - DNA, 337 bp, Homo Sapiens
ttccatgcagttcacatatattataataattaaatgacaggacagcaccatattcatagaatatagaagaataaaggaaaaatatgagacaatgtgagtcaacagcataatacaaagttttgccaaaagctccattttcacaatgctacaactacagggtccagaggggtaagaccacacaatttatgagctttcccacacaagaaacgaaaagggttggttgttaatggcattctgacactattacagtataattacaaaatgacacaggttaatatttaaggagacattaagcctctcaaaaataaaatgagtatttacaagattaaggctctgc

SEQ ID NO: 101685 - DNA, 473 bp, Homo Sapiens
caaaaaggtatcatcagtttctcatgaaaatcctactgaagtgtttgaagatggagaaaatccaccaagtagtcgatcatcagagagtggattcactgagtttatacaatatcaagcagaccgaactgatgatattgacagagaactgagtgagggccagggggcagctgccatcccaattggtagcacatcctctgagacagaaacagcatccactgtgggatctgaagaaaccatcatccagaccccttccgtagtcactcaggggacagcaacccgaagtaggaagacagcccaaaagactgcaatgcagtgctgcttggagtatgtccaacagtttcttaccagacttatcaacctctacatcattcagaataactctttttctcagtctttggctacagaacatcaaggggatcttggtcgagaacaaggacagacttcaaaatgggacagaaattcacaaggagatg

SEQ ID NO: 101686 - DNA, 645 bp, Homo Sapiens
agatgggaaataaaagtagttaaataacatcagaaactgagttcctggagaactacagtttagcattcctcaggctactgtgaaaacacaaccgttatggtctttgtctccatttttatcaaggttttccatggttaagtttggagaaaataccacacaaaacaatgaattgccaaattgtttgttttattcaagactcattctacttgcaagcaaagtgtatttgtagtcctatgaacagtctcctcgtgtatctccagagactgcatgtgcaaagtaaaatgcttcatttgccacatagttgttgtaatatttaatccagtagcataacttatatctgtatttaaggacttttgtgcaatatggtcttaagaaataattgccaaaaaaatcggccatggtttgcattttttaacataatctaagacagaaaaaaagcaatttttactatgtaacaatggtattcaacattctatatactgtgtttagtacactaattttgaagccaatatttctgtacatgaaaaagagctatttatctctgtttgttggaaaatcctaatggggattcctctggttgttcactgccaaaactgtggcattttcattacaggagagtttactatgctaaaagcaaaaaacaaa

SEQ ID NO: 101687 - DNA, 779 bp, Homo Sapiens
  misc_feature (66)..(66): n is a, c, g, or t
ttggaagccccccccttgaggctgctccccttcgtggcccgccctctgctcttatgccaccttttntgggtaccggtgcccaggggcacccgagctccagccccgagccctggacatctactctcccggggatgatgcctcccacgagaaggagctgatcgaagcgctgcaagaagtcttgaagaacctcaagagtaaacgtgttcccatctatgagaagaagtatggccaagtccccatgtgtgacgccggtgagcagtgtgcagtgaggaaaggggcaaggatcgggaagctgtgtgactgtccccgaggaacctcctgcaattccttcctcctgaactgaatatgaaggggcgtccattctcctccatacatccccatccctctactttccccagaggaccacaccttcctccctggagtttggcttaagcaacagataaagtttttattttcctctgaagggaaagggctcttttcctgctgtttcaaaaataaaagaacacattagatgttactgtgtgaagaataatgccttgtatggtgttgatacgtgtgtgaagtattcttattttatttgtctgacaaactcttgtgtacctttgtgtaaagaagggaagctttgtttgaaaattgtatttttgtatgtggcatggcagaatgaaaattagatctagctaatctcggtagatgtcattacaacctggaaaataaatcaccctaagtgacacaaattgaagcatgtacaaattatacataataaagtgtttttaataatt

SEQ ID NO: 101688 - DNA, 905 bp, Homo Sapiens
  misc_feature (61)..(82): n is a, c, g, or t
  misc_feature (115)..(181): n is a, c, g, or t
  misc_feature (524)..(651): n is a, c, g, or t
gtgccaagctaaaattaaccctcaactaaagggaataagcttgcggccgcatacgcggtcnnnnnnnnnnnnnnnnnnnnnnccagctagtttttgtatttttagtagagatgannnnnnnnnnnnnnnnnnnnnnnnnnnnnnnnnnnnnnnnnnnnnnnnnnnnnnnnnnnnnnnnnnntgaggcaccgcacccaacctaacagaggaaacacttcaaatgcacatcctcacatttctagtctacgtagctggaaaaaaaggacattcttaatatgctaatgtggaggtcacctagttaccctaagggagaaaagcaaggcaaggacccactgcacagcaagttcccccttggaagcccacgggcgcagctgcccacaaatgcacataatctctgcagaaatacaaaagccctaatgctggctgcactggggacacaggtaggaggaaattttcccctgtaagcagttttgaattctgaactatgtggacagaacaccaaattttaaaacaaatgaaagtgnnnnnnnnnnnnnnnnnnnnnnnnnnnnnnnnnnnnnnnnnnnnnnnnnnnnnnnnnnnnnnnnnnnnnnnnnnnnnnnnnnnnnnnnnnnnnnnnnnnnnnnnnnnnnnnnnnnnnnnnnnnnnnnngtgaagtggcaacagacagaaacgagcacttctgcagctatctcacaaaactagtttggcaccaaaactagttaaagtgacctggtgtccgcctcactgagctgctccagcagaggcacaggcattctgcatactggcgctgctgtgcactgacagccataagccaagtcagcctttccccaggagtgccatggctaggaagatgcatctccctcgccaccagtataattttaaaagttatggttgtaaaatga

SEQ ID NO: 101689 - DNA, 406 bp, Homo Sapiens
ggtctccgagagcacgtagaattggacaattaggtaaatccttggaatcccccaaacagccatttgctttataaatccagtatttcttacctctgaacgtcttaaagagctgcctcacaaattaatctaaccattgcttgcactaagaagtttgccaagagcctcatacaaccttactggggggaaggaagagattactgaaaaccaacttgtaggaatgaaatgaggctgtcagttgtctaacctaacaaactgccaaattaggtttacattttttgttattagacttttgaatggccgaggcagagttaaatttaaaattttggattgtagccactttccactcgcctaaacactcaataccggtttgtttatttttccagcatcaagaaagaaaaccaaggca

SEQ ID NO: 101690 - DNA, 585 bp, Homo Sapiens
aaggatttctaaaaaactgttcattgatgtttatagttgtgttttatattatctaaaactcttccagttgaatttgtattttcatcaaaatcaacaaaattgcacagaaatataattaacggatacaaattcattatttttaaagctataaaagaaaatggcttcatggggttgttcctgaggtgtggaaccttctccatattccactgctctaagccaagaactttccctcaacccacaagaacaccaggtccacatgggggacattcccagatattcatcagggaaagaacacgtgaaccacttcaaagagacctaactcagattttctagaaagttgccctgacttccctttagagagctgtgtatgtgattctggaaagtagcatatgctttctggacagtttcatgttcccccctagaaagtaaggcactgctactagaccctgaggtggccatgggtttctatcctaaacagccatttctcattctgttctttgtgaacaggacttttatttcctaaacctgatgtgattttccagttgaatggaggcggaggtggaaagggcccggttaccggtaccg

SEQ ID NO: 101691 - DNA, 690 bp, Homo Sapiens
  misc_feature (669)..(669): n is a, c, g, or t
gggcccgaggaggtgaaccggctcacggagagcacctaccggaatgttatggaacagttcaatcctgggctgcgaaatttaataaacctggggaaaaattatgagaaagctgtaaacgctatgatcctggcaggaaaagcctactacgatggagtggccaagatcggtgagattgccactgggtcccccgtgtcaactgaactgggacatgtcctcatagagatttcaagtacccacaagaaactcaacgagagtcttgatgaaaattttaaaaaattccacaaagagattatccatgagctggagaagaagatagaacttgacgtgaaatatatgaacgcaactctaaaaagataccaaacagaacacaagaataaattagagtctttggagaaatcccaagctgagttgaagaagatcagaaggaaaagccaaggaagccgaaacgcactcaaatatgaacacaaagaaattgagtatgtggagaccgttacttctcgtcagagtgaaatccagaaattcattgcagatggttgcaaagaggctctgcttgaagagaagaagcgctactgctgtctggttgataagcactgtggctgtgcagaccacatacattattatcacttacagtctgcagaactactgaagttcaagctgcctcagtggcangagacctgtgtcgtgccatca

SEQ ID NO: 101692 - DNA, 888 bp, Homo Sapiens
  misc_feature (30)..(30): n is a, c, g, or t
  misc_feature (805)..(826): n is a, c, g, or t
ctgtgaactcatcacgcacacccacgtgcntgtacttgcccccagggtggaagagaagagacagaaagaccccatgaccccccccatgtgatccgccatctgtgtctcagtggcatctgtacagccttgtctgcaaaatggaggatgcggggcaagcccttagggccctgccagggctcggggggcaaagagggactcgggaaactcagtgtaccccagatgcctcacccattccgtgtcatcacccatgtctgccacccactgattgggcaattgtgggcccatggggtggaagcccccagatgactgagcagttctacaaaaaatggccagcacgagcggggactagagggtcctgattttgtgtctgtgcctcttcatctctctggactctgatctccttctcccttcccatctccaggccttctgtctgtcccagataaaggcgctgttctcccatcctccctaccccatcctctccaccaaatcgctcccaattttgagagccaaaggctggcgcttctgacttcaggagcgaaaggaggaggcctagtttgggccgatgtattttaaagcagagtggacagcagagagtcaatttccctttcgttgggagtgggcagtggggtggctaattgtcttcggccaaccaggggcctgttgcccaggcaactcaccacgtccgcctctgctgattggctgccacggtgggagtcagccaagatttaaagggatgccagcgattgctcttttcaaaacctaccagtcccactgtgggtggagaaataaatggtctttctcctcnnnnnnnnnnnnnnnnnnnnnngaccgcgtatgcggccgcaagcttattccctgttagtgagggttaattttagctctagcacg

SEQ ID NO: 101693 - DNA, 423 bp, Homo Sapiens
taccaaatgctacttacatacattcaacatctagcttactggcatgatatcaaagttttataaaaatgaggaactgcagatatatgattagaaggtacacaaattgcattacattaaacacaaaggcagtgtggtccttgtaggagaaatcaaggtcagtaccccctggtagaaatgttctataaaaatgtgtcacattgaagtatcagtgtttcagccaattgtctgtccctgatatatttccttggagtatgtaatgtatcaggactttaggtttcttaatccaaaatgtctgactgaatttaggtacatctagaaagcagctgaaagggtttctcttatagtctgacataacagaaagtagattgagaaatccctctctttacctgaagatgtactgttacacttcagccatcagctcac

SEQ ID NO: 101694 - DNA, 378 bp, Homo Sapiens
ttttttttggtattttcagttagattctttcttcttagagatacaaagaaagggaggaaaatagctacagacatggtgtaagtaggtcacagcagtttcaatgcaccaaaaaatgtgacatctccatccagtgatatttgtgcattttctcttggtattgcaagttggagttcatctccttcttccagttttgcaatgccagctgaatagcaggaattattgggtagtgttacaggcatattttgaatacatcgaaacaaagtcaacagactcaattcatccccaaagacatggaccttcttcctctgaattagatgtcccatggcgtaggtcttatcagtatataaaacctgaccatatataaaaaagtaaccagtt

SEQ ID NO: 101695 - DNA, 449 bp, Homo Sapiens
gccctttcccctccgcctccatgatgcttctggtagattccatccatttctgagggatttcccctgaggttaaaactgccttgttttcctgtggcttagttgtcattatcatatgatggtagtattttcaaccatctcccttatcctctgtcctctgtccagatggttctgtctgggccgacggcacagctgtcatcccgcaacttctctttatcctgggctacaatccagtcctgcctcacacgtccttctctttattattttactccttatttgtgcagttggttgttatgtggacttgtctagttttggtaaacacctacggtcctataaccaccaccactgtctggcaccgtggccccacagctggacggctggagctggcagcttttaaacccaactcaggtggctgtccaagccaccctatttaaaattgcatctcaaaaaaa

SEQ ID NO: 101696 - DNA, 591 bp, Homo Sapiens
aacttcttattacctgttttaatcttttttgatatctttattctacctacttatattgttcgctgtcctattatcttcatggccaatgttcaagtggtagcctagtaattttcgatcagggtgcatatgagaaatttacagattaggggctgaggtatgttatatttgaaaacaacatatagttttgtagtataaactatattaaattaaaataaacaaatggctttgctggaacaaatatacagaaggtaaacttgaatatcgatgatggttggcaagtagcaaaaggaacagataggtgttcctgggttaagggaagcatataggaatcttggggttagtgagaggaatataccatttcaatatttatcaaatagaacatgggtattaaaatgttaaaagaacattatttgagtctttttttatctagctgttttttatctaaggtttcaatactataacctaatctttaccccaaatttagtacttctagctaagttttgttttaacaaagaaaagtaacatatattatcagtgtaggttaaaatgcattaatccatacttgttggatcaataaataaggcatgaatt

SEQ ID NO: 101697 - DNA, 438 bp, Homo Sapiens
aatcacattacttgacctcagattatactacagagctatagtaaccagaacagcatggtcctggcataaaaacagatacatagaccactggaacagaatagagaacctagaaataaatctatacatttacagtgaactcatttttgacaaaagtgccaagaatgtacattggggaaaggacagtctctttagtaaatggtgctgggaaaactgaatgttcatatgcaggaaaaagaacctagacccctatctctcatcatatacaaaaatcaaatcaaaatgattaaaggtttaaacccaagacctcaagcatgaaactactgaaataaaacattgaggaacgtctccaggacattggagtaggcaaagatttcttaggtaataccccacaagcataggcaatgaaagcaaaaatgaacaaatgggatcacatcaagt

SEQ ID NO: 101698 - DNA, 593 bp, Homo Sapiens
  misc_feature (288)..(296): n is a, c, g, or t
ggccgcaccgtctcaaaaataagaagcacctctgctcggccgccccaccgtctgggaagtgaggagcacctctccctggcccccacgctgtctgggaagtgaggagcgcctctccctggcccccacactgtctgggaagtgaggagcgcctctgcctggccgctgtgcaaccctccaagtgtgaagtggcaaccttgtgtgtgatttttctgccctacccaggtttgcatctttgacattaaagtttacttttaaatttaaattaaattaaaagttttaaattggagnnnnnnnnngacagtggggagccatggaaggttcttgagcaggggctgagggggtatactcacctccattgtgattaatactgttagactcaacaagagctatggtgatgggccggcgcagtgggtcgtcctccttctccagctctgtctcccagaggatggcgtccccatcctcgctgaagttctcttgagccctgtagcctcgaggtaactcgctggagccatccttctggctaaatactgccactccatacaggccattgtagctgacgtggttgctggtgacatgggggaggctggacgaca

SEQ ID NO: 101699 - DNA, 458 bp, Homo Sapiens
ctgcacaaacgtgttcagaaagattattcaactttcccatacttgttctaaaattgagctgatccgcatctctttcaaaaactagaatttctgctctaagaatagaacataaggctccactcccttttagaaaagatatatgaattggaaaatgctctgaaagtccttttgcttcaaacaaaagtgtaaacttttacacttccccaactcacatttgatttgtaatgatatggttgagaagtacatctagatgtcatttattaaaagtgctttgtaagactagattgagctgtttctgagggcggtcaccagttgtgttggggtctggtttgagtgccttctgccaaaatgttgtgatggaggtgtttctgcgaccagacacaggataccgctgtgtctgcacccggttgcctgcatggccagaggaaaagtcagttggattaaacatcatggtaaaa

SEQ ID NO: 101700 - DNA, 776 bp, Homo Sapiens
  misc_feature (61)..(136): n is a, c, g, or t
gagacagggccttgctctgtagccaggctagaatgcagtggtacatcatggctcactgaannnnnnnnnnnnnnnnnnnnnnnnnnnnnnnnnnnnnnnnnnnnnnnnnnnnnnnnnnnnnnnnnnnnnnnnnnnncggctctcaccatgttgcccaggctaactaaggctctttctaagtgcctgtgatgaccaagcacaatgccatgttgaccttgctttgtccagctttctgtggggcagcctccaaccccacccaagaccctcaaccatcagggaccaacccatgctcacagttcctggttctttgacgctggcgtgctagatatggtggaggctgctgggtgtctcccttgaacaccctgccccagggcagatcactgtagctcggtttcccagagccctgagtggccttggtccactgctgcttggaggcagagctggccgtgaccctgagcaaagcacaggaccctccccttatcccttcagtgtgtgctggctgtgttccccgtcatctgggaagacagccacattctgccagcacttgcttcgcatcttgtgacataagataatagttgccaacatggcgcccttcatccctgggtgctgtcaagccgtacaccaggcaggggcagcctcacccagctcacatcagcgagaccttggggcctctgttttggacggtggtgtttgacttcttgctgggaatctgatcattcttccaggctttctgccttcgggtcttttttgtggtttagtttatcgttttgtttttg

SEQ ID NO: 101701 - DNA, 558 bp, Homo Sapiens
ggaggctgaggtggtaggatcgctgagcccgggaattgagaccacagggagctaggactgcaccacggaacaccgcctgagtcaacagacgagaccctttctcaaaagaaaaattcaaaagtgacaacaccaaatgttggtgagaatgtagaggaactggagcactcgtatattgtttggttgatagtttgaagttctgctgaatttcgaagccttcaaagtattttggtgtgtatttcctcatataatttggcaataattatttgaggtggtaataggaaaggaattcttactacttctcttcctaaataagtaaacaaatttgtggagtggctaatttactacctaaggtcacacaataatgtcagagaaccattgaccatagaagtcaattaatattagtcttaggactttttcttagtgttccaagactatcatgaggtggttttatttgtttctgtcgtggtttataatctcaagcattttttgtagtaaaacgtctgaggatcattaataaacctatgatcataagattttgtaaataaaatgtccatggat

SEQ ID NO: 101702 - DNA, 633 bp, Homo Sapiens
atttcctcagggttctcatttggattgccttggaggttggtgtgatgccacaatgtgcagagaggctgaggacagggagggcaggtgggcttcactttccagccagctctgatttctggggagtggtagtctattcagggggctccgaggccctgtttgggtggattgggaagagtgtgcagttccttagtgatgtctatcataggcacagtggggaactagcaacattcatgctaggtatttgccagccttgacataataaaacagatgtcactgactcctgcctctttgtccagcagtggtcagcactgcttggtcaggctgcagggcatagatgggttgcatcctgagtgagaaaatgcatttccagatatgtttttgtctcttcttgctggcaggactagggttagtgtttatcatttgacttaaactcattcccccaagttcttactctattttcatgtatcggcagttactatttaagttgctgccctcgcagactacagtgagggcaacgagcacagactagagcaaagcttccccacccacagactgattatgcagtgtcactgggagcccctaacactggagacgctgacttaggaagtgtagcgtggggtaaccgggcaggcc

SEQ ID NO: 101703 - DNA, 266 bp, Homo Sapiens
cctctactccttttcacatgtaaaatgtagatttatgggtggggtgggacgggacgggggtgggcttagcagaagcctcacaaaaatgtaaccatctgcctcactgcctatcctccctccctttgttccccctcctgcctgtcttccccctttaaagactgaagttcccaaaaccccctttagaaaagagatcacagatgctcctgcgatttgtgtttgtttttccagggtgtgtccttggataaataaactgtgaatcgattgag

SEQ ID NO: 101704 - DNA, 600 bp, Homo Sapiens
  misc_feature (188)..(279): n is a, c, g, or t
  misc_feature (378)..(431): n is a, c, g, or t
  misc_feature (433)..(479): n is a, c, g, or t
aacaaacacaaatcgcaggagcatctgtgatctcttttctaaagggggttttgggaacttcagtctttaaagggggaagacaggcaggagggggaacaaagggagggaggataggcagtgaggcagatggttacatttttgtgaggctctgctaagcccacccccgtcccgtcccaccccacccatannnnnnnnnnnnnnnnnnnnnnnnnnnnnnnnnnnnnnnnnnnnnnnnnnnnnnnnnnnnnnnnnnnnnnnnnnnnnnnnnnnnnnnnnnnntaaacacataaaaagagggagtagaggaaatgagtctgatatgggattgtgaaattataactatgggtttaagaacaaaaggaagacaatattggtgannnnnnnnnnnnnnnnnnnnnnnnnnnnnnnnnnnnnnnnnnnnnnnnnnnnnngnnnnnnnnnnnnnnnnnnnnnnnnnnnnnnnnnnnnnnnnnnnnnnncacagagattaggaaaagcttagagtcagcaaatgccaaccagtctcttggtcaaggcaagaggaaaatgggagtgtgctaagggcaagctttgcccactataccaccccctagagtttca

SEQ ID NO: 101705 - DNA, 315 bp, Homo Sapiens
gaaaagggaaaagaaactctgaatccgaccagtgtaggtgattacattagcctttgaagtcaacacaaagtttaaaacttccaggattttgcaaagttgtatatatttaatgctgtgcaactgctaaactatgcagtttttgttgaaggaactaaaagcaactagctccctaatggtctataattttatttcttttggcttaaagtgaaaaagaagaaatagagaattccagcagaattcagtggttgtctactatccatacttcttatcactttagtttttcatcagtcaataaaattaatttactcttcccct

SEQ ID NO: 101706 - DNA, 676 bp, Homo Sapiens
  misc_feature (447)..(483): n is a, c, g, or t
ccaagagaggactgcgggaaacaaaaatttgcaaagaattgacttacaaacaggttgtcgccttccacccttcgccttcaaaaggtttcagccacatgcctggggacattaaacatacggttgctcaacattatttgttgacagactcggagcctcaccaaattgagttaaccaacgtcagtccaaaacaaaaggcaaggcagtcacaaggcatgcaatgctcccagcctgcaggtcatccgtctaccagaggacctcagggcccactcagcggcacctggcctcagcccttcctcggaggtccaagtcatcttcaagctgagtgacctcaggagatgacaacaaaaggtttctcgagtgtatctagaactcccaggtctcaaggacttgaaaaagtcaaaatgtgagagtgggtggaagtgtcctacaatttgtttttctcctggnnnnnnnnnnnnnnnnnnnnnnnnnnnnnnnnnnnnngtccaatggtagggggaaggggagagggaaggtaaattatttgcaatttccaaatagattcagtggctgtaagggaatggggcatgtcggcattaccttttctgggaaggctgctttcactagagccactgggagggggggaaagataaataaaagataaatataagagagatggcaatttaatgatcatttg

SEQ ID NO: 101707 - DNA, 708 bp, Homo Sapiens
ctgaggccctggggtagcctttaatggcccagcaaaatggccagaaccgttagaggaaacatttaataaagtctggagtcagagccctgcgggtctagctggattcctggaggtgcggcccagaagccagcgggagggaattggaggccggaggctcaaactgtccccacttccaccaagggcccctcctccaacagcttccaggctgccaaaggcccctgcatcacctccagggtcccctgggtccagcctcatgcttcccataatgagtttttaaaccacaacgctgcatcaggtgacatctcttctgcaggctgtgcgcgtctccagggggaagggggctgtgtctttgggacagtttgtgctctcaatcacttgactgctgacaggcacctcagctgaatggtgtgatttatgcaaagattgtgctgaattatttaaagcattctctatttaaagaacagagaatatttaattagcattctgctgtgcttaattgaagactcacaaatcaattaaaactgcttaccttttggcagttcagtaacttcacagaaacctcccaggaaatgcatcctattcacagctgggttcatcctatacccagcgacctgtggccagtgtggcgctgtgattagaggcggctcagcgccttcagaggagcggcctggctgtgcgcacattagagaaaggcatccatcgtcgttg

SEQ ID NO: 101708 - DNA, 664 bp, Homo Sapiens
  misc_feature (513)..(513): n is a, c, g, or t
ttttgtttgttttcctgccggctgggaaaacggccgggttcctgctgcactaccatgcgccgtgcggcccagtgcgactcgccggacctcgcgggcgtccctgtacggagccctcggccggtcctagcagggattgtcaccatttccagctccggagcgggcggctgcgccccgcttcgtcgaggagctgcgctcacctcaggggcgggcccccgcatgcgttcgcggcgccaagaagagtattcctttccacttacaactaaataagacctgcttttgctggagctgtgctaggctgagggaattccacactgaattttacaagcgggatggatttctctaaggaagatgacatacaacgatggtttgcggagtcttaatttgttggaaagtgaaataatgaatgatgggaggattcatacacagcatgtgtctcaacttagagaggaggttacatccctattaacccattgcagaagactgatgtttggaaatatgtatttgggagacagntccgttctaatgataccctgttgctggtgctgccatcgaaaaatctgggttcacttgggggaggactggttccactgcagactgaacccttccgccgcgaaataattgtccggcttggcaggccacctgaatagatccaataatagctttg

SEQ ID NO: 101709 - DNA, 675 bp, Homo Sapiens
ccccgcgctgacccttcctggggacatcgggtgggggtggaggaggcgctgagctagggagaggagggttgtgcggcccggaccacgcaaccttgggatcggagggtggttgaggccttgagggaagaatggaaggcggccttgacttctggtgcttccacgcccttcagatccagagcccagagcgtccaggctggagtttaggacgttcatcagagtcccgagacgcgcgagtgggtggaaccgcgtggggcgggagaagagggggagattaggcagcaagaaaatggtccccgtgggcagttcagcctaaacctggagctggggaagggcctctggagagaagccttaaatcgttactcatctttcacagtcttttataatcgtgaatgagccctccgttgtagactgttaatgcgtgtccaggatgcccgagagtgggggtaaaacaataaaagactcctcctgttgtgattaaaattatatttgctttttgtatcctcctaagttccatgatattgaaaatgtgtcttgttatatttcataaatgagcttttaaaaaacttctgagatatcttccaaaaagtatcactcaccagggaagaaaagaagaggaaacctagtggcttttctgttgacgccaaaggttactccctctgcctcaccataaaaaaa

SEQ ID NO: 101710 - DNA, 284 bp, Homo Sapiens
ttacaaatacaacacattatcatctttaagttatgagcatgctaattctccaaatggagaactactacttgattactcctgtgagttctatttcactttacaataataattctcctctttctccagtggtatttctttgtcctgcaccattgtcctagggtttcattttggtcttgctgtctactttatctttcgaattattacatcagcatttcttctctggtttctcagtgctcctatacaggattcagtcatttttatagatttaaaaacttaatttcttg

SEQ ID NO: 101711 - DNA, 406 bp, Homo Sapiens
acatttcaaataaataattcatattaacgaaaaccgtccagccaagtcaaatactttgctgattgctatatttaattattgctaacaaattctgagcaggctgttttccagcatcctgtgcttttgtgagtgcggattccccactagtgggcgccatttgtcttcttattccttccgtgcagctcaccttaccgcaaattcatttataaatacaaaaatcagtgaaaggtgggggaagaagtgtgcaataaaaatcaaactcaactatagtgcagtccttagacaaggatttccttcaccctttcctgtttcctcattaaaacccagcaagaaagatgacttgagaatagcatttctatttaaatcctattggaaaataaattaataaacacacttgtaaaaatac

SEQ ID NO: 101712 - DNA, 396 bp, Homo Sapiens
ctaggcaacgagagcaaaactccaatacaaacaaacaaacaaacacctgtgctaggtcagtctggcacgtaagatgaacatccctaccaacacagagctcaccatctcttatacttaagtgaaaaacatggggaaggggaaaggggaatggctgcttttgatatgttccctgacacatatcttgaatggagacctccctaccaagtgatgaaagtgttgaaaaacttaataacaaatgcttgttgggcaagaatgggattgaggattatcttctctcagaaaggcattgtgaaggaattgagccagatctctctccctactgcaaaaccctattgtagtaaaaaagtcttctttactatcttaataaaacagatattgtgagattcacatacaaaa

SEQ ID NO: 101713 - DNA, 501 bp, Homo Sapiens
  misc_feature (296)..(340): n is a, c, g, or t
caaaacttcaggcacgaccctgcaaagggaaggaatgatggaggtggcagaacacgattgctttctgttgagaagcgtgtgtgcctccaggcacaggtggatctactttagcctccttagaccacaaaataatatttctccagattggatgaatgcaggggctacccaaaagattgaacactcagcattcgcacattgctcattcattcaatacctgtgagccacagctccaagtccgtggcacctgatcccttgacacatgggacttctcttgcaacacaaattaatagataaannnnnnnnnnnnnnnnnnnnnnnnnnnnnnnnnnnnnnnnnnnnncactgagcaaggggctttgtgtgatgttctggtgttctgcaataagtctttctaaaaatgttataatatttaagtacacttagtttttggtatttgtaaacaaaactctaagtaatacagaaattagtaccagtcagtgctacccagagcataggtaaact

SEQ ID NO: 101714 - DNA, 624 bp, Homo Sapiens
tgcctaaggagttactgctacaggtggtgatataacacccttcccttactttgccactgacagctcagagcagtaactctccatctcctgaagtaagtagtctctcttttctgcaacaactgatacttcctcaactgctccaaaaccctttaaaagagtttttcttaactgctatcaaatacattggcctaacatttagaaggaagtactggtgggcagaagtgacactcttccctaaaaatggacaaatgacaaaaaccaataagggggacgggaggtaaataaagtagaacgtttcaccatggtgcaaagaaatgttatttgtagccatcgttcattgtattaaaaatttgccatgtcacatgccctacaaatacacatatacatatatacaaacaagtattttttaaggaatagtgtgatatttaaggaattatgacaaattcttaatttatctcaagaaatattttgaaggaaagtcctgtcttactttacctggaacactgccctgtgatcttctacaacttgttcttccatttctaccatttgtgaaacagcttcgtggaaagtaaacaactgtggagagacttcttcttccttaaagtaaaatagttaagaagtgaa

SEQ ID NO: 101715 - DNA, 985 bp, Homo Sapiens
tcatgcgctgtttcccagtctgtgtcctttcaagatactcccttgaaatgactgatttcaggcaacaactggatttacatatggtagccttcaacttcctgtttaacttactgccaaacttcaatagaagtccagattagaagttttagacctcagcctctggcctgggcttctgaaatgaccttcctccaaacaccatttaatttccgctaacttagttaatgaatggaactttctgaagacagcagttactttgatctgaacccctttcctagtttccagttaacatagccagagggagacagaaggggtgcccgcctctcaatgggtgccctctcctcctgcgtggctggagcagctcccagctgtagctattcctctaacgcagagagagctgcagaaagcagttcccaaaaggaagaaggcaagttacaaataccgccgttggcattttcgtgggtgtttccgccacatagagataaaagctttgaggtggggctttgaggcacactctctgggtagctgggcctgcagtctggaaatcctaagtaatccttgcaaataggctaactggaagccagcaatacaaatgagcagtgcttctggcctgagagaaaggtgtctgcattcaaagtacaacttcagataaaaatggaaaatgccagtcccaccctgcaggaatcctgtttctgggctgtttatcctcactgccatccaccctacccttggctgtgactaggatgtgaagaaagagattgggtggaaaaggctaccgcagctcttgctccgtttaactcaccaccttaaaaaacatggccttggctgctgctttaaaacaacaacaacgaaaatccccagccccaacccagaggtttaaccctgcagctaaggtgaagtttttgttaaggtgataaggtaaaaaaggacgccattctgagccttgacttccactcttcatacttttcggaagacaagtccagcaaag

SEQ ID NO: 101716 - DNA, 431 bp, Homo Sapiens
ggatggctacataccaatggattgattctcttaattgccacggcaagggggcgatcctatcatgacttaacatcaagcgcgcagttcaaaactactgtcttctgtcaaagttttctcctcttaaatgttattttgcttttacgtctcaactgtgtatgtaaaaaaaacgaatatttaaattacaaccctagactaaaaatgtgtttataataagatgtggatatttccttcagtagattgtaaccataatttaaattattttgttccacactgttttttatatctgtcatgtacattgcattttgatctgtaactgcacaaccctggggtttgctgcagagctatttctttccatgtaaagtagtggatccatcttgcttttgccttatataaagcctacagttatggaagtgtggaaaactgtggcttct

SEQ ID NO: 101717 - DNA, 501 bp, Homo Sapiens
cgccaagggacaaccatatacaccttctgtgtcttgcatatttgccactgacatgaccactgccgtcacagccaggggtgggacagctgaacagctcttgtatggctggttccacgggaactcgaacccctttggaccgcgtgcgatgccgcttctcctcggtgtccacctccatcttacaggaagtcttctctcctaggaacggaggcagcgtgactcctggcaggacgcaggcccagagtcaggggctcgctctaagctctactcctggtcctctccagcttgtgactgtggcaaagtcacttaatctctctatgccttgatttctccatctttaggtggctcctcggatatccatacgtctgtgagaccaactggaacctttcttgatggaattttgttgatagcttgaaagatgcaaacacttgattgaattcaataactacatttttttcttcttccaccagatgtggccactctgcactgttgccgcgccgggtg

SEQ ID NO: 101718 - DNA, 749 bp, Homo Sapiens
gacatttctaaatatttctgtcccagcaaagaggtttttgtagccaaggtatttgctcataagcatctatagttggatgatgtcacatacttgctcatctgccattacttgggaacagtagcttgtggcaagcaagaacctgaagcttttacatggccatggttatgaaccaggaaatagggaattaaataaaatcagaaaaacggttgttggatctaagttaggaatcagtacaagacctcatagaatgataggatgactcatggttctgtgcctcctagaacaatgttcaatatgactaacctgccaccaaattaaatgtttgctccaggatggtcagtaagacaggcttggattttctaatggacattttagtaagcaggtctgaggcaaggtagagagattcaggaatactgggccatcagggattataaaggtttgaggggataggagggtaggaatagaagaaagattctgtaaatctttcttcttcacatttgcaagtctttttactctctattatgcctaggaatgtgtgctagtgccaagcaaatcagagtaaattcctctctaaaagagccatccagttaattagattgcaatacatagatgatatatatcatttagcattcttagaggttataaattaagacattacattcagtgaaaaacagctatatagtttaccgattttctacatgtctcataatttgatgaaaataaattaacccatgatctgcctttattct

SEQ ID NO: 101719 - DNA, 413 bp, Homo Sapiens
gaaagtccctaggcagagaagcgctgtgtgggcagttggcagtcaggctggtgtgcactaaagtagtaagggctggggggaaagaggtgagtacaaattgagttcatctgtgaggcaggaaatgcttatcaaaccccaaattaatcatttttaaataacccatgatctattgacttgtaagagtgcagaaacttaaaatgaggctacattattttaaacatgctcctgtttcacttttactgatcaataaacagtaagtccttaggaaagggcaaggaccccgaggctatagttccagcccattctcatatcataagacacgtcacggtctatataaaatcaaacaacagctaaccccatctctactacacatacaataaattagccagcctctggagtgtctagtcaagtac

SEQ ID NO: 101720 - DNA, 942 bp, Homo Sapiens
  misc_feature (425)..(485): n is a, c, g, or t
cctagattccggattaggggatgacatcccaaacagcccggagtatttgcagaaggctcaggcaacgagtgggccacatctcacttctgcttcctcatctcagcccactctgaaaatgtgcagcaccctcactggttcctccccccaacgcaaggaggatgcccaattgttgccctctaaaaatgcacagttctcctggccctaggacttacttattacatttttttctctttccttgagctgcctttggcaagggaagagacccccaactctgcgcccctactccatgctgctgatccccacctgcgcactatagcgcagggtcagcagtggaatgaagggccttagaacctgcatagaagaaatgaactcactgcatttctgtgctccctcctccctcgcaccaaactcctagctctacaagnnnnnnnnnnnnnnnnnnnnnnnnnnnnnnnnnnnnnnnnnnnnnnnnnnnnnnnnnnnnnaaatattgctatttattgccgagttgtgcactttggggtagagtgaggggctcccagcagctctagctgggtctctcttgcttcctccctgcttacgcctttccttttcttgctccttcttcaactcctggtgtgtgtgagcatgccctttgcttgccacaccatatcctttccccagatccacctgtcctgacactctagtcctccaggatagtgctcctcccccagctccagggctcctggatgtccttcctcaactccctccacccctagacaatcctacctggtcccatctgcctcttttctctccccagcctgccctgtgacccttgcctcttcctgatactcccaagagcaggccccaggggtctgtgtcacatatctctgtgtgattccttctggttgcatccccaatttcatacaaaaagaaaaataaaagtgacctcgttctagcaaa

SEQ ID NO: 101721 - DNA, 451 bp, Homo Sapiens
  misc_feature (46)..(70): n is a, c, g, or t
gtgccactgcactctagcctgggtgacagagcaacactccgtctcnnnnnnnnnnnnnnnnnnnnnnnnngagtttcctaatgaaatgacttaaatgtcacctccatgaatgtatatatacaaactttgctggattgaagtttcttcatcccaacccctgctgtctagaaatgctataaatgtaagtaatttaggaaaatctgattaaaattaagacatgtataatgctccagagaatttgcaataggaaagaaatgaaaacgtataactctattctctttctctttaccagtgcctcattcttaacatgaatctacactatgaatcctacttcttactttcatacaaaaattgatgtgagatatttttgcaagttttcttcacataaaggttcataagtcgaatagtgttttcttaatagaagcagttaataaaatttctttccattttg

SEQ ID NO: 101722 - DNA, 822 bp, Homo Sapiens
  misc_feature (465)..(480): n is a, c, g, or t
  misc_feature (529)..(571): n is a, c, g, or t
tctgtgtccaacttgtccccatttgcccagaactttctgagtgtggacattgaaaatctcacatcccagggagccctcagtcctggctaaacctagacaactggtcaccctgttggcactggatttaactcgaatcctaacttctcctagcttcttcccatgcctttgactggcccgtgtctcctgttcctgggacccaagggtcactattaggaattcccatcacgaatcccgaacagcctctgccccacacagcacaaccccaatcccacccagaccaactgtgttcaccctagagagaagcagagatgggggagaaaatgaaaggagaatgtgaggttacagtcaccttcttaagaaccttttcatagacacatttctgttattgccaacaatgtccttaattacctagcattgctttgatcaagaaaaaaagtgatgtaaaactttatttatttatttacnnnnnnnnnnnnnnnntgagatggtgtctcaaaaagaaaaagaaaatgtggtatactttgcctcnnnnnnnnnnnnnnnnnnnnnnnnnnnnnnnnnnnnnnnnnnncagttgggatccacccaaatggagatttgcaaagtgggaaacataccctgtgataagcacgtaactagagataattccagaacttatgagaagagacaggaggctcttgggaataagaccatgaaacctgcaagcatcgagccaaaactctgaaaagttttcgacacagttccaagctaatagtgcatgcagagaaccgggctggaacatttaggaggggggtggagagtggagaagagaaagaaatgtta

SEQ ID NO: 101723 - DNA, 547 bp, Homo Sapiens
atagtttagagaacattgttcgtattcatctgttagggatggtagaagttagggttgtatgtgattataagactagtggaagggatacgtttttaatgatggatgagttctgcattctgattcatgcagtggttacaaaaatgtatacatgtgataaaatgtcatgtaaatgtgcacatttcaccaatgacaatgtgctggttgtgatattgtacaatgttaatggaaaatatcaccactggggaaaattgagtggtatgtgtaaacggtactatatttgcagcattttgtgagtctttattttaacataatatgtaaatatgtaaagcaactagaagaatggttttaatacaggagagtaacagcttataagcaagagaaagaaaaatgataaataatgtgaacacttaccaaaggaagggtggaacagagaaataaaggacagggaaaattatctgggatgattcctaaattccaatatttggatggaactatacagaattttaatatatctggaaaataaactgaaaatattaacgaatccaca

SEQ ID NO: 101724 - DNA, 574 bp, Homo Sapiens
  misc_feature (54)..(96): n is a, c, g, or t
  misc_feature (191)..(205): n is a, c, g, or t
tttcctttgggctacttctagcctaacaccattcccatttctataatacagttnnnnnnnnnnnnnnnnnnnnnnnnnnnnnnnnnnnnnnnnnnntaaaataatgagtttttcagtttgtgtggataacaccactgagttctaactgtctcaaatcctcatgtgattgtttaggaggcaccgtactcacnnnnnnnnnnnnnnntaacatggataactctgacagcccttcctcagcagctgaagtccctgcttctctagagggtgcagattccctatcccaacaacagcttccactaaagtagtcggtggcattttgtcagcatataacttctggctccttggatgactgtgttttttcctcatccttaaaaagtcccaagaaatgaaatgttactcatggttgtttttctggatgctttcttatcgcacaggtgttatacaaagaaaacatgggcaagggaacccctttacctgtcactcccgagatggaaagagtcaaacacaatcaagaaaatattagctcggtactttggcaagaaaagaaaaaaactacttatttaatgattttgaa

SEQ ID NO: 101725 - DNA, 822 bp, Homo Sapiens
acataggaaccaaggacacataggtctcatggcgaccctaaaatagtctgttctgtcacatagactagtacctgttccttccaaacatgtaacctttaataattgtgacattttgaaatgggaaagggcaaaaaggagggagaggggagtcatgctgtatagactctaaaatgttatgtttgttgtttttcttgctttgtttcacaactttgagccagagagaggctagcattttccctccaagctgactcggggaagctgaaacacaacaaagacctatttgatttgttcacaatgaacagggatttaaaaacgcagccttagcggacagctctaccagccacagaaaagttcttccagatcttcctcccgtcagcgcgataaaatggtaccgtactttggttaaatgtaaaatcagctttccaggaacagtggcatatcctttctcttccatcagttccctagattctcttcattactacattctctagcctaacattccgtccctgctgaattaactaatattcagatacattcaagatagaactaacactcaattctatctttccaaaatttaaggggatgataggtcttcactcacatggtaacaaacacagcagcaaaccccataaaactgaacatcaactgccttctgggaagttctcatctggcaagctagtgcaggtatcttgtgcatgggtcaagagagtgaagctcagagcacattgcttggcacccagcaggtgttcaggacatgttttagctcagccctcctagaaaactatgaaataaaatccaaacaaaagtattaagattgaagta

SEQ ID NO: 101726 - DNA, 550 bp, Homo Sapiens
  misc_feature (11)..(11): n is a, c, g, or t
aagatcaatanaattaataaacctctagtcaaacaaggaaaaaaggaacactcaaattaccaatatcaaggtaagatcagacatcatttcaatattgaatcaaaaaaacgagtgagaatacatcactccaaattttaaggatattaaaggatagtaggcaaacattatgaagactttctgctgataaattctacaacttcagtgaaatgggcaaattccttaaaagacacaaattgccaaatctcaaaatgatgagttaaataacttggacaaaaagtacatgctgtatgtccagtaacatacatttctggaagcacaaactaatgaatagtaacaaaaagtagataagtggttacctggggtcagtgtggaatggggagtgtgagattacaaagtggataaggacatatttgggaataatatatgtgctcattatcctgattgtggtggtgttttcacatgttagacatatgtcaaaatttaaattgtatactttgaatatgtgcagtttgttttatggaattatatctcaataaagctcttagaaata

SEQ ID NO: 101727 - DNA, 379 bp, Homo Sapiens
tagttgtgggggttggggggcagtggttggagaaaggtgagtcaaaaagcagcactactccctccggagcaaatgaatgggaataaaggttgatgataccaggtcagtaggagtctaaggtcagggcagagtcatgcaagaccaagagagttcgtggcctgttgggcatcaaggaccagaattcagtgacctgtccagggcaggaacatccctctttgctgcaatgttacggaaccggagaacaatgtggatacagagaaaaacagcaatggcatcgtagcagtcagctagataagaatccaggtgtttcagggtcatgctgagtgtacggcccatgacagcatggaacaggtcgtgtgcagctgggccagacacaaca

SEQ ID NO: 101728 - DNA, 509 bp, Homo Sapiens
ctgtggaagacggggccagaaaggggcctcggtgattggctctggcagctcagctggcacttgccaatgctctgggattttatgctggcagatcgggggtccccaccatttcctgtcattggagcttgtggcttttctattcaaggccccacaacctgctcaggctgccgactggcttccaggatgtgcctctgggtgtgttcagtagggtcaggtggctctgggaccttaagcaagtaacattctgagtgcctgcttctccttgaggacccaccacatctgcccacagctggctgttctctcctctccaggtcccctctgagccctctcaccttgtcctgtggaagaagcacaggctcctgtcctcagatcccgggaacctcagcaacctctgccggctcctcgcttcctcgatccagaatccactctccagtctccctcccctgactccctctgctgtcctccccttttccatggcccttctcccgctgcttgttgagctcctgcag

SEQ ID NO: 101729 - DNA, 624 bp, Homo Sapiens
caaactctattaaaaggattttcaagggccgggcaagatggattacaggcgtgagccaccgtgcctggccattatgactgtacgttttggtgacacctggttcttacgttagaaatcaggctgctgaacgttctgctctgtgtgtgtctttgtgcccattcttgttggcttccttagagggatttctggaagttcaatgattatgtaaaaagcacaagccttgctgggaccctggagtggcgttggagtctctcgtggttaggagcccaggccctggcctggccatcgggggctggaatcctggctgtgtcctccgtagccatgtgccccaggcagctttcctcaccgcctgcctgtcatccagggatgcaggtaggtcctgctccatggggttgtcatggcgatcacagagacttgtccgtgtggaccacctagagcagtacctagcagggcacctggcgccctggggtcaccttggatcagggttgcagatgacccactcccatccctcccaaaggcccttcagcccagaattttgtgcaccccaaattccatcaaaatcctttttcctttgagagtaactttattcatttccctgcagcttattaaagaattctgaagaac

SEQ ID NO: 101730 - DNA, 269 bp, Homo Sapiens
  misc_feature (214)..(215): n is a, c, g, or t
tgaggacagacactcctgcttccgagcccaaatgttgcattttccaagaccaccctggtctgccatgtccccatcctgggcctataaaaacctgagaccctagcgggtacacacactatctgctggacatcatgagaaacacatcggcacaagaagacagcagaggagctgggtcatcaaggaacgacactggctggaagagcgcatgtcgaannaggcacagggccagtcttacgcagctccatcccaatgtgcaagaagggatgcgg

SEQ ID NO: 101731 - DNA, 289 bp, Homo Sapiens
atcgcttgagcctcccaaagcattaggattacagacatgagccacagtgcccggccttaaagtgaatatttagagtgagaaaaggaaacccaacaagttaggtgagaagaaccaggtgtctctcttggaatagatcttaaggcagtttcccagaaattcataaaaatgttctcacattgcaacctggttccctctgtccaccaaaagcattctacaaaccccagcaactcacagcacacaggcgcacctgcaagtgaagagccctgcccacctagcgtccttagtctct

SEQ ID NO: 101732 - DNA, 381 bp, Homo Sapiens
  misc_feature (13)..(13): n is a, c, g, or t
ccgacagcacagnactccttatggcaataagacaccaaattataagcagcacctcacgccacgccagcagctaaacacgcaccggccccgagattcaaacgactgcagctcatccacctgcagacgctggctgaccccgttccacagctgtgactatagctttgattggacaagaggctgatttcagtctcctgctcctcctggaacctgaatatgtatgtttggccagctcaattcagcatgaggctcctgctgcaacaccgcctccttccaggtgcctgccagctgtttctgccagaggctgcgtctcccggcctgtcagaatggccaccctgcaggctgtaatcctttagaagaaataaagatcccctttccagatgt

SEQ ID NO: 101733 - DNA, 273 bp, Homo Sapiens
cctccttggacactgacggggatatgtacatcagccctgaggagttcaaacccattgctgagaagctaacagggtcaactcccgcggccagctacgaggaggaggagttgccccctgaccctagcgaggagacgctcaccatagaagcccgattccagcctctgctcccggagaccatgaccaagagcaaagatggcttcctaggggtctcccgcctcgccctgtccggcctccgaaactggacagccgccgcctcaccaagtgcagtgtttg

SEQ ID NO: 101734 - DNA, 534 bp, Homo Sapiens
cttggttcctcccccaaaggtaaggagggcttctcatggggtcctgagtacccacgatggcttcaggccagcattgccccaggctacctccttccttgcgcctttgagtcctctcccctgacctgctttctgtcagtagatgacatccactgtctcctccatgccaggctttgccaccttgcgtcaccaccttgccgaagacgggcaaggagtcgagtgtggagcagttccagcgccggttccggaactggtactggcactcctcaatggccagctgggcaccgcggcgcaccgagtccatgacttccaggttccgcttgcacatctgcacctgcctctggatcaggcccttgagtttctcgcacgtctcctcctctgagatgctccccaccgacgacagcttggccaggtacagccagttgctcgcggcggctgagaagacggcgaagacgaggaggcgcagcgaacgcaggcacgagcggggactcatggtgccgccgcgggcgcccggcccggggcagcggctgcggccgc

SEQ ID NO: 101735 - DNA, 647 bp, Homo Sapiens
  misc_feature (586)..(586): n is a, c, g, or t
  misc_feature (608)..(608): n is a, c, g, or t
gcggccgcagccgctgccccgggccgggcgcccgcggcggcaccatgagtccccgctcgtgcctgcgttcgctgcgcctcctcgtcttcgccgtcttctcagccgccgcgagcaactggctgtacctggccaagctgtcgtcggtggggagcatctcagaggaggagacgtgcgagaaactcaagggcctgatccagaggcaggtgcagatgtgcaagcggaacctggaagtcatggactcggtgcgccgcggtgcccagctggccattgaggagtgccagtaccagttccggaaccggcgctggaactgctccacactcgactccttgcccgtcttcggcaaggtggtgacgcaagggactcgggaggcggccttcgtgtacgccatctcttcggcaggtgtggcctttgcagtgacgcgggcgtgcagcagtggggagctggagaagtgcgcctgtgacaggacagtgcatggggtcagcccacaaggcttccagtggtcaggatgctctgacaacatcgcctacggtgtggccttctcacagtcgtttggtgatgtgcgggagagaagcaggggggcctcgtncagcagagccctcatgaacctncacaaacatgaggccggcaggaaggccatcctgacacac

SEQ ID NO: 101736 - DNA, 472 bp, Homo Sapiens
gcttccttgttgaatgcgtgagagggagcaggctggtaactaccgcctttgtcaaagaaaggagggtttccttctatattcttcagtccaaccccttccccgctttttaaaaccatccttcagtttcagagttagctcctgatctggtctgcttctctttcaggtccattcacctttgcaagccattctaaggctatcacccattttctttggggtattctttggttctatggagaaaccaaaagccacccttcccggctttgtctgtgagagaggggacacatgtaactagtgccaccgttaactttcattcttgaacgaattgccctaacagttaccccctcagcttctcctgccctttctatttcttgattcagcttggagtttcttcaaggtgctcttgggaaaaccacatttaccttgggtaacttgtactgccctttccttctggtttctctggtaaagaccgtcg

SEQ ID NO: 101737 - DNA, 843 bp, Homo Sapiens
gtctgttacccaccctggcgccgcgtcgacgacgcgggaagcgcccccagtgcgggtaaatgggatattcacaagtgtatggaaacagaggtcattgaatcttgggaattattatttataaagcactggactatggtttgaaggagaatgaagaaagggaattaagccctcccctagagcagcttatcgatcacatggccaacacggtggaagctgacggtagcaatgatgagggctatgaggctgcagaagaaggcctgggagatgaagatgaaaagagaaaaatctcagctattcggtcatatagagatgtcatgaagttgtgtgctgctcatctccctactgaatcagatgcaccaaatcattatcaggcagtatgtcgtgcactgtttgcagaaacaatggagctccatacatttctgaccaaaattaagagtgcgaaagagaatcttaagaagattcaagaaatggaaaagagcgatgaatctagcacagacttggaagagctgaaaaacgctgactgggcacgattctgggtacaggtgatgagggatttgaggaatggggtaaaacttaagaaggtccaagagcggcagtacaaccctttgcccattgaatatcagctcaccccttatgagatgttaatggatgacattcgctgcaaaagatacaccttgcgaaaagtgatggtgaatggtgatattccccctcggttaaaaaagagtgctcatgaaatcatcctcgacttcatcagatccagacctcctttaaatccagtctcagccagaaaactgaaaccaactccaccacggccacggagcctccatgaaagaatattagaag

SEQ ID NO: 101738 - DNA, 464 bp, Homo Sapiens
aacaaagtgccaccgaagaaaagtaatgactgagagcattgatgtacttattttgtcagtttgtaacaggaaagtgggggggagtctaagtcttcatagtctaatgtccaagtgggttgcactagatgtagacacttggaggcttacttttcatggtaatgtccatttcctatttataacccctctgggaacgtttgtctaaaggaaatgtttctgttcagtgtaacaattacagttgcacctggattgcccagtcctgcccctgcactaggggaccattaatcactgcaaagtagaagaattattaagttaaaccagagtttgagccaagaaaacccctgaacaatgttcatcttctgtgaaacttgttcaaatagttaagcttaaccatgttgctgccaaagacttttcctatgcagtggtggggcaccttgatcatcatcattatcttgattggctgaaaa

SEQ ID NO: 101739 - DNA, 564 bp, Homo Sapiens
gcacgaggaatttttgtgtttccccaaactggttcttagaaatccaaggccttgacttttaaaacttgtctctgagttttaagggctcattttggaatgtaaaagataatcactgtttttcattgttttggtgttctacaatcatgatttggggtcatgagaaaacctcattgtcctggagtgaaaataatttgagttttgtgcttcaagatttcattccacttctttgagtatttggataaatgcccatgaattaagtaagaaccaatgagagccttagagtcatgatttctttatttaatttttcagctgcttctctttgcaaacaacaacaacaaaccaaccccaagcccacagatggcgttagtcatcctaataatacacatcaattaaaactgtgagtcgggatccagcctcatttgctttgagcaacaggtatattactgacgagttgcagatacattgacattttctaaatcaaattaatttttaaaggcactggagtagcttgcaatttaaaggtaattgatattaaccccctgaaataaagagttatttgtaaag

SEQ ID NO: 101740 - DNA, 165 bp, Homo Sapiens
tttcatgaggccataactttatctattttgttccttggtgtattactagcacctggtatttagtagtttctgaaatatttattgaatgaatgaataagtgtgcaagatcagaattgccattgcactccaggctgggcaacaagaacaaaaattcgtctcaaaaaa

SEQ ID NO: 101741 - DNA, 835 bp, Homo Sapiens
ccctagcctgattaactcctctcaaatgtagtcactcatctggaacctgcgagtcaatctaagctgactctccctctatatcctttaaacaaattctgtggattactttaatagtcccttcaccagtatttcacactctggtatctaccccctctaaaccaattccacaattttccaaggtaaacatactaaaatacaaacttttatgtcactctactaaaacattttcagcattttccccaaagccttgagaaaacctcctagcctttcctagttcaactcttcagagttctacccttggttccctccctttcccccaagcaaaacccatcctttaatgcatacaggctaccaagtatttctgagttttcactgtttggaatccttttctattctgctccttattcacctaatttctactctaacgaaatttctctgtccctctgccccatttcagcctgagttatgcacctctctctctgtactgcaacagttccccataaatgcctcacctgccatttttacagcctgtgttttcccctattaaataatgtggacataagtatcttgctatagtctacatccagttcctagcacaatgcctggctcaaaaaaggcatatattagaaattaaaataatttttcattacaacagataattgaaacagtaatttcactaggtttttagagcattttaatgtcttgaaaccttgacatagtaggagatgagtgcccatttagctaactattatcagtttttagtattaacaatactaatacaattgtttggtatgtaacaattaaatggaaaatttttaataattacagatttttt

SEQ ID NO: 101742 - DNA, 726 bp, Homo Sapiens
  misc_feature (63)..(95): n is a, c, g, or t
agagatggggtctcactgtgtttcccaggctggactcaaacacctagcctcaggcaatcctannnnnnnnnnnnnnnnnnnnnnnnnnnnnnnnngtgtgtaacaaccatgcccagccttcctgggttttaaaatagcatttactaaattccaaacaaggaatatatgatcattgaaagagttggtggaatcatttgactttctttttattcttttcacctgtctaatctttagtatggaatctctctctagcaccatgttgggggtgagcagggaagatgtggcagatttggaataaggtagtatagaataaccgatgacctacgtggccagttaagttttatggcttgacccattcccttgaataaggaaataattctaaatccatataggttattgtaaattataccaaaaatacttagttttaattagtgtaatcttaaatttcaacttctgtcatccaaaaatactctgctcattacttgaggggcattgccatagccatttacggtaaagcattctgttacatgaaatgaagacaactgtacagttatacgctgtataatgactttggtcaatgacagactgcatatatgatggtggtcccataagatcataatggaactgaaaaattcctgtctaaagacaaaggcatcgtaacatcttagcacaatgcattactcacatgtttgtggtgatgatggtgtaaacaagccgcacagtagg

SEQ ID NO: 101743 - DNA, 698 bp, Homo Sapiens
cccagtaatggatggctccaccgaggccaggttggggaagttcagcctcgaggacactaggggacgaaaaacttcaaaaagaagactctttttattaatattttggcgttctttttggagaggaacttttgggatgtagcctttacctgtttcctgaatttgacatccaaaaagccttttggaaaacaccattctaaatttatcctgttctgaatcatcatcgcttctgatagatgcagttgcttgctgacatcgtgatctttgattttgtacaacgctatttgggctaacttttgggattttactttgtgcttagaatttgaaagtagtattcattggaaagagactccaagaaaatactcgaagacatcaaaagctggattcgagggtataacgtgttttgttttgttttttaaattaggaaaaataaggaattgcagtgtgattttctttccccctttaacttagaggaacgaggattatacagaaatttgaaatttcaacaagaaaaacttaagcttccttggattcccacgtcaaaggaaagtttcaagctttcagaaggagttctcactcgaagataaagaacagctcgctaaccacgaaagaggaatcgatgctcagcttttagttgcacttcctaaagttgcagaattaagacaaatctttgaaccaaagaagaaagaattcttagaaat

SEQ ID NO: 101744 - DNA, 136 bp, Homo Sapiens
tgaatggaaaatggtttatttgaccactctcttatgtatgcatctttagattgttaccaatattttgtaatgattaaccatctcccaggacacctgtgttccacagagcccagtctggtaaacaacagtcttaaag

SEQ ID NO: 101745 - DNA, 474 bp, Homo Sapiens
gagttccagctatatagcctcaaacaagaaacgggtgtacaaccattgagtttacttacttaaatctgtgaatttcaatgaagaatgggaatataaaggcctactggggcatgtttatcaagttatatcccagggcaatgtgtatgctagcaggatgaatgctatcttttcaaaacataatattcagtgaaaattacgtaataattgtaagtttataatcatactcccaaatctgttactaaaaataacataaattctcctagttcatgtacttagatgaataaatttagttttggaatgacgtttatggaaaagcaatagatgaacttaatcatttgatcactgcctatcactaggcagaacttgacctgtaattcttaatccattgtagattttttacattttactcaaaacttcatacatagagactctcaggtcaaattttacaagtattaaacatttgttaattataaa

SEQ ID NO: 101746 - DNA, 123 bp, Homo Sapiens
acagggactgagtatcaaacaatataaaacaatataagaagggctctctcttccctcaattctagctgcaagttttgagcactagacagcagaaataaattcctaaaatgttgagttgagcaa

SEQ ID NO: 101747 - DNA, 284 bp, Homo Sapiens
  misc_feature (153)..(213): n is a, c, g, or t
gaatgtcatgcaataattcacagtcccaagcccacggttttcaaacaaggtaggaaaaaaggaaaaaagaagcaaaggaatcggtggtgatggtgggtttttcttcttcttgtgttgtttcaagcaggaccaaatgtcagaaaaaaatgcctnnnnnnnnnnnnnnnnnnnnnnnnnnnnnnnnnnnnnnnnnnnnnnnnnnnnnnnnnnnnnaattgatttctgcaggcagtaatagtagggtttggtataaccggcaagcactcttgtgtgtgtctgaaaac

SEQ ID NO: 101748 - DNA, 357 bp, Homo Sapiens
gggctctagataggtacgattgcatcgacacgtgggcaggtcgcccatgccaagggccatgttggtgggtgggtgcgtgggatctgtcgtatgagtgagtcaaagcctgattttttcccccaaaaagattgaaatgagatatcatattttaacattagttttatggcatcttgaatagcaacacattttagctcaaggaatttttcagctgtccttttgagaaacgtaaattttctttgtttttaagtatttaataagcattctttacaattgcaccacagcgcgaactttccacctgctttattaattatgacatttgtgtccccactattaaaatattccgcagtattataaaaa

SEQ ID NO: 101749 - DNA, 992 bp, Homo Sapiens
ggagccgaccttaatgcttgcgacaaggacggacacattgcccttcatctggctttagacggtgtcagatggaggtaatcaagactctcctcaaccagggtgtttcgtcgattatcaagacaggcacggcaatactcccctccatgggcaatgtaaagattgcaacatgcctatcgtggtggccctctgtgaagcaaactgcaatttggacatctccaacaagtatggcgaacgcctctgcacttgcggccaacaacggaatcctagacgggtccggtatctctgtctgatggaaccagcgttgaggcgctgaccacgtggatctctaaaactgcaacagaacagcccctacatgtcccttttctccccagtgccaggggaacagtgacagcttctgcctctcaggggtgacttcaaggactgaggcttgcagagagcactgagagctgggtcgagcacatattatgaggtggtgttcaataaatacttgctgtcatcgtgtatgttcatggtgtagatacagaaacaaatttattcagtgtgaaactgcagcctatgaaaaatctctaaataaaaagcaagcataaaagtgctgtggactcttatttccttgttttctgttcaccaaaagatctttcaatcaaaattgcctgtcaaactaagtatttcctttgaaatgcacagtaattaccaggagctggtatcatgcaagggctgggtttgtccctgtaaggattataacacagtagcttgcactaactagaatttggcacctgatgagaatctttactgtctgcctgattggagattggagagaggggttcaggacagggaggaaccagccagctgaggaggctgttgagttgtgattaaacctgtggacctgaaaggtgtcgctattggacaggaagaaccaacatgtgctttgttcctgcgtcttaccttcctgtcctggacatcaagtgaaataaggattgacagccagagaacaa

SEQ ID NO: 101750 - DNA, 405 bp, Homo Sapiens
catatacttccgtctcgatgctgttaacaacttctgataacatggaaaattcaaggattgtttaaaggtctgatgatcacacacaaaatgtaattccggttatttaagtcatttctgtgattctatcatgtacagtttccagaattgtcactgtgcattcaaaagtaatgaatctaacagacatttgatttaatgtacactcccttttgcttatagtgtgcattttttttggaggtcattcaaattttccctcttctgtgatagctgtagtttctttcatagaaagtagctaatccagtgtaatcttttacctttttaaaaaccaagatagagtatctattagagttttacattgttgatgatagattaacaataaagtgatgttctggtggaggtagactgaaa

SEQ ID NO: 101751 - DNA, 448 bp, Homo Sapiens
  misc_feature (125)..(159): n is a, c, g, or t
tgctccataccatcccataccaacactcaccacctgcaaataatagcattactaggagctgcagtcacaatgaataaatcaacaattcgctacaagatctaggattatttgtgtattttgttgannnnnnnnnnnnnnnnnnnnnnnnnnnnnnnnnnncgttggcgtgtatctaataccattgtatctcattgttgagactttgttacaaatagggtttctggtttctttctcccccctcgtggttcattttgtttttgtcaaaccagtggtctaaaatcacagaaataagcaattacttcaatcatgtggaatccaggggacctatctttggaaagcacagaaggagatctgaattgtgtgatctcttgaggctgctttcaatgctggaatttaaattatgaactgaacaatcttttgcttattaataaaaagattacacacaacc

SEQ ID NO: 101752 - DNA, 628 bp, Homo Sapiens
ggccgccaacttttctggtttctcactagctgtcttgaatagtgaaacctgtattgatggccactagtaaaccaagatgcttatttaacaggtggaatattctttatatgaaatttcagctaaagacactttctggacctggtctgaaaggtcatttgtcaaaaaagcttagggatattctgtgaaatggtgagtggtctcctggaaaggtctcattgtatttgaacaatagtcttccctctaaattacaacacctctgggttttgtctttacacctctgtctttgtcatcacctaccatgaatagtcaccttggttttgcaaatggggagggggtatcatctttttgcctgttttcactgtatttttgtatattggtgttgccgaaagaactttttctttcagtttaattctttgaggcatgtaggaccaataagattgagaattctattggtggaatttagggaattccttaaaatgctagttgacaatcaaggaacagtatgatttatatcaataagaaccaaaagaattaggtttgatcaatcatttaagccaaggaggaatacttgcatttagaacaatgcaaaactttgtctaaaatgaattaaaatgacccacctgtaaaa

SEQ ID NO: 101753 - DNA, 1124 bp, Homo Sapiens
gagtgctgacctatacaatctatttataaatgacccacaaattacctttttcttcttcttcttcttaaactgataaatacaaattgtatatatttatggtgtacaacacattttgaaatacatataaattatgcaatggttaaatctagctaattaacacatgcattacctcacatagttatattttgtggtgtgaacacttaaaatgtactctcctagcaactttcaagtatgcaatattaactatagttactatgccccacaaattatctcttaacatataatgtcatcttcccgatgagtgccagaattcaacattaagcttttttcttttatgaattaaatattatattaggaattactaatagtaattaagtgccatttaattttaatatccctttaagatttttaacaaggaagtgtaaggcatttcaaagtgttcaaatattaaaaaaagttgttttcagatagctataaattatacaatttctcatctatattttacttatatacaattctaagtcaaatgtcccaccagcaaggatagatagcatgattaaacctgtagcaatccaaatcccataaagtattagttctgattaagcctgatttttttcatcttagtcactcagtaaagggcagcatccattttggtcaacatcattgtaccaatgtccagcagccaagacaaagagcctttatatggtggtatgaatagacaatgagagcaatacgacaccacttgaaataaggggggggagaaaaatgtttttataatgctaagttttaaaactaggagatgaaacttacaaattgtgtaacaactaggtaaaaggatatatatgtaagaagaacaggaaggtagaacagaaaggtctcctctctagaccttctcaagatatacctaggttcaaacttggctactccattattaagtggatgtgtttcctcacatgtaaagtgggaatatatacatcacaggattattaaaagaatatagtagatgcttaattaacgtcatctgtctttaatactaataattatataatggtaataagattatgggtgacttcccctccctcactttccaaattgctgtatttttcaagcataaatgaaaaact

SEQ ID NO: 101754 - DNA, 692 bp, Homo Sapiens
  misc_feature (605)..(605): n is a, c, g, or t
  misc_feature (614)..(614): n is a, c, g, or t
  misc_feature (623)..(623): n is a, c, g, or t
  misc_feature (628)..(628): n is a, c, g, or t
  misc_feature (662)..(663): n is a, c, g, or t
tgatgaaacaaaatgtaaaccgaattctgcttctgaagtcattggccctgtcagtttgcaagaaacaagtagcatagtaagtgtcccttcagagggcagtagataatgtggaaaatgtggtgtcatttaatgctaaagagcatgagaattttctggaaaccatccaagaacagcagaccactgaatctgcaggccaggatttaatttccattccaaaggccgtggaaccaatggaaattgactcggaagaaagtgaatctgatggaagtttcattgaagtgcaaagtgtgattagtgatgaggaacttcaagcagaattccctgaaacttccaaacctccctcagaacaaggcgaagaggaactggtaggaactagggagggagaagcccctgctgagtccgagagcctcctgagggacaactctgagagggacgacgtggatggtgagccacaggaagctgagaaagatgcggaagattcgctccatgaatggcaagatattaatttggaggagttggaaactctggagagcaacctcttagcacagcagaattcactgaaagctcaaaaacagcagcaagaaacgatcgctgctactgtcacncgacagatngtcctgganagccnagaactcctgcgccctgtcggcatttcctacatnncaggctccatgaagcagaggcgcgtgcgc

SEQ ID NO: 101755 - DNA, 568 bp, Homo Sapiens
gtagaaagaataatttattacccatatgttgttactgaatattctgcaaaacaattttgtattgtatttgcacaatgaaagaattttgcatagtcttaaaaaccttgtgtgcaatgatttctttccaaggtacacattcgagtagcttcaccaccaattaaatatccatgcttcatgggaataaacattcctacaaaagaagagctcattgccaataaaccagaatttgatcaccttgcagaatatctaggtaagtattaaaatttctataaactttgattattaacagagaaaatccaaagcttgacagtctttacacctttagtaaaaaggagtattcagtgtttgttaaaagtagttatatatgttaaacagatattgaatactattctcaacagtgagagtagtgggcatgggcagacaccacagagtcttgtgttggagagctaagccaaggtgagatcagagaaggaagaggtggtttccaggtggagggaagtgcaatcataatcacttaaagcctcccaaaagtcagatcccaagaaaaacaaaaataaagttggcggcc

SEQ ID NO: 101756 - DNA, 460 bp, Homo Sapiens
cctctggataccaagggacgactgtgtttaaaccatcgtttgggtttggagagattaatgacaacagtggctaagcatgggaagggtttctatggtgggactgcattggaccacctctgaatgtgtgtattagcagtttagtaaataaaacaaatctaaattattatttgattggggttagtgggatgcaaataataagatttattcagagtatcctaaaaattcccccagttttatttagttttgtggaattatgtcctctttctaattttgcaacatttccttgcatgttaaaacattcttccctgaacccacaatgagtcttttacaacacatctctgatacaagaaaaaagatatttcaatgaaaaacagagcttgcttttgtacataagctaaaaacaaacaaaacaaacccagaagcatagctgctctgctcattcccttctacccaagagaaa

SEQ ID NO: 101757 - DNA, 478 bp, Homo Sapiens
caaatatgacaagtatttattgagagccaaatgtatgtcaggcacttattgctttgtgcctggggaacaggggcaataaagtagaaaataaaacaggcatggaattggcctcacagatcttaaagtccagtgaggcaaacgagtttcataagaaacacatgtatatttaagtattttcaaaagtactgtgaagacaaagaacacggcaatttgagagagaaaataacaagtgacgcctgctttaaaattatctgccggaaaaggactccagagatagtgccactggagctcaggaagagttaatatgttcaagaaaatgcaggagggcatttctttcaggtagatgcctaggctctgcctactttgcatgcttctatctgactatgtaaggcaaaaatttatagaagtataatcatgcctttgctgcaaaatgagaaatagacatttaagaagaaatttccatctcatcgaatggtaa

SEQ ID NO: 101758 - DNA, 474 bp, Homo Sapiens
tccttaaaatgtatctactttgaattgaaatgggctgtatgcataaaatacacaccagatgttgtaatacgtatgaaaaaatatgaaatataagtgtgtatttattacatataaatgaattgatatttttatacataggttaagtatactgttaaaaatcatttcacctagctttaaaaaaagcttttaaaaaatgtagctattagaatatttagattgtattagtgttgcacattatatttctcttggtccacacactgatttagagtggttgattacttgtggatcagaataaccaaatatgagtagcctcaaattttaagctaagtttaattaactttatataaagtatcttttcatttagaaatttttacatactgtcctctatgtatatcatgagtatttctactccaaagctgtgcttattttgttttctatgcctggattagcaaaacacccgctcccaacatccag

SEQ ID NO: 101759 - DNA, 742 bp, Homo Sapiens
atcagacttaatacataatgattcttgggaaagccatttaaatccctgagactttaagtggataaatgtaggtaaagtagtatagtacttggctcataataattgctcattcaaattcacatgttagttttagttgttttttttaaattagagtcctgtgaatacatgaacccacccacccacatgcaaacacaagcaaacacacagccatgaccccatgcataagtttggctgaagacaccctcatgggaactagttcactgacttccaaattaaagagttaagcatttgatttggtctgttcaacattaggggtatcagccagcaaaatctgttgagcttaccgttgaaaaatcctttcattcattactgtggtcataatacacagttacctggccaggaaagagtacacatcacagggatctgctcactgcacgtgtgcctgagctctccctcactttctgccttcttcaagaattcttccctgattggtccaaccagaagcgctgattctccccacctgatttcctgtaattttataatctatgtccttcacttttgtgttatattgtttatttccttttggtctttttgtgtgcatatgtatatgttttggggaatggggtattcacttttgttactcactgtgttactcacttttgtatgcccatagtgcagagcatggtgccttgtacatagagtatgttcggtaaatatgtgcaataaaaagtcctttgattac

SEQ ID NO: 101760 - DNA, 481 bp, Homo Sapiens
  misc_feature (75)..(90): n is a, c, g, or t
gttaccattctgatgtttctgtactctgatttgtgaactattcctagactcattctgggaatagttcggccaacnnnnnnnnnnnnnnnnacagtttcaccatctctggaattctgctgcataaattctagtcattttgacctccctgaattccaatctcttctcacctcaggagaaaataaagagaacgtataatccccttcttgagctgtgtaaaactaccacctggcagaaagccaggaaaattataggtttcatcttgtttgcttcctgcttctcaagtgtcacaagactatgttgcctattgttgaatatcttagaagcgttgtttcatattttgttcagttttgtggttatttacagtgggagggtaattctcataacctttttatgatatttttgttttctattaccatactttttattcatacatgttttattcttcccttcttttccagcaataaaattttctttgttccat

SEQ ID NO: 101761 - DNA, 377 bp, Homo Sapiens
gatgaagccaacacatgttaagaatttataatatgcaaggcattctgagaaactcatcacaaggattacttcatttaatactcacatagtcctctgaagtagttgctatcattattccagtttgcagatgaagaaatgcaggcacagagaaggaaaatatttggccatgggtcacacagctaatggacttagttctgtataactgcagaactcatactgttagcaactgtggttgtctgtaattaatttaaagatagaataagttaaatctggtattttcatttcatagtgtttaatgtcctaatgattaatttttaagtgtataaattaatgttttattatcttcaaaagcaaataaagcaagcatttttttatta

SEQ ID NO: 101762 - DNA, 666 bp, Homo Sapiens
ttcataaatagtacaagatagtactaaaaaattggacatttgaaaatatgaagcaactaagagttgcttaatgagatgtcatttcctaacaggatgttcatttatggtttttggctactattgctctttggtgtgtttgtggaatagaaattattccaagctattgtgaagagtcaataattaaccaaatgtatttatttcctaaaaagactaaaactgaaattattatcatgtaaagatggcatctgtcctaggcaacttggctttatgcagtttgtcctttcagttttcaggaatgagacctcttgacccctcccctccaatgcagcccctactaagggggagtttaaggagccatacatagttctataattcaaatcaagtaaacatgcttcttgtcccaggttaacttgtgctgcctcagtcgctgtttaaacatttttatacgcactgttaacctgcctgcccattaccctattacttttaatggataaactactgttccctgggcagttgtctcttttaacgtcccaccctaaacttgccaaccctcatatgaaggcctcaggcttgttattggcaaaggtcagaagtcttaagctagtgaccttgcaggctaaagtaggccttgaatttgtttgaccaggaactaaattaaaaaataaa

SEQ ID NO: 101763 - DNA, 371 bp, Homo Sapiens
gaggagaggaaggaggggagctgcaggctatgaacggggctgcaggttatgaatggggcactccggcgttctgagaactgagcactccgacattctgagaactgggcacaggggcaccaggccctaagtgagttctgctccggggtggccgggcccgagagcactgacgtccaacgggagtgtcgctgcccaccgcctcccacaagaggacacttcgatttgccagagaagggcagagtgggagatgactttttctcagcatcttgcctcattttcctcttcccagaggtttgtttttaaggaagtttaagcttgctgcactggaaaagcaaaaaacaatattttgtaaaataaatatttgttttgtgcag

SEQ ID NO: 101764 - DNA, 785 bp, Homo Sapiens
ttgccattctaacagtgtttattataggaatgcaaagataattcaaaattaggaaaatttcatcaggcaattcacaaattatatttctacatataattgaaggcacaatcatgaaaaacaaagtagctctatatgcattaagtccatgatctattcagtgaaaaacacaagttgcacatgtcttacagaaggaaaacttaacactgaacacagattctcaccatctgctctttgtcctgaggctccaatagaaatacagtgaagaataaacattgtataagcacacaattacaaaaaaggaatggggttaccaacagaagagaattcatcttcattagacaatgacagtacatggaaaatggttaactaatggagcaaagcaaacaaaggtggaggtcagggggatactgagaacaaggaggctaatctgtcccacagcaacctggaaaggttctagactcagacacgaggtacccccgacagtgggactgataggcaagactgaaaacagagattaagcaaaagcccggatagagaacacatttcacaggccctgaaacacactgctggccccatctccttaaacagaacccaagcaaacgtatccacctcaggcaagagaatgtagattttacatccagaggaatggagtagtcatccagccatcatttatgattgcaacaggagataagatagagggatggaggataacaattaggaatcagcatacattccccttaaagctatcagttgacaagtcttggccacaaagaactcccaatcaa

SEQ ID NO: 101765 - DNA, 470 bp, Homo Sapiens
tagagcttcatgtttttgccccaggaatcccacatctggggtttagtccacaaacatacttgccctcatgcaacgtgatgaccacacgacaaggctatgcacgtgcaccctttgcacctgcatgtgccgcagagccctccgcaggccctggactgtcacacctgcggcagctcactgcgcgccccgaaatacagtgtcaagaggaggagacaccagtgtgtagtgtgtagccatctgtgtaaaagaaaaaaatgcatgtatgtcaacgtgtgcccctgtttaccggaattttcccgaaatgatctctgggaatatccccaaggtaaccctgtttgcccttggaagcagagccagggaacctgggctgtgggggaaatgggcattcgccctcatattttttgcatcttttgaattttgaaccatgtgcaggaatggcctagtagaaagaaataaaatgccaatgtttaagg

SEQ ID NO: 101766 - DNA, 516 bp, Homo Sapiens
  misc_feature (53)..(68): n is a, c, g, or t
  misc_feature (418)..(447): n is a, c, g, or t
ccctttaccaaatttgactgggagaagctctcttagtatttcctcttcctttnnnnnnnnnnnnnnnngaatctggactgttctagggaaaggggataggaggtggagaggaaggaggcaggagccccacagccccacacttctgctctgattcagaagaatttgattccattctgaacttgatcaaaggtgctcctatatgtggctgtctcagggcacccacaggcacgggcacaccattctcctccattccttgtctgaagcccagctgtaggtcacgctgattctcccacatcccactttgctacattggctcaaatctctgagataggtttgtcttttctttcgtaaattctgaaataaaagcaatgtgaattccttgatccataattcctttaatcaaaagtagcccttggannnnnnnnnnnnnnnnnnnnnnnnnnnnnngaatcagggtttcactttgttccccagggtagagtacagtggcactcttaaacttaaataatcccttcc

SEQ ID NO: 101767 - DNA, 485 bp, Homo Sapiens
accttttagtgtaaaactgaacatagaaaataaattcatgaagaagggatattttctgagggtgtccagggctgcccaacacctcttgtctaccttctctgtcatagccccatttaaaacactctctctggatgaatacaccaaacctcacagtctttgctctcttgctaggaagaggagcaagagcgtgtttcactcttggctcctgcttacacacctgccgtccaatggaaactactacttaagacatttaaaaatagttgtggtgatagcatgttgtgttttggttggtgatgccagttagtctctgaaaactttctgtgatgagtgtaaaattctacaccttaatctcctttcttgtaggatctgggaagcagtatgcacttgattgcaccaaagattttacgttcatagaaaatttctggcatctgtgtgaagaaagtaaactatatcttccatttaaacaaataaaatatctttttgat

SEQ ID NO: 101768 - DNA, 580 bp, Homo Sapiens
  misc_feature (347)..(478): n is a, c, g, or t
aaaactttgtctctcatgggtctatctgaatgcatgtgttcttaagatgagattttacctaagtctcgaggtggtttataacccgagttaagaattattgttaaatctatctataacttaatgtaaagtgtgttacctaggctcattttccattatatgtatattctgcttttttgctattaaaagataaatttgaccacagtaagacaatccttagggtttcagaaattctttaagtgacggtgagtgctttctgctaaatggttcataagccatgattcaacaatcagaagttatcttcacccttgagaacaaacttctaattcaaaacaattattatcattttnnnnnnnnnnnnnnnnnnnnnnnnnnnnnnnnnnnnnnnnnnnnnnnnnnnnnnnnnnnnnnnnnnnnnnnnnnnnnnnnnnnnnnnnnnnnnnnnnnnnnnnnnnnnnnnnnnnnnnnnnnnnnnnnnnnnagcagaatgaattttaaagtactggtagtagcaatcaaatgagaaaggcaagacttacttatttttttaagtctgaacaatgaattagaaaacttttatttt

SEQ ID NO: 101769 - DNA, 166 bp, Homo Sapiens
agctctaaataattaaaggttgcctaaactaatgtgtataagtagatttacctgtaaatatgtaagggaagtcccaattattgtacactttcataattcaatgtgaatttcatacaaagcaaagtttcaccattaagaaaataaacattttgttcctatcaaaaaa

SEQ ID NO: 101770 - DNA, 719 bp, Homo Sapiens
aaatttggttaattagcaatcagattcactggggaattgaaacccgtacttccctttcttctgtccctccaccaaagaaccggaacaaatggcttcatgtctttgtccagtctttctgcctaaagcaaaatagcatatattctccaggctgaaaagtagattcctcctcacccctactcaagacggccacatttcaatccaggctcttgaagacagggtctaatgaaaggatttctgttctttctctgtctgttccctctggcccagcttctagtcctctccttatgtccccacctccatggcagtggcaagagtacccctgagagtcaatggtgctaacgttccccacctatatacccctatgtagtttatcgagatttgaacccagcacctgggtggctgtgttgggcggatacatttcacgtcctcaagaccacaaccctggcgacaggtctggattaattctgtaaagtagcaatctatatcatgctaaattcctgcactgaggttctacctcggctgaactgactcgtggatggttaagtttcctggggtggctggaacccatttactaagcctctaattggcttcattttggctcaagttgcatggtttcccgaatctatgcacctggagtaagcacttttctggttgccactgaaaagcatgccggcaaacgctgctctgttaattgctgtaataaacagactttattataa

SEQ ID NO: 101771 - DNA, 580 bp, Homo Sapiens
ttaccattctgatgttggagcgggagcacacagggcctctgttgatgtctctccctttcatcaaactgaacaaattgtctggtgatgtagatgttttcatacttccaaccacaagggcccaaaaatcgcttcatgaagaggccagtgccaagcaggacgagcgaaagccctgcaaaggcaagtagcttctgacccagggaggacaacacctctgtggttgttgccatctggtacaagacgctcaggacttcccctttgctgtcatttagctgtgcctccaggacatggctgggactgaaaagagagactgccagggtctggttccaagaaacaaggtcatcaaatacacttagtggagtggcaaggccataaatccactgaattgcctcaatatattttttcaaaagtggaaaatgtatggaaaagctctttgcccttaggttgcaagtcataccatctaggagacctttaaagttgtgaaaaatattttctacgtgtcccaagatgacaatccctgtgccagctgcaatcaaagcattcctgccttcacgcaggccacaagagagaaagacaagaagaa

SEQ ID NO: 101772 - DNA, 519 bp, Homo Sapiens
aaaaattctagatagaaacagcctcctggatccctctctcactgcggaagaaagccgccaaggagagtcacctgttcatgttggactttgtgtgcatgaaaaacaaactttcattgtgttaaaccactgagattgggatggatatttgttactgctgcatcctctaatctaatatgtcagaggactgcagccgcaccataccctgcagttctgaagccctgcagggagccccctcggcttgtcctgtggtccctttaggaaggtgggcctggctcagaagttgcatccagaggaaactgagctcctgcacctgctccacttgatgaatgacaaacagcaacagatgcgcagagcggggggaggttgaaggctttgtctgcctttgcggcccacgcacagaaagcggttcccctgccaacgaccaggtggctttgcccaaatatggagaaacactttaggccattagttctggtttgagctaagcagaataaactaatcttcccctggccaaatgggaaa

SEQ ID NO: 101773 - DNA, 588 bp, Homo Sapiens
actgaaagggcttattacaagtcacttaatgataacttcagtgaaatttgcaaaatgcatctgtgggtttattgaatttacaccctcagctagtgggagacccccccaggtggttctctgggaccaacctgagactagtcccagtggaggtcacagctctgtgcagagctgaaatgtttaatgctggctctctggggggaaaaaattcctgatttgtagcatctgccaattcctgtgatgtcagtatactcccaccatagccaggttacagctgctgaccctggggcgggaatcgcctgtgcaagccaactccagctcatggggctcactggggctgtgctgctcccacattttttcctggtgattggaggagagaccgcccagcggacttgattccagatagatggatgtgcctctgagtggtcctcatctgcattagaggtggcctcttgactgagaaggtatctgaatgaggcttacttttaaaaatgagaagttaacgagctcttcattttgttctttcttctctctagctgctattaacttagcaaagctgaaacttttcagacattattacgtcttggtaag

SEQ ID NO: 101774 - DNA, 724 bp, Homo Sapiens
cctccaccttctttccaggcggtatcctttgtgcatgcctactgtacattttcgacctctttccgatggaatgatctaagatgaaagtaaactttttaaatgtttaatcattcaccactaggcaaaccgtcataatagcattacagttcgcattatttctgtagtgtctcttatgtaaaaatgctttcatttctgatcttgcaatgaagtgctgtactaactcgcattatgcatattagaaaactgataagtgatttgtccgacattattctgttaattagcgatgagccagtattgcacagcttgttttacgtaattttagatagctgcttgtaaccacttagattatatagaaattaagacatagaaacttttatcagaattaccagaaatagtagccttttgctattagcttcatgtagagatttacctgagtaaagtaccaaagaagttatctgaggtattgttgaaggatgatacagaatatattttctaaaaatcacgctgatttatgacacattactctgaaatacacatctcaagtccttaaaagaatatatgacaactgtaagaagccattttagataagtaatttgaaacattcttttctacttccaaatgacttttttcctatcccttatttttgaaatgtttattcaataaatatgtatacagaactgatgaaataattaaatcaataaacggcatatcctgccctgaaaaa

SEQ ID NO: 101775 - DNA, 795 bp, Homo Sapiens
ttaccattctgatgttggagggggaaggccgtgccatccccggggaggacaagaaaaaagtaacaaaaataatttttggcttcaagcacccaacaatggaaatgctgaaacccatgtcctttaagtccttttcttctcctagcagagggccctctgcctacatggggcaccgtggtggccatttaatgtactcctgcttggtacccacctctgctctgccccctggtggccacagacaccattgctgctgcctcagcacagtttgaccttgttgctgccaagagccacctctcctctcatcactgtccccactctcctgccatgcctcaggtggctgctggcagaagagcagtgggctttgtttcttcagaacatcacagcaaccactgtcttatcagctcacaccctcaggatcttactgccccttttcccaaaaatctccactccggcaaccctggccctgcatcattgaaggacatttaagtgatataacatattgttgcctcaaaaaagttttttccctcttcaacagctgggacaactggataaccacatgcaagagaatgatgtttggccactaaccacaccatacatacaaattaactcaaaatgaatcaaagacttaaatgtaagagctaaaacttagaacaaacaggagaaaatcttcacaaccatggatttggcaatggattcttagataagatgccaaaagcacaagcaacacatggaaaaaaagagatacattagacttcatcaaaattaaaaactcttttgtgcatctaaggacactatcaa

SEQ ID NO: 101776 - DNA, 817 bp, Homo Sapiens
  misc_feature (271)..(280): n is a, c, g, or t
  misc_feature (474)..(489): n is a, c, g, or t
agactatctcctttccgaactagtttccttgtgaagcacatttgtggttagatagatggttggttagcatgcaatgagttgaaagcttttagataagtttgatctgaaggcctgacagagggtgtcatgaattatccacgttctcactgcagagcacaccttgcctgttaaccagaaagtcagctcagctcctcagaccgtgctgacacgcatgaacaaatgcccatgccccatctcctcttctgccgtagaaaatttaactataccaacnnnnnnnnnngttataatacacacaagtatattttttcatgaaattgagttgacctgtgaatctagatctaagtgacactgagcccttggaagtgatatttatggactctacactacttcatttttaacattttataatgcaaatgagttctctttcaacacaactgaaacaaatactctaaagtatgacaacactttttgaannnnnnnnnnnnnnnnactttagaataccattgctgttgttatcgttatggttatttggtgttagtatgacacttattttatgttgtccccaaagctctgctgattatgcatttctggtaaacataaatggaaaaatgagctagttattgataaacacactttacttagaaatagaaaactaaaatgaaaaacaagggagagcatcaggaagaatagctaatggatgctgagcttaatacctaggtgatgggttgatctgtgctgcaaaccaccatggcacacgtttacctatgtaacaaacttgcacatcctgcacatgtaccctggaacttagaagttgaag

SEQ ID NO: 101777 - DNA, 677 bp, Homo Sapiens
tgatgttggattttgctggggcacagtagccccacctaaagggagtcacatgaaatcttagccttttacttgtcacagagtataagaataaaacctttgatgattgaacggattatcctcaggataacatctgtgattcttcatgagagttatgtcttcttaaacccttggaagctgtcaacactacagatttcccaaagcaccaagctgcaaacagcagattgctctcaagcaatgatgctgaagcatgaagcaagaatcatgttaccatatcagtgttttcactgctctgaacccagcacctagcacagctcctgatagagctgtgtcaaacatgacagaactcctgatagagctgagagtcaacatgtccgttcaatgagtgaataggagtgggatcccaatgcaaatttcaaagctctcagcaagacaaggtggagatgaattaccatgtgcatggagagaagccatggcccaaggatgggaattgcagatctggaggctgaagccccgcattggcatcctggctctactcccactggttctgtcaccctgggcaaggcacttctcccaagctgcagttccgccaactgagaagcagagacaatgacacttgttccgctcaccttgcagggttgttgtgagaaggaaataaagtatttggaagcactttaaaa

SEQ ID NO: 101778 - DNA, 733 bp, Homo Sapiens
gctgaaagcgggtgtattaggaagtgttcctgggatcaacatctgtgtgaaggaagcaatacataggcaggggggagctggactgtgatgtggttgcaacagagttctctgacaaatgcgctgggagctatgaagctggaatggcccttcagagatgttccaaactgaagcaaagagggttgagtccttttatccccatgatgggttattgggtgtagctctcattagggaggaggatgtggccttgaggagagtggctctctttagcctcaagcaattcctgtagcaggtctcagttgggaaatatcagctgccgacaacccagtacctgggggagtgaatgcataccacagtgtcccctgccttcaccctttgccccgctcagatccacttgctttgaaaaaagcctgggaacagccattccaggattctgggggaaacataacagaaatattagtggaacaaactacaacccctgctgtcgcagctgctcccaaagccaccactgatatctattgcttcccttctctactactcattctaaactctcctcccccttggcaagaatctctgctactttccattgcttactactgggcaaacccagagtctcatccacaaggggtctgagctcctgctaaccatgccatttgggtttacaaaccaggcaagggattttgcctcgtgccgcctcgtgccgaattcttggcctcgagggccaaattccctatag

SEQ ID NO: 101779 - DNA, 422 bp, Homo Sapiens
agaggcaacaaaatttaattaaacgtagcatatttcagaaacactgggttagttgaaaacaacaacaaaaaatgttttctcgcctctatcctctccagctagcaaaagaatcccaaattaagtaacagcctgtgagcaaagatcaaatccagagcactgccaggaagccatggactcatagtaaagatcaaatcaagggtatagcttaaagcagtgcctcacagaccctcacaactagaaaagggggcatttaggaggcttgagggcgttgattcacggtagcctgacataccctaaataccagcaattaggccttgggagagaagcctgtctcaaaaataattgtgagcgtggtttgttgacacatgaaaaaacctcgaatacatagaaaattcacatcatttttgagaaagttggcggcc

SEQ ID NO: 101780 - DNA, 229 bp, Homo Sapiens
acaatacaggcactgtaagtattgtacctaaccagtttccatattagcttttgctacaatgaagcttaaagacaaatttgtcagtcctgtcgtaataaatatatagtatttcatggcatggtaattctacagaaaatatatttccccctctccatttctgctctcaattctgagtaaactataattggatgctttactatgaaatatgttgttcaattatattattttt

SEQ ID NO: 101781 - DNA, 707 bp, Homo Sapiens
  misc_feature (47)..(55): n is a, c, g, or t
ttaccattctgatgttgtgaccagagtaaaataatctattaaaaaannnnnnnnngcttaaaaaaataaagatacatgaagatgtgaagatatagatgcaatcatacccttacactactggtgaaaacatacattaatccaactttcttagaggacaatttggtaatatctattagaaaattttgcatattcataccttttgattcagcagttataattctggcatcttattctgtgcagacactcatactgcacgaaggtgtatctaattgaattttttggtgttattcataagagtgaaattttgaagttatccaggtacctatgagtaggggattggtgtacatcaataagatgaaattccttgtacctgccagaaagaatgaggttaatctatatgtactgatgtggaagagtatacaagatatcttgaatgggggaaaaaagcaaattgtataatacttttttatgttaatgattatttatatttttgttaaaacatatatatatgttagtatatgcatactaaaaaatgaggctataaataccaaacttgttaatattggttatctcagggagggatagtagattatgatggactttcactgtctccattatatatttctgtaatgtttaaatttttcacaaagagcctgcattatttttgtaagtagaaaaaaaataaagatggaagtctctccaattta

SEQ ID NO: 101782 - DNA, 658 bp, Homo Sapiens
gaatgaacttcctgctattagataataagattttaatgtgatcatcattgaattacctgaatcaacagaactatgtattttttagggccttctgtactaggcataattgcatctttatgcttactacatcatctggggtaggtaggggtcacaaagtcttgaaaccatgagtgtacaagcagacaacaatgttggccacccagaaaggcttacctctccaaaccaattgcttggcacagagaatggaacttggagttgtacaaaagtgcaaagctgtgtgtccacttaaggagtagcaattgagctttgccccacgatcacagaggatcttaacacaatccacattggccatttcacaagccacgtgaagaggggttttcccattgggtctacagttgattgtagcattgtggtccagtagcaccagaagacattccacatggccaaacaagacagagagatggaggcctgtggcccaggaagacttcaatttatagctaggcaaccagtaaccttgtttataagatgccaaaaccatattctcatcttcgacttcaaaaacagtgtccacatctatttgcctttggatcaaaatagcctgcaattttccgaagtcattggactttagcgcctcaaggaaatttctcttaactaactt

SEQ ID NO: 101783 - DNA, 369 bp, Homo Sapiens
cccaaaccactgcatacttctcctttctttccatccctcctcccttcccagcactttcgccctccattgaatccctcaagcctcattctggccccactcctcccctcaccctctatccctgccctcctcagatctgccaaacacctcaggcctggctgcctctgtcctgttcctaccaaccttctgaccatgcctctgtgctccttgggacctgggctcacattttcaatctcttctctcctattagtacagctctgtctagagccatggttcttctctacctttcacagctgtcttctttcccacttatatgagtttctttaagtgtgaaaattaaaaagtgccacttaaatacaatgattaagtcat

SEQ ID NO: 101784 - DNA, 573 bp, Homo Sapiens
ccaaaaaaagtaaaaccagagtttcaggaactctttatccacagaggctaatagaaatagaatttggaaatatctatctgagacatttttaaatctgaggaatccgtaaaatggtggctcttgggtatccagccctcaggatctccatttacctgttaaagtgaggatttggtgcctttcttctttagttgggccatcaagaaaacttcagaaatcaggcattctgtcttcctatacaataaatattttcagatcatattttcagataagagtcttcagcttccctcagctattcaacccaatgcatggaaagcctcagttgaataaacttttccaccatcccaggtgcctgaaactagtgtccttcttcacttctacattcaggacaaaatgaagtcaggtttttaaaacctcagtataaaagaccccctcacactggtccaatatgaagacttctcagcgtgaacactggggaattccttcctttcatctttcctaatagattgttgttttctaatcccatcccattctgctgtacctctccagcaagtcccttttcaccttagccaagct

SEQ ID NO: 101785 - DNA, 590 bp, Homo Sapiens
  misc_feature (37)..(37): n is a, c, g, or t
  misc_feature (308)..(317): n is a, c, g, or t
cttgatgccacaatccatgtctcgttaacaaaaaatnagaagggccagacagcccctcacagagccaattgtattccttccagctcagccgcaggagtttctgaggatgaggaaatgggccacacgcaagcaaggggtgggagctggcaagatttccgtgccctccccccaagctatctgctggacccaagctctaggaagaaaagctttgtgaaaagacttctggcttcactaagacacattaaagaattaattataaagtaaagctgaaggagaaaattaattttagaaacacaagaggttacaannnnnnnnnncctggagatgggggaggaaacacagttattttcgttttcatcctgggggcaagctgggagctgtccagtcgataacctggccatcagaacaaggtttgtaattaaaaggtcagtgacctggaaagccagggccccactcccagagcttctcagtaatgacggagctattaaattaagactgttatgaaatcaatgctaaaaaagctttcatggtaacgagattccattcaaggacatgcaaactacctcatgaaatagacgtaaatgataaaa

SEQ ID NO: 101786 - DNA, 618 bp, Homo Sapiens
  misc_feature (308)..(317): n is a, c, g, or t
aatgcacacaaggtgatttccacttcaagttacattatagactgcatttatatatttgaaagtgaatattcaaatttaacaaatcaatgacatgcttcatttgaattgctataactgttcaaacatagttgattgagaatccatcttttcctcactgatttgaaatgccactttgtcacatactggattctcatatgtatttgtgcttattttctgaatgttctatgctgatccattgacctggctgattaggcataagtaccacacagttttaattattgtggctttaatatctggtggtggctcannnnnnnnnnctgaatttttctagcattattacttattctttcaaatgaactttaaaatcaccttgtctaaaaagtaaatatttttcataggattgcattaatttttctagtgatctggtgggaaattggcatcttcatgacattaagtctgcatatccaagaagcaagcaaactctgttctgggtagctttgtttttatgattttactatggctggaagcagctagaaagtgttgtgtctcaaatctaaaaacccacatctggtgaagttctaagtttgtttaaaataccagatattaaagccacaaaaa

SEQ ID NO: 101787 - DNA, 458 bp, Homo Sapiens
  misc_feature (442)..(442): n is a, c, g, or t
tcctatagctctggggtggggagctccctcaagtgttcacatgtgtgtggaatgaggaacacccatctccttggccctctccaccctgaagagttagttattaaaataattggcaagctcttgcaaatgtcagtcatccattgttcagaatggaatagcaataatacatccctggctgccctgggcttggccaggattactcactgaaggcctcagggttactggcacacactttcttttcctaataatcccatcccctcagctttcctaaggctagagtgaatttcgtgttcctttagtttacataagatggtgaacttggcaaaagctatcattaaacagaagctaagagaaagcctatgtcgtggaatccagaatgggtattgccattcactgctgtccacagaagctgtcttgaatttctttctgtgtcttttctttntttttctttaagactg

SEQ ID NO: 101788 - DNA, 764 bp, Homo Sapiens
tataatgagaagtcctggggtagccagcagagattctcttgaccctgaagtccaagagaggggtgttgccccctggggacattgggcaatgtctgatgacatacttgattgttaccgttggcaggacactgctacaggtatcttgtggatggaggccaggaatgctgctcagcttcctacagtacccaagacggcccccacaagaaagaattacccagccccaaatgccaatagtgctaaggttgacagaccctgcgctacagtctcctagaacttaggagtcaaatctgggcacttcgatgtcctggagttactttctaaaagactacaggaagcagtgcatggaggcagatttgttcccgcctgccagggccatctcgttaataacggactgtgttttgggccagacgggcatagccccgcttgaccagaactgtttgggtattttagaacaaaacaaactcatataaacatactaaggcatattgacagctgaccacctccctcgcacatggctttgataagtattaataggaaacagactctcgacagacactgctttccacgggtgaaagtgtacctgggtccttacatttggggaagggcagcttttcttttggggcccctttgccacaaggcagggactggcagtgggccaaggatagggagtgtgagataaagggcagaggccaggccaggttggcctccaaagtcaaatccctgttcatggggaacatctatgttgactccctgggaggcaggcc

SEQ ID NO: 101789 - DNA, 815 bp, Homo Sapiens
  misc_feature (112)..(120): n is a, c, g, or t
  misc_feature (127)..(127): n is a, c, g, or t
agagtgtgctataattctttactgatcttccccccaaaaaagatcctctctattcactgccaccctccctctaacctgttaaacgtcatttcctttcctaccacattgaacnnnnnnnnnagactangcacagtttcctcacttcttaaattttggataattgtttctggcatttaaaaaatgtacagtgtaatctctggggaaattttagaatcaaaaacaagagccacatcagccccccttttaatatgtgtagagaccatgcaagactactgtcttctaaaaattagacagacttagccagatgatcacatattagcacatctgcccagccctggctccacttggttttgtcctggttcctctgcaagccccatcacaccctctgtcccctgatgtggggacttctccctcttccattcttctcaacacagcccctcagaaaactccacctctgacctgactctgctttctaatatttttttcaataccttcactcaatgatatcttgcatgcaattcccttttcttccaatgatgaggagcataatagctaatttgttgtgttttgtggcagaagtatttaggtattttcagctttcagaagaggaaactgatgggtgataatagatatcacagtagcatattgttctgtagttctctatttgaacctaggtcaaaataaaaagaattggatttaaattgcagcacaatagagatctttttgatacctaaacaattcaacattggaatggattattaatggaggatgtgacattttactcttgaaaatgcttgggagtaaatagaaagttt

SEQ ID NO: 101790 - DNA, 601 bp, Homo Sapiens
  misc_feature (405)..(414): n is a, c, g, or t
atgagctcctgcgctgggcctagagtttgcaagtttgaagcctagggagcatgtagccggctttcaaatgtagatcttatttatattcacatatggtgaggccaggagatcaggatctgattgctatcgaaagaataattgttactcacagttcccaagtagagagggcgggtcataccaggcagggccaggagtggaggcctcagggtggtcagaaggcagagtcagggaggggaaaatgtaggcaggagcatttgctgtgtttctgagggaaggaatggtcgaggcagggtaggaagcaggcctagaattggctactgtgaataatttcagtgggcttgtcagtggggtgtaagggctggggaatagtggcctggagcgtgagaaccctggaagggccctgtnnnnnnnnnngttggaaaatagactctggattggttggttggtatacaaaaggcatgctcacaagtgagtcccttaccatctctagccatgggaggggcagtttctctagggtcagcaaagccccaagatgtcaaacatcagaataaagacatgcttaatacaaagacaaagcataggtatctgaatcccctcgtgc

SEQ ID NO: 101791 - DNA, 466 bp, Homo Sapiens
atgttggagcggtcgccaactcccaggaactgaggatttactctgttattttggttttagttcttcatgtgagatggtaaaacttgaagagaaattccatggaagattgtattaatatcattaattgctagattatcagtagcaggaaatgtatcactagactgtgatagacacacacacacataaatatatacctactactttatggtagaaagacaaacagcctagttccatgattttccaatttttggagtgtttgcagtttgttgactttgttgctagtaaatctaatgtggtctttttcaacaatggaccttcggcgttcgctatttctatgctggtttgatgaattagttgataagtcggatattgtattctcaagatcaaaattgtatttctatgtcagcatgtcagtgaacatgcatttagagtgtgatggagaaaataaataaaacacatgaataaa

SEQ ID NO: 101792 - DNA, 390 bp, Homo Sapiens
  misc_feature (60)..(243): n is a, c, g, or t
tttttgaaaaacatgcttgtggagaccacggaattgatttagggagatactcagtggggnnnnnnnnnnnnnnnnnnnnnnnnnnnnnnnnnnnnnnnnnnnnnnnnnnnnnnnnnnnnnnnnnnnnnnnnnnnnnnnnnnnnnnnnnnnnnnnnnnnnnnnnnnnnnnnnnnnnnnnnnnnnnnnnnnnnnnnnnnnnnnnnnnnnnnnnnnnnnnnnnnnnnnnnnnnnnnnnnnnnnnnnatgtggtgagcacaccataaacttaggtatcagaattgacaccattcctccttgacttctctatatgctctttctgtagccagatagggagctccccaaagaccaggccacctccttcctctgtctctggctcaggaaagagaattc

SEQ ID NO: 101793 - DNA, 634 bp, Homo Sapiens
ttggcttagaccaatctgagctacctttgaagctggagggcttgtctttgtaaaccatgtggctgctacacaaagggagaggaatgggatggatataggaaggcctatcatatggttcatcccagaagacttgtaggccatgacatagtttggagtttacaccgtggacaacaagaagtcacttacaggcaaagattcacatattagaaataactctggaggcagttctggaaccaactggggcaagaaaaccagttcacacctagtttatctcttaggtcttctgtagagaaaacaacccaactccactgagtaaacaggtattctgggcaagcactatatattgtttgcacccagaaacctcgcttctcaggttgaatttcaactcagaatgttgaaatgctcacaactcccaagctgccaacagtaatggaccaatcactgttgtaaaattcaaagtgttttacattacttctaagtctgtgcactcaagagtttcagcctgcaaaccacttccatgacacgtgagagtcaaatgggagaatccattagaggtggcatacggagggtgtaagagccaaggacttgaaccacacagacgcgctggaagtgacatcacctcgctgagtctctg

SEQ ID NO: 101794 - DNA, 539 bp, Homo Sapiens
  misc_feature (442)..(442): n is a, c, g, or t
  misc_feature (456)..(456): n is a, c, g, or t
  misc_feature (478)..(478): n is a, c, g, or t
  misc_feature (496)..(496): n is a, c, g, or t
  misc_feature (515)..(515): n is a, c, g, or t
gacatcttcatcatcaactttattttactactgaaatttgactttagaggaattaagctgatcacatattgctctgtcaaaaggagaatgagatgctactttacatttactaggatggctgtaataggatgtagagaaatcagatactttatatgttgctgttcggaatataacatggtacagctgttgtgaaaaacagtttggaggtctctcaaaaacctaagcctagagttaccgataaccctgcaattccacttctaggtgtagatccaaaagaattgaaacaggtactcaaacaaatgcatgtacatgcatgtttatagcactactactcacaataaccaaaaggaaatgtctttttggttattgtgcccattaatggatgaataaacaaaatgtcatcaatatccatcaatggatgtccatcaatgtccatcaacgngatgaataaacaanaatgtggtatatacataaattntatatacataattcatcncataaagaatgaataaagngactcctcgtgccgaattcttggg

SEQ ID NO: 101795 - DNA, 712 bp, Homo Sapiens
ccgccaactttttttccttagagaatcgtttttgtggtacatgtgggttagataagcattatcaccttggcttctctaatatggggctaatagtacataccacacagagttggtagtattaaatgtaacaatctaaggcactagaacaatgctgaacacataatagtgagtccaaagtctcaggactcttcactgatgctgcttctactattggaccctggaactcaacaatggcaaaagaaataattcagagacccctctccccaacacacatacctgctgcttggcccctgatcttttacttcctgaaacaggctgttctgataaatgtctattaatttggtgcagggaaggtgtaaggggaaagagttaagtgggtcactttgaagctaatatagtctaattacccacattctggtcattccattgtggctagaaggctctcagtctcccctctgggcctctgtccctctgccaacaatgtcctctctcctttccttcctctactcagagcttaagtcactttttaaccccaaacccaactcatttcttgcctcctctccagccacctgaacctcacttttgtcttggccaatgcaatacgttttgctttttcaagtctctagaagcagactcagcaaactatgacccatgagcaaaatcctgtctttcccacctgttgttgtaaataaagttttgaaatgcccattca

SEQ ID NO: 101796 - DNA, 538 bp, Homo Sapiens
agacatggcctgcccggttatccctccaacctcacctcccaccactcaccccctagctgactatcatccaacctcatctcctaccactcaccctctaactggctatgatccagcctcaactcctaccactcacccactagccaactatcatccaggcactctgaccttcttgctggccctgagacactccagcctcagggcctcttgacttgctgctcccttccctaaactgcccttcatggcatcatatcaatcaggtctctgcttgaaagtcacttcccccaaaaggccttccatgaccacagcacatgccttcatctccacgttcacatcgcgcttcgtgttcttcacagtactcaacactctgcagctctatcaagtgtctttcttacttgctgtctctctcccacactagaatgtaatttgtatatggcatcttatttaccatagcattcccattgcttacaacaatgcctcagacgttgtggacatttggaaaatatttgctatgctgacacattaaaagaaatgtgtatat

SEQ ID NO: 101797 - DNA, 649 bp, Homo Sapiens
  misc_feature (536)..(545): n is a, c, g, or t
taacttactaaagttttccttgcaggaacatgcttaccctgctgatgaactcatgcctttaacctgtagaggtcgagttagaggccaagagccaagtcgcggtgacgttgatgatgccttgggaaaattttctctgacactgattgattctttggacactcttgtggttttaaataaaactaaagaatttgaagatgcagtgagaaaagttttaagagatgttaatttagataacgatgtagtcgtatcagtctttgaaacaaacatcagagttcttgggggtcttttgggtgggcactccctggcaatcatgctgaaagaaaaaggtgaatatatgcagtggtacaatgatgaacttctccaaatggcaaagcagttaggttacaaacttttaccggctttcaacactaccagtggccttccttatccaagagtaagtacttctgaaaaatatgagtctttatatactttctttgctgttttacaaaatgaagttttgtgatcagagccattgttcttcaccagcttgaggctgnnnnnnnnnntgcttcaaagctatataacaaatttatattttcatttcaattaactgattatacttctaagtgatgtgataattagattagtttaagctttaaaaaagttttat

SEQ ID NO: 101798 - DNA, 629 bp, Homo Sapiens
caagtgaagatctgttccagatggacatatctgctgctgcttttctgttcctcacgcacaacacaccttggctcagccatcctcccttcttgcaaaggctcctagactaccctctggcaggaagaatctaatccatccttcaaagaaaagctcaagctgttcatggaatagacacgtatggagccaggctctgtgctaggtgccagcaatgcaaagatgaaagacacctgtctcaaagagctcccaccagctgggcctggggcatcatccccaagctcacaccttgtcattcattttgcttgtctattcatggtggttaattcctgaggacaaggacttttttcatactcttcatgatacttatgtgctgagagtgggtgttgaaatgtatttgtactttgttttatttgggagaaaggccttattgtgtagcagctaagagagaaggccatagggttatatggattgggttcaaattcccctccaaacctatagctctgtggcttattaggaggatgactaggacaagttatttagcctttatatacctcagttttctcgtctgtaaaataggtgataggtaataatagcatcttttatttgaaatttaaacaaaatattgaacttgg

SEQ ID NO: 101799 - DNA, 628 bp, Homo Sapiens
gcacgaggcgtcccgctgcgtgcgcgcgtctgtccgtacagcgcggtgcccaccccgagagagggcctggattcaccaaggctgggggccttgagggctttttagggcacgtgaaaggaaaatggagttagagttgtgtcgggatagagagtgggatcattttgcactcaaggaattgagaagatcccgttggtaccgcagtttccaaggatttgtgtagtgcgttttttggatctggtttgtacaagcgaccagtataggagacgggatccctcccgcccttacaccccgctgcggggtcagccgacgtgggtgggattttgctggcggcgaggggagaaggtgacgtgcgtggcgccatgatcggaagtctggactgaattcttagctgcgaggtggaaaatgcgcgtgggagggcgatcttgaggggtgaagtctggccttcccatctcctaccaggcaggagggttatgctgaaggctggttttgctggtctttcattgtggctaagggcagttccacagatacagtcatagatagactccttaagtcatgctctgcttgcttcttctagtccgctgttacctctttatctgaatttgatgtaaataaatctccacattcctta

SEQ ID NO: 101800 - DNA, 609 bp, Homo Sapiens
ccctgggagaggtggggtagtgggggtgtcactgttgtgtacagtgggacactacacaatggttacgtttgagctgatggtaacgcttctgatggaaagtggagttactgacaggctgtagggaggaaaacaaggctgggaaggggaacccgcccccatcacacagctggatcgtggtgtatttgagattaaagtagcccccactgcccgagtgtgagactggatgactctcctcaggaaaggcaaggccactcttctattggttggtgaattttatccagtttgcacacttttgagttagaactttttaggagatgacctctcctatcacgtttgccaccaaaaatatcattttcaaaacgaaataatagcaacgtttgtagttcgctttgctcgcaagaccatcctgaaaacacagtccactgtggaacatattaagtagacgggggaaaaaaagcataggacatttaaagaggaagtgcttacttcatagaaaaagtcctttgaggatacctgtttgaattacaaagtgtgggtgtgacttgaactgtaaagttctgcagactgatgactcgcagcaggtcagctgtcccgattcccgctccaaca

SEQ ID NO: 101801 - DNA, 666 bp, Homo Sapiens
ctagcggagaaacgaagaacgtggaactcaggccaccacacttcccagaaacaaccgcgaccccgcgcgagagagcatatggctttccccgccccactgcaactcccagggtgctttgaggccaagcgcacatcatcgaaagacaaagaacacgagcttcaggcaactacacttcccagaacctctagcgaccgtgcgcaaaagagcggaggacgttcttcccctactacgactcccagagtgcatcgtggccacgcccaaagccggaagacaacgcagagctctggcgactacattcccccaaactcctgcgccgcacgccagagggtatagggttttcctcccctactacgactcccacagtgcttcgctggcgtgcacacacggcccagagacaaggaactggagactcaggtgactacacttcccagaacacaccgcggcccagcaagagcccaagaccgcctctattaaacaactaggattcttaacaacgactgtggagtcagtacttcagtctaagaccttttgctactggaaaggggtccggatctcagactctaagagagggttcttggatcttgcacaagaaagaatttgaggcgaatccataaggtgaaagcaagtttattaggaaagtaaaggaataaagaatggctaatccat

SEQ ID NO: 101802 - DNA, 643 bp, Homo Sapiens
gcacaaagtcagtgtttaataaaataattgttatagaactgtaaattagggctttcatgtctaagtgaaatagtacagatatgatcaaagggaaagatggacaaattagagcacatagactctttctaaattgttacaggattgatactgctagatccaatttttttaaagggaagctacgactctgggtttttaaaatactatgcaagccacacaaaacacttccacaagccacattcaacctaagagctattagattgttatccctacaaacttatctcatcccagcctcctcattttgcaaatgggagatagtagaaatagctagtccttttatccatatccaagaaaccatagagctgaggggatccttagcaattctagctactcccctgggaccccacacccatggccatttttgccctatttgagggaaactcagtttatgcttaacaaagaagagaagtattagtttcttgtaagtggattctgaatggggggatagccagtgagtcgaggggcatctggcccactttaggctgaaggaaaagggggatgaagcttcctaccaagaataggaagttaccatttcagaatctaaaaatatctttcaccatctgtccaaacgaacacagaatggtaa

SEQ ID NO: 101803 - DNA, 418 bp, Homo Sapiens
agcaggccactagggagtcgggagagctcggtgatgtcacgaggggcatcagactcttccctgcaggctggcgggactgatgggctctcgttccaatggaggtacaatgggacttccggggctgtgatgggaagggcggaggagctgccgatggtcccagtgccatattagtgtcacattctgaggggcagccctgtgccggacggcagctgctacctctccctctgcccctttattacttgaatctcttcgttgtgccctgtctaggcacggtcgtccgacagcaggcagcccactgccctcccagagctcactgtctagcccagggtgacacagggtaaccgtgggcatgacttgggccgggaagtgagaggctcgattccatcacatgtaaataaaaatactcattttcaatcta

SEQ ID NO: 101804 - DNA, 457 bp, Homo Sapiens
caaaaataataatattgaagtaaaatgagtatttataaagtgcctattaaatgcctgattgatcactggcctgctcacttcaagggctgttcttattctaggattagaccaataaagcagccacaactggtaaattgtcactcatgaaggccgagggaaagacagcctttgagggtcttttgctgggaattaaacgttctgcctcaaaaactatacatgtcatttccattcactagtctttgagacgtcacatggccacccaggagtgtgatagcagacatgtaatcctaccataattctgggatgggaagagctggcgatattttggaataacattaaagactgccacaaacattgtaaagatagtgttatcatcacgcttcaaaagaaactgcaacacgggggtgaggtgacctgtccgtaatcattcagtgagtaaataaagcaacaaggattc

SEQ ID NO: 101805 - DNA, 485 bp, Homo Sapiens
ttaatggaagacattcattcatttaacaaatacttaattagcacttatatgacagatatattaacacaccatttgccccatctgaggagacaaactccgatgagaggccttttaggattaatgcctcactttagaaatacggatgtgtgaaaggtcaagtgaaagttgtgtctcttctgcaggcacaccctactcccccttattccagagttattcattaatgatgtgaaacaaacttgaggtgtttagtttttcagagatttcagaaatgggaagccactgatgtcgccttttactttggaaatgtgttggcaattcggatcatcagaaagatgtctgcttcatctctggaatatctaagtctacttacagaaaacaaatctttaacaaacatttgcaaccacatgagatttggtgcagttgaattcattttagtatttttaaaacgtgtaacacttttctaaagaaaatatccccttgcttgt

SEQ ID NO: 101806 - DNA, 397 bp, Homo Sapiens
gcacgaggccggtaaccgggccctttccacctccgcctccatgttcagtttaaatattaatcttgctctatctagaaccccaagaatcatctaagctgactcttaaattatatccaaaaacttacggttgtgatattcaaatgtataaacagacagatgtaagacattaatagaaaagacattgtatccaaaacaccattaagaaaattaaaagacaaaaattaaactgctaaaaagattgcaacaaaatgtccaaatttatatttaaaaagtttttgcaagtcaataagaaataatattactaacctaatacaaaaatgagcaaagaacatgagctggcaaattatgaaaaaagaaatacaaatagctaataaataggtagagaaaagtttgacct

SEQ ID NO: 101807 - DNA, 263 bp, Homo Sapiens
gaatatgagcgatcccagagaggatcactcagttgaagaatttaaagagaggcaaagcgtttaggaaaggtgaatccacatctgttttctccatttgtatttaggaagcccactgaattatagaatatctatcttaaaaggtttagtcttccaataaagcaacagagaatatgcttaagatcatgaactctggagccaaaatgccacttactagctgagtggacctctggcaattacttaacctctttgtgcctcaatttctg

SEQ ID NO: 101808 - DNA, 665 bp, Homo Sapiens
atacagggaaaaggaaaatctttctggtgttttatttacttgcattagtttctaaggctgctgtaacaaagtaccaccaactgggtggcttaaacaacagaaatttatcatctcacagttttggaggctgcaagttccaaatcaaggtgttggcagggtgggttccttctaggggctctgggaggaaatctgtgcaaggctctcttccagcttctggaggttgtttttgctcacaagcctgggcagtctttggcttgtgaaagcatctccccagtttctgccttcatcttcatgcggcgctctccctgtgtgtgtgtgtctccaaatttcccctctttataaggacaccagtcctactggattaaggcccaccctaatgatttcattttaagttgactgtctcagccaaggccccatctccaaatcaggtcacattctgggatgctgggagtttgaatttcaacacatgaattttggaggacacaattcaactcgtctcaccggttcaggtgtccagaattggtttatttcccatcttaattgtagatttacaatgtaaatgagccatacattttgtcaattttgtttttgcaagaagtatttaatttggtggtcttacctattttactacttaaaagaaattaaaattgcctaagtaagagtta

SEQ ID NO: 101809 - DNA, 532 bp, Homo Sapiens
caggagcctgggcatgctttgtccgtctggcccagggaggcatctgcccatccctgtgaatagcagcgtctctcctcaacagtcagtgactgccttctgacagcctgaccagggggtctgagtgcgagaggcatctggcatctctgaaaaagcagctccagcctggcttccagggcagggactctccactgccagatctgcagactctccaccaccagggcgcctactgcagttgggaaaagcctcagatctatgtcctctcctgtctgggtggagcaggcaccatgatccctgtttcatgcacaaggacattgatgcgcagggactacaggacttgtccaaggatgcacccgagcccacgtcccacctaggttccccagtctctcccagacaatccctcagaaaacagtcctgggcccaggaaccagagctgctgagcaggcccagctacgtaatttgtggagcccagtgcaaattgaaaatttgagaccctttgttaagaaattatgaagaggccaggcacaatggctca

SEQ ID NO: 101810 - DNA, 577 bp, Homo Sapiens
tgagccactgcgtgcccggcagcagatgaactttcaattggagcaatggaattctgtggggcaggggattgcacactgcacacatcacagctgctcatccagggttcagggagcacaggtgttgtggcacttgcttcatcttgagtggcacggagcacagagcagcccctgtggagtgtggaaacaccaaaccctgagtcaccactgactgttgccctgggcatagaaccccaggtgaaggcacttaacactggttatccctgtgcatccaggaagctgaatggcggccaaagaaaaaagttacaatgcagtcaggctggaccagagaattcctgcatgtgcaagtttgtgcgtgtgtatgttttggaagtcaagccagatgtcgtctttcctcatgtgacatttggtatcttttttccacagcagtgttccattatgttctagttcttgaaagaggcagtgaggcaacaagtgtacgacgaaattgatttgggaaatgatttatgtgtattatagtcttctcttagaggatcacaaagtatattagcatattaaaggctctgagaagtcctgtaat

SEQ ID NO: 101811 - DNA, 690 bp, Homo Sapiens
  misc_feature (628)..(638): n is a, c, g, or t
aataatgctgcaagaaataagggagttcactgatctcaattgaaatcaggatctcctgatcctgatatatatacccagcaacccagggattgctggatcagatggtagttttatttttcattctttgaggaacctccatactgtttttcatagtggctgcactcatttatattcccactaccagtgtgtaagggggcccttttctctgtatccttgtcaacacttatcttttgtttgataacggccactctaatagagtttattcttctccctcagattctaccttagcacccagctgactacattccagatggttgtttaaccttctgtctctcctctagactgagttatccaagggcagggaatggtacttatttatctgtgtggctccaacatctactgcaataggcatcaggaagtgacaagtaccaaatgattttcaaggagtgtgccacatagcccccaggtcctggggcggtcccgagggactctgcagtgtgagaaggggctgagctgatgagggggaggcccttggccccttcttcagtgagagaactgccttctgtgtctcattcacgtgctgaagtgggggttctgtgccatatttcatctattatctacccccatnnnnnnnnnnnggattatttctaccatgttccctttccatgcatacatagagaaaaaagagta

SEQ ID NO: 101812 - DNA, 845 bp, Homo Sapiens
attaatggagtatgggtaggtgatggaatgattgactgatggaggattcatgcatggaacagtttgacttgattgtgaataggtcaatggatagaaaggctgagctggtatcagctggttccatggctgatcggctggctggacaaaacggctgactacatagagagtcatcaaaagctgatgttgtttagagctccataatccacagagccgaaaccagaggttcctgaagaaggtatatctccccatatcctccccttccctgcccacccagagccctagacccatgtgcaattgatatagaccagaatgtacttggtagagatttgtctcatgccacctaggctggccatgcataagagggagccagccaaggaagcctgggcctggtgaatagtgaagcccttcttcacatcaaaggagatgtctgtctcccactgggacctcctcagtggggagctcccagtgtagtgccatctgggccagggggtttttaacttggaagggaagcaaggctggatgatgagtgcgcagctgtaccacctcatagtagttatctgtagggacaaagagctcctcagggtctgggaatgtggggaaaaagatttgttgcttcccagtggctctattaccacccaggagcatgaggtctttcttggggacctgaaacctcactatctcttcccatccccattctctatgctccttcctgtctcataaggaaggggtcctggactgaggatgctgaagacaaacttcctagttccagatctgtcattagcttgctgtgtgtattaaagaaatctttccctctctgcacatgcaatcatgcacaatgcaaggat

SEQ ID NO: 101813 - DNA, 323 bp, Homo Sapiens
tattttaattggcaaataaaactatatatagttatggtatacaacatagtgttttgaaatatgtatacattgtagaatgactggatcaagctaattaacatatgcattacttcacatacttatcttttttgtggcgagtacaattaacatctactctcagtgaatttcaagaatagaatactttgttagtaactatagtcaaaatgttatacagtattctgttgctttcagttgtatcaatctcaacactcccattgcctcattcaaatatgctaaaacatttacatttctaaataaaccttggatgtttcattggtaaaaaa

SEQ ID NO: 101814 - DNA, 515 bp, Homo Sapiens
cggcgcccacaggcatcatctcaggtctccttagcacactctgctcagtcccaaatctccttgaaagtgtcttttggcgaggactgcctgataaaatacgggccgcccagttacacttgaatttcagataagcggcaaataatttctgttagtataaaatatttgggacatatttacactaaaagaaatgattgtttatctgaaattcaggtgtaactgcgtagcctgtagttttacttcctaagtctggaaacccagaggcttcaccaccaccacctccatacctcccgccaccccgacctacacaattagccctaaaagagatcactgctgacccctcccccgctcccagccattcagggctcccagacaccaggctgagggccgaggccagcctgtgacaagttctcacctgtccaaggcaaaaggagataaaagaagacaacgcaaagaggttgttttgtaaagctgaaggtgttcaaaggactggtcttcattcttttttttctttcctt

SEQ ID NO: 101815 - DNA, 503 bp, Homo Sapiens
cgagaccacaggagaagccacttgctccgaggcgcctgggaggctgtctatttgaacgcaggctctgctctcacctggaagtctgtattcaggatggcttgtttgggcagtgccaggtgggagtggggcaggcccggccccttttgcaagtcacctccccagttctccaacgcttacaaggtgtgctccgacaactcatgtcccaagagtaagaggtggaaccctagagatgggctattcacatttggactctctggagaagcccagaggagccttctaagaagaagtcactggaaaaggccagcttccatcttcttaggaccagttcctctcactggcattgtctgagtgctacagagccaagaactctggaatcctcagccaggataatattccactcacccaattcctcattcaacaagtatttattgagtacttactatgtagcaggcatagttttaggtatttggaatgtatcgggaataaaacaaagatctctgctt

SEQ ID NO: 101816 - DNA, 589 bp, Homo Sapiens
aggaggacgaggtgtctccaatgccaagcttcggcagcagaagcagcagccacagcgtacacaaaagcccgaactgttgggaggcggagggtggagggatcctgagagagggactgcggccggatgcccagctgtcggagccccggccagaaactgaacaacccacatggatttgacatcccctcatgatcatcctcatgatcatcccctcatgagaaattccaagtttcttcatttgaaatactgctctcttcaagaaaccacaattgtaataatttgtagaatgtattaccattagaaaattaattatgtattatgcacacgtttctgaaatacttcactgcagtaaatagtatatggtgagaattattgtttcctttaacaaaaaactaatgtgggtaaaattatttacataaattcagatgttttggcttcaactgccattctacctcattagcacttccctaacttcataaaaggtatgatttgaaatttttgtttaattcagaatgtattaaaaagaatttttaaaaaatgttataatgtttatattgcaattgaggacatgttcaataaatatcttaaactt

SEQ ID NO: 101817 - DNA, 691 bp, Homo Sapiens
cagggaattcttctctccctagcctcaactacgaccacttccccctctctgaacttcacacaccagcaaaactgagcttgctcttgttttccaaacacaccatgctcttttatagacccgtgttttagcctatgttgcccctttgcatggaatatccactaagtaaacttctaatcatcttttaatgatgactccagacttttaaggaggccttctgttctaccaccaccacctctgtgtaatcaaacttggacacttaccatgctgactgtaaactgtttatgtgcctgacttccctactacacatgtatccactggaccatgtgtgattgcctctatacctttggtgtatctccagtgcctatgcatggcaggtactgaggaatttttgatgcaacaaattgaaattaagtatataaaatgttttgagaatttgcatcactgcttcaaataacgatcgatttctgaatcagaaggaaaaggaaagccaagcttctccatcatactcccatgctattatatcattacatcttgctagaaattctcatgatattatttaactaaaaaattagtaacaaatatgctttctacataaaaaaataaagtttaggataaattctaatgccaagactaaactgcaataaaacattttttatctatataattctaatcaacaaaaaagttggcggcc

SEQ ID NO: 101818 - DNA, 645 bp, Homo Sapiens
gaaattcagataaaatttcaatttgtgattatttgataccaaaaaatcttcactgcttctttaaatttagagacggatactaatatttcaaatttttgtgaacaactttgaaagcagctacaactttctgggacctaaaatagtaaatccaggcagttcatggaaattaaacaatatgaggagagagggattcacttcccttctctttaattttctgtttttgcttgatttgctacagagactttcttatggaaaaactctgaaagtattgtcatcaagcaaacaaatgcacaaatgtgttacattctcagaaatatatggaaaaccaaatatacggaaaactaaaaatgttgaaagatgtggctatatctactgcaaatgtcagaattaaatgtttactattcatctactctacttatgatcagcaaatatattaaataatagttaaggacactcactaacaagaaacatgacagctgcttgagaaccctagcaaaaaaattggtgtatgtatgactctgatctgatttaaatcttgtttgccactcccagttctctatgttcctgaaatatttcctgtgttcttttataaatgacttcttagtggctttattggggcagtttagaacaagatggtgaaggctc

SEQ ID NO: 101819 - DNA, 756 bp, Homo Sapiens
cctgagcggatggatgaaagctgtcctggtctgagtgcagagaatggggtgttcgggttctccatttgagtcttccactgcccaaacctgaggcccctttaaggttgccccttaaagttgccacacccagaaattgggccaaagaagttaagctgttgattatttcaattctgaataaaaatgaaggcatcttctctgccttctaaggcctggtctgatcttggctccttcatcactagaaccttcctgagcagtggtctgggacccctcgccttcctccctccacctgtgtttcagagccctcctagtcagcatgggcttcacctcaaaccccactactattctctcttcttcctggggttcacctcaagccccactgctattcaaccgccaactttctcttcagcttcaaaatagactcccgcatgtaccttgattaaacacaggcccactgcaaccccagtgccccagggacgaggagggaaactgtttttaaccataaggaaaacaaagcaagtactgtggtcaatgtcagtgaccctctgcttagggcaaatattggagtgtgtgactgcaaaactgggacatccacccccgactacaggggtgcccctattctgcttcggccagttgatggtatgtgagaatgcaaactcttgtgatttttgtaagagaacccagaaatgtggagtttggggtggaatctgatctttccatgtttgctcaattgtttaaaaatacagcaggaccagtttc

SEQ ID NO: 101820 - DNA, 518 bp, Homo Sapiens
aggctgataactattgtttttgtcctttattcctcaatggtttaaaagggggacaataaatgaacactattgcctcccggaatcacaagtctgaaaagggaaccacagataaaaactatgatgatcagagttcttacacaaaatggataaaatcaaagcgttagcttaataaaagtgtcgacagaaaaacattgaaatggaaagtgtaaaaacataagtgatacactggtgctcaaatttcaatatatgatcaaaaaagagtatatgtaaaaaaattatcctaaagctcaaaggcaaacaaatgaaaatcccatataattaatcagaaaaaaatgctactatgattctgaattaaaatgcaacagaaaacgacatatccaagaatattttggtttgaagacaaaaattctgaggtgcagattgtggacagtgatttctaatttcacttaaattatgaatattaaagaagcaaagagattaaaataagaaacacaataaaatgaaaatatgtaattttg

SEQ ID NO: 101821 - DNA, 636 bp, Homo Sapiens
  misc_feature (11)..(11): n is a, c, g, or t
  misc_feature (91)..(357): n is a, c, g, or t
tttacaggctncccagtgcctagtccagtggtgggtaatgcttacaggaatgtacctgttagaagttcttacagaattcttttgttttgtnnnnnnnnnnnnnnnnnnnnnnnnnnnnnnnnnnnnnnnnnnnnnnnnnnnnnnnnnnnnnnnnnnnnnnnnnnnnnnnnnnnnnnnnnnnnnnnnnnnnnnnnnnnnnnnnnnnnnnnnnnnnnnnnnnnnnnnnnnnnnnnnnnnnnnnnnnnnnnnnnnnnnnnnnnnnnnnnnnnnnnnnnnnnnnnnnnnnnnnnnnnnnnnnnnnnnnnnnnnnnnnnnnnnnnnnnnnnnnnnnnnnnnnnnnnnnnnnnnnnnnnnnnntctgcataagtcttaggcctgcaaaacagttattttgcagattgctttatgttatacatttattttcattacaacaggtaggtattcattttaatccctttagaaattaatttaccatatcattaaaaaaacagtagctcttctggaatactcagatttgggaatggtggagaggaagggaaaccttaatgaggagtaagaccaggggttggcaaacttttccagattttgggcaagttatttaccctctctaaacctcagttttcacctgtgtcctcg

SEQ ID NO: 101822 - DNA, 500 bp, Homo Sapiens
  misc_feature (44)..(295): n is a, c, g, or t
aatctgcaaaataactgttttgcaggcctaagacttatgcagannnnnnnnnnnnnnnnnnnnnnnnnnnnnnnnnnnnnnnnnnnnnnnnnnnnnnnnnnnnnnnnnnnnnnnnnnnnnnnnnnnnnnnnnnnnnnnnnnnnnnnnnnnnnnnnnnnnnnnnnnnnnnnnnnnnnnnnnnnnnnnnnnnnnnnnnnnnnnnnnnnnnnnnnnnnnnnnnnnnnnnnnnnnnnnnnnnnnnnnnnnnnnnnnnnnnnnnnnnnnnnnnnnnnnnnnnnnnnnnnnnnnnnnnnnnctgtcagaaaacaaaacaaaacaaaagaattctgtaagaacttctaacaggtacattcctgtaagcattacccaccactggactaggcactgggtagcctgtaaaatacagtaagagctgtctctgcacccagaaaatttaccatcattttgtgctggaaagacatgccctagaaaacaataaacagcacgactgtacatgattc

SEQ ID NO: 101823 - DNA, 941 bp, Homo Sapiens
ccaagaattcggcacgagggtaagagataagtagggaaacagaaacatgagtttggggggtatgttgtctaattttagaaatacagtattattgagggcctcataaggtctacaaggttaaatggttgctacggatgcaaatgtaaaagaaataaaaaagacacctaaaattgcaagttagtgtttttacctggtttattgtcttctaagaaatttgtgtgggccaaagtctcaaaattctataaaagcaaggaataatatgtgtctttgtggagtacaaaatcaaataatttgatctaaggaccatttgaaaagtaaaggtaaactacattgtaacaagagcccaagaaaatagatagtatgtgtgataaatatttctgatagtttaaaaagaataatggtgaaaagcttgaaattttcttttcctcaaaataataactccccagcatccacttgccttgaccagaaaagctgtcattccacaattgtgctaatttgtcccagaaaagcagacatcctatacatgaaaacagacttgtataatgcatgatcattatcataactctagctatagtaactaacagctttctcataatcaatgagggacccattttctctggctttattgaaacttccttagtgaagatcaacttcatttccttagcaaataactctcattcggactccatcatagtaccttttcctacctctagtaaaaattcctctcactttatttccaaaccattctctatatacctctcaaacccccatccacaaacacattaaacagctctcctcgtcctactctccaatttccaaaccagtaagtctcagttcccagtaacttacctaaaatacacatacttcttactctcttcagttcacaagtttcttaacattaatttagataccttcaaactgccagcttaagactatgggga

SEQ ID NO: 101824 - DNA, 469 bp, Homo Sapiens
aacctttcctgccagccggcaggctcctgccactgcctccctttcctgcaaggacacacaaggtcgcctattttcatcacaggttcgcacctccaagccttcatccttcatgcacctccttcctttgcctgggttgccgttccttttctctctgctcttccttctcggagataacgtatattctcctccaggaagccgtcctgaatgcccccagtcagcctcacctgctctgagctcccaagtacagtcctatttttgggcctcaatttgtcaccttttgtgggacccgctggtactctgggttctctagttaatctttgacctttttcctagtacagggacggcgcacatagtagggccacaggcacagtttgttgaattaaatgaggctggagagggcgatggacgcagtcctctggagctctccaacttcctggaaagttgtaccttaaataaaaaacccatcctg

SEQ ID NO: 101825 - DNA, 520 bp, Homo Sapiens
gttcatgccattctccgtgacaaagaattttaacttatttggtgaagaagtccaagatcttaattaattatgtaaaataatttaatctgggttataaacaattgttgagaaattgctatttgcacagaaatataataaatgctctgtctcggtaagtattaaaatatttttatttacacctaaatgaatcaaaaacctatactgtttaaagataactcaactgcagagtatagaatatggtctgaaactcttaagcaaagctgaattatttgtgcctaaatggtaatgggtaaaaatttatttggtttatcttaatttgtattaattattgcttagctattacacataccatcatttccacactccctgctgccacaacatctttgggttttgcatctttggttccaatgtaggagccgatggtgtcacatgaccagggagagtattggctataatcatttcctttgtatttcccagctaccttcaagtcttcatccaaaaactacagatggagaaagaa

SEQ ID NO: 101826 - DNA, 490 bp, Homo Sapiens
atctttgagcagtctattcattatgaacacatgtaatctgttggaacaaagttctaggacaatccaggtcatccttcaatatttgcagaaaacagcacaaagaaaacttgatacttaaacttagttggaaactttatgccacagccattaaatacagagatcatataaaggaatagaggaagctgttgaatactaaactaactcaaatcatcattatccttacgaagtgcacactgaattaatgtaaaaagcatttagtaaacaaaaagtattttcaatatacaattaagactgaaaagtattgaggcctcataagctgaacctgacacaataaatttaaaagggaaactaatttggaaatcagaaaaccatctaaagaatttgggaattaggcttctgctgccctctctgctactgacggtcaaggcctcctcattgtattctgtcctccatatctctgctgattcccattttgtctatttccatttac

SEQ ID NO: 101827 - DNA, 726 bp, Homo Sapiens
  misc_feature (138)..(671): n is a, c, g, or t
ccaccctgtgagcccatgagtgagctcactgcacttgttatagacatcctaccaccagcagcctgattttgctgagtccgtagcttacaactccaatctcatggccctgcctttcacctcacttgctgccttaaaaannnnnnnnnnnnnnnnnnnnnnnnnnnnnnnnnnnnnnnnnnnnnnnnnnnnnnnnnnnnnnnnnnnnnnnnnnnnnnnnnnnnnnnnnnnnnnnnnnnnnnnnnnnnnnnnnnnnnnnnnnnnnnnnnnnnnnnnnnnnnnnnnnnnnnnnnnnnnnnnnnnnnnnnnnnnnnnnnnnnnnnnnnnnnnnnnnnnnnnnnnnnnnnnnnnnnnnnnnnnnnnnnnnnnnnnnnnnnnnnnnnnnnnnnnnnnnnnnnnnnnnnnnnnnnnnnnnnnnnnnnnnnnnnnnnnnnnnnnnnnnnnnnnnnnnnnnnnnnnnnnnnnnnnnnnnnnnnnnnnnnnnnnnnnnnnnnnnnnnnnnnnnnnnnnnnnnnnnnnnnnnnnnnnnnnnnnnnnnnnnnnnnnnnnnnnnnnnnnnnnnnnnnnnnnnnnnnnnnnnnnnnnnnnnnnnnnnnnnnnnnnnnnnnnnnnnnnnnnnnnnnnnnnnnnnnnnnnnnnnnnnnnnnnnnnnnnnnnnnnnnnnnnnnnnnnnnaacactaacaaaaaccttgcagacctgcagcctaagcttcccagaagtcacctgc

SEQ ID NO: 101828 - DNA, 699 bp, Homo Sapiens
cgaatgtttcagagcgcagggccgttctccctcgtgtcctctggacccacccgccccttcctgccctgtttgcgcagggacatcacccacatgccccagctctcggaccctgcagctctgtgtcccaggccacagcaaaggtctgttgaacccctccctccattcccagttatctgggtcctctggattcttctgtttcttgaatcaggctctgctttccccctagccactacaggcagcctctgacagtgccgctttacttgcattctgcagcaattacatgtgtccttttgatccttgcccaacttccctccctctcccagctcctggcccctggcccagggcccctcttgctgtttttacctctgttccttggggcctagtacccagcaagcacccaaatgggggaggttttgggatgagaggaggaaacgtgtatacctgtaacatctggtggctcttcccccagaagtttgtgttcatacataattgttttccacgctggatcataatgtgacgtgcagttctgccctgtgctggggagccacatgaagcttcccctggctaacttgctaccccgcagcaatcccagtgtggccgtctgcttgctaaaaaatggatctgtgctcatctgtattgatgtccttggagttctacaagtggaacttaagtgtcaaaaagaatatgtggtttttagct

SEQ ID NO: 101829 - DNA, 290 bp, Homo Sapiens
  misc_feature (14)..(14): n is a, c, g, or t
gacagcacttaatnaatcaattccaggagggaggcagatgacccgggggagggaataggaccagagatacccggcaaagttctgcttggccatcatagctttacaggtgtcaaccagccatgtgacctgcatgacctccatgtctacctgtgaagtctgggctacaggcgcaccctccagggacttccagaacccaaacccagtgatgtaagaggcaaaataatttcaagtctcctttcatctatttttataaagtagaaataaaatggccttttggtcaaccaatctgt

SEQ ID NO: 101830 - DNA, 694 bp, Homo Sapiens
atctagagagaaagcagctttgctagggaagatttgagcagggccccatgaataaacccaccagagtgagctgcagctgtgagttccaggcttggaaccttccgtgcctgtttagtgccctcaaatttgagcccatacccttcggcacacacactaagacttccttccatgatcaagccctggcttacccttcagcctcatctcccactgagttttggtcacaccagaccatcaacatcccagatactccaaagtccttgcccttgaggaaggagattccataccctgtctggaatgctctccttccacttctgtctgacagatactcactccccattccctgttctgcatccagctgtggcatatttgagaagccttctttcattgctatcctgcatcttccttgttcctggggtagcacacagcctctctttcatagaacatcacacaagacagatgctgggatggctgacttgtgtatctgtctctcccaccagactgtgggttctctcaacagggtgaacatgaaaaatagaagcctccagtttctcctgatagtgtatagatgggcagatctggcctcaatggcagaagatacttggggaactggagaaagtacagaaggtgatgtgaaatcaattgggtcatcaaaagaagacgggtgtaccacaatttgttcctccacctgctgccc

SEQ ID NO: 101831 - DNA, 435 bp, Homo Sapiens
cattcagaaccctttcctctgaactgagagataaagaataagatgtcagatgtgtttctgcattgggataagtaaggacaacgcatatcctgtgggaaggatagcttttacacccagaactgtctgagattttacagttaagctacatcaaaaacattaaaaacagggaaacagaaatatcaagtaagaatgaatctagtagaaatatctcaaaagataataacaatatgattatatatttgtactttgtgttaattatttgtgaaatatttttcttgcatgaggcaatagaggcaactcctgcttctttgagcagaatgagaatttagtttaaagatataggggagaaaatagaataagtactgtggcattggcttggaataggtgttattgtgagtatatgactttcattaaaataagaaatatgtaaaagtg

SEQ ID NO: 101832 - DNA, 401 bp, Homo Sapiens
tttacaataaaactgaaatgccaggaaaaagagacaacctactttaaggtcaccactgcctcccagcaaggacgtttaaaaataacccccgatctgccctgtgctcacaactctcattgcgccagctcaatggcaggcccagtgccaccaggacagctatgtggaaggttccgggtggggcacgggtgtgtgttatggaggaggtgagggaggctgttctcataacaatgctggcatctggtctgtgggtccaccctgccgatgtctgtgaaagggcatgtggatggcccctgatagaccagttctgatgccagtttccagctaaagtgaaactgctccagacctgagtgggaagtgcactgtgagaagtcaggttcacctggagggtatggatgccaggg

SEQ ID NO: 101833 - DNA, 716 bp, Homo Sapiens
gtaccagtcagtgctacccagagcataggtaaactggggaattaggcccggttgggacaaaaagcaataaaaatattaaatagtgataatttaccaattcatggcttgtagcccagaaacaatgaattgaaatactgcctgtcgttacttagaatgcggtgctcattgcagcaaggttttgggaaactgagtggacactgttttgtgaaagcataaatgatgggaggaaatcaaggaagatacaggggcgtggctgcttctgggtagcataaggaaagatgatggtcagatccaattcctacattctttgctcaaggcacataaggaagctcaagcactttctgtgaccttgttaagagaatctctcatgtcttgcaggcacagggctccgataaaaacaatttcacagtttgatcctatgggctgccaatttacaacagttgaattcacaacctcgtgaggtgtcgtatgtgagagtgagggcatggttaggagtggctgggaagctgagaattggatgaggctgtataggagcgctaacaacatttggagccattcctgttaccgtcagcagaggcagactctccttcttccttacttgataagtctgttaagctttgcctgaaagccctataactcctttgatgagtcaattctcttcatgtctcatcccaattacccacaagtatctcctgacatataactataaacagatc

SEQ ID NO: 101834 - DNA, 529 bp, Homo Sapiens
cttagcttcaccaggctcatcaaagctgctccaggaaggcccaagccagaccagaagacatgcagatcatcaccacagccctggtgtgcttgctgctagcgggaatgtgcccgcaagatgtggacaagcaagagcatgcaggtacccttctccagatgttgcttctcatttgcggagcaagagattcccctgagggcaatcctgtgttacagaaataccagctccatctgctccaatgagggcttaatattcaagctgaagagaggcaaacgaggcctgcgccttggacacagttggatgggttcagaggcacagaaaaatgctgaggcactgcccgtcaaaaagaaaatgagcagatttctttccattgtgggctctggaaaccacatggcttcacctgtccccgaaactaccagccctacaccattccttctgccctgcttttgctaggtcacagaggatctgcttggtcttgataagctatgttgttgcactttaaacatttaaattatacaatcatcaaccccca

SEQ ID NO: 101835 - DNA, 295 bp, Homo Sapiens
agttggacatggtggcttctgtaatcccaacgactcaagaggctgaagtgagagactggcttgagttctagaccagcttaagcaacatagtgagaacccacgccaaacaacgcagacccggggtcacgcctcgtcctgtttcaacaacgacacccaagggcttccctggagcccagggcgtgggagggagacttgggtttgagttctgcaccttgcggaggtggttagttatttaattgtcttccacctgaattttcctcaggcccaaattgatgagacaaccccgaatccctcc

SEQ ID NO: 101836 - DNA, 417 bp, Homo Sapiens
  misc_feature (370)..(370): n is a, c, g, or t
ccccgtcatgatccctctgctgcaaccatcggaggaaagtccgctgtctctggtgcgaccgaagcccgactcctgcggccgtgggcggcaggcactggcgtcgcaggttatgcgtcacttccggccgtggcacagaacgtggtgaagcgttatgggccggggtggcaggggggttgccataaccagttgcgcttccccctccggtcgcggaggtcgatttgagtgtgtagcgggtagcctgtctagtcagagtttgttttgttttgtttttatatctctacaaaggatagaaggtggaacttacgtccttttaacttcaaaactttttattgttagtgttttgtctgtttacaataaggttgaagtatanttgctgattctccatttccgtttacctccaaatcttaagatattaac

SEQ ID NO: 101837 - DNA, 310 bp, Homo Sapiens
ggaattcaaatggaatactagcaaaatcaatcaaatacaaaacactattggaggaatttaggggaaaaagattgaaatttatagaaaacaaacagcaaagtgacagaagttgttcctaatcaaaaatcattttgaatgtaaatgtatttaatccaccaactgaaagagagattggcagaatggattttaaaaacatgacctaactacatgctatctacaggtgacttaaatccaaaggcacaacgagatttacagtgaaaggatggaaaaatattttccatgcattagtaaccaacagaaagctggcatg

SEQ ID NO: 101838 - DNA, 428 bp, Homo Sapiens
tgatggggtacaaagctatcctgaaaaacaactgtgagtatcaagaaggcagggactgtgcttcatcatatatgtatgactatgccaatatagtgggcattttataactgttcacttatttattgaacaaatattcctttggtggttacgctctgctggctatggactatgatttggagataaagtagacagatatggtatctacctttcagagtggggaagctgtgtaaggttatttgttggagatggatgaatggatggatgggaaaatgtgtgctggggtaaaaaaggtgtttctcacccataggtctggtgctctggtctgatattcctttaagataagacccttggtctgagcacattcaaagaaagatataggtaggttcgccaggtgcgatggctcacgacaaacccagtggcagtaatta

SEQ ID NO: 101839 - DNA, 283 bp, Homo Sapiens
cagccctccctctttatagcaaggcttgctgggcaccttctctagggctacttggctatagatgatgaatgcctatgtgcatgaagcccttctgatctgggtctagggaacagggagacctcctattacatcatgagaccacagtatacctatatgatgcaccaggctccagtaaacaggctccagtaaacaggttcatgcctggtgatttctgttgcatttctaagcaactggatcagagaggaagaagatggcaagagctggccacccagagttcaggagc

SEQ ID NO: 101840 - DNA, 343 bp, Homo Sapiens
ggatccggtactctggtaccgggccctttccacctccgcctccatgttcactcaatttctgctcatcctttaagcttggttcagtggtcaccttctctaggacccctaggctgagtgaggggtcctttcaaggcatcccttaatatgaaacctgcccccatattacccgtttacctgtctgtctcccccacatagacaggactgagttttactcaccgtcacatcctcttcagccctgaacacagaacccagcatattctcagcatattctccagtctcgaaactttggaaaagcacatctgaatacatttaaagataagatctgttccccataagggccatg

SEQ ID NO: 101841 - DNA, 526 bp, Homo Sapiens
  misc_feature (65)..(65): n is a, c, g, or t
ccggcagctgtggccctgatcaaatcaggggctggggagggaaagtgggtccattgaggtggccntgctccatcagccccctacgggacttgtgttcattacagtgagggggtgctcccactgtctcccggcctccctaatgctccctctgctgcagggagaagggttccaagatcacaaaatgtcaacaatgctggcctcctggaccagaccccgaggctctaacaatgcactctgagatccctacccttgccgttggtctctgtcgctgactcgaggcacctaacatccattcacacccaacacaggccagcgacttctggggctcagccacagacatggtttgtcactgttgagcttctgttcctagagaatcctagaggcttgattggcccaggctgctgtgtgtgctggaggcaaagaatccctacctcctaggggtgaaaggaaatgaaaatggaaagttcttgtagcgcaaggcctgacatgggtagctgctcaataaatgctagtgtgttatttcaaa

SEQ ID NO: 101842 - DNA, 522 bp, Homo Sapiens
  misc_feature (64)..(72): n is a, c, g, or t
  misc_feature (378)..(378): n is a, c, g, or t
  misc_feature (404)..(472): n is a, c, g, or t
caattcagaaatctaaatagacacattcagagcaattagtaaaaactaacacatgccttggacnnnnnnnnngacatttccaaaaaggagttagccaaacgcaatagcgtaattacagaattacagcaagctgaatacgtacacagtattatttaagcaaacatcagaaagtaaaataaatacacaaccctccttcccctcatcaaattacttttgtaaaacctaacattggtactccaaagaacaaaagtataaaaactactgtatgcctattcatgacagtatacaccctgcttgatttcatttcttcagcatctttccttctaacactcagctcctacagcaactactttgttggatgaaattaagaaaagtctnaaaaataatagcaaggcttgatggtnnnnnnnnnnnnnnnnnnnnnnnnnnnnnnnnnnnnnnnnnnnnnnnnnnnnnnnnnnnnnnnnnnnnntgcagtgagccatgatcacatcactgcattccagcttggacagagcaaag

SEQ ID NO: 101843 - DNA, 340 bp, Homo Sapiens
gacaagatataggtaagatttctgaaagacaggagctagtaacatgttctatttcttctgatagcagttttttcctagtaatttgtcaattgcatttaacgtttcccactgacttttgagacagcctcaagtttttatgtctgaagggttcgtagattctgacattgtaatttgtccctgctctcttttctctgactagtgtaccagggctttctcaagtgtactaatcttctcaaagaatccaatttggttttgttggttgtatctactctacgttttgtgcctcatttccttaatttttccttgtctttaagcttttctctaatacaactgtcgatgt

SEQ ID NO: 101844 - DNA, 520 bp, Homo Sapiens
agtatacagctttcatatctgtcagtcagtgtgcaagtgttaaccacttcatgtgactgagttcaatgttatagtgcatgttgcagtctaaacattttctaaagtgcctgtaagtacacaaattagcaacatagtatcagcgttacagagaattccttcacataatatagaacaggcctagaatttaaagtgaaactacaatctgtttcagttggttttggaatgcaagcataaagaaacaattccagttcaataacatatttcagagtgttatcaacagtgctaggacaaaaataaatcttgtgcttatttagaaaaggtcattttgagatccaggagtgtctgatgcttagaatccaatggaatgtctctaattctatatagtagatagtagcaagtgaagcttagcgagtttttaattataaagagattgtgcaaatacataaggtgattatcaactatcattaaatccaaaaattccattaaaattgtgtctaatcagaatggcagttcaggagtc

SEQ ID NO: 101845 - DNA, 556 bp, Homo Sapiens
tttatatttgtattttcaaaacctagaattagtatgtgctacttttatgatggaaaaacaaattccattcttaatgcaatatacctcaacaatgtgaaaacaactttaataattattaatatttttattttgcttaaaaagatttgtgggaccccctagaatggcctcaaaggaaggataacctgagctgctttttaccgaaatcacggaaaatggcagctctctgatgctttaaggttttcaagtatagatttcaggacctcaataaggtacccatcccaatttttaatctctcttaataatgcagagatttactcacatccaccataatgcttctggcctcagtttaagccatttcctctattatttcctctgtgaaagaaggaaaagaacctttaaaatgtattttaacatcaaaatgctgagcgggtggtgtgcccaagtgatgagagcggtgaatgggttatttctttgtttcccatgatttataataaaaacatcaacttacaccctaccctaaatgacttttcttcctctaataactaaatgtgaagtt

SEQ ID NO: 101846 - DNA, 500 bp, Homo Sapiens
ttccttccttccgcccgcccgccggcccgccctaagagttgaccacgccgcaatgaagagcttcttacagtgaaagcaaagtaggtcgagtccactgaaaatgcctttaagggacaaatactgtcagactgaccaccatcatcacggatgctgtgaaccagtttatatcctggaacctggagatcctcctttgttacagcaaccactacagacatccaaatctggtattcaacaaataattgagtgctttcgatcaggaactaaacaacttaagcatatattattaaaagatgtggacactatttttgaatgtaagttatgccgcagtctcttcagaggattaccaaatttaattacccataaaaaattctactgcccaccaagtctccagatggatgacaaccttcctgatgtaaatgataaacaaagccaagccataaatgatctcctagaagccatatatccaagtgtggacaaacgagaatatattattaagctag

SEQ ID NO: 101847 - DNA, 334 bp, Homo Sapiens
aaataagtgggtcaagtacgccagccacctccatacaccagtgcgtgctcccgatgctgctatggaaggtgctacgtgacctaagggactcccccatcaacaaaagctttaagctgtggagggccacggtggcgtggctctccttgcaggtgttctgggctccgttgtaccaagtggaccaggtggttgcgggccagcgttgtgcagagcccatagccaggtgggcaaggggctgccctctccacattatcaggtgccagtgtacaatgcctttgatgaactgttttgtaagcgctgctatatccatccattttttaataaagataagactgct

SEQ ID NO: 101848 - DNA, 414 bp, Homo Sapiens
aaagaaatatccctaaagtttaataaatccttgcgggaatccaaatcttcactcatacctccatctgatacagctatagggggaacaaatatgggaccaagagccaaggccagaaggtgagtcctgactccaccacctctatttttatggctctaagcaggtcaatggactctccccatttcccagctctgaaataagtggatgtgccagatgaccaccaggattcctttcagggctgtggattctgtggctgtagatccattatggttgctacactccactcaggttccctcgatgaacttggcaccaaggtcagtatgagaagtaaataatttttaaatctgactcttgggtcctaccttgcctcactcaaatgccagaataaaacatctgagcaagcatatcctctcgctt

SEQ ID NO: 101849 - DNA, 381 bp, Homo Sapiens
cagcccttccaagaatcctctgaagggttctgattttacagacaaagcaactttggcatggataagtgattggctcaaggtgttgccgctagtcagtgccagagccaggactccacacaggccatccgactccccagcccacatctttcacttgtacagcagattgccaaactcatgttgatgtggccaggccttgtgggggctctggtgctctcaagtacagatgaaacactgcacccccgcccccatgtcactgggttgctgccaagtggccctgccatatcctcccatttttaaagaagtcaggaatcctaatttgtatgtgaaacccaacttttgaatgtcagtaactatctttaattaaataactactgatccaac

SEQ ID NO: 101850 - DNA, 335 bp, Homo Sapiens
tgtaaatggatgtggacaaaaacagtcaatggtctatttaagtgtataatttatactattcagaactgtgacattaattctttctgggagaaaagtgatttaaaacttttttgatgcatagttgaggtacccaaatatcaaaggcagagaccccatggggctccaaagagctgcagtctccttcccaaggttttctggatataaatttgcatggtatagtcataatagcttttgagctttttatatgcatttggcaccaagactgggatccacaactttgtagacactgcgatgaagttaacatattagctatactataaatagtgtttgtaact

SEQ ID NO: 101851 - DNA, 431 bp, Homo Sapiens
gctgctggaagcccaggcgggggaagggggccgtgtgtgggggcgcagagcgcccttgagccttacgcagaggtcttgtgtgttcctagttaagccctcccacgcccgaggccccatcgcttcctctccaccctctttacccaccaatattccaagcccagatcctaattccccaccgcattaccccgccctggatttggggaatgtttttctttattttaatatagctcaaggaaaaaatacgtatatcttgagagatttggggtggggaaaacaaaagccttgcggagtaaaaaaaacaaaggcttatttttataaatgtttaatgttttcaccccctggatgctccgaaacgccgtaattgtgacggcggggtacgtgtgccataaatcatttagttgctaataaaaattctgcctgtttgccctgga

SEQ ID NO: 101852 - DNA, 528 bp, Homo Sapiens
ccaagtttctgagatgtaatcagaaagctgtagtggaaggaaatttgaaccagaagactgcagtcctgtctatgaacgttaaacctgtgtggcttaggaaacgagtctaacctcgtctgagcctcagtttgttcacctaaaagatggagatgagagctcatttgtctcattctcaggggttatggtggccatccagacataaagaaattagaacgttcattcatctgcagatgctcacacattcctacaggatgactgaaacccacagcaaacaatcctcatggaatacagctcagctcatcctgaagaataagtgggaggtcagcctcacgggaaattcgatatctccacatgcagctgtcatgccacatggaaacagtcatgcatagggtcctgtcacctggtagactgaccccaggtccactgacccctgacaatcatcaaccgcttctgagggctccatgattgagatttgtccccaggaactcaggggaaactatatattgattaaaatgaactatcaaaatc

SEQ ID NO: 101853 - DNA, 193 bp, Homo Sapiens
aagggcttgagccaccccacccagcaggaaagtagttaaactgagaagaaggctgtcatttaaaaagccaggacaaggcagaggaaactgcctgtgcaaaggtcctgggatgggaaagcttggggatttgggacaataatagtaacactgtggctcattgggggagagggaggcagatgagagtggagaaatg

SEQ ID NO: 101854 - DNA, 374 bp, Homo Sapiens
tttctctcaatgaattaggacctgtagtacaatgtttaatagatacaatgatattgcattctttgtttctgattttagtggaaataatcatgaagacaatgattgtaataaaataataagcagcatttgaatgcttgccatgtgccacaaatgcattgttctgtatgctttgcacatattaaatagttgaatcctcccaatgaccctgtaaagtaggctggttgttatccctgttttatatatgaaaaaaactgaggcacagaaatgatgtaacttctatagctttcactattaaatatgatatctgctgtggtattttgaaagatatctttcatcaagagccccttttattagtcctattttgttaataagac

SEQ ID NO: 101855 - DNA, 388 bp, Homo Sapiens
  misc_feature (28)..(28): n is a, c, g, or t
agctggactccccagcacatccaagaantgcaattaactgaataagatactgtggcaagctatatccgcagttccccaggaattcgcccggttaatagcacccagagcccctgcgtttgtgtccggttgataacgcccaaagcccggcgtccatcaccttaggatagacttaaagcctctgcacctggaactgtttactttcctgtaaccgcttatccttttaactttttgcctactttacttctgtaagattgtttcaactagaccccccctctcccctgtctaaaccaaagtataaaagaaaatctagctccttcttcggggccaagagaatttcgagcgctagctgtctctcggctgccggctaataaaggactcctgaattcgt

SEQ ID NO: 101856 - DNA, 412 bp, Homo Sapiens
  misc_feature (11)..(11): n is a, c, g, or t
  misc_feature (27)..(27): n is a, c, g, or t
  misc_feature (33)..(33): n is a, c, g, or t
  misc_feature (49)..(49): n is a, c, g, or t
  misc_feature (57)..(59): n is a, c, g, or t
agggaaaaccnggagccctcaaagagngcagcnggcaaaacaaaacgangcagcacnnngggaaaaagtcctggcactggtagttcctcaaaaagttaaacacaggcgccatggaacccattaattccacttctaagcaaacactcaaacaaaaccatatgtccaaacaaaaacttgcacatgaacgttcatagcagcactactgataatagccaaaaagtaaaaacaacccaaatatccatcaactaatgagtggataaacagtatgtagtacagccatacaataaaatatcatgcagacataaaaaggaatatatgccacaacatgaatgaaccttgaaagggctgtgttaagtgaaataagccagacatagaagacctcatatggtatgagtctatataaaaagtccag

SEQ ID NO: 101857 - DNA, 639 bp, Homo Sapiens
  misc_feature (351)..(351): n is a, c, g, or t
  misc_feature (449)..(449): n is a, c, g, or t
  misc_feature (500)..(501): n is a, c, g, or t
  misc_feature (571)..(571): n is a, c, g, or t
aaatgcagactgaataagtgttaacttcctctatgaagggtcttcagttagcagattgcaatagattatgtcctgatattttatcttaaattagagttataaagtaggagagatccaagatggaaagacccagttcaggggttctctaaaaaggccaccaggaagcccgtggactctgtgaaaggggccatcactccaaagacaccaaatactcccccaacactgatggcttgcccataaatgtatcccttttcatatgcatgaaatttccatgaataaaaatataaatgcctctagaaacaccactaaatttatagttattatatataactactattacattgagggagngggctgacatttgttattggttgttaaaaggagacttcatattcgaaaagcttaggcaactctagccccagtccaacatctcttttactgcatgaatnggatcttggggcactgggattcacttttaggttctattcagaaaaaggttnntttgtgcaacataacgcttcaatggcagtcgactctggggatggtacatctgactcagatctcttctatntcatttctctttgagcagggagaaacaggctactttttcgggggaattggtcagaaacatctaaattc

SEQ ID NO: 101858 - DNA, 568 bp, Homo Sapiens
  misc_feature (42)..(42): n is a, c, g, or t
agtactatcaagagagagcaattagacaagaaaagaaattanagatatctaaattggaaaggaagaagtaaaatgatctctctttgcacatcatatgatcctatgtgtagaaaactccaaagactccaccaaaaaaaacctattagatctaataaatgaattcagtaaagttgcaggatataaaattaatatacaaaaatccatggccattttattcacaaataacaacctagctgagaaatcaagaaaacaatcccatttatgataacataaaacacttaagaatacatttgaccaagaagatgaaagtgcatcagtatagcctgcacactgaaaaccacaaaacattgatgaaatacattgaagaggacacaaataaataaaacgatattccatgctcatagattggaagaattaatgttgttaaagtgtccatactacccaaagcaatatatagattcaatgcaatccctatcaaaatctcatcagcattcttcacagaaatagaaaaaaatcatacaatttctgtggatccacaaaagatcccaaataaccaaagcaattctga

SEQ ID NO: 101859 - DNA, 781 bp, Homo Sapiens
  misc_feature (660)..(721): n is a, c, g, or t
ccctccctaatcgccgacaggggcccgcgctgccccccaagctgaactcggtctttgaggagccgctctcaaagaagcttttcttcttctctgggcgccaggtgtgggtgtacacaggcgcgtcggtgctgggcccgaggcgtctggacaagctgggcctgggcgccgacgtggcccaggtgaccggggccctccggagtggcagggggaagatgctgctgttcagcgggcggcgcctctggaggttcgacgtgaaggcgcagatggtggatccccggagcgccagcgaggtggaccggatgttccccggggtgcctttggacacgcacgacgtcttccagtaccgagagaaagcctatttctgccaggaccgcttctactggcgcgtgagttcccggagtgagttgaaccaggtggaccaagtgggctacgtgacctatgacatcctgcagtgccctgaggactagggttcccgtcctgctttggcagtgccatgtaaatccccactgggaccaaccctggggaaggagccagtttgccggatacaaactggtattctgttctggaggaaagggaggagtggaggtgggctgggccctctcttctcacctttgttttttgttggagtgtttctaataaacttggattctctaacctttnnnnnnnnnnnnnnnnnnnnnnnnnnnnnnnnnnnnnnnnnnnnnnnnnnnnnnnnnnnnnngaccgcgtatgcggccgcaagcttattccctttagttgagggttaattttagctaggcac

SEQ ID NO: 101860 - DNA, 475 bp, Homo Sapiens
ccaagccccttcctttctaaattaaaaatgttttcatttgaaagtgtatttgccagacaatgaaaacagtatgcagtatttcttaaagtattgaaattagaataccatgaaataaatcaaaacatacaatggcaagtagtatgcatgcatattcaagagactcttccatttttgcaagctgtagaaggaaatgtctgaatgtctataagttatggggtagattcttgagaagcatttcatataatttcactgaagaaccttgataattttgacccactgtaacttagccactgatgaaccttaaagctgagtattttattaacacctgatttgtattccattatattcaaaatgcatctttggtattgtgcctctgctcccatctctctctttgcctcatagatttagctatgttgggaagcacatgcttgctctaggaatatctccaataaagctgttaactatttggtggaaa

SEQ ID NO: 101861 - DNA, 505 bp, Homo Sapiens
  misc_feature (469)..(469): n is a, c, g, or t
  misc_feature (485)..(485): n is a, c, g, or t
gcagccaccatttgcatgtgatgttgataaacttcattttacgccacgtatccagagactgaatgaattggaggcccaaactcgtgtaaaattgaatttcttggaccagattgcaaagtactgggagttacagggaagtactctgaaaattccacatgtggagaggaagatcttggacttatttcagcttaataagttagttgcagaagaaggtggatttgcagttgtttgcaaggatagaaaatggaccaaaattgctaccaagatggggtttgctcctggcaaagcagtgggctcacatatcagagggcattatgaacgaattctcaacccctacaacttattcctgtccggagacagcctaaggtgtttgcagaagccaaacctgaccacagacactaaggacaaggagtacaaaccccatgatattccccagaggcagtctgtgcagccttcgggaacgtgcccnccagcccgacgagcanaacgcatgagagcagaggcc

SEQ ID NO: 101862 - DNA, 308 bp, Homo Sapiens
ggtgccaataataaacaatgaaaaaagatagtttcctcaatgaatggtgttgggaaacgatatacatatatatatgcaaaagaataaaatcaaactcttatattacaccatacactaaactgacacagaagagaggtctcagaggttcttcattcagggctactatgggacatttgtgggtatcagttaaagggacacttctgggaggattataggcatgctatgttttaatatgcaaggcacaggctggacatcagcccccattcctgacgagcaggggtgttattttaggggtgaacaatttatgc

SEQ ID NO: 101863 - DNA, 500 bp, Homo Sapiens
ttctgcagtaatgtagcttctcagagcacaggagaaaaatgtatctgagagttattcgagagagagttcaacaatagcccatatttccgaacataaatctagtgagccgcattaaagtttcttcatgtctggatggaatagtgtcacttgcataggtctgagggtttcattatttgcctgccccagatttggactccgtttttcaggtgaaagaatccttggataactgtttcattttcataggaaacctctttggtttcgggatccaaagtaatatgtaggttcaatattttgtaggttttataatcaaatgtctccctaaagagatgacatagggaagaaaagcctaatgtatcatcttaatggattcagtttttattatgcacaaataactgggcttgtaacctaggaatatgattagagcgtgatgctggcttaaaaaataggactggtgaatcacagtttgtgaataataaactactggttggaaataaaaaaaa

SEQ ID NO: 101864 - DNA, 551 bp, Homo Sapiens
atatcattctgggattgggaatatgtaaactcaactggagattttttttcataaaaatttatatagttccagccctctcattgcttcctatcctaaatcctcttccagtctgtccatccctcactaccatgatagtctacattctgataagctgtgaggccactgccaagggagggagaaatggtcactttctggtggtggttaatgctttgttagatagcttcatccagtcaatagttgaaaagttttcacataatccagtattggcatcagagccagaaatgccctccctaggtccaggaccaaagataaaacaaacacgaggaacatgtagcgtctacacaggaaagtaaagaattatagaattaactaattctacttgaaatcaggagttttataaaacaacatttatagaccgtggtcatcttatattggtttccatcatctcttccccttctctctgggaacagttacccgggtattctttgggaagctatcctttctcagctatgtggtttggcaccaccaccatcttcatgagtggaccctgt

SEQ ID NO: 101865 - DNA, 386 bp, Homo Sapiens
  misc_feature (331)..(331): n is a, c, g, or t
  misc_feature (342)..(342): n is a, c, g, or t
atgagccaccatgcctggcctttggggggattttaattacagtattaattatagttctaggatttcccacattttatagtagtagtttgcaggatattatgtgccctaattagcagatatagacattatcaaattataatgatagtataattatccctttttaatattggggaaagaaaaatgaaaattcattagttaattactgctttgtgttgtgtgaatttattaacaaataacattattacatataggtcattgttaacaaacaaacatccctgaaaacctctgtgaaaatttaattttttatatcctgattaatatattgtgactntaggcccattnttcatgtgcttcactttgatagagttaatccataaaattgctct

SEQ ID NO: 101866 - DNA, 717 bp, Homo Sapiens
tctacaaaatgagtatggggtgacaaaaattagttcctggtgcttaatgaaactttctgccactgattttatatattaccccgtgcttttttaaagtacatctctctcaaaacttagtgtaagtttgagggctacacaaaacatttacatttcattctaacataatgaatataataggttgtggaaagtgggtaaactaaatgtagccttcagtaaaattgaatctcagtgtaatccttggtgctggcatttctcagttccgaggagttaaatgatcccatctaagaggtcattgccatgcctattggcactttactgtcatagcatttttaagggacactgtcaaggtgtttaagttctcagaattacttgttgggattttaggacaggtttgtttacttaaagtaagaactgcattgtcaaagttgaaagaggaacacttttgtgagttcacaaatgtgttcttaagaaaacattaaaatatggagctctgggttttcaagactatttggcattcttaatttggggacttgggagggaaactgataaaaagaaattgaagaattgatggttatacttaaagaagggtaatgtaaacagtggtgatgaaatatatacacatcaagtgaaattacttgacagtgttcatttgaatgactttgaattcaagccattataattacttttaaaattaaatatcatttgcactgttctgat

SEQ ID NO: 101867 - DNA, 369 bp, Homo Sapiens
ttgtactttctgtgacatatctgagaaagctttgcctcacccaaggtcatgaagacttactcctatgctttcttgtaagactttcacagttttagctcttacattttggcctatgatccatttggaattcatttttatgtatggcttgaggtagggattgaaattcattcttttgcatgtagatcctagtaccatttgtggaaaagactgttcttcccttatgaattgtcttagtacttttgttgaaagtcagttgatcataaatgtgagggtttatttctggactcccaattctattccactggtcctgcgtgtctatccatatgccaggaccacatggtcttgattacagtgtgagtccttcaaatt

SEQ ID NO: 101868 - DNA, 470 bp, Homo Sapiens
ttttttttataataaaatggctttattttctggtacctcccagactctgatgactggtcccctagacacgcagtttgctgaaccaaccagccctagagcttcccctccaccgcgctgaggggactgacccatggcaggggatgtgggatgccccctgacttactacatcacaggaacagggccttcgtgggtagaaaccagccatgctgatgtgggccaggaggctgctctccgtttccgagctccttctcagagctgacacagctgaactatttaaggccctagcttagaacctcaataattcccaaatttaccaaaaatctgcctttcctagtcaaccaaaacatcacgttgcacgtgactctgctggcactgttgcttgtgaggaaatgaaccaaccatcacttacagggtaggcatcttttaaactgcaggtccaaagataaaaataacgagggaggctgggcatg

SEQ ID NO: 101869 - DNA, 502 bp, Homo Sapiens
ttgctcagggcaggttctaggaggggaagagaaagagaggctggagttcggcttctccagctgtgatctgtagcagtgggtaatttctctttctctgggtaccagtgctgccagcaatagcatggagcctccagtgtccgtcagctacgcctggggaagggcgggaggactcccgcatttctatgctgggcattttgcctcttctcattcatgtaaatctgtagcctaagggaatatgggatgggaggcctggggagaaactggactgggagtctgggccacggtttcctgcccggctgtgtgacttttaagtcatttcacttctttgggcatcagtttttcatatataggatgaggttagcttacatactctctaaaattccagctctaaaatgccagttgtatttgatacatagttaaaaattaacagggcacagaaaaatacttagattgtggaatgaaaaaatcaggttacgaaatattaaaattacttcacttttag

SEQ ID NO: 101870 - DNA, 308 bp, Homo Sapiens
cagtagcaatgagactactcaatgccaagatcttggttcctaagtccattttccaataaaaggaatcagagttctttggagaaaagatcaattccatggttggggcaaagaaagtacaagatgagcctagattaaaaagtaagcatcataaagcaagaaagcactaaaaataatgaggcatgttgaaaggatacaggagccaacctgtttaagctcctaatgcccagagctggaaccactggagcaacaaaataaataatgacagtgttcgattataacccataaaataaaataaatattcatcagcc

SEQ ID NO: 101871 - DNA, 549 bp, Homo Sapiens
attgcctttgtgtagagaaatatttcttttcctgtgttaatgagctatgtactgaatataaaccagtgcatttaaagtaatatcttttgtgcacctctaaatgtgtttggaattgtgtttgttctcatagaatatacaaaagtactgattctaggtaagaaggagtctccacgggtgtgccctgctcagctggatgtccatgagaacagccatgaaataagtcactacttgtccccaaaaccacaggaatatatacctaggtcacctcaaattcctgagtgtgctctgccatgttacacggtcttcaaattgaaaaggtttcttgaaaaggaaagtttggcccagcaactggagaaggagtccatggtgtcgctgtgtgcctgtatcatttggccaagtcaatggttgtaagcaaagttagtggagacaaaaatgtgtccaaaatgtcgtttgagttcctgggatttctgtaatagcacacaactcagaactcttcagcatttgtgtgattccttacctctggctgataaaactctaatgggttgtggc

SEQ ID NO: 101872 - DNA, 438 bp, Homo Sapiens
  misc_feature (63)..(72): n is a, c, g, or t
ttaaatggttgcagaggctttcattcatgaagttcaagtttactatatcatggtatgtcaggnnnnnnnnnntcatgaccctctgtgataaattaaatatcacaaccacgtaaatgtcatcttttcaatgaaactgaaagtgcataggaatgggactctttttcagtctgttttggctttaagctgtaagaaaaatattttaacactgacagtagtaaacctatgaagctaaagaacaaagccatactctccccagctttataagtcacacgcggaattgtgaattaaattattctaattgcaaaatttggggtcttggccgaaagaacacaggttgaatttgaagaagaggcagctagaaaaatcggtgtaacttttacatgaagataatttgcacagaatgtaattgaaagagaataaatatggagctccatgatg

SEQ ID NO: 101873 - DNA, 1007 bp, Homo Sapiens
gactgaagaaaaacagtgctttatattgctgggattttgagaaggctagtttatgagatttggaccgtctcatgagttcaagcaaacacccttcaccatcatttccccaccagcagtttccaggcaggggcggcaaaattgttttcaccccattgtgtctatctctttccctagctccttcctcagccatatagagtgtggctccaggccttttatccccttttccatccctcactcctgatgtcctggatagagaattacaagtcagtaaactctgggctgggaaacactggctggtgctaccaagacactatgtaactgttgtccattcacaaagtattatctacactacatacagaatacattttcccctacattttaactgatgctcgctttagagcaactccctttgtttggacaagaaaggaatcccatctccctgtgagtggaatccagaatctattaagaaaaatcaaccttttccacacagttttagtttaataaaaggaaggaaaacccaccaagtacatttcatgtcgaaagagaagcaaaaaatttgtactgcaagtagtcgtgtgagttaccttgattcccaggaaaagaaattttaaatgctggtacatttgcaagttgcagcatcactcattgtaccttaaggactggcaaagcctttccaataaggaagcatcctggttctagcttattttaaaacaaagtgacaggacaccaactgtgaatataaaacaggtaaaaataattctttaaaaaggcatggaaatatatgtcttttctgactggtttcagaaattgccagattatgatatataagaaatagctgataaaatcatactgaaatctcatctagaaaactacattgttggggaaggaagaggagagaccttaaaaaatgtttattgccaaagttaagtttctatgagaaaagtttaaaaatcatttagatttaacaaaccacacagcagcataaaatgggcacttttgaaaacttg

SEQ ID NO: 101874 - DNA, 549 bp, Homo Sapiens
tttcgtacagagcttacagcggtactttccctcccctcacatagtcttatgctgagagcaatggaataacttcaacatataagcctctccccactaccttccagagatgcttgagataccactttggagttgctctgggtcagcagttcttcctcagaccccaggtctttctcagcttatgagtaggggaaggccctggttgcaccagggaaaggacctggttctcagggcacattttgactcagaaggtagccctttggcttcaactttcaggagccatggacaggtctatcacatataccaaacatgattttcaacttctgacttgttgagcactatactttttcagatattcacaattaaaatcaacagcaaagaagataaaaagttggcggcaatcaggaaatgcattacatgatccacagattctaaatcccccacgggttataatgaacgagccattgcaaaaaggagagggagagagagaaagagaagcagaccctaaggagggatcacagattcttccaccaaatgggacaaaaagacaaa

SEQ ID NO: 101875 - DNA, 362 bp, Homo Sapiens
taagtccaagtgaacagaaatggaggaggcaggaatggccatgtggggttcagccagagacaacggagatcacttaagagatgactctcaccttacccaccctgagctcaatgtcaatgcatttcctattcagattggcataaagatggtggctgataaccacttatcacctgtatgaatgaacaatgaatgagcataatcaaagtactcagggccctattctatgtaatggagttcaaatgaaaagtccaaactcccttcccaagcaattgtttagatgacttaaatgtccctacgtagtgattgttggttatttcctttgaatcagagaaccaaatgaaaaggaaaagaaaaaggataaa

SEQ ID NO: 101876 - DNA, 398 bp, Homo Sapiens
aataacctcatgtaaaactttacatccaccctattaaatgttatctggttggtttcatagccttgttttaaatcttgattctgtcatctacgatgttaataaggctttccaacctcatacagcttgcacatttgataactaagccttcgtgtgtctttgtccaagtcttaacatgttttatgagaaggcagaaccacgtggcacgctgtttcaaacctttctgtcggttgaccacaggtcttcgaatgtagttgttcagccagctgcagagccacccaagtttcatcctccagcctatgcttggctttacattctcttcttcttgtgacaagggctgtgtctcccaggaacatctgctgtgtctcttggttcagcatggtctgtgatataaaaaacta

SEQ ID NO: 101877 - DNA, 469 bp, Homo Sapiens
aggatcttcctaaatactatgacaattgtccttttttcttctggtttaacacaccttttatacaaaataacagatatagatataatataaacctatagaaacagcctaatcttcagtgtctgtgtataagatataatggcaagtcttttcctggttgtcatgaactttatagaaagcaaaaaatcctcgagccaccattgaccattgccatactcctcttaatttggttattttaaaaatacagttgttcttgagacccactgttgcagtatcctcaaggtccatgccataggactgtgttatgagttcaaaaatattataaccagatcttaagtgtggtagtaaattcttcccagagaagttcagtatgagtctgctcagtaccttcaatatgtcaggtcctcagtaggcactgatttaccaatgacaaaccaccaccaaagtttgtgctaaaataaggcaggaccta

SEQ ID NO: 101878 - DNA, 274 bp, Homo Sapiens
cttctccctgtaactgagatttctaccacacctttgaacaatgttctttcccttctggttatctgaagactgtcctgaaaggaagacataagtgttgtgattagtagaagctttctagtagaccatatttcttctggattgtaataaaaatgttagtagctccttttactttgttcctgtctctggaaagccatttttgaattgctgattactttggctttaatcagtggtcacctagaaaaagctttgtaatcataacacaatgagtaattct

SEQ ID NO: 101879 - DNA, 511 bp, Homo Sapiens
gcatttggcaatgtccagagtcatttttggttttcagtatgaagggtgggtgctgctggcgtctggtgagcagaagccagggatcctgctaagcgtcctacaatgcatagtacaactgcccccaccccccaaaaaaagtctcatccagaatgtcagtagttctgaggttgagaaattctacctataagcaaatggacattgttgtgttccaataaaactttatttacaaaaaataatcagaaggccacatttggcctgtgagctatagtttgcttatctctattttaaatagctttttgctatatgataatatagttttctgtatttgttcctgaattgtctcattcaccccaaatatttttccaaattttcttctattttatgcctttaaacctttactaaatacaaataatacacagaaacaatagcccctgtgtaactaccacctaataattaagcatgttgttttattgttttgattaaaaatttataaaagaaataaatcatttca

SEQ ID NO: 101880 - DNA, 310 bp, Homo Sapiens
  misc_feature (48)..(48): n is a, c, g, or t
  misc_feature (62)..(62): n is a, c, g, or t
  misc_feature (73)..(77): n is a, c, g, or t
  misc_feature (82)..(82): n is a, c, g, or t
  misc_feature (84)..(86): n is a, c, g, or t
  misc_feature (88)..(89): n is a, c, g, or t
  misc_feature (92)..(92): n is a, c, g, or t
  misc_feature (94)..(96): n is a, c, g, or t
  misc_feature (100)..(100): n is a, c, g, or t
  misc_feature (103)..(103): n is a, c, g, or t
  misc_feature (111)..(111): n is a, c, g, or t
tacacctatatatattatattactaaaaagccgaggtgttcttctttnatatggaagtgggnaacatggtctnnnnntgatntnnngnnggnannntgtnttnctccccanccccaccccactcttacccaatttctgggctctggatcctcacagtcatggaggcaccgtgggcctggcacttgcaaaagtgtggcccctcactctagtgtgtggtccctctcagggtcctggggatctgcctctctgtggtctccatcctgactcttgaacttacccacaataagaataaattctgcctcatctttaa

SEQ ID NO: 101881 - DNA, 470 bp, Homo Sapiens
cagtggaaggcatataggagtgatggttccccccgtgcccttgcagccattgacatttctttctgcttccactatttggtgttgggcactggagaaaaacgaagccaagagaatatgaaatttgcatagccaaatgctatggaaccaaagaataagatgactcacatctgtttaacttgaactcttatgcaaaaatcctaatcgtgtcgcaacacgggaccagttactgtgtctatcgggtcatttgggaatgggcaggatactggagctgggaggctaatggggtccagagctgcataatggggatcggatgttggtactcctcccagggagctctcaggacagctgtttgtcgtgggctcccaagtgcctaggccatgccttacgactgctgcacttaccatttgtcatatgatggcacttgactacatatggctttagaaataaaataaccctcaaaactaaaaaaa

SEQ ID NO: 101882 - DNA, 511 bp, Homo Sapiens
ggttgctctttttatttttattcaaataaatacaatacttatgtatagcctgattaatttcccttgtcatatctcttttttcaggtttcaggcttagatttttagttgtgccatgctatggtcacatcataactgttctctaagttgaaacaagtatttcaacaggcaaatagcaaactcgccaaaagacctgtgggtcacttgcccaaatgaggcctactgagatgagaacaaacatctttttttggtaaaaactctatttttatagtgtatctttggatataatgcaattgtttcttccccttctttcccaggccaggcacttgaaaataagacatttcagggatgggcaacccactccattaacatccactggactcaatttcccaagaaaattaaaacagtgtgaaagaacactgcatttagcatttggcatttcagttaatgagactgataatgactgaaatatttttgatgtgctagaagtcaattcagaaatgtaggactggag

SEQ ID NO: 101883 - DNA, 324 bp, Homo Sapiens
  misc_feature (56)..(73): n is a, c, g, or t
ctctctctaagtgctctagaagcttctagagggaaggaatcttgtcttatacattnnnnnnnnnnnnnnnnnngtcttatccagtctgaagtacggtgcctggcacattaattcctttcctcttttcccctcactgccaaatgagctattgccactcacttgatatgcaaacactggctgtccagtatggaaaaatatttttctggctgtagacttgagtttgattaccaaattgatttctgtgaattacatttcaattctgtgcagaactttttgacagccctttaatcaccatgtatccaataaatacccattaaagacaaa

SEQ ID NO: 101884 - DNA, 616 bp, Homo Sapiens
gcggtctcccctgcaccgccgccccctggacgagggctggacccaaggcggtggtcagggacctcagaacacaagtagaaccagtccaggcccgggcccgcgctgcccgggtatggtccaccaaacgagccttctctttaagggtctcgagaagggccccacgctgggggaccccactgcagaacttttcgtgagggctgcaaggagggccgcgttgtaaaataaagaggagacacgaagcggcatcccctgagggttggggatcgggccgtgaggatggagttgggacaggcctttttgctttggtagttgtaggggttgcattggaagatgggccagcggcagagcggagcatgcaggaaagaggaagaggccttggacctgcagcccaggtcggatttggtggttactgtctaaatctgaagctttggcctgccttgactccccacccacccagggcagcttggacctctctctagccacccttgtcccgaggggtctgagtgtctcccagactaaactgggcattttctgcagtggaaggataaaaatggaagcgtttacgcgcctcccagacactggtattagggctcaagagctctacagattgcctgag

SEQ ID NO: 101885 - DNA, 350 bp, Homo Sapiens
gactttgcagaaaataaaaccccagtgtcagagcctgtcactgtgatctagttctaggaaggtattctgggtttattttccattcttgtctcttggtgaatactgtatttcaaccactatgccttctttgctctctaaatgtaccctgtaatttctgtctctctactctagctcaggggtctctgagctctggatctgtatgtgtatctgtcaatgaacatctatatctggatatcttccaggcacctctggtctaaaacacctaaagcctaactctttaatgtccccatttctactttaatctttatccaggttcctgcgccatcatataactagttgcttaagacaaa

SEQ ID NO: 101886 - DNA, 187 bp, Homo Sapiens
aatgaaagatcaatcacccccaaattcctatcattttgtaccacgtcggtaagaattttatctagcgtgtctgttccgcctgtagcccatccgcctcctgtgagttcaagtcatcaggaggacaagtaaatttcttagcctatctgaagccaaataagatttctagggatatttggataattgtcac

SEQ ID NO: 101887 - DNA, 678 bp, Homo Sapiens
  misc_feature (515)..(515): n is a, c, g, or t
  misc_feature (517)..(517): n is a, c, g, or t
  misc_feature (536)..(536): n is a, c, g, or t
  misc_feature (655)..(655): n is a, c, g, or t
aaatgtacagaaaaatgaacaaaaaaaccccaaagatacagaaactactactctcacacatttcagagatgatggaaagagagaacttataagatagtttaacatggagtatcttaaaatcatgcagatatctgtgtgtccacaaaaacaaacaaacaaaaagattgtgcactctcttgtatgccatgaacggtactttggctgtcactgtaaacttgaaggaagattactgaagggaaagaagaattcttagaaattttaaaagtgtaagaccgaagatgcccctgtgtgagagaaaattaaagaataaaaataaaaattagtctctccagaaactacttcttttggaacacagcttccagaatcactttaaggactggcttctccttgactttcgacctctcatccatgttgtctgtattcactctcacctacctggggattcttccacatctcatgtctcttcatattccaggactcctttccttcctcccagaaaatgatcaggtctggcntnaaggcagcaatacccaggnagaaccaggttctgtagttctctaacatcacatttctattataattctgctgtgcgtgtccaggcaatgcactcctccaggaggattctaatgcccatccttaaatgtcatgatcaatntctagcttccagggggcctggcg

SEQ ID NO: 101888 - DNA, 336 bp, Homo Sapiens
catcttccctccactgcctccaagtagctggggactacaggtcatgtgagcacacagcataaaggcagctgcccacaagccaggaagagaagcatcatcagaaaccgaccatactggcttcctgatctcagactttcagcctccagaatgatcactgcctgctcctccaagcccttcactgtagaatggaagcctgtgattttcctggcatcatgcatgactgagaaggtcagtgtggctaattctgagcttcaacatcaggaaacccgtagttcttcacactgagccgcctcctgcagcacagtcatccttggtaataaagctgatattttaatc

SEQ ID NO: 101889 - DNA, 374 bp, Homo Sapiens
aaggtaaatgaagtcacctgaaccctactaaatatataatcctgatgaaggatatctaaggtaagtggtctattatgccgtattctttgcaaaatttaatttagcataatagatagattcatctactacagctattgaaaaaaggtggcttaaaaggaaatctgaaacataaagaataaataaattgtgcatttacatgtattatgccagctgacctaaatacattgtcaacagtgttcatggcaccgacctgtttagtaattgagtaacataaatgatattataggctcataataaaacaattttttaatcattgggaggcagctaattggcaagcacaacctttacatggggaagcattattattgaaaaac

SEQ ID NO: 101890 - DNA, 248 bp, Homo Sapiens
tttgaagattacttcaaaattagcttccccccaattccagtaatgtgcttggttacactacgtattgaaagtaaccaggcacacaagttttgaaacacaattttcaaaatgatctaaggaatagttttccccatatatataaattaaatgatttgttaaataatagccatatttgaacagctaagtaaaatgtttgagttttaaaatcgtggattaaattgttccaactggctagggaaagtgggtca

SEQ ID NO: 101891 - DNA, 698 bp, Homo Sapiens
  misc_feature (208)..(208): n is a, c, g, or t
  misc_feature (387)..(387): n is a, c, g, or t
  misc_feature (431)..(432): n is a, c, g, or t
ctgggcggctttacccgttatcttcccaaagcttacccagcaataggacctccataccatttgattaaattttgtatacagggcacagccattatgccccaaggctggaatctttacctgtcagatacagggaatatactatttttcataccacgtgcatgtgaaagggactcatgtttgggtaggcctggtataagaatggcacccntgtaatgtacacctatgatgaatacaccaaaggcttaccgggatcaggcttcagggagtgccatcatcgatctcacagaaaatgaccaggtgtggctccagcttcccaatgccgagtcaaatggcctatactcctctgagtatgtccactcctctttctcaggattcctagtggctccnaatgtgagtacaccccacaggagcctaatctaaatcttgtgctnnagaaaaaagcattctctaaactcttaccccacccttacaaaaatgcatatggaggtaggctgaaaaaaatgtaaattttaatttctgaaatacaggatttgagctatcagaccaacaaaccctccccctgaaaagtgagcagcaacgtaaaaacgtatgtgaagcctctcttgaatttctagttagcaatcttaaggctctttaaggttttctccaatattaaaaaatatcaccaaagaagtcctgctatgttaaaaacaaacaac

SEQ ID NO: 101892 - DNA, 372 bp, Homo Sapiens
agtaagaaatctctttaatagtgaaagagtttatttggttactgtatacagacatagcctaagtcaacaatcaaataaaacataactgcatgcatatatttctgaaaatgaaaataaattaattactgacatttttaaaacttcagaattctattatttttctaaaatatctaataaatcaaaatttactaacactttggttttatttttgctccttttaaaatatatgcttagatatatatttaaaggatgtattttactatttctaccaatatcattgactaaatgcttaagtgcctactgctatgttagctactttaaaaaaatataaaaattaaggtctgattgtgagggaagttatttaaaacaagt

SEQ ID NO: 101893 - DNA, 570 bp, Homo Sapiens
aaaatctcaatttgtgtctgtttacagctctctctcctcactgctcacagcaaggggttctgtatcagtggatttcattttgtagctgctgagatgttaaggcaagcctcagcatctgcccccgctgggtgcacaatgctgcttcctcgaagagaagacacagagtccaagtggcaggacttgaggttggcttccactctgccttagaagttaattttccaaagtacattacaaatctcttaggcccataagggaaaaagaaaggggtgtggtttgtctttgaaattacggttaatacttttagacagtaagtccggctgggtgccagggctatttgccccgacagcatcagcctgtaacatttcttctctttcctttgtgccactgagtcgttccctggccagaggacataaatggtgctggtaggaggttatcagagtaaggaaggtagcagatataggtgcagggtgcctgtcattcactgtgttatttggtttaaatcaaagtgattctgggggaagctatgctctttcagtggataataaaattggtaaatatattgtaaaacaa

SEQ ID NO: 101894 - DNA, 217 bp, Homo Sapiens
atcacccaccgtgtccggccacagcaagcatttatttcttacagttctgggggctggaagctcgagaccagggtgccagtgcaagcagcttccggtgaggccttcttcaaggttgcaggcgaccaccctcgtgccatggccacacatggtgaaagggagctgagagctctctgggatcgtttttataagacactaatcctattcctgagcactcctc

SEQ ID NO: 101895 - DNA, 251 bp, Homo Sapiens
aagactttcttaaaccacactctctccctgccaagaaaatgggtatcatgtccttcataacccatcctgaaaaaatgaaaccgacatgatggcagagtggtatgaaaaagactctgaatttggaattgagggacaagagctcaactgccaactctctttattccccctgggacattgggcaacttaatctacttctcagtgagttgatctgtcacttgggtctaataatacaacttcttacgactactttt

SEQ ID NO: 101896 - DNA, 416 bp, Homo Sapiens
catcctgaggggcctgtaagcaggggagctcctttttcttttttgcctgtagaggtgggaagactgttggtgtttctgtcctttacaggacattaggaaacagttgtgtaattacacaaggtggacctttatcttgcctgacatgctgggaatcttcaccccaccagggcaaatttccaaatagctcattttattctaggtctttcaaactttcatgtgacatatttccctttcccattgttgctgatttccaaatcgctgtcagcaattttttcctctctccttgcctattcttcactcatttggtggcaaagttcatagaactaggggacttggaagatgctttgaaaatattgttacaaaggcactgctaaaatgattcacagggagagtggccagttggaagaaggatccta

SEQ ID NO: 101897 - DNA, 596 bp, Homo Sapiens
gaaaaagaagctgtgtcagccagaagggccctggagaatgaactggaggctgctcagggaaatctgagtcagactacccaggagcagaagcagttgtctgagaagctcaaagaggagagtgagcagaaggagcagctaagaaggttgaagaacgagatggagaatgagcggtggcacctgggcaaaaccattgagaaactgcagaaggagatggcagacattgttgaggcctcccgtacctcaaccctggagctccagaaccagctggatgagtataaggagaaaaaccgcaggaagctcgcagaaatgcaaagacagttgaaggagaaaacgctggaggcagaaaagtcccgactgacagccatgaaaatgcaggatgagatgcgtctgatggaggaagagttacgggactaccagagagctcaggatgaagcactcacaaaaaggcagcttctggagcagacgctgaaggacctggagtatgagctggaagccaagagtcacctcaaagatgaccgcagcaggctggtcaagcagatggaggacaaggtgtctcaactggagatggaactggaagaagagagaaacaactcaga

SEQ ID NO: 101898 - DNA, 257 bp, Homo Sapiens
gttcccagcaaagctgcttcctctctgctcctacgcatcctgcactggcgggaagagagcgtctgggtccattcaagactctgatgacacccctccccgaggcctcccactgccgaggtcccaggacccttcccccttcacctggtgacaggaacactcctttcctggtatggaacgtgagctcccgtgacatgatgataggtcttctccttgggcctcccccaataaatctgtaataaacctgaaacccacctact

SEQ ID NO: 101899 - DNA, 421 bp, Homo Sapiens
acgtttaatgtaaaaatgatctcgtgacatttacatactaagtattaggcattacataatattaattttgatggctatgttacatcatctaaaaataatatgacaattggtggcatagtatgtgtttttcaaaactgctgtaaaacagaaatagtgtgaactcaaatacatattgctgaagggatgaggatcgctcttaaatgcctggatggcatgaactttacatattagcatggtaagaaattactaaatcttttcttttcctgtattaaaataatgaggatctaagacacattaaatcaaaatatttacaaaaatttaataatgttttagaccaaagaaaaaaaggacaaattaaagaaatcattcttattctaaatttaatttttttaatgttagttctcagttttcttagcttttt

SEQ ID NO: 101900 - DNA, 501 bp, Homo Sapiens
aacattcgagaacaaagttttgtcatgttactcttattccagtttcctgccatctgattcacatgcagatgttctattccagagtagtccaaatactatgctctgctgactcaagtcatgtctcaaacctatttcctctattaagtaagtcagtcaatccatagtgaaatggactcttcctaccgcctgtagcatttactgttgatactgagtattttccattttaatagttcccagcctttataacactaagttttaagaaatgttgattaggcatctgctaaggttacatgctaagcagctacttatattgtatttggtatttaattttgtttattctccagttgaacagtagggaacaattcaagctacttgaattgtttttcaccctcaccatccaagaccgtgttaagtacatagaagatgcatggtgaaattcgtttctgctgaggtttctattttaaatggcaaattctcataataaaatggagcattgatgcc

SEQ ID NO: 101901 - DNA, 543 bp, Homo Sapiens
ggagccaccgatccagattcattagcaccttctgacaccctgcgagaagtcactgttactgtcctaagtcgaaaactttgcaacagccaaagttactacaacggcgacccttttatcaccaaagacatggtctgtgcaggaggatgccaaaggccagaaggattcctgtaagggtgactcaggggcccccttgatcttgtaaaggtgtcttccacgctattagtctctggaggtcatgaatgtggtgttgccacaaaagcctggaatctacaccctgttaaccaagaaaataccagacttggatcaaaagcaaccttgccccgcctcatacaaattaagttacaaataattttattggatgcacttgcttcttttttcctaatatgctcgcaggttagagttgggtgtaagtaaagcagagcacatatggggtccatttttgcacttgtaagtcattttattaaggaatcaagttctttttcacttgtatcactgatgtatttctaccatgctggttttattctaaataaaatttagaagact

SEQ ID NO: 101902 - DNA, 241 bp, Homo Sapiens
ctccataatgtgtgcccagcctaataatttccagtagtattcatgatgatctgtttttctaagaataaactggcatgttttagttcagccctggataccagtggccttgacttatatttctatactaagattaaagatggtaatgtgcagataccctgagttttcagtttcatcttgtggttataactgaagatttcgacatttttctaaattgttaaatatagataaatgataaaggtat

SEQ ID NO: 101903 - DNA, 829 bp, Homo Sapiens
  misc_feature (696)..(696): n is a, c, g, or t
  misc_feature (698)..(736): n is a, c, g, or t
ggttaacattacagtaataatatattttgaatctaaaatttggatggagacacaggacacagaatatataatgctcaaaaaatgtaatgctcaatgaatgtctctatcatattcttttttgttgttgttgttgttatatagatgaggccttcctatattgtccaggctggtctcaaacacccagctttgcctccttatgtgccaggaaaacaggcctgagccaccaagactctcaatatattattaaaatataaacaaattacttgaagtggtacccctcaaaataatgtcattttcactttaatgtaaattagtcttactataaaatcactttcctgctttcaacaagttgcaatgtaagacgggacattttctgaaatggagagaagataaacatgaagtaagaagctttgtccccagcaggcttttcctggcagaaaatatggacatctgggtggtgtcatagtcaggaggccaggaggaaggatttgccaaaatgggtaaactgggcagtgcatgaaaactggtgcctttgctcctatgggccatcatcctgttgatagtgaggtaccaagagaagtgctgatggtaaagccctgtgtcctccccatccatgatcttggccgaaagcattaactccgaagagtctcggtgcttttagaaaatttctggtttgtaatgaatgcctgttgtggnannnnnnnnnnnnnnnnnnnnnnnnnnnnnnnnnnnnnnngtcagttactcaaggttctagaacaactagccaacacctccacaaacaaatgggagcttaatagactttgcaaaattactttttatccagttg

SEQ ID NO: 101904 - DNA, 434 bp, Homo Sapiens
catccctccttgcctccactcccctcggccttctggatccccgtgggtttggagaggccgatgcttgtggctcttaccaacatcaatttgcagtctccaggatgcaacttcaccctatgctgcgttcataaattaatctcctgggattagattctgtgttttagtaacactcctgaggcattgtatttacacattaataataaaagaaaaaaagtgagacaagttctgacaactttcaataacattcagaaataaagtgcgaggcacggaagtgtccaaagttaattaaaagcatttggtgctgacgggggctgggggtgttgcctgcctagctctgacaggtgctgtttctgaaatgcaattttcctgtctataatgtacctgatgcctgcagaaaaggagaaaccgaaataaactgaactggcagcatgaaa

SEQ ID NO: 101905 - DNA, 463 bp, Homo Sapiens
ggttccagatactgctgctggatttactcaaggcccacttctattcctggtgccatacaagctgaaacattctgtgactctccatcaaatgaagcatgagcagtaaacacaacaatccaagtcttttgccaatgatatcgtggctctctctagtctcattttcccttgtttgtatcctaagcttcatccaacgtagacacattcttcttaaatatgtccttgattttcctccctccacagtatttcttctacctgttccacctccctttccacttgcagagtcctcaatcttctcctttaggacccatctgaaatgtctactccttaatgaaaacttttctgatctctctaatggcatgagatttctctatcctaaatactcattagccctttctttatatttcattgtactagatccagctatttaactgtaaatatttttttatcatccctaagaagtaaa

SEQ ID NO: 101906 - DNA, 402 bp, Homo Sapiens
caacataacacttgaaaatacattgtaacagaaagtaatagagctttaaagcagagctataaaagtgatttattcctgagtacgtacttattcctctcccagctgacatccattttatattaattttccttgagtgtgtatcttcatctcttttctaaatccttactactatatatgaactttgaattccacccttattcctttctacttcgtgccaaagacttgcataatgtgctgaaagagagccacagggcttcggagccacgatttgggaaactctgctaggcaatgataatgctccctagtcacaattactggctttattaggtagtcaattcgctgttttttaattaggaagggaaaagttcttaattcattttttccaaagttactttaaatgca

SEQ ID NO: 101907 - DNA, 1194 bp, Homo Sapiens
  misc_feature (634)..(651): n is a, c, g, or t
  misc_feature (676)..(1093): n is a, c, g, or t
  misc_feature (1130)..(1130): n is a, c, g, or t
gcggccgcccttcggccgggcgggcgccccgggaccaggcggcggcagcgacctgcggcggcgggaggcagcgagggctgagccccgggacgcgcggaccggctggcccgaggagccggccccggagacgcagttcaagcgccgcagctgccagatggagttcgaggagggcatggtggaggggcgcgcgcgcggcgaggagctggccgccctgggcaagcaggcgagcttctcgggcagcgtggaggtcatcgaggtgtcctgacccctccgctgccctcggccccgccgcccgcagccaggcccgttataaatgtatattatatataatgcaaagaaaggtaaatggttttactgggatttttatcgagaagtaaatatttcgattttttatttattaaagctgttcattctggcaatgatttggcaacagtgcgggtggtcctcgagctctatttttactgtctggtatttaaactgaaacatacgtttctaagcaatacgaggccaccttcagtcgcaagctgggtgccaggcctggggcccctcccagttcccccgccccaggaaacactgctgacacttgcaaagactgccgaacttttgtgcactttttacataagaaaaaggattnnnnnnnnnnnnnnnnnngaccgcgcctcgtgccgaattcttnnnnnnnnnnnnnnnnnnnnnnnnnnnnnnnnnnnnnnnnnnnnnnnnnnnnnnnnnnnnnnnnnnnnnnnnnnnnnnnnnnnnnnnnnnnnnnnnnnnnnnnnnnnnnnnnnnnnnnnnnnnnnnnnnnnnnnnnnnnnnnnnnnnnnnnnnnnnnnnnnnnnnnnnnnnnnnnnnnnnnnnnnnnnnnnnnnnnnnnnnnnnnnnnnnnnnnnnnnnnnnnnnnnnnnnnnnnnnnnnnnnnnnnnnnnnnnnnnnnnnnnnnnnnnnnnnnnnnnnnnnnnnnnnnnnnnnnnnnnnnnnnnnnnnnnnnnnnnnnnnnnnnnnnnnnnnnnnnnnnnnnnnnnnnnnnnnnnnnnnnnnnnnnnnnnnnnnnnnnnnnnnnnnnnnnnnnnnnnnnnnnnnnnnnnnnnnnnnngcagaacgtaaaaggcgcgttgtggcgttttccatangctccgcccctgacgacatcacaaatcgacctcagtcagagtggcgaaccgacagacataaaaa

SEQ ID NO: 101908 - DNA, 518 bp, Homo Sapiens
  misc_feature (433)..(465): n is a, c, g, or t
tctgttcatgttcctacatctgatttatgcatattttatatgcagagatcctatcacgtggatgcaggtcattttgggggagggaggaagatctgaattatatacatgtggtcagttctgctgagagcttcatctcttggttggcagagggtggtgttatctggccacaggcaaggccccaatgtcttcagcctgcttggttcagacattataaaactgtggtggcttccttccttcttggtttatgttgtctctgaggcctcatgccaccgttgagaaccatagtggaaatgtcatcaacactgaacatgttatagccctttcttggttccaccagtcccttcatcccctaccaatcccttccccttcacctccatggtcttggtgctaagataactttagaatcattgctgctagtcaatagcttttcatnnnnnnnnnnnnnnnnnnnnnnnnnnnnnnnnntttgaaatatttttgtttgttttcaacagtgatgtagcatgttaaaaaacaaa

SEQ ID NO: 101909 - DNA, 367 bp, Homo Sapiens
  misc_feature (224)..(237): n is a, c, g, or t
gtagagacaagggtctcactatgtttcccaggctgagcttgaactcccagcctcaaacaatcctccaacagcagcctcccaaagtacaggattatagccatgagccaccacatttggctgtattatgttttaagattttcaatttccagtgtttcattgacagtatatagaaataatattgatttttgtattgatcttacaacttgcaacattgctaaattacnnnnnnnnnnnnnnggcagagtctcactctgtctcaaagtaaataaataaatatgtaatgcatgaataggaaatttgagggccagtaaggccaacagatcaggagatgaccactggagagcttgttgcatttctcaaaaggaag

SEQ ID NO: 101910 - DNA, 724 bp, Homo Sapiens
gtgccgatgctggtgcgtcggatccgcccgggctctcccactgttgcttgtccccgatgagccacctgagcttgacgatgtactggaggtggtgcccgaagactgagactgctccatggcggggcttgtagatacactattacttgtatttgtaccttcatcagctgttttcttgaagaaactgtgctgcagagcataataaggttgaattcgagttttggggtcataatcaagcatccttaaaatgaggtctttgaacttcaagtagtcagcgaccgtatgacctgactccccagcacgtcgcccaccaggtcctcctgtttccactccaagaatgttatgaagtttacgggttcctggtggtttgtactcccgttttccatctttggtcttctctaagttccaagtgccatctggcaacttctcaaagaactttcttgcttttggtgcttggtcaagaatatgagcaggtggaatacccagaacttccactattttattcatctgatctacctcattggcaccactgaacagaggttctccagtgtgcatttcaaccaaaatacacccgagggaccacatatcaatggcaaggtcataaggcattcccagtagcacctctggagaccgataaaagcgactctgaatatactggtatatcctctgccccaactgacaagaactgccaaagtcaactatcttgattgcactgcgtttggggtta

SEQ ID NO: 101911 - DNA, 472 bp, Homo Sapiens
aaaaaaaaggacagagaggaaagagaaagacaaatagaattgcatcactaatgatgtcattattgcctggaaaggaacgaagggaaggccattttgtccatttctggaggcgtctttgagaagggttctttggctaaagaaaggaacagtttcaccttcctttccaatttggtaaggacatctctggcctgctcaagtttgaagcttccccatcagaagtctgtaaaacacaccagaaggaaaagacacagacagggaatgaagcctgcaaagtccctggggctggaatgtcttgtggccaagtcactcctgctggcgctgtggagtcccaggctggcctgcagaaggaacccttacctctcctcaattctctctgctagttgagagcaccgagccatttccttctttccattttctgtcctagggtctacttgacaggccaacaagagtggtggtcccacaccccaccctg

SEQ ID NO: 101912 - DNA, 535 bp, Homo Sapiens
cagagaactgatcagaatccctttcgtggggtatttttttagaaaggaaaataaactaaggacaacattacattttccccaacccctcaatgtgtagactgagatcctgaatatcttgtcaaccattccagtttaacactttagtgtaaggataattctaatcatttttttaattaaaagagaacatataaaagtatccagagttcttccagtttcatacagaactccaaataaattttcacagaatgaaaaatatttctgtacaaacatttaaaatgggctgcaataaaatgccaacaagagaaataatgacccttccatgacctttgtggtgatgacccctccatgaggagttcagttgcatatttctgcagcaaaagaagctggagatgtgactggcctaacttctaaaaatcccaaaatctcccaacaggtaccaaaaaggttcatttgtaatgacagttcatttgcatttaacagctatatccttcttaaatcatttccttcaatcctgataaataaactttaatgttac

SEQ ID NO: 101913 - DNA, 528 bp, Homo Sapiens
  misc_feature (285)..(285): n is a, c, g, or t
agaaaagaaaagataagaaagtgaaggacgttttgtgtcctagaccctttttcgaaagggagtttatccaggaattagtagaattcctgaactggattcataaaactaagtagccttactctgcattgtctacagggcaaagttgtacccatgtttctttcaggatgtgcactgggtacctaaaaggccagtgtgacataccccacacctaacagtatgcatgtcatttcatatcatttctatttcagtgcaatttctgatggctgctatgtgtctgacactgtngccatgatctgtaggagaaaccaagtgaacaggggacaatctcagcctttaggaacacaggggagcactcaaggccaaataaaatcagtgccctcgtggagcttctcgcaaggtgtttgggagcagaggatggagcaccaactactagttctgctcagtaacaccctccatttgcatagcacctaactgacttccagagtctctgtagaaaccttaactcatctggagttatcagggagctgc

SEQ ID NO: 101914 - DNA, 533 bp, Homo Sapiens
gaaggctttctaacaatgactgactaaataaagctgtctgctcctgcattgataatgaaggtgcgttgtatttgatacccctccccccctttttttggcaaaggaggggaaaggaaggtttaaaataattgatttaaaatgtcactaagtgtagactgatgactgtatagagatgtgaaatgtataattacacatggaagcaatatgttgctgtgttgttattaggctccccccgttcctgttccctacatcttttaaagacttttggaaatttggctgaacaattagaacacaacaggccaactcatactcatttggatctatttagacaacgttaaccaatatatctatagctttagattatattcgataaaagtaattggactcttttccgttttctgactcattgacaagtgcctttgtaatatgttcgcagctttccctttccgttgatttatagctagatgaactaatttaattctgttctaaagagagaacctactttctcttggatatataaataaaataaataa

SEQ ID NO: 101915 - DNA, 255 bp, Homo Sapiens
ccatactacagcagattaaacttcttatgaggcttatatttagctaatgttttcaaagttttactttctaaactcaatatggttttttaataattggctctttagtttttccacccattttattgtgaaaatgttcaaacagagaaaactcaagaagaatattaaagtattcttacatcctctacctagattttaatagttgttaattagacccttacttagtttcaagaaaacatttattaatggatctctccc

SEQ ID NO: 101916 - DNA, 469 bp, Homo Sapiens
  misc_feature (36)..(36): n is a, c, g, or t
aaggcattctaaacccaatgtgtgcaaaacccagcncagggtcttccctcattcccacactcagacttgttaggaataacattcaaaatcctaaggaaattgaacactcgaacaaaggagtcttagcaaagcaattttacttctgcgcagaggggtgcctccttggccagtcgccatgagagcacacctgaacaaaggggcacgagagcctttattcctgacacaagtcctgcccctgtaccctttccacattggctggggttgggtcgtacaatctaaatgaatcccggttggctaaacatttgatttttttagataaggtgggcatgtaaaagaaagcagagaagaaaggggaaggggtgtctgtaatgagctagaaagttagtcctctttccgaataaggagaggaacgtgagctggtaatggtaattgcctggtactgtggcgtgcctgtgtatctaacaaaggc

SEQ ID NO: 101917 - DNA, 335 bp, Homo Sapiens
  misc_feature (234)..(234): n is a, c, g, or t
tgagccaccgtgcccggccgaatgtagtttctttgaatgaaaatagtcaatgctttgaacatcatttgaaagtaatgaatttaaggagaggacacatgtatgaaggaacagtgattctgggcacacagctagctaaacctgagttatttcaccggaaatttacctttagtgagagcaactagctgtaatgcaaaacaaatgaaatcctccaaatcacctagattccctagaatntatcatctaaccccaattcctgttatttcttcaaatgatatttgtgaacatcaagtcaataaatggcttcatttggaacaaatcacttaaaaaaagatgag

SEQ ID NO: 101918 - DNA, 836 bp, Homo Sapiens
  misc_feature (452)..(460): n is a, c, g, or t
agctggcactcgagggggcaggttagagccagcaggtccttggcactactgcatgccagaggccctctgccgggccccgggctagcctccaagtcctagactgcccatactttcttagagaagaaaccacatttaagtcaggcctgccccatggtcagtggcagagtccagcaatctctaggttggaagatgtttgagtctcaggccccaaggactcctctggacaggcatccgggactcttcctgtccccctgccccctagcccaggtccctccacttctcgctatccccacagctatacctggctctggccactcacagctctcacctggctgactttagcggccggcttccctgggctccctacacccatctccgcccttcctgttcagctctatgcagcagccagcagaccccatttaaaccattctgtccatcatgcttctgccccnnnnnnnnntcccccagtggcttcactgagtgaagctaagcttgtcacattgccctggggcagtcctgctgtagaccgggccctgccacaagtctcacccggtgccactcctctccctgacaccctccagctacatctacctttggtctgtttctcagtcaagcctctccaaggggccttctctgagtgctagatcagccttccccaatcacatgaccctcatcactctctgacagggtctcagggctctaaatgtgagcaccgggagggcagagcccttgcattctgtttggcacacagcaggtgcttggtaaccacagaccgaatgacaaaaggaacagcatccacccacccaagtccttgtgggctgacggtgccgagctcc

SEQ ID NO: 101919 - DNA, 488 bp, Homo Sapiens
tagatctaggtagtgggtagcagtctcttctctttagatctttcccatttgaaataatagtaatgattctagaaggggtgttttaacaatatcatgtgtactgtgtgcctcaacgtaccgtgataagaagacctaaatgcattcagattagtccgttgtagggacttcctgttaagtaagcaacctgtacacttgtaggttcttgataggtaaaaacattcatctgcattttggaatcatttttgaaacccatgaacaattatgtggccttgacaaatgcgcctctaaccccctgattcatccgagcagacctgttgatcctttcattatgtctgattattcaactgaataatctaatctgttgctttagtcacaggggactctcttattccctgcagtaaattttcttggaaagttaaggcaccttctccttcttagaaacaatgtatagttcagctgcagaattctttccaaaacacagactaatt

SEQ ID NO: 101920 - DNA, 533 bp, Homo Sapiens
cagtctagaggcagaatcagaaggcttggttgaacatatcgctttccctttttcctctccctccgcccctcccagtacagtccatctttcaatgttgcagcctggttgagaaggagagaaaaaggtggcaggaatttccaggagatccccaagaatgctgccttgtctgtggacaaagatggaccatgtgcccttcggaattagggatagaaacaaatattgtgtgctcttaacgattaagctgtgttatggtgggttttcaggtttttaccttttttctttacccctttactctgcaagaatggggaaagaatgcatactgcgaaaatgagtcttttaaattctgtctgcctactagttttaagtatatggtatgttgtaaaatttccaatgatgagagacagcacaataaatgtaccttatctccttaggctgaaggccataactacatagtggagtaatttaagaactctcttgccttcaccaacccaaaaggttgctttttgatagcaactggctaaaaaaattttaaa

SEQ ID NO: 101921 - DNA, 418 bp, Homo Sapiens
  misc_feature (234)..(263): n is a, c, g, or t
tggaccctgactgatacactcttaaaacgagaaaagggtaccgatttataaagttcgtgaattaaaaactacaccagtcatggaaactcaatgacatcactcaaagaaaattcacaactctagccttgagttagctccctcgatagtatgatgaggtcatgcagatagaatcatacagttattaacaaaagtagttgatgttaaccgagtaatcagttttatctgtgttccttnnnnnnnnnnnnnnnnnnnnnnnnnnnnnncgtgagcaagtgagtgcacatactattgttaaagtcttctctctaaagttttaatatctgatataccataaacacccagataaagaactttagagaaactggttaaaaagatttaaaattcccaactgtaataaatccctaaaatgaataccaaa

SEQ ID NO: 101922 - DNA, 459 bp, Homo Sapiens
cgcgcggcagggaagacaagcaagccctgcgcctatctgcagcttgatcttctggtactgagccatggagctccttcttggaggcgtgaaatgctccccatccttcaggagacaacagcaacagcaagccactccttgtccagtcagcaatgctggaatacctctgcagctcacagtccaacgcccacagccttcgagtcagtttcttgatattcggcaatgcactggactcctgatcccatcagctcctggctgaaggtgggccaacccttccccatttccttcaatttaaacatttcctcatgtccctcagtgccaagccctgtgctgggagctgaggacccagaggtgagctagatctaaaatctgacctcaaggagctaacagtctgagaggaagactggagtggataaaaataccttggtaatttatcacttaataaatatccaataaatgcta

SEQ ID NO: 101923 - DNA, 618 bp, Homo Sapiens
taagcctaggaagtggcatgtcagaagtcaacaaagatgtgataaacttaaagtgctaaaacagaaggcacttcacaaaatctgttcactgattctgaagtgttcttccctaatactttctttacttcacaaaacttcaaccataaaaacaaagggctctgattgctttaggggataagtgatttaatatccacaaacgtccccactcccaaaagtaactatattctggatttcaacttttcttctaattgtgaatccttctgttttttcttcttaaggaggaaagttaaaggacactacaggtcatcaaaaacaagttggccaaggactcattacttgtcttatatttttactgccactaaactgcctgtatttctgtatgtccttctatccaaacagacgttcactgccacttgtaaagtgaaggatgtaaacgaggatatataactgtttcagtgaacagattttgtgaagtgccttctgttttagcactttaagtttatcacattttgttgacttctgacattccactttcctaggttataggaaagatctgtttatgtagtttgtttttaaaatgtgccaatgcctgtacattaacaagatttttaaaaataa

SEQ ID NO: 101924 - DNA, 601 bp, Homo Sapiens
agcctcacttttattcaagtgcgcaggtaattacttggttgaaacaatagtgtttctgtgccacagagcacaggggatcaatttttatgtgccgttgccttgactataaagtagcttttgtgtggcacttctcccactgcatcgtaatgggctcagttagatggatcagctacagagtgtatgagctccaggtaaatgaatgagtttaccagcagaacataatcctttggcattgctcatctgcgactgaagaatgttttcaaagtgattattttattcttgtcaaaaccaatatcaagtcaccctttctgacaataattaaccaacaggtttggttgcttcttaaagttgcttcttgtaaatgtcagaatatctgagtgtgagtcctaccagtcactagtgtgatttttgaaaaattacttaaatgtcctgattctcactaactgcatttatgaaataaggatatcaacatctacattacagtactgtgcaggtcaaatgacctaaagtatatgaaagttcattgtaaactgtaaaatgcaatgcaaaaaccactgttcttattattactgttattataataaagttatgttattaacac

SEQ ID NO: 101925 - DNA, 496 bp, Homo Sapiens
  misc_feature (76)..(177): n is a, c, g, or t
tgggctcaagggatcctcccacctcagccacctgagtagctgagaataaaggtgtgtgccaccatgcccaggtaannnnnnnnnnnnnnnnnnnnnnnnnnnnnnnnnnnnnnnnnnnnnnnnnnnnnnnnnnnnnnnnnnnnnnnnnnnnnnnnnnnnnnnnnnnnnnnnnnnnnntgaaccactgcacccagaggcagtaacatttctgtactaattggaaatgactagaaaatcacctttcaggcaatgtttcttcttgctttcctctaaaaaggaaatatttctttcctatcccaacatttatatcccagcccagccttggggatcctgggtgaataggaataggacttgcctgccagtgggtggagcactccaggtgagcctctggcacaggcctggccaaacacagcctttactaagttaagcagctacagtttagtaccagaaaagaaattcaccttttaaatagcagaaaatccctgggtggtagcaa

SEQ ID NO: 101926 - DNA, 225 bp, Homo Sapiens
gtgtgagccaccgggttcctggccgaatcaggtgatttcttaggccctttctaaatacaaggtttaagtgttttgaggcagccgacagctatacctttaagtctcttgcttctctaagaataagacattttggatcatttgttctaccataacgtaatgaatacaagttgggagcattttgctcttctgttaagcacagttggccttcctgtccaaggattgttg

SEQ ID NO: 101927 - DNA, 181 bp, Homo Sapiens
agaaccatgattgcaactgacatttccaaataaaccatgactcctcccccagcaacgggtagcacttacatggaccaaaagtatgaagcctgactgggagccaggcataaccttctgtgtcaaggacatcatggaagggaaaggaacagttctgaaccaatcattccgcatgaacagaaat

SEQ ID NO: 101928 - DNA, 507 bp, Homo Sapiens
aagaaaaaaatgaactgataagggatcttgaaacccaaatagaatgtttgatgagtgatcaagaatgtgtgaagagaaatagagaagaagaaatagagcagctcaatgaagtgattgaaaaacttcaacaggaattggcaaatattggacagaagacatcaatgaatgctcattccctctcagaagaagcagacagtttaaaacatcaattggatgtggttatagctgaaaagctggccttggaacagcaagtagaaaccgctaatgaagaaatgaccttcatgaaaaatgtacttaaagaaaccaattttaaaatgaatcagctaacaggaattattcagcttaaagagagaacgtgaaagtgtggaaaagattcaaagcataccagagaatagtgttaacgtggctatagatcatctgagcaaagacaaacctgaactagaagtagtccttacagaggatgctcttaaatccctagaaaatcagacatacttcaaatcttttgaa

SEQ ID NO: 101929 - DNA, 422 bp, Homo Sapiens
tgcttcactttgcctgcggacccccttctgatgaactccactcaggccttgttcctggagccctcttcctctggctgcaatccagagcaagttgctgtctggacttgttgaaaagctgttgtcctgagacttctcttcaaattctaaggaaaaatttactttttctcaggattctaaacccaatcaaataatcaagtgtaaaggcaaaatagatacaaaatgtaccttgcaaatactctaggaagctactggaagaaaggcttcagcaaataaaggaagtgtatgaagaaagaaagaagcatggcacattgctaccttaactaataaaaatctctgaactttccggtcccatctgaggaagcaaaaatgctacttgctgcaaaaacgacaccatttatcacactgcaacaaaagcaatgtat

SEQ ID NO: 101930 - DNA, 518 bp, Homo Sapiens
atcggcgcgagacaggtctacaatgctcagacaaagagctaggcttaagcatttggcattaggcgctggaaaattcagagaattaaaagtatcttctacctatgactccttcatattaggaaagaagactgatattctttagtatgcatagatctaatgaaacttaatggctcagataaataaaataaaaacaagatcataagccaatttccttccagaagacctaaaaaactccaccaaaattaaagaatggccatgctgttaaaattccgttgtctacaaacactcattgtttcaaaaacattgatcagaattgtacttggccaatgttactggaaacattttttcaagacaaatcagggtttaagaggcttctaataagttagttgtagtatatgaattgtttaagcccttattaattataaggtaacattaggttggtttattttcagagtcatcaagaatgcttatggaaagttgagatttgcataagcattatatgatgactctgaaaaaaa

SEQ ID NO: 101931 - DNA, 474 bp, Homo Sapiens
  misc_feature (304)..(344): n is a, c, g, or t
gctccggagagcagcaggaagcactccaggccaccagtgcctgtcacctctttcccctttgcccctgcttcatcccagctctgtgtgtggaggacaaagcttcttcctgcgtggctccaggaaaagatgtggctcacgtaggtggcacctgccaatagctttgtcaatcacagccccataggaacgtctggaattgcttgggagttggggagaactgtcaagaagagtgaagagagtgccaaagcggagatctgttcacctgggggccatggaggggggacccactaaagatcaagatcaaagnnnnnnnnnnnnnnnnnnnnnnnnnnnnnnnnnnnnnnnnnaggagagaattgctcatggctccagaactggtggcaagtttctctggactcttaggtttatttttaatatgaaatataaaaacagtttcaaatatcttattgagggagaagtaaaaacttatttaaacaa

SEQ ID NO: 101932 - DNA, 181 bp, Homo Sapiens
cactcaacaaatatttatcgagcacctcttctgtgccagacaagtttacacatgggacacagcagtgaacaagacaaaggacaaaggtccctgccccaaggagcttacattctattggagaggggcaaacaataaacaagtaaattatgaagtattttagacggtgataagtactactggc

SEQ ID NO: 101933 - DNA, 435 bp, Homo Sapiens
  misc_feature (68)..(68): n is a, c, g, or t
  misc_feature (91)..(136): n is a, c, g, or t
ccagtgtgacgtgtgaacaggtccctgtgtcccagcagcaagcaggtcctggtccacaccggacgacntgaaggactgccttctgaaagtnnnnnnnnnnnnnnnnnnnnnnnnnnnnnnnnnnnnnnnnnnnnnntgctggacttctgactttttttatggctttgcccagcaaggaagtctggaattcacattaacataaactataaacgcagaatcagttgatgaggacagttagtgaggagatggtcttttggggataaaatctggcaggattgctgacctggactctgtcatctaaagttctcacacaaatgaccattacgttgtgatgcatgaaacaagtaacttaatatgtatttttgtctgagtataaaatcattgtgttcactttggaaaatatagaaaataaaaataaaatatactttaacagca

SEQ ID NO: 101934 - DNA, 468 bp, Homo Sapiens
  misc_feature (73)..(73): n is a, c, g, or t
cctccccaatacctctccctgaaaggtgagctgctattttaggaaactggaccagacaccaacttgggggctntaagtcaaacaacctcaaacccatctcttcctgtgtaggggtgcaagcctctgaagctctcactcccacccttagtctgcatggaaaatgtactgtgatccccctgcccccaactgccctcgcctttggtgtgagatgttccttctttcggagttcagcctgagtccctctcccctctgcaagccaacccccagccagcaataagggtccaagccagggcctcctctccacactccctgtctccatcctacactaccctagggaatacctggattccccattctatccacatactgtagcattcattctccatctctctcacctcacctgtggtggtttatgggtgtgatggggtttttaagattattataaaccagtaaaaataagaaaacctc

SEQ ID NO: 101935 - DNA, 394 bp, Homo Sapiens
cgtacttcagtgttcattattaaaactacgccattactatatcataaaaatctgggatggatgttccagccatcataaggtccaaaagaaaagagaaagtgttattttcctgttagtgacatgtagtccctttgttctagtaggaaaaaaggtgcctagaggtagtatatagagtaaatattgttcctttagcctacttcctgcagcttccaatttatccaaggaaatgtctacaacaattttgttcaaaagtctgttctagtcaatagcaggagaagtccacgttattgggctgattttgcttacatcagcaagagaaatgtcacgtgatactcaggccgcgctttctcttccatcacaccatcttcaaggaatgtcaataaactcactttgg

SEQ ID NO: 101936 - DNA, 437 bp, Homo Sapiens
  misc_feature (73)..(133): n is a, c, g, or t
cggcaaagttagaacacacaaaagatagtatagttccttacccatccaccacttggttttgaggagaaaaggnnnnnnnnnnnnnnnnnnnnnnnnnnnnnnnnnnnnnnnnnnnnnnnnnnnnnnnnnnnnnggtgctctggagtactatgcacctgtttagaagtggggaagtagcacaaacactagcaaaagaagaaccaccatggagttcctccttgcacatctctctcccctcctgaaggcctagggtgagcccacagcattgttccagcagtgagggagtcttcactgccccctgagactctctcacggctcttaagatacctccctgaagtccctccaaagaattcaatgtgcccctagtctaaatcagtttcctccatcataaatactcatagatgatgcaacaataaaacgttaataacgataatggc

SEQ ID NO: 101937 - DNA, 469 bp, Homo Sapiens
  misc_feature (147)..(180): n is a, c, g, or t
aaaaactataatcccatagagacatatgtgacaagtctgacaaatggacaaaggaatgacgcttgttctcatttagaaaaagcttgctgatgctggatgtgtgtcaatgcacaaagctgtggctcgaatagccaaggacatagcatnnnnnnnnnnnnnnnnnnnnnnnnnnnnnnnnnnaatagatgagagcttcctatgttgctcagtctagtctcaaacacctgacctcgccttcttatgtgccaggacaacaggcctgagtcaccgcgcctcctgacatagcatctttcgtacaggatttagggaagcatgagagcactggaaataaaacctaaatggtgggtgagctataggtaaacactgaaatatcatgatcttattaaaaagaaaatagtgaacccaaagaacctgatatacaagagaaaatgaaccaggctgccaaaatcctctgtttcaacaacagaag

SEQ ID NO: 101938 - DNA, 534 bp, Homo Sapiens
  misc_feature (319)..(418): n is a, c, g, or t
  misc_feature (443)..(444): n is a, c, g, or t
tcagactctgatcttagaataagctcatgagaagtctcatttccaagctggagatcatttccagtttgaatgaacaattcttctttttggcttgggtgaacgtggggataggtgaaagctgagctgcacatccttcagaggtcacaatgaaaagtcagtctttattctagcagggcttggtcatctggaatagctggtacataggtggcagctccatgccctatctcatactttaaacaacatcaccaatatctttttccgaaataagcttgagttgtatatgtttattataggagagaaaagtttgccaagtgtcttnnnnnnnnnnnnnnnnnnnnnnnnnnnnnnnnnnnnnnnnnnnnnnnnnnnnnnnnnnnnnnnnnnnnnnnnnnnnnnnnnnnnnnnnnnnnnnnnnnnnaagaaatatgagagcccagagtgannttatatgacctgccacaaggatggtcaacgtcgttaggaccagggcagaagatcttgaaataaaaaggtgcaggtcttactgacttccag

SEQ ID NO: 101939 - DNA, 432 bp, Homo Sapiens
tttcttattaacctctttcatcccatttcagcagctgttcctatgttggtcagaagtctctaacctccaagccagatgaagtcctccccttcctatctcattatagtcattctccacatactctttgagcatgaatagttcaggatgcctttttcccaattcagttttaaaatagtaattccgtttggagatggaacagacattgaggcttgtaattgtttacctgagatcttagtacccttccttcctctccccgtttccctactatagttgatccagcatccagatgtggttaactgattccaattcctgaagctgtgacattctctgcatacctggaagctcttaatgagggagtctataaaagctgtggggagaactagcttcctcagctgtaaatctgtacttttttatggttctctaggattattc

SEQ ID NO: 101940 - DNA, 568 bp, Homo Sapiens
ataaggtctacacctttttaagtatattatttctgacatcgtaagaaataatttagttccttattctcatttatcttttatataatgtactgtaatattcaggtttaaagtaaaataagtatatgaattatattttggtaaaactgtttcatgaccagcttgattaatgtatattaacataccagacattgacagcgaacatttcatgaaatcagttatttacttactaaaacaatgagttttagcttgaaagttactgctgctctattattaacaaaactaagttttaaaaattaattttaattctactgaagtttaatttctggttaaaggtatagtggatgctatttatgatccaagtttttacatcacatccattgatctgcctatcccttctttttactccaaagaggagatgatagaataatacattcagtatactaccaagaagcaaagttataatgtgtttcattttgctattggaattttttattgtaacattgtatgataacctgaaatgtttacttgtgccttttctttaaacaattaaagttttccattttataag

SEQ ID NO: 101941 - DNA, 487 bp, Homo Sapiens
aaggtccaggagatggacacatctcagctgaatcctgaagaataactaaaagttaaccaaaccaaagtggacaggaggagggatgggaggacaatctaaacagaggaaaggacctgcctcaagatgccaaggagacagcatgggcctttccaagcagatgcaagggttgaggaggttaggagactgagcaacaaagacatggatgttgaagggtacactggttccattctttcgtgccacccaagcatcctctcaataagctcgcctcccactgcacctactcttaaatgaatttgtttgacctgtggtatttcatctgcaatcacaagagactggactaacacaatgtgttcagtcaatatttacaactcgaactaaatggacctggaacttccgggaaggtagaagaaggcacagaagtagtcatcagcttactgcgaggtaagaggaggaagctacagttgagttgaggaggctttgcctggcc

SEQ ID NO: 101942 - DNA, 325 bp, Homo Sapiens
catcatagtgggagatctaaatacacctttctaaggaactgatgaatgaaggaaacatagaagtctataaagacatagaaaatttaccaacaagcttacttaatgaccatatataatataattgtgaaatacagattcttttcaactgcacacatggaatatttatgagagtcttaaagcaagccaacaaattttagattagtaacgtagaaataatcttctttaaccgtaaagcaattaattcaggaatcaatagcgagagataaccagaaaaaccctatactttcaggaattttagaatatactgctagatacattatgagtc

SEQ ID NO: 101943 - DNA, 524 bp, Homo Sapiens
agagagcagtttgagatcaccaatatttccgaggatgtatggcacatcctggaattcgactatagcaggctccccaaacaaagcatcgggcagttccatgagggggatgcctatgtggtcaagtggaagttcatggtgagcacggcaggttagtgagcgctagtggttttttccagctgaaaaaggatggcccggcagccatgcgggagccagcttctccaatgaaccctgtcatgccctatgctgcgtccgtgcagtggggcactgcagtcatgcgcctttgagagccacctagtaaactacagagatgaaaagaagtaaggccgaattcctaacaacctagcattgccgaggccgctggtgttcacctgtagaaattgaacttgcacatcaaggcttctcagctccctctctccctcccctgcccctgtccccagagcttttctgggaaagagatgattggcctctaaatgatatttcccatgtggctgtgtgctgcttcaattaaagtcgttaagtacaaa

SEQ ID NO: 101944 - DNA, 481 bp, Homo Sapiens
ggcggtggcgctcctggaaggccctagcttccgatttgttccaaagtggagcacaaaaaggcccgatcctgcgaactttgaaaaggcctctcttcactcttttctagaaattaagaaagagcagaagttgctgggcttcctctggctgcgggccaagcgtggggcgacggccgaggtggccgttggcgcacgtggggcatttcgcttggaaaggctcagcagcctgtgtggcgtctgcggtggcaggtgcgagcctgtgcccatgactcacccactagcaggtggccctggctttccaaactaaacacttcctggggtttccagggtagtacaatttcatgtactttcatgcttttcaacacaggcaatttttgaattgtataattagtcgtaaaaaaactttttaaatctattgcataaataggaaataggggaacataaaactcagttttacctcgtagagtcaattacatttaatatt

SEQ ID NO: 101945 - DNA, 598 bp, Homo Sapiens
ggcgcgcccaccccccgcgccggtaaaatcaaaacccaatcgtggcaggcagcagcaaattaactgaacccaccttctctcccgagcaccagagcctgagtgaacaacttgccgcagaagagccttctctagtgtcctccgccgtctcaccagagtagggatgctcttccgcttctccttagtgctgcctccaaaccaatgcaccatcaccaaccaagtctcctcacggaagaacgcgtttgtgaagaagacattctctctggatgaagcaactacagaagtgcaggcaagacattgtgctgccgtcgctgagtgtggcttaaataaaaaacatgtttatgtgggagagaatgtgtgggggttgctttcgcattatggaattcttaaaattgttgaaccgggaagatgttattcagaaacccctggtggcttcagcttgctttttgtgtatttcaggtttcttttttcccccatttttaattatctctggaaaaactcaagagtcctcccctgctcctaaaatagttataaaattaatgtgctgtactcaagtcgttactccacgtaaaagagtaaaagactcccatattaaaaaaaa

SEQ ID NO: 101946 - DNA, 475 bp, Homo Sapiens
ccgtctatccagaccagacttcggtagatgcctttgttagatctatcacatgtaaacgagcttgtatctccttccctgtgccacgagagagattggctttttattccagtctaggcagagacagaagaatgttgaataagagcacgattagagtcctgtctggttatctgttgcccaagaaaagaactctgctgtccaggcactgcttggcttactatcccagcaaagactgcagttttgtggacttttgaccaccttgggctggcactcttagcacacctgagacagatttaagcctccctaagagactgaagagaggaacaggtgtcagatactcataggcactgagatctacaaatgggaagcttgtgagtggcccatctttgttggcctacgaactttggtttgatgccagtcaggtgccacatgagaacctttgctgagatgcaaataaagtaagagaatgttttcctgg

SEQ ID NO: 101947 - DNA, 460 bp, Homo Sapiens
agtatcaaatattcttataagcgtcccctttgaaaaacagtgaagtgtttcattatcaaagattcaaaactttttcgttagtttttgaaatgactcacattcacaaatccattagtccacacaagcctttctcaaactcacccacatcatctactacttaactttctcctccaactgccagcacacagttgtgcccctgagaacgagttggttggtggctcctggtcccacggcactgggcacaagtcaagagaggcttccagagacaacctcctgaccgggcagggtggactgaccctggatgcccgcatccctggctgagacccaggaggaacacccaggcccaggctccctgctcctgctacacagggagctcatctgagaagcactgtccgaatcctaagtccctcagatagctaggaaaagcagcacgggaatccggccatcaaaaaggtgaggc

SEQ ID NO: 101948 - DNA, 557 bp, Homo Sapiens
  misc_feature (476)..(476): n is a, c, g, or t
ctggtagcagttctctatagaacaaatctaaaacacaaccaccatagtaatgtaaggagagcttcagtggcacctcaaaacccacccttcgagatctgtccaaagacagtctcagaaagctgcactgcccaccggctcagctttcattcaaaaaggcttccaaggccaattctgtcttgaagtcaatgcatgtatttactgtttgacagtaaacccgctctgccttctccacgtccaaggctgtgcattcgtctaattagcgtcgtgtatgttttccttttattttttccaataaaaaagcagtgggatgaaaattgctttgatatatagcaggtaacattgaagctattccatagcacttaactgtagtgaatactgtgtcaccaattttgaaatcaatttaatgtttaatgcaaatccattacatggtgctattataggctgacaaaatgatttacacaaatgtgacaacttgngctcaattcactctgctttccaacagtgtaaatgcatagcagtgtttatctgcatgagaactatgcactaatctatctgaa

SEQ ID NO: 101949 - DNA, 354 bp, Homo Sapiens
  misc_feature (123)..(123): n is a, c, g, or t
aacatagatatgtaaactacagtactttatatatctatgttcttaataaaaataaaatccacaaatcttaaaaaggaactttaaatgcagggctatattgaagtggtaaactgcaacacaaanctggcgcaacataggtaaatgaataccaatctcactctatgtgatgcaagcatgctactttcccactaatttaaattactttcaaccactatgagccagaatgcatgcctgaaccttaaactgcactttaaaaagtaacatcttggcctagaaattaaatctaatgaagtataatcatcaaattatatccgctacattaatgttcaatgcaaaattaagatgtcatcttta

SEQ ID NO: 101950 - DNA, 638 bp, Homo Sapiens
  misc_feature (333)..(342): n is a, c, g, or t
atgtagtaactattgcattggaggcaatactgtgattttctttcagtgtgtgtcttattgagccagacattgactcattatgagttgagactttaggctaccagatccaaaacgcaataacattggtattattaagcacttgaggctgtcttttgttaatccagaatgtgcttatttagtcagtgagtttttcctttcttcctagacctatatcttgctcctagagttggttagggttacatcatcactgtcagcagtcctcattttatggttatttaggtgccacatctctcaattaccaaagagatcagtacaatgtgaggcaaagtaccnnnnnnnnnnaaaagctataagatatcagatttctttcatttagccaatattttggttttagagggaggtttttaaaaagtcaccgagaactgaggatcatgtgtgtatagaaacactgtaatctgatagatgagtcttaactggcaatgtctttgcttatcatttattctgacagtgatcacctgcattaattatcctaataggcgatatcaagtgtttatactgaggccataagtagaatgtttcattgagtttgttatcagggctgctgatcatgaaattaaactgtagttgtgcacaaaaaa

SEQ ID NO: 101951 - DNA, 459 bp, Homo Sapiens
cagtaacactaagaagtatagttaatgcatacacatgaagtgtgacaaaacttggcaaaaacactgcagaggaaagtttgattttttttaaccagcgaaaaatttatctcacttctaaagatcttatagatacttaaaaacaaaaatctcaaatctaaaacaataaccgataaagctttaaatgttgaattttaactctgaggatggggaaaaaatggatcttttctacataaagactcaattgttccctaatcttagagatggctattagagccaagtctgctgaaaacatcctgtttactctgcagagaaaaacaggcttggcgtaagcattttgctcagcatgcagacattttcattctgttttagagaagagtcaagatggcagaatataaaaaatgaaattaaaaagtacacagcatctgaggtcagaatggaatctggctgttaaccttacaa

SEQ ID NO: 101952 - DNA, 512 bp, Homo Sapiens
gacgcgccgggcaaactcgccgccctggtccactcgtccgacgcccctctcagttggacaatcgctttacggagcagctacggcgaaaatgttccttccctacccccattctcaccggttgccagcaacctggagacgccgtcctctctccggcgcagggagttccggaggatgcggggcggaaaagcaaaataccaccctctctcgaagctccgaggcaaatgacgataaacagcactctcgccccctcctaacactatgggagcccttgattcgatcccgaaggaggcgggcgggcgagagcctggatctacatggctctccagttcccttcgctctccgcaccccagcgcggacctcgccaaggctacgcggcgcgccaggagcccttaagagcttggagtggagcagggtgcgtgcggcggcgggtccgctcggtccatttctgggcgctgcaagatcagcagaaacctgagaaagcgcctggaataccgagcagcgattggcccacc

SEQ ID NO: 101953 - DNA, 419 bp, Homo Sapiens
agggctctatgtcatattgtatctctcctactgtggtagattgttgttcaaaactattctttatgtccacaggagaagtattcttccccaatccttgatttgatgttggctgtgtgacattttttggccaatggacattggtagatatgacacaaaaaggagctttaaatgtggttttgcatttggacaccccctttcttgattttgcattattacgaaaatggcttcccctgggtcactgttggttgttcatcctgggaatcagagtaaacacatgtggggtggacctgagtccaacccacaagaggcctagctgtacctgctgctagaagcagaaccactaagctaaacatatcctagatcagctgacacccagttgacttgcagacacccatgaaaaataaaaccttattatataa

SEQ ID NO: 101954 - DNA, 510 bp, Homo Sapiens
caagagaacttaattagaagtgaaccctgaaaatgtgactagattgctgctatctcatgatcaaatttaaatggatgaggagttgcttcatagggatgaacaaagaaagtggtttcttgagatgagatctactcctggtgaagatgctgcgaacaacgttgaaatgacaacaaaggacttaaactatgacagaaacttagttgataaagcagtggtagggtttgaaaggactgactccaattttgaaagaagttgtactgtgggtaaacagcattgcatgatacagagaaattgttcatggaaagaagagtacatggatgcagcaaacttcattgttgtcttattttaagaaattgccacagccactccatccttcagcaaccaccaccctggtctattagaaaccatcaatatcaaggcaagattctccaccaacaaaaagctatgactcactgatggctcagatgatcattagcatttttcagcaataaagtatttctacattaaaaa

SEQ ID NO: 101955 - DNA, 518 bp, Homo Sapiens
  misc_feature (174)..(220): n is a, c, g, or t
ctgtcgaagcaggctgctggagggaggagggaggcccatctgctcagtgagagcccaggaatctcgtctttcagtggctgcatcgttttcaccattagttgagggaatcgatctgtgccttcattctaagatgccaccgcattcggggcagagccggggccggaagccagggannnnnnnnnnnnnnnnnnnnnnnnnnnnnnnnnnnnnnnnnnnnnnntaagatggtttctgtgcagggaaccttggccggctctgcagctgcccgcctgcctggactctccgatatccactcctcagtgcacctgacacgcatggagccggtcctttcctggaagccagaccccaaacaaactggcttccccgaccagtccactcccatgtgggagcttatcctcagaggcactgggtcctctgcctccctcgggcggctcgcctgtttcaggcatggatgcctgggaagggagtgagacgcagcaatgacttgtgcttctgccgagaataaaaatcctgagcgt

SEQ ID NO: 101956 - DNA, 465 bp, Homo Sapiens
cagctctaaacagtgagctcgatgtgcaaaacgcagtccatgaaaaccagaaagagcgagtcttctgattggcagctgtggctgtctctatcatcgtgactgtggacttccctgctgttgccatcagggtgcacacaagcaggtgcagtgctgtcacctggctgaagacctgcagcctcggagcctctgggaggtccctttccacctcggtgaaacacagtcctccacatcaatttccaaacaatgaattaggtatggccattcatcactgttcagtagtttccccgtccaaaggctctcttccaaaactgcagtttgatctgtgttaataattgtggggttttagatgagaaaatggctataaagctgtggccctactttattttttaaaaatgacagaacttttgttcagatccaaaagacaaaattgcactttaatgttattagttacttgaaaacaaaaaa

SEQ ID NO: 101957 - DNA, 816 bp, Homo Sapiens
  misc_feature (44)..(52): n is a, c, g, or t
  misc_feature (634)..(645): n is a, c, g, or t
cctcccatgcgttgccgtgacaggtcttcccacaccctctttgnnnnnnnnntgtggctgcccccagagaattcccccttcctcttgaaacgcgacacaccctcgatggccaaattttgcgtgtcatcccactgggaagccgattcaccaccccctctcacttgaagacccgccccgaacactaacctggagggtttctaccaaggcccagtggacccctccccactttccagaggaagactgagtgtatgaacccctcactcagggatggacttctaaaaataccttaaaaatcagaagcccccttgtactgtcccgtgctataaacctgcctgaaacagaacgaacataactgaaaacacacccctgggttacggttgaaaaatgcaaccccacccaaaagcgtgcaagaaaaaaaccccacagcctaaatctcacacagcttctcagcaggagttggattaaactgagaaaataatcttaatctcacgggctaatgcacgcaagatgggaaaactttaaagcaaactctgcagtgaaaagtgtttcccccactcccttgggcgagggaagggagaagaagatagataatgaggagaattataaggccctggattcaggtttctgaaactgnnnnnnnnnnnncaaccctcggaggacaatcagctcttcctgaatccaaaaaagcacatcaaaaatgcccaatgacagaccacagccaaatatggcagggcaaactgatttggttctgcgatttccattctcctctccacatccgaaaaatgccttcagctacagctaaaaaataataataat

SEQ ID NO: 101958 - DNA, 298 bp, Homo Sapiens
cagatccctaattcatgtgtttctgggtgttgctgtggctggctgactaaaacagttaaggaaacaactcgtactgaacccatcaacactacttattcttacactgacttccaaaaggcagttaacaaactcctaactgcatcactgtaaagatctaccatttgctctgatatctctgatgttgctaattgagaaagtggtacaaagttagtcattacacagcccactaatgccttctcagtcaaactctcttatgccctggcaagccaatgaggataccctttgacaaaccctgtgg

SEQ ID NO: 101959 - DNA, 546 bp, Homo Sapiens
agagctgcccattttctctttgttctaatagggaagcaattactgatagaaatgtgagattaaaaatagggtcctccctgctgctccaaacaaatgcctaaacacagtatgtatctcagtcctctgttcccagagattccaccctagcccaggaaagaactggcctgtgtaaagcaaaacccaagtcatccccctccagaaatttctctggcagccaagcctgaccctaagggttccactttgctttaaaagctaggagtggcctctagagccaggaacacattaatacaacagttcaacctcagcaccaagtcaggtacgaagcgcttgatacgtggaatttttctctatatcaagtttaaatttctggaaatagactttggttgctaatgacaattacagttataccatagtctgtaatttgagaaaaggtgaaatgtatttaatatatatttagttttaataaaaagataaaattattacagaaataattgagagagagaaaatctattataatttatttgaaaaataaaacattttatccag

SEQ ID NO: 101960 - DNA, 901 bp, Homo Sapiens
ttgaatctcattattatcagacacattcttcaaaacagattaatatatttttttggcttgtgcaatggctttttattagtagtgatagtattttggaagataacacatgtctttctttacatcatatctaccctttccgcataattcccttgtgactttggccacctgtttttgatactgaattgggtctcattttcatcatatacaatttcagattttaaaattgacttaaacttagaaagttagaccagtctttttgttaaatatgactcagctaatttataaatgtggtaaaagaagagactttgttatgtaaagcatataaatactttactttataaataagaccatacactttcaagtagaaaaaaataggaaattcagcaccaaggtgcacttttcatgtgcaagtcactttgcgctgcgtgattttagtaattcagcgtgtaatgtcacaacccttaccactgtgaaatttccacaaatcccaagcatgacaaaggtcgtaatagtttaggaccatatgggactaagcattataagaaatcaaaatgtgttatcacatatttgaacatatcacatattagaacatcaatgggatatgccagctatacgtcagctatggaactaaggagtctaatttatcacactgaaattctattctatttgaagatacctagcgaaactgtagagatgtttaaagtggattttccctatgaaagagtcttcataaatctcacagattttgcaatatttaaaacatgaactagaaaacccatgaaaatatataaagcctttaggtataataaccatatcccttgactgatgtattttagtacatggtatcacaaactttccacaaaataaaacatgagatgtaataaatgtttaatatgtatct

SEQ ID NO: 101961 - DNA, 389 bp, Homo Sapiens
aatcaaagacaaacctaatcaatgaattcagtacagataaaatttgtagaatatgatttttattaggactgttaagtcacagaagggttaaatagattggtagagcaaaatatgtcactgttatcataaatattcattgtaatgaaagggactctcagaactataaattagtacgcttcatttctacaccaagcaagctcacatattatttaataaaaggataatgtccctaaatttaagtaggtctaacctgttaaacaaagagaccacatagtgtacgaagagatgtcaggagattaaataagtgtgtggataaaggtaagccagtggaggtaatctgttttgatggtcaaaaatactttagcatttcatagcaaaaacaattgaaa

SEQ ID NO: 101962 - DNA, 440 bp, Homo Sapiens
ctgatgacacatctgaggaacttgttcatgggaaacatggaaaaagcactgccctcagattgggaaattctgactgtttctgaactgtcttcttttgcaagactgaacatagtttgggccattggtgcatgcacatatattaacttgtgactaaagacagacattgcttaaacctgttccaattttaacttttactgtagccctttgattccagagagggagctttgctggcaaaagcagtttttgcactagaaatttttgctgttcccaatctaaacttttctggtattgtatatatgcactttaatatcttatttatgccttgctggagttttgttttgttgctccaatttttaacttgggggtgaaagatttaagaactcagcctcactagatcaacggaccaaataaacaattcctgaagacagtttttcatagtg

SEQ ID NO: 101963 - DNA, 456 bp, Homo Sapiens
tacagggggactctgtgaagagtccagttccctatttttaatcaggttcatttttcacctgcttagaaagtggaacatctcctgaaaggtgacaagtcgtgatcaaaggcaagtctccaggcagagagttggcaggtttccgaagcaaaggttacttagaagtggaggctccactgccagcttccccccgctgcaaaatctgacactcctcaccctcagggttcagcaagattctcggaaaggccttttctgattctaggaggtgctgcagcaggagctgactcggccatttcctggcctctttagttggaagatgacagaaaggcggaagcagggactgctattgtgaggcccatggcagccttcctgtaaaacaaattggcaaattgtcaccttcagatggaccacagctggccctctgaacagccctccttggcctttccagagtaaaaaaga

SEQ ID NO: 101964 - DNA, 368 bp, Homo Sapiens
ggaaaatactgttaagtaacagcagtaagagccgtgaaaatctaaagacaactggaaccagggagaaggcagcaaaggagtcccaaggctctggccactcctttagccacaccataaaggctttcctgattctgcccttttgctgagccttaggtccccactctagggacaaaaggagtgttccagataaaggtcaagtcttaccagggacaaaaagtgcctaactgggaatggtggtgcttgcaacactggtgatgtcgccaagaatagtctgaagactaaactcactccccagacttcagcaccacccaccaaaactgcctggtacactttccctctgaagtaggatcaataatttagccaaataa

SEQ ID NO: 101965 - DNA, 286 bp, Homo Sapiens
  misc_feature (206)..(228): n is a, c, g, or t
taacctaagcagacagttctgtgaatgcgtgaggaccacctgaagtctgcagccacggtggaggtcaccaaagggtgaactgagagagaagagggaattcacttgcccaaaggtttacagatgcccaggcaaactgatttttccatccagaattatcttgttctttaactctcctcaattgtcatatataaacatgaatttatatnnnnnnnnnnnnnnnnnnnnnnnccgcgtatgcggccgcaagcttattccctttcagtgagggttaattttagcttggcac

SEQ ID NO: 101966 - DNA, 429 bp, Homo Sapiens
ttagcgagcactcttgttcctaagaatgagtgcttcttttctcttgagctatttcaaaatgaactagtttctttacaaaccacacaaggactgatgatcatttcagataagaggttcacagtacaaaccattgcacaggaagagaaacccttgtgcaaggtagcctgagagtccagcagacaccggcatgaaatcaacaaccaatattgacctcagcagagctttctgtagctacagtcagctatctaactatgaaaacagcaaaggatttgaaaaatacctctctaggtatttgaaatcacttactgtttgcatgtcggggtggggggaaatgtgagtaaaaatgaggctgggatgagcttaccatctaaaagacactcattggagaaatgatgactccaaaaaatctctttgattcagagatttact

SEQ ID NO: 101967 - DNA, 179 bp, Homo Sapiens
cctctattctctttatctgcaacacctttcttctgagaagttactgtttctcactcagaaaagcctcaccctttcctgtgagcctaagaaataattaaaagttagaatttaaaaggctcccttaaagtaaaaattttaagtacaaaaagatattacatcaagtaagtaaaaacttttaa

SEQ ID NO: 101968 - DNA, 563 bp, Homo Sapiens
tttcatttattaatcttttatttttcattacattttagtacagcaaagcaaatacaggtaaacatcagtattcttcatacaatagcagacagaaagggaagccagccacaatttagagtgccttttcagttgttgttatatttgtttgttagtttatcactttaagctagattattttactggcgaatttttttcaagctttcaaggaaaagcctatatctatagctatatgctatattcttttctagataatgcaacaagatggaaagatttccaaaacattttatagagctatcaaaactcataccaaaatacaacagagacagcaagtggtcaatcacatttacccaatcagacaatatattaaaacagttgaaacatttccagacaccacaccagaactaaatatgaaaagacataaatataactggaacacaaataccaaatacaatatgtacccacccccaccccccaatacatgagaactgaggctcaaaggcccctccttgcaaggcccctctgactgccatgcattcctctacctgaagttgtgaacaaagatt

SEQ ID NO: 101969 - DNA, 714 bp, Homo Sapiens
taggattaattagatacatcatttattatagttggtaattttaacatatttctctgtgaaactaatcaattaaaccaacaaaaagaaaacaaatggtaggtttgaattacacaattagtaagcttgaactaatacaaatatatttcacacctaataaatacagaatgcgtattattttaaagaaaacatggaacattcacaaaagtcaacattgaacttgggtgacaaaggaggctcaataaattccaaagagtcaacatcacctcgtagactatactctctggccataatgctataaaattagacgtcgataacaaaaggatagctttaggaaaatcccatatgcctggaaactaaaaagcatacaaatgaataatcctttggttaaagcggaaatcacagggaaaaatatgaaatacttggacttgaacaaaataaaagcaccgcatgtcaaaacctgtgggacacaacgaaatcatttctctgagagaaatttatagctttaagtatatttatcactaagtaagaaagaacaaaaacaaatgatctaaacttttagcttaagaagttagaagaagagaggttgagtgaacccaaataacttagaagcaatgagaaaataaaaatgagtttagaaatcatcaaaatgaagaactaagaaaagtggaaaacaaacaaaacctaaagttggttttggaaaaagtttatatttct

SEQ ID NO: 101970 - DNA, 512 bp, Homo Sapiens
agacatagcttggatagggtagtgtgaattggagggtgagaggaaaaaagaagctagagataagatgatacctggtgcatagagaagaaggaaactaggatagactgcatgctagcctacccacagttctcactcccttcaatcttccttttgttatgagcaggtgaccagttatatctatgtcccatgcaggcctttaccaccaagggaaatgagaatcaggcacaaccatgaacaacactgagccctgaatgctcatgttaatggagcaataagttatctatttcaaaaatcccactttgtaagatccttcaactccttaatttatatttcatcaactctgtgaaattctaccttttcacaaagaatattctatgggaagtttatagatgtacaacaacaacaaaaaagtcggaatattctggagatagggttatggctgtacaacaacgtcaatgtacttaatgccacctaactgtacacttaaaaataaaaagataaatgttgaaaaa

SEQ ID NO: 101971 - DNA, 519 bp, Homo Sapiens
gggagcccctttccaagggcccttcttggacttcttgcaaagtgctttcagttaaaacttcaccgccaagccaatcaccaaagaagtccccaagctccaaagctcaacatcccttatgaaaaacttctacaaacccctggaaaagctgaacaaaccttcccagcttaaagactctgaagacagtctgtataatgactatgttgatgttttttataacactaaaccttacaagcacagagacgaccggctgcttcaagctctggtggacattctgaatgaggaaaattaaaataagtgtgtggtcccaagttggaaatattcatgcttcttccttaccctgcgattttgcctgtgtctgaagtggttgttttgtcatgaattcttatgcttataatatcctttgtggcaccttttctttttctccctaaactgtacatgtgaaggggatgagctcaagcaggaagttcaacttccagaattgatcataggtatttcaaaacacatctttcctgtctgcac

SEQ ID NO: 101972 - DNA, 479 bp, Homo Sapiens
tccaatattaaaatattaccacaaatacaaaatggtattaagtatgaatatgacttatcttttcaaaaacattaataaactgtttctcttgccaaattagcccctaactagaacatctttgtgcatgtatcgctgagggcttatataacttacactaccctttcacagaagaatgacaaaattcttaatagaggcaagtctttgagtagggagatggggaaaagtaatgaaggatgatatgagacagagttggctgactgctattctgatactccacagatgaacactaataaagtaactacccatcttttctaactgaactttatatgtaatcatcatgggtctccagctgtactgtaaatgctacaaaggcaaagactaagcacctgtgaggcagaatatgctaggagaagagtatgtgttttaaagtcagacagacccagataaaaatcctgaataaatcctgtactgttgaacct

SEQ ID NO: 101973 - DNA, 589 bp, Homo Sapiens
gcggccgcagtggggtggagggggcagggcgtggtgaggtaaggtgagtgccgtagtggggttccctggagccatggcctgctccattgtccagttctgctacttccaggacctccaggccgcccgggacttcctctttcctcacctgcgggaggagatcctcagcggcgccttgcggagggaccccagtaaatcaacagactgggaagatgatggttggggagcatgggaagaaaatgaaccacaagaacctgaagaagaaggaaatacttgcaaaacacaaaaaacttcctggctccaagattgtgttttatccttatctccaaccaatgatcttatggtgatagctcgagagcaaaaagctgtatttctagtgccaaaatggaaatatagtgataaaggaaaggaagaaatgcaatttgctgttggctggagtggttccttaaatgtcgaaaatagggaatgtgtaaccagtgctctatgtatcccactagcaagccataagaggagttccactgagcgtcctgactggacctgcattgtgggtggtattacttcaagttatgtacgccggtgcactgggaatggt

SEQ ID NO: 101974 - DNA, 537 bp, Homo Sapiens
gcggccgcagaccgagccccgggcgcggcaagaggcggcgggagccggtggcggctcggcatcatgcgtcgagggcgtctgctggagatcgccctgggatttaccgtgcttttagcgtcctacacgagccatggggcggacgccaatttggaggctgggaacgtgaaggaaaccagagccagtcgggccaagagaagaggcggtggaggacacgacgcgcttaaaggacccaatgtctgtggatcacgttataatgcttactgttgccctggatggaaaaccttacctggcggaaatcagtgtattgtccccatttgccggcattcctgtggggatggattttgttcgaggccaaatatgtgcacttgcccatctggtcagatagctccttcctgtggctccagatccatacaacactgcaatattcgctgtatgaaatggaggtagctgcagtgacgatcactgtctatgccagaaaggatacatagggactcactgtggacaacctgtttgtgaaagtggctgtctcaatggagg

SEQ ID NO: 101975 - DNA, 878 bp, Homo Sapiens
aaccactgaaaaatgtaaaaagcattctcagctatacctatacagaaacaggagagcggagagggtaacacagagggcagatttgggctccagcttcctgctgtaaacaattctcacgccagaaaagacctttgtcactcagctgttctgaagaacttagcagaattggccagggtggggctggtcagtgagtggagtctgtgcattgtgagtttctcagtcaaataatgtgtatccatatcaaatgtaagttatcaatggcccaatgcccatctacccgctagaggccatgactgaatatgcttgggttctttctacatggaaaatctacagtcacctggcttatgtaaacttgggaatacttacactaggatcctattaaccaaaccagagtaaaagcatacattggccatttctaacttagcttaccctgctgtgaaaaagatttcagcccaaatcttatttttccaaattacttctgcagcaagtggtgtataccctgctgagtaaaggactggctgctttgtttacaataaagaaaactgcttgttttttttcaaattcagatttttatttgaacaatctttgagtttaaatgccatttatgcccctaaagatgaattctgctgagaccttctcagtctgattacatacttgaatgcccctacccttagtattattgattactgggcagttgagttcctttccctggttgctttttttccagacccataaaagattacagggataatctgcctttgcaattatttgtattgcctgcctaacataccaaaccttgggggcaattgtgaaaacaatttgccatttggcccggggaatccccataggagaataatccaacataaaaatctctctaa

SEQ ID NO: 101976 - DNA, 664 bp, Homo Sapiens
  misc_feature (46)..(241): n is a, c, g, or t
ttggaacctgagaagggggtcgtggggtccccggggcccaccgtcnnnnnnnnnnnnnnnnnnnnnnnnnnnnnnnnnnnnnnnnnnnnnnnnnnnnnnnnnnnnnnnnnnnnnnnnnnnnnnnnnnnnnnnnnnnnnnnnnnnnnnnnnnnnnnnnnnnnnnnnnnnnnnnnnnnnnnnnnnnnnnnnnnnnnnnnnnnnnnnnnnnnnnnnnnnnnnnnnnnnnnnnnnnnnnnnnnnnggtagaggaatcgttttctctttgagactgttatgagtatgtacaaatgttatttcctgtaaaatattttcattttttaaaatgttattttctagatagaaaagtagaagtgtctctttggggagcgtttttgggggcgtatagtaaagctctgtcatcatgaattaagcgaggtgggctttgagtttcttgggatgacagggaaatgtgagccgcctactggccgtgagcccctggggtgcggttgcaggattcgcccatcctggtctgggtgtggcttgtgaccacctcctgcagttctctgcccaggtaaggactaattgggaagaattctgggtcctgagctggctgccgcttccaagacagtcgctttgagggctcttggcaccgattttgttaaaatgcatgagcttagggttgtgc

SEQ ID NO: 101977 - DNA, 610 bp, Homo Sapiens
  misc_feature (181)..(190): n is a, c, g, or t
ttcaggctgaataattatcagaacttaattattaaggaataacagtaacagctcagctaatatgtaacattcactgtgtgccaggcattgctcctctaagtgcttatatttaactacattaactattttgcagcaataaaaaacacatctgtcataatgtgaccaagctgctgttttcagnnnnnnnnnnctttcaataaaaagttcatgattttaaaaaattaaggtaatgttctttaaaaatgcttatactttaaaactcaccgttttctgaaggcattctggcccaaggaacaagcagagcaggttgaaggccatgtttttcctgggctcttagagtggttatttcatgctgaactagaagtctcaattttgctacgtttccaggtctaaaaaatagttcaatttactaaaattgctttctaaatacacagttcagggcttacatacatatatgttaatgggtcacatgacaaattaaatcttcacatgaggattaaatccccggtaaaacctacgcactaagtgaaagcaatatttttggtttactactaacactgctttagctgtgaatcagagtacaaaccgcatcccacgcagaatgttgctt

SEQ ID NO: 101978 - DNA, 471 bp, Homo Sapiens
tatctctaagtagtggtacactggaggacatagcaaatatgcaataaatacttattaagctgaagtgaactaaccaaaaaccattaattacaccatttctaacaaccaaaccagctattgcttttcagtgttttggtgatacgttggagtaggaagtcatattcaaattggttagatccttggaagaaatagtagtatttgtttttagagtagaagactgcatcaattttaggcccgattccttggaagttcttggtaatcagtttgggataaccagggtccatcatctgtctcctttcatcatacctccaatactggttatctacaaagaagtaggtcctataaaaacgtgggttaaaaacagctgcatcaatttttttcacaaagttaggaaaaccaaaagaatgtatgctcttgggataatttggctctggtctttaaatgccaaatcccccagaatttgtcatcttt

SEQ ID NO: 101979 - DNA, 397 bp, Homo Sapiens
aggtgtgcatgtaataacaaaacacaatagatttccattagaaccatcctttaattcaataaattctttggatgaactctgtaaatagactactgacacatagcactcaaaaagtcttatgaaccttaaaacacaaagtagtagactgggtagacatagggacaatacagctcatcatttcatttttgacatgttggacttcaccatgcaagtaaattaatgcatatatgatattttgttttgttttgagaaagggtcttactgtgttacccaggctggaatgcagtggcaatgatcttggctcacagcaaattctgtctcctgggctcaagtgatcctcccaccccagcctcccaagtagggtgggactaagatgcatacctctatgctcagctaa

SEQ ID NO: 101980 - DNA, 547 bp, Homo Sapiens
ttgagatccatggacagtttaattaggaagcttcgacttgttagaataacagaggaagtcccagttatctacctattccttaaaacacattttgtcaggctggaatgattcccatagtaaaactcaacatccacacctgcataaacatcgcctcccaagtgactatttattactgagtcgacacaggatgtcaccagtgagcctcatctccagtccaatggaggagttgacttagaccttccttggacaggaagggtctcataagcaatgccagaacttcaacagagcctaaaggtctggggacagggagatgggacttcatgtgctccaggcagggaagagctgtgcatttttgagaaatgggcagggacaggtcttccatggtaccagtggttgaggatgtcgtgggtacaactttccctggaggtcagaaagcatgagacagtttctggaagtctccgctagtgctgtgatcttttggtaaatccacactgcgggttagttacgtaaaatcccgtgaactctgtaaaaggtagcagtgagccta

SEQ ID NO: 101981 - DNA, 214 bp, Homo Sapiens
aaaggggataagatcagttacaatgtctttttcctcagtcaatcacataagtatctaaaatgacattccaaagtaaggacaggagtttaaatcctgaactatggtatctaaagtaaacttgaactttccttatttttaaaaaattttggccgggcgctgtcgtcacgcctataatcccagcacttcagagggccgagatggaaggaaggattgc

SEQ ID NO: 101982 - DNA, 478 bp, Homo Sapiens
gtacttccgctctaaggacgcaaatttcggcaggacatgccccacccccgcgttccgaccgctgaagctccagtgagggacgcaggcattctactcttcgattggtcgctgggggaagaatgacgggcgcctttttaaatgctttatttcaataaaactttattagtggaagagcgccagctattaactacagacgtctctggtgggtccctggtcccggcccattctgtgtctgttctaagccgctggagagctggagatcaggactgcactgggtacctgaggcaagagaaaagctgtaacggaaggagtgaagaagagggaaaaaaacgggatgaggaaacaaggggcagagaggaagcaaacaaaaatcaataatagaagtttagcagcagagatcacctaggtggttcaaccactcacttttttgaagagcaggagaaaagaagcgagaaaaataaaagagagaataaagcta

SEQ ID NO: 101983 - DNA, 578 bp, Homo Sapiens
gtgtgaagtcattctcttaacattaagtagattccttttcataagcacactagctccagtgctagtctgtccagtgcccagccatggcagagatgaaggtggatgcacctgacttgctgaataggatgttgcactgggttgataaagagttgtagtggaaccacgataatcaacatcatctgaacttttggattctctgtcatattcttctccgatccatatgtatgactgacaggccagtagagaagtaacatcaagttcttgaacatcatgtgttgaagccaaaacaatttcattacaatttgccttattaacagaaaatgccatgatcatatcagattccttatggatgactttcgcctttccacctggatagcccagatcagcttcaaccttgatgtggcaatcttctgctatgcagttttggttgacctgctccacatgttcttctatagactaaataccaccacaccgtcacaaacacaaaacacatgcatggaatgaaattataaagacagtgaaatatttcaagctgaaatggccactccaccacttaaagatgataaaaatgaatttgc

SEQ ID NO: 101984 - DNA, 553 bp, Homo Sapiens; identical to SEQ ID NO: 61923

SEQ ID NO: 101985 - DNA, 496 bp, Homo Sapiens
  misc_feature (399)..(422): n is a, c, g, or t
ctctgcgtcctggcgccttccgtctaaacagaggccgcggatcgggacgccgggaccccacaaactggcagccaggaggcgggccagccgaggatcgggggggctcggactccccctgcacccagtccactgttcggagggacttagagcagggtcccttccctgagggcctcgcccccgaggacgtggcgccggagccgtgcgacccattggcttcagcgggtgggaagcctggggccgggacgcgcgttcgccccgcgctggggttgaacctgcgtggatgtgcggcgggtgaggaaccgcggagaaggcggtgggggcgcggcctgcagcccggtcccgggcgagccctccgcgcgtctcccctcggcgcgttttccctccagggtgactgggaannnnnnnnnnnnnnnnnnnnnnnntgggaggggccgggctgggcgcttttgccccgggccccggaccccgggcgtttgtccggtgcgctggcttaaga

SEQ ID NO: 101986 - DNA, 508 bp, Homo Sapiens
cttggctggcagctgggagcagaggaagggagagcgttggaggtcgtgatgtgcgtgctctgcctcagtaggtctgaggtgcccactgttgttatgcttagttttattagattctctgtaacaacatgagcttaccaaccagccttgattttgagattaaataattgaacagattaactgggcactgaagtaaaattctacctactttattctcttagtaaaaactatacacacaataaacaactgtcaaggttgccatcatatttgagttttgtcacctaggaaaacattgtttatactttgtttttgaaaaaattcatatgaatttcccctgggaataacttgttttatttcagtttttattttctattgaaacacttgttttctagtctaggattttagccaaatagaaaagctatcatttaatttgggggaaaagaaaatctattgtcctgtgaagaatttatagcaattattaaactatgttgcttaaatataacgagttaaa

SEQ ID NO: 101987 - DNA, 550 bp, Homo Sapiens
aaattattgtagcaattattgtaaaaatatttgaaccttagaatatcatcttcattatttttatgttctatcatgattctccatgatagaatcatggaggcaagctgatgaaatccaacttcctcattttaccaatgagaaaacaaagacctagaggagtactgggaatagccataggtgatagaataggtaattaaatatatctgtcaagactaatatataaggaagcttgatgatgatttactacttattacaaactactgggccttctaaggtaagattgcttctaaggtaaaagacactaatactatctttgtaggtgaaaaatgatacaatgatgatgcatgttctgttacatttcagaaagaaacacctccctatcagctaccccgatgagaggggagggggcctcaagccatgtttatcccaacttttaaatcacgtgaccataacatattttaaaataaaataatttgtacttgatttaaatataagtgaaataatttgggagaataatttatgtatttataataaatgtaattatgaattg

SEQ ID NO: 101988 - DNA, 413 bp, Homo Sapiens
taagaaccctgtgccacagcatttctaaacaattcttaaaataaacttgttagccacatcagcgttgtgcattaaatttcacaactcatggagaggaagaaaaaaagtcttgcttaactctaaacatacaagttttagaagaattttaatgaagtgcggctcccagaacaggaaaagccttatgttaaaacaattcagtccttgagtccttggctaacaactagattgaactacctacctgacttggaagtgaagtgtcctggaaaacatattttaaaaattttaacacttttctccccttgtagaaaactttaaatttaaagtctagactatacagaccaaattcaagttaatgactatataaccaaactaagtggcagacagtgcaaaggtgaagaactgaggatttacat

SEQ ID NO: 101989 - DNA, 437 bp, Homo Sapiens
  misc_feature (79)..(80): n is a, c, g, or t
  misc_feature (135)..(135): n is a, c, g, or t
  misc_feature (151)..(151): n is a, c, g, or t
  misc_feature (170)..(170): n is a, c, g, or t
ttggaaatagggtaacctctcttggtgtgtaaccattatgtgggtggctcatgtgaaatagattttcaacccaaccttnncatttctgaacccttcacctgcttccatttcttttcagagagcctatccctgtcnctagtccactgtagtnctcccactgtgggagttgnccttgctaaatagttttcttttccggggtcacatgtttaacccttgcactgacactcttagcacagagtcttgaccacctctgtgggactgtccacccacctctggatttttataattgtaattttccctttaaaagcattacaggagcatacataagtacatggaaggcatagaaaaggaggagaagaggaaagtgttcatgggtaacactgttaatatcttggaaggtttcctgccagtctttttttcctatgcctttacaaaag

SEQ ID NO: 101990 - DNA, 244 bp, Homo Sapiens
ctgttagagcagcattacatgcacgaagacactgtacaaggactgctgaatgaggaactctgtacagagccgttgttacagagggtttatgtgctcagacagtctcctctttgaaaaaagagcccatttgaagtgtagcttaaaaccatttttctatttcacaaatgtcttggaacacagacacctaaaggagcgctggctgtttgaaaaggtctggacttccaatgtgacatttccacaaaga

SEQ ID NO: 101991 - DNA, 651 bp, Homo Sapiens
  misc_feature (242)..(242): n is a, c, g, or t
agagaagataaaggaattagctgtttaatgactacattgtggtgaagttttaaagccactaaatgggaggtccattcccatggcaccattgctagcagcccaaacacagtctgcagaaacactcatttcagtggctgacttcagtcagtaattgatacagcaaaatttcattctaacatttcaaagctgtctcacagaatttctgagaaaaaagtgttcccaatcactgatttcatcatatncgcgtcaatattacttcagcacctttaatgaggaaatcattgaaacacactcatcatctttggctagagagatttatgttactcagaggttttgcagctggtgtggcagtgggtggcaatagtgaatttgcagttttgaaaaaaattaaaaagttacgagaagaaaagagaataaacaaagagaaagggaaatgaagcaagaacaaaagagactcaatcatagtgttagaaaattcctgcaaacttcttgatcctgaagtctccaaaaaacctcagacctcccaccgatgttacagtatctttcatctggggctcaatctagaatcttttcggttcctggtaattcctctgagtgcttcatgtctgtcatcacagttttattaaagaactttacttgtgtttggaaaaa

SEQ ID NO: 101992 - DNA, 583 bp, Homo Sapiens
  misc_feature (22)..(22): n is a, c, g, or t
  misc_feature (203)..(203): n is a, c, g, or t
ttgtaaaaaactttgtgtatanaatatatcacacactaaaattaaaacttaaaatcacatggaaaacatattttcaactaacttaagaaacagtaacttaggattagtacacctaatgtaaaaaaaattccttcaaattagtaagaaaaacacagacaccctaatgagaaaataagctaaggatacaaataacacagacaccntaatgaaaaaataagttaaggacacaaatagacaattgacaaaagatagagtaaaatttgccaaggaaacatatatattctacttcactaatagctaaataaaagttactatttttatctatcaagttggcaaatttaacgaaatggtaatattgaatggttgtgagtgtagtaacacaggctccttaatacattagtggtgggtatttatgagattgaaatgtataagatttataggggagggggctggacatttttaaatcaaggtcttcaacaacattcacacaatttaacccagtgatcccactccttggactctagctaaagaaatatagaacaagatttatgtataagaaaatcaacacagtgttaattatttt

SEQ ID NO: 101993 - DNA, 557 bp, Homo Sapiens
  misc_feature (482)..(514): n is a, c, g, or t
gcggccgccgctgccagtcaagagcccggcggtgctgcacctacagcactccaagggccgcgactaccgcgacaacaccgagctcccgcatcacggcaagcaccggccggaggaggggccaccagggcctctaggcaggactgccatgcagtgaagccctcagtgagctgccactgagtcgggagcccagaggaacggcgtgaagccactggaccctctcccgggacctcctgctggctcctcctgcccagcttcctatgcaaggctttgtgttttcaggaaagggcctagcttctgtgtggcccacagagttcactgcctgtgagacttagcaccaagtgctgaggctggaagaaaaacgcacaccagacgggcaacaaacagtctgggtccccagctcgctcttggtacttgggaccccagtgcctcgttgagggcgccattctgaagaaaggaactgcagcgccgatttgagggtggannnnnnnnnnnnnnnnnnnnnnnnnnnnnnnnnggccacatggatcgaacactcatgatgtgccaagtgctgtgct

SEQ ID NO: 101994 - DNA, 245 bp, Homo Sapiens
ctcacagtatgtgaatctcataagagttccatctccctgcctgcagctttttgactcaccaggataggaatatgcctctgagaactttttacgcacatgcctttacatgtctgcttcatttatgaactagtcagctctgtgtcaggccctgttgtaggtgtcgaggaaatatcactacaaaacagacaagaatccctccttcagagaccttacattccattgtggacacagacaataaacacggt

SEQ ID NO: 101995 - DNA, 397 bp, Homo Sapiens
tgcataaagcgcgaggtatttctaccagtggggtttgaacccctcagaataagggaaagatttacatcctcagaccagggtccattggcatgcgtaggaagccctcttcgtcttcaagggtttagacaaatatattttattggacattagcccgccaaggggataatattaaacagagaacaaataagccaacctcatttattgagtcttccataggccgaatcctaggtttgagctttagaatacactagcacagctgtaggactattttcacttgattttgtcatgttgctagcgtgctttttaactgctttgtgcctgccaactcagcagaacatatgatggtccttctggtggtgctaatttgaaatttaaaactgctacgttagatgcttat

SEQ ID NO: 101996 - DNA, 379 bp, Homo Sapiens
  misc_feature (175)..(183): n is a, c, g, or t
tatagatgagaagactaaagctcagagggattgctaaaaactagtaaataaattatggaaccatgatttgaatttagatttaagtctgactgaggcatgttcaaagacactacactgcctctccagaaatcaggagtagcaatattaacactggacaaagaatttaaagcaagtnnnnnnnnnttaagagaatttcatattaataacaagtataatgcacaataaaactgtaccaaatgacataaaaatgcataatgaaatttattagaaattaaaaattaaagggcatagttacaattattgaggaattctcatagctctgccttatagatcatgtaaacaaacaaggtcatagaggacttaaatagcaaagcagaaa

SEQ ID NO: 101997 - DNA, 569 bp, Homo Sapiens
agagtcaccatctgcaaaaccatagatttctggctgaaagtgggcatctctgcaggcacctgtactgccatcctgctcaccgtcttgacctgctacttttggaaaaagaatcaaaaactagagtacaagtactccaagctggtgatgaatgctactctcaaggactgtgacctgccagcagctgacagctgcgccatcatggaaggcgaggatgtagaggacgacctcatctttaccagcaagaagtcactctttgggaagatcaaatcatttacctccaagaggactcctgatggatttgactcagtgccgctgaagacatcctcaggaggcccagacatggacctgtgagaggcactgcctgcctcacctgcctcctcaccttgcatagcacctttgcaagcctgcggcgatttgggtgccagcatcctgcaacacccactgctggaaatctcttcattgtggccttatcagatgtttgaatttcagatctttttttatagagtacccaaaccctcctttctgcttgcctcaaacctgccaaatatacccacactttgtttgtaaaa

SEQ ID NO: 101998 - DNA, 455 bp, Homo Sapiens
tcatgctgctcaggtgggtctcggacccctggcctcaggcaatcctcccacctcgacctacaaaaatgttgggattgcagacataagccacagtgtccggccattaaagtaaaaaacaattaatggaactctcttcatctggtagtttaccatctgtaatctccttttaagaaaataataccataatgggtacaaatatacagttagatagaagaaataagtttagtctttgagagcagagtaaggtgactgtagttaacaacaatgtattgtgtatgtcaaaatagctagaaaagaggacttacagtgttcccgacacatagaaatggtaaatactcaaggtgatgataccccaaataccctgccttgatcgttatacactctgtgcatgtaacaaaataccacgtgcaccccataaatatgtacaaatatcatatcaataaaaataaatacct

SEQ ID NO: 101999 - DNA, 406 bp, Homo Sapiens
gtatagtatggattcatattttggaaaagtaattttagaagttatttctgaagtgcttattataatagtgtttcttgaccacatgcttttaaataatgtgaaggcaatgaagtaggcaatattgcttgcacatccccaatttaaacacctgtctgtccctccttccctctctccgttcttttcttcctttccctctctctttattccttccttcattcccttcaaggttgcggattattctattatataaatgtatcaatttattagaatagtttctatgatgtctatgataggttttaaattgtttgcaatagtttgccattataaataatgcccagtagcgctgtggtctgatttaacttgtgaaggtatatttccaaataaatcgctatgattggaaaaaaaa

SEQ ID NO: 102000 - DNA, 901 bp, Homo Sapiens
  misc_feature (307)..(471): n is a, c, g, or t
  misc_feature (576)..(628): n is a, c, g, or t
  misc_feature (722)..(731): n is a, c, g, or t
  misc_feature (803)..(858): n is a, c, g, or t
cccaaaggccttaagtctgcccttctcctttgcaaattttttccggttatcccggttgtgggaacctattcccccttgggtggattgaacccgttcccgccaacagaaaggaacggggccccagcggagttcaattgcccggaggaaaccgagaaagaagcccccaaattacggcaaaaaccgcctttcttcccccgggggggttttgcccgggattccaattaaaatgccaggtttggcacacgaccaaggtttttcccggacttggaaaaggcggggccgttgaggcccaaacgacattttaatnnnnnnnnnnnnnnnnnnnnnnnnnnnnnnnnnnnnnnnnnnnnnnnnnnnnnnnnnnnnnnnnnnnnnnnnnnnnnnnnnnnnnnnnnnnnnnnnnnnnnnnnnnnnnnnnnnnnnnnnnnnnnnnnnnnnnnnnnnnnnnnnnnnnnnnnnnnnnnnnnnnnncccaagaattcggcacgaggcctgaagtcaggtgtttgagaccagcttgcccaacatgttggacccaatcttttcttaaaataccaaaaaaacttcgcggaattnnnnnnnnnnnnnnnnnnnnnnnnnnnnnnnnnnnnnnnnnnnnnnnnnnnnngcttgaacttgggagcagaggtgagctgagtgcagtgagccaagaccatgccattacactcaagcttgggcaacgagagcaaaactctgtctcnnnnnnnnnnttagccagatgtggtgacgcatgcctgtagtcctagctactcaggaggctgaggtgggaggatcacctaagnnnnnnnnnnnnnnnnnnnnnnnnnnnnnnnnnnnnnnnnnnnnnnnnnnnnnnnntgacagagtgagaccctgtctcaaaaataaataataattaatt

SEQ ID NO: 102001 - DNA, 388 bp, Homo Sapiens
  misc_feature (51)..(51): n is a, c, g, or t
attctgatgtggatcagattagacccttgaaatccaactgtgcgtctcccntgctaaaaaccctctggtgactctccattacatatagcacaacactggactttatctggcaataaggacattctgtatcctcctacttgatagatttcctcaagagtttagtgccagggaccactttttctgttctgaagggactaataagctttttctcaggcaataaggataaattaagaggatgtactgggaagtcagactactttgttcaaatcttgtcttttctacttactagttgtttggttataaacctttctgtaccttgtttccctgtacaaaatgaaaatgaagacagcatctacctcatggcatttctatgaagaataaatgagat

SEQ ID NO: 102002 - DNA, 196 bp, Homo Sapiens
aatgtgaacatagatgcagcaccgactttttaaacttgaaaaaactggtataatgttaacttttaaaaataacatttggacacactagtaattgatttttgtttacagattgttttgtttacaaattgttagtctttgtttctatgagatacttttagtgtgactttttaaatgtcttagaaattaaaagttgtac

SEQ ID NO: 102003 - DNA, 514 bp, Homo Sapiens
cctctgcctgttacccagtaccaaagttgttaacacatttttggggatcttttcagcaatgccccactctactggtaccaatttattgtattcatacattttcatgctgctgataaagacatatctgaaactgggaacaaaaagagatttaattggacttacagttccatatgaatggggagacctcaaaatcacggcagaaggtgaaaggcacttcttacagggaagcaagcaagagaaaaacaaggaagaagcaaaagcggaaacccctgataaacccaccagatctcatgagacttagtcactatcatgagaacagcatgggaaagaccggcccccatgattcaattaccttcccctgggtccctcccacaacacatgggaattctgggagacacaattcaaactgagatttgggtggggacacagccaaatcatatcagtcattgtgatgcttcgcccatatattagtctgttctcatgctgctaataaagatttactcaagactgggta

SEQ ID NO: 102004 - DNA, 329 bp, Homo Sapiens
ggggaacaggaggagctcagtaatttttatgaaatgctttgacctcatatccattaactaattatggtcctagtcagaagaagctagcacccttccctggtgaagttgatacaaatccattgtatgttcctgtcctgcaatgatttacattcagttacagtactagtcaaaactatatatatatgaattctacttaggatccaattttgatatatttaaaaagcaattgagactcatgatagactttatgagcaggtttaacttgtgtggtcgaataaaagcctttaatttaaatggaaaagtaaaagtaacttttttcagtgacttga

SEQ ID NO: 102005 - DNA, 327 bp, Homo Sapiens
  misc_feature (225)..(225): n is a, c, g, or t
ccccctttttaggggaattgaatatttaaaaaaatacagaatgaatacgttttcacaaaagaaggtaagcttgtttgccttttctgcttatgtttgtgcattctgagggggtgtcagatttgagagaaggctcagttgaaaagactcaaagtccagacacttccacattctgttatattcttagaaggataattataagaagatgcaaaggttaaataccagttnttgatcccagctctgaatatgagcatttttagctttagttttatagatggtttacaaccaacagatctacagaaaacaaaactgcatttcctccacataact

SEQ ID NO: 102006 - DNA, 507 bp, Homo Sapiens
  misc_feature (30)..(30): n is a, c, g, or t
  misc_feature (74)..(74): n is a, c, g, or t
tctgtttcttcaatggttctcttccctttnccatcctccaaacctggcctgagcctcctgaagttgctgctgtnaatctgaaagacttgaaaagcctccacctgctgtgtggacttcatctcaaggggcccagcctcctctggactccaccttggacctcagtgactcagaacttctgcctctaagctgctctaaagtccagactatggatgtgttctctaggccttcaggactctagaatgtccatatttattttaatgttcttggctttgtgttttaggaaaagtgaatcttgctgttttcaataatgtgaatgctatgttctgggaaaatccactatgacatctaagttttgtgtacagagagatatttttgcaactatttccacctcctcccacaaccccccacactccactccacactcttgagtctctttacctaatggtctctacctaatggacctccgtggccaaaaagtaccattaaaaccagaaaggtgattggaaa

SEQ ID NO: 102007 - DNA, 465 bp, Homo Sapiens
tttttttgggtgatagaaagtgtttctttatttgaatgtcattccacctgcactgaagcttaaacccagcagcagcagaaggggtcaggaccaaaataaatgttaccaaattagacaatgaacagcgaggacacactcagacaaaacttactaatggggtatagacaacaccaagctatcctaacagcacacagcacaggccctcggaggcctgcccatcagagctctgcggaaggctcccttgttccctgttcaggaaactccagtcccacccaaaggttagccgtgggccaggcaggggcctgcagaagtttctggtgctgggaagatcccagcttctccaaagacagggtttccctttctctttctcagttcacactggaagctggagaaaggttattccccgtgtgcccaagcaggatgctcaaaaggccagggactctccccacagccttatctaaaagt

SEQ ID NO: 102008 - DNA, 510 bp, Homo Sapiens
tcacagagttactaaaaaatgtctgtaaagcatatttacctcttgggagataggcactatgtaaataaggtaaaatttctgttattacaattattcataataatattcttttcttatttctaagcctttctgggaaatcatttcagtccacaccaaccatattattcagggttcctgccatatgtgtggggtatcctactgatacacacgtattcaaagtttatgggtacaacaaagacatagtacatgtacataatatgtatgtgaatatagttaaatatatttcttcacaatattttaaactgtgaagaactttatcatacaggaaacttaaaacaagaggtgtcaaaagacccaaattaggtgcattttacttgtttatgatggcataaccattgctttaaaatgtttagacagtagaatattgaatttatgctctatttttgtttatttaagcaacacttaatgtaaaagtgcaacaggcaattgaatccaaatttcaacgacaaa

SEQ ID NO: 102009 - DNA, 206 bp, Homo Sapiens
ataagggacaattaatgatgctataaaattctatctaacattcctagtctacttgttgttttggagggcaggctgccattcctgcctattttaatctttcgaaggtggtctctgctcccatttaaaggtataagcaattaagagatacagaaccctcagaactaccttctataacttacctaatttctaagcttaaaatgtaatct

SEQ ID NO: 102010 - DNA, 171 bp, Homo Sapiens
ggtgagcccctgtggaggaaaagttaaatattaaatttgaactcaattgaacatggacacaaacaatggtcaccaagtcctggaacaggttgtgtgagccccttgaagcgttcatccagggctgtttcggagaattttttatttcaatctattcccaaacattagtccttg

SEQ ID NO: 102011 - DNA, 491 bp, Homo Sapiens
agcaggcacattctcttcgacccctccctcattcagtctgctttggagtctactgaacatcaagcttgctatgagcaggatcttagagctgaggaattggcctcccaatccgaacaggtgttataatcctttcttaataggttgtgctgtggacccaatgtgagggctgtgctggtgtaaatggtgacatattgagttggggggatgctttcggggtggggggactggttccattccatcaaaggccctcttgagagtctatccagggacccattgttttactttaacagaccagaaaagatgtttgttttccatgtcattacccccaggggataccgaatgtgtgggtagaaatttctctgtagattaaaaatcagatttttacatggattcaacaaaggagcgtcacttggatttttgttttcatccatgaatgtagctgcttctgtgtaaaatgccattttgctattaaaaatcaattcacgctggat

SEQ ID NO: 102012 - DNA, 494 bp, Homo Sapiens
actcccagccataagctgaatgtttctctttaaaggatggagaaaacttctgtctgtctctggcaagaattgggggactgttgactgggattgtgggctgggcttggcttctaactgctgtgtgacccaagacagccacttctcctccctaaccttggttatgtcttggcagcacagtgagcaggtcggactaggcgaacagttttggattattgtgtttttagatgtggaattattttttgttatataaactcttatgtgtaaccccaatatagaaactagattaaaagggagtctctctggttgaaaggggagctgagtaccctctggaactggaggcacctctgaaaaaagcaaactgaaaaccagtgccctgggtcactgttactcctataagacagtttaaagtgagacctggaaaaacatttgctttaccttgaatagataggtttttatgttggtatataagaaataaaactaacctattaaacctg

SEQ ID NO: 102013 - DNA, 171 bp, Homo Sapiens
tttttcttctccctcagcctcagagtcataagttatgatccagttgagggaggagaaaaggaaaaactagttgggcagacagctaaaacttgtctttggtaaaattctttcaaaatgaaagacagcctgaaaaatcaagctacaggcacaaatagagcagcctggggaaaa

SEQ ID NO: 102014 - DNA, 358 bp, Homo Sapiens
ttatatatgcatgcaaatattgatttggtacagaaaatagcttggacaagtctttatatctttatgcgtaaatatagggtatgccttcattttccatagcttccatggaattccattgtatggctctatccattgtcagcctcttcagttatttccagggttttgctataaaaacagtgctgactgtgtatccttggtaattgccttcagataaaaacccagaagtggatttggtggtgctaagagtgggtgttggttcaaggcttttgccacatgttgccacatctacaacagaagggtttgctggttggacttcccctgttggatgatgataaaatacatataatgtatttaatac

SEQ ID NO: 102015 - DNA, 394 bp, Homo Sapiens
gaagaggccctaattaatccagcgggagcgaggattaagctgcgactttgcgcgctgacacccagtaggccgctgcgcgctgaagaggcactggcgggaaccacgcccgggcgaatcccaagctccccgccagcggcgctaggtaacgtgtccctcacctggactcacccttgagagattctgggcctactttgagcccttcctgaggcagctcgcgtctcccaggctggctcgtttcacctttgttcccacgcccgttcccagacctcacctgagttttcccttcctattcttggaccctgccccgacccatccctttgcagcatgaacaaggaaactgtggttgacttggattttctgccactcattgtacacttcctttggggaaaaaaaa

SEQ ID NO: 102016 - DNA, 524 bp, Homo Sapiens
cgcattattctgtaacttgcaagtctggagaccacttactgttgagggtagctggaattttagacccttggcagtatttaagatttagacatttagccttgtgaaagttaccacagtgctccatgtgattcattgactgtgagcctgttgtccattgcactcagccctgtactcacttcttcactcgctgtcctggttttactgttcagattttggtgggttctcaaagcagtaccactctcatctgctcagtacatctgcggcaactggctgccttcgatgctgtcattgcgttcagcccagcacatcacagccccatcagtgtgtagccaccgctctcgtttttctgtatcgcttttatctcctgaaaaagatgcaccaaataagagatcatctatatcaggaattgaatgtctaactcaaacctctcatttttgtttaataggtagatctcatttgaagtctcctatctgaatctctgaaacaattatagtttgattagacaaaggtttttaataacactt

SEQ ID NO: 102017 - DNA, 355 bp, Homo Sapiens
gaagagacaggaaaactaggattacttcccagatctttagtatggccccgaaatgcaatcaactgaccaggttaggaatactgaaggaaaagcatgacatctactcagatctcacagtaaagtctgctggatacatagggcaagtatcactagcatagaattatacaacagctttaaggggaagttgcaccaaagtaagagggctaagattgaatattggagaacatctacttttggagggatggtgatgaagatatgtagcaaagaggtaaggaagaacaggtcagcatggtagcattgaaaaaataggacaggaagatttttttcaaatatcaaaattatatggctaaataag

SEQ ID NO: 102018 - DNA, 193 bp, Homo Sapiens
ctattgttttgtagtcttcctgtccccttcagtccctccagtgtgtatattaccattctccaatgaaataatagggcatttaacaaagatcgctatgtgcaatactgtatttagtgtttctatttcaatttttctaggatgttaatttatatgaaaataaaatgaataataaaagaataaagatacttgcaaa

SEQ ID NO: 102019 - DNA, 545 bp, Homo Sapiens
gcattgtatcacttcatctgcaaatatttcaataagtacccaaaagtggttggactgagtcccatgaagccagatcacttctgactgcaaggagcttggaaaagcaagtatctggatcttttaccagctaaatttggagaattattgatcaaatttggatctctgtgtgctgtcctccaatttaatactttctgtgttgctgttttattttctttcttctggaacctggcaaagtgcgtcaagcgatgaggcttcctctttgaagatcacaggtgagaagattaggtgctttctcagaagcccagcaacctgatgggagtgtggagtgagcaagacccaaatcggagcttcatccctgcatggttcattttgcttatttggcaaacttgccctgcagaatctactcaagcttcctcagtttctcaaatcattcttgggcaacaaatgaacaagaaagaggacgtcttattatctggtgtctggcttgctgatttaataacctagaagacagtgtttgaagaacacaaactctaaagtccttcact

SEQ ID NO: 102020 - DNA, 281 bp, Homo Sapiens
agctcatcagctatcattagtgttggtgtattttatgtatggcccaagacaatttttcttcttgtgatgtggcccagggaagctaaaagattgaacaccacagagttaaggtgatgatctctctgcctgctaaaattccaattcctaagacagacatgagcttagatatgctacgtactataagtataaatacataaaaataacacaaataagtggattaacaaagaaatttgcctctggactgcatcaggtgtggtgggggtggaggaggcaattagctt

SEQ ID NO: 102021 - DNA, 450 bp, Homo Sapiens
aatctcatgggtcctttcctttaattattctataggtgtttcattataggagcgcatctttaattagacagtattttaataataacttatttgtctggaggacgttggttcagtatcttcgtaaatcaagaactggtaaaccacagcttagtagatctaggactaagacttaaaatgtggttggaatctcactcaaggcctacccacctaaaactgcgttctagcaattgcatgctgactgcacctatgagtcgtaagtctgtagttgcaaagtgtgtctagtttgatattctttctaaatgctggtaagagaaacagacataccagaacttgtggcttgctgaagatggtatgagtaatgtggaatctggggaaggggtgcatgtcacatggaaattgggagtctttgaaaaatatctctatcctgtaaattaaaaaataataaatcta

SEQ ID NO: 102022 - DNA, 542 bp, Homo Sapiens
  misc_feature (419)..(432): n is a, c, g, or t
gttgttggtggtgttagtcaattagttggttgtttccctacccagaaggtgtatgaaggacttttaagaactcaaagaattgtagccggtatggaactcttaccattttctccaaatacagtgaacggtgcagggctgggtcctgtccaaaggctgacccagtgcaagggactagattagtagtgtcctgtggtgtatggatctcatgcatgacttctgatcacggcatgccatcatgcaaatcatttctacgcattgaacgagcacaatgtttggaatcggcctgagcaagtcctcctcagcctgaagaaacctgattgttttcccccacccatctccaaaccacgtgaagcccatgtggagaagatgcgctttatgtcaaagaaactgacaattaaatgacatgggctaaatgtgannnnnnnnnnnnnntttctttttgctgcttagcttaactaatgtaagaatgcaaatatagtttgcatgaacaaacgaacttttaaagtgatgctttctgcttctgagaatcaataaaatgaaaa

SEQ ID NO: 102023 - DNA, 451 bp, Homo Sapiens
agcatggcaataaatattctagcatccctaactaaaggggactagacagttagagactctgtcaccctagctataccagcagaaaacctgttcaggcaggctttctgggtgtgactgattcccagcctgtggcagggcgtggtcccaactactcagcctagcacaggctggcagttggtactgaattgtcagatgtggagtattagtgacaccacacatttaattcagctttgtccaaaggaaagcttaaaacccaatacagtctagtttcctggttccgttttagaaaaggaaaacgtgaacaaacttagaaagggaaggaaatcccatcagtgaatcctgaaactggttttaagtgctttccttctcctcatgcccaagagatctgtgccatagaacaagataccaggcacttaaagccttttcctgaattggaaaggaaaagaggccc

SEQ ID NO: 102024 - DNA, 448 bp, Homo Sapiens
ctcccaaccctgaagagatgaagtaagagtcttagcacctttttaaaggtctgattaggaaacatttgtcatctattgtctccaaggggagccactataagacttaaaaagaaccttggtctccacaatctttcatcttaacctgaacatttcctttctattgatcccaggtctttagacaactcaaccaagtgccaaccagaaaatgtttaaatttacctatagcctggaaggccccctccccaccttgcttttgagctgtcccgcctttctgaaccaaaccaatgtatttcttaaatgtatttgattgctgcctcatgcctccctaaaatatataaaaccaagctgcgccccaaccaccttgggcacatgttctcaggacctcccaagagctatgtcatggctgtggtcactcatatttggctgagaataaatctcttcaaataaa

SEQ ID NO: 102025 - DNA, 487 bp, Homo Sapiens
cacctccccacacgcacacggccagcctggagcccacagaagggtcctcctgcagccagtggagcttggtccagcctccagtccacccctaccaggcttaaggatagaaacgacacataacaccgggaaaagccatgctgtcaagcatctcagaatctcaaccccagaggcagtctttagggactggggtgggctcaggaagctgtattatttcaaaggacgcagtgtttccacagctcagcccagagctgctggagttcacacggcccaccagaacctgctgacttcaaaatcatcaccaccaaggggccaggaggtggcgctgtggggcaacagaaaacagaaaacagctgctccttgaacttggattcccagcagctcccccaagcgcccacaggggctgcattcctccctgctggacacctgtaactacaacattaaaacagggcgcaagcaaggaacacaaacactgggaaagctgtgcctt

SEQ ID NO: 102026 - DNA, 503 bp, Homo Sapiens
actcctacaggaactggacctggttatggcatttccaacgcaggggcaagcgatgaatggcagggttgaccccaccattcccctggtaatcactgctgggtgtactactaacattgcctcgcattctctgaacaaaccaataaagcaaaagtaattcccactttatggataaggaagacgtagaatgtgacttgtccaaggccacagagtaaacagatgagctcagattcaaaccttggtgaataccagcttcataaagccagtgctctgtctaccgtaatatgcaacactctaaagttagcaaaatcaagtttattatacccacgctgtaatccacatacttgcaagcaattaataaactcagagtggaaggttaaatcatctgaaaataaacatcaaaaatgtatcactaattcttggcaattcttgtatctaagcaatcaccaaaatatttaataactcaaagatgatttatcatcaaacataagaattaactccctggg

SEQ ID NO: 102027 - DNA, 423 bp, Homo Sapiens
ggaaatttggttatagagctatgcctcctacaacaaattacaaatatggagcccagataacagatgagacctggtgtattctgcactacttaccccccacccacctaaagtgctgcatgctgtttgaggctcctgtgactaggagagttatcctattccttagaggctgctgagagcaccaaattttggacccacctctaagagaaataaaggcacccaggaaactccttcacctgtagtacccttgacctcatgtttttctttgcactgcttattgctggttcaacagtaaagcaaagcaaagcctaggtaatgttagccaagcctgagtcgtcattcttgccaattctcaaaggaggcggggtcaactttaagaaaccatgatgtatgtcctatctcatcaggaaatcaaggctaaagaaa

SEQ ID NO: 102028 - DNA, 502 bp, Homo Sapiens
acgaaagtcctttgagcatggtttcaggtgagcagacagtcctaacctaaagagctgtaacaaatacacgtgggctgtgtgtgagattcggggagaggcaccagggatccagtgtgggtcaggcgtggtgccgccctcaaggaacttagtggggagaaaatgaagtctgtacttcaataactacagtgcaggctaggaagagaacacccttagagatgtgcaaatcaagctctttgggagtttagaggaggcctaggactgctaaggaaaggctgggactaggaagaggtaagcaagtcactgaggaggcaaaatttaagaagccacccactctcagggtgtgtgaatgcagcgttggcacttgcatgaccctgagaatgagcaaccccttaaatgtatcttaggcaccttgccagactcacttttagcttgctggactaattgtggggatcagtaggccttcagaggaaagttagtgtctgagctgaactgaaggatgggg

SEQ ID NO: 102029 - DNA, 317 bp, Homo Sapiens
  misc_feature (84)..(92): n is a, c, g, or t
ttcagtgaaatacacctttatatatgagatccaagtttcactttttgtgatataatgagccagttttctcagtaatgtctactnnnnnnnnngccattaacctttctctaatatttgcatgattctaataaaagtatgtcaacttcttaaaatgttttattaaaatgtggcattcctttgaaattttataacattaaaataatccacaacatggtacagctcttcactttttcagctttttaaatgtccattaataagtttgaatacgttaaaattatatgtttaacctcaacaaaataaatggcaatatgtgtcaa

SEQ ID NO: 102030 - DNA, 539 bp, Homo Sapiens
ggaaagaaagggaatgaacagatttatcacactggaatcttgaaaaggcaaatcgccaacacctgagacgcggtcaactctggtatgtgccagtgaggggagaacggaaggacccagggctcgcagcctcagccggtcattagggcaccttgctatggacccttccttcaagacccaccataaagcccatccagagcccttccaagaggccccgggagtagttttctccagagagggcagtggtacggggaccaagattcctctgacttatatcaaaccagaggcaactcccacacagaggctgtggaagggtaagcctgtgtgcctcaagaaaaatgcttcaaagcaaaagcaagtaagagattctagatgattcttacctgctatgaaagatgccttgatgtctgaagaggcttcggcctgatctccctgaagatgctgaaatgggggagaagcctcatcacctctgtgcaagcaaaggagtgaagattatttcttgaacacctgcacaacatatctattcaactagcttgcaccct

SEQ ID NO: 102031 - DNA, 318 bp, Homo Sapiens
gcggccgctgtgtctccacatggcgtcccctccccggatggcgaaggtgccctccagctcctccaactggatgacgactgaagaggccagactcgggaacccctctcacccttgccgagcccagggtaatgcttcaggtagcgggtaagtccatttcctttttactagacacaagggctacctactctgttttgccatcttttagcagacccagccgcccctcctcaatctctgttataaggactgatggcattccctccacctaccgccagacaccttcactgcccttccacctagaccactatataactttcttga

SEQ ID NO: 102032 - DNA, 441 bp, Homo Sapiens
ggaaaaggaatcctttcatgaagatctgtattttgttattttttgctgactgttagaacttgtttagaacaacttgttctgtgtaaaagtgagctgcctgctatttttgctctacttttggtaatctcactagtgtccattttccttcaaaattgcagttttggttaagtttcttgtcagttagcttttctgacttaggaattttgttaatgcagatggatttctatccctcggggccctttccttacctggcagggactctgtctcacctcttctcaggaaacatttcttatcagtaaatgtctgtaatcttatacacacgagtggtccctttaggatgtacaaaagcagtactcattcagtagaaaccatacttcttcaagtacccatacaaccattctgtttttcactttctgtattcaataaattacatgagatact

SEQ ID NO: 102033 - DNA, 464 bp, Homo Sapiens
ccccctcaaggttgtttacagtatattctcgactgtaatggcattgcagtagggccaaaacaagtccaagcttcttaaaatgattggtggttaatttttcaaagcagaaattttaagccaaaaacaaacgaaaggaaagcggggaggggaaaacagaccctcccactggtgccgttgctgcgttctttcaatgctgactggactgtgtttttcctatgcagtgtcagctcctctgtctggttgtttacctgttcctgttcgtgcttgtaatgctcacttatgttttctctgtataacttgtgattccagggctgtttgtcaacagtatacaaaagaattgtgcctctcccaagtccagtgtgactttatcttctgggtggtttgatagtgtttttaaaagtaatatataatgtggggtgaaatgggagtaggggggtggacaggggagaaacgaaaaccacaaa

SEQ ID NO: 102034 - DNA, 464 bp, Homo Sapiens
ggctataatcaaaaagacaaataagtgttagaagacactgctagtggctatgtaaagtggtacacagcagctttggaaaacagcctggcattacctcaaatggggagtatgatcactaggtatgtacctaagagaaattaaaccatatgtccgcacaaaatttgtacataaatgtgcacagcagcattattcataagtcaaaaggtagatttccatttatatgaaatgtccagaacaggcaaatctacagagacagaaaatagattagtggttgttgagggatggctgggatggaggttttgggggcaacagctaagaggtatgtggtttctttttagaataataaaagcattctaaaattgtggtgatgcatgcactactctaccaatacactaaaaatcaataaattgtacattttaaatgagaattgtgaattatatgccaataaagctgttaaaaaatta

SEQ ID NO: 102035 - DNA, 380 bp, Homo Sapiens
ctagaatgcagttgttagcagcagcgaatctgcatgggtctgcagcaacctcaagtctcctcagaagaaagaatttgaccaaggggcataaggcagaaggagagacccgggcaagcttcagagcaagagtggaagtttattaaaaagcttcagagcaggaatgaaagaaaagtacacttggaagagagccaaacaggtgacttgagagatcaagtaaaacctcattaacgtaactgcaacaatgaagacattacctagacgtgctggcttcctctttgccttcctccatgatgtaagtttcctgaggactccccagccatgcttcctgtacagcctgtggaactgtgaaccaattaaaccttttttctttataaattaac

SEQ ID NO: 102036 - DNA, 905 bp, Homo Sapiens
ggaaatgtgggagtgagcaatataggtatgggaagagcattctaggtagaggattaggaagagcaaaagccctgaagcaggactgtgtctggcctctgaagaaatgcaaattgttcagggttgttggacctgaaggaagaggaggaaaggaataatgaggccagaggggccagatcatgtagggatttgtaggttgttgtaaggattttggttttcactaaatgaatggtgaaccatttcagttttgagcagaggagttccatgatctgatttgaattttaaaagatgtgtttcccaaaattcctattcctttcatacagctgctttcaatgaaggtttataaggaaagcaatcataactacttggataaggtataagtgatccacaatcttttcaactctaccataggtatctacatatatatgttgagagatgctgctttttggccaaaatgaatcttgaattgggggtgtgcagaaaaagttatatctggcctgaggctggtatcttttagagtggcctacttgcatggttggcccttatctgaacacgtggatttaggggtattctcactgttcactaataaaggtggttcactgtacctagactgttcaaacaagatgatttatgctaaacacctgctttccttctgggagtatggaattttggtacatgccaggtaaaggatgtctatatgaccaaactcccaatgaaaaccttgcatactgagtccctaggcagaaacatccctcgtataaaaatgtgctctgtgtgaatcttcatgggagggagagatcctaaagaagcctgcacatggattcctccagattctgcttatgtctttttcctgtatgatccaactgtgtacacttactgtgtcactgtaataaactttagccatgagt

SEQ ID NO: 102037 - DNA, 851 bp, Homo Sapiens
gtaatgtgtcctacatcgcatggggcctgagaggacaggcaggcactcctaggaccatcatagcagcgacccagccctggtggccagtgcccctcccctcttttctaggacttttctccaagccagtccttcccctgtccccccttgtaagggctgtctggattagaagcctggccccaggggactgcatcctccaagatgctctccccagcctctgtgtgagaaggatggaggtagggaggctttcatgctgcctgccccctgaagctgaatgaccatccctgctgaatgaagtgttggggggaacccttaggtgtttggccttcaagtttgtcagctccagcagctcgtttttctggcagggcctggtatgacacatttggctgtgttctttgctctggagtggacctattgattcttatcgagctaccagctgagggggaaggggaggacaaatagtagggcagacctgggagagaagggaccctggaaaagcctggccagtggacctgccaggtgggaggcagagcacagataaagagcctgagcctggattgttcctgatctgtcacctaatggtggggagagccccacagtgctcaatgggagccagccagggggcagtcagggtggaaactggccaggggagggtcgggggcctgctgaaggctgggaggcaaacgggatgcaaaataacatacaaatgaatgcccactggttttgcatacaaggcttctgggaggtaaaaggttccagtcagaggggtctctcctgctttcacctttatattcccccactggattccagaactgtcaagttgggcagtattttataataaagtatgtggagtc

SEQ ID NO: 102038 - DNA, 500 bp, Homo Sapiens
agggaggatggaggatgagggaccatggcaaggttgagtccagtgtgatgcctcctatgtagagagaccccatctgtgggggggtcatggctgcccacctcatggtggttctgatggcaaatgggcaaatgtagtggtgatctcagggcaagtgcaggcacagtcagtgctcaggaatgccagcctatgagctggctacatttctcttaaaatcaccaatttcattgttgcccagcatgccatcagcctatagagtcaggtgccccagatattaaatccctgttaattaagagggtcaagttataagttcattcaccaaacacttggtaagcaagtctgaagtaacagcatatgcaagcgcaaggagcacaaatattataacctcttacaggaaaataaacacacaaaaaacatacaaacaggtccccattaatatggccccaaacggctaatggagattcattcttatctaattattaaaagggttgtttgtcaaaaaa

SEQ ID NO: 102039 - DNA, 595 bp, Homo Sapiens
cccttagcaaactgggctagaaaggatttattttttatagatttaaagggtacatttttgttacatgtatatattgcacagtggtggagtctgggcttttagtgtgactgtcacctgagtagtatacgatgtacccaacaggtaatttctcatccctcactgccctcccactttgtggagtctccagtgtctattattccactctgtatgtccatgaatatgattattttttattagcactttgcaacaccctaaaaatacctcagaactttatgaaataattagaattgtgcagccacattcctttttatgcatcactcatctaaaaaaataagcttctctgagctcttctgggaataagaaagggaaatgctgctagcctaaagaagacagaagaaattatgatacagtttcacatggggaaagtgtcagcaatttaaatgaaggtcaaagatttaaggcaagcggtttagataaggcctagcacagagaacaattcagaacagccagtccctaaatggataacaaagtccaaagcaaagcctcccaagattttccacagtcacttggaagccctgtgaaaaataacattcct

SEQ ID NO: 102040 - DNA, 452 bp, Homo Sapiens
caattccagtgttaggtatttcctcaggagaaatgaaaacacgttcacacaaataattgtacatgtatgtttctacacgctttattcataatagtcataaacaacctaaatattcatcaactggttagcagagaaaagagcaaaccactgatgacatgaacgaatttcagaagcactgtgctcagtgaaagaagccagacaaaaattacatcttacataaatttcatttatatgaaattctagtaaaggcaaaacatatagccaggggccaagaggggaggatggtctgaaaaaggcaggaacttcttcctggggtgatgggaatattctgtgtcatgaacatcgtgattgtggttacaagactatacttttgtcaaaactcatcaaattgtacacctaaaatggatgcattaagcctcaatacagccaataaaagatacctacgttacagt

SEQ ID NO: 102041 - DNA, 792 bp, Homo Sapiens
  misc_feature (169)..(169): n is a, c, g, or t
agcaccactgggtctgccgcatgctgcttgactacaaagccgaagtcaatgcccgagatgacgactttaaatctcccctccacaaggcagcctggaactgtgaccacgtgctcatgcacatgatgctggaagctggcgccgaagcccaatctcatggatatcaacggcntgtgctgccatccagtacgtgctgaaggtcacctccgtgcgccctgctgcccagcctgagatctgctaccagctcctgttgaaccatggggctgcccgaatataccctccacagttccataaggtgaggctctgcccagtggtcagcaggttgaggaagattcaaatggcagccttgtctgaaatctccaagtaactcaagcttgcttgaggcttgagtcctgggctaactacctctgatcctctttgaccttccattacatacctaatcctagctgtctcctcatctcatcctagtctaggtttgcttgaaattgggtgtgagagctagaatgagaaaaagagtagcaaataatttgttttgccttgtgtgaacaccagtgcactggtggcttcctgagggactgaggtaagtctgccagaaaggtgaatagtgttagacaggcatacatttgccatcttttaaacagaatgactgatctaaagatgactcagcctgctttgaaattagcttgtagccatgaaagggccacccgattttccagtttaatgaaagctaacgtttattaagtactaaaattatatttattatgtataataaataagcacactgttataagcaaa

SEQ ID NO: 102042 - DNA, 534 bp, Homo Sapiens
tctttcctgtcctccgctcattccaccactacatgtagatatttgaaaaggcccagaggaaaagtcagggttacttttttcccctctgtggaaaaacatgatgaagctgaatttacctcaactagtattaaaacatcaagtgaacagatgtacatattgattaaagatgaagaaaggagaactcagacaagtgggcggcagagcagtttttccttttaaccaaacgttctttctttatggcctttaaagatatgcattcttccaagatacttgatgggtgttctgaccatttcagggaatgaagaacagcctgagaccataaggaaagccttgattcatgtacgagtttctttaatgagtaagcaagagtcatgcaagagtgctctgctgtagccatgtgattcattctgtacccctgaaacaaatatgtacagaaccccaaaagaggaagctaaggagcctgtgagttattctaaggaatgtgcaacaccccctattaaaaactccatcctaaaacggtgaaaccccgtcttt

SEQ ID NO: 102043 - DNA, 736 bp, Homo Sapiens
aattcggaacgagggcaaataggtattatctatgagttaaccatctaaaaataaaagagtggaagccctaaaatgctagaataataataaaaaggccaaaaataaaattgtttctctctcaaccactttgccactcctatggtttagggattaatggaaccaaatccattaacattctaactcagcatacttttaacttattgtttggaggggcaggacttattgaggtaaattaaaagaacaaaaactgtaaaaaggaagtagttcagcatctatcgccagccaggttgtttctcagccatcaaatgataatgactaaaatttctgaggcttcaggagtaacagagatacaacagtcttggaggtaactccatttgctacaggacaggcccttgcctaaaagagaaggtatctagaaatgcctttaaaataaattcagagtaccagaaagggtatggggatcctagttcagatacaagatcattcccaagacctaatttatttctggcagatgcctgctattttctgtttttccagtatttttgcttaaggccagcttgtgagtggctaacctatttaattcgtcatttctgccttttaaaacccaaagtagaatacatgtttgatctcagtgatagtgttgttcgcccattccaccattctagagcttgtaaaagtgatagaattgtagcaataaaagggcatcgtctttattttactatctatatactaagct

SEQ ID NO: 102044 - DNA, 507 bp, Homo Sapiens
gtgtgtgaattcatccatgaggagctctgaggatggaggaagttggcaatctaggaactggtcctagaaatgacccaagaaacttgcttctttgtatctttttggtgatagaagatgatgtttcttttaatttgaggccttcttgaactgtaagctcccacaatctttcgctaaacagacttcattcacattctgaatctggtttttgtctcacacatattaaattttacaaaacagaaagaaacaatagagcttattaggaaaaacttgttttgaatagtaaattaagcataatggaaataggcacatgttttagcacggttttttccccttttttaccaattgaacatttacatctttttcaaagtgctgtgattttccccttaagtcttaagctggcaccacacactttcaacaaatgagacttacatcacttgtatctgctgagagaaatcattgtaatactgtggattccaaatgcacagccatccaaaaaagagttttagt

SEQ ID NO: 102045 - DNA, 395 bp, Homo Sapiens
  misc_feature (33)..(33): n is a, c, g, or t
  misc_feature (38)..(38): n is a, c, g, or t
atggcagctgtctcttgagtctcttggtttacncaacncaggagagaggcaggagtggcatatgtttcaggaagatggagtcctggggagcaggtgtgaggggtagggggatggcagtgcacctggagcccaggccatgacacaggtatgagggtagggggatggtgatgcacctggatctgaggccatgacacaggtgtgagggtagggggatggtggtgcgcctggatctgaggccatgacagatgtcccctcaggtgctgcctccaggacacagacccagtatctcctgtcttctgtatttttcacaagaggccaaaatttggaattttcatttgcatatatgagagcttctaattttgttaaaccatgactttttaaagttgtttctggcc

SEQ ID NO: 102046 - DNA, 354 bp, Homo Sapiens
aattaattttcagccagttccgtcttctccacttgattgcgtgtttgcagtgagttcctgagttatcgggatgaatggtcagaaagcagtgtgcccaccaatgcatgtttcctgccattgggccccttagcagtgacttgggtgcaaaccagggtgatttttacaacttttaaacaagtttaaagcaactttgttggctttcttagctgtttgctttgaaaatattaaattcattttcagcaagtgagtcattcaacagttacactttctgagcatctatgtttgcagccaatgttcgaagaccagggttctggccaggtcagagcaggacaacagaatgaaattgtaatggaa

SEQ ID NO: 102047 - DNA, 404 bp, Homo Sapiens
atattgtcactggagaaattcattttctcaatttcaggggagcataccaaaatggctttactaatatatactaaatgaagattaagtatacctgtgtagtagagacaaccctatatgcttaccaaattctacttcatttccctttttttgggtatatagttttgaaaagtacatcgtgcaggctcccctgcagcttctagggccatgtgcgtaagaactgaccaatgaacaatgagcaggaagaatgtacttctgagattcggcagtcactcactgacgagcctcccctgtatgcctgctcttccccagcaatgctggacaccataaattctagatggtataactataacatggagggctcatggactcagattggacttcccaagaaaaagatgttttaagcc

SEQ ID NO: 102048 - DNA, 409 bp, Homo Sapiens
ccagtgggcacaacacagcccttggtgggaggggaaggccccagcctcctccacctcccactggaaagcagactgcttgggactgcccagctgtgaattgtatagtttctgtacttattagaaaagggtaaattattttggttcaaatctattattccatcaattcagttagaattgaattttctaggtgattatgcagaatcttctcacagggcacgatgctatcgtaagagatttctgttatctgtactgggcccccttgacctgttccttgagtgaagtgggggatgccatcaccagtcccaccttgcctgatgaatcacttcattatacatggtgatcagtggacacggaatccccaatagattgtatatcagaagaagaaaaataaacacttttgctcgaaaac

SEQ ID NO: 102049 - DNA, 337 bp, Homo Sapiens
agtttattagcacttgctgtacccatcgtgtgagaggcctcaattcagaagtatttctctctcaaggcatgttgtgaacagcacaaggtcagacataaccaggtccacacacgtttatgtctttccacagggtgggaatatattgatgctatttcaattataaaagccacgagctacgaggagttgcctcgagacaattcccttcagtactacttgttaacttggtagagccatgggcaaaggctcaagccagtccacgtgtcagtcaatactgcaaactatacatcatagtgtacttaaaatacaaacgctatggtttaaacattctccatcaaaa

SEQ ID NO: 102050 - DNA, 556 bp, Homo Sapiens
  misc_feature (515)..(515): n is a, c, g, or t
  misc_feature (525)..(525): n is a, c, g, or t
gcagaggccagagagagcaggaaaggaaatggaaaggaacctcaccttcatgcttggggaaaaggagaaacctgtgttaatgtgttcccaacatcccactctcttcagcaatcgctggaacagccatgggccatccctgctgagtcaggaaagaagctgagggaagagtcgggattgaaaagcagcagacaaggctggcactgatcccagtttatcctttgagattcagcagaagatcctgatggaggaggaggataccaagagagaggtgcccaaggaagatggagttggtgatgtgcaacatttcgattccagcaagattatggaagagcatagctacatacaaaaggagctagatttacaaaatggtagcttagaggaagactctgtggtgcattctgttgagaacgattcccaaaacatgatggagagcctcagcccaaagaaatactcttccagtctgagatttaaagccaatggagactattctggctcctatttaaacctctcacaanctgtgcctgnaaagagaagcccttctcctttgggaaccagt

SEQ ID NO: 102051 - DNA, 447 bp, Homo Sapiens
aactccaacttgcaggatgctagaggctagctttttgttgacagaattgtcatcatccttaagcaaaaaaggctgccatgtctattcccctcccaactatctggatatttgctggaattccaattaatattttatgctatgacacaggatatacatttgctcaaggaactagcaactacactcaaagctggcaagccaataaatctctcaaaaatcatgcctcgtgtaaacgttcaggaagttccaccaaaatgggtacgactattctttccagaattcctctcgcccccagccacagagaaagctttgaagaagaatggtttgaaagattttctgtgtgtttaacatcttaagtccaaaacatttctctgctcaaacaacaaaaacatttatctttttcacttttaccactataggtttagtatactagaaaacacttgtctctac

SEQ ID NO: 102052 - DNA, 400 bp, Homo Sapiens
aatgacgagaaacaaaacaaaaacatcctggagtagagcaataaacattagtgttgattttactgctgtgaggaatctctttccagaacagaaagtagtgccataatttggtggaggggtggggagggaaggggagatgaaagagaagaaattgcaccactaatctaactctgtaaagcaattgtttagttgctgtgctagcaacttcacaaaagccagagataattatagctgggaaaggaatgctttagcagccaaactaatcttttttaggtttttagctgttattatcatagcagcagtttcctccacagtgtaaataccccgtgctttgctccatcacaaacactgctcactggttcctttccaagaaaacactcttattgatgagattacctaa

SEQ ID NO: 102053 - DNA, 477 bp, Homo Sapiens
aaacttctatacaacaaaggaaacaatcaacaaaatgaaagcgcaacctatggactaggataatatacttgcaagccacatatctgataagggattaatatctaaaatgtataaagaacccttacaactcaatagcagaacttttttaaatgagcaaaggatctgaataaacatttctccaaagaagacataaaaatggccaacaggtatatgaaaaggtgcttatcatcattaattgacaacacataggtcctttatccatgtgcacattgcactaacgtgcaaggtgaagactatagttactaaaactgtactgtattaggaatttttgttaagtaaattttagctgctcttgtcatgaaaaagtaacaatgtgagatgtcagataagttaatttgtgtcactatagtaactattatctgtatgtatcccacaacatcatgttataaacctcaaatatactcaaaaaaatttact

SEQ ID NO: 102054 - DNA, 472 bp, Homo Sapiens
gcggccgcgggtctcactgcaaagagggtgtggcctaaactctggccgccgcgaaactctggggccgcgcttggcgcagtacaaagcgggctggtggcgctttgcagctgccccggccgcgcgcctcccggggggcccacacccctgcgttcctgaaacccttcttttgaaaaatgccctttcgaacgcaaccgtccgccccagagccacgcgggcacggctcgagggaagtttgtttcctttttcaaattgctccggtcaccttaacggtttgagtcttccggagtcacgcccgcagcctcgctgcacccatctggcttgggcagggcgaagctcgtctcccgctttaagagcgcgccagcatattctctgcctgctcttccaggccggctgggcgggggggctcccaacggcttcctctccagttttcaaaggctgcacatttcacttaactatttgaagtatttatagg

SEQ ID NO: 102055 - DNA, 471 bp, Homo Sapiens
  misc_feature (40)..(40): n is a, c, g, or t
atgtccaccagctctgttgctaatgctttcattgctagtntgatatgaatttcatcaagttccttaagtgtaatgagcaacatacattgttttcaaatcattcccactggtctctcttggatctgcttgtaatacaagtttgctgtataaataataaagattacatttgaaattgtagtaatttctggactatctgttatctagaacattctggacaaatattcaatatgtaagggcagtatagaccttcctgaggataaagttttgaagaacactcacctgggaataggaattcacattaatatataatttacagcaaggaccccaggtcacttcctagacttgagggtagaggagctaatgcctaaatttcactcctctttaggtgactctactaactgatgaaatggctataacagaagcgactgatcgatgtgctacttaaaaacagctagaggctgggtgtggtgg

SEQ ID NO: 102056 - DNA, 461 bp, Homo Sapiens
  misc_feature (77)..(77): n is a, c, g, or t
ccgacctgggttgtagactccaggcacagtcaactgcaggcacagtcagcaccagcgcagcagggacggggcggtcnctcactgacgtcctcctactgcagatgcacactgaggctcttggccgcagagcgtggcgtctgcagttcatgccaacggtgtgtgcacgtccccggagagtgacagaggagagtggctaaatgtcagtcatggggaatctagagcacaggtgggcacgcttctccgatgaagggtcaggcaggaaatattcttggcactgcagccatacagcctgtgcctcagcaaccacgggggaccacagaaggttggggaccactgctttaaacaactagctctcccgtgaagagcaggtccccaccctgctgtgtagggcaacagcagatgtcaatggcatatgaatgaacgagcgctgctgtgccaataaaactttatttacaaacgta

SEQ ID NO: 102057 - DNA, 466 bp, Homo Sapiens
gtccattgatagttccagtatagaaagtgcataagcaacagagggctttgtaatcttacatcccttgataaaagatactacagtcaatctcctgtagtagttccacagttccatagattacatttttccttggagcatcctatatgcagcatagtttagtggttaagagcaaatacttcctgaatttaaatcctggctctgccacttaactatgtgatcttgggcaagatatttactcactttatacctaagttcctcgtatatgaaacagaggtgataataatagttcctacttcataggattgttgagaggattacatgtaaagtaccaggacagtgcatggcacatgtaagtatttgctttaataataattatggttctgttagtcctgataatctcatgttttatctacacatttacacctacttctaaaagcagtggatatatttctttttggaattgtgt

SEQ ID NO: 102058 - DNA, 550 bp, Homo Sapiens
  misc_feature (23)..(23): n is a, c, g, or t
agatgatgcagagaatccccctntaattcctgtctaattttccgaatgaattttccgaatgacgcactcgtgaaacttagttgtggttaactttgcaaaatgggaaggggggttcaaaatcggaaaagactttacttttcatttttaatcagcctggtgcctttagagctaggatttagtttctattctttctgtctcattttcaagtgatttttttcttcaaatggcatctactgggctcaagaactggagatccccacaaagctgagattcacatgggaattttgtacacacccacacaggtatacacttccatttacatgcagacatccacccacagatacacacatccggagaccaagacagaacgcaaactgccccataaaagcacggttccccaaacaggagaaacgcaccattcactccagggaggtatctatttgtttaattcagcctctgatagtcaggctgttgccaagcccagctctgaaactcttcccctctaggaaagaaagatggattttttctttactcaagaatatagatctct

SEQ ID NO: 102059 - DNA, 463 bp, Homo Sapiens
aattaagtaacaaaatttaaaaaatacaaaaggatgtacagtgaaaagtacatctcccttctatccctgatccccagactctcagaggctgcctcctttagatggggcgggtgctttccagatgtccccactctgcatcaactggccctctttcacttatctgcattgtctgcctgacccctttagacatctgagctgcctcccaacccattttaccacgcctctcctgcatccccttaacacttggcatgtctgtcgttagcactttcacacaagcttctttacaaggctgtgtctttttagatggggagattcacagatgcatgaggttaggtttacatcttcttttgactatctacatccctgataactaggatggtgtcagacttatggcagatgtacaagtctgttgagtgaattaataaattaatgaatgggcaaattgtgtattgtttccagggtc

SEQ ID NO: 102060 - DNA, 577 bp, Homo Sapiens
tttgcacaaactgcaaatccataaatgcagagattataaacattgataccgaaatttcttccagaggattttctgaccttatgttaactctgccatagacattcgtgtttctttggaaatgttggcttattttaatgaaatggttcctttggtacagttggggctgtgatgtcaacctggctccattctaagaacccttatgaaatatttacagtgaaatttaactacacatgcgtaacagctgacttcggtggccgccaaggtttaggcttacctttttatctttcttaaaggaaaaaatatttttacattttcctcttctccagaagctcaaaccctcttgtatttaacaacttcccaactcacacctctatgtgaccatcagtgtggagtggtgagactaaaagatgattctggccacatgacatctttgttcaagcttcacttctacagtgaaagaacagctgggttcccccatggaggagatgggagctaaagcaggagctcaagggtgtaacaggagaaatggtgattcactagcaataagtcccagtccttcctttctgagaattaaacc

SEQ ID NO: 102061 - DNA, 494 bp, Homo Sapiens
  misc_feature (137)..(147): n is a, c, g, or t
gcggccgcggccagggcgtccgggctcgttcgccgcgcagatgggggtcggtcctgacccccgccggggcgtccacagcggcccgcaggcagccggagacttcgcatagtgcccggctcatcggagggctgtgatcnnnnnnnnnnngcagaaatattacaactccactgatgagaaaactcacttcgctttcagtcaaaaccagaaattagataacagaaatgccacactgtcaacaccgaccgggaggaaagcctcgctggcggagaccgctcaagggagccctccgcgcgttctcccagcccgggtcgcaggtggagggggagtgcctcctgcagggacggttctcccgcagacactcaaactccgggatgtaaaacccctgttaataattgtcaggggtctgttaattgccaaatacagtttttgaaagttgtatgcactaggtaaaataatttatgtaatgtttggaagtatgtgaaagacagacatta

SEQ ID NO: 102062 - DNA, 273 bp, Homo Sapiens
  misc_feature (56)..(90): n is a, c, g, or t
gagacagagtttcgccgttggcaggattgtcttgaactcttgggctcggtgatctnnnnnnnnnnnnnnnnnnnnnnnnnnnnnnnnnnngtgtgagccatcacgcccggcccacttgaatatatatatatagccaagaatagttggctatactttcatctttgcctagttctaagtaattgattggtttcaggatccaataaactctacaggtaaatccactaaggtaatggtctataccggtggttcctgaacttgagtgtgcagcagaat

SEQ ID NO: 102063 - DNA, 672 bp, Homo Sapiens
  misc_feature (156)..(156): n is a, c, g, or t
caggccgaccaggtgtctgcggtggacagctactactacgatgatggctgcgagccctgcgggaagacacctcaaaccgagagccagccattgtcaggttcttctcccggttcacagaggtcagggagtttgccattgttcccctgcatgcggccntgggggacgcagtagccgagatcaacgctctctatgacgtctacctggatgtccaagcagaaatggggcttggaggacgtcatgttgatgggcgacttcaatgcgggctgcagctatgtgagaccctcccagtggtcatccatccgcctgtggacaagccccaccttccagtggctgatccccgacagcgctgacaccacagctacacccacgcactgtgcctatgacaggatcgtggttgcagggatgctgctccgaggcgccgttgttcccgactcggctcttccctttaacttccaggctgcctatggcctgagtgaccaactggcccaagccatcagtgaccactatccagtggaggtgatgctgaagtgagcagcccctccccacaccagttgaactgcaggaagagaggacccatcctgccacaggacccagaaaaaaagcccaacacacactcgggttaagaaatacctttaaatttaggtaaataaagctcaaggaggtggggctgtc

SEQ ID NO: 102064 - DNA, 434 bp, Homo Sapiens
ggaaatatagcatctatcgtgaacgtggaaaagtaaagataattcaccatgcctgctgtggctttagttcctaaagaactctacctgagttcttcactaaaagacctcaataagaagacagaagttaaaccagagaaaataagcactaagaggattacgtccattcaatacttggaactgaaaacatcaaaaaagccattgaagaagctgaaagactctctgagagccttaaactaagatataaagaagctgaagtccggaaataacttgaggaaaaggacaggcagaaggaagcaaagcaactacaacaaaaaaggcaggaaacaggaagagagggatggtggcacattggctaaagtttctttggagaatgtattggattaccaagacaaaacccaaaagagcaatggtgaaaagagtgaaaaaatgtgaga

SEQ ID NO: 102065 - DNA, 451 bp, Homo Sapiens
aggagtggggggtgagtagcaagtcttctgattaggaattttcaaagacaaacttacaaacagaagaaataaagtttgcattccttcatatatttagatatgacagattaaaagcaaagcaggtatgcagagcatgtttaatctctcaccaaggtggcaatctccaaatgctttgatgtcgcctcattgcaaggcccctgagacttttccaggaaccaaattcattgactttatgtggcttgcccatcccttctggtgttcaaaaaagaaaggaaaaggtccctgcaccttcttgcctccttcctttattgtacagtttgctttgtttgtttgattttaaaactgccattatgtgaaagtgttgcaagtataaataattgagaagataactctgtagggaaaccacttttgctgcctttgtgcaaaggcagctcattacggctctaagctg

SEQ ID NO: 102066 - DNA, 575 bp, Homo Sapiens
ggtgcggtgctcatgcctgtaatcccagcactttgggagggcaggcacagcctgggcgggagagatgagaggtgaagaaccagggctttgaggaaaggagatccacagagaagagaaacactaccaggtgtgtctgggactaaacaacaacagtttgcctgattttcatgttggtgctactgggaagtatgttggtgctactgggaagtaactatttctaaagtacaccacttgtgagcatggggtggaaggctggatttaaactcgattctgtgctctggctgggcttatccacaagttggcctagctcggggagcctggcatttgtgttgaagcagcaagatgacctcaccgcaagcaaaacatctcattcctatgggctcttgaggcatccgtctgtgaccactgacttcaactatgtgacacaacatgccttccctgacgctcaggaacagaccattcatgtgtcttctgcactgctcattcggaagcatcataacttaaaatgatcttaactaaaaaaatcacggctctccatcaaccaacgctcagaaatattttcccatgctcacgga

SEQ ID NO: 102067 - DNA, 607 bp, Homo Sapiens
acaaaacaaacaagaaacctagcatgtctacgagtaactttgatcatccgtcagacatggcagcctgtccatgggaaataagagtgttggtgtctgtggtcaacatttctatttggcctttagcatggagctgtctcctttcttaccatatgcaaagcaaattccaatgccgtggattttcccggccctgctagccacgtgtccctctttattactgtcacttcagcacagagtttccaagaaagagacacgtggaacagcctcatgttgaattctaaatcctactgatggacacaccaaatagcctcctgaccacaacagcatattccaagtcaaagttctccatgaatgttccttagcagactgaagacaaataaatacatgtcactttcttcttgaccccagagatagggacacgaagggataaacgtctttgggaatggcacccctgtaacctcagaatcactacttcatgaccaggtgcagtgactcttgcttgtaatcccagcactttgggagcccaggcaggagggtcatatgaggccaggagttccagatcagcctgggcacatatgaagaccctgtctctacaaaaatgaaaaataaa

SEQ ID NO: 102068 - DNA, 378 bp, Homo Sapiens
actaaagtcaaaccaaaagagctacatttaggggggctaatagggtagtctatggcagtgcaatgtagagaaatagagactgtctggggaaataatcatgattacagtgtgggaagaaaaggaagatttaggtaaagagactgataatcagtcctagtttattttcctagttagtttagcacaagaagaggtcagctaaacccaggagtgaaaaaggttgcacagtgcactgcagaacagtgttttcagagcatccctttaaaaactgaagaccacaaaactaagatgctcatgttaagttagagagtaatgtcaaatgaggacatatgtaatggtggcattcctatatgaggccaaaatctgtgtccagaggtcata

SEQ ID NO: 102069 - DNA, 929 bp, Homo Sapiens
  misc_feature (273)..(282): n is a, c, g, or t
agatgcaaagcttctcagcatcgcacttaccatcatcaccaccatcccaacagacgactgagagctttttgcaaggtcgcaattgacaaagaggactaggtccttgcggtttagagtcagttaagagtccgtgtgaactcaaccttgcctttggcgtttgattttcagaggtttaaaatgaacttctcattgatgtcccactctacttgacttagcaggaaaaagactagagttgaacttgctaacccaggaaaagtttgtgcctgttagttnnnnnnnnnnggggggggtggaattctaatatcaatgtttctgtaaagttataatctgtggtttacatatgttatcactgaggtccatttgtacatgtattattagattatctccagatagggatgtgtcttctatttccattttctctgccagtgcctttatttcctagaatactgtttttcatggatagtgttttcttttgtatttcatctacactttcatcctcattcccactccttatttagaaaagaaaatcaagactccgtagaggattccctccctctgaaagaatcctccttgcagtttttagttctgtcttcaaacaatatccatgctttcaaaagactaattcagtagtgctttgtgcttcctagatccggtaaatataaattacacttgttttactgattaaactaagggaagaaaagagttggtcattgtatacgccttgacctctcccaagggtcgggtctgttgatcttctgagtgtcttcttggtattttttccttatttccagtggtatgtcctacacagtgcatccttaggccaggagacgcagtaggaaaatgactctacctttcatgagaaaagggtaccagttggtattagctgatcagagagttgctttaaaaataaaatgcttatgtattgatga

SEQ ID NO: 102070 - DNA, 766 bp, Homo Sapiens
ctctctctgcaccccagcagctcccatggggacagcttggatcacactttgggcagctgcccaggtggttctggaagtccatcgacatgtgctggagaaagtcactgctgactatgtccgcccactggatgctctccacgttgcacagggcagggttgttgctgaaccgcacggcgccatgcagaatttcctgtaatttctcatgggcagctccttcagtccggttttatttgcatcatagttagataagactgctaaggcataggaattttcgtagtacatatttcctctgatgatctgcaggttttccaaaggaattcgctccactgtgttgagggcaatgaggacataaccagccacctcctggatggtctttaagaaggaaagatcataattcctctgcacataggtaatttccaaattcccaaggaccacctcacagttattgaacatcctctggaggctgagaaaatgatcttcaaaagtgcccaactgcgtgagcttgttactcgtgccttggcaaactttcttttcctccagagcccgactcgccgggcagagcgcagccagcagcgccaggagcgctgccccggccgtcccggagggtcgcatcgctgctccccgaagagctcgctccggctctcccgatcaatactggacggagtcagggggccgtgcgcggtggttgtggcgttggcggcgaggcggggactcgggcggacgccgacgaggtggcctgtcgtccggtctgggcggcggcggccgc

SEQ ID NO: 102071 - DNA, 225 bp, Homo Sapiens
ccctgagagcagatcttcagagaaaaaaaacttgagtgcagtagtttatttggcgtttggctccaggatgcaggagtgggaaagatggtagagagacagaagaaaaatcaatagaaaggtattacggaggttggatatataatgcttcccagaattgtctgactgaacaggaggctgaaatatttatccgctggctcctgtttccaattgattgagggatgcccc

SEQ ID NO: 102072 - DNA, 697 bp, Homo Sapiens
cttcttcctctattagcaaaaccctatttatagctgcccaagagaaaagagtgtatgtttggagtggaagaaaatcggttttgaatctcatgaaccttgagtgctggagcatctgatctgtctctatgccaccactggccacctagagcccttggctgtggtaatccagggtaattgcgcagaggcatctgatgtgtaggaaagtaattctggggatttgatggagcagaaaggagagagacctatgtttgctaaaccaatcttgctatccctatgcctctccatggagtcagtgtggacctcatgattatagaggccaatggaactggtcagtgattctctaccccaagtagggaaaacctccatcttttccctgtcttcatcctgttatcccctggtgtacacatggaagaggaccaggacataccacctggggatgggctgactcagggtcccgaggccagagacaaagctgtgggagccaagaataagacagaaggcatcagatatttgcctggctctggtcacttccctttgaagttgacttcaagcttagcttcctcaactactgtttttcagaaggaagaaagaatcaaatggaagaagaatcaagtccatgcccaagcccaaagcctgcacacattctgcccttaatccaagtgttgcctataaaaatattttctggtttctcactcta

SEQ ID NO: 102073 - DNA, 217 bp, Homo Sapiens
tgggggtgacgttgacttggatcacagttgtacactaaataagaaaatacgaaatgcacagctagctcagtataattttattttgatggttaaagaaaaagaaaacatagataatactgtaaacgtgccaacaagagacaacaaaattccccgagagattttagtaacctccgccattgataaactgccgcacctcaggaagacacggccccctcaa

SEQ ID NO: 102074 - DNA, 340 bp, Homo Sapiens
taaagcaagttcttatctgagccagagggcataattatgtcagaataaaatataattatgtcggaataaaatgccctgtactaaagaggtcaactaacaggctgggaaatcttaagttttgtttttaagacaaatccttgaactctctgtgcctcgtttctcatccctaaatctgtgcaactcacctcacagggagttgtggagggtaatatactgctaatttgttcagtgtttcacaacaataaattatgcctaagatctgataaaacatagcaaacctcatttatgtaagtagagacaagcatggataagacttacagataataaagaaaattcatta

SEQ ID NO: 102075 - DNA, 244 bp, Homo Sapiens
cagcataaatgtgagcctccctttctgcaaatttgttaggattggaaatgggggtggggcgtgaggggggaagttgtactttggtggcaaggactgcttagcacttttttaggaccaaagcccacagtcaggcttcacatttctcagtttccaggtgtgtgaatttctaatactgtgttgtcaaatgagcactaatttgtatgcatttctaaaaattaaaacaaaattccttttaaaaaattaa

SEQ ID NO: 102076 - DNA, 352 bp, Homo Sapiens
tttggtcctatgaacaaaagggagggatccaagagagaagtgaggcatctgggagacgctggggaactaaactactaacctgttgctcagccctgggctgggccatttaacaaatctgcaacttccccctgaattagccttctggattcatagaaatgagccctattttatggcttgctaaatgggaatctcttctggaagaattctaagaatcaagtcaatttatgacctaataacctagtttctactcaaagctacagggtaggaaacgtaagtgacctgaggccaagtgaagctgctttttgcccacttctgctaagatgacacaactttgtgaggaagtgctaagctg

SEQ ID NO: 102077 - DNA, 470 bp, Homo Sapiens
taaatgatgaaaataaggtacaaaatacctcgcttcttggactgattttaaaacacttggttatacctgatggagaatctatggattgcaaaggttgtggctgatacagcagtaacccctcccttcccctgagatcagtatttcggtgaaaaaggtagggaagttgccttgagtacaaaaaaagagaagagggctaaccaatagcagcggtgtggcagacagcacagtctgaatttttaccaaatgcgagataaatagcagaaattgtgcataagaaagaatggattctcttccttatgctgagaacaggcctctctcccaacaatgaggagctcttcccctgaggaggagaaaggatcttgtttagggctttgacctccattgaaggacagtgttcagattgtcatcaacaagcagagagaacaaagaggtaccagaacagggagcaaggctctactaacccagtgaga

SEQ ID NO: 102078 - DNA, 547 bp, Homo Sapiens
  misc_feature (526)..(526): n is a, c, g, or t
tcgtcaaataagttgtaagagtataaagggattgtgagaccaaaaagttcaagaaccactgctttgatacaaagctaccctgttttgatttgaaaaacaaaaaccactgtatttctttttcattaatgctcctggcataatctcaaccacccatttaaattataataattaaccagagaaactaatttatatttcatagagaaaattaggaggagggaggatatggacaattggaaatcgtcccatataatcattttagcagactagcaaaactcatgaacacacattactgaaatttccatagtgacataaggcacttttacattcccttaaagtggcaaaaaatgaactcctgtattgacacaactcaaaggtatagcctcactatagcatagaaaaataagaagcaaacatatataaacttaatattatactttataatcaaagtcacagtattctaacttacttagaaattatctaggtatccaatgattattgattagctcaggttaacattagtccattntgttacctaaagaccttggaa

SEQ ID NO: 102079 - DNA, 327 bp, Homo Sapiens
gactttctgcatcaagagggtatggttaggtacgggtcttcctgcctcattcctcttcctctttgtgtaggtttcagccacaaaactgtcattcactctaggggacccctactaaagggtaacttcaggtgtgcagccctgagctccaaggctctgcaccatgccacacacttgctgtaaggctagaagtgaagaccttattaataggagcataattgcgagggagaatcatggttctgcagtctagtgtagacactggaataacagcacagaaaaatctatgactcccaatatcttctagaataaagaattttccctctttaacac

SEQ ID NO: 102080 - DNA, 319 bp, Homo Sapiens
gcactcaacctgtagtaaaatgtaaaatggctcttattcagcataaatagaggcatgcccccatcaggggtcatttcagagttcatcaagattctgagataaaaaagcatggtacagtgaaaacaacaaaattgactttcctgtttcagaagccaaaagtcagacggtttgtatctaattgaataaaagaaacttgaagtacgtaagttaaaacttgaggtgtatcccaaaccatgggagcgttgaagaagcttttgagatctgggtgccatgtttggaacacactgatgtgacaggttgcctggaccacaaaccctgg

SEQ ID NO: 102081 - DNA, 326 bp, Homo Sapiens
gtttaactatagcagcttaactgaccatttcaatctttgggttcatcttttaagctaaatttttccttgttctttttatatttaacgattttcctaaatcttcatatctttccagaatgctaattcaacttatccctttaactctagtgccaaaatttggaggattttcaatcacgttagtgctagaataaaaaagaaacgtgaagtaggttataaaaagaaggatctcagcacttttacagtattcatgatttatcaactgcaatgctgagattttacatggctgactacttctgtgctgaacacattaacctgcttatatgata

SEQ ID NO: 102082 - DNA, 557 bp, Homo Sapiens
aagcacagtaagactgtctgtagttttttaaataaggtatgttaatgatcatttatagataatatcattatatacccagaaaacccaagagaatcaggagtgtcagtattagaaaatgctgtaaggtagccaaactccaagattaatatacactaaagggacaaaaggagcttagtacgtgaagacatgccttggttcctagataaataataaaagagaagggagtaagacccacatgttgaaacatattatagggctctagtaaataaaacagtttaggtctggaaagggggaaggcaaacaactccatgtaacgagggtggacactgagtgtctgatgaggacagtatttcacagaagagggaggagacagatcactccatccagcagcactgggatgactgggagccatgcagaaaaccatttagaccagagtaaattccagagggatcaaagatgacaagcacaattctagggaagaaatgtttcatcatctcagaaggggaaagcctttccaagcaaaaccacaaaccaaaaagtaaagaatgattgacata

SEQ ID NO: 102083 - DNA, 468 bp, Homo Sapiens
gagaatcacaagaaagctcaatggcatttgaccccaaatggaaaacccaaaatgacacttccattaggatattcctttgttttggaagaacagggtgagaagaagaaagacaggggcaaactttaccagacatgcccttcaccagccaggattagtaactgaagaggaaggagagaatgctgggtgcactccagctgctgggacccttctctttccatctcactgtacctttgcttctggaggaaggaaaatacattcaagtcctaggaagattctgaaggtcaaatgagggaaaggagccctgcccagcaagatgtatcatgtcaagccacctgcttctatcagtcccaaatccaccatcaccttagttcctgactgcaattagcacaactgtgttatcacctgctctaactttagagagagactgcatttaacatcaagaatgagggtgcttttgggaaaatgaaa

SEQ ID NO: 102084 - DNA, 285 bp, Homo Sapiens
  misc_feature (193)..(193): n is a, c, g, or t
atgagcaccacgcccggccgagcatacttttaaaaatgattttgaaacacgggtctcttttctttaagtcaacatttgtctaagcacgtctgtaaacgttctgttacagggagaggaagagtattgagcaagttctcctcaacaatcagacagttccgctttatagggactgacatcccttctaggttcaagnaggaagtgtctccacggtaattacccaatgagctccagatgagtaaggtttgacagctcacccacatgaggggacaaattcatcaagctatt

SEQ ID NO: 102085 - DNA, 297 bp, Homo Sapiens
aacattatactaagtgaaataagccagtcacagaagcacaaatatatgattctatgtatgtgaagaacctagaataggtaaattcatggagacagaaagtagtttccaggggctggtggtaggggagaatagagagttagtgtttaatgggtatagactttctgtttgggatgacttttttaaaagttcaggggatggatagtagtgatggctacataacaatgtgaatgtacttcacaccactgaattgcacacttaaacatggttaggatggtacatttttgtgtattttaacat

SEQ ID NO: 102086 - DNA, 448 bp, Homo Sapiens
cacagtcagcacttgtcaaatgaggcctggtggtcagagccccctctgtgctcctagcacgtgagtcttcaggagtcaggccttgaagagtgtctgccattcgttccgagacaggaagtaagagatgattggccaggaggctgcagctgcaagtcccaagagcagcgcctggcgccagctgccaccctcaggcttggagcagagaagagatggaaaccaaataaccgagggcctggctcaggaccttcacgcagttttcaagaaattcatcttttcttgccgttttccctgtgttaagtgagtcaggaaattgaaaaacagaaaaaataagcgtgaaagtaggtagttgactctcatatttattcagttatttttaaagagtttatcctactgatatgagtaaaataaaattttcgttaggaataataagagcttattttctatctag

SEQ ID NO: 102087 - DNA, 360 bp, Homo Sapiens
gtgtaagacaccacacctggcctacaatcaagtgtgacaaccatttaaaggctttgtctcattcttcagatttctaagatttctcaccagtataatttcttttatggttagaaaagtttgaggtgttgtcaaaagcattgccagatctttctggtttgcagagtttctttccagtatgaattatgttatgtctgttaagaattgagggcttgttaaaggctttgccatgtttttcaccctcgtagggtttctgtacagtatgaatttttaatgcctagtaagagttgaagactggttaaaggctttgccatattcttcacatttgtagaatttctctccagtataaattattttcttaaa

SEQ ID NO: 102088 - DNA, 524 bp, Homo Sapiens
tcagacaaacaagaccgattaaatcagacacttaaaaaaggaaaagtcaaaagtattgatctaccgatccagagtagcctatgtagacaactaggccaagatcttctcaacagctacattgaaaatgaggtatgtaaatctgagttgatgctgaaataggtggtagtttattctgaaattttgtagaagtcaatgattatctccaaaatttagggcactagtttataactcctaaggaattatattaagtagattactaaactattttttacaaaatactgagctgttttaatgccatatgtactgtgtagctatcatcttagttgtgtgaaaaacatgtattgcctcctctatagagaaagacttttctgaaattgattcttccttttattctgtctttaacaatgacacccagcagaccacatatggggaaatattagctgctcccctcttctcctgtgttgtccttaaagattatatctctgttcaaaatgttttctgacatccattaaatatttttttaa

SEQ ID NO: 102089 - DNA, 387 bp, Homo Sapiens
  misc_feature (369)..(369): n is a, c, g, or t
aacagtaaaaaatccttaggtgttctccatctgccgtgggaaacactccgcagctgcttctttagcctagcaaagatcaacctgaccttggccaaccagcttgtactttgaagagtgtattttgtgaaacctgtgagtagagaaggattcatgcttggcagaatttgttgtctcttttgctcagtatcttaccatgattaatccccaatccatctttctctgctgctgctgttgctgctgtcagacacatatttcttctccataacagacgctgttccaacgttgctggattctggctgggtgtgaccttttatggggcactgctgcctcctatcaggcttttatgggcatgttggtttatgcacatgngcaggcattctgaccttg

SEQ ID NO: 102090 - DNA, 445 bp, Homo Sapiens
tggcgtcagttccgccgccgtgaagccagattgggcagggaatatgcagtctcctcgctggatgcccggcaagaccctcccatccctggccccggggccgcgcctgcagaatggggctgatggtggggacttgcctggggtgctccacctgcagagccctctgtttgcgagcccactcagtcactgcacaggtgcttagccgagaggcggcacagtcggggttggcacctgcacccataccagccctgcctcctgttcgctgtgtggcctgagtggctggacctcactgtatctcctggtgggattgctcagaggtctcagcaaggcttggtgtggttaggatgagttattagagcagtgctgagctgtggcaagcacccgacatcagccactgctgtgatatactgagcacctcctctagagagaataaaggactgacaaagct

SEQ ID NO: 102091 - DNA, 332 bp, Homo Sapiens
gaccacctgttggccttgtggactggcttgatgatactgaaagtgtggccacagatggttgttgagctgcattgctgacctccaggaatgtataagaaagcctaaagcaagcaattaaacagccactggaagtgataacacttgggagtttgattatccttatgtcagaaggaaaatttgtattttctctttattgtctataaaagataaaaatttagataagggcaacttaacttttaaaaatctccagtggcaataaaaaaatcttcattaccacatttctgttgaattgtattttaaagttcctaataaaatgacctcatttactgggg

SEQ ID NO: 102092 - DNA, 190 bp, Homo Sapiens
  misc_feature (94)..(94): n is a, c, g, or t
ccacgcgtccggcacctccccgcccgcgggagcgagatccttgggctctgtcacagggatcaaaggtccttgtggttggaaaggattaagcccntgtcacccatttgagtgtttgtggttgcaagaagttttagctgaggagtttacaaggaaataaacgcagtaattgcatgagttgaattgcagatca

SEQ ID NO: 102093 - DNA, 365 bp, Homo Sapiens
  misc_feature (30)..(30): n is a, c, g, or t
  misc_feature (32)..(32): n is a, c, g, or t
caccatttaaaaagtcactgttattccacngnttaaaaatagaaagtttgctctgagaaaatttcttccctcccattacaaaataaagtcacagtctttccgtatgtccactctagagtgctatcttccaatctaaaacagaggaactgttttcaaacatcattagtttagcggtctccactaacaaagacatacggataaagtaacatgtaagtcagattaagaatctcaactttttaagaaaaaccaaatgactaaaggcatatttttattctatactttttgtcctataggtactctaggtccttgtgtaattattgaggacaaaacgtcagttaaaggtgagagggaaaactaggttgcca

SEQ ID NO: 102094 - DNA, 305 bp, Homo Sapiens
  misc_feature (220)..(220): n is a, c, g, or t
  misc_feature (246)..(246): n is a, c, g, or t
  misc_feature (265)..(265): n is a, c, g, or t
gcgaacactgcggtccttgccaaagtaaaatgaagctgccccaggacaaggggttaccatgagctccctggagtccgacgcgggttttctctctgggggacctgggtggtccccgctgtggtctttgttgtcccactttgggaccgggtccagtctggggtctagtctcgagcatcagggtcaggctcggggcagggctgggttaggctccgggtcagtnttgccatgggtttgggagcaggtttnggttacttgcgtttgaagncagcagtggtctcaggaggaagaaacgggggcgggagaga

SEQ ID NO: 102095 - DNA, 162 bp, Homo Sapiens
aagtacaaatccacggtagaacatgttgttccaactcaactacctgcagggaaaaaaaatctctttttcaaaaattgttttttctaaacggtgtatttttagtctgaatgtctaaaatgaaaacactgaaatactaattcaagacagtaaaatagaacttat

SEQ ID NO: 102096 - DNA, 414 bp, Homo Sapiens
  misc_feature (25)..(25): n is a, c, g, or t
  misc_feature (42)..(42): n is a, c, g, or t
ccctatgcatgtcaccacaaacccngggtagctcaacggctnactctcaaacagccttcctgccacagcaaaccttgtttccccaagatgccagtaaattaagtaacaaattcacaattagttcaagtggactcaggaaaaggatgctttattttcagatctagtggacaagctcaaaaactagaatctgagagaatttcatttgaaatgagttagaaaaaaaatgtggcatactctataggaattatatgttataggtatttcacagacaacctaaattacaggaaaagcttcaaacaggagcatagacttgaaaaaaacaaagataataagatatgtatcttaactggcaaagaacaggtaccccaaacatttatgatttcaaaggcaagatcatacttgttttatatcttc

SEQ ID NO: 102097 - DNA, 238 bp, Homo Sapiens
aggtgcttgtatctgagaaggaggaacagactgcggcggagcctgctgctgtgaagaagcagtggatgtgccatcagaatgggattcctctttatgctgcttttgtgattgcttttctgcttcagagtcatcagaatcatcttcatcatcgtcctctgaaaattactccacttcccgtccctcctcagggatttcttgacctgccatacgaagcatcatggcttgatgcttcgtatgt

SEQ ID NO: 102098 - DNA, 195 bp, Homo Sapiens
ctggttatataaagtttgcccaagaaagaaatttgtgtaatagaaatataacaatggtccattattctccattcagaactggaaaaattgggaggagacatgtttatactatttgaaaacttaccataaacatatattacttttattggaaaaatctacctttaaaagctatctatctgtctatccatctatcta

SEQ ID NO: 102099 - DNA, 249 bp, Homo Sapiens
tctcttgactagggaattgaacaggtcccagaggattcacagtactgctgtggcctctggctgggtaaatcatcccagctctggggctctgggctgcagcgcggcaaggcagtgtgttctgcacaaagacaggatgtacttggggagaggctgtaccattgttgtgagcggaagagaaattaattttaaccctggagttgattccagcctgggagggaaacgccaacacttggagagggatggtttcag

SEQ ID NO: 102100 - DNA, 871 bp, Homo Sapiens
  misc_feature (795)..(796): n is a, c, g, or t
  misc_feature (810)..(810): n is a, c, g, or t
tctgatcacgtgcggaagaggaacgtggaatctggggaagaagagctggcgtccaagctggaccactacaaagccaaggccacgcggcacatcttcctcatcaggcattcccagtaccacgtggatggctccctggagaaggaccgcactctgaccccgctgggtcgggagcaggctgaactcactgggctccgcctggcaagcttggggttgaagtttaataaaatcgtccattcgtctatgacgcgcgccatagagaccaccgatatcatcagccggcacctgccaggcgtctgcaaagtcagcacagatctgctgcgggaaggcgcccccatcgagccagacccgcccgtgtctcattggaagccggaagctgtgtattacgaagacggagcccggatcgaggccgccttccggaactacatccaccgcgcagatgccaggcaggaggaggacagttacgagatcttcatctgtcacgccaacgtcatccgctacatcgtgtgcagagcactgcagtttcctcctgaaggctggctccggctctccctcaataatggcagcatcacccacctggtgatccgacccaacggccgagttgcgctcaggaccctcggggacacggggttcatgcctcccgacaagatcactcgatcctgagggctccggcctctccttccctctgtcctccctgcacaggccgcacacacttaacgttttgttccccaggagaccggcggaaaagtagaaacctgcaatgctgcatctgggaaactgacttgtgaccaggctgannaaagggagagttgnggatcagacaagcctgacttctctgcagggttttataccttgaccatgaacccccagggat

SEQ ID NO: 102101 - DNA, 334 bp, Homo Sapiens
  misc_feature (283)..(283): n is a, c, g, or t
aacctccttttctgtggataaaggagttgctttaaccagataaatagccaaagaaatgcattatactctaacagtgataggtcgtattgggcacctagggaagcacctctaatggttctgaaccattaggaagtgagactccatcattcctacaaatgatggacattccaaaacaaggtccactgaggcagtcctggtgtttccttctatcaaaaagatactgtcccttccctgcccctgagcatcagaaagaataatgactgcggtatactgaaacccctgnaaatatacttaaaaacacgagttcacgatgatacttaaaagtagggaaagg

SEQ ID NO: 102102 - DNA, 428 bp, Homo Sapiens
  misc_feature (349)..(349): n is a, c, g, or t
tgcaatgaaaaagtggagaccacatcaaaataacctatgccactggattcacaatgtttgagaaatatctttgcccagagtaagcactgtcaaagatagaattctgtgccctcctccttccctccacaagatttgaaagagacaaggctcacatcttggagaatttctggctccttttgacctggcagtcttgagagatgcagctcggtcagaagattgcaaggatttcctgctttcagcctgtctagaaatactacaagatgaacatcccccatatctcattatttacttcttcctaagtcaggaaacttggagacatgtgaaaattcatttcatgagtttcagtaantattttattttgagaggttgggtggtggtttgggttcctttgtttatttccctttttgagtaccgaatagattggttac

SEQ ID NO: 102103 - DNA, 261 bp, Homo Sapiens
gcaatgtcaattctcctgaaattgatctaagattaaatgcaattctaaccaaaatcacaaaaagctatttacaaaacaagctgtttctaacatttatttgtacaagaaaagtgtcaagaatatctatgacaaatatgatttataggataagatatcaaactttataagaaatttataacaattaaaacagtgtggcagttgcctattaacagataaaaataaccaatggtataaaacagagacttcagaaacagatctgtg

SEQ ID NO: 102104 - DNA, 209 bp, Homo Sapiens
  misc_feature (120)..(120): n is a, c, g, or t
ctgttgtcccaaccactcaggagaccgaggcaggaacaccgcttgcacccaggaggtagaggccgcagggaaccatggtggccttagagaaagagtgagatcccgtctcaaaaacaaagnaaaaaaacataatgtacgttaaagctatttctcctgtttcctggactttcttttcaaaccaaaaccctggactttcttttcaaaccaaa

SEQ ID NO: 102105 - DNA, 397 bp, Homo Sapiens
  misc_feature (29)..(29): n is a, c, g, or t
  misc_feature (354)..(354): n is a, c, g, or t
cagctacttggatggctgaggcataagantcacaagtatgaaattgcgttgcaagaaagcagtgggcaagtcagaaagaagggagctgactgtaaggagacaaaggcttgctgtggattttataggatggtgttcgtgctgttttctggagagagctatgtgcagtactgataatgccaaggttgcagtgagctaatttgcatttttctatcagccgagggtctgatgatagctgggcgcaggaagattgtgacttatttacgcaggaggattatgtgtcctggaccatgaagaaaggcagacttacagcttatgtgctttctctttgcttttccttggtcccaccagcctgantctttttcctaattaggactccacatttaaaaatatattgttg

SEQ ID NO: 102106 - DNA, 322 bp, Homo Sapiens
gaaggttgaatgcctttaagaacttgatgcataaaatttgcatgactcctcactcctttctggatctctcattggactcaagccagcatggctcacaccacaaaggttaacggcagtgcctcaggaaaagcaggtgatattctcagtggagaccaggacaaggaacagaaagacccttactttgtggagaccccctatggttatcaactagacttagatttcctcaaatatgtgggatgacatacagaagggaaataccatcaaaagactgaacatccagaagaggcggaagccttcccgtggccatgcccagaacccaggg

SEQ ID NO: 102107 - DNA, 300 bp, Homo Sapiens
  misc_feature (207)..(207): n is a, c, g, or t
  misc_feature (228)..(228): n is a, c, g, or t
  misc_feature (234)..(234): n is a, c, g, or t
  misc_feature (255)..(255): n is a, c, g, or t
accacccagctgcagagcccttcagcatttcacaaaaaggaggtcatgagggtaggtgggagcccaggtgaggcaggaccctatcatcttggagtttaaactgtgtcctcagacacttgttggtttttagctggaaagtaacagaacagattaatgcttcaaaaatccgctaggccaggtgcagtggctcatgcctgtaatcccaanactttgggaggctgaagcaanaggatngcttgagcctggcagtttganactagcctaggcaaaacagtgggacctcatctctacaaaaaaatt

SEQ ID NO: 102108 - DNA, 306 bp, Homo Sapiens
gttacagggattctgttacatcatcatccccattttaaaagaggattattaaaggttaaatgagcaaatcttgaaaacaaagccaaataggttttttatatatatattttactgacttgaataattttgtaaaggtgctaaatgttagacagaagtcaacaaggctgacttacagataagagaaattaagggtctggaattaaaaactagctatgaatatccactatctttcacagaatttaaaaggtcttcagctgtgccttgagctcgtgtgagattaaaaatccacttaatgggccgggtgcg

SEQ ID NO: 102109 - DNA, 260 bp, Homo Sapiens
  misc_feature (178)..(178): n is a, c, g, or t
  misc_feature (203)..(203): n is a, c, g, or t
  misc_feature (220)..(220): n is a, c, g, or t
attccctctttaagaccattgagctacatttttccttctacctggacccccttatccttaaattgaccatcagaacatttgcacccagactaagagccagagttcctgacacctggccataggcctgggccacctgaggctgcctttgcaggtggaccccgagccatatctggatgtntgcatttacgacacctgctcctgtnagtccattggggactgnggctgcttctgcgacaacattgctgcctatgcccacgtgt

SEQ ID NO: 102110 - DNA, 277 bp, Homo Sapiens
  misc_feature (138)..(138): n is a, c, g, or t
  misc_feature (160)..(160): n is a, c, g, or t
  misc_feature (190)..(190): n is a, c, g, or t
acttaacatcaggacgtgttgaatagattgcagcatggggactgaatcctgtatggtcaattttcaaattggtacttccctggtcaaccacttctcctattatattgactttcaccaaattggaggctgtagcttcanaaaaagataggcctctgggaantattataatgtggtcttgctccttacttantcttactgagatataggtatttgccaggtgtgcccatccaaacaagtctacaagtctgtacaggctggcaagtttacagcgagtaag

SEQ ID NO: 102111 - DNA, 252 bp, Homo Sapiens
  misc_feature (182)..(182): n is a, c, g, or t
ctgttgacttccaagaaggactgtgggctgacttcaagcccgcaagtggctttgcgactgatacctgaggacgaggcacaggaatggagatgctcctgtagtcacgtgacagagaactttatgtgtatggcatgcagtgataacaaagcaggggcctgcatttggcatgttttccattttantctttcatgactgattattgtgaattagttattatttatattgatggtgcagagtggcagaagcaggcga

SEQ ID NO: 102112 - DNA, 285 bp, Homo Sapiens
  misc_feature (211)..(211): n is a, c, g, or t
ataaagtttgaattacatactatgtagcctttttatattggcttctttcacttagtaatatgcatgcaacttttctctgtgtctttttacggcttgatagctcattccttttttagcatcgaactatcctgcttttaaataaaaattatccggacacttttgtttcccataacacagccacatgaggtcctatggctatatcatacttttnctggatgattatccaggtgaaagggtgtttgtaattaaagcattattacaacagggggggaaacaattttatcc

SEQ ID NO: 102113 - DNA, 246 bp, Homo Sapiens
tagcaaaggacactgagaaataaataatgagatataaagagaaacaagattagtaagtatgcatcatgtgccagacaccatgctccagacaaaggatgcaaagacaaacacaaccccgtcctcatcatcctcatgctctaatgcagcagtcaggtactacaccttgaaataccattgtgattggttcagggatgggtgtaaaatgtcagggacagtgagaccacaaccttgttacttctgtgaatg

SEQ ID NO: 102114 - DNA, 302 bp, Homo Sapiens
  misc_feature (292)..(292): n is a, c, g, or t
aatggcaatcctaaaaacagtttcctcccaagaaatccgtgagtgtactgggaaacctggacctctggatttggtgatgagccctcaaatctccagtgaacaaaaaattaaatctaagagaaaggtgtgttgcagtggatgctacacaatggaccgacggattgatgggatgatgaacaaacaacagagagataaaagtttcaaattatttgtagatgaaagtaaagaacagataaaccaaaattgctgaaaccaacattttaaagttccaatttctgacccacttaaaaanacaaaccttc

SEQ ID NO: 102115 - DNA, 217 bp, Homo Sapiens
ggggaaggaccccaatccttggggaaacgaaagttgccctttgggatgatcggatgcaccaggtactgatcccaatcatgcctgatctggatgagcgctggcagggagtgctcggcttggagataatactgtcggaaaggctccaagaggtgagcaagtgggaactcatctggatccccaaacaacttggactcaatttcacgtttctgaagtaaaa

SEQ ID NO: 102116 - DNA, 307 bp, Homo Sapiens
tatgatgaagcagagaaaacagcaagcaacagccatcatgaaggaagtccatggaaatgatgttgatggcatggacctgggcaaaaaggtcagcatccccagagacatcatgttggaagaattatcccatctcagtaaccgtggtgccaggctatttaagatgcgtcaaagaagatctgacaaatacacatttgaaaatttccagtatcaatctagagcacaaataaatcacagtattgctatgcagaatggggaaagtgggatggaagtaacttgggaaggtggttcgcagcaagcccccttgact

SEQ ID NO: 102117 - DNA, 267 bp, Homo Sapiens
gtagaattggttgaagtcacagcacaatagaattaagtggggcttaatgatcctctaccaaccagaggcgggtaaagggtaaccctgagagagacaagaagatgaaaccagaccagaaggtatcctgcagagggaggcaaggccagaaagtgtttttaatgtaggggaaagggagtgtttgagatttaagtgagtaatgagaaggggctgaatgtttaatttccctaattctattgttaatactttggaccatgtttctttatgagt

SEQ ID NO: 102118 - DNA, 337 bp, Homo Sapiens
  misc_feature (107)..(107): n is a, c, g, or t
  misc_feature (120)..(120): n is a, c, g, or t
gtgagattccagagccctgactacaggtgatcagcggtcagcaactccccaaagtggacaagaccaaagaggggtccattgtggatccactggtgaaagtgcagatntttggcgttcgtntagacacagcacggcaggagaccaactatgtggagaacaatggttttaatccatactgggggcagacactatgtttccgggtgctggtgcctgaacttgccatgctgcgttttgtggtaatggattatgactggaaatcccgaaatgactttattggtcagtacaacctgccttggacctgcatgcaacaaggtgagccagcccctttgacccctgg

SEQ ID NO: 102119 - DNA, 659 bp, Homo Sapiens
atgaaatgtcaggaggtcaatgtcccctttgggcccttgatgtccacctcgggccttttagatcaccttcccctttgggcaaagacaccaccacatcacccgtcattatggtgcccttcaagttcaggtcaaagtcaggcatggagatcttgggggctttgatgttcatctcaggcatcgttgaacttggggcccttcagctttgcatctggaccttccatattcacgtctggaacatcaacgtctacattgggaccagaaatgtcaatgtcagctttagggagggtaacatcgacttcagggccttctcctttgaagccaggcatgctgaacttgggcattttcactttgggcatcttcagatgccagtctggaccatgaacatccacatctggggcattgatgtccactttagggcctttgatatcaacctctggccctttcagatccccttcaagtttgggaagagaaatatccacatcacctttcaccttggggcctttcaagtttaagtcaatgtcaggcatggagatcttgggagctttgatattcatgtcaggcatcttgaatttgggacctttcaagcctccctccggaccttccacattgagatctgggccctcaatgttcatacatgcgaccctctatattgatgtctc

SEQ ID NO: 102120 - DNA, 314 bp, Homo Sapiens
  misc_feature (282)..(282): n is a, c, g, or t
cctggaaatgaaatgtaaaaatgtttacccctgagttgcagcctttcagtcatacctgtattatctactcacctttgcaggaactgacctttgctactccttttgttcctgatcaacatgctccacatgtactgagtgcatactatgcccagggtcctgtgctaggtgtcctggctttcagagcatcactgtggggaaaagactttgctgggaaaaagtttcatcttaaaaaattaaaagcatgccacttagcaaatgaagggaaaaatggaaagacccaanaggtgcccatgagattaggacgttgatacttt

SEQ ID NO: 102121 - DNA, 935 bp, Homo Sapiens
aggctggaccggtccggattctcgggatattgccgtgctgggcctcatgttctactgcaagaagcgctgcaaagccaagcggctgcagaagcagcccgagggcgaggagccagagatggaatgcctcaacggtgggcctttgcagaacgggcagccctcagcagagatccaagaagaagtggccttgaccagcttgggctccggccccgcggccaccaacaaacgccacagcacaagtaataagatgcacttcccacggtctagcctgcagcccatcaccacgctggggaagagtgagtttggggaggtgttcctggcaaaggctcagggcttggaggagggagtggcagagaccctggtacttgtgaagagcctgcagagcaaggatgagcagcagcagctggacttccggagggagttggagatgtttgggaagctgaaccacgccaacgtggtgcggctcctggggctgtgccgggaggctgagccccactacatggtgctggaatatgtggatctgggagacctcaagcagttcctgaggatttccaagagcaaggatgaaaaattgaagtcacagcccctcagcaccaagcagaaggtggccctatgcacccaggtagccctgggcatggagcacctgtccaacaaccgctttggtgcataaggacttggctgcgcgtaactgcctggtcagtgcccagaaaacaagtggaaggtgtctgcccctgggcctcagcaaggatggtgtacaaccggggagtactaaccacttccgccggccctgggtggccgcgggccctgggatgtccccccgaggcccatcctggaaggggggacctccctaacccagtctggaggtctggggcccttcgggggggctgaaggggggaaaagggtttaacccatgggaagaaaagccccccatggggggg

SEQ ID NO: 102122 - DNA, 415 bp, Homo Sapiens
gaacgaactagcagaggagccagaggcactagctgatggcctctgctccatgaagctttcccctccctgcaagtcacgcctggcccggagacgggccttggcccaggcaggccgtggtgaaaacaggagcccgcccacagcactctgaaatgctccactcacaccttataggccctaggcctggcccaggcattgtcccctggaaacctgctgttggctgaagctctgctgaccaggctgcagcctctgctctgtggctccattcacggcctgttttcatctacaaaggccctgaggttcccattcaacccccattgccctacggtcctggtagcaaaaagctttttccagagcgtgcgttgttctttcaaaaggatagctatcacttctcaccatgcgtggactgccagtgggt

SEQ ID NO: 102123 - DNA, 590 bp, Homo Sapiens
atttcagaagaagtttattaagaggttttaggctttaagcatatgtgaaaagcaaaaattacattttaaaagtatataatttgcattttccaccttctcaatgccaatgaaatattctaggagactctataagataaccaattgattttctactactcccaaattttaactttgtaatttaaagaggaataggcaaatagagctgctgtggttctggttctccctgcaggatgaagggggcctgcaaaatgtctcctacttccattctagtcattcagcaaggtgccttcctctggatgcactgtctgtatacttttgccatgttgcatcacataatgattctgcccaccttcaccatttgactgtcagtaaaagaatgtatgtgctcatttcttcttttattatagcgcagtgctcttcatgaagtctgaatcttgtttcatttgtgattgtaattagcacttgcttcttcaagactggctaaatgatgataatcagtgaagttctgtgatgggcacatggatgtgtattatatttttctactttggttaatatttgaatattccaataagttttaaaataacttgttt

SEQ ID NO: 102124 - DNA, 168 bp, Homo Sapiens
acggacaaaagtgccttcccatcagtccctgggttgggctccggttaccatggatcgccggttccaaactcagggccctctcgggcccgctaggggtaccacaaagcgggcagaaggcccctgaggggaagttaaggtgtgagggaggggtggtgacgcagctgtagc

SEQ ID NO: 102125 - DNA, 510 bp, Homo Sapiens
  misc_feature (42)..(50): n is a, c, g, or t
  misc_feature (89)..(89): n is a, c, g, or t
  misc_feature (93)..(93): n is a, c, g, or t
  misc_feature (143)..(143): n is a, c, g, or t
  misc_feature (155)..(155): n is a, c, g, or t
ctgagagttcttaccatgaatgggtattgaattctttcaaannnnnnnnnctgtaccaatttatatgattatgtgattttccttatttngccncttaacatgtaatatgatgtatttgaatattgaaacagccttgcatcccnggaagaaaaccncatttggtcatggtaaataattaatatattattgaaatctatttttgcaattttgtttgggaattttgtgtttatattcgcaagggatatcagtctgaagtttactttgttttgatactgttggtactttgttggttttagtatcaaggtaatactagtttgagggtaaagaattgggaagtgtttcctcttctcttttccagaagagattgtatagaattgatgttaatgatttcttaaacctctagcagaagtctctagtgaaaatacctgggtctagagatttctttttgaagaatttctacatttgaattcaagttctcaatagttatagaaatatttaaatgatctattt

SEQ ID NO: 102126 - DNA, 393 bp, Homo Sapiens
aatttacagatggggtcttgttatgtttcccaagaggctcaagtgcagtggctattcacaggcatgatcatagcacactatagccttgaactcctggcctcaagtgatcttcccacatagctgagacaacaggtacatgccactgtgcccagcaggacatttttcttaatagaaaactactatcgtgaagaattatgtttatctcttaactatgtctactcaactagtttcaacatagtatgaaattaacagtatcacgaaaagcaatgttccatgttaatttccatgtcgaagcaatgttcttgacccaacattggataaatctcattcttgatgctagctatttcttgggtatggttgctttaatcaacctctgcaaaactccgatcttag

SEQ ID NO: 102127 - DNA, 117 bp, Homo Sapiens
ataggtgttagcccctgtgcctggccagcagcaacttcttaatagaaattttgaactttctggattcttaggaacacaaaatatacttaccttttgagttgaggttggtcactgcca

SEQ ID NO: 102128 - DNA, 485 bp, Homo Sapiens
  misc_feature (444)..(444): n is a, c, g, or t
aaagaatttatgagacattaaactacatggacaaaagtctcatttctgaagtggtaggctgtgagttttcactattctcctacataataattatgctccaaaacaatcactattcctgacttctctacttacctgtgtttttaccccctcttctctacctatctaaactgttcttagttctactaaaaactactccctacccaaaactatcattatggatcacaagtgaattctcccacctctgttaagttcagagctgtaatggtatatggaacattcaacgtttaataggggctggttggcaacctgtgtagtatttgacctcaggatgcttaatcctcatttgccaaatcaatcacggttgttttcctcttcccccaataagactaagtcacttcttacaagtcatcccacattactgagcacagtggtccactaagaaanctgttaaaagtgataaccaacaacaaaacactacatcattg

SEQ ID NO: 102129 - DNA, 266 bp, Homo Sapiens
cggcacgaggggctctgctgtttcaggctcaatttatttaccttgtcacctggcccataagtaagaagactgtcatccatggccattgttttctagttcttctgaggacttttctcctctgtcagtttaaagcctccctaatcaaccaagtttgtttctaggcacatgcactcttccctcctctcatgtgctcagcccttgggtaagagtccatccttctgtggtctcattagaaatttcacattctggccgggcacggtggctca

SEQ ID NO: 102130 - DNA, 173 bp, Homo Sapiens
agccaattcagaatgcccaaatattctccatcctttgaggaagtgacttgcctcccattttcttcatgtagattgtttgtttttgtctctatatattcgtttagacacttgttgctcaaagcaatagaaacccagtttaaatggcttttaataaattgttttgagtaaccacc

SEQ ID NO: 102131 - DNA, 296 bp, Homo Sapiens
cagattaaaggaaaaagtaaagcaaaactaacacacagacagagaggaacatgctgagagagcccttcaccgctctctctagcttgttagctttctaaaatatgttatagtaaaaacatttaaagctgtgtgtggttatggcacaaataaaaactgtcacctctttgcacttgcctgcataggccaggtgatagttgactccattacagagaaatataaaatcagagtttccattataacagatttatagtgaaaataaagaagattccttatgtgtatttaaagaaggtaagcat

SEQ ID NO: 102132 - DNA, 273 bp, Homo Sapiens
  misc_feature (45)..(45): n is a, c, g, or t
  misc_feature (59)..(59): n is a, c, g, or t
aaaatatttcattgcccattctttttaaacacctgctctgtgtanggagcttgcctgantcccttatggatgagagtcaacactatgcctgcctgtttcccattttggttaggcggcagggaggaagattatcactgcactacatattattattggtatcctatggggtacaggacagtgtactaggtgtcaagggtcaggtgagccccaaaaaatctaaacaaggacttcacaatttaagagagaaagtaaagccaatggtcgccataggcc

SEQ ID NO: 102133 - DNA, 351 bp, Homo Sapiens
  misc_feature (32)..(32): n is a, c, g, or t
  misc_feature (62)..(63): n is a, c, g, or t
  misc_feature (89)..(89): n is a, c, g, or t
  misc_feature (92)..(92): n is a, c, g, or t
  misc_feature (103)..(103): n is a, c, g, or t
  misc_feature (127)..(127): n is a, c, g, or t
  misc_feature (130)..(130): n is a, c, g, or t
ccttagaaaattaccgggggtgaatgaaatangggtagccctacatagcagtggacaatatnntgttaaccagtattttccaccttggnggnaaaaagatcancctatacctcccctcctgtttttnctncctcacaacaaaagcatgcatttcataactagtctgcagttcatacttggcatttcaggcttctgtcatctgtcccatgtttcttatcaactttttatcttccatcaatagcctttatgaactctatacttcagccaaatcatgcacttcaagatgccctgaatctatcgtattcagtcactaatctaagtttctatatgttgtagtcctgtgcttaaagg

SEQ ID NO: 102134 - DNA, 367 bp, Homo Sapiens
  misc_feature (249)..(302): n is a, c, g, or t
  misc_feature (351)..(351): n is a, c, g, or t
agaaacaagataaagagaaacaagaagaaaagaaggagtcagaaacatctagagaagatgaatataaacaaaagtactccagaacgtatgatgagacttaccagcgttataggccagtatcaacttcaagttcaaccactccatcctcttcactttctactatgagcagttcactgtatgcttcaagtcaactaaacaggccaaattagtcttgtaggcataacttctgcttactccagaggaataacnnnnnnnnnnnnnnnnnnnnnnnnnnnnnnnnnnnnnnnnnnnnnnnnnnnnnnttaaatcacaacctaaattcaatcagaggacgacgacgaccaagagagnaaaggagtcttccagg

SEQ ID NO: 102135 - DNA, 366 bp, Homo Sapiens
gaaagttcttggttaatttatctgcagtttctcttgcctgagaaagctaactttcggcttgctctgttccacattgaatccattatcgcaaaactcttggcttcaaagagtcagtatcattgcatcaaaagcacagctagtctacctgcatttattattactgtttttaaaattaaaactctcaatcttaaagtatactaatgccctgcaccttacacaaatagctgggagatgttatctgtcctatcaaaatgtgaagcaaacagacaagcaaaaatacataaaattaatcacacctattaagctaaatacaaaggaagagctctactcacccccaccccaattaccaccctaagggagtctaag

SEQ ID NO: 102136 - DNA, 341 bp, Homo Sapiens
  misc_feature (49)..(49): n is a, c, g, or t
cggctccccgaaaggaacgggactgtcgggatgcttcccggatgtctanagttgccccttcctgcagtgagattactgcttcctgtttccctccagctcttcccagcagcagtgagggagtataagagggatctgtagtcgctgcctggctctgtgggcggcccctttaagactcaggtgagctcagccagtccccctgcgccaggcttgaatcaaaggtgtcagcaagctagatgtcaaaacatttcgagagagaggcagcttgcagaaaagcagaaaggttgaattcaggggtcagcaaactatggcatgtggcaccgtgagctaggaatggtttttcc

SEQ ID NO: 102137 - DNA, 257 bp, Homo Sapiens
  misc_feature (159)..(159): n is a, c, g, or t
atgagccactgtgcctggcccaagataaaaaattgattagctattttagtctgcttcccattttaagttttaaaatctgatatgtattttacatgttctagccagagcttaagtgctcaacagagcagtggccagcagctactatactaggcagtgcanatctgagttccagacacaattttaagaaactcaggaagcaggttccttttatcattccagtgtaagaattcacttcttgccctacactatccatagta

SEQ ID NO: 102138 - DNA, 471 bp, Homo Sapiens
  misc_feature (55)..(55): n is a, c, g, or t
  misc_feature (59)..(59): n is a, c, g, or t
  misc_feature (86)..(86): n is a, c, g, or t
  misc_feature (155)..(155): n is a, c, g, or t
  misc_feature (383)..(383): n is a, c, g, or t
tttaaaaaacaagaaaagtaactatgttatccaatatgaaattccacaacatgantttncagcttagcaactagtctaggtaatgnttaactggaataaggcaatgacaggaagaaaacccaaaccaggtggagctgtggctacaaactacagantgctcacctgcctaagggggacacagaagggagagtctgggaccgaagagcaagaattccatgtggacttggagttcctgaccattcagcagtcattcatttcagttaaaggtagacttcgctctcgtgaaaatgtgcgtgtgagtgagagtatatgaggaacctcaagaaagagagaaagataactttttaaaaattccctggaagatattggggtaggctaatttnaaaatcaataaaaagaagcagaaaagaaagccaggacaacgaaaactccacttattttacagtttcctctgagactggcaacacattt

SEQ ID NO: 102139 - DNA, 317 bp, Homo Sapiens
cattatggccgccttcatctgacttagcaactgtcccaggcatctggtgcttaagattttaaaatgaacagtttccatgagcttcagaatccaagtggatcttgtagagtcttgcagcgttcagaatgactttgggtaactggtcctggtcactttcgcctgcctctctaggagcattcatggttgttttcctcccacagttcagtggggactgcccaccgtgtctgcggccggtgtcatcggcatgctcagtgccgtggtcgccagcatcatcgagtctattggggactactacgcctgtgcacggctgtcctgtg

SEQ ID NO: 102140 - DNA, 450 bp, Homo Sapiens
  misc_feature (315)..(376): n is a, c, g, or t
gtggacaatgtgctagcttgagccaggggtcatttatgtggcaatttcaaccatctcagtggtgagccagaaagcaaagaaagcccctaaataacaaaaatggataagaaccccagaggacagcaattagaaaggaacccctccagttctgcatcacaccccacccaggtctaacaaactgaggcatctcattttccagcttgcagtaggtgaaaataaggtggggataggcaaaggaagggaactggagttgctggcttagcagagaaagcaacacaagtaaaagcaagagggagtggaattctgctctttccnnnnnnnnnnnnnnnnnnnnnnnnnnnnnnnnnnnnnnnnnnnnnnnnnnnnnnnnnnnnnnagtttgtagcagcctaaaaactaaaactcaggatcccgagcctcattcagtattctctttacctcaccgctttg

SEQ ID NO: 102141 - DNA, 207 bp, Homo Sapiens
ccctacatcctcagactagttatgtcatctttctgtgcctccatttcctgttctccaaaactgagggaacagaaccacctacatcataatgttgttgatgtaggcagtaaaagtgataatacatacaaagcaccatgtttgccacatactaagtgttgaaatagatgtcacatgtcattatgatcaatggaccaaaatccattgcaa

SEQ ID NO: 102142 - DNA, 195 bp, Homo Sapiens
cgtgagccactgcacccagctgagttattccttaaataaagaaccactatagtggaccttaagagactatgcttttaaatgcccttgttacttagagactggaagcaggaataacatagagcaattgttttcaaactccagaattcctaggagatttcttaaaggataacttgctggactgggggtagaagttag

SEQ ID NO: 102143 - DNA, 260 bp, Homo Sapiens
  misc_feature (186)..(186): n is a, c, g, or t
ctcaaccacagcggggacctgaaccacctccccggccacacgttcgcggcccagcagcaaactttccccaacgtgcgggagatgttcaactcccaccggctggggattgagaactcgaccctcggggagtcccaggtgagtggcaatgccagctgccagctgccctacagatccacgccgcctctntatcgccacgcagccccctactcctacggacttgcacgaaatacttgacgtgtcccgggaccttcccttcccgg

SEQ ID NO: 102144 - DNA, 261 bp, Homo Sapiens
  misc_feature (239)..(239): n is a, c, g, or t
agtagggacattgcagaagcttgaaaggccaataccagaacacaggctgatgcttctgagaaagtcttttcctagtatttaacagaacccaagtgaacagaggagaaatgagattgccagaaagtgattaactttggccgttgcaatctgctcaaacctaacaccaaactgaaaacataaatactgaccactcctatgttcggacccaagcaagttagctaaaccaaaaccaaactccnctgcttttgtccctcaaggtgg

SEQ ID NO: 102145 - DNA, 1054 bp, Homo Sapiens
  misc_feature (846)..(846): n is a, c, g, or t
  misc_feature (993)..(993): n is a, c, g, or t
ccctctccccttctcttccccgaggctatgtccacccggtgcggcgaggcgggcagcgccagaggcacgcagccgcacaggggctacagagcccagaatcagccctacaagatgcacttaggacccccgcggctggaagaatgagcttgtccttcctcctcctcctcttcttcagccacctgatcctcagcgcctgggctcacggggagaagcgtctcgcccccaaagggcaacccggacccgctgccactgataggaaccctagaggctccagcagcagacagagcagcagtagcgctatgtcttcctcttctgcctcctcctcccccgcagcttctctgggcagccaaggaagtggcttggagcagagcagtttccagtggagcccctcggggcgccggaccggcagcctctactgcagagtgggcatcggtttccatctgcagatctacccggatggcaaagtcaatggatcccacgaagccaatatgttaagtgttttggaaatatttgctgtgtctcaggggattgtaggaatacgaggagttttcagcaacaaatttttagcgatgtcaaaaaaaggaaaactccatgcaagtgccaagttcacagatgactgcaagttcagggagcgttttcaagaaaatagctataatacctatgcctcagcaatacatagaactgaaaaaacagggcgggagtggtatgtggccctgaataaaagaggaaaagccaaacgagggtgcagcccccgggttaaaccccagcatatctctacccattttctgccaagattcaagcagtcggagcagccagaactttctttcacggttactgttcctgaanagaaaaagccacctagccctatcaagccaaagattcccctttctgcacctcgggaaaataccaaactcagtgaaatacagactcaagtttcgcttttggataatattcctcttggccttgtgagaaaccattctttcccctcagaantttctatagggtgtcttcagagttctgaaagaaaaatactggaaacagcttcagctatcta

SEQ ID NO: 102146 - DNA, 914 bp, Homo Sapiens
  misc_feature (839)..(839): n is a, c, g, or t
gatgacttcagcaccaaagactatctaaaagataatttggataaatacatgtcccagtttccaaaagttcggattcttcgcctcaaagagagacatggcttaataagggccaggctggcaggagcacagaatgcaacaggtgatgtgttgacatttttagattctcatgtggaatgtaacgttggttggttggaacctcttctggaaagagtttatttaagtagaaagaaagtggcctgtccagtaatcgaagtcatcaatgataaggatatgagttacatgacagtggataactttcaaagaggcatcttttgtgtggcccatgaactttggttggagaacaattcctccagatgtcattgcaaaaaacagaattaaagaaactgatacaataaggtgccctgtcatggctggtggattgttttctattgacaaaagttacttttttgaaacttggaacatacgaccctggccttgatgtttggggtggggaaaatatggagctctcattcaaggtgtggatgtgtggtggtgaaattgagatcattccctgctcccgagtgggccatatattcagaaatgacaatccatattccttccccaaagaccggatgaagacagtggagcggaacttggtgggggttgccgaggtctggctggatgagtataaggagctgttctatggccatggagaccacctcatcgacaagggctagatgttggcaacctcacccagcaaagggagctgcgaaagaaactgaagtgcaaaagtttcaaatggtacttgggaaaatgtcttttcctggacttaaggggctccccattgttgaaaagctaantgggtgtgccttatttaatgtgggcttttgggggtaaaatggcatttttccattttgaaaaaacacctaaccagc

SEQ ID NO: 102147 - DNA, 427 bp, Homo Sapiens
  misc_feature (413)..(413): n is a, c, g, or t
actgatggagcagacggagatctggctgatttacacagagcatctgagaacctccgccaagaaggagtccgtgccttgatcctggtgggccttgaacgagtggtcaacttggagcggctaatgcatctggagtttgggcgagggtttatgtatgacaggcccctgaggcttaacttgctggacttggattatgaactagcggagcagcttgacaacattgccgagaaagcttgctgtggggttccctgcaagtgctctgggcagaggggagaccgcgggcccatcggcagcatcgggccaaagggtattcctggagaagacggctaccgaggctatcctggtgatgagggtggacccggtgagcgtggtccgcctggtgtgaacggcactcaaggttttccagggctgcccgnccagagaggagtaa

SEQ ID NO: 102148 - DNA, 327 bp, Homo Sapiens
cgatatttgtggttctggccttacctaaaaaggtttagcaatttggggataactcttggatctagcttatgtgcgttcacatgcacatttgctagcccagagcttttaaaatgaggtctggcatatacttgattacaaatgaaaactcagaaaccaattttatttattaaatcatatcttttgtttttccccctcccttctaatcccccaaaggacctatttgagctgttccccaattcatctgcttattttggaccatgaatctgccagagtgatattttctgttatttctcctccaaatttttccctgatgtttccaataaaaga

SEQ ID NO: 102149 - DNA, 322 bp, Homo Sapiens
aattggaaaaacaaaactcagaagagtggggctccaggctctgcacacctccagtggcctgtgtggcctcaaggcaaggctcttaccctctctgggcctcccaggaggatgcgccaatagtctcaatgtcccctccaggtaaagggctttggttccagggctctggccaaagcaaagccatgcatggggcagagggagctgccagagtgaggtggagggaggcgagagccagtggcaggtcctaggcaatttgttatcaggccaggaaagctggctgttggagtcatgatacgtggcttgcagacccaaggccccgtttacc

SEQ ID NO: 102150 - DNA, 827 bp, Homo Sapiens
  misc_feature (772)..(772): n is a, c, g, or t
  misc_feature (777)..(777): n is a, c, g, or t
tgcaatggccatggtatcgatatcctgaagcttgtagcagcccaagtgggaagccagtggaaagatatctatcagtttctttgcaatgccagtgagagggaggttgctgctttctccaatgggtacacagccgaccacgagcgggcctacgcagctctgcagcactggaccatccggggccccgaggccagcctcgcccagctaattagcgccctgcgccagcaccggagaaacgatgttgtggagaagattcgtgggctgatggaagacaccacccagctggaaactgacaaactagctctcccgatgagccccagcccgcttagcccgagccccatccccagccccaacgcgaaacttgagaattccgctctcctgacggtggagccttccccacaggacaagaacaagggcttcttcgtggatgagtcggagccccttctccgctgtgactctacatccagcggctcctccgcgctgagcaggaacggttcctttattaccaaagaaaagaaggacacagtgttgcggcaggtacgcctggacccctgtgacttgcagcctatctttgatgacatgctccactttctaaatcctgaggagctgcgggtgattgaagagattccccaggctgaggacaaactagaccggctattcgaaattattggagtcaagagccaggaagccagccagaccctcctggactctgtttatagccatcttcctgacctgctgtagaacatagggatactgcattctggaaattactcantttangggcagggtgggttttttaattttcttctgtttccgatttttggtggttt

SEQ ID NO: 102151 - DNA, 705 bp, Homo Sapiens
gttttgggtcacagagttccactttttccactcttattagcactgcaaaagctcctgagaatttaaaaacacagtaattctctggatgttaggacctaggggaacattgggcatttgaacatatcagggagggtccccattttagtgggaacaagtatttaaacaatatttagagcaagtgtcctcatgtgataaacagagcacagtccaaagataccctctttctcaaggtagtcttttatctttataaagaaagattagtgtttaagagcgtagacttgagctagactacccaggttgaaaccccactagctgggtgatcttgaacatgctgcttagcttctctgtgccaaacttactgatatcctcatctgtaaattagcgataataatagtacttacctggtaggattatggtgagtattaaatgagtaaatggaaacagcttagaatagtgcctgacatatattatgttctctgtagttactggctgtgattattaataatattgccgcaccctaatatctgttatttaattgaaatctgcttgtgtgcttataagaatttactgagttctcacttcccttacagtcatacatggtttttcccttttgcctaaatcagaactcaacagcctgggaaaatcactgacaaatagtggatataggtttcaattctgaggatcaataaacagaatgatttgttg

SEQ ID NO: 102152 - DNA, 396 bp, Homo Sapiens
catccaagtttccgattatgtctttatgctttgattctttaaatcatataacaggtatttcttttcaccaaaatcattttgttgtgaaccatcaccgatttccatgactacctaaaaccgtaagctgtatgaaggcgaacactttcactcgttcattaccacgtttaatgcacctaacacaggggattgacctgtggtcaagcattcaaacatctgtgtaattaataaatcaatggaggaaatatcaatcaccaagaaaaatggacatttaaaaagatgacttacaattgtaggaaagatgacataaagtatatctgcgttctgggaatgaaaatacaatatgaagtagcttagtaattttcactcataagtcatagggtgctaggtctccactgg

SEQ ID NO: 102153 - DNA, 267 bp, Homo Sapiens
  misc_feature (20)..(20): n is a, c, g, or t
  misc_feature (37)..(37): n is a, c, g, or t
aaaatgtctagcagaatganctgtatttccatttctncatgtctacctgccttccccccacaccctaaagttgtacttgtttctagcaaactagaaggaaaagataggaaagcctggcactactaacctcacctctcatacacctctttgaaggccccagctcttttgttcaggcctctcttctcccctagactcactcagcttggtatccatcatcttgagcattcttcagtagattcatctagggttcagattccagactctcag

SEQ ID NO: 102154 - DNA, 470 bp, Homo Sapiens
tatgaagaagcactttctaatgggtaaccagaaaagggcttcacccatttgtttttgacttctatgatagtcactgcatatgatccctttaagtgtctttaaaaaaatgacttatgaatttgatagcatttggggaaaaaaagccttatatgattaacaatttgtaagttttcaagatcggatggaatttaattttgctcctagaatttttgtcttcagaatatctagttaagataaattaggcctttgactattataggtattcataaatgctactttagccatgtaagttaaaaagttaaaatacttaaactttagtgtatttatttatctcgttactttttttctaattttatatgaaatgtgaaaggtctttattttggtttgggttactttgggctgctaaccaccagtgttaggaattaatgtagggcaccctcttattgggaatgtcactgtaattgcctaca

SEQ ID NO: 102155 - DNA, 449 bp, Homo Sapiens
  misc_feature (22)..(22): n is a, c, g, or t
agaggcaggtattgttaggttncacagcatctgcaggcagctccttgggcaggtttactttaccagcatttcccttagccagatcaaaacctgggttgagcttttgaggtgactgaggcccttgcagaggcaagtcctcaaacaaactgatattgcaaaaacctttagtatctgctttgaggggcaggcttgcaagtggggagtatgaggtagaagtggtgttgtacttgtgattgggaaggggtggcggaggagagccaggggataccgaggggtggagggaggccagggactctggcagcggctgcataggctgggcggcttgttctgggggactgagggtgaggctatggacctcagctggcaagctacttgcaagcccgttctgggcagaagctcctaaagggaaaggaggcaaggcagcagccttcagttggaatgaaggcgag

SEQ ID NO: 102156 - DNA, 275 bp, Homo Sapiens
cggcacgagaagatactatgcctccaaagggtgtccgccacactatgatgtttagtgctacttttcctaaggaaatacagatgctggctcgtaatttcttagatgaatatatcttcttggctgtaggaagagttggctctacctctgaaaacatcacacagaaagtagtttgggtggaagaatcagacaaacggtcatttctgcttgacctcctaaatgcaacaggcaaggattcactgaccttagtgtttgtgggagacccaaaaagggtgcag

SEQ ID NO: 102157 - DNA, 312 bp, Homo Sapiens
  misc_feature (154)..(154): n is a, c, g, or t
  misc_feature (276)..(276): n is a, c, g, or t
ctcgtgcgcgtacattaggcaagagaaacagcggctcctcaagtcctgcccaaagaccgtccagaaaccccagcctcccgtcgccttctcgccgcctccgctgggagccgcagatcagtccaagttgacggacaggaggcgaaatgtgcaaatntttatgggttgacatgatgaaagaagcattagaaaaacttcagctcaatatagtagagatgaaagatgaaaatgcaactttagatggcggagatgttttattcacaggcagagaattttttntgggcctttccaaaaggacaaatcaacggggtgctg

SEQ ID NO: 102158 - DNA, 878 bp, Homo Sapiens
  misc_feature (285)..(285): n is a, c, g, or t
  misc_feature (792)..(792): n is a, c, g, or t
tgtagatcaacccaaagaagaaaagaaagaatgctactataatctcaatgacgccagtctctgtgataatgtgttggcccccaatgtcacgaaacaagaatgctgctgtacatcaggcgcgggatggggagataactgcgaaatcttcccctgcccggtcttgggaactgctgagttcactgaaatgtgtcccaaagggaaaggttttgtgcctgcttggagaatcatcttctgaagctggtggtgagaactataaagatgcagatgaatgcctactttttggancaagaaatctgcaaaaatggtttctgtttgaacactcggcctgggtatgaatgctactgtaagcaagggacgtactatgatcctgtgaaactgcagtgctttgatatggatgaatgtcaagaccccagtagttgtattgatggccagtgtgttaatacagagggctcttacaactgcttctgtactcaccccatggtcctggatgcgtcagaaaaaagatgtatacgaccggctgagtcaaacgaacaaatagaagaaactgatgtctaccaagatttgtgctgggaacatctgagtgatgaatacgtgtgtagccggcctcttgtgggcaagcagacaacgtacactgagtgctgctgtctgtatggagaggcctggggcatgcagtgcgccctctgccccctgaaggattcagatgactatgctcagctgtgtaacatccccgtgacgggacgccggcagccatatggacgggacgccttggttgacttcagtgaacagtatacntccgaagccgatccctacttcatccaagaccgttttctaaatagcttttgaagagttacagggctggaggaatgcggcattcctca

SEQ ID NO: 102159 - DNA, 495 bp, Homo Sapiens
  misc_feature (419)..(434): n is a, c, g, or t
gactgagcaaagacagcaatggaacctctggctgcaggagatgcctgggtatgcctgatatgtaaacaaacacaagcagtcgagttcaggccatgcatcttcaaagtgacgaagaatatatgtaaatgcttgtttttctcctccatatttctcgtgtagaggtatatgagaatttagcatcaagacgctatactgcaaaccctgttctgtgttgcctatattcatagcataatatttaataaatactcccaaggttgtcattgctggtcacatattagctgacaaaggcacactgaagggactttgattcttactgtaaaatgcaaagattgttttaaactactcaacatatacaatcttaaactatgtgatgattattctcgatcatttatgataatttcaattctaaaagattactnnnnnnnnnnnnnnnngaccgcgtatgcggccgcaagcttattcccttgtagtgagggttaattttagctatggcac

SEQ ID NO: 102160 - DNA, 614 bp, Homo Sapiens
  misc_feature (38)..(38): n is a, c, g, or t
  misc_feature (177)..(177): n is a, c, g, or t
ataagtaaacaactgccaagccgtagttgtaggttccncctttaaggtggttcctggaagaaccatatgcatttaattgaacttcattcttaggcagggttatctggacactctctccagcagataccaccagttcctttataactgggtatggtgctgaggtgctctggaaagagncctggggggtaggggtagcataactgtaggagggagccactggctgggggacagcaatctgggttttctcagaactttttacttgttgagtgctgggcgtagtagcaagaccctctgatatttcaggttgcactgatacattctttggcccaccagacagctctgcagtcaggtctgtggttaggggactggaaattgtaatcgccttgtggacctctgcagagccactggtagtcagaccacctaattcgttggagtcattcactttagaatgctgtgtcactataggtgtaactacgtcactgggactacctctcttctgaagcttcctgattaagctctgctggtcactggaagatacagcaggtctgagtgcagctctgggtgggctctgcctccaagatgcccagttccaacctagccccagaagatgtggt

SEQ ID NO: 102161 - DNA, 317 bp, Homo Sapiens
  misc_feature (53)..(53): n is a, c, g, or t
tgagactctgatcacgtacaaactcaccatctatagagaagaccgcccaagtntgcccttgtttgaggccttcacagcatgtggttttgtgcaggattgtggtttgctgattcatccagaggaaacctgtgggttacagcctatttcttctgactacattgaagccattttacagtctgaactaaaaagatgtccatctggggacatgaaaggccagtgggattgtgccttgccttagttgttcggacaacaggacgtgtgactggagagaaataacctggcagccccacaactgccaatatggtgtcctaactaag

SEQ ID NO: 102162 - DNA, 372 bp, Homo Sapiens
  misc_feature (137)..(137): n is a, c, g, or t
gtcgcttcaagagaagaatgttacttgggcgtcataacttagagcaggaccttgtcagggaggagttaaacaaaagacagactcagaaggacttagagcatgccatgctactccgacagcatgaatctatgcaaganctggagttccgccacctcaacacaattcagaagatgcgctgtgagttgatcagattacagcatcaaactgagctcactaaccagctggaatataataagcgaagagaacgagaactaagacgaaagcatgtcatggaagttcgacaacagcctaagagttttgaagtctaaagaacttccaaataaaaaaagcagttttcagggttacctgcaaaattcccaaaccagaccagtt

SEQ ID NO: 102163 - DNA, 346 bp, Homo Sapiens
  misc_feature (52)..(52): n is a, c, g, or t
  misc_feature (113)..(113): n is a, c, g, or t
tggccacaaagtttaacttggaggctcactggcaacagtagtgaaggaagcnaaagttgtggtgaactgtgtaggaccagcttctaaaagccgggaaagagtgggagcacctnacatataaagaggtacacaaaatgaagtaagaagaaagcacataaataagaagcaatagctacttgaagactcaactaagaaaaatcttatggtctcaaaggatgagagcaactcctgcattgaataagttcatcatctatatccttactctaaccttacttaagatcttcctccaagttaggaatgaaccaaagcactagaacacacaacatatataaaaaatgggtggtaa

SEQ ID NO: 102164 - DNA, 349 bp, Homo Sapiens
  misc_feature (320)..(320): n is a, c, g, or t
cagaggtctggtcctgatgctggcaggggggccccctcctccatccctgactggctgagtggctttatcaccaccgagtgatgtgctgaggcctcctgcagtgaatgctccttccattcctgtactcgggcagtgccattcagcacaggagagctctttttgcctttggctttcaattccaaaacatgatttaatttctaactaaattagtatggcactagttatgaagtatctgcttaaaacccttcatcatgatatcctgtggatttaaaaactctaattccatgttttcttcccatctgccttatatatctcatcancctgcttatccaatattccagtttgatgg

SEQ ID NO: 102165 - DNA, 469 bp, Homo Sapiens
gccagtaattcaacacgtgtttaatgagcaccaattgtgtaccaggccacagagctgactaagacagagcccctgtgctgagggttcacagtctgcccaggaagggaagatccaagttcattttacacactagggcttaagtgctgaatcccgcaatgcatgcgagtgcggagtgagcaggggatggcagcacagcagcagggaagaggagcctgcttcagaacaccaggcacgattagagctacagtgttaacacacaaagggcgaatgcctgcagctgagcctggcaaggggcttgcatcccaccttcctgcatccaaaccttccagctgcccagaactgctggtaatcccacaggaaacatcattctttgccaagatgctatcccactcatcccccagaatcaaagtggccacttcctccaggcagccttcctcacattccagctgggacagaagtcacagggagc

SEQ ID NO: 102166 - DNA, 353 bp, Homo Sapiens
  misc_feature (17)..(17): n is a, c, g, or t
  misc_feature (48)..(48): n is a, c, g, or t
ggcttgaccctaattgnaagtgtggtatgagtctgttcccatttaaangcagacagaaagaaactactctggacctgaaaaacaacgtgacttgccaattattagaattttctagttgaaaggcatagatcagccaatagatccacaccaacaagttgcaaaatgtagtttttgctgctggctctcactttccgcccaatccccctttttgtgttttagtggctgtgttgctgttggaaatggtttgtcacctcctcctgtgcagtggctgctgctccacattgcggatcttaaaaaccttcctaatctaaatggcccttgctttacccggccatggctaccctggggtttgg

SEQ ID NO: 102167 - DNA, 342 bp, Homo Sapiens
ccctgcaaaaagcctaaattctgacctggcttttacctggaatatatttttgggtatcagtaactgataccctcctttcttatcataaacaatacttctccattcaagagataccaataaagaaaaatatgtaaggaacaaaaaatgtgatggagaaaccaaccattccataggtaatataccgataaggaagttcaacttccatgtgctgtcttgcttttcgaatatcatcacacggtatattgaagattttgcaggctaaaggaatggtgatctttttcattacatctctgattattagtacaaataccatccctatgaggatccgcaatatggcttttc

SEQ ID NO: 102168 - DNA, 886 bp, Homo Sapiens
  misc_feature (37)..(37): n is a, c, g, or t
  misc_feature (53)..(53): n is a, c, g, or t
  misc_feature (66)..(66): n is a, c, g, or t
  misc_feature (73)..(73): n is a, c, g, or t
  misc_feature (165)..(165): n is a, c, g, or t
  misc_feature (195)..(195): n is a, c, g, or t
  misc_feature (221)..(221): n is a, c, g, or t
  misc_feature (590)..(806): n is a, c, g, or t
  misc_feature (823)..(842): n is a, c, g, or t
gccagaaatcgcacgagggaggatcctccactccatntcaaaggaaaagtcgntataaatcacatntgtaggntagtgaatgtaaacacattagtgagcaaaggaaataggggatgaacaggaatggtcatctacctaactgagcacaaatgactctggcagtcnagtaataggaggtaaagaaccacgctaatngcagaacagcagcccccctaccttcncaggagcagtgtgactgggaagcagccccgtgtgtatgctggtgcaggttctaagcaaagtgagctgcccatcagttccgatgagtttgctgatgctagacatatgacatctgttctcttgctgcctgccccagttatctcccaaagttctttactgagaatgaaaagcatctttctctgtgtggtgacttcagtaggccaacaaatatttgagtttaaagcacaagactagtcataggcagagcagcgctaccatttacaatttgcttacttgatgctaaaccatgggttaggcattttacagtcatatcatctagcccagcaagtcatggaagcatagttgttaaaatcatctgacactttgggagnnnnnnnnnnnnnnnnnnnnnnnnnnnnnnnnnnnnnnnnnnnnnnnnnnnnnnnnnnnnnnnnnnnnnnnnnnnnnnnnnnnnnnnnnnnnnnnnnnnnnnnnnnnnnnnnnnnnnnnnnnnnnnnnnnnnnnnnnnnnnnnnnnnnnnnnnnnnnnnnnnnnnnnnnnnnnnnnnnnnnnnnnnnnnnnnnnnnnnnnnnnnnnnnnnnnnnnnnagtgagactccatctcnnnnnnnnnnnnnnnnnnnngaccgcgtatgcggccgcaagcttattccctttagttgagggtt

SEQ ID NO: 102169 - DNA, 878 bp, Homo Sapiens
  misc_feature (235)..(235): n is a, c, g, or t
ccctcaaaggtgtcacagttgctttggcccggtctgctgttggcccccagccccggttgggttttgttctgcaggttttgcaagggcccggtgcccacctggttgggccaagcctcgagcctctgggagaatctccctttcccccgttcttcgtagatctgctaattagaagtcagagcagatatttccccaagggaacgtagaatgtcatctctttctttaggatcatcacaanaaatctgctattttccgagcttcagccaaagcacctcgaatctgctcttctccttccggtccaccatttggatctgcaagccagttctgagcagcatcgatcttctttgcaatgctctgctttgagttggtcatggcttccagcttgcgagctgcattttccacttttgctgtgagcacatccagaccctgagatacctgctgagctttctgcatggccaccggtgaggaaccttgtcctctggcacggaggtcagccacttgatcagtcatctgccctagcattttgcaagttcccagaatctccctgcgttctttgcctgcacagagttcaccaacttttccagcttcatctaagatctgtctgatggcctgctcaccagcatcccctggggaggcactagggtcacggagccaacctttggcctggttcagtttggagtctatggaggccaatgctctcttcatggcttcagtgtccttgctggcccaggcatcttcatcccaagaggtgagttgtaacacacgaattatctcattaatttcagcactcattttttctacagtaaaattgcgattttttaaagcttcctctatgccttggttttttgagtttttagttgttacaaaaatcttcatagctg

SEQ ID NO: 102170 - DNA, 373 bp, Homo Sapiens
tccagccttctgaacatagttaatagtaatgacagccgtaacactaacgcgctctgcaattcgccctgcccagccatcctcggttgccaagattgcctgtgcctgcctgacaaaggaagagaatctccgaatgtgtatctttgggcccaccctagggagaggtcggggtaaccaggctacatggcgacatctaggcagctccgccttgcccagcctccttgccataatcctaatatattggtgtcctctgctcagaggggactgtcatcatggtgggaacaggctgtgcctccccaggggactcttgccccatgttcccaagggcctcatctgtacactgtggaaattaaactgggcatccctggtgggccca

SEQ ID NO: 102171 - DNA, 268 bp, Homo Sapiens
  misc_feature (19)..(19): n is a, c, g, or t
  misc_feature (182)..(182): n is a, c, g, or t
tcacgcctgtaatcccaanactttgggaggctgaggtgggcagattacttgagctcaggagttcaagaacagcctgagcaacatggtgaaaccttgtctctacaaaaaaataccaaaattagccaggcattgtggcatacactcgtacttccaactacttggaaggctgaggtgggaggatnacttgagctcaggaggttgaggctgcagtgagccatgactgagccactgaacttcagcttgggcaaaacagtgagaccttgtctcc

SEQ ID NO: 102172 - DNA, 282 bp, Homo Sapiens
  misc_feature (93)..(93): n is a, c, g, or t
  misc_feature (120)..(120): n is a, c, g, or t
aaaattgtccaatctgttgctatagctaaccagtaatttcttttgtcaaatgtaaataccgttccccagtaccttcctattggcttgatgctnaaagacacgaagattcaccttccttanaaatgcatcaggctactctgtgtttgcagcatcgcccaggttcctaaaacaatcttccctttacaaattacttttatatctactacgaaaggatgagctcttgtttaaatgtctaactgtgaacatcaagtgtgctgactggagataaatgttctcgtgccg

SEQ ID NO: 102173 - DNA, 298 bp, Homo Sapiens
cacagggccctctccctccctctctccaactcagcttttaatgcggggctatagggaagctggtgtgactgctttcaccagacacagccttttctgataaaggaagctgaccaatcacaggacccactaccccacagggcaggacagagtcatctcccaggaagtttttcaaccggggcaaagggaagagctccctcctatctgctcttgaagctgtgaggtacagaggccactggtcctgtgccttctatgcgaagaaagcaagcctacacagcaaaagaagcacagagataaggag

SEQ ID NO: 102174 - DNA, 335 bp, Homo Sapiens
  misc_feature (24)..(24): n is a, c, g, or t
atacattacaaagtggcattgtanacaagtgctcaagcaaaagcatcgttcctcttgattacagaatgaactggcacacttctccaagaaggagccatgggagggtgctcccaggcaggggaacggcctgtgcaaatctcttgaggtgtgaaagcatcagacccttttagagctgaggatcagaggtgccagttcctgccacctcctcctaggagtcactcctgaacaaggcagatggagtaaggctgagggcttaagcattatttcaccctccatccatctggcagggactcccacatcacctgaattaaattccaaagtccctaccatggcat

SEQ ID NO: 102175 - DNA, 292 bp, Homo Sapiens
gaggagcaggaaactgggtcccttgaagaatctacagatgagtctgaggaagaagagagcgaagaggaacccaagctgaagtatgaaaggctttccaatggggtaactgaaatacttcagaaggatgcagctagctgcatgaccagtccatgacaagtttttggcattggggcacacattatggcaaggtttatttactttgatgtccaggggaacatcacttcagaagtttgatgtaagtccctgtgaagataaatccagattagctttggatgaaagtgggagagcacat

SEQ ID NO: 102176 - DNA, 452 bp, Homo Sapiens
aaaaggccgaaaaggtcactgaaaaagtagttgtaaagcctgaaaagacggaaaagaaggatcttcctcctcccccaccaccacctcagccaccagcaccaattcagccacagtcagttccaccaccaattcaaccagaagcagagaaatttccttcaacagaaactgcaactttggctcaaaaaccatctcaggatactgagaagcctctggaacctgtgagtactcgttcaggtagagcctgcagttaagactgtaaaccaacagactatggcagcaccagtagtcaaagaagaaaaacaactgcagcaagtcatccagccaaagcacttgttatcagcagcaggctcgcaccagattcaagcaccagccagttaacacaacagatcgaacttgtgcctccccaggcactcatgggcaaagcaagctagagcagcagcagcattgggttt

SEQ ID NO: 102177 - DNA, 354 bp, Homo Sapiens
gaaaaattattctgatggctctgaaacctcatcagagttttctaaaatgcaagaagatctgtgtcatattgcccataaagtttacttcactttaaggtcagcttttaatatcatgtcagcggagagagagaaactgaagcagctgatggagcaggatgcctcctcctccccgtctgctcaggtcattggtctgaagaacgccctgtcatccgccctagcacaaaacacagatcttaaagaacgcttacgcagaatccatgccgagtctctgctcctcgactcccccgctgtcgccaagtcgggtgacaatctgggcagaggaaaactccagagatggaaaaccgagctctagtt

SEQ ID NO: 102178 - DNA, 917 bp, Homo Sapiens
  misc_feature (612)..(612): n is a, c, g, or t
  misc_feature (636)..(636): n is a, c, g, or t
  misc_feature (800)..(800): n is a, c, g, or t
catcatggaagcctgtcactgtatgtaggacataatagaacttgatcacttgaagctcagacctattggtcttgatcaaatcaaactaagaagaccttagaaataagctaccattttgccacagagcagcttataggtaatacactcttctctcagtgcagtgtacatttccacaaatctaagaattgccctataaacatagcaggattttgagagcttgaaaattttccattattctggacatgaatttctaaaatgccttaataggtttatgtagttgagtaaattttgttttttaatttttgtaagcatcaaagttgattagagaggggggcactttttctggagaattctcttagtaaacacaaaagattgttacggtttcattagtagtatggttgtggggccataagttaaacagtgctgcctggtaggctggggaactgaagagacttgtgggtattccatctcgggtgccgctgttggcaatgatccaagcagcccaaaaagatttaaatggatctataataatttccaagcggtagattatgtggcattttattgctcaggcaataattggtttaatgctggtagtgtcaattttgaggtgtnattttggtctagaccttccagtangtggaatacacctagtttatcacatatcaccagcaggcatggataattatttaacatgctaatattgagtttgcagtatattaagataagtcagttaatcttgggtcatatgtcgagagtaatggaagtatttcgcgcatgggaccactaaggagtttctttanagtaatgaaagactgggttataaagcattagatgggaatcgaaagtcctcacaatgtgaacagagcatattccataggagggaccaaatagtgcttccgggaaaaaccatacgagtc

SEQ ID NO: 102179 - DNA, 580 bp, Homo Sapiens
  misc_feature (496)..(496): n is a, c, g, or t
ttacttccttccgaacattgaacatagactggatgtggtatctgaacgggaactatttggttctgttggtgtcattggtggtcattcttcctttgtcgctgtttagaaatttaggatatttgggatataccagtggcctttccttgttgtgtatggtgttctttctgattgtggtcatttgcaagaaatttcaggttccgtgtcctgtggaagctgctttgataattaacgaaacaataaacaccaccttaacacagccaacagctcttgtacctgctttgtcacataacgtgactgaaaatgactcttgcagacctcactattttattttcaactcacagactgtctatgctgtgccaattctgatcttttcatttgtctgtcatcctgctgttcttcccatctatgaagaactgaaagaccgcagccgtagaagaatgatgaatgtgtccaagatttcattttttgctatgtttctcatgtatctgcttgccgncctctttggatacctaacattttacggacatgttgagtcagaattgcttcatacctactcttctatcttggggactgatattct

SEQ ID NO: 102180 - DNA, 413 bp, Homo Sapiens
  misc_feature (83)..(83): n is a, c, g, or t
ctattgtcaaattcccaactaccagaaataactttttggaattaaaatgaattcccctcctgaaattgtctctcccttggttnaaacctatctttctctcctggataacttcaagaccaggaccacctttacaaagttgtctgtgagtggcaaacgggagttgtgagatgtatgcacacctatgcggataaatgagtggcctgtccacagcatcttttattagctgaccctccccaaggcctctacaggacctgttctcccctctagcacaacttaccacagtttattgtgttccctatttatctgtctatcccagggatcctattcaattcatctttgtattccaaatgctcagtggagtgcctggcacataatagctgctcaataaacatttgttgcttgactggttgtag

SEQ ID NO: 102181 - DNA, 495 bp, Homo Sapiens
  misc_feature (51)..(51): n is a, c, g, or t
gggagaaggcagcggacgcatcacttgcacttctagaaatagatgcaacgntcaggacacaaggacatcctatagaattggagacacctggagcaagaaggataatcgaggaaacctgctccagtgcatctgcacaggcaacggccgaggagagtggaagtgtgagaggcacacctctgtgcagaccacatcgagcggatctggccccttcaccgatgttcgtgcagctgtttaccaaccgcagcctcacccccagcctcctccctatggccactgtgtcacagacagtggtgtggtctactctgtggggatgcagtggctgaagacacaaggaaataagcaaatgctttgcacgtgcctgggcaacggagtcagctgccaagagacagctgtaacccagacttacggtggcaactcaaatggagagccatgtgtcttaccattcacctacaatggcaggacgttctactcctgcaccacgaagggggatggaca

SEQ ID NO: 102182 - DNA, 461 bp, Homo Sapiens
gaccgcattggagatacctgtgacaacaatcaggatattgatgaagatggccaccagaacaatctggacaactgtccctatgtgcccaatgccaaccaggctgaccatgacaaagatggcaagggagatgcctgtgaccacgatgatgacaacgatggcattcctgatgacaaggacaactgcagactcgtgcccaatcccgaccagaaggactctgacggcgatggtcgaggtgatgcctgcaaagatgattttgaccatgacagtgtgccagacatcgatgacatctgtcctgagaatgttgacatcagtgagaccgatttccgccgattccagatgattcctctggaccccaaagggacatcccaaaatgaccctaactgggttgtacgccatcagggtaaagaactcgtccagactgtcaactgtgatcctggactcgctgtcggttatgagcggtg

SEQ ID NO: 102183 - DNA, 529 bp, Homo Sapiens
attttttgtgcctgttatttttcatgggtttatcatctctttacaaatgggctgcgtccactgaggggcagcattgatttcccgctgctgtcactcagcgcctcagcctcctttgatcccttttttggttcacccttgttgcccatacttactttcctttattgtcagttctaatcttctccttttctatctctttaatgaaattcaccattttaaaaaagatttctggggtctcaaaagtttttcaggggatctcgcataagtctctgcattgtgacctaaactgtgtagcactgatttccaatggattggggctgatgggcggggtggggggccattgttgggagagcagaatatcctcatgaatagagtttctcagtgacactgttaacattttggaggataaatcctttgttgtggggggctgtcctgtgcatcgtaggatgcttagcatctgcttcagtagatgccaatgatattatctcagatgtggacaaccaaaatgtctccaaatcctgccaaatgttcc

SEQ ID NO: 102184 - DNA, 575 bp, Homo Sapiens
ccgcctcaaagagctgtgttgaacacagctcctcatgacaaggggaagtcatccaagattacggcgcgattcttcctcaccatctgatccaggaaatcacacagcttgaaatcagagctacctcggaggtgtcccctaactccaagccctctcccaacacaaagaaccaccccgtccgatttgggtctgatgatgagggcagatacctaactcaggaaactaacaaggtggagacgtacaaagagcagccgctcaagacacctgggaagaaaaagaaaggcaagcccgggaaacgcaaggagcaggaaaagaaaaaacggcgaactcgctctgcctggttagactctggagtgactgggagtgggctagaaggggaccacctgtctgacacctccacaacgtcgctggagctcgattcacggaggcattgaaattttcagcagagaccttccaaggacatattgcaggattctgtaatagtgaacatatggaaagtattagaaatatttattgtctgtaaatactgtaaatgcattggaataaaactgtctcccccattgctctatgaaaaaaaa

SEQ ID NO: 102185 - DNA, 464 bp, Homo Sapiens
  misc_feature (52)..(52): n is a, c, g, or t
tggcccgagccccagcatggcctccgacccagctccgggtcgtggcgccgcntgggggtccctgcgccccggaaagagacagcaggcactggaaagcgaggccggtgggcgggcgagtcgggaggctcgggcggccgaggtccgggagcggatcccaggtggcgggagctggtgccctggcaggagggactggcttacgccaccctgtgcaggatcgtcttctcagcttacagagcctagtgtgattcaacaaccctccatctctgcccccaacatgcccaactgatctggtggagggaactgaagatgaaggcctctcaggcaccatggatgggatgggtgtgtgtgaagggggcagggtccccaggagctgccccaggtctggctggacagttgcacgggaagtcctgtttgtaaactcaacgtttccacggcttttccattaaactttaccccaaatcaaa

SEQ ID NO: 102186 - DNA, 426 bp, Homo Sapiens
  misc_feature (152)..(152): n is a, c, g, or t
  misc_feature (154)..(155): n is a, c, g, or t
tcacatgctcagccccataaaccgtgctggacaggcatggccatttacacccaggatcctgctgagaacagcaaccaactcaccaccctcgcatcatgatccttgccacacaggggctctggtggctttggtggcctgggctgtggctcttntnnccagccaccttgagtgaagatccgggttctttgggtgctactcaactgctatgtggggagctggcccctggggtgatgagggcccttcccaacccgccctcagcccttggacagccaggatcacccggggctgtctgcatacagacttctcaggggagttctcagcttggacccttatctccccagaatcctggaacctgctccttctgctctcgtgactgactgtgttctctatgcaacttccaataaaacctcttcatttgaaaggaaa

SEQ ID NO: 102187 - DNA, 431 bp, Homo Sapiens
atcttgaaaggatactaagtctgacacaaggaaattaagtcatgggactctgaccagatattctgtctacttccttctctgctatgggcaacttggaggcagcaactactatcagtttatctgtaatgtgagaatttatattacataacagatactggggatataggataccatggattttagttaatacatttcctcatagaaaataaggaaataacagtcttgttcctgtcctaacaattctgttagactaatgatctccagtgattggcgatttgacctggtttcttcctggactatttgaatgggtggatttgttggtgcatctcttgtcttctttccttttccattctcctttatttttgtatttacatacttgtatgcaactttgtaatctgattttcccatgtaacattttaatttgaaaaaaa

SEQ ID NO: 102188 - DNA, 148 bp, Homo Sapiens
ccactttcagcatacagatcctggacatattttatatttataccaaatattttatatattttctactgttgtcaatggtagtggtttttaaattttcaaacattcattactagtatatagaaataaaatcactttttaaaaatgtaaa

SEQ ID NO: 102189 - DNA, 370 bp, Homo Sapiens
  misc_feature (164)..(164): n is a, c, g, or t
  misc_feature (356)..(356): n is a, c, g, or t
ctttgctcacgggcagacacggaatgtaaatttgcacatccttcgaaaagctgccaagttgaaaatggacgagtaatcgcctgctttgattcattgaaaggccgttgctccagggagaactgcaaatatcttcatccacccccacatttaaaaacgcagttggnagataaatggacgcaataacttgattcagcagaagaacatggccatgttggcccagcaaatgcaactagccaatgccatgatgcctggtgccccattacaacccgtgccaatgttttcagttgcaccaagcttagccaccaatgcatcagcagccgccttttaatccctatctgggacctgttttttcaggntggtcccggcagtg

SEQ ID NO: 102190 - DNA, 331 bp, Homo Sapiens
gtccaaggccacccggctgagcagcggttgaaccaggacaccatcaggcatgcgtttcttgtctccaccacaccctcaacccacttcccaacgcgccttgcgacaggggctgcggtattgcatccacatgactgataaactagtaaacacacatgaattcattttaaaagtgtattcaatcagttaggtaaactaaaaaccttaagtcttcgttcgatttggaacgcagccagagaacaaatggaaaatttttcaaggtagagaagatgaaaactcagaacgccctcttctggcatctctacccaccctagggacactatggctctttccc

SEQ ID NO: 102191 - DNA, 308 bp, Homo Sapiens
ttccgcccccccatggatgggaccagcttctggaacatctggatcatgtcctcgcagttgcgctgctgagccacaatcgcagagcttggcggtgatgtcgatgcggcggcagatgtccatatccaccttcatggctttctcctggatcttggtgtccagctccgacaggttgttactcatgagccccttgaagaccaccagctcagccttcaactgttccaccttcagtgccagctccacctggcaggcatcagcctcctgggcttcctcctggagcttatttacacggtcttgcagctggatccgca

SEQ ID NO: 102192 - DNA, 283 bp, Homo Sapiens
  misc_feature (36)..(36): n is a, c, g, or t
  misc_feature (53)..(53): n is a, c, g, or t
  misc_feature (160)..(160): n is a, c, g, or t
caaataaacagcatggccaacccatccctggtggtncatgcccaaagccgagnagtcagtcctgttttttctctttccttcaccctcccaaatccatattccaagagctctgcttccaaaacctgtcctgatccaaccccatctttccatttctattccnaccaatgttgatttggtctgaatcttggcggcatccttctaactggtctccctgctttgattattgccctcatcccccaccccacaattctccctctctactctgcagccaggaaagtcagga

SEQ ID NO: 102193 - DNA, 352 bp, Homo Sapiens
  misc_feature (35)..(35): n is a, c, g, or t
  misc_feature (328)..(328): n is a, c, g, or t
ctttgcctttgcctggaccaagctctaccatgccnagtccagactcccagtgcaacatcctaactgcaaagtcagaatgccttttccttttctcagagactctggtactgaaagaaagcaatctagcatgggttaggtgaggagaagttccctccatagaaaaggatcagccaggggatcatagaaatggctgcagggatcagatggtctggcccccacagagtatttaaaattcaggtatctttttgacctgcttgcaagttacataagcaatacggatttgggtacagaagtatctatgagggaaagggggaaggagaatgggggnacagttacttccctgggcacattc

SEQ ID NO: 102194 - DNA, 310 bp, Homo Sapiens
ttgttatatgtttaaactgtgagtctgtaggaaagaagagcaaatatggagtatctagtatttgctataaacaagggttggcatgttataggcttctaaattaatctttccattacactatgagatagagtctttgactcaagattcccattttatagacaaggaggctcagagaagtcaaataagtctccagggatacacatgcagggtggagacaggatggaccaaaactctttgctttctaccatatgcttagaacatccctggtacataacactattgtaagaactagctattattaaaattattg

SEQ ID NO: 102195 - DNA, 140 bp, Homo Sapiens
gagtactgttttaaactttaagggttaactaagagttatcaacacaaactaatatttcatgcaaaagtatcacttttataataatctttttcttgtatgaaactaatttccttaaaaaatagctactatatactgaaaac

SEQ ID NO: 102196 - DNA, 381 bp, Homo Sapiens
  misc_feature (21)..(21): n is a, c, g, or t
  misc_feature (79)..(79): n is a, c, g, or t
  misc_feature (95)..(95): n is a, c, g, or t
aatgccgactgggactgctgnagaaaggcctaggtcgactccactgtgggttctgccaccattacctttctggagggtngcctgcgcagtttgcnctgctctcgctctaagcagtggaaagacgtgtccccccccacagagcgacagcaggctggcttccaatccgcggccagccactggtaggagctcgagtcacgggacccaaccgagttcacaccatccttctggattgagttgtcacgtcccaaagccaaatgccttggcatttacaacgagcagtggctgctgtgcctcaagatggtacatgcagaactggaatcatatatctcgtcagttaatcagcaccaaggagattatgatccgagatggccgctctcttct

SEQ ID NO: 102197 - DNA, 299 bp, Homo Sapiens
  misc_feature (247)..(247): n is a, c, g, or t
  misc_feature (251)..(251): n is a, c, g, or t
  misc_feature (253)..(253): n is a, c, g, or t
  misc_feature (256)..(256): n is a, c, g, or t
  misc_feature (258)..(258): n is a, c, g, or t
ttacacttgcctgtgtttcaagtttgctaaagggatgaaatacattatttagaatgacagactataactaacaaaggtattaggattattttcaaatatttattccccaaagccatgctgtcagcaagaagacaaaaaagatagtagtttatatttcttccacatgtaataaaccaaaaaaattcccacgtatgtattttttaaaacagggtctgctcggcacaaaatcaatctgcatttttttaantggnanagnanttctcagggccgtttattagcccaaaagatacctactgtcc

SEQ ID NO: 102198 - DNA, 301 bp, Homo Sapiens
accaccccccgcccagcccctgcccccagcctgtgtgccctgttccttgcccacctcaggcctggtggtggcagtggaggaggctgaggaggctgaagaggctgacaggtcggggggctttctgtctggctcactgccctgatgacccacccgccccatccaggctccagcagcaaagccccaggagaacaggctggacagaggagaaggaggttgactgttgcacccacactgaaagatgaggggctgcaccttcccccaggaatgaccctctatcccaggacctgagaagggcctgctc

SEQ ID NO: 102199 - DNA, 294 bp, Homo Sapiens
ctgtggatgatagtcccaataaaaccatattgtaaaaatttgccctaatccgaatttcagtgtattttgaaactattagatatttcaggctatgtcaaagatcctagattatttaatacagacatccaatcctaatttctgtttcttttcctttaggtaaatcattttattttcacttgattacctgagtatagcttccaaaaataactaagacatatattcacataactaaaaaatgatctctcatttatttatggcacatattaaaaatatataggataggttaaaaaagta

SEQ ID NO: 102200 - DNA, 291 bp, Homo Sapiens
  misc_feature (181)..(181): n is a, c, g, or t
agctgtgggtgtatggtgagttgatgttgtccctgacttagggaatatttataaacaagggcagaggtatcccctggacatgttagggacagcgctttaatggacagagggtgaaagatcaggaaaggcagggggttctttccccccagacatatcagtgattggctggctttgctttacncctgggtaaatctagactgctttgcaaatgagtaaaattattgacatttcctaaaaggctcacggtacattagtagactatattatttttataaaaagctctttcctctg

SEQ ID NO: 102201 - DNA, 139 bp, Homo Sapiens
cctacctcagagataaatgagatctccatttcccacttaacacagtgattatccttttttccccccccaaaatagtgacatttggtccaattataatctattttcctattgaactttcagcaataactgagctgtgcac

SEQ ID NO: 102202 - DNA, 182 bp, Homo Sapiens
actgtcttaccttagtgtaatataaagtgataaatgtagaatcgtgaaattagaagatcaccaccaagaaaaccatcaggcaagagtcaccactagaggctacaaaactagtgggtgaaattctgaggaaaagcataatttctttttaaagttatctccctacaagatacttaaaactacaa

SEQ ID NO: 102203 - DNA, 281 bp, Homo Sapiens
  misc_feature (45)..(45): n is a, c, g, or t
accccggtggcccctctgagtccgtgtggccagggctctggctgnggaaaagagaatttgagcctagcgtactttgcagcagccctcaaataactcagcctcctcaaaggggcatctgatagatgcccgtgaacatgtcttctccggcctggccaggctgcccaccattggaaacatcccccagggcctgaccccactgccgagggctgcagcaccccccacacctgctgggctgacgtgtgtcctggctcctgtcttcccctgaagccaggccacccagc

SEQ ID NO: 102204 - DNA, 309 bp, Homo Sapiens
gtttaagttaggaaattagttgccatgttggttcagttgtgtatcaccaccaaagaagtgagttgctaaattaaatataaataaatacttagccatagaactagaggaaaagattaaacaatgtattgttggatcaagaaatcatgtttcaaaatttaaatcaatgacttttatagttcaagtgtctgtgaagtctaaaataaaaatacagacattaattgcactaccttattggtagaagaaatagcaagtaccctaaaaagtgcatgtcatattggaatcaaatctcttgaaggctaggctagtggt

SEQ ID NO: 102205 - DNA, 360 bp, Homo Sapiens
  misc_feature (322)..(322): n is a, c, g, or t
atccctttggttggaaagctctagatgattcccgcagctcctccagaccccgcctccctgccctccccagctggtctgggaagaggtggtctgctgacctgtggtatctcagaggggacgttcctcctcctccctgtgcaccaggtgggctgcaccctcctgcctattcaggatgtggatgccacaggagagcagcaggcagtggaaacttcagttgcactggttctcctggtggcaaaggcatgaagcacaggggtcgatttaatccaggctactagaaagctccagagcaaagtgtgcgggtcccacaaatgcttggctngtggggtctggatcagttctgagatagagtttggcagg

SEQ ID NO: 102206 - DNA, 333 bp, Homo Sapiens
  misc_feature (22)..(22): n is a, c, g, or t
  misc_feature (43)..(43): n is a, c, g, or t
taccaaccttcccagttcccanccctggcaccggccaaagtgncttcctctaaacccagcctgactcggttggtgctcttagggtgaccaagagaggcaagcagctcgcagaaggggacagacttcaagcctcttgggagccctgggcgggtgggaaggagctgtggctcagggctcctcagaaggctggtggttccatgcacagatctcctaacccataggctctctcacacccccagggccccttagactccaggcccatcttgagtgtcatatcagccaacctctgttggtgccaagtgagtgcaaccaggctgtgcaccctcatggccc

SEQ ID NO: 102207 - DNA, 779 bp, Homo Sapiens
tcccgtgtcatcccccttcgtagtgctggtgttgtcactcccggaagagactggaaagacagccaggcatccgggacatgtgctagaagaggaactctgggtctgttctgagggagggtcagcctccacagaagtctgcgaacagaagctgagcagtgcaagaacctagagctgaaggatcttctgccttatggctttgctattcatcacgcaggcatgaccagggttgaccgaacactcgtggaggatctttttgctgataaacatattcaggttttagtttccacagcaactctagcttggggtgtgaatctccctgcacatacagtcatcatcaaaggcacccaggtgtacagtccagagaaggggcgttggacagaactgggagcactggacattctgcagatgctgggacgtgccggaagaccccagtatgacaccaagggtgaaggcatactcatcacatctcatggggagctacagtactacctgtccctcctcaatcaacaacttcctattgaaagccagatggtttcaaagcttcctgacatgctcaatgcagaaatcgtgctaggaaatgtccagaatgccaaggatgcggtgaactggctgggctatgcctacctctatatccgaatgctgcgatccccaaccctctatggcatctctcatgatgacctcaagggagatcccctgctggaccagcgccgactagatctggttcatacagctgccctgatgctggacaagaacaatctggtcaagtacgacaagaagac

SEQ ID NO: 102208 - DNA, 359 bp, Homo Sapiens
tccttctaccctgggtcctccttctcccagcaataaagaattaggtcattcaaagcatctcctctccctaagagtgtggatctcacccaccacatgctgtccttgatctggggcctgacaaagattctctccatgaccacacgttaggctcttctgagatttttttcaactaggggtcaacttttgagcttctgtgtttgtctctgtccaattgtagcacgaatccagtttagacagaatcctccatcctcaatatctgatcacccttgatatctgattgggttcctcatctgtcttacgctgttcctgctgctatagcaaaataccttagaatgggtaatttatgtactgctcactat

SEQ ID NO: 102209 - DNA, 192 bp, Homo Sapiens
gagaaactatttgaaaaccaggcattgggttgaattggaagtgaatacacttcaaaaggtctgaggagaaaatattagaaaccactgatttggataatgtctaatagctcttttaactcttagtcttttacctaaatatccttgatatttacagcatagtaaaatctggttttccaaggattctgatgaaag

SEQ ID NO: 102210 - DNA, 270 bp, Homo Sapiens
gaggccttgtggagaagggctcagaaaagcctgactagagtttggttaaggagagaatcttggtcagcagctgtgttagttaagaggctattgcagagtccaggaggaagatcatgggggtttggactgtgggtagcagtatacatggagacaagtagatgattatgggagatattttagagagggggctaagaagacgtgcttttgaattggtatactccctgtggaattgattgaaaatggtttctttttccttgactgaaaaagact

SEQ ID NO: 102211 - DNA, 343 bp, Homo Sapiens
atgcctctcaacaccttaaaaaaaatagtaataatggagacagaaaaaactacatgtatatattgaggttagtctcctgtatttgaactaccccaatgtttcatctcagtagtgaaaactttgtaggaaaagttctatttatagaattactaagaagatccaaactataacataaggaagatacgattaagtgagctgagtgctagttataaaaaagggctctttgaatacacctatgttctgactcatcagcaggaaagaccaattaagaaacacttttcaataaagctataaagacattggacaacgaagaaattcaaaaatgagctgcaactcagataat

SEQ ID NO: 102212 - DNA, 278 bp, Homo Sapiens
  misc_feature (241)..(241): n is a, c, g, or t
ggcagacggcccaacatccagtctttccccaggacagagctaacaagggcccctttgccttctcatcctcaggagttccaggcacatgagtcaccgtccatccacatccagtgtggcctggagctgctacagaggtgttgggcaggccatgcctgtgccgccatctctcccttcctgcctcatttcatcccccgcagcagccgggattgattgtgctttcctaacccccttggacctactnttccttcttcccaccattcctctttccccacatgtgt

SEQ ID NO: 102213 - DNA, 383 bp, Homo Sapiens
  misc_feature (21)..(21): n is a, c, g, or t
  misc_feature (46)..(46): n is a, c, g, or t
aaaaaaaggaatttggtcaanacccaattccacgaagtggtctggnttgcagacatcggccccacttcctgcctcatgccccttcctccgggttctgggtccccaaggaggccactgtggaagagttttcgccaacaagggttaagccagagaaggctgggtgggaggcttgcagagccaagggaggagattggtcagtgtaatctgtggccgcccggcactggctaaactgagctctggccacatgggccctagttgccccaatcccgcttccaattagatcctgggcactggtccccgaagaggtgttgcgtgacattatcacagacactgaaataccaccctggagaccgggagttctttccttcctaagtggttctgtc

SEQ ID NO: 102214 - DNA, 331 bp, Homo Sapiens
  misc_feature (47)..(47): n is a, c, g, or t
  misc_feature (151)..(159): n is a, c, g, or t
aaattaatgcctaggattaatgtgaataaaaattaaagggaaaatgnccataaaattgaggataccaaaattaaaatggatccttgatgtgagaataactgtattccttgcatgttcagaatgtccttatgttcttctagagagacttagnnnnnnnnngccatgcaaataaaaatctcattacatgccagctgagtgacttgcaaaggtttgccccagaagggctttttaaagaggctaaagacattctaattgccatccaaattgatgtttacaccaaaataagaagaaatcatctactcccaaagcaaatcctatctatggacttcat

SEQ ID NO: 102215 - DNA, 322 bp, Homo Sapiens
  misc_feature (160)..(160): n is a, c, g, or t
attgaagtccataatgttcgagtacctcagggacatttaagagttggaggtgcaaatatattccaaaagggtgcaacagacacagtgtatcccccctgcttctgtttttgtatatttttgctacttggtttttcttgatcatagctattttgtgcttganctttattgtctaagatgcagtatcctgtactagcttataatattcccataccaaagtcatggggaaacaaacattattttgtttttggtttatttatactatattctgcatacagtactttaaatgccaattacagtgcaatctttatttattgtaaaattt

SEQ ID NO: 102216 - DNA, 331 bp, Homo Sapiens
ttggtgccttacaaaagaaaccctaacatttaatgggtggaaacatcatcgctatgtatgttgagttcccagggagatggttagaaagtgaggttgcagaacctggctcctgggtgtttgacacatatcaagagaggaatcctgtttggagaggcctaagaccttcaaagctattcccagcagggaggtactcagataacatctaaggtttcagatttccggggaaaattacaaacacttggcaaatgagaaattatgtgcactaaactattactggcctgaatatcgtgtggttagaaagaacttgataccaccacgtaggtgtgcgagg

SEQ ID NO: 102217 - DNA, 302 bp, Homo Sapiens
  misc_feature (45)..(45): n is a, c, g, or t
  misc_feature (56)..(56): n is a, c, g, or t
  misc_feature (135)..(135): n is a, c, g, or t
  misc_feature (255)..(255): n is a, c, g, or t
  misc_feature (281)..(281): n is a, c, g, or t
gtctgtaagcagtggggacttgcgtccaatggggattgccttggnagggcaccgtnggcaccggagagcttggggctgcactgagccgcttggccctccggcctgagccacccactttaagacgtagcacttctntccgccgcctagggggctttcctggaccccctaccctgttcagcatacggacagagccccctgcttcccatggctccttccacatgatatccgcccggtcctctgagcctttctactctnatgacaagatggctcatcacacactncttctgggctctggtcatgtt

SEQ ID NO: 102218 - DNA, 366 bp, Homo Sapiens
  misc_feature (279)..(279): n is a, c, g, or t
gagtttagacctcagtggaattgactcatgtgaaatgagtgatagtggaagtcaagtgccagacagtctgcctagcacaccatccccagtagagtctactaaatcgttttctgtgcactctgacagagaaagcagcatcacaaatgatatgggctttagtgatgacttctctttacttgaaagccaagagagatgttaggaggagcttcttcaattactgacacatattttgaattatgtaatgtgtaagggactagaaaagtctgatgatgatacttnggattgaacggggacaagtgttttcagcactaagtaaaccagggattatccagtgaactacttcgaccatcagatggaataaaactt

SEQ ID NO: 102219 - DNA, 165 bp, Homo Sapiens
  misc_feature (29)..(29): n is a, c, g, or t
ctcctcctacccatcaaggctgccccagncctgtgcacaagtaccatggccgtggctgaagggccgggcagcactgaggctggactttgagtctttccctgtggagatggcatggtactgcagggtagaaggccttcctaatagctgtgggtggcgagccacatc

SEQ ID NO: 102220 - DNA, 399 bp, Homo Sapiens
atgatcctcccaagtggctcccaaagcactgggattacaaccatgaaccaccacacccagccttactttttcttcttcatcttaatttcctgcagtttttacatggaccaagtaataaagaatataaatacggtgtgttatggagtcttagagcgtgctttacagttagaagattccaaagagacagaattcaaacaacttaagtcaaaatcacattaggaagtagatataactggcctcagtggtttggctggaaagagaagaatgaacactgagtgtgaccaatgggacttaatattgcataaagcacacaaaacttccccgccagtgggcatcgtaagtgacaggaaggctgtgtatcactgaaatcaattaattccacaataacacattgaatcc

SEQ ID NO: 102221 - DNA, 446 bp, Homo Sapiens
gactagggaaagtgatcgactggaggagaagggcagcctaactgaaggggccttggctcattctgggaaccctgtatcaaaaggagtccatgaagaccatcagctggataccgaggctggggccccacactgtggaacaaacccacagcttgctcaggatccatcccagaatcagcagacatcaaatccaacgcacagttcagaagatgtgaagccaaaaaccctcccgctggataaaagcattaaccatcagatcgagtctcccagtgaaaggcggaagtctataagtggaaagaagctgtgctcttcctgtgggcttcctttgggtaaaggagccgcaatgatcatcgagaccctcaatctctattttcacatccagtgtttcaggtgtggaatttgtaaaggccagcttggagatgcagtgagtgggacggatgcaggatggt

SEQ ID NO: 102222 - DNA, 280 bp, Homo Sapiens
gtaggctgcggaagacgagcaacctgagcgcggagatcaaccgctacatcgtcatcgacgggctgcgggagctcaaacgcctcaaggtgctgcggctcaagagcaacctaagcaagctgccacaggtggtcacagatgtgggcgtgcacctgcagaagctgtccatcaacaatgagggcaccaagctcatcgtcctcaacagcctcaagaagatggcgaacctgactgagctggagctgatccgctgtgacctggagcacatccccgtcttccaagccta

SEQ ID NO: 102223 - DNA, 294 bp, Homo Sapiens
  misc_feature (228)..(228): n is a, c, g, or t
caaagataacctagaactcctcctgatgaaccattacatcaaaccagggctgaaaaacaacttcaaagaaacggcatttgatattgccaggaggacaagtatctatcactccttctttgtaatggtggaaggctatacaaattcttcacctcagtcttaatggttctagtaattttaggtgtctaagtaccagtggctccttcgtgcaagatataaaatattcccatnaagacaaagttggatttaaaacgtcttactacagaaattcagtggtaaggtagttactattatgtt

SEQ ID NO: 102224 - DNA, 287 bp, Homo Sapiens
cttgtatacacatatattggtatcaaaagggataaaagccaatttgtctgttacatttcctttcacgtatttcttttagcagcacttctgctactaaagttaatgtgtttactctctttccttcccacattctcaattaaaaggtgagctaagcctcctcggtgtttctgattaacagtaaatcctaaattcaaactgttaaatgacatttttatttttatgtctctccttaactatgagacacatcttgttttactgaatttctttcaatattccagggtgataga

SEQ ID NO: 102225 - DNA, 1062 bp, Homo Sapiens
  misc_feature (169)..(169): n is a, c, g, or t
  misc_feature (178)..(178): n is a, c, g, or t
  misc_feature (1020)..(1020): n is a, c, g, or t
aggctggaccggtccggattcccgggatcacacgcaactttaaattccgctggcaactggagtctctcaaatctcaggaatttgttgaaacggggctttgctatgatactcgggtgagatgcctgcagatcacggatctgtacttaaatgctttcagccttatgccttnggctcctgngagaaaaccacactgccaaagttcaggtaacagagttcaatggaatttgatgaaagtcacctaagggcctcattttcctttctctttctttgaacagacaaaatgctaagaagtttggaatcaggttccaatttcgcccctttgaaagtgggtggaatttacttgcctctccactggcctgcccaggaatgctacagataccccattgttctcggctatgacagccatcattttgtacccttggtgaccctgaaggacagtgggcctgaaatccgagctgttccacttgttaacagagaccggggaagatttgaagacttaaaagttcactttttgacagatcctgaaaatgagatgaaggagaagctcttaaaagagtacttaatggtgatagaaatccccgtccaaggctgggaccatggcacaactcatctcatcaatgccgcaaagttggatgaagctaacttaccaaaagaaatcaatctggtagatgattactttgaacttgttcagcatgagtacaagaaatggcaggaaaacagcgagcaggggaggagagaggggcacgcccagaatcccatggaaccttccgtgccccagctttctctcatggatgtaaaatgtgaaacgcccaactgccccttcttcatgtctgtgaacacccagcctttatgccatgagtgctcagagaggcggcaaaagaatcaaaacaaactcccaaagctgaactccaagccgggccctgaggggctccctggcatggcgctcggggcctctcggggagaagcctatgagcccttggcgtggaaccctgaggagtccactggggggcctcattcggncccaccgacagcacccagcccttttctgttcagcgagacctc

SEQ ID NO: 102226 - DNA, 1641 bp, Homo Sapiens
  misc_feature (1433)..(1433): n is a, c, g, or t
  misc_feature (1532)..(1532): n is a, c, g, or t
atgaacttggacatcagcaaagatcccgagcactgccggctggctcctagaccggtctcccgacccagtgtagacttcgcgcagataaagtgagcccggaaagggaaggagggggcggggacaccattgccctgaaagaataaataagtaaataaacaaactggctcctcgccgcagctggacgcggtcggttgagtccaggttgggtcggacctgaacccctaaaagcggaaccgcctcccgccctcgccatcccggagctgagtcgccggcggcggtggctgctgccagacccggagtttcctctttcactggatggagctgaactttgggcggccagagcagcacagctgtccggggatcgctgcacgctgagctccctcggcaagacccagcggcggctcgggatttttttgggggggcggggaccagccccgcgccggcaccatgttcctggcgaccctgtacttcgcgctgccgctcttggacttgctcctgtcggccgaagtgagcggcggagaccgcctggattgcgtgaaagccagtgatcagtgcctgaaggagcagagctgcagcaccaagtaccgcacgctaaggcagtgcgtggcgggcaaggagaccaacttcagcctggcatccggcctggaggccaaggatgagtgccgcagcgccatggaggccctgaagcagaagtcgctctacaactgccgctgcaagcggggtatgaagaaggacaagaactgcctgcgcatttactggagcatgtaccagagcctgcagggaaatgatctgctggaggattccccatatgaaccagttaacagcagattgtcagatatattccgggtggtcccattcatatcagtggagcacattcccaaagggaacaactgcctggatgcagcgaaggcctgcaacctcgacgacatttgcaagaagtacaggtcggcgtacatcaccccgtgcaccaccagcgtgtccaatgatgtctgcaaccgccgcaagtgcccacaagcccctccggcagttctttgacaaggtcccgggccaagcacagctaccgaaatgctcttctgcttccctgccgggacatcgcctgcacagagcggaggcgacagaccatcgtgcctgtgtgctcctatgaagagagggagaagcccaactgtttgaatttgcaggactcctgcaagacgaattacatctgcagatctcgccttgcggatttttttaccaactgccagccagagtcaaggtctgtcagcagctgtctaaaggaaaactacgctgactgcctcctcgcctactcggggcttattggcacagtcatgacccccaactacatagactccagtagcctcagtgtggccccatggtgtgactgcagcaacagtgggaacgacctagaagagtgcttgaaatttttgaatttcttncaggacaatacatgtcttaaaaatgcaattcaagcctttggcaatggctccgatgtgaccgtgtggcagccagccctcccagtacagacccacactggncactaccaccactggccctccgggttaaagaacaagccccctgggggcccagcaagggtctggagaatgaaatttccccacctaatggtttttgcccaccccgtgtgga

SEQ ID NO: 102227 - DNA, 1113 bp, Homo Sapiens
  misc_feature (855)..(855): n is a, c, g, or t
gaggctggaccggtccggattcccgggatgcaaatttgattttgatttatggaaatgaatttgacaaaagattctttgtgcctgctgaaaaaatcgtgattaactttatcaccctcaatatctcggatgattctaaaatttctcatcaggatatgagtttactgggaaaaagcagtgatgtatccagccttaatgatcctcagcccagcgggaacctgaggccccctcaggaggaagaggaggtgaaacatttagggtatgcttcgcatttgatggaaattttttgtgactctgaagaaaacacggaaggtacttctctcacccagcaagagtccctcagcagaacaatacccccggataaaacagtcattgaatatgaatatgatgtcagaaccactgacatttgtgcggggcctgaagagcaggagctcagtttgcaggaggaggtgtccacacaaggaacattattggagtcgcaggcagcgttggcagtcttgggcccgcaaacgttacagtactcatacacccctcagctccaagacttagaccccctggcgcaggagcacacagactcggaggaggggccggaggaagagccatcgacgaccctggtcgactgggatccccaaactggcaggctgtgaattccttcgctgtccagcttcgaccaggattcagagggctgcgagccttctggagggggatgggctcgggagaggagggtcttctatctagactctatgaggagccggctccagacaggccaccaggagaaaatgaaacctatctcatgcaattcatgaaaggaatggggggttatatgtgcagatggaaaactgatgccaacacttcctntttgcccttttgtttcctggtgcaaacaagtgaagtcaccccctttgatcccagccataaagtacctgggatgaaagaagttttttccagtttgtcagtgtctgtgagaattacttatttcttttctctattctcatagcacgtgtgtgattggttcatgcatgtaggtctcttaacaatgatggtgggcctctggagtccaggggctggccggttgttctatgcagagaaagcagtcaataaatgtttgccagacaa

SEQ ID NO: 102228 - DNA, 916 bp, Homo Sapiens
  misc_feature (743)..(761): n is a, c, g, or t
attgacttccgacaggatctgggctggaagtgggtccatgaacctaagggctactatgccaacttctgctcaggcccttgcccatacctccgcagtgcagacacaacccacagcacggtgctgggactgtacaacactctgaaccctgaagcatctgcctcgccttgctgcgtgccccaggacctggagcccctgaccatcctgtactatgttgggaggacccccaaagtggagcagctctccaacatggtggtgaagtctcgtaaatgtagctgagaccccacgtgcgacagagagaggggagagagaaccaccactgcctgactgcccgctcctcgggaaacacacaagcaacaaacctcactgagaagcctggagcccacaaccttcggctccgggcaaatggctgagatggaggtttccttttggaacatttctttcttgctggctctgagaatcacggtggtaaagaaagtgtgggtttggttagaggaaggctgaactcttcagaacacacagactttctgtgacgcagacagaggggatggggatagaggaaagggatggtaagttgagatgttgtgtggcaatgggatttgggctaccctaaagggagaaggaagggcagagaatggctgggtcagggccagactggaagacacttcagatctgagggtggatttgctcattgctgtaccacatctgctctagggaatctggattatgttataccaagcaagcannnnnnnnnnnnnnnnnnnaaagacaggttaccaaagacaaaggcccccaaaattgaatcctcatactggcctggggattaaggggcaaaatcttattaccttttggccaaactgttccctctaacctccaatttaacatcggtgggggtccactaaccagggggagaaaaatt

SEQ ID NO: 102229 - DNA, 988 bp, Homo Sapiens
gctgggcctgcctcggacgccgccggtgtcgcggattctctttccgcccgctccatggcggtggatgcctgactggaagcccgagtgggatgcggctgacgcggaagcggctctgctcgtttcttatcgccctgtactgcctattctccctctacgctgcctaccacgtcttcttcgggcgccgccgccaggcgccggccgggtccccgcggggcctcaggaagggggcggcccccgcgcgggagagacgcggccgagaacagtccactttggaaagtgaagaatggaatccttgggaaggagatgaaaaaaatgagcaacaacacagatttaaaactagccttcaaatattagataaatccacgaaaggaaaaacagatctcagtgtacaaatctggggcaaagctgccattggcttgtatctctgggagcatatttttgaaggcttacttgatcccagcgatgtgactgctcaatggagagaaggaaagtcaatcgtaggaagaacacagtacagcttcatcactggtccagctgtaataccagggtacttctccgttgatgtgaataatgtggtactcattttaaatggaagagaaaaagcaaagatcttttatgccacccagggggttactttatgcacaaaatttagtgcaaattcaaaaactccagcatcttgctgttgttttgctcggaaatgaacattgtgataatgaggggataaaaccatttcctcaaaagaaatggaggcttcgtggagctgcttttcataatatatgacagccccctggaataattgacgtggaatgttttttcggtgggccttttaggaggtagccaccttgcagggaaattttcccctgtgggtgggaaggccaacttgggcccaatggcctgccatggaaggaacaagggcccactctttgaagggttaattttccttcaaggggaagccattttttgttggacaaaattgtcctctgcccat

SEQ ID NO: 102230 - DNA, 609 bp, Homo Sapiens
ggccggaagtttcctggggcttgttaaggtaaaccccactggcgttttggggaagggaggttccccaagtggagggtattcatgtacccaattccagggcccctgccctttccttgcacaattcccaacatttttaggacttagttaccgacttcaaggcctggaatgaaccctgaagagtaagacatagtaaagagtagattctttctagctccattctctaccacccctaacattatgaagacacaccagaggccaggaacacctgccttcatttccagggcctaggttgcctagacatgcaactttgctttgctttcagcattctgagggctacaatataaaggtaacaaacagactatgtgaccaaaacagatctccaaatgattcgatgtctatactcttataatgtgtaacatccaaagagcccaatccagagaaagaaatgatgtaactatacagacacaaaccacatccaaaacacctgtattcacttggcactacagccaaatattcatgagctaccaatgaccatctaaagaaaaaaacaggcctggcgcagtggctgacaccagtaatccctcctgcaaatgaatgggtgccgagctc

SEQ ID NO: 102231 - DNA, 953 bp, Homo Sapiens
  misc_feature (182)..(182): n is a, c, g, or t
  misc_feature (226)..(226): n is a, c, g, or t
  misc_feature (250)..(250): n is a, c, g, or t
ttttcttgggcaaatgaccagatttggtcaacaatgttcctccatcttctccctgttaggtgttgctccagttttccctttgaatcccaaaattttctcttgggtcttctgatgaatcatgtgagtattttcaccctcattcaaaagaggatgtcaactgctccatagaaacgaatcaaatncactattttcttccagaatctgggtgacttcttctggaaggggncatggctcgaacactgagcgtggncaagtttattgggagttgttatggtgattagcccgtcagagtcaacttggattccttcagggattttgctttgatcttctttcatttggtgtatgactgcaactttttgctgtttgcctatttcttcattgaccatgtcaacttttgggggttttgtgattgtttctctgaatggaataataggttcagatacactgatatgaatctttgcaaacctttcttttaagtcatccaggcatcgctgaaggtggacttctcctgctgtgactaaaacgtgctctcccgtttcctgaattaaaatctggacacagggatcagcctggtttaacagtttcattccttttacgagctgaggcatttcacttggatgttttggttcaacagcaactctcacaataggagtggcttcgaagttgagtggtataaatggtgggcaggatggcaggctacacagtgttgcagatttcagcacaaaatcttgaaggcctcctattcctagcacatttcctggaggtacctcctctagatattccagttcccttcccatcagaagatacaggttttccagagcacagtatgccatgtgggggacttgggggaggccatctggtggagctgagaagcctaatggtacccttcgtaaaaactcaagaggactgtatttgggccccaagacaaaaatttctttcttcttcgagccaca

SEQ ID NO: 102232 - DNA, 1469 bp, Homo Sapiens
  misc_feature (54)..(54): n is a, c, g, or t
  misc_feature (214)..(214): n is a, c, g, or t
  misc_feature (250)..(269): n is a, c, g, or t
  misc_feature (304)..(304): n is a, c, g, or t
  misc_feature (316)..(316): n is a, c, g, or t
  misc_feature (342)..(342): n is a, c, g, or t
  misc_feature (401)..(414): n is a, c, g, or t
  misc_feature (431)..(445): n is a, c, g, or t
  misc_feature (448)..(462): n is a, c, g, or t
  misc_feature (490)..(517): n is a, c, g, or t
  misc_feature (526)..(537): n is a, c, g, or t
  misc_feature (551)..(605): n is a, c, g, or t
  misc_feature (636)..(644): n is a, c, g, or t
ttggtttggtgttcagattgtcgatcttcttatagcatgggtttattgttttcnagtaattacaggcacagcacgttcagccaccacccctgggtcttcgttcgtgtgcgggttagtagtttgtggggagtgttcttctttcccttctcgtatattcaaaggggagaaagatgtgggtgggggcgtggtgtttgatttcttcatctttctctantcccggcgcgaggccgctgcgctggctcttcgattnnnnnnnnnnnnnnnnnnnnaggtcgcggggtccgggcgcccggccggttcgagngaaggagagggntattatatttgtttgttgctcgggancccgtctacatgtgtatatcttttatctatgctgcgcgacaggaaagaaactaatcctnnnnnnnnnnnnnnagatatataaaaggagnnnnnnnnnnnnnnntcnnnnnnnnnnnnnnnttaataaactcaaaccctccctcccccnnnnnnnnnnnnnnnnnnnnnnnnnnnnaccgggggnnnnnnnnnnnnattagaggggtcgnnnnnnnnnnnnnnnnnnnnnnnnnnnnnnnnnnnnnnnnnnnnnnnnnnnnnnnttttttaaaggggggcaaaaaaaggtttagnnnnnnnnntggggcccggggaacttttgtgggaggttcctcttgggcccgctgagggcctgggggtgcaccatgagtccacaaagcatcccaggtagcctggcatgtgacaggaggggatgtcgcagtagcgcccagtagatgccctcctctgtctcagccacgtagcaccacggctgcacgtcaccgtctgggttacggcagaagttgtgcgcgcccagcccccagcggccgtgggggtcgctggcgctgctgtagctgtgttgctgcgtctggtcccagaagaggcacgggcggcccgccccgcgcgggccagtgcggttctggtggccggcggtagtcagccccattcacctggaagcattcggacaggcctggactgtgcaggctcccagccgaggccccacgcggctgcagcagcgggaggaagaggagaaagaggaagccctgcagggcttgtgtccccatcgctctcaaccaaggataggtcaccctcgcccggacacggcccgggctgcccccggggtcgcttcggggtctcccaggagacctagggggcgttgtcctctgacagtctcccctcgtccgactctgagccgcgctttccgtctggggtgggtaaatctctcctgggggtctttgcctcccagggcctctgcccgtagaggcgtctctctgtccctgtccctacccgggtctctccggggggaatctggccgggggcgttctcagtctctgtctcagcgagctctgggcggtgcctcagcctatacgcccgccccctccacaatgagcctagctctcggcatccctgaagtccggaccggtccagcc

SEQ ID NO: 102233 - DNA, 1128 bp, Homo Sapiens
  misc_feature (995)..(995): n is a, c, g, or t
ggtccggaattttccggatcgcagagtgagaaccaccaaccgaggcgccgggcagcgacccctgcagcggagacagagactgagcggcccggcaccgccatgcctgcgctctggctgggctgctgcctctgcttctcgctcctcctgcccgcagcccgggccacctccaggagggaagtctgtgattgcaatgggaagtccaggcagtgtatctttgatcgggaacttcacagacaaactggtaatggattccgctgcctcaactgcaatgacaacactgatggcattcactgcgagaagtgcaagaatggcttttaccggcacagagaaagggaccgctgtttgccctgcaattgtaactccaaaggttctcttagtgctcgatgtgacaactctggacggtgcagctgtaaaccaggtgtgacaggagccagatgcgaccgatgtctgccaggcttccacatgctcacggatgcggggtgcacccaagaccagagactgctagactccaagtgtgactgtgacccagctggcatcgcagggccctgtgacgcgggccgctgtgtctgcaagccagctgttactggagaacgctgtgataggtgtcgatcaggttactataatctggatggggggaaccctgagggctgtacccagtgtttctgctatgggcattcagccagctgccgcagctctgcagaatacagtgtccataagatcacctctacctttcatcaagatgttgatggctggaaggctgtccaacgaaatgggtctcctgcaaagctccaatggtcacagcgcccatcaagatgtgtttagctcagcccaacgactagaccctggctattttgtggctcctgccaaatttctttgggaatcaacagggggagctatgggccaaagccctgtcctttgactaccggtgtgggacagaggaagggcagacaccccatcctgcccccatgatggtgaattctgggaagggtgctggntcctacgggatcacagccttcccttggatgccccacttgggccaagacacctgccctttggtggggcttcaacccaagaacctttacacaatttcaaggtttaaaaatggaagccattcccaaaccaaataaa

SEQ ID NO: 102234 - DNA, 1325 bp, Homo Sapiens
gcgcgctcctctccccgactcggagcccctcggcggcgcccggcccaggacccgcctaggagcgcaggagccccagcgcagagaccccaacgccgagacccccgccccggccccgccgcgcttcctcccgacgcagagcaaaccgcccagagtagaagatggattggggcacgctgcagacgatcctggggggtgtgaacaaacactccaccagcattggaaagatctggctcaccgtcctcttcatttttcgcattatgatcctcgttgtggctgcaaaggaggtgtggggagatgagcaggccgactttgtctgcaacaccctgcagccaggctgcaagaacgtgtgctacgatcactacttccccatctcccacatccggctatgggccctgcagctgatcttcgtgtccacgccagcgctcctagtggccatgcacgtggcctaccggagacatgagaagaagaggaagttcatcaagggggagataaagagtgaatttaaggacatcgaggagatcaaaacccagaaggtccgcatcgaaggctccctgtggtggacctacacaagcagcatcttcttccgggtcatcttcgaagccgccttcatgtacgtcttctatgtcatgtacgacggcttctccatgcagcggctggtgaagtgcaacgcctggccttgtcccaacactgtggactgctttgtgtcccggcccacggagaagactgtcttcacagtgttcatgattgcagtgtctggaatttgcatcctgctgaatgtcactgaaattgtgatatttgctaattagatattgttctgggaagtcaaaaaagccagtttaacgcattgcccagttgttagattaagaaatagacagcatgagagggatgaggcaacccgtgctcagctgtcaaggctcagtcgccagcatttcccaacacaaagattctgaccttaaatgcaaccatttgaaacccctgtaggcctcaggtgaaactccagatgccacaatggagctctgctcccctaaagcctcaaaacaaaggcctaattctatgcctgtcttaattttctttcacttaagttagttccactgagaccccaggctgttaggggttattggtgtaaggtactttcatattttaaacagaggatatcggcatttgtttctttctctgaggacaagagaaaaaagccaggttccacagaggacacagaagaaggtttggggtgtccctcctgggggttcttttttgccaacttttcccccacgttaaaggtgaaacattgggttcttttcattttggctttgggaaagtttttaatc

SEQ ID NO: 102235 - DNA, 964 bp, Homo Sapiens
  misc_feature (897)..(897): n is a, c, g, or t
tggcgcgtgcacactcgcctcgccgttcgggaccagccagatcgcggcggcctcgcgggcggtctggtcggtgaggtcttggccgcgcgcggcaatgctgaggctgctggcgtccgggtgcgcccggggcccggggcccggcgtgggcgcgcgtcctgccgcagggctctttcatccggggcgccgccagagccgccaggcttccgatgcgccccggaaccagccccccagccccgagttcgtggcccggccggtgggcgtctgctccatgatgcgcctgccggtgcagacctcccccgaggggctggacgctgccttcatcggggtgcccctggatactgggacctccaaccggcctggggcgagattcggacctcgccgcatccgggaagaatcagtgatgcttcggacagtcaatcctagcacgggggccctccccttccagtccctcatggttgcagacctaggcgatgtgaatgtcaatctttacaaccttcaggacagctgccggcgaattcaagaggcctatgagaaaattgtaacacctgggctgtattcctcctgaacttgggtggaaattccacccattccatatcccaatattggaagccgatgggcaaaaaagcatgggcccactgggggctggcggcacgtggaatgcttcaacccggaaaaccaacccaacaagggccccaaggaaaacaaaactccttacaacgtgggcgccccctatcctcccgggggtgtggtatcgaaggttttctccgggcgcctggaacacactgcttgccgcgcccatatggcacaccgggggggaccccctccaaacaacccttggggatccccctacaagacatcacacccggggaaccccagaggtctccccccgcaaaaagnctcgagtttggaataaacttttatcggacaaaaactaacccgcggatctccaatagtgacgggtggg

SEQ ID NO: 102236 - DNA, 738 bp, Homo Sapiens
tcaaccccaccccactcacagcaaaaaacgcacgaggccccgggtcccaccgtgcaactgcagcacttgtctgctgagtctctccgcccggatgtgtctgctccggaatctgcactttgggggttcctgcggaggcggctgaaactccttaccaggaagccaggccaggggacaagggcagggcagctttgctcaaatgtgggcctcccccacattccatcagcaccactgcccctgtctcagggaagcggtcttcaccctgcacaactcacaagaccaccctacttctccactcccacccccacaaaacacgaatcctgataatgccaacggttctgtcctcctgttcccgggttgtgtgtcacttaaggtgaacagaggagtgacttggttgctggggtggccgtgtctcagctcttggatcagacaggcaggtggaggctggagaagagacctggccccagttgggaaaaccagggtgacaagacaaactgtataggaaaggcagccgcccaccaaggccccacctgatcaagtgcagcagacgctggctagcgggtgaggtccccgtgctcagtcccacggattcgcgacctttttgaacggcaaaacagtaagccagaccagctgcagtttggagggggcgccctgctgcagctgaatcccactcctggcctcactccccagcccgtttctctcccatgcccagctctgcacgtgcgtgactccggctgcttt

SEQ ID NO: 102237 - DNA, 865 bp, Homo Sapiens
  misc_feature (107)..(107): n is a, c, g, or t
  misc_feature (110)..(110): n is a, c, g, or t
tcaaaaccctggcaagctggggaaaacctgggatccctttttaaaacccagccgccccaccaccagcttcggctccacccaccaggcgccgttccgtgaaggctctnttntggccctcacggtcagccagggctgccggtcacaccgaaggggtctttggcgggtgaacctgctgcatgagctgcggggcgcttcacccttgggcttcctccgctttcggcctgctcttggccttgttgatttgtaccacaaagaaggccaggaccacccatggctcccaggaaggcaaagacaggaatggtctggcccacctcctggttgtagcggccaggcatgatccctccaggaatgtcccaggcgccgctctctccaggggacaagggcctcacttgagggcgattcgatcgaaagttgggtaacaccaccttgtccaggtcaatggagagtagcttctgatgtttccaaaggttactgggcgccgtctcgtttaaaggctgtggcttggcccaagacaagcgtggacaggctggtagaggccgaggttttgggtctcccaaatgggcctccagaaccttggagtaccgatgaagatggtttccttccatcctctctggagtgactgagcctgctccactgggagggcgctggcggttcccagagtgactgaggctaggcggtgtcaccccatacgatgtgtactggaggagggcatccagaagccaaaagcagtccttctgtcggtgactgtcatccaagcaattggagtccccatacagtacaatccggcctccaccctcagctggaatctgataaagtcccaaaatggggacgttttcaacaactgctgtttcctgctttaaaacct

SEQ ID NO: 102238 - DNA, 879 bp, Homo Sapiens
  misc_feature (719)..(719): n is a, c, g, or t
  misc_feature (814)..(814): n is a, c, g, or t
ggagtccttcacacaggggctgccactgtccaatttcgtgccacccccaccctcgcccgccccatctgactcgccagcgtccccggatgaggacctgcaggcctggaacgtctccctgccgcccaccgctgggccaggtaaaatgtggacgtcggcaccctccctgccgcgcctggtacgggagcccgtacgctgcacctgctctgcgcagggcaccggcttctcctgccccagaagtgtgggcagggcacccgccccagatgcggatggtcacaggcgacatactgaccgacatcaccggccacaatgtctctgagtacctgctcttcacctccgaccgcttccgactgcaccggtatggggccatcacctttggaaacgtcctgaagtccatcccagcctcatttggcaccagggccccacccatggtgcggaagatcgcggtgcgcagggctgcccaggttttctacaacaacaagggctatcacagcatgcccacctacctcaacagcctcaacaacgccatcctgcgtgccaacctgcccaagagcaagggcaacccggcggcttacggcatcaccgtcaccaaccaccccatgaataagaccagcgccagcctctccctggattacctgctgcagggcacggatgtcgtcatcgccatcttcatcatcgtggccatgtccttcgtgccggcccagcttcgttgtcttcctcgntggccgagaagtccaccaagggccaagcatctgcagtttgtcagcggctgcaaccccatcatctactggctgggcgaactacgtgtgggaacatngctcaactacctgggtcccccgctaacctgctgtgtccatcaatccctgttttggtgtttccgac

SEQ ID NO: 102239 - DNA, 1712 bp, Homo Sapiens
  misc_feature (858)..(866): n is a, c, g, or t
  misc_feature (988)..(1000): n is a, c, g, or t
  misc_feature (1391)..(1391): n is a, c, g, or t
  misc_feature (1397)..(1397): n is a, c, g, or t
  misc_feature (1440)..(1440): n is a, c, g, or t
  misc_feature (1458)..(1458): n is a, c, g, or t
  misc_feature (1614)..(1614): n is a, c, g, or t
  misc_feature (1616)..(1616): n is a, c, g, or t
  misc_feature (1695)..(1695): n is a, c, g, or t
aagaagtgaaacgactatattcaccagaagaagatacatttagagaactgaggattttcttaagaaatgttacacataggcttgctattgacaagcgattccgagtgtttactaagcctgttgaccctgatgaggttcctgattatgtcactgtaataaagcaaccaatggacctttcatctgtaatcagtaaaattgatctacacaagtatctgactgtgaaagactatttgagagatattgatctaatctgtagtaatgccttagaatacaatccagatagagatcctggagatcgtcttattacgcatagagcctgtgctttaagagatactgcctatgccataattaaagaagaacttgatgaagactttgagcagctctgtgaagaaattcaggaatctataaagaaaagaggttgtagctcctccaaatatgccccgtcttactaccatgtgatgccaaagcaaaattccactcttgttggtgataaaagatcagacccagagcagaatgaaaagctaaagacaccgagtactcctgtggcttgcagcactcctgctcagttgaagaggaaaattcgcaaaaaagtcaaactgggtactttaggcaccataaaaaaaagcgaagggaaaaatttccccaggcaaagggaatggataagccaaaatgccatagattcccccaaattgtgggaagggttccgaagggaactttcccgacccaaggggggcgaatccctaaaggcgacccgggaaacaccccgggaaaaccttttcggggggggaacaaaaaattgaaaaaccacccccaaaagggcctctcccaaagagcaaaacttgggggaaatttggcacnnnnnnnnncccccaaacacccccctggcgcaacacaccgaacacaaaaaggggcgactttgggggaacacccccctgtgggggagagaaactaccccgccgttgcggcgcattcaaagaaatttcgaagnnnnnnnnnnnnncaacctcgtgtctccttataaaacgacggacgcaagacaggccttttcccccacgtcgcctcccccccggcaataaataacccacatatactccttttccttgtcgggcgagagacaaaaaagaggcggcggggaacaaggaacagaaaacgccggtgtgccgtttggccctccgtccgcccagaccgattgactctaccccttggctgttatccccaacatgacgcccccgccctaacggtgcggcgtaccgaaaaacacacacccgcgcccgggagtgctctgaccgcccatccccccgctctccgttgctcggacaaagaccacgagcagcgcgttctgtttgttccggcccaccccgctatagtgtccttcatctgtcccttagagnagcgangctcacgcatcacgctgtctgcgcgtccgacagcgtctctttntgctagtttatgtacgcngcgcgcgcctgcggcttgcgcctacatgcgctctcgatggcctgaggccaccacagaacaatgcacggcgacatcgcccgcccactctgtgctagtgaggggtcgcactccgcgctggggagctcgctggcgcggtcgcgttatacactatgcaangncgacggggtacgcaaccgcctccgggttgtgccccctgcatcatccgcccgctctgttacgaccccctgtggtcacacnacacatgtgcgcccggg

SEQ ID NO: 102240 - DNA, 1397 bp, Homo Sapiens
  misc_feature (135)..(135): n is a, c, g, or t
  misc_feature (191)..(211): n is a, c, g, or t
  misc_feature (239)..(302): n is a, c, g, or t
  misc_feature (379)..(414): n is a, c, g, or t
  misc_feature (1356)..(1356): n is a, c, g, or t
cggcgttcaggatctatagggcggcgtcggggggtggtcttcggtgcgcgcgcttaagcgccgggcgctacgatgagctggcggtggtcgggttgggcgagtggcggcaggcggggatacgcagatccgacttgnacaaggggtaggggcagcactgagcgggaggtaacggcggggacggagttgccaannnnnnnnnnnnnnnnnnnnntgcggttactaggggatgggcggagaannnnnnnnnnnnnnnnnnnnnnnnnnnnnnnnnnnnnnnnnnnnnnnnnnnnnnnnnnnnnnnntgaggattagaaaaaacagcgcggcgggaggggagcgggtgttgagtttgtagggggggatagggtaggattagaannnnnnnnnnnnnnnnnnnnnnnnnnnnnnnnnnnnggacggtcgggtctggggtgagaggggaacgggcggttgaaggcgctagggggggtggccaggggagtcgggagggagacagtgggtacggagcgggcaggcgggggggccggggcaggcctgcgtggagcgtctgggcccgccccggggcccggtgcggccgcagccccgccttcccggggggcctcctgctcttcttggaccccgactgtgccgctttgaggccagggaggaaggcccctggaggacagagcagaggccccaggccgtggggaccgggggggctgcggggcccactgggttgatccagcaagcgcacgatgtcctggtgcagtctctcctgggctacgtcccgcggcagcctgtccaggtggtcggtgatctcacggttggcaaagtggtccaacagcagcttggcagcctcatagctgccctcgcgggcggccaggaataggggggtctcctccttgctatcctgcatgtccttattggctccatttttgagcagggccaaagtggcttccacgttgttcacagccgcagcccagtgtaaggctgatttcccaagctcatccacagcattgacatcagcatggctggcgatgagctcttccaccatgccctctactgccaggcgggccgccaggatcagtgccgttgagccatctgccatgcgggcatccaagtctgtagagcggtttcggatgagaatctgggccacgcacattgacatccatgccatcagcatctgcgtcgccctgtggtggtgtcagtgccatggctgggtgccacgcggatgtcagcagcaaccagatggtgttgagtccactgacggcaatccacagcctcctcagcccccatgcctggctcctctacctttagccgcttggcctctgggcactctgtgtccatccagtctgtggccactcccccatcaggccncacccttggcatgtcttcatgccaccgcatcaggggatctc

SEQ ID NO: 102241 - DNA, 880 bp, Homo Sapiens
  misc_feature (756)..(815): n is a, c, g, or t
ccggacctgcatacctgggcgtatgcctcacagcgtctcctccgtatgcctcacagtttgctccgtacacccgcgtttcctccgtatgccccagtttcctccatatgcctcaatttcctccgtacgccccacagtttcctccgtatgccccagtttcctccatacgccccggtttcctccatacaccccacagtttcctccatacgccccacagtttcctccatatgcccagtttcctccatacaccccacagtttcctccatatgcctcaatttcctccatacgccccccagtttcctccatacgccccacagtttcctccatacgccccacagtttcctccatacgccccacagtttcttccatacgccccacagtttcctccatatgcccagtttcctccatacaccccacagtttcctccatatgcctcaatttcctccatacgccccccagtttcttccatacaccccacagtttcctccatacgcctcaattttctctgtacgccccacagtttcctccatatgcctcagtttcctccatacgccccagtttcctccatacgcctcaatttccttttgtacgccccaagtttcctccatacgccccaagtttcctccataccgccccagttttcctccataccgcctcaatttcctcctggatgctttcaagtttccctccataacaccctcaagttttccttccgttcttggccttcacaagtgtttccctcttaataaagccctccannnnnnnnnnnnnnnnnnnnnnnnnnnnnnnnnnnnnnnnnnnnnnnnnnnnnnnnnnnngatttgggcttggggtttttggccccccaaagggggcacgggacacaaaacggaaaacccctttt

SEQ ID NO: 102242 - DNA, 884 bp, Homo Sapiens
  misc_feature (579)..(799): n is a, c, g, or t
  misc_feature (808)..(840): n is a, c, g, or t
tgtgcgcttaccaatgcagaagctgcccacccgaccaacttaccctggagtgctgcccacaaccatgactggcgtcatgggtttagaaccctcctcttataagacctctgtgtaccggcagcagcaacctgcggtgccccaaggacagcgccttcgccaacagctccaggcaaagatacagagtcagggcatgttgggacagtcatctgtccatcagatgactcccagctcttcctacggtttgcagacttcccagggctatactcctcatgtgtctcatgtgggatagcagcaacacacaggccctgcaggtaccatggtgccccccagctactccagccagccttaccagagcacccacccttctaccaatcctactcttgtagatcctacccgccacctgcaacagcggcccagtggctatgtgcaccagcaggcccccacctatggacatggactgacctccactcaaaggttttcacaccagacactgcagcagacacccatgataagtaccatgactccaatgagtgcccagggcgtccaggcaggcgtccgttcaacagccatcctacctgnnnnnnnnnnnnnnnnnnnnnnnnnnnnnnnnnnnnnnnnnnnnnnnnnnnnnnnnnnnnnnnnnnnnnnnnnnnnnnnnnnnnnnnnnnnnnnnnnnnnnnnnnnnnnnnnnnnnnnnnnnnnnnnnnnnnnnnnnnnnnnnnnnnnnnnnnnnnnnnnnnnnnnnnnnnnnnnnnnnnnnnnnnnnnnnnnnnnnnnnnnnnnnnnnnnnnnnnnnnnngcgggctcnnnnnnnnnnnnnnnnnnnnnnnnnnnnnnnnntttccagcgccaaggggctttcagcagaacccagccagcagcaa

SEQ ID NO: 102243 - DNA, 1038 bp, Homo Sapiens
  misc_feature (873)..(873): n is a, c, g, or t
gctcccctgtgtgagggcaccatgcccacctgcagctttcctgagtacttcatcgggaacatgctgctgagtctcttggccagctctgtcttcctgcacatcagcagcatcgggaagttggccatgatctttgtcttggggctcatctatttggtgctgcttctgctgggtcccccagccaccatctttgacaactatgacctactgcttggcgtccatggcttggcttcttccaatgagacctttgatgggctggactgtccagctgcagggagggtggccctcaaatatatgacccctgtgattctgctggtgtttgcgctggccctgtacctgcacgcccagcaggtggagtccactgcccgcctagacttcctctggaaactacaggcaacagaggagaaagaggagatggaggagctacaggcatacaaccggaggctgctgcacaacatcctgcccaaggacgtggccgcccacttcctggcccgcgagcgccgcaatgatgaactctactatcagtcctgtgagtgtgtggcggtcatgttcgcctccatcgccaacttctccgagttctacgtggagctggaggcaaacaacgagggtgtcgagtgcctgcggctactcaacgagatcatcgctgactttgatgagatcatcagcgaggagcggttccggcagctggaaaagatcaagaccatcggcagcacctacatggctgcctccggcctcaacgactctacctacgacaaggtgggcaagacccacatcaaggcactggccgactttgccatgaagctgatggaccagatgaagtacatcaatgagcactccttcaacaacttccagatgaagatcgggctcaacatcggnccccgtggtgggccggggtgataggggcacgaaagcctcagtacgacatctggggcaataccgtgaacgtggccagccgcatgaacagcacccggtgtacccgaccgcattcaggtcaccacagacatgtaaccaagttgttgggctgccaacacgttaccagct

SEQ ID NO: 102244 - DNA, 950 bp, Homo Sapiens
  misc_feature (746)..(746): n is a, c, g, or t
  misc_feature (915)..(917): n is a, c, g, or t
ggacatttgcactgatgccatgcgtgagaactggatcagcctcagatatgcaagtggcataaatgtcaacctgcagaagaatttaacccttcccaaaaacttactgaataaagaagaaaacacactgaaaaacacaattgttttcagtaatccttcttcagaatgtagtatgaaggagggaatacagacatgtatgtttcctaaggaaactgacattaaaacttcagagaacacagccgagttcaaggaacgggagctctgtccactgaagacctccaagaaactacctgaaaaccatttaccaagaaactcacctcagtaccaccagccagacttgccagaaatttccaggaaaaataatgggaataaccagcaagtacctgtcaagaatgaagtagatcattgtgaaaatttgaagaaggtggacacaaagccttcttcagaaaagaagattcacaaaacatctagagaagacatgttttctgagaaacaggacatacctttcgtagagcaagaagatccttataggaagaaaaagcttcaggagaaaagagaaggaaatttacaaaatttaaattggagtaaaagtcgaacatgtagaaagaacaagaaaaggggtgtttgctccaagtctcaaagcctccctgaacagaagtgatctaaaagcttgtgtgcagtgactttgagaggtctgagctgagcagtgacatcaatgtaagaagctggtgtatacaggaaagcactanggaggtttgtaaagcagatgccgaaattgcaagcagtttacctgctgcccagagagaagcagaaggttactaccagaagcctgaggaagaaatgtgtgggacagttctgctcccgattcagctctgactgtgggagctcctctggcagcgtgcgtgccagccggggcannnttggggggaactggagcagcaccagcagttccg

SEQ ID NO: 102245 - DNA, 986 bp, Homo Sapiens
  misc_feature (16)..(16): n is a, c, g, or t
  misc_feature (967)..(967): n is a, c, g, or t
ctggaccggtccgganattcagggatgcggcagccagtgtcattgacaccgccagcaagtacaagatgctgtggaagctgccgctggaagacgcagacatcatcaaaggggcatcccaagccaccaatcgggagaacatccagaaggccatcagccgccttgatgaggacctcaccaccctgggccaaatgagcaagctctctgagagccttggtttcccccaccagagcctggacgatgcactgcgggacctctcacctgccatgcaccgggacctgtcggagaagcaggcgctgtgctacgcgctttccttcccgccaaccaagctggagctgtgcgccactcggcccgagggcaccgactcctacatttttgagttccctcaccctgacgcccgccttggttttgaacaggccttcgatgaggccaagaggaagctggcatccagcaaaagctgtctagaccctgagttcctgaaggccatccccatcatgaaaacccgcagtggcatgcagttctcctgtgcggctcccaccctgaacagctgcccggagccctcccctgaagtatgggtctgcaacagcgacggctacacgggccaggtgatgcctgctgaccctgcgccccgaagcccgaacgtggaaggcctggcatcgccgggttgtttccgccacgggttcctctgacattccgggctggggccccgggccttcaagtcctacactgacacaccggggaacccctcctcccatccccttgaaggaatttcctccctcaacacacggcaccggaaacaccagcccggggcccgggagtcggggacgctctaaagggccgccttcgggacaatgagggcgaggcctccctacccctctttactgaaatcccccgcggtccactacagactcctggccctctctcgcccctcttcgcctttgtaacacacctcttcccgcgcgatcgctanatacgtccactccccagcg

SEQ ID NO: 102246 - DNA, 712 bp, Homo Sapiens
  misc_feature (372)..(385): n is a, c, g, or t
cccgaaccttgtctcctgggcaggctttgtacaacatcatcagcacctggcctcatttcaaacactgagagaagccccaggtccttctgagactgctttccctcccctgtcaggtctctcctgtcctaaccatccagcttggctcaacaccttttgccctcctcccctgccacacagtcctgtgcctcctttttcaggttgggatgatcatgccctctcctgccaacatcctccaagggcctccaaacctcatagctggacattcacagccctctgagtctgagtccagatttcttctctccttaccttcctctcccttggaaacccaactcctcagccaggtgagacaatgggctggttcttgtttcattnnnnnnnnnnnnnncattcccctctgcctggtgagccttcccctggtgtctgtctggcagcccccacctcccacctatcacccctcacccataactcaggtcaacgtgaccacccttccttgcttacacataaacttgtatatatttggatgtagcccttatttaatggctgtcattatttatagatatgtctatccttgctacttggttgtgagtttctccaggggaggaactgtgttttattcatctctatgtcctctgtttctcagcagtgtctgaaatttaatgggttctactgatgtttattagagaaatggatgaataaatgaatgaagagatcc

SEQ ID NO: 102247 - DNA, 1035 bp, Homo Sapiens
  misc_feature (793)..(808): n is a, c, g, or t
  misc_feature (945)..(945): n is a, c, g, or t
  misc_feature (957)..(957): n is a, c, g, or t
  misc_feature (961)..(961): n is a, c, g, or t
  misc_feature (965)..(965): n is a, c, g, or t
  misc_feature (978)..(978): n is a, c, g, or t
caagcgccaggccactgcccactgccccaacagctatgttaataacaatgacatctaccaggtcactcctgtctaccgcctcggctccaacgacaaggagatcatgaaggagctgatggagaatggccctgtccaagccctcatggaggtgcatgaggacttcttcctatacaagggaggcatctacagccacacgccagtgagccttgggaggccagagagataccgccggcatgggacccactcagtcaagatcacaggatggggagaggagacgctgccagatggaaggacgctcaaatactggactgcggccaactcctggggcccagcctggggcgagaggggccacttccgcatcgtgcgcggcgtcaatgagtgcgacatcgagagcttcgtgctgggcgtctggggccgcgtgggcatggaggacatgggtcatcactgaggctgcgggcaccacgcggggtccggcctgggatccaggctaagggccggcggaagaggccccaatggggcggtgaccccagcctcgcccgacagagcccggggcgcaggcgggcgccagggcgctaatcccggcgcgggttccgctgacgcagcgccccgcctgggagccgcgggcaggcgagactggcggagcccccagacctcccagtggggacggggcagggcctggcctgggaagacacagctgcagatcccaggcctctggcgccccccctcaagattaccaagccaggacacctcaaggtctccagccccactaccccaccccaatccctggaattcnnnnnnnnnnnnnnnnaagacaggggtctcggtcccgttggccaatgtttgaaaagcctgtggccccctcaagggttcccctgtacacaccccgagatccgggggttcaaggggacccgtccccccctctatccctcttgaaaggcctcctgnctaatgggggcncaanctcnacccgggatcatngtcttggggtgtttgtgcccaacaaggagcgtgaccctctcgaggcctgccaaggcg

SEQ ID NO: 102248 - DNA, 1009 bp, Homo Sapiens
  misc_feature (960)..(960): n is a, c, g, or t
ggtcactgtgctgaacgagtacgagcgggccctggacgtggcggcagagcccaagcacgagcggcagcgccgagcccagatacgcaagaacatcacggagactctggtgtccctgagggtccacactgtggatgacatccagcagatcgctgctgcgctggcccagtgcatggggcccagcagggagctcgtatgccgctcgtgcctgaagcagacgctgcacaagctggaggccatgatgcgcatcctgcaggcagagaccaccgcgggcaccgtgacgcccaccgccatcggagacagcatcctcaacatcacaggagacctcatccacctggccagctcagacgtgcgggcaccacagcgctcagagctgggagccgagtcaccatcgcggatggtggcgtcccaggcctacaacctgacctctgccctcacgcccatcgtcacgcgctcccgcgtgctcaacgaggagcccctgacgctggcgggctttcagcagggccccggccaacctcagtgacgtggtgcagctcatctttctggtggactccaatccctttccctttggctatatcagcaactacaccgtctccaccaaggtggcctcgatggcgttccagacacaggccggcgcccagatccccatcgagcggctggcctcagagcgcgcctcaccgtgaaggtgcccaacaactcggactgggctgcccggggccaccgcagctccgccaactccgttgtggtccagccccaggcctccgtcggtgctgtggtcaccctggacagcagcaaccctgcggccgtgctgcatctgcagctcaactatacgctgctggacggtgcatgcagcggttggggcacacgcggccccctggccttgttcttggggggaaggcgtttctcgtagggcttccatgggtgtctctggtgaaatttgctttctggttcatgggctgctgngggcctggccggagaggagctgttggccacggagaagcaggtgccagct

SEQ ID NO: 102249 - DNA, 1061 bp, Homo Sapiens
  misc_feature (849)..(849): n is a, c, g, or t
cctcatttacacgtggctgagaaggagacactactggcctgggtgacctccaaattcgagctctatacctgcctcagccctctggtgaccaaggcaggtgcaatcttggtagtgaccaaactcctgcgctgggtgaagaaagaggaggaccggctcttcattcgttacccacccaagtactccacaccaccagccacctctacggaccaagctgcccataatggcttgttcactggactctgatagttggagctcccagaccaggcagtgctgggagcaaccacctttgttttttaccttctgtctaccctggaaatgtgtgtgggggtgtgtctgtggccagtcattgtctccctaagcaatggggcaaggtctgagggcccaccgatgagagagatggtggcacccgccaggcgagcaggctgctttccctgcccagtcatgcacctccccctctggggaaatccttaggcctccctctcccttccctctgtctcatctcctccacttggatgatgctctagcctctgtcagggactgtcccctccaaacttgcttccgtggtctgcctcctagttgaatctcagccctgagtgtccagatctggccaaggtgtctagggtggcccacgggggtgctggaattggcacttcagggacaggctatgcttgggactggcctgagggtatttttaagaaaaaaactacataaaaggcctaaaagtaagacccacaagggatatttccttttgcccttccttgaactttttttcatctttacccctgccaggaaatgacccggccctccaatggctggctggctgctaacaattaaatgagaaaggtgggnctttcaattgttccaccctggtggaaacccagggaacacagcaccctgtactgcaaccacggtggggcttgaaatcccagcatttttttataactaggggagaatggcacttttagcccttcttaaagccttccggtttttacatccattctggggggaaacaccggaggaattaaggtataaccccctctctctccaattgggaaaatccc

SEQ ID NO: 102250 - DNA, 1032 bp, Homo Sapiens
gagctgaacgagactcttgcactgggttttgcttgctctaagggacaaagtaagctgatgctcatagcacattggactacagcaagagaaagggggagaagcagatggagcatctccttcactgtccatgagcccagtgagtaaaaggagtgaggaaaacctcttttgttccacagatttacaaatacaaaaaaaataaataatatttctaagacagtacaaatgcaaatactgtttcccttgtgtcaattacatacagcatgcctacaaagagagaatggtaattcttcttcattcacagacaggacacatggcagtgcactattcaaaatgctttgataatcttaatttttgtttctggtgctgagatattatgaaaggaactgcatttgcaacttattaaatacttccaggaacaaatagttcactttgcttgggacttgtagttttgagtaattaatcatccatggagcaggagccagtcaggagatacccgttggtaccactggtcccattggtggttgtcgcagtgtggggattctttcccggaggttctgagtcctcctcatctgagctagactcaatatcacttcgatcatccttggacaccttgcctcttgaaacagctttgcaagctattttcacaatcaagtaagaccagaagcagttcaacccttgtactagcaatagcagtaggttaaaaacccaccaggaagggtaaggtccaacgatctcccagctttcaaataatgtggtatttaacacccagagaggaaatatacccagtcgtgtggtgataaaaaccacggcaaacataacaaacaggagatcacacattttctgaaacttggcataatttgccattttggcagcctccagaagagcatcagctgaatcatgaagacaaaggaccagcgttcctactcgggccatattgttgacatatgaaaaggtaatcaagaaaatagatacaaggtggtgcaggaacataatgccaaagtcctttcttttgatatcagtgaactgagaaaa

SEQ ID NO: 102251 - DNA, 1003 bp, Homo Sapiens
  misc_feature (780)..(780): n is a, c, g, or t
  misc_feature (964)..(965): n is a, c, g, or t
  misc_feature (976)..(976): n is a, c, g, or t
cccccccaatcttggcgtacatcttccctagttaaaggctagaaagggggaattggagagaagatcccaaccccagctggggcagagtggctgagcacgagacacccacaaaccccaacgcggttctaggggttggatcagaagagtctctgtgtcgtcggtcgggcacaggcttgcctcctcgattctagatgtgccctcggccacagtgtctaatcttcctgtttcctggcattcaggtgttttacctctctgcccggattttgtacctgaggacaaaataggcaatgaggcggagggagatgaagaaaatcccgagtacgatgaagtccaggtacagcttggcattttccacgtccagctcccgcaggatggcctccgacttctggaagtggcacgtctcgtcgatgtcacagtgcagatcttcccggtctaagccatagatggagaggatgaccccttcgaacccatacctgacataggagatgtaggacatccactgtaggtacgtggggatggtgtcgaagctgacgaagaaccccgagaacaggagcaccgggatggctgtcactgggcccacgaaagtggccacctgcagggacgtggaggcggctccgatcagcaggcccagggactgtgccaccagggaggtcatggtgcccagcgcggcaaacagcacaaagcgcacggcgtcggacggctgcgacgtcatccagtacacgatgctgcagtaggccactgggaacatgatctgaaagggcacgtctgccatggtcttgnccaggtagtaggccttcaggctgtaccagtagttcaggtgttcccgaagaaagactcccatctccaggggaaatgtcagaacagtaggcatgagggccgcgaacatgaggaacagcatggagaagaagaggaagccggagttgctcaagaccttcttggcttcgttcccgatccccaagtacannaggccaatgangaggccgatcccaatgtgcgaggtgat

SEQ ID NO: 102252 - DNA, 1337 bp, Homo Sapiens
aacaattgcgcttggtccctcttctgtggaacttccacaatgcggccccttcgctggtaaagtggaaaattctctcggccctcttctgggattgagaaattatttgcgcttgttccccactggaaggatttgttcaaaccttgcgggttgaatattcttggaagaggttgcggagggaaatttgggagtattcagttcattgatggggggtttgggtttctggaagactttattcaatgggttttcaggtcccagtctctccatgaatggaatccagagatcttggagggtttcacatctttgggaattcccctttgtacttatgagagccattcactgattggcaggcaggctcgttttctttttctggtgagaggtggtacgacggggtacaaaagacagcgataatcacaaccaccacgatggtgatgacgccaacagaaacaattatgaccagcagcatattactgtccagaggagaggtggggctcccatgagggctgttactgccgctcattggaggtttgtagtcggatcctaggtctggcagccggcttcctttccctccagaccctgaggctttaggtgttctgaattggacagcttcagacatgggtcccatgccctttgagttccgtgcctggattttgaagtagtatggtgtgtcaagagttaactcttgtatctggtgagtcagtctgtttcccacaacaggctcaataacccagtcatgtatctctgcattcacatctgtactgtaatatatgatgtaacctgtaattttgccattggcttcggagggaggctgccaattcacaattatggtcttaggtttcccctctttactcacaacagtcacatccttgggtggagaagtcggaactaattcaaaggtggtcccatgggctgtcatactccatgtacttgatcttcgacctttggtcaccatcacagagaattcatagagtgtattcggctttaaaccagtcaccaaataactcaaagtggttgcatttgcattcttgtacttggtgtttgctgggatgttggttttccatcggacggtgtagtatcgggagtctgtaatcttctggtgcttgggcagcgagttgtctgcccacgtaatcctgatggtgtcatgactcagaatggaagcctgaactcccactggtggcatcatgggagtgggatctggccctgtgtgaggcctggtcacagcactctcatacagggggatgccttcacccacgcttattaaatgctttcagggtaatcacatagtgagagctgggatccagattttcaatggtgtaatagcgctgtttatagtccactct

SEQ ID NO: 102253 - DNA, 1221 bp, Homo Sapiens
ctgcaagccacagtggctgccctgtgcgtgctgcgaggtgggggaccctgggcaggaagctggctgagccccaagaccccgggggccatgggcggggatctggtgcttggcctgggggccttgagacgccgaaagcgcttgctggagcaggagaagtctctggccggctgggcactggtgctggcaggaactggcattggactcatggtgctgcatgcagagatgctgtggttcggggggtgctcgtgggcgctctacctgttcctggttaaatgcacgatcagcatttccaccttcttactcctctgcctcatcgtggcctttcatgccaaagaggtccagctgttcatgaccgacaacgggctgcgggactggcgcgtggcgctgaccgggcggcaggcggcgcagatcgtgctggagctggtggtgtgtgggctgcacccggcgcccgtgcggggcccgccgtgcgtgcaggatttaggggcgccgctgacctccccgcagccctggccgggattcctgggccaaggggaagcgctgctgtccctggccatgctgctgcgtctctacctggtgccccgcgccgtgctcctgcgcagcggcgtcctgctcaacgcttcctaccgcagcatcggcgctctcaatcaagtccgcttccgccactggttcgtggccaagcttgacatgaacacgcaccctggccgcctgctgctcggcctcacgcttgacctctggctgaccaccgcctgggtgctgtccgtggcccgagaggcaggctgttaatgcccactgggcacctttcagacacaatttgggctgatccccatcacatttcctgaccatcggctatggtgacgtggtgccgggcaccatgtggggcaagatcgtctgcctgtgcactggagtcatgggtgtctgctgcacagccctgctggtggccgtggtggcccggaagctggagtttaacaaggcagagaagcacgtgcacaacttcatgatggatatccagtatacccaagagatgaaggaatccgctgcccgagtgctacaagaaacccgggatgttctacaaacatactccccaggaaggagtctcctggctgcccccaaggcatcaacggcaagcctgctgggcccgccattaaaagcgtttccccccaaatgccgggttgaaacccccggcaaagtttccggggaaacaaatggaaacttccatggggg

SEQ ID NO: 102254 - DNA, 1198 bp, Homo Sapiens
  misc_feature (951)..(951): n is a, c, g, or t
  misc_feature (968)..(968): n is a, c, g, or t
  misc_feature (983)..(983): n is a, c, g, or t
  misc_feature (1010)..(1010): n is a, c, g, or t
  misc_feature (1038)..(1039): n is a, c, g, or t
  misc_feature (1045)..(1047): n is a, c, g, or t
  misc_feature (1055)..(1055): n is a, c, g, or t
  misc_feature (1112)..(1112): n is a, c, g, or t
  misc_feature (1118)..(1118): n is a, c, g, or t
  misc_feature (1130)..(1130): n is a, c, g, or t
  misc_feature (1147)..(1151): n is a, c, g, or t
  misc_feature (1156)..(1156): n is a, c, g, or t
ggcctgctgctggagaccaggacgcgctgtacgtggcgctggagctggtcatcgccgcgctttcggtggcgggcaacgtgctggtgtgcgccgcggtgggcacggcgaacactctgcagacgcccaccaactacttcctggtgtccctggctgcggccgacgtggccgtggggctcttcgccatcccctttgccatcaccatcagcctgggcttctgcactgacttctacggctgcctcttcctcgcctgcttcgtgctggtgctcacgcagagctccatcttcagccttctggccgtggcagtcgacagatacctggccatctgtgtcccgctcaggtataaaagtttggtcacggggacccgagcaagaggggtcattgctgtcctctgggtccttgcctttggcatcggattgactccattcctggggtggaacagtaaagacagtgccaccaacaactgcacagaaccctgggatgcaaccacgaatgaaagctgctgccttgtgaagtgtctctttgagaatgtggtccccatgagctacatggtatatttcaatttctttgggtgtgttctgcccccactgcttataatgctggtgatctacattaagatcttcctggtggcctgcaggcagcttcagcgcactgagctgatggaccactcgaggaccaccctccagcgggagatccatgcagccaagtcactggccatgattgtggggatttttgccctgtgctggttacctgtgcatgctgttaactgtgtcactcttttccagccagctcagggtaaaaataagcccaagtgggcaatgaatatggccattctttctgtcacatgccaattcagttgtcaatcccattgtctatgcttaccggaaccgagacttccgctacacttttcacaaaattatctccaggtatcttctctgccaagcagatgtcaangagtgggaaatggtcangctggggtacagccntgctctcggtgtgggcctatgatctangctctcgcctcttcccaggagagatacnnatcccnnnagaacagnagaacacggctggttttcattgtgaagatagctacacctcaccaggaaatggactgnctctcntgagcacttccntggagctacacgtatcnnnnnctaantaatgtatggtgtcagtaagtaagctcccaggattgaaccaa

SEQ ID NO: 102255 - DNA, 1106 bp, Homo Sapiens
  misc_feature (915)..(923): n is a, c, g, or t
  misc_feature (955)..(963): n is a, c, g, or t
  misc_feature (972)..(1062): n is a, c, g, or t
tgaaccctgcccagcgctacagccccagcaacgggccaccgcagcccacaccgccgccgcactaccgcctggaggacatagccatggcccaccacttccgagatgcctaccgccacccagacccccgggagctacgagagcgccatcggccgcttgtggtgcctgggtcccggcaggaagaagtgatcgaccacaagctcacagagcgtgagtgggcagaagagtggaagcacctcaacaacctcctgaactgcatcatggacatggtggagaagacgcggcgctcgctcacggtgctgcgcaggtgccaggaggccgaccgcgaggagctcaaccactgggcgcggcgctacagcgacgccgaggacacaaagaagggccccgctcccgccgcggcccggccccgcagcagctccgccggtcccgaagggcctcagctagacgtgcctcgcgagttcctgccgaggaccctcaccggctacgtgcctgaggacatctggaggaaggctgaagaggccgtgaatgaggtgaagcggcaggccatgtcggagctgcagaaagccgtgtcggacgcggagcgcaaagcgcacgagctcatcaccacggagcgtgccaagatggagcgggccctggccgaggcgaagcggcaggcctccgaggacgccctgacggtcatcaaccagcaggaggactccagcgagagctgctggaactgcgggcggaaagccagtgagacgtgcagcggctgcaacgcggcacgctactgcgggtccttctgccagcatcggggactgggagaagcatcaccacgtgtgtggccagagcctgcagggcccacagcccgtgggggcccgacccggtgcctggacccccccgaaaccgccccacaggcctggggccccctcccttgccctnnnnnnnnnttgcccagcccccaacgaaaaccgggctcttnnnnnnnnnccttttttnnnnnnnnnnnnnnnnnnnnnnnnnnnnnnnnnnnnnnnnnnnnnnnnnnnnnnnnnnnnnnnnnnnnnnnnnnnnnnnnnnnnnnnnnnntgggcccttggccggggaaaacaaagacacccggggggcccaaa

SEQ ID NO: 102256 - DNA, 440 bp, Homo Sapiens
  misc_feature (308)..(308): n is a, c, g, or t
  misc_feature (320)..(320): n is a, c, g, or t
  misc_feature (330)..(330): n is a, c, g, or t
  misc_feature (334)..(334): n is a, c, g, or t
ccgccgggattcctaaggatgacgtcggcaagagcgtgcatgagctggaacgagcctgccgggtagcagaacaggcagccaatgatctgcgagcacaggtgacagaactggaggatgagctgacagcggccgaggatgccaagctgcgtctggaggtgactgtgcaggctctcaagactcagcatgagcgtgacctgcagggccgtgatgaggctggtgaagagaggcggaggcagctgcccaagcagctgagagatgcagaggtggagcgggatgaggagcggaagcagcgcactctggcccgtggnccttgcccgcanaaacctggangganaactgggagagctgaaggcctcaaatgccctcttgcgggcccaggggcaaggaaggaaaggggggtggaaaacaaactttttccccaaaaaatatccggggccccc

SEQ ID NO: 102257 - DNA, 969 bp, Homo Sapiens
  misc_feature (11)..(11): n is a, c, g, or t
  misc_feature (320)..(320): n is a, c, g, or t
  misc_feature (682)..(682): n is a, c, g, or t
  misc_feature (688)..(688): n is a, c, g, or t
  misc_feature (707)..(707): n is a, c, g, or t
  misc_feature (826)..(826): n is a, c, g, or t
  misc_feature (940)..(940): n is a, c, g, or t
  misc_feature (958)..(958): n is a, c, g, or t
gaatgtgtctnttgagagacccaatgtacagaagtactgcctcatgagtgtgcgagatagctatacagactttcacattgactttggtggcacctctgtctggtaccatgtactcaagggtgaaaagatcttctacctgatccgcccaacaaatgccaatctgactctctttgagtgctggagcagttcctctaatcagaatgagatgttctttggggaccaggtggacaagtgctacaagtgttccgtgaagcaaggacagacacttttcattcccacagggtggatccatgctgtgctgacgcctgtggactgacttngcctttggagggaacttcttacacagccttaacatcgagatgcagctcaaagcctatgagattgagaagcggctgaccacagcagacctcttcagaatccccaacttttgagaccatctgttggtatgtgggaaagcacatcctggacatctttcgcggtttgcgagagaacaggagacaccctgcctcctacctggtccatggtggcaaagccttgaacttggcctttagagcctggacaaggaaagaagtaaatatgcatatttctctacctcctctggagttttgccctttgtagggactggatttgggtagatgttttggagagacagaagagaccagagaagcttgtgggctcctgngtgtanaagtggaggtgtgggctangattcctttgattacatttttaaatctttctttctgatgataaaaagtaatacaacatcacactagaagattagaaaatgaggaaaagcataaagaaggaaaattatcacctatgattnttacactcagcgggaactgctattaacacttgtgtacatttccttctggtctttttttatgtgcattttaaaacataatactggcacactgggtgggtgactgaaacaaaaggnggggaggggttggggggncccaaccccca

SEQ ID NO: 102258 - DNA, 559 bp, Homo Sapiens
  misc_feature (459)..(515): n is a, c, g, or t
ggccacccatgctgatataatgttaataataactttatatttgggtactgaatgctgatccctatagttaatgtggtggattgactagtattgctggctccgtggtagccaggatggatgcccttttgttttttagcagttctctaggggaactagcctattgttttctgtaaacagcacatatcatgaagcggcctctttggcaaatttgatgttatcgtctgtgtactgtatgattgatgtgactcagtgattggtgttcttcctttggctgctaggcctcctgcccttggggggtactttgaaccagatacctccctcttctggcttccaggcccgaattccccgccaaccaatccggggcaaccccgggggcctccctgaaaaaccagccaaggtttcaaacgcttccaaaaggggcaaagggttcccttttggtaaaccccactccatttggannnnnnnnnnnnnnnnnnnnnnnnnnnnnnnnnnnnnnnnnnnnnnnnnnnnnnnnntaaaagggggaccaggggggcggggaaataaaaagttttttggt

SEQ ID NO: 102259 - DNA, 538 bp, Homo Sapiens
ctcgcgaacgtgttatccagggaaccgctactccgatgattagctgcccagctggactctgcacatggggatggacccttcctgcctgcaccccggtcctcagcctgggctcccaggacaggacaggatgggacagcaggatagacaggacagcaagcccagtgggtgggaggaaggatgagggccccaccatgtccacactgggaaggagggccccacagcttcagactgaggatctagggctgggacctgtcagtcaaggaagagaggtcactttgggaccttctctgcaatcctgtgacgtgagtctgccctccttacaggcagctcccaggtcaataaggaaagagaatatggggccagtgtagctgtcgccagggttctgggagctccctgtggcctgtctgggaattcctgggggctgagactacagtggccaggctttgtgcttatttattggggggtgggttgagggaagagctatctggccttgggtacctggcctgaccgtctttcagatacacgtcgcgatggtacc

SEQ ID NO: 102260 - DNA, 862 bp, Homo Sapiens
tggattgttcgaagtgtgactatggcccgggagccagggcagcatgaactcctttctctgaaatttcgaggcctccttgggttccctgaactccgggctgatgttcccaggacccagcaccaggagaccccagtcccgccagcagccgccgctacccaggagggctgggcgacattggccgcctcccaccagctccccctcctcgcccacagcctcttgtcactgccaagcccccgttccttttgcccaaatcacgcaggcggaagctgcagtgccagctggagggatgttcatagggcttcctgtgcccatccctgctccaaacagctggacagcttcccctctacccccaccctggtgagcccctgggggccagagaaagatggggttcctgcaccttcccagctccacctctgaacttgagttagcgttagctaagcatacaatcagtgtcgaacgtctctcttccttaagcttgtagatacgactgcctataatcaggggactcccactggaagccgggaagccaatgctggccaggtgcgagggcatggtttggttcctttagggaatttttgttttgcaaacaggagaaacctgtgctgcaagttggaatggcaggaacaactggccttggtcaacaggcaaccccccagcctaggggcacaggcctccttcagggcccggggcagcccccaatttctgggccagcagggtttctcctttgtagggggctttttcagcacatcccaaaatggctagggcctccctgccccccaacgtgggtcagaagcaaatgtccaaactggtcagggctcctccaaagaatgccctccagattttccccctagccattgagccc

SEQ ID NO: 102261 - DNA, 1107 bp, Homo Sapiens
cacccagggccaaggtgaatggggttccttcgggcccaggaagttcgttagcccaattttggggatggcatcattcccaaaactggtttggcaaatgtgctcctggttcttgcgggtagtccttcctgggaatgccgcaacacgccgttagcacaggcggaacatgtgctggtagggggcgttcttctggtctgacagctcctccagccgcaccaggggaccttcacccccccttctcacggaacggggccttcagaatgccaaagacctgtttgaggatgttctgctccctcatcagcttctgccgttcccggttgggcttagtgaccatgatgtccaggacattctgcccattgttggggacatcgctgacaaagaacaccaggtcttccagcagctggatgacaaacctgcggtcattctggctgatgaagccctcgttgagtttctccacggcactggccagcatggagctggcgtcattggcaaagtccaggtctcggatctcagacacgggcactgacacgatggcaaaggcctccttgtcctccttggtggggcaggtgcccagcatgagccggatgggccgctcctcctcgatgtcaatgggcacattggtgctctgaatccacgtgttggtgcagaggtgccgcagccggacgtacgagttccggggcacgaaagagtcggttttctgcaaggtggtggggtccagctcaaagagagaggcgatgtcattgccatgaggcacagccaccaggcagtacttgatcttctccccagcattcctgcggcctgtgcggccctgtgcccccattcctgctgccttgggatctgaggcatcacctttgtaactggggttctcctcagcagccaggtagttgcctgtagccaggtgcttgaagcggtacaagccattccagtgcccagctcctccacggcaggggtcgtggtggaccacctccacctcccagagagcattggagctggtgcccgaggtggcagactggcgcagtgtagttcgcaggaacacctgcagcttgcccttgtactcgtcacacgtcaggaacttctcctgctccgcatggaacaaccgcatcacccgtt

SEQ ID NO: 102262 - DNA, 1108 bp, Homo Sapiens
  misc_feature (145)..(145): n is a, c, g, or t
aaaggcccctgggaaaaaccaacttttcggaggttagttatccaggcgttagaccatggatgccagaggccggccctgctgcccagggtactgccctcaacaattggggggaccatgcagaagtactttttaaaaacggttgcanccattcacaggcagggcagctgggagcagaggctgcggggaccctcagggcttacctgggctagggggctgctgggctgagcaagacgggcgctcctctcccatcacttccctcagttggtgacaatctggcacacaaaagctttcctgatgttggcgggcacaggctcgggaacgtgcacgggtacgggcatgggcacggctattgatacgaggatggcggagtttaggagaagcatgggcttttgtctggttgtagatcaggaagttgagcacagcaaactccaacagagcgcagaagcagaagacgaagcagatggcgatatagaaatccaaggctgtgatataggagacacgcgggaaattcttacgagaaaaggtgcccagcgtggtcatggtcagaacagaggtgatccctagagaggtccgggctggagcagactctgtcttgatccaaaaggaaacccaggagagcatcgtggtcacggaagaagggacatagttttgaaaggcaacatagccaaaccgcctgctcacattgaagaaaatcgtcatgaccatgaagtcactgcaagaccaatggccagttgagagctaagccaaggccagaatcttaatagcttccttctcagttcactgtcctacacccaatgtctgtctctgcaggttggcaagagagtcaggtgaaagtgaaaaaatcaattagccttctagatatcatgcccacgcagctgatatccagatggctgactaagggcttcataccctttgaggcacatcacacctgcactgatggccctcagaatgtctactctcagcaaatgagactagggaagtctgtgctgtggtggagaagcacagaatgcttttggcctcctttctgcacattcatgtgatggcaaaatgccttcgtgagtgagcactgctccacaggtggtcaaaaccggcactagcctgctcactc

SEQ ID NO: 102263 - DNA, 1123 bp, Homo Sapiens
  misc_feature (62)..(62): n is a, c, g, or t
  misc_feature (64)..(64): n is a, c, g, or t
gcagttttattattgatttcctctgttctgatggatttatatattaaagtaacattttcttngngttctttccttgagtacaaatttatctggaaaaaatcttcaataactttagatcccagcaaaacttttttctgagaatccttaaaacctactgctttaacaaaagctgctcgggagccagtgttgcggacagaaaaaaacaattttactttctttgccaggtactaagccattcactgttaccatgtaactgtcagataattttttaacgccttccaaaataagattgcttgttcctccatatccagacaaaggtattgtgaacttaatgcctggttgtgatcgatttccaagttgtttgatttctagtctagccaacatgcaagataatcgagtaggtgcaaataatacagagatgaaaatgtcttcctttgggtgaattctgatctcacagttactggtcaatcgctgttctgaaccaaaagtgttctgaagctgaaagcagtcctgatcttgtcctctaataagcagtcgtaaatgttgagttgtagatgcagaattatttcttaaagctagtttctgaagctgtgttctacctagagggactcctccccaagccagaaattgtttgttggacaaaatcgatggaatatctaagcaaggtccaggtgacagaggtttacttcctgaagaaatgacttcgccttttaacactacctcatactgaggtccaaatggctgcacaaatattttcaagatcctttcctcgcaggcttcaggatcctttggagtaaatgaaacaataacctcatgttcttctccaggtttaaggaatagattctttggatccactgaaaagtgacttccttgttctgggaccttgatatccaaataaacttcaatgttcccagcatttttcaaaggtaagtgctgctttcttgaggaagccactttggccaagaaatgcatcgtctgcaagtccctgggagcatggatcctagctattcctgctcttgctcggagactcacacttctaagaacgggcgtagggtttgggctgtcaacttcgatatcaacttttgccgagaattcttctgctgagtccagaatatctgaagag

SEQ ID NO: 102264 - DNA, 1205 bp, Homo Sapiens
  misc_feature (130)..(186): n is a, c, g, or t
  misc_feature (1133)..(1161): n is a, c, g, or t
gggtacgcgtatcttattggatgaggtgttaactagggcaatccagttttatggtgggtagtgtatcttacataggggttggttaggggggtattccagaaagtgattgtcttgtgaaattcgagagaannnnnnnnnnnnnnnnnnnnnnnnnnnnnnnnnnnnnnnnnnnnnnnnnnnnnnnnngcacttttggggcgcccaggagtatgaaggcttgagccctggcgcaagaaccctgggggccaaagtggacattttgtaattgtagggggcgttgaatcccaaggcggggcctgttgtcccggggccggaggtgacacccatggttggggggggcggtggagcccgggggccggccttggtttccggggccgaggtgccaccgtggattgggggggcggtggagcccggggaccggggtggagcccggggccggcctggtgtccggggccgaggtgacaccgtgggctgggggtgcggtggagcccggggccggcctggtgtccggggccgaggtgacaccgtgggcttggggggcggtggagcccggggccggcctggtgtccggggccgaggtgacaccgtgggctgggggggcggtggagcccggggctggcttgttgtccggggctgaggtgacatcgtgggctggcggggtggtggagcccagggctggcctggtgactgggacggaggtgacatcctgtccccaggtggcagctgaacctgaagctggttccgtggccggggccagagtgacatcctgtccctgagtggtggaggagcctgaaccggggctgtggctggagagtacgctgctggtcatactcacagcattcttctcagtagagctgggcactgaacttctctgggtagccgaagtctccttttctccacctggggtagagcttgcatgaccagaacccgtaacaactgttgcgggtttaggggctgtggtagctgtaagaagttaaagtcatagggttgggtctttatgaaggaaaaataagagcaagaagaaaatataagctctggccaccagagaaataataccaggaggactggggagtgggcagcctcagtaacccctgggttggccgcctccttccctgcagcagcctccttctctnnnnnnnnnnnnnnnnnnnnnnnnnnnnngcatttcttcccctcttaagccttccctctccctactctcttcc

SEQ ID NO: 102265 - DNA, 325 bp, Homo Sapiens
ccgcctagactacctagctaaataaatttaaaagactatcaagaaaagtaggtgagttagtgtatataaagcatttagataatgctagtatttagtgcattataaatgattgcagctgttattgttacattgattaccagcaaaatgttagaacagatttagagatgacttgtacttaaaaagcttaatggtcatcagtggaaaatagtgtgacttcaccaagtgtgaaacataccagatttccttactgaaaggactcctaatgttaagtgatgaggggaattccatagagataatgtttggcaaaaaatgtgacagacttgca

SEQ ID NO: 102266 - DNA, 344 bp, Homo Sapiens
atataggtaagccacagagataagagtagcaagcagtgatggggagaagataatctagtgtaggaaagatggaaagaatggtgatatttcacaactgctagattgacactttaacttgagagttatccctccataaactggatatttgctgagcaaagtttaaagaaaactccatgtattcagtaatgttttccacaccccacttctcttatataagccagtggcttagagtgcttgctctaatttctatattccattaaacaagggtgggatttcttctcattcaaaccatttgtgactttgccctttagtgacctctaccatcaccctatcattaatgatcc

SEQ ID NO: 102267 - DNA, 600 bp, Homo Sapiens
agctgaattgaaaaccaggtcgttgtgatgtagaaaaatgttcatgcgctggctggagattatcctaaggttgaacactgctttcaggtatgagtccagggtactggaatagcgaagatggaacaacatgttagtgggtgacacagttattggcaaacaattaccttccttttgtcactgacctgtccaactggatgctgccatggtggctgaaggcacacttcatgatgctgtccagggtcatcagggagacatgttgaaagagctccagacgtgagttttgggcaatgtgttcctcccatttgttctggggcaggggatgaatatcatgatcatacacatgcccatctttcccaatttgtaagttattttatgtcccttttagagcctgctgggtttgaaaatataaagcgtacaaaatgaatttgccttattatgacaaccatataaaatgaaacaccttgtcagtactgaaaatgatactgtgccttagatgctatttgtgactttgtaagggtggggaaatagctatttttccctctttgtcaagtttcattagtacaatctatatgacttttatcatggaaaaactaagctgac

SEQ ID NO: 102268 - DNA, 153 bp, Homo Sapiens
tatatcccattgcaaaacaagtctacaaatgatggaaattaattagtatttaccaacatttagcatatacataacagtattactttacaaattgtcttcattaaaaccacaaaaggaaacaaatatgaatacctcaacatatctgttaagaat

SEQ ID NO: 102269 - DNA, 231 bp, Homo Sapiens
taagatgctttatagaccccaagtgctaaccacccctttgagttactcatcattgatgtttctcctgtgtgattagcgttatgtatgttaataaactctgtattcctcttgttaatctgcttgtccaattcgcagggccccagtcagagcacttaggaaagtaaaggaaaaaaagtatagtatttccctagaatccacactaaggtgcccctcaacacctaataaaagggc

SEQ ID NO: 102270 - DNA, 198 bp, Homo Sapiens
atgaacctgtaatgggattacagacatgaaccatgcccagcaggagaagtcatttcattctctggttaaaagatcagccatccctcactgttaccatggtggaataggggctaattattgtcaattctttcattttttcaaggtaagacagaaatctgtatttttatctaaaatctccagtgttcattgttggtaact

SEQ ID NO: 102271 - DNA, 682 bp, Homo Sapiens
  misc_feature (71)..(94): n is a, c, g, or t
tgtcgggagaggcagtgcaactaaaataacctcactaaagggaaaaagcttgcggccgcatacccggtccnnnnnnnnnnnnnnnnnnnnnnnngagtataagggaaaacagagttctgacaaagtcagtacccaagtcctgcagaagtcaagggatgtcaaggcccggctggaagaggctttgctgcgtggggaaggggccagaggggagatgatgcgccgccgggctccagggaacgaccgatttccaggcctaaatgaaaatttgagatggaagaaagagcagacacattggcggcaagctaatgagaagctagataaaacaaaggccgagttagatcaagaagccttgatcagtggcaatctggctacagaagcacatttaatcatcctggatatgcaggaaaacattatccaggcgagctcggctctggactgtaaagacagcctgctgggaggtgttctgagggtgctggtgaattctctgaactgtgatcagagtaccacctacctgactcactgctttgcaacactccgtgctctcatccccaagtttggagacttactcttcgaagaggaggtggaacagtgtttcgacctatgtcaccaagtcctgcaccactgcagcagcagcatgggtgtcacccggagccaagcctgtgccacccttacctcctgacag

SEQ ID NO: 102272 - DNA, 666 bp, Homo Sapiens
  misc_feature (328)..(440): n is a, c, g, or t
ggtgactcagtagtttaaaacaacagaaacgtattctcgcacagtgaaggaggccaaaagtctgaaatcaaggtgttggcagagtctgtttcttccagaggctctgatggagattgttccttgcctctctccttgcttctgggggctgccagcaccttggtatttctcggctcatagctgcatcactccaatctctgactccatcatcacatggccttctgctctgtgtctccatgtctctgttttcaaatctttttctccttataaggacaccagtcactggatttaaggcccactctaatccagtaagcctcgtgccgaattcttnnnnnnnnnnnnnnnnnnnnnnnnnnnnnnnnnnnnnnnnnnnnnnnnnnnnnnnnnnnnnnnnnnnnnnnnnnnnnnnnnnnnnnnnnnnnnnnnnnnnnnnnnnnnnnnnngccgggagcaataaaagtgtaaaagccctgggggtgggcctaaaatgaagtggggccttaaacttcaaaaattaaaatttgtgggtttgggcggctcaaactagggcccgggcgtttttctcaaattctctggggaaaaaacccctgggtcctgttgggccaaaaactgtggcaacttttaaaatgtggaatatctggggggcaaaacacaaccctccgcgggggg

SEQ ID NO: 102273 - DNA, 945 bp, Homo Sapiens
  misc_feature (70)..(70): n is a, c, g, or t
  misc_feature (136)..(136): n is a, c, g, or t
  misc_feature (187)..(187): n is a, c, g, or t
  misc_feature (201)..(201): n is a, c, g, or t
  misc_feature (209)..(209): n is a, c, g, or t
  misc_feature (291)..(291): n is a, c, g, or t
cgctctattgctatggtataggtacagataatgtagtatgttcttgagagtcttgtctctatcccgagtntgctctctccatgctgtcctccctgccgtgtggggtttcctcgactagagccagcatgtctcattntcaatgtcacagcccatgctccctcattacaagttctctaaatgttgcttntctcagcctgttantccatatntcaatccttggaactgtccagctcccatgactctatgcccaccaagctcttgaattttctcatttcttcacctacaaccctntgtcttgacttatctcctgcaactgactcatctgcaacattcacaccattgcttccttgtggtttcccttctttagaacttttactcatccttgagatgtatggtgtatttggcttgagttatgagagatgcttatttattcatttactctttttcatattttcagagaaagttacctaatccctcctaaagacacagcagtatgggtataacatccttgccttcccatttatccatgtttcactttatcactgatatgaagaggcccaaagcctgttagccaccatccatgctacctaggtagtccataggaaccacccccatgaccaccaccaacatcaactaaaggttcttggagggtatgtcagtgtgttgctcaggataccccaggtacatcaaggaatcaaggagaggaaaatatgagcaatatgtgtattcagagtgaagattttatgtccagagtatttgagctcaaaccttgcctgttgttttctaatcatgatgaatactttctcagtttctttttcctgaaatataaattgggatttaagactgtacctaactattaagatcactgtgtaaaactaagtgtctctaaatgtaatgcatcgatttagtgtctggaacataataaatatttgctctcatgattgc

SEQ ID NO: 102274 - DNA, 599 bp, Homo Sapiens
aatcgagccgttacccggtcccatgcacagtttggatcagcaatccaacacgatctgctcagctctgaaaaatctctggctattgagtggagaacaggctacagggagaagagggtgggagcagggataattaggagcctattgcaatatccagacaagagataatcgcagtagaggaaggggcaaggcactgtcaggataagcctggaggatttgctcatggattagatggtgggtacaagagaaacaggaatcgaggaggattccccagttttcggcctcggaactgaagaaccgagtttgcatttactaggagggaagtctccccaggggagcacatttcacaccatggggccgagtgagctccctttagggctgagtgtggggagagaggaggctatattagaggctggagccccgagtcctccagggttttgaggctgggaagctgaggacaccatagcaagggaggccaaaaaggagaggccagggaggtgagaggagagcacagagctgtccacaggccaggtggaaagactcaagcgggtgattatttgcatcccatgctactgataggactgggcacccaggtcactggc

SEQ ID NO: 102275 - DNA, 918 bp, Homo Sapiens
  misc_feature (310)..(740): n is a, c, g, or t
  misc_feature (763)..(763): n is a, c, g, or t
  misc_feature (785)..(785): n is a, c, g, or t
gggggcccctgtggcctgggtgggccctcccgcccctccctggcaggacaatctgcttgtgtctccctcgctggcctgctcctcctgcagggcctgtgagctgctcacaactgggtcaacgctttaggctgagtcactcctcgggtctctccataattcaacccaacaatgcttggtttatttcaatcagctctgacacttgtttaaacgattggccattctaaagttggtgagtttgtcaagcaactatcgacttgatcagttcagccaagcaactgacaaatcaaaaacccctcgtgccgaattcttnnnnnnnnnnnnnnnnnnnnnnnnnnnnnnnnnnnnnnnnnnnnnnnnnnnnnnnnnnnnnnnnnnnnnnnnnnnnnnnnnnnnnnnnnnnnnnnnnnnnnnnnnnnnnnnnnnnnnnnnnnnnnnnnnnnnnnnnnnnnnnnnnnnnnnnnnnnnnnnnnnnnnnnnnnnnnnnnnnnnnnnnnnnnnnnnnnnnnnnnnnnnnnnnnnnnnnnnnnnnnnnnnnnnnnnnnnnnnnnnnnnnnnnnnnnnnnnnnnnnnnnnnnnnnnnnnnnnnnnnnnnnnnnnnnnnnnnnnnnnnnnnnnnnnnnnnnnnnnnnnnnnnnnnnnnnnnnnnnnnnnnnnnnnnnnnnnnnnnnnnnnnnnnnnnnnnnnnnnnnnnnnnnnnnnnnnnnnnnnnnnnnnnnnnnnnnnnnnnnnnnnnnnnnnnnggcgcttgctggggttttcatangctcgcccctgacgacataaanaacgagccagtcgaggtgggaaccgacagacatagatacaggttccctggactcctctggtctctgtccgactgcgctacgaactgcgcttctctcggaagtgggctctcaatcaccgtagtaccatcgggag

SEQ ID NO: 102276 - DNA, 765 bp, Homo Sapiens
tcaagctctcactcccactggcctccctcccgggagccccgtctcctccgtctccaggtggcccctgcatccctgcctggtgggcctttgcctccctctcctgttcctgccttgcctgctcccaggtttccaggtcctgaccaggaggcaggagtccataccgaggcccaaacaggctagccctgagcagggcccccaagcctgaggcccaggagtggacagacctttgtgacacccattctctcttccttttccatctgtccggaactctggacactgcctggaggaatcaggcctgccgtaggcccaggaaggcggaaacaaagacgacgctcagagacaggaagcaacttgcctaaagatacacagcacaaatgagaaaattggtgcccaatgtttctgaagaccagcaactgctaagacagagacttccgagggaacccgaccttgcctgaaggaccaacagcgccccctgcaggacacttccctccattgagaaaagccacagggcgcggtctgaggcaatctgagtcggtgggaatcccctatttcacctcctggcatgtaaggtgctgtgagccttctattgtagacaccggaatggtttccacaaaatgaacactgccacgatgcttgtgggaggacactggaactgggtggtaggagggagagagagaattgtaatattgaaagaggacattttactctcatcactgacacgtatggttgctagacaaaagaaataacctcgggcattccttggct

SEQ ID NO: 102277 - DNA, 969 bp, Homo Sapiens
  misc_feature (172)..(172): n is a, c, g, or t
  misc_feature (236)..(236): n is a, c, g, or t
  misc_feature (238)..(238): n is a, c, g, or t
  misc_feature (332)..(332): n is a, c, g, or t
gacattgatgtcggattaacgatcattagaatgctcgagccagatcgcagagagtgcaccccagcagcattcatatggaacgtcacacctgcccatggcatggcacagtctaccaccgccatgatgaatcaacctgggattggagcagtcagcatgagagccatcagcagcntgtgctgatcccctgctttctgaaggcctgattttaggggtgagggccaatgggtgcccccccncngaccccacccctcaaccaccagaacttgacccactgttcccgccatggctcagggcctaacatcatcctcacagggactcctctccaggttctntaaggagattgcagcagccctggccggagtgcctggctttgaggtgtcagcagctggattggagctagggcttgggctagaagatgagctgcgcatggagccactgggcctggaagggctaaacatgctgagtgacccctgtgccctgctgcctgatcctgctgtggaggagtcattccgcagtgaccggctccaatgagggcacctccatcaccatccctcttcttggccccacattcccccaccaccattcctttcctcccttccccctttggcaagtagagactctactctctgtccccagatcctctttctagcatgaatgaaggatgccaagaatgagaaaaagcaaggggtttgtccaggtggcccctgaattctgcgcaagggatgggcctgggggaactcaagggagggcctaaagcacttgtaactttgaaccgtctgtctggaggtcagagcctgttggaaagcaggggtagaggggagccctggaagcagggctttaccggatgcctaggggtgggcagtgccagcccctcctcaccactcttccccttgcagtggaggagagagccagagtggatactattttttattaaatatattattatatgttaataaaaaaatcatatca

SEQ ID NO: 102278 - DNA, 762 bp, Homo Sapiens
  misc_feature (119)..(119): n is a, c, g, or t
  misc_feature (167)..(167): n is a, c, g, or t
  misc_feature (171)..(171): n is a, c, g, or t
  misc_feature (213)..(213): n is a, c, g, or t
  misc_feature (233)..(233): n is a, c, g, or t
  misc_feature (235)..(235): n is a, c, g, or t
agctccccagagtgctcctctgcctaaaagcgtattgtgcaccccaggacacactccatggcacagatcatagctggcacaccccacgatgcttggacccaggagttgttcccaggatntcccggtaccagagcaccacaaaaggagcaggagggcaggtgggagtnggcntaattctcagagactcatcaccactctgctatcagattaacncagcagtccaggagggctcntntggatggagaattcttcccaaatagaggatcagttatacactgtaacatagtcggtggcagacattagtgcccagctgggcctccagacaagtgaacctggggttggccaggaaaccagaagcacaaaaccacaaagtccctcaagggccctctccccattcccagcatcagctggagttttgtcacttacaaatctgcccataagtaacctagaaatatgctgggggtcacccgcagaaaccccctctgctcgctaatgggtaagcagatggcaccccgcaaagagtcacattatctgcccttccttaaacacctccaatggctggcaggccaggctgcagtctcaacccctgctagccgtgtaaaaatgcactctgtcagggtggggtaaccagaagagcacatttatctagctctttcttcttaaatgaaacctgtggtatggagtaggatctaaaagtggaaatgtgctggccgcagtggctcatactggatgcccagccacccagtgggagctaagcatccg

SEQ ID NO: 102279 - DNA, 978 bp, Homo Sapiens
  misc_feature (42)..(42): n is a, c, g, or t
  misc_feature (76)..(76): n is a, c, g, or t
  misc_feature (99)..(99): n is a, c, g, or t
  misc_feature (132)..(132): n is a, c, g, or t
  misc_feature (153)..(154): n is a, c, g, or t
  misc_feature (162)..(162): n is a, c, g, or t
  misc_feature (260)..(260): n is a, c, g, or t
atctattctactagttgtaggacattgtcggaatcatgcccnccagcttccaatgaattgctgtatccaagtattncatctacccagcaattaaaccantgagtcctctcccaacatcaccacatacctagntgagatgacagtgtactatanntcaacaantaaaataataactctcttatgtataaaatagcttgaacttccatatgagtattctaccaatattaagttaccagatgccctgtaactgaatccttccntgacggcatacagatgaaaatcgatattctttgtcaaatttaaaatttctgagtgacagctgtgcttgaggggcccctacgtcatctcccattcttctgtcattcccagtcacatgaacattgctccaataaagatatcttcttttacagacgccttggagcgaagtattagtgaactttccaaggtaactgtcatctttaaatttaacagtgatttattaagtctaacaataatctggtatttataaaaataaaatcccctaagcttaaatcctcaaaattttctttcagaattaaaattaatcaaatatttagaattgatcagaagagctcaaatttgcgaggaatgagatggaacagtctcggacgtgcgtcatcacacaggaagctttggcctaagccacttcacgatgcagactagaaggatattgtgggaacagacaccatcaggggacatgggaggagcatgtcgtcatatgttccttcccgggtagaagagcgtgtggtcactactaaacagtgccaacaatagtctgaatagttcaagctattctctgcttgacagctaaaataaagtttctgaaaaaaacagaaacagaacttctttgtgctcctcggtcgatgatgaggggaagatgggagagaagacacatccattctcttctcctgcccttagttctgtcccctttgaactcaggactccaaaaaagaaaccaac

SEQ ID NO: 102280 - DNA, 995 bp, Homo Sapiens
  misc_feature (43)..(53): n is a, c, g, or t
  misc_feature (264)..(264): n is a, c, g, or t
  misc_feature (312)..(312): n is a, c, g, or t
ggcgagtctgatggtgccatcgtcactgtacagtagatcgtcnnnnnnnnnnnttgacatttatatacacatgtattgacatatacaattataatctgagtcaagtatcgatgagcttatactcaatttcttctactccattattgtccttaccagaggttgacaaaaaaagtgaactcaaatagatttcattgtgtattgctctgaaaaaatgtaatatgcatacatgtaagccaaactgagtaccagcaattttcattctcntattcccaacctctttatcacacagataatcaaaagttaactaatttntagagaaaaaattgtatttaaaaaaatagggttttgtcaagattgcagaattttctccagattttccgggtaaatagtcattaacccaaaatacctttcctgtgagatactaaagataaaatatggatattgatacatctatgtttttctacataatgataataataatgaaaatgtttgccagttatgtaggtgaaaattaaacaaatcatagttcttaaagtacccattttccccacttcacatacctctagaaaagttaaatgtacagaaaaccaagtttagatagtaagaatatattatgaatgatctttgataatgtccatgatttataaatgctgttatttcccagatgttgtaaatctgagaatattaattaaattgatattcctcctctgctagaacctgaaaggattatgaaggggctaccatagctctaaagtaagaagagtggtataggcaggaacagctaggtagtatctgtcctagcactgacaggttcacaggttgtcctttaggaatagacccatgagctttttcaactattttccagatttctcagatctgaggtaatttccacagtaatttatattagctgtcacattgtgtcttattgctagaataaactttgcttggaatgctaatgtctaaaagttttagcttcattaaaaaaactgtgtaac

SEQ ID NO: 102281 - DNA, 996 bp, Homo Sapiens
ggtctaccattataccttgggtccgatccccgaggaaccatgtacaggaagtccttccaaattacgggattaatcccaacacattgaccccaacacagatttatgtttccggttgggaagcaagtccggtattacaccacaggtgccccataacccgcccgtggattttacttgccacaatgaagccgtgtggtgccatggcgccgaatagaaacgaacgtttatcagtagaaactacagtccaagatgactcatgtcatttgaccggttcccaagttcaagaacgccacgcggcaccatcaacaagacttagtgacatctcgagggactggaataccaattgcccctaccgcagaacctgctatttagacccacggacagacgtgtggaggagcggcgacccatgaccacggcgcgcgcatggcacagcatgtgcagcctgggtgacagcatctactccatcgggggcagcgatgacaacatcgagtccatggagcgcttcgacgtgctgggcgtggaggcctacagcccgcagtgcaaccagtggaaccgcgtggcgccgatgctgcacgccaacagcgagtcgggcgtggcagtgtgggaggcccgcatctacatcctgggcggatacagctgggagaacactgccttctccaagaccgtgcaggtgtacgaccgcgaggccgacaagtggagcaggggcgtcgacctgcccaaggccatcgctggcgggtccgcctgtgtctgcgccctggagccacggccagaggacaagaagaagaaaggcaaaggcaagaggcaccaggaccggggccagtgaccctagctgcgcctcttgggaccatcctcaccgtcacctcccagggctctgtagaccagcagcaacttcttagtattccggaaacattatgtacaacttagcagctttttttacttttatgagtcttggtatttaaatgacatcacagtaaccaattaaatactatcagtaacttt

SEQ ID NO: 102282 - DNA, 916 bp, Homo Sapiens
  misc_feature (99)..(99): n is a, c, g, or t
  misc_feature (192)..(259): n is a, c, g, or t
  misc_feature (281)..(281): n is a, c, g, or t
  misc_feature (368)..(368): n is a, c, g, or t
ccaacaccacgcagcggtcgttgggagagcggaggcgcccatacccaacccctctccccggggtggcggtcattaatcaactggccgacagtttccgantgaaagcggcagtggcgcacgcaatatgtgagtcgtcactcatagcaccccagctttcacttatgctccgggttcattgttgtgtgaatgtgnnnnnnnnnnnnnnnnnnnnnnnnnnnnnnnnnnnnnnnnnnnnnnnnnnnnnnnnnnnnnnnnnnnntttggccctcgagccaaggaantcgcaccgaggaggaaacctatgaagcagcaggtctatttcctatgaaaacaacttgtccaaaggctgcctgcaacaaattgctttntatccatttctccatgagctccaatttccacctctgcaggctttaatattcttaccaagccagcaggagggaaacccattgcaacatcattcaattaccctcaatattaaattcacttcccaaaaaggatgagaagtcaaccttgatgtgctcatattaaacagtttaaatccagaagaaaacaaaaaattctggacttggatttttgaggttagaaagaatttttgaagcagaaatcccaataaatatgctgatcttcctaagaatgaataaatcacagaattttaagccaaaaggaaagggcacataaagattatccagtccaacctcattttacagacagggagggtgacctgcccaaagtcacatgactaaaaggagaaggggtggccttggaatacagatgttctgacttctagggtcttatcttttaatgttgcctttttgtcctcaaagctgcctgcttattgggttggaagaactcacatcttatgaagggttagaccctgccttgaaaatcagtatggtaggctgggcgtgggccctta

SEQ ID NO: 102283 - DNA, 517 bp, Homo Sapiens
tgaatataaacactatatggcagtgtctttccaccttgggtcccagggaagttttgtggaggagctcagcacactaatacaccaggtagaacacaaggtcatttgctaactagcttggaaactggatgaggtcatagcagtgcttgattgcgtggaattgtgctgagttggtgttaacatgtgctttggggcttttacaccagttcctttcaatggtttgcaaggaagccacagccggtagtatctgaagttgacttgacagaacactgtcttgaagacaatggcttactccaggagacccacaggtatgaccttctaggaagctccagttcgatgggcccaattcttacaaacatgtggttaatgccatggacagaagaaggcagcaggtggcagaatggggtgcatgaaggtttctgaaaattaacactgcttgtgtttttaactcaatattttccatgaaaatgcaacaacatgcataatatttttaattaaataaaaataaatagtggtcgtt

SEQ ID NO: 102284 - DNA, 645 bp, Homo Sapiens
  misc_feature (31)..(31): n is a, c, g, or t
  misc_feature (46)..(46): n is a, c, g, or t
tggaccccttcctcctcccggcaccacgttntcagtgaatgttctntgaagaggaaccctggtccataggaactgagtgaaagcaaggccaagtatgtccacccatggggacaaacgtcccagcacaaaggggtctcaggcctgcaaggcccaaagtggacgctcggacaagggcaggaaggtatttgctgattctccttctccatgtgacgtgtctctcaacccacaccagactaggggagcctcccgcagcttcagattcccctattgacgcccacacagtgttatgcaagcaccgagcccagagtcccgctgggccgtggtgtcctaattgtcttggtgacaaagagcaattctattttaaagcaactgaatcctttccccctgttttgtgtgccagtattttactgtcttcttaattgttttaagcaatgtttactttggatttctggatgttatataaaagccacgaaaaccctggccatgctgtttgtcaggcccacctggctgagtgcaggaagcaagcgcttttcaggagctcactgcaacaccgggcaaacacttcttccgccagggatgcggttaggacaatgccacgtggcgtcacagtatgctgttatttattccaataaagacctcgtgagc

SEQ ID NO: 102285 - DNA, 436 bp, Homo Sapiens
aatcccagctgaggggcatcccataatatgtctgaccagaactcttcgaaactatcaaagtaggcatcaaaaccaaagaaagtctgagcaactgccctagccaagaggaacctaaggagacacgacaactccttacttgtcaatataaatgtctggagccagaatgttatcaaatttgataacataatgtcatatgagatcctggaacagtaaaatacattaggcaaaactaaggcaatctgaataaactatagactttagttaatactaatggatcgatattatttcattaattgtgacaaacgtaccaccccaatgtcagatgtcattaatattaggagtaactgagcgtggggtatacagcagctctctgcactatcttctcaattttttctgcaactctaaaactattctaaggccaggtgtggtggctcat

SEQ ID NO: 102286 - DNA, 554 bp, Homo Sapiens
aatattctggcaatctttagaaagggagattccaaactcccatttggtaaaccagttgattatttggaaatgttcactgccaaaatagtaagtgctataactaaatgcgcttttaattaatgatatagtgtttggaaaggagtagaacatgcagcataagaaactgctgcagagtggtgcgaggagtacattttcagagcaggtgcagtacatcttccggctctatgaatcattatgtgagaaagcaggataacattaggtaacctgagcctcctgtgtggtattagaaagtataccgtcaccttttcacatcactggagtgtaaaatttaaaacaagatggtgattcctgacattccttggctgtcagtgctgcccagattcagaagaatattgcccacatttcactgtatttggtgctgggtcattttgaccttgctttgttaataatatctttaaaaacaaagacaatccttaaagctttgctcctcacacattaccttctaattatagtttgaaaatagattccctacacatacatacatatgtatgcac

SEQ ID NO: 102287 - DNA, 890 bp, Homo Sapiens
  misc_feature (59)..(80): n is a, c, g, or t
  misc_feature (214)..(236): n is a, c, g, or t
gtgctaagcgaaaattaccctcactaaagggaataagcttgcggccgcatacgcggtcnnnnnnnnnnnnnnnnnnnnnnagaggttctacaactgattcatgtttattgtagaaaaaccagaagacgttaaaaaaattaaaattgcctaaaattcaaccccccccaactcttaacattttcatgtatatccttccagacaatgttccatgaannnnnnnnnnnnnnnnnnnnnnnatacttacaaaaacaggattctactctgtatgtgtggaaatgattttaacttacagaatattgtcaaaccttagaaacctgggcttgagcactggaactaataaagactgtagcagcgtcgttcctcctctggcctgctgcagaatgttgaggcctttttgtctgccaccagtgccaggtgcttgtgagtctgttatttaatttcacaatgaaggtatgaaaggagtaaatgagtaatatgcatttttggacaaagaggtcgaaacctttgtggaacacaactttcaagatggagatatatattcacgaagctttattgcagctgtttcccttacccagttgaagtggccagtcattttaatttgcagttctatttacattcccaaggtaaccacgttcagtaactctctagaggctaagctgttaaaatttccatttttatacaaatagcaaagagatttctttccctttctttctttcgttcgttctttccgcggggcgaattcttggactcgagggccagattccctatagggagtcgtataaattcggaatcatggtcatactggttccggtgtgaattgttattcgctcacattccaaaaccataagagcgggaacaaaagtgtaagctgggggtgcaatgagtagcta

SEQ ID NO: 102288 - DNA, 876 bp, Homo Sapiens
  misc_feature (131)..(131): n is a, c, g, or t
  misc_feature (817)..(833): n is a, c, g, or t
tcctgcgcccccgcttcccattcctgctgtgccccccctgccgtacaagacccccccgcccgggaggctgccaccccgccatgacgcccaggcttggatgccgtgcaaccgcgcctcttcccttgttctgnccaggtgagcgaggccttgcaatctctcccgcatcacaaaaggatgggtcagttaagcctcatccgaaacgcatctgttgagcccctgggaacagcttagccaaaatactgactgcagctacacgttaggaaacactggtacaaaccaacaggcagcctttccgcccttgcggagggagagactagcatcatcatcaagagataaaccgaagtgtgctggaaaacacacgagctctttagtaagagcaggcgacatgcaaggaaccatagtaacaggaacagaggtcctgaggctggatatggaacccaagtttgaggatgaccaactgagaccagtgttgctggagcacaaagtgccaaggagagaaatggcaggctaaggctggaatatgcaggtatgaagcgcaacctgggttcttctgtgccatgtgaaaggttctgctcttgatcctacggaaagtgggcaaccaaaccaattgttttccaaagatcctaaacaatgtaaagctaggctttgatcaaagggctaattaacccatacttactatttgttaacaggagtttcttacatcagatttaaagcagaaggctcacagcttcatttcaaccatgccactgtatccatgaaaactctgaaacaagtatttgtggacagcaaaatccacatgtactcaatacctagcttnnnnnnnnnnnnnnnnngaccgcgtatgcggccgcaagcattattcccctttagtgaggg

SEQ ID NO: 102289 - DNA, 626 bp, Homo Sapiens
  misc_feature (35)..(35): n is a, c, g, or t
  misc_feature (67)..(220): n is a, c, g, or t
  misc_feature (542)..(562): n is a, c, g, or t
gccaagtgccaacgctaaaattaaccctcactaanagggaataagcttgcggccgcatacgcggtcnnnnnnnnnnnnnnnnnnnnnnnnnnnnnnnnnnnnnnnnnnnnnnnnnnnnnnnnnnnnnnnnnnnnnnnnnnnnnnnnnnnnnnnnnnnnnnnnnnnnnnnnnnnnnnnnnnnnnnnnnnnnnnnnnnnnnnnnnnnnnnnnnnnnnnnnnnatgagccaccactcccggcctgctttttgtttttgaagacaggacttaggtctcctcctcccgaactctaaacctgcgtgtgtggctgtgcaccgctcgtttgtagcgtcacctcaggtctggggaagtctgtgctggcatctcctcattgtgccttcatcagagctggtgccttcgggccagaaagactctcgttctttctaaatggtgggatcaggggcctttgctgtgtttcccttggtggatttttgtgttttgtaagttgtctattttgataatgtattatttttataactgtaaaaaaagtaaatagcatattttnnnnnnnnnnnnnnnnnnnnngaccgcgtatgcggccgcaagcttattccctttagtgagggtaattttagcttggcactgcccg

SEQ ID NO: 102290 - DNA, 374 bp, Homo Sapiens
gctgctctattgcagagttgaggactatccgatgcagcctttgccgccctgcatgccaaatgtgaggagatggagagggcacggtggctgtggaccacgagtgtgccaccccagcggcggggcagcaggtgatggggcaggcttgggtccccagggcctgtggagagagggtggacagggagtttgggccctacttgagtccatggaattgctactgcctcttggttgctcatcatactcatctactggcagtggcaaatagctcagaatttccttggtgtttgttggaactagtggagatatatggaactagtggagatataaggagccaagtgctagatccctgctgagaagtcactatgtcattcatcgct

SEQ ID NO: 102291 - DNA, 123 bp, Homo Sapiens
aagaattcggcacgaggcggtccacctcaaacctcgaaagtgccaggtgttagccaccatgcctggctcatctccataattcttgggacaactctacagacaaaactgagtaagtaagggctg

SEQ ID NO: 102292 - DNA, 797 bp, Homo Sapiens
tttttcgccacccgggacacaattaaaaagtcatgtccttctttttcccgacccaaaccaacatctccttactttttctgggccggacgaggggactgggaagaagggaaaattcaaagtttcacttgaactcttggtcacccacccgtgggagtccaatctttcagcagcctccgtggcacagcccccgggtgacagaaagaatgaggtttagttggaccaagtaacattgcatcccttgtgtttacgaaaaggcagctgcttttgtggtgtgatttcaggcgagccagacagggccggggccacgaacctgcatcgtgcatcttaagcacctattgccatgcgtgaggctaactggaaactcacttgctgggtgcagatagcttccaaactattgtgatgctcatgcttgacttcccaaggaacgtgtttcaggaaaggccattgccctcattatggtctttgataagcaggaagaagtttgttgttccttttttttcttaatgccctacttcgtgcaacatacatccaatcagtcatatcctattgacgctacccctaaatatctctgggcctggcccgtgctcagggcactgccttcattcagttactgcacttgcctgctgcctgtgctcctggtctcctgattggactcccccaggccagcagccacactactgccaaaatccagtcgaaaattaacttcaggtaaagcacaattccaaacctaacactgcccccctcaaaagcctctctgtagccttcagaataaagaccatattatttgacaagacaaa

SEQ ID NO: 102293 - DNA, 570 bp, Homo Sapiens
cccaaattaacaccgcccttttgtgttaaaacaacccccttttaaggtgtttgttcccccttttggaaaattgcccccttgtgggaaacccatttttcccggaaaccaaccttgaaatggccttccctgggccttgaaggggaatttagttccgtgagtctattttaaaaaattttttcaaatgatccccatttcagtaacctgacccatttctaacatctataggcccttttgtattttaccaccatcccaatagtggttataaatgtttcccaagtaccataataatggtaaataacacccaactctcagtccaacctctgccgaatatacacctcctccaaatcaaaacactactcccttgtcgtcataacattttagttcacttccaatttgtgaattgtgttctatttccaacagatttgcactaattttgcaagaaaaatgctgtaaactgccacagcaaacaacaacatttttacgttcatctaatctttcttcccaaaggacttggagctctggacagatttcagttcattcttcctatgtaacccatttggtagaaaagtg

SEQ ID NO: 102294 - DNA, 889 bp, Homo Sapiens
  misc_feature (61)..(197): n is a, c, g, or t
  misc_feature (830)..(830): n is a, c, g, or t
  misc_feature (840)..(840): n is a, c, g, or t
gtgccaagctaaaattaaccctcaactaaagggaataagcttgcggccgcatactcggtcnnnnnnnnnnnnnnnnnnnnnnnnnnnnnnnnnnnnnnnnnnnnnnnnnnnnnnnnnnnnnnnnnnnnnnnnnnnnnnnnnnnnnnnnnnnnnnnnnnnnnnnnnnnnnnnnnnnnnnnnnnnnnnnnnnnnnnnnntgagccaccacacccagcccggctttattcttaaagtgacctggtgagccagctggtgtggagatgaggcgggaagcagggctgatggagtccctggacagtggatggcagtggcttggccaggccgctaacagcaggggcactgggaagtgattggattctagatactgatttcaagggtagcacacacgtgatctgctgatagattccatgtcaggtgtgagagggaggagagtcaagctcatccacagctctggcagcggaagacggccaaagtgaagaaggtggcctcaagtttacctccaccttccaaacctcaactggtaaaacctcatgcatgcccagaatgctagcacaagagatttagggaaatgtgggtattttgctttctggccctgcagttcaggttccaccttataaaatgggagtggcgtgggtggtgggcgccaccagccatattcacgggagttagcataagggttcacagtttgagtgaagcttcctgagactgtgccgtgctgccaacacagttctctccgattcattccctcaaaacagtatattcccaatgaaagcacgaccagtacttaaactagccatgttcagtgtggctctcagactttccccaggcangatgacacangattccttttagacgtctcttaactgtacactaaagttactggtatatt

SEQ ID NO: 102295 - DNA, 426 bp, Homo Sapiens
  misc_feature (16)..(16): n is a, c, g, or t
  misc_feature (300)..(374): n is a, c, g, or t
atgagtaaatcttggngtgcgcgcctgtatgacttaaaataggacatgtcatctaaccattaagtcatgtgtgaacacataaggacgtgtgtaaatatgtacatttgtctttttataaaagagtaaattgtatataagggtgtggcctttttagagagaaatttaacttgtagatgattttactttttatggaaacactgatggacttattattggcatcccgcctgaacttgactttggggtgaacagggacatgcatctgttataaaatcctttcggacaggcgcggtggctcacacnnnnnnnnnnnnnnnnnnnnnnnnnnnnnnnnnnnnnnnnnnnnnnnnnnnnnnnnnnnnnnnnnnnnnnnnnnnactccatttctactaaaaatgcaaaaattagctgggcgtggttgcgggtgct

SEQ ID NO: 102296 - DNA, 636 bp, Homo Sapiens
  misc_feature (29)..(29): n is a, c, g, or t
ctattcacagcctgtaccggtgaggaatntgtctcaaaagcattcagcccttcaaagatttttattgtggtgaactcagaactgataaacagaaaaacagaaacagaaaaagggaactgatatgggggcgatcttgatgcgggttgtgtctctcatgcatgataactcagaggacaggctcctcggtagtgcggtagtgctaactctgtgaagtttcttcaccctccttcccagccctggagccggggtgattcatagctcctgttccaaaggcattcagcagccattcgacctgggaaagaaacagagttttagaaaatacaggccaaatgtagagacgcctgtgattaccaggatgagtatgtcagtgcaggttggcttctgaatttctgtttctgagtttgtttggctgatgcctaaggaaaggggtcccttacagccctgttttataccttagttcttggtggcaacgtgggtgttgctgatctctctgatgtgtttttctgtgcactgaaaacaccagacatgctccgtgacatcctcggagcatctcccatcataatggagtgttcctaacctgacaaagaatagcatattacctccccatctactcaaaataaaattatagtaaaattt

SEQ ID NO: 102297 - DNA, 577 bp, Homo Sapiens
gacttcacccaactaactgtgcttgtgtagaaagaggttgcatccctgttccagtcatggccatgaggaacagctatgagaagggccctaaggcacagcatggtttgcagtaagaagggcagagccagggagagagaagtaaacatcatcttctgggctttggtttcaaaaatcacaaggtgtgggcctgagcctgctgcctgcccaggtctgggcgcctccactcagccactgtcctcccagtgcctctaaatctggaaggctgcatctgaacctgcccttccagacaacacccctcccctggggaaaccaatggggatgagtagtggccctccactggggactgtgggtttcgaggtgggggcagaggatgagttggcagcagtggcatatcatagctctcttcatgtcagcagggagagggaggtgccactgcctcccctgagatgagaaagcaggcgagaatcaccaggggaagaaccctggggcagctggcttgtcccagccatgcctgagtgcaccaaatatggaggctgcgtcctcactcggagagccaggcagcctgagcaccaagatc

SEQ ID NO: 102298 - DNA, 633 bp, Homo Sapiens
atgtcctgtgcttcctcaatatcgtggtgaggtgcaggcactaaggagtggggtgactttaggcctacatgggacgcagaggacaaactgagcagcacgagagggagggaagaactgacagtgccctgggatccagtcctgtatgcatctgctaaatatcattacacaagtgtagtagcctttgcactggttgccttcaaagaattaggaatgttgttctgtcagagggcggggaatgaaaacacttgtcaagtgtgcagtgtttgatatagcagcaactagggaggttctaacatcacacacttgtacttcctatttgaccaacaggccatcaagtaccacaggcattttggtacaacttctattattagggcctggtccctggatttggcctctattttgcagaccctagagaccctctgtggtgactggcttgagataacccaaatgcacaaggcctgaggtagacaacagaaagtcagtttttcaacaaaaaacaatgtttggtagctagaatattcacactggcattttcaccctgcaggcagacctatacaagtagccaaaccttcattacaaagatacttgaagagtacttgaatacaaatcaaaatgacataatggcactaagct

SEQ ID NO: 102299 - DNA, 419 bp, Homo Sapiens
  misc_feature (308)..(370): n is a, c, g, or t
tgagccaccatgtccggcttgtgttgtgacatttaacacaagatttcccaaagaagaaaggccttatatatgctgtgaatgtgtttttgcttgttagtttgttttaacttggtatgacggcactggaggctagcctttgaaaagacccttctctgatgtgactcatgtatccaaacatccatggatttcccataaatttgaggtattattgagtgttttcaagaatgaaaagaggccgggcaggggggctcacatttgtaatcccaactttttggggggctgaggtggggggatcccttgagcccaannnnnnnnnnnnnnnnnnnnnnnnnnnnnnnnnnnnnnnnnnnnnnnnnnnnnnnnnnnnnnnatcctgtctccaaaattaaataaataaataaaattccattttggagact

SEQ ID NO: 102300 - DNA, 309 bp, Homo Sapiens
taggctgtggaagacgggtaggctgtggaagacgggtaggctgtggaagacgggtaggctgtagggttgagcacaaacagtcaaggcagattgccagggtggatgggagtggagtctgttcacggcgcacccactgggaaccatgataacagaggtggacaggaggcggccccaggggtgcctgcccggtcgccctctctccatatgcccaccctgtgagcctcccggcccatcctcccggccaggctccctaccccactcaggccaggttggctgtagctgacgctgcccccgtcttccagggtaccg

SEQ ID NO: 102301 - DNA, 601 bp, Homo Sapiens
gagttgaagcaacagttacaaatcaggagatttcagctcaaaatgcagggttctggctcttttcaaaggggcctatgtgacaaccctgggcccatattccagaagctgccctgtggtcagtgcacggtgcttcaatctgttcaccttcaatgcaaacgctgcaaggggaggcacctgtggggtgtggaggcacccgaaaccctaacaaaggcaccagggtgggaatccaggtcttcagaagccaaaccctaggaacccagtaaatggtcagacaggcagtagccatgaggaagggagacttgagggttccactggttcccagcttggtcccctagaaacaatgggtgccattaaccaagagaagggtataggaaagacagtctgatgcccggggtgggggaaggggtgggcaatcccacttgctggagagtgccgtggttactattatattaaaacgaggatggatctgtgcatgcctggccagtggaaatcgcacccccgcctcagttcttgggcttgctctccatcttcctgcttaccagaatgattttggtctcatctagttcggcctgcactttagtcatgggatcagccctcgtgc

SEQ ID NO: 102302 - DNA, 800 bp, Homo Sapiens
gttctgaaaatgctttaatgccaccaagaaatctgaaaggtgcaggaagctgccgccatccccctagggtgcctagggcccaggctgtccctgaagtggccatcagcaggcaggaggcttgcatagccaagcagcccaagcaattgctgacatccttttgtcctctgccctaaatgccccaggttcctcctcagctggggaaagaaagaggaggaagtggaaaaagagtaggaggagggtggttctctccagggcacccttcctgctttgggatggtgactcacccagcaggccctgggagaggcaatttatcagccccaacgaagacaggccaggcctcgggctccagaaggggcagaggaggttcttctgatgcagtggccaggaggagtcaccagcagaagccaaggggcggtggaccatccctctgctgcctctgtcactttgggcctttctttagtacaacattgtcatactcagttcctggctgccagccagaagcagagaaatcctgcccggctggctggacatgctggaggccaacagggtccctgtcagctgtcgcctgcctcctccatgcctcaccccggggctcctgcgggctgtcataaaagggacagggcagccactcctcggcctcaatctatatgtggtcagggtccagggggcagggtctcctcaatggctgccgacagagggttcgcacagagctgatgaggggacggcaagaagcccctgaaagtagttccccaagaaccgggcgacggatggatgggccgggttactctccctccggggcc

SEQ ID NO: 102303 - DNA, 654 bp, Homo Sapiens
agtctgacatagatgtgggccagtcataatatgaattggaataagaataaagctagatgtataagtctcgttaacctataaaatataagtgtgagttttctgttacgcaaattatccatgttagcacatttggaacaaatgtataaatgtactttctgaataaagtcaaaagtctaacttgtttatagttccataatgttttaatgtttaattatattgtgtatttttctccctttccccttactctccaaaatcaccaaatctggaaaacaggctgattgtatctgtctatgagcaaaggaaacctgaaggaaccaagggcctggctggacagagttgtcatgtgtctgcctgtctacacttgctgtgcagaacatccgctcacctgtacagcaggcacagacaggcagtcacatgacaacccagcctgaatgacaaccagccattgaaagaaagcagccctcacaccatagcatctacaccaagagctacaaccaaaatgaggggctcgggggcctggggttttaatctgttggtttaatacttaactcatgtattattttattttgattcaagtattaaaacccaccaaaagtaaagtgagtggtgcctatgaaatataataaaacccatttctgaaaatgaacctcgtgc

SEQ ID NO: 102304 - DNA, 395 bp, Homo Sapiens
ttttggtagtaatgatcataaaaacaacaatagttattatttattaaaattacacaatattccagttacactttcaaagactttacatgtaccaaacatttaatttccatgatagcagtctcaggtagatgtgattatccttatgtacaaataatgcacatagtgtctgtgtgctggacaacgcacaggggtagtgagcctttggcccagtgtctcacagggaggagggcgggggatggtggggacaactggtagagtgggcggcatgaccaaaggctttctcacgtgttacattagcagggttattccacagatgccacggagtaaagacagaatggtactggtagtctttatgtattcattaaactaacccacacaataaaaacatctacacc

SEQ ID NO: 102305 - DNA, 576 bp, Homo Sapiens
atcggcacgaggtttatagataaaaaactatatttatatacacacatacatagagatccttcaaccaagaagaggcaaaggatccagggtcctctgtggtgccccttggcctggcacaggaaagccaggaggcaccagctgtcttgggaatcatctcgggaaatgcagtgctgagctagtgtgccatggatggggggtctccaacagcccactccttccgaggaaggtggagctatgatgaaccagggcagccctcacccgagctttccacacatcctgaaatgcaagctgtacctgatggagctttgaaactaaaacccaaagtgcagatacaaaaggatcccctgataggcctgggggactgactccttggggaagagttccaagagcatcatgcagcaggggccggggaagccagtagggaggacatacacccacagcccccaggcccggaagacaggtgtcatggacacagaggcctgctcagccacaggagaggggctgggctctgtcccctcctcaggtctctctcaggcaggggaagccaaaaggccagggtgaggctcgaatcaaaac

SEQ ID NO: 102306 - DNA, 443 bp, Homo Sapiens
  misc_feature (431)..(431): n is a, c, g, or t
gttggattaacctccatttcagaaatgagggaagtgaggcttgcagaggtggcacgcccgagataaaggagtgactgagtggcaaagctgagacttgaaccctaaactgtcggctcccgtgttcctgtgtgccacggtgctgtgtgagaagtgggaacggtgagttccctgctgggctcagtatggaggcaaaccgctttctgcaacacattcctatgctctcggacagcttaattgacttctgtgccttaattttctcatccgtgaaagagtataataataacaacaataataataatagactagaaattggccaggcccttggtgaggactcggtgcgtgctacctctgatagatactaatatgtaggtatagtaggaacatcaatcatcaatattgttttgactcttttgacctctgataaaaaattntgaccatggact

SEQ ID NO: 102307 - DNA, 629 bp, Homo Sapiens
  misc_feature (84)..(84): n is a, c, g, or t
tccatgtcatgacccctgacatgtgcgtccatttgcggattggcttataaggccgagcatgtgcatgaagctttgctgtcagcngttcctgtccctcgacagtatgtgccaagctgcctttcaaggtgccagtgatgcaagtgtctcttgcacgctgcgtacagttctgtcactgactcttacacacagccctggagacggaagagtgccgggagcattctatgcaagtgtcctggcctttgcgggcgtctccacagcacaaacacgagtcagggaccacccctcttctgcttccatgattccaccaactgggtggggcagagcagtgccagggccggaggcacgccccaggtgagggcaggtggccatgccagtgagtgcactgcgttctcagttaattcatccgaaatatttctaagtttcttgattattgcagttgcatccccaagataatgccgccctcaccaagtagaaggcacatgtgctctgatggcccctcccacactggggtcagggcacagcaacttagcgaggcgacgtgggggctcagaggacctcggaccaggctcggcacatggggcttctccagccagccagggggaagcaccctgcagactgctaacttttgc

SEQ ID NO: 102308 - DNA, 253 bp, Homo Sapiens
cggcatgagccactgtgcccagccatctattttctttttcaaggagcagcagggtgatggtctagatgatcctgcaaagtccctccctggactataacatcggagtgctcatacttgggttattccggaagagacaagaagaaatagcctaaaacaaaagctttctagggggttgccatgaacatattctcagtgatagctgttcatgaaggcaacctcatgggttcctagtaacaagtcctgccgtgacgtt

SEQ ID NO: 102309 - DNA, 432 bp, Homo Sapiens
gtgattaaggccacatccatcacctgtgacctccagcttgtggaccattctgtcttgttggtgggttttggcagcgcccagtcacaggaggggatatgggcagagacagtctcatcgcagtctcagcctcagcctccacaccccaccccatactggatcctgaagaactcctggggggcccaatggggagagaagggctatttccggctgcaccgagggagcaatacctgtggcatcaccaagttcccgctcactgcccgtgtgcagaaaccggatatgaagccccgagtctcctgccctccctgaacccacctggccccctcagctctgtcctgttaggccaactgcctccttgccagccccacccccaggtttttgcccatcctcccaatctcaatacagcctgaataaaccaagacaaaacctatgaaa

SEQ ID NO: 102310 - DNA, 239 bp, Homo Sapiens
gggtgaggcactgtgcccagccccaagtaagatctttttaaaataaagtttcagtgacctagaattcagccattacataaatgatacctaacccatcaggtggaggaaaagggaggaaggagaggagaaagcggaaggattagctaagaaacctaaccttgcaatcatgagttctgatttacagagagaacctgatctgccaaagtaaggaagaaaacaccaccagttagggagccgaa

SEQ ID NO: 102311 - DNA, 329 bp, Homo Sapiens
gagttcaagcgacccttctgcctcagtctcccattccccagcctcagcctccccacaatttttaaaacttgtgtcatgtgcaatttactggaacagaaattataatattggcttatcatatgagtgtattagaatagagattataatacttgacacgacatgttcctagcagaggcggggcactgagaagtagccagaccctcctgcagagcctggcttaatctctcagtcattgaagagtttaactgtgatgtctagccagagccagctccccacctccacacctgagaatgcagccagcgacctgggcgacccccagcacgaacccc

SEQ ID NO: 102312 - DNA, 208 bp, Homo Sapiens
aactttctggattagttgtaggttgcaactgtggcctgtagcctgactctacttccccacttctctcctgctacaacacacaccttaggaaggcagtttgattactgatgcagcggtccccagaaagggattgagcttttgcaggaagttcattggatgatgatcgggaaagaggttatagaaaaccattttgaaaatttaggatttc

SEQ ID NO: 102313 - DNA, 419 bp, Homo Sapiens
cccctggcttgctcaggtctggaaagagcccagatgggggctgcagcatgggccttggttgaagcctctaatcctgtaagggctgctttggcccaagaggccttagaaacccggtgtaagcctcaatcggtagccggtctggcctctttctcacacttaaccgacacagctcttgctctgatctcatcccaagtcatctcgctggaggacaattaactcggcttcaaaatggccctcagcctggagccaagatttaggagcaaggcccgtctagttgggagagaagatgtttttggagagttgaagacttcttgaaaaagttcgaaaagttcttgaaaaagcaaaggatgcttctttcggtctgggagagggaaaacctctcccagggcaaaaggaactaagaccaggggtgggttaaa

SEQ ID NO: 102314 - DNA, 588 bp, Homo Sapiens
  misc_feature (192)..(294): n is a, c, g, or t
attgtccatccagacaatgtgtttgactgcctaccaccttcaagacattgcattaggaaccagggatttggcgtgaccggcaaaaatagctaacactttcatagcatttgcaatttgccgagtgatgttttcagtgttttgcatatattaacccactgaagccttacaaacctctgagggaaactgttgttnnnnnnnnnnnnnnnnnnnnnnnnnnnnnnnnnnnnnnnnnnnnnnnnnnnnnnnnnnnnnnnnnnnnnnnnnnnnnnnnnnnnnnnnnnnnnnnnnnnnnnnggggtccctaatgcccctggccacagacccataccagtccctggccttttaggaaccaggccccacagcaagaggtgagtggcaggcgagcaagcattactgcctgagctccacctcctgtcatatcagtggcctcataagattctcacaggagcacaaaccctattgtgaattgcatatgcaaggatctaggttgcatgctccttatgagaatctaatgcctgatgatctgaggtggaacagtttcatcctgaaaccatccaaccccgcccctcccacccccatccattaaaa

SEQ ID NO: 102315 - DNA, 519 bp, Homo Sapiens
catgatcgatcgagctcggtaccgaacgggtgatgcggttgtatctggggacgtggtggaggatgcatgttctgttctctccaggaagagctagtggttttctacccgtgtgtgttggtgagcaatgtgcagaggcaggggctccctcaggcccctgattcccagcccacagctctttctactctgcagacagagttccttggagactggccctgcattcaggcagggagcagaggggtccctgcctgcagcacccagagctgaacctgaagctacaaagatgggctgatgaggtggcccatgaggtgccagcaacatcccaaccccctggtctccccagtgagtcagggcactgatttgctatagctggagctacatgcacctctcctcccctcagccaccttttaggggagaaaggagggcagatttgtaacctctggttctctgcagggatcctgggctggaagaaagttcataaatggatgaatgccttttaaaactccagcttttccaagcatc

SEQ ID NO: 102316 - DNA, 696 bp, Homo Sapiens
aggtgaaagggggctggtgtggccagaccggtgtgctgtggtggtggagggagtggggtgggaggataaggtgggtggggcagggcccagggagccccaggctcgggccaggagccagggttaaggcaaccattgccagccctacccagaaatgcagggccacgactccaggcccctcaggctaggggccaccgcggcagctgtgggcagaaggggctcacacatgagagaaggcatggctcttgcagagaggcctgtccttcttggagtagaaggtctttccttccaggttgatctgacatatcgcacagacgaagcaggtgtcatgccagctgaagcccagggcctccaggaagcggtccccagcgtcgatcttgaagtcacagccatggcatttcgtgccaaacatcttctcatagtctcgctcgcaatagggcacgccctcctccatgtagaaggccctgttccggatgggcgtcttgcaggcagcacaggtaaagcagtgcacgtgccaggtcatcttcagggcgtgcatgatctcgcctgtaatcttcttcttgcacttggcacagctgggtgcatagcgcacgtcatagcatggtgggcagaagatggcgcccttctcctcaaagaagccaccctcttccaggaccttcccacactggctacccacaaccacctgcgggatcctctaga

SEQ ID NO: 102317 - DNA, 678 bp, Homo Sapiens
tagctcaaaacagtaatttatttttactcataagtctgcaatttgggtggggatggctcatttctgcgctacacagcgtcacccgatgcctccactggaactgagtatccacttccagaatgaattatcttcattactggcaaattggtgttgggtgtcagctaggagctccactagggctgccagctggggatctcaaattctgtctctgtgtggttctccatgtggttacctggacttcctcacagcatggcaggtgcattcaaaaagtccctggcagaagatcaaggttttttggtgatcttgtgactaaaattctacaacatcacatatactgtattctggttagtcaaagcagtgactaaaggccagtccagattcaatgggggaggaggccacaagggaatttgcagccattttaaaggtctaccacacttctcctctctaaccataaaatatttgcatttctcacacatgcaaaagacattcaccttcccccaaggcccccagaagtctcagcctattttaacatcaggattagatctgaggaccaggatttcatcagctaaatcaggtctaggtggagatgaggctcctcgagtgaagctccttgagtacagagcctctagatctcaggacctatgaaataaagaaacaaattatatgcccccacatacc

SEQ ID NO: 102318 - DNA, 856 bp, Homo Sapiens
caattttaagctcatcagctatcactagtgttagcatattttatgtgtggcccaagacaattattttcctaatgtggtccagggaagccaaaagattggacaccctgatatacttaattaccagggtaatattcctaacaccatcacttttacttgacaattctcctgctctaaaagttatgaacctgacattcttggtcttacacaatctggacccagtctactcttctataaccatcttccacttaatttacaaatctttattaaggcacaggtactcctacttatcccctattgcctctctcatgctgaatcaatcatgccaaaagctaagaaaacatgagcatgcttgggactaaagaaacagaactgaggatttcctacacatcctaactgcaaggacagtccatcaaaagccagagataagtatttttatttgctctttatttcttaaaataatttccccaattttgttaacccctacctcaaatgactttagaggtattttaaaggatatgtaatatagttactaagcatttccactgattgtagctgaaggattttctaatgtctattacatgaaacttctccttaaactctcttttaacgaaactgtcattttcctttccagaatggtcttgtcttttctttctcctatatatcgcatataaaatcagcggccaaatcttctagatcaaacatattcatttcatccattccttcaattatccagtcattcaatcaacattattatgtgtaaagtatgacccacttgcattcctagacatggaagatccaaaattaatgtgaataataatctagtgaaaagataagcatggacaaaagtaattattag

SEQ ID NO: 102319 - DNA, 587 bp, Homo Sapiens
ctcatttatccttttctttatttgccaaatgtctatgtatcttaaagtatctgggcttcaacatcacagtattcttagcacaaaacataagggaaaagatgctcacttcccatctgaacattcattcacaagctggtagtgcagttctgcccacattggtcctctgcattgaagtacctgctgaacgaggggctgcaggcattcttggtttcccaaagctatattccagtagatacagggactttttggtagttttcagagctagaaagcacacacagatgggaggcactggtttctaggatggcttcacaacagagggcacagttggctaaagtcaattcctgacccagacattgaccatgaagtgttcttggggcaagtccagttgacctcgatagcctcgctgattgttgcttggagggtaggtgaaaaagacacggtttctttcttcaggcagtctgggtccagagttcaaggagttttacagtattggaagaacaatgaaactatatacaaggcaaaatgtgaaaaattctactacagatgtacaaagtgaacagtagaacaaaacagtgtgtggggttggg

SEQ ID NO: 102320 - DNA, 484 bp, Homo Sapiens
tctctttctaactatataggatctaacttgtgtcctgaagccagacacactacaaagcaaaccattaagacagtgagtcccaagaatttttaactcaagattttcatgtaatggctcacttagaaaatactgaaggaaagtcagctggttgaactgaagaagctgctcctggctggagatactcggcatcagaacttcagcctcatgcatccataccttaacccctctgcagttcaccagctgggaagctcccaattaataacattaagtggaaaaagactaaaaatttcattattaccaaaatgagtacaacaaggcattcaatgaactctaacttctgtatttcattaagattttgggaaaataaacttggaagttttatttcttaatatgataatctgtgggtattttaaaacagaaactaagagtacacacaaaccaaaagtgttccctttataatacaataaagatgcttcttgccaaa

SEQ ID NO: 102321 - DNA, 730 bp, Homo Sapiens
tatgtggcggcttttctggagatgaggtcatttggagtagaacggaaataaactgagatgtttgaccaccaagtagctaggcaaacctttggagaatgtagtgcgagacgaggtcttcggtttattgtttggctggtaaattccctttgaatgcggggcatttatgttgttcatatatccttgtctgcttgaacagggtgattaaacttctattgagaaggccttcaaataatccgccatccatgctatcatttctgaacatgcatgctaaataaatgcagaatgcttataattgtaactataatttcaagacaaataccacatgccttctgactgaatctcttccatagaggaattccagggctgccactgacttagttctccatcctcctagccaacctgcttctcctcttgtattctttctttcagtgaattgtaggcaccacccggtcattgaaactaaatatctgggatcatcctagtgtcttctcccatattgctctgacaacaaataaccaccacaggctgcccatgtacttcctgaacctgtcttgaatttgttttctcctctcatcctcaggactcctgcctttaaaaaacatctctcctctgcatcatctcagcagcttcctaactgatctccttgtctccattttgctccgtatccacccccgaatccgttcccattcaggatctctccaaaaataaatctgaccatctaatggacctg

SEQ ID NO: 102322 - DNA, 707 bp, Homo Sapiens
tggatcccaaaaagggaattcagtttctaatagcaaaatgacctgctacagagttccccagaagacgtcgcccagttcctttataataggagaaggcctaaataagaccgtcattggggactacctgggtgaaagggatgaatttaatattaaagttcttcaagcctttgttgaactccatgagtttgctgatctcaaccttgtacaagccttaaggcagttcttatggagcttcaggctgcccggggaggcgcagaagattgatcgcatgatggaggctttcgcttctcgctactgcctgtgcaaccccggggtcttccagtccacaggtcagtgcagagcccacagcctggccccttgccaggcacagcctccagctctggagggggcggcccctgtgggcacagcccagcgtgtgttcctggggacctgccttccctgagcgaggacgacctgtgggccgggcacctcttgcaggcgggcccccagcacgcggggtcccactgtccactggaggttctggctgagcccagcaccccggactcgttgcagacacgtgctacgtgctgtcattcgccatcatcatgctcaacaccagcctccacaaccacaacgtgcgtgacaagcccacggcagaacggttcatcgccatgaaccgcggcatcaacgagggcggggacctccctgaggagctgctgagggtgagc

SEQ ID NO: 102323 - DNA, 695 bp, Homo Sapiens
  misc_feature (82)..(90): n is a, c, g, or t
  misc_feature (92)..(95): n is a, c, g, or t
  misc_feature (113)..(114): n is a, c, g, or t
  misc_feature (132)..(132): n is a, c, g, or t
gttggtggtgaaccccccaacgcatgaattgatttcgcacaatgctatccaaatccgacaaagggctttataatgttcttannnnnnnnntnnnnacctacgtgctggggttnnctcgcctgcgtggggatnctggtgttaacccaaacctaggattttgttaacctaattcacaaagttctaagacccttaaacagctaacaagaaactaaatggaacaacatgaatgtttttttcctctactaaagagtgcttcgtatcatctgttcttacattaatgttaaattatttgtactattttaccattatacacttcttaaccttcatccaggcaatggattaaactatcaaactgtttcaaaattgaaatgccacttccaaatcagttcaactactgtacattttgtgtgtttgtccaaatatcattaaactaaattaaatggtcaaatcatgagtcagaacaaagctagcctgttggcattaccaacatactgaaggctgattatttaagcattgctgttctgtgcctatctatttgctaattctgagcctttaggaaatcctatttggaaaaaataaacacatctctgcaagttcttttaaatagcactctgcctgtaaggacatgcttggaatgcagaaggaaatggcttacctttcttaattacagtttgatctgggatgttaatacccgg

SEQ ID NO: 102324 - DNA, 810 bp, Homo Sapiens
ctgctgcaacttcacgcgtgagctccaggctcccctggttggaaggtgccagggagtgaggcggttttaagattccttcaacatcaggattcccgatcatctcatcaaccgacttgttaagaaaactgaggcccagggaagtggctcacaattgtgtagaattgtgaggtgtcttgactgctgggccaggactgaaggacgtacgccctctcccggaatcgtctcagctacagagaaccaccttgcccaaggtcaccaccctcttgccaagggggtcacttggatctaatgattggttaatgctggggggagggggtaagtcttggcccccagcctcaacagtgatggcggtggctccggggtcatcctagcttccgagtttcgtctaggttgagggcgccatgttgggactgcatcagcttctctctctgcctggttctgcttcctttactttaccatttgttgttagtccagggcacaccccagtaaacttcctgcatgcgagttcatcttagactgcttcccagggaatcgtatgtacaacactcgggagtagagagtcactgaaacggccctagctctgagagacccctcctgaccagccatcacccctcccgctcttccttactctgatttattgtcttcgtagaatttaactctcaggtctatggccatactgccctgaatgcgcctgatcttgtctgatttcagaagctaagcagggtcgtgcccggttagtacttggatgggagaatttagtgctcgaacactattgctgtagctttctttaataaataaatttgactgcca

SEQ ID NO: 102325 - DNA, 650 bp, Homo Sapiens
  misc_feature (567)..(580): n is a, c, g, or t
ccgtttgtagagaaacactgcactaagacttgggaatctccccagctcccagggaggggtggcacacaacagccttccaacctgcttccgcctcctgctccagccctgcagcgtctgtcaattcatttctcaactcaccgcacttggatggcctgggggcagggttgctcttctgggggagggtcattcattcagttggcttttggctttcctttctccgggctgggcctggttctcttttgaacacttgtcgtgctgcagcaagagcatctttggatttggggctgtggagctgtggttcacccgcgggagtcacagccgcggcctggacctttccacctcgcaccctcgctcaccctccttcatgatgcctggaggatggcctaaagacaatttgccttgaagatgaggaaagtgtttcactgtttattttctccatgggatgtagcaggcaagcatgcttaggacagaaaaccactgagtttactcaggtaaatgcgggcctaatacaagagtattgggttccaatgttggttaaccaatgcagttaatacgcaatgcttctannnnnnnnnnnnnngtaatcttatttagaagtttcaaacaaaaagacatagtctgctgatcaataaacatggagctgccctcaa

SEQ ID NO: 102326 - DNA, 599 bp, Homo Sapiens
  misc_feature (488)..(535): n is a, c, g, or t
ccccctccaaaaatactaccccagaccgaagttacaacccggccgaaaaatcccggatgcaccgcagctcgaccgacttttcagaaatttaatactcccaaatcggattgcgaagataggattacggatttgcaacattttggaggactaattaaaggctaggccaaacacatttacatagacttagcacgcttctgctcaaatttcgagtctatttcttttgaactacttttccaaaatggcaaaaccaaaaatataaaatttgcagggcagcccggagcttacgtttacaccaaatgctgctctttaattgcagctacctctccccacagaaccccttcccgccagctcagcgatccgagcaagacgcggctctcttttccgagcaactcttgagtccaaggcctgggcgaagctggcggagacaatcgcccaagtttgaaggggccgcgaagcttggcgggggaggtcggtgttggcgcctaggnnnnnnnnnnnnnnnnnnnnnnnnnnnnnnnnnnnnnnnnnnnnnnnntcgcccgccgcggatcccgctcacttaccacgtacgaggagaaggcggcggcggcggcggccgc

SEQ ID NO: 102327 - DNA, 808 bp, Homo Sapiens
ggaatcctcctactctacgaggaccaaaaaccaaggacgccaagccatacaaattcagcacagctgactcagagaggtggaaaggaaatcaggacaaaaagccaaaatgtcttctggaggaggatattgccagccagaataactgtgagagatgcaagcatagtcctggaaacaaacagcacaattcctttaaagccctaaaggatgaagatcttcctgtagagaagtatttaatggaaaggcagcctgtaggtgagccagctgccgaccaggtagctatggatgtgatgcacagccccatcctccaactggaaaggaaacacaaagtctcaagtgacagcaaccagacagagactactgcagagaagttgccagaggactcttttcctaaaaaacaagcaaaaacaggtttatataggccctccaccgaaagaataaggttttatccaacaatgcaagcagccaaaagccgactcactcaagctgcagaaatacaccaataacagtgagaagccatctgggaagagacaatgcaaaaccaagcacttgatatctcaggacctgaggcaggggttcctgctaacagggaagtgctacgttgagaatgctgatggcaagatacctcttggcacttgttttctccttgggcttatatagaggctatttcccctcaccccaacattccccacctacctgcttttctcaaggatgtaaagcctttcttttactggactcctaacttccctgtcttagaggggaagtcttccttgatggtgataaaattggaaactattaaaatttaagttca

SEQ ID NO: 102328 - DNA, 521 bp, Homo Sapiens
gaaccggggcctggtgctgccctacacctacctagaccctcccctcatcgagaacagcgtctccatctaaatcccaggggaacacaggcccagatgacatccctttgaccacatcgctctaggataactggcacccagagaaaaggactcctcagaaaaaacaggcccccatgtgcctctcctgggacaaccagactctgtaactcacccccaccaccatacacacacacaaaaacagaaacaaaatcaaaacagagaaagcagaaaatctaccaagaacagagtctcaggacagaaccactgagtcttttggaggctccaagcctcaaagtgcccgcagagcccaccttgagggttttgctagttggttttgttttgcgttttacagccgtggggggaagcacataatcccgccccggggcccactagcatccactgattggaccttatggtcacccaactcaaggacagccaccaagaagtggctgccaaagagactgggcgcagtggctcatgcccat

SEQ ID NO: 102329 - DNA, 720 bp, Homo Sapiens
ctgggatgacaggcatgagtcaccacgcccagacctataaaggctttaatcttagattctatgtattttaaatggtaggatacaatcccaaccagaagctaactcttggaaatttcacagctgataaatagacatctctgcttcagaatctttcttaactgaatgttttcaccaaatctttctgagctactgatcttcacttgatcttaaaataacaaactgatctgaaccttaatgaactgctgcatgacctggtgtttctatactgctaatgactgatgcaagtagacacatgagtgatgagctgtgacaatctatatcaatcattacacaatctagttcacttactgcacataatcatggtagaaaataaatgaaaacaaaattttaaggtataaaaaattagtgtacctcattattatttctgggtaaattttttgtcttttaaaaaatagtgcctaaaacattgtcttatctatgtgacattcagtgactactaattgatggttattgtgttgaattactcctattaaatgtgggttccacatacttggtttcaatttatacattccatggaagaatagacatgttttattatcatcatctcttggcattttttttcaggataacagccaatggaagtaggataagtgtaaactttttgaagtatgttattaatgttatttgattttaaataatgaataaaagaatgagaatgag

SEQ ID NO: 102330 - DNA, 585 bp, Homo Sapiens
atttttttaaaaaataattcttttgcagaaatatttatgattacagtaatcattgctatgtttcagaatactttagagctttaattatgtcatttgggcttcagccaccagggaggtaagtgtggtgaaacagaaacccagagaagggaagaaacatatcctgggtcatatgacgactaaatagcagagcctggattcacactctggcttgttttgccctagtgctcaggccacttcactgaggttcttctactgcaaatacttcctgttacttatttataccatgctctttcattcccctgtactttttctccaaccggttcctttttctttaggagtacccttcttgtttgatcatgtcgtgagtattttgaaattcacctcagacttacagataaccatgatggagtaaacataggcatttaactctgcttcctacagaaacctcattaaaataacaatgaaagaataaaaaggtataaacccacagggactaactaggagaatagaagcaggtataatagcaagtgtgagttgtcaacagaattttggataagtgtggcttgtagacgaaaaaggtaaaaa

SEQ ID NO: 102331 - DNA, 206 bp, Homo Sapiens
ttagagtagtgcttgtcacatagtaagcctttgttgttgttagcgcttactgtgtaacaaatcactgcaggctcaaaacaacagtcatttattcagctcataaatctgcaagttaggacagttggccctctgtatctgtgggtaccacactggagaattcagcaacggtggatagaacatattcttacaaaaaaaattacaataaa

SEQ ID NO: 102332 - DNA, 645 bp, Homo Sapiens
gcggccgcgggcgcccagcggctctgggacccgcaggggggcagcagtgccaaccttctgccgcgccgggagagatgcgcgcgagcccctccgctctctgcccagcctttccttccagcctcgctcgcgcccctgtctcaaaggcctcataggactcccagagtctcctatagtcgggagcccccagcccccttccggacatggagtgattggtggggaggcggcggttgggaaaagggggtcggtcaaccgattgattccagtttccccttcccaagtcaggctctccaaggtctggaaatgctcagggcggagggggagacatcgggaggcctgggacctgcagaagcctgagaaagtgaagttggtgccaaggagcgtgcgttctttgtttcttcttttttccttcggagcccagcttgtaaagagtagaagaaccggacattggtggaggaattcaaacaagagagcccggaggcgtcctctgctgtggcccagagctagcgcctactccaagaagctcagctggggttaacaggcttctgttaaaatttcccgggcactgggaaaatttcaggtgccttcgcctcggtggactcctttccctgctaacaaaattattaaaaataagattttgcaactgcg

SEQ ID NO: 102333 - DNA, 631 bp, Homo Sapiens
ggacccacaggtccagggtcctttctccaccagcacccgcgagaggggtagcacagccctccgggccggcctgctgtctgggtcccaggaaagggacgtttagtgttgggggcagtctgtggggacagtcaccgctcagccttggacagccggttcgtagttttcctttgttgcgctgggcttggcctgagggcagctgccccgggtggccatggccgaccgctcctcgctgaggccggggggtggccgtggcgccgggggctgcgcagcccagagtctatgcatggccccctgttcgagtggggatccagcctggcaaatgggtggggcgtcccattacattctagaggcgctccccacaggagctgaggcccgcccggccgcggcctgcgctcccgaggtatctaggaggccgcaggagcgaccatcccttccctaacgccccctgagccctgcgcctgccgctgaatcgcgcgtccacacaggtccacagggtcgtggggagagggcccggcaggcggggctcacaccaggccaggcatctgcgcccgcagaaagggcacggaggcggcggccgggaaggcggccagcgggtaggcgagggccccggagaagccgagcagcggtgggg

SEQ ID NO: 102334 - DNA, 556 bp, Homo Sapiens
ccgaccccaaactacttctgggaaaccaccggtatccactgctttggggaactctggatgctcgttatgccaaacgctctcaaagtaagcaaatccccaactgccgttcccctccatgggtaattcttagggtctgggaggtgagctcgcccgccgaggcagaactaagcgagtcgcctggagaggcgtgaagggagcctgcacgtgtcccccgcggcttccccaccgccccaagagcggggcatgtacgagaccgcgctgtggggttcagatttaggaaggacgaccgcgtcgcctgcctccctccctcgcccagagccgggagcaatgctggggcacgaaagaggacttgggaaggatccggtccttactttccccgcgggtcccggacccgcagcccccgggttgtgaggcggaagccaaaggggcgaacccagcggagccggcgtgcacagaccctgccccgcggtccaagaggggtgcctccggcccgggacagcggggctcccggagcccgaaagccccacgagcggcgacagcggggcccggcgctgac

SEQ ID NO: 102335 - DNA, 665 bp, Homo Sapiens
agcctgaccaaggtcaccacgtcacttccttcatgtggctccaggttcggcctatgccccgtcagttctgtacagcttggcacatggccctagacatgggagacaacgtcctaggagtgaaccttcctaagtatctggggctaagcccctaaacatacagagattcccaaaccatctgcattcagctactaagctttcttcaaaaggatcatgttgatgttgaaaaggggagatgtgaaattaatccaaactgaaagctgttggaaccgtacctgattttgagccttgagaggaacgtggctgtggggcctgcgtcgcatggtgtgaagctgcaccttctgcttctttattctgggtcaaatctcttcctcattcttgtcctgtaatgattaggaaagactgaatggtaccagaggtgagaccgcctcaagaccattacccttccttatgggatgttaaaacaagcttccttagtgtagcgagctgtgaccaatcaagtcaaatcgctataacctatgtcttgatcttgttggaaaatgctgcaacctgttaaacctctgcctctgactatgtaaatgagactttaactttccattttgagagtctgtgtttcctatgtgactatcctccaacttcgtgttcaaataaactccacgattcatcat

SEQ ID NO: 102336 - DNA, 960 bp, Homo Sapiens
gactggcattgtctggagacggcttcctggaagaggagactccagcagagccctgaagtgtggacaagcttccattcactgcaaattcgtgagcacactctggtgtcaggatctagtaaggaaatgggcttgagcagagcagggggtacctgtggggttcttctcttcattttcaccaccacaaagctggtctaagctgccatcaattcccacctggacaactgcaaaagccttccagctgttcctgcttccactcttgctcctctacaattcattctgcacgcagaagtcagaatcaaaatcaaagttcatcatgtcattctcttgacttgtggcttccctttgctcttaagctaaaagtaaaaatcattatcatggctacaaagtcttgtgtggtctgggccacatcctgtgcaaggctccctttcattgtctatattccagtcaagctggccttcaaaatttcagcacattgggtctttctgccacaggcccttgcacatacatgcttttccctctgtacatgtgattttctttcatccccgctttccaaagctaactctgactcatccttcagactgcatcttaatgattacttccttctggaagactcccctaattttcacaactagatgagctctcccttatatgttgaaaacaagtatttcttgtgtgaacagaaatgtttaatgtctgccttcccaactcagccacaagctctgtgaggatggggactcagtctttgcatccctcagagcctagcatagtctcagttaatacgtgatagctggagcgtgacatttcattaggaacagtgaggctagttgagaaattatacctcaccagtatataggagagtaccattaggaattcttaatgggatgaaaacctgaattcatgtctagaccctgccacctgctggctgtgctgttttaaataaattgcagatcctctcaaaaa

SEQ ID NO: 102337 - DNA, 484 bp, Homo Sapiens
  misc_feature (21)..(21): n is a, c, g, or t
gcagcagaaggggcagctggnagcagcctgtgtttgccccagctccaggccaggtccaagacattcaaccagccctgcccacaaagggagaagtattgcttcctgtagagcaccagcagcagaagcaggaggtgcagtggccacccaaacataaataaccacccgcagtgtccagaggccctcagatcgtctcatacaagggaagagagagccactggctccacttatttcgggtccactaggtggcccgtctcatctgtgaacttgactctgtccctctacatgtctctttaatggggtgagggtgggggagagagggaattattgtccagtgccaaccccaatgaccccaatcccaacctcaggtgagcatggcctctacttgagggactattgttactataggaatccttacttccccagtattgaagctgaatcagtgagtgtgtacaatgatacataataaatcctggaagtcttggga

SEQ ID NO: 102338 - DNA, 558 bp, Homo Sapiens
tgatacatatttgttaccatgtatgtcactatgaacctcctctggaggatggagaagtcaaataccttaattattccaacacaagcttgcgtgaacagataatcatcactacgagtatattgtgtgcctgctaagcaccacgcctgagataagcatttgctgtggtttgaatgtcccctccaaagctcatgctaaaatttaattgccattgcaacagtgttgcaaggtgagaactttaagagatgatcaggtcatgagaactctgccctcgtgaatggattaatacccttatcgcagtagtggacccccttttctcttgctgtctgtctctcatgttagcttgtgcttcctcctttcaccatgggataacacagcaagaagcccctcaccagatgctggcaccttgctattggacttccggcctccagaactgagaaatacatgtcttttccttataaattacccagtctgtggtattctgttatagcggcagaaaatggactaagacggcattttgcatacattatctgtcttattaaaaataatgtttttgcccag

SEQ ID NO: 102339 - DNA, 504 bp, Homo Sapiens
gtttttctaaagggctattcatctgtttgctccagttttctgttttgttttgttcttagtggtcacagtcatctaaccaaagtgatctagtgtgatagatcgaaattaacatatttttgaccatggaaggaaataaggaaattcaacccaaatttcccaagacggctgaaagacaggttttctggaaactgttaagataaactgtaatccagacacctaattcttcagttcactactcatgtgatactgattcccacattaaggttgaacaacatggctcagagtcttgttcaagagaaagtgatcaccgagctgtcacatcagcaaatatgtagtcaaggcagccaggccaactagaccacacttattggtctagtttgtccgttttatatgacattgaaaacttgtgtgtgcaacttttgggggacaggaatcacttaaaatcatatttatttggctttttatttaaaggattctgtcacaagtcttattgaaaagtagatt

SEQ ID NO: 102340 - DNA, 487 bp, Homo Sapiens
gaatatccacacatacacactgagtgactactagcacaagacaagacatacagagttccactctccccaggtacacagggttgagatccaatgggaaagcagtgagccagctgagtcaggggtaagaggagccagtgaccagagaaatgacccgggacatatgaggccagaagccaaaactatggcatcagtagggagactgcagaaggcggcagggtcctggatcaccaaggaccttgaaagcatgtggaagactttgatcaatgggggaatcattaaggggttttgcattccggaactatcatcagcttcagcggggggcagggggtaggatagaggcagggaggcaggaagttctcgcagggtccaggcaagagatggtggagtgtggtcctggggaagggggcagtggacggatctgagggaggttcagttaggatgggcaaggattgagatctggctggatcctggtgacaggggagatgag

SEQ ID NO: 102341 - DNA, 472 bp, Homo Sapiens
acccgcaagggccggctggagctggtcaacagccgcttcacccagcccaccccggaggacctggtctatgtggaccccagccccgactactgcctgcgcaacgagagcacgggctccctgggcacgcagggccgcctctgcaacaagacctcggagggcatggatggctgtgagctcatgtgctgcgggcgtggctacaaccagttcaagagcgtgcaggtggagcgctgccactgcaagttccactggtgctgcttcgtcaggtgtaagaagtgcacggagatcgtggaccagtacatctgtaaatagcccggagggcctgctcccggcccccctgcactctgcctcacaaaggtctatattatataaatctatataaatctattttatatttgtataagtaaatgggtgggtgctatacaatggaaagatgaaaatggaaaggaagagcttatttaagagacgctggaga

SEQ ID NO: 102342 - DNA, 460 bp, Homo Sapiens
cgggggaggccgccccacccttgtccccagcccagggcgtaggctctttggccgccgccacgagagagcccgtctgaatgggcagcaccgcctgatacttgggccgggggctgcagccggctccggctgcggcaggctcccccccaatgccggcttgcttggtggccgggggcggacagggcaagggcaccgaaccgccccagctctcttcctgctgcccgggggccgccccggccgggagtaacaagccccggcccttgccgccgcagccggccggggaaggcgcggggctcccgccctgggaggaggccagcgggggccccggctccttgagcttacggtgccgggggaggaagtgggcttcggccgccccaggctcgtcctcgggcccgcccagcgccgcagcccgctcgtagtccagtcgctgctcaggattgccgccggcaggggccgcggccgc

SEQ ID NO: 102343 - DNA, 324 bp, Homo Sapiens
  misc_feature (182)..(195): n is a, c, g, or t
taatgtttcctaataaaagagaagctgcattttattggtttttatttttaattttctacacgtttgagctgagtcctgagacacttagcttccctctccctcattcccggacccttccaccccactgggcccaaccatgggctcaggaccctggaattccgttttctgatttgctttgggannnnnnnnnnnnnnaagatgttacatggtgtttcgaagccagcaagttaccatcctccggtgtctcttctctccacatctgtaacttctttttccaggttttattttcagttttaaattcctaataaattatttgaaaacgtt

SEQ ID NO: 102344 - DNA, 986 bp, Homo Sapiens
  misc_feature (734)..(765): n is a, c, g, or t
aagaaagccaccatgaagggctgcttgtcgtaagggccgtctctgcccaccaggcctgcggctcgggggtggacgtggactccatcccttgtcaccacgctcagctgaagccccatgttatgctgtggagtcacaacccacagattgctagtggccgtgatgtcaaattccagccagccttcttctgaggcccatactacacgggtgtccaacaaaaacaggtcagagtctctgtgctgatgctcctgtaagacttgataaatgctgataagaaaagtttggtttttaaaactccccataacacagtccttgtagatgcggaattctgcagcagtcaccacctcaccctcaggaatctgggataagttgaacttgaactctttgtggtgtcgctgacgaggggagaactccttgtcgtactccaccaggttcacaaagctcatgaccatgtccgcgtcgttgaggaaggcgctgtcctgcgcgctggtcagtggggacgcgccgccgctgccagatccgggggccagaaggctcttgcggttgagcgggtgcgcggcgcccgggggcggctgccgacgctgggacgagctggctgcttcgtggggccaggactgctgcctctccccctccgacgccccgtcctcgtcgttgtcggcggacagggcgttgtacagatccagcatgaagaggggcgcggacttcagtcgcccgggagggggctctccgcgaggcannnnnnnnnnnnnnnnnnnnnnnnnnnnnnnncggagcgccgggggctgcggctgttggaggccgtgcaggggccggggccggtgcgggagccccagcaccgacaagatctccttctgcatctcccgcttctcctgcgtcttgagccgccggtacaggaagcccgaggaggactgcggcgacggcggcggctgctccgtgcggccggggctcccgccgtcccccagcagctgccccccggcggcggcggccgc

SEQ ID NO: 102345 - DNA, 608 bp, Homo Sapiens
agcaaaaagaaaatactgtatcatctcacattatcataactgagtgcattcatgtgcttttggtcttaaaattttactttaacgcacttaggatttgtcgtcagtaatttgttatgcactatctagactaagaataggtattaatttactagaattgtcaaatgaaatatttcaagcaaagtttgcataatgaatgcaagtttaaaccaattaaatgtgttcactttttagcaagctaagctgctccttatttctcctgtagtagacacaatcacagttaatctttgcacaatgcatcgcattctccatgcaacctaacagagcggtctgggatagagcctgaactttgggtcccttggggcccaacaggcaaggttcagatctgggctctaccacaaaccatctgtgtaacctgaacctccctagtcttcagtttcctcatctgctttaaaaaattgctagaacatagttctatgtaaatgttcggtgttaaaatttatttggtatctactgtatgtaagatatggcctctgctctcaaaaatatgtagtcccagaagtgatataatatgttcacggagatgtactattaaaaaataccccaaaaaa

SEQ ID NO: 102346 - DNA, 689 bp, Homo Sapiens
tagaattcaaaacactctctatattaaaaataaaaccacgacggagtggcagcctcgagggtctgggacactcagcagagactggaaatggcagttgtgactgggctgaggccttgtggggggaccagggcagggcctgggacagggaagggggtgagttaggaggccagtacgcccatgcggaccacctcctctgcccctgcctcccggggaccccgctgcaccccaccgtcctcggcctctacatctgagtcgctcatctccccatcagagaagtagccatcagtctcagtgtcaaaatgcaggctgaccttgggcctctcagccacagctgaaggtggtcccatcccagcatcaggcctggcacccggcaatctccgggttaccttgctctcgcggggtggccggagccggcccaaaggcttagggcttgctgcaaggccaggcacttggacatctgagtcagcagctactgaggctgcctcgtccggggtctcaggggccagtggcggggggctttcaggggtggctaggatgggacagtccccggctgcagggctggacggcaagtgagaagatgtccgacgtggtggcttcctggtaggtggcccttgcccccccttgccactgcctgcatcctggccccaggtcttcttgggggctttgtctggagtcgtccgtgatcctgg

SEQ ID NO: 102347 - DNA, 433 bp, Homo Sapiens
gcggccgccttcggagcgccgccctcctcccgaaaccggccggggcgagtggctgcaagaagctgcggtttggcccgcgggagaggggggcttccccgctggggttgtctgacgcgaacgccttcctggccccagccaggcgccctgagatgatgaaggtttaagaagcagcatcatcagcgaactgtgttttgaagatttgagggaagggctgacctcaggattttatactagttgctgacctccataacagcagacaaaattggaagcaagagtgattttggaggagtcacacttagatgtttcccttacctatttctgttctggaaatttaaaaatcttacttctcgtgacagtcctacatgaaaaattaaaaatcacaaggattcatggatggaaaactgagactcagagaatgatcacattcacatcg

SEQ ID NO: 102348 - DNA, 446 bp, Homo Sapiens
  misc_feature (189)..(199): n is a, c, g, or t
caggtcccaaaacacaaacccgaccccactttgttttcagcacagggacttggtatagaacttgtgagcatcaggtcccaaaacacaaggccaaaggccatttccttgttttcagcatgcatcttagctatgtcaggcaatggttaaatagccaagcgtgatggctatttaaagatgtactagtatttnnnnnnnnnnnttttctttgcccattttcaagaaagaaaaagacttccaatctgccttactttgctctattgtgtttacttatctggagctcttgtcacttcaatggactttttttatttatcacatgtattgtttagtatctatctactacaataatatataagctctttgaaaaaagtgtttctttcttctcttttcattaccagtttacccttaatgcagagaatagtggatggctcatagtaattgatttaaaa

SEQ ID NO: 102349 - DNA, 517 bp, Homo Sapiens
cagttcttcattctgcttgcggaccgggaggcccaggccccgcacgtccgagacaatgaaagtgatgatggtcttgacgatggtggcaaagaacgtgttgaccccgaagaccagggcacagagctctttagacagagaagatgcaatctgaaaggtggcgatgggcacgaggaactggtaggagccgcggaacagcacgaaggccgcatagcacagccagatgctgctcgggtggcgcgtgtgcgccagaaggaagaccagccccgcctgcgtggccgtgacgcccgcgatgagcagcttggaccagcgcgcccagcggatcttcacgaagcccgcggcgaaggacgtgatggcgcccagcagcgtggaggcagcatctgccgcgccgttgtagacccgcgcactgttggtggtggggtccacctcgttccacaggatgtgcacgtagtagaccaccaggtagtagccggccgagttgaagacccaccagagggaccacaggcgcagctgcggccgc

SEQ ID NO: 102350 - DNA, 576 bp, Homo Sapiens
tgtcttaaagtttctggttcccaatgtgttttcgtctacattttcttagtgtcattttcacgctggtgctgagacaggagcaaggctgctgttatcatctcattttataatgaagaagaagcaattacttcatagcaactgaagaacaggatgtggcctcagaagcaggagagctgggtggtataaggctgtcctctcaagctggtgctgtgtaggccacaaggcatctgcatgagtgactttaagactcaaagaccaaacactgagctttcttctaggggtgggtatgaagatgcttcagagctcatgcgcgttacccacgatggcatgactagcacagagctgatctctgtttctgttttgctttattccctcttgggatgatatcatccagtctttatatgttgccaatatacctcattgtgtgtaatagaaccttcttagcattaagaccttgtaaacaaaaataattcttgtgttaagttaaatcatttttgtcctaattgtaatgtgtaatcttaaagttaaataaactttgtgtatttatataataataaagctaaaaatgatataaaa

SEQ ID NO: 102351 - DNA, 558 bp, Homo Sapiens
cattggaaatgctaaaattcagttttgcctcaagattggaagtttattttctgactcattcatgaagtcatctattgagccaccattcaattattcatctattaattccttgatccttcatttatccattctgcaaacttttcttgagcaccagcacgggtggccatttgtggacttctcttcattcctatgtgttttcttatcaaagtgatccactctcgaaaggctcctttccagtctgtggttgggttcaagtcatgccagggccagggggcccatctcctcgtttagctctaggcaaaaatccaggggatctgcagtggggagcgggggcaggaagctggagggaaggcctgtgaagggtagggatgtggaaagacaaggtgacagaaggacccaataggacctttctatatctctggcttagcattttctacatcatattgtaatcgtcttatttgctagttttcttccttactgtgagtgactaacagtcatctttatcccagtgcctggtacataataagtgatcaataaatgttgattgaaaaaatgagt

SEQ ID NO: 102352 - DNA, 470 bp, Homo Sapiens
ttcgagccgcccgtggtgactcaccgctcaccacctctggctgtgcccgcaggtcggccggctgccctgcgctgccgggcagtgggggacccagagccccgtgtgcgttgggtgtcaccccagggccggctgctaggcaactcaagccgtgcccgcgccttccccaatgggacgctggagctgctggtcaccgagccgggtgatggtggcatcttcacctgcattgcggccaatgcagctggcgaggccacagctgctgtggagctgactgtgggtcccccaccacctcctcagctagccaacagcaccagctgtgaccccccgcgggacggggatcctgatgctctcaccccaccctccgctgcctctgcttctgccaaggtggccgacactgggccccctaccgaccgtggcgtccaggtgactgagcacggggccacagctgctcttgtccagtggccggatcagcg

SEQ ID NO: 102353 - DNA, 740 bp, Homo Sapiens
  misc_feature (591)..(591): n is a, c, g, or t
gcggccgccgccgcgggggagccccgggcccgcggggccaagcggcgtgggggacaggtccccaacgggcttccgcgggctcccccggccccggtgatccctcagctgaccgtgacagccgaggagcccgacgtgcccccgaccagccctgggccgccggagcgggagagggactgcctcccggcagcgggctcttcgcacctgcagcagccgcgccgcctttccacctcgtcggtctcctccactggctcctcgtcgctgctcgaggactcggaggacgacctgctgagcgacagtgagagccggagccgcggcaacgtgcagctggaagcgggcgaggacgtgggtcagaaaaaccactggcagaagatccggaccatggtcaatctgccggtcataagccctttcaagaagcgctacgcctgggtgcagctggcagggcacactgggagttttaaggcggcgggcaccagcgggctgatcctgaagcgctgctcggagccggagcgctactgcctggcgcggctgatggctgacgcgctgcgcggctgcgtgcctgccttccacggcgtggtggagcgcgacggcganagctacctgcagctgcaggacctgctcgatggcttcgacggaccttgtgtgctcgactgcagaatggcgtgatgacttacctagaggatgagctgacgaatgcccgtgagccgcccaagctgcggaatgacatgtctagaaaatgctgg

SEQ ID NO: 102354 - DNA, 540 bp, Homo Sapiens
  misc_feature (454)..(454): n is a, c, g, or t
  misc_feature (467)..(467): n is a, c, g, or t
  misc_feature (498)..(498): n is a, c, g, or t
gcggccgcgtgactcactcgatcctgcgggcggcgtggagcactcgctcgctccctgcccggagccgccaccttccctcgctttccctagccggaattgcacgagagtgtcccttctggtatccctgggaagctcagcttcaagagccttcgcaggctccaggagctgggcggcgtcccccagtcagggggaacttgcgttgcggctccagcccttggggtctacttgctgtctgcgcgtccgcggcctgctggcccacggcgcagggggcgccgcccccctctaccggaccttggtgcgctgcaccaagcttcccgctcggagcaaggggttgggacgacggaggctcctcttagtaaaagggtggcgttattggggttcagtaccctgagtgggcgtcgagttggggagatttctggaaaatgcgtgtggggtagaatggatgggagagaangcaagcaaagtgngaatcggggacggggagcgagcgaccagatncactccaagtataacatgggatcccacgtctggagaggagtc

SEQ ID NO: 102355 - DNA, 729 bp, Homo Sapiens
gcggccgccagtcctgggtctcccggctcaggtagtgccaggatgctgcgggcatggcggacagctgtcctcggtctggaggcgccatcctggctttcaaatctgctccagaggttatctggggaggggctgctccctcacagagggagcctctaagcccaccaggcgggcactttcagcccaaagcctccgggccacctcctcatcctcagcctcgggggccggggccttctgtttgagtccatcgaagtactttccggaaacatccgccagttcctccggcacggccaggtatgtgctgggctgggcggccagctcggggctcttgaccagcagccagaagatgggcccgagtgtggtgctggagaaggtggagccatggatgcccgtgtgtctgcccagctctgtcctggccacgccggggtgcagggcgttgacagtcacaccagagccttgcagccgccggctcaactccttggtgaagaggacgatggcgagcttgctctggcagtaggcggctttggtgttaaacttcctcgtcggccagttcaagtcgtcaaagtctatgtgcccagcaacatgggccagggacgagaggttgatgatccgcgaaggggttgaggctttcagctcgtccagcagcaagtttgtcaagagaaagtgacctggattaaggatgatgaaaaggtcacttttgactcacacctaaaatcccagcactttgggagg

SEQ ID NO: 102356 - DNA, 551 bp, Homo Sapiens
gcggccgccgccgccggggggcacacgcactcgcaccccagcccgggcaacccgggctacatgatcccgtgcaactgcagcgcgtggcccagccccgggctgcagccgccgctcgcctacatcctgctgccgggcatgggcaagccccagctggacccctaccccgcggcctacgctgccgcgctatgaccccgcggggccgcctcgcgaggaccggtgtgcacacgtgtacatatgtataggtacgagcgctgcggcctccccgtgcgccctcccgcgaccgggggcccggtttgtatgtacatagaatgtataggtgccaggtagaggcagagaggccaggcggggcaggagtggccaagcgcgcaagggcgcgggcgagcaggcctgtgaattcgcaggatcatttcagacccgcacttcggcagccaactcgaaagcaggcggttgtgtgcggcagcagttggcgtttgctttgcacttcggaacctgttgcgttttgacccacggaggtggaggagtaactttttgacatgttggcctttccagtt

SEQ ID NO: 102357 - DNA, 549 bp, Homo Sapiens
ccgtcaggcgtccttcttcccgctttcggtgccgaaccccttcgtgcagcagacgcagatcggctccgcgaggcgggtccagattgtccttcttgggattatcttgcttccaattcgtgtcttattggttgcgttaattttattacttgcatggccatttgctgcaatttcaacagtatgctgtcctgaaaagctgacccacccaataactggttggaggaggaaaattactcaaacagctttgaaatttctgggtcgtgctatgttcttttcaatgggatttatagttgctgtaaaaggaaagattgcaagtcctttggaagcaccagtttttgttgctgcccctcattcaacattctttgatggaattgcctgtgttgtagctgggttaccttctatagtatctcgaaatgagaatgcacaagtccctctgattggcagactgttacgggctgtgcaaccagttttggtgtcccgtgtagatccggattcccgaaaaaacacaataaatgaaataataaagcgaacaacatcaggaggagaatggcc

SEQ ID NO: 102358 - DNA, 886 bp, Homo Sapiens
  misc_feature (53)..(249): n is a, c, g, or t
ctagtaaatctgaatatctgtatattctataagtaattccattttcaggtatnnnnnnnnnnnnnnnnnnnnnnnnnnnnnnnnnnnnnnnnnnnnnnnnnnnnnnnnnnnnnnnnnnnnnnnnnnnnnnnnnnnnnnnnnnnnnnnnnnnnnnnnnnnnnnnnnnnnnnnnnnnnnnnnnnnnnnnnnnnnnnnnnnnnnnnnnnnnnnnnnnnnnnnnnnnnnnnnnnnnnnnnnnnnnnnnnnnnntaaatctcatttggaatttaatgacctttaatatatattgggaacttttatagtttatataaaaaagctacctacaactaaaaatatatatgtgacttacttgacaacataatacccttcatacacacagagcatttaagatcagaaggaaaaacaaaaaccagtaactcacaaaataaagggttaaatttttcagaaattatgaaaaaagaatataaaaaataaggcaaggtttttcttccagatttaaagattgctacccaaaaagaagcatttgatgatattgcacattacaattctagcattagctagattaaaagtcttggaagtttagttcacacactgtattctcaattttggttaatgaagacaaatgcctttatgttacttgttgcctttcccattggttttatttcttgggaagcattttgtcttttcctcttaggaattttaaagaaaggtaatgttcacatccaagaatgaattagatataactccatggtacctgggtgtgacagtcataaatgtcagtgataattagttataaattataaaactctcagattaatagtttaatataataatacagctcagactaattccatgatctttcatatttcatcatgtcaaactttaa

SEQ ID NO: 102359 - DNA, 549 bp, Homo Sapiens
ctctcgaggagttaagtttacagcgcagggggcagggcatgtaccagccctctgacctggcgtccaggccagcacctgtgcaggacagggttcaggaaaggagaagtcagggggctgtacccacctcagggaagaagaacgtaagaggccttcgacgaggcagtagttttcctagcttcaggggttgttactcagccagtttgaaaaaataaatgtggtcagaacattatctcccacatcgggctgcgaccttccatcgggtcataatcttctccttggccgggcacacagcctgcctgactctgtctaccgtctgtggtcagcgcacgtgagaagttggaatagtttggaacttagaggaccctgcgtgtcacgtgggaaacggggaactgtcttctccctccttgggcttccagtgtgttgtccttcctcctggcccctgacccactgtcttcccatacacacaggtgaagacacacctctcacatcacactcaggtacactgtgtcttgaagacacacgttgtggggctgtatagtctcttgttct

SEQ ID NO: 102360 - DNA, 511 bp, Homo Sapiens
  misc_feature (54)..(66): n is a, c, g, or t
gcggccgcggtggcggcggcggcgagacttctcctagaggcgtctcggcgcaannnnnnnnnnnnngacccaggggccgacgccaggcccagccccgacacccaaggctttccttccgcagcctcgctggagcctgctgtctgcgccctgcagaagtcctgacggcggcgtaccccgggagaccccggcagccccgagaagccagccgccgccgtcattccagtcagaaaaatggcctgcggggcacgcgccggtgcgccctgccaaccacgtccggactttggactttagacaggaaggcgtcccggctcagctgtggtttggtcagagtttaacctgtcccacgcaagagaacctcgatctggtttcctcgcttacctgagtcacctgggcacttgttaggcccagctgtcttcagttccattagcggccaggtacccaaatgctaaatcaaatccccgtggaccttggcctggcgcggtgcgtgctgttttcctccgagaagaggagc

SEQ ID NO: 102361 - DNA, 420 bp, Homo Sapiens
caaagtcacacacatattagaagagctgaggtatgaatctgggtctgcctgactcaaagcccaaacgctttcctttgcatcgtgtcacaaagtcatagaccatgacattgtttgtatcttcaagaccagttattaactttccggctccaaggagatcccctgcccaagtgcctaggggcagtagacagctgtctcagggacagtcgtagcatgtgctggattattagtgcagcagctgacactttttcccagaagggagagaggcagcaagtcagaaagttcacgggaatgagttgggagggggtcccagggaagggggacaggctgccaggagaaggaaagtacacgggagaaaatagtggggctctgatgagttagtagggttctgttaccaataaaaaagtttccataaactgtagg

SEQ ID NO: 102362 - DNA, 471 bp, Homo Sapiens
ctgtctcccctttcagccttcacagcagtgagctgcaatgttggagggcttcatctcgggctgcaaggacccctgggaaagttcccagaactccccacgtccttgtctcaattgtgccatcaactttcagagctatcatgagccaacctcaacccacagggcctcagtcgccaccatgtgggcctctccagtgcaaaccaccgagcattccaccatgaccggtcacagctacaaatccagagaccatcaatcctgctagagtgcagggaggcaagcacccaagggtggctgaccaagactgcagagtctcctccatcttcaggtccattcagcctcctggcatttaactaccagcatccagtggtccccaaggaatcccttcctagcctcctgacatgagtctgctggaaagagcatccaaacaaacaagtaataaataaataaataaactcaatgcagacacaaaaaaaa

SEQ ID NO: 102363 - DNA, 665 bp, Homo Sapiens
gcggccgcacggacctcaagtactcctaccgcttcgtgtgtgacgaacactactacggagagggctgctccgttttctgccgtccccgggacgatgccttcggccacttcacctgtggggagcgtggggagaaagtgtgcaaccctggctggaaagggccctactgcacagagccgatctgcctgcctggatgtgatgagcagcatggattttgtgacaaaccaggggaatgcaagtgcagagtgggctggcagggccggtactgtgacgagtgtatccgctatccaggctgtctccatggcacctgccagcagccctggcagtgcaactgccaggaaggctgggggggccttttctgcaaccaggacctgaactactgcacacaccataagccctgcaagaatggagccacctgcaccaacacgggccaagggagctacacttgctcttgccggcctgggtacacaggtgccacctgcgagctggggattgacgagtgtgaccccagcccttgtaagaacggagggagctgcacggatctcgagaacagctactcctgtacctgcccacccggcttctactgcaaaatctgtgaattgagtgccatgacctgtgcggactggccttgctttaaccggggtcggtgctcagacagcgccgatgga

SEQ ID NO: 102364 - DNA, 273 bp, Homo Sapiens
aaatacaaaaatgattgttaatgattggtgctcttaaagtgagcttaaaatttatccaagacgtatatccaaatttgtcctgtagtaatagattaatattcatagattgttggtgtttaaagatctgaagtgtgagtagaatgtattcagctgtttaacatgtagtttagatattcaaaagtatgcatgtagaatttaaagaatatgttaaaaattattaattttaatattttgtttggaaaagcatgttataatataatgttttcactataa

SEQ ID NO: 102365 - DNA, 437 bp, Homo Sapiens
gcggccgccggcatgcagctgtgcgtggacgcctcgcagccgctttggatgctcttcggcctgcacgggaccatcacgcagatccgcatcctcggtgagtgcccgcagctgcgcctgggcgtatgcctttcctggaggcggggacgatccgggtaggagacaaagggcgagctccccttcctccaggctcatgatggtgttgctaaggaatcacagacacctaaggtgagttctgggcgggacttggtcatcttgtcagtggcccttatacgtcacctgggagactcacctggggggtgaggcgagggaaagagcggattattgagtttgatgcccagaatcagatcaacccatagtctcacagatacataaacagtccagaagcacacaacccactgaccactcaaaaatgagaggaaaaggccaggtgcggtggc

SEQ ID NO: 102366 - DNA, 675 bp, Homo Sapiens
  misc_feature (54)..(68): n is a, c, g, or t
cagccttttaacaagcaagacaataaactccttttgtcagaatcgatttgattnnnnnnnnnnnnnnngaatgtgctccttatttctcattgctgtagaatacttaggaatacacatctactaatcacaattaaaaaataagagaatctttagaaacatcattgctttctggaggtagaaattttgaacttgaaggttgtagttccaggcaattttgtgcccttgaggtgtccaattgatagtatagcttgcctctgctaataaatacacaaaagttttctttcctgtgattttcagaaattatttttggaatacaaagattaataaggaatatgtgatgtttatctcctgcatttcaaaatcttctggattttttttgaggcatgaggagcaggtaatgagattttttttctgaatatcttgattctctcccttaacccagattttgcatattatgcattgctcatttgtcacctacaaaaataaaggttaatgattatttgtttgcttttgtctatataagctccctaaggcacagaccatgttcgtttttcttatgttcctcttagcactgtgcctggtgccttgccatataaaaggtaccctataaatatttgttggctgagtaatcagagagcccatttcaaaatctaaattatacaaatcatcaaagac

SEQ ID NO: 102367 - DNA, 430 bp, Homo Sapiens
ttggtgctgataaatattgatgaattctgctctctgcgtctctatggttgtcaacactgcagagttgaggcctcatatctcacctgcactgctgcaacagcttactggtcccttgctcccagccttctcctcttcagcccatcgtccacacagcactggggaatggggagccacttgaaacaaaagtcaacaactggttgtagttcataaacacagagctgtttgtgtcccctgtatctggaatgccattatgacccactacattttttctttcctacccctcttaaaactcagttcaggtagcagctccactaggaagccttggctgaccataatcccattcaattccatttcacctcttcgcaggcagtctggggttagggaccctttctctttgctccccaaaataaactggttaactctaaaaaaa

SEQ ID NO: 102368 - DNA, 452 bp, Homo Sapiens
aataaagtggtcttgcaatcatcccgcacctaggtaaatgtatgggtttgtacgcattctttggagcttccccctttcaaggtagcccatccaagaggatctgtggctgagtcgtttgtgcagcagcagggatggacagcgcggatgcatccaatccttcctggtccagcctctggcctgggcctccaaatggttgccattagaagtggtgctggaggcaacggctttctcgctcacatctgttcgagtggagcacttcactatggaattctcaacttttttcttttcagtggtcgtggagctgtgggactgggcctccatgatgtcttctcattacttcagctctcttcgaccaaaaatgccctgcggcggcagcggctgtcaagtccccgaacttcccatagacccgcggacggggcgcaggctggaggctccccgctccgcgcggccgc

SEQ ID NO: 102369 - DNA, 597 bp, Homo Sapiens
gcggccgcgcgcgcgctctgccctcgggcggccctgctctcccccgcccggccccgcaaccccgcaataacttggctgggcggggtccggcactgggctagagaggtcgagcgcggcgtcttgagccgctggcgggaggctgctgcttccccgcctgcatcagtgcgggtcccgtggactcctcgcccccgtccccgcgagctcggggctccacatcaaggaaatcctcagcccgggagtggcttccccagaaacagcagccccaagcctccgagagtcagtcggagaaaaggacacactcaggcgccctgcgacagggatgcccgtccgacctacaaggaacgcctcgtaaaccggggtgcatgggagaccacggaaataacacgttctcgctgtttccaagctttgggataggcatctcgaccctcgctctctacccacgtttcccccccaaatcctggagagggaaccagaaccagcgccccgctgcggggcgggccggccagcgcacctcctgggggtgaggcctgtggcgtccccatctcgcggcgaccaatctctttctagacgcgcgcctgccaccgctgggcgacggcg

SEQ ID NO: 102370 - DNA, 544 bp, Homo Sapiens
actatggtgttcatgatttaaaaagtttggcaatcagagccacagagaagcagtgcatacaaataataatactagctactatctactgactgctaactatgtgcaaggtactgttcaactgctttattcatattaactcatttaatctccccaacaactctatgaagtaggtgctactcctcatattaagctactcctgtgttattcccacaccactgatgagaatattgaggggtaagagaggttgagtaacttatccagagacacaaaacatctcatggaaggatttgaactcaagccagtgggcccccagactgtgctcttaaccaaccctgtatgctgcctctggcagttactgaaccgagtgagaagaaggactgggctttgtattctgagggccatatatggaagctcattctcctcactcctgtgctgagaagcattcttcattcattttggatactctctcatcttgaactaattctgtatgccagatgttggcaaagataaattagacatggattctaccctcaagaagttacag

SEQ ID NO: 102371 - DNA, 463 bp, Homo Sapiens
ggccgagcttgcccttatgaggcccacaggtggcagtgggcagaggggaccccgctataccacctcgctgctgttccactgtctgctcccgtgttctgaccacagctctggtgccgtttctcaagcctgggcttcattcaacattttctatctagctcttcatggtgctgctcctgctatggttccacagggcttcttctcgcaggtcagctccttagagaggtctcccagattccccgtaaagcagccctgcagcctctgcctctctcagccgcatcaccctgttgcttccttcacagcatgtctcaccatctgcaaccatctttctgtttgtcgtcttgttgatttgctgcctccacactgtcagctccttgggaacagagattggtttgtttactgtgcatccctggtgcccagaacagggcatggcatattgttggtgcataataaataaagtggaaat

SEQ ID NO: 102372 - DNA, 442 bp, Homo Sapiens
cctgggggtaactgtgggcttcccagagcccccccacccagggagccccccaactggggccgtgcagcagagccacatggggggccctcactgggaggagtctgagctctgctccctgcctcctcccagatggaggccaaggcacaagaaccaggccctgcccactcctgccatggggccctgggcactccgtgactcagtttcccctcctgtcacagggacagggtgttgcccacgactccctagtttctgtgaggggcttcatggcacagggcgtggccatgcccccatcggagacccctccaactcttgccccagccaggagcagcccctctgtccccaccccaagctgggcccaccttggcaggctcagggactgggaaggtccctcccctctctggcctcaacaccctcctctgaaaacgggtctgggggtagctga

SEQ ID NO: 102373 - DNA, 474 bp, Homo Sapiens
  misc_feature (68)..(194): n is a, c, g, or t
cactcgacccaggaagtccagctggcttcaagtctcataagtatattcagtcaagcagccagtgccannnnnnnnnnnnnnnnnnnnnnnnnnnnnnnnnnnnnnnnnnnnnnnnnnnnnnnnnnnnnnnnnnnnnnnnnnnnnnnnnnnnnnnnnnnnnnnnnnnnnnnnnnnnnnnnnnnnnnnnnnnnnnnccctttctgataacagagtgaaaccctgaactacacctaccagaccaaaccagtaaggagtttaactacagtaactgagctttacttcatggcaggaaactctgtaaccagttaagcaatgaagttataatcaaattagctgtctccatcacacacttctgtttcctataggtgctgtcagatcaggttcctgattggagttctcttatctgctctggtttggagggctgccccattcgggaatctgttttgttttgctcaaatacactcaaaaaaaaca

SEQ ID NO: 102374 - DNA, 703 bp, Homo Sapiens
cacataacaataatttattcaaatttattaaggcaggagctgggcctaaagagggtgctgaaaggcaggagctgggcctggaaaggtcaactgaaggaaatttttggcctaaggaggctgccaggaagcaggagctgggcaaaaacaggttgttgttaggcaggatttgggctcatagaggcagccaggaggcaggaactggatctttataaaaggggcaacgtaaggcaggagcagggcctgcagagtctaccaggaagcaggaccagggcacaagaggctgacatgaggcaaaaagttgcccttgggaggccactgtgaggcaggactcttaaaaggacgcaaagctgggcctgtagtggctgctaaaaggcaggaacgtggtctggaaggccctggtgaggaaagagttgggccaaaagaggccactaggaggcaggagctgggcctcaggaggctgccataaaacaggagctgggactcggaaggcagacatgaagcaaaagctggcctttggaaggctgatgaaagggagaagccgggcctggtgaggttgacttgagaaagtttggggcctggagagatccatgggaggcaggagccaaacttgtagacgctactggaaggcaggaggtgggcctggtgaggtaaacatgaggaagttctaggcctggagagacaagtcggagaaaggagctggggg

SEQ ID NO: 102375 - DNA, 633 bp, Homo Sapiens
  misc_feature (60)..(61): n is a, c, g, or t
  misc_feature (107)..(107): n is a, c, g, or t
  misc_feature (125)..(125): n is a, c, g, or t
  misc_feature (146)..(146): n is a, c, g, or t
  misc_feature (167)..(167): n is a, c, g, or t
cttagagacttcaggctactgatctcatcacttattagcaaattgctgctgacctacgcnntgtatattagcctcgcaggatgcccggacaatggtgaagaactccnagatatcaagaatttggnaaatcctggccaaaccacccncaagatgatacactgaaatgntagtattagtactgctgccagatctcctttttaacatcatgtgcgtctcttgggatccagcaaaagtgttaagccacaatgcccttgtgccttttaatataccacagtgccagttaaactaatatttttgtttgttgcctttgggagttattttcattagtgatttcagcaaatctcatgataaaggacaaggtcaagaactccagagcactgagcagagaggctggtgatgaaaaggtgaaggcctgcgcactgaactgtaaggcagtgggcagtacagggtaactggaggcggggccagggcctcagcgctatggaagagtgtccactgaggctgcacatggcccaggagtggcaccatgttgcagggacaaccatccccatttggcttctccttaaaacacaattgcagctgcattctgcatcgctgaaaactgcaatataatattaaatctgttggtctatg

SEQ ID NO: 102376 - DNA, 463 bp, Homo Sapiens
ctccctctggaagagatccttgtcgatgatcacggcgtctccatcatcgttccagctcacagacttgaatgtgtcttcctccacaatcgtccaaagctttcttgggaaggagagcctaaaaaggttgtggttgtcttccacgttgaccacgcgttggtttcggtcttctggtggtgagttatcttgggagcctggatcttggctcatggcttggtcctcgtgcctgtccaaaacctcgctggaatctggatttggatcaggtgaagaaccagatgggcccccgcttgttggctctccaccaacagatggggccagcttggcttcatattcctgttcagtgttctgactcgccatggagctacaccagaatcaggagcattttgtacccaaggcccttatcactgtcctagcaagtccaaaatgccttcagtcagagtaggcgtgcccaataaatactgtccac

SEQ ID NO: 102377 - DNA, 563 bp, Homo Sapiens
gggcttcaagacccacacactttaaggggctactcaagtgcaccacagctgtccacaatcctaagagccactgatgttttcacaggtgggctgcaagagcaccaagcaccagaatcacatatgggactatcaccaaagagagagactactgcgcggaagaccagactatcgagagctggagagaagaaggtttcccagtgggcttgaagcttgctgtgcttggtattttcatcattgtggtgtttgtctacctgactgtggaaaataagtcgctgtttggttaagtaatttaggagcaaagcaatgctccaagcgaggcctcctgcttcaggaaagaaccaaaacactaccctgaagggccagcctagcctgcagccctcccttgcagggagccttcccttgcactgtgctgctctcacagatcggtgtctgggctcagccaggtggaaggaacctgcctaaccaggcacctgtgttaagagcatgatggttaggaaatcccccaagtcatgtcaactctcattaaaggtgcttccatatttgagcaggcgtcaaacaaaaaa

SEQ ID NO: 102378 - DNA, 510 bp, Homo Sapiens
ttccattcaattagtccggccccagccttctcctctgccctgccagttccagcacaccaactagagacactgcctgctgcgccctccacccacaccatgcacccaggggccacagaagaggaggtgcaggctggtgaagcctcctggttccaaaggggctctagggaggggtggcgcccgagcggcgcgggaggtggggatcacagacactgatgcaggcgggaggcggccgagcggcgcgggggctggctctgcagggaccccgtgtccccgggcgcgggcggctgcgaggcagcggacgacggggcccgcgccttggtggactccaggctgctgagtccggagtccttgttgtcactgtgcgcccgcgcgcccgcaggctccggggggccccctccgcccagctccttccactcgttgaagttgaggtcagtcagcgggctctgcaccaccacggtgtggcggcgccagctgctccggcgccgccgggtctcgggcgacagcggccgc

SEQ ID NO: 102379 - DNA, 518 bp, Homo Sapiens
  misc_feature (304)..(312): n is a, c, g, or t
aggttccattgctcttcctgctgctgtcctttgcttctcaacggtggctcgatctacagtctagagcacatgcagctaacttgtgcctatgcttatgcatgagggttaaattaacaaccataaccttcatttgaagttcaaaggtgtattcaggatcctcaaagcattttaaccttgccgcttaaaacccaatttaccgtgaaatgggaattttgctgcattgttaaactgtagtggaaaccatgctatagtaataaaggttatataagagagaaattgaaattaaatgtgtttttaaatttcnnnnnnnnntcaatctttaggatgacttaaaaattgatgtgccatgtaaaatgtatctgcattttttacacaaaacttgttttaagcataaaattttaaaactgtactacttgatgtattatacattttgaaccatatgtattaaaccataaacagtataatgttgttataataaaacaggcaataaatttataaataaaagctgaactactaat

SEQ ID NO: 102380 - DNA, 616 bp, Homo Sapiens
  misc_feature (53)..(53): n is a, c, g, or t
  misc_feature (66)..(66): n is a, c, g, or t
ggtgatccctccccccagctgcagtggtcccatgggcctggcccactgccctngggtgctctggcncagggtggcaccctcagcatcccttcagtgcaggcccgggactctggctactacaactgcacagccaccaacaatgtgggcaaccctgccaagaagactgtcaacctgctggtgcgatccatgaagaacgctacattccagatcactcctgacgtgatcaaagagagtgagaacatccagctgggccaggacctgaagctatcgtgccacgtggatgcagtgccccaggagaaggtgacctaccagtggttcaagaatggcaagccggcacgcatgtccaagcggctgctggtgacccgcaatgatcctgagctgcccgcagtcaccagcagcctagagctcattgacctgcacttcagtgactatggcacctacctgtgcatggcttctttcccaggggcacccgtgcccgacctcagcgtcgaggtcaacatctcctctgagacagtgccgcccaccatcagtgtgcccaagggtagggccgtggtgaccgtgcgcgagggatcgcctgccgagctgcaatgcgaggtgcggggcaagccgcggccgc

SEQ ID NO: 102381 - DNA, 485 bp, Homo Sapiens
cggccgcgggacacgctcagcgacctgcgcgcccagctggtgtggccagggcgtgagctcctggaagcgcgccttctactacaacgcgcggcggctggacgaccaccagacggtgcgcgacgcgcgcctgcaggacggctcggtgctgctgctcgtcagcgaccccaggtagtctgggttggagcaggcagagccatgaccaaggggacctgggtactggctgaaggaataggctggggtagagggcacttttggaaggcacttctcctgcctcccgggagcctagatctcactccagggtctgggctcccaggtggaccatgaaaccctggcctgaccagctgatgcacactgcttcagacactcctgctggagccccagtccctgacaaggacctaggacatttttgctcctgcccagcctatcgggagggagccttgagcctttcagctctgctgtgtgacttttgagttgtgctcccctct

SEQ ID NO: 102382 - DNA, 499 bp, Homo Sapiens
caaagcggtccaagggttccacactggggtccaccaggctgggaaggaagcagagaaacttggccaaggggtcaaccatgctgctgaccaggctggaaagcaagtggagaagcttggccaaggtgcccaccatgctgctggccaggccgggaaggagctgcagaatgctcataatggggtcaaccaagccagcaaggaggccaaccagctgctgaatggcaaccatcaaagcggatcttccagccatcaaggaggggccacaaccacgccgttagcctctggggcctcggtcaacacgcctttcatcaaccttcccgccctgtggaggagcgtcgccaacatcatgccctaaactggcatccggccttgctgggagaataatgtcgccgttgtcacatcagctgacatgacctggaggggttgggggtgggggacaggtttctgaaatccctgaagggggttgtactgggatttgtgaataaacatgataacctaaaaa

SEQ ID NO: 102383 - DNA, 584 bp, Homo Sapiens
gccgccgcccgtcctggcaccggccgagggcctggaaatgagccgcgccccgcgccccagcactgcgggcagggaggagggcaccgtggacgcgggtacatccccgccgccccaaccccggcccgccgctgcggcaagcttgaaggcccacgtcggggacatcctggtggagctgcggaccatgaacggccaactggacagcatagcgcggggccctcaccaaactggcttcgtccctgggcccccagcctgagcccctggcagatgtttcggatgccaactaatggagctcggcgaggctgggccgccccggggccgagggatcgcttgcaccaagcatccctgcctgtccctccccagcagcgaagcgcgcccggcggaggagcggttgctctgcgcagctgcctagcggaaagcacggccctagcgtttcagcgtgaaacagacccggttgcgcctcacaccctcctcctccgctctctcacggcggcccctgccccggcttcctggcccttcacatgcccttctcttgtcttgagcgtctagcaggaaaagtgcctggaaacggcggtggcaccctgcga

SEQ ID NO: 102384 - DNA, 437 bp, Homo Sapiens
ggtcaggcggatgaggtccctactcccgagcccccagcctcacccactgcagggccaggctctcagtcacccctggaaaatggtgcctggttcacagctcccgtgcatctgcctcatctctcctgatcaacgtctgtctcttgggagtagctagagttcctcatgagcttgtcctcaagcgaggcatgcatgaggcctccagccggtggtcagtgagggagttaagtggcttctccgtggaaacacagccttctgctgcagcagaggctcacccagcgtgaactgcccccagggaacactgggcgatgcctggggacattgtggttgtcacgatggggggtgctcctggcctggagtgggtggaggccagagacactgctcagcagcaccctgcagtgcccaggacggccccgtcccagagaacaatccagccccga

SEQ ID NO: 102385 - DNA, 656 bp, Homo Sapiens
  misc_feature (192)..(246): n is a, c, g, or t
gcgccatccctgtcacctgcctgctggactctgggcatcaggcccagcttgtggagttcctcatcgtgcactacgagcagatctttgggatggatgagctcccccaggccactgagcccccgccccaagactccagcccagcccctgggcccctcacaaccagctcccaaccgccacccccgcaccttgacnnnnnnnnnnnnnnnnnnnnnnnnnnnnnnnnnnnnnnnnnnnnnnnnnnnnnnnacagtaccctggagcagcatcccacggccacacctaccgagattccaactccacagagtgaccagagagaggacgtggctgaagacaccaaagatgggggaggggaagtgtccagccaaggcccagaggactcactcctggggacacagtctcgtggccacttcagccgccagccagtgaagtatccccggggcggtgtgaggcctgtaacccaccagctgtccagtctggccctggtggcttccaagctgtgcgaggagacccccatcacatcagtgcccagagggagtttgcgggggcgggggcccagccctgcagctgcctcccctgagggcagccccctgcgccgcaccccgctgcccaagcattttgagattacccaggagacagcccggctactctcgaaattg

SEQ ID NO: 102386 - DNA, 458 bp, Homo Sapiens
gctcagttctcggggtgaaggacaaggttaattctactgtaaataatcctaccattcagaaaagctggtgtgtccaaggaagaaaaaacaggctgtgactacaaacctaaaagtaaaggcaaacaactgccagacagaggcaggaaaacggggaagagcccttggtaaatattgcatgcctcctggggacccccatgggctttgactcaagggggagatgaagggaatttgttaaagaaagaagtcactgagacagacaaaagcttccggcacaggaagttagttcgactaaggataccgaaatgtaggaatttgaatgggttcctgggtgtgaggttgaagtgaaacttgattgaaaagaagctgctggtggtgagtctctccttaagctattcctggcttctgggtagttggtgtaaactctgtggtccttgaataaagtgaccataagaaattta

SEQ ID NO: 102387 - DNA, 622 bp, Homo Sapiens
  misc_feature (562)..(563): n is a, c, g, or t
gcggccgccacacgggcacgcacgcgcgcgcagggccaagcccgaggcagctcgcccgcagctcgcactcgcaggcgacctgctccagtctccaaagccgatggcatctccgggctctggcttttggtctttcgggtcggaagatggctctggggattccgagaatcccggcacagcgcgagcctggtgccaagtggctcagaagttcacgggcggcatcggaaacaaactgtgcgccatgctctacggagacgccgagaagccggcggagagcggcgggagccaacccccgcgggccgccgcccggaaggccgcctgcgcctgcgaccagaagccctgcagctgctccaaagtggatgtcaactacgcgtttctccatgcaacagacctgctgccggcgtgtgatggagaaaggcccactttggcgtttctgcaagatgttatgaacattgtacttcagtatgtggtgaaaagtttcgatagatcaaccaaagtgattgatgtccattatcctaatgagcttctccaagaatataattgggaattggcagaccaaccacannatgtggaggaaattttgatgcattgccaaacaactctaaaatatgcaatgtaaacaggt

SEQ ID NO: 102388 - DNA, 900 bp, Homo Sapiens
  misc_feature (39)..(39): n is a, c, g, or t
agcgccgcgcctttcctctggcccgggcagcggctcgcnccgacctcggccccagacggccttccctgcgcgtcgggacctggggctgcagaggaagtgggcccggcgaggggccagaaagctgtccagggctggaactggagctagtgggctgtgtggttaacgtggagacgtttgctgctcactggacttcgtttttggatatccagtaaaagcaagggtggccttcaccttatggccaagctcactcgtccactatcactcagacctaaaaccattgattgattttagtgacgctagctacatttggcagtgggatttaggacatagttcatagtcaaaccccagtttatgtagttttacaaaatgtggctttaattacagtaaagggttatagtagtcgataaagaaacattttaagactggaaaaacgatgtggattgaactaccattaaagtggaaaatggattttaataaaatgtatctttttcaaataaatgatttataatcttcacgtcttggctatcattttctttttgatgtgtgtgtgcgcacttttatccacaagtttaaagcagacctcgataattcctaactatgattttactaccctgaactctgcagggaagtgtcctttaattgacagctactcaccaccttgtttgacagagtgccccatttaaaagtcctgtttgaaataaaatgtagccaggtggccttcagggagtcctgtggtgctggttctctactttctcaactcattgtttcatgttagcaccatgcatgtctaatttaggtgcagtataatttgcggttatctacaaagatgttttaagtctggaaaatagctcaagatagtgattcagcctgcaggtgttagattaaagatgcgtgctgcgc

SEQ ID NO: 102389 - DNA, 474 bp, Homo Sapiens
tacgagcccctcacaactacccatgcacctgccaaacccggcaattaagcttcttacacatccagccccgacaggggtctacactacagataatgcccgggttcaaattccgactccggattccccactcactggatgcgtgaccttggaaaaatgatcaacctcttcaagctacacaaagttaaatggggatcgtctggcctacctcttgacagaatactttaagtaggatcgtatctataagaacacaataccacactcaagcaatgctggacagttggacttaattgtggttaaaggcgggagtgaggtgggagtgcgataccaacggaatcacatcccgggctccattccctaagcagctgtgtgacctgcggcaagtgttttaatcccttctggtctgtttctcctttaaaatgaggaaaatagcgcctagtttacaggattgtttttaaggataaaatatattcaaaa

SEQ ID NO: 102390 - DNA, 537 bp, Homo Sapiens
  misc_feature (441)..(473): n is a, c, g, or t
acttctgaaagaatgctgcgggagaggaggaaggagagcatcctggcttctggcagcagagccccactgtgacaggacctagcattcaccttcctcttctgttccgagtgcgagaagacttcagggacctctgtttcatggacattatcatattcttctcaagagtacccagcaagaggtttgcaaagaggagttattcagtgagtaagtgattcatgtagctctctaacaggcatctggattttgggtgctacagcttgcaattagagaacaaaatagaaggattatccacagtccttgtctgttatctcacgtttggtgggctgtagaatccatcaactttttcagggtattcaaaagttgatgaacaattgtggataatattgtcaagatctaaaacaaactcccttaaagacaaatcagaccactattaaggctcannnnnnnnnnnnnnnnnnnnnnnnnnnnnnnnngtgacagagcaaaactttgtctcaaaacaaaaagaaaagataagataattactttatacttagc

SEQ ID NO: 102391 - DNA, 733 bp, Homo Sapiens
gcttgttcattgaacaccatgttccccagaaaattctctacaaagatgttcatttttttaagttaaaagtgcttaaaagttcactgggaattttgcaatgcagttgagaaaactggagctgcctaggggaatttcagcattagggcttgaaattactcacccaggagaaatcccagtataatctgccctcccattagtggtaggagagaagctccaagttccgaggcttctcattttaccaaacagttgtaccacccttatcactaactagcaagttaaatgtgaatcaaattaccgtgtcctatcaccaatgcagtgcttcctactgaagaggcgaccgcaggaaatcgttcggtgttgcaaacaattgcataccagcatgttctgtcaacatgaatgttgtgccgtacaagaggaaaaggatcagagaggaaagaggctgtgtggtgcagaggcctatctgaacagctgattttctacatgcccttgaaggctccctggttctctgagatacactggctgacgcttcagactcttgggatttagttggtgggttacattgacctctcggtctggcttcatttcactagaaacgacacctatcggctattccctttgctgcaggtaatcccagcttctcgaaagctcccggggtaatcttctaagaaccaataagaagacagaaaatgttatagcccatacttaaaatagttcgaaatgacattattcacct

SEQ ID NO: 102392 - DNA, 662 bp, Homo Sapiens
  misc_feature (642)..(642): n is a, c, g, or t
  misc_feature (649)..(649): n is a, c, g, or t
cttcccaccagcaagaccgagtatgctctaaaaatgttcctccggaggagtaagctacccaagaatggcccacctagagtctatcaaccaggccagataacagatcgagcagttctcaattcatatggtgactttataaagaaccaagcggatggctacctgttcgatagatataagctaggaaaagtagaccaagagttttacaacagatagtgacctgtccctaggagtcaccatcaatgtgtggggaagaaaagtgctcctttatgactgtgatgaatttacgaagtcttattataagtctaaatatggaattgagaactttacctcagtttcatgcaagcctccttctcctcctccaaaaatagaaaggaaatttccaccttacaacggttttggttctgaagaggattctctccgtaactgcatagacctcaagcccacacctcatcggaggaacttcaagaagtttatggaaaaagacagctatggctccaaaagcaatatactccgtttattttgcaaaaatagtcacagacaaatgtgttgacttggacaggatgtttgttatattcatattatctcggtgatgacaccatttcagtgtttgaacctatagagaggaattcaggaattgctggngggatgntcttgaaaagaag

SEQ ID NO: 102393 - DNA, 717 bp, Homo Sapiens
  misc_feature (20)..(20): n is a, c, g, or t
  misc_feature (331)..(331): n is a, c, g, or t
  misc_feature (341)..(374): n is a, c, g, or t
aggacagatatttttaatanaattactatagagctgaaaaacagagagagagaaagcagccgggttgggcaagccgtcgacagtctgcgacatttttgcgcttcctgggagggaattcctccaagaagaggggtaaatgagaggcccacacgctggatggcaaacacaaacactgtcagatcagatggcaacctttagggttcctttacgatcagatcagtttaaatgaaaaaaatcgggtgtaatttttatcaccagggagcactggcctggagtatttccatttctaaagagcggttcccgctgtggtttcattagcatttgggggttnattctttttnnnnnnnnnnnnnnnnnnnnnnnnnnnnnnnnnngccggacctctgccaggggcagaagagaaaacagccagttattatacaaacatcctcagtttggagctggagtgtctgctctggatacagtcgattctgacatcaattaaatatataaccagacacgtgcagtggcggggagggtcccctcacccagggtgcatctccagaaacgccgcctgcccttcccctctctttagctcagtgttgggagtttgaagatggcctcttcccgtcctgtgtgtattttccccttagcaattatactcctccactgaaatctatatgttccataccgctgctgcctgttactaataaaaaccgtctaccttgcactattaaa

SEQ ID NO: 102394 - DNA, 711 bp, Homo Sapiens
aaaataaaaagaagaaagcatatgattctatgaactttcagaaaatgaaataagtaactctttagaatctggtccaatcagtgaggtccttacagaccagcaatctggaccaaaggctaaaatatgtcataaaaataaataaggttgtgagtcagtttgtccagatcttcacagaaagaggaaacagaacatgaggatttccagaggtgcaaagcataaggtaatttttaaggattcagacaatattcagtatgactggcataaggtttgtgtaggagtctaaccaggggtgaagctagagatctaagtaggagaccacatcattaagcatctttacaatcattataagggcattcttaatattcacacaaaggcaattggaacccacttaaaatcatgtcactccccttccaattcttctgatcctccaatattgtgattggttcttcattttctgctcacttgacctctttccaccatcttgccaccccttcctttgaatggcagataggttaaatagatagcttacattttaaatcttttggtgcattattttctgcatagtgctttgctggggtgatatatttccccctgttatttcaagattcagattttagtcatttctgattttaaaaagaatgatatctcactccataacctatatttaaaactaaaaataaacgtatttttaccattgtataaaaaccttct

SEQ ID NO: 102395 - DNA, 423 bp, Homo Sapiens
  misc_feature (111)..(239): n is a, c, g, or t
  misc_feature (247)..(258): n is a, c, g, or t
gggtgaaacactacacccagcctcctttagtgataatttttatagcaaaagatgatttggttaaataagttagaatactttttaaaaaaattgttaagaggcagtgtctcnnnnnnnnnnnnnnnnnnnnnnnnnnnnnnnnnnnnnnnnnnnnnnnnnnnnnnnnnnnnnnnnnnnnnnnnnnnnnnnnnnnnnnnnnnnnnnnnnnnnnnnnnnnnnnnnnnnnnnnnnnnnnnnnncagctacnnnnnnnnnnnnaatagagacggggtcttgctctgtttcccaggttcagttagaagcagatttttttaagtaaaattatcttgcaagtttgaataagctgggaattcagatcattttattgtcacctttctttgccttgaaaaattaagatgtatagtcaccagttaaaaatttaaa

SEQ ID NO: 102396 - DNA, 460 bp, Homo Sapiens
  misc_feature (24)..(24): n is a, c, g, or t
caggcacttgagtggatgcaaggnattggcaggagacagaggggtcagaaaccactgggcaagatggggggaccttatctgtctggctttggaacccatcagtcttcccactcatggatcccaaattaagaacccctggactaagtcacctgaagagtttccagctctaaaaccatatgattataagatacggttatttgtcctcccacctccccccacgcccaagtgattcattcattccacattgatccaacatgaattccagctcctgctagctgggcatccttcatcaaggtcctccactgctgaagcctcagttgccttatctgtaaaatggggataatgatagtctcttccttaaaggattattaaaagtcttaaaggagatagtggatgttaagctctgaactcagtgccttcctgacatgtggaaagttcccaataaatgcttaaaagcatt

SEQ ID NO: 102397 - DNA, 321 bp, Homo Sapiens
ggaagcaaaaggaaggagaaaacaagagacataaacaaagttaaacaaatattccattctaatgtataaaagtcctgtctatacttgaagtcacagggaaggtgctaatgaagttaaagaaactctgtcacaagcactgtgctttatgtatttattttatgtaatcttcacaaccctgaattcctattttctgacagtgaaacactctgaaaaggttaaatactgccaagtaagtgataaaggggaaatttgaaatcagaactaactaacccaagtcaatattcttccctttcctactaaagagagctacttaaagggcaa

SEQ ID NO: 102398 - DNA, 503 bp, Homo Sapiens
accaacatttacccaaacaactgccccgttcccctggtccttagtgagtcccttgagaaactgcattattgggataagatggaattaagataaaaactgagcagtaccaataaaaaatatgactttaaaagggcatgaaagcaaccgttatttagtatctgttattgctgagtacaatgtaatatagaacttgaacttgaattcaaacttacactcctccaaaacctgtattattttctccaggccctgccactagccagtgagggaaatagatgaaatagatctgactctaccttgaaggtctgcagcaggggtcagcaaacttctagccctcaggtcaatagcctgccgcctgtttttgtatggcccatgagctaagaatgatttgtacgtttttcaatgttttaaaaaattgaaaggagtataatgtttcataacacatggaaattatgtgcagctcaaatttcagtatccataaataaagttttattggaacacagcta

SEQ ID NO: 102399 - DNA, 596 bp, Homo Sapiens
cccctcttcccaaagatgtggtgacttaagaggctctctaagcacactgttgactccaaaacatccgcaggtcagagccaggtgggaaggtggtccgtgcaggatgtgccaggccctgtggcaggtcttgccccatgagtccatatgccagtgggcagtttccagtacacaggtgatggcagccagagcgcggccccaagtgcaacacgttctttggttattggctcagaagcctggaaacaggagcttctgcggaccttcacgcacgtgttattcccaaaatgccactagatggcagcagagaagaacttttccctgatttaagcgctctgcgagcagccactcagcattacactaagaattcagacccctggtactcaggggtcttcgagataaatcctgtttgggccctttgcaggccctatctcacctactgcccccgttcaccagatgaagaaggaacaatgattattctcactttataggcatttaaactgaagactgattctaaccaattctgagtccagaaccaaggcctgaaatgggccagagagcatgcacacggtgtcctggttaaataaagtcatcccaacatt

SEQ ID NO: 102400 - DNA, 803 bp, Homo Sapiens
  misc_feature (216)..(237): n is a, c, g, or t
cctcctctcctccctaccgtttcatttaatggtaaaacaacagcagagctctgaaagttagccatctgcgcagagtttgccttctttaaggagggaggcgtcagacgatatccatttaaatatattttgtacttccacaaaggatggaaagggaaattcacgaagggagtggaggcggaaagggagctccgagaaagaaggaggggtcattccgcnnnnnnnnnnnnnnnnnnnnnnccgacgcaggggaaagagttgctctctacaccgaaaagggactttgaccttccattgatctcgaaattcaaaaacgtttcttcacaggtcagattgtaacaaacactcgttcctaatttatgaactcgccgttttgattttattatttaagcatgcgccagcaatcgtgtttccttaagaaagaactgacctatttttggctggagataaacgatcatgttaacagatgttaatcttgtaatctgtttttcctgtaagcactttacctagccgggtttcagaccttaaaaataacatcttttccaaaaagacctgacgtcacaattcactccctgaaaaatcacactccccctccagtttcttcccctgcaatgatttcaaagacattaaatcttttccactttataaatgctgatctgttctgcctctactcccacaggctcttatttgcatttcaaattccacaggttacaccagtcgccttttcaaaaaatgtaaaccaacaatgcagcagcaaatggctttttgtgcatctggattaaataaagcacagaatgaaaatattt

SEQ ID NO: 102401 - DNA, 604 bp, Homo Sapiens
ttactgcttctccaggttctcacaagaaagcaggcatggattccttttgcacagctcctccaggctttctgggccctgtcattccttcttctatcttctgggttgagcaacatgcaatctccccttgtgcagaagcccaaatagctactgaaaatgtgtcctctctgactttccccatttcttgaactctgagagactttttctagtatcagttctgaggagcattgctgttttccttcctatcatctggaagacctagactttaaaactcaaaacctgagaaaaacttccttttttttctctcttttgtctggatcatcactaccttgaaatactaaattagcaaagtcctaactagaaactgaattggctaaagagtcaaggagcaacaggtaattccaagaaaaacaacagcaaacttacatcagttaacatttcaaagctattttcctttgcaattttgtgtatctgtttttatggaatgcaagagataataggctaaatgctattttgcatatgtgttacattggatttctcacatattctactacttaactcaagatgttgagtaaataaatgagttaataaactggggattctatat

SEQ ID NO: 102402 - DNA, 763 bp, Homo Sapiens
ccgtctaattactgtattgtgagctcagtcagcaatcttgcatgaactctgcagtaacttctgaagactcttgctccaagtgtttgataatgaggagatgtgcaggactaaggcgactgtgtgatgtctgcacagttcgaaagcccgctttcctgttactttcaaatctcgggtcagcattttggaacttttctgctttaatttttccacacacacctctcactgcgaccacctaccatcaccacaacccaaaacaaagcaaacaaacagaaagcttgaacaagaatttacatctgggaaaacgcttctactcatcaagagtggaattcctttttattcctataattgactcacagcttcaaaaatctgtgaagtcatactttggtcacggaagttgcaagaaaccatatttgcaaacgttttattttaaagaaggtatttaaaaatatttcacatattagccacagatttctagaagtgaagttataaaaattagaaattatatttttccttttgatgatagcaagtgaaaagagattgctccaagcatgttttcaataaattcagtataactgcaacacaaaaattctgcatgcaggcttcatacacacacgttataattttatgcatttatcttgagagttgtataattaattttaaaaatgcaacagaaatgtgaagttaagtctactttgccaataatggaaatgtctcatagataattttgaatacaattaaaattttgtttttatcataaaaaaaa

SEQ ID NO: 102403 - DNA, 592 bp, Homo Sapiens
  misc_feature (179)..(187): n is a, c, g, or t
aaaagcaggtgttttaaaatgtttgttgaaatgaaaaaaacaaacagcttgtggggaggaaaagcaagatcttcccttgaaataggtggtttctgaaaagtgggcaacactcacgtgtcttgaacaaaggcatggattttcgccagagctttgatctgcagactacagtggctagaagnnnnnnnnnttatttgatctcaggattaccaaaaaagacaggtaactgacatcaggacagagaggttaaacgggaacagtggccatctatatttggtgaaggagctggagagttgagaaagaaacccacacccctaccccacagtgcagttatgtggggcttactgaaggatgagggtagaacaggaaaactgggtcactcagttcttagatcccaagtcctactaaaaggaagcttctaatcccacccttaaataatctgaaagtagtggtgagctcattcaaagcccagattcagttcaactatagactaagcttactcgacctatgtatactaacagccaccctttctactttagtcttcactgttctttacacacaatgtctggcatttaataaaaaaattatgaggcat

SEQ ID NO: 102404 - DNA, 648 bp, Homo Sapiens
ctaggaatttgctttgtttttatttttgatagatgttggttgtaacctatacatattctttgctaagaaataacccttgagccatgtagagtcaggagttgggccccttcagaggctgaggtttgctgcttctgtgtactttccttccaaacaaatgaggttggagaaacaggttgatctccagaatgagaaactcttcagatgcttcctgcctttttatatctgcatttcagaatcaaaagagctaaattagagaatttattaatagttaaatttcaggtatcaattctgatataagtaatatcttgtggaaatgtctcttatatttgaagtattctaactggccaaatcaagtggatccttccccttaattactgattggtaagctttatcttagtttaaacttgaacaagaccagtggtttggcaattttaaataaattatattcatgcagctattcaaaagttgtcaacatgcaatgaaaagtgttcaatgaaattagttgttaatactgacaacagggattgtatagcacacatacattatatattgctatattaatctgactttgagaggtaacaggatgggagggacacaggttggcagaatacataggagaggaaacaaagcccttctttttatttattt

SEQ ID NO: 102405 - DNA, 435 bp, Homo Sapiens
tgtttttaaccactttattaaaagcctggaaataacatttatgtaagataacagccattcactcaacaaatataaaaggtgccacattctgtgctaggcactagtacctaaaaccttcaagacacagagcttatatcctttagggaacttacaatgtggtgactacaagcaatcatattacctcaaagttatgagtcaaaagccaggatatttctctggattaaagaacaaaggccccctttaaattactgccatttaataaccataagaattatggcacaaccataatttacttatagaactaatcaaggtttctacatctcctgaataaatgtgaataaaattgtcattgcacttcctccatctctatgttaagaacagatacaaaaattattttaatgtaattgttacaatgtatctaacatattatcaaaa

SEQ ID NO: 102406 - DNA, 638 bp, Homo Sapiens
ccccatttggaatgaagaaggtgtggagagaatggacgttctggggaaaggctggaatgacccacatgctctagcaagaagcacagacagtccaaggctggtggctcctgctcagcatttgcaagactggagggcaggtacaggcggcaacttccagagcttcccctcagtgcttggtgactggcacagacacgatgccatttgctcatgttcccctaatacagactggtagagctgtggtggatccattgtcaggatgcaaggggcacagccaggtccctgagtgacccttctccttcccacagcccctccactcccatccctatcttcccactcacactcactggttcttctgctttggtttagcctccaatgatcacagaactcatcagtgaggcttttccatctgtggtagcttttctaatataaagaaagaaagatactgagaacattttaaggcttagcagccttctggcttagttgtttgtaaatgaaaatatgagtagaagaattaaacagccaaaaagataacccacaaaatgggagaaaatattgacaaatcatatatctgataaaggatttgtatctagaatataaaaataactctgataactcagcaataaaaagacaacctgatt

SEQ ID NO: 102407 - DNA, 425 bp, Homo Sapiens
  misc_feature (114)..(170): n is a, c, g, or t
atcacttcttctttcaaccagaaaacaatcaacagctcctcgcactcggcgctcggcgactttcgagccctgctccctgcttcttggctaacactggctcactcggatgcgcannnnnnnnnnnnnnnnnnnnnnnnnnnnnnnnnnnnnnnnnnnnnnnnnnnnnnnnntgaaagggtaaatattgattggctggctttacattttatgctccatgccatatttccttccctccctcacttcatcgttgatttttctcttgccctcctgtgatgtttgagtgtagtaaaaccataataagccatttttggaaaggcggtggttacactctttattaaaaactgacatctgttgggagagcaattaaaggcatcaaaaggcggggttgttgcatgtgatttgggggaataaaactttggaaaatt

SEQ ID NO: 102408 - DNA, 730 bp, Homo Sapiens
  misc_feature (217)..(268): n is a, c, g, or t
  misc_feature (338)..(390): n is a, c, g, or t
ttaattctgatgatacccactgtggtatggggaatgggtagtaccaaatgatgtatgtcacttaagttcctagtacaccatgtgttgaatttaacaaaactgagtcaaagcagaggataaatagcttgatatagctgtagcagctagggagaagacttaagattcaaacccaataatactacactagaatttggttgggtgcggtggcttgtgctcnnnnnnnnnnnnnnnnnnnnnnnnnnnnnnnnnnnnnnnnnnnnnnnnnnnncagcctgggcaatatggtgaaaccctgtctttacaaaaaatacaaaaagctactcaaggggctgaggtgnnnnnnnnnnnnnnnnnnnnnnnnnnnnnnnnnnnnnnnnnnnnnnnnnnnnntgacagaatgagaccctgtctttaaaaaaaagaatcctacgctagaattgattaccaacccttaaactcaactatcagctaccagctgtcttagtagtcaaacttattttctaggtttaattatccataaactagtctgataatgtcttttaaaggttgtgtcccgtatttattttgagaggaattaaaatttaaagttttaaatggcatggaataatgatctcaacttttgatcatcttcccatctgtaaagtagtaggtacttccactatatgtatatttacgtttatgcacgtgttactgcctttggtgtaataaagctaactttttgtcaaacttc

SEQ ID NO: 102409 - DNA, 545 bp, Homo Sapiens
cgcttgtctccatcccctttgttaccattccagtctgcgccccttcacccacacctggaccagaccagtggacacataactggtatccactcgcttctccttcctcagactgtggcctttgcatatgctagtccttcttcctggaatgtgcctccacccctagggctcagttctccacctgtcagggcccagcccaaatatcgcttccacaattaaataactgaaaccactaccccagtctaacttgggtaccctgttgtttttttgtagcacttaacacagtttgcatttatgtatgtggttacaagatgatttatttaatgtctttttccctagactgtaagatttctgagggtagggaccatgttcctcatgttagtgttctttctgtatagcctggcacaaagcagggtctcagtcagtctttgccaagcaagtgatcacattaatgaccctattaccttcccccaggagatcaaccaaaaatatgtaactattcttttattatttttatttttggaatattaaaacagtatatatgaaac

SEQ ID NO: 102410 - DNA, 751 bp, Homo Sapiens
  misc_feature (615)..(631): n is a, c, g, or t
cgaattaagaaaattccgttagccttttctccatctcctctaattctggtagcatctttggacccctaacacttggcatctgctacttcagacagacaaaccctatgtaaatgacaaagaaggggcctcccaaccttctccctgtgttactatttcagaagcactactcggggcacagtggtacaaatttcttatggccactagcatcttttttcaattttcaaagtaatcatcaaacatctgggtcaattatacttaaattacagaagcacggaattttaggcaacaggcccctcattttacctcagagattaagtgacttgctcaacatcacacagcctagtaaatggaagtcttgcaaccaaacttgagccccattcctcagtgagtaatcctgagtgtgtgtacgacaagataaatactaataatcgtgttgtgttctttaccgaagagaaaatgaggatcagcactctaaaatatcatttagctctatagggttccaggctattctggtcctgttttaagtgaataggaatttgtacattacataaacaaagccaaattttcaaataaggaattaaaacaaatgcagcagcataggagatgtttatgctnnnnnnnnnnnnnnnnngactgtgcctctttttatctcagaaatacttcatatacattttcttaacttgaaaaggaaagctaaatttgattaagcacatgtctgcatatcacatgagccttctactactatagaaga

SEQ ID NO: 102411 - DNA, 492 bp, Homo Sapiens
ggatatctgccgcatcaggtgccaccccgggtgaaggatgccactctgggtgttcttctttgtgatcctcaccctcagcaacagctcccactgctccccacctccccctttgaccctcaggatgcggcggtatgcagatgccatcttcaccaacagctaccggaaggtgctgggccagctgtccgcccgcaagctgctccaggacatcatgagcaggcagcagggagagagcaaccaagagcgaggagcaagggcacggcttggtcgtcaggtagacagcatgtgggcagaacaaaagcaaatggaattggagagcatcctggtggccctgctgcagaagcacagcaggaactcccagggatgaagattcctcctgtgacccgggctacctgtagccaaaatgcaactggatccagttaatcctctcatttctgacccactttttcctttgaaaatacaataaaattcccccataccggtgtgcatttgaaa

SEQ ID NO: 102412 - DNA, 695 bp, Homo Sapiens
tttttttgtatcaaaactttatttattaaacaaaaaatgcaccattggaataacatttctataaaaaaatgaatatgagactgttctacagtgtttacaaaacccccttttccttgtgtagtagtatacaagatcatgtgtagaaacagtcattgttttaaactgtaagcaagtttcctttcttgtagaacaagatttacacttaaatattgcaatcactagtctaatttggttaacaatgctagaatctgacagtttaaagaaactttttgtaggctcaaaatacctttttgttaaaaaaggtgttttgtaacaacaaaaaatttcttttctcactaaggctagttaaagctgtagtatacccatttctaccaaataaacttatcactagcacactaacaatctgtttgagttgcaaagccctttgaatgagtagcactgatctgcaaaatgctttcagaattatttaggtttggtgttatcttctttgaatgaccctaaaaagggagaagtggcgatgatggaacttcagtgaaggctttgcctggactggacatctcttcatactcagcaatggacaattcatttccaaagtggtccctctgaggtatggaacactgcagctttaacagccgtatctagatcccaaccagatctccctttttatcataaattatccaaaaagaagccacact

SEQ ID NO: 102413 - DNA, 587 bp, Homo Sapiens
atttagtctcttgaataactccagtgtcttgaaatctactatcttcaccctcatgaaaacgtcaagagtttgaggaccacctctttctacatctactagcctaaacattttccctccctttagctagtcctccttgacatagtgtggactcctggcatcaccttgtctactctctggatgagctcaaatgtgtcagtgtgcctgtctaactttggtccagatgtggcctcaccaagccaaatagaactaaaccattacctgcttgcttgtagacctggaccgtaggagagcccaaggcccccttaggttttctttactacttatgctactgactcatatcaaactgacacctaagctggacatggtggtgcacacttgtagtcttagctgctctagaggctgaggcagaaggtagcttgagctccaagagtttgaaaccggcctgggcaacatagcaagatgcccatctgacaactgacaaaaacctacaggtgttattttcggggtaaggtagggttgttttgatttcataataataaattaatgcattaattttatacaaaatataacattaaaaaccttcattc

SEQ ID NO: 102414 - DNA, 472 bp, Homo Sapiens
gcggccgcttcctctgctctacgaggctctggtgcccgtgacttacatctccttcccttccttccttccttctgaaaaatgcactgtcttaggtgcacacaggaaaacattgtacacattcaccccatgaacccaccagcacgttgacagagcaggctcctgcacacagacagctccctcgggcccccttctcccgtggcggccccgcgacgaccctgcgaggacccgggtcccgcttcctagagcagagggccttccccagctgtgccgaggtgggatcacgggcacgcagccttctgtgtccgcctcccgtcagtcggggtgatgcctctgggtctcacctgtgttttcatacgacccagcagtttctgataacggttccatcacgtgaacacagcacgatttgcttctccagactcttggtgatgcattttgtaagtttttggctaatattacaaacaaaacttgtgtt

SEQ ID NO: 102415 - DNA, 379 bp, Homo Sapiens
tttaaacattcacgtgacggaccaccttccctcagccaaacaacttccctgaaaggcgcccgaaggagccttcccatccaccgcgggtgcccaggaaaggcctgtggggctctcctccccgcgctccacacgccctcgcatcccaccgaggcgccagcttctgcctgcacgttgctgaaactggcctggaggttctgacaagaattagagcggcggccgttgccccggggatgacctggaagcgaaagagaccggcacgaattctagagtttcggggtttccgcgggttgagattgtacgggaaacaatgcattaaccaaacctaaaaatcaaacaaacacgtctggtagaacctaccattaaaaagcttaattcctat

SEQ ID NO: 102416 - DNA, 490 bp, Homo Sapiens
tttatgcaaaagatgtttatttcatcatttatttaaaaagcaaaatatatacatttttgaaaaccttcagtagccaacactagggaaagggcactaagtgaattgttctctgccattgggttgtccgtgaagaatttcaacctatgaacatttctaaacattcagagaagttgaaataattgtacagcgaacacctgtacaccaaccatcctcccaattctacaatttatatgttactattcatgtttcattctgcctctatccttctatccccccaatgttctttttttaatgcatttcaaagttgcccacatcaatccaattccccttaccccaacacttcatcttacactcattaaccagagttctcaaagggtttttaataacatgaaatgcttttttgaaaaaagtaagatgtaaaattaaacatactgcatggccttagccattcaaaaatatatcaaaaaggccaggcacggtggcttatgct

SEQ ID NO: 102417 - DNA, 477 bp, Homo Sapiens
aaagaattgttgaaatgatagtattttggatatattggggtaaataaaaagtagtattagaattatcttcaccttttcctttttcctttttaaatgtggctactagaaaagttaaaataatatatgcagttcatattatatttctattggacagcactgttgtagaaagatatacaataagcagagaacagtgttcctctggggattgagatggaggagattgggaagaggaaagcctttggtcttttgttttataatgagtgtatgtaatcattattacttttaaaaatgtttgatggaaaatgtaaaaaggaagaaaggactgacaacatactacaatgaattttaaaaaggagcaacaaagggaccaagacaaaacacaaatcacttacgttactttaaaaggttgagtattttaaattactgttctctttttttcaaataaatgggcagtggaaaggaaagttgtcatttcta

SEQ ID NO: 102418 - DNA, 812 bp, Homo Sapiens
  misc_feature (100)..(127): n is a, c, g, or t
  misc_feature (514)..(578): n is a, c, g, or t
  misc_feature (611)..(676): n is a, c, g, or t
acaaaaagtagatttaaaaatcagtatcttcctgacagaggtattgctataaattttcttttctagatgaaaagaaaaatttttcacttagttattatgnnnnnnnnnnnnnnnnnnnnnnnnnnnngttcttacaaataatgaaagccaagttttaaggaagtactgtggctttgtagcccagactgagaggaaaactgacaactatgtcatcaattcaccaaatagacgaaatgggtttctgtgttctctgttaagttataaaactaaacttagatactgaaattaacacaatttaaaaacagtcatgtagaataatgatgctattatttataatgctcatttgattctcacaatcttgttaagtggacaaagcaaatatcaccatcctgtttgctgaataatgaaactgagtctctgggaagctaactggtaggtctagaacccgtccagttatctttcctgtgattcctttacctttatcatcatcatcgtggtaagcattacattagannnnnnnnnnnnnnnnnnnnnnnnnnnnnnnnnnnnnnnnnnnnnnnnnnnnnnnnnnnnnnnnngaggattttttgagtttgttctattactattannnnnnnnnnnnnnnnnnnnnnnnnnnnnnnnnnnnnnnnnnnnnnnnnnnnnnnnnnnnnnnnnnatggtggagccagaattcaaacacaggtagtttggctctcaatatagtctgtgctcttaactaattcactatatttgtctctcaaatatcccaatcacatttctatgaaagttgtgtataaaaagttaatagattt

SEQ ID NO: 102419 - DNA, 372 bp, Homo Sapiens
aaagtcaggtttattgaggcgtaatttacacaaagtaaaatcttactttttcatgtataatatgatgggttttgacaaatgcacacggctgtgtaagcactgccacactaaagatacagagcagctctatcactccttcaaaactccctcatgccctataaagtcagcctttgagaaaggaagccacaggagggttgccagcagagaagtgatgtgatcttactttacttaaaaaggatcacgctggttgctagttggagaataaactggaaggagcaagggtagaattaggaagttggaatacaagaaaatgatacagtggcttggaaaaaagttagtagaggtagcggcggtgaaaagttcataataaaa

SEQ ID NO: 102420 - DNA, 498 bp, Homo Sapiens
aacagaaaaagaactctatgttgtgctttagacaatgattcatgtttatgtgttttgagtactcttaagcaaaggttggcaactaactaaatggtaaatgaaacagtctccagacttggatgacaccatcagaagtctggactgcttctccattatactttaagaaagacaatacaggtaaatgtgggagagaacaccgtgctttggctgaatgagggactgcctctgtttctgggaatacatttattatgtttgccttttctttctcagagtgtggatgtgcaagggagagtgtgttagatatgtagttttgatttaaagcacagtggataagagcaggcttagtctttatatacgagtggcctcagcaggtgataaattgtttttgactttcatcagttgccaacaaataagaaaagtgagagatttatcatgtatgtaaaaactgtagcaacattctctaacatgtaaaataaaatttaataaaatgacgaattt

SEQ ID NO: 102421 - DNA, 487 bp, Homo Sapiens
caactttggaagcctttatcttttagctaacgaatggttaacttggttgaagtttggggaagggggagttagaactttctctgtctttgatggctggctgagaatacagggtaaagaactgtccagtgttgtgagtggtgccttagagttgctcatagcaagaaaatcacttgggagggtggaagtggctctcagatggtcattggttacctataacttttttaaagaagaccttgagaagttgggacatatcttgtcactgaggaaattgtgccaaagaactgctgctttattaacgcatttgatcagatttgaaaagagagctctgtatacactctttttctaactccaaagaaattttgtttctagaaagattcaattaccgtaatgatgttctttggaaatgtgcctttttgcgtgtatatcttaatatggataaagttccaaggtagttcaaaggttttaataaaattttacttaccagaaa

SEQ ID NO: 102422 - DNA, 392 bp, Homo Sapiens
tggcagtatcctgaattactataaagcaggaggagttttgtttttaaaactttgaagaatatattggaaaaacataccaaaggatttactttgagaactttctaaactgaaatagacttctgggaaagaactattgttctcttcttcctgtttatttatgttattactcttcttcaaaagggataacagtatctcctttatatccacaaaagcagtcaaatcctcccttgaagggactctgtattcgggtagtcctgaaatatctcttgctagatttttgctccaatgtgataattgtaatataaaaaattcttttggtgtattttgtttattatttggtattttaagagccagataaatgtccaacttttaataaaatgtgttaaacataa

SEQ ID NO: 102423 - DNA, 364 bp, Homo Sapiens
gatcaatatatttggaaattaaagtttctgactttaattctggcctatcctttgaggctcttgagggtgggcaagttcctgaatccctcaggtggtaaagatgggcaaaggatggggaaaagaagcatgggtgattaactccttttatcccacccctggaaggaaagataagcttctgggaaaacacttaacccaaagtttcagacatgttaaaccactagcccagatttctgcccttgcaccaaggctatgcttggaaatcagtggttgccaggttaggaaagtggctggatgagagatctgaggacagaaatctcaattaacatgctatcccctcccttaaaagccaagttcccccgcgtgc

SEQ ID NO: 102424 - DNA, 671 bp, Homo Sapiens
ccagagtctgagaccagatctttgcagagacaagttgcctaccttatgttaaagaagcatctagattttcctgtctgtatcaacccaaatgcacatttttctagatatgctatacctttttgaaatttttttaaaaagctagatttttgagggacaggcagcatgtaaaaatttagaaatgttaaaatggtcaagtgtttaatggaaaaatctttttgaatcatgaggacttttactttaccctcagagaagctttgaaataaaattttctgagaaggtgctttaaattttaggggctgcaattatccaccgttaataaaagtcactgttaagctaacagtccaacaagtgagggtgagcctgatggattatatatcatatggtagaatactttactgccattaaaaaggtagagtaagaggataagcaaaaggtagttcttatgtaagagtaataggttagaaaaagtaacattgtaaatctcattaaaaatgtattttttatgcattgcaaaaagattaatcatatttaccaagatgttgactgaggttattatgaagtggtgggttttataggtgtttttaattattttcccatggttctgtcatatttttttaattttctatattgaatgtgtatttctttggtaataaaacaaaattttaaataaa

SEQ ID NO: 102425 - DNA, 479 bp, Homo Sapiens
ctacagctctgtctgctggcatgagagtgtacaggtcttcgaggttttgcaggcccgatagctctgggaaagcagaacttggccttttccaaaaattttctgcccttggttttggggatcatttgggcaagcccgaggtgctgtgcatgggggctcctggaatcctgggaagggcagaaagccttggccccagactcatcgtgcagcagctctgagcagtatttcggctgaggagtgacttcagtgaatattcagctgaggagtgacttggccacgtgtcacagccctacttcttgggggcctggtggaagagggtggcgtagaaggttccaaggtcccaaactggaattgtcctgtatgcttggttcacacagtgcgttattttaccttcctctgagctgctaatcgcctgcctctgagctgggtgagataaatatcacaaggcacaaagtgattgtacaataaaaaaatcaaatccc

SEQ ID NO: 102426 - DNA, 707 bp, Homo Sapiens
  misc_feature (307)..(315): n is a, c, g, or t
tggagcggccttcaggactctctgggagcatttgcatatcatatgtatattaatttatgtattcaatgtatgctcagcattcctatctggagtgatgagagtgattacgctccctcctctcccaactgcacaggcatgcaacaggagtgccttatccaattgaaaaagcagtctccatccccgagtgagggtatttccatgctcactaccaaggttcagggacatgctccccagaaatagtctgtgatgaagcacgtggtagaataaggcatcccacttcacatgaactcttgttttctatatttgnnnnnnnnnctaagttatgataatctgaaaatgacagaatttacacagttggagtatatttcctgagatcccaccacataaagaaaagatcacaatataagggcatgaaagagtgggaactcacagacccggcgtattcaccagtgtgctccctgacctggagaacacaactgcagttgccaggctggccctgtgaagcccacaaatcaggacacgccacttaatggcaccaccagcaacatagccttcccttggagactcaataatatctgaacccttcacggcgtggagctgctgatgttcctaactacaaattcaggctccacagaaaacatggcttctctttattttagattatcttattttataaaaagcaagaatatataaaagatatagagaaa

SEQ ID NO: 102427 - DNA, 864 bp, Homo Sapiens
  misc_feature (78)..(96): n is a, c, g, or t
acttcgaagttagcagtgtgaggagcgccagcgccatagaccagctcctcagtgaaacagccataactggtgaaaatnnnnnnnnnnnnnnnnnnntttagagtctctggaagttgtcctaagggcatatatttattcaagaaagtcgactataccttggcaagaacagtgaagtctatgatatttgagtcataactccttcagccctccccttccccttcctatcagcacaagaaaaatggaagttccactctaggtgggtatggccaagaaaatactgttctctctcccatcagcttccaaggaagggctacagcagcccaccaagagggacaaccaatgcccatcccccacccatccctgtattctcttagctccaaaccacagaaggtaaaatcctcgtgagtgcaaccaggggatcataggttcccatcctccacccaccgcctattcatatagtggagactctactccaggtgccacaagttgagaatattagagccttgattgcccttatcccagctcattcatacggcagagattccacaccaagctcccacttccactcagtgtctgactcataaagtaggggtgtcattctgagataaatgggccgctttccctgcctacctctctacaacaggagctcagatattttgcccagcggggagagataatccaaaagaacagagttctaaagctgtccccacaggaacgaactttatttgaaatagagtgtgtgaaaggacagcctaagattgctctcaagaacaatggagaatttagtggtaagcaactaaaaggattctggtaactccattagagcaacaaatgaacccataatgcagctagtaaaacaggaaa

SEQ ID NO: 102428 - DNA, 734 bp, Homo Sapiens
  misc_feature (523)..(523): n is a, c, g, or t
aaaagaaaaaataaagtcaaatggaaatgctagaaataaacatgatattagagatgaattgcttccacaggcttttcagtaggtaggcataggtgaagaaccagtgaacttgaactggtcaataaaaattctctgaactaaaacacaaagagaaactgggatgggggaaaagcaaaacaaagcaaaacctataagagctatgggacaataacagtctaatatacatgtgattccagcctcagaaggtgaagagagagagaatgaggcagaataaatatttgaagagatgatagttacatgaatgaggtgtggcggcaaggctagagagaagtggatatgggagcatttgcaaggagaaccactgaggcttggtcactgagtggagggaagtgtggcacctgagtgtctgtcttgggagctgcaggctctcagcaggtagtagtgggtggttagcaggtggtggtgccaggatggagagccaagcctagctctccagtgcctgtgctctctgctggtaccccancaccacctcctacaggccaaagtggaacagtagtgggcctttgctcctcgattccctagcctccagccccagcctttcctaagccctcaatgtactattcctattagtcaatgtgtggcagagagatgttcatctcccccccattctctccacctcctctgtcccaagtgttgtgtcacacattgctctaaagtaaaggttttcttttccc

SEQ ID NO: 102429 - DNA, 543 bp, Homo Sapiens
  misc_feature (52)..(70): n is a, c, g, or t
  misc_feature (125)..(125): n is a, c, g, or t
tcagttggcagtgcccagactgcgggctgcgcttggtcgggcaccccaggcnnnnnnnnnnnnnnnnnnngagaaagaaagaggaggagacagtgattgcagcctctcccggcgcaggtggcagnagccttgcggctttggagagaggtggagccttggtgaggttgggaggactgcctaactgcgatctttttctccattcttcctcctgggaacttctccgccctgaaagggtagcgtgagcttcatgccttcggccggccgtgttatactcgttagacccaattcaccatgaatcctttgaaagactagtggagagtgagaagggggtttcaaagtcactggagtaaaggaattctccaagcaccacctcatgattaattcttggaaaagcctgtttgcgcggcccttagaatcattttgacttcttgtctaatggtgaagtttttctctgtaatccttctactctgttttctaaaaccagaactaaaaacctaaaaaattgtaaaacttcatggtgtaattaaaaccccttcaccattt

SEQ ID NO: 102430 - DNA, 398 bp, Homo Sapiens
atattcactaacatataccagcagagcaaggtagttgaactgcatttcctcttccgatcagtgtagccagctctattctagatcttaagctcattcaaacagtattttcaataattcttttactgttaatcccttcatatttcaaaatgcgtttgaacataaaacttgtcataatccaagccatcatggtttcaataggttgatgcaaatacagccacttaggaaagtaaattgactttgcagtcatttagagttgcaacactgactctgtcatggatgtgttttcttatgagatggttgagaggtatcaaagttcacaaagctgtactggttgaatgcctcttatgtaatagcaagtgaataatgctttcataaataaaagtctttatagcaattta

SEQ ID NO: 102431 - DNA, 650 bp, Homo Sapiens
  misc_feature (159)..(159): n is a, c, g, or t
ctaaagggagggaagctagtgaagcgtcagttataatagaaataggaattcagtaaggaaatggagaagcttaaggcaaagggtgactctccggcctgaccctcactatgaagatatttatgtatgttcccataatacttttcagatcccaatgtctgngtttatccttgacagaaataatagaactgctgtcttcttccaagttaaacaaaactttggagctaaaagctagctaggtcaagagaaacaaaatctaatcctcacccaattgagagactgaatatacaaagaatggccaaacctaaccatgacctcctacccataacctcttcagtaatcggccagaagggtcaggacttaatctttaaccggcagcttccctatttcttgcccctgcttccagctctgggccaatcagagaaagccaaatgtgctcctcacaccaatcgcgtaagaagccctgcttctagtatagccctcctccaacttcccgatgccaacatcctccaatcagagccaacctgaagtttctcccttttttcagtatatgtaaagcttttccactcccctgcctgcctatgagtctgttaaatcaagtgatgggtcgcggctaactcttcccagctctgagtaaatagcaaattctcatt

SEQ ID NO: 102432 - DNA, 566 bp, Homo Sapiens
  misc_feature (210)..(235): n is a, c, g, or t
  misc_feature (260)..(299): n is a, c, g, or t
ctttacataacatttattccatatagaatgtatccacatacaatgacgtcagctttaaaacaatccactgttacttatataaaatcatctataaaatagagggatacacaacacacctcagtgaattaggctgatggtctaggattcaaaaaatgtgatcattatatttcctattttttgctaccatttcactgggttggcttaggttcnnnnnnnnnnnnnnnnnnnnnnnnnnggagggggagtctcgctctgtcacnnnnnnnnnnnnnnnnnnnnnnnnnnnnnnnnnnnnnnnnccagaatcctgatttaggaacagccatgttgggagaacagagaactcaatgcacatcatccagtcttgaagcaactgcaaatgtgccatcaggggaatcttgaaaaagtctcaattaagtaccatgaaacaagtggttattcatctatttttaaattttttaaaagaaagtaaccaatttagcctagaaattggtatcaaggacaataattaatgaaagaacaagagaaaatagtaacataaaaaggataattttgaggtatgtcat

SEQ ID NO: 102433 - DNA, 840 bp, Homo Sapiens
  misc_feature (48)..(61): n is a, c, g, or t
  misc_feature (705)..(728): n is a, c, g, or t
cataagccattcaaaatatgcctatcctcatttgtatagtggtgagtnnnnnnnnnnnnnnccatgcctacttctcaatttggcaaatgttgatgagattgacaatccccttcctgataacctacatattgagcgcatttttttccccaggacttcaatccatatggggaaaatgggtaacacaaaagaaaacaaagcagaaagggattcttccaaccttggtgcctgggaagcttctcaacctctcacaatctaagctctaaggcactctttcaggaagtttactattattgggtttatgtttctctaagtatacaggtggagcttctaaatgcctctcatgtataccacttcctgggtatacatgggccttcagagagctatcagtttgctgggcctgggtcccaagttttcagagagctatcaggttgctgttgctttccattgtcttgacccaacccgaggaacaatttagctcaacagttgcagaaaattacagcactcaatgtgctggtgtggtgatctgagcctgattaagtttgaatctgacaacactgctattcaccagctattgcccttaagggagtaacttgacatcaggtttctcatcaacaaagtggagtcaatgctggtcccacctcaaggggttgtttcccagcttgaatgataagggagttaacatgcatccaatgcaatgtatagtgnnnnnnnnnnnnnnnnnnnnnnnnctcctgatggagacaatatgcataatactgtgagtcttgggcagacatccaggaaaatctggttgggaaagacctagagaattttgattaaaagaaagaattaatgattttc

SEQ ID NO: 102434 - DNA, 470 bp, Homo Sapiens
ccccctgacctcatcttttaagcaaggctgacattgctatgcaggcttgttgggtggacttggtgagggcacgcgtgtgaagtggctggcaggtgcctagttctgttaagcacctgccatatgataacctgaggtcccactgtgtggcagatgaaggggaaacagaggtggaaggcacccgtgccacctgggtggagcacagtggaaggcctggtgttggctctgggcgtcctcctggcaccagcctgaccactctgcctctcttactaacccatctctccctcacgtgtcccctgggaggtgacttctcaaagcgctaacaggctccgctgggtgagtccacagctgtccctcttgtgatcatgggactcagcagcactgaccacgtccttccacgctctctcacctgcccccaactgggggcccatgacttggcattagcatgttccaaataaagaaatactggcaac

SEQ ID NO: 102435 - DNA, 619 bp, Homo Sapiens
  misc_feature (183)..(224): n is a, c, g, or t
ggaggggaagtatcacaccgtttaaatccttctacttatcctgattttacagatgaggcaatggctcaaagtcacagagctaataagatgtgaacctgggattcaaacccaggccatttggcctcagagcctgagcatgtaacgtttctgcctcttagttctgagtaatgagctggcatgtgnnnnnnnnnnnnnnnnnnnnnnnnnnnnnnnnnnnnnnnnnntctgcaatgaataggaatcacattttaataagcaccaagaaccatggaataataactttctatttaaaaaaaacatatatatatatgtatttttaaaactaaatctcagtgatcagtattttactctatagtctcagttgctgaccaccagagaaactaaaaccggagtgaaacttttccaggatcattaattgaaagaacaatgaaatccctccttagtggccttgctgtcctcttctatgtactcatttttaccgtatatccttggggtgggttctccccagaaggaatcctctctgaatctctctataacatcagctgtatcactgcctgatctacaattggagcttgatacatttttcctgactgaaataaaagctgaattcatacaatcc

SEQ ID NO: 102436 - DNA, 471 bp, Homo Sapiens
cctccgcctccaacctgggtccctggtggcccactgcccccaccccagagatgagtcgccagtgccatgccctgcaggaggatatgcaaacccgcagcaagcagctggaggaagaagtcaaaggccttcgggggcagctagaggcatgccaaagggaggctgcagctgcccgggaagaggctgaacaagctctcggagagcgggaccaggccctggctcagcttcgggcccacatggcagacatggaggcgaagtatgaggaaatcttacacgacagtctggacaggctcttggccaagctgagagccatcaagcagcagtgggatggggcagcactgagacttcacgccaggcacaaggagcagcaacgccagtttggactcaccccccctggatctttgaggccgccaacccctagtctctagtgttctctgaggccccagcaataaagtgtcttgatgtagaactcaa

SEQ ID NO: 102437 - DNA, 690 bp, Homo Sapiens
tttttgctggtaaaggagaaatgaatacatttattcagtgtttccacagacagaaggaaagctggcaagcatttgcagttcccagaaatcactgagtcttctttaccaggctgcatcagagcgcctgcgattattctgagaaacttacaatgacactgaacagagactcccgtgaggaatctgtaagaggctatcttcagacacgcatttcttttgaggaacaataatcagtgccacatcgcgtctgtgatttaacatgttcagttccctaggaaaaggcagcagaaggcacactgctgggatgaattcacatacacctgaaaacagccctgactggcggtgggactcagtgcaggtgggaaaatgacaagaaagtattgcacaggaggaggaaagctatccaaggcttcacttcccattgcagcaggagcatcttaaggccaggtaaatgcatcccatcgctctaagctcatgaactgctagcaggaatgaaaatgaaaagctttgtgagtagcaatatggcaatgttttccaagaaccttagtttttccatcttaaaggatcttttaaaagttcatatccactagtctcattttcagaaatgtaatataagaaaataaagatttatgtataaggatgcttaatatctatttttcaaaacaatgaaaataatccaaatattcaataggg

SEQ ID NO: 102438 - DNA, 782 bp, Homo Sapiens
  misc_feature (399)..(435): n is a, c, g, or t
acttgaacagctccatcttcactgctctatgttcaagatggccagttcttaaaaggaatataaagataacccataaatataactgttcatctatggacagtaatacaggagacgtgaaattttgttgactatgaaatagtggtcactgtttaaactctttgggtttccatttctttatctgtagaatgagagtgctggacttaatctctaatgtctattctttcttttttaaagctttaaatgtctatgaatatctaaagttctgggtattcttacagaaacatctgatcatacttctgagtaaaactttctactgagtctgatgttcagttgctcagtattatttcaataacatttgtagcaacactcactgcaggaacaagggacatattccaagannnnnnnnnnnnnnnnnnnnnnnnnnnnnnnnnnnnncattattataggtcatgagagttcagggaaaattaatcatgatctttattattttagttcaaagtgtcttcttggaacacttgtataaaattgtagcattattattctatattattgctctgttgtatttacatatgcatctgagaatttagctaatatgaactatgtagtttataacttaataattatttattatatatttgattttaaatgttcatgtttatggcttcttatttaagacctgatcatattaaatactacccgcccagtacaaccgtcttttgtgattccctggaaacccttaattcaatagtcctgactgaaaataaaagattatccatagacaa

SEQ ID NO: 102439 - DNA, 705 bp, Homo Sapiens
aactagagagaacgctgtctggtggataatggcctgaagagaaggctttgtcaaaataaccaggccctgaaatgcctccaggtctctttcaagaggttggaaggagccagcctcgggaggcagctggggctctcgaaggagccgattaccaagcgtgtttaggaaatgctgcctctgtaagggcacattacacgcagtaattgccccatgtgctggcctggccagtccccgagggtccccagtacttgaggccggagaaatccacctcctaagaggcgctcagtctcagcagagtcgtgacgtcattggcctcagtccccgtccccataggcctgggcgctcttggctgtggcaactgtcttagaagaatggtcccccatggccgctgatgtgtgcagtaatgagtgccgcccgccttaatcgtggaacagttaatgaacacaccctgggtctccggagcccacatgcacccacacatgctcaggcagcagcttagcccctcttattcacaggtgtgggcacagggaactttcgggaatggggggcccagtgtgttcatgttgctctgatctgccgcctcctcacagaaggcctttgttttggagctttgagtggggacaaaatgttggcatttcactcacattcctcttcattctttgaatcagacataaagtctagacgtccccagaggttaatcttgggaac

SEQ ID NO: 102440 - DNA, 876 bp, Homo Sapiens
cctcgtgcagtgtaatggaccaatatgaaaaaatgcttggttttgtttatgttccattcagaagtttctaaccgttgcttttcccctttgaaatggaaatctacacaatcaacatataactttaaaaaatgcctgacatgaaagataattgtattaaaagatactagtattagaagtgcgcacaaaggtaaaagctgttatctgtaaacagattaaaaaccaacagagttctccagtaccgatctgtaatctttctgcccgttgcccagcttaatgagacatagactctactgagtggacaaaaatcacctgatacttgctgttgttgaatttctgaaggaaattgattagtcaactctgtcatctatgagtagcatgaatatgacacagaggtaactgatattttctatgcttcatcaaatgatagtgtacatggtttcatttaataattttggggaaatatgatgtcttgcattatctgtttggcaaaactctgttgtcttcctttggttgaagacttcaaatggttgcttgagatgattgaataataaaatatattatgaaaatgaatttaattctctctaacatgctgtaaagtaatagattctttatgaatggttctcaactagggcacccccaggggatatgtcacaacttcagaagacactgtttattttaatgacttggggtggtgaggtaggaaagtgctattggcatctagtggttagagaccagggataatgataaacatgccacggtgcactggatagcctcccacaacaaaaactcatacagcctcaatgtcaacagcactggggttgaaaaactctattttatatgaataatcagaaaaaataaaatacctcatatgtatgt

SEQ ID NO: 102441 - DNA, 560 bp, Homo Sapiens
ctgagtgatggggagttctgtgggatgagtgaagtgggagttgggggttgagtgatgggggaccgagaggtcagtggacgaggttctaggggctcactggtgaacaaagttatgggggctaagcaggattaaatggggcttattaaactttgacttttacacgttttccagcacagtgacctgcccctaaaggttcatgcgcatccctcagacccctctttagacgcgccccgcttctccctctgccctctccccttgcccaagccccgaggtgggggcctggtgtgaatgctccggccgaagtgaacctgcacccccgcacccgaaggcctctttccggcttctgggcaaggcggccccggtgaggtgagcagaaggaaggagaggcacctgcgaggtctcacctgaccccgggcctcgcccaagttgggggcgtgggaggaggggtaggtgcggggtctgagggagatgggggtaaaatgtaattgggataatagttttagagtgtagttttttttggcatttaataaataacatttgaatatatagattaattatga

SEQ ID NO: 102442 - DNA, 490 bp, Homo Sapiens
ttaccctctgagtcctcggaatcatttttaaaacataaaggtttccagaactcacagctgtgaacttaactgttctcaagggggtatctttgattgattttcctaactcttctacgataatcggccttttcccctcttctgcttcctctcgttctggcagccgatgctcacatccataacagtgtctgtttccctggattttcccatcccagggccacgcagagtgcagctcccctacacggccacggcattctgtccctctgtcgcgtggccatgcgtggctcagtgccgtgggagcctctccgtgtctgaggccgagggcaggctggtgccccattcgctctgtgcctcacaggcggccctgatgctctgtgctccaaatctctgcaggactggatttcggccgggacagaggaggctgtgcccccacccacgttgttcccagtgcccacgcaccttgtcaactggaataaatttggtttccctgcaa

SEQ ID NO: 102443 - DNA, 794 bp, Homo Sapiens
ctatagggaatttggccctcgaggccagaattcggcacgaggcggcacgaggctgagtttcgagcccctgcaatcaatgagacagttttgatgagctaatgggaaatgcatctccctcccttgattttcccctctataaataatttcccagtgtattctcatgacagataaactccatactttacacacggctctttgttctgtttcagaatctttcggttctcaagaaaagctctgaatttgccttgatttctatctgaggtttatgtgatctgacaagttttatttcgggatggattttgcataaaataaacaggggtattaaatggaattccacagggagggaagctggtaggaatgctttgagttagatgcatatcagtatgttggacagacacccggctcaccgttccacatgcctgtcctttgcttggtgggtactgaactgacctgctcctgtgtggacattctttgggcctgagttgccccttctgcccacgtataggagatgtgtcagggtggcgggagaaattataaggaaagacgcaaaccttcttagaaggtcaggacgttttgcaaaacttcggaagggcaaagggtagataacaagggaatgtaaaggaatttatttggatgaatttgtttacttatgtctccaggtatcaacctttgatcatttgcacacaggactgctctctactcggggggtcgacaatgttaattacccacaaattgtgtttgctccaagcctttgtcattaaatctgtactaaataaatacaaacatctctggct

SEQ ID NO: 102444 - DNA, 265 bp, Homo Sapiens
ttcgctactgtgtgcaaatgatcaaaggttgatatctggagacataagtaaacaaattcatccaaataaattcctttacattcccttgttatctaccctttgcccttccgaagttttgcaaaacgtcctgaccttctaagaaggtttgcgtctctccttataatttctcccaccaccctgacacatctcctattcgtagcagtcggggcaaatcaggcccaaagaatgggcacacactagcggtcgttgttcctcaagagtcagc

SEQ ID NO: 102445 - DNA, 468 bp, Homo Sapiens
acaaacagtaccagttattctaaggaattaaccacagatttttgggcaagatttacttccctgaatgagtccattaccacaaagataaataaggtgttaccaagtactgatttcatcagcaatccagataataagactatttctcctttctttgaacccatagacacaaaactttctcatatgcctgttccacctggactcaacagtagcaaacaattactaaacaaaaccaaaggatacaatagcagaaaccacacatctgcaaatgaagatgaggtatctgtgacttcaaagacttggctggtttctgtggccctttgcacctctgtcatctttctcggctgttgtatagtcatcctggcatctggatgctgtggaaagcagcagggccagtataaaccaggacagagaaaatcaggatccttgcaaattaaaaaccgtaaccatatgaaggagaactaatcatag

SEQ ID NO: 102446 - DNA, 660 bp, Homo Sapiens
  misc_feature (602)..(611): n is a, c, g, or t
aaggtcatgataaggctagacaaatagagtgcaatgagggggtcaggtgcgaggccgtcctcccaggtcagtaaggccgcatggagggataaagagatccctgcactgcccccaaccgccaattcaccctgtgtctctcgcagaattaaagccaggaggtggctttctctttccttctactggtggtaaattaagtgactgtcctactttgtagacatgcaatcgttttgtacctctagaccttgggcagtcactggtgatgacactaattgaactaacacagaaactgctgtcacctgatgtgcttggtttcattcctgcctgccttctctacaacgtgacttcatttcatgaatgtggttgccattatgacagtgctaggatgctgatctgtacaccatgagtgactgcgaactttcagactctcaccgcaattcatggggagactttggtgtatcctgtttccagagttgtcctcttctgtgatcctcaaaagaagagaaaaaaacgcatgtggcataaatcaacaggaaagaaatgtttaccactggaagatggtgagtgcatgagtcaaataatctagaggcactgccctaatgagnnnnnnnnnncaatgattctagaaaataaaactttaaaaccaataaacgtctttacacg

SEQ ID NO: 102447 - DNA, 446 bp, Homo Sapiens
  misc_feature (180)..(192): n is a, c, g, or t
aatgacatggctcttctggtagtggtggcaaaaatatacagatggggtgaccactgatcatttcaaattttacttttgtaagtgagaaactgcctatgtcaaagtggtatgttatttgcaatattaaaaaaacagagatgtaagatcataaagaattgtttctgtatcttatgcactccnnnnnnnnnnnnncttttgtgttagcacaataaaatatttaagaattgaccaatttagatgtcttttacaggtatcataggggatatataccatgtgactctgaggtagtaagttcaaaaacaaaacaaaccatgattattctaaaggttaaagtctgtaatttctaaatattatgagttatatgttacaagaaatactttgtttagggaaatcttactattgggatttacttctaacagtgacatgtgaagaaaaatatgtaattc

SEQ ID NO: 102448 - DNA, 266 bp, Homo Sapiens
caagaatgctctcaggccaattacttctgtaggaattcatgaaaagaagaaaatctgatggatttgtgtactgaaataaaatctgtggtttctttcccttccaggaccaattctctaatgtgcaataggatagtaacaagactgaaagcatttccacatagattcaatttgtacagcttatctccaggagttctccaatgcaaaataaagtcattgctctttgtgaaaaattcccatatttattagtaagcattttctctaatatg

SEQ ID NO: 102449 - DNA, 540 bp, Homo Sapiens
  misc_feature (63)..(124): n is a, c, g, or t
ttgagtacaagctgaaacaccgcacaccacctcctctctctaccattcagaacactctttacnnnnnnnnnnnnnnnnnnnnnnnnnnnnnnnnnnnnnnnnnnnnnnnnnnnnnnnnnnnnnnggaatatttcccagcttctggaaagaaagccaagccaatgatctctcttataggtgacatgggatagaggatcccattccagattcccccaggtgctccatgaaacagcacagactctggttttccatcatctcagctccggggccttaaggcctcccccttacctctcctctgagttcctgtggaatccacactccagaggtggccgccccacagcctggggcctccccagggagctctcatttgggactgccccagctctgatgtgtcaggagaggcatttgcctttagccacctgttcatttgggggaattctcctataggctccctgtgttcccagttctacattcaaatcattctgggtcttttggtccttgtgataaaacatgaaacagcagaaataaacgtttaactat

SEQ ID NO: 102450 - DNA, 396 bp, Homo Sapiens
taatctccttgagaggtgaagtgacccaaggcatcgtgttggctgacttccctgtaccagtccagtcatccaaagccccagttgtgtggggcaaactggaaggatgggaagggacggtgtggacacctcccgaatgggttatggttttaactattaggaacacggttgaactgccaaaggtgcgtgacttagtacaatcgattctgacaccctgtcaaggggcaatttgttctcttgagtatcataaactttctatcaagatggaaatcaaagaggacaaaacagaaagacaaacttgagaggggctgagtaggattggagaggtgatgtcaccaggcacagtggcattgggaggaggcaacctttcagtcatcccgaggatgtaatagacttccc

SEQ ID NO: 102451 - DNA, 527 bp, Homo Sapiens
  misc_feature (205)..(205): n is a, c, g, or t
atcagctctgtcctttgtcatctgttgccacatccatggaactcaggtttcctatttggaaactagagtgttgaaccagataaggttcatcaggcccttccagctccccaggctccctgaagtcctgggtctaggcaaggcattgtccccctgcttcctggaaaccctcattttccttgtctgtaatatgaagtcagcattggcnccgccccccaccccctaccatctcccagtggaggggaggttgcaggggagagctgccgccaacccactcctgaggcaccaccacagtcagcatcgacaggggcacagcagtggcagtttgggacctccctgtgcctctcagcactcccttccccacccccatagcccaaggacaaggctaccacagaaggttaccacaggacctgggcttcgtctccaggggacaaggagacactgtcagcctggtgttcaccaggcctggtagatgagatggcttgtctcatccacaccacagaaggaaataaaccatgtggcttaaattt

SEQ ID NO: 102452 - DNA, 424 bp, Homo Sapiens
cgacactctcctgtccttgggtgggggtgggggtcctggaaagaagctccgtcagcgtaaagtgaactcttagctttgactttgcagagggatccgttgtgtcacagtgacccgcattcctgtcattggtgtggtgtgtttcacagccattgcctccctaggtagattgtaaaacggcgttcgtagagcctttgacctcataatattatgttggaaattacacgatagtaaacataatgataaatggggaatgttaaatggtagtatgggaacattttctaatggttgcatccttaaaattttctgtttcaagtttttaaaggctatagccttaaaaaaagctgactgtaggaaaatggtggaaagagtcgtggaataaaggtagctttggggattatgacgtgaataaatgacagaaattaaa

SEQ ID NO: 102453 - DNA, 403 bp, Homo Sapiens
  misc_feature (87)..(104): n is a, c, g, or t
atggatgctaagaccagagttggaagtttgataaggaacaggatattgactaatttcagaaatgaaaatatgttcccacaaaacacnnnnnnnnnnnnnnnnnngttgaatttaagtaggcaggagctggcagacaatgtggttgagcaatcgaggttagcatcaccagtggtgatgatatgtgccactgggtgtgaggcactgagaaaaacaaagcagcacttctgtagaattactgcccagaatttataacctcactaaaaccatgatgaaacatctggtggacctggcttggtggtcattctactgaatgaaggacctgtactcttcaaagctgtcaagcacatggaagacagggatagacacagaagctgtagcagtttgaaggaatccgaagaaacat

SEQ ID NO: 102454 - DNA, 661 bp, Homo Sapiens
aagacattacctattaaggaaagataattagactgacaggaaaaatcagacacattttagctgtcatgaactggaatgacgtaggtgacacgattaactagctcttcaactgagtgctagttaaagcaattatggtacatccatacagtgggacccggggcagaactacacaggctgactggcagccgtgcgcacaggtgtgtgctgggggacatgcatttaggctgtgcgtgtgtgggcggcccccagagaacgctcagcatttaagcagtcgcaatgagggaggctgacaaggctgctgggaagaggggtgcgcttcgccctctaggctactctgcttttgaggcccattttgaatgtgcgtacttcctgtttaaataaaaccaaacaattttaaagatcaaattctggaagcacgtacttgaaacattaacaacaattaccttggagaagaaagagggcaataaaggcggcttttgtgttttattctggacgctgccatgtttaaaaaacaagaattcattcatgaccgggaggccttcaacagtcacactctctttcttgagctgagaggtggatgcgcgggcattctcggttactcttgaaactgtatgcgcaccttatatacactcccatacatatgttcggtatcataattaaa

SEQ ID NO: 102455 - DNA, 522 bp, Homo Sapiens
gacatttttaagatatgtaatgaagggagatggttggggaggagaggaagacaaaagatacaactccgggggatggtggaggtttaccaagaggagaaaccagcaagacacacagtgggaacaaccatgagggaagaggtgactgagggactgtattgttactgcagcctcggaagcagcaaatataaaaaagttaccctttctgccccacccaagctcagagcctcctcactgattttcctactcccaggccctcccagtgccactgtggttcacactgagcactggtcctggggtcctagcagtcatcattttacacaatttgatcctgttcagctcttctggttttgtctctctttctttccttcttctgaaagtctagctggagaaaataactctccataccccggaacacacaccgcgttttcccatctttagctctctgctcactaatgacttcccctctaatgtccatccccatcatatcatctccacccacccaagtcctacccataaaaggag

SEQ ID NO: 102456 - DNA, 795 bp, Homo Sapiens
  misc_feature (774)..(774): n is a, c, g, or t
cagttgactgaatgctattttcttcatatagttctgctgtctctcctttcccttgaacgctctgctgcatgagggacctaaaatagtttataatagcctgaggctccttaaagaaaatggagaaggcaccagactcccttttgtggagaaaattgtttttccttgtgtatccccaagagtgtaaacacacaagttcatgtcagctcctaaactgtttgcttttgtattgtgttacctgatttttttgtttattaattattgcaacagaagctactcctgcatttttaaggaatagtatattttagacacttagaaatatttttttaatgttctttaagtacactgtaaaagcatccatgtggtcgagcctcataataattctccctttttgcagacccaggattcagtgtggcctcttcccagagctcagagatccagttaaaagataggtagtcactatctaaataaaattggtctcctgtgatccaaccacctcccaccaggccccaactccaacattggggattacaattcaacatatttgggtgaggacacagatccaaaccatatcacaggccaaggccgaggcacggttgagaaggctcagaggcacctgaccaaagtttgtaacagttttgattgacaataccaaattaccttacactgatgtatacaagatgcccagtttttcatttttaccaatcacctatgtttccaaacgtgtttatctttgtcaaccagatatgcaaaattaaggtgtctccttacaaactntctgatagtaaatatcaaaag

SEQ ID NO: 102457 - DNA, 623 bp, Homo Sapiens
  misc_feature (55)..(64): n is a, c, g, or t
actatagggaatttggccctcgaggccagaattcggcacgaggcggcacgaggcnnnnnnnnnnatcacactatactgcctcccatttgaaaaagtaaaaattacaaatttttacattttaaaataatttcattatttgttgccaaaagccaaggcaaattcctccttttcatattaataaatattctttcaagttcttagaatacctgttaatgttttagaattatctttacgaaaaagtaacatatagctctggagtgtttttattaagattcaaattcataaattaaatattgaaaacattaattgagcatttgtacatgcaaagcacaatataagtggaagatactttttagtgtgacagagaataagaaaaggtttgaaacaggcttaccgattccttcttttccagcttcagttttgaatttgtaagtggaggataataatgcctatctcacagagaagttgagaaaattaggaaatgacagatctaacgtgtgccaaagcataggacttgacacacggttggcacttaataaatgccggttctcttcttccactccatttttcagagatgcagtgaaaagaaagaaatcaatcctgccaacagtaagtttgtaatt

SEQ ID NO: 102458 - DNA, 538 bp, Homo Sapiens
tatgaaacaaaacattaacaaatattgttctgctataggcactggtaacctaattgtttcatctggtacatccctcacaaattacacaaggatttatttcatcagacagtgaatagaatttaaagggtcattttttcttttcaggattgcacaaaaactgagaagatttctaaacctaatacaaaagcagttgtaatagggcaaataacaattctatgcttttctaatgtatagcgattcaagatatataaatgcacaaaccacttgcagtcttgcttcagtgatacttaggaataaattccagataacatagcataaaggagtaatacatctttattattattgcttgagtttgtgggggaaacccttttgaataaatgctaaatgaaacatgaaccacccatctgtttaatagcaagaaaggcctgttcattgtcacgtatctccatcctcaccaagaaacatttgacaaccgtaggtcaagggagtgcaaaaatggtagacttaagcactttagggccatctcctaatctgcctt

SEQ ID NO: 102459 - DNA, 724 bp, Homo Sapiens
  misc_feature (67)..(75): n is a, c, g, or t
aaactttttcacagatgttagtgctttagtgattttatttggcctgtgctttagatatactcagccnnnnnnnnngctctcctagctctggcatgtgtttttcagttagatgcaaaatataccttgattttactggtgaaccatcacctccatagattccaaagcactgtccatattattgagtcaaaatgcaagtttctaggtaaatactgctggtcaaaatttgaccttaaaagtttctcattatatagaagctttaattgaaaaacagcatttaattgaaaaaattgctatttaatcagtaatatttaagtaaaatgtgcgaacataatgtcacaaactgtataaatacaaagaaaatatatatgtgacaaaaattagcttgaaataaacctgtatgcccttaaaacataactatttttaaaatgattgaaaatgtatttcttgcctccaagaaatctgactgtgatcaaagaataatcccacacagatctgctaatttttaacatttccttcaaatctttttagaataaaaagttataaaatattacagatgaagttgaagtcctcaatagtttcattaccatctctcattccaaaggcaattactttaataaattttaaataatttacatatattttaatttgtatgtctggacaataatattgttattgtgtcttcaaagttatttataaatggtgtcaaataaaatataccattctg

SEQ ID NO: 102460 - DNA, 505 bp, Homo Sapiens
caaagtttggcaaatctaaaaagatatcagggtaccagtagttcactgactttgttaaacgtttctcaggagagaatccaaaattgatgtttgcacttcagtagtaaatcattgaagatggagaaattatgccaagtgactctctcaagcctttttaactcagacgcactgcctcctcaatcagctcagcagataaacctcaactaccttaagcaaagacttccttacttttacactttcagtctctgtctccccacttttccttccaacttctgacttttggtgactcttacttccataccttccctctcttttccactgccctccttctcctcaagaacaatataagacttaaggatgcattctctaatcaagcacagagagcttggtgatgaattacccaaaggacaaaaggtagggagctgaaggagaacagatcataacttgaagcactcaactttatattgccaactttcattcttaataaagaagtggttaaaatggt

SEQ ID NO: 102461 - DNA, 701 bp, Homo Sapiens
  misc_feature (89)..(89): n is a, c, g, or t
  misc_feature (91)..(91): n is a, c, g, or t
ttaccattctgatgttggagcggccgcacccagcctctgtgcctattttaaaacatatatcccaaagtcatatccccagtgatccagcncngtctgttactttaatgagacagctcaataaagataggaaatatatattcagttacttaaagagaaaataatactggtggttctccctgtaaagaggtagaattgccaaaaaatgcagaattgatcagcaaaacccagctataaagaaagggcaaaaggaactttattttagtgccttatcccaatatccttttatttagttttttgattaacatgatgtgtgcctattttcagaatcagtgactgccagctgcagctcttgacattatcaagtgagctctggaaaattctgggtagctctttcctattctctcacatgcccaaagaactaagtaattttggtcctaactcttactattctattcttcttcacatgaaatcacattgtttcatactgaaaaccaggatggctattagttcttattaatctgtcattattaggaatgagaggatataaaagaggtatataaaatgtatgagtgtagagcttttgtctaaggcaattactctgtgaatctgaggtgagacatttcttaaattttgaattgtggagctctccattttttaataaattatattcatataaacattataataaataacactgctta

SEQ ID NO: 102462 - DNA, 587 bp, Homo Sapiens
gcaacgcgcgcgtcatccagtggctgtacggctgccagcgcgcccgcggaccgccgcgcgagtccgaggtgtgaccgccgcggctccggactggccccgggactggccccgggcacggaaaaggacacccctcttctggcgcgctgggtgcctttgcgtaagcccttccttctggaactcagtttcgcgtctgaaccttggggaggtggaacaagttgctgccgaaggcccttccctgctcccgcggcgaagggggagggagaggcctcttggtccctgtggagacccggtctggggagtcacgattggggtgggagatgagcaaacctgctgaataaagttaaaacgttatttaaatggggagctgaggaaggagcaaacgggttttcgcggttaaacccgtgggttttggaatgtgtgttcccggctgtgtgatcctgggcaagaacttgacctccctggacgcagcggcacccctcggttattaaggagggaggagtaggggatagaagtatttcaaaatagttgtaatgcgcatggcaaagtgcccagcatatagaaagtgctcaataaacgataactgctgt

SEQ ID NO: 102463 - DNA, 337 bp, Homo Sapiens
aaatgtactaaaggtctcggacagcccgtaactctaaatatagctctttatttttgtaatgttatgttgagcttgccccaaaattaaccttagaaataagatcttatttcattctgttgacttcccatgtataatgtatggaggcgaatgagaagtaaaggcaagttgagaaactcctccagaactcctgtgtcatggccagtctacatgcctaaagtgtgtcttcctgtgaggacagtgccatggtacctcctaaaatgtacagatgtgtatttatgctatcaagattgtgattacttttcaatatctagactgtattaataaaatagtatttcag

SEQ ID NO: 102464 - DNA, 722 bp, Homo Sapiens
gaatatgtgattaatgtgtgttggctgctgttgtctctgatttggctactgttgtttctgatttaaatctaagtaaatgtttaattaaatgtatagaatgctgtctctaatgtgaccctctctccttattaaatcctcttattaacccactcctatgagaccatcttatttcttgcagatgaatgatgctatgggatttgaattgccctgggtgtattttgtcagtctcgtcatctttgggtcatttttcgtactaaatcttgtacttggtgtattgagcgggtaagctacacctctttcatcttgaaagcagagtcctgaggacagttgccaagaccacacaagctttgctggatgagggccgccaagaggggttgccagacattttatgtgtcctctgagatgctttcttttctgctgaggcttcccaaatcaagctgtttcctggaacctcaccaggcttcatgaaggagaactatagaacgattattgaccagaaattaatcagcattgttgcttgagatttaaacaatttccatagcatgccctttttttgtctgttctaaagtgagatacatttataattgctttatttgtctggatccaaatataatgcagattaattgttataaaacgatagcaaaatgagctggattgggtgggcttttggtagtaaccattcctagatttcagccgctgagcttgtcaaaattaacaggaat

SEQ ID NO: 102465 - DNA, 469 bp, Homo Sapiens
  misc_feature (12)..(12): n is a, c, g, or t
aagctgttatanagttaatatctgctattctggactcaagaaggtcaatctgtaccctccgtacgtgcctcctttcctagccttcccaagaagtcttaagaaaaatggacatcaaccaggctgaaaccttggcatcatacctggcacctgctggatgcttaataagtacttgtggactgagtgactctcatgccttacctctgcagtgtagacaatagtacccatgcttgctacatcacggaggacttgttaagcattattcaattatgaatctttagctagtctacatgtcatagattctaatattgatgttttctaccctttaatataagtgaattttaatccattttatagtacatcttgaaattatatatataattttcttagtggtacctaatgtatcttccaatcaataattttcctgatttattgaaaaacggtattaaataaatgtaaaaacaaaaccaaa

SEQ ID NO: 102466 - DNA, 499 bp, Homo Sapiens
tttgttgcaacttatattaaaatagcatgaataacaaataacaccaaataaatatcagcaagagtaatgcctacacatattaaagtatccatttaaaccatgttctaattaaatagaatgtccactaagtcaattttatatatcattacacgtaacatgatatcaaagaatatgattttatctattaggcatttccaaatacctattcccaaattaatatttatgcacttgttaagacttacagtttacttagaaataaaacagaaacaaacacacatgcatttttataatttaaaatatttcatgttacacaatgagcaatgttcagatttaagttttaagccaagtttactttttcctaagttgtatttatgccaaggctttcttacaaaaatatatcttatgtgtataaattggacaaacttacagtagtatttctaatgttcaatttgagatgggaaaacataaacctattcaaaataaagatatttgtcaaggt

SEQ ID NO: 102467 - DNA, 547 bp, Homo Sapiens
aaaggggaaggtatatatttaaaattcctccccttcattttcttcttcaaacgaatcagtccccacttcttcataatccttctccagggcagctaagtcttccctggcctcagaaaattctccttcttccatcccctctcccacataccaatgcacaaaggcccgcttggcgtacatgaggtcgaacttgtggtcgaggcgggcccaggcctccgcaatggccgtggtgttgctgagcatgcagacggcccgctgcaccttggccaggtctcccccggggaccacggtcgggggctggtagttgatgcccacctgagggacacagaaagaggaggagccacagaagaagatacaagtcagccagaggataactcaggatgggacatcttggtcacttggcatggcttcaagtcatggtcaggggcgtgggagtggggctatgggatgcaacaggcgggatgggactggggaagccagcaggtggcaagggagaagctgaagagaaagtggaagcaggcagggcaacagagcaaaaacccatctctac

SEQ ID NO: 102468 - DNA, 360 bp, Homo Sapiens
gactccatcataaataaatacacacatacatacatacaaacaaataaaagacacagactaagggaactgggtgataatgaccctggagaagtaagatcatagtaagcttcagagcgaataccatggcaagccaaagatccgtacgagccaaagatatggagaataaaaaaccaagagcctttcagaggaagtgattctgcaggaggaatccataaatatctaaatgaactgaggccagaaatcagaaagagatggaaaagccattacctgctaactttccagattatgtggctattacttcctatgctcggggtacctgaaagtccactgtatcctgccaataaaactcctataaattaa

SEQ ID NO: 102469 - DNA, 497 bp, Homo Sapiens
  misc_feature (332)..(350): n is a, c, g, or t
tcaacttttgtagtatttacgtatgcagactagtcttatttttttaattcctgctgcactaaagctattacaaatataacatggactttgttctttttagccatgaacaaagtggcaaagttgtgcaattacctaacatgatataaatttttgttttttgcacaaaccaaaagtttaatgttaattctttttacaaaactatttactgtagtgtattgaagaactgcatgcagggaattgctattgctaaaaagaatggtgagctacgtcattattgagccaaaagaataaatttcattttttattgcatttcacttattggcctctggggnnnnnnnnnnnnnnnnnnngctgttggcagtttaaaatatatataattaataaaacctgtgcttgatctgacatttgtatacataaaagtttacatgaattttacaacaaactagtgcatgattcaccaagcagtactacagaacaaaggcaaattaaaagcagct

SEQ ID NO: 102470 - DNA, 212 bp, Homo Sapiens
cagaataacatacagtgtacagaaatatgctacattttgatgacacaggccaggtgacttacccgcaagggtgcagaatctgatatgcttgtctatgtatgtgtgtgaaaatagaaagcatacaagtataacgaaggcacccgttctcagagcacactcttctttgagctcattgtccttaggctcacagggatgtcaagttggggtgcttc

SEQ ID NO: 102471 - DNA, 429 bp, Homo Sapiens
ttcattgacttcggtatttcatagtacctgagattttattttgagataccatcagggtgagttgcaccacttgtactcaattctaattgccccctggcaatctgggaagggttcagaaggtgggcacccagccaacagcatgaactcagagcattgttttagggttggaggaggaacacgctttctttacatcactagtgtagactcaaaagatatgcaagtgtcaaatatgcaaaagaaatagtttattcaaagagactgtgtgttactgaagaacagcataaaaatatgatttttttacttgcaaaaatgaaaggaaaaaaataccacgcattgaaatgcccagttcagactgaataattcctgctgcagcaaggaaagtacctactataatagaaattctgttttgttttctgtggttatcaagtt

SEQ ID NO: 102472 - DNA, 485 bp, Homo Sapiens
ttctcatttataaaatgacaaaagaagatgcaagaagtcaatctactgaaagtggttcacaagctaaaaggctctcttcaaatggaaggtcttactgtggtcaagtgctacagtgtcccaccatcacaggacgcaacctgggtctgatgtgagcaggctactcaagctacttcccctctggcccaactaaggtggccacacagccataataagccattggttactgcagatgcttacaaaggaaacctacctttaatgttgcttcatccagaaccttcacctcctcgatgagtttttttaattcttctgagctcagcagggagataacggactgaccagactgaagggaactgtggtccccatcatcgtcttccttggcttccgtgagaccctctgtatattctctcagctctgaaaggctttcataaggagaaacaacacacagtatgaacaacaatattaaaaagaggtaacagtaattgtat

SEQ ID NO: 102473 - DNA, 432 bp, Homo Sapiens
ccttggagctacagaggcctccagcttctaccaaggccttggaggtgaagctggcataccaggagtctgaggtggctgccctgctcaagaagatccctctgggtccaagtgagatgagtaccatgcggtgccgggcagaggaacttcgggaggggacactctgtgactatcggcctgtgttgcctctcatgctggccagtttcatctttgacgttctctgtgctccaggttcccggcccccaagtcgcaactggaacagcgagacacctggggatgaggagcttggatttgaagcagcagttgctgccttgggcatgaagacaacagtgagcgaggcagaacatcccctcttatgtgaaggcacacgtcgggagaagggtgacctggcattagcactaatgatcacttacaaggacgaacagggcccgagag

SEQ ID NO: 102474 - DNA, 353 bp, Homo Sapiens
aagaattgctgagttttccggattgtactttcaaagactttccctgaaactttgcgtggcatgggggttgcagaaactggtgtctacacattacaaaagtgtactgtttacacctatttgtgatgcacccatcgtgtttttctccatggaccacctattaagcttcctgctggagcgctcttggcccccttcctgctttctgggccacatcctgttgtaaatcggtgctacttgtggggttttgtttgtgaattggggatatttaaggaacaatttattgaaacaactgaagagtttgtttcctcctttgggttttacttttaaaataaattcggttaggaaaaagtaaaaaa

SEQ ID NO: 102475 - DNA, 457 bp, Homo Sapiens
ctaaatagccttaatgagttgatagcatgcatagccagcttacaacaagatgcataagcaagttgcagagaagcagggttccccgaaaagcagtgctgggccaggagtcctagacagccactaatcctgtgtcttttggcaagcattcccaggccccaggctgcttgtgtgaacaatgcgggtgtgaggctgggtgattccactgatccctgcttctataaaatggctggagcaggtgtgtgagggagggagagatgctaccatgtgggcaacttcctaatgttgttggcactgggcactggggttgggggaggggacaccaaaatgaataaaaagactgcgttcctgtccttcaggaagttacaattgaattggcagataactaggcacatacatgtttgacagacacatgcatttgaccttttaagatattttctcttccaaaaatagttcgcaa

SEQ ID NO: 102476 - DNA, 530 bp, Homo Sapiens
  misc_feature (45)..(45): n is a, c, g, or t
  misc_feature (326)..(334): n is a, c, g, or t
  misc_feature (356)..(403): n is a, c, g, or t
atagtgttacataacacgtgtcatactttgaaacatgttcccgcncaaattccacactttgacaaatcgggatagacatagatgatagagtcctttaagaaagcaaaagatcctggaaatggcagtcttattaaattaaaataaagagccaacccaatcaaagcatgggaattcggttacttcctttcaacagaccttaaaagggtaagaaatccagtcagtaaacagccacccaaccaccactgttagtaggagctaagtgaagaaacttactctgtgcccagccttagtggaatgaagaagttgattgcagacaggggggatgnnnnnnnnngggtgaaacatgaccaatgttnnnnnnnnnnnnnnnnnnnnnnnnnnnnnnnnnnnnnnnnnnnnnnnncccataccaaatgagcaaacaattgttaatgatttctgagtgttatgaaagaaaatgttaaaaatcagctgtgctcaaaacaataccaaaataaatatttgctttatttttgaacatgacacacaaa

SEQ ID NO: 102477 - DNA, 574 bp, Homo Sapiens
agcagctgaataagtatattaatcatctatgaaaaatttcctctttggaaataagatgaactaaaaaaaataatagaaatatcataaaactttttagtgaagtacagcgtgtcctactgcagatgtttatactctttaaaacacctctttgtcacttagaatgtgtgatttccaaatttagttttagtttttttctttgaaacgagggtggaatttaatgaatcaaaatttaatctgatatctttgatgttttctttgagaacaacccaaggataagccttccaaagaagaaaaatgaatcaggcagttaaatgagttcagtttgatttttattaacaagtgttttattttttatgtatgcgtcacttgtcatttcaacaagtgggtgtcaaagcaccacatggaccttgtttgaaaatgatcaaattaaggaacttgaggtagaaagacaaaagaagtgaacataaaattaagctaatcaatggattttgtgcaaatggttcccaacttcatattaaattcttaattagctgttgtcatagaataataggatggtaataaaatcaaaatgctg

SEQ ID NO: 102478 - DNA, 483 bp, Homo Sapiens
tatgtgggagagcctgggctcctgggctacaaaccgtgcagcatgtagcaactgcgacaccgtggaattatgtgtgtagctaatcatagaaagggtacagtaaaaatacggtataaaagatgttttaaaatgacacaggtgtatagagcacttcccgtgaatggagcttgcgggactggagtcgctgtgggagagtcagtgtgtggtgagtgtgagggcccagggcattactgtccactcgtatgtgactggcagtgtaataggtgtgttcacaccagcatcaccacaaacgagtgataacgtgttgcactgtgacattacacgccgcaacctcactaggcaacgggaattttcagctgctttgtagtcttatgggaccaccgctggatatacagcctgtcattgacaaacttcgttatacaatgcatgactgtattctaaaataaatcactcaggccatagcaccactctcctccaaaaaaa

SEQ ID NO: 102479 - DNA, 546 bp, Homo Sapiens
aatgtattggaggggcggcggcgactgctgcagctgggccagctgcgcgggctgcaccccctcccagcctgcgagaggaggaagctagtagaagatttgtaccaacaaaaccaaggagtaaacaacttgagaataactgcatgagctcagggcttggactgtcagattccatttctaagcttccagaagagcgacacatagacactggggaagtcagagcctttgaactccaatgccatccccgtcacccacctccaccaccagcaccaccaccgaatggcactttggacaatttttccctctcatgtgacttttgtcatttcttacgtcagttggagccagcacctctcaaatccatcttctaaaacccagaaaattgtgtgtaacacatgatgactgaaagggagtaggctgaccagttaagagcctgccactggaatggaaggctgtgggaaggtgaggggacggtggacatcaaccgggaagagctgaaagatggcgttaccaggtatctaccctgctaccctgcatagaattcccaagacc

SEQ ID NO: 102480 - DNA, 517 bp, Homo Sapiens
cagtaaaaggtgtttgaagctgtgggttttgatgagaaaatgcagtgctcagagagtatgtggctgaggacagaggactaggggacactaaccaagtaagggacagttgaagatagagaatgagaaaacaataggaaggactgagtcacaaaggccagagtggtgggtttcccaagtggcagctgtactacagaatggcccagggctcagcttcttactaaccttgtgaccttgaggaactggcacttctctctgcttccctttccttgtctatgaaataggataataacaccatcatcaaagggtggttcaaaggtttgagcactgtggcaaatgtaaagtagtgtgtccttgtaatcatcagggaccaggtaggaagcgcttgatcagggtggattcccctcagagggaacactcaagaaaggtttgccgaaactgttataatcagaatgcagctacagcctagatatagagatcgcctgaacctgtgtcctcacgtcattaaaagtctgctctt

SEQ ID NO: 102481 - DNA, 332 bp, Homo Sapiens
aatgaatcagaacctctcatctagtgcttggaaaaaaatggaacagtcaacttttttaaaaaaataagttctaatgtgaaactatttcagtgtattattatagtgatttgcaatagaacctagagaacatatttgtaacactggtttcataggcaatatgattattagtaccaattatcagtctaattagtaccaatgatcagtctaatacataaacattagtaatataacctgtttgtattttggagggctttagaacttttcaagagtttagtaatgtgtttatatgcattaatttaaaaaaatcagtagatatatacagaaaaagagat

SEQ ID NO: 102482 - DNA, 548 bp, Homo Sapiens
gcggccgccggcgctgcctccgcccgcgtcaaaggatccgcccccgcaaccccctctggcaccgctggagcggcctgagatagagcccttttcaggagacccagtctacctggctgaattcctgatgcagctagagaccttcatagccgaccatgaggttcatttccccgggggcgccgagcgggtggcctttctgatctcctttttcactggcgaagccaaggactgggccatctcggtcacccaggaaggaagccccttgcatgccaacttcccgcgcttcctggatgaaatccgtaaggaattctgtggccccatccccccacgtgtggctaaaaaggccattcgcaagctcaagcagggccactgtaccctcggcagctatgcagatgcttttcagttcctggcccaattcttgtcttgggatgactgccgcctccaaaaccaattcctcaaaggcctgtcggaattcttccgcaaagagctcttatggtcaacagaaatggccgacctggatgagctgattctcgaatgtgtggagatagaaa

SEQ ID NO: 102483 - DNA, 443 bp, Homo Sapiens
caggacacctgctccagtgacaagggcctgccacagagccagcacctctcaggttaaggcagcatttcccaaaataaattccccaaagcacaggttgagctctgggctcaggactttaggtggaactcagattcaggattaaacactaaacacactgtaacaaagctcatctcttttcaattttccagtcttctgagtatctcaaagacgaaggcttggcgtgacgttaacatgtgtagcatcccttcaacacttgctgatctcctctttgaacaggagagcaggcctcaaaggctcaaagcttttggcaaatgacacatggagtcaagatttattaacattgctctgtttttgtaatatttactgttgccattattgcccagttatgacaactgagacaggtttttcatttatggtagtaaaaataaaaaagcaaggccatt

SEQ ID NO: 102484 - DNA, 645 bp, Homo Sapiens
agcaggaggatgtatcaggagctaatgggagaaatgaggtcaacattatttcctatgtagctttctcttatgcccaaattccactggatatcatccacttctggttacttctggtttgggatgtataggtgaaggaatagttttggatcctcctttattacctgttttatttgcataattggacaataactaaacttgctttaaatatctcttaaagcattttaaattcaaatttggagagaggaatatgagagtggtttttggtcattgtttagccatatacaatattgtcttaccttctgcatttgaagtttttgatacctgataaatgtttgtattgtgtagttgaacaagaatttgccacatgaaggtttacagttgtagttttatgttaagttctttacagtagtcccctctcatctttatcccccacttggaactatctacagtagttccaggacccccccctcccagtggatgattgaaaccatggatagtaccaaaccctatatacatattatgtttttcctatacatacatacctatgatgtttaatttctaaattaggcggagtaagagatgaacaacaactaataatgtaatagaacagttgtaacaatatactataataagaacaacatgaaa

SEQ ID NO: 102485 - DNA, 429 bp, Homo Sapiens
tttaaagcaggcgatggagaaagggtggttctcctgccatttggttgtgtgattagaagacagccctttgtcacacagttgtcggcctgcctgtgatattcccggctatggccaagatgtgtgaggtaagccccgggttcctcccacttccgtgtattcctgaggactctgctttcccacactgagttttgcatcttctcacagggaatttctatggcttctctgtactttgctaattatatgcacattaatcatggtgacctggttataggctatggtttcaagagaagaaaaagttccccaattggtatctgatgggcaaaacaggtacagatggaccccctgggctttgcccctgatgagctcatgatcactactaaccaccccccagatgctgggccactggcactctatcagctgccctataca

SEQ ID NO: 102486 - DNA, 674 bp, Homo Sapiens
  misc_feature (379)..(408): n is a, c, g, or t
cataatgtgcaagtattatatggccacagagtgtaatacaaattagtggcaaagtgctgagtgaagggaatccatgacagattcagatgcacaaggttgaatattacccgtaaactacctgactctgctaaggtcttaacagcacaaaacgctatgtcatgcccagcttttaaaagtctctgaaatacttggacacaatgaagcttgttaaaggaattttaccatagccacaggtaacaagaggaggattggcatgagcgataaatgacattgggggagcaatatggaagatcatctgggcaagtcttttctaaaatgtgccatcttccctgaaaacaattttgctcactccatcctatcagtttattaacatgtgctnnnnnnnnnnnnnnnnnnnnnnnnnnnnnnggcatttaaaatatcaaattatcaaaaccacgctgacttttaaaagttaaaaaatctaagtgggaattttgttagcattgttatgttgattaccaaacaaacattcaaacattcatcatttcactgaaaacactatttcaaaataattcaggttattaggaattggaaagttatttgcaacccaaacttaggggatataaggaagaggaagataacttcatggcattctgacgtccctattcactctcctattttttaaatacatg

SEQ ID NO: 102487 - DNA, 478 bp, Homo Sapiens
ggtacattccaggcaggcacttggtctagaggtgggctgatcatttctaaatggcagaaccctgacaaacgtgagactgagagtccacagaggggcacgtggggctgagctgagaggcccccagggccagcatcctggcccatgccttatggaaggccagactagaagccctgggccagccccaggaaataggaagtttccaggccgtggacctcctgtgcccctcagggtgggggccatggaagagctcctctttgttgcagggaggggaagtctgtaccccaaaaaggtcttcccataatcctggagctgggagtgtgctcgatgcaccaatggcaaatggtgtgcagcaaacgcgctccgttcctggcactcttaccactgtcaagagagggaccccagaactcaggaggcagccaccagcaatcagcaggagctggcaggggaggcagacgggcctccgtctctctaaaaaaaa

SEQ ID NO: 102488 - DNA, 461 bp, Homo Sapiens
acaataaaataaaaaaatttgtagaatgggaaaaaatatttgcaaaccatacatctgataaaagattgatatacaaaatatataagaaatgcaagcagattaaaagcaaaaacaacagtaacccagttcaaaataggcaaaaactaaactgatatttgtccaatgaagacatacaaatggccaagagataagccataaagtactcaatatcaccaaatatctggcaattgcaaatcaaaaccatgatgagtatcatttcaaacatgttagaatggataatgtaaaaagaagaaacataacaagtgttgacaacactttgaagaaaaaaattctgtacattcttggagagttataaattgatggagtcattacaaaaaccaatagaggttatttgaaatacagaactactgcgcaatctagcaatagtagtattgtgtatataatactgttaatataacaaa

SEQ ID NO: 102489 - DNA, 386 bp, Homo Sapiens
caggctgagataatacagaattttaaaatgcactttgtaccagtgtctatatggaaagaagtagatgctgaatacctcaagatgccaagggaacaagcaacattgggaagttgtcacaacatgctcaaagacaaactacaattgtctgctagctatttcttcagaactggaactaatacgactatccttttctgttttatactttgattagaatgttatttcctcgcttacttaaaatgtacttcaactttttaacaactgatacaataacttcataaaagtataacactaggttgaaaccttaaggaaaaattgaaattgttaatgctttcgatcttttgggaggccagtacacagacaacataaatttcttctttttatgatac

SEQ ID NO: 102490 - DNA, 492 bp, Homo Sapiens
agcacctatggacataattcaacatgatgccctctttcttctggaggggtgtgataactgcttgataataagcactttttcaggcctattgagaatgtggttaatgattctaaacttgatttttcataacttgtaaaatagagctgacagtattatagttctgaaaacagttttgcgttatttgggtatcaaaataaagtttgaaacaattaggatggatttgcaaataacctttcacaaaacatgttgactcagattttgtcatgatccttctgttaggtgcatctcttattccagccctaacagattgggtgacaatatcagggtgctggtggatgtacgcctctttctttccagtgtgctgctatgatggtggctggttacctgtggtgtcttattttctttcactggctatgaatggcttgctcatgacatattttgtatttgatgagaataccatagtgtttgataaatattcagaaatgtatcgct

SEQ ID NO: 102491 - DNA, 338 bp, Homo Sapiens
tcgtgagacacgtcccactgccttgttgcagtgccccaaggaacggaggatcgggtccacccaaagtgaggaataaatccggactttcagcaacgtgggcaggaaggagccttaaaattcccaggcaagtgggtaactctgtgcacagaccaagctcttgctcctggataatcaagaagaacaacgaagccaaatcctgttaaaattttttgcagaggaagaagtatcaaatagaagagaggaaattgttgggacagctaagctcttcaaagactcaacttcctggtcataaacttctccccgtttttcttctttttcgccagtctaccctgtttggg

SEQ ID NO: 102492 - DNA, 471 bp, Homo Sapiens
  misc_feature (208)..(231): n is a, c, g, or t
atttcaatccgttgagatttgctgagacttgtataaggtccatgatatggtctatttcgataaacatcctatgtgcacatgggaagaataagtattttatagtgttgtacacacgtgaattaggccaagttggttaatcctattgttcaaactgtgtaaggttgaatccaaggataaagaaataaaccagtgggatagagttccgagnnnnnnnnnnnnnnnnnnnnnnnntcttcagctgatttatgttgagatgttggggactcctccaattcggtggaaaaaaaatgatgcttttcaataaatgatgccaggtcaattggatatctacacgaaaaaaaatgagctctagccccgtaccacaccattcacaataattaatatgtaatcaatcatagatctaaatatgagccctaaaacaagcttctaaaaggaaatacaggaggatatcccaataaaaaggtactaacc

SEQ ID NO: 102493 - DNA, 476 bp, Homo Sapiens
gcaaattaggactggaaaatgaagcatcttatgtttgaaaaaagaaaaacaactcaaaatttgcatttacatgctactgataggttataacttaaatcttcagcccttaggtaaactgtcataaaaagacaatattactcaccatcctcgtggtcgaatcctcccaaaaacaaagttgattccaatccatgcataaacccctaagtaagaaacagaaaagccctcacttaattctctactgctatgccatgtatacacctctcccctagggcttatctttcctctttttcttggaaaaagtaatcatagtattttattccatactctcaatgtaggaatttcaaatctttcatcttgtgatttttttcccttttaaaattatttgcatcttctaaatttcctcaatgaatagaaattaattgtataacaaatgtctaaaaagtataaatcatctgaatgtcaagaaaaaatcgaaa

SEQ ID NO: 102494 - DNA, 537 bp, Homo Sapiens
catgctttcttctgatacttcccaactgtcagaaaataatgtgtatctacttccagctacttttgatggaaacgacagcaatgctggatcttctggtaattcgtcagctgaaatcggcactgtcacaaactctcctgtgtcaccttctgatactggttctcatttgttctagtagacaaactttcaactaaatgattcacccatcccaagactttctcaccagtggagaaacacacacatcaagcaaaccaagtcagagcaatgagaattgtactgtataatttaaactatctcctatttatcttttttcctcaatttcctaaaattctatttatctacagaacttgcgtgtataattcttgtgtacatccttaaatttaatgtaataacatgttaaagatgttttccaaatcagaaccatgttgaagatacaagcgtaaattgttaggctgctattttctagaaaatgctgtaccttgactttttaaaataatcttatgaaacataattctgataaaatataaaagttcaattaaa

SEQ ID NO: 102495 - DNA, 539 bp, Homo Sapiens
  misc_feature (523)..(523): n is a, c, g, or t
tttgatgtgtaaaatttttattttccacacactgataacagattttcagtgtaaagtgaggaaggaagctctgtggagacaagctggttggtggaggcatgcaagagtggtgctcaaatccaaggaactaaaattgcttatttgccggtcatcgttctttgacaagaaaattgtatacaagcccctttccactcaccactattcacttttagtaaaaaacagctgactttgccaaatgagtcactttctcactgtcagaacagacttaaacagcagtgccaacagttgtaaatcatcaagacaagcaaagcacatttgaaaaacatacaaacaactgaactttttgtggcagacattataacagcaatttatggaaatgtgttgatttatggaaatgtgtttgtattttatatttagtcttacaccagtttgttatcattgattgaaatactgaatgtagaagctttagaatctaaaagggttttctaacgaaaattacaaacatatcaaaggaaaagcacanatacaatgttctccag

SEQ ID NO: 102496 - DNA, 417 bp, Homo Sapiens
agctcgcggagctggtatgttgcattgtacaagatgaagttagagtgtgaagcatggaacaaagtgcttattgagccagaaaatactgcccaaccagctctcaaggcaaagagagggtgtacgagaagctaatcttcaaatgagaggtggagacccagctggcagctagcatggtgcggcgtgttggaggcaagaagcagaatctcagactggcaagatgcaagggcaggcagcccacccacagggaaggcgtcgccaatcttgagcaactctagaagagaaacctgaacacatcagaactcaaactaactgataatgaactggttttcattacttcctgagtgatcaggacgtagaattgtctcttacaacccaatgtataccattctcagttgtctatttaaggatttcttagtg

SEQ ID NO: 102497 - DNA, 410 bp, Homo Sapiens
gctgtaaattgaaacattagaggttaatgatactttgagtatttacaataacgagatcttgagaggtaggacaggaaaggcttttgtaatgagagcttggtgtgagatctgatgccttttacaaagaaaggagggaactcctctaagcagagggaatcaggcgtgcaaaggctggatggcaggaggaagcacagtgagtacaaaggctgaggaatatctgaggggtttgagctaatcgacctgaatggagtgtggtgtgagttgaagctggagccggaggaagcagagccttagccataccgagaagttttgtgcttatccaagaattaaaggaaaccagtcataagctttaagcagaagtgaatgactggtttcctttaattcttggacaagagcaaaactctgtctcc

SEQ ID NO: 102498 - DNA, 606 bp, Homo Sapiens
tgagtttccagccgtgacgggatggtaggtcagaggcacctcattctaccccctcccttgtgtggtttagacagaattgaccggtgttcatgttaaaatagagatcataagactaagaacaggctctgtggcaataaaataccaaattataaacaggacctcaggccaggcctggtgaaagtaagtcgtgcatccctgcacgtaaagaatcaactctgttctaaaggccgcaggtttctctttttctgtagcagctaaacaagcactagcctcaagataagcagcattgaaacaaccgcagctcctccccctgccgaccctggccccacacccctgctccaccagccgtaactagagctttccttggacaagagactcgtttcagtaacttttccctgataagagaccctgaccatagacgggttctggctggtttacagagattgcaccctcatgtgccttcatgtcctgaaagtactttttgaggtataccacctaattgtaatacgcttacatgctgccttcaccccaaggtgaacatgggtcatatgtaacatgcatgtttatccagcacacgtgtccgaataaacatgcatgtatattccg

SEQ ID NO: 102499 - DNA, 514 bp, Homo Sapiens
  misc_feature (30)..(30): n is a, c, g, or t
  misc_feature (165)..(165): n is a, c, g, or t
cactactgggttatgtccagaggactctanatggttctaccatgaagacacacgcactcaaatgcccactgcagcaccactcacaacagcaccgacatggaatcaagctggggcctgtcagcggcagacggataaagaggatgtggtccatatacaccgcggaantactatgcagccataaaaaggaacaagatcatgccctttgcaggaacttggatggagctggaggccattatccttcgcaaactaatgcggggacagaatcccgggcactacacttccccacttacaagtggaagctgaatgatgagaacacagggacagaaaggggccaacaacacacactggggccggcctgagggaagagggagaggctcagaaaaccattttaacaaaactgtcaggtacccatgcttggtacccggtgctgaaatgatctgtaggacaaaccctagtcactagtttacctatataccaagcctgcacacagacctgaggctaaaataaacattag

SEQ ID NO: 102500 - DNA, 562 bp, Homo Sapiens
cagggatcctggagagattatcagagttgttggttaaaaatgttaatgttaatccacgacgctctcaagagctcacgtctggtgtgactatgaccatgtcatgctgtttcaccagttagtacctctgctgagtccattctttctgcctggaatgctctttctactcttctatgccaggttatctcctattcacagttagcaattagcctaagacacattatttatttaccttagtttgtgtcaagcatagacagttgtggttttacagatagggaagccaaaccaaacttcctagcctacttttctttttctaatctagtggattttatactgacttacaagattttactgtgagcagcaatgcaacataacccaatatatctaatctttcagatttagtgaacatttagatttttaaaattataattaaagctataacatttagtcttcattttctctgcagaccacaaagacttctgacattctaagttttttttaaaaaataattcagtagattgttatcataatttttactagactattattaaaatattatttcaga

SEQ ID NO: 102501 - DNA, 434 bp, Homo Sapiens
atgagccaccatgcctggccacaagttcttactattaagagacatggtgataattcattctgaagaggaactctacaaacctgaaagatgtgacagtgcttttttcaacacttccatcctttctatacataaaaaatttatactagtgtgaaaccctagaaatatataaaatgtgaaacagcctttatatggttgccacatttgatagtaagataattcatactggcaaaattcctacaagcatgaagaatgtggcaaaacctttaatcaatgtgtacatcttattttgcaggaaagctattatccctgagaaaaattgtacaaatataaagaatatggaaaacccattaatgcctactcacatcttactcaacataagaaggttcatagttaatgaaagcattaaaagtgcaattactgtcaaaaaatctttc

SEQ ID NO: 102502 - DNA, 563 bp, Homo Sapiens
gcggccgcccaggctgcccccgcccgcgcgcgcccgttggggggcccggggagcggcgcccgcggccgggccgcattgtgacgtagcggggccgcggcagcgcctccaccgcccgcctacttcggctgaggctgttctgctcctgccgctgcggtccgtcggtcggtcagtcagtcccttcgcgctcctgagccgccggcgcgccgggcgccccgggaatttataagtatttgaccgtactcaaaatgtgcaaggaagaataatggaagcccctgaataccttgatttggatgaaattgactttagtgatgacatatcttattcagtcacatcactcaagacgatcccagaactgtgccgaagatgtgatacgcaaaacgaagacagatcagtttctagctctagctggaattgtggcatctcaactcttattacaaacacgcaaaagcccacaggaatcgctgatgtgtacagtaagttccgcccagtgaagcgggtttcgccactgaaacatcagccagagactctggagaacaatgaaagtgatgaccaaaagaaccaga

SEQ ID NO: 102503 - DNA, 328 bp, Homo Sapiens; identical to SEQ ID NO: 55789

SEQ ID NO: 102504 - DNA, 594 bp, Homo Sapiens
ctactttgctcttcaactggctccagatttagttatacagaagaatcaatccatagattgataggaaagcaaaactgctactttggggaggggctttgggaaattactgacatcagcatcatcttggtgtttgtgatggtgaggaaaaacaagaagagaaaaagggtagaaattcacccaatgcaagtgtgtacactagactagcaaaaaaccccagtgggcagcctgacatcaaaagaggagataagacacattttttcagaaggccgcagaaggactgtgttatcacacaggataacacatgtatgttacaagtgtaacatgcaccaatgacatgtatgttacatcatatgatgacactgagaagtaaattgaaagtgatagaatattaagtgatctcagtttaagaagatattaaaagatgtcatgttttaagtgctcgtcttactaatagaaatgtcaaatagcatttattctcaaattttcatttaattatgcatgcctactgaaattatacattaaaaatgaaatagaagtgtgctaacagtttcagaaatatttttttccacatggcacttcaaaaggcaagtttag

SEQ ID NO: 102505 - DNA, 898 bp, Homo Sapiens
  misc_feature (518)..(651): n is a, c, g, or t
ctaaaatagagacaaatctatattgcatgaccaagaagaaacagagggtgctattgtagttgctctatttattcacaacatgtgaaatattatgtaataccgtatataaaactatctctagtaagtggtaggtactaggataacaaaataaataaaacccagacagatcctatatttataaacttatagtctagagagaaaaatacagttaaataagtaatgctagtacagtattgataggtgcatttaaagaggcatgtacaatgagccctgttggaattcagagaatgaatgaaccacgtggaggctttagggaaggcctctcagaggaagcagcatctgagctggatcttggaaaagttcagttccatcagaaaaaggaaaacttgctcaaccattcagacaacggacacaaaagcattttggagtgacattcagtatgccttgttctatgaatggtgtaaagagtattattattgacttgtggatttttatatagtaagtgcataccaatcagnnnnnnnnnnnnnnnnnnnnnnnnnnnnnnnnnnnnnnnnnnnnnnnnnnnnnnnnnnnnnnnnnnnnnnnnnnnnnnnnnnnnnnnnnnnnnnnnnnnnnnnnnnnnnnnnnnnnnnnnnnnnnnnnnnnnnnacaatgagatgcctcaagctcaccttgtaaattctccacactatacctaggagcaaccattatttcaagaatccctggtatccgcagtgggaaacagcatttagagaccaacatttgggcagtggggttggttattatccctggagcattatggtctaggttctgcagacaaaggtaggatatatacatatgtatacacattatatgtatattctatacatataaataaagttacatagtttccatt

SEQ ID NO: 102506 - DNA, 484 bp, Homo Sapiens
aactttaacaattcaataagaagaattttttaaatgggcaaaacatttcaacagatgctttgtcaatatcttccacagatgattagatatattaggatgtcttcagttttaaaactaacataccaagtgctggtgaggatgtggagccattggaagtctcatatcctgcttccaggaatgtaaaggagtgcaaccagtttggaaactagtttgacagtgtcttaagaaattaaacacacttacattaaaacccagccatcactttcctatgtatttacccaaaagaaataaaaacataaacatatatcacaaaaagacttgtatacaaatgttgaatgcacctttgtttataatggcaaaaagcctgaaacaacctaaatgtctgtcaacaggtgaatgaatgaaaaaaattgcagtaaacccatgcaatgggctactagtcatcaataagagcaaactactgaagcacacaaaggataaatct

SEQ ID NO: 102507 - DNA, 790 bp, Homo Sapiens
  misc_feature (679)..(691): n is a, c, g, or t
acctgtggacagaaagataccatgagggtacacgcaacgtaagatgggaataaacggatacacatgtgacctttccttgaacaggaagatccaaaattatgaagatactatgacgatatccgttctccctaaatcaagataggcacgtacatcatcttctacctttctgccccgaaaataccttgtagcttaggaacggtgacccagtcaagaggcacggtactgagggcctgcatcgatttggtgggggtgctgaccacagggctctcaggactggtgggccaggctgtgctgggggcggcaggggcaggagccatggtgggggccagaggcatgctggctttggtggtggcctccaggatccagtcacgtagcctggtgactcgggcatagacccctggacgccgggcttccgcacacccgattccccagctcacgatgccagccagaaagaaccggccagagggctcctcgcagaccaggggtcctcctgagtcaccctaggaaaccaacacacaccctcaggatgggtcggcagcagccagtccagacaccagtgctacgaggcccaagaaggagctctgagctgggacagccaggacctctctccacacaagctcacagagcacctggggctgatcattgacatctcagaacctgtttcctcttctgtggaggnnnnnnnnnnnnncccaagacagttggactataggatctctaagatgtctttcagtcctacctctggcaggccaaaacgtgacccaaataaataacatcccctcctcttctt

SEQ ID NO: 102508 - DNA, 590 bp, Homo Sapiens
  misc_feature (560)..(560): n is a, c, g, or t
gcggccgcgccaactccggcgtcgggaacactcaccgcaggacgctttgccctccttggaatcgcagtagccgcagtggtagccggccctgaggcccttgtattccaccaccgacgccatggccgccgcgagggtccgctcgggccgaccacgcctcttggcgcccggggccgacctcggcgaagcgctggggcccgcggcgggaggggtggagagcgaagcctggcgcggggacccgtgggcggggatggtggtcgtgtccccaagccctgcgtttgggccggtgcttcccacagctgtgcgttatcagccccatttcacagtttgctaaagcagaggcgtactactatcaatagcatcaagaaatgatgatggaagaagcatggaaatacaatatggttccaaaatgggaaactaaaatagaggaagaggaaaagagatcacaacgtgagaaaacagaagatactaaaaaatgggactatctagtgcctgagagggaactgagtcttacaaagaaacatataccaggctgaacaaaccagaggcctcagagaccacanacaccgactgctccctcaaagaattcccag

SEQ ID NO: 102509 - DNA, 516 bp, Homo Sapiens
tgtccaaactaggcaacggcatattcagattccaagtttaacatgtcaaataccacaagatctgagttactggcatttcagagatccttaagccacttgaaaatttcctggttccatgtgatacccccaacaaggtggaacaatcaagtgtccacgacccaaactggacaaaaaatgaacaacattcagcttggcctaagtttatcaaaatacttcagtcccttcacttgtaacactgctcagactgaacagatataaaaaagctcatggggctttatcatgaaaattccacctaatttactctaaataaactaatacattaaatctctaaatctacagaattaaacacaggataccaagctataatacctccacctaaacacctactatacagctagccagcctatctctaaaataacaccagctccttctataaaataaaattttttttataaccttacatatatttttttctaattataaaatatcttttagcttcagaatacatcttgcttg

SEQ ID NO: 102510 - DNA, 410 bp, Homo Sapiens
ctgactcagatgcagggtctgctcacccaaacacatgccttccctccccagccacaccgtgcacgaagggggcacaggagaggagaggggctgtgccccaggctccccatttcccagctcctcacagaggcctggtttgctcagtcttctgaactccagggaccagccctggtgggcatggggtggggagcagggagttgcccttcccctccctcgggaagccacctaagaatgtttacatgccaaacagaatgtaacacccctccccaagcccttcccagtcactgcatggcctctgcccatcctgcacctgtccaccccaccccaacaccctggaagccactgtcaatgattagatcgggtctcgaaagggaagtagccatcacaccattaaaaagcctgtggacctt

SEQ ID NO: 102511 - DNA, 519 bp, Homo Sapiens
  misc_feature (101)..(109): n is a, c, g, or t
agaaacgcccgagcccagcccctaggagggggtggggcatccctggccaacccttaaacattcccaactcctctcataacactagacacatgtgcccagcnnnnnnnnngacaaatgcttcgtgatttcacttatatgaggcacctaaagtagtgaaattcatagagacagaaagtagaatgttggttgtcgggagctgggggcagtggggaatagggagatattgtttaatgagggcagagtttcagttggggaagataaaaatgttctgaagatggatggtgtggatggtggtgatggctgtgccatacataatgtgaaagtacttaatgttcttgaactgtgcacttaaaatggttaaatggtaaattttatgttatgtatattttgctgcaaaaacccacttatacaatataaggtgacattattcctgatattttcttacctctccccctcatacacccacccctactgctgtgcatattccagattttgataaacacttgctaaaccaaaaaa

SEQ ID NO: 102512 - DNA, 319 bp, Homo Sapiens
cctctgctcactgagatatatctgtatccgattgcctcctttggagaggctaatcagaaactcaaaagaatgtaaccatttgtttcttatctatgtatgacctagaagccccctccccacttcaagttgtcctcctttgcttcaagttgtcccaccttccagaccaaatcaatattcatcttacataaactgattgatgtctcatgtctccctaaaatgtataaaaccgaattgtgctctatcatgtcctcaggacctcctgaggctgtgtcatgggagtgtgtcctcaaccttgacaaaataaaatttctaaattaaa

SEQ ID NO: 102513 - DNA, 681 bp, Homo Sapiens
  misc_feature (71)..(71): n is a, c, g, or t
  misc_feature (75)..(75): n is a, c, g, or t
gtggcgcaatctaatgtccatggggacagctaaaaggccttttttggtaggcattgtggtgcctaacctgnaagnttatgccttcctgggcccagaagagaggaatgaaaggaacatatgcagatcttgcacaaataaggatctgaagaaagccattttggaagatatggtgaggttaggaaaagaaagtggactccattcttttgagcaggttaaagccattcacatcaattctgacatgttctcagttcaaaatggcttgctgacaccaacactaaaagctaagagacctgagctgagagagtacttcaaaaaacaaatagaagagctttactcaatctccatgtgaagttcaaggaaagttcttctcagtgtaatgaactgtctagcaatattatagttattcttgaaagtaatgagtcaaaatgacacagctgaaaatgaataagcatctgattttatgactgagccttttcctgtcccaagaggtctttaacaatattttctctatcatcaatgagtatattttatttttattataaaaatgatattgtggtggactgctaaaaatatcacaaatggcaatgtaaaaatcaagacattttctcaagaactgtgtaccactaaaagtaatatattgtcaatgttcacagaactattaaacataaaggaaaaacataa

SEQ ID NO: 102514 - DNA, 492 bp, Homo Sapiens
tggcctctggggcgccccgcaggtcgtgtgaatacacatgtggagtgactgaaacggatgcttatggctactttcccaccctggaggagactctgccatctgggtttgggctaaagtcgaggtagtgtgtgaatctgatttccccctttatgtaatgagctgttttcctgatctgtggacctgttatgtcatggctttgatgaacaagaataaaaaaggtaagtgagaaaacaaacaaaatgaatatatctgtaggaattcagtgctctcgaagaactgcaactcactgccttctcaaatctcagataccactatttaaagaagataggatgtggttaaaaataagtaacgcaacgatttctgagtgtccatattgggtaactgttgactataagcctcaggtattgcttcttttgtgtgtgtctccattgttgtgtttaacccaactgaccaatttagaaaatgtaatattcttttgatattccaaaaatt

SEQ ID NO: 102515 - DNA, 548 bp, Homo Sapiens
  misc_feature (406)..(406): n is a, c, g, or t
  misc_feature (438)..(439): n is a, c, g, or t
  misc_feature (455)..(456): n is a, c, g, or t
  misc_feature (467)..(467): n is a, c, g, or t
  misc_feature (480)..(480): n is a, c, g, or t
gccattgccttttttaaagatttaccctaggacctgatttaaagtgaatttcaagtgacctgattaatttcctattcttccaaatgagatgaaaatggggatcctgtacaaccctttgtggacccttttggtttagctcttaagtaggggtattttctactgttgtttaattatgatggaagataacattgtcattcctagatgaatcctttgaagtaacaaacattgtatctgacatcagctctgttcatgagtgctcagagtccctgctaatgtaattggaagcttggtacacataagaaaaactagagatttgaaatcagctatgaattactctatatagtatctatagccatgtacatattacagcatgacaagctcaaataattatgagtcagcccgaaanggatgttaattatgcctacgatgtaataactnnattggaatgtcatggnnctcattacatnttttagcttcagnagtttatttgaaagtaaataattgaacatccctacaatttattttaatcattggaaaataccttaatt

SEQ ID NO: 102516 - DNA, 451 bp, Homo Sapiens
attaaaaagcataaaaatatgaaatttaattagagtccttttcatataatattagaggagcatatcggaatctctggggaggtctgtgtagtttgaaaaagcctattcagtatgtctgttattttcatagtacaaactaggcaaatacaactaagtcaaactctaattggcttctagcaatacaaaggtgatatagtgagaaagcattgcaggggcatgcattgaaagtgactgagcaacactaccctacagtgttaaaatactgacttaggcagagcaggcattatgttgcttgaatttcatacagagaagggccaataagaaagaattatttgtctagccctctaaaatatgatttgcctgctttcattgtctgggtatttgactgttagcctgtatcttaaggcagccaatttctttatcttaagagtggaatgttggagaaaagaaa

SEQ ID NO: 102517 - DNA, 435 bp, Homo Sapiens
tagagatgggatcttgctatgttgcccaggctggcctcaaaagtcctgggctccattgatccccccacctcggccccccaacgcacagtaatcacagctgtgagccccacgcccctcctgggctgattttaatagggcagaatatgctgcagaaccggcttcccagactgtgagcaggaggaggtggtggcagccctcaccagaagacccacaacccaggcaacgggatttctacatcaaaacatgaccaattacgcagggcaccttttccttaggatcccaagaagccctgggcccttcctccaaagttgtctgctgtctgctcagcggcaggtggcacaaggtctgtacctgccagggcccagctccgtgaggggctgtggagtaggcacattcacaaatggcgcttaggagaacccaaagcccacgcccagg

SEQ ID NO: 102518 - DNA, 548 bp, Homo Sapiens
ctgtatttacttgttatgttgtaatattttgctgctgaatttggggctacttatattctgcagaaaattaattgaaatacctattcaagaagatagttgtaaagatattgtatctcctttaatatactccttaaaaatgtatgttggtttagcgttgttttgtggataagaaaaatgcttgaccctgaaatattttctactttaaattgtggatgaagaccctatctcccacaaataagttcccatttccttgtctaaagatctttttttaagtgttctgtggctgatttactaacagtaactgccattttttgtctgtgataacagagtgatttgtaaaacagtggttgttttttcattgtgttttcttcgtggattgttttttctgcgggtcatattcataccttctgatgaagttgtacaacaccagcaacattataatggccctgtagctctgaatgctatttgtgtaactgaaaggttgcactctagggtgaaccaagctataaaagcccatgcttaaataaaaattatgtccaaaagccaaa

SEQ ID NO: 102519 - DNA, 220 bp, Homo Sapiens
aaatcagtcattccagcctatctttctccccaactttggttttctcttcactgacaccacagatttgatcttcaattggaaagaaaccatttaatctattagttcatcttttggaaacatcttttttaggtgacagtaacatataagagtggaactctgttttatgttacttcctgccttatttttctcactagtttgcagcatatatccgggcggccgc

SEQ ID NO: 102520 - DNA, 261 bp, Homo Sapiens
aaggccctcgagacggacgatttgccaaaataaccaggttcagtggcttctgtaaaaagtcacttcctctcagcaggaaaggcccagtttcgtggggctgggggagctggggcagtccgcctgcagcccctgaggtgggagggtccccaggactaggcctttcgccaggtcagggatggggagggaggacaggagccaccctaaaagggaaaagggggcggtccccagggcgagcactcccactcccagcgaatcctggcc

SEQ ID NO: 102521 - DNA, 564 bp, Homo Sapiens
tacctagtctcaggtagttctttatagcagtgcaaaaatggacgtaataagtcttatgtacttattggtgagagagaaaatccgtgcattgttttcaaaagaattcattaacgtatcaattcaatttctataacctttgaagtggcagtaaatatgtagtaattgatacttgggagatagttgcccacttgggcaaaaacgcatgcagaaggtggagtttttaaatttaaaacatttttaaaatagcaaatgttaatattccagtttccattggtaggaaattttttagataagttcaggcatatgtatgcaatggaaagccactagaaatcttcaggcacacagataatgacaatgcaggttgctcatgaagtatttagtgaaccaggagagttttagaacaacaattatagcatgaccccattttgttagtatgtttttctgtgtgtatgtttagagcaacagagaaaaaaagatgtgggagaggacatataactacttatctctagtggtgggattctgaatgtataatacatatgttgtacttttatgtataaaactttg

SEQ ID NO: 102522 - DNA, 536 bp, Homo Sapiens
ggcgtccccggtcccgccggccgctcgtgccgctcgatccaggcgttgtagtagcgcacaatgttctcatggtgcagccgtgacagcagtgtcacttcgcccttgatcctgcggaactgccgactggccgggttgatgggaatgcgcttcactgcgtagcagcagccgtccaacttgttctgcacctgcggcacagccaggggaaggtcagccgctcggagccttgcacaaacaggcatttgcaccgcaccccatcccctcccaaggaaagcgtgaagttctaaatgagtcccacagctacagtcaagaaccacatgcctgaaattcttaaactgaagaaagctttgactgccacaaaattcagaaaacagcccacccgactctagatatatttagcttgctgggagaccctggggaaaacataatctccattttaataattaattttactgacagttacctccctgcttttccaatgtatctgctatataaatttctaagtgtcttgattttaagataaaaaattattttctaaa

SEQ ID NO: 102523 - DNA, 433 bp, Homo Sapiens
cggatacataaagaccagggggaaaagctattatgcatgttggaatttgtgatgtgtaatcgtgttaatttactgtttgagaagaaaccccgctatgtgttagtgattatatagtaatcaggaaattatacagatatttagatcatagaaattagtttatgaatggcataaacataatgctacctcagcaacgaaatgagataatcagctaatttctcaaacctgatcatatgaagcagacccgggaagaatacttttcagtggtaagtgggaaaaggtgtagcaaataattgctaaacttccaaaattcttcttcttcagggcctacatgtgatattccataatttcgttcatctgttctgatgcagtgaagtgcaaaaacatcctccaaaccaaaatattgtgaaaacaaaatttctaaagatgacttggc

SEQ ID NO: 102524 - DNA, 465 bp, Homo Sapiens
  misc_feature (74)..(160): n is a, c, g, or t
gagactctgtctctaacaaattaaaaataaataaataaataagcatggaatatatctgataagtgctatagagnnnnnnnnnnnnnnnnnnnnnnnnnnnnnnnnnnnnnnnnnnnnnnnnnnnnnnnnnnnnnnnnnnnnnnnnnnnnnnnnnnnnnnngaagtgacgaagcaaaccatgaagctaccttgggaagagtgggaggtgggtttgggaaacagtgatgccaagaaggaagggattttcacttttcgtggtaggcattctcctagaagctctccctctcacctgaagcttctgcaaaccacagtaacagatacctgtggcatagtgagcacccaaggctcaggcttcgctctagaacagaggtaggcaaactctttctgtaaaggaccagatagtaaatattttaggctttgtgctccagacagtctctgttgacactgttaggcttagccatggta

SEQ ID NO: 102525 - DNA, 492 bp, Homo Sapiens
ggtctagcaaaagggactgagaaggagtctgccatgaagtgaggggggactcagaagagtctgggtttctggtggacactgaagaaagttttcagccttctgccgtcagcctctcttggaactgctctgagcctagggagctacctcacttgaaggctctcctagaagccgccagccaatgacgagttgctatgaggtgtaaagaccccacccccttgccttactttggaacacctctgcagggccatctcagttccagagcttccattaggtcaggctgaggcctctgttgagactacatcagcagttcagcttcttcttccgcccaacccgtcattcccctactggtgatattcgcaagagcactccgataaacctacactcaaatcttgctatcggagtctgtttcgggggacccgacctaaaacaaccattgtagccccagcccagagccgtgcacatagcagatgctcaataaatatctgttggctg

SEQ ID NO: 102526 - DNA, 409 bp, Homo Sapiens
  misc_feature (51)..(51): n is a, c, g, or t
  misc_feature (161)..(176): n is a, c, g, or t
gcaaaatgtactaatgtatcttatattcaggcatgtctaaatcaacttttntagtatgcctcaggcatttgtcaccaaccctttatattaacatgaaacttagaaaatttttgatagaatcccagagttcaaaaggtattaggatttttgccactgaagtnnnnnnnnnnnnnnnngatatttatgagaaaactattgaacagtgactgtgttgtacccgagcaagttagaggaacgccacactttgagacgaatttaaaagtcctttatttagctggcagccaagaggtggctcacacttggaattctctcagctccgaggaaggggcttgattttcctttatactttggtttaggaaggggacgggagctcagttgcaacaattctacagaagtaaaaacatgcaaa

SEQ ID NO: 102527 - DNA, 529 bp, Homo Sapiens
agaactttaaaaataaattggcctgcaaaactacttttgcaattacagtgtcatatttggccccactatgtctcagaggcactgcataaatatgaacagaatcgtctaatgcactttttcaaaacagtgcttctcagccaggggctagtgtgaattcattctacagctaggtgccggtgacacttcggtttgcttcactggcaacattttggagaatgcgtcctatactaagaggaaggctagaaaccaagcacatgtcaagagccaaatccaccatgttacttcttttcgtgcttcttggttaactccccaacgcccagttggatgtggtcccggttgtcactgattctctcttctctgcgctgactctcctgggagacttgctgcacagcttgcaggattgcattctgcacaatctgtttgctggcattctgcagcttcacctcttcaggctcatttccaggtttctcacccgctgtggctcgtcgccgtggatattggactgacatttaagatagatttgtcaaaa

SEQ ID NO: 102528 - DNA, 550 bp, Homo Sapiens
caaaggtgtataaccatggaacatgagaatacccagccctaacattcacttaacaccaagaatccaaaagctgcctgttggctctttcagacctctcaggtagaggcaaaaagacatagtttagagtactataagaaacagtacaaaagtacaggtcttgccttgtctagtagatagatagccggttgagcatgatcttgttttgccctgtctgggtaccagtttctttcttgcaggagactactatgttacatgtttagagtgaaaggtgaaatgcttgaaaacaggtttagggagactaaagtgttctgtagatcagtccttgtttgaacaagcacacattcttggcctgccgtgtcccctcacagaacttgagatcataacttgttctttcctatctatgaatcaactggtaattagtgttccagttggcgcaagtttcttttatccacttggcttggctcagccagaagtttggcttaccaagagcaccacctagtgttcactaagcaagatggtaaatcttggtaaatttagcaccagtactgaa

SEQ ID NO: 102529 - DNA, 127 bp, Homo Sapiens
agtgtcctgtacttcacacagtacccctaacctatttccccaaacccatttcccctaaattctgctgctcccatcctccctgttttcctcttcaggggtgaggtgctttatcaggggcaaacatact

SEQ ID NO: 102530 - DNA, 291 bp, Homo Sapiens
tatttgataggcaatagaaagtcagaaaaagttaagcaaaaatgtgtaattcttctaccagaacatagttgataacacaaaattttatgaaacatcagatttataacaaagttattaagttatgtagatattattaagattatgaaaataaagtccacataggcccatttatttgtgagtcagcacataaacatagaagaatgattaacaatataagcttgtagcttatgctaaatgtgagctgcaatagatgataaattatagaggacttcagagaacactaagcttgca

SEQ ID NO: 102531 - DNA, 315 bp, Homo Sapiens
ggtaggtgcctgcaggggaaaacagaatctgagcatttgattactgggacaaatgccatgaaaatcaatataaaagcaggtagaaagatttaactagaaattacaataaattgctaaaggccaagtgtgggctggcctgagaataggaatcccctcaggtttcaaatatgggggtggggttgcagccacctgcagctgttatcaataggaagccacaggaaagatcagagatcacaaagaaagacccctttggtactatctgggggaaaggagtagcagctatggctgaaaatctgccccaatctacatttctta

SEQ ID NO: 102532 - DNA, 351 bp, Homo Sapiens
ctactcagccataaaaaggaatgaaataatggcatttgcagcaaactggatggaattggaggtcattattctaagtgaaggaacttgggaatggaaaaccaaacatcattctcacttataagtggcagccaagctttgaggacacaaaggcataagaatgataatggactctggggacttggggggaaggatgggagtcgggtgaggggtaaaagaatacacattgggtgcagtgtacactgcttgggtgataggcgcaccaaaatctcagaaataaccactaaagaactcacccatgtaaccagacaccacctgttcccccaatactattgaaataataattaaaaatag

SEQ ID NO: 102533 - DNA, 195 bp, Homo Sapiens
aggagaattgctgttcagccattcttactgataatagtcaacagggccatctatctgataagctcatttctagttcacagcattgacccatccacagagtggagaattgtgccctttcattctctagagtggttaatgatgtcaggaattgtatttttgactcaataaagtgaaaatatttacttttaaaataaa

SEQ ID NO: 102534 - DNA, 513 bp, Homo Sapiens
ttttttcgaatttcctggtcaaaacatactctgaaatactatggtatagtggagacggggtggactttgcaaacaggtagataagttctgatatcttggttgcaatttaacagcttagataagttttaacatttctgcccttcagtttcctccttaggaaaacagcaactatagccaattgacagtgttgttacaaaaagtaaataagaaacactgtatgcaaagtatctagcataatatataaacactactgtgttgcagagcaggtggatacatgcttactattaaagagaaataaggtgctaaatgccaaataggtgaatgtgaggttagtccacctcattccctacattgcacaactacagaggttccttgaagtccttcaatgtatatttcagcagtggatccaaaactcaagtgtcagattctaagggaattttgagggactttcaatttctaaaagatgaattgagagcatttatcaagctacctaaaatgtcaaactttcttggt

SEQ ID NO: 102535 - DNA, 617 bp, Homo Sapiens
cagggaaaagtcttgggcagggaagtaccacagctcatgcaaaaacctagtcctttaaaatccatccccccacacaccatcatctcagactgtggccaagaaaggaaatcatttctcgttcagaaattaatgaggtttcccagagttggtgcagccatggcagccccatgtgagtttcccagtcgtgctgcaagctgccttgatgtccacattcgattaaacgcctgggtaagagcaagccacccaggagagagctataaaatctcctgctgaaatttggtttagctttctttgtgtgtgtgccctattctttgctacatttttttcccaggattgtggctttggaacatgaatattgattccaagttctgttctacttagaaatgctcccatcgctagccacatctctgaatgcacttggggaagatagtcccctttggaatgtggatatgatgaaaataatcatcatcaccaattttgtgggggctgggttacttgggaagtggtggatatgtagtttcagagtgaggggttacagtcaaaagaccactgaaaaagagtctgtgacatacaagctgtgtgactttggacaaatgactggaccactctgagcctca

SEQ ID NO: 102536 - DNA, 520 bp, Homo Sapiens
  misc_feature (44)..(85): n is a, c, g, or t
gcggccgcccgggtccccctcctccgccacacgcgcgcgcgctnnnnnnnnnnnnnnnnnnnnnnnnnnnnnnnnnnnnnnnnnntatatacacgccagcgagctgctggccgctcaatggaccgatttccccggtttccctgaacccagcccagcccgggatgagaaactgcaaaatggcccgggtcgccagtgtgctggggctggtcatgctcagcgtcgccctgctgattttatcgctcatcagctacgtgtccctgaaaaaggagaacatcttcaccactcccaagtacgccagcccgggggcgccccgaatgtacatgttccacgcgggattccggtcacaatttgcgctgaagtttctagacccgtcattcgtgcccattacgaattctctcacccaggaactccaagagaaaccttctaagtggaaatttaatcggacagcgtttttacatcaaaggtaggataggaggaaaagatccaaaaggtgcttttaagaattcaagagctcaaaaca

SEQ ID NO: 102537 - DNA, 301 bp, Homo Sapiens
agacagggtctcagtctgtcacccaggctcactggctcactgcatccaggctctcaagaaatttgtaaagaatgaaaaggctgtaaaaggaataagaaatacattggtatctggagaagaattcagactcagagagtattttaaagactagagaaacttgaatatatttaaaatgccaatgtgtaatgttcagtagggaaggagaaaattaagatacagaagggataatgcaagtcccctagaagggtgttaaagatgggatccaggcaatgtatgaagtgtttggatttagaccagtggg

SEQ ID NO: 102538 - DNA, 340 bp, Homo Sapiens
ttttttctagtttcccaagtccctttaagcaaattacttatgaagatattctaattaatgtctctctgagtgagaggtttatgcacctctaggaagatggtaaacaattcattcttaccagcaagattagagccattcattctgtagacaaatacctccatcaagtggatatagattctttgctttcctactgataagaaaactaagaagccagtggtgcccatacctgccagacaagctcagaaggacaaaggagtcttaagtatctaaagtacatcatcaggcctgctgtaaacatgtgctaattaaaaaagtattaaaaatatagtgaaaatataaa

SEQ ID NO: 102539 - DNA, 530 bp, Homo Sapiens
  misc_feature (314)..(346): n is a, c, g, or t
atggatatgagaagtgagagggaaggggatggcggggcgggttagaccaccactaagagatggggaatgggaggggtgtgtggaagagagaccaagtcttcaaagaatgccttagagtgaggacccacgggactgtctgctgaaaagggctggagaggcctttgggatcagcttcgtcgtattcccgataaggaacagcgcctaaagtgaagggacgcgtccagtcttttagctagttaatattaaaaaacatcgtctcatttattgaccgtcatcctatgagtattacctcaacatcagtgcttgcaacagtnnnnnnnnnnnnnnnnnnnnnnnnnnnnnnnnntgttctgtgatctgcacacagcaagtggcagagctgtttgggggcccaggtctgtcggctccaccaccccagggttgacccaaaatgacgcatgaaaggctggcattataagatgctgtttcttgtttagacgaagtgatactgttacactggaagcactaataaaacccaggtataaataaaa

SEQ ID NO: 102540 - DNA, 519 bp, Homo Sapiens
taaagtttccaagttggttgtattaacaaaaacgggtgcatagcctgggaagtaatttgggagggaagaggccaagctttgtcgggatattaagtgtttatacatttgctgaacatcccacaagacatgggcaagactcttggaagtagctggatactgacgactgaagctggagcagagagggggtatgtttctgcaaaaccacatacaaaacggactacggaaatcttactaccgaggcttgcccaggcaggagagaaaggtgtagcatccctgaagtcatcagtcgtgtctactcttcaccgcctgctctcacctcacgttccccacgaagactccgggagcaggcggccggaaggagcccttccctcccttctccggtgattcccagaacttccgtctctacccgtcacctgctcccaatcaaaggagcttaatagacggcgacgttttcgactgcccagccaccaggcaggctgaaagtgcatggagggcatcatccacctttagacagctact

SEQ ID NO: 102541 - DNA, 488 bp, Homo Sapiens
ttcaaaaggcaaaaagctttaaaagctgcagttcaaacaggcagagaggtgcacacagagagaggaggggtgggcgggcaggcgaggcagccaggaggggccaggcatgggggatggcgtcgtccccccgctgctggcctggctcacctggaagaaaaggcccgcaggtaaggggcccgaaggtcaggatgggaagaagcagtcctgagaccagcgtccccgcccattctctgtcactggagccaccccaaagggaccttggtagcctgagttgctgttcatggaaggcttctctccatccctcactctggccgcccctcagcctgaggacctcagtggcccaccgccagcttcacacccgcacctgtggcactgccccaggcctcagagtcccgctcaccctctctccgatggactcatggcgctccccaccctcggcgggctctgtgactctacaactcttgctgcctaactgtcatgcgtgataa

SEQ ID NO: 102542 - DNA, 592 bp, Homo Sapiens
gcgggagtacgtccaaagacccgctgacagcgtttcctaccagataaactccaaatccgctttaacgtggcaccaggcgaggaaaagctgccaacaacagaacgctgagctcctgagcatcacagagatacatgagcaaacatacctgacaggattaaccagttccttgacctcaggactctggattggacttaacagtctgagcttcaacagcggttggcagtggagtgaccgcagtcctttccgatatttgaactggttaccaggaagtccatcagctgaacctggaaaaagctgtgtgtcactaaatcctggaaaaaatgctaaatgggaaaatctggaatgtgttcagaaactgggctatatttgcaaaaagggcaacaccactttaaattcttttgttattccctcagaaaagtgatgtgcctactcactgtcctagtcagtggtggccgtatgccggtcactgttacaagattcacagagatgagaaaaacatccagagggatgctctgaccacctgcaggaaggaaggcggtgacctcacaagtatccacaccatcgaggcaattggattactcccggggtcaca

SEQ ID NO: 102543 - DNA, 631 bp, Homo Sapiens
cccggaaacattcataagtttaatccacgccagtaataaaatcgcattacatttctcataaaataaaggtccccatttatatacagaagacagactgtacaggcccggcctggccccaggaggggtcacacacagacgggcggtggtggaggaggaagggccatccctcccatcgaggacggagaagccctaatgtgccaggagagcggctggccagcctgcactcgtagagtggctggctggccggccaggcaggtgggcaggcgggcagatggacagacgggcctggaggccaggcgccgggcgttactgaacttgggattcaaaggtgccattgagctgcccttcctcatagtccatctgacacaagatcatgttgttcttcaggaagaatttgtctcccacacaaaatctctggttgcagagctggcaggcgaagcagtcgaggtgatacacgttgtcccgggcccccttcaccatctcgaaggctgggatcagcttgctgcaagcagcacagttccctgtggtgccaaagagcctcaggtagtcgcgtcggcacaggatgaggttggccttggtgtagaaggtggagccacctcgcccagggggagtcacagcaggcacacttgag

SEQ ID NO: 102544 - DNA, 452 bp, Homo Sapiens
agtattcctgagttcaaacctcagttttgcctctttctgcagtataacctggagtaaatttctctacttctttgagactcgatattctcatatgtataaaaaggagatgatgatggtagcctcatagaagtattgtgaagtgcatagcatcatttctgatacaagaatatgtttagtcaattttagttcttaaatatatgaatatgcagagtaattttagatgtcagtatacttaaccccagacaaacacatgcaatagcccttaaacttttagattgggcacttgtcagtttcctataccccttccctgcaattgcctcatgattttttgattatgtggcaaatgcacaaaaggaaaccacatgtagctgccatttcacaccattaaatactcagaaagtcacctttgaggaaaaccagtacttctaagaaaaagcaaagccacgaagttc

SEQ ID NO: 102545 - DNA, 552 bp, Homo Sapiens
catgtgggatcctgaaacctcaagctgcatttagtttcagagtccggggaggtgctcactgtcttctgactcctgagatgccgactccctctgccataccccagggaaggaaccagtagcagaagctccagggaaactgatgaaggtcaacagaaggaagaacttctagcagcccaaagggattggaatgggcggcccgtgggagtggacatgcagaggcactggcctggggtgaagccttggaccaaattcttacttgcaggccctctggacccaggagaggagtctgcaggcctcggctgggccggattccgcagattctggcctaggtcctgaatgcctggtgagttactgagaaaggccctacaggctgagggtgccagtcagggtgaagcagccccgcaattggcccacctccttttgtaccttaacaaaggtgtctttgttacctttcttaaaggtaataaagccggtcaggagcaaggcctggcatattcagggggtcatctgtatttggtcgtccagcgggaaacccaaatggaaggaaagaaa

SEQ ID NO: 102546 - DNA, 527 bp, Homo Sapiens
gatgactcgggccacaggagcatggccctcccctgtcaaagctgacttctcgtttctcaggacaaaatccatacgctttaccgtgcccttcaaggccctggctgaccggccgtggcccatctccctggcctcacctcactgcccatggggctcctatggccgcctcagcttctttctgctcctcagactcccagactggagccgttgctgcctcagggtgttgctttatgtgttttcacagatgcctttaggggagatagacctaaaagagtctgggcaacatgcacagcctccaagcagttcactcatcactcagctactatggccagactgcctgctagtgcccggtaggtgccaggccctggggaaggaagcaatgccctgtggcccttgttcccaaggaccgagcacttttccacgcagttaaggtgcacaaacacaaaacaccgaataacgctgaaagagcccaagagaggaccagaggtcactgggctgaatatgatgaaaagtaaactaaaaaccagaaa

SEQ ID NO: 102547 - DNA, 420 bp, Homo Sapiens
cagtgtaaggcttccaagaccgggtcataagaggcactgtttgtggcttcctccttgccctctcttctgtctcactgtggggaaagccaactgccatatcatgagaaaactcaagcagcagctctagggttagccctacatggtgaggaactgagacctcctacccacagccatgtgcatgagcagtattggaatggatcctccagccccagtcaagccttcagatgactgcagccctagccgacaacttgactgcaacctcatgagcgaccctgagacaagaacagcccagcttagcccctctcaaatttttgacccacagaacctaagagataatgaatatttgtcattttaagctgcaaattttggataatttgtcacacaacaatagataaccaatacactgtctttggcccatgt

SEQ ID NO: 102548 - DNA, 462 bp, Homo Sapiens
gaactgtcaattatgaacctttcctcatgcaaagaaaagttcaaataggacagtggataaccctatactgatcacctagtttaaataatttgatttgtcttctctctgttaactattcctatgtatgtatgtatctatcaatctattatgttggttgttaagccatttttaagttgcagacatcaaggcacagcttatctaaataactcaccatgtatctcctaaaataatggcatttttctgtctacccacaaaaccatcatacacctaagaaatcagcaataattctatagtccaatatccagtgaacattgaaatttctccaatttaaccccaaaaaagttttaagaatttgttgttgaaccaggatctgatctacagctgtgcttcacacaggtttaagtatctactgtgctcctctgaactagacagttgctgcctccactctctatgcaggcctct

SEQ ID NO: 102549 - DNA, 616 bp, Homo Sapiens
  misc_feature (517)..(517): n is a, c, g, or t
  misc_feature (526)..(526): n is a, c, g, or t
  misc_feature (569)..(569): n is a, c, g, or t
  misc_feature (602)..(602): n is a, c, g, or t
tggaagaaagaaagagcctgtccccattttgtggggtcccagaaagggtgattttcacacttcacatttggcattagggctagtatttcacaaacattaccgtctggaacttttgaaggctgagttaaatgacttcatcttgtgtacttgtagaacctgctattagaaggaggctggggactccctgatgatgtgaaccagcccttctcttctcagttttagcactttgtgatcatatttataaaccttggacagggctccttggccttagagttaagtgaagagttaacactgtgactttagatgcatttttctcagtgcaagtgtctgagctcatctccagttctggactcgtgcccccactcccgggtgctgacagcaagctctgaagatatgctgagagagctccctgactctcctgactcaggtctgccagttgatgaagacagcacagttgttaccaaaaacaaaacctggcagatggtcctaggtcaggattagtggtcattctctggtnttctccagnctggtgacacagggtggtcttaaaagagtcctagtccagcctntggctccccgaatttcctgctggtgcatggagncggaggtggaaagg

SEQ ID NO: 102550 - DNA, 510 bp, Homo Sapiens
cagggtgttcaggaactatgcattaaaaacttagtgaataaagcaatgtctccgggcataaaattaatatatgaaaaccactgtgtttctataaactcgttttttaatagaaatggatgaggcaatttttaaaattaatgtggaaatgccaggacttagccaaaagaatcttgaaatgaaacaaagctgcactacttaacactagctgacttccagactcagcacgaaactactgtaatcaagactgtgcaggattaggataaagacaagtagatcaaaggaagagaacagagttcagaaataggccccacacttggacaaatggctttcaacaaaggtaccaaaacaatcaaacagcaaaaggaaaaaatagtcttttcaataaatggtggcagaacaactgaatatccatagggaaaaaagtgaatcctgaccccaactttgcacataaaaatgaatttgagatgcaccacagacctaaatataaaagcaaactgtataacactttta

SEQ ID NO: 102551 - DNA, 530 bp, Homo Sapiens
caacttgagctgaccagtgcgatgtgacataaatcataccatcatcaggccaaagtcaggaaaataccataggatttcatgcctatcaagtgtgaaattttagaggcaagtcatgaaagcctaagcctggtgtagaacagagcatctgaaatccacgacaggtaactaagatgaaaagcaacagcacaatgtcacttttcaaaactcaagggactgccagcttcttgcttaccatggacatggataccatttggttgaaaagaagagtttgtttctggctgataggacttcaggtgtgaacctgatggctgctgggtatagggaggctgtgttctttgcagtattgaagaaggagctggaactctccgggggctgatgtggtgaggagatggagcagaaggtgcaaacctgagaaaacaattataaaaggaaacatgagggacataaaacagcaggaacaaagacaaactctccaaagccaaattctcacctcccattctggctatacaagagcgtgacaacaagccatt

SEQ ID NO: 102552 - DNA, 498 bp, Homo Sapiens
ccaggagggagacgccaacttctcttagtgtggagggcaagcataaaggaagaccctcagactttgtcacagattgcttcttgatgcgtccggcaaaaaatgtacaaaccaggcaagtttaaggcaaggccccacgaggggagctgttggctttctggcataattttaagctccgcaccaaggatcctattttatcacctgtgccgtgggtggagaaaaaaacgtaaaagctaaccaaaaactccaacaagagggcgccatcctggccattcccgactggagcgctgcctgcggtggcacagtcgcccctgccaggggctggctgcctcatggtcccctccccttcccagaggtgcccaatggctgggccctgcctctccagtaaggatgcctcccctgccccacacacagcatcgggctgccccaagtatcaagtcaccgagccgcagctctgctctcacctaggtgccatttatacactgctaatttggctggaac

SEQ ID NO: 102553 - DNA, 265 bp, Homo Sapiens
ttcggctaaaaagaatgcaaagatgtgcccccacccccaccctcgaccacccccgatgggatggcttggggggctccagggggtgccctcccagacccccttgcccaggcctccccagcacctaggtggggcctggggtaggaggaacaggtttaaaaatccccaaaaaagcgaaccgtgaggaggggtgtgggcacccccggcccaatgccccctggtggaatgcgggggagcaggcagtggggctggaagcagaaacaaaatg

SEQ ID NO: 102554 - DNA, 471 bp, Homo Sapiens
  misc_feature (156)..(166): n is a, c, g, or t
  misc_feature (380)..(388): n is a, c, g, or t
tggtggcgcttactggaagccgcaccgaggcgtgtgctgtattttaaaaatcccatttctggtcaatttctccacgtaatcagacacccgcagagaaactgcatataactctttgcctcaaggcttttagacaagcagagggccaaaacttgcatnnnnnnnnnnncatcatcattaatatcagtaccatctaaattaagagcttctaattgttttaagggaaggtggaagctaaaatgaaccggcacatccaacagagggcactatctgtggaggaccaacaaaggaaaacagagcggaaaatatgggcgcacatgtgcctccagttcatgaagttatttggagggaggggggaagaattaaacttacattattgattnnnnnnnnngttgaaaatctgttagagtgaaaacagccatggtaatctacagaagaaaagggagaatggaaagaaaagatcattcatgtctt

SEQ ID NO: 102555 - DNA, 505 bp, Homo Sapiens
ctaattctgtatcagacttcagtacaaatatctgtctacttagtttttgtattttatcaccttgagacattagaagcatttgactcttctgaaacctatcctgttccctcatctccttttggaaacacctctcatggattatactgagaaaggtgggatgaaactaaattgaggttgttcaataagaagagaccactcttacctagttccaaagagaatgttaatcaatattggtgatatgcttcctaattccaattttagagataattaacaacttctcattatctaactattttatatactgcaagttgctaatacttgaatgtgagaggacacagtaaaagaacacaaaccatatacatgattagaatacatactgcagttaacaagatggaactctacacagcaaggataaatgatttctcttgtatgcaaatatgcacaaacaatagacaataggattcttatactatattatttcaagttacttttaaaaatagaaagt

SEQ ID NO: 102556 - DNA, 485 bp, Homo Sapiens
ttattgacaagttcaaatttaatgacatgttacagtttcatttgaacagtgtattactgtattaaagtatagcatcatagctaaaagaataggctctagattcagaccggctgaatttgaatcctagatctgccacttacatgaacctggccaagtaatttaatctccctaggcctcgattattcccatctgtcaaaaagaaatattaaatggtacttatatcatagtattgtaatggagattgagctaaggcatcaaaggtgcttaaaacaaggaatgccacataattcttcaggaaatatatgtaattgttattatttatcaccagtttctagtgcccaatactagaatgtgtctgggtttcaaagaatagatgcgaggaactatgtaaagtgtatgcttgctatacaagtgtgtcaggtattattgatccaactctgcaaggcaacccattaattgtacatagtttgggaataatccttggg

SEQ ID NO: 102557 - DNA, 408 bp, Homo Sapiens
gtgatctgcgtcttccccgaaatgacctaccatagcatttctgccactcccagtcactgcttggcagcacccatgagaagcatagactcaatgtgtatgcagagctggatgcaaggagcacagcagctgaagccatcagttttcaccccacagctgaagatctgtcagtgaatatgctcaaggttgccactataattttgggtcacagggtagtgcttatactgatgcaaacaagatccaaagggatgcctggttcaaaaggtgggaggctttctgcaagtgaaagatgaggaaaaactttaaaaagtttattttaggctcttgatcctcattgttatgatgcatccttgtaaatttgtcccaaaaaaactttattaaaattcatttatttaatgagattaaccacag

SEQ ID NO: 102558 - DNA, 576 bp, Homo Sapiens
atgaatgagggaatgccgtagcagttcaatcagctttcttcaaacaagttccctgctttgttctcttcaacttcaatccttttattcaattaaggtggatgtcaaactgtgggactgaaaacaaggtttcagtcatctgcttttcatgtctagcacctcactgaaagtgaggggtgtatgccatctattgtcccttgttcttggctgaaatggaaacagaaagagtactattttagcacccttttccatgtacttggaagtggtgcagagaagacagaaaactagtttccaaattcaagatactgcaatagaccttgaatggaacgcaaagttatatgagatattttcccaatctttcagggacttggaatctcaaactggtagaaaacatgttcacaaaacacattcacagcaaaacaggttttgaaataaaagaagtgtacaatcccacagactttcaaataggggaaaattcttttttgattgagaggattcaacagtatttaatgaaagaggtaatatgtgatatgagttttcattcaattaaaataaattctttaaaatatggaagagaaa

SEQ ID NO: 102559 - DNA, 357 bp, Homo Sapiens
ataaaattttggtctccccaacctcttacttcaacccagatatttcctttttattgatcccaggtctttagataaacttaaccaattgtcaaccaaaaaatttttaaatctgcctataaactggaagctccgcactccgctcccctcccctccccgcccttcgaggttgtcctgcctttttggacaaaaccaatgtattttttaaatggacttgaagtctcatgtctccctaaaatgtataaaacccagctgctccctgacccccttgggtacatgttttcagggtctcctgagggctgtgtcatgggttatagtcactcaaatttggcttaaaataaatctctccaaatattttcc

SEQ ID NO: 102560 - DNA, 529 bp, Homo Sapiens
  misc_feature (414)..(422): n is a, c, g, or t
cagccatcgatttacagaactatcaagaactgagccaggtgcattatatgcctttctccttttatcctcacaacaacagcacgggtagctattacctgcacataacagctatggaaatcaggcttaaaaaagttaactcatttacaaaggtcatacaatgaagaggtagcagaaataagatgagatgccagggctgatgccaagactaacgttcattaaactctacctcattatgcttattcatcgatagtccagatgcatcaattcatttgaatagaaaaactgtcatgtataccatatacagaataacaattgagcacaatataaacttatttggataattgagaagataaatcaagatcttatgatgcttgagtgtactagacgaaactgttgcagaccaaaaccatgtcnnnnnnnnncttcatacccttagtatctttgttcagtgctaggtatgtaacaagcattcaataaatattgaatgagtatttttgaagtaaataaatcatcccaataccaggaacaa

SEQ ID NO: 102561 - DNA, 592 bp, Homo Sapiens
ttttttcttggcggtggaggtttggagggacacgtcgtactctagaagatcttttctgtgttcaataatgtgagaccttccgtcagtctttcaagtataaatacctcttaccctgtcatatagtgtaggatatccccctatctccacgaactgagttgcatccctctttcagtggagattagtctgtgaacacttctcttactactcgtgtagggggtagtggtcaattacctttacacgggaaggtactgcgggccatgtgtgttttgacttctttcaacccacttctgggttttttagtgaaacacctctatctaacactgatactttcatttctgttgtctattgagtcagttaacactgatccatttatttttcagttcccaaaatcttgctttgccattgcttctattttattgtctgggggtgtttaacacctgtttcattttttacagtcatttagtttccagattttagtaagggacagaggggaatagatggactcatttcatgatgtagaaacaaatactccctgtcttgtcttacatgaaaaattattcttaaactaggccttgtctttgagaacctgatc

SEQ ID NO: 102562 - DNA, 608 bp, Homo Sapiens
  misc_feature (95)..(95): n is a, c, g, or t
agattatcatgcagtgataatctacatgaggtaagtgttggttgaatatatagtggaaaatatgtttgaatgtgtgaggtagtttcagattatanagttttaaagtaagccaaagagtttggagttaatagggagctattttctgttctgaagcaggggaaggcaattggaaagtggtattttaagaacatttatttgatatcaaagagtaaaacagtttagagtgaaagataagaaaggttatcttggggaatatggtgataatcattcggtagcaatgaggtgataaaattctcagctagggcaataagtaatgagaattgagactcattggcaacttgacaaacctactaaagaacctgggaaaatggaaaaacagcaatgccactttctgaaatggtctttaaaaagggctacccagtttatgttggaaaaggagttcaattgggatatactgaattagaagtgtcagtgttgggaaacagagtctgagttagaggtcagggtttaaaaataaggtataatgtttgataatgcagattttataattacctgattccctgaaaatggaggagctcatcaaataagtaattataaagtgaaagaaa

SEQ ID NO: 102563 - DNA, 605 bp, Homo Sapiens
attgtacgtcagacagatgatgaccaagctgctttcctgctgggggaaggaggcattccccctgggttgtttttctcttggtgcccccacacactggcagacccgaaggcagggtgctcaggagctgcagagcctggcagggtttgctggacatgctcagggacgggccatggtgctggctctgctttctaatcatggtgtcagtccttcacttcccttggaaatacccagagattttatttcctgaagataggacatgatgggtgctgtgagatggtatttaaagtacctgtctgcaaggaaaactttaaaataggaagtactaaggataagcgcctatgggatattggaatattttataaagccacaatagttaaagcacttagatgtggacagatgagcagagaatagaggactttgaaacgggccaaataaatatggaaatttagtacaggctagaggtgtttccaattaacgagtaaaatggattattcagtaaaagcagttggccctctggaaaatagtaaagccatgtatgtgcctcactctttatgccagtacatattccagattaaagatttcaatgttacaattatgaaagtaaa

SEQ ID NO: 102564 - DNA, 234 bp, Homo Sapiens
cctgctaagcaatagagccctttagttgagtgatgtgttatgtggaaccctaatatgtcaaatagccccacactgagctgcttctgactgaggtagggggctggagaccattctgattgaacccctgttgctccttacaggagtcttccagtgacacccagacctttctgaaacactgctaatacacatgcacacacacacaactgagcccttctaatggtaactctatttctg

SEQ ID NO: 102565 - DNA, 170 bp, Homo Sapiens
  misc_feature (77)..(89): n is a, c, g, or t
ggagccaaagcaaagatgaaagctggcaatgcctgttttcttgttggagtaacctcacctttttgccactccagacnnnnnnnnnnnnncccatgtgcccatgagccttttgaaccaggcagagtaagaaatctaccaagcaataaccaataaaatgtcttataagctga

SEQ ID NO: 102566 - DNA, 154 bp, Homo Sapiens
ctatccattcctgccttcctaagagtctcatcactgaagagaaacagaccccaggcagttcagtctacactccaaccaatacagccttgaaaaggtaaacagaatgttgtttttataatgttttattataaaagtaatatatgatctatataga

SEQ ID NO: 102567 - DNA, 475 bp, Homo Sapiens
tgtgtgcgaggtgcaggcgctgggggagcttcaggctgtggtgtgcgagtgaccgcaggggagcgtggggtggctgcccgctgccgagtcagccgttgagcccttaggtcgcagtgcgtccgtggattttagtaatgttctcatcactttgtgacacactctgcttcagcatcacagattttacaaatggttcaaattcaatgaaaaagattcgccagaggctgaaaacatcaagacctcaaaaatatgaatgcaaaaatattcaggggaatgaactaattttgtagatacctacatacaaagtttctagaacatctataaaaccacaaagtcataagaatttgttttccattacattagtttatataaaatgaataaatagtatttatagatttaatgtgtcttatgtacatatacatgtgctctgttttagcttaaataaaaatgctacaaagtcggagaccacttaagaaag

SEQ ID NO: 102568 - DNA, 464 bp, Homo Sapiens
gggtgcgcaggtgtttcctggtgtgtacaccaagaatacatcttggcgaggtttctctagggtgcatgcccaggaggaagtgtggctcgtggggcaggtggacgtacatctgttcctggaactcccccaactgcaggcccgagaacacggtgtgaggatcgctggctcctgcaggacgtggacgtggcaggggcctgggatctggggtctggcctggggtctggggtctggcctggggtctggctcctgcaggacacaggcgtggcaggggcctggggtctcacacacaggacagcaccgcgctgcatctccttcctgcgtcataggggatgtgggtgaggagtgcctctccagtgaagctttataaccctaaaaagtattgtctgcccctaagagcgtttgcttatgtgcgttctgtctcttcatgtttatgatgatataaattaaaaccaaaacattttaaa

SEQ ID NO: 102569 - DNA, 662 bp, Homo Sapiens
  misc_feature (375)..(423): n is a, c, g, or t
ttcgctactgtgtgctgtgtggcacagcaagaccttggctctaaaaataaataaataacaaatagctagacgtggataaagatgggtttgtgacggagggggagctgaaatcctggattaagcacgcccagaagaaatacatatatgacaatgttgaaaaccaatggcaggagtttgatatgaatcaagacggcttaatctcctgggatgagtacagaaacgtgacttatggcacttacctgggtaaggggcaagatgtcagcctggcagggaccgtggtcttgagtcaaagaaacaaatgggtcacacagtaaaggaaaggaagcttatcttaaatagttcaattcagtgctaagctgattccctttattaatnnnnnnnnnnnnnnnnnnnnnnnnnnnnnnnnnnnnnnnnnnnnnnnnntgaagtctggaagtctggtatcttctacatttttagcattttacatatattttaccattttttctttatgtcatccctcatagagacaatttttggagtagatttcatttaaaagaatacattgggctgggtgccgatagctcacgcctataagcactttgggatgctgaggcaggaggattgcctgggcccaggagtttgagaccaatctgggcaacatagggacaccctaactaaac

SEQ ID NO: 102570 - DNA, 442 bp, Homo Sapiens
gttaaggaggaagcagtgatgtgaaagccaaatattttagtattatattgggaagggatcttaaaaatcacttatgaggtaggaaaactaagaagagggaaggaacaaaaacacttctcatggtgatttgcccattaatttaatttcacaatgggagttcaattcaagtccattaacttctgaaccagttggctttctggcataccctgttatctcccacctccatttttttcttcccctttattgcatattgatattctttgtgtggatcaagtatacactgaatgggagaatagttctgatttttcttgtgagagatttttttcctatttagaatacaaaatgctttgttcatgtcatgcaaaatgaacaaaatcctttgttcatgtaatgcaagatgtccaaccttttataaagtaattctcaatgatcaaaattttga

SEQ ID NO: 102571 - DNA, 544 bp, Homo Sapiens
acacgtctgctaacacatctgggtcactgctaaacaacagtcgtgacaggacatttaagcaaggtgaaaccttactaaagtttggaggagggtttttgcctctacataaatttgagagggcccacacggcatttcttgttgttgtgagtctgtttgaatttgttaataactctaaaagaggtggaagtatttcacaattcaaaacaaaatctctgcattctgcattgtcaccagcaatattaccaagtgcccaaacagcctgttcctgaacatcttcatgttcagaattaagaagtttgataaaaatcggaacagccccagtttcaatcactaccttggtatgcagaaaagttccagatgctatatttgttaatgcccatgcagcttcaaattgtaaagtgcaattttcatttctttcaagaaatttcacaaatctctgtacaactcctggtttctgtataacttgatctattggtggattaggttctttagaaagcagctttctaaatttctgtgttgcatgttacgctgttgatcagcatta

SEQ ID NO: 102572 - DNA, 538 bp, Homo Sapiens
gggacatgttagtgcttggaagagaaacttcaaaccactccaatccttatgcagggactgcttgatgagtctttgaaggtcagtgataatgacagatggttatccattctcgacaacttactggtatataagctaatgttgttccacaacgagtgtaactgaacaggtagagtatgcatttagaaaaataatccagacttgaaggctgtgatacagactatcatttactgaacacacaaccaaaaactggtctggaaagacaattaaaaataattgttacctgtactactccatttccagcagtttaccattaacaaagaaggtaaggaaggagcaattattggtgagtagttagagccaaagcatccatcctccgtactcagggcaaactatgctgggtgctaatagccctgttgatgcctgccagtcagaacttccatgggactgttcagctgctgaaactgctgtgggtgaggactttgtttgagaccagctcacatacaaaagggtgcaagtgctttaataaaaatcttattct

SEQ ID NO: 102573 - DNA, 166 bp, Homo Sapiens
agggcactgagctaaagatgagaagaagcgttccctggagcctgcatggcatcaatcatgagaatggatgttgagggttatgcaccccactgaggcagcactgaatgccagatcccaagttacagaggtgcttgtatgtttttaaataaatttaagagtgtgtgtg

SEQ ID NO: 102574 - DNA, 321 bp, Homo Sapiens
tttatttttaaaaccacattcccttggtgatatctagtgagaaggtgtgattctagtttgtgttgaacaaatgtttttagctctaaggtgttacactgtaattgagatgtttccaactactgcttaaaagaagacattggcaaatgcctgccttaattgcaaaaaacacatgaattccaatattaccttattgatcttctgagtacacatctattattaccatggctgtgagatcatttaagaaacagacaaatgtcatttagaaacagactatagaatcaaatcacaactaaagagaatgctttatgatagctcagacag

SEQ ID NO: 102575 - DNA, 110 bp, Homo Sapiens
aaaattgtagcacaaaacaacaaaacacattcacaagccacttgttggcactgtgtacctgagtgagaatttctagaacattgtagaacaaacagccataaagtttattt

SEQ ID NO: 102576 - DNA, 550 bp, Homo Sapiens
atttcttttccttttgatgtttaggactttactcctttctgaaggggcaggatgggaaggggattaacctgtcctagagacagactgaggagcactaaagaagagcagctcatgtccattcaccccgggttaacaatgcagtttttaccctaatgattctccagtggggcagggccaggaatgacgtccttatggcatgattccaaactttaagtttttagaaatgtccatcagttgttctcttttaagtgaagtggaggtcgttgctggtgggaatgatccctaacttggagataagggaggatggacgactcatgatttctgccctagcagctaaaagtcatccctgcaacaaaattcttaactcccatccggctcccccaccatacccggctcccctgcagtcttccttctctggcaccacctgtccacatctctctccctctctcactgtaggttccctactgtatattaatactgcccaaaattgtaaaaatgtgtacctttgatcaactattttatcctccaaatacaaattcctcgaatcaaa

SEQ ID NO: 102577 - DNA, 325 bp, Homo Sapiens
caccacacgcacgcactgtaacatcttggggtcaaagggaataccgtggaaaatacacgatcttggaatgcggacattcacctgaggcctattacttattagctgggtgccctagagttcaatgccacttatgtgggctaactattagtcggtaaagcgatgattggcctacagtggtggcatattagaccctataggagcagagagcatccaggcctgtgctcagtgaagttcttcgcccacatgacaatatcatggagcagcacccaggggagaactgatgaacgcagtcactgtgacagcacgtgaacatgactcactccct

SEQ ID NO: 102578 - DNA, 498 bp, Homo Sapiens
ggaatgctgggatttgatctgaatatcttccaaaatgtaatgaacaaacacagcatcaccttcaaatcctctgtggcctggggaggtgcttggcctctagaagagaggcctctaataatcagatcaaatcccagcattcctaaacaaggaaacaaggccaccttccataatcaccaacatcactccccgctgggtaatccataggagcccttaatcatgacgctatgggaaatggtatttgcatgtgatgtaatcatttatatggaatcatgtctattcactcatgaaattttaaaagtctgcatcaggagtaaatgacaatgaagttcttccttcctagtttggaaatttgtctctaatgaaaaatttcttaaccacagtagtcagcaaatgactacgattgttaaacaggcacatcccaagcaatcccaggcctgcctcttggccaatgccaacacataacagtggcatcgatgaaaactctcccaggcaagataa

SEQ ID NO: 102579 - DNA, 160 bp, Homo Sapiens
aaactcaagcaaatgaagttcataataataggggatgttgataaaacttgtggcagccttccaattcatttacagttgtttcgttttgtttttgttttaatgtccattttctgttgactgttcccagttttcattttccatacagtctgtatgtaaaaaa

SEQ ID NO: 102580 - DNA, 508 bp, Homo Sapiens
acttttttactctggtcaatgaagaatttgatcagcctctgctgtaaaacgtcccggagtttcctacagaaaagaaatgcatttaatacatacaagcagcctctatgaaatacaaatggccagagggtacgaaaaaatgttcagccccgctaagaatcaaagaagtgaaaacaacaaggtaccgttattggccaaactgaaaaagactgagcagaaagacagaaaccctgggcagtggccggacaggaggcagcagggtggagggcagacaccccctggaggcagtaggagaaccgatgcccccagagacaagatacccacgcccggaaaacccttccaacctttgagccagttgttccaattataggaactgcaccttaggaaacatgtgagcacaccaagatttatgtaccaggattttcactgtggcacataaaatataacaattatgaacaacctcatgttcaagaatataggctaaaattatgtaatgctaaatggccataaa

SEQ ID NO: 102581 - DNA, 532 bp, Homo Sapiens
aagactgaatcaggagtgattttcaaatgtagagaaaactccagataatgctgtttgcttccggccgctgtaaatcataggtgaaaaccagtagcaagggctcactcagtgcctcccagaagcggtctgcgggtctcagctgggctgggggcagttttcattgggcaaggcttgggcttagcttcgaagcaggggctgggagaggatggatgggggtgtgagagcagaagaaagacctggctttgcagtgaggcagtcccaagttcaaatctgagctcaccactgacccgtcgtgtgatgggcgccaggtgttaggagactggaactgggtatgtgtgtggcattcggccggccatagtagctgctcagtaaacagaaactgtttctcatcctcatcctcatcctcatgcctgcaaactgtaaaccgtcctacttaacaatgaaagtagaaaagtgtttcaatgtgacaggaaagagtgaagacacagaagcttggaaatgatgatgtgttaaagaatcactttaaacaaaa

SEQ ID NO: 102582 - DNA, 467 bp, Homo Sapiens
ctaaatttaatatgccatttcgagattaaaaatgtttttttcccgactctgatggtctcttgttacttgtgaaggtatcaataataatgtaataatgacaacattgaggaactgtagatttttattttattctgcctgctaattatggatgtaattcaaatgacagaaattcttaggattactatggttgttacaaggacatttagtaagcttatatgtctagtaaataacttgatctatctaaaaaatactttatctcatcttatttcaaaattattcagttgagtaatctcttttttgtaactggcaaataacatccactgtcgtatgagaaagttaatagatgtttattctccttgttagagaaacactgaaagcattaggtattttcatcacggtatagctaagaacctattggtttattaaagattttgggggtttgcactgtggatgcttctttgaaagaa

SEQ ID NO: 102583 - DNA, 489 bp, Homo Sapiens
gctcctgggctcctgggcagatgcttaattaggaggaagaaggaaccaaaatcatgaacgcaactggctctctcagggggaggctgtcaccctccaagctcttcttccccttcctcaaatggagattcacactcatccctagttcaggagagccgccattgatgatgaggaaatccgtgtcaaagaagctggaaagactgctattcattgtgagaattttgtttccactgctacattacattgtttcttcttgttttcccttccaatttccagttaagaatctttcacagaaaatttttaattttatcacaaactgcacagatatcacacagctgcacccccatttggtgacacaaagcatacccttctgtgaagattttcactttacgccaaggcatgattgtcactttacgccaaggcaataaatttttacaaattttgtataacaggagctgaattctgggttctcaaatgtgaaatgtggcaaaa

SEQ ID NO: 102584 - DNA, 275 bp, Homo Sapiens
gcattaaagagaatagtatcatatgttcttttgggaatgtccccaaaaaggtttatgtaaagtctaaagtctaaaacagtatataggactgcatgtgaatgtgaatgtgtagtgggaaggaagagacagagtaacagagaaaaggaatcccaggcattagacagagttgaaccaggtggctagatcccaacaccgtagcagcttcctagactatacctaaagcagccgcaatgagaccagtcccttgcatgatcttcccaaaagtgaagaagtca

SEQ ID NO: 102585 - DNA, 522 bp, Homo Sapiens
aaagaaagaatttgaaattccatttaaaaatcagaatcaggaaaaggcttgaggtgtgcagctgactcactcaatagatgtgtaataagcctgattcacatttgtctgtggcgctgacgttctgcccccgtcccttccagacgtctgagttccccattgtctggaagcgtttttgccacggctcctgcgcggacgtcctaatcacctgctcctgctcctgctcttacagaaccaggcagggccgcgttgagaagcagaaacctgctggacagctcaggaagccgtagtgttggccccactgtgtgcctggcctccgtgacgtgtttaagtcacacactttctgagcctcgaggccctgagcgacagtaagcgttgagcttcagtggcgctgcacactcaggtgtccaggcaccaggttccttccaggaatgagtcaagtgtggcagggctgctggtatgtgtggcagggccggggccactgggagaggggtggctgccggtcagcatctgacaactgctccc

SEQ ID NO: 102586 - DNA, 427 bp, Homo Sapiens
gaaatgagctgccaaggcaagaaccagcctcatgatagacttcaggtttccatccacaatatctttagccgaagtctggtgcatacgaatctttttagaggccacaaactgtagccactttctccacattattcttcatctcctgttggttaccgggactcagctgtaccccactcagcttttctcctgcaacaatctcgatgagatatgccaggatcaccccatcccggagatcttgtcgcaggtcctgcacaggcttcactgctggcctcttcttcagctgtgcattcacccaggccacataggcctgcagctgttgctcattgaagccctcctgcaggacgtccagtaagttccctcgggtcaggcaggctagcattgttcctgctgggggctcccaaagcggggtctccagcccggcggccgc

SEQ ID NO: 102587 - DNA, 468 bp, Homo Sapiens
ctgtatcaaaaatatgtagatggattttagtagttgtaatttaaatgtggaaggtgaagagaatttcaaactccaaagagaaatgaatgatattcagatgtttcattaatttctagtctgtgaaaatatgcattttatagtaatatgtatacacttattttatttagaaataatagtgttttagaatttattaaaaactcagtgatagcctttataccaaaatgtttaactttaccaacagcaagtcataaaagtatttattttaaagctttttaatattatcgtgtaactttcatctgtcttcagatgtaaataattatctgcctaaatgttatatttttatgtatgcattttctgaaaatgtattgttttgtaaagtgggaaagataataaatcaagcacttcttgcacttgtttctgtgaagcatatagccctctattttaaataaaggaagatgtgtagtaaaa

SEQ ID NO: 102588 - DNA, 592 bp, Homo Sapiens
gctgaagatattgtgaacattgttgaaatggcaacaaatgatttagaatattacataaacttagttgatatagaaacagcagggtttaagaggactgacgccaactttgaaagttattctgtggatcaaatgctataaaacaagatttcatgctcttttgtgataggaaaagccaatcgatatggcaaacttcaatgctgtcttattttaagaaattgccactgccaccttggccttcagcaaccacaaccataatcagtcagcagtcatcaacacagaggcaagacactcaaccaggaaaaagattatggcttgttgaaggctgagatgattgttaccatttttagcagtaaagtattttttaattaaggtatgcacattgattttttaaacataatgctattgtacatttaatatactattgtatagggtaaacataacttttatatgaactgagaagctaaaaacttcagtgatttgctatattgtgatacttgctttattgtggtaatgtgaactgagcccccaacatctttgagtcgtgcctgtagttgattactagttgatgtagaataaaagtacccaaaatttc

SEQ ID NO: 102589 - DNA, 313 bp, Homo Sapiens
gcggccgctggattctcggcctcgggctgaggaggcaggagggaaagtgggtcagcgcggggccgcggcagggctgctgttgtgcttggaaaggggcccggggtgccggaggcctctcccaggcgcggcggcaggagcgcccgcgcgtgacactccaggcacaaaggggccgggccgccgcctgcactggggctcgggcgtgcggggtatgaggctgtcgggcgccgcacgcatggactgtgttccccttcccggccacggctcggggcggcgggggcccggggctctcctgtccccgagcgatgtccccaag

SEQ ID NO: 102590 - DNA, 518 bp, Homo Sapiens
ttaccttcatataatatattttagcagcaaatgacaaaaatcaaaggatccattttggcaagagaatgtaagaataaaagggaattgacgctctaatttatataaaaaaatccaactacatgaaagttatcttcacagtcctcactttgttgattttagctaagtacttgacatgtgcaccctcatgtttatacagtggctcaaatattttattataaagaaaaatggaaactaaatcttcagttttctccaaaagtacacaggaggcatatattcctttacttctctcattaaagcaccatccgttcaattcattttgcaataccaaccccaaatttcagaacttttaaaaggtaaattttagcaaaagttattaatgaaaataactgaggcaacatcaaaatttaatagctccccaaattgactaatttatgttttagtaggaataaatcatagtacataataatagaagatttaataagttaaaatatgaagggagataaaaccaaaccaaaaca

SEQ ID NO: 102591 - DNA, 764 bp, Homo Sapiens
  misc_feature (13)..(13): n is a, c, g, or t
  misc_feature (34)..(34): n is a, c, g, or t
  misc_feature (87)..(87): n is a, c, g, or t
  misc_feature (158)..(158): n is a, c, g, or t
  misc_feature (171)..(171): n is a, c, g, or t
  misc_feature (174)..(174): n is a, c, g, or t
aacacggttcaangggactctgaagccccgttcntgaacagagacagagaaagaacctgaagtcgaaagccagaagcaaaaggcccnggggcagtttcctcagacatggggtccacagcaaagaaaccccgaaaatgcagccttgcccaccagcctgnacacaccgtcccnttntgtcctcagaacagatgagctcagggtagggtagagaacgcactttctcagacctgtcccctttgtgtttagaaatgagttaaccaggaccaagtggccatttagtgtcctggaaacttacgaggacagtgttggcctttggagtcgggccttcttgtgttaaggggcacaaggtccagatcactctggagcaggccagctctgctggacagtgaccctcttcccaggcctcaggagtgaccatagccactgctgaaaagtcacgcagctgctccctcggaccccccaaggatggttgctgttagcagaggattggtgcagtcccagctgaagcccactgtgtgccaaaggaagaagctcccagggctgcttccttcacctgcagaaagccccaagtgagccaccagcactcatggggcagtccctgtccaggctgcccagggcttctcatagacgtcctgagaaggacggtgtaatgcaaggaaatggctgtggtaacactgatccttcagaagaagcttcattccctcttaatctagttaagccaggacatccagaattcattgctttaataaagaacccaggccgga

SEQ ID NO: 102592 - DNA, 436 bp, Homo Sapiens
aagacttctagagagggaatgtcccagagacagtggttctaaataatgtatccttgttgatttaaagtaaaatgttggagtgataataagtattggctgaaaaggagattctttttgcaggtcatttgatatccacagtcccatcatatattttgggaagagaacctatggcccaccctccagcatgcttggttcagagtatatttcctctgcttgccctggaaacaagggtttaatttcataaggaaataaaacttcgctaaactctctgcagatcacacatttatggcccaaagggagttggttggtggtcactcatcttagaagtactacaagttacatgaaaaagacatttgtaggagcagctactcactaaccatccactagcaagacgccagcatcagtggaaaccagcaaggcctggccccagggatct

SEQ ID NO: 102593 - DNA, 550 bp, Homo Sapiens
  misc_feature (32)..(32): n is a, c, g, or t
  misc_feature (35)..(35): n is a, c, g, or t
ggcacgaggggttcatctgagacgagaggtgncgncgaaggagagtctcgcctgtcacgctcccggagcaggggcttcatgaggtggccatggaaacagcctggcagactcccatctctcctggtgccatctccggagcggaaagtggagcgccccgctggcgaccaaggccgcactgagagccctggtttggtcaacagttgggctccaaggagccctggtattccttgaacatgcatacctttcccagcgtgagggacatggaccgtgccgtgcgagggaccccatcttctgcagcaggagggagcagagaagagaacacagggattcctgttgctaaaaggtctgttttctcctgctagccaccctcatcagccagagttcaaaccctgacagtgcccatggagagatctggtccaaggcaccaacctcttcctgctggactgagaaagagcctcctactgtgtctctctttacctcagcttttgcacacctccaatatattgtccactgaagtcagaataatctaaaaataaaggctgattacctc

SEQ ID NO: 102594 - DNA, 498 bp, Homo Sapiens
  misc_feature (409)..(409): n is a, c, g, or t
  misc_feature (417)..(417): n is a, c, g, or t
tatcacaaaatatttaaagtttagtacatattaggggctagagattgcagacacaacatgatgttctgtcttaaaagctgtattcatgttttctaatattcttagactgtatccttctcaaagcaagaaatgtgttttattcgtttttgtatcgccactgtagcaacgtggaatgaacatgagattaaagaaagccatccttcatgtagtcatttttgtcaacactgagaaaatactgattgagcaggtggtgtaagccaggcacagtgcttagaggtgggggtaccagcttgtgtgataggtgctccctgcccttctggatctcacagcctagcagggaagacagatgtgtacataactaaccccaaatacattcagagtgtctggaaacacacaggaggggatggtntggttggnagaatgatttcacagaataaatcacattcaagtttggctggcctgtgacccataatttataaatcaaaatattggccatct

SEQ ID NO: 102595 - DNA, 501 bp, Homo Sapiens
accaagcaaaaataggcctagtgccctgaacaaaattaatggatggatttgagtacatttcaagcaactacacttgtattgaattgtttaattcttgtagtaaacttaataaggtttaggtatcaatgaagaatctgaatcgcagaagtaaagtgacttgaggtgtcgcatagcttactaagtagctaagtagcttaagtattagagcaaggatctgaatctagacctcagacttttaaactatgaaattctgtgacatcctgttcaacttttcatagttgaagatggcttcttttgttgctacagtgtatgtagaagaatacccagacatttgagagacattggttaaaattcaaaattcaggaaaaccaaaagattaaaatgtagttgtaaggcttctcctctgtctttatcctttttgattgttacactgattctctaatggtctaacctttaggtaatttgtctactttattaaaattaatccagatttattaaatg

SEQ ID NO: 102596 - DNA, 622 bp, Homo Sapiens
  misc_feature (575)..(575): n is a, c, g, or t
  misc_feature (611)..(611): n is a, c, g, or t
ttctatgattccatctccgtctgggcgctgtgagtggggtgggcacgtccgggcagcccagtgcgtctgtcgcacgtccccaggccgtgctgctggcgtcactttctttgatatgtagctttttcttaaagacttttgaatgtttaataattttgtaaatcatgctctttacacagagtaccacttatttaataagacgggatgtaaatttacaatgacaaatgtgtattttaagaaagaaaatgacattattttgaatggtactttgtggaaagaggggagaataaagttatgctgtgtacatcacttgcagatcaccaaaaacactccgctgcccgtgaccgccggtgggtgtgtccccgctcccgtcgtcccgcccacctcaaaccccgcaggtgtgcctcccagcggattatttattgtagaaagtgtattcatttgctttataatgaaaaatacatttgcaaaggtatattgatatgcatttttatacaggcacataaaaattcaacttggcttgggagcagaatgcattgcattgtataaatgactctggcctgtgtgtactttgattntataacttgtaatcttttgtttacaatgaggggctntctgtaacttg

SEQ ID NO: 102597 - DNA, 419 bp, Homo Sapiens
gacatctcctgcccagaagcaccagcccctggctccaatcagactgctttagaaggtgtcctgctgatagaaaagaggccacaatggcagagtagccttggagccaatctctctcccaggatacctgacaagagcagaaacccacggactgattttagagcagaaagcagagaaaggatacagcaagccaaactgccagggaaagagggtagtagttagaagcactgattaaccaagggtgtgccagaaaaaaggcccacacagtggacacctcaaaagaatcactgacatagttattgatcatgctcagctccatgtcttgcttcactaaaagttctgaatttcttcctttcgggaagacttgtggaagtataattctgcaaacaagagtatttcataattgatgtttctgacatgac

SEQ ID NO: 102598 - DNA, 511 bp, Homo Sapiens
cattagtcttatcattaaacacatttcttaagtacctactaggtagtaggctttgtgataagcatttaaaaatataaccaaattatgtgtttcccgttgaggaattccctgtcttgcacaatgatagttacatgtattgtaaataaacatcatgaaatttggtagagtgcttgtgcatgttggcaagaagaaaaaatgaactaatatcatcctttataattcagctggatgtccttggtataagaggttgagagcacagaaaacaaagtttcaaaccacaactgtacattgttcagtctgagattatcataatgattgggttctattaactatttggttaagatgtaaaattatgtaatagtgtggtgagaggaaaaatggtggattaaggaacttaaaaattttgtcccttcataaaggtagcaataaaactggccttcaaaaaatgatcaaagtcaactttttcaggactcgagaaactaatcaaaagatcacagtaaactgagttact

SEQ ID NO: 102599 - DNA, 501 bp, Homo Sapiens
gagattccagctggtaacatgttcaaacattacagggatcatgcagtctgttgttcttaaaactaaactaaaagaccatggcaataaaatcatacattccaaataagactcatatctcaagggatatctttaggctaaaaaaaccaaacccaacccggactcaaagactgactagctataaaatactatctcaaagttggttgagactctcctctttggagcttgcccctccccttcttagaattccttcttactctcttgctctaagctaactctctttttccaaaactcctcagctaggctggcatgctgacaatttaagtaaaaaacacgtaaaaactagcagatattttaaaaaatattattttgaccttcgtgctgtttcttaaaagcaaaaaataaaattctcatataaaagaccccctttccatactaaaaggaatgaggagattcttatcttaaagggcaaaaaattgagaccaagacaatacttagaagaca

SEQ ID NO: 102600 - DNA, 517 bp, Homo Sapiens
  misc_feature (177)..(224): n is a, c, g, or t
  misc_feature (312)..(325): n is a, c, g, or t
ttgccatatcattaaatctgtaatcataaaaactaaaaagaaattataatcttagttgagcacatcacttttgagacttttcatcacaattaaggacttagcaattttctaacagacaagtagcccctattccaccttttaagtatcagaattagagtcaaaatttagcaagatgcnnnnnnnnnnnnnnnnnnnnnnnnnnnnnnnnnnnnnnnnnnnnnnnnctctttcttcagattatagacaattagactccagaaaaactgtgacaaactatttagagaatccaactctatgctaaaggatttggcnnnnnnnnnnnnnncctatctcagagcccccaaaatgtcgtgtagtaccaatgacagaaactctattgaagggattctcaaagtgggttatcactccttcatagcaaagtggcaagcatgatttgaaaaaacattgctttcccgggttcaaatgacttctggaggcatgcacctccctgctgcctctcttcggaatcagtgctctg

SEQ ID NO: 102601 - DNA, 504 bp, Homo Sapiens
ctggcactgatctcccccacactaggtgcagcccactccctaccatccctttggctccacaccctttacagtaacaatggcagcttagtcaaacagagaactgaggtttggtagagcaccaagtttcattgtttttgtcaggccagattttggatgtgaaagagttatcagactaagagaaaacaaaggatagtgacagttcagagtagctggagttgcttacactatataacagctaagagttgtttatctaccactttagcattttggtgatacatataaaaatccttagctcctatgtatttccttcacatttatcaacatctataatgtcctccctttcagtggcgtatcatgtcaggtttgcttcaaataaagaaatgtgatcataatgaatattttcactgtgatgtatttaatggagaggctaggtggtggttttgatagttcaattcaaggctaatcagggggtctgcaatgctagtaaccttcatcctaacctgg

SEQ ID NO: 102602 - DNA, 497 bp, Homo Sapiens
taattgctttctttcctgcctggggttttcaaggttccccccggctttgggtaagggagctctctcagggcttgatggctttacctttgtcgtgtgcttcttgcccagtgtccccacacaacgttgcgcttctccgtggctgcatttagactttaccgtaaatgtgagtttcactgctcacacattgccccccatattatcttccccagagagcaggaggcacccagtattcccacctccttacaacagtgccttgcacagaacaggccctgcgcggatgaaacttagcaaggagagagattcttcctgttgtatcaatataagaaacgggttccaggcctgcctgaatgagttccatacacaatgcattaatataattgttcatagttcctttcaacggcctcttaacaagttcccaaaatgagtattatcagtataatttaaaaagttaacacaaggaggagagatggctgacaataaaatagttatgtacttga

SEQ ID NO: 102603 - DNA, 232 bp, Homo Sapiens
cctaaataacattaactctacaaaaacagagtcacttaaacagccaatagtgtgtaaccacaagttttagcaacaaaaaccaagggctccccagagaaccggaagcacgtgtttcagtataatgctttccagctattcctggaaagttggcaccctgggccattcacaaactttttttgagtgcccacctgtcgggagcagggacgtggccctcctaggcaccgggcacata

SEQ ID NO: 102604 - DNA, 406 bp, Homo Sapiens
gggcaggaaaggagacaaggaggccagtatggacactgtgtccagtatggctttccaggctaatcacttagggcagagacccagccttattcatctctacttcctgatgtccatagtggtgtgtcatgaatttttattgaatgaacaaatgaggtgtatgaggagagatggttttctcctgctcagctcttacacagtgataggtttgttccatgggacttatcataggcctggtgattcttgaaagagcatttttcatgactcaaaaatgagctgagaaggagtgttatggccaggtgcggcgtcatgcacctatagtcccagctgctcaggaggctaaggcagaaagaccattcaagcccaggagttccagcctgaagtatgctgtgatcatgcctgtgaataa

SEQ ID NO: 102605 - DNA, 481 bp, Homo Sapiens
tagatggaggacttagggggtaactgcactgatttttggctgcatggagtcctctgtcctgtgctatggacacctgcatgttggggctggggcccacaaagagatatgtctaaggacactggcttctttccactgccactgccaagatgagcagcggattttccaagagtgatctggcagttgtaagttgtatataaaaatgtcccaaggaaaatcatgtgtctgttttaaagagaagggagttttctaggaaacctttgacctggacattcttctctattctgagaactgtaccctgtgcccccaagatgtgatctgtactttgttgcccctctgcttttgtgcccatcatcttcttcctctatttctcctccctgatgtgtgcagccctccctttcagccagtagggaaagggaaacctgcagggtccggcagggtcccctgttcctccccaacaaagcctcttaggttttctttggct

SEQ ID NO: 102606 - DNA, 527 bp, Homo Sapiens
  misc_feature (371)..(371): n is a, c, g, or t
  misc_feature (392)..(392): n is a, c, g, or t
  misc_feature (406)..(406): n is a, c, g, or t
gtgtttctcactctctctctccctgggaagtgttgcttgataaagatgcagcttttaattaatgtaactgttcaagattacagccggtcatcagctttctaaccagtgcctcacagctctgctggaagagccttgctccggtgatggttgatttgccattctctgtcccagcccagagaagctcccctcactgtcaacgtgccatctgtcaggtgcatgttataaagctgtcatcatgatcagctcattcacgcaccagctttagctttgaggaactgccggccatggcgttgaagacctgctgaagcctccagccagacatctgatgttcaggtctcagggggtccttgctgcttgtgtagcctgacagngtgtggccacggcaggcacanccatggtttggagntttggaaaagaagagaccctgtgttattgtagagtgaccactggattgggcttctggaaatccaattctaatcagacttgggttatgcatttactatttcaataaaacatttatggatgga

SEQ ID NO: 102607 - DNA, 830 bp, Homo Sapiens
  misc_feature (555)..(618): n is a, c, g, or t
aagaaaaataaactccagagaggtgaagtaacagaaccagtctcataattgcaagagaacctgaagcactgaggtttcctgacacttagtccagaacactttctccctactacacatcagcctctttttgatgatagtggagatgttctctgtacaaaatagtttagaagaaatgttgtacattttccctttgaatatacatgatgagagatgatagtccaatagctgggtggcattgtgagcttctaggacctcccagaagctgaggatctgtatccctgccatgggctgcatctccagctggttttctgcccactcacagcctgcaagtgtgcagatggtaaggatatcatcatttccaccatggggggtgggggagagtagggggagaaaagacactgtttcatttaagtatatttcaaattccttggtgtttgtcatgttaacatgctctcacatttgcagacattaaccaacaactaggaggaaaaaaattcttgtcttaagcgcagacatagagaaatggcatctaagaaaaggtctgtcatttaaggnnnnnnnnnnnnnnnnnnnnnnnnnnnnnnnnnnnnnnnnnnnnnnnnnnnnnnnnnnnnnnnnttataaacaggcgagatagaaggaatggaagactcagtgacagggctcaatcctatactgtttttataattaaatagtgccttgcacatcagcccagtgttcactctttgatgtaattgcctgctcatcaacatatgcaaaattacaattgcacagtgtgagtgctcaaaggaagatgttaatattgctgtaatgagcctgtcaatcttgtg

SEQ ID NO: 102608 - DNA, 515 bp, Homo Sapiens
actattgatccataaggcaactgggatgaattgcaacattgttacactgaactcaggaagccaggctcagaaggttacatacttagactcctagtcagcattaaaaaggaaaaaactacgttgcaattgagccacctggaggaacacccagaaaactatgctgagtgggagaaagccagtccccagaggtcacatactgtatgattccatgtgcagaacattcttgaaataacaaaattatacaagtggagaccaaattagtagttgccaggggctaaggaggggtttgggacagtgggaagtgagtgttcctgtgaaagggcaacatgagggatgtttgggagggaagcattcccttcttgctgtatcaatgtcagtatcctggctctgatccattactgtagctgcaaggtcctacccttgagggaactggccagagtacctaggattcctctgtattattcctcacagctgcatgagaagctacaataatctcaaaataaaaagtttaattt

SEQ ID NO: 102609 - DNA, 518 bp, Homo Sapiens
  misc_feature (33)..(33): n is a, c, g, or t
  misc_feature (154)..(154): n is a, c, g, or t
aattatctacagactcaatgcaatacctatcanaatgtcagctgacttagttgcagaaattgacaagctgatcctaaaatcacagaaaaactcaagagacagagaataaccaaaacaatattgaaaaagaacaaagtaagaggactcacacttntcctaatttcaaaaccaaacaacaggtaatcatgatagtgtggtactggcataaagacagacatatagatcaacagaatagaattgagaatccagaaataaaccctcacattcatgggcaagtgattttcaacaaagatgccaagacaattcaactgaagtataagaatactcttttcaacaaatggcactgggacaatggataaaataatgaagttggactccctacctcatatcatatacaaaagttaaccaaaaatggaccatagacctaaacataagaagtaaaactacaaaactcttaaaagacaggagtaactctttatgaccttggatttggcaataaaatctcagatatgacacca

SEQ ID NO: 102610 - DNA, 553 bp, Homo Sapiens
caaactttctgaatcattcatttctctcatctagagctggtgggagattgagaggtgaatgggacatccaagatccctaaaaagaattgttcgatagcgtgcatgtgttataaagtggtgacacgggcatccctgttgaaatgatggatggctcactgccataggctgatagcagttgtcataaagatattttgggggaatttgaaaaggacgtaaagaaaaatctttcatattggcttgttggttatataacttcaaatttaataaaggaatacttacgtagtaattacatttccttgaaaaaactatagtgaatagaaatccctagccatttcattttttatgtttttaatgaagatctttaaaataccataggtggtaatcgtggaaaatttgaaaaatctcatgtcagtgtattaagatggtggagaagtttttttctccattatttaatggaactttgggtctttttattaaaaatgtgagactcatgaaattttggcagctgaatatttgtgaaataagaatgaattattaaaagatgtatttccat

SEQ ID NO: 102611 - DNA, 433 bp, Homo Sapiens
  misc_feature (206)..(206): n is a, c, g, or t
cgaagacctcattccgggccagggaacggaatatccctgatgggattttatgtgaggggtctgagagccgcagggccaccggggtcacagatcaggcctgctcaccagccctctgcactcacctagtcctggctcatcatgagtccaggcaccgcccggcagtgatgatcaccttattactgaattccactctcgctgaagaaccncccacatttcatcaccacccgaccttccagcgggcctggtgagacgtttcctcctgcagcctgaacttggtggagatggggcagctcccaggcctgtggtcagaggttgggtggggagagtagggacagtgtggccagggcaaatgggccctgagctgtgctttggtcacttggctggaggaaaatgccaaggggctggtgggagtatttttgggaggtgtcaaaaa

SEQ ID NO: 102612 - DNA, 445 bp, Homo Sapiens
gggaccccatggagggacttgcagttttcctggaacctagagtttttggaatactgtgcaggcatcactccagaatcactggacctgtacaacatgctgattccctgatgcacaggcgatccaggcttcattcccagatttgatgagagcaccagcctcaagccttgttctgtgcccacaaggaaatgaaagtaaaaattgatagcaaactttcttttaactaaaccatagttctttaaagcccagaatcaggcttgtttcttggttttggtagctgtaaatgagcaatttatgctttttgttgttattgtcattcactggttcattcttttcttcaaaaaggttttatttaaatttgtgtaattgtgaaaatagcacacttgttaaagtattttgaaaataaggaaaagcagaataaaaatgtacccagtgccactatttacaa

SEQ ID NO: 102613 - DNA, 394 bp, Homo Sapiens
catgagaaagggtgtgtgttaacaggaatatggatattaacagaaacaagtgcctcacatacagttccttttttgctttctgtacactgctatctgctgctttgttggctgcgctctggatcactcgctgctcagactgcctaacacaaggacaaaactttgaagtaaaaaatgtgtcttttggtatatggaattgtcattaacatttgcctctctgcttgcagaagaagcacataacaacctgggaatcttttgtttttctctttcttttattaaactaagtcttgtttgtttaaatcagaaacaaattctcaagtaacaagaaccctttcccttttttctgcatcagcagtgaaaggggtggtgtctttgggattttatttaaagcatgaaa

SEQ ID NO: 102614 - DNA, 517 bp, Homo Sapiens
acaaggtaaatgaagtcagggtcacagaagggcttctcacccaaccctctcacttcacaagtggggaaaccggcccagagagggcaagtaaacaaacagcgtaaggagtttgtggttgtggaaggttgtgaaatggcccctcaaaagatattcccattctaatacctggaacttgtcagtgttaccattctgatgttgggaagattatcctgcggtatctaggtgggctgtaaatacagtcacatgcatcgttataatcagacgacaaagagagatctgaaaacacacagaggaggccccagtgtggagaccagtagagggaggcttgagaacacgggccttgaacatcggagttggtgtggccatagccaccggaccctggaagaggcgcgtaacagattctccccgccagcccctgagtgagtgcagctctgccaactcttgatgttggcccagggaaactgttttcagacttctggcccccacaactgcgagagaataaattacgttgttttaa

SEQ ID NO: 102615 - DNA, 358 bp, Homo Sapiens
  misc_feature (143)..(180): n is a, c, g, or t
cgccgttttacagagaaccatgacagagcatccctgctattaggaagggactgttcttcggggtgcaaggccataaggtgtttcacagcacacttgattatgtaaaggcttggtgtaaatacagcccctcaccttcgccaagnnnnnnnnnnnnnnnnnnnnnnnnnnnnnnnnnnnnnncccgcaaagaaactatccaaatgcattaagacacctgttcgtgtgcttttcttcttgcttttgttaagtgaatcccatccgtttaagttagactaattagaaggcctgcttgcctccatcagcaacagaaaaacagtgcatacgactcctccaatgtgtgtaaaatgcatgctaggta

SEQ ID NO: 102616 - DNA, 255 bp, Homo Sapiens
gtgattgaaaagcctatactacaatttgaagtaaatttttgtttttcttagtaagtgtaaatggttgctttatttttattttaaaaaggtatgtctttggtttggcagaattcatgcagggctatcaagtggtgttctagggtaacagtgtccataattaacgcttagtcatagagtcaaaaacatttaagactgattgggttgaagtttataataaattatattaacatgtcttcctttttgaggtaaaaataa

SEQ ID NO: 102617 - DNA, 760 bp, Homo Sapiens
gtattgagcacaacatattcaagaaccgaaagaaagctagttcgactggactgcaaaaaacaagaggaaaattagggaaagttgaagttggaggggtaagtgggacctgtatcacactggaccccgcaggccacattaaggataaggagtgatacccaagagagtataagggcccatcaggcctcgactctgctaagatcatgttgtcaacacttctttatggaaagaatgatctctttgaggataatgcattgcaaaatgaaaaatctctcatgttcatgtttatggacaacctccttttttggcttcactaaatatttgcttagaaaacaaaatcaaatttctttgcattgatttaagcctaaacctgaagcaaattgtagttagggactatatacaggactatatgtcatcctagccattccatctttataccattagaggacttagaagcactaaagtcgaaggctctgccattcctattttcttgtgttaaggatttacaggatgacattcagaatcgtgccacctcatttgccactgttgtcaaggacattgaggggttcatggaagagaatcagaccaagctgagcccacgtgagttgacagctcttcgggaaaagcttcatcaggctaaggagcaatatgaggcgctccaggaagagacacgtgtggcccagaaggaactggaggaagcagtgacctccgccttacagcaggagactgaaaaggtaatagactgctatgacgcttgatattt

SEQ ID NO: 102618 - DNA, 296 bp, Homo Sapiens
gctcagctctgtgctttctgacatctctatttgcattcagcctatccacagaggtatgcattccaatttttttccttccatatatttaggagcttgttcctgtggggaaggcctattgttgtctatcatgcttgtgactaggtgtgtacattgtttagttaagaggaacatattagaaacttcattataatcatgcatcctgtgttttccaatatctgttcaataataaaaataatgtttgatttccatgtaagtgacttttatgtctattctcaattggctctgaaatcatgaaa

SEQ ID NO: 102619 - DNA, 397 bp, Homo Sapiens
gtttatgcaatttcaaacattgtaagaaatagtcactcatgtgattggtttgtgtgcttggtgtagactgtacgaggatttttcaaaagtaagtattgttcattctaaaggaaggaaatgtatgttatgagatagaattatataataaacagaaccattaaatgccatctgaaaagtggtgttttcaatggcaggaagtagcattgctgcgtattttgtgtgtgtgcgcaactcagctttgtgtcattgtgtaactttaatttgaaagaacatcacgtgactgctgttttcatttctgccttttaaaaagcagacagctattcagaacagcaagaagcagacccaaattttgtttgtatgcccctagtcataggcaaaaatggaaagggaaatttac

SEQ ID NO: 102620 - DNA, 563 bp, Homo Sapiens
ctctgtgagccccctccctgagctccactttcccttatgtttttatctgaaatgtcatggtatacaccaccaatttcagggtgtagtgttccctagttccattttctggtactcagtaaattttaggaatgagaggcttaagctcattaataactcacacaggtaaatgtgtgtgagtatgtcatgtgggcttttaagaatgtggagagggtgggataatgtcctatagtcatggaacttgccaactagctcccaaggaagaacacacacacttaagacactgaggagaaggacagtgctaactgtgcatccctggctgtgagcccttttgttgcccagagataatggagggtcagagtagtcagaaaatccttggaggtggcatctcagagaaaaaataatataaaataaataaacactgggacttagggagtattaagctgagggcccttcacagtaactacaaaagaatgacttggggatttacttgtccaaaagtatacacaagactggagacgtaatttgtgggacatagtactaaatgaacacatagagtcacttgt

SEQ ID NO: 102621 - DNA, 450 bp, Homo Sapiens
gtaaatcatagcagctgggagaaagtagtgtggtatcctgcagtggttctgttcaccaccacatgggcagagcatgagcaactttcctttcctgggccctcgttctgctcagatacaaagtgaaggcttacttgggctcctgtgcaactttaaaagtgaaacttaactgaaattgggcaggtgggctgcacttcttctaaaaagtaagaggcccactttttagaaaatattaaaccttggattacacctcagtttggcagttacatgacacattatttctaaagagccatctaattttatgccatctaatgtttatattgataactgatgaaaatacaggagcttattatgccactgaaactacgatgaagtggctcaaatttattctctcactgtaggttggatttgaggggataaggataagagagaaaatactattggtgctcaggt

SEQ ID NO: 102622 - DNA, 582 bp, Homo Sapiens
cctccttcccttccacacttccttcctgggtagctctgcctgaagcattccactaagatcatctattccaaggtcatggacaggctactggtgaccaaagttggttccttttctcctttctttcctccttgaagcctggctcccttggtcgcagcagcccctcagtggcctggttctcctgtccccctgcccttcctcaccattgcccattccctcgttcgttcattcagcacaggccttgccgtctgccctgagtcagctccgagacacctgaagagccctccagccctaactactttactcagactaggtccccaggcctttgttcttgcctcttctcgctgagcctttcacttctcggcagatgtgaccgattggtagctccaccccacactcccttcctgctgggctggaatgctaggacgctagctagcctccaatctcactcgtgacctcatgaaaaactgcctcttattcactcgcggcgctcatgtttctctcgtcttttaatgtaacggggctctggatagagatgactctcaggatccctttcccaataataaaaattaatgagatctgcct

SEQ ID NO: 102623 - DNA, 663 bp, Homo Sapiens
  misc_feature (93)..(93): n is a, c, g, or t
  misc_feature (135)..(143): n is a, c, g, or t
  misc_feature (278)..(278): n is a, c, g, or t
cttggggggccaaaaacccccccatattaaaacccaggcccttccctttttattatccgaggtcctaagaaaaataactctttccccacccanggccaatcaaaaattcttggaatctgcaatattccggaatgnnnnnnnnntattcaaggggccccccctttatagatgaaacccaaggacatcttaacatgtatgatgatgtctaatgtctccctagaatgggtaaaaccaagccagtacctggggccaccaaggtacctggggccagtacctgngccaccttgggcacatgttctcaggatctcccgggcctatgtcacagcccaatggtcactcatattggggtcagaataaatctcttgaagtatttcacagagtttaactctttttgtcaacataatatttaacaaacataaagtttgttaaataaataagtcattttggaaagaggtcccaaataagaaactaacagcatggtagaattcacattcatatgaatataaaaatgtacatattatcgttaatgatatcatgctgaattcatgtctgattcataattttgtatgaaaaggactcatgtttgacttattcaccactgtatcccaacatgtagcaaagccttacgcacagcagttaataaatatttcttgaatgtaaaaa

SEQ ID NO: 102624 - DNA, 517 bp, Homo Sapiens
  misc_feature (88)..(89): n is a, c, g, or t
  misc_feature (115)..(115): n is a, c, g, or t
cagcatctggagtacttgttcacctggatcagcaacctaggaccacacccattccctggacatagatccgttgccagagaggaccttnntggtccacaccagacagatctcaggncatctggagcatcagctaacctggatcagcagcctgagccaacccaacccctcctatgcagagatcttaatgcaaggagaccctctctgccccaggctcaggcatatctccagacacctggagtacctatttccctagattagaagtgtaggccatcccctgaatctggagtggggaggttgcaatgaccagcaacttatttaaaaatgtgttgtttttttctccaatatttggattatttccatatatctttgtgttattgatttctgatttaattccatcatgttaagagattataatttgtatgattgaatacattcagtcttaaaatttatggtatatattggtgcttgttttatgtacaagatatgatacatttcagtaaatgtttcacatgcactt

SEQ ID NO: 102625 - DNA, 412 bp, Homo Sapiens
gagacaaatctcctgtgatctatgcaggacctctgtactttctaaagaacaaaatgttatgtagacattatacatggttggttgtctcttcttgaaactgtaatgtaaatctagggtccagtcatatcctaggtatcatcatttatccaagtacttggaggaatacaagtatatataaatacagtcattgagaataagtcgatttgaggcatacaagagtagtttcttacacagtttaacacagcctgattcaagactctgataggattcaaacagataccggttaaccatgactaccaaaactgatcatctgagtcgattgatagaaagggtgactagtccttagcactttttctcattcctctttttattcagcaattgtgttacctaattcaggttataagacctcttt

SEQ ID NO: 102626 - DNA, 307 bp, Homo Sapiens
gtgcacccactcctctctcacccttggccaaaatcaaacaaaacttactgctccttctaaaatctagaaagaatactgcctatttttgtattttgtatatgcttaaggaaggaagagtctggaagtttcttcattggcttcttacattccaactttgctagtcacaaggcctttgtaaaagagactgtggaaactacttgtttgcaagacatttcccaaatttactgtgcttggcctgtgacacttaatttcatggaatgggattcataaagatgatcttaaccatacattccttaagaatttatcg

SEQ ID NO: 102627 - DNA, 455 bp, Homo Sapiens
  misc_feature (159)..(174): n is a, c, g, or t
aagcacaaggtttaaaattaagtgtgttgtacagtaaggtttggctaattggggagccaaaatacttaatttggcttaggacaaaataaactggccaattaatcaacagtaaaaggagacagtgactgacttgaacaaaaaaacagttgtttagttggnnnnnnnnnnnnnnnngggtggaggtatacacattggaaaaggtattccggaacacctggatcaaaatgacctttgctaggtcaactccagaaattgatcaatcatatctgacctggtacacataaattccagatctccttcttagatgaaagctaaaaccagagttatcctatagccagaatgtgggtaagacactaaaagatggtcagtatacatttagaaactccacactgtaagaaaattacacaggcacatggaagaataagcaagatcttggtcttgtttaaaaaagaaaa

SEQ ID NO: 102628 - DNA, 660 bp, Homo Sapiens
cactaactgtatttctgctttaaaaaaaggcttattcaggatagataagcatgtactccttttttaacttgctggaagacttgcccctccaaactagcacccccaaaagacaacttctttcagaaacggggtgttttacctaaacatagtagcttacatgttagccagcagtaggtcggcactagtgttttccacggttatcacctttgacaggtgatgtgcatctatagatagtggaagccaccccatgaggaggtgttaatagcagcatggtttcacttttggtaatcaggtaatcatgtgtatatacttagattcgcattattttaacatttctctgctactctgcacttcaggttcgttaagctattttaataattactggggttatggcaaacaccaatggaaatgtatatggcaactgctttcctgagcaagtgtgatttgttttatggctgttcaagttataaaattgttcttacattgtaggtaaacaaaatcttgatgtttttaaaggtcactgtaacttaaggttcaaatttctggcacagttttattagtattcacttcggaagctaataagataccatggttttctatgttactcccattgtaacattagtaaagtgactttcaataaaagatttatgttattttgaa

SEQ ID NO: 102629 - DNA, 652 bp, Homo Sapiens
  misc_feature (82)..(82): n is a, c, g, or t
atggcccaatatagctttgacagtttgaaatcggctcgagatgttgtatctaggactggtcattcattggctcttggttgtntgcatcgttatgttggtggaataggctcaggacaacatctgaagaccagtgtcagcattttattggctctagcacaagatgggacatcccttgaagtccagacttggtctcttcattcacttgctttgatagtggattctagtggtccgatgtatcgtggctatgtggaaccaacattatctctagttcttaccttgctgttgacagttccgccttcacatacagaagttcatcagtgtttgggtcgatgcttgggtgctataataactactgttggccctgaactacaagggaatggagcaacaacttctacaattcgttcctcttgtttggtgggttgtgcaataacacaagaccattcagattctcttgttcaggcagctgccatatcttgccttcagcagcttcacatgtttgcaccacgacatgtcaatctatctagccttgttcctagcctttgtgttcacttatgtagttcccatttgttacttcgacgagcagctgtggcatgtcttcggcaacttgcacaaagagaagcagcggaagtatgtgaatatgccatgagcctgg

SEQ ID NO: 102630 - DNA, 554 bp, Homo Sapiens
  misc_feature (472)..(480): n is a, c, g, or t
  misc_feature (520)..(520): n is a, c, g, or t
acatcgagaatgcatgggttagtgaactagaaggctcattatagggctgaattctaatagccatccggacattcacatgtttcttttaaaattacacaaaaagattagtctgtgagattgggatacaggcgtcaccgaggttaatgtgtttccagagaacaacccctgaccttaacttgaccctgtcttggctgcttcaggggcgcaggccttagctgtgctggccttctcatttggcacctgagactgaggtaacaggagaagaaatacagagtgatcaagccttaaagcattactgctgacagcagggttcctactcttctgaaactctgtgcaataacggactttgctgcttaatcacagaacattttgggtctgtgattttgttttccttggccttacacataactaggttctataacttaaaatgcacacggatctcaccattagtaatttggtaaggcaaaggggnnnnnnnnnagccatccgaattctgtaaaccaacttttttagtacattnttaaaatactagctccatccaaattgattaaatg

SEQ ID NO: 102631 - DNA, 706 bp, Homo Sapiens
  misc_feature (103)..(103): n is a, c, g, or t
ttctgattccatatgaattctaattctttttcactacatatgttttaaagagttacatacagtgatttataatggtttacagttaatgctgatcttgtctttnaaattccaacactttgtgtcactacctcctctaatggttagtatgatatgctagcagactgtatgaggtctttttttaaaataccacttttagtgtcagtgaaccaaattctggaatgtcttaacagctctaaatcttacttgtcttgaaaatgattggggtttaataccactgctggtggttcacacatcatcccatccttaatatgcctgacaggcatctgagcaaaggtttttagtaattgaatttctctgcagtagtccttcaagcacttgaatgtaaacctttagcatttattcgtttaatgactactgatacgaatctcaagcagatttcttgctcttaaaagttatgtttcactgagttctggttttgtgtagctatattttatatagctagatattcctcacagtgaacatgaattgtaataattggttatttccttaagtctttagattataataatttcagattattgcacgtctgtgatttgagaggtgagttatttaagaggccagttttcaggacatgggaatttgaattgtaaacctgttatctctgtgaaacttttaacatgataaaatataacctttctttgtgctt

SEQ ID NO: 102632 - DNA, 545 bp, Homo Sapiens
cacaacaatagaaacttacacatggcaaatggctatgcagtacagctcccgatatctggtccactaaattgacctttgagcttagtgtgggaatttcttgcctcctttctatcacttctgagaacaaattctataagcagaaatgcctggaattattgtctggggtcgaggtgttttgtttcaatataagctggccagtctggaaccaaaagaacgaatgtttaacttgtataatcttcttgcagggaaacaggcaagtgtttttgcaagcataaaaggcacaaagtggagtttatttttggtcagagagatgaagaagtaaatcacaaggcaaaatttgttgtttgtttgaagaggggagcagtattaacaagcaaataaaatgccttctatgatttccacagttacaattatagatcctaatcttgcaaatacatgtcaccaaatgcacaacattttgggaatgatggtaaaattgtatgactgaaaaaatcataaatatttaagctatattgttttattaataaattgggtacttacagaat

SEQ ID NO: 102633 - DNA, 718 bp, Homo Sapiens
tcccaccaccgtcatgatggaggaattacgttatacattcatattttgtattgatttttgattatgaaaatcaaaaattttcacatttgattatgaaaatctccaaacatatgcacaagcagagatcatggtataataaatccctttgcaactccactcagccctgacaacccatccacacacggccaggcctgtttatctacactgctgcccactcctctctccagctccacatgctgtacctggatcattctgaagcaaattccgagcattacatcattttgtccataaatatttctaacatccttaaatatacaatcggaattcaagcatctcccattgtcccacaaatgtttggctgtttttgtagttggattgtttgtattaggattcaagcaaggcccatatattgcatttatttgaaatgtctgtaagtctctttccatctacagagtttagcacatttgaacgttgctggttgaaatcccgaggtgtcatttgacatggttctctgaacttatctttcctataaaatggtagttagatctggaggtctgattttgtggcaaaaatacttcctaggtggtgctgggtacttcttgttgcatcctgtcaggaggcagataatgctggtgcctctctattggtaatgttaagactgctgggtgggtttggagttcttggctttaatcattcattacaaagttcagcattttaa

SEQ ID NO: 102634 - DNA, 461 bp, Homo Sapiens
cctttcaaagaaaggtctagccctcaacttgctcctgggagatcacagcgctaagcccctggaatatcctgcctgatgcaaggcctttgtttacctggggccttggatcacaccagatagtttatgctacagatttatggtgagggcattgccccttgcagtatcaatttaatcgccgggggaggtggaaactgaataacatctgccatttctgttctccatgcctatgtgactaacacccaataaaaaccttggacaccaagtctcagcttccctggttgataatatttcataaatgacccccactcattcaaaaaggattaagtgctgggcatgcatctcctgtcaaatgggacaactggaagcctgtcctgctctcttttgaactctttcctatctgccttttaaaactgtactgattttaaactgtacttttgctctaataaactaattgtcaacgt

SEQ ID NO: 102635 - DNA, 268 bp, Homo Sapiens
ttacttcttttctttatatttttattgttcttcctgcccaatgtcttcctatggttccagcatatattcctagaggttacctaatgtgtaacattaaattatttctttatcatttactttataatgttccctcacaggtaatttcaggcattttgatgataataatagtgagacccacaagagataactcttgtgcgtataagtggtctcttatattccataaaaggatacaaatattgaaaaggaaattaaaaaaccatggattttt

SEQ ID NO: 102636 - DNA, 534 bp, Homo Sapiens
  misc_feature (506)..(506): n is a, c, g, or t
tttactttataggcaaaaggcaattgtccttccaaaaagtaagagtttaatatactgagatcaaatcactgatatttccatggtatctgctaacacgtataaaatatgatgttgaagagggaacttcctaattaataatatgtctgatatacttgtgtactcctccacctgcctccaaattgccttccactaaaacaaaccattaaaaacttcccattcaatgtatacttttgtggaaatgaaataatcaattcaatatctacttttctagatctcccgtcctcactgacatgcacaatataaatgagtttttactgttagaactttgagcaccaattcatattctcataaaagaatgtccatctactaataagagctcttactattcacatttttaacaacaataaacacaaaccctctttgggttactatcaataataaagacgtgcattgtggtaaaatttccctagttcacaacagatattttcttcttgaacatctgattntcagaagaacaatcctgtcctgaattct

SEQ ID NO: 102637 - DNA, 461 bp, Homo Sapiens
tttctggttgcctttgattgacttctgaccttaagcatgaacagaaatgtgtgctaaaaagcctggtctttccagtgaagagtcaatcagtttgccaaatgcttactccataattttaatctaataacattttactaataacattttatgaacaagaacttactttcacatccagacaatatttttagaataaagctcattgcaccttataatgtgctttatttaatgtcatcttctaccatgtgcaagaagtttgggggagtatgggctagtagagatgtttacaaaggtcttgattgaaagacccacagggctttgttaattggttttaaagatacttacaatttctctgcaaatacatagaacaaagacaataaaacgttatttagtaagatataagtcctattgaatcagttggtacccactttcatttatagacccttcagagctgaaagggatgg

SEQ ID NO: 102638 - DNA, 457 bp, Homo Sapiens
cccgatgttgaccaattctgtcctaagggttacatgctccccgcaccccactccccatcagctatgtcagccgtggccactggcaccacactgataagggaaagggaacacccttggcagtatgtgacctcagtccttttccctctctgccaatacagagtgtcattgatacattagtgacaaaagggctacttaagacaggaggcataatgtgagatgccagaaagagctgagacatggaaaactgggacacagtggcacctctagctgacttttaaaaaataaatcattaatcaagaaccaaaccagaactgaagtgacagcactccttcctgtctcctcctgcccttgctcacagcacacatgacattactgctgtgacacctgtccctctgcctggtgtttattactgaggaagcccatagtagatccacagcttaggaaaagctacttgatc

SEQ ID NO: 102639 - DNA, 681 bp, Homo Sapiens
  misc_feature (27)..(27): n is a, c, g, or t
aaaggaaagttctgaaagaaaatttanagtgctactccagtgaacatataaatgatatgaaagtgaaacagctttctggctgatgcggagaaagtttttgtgatctggatagatgaaaccagccacaacattcccttaagcaaaagcctaacctcccttcagttctgtgaaggctgagagaggtgaggaagctacagaagaaacgtttgaagctagcagaagttgcttcatgaagtttaaggaaagaagctgtctttccattccattaaagtgcaaggtgaagcaggaagtgctgatggagaaggtacagcaagttacccagaagatctagctaagatcattgatgaagatggttacactaaacaacagattttcagtgtagatgaaactgccttctattgaaagaagatgccaccaaggactttcatagctagagaagagaagtcaatgcctggcttctaaagctgcaaaggacaagttaactctccctttagggctaattcagctggtgatggtaagcagaagctcatttaccattctaaaaatcctagggcccttaagaattatgctgaatctactctgcctgtgctctataaacggaaaaacaaagcctggatgacagcatatctgtttatagctcagtttactcaatactttaagcccactgttgaaacctgctca

SEQ ID NO: 102640 - DNA, 665 bp, Homo Sapiens
  misc_feature (430)..(445): n is a, c, g, or t
acctttgggctgtcgtgcgggctggctgaaacggttggacaggcccaggtgtatgctgtggaaattctggagggcctgggaatctctggggtcccacggcaggtctcggctggctcggaactggtagcaagggcacttgaacaggcgtgaccaccgtccctttgaagtgcgggttgatgtgtatgttcttgggctgctgtggagtcacgggtggcggggtcatcatcatccttggggtctctagctggggaggcatgtgcattccctgaggcggggatgggtggtgcgggtgctgcaccggaagcagcggctgcagcggctgcggctggaacaggcttctgatcggctgctgctgaggcggcggaggcggtggagggggagcctggggctgtggaggaattaaccttggagaatgagtctacaaatcacnnnnnnnnnnnnnnnngttccccgaaatcaacatttaaaagaatgctgatgtgttacaaatttacactgattgcattttttaagttacaatgtaagaagtctgtagtaacaacttgtatcaaaacagcaggataaagaagcttctctacttcttcacaatgagggctacagtctcacaattgagtcaatccccacgcaagagggaaaacagccccaaagcacccagtgtgaatttt

SEQ ID NO: 102641 - DNA, 495 bp, Homo Sapiens
  misc_feature (188)..(200): n is a, c, g, or t
acctttcaagtttccatttattttgactgtacccgtctgaaagcagatttcatttacgctagcaagactggaagccacaaataaagaaaaagaaacggattcattgaatctcagtatctcagtagcgtttaatagattcccttggctaaattcagagccctgtttgaattcactcacgcaggagttgnnnnnnnnnnnnngttggtagaggtgccggtttcccatccccacggcttatttacaattatgggtgttgttatttttaaaggattcacaaggtgactaactctctgttatctgttgaatggaaggagtgttacatatgcaagaccgaatggggcaggccgagcccccgccctatgctattctacaatccagatgggattcgtgattagaaaataaaattggccaaagctgtctcggaatccttttcccacttctaatttcatcagcactattaatcagagctcaaaagagcaaggaaataacatcagt

SEQ ID NO: 102642 - DNA, 590 bp, Homo Sapiens
  misc_feature (248)..(256): n is a, c, g, or t
atgatttctaagtttcagcaatcagtcatagcaaccctttaactattatatactcaatacagagctaggtattctgtggaaagtatagttgaagaaatgacaacagtcctcaggtgcttgactgacttatgtgaaagtataaaagtattctttgtaattccagtaagcagaaatagctttgtttagggggttgggagggactaaatttacaaagaggcagaatctcagtctaagggagagcttttggnnnnnnnnntagattattgaaaaaattggatttcccctcactggctcttttctgatgtgttgcttctcacttagcaacagctatagtttcctgagctctctccttgattcttcaaggcaacaagacttcgggttttctattaaggtttagtcctgcatggcactgactggttttgccctcagaataaaagctgtcaaaatgggaaactcggtaccatttcttccaattatcacatcccctccagtatcttcctgcttttggttgctctccagtattttcagatagctgttttctatattgtccacagtaatgggttcacatgcttggtgtgagggaaaaaaaa

SEQ ID NO: 102643 - DNA, 640 bp, Homo Sapiens
  misc_feature (428)..(428): n is a, c, g, or t
gcggcagcgtggcaggagcgaggggcgccccgacccgtcccctctgccctccactacccctgccggctccagcccgtccgtgtctcaccgtctttatttaacaaagaacggagagactataaatgaccctgagcagagtggctgcgagcagggcccctggggcgtcccacgggcgtcatcctagccgcgtgagcgccgagcttgggcaccgggggggttggcgtgcttgtacacttgctccgttttctctaaactgccgcgatgaatgtcagtccccagagccggaaccgttcccggttttctctacttggatctgagaactctgtccctccagccctgcgagcgctttgccagggtgacgggcggaaatgtccccgcatccgtgcctgctttcccagatgggaccctccagcagtcccctccactgnccgtgtttcctcctaaccacttccccccagcgaccgcggaaggcgcttcctcccccgcagcgcgagccccaagctcctccagagccccagctctccccgcccccttcccgaccttgtttcatatgacccctcccccgcacatactcaatttcgtcttcccaaggcgcccactctccacatcctgatgaaaaaaagagccaactgctgtccta

SEQ ID NO: 102644 - DNA, 479 bp, Homo Sapiens
gggggtaatctgttgcacactgtatgcaaattaccccaaactaatagagataactaataaaggtatagaggtctatccccctcaccccaagttgaggtaactctgaaggaccactctagcctcagagttctctgcagggctggctgaagccttttgaccataacacagcccagcactcccaatgaacctcctgaatgcaaatctcagaatctgcctcctagaggacccaacctgtcatatatatacatacacatgaacttaaaactttaaaagaactgggatataatgaagtacaataattatcataaaccactgcatgtagtttaagctaaagcagctcaggatattatgtaacttttattatgaaattcaatataattgtgctgcaaaatgtgcactgtgctgcagaaatgtccaaggtggacaagagttacaaagatttctacaatcccagtatacttatgagtttattaaaagct

SEQ ID NO: 102645 - DNA, 521 bp, Homo Sapiens
ttcacaagtaaatgcaaatattaagttatctgtaagactgagctactgaatgtaattcagttactttggcaccataaaaggtgttgagggcaaaatttcctaaatggctatgatccaaacttttaaaacatcacataataatgtatttggagttgtttagattatttttagcaggaagttgcaagtccaagtttgtcctttcacttcaaggcaacatctttctagccacaaaattaatctcctctgtttgtgtacttgggcatgcacacacagggcagcaatctcaaaaagttcacagcaaatgcagaactgactgtgtacatgcacaggtgtgtgtttacacgtgcacatgagggtatggggtgggcgtgttttctaatggagtttgcaaacagattcggattaaccaaggctgaccatagttccatctggaaactatattttctaacatgagccacattctgaaaaacagattcagatgtctggaactggttcagaacagttgtaagaaacattcacta

SEQ ID NO: 102646 - DNA, 516 bp, Homo Sapiens
cttgtgaccttttccttgaatctcttataattctttctacctgtgttgcatggcagattctcagattgaggctaaagaaaagaagggtggggacaaagcatacagaatgtgtgtatctgtttttatgtgggtgttggctgtttttcgtcactgctttttaagctgaatcttagctggttttcttgaactttgactttaggtgtaaaaattcaaccagacattctctccttactgtggtcagctgacatcataaccactaaggcttaatgagcttaacttgcactttcatcactagcaaaggtcttgaagttatttctcttactgattcataatgggtgtgtgtatgaatcactctcacataatttagatataaaaacctatgaggatgagggagggaggggaagaaaaaaaaggactcctttcattttcatccgtacttcccagatgggctgaatctccgattatttgacccatcattgttattaatatggttaataaactacctatttattgatt

SEQ ID NO: 102647 - DNA, 917 bp, Homo Sapiens
cttctgcagatctgaagtgtaactttttcgacgatctttccattttgcaaggtcatcctgccatttctgatcttgttcttttaattgtgattttattttctgcatctcctcgtaacgcagctgacgcaagttttgaacatcttctgcgctgacatcactcatggacttactcccattctcaccataaatcttttgaaagagtcttgaaaatgttccatctgcttctgtataaaccgggcttgcccaacttcttctgttatcctcatgtttgtctggctttttctttctcagaggtgctggtacataggatggctgtctacttttgttgggtaaaaaacgattgaagggtaacgcagtctttggctcaacagccgaaatccttcgatacgacatatcatctttattataatcctgcatcttgaatgtaaattccgaatctgtgtcactttcaaaaccttcacgcccccctctcaacgtgatatcagaggagcagcttgtcaatgacctcgagcccaaagagtccaagctttcaaaggaatcttctctcttatggtgccttggaggagcaagaaattctccacgttcaggacaccagatgtcaccgtagccactgtccctgccacttcttttcaggaagctggagtcttcgagtgccttcgtcagtgcttgtcctaaaagattctcaaacgctttcaaattaagatggggaccattatagtacgggttgctttgtgcttttcttcccagccagtacaatgttatcaaaacatttttcactctcctgtcagtctcttcttgcttgacagtgactcgatttgataaatcctgtagatctccaggatggaaaagctgggcttctttcaacccaatctgttcacaagctttcaagaaaacgtttatattatcctctcctcttt

SEQ ID NO: 102648 - DNA, 412 bp, Homo Sapiens
  misc_feature (287)..(295): n is a, c, g, or t
aaaagtcttgcatacctagtgcacagtttggagacgcaaggatagatctgtttactctagttgaacattttctatacaattgaaagcaacctataatagataaatccatcattgcatttaaacaatgaatttccttattctcaaaggacaaatacgtctggattatgtggtaaattgctactcagctatggtgaaatatttatactattctaggcacaacactaggaactaggtgattctgaaacaaaaggaatattttctgttgttgctttaattaccaaggttannnnnnnnnaatctcaacactgacaaaatgaaaccaaatatctcttcctcaccatttctcaaggaggctgcctgttggaattgttttggaaattttgacatgatccctaaattcaacattgggatt

SEQ ID NO: 102649 - DNA, 622 bp, Homo Sapiens
atgggatgaagttgaaaagacccaggaaatccaacctaacctccagctgtctggcagagaggttcttggtcaggatccctctgaacacatggccctgttgcccctagcattcctactgccacccagcactgcctgctgtactcagctctaccgaaagccactctcagacaagctactgaggaaggtcatccaggtggaactgcaggaggctgacggggactgtcacctccaggctttcgtgtgagctcccacccctgatacccctgactctgacctcagtcccaacccctaatgctgatcccaaccccagccctaactgctaattctgttgccaactcaggttttcatctggtccttgctcctaacccctaattagggtcattggggatgaccctaatctcatccccaagctatggtcatagctttggacctttctctacccaggcttcacctggctcaacgcagcatctgcatccacccccagaaccccagcctgtcacagtggtttgagcaccaagagagaaagctccatgggactctgcccaagctgaattttgggatgctaaggaaaatgggctgaagcccccaatagccaaataataaagcagcattggataataaa

SEQ ID NO: 102650 - DNA, 468 bp, Homo Sapiens
ctgcgtatcctaggtgagtttgaggtccccacagagaatggaccaagtaatcattgtcaccaaagagggatccttcctggtggtaggtgcgatggataagtgaggggtaccagcaaccacctgtcataggctgacggcccagatgataagttccccactgtgaacttgcttttagtcagagaaaaatcagctctgtgaatctcctagggtctgcatatttaactaatttgggatgtttcctattaatgcctatttttcgaaatgcaaaaaaatacaagtaaaaatttacctgtaatgtcagcatccagctgtaaccactgttaatattcttggtgtgttccttacagacttttgtctattccagtgcatattgatatacatactcatgttcatttaaataaaatgggattagacaatgcttgatgttttatgatatattttctcataaaaatttaagctgtcttacaa

SEQ ID NO: 102651 - DNA, 556 bp, Homo Sapiens
ggttgcaggccaggaccgagttggactgttggtagaaacaagaattccacccacgcacctattccccctcccagcgcttcagacacctctctcatcgaaaaaccgggcgaagggaagccggcaacgagcggagaactctggctgaattaacggtggctcccagaagctcctgcccctctgacagctgtcgcttgggcagcccgagagaagaattgtcctctttcctggtgccagaggacgcaggaaattagccaggttgcgagttgcaaagctgctgccgcggcgccgggaacggagcgcgcccaatctccagcgggagccgccaggcctggcctggccggggcttcccttcgctcgccatctccggacaaagcacagccgagcccggctggaaggcagagctccgaagcaggcaggacggagcggagcaaaagaatgcggctctattctcgcaagggaaattataaaaaagttcatgttcacggttctcatccacatgaccgacagcggccaatggaagggccgaacaactcataaagttgtattgcaaagttgt

SEQ ID NO: 102652 - DNA, 366 bp, Homo Sapiens
gcggccgccgccgccccgcccggtcgcccctcccacacgcccggctcccccacagagacctcctccgccttcaggacgcagtcagccttcacctcaagcaggacttgcaggcccaggacctgctggatacagtacagccagaccgacgattcctcctcgtgctggagttatcagtgccccacagagccacgcgcgggcatctgctggaagactgactcctgaaagccaaagcaaaacatcagaaacgtcgaaaggttcaactttccttcctgaaccactgaagcctcaggctgcttttcctccgcagtcttctttgcccccgcctgctcaaaggttgcaagagcctcttgtccctgtggcagcacc

SEQ ID NO: 102653 - DNA, 528 bp, Homo Sapiens
agaacattctacatagtttgtcaaatccagcatttgacggtcctctgggtgacccggagaacaccaaggctgtgagaaatgggaggcctcctggcagctccactccccagacccgcctctgccagggctccaggctcagcaggcgcctgtgcgggacagggcgacggttcaagaccaagtccggctgttagaccagaccctccaatccaggcggcctccctgctggggtcctgtgcggtcaggagtcccagggcatcccagggtggctgtgcaaacccttgttcccaaagatatggggcttgtcccccagctagcctgcccatgcggtggccacagcctcgggtgagttccggttccaaagtaccggctctcccttacgatcaagtgttcgaatgtgcttgaagcattccagacacaccaaggcctggacctgacttcattgacgcctacttaggaaaaattgaggcagtctgccaagctttcagcaactgcttaaaaagctcaaaatggcaagtttttcctcgtgaa

SEQ ID NO: 102654 - DNA, 553 bp, Homo Sapiens
ggggtaaggaaatgaattaggcttcttcccaattattagggagctttcggtctttacagtctaatgggggtgaaggacaagtagacttatcaattataaagtgattaatggtatgtttagggttcctcaggaacatgaaggagaaacatctaattcagaatgcggaactgagaaaggctgcatcttgaaagatgatttgtagttagccggaagtgtgaagggagagggatatcacagagagaaggtgggaactgttattaatgttttatttctgaaggtggtaatgagttcttggaagttcattgtattatttgtatcactgtatatcagaagactttaataataagcattgaatcattaagccttagaggtgatttctgggtattgataacaaaatatgaaaggattttctattgtatagaaactagaggcaggggtactataaatgagaaataataatagatgagtgaaagtaagtttatatattacttgccttttcaggataagtttcatttgggggaaatagttttactatttttgaaattcggacata

SEQ ID NO: 102655 - DNA, 581 bp, Homo Sapiens
  misc_feature (100)..(225): n is a, c, g, or t
tacgtcgccagaagtctttctggagtgcctcttgccacatcaatgcagactcatgatcatcatgaagccagttccttattactcaccacattaaatcttnnnnnnnnnnnnnnnnnnnnnnnnnnnnnnnnnnnnnnnnnnnnnnnnnnnnnnnnnnnnnnnnnnnnnnnnnnnnnnnnnnnnnnnnnnnnnnnnnnnnnnnnnnnnnnnnnnnnnnnnnnnnnnccacatcaagtcataagctaaatcctgcatttctttcgtcatgatgtatgcatagcagttatataattaatcttaaaattaatctacataataacaacaatattaaggacaatattttccttgtaacttgatttactggaacacatatctttatccattagcctgaaaaatatccatttctgtatactacataggttactcacttaaatccaagatttgagccaaaatatacgtctaattaatcacattgtgttatagctggttataggaaactggttcccagacaaattcccatacatgatctgcttaagtaaggataacagattgactcaggaatcaaaagcaatccatttttt

SEQ ID NO: 102656 - DNA, 361 bp, Homo Sapiens
tgcctaatgcaaggcagtggctcagcagcaagaatgctggttctacatcccgaggagtgtctaaggtgcgccccactctgtacaaaggctgtttgggcagccttgcctccaaagagcagattccagcttcggaagcccctggtctaacttgggatttgggaatggaaggtgctcccatcggaggggaccctcaaagccctggagactgccaggtgggcctgctgccactgtaagccaaaaggtggggaagtcctgactccagggtccttgccccacccctgcctgccacctgggccctcacagcccagaccctcactgggaggtgagctcagctgccctttgaaataaagctgcctgatcc

SEQ ID NO: 102657 - DNA, 242 bp, Homo Sapiens
agcaagccattggtatctgaatgctaagatagcaagaaatttaaaactgtaacaaggtggactgctttcccatacagtgcatgccgggctcctctgtgctatcagcgtggggcgtttattgaaaaggggcaaatatacaaggggtttaagctccaaagacattagggaggccctgcggacttctgtttcccagaccaatagtaccttcaaaaggacacaatgtaacagggttagagcttaca

SEQ ID NO: 102658 - DNA, 507 bp, Homo Sapiens
ctgaagcagaaggctaccattgaggacttaagcatgtcaggcgttgaactaggtgccgtaaagttgtctatacatttaatccttagaacaaccatggaggcgggaggcagtgtagcagttcttatctccacttcacagatgaagaacaaataaataggcccagccttgcagctgagaaagtggcagtgtctgtgggactcaaagcctgttctcattctgatacgcctgaatgttctggttgaccttcttctaattgttgaggcgtgcttgtgtgggtgcttgttgtctctttccttaggatttgagcatttgttgccccttttgacccatcatagactattactttcccccttgtataacagtttgggctttatgaactgtttttcaagctgttttattctatgagctttataacagctctgtgggatagccatgcagtggtctccttttcaacatctcactgttccaggtcttatggtttgttggtcagagcccctgattgaaaag

SEQ ID NO: 102659 - DNA, 481 bp, Homo Sapiens
gaagccctaacaatggcccgcaggagtggagtgaaaaccttgttcaatccagcccctgccattgctgacctggatccccagttctacaccctctcagatgtgttctgctgcaatgaaagtgaggctgagattttaactggcctcacggtgggcagcgctgcagatgctggggaggctgcattagtgctcttgaaaaggggctgccaggtggtaatcattaccttaggggctgaaggatgtgtggtgctgtcacagacagaacctgagccaaagcacattcccacagagaaagtcaaggctgtggataccacgggtgctggtgacagctttgtgggagctctggccttctacctggcttactatccaaatctgtccttggaagacatgctcaacagatccaatttcattgcagcagtcagtgtccaggctgcaggaacacagtcatcttacccttacaaaaaagaccttccgcttactctgt

SEQ ID NO: 102660 - DNA, 450 bp, Homo Sapiens
gagtaattacatgaagtacaaacctctctgctagctcttcagtctacaaatcgctatgtaaataacagatatgcttcatgattgtgaccagtcatgttatttctttcaaattcttccagtggtttgtccctgtgcatctgttaattcagttcacgtacagcagagcatgtagttatgctgtctctctgtcatctacttgacattctatagaagtgaacactcgaaagaactggtcaacaaagatgaaagtgcagcaaagcaatgaaaaatgataacactggaagtgaaattttaatcaaacataaatgaatttgtagaagaagtcactgaccatgggaatgttgttcttgctgctgtgtattcataggagcttagtgaaggcaaacttaccaacacaaataagcaaagtggttgcaataaagacagatacgtcccagaggaaaaaaaggt

SEQ ID NO: 102661 - DNA, 836 bp, Homo Sapiens
  misc_feature (11)..(11): n is a, c, g, or t
cacttgatcanacaacagccatattgggtttttttcaaaacacacatataatcagggcacttctcaacttaaaaccatttctggcattacttgcccttaggataatgacaaaactttttaacacagtccacaaggccagagatagcctgacccttgctgatctgtccagcctctgctatatgtccccttattttctctgttccaaccacattggactttgttcctcttactagtcatgctccccacctatttggttccctagttaacttctcttcatccttcgatttcaacttgtgtcacttcctccagaaagcctaccctttctttcttaaccaggccgataggctgtcaaaaccaggaatctcttcttcgtagcactacagtcatactcattgatacgtgtgattattaatgtgggttttttaaaaaattagaatgaaactcaagagcagggaccacatctattacttgtgattaatatattcctagtggttagcacagtgtctagacaaatatatgttgaatgaataaatagaaaagggagaggaaaaagggaaggattgaccctctgtgaggcagtcttgcaaacagcagaaatgcaaagcaaagctgaagaactaactattcaacacacacctagaggagcgttgtaatggcttgtgcctgtctcaaatgggtgcattcttatgggtaagttttactaatccagctttcactggaatagttcacattcctctcctagtgtcagtctccaacaaatccctcagtaattcgtaatcagtaatctcatgccaaggatgaaagaagggcattatccaaaaaggtgggtgtgtcca

SEQ ID NO: 102662 - DNA, 544 bp, Homo Sapiens
  misc_feature (346)..(358): n is a, c, g, or t
ctccagttcaaattcctagtgttctcatatggtttatatgactgaaaaattaatatctttaagctaaaatataagggaaaggaagaagagaaatttagatgtaaaatgtgggtcagatattttataggtttccatttaatatatatatacacacaaaatccagtatattctgagtaggttcttagttttctgatttctacatgtgtctgctatgtgcaaatgtagtatattatttactacatggttattgtggtgtagtgtgcaaatgttagcatgtgcattatcctgattactggacacagttttattcttatcaggaatagaacttgcacatgtaccatacaannnnnnnnnnnnnaatcacaaaggatgtatttccctaagtagcacttttggagcaggggaaggaagaaaactgctattccctaatcctcctcctataagatatgcatatgcctgaggtgtataaagacatttaggttagttaatgggcatgttaataagagcattgtgatgcaaattcattttcaaaatgaaaataatt

SEQ ID NO: 102663 - DNA, 514 bp, Homo Sapiens
acagatgtataagtaaccaagttgaattatagttaactacatgcccacaaagaaaagatctgagccaaatggcttcattggtgaattttctcaaatgcttaagaaacaaatgatatcaatcttacaggaaatagagacaaaataacacttcccaaatattttacaaggccagtattaacctgataccaaagccaggcaaacacatcataagaaaactataaaatgagaaaggtacaactttttaacaaagtgattgcagattaaatccagcaacatgaccaagtggggtttatctgaggaatgcaaggttgggctaacatctgaaagccaattaatgtcataactcctcaatagaataaaagaaaaaatccatatgaccttctaatagccacagaaaaagcatttgacaaaaccaaccctttcataataaaaactcccaacctaagactacaaagaaactttcacaacctgataaaggtcatctataaaataaacctgcagctatctaagtttc

SEQ ID NO: 102664 - DNA, 435 bp, Homo Sapiens
attgttatgaataaagttgccataaacattcagcttattgagcattcagctgctatgacactcaggtctttctgtagacaaatgtttttatattaggcaaatatccagaaatagaattactgggatatatggtaagtacatgtttaacttcatgagaaattgccagactgtttttcaaagtggttgtaccattttgcaaccccacaagcaatatatgggcattcgagttgctccacattctcaccatcacttcgtattctcagactttttcattttagttattccaggaatgtgcagtagcaaattgtggttttaatttgcattttccctaacagctaatgatgttgaacatgtgcttactggccatttgcatatttggtaaagtatctgtataatcttctgcccactttatattgggttgtcttcctattctta

SEQ ID NO: 102665 - DNA, 522 bp, Homo Sapiens
  misc_feature (442)..(456): n is a, c, g, or t
gagaacctatgaatgtgtgccatgcatggccagcctcctccgtgagctctgcatctgcagatttaaccaaccacgactgaacacgtacagattcctgtcatgattctctaaataatacagcatgaccaccatctacacaggatattgcagtaggtattacaagtcatccaggatgtgcatagcttatatgcagatactacaccattttctatcagggacttgcacatccatgggcaggaggttgagtcctggaaccaagtcacccatggatggtaaggaataactgtactactttaactactgttcaagttcagatttttcacttcagcctgagaggtactgtttatttaattgaaggattttcgatcatcattatattccaataacttgggacacagtaggcctttaaggggttatcaaaataactagttctttgcagtcnnnnnnnnnnnnnnngggaaagggaatcgggcccggtcccgtggggcgggagggcagggccaaaactcccagcccagggaa

SEQ ID NO: 102666 - DNA, 496 bp, Homo Sapiens
  misc_feature (406)..(406): n is a, c, g, or t
ccttccttgacctcgtgttgcttacattctagtgagggtatcggaggaaaagagatgtgtgtgaaccaatatgtgagataattatacactgtgaggtgctctgtgaagaaaatatacaaaatgctggggccccaaacaaaagagagcttagcttagattgaggggtgacatttgagctgagacttcttgaaagtcctgacaaggctcagccaggctaaaaagctgagtgaaagacttcaaacaggggaagctgcacatgcaaaggccctgtggctggaaagagctgagtgtgttcatagactcaaagagaaaaatgtctcagtgtgtttggcgcatggtgatgggagggtaagtattggtcaaggtgtaaaggttggagaagggagcaaggtctacagcactgcanggtcttctggaattttcttccacagatgggctatgtgctttcctgtgctgggagaaatgaaggaaacaaacagacattgaaattgaactc

SEQ ID NO: 102667 - DNA, 111 bp, Homo Sapiens
aatgggcaaaactggaaacttgcccccatggtgcccatcaaaagatatgtttcgtttataatttgcatatattttacacatagtctttgaatctaataaaacttttaaaag

SEQ ID NO: 102668 - DNA, 526 bp, Homo Sapiens
gtgctgaagaaagaattgaaacatacagatcgtttctttgctcaagggagtgtggatttcagtgctctcactgagcagaggctgagggtgaccaccttggatcttcctgcaggacacagcccagagaaactgagcctgaatttgctgccatgttttgaggacattatccacgctagtctctttcatctgggccgaggtgggtaattttccttagagtcaagtactagaaaaagttttgcttcttctaagagctggtacattgccctcttgtgaatgagagccatgtatgtgaccacaacaccctttcagttgaccactaagagactgaaggccaattccggatcaactttacagccgcctacggcctgctataccacccatggcatagtttctgtggtctgatgctttattttttattgcattttactaatttatggcatgcatatcatatgagcagtctcaaatcctccccagaacaaggtgaggaatatattaatatttaaaataaaataaacaaaatgtcaaa

SEQ ID NO: 102669 - DNA, 444 bp, Homo Sapiens
  misc_feature (140)..(353): n is a, c, g, or t
ggaaacatcagtgaaagaaatttaaaaagacacaataaatggaaacacatcccatgtccatggattgaagagaatattgttaagatgtccacacaacccactgcgatctgcagtcagtataatcctatcagaattactgnnnnnnnnnnnnnnnnnnnnnnnnnnnnnnnnnnnnnnnnnnnnnnnnnnnnnnnnnnnnnnnnnnnnnnnnnnnnnnnnnnnnnnnnnnnnnnnnnnnnnnnnnnnnnnnnnnnnnnnnnnnnnnnnnnnnnnnnnnnnnnnnnnnnnnnnnnnnnnnnnnnnnnnnnnnnnnnnnnnnnnnnnnnnnnnnnnnnnnnnnnnnnnnnnnnnnnatacctttgcacatagggttaaataatttttgcaagggtgccaaggccattcaacagaaaagagagtttaacaaatagcacaggcacaact

SEQ ID NO: 102670 - DNA, 527 bp, Homo Sapiens
  misc_feature (464)..(464): n is a, c, g, or t
aaaaagaaagaaatggctttcctggtaggcaattgtcaaggaatgaagtttaggaggaggaagaactccaaggtcttagtctcatatggatcatgaatatggatattgagttcacaaaggttgttgtaaagggtagaaaataaggaatatgactagatgctaaaaattatccatgtgggtagagatgagatgggagtatagtagattagaggtgctgaaacattttagtctaaggacccctttaaactcttagtaattaacaaagaccccaaagaggttttgtttatatggattttatctatcagtatatactgaaccagaaattaaaactgagaaaaaatttaatatttatgcattaatttattttaaaataataaacctatgtgttaaatagcatattttctatgaaaaatatttttcagataaagatcagtttagttagaataataatattgtttacattntgtaaatctctttcatggaagaagcttacttatctgctatatttaattgattgcaatatattg

SEQ ID NO: 102671 - DNA, 503 bp, Homo Sapiens
  misc_feature (216)..(236): n is a, c, g, or t
tttgagaacaacctgggcacaatggtgaacctcttctttacttaaaaaaccaaaaaatattcaagcatggtggcgggcacctgtagttccagctaactcgggaggctgaaggcagtagaagcaacttgaaacctgggaggacagaggttgcacgtgagaccgagattgtgtcactgcaactccacacctgggtgtaaccatgagaatttgtttccnnnnnnnnnnnnnnnnnnnnngaatcccaggaaaaataaagagacccaaatgttaggtgttggaattaattatatgacaccctacaggtgtcagcctctgcatccctctctctttcaaactccatgcagagtatcttatgtattgagacttttaaaaaataaataaataagatccttatatgacagagatataatctaaaatcccttgaggacgtattctttgccattatttacaaaggtgactcttttttcttgatataaaatgtaaggctgggtgtggtggctcat

SEQ ID NO: 102672 - DNA, 482 bp, Homo Sapiens
aaaacatgtacaattaagctttgacatcttgaaaggacagaaaacattccctcttctttaccatcctcataatttaagtcatctctattataacaggaattttctcattctccatacacatctgccacattttcaacctgcatgaaaattaatttgtcattactcgtcttatttaaaaaggcagattctttttttatatagcacaacaataattctttcacatagatcttgccaacttgactagtccatttccttttaaatacattgcagactgctactctgtttatctacatagattgttttaaaacaattttaaatgaacttagagataacctaatttaatcctctcattttgcagataaagatgctttggtctggaaagagtatattaagccacttctgtcatgcagcgaggaattaataaacagttttcatgcctatattttggatttgtttgtgactaaatgtgtccacatattact

SEQ ID NO: 102673 - DNA, 298 bp, Homo Sapiens
agcccctgctcccaaaggcactgtcaattaaaaaatactttcatgcataaagagtggtacatgaccacaacctgggaaagccgtggaaagggcataggctttgaaatccacgtcccagttctggctccatctcttttttaatggaagggtaatgtaaggtaagaggaggaaggtggctgtgggtaagggaccacctttacaggcaaggtggggtttgcactgggcctttgccattccctccacacctaggaattatggagagcctttctttcctagttccagtggcatatggattacc

SEQ ID NO: 102674 - DNA, 156 bp, Homo Sapiens
ttcatggaaaatgggccaatgacatatttgaaatgtagtttatatttgcattaaagcagtaaatgtacacagtagtggaatcaccatcctactcgtgaagcccatgaaagccacatggtatccctgatgaaaaattgaaaaataaaatattcttaa

SEQ ID NO: 102675 - DNA, 563 bp, Homo Sapiens
tgctagaccccattcagtcttgggaggtgagagagccagttccaggcagggcccctcagttatgccgggagcatccatctttgccatgggtgcttgtgccgtggggcaggcggggcccacgggtagcccgtcgagaaccaccacctgggttggggggaacagccaggggtgaggagtcccccgggcccgtgttctggcttggagggagtttgactttggccaaaggtagcgtgacctttcccagatgccggataccaggggctgggtgcctgcacactggcatcctgtggtccgagatgcgctccgcctgatggggccccaggaggtgtgtcttggggtgggagagcccttgcccggtgacctcgaaggatcgggacctccgcttccttctctttgcctccagcgactcctcccttttcttgcccaggcttttcttctggccacgcagccagggcctggggccgtccccatgatgtccgactgcccgggacggggcctcgcccgtgctgctggacaggttgtcctcactggcagcatgctgtagtgtggggctgggcggccgc

SEQ ID NO: 102676 - DNA, 565 bp, Homo Sapiens
tagagctacaggtctcagggacagtctcgagggatacagggcccccatcaccacatccccagatttaaccgcagcagctcagcttttatctgtatctgttggagctctctaggaaatgtcaataccaaagcaaacccaaatcacaactagattagattactattcaagagaatgattctctaccgaaactgtgcaaaatggggatatcaagagagttggaaaatgtaagacgtaaagaccataatcaggaaaatacgcatcatatttgttattcactgagagggaggaatttccacttaaatcctatttccagcagctggattgtgctctcagtggagtgctctggattctgattaatagagattttctagtcctcccagcaacttccttctcaattctcttcactttccgcagatctcggcaccagggttgcatcttgtgggctccattgtgttttcacacaatgtgctatttgtccttcacagtgttttggtttatttttctgtttgtccatcttgtttttgaacaattgccagcatttaaaaatgaggaaatctaaaatatg

SEQ ID NO: 102677 - DNA, 344 bp, Homo Sapiens
tagtgtcgggattaggattcaacctgtatattgggggagacagcaacattcacaccatagcagaagtcctccatgctttgggggtttgagattctaggtagattagaaaatacgagcaaggaaataaagtgtttgctagtagaaggcaaaggaggcatccagacccagcagtcttggtctccaggacactgaaccatggctggaaaagaagctctcctcctcccttcccctgcaaacatgagtgcaggggctgcctgtgttaaccgggtcccaggacctcttcccactctgctctgcacactgtgtagttttttacagctttgcaaataaaccctttggtataa

SEQ ID NO: 102678 - DNA, 513 bp, Homo Sapiens
ataattaacactatttgtgcaagtcagtgtttttgaaaattcagtgtcccaataaaaagtggactgcacactaagggaccatcccccagcctgtaagctgtctgtattaatggggcccgttgtatctcggaattttgaggttggaacaatgggagccctgttgagcgtttcctaaagtgacttagccgcctgcgttgtttgaccagggaagcaacaggaaatggcagctagaggccctccctgtgcgtgacctcttgtcacactcagaggggggtaactgtcagctgttatctactcttcaggttttggagaaacacaaaataagttatgaggaaaagcaaatttctctcctgagtatttacatgtctctgtatgctcaaatatgcagatgtgtccctatgcgtgtatattagcttattttttaggctctagccattttatattctttcatgtgcttctcaatattctttttctttgcactttatacaaattaaaagcatttttaaagctaaa

SEQ ID NO: 102679 - DNA, 475 bp, Homo Sapiens
cagtgtatgaagtttctaggaccaggtaggattcaattggaggctgaatatgatggaaccaaatcagacttaaaattccatggactcaggtcaagattttttaagagtagtcagggagacggaaacctaacagtaaatccagctaatcttgaaaagagggaggaaatttgggtcaggcattgtcaccgaatgctactctggcagcatgcatttgcccatcctctgaatcctgtaagtctctggtttcaatccttccctgtaaccacctaccccatccccagttccatggagcaggggaaacatccttttcttcctcattacattaatggtttcccttcctattattttctcttgcgttttccatcggcttattttatttctcctgatcattaagatgaaacataattattatagaaaaaaatcaacagaatagtataaaagaaaagcagaaacaaccacttgaaatgctataatc

SEQ ID NO: 102680 - DNA, 378 bp, Homo Sapiens
tatacatacaaatgaaaataaaggcacaagagatgtgctgatcattacaggaaaagtctagaaaatgcctgttccttaatgactttaacagatgttagcatttagttctatagtcttataaatagcagacttcatttttggtggataaatgtcataaaaacttagggctaagtatttatttcgtttgtttccttcaccttgaatccatttttgaaaacctttcagttttcagaaagttattcactgaccaaatgatcacatcaatatgtcagaataaaaggaggggtgccctgtcactcctccttaaggagggaaaaaaaatgcatatggagtttctcattattttaattttttaaatctaatattaacttttgttac

SEQ ID NO: 102681 - DNA, 509 bp, Homo Sapiens
ttttttttaagttattttgagtatgaaaccctggatgagcaaaagggatcttgaccaaagggataaatgtctgataggaacctgccttaccacacacaagcagagatgtcagaatatgtcttttcaaaatatgtttttgttgttgttgttatagttttttgcattccttctacaccagagaatgaagacccagattcttagaaataaagccaaactggcattcatctggtttctcacagcatcagtttgataaaaagaatttcactgtattttttttgtccccatgtattttgctttttccaatacttccaattatttgttggtctcactaactcttcaagcctggtgtggctgtaggaacagtaagcacagtggcggtgttgataactgacgtgatgtgggctaaacagacatgttaagtcaaaactattctctggaggaccatggaatgggcatccctctagactatgggagggtgaagtggaaaactgtaatgaatatagacagca

SEQ ID NO: 102682 - DNA, 624 bp, Homo Sapiens
ctttttatattttttagttgactttattctgacgcaggggaacccaatgtttatgtaacacttcttacacctgaccccagactccagtcaacgtagaaaacacacagtatataccctgcaaaatgataccctgtgcagcaccaccacaaagtgcttcattttcctctctactgaggttccttgattccacgtaacagaaacccttgcaagctagcttaataatagtaattttaagaggcaattaattaaaaggaaataggatatctgtatcataggtcccaaaggccaaacacttgggcctgaactggcactaggacaaggggctggaatgccatcaggactctgaaagcaactgttcccaaaattgtgcttctgcttgtccttccagatgacttacctgcttcattcttctctctgaaaacaggctttctctgcttctaagtacacagctaccaagtttacatatcctctcttcaaactaccagcagaagactaccatctcaattgttccaattacaaattctggaaaaaatatgactggctaatcctgggtcaggtagctgctgttagtcctttaaggtacagcaaggtaggagatactataaaattcaaactaaacttcag

SEQ ID NO: 102683 - DNA, 482 bp, Homo Sapiens
gagggacctctacttcacatagtcacccagggacccaagttccttccttcttgtggctctgtcctcttctaagcccttgaaattttttccattcagccagtggatggagaaagaaagaacatgctaaattgccctagatgtttttcatgggactggcctatattactttggctagaacttagtcagatgaccaaacctaactgcaagagaacctgggaaagtaatctaactgtatctacagaaaagaggaactgaatttgattggcatctagtctgtctctgccacaagtaactactagctgggtgagcttaggtcttagttttcttatctgtaaaatggaactaacatgagaattggtgaaagctaaatgaagtaaagtatgtggaaaatgatgaatccagttgggattcatgatcatgactcttttctctcagcttggacctcatcacagctattgagcatcatccctagataaaaaaaa

SEQ ID NO: 102684 - DNA, 469 bp, Homo Sapiens
aatcatgaaaggacatcctaaggggtcaggtgaggttgcagtggggttagtcggtcaatagtttctttatgccaattaggatttctgcagaaaacaatgaaacactggtttaaacagtaaaaatattttaattccttacagaagcccatggaacatacactccaggtttaattcatcagctcaatagcatcatcaacgacttaggttctttccactttctgcttgtcatctgtgttggctttattttcaagctagctcctccctggttgcaagataattgcagcaggtttagttatcatattcggacatgctaacgcccaggctagtgatcccttccttacatttctttctcattttaagaacaaagtgtttaaaaaattatacttaaaattattggcatctctgtcaattgaaagatgtcaatctctcccatttttcctaatcactaataacatctactaaaaacaaa

SEQ ID NO: 102685 - DNA, 427 bp, Homo Sapiens
agtccagagtcaaagggaggggagactttgcctcttgataggaggcaaagttacatttcagagggtatgcatatagacagttccagctatttttgcaatcttctacagtagggaagtgagttctagtacattttataatgcggagaatgaactacaagagactgattccaccaaacctcaaaaacatcaccactctctatagagaaaggactgaaagggtaatgtgaagcttgaaaggagctgtgtttgtgatgaatactgaagagaggaatgaacaaggatttagactttttcagagagagtatatattaaagctattcttagcaaaaagtaaataatttagcttttaactttagataaagcattgaagaccacaattgggtagttgcaatatagaaaatataaagtgtgctgtataaatattttt

SEQ ID NO: 102686 - DNA, 568 bp, Homo Sapiens
  misc_feature (226)..(234): n is a, c, g, or t
acactaaaagtaaagaaaactatagagcaatatcccttatgaaggttgatgccaaaatcatcaacaaaatactagcaaatcaaattcagtagcaggctgaaaggattatacaccctgaccaagtacagtttgttcctggaatgcaaggatggttcgacacatgaaaactgatcagtgtaaacagaatgaagggggaaaaacacatgattcatctcaattgatgccnnnnnnnnngcatttgacaaaattcaacatctttcatgatgaaagcactcaatatactagaaatagaaggaaactacctcaacataataaaagttatatgaaaaatctacagcaaatatcatactcaatggcaaaaaaactgaaatcttctcatctaaaatcaggaacaaggcaataatgcccacttctattcaacatattactggaagttctagctagagcaattggacaagaaaaagtggggggtgggggagaagaggcatccaaactggaaaggaagaagtaaaattatctctattcccagatcatgtgatcttatatgcagaaaaccctaacagttcca

SEQ ID NO: 102687 - DNA, 564 bp, Homo Sapiens
acttacaaagggattctaaaaaacttaatcttattgaagtagagagtaaagtggtggccaccagacaccaaggtatttaggagacaggagggtttgaaaagatgttgatcaaaaaatacataattatagttaatagaagttcaagagatatttttgtacagcgtagtgactatagatcaaaataatgtatttgtagttttgaaaaatgctgacaatgtcacttgctcttgccacagaaatgttaactatgtggcgtaattacctagaattaagcatttaacaatgtatatatacttccaaacattatgttttacaaaataaatatacatttattgattacagatggtaatggtatgaaagccactgaaagggcaggcgttgcttatggtcttatgactggccactttgtgaacacaataaacaagtttgcattaaaaaaacccagaaaatggtttaatctaaaagttgccatgatcttcagaatttttccagagaaaatgaccaagaagttgactacagttagcccactaagaatataagctgtagacaccaaaacccactaaa

SEQ ID NO: 102688 - DNA, 378 bp, Homo Sapiens
  misc_feature (139)..(158): n is a, c, g, or t
  misc_feature (163)..(257): n is a, c, g, or t
tgagacagggtctcactttgtcacccaggctgcaatcttggctcactgcagcatcaaccacctgggctcaagcagtcctcccacctcagcctcccaaatagctgggactacaggcatgcaccatcatccccggcttaannnnnnnnnnnnnnnnnnnnaaaannnnnnnnnnnnnnnnnnnnnnnnnnnnnnnnnnnnnnnnnnnnnnnnnnnnnnnnnnnnnnnnnnnnnnnnnnnnnnnnnnnnnnnnnnnnnnnatgagccaccacccctggcacattttttaattttttgcagagacagggtctcgccacgttgcccagtctagtcacgaactccccgagttcaagcaatcagcccaccttggcctcccaaagt

SEQ ID NO: 102689 - DNA, 610 bp, Homo Sapiens
tgaagatgtttaaataaaaagaagaaatcaagcatttatcctgctttcccggtttgaattgtatttcagaatacacaaatagttgaggaggaaaagttacttttaatggaagaattacagcttataaatgcagaatgagtgtagagtctaaaaatcaccattccgtaggccctaatgaattaatgggtgtaggcagtgatcattggtagctgctaaaaccattaattaagtgaaagattgatggggagctttataatgaatcaatcaggctgacaacacctgaacctgctgctgaatcctaacatcagaaacagtgagataaccagacattatgtatctcccaatgtcagcactaggaagttcatagcagagcttaaagtgttcttgccaaaaagaaagaaaggaacaaataaaggaagaagtaatcaaccttgtagatctaattacagcttagaaaaataaaaagaagattaaaggaacaagttaaagacatcaagaaacatcaatctgctaaatccagattgtgtgaaattgtataggacaaatgacttggtttctttgacaaatgaatgacatgaaattaataaaggtgagaagaccccgtctctac

SEQ ID NO: 102690 - DNA, 578 bp, Homo Sapiens
  misc_feature (298)..(298): n is a, c, g, or t
  misc_feature (343)..(343): n is a, c, g, or t
agatgagattaagaatggcatactaaaagatgggccaaataaattaaaaatttccagcatgccactcgatagtcacattagattttaaatccaaacttttgattctaatattctagttccacaaacttcccccagacttcagtttcaatgtttttactaatatatatacgaacacttaaagttgaaaaatatactgacatatattcctcaaaatcaagaaagaaatcctcaacacacttgaaagatcattaaaagcatatttaaagttttgtttatgagcaatgaggctgcacagtgncgatcaccctggagagactgccggaaatctaccagatggccaaanctccattcacacacagtggctcagaatatccctgggcctctggatgtttacagagtacataggtaagtagccaaacctgcaacccactgcattagagtcattcaagtcagctaaaagaacggatggaatctggaaactcttactttgtaggcttcactgctataagaacacttagaaaagttctataagcacacaaaaaacacaccctcataagtaaaaagaaaactagtaaatt

SEQ ID NO: 102691 - DNA, 327 bp, Homo Sapiens
ctagggcgctttcgggtccccattgcagcccccggatgagcccgcagtattttccttatatgatcaggtcccattgcgggcggcgccgcttgcccggagcctgagaggattatgaaaacgtggcgagcgaaatggggccaggggacctggagcgggggcgtgaggagagtaggcagcgggtgaggctggacgggagggaggtctagggaggcctctgccgcgggcactgtgagtcctggccgatgatgacgagaccactgcgcaatctgagttctgggaaccaggtgatggagtatgttctgagaacagactgaggccgaaaaaaaa

SEQ ID NO: 102692 - DNA, 281 bp, Homo Sapiens
ccctttagctcataaatgaatagtgctggaagatatctcaggagcattctccctgagatgatgtcttcagtaatgatcgcacgtattggtgttgattccatccttgaagttactttcctttatctttcacagtggtgtttcttcactagaggttttgctgtctgattaacttctctgccaaataaatggacttttgcttcataggtacacaaacatttctaaaactttttttggaaaatatatttctttcttaaaaaaacaaatagtgcatgcacattttt

SEQ ID NO: 102693 - DNA, 272 bp, Homo Sapiens
ccacatcatcagaaagtcaaaggtctcactccaggtttggggctccttccttccactcccctccctgccagagtctgtcttggccagtgccagcctcgatgctttggttttgaccccacctgatcctcctttcctcatgcagcacaagtgctcaccggggccagaagccaaggcatggatatgacaagcagggcagcctggacactgccctcacaggacagcgccaataacaatacagcctctggagttgtctggtcagatgttccgtcgga

SEQ ID NO: 102694 - DNA, 490 bp, Homo Sapiens
cagttatcctgaaaatgggaggggaggagggaaatgaaccagggaccgcatcagcaccagaactgaaggagtggaaaataattagaagggaaataagacacagagaaaccaggatgggcaaagagaaatgtgtgattggggaaaaacaatatccttacctcatccttttcgtttcttcctactcacagaatgttaaatgcactcctaaatgaaaatagtgtggatgtgtgagtggctgtcactcagacagaggagggaaaaaacccaacttatttcatcttcatcatcttattttgtcagaccaagcagaatcctcctcaaactatccagagtaactttggttaaaatatgggtgtgtggccaaaagctttggatagatttattttgtacgaattttaaaaaacaaaatgttagcatctttgcttatggtagttttgaaagaaaaatatacatatttcctaagctgatattaaaagtggcatttatgtaa

SEQ ID NO: 102695 - DNA, 477 bp, Homo Sapiens
ccatgattgtgaggctttcccagccacgtagaactgtaagtccaataaatctcttacttttgtaaattacccagtctcaggtatgtctttatcagcagtgtaaaagtggactaatacagtaactttataatgatctgtttcatacactgctaaatttcctaatgcagataacactgccttgcatataacaggtgttcaataaataattgtttaaaaatgacttgtttggcacaagttttaaataactgaaacatgtagaagtaggtagatgtcttgtctaactgatggtaattaatttccatctcagcccaatttagtccccaattatcacatcttatatacccagttaggaaattagttcaacctgaaccacccttgtggtttctttggaactcaaagctagcggtattcaccccatttgcctctgtctcttcaaagacttcaaagctctgagtttttcctgttgaaaatttcaaa

SEQ ID NO: 102696 - DNA, 577 bp, Homo Sapiens
gcggccgcctcttcaatgccatcatccaccggcacaatgcccctgctcatcgacatgaacaaggtgtaccggcagaccaacctggagaacctggaccaggccttctctgtggcggagcgggacctgggagtgacgcggctcctggaccctgaggacgtggatgtccctcagcccgacgagaagtccattcatcacctacgtctcgtcgctgtatgacgccatgccccgcgtgccggacgtgcaggatggggtgagggccaacgagctgcagctgcgctggcaggagtaccgggagctggtgctgctgctgcttcagtggatgcgacaccacacggccgcctttgaggaacgcaagttcccctccagcttcgaggagattgagatcctgtggtctcagttcctgaagtttaaggagatggagctaccagccaaggaggccgacaagaacaggtccaagggcatctaccaatccctggagggagcggtgcaagcaggccagctcaaggtgccccctggctaccacccgctggacgtggagaaggagtggggcaagcttgacgtggccatcctggagcgg

SEQ ID NO: 102697 - DNA, 468 bp, Homo Sapiens
aaaaaggtagaattcttatgaatgtttcatgatcatgtatgtgtggttaacgcagatacatttggaagtcggttatcaaggttgctctccagctcaaggtaaagtctagtcaggaacattaaccagtgatgttaattccatcccaggcaaagggtaatcataggcaaggtgtggtcctggaatagccatggtggagtacttgaggagggtggatcctagacagatggattagatttcattccccaccccccaggtcaaaaaagaccataaacaaagttgaaaaccaaatgacaagtgaagaaaaaagttggtaattatgatcaacaaaagatcactaaaaacacgtatcagtaagaagataaatgctataatggaaaaataggcaacagatttgaacaggcaagccagaaataaacaaatagattaagcaggaaaaagtattcagcattactactaatcaaaaatatt

SEQ ID NO: 102698 - DNA, 510 bp, Homo Sapiens
  misc_feature (203)..(203): n is a, c, g, or t
ttttctagttaattaagtataagtataagagacctatctgctatttactgagtgccctggagaaattgcaaaaagtgtctctggaaaatgctgactattgcctctggggcatcctgatatggctgcagtgggaggccggcagaagtaacaaccctcccatcgtgcctcagtgtatttgtgtgtgtatgcgcgtgcatgcaaantgcatacacacgtacatgtcatataattattaaacagaattttcttgaggaaaaacattttattaatatgacctacactgcattgtagttttctatcaatttcactggattaaaagattgagggaataagattggcagactaccccctagtggctaacttgaagaaagttgtgcacaaattgtaaagaactactgcattaaggtaacagtaattgtttatttccattatatttattaaatatacttattaaatctatgtcccaggcactggatcaggtgcttggaataaaaatccagtaaacagaaa

SEQ ID NO: 102699 - DNA, 168 bp, Homo Sapiens
ccaaatggctacatcttctccctttatcagcagtagcaagatttgagaacatagggatggcaacagtattttcagaacagaaaattaaaacaagctgtatttttgttcccaatttatgagtctattttgatgggaagttgaacaaataaaaaggaaatcatcaaagtt

SEQ ID NO: 102700 - DNA, 509 bp, Homo Sapiens
cttcctgatctgtttgagttccttgtagattctggatattagtcctttgccagatgcatagtttgcgaatattttctcctactctctgggttgtctgtttactctgttatttcttttgctgtgcagaaactttttaatttgactaagttccatctatttatctttgttgcattcacttttggattattggtcataaagtctttgcctaggccaatgtccagaagtttttccaatgttatcttctagaatttttatgattttaggtcttagatttaagtctctgatatatgttgagttgatttttgtataaggtgagtgatgtggatccaatttcattcttctacatgtggcttgctagttatcccagcaccatttgttgagaagggtgtccttttcccactttatgtttttgtttgctttgtcaaagatcagttggctgtatttggctttatttctgggttctctattctgttccattggtctatgtgcctgggtcttagtgttttgct

SEQ ID NO: 102701 - DNA, 493 bp, Homo Sapiens
  misc_feature (88)..(117): n is a, c, g, or t
cagtcacaagtattaacagcagaatagaccaagtggaggaaagactctcagaacatgaagactggctctctgaaataagacagtcagnnnnnnnnnnnnnnnnnnnnnnnnnnnnnncttctgagcaatatggtattttgtaaagtggccaaatctatgaattattggcatccctgaaagggatgggaagaaagcaaacaagttggaaaacattctaggatatcatccacgaaaacttccccaaccttggtagagaggccagcagtcacattcagggaaaccagagaacccctgcaagattctacacaataaaatcatccccaagacacacaataatcagattttccatggtcaagatgaaagaaagactgttaaaggcagctatacagggcaggtcacctacaaaggtcaccccatcaggctgacagcagacctctcagctgaaaccctataagccagaaaagactcagggcctatattcaaaaatcttaaa

SEQ ID NO: 102702 - DNA, 746 bp, Homo Sapiens
taagtccctatgaatgaaaccatgacattgtgcaatcaaggcaggaatgttcagactccaatcctgctgaaatacagaggtgatctttgccaatgaggcatcgtggagactccattacacgctccagcaagcaaacctgttatcctcagtggcccatgaccattcttgctgtcagactttgctccgtatgcactgagcccagagctgattttatctgccatgaaaagaggatgtggaacaaagaagggaacagagtttggttgcagagagaagtgtatgctccaagaaccagatgctaagatgggattaaatgtgcaaggctattattaggggagatgcctgtggcagaaaatggggagagagatggacaaggctgggcaagtcatcagatcatgatgcaaggctgatctgagtgaaggaaagagggagaaaaggtagttggacatattctaggctgccatgcagttaaggagtgttcagctagggcattgagggtcctggagccagtgtcaactgacataggacaggaatgagccttagtatctttgccatgaccagttgttggtatgtggcctcaccacaaacacagtgatggatttcagagcccagcagctgaggccgatggtcagttatgctttcatggttaaaggtcttccaggcacattctcatgacagccacgatatatttttgtaagaaattctaccaaggcaaaatatgattaagataggtagccaaaacaaacaaa

SEQ ID NO: 102703 - DNA, 471 bp, Homo Sapiens
tttctttctttactgactccaccaattgttttggcttccagtagaagcagcttcaattaaagataatggttgtttggcttgaatgaagactaaaggccagggactctaatataagtcctgaaacactcagaaaacaaacaaggtggtttttaaaacacatttcatacaagttcaagttgttcttaagaaattaaagctagttggagagagctaaaaatgttatcacaactgcatttcaaatggtaaagccttaactttaacttaatgttcagacattatcttgaaagcaaacggaaacctgagcaaacacctcttgaaatcaatcgatgcagatagatggcacctcggaaaaatccctaaagttggcctcaactgtcctgacttagccatgtaatgaatgcaattccatctgatttgcctaggtagtaggaatatccaaaaaaagaacaaacctttccacatgcttccaag

SEQ ID NO: 102704 - DNA, 502 bp, Homo Sapiens
ctccccagagaaacgggatggaggagcacacagggtgctcttgctctcttgcctgcgctgccatttccttccagcctgggtttctagctctttggggagattccccgttttgtggaatgctttctgtgtttcctacttctggatgcctaaggagtggccagtcatactcctggctgaccactgccaggcaccgtggttttcctcactgaactcaaggagtcaccctccgtggggaggccacactcacagctccaggcctgccatttagcccttggggcttggctgtaaagttgcccaagaggattacaggagctgccagccaagtttaatttggccaccttagagaactgcagcaaggccctatcagcttcccattagacaaacaactgcatttaaattaaataaagtttgcacctctagggagtgctgacctgaaaataagaaccttctgtctgtgattatagagtacacttgcttttattaattgctgattcttagttta

SEQ ID NO: 102705 - DNA, 553 bp, Homo Sapiens
actcatctcagtaaccacacattagcctatgctgaaagaatttactatattttactgaaagctctcaaagactgacagctgggtaacaagatacactgtattgttaatcaggaagttatagagactctgatcatgcccatatatacatacaatgggttaataatacttcaatgtggaagtcttatagtctattaagccttccttctttatctatgtttcatgtctgtgctactcttataccatggaatatgcttcaacaagggctgattatctagctcattttaatgccaacagcttctctttacacccccatctatgcactgccccacaggggccatcttgaagaaacaagagcctagttgctatgcttcactgcctcccttctgagattgctgttagcttacatttcataagtaccacactgatgacaacactaaatagattttaatgctccagagatcaacaagatgaggtagagaaacacaacacaatctgtcctaattagttcatagaatatttctatctttcaatactaatcaggcatccaaagaag

SEQ ID NO: 102706 - DNA, 465 bp, Homo Sapiens
  misc_feature (206)..(227): n is a, c, g, or t
  misc_feature (380)..(389): n is a, c, g, or t
caatttatgaccacattaattggagaaaggaaaataaactctcttgggaatacgctgtactagcacgaagagattttccttcatttctgcaaaattaatattctctattcatctaatgcctatccactagatttttttgtatatgtcacagaagtacttttttcttaggtagtatatttaaacctttcagttataattattaccannnnnnnnnnnnnnnnnnnnnnacttaatggttataaaaagttacatcccttaagaaatatttagggataaatatggatcaaatccttgagacaaaaacccaaactttataccaaatcctttcatccaaaatcttatattcaaatgaagtgagaattccattaaggaaacaatannnnnnnnnncaactaatttttatagttacatcagcctgggctaattatacagaaaatttatacaaatacacacaaaaccaaaaat

SEQ ID NO: 102707 - DNA, 446 bp, Homo Sapiens
ttgatagaccattagcaaggttaaccaagaaaagaagagaaaatccaaataagctcaattagaagcaaaatgggagatattacaactgacaccactgaaatacaaaagatcattcatggctactatgaacagctttatgcacatcaactgggaaacctagagatggataaattcctggaaagatataaccctcctagcttaagtcaggaagaattagacaccctgaacaataacaagcagtaagattgaaatggtaatataaaaattaccaacaaaaaaagtcaagaaccagacagattcacagaagaattctgccagacattcaaagaagaattgttaccaatcctattgacactactccacaagatagagaaacaggcaacccttcctaaatcattctgtaaggccagtatcaccccaatagtaaaaccagaagaggacataaa

SEQ ID NO: 102708 - DNA, 512 bp, Homo Sapiens
tgggcttaccagattgaactggcggaacaccgtgattccatgagatgagcagttctgggctgggacagctaaggagttaagggacaaccttagctgtactctgggggctgggtgtggcatccccagctcagaaggcagggccagtcagggggccatgccctgggtgctggtggggtctcagtgctttgggaatttggacagcaaggaaggacccctcatcgccactcctcctgctgggctggtgcccacgggtgtccagtgggactcctcacatggtatgtccttcgtgaggcctgccactgcagtcctctaggtcctgtgtggcccatggcatagtgcccacatcacctctgtcctactgtctacccaagccagactcccagccagctgccagtatcactcctgcatttggaaatgcagacagcagacacgttggagcgtctctgagcagaaagctgtgccagggctctgggatgcccagagaaaaagaagacaaggcctggccctttgtc

SEQ ID NO: 102709 - DNA, 151 bp, Homo Sapiens
tcagttgttccaaccacattaaaaaaactttccaatagctgaatcgagtgtcagtttttgagtttatttggcaaaaatgcattaaagcttgctgcatttaagagatgtcccattatgcaaacaggttgaaagaatattacaaatacgtttt

SEQ ID NO: 102710 - DNA, 533 bp, Homo Sapiens
cccacttactgtgtgtctgcataatttagcaattggccaatgtacttcatagttttgaatatctctttccagccatcataactgatgatgggattaggggcattaattcagagatgatgtacctgagctgccgttcgactgagttccacagcaatgtctcctccagtgttcccaagaccaatcaccaagacgcgtttgccctgaaagccttctgggatcttgtactcttgactatgcaggatctgacctttaaacttatgaattcctgagaggagtgaaggatcagaaagtctgaaatgtctaaagttataatttctcactacgcagggatagggtctgtggaaaaagggaagtcccacaactatggcagtcctttgcttatgctgcttgtggcaggaagtagaaaaagcatataacctccctctccctgggatgctgtgagcccagatgtggatttagtacaaactgccttgttaaaaacataggaaatcttgaattccatatgaatgtgcccttttaaagcagttgcttca

SEQ ID NO: 102711 - DNA, 530 bp, Homo Sapiens
  misc_feature (11)..(11): n is a, c, g, or t
agagtgactcntaattggttcaagccaatcataatggtctcattccccttgccagatggtttaagaaaggcaagtgaccccaatcctaatcaataggacctgagggaaaaactggagggtttccatgaaattgttgtcttgctaacaaaaagagatgtacaggaggaaatattccatttcttcataagacactgttgagtctgcattcaatacagccagagtgcaatcatgagagaagattctgagaatggcagagtataaagatgcaaagtgtcggggtccttgattagatcagtgagccactaaattaaccaaccccgaacctgtcttccttctctcccttcctctggacttcttgttctgggagatcttttcttcactggagtgttctgttactgacagcctaaggcatccacatgatacaagatatatatttattccctttttattaaaatctaaatgagtttccaattaaattccaaactgaaaactaaagaatgccattgtcaagttcactatttctattcctg

SEQ ID NO: 102712 - DNA, 476 bp, Homo Sapiens
gctattgaatcatgataattcaagtataatctagaaaagcatttcttttacatgtggcttttgaattctttaatttttccagtgttaacttttacagtacaccatggcttttacaaatgcaaatctgattgtttgcaatgattcatgtagtctaaagggggcaagaacaccatgctattctattagtattgatttgtaacatgagtggtagatgttcatgacaaggagagaagaaatctatggcttacttgtagaactgagtccctaaagcttatctggttcagtgaacaggactttcctcttataaaatatctattgtttatcttgccttcactagttagaacaagaatgccttatttgttttacatccaaatgagggtatcagtataacattttacctaacctagacataatgagatcaaaatgtaaattgtcattggattttactccaaaagtaaaattgcttatattgggat

SEQ ID NO: 102713 - DNA, 481 bp, Homo Sapiens
  misc_feature (408)..(408): n is a, c, g, or t
  misc_feature (421)..(421): n is a, c, g, or t
  misc_feature (444)..(444): n is a, c, g, or t
ggctaagtgtattggaaactgcaaaatcagtgttatggtaattgcagaaatattttgtagcattggcagtttgggaaacatgtttatgtctgttttattctttctgttttttagagcttatattctctgtggaagatgtgacatatccaggcggaacatcatgatgcagggaaacacatggtgagtgccgtgatgggaatggcaatagtttgggagaaccgagagaggagcagacattggtgctgggctatagagggtggaaaggatttagatacatggggagaggggataatgtgctcattctttcaacagtgggcacaatacaatagagggccatgcccagggctgggaagccagaccagaacagttaatagaaatgccatagcgctgccctgacagcgcttgcanttgcggggtgcangcagacgttggaggtagaattangtccttagaaggtggattgtaattattgtaggacctg

SEQ ID NO: 102714 - DNA, 586 bp, Homo Sapiens
tttggatacaggccaggagcaggctgctctgtgatggtggggcggggggtgataagactcccctgagaggctcccttcggtgctggaaagatgggacatggggaaccgcctcctgcctggacctgttgatgcccagagccactcccctgggtcctcatcgctccttccaggcagtgaggatgtgggtttccaggggaatccaggcctttagggagagtgggaatctgactttgatcttgcagctccgcatttttcctgcacatttgctgattagtttatgcctgtcaggggcctcagggccagtgctaagtcccagggtcttagggtaggaaagatgattccccagatttcctgcaggcatttgagcatggtggaaggatcagtggagcctccagtgaaacttggcagattgcgcacttcatttattttcactctcccaggatccttcccaaattatcataaataaacagagaattctgaaacctacaaagaaaaatacagcaaaagaacaatgaatcagtttcaaagcctaggcagagaggccgtagggtgactgacagcagcccctgtgggactggagagcaga

SEQ ID NO: 102715 - DNA, 373 bp, Homo Sapiens
  misc_feature (147)..(159): n is a, c, g, or t
catgtagagccacaaagccaaactttgcagcttccaagtttggagttaggcttagaatacccagggaaacccatgtttcatttaatttttatgtttaatacttaattcatctgaaatttaagtatggtgtaagatgagaacttaccnnnnnnnnnnnnncataatggatagcagggtatccaactaggagttggtgaacaacctattagtttgaaataaggcctgttacatcccatttatctatttgcttatctcagtcagtgctggcctcaaagggacttaattactgtagttttgtgatatgttttgatgttgggaggacaaatctcatctgtttgaagcaagctattctacttgcacaggtatttctttg

SEQ ID NO: 102716 - DNA, 841 bp, Homo Sapiens
gcggccgccagacctacagcttcggcaagactagctcctgccacctgtccatcgacgcctcgctcaccaagctcttcgagtgcatgactttggcctacagtgggaagttggtgtctccaaagtggaagaatttcaagggcctgaagctacagtggagagacaagatccggctcaataatgccatctggcgggcctggtacatgcagtatctggagaagcgcaagaatcctgtgtgccactttgtgacacccctggacggctctgtggacgtagacgagcaccgccggccggaggccatcaccacggaagggaagtactggaagagccgcatcgagattgtgatccgggagtatcacaagtggagaacctacttcaagaaaaggctacagcagcacaaggatgaggacctctccagcctggtccaggacgatgacatgctgtattggcacaagcacggggatggatggaagacccccgtccccatggaggaggatcccctgctggacacagacatgctcatgtcggaattcagcgacaccctcttctacacactttcttcacaccagccggtggcctggcccaatccccgggaaatagcacatctgggaaatgcagacatgatccagccgggactgattcctttgcagcctaacctggacttcatggacacctttgagcctttccaggacctcttctcttctagccgctccatttttggctccatgctacctgcatctgcctcagcacctgtaccagatcccaacaacccacctgcacaggagagcatcctgccgaccacagccctccccactgtgagccttcctgacagcctcatcgcgcc

SEQ ID NO: 102717 - DNA, 405 bp, Homo Sapiens
gccggctccacttatcacggttggctgtgttattgaggacagagctgtgttagtgtgcctgactccatctgttcaaaagggtgaatgttatgttggcagctccgcattctaggcctaaggtttggagggcacagggaatgctgacaggccataatacctgggcaggggggctgccctgatgatgtcatcagaaccatgaccacagggctacatgtccccccaaggatgggagacagggaagacaaagggtcaggtaatagggataggtggataaaacaaagagtagaagttgggagtatagtagggaacagaggatgagggctcaggtggaggtggggacataaagcatccagggaataaaatgtgaccttaaaatcctaaggaatggctagtatccagagcttt

SEQ ID NO: 102718 - DNA, 488 bp, Homo Sapiens
cttcactgacccctccagtaactgtccggacagttacaggatgcggtcaacatatctgttcacctcgcataacaaagctggcaaaaaaacatctccaggatgcggacaagtcacttgcacccctgactcactcagctccccgaccctgacccagttctcctgcacccccaactcagctccccaaccccgacctggttctggccctataaaagcctgctattttctgtaagcgggtctgcctccttcaactgtggtagagcagccaagcagctcagtaaagcttgcttgcctgactttgggtctcctcatcctttctctcggctgaccttacacatgcattataggaagagggaaacattttgaattttataaattaatagtttcaccagtattttgttaaggtaatacaccataaattttgaaatgctttttaagattctatgtgaacttcatttgtttttaattaaacacaactgtgttaaacgtga

SEQ ID NO: 102719 - DNA, 429 bp, Homo Sapiens
  misc_feature (339)..(347): n is a, c, g, or t
accccaaatataccattggcagcaaaggcaatgattacagggtcatcttctctatgacatttccatagccttgccaaagaaataggttgatagattgatgtatagatggatggatggatagctagctagctggtggataggtggcagatagatggatagataaggcaaattccatgggtctatgtgtctgtttttgtaccaataccatgatgttttggttaccatagccttgcggtatagtttgaagtcaggtaatgtgatgcctcagccttagttctttttgcttaggattgctgtggctatttgggctcttttttggttccatatgaattttacaannnnnnnnnctaattcagtgaaaaacgtcattgatagtttgaaaggaatcacattgaatctgtaaaatgcttgggtaatattgccatttta

SEQ ID NO: 102720 - DNA, 562 bp, Homo Sapiens
tgaaataatgtaaagttatattttcatgtttttatagatacaacatgacaagaatacataatgtaagagtatttcaactatggataatgttgattggataatgcacatctcagttacaagcagtactcatagtttaatatccatgtaacggtgcatcaatatattgctatataaatatgtctgtgtgcatataagtgaaaagtggtcaaacaagagtgatgacagctgtctaaaggtttttttattcattttatataaaaactgttatggaaagaccaaaatgtttatgaactattcttatgtaaatttacaatcgtcctttactgtacttttttgtttacagtatagtaccttattttctgctgtgttaagtgggtgtcaaactccaagaagacatacactttctataacttctattgaagatattggaatttccaatttttcatgtgtactatgtcagaaaatgctttcgattttatttttaaatctaacatcggatggcttttccggagtgttgtaaaaacttcaatcatacataaaacatgttcttacaaaaggcaaa

SEQ ID NO: 102721 - DNA, 400 bp, Homo Sapiens
tgtaagccacggaacccagccccatcatgcctttaagtgttcaatgcacagaatagatagaggccaatagtccatttcaatcagattttaaaaaaagtaatgcaaaagatgggagaatttattgctgactgttacttattatgcaataatttactttaaaatacttcaaatataaactgtgtaatggatgtgtgctgtgtaatttaacttcaatcttgttctgggggtaagttagtatttgaagcacctcaatcaggtggctaggaagatgctttaaacacttatctaaatatacgccagagtgttcatcagcataagggatattagtaatttttcactgatgaatgcagcctgaaaagtaggtggttgtctagacttttagaggcaaaatgcatgaaat

SEQ ID NO: 102722 - DNA, 481 bp, Homo Sapiens
aatagagaaagtgaaaaatgataaactaaccattataaaatagaggtttgagtccacctgtattttacagaaatttgccctcaaatgtttgagagggaagtcacatatgatagaaaaatatcttttcaagggtagaatgatatttccttataaaagtgacaatcaaaaaagactcatttgtatacttgccaaagtttaaaagttttttacattccttaccctaaacccactgccccatccacccagaattcagaaagggtttggcatagatccagggctccagggcccaggtcattttgttattagtctagggcttttgtcctccacagtctaggcagggcatctttgtatgtgtgttgctggttggggccagggacgggggcaggcgggagttgtccaggtttaagattgtttgttttccatcagatccacaagcaatatctgtgggctgaaatccaggttatacctattcactatgact

SEQ ID NO: 102723 - DNA, 537 bp, Homo Sapiens
gacttcacctctcacggctttcaggcagagaggccctcccatgcccacaacaggctgagcccagccttcctcggggtttgcttccaggcctgacttttactcccctttctaagtgaggcagccatgactggccacttcatgtgctcctggagaagggcttgcaccagccgttttcaggaaagtcaagcagctgttgactcctgagtctgggtgaatttgtgtgaagagcataaggcgctgtttcttaaccaaaacgcttcctcttgcagtgcagatgggatgtgcttctccacaggaggccccacggcttccccacccctcagaggagcgccgtgcgtgcgtctgtgtggaggattggcagctcctgcagtcggcccttggtcctatttggcgacgcctctgccttccccttaattatacagtcatgagccgccctggaatcacggcagctccggatggatcctggatgccagaatgcagcctcagcacggggctgcaggacaggagtgagcgaggggctgcagagccggcggccgc

SEQ ID NO: 102724 - DNA, 418 bp, Homo Sapiens
  misc_feature (146)..(154): n is a, c, g, or t
ccagaaaacacagccctgcactctgattgacacaggactcacccactgttctcctgtccccgtgacttctccactgccctgaaatgccataagaaatttatcccgagcctgaataaaatggaatcaaacattttcctacaggctannnnnnnnncaataacttcctccccagataacccaaggattcaaaatggttttcagagcctcaccattgtcttcacttgacaggaaatatgtagacagcctttgttcccatggaaagtgtgaagaacatgaatctgacaaaccacacaggaggtaatttcctcttggcagagttttccacaggtgctgaatttctttaatttatttatttttgtggagagggaggtggaagaggatgggcataaaaagacgactactggctcatcatttcagt

SEQ ID NO: 102725 - DNA, 484 bp, Homo Sapiens
tgctagtaaatgatttgtagaaacttggttttctaagcatagttcttccataaccaccttttgttgtttgagcacaagggattcttttcctagttctatgtgtttgtttccctatatgcagtctttaaaggattacaacacttaaaattgaatggacttgtgtcaagctttttgcatcatacattttttgaaagatttttaaaaaagcctacaacttacatatgtagtagaatcagccattgctctgctcctggcatagagtcacctgttatgtggattaaatagttttaaaatacatatttgaagacctttgagaatgctttagtgtttgatttgaaataaaaggaaattttagcaaggattaaagaaaaaagctatcagctgtatgttaagagagactcttactaacatgttgtaaatattacaattcatgaaatgttattgtaagtctgtaacttaattttttccctgttttagttataca

SEQ ID NO: 102726 - DNA, 464 bp, Homo Sapiens
ctactctgggaaggtgatctctacggccaccggccacagggctccgtccctgagctcctcacgccgcagtagctaaagcacccttagctgcaaggaaaacacaggtgggaaaacagtttcttaatgaggaatatttgtaagctctgttggcgctcagcaggttgaagattgacaatgaaccacctaagggtgcagatttagcctcagggtgcagctcggatccctgggttcagcgaaggtgggtgccgaagcccgaactgaattggcacgcaggtccctgcccagcgctgaaccgcgcctcgggaaagactgaaagctgcccgtgccgctgagcatgcccagtttctgcctgagtccctggagggttgcaagattgggggttgatttggtctccaggtgccgtaggctgcgaggaagatgagacggccaaagatgagaaggccaaagattgcgagcgactagta

SEQ ID NO: 102727 - DNA, 461 bp, Homo Sapiens
tttgtcttgagaaagtctttttttatgtgaagtcctatattcatgaaatggacatgatcttacaaatacacatggaaaataacaactatcatttgtagaatcctcagcatttacaaaatactttttcacacattatctcatttactgtaaagaatttcttaactaaataattctattatctataagagtataatgcagatgtttactctaaaattaaagtacaagtatccaaactgtacctacattctttcaactaagaggatagaaaattgttttctgaattgttgttatcacaaaatggtatctatcattttaaaattatgatttgaaaaataaaaattccctaaaaatttttaagttttttagagttttcctcagaatgtagattctagctaagcattaaagtttaaaaaatgtctatctgaaatctctgaatcattctaaaatgagaaaacaatgta

SEQ ID NO: 102728 - DNA, 528 bp, Homo Sapiens
tgtgaccaagggtggtggttattgtcttgcttgaataattgacattcaaagttcctaacacagttggaatttctgcgttccttatgctgcagtctacttagcttcttccgtccctgctatttttggtttccccttttattcttagccacattctaatttctaggaacataaccaaggctatctttcttaggtttctatttaagaactcaaacatattcttccattgaaaatcacctaataagctgacagagaaacccgttaatctggtacataaacatctagtttctgcttattttcaatgacttgaaactaaatatccagttccatttttggtcatctcttgctatcatagttcttccaataaatttgttataattaccaccaactggtccttactgtacttaaaagcggaaatgtctttccactgatttctacttaggacttactccacctttaatatgacatatgacttttacctaatggatgtatactgtccctctagcaaattaaaattttctattaagtact

SEQ ID NO: 102729 - DNA, 475 bp, Homo Sapiens
  misc_feature (403)..(403): n is a, c, g, or t
ttttataagaaagatctttggagctttattagcctttaaacaccactagttgtttatagacacagtagcagggggtccccggttcttttcttctttgtctacatgtcttctttcttaatgtcccagaacaagggtgtggaaaaagcctatacattctgactccactagagtgacaatgtgatcttcccaagtagagacaacagcggatgctaatgggtgagctcgtcggtaatggcctctcgctcaagattttagtgactgcggtctcctttcccagaaggccccttgcactgatgctgaaaacagacttgcgaagtttttggtcgatgtatttgttgtcctcaattgctgagcgtttggagtggtcgcaggaggaggaagaggtggtcgggaggcttctcangaggcaacatgtgtcctgttgctggcggtcaataaactgcttcataaaactctccctgattttaggaactgt

SEQ ID NO: 102730 - DNA, 172 bp, Homo Sapiens
caaaagtaaatcctatgtctgggaggtaacccgatcaccgcggaaagaacgccgacatggaaatcttaggattggtttctcgttccaggaagttgcgctactttgggcaaatcacgtcacctctgggactgtttctaatcagaataaagaaagggctggaccaatctttcag

SEQ ID NO: 102731 - DNA, 498 bp, Homo Sapiens
atttggagcattatcatatatatttccccaactctggttcttccccatcaccagtaagtcctccctcaccatggggacaccttgttaaagaggaaactcagtcacattccctggtctgtttaaatcccttgagcatccaccccttagccacttcaacagctttcctactgccatccctccttataacccccacttcagcctaaacataccttataactacactcatgcttctaactggattaccactttccctctacaactactcatatttaaagatgctgttcaaaagtcaggtcatctgtaatgttttattctgtaatacccaggcaattagttgctgcttcatccgtttttctctcatagtacattgcatatttccttatcatagtttatgcaattgtattgtatcatataactgtttattaatgtatatgtcttcttctaaggcagaattatctactgccacatagtagatgctaaataaatgtttgctcaatg

SEQ ID NO: 102732 - DNA, 544 bp, Homo Sapiens
atatgagtaaaagccattgctgccagatgagctccctaggctcagttcctggaagagagacagagggtcgctactcttcttggcctgctcaggagggggcctgggctttggaggggcccgcagagcgctggcataggacatggcgggcttgccccccgcagagctctgggggctactgctattggccgactccgcgatctgcttgttaggcataaggggtggaaactggccaagatgctgcagcacactgtagttgaaggaactggacacctcgaggttctccgacttcagttgatcctcagggggtttgacagtcttgggtggcgctatcaactctctgggctgagctgtcctgctggatccattgcacggaatgttctgataaggagtagatgaggtggtgtttacccaggactccggggatgaaaagttgaaagaagattggttactgtggtcctgaagctctttacactgagccagactgtcttgaggagtgcttacttcttcagacaggttgaactgagctagatgagttcttctctgt

SEQ ID NO: 102733 - DNA, 190 bp, Homo Sapiens
tacgaacataacaactgcttcactgtcattacttattttccaatctaaaccctccacaagagtctagaacaccatgtgactcaaaataaacttttcaatcaattacaaggccattgaaatggaaaatcttgatttttaaaaatgttttaatatgtttccttaaccacattgtggcaggccaggtctcact

SEQ ID NO: 102734 - DNA, 445 bp, Homo Sapiens
agataccacatgtggatggcttgcactcatcagaagagctcagaaacttaggttgggacttctctcaagaaaagccttctaccacgtatcatgcaacctgacagtagctatggagcttgtggtggacacaagtatcagcaaaatgcagaacagtatggtgggacacgtgattactggcaaggcaatggttactgggatccaagatcaggtagacctcctggaactggggttgtgtatgatcgaactcaaggacaagtaccagattccctaacagatgatcgtgaagaagaggagaattgggatcaacaggatggatcccatttttcagaccagtccgataaatttcttctatcccttcagaaagacaaggggtcagtgcaagcacctgaaataagcagcaattccattaaggacactttagctgtgaatgaaaagaaagattttt

SEQ ID NO: 102735 - DNA, 543 bp, Homo Sapiens
  misc_feature (477)..(485): n is a, c, g, or t
cgctgaccagggggggcctccagcagcccccacatctgccagcggggccccacgcacactcgcctgtccctccagggatcaaaagcatccaaggaattcacccggcgaagaaggccatcatgcacggacgaggcagaggagtggccggtcccatgggccgggggcgcctgatgccaaacaagcagaacctgcgggtggtggagtgcaagccccagccctgcgtggtgtctgtggaggggctgtcctcgtccaccacggatgcccagctgaagagcctgctgatgtcagtgggacccattcaggtagccgcctgggggtggcatctgtgccacgggtagttgtgtcccaagacaaagtcatttcttgatttaaaacacagtgccctttgtgttggctacttcatattaaaataatacttgggaagtaagacaaataacctgttgtgcatacttagtatcagaacatttgccgccaacnnnnnnnnngaaattttcagattcttagttataaattttaagaaataaataccccagctgaacagaa

SEQ ID NO: 102736 - DNA, 443 bp, Homo Sapiens
tcaaagatgacagatgcctggtagaaagtgcatctttttcatctttattaagaatgatatccaaacatgaaaatatgtaagatctggttaggagcagggtgatcatacatcccagtttgtctgggacagtcctgatttacatctgttgtcctggtgaaattactaatgctcccttttcatctcaatgtcctgatttggatgaatacaattacatgggtcaccttagtaataagggcaatgaaaataagtgtggcattattaaaaaaagagcatctatattttaaaagaattgatcatttctaggctcagataaaaaacaaaatcccaacgttagtgggaacgtatacatgcgagttaaattactaccagtgattgtgaaaaacaagacaatagaaaatgttccagaacactgagcttgggcaaaaggctaaatttaaggcgta

SEQ ID NO: 102737 - DNA, 514 bp, Homo Sapiens
caagtaaatctgctagtaaagttcatcatacatagattttatatgttactattttcttttaaaagtgtgaaggtataaatctaagctagaacagggaaaactgaaagacatacgtaaataaatgcaggttttaagagttatataatagttttttatatgcttccacaaagttacccttcactaaaccctgtaagataaatgcaccttgctgagttgaaggcttttgtgaaggctatgctttaggggcaagaaggtgaagatgaagcaaggagatgagaagaaacaatagagccaggtggctgatctccctctgtaacattgtacttgagggagctgtttgcacatgagtgtctcatccatctttcctctgcatgctctgagtcacacaccataaatctccctctcagtcttctcaggccttgcatatctagaatctgatatgcatataatataacttagaaattgtatgcttcttcacagtgccctaaaacacatagtgacataatccttgact

SEQ ID NO: 102738 - DNA, 390 bp, Homo Sapiens
tctgatgttgggcccgggttggacaagcttgtcctaaagcatccttctccacaggtacagtctgcctggcagtcaactgtctcctgggctagacacacaatatgaaagtcctaacaacagtcaagacaagagtccagctcaaagtggtactgttcctaacacattctccatgtgtcaaccgtcttcccacaagtctgagtttacatccacttgaatggctctaactttctgaaacccaaataattcaatagaagaccccatttttaatctactctactttctgcaacttagtttatctactgaatcaggggagactgacttatttggttcaagacaggttaaaagagactctaggacactccgagatgaagcaagccacttgaaccctcc

SEQ ID NO: 102739 - DNA, 181 bp, Homo Sapiens
aactccaatgcattatagacataagattattaacactttaaggaaaacataggagaatattcttccaaacttaggataaatgctaaaaacattgaccatacaagcaaagattaaattagcctatattaatcataataactgtttatcgcacatgtaccccttaacctaaaagatgaagaag

SEQ ID NO: 102740 - DNA, 513 bp, Homo Sapiens
cagccaccttagcaagtcctgggtttgtcttcagattctgctgctcgcccattgcatggatcgggggttactttgtaaaccacgccccacgtggaagacgtacttccagtgtttctgcttaatttttagatgtttgttaattgctcttggcctctcattaatcccctgtgggtcatccaggaaatatattcaccactgtctgttctttgagttttcatttccaggcatccgccctgcctggatctcctcacctgccaggaacttcctctccacaagccggccatcccagcaaaagttctaacaccaaaggtctggcaactagcctgccatcttgtgcctggagccgcctgcgtgccacctactcccgaagatgggaaccttgttgccagttgggcagatgcggggcaatcctgtaccaagaccccattttaccacctgctttctcagaccactctggaacccactgtctcagattgtgtcctccaggaagcagaccatgagagggattagaca

SEQ ID NO: 102741 - DNA, 471 bp, Homo Sapiens
tttttgggtgccatggtgatgaattaatgaatcttttgcaaaagttgaagtgtttctcccaggagaaggacctggttgcagagaccacactgccttcctggggccctgaggctctaggagaagctggaaagcacaggtgggggtccatccagctgtttccaaactgcgggttgtgacccattcatgggtcagtaaatcaacttcatagctcatgacctggcaagtgcagggccctcgacagatgtggcttagttcttctctacatctacgtttttccatttatggaatattttcgcatccactgtgttctttgatttttgaggaggaaggttcctgtggagatgaggtagagggcaagtcagagtttccatctgggggtgcctgtcctcagggaacagtagaagggaaggcactggtgaaaaatcaggaccctcagaccagctcatgcaggctgagcagagaggggaccac

SEQ ID NO: 102742 - DNA, 506 bp, Homo Sapiens
gtactgggttgaatatcgtcccccataatttcatgtccgcccaaaacctcagaacgtgaccttatttggaaatagggtcatgtagacatgattagctcaggtgaggtcatattagatagagtgagccctaattccaatgactggcgtcctcaccagaaggccacgcaaagactcagagacaggaagggaggccacgtggccacacaggcagagactggtgtgatgcagccaccagccaagaacagcggcagcagcaggagctggaagaggcaaggaagggtctgtccccggagcctgcagaggaagtgtggccctgctgacactttgactttggacttctgacctccagggatgtgagagggtaaattcctgttgtttcaagacacccagcttgtggtaccatgttacagcagccccaggaggctaatataatcctttcatttttgttttgtgttatgtttagacttatgaatataaaacaaatacaataaaaaaataaatgatct

SEQ ID NO: 102743 - DNA, 409 bp, Homo Sapiens
gcggccgccaacttttaatatgcacctggtgttctgtgattgaagtcacctgagctgtaaatacagccacaaaggctgattatcttacacttgttgcttatttgtgttttaatttccaatacaccagaagcttcctacaccattatatattgccattataaattcaatcagataggtaatttcataatagaaattcctgtgtttcatggtgtcggctatattgttcattcagattaatcctctcccttgaagggctgaaaaagagctagggaggctattccattagtagcaaaatgttgtaattcactgaaattgctgttaaccaaaaataagtaatacaacatgcagtttgtgtgggttgacaaatgaaacagcccttaaaagggctacttcttaaatgttctcaatt

SEQ ID NO: 102744 - DNA, 535 bp, Homo Sapiens
ttcgagtgaagggatcacagttcacagaggctcacaatctagagaggaagaaatgacacacaaacaaatagttaaaagatatgtggtaagagctacacaaaagccacagagcaaggagctactggctcacagaagagaaaccacctgactatgccatgagatgttagggcgggcacatccaagagatgacaaacttttttctttagtgatttaaaatttcaaaagacagcttcctgtgaatctgtaattatttccaagtaaaaagttttttactacttcaaaagaaagggatatagtctcataaacatgttgaacaaaataagccagacagaaaaaagtaggctctattttatttgatacacaggcaacattagtctatgctgttagaggtaacaaaggtagtttctctggtagaggaggtagtgaactggggaaggacgaagggatttatgttgtgacagtgatattctgattactgatataggtattagttacctagtggtttcagtgtgtaataatatatttgagccatatg

SEQ ID NO: 102745 - DNA, 504 bp, Homo Sapiens
tgaaagttgcaaaattacttgccaatgtttgggtttctggtacattctgagcatagcagttggttcagtgcagtgtctgcttaccagtgcactgccagggtcagggatggctaagcctctcaccctaggagcgctgtggctcctacaattagcgcaggcccagagggttcagaagggacctcagggtgattctggttacaataaaaagcagaggggaggatctgttttcctttcctttcctttcttattaagggtatcaatttgaccataagacaaggctgtagtccagaacactcctctggggtgcggagcttggcagcttccctgccctgccctgcccttgtaatgggacctctcggttctctctctcagcaccaaaaaggttgaaaactaaagcgagagaggaaaaagaggaccgaatggggataagggaaggaaagaaaacatgcaacttccaagtgtgccccaagacaaagttgttttctgatgcaaaatgcccggaac

SEQ ID NO: 102746 - DNA, 440 bp, Homo Sapiens
gaaatctaaaatcctggctaaaggatttgaagagagtattctttaggtggcttcctagggttttcaaggcaatacaaataattttcatgggtaggaaaatgcatactatatacatacattgcttttctctgatttaacattaaaagattgaagattgcaaatctaatctctcaatttagaataaattaaaggatttatttttcagccaagcaaataattatattgaattaataggtaacaaatgtcattagctgacaaaagatagtatgactagattcagtaagtatgtaaccatgtaactaacaggccattaaattaaggcccttataggtgcgtgtggacatcatttctgtacaatgtcatgcacctccacccagcaccttcatttgcctgtttacagagataccaatttcccctgagtgactcacggtgaatactaa

SEQ ID NO: 102747 - DNA, 297 bp, Homo Sapiens
tttcgagtgaagcctcaggtatgatggataggaaggaataagaaagctgtttgagaggagaataaaaggacttagctactgattggattgttggattgggaaagtcaggagaagtaagggtttttgttttgtttgttgtctttatttttatggttgataccaatgacattcagtttgtgtaaatccatgaggacaagactgtattttactgctgtatccctagtgcagtgtctgaaatatggtgggctctcaatagatatttattgaatgacatctggagttcatacttcactcgaa

SEQ ID NO: 102748 - DNA, 452 bp, Homo Sapiens
tagggactaaaagactactttgactttgtgtttgtctaataccttctttcaaacattcgcatgtccatgcttgcttgttgcaaattcgaaacaattttatgtttggttttggctttgtggggtgtctgattaattgaaagtgagtggaattctggagaatgagcaagaagagactaggctgaggataggagtgagagcacacacaggtggcaccataaatctctcctaagctgtagtcagtgcacaggaaagtccatggcctaaaatcggggttatgcacgccccccaccgtcacacacacacgtttatgtcacagctgccgaggagcactctgagaacctttaatacagccgttacatgtgcatcctttaaaaaatacttcatgagtctttatgccaaataaatgtttccttcgcagcccaggccactttctttactctaaaccccggtac

SEQ ID NO: 102749 - DNA, 315 bp, Homo Sapiens
tatagaggcactccccgtttcgagtgaagccctgagagatcatacacatttttcacttgtgggggaatgtccttaagtagaaatagatggtgatttcagatatttgatccaaacctaacttcctcatttgaattgagtatgctaataactattcttgaggctctggaactaagtgatgacatttcctgtgttgggaaatcagcatgctgatttctagaagcagagttttacaagttgaacagatgaaaagggaacaaaacaataaacacaaacttagactgaagggtcatttttctagtccaaattcactcgaaa

SEQ ID NO: 102750 - DNA, 330 bp, Homo Sapiens
tccatccctcacactgtgcccatctttctgaagtaggaatctgatcacaccaccctgctaaaaacactctggttctccccacggcatgtggtgcccttgtatagctggcaaagccttgcatggcacggccccagcctgtgcttcaactcaattgcccgactctctccagctctgctgagccacctaagtcacagatggtttctcctctcatctctgctctcttccatgtgccatttctgtggcttggaatgttcttccctcattctctttctggccctttcccgtcacaccttagacgtgcatcttcactcgaaacccggggatcatcta

SEQ ID NO: 102751 - DNA, 436 bp, Homo Sapiens
  misc_feature (231)..(231): n is a, c, g, or t
agcaggttaggtaattacagtaagtttacatggctattaagtgttggagctgagatttgaactcaggctgacccgagatttaaacccaaaacacctgtacttaactaccaggcactgatactcctagtttaataaaattgctcgataattgggatactaagagccctaacgtaaacggaagccatgctgaaagagatttatttagatagatgagcctgaaagtgcatactnggattgcaaagggtcaacgcggaccttctgcagatcctccgagatacggagtaaacagacggtactggagtctggggtagttcagacagaaacatcagcacagcagcagccttggagaagcagtatgtatttagctgcaggctgtatttagtcctagaaggactgcacagaacagagttaatgcataacaactcagagcttagcc

SEQ ID NO: 102752 - DNA, 413 bp, Homo Sapiens
gcgttttgaggattaatcctaatgtgtataagatacctaacacagaagatgacatgtggggaatgttcaatagttgttagctgcagtaatcaccccaacatatgacatcttttataaaggtatgtgattatccccttatgacaaattcctaagaataggatttgctcaggcacattgatacggacgttctcagttatttatttgcatcaccaaatagctctccagaaaagttgcagcaatttatgtactcccacccaccgtagaagaaggtgctctggtccctatgccctcactggatacattttgtcaagtcttttaatctttgccagtctgaaaggcaaaaatgtcatatttttctttttctttcttggctcactacaacctctactatcctgggactcaaaaccccagcg

SEQ ID NO: 102753 - DNA, 354 bp, Homo Sapiens
ccagaggattcatctcgacacgtcagaacatcaacaagactcttggtctcaggtcatcagtttcctggcactcctcctctctctagctgtagtagcagctactgcttgaagacaacctatatatcccaggcataccctctacacgtataaaaagatgtgcaggtgttacagaccacctacacctaattcacttcctttctaataagatggatggaataactcggaaaagggaaaggagggattttgagccgcagttgtctaaagaattattgattcacagggatctccaagattatgcatttgaagagttttatttctccaccctgacgtgtcgagataagtcctggagtcagc

SEQ ID NO: 102754 - DNA, 316 bp, Homo Sapiens
acgtgcagtgactaggggctgatagacgaagaatagtggaaaggaaagttcttgtgtaagattgtgtgctgtatagagtagatagaaataacctgttaaaaacattttcttccgctttgaaaatattttttattgctctaagttaaatatgattgtttaaaaaaattgggcaaaaggctcaagtcagtaaatcctatcagagacagttcgcatattttttaaacaaattattatgtgttttccacatttttttcttgctttctaacttctatttctatttctaaaagtttaatgtgaaagggacagactgacgtgt

SEQ ID NO: 102755 - DNA, 321 bp, Homo Sapiens
tgttgctgcaggtgactccgaggattccatctcgacacgtaggaggggtgtaagatgaggacaaacaaaaagagaatcagcatatttctgggttatggaggggatgagatgaggaaaaagaaatacagcatgacagttaggagcgcagattttagtgttaagagctcttgttcaagactgtgctctaccactatggcgtgactctgagcttgcttttcaactaggcctcagtttcatcaacttaaaaagggataataatataaggaaatggcttagtatagtggcatactgaaaacgactaaaaacaaaacaatccaggct

SEQ ID NO: 102756 - DNA, 587 bp, Homo Sapiens
agaggatccccggggagtagtccaagtaacacatctttctgaattcaagcttcacccataatacgagattacatctttatcatgttcccaaaaatggcagagtaaaaagatcaaactcttcaaatttgtctacaaacaaatcatggcaaatgcaggcttttcaacaagagtgcattcaacatccctgtttcaccagcctcaccagtattgtgtatgcttagttattttccactgtatcaaattgactatttcaactttaattccacaggttagttcacatattgtcattacataccagagcacaccttcatttcaaacacatcaagactcagtgaaatgtcaattgctcctacaagtggaagacttacctgaaatgctatgagatagcacaatgcagccagctcagaaagagctcgccattgaacattactactatgctgacccatcttcaaaaagcagagaaccagcatgcatgtagaaatgtcctttcatttctaagaaaagtaggcttgacagttcatcatttccacccaaagatttcacagactgaagagcactatcaaaactttgcagtaattctctacttt

SEQ ID NO: 102757 - DNA, 540 bp, Homo Sapiens
  misc_feature (241)..(419): n is a, c, g, or t
cgaggtgacgggagtagtcaagctaagcatggacactgtaatatatcttaatgaagacatatccaatgcagcgtcatctttattctctgataacagccattatgttattcacaggatatatgctcagtgccaagataagattaagctgcttttaaaagtgaagagtaaggattaactagtgctttataaatacgttctaaaacatttgaccttcagacacagagggcaaaaatagtgattnnnnnnnnnnnnnnnnnnnnnnnnnnnnnnnnnnnnnnnnnnnnnnnnnnnnnnnnnnnnnnnnnnnnnnnnnnnnnnnnnnnnnnnnnnnnnnnnnnnnnnnnnnnnnnnnnnnnnnnnnnnnnnnnnnnnnnnnnnnnnnnnnnnnnnnnnnnnnnnnnnnnnnnnnnnnnnnnnnntaaaaataataaaagatgacagaagaataggaaaaacaagaaaggaaggcaagtagtagacacaatatcaaactgctggaatgctttttttctagctactatccttttggactttactccg

SEQ ID NO: 102758 - DNA, 501 bp, Homo Sapiens
  misc_feature (78)..(126): n is a, c, g, or t
ccgggagtaagccaaaaggatagtagctagaaaaaaagcattccagcagtttgatattgtgtctactacttgccttcnnnnnnnnnnnnnnnnnnnnnnnnnnnnnnnnnnnnnnnnnnnnnnnnnagcggcaggttcttgctctgtcacccgggcggagtgcagtggctattcagaagtatgataatagcacactacagcctcaaactcctggactcaaatgatcctcctgcctcttggcctcctgagtagctgggactgcagatgaataccacctctcccagctgactagtgtgtactaatcactatttttgccctctgtgtctgaaggtcaaatgtacaagaacgtatatataaagcactagtaaataccttactctacacttataacacgcagcttaatcttatcttaggcactgagcatatatcctgtgaataacataacggccgtcatcagagaatacagatgacgctgcataggatatgtctaactaaagacta

SEQ ID NO: 102759 - DNA, 478 bp, Homo Sapiens
aggtgactccagaggattcccgggagtatgtaacagagagataagagtcattagtctcacagaagcagaaattaaaatagcaatgagagctgagtaatgcctagtgttggtgggaatgtggtgatgggggccatggaaaacccgcacatgttatgaattggggagtgaggcttggtgcaggcctttctgggagggcagcccagtaaccccacccaagggtgtacaatcaaagagattcttccacaggtctgtgaggaacatacacaagaatgttgtttgcagtagtacgaatctggagccaattgaagtggctgtcatggagtaatggctaagtcagattccacaccatggaattccatagagcacagagcagcaatgggctcatccagcaacacaaataggcctttcaaacatcatgctaagcaaagtaaagggaaaaaggtaacatggcaactgggaaaacagagagacaagggat

SEQ ID NO: 102760 - DNA, 550 bp, Homo Sapiens
ctagtccaagagagaaagagaccaagatagaaagccactctgccattaactgagtctacaaagtcacacaccatcacttccactttatgctattctttagacgccagtcactaagtccagcccacactcaagtggaggggaataacggctcacctacttaaaaaggaagagtatcacagaattcatggacatatttttaaaccaccacacagacacattaacttctagtctccttatacatttggaaaatatattcctacttggtcatttcacttagcttatagaagtgtccaccttacagaaatttgacatttgtgtgtagtcccaactgccagactcttgcataagggcttcttgaacttgtgggtctggtacagaaaagcctttttcaccccctaaggttcatgaaacatattctcttgactatttggatggtatttaaatatttttcggtctttattacatctagaataggtaggtatatagtgtgaggtaggggagccaaaaggggagccaatttttttctacatcatttattgattaatcccat

SEQ ID NO: 102761 - DNA, 415 bp, Homo Sapiens
ggtgactctacctgatcctttggagtagtccaaaaaacaccactcagtcaactcaagaaatcctcacccgacattttcaaattccacatggcagaggtctccagcattcaaacattgctctgttttacaagtgagaacacagtaaatatggaaggcagtaacagggatacatcacctaggtgacagcttggatgtgacgggactcttagcagtggtacagagacaggtttaagtatgtaagatctaggacgtcttctgggcatccttccatgaccagaagctagaaaactttgggaaccattatctgggaattctgaaaatctaccaagaacacggaatggcaccgatacggacccaggatcagttcagggactctgcttcctccccggtgacgaccatcaaccccaaactctcg

SEQ ID NO: 102762 - DNA, 518 bp, Homo Sapiens
taagtccaacaaccacactccaaatcaggatttccacccaggtcttcctgctactaaagggagcatctaacatttgcccagagtcagaagacctggtttctgcttctgagttgtcagctgactccatctggagagcagatgacacctcttcagctctgctctgggtttctccatctaccaaaaacaagaaccagaggtgttcttcagtttatatttaaatacttttattgctgcaagcacttccttctcttgactctgaggaaagtcacactacaagtactttcctcctctatcatcattcctctccagccaccccccacataccaacggtttcctctcatgtgtccttgagataaattcaattgtgataactagtcagaacatgggtcatgaacccagcggataggaatcttactgctaaacacgtttgttttcaatttcatggttttcttcctcctttcaccagttgacacgaagcaatcattcatttgactactcccgggatcctcagggtcacc

SEQ ID NO: 102763 - DNA, 670 bp, Homo Sapiens
cggagtaagtccagaaacaatcgccataaaccagtgcaaaatgtgcaacagaatcaataagtgtgtcttagctctgagagcccaaattggtgatttcttctcctgttcctcagttgggcacgtgccccatccgttaatgctggttcgcaccacagacagaaacattcaaccaatttgtagcaggttatttttacaaattcataccagaatgtgtacaagggacagggaaaaccataccgaatgaatgataagtgatcagtgcttaaagtaaatacaagggacagcacgggcaagaatccacagtttcaataaatacaagtgaacaagcatggtgtgtctcaactgggtggaattagtctgcataataattcagcatcatacaaaatctagcagggctgttgagcagtgattggcaaaaacgttcacaataacttatgcccttgagcgagtctgcatgtaacacattctgtggtttcaaaggtgtcagttctctgttttctcctttcctggccatccctccaggaagggaggggtgcagctgggccggcttggcggaggcgccccgtgaggaaggacgttgcccaagagccagtggtcagggtccagtgtactcaataccaagtggcaaattgggactaattggactactccgggatccttagagtcacct

SEQ ID NO: 102764 - DNA, 320 bp, Homo Sapiens
gcattctccctagccactgaagcaactaatgaatgctagctccaaacctagtacaataatatataataatgaacactttgttattcctatcattaggaacggagtcaagtttgcctgaggcggattctacctcctaaacacctctgaaccccacacccctcttccccttctccactgtgaccttcttagtctcaaggtcatcatctttcccctacagtattagaacaagctccttataagctctctaccttcattttcctgcctcctatccattttcttagtttaatttttatggttcttttttggacatactcacaaaa

SEQ ID NO: 102765 - DNA, 464 bp, Homo Sapiens
gggtgaggtgatctagaggatcctccgggagtaagtcaattttgaaggactttacaagcttaccatcagacaccaaaatataaaaatttcaggataaaaatctcagtagaattaggcagtattgttatccaactgtgggataacagattatctatgggatatcagataacaaaggggatatgtcacacgaagacttatagcaaaaagtacaaatggcaatcaggatcaggctgtgagaatgtatccacataaatgggtacattaaaaagaatgataaatagggcaggcacagtcaatattttaggaaaaatatttgtttaatgcaaacagaaattaccccaagaaaaacatgccccatccataatcattagcttcaccatgacacagaaccccttcatagaatatagacgcatgccttatacacaaaccaaatcaggaggctctatgtatcacagaaccaaaga

SEQ ID NO: 102766 - DNA, 390 bp, Homo Sapiens
agtacgtcaaggagaaatgaacagtggatgaagggaaaaaatcttaagaattacactgtgaggcagccccatgatccacctagcccaggattctatttgtgtcaaggaatgcatttagaagagtgtgtgtttatcttcatactgccaaaacttgagcaaaatgctggtgttcccagttggccttaggtatcactgtatcaataggcttggctgccaccatgtaaaaatggacaaaaagcttagaatagacaagccgatcttgtttatttgcctcacacacgtgtgccctgatgtggacaagaccaaaataaggaacaaacctggaaatacaactaagtttctaaatgccaagtcaagactctctaaacagatatgtttgttgttgttttt

SEQ ID NO: 102767 - DNA, 395 bp, Homo Sapiens
tgctaagttgaagttaaagaaagctgaagtttcattataccttcgtatattgcttcttttcctttccttagttctgttactagctccgttggttagttaatgtaacataagttctgagtcacctcagaccattgccttgtatgcttgcctctgtaataccttgtgggaaatgtaaaagatcaatgacagatagccttttcacacaattattttatgcctcggccctctaagtgacacaagttacccctagcactcatcgttgtgatcacctgcaagcacaagacgctgattttctgctcctatagcctgccaaccttgtggtacatgggactacgtccgttaaacaacccaggagcaaagttgactactcccgggatcctctaggtcacctcaac

SEQ ID NO: 102768 - DNA, 281 bp, Homo Sapiens
acctaaggagtagtcaaacagagctgaatgctctaatactccacacaccttaccctacgaacataagtaaataacaaaccctttatctctgactccagttcagggctcatgtctagcacctagctaaagggaaaccaaatcataaactcaaacttcctgaccaagaggcagaagaacaaatacagtccaagaaaatctgcaagtggcataaaaatgtgaaggctatatgaagggaaaaattactctcttcaatgaaccactcttgtacatgcgaaggccag

SEQ ID NO: 102769 - DNA, 297 bp, Homo Sapiens
ttgcttggtgctgaggaaggtctcaaagtgtacacttacaatgtcatcttgactggaaactctgcttgcggctttgttaaaaaagacaaggttttttaaggttcagtctacatgtcaggtgttcatttgaaagctggtaaagggggcaagatctgctgaacttatcctattaacaaagctcactaactgaaggacaataggggaaagtacaccactaattacgatctatatattcaataagcatatactgaccatctgctttttggactactctaagatcctgtagagtcacctcgc

SEQ ID NO: 102770 - DNA, 287 bp, Homo Sapiens
gaggattacgggagtagtccaaatgtcagttttgcaatgagtcaacccgccttgcacacctcatggtctctattagtgagacctcattatctattagtctgttgcagaaacctcacccacgataatctagagatgggtatgaattaaccacaacactgtttggcacccaggatatcaggattctaaactacaaggcttatgcagacaaaatgtttgtcaaaatcttgaaaggaagtgaagccccaacacatggaggagggtgagtggcttacagagtgcagagtaca

SEQ ID NO: 102771 - DNA, 414 bp, Homo Sapiens
gtgacctaccgatcttaggagtagtccaatagtggccgggcaatggttgtcatgaaaaatgttagcactcacgatctgcactgtactttctcatgcataagaattaaaatgtgagggaaagatagaaattaggaatgactctaagcctttcatcaagaaaacctacaagaatataactacaactaataaaaatgaaagagtgcagaaagagcaggtttaatgaaatgaagcaaatgttggaaactgaacttgttaagtctgagcgcctgttaggcttccaaatggagatgcatagtaggctaggaccaaagaatatggagtaggaagccgaagtctgggcttgcagatacaaacgtcagaatatgtcagccatcagaaactgatgacagatgggaattatatttaccatgaaat

SEQ ID NO: 102772 - DNA, 411 bp, Homo Sapiens
  misc_feature (182)..(182): n is a, c, g, or t
gcaggatcttgggagtagtcaccggggcgggggttctcaggagtacaagcagtttggctgtttacaggaagggaccatgaggttcaggctacagcaaagtcccctgagtggcaccggaaagggggtgaaaaggtggtgggtccacagaattggcaaagccctgggatttccaatgacgaatntcaagtgaggaagtgctgggaacgtgaagatcgcagagttgtgggtgcctgagatcagggttctagaggctaaccctggacgagatctaaaaagggtcactaaaatgaggtacagaaaggcagctggaccagaagaagtcaagaatggacaggccaggttgctgggtggatactctgagaagagaccagcagggttggcggagtcttcaagggccagccaggcttccat

SEQ ID NO: 102773 - DNA, 173 bp, Homo Sapiens
agtagtcaatcaattcactgtttctaaaacataccgaactcattctcacctcagtgttctggtattcctgcaacttggaacataattcacttctccctccctgcacactatcttcaggctcagctcaactatcagccttcatgagattctataggctgattctcatttgtgat

SEQ ID NO: 102774 - DNA, 521 bp, Homo Sapiens
aaggactcgggagtagtcaaaatttctttctttccccaattggttcctggaaacggggcaaatggattggcatcttacaagtgagaatatgacagggtttactgccattgtgggtagtagtagagccagaactgggaccagtcttcttgagttgtgttctatcccatatggcctctgcttctgtcctttttcaggcagaatatctccccatgcttttagacctaggaatctgatcttttcgtgtaattgtgctgtcttcttttccaaattagagccaggtggtcagctttaaagctgtgaagatggtggaagctaatgtttctccagatactgctttctgacctagagccctgagtatttttcctatctcccttcctaaccttcttcactgaatttaagtagcagggccatatatggcccatctatacactttctctttgcagcagggaatgtccactgtatcccccgtggtagcaagcaattggggcttttaatagcaaagaagatcatagggtggatgc

SEQ ID NO: 102775 - DNA, 353 bp, Homo Sapiens
tttaaatattgtgtatgaatattaggcgccctaaataattcgaggaaagaacttatatattagaacattaacattgaatggagtagagctacacatttatgagggaataacacctgtctgcttataagcaaattcattgctgacgtgtataaatggcattaggttggttgtactgttcacattattttatataggagatgaaataaaaattccctaaaataaaactagggttttcttaggaaagaggaagtggggaatggatcttagtgggtcatgaacgagtgtcctcttctgcagtgggaccctgtctctgcagaaaagaaaagcagtagttgactactccccaggatccg

SEQ ID NO: 102776 - DNA, 294 bp, Homo Sapiens
  misc_feature (71)..(71): n is a, c, g, or t
  misc_feature (107)..(107): n is a, c, g, or t
  misc_feature (138)..(139): n is a, c, g, or t
  misc_feature (163)..(163): n is a, c, g, or t
gcgtaactgagacccagaagtgtaatatattcatacctagtgtccacaacagtatgaatggttgagtcacnaaattggatactctttactttctttatgtgattccncatgtaaggaaataattaaaaacagtggctnnacattgctgattgctctgagtccnttggatgccattctacggtgaaaggtgcagtcacagaaagaaagaaaagaaaatacaatgctgtggctcttagatagacctgggttggaatcccagctttgctaattgtcgctgtggtgttcttgactact

SEQ ID NO: 102777 - DNA, 508 bp, Homo Sapiens
gcccacaggatcccgggagtatgtcaactggaaaaagaattagccaatcttgtgtggggttctgtgcagcagctctgatgaagaaggacctagcacttcctactaggtacatgaattagaagaagaccttgaaattcttgagtgaggctgcatatgcaggtgtgcaaaacccattctggaattcttggaaagggtctagcctctttctcattcaccaacctatattagaagcacttgagggaaatttaccactccaaatccaaagcaatgaacagtcttttctggatgattttattgcctgtgtcccaggatcaagtggtggaaggcttgcaaggtggcttcagccagattcatatgcggatcctcagaaaacatctttgatcctgaataaggatgatattcgttgtggttggcctaccaccataactgttcaaacaaaagaccagtatggggatgaggtgcatgtacccaatatgaaggtggaagtgcaagctgtccctgtatctca

SEQ ID NO: 102778 - DNA, 316 bp, Homo Sapiens
tggcgaagtttgataaggactgtggggctagtactccaatcacagggactcaattagagtttaggaaaaaatggcctgaagttttcagggataagtgtcaaatttgtttccaagtcaacaaattcattgcacatctactatatcccattttcctgtaatccatcaactctcctagcaataagaaacgctgcattcaggcttttccatttacaaagatctccaggatggatctctgtcacaaaacctggactgccagtatcttcccaaagtcaaatttaagagatcaatcctaaagaaactatttctgtccatctga

SEQ ID NO: 102779 - DNA, 418 bp, Homo Sapiens
tcttgaggaccccatgccccctagcgggcaaaggccacactatcattctacagctgagtgttctgaaatcccagggagttgctcaatgtcacacaccacctgaaaaagccagttctaaagtctgaagacccagctccgaggtaacgtcccttccccatccgccttcataggatcacaggcttcacagccagacagacctgggtgcaaaaatcactgttatccactgcctgggaggttggaaaaatccatggtcactgagaatgcttctgcagctacaaaatgggaatgagaatgactctattttggactaacactttttcaataagaaagcagagtaacaaagagctacagaagtaaggagacaattttgcttggggtggagggaaatctcccccccgctagggggcatgggtatcct

SEQ ID NO: 102780 - DNA, 558 bp, Homo Sapiens
gacctagaggttaccggctgttaccctgaaggcacattagttaaggcaaagagcagcaatgtatacttttggaagtctacgctttgcaaaagccatttttggacatgatatagcaggtaggaatattttctgtccttgcatatgactctggcaggggatccagctccatccttcaggaagtagaaagttctattggaagtgagtatccttcaccaaatgtatagccaaaaaactataggcccatatctgaaagcttccttgaagcacctctggatttatgaaggaggcactgtttgctaagaccacacatgtttaattgctttcagcacaagtaaaatgaaaaatgttggaaaatttgtatacatgcttgccaatatgtggtgctttagaaattacaaataatatttcttgtattggcaagaatagaaactccgtatcttttaatataatactatttttggctcctggagttaagtcatttgaatatcctgtgcgaaatcatagagtcaggtttaccatgacagtttaaaatctgctacacactaatggaaataactt

SEQ ID NO: 102781 - DNA, 539 bp, Homo Sapiens
ggcgactctagcaggatctccgagggtctgttaccataagggtaacgcagtcatttatatgatatactaactacatatacctaattaacatgcaacacagtaatgatgatgcatataattatcgctggatattaactttctaaatttcatcttcagtatgatattaaatgctgatctgatatgttcagactaagatagtaaacagctcatgatgacagtaatctgctaacaaattttaagcataagaagaaacatacattatcacataacagcagatttccagagacaaacagaaagaaacaataagagaaaaatgtgatcaaacatatgggccatgacagctggctgtgcttggcattataaataatttaatcaagtccaacataaatgatttgggattattcataaattggcattaactattccatagctcttctccattaatatggataaataagggcaaaaacataaacattttttagcaaaataagccattcaagaaactatcataccaagaaaccatactaccacagtaccaa

SEQ ID NO: 102782 - DNA, 330 bp, Homo Sapiens
agcggtctgttacctgtctcgtcttgccaaccaatgatacaaactgagggctgaggctgtaccttcatggatatttagcctcaacttctagcatataattcctgacaaggacagtaaataggacagtaagtactgctgaaggaactggacacatgaaaacatacatagagacaataattcttgatccggataatattcttcaatcctatgcatagctactcgtgaaattaacaaaatagctctattaaaaattcctacctaagtgtatatagagccaagtatcaccgaactattgtcacattcttcccttagctgggtaaagaccgtcgg

SEQ ID NO: 102783 - DNA, 450 bp, Homo Sapiens
ctggtagcactttgaatagaatcgatttcattttattcaacactgtaatagcagagctatacctctcatgttgagagaaggtatcagaaggatcaatgaagactgagaaaagaaaaatgtatgagaggtagagatcactatcagccatgaattcacttagccagtatgtggttagcaaagtcagggtgttcagtcaatgaagctagcaacgtgatagtaatatagacatttgttttaaaagatacgtggtccacattttctctctagaagtaactggccagtgagtagtttcaaatagctgctttagagtagagcttcattaacattattccacaagtactgtagcttatagaaagtatgttcagcactagtatgttcaagtggaaactatgaaaagatttgcaactaactgagccagagactatgtagaggtaagccctcgaagtccgc

SEQ ID NO: 102784 - DNA, 302 bp, Homo Sapiens
cgacggtctttaccagagatctttgtgtatttggttccctcatgtatcctagatacctagaagaggggattgctcgtaatagatactccataaatattgattaaatgaatgaagcttagagacagactacatacataaagggtgaatttgactaagtgtatcagtaagtataggttagattatgctgccagaagaaaccataccaaaaagcctcaattgcttagcaatgaagtatgttctaatcttttgtcacccacagtgagttgtagacgattgttggtctttaaggtaacagaccgtac

SEQ ID NO: 102785 - DNA, 456 bp, Homo Sapiens
ggtactataaccacatgcaagatgggcttgctatgctagctcctccttcatcttgtagctgggggccgcctcactcccaatatagtagagataagtggcatagtgttgtcttcgagttagattagtatcatagaaggattcagctattttaactcctttgggaccttaggcgcttaggtgatgtatccaagatacttctgcttgctgtggccctggatccgtgaaggccttcaaggctgaagggtatgcttgtgccactctgaaaatctctttattttatgtcatggtgagtaaggccagttttctttgtattactggattattcaactgaatgcctttcccagagaatgaaatgcaaagattggagtcaccatagttagggagaaaggaaggctgataactcaaccttattttattctgactgctaaacagaattggaaactaacatcatcctca

SEQ ID NO: 102786 - DNA, 396 bp, Homo Sapiens
agaggatccccgagggtcttaccatatatgatacgtaaacatcgtttttttaaaaaagaaccaggtatacatttacataaatataaatatgtgtgttatatataaacctcaaggtttccacaagaaaagtgagtattagcaattaattctatttcacaactgagaaaataattaagattacattacttgctccaatgactctggatcaagatgtctacatactctagaaagacaaatataattagaaatcctctgttacattctgtaggtggactttttcttaaacctctgccccggaatgagttttggtttctagccccagatatatcaattcttggcccatatgtgatataagtacccttctgtcctaaattcttggcatcctccccaatcctg

SEQ ID NO: 102787 - DNA, 556 bp, Homo Sapiens
tttcctgaatttctcagcatggaccatgtgaacgtgggcagaagggagtgggttttacattcactccgtcttagtcttccccaaaaccctgtgagttagttgcgtgaacgtgggcatgtgagaaggagagttggggctagaccagcctggtattttggtgcctggacacctggtcagttccttctctttgacctgcattgtgtagacagaagctactttcatgcctggagctacacatttttatatgttgctcctggggtggcaggagagagcggtggggggagaagggaagacattcagactttgcctaactgcatccaagaaggctgctcctaatcaccaggtcagtcacctgagaaaatgatcagttatcttctttatcccctcccattcttcaaacaaagctcaattgctcagaacaagtaatgcaaatttggctggtgccagtattcctgcccaggcacctttgtgattagctcagccattgacaactatgcctgaggctcacctttttccgaacattggtcgataaatcttacttgacagaatgggagct

SEQ ID NO: 102788 - DNA, 546 bp, Homo Sapiens
tccgaattggagctccggtaccccggtccggttaccatctgagagggccaagtctctgaaaccacaaagatccaatcatgtgattctatcacagtattcccacaattagtgccccctataccaccaactgattcactccaccctttgtcagttctcaaatgccagcaaggccacatttcacagggggagggctcttcatggggaaattcctcagtaagcaagtggccctgtagtatcattgttctaccttgtaacctgccatctaacgaagagttttttgaatgtgcaatgatactaaaaaaagggaaatttaccgtgttagagttaagcactatatacatgaaattattagcacgctgttctggaaggaatgggttatttctggatgggttagcactatactgctgcagtttgcaaagcatgtgttctcaacccatctgccatacttgcctttctcctgatctgaaaccatttcaggcaacttcatcaactggttacacaggacagtagggaataatcactaaaaggtacagccgtcggatcctg

SEQ ID NO: 102789 - DNA, 528 bp, Homo Sapiens
aggatcttgtagggtctgttacgtagcagccaattaagactggctggtgaatcaatccaactttgacaataccccaaacattgtgtaggaaaagaatgtttgggatacttggtacttaggtttgctaagttttgggtaacttctgtttcctaataaagcatgaactaatcaatttggatgcactgggataatgactttatcgctattaaaatgaaccctattccaggttcagagatcatagaccacagaggtgtcaaagcacagtcctatctatccagctaacaacttgcccccatactctcttcccagtgtatgtttctagtttactcaactactttggtggtgcagcctttttcctggcagctctataattttggtaaatgagttcctgatgccttgaaagaccatatttccctgctactggctgttgaattcgttttagtcaacaggcaactattattcactggtggtctcttcatctgtattctaaatgttctctcttctttcaacagtaaggtctcagtctcc

SEQ ID NO: 102790 - DNA, 489 bp, Homo Sapiens
  misc_feature (101)..(101): n is a, c, g, or t
acggtctttacccttgggaagagctgctaactttacttttccgctgctgttggttccggttcaaagctcggtttgggaagtaagaggaggactcggagacntttgaccagagcactccaggccaaaggtttccttccagttcaggtctgtctcttcgtcccagccccgacttaagatcagaacctagatatttgaactagcccagtgaccctgtgaattctaattgcacagggtctgtactgcattgtaagacttggctcagatttatgaaccagaagcaatgcatgcacgcgcacgcaagcacactcagagaagggggcgatccctagaaaataccacatcgggctgtgtgtgctttggttgtgctgccacctggcacccctttgtcccttagagccacttttataatttccatatgttcatgcctaaggatggtgggagtcccaggtattcttttctgaactcatcctaaaattggtaacagaccgg

SEQ ID NO: 102791 - DNA, 483 bp, Homo Sapiens
actctagcaggatcttagagggtctgttaccgccatcatgctggctgaaaactttccagtttttaaatgtcatgcatgttttggctcaagaacgcttgggctgttgggggcatttggtagttccatacaatatttttttccgctgtaaaaaattacatgggaattttaataggaatagtattaaatctgtaggtcacttcggggagtatgaacagttttaacagtgttaattcttccaacccatgaatacaggatatctttccatttatttatgtcttcagtttcttttagcaatgttttatagttttcagcatacagatccttcacctccttggttaaatttattactaagtatttcattctttcttttttttgagacagggtctcactctgtcacctgagctagagtgcaggggtgcgatcacagcttactgcagcattgaactcctgggctcaagtgatcctcttgcctcagcctcccaa

SEQ ID NO: 102792 - DNA, 545 bp, Homo Sapiens
acgacctgtgctgggtgactctagacgatcccatttcgacacgtcagtagcaaatcaatgaagtgaatgaaagaaaaggaaagaatgagagaaaatataaatgtatttggccaaaatcagttggacatctgtgtcaaacttttacacaagagcaacagcctgtaccacagtttgccaaccctgccattcattaacaatgaagacacgatcccacattataatttcctaaatttacaagaaaaataatgcctttggcatcacagtctgtgccaaagtatatagaacaggcttccactgaaagttcactcatgctgttaaaatgctttaaatagtaaacagagtagaaaattaaacaaatccacagaaatcaagtactaagcacaaaacaaaaacttagacgtggtcttccagctccgggcactttctctttgcattatgaaccgggagaggcacggccatcatggacgtcccatggagtacacagagcagaagcggtaataaactgctgccctcctgacgttcgagataagatcctgtagatcacc

SEQ ID NO: 102793 - DNA, 230 bp, Homo Sapiens
cccagcattcgcaggacgtagaaaaggggtcctggaaacacccgtcacaagctttgtaagtaatacaactaaagtagaaactaaactaatatcaaaggctgaagcccagctttgaatcatctcaataccctgatctaatgaaaatgacctggaactaccaaaagtaaatagaaatcagatcttgaggaacataacattaccctaggattcatattatctctggagcttct

SEQ ID NO: 102794 - DNA, 358 bp, Homo Sapiens
ccaacatcgcaggatgtttccctgatggcgttgcccaggccttgaaagagccgggagcgatttcaaatgggctccgggctcgtgtcaggagcaggagctgcctttggtgggacacaggtcaccaaacctgacccacccaaatcttcagcactgacatcaccgccgaaaacgagaagttcgtttacgacaaggtctcatattcctgcttgttctttacctaaaaatctaaatttcccatgtgggtccttacacatctgtatcaacaaaatcacaattcgccaagatactgaaagcaccaacaatttctgagtttaaggagaagagacaaagaaatcaagacaacaggaagaaggatgca

SEQ ID NO: 102795 - DNA, 311 bp, Homo Sapiens
ggctcgctaccctacatttgcaggaggcgtgagacaccatgcccagccagagtttagtttttggtaaagggtcatatagtgaccgtttttggctttgtgggccacacggatgctctgtcccaaccctggctaatagcggcaggaaagcagccatagatagacaatatgtaaaggaatgggcatggtccttttccagtgaaactttgtttactaaaacgctaagcaggctataagttcgctgacttctactataaatcatcatcccctgatcttgtcggacttgaaagcccttgttatgcatcctgcaatgt

SEQ ID NO: 102796 - DNA, 268 bp, Homo Sapiens
gtcccaatcattgcaggatcgtgggacaggagagtctccaaagcatgatatgaaatcaaaagccaacaaattttacttcacagaatgttctcaatggggtaaagacaacataaaattaagtgctacattagtaaacaacaaaagttaaatatacttgaaacacatagagctactccaattactaagaaaaattttaaaaaactaaaaggaaaatggacagataagactaggcaagtcccagaagaaataaatgacttaacaaaatgga

SEQ ID NO: 102797 - DNA, 339 bp, Homo Sapiens
cactattgcggaaggggttacttagcaggcacagttggtatcaaaccctgcacattctccattcctattattaggataggcctatggctggcttctgggattgatttctggggccttcggaatattctgcctgtttctgtaagtctgagaccttgggccatgctatacccatttgaccagatacattaatcccaacaagggacagcctagcggggatgcctgtttttactctgatgcagcctggagcctgaatagctgagtcagtcctgggggtgctgcatgcctacatgactgacccccaataaaaaccttggacatcaaggctcaggggagcttctc

SEQ ID NO: 102798 - DNA, 436 bp, Homo Sapiens
agccctcatgcttactgcaaggtagagtgaaccaagatgcacctacttcatgctattggaaggcatcatcttcagtgcaaaaaagcttagtctcagacatttatcttaaggtgaaatcttattgcaggtcagtgttaactgatatcaatgtaagcaatgcaatacacattaacctcaaaggcatattcttactaaaagatgagaggaatcagaatgaacctgagtaggagtttggatgagaattcctgttagtacaacaaactcaggcattcttattaaaaccaactcctcatagcttattgagggagatgacagtcggcacagcaacacactcacatgcaggcagaataagctgggatcagaggaaggagtactactgaaacaagtacatactagtacaacaaactcattcccagacgtcctttccaaaactttt

SEQ ID NO: 102799 - DNA, 406 bp, Homo Sapiens
cccagcatttgcaggatgcttcttactgactgcagaggtgggcatgtaactcggggctagtcagtcacagactctatatatttgccacatgattttttatcaggtgtagttatgaagggataatcagagtgcttggggctggaggaagcataaccttttatctaaagatcataaaaatgtgactggtacgcagttctggagctgccagatgttacgttatctccacgtggagaaaacctgtcaaggggagagaatgatgtcaagctgaaaagaggaatgggtggacaactagaatatggaaaactagtagttgaagttctggaactcagccatgcctgagcctagcttacctctgaaactttatagaaatgagcaacaatacctattgacattcctgcaatgttgg

SEQ ID NO: 102800 - DNA, 500 bp, Homo Sapiens
tagtcgctctagagtatccccccaagcatcgcaggatgattgtaacatgatcctctttccgagaggacaaaaagtatatatgtgtctgtatatttgcttatatactcgaagaagtttggaaagataacttaccaaagttgctcaaacagtgttacctctggagaatgagatttgggaagataagaaggaattttcacttcttagattttatttttatattatttaaatagtttaacattaaacatgtattactttcatgatctttttaaacttagggaaaaaagatgaaacatttcatggttccactcatcaggactttttattctttctcttcaatttaattcgaacatttcagattgctttttatggagagcaagagaactctggctggggtatgttgagcaaggggtgcttgtgcgatgtccagaagcttatcagagataaggcctgagctcacggagagaagtgtcggtcgacagttatatgttcctgcaatgcat

SEQ ID NO: 102801 - DNA, 249 bp, Homo Sapiens
  misc_feature (140)..(153): n is a, c, g, or t
tgagccggtacccatcattgcaggaaaaacatattaaatagccctattttgtaaaaactgaattttatccttgaccttttagcttcttgattaaaacttaacctcaaactgacacaccaccaccaccattcccatcctcnnnnnnnnnnnnnnataaaatcctaaaaggaaaatagtctctataaagtagtgcttaccctacacattttcagacaaatcctagaagttattgtatcctataatcaaaag

SEQ ID NO: 102802 - DNA, 366 bp, Homo Sapiens
tatccccccagctttgcaggatatctgagaatacagcaaggcggagagggaagaataaaagacaggacgagagattgaggaattacctattgagagaaagctcaagcaaaagcaaaggaggagagacgaacaggaggaggtaggaaaggaatgccagaaagaggctatggcaggaaaccagcaccacgaactgccacctgctggaagccgagaggccctgggtgccggccaggagcacagtttcaagagtttggagaaaggacgcccagcctcggttctgccccctcaacttcgtcctatcactctggcaaatcacatgttcatatgcctgggactcagtttcttcctctgtagaacaaaggtaag

SEQ ID NO: 102803 - DNA, 478 bp, Homo Sapiens
tacccacatttgcaggacggaatatcttgtaagtggttttataaaataataaaatttcccctaatcttttctgaatcttctgaaaccaaatgtaactatgttttatcgtccagtgactttcaggaattgcccattgtttttctgatatgttgtacaagattgtcattagtgagacatatggacaacctagaagttaacgggggatatatctcaaatggtaattaataatagatggtgaataatgatttggggattcagatttctctttgaaacatgcttgtgtatcttagtggggttttatatccatttttatcaggatttcctcttgaaccagaaccagtctttcaactcattgcatcatttacaagacaacattgtaagagagatgagcacttataagtggagtatattataatagattagtactggattattcaggctttaggcatatgactatctttaaggagtctataaatat

SEQ ID NO: 102804 - DNA, 210 bp, Homo Sapiens
ggctcccaatatttgcaggaggaaaagtgaaatcagagaggcgtaccctagccacagctgttgtattctgctcttctttcctttttggtgagcttcatgggtggagttatcagtggtctgtactttgtggatattttgcccagcaggaagtattagacacatcgtctagaagcatgtgtgaaaagttccaaaaacgggggagccggctca

SEQ ID NO: 102805 - DNA, 378 bp, Homo Sapiens
gggctcggtacccattatgtacaaacctcttcttcacataccctgtccaatttcttgtcatgttctcctgcccaaggattctccgtggtgatgaattttgaggtagccaaaagcaacagtggctttgcaagggcttgctcctcccacaataaaaactctataaacccttgtcctccaggtggtggatgtgcatgcaccctggcggcatctgctgctccctttgcataagacgggagggtatacgtttcctgagctgatctgaccctgagagccagggagcttcggctggggcatctccctgagaagcagcatggagcagcctaacagtaaaggctatagcctgggaaggacccctcagggcccagagtgcagcagtgc

SEQ ID NO: 102806 - DNA, 167 bp, Homo Sapiens
ggctaccccatcatttgcaggatcataaaaggggaatacaaatatttgttagcaaaagggggcatttggtgtgacagagtcgagagtcactgctctagcaagcttcccctcctagccaccagattctcccagagaccagttcttcctgaaatgcaggatctggcttt

SEQ ID NO: 102807 - DNA, 299 bp, Homo Sapiens
  misc_feature (15)..(15): n is a, c, g, or t
ctgagccggctcccnatcattgcaggatgttcaaggacgggagctggtgccatgtcctaccctgactcagggagtgattcagactgagagttggctaaatctagaaggatttttggattgcattataaccttttaggtattcatcttatcctttagctaagaatagatctggaccatgaacaagcccttctgaaatcatcctcctccactagagttctgagctttctttccgtgtccaatctagacagtagggatcactgcacgttgaactttcctcgttctttcttctgcccagtttg

SEQ ID NO: 102808 - DNA, 369 bp, Homo Sapiens
aacatttgcaggacttgaatttaacacaaatactctcagccacaatggaagggaagctggttgtctgggacatacaccgcccaccctcatctgcctccacctttttgggctttccctatatcaagccttgtaaattggttcatttgcagaaagagggtatcacggtacttaccacaattgatagctacattgtcacaggtgacattaaggggaacattaagttctatgatcacaccctgtctattgttaactggtacagtcacttgaaactgggcgccataagaactctgtccttttcaaagaccccagcaactcctcctactgaaaaatcaaactatcctcctgcaaattttgggtgtaccgagctcg

SEQ ID NO: 102809 - DNA, 180 bp, Homo Sapiens
aacatttgcaggatcaatgcaactggtggtgggctgggcctgggttacaaatatgaatttggttataggcgagacataggattagttctaaggcttttctaagtggatctcctgggattgaacagctctgtggccttttaacatgaggcaagggagagagtacgtgttcctgggacacaa

SEQ ID NO: 102810 - DNA, 167 bp, Homo Sapiens
agaatgataactactgtatgtacttatacagagttcaaacttataatggctgatctatgtataccctgaaaaatataccagatgcataagaacatcataaccattggacatattttcttatgctaaaatatgctagtcttcaactagatcttctttcacactataca

SEQ ID NO: 102811 - DNA, 379 bp, Homo Sapiens
ggagacaacttacgttaaacaaaaaaactatgtatataaagattcttgcacaattagagaaacgtaagcatttcgatgcttttaaaattatgtttaaatctattatattttctaaatattatccaaataaacataaaaatgcttttaaaacaaataaggaggccatatcagagaaaagatagatttattttgcttttttgttgtaacgtctccaatggaaaaggcatgtaaaaaactacattcctcacggagaacaacagaactggaggagaacgtaaaccgtcacaaccaagtagaagataataccagtcacatttttttgcagaataaaggtactgataatgaccgcgtaagtgtctccgggtgccgagctcgattc

SEQ ID NO: 102812 - DNA, 455 bp, Homo Sapiens
aatcgagctcggtaccggagacacttacgaaacacacaacgaagaaaactgaatcactggcgaacagctgccagttcctccccccagcccagcgaacatgaggatgaacgatgctgacagctccctcggcctgcagcctgggtttgtttcttcaaaaaaatctcgttcttttttggtggtggtgttttaatctttatggaaaagggtaagcttgtttagaagcgatccatctctgacttaccaaataatgcagcttagtaataagttgggcaccaccactgccctgggatgctgtctcaaatgccacatcacagaagggagactcgggagaaggggaggcttgtggcatttcactgtagttgagaaataagctcccgtggctaacgatgtggcatcatttatttaagttttgaatttcaatagcttttggggtacaagtggttttgggtttcatg

SEQ ID NO: 102813 - DNA, 110 bp, Homo Sapiens
tcggtaccggagacacttacgggtaaggaggagccaattttctccatatattcaatttcataggagtttctgtaatccaactctgcaaaaacaaaaacaaacacaaacac

SEQ ID NO: 102814 - DNA, 586 bp, Homo Sapiens
  misc_feature (403)..(519): n is a, c, g, or t
aatagaatcgagctcggtaccggagacacttacgtggatagagtcttttcatgcaagatgaacattggtggcaggagctagaggctcacgtgcccagagaggctcagcaggtaacatacatgagcaaagtggaaaggctgaaaatgaggtgaacaggagagctcctgttgccatcgaaaggaagcagtcaccactcagcctaagttgattgttgctaaaatttgctgattctttgaattttttttcaaaagatgctgaaaatctgaattattatacaaacttccctgttattaaattaatggaacaaatgcaagatattttaaagatacaatgtaggccagacaacagagcttcaggcaaggtctggacacagcttccagttttcaacttaaaacccagcctnnnnnnnnnnnnnnnnnnnnnnnnnnnnnnnnnnnnnnnnnnnnnnnnnnnnnnnnnnnnnnnnnnnnnnnnnnnnnnnnnnnnnnnnnnnnnnnnnnnnnnnnnnnnnnnnnnnnntgactccttcctcttttcctctttctgttcctcgatccacatttttttccgtaagtgtctccaggag

SEQ ID NO: 102815 - DNA, 357 bp, Homo Sapiens
gcctggaccggagacacttacgacagaagtttccacttgatgtactgtctttagcacaggagcaccctgacaaagccggtaatttgggaaaactgagtggctgaactcagggggtaaagggaagtgagaaaagaggacaaatgaccaagaggctttgtgtgaagtccatggcgtagagttcagaactaggctagtggtctgggcaaggcgaggaagagctaaacctgaacgattgttaaagaaaaataatgtgatcagtgggggtaatgggaaataaagcaaaaagaagcaaacttcttcggtgatatacttcatctgattcatttgatccaccgtaagtgtctccggtccgagcct

SEQ ID NO: 102816 - DNA, 328 bp, Homo Sapiens
caaaatactagcagtctgcctaaacatgttcattgtacatttctcaggctatcaatgaatggaggtttttaaaaagttgaatatttgtctgaacattttatttcaaagttcaaaaaaacagaggctgcaaaattcattttataatggctattttgtgacgataagatgtagttcatgtttttctgtagcactgggcccaaatattctttgtaaagaaaatcgctgcagcaaaaactgttactgtgtttattatatttgtagaagtattagaaaaatattctattttttattcagtgctgcgtaagtgtctccggtaccggctcgatcg

SEQ ID NO: 102817 - DNA, 353 bp, Homo Sapiens
gacgtacgaggaagaggttgtgaagctatacataagacaattggcaatcttgtatttcacaagaatctaattagagaatttgggtggccaatcccctcagcatagtaagggagtcaaggaagcttttaagaacctcatcagttttctaccttccctgaacaagtgtctcttatttgtaactaaatttgtcagcttaacagtaagcagtaactggtattagactcaatttttcaactagatttgtaatttggcacagtaatgaaatcttaagcccatgcacctattctgggcttcttgtttgtttgtttgagacgaagggggatgacacacgaagggggatggaagtcctctag

SEQ ID NO: 102818 - DNA, 601 bp, Homo Sapiens
ctggaagacctggatttggtggaagacgtagatttttctggaagacactgactgactggaagacctggatttctttctggaagacactgattgactggaagacctggatttctttctggaagacactgatggactggaagatctagattttactggaagaactagatatactggaagactgggattgggtggaagacacagatttttctggaagacatggattagctggaagatctgtattggatggaagacctggaaattattggaagacatggatttcctgaaaaatctgtgtcttccacctagtctgccagaaaatccttgtctgccctcaaatccatagctgccgaaaaatccaggtcttccaggaaatccgtgtcttccagcaaatccaggtcttccaacaaagccatgtcttccatcaaattaaggtcttccaggctactggtgtcttacaacaaaggtacgtcttccaacagaaggtacgtcttccaagaaaggtatgtcttccaacaaaggtacgtcttccagaaaatccacgtcttccacccaagccatgtcttccagaaactccacgtcttccagaaaatataggtcttcc

SEQ ID NO: 102819 - DNA, 220 bp, Homo Sapiens
ggggagcgtaaaatatcaatcaaacccaaaggaccagcagaaaaaaatccttcaataaaggcaactgtttgccttcctaggccaatgctttactatattagaagcactgataccttcccgctcctacaggtggtgtcttatacatacagcagttagatctatatagctggatttgccaagaaacaattccatccccagaactctctctcagacaagaccc

SEQ ID NO: 102820 - DNA, 232 bp, Homo Sapiens
gatacccccaacagagggggcaacgtagtatattggggagtatcttatgtctgttttaatttatagctgtgaacctaaaactgctataaaaactttaagccttacttattagaaattcaattaaaaggtttcaaaagatgttttaagtcatatttagtataagatggagaaaacaattgcctaagtcaaaaattactcccattattattaccatatccgttaatttttcttc

SEQ ID NO: 102821 - DNA, 564 bp, Homo Sapiens
  misc_feature (132)..(183): n is a, c, g, or t
aaggtattcatgggcggacgtataacccggaaaaggaatgacatgccttctggattcatgcagtcggatgttggcttcgaaatcctgttttacacttagttgttattcaacccaagtgattaagtgatagannnnnnnnnnnnnnnnnnnnnnnnnnnnnnnnnnnnnnnnnnnnnnnnnnnntcctatgtgaagtatgagaagcttaatgtagattagtgggtatgaaaactccaagcacagtcctacaagttgaataaatattagcttaaggaagtcactgcatgcaatcactattattttcctaagctggatttctgataattgcatcactccctctggccacaccaaagaataagaacagtcttttattcaggtaatatttacatgttttctctgtggcaagtactgtactgattttatttaatgtattatttcatattcttctcacaacaatcttataatgtagcatttttatcccattttcagctaagagaactgtggttttgcaaaatttgtaacttgcctttcacagagctagtaggcaataaatagaggccgatg

SEQ ID NO: 102822 - DNA, 520 bp, Homo Sapiens
actctctggccctgtactctcgggccctgtactctcgggccctgcccagcttgcctggcagcccctgctgccccgtggccttgctggcatttgtcttgttttgtcttgttttcccccagccacagacgcctctcagtttctcaggctctgaatacagactaaagaggatcagagttgaacttcactcttaattcttccaggctctagccccagctctatcactcattaactgtgagtttagggcaggtcctagcactgctgtgggcctcagtttccccatatgctgatgcacctgtgtgccggccacaggtgaagtatgagctttttgaggtcagcgctggcaagtgtgggtgaggccagacccttcctgtgtggccgacggctggcaatatccgtgaacaacaagattcacgtcactgtgtcctgagctgagaatctgtatctagcatctcctaaggagataattaacagtgtagaaacagtgtaatgcgtgttctgtgatcacgtgtgtctgtcatcg

SEQ ID NO: 102823 - DNA, 662 bp, Homo Sapiens
  misc_feature (459)..(469): n is a, c, g, or t
cacaggagacaaagggagcggccttgctgagcccggagggctcatggcaaaggctataggtcagggacccacagggaggtcggcctggagcccgccaagcaagcctttttcctgcccaccgtggacactcgacaaagtagcctgcccaaggagggcagagccaggctctctcactcttccagctgctcacccattcaagaagtacaaactgcttgcttttcttagcatcacattagtgaatctagaggagagggaagggaactagaacatactgataacaaccactaccatttatcgaatgcctcttaggtgccaagcaaagtgtgcatgttctttaactctgtcctcatggcaagctggtaaggtggctactgttgtggctgttaatgtccctactttccaactgtggacaatagaggatcaggtagcctgtaagcagttttgcatcctagtgggggnnnnnnnnnnntgggaggtcccccaggacagcagaccacctaaaaacctttacatgggatttcacactggttgcaaaatagttcataattttactgcattccccactttcactgcagaggatcagagaagaagattgataccgtgaaaaggaaggacccgtgataagctctcagtgagccccacatccttcgatcacccaccca

SEQ ID NO: 102824 - DNA, 219 bp, Homo Sapiens
agagggagacaggaaaatgtgatagtgatacagtattaatggttcataagcaaatatgtcggcgcgtaagaacatgcatgtgcagcagaaatcccacaatagcactccctcctggtgggcctatcactgtatcactcccctataagggacaggaagatatctccctttcctcaaagtcaagtggttagcctaccacaccactcccacatcaagtggacc

SEQ ID NO: 102825 - DNA, 352 bp, Homo Sapiens
ctaatcacgcatttaatgacatacatgactataagatggtttaaaaggcagtatctcaattcctacaattaactgtcaaatactcttcctcaaaaccaaaacccaccttaacttttaaaaataaaaattattttaaaaaattcttctgagcttttatcagggaacagcattgtattattttttccaatgataaaatggcacagtgagtttctcagctggtattttcactacagaaggtgtactttcaggggtgttgactcaatcttatacctcatgattactgcaaaataggcactgtttacagaattattttaagttttcagattaatattgactttgttatcatgcttat

SEQ ID NO: 102826 - DNA, 596 bp, Homo Sapiens
tctgacaggaacaatcagtgactctgctacgtcgcacaattctatccacagagtaaggtagcaatgcttggaatacacgcttgcattttccaattggctgtggaataaagttgttattcttttctggatgaagccatttccacactcagaataacaaaaactcttgccactgaacgtagaaacctcattgtcacagcaatagcttcttctctacgtccaggtgtatatttgttttggagttctttcactagtgtacctagtagagtatctaaaagcaaaatatctgctgtacacttaactataaggcaatgagtgaaacagtccagccgaattgtgccactttgctgattgaggtatacttgctcttctggcaaaagatggcctattctaatacaggcaataagagggtcccatagtatctcgtacgacgccatacataatcatagacgtcaacgccattccagtcctatagaacaccttccaaggcaatctgggcacatcattggagactcctatagcatgatctgtcatatcgtgaatcttcaggacgggaatatgtgggcgcctacagatccatcatgaatgtggtgcagaga

SEQ ID NO: 102827 - DNA, 444 bp, Homo Sapiens
ggcagcacacggacctaggaagacgctgcccatggcaggcactcgaggagtgggtcatgagtaagtgaatgaatgaagtatacacaaatgatgcaatactagaaggatgaagactatttagttgacagagaagcaccccaaacagaaaagctagaaacaatctcacttccatggctgaaggatcagcaaagacacagtgagctccacaaactctgtcaccaagttctgagtctcccattctcaggtgaaacctcagagctcaaggaagtccccctgaactgaccccttattgtccccatccagggacagatccctcactctgactcttgcatcctaaccctttttgtaaatcatgttatacgaacatgtgtgtatgtgtaagtatacacatgtacagattagtttcatatacatctgcctcactagactgtacattcttatggg

SEQ ID NO: 102828 - DNA, 262 bp, Homo Sapiens
gaagtgatcctcctgctgcgctgccaaggtgctgagattacaggcgtgaaccacgtgtgcctgacctatccatgtttcattcagctcttcctcttacatagggtttactttaggtcctatgaccttgaaacaagtatctaaaaacatcattgagccttacctaagtatcaaattgaaaaagtaaaaaaatgcagtagcatttgactctttactacaggagaaacttaggatccttgatctttttctctgccttgcctttgtt

SEQ ID NO: 102829 - DNA, 227 bp, Homo Sapiens
tgcggtccgacattggacgcatggaagtgttattccgatgcaggattattgtgtttcttcttacctgcctccaagtgtgcttagggttgtgacgttagcaatgcagctgccttgaagttgttagtcaaggaggccagtgggactgtactgggaacttttggcccagattgagttctaagcgcaaatgtgcagtgaatacgtttccacaaacagaatgggcgtccaaa

SEQ ID NO: 102830 - DNA, 236 bp, Homo Sapiens
gcatcgtgaaacctcaattatatctactttcattgtgcatggttatagtgggaaaggactacagctaagaaatcgtaaaacaataaaataatcctaccatatgtattctaagtctccagagtcaagggtaaaaaatgttcctgagactcaatagattaatatgctgttttccaagttatttaaactttgttcagctgctatattctttcaatttttattttcttttcggttttagc

SEQ ID NO: 102831 - DNA, 407 bp, Homo Sapiens
tatgagttgtagccagcagagtgccccagtggtgccaggtgacagtcccccggaatacattagtgcatttgctaagactccatgtgttctcttgggcctcacagaacatgggctttgagggtgggagccaagaggcagacttgggagtgcccgaggacttgttctgaaacacctggggggctgacacccccactaccctcacacccctaccaccagtttccccaccagcgatgatggtagctactcagccagtgggctcctatatagcggttacacgtctagaatgtgcctgggaggcaaggtgccacgtaattatcccgtatattatcccatgatatactagaggaacacagatgcttaagtaaattgcctccaggtgatctgtcaacaagggtcagatcggacgg

SEQ ID NO: 102832 - DNA, 681 bp, Homo Sapiens
cgaggagggcgatgccgatggagagcttgcgcctcatgcccccgctcaggaagcggctccgtgagttccacttgtcctccaggccgatgatgtgcagcatctgcttgacttcttcagggcacttctgacgtgacaggcccttcagctgggcgtagaaataaaggtgctctgcgactgtcaagttgtcaaacaggatgtcgtgctgcgggcacaggcccaggctcttccggatctgaaccatgtcctgggaaatttcatacccgctgatgtatgcccgtccactggtggggggaaagagacctgtgagcatggagagggtggtggtcttcccggcaccgttgtggcccagcaggacggtgatctgtccctcgtacaggttgaggttcaggtctctgacggccgccctgtccttatttcccaccctgaacaccttggacaggtgcttgatcttgatccccgccaccaggtcctctggctcggcttcaaagtactcgtttctgagtgctttctcggggtcactgtcttcttcctccttccctgcaaccgcccttggcttcccacaccaataggagggcatgatgaagaagtaccagggctgaggcacgccgaactgccctgggaagacggcctccatgtaccaggtcaccaggccatagagcacagagtccaaccgcatcacct

SEQ ID NO: 102833 - DNA, 366 bp, Homo Sapiens
agctataacatcaaacactcttgtcagctctaatctcaccatcagtatcccgtggcctgccctttgtctagaaactttgaaggttagcaatttggagagctgtcagagtggaagcatgggttggaatggtaatggcattgaatgtcttcacgtgttttacttttttcaggtcttatcgaatgttacttagcctccaacagtattcgagaagcaatggtaatggctaacaacgtttacaaaactctgggagcaaatgcacagacccttacccttttagccaccgtttgtcttgaagacccagtgacacaggagaaagccaaagcattattagataaagccctgacccaaaggccagattacattaag

SEQ ID NO: 102834 - DNA, 285 bp, Homo Sapiens
acttggtaacaagacacacacacacatccagttatctcagtgttcgctcccatcaaaaacacacgctttgttttctatacttcctcagtaagtggagaatgcagttactctcaagaacctccaaagaatttactagtattaaaactccagttaattctctccagtgtttagtcacagggtttttcattctgtccaaagctgactgaaggtcttgtaacacatctgtgtagttatttccacagtgagcactccaggtatacagaaaatcataggcaggtttccaca

SEQ ID NO: 102835 - DNA, 144 bp, Homo Sapiens
ctagaaattattaccagcctactattaacggcaaggatctgggccttgaaataatatggcccagtacaacctaccagtcttgcttgtgtgtggtgggtatgggtcttgttggggaccagccatgtatctaagcctctgtatgac

SEQ ID NO: 102836 - DNA, 560 bp, Homo Sapiens
gatccccggccactctagtcagtggaatggaccctagttggacgcttaaaggggagtcattttcttataataagtagcagtagtagctctagtgtttgctgtgatcaatggtgacaccttgactttatgtattgccatggaccaatcatttattcagtgaagagttattgaccattgactttattatggttggtgaaataatcgcaagaaaatttattcagttaggtatttataaaaatacctaggtattaaatgaagattgttctagttgatataagcaataaagcctgactatatggctcctaccctcaagaatcttacggtatagtagggatgatgaaatagtgtaagaatgatttatatgtgccagagtacatgacagagtttttactgtcttgaagagctacagagttcagaagagaaggggcttagtgaggaaaagttttgtgggagaagtagaattcaaggtgaagactaaagaacttcagtaagtacagataaaatggagtgtattctaggccgtggaatggacaaaaaaatgaaacctggactagagtgcc

SEQ ID NO: 102837 - DNA, 135 bp, Homo Sapiens
ctacaaaaaatacataagtaaataccaaatcttgccatgtgaagtgccacacgggagagatacttgatgctaccatggcataaaatggggggagtaggtgcagtgaagagacacgaagtagcctgaggagtcagg

SEQ ID NO: 102838 - DNA, 145 bp, Homo Sapiens
ggccaataatgcccaagaaaacccacccaagaaagttaaactgggagagaccggatggaatgagtgaatcattctggaaaatgaatagcacaagtagctaaaagtctacacaatagaggaggagaaaaaatacactttatgaagc

SEQ ID NO: 102839 - DNA, 265 bp, Homo Sapiens
cggctggtcgtctttaagagtcccccgcccctttgtttcccacgaaaaacagacacaacaaaacaaaaaggcaaaccaaagtgggtgaagaaccatttaaagagtaaagataattctggattgttggctctgacatatccttttaagaattttgctgagaaagctaaacacatttccagctttagcagtaatttcagacattacaggacaaacgaaaacatttatttctgcagaaaattatagtgacgattgctgactacggtgc

SEQ ID NO: 102840 - DNA, 651 bp, Homo Sapiens
  misc_feature (595)..(607): n is a, c, g, or t
cggggtctgggcattcgatagtctcttcaaataatttcatgagcctggtgatgtgtttctcagttacgtggttaagctatacattgagttcagtattttgtcatcttcctctgtgctgatacttacttcttgatatgaacaattgagtttactggtggctgtagtttcttttcagcaaccctcgacccctgccacgtgtgcagaatgtagtgaagccaagtttgaggttgggatctagagccctccaacaatccctgcgatgtgccctccaacctgggggatagatcttcctggccctggagaaacccagttgagaattcataggattgtcgtgctctcagcaagtgctttagtcttgtcctctggcagatgttttctttactgggcgtgaaaaccccatcaaaataatgctaagggaactgaaatatagagaaatacaaataagcaaagaagaagaaatattcaaaatgttcaggatggccaaagcaaatagacttaaggatgatctagaagagagagaaatctagctgacttgtgttttctcacatccttctacatcttgagaagaagttttagcaaataaccctaaagtagnnnnnnnnnnnnnaaattttaattataagctggtactggggggctgatgtctataat

SEQ ID NO: 102841 - DNA, 198 bp, Homo Sapiens
ccactctagtccagctcacagtgccatatcactggatccagacccttggtaatgtgattctattctgccttgatacagcccacaggggtcattgtgacatcgctgggcattgcacctaggtgatttgagtctcctcttctgccttggtgctgcccacacggtgtattgtgacatattgctgggcgtatgttatgtgac

SEQ ID NO: 102842 - DNA, 215 bp, Homo Sapiens
ataggcggacccactctagtagacaggtgggtcacacagaactaatccagcctgcaaatggcctgtgcaatcttcagctctgtccagtcctgcctccctctggggatgcctttaaaggtgatgaatgatctggatgaatgggcttagaagataagagggaaaaacaaatatcacaggtcaaatcgttatttgtcttcaagtttaacaccgtctac

SEQ ID NO: 102843 - DNA, 204 bp, Homo Sapiens
gaccggcactctatgtcaggagggagagtgtgatgaattgatgagagtggtacagacagtaagaggtgggtggattctagatatacagagaaaatacaaaaacacttagaagaagggagatgggttaggattatatgttacagagagcctgtaatctttaaggttgagtttcatcataacgaatttgttttgggactagagtgg

SEQ ID NO: 102844 - DNA, 271 bp, Homo Sapiens
ggggaagcagtagaggcggagagaagtggtcagattttggatttattttgaaggtagaacagacaggattgctgactctgttgagtagtcagctgggagctattgatggtttctgagcaggagctgaaggaagattaccccggtataggactgctgggaagacgtggtgcaggcagagatcaggtaggaggccattgcaaggatttaagggtgagatccataagggttttaactcaaatcagcagaggaaaaaggagtggtatgtcaatct

SEQ ID NO: 102845 - DNA, 240 bp, Homo Sapiens
catcctgcagtctgtttcctggtcagcctgtccagctgccattgcgtgattggttacaatgacaggagaggataaacaggaccattcagacatactcagaactatcagaggtatcaataagaatggcttataaaaaaccaatcagttggtttacataaatggttacttgtaggttaaggacatttgtaaatcacttattctctagataatttcaaaattttcccttggactagagtcggc

SEQ ID NO: 102846 - DNA, 253 bp, Homo Sapiens
ccactctagtcattaaattgtctaagttcttccactcctcccactcaaaatctctgagtaaaactaatatgccagaaagataccacgtttgtcttttaacatcagttatctcatcccaccatcacataaaacccagaggactacttcccctagtatgagattcaggctcttaataatcatataattttctctttaattttctatgataaaatgaataagtgtgcagtgtccagcattatacctgcatataagg

SEQ ID NO: 102847 - DNA, 255 bp, Homo Sapiens
ccactctagtcaggagatattaatacaaactcattggtttgcaaaaacaattaacaataacaaaaacgaaatggttgaatacaaacagtggattctatctcagcaaaaaagtaacagcagacttaaagcaggcagaaaagaaagagatagataacttaggaaccttatagttgcaggttgacctttgggctctgaaatttccttgacgtaattgtgcacaaaaagaccataaagaccatttacacatacatcttt

SEQ ID NO: 102848 - DNA, 413 bp, Homo Sapiens
gccagtctatttcagcatgtgctgaaggatgccctgtggtcagaaacaagttcattaactttctctttgaagtgtcttcgtccccgtttcctagcgttctgggaattttacacatccttcctataaaaccaagtatcaggtgagatccttaggatcaggaccatgaatcaagtggtgtgagggcaacacagcaaacttacccttttgaggccgtttcctttttctgccctcaatctctgtgaactgaaccttgttaaagtcagtcaacaccagggtggatggtttgccgttgtcacctattttcaggacataacatcctgacttaggagccattccgatcatttctaattcaatagatgcacccagcattcagattgccttttcaggatctttaaagtcgatgactagagtgg

SEQ ID NO: 102849 - DNA, 311 bp, Homo Sapiens
gtcggacgacggatgtatagggtcttagaaaacatcaccagctgcatcattaatacttaggcctaacgtgggacattccagagaggtaaattactcctttgcaattattctggtagtatttttcaccatgatgttagatatttctgactcaaatgagtatttctgggaagaattgttgtttgcggaaataaaaatgtcagcctcttcaatcttggctcatttgaaaacctttcttatatgaaactgaattgagagaggaagacagcaaaattaaggcattggctctgctcaggaccaacgtagagataagt

SEQ ID NO: 102850 - DNA, 414 bp, Homo Sapiens
tcgttctggtcaagactaaacgtgctatgattctaatatgccaaaaacctgtactccttgctctctaccccccacctatattggaatgacacaaggaaaaggctactctgaccgttcctacacggcaggttaatagggcacctgtgttctgatttattgctgctcgctgccttccctggccccgtgtcaggtaggagaaatcggcacggaaggtaggacggcaggagtgacctttcgctaatcaccacacctcagttactactggcgcagcctcatacagaagacggaatccttcaacgagctggctttcaaatacagtcacactttgatttactccagaacaaagattccacttacacataaaagcttctgatgcatgattctgtcaactggggcactacagtaaaaaagccg

SEQ ID NO: 102851 - DNA, 317 bp, Homo Sapiens
taagggctcatgcaggaaaccagaaaatgaattggaaagatggagagcagtcagatcacagagggcctttaaatgagacaagagagtctgagcttttccttgtagatagtggggaaaaccaaagggtttcaagtctgaatttagcatgacaaaatgtaagtgataaatgtaggatgaatactctaagctgacagactataagagctaaaggctagagacaggaaaactggctatcaggctatgacaataatatacctaagaggtaagaaactaagttatattggcagaaatgaatacaaaaaccactatagctgggc

SEQ ID NO: 102852 - DNA, 297 bp, Homo Sapiens
taattgagctcggctacctaatttgactttcttccccaaatacaggagatggttaaatgctgatgacctactttatgtactatgatgcaaatgcaaatgataatggttactgtgcagcaacatggaagaacttgtgtgaaagcaggatgtaccacatgactgtaactccagaatgtgcttgcatgtgaggagagatcaagggaatatagaaaaatgaagacatagttgtgttagggtggtagaattttgagtggatttctccccccactattggtaaaaattttgtacttaatttac

SEQ ID NO: 102853 - DNA, 344 bp, Homo Sapiens
tgatagacttagctccatcgcagcattacataactgggatcagatccacatgaaactgaagtccaatatccatgcaaggcaccatgagggagccaccaagcatatacacacagtactcgctgagaaatggtatacaatctcatggtgtggtgaaaacaccacatacagaaaattactataaaaaggaacagagaaaacaaagtagtaaaaatctaaatagatcctgggtaaacacatggttcaacacaataccatcaactcaaagacctccctagcaatacacggtttccaattcatgaaccttctaaacagcatactcatctattcattcaggaactacttat

SEQ ID NO: 102854 - DNA, 253 bp, Homo Sapiens
tccctaccttcagagagcataaattctacttttttacaacaattttatgcagaatacgcatcttatttttgtaaatatgcacaatatttacatatagtacatactcaatatttgtgaaatgacattgaatacagtcatagagtccatcatccaatattagataatattggcaaatatttgccatatgatgtaataaaatgtgcattttttcatccttatatgaagtcgtccaatacggtagccggctcgatcg

SEQ ID NO: 102855 - DNA, 340 bp, Homo Sapiens
aattgtttgggttaaaatttgaggaaggttcatcttgtacgtatttaagagaattttgttggtgaaaatccttaaagcttacttttaggattgaggctttctgaataattgagcttcccaccctttgagtgctgaattactgtattttcatcaagtactttaatatataactcttggataatcaaaactttgattccaagcatctctctagtaagataaaacaaactgtcacttttttcttacatattttaacaaatcagaaataatggttccttttaatttttatataggaagaggcatatttctacaaaaaattgagatacctgaagaaagtccatta

SEQ ID NO: 102856 - DNA, 613 bp, Homo Sapiens
aggatctggactcccactggttgctcaacagtttcattaacaggaagactctgttcagactcctttcccacacccttcaaggagtgtgggaaacctccaacactccacaactctcttccatcccaacaccacccccagtgccatttctcatccatgtatcaggcacaaactcctgccaccttccacctttccactgacccagcttggtccctccggtccctctgctggcctagggctaagcctccctgtgtgccctcctgtctctactaatcccctatgtctactctcttcatcctctctacctccagagacggctcctcccagcttgtaaacatgcgcaagtctcttccatcttaaaaaataaagccaaaccctcaaaaaagcctgagggtcccctaaacctaccatcctttcacttcattccctttcacataaagctgggacctcatgaaggaatagtctgtactcagtgcttcagtttcttcaaccacaattcacttctcaacatgcctccacctggatcccctcaccaccatctcctctacacagccacactcagtcctgagccatactggaatctgaggcaaaagggacaatcagcaatactgacgct

SEQ ID NO: 102857 - DNA, 398 bp, Homo Sapiens
ggacttgcttcagggaacactcagaggaagatgatatgaatcagagaaaggtaaatttagcattttgtggtcagacagtggccttgcctatgtctttctctgaacatggtaatggagtacactgagaattctctattgccgatggatgaacatcacaatctggtttcattgtcccaacagggatgtacttttctttcttccctcaccttccatccacatctgaacttatcccctcctgtttgaacaattggaggagccattttactttcctgtgcctctctcgctctgcccactctactctgttcttcacatcattgctgagtcaaaaaacatgactttaagcttgttactcttctgcacaaaagacttctttgggtttctattgcttatagaagaaa

SEQ ID NO: 102858 - DNA, 343 bp, Homo Sapiens
atatggacttctgtcctctcaactagaatcattcatgcatgctcatcattatggcgtggtgtgtaagaaatgtcatctgtcgtcttaaataaagtggggagtgtgacgtgagggtgcatatatcacgtcactaatctcaaactggcacagctgaaagatttcagggttagaccatactgacctaagcctggttttaagaatacagtacttctgtttggtgtgtgtcctgctgtatatcaatagatcttcaatggaaaaccttttgttacatagagtcattaactaccgatggtcatgtgtatagaagtgatctttctcctcacctagggaagaaagtccatta

SEQ ID NO: 102859 - DNA, 908 bp, Homo Sapiens
gcagctcatcatccggggccctctcactgacgaacacatttaccagccatacccttcgggagctgatgtaccctttggacctccgctcgacatacagatactgcaccaggttcttgacttacaaatagccatcgaaaacattactgcctcttatgacaatgagactgtgacacttcaagacatctgcttggcccctctttcaccgtataacacgaactgcaccattttgagtgtgttaaactctacttccagaacagccattccgtgctggaccacaagaaaggggacgacttctttgtgtatgccgattaccacacgcactttctgtactgcgtacgggctcctgcctctctgaatgatacaagtttgctccatgacccttgtctgggtacgtttgggggaccagtgttcccgtggcttgtgttgggaggctatgatggtaactaagagaagctttgacttttccttttagataaagtcatctcggttttgtcattagcatcaagtggtaattatgaagatttcataaattgggcagttttgttaatttcttacctcttgaatcccagaatagtatctcctttggctttgggtttgggtttcattccagatttaaaagaagtggattgggttagccatttttaggtcacacatgcctttgagaagctgtcgaaggctaagtacctttccccagaataatgcaattgcaaacctctgcattgttgttcagcttgaaggtcatgggcctccgaagttcatttatagaccctctagggagctcatggacctcaggtaagagcctctgtgatagagaaaagatagtatgtgaggtatgtggaaaaagaaacaaagttgatggattttttttcttctaagccagtcagttgagtatttggacactcttacag

SEQ ID NO: 102860 - DNA, 547 bp, Homo Sapiens
tgatcgagccggctacctaatggactttctgccctcaaagatctataatattaggagggcaggtgacatgtttagtacatccctatatgcccgagaagcgtaatgattgtgcaaatagtactcagatacttaataaaacatcttatacttgaatgttccttgaatacctccaagatgtttaaaatattctttttcccaccctcaaactataatctgctcccttcattcattccccaatatctatccctatcccagaagctagaaaccagcaatcatgccaaatctgtgttcttgtccaccttatcacatccatcctgagatgctcctaattttacctcctaatctctaatctcatagcattacctttgtccaagccaggtcgttattctttcttggattttaatatctcctttattaatctcctacttccaatctcatttcctctacaccatttccatactgttattagaaagacattcctaaaaattaaaatcttccaggagtttatgagaccagcctgggaaacaaaatgagacctgtctccacc

SEQ ID NO: 102861 - DNA, 424 bp, Homo Sapiens
agagtggagtgttgcaattcagacttctagtatggagcagcatggtcatgggtgtggacaagtgaaagtctaggagtagagagcaaagaactctgttgaatggaacatggctgcaccataccttggtgtgatctcaggtattgggtgggtttgctgtagatactcagtgaatctgggagaagggtgtagagatctattgatgacaaaaactgagaaatagaatgtagatcatcagcttgtgaggaggaagagtttggagtaatagagcagtcattgagtatgcaaggagctaggagaacttagaagtcttccttctcctagaccagtctctattggaaaagctgtcagggatgtcgtttattcagaaagtagttttgcatgggataaggatgtgattatagaagaaagtccaactagggccgag

SEQ ID NO: 102862 - DNA, 376 bp, Homo Sapiens
acgatatgtgagtgggcggacgcactatctgtcatttgtcatcaggttcccaggtctctcgtccctcccctggcacataagtattaagctacacgctggccagaactagggattcacaggggaaatgccccttcctccatgttaatgtgttaatattagcaatcagctccacaaagacaactccaccccagacaaaggactatatgggcaaattcttccatgagaagtaaacgcagtgaaaaagaaaccagaaggtcacttcccactgggtcctgcatgacaacagatagaggcaaagtgaccttccctaagtcacacggccaaggctctggcacataaatccaggccaggacttgagagccgcccatctcgtctc

SEQ ID NO: 102863 - DNA, 275 bp, Homo Sapiens
cggccccactgtatcgatcgcggagaatacattcatgatctctccacaggttctaataaaggggggagacctgggttctgcacctggcctggttgtcgtggttacggttgctttcaggcgatggcacctgttctccaggtgtgtctggacttctacttgctttagccatatatggccaccagggggagcagtcaccccacagttgcctggagcgccctcgctctccaaattcacagcttgaaatgtcacctgtggccgtctgcggtcatccacgg

SEQ ID NO: 102864 - DNA, 328 bp, Homo Sapiens
ctccatattcgatcgcggagaaaaaagcatatccccaggaaggctgttggagaaagtggatgggacccacctgatggggagcttggagtccgagcggtcccatcacagcgctcagagtgtgatgcacaggaggttggtgcctcccctcctggccctgagtccatccctcatccctccccagagagctcttctcagaagtgccctgactggggcctgacgccatttcccttgggattcctgagtttgatctcttgtggaggactgaaataaacctgttgagttgggagcaacttggaaatttccttctcctcctccttcttctttctct

SEQ ID NO: 102865 - DNA, 376 bp, Homo Sapiens
tacttaacgatattcggatagtctaactaacgtgggctaggaaaaaagaagaggcaggtgttttgcagaagtgctcagacttcagaactgtttcagagacaggatgaaggacatggaatgcagaggcacagtgaaaacaccatatgacttagcagtgaataatatttgcagagtcataatcatgtaaatattactgatttaattaaaaagtgtgctacaattggaagaaacacagggagaaacataagatcatggtgtagcgaggaagatacgcttttacccgctgtgatagaaagtcaatagacagtgctggcaattaacttaactattctatttttgttctttcattaaaaataagattaaatatttaaggcac

SEQ ID NO: 102866 - DNA, 448 bp, Homo Sapiens
  misc_feature (49)..(60): n is a, c, g, or t
  misc_feature (69)..(146): n is a, c, g, or t
gccctgcccaagctgcaaacccgccgggtggatttagagggatcccccnnnnnnnnnnnngaatgtacnnnnnnnnnnnnnnnnnnnnnnnnnnnnnnnnnnnnnnnnnnnnnnnnnnnnnnnnnnnnnnnnnnnnnnnnnnnnnnaccatcctggctaacacggtgaaaccactgcacccggctgtacaagtaacctttatatataaccagtttatgaaagacttaggatataaatagaaccagtttataagggattccttctgattatgaatgaattaaccaatttatgattgacatctataggaagagggataaccaagttaaaataggaagagagagagaatgtgtattcttaactttttatttgaaataacatcctatctgtggaaaagttgtaagaataacacaaaaaactcccacatattcttctccgcgatcgaagtgtg

SEQ ID NO: 102867 - DNA, 379 bp, Homo Sapiens
ggatcccccacacttcgatcgcggagaaggcagagcagagatgctgccagcagccacagtggtacggccagactgatggatccatttattcctctcaccgacccaggtctgaaaaggactaggctggcattggtgacccccagcttgttggcagccacacaggtgtagttgccgtagtgctcctcagtgacgttggtcaccgtcagggaagactggccctccgtgctcttaatctcaaggccattggcactatttatcctagtgtcatcccggtaccactcaaagtcaggtgcaggcactgccgaggcctcacatttgagtgaagcttgtcgtcctgtggtggcttcattgctcttggattctccgcgatcgaagtgtg

SEQ ID NO: 102868 - DNA, 418 bp, Homo Sapiens
agcctgccccacatttcgatcgcggagaatgagcaagaagggtgagagtcccacgggtgaagggagaaagcagcagagaatgaatataagcccggagaatgaacataaatgtgaggggaagaggccagaggccaacactggaaggacagtgagggccaagaaaggaactactaatgtttctgagacctgcagggaaccatggtattaagctctcattaccagcacctaattttttagaggctggttttccaacttaagtgaaagaaattcaccctgtttttagcaattatgacgcactatatttacttctgtcacattagctgattctgtggtggactgggtaatttgaaaagctcctttgaacatgaattgtttttaaacttacagtctagctagcctaattttacaaacagatgct

SEQ ID NO: 102869 - DNA, 255 bp, Homo Sapiens
tcatcgagccggccccacatttcgatcgcggagaagaaagaaacgatacaagcaaaatacaaatgtatcttataagatatagtcgattcctgttgagactggagggtattaaaacacttcctctgatatttctcagaattagaattctaacgaaagagctgtttagtctctgatcatcatagcacatgatataaaacaacgataattagagatttttggtttactgaagacttttgactacattagtagtttcct

SEQ ID NO: 102870 - DNA, 485 bp, Homo Sapiens
gagctcggtaccccaccggcaggttgtactcctgctctcaggcctccttggcccactccccttgctcactgacatttggtctcctcttccaggaaactgcttcccttgtgggaaagggctcaggccctaataagtagaagaggatcaggcgagagggagtcagaacccctgagatgcaaaggcagcagaggggcagagaccaagagcaagcagtgaagagacatttgcagaaacagtcttggagactgaaagaacaacatctctggtccttcctttagccagatctgattctctgccccttccccaaaaaatccctcatataagaaaacggcacctctcaccatctaccagggcttaagccagacacccaggagtatcccttgacaccttgttctcaaatccacaccccagtccaacagcaatcctgtctgatccacctgcaaaatagatccactatccacctgcccccagaaggtccaggtatg

SEQ ID NO: 102871 - DNA, 319 bp, Homo Sapiens
catacctggaccttctcctgactcttcttcccgcacctccgggtcccagcggtctgcactccctgggaagctcctcgcgctccgaccctgaccctccagcgtcacagtgtcactgtgccccactaccatgctagacatctctggccctctcctgaaacctggccctggatttctagctgaatgacggccccagctgaaagtcctcctgggacctgttgctcaaaacgtcgacagctggacccctcgctcttcccgtccaaaccatttccccttctgaacttctctatatggtcagcaatcctaggatacagtagggaga

SEQ ID NO: 102872 - DNA, 144 bp, Homo Sapiens
tagtcgctcgggttaataccgaaggtgtgagcaggacataccggacacacggatggcgaagatgaacagaggaggggggcagaaccactctggttggggtagacggcaaggtcctgctgagctcttaaagaaagggcactgtat

SEQ ID NO: 102873 - DNA, 878 bp, Homo Sapiens
cggccgggtgttcaggccccaggcaggcccggcccttcctgacatgacaccccttcccccagattatccctggctgctggagcctgggcctgtccccatgaactccgcactcatcaagtggctgtacctgcctgatttcttccgggcccccaactccaccaacctcatcagcgactttctcctgctgctgtgcgcctcccagcagtggcaggtgttctcagctgagcgcacagaggagtggcagcgcatggctggcgtcaacaccgaccgcctggagccgctgcggggggagcccaaccccgtgcccaactttatccactgcaggtcctaccttgacatgctgaaggtggccgtcttccgatacctgttctggctggtgctggtggtggtgtttgtcacgggggccacccgcatcagcatcttcgggctgggctacctgctggcctgcttctacctgctgctcttcggcacggccctgctgcagagggacacacgggcccgcctcgtgctgtgggactgcctcattctgtacaacgtcaccgtcatcatctccaagaacatgctgtcgctcctggcctgcgtcttcgtggagcagatgcagaccggcttctgctgggtcatccagctcttcagccttgtatgcaccgtcaagggctactatgaccccaaggagatgatggacagagaccaggactgcctgctgcctgtggaggaggctggcatcatctgggacagcgtctgcttcttcttcctgctgctgcagcgccgcgtcttccttagccattactacctgcacgtcagtgccgacctccaggccacctgcctgatagcctccaggggcttctgcccctaacgctgataactgggtaccgagcacg

SEQ ID NO: 102874 - DNA, 380 bp, Homo Sapiens
ctcatctacagttcccctcgctagcgctcgggttacagcaccactagtcaacgtgggagaaaatgagtgtgagactagacaccaaaagctggttgctgggttaggggtccagggaagcccatagatgtgcctcatgacatcagcagttgtctcctgggtctgaataaatggtaggataatgcctcaagagtctcgggacagaaactttatgcaaaattaccctacaaaataggcctccataacagtacacctgtggtatgtagaaaagtgctactctcagagctactgagaaagtaacgtcctatgcccagctcttcttggtttggaccccaacctgatgctcagttaaaacatgggtttaacccgagtcgctaccagga

SEQ ID NO: 102875 - DNA, 310 bp, Homo Sapiens
acccctggtagcgctcgggttaagacatacactgagaaccagaaccctaatctcaggatccatagtctaatccccttcctgctacagcacatcatctcaattactgcaaatgtacctgttaatacactctgaaaaatatactacttactgttcacagtaatgtgcactggcagccatgggaccgtcaccataaaccaagaacaataatttctgcactggttaattcctataagttcagtatacaaagatagcaatgcctattaacaatctgaacttataggaattaacccgagcgctaccagggtaccga

SEQ ID NO: 102876 - DNA, 641 bp, Homo Sapiens
ggttaaaggcttggtgacgggtaggtagaactaaggatgggaacggatgataagatgagcatgggagagttaaaggccagggaagtatttgtaaggggataggcaggatgggtgtgaaatgcagagtcagggcatgagagttggagaggagggcttaataccaagtagaacaagtgatgctgggagaagcagggctaaactttcaggggattcagttattcccttctcccatggcaacagtgattccttggttagcttcccccatagtcatcagctccttcttccctaggcagtccccaacttgtgactaggccttgtacatcctgggtccctatttcccacctatgttgtctgtaaacaacacagtccagaatctctgtcccctaactgtggtggccacagcaagggccttgggcttagagaatggaataaagaagctggaatcccagatgcctgcaattctagctaaagccagaacgctagcctgaaattagtttatctctctgggtaaaaagaagcccctgtaactacataggaataaaggatttccctacaaaagaagggcatttacctactgccaacctcttaaattttatctgctcaaggtcaactttgctgacccatgtcttacaacccctgaa

SEQ ID NO: 102877 - DNA, 309 bp, Homo Sapiens
tgttcatccacgctggtatcagccatgccaggaacaaaggtaaaccaagttcactcatgtgccagcctgagaactcagtgaatacaagatgctcccaaatcggtcacatcccaaactagaaccagccagactgcaaagaacaaatggattaaggcagagcagagtgccaaaaaggggctgagctctgtcactctaccaacttccaactagccacaagactgccttccagaaccagggactcagcaataacacacccgcatcctacaagagtatacagcataccaactccttaattaaagagtaggaaat

SEQ ID NO: 102878 - DNA, 382 bp, Homo Sapiens
cagatcctcactccactgtgggaaggggcaccttctgaaccaacgttttgcatgtgtcttcatcccctgcttgcactccagatctttccttccttcacttaatcacctgttagcatttaccaagtgcttgctctgtcctggacgttatacaatgaggtggccctggaccctggggtcttgctgtgtgtgggcgggggtgatttcccagggatggctctcaaaacagggacgtgaaaatgcatttggagagatcttcaaattccttgaggatttgaaattttcatttttatttcaacaataacttgttcagccgggcgcggtggcccatgcgtggattgccaggcggcaatccacgcatggctaattaatggtatttatagtc

SEQ ID NO: 102879 - DNA, 526 bp, Homo Sapiens
ctggcaatccacgcatggccgacacccctcatggtcaaccgttacaccatggatctgactgccatctacgaggtgagtccccgccgcacggcatccccggtacctgcatgcctgagtccgagtccccacctctctagcgccgcaaactccagcccgggacgcttgcctcccttctccaactggggctccctagcgccgcgccctccagcctggggcccctgcctcccgctcagaccagcttggtgatttggaggtgaaaatggaacccgcgacacccggctcttcgctcaaacatgggtggggcggcccatgcaagtggaaagtcggagaacttttctcagaccgaggctgcctggaggcggaagtggcccccatacctggctcacccctagtcgttgctgagggcgtggttttgcgcggaggcgtctctggggctgaagtctcagggtggggggatccgacttctgtctctccagtccctgaccgtagagacagagaaccctaaaaccgaagcaatccggattcc

SEQ ID NO: 102880 - DNA, 245 bp, Homo Sapiens
ccttgtgccactcatccttactcctctaaatttcttatcctttctgctttcctaaaaaaatatatccaaatccctttaaggaactgatggtttctctatcctaacttgtcataaaagcagggtgaggaaatgtgacatgagatactaatgttgtctacattgcttttgaggaagtgttgatctatgcctatgatataaatgcatatttctttctaaaagaatgtcctaagagacccgttgaatct

SEQ ID NO: 102881 - DNA, 978 bp, Homo Sapiens
  misc_feature (103)..(103): n is a, c, g, or t
aacccgtggggatcgggggctcctgggcctgaagacgacaaaccaactgtgatcagtgagctcagctcccgcctgcagcagctgaacaaggacacgcgttccnctgggggaggaaccagttggtggcctgggcagcctgctggaccctgccaagaagtcgcccatcgcagcagctcggtgagcagggcggtgcggggagggatccgtgccttgtccgtggccccgtctgtcattcctcttgtctgttctctggctctcctgttcctccttgttctgttccattccttctgtggcaacccccaacaccgcccccgccatccacctctgaatctggtcttgcttggcctgcccgagagaggaggttcttctgggcgtctgacacgtcagggttgctgctcactgtgtccctgttggtgccagaagtgggagactgggctcccctcagagactcaggttgggcatgaggcgcctccatggccctcctggaggctcttggccccagggattcctgtgagttctctctctccctcccgacacaggctgtctttaccattaagggttgttttgtgttttactttggaggtacgcctccctcctcccatcctctctgtggccatgtggctgcccagtgtggctgataccctctgccttacagctgcctcctgccttgcttcctctggcggcttggagcacactgactccttttcttttgggggatctgccactaactccctatttcccatcccagaaacatttgtctcttggcaccaccttagaatcccttaaacatggattcccgtgtgtcatttctaaagtgcagtaagaagatagatggaagtcacgccatctccctgcactccatctgccctcttgccttctccccaccacttccccgtctgtcctgcccctgcccagaaggatctgagcaggggcctggcttgctgctgaggctgtcacagctccagagccctgacgctg

SEQ ID NO: 102882 - DNA, 417 bp, Homo Sapiens
gtggattgccagctggcaatccacgcatggggggcagggaagccaagtggatgcaaaagaggccgggaagaagaggatggggctgctggctctatgccaggcccatgtgtccacctcactcccttctaacaactaaaacactcgaggctgggggtcactctggagagaaaatggcaccatttgaagaagaggcttaaccctcttaaaacaccagtggagcctgtgccacggttccgtcattccaggcagagggaacagcttgtgcaaaagctgggaggaaggaatgttgttgccaagctgtgagcagccctggtggtccaaaagggaggccaggcagagtgccatgcgtggattgccagctggcaatccacgcatggcatggacccctgccttggagattcctccactccactgtgg

SEQ ID NO: 102883 - DNA, 340 bp, Homo Sapiens
ctggcaatccacgcatggggcagacacagcgaacttcaagccatttcaccagacacttgcggtgaaaggcgtgttggcacgggagcacgcctaactcatccttccccttgaagtcttccagacagactgcgcaggtctgcccatataattgtaacttcttggcatcacctttaagcaccacctccttatatccgtatcgctcactctgtgcctggttccgcagtttgctgataaaatagcagcagaagataaggctgagcatgaagacaaagatgcctgtgccaaagatgaccatatagatgttgagcggaagtcttggaaactgatggccatgcgtgag

SEQ ID NO: 102884 - DNA, 404 bp, Homo Sapiens
  misc_feature (278)..(293): n is a, c, g, or t
gttatcacgcatggctgggattgcaggcgtgagcctctgcgcccggcatgaagcatctttaagagagtttccattgtttaagttttcagagttgttgaaattccataacattctctcttcttggtcttttaaatttggcctgtattctttcctttatgccaaactgcagaatttttcattattctgtatatcagtcagtgccatttcagctgtgccctggtgcgggtcattattgtactagacaattgagttcttataaaatcctgtgagttgttacnnnnnnnnnnnnnnnncagaattcttatgacagatattagacatactgaatccaatcttttccatttttattttggggtgtaacgtattttacggcatcctgtttcatggatgcagtggcatgtttg

SEQ ID NO: 102885 - DNA, 404 bp, Homo Sapiens
aatgggagcactctgctgtgacttgtagtatattatcccggcgagacacctaaagctggtctgcggcacgttgggatgtgctccttgtcgggctgtagcacagatggcctcgttgtaacattaaactggagatgctggtactgccttggcagaatattgaggaggtcaaaaggctcaagagtgggcatgtagtgtggatctcttatgaaagatcagaagagccaaccatcagaccatgatcccaggagggccgagaggtcgcttccttcactaaagggataagtgcatctgtgagagggcacagcgtcattgagaagctcagtggttttgtcctctgttggctggagtagacagttagagacactgccacgccatgcgttgatctgccaggggatcctctaaag

SEQ ID NO: 102886 - DNA, 373 bp, Homo Sapiens
  misc_feature (105)..(105): n is a, c, g, or t
gacattgccgtccgtgtatctagagggggtcacagacatttagtctgtaaaagtaatggtgcccacgtgtcaccagctcactactgacgggcccttccgctgcgngacgtgctgcgtgtgcgatgatgatatggttgtgattgccatctgcggttcccttattacttctgaggccgagcacctttctgtgcatgtattgggtggctgtttgtgtgtcgtctttggccatgcgccagtttgggtcttctgcctgtttttcttcaggcttgtctgtttcgtattgatttgtggtcagtccttgtatacttcagaagcaagacctttgtcagtggtgcaggtgtgcagatgactgctcccatgcgtggattgccag

SEQ ID NO: 102887 - DNA, 298 bp, Homo Sapiens
ggcatggatactgagtaggcaaggtagcagaggctgccacaggataaagaacatttaaagtttttgctaagttctacaagtcaaaaaccatcaacttaaacctcaaactgtctactaacttcagtttttttcccttcaagaaatagttctaagttcccgatcgtttgccatcaaacttactcttcacaattgacttatgttacccatatttccccaaaaggattgatcacacactctattataaaaaaactactttagcaacaacctcaaagagcatttgccatgcgttgattgccag

SEQ ID NO: 102888 - DNA, 324 bp, Homo Sapiens
  misc_feature (246)..(246): n is a, c, g, or t
  misc_feature (266)..(266): n is a, c, g, or t
ttcggccctgtgatccacgcatggggggaggcgagtgccttgagagatgtcccagagccaagatgggatgcctcctggtatcaaagtgatgttcagattttttctggaaatctagaataggataaatgtgaatagagattagagtgaacatcttctaggatttgaagcccttgagagcttctaggatttgaagctcttggtcttgagaccaagcctctgcaatgcatctggggtccgttgcacaangtgtgtgtctttttaccagngtcttatccccgcttcagccttttctctcctgttagggatcaaaacttgccacaacag

SEQ ID NO: 102889 - DNA, 464 bp, Homo Sapiens
aagcgatgttgttatgaagactggacttcatggctcattgtgtgggagtagagagaaaggaggtctgcgtgactcccagtttctgggttgggcaactgggttgttaaagagaatacagaggagaattaagtgagcagcttcagagatgacaatgagttgggtttgacattcagagtgcgaaatgcctgaggtcagtcaggcagaatgtctaagtggaagtttgttaatcccaaatctgagatctgagccagagagagttctgagtgtcatttgcagaggagggggctgaggactgactgttgatgagagtgtcccagaagaagagaaagggacaaacctagaatggtgggaaatactgtagggatatggagcaaggaagaggagtccaaaaagaaaacaccagcaacaaagaaaaacagcttataagaatcaggccggcgccaggtaaggcaatccattgccag

SEQ ID NO: 102890 - DNA, 595 bp, Homo Sapiens
ctagaggatccccctggcattccacgcatggcaggcaccccacacattcatgtcacacccgcccctcagggctcatccatgccctcggtgcccctaccctcaccctggtcaccctcctcacttggagccacacagacagccgagagcctgggtgcacgtgccctcagtgggcacgagtacatgccccagcgccccccaccacagacctgcagcttccccaggtgtctcccatgcgccctggggctcactactgcacccgtgatctcagggccctcagactcgaatctctcagaaacactcctcaaagcccacggtgccctgcctaaaagcacacacatcctcaacggcacacctgccgaaaaccccatgcacctggccctcccacagcagccatccccatgccctccccactggctgcaagccgctgtgcctgccgtgactgagcagaggcttgggagctccatgaagtcagtgaatgggtgggtgcactctgggtgcatgcacagcagagacactctccagccctgcgcccaacactgtccctgctcaggtgactctctccatgccgaatcaacaacggtgctgccaaggacct

SEQ ID NO: 102891 - DNA, 502 bp, Homo Sapiens
ccccgtgaatccacgcatggctgtttagacttttctatcttccacgtgtaaactgtctatttttctcttattaaccacaagtttgggattcttcagaggccaaactactgttctcccaggctttgagaaaaaaacttttcgtgtcatttagctacatagttttgctgaacttctccttcaacaacaggaaagcatatcttgctagctgggcaagccctactctgagcataatcttaagggactggcaagaattccctggagaaccccgagaacttgctgaccatgctggagaattccccggagaaccccgagaacttgctgaccaagctggaggattccccggagaaacccgagaacttgctgaccatgctggaggattccccggagaaccccgagaacttgctgaacaagctggaggattccccggagaaccccgagaacttgctgaccaagctggaggagttccccggagaacccgagaagcttgctgaccatgcgtgga

SEQ ID NO: 102892 - DNA, 454 bp, Homo Sapiens
taggggcatgcggatgaggggcatgcaggcggattaggggcaggcagacgaggggcagtgcagtacagtgcatgcaggagacaggcatgcccatgagttggccagctgcctgcgaaatagcatgggcaggaagagaggtgagtaaggtgacaggaagtggaggcagctaggaagggaacacagggaggatgctggagggaagggagtgcacaggtgagccgcctcgcagtctggtgctgtcctaacctcacctggcatgagtccccccggtagctagcggggcacaggcacagcgtccacattgctggccagggccccctggcctgcctgggctgagccacctccagtgccaccctgcgcagggagacagccgaggagatctgtgagaagagggcacggatctgcagctgcctaccaggctggccagcaccatcatgagctctcgcgggatcat

SEQ ID NO: 102893 - DNA, 480 bp, Homo Sapiens
aaccacgcatgttgggtgatgccctggacgcatgttgggcaggaggaaggatgaaggcaaagatgaagggctggaggagtcaggcccaggccgcacgtctagacaccttctccttccatacactgcactgatttgctactgccctgcaggtcttgaacagcttcaggccaggtacaggcgtgttgggggagagatggacagggtggaggtgcctagggaagcagagttctgcacagctcagctcttggtctctgcctattggagtttccagctgcctcagatgacagggaggtcagggcagtgctcttatgaccccaaatagtgccccactcaaagcagaccacctgggccggagggagctgcaggggcaggacagcaggcatgggtggagagcgctgggtctcccccaaaatcaccagtgtcacggctgacatttactgagcccctatgtgtcaggcactgtgctaagcccctgacaaa

SEQ ID NO: 102894 - DNA, 403 bp, Homo Sapiens
  misc_feature (55)..(55): n is a, c, g, or t
  misc_feature (349)..(349): n is a, c, g, or t
ctctaccaggcgtgctcacccaggtcacggagcagctcccagcagagtggttccnaggtatgcctcttggctcgtttcctagagccctgtgcagcaaggtggaagtggaattacacttctcagagggttctagaacctgaagagcaaggtgactaaaacccagcaccctcttgggccagaagtgccacacctctctgctctttcattgactggaaggtgtgtgcagggacccaggaagcatggctaggcctctccagggacagccaggaaggcttattatacaggaatgggccatgggcgccaaggggaacagggaggtgcacagaccttggctcacaatgagcaggcngagaccgcctctgaacaagcccagaggctgtggttaacatcagtctccattcac

SEQ ID NO: 102895 - DNA, 388 bp, Homo Sapiens
  misc_feature (64)..(64): n is a, c, g, or t
aaaagctctgtgggtgattctaatagccagtctgggaccttattgtgggccagattatgagaanctactataacaggaagacatagacctgggctggctctaatggaaaggggccttctagagcgcctgggggttttgaactgtttgggtacagataactctttttagtctggattcttacagtgatcctgaaaatgtatattatgccttttctctttaggaaatctttgggaaggctttgttagagaacgtctttgtggatgaaaggggctctctttctccacatctcttagacccactccaatccactccaaaccaccagagaaagtcctcattgttcagtagaaatccagctgccacactggatcattcccatcagcacaacaca

SEQ ID NO: 102896 - DNA, 155 bp, Homo Sapiens
tgattagaggatcgctgctgctccccttcactcaggcctgggaaaccagcccagtttctggcaggagaggcagaggaggtcaatgcctttgctctgggcttcctgagcaccagcagtggtgtctctggagaagatgaagtagagcccttacacga

SEQ ID NO: 102897 - DNA, 498 bp, Homo Sapiens
tccgtacgcccacaagggacttgaacttcactgtgtgtaagagagaagccgtcaggttggggggtgcgtcttggctggtctggaagggcaggggcggtggtggcgggggcggcagcagccagctgaagccatcttccttagccggtgctgagcccggcaaatctctcacctccgccagcgggcccggcccgggcccctcttcgtaggggatcttgcagcccggtttgtgggccaccagcacaaactccagacgttccttctccttttggagctcggcgatctccgactccagctctgctttttcttcctccaactgatctgtctcctgaggccagggaggccaggtcacagaagagagagaggaaggagaaaaaagcatgtcagtgaccgggaaactcgggtcatggctcccttggacttgctgctggaaggcagccccgggctgagaaaaaacacctcctgagatggagtccttgtggcgtgacggtaccgagccta

SEQ ID NO: 102898 - DNA, 441 bp, Homo Sapiens
ccgccttctcctcactcacccctctgttcattgcaggcagacagtgaactcccttctgctcctcaaaccaatacttactccctcccaccttggctttgtctgagctgctcaaggagtacccaccaccgtccaacctccctcccctgttgaccctcaggtctaggatatgtacactacatgaagcacatcccccaacacatgacagcctggggcaggccacttgccatgtactactcgacagcgctcacccatctgtgatcctacaaacctcatgtgcccatctgctctgtgtctgtgccctcagctagaatctaagtttcacgtgtccaggacattacctagaccggcttactaaagtatacccaaacactaccagcaaagatctgttcaaagaaatgtgaacgaaacctgacccactgatgctggacagtagattcccgc

SEQ ID NO: 102899 - DNA, 387 bp, Homo Sapiens
cacccaggcgcacttctcaacattcctggtcaagacagacctcttaaaatcatgggtaaatatccaccgactgcctcctagaagcccgcactgtgctgcacgctgctggggaatactgaggaggggatgtgaaatgtctgtatgtgacccaggacctaactgtggaatggagtccaattctcagggacagagaaagtgctccggtgtgtcctgctggtggagagcacaatcgtcactggagactggatgagctcagggcaggctgatggattattcaggagaggcttcataggggccaggggcctgagctgggctctccaggggtgcagcctggcaggggagaaagggagaactctaggaaggggacggtaagatcatgccagaagt

SEQ ID NO: 102900 - DNA, 754 bp, Homo Sapiens
  misc_feature (603)..(603): n is a, c, g, or t
aggaggcagaatggggccgagaggaggagctgagctgtgaggcaggtcccacggccgactccccagggcccaggagttgtgagctggaatggcctcccagaatcacgtggctgggactttgtaccccccatcccatcagtcactgagcatgagtgtccccaggaggacattgcctgcagggaagcaggtcctgcagctctgtctgcaccgctccctgcagcgaggccccgtccctcagggttgtcgtgcagaggacgaagtgtgctgtcaggatgtgcacaaggcttgtgggagctcaaaggatgggggcagcttgggggatggagtgcagtggggacatcttgaggaggcaaagactgagccaggcctttgaggtggagttagatggtcagagggagcagaacctgggggtgcccagaggcacatttggagctgtcagtgggtccgatgttgagggaggcaggtgagccaggccctaacgagtctgtctgccgtgctaaagggtgtggacattagcataaaggtggtcacgagctgtcagtgggtctgatggtgagggaggcaggtgagtcaggccctaacgagtctgtctgccgtgctaanagggtgtggacattagcataaaggtggtcaggagccattgcagcacgttgagccgaggagcagcacatcttgtctgtgatgtagatgggtcagtgtggcagtggcgtaagttgggaacagaggaagggaggctggaatctgggagcagaga

SEQ ID NO: 102901 - DNA, 475 bp, Homo Sapiens
atcttagaggatccccgcaccaggcgcacttctccaacgacagcccctttgcttcaggacagccactgtacccccagactcagctttcagggccctctccatcacaaggactagcaccttatagaccccactttaaggccaatacccacagacccagtatccagaccaactcagctccatggctgcccttcacactcccagtgctttgggtctgtcccagtgccacgtcgacacccatggaccctctagctccaggctggcccccatggccacaggtaccacgtcagcatccaaacattcagcctccaatacagccctcatgggtacagactccagcgccatccctcgtggccccagatttcaggctggcccattcaagctcaggctccaggcccagaccacgctccaaccgagtccaaaaaaggctgacccacagagccccaggcttcaggcccgacccagaagtgcgcctagt

SEQ ID NO: 102902 - DNA, 292 bp, Homo Sapiens
ggcaccaggcgcaattctagaaactgtcccccgacccacagtcagggcaccgtggctccgggggccctgggtatgcaggacctactgctgggtatgcaggacctgggtagccatgaccccacgcaaggatgggcccagggcaaatggcccccgtgctaggtgccaccagtcagggaaactgcagcactgcccaaacagcactggcaagaagatcctaagcacacttcggtcatcctctctgtcaaatgagaggatgacagaagtcgcaagggtgcagaagtgcgcctgggtg

SEQ ID NO: 102903 - DNA, 423 bp, Homo Sapiens
ctccccgcaatccaggcgcacttctgaaacagaaacggagtcatcagattgctcacagtggccaaatcttgccctaaagtcaaagctctgaagcactgcactaaaagagctcttggaacacctatggatacccaaggaaaggaatggataaagttaagccatgatgacctagttgaatccagccattcttgcaagtgcctagttttgacttcagggatggaagtccttccaggcatgccaagagggaaggaaacatggcaggtgcactggctttgaagttgccgtggtggttgcaatcctgcatctgtctgttcctgatggggtgacctgacggtagaggaaaatgtgattcggagacagagacacacatggagtgtgacgatggaggcagcgagtggatgcgacgcatcggccgagcatgag

SEQ ID NO: 102904 - DNA, 241 bp, Homo Sapiens
cacccaggcgcacttctggtgaaagactctggagggcagcaagtcctcagttattcagcatttcagtcccagccccaaaaggcattcaggggaaactccagggtctgagtggctgtgcaggtgacaccaccctcaaccacagcagcttctttgggtctgtctcctgttgggtcggctgaaactaccttgggagaaaaggagttttactttttaaaaatgagagaagtgcgcctagtacgtc

SEQ ID NO: 102905 - DNA, 558 bp, Homo Sapiens
caccaggcgcacttcttacctgcctccaggcagccatgcgctactgaggacggggatcacgctgggcaggagctccaggccccagcacagctcatgcccccaagggcaaaggctccccgtgcagcgcgtgcccctggagggtccactgcccgatgcatcccgcctgcagttggggactagaaattactgcttcttactggaggcaaaaccagagctgccagtgctacatccagccagctcggccccagagtttcccttaccaggtcagcactggccccacggagccctggagattgggcacggcccccctgccccagctctctgggacgatcgtccggctccagccgctctgataagagtgcccgctacccccaaatagctgcctcagtcctttcacagccaattctagagagaaggaaaaggagtgagacgagctggccagcacacagtcaaggcccaggggctgggatgggcggactgtggcatccaccaatttgtcatttgtgcaaagggcccggcctgagctttcgccaaagggaggcccgcccaaccactgcc

SEQ ID NO: 102906 - DNA, 482 bp, Homo Sapiens
cacccaggcgcacttctgtattcccctgtgtacagtctccttctgtttctaggtttagaagttcaggaggtgactgtgtttctccatttccacagccaaatggggtgaagaggtgaggctaggggagttgctgtgctgattctccagccattggtcagacaggtcacccaggacgcctcgaggaaagccctggagggaatcacatgtgtactttttcatgaagctttttgcaaagcacatctgcgatacactagtttattgaactaatgtccaggagtagacgtgattggtggccaagttatttgggtgacacctaaacagatcacgtgacctgaatgacttctcagaacctttaatatgccaatgtgtgtggcaaacttacaagaagggagctaagtatccagcctctcccaaacctctgtgaacaaagcttctgtcctcccacacctctcacttcacaggcacatcaggctacagagtgc

SEQ ID NO: 102907 - DNA, 444 bp, Homo Sapiens
taccgtctcgggtcctgtactctcggaccctgtctcaaacagcaaaagagtagatctcctttggttctaacaagaggggatgtgagattcaagatcagagcccactgtccactctgcacagaccacatgctcaggtgcacccaggggctgggcaggaagccagatgaaggaaagaggttggctgtgagactgtacatagagatgctgatggtgttaactgcaggatacacagcccatttgaggctggcactctaagtgcctcagctgatggtggcaggtgaggatgtgtgcccagtgtcaccagaacttgccctctttagagacaagttagaagttctgacttttatataaaatctcctgatttaaaaatgttgctaacgaatcccaaattaaagaaaaatactgtgcaagccaaagagcacagtctgcattttgtttgggctc

SEQ ID NO: 102908 - DNA, 465 bp, Homo Sapiens
agttcgacggagactctctagacaagatatatcataactcagttttttaaagtgttatggtatatcttgtctagagagtatttctggttgcttagagcatatttgaagataattctattacatatgcatttggatgcagctatgctcttgggatgactggactagaaacacacaaactattattattttaatgaggcaggctttattttaaaatatacaaaattggaataattgcctaagttatttctatatatcatttggaatactaaactcatatatcttggttcttggatttgaaattgcactttaggtgaaatggaaataaactgccatgaaaacaaaatctgtaaacagattattagacatagacaatatctcagaattaaggcattgttttggaaaaggtgatttaaacccatgaatattgaaagaagagagtctccgtcgaactggtaccgagctcga

SEQ ID NO: 102909 - DNA, 816 bp, Homo Sapiens
cgacggagaactctccagatggacactgcaggctctgcctgcacatcctccgtgcctggaccactgtgaaaagtcttcaggggtcatgtcagactgaggttgtccagaagttcctatccctttgtgtgtgtggtgagcttttggtttgttggttttggtttcgaggtgaaagtcacataacctccagctgaccgctgcagtgggcattgagtacattcttggtcctgtgtcaccaccgcctctctctcgtttcaaaacttcgtcatcaccctggaagagcaccctgtactcgctacatgaccacacccgttgcccctgcccccgcctctggctaccactaattggtttacttttgaggtttgcattgggctatgtccccatggccttcgatctgtgacagagatcctggctttcatacatccttgggacagagaaactaaggccagcgtccttaatagcatgaccaggtctgcttggactgtcctttgaggtgtcctgcaggcactgattctgcacctgccaaggcctgacctccccgtaatcagcagataatccaatagaggagaagggcacttgaggccatgcagcggctgaacgggaagctgtgctcagcgtctctccaagcctctgcattccagtgacaacgtccgcagggcctcagtgaataaaccgctgcgaatgcacgttggtgaggccatcagctgccgaagggaagctggggaatctggacggaggagaaagaaacgtgggctgcactcccggcgacacattggactaagaacggcgcctgccttctagagagtcctccgtcgaact

SEQ ID NO: 102910 - DNA, 356 bp, Homo Sapiens
ttacggagactctctggaagagcatcagtataacatataatggctgctatagactagagcaccaactcagtcaggcattgtcctatgcgattaaccgtggagatgttatctgtgactcctttcaagtctgtgggtaggtattatgataatatgtcctctaatttatcatgacatggagagttaactaacttgctcgaactcagtcgtggatctacgcacttcaacacacagcccatgctgaatgccactttaccacttgcccacctgctttccattttccaaattctaacctgtcctgtctgcgtttcggcacctctccgatccgtcccgatcttgaaggacttacggtctttgtc

SEQ ID NO: 102911 - DNA, 553 bp, Homo Sapiens
  misc_feature (238)..(352): n is a, c, g, or t
  misc_feature (356)..(389): n is a, c, g, or t
ggctcggcccggttgacggagactctctacttagaaccctcccataagccgaacccaatctgccttttcaccatcttcccatcttcctactgcctccatagttatgctgcgggatctagctaagtaaactctaagttattctcccatgttttcctagcacctaacatatcagttccccctccacccccattttcttccacatacggaggctcaataaataatagttaaatgaggctgnnnnnnnnnnnnnnnnnnnnnnnnnnnnnnnnnnnnnnnnnnnnnnnnnnnnnnnnnnnnnnnnnnnnnnnnnnnnnnnnnnnnnnnnnnnnnnnnnnnnnnnnnnnnnnnnnnnaggnnnnnnnnnnnnnnnnnnnnnnnnnnnnnnnnnngctggcctgccgtcccagcaactcagaagcctgatggtgggagaatcgcttgagcccggggaggtaaagccttcagtaagccatgtaagccatgatcgcaagcctgtactctctgtactctaacctgggtgaccgagcaagagtacagagagtctccgtgaact

SEQ ID NO: 102912 - DNA, 486 bp, Homo Sapiens
tcatcgagctcggtaccagttcgacggagactctcaaagagcctcaaaattcaatcatgttaaacaaatcctactgccaaaacagctttaaacttctgtgcctataagtaaatgctatattccacaatattttaccaggaaacaggatttcacctaacacttcatcaaaccttgtttttgctgatagactctgacgctccaagtaaggactgaatgcaggcagacaatgcttcctgtgataatccttggaacactgccctatctatgcatctgtataatttggagagacagacaagagttcttcgaaccgtaggataccacattccatgaagatctgctggagaaattgtggtctgtggtctaggattgagggattctgttgaaccagattttgtcagactgttagactctccttcttctaagtgaacatctgaaaatgaagcttctgaagaaggagagtctccgtcgaactggtaccgagctcaa

SEQ ID NO: 102913 - DNA, 569 bp, Homo Sapiens
ctcctcagagaagcagtgctgctgtgaaaagtagctccctaacgagaacaggaaatacagtagccactgatatgttatctgaacatcccttgctatctgagccatcatctgtgagtttctataattggatgtcaaatactgtgggtaatcgaggaagtgtgttacaagaatctcctgttacaaaatcaggacacaatagtcttcccacaggtgttgcacccaatcttccaacaataccctcagcctcagatttcaacactgtcttgtctagtgaccaaaatactttggatgggacacattctcagcatagcaccagtcaggatgatgtggcaggtgtagaagaagcaaaccaagggtttcctgctgttcagcttgctgatgcacaggttgttttcaagcctcttctgagtcatacaagggatccagtcacaggatacaatgccattcatgctaccgaatgtactttaggagaacacctttcattttcagggactttggactgcctcagagcagatattggattcagacacagccaaagagagtctccgtcgaactggtaccagctgata

SEQ ID NO: 102914 - DNA, 607 bp, Homo Sapiens
tgagctcggtaccagtgtcgacggagactctcttccatgaattattttaacaaatctcagaaatcctgtgatttcacccctacatagctattaagaaatgagttcatttttctggaaatacttctattctgtgctataattgatcattagctagattctaactgatcttttgttttgttttgttttcagtaccaatatctatgagtcacttaaaccccaaagggtgcccaatcctgtgtcatttcctggaggaatatcaaatacctccattttaggtaaaagtttcctttcctctttttatacttaataaacaaagataagatctgaaagcaatggctatttaaaaataaattaatacgtagctttttccaataatagaaatattcaattcaatttggtcagattaaagacatcatttaaacgtttctcaggcaagaattttgcagctatttaatgcaagtctcaattatagtctaaaagccctttttcctaggatgaagaatactatttcaaacccaaagacacaacaaaaagacacctctccttcccctagctcagaaagctaagggaaggagagtctccgtcgaactggtaccgagctgatgac

SEQ ID NO: 102915 - DNA, 552 bp, Homo Sapiens
  misc_feature (210)..(350): n is a, c, g, or t
ggtaccagttcgacggagactctcctgggcccttgcaggattgggccaagatgcttggtgctgcagatagtctcccggaagagaggggcttacacattcttggtaagctgtggctgggtttagaatgattccttgggaaaaggggtagcaaagtaactttgtcctgaagaagccccaagtatcctgagcccagcagccttacataaagtnnnnnnnnnnnnnnnnnnnnnnnnnnnnnnnnnnnnnnnnnnnnnnnnnnnnnnnnnnnnnnnnnnnnnnnnnnnnnnnnnnnnnnnnnnnnnnnnnnnnnnnnnnnnnnnnnnnnnnnnnnnnnnnnnnnnnnnnnnnnnttccttaatggtcagggttatagtgaggactaagtgagggagggctcagctgccagcttggcatcctcagcccatggcagccgtgtcatggctttgtgctccagtttgttgccagggcctggtgtttcatggttcactctcttgtctgactgtttcccagatcaggcaagagagtctccgtcgaactggaccgagctgatta

SEQ ID NO: 102916 - DNA, 540 bp, Homo Sapiens
agttcgacggagactctcccctaccccccaaaaagggaaaacaactgggactggataataattcacaggactgatgaccagtccttagaagttaaaaatgacctgcctggccagttgtggtggctcacacctgtaatcccagcctattcttctattcaaatgtttattgagcacctacaaatttataagatggccatataattgatcatacaaactaggacactttttaatgaaagagctactatcaaaagctattatcaataattaaggcaagacaacaagtataaattggaacaaccaagacatattgttaccatacatatttatagaatgaaaggaaagaaacatggtctctgatgttaaaacctccatgatatagaggagtgagtttgtatactagagtaataaggtctgtgggtgataagtactagaagcctgaacagttagaaaatgtaccagtttcttaggccactctcttgtccaggaatcataacttagtcttggacaagagagtctccgtcgaactggtaccgagctcga

SEQ ID NO: 102917 - DNA, 448 bp, Homo Sapiens
gttgatcgagctcggtaccagttcgacggagactctccactcgactctgctaagaggttccgaagaacaccagtgaaagaggaaaggtgaagacacagacccaagcagaggccccacctgggtctcatcctcagcaggtactctggccacgctctccaggtagacgggttcctcttgatcctgagacacatggccattggcctgtgggaagagaaaagtaacatcacatctagagatgtcccagagatctgcatagcatgggcctcttttcaactcacacaatgtccagaatgtactcccatcatgcccagaaatccggagcctcttacagcatcattacaaaagcctgctctctcataccaactttgtcaagcagagaaacaacaaaaatacatttcaatagacaaagttggtatgagagtctccgtcgaactggtaccgagctcga

SEQ ID NO: 102918 - DNA, 534 bp, Homo Sapiens
  misc_feature (266)..(305): n is a, c, g, or t
gagctcggcaccagttcgacggagatctcctgcactgttacacttgtgggctctgagctagtgtcctcactgcacctctgtcttaagtctatcctcctggacagcgctgtctgtcgtccatggagcttcctgttgtggtggacatgttctagagtctgagctgcccaacaaggcggctaccagccttcggtggctactgagtgcttgaatgtggttagtgccaaggataagcttaactcatccctttaattaattgaaattcacannnnnnnnnnnnnnnnnnnnnnnnnnnnnnnnnnnnnnnntcatcttagacccagctcagtcactccttactccctggggcaacattcaggaagccccgggcaggacttccgcagaacctctgtggaagcacctttctccctctagctgcctgactccagactagggactcatctcagagttcccagggactgcatggactgggtgctcaaccaatgcagactgagatctggaactctgagagagtctccgtcgaactggtaccgagcc

SEQ ID NO: 102919 - DNA, 456 bp, Homo Sapiens
gctaccaggttgacggagactctctaaagagttccaggtcccacagcctctgccacgctgcctacctgtctccagcaccgggaagctgcctgtcctcacttcctcccagccagaacttgtgaaatgcagtcctggtgggttcgtttatcctcagcatcctgcacaatctgctaggctgacagtgtggcagcttgaagccgccaaaccaaagacgtcaggtcactctggtaggaacaatgtctagagataaggcgtggccagctcaggcctggtcctccacagagttgagaggctaaataaagcctccaaacatctggttccaggccaagcaaagacacaatctctccagtagcactggcctccaagacaacaagcagggctggctctctggctgcgactcaaggctatagggcatgcagccagagagtctccgtcgaactggtacgagctcgatac

SEQ ID NO: 102920 - DNA, 438 bp, Homo Sapiens
  misc_feature (179)..(179): n is a, c, g, or t
  misc_feature (193)..(193): n is a, c, g, or t
  misc_feature (264)..(265): n is a, c, g, or t
  misc_feature (298)..(298): n is a, c, g, or t
  misc_feature (320)..(320): n is a, c, g, or t
tcagctcggccagttaacggagactctctgtcccgtgaggtgatgtagcacttcgcccgcggcggctgcagtctccgcatccgactgactgtctgtggggcaagcacagcggggagggctcagaggggcaccaccaggtacgcccatgccagggatgtcgccgggaatgggctagaccncacgccagcagccntgaaccccaaaccagtgaggacttctttcggcccaaatcctccaccacctgttacatcccccaggaggacnncaagatgaccctggggacgtgaagaaaggcaanaagcagcctccacatcacctcnaggtccaggctctggttgctcgacgcgtcctcttccgcgccgtcggcgtccccagtgctctcctcagtgccatgctcctcctccggctcatggctctgaggagagtctccgtcgaact

SEQ ID NO: 102921 - DNA, 574 bp, Homo Sapiens
cccaggctcgctctctctgaagggtgtcactgagagcagggcgtcaacttaccatgaatgagcacaggctctaagagaggacttctgggaaaaatgactgtcgtaattgtgtgcaattctcaaacaaacaaacacacaaacagacaaacaaagaaaccctccaagctcactacctctcaggttggagttccaataacggattcctcatttggtggcaatgccactgccctcatgcctgccacagacctgggcagttctctctcctgagggcctgtctcctggctgggctgtttcctgagctctttttgcactagccaggtgctaaatgctaagactgaggctgacagactgatgctgatctgtcattagtaacgcagccttccttctgtgggagagcaatggggatgggaagatagggtacatatagccttcgagggagctcacagtatgatggtgggaactctgcttcagctttgcacctgtagatgctaactaaaaattaattcactctcgtcattgtgctataataggacaatgacgagagtctccgtcgaactggtaccgagctcgatta

SEQ ID NO: 102922 - DNA, 517 bp, Homo Sapiens
tcgagctcggtaccagttcgacggagactctcagaacccgaatgtgtagaatcctctctggaacttacccaagtgttctcattcccttttaatcctcagttctctttttctttcatttggactaagaatgtactattattcaaaagcctgcttcatccataaaacattatggagggaaacactgtatttttacacatgacaaccaatagaaattcttgtactactcctgagtatttcaccagtgtgtaatagtcactgctaatgtgtatttcctatagagcacacaacccacatcaccaaagccaacgtagacaggatacaggaaaagagacaacaggtactcacttcagtgaataaagagaacaaagaactacaaatatacccaattttcttatttttgaaatatcagaaacttttactcacaacacctaccacaactctctaagaccaaggctatctttaatgacagacttggtcttagagagtctccgtcgaaactggtaccgagctcgatgag

SEQ ID NO: 102923 - DNA, 577 bp, Homo Sapiens
tcgagctcggtaccagttcgacggagactctctaaacaagaaaacttgtgctgacctcagggcctttgcacatgctgttcctgctgctggaaacactgttcccaggctctcggtaccgacaggatcccttcaggacttggtgtaaatgctacttcctcagcaaggccttccacactgcttcacctcagtttagtctgtctcctctcttttctcctcctggcacctaggacaatctctcattggtctgagaactccacaactccatctgtccgtctctcttttcaccactagagcctggcctggtgcctggcacacagtatagattatggaataaacaaataagcctgtgacatgggctggcaccactggcatacacacacacactctcatatacaccctcacacagttggcacagcacagaacagagtaacatcaaatcctgactgcctgggttcaaatctcacctttcccctaaacagcatttggtaagttacctgcaaattttaaagctgtgatattgtttggttcgtcaagttcttagtatggtgagggtgtatatgagagtctccgtcgaact

SEQ ID NO: 102924 - DNA, 593 bp, Homo Sapiens
ggtgtgacggagactctcatttctcacttcctttctccttaccccgctggctccaacctgaaaccaggtacaatcttctgtcgcatctgcattgggtggggtatcacttctgctgacaggagacgagtgagcaggggcaggtaaggattctgaagcagacagagtctcccgcccccatcatactatctttccaggctcttgtccactttcagcacctcccctcctgatcccataccttggaaaaggacaaatatatccaccctaaaaaataatgggacctacaatcttggaagcaaaatttgtctgtgaaaagaggctatgtagagagcacaaggctttgttgcctcccagtaatgttcacaattccgccttacccacctcaaccctagcaggtctagacctggctccctctgggaagtgtacctacagccctggtttcaggaggcttggcgctcttgttctttaggttatttgaggatcttgtctccttgagtagactgtccatgcctggagggcagggctgtgcctcacacctctctgtatcccactaaagagcctgaccaatgctgggatacagagagtctccgcgaact

SEQ ID NO: 102925 - DNA, 582 bp, Homo Sapiens
atatcgagctcggtaccagcttcgacggagactctccgtgaagttccttgcccaacgagatacaactggctcctccaggtgtgaaatgaccctgtgcacaatccccgtggcacagcctacttcgccctgcccgtcggggaaccaggtgatgtagcctgccccctggagagatagggtacagccttgtgtcttcctacaagcccctttctggcagctgtagcctgctcacctgccagtggtgtggcaatgcctctcccacaagtggcagagcccacctgcccagagccctatgccaggtagatggcagggttgaaacgttcagctcctcacccttgaagatgtgaaaggtgagcagaccaatcttcacagccactctcctccccaaaggtgtccagctcgcatagcacagcctccatgtccccttttcccttaggagggcatagtccccctacccccgcaagcggtccatccctcatcctcctcctcggcaatcctgccaagtggttggtacagcccccatacccttctctccctagtagggggtagttgctcccctactactaggagagtctccgtcgaact

SEQ ID NO: 102926 - DNA, 544 bp, Homo Sapiens
tcatcagctcgcccagttgacggagactctcccctggcaggcaggagcacatcaggggagagcacattgatcatggaggccacctgaggaaccgtcgaggaagctgggcatgttctgcttggtaacaaggagactcaggtgggccatggccccatccaccctccctgttgacagcaactcagagactggtgaaattctgtagggcagactaggattcatgagagggaggaagcagacagctggttttgaccttcctgatagttggagctgttttaactttggaatgggcctattatagcagtagtcagtgctagctaacattttgtatgagcacttactacatgctaagtccttactgtaccactttagtagtctatgcaagcatcacactagccctatgaggttggtactgttatcaccccctaatacaactgaggaaagtgaggttaaggtacttagtctagatgactactagtaaggggtagagcctgggtaacccagatgtgtctctgactcaaagcgtgtgcatttagatactgtgcaa

SEQ ID NO: 102927 - DNA, 177 bp, Homo Sapiens
tcgagctcggtaccagttcgacggagatctccttggtgtgaaccaaagaagtgtggcggtcaacttcactgttatcttaaaggcagctgggaggagaccttggtagcgggagggaaaaatatgccaaaagcttccaggaagagacttccccattgacaaaaacagtgaagtcaaccc

SEQ ID NO: 102928 - DNA, 512 bp, Homo Sapiens
tcgagctcggtaccagttagacggagactctcaaaatttggtgactcttgaaacagcagcattctcacaagggtttggggaacagggagccaatactgtctgacaattcttgcctgtgtatggcagcacacagtggcaagtgtagccacttatgtcatcaaagcaggttccttggttcaggcatggatttgaggcacattcatcaatattcacctggcagttatagcctttaaagcccttcttgcaagtacacctgtatccattcaccagattgtcacaagttcctccattctggcatggattcgaaaggcattcatttttgtccacttcacagttgatgccaacccagcctgcatcacagagacacttatatccactgagacctccagtacagtttccatggatgcagggattgctcaggcattcgttcacctgtgagtagcagctggggtgatggggtccctcggggcatatacagcggaaactgtactggagagtctccgtcgaactgg

SEQ ID NO: 102929 - DNA, 285 bp, Homo Sapiens
atggtcgtggcttagtaaatcccttgaaagtagacaaaggcatctgaagcaatatcaaatgttgacaactccacgtacttaaagaaatctctgaattgattagaaaagaggatgattttggcaagtggttcatgtcgaatacattctctcagcataatcccacaacgtaaggcaatctgtggggcttcatatcctttgaggagcataaacaggatatgaggatgagcactaatatactccacagtaggactccgagtgcctatctgtctctcaagatgttgttta

SEQ ID NO: 102930 - DNA, 189 bp, Homo Sapiens
ggagactctctgcatctactgtgctattcatatatatggtaagtaagagctccttcctccttcccaaatacctaggtgtattgttgagagcacaaatagatgcagagagttaagcatattctgtttttcttttactacatttgtgttagaaatggaaattaagttatttcagtaatgtgcgatagttgt

SEQ ID NO: 102931 - DNA, 343 bp, Homo Sapiens
ggctcggtaccagttcgacggagactctcgatatttaaaacaggagagctgatcaacaaagtcacagtctacagattatactcatagcataactctccaaataaaacagatcatcagaatggcagcaatgttttactgttctatttttatggaatgatttacttggcattttactttctgaggacaagaaatcttacatatctttatatttctggaaccaaacacagtgccttccacatagcagaaataaaataagtactcatgtgggtgactgctaatcttaatgcctacttgtctattcagcaattgttatggaatttcaaagcagaaaaaggggaaataa

SEQ ID NO: 102932 - DNA, 581 bp, Homo Sapiens
gtcggtaccgttgacggagactctctgtgtctcagaggacgcctctctggcatcatggtgcagttgtgaccaggcacaatgacctcacttgcattccattgtgtgcactctaagaggaggaggcagcactgccaactgtggtgcagactcatctgctggtccctcagcccgtctcagccccacgtgcccctcctatacgggattctggtgtaccaggtatgtgtttctggtacagtgtaatcctgagtacaagctatctacttcatctggtgctcgtccaaataaactaccatctgtttaaatggcagaacaacagctgtgccatcaggacgacagcatgtctgcagatggcatgtaagccatctgagggatgtttcaagggtaaccgtagacacaaaggcttctgcgctcaactgctgactttatcacttacctgtgtaaggagcacctgtgtttctctgctgtgttgcacagctttgaacagtatgtagctatgtgctcagtgtcaaccggagtcttgttctcgcttgcttgcggccacggatctttcgccacgtcaacgaccgcgatgtaatacgacg

SEQ ID NO: 102933 - DNA, 489 bp, Homo Sapiens
ctatcgagctcggtaccagtttcgacggagactctcgtatttggccctggacttgcctcttttgcgtaacatttattctgttttatttgccaaatacgagagtctaagctgttcactgagggggcagtgagacgtggggctgctggtcctaggagctcttccatgacacctagtgttacctgggagccccaagccccagtcccccatccctcaggaaatccagttggaacccctactttgcagggccatctttggcctgaagccaccaggaaagctgtcccactgactgacccctcttaaggaagctgcagactgctgggcccattttcagatagaggaacggagagctgcggcagcccaggagccctgccaggcttccttctgggtgcagccacctgtgggtggggcgcggcctcgtctgagaccaaggcagggcccatctactcagctgtctgctgagagtctccgtaactgggccgagctcgataa

SEQ ID NO: 102934 - DNA, 233 bp, Homo Sapiens
ggagctcggtaccagttcgacggagactctcttcatatggcattgtcggccttatagggataccagtcacattggattagggcccaccatcacgtcataacttcatcttaacttgtctacatctgcaaagaccctatatccaaagaaggtcacattcataactactggaggttagaactttgacattctgggggaggcaggacacaattcaacctgtaacaatatttgtgttt

SEQ ID NO: 102935 - DNA, 471 bp, Homo Sapiens
cggagtagctcataaataggatgaagagattatccttcatgtttccaaggtctaatactatttgaatcgagcttgatgttatagatgcatagcgaagaaatctacaagtgaaatgatatgataactaagcactcgctcgaaaatcacatgcggaacatcactggtagagtactcaggggtaaatacttcaagatgggcacaatgttcatgttaaatgcatggttggccgactgtgggttcatttaattcaggttctctgtttgggggtatgttgaaaatttgtcataagaaaatattattcagaggtctcaagaggcagactgccaagaatagcagttagaaatagatagcacaggcctgcgtatagatcagcccgtaacccaggcagacaagcctgagggaggagaactgacgtgagacccaggagatcgagaccagccaggagtaaaaaagagagtgtccgtcgaaact

SEQ ID NO: 102936 - DNA, 479 bp, Homo Sapiens
  misc_feature (73)..(81): n is a, c, g, or t
actactggaggttagaacttgacattctgggggaggcaggacacaattcaacctgtaacaatatttgtgtttnnnnnnnnnccaaaactacagttaaggttccttgaacaccctatttatgagcccatacagatccattagagacaatactatgagaatgaagaacctggattaaggagccacactgtagaggttcaaatcccagctcagccacttacaagctacataactttgaggcagttcattaacttcccagtgcctcagtttccttatctgtaaaatagcagcacataggtcaaacggttgttaggaggattaaatgagttatcaagtacttagtacaatgcctggtacacactaggtactcaatcaacatgagcaattgttgatatgattatcaccattttcagcatcccaaagactcccctaggaagcattcttggggacagagcatgcttcctaggagagtctccgtgact

SEQ ID NO: 102937 - DNA, 203 bp, Homo Sapiens
ttcaggactaggttagataacgtatgtattgggctcggaagaggtcctggcacattagcttgaacacttagtcgtgttatgtggggtaacatcgttgttatagaataagtgggggaggcagtcaggaagggcctcctggaggaggtgacatttaagctgagacctgagcgatgaggagccaaccgtgatctagtggaccggct

SEQ ID NO: 102938 - DNA, 417 bp, Homo Sapiens
ctagaatcaaacgtgacgcatatgtgtttggaactgtgcgtgatcatggtctatggtgaatcgacatcagatccatggacttctagctcctccctaacgttctccaaggagaaacccttgaagcaacatcctgtgtagtctgttgttctattattgaacaattcattctgttaaaaagttctttgtgaaatcggtggccccttatatactgaggggggtcccagaggttccacctgccttagaatatctcattgtcacatgcttcccttgtttcttctcccctgcttgacatggtcctaatgttcacacctcctacctgacaagtcctccatgagcaccttgggtctctctgctcacctccagacctctgcactgtacagacacaggatggttgtgagcagagagtctccgtgaact

SEQ ID NO: 102939 - DNA, 564 bp, Homo Sapiens
ggagctcggcccagtttgacgcagactcgtccatgctgttcaaacaggtcagacgacaattcctacaaaggacaagctttcaattttcacattaggagtaaagattttcctgttttcagaaaccgacgctatcacagaaggaaagcaatgctatgtcactccctgtcagaagctcctgtttattagaaagaggaagctctcccccggcccccagccacctctggggacccaagctttctcaatctcattcaacttcctctgtaaaaattcacaaaatggccatctaaaggaagtgattccattcccacccagcataagggcctgagctgtttctacattcctgttcaatgttcttcccagacagctgctgcacagcacattgctgatttctaagcacagagaactgactgttgtgaaaggtggaggtgaggcaggggataaaccccccacacctgcttcttcacaagcttcatcagcctctgaccctctaagtccaagatatagcactctcgaacacttagaattccatgggcaatgaatgccaccaccccagcggttttccaa

SEQ ID NO: 102940 - DNA, 317 bp, Homo Sapiens
caggagactctccaggcaaatagtcacactgcctggagagatttaggaacaccagtattccactgagattgctgagagtctcaggaaagaaaggtctaacttaaattgtattttaccatttctgagtaatgaatggattaattctatggagatatattctacagtctagaaagggaaagccaaagataaagactgttgtatttattcattagttgccaaagggaaagggaagaccgattaacaacagaagtgtttctgttattgtgtatattatcctgtttattttaaagatgcttgcttatttacattttctttta

SEQ ID NO: 102941 - DNA, 492 bp, Homo Sapiens
actagtccacggttgctccaaattccctggagttctcgaagtctgacatgctaatgtctgtcctgtagcttctgattgaaactcggtcgacgttcttcctgtgccgggctctggccacccccacagccacggctcccactgccagcaccaggcccaggggcaccagggtggagaccagcgctctggagcttccaccttgttcctcagagctgccggaatccacagatgctctgctcccatcggcttgatctcttgtatctgccaccgccttttcctctgcaaaaagcctgggatcctgaatggctttgttctcaatctcccgaaaaccagagtctagcaccttctcatcaggagcagcgtctgccttcgctaggctgacatcgcgggaccccgctgccttcctctcttcaactgccacatagacggctgcagtctctccatagaagtggccctgcttcactccacaccagtaccagccaaccgtggactagt

SEQ ID NO: 102942 - DNA, 396 bp, Homo Sapiens
agttcgacggagactctcccctaccgcttgggttaggctaggggagaggatttgttttttccgcttttagcgactgacctggaagcccagccccgctttgtatcccagtttcactgaggataaaatgatgcatttcaagcaccagacaagcagcctaaagatagatctttgtgatctatttcaaattgtgccttcaaagtcatcagctgtaacagtgtaagtccttatgggtagtgaaattctcagttctgagctttgtcgcatcattcattttgtggcttttcaggtcatgggattcggtctgtacctgatggatgggagtgtcagtaacatctataagttggatgccaagaaaagaataaacttatccaaaatcgacaagtacttcaaggtgag

SEQ ID NO: 102943 - DNA, 632 bp, Homo Sapiens
tccagtacccgagcatgcttgaatggctgccggacgacgtgtatgcaccactgcgctgcatgcgctccctggacaagttccgtcgacacgtgagcaccgtgctgacctccaaatatcgttaagctggagcctggtcgacgtgtattcaccactgcggtgcatgcctccctgtacaagttccgtcgacacgtgagcaccgtgctgacctccaaatatcgttaagctggatccagctcgacgtgtattcaccactgcggtgcatgcctccctggacaagttccgtcgacacgtgagcaccgtgctgacctccaaatatcgttaagctggagcctggtcgacgtgtattcaccactgcggtgcatgcctccctgtacaagttccgtcgacacgtgagcaccgtgctgacctccaaatatcgttaagctggagcctggtcgacgtgtattcaccactgcggtgcatgcctccctggacaagttccgtcgacacgtgagcaccgtgctgacctccaaatatcgttaagctggagcctggtcgacgtgtattcaccactgcggtgcatgcctccctgtacaagttccgtcgacacgtgagcaccgtgctgacctccaaatatcgttaagctggagcct

SEQ ID NO: 102944 - DNA, 334 bp, Homo Sapiens
acgcagtggtgaatacacgtcgaccaggctccagctaaacgatatttggagctcaacacggtgctcacgtctagccggaactaagcacagggaaggcacgcagacccagcagctagaaaacacgtcgacgcgacaagccagtaaagcaagctagggtactggaggatcgctcaagagtcgaccaggctccagcttaacgatatttggaggtcagcacggtgctcacgtgtcgacggaacttgtacagggaggcatgcaccgcacgtggtgaatacacgtcgacctcgcaggcatcgcatgcatgcttggtcatgctcgggatcctctgaacaga

SEQ ID NO: 102945 - DNA, 592 bp, Homo Sapiens
tcgagctcggtaccgattgcatcaacgccgcgcgactcagatcagacgtggcgacccgctgaatttaagcatattagtcagcggaggagaagaaactaaccaggattccctcagtaacggcgagtgaacagggaagagcccagcgccgaatccccgccccgcggcggggcgcgggacatgtggcgtacggaagacccgctccccggcgccgctcgtggggggcccaagtccttctgatcgaggcccagcccgtggacggtgtgaggccggtagcggcccccggcgcgccgggcccgggtcttcccggagtcgggttgcttgggaatgcagcccaaagcgggtggtaaactccatctaaggctaaataccggcacgagaccgatagtcaacaagtaccgtaagggaaagttgaaaagaactttgaagagagagttcaagagggcgtgaaaccgttaagaggtaaacgggtggggtccgcgcagtccgcccggaggattcaacccggcggcgggtccggccgtgtcggcggcccggcggatctttcccgccccccgttcctcccgacccctccacccgccgtcccaaagcacag

SEQ ID NO: 102946 - DNA, 289 bp, Homo Sapiens
tcggccgccaagattcctccgggcaggactgcgcggaccccacccgtttacctcttaacggtttcacgccctcttgaactctctcttcaaagttcttttcaactttcccctacggtacttgttgactatcggtctcgtgccggtatttagccttagatggagtttaccacccgctttgggctgcattcccaagcaacccgactccgggaagacccggcccgcgcccgtgggccgataccgcctacaccgtgcacggcaggaatcccgcgaacggatgctctagagtgcc

SEQ ID NO: 102947 - DNA, 153 bp, Homo Sapiens
gactgcatcaacgcgctcggaggcggagttggatgcagtcagcggcgttggatgcagtcagcggcgttggatgcagtcagcggcgttggatgcagtcagcggcgttggatgcagtcagcggcgttggatgcagtcagcggcgttggatgcagt

SEQ ID NO: 102948 - DNA, 447 bp, Homo Sapiens
ggccggagctatctttcgattcatctgtggggtctcggtttggaatgaccagcttgcaaggcagggccaatgggatgatggagtgctggtagaccagggcagacagcgatccgaagtttggctcattggggcagcccttgagcttgactcctctggggccagtctctatcagaaaatgcctgaccagctcatgggtcatgtctccttttttattctgctgcatgatggttggaggtggcgaagacaccttcatggccagcccgtacgcgcctcggaaggagtgactgtcgcggatgatgaaggcccccggctcctggtccttgaggagcgcgatggcctgctacctggagatctcaggcttgtaccaatacttagaagtgtccaggacaaacttcactttagcccgcgtctccgggctgttgtctaaagcaggagaagggaagaaag

SEQ ID NO: 102949 - DNA, 376 bp, Homo Sapiens
ttcagaggtgtctacaactactgcttctgtgttcccacacttcactgcaggaagtgcttcctactgtccagcttcaaccccagccccctctgtgatgaccccctgctacaaagaggactgaatttgcctctgttccttgcccagggaagacacagcaggcctcagccagctatggcctctgatgcaccacagagcccagcactcaccctgctccctggagatctcaggcttgtaccaatacttagaagtgtcctggacaaacttcactttagcccgcgtctccgggctgttgtctaaagcaggagaagggaagaagatgatgatgatgatgaagaggaggaaggattagaagatattgacgaagaagcggatgagg

SEQ ID NO: 102950 - DNA, 467 bp, Homo Sapiens
cgagctcggtaccccaattccattccagcgtaacggaacatcatggccagatctcagtggcatctgatggtacagatacagaaaaactatactctgtgtttttaagaggagtgggaagaaatgggacaaggagatcgatgctacctgcccccagtgatacctaaggacatgagtgtgctgtgaggaagcctcttccagagtaggggggagccttcataaacttctttattcaactgcaaccagtgagatttatggcatagtatggtaccagatactgacaaagagccattaaaatgataacaaagaacttctagtagcatggaacgatgctcatgaaaagtaaattaaaaagcaggacacaaaactctattatattataaactcaactgcgtacaactgtgttagattaatgtataaagagaataaaagcaaaccacagttgtacgctggatgaattggtaccgact

SEQ ID NO: 102951 - DNA, 535 bp, Homo Sapiens
cttctctcaacgaactgaagttgatgctggggttgctgattctcgcctctgagttgaccactcggaatctcatgctgcctccataccagcccagtggttctccggagaagtcagccctgatcaatcatctccttcacgttcttccctcagcaccaagagtcctcaaattcctcatctgagcctacaagccccggcaccttcctgattcatctcccagtcctcttcctaactctggtctgtatggctcctatcctcagggccaggctcctccccttagccaggcccaaggtcatcctgggatccagactccccagcgatctgccccatcacaggcctccagcttcacacccccagcttcagggggtcctcggctgccttcgatgactggtccactcctgcctggacagagttttggagggccctcagtgagccagcccaaccatgtgtcttcacctcctcaagctctgccccctggcacccagatgactgggcccctgggaccactgccacctatgcactccccgcagcagccttc

SEQ ID NO: 102952 - DNA, 674 bp, Homo Sapiens
tcgatgccacccatccacgtgcatcatcagtgtaatctctgattggattcctaattggggaggtcttgcccgtctctagtcagtaactcactgtttctaagcctcctgggccatggcccaattcttctcccagtgaggtggttgctcagagtgccgacccttccatagggagtgagcagtgcaaagaaggtgccccctcctgaaccttgaagtgtagccattagggttttcactggggggccttctcactaattgtactctggtgctgccagagagaaggttgtcagcttcccactgctaggtggcagtagatggtggcagccctctctttccagggcaaggtctggtggatgaggtgcacatggttaatgcagagcagcttaacactccaccacacgagggtgagccctgggataatgtgttgggaggcgtcctggggagggtgaggattgaagcagcccagtctgctgtggcgtgcgtgcttggccaagcatcctgttgtggcagtggccactgatgtttgatcgtgaatgtttatcttgggactgtcttgctgggccgggcccataggtgtagctgagcattcgtggggaatggacgcccagccagagttgtacccgggccagagagtccaggccagaaaggtcaagaccagatgtcccgggctggggaga

SEQ ID NO: 102953 - DNA, 496 bp, Homo Sapiens
gtgacacctgtctgctgtcaggatctgagtatatggtgaaccataaggattggggttgttcatcattcccatcttaagaggctgggggcctctcaatcctgtttgtcctcccatctggggagagccctgctgaagaggctcagtcagtaagttgccagcacttcccatgcctgggtttgggtactgcatattctgtcgccctcggcctgctccaattgaaccgttcatgacttgattaggcacttatcccttgtccattgcctgcagccaacattccaggattcatgcccgcattcatccctgtgttcattcccatggcaggctgattcactggaccgttcatcatacctgttgactgcgtaggaccctgatttggtccactagtgcccatccccatgttgggagaagtcaagcctgcctgtgtcattgggcttttgaccatgctatttatcaaacctaatccaggactgctctgtcgggcctggctggccatgac

SEQ ID NO: 102954 - DNA, 580 bp, Homo Sapiens
atgtcgatcgagctcggtaccgatgcacgggactctacttgggtcctgtggcttcctttctccaaccctggaacagcagcccaggatgaactctagcctgtgagacccttctgtgtgcccccgatctttgcagtcttgtctttcatgagatgtgcagggagtctgtggagcatgtgcttcgaatcaagccacctgtgatttgcaatcgggccatcgcactgttctgagtcgcctgctcctcttccaggaagcctttccctgactggggaggatcccttcctctttaaaatcctgccacttgcttcagactctccctattatatttccacttcctggctgcagtcatcagaattcgggttttattgcatccccttaaagacaagggtcatctgttgtatagctttctgtccccagcacctgacagtcattccgttggaaaaaatactgatagattgcttcttggacttttggctaagatcaagtagagaaacagtgatggagacatccctgaacttgcacaggaggactgagccgtgagtctgaaagaagagactgctcagtgacagattgctggcattgc

SEQ ID NO: 102955 - DNA, 434 bp, Homo Sapiens
tgtttatcgatgccactatcatctcctgttatagtccagttaagagatgatagtggcagtgtgaaatggaaaggcagcagtggatgccagagatatttaggaggtaaaaagtacagggctgagtgattggatagggacagagtgcagagagggagagatccattgtctggctggggacaggaggagacgtttagagatggaagatagaagtttagtgtttggatatgttgaatttgaactaagcatgcgacatctaggtgatacacactaagcagtggttaatgctgttgtgataaagtaggtatctgaaggtcaggtataactcctttgagaagtggaagagggagctgactcaatggaagaagagacttatcaagtgacacagagggcccagttgaagttaatctgcatctaggccgggcgtgctgcctcga

SEQ ID NO: 102956 - DNA, 466 bp, Homo Sapiens
cgttggtggctctcatctgctttccagatggtacagcagtgattccctgtaaaccagctaagtcagtatctttaagtgacatttgcttaactgtcttccctggaacataattggggtgaatttggcatgtaggttagtttttagtatatttgtctctgttttccaccagattataatcttttttggggagggactttttacccccttcgaagcatcttgtgctttttaaaccagataagaatatgtattctttatttgattcagaaagaatggtcaacaacttgaaaccagctttatatagaagcacatggcattaaatacaatgcttcagaatcagtgtttctttccttctttgtcattttccttataatggtaagtgccagtgtagttttccttgtcttaggagaattcatacctgatgactataatggtttgtgagaaaaacccacactctaggtttcaggca

SEQ ID NO: 102957 - DNA, 566 bp, Homo Sapiens
gtcaccttggacaagaagcaactgtgtctgtctgaggttcctgtggccatctttatttgtgtattaggcacaatcgtatctcccccttaggttctagccttctggatcccacccagtgacatagatctaagcctcaggcccagtcactgagctgaaggtagaagctgatccacagaagtatcagtaaacaaggaccagatatctgcttctccaggagaagaagccagccaacccctctcttcaaacacactgagagactacagtccgactctccctcttacatctagccttactgtagccacactccttgattgctctctctacatcacatgcttcccgtgtaatcaagttgtaagcctctcattcttctcccaagccagactcaaatattctatcgatgtcaaagaagaatcacttagagtttggaatatcttgttctctctctgctccatagcttccatattgacaccagcttctttactagtggagaagtggagtcatgtgaagccagggaaacacaacatgtgagagtcagaaggactctccctgagttgcctgtggcaacg

SEQ ID NO: 102958 - DNA, 402 bp, Homo Sapiens
gttgaagcttggtctgcaatgtagcagtgttgagaggtggtacctttaagaggtgattaggttgttaagagggattaatgtcgttctgaaaggagttctcactcttggagaagtgaacccacaagagtaggttgttataaagtgaggatgcctctcatgtttggcctctccttgcaaacatgtgcttccccttgcacttctctgccatgttatgacacagcacaaagccctcaccacatgcggcaacccatcttagatttctcagcctccagaaccataaaccaaataaatctttttcctttataaactaccaactctcgggtattttgctatagcaatagaaaatgaactaaaacaggaatgaaaggggatttcactatagactccacagacattaaaatg

SEQ ID NO: 102959 - DNA, 291 bp, Homo Sapiens
ggagtatcatctgacatcatgcatgagtcactgactccgtttttaggaatctatccttcaaatatcaaagtagatacacatgaatatatgtacaagaatttaactgcagtgttgttaggaatggtaaaaacctagaatgctcttgaaggtatatcagctggggaataattgaataaactatggtacaacgataccataggatattatgcaactgttaaaaagagccactagattcatatttgataaggataaatgttggtaacaaaatatgaatctagtggcatcgattac

SEQ ID NO: 102960 - DNA, 465 bp, Homo Sapiens
ggccttgcttgatcaggaaatatatctggacattccagccatctctctgtcacaaattcatagccttgtcagataaggaaggaaaactacttcgcaactatacccagaacatagacacgctggaacaggttgcgggaatccaaaggataattcagtgtcatggttagtaaacttcagagtggttttctgtaatttattttagtttataggaagatatttcctataaagctgactgccatcgagaagtggagataaagcattatttaatcatgttatctcatttatcgataacctcagaaaagtagaaaacaaaaataataaaaacagaagtattgggccttgacagttaattatagaaaacctcagatattaatttgcttttgatttcaaaagatgctgcagttgcatgcattcaattaattttaaataatcttttctggctgagtgcagtggcatcgataaaca

SEQ ID NO: 102961 - DNA, 603 bp, Homo Sapiens
agctgaggttcttggggtggcgtcgcgttggctcgggctcccgtcttcatgtcagtccctgtgggtttgtccctgttggtctgtggtccgtctcctcttcttcgctcgagcccggtcatggcctgacggcccaagtctaatccagcatgacctcatctctgtcatcattccaaataaggtcacattcaggggtttcaggtggacatgaatttcgggggaacacaactcaaccccctgtacctcccctacagatggttctctgggatccgtgagaaggagggaggccccactgcatgttccaggtcgaatgttctcatagcacgtcgtttccttacctgcaaggctaggtgtcagtgtcactgggaaaggagcccattggcttgcccttcttcactggtactcactgtgtgtgcccatcaagagaaaggcacgtgcacagggatatagggagaaactttcaaaggggtgaaatgcacagaaaactgagagcagtccaggactgtggccctaaacttgctccctggcagctccctacacacaggccttatggtattcgcttaagccactctctaggactagagagtgcatcgataacaccgtcgg

SEQ ID NO: 102962 - DNA, 565 bp, Homo Sapiens
cgtcctcgcgacgtgtatcccataacgaccatgcctacatgtccttgaaccttcagctcagtgcactggccaagaaaatgtctgtaaacctaacccatcatagcagtactcctcagtgtgtgtatttgggatacgggtggagagtgcagaaggggtaggaagagggaggagggcaaggaagggtactaatatgcaccttactccctctggatgccaatacttgtcttcaggcaacttttcttgaggtggggtagaagatgtatgtgtgaaatcagtagtaatggtgtatgatgtcctaagtagtgctagtaataatgaaactctgaatggcatttaatgcagtgtatgctatctgccaggacactgttctaggtgcttttacttgtgtcagtcataatttaatcctcacaatacagctctgtgaggtaggtgccttcgtaactttacatgtacggaaacttgaggcatagaaaagccaaatgacttgctcaaggttcactcaataagtggcagagaatctaaagtaaagaataaggtgctgaggataacacgtacgcggaggggt

SEQ ID NO: 102963 - DNA, 452 bp, Homo Sapiens
tgctcgtagggctccgtggggttggggctgacattcatccatttacaagcatatccatgtatgcccctcctctgcagggcactgggtgtggggatgcagggaacacagagctgatgcttgcctctttgccttcaatgcagatgaccttctagaaggaaagaccatggagtgtgaagctcagttggcaggttgaaatgataacagtccctttgtgtgtgcggcttcttagggttatcatatttgatcctcagcacacattcaggtagtcaggtcagagacgattgattccttagtctccagaggggaaagctgtggttgagtttcattaattgagggaatagggccagagtgcagtcagggtgtgctgattcctgctccaaggatcttccaggacgccaggctgcttctcactacagaactaagtgctacatcatgtggggataacacgttcg

SEQ ID NO: 102964 - DNA, 224 bp, Homo Sapiens
ctgcgaaaacctggcgttgtatttatcctatcagtctccagagcctcctcaaccagttgtctttcctcctcaactgtggtctttagtccctcttttaatttatcctttgatccttgtatgtcctagattcagaggatgatttctaaatttctatagccatagatggagcatattggtggtatattgcaccagaacaaaaagggaagcgtgtgaagggagaaagg

SEQ ID NO: 102965 - DNA, 601 bp, Homo Sapiens
tcatgcgtacctcgcgaacgtgtatcatatagggtctgagggttggtcccagtgggctgtgacatgagcatgaggcaggtgctgatattggtcctatgtgggtctgagatgagcctcagccagaccctgagaggggccccagatggccacaggacaggctgtggtggttggaccatttagggttgcacctgtcctctgggtcaccaactttggacaagtggaggtgggtgaggttggcacccccaggactgacatcttgctcaaactgttctaggatgctgagctctgagacctgtgtggagggaacaaaggtcagagaacaaggcagagagaggaaagttgtttgttgattttggaggggaagaggtgggaaggaagattagcaccagcttggcagatatcaatcgctctaatcccgttcaccagcctgcacctgggcctggctcctccttttccttcgtgtttcttaaaaaggtgggagacagaaatctggggagtttgtttctcactggggttggcactaggaagtgcactgagtgatcagcaggttgccatgacctggccaggagggatggcgagagacaggttggatacacgttcg

SEQ ID NO: 102966 - DNA, 793 bp, Homo Sapiens
gtaggcatgatctgcatctagaagaaaaccattccatcagtcagaaggatggacgatagcaggagtgcaaacgtggggaagctattggagcagtcctgttgagaaatgatgagggtctctaaatgagttgggatacagaggggtggacagaagggagaggagccatgacgagcttccggacagcagaagcaaccaggacttgatgatgggctggggaagagggcacatgattcttgtgccgtgatctgcactgggacacgagaacgcagaagtacgcatgtttgaacggatgacgggaaacacgttcatttggttttagaaataggtgacatggtagaaatgcattcaggtagttggaaatataagtcaggactgtcactcaggagaaaagcgggctagaaccaggaatcctggtgtcatgggtacacaggtggcagacaaagccactggtagatgagaaatcctgctcagggagaaagcattaagggagaagaaaggatggaagagagaagcccagggaaggagacggaggagtgggcacagaggtgggagggcaaccaagagcacatggtgggacccagaagccaagagagaaaagactaaaaaaatgggacaaggagggagaattagctcattggccgaattggcaaccacagttttagggaagtgaactaaagacccttcatttatcttcctgcagcatctctcagggcctgatgttgccgtgtacttgtttacgttggatatgacaatgctgctctgctacagtgtcagtgcctggcatgtcgtcgaa

SEQ ID NO: 102967 - DNA, 551 bp, Homo Sapiens
acactgagaccgtatctcaaacaacaaacagaaaaataaccaaactctagccttcaaatttaaggggaggctgattcaagtgacagtaaatcaccagtcttccatttagctgactctatgtatattaaactcttcgtctattgcaattcctctgtcttgataaatcggccctatctgggcagcacgcaggaagaacccattgggtggttataggtgatttgggaatccactccccagaggctatgtatgccacataaagacatacacacccatataatttgacataaagatgtgtataattatatcatgtttgcatttttttaaaatatagtctttctgtttgcttgctttcctcctttcccatattcctctctttggtggttatttatctttccaaagtagattttaatatgcttccttccattttgccattttcattcaataatccctctctaaaatctttcttagccaactggtataactcaaccattttctttgttggtgggcattcatgtatttctctcctctctgcctggttctctcgatacaca

SEQ ID NO: 102968 - DNA, 537 bp, Homo Sapiens
aacgtgtatccaaattatcagaagatcatattaaagttttttttaaattagttcctttcaaacaaaatctgagttaccagatctttttaaaaattagttccttcaaaacaaaatctgagttaccagtcctgagcatgaggaccctccagttacagatacatcgagataaaatagtctccattcaaaagcaccgacactttaagctgtcatggcaaatgtgtatctgcttagcaaaatataagtgaaattgggggactgttaatacatgacacaagctacactgaggttttcctggaggctgctgaaagctgggttagcagatgaccttcagtgctaaataaaccagcactatgggaaaaaagaatcttcaaaaacaattccttttgaagctgtcactgcattgagttagcctcttttgattttgtattcactgctatgggactagaaattactagcttccatttgccttgcggcaaggaagagaaaacgcatttatccatcctgcgagacgacgactttcacgatgggtaacacgtt

SEQ ID NO: 102969 - DNA, 547 bp, Homo Sapiens
tgtcggtacctcgcgaacgtgtatccccctcaggaggccatggcagcagataagacagatgtctaaatagcactaagatgcttctgtgattttcaaactgtattccgaggatcctagcatccttggattgtacctgatgtacagaagagagggaaagctctgctgctccttgcagttgtctatcagcagtaactagggttttttcacaatcacaaaaccaaacaaaatataggcataacctggggtctgaagctgacatgagactatcaccatgatctgtcatctacttttcactttgtcaggattattccaacagccctattatcctcactgattgactttataataggtaaatgtcgtgcttttggattgctgtttatagctgtaaaatactgctttcacctttatatatgcagacttcatataaggttgctttagaaaaacaaaacgttcagtgttaaaaaaatgacagttgcaagggagggagaggcagcaagagagttcagcttacgtctggggagctcatgcaggataacacgttcgcgag

SEQ ID NO: 102970 - DNA, 491 bp, Homo Sapiens
gcggacctcgcgaacgtgtatgcagaggctacgatgaattgcacagcacagatctggaggaataaaagggaatccagtagccaccctctgagactccatgcctaagtcacactcaggggaactctgcccaaaatcttgtccagttctgggtcctaagtctttcatgccattactggggaattcacttgataggcttctattattctctgtctcaggaggactcaagatcagtggctttggcctctgaggacaaacaagcttatattctaaatggtatgctgagcttttcagcaggtctaactatcccagagtaggaacaactcagcactgccatccaggctcttaacacagtaatctacccgtgatagggcaagaaacaaagaaggaatcagtggtcctatcgcctcttctcccaacccctgggcccgaggcagagaactttcctagctcccattgtccctcagggcaatcatggataacacgttcgcgag

SEQ ID NO: 102971 - DNA, 476 bp, Homo Sapiens
tcctcgcgacgtgtatctgcggagccactagcagaaggctaaatagctgtctggtgaatgaaagaatgaccaaatggtcctgtatttccttatctagatcatctctaaacaccttctaatggtatggtttcagacctaaatcttcccacaaatctttacggatgcagtaacttttgttaaatcccttcgccccaacttttcatctaccctctgacaacaaaagctgggaaatagagggaagcaaaggaatcatgtacggctgatgggatttagacagcacagagcaagtggttaggtttaaagaacgtcatccaaataccctggcaggaaaccttgtatactgacagttgcaatatgtgtaagaaaagaatgcatccaatggtatcctcaattaattaattaattaattaattgaggataacacgttcgcgagggtgtactctagatctgctatcactctttcaacgcttgcactc

SEQ ID NO: 102972 - DNA, 758 bp, Homo Sapiens
tcctcgaacgtgtatcttagactggtgggggaagaatatcaaaattcagtgactagcaatgaatggtacagaaagttggtgaatccattcacagcaggcatgatgacctaacatggtttcaaaaagaacttgatttaaattcagggctacagaaatgcaagctttaagactgtcaaagacatcaggtaccaggagacaggcttgtaatataaccttcaactccagtttttagaacccttggttgttgctttgttcagttcaacaaacttttgttgaacccaacgtaactgccagaccttgtgcaggatgccaaggacacaatgacattgaagagaacaagcatttctgttcttagagaatggcatgcggaatgagtaatgcacaggtgcacagaaccatgtgggggacggggagacccagcttttggcctgaggtttctgtgtatctcagcatggagtcaggcatatagcccagacaactcaagcagcatgagcatttggtgaaagtctgatctagcaacagaaataattgaagagttaggtagaagacctctgagaaaaggtccaagaaattatctttggaaaaacaaaaaacagtgggttccatacatccagagtgacggtgaagctgaatctcccagggtctcaggactctgctcttcaagttaaactttatcaccttgccccagtttgaaacataatttacttaggctacaaataaacaacattcaggattaccttatcatttaaacttattta

SEQ ID NO: 102973 - DNA, 597 bp, Homo Sapiens
  misc_feature (23)..(23): n is a, c, g, or t
tcctcgagagtgtgtatgcaaanacgtactcgctttattaatccttagggaccacatagagctgaaggcttgtttctcttcactgtggcaattaaatcctattactccttgacttcttatacatgcactgagtgtgcatgtaatttggcccttcccaatgataaaatgcagaggtgaaacacggttgctgtgctgtgaagccactctgtccttgtcagtgtccttgcagtgccaaaagcagatccgtagtgattttgccaaaaaactgtggttcaaatgtgaggccccgtgagggcttccttgctgtttgaaaccttctcctgagatgtagcctcagggatgctgttgtaaccgttacctcgggaccgtctgaccccactcaccccagaagagggaagatttatggatccaaaatagaataaatgcaaagctcaattgacaaagtctgtagacaaggcccagacatcacagctgttgagcaggcccaggagaagcttgagtccttgaaaccagtgaagaaaatgctgtttcagggatgagggggagcgaccgagagaggaggatcagacttagcggtatagaggatacacgttcgcg

SEQ ID NO: 102974 - DNA, 650 bp, Homo Sapiens
ctcctcgcgacgtgtatccctcagttaactgtttggcatgggggactaaaagtaaacaagattggaatgtccctaggatggctatgaatggcatgttgccatagtatttcagaagccactggtaaagccctagatggataggatgagctcttggccacaaagcttttcttaggattttaatatactacaatttatcgtttactgggaacccaggtggagtgacttcatttccaagaacataggtgtccacgttaccacgattatttttttcagattaaggctctatcttctgaagggaaaatgaccactatgcttcactgaaagtccatctcaatcagaaagacaggcagataccacggaaacttagtacttacctgccaagcccaagacatcaagatgatacacattttgtgtttctctctgagggtaaaagaagaaggaaactgctgcaaagtaccaaggaatataacccggttataaaacagacagaacgagaaacaaatggcaaacccaagtgttgaccttcccattcaaccagaccacccctctgcttgctggaactaggagtagagcaataagaatactaacatataggagtaccggggctcgggcaggtatcggcttacgcctggatacacgttcgcgaggta

SEQ ID NO: 102975 - DNA, 665 bp, Homo Sapiens
tcaggtcaagagacaactgcctttgaaagagagtgagtgactgtttccaaaacagcaagcatagggagagccgccggaagtattgacggaaagcttgaattacctacatgattgatgatggtctccagctgtcaaagaagattgtggttgccaagagaaaggtaaccatttctcatccccttgagtggaattggatgcctctaggagcccacattggctggcagtagacatggccgaatttacaagctacaaggagacggcctccagccgccacttgcggtttaagctacagagtctaagccgccgccttgatgagttggaggaagccacataaaaacctccagaaagcagaggatgaactcctggatctccaggacaaggtgattcaggcagaaggtagcaactccagcatgttggcggagattgaagtgctgcgccagcgggtgctgagaattgaaggcaaagacgaggaaattaagagagcagaggatctgtgtcgtctgatgaaggagaaacttgaagaggaagaaaacctcacccgggagctgaaatctgagattgagcggcttcagaaacgaatggctgaattagagaagctagaagaggccttcagcaggagtaagaatgactgtacccagctgtgtctgagcctgaatgaggagaga

SEQ ID NO: 102976 - DNA, 570 bp, Homo Sapiens
aggcacaggggaatactaaatcctcatttgcctttgcctttgtactggaaaccagaccttacttaagcccaccaaaggcaaggttgggcctgccacagcggatttcaaaaagacaaagcaatgcaagccacgtgttcaaaatgccctaagtggctattcaggtaatatataaaagtaagaccaggctaattagtatacaatggggtaaaccagagagcagaaagcccttctttaaaatgagcctaccactgcttggcctcagtgtgaatttagaccccatcttctgatatttcaggagaaagtaaaaatctagatttttatctaaaatctttttaatttttaaacagtcacctgattttaacgaaatactatgtgtgcacaatggaactgtctacgggaatgatctagtccacgagcataccaggttcctcacaatgtcttataaagttgtttaacccactagtaagaaatattacacaattataccggaccaaaaacatacatacatacaaatatgtagctgggacaaaaattcacagaacaatacagtcatcctcggtatcatggagg

SEQ ID NO: 102977 - DNA, 753 bp, Homo Sapiens
ctggcgtgtagctcagcacttctgctctctggcaggcaggctagtgaagctccagtgagccccaggctaggtttctgcatggagttgtagggcctattttgggggaagttgtgcacagaaaccaccagagtgagtcacaggcatctgggggtgcacccattgacatttgcatccatgtcatgccaaacttgtagcccacaaatgcccaacccttttctccatgcatagctctgtctcagtttagttcacgccaagcagccttggttagttaaatgcagagcttggcatttgcccatgttaaattccttatcctttttcattctggcctggcctggttttgccatctgaagctatgatgagtcctttatcagttttcatccaacttgtcaggcagggcagggctggtatgaagcccaggacatatcgctgggacatcccataggtctgtgagattcccaggtccctccaaatccacacggtcatcatgggcaaattagtttaagtctgatctgttaagatccagatctctcacaccaacagcacacacccctttttcccatggccatggaaggagggtagcatagcctgactcgagtcctcgttctcagcagaactggttctgtggtggccacttccctttctcaacttttacctacttctgtttaataggttgttctgcaagtctgagagcaacggcaagcttagaagtgtggactcggcctggtacagtggctcatgcctgtattcccagca

SEQ ID NO: 102978 - DNA, 588 bp, Homo Sapiens
tgatgcgatcttcctgaacgttccaagtgtgtaaagctagatcccgccacggcgcacccgagtctgctcttgaccgccgacctgcgcagtgtgcaggatggagaaccatggagggatgtccccaacaaccctgagcgatttgacacatggccctgcatcctgggtttgcagagcttctcatcagggaggcattactgggaggttctggtgggagaaggagcagagtggggtttaggggtctgtcaagacacactgccaagaaagggggaaaccacgccatctcctgagaatggggtctgggccctgtggctgctgaaagggaatgagtacatggtccttgcctccccatcagtgcctcttctccaactggaaagtcctcgctgcattgggattttcttggactatgaagccggtgaaatttcattctacaatgtcacagatggatcttatatctacacattcaaccaactcttctctggtcttcttcggccttactttttcatctgtgatgcaactcctcttatcttgccaaccacgacaatagcagggtcaggaaattgggctcccgggatcatttagatcctggtt

SEQ ID NO: 102979 - DNA, 706 bp, Homo Sapiens
aagacctggagggctaccggtgcccggcctcgtccccatgaccagatgggacttcatgagaaggaaatgagcggctgacgctggtgagcaaagcaggccacaccgcaggccgagcccgtgggccggcgtctccgtggctggtttcacttttcctccacatgctttgggtaacgtaattattgctattcagtttgaacctccagaaagaagagacaggctccaggaccccacagactagtgaactgggtgcctttaggtacgtagaggggtaaaattactctcatatagccaatatatttggggacagggaggccacctttggctcctccaaacactgtcaggcttgtttgttttgttttatagattcagaaatataaaatgatataggagctttcagtcacacagtggaaaaaggaaaactgttaggaagtgaaacatttttgttttcagccatttactttggagcccactgatggaggcggcctgaaaggttttccagtggcaagccctcccccaggtagctggcaaaggtcagtgccagtataaagaatgcaggagagctaaacctgggtacatgaaggtcagaggggtgaggacggtcgagaaatggggagaagacttgggcttgagacgacctgggctttctcactgtgtagctcactcagcagtatgaggataacacgtccgaggggatactctagatcag

SEQ ID NO: 102980 - DNA, 561 bp, Homo Sapiens
caccacctttatcacatgaagggaacaattagatgccttgtaatgataaaaacgcataatgtctttgaaagttagtacaaacatatcaacttttatttactggagtaggactttgctattatattgctaaaccttcgacacatttgtgatttgccataaaattaaattaagggcaagtcaaatagactaaatccaactaaacctctcctacaatctgttagagagtgactgctcctttattcgatttacctcgctaagttttattttacagaacattgtaaaatataaaacttaactgattacatgcatttctacattttacaaaaatgtttactagttttacactaagtacttacatcacagtgtgaggtttttggtggtggtttggccacaaaacacgcaaggtaacagtcacctagttcagattaaccagttttgtctaacccttggaatcctcaccatcaacctgcgtctaatggcaaaggctgctgtcgtcatggcttccggtaaggtcagccaaagggtcatagggcaaggtcacacatgtatgaaaagcgccag

SEQ ID NO: 102981 - DNA, 676 bp, Homo Sapiens
  misc_feature (436)..(499): n is a, c, g, or t
  misc_feature (569)..(613): n is a, c, g, or t
aacatgttctatgttcaataatgcacatatatacttgtaactgcaattcaaaatattaataataccatcactattcagaagcaaacaaaatagcaacaagtttcctaaaagaacaatgtctaacccctgccccgcaaattccaaaattgaatcactgaccagtttataattcaagtaaggatatgaaaatacaagagtcctgatttcatcaacatctaggactccccataacatgttagtttcaaacagcctttttctctcagcaagagtgctttcttgcctcttatctgtagccacttctcaaaatgagaacatgacattactatagccaaaagtcaatctccttgcctcatggtcacaagctaggtccccagccaacactgctctctcaaaaatggaagacaacaaaacagggccaggcacggtggctcacacnnnnnnnnnnnnnnnnnnnnnnnnnnnnnnnnnnnnnnnnnnnnnnnnnnnnnnnnnnnnnnnngaccaacctgggcagcatggcaaaaccctatctctacgaaaaatgtaaaaattagccgggtatggtggtnnnnnnnnnnnnnnnnnnnnnnnnnnnnnnnnnnnnnnnnnnnnngtttgaaccctgtagttttaggacagcaatgagctatgactgccaactgacttcagcctggat

SEQ ID NO: 102982 - DNA, 560 bp, Homo Sapiens
  misc_feature (363)..(422): n is a, c, g, or t
  misc_feature (462)..(497): n is a, c, g, or t
tcgggactgggaacaccaggggctctattgcttgtaagttttagaaattatgaataaaaagctgctataaacactggtgtgcaagtttttgtgttgacataagtctgaagttcctttgggtgaatgtcaaaggacacaactgctggattgtacagtaagagtaggtttgctcttgcaagaaactgcccacctgttttccaaacaggctgcacctatttttatattttcaccagcaacaaataagagttcctgttgctccacatcctcccagcatttgatgtgtggcagtgttatgaattttggccattctaataggtgtgtggtgcaaggatgcatcttcatcattgcaaatcagtggttttnnnnnnnnnnnnnnnnnnnnnnnnnnnnnnnnnnnnnnnnnnnnnnnnnnnnnnnnnnnnaactgaatgataaacatgggacagaagccagtcaggatcnnnnnnnnnnnnnnnnnnnnnnnnnnnnnnnnnnnngtcattactgaagtacgttacagtttaagaataagtgcactaaggcaatcaatccatgaaaat

SEQ ID NO: 102983 - DNA, 548 bp, Homo Sapiens
  misc_feature (512)..(512): n is a, c, g, or t
gaaattcttgtcccattcttgccttcactgaatgcctctaataccttcagaagccaagaggaaagcactcttctgggtcaatgttcttctctgtagacagtattttatcaaacagactttagtttgtcaccatgatttgataggtagccccaaaactccagctgatgttacaaggtctcatctcgttaaaagtcaatgaaactggtcccttttgtcattgtttctctgtaatatcaactttggatatcacatgtccttcagagttgttcttcattgctctcaaatactggattgctgtaagacactcctctgccacactccggcatgtcagagtgggaggtttggtttagcgggggccaactagggtcatttgccaagtccctctgccatatccgatactggctttttgactgatagccgaaacatcttttaatcatcatccacagggctcgattttcaataacagcctcctcggccacaagggacacaatgaaattcaagctggcatgatngacaatggacgccctccacagggatacacgctcgct

SEQ ID NO: 102984 - DNA, 675 bp, Homo Sapiens
cgagtgtgtatgcaacagacttcccgggtgatcgttctgaactgtggagctcaatgcagccaggatgccaggcatacagcactggtcaggtgccaagcagctgccctggaattgtaaacgttacccacacccgtcacaacggattagggaacgtagagagaagaggggcatctgtgcgcttcatgaaacacgtggatacatctgtgtcattccagttgaaacctgacattgttttccgatcttggagtgccgtacacgttctgcttctcgtagaaaagccgcaacagctcagaggtgacttcctgtcctttggaaatgcctgttccactggcttttcagtttcctgaaatagctcagtcctccagaggcgaggctcccagcatcctgaggcacgtgtccatggggaaggaggggcacgctgattttagttgcttttccaaaggcgccttctaaagccaggcctttatcgggccctgctggtggcttctccacggtgccctcatgtggacctcagactgggctttggagcctcctgtctcacacacccattttgtccttcccacacactcgttctctctcacttgttctttcacacttgtccgcactcattctcacagacttgttctcacacggtttcattctcacatttgttctcatggataacacgttcgcgag

SEQ ID NO: 102985 - DNA, 242 bp, Homo Sapiens
aaaagtatatatgtctttaaaaatctatctagatagatatagctgcagtacatatacacatatactgttttatttgatctagtatatgcaacatgtccatcccaagaaataattcaaaactgggaatcatcactaacaccttctaactacagattaaggcaagaattcaccgataggcagaagtttgtttctgcctcatggtcttgactcagtaactggcactttttacttttgcttaaaaa

SEQ ID NO: 102986 - DNA, 543 bp, Homo Sapiens
  misc_feature (157)..(491): n is a, c, g, or t
gccagagacaggtcacaggagactgaatctcatcaccccacaaacataccattcaggttttgccaagaatgacactgtaaatgtaacaaagcttccatgcttgttagtgaacaccaactcagctcctctcctctattcagaaatcaggatgagatgnnnnnnnnnnnnnnnnnnnnnnnnnnnnnnnnnnnnnnnnnnnnnnnnnnnnnnnnnnnnnnnnnnnnnnnnnnnnnnnnnnnnnnnnnnnnnnnnnnnnnnnnnnnnnnnnnnnnnnnnnnnnnnnnnnnnnnnnnnnnnnnnnnnnnnnnnnnnnnnnnnnnnnnnnnnnnnnnnnnnnnnnnnnnnnnnnnnnnnnnnnnnnnnnnnnnnnnnnnnnnnnnnnnnnnnnnnnnnnnnnnnnnnnnnnnnnnnnnnnnnnnnnnnnnnnnnnnnnnnnnnnnnnnnnnnnnnnnnnnnnnnnnnnnnnnnnnnnnnnnnnnnnnnnnnnnnnngtaacaaggcttgacagcagatgagcctgaatctaagcaagaaaagcccaga

SEQ ID NO: 102987 - DNA, 580 bp, Homo Sapiens
  misc_feature (502)..(510): n is a, c, g, or t
gagtgtgtatgctgaaacctgggcttctgtgaggcgatgcctcaccccacttcggctcttgcttggtgggctgcatccactgtctgacaagccccagtgagatgaacctggtacctcagttggaaatgccgaaatcacccatcttctgcgtcgctcatactgggagctgtagactggagctgttcctattcggccatcttggaacctcctgtatcacaatttctttatccactttttgattggtgggaatttgagctgcttccatgtttttgcaattgccaattgtgctactacaaacatgtgtgtggaagtatcttttttgtataatgacttctttcctctgggtagataactcatagtgggactgctggattaaatggttgttctacttttagttctttaagggatatcctcactgttgtccttagtggttgtactagtttacattcctaccagcagtggaaaagtgtttccttttcaccacatctatgccgacatctgnnnnnnnnnaatcttttgattatggtcattcttgcaggagtaaggtggtatacatcgtggttttgatttgaatttcctg

SEQ ID NO: 102988 - DNA, 112 bp, Homo Sapiens
tcgaacgtgtatcctgcttcagtggactttgtctttatgttcataattttaccatcatttatattatggcagaaatatcctaaaaagcatgtgttagctatgtcttctgttc

SEQ ID NO: 102989 - DNA, 590 bp, Homo Sapiens
ccggtaccctcgcgaacgtgtatcaatggtcgattcgccgctcaagggtaactccccctcttccagctgacttggatgctggaattccaagtgagctggcttcaaatgtttcaaaaacacatcatgtcttcttcctgccagttccatgcccctgtgcaaagtggccagggagggtcccttctgcacaggacatggtgctgctgcgtgtccctgcagcacagctgctgcttgggcctacgaaaatccattctcccttcccctgtcacctcatcttgactttcctcacccacactttgccccatatggtttcaatgtgaccgggcccatagcctggctccagcgtgcgcacatcaccaggccttcctgtcacctttgcaacagcgatgggctcaggagctgccatctgaccaaggtggcccagtgagcatcacgcacagggcaagaggtgctgtgttttggctgtgatatgggcctgcagtaggacccatgctgagtgcctcacggagagaacctgtctaagagtgaagccaacagagttcagcagagtgatagagagatgttgacttcacttgtgcctctgggatacacgt

SEQ ID NO: 102990 - DNA, 335 bp, Homo Sapiens
aggtgttacttcagtgttagtgctcaaggaacaggcttggtaaggttgtggcttatctaaaactaaatggctaatgggtttgaatgccttcacagttcagacccagattatctgatgcctgtccttccttttactatatttcaagttcctttccagacagattattaagaggagtcagatttttaccctttttgggattctggctacagacagcgccactaggaagacttaggaatgtttgttgggttactctctgaattactgtgttgaattgtatagtctcatacttgaagaaggacaggaagccgacacttaagcacactcattggataaca

SEQ ID NO: 102991 - DNA, 393 bp, Homo Sapiens
agagggcttgagtccaggaggtcaaggctgcagtgcattttgattatgcctcacactgaacatttgctgtgtatttgctatgtaccaagcactgtcttaagcacttaatgtagattaattcctacatataatatgcccagcagcctctgaggtaaatgatcctacagtcgaccccttatcctcaggtgatctcctccaaacccccagtggatgccggaaactgtggatagtactgaactatagactgtgttttctcgatctgataaccaagatggctcctaggtgactagtgggtggttgcggatacagcatagacttgctgaacaagggatcgattcgcatctcagtcggacgaagcggataacacttccgaggggatactctagaacagct

SEQ ID NO: 102992 - DNA, 528 bp, Homo Sapiens
  misc_feature (400)..(425): n is a, c, g, or t
cctcgtgtgtcctcttactctgacttctagcttagctctttccaaaaggaacttgaacttggccaagagaggtaaggaggctgagcagagcagtctttgctcattcctggttgttgccaccctcatttaaatggaagagagaaaacaggagcttcttggctgtttgccaaaatgaattgtccagggaacacagtgctctctgtaattaccctgcctttttctccaccccaacacaaaaatctggaaaggaaaataagtgggcaggattaagagctgttagaagctgaggaccaaaggacactgtgggtccattcatcaagggggagaccctcttcattagagtcctcatgaaattagccaaatgatgagtccttccctagctgagcatggtgggttctcnnnnnnnnnnnnnnnnnnnnnnnnnngggtggttgtgaaatgggattctccttttttcccccgggtgggctcccgggggtttgatccgggctcatggaacccttcgcccccaggttccaggggattccc

SEQ ID NO: 102993 - DNA, 576 bp, Homo Sapiens
ctcggctctaccttgtctccacagagtggagacctgggatgtgaaggatgtggtgaactgcgttgggggtatgggtgccctgctgcccctgctggagcgagtagctgcacagcccaaagaggctgaagcaggtccagctgaaacgcatgacctcgtgggtcctgaactgacctctggtcacaacacccagggcctggttctcccattgggtaaatcttcagaggaacggatggagaggaacgcagtggctgcttttctgctgatgctgcggaacttccttcagggtcacatggtgaaccaagagagcctggtgcagtgccaggggcctgccatcatcggggccctcctgcgaaaggtcccaagctgggccatggacatgaacgtgctcatgtccgcccagctgctgatggagcaggtggcagctgagggcagcgggcccctcctgtacctactctaccagcatttgctcttcaactttcacctctggaccctcagtgacttcgccgtgcgcctcggtcacatccagtacatgtcacagcatagttcgggagcacagacaaggtagagccgaggtcc

SEQ ID NO: 102994 - DNA, 422 bp, Homo Sapiens
  misc_feature (70)..(96): n is a, c, g, or t
atgaaccactacgcctggcctctttatggcttttaaaaagttatctgccagttcaagctcctttctcttnnnnnnnnnnnnnnnnnnnnnnnnnnntatatcttttcatgtgaccagtagggtataaacagcccttaaagggcatatgtctggcctttgaaataattgtttggccactattaggtcttagggcctctggactattgagaagttacgtagcttcaacctgagtcacacattgtatatttgcttttgctagtctttccacattttatctgaaggtctgtttttacagaagccttgagatatgaagatccctgtgcccctgacccctccccattaggagtgtttttttgtatttagaaattggtctcctgagttaggaactccaccgttcccctcagcaaacaagtacgaccgaa

SEQ ID NO: 102995 - DNA, 641 bp, Homo Sapiens
ccgaaatgagagggaatcgcatctccctctcacttatcctatagctgttaaaatcctaacttcatacggcactgaaagccgtctccgtattgttcatatctttcctgctgtgtaaaacgacatatggttgtccatctccatggaaactggctcctcaattttgacttccacaggtggggagggtgagctgcagaactcaggaaacttctctctcagcattgcccgcagctccttatccaacttagggttgtcaaacaggggagctaggtgtgccaagacccgtttctccacaatgtggttgagggaggaaaagacaccctgccgcacgtggccctccaatggtggatagaagttgggaatgatgcggcacatgaagtccaggagtgtggcagtgatggctgggtggggcttcatggagtggtgcatgaccaggatggctggttctatgttcataatgctatccttgtctggactaaagaacagccagtcataaaacaaagccagcttggcattggaggcagcgacatttgacgtgcacgttgtcaggagccaaccaatgatggcccaccggggcaagatatctgaactcagtacttcattagaagggtggactaccccgcacagtagcgtacgggtaccga

SEQ ID NO: 102996 - DNA, 552 bp, Homo Sapiens
ggtcctcgatctagctgtctctcaggcatagagacagccagagagacagagactctacttaaaactacttctgttaaatgatttagaagcactgtcatttcctcttaagctagcatctgactcattatcattaggaactgctggatccgttaatttattcatcctgtgtgtattgagcactgctgtgctgtgctaggtactcaggatagcaaagataaagacacagccccacctccaagacgctcagacccataaacaattacaagaagtaagtagaaggtcatggcagtaccttggagaggtcatggaaggcttcctggtgcagtggctcagagctgttttgaaggaggggtcggagtagttaggctcggtgaagaagagggggagtggatgttcaagaagtgatagtgacatggactgcagcgaaaggcaattctgaggtcccaccaatactgaaaccatttccaggagctgactaggggtaccgagtaggggatggagggagggaagaagaggagctaggagcaagccagtctgggccagaagaccagg

SEQ ID NO: 102997 - DNA, 442 bp, Homo Sapiens
ttccttgccccattcatccaaaccttcccaagcacccaccgtgtgccaagcattactcaaggagctgaggatagagatgaaggactcagttgtgtccccacagaggtcaccgtctagggggcatgatggagacccgggtcacagtaataatgaagggagacggctgagcccacagtcctgccacccactcaacctgggattctcctgttaattctgtagctcacggaggtgcctaacaggtgaagtagaactttcaggggccagaagaatgaatacaaatgtttggataactacagaggaacatctctataaaagtcgacttcttagctttaagcagatgaaacagacttcagctgatttaaatcgagtttacttaaaggcctttggcatctcactgattcccagaaaagccaaagaaccaggctcagaaaatgggcaggac

SEQ ID NO: 102998 - DNA, 454 bp, Homo Sapiens
gcgccgcacggtcactgcatcctcctgctcattgctgcccagccctgccctgctccaggggaaacaattagagatcagagcactttgggtgcacatctgggcactcggtggtggctgagggggaaggctttgatataaccatcaccacccactgtacggctctctcccagtggaagtccttcagagaagcagcacctgaaggagggcatttgctaactaacttccctcgtccaccagcacttactgagtgctttctctgtgctgggccctgagcgaagcatgaatataagacatatgatatagacccagtctgagggtggtgacatatcaggacgtaaggacaaggacacccggtgaggagggaacagaagctgcaggagagggcagaggaaaggagcagttaatgtccctttgtgccatgttgtgctcagggttaaggggctcccggggtacc

SEQ ID NO: 102999 - DNA, 567 bp, Homo Sapiens
ggtacctcggtctacttgtctggcaaggtccagaccgtcccagggcctcttctcttccaatcctcatccatgcaaatcctaacaaatccagagcacagttcgtggagagaaggaatgcccaaggtgaacatggtagggaggtcttcgattcgctggagcttcaccacgttggagtcgcctgctgggcctgccaagatccgtagatgggctgcatcgtagcgatctccaattccaatagggaacactgtcactctgttggacctggcggcatcagctgctgtcattccactgaatccacagagacgtccgtgtaacaggatgaccaccgactttgtaggctcccggcctggcaccatgcagttctgaagtcaagtatcgcacagcaaagcccaaggtcatcacctcgatttggctggggcctccctcccgactgcagtgacgtccacaaggctcagcaaatgggcttgctccgggaccacgttccagtggcacgtcaatggtggtgatgcttccatactgcagcagctgacacctgagagacaaggtagagccgagggggatcctcta

SEQ ID NO: 103000 - DNA, 574 bp, Homo Sapiens
tacctcggtctaccttgtctggtcacttgcctgccccaagcccaatgtgcacacatgcacatgttcacatgaacactcacctgtgttgtaggcatgctgggcatggaatgagaaggggaggccctgtgctgagtaaactcggcgttgccacagaaaacactggtggtggtgagcgaatgagtagactggtgagagccccaaggcgctgggcatagttctgtaggagaaaactgtccgtcaggaggtggctgacaggtgggcagctttatgttggccctccatcccaaggccaaggtggggttcctgaatcccaaagccaaggcggggtgccttagcacggaggcccccacagatatacaaacacacgttggtgcattcacagagacactcagatccatggagggaaacatgcacacacagattcactgacaccaacacacgtgcaaagatgaaggcacgtgtactggccctgtggccccagcaccaacactcgcccagcctcccagtgcagagtgagggaagggagacatcgtccatcccctgtctctctggagaccaggtagagccgaggggg

SEQ ID NO: 103001 - DNA, 710 bp, Homo Sapiens
cccatccaaggccacactaaaaataagtggcattctagaatttaagccctttgttggctccaaatcccattgtaaatgtgtctttttcaaggcagtcagtaaaccagtggtttaaggagtctcatctccagactgccatgggatttacagaattgctggagtaacctgacagccaagacagcgtgggagggcatcaggtcagtctggtgtgcagtgtggccaaggagaaagccccctaccactcgagtagcctttggccaccaccctaggccactgccctgctactctgtcaaggctccttcagtccttcccccttcacagtgacattcagaagatcagcagctagttgggccagcactgaagaccctgctaagtcccttgtacaaattgtacaagtatactcttttctctgaattatttgcattatttatgggttggttcagcagttttcttctgttcctccatcggtctgcatcttgtcagaggaaaaaaatgtatattgctttaagacttcacaaaaaaaattgtcttattaaccattctgccttttgttatctcacagtaataatagcagcagcagcagtagtgtaatcgttgtagtaataactaattttttgagctcttactatgtgatgtagactgtgctgagttagcacttacatataaacgcagtaacctctaacagaaagacagtagagccgaggtccgcc

SEQ ID NO: 103002 - DNA, 333 bp, Homo Sapiens
taccccacttacaaagccgggctgtgatcagggccctgctaaccacacaggactcagatctcacgaagcacagaacgtgaacccctgtccatgacgatcaatttcagatgtgtacacaaaacccaagccccgatgagaatcatgccttgatgatgtttgacatacagctgctgggagaggtggtctttcttgctgagggatagctaactttaaggacacacagacactggccatctacatcgtcatggcgagaaggatgagcggtagtaggagagagaggccaacactcagaaagcagcagagcaaagagctgtaggaatcccggtggccgaa

SEQ ID NO: 103003 - DNA, 212 bp, Homo Sapiens
gcttccccgactagccgaaggtgtgtcgcttacggacactggcctaagctatctgtccaccatgtctgtccctccgcagcctctacctgcgatggtgctgccaggtgcaagacttcgggctgaagcacctcctggccctggggagtttgcgcctcctgtctctggcaggctgcccgctgctcaccaccaccgggctgtcgggctagtcgggg

SEQ ID NO: 103004 - DNA, 374 bp, Homo Sapiens
gggggaggggctgccaggatgcgagcctggatggctaggcagaggggacgtgccaggaccaccaggacctgggctgggctttccctgacctgttcccttaccacggtggccctatagggcaggtcctgggctggtttcctgccctcaaggaactcgaggttcatgcagggaacagacgaggagccagacagttaccacgcccagtgcaggaggcagagtcacatgccagccagagatgagcgtcgagcctggtgtgcggttaggaaggctttctacagcagggagacctgcggtgagacctcactgtgttgaagttaacgaggaggggaaggctccaagcaggtgtgaggatcccgcgcacagggatcctcaga

SEQ ID NO: 103005 - DNA, 640 bp, Homo Sapiens
ttatggcgcgggattcttcggcgcgtaatccttcggccgcagggattcctcacgatgctgtgcaacagcgaagacatcctgcctcagccccttcatggctgacatccgtgacgcgccccaggacttccacccagacagggtgaaggcacgcgggcctggattggagaagacaggtgtggccgtcaacaagccagcagagttcacagtggatgccaagcacggtggcaaggccccacttcgggtccaagtccaggacaatgaaggctgccctgtggaggcgttggtcaaggacaacggcaatggcacttacagctgctcctacgtgcccaggaagcccgtgaagcacacagccatggtgtcctggggaggcgtcagcatccccaacagccccttcagggtgaatgtgggagctggcagccaccccaacaaggtcaaagtatacggccccggagtagccaagacagggctcaaggcccacgagcccacctacttcactgtggactgcgccgaggctggccagggggacgtcagcatcggcatcaagtgtgccctggagtggtaggccccgccgaagctgacatcgacttcgacatcatccgccatgaccatgacaccttccacggtcaagtactaccctccg

SEQ ID NO: 103006 - DNA, 277 bp, Homo Sapiens
  misc_feature (46)..(114): n is a, c, g, or t
atagggtaatcactatgttgcccagcctgatcttgaactcttggcnnnnnnnnnnnnnnnnnnnnnnnnnnnnnnnnnnnnnnnnnnnnnnnnnnnnnnnnnnnnnnnnnnnnnatcataaattaaaacttctgaacaatctggtaacaaatggaaatgctttcccatgatccagcacatctagcagggggtgtctgctgacattgctacacaaacgagacacacctgggagttgtgcttctcatcatttcacattaagaacccaactgcacctttt

SEQ ID NO: 103007 - DNA, 255 bp, Homo Sapiens
atctagaggatccctggcgcgggattccttcggccggggatccgtgacatacccccgtgctggtagagccagactaatctggttattaccgaccagacttcagttgccctcttcatgtaggaacgagcctctctgggctgtcttctatcgggtggttgtaggtcgggaaacatcaagcctgggtaaccttcctctgtggggtgaggggtgagaggtgtaggaaccaatgtagaggaatccacggtgggacgaggt

SEQ ID NO: 103008 - DNA, 305 bp, Homo Sapiens
gaggacagagggggcggagctcctggagaccacctggctggttgcccttcggttcgcggttctagctcctgtcttgggacacaccggaggaaccgggcatgaggagcagagggagtgggaatgtgtctgtgtgtgcctggagaagagggtgacagccaccgtatctctccaagaaacgccagcacacaagcagacaccccctgctcctgagagcccaggcaccagatccccgcaagggcctcgcagatccatggggtcgcagacaggcgctcttgtcacgacagggatcccctccctctgactct

SEQ ID NO: 103009 - DNA, 203 bp, Homo Sapiens
gagctcggtaccctcggccaccgggattcctgggcatcgtgttcgggcccacgctgcatcagccacaggcccacacgaggccaccgtgtccctctcctcctggtggattatccccatcagcccgcgtcatcgatactctcatcgtccactacggcctgttttaaagaggagccggaggaaccccgcataacggatgtctaatt

SEQ ID NO: 103010 - DNA, 129 bp, Homo Sapiens
atggcatgtagtgaggacactgaagctcagagagcaaataactagtctttggaagtatcaggattcaggctcattaaacccttagacgcctacatatccagggtcataataagcgatcgtctagagtca

SEQ ID NO: 103011 - DNA, 381 bp, Homo Sapiens
attgggcaattagtgaggacaattccaatggcaaaagagaatgaggaggccaccaaggtcctcccaggcaggggcctggccaaacagaagcccctgcacctggaggggccttgtgatgtcaccaaagccagcaccaggaggaggtgtggagcttggtgacaaggccactgaatgctggctgctggaagcagctgtgccctccgcccctcggccaggcccagcaccgggctgagacactctagctgcccagggcggcacccatgcaccccaaggccccgagcactgagggccccagcgcagacgcaccagggaggcactgagccgccaaacacggcagagacaaaaagcagcgacagccagccgccacagtattagcgatcg

SEQ ID NO: 103012 - DNA, 262 bp, Homo Sapiens
ggcgtggggaaggggtaccaggagagatctgagacaaggtatgagagtaaaagatttaagattggaagtggagagtgtcatgggccagtgcctttcggatgggtgacttctggaattcttgttaggcacagcgaggttggtcctgtgggaaaggaagaatatttccggggtgaggagacttcggggtgtgggccgggtgcctttttaaatttggaatggtgtatacatagaacaacggatgtaactagcgtgcggttacaag

SEQ ID NO: 103013 - DNA, 225 bp, Homo Sapiens
gctgagtccgaaacaggagtcatcaaagggtggtgtgattatcactggttcttactagatttgggaataggcggtggagttaagagcagtgttttgggggcaggaggtggatctcataaagtacattgtcaaaggtgaggagaattacaaagaaacttcttaagggtgggggagatgataaagaaccttcttaagagtggggcagattacaaagtacattgatca

SEQ ID NO: 103014 - DNA, 561 bp, Homo Sapiens
cagctcggtacccttcctaccagcaaagactgtattgcagggtgaagagtggctcccgtgggcccagagctgcacgccggtccacagacacactcacgcccgccacctgctccccgcaggatgtgtctgtgtgtgggaattggtatcttgcacccgtgggagtcgggacatataatggaaaggccctcgggaagttccgcgtcctctgtgggggctgccggaagacacggccccaggagtcaggcccctgtggtcaggtctagcatggggcttgttttccactcctgctgtaagcagccttcgacacctgtcctgccacggcctcccagccggtgcgggagcccctcactgccctgaccgactccgcagtccccggggaggagcatggatggtgtgtcggcagctccgtccttccagctgtcccgttgcagtgcccgtgatccgcgtctgccttagcaggggcctgcgtgagtgggcacggtgtgggaggtcgcctgcgtggggtggtgtctgtgtgtgtgcacgcacgcctgccatcaaagcagcagggctgagggggtg

SEQ ID NO: 103015 - DNA, 232 bp, Homo Sapiens
gtacgctggtacgcgcacgctaagggggcgtcctgacagcctgtctgggatcagagctcaggggcctccttccaacaaaggcaagctagcaggtcccactcagccccttcctagacgctttggaaccgctctgaatggaaacatgacacctctcgatgaccccctacaaactctgacccaggatacaactttgtgcctcgggatcctgcagaagatgacccaggggtgctag

SEQ ID NO: 103016 - DNA, 454 bp, Homo Sapiens
ctagaggatctgttcgtaccgcacgctaagggctaaggtagcatctcagcatgtcttattcgagacttcgtagaaccagacctgctgtttgtagatgttaagtaatcaaacctttctctacgcattctggaccagttaaggttttctccttctccgtatgagttttgattttcgtcctccttggttggagatcacactttggtctgctgctaaggttggatgcctcccactgtctttccctaagtctagggcttcagaccccagtgtggggagagggactttcgtttcctgcccctcaccacatctagacacaggcagggcaagaatatagatggccaaaaggccgatgaacttcttgacctagcctgggacattacctgttactaggtggacttcactgcctgtgaatggaagctgaagggctgttttttggtttgtatttggacaggccagg

SEQ ID NO: 103017 - DNA, 263 bp, Homo Sapiens
tgtgtcatcccccttcgtgatcacagtgccactgttccataaggcctgctgacccctcaacaagccctgttccccggagatggaattatggattctttcacctcaaaacacaggccagctcagcggcctgccctgctgccatgttgcccatagaccagcaggttcctgacaaaggacaaaggttgcttttccatgctccccaaaaactgtgaaaaacgaaacaaatacccaggctctttttagaaataaagcagtacaggcca

SEQ ID NO: 103018 - DNA, 344 bp, Homo Sapiens
gctcaggggtgcagacaccccatctccctcacttagagggtggaagccctctatctattgctcagcaggtgtagacaccctcccttcttcgctcaggggtgtagacaccctcccttcatcgctcaggggtgtagacaccctccctccatcgcgcaggggtgtagacaccccatatccatcgctcaggggtgtagacaccctctctccatcgatcaggggtgcagacaccccatctccatcacttagggggtggaaacctctctttatcactcagcaggtgtagataccctctctccatcgctcaggggtgcaaacaccccatctccatcacgaagggggatgga

SEQ ID NO: 103019 - DNA, 527 bp, Homo Sapiens
gatggagatggggtgtctgcacccctgagtgatggagagagggtgtctacacccctgagcgatggaggggggtgcctacacctgctgagcgatagagagaggtttccaccccctaagtgatggagatggggtgtctgcacccctgagcgatggagagagggtatctacacctgctgagtgatagagagaggtttccaccccctaagtgatggagatggggtgtctgcacccctgagcgatggagagagggtgtctacacccctgagcgatggagagggggtgtctacacccctgagcgatggagagaggatgtctacaccccgaacgatagagagggtgtccacacccctgagcgatgaagggagggtgtctacacccctgagcgatggagagagggtgtccacacccctgagcgatggagagagggtgtctacacccctgagcgatggagagagggtatctacacccctgagcgatggagagagggtgtctacacccctgagcgatgaagggggatgagacacggg

SEQ ID NO: 103020 - DNA, 312 bp, Homo Sapiens
tgctgggattacaggcgtgacccactgcacctggcctgtttttcattatctagcatgagcatttgtctctgcaaattttcttaaaacatagtttccctgttgtctcacttatacagtagctgaaatgatttccttagacttgtccaggcggcttcatacctaggagcttaagctgaatattggatccaggctcaaggtcatggatgagataggattcaaattatgcagggaggacataattagggatggtttgaataaattgcagactcatggaagtaggataatgtctagcctggtggtttctgaaaagtg

SEQ ID NO: 103021 - DNA, 431 bp, Homo Sapiens
tgtccatcccctttcgtggtgggaggcggacccctaccagattccaccacccccaaagggtgtgggggtccgggtcctgggctctcagggacatgtggctcaaggggcccgctcagggtcagcactccctgtcccacctggtggccgttcatgagcaacagctgccgactcagcaggttctttgctctggttggaggccactgggtggctggcaggttgctgggcctcgctcggctgcacggaggggtcaggctggctgggtgccaggaaggggactaaggagtgccaagggaacacagccacagagcgaggttccacattcgtccacactgttccaggccggccctatgatgacttccttcttggggcagggtggctggtgtagctgctgggctccataacgggcaacatgcagcagtgtggtgttagcc

SEQ ID NO: 103022 - DNA, 264 bp, Homo Sapiens
cgagctcggcaccccccttcgtgatccggtccttcccctccttcgtccaagggccaggctcatcatcgtccctccgcagaaggtagcgccacacgagaaacccggacttccccttctcgggccagtatttcacaaccttgtagatgccatcatagcggttgccctcagcgggggcgtacttgctattcttgccacccttgacattgcgcaccaccctgaccggcttccccgaccgccagtccttggacgaagggggatggacac

SEQ ID NO: 103023 - DNA, 347 bp, Homo Sapiens
gtggtctagaggatcccttacatcccccttcgtgaaggtactgcccacagtgggctccaagctgagcacgcttaccatactggtccccgtttctccttgtgaaaagtgaatgcacgggaccgggtgccttccggggctccccttcatctcccactccctagggaccctgatccgtcagtgggaggtgccgaaccggagtagcacggtgtggctgtgagcgacaccatgtttgccctgccctgcccctcctatccctcccaccacagggagcttcagccatgtggggctagctaggctatgaggctcgagtcctctcttcgtccttcttggtccagggcctcaaaagg

SEQ ID NO: 103024 - DNA, 514 bp, Homo Sapiens
  misc_feature (306)..(383): n is a, c, g, or t
  misc_feature (408)..(408): n is a, c, g, or t
  misc_feature (443)..(472): n is a, c, g, or t
cgagctatgtcatcccccttcgtcaaatccaaagttgatcagaccaagggaaagtaaagctcagactcaaaggcatatgtctacacgctgatcaacagcctatgacttgtaacatgaaagccctccccaaacaaggatgacgtgagaaaattagattaaatttgcaattgggaaaaacagaagaacagaaactcagctgaagtgaatggatacatggtaaaagaacataccacagctacgtaagaagcatgaaagatttaaataagatcaacttgtgaggaataggcacaggagtcagaagctatnnnnnnnnnnnnnnnnnnnnnnnnnnnnnnnnnnnnnnnnnnnnnnnnnnnnnnnnnnnnnnnnnnnnnnnnnnnnnncttgaggccaggagttcaataatancctggcaacacagcgtgagcctgtctctattagtnnnnnnnnnnnnnnnnnnnnnnnnnnnnnngcagaaactatccattgcaatgggataaagaatagaatgaga

SEQ ID NO: 103025 - DNA, 398 bp, Homo Sapiens
ccaggattcccaggagagaagggcgaagtaggagaaattggactggatggtctggatggtgaagatggagacaaaggattgcctggttcttctggagagaaagggaatcctggaagaaggggtgataaaggacctcgaggagagaaaggagaaagaggagatgttgggatttcgaggggacccgggtaacccaggacaagacagccaggagagaggacccaaaggagaaaccggtgacctcggccccatgggtgtcccagggagagatggagtacctggaggacctggagaaactgggaagaatggtggctttggccgaaggggaccccccggagctaagggcaacaagggcggtcctggccagccgggctttgagggagagctgaggaccatcgttg

SEQ ID NO: 103026 - DNA, 603 bp, Homo Sapiens
caactgttcggatgcatgcggatccagcagtttcggaaggcggatggttcctatgcggcttggttgtcacggggcagcagcacctggctcacagcctttgtgttgaaggtcctgagtttggcccaggagcaggtaggaggctcgcctgagaaactgcaggagacatctaactggcttctgtcccagcagcaggctgacggctcgttccaggacctctctccagtgatacataggagcatgcaggggggtttggtgggcaatgatgagactgtggcactcacagcctttgtgaccatcgcccttcatcatgggctggccgtcttccaggatgagggtgcagagccattgaagcagagactggaagcctccatctcaaaggcaaactcatttttgggggagaaagcaagtgctgggctcctgggtgcccacgcagctgccatcacggcctatgccctgacactgaccaaggcgcctgtggacctgctcggtgttgcccacaacaacctcatggcaatggcccaggagactggagataacctgtacggggctcagtcactggttctcagagcaatgccgtgtcgcccaccccggctcctcgcaacc

SEQ ID NO: 103027 - DNA, 536 bp, Homo Sapiens
tatctcctgtgcatacgtgtggttcattcagagaataaagcaaacacactaggaaaataagagctgtaattcccaggacggcaggcaaagggatctgaaaaaaaggcagagcgaatgggtctcgttgataatcattgatccaaagccaagtcaccccttcacaagtcacacatcagtgactagaccccatcagtaaactggtcgtgctgctgctggggattgcatacatagcttctgatgcctggtaatggcagatcgagaagagattacactatgcactagaatctggcctccaaaataaatccaggccattcttttccctgagacagtaaatagggtgaagttaaactccagtatttccatgggtaccactaagttaggttaacccaaggcactgggattcattcagtctgattattgcactgaaaaatacttcctagcccgtgtgaaaaatagggcatctgaacaggacagagattatgatcacagttttacaactgtgtacagcgcttcgcttctgacacataaaatactgg

SEQ ID NO: 103028 - DNA, 455 bp, Homo Sapiens
ggtactctagaggatcttcagtgcgtagtgggaaggagccatgggttgtttgaggtggcagtgaatggagagcgcgagttgggtgaactactacatgagccccaggtggtggcatgagatgggctggaatgccatcgcctctggaggctcgggcaggggaacagctccatccaacatgcctattacaagctcactcttgggaggccatgggaaggtaggcagggagagacaagagggacagcaagggctctagaagtctacgaggagagggcggcgagccatggcctcagccattcactaagctgggtacagtggatctggggatggcttagcgagggagagctgagatggggcagctgactggctgcagcctggacaacaccagacaacgcatttggtgcgtgtccccaccgcaggggcttggtgggcatgtgcactcacaaagtgctggcttc

SEQ ID NO: 103029 - DNA, 366 bp, Homo Sapiens
ctatttcatgcgtcagggggaatgcccgtatgtattgcccattcactagatgccacatactggaaagagggcagtccctcctatcgctgggccaggaaaggggttgtgaagtattatacaaggggaagaatggggtgctatgggaacccagaaaaggtagcaaataacatagtccctagtccaagggcttcgtgaggaagagactctaagctgagatttcaagaatgagggaaaggtagccagacagtgcagagagaggagctgggttctaaggaggaagaacaacatgtctaaaggctggagcaaaaaacagagtatggcacttgaaggaggaagtgcgatggccgacgtcccgacgctgtaatt

SEQ ID NO: 103030 - DNA, 497 bp, Homo Sapiens
ggtcagggcgtgtggttgtaactagtcaggtcagggtcgtgtgattgtaaactagtaaggtcagggtcgtgtgattgtaaactagtcaggtcagggtcgtgtgactgtaaactagtcaggtcagggtcgtgtgattgtaaactagtcaggtcagggtcgtgtgattgtaaactagtcaggtcaggatcgtgtgattgtaaactagtaaggtcaggatcgtgtgattgtaaactagtcaggtcaggatcgtgtgattgtaaactagtcaggtcaggatcgtgtgattgtaaactagtcaggtcagggtcgtgtggttgtaaactagtcaggtcagggtcgtgtgattgtaaactagtcaggtcaggatcgtgtgattgtaaactagtcaggtcaggatcgtgtgactgtaaactagtcaggtcagggtcgtgtgattgtaaactagtcaggtcagggtcgtgtgattgtaactagtcaggtcaggatagtgtgattgt

SEQ ID NO: 103031 - DNA, 357 bp, Homo Sapiens
acccccgattataagcgtcaggggcaggtggcactacaaacaaccctgatctacttgactgttttgcctgccacctggcctgtcccaggatgaagtcattccttttcagcatgcaggtttcaatgggctggatttctgggccattcactggcctcacttccaccccacgcagatgatggaacggtaggactgtgatagtgctgctgggtggagaggagatcacacccaggaggggccgaggttagacatcaggaaggactttgctggtttcacctggcaagattatatgagaggtcaatgtcccaggaggcttggatcctgagatcctgacgcttaactgtaatcctgtagagtcac

SEQ ID NO: 103032 - DNA, 537 bp, Homo Sapiens
  misc_feature (337)..(337): n is a, c, g, or t
tgctcaatgtgaattaagtatgtctacataggagtctacacgtcaagatgccaggtgtgaattaagtaggtctccacagggatctacatatcaggactcctggtgtgaattaaataggtctacataggagtctacacgtcaggatgccgggtgtgaattaagtaggtcgccacaggggtctacaggtcaggatgctgggctgtgaattaatgtagatctacacaggggtttacacgccaggacacccggtgtgaattaaataggtctacatagtgagtctacactgtcagtgatgccagtgtgcgaacttaagtagtgtctccacatggggtctacnacatcagtgacaccctggtgtgaaattaaagtaggtctccacagtgagtctaccatgtcatgaataccctggtgtgaattaatgtaggtctccgcagggggtctacacatcatggacacatggtgtgacattaaagtagagtctccaacagagagtctacgcaatcaaggacacctggtgccctgaaagctgtaaaactg

SEQ ID NO: 103033 - DNA, 384 bp, Homo Sapiens
ggaaggcgtcgggaagtggagcaggctatgtgagtcaaggatggaacgatggtcccagaacatcccaggagggtgtgacagcctccatctagaaggttctatcctcaggtccccaaggcatctgcagcacaccgtcctctgctgtgggtctgtgaagcagccactccagcagcaggtgtccctatcgtgggcgtactcagtcatctctctccccactgacccccttacgttcctgtccctgtggtcacccgcccagctatgggccttcgcgcctaactatgagtccctccatacatcacctatcccccactcacctgtctatactccatcccccgtgtagccacgaatccatccagcaccccctcaccactcacacctctccaa

SEQ ID NO: 103034 - DNA, 507 bp, Homo Sapiens
cagtttacaggggaggaggaaagaggcagaaggagagccacagccacctggacacttactcagggaccacgtgcttgatctgtggtttcacatatccatcaacagctttagccagcacaggagtgtagtacttggagaagacctcatccttggggcggtcaggaaacacatagatgagatagctcaggtcccccagccggtcagccagggacctgatggagaaatcccgcgtggtgaatggtttcaagttccacaggttgcgttccggggagtcaaaccttccaggcgatggtgatgcccccgatttctgagtcactaaagcgcaacaagaaggtaccgtcgggcttgttgatgagcaggtcgtgggcctgttgcttattcacaaaacctaggatggccctgggtgcacggagcattgagcgtcaccactgggccacatgccacagtctctctgttaccacagctgcccctgaacgctgtaaacttaaggatcctgctagagtcacg

SEQ ID NO: 103035 - DNA, 484 bp, Homo Sapiens
gggaaccaggctatgcccatgagtaccaattccgagctccggtaccacaggccggcaggggaatgcaactggagcggggagctgggcacggggttgggatcgtcctgcggctggaaggccctgcctggtaaccatgtgtcctgggtcatgccttgccagttgaggcagactctgcaggtcctgtgcaccaggtgaggtccgggacctgtctcaggccactggggagccatggggggctgtgagcagatgaaggggcagggcctgttcccctgggactagagaatggacccagctggggctaacaggccaaggctcggagggagggatggcaggccccaggacagacagacaggtttcccaggagccatggcccctcttcacaccccgttcccatccaacaggcagtggacctggtggtgtcaactcaggcacagtccagatcgtcaacaacaagtttctgcactggagtgtgtccctgacgctg

SEQ ID NO: 103036 - DNA, 469 bp, Homo Sapiens
ggtttagatgtttcataagtccctggtgacacattgctgatgtccttctatgagaaaatagtgtattttttagcaagaatgtgggaacagatctttctcttgacttcagggtcttagatgagggaatagacttatctgattcaagcagtctgtccttctaggggaaataactaaatcataccaagtgatgtaaagacccagtcttaaaatcccaaaagaaattccttacagttagtggcagttctcatctattgcatcgtccggggcactaggctattctttactgctggttgacttaccaccattttctctagacacatagattccgtctcaaaggggcaaatcattttctcccttcccagcagtgacaggtgtgcagcctttgtttattcagcccttctcctccaaagagcaccttccctagtctatagcatcacagagaggaccagaagaaagaacagcctagtgc

SEQ ID NO: 103037 - DNA, 423 bp, Homo Sapiens
cagtttacagcgtcagggcagtcagcgtaatcatggtgcccggggcatgtaatgtccgcacaggcggcgcagcagcaggcggtagtgcagcatgccgctggattgggcttcagcagtgaacgtgttgagaggcaagtagcagaccttctgcagctcaaactccttgtacactgcctccaacttcttacagcgtttggtagccttttccagttctgttagaacctcgtcatgtctttggaagtagctggtaaactcctttaactggcgcatgttcctgagcaggatgtccccgattcgttgatgactgccttaggtgtagggctttggagggcccttcccagaagtgccagcctctgctccacctcgcgcaggaagcctatgtggaactcatagatgggatcgatgttggagaagagcagcgtc

SEQ ID NO: 103038 - DNA, 503 bp, Homo Sapiens
cagtttacatgcgtcaggtgtggccatccaggccatgatctccgactttggcctctgcaagaagctggcagtgggcagacacagtttcagccgccgatctggggtgcctggcacagaaggctggatcgctccagagatgctgagcgaagactgtaaggagaaccctacctacacggtggacatcttttctgcaggctgcgtcttttactacgtaatctctgagggcagccacccttttggcaagtccctgcagcggcaggccaacatcctcctgggtgcctgcagccttgactgcttgcacccagagaagcacgaagacgtcattgcacgtgaacttgatagagaagatgattgcgatggatcctcagaaacgcccctcagcgaagcacgtgctcaaacacccgttcttctggagcctagagaagcagctccagtgcttccaggacgtgagcgacagaatagaaaaggaatccctggatgtgccgatcgtgaagcagtaagag

SEQ ID NO: 103039 - DNA, 137 bp, Homo Sapiens
agttacagcgttcagggggcacagctggctccgaggagcctctgacccgctggccactgtggtggtcttggggcagctccagacacacaagcccagaagacccagaggctgcctcacgtcggagaaatgcgctgatc

SEQ ID NO: 103040 - DNA, 433 bp, Homo Sapiens
acagcgcagggctgagcctccacggcctcctgcacctacagaacggagcccttgcatctaaactagccccgacctatacgctccaatttcccccaaccatttccactcccagcaggatggagcaggtgcactttcccctggattccacctgctaaggaacaatgaaaacccctgggcattctatgctagatgactataagaagactccaaatggcagtctgaagaaggcagaccagctgggacctcaggatccaaggaacaacacagtggtgagcttcctgcatttccttttctgcatatagctcagacttggaactgaggagaccagcaactcagaaatgccaaggagcacaaagagaaaatgccccaacaaatctccctgtttcaagacagaaaacttgtagataataaccactgtatttcagccaaacat

SEQ ID NO: 103041 - DNA, 462 bp, Homo Sapiens
tcagtttaagcgttcaggtactgacgcgtgtcaggtataaaccgcaggttgagagagaactaagtattttctgtccatgaaggtgataagcgagggcctgaagaaagagggactggggaggacactggcaccagaaataggaaagggctgcttgggggtgggaaggatgggtcacggtgctatctagaaagttgcctggcaatggatgtaggatgtgggagtgagacatcaaacatgaagcagtcgcttaaataaagtctgaagaaagactagatatatgaactgcaggagatagtagggaaactgtacctggctcctcataaaacttcccgccttctatctccgggaggatcgcagggcatttccgccaagacaggtgagactgcggttctgacctgcgggcctccatgaatatgcgcgagggcacctgggggccggcagagccgttcccctgacgctgta

SEQ ID NO: 103042 - DNA, 580 bp, Homo Sapiens
  misc_feature (450)..(513): n is a, c, g, or t
gctgggattacaggagtgagccactgtgcccggccgtctctctagttttactttgcaatgtcgttcatatccatcccctttctagtgccactgctgaagtcctaagtcactgcctcctaactggtccccctaccctaactcctcccagacacggcctcctgccctaagtctcctccctgaccagtcctcctgccctaactcctccctgaccggtcctcctgccctaactctcttccctgaccggtcctccagccctaactcctccctgaccagtcctcctgccctaactcctccctgaccggtcctcctgccctaactcctccctgaccggtcctcctgccctaactcctccctgaccagtcctcctgccctaagtctcctccctgaccagtcctccagccctaactcctccctgaccagtcctcctgccctaactcctccctgaccagnnnnnnnnnnnnnnnnnnnnnnnnnnnnnnnnnnnnnnnnnnnnnnnnnnnnnnnnnnnnnnnntgccctaagtctcctccctgaccagtcctcctgacctaactcctccctgaacagtcctccagcccta

SEQ ID NO: 103043 - DNA, 399 bp, Homo Sapiens
gtggtcccttggccccacaagtcaaagtagcgcctatagtagtcccctctagcacagaaatagacagcagagtcctcagatgtcagcctagtgagctccatataggctgtgctggaggacttgtctacactcagtgtggccctgcccttgaacttctcattgtattcagtactcccctctccaggaaaaatccatccaatccactcaagtccctgttcaggcgtctgcctcacccagtctatatcataacttgtgaagatgtagccagaagccttgcaggacaacttcactgaagccccaggctttaccacttcagttccttactgctgcagcttcacctgggccatggccggctgggccgcatagaaaggacaataaaggaatgcgataatatatgcc

SEQ ID NO: 103044 - DNA, 399 bp, Homo Sapiens
cgggtcgtgcaccatgtggggcagttgtcacatgtgatcacccacagcgtcaacatccgtgtccctctggtcagagttgtagacgtagtggacaaattgtctcgtacatttgaagacatctgtccccatcaatgtccacggagcaggcgtcaccctctccattgttgtctgtgtcgatctgggcagggttgtagcacgtaaggccagttgtcacagcggtccccaacctcatccttgtcatagtcagccttggctggggattgaagaggagctggcagtttgtccttctcatcggtcacaaccgtcattgtcatcgtcatcatcacagtgcatcgccaatcccgtccttgacaaagtcttcctgccccagaatttggcagatgggggcagttatcctgc

SEQ ID NO: 103045 - DNA, 332 bp, Homo Sapiens
acagcgtcagggaaaacggaacacttcagttcctcaaggtagtaagagaaaaagactccttgtatgtaatagccagacattttatcgataaaacttgggagcacaattttaaaaagtcagggttggcctcactggtggaaaaaatataatgcattcattcaagcaaccaaacacaggaggcatttctgtagttatctgagggcacctctcacgtttactgagtccgcttccgggattagatacttcaggctgccagcagaaatcctatcaagtaaaagtgggcaaaatagaaaatggactttaaaattgtcgtccttccctggtgaggcaac

SEQ ID NO: 103046 - DNA, 482 bp, Homo Sapiens
agagtggaccgtggtgtaggtcctggggtaggagtggctgcggtaggagtggcagaaggacctggcagtgacactaggccagaaaaaaatggaaggaacaggagtggtggttgtactgtggatggatgtaacaggtgcagtgggcaatgaaggggttctgataactgttgggtttggtattgatggctgaggtgtgtgaacggctgaggagacctgccctgggaacacaggaaggacagtattcagcaggttcattccagaaacggtggcagctgctgatgctgatggatgattaattgccttgactggggatgcagtaggaacaggagttgcagcaggtgctgaaggattagaaccatgaggagaaaagagttgacttgctggggtggaaaatgtttgattctgtataggttttgacggattcgaaagtcttcattctctttcctacaggagtacacctgccgtgggagatcctctagagc

SEQ ID NO: 103047 - DNA, 213 bp, Homo Sapiens
aggtttgggacggccccacccgaccctgacaagtgaccatggatcatggagccgggtcagagacatctctgactgtcaatgagcaggtcatcgtgatgtcaggtcatgagaccatccgagtgctggaagtcggagtggatgcccaactccctgctgaggaagagagcaaaggactggagggtgtggccaccgagggctcccagagcggagacc

SEQ ID NO: 103048 - DNA, 462 bp, Homo Sapiens
attagctgacttagaggatcccagtttacagcgttcggggaaagtcacaggcagatgcatggagcctctggtttgtctaagagacagtgcccatagccattgtccaggaagtcagtgatgaagcgggcactgcagggggaccagggctcctcaggatccacatgagccatcacaggggccatgacatggcgagaggtgctcaaaggcccattcaaactgatgcatggcttggagttgtcatggagcatgttgaagacatgacccagttcatgagcagcagtgaaggctgactggagcccatcatcctccacaatggcacagctccgagccgggtcacagacggtgcccaaatcagacatacccagcgtgtcgcaagttggagactccacacaggtcctgacgggtaaacagaatggctgtgtcaaagtggtcagggtccgagtcctcaggggtgtagagtcc

SEQ ID NO: 103049 - DNA, 349 bp, Homo Sapiens
ctgtgacacaagcttggtggggatcgtgggaatacgatcacccaaatagcagcacataacacccatatatacagcagcccccatatggttaacaccactgtataccagcatcgtgcttgacatttcctatgccttctcttatatgaatccacttaacatgctcttcaatgaccaagagcaatcatttggcagcccccatcttgtagattgaggagcctgaggctcagaaagactaagttaacgcttctgagatcacacagctgaggtagagaagggagtcagatgaagcccacctggcatccgaggtcttagctgccatgcgggagacacgtcttcaggttacttccaa

SEQ ID NO: 103050 - DNA, 533 bp, Homo Sapiens
ttccatgatatcacggctctaaagtatcgctgtcagtgccatttccatgatatccacggtgttctaaactctcgctgtgggtgccatttccatgatatccacagtgttctaaactctccctgttggtgccatttccatgatatccacggtgttctaaactctcgctgtcagtgccatttccatgatatccacggtgttctaaactctcgctgtcggtgccatttccatgatatccacggtgttctaaactctcgctgtgggtgccatttccatgatatccacggtgttctaaactctccctgttggtgccatttccatgatatccacgacgttctaagctctccctgtcggtgccatttgcatgatatccatggtgttctaaactctcgctgtgggtgccatttgcatgatatccacggtgttctaaactctcgctgtgggtgccatttccatgatatccacggtgttctaaactctccctgtaggtgccatttccatgatatccacgacgttctaagctcatcctgtcgctg

SEQ ID NO: 103051 - DNA, 201 bp, Homo Sapiens
gtactagaggaccccatattcatctccagggctccgtattgatggctgagactgggtggtaggtaaagtgctgagcgcagacttcgttttctcttcccattgatgacgtagaagttcacttttacaggtgtgcggatatgcttgttcccgatattcagggatctcaacaaagaagcatgttgggatccctgactgctgtaa

SEQ ID NO: 103052 - DNA, 386 bp, Homo Sapiens
gggaacggtcggtatctgtttctagccctgcactgcccatgctttctttgctggctccagggcctggctgtctctgcagctgtaggactgaccgtccccacctccatggcagcctcctaccagaccttaggacggagcttcatgatctggtggtcacctgcccctccctgtcctcctcctcttccccaaacttagttgatgcctcaccttggctttgactccattctcacagcatatagtattaggcaaccgttattgacatacaattcacataccatgccacctgcctctttaaagcacacaggtcagtcatttttaacatgttcacagagttgtacagtcaccaccagtcaattataggacattttcatcacctcagaaagaaa

SEQ ID NO: 103053 - DNA, 352 bp, Homo Sapiens
ggtgatatgccaaggtagagaggatgggtctgaggtgttcctctgtgacgggacagaagagatgtgaggacctgaagaggcgccaccatgggaacttgagaaaaagaaggcaggtggctcggaagacccgatccatgtgaccctgcaatttattggatatggatgaatcagagctgactttttcgatgacccaaaagatgaaactattaattaaggctagacggaggggagaaaagagagagaaataccctgctacctccagtttttctccctacagcacctcctagagatgaggtgatggcagctcaccttcaggatccataggaaacaaagagaaatctctccctaattc

SEQ ID NO: 103054 - DNA, 484 bp, Homo Sapiens
caccgcagtacccctgacgatcccaatccctaccttaaacctgcctaattggtaatgtgcccatgtacccacagcaggccaaaggagttagcatgcccaggggccaaacaggagcattgtgaaaccctgttgtgtacatgcataggaacacattctggcaaacacaatatgggtacacacgtgtacaaacacaagtctataagccatggatatgaatatccttcagggtggtgtacatatactatatgtatgtcgtaaggccatgtacatgagcatgcctgttacttgaacataggtgcaaatcctctagtgagtagatatgtaaatcgtctactgaagaatgcacaaactccagtcactcctgtaaagctagagtgtatgtgtataagcatacacctgtgcactacgcctgtccatgtatgtaaacccaccacgtgtttgtaagccatgtacatgacatgccgatttcctgaccttaacatag

SEQ ID NO: 103055 - DNA, 1400 bp, Homo Sapiens
aacgggtgatgcggttgggggcatgcagagtatgcccatggaggtgcccatgaatgccatgcagaggcccgtgagaccaggcatgggctggaccgaagacttgccccctatggggggacccagcaattttgcccagaacaccatgccctacccaggtgggcagggtgaggcggagcgattcatgactccccgggtccgtgaggagctgctgcggcaccagctgctggagaagcggtcgatgggcatgcagcgccccctgggcatggcaggcagtggcatgggacagagcatggagatggagcggatgatgcaggcgcaccgacagatggatcctgccatgtttcccgggcagatggctggtggtgagggcctggcgggcactcccatgggcatggagtttggtggaggccggggcctcctgagccctcccatggggcagtctgggctgagggaggtggacccacccatggggccaggcaacctcaacatgaacatgaatgtcaacatgaacatgaacatgaacctgaacgtgcagatgaccccgcagcagcagatgctgatgtcgcagaagatgcggggccctggggacttgatggggccccagggcctcagtcctgaggagatggcccgggttcgggcccagaacagcagtggcgtgatgggcggcccgcagaagatgctgatgccttcacagtttcccaaccagggccagcagggattctctggaggccagggaccctaccaagccatgtcccaggacatgggcaatacccaagacatgttcagccctgatcagagctcaatgcccatgagcaacgtgggcaccacccggctcagccacatgcctctgccccctgcgtccaatcctcctgggaccgtgcattcagccccaaaccgggggctaggcaggcggccttcggacctcaccatcagtattaatcagatgggctcaccgggcatggggcacttgaagtcgcccacccttagccaggtgcactcacccctggtcacctcgccctctgccaacctcaagtcaccccagactccctcacagatggtgcccttgccttctgccaacccgccaggacctctcaagtcgccccaggtcctcggctcctccctcagtgtccgttcacccactggctcgcccagcaggctcaagtctccttccatggcggtgccttctccaggctgggttgcctcacctaagacggccatgcccagcccgggggtctcccagaacaagcagccgcctctcaacatgaactcttccaccaccctgagcaacatggaacagggtaccctcccgcctagcggcccccggagcagctcctcagcacctcccgccaaccctcccacggcctcgatgaaccccagcctaccagtcacttcctccccaa

SEQ ID NO: 103056 - DNA, 554 bp, Homo Sapiens
  misc_feature (434)..(434): n is a, c, g, or t
  misc_feature (445)..(445): n is a, c, g, or t
gcccacttgcacataatcaaagtagtccccaaagctgtagtttctaatagcttcatagctcacatgtaataggggttctctgtgtgtttatagagcaggctactacagtggaactgtttctgtttcatctgacatccggatagatgccagccacccccacattccaaggtgagatttctgactagcagtgacttttctagggccgcttggaaaagttgataagtatccattttctgcaggacagagtagactggtatctctgactcatccctgaaaaatctaaatggcaagagactagctggctctctgctctgatggggaggaggttgttgtttgggctgttctctacagacatagtcagggcaaaaagcatacgcatgcttcccatggaccagagaaacctggcctgggttgtctcaaatcctgtccacaanggcaactccangaagaaagaagccctttacatttccataaaacactttagaatcagctagtcatttccacaaataaagtgctagaatttgattggattattgattatgtaggaacaattt

SEQ ID NO: 103057 - DNA, 627 bp, Homo Sapiens
atcgatggggcttaggctgtgaaagtgtgagccacgtaggtccacaccatccccaggcctgaccagcacagctcccaagtcaattctaactgactgtacagacaatgccacgtgcgtacatgtgttgctggtatatacaacccccaaaaatgcctactgccgcttggtaccaggacagctcctgtgaatggccccatgacaccaggctgagagcggggactcccatgtgaagtggcctggacgtgagcgcacagatattgaagtgccggatggagctcccagctactggagaaagaggatgtggagctgaggaggactgagctttgggtgtattcctgtagtggaacctgtggcggccaagggactgtcagagtcagtgtgtgcttgtgctgtgaggcttgggcaccagggggtctcctgtgccacgccatgtggactgcttggcgtactctcacgctgtgtcttggcacagtggagctccccatgatctcagggcaggtgcagtgaggaggtgcatcccccccaccccgggggtcgggtgggtggctgccctgaagttgaaactggggtaccgactcgaatccaatcctggcatactgttcctttgtgaatgaatcgcaaaaaata

SEQ ID NO: 103058 - DNA, 466 bp, Homo Sapiens
tcatgtttacatgcgtcagtgtgagacctcaatgtattcgtgagcttttgcaggaataaaggtaataggaggtggaggcttcttgacaatctcttcacgtggtgtcatctctttgggcttgcacacaacttttttggcatctttcttcacagcctttttggtaacttcaatacgttttggtggtggattcttatcttcggtgtgttggtagcaaaagggggataggaggagcaaccacaggagggatttcttctggtggcactgctctgataggcatggttgggattggaactctggagtcaggaatatcaggaggcttcagctcaagtttgatttctttcgtcgttaggtacagctctgccgtgctttttgcttcacctcttggctccagccgagcgatgaccgagtagacaccttcatcgtctggggtcacattgtggatggtcatataatggcagcggccatc

SEQ ID NO: 103059 - DNA, 543 bp, Homo Sapiens
gcgtcagggggtctagtttccatctggtgggtgcacgctgttgacatggatttaacatcacccaaacagtccagagttttaaaagagattctaccacaacttgatccgaaaatagtctgctctcctgggaggaaggaggtatgtttacatataacattactgcaaagagatcgcttgctagaattcggcagagctgagggcaaaccactcagggatgtccagatacggagtcacctgtccccgagaggtgtgacctcgccacactcgttcagccccacatctgcaggtgcgccctgggagagcttaagtaatgctggggttgttcccttggcccagctgcaggcccatgggggacctgcaagggaagcaccctggaagtggtcccaagcacacgggcagctatgcatgcctcgacactagccacctcccctgtcatgcagagcttcagcggactccactgtgggccttaggggaaggtggggacgcctcttcccaccagactgccacgttcccccctgaacgcttaaactgaggatcctctag

SEQ ID NO: 103060 - DNA, 863 bp, Homo Sapiens
  misc_feature (21)..(21): n is a, c, g, or t
  misc_feature (287)..(287): n is a, c, g, or t
aagatctcgcatctgctgtgnacagctggaggagctggctcttgtcctggcccgccttcccatctgtcagagacatatttgaatgtgctggatcaaaccctcccttttcctaagcctctgggtcccctccagccagctctttggcggcacgccccaccagctcctgtgggcctgagtgctgctgtgtttacttgtgcctttcccccaccctgtccagtttttctgtcatgcagacttgttgctgtccacaagccttagtggctgcactgctgccccctgccacacanggggccgggccctgggtctgtcctgtttcctttgagggttgcccctactgccctttgcaggaacagatccaggtgtgagagctcttgagtcaagagtggcagaagtggctctaattggggtgagagtgtagtccctgggcttgccctgggttgaccctggtggcacatttccttggccgaggatggaagatttggagaatcatgtccatgctggcccaggacccagccatctggcccaaaggcacaagctcctggccctgttgagttgagagtttgcaagaagcatccagaagatcccaagggagagaaggaaaatggctgataatgattgtcttcctaatatgcaagttctcacttcctacttccagcatcggccttcctggccttgtcttttttttgtttccctggagtataatgggaagttgcatgctgcctcctgggttttatcccagatagctctggctttcttgctgcccacaggggcctggggcaggaaggagacttgctgagatgccatggagtgcccatctggtcactggcagtctgggcaggttgcccctttctgggtttgtggtg

SEQ ID NO: 103061 - DNA, 530 bp, Homo Sapiens
tcatacagcgtcagggcagtgcgggtaaggtgaagttagatgactggtgatatctcaagccgtgatggggagcgcgacaggaaaagacgaaggtagtgttggaaagggttaggaaataatggaaaggggaatcagtgattggacaagaggggtgatgacagcgggcactgaaagttctcccactgacaggcaggagagaagcagtggggagacactgacaggtggggtcactaacagcagggcagggtactaatgggtccctaacagataagggatgaaggaggtagcatgaaaggggacaggaactgacaacaggagagaactgatggggaggatctgacaggcaactaacacagaggccgatagcaaagagcggaagggccacaacaggcaggatgagggagacacttatgagggaaacttactgacagtggggctcactgacagaggcactggcactgatggggggcactgacagagaagatcaatgacaggtggggacattgctgacagaaggggtcacagagcgc

SEQ ID NO: 103062 - DNA, 436 bp, Homo Sapiens
ttagtgtaagcgtcaggaaggacaagagactgtctgtgagaaatttgaacgggctcagtgctgttacctactagctagaaatgggaagcaaggggatgaatgtgaggttgggggcattgagtcaagaagaagatcaggcaattctggagctaggtaaattgggatcattcctggcttgtcacatctacgtgggacatttagactatccacgggctggataccttaggaaagttccttctggctctgggactcactgctctttcagcattgccaatttacatctagtgtgttcttgttagaagtggaaggctcctcttcatttttgagctccttgcgccctgtcattttctctgtatgagagggttttgctattcctttttgagtgaaaacgactcccatagcatattgccattcacactccaccaggtctcccctt

SEQ ID NO: 103063 - DNA, 502 bp, Homo Sapiens
aggatgtagtttgggggaaggggactgtgtcagtcctgcctgggtgacccatcagctgcaggagacatcagccctgggcagctgcttcctgagataggtgtcaagtctcatcctgacctcagctctccccttcctggctaatgtcacagacctcctgcctgtaactggggcacagggcttcccctttggcctgtcccctccctcttttctagattgtggttggaaaaatcagacatagtcacggttggctcggactgaagagatgatccagcgtgtccttttctttttgcaggtagagaaaagtgaggcccagggagaaggactttgctaatagcagttaggagtgatagagtactttttatatgacagatctggtgcattttgtcctcacaaaaggacctgtcacatggggattctattatgcccacttcccaaatgtgagaggtaaaatggtactactttgggttagtagaggaactccagaccccagatccctgacgcc

SEQ ID NO: 103064 - DNA, 374 bp, Homo Sapiens
catagctgacgccgcagatggggttacacagcatcacctgagttccaatactccagtaaaaccacccgacgtaagaaggatgccgaaaccaagcgtacactccactggtcaccagagtatgtgtatctgatttttcattctgtaccacgtggttgaaattggagccagctgtaaacatggccgccttcctcagacattctccgaagaccaccatcagcagccctgtgacactgagccaggtaatctgcttcagttctggccaaaagatattttcaagtgtgaactctaaccaagaagaaagagcagctactgtatactccaggctgtgattcaggagaaaggaatccaagacccccgacgctgtaactggggat

SEQ ID NO: 103065 - DNA, 501 bp, Homo Sapiens
aggggactgtagggttccgccaggggtcatgggtaggaaagtgtaggggtcgtaagtaggggactgtagggttccaccaggggtcatgggtagcaaactgtaggggtcgtaagtaggggactgtagggttactccaggggtcatgggtaggggactgtaggggtcctgaccaggggactgtagagttccgccaggggtcatgggtaggagaccattacggctcgtgaataggggactgtacggttacgccacgggtcatgagtaggagactgtaggggtcgtcagtaggggactgtagggttccgccaggggtcatgggtaggagactgtaggggtcgtgagtaggggactgtagggttccgccaggggtcatgggtaggagagtgtaggggtcgtgagtaggggactgtagggttctgccaggggtcatgggtaggagactgtaggggtcgtgagtaggggactgtagggttccgccaggggtcatgggtaggagactgt

SEQ ID NO: 103066 - DNA, 493 bp, Homo Sapiens
aggtgactctaagatcttaataagcgcagggaatgactgattcaggcaggccctgacatctgcgtggaggtgatggcctgctccacccatgtggttggccctgcaggccacggccactgctccatgggtcacaggaccctctgtcccaccctctccaagtcatgctgcaggtgccagtgcagtcactgtccccaaacattgctgcccttctgctcctggttccagagccctcaagggcttggtctgcctaccacatgggctggtacccaagggctgaaggctggccctgcccctggcctgctcgcttctacagcctcagaacaggtgtgggaagatgggggtggccccagtgcccaccaggacagcctgcccggtacctggtggtaatggagtatggtgtctgcattcacatccttccctggagatatgtggagccacaatttccgcatgaagtacacctggtaggggagcgtcacggcggcccctgggcgag

SEQ ID NO: 103067 - DNA, 496 bp, Homo Sapiens
agttacagcgtcaggcggtctcggagttcacaaagggagatctcagccccaggagccgcaggacttggctgctacagaaataacaaccactaaaagcgaaaggaataaatatctgtgcgtgtatacacatacgcctagggtgcccactgcaggaacacgactgggcccgccgccccacagcagggtcgtgccggctctgagggaatactggctggggtccctccccttgtgggcccagagtccagctgctggagttggggttgggtgtcttatccagagcggggtctcccagggcactgcccgcctgctccagctctggacttcaaaatgggatcccaaaggtttggctgaagggttcttctcacttccaaagtgactgagggcctgaacaccagccaggcagagctgatgcccaaaccctcagatgatgtttctggcagctctgagaatattctggaaggactcacttttcaagcaagcctacccagggctcaat

SEQ ID NO: 103068 - DNA, 440 bp, Homo Sapiens
taagcgtggatggaagcacgaggtaaatactaatcttatgtgagccaacaactacggctcagaaaagcaagggggtcacacacggagcgccgtagcagcatctggcccagagcctggtgctcttgcatctcagagaaaagacacaagatgagcccactggccctcactgacgagttttctacatggacactctagagctatgaggagagggggctcatggagctgacgctcaggcctgcttacgggccccgagtgctgtatttcgtgttccttcagcactacatgggtaaaattaagattccacgaggagaaacgcaagggaatcaggagtgcctctgtgtgtctgggtccagctctgctcacatctgctttccagcaatggagaatgaaatgactccagcgggaagcaagctggaaagggcgcgatggagagtgcgagg

SEQ ID NO: 103069 - DNA, 742 bp, Homo Sapiens
  misc_feature (615)..(615): n is a, c, g, or t
  misc_feature (661)..(661): n is a, c, g, or t
  misc_feature (719)..(719): n is a, c, g, or t
  misc_feature (725)..(725): n is a, c, g, or t
gggctcggagctgtattccagccataagatggactgacctctctttatggccgtatccctgctcttctggatgctcctgggggcagtgcctatagctcagggtcatcctgagattcagctcctggagtctgagagttgtggccacagcgcagagggtccttggcgggggggcctgcgctgtccgctgcagcctgggctctgagcagtgctatccctagaccttactcgggatcctctgaactctggccctgccctgcagcttgagctattttggcacagcttttgcggtgcatggcttttaaatggctccataagcagcaggctttctgcggtgatttctttttccatctcacaccgtatcccctccttgtctcccctcccctgtctccgagggtccatctctctgggtctcttcttgtctctcctcacctcctcccgacctttctgcccttcctcatctcttggggcctgaccctgcaggctgaggctggccgcatggagctcgagctctccgtgaccaagctgagggcagaggaggcctccctgcaggactccctgtccaagctgagcgccctcaacgagagccttgctcaggacaagttggatctgaactgncttgtcacccaggtacactgtgcacctgcgggcccacctacctggnccacccgtcctccccactcagtgaggcaccctgggcccggtcctgcaccggtcttggnccctgnctccctttctgtctcgg

SEQ ID NO: 103070 - DNA, 388 bp, Homo Sapiens
ccctaccgcttcttcgctgccactttatccacaaccctagcgatagacctggcggccacgggccaccctccttgtgccttcgccagagcatcagcttctcagacctgccctctggccgccggacctcaccaccaccaccaggcctggccggcacttcactgtccgccagctcctcctcgtacagggacattccatccagctcctcctctacagacacatttcatccagctcctcctctacagacacattccatccagctcctcctctacagacacatttcatccagctcctcctctacagacacatttcatccagctcctcctctacagacacattccatccagctcctcctatacagacaatttccctgacgcttaaataaggatcc

SEQ ID NO: 103071 - DNA, 529 bp, Homo Sapiens
acgatccctttgtgcaaagctcattcggcagcagaaggcatagaatgagcttaaggagctggaacagaagcactcgcagctgaccgaggagaagaacctgctacaggaacagctgcaggcagagacagagctgtatgcagaggctgaggagatgcgggtgcggctggcggccaagaagcaggagctggaggagatactgcatgagatggaggcccgcctggaggaggaggaagacaggggccagcagctacaggctgaaaggaagaagatggcccagcagatgctggaccttgaagaacagctggaggaggaggaagctgccaggcagaagctgcaacttgagaaggtcacggctgaggccaagatcaagaaactggaggatgagatcctggtcatggatgatcagaacaataaactatcaaaagaacgaaaactccttgaggagaggattagtgacttgacgacaaatcttgcagaagaggaagaaaagccgagaatcttacctagctggttacagcatactctatga

SEQ ID NO: 103072 - DNA, 582 bp, Homo Sapiens
  misc_feature (163)..(241): n is a, c, g, or t
cttctaagcctcggtcactgcgccaatcttggttccagggagggatggcccaatttcctaaaatagttggtacagcatgttggactccttacagtggaagtcatgcgcttttgggaagcgagacagttctcagcgatcatcttatttatcaccacctctcatnnnnnnnnnnnnnnnnnnnnnnnnnnnnnnnnnnnnnnnnnnnnnnnnnnnnnnnnnnnnnnnnnnnnnnnnnnnnnnnccactgcctctaagtctaatgctgtttccgtgacgctgtgattctccagatgttctgcaggtgaaaagacgcctgtcttgaccctgggctgaatcaagccatagtccttggcagctggctgggccacagagggcacgcagcctgaccactgattgaccggacctaaaatccccagtctttgcctctctcagcgtgtgcaaactcaggccttcccccgtctttccctcctcatttcctggctccctccttctgcctcccgaggtacaaatgctcagctccgaagttgctccttgcctgatgaatctgagagctgaaacacaacgctaattaatgagcttgcc

SEQ ID NO: 103073 - DNA, 289 bp, Homo Sapiens
acaggcgcgagccaccgtgcccggccttatgtggtctttctggttggtaaatattctaacacacacaaattaatcattagatcaaaagaattgtgttttggtacgtagttaaggtgctcttttcttttaaatatacactccttgctgttcttcctgttccctttgcagagcaaaagtatcggaaaaaaacaagtgcaagcacttccttctaatattggtttagttgtggtcaaaaacaggaattatgagtcatgaacaccaaattgacaggaatgagcttgcgactagg

SEQ ID NO: 103074 - DNA, 281 bp, Homo Sapiens
gatgagggtgacaacactaaaccacagattttcaatgtagatgaaatggccttctattggaagcagatgccatctaggactttcatagctgaagaggagaagtcaatgtctggtgtcaaaggacaggctgactcttgtgttacgggctcatgctgctagcaagtttaagttaaagccaatgctcatttaccatcctagggcccttaagaatcatgctaaacctactctgcctgtgctctacaaatggaacaacaaagcctggatggtaaatgagacttgcg

SEQ ID NO: 103075 - DNA, 396 bp, Homo Sapiens
caggatctccttctcaataataaatacagccatctgatggggcagggacaagcagaatggcatagataatgacaagactgaaaataaaaagtgaagtcagatgactaaaggacccaccaaatataagatttcagagcttgaattttatccaatatgtaatggagaattattgaccttttaaagctggaaaatgacatgaagaaattagtttgcgggaaatatatctgggtagtagaagcatggaatggtgaatagtgactggtgcagaaaacaatgttatctaggacaagagtcagaagatttttttaatgacatgataaaggtctgaaggaaacgtgcaaaatattacaaaggaagaatgggcagggcttagtgagggttaaagggctcccggga

SEQ ID NO: 103076 - DNA, 439 bp, Homo Sapiens
gactacaggaccttaaagatattggacagacaaaccgcctgccagacaagaagcagctggtgcttcccaggtccccctggccctccagcaggggcgtggtgtcctaggcgatgccggagacgggtattccttctggctctcctccctgctctgccttgttcctcccagtttcatgttgctgcaggctgggcccaccctgagccctactccttggctttgtttcatctcccatgcataagcgaatcattcaggcactgtctggtgccccgatactgtctctttgtgggcccttggtttcctcaaactctcatgattacttcaaatatctcccttcctcctccatgctgattgagagcctgaccctgccctggccttaaggaattcatgatcaatggtaatttcactgtctgccctctttggaagagctgcaggaacccag

SEQ ID NO: 103077 - DNA, 135 bp, Homo Sapiens
caaaaaagatcaggctagttacacacgcgtgcacgcgcgcacacacacacacgagcaggccagacgggtaagaaccacccagacagaactggagggtggagtatgtatgaagcatttgagagatcatgaggaggc

SEQ ID NO: 103078 - DNA, 442 bp, Homo Sapiens
ctacttcctgtcttcaacactccattagttcatcttacactctgccctttaacgtggtcactgctgctcatcttacaaggtttgaggtcacaggacccttcctccaggaagccttgccttgtcccttcacgtggctgccgctgacttgccgtacgctgagaccatctcccatcaagccctgattcctctgagcggtcgtggggctctctctcctcccagtggcctttgaactccgtgaggggcaagggactgggggctttcttggtcaccgggctttttcagtgatcagcccacaatgaaaatgtaccataatgggtggctaacgctctgtatcaggggctggtctgtgtgctttcatataaatctggataacatttaattctcacaacaatcttgtaggaagacggctatggtcattcccattcgtcaactaagaaactgg

SEQ ID NO: 103079 - DNA, 581 bp, Homo Sapiens
atcgtcacttgtctctgactctgaccctcctgcctccttctcataaggaccctggtaatcacgctgggcccacccaaataacccaggctaattccatctcaagggtcttaacttaatcacacctgcaaattccctttgaccacataagagaacatattctcagtttccaggtattggaatatagacatttttggtactactattcagtctaccatatcatctttttttaacacatttcaaagtaagttgcggacatcagtacttttccctctaatcacacacatcactaattagagttcagtatttatttataggtcttttatttccttggagttaaaaggtacatgccatgaaatgcacaaatttaaagtacacatgcagagttttgacaaatgctgcacctgcgtatctcaaaccactctcactgtaaagaatattttcataacaacagaaaatccctcctgctcctccccaagcaactcctgcccacagccccagaggcaaccaccacagattagctctgtctgctgtagaacattgtaaaagtgaaattagcggggtgtagtggtacacacctgtgg

SEQ ID NO: 103080 - DNA, 908 bp, Homo Sapiens
ctctagagtgatccccggcatacctggaccttctaccccatgtcctctgcaaaaattgtgttgtagaattaaacttcggtcagaaggaggagcccttcttcccaccaccagcaagagtttgtgttcattcatgctgtgcctagttgacggagcgtgtacgcactgcagtccctcccaagaccatagaggaatgtgaggtgattctgatggtgggactacccggatctggaaagacccagtgggcactgaaatatgcaaaagaaaaccctgagaaaagatacaatgtcctgggagctgagactgtgctcaatcaaatgaggaatgaagggtctcgaggagccagagatggaccccaaaagccgagaccttttagttcagcaagcctcccagtgccttagtaagctggtccagattgcttcccggacaaagaggaactttattcttgatcagtgtaatgtgtacaattctggccaacggcggaagctattgctgttcaagaccttctctcggaaagtggtggtggttgtccctaatgaggaagattggaagaagaggctggagttgaggaaggaagtagagggagatgatgtgcctgaatctataatgctggagatgaaagccaacttctctttgcctgaaaaatgcgactatatggatgaggtgacatatggggagctcgagaaggaggaagctcagcccattgtcacgaagtacaaggaggaggcaaggaacgcttctgcccccctccgagaatgcggacaaatcgccgaaacaaccgaaacaagcgtaaccggcagaaccgaagccggggccaaggctatgtgggcgggcagcgccgaggctacgaccaccgggaatacgggcagcactatcttgggcagcctggtacagaggggctcccgttattt

SEQ ID NO: 103081 - DNA, 285 bp, Homo Sapiens
ctcccaaactgctgggtaaagacatgagccaatgtgccgaatgtagtagttttgaaccttttcttactatcttgttttagatgtttgttgtaaacaactgtatctggattttgttttctaacccagtctaaagcagtctgattttgctggaacaactgagggatctgacatttctatgccactttattttatgtaaatgcgttattttactcctttttccatacttttgatggtttgggaaaattactatttattccctttcttttatttatttcttattttttg

SEQ ID NO: 103082 - DNA, 459 bp, Homo Sapiens
ctagaggatcgcttagcgctgatagcctccaggcctgtgtgatacagccactaaggctgtctctttaacatctcatttgatcctaatgtacaaagtctctcctgtctgtggcttcgtgacatggagcacccaacaacacaacactgtctcccaagtgagagtctcagccctcagcagaagcataaccagagactcccacagctggctggccttatccaagcagaagagacttggggctcattccctggaatgcttcagcaaataagggtccttcccaaggtttggcaagccccagaggactcaatcccaaaggctgagtacagctaccttgtgtctgttgctccagctgggccttcggggaggtcaccagggggaaagggaaaggaagttgaagctgaggccgaggccccagtgctggggggaggctatcaggcgcgtaaaacgcgcccatagccccca

SEQ ID NO: 103083 - DNA, 381 bp, Homo Sapiens
tgccagaatgcttgtcttatgaactcctacacatacttcaaagcccagctagtggtcgcctcctctaggaattacacctctaacctttttggagaagattgagccatccagggaggcttctttatgtttacaccaggggtggggcaagaccaagctagagtctcactcaggtaccaccctcccacataacttttactcctttgctacctgtgccagccatctgctccatttcacagaggtaaaaactaaggcaaagtggggcacccacagtcatagagggagaaatgttggcagagccaggtctcaaacctggagttctatgctctcagctatcaggcagaaccgcgcgtgctggctcaagcctgtgatcccagcacttcg

SEQ ID NO: 103084 - DNA, 546 bp, Homo Sapiens
tggcaagcctgtaaccgagtgctgccgggcggttggccggggcctccagcccaagggtgtgcgggtgaaggagacagctgacttcaaggtgtacacaaatggcgctggcagtggggagctgaaggtcaccgtgaagggccccaagggagaggagcgcgtgaagcagaaggacctgggggatggcgtgtatggcttcgagtattaccccatggtccctggaacctatatcgtcaccatcacgtggggtggtcagaacatcgggcgcagtcccttcgaagtgaaggtgggcaccgagtgtggcaatcagaaggtacgggcctggggccctgggctggagggcggcgtcgttggcaagtcagcagactttgtggtggaggctatcggggacgacgtgggcacgctgggcttctcggtggaagggccatcgcaggctaagatcgaatgtgacgacaagggcgacggctcctgtgatgtgcgctactggccgcaggaggctggcgagtatgccgttcacgtgctgtgcaacagcgaagacatccgccccag

SEQ ID NO: 103085 - DNA, 398 bp, Homo Sapiens
cgagtattaccccatggtccctggaacctatatcgtcaccatcacgtggggtggtcagaacatcgggcgcagccccttcgaagtgaaggtgggcaccgagtgtggcaatcagaaggtacgggcctggggccctgggctggagggcggcgtcgttggcaagtcagcagactttgtggtggaggctatcggggacgacgtgggcacgctgggtaagttggaggctgcagcatgggcacctggggacagacgatggcaaggacggcccaccctgaggctccagggcactgaggggactggtggctgttgtcaggcttctcggtggaagggccatcgcaggctaagatcgaatgtgacgacaagggcgacggctcctgtgatgtgcgctactgggccgcaga

SEQ ID NO: 103086 - DNA, 557 bp, Homo Sapiens
ccgagagcctgtggtggcctggaaacctgtcccaactcggaccaccctctgccccaggccctgcagatccaggtggcacacacagcaatggttgccgggggcgagagctgtcacgtgcagcggtgtcctgagagtcgcagggaccacggaccctcggcacacagccacaccagccactaccaacccgttctcagatggggagtacacgacactggggtcctgacctgattctgaccaactctgatattcagccctggctaagcatgaccctgtttggttaaaagtatccaggaggaagaaccaggcaaaggacatgcaagctgcctgtccttcagtccgtgaagcagccttccctccagagatggtttcacggccacggtgtttccagctctcaaggcgaggtgtgtctgatctaggcaggcccttgcacgccactgagcccgtctctcaccatttggtggcaccagccctgctgtgtcctggaggctgtcctagacccaacgtttctgagtgtgcacagaccctgtagcttaacattcccaaggccagtagtgggt

SEQ ID NO: 103087 - DNA, 802 bp, Homo Sapiens
caattatctgaatgagcttggaccacattccaggtgtaaccaaagaaaatgcacatttaccaaatgtgagatatactcccgacacacagactaagaaaacaacagacataacagtcttgtggctttgttcctagttccagggcatgtcggaaggtggggtagaggatcagaaataagcacaattctcctattttaattgctggcaagttgaaccaccacactgataactcaggattattacatattacaaacaaccaattttagcaggaatcattctttgtactgttatactgaggcttggcagctccctttaacatctcacctcagcattaaagaggaagcataagggaggaagtgtgcaaagcagatctggagtcaagcgttgctccacctttgtgacctcaggcaagaaacacccaggctggacctcagtttcctcaactaacaaatgtggataataaaagtacttacccatttaggtgcctgagaagagtcagagctaatccaattaaagctgcttaaatggcgtgcctggcacacagcagtgtccaatttagcttgtgtctcattttatttttatcattagtttaagagcgctggcattgaatctctcacacctgggtacaaatccctgcgctatattactgagatctgtcacacagcatttactaacttcttagatcaaggtatctttatcttaattttctgccatggacctctgtagcagtctgacaataacagcactatcagaaaaatgtttttaaatacacttaaattaaatacataagtatacaaagagatg

SEQ ID NO: 103088 - DNA, 688 bp, Homo Sapiens
cagcacgttgatgtgctgtgggagggggtgggtcaggcgccatcggcactcaacacctccgcccgagcgcacactctgtgcttcgtgcttgaggatctcattggagccgaagccggacagcatgagggtgtccctctccatgtccaggatggcgcaggccaccagcaggtgcagattggggccagggagccctgtccacagcacctcccacagccgaagaacatccggaaaggggaattccctcttgaaccagatgagcagccaccggaaacagaagcagagagagccggagtcctgggaatccaggaagtcgcagagcagggggtccagcaccctcaggagcagcagcagtcgcccgagttgccgcttcatggtctcctggctctcttcaaagttcccttgcacgagctccatgaagccacagaaacaccagaaagcatccacctcgttctgaatgacgtagaggatcggggagagaagatcactcatgccctggacgtagccgaggtcgaagtgatacatgcagtaggtgaggaggatatcgttcagcaggcccagccccgggttctcgggaccctcgtagaactttttggtcctgtccgtgcggctcacatccctttcgatgaggcctgcggtatccatgcagaagtgagtttctccgctcctgctcagggctcacagagtggcc

SEQ ID NO: 103089 - DNA, 278 bp, Homo Sapiens
gggctactgaggcaaaacagggccgggctgagggcactagcaggtcactaaagggagtcgagggtgtgctgctagttgggggctgaggagcaggggtggtgggtagcgtgcttgttgactgagcagatataacatgagatgagtgactgctcacaccatccagctgcagggccagtctccgtgtacagaagtaggcaagccggcgggacaggtatgcagactgaacaaattccccagagtatcggagaagcagaggcagcagcagtttaagcaattca

SEQ ID NO: 103090 - DNA, 474 bp, Homo Sapiens
  misc_feature (197)..(429): n is a, c, g, or t
acgatggtcctcagcttcagtccccagtcagtgcactgcctgttatagataaggaggctgtgccagagcctccaaaaatgcatcgtttgaagggattttagaaggctggagtgaataatgtggaatgctatgaacagacaattctctcttcatattatttcaaagcccacgtttaccttaacaaaatccaatgtttnnnnnnnnnnnnnnnnnnnnnnnnnnnnnnnnnnnnnnnnnnnnnnnnnnnnnnnnnnnnnnnnnnnnnnnnnnnnnnnnnnnnnnnnnnnnnnnnnnnnnnnnnnnnnnnnnnnnnnnnnnnnnnnnnnnnnnnnnnnnnnnnnnnnnnnnnnnnnnnnnnnnnnnnnnnnnnnnnnnnnnnnnnnnnnnnnnnnnnnnnnnnnnnnnnnnnnnnnnnnnnnnnnnnnnnnncaattctcctgtctcaacctccggagtagctgaggaccatcgttg

SEQ ID NO: 103091 - DNA, 1044 bp, Homo Sapiens
  misc_feature (194)..(251): n is a, c, g, or t
  misc_feature (973)..(999): n is a, c, g, or t
atgatacgagtcgagctcggtaccgatgacgctcctagacgggagattgtagagagaaattgaaagaaaacaaaacaaagacacttctgtcacaaggataagaatatttctagaacatcttgaaccgatagatcataaatgttcagattggataacattttcattgttggcaaattcatgcttcaggtctcttnnnnnnnnnnnnnnnnnnnnnnnnnnnnnnnnnnnnnnnnnnnnnnnnnnnnnnnnnntggtgtggtttttaaaggtagaattcccaattgagaaaatggtaatacagaaaaggtgaacaggaatgatcaacacacattacttcaattagccaactatttcttttgtgtataatatacactgtgataagctttaccagatggtcatactcaaatttacagaaactaattgttaaagtatgtttcccaagtcacaatatataaactctgatacactgttgcatggtaacaaaatcccaattctgaaggctagctagtgcagaaaatatttaggacaaagaagagaatgccagccaaagcgtggggagagtgtcactcctatagttctaaaaggtatgatatatacttatcttctgccattacctggtacatagtataggtgctcaataaataatctgggtgaatgcgtgactgaatgaataaatgagtaggagaaacttaatgtttcttcaaatgaactaaatcaaacaagaaagcactttgtgatcccatgggagatacacttataaactaaggaagtccttaataaggctgaccaaggttccaagccatagctcagaggctagaagaagtagatatcccaagattcccctcacctcctaattaatttcaacaatcctcttcatatgctttgaaaattttaccttggtgaattcctacagagcaaaagcatcctttgtaagtacagcatgctttcaggaattagccacagtcagaaaatnnnnnnnnnnnnnnnnnnnnnnnnnnnacctaccccgacatatgatgaacgacgctgccgtcaccaaaccaa

SEQ ID NO: 103092 - DNA, 695 bp, Homo Sapiens
atacaatcgagctcggtaccgattacgctcctagacggacagaacacatgactgagtttctggagtcccacaggccagcgtaggagtcctgacacctcagtatagctgtgcacctctgggcaaatagtttctctgctctgagccccaggacaagctgggggcctccatgggcgcctgagggccaggcgccagggccgtgggcacgagtatggtgagacaccagcccctgcagtactacgagccacagctgtgcctctcctgcctcacgggcatctacggctgccgttggaagcgctactagcgctcccatgatgataccacaccgtgggagcgcctctggttcctgctcctcaccttcacctttggcctcacgctcacctggctttacttctggtgggaagtccacaatgactatgatgaattcaactggtacctctacaaccgcatgggctactggagcgactggcccgtacccatccttgtgaccacagctgctgccttcgcatacatcgctggcctcctggtcctggcactatgtcacattgccgtggggcagcagatgaacctgcactggctgcacaaggtaagggccacctcggccggggctgggagagagcaagggaagctggaggcagcagcagcagaggaagggcctggccaccatgtccctccctggatcgccgttagaattgccc

SEQ ID NO: 103093 - DNA, 630 bp, Homo Sapiens
tgtctccgagacgctcagtcgttggactggtgacatggagctggtgttggcatcaccaggtgatgacagcgtgtggggcttgaggtatgttgagagcctggcacaatgcctagcctccatttagtcaccctgatcatgaagatgctggtactgtcttcctgtgacagatgagtttgggatgttgtcttcctgaggccatgcggttggaaggggggaagtgaggattttaactccatcattgattctgtcaccaagcccagggcatggatctcattgaatctagttaccagtcccacttcacaaaccaagggctcgacatcctttggtgtaaatctataagggactataaggactttatcctggggccataacagaaatggttgcaaggacagcagcatcaactcttactgtgtgctcactctgtgctaagaattatcccattttatagatgggctgatccaggaaactgaagcatagtgaggtaaggtcgctggcactgcacagctgtgagcccgactccttctcccctcagaagcctttgctttcatccggagataacactgctgcccactgtagagggaagggggatgcatgtgaagcagtgcacctagaagtgccgtctaggacgta

SEQ ID NO: 103094 - DNA, 791 bp, Homo Sapiens
accaacaagagccagattaacgtcactgttccctcgaatgataactgcacctccccattccctctgttgaacggatggcatccaaaactggaccatgaagaatgtgacatacaaggagaacatcgccaaatgccagcatatctttgtgaatttccacctcccggatcttgctgtgggcaccatcttgctcatactctccctgctggtcctctgtggtagcctgatcatgattgtcaagatcctgggctctgtgctcaaggggcaggtcgccactgtcatcaagaagaccatccacactgatttcccctttccctttgcatggttgactggctacctggccatcctcgtcggggcaggcatgaccttcatcgtacagagcagctctgtgttcacgtcggccttgacccccctgattggaatcggcgtgataaccattgagagggcttatccactcacgctgggctccaacatcggcaccaccaccaccgccatcctggccgccttagccagccctggcaatgcattgaggagttcactccagatcgccctgtgccactttttcttcaacatctccggcatcttgctgtggtaccacgatccacgttcactcgcctgcccatccgcatggccaaggggctgggcaacatctctgccaagtatcgctggttcgccgtcttctacctgatcatcttcttcttcctgatcccgctgacggtgtttggcctctcgctggccggctggcgggtgctggttggtgtcggggttcccgtcgtcttcatcatcatcctggt

SEQ ID NO: 103095 - DNA, 654 bp, Homo Sapiens
tcctagacggtcaggatgaaactgtcacttcagattattaggcattagattctcataaggagcatgcaacctatatccaaagcatgcagcctagatccctctcatgctcctatgagaatataatgctgtcactgatctgacaggaggtggagctcaggtgatgatgctcactcatctggcactcacttcctgctgtgtggcttggttcctaacaggccatagattggtaccattctgtggtctgggggttggggacccctggcctaatggatcatcttagtaaagttcagaggcatttaggaggaagacccatctgatgacatgcaaggaggaaatatctgtagacccctggagaagagggaaagcagtgcttttccatgtgtaagcttgggactgagggttggatttttgaggtaggtacatgactgggtggagaggatgacattcctcagttctccatttggctttcagtaggacacacttcaggagtcccacatcaggatggctttttttctccctgtggctaattaaaaccatcgtaagcccaaaagctaaactcaaaggcctttgagagccttccattgggctgcccaaagtccttagaggctggttggccaatgtaatgaataataaaggaaagtcatgtcccagcat

SEQ ID NO: 103096 - DNA, 246 bp, Homo Sapiens
gtgatgatcgagggtggacgagctggggtgtggtaggacgtggcctggagtagagctcgggcgagggtgttaagcagtgctttctaaccaaccactcaccaagaagctttataagcgatatgcttttctacgtggcgaagaagaaagagagcagtttctttaccaccttctttctctcaatgctgtggactatttctgcttcaccagtgtgttcaccactatcatgattccgtctagagcgtatcc

SEQ ID NO: 103097 - DNA, 718 bp, Homo Sapiens
gaactgcgcaccgtctcctacctgccgaatcttcccccagacccagtccatcagattgagtgccacttatcccctgctacctgacttcaggtgagaacctgggcacctcaggaccactgtcacatcactgtggccaagccctcacagggctggcattgggaacccagatcctggcagctgcccacgtgccagtcactgtgtgaacctcaccaggggctcattcttgtggccttcaccacagcactacgaggacaatacttcccattcccgtttcacagaggaggcctggagagctcacaggatgtgtccaaggtgacacggctagttagtgtctggctgcatggcccacactcttagctttacctgacactgcctctcacaggggagactgagaccagagaggccagcttcacccagcctggggggcctctgcggcctaggcctatgctctgggaccagggctcatattcgggagtggaggcttagcccttggctgcctgaagttctggtgggccagggacattgtttcttcctgggctgggtcctctgacatgttagggtaagtttgaatgggtcttgacagggttgaccccagcttcgccaagtccagtccctgtctgatccattccacccattcattcattcacccaccatacaagcaccctctgctcatccacccattccttcacccatctgctatccgtctagagcgtatcgt

SEQ ID NO: 103098 - DNA, 320 bp, Homo Sapiens
  misc_feature (51)..(65): n is a, c, g, or t
ccctgcacaccccccaacttggttattgagcaacttccctttccagggggnnnnnnnnnnnnnnngaatgacttgtcttcctcttagagtgtgaggtctacatacaaatattattcttgtattcagcaaatgtatgtcataggcctagtgtgtattaggaactgtgctgtcaccaacaaagtttagagaggttataaaacttgactgtagctttttagaggtggaggagtgactttgacaacctcaggctgtaattcccttccctcctgtgagttccgttccatactgtcgttgccgtctaggagcgcaatcggtacacg

SEQ ID NO: 103099 - DNA, 579 bp, Homo Sapiens
  misc_feature (67)..(114): n is a, c, g, or t
agcttgcatgcatttggttaagatagtcctaggagtgcagttgctgagttttagtgggtattgtcannnnnnnnnnnnnnnnnnnnnnnnnnnnnnnnnnnnnnnnnnnnnnnngctccaggttcttgttgccatttggtgattgtatatagttgtgtgtgccgtgctcttaccgtgccctgccattgcgcccttccttgttgccttgttagcattctggtggctctaccagtgttacccagagtttgcaccattttgaggaggattagaagtagaaactggactatttttgaacatgagcgttcctgagggggaacagaattagaagcatagaccagtaagtgaccctagggtgttgttgttggaggcactgctttcccactgattatagtcttgtaactgggtactagaggccgtgggtattaacattagttttcagacttggtttcagtagcaaaaccttctttcgtcaaaccttaataggaagttatcatgtaaaatatataaagaagatgcttggtttgggagctgggcatgtacatcagaccgccgttttgatgctcacccccgtcctagagc

SEQ ID NO: 103100 - DNA, 416 bp, Homo Sapiens
gtacgaatcgagctcggaccgagtacgctcctagacggaggaaagacgaagttcagcgtgcttgtgccttatttctgtctggttacctgctatccggccaggttagaaagagggaatcactccctttggccctatcatcaagacttcagtgttccctggagcactctaaatttgccatcagacttggatcatcctctaataccaagctcctgggtccttcctgaaggctgcctccttgtcttgctgagaagaattaaggttgcttccctgggaggaattcagcagcacctcttgtaagtcatcaggtgtgctgtaaggatggggcaggcaacatttctttgtactgtgggaaggcctaaatcagtgtttctcaaggtgtgatccttgcaccaccaatcttaagaaatgttctttgg

SEQ ID NO: 103101 - DNA, 672 bp, Homo Sapiens
tacggggggaaaagggatattatgtatagaaaagtctacacttctggatacaactaactaaaaaaagccggatacactaaacaaaacccaaataatgtctcccctcaaaagggggtaactggaaaagcaattcgagcaaaaatcaaggagttcaattataaataagtatatcaacaaagtgaaagatgggtttaatttttcccacaaaaagttaaaagaaataacagcagttttagaggaagaggaaaaaataataagaaaattatatgcagttgcaaaatgtgtgactatttacaaactctaacatataactacaaaacggaccagaagaatcattatcataggaagcaaagggtcatttcaaaaatcagaggagggatgattcatatttaatttaattctgtggaaaacatttaagtaacctttgaggacaaaaataggtgatatgttgaaatgcgggaaaccacagtggaaggaaaaagaattcaagaaagctcagtttcagtaaccagtatctagtaaaatcttcaggacctagaggctactatctgcattaatagtgtctgaagacctagaaatgtcattaaataccatctttggataattcttgtagacttgagatgatgtctatttaaagttacaagacagtgcctgccgtctaggagcgtaatc

SEQ ID NO: 103102 - DNA, 879 bp, Homo Sapiens
acgatacgctctatacgggtttcgcattccgcattagtcacatagaatgcgcctccctagcgagcttcctgaggtagacggctggttgcggtttctcgtaatccgggctgcccccaccctccagaatgtcttggtggcgtccctttctgtgagcagggatggtggtttctttgcgcttgctcatgttcaggggtgagctctggtccagtcaagccacagggtcagcaccttctggtcactccctggccctgacctgagcccggggaggaacgtggggcaggcgcgggtgggcccagcctcgagctcttcagcacagtgatggtgacggggcagcggtggcggcacagccagcccttctggggtccccagtcagagccctctgccctacctgggctggacttgtttctgaacagccacaagctacagggggctgccgctgtgtccctggcgaggcactggcccattacaagcaatcgtctggggagggcaccagtggaaagccccgttccaagccatttcaggagggtggccctgcttccgaggagccggagtcagtggccggataagcagagccactcgggagtggtgaggcccggaagggcttagcccggtgggcggcagaggagctctggcccgcagggtgtcgggcgaggcaaagtgcaaagcattggtgcgcggggcctcaggcagccacggcggagccgcaggccagggacctgcagtgactcagctctccctcctccctgtgtttggccttagtgtccacaggatgaaatgtccgagtcaggccagtcctcggcgccgccacacccagcaccacagcccaagtccaacacgcccacagtcctccgtgccctcgccccatatagaggatcgagc

SEQ ID NO: 103103 - DNA, 428 bp, Homo Sapiens
gcagggcgggggggattaacaaagactgtccccagcatcataacgcacaggaaaatgggaggttgttttgttttatactccaaagatcttttggtgtcaggattccatctctaagattatcaacattggcaattttgcctcaaggttgagaaatataaaaagaaattatggaggcaaattgtgaaatttaacatcttcagagaataagataggccttcagtaggaagagaagtgtatgtatctgactagcagcctggaagatatgtctgcccaccccttcctcagtttgagaacctcaggagccatcctaactggtgggcaaaagaaagatgcgaagagctctcaaggtccctgtagcccataaagccatgatcttataagcatccctaacagtccgtctaggagcgtaatcggtaccgagctcgatc

SEQ ID NO: 103104 - DNA, 193 bp, Homo Sapiens
tcgcatcgagccgtgtccgattacgctcctagacgggcttagaatcagtgccactgatcagaagatgcatgtgagttcctgtatcccgcaaagtgaaagctattcttccaacttagaatatgtgtaagtttttttaattcctgagtggaaataaaaattactactggtattgaaaccaactaaaatttaagac

SEQ ID NO: 103105 - DNA, 638 bp, Homo Sapiens
gggagtttctaagaccactctcagccctcaagggtctgcaagtcagtgacaccacaggaaatgggaacctgccaagaattagggaaattcaggtgtctgcaagtccctaaaccctagggccaaaaaaaaggattgggcagatgtgtgtgtgtcctggaggcagatggatgaaagtatcagtaggctccgtggcttaagtgcgagtcagtgctcgccattggtcttttgcagtcttgtcacttctgtctggaggcattcagagagctgaaaggtacacagtgcagtggtaacatctggaattgacccctggctccatcttcatgattagtaaagtcactaagcccctttgagagcaagatcaaggcagtcacagtcacaggggcattatgagtatcacgtaaagtcatgtattcatatatgggaatgcttggtaaatagaacatttcggtataaatcttgcttatcagttagtgagtgggggtatctgctgagtgggtctctctgtaaatgtgccttctttccctagtacatctattattactgagtccaggtacgtacgcgtataagccaaggtataggctaaggtactataatagaacccagaatatcacagtttaaacatgggagaaatttgtttc

SEQ ID NO: 103106 - DNA, 471 bp, Homo Sapiens
attacgctcctagacgggggggagcgccgccagcgcttgggaagatgccccggccggagctgcccctgccggagggctgggaggaggcgcgcgacttcgacggcaaggtctactacatagaccacacgaaccgcaccaccagctggatcgacccgcgggacaggtacaccaaaccgctcacctttgctgactgcattagtgatgagttgccgctaggatgggaagaggcatatgacccacaggttggagattacttcatagaccacaacaccaaaaccactcagattgaggatcctcgagtacaatggcggcgggagcaggaacatatgctgaaggattacctggtggtggcccaggaggctctgagtgcacaaaggagatctaccaggtgaagcagcagcgcctggagcttgcacagcaggagtaccagcaactgcatgccgtctaggagcgtctccgtaccgagctgat

SEQ ID NO: 103107 - DNA, 332 bp, Homo Sapiens
atccttgatcttctgtaactgcagaagtacacgtgcaggtatgttatacaggtaaacttgtgtcatgggggtttgttgtacagattattttgtcacccaggtataaagcctagtacccatgagttattttttctggtccgtctccctcctcccaccctccaccctctgatggagaccccagtgtctgtggttccctctctgtgtgtccatgtattctcatcatttagcccccactgatgagttagaacatgcggtattggggtttctgtacctgtattagtttactaagaataatgtcctccagctccatccatcttcctgcaaaggacatc

SEQ ID NO: 103108 - DNA, 577 bp, Homo Sapiens
gattacgctcctagacgtgctttccgaagttcgtccatctcaatttttctgggccgttggctaatgcctcataggtaggagtcctcagaccagccatggggatcaaacatagcccggggtctcggctgtaatctttggtcttttacccaaggggcggctcgcaagtgctgaagaacatgggagcacgaagcccccatccagcggaccccgaggagcagcaggtccacacatgtccccaccaatcaggggccaggcaccaggccggacaccggaatctcttcaggggactatttcagaacaatagggactcaaacaaaagagacagggacggtgctttcaacgagccgtgccaccacgtggacctttctgtggctgcagctcaaatcccatggaacaagcaaaggaccctgggtgtccccatcaccctccagccccgtgtgccagacgcacctttgggtagttggtgccaagctcgtcaatggcacagaactggatcagcttctcgtagatgctgaaagaacagtgccggcgctgagcaggcacaagtccacgtcccccgtctaggagcgtaatcggg

SEQ ID NO: 103109 - DNA, 767 bp, Homo Sapiens
caacgtctgtgtcattagagagacgtgtgtcgctgcgctggctaatttatatataactaggtagacgtgtgtagtggataccgtattatagagcagaggtacaatccagatgtagattcattgacgggaaacatctttcgcgtgtgggatctgtggctgccaggcctggtgagacgaggattcaggagacggggtaagggagtgtatattctcagcactcagcacctaggttactttgtgtaatctacaaatacccagtgaggggagtatatgtgtacccgtggctgctgagggctcgagatgagggtcagggtcaggatcagtgtgcctgctgccttgggatcttggtcctcagtcagaggaacttcctctctctaaccaccccctaccccaagccagacaatctgttcacgggtagttggtacccagtgacccggtcagagtcgggggtctctcagccctcctcaggatatacccatgaacattttcaggctccttttagggtggagtctgcatagctgatcctacacaggcctcacaggctctacaccgactcaagaaatgtttgctgcaatgaataaaccagcagcaagccaaagcaaggagagatttctggcaacagagagcccgaagcgggagggccttcattcagttcctcaatgacaccatttaggcagccgtcctcaaacctgacagtgcctaagaatcacaggggcgtttgtttaaaaggacatgccccagcctcactccctagtctggtcctattg

SEQ ID NO: 103110 - DNA, 692 bp, Homo Sapiens
tcagctggaccgatacgctcctagacggaggggacggcacgggtgcttcggctctcgcggatctgtgccttctgcagatgatctggcagcaggtgcctgccctttctagctgcctctctcagcgtgctcctccctgggtttaggtgagccacacctggatctctgcaaggtctccggagcactgcagaatcgctgctcccctcgggctcttagttcctgtggcgctcttgcccgaggctgcattgcattcagatgcacggggcctccctgcctcatgccccctggacagatgctgctgtggtcctgaaacttgagacacgttctccccggaaggctctgcgctcctgggtgttagggtggcatcccaggcctctctgtgtgaatgaggccagctcagaaggtgcccgtggacttccctctgctggccggggaggcctcggggcatcactgtgagagtgtcctgggtgaggcaggcgcctgctgaatactggctgtaacatgaagagtgcgccgcctttcactggctctgctgctaacatcgtctctcttcccacacctagatttcgctgcccccatcacccacatctcccaatgcagtgcctcctgctcgcaaagccagccctccctcagggctgtggaccagcctatgcctcccactagccgcgtgaaggttcccggaggatgtcccacga

SEQ ID NO: 103111 - DNA, 331 bp, Homo Sapiens
ctctgatataatggtagtatcagtgcaacttaatgattgtacttgatattaagtgttctcaactgagtaactcttaaagtggaaaccaagtttagatcttggggagtggtaaaggaatcagctctttctattgttagcggaagacagtaacttatcattcatggaccagtagattgttgaaagttggtgaatcggatcataagcttctagctaacatccacggacttcagaattagctaaacaatctgaaggtttagtatattagaacaccccaaccgtataatgctaacctgatgcaccactgtcgagattcggtccgagctcgattacc

SEQ ID NO: 103112 - DNA, 186 bp, Homo Sapiens
aaggtcggtaccgacagtgtgcacatgctgaagggataggactggttgacgaacacaggctaaaattataagagtgacacaagtttactgaggtggcagagagaacctggggtataaggtctgccttcgactgatccttggctgaatgaagaggttaaaaatgacctgcacaactggtcgacgatt

SEQ ID NO: 103113 - DNA, 569 bp, Homo Sapiens
tctttgtagactcggggctgcctggctggacatcagcccccactgttcaccccagcctggtgcccactgtccgggcagccctagcctgtcccacatcatcccgcactctccccagccctgctattgccctgcatcgcgggggcacctggcttagggaggggtccttggtccatgcccatgaagctgggctctcagagctagtgtggatgggagagcagcatcctgctagggccaccaggatgctgagaatttggccagcgagcggccggactgtgggagtcaggccgagggccaccgatgggaaccaagacgtgtcctgcccaggcgcacggcatgtcccctgcatttggttctcaggaaggccccaccctggcctttgcccggaatccttaggctgggacacagatggctgggacaccccagcttggagctgcccaggaaggcagaggagaaggggaggacttggctgcttccagccacatctggacaacagaaggcctgagccaccaccctcaccataggatgcctctgtgtggattggaaaagggaggagacagtggtgcctttca

SEQ ID NO: 103114 - DNA, 230 bp, Homo Sapiens
gaaatcacttacacagagtcacagagcaagaaaataaccagcccggactagaacctatgtttctggctgctggtccagtattcttggtactatgttacatatactgtcaacttagccagcttcccattcttaaacctaacctgcagatgtacctggactacttgtctaatcgatctgctcctgacaggacttactgtttatgaatattacatagtgctgtagtactcagg

SEQ ID NO: 103115 - DNA, 965 bp, Homo Sapiens
  misc_feature (622)..(622): n is a, c, g, or t
aatgtccgggtctcgctcggcgtgtcagcaatcagtgctgtgctcgcgacgtgtgtagacgagtcaggttcacccgtaggttggtgatcttcaacaggttctgaatccgtgagctgtaggggtctgggatagggatggcagggtccagcacacgatagatgacctcgccttcagtggatggctcaatctctgagtagcgggactcacagactacatcatcccagtgccgtgggggtgctagtgggactcctgggaagtcagccccacagtcataggagaaatatcggtacacatgccaggtgcggccaaagtctgctgagctgttccaccagcatggcagcagggcgaaatgtcttgaaggtcataatgaggtgtgtgaaatgaaactcagcctccaggtccagctggatggtgaccgcagggataccattctctgactgccaccaggctgcccgccgctgtggtgcaaagctggtgactacattctggatgcgatggctgtgtgggttgtctctagcagagaaggggcgccgggagtcacaaaggaagcacttcttttcgtcctgcaggtgactgacgatgcagtagggctgggggccattcaggccacaagtggatgagncagtcagtctgtcagctcggcccaccagcaggtcgcccgtggcggggtagcagcttcccctggaacagccaggcacatccggggcaggggcctgtgccagtgtggcagccagcacgcttagcagtaggcccagtcgaagttcccagggcagaggctgtcccctccctctttcccttgaggtcagctccatcctgaagaggggaacagggataaggggaggtgaacggtctcgggcccgagccctcctccttgctttggggttccgtgggtggtggtgcatggccgttcttagttggtggagcgattgtctggttaattccgagaacgatcgagacatagggta

SEQ ID NO: 103116 - DNA, 347 bp, Homo Sapiens
gacatagccacgctgaatgataacatcgtgaaaacttcctgagggactatgtgcaggaagtatagggaggtggaggaggtggagacactgtacaaccccaagaccaagaagcacctgggcatcgccaacgtggtctttgccacggtccggggagccacggatgccgttcagcacttgcacagcacttccgtccatgggcaacattatccacgtggagctggacaccaaaggggaaacccgaatgcggttctatgaactgttggtcactggccgatacaccccccagaccctcccagtgggcgagctggacgctgtctctccaatcgtgaatgagagcctacagctgt

SEQ ID NO: 103117 - DNA, 419 bp, Homo Sapiens
tcccattgggccttctgcgtgtaagggtttcgaggggggcgggagacagcctttcaggctgcagctcctggggctgaggcactggcggtggcagaggaggctgagggtgctgctccagcgggctgtgggcatggtgctggctgccgtgctggctctgctttgcccctttggactttctgcccgctgtatgaccttgagtcactgtgttcgaatctaagacaagggggcttgttttgttagcagactgtgaagaagctgcttgagcagaagtcctactagaggtacttgaactgtttttggctctgacgttttccacgtcagctgagtttctattgctgtgactgctgtgtgggtggaccgatgggccacactgcttatgactcccggcactgggtcgggacgcagaacgcgcctaatgg

SEQ ID NO: 103118 - DNA, 402 bp, Homo Sapiens
aagccattaggcgcgttctgcagtctgcacggtccacaccggtggcaaagagcatccgcctatctgtgcctccaggcatctatgcccctagtgtgcaaacctgtatacctcagtacactacgtttccacaaagccgggactgtgatgatgcagccctcagtgccccacagggtccagaatgagaagggaccaatgaatgagtcaccaggttaccccaacaaggtgcggaggtggtggtggtctgtcctgggaatcttccgtcttggagaaatacagcaacagggaatagtggaacagtacgctaggagaaagtagaggctgttgcatgaactgactgaaaagaccctaggatgggagcgctgcctccctcctccaaataagacgacgcagaaggacctaagt

SEQ ID NO: 103119 - DNA, 384 bp, Homo Sapiens
ttctcctcctcgggcagagacggccgcttcagtgtgcccgtgatggtggcagtgcggcaggccgcgatgtccttgttcagcactgatctacaggccagatccacgtccttctcgaagtcggtcatgagctgggcgtggccgttctggaaggagccccctgagtccccgtggccctcctcctgccggtcaaccacacggcatttcacagcgtcatggacctctctacggaggatacagtgcaccatgacgatgacgaagccctccagcgagtcgaagacagcagaagaggatctggaagagggcggagcggcgctcggtgacggcgagcacagccggataccaggtcagcgccagcagcggcagcaccacgcagaacggcctaag

SEQ ID NO: 103120 - DNA, 479 bp, Homo Sapiens
gactctcttactgtatctattaggcgcgtctgatacggtttggatctccctactgtatcctagtactgtgctcccatttcccagtactgtgctcacaggtgtgagccaacatgcccggcccatcagctcttaagcagcaagaggccctgcagctggctgcctggctggacagcacagttaagcaggtggctgcatcctctgcagttgctggcagcccatcttcctggagatgtaaaccctcctgcaaggctggctcttctttgggtgtgatgaagatgatgacagagatggatgctgggctctgagggtcctggttccttcgaaggacatccaggggcctctgagatgatgggctctggttcctggcctgtagcatgggtaggagcaggaggctttgcaaggtagactctacaggcaggaccttgatggagggtggggtttcagaatagaagacctgttctgggcacacgaagatcctg

SEQ ID NO: 103121 - DNA, 497 bp, Homo Sapiens
  misc_feature (152)..(221): n is a, c, g, or t
caggatgtcactgcaacataacaagacctgtctctacgtaaaacaaaaaacaacaacataacgaaaaatagctgctcctggtggtcctagcttctgtactcctaggtactgtagctagcgccagttgtctaagctactctggaggctggttnnnnnnnnnnnnnnnnnnnnnnnnnnnnnnnnnnnnnnnnnnnnnnnnnnnnnnnnnnnnnnnnnnnnnntgaataagtaaagcaagttctacaggtgggcctgatttgcatcttgagttctagagcacaaccttcccagacacaccctgccttcctcacactgcccgcatatctgtctacactcagtcccagcaaacgcaaacggatgggctcacagtggggatgcaaacaaagatgaggcgactgagtgagtgaatcaggaaaggatgttttcattttattgagtgaattagactaagtcaaaccctcccttagagtgtaaagtagaagataaataatgtactg

SEQ ID NO: 103122 - DNA, 413 bp, Homo Sapiens
ggttgcacactgcaacaaggtgtcggatcagaggaggccttggtgccctatagcaagcccagtttcccatctccaggtggccacagctcatcaggaacagcttcttctaagggatccactggacctaggaaaaccgaggtgttgagagcaggccaccagcgcaatgccagcgaccttcttgacataggatatatgggctccaacagtcaaggacagtttacaggtgaattatagtaaatgagaggagacatacaaagctgctctgaaggaccatcaggtccggactcatggaagtgatgactctaaacagtgcaatgaacaatttatttatgtactattaaaagaactgtaaatgcaatgtaaagacacacagccacacatatcccacagatatgtgttgcagtgtgcttccg

SEQ ID NO: 103123 - DNA, 574 bp, Homo Sapiens
  misc_feature (80)..(205): n is a, c, g, or t
  misc_feature (501)..(520): n is a, c, g, or t
  misc_feature (574)..(574): n is a, c, g, or t
gcccggatgcctgcacatttagaagtacagggcatgagcatgattctcccaaataggctcaagacaaaatattacgtatnnnnnnnnnnnnnnnnnnnnnnnnnnnnnnnnnnnnnnnnnnnnnnnnnnnnnnnnnnnnnnnnnnnnnnnnnnnnnnnnnnnnnnnnnnnnnnnnnnnnnnnnnnnnnnnnnnnnnnnnnnnnnnaagaaatgttaaggaacaaaattatttggtgaagaaaagtaccttcactggacagctctccaagacctacatcttcttgttccatgaacagctttgacccaatgagatatggtaaaggacgatcaatgtatagatcctgtacatcatgaaaggaataggctgtcaaacatttcagttgaaaacaaacttacatgtgccacctgataccctgttccatctgactatcccaaacaagctacataacgaaagtggagaataagaaacacagcaggactaaaagttaaaaaagaaattcnnnnnnnnnnnnnnnnnnnnaaaagtcaaatcctaggtaaagatgtcaaggtaaggccgggcaccatggctcan

SEQ ID NO: 103124 - DNA, 484 bp, Homo Sapiens
  misc_feature (80)..(143): n is a, c, g, or t
cccccggatcagagacagacactatcactactgagcctgataaaacattctagcttaatactatcttttctatttttgannnnnnnnnnnnnnnnnnnnnnnnnnnnnnnnnnnnnnnnnnnnnnnnnnnnnnnnnnnnnnnngattttaaaaatggctctgtcgactgtataaagcactttgtcttttccatcattaatttgatcagaaagcagaccactgaaaacctttcctccaaaacaagagtcagcaaactttctgtaaaggactagggagtaaattttaaattttgcaaggcagacagtctgttgcaattactcagctctgcccttatagggagaaaataaccatagtcaatgtataaatgaatgggtgtggctaggttccagtagagctttatttacaaaagcaggccattttttcccacagaaatgtgatagaaataatttgtgctgaaattttcagctgttgcagtgtgcttccg

SEQ ID NO: 103125 - DNA, 468 bp, Homo Sapiens
  misc_feature (134)..(280): n is a, c, g, or t
  misc_feature (345)..(421): n is a, c, g, or t
gaagaatattcacaagcactctattgagctgaagaatatgggaagatttaagttggaaagtaaaatatttaatcaaatgaaaaaaacggccattattaactcaaaaacaaacacacaaaattgtacaggaaagnnnnnnnnnnnnnnnnnnnnnnnnnnnnnnnnnnnnnnnnnnnnnnnnnnnnnnnnnnnnnnnnnnnnnnnnnnnnnnnnnnnnnnnnnnnnnnnnnnnnnnnnnnnnnnnnnnnnnnnnnnnnnnnnnnnnnnnnnnnnnnnnnnntgtggtgatgcacgcctgtaatcccagctactcgggagccgagtagcaggagaatggcgtgaacnnnnnnnnnnnnnnnnnnnnnnnnnnnnnnnnnnnnnnnnnnnnnnnnnnnnnnnnnnnnnnnnnnnnnnnnnnnnncaaaaagtaaaaaaatgaaagaaacctgttgcagtgttaccgggcca

SEQ ID NO: 103126 - DNA, 479 bp, Homo Sapiens
tccggccggatgcacactgcaacaggaagcactgtagagttacagacacggaagtgacatggtccagatatttttccgcagtgtgcaggaatctgccacatagtatctgctgagtaactaccttaatggctgtgacgatgagggtggaggtcagtgggttatgctgctgagtgacacaacctgtagtgctgcaggagcctggaggtagggagggagcatagcatggctgtctgggcagataagtccagtgagatgggtgggttctgacttcatgaggggaaagaggaggctccacaaccctcatgagggacagagagtagatcgagtgggtaagcaccgggccaggagtggtagcagacagctctcgtaagcagcccaaggaaaggctaggaacataggaggtctgaagagggaagcccaaactgccaggtgggctgggaggcatcatcccaaaccagtgatggttcctgagaagactg

SEQ ID NO: 103127 - DNA, 479 bp, Homo Sapiens
  misc_feature (40)..(40): n is a, c, g, or t
ggatcacactgcaacagtgtgatgtcacagcatgttacanctccttgcgactggttgggtgtgagcacctgcagtcgtgtgatgtcagaggatgttacacgtcgtggctgactggttggggtgagtacctgcagtagtgtgatgtcagaggatgttacactcttgtctgactggttgggacatgagcacctgcagtagtgtgatgtcagaggatgttacactcttgctggctggttggggtgtgagcacctgcagtgagtgtgatgtcagaggatgttactactcctgctgacgggttgggatgtgagcacctgcagaagtgtgatgtcagaggatgttacactcttgctgacaggtaggggtgtgagcacctgcagaagtgtgatgtcagaggatgttacactcttgctgactggttgcggtgtgagcacctgcagtagtgtgatgtccgaggatgttacactcttgctgacaggttg

SEQ ID NO: 103128 - DNA, 692 bp, Homo Sapiens
  misc_feature (53)..(175): n is a, c, g, or t
  misc_feature (191)..(314): n is a, c, g, or t
acactgcaacacaacaattaaaaatggttgactggccgggcgtggtggctcannnnnnnnnnnnnnnnnnnnnnnnnnnnnnnnnnnnnnnnnnnnnnnnnnnnnnnnnnnnnnnnnnnnnnnnnnnnnnnnnnnnnnnnnnnnnnnnnnnnnnnnnnnnnnnnnnnnnnnnnnntatggcggtgggcacnnnnnnnnnnnnnnnnnnnnnnnnnnnnnnnnnnnnnnnnnnnnnnnnnnnnnnnnnnnnnnnnnnnnnnnnnnnnnnnnnnnnnnnnnnnnnnnnnnnnnnnnnnnnnnnnnnnnnnnnnnnnctgaaaaggaaaataaaagaaaaaccaaatcaacgcacccccttgctcaaaaccattctaaggatgacattccattatccttagaataaaatatgaagtgttttctatgcctacgtaatcttgccgcttgctttcgtttccagcccttttttcatcactgtaccgcaaccatgctggcctttctgcccttccctgaacacaccagatcacacccgtatcaaagccttttcccttccctctgcctggatgcattccccatcaccttttctattagccaggctcttcctcatcacctagctaatatagcttccctacttctcccttgctccctccctccaagacacagtctaaaccttaacctatgttgcagtggcatcc

SEQ ID NO: 103129 - DNA, 432 bp, Homo Sapiens
tcacactgcacacagtatatctatttaggatcagttgtttacctgttgagagctgctgctttctgctgctgcccagcattatgagaaagtatcagactgcatattgctagcctgggaaaagataaaaattcaaaatttgaagtatggtttctactgaatgcatatcgattttgcactgtgctaaagttgaaaaactgtaagttgaaccgtcataagttgtggaccatctgtatacaagagaaggcataaaatgttcagtttaagggaaataataaagtgaatattagtgttgtcattgcccaggtcaacaagccagaagtgcttccctccaacctcaccatccttgtcaacatatcccccctcagtggaggtagttattatcctgacctttgtgactgttttttgctttgcttcataattttaagtcctggg

SEQ ID NO: 103130 - DNA, 290 bp, Homo Sapiens
ggtatactgctgaggtcttctaaagtgcttccttttcttcacagactggcttagaggtagatcaaatcgaatggtgggggagaggaggatgacttcagtgaataattggcttagtcttcgtaacctggatgcctgccatctccgtgctctaccagctcatgcttacgcgatcccacctaaaagaagacagtgcacctctgcactaaagaaaaagtagcccaggtgggtggagtgcttcaagaatagcagtgccatgatcacgccaccgcactccagctaagcgacagaac

SEQ ID NO: 103131 - DNA, 223 bp, Homo Sapiens
tccataatgtgtgccatgtattctggtgtattaaatttttctcacttttaagtgctagtaccataaatatagatagcgtataacccgacatacccaaaagctttttggggtccttgatgatttttaagaggtcctgagagaaaaaaattttgagaaccactgtcctagagctccaagaaggtgaatgccataagatgtgtgttttttaaaaaagcatttctcg

SEQ ID NO: 103132 - DNA, 405 bp, Homo Sapiens
ctgaggtacaaccaatgttgcacagaaagaggcagcagctgcacctgccctcctgcagagcgactgtcacgcctgcacacactcactctcttaggactcactctgccagacaagggtgacagctggcctagactacagtcagaatctacatctttcttacaagcacagaaatcacaggaactggaacacctgcctggggacagggatctggaaggatcacccaggcctcacttcctcaggcctcccttgtaccaggaaaggcctgataacagcatcatcctgtccttcttggaggcaaatgtccttctcctgcattttccagaggggcctgccctaacctctgagccccttctgggagctcagcctccacttttcccaccccaggaggaagctgggggctggtag

SEQ ID NO: 103133 - DNA, 366 bp, Homo Sapiens
agagctggtggcatcgttcagctggatacccgagcttttttagtctcaaatttaatatacgttaaaaatagaacctctcctgctatcctaatccactcttcctcctgacttctgtatttctgttaatgaatcccaggctggagacctcagcgtcaccttgggcaacctcctgctcagaaacctttagcatcccctcaatgtgagcagaacacatgcccatgctccttatcttcatactcaaggccttccttgtagactcaaatgaggccgatttcctgacaaccctctaatccaggatttcttaacagtttaatggcttggactccatcaggagcctaatgaaacttatgggcacacattatggag

SEQ ID NO: 103134 - DNA, 370 bp, Homo Sapiens
caggaatgtactgtggactggagtacagattgagtattcaagagaaaagcaacaatgacaagacaaaggaacatgggtaatttagaagggcctccgaaaggtactaagctttcatgtgatatcatgcacatgttgtttaagagtttgtggagacaaaaaggagtcaaaagctttctccttcagcgcaggagattttgtaatatttctaaatgatccagccaaacaacattggaggaagaagaaaaatcaaacactacactacacaagccatcatcctgtcacagagccattggcgctcatgaaaaacgatggtattgttaaggtttatttatagttctttcctaatcaaataaaaaatgaacagggaaac

SEQ ID NO: 103135 - DNA, 602 bp, Homo Sapiens
ccaccggcaggttgtactcagtctggctcccgaggtccaccccttataccccaaggtccagatggcggccaacgtgggtgatcaacgtagcacagattggtcttctcagtacagcatggtggctggggcaggccgagagaatggcatggagacgccgatgcacgagaacccggagtgggagaaggcccgtcaggccctggccagcatcagcaagtcaggagctgccggcggctctgccaagtccagcagcaatgggcctgtggccagtgcacagtacgtgtcccaggcagaagcctcagctttgcagcagcagcagtactaccagtggtaccagcagtacaactatgcctacccctacagctactactatcccatgagcatgtaccagagctatggctccccttcccagtatgggatggccggcatcctatggcacagtccacacgcccagcagtccatccagcacacaccaacacgcaagggactctgaaccagcccccagtccccggcatggatgagagcatgtcctaccaggctccccctcagcagctccgtcggctcagccccctcagcctggtcaaccatggtaccgagctgattta

SEQ ID NO: 103136 - DNA, 428 bp, Homo Sapiens
tcggtaccccaccgcaggttgtactgtccatccataaatcatccttttcacttttcattaacaaagtaattctcccatgttatttaaaaattctgcagaaagatttttaatgacagcataatattctactctaaaaatatatcgtaatttgcttaacccttctccaaccaatgaacgtttaagactcctacaacttatttctgttattaagaagaactctgcaaggaagtcatctctacacagcatggccataaagactgaaaacagagggtaatatcttctattaaagattgtcagtcttttgataacaacatgtatattcacctgtgtttccagactttacaaacctttgtctgcatttcagatttaattcccttaagaaaggaaaattccagctctatccccagccagtggaaatacagaaaagc

SEQ ID NO: 103137 - DNA, 460 bp, Homo Sapiens
  misc_feature (420)..(420): n is a, c, g, or t
  misc_feature (440)..(440): n is a, c, g, or t
tcgaccccaccgcaggttgtactcacggacccacactcaccccatgtcctcacttctccccttccccagcttggagtccacgatcaaccactggaatctctaccatggcatagatccttatcacccttgacccctcaggcttggtcattcttgcttgactaaatcacagttctggttaaatccttctctctcttcacctgttctgtgcttgcacccatgaggccaaatgtgcttggagaaaaccacagcaccatattgtttgtctcactctaagctgatcacagatcttaagtgggcccttgatgctacctggcagtctcattgtgtttccactgtctcttcattcccaccactctctcagacaactgttgcatactttctacttgctgttcaaacatccatggtctccttacacttggntgtttcctttttcaccaganaccccagaaataatcagtag

SEQ ID NO: 103138 - DNA, 393 bp, Homo Sapiens
  misc_feature (357)..(357): n is a, c, g, or t
  misc_feature (377)..(377): n is a, c, g, or t
gtgagctcgacccccaccgcaggttgtactgggtagcattatacacacaagtcccttttaaacagaaagtctgttttaactttttgccctacctcagtctgaggaaggtcagttgaagtccttactgtacaagtccaaaattttaggaaaatgagtcccatgatgagtttcctcatgcttcagccatgcacggaccagtcagcttccaggtgtgactggagcagggcttgtcatcttcttcaaagtcatcttgcatgggttggccaagcttggtctcacctcccaggtctcagatgctttaggttttacatggctgtggagaatccaggctgggattccttctacctttatggctgngggagtggacaagacgatgngtctgggtcctctcca

SEQ ID NO: 103139 - DNA, 399 bp, Homo Sapiens
cagttgtactctctcatttaacaggtgttaaactgaggcatagagaggctgaatgtctcgctcgcagtcacacagctagcaagtagcaagctgcggtctgaaacttgcgagccccattctagagtttgggttcataaccactgtagctactgtggtttttcagccacaggtggttgcttcctccttgcacttccctgcccccacttccctttatgtacatctgcatcgtggtgtttcatatgccctgttccaattatgtattaaatgttggtctctcctgctaaacagtgagccccttgaggcaaggcctacctttaattcatgcttatatccctggaatgaagagttggtagtctcagatgtttgcatgacttaaaaaaatatgacacacattatctt

SEQ ID NO: 103140 - DNA, 465 bp, Homo Sapiens
agaagctccctgactagaaggcgagtaaggtctcccatgaaatacaccagcagccctgttgatttgtgggaggaatccctggcttgcccatagttctagaatcaggctgagaaaatctctgtcctaagaatttgcctccagggtactagctgatgatccttgctctcctctgaccctaacgttgcattattgaaaatggtcagcatcttcaggtaggcttagcacgtgactggggggatgctgcacaaggacagcagtaatgagaaggaagggggcaggtgggaaggaaaaaggaggggcatcctggtaagatttcacaggccaaatgagctgagtttttaaaaaccttagtgcttctctcttgtacatggtgaaacccaattactatgtggcgtttgtacaaatataccaatgacgctaacccgtgtcagagagctcaccctcctcagtacaacctgccggtgg

SEQ ID NO: 103141 - DNA, 420 bp, Homo Sapiens
ggtgtcatcacgagcagcgggccactgaagacacagacacacagggagagcactgtgtgatgactgaggcagggattgagccatgcagctgtgaggaaccccaaagcatgccagccgacccccagaaccccaggcaaggcaaggaagaactcccctacaggtttcagagggagcatggtggacaagctgactttggacttctggacaacagaactgtggttttgttttcagccacctagttggggatcagcccttagaaactgagacaatgcccaactcaggccctggctcttttccacgcacagagtgagagagctttaaatatacaaaaagatggctctccaaagcctcccacaatagactgaccatctcacccagccaatctttctggagtacaacctgcggtggggtaccgagctg

SEQ ID NO: 103142 - DNA, 381 bp, Homo Sapiens
gtgactacgctgtcgctgaccggcggtgaacggccagattcaccccaggctcctcctctccaagctgcggtctgcacagccagaacgcagcttgcatcatgggagcactccctgcctggaaccgccagcaggacccccaactcacacacagccccaagcccctgagtgtggcagccagacccccgagggcgcgcctctccctgatcctgtctcatctcctactcccagctacacttctttgatccccacaaccgagaccacttcacacagtactcccagcttcacttcttcaatcaccaccactgagaccacctcacacagtactcccagcttcacttcttcgatcaccaccaccgagaccacatcacacagtactcccag

SEQ ID NO: 103143 - DNA, 163 bp, Homo Sapiens
atcactgacccccaccgcgatggggtgcagcgcccctcgaaggctgggggaactgtcaccctgggacctcaggcttcggaaatgtggatgtcatcaccctgcagccttgggtctcaccctgagaagatgaggcagcttcctgcacagtacaacctgccggtgg

SEQ ID NO: 103144 - DNA, 422 bp, Homo Sapiens
aaacgcaaggaggtcataaaccctgcagtgtgtgcagggagctaaaagccatcaggcattacctgagtgcaaattccaaggtaagcaaatgaggaactaacgctaggcagaaaggtgaggccagctcacagagagccttccttctgtgccatggtaaggactccagggtttattgcatatgaggtgctctcaggaggaatgtgtgctaagcaggaggatgacacagtccgtttcactttcttaggtggagtacttggacgtgaatgggaaagatggatttcagagggtccagactagaggcaaggaaaagcagggaatgactgccacattagttcggtaagagctaatgaggtcttgatcactggccatgaggaacaggctctgcaagaatttaaaagctagagtacaatctgcggtggggg

SEQ ID NO: 103145 - DNA, 358 bp, Homo Sapiens
ctaaaagaacccccggagcccggtcaccgggcgagtgtgaggggagaggtcagctccctttcctggcagccgtgtgctaaggaaggtctctgggttaggcagctgggccatgcaactgctgcaggctgcctttctctgtctgaagccccaggccccactgctgccgtggcctgtttaacgagctgtcagaggcggctgcagtcccacgtgccttcctgtgttgactccaaaggctattttaagcagggaagatggtgggaaacaggaagtgtcccagctactagaagttttgcatccttcaaggagaggggctgggaaccagatgtccccggtgaccggctacggggtaccgagctcg

SEQ ID NO: 103146 - DNA, 567 bp, Homo Sapiens
  misc_feature (512)..(512): n is a, c, g, or t
cgagcccggtcaccggggacatcagctgctgtggccagagaagagaacatggtgaataatgcttcataccttagggcagggcttctcaaacttaaacgtgcataggcatctcctggggagcttattaaattcacattctgattcaggaggtcctggagggcctgagatgccatgtttctatcaaccttctaggtgatgcccatagtgctggaccatgggccacactttgagtaaggagggcttcctggcttttgcccagaagtgacacatcacttttgctctcaaaagaattaaagcaagtcacatggccatgcccaacttcaaggcagcagataatataatccattaactacatcagggagaagagaattggaatttttgtgaacagctccaatgaagagcaaacaatgtgaagctaggatctgaattcaggcaggctggccccagagtctgtgctcttaattataactatatacagtcatgggtgttggtccattctctataaagagaanttgcctgcaggcagacagctagtcagggagttacagttgacttgtgtgacttgac

SEQ ID NO: 103147 - DNA, 408 bp, Homo Sapiens
cgtagcccgatcaccggaggggggggacgtgtgaggatcatggggggacctgtacccatgaggaccatgaggggacccatgacggccacggggagacccatgactgcgctgtttctatgaccacgtcaggggtccagcccagtagcaggggtgtagtgggcagagccgggcacacctgcaaagaacctcctgcccaaaccccgctcaagttcccccgctgccctcttcccacgcggtactggacggtgaccccggcggcctcccccagccagctgcaggcctcaacactcactgtttccagctgggttctgggtctcctggggcacctgctgcccctgacacacagggttttctctctgcagaggagcacccccagtcccgtgctgcagcccgggtgaccgggctacg

SEQ ID NO: 103148 - DNA, 370 bp, Homo Sapiens
tagccggtcaccggggcatcgtctctaagttgaactccagttctgaggccatgttgaggatctgggggatccggtcttcttggcactggcttcctctccagccagatccacaagagcagccataggggtctgggaggcagaaggtgaggccccggcagcctgatatgcctgggcactgctcctggcagctctgcccaaaacggccctctctgcaggcctgttcacagcgggtgccagtgaagccaggggggcatacacattcgccgtcatggtcgtggcagacacctccatgtaggcaacctgggcactccttggtacagcctggcccccagcgcccagctgcacgacaccgggcggtgtccggggtacg

SEQ ID NO: 103149 - DNA, 588 bp, Homo Sapiens
  misc_feature (499)..(499): n is a, c, g, or t
tggacactttaaccactgaaacacagtcatgcatgctctcagcatcgagaactttgcattcttctgtccagcgggtcagggctgtggggatgctggacagggttcctgcttggatggtagctgtgctctgatcatggaaaaagtcatccagcagctcatcatcagaacgggcgatgatgtggacgtcatcgttgcctaccaggaggcgggcccgaccccggctttgtaggggaaggctgctgctcagctgaaggatgtcagcagcagctgagggaccaagcaacctctgcagtataagaggagggttgggctggcgattcccagggtagtgaacatgaatggtgtggccagtattggccgtcagctgccttagggtcctctgactgcgcccgattgccctgggtgagacgagttgttgaagagccactgcccagtgtcagagaactgtggtctgcatggcgcaccatcagtggatgggcggtagggatatctcctgggngattgggggatgtctgtagcactggagaacatgttgtcaaactcaatgatgagatctcctcccggtcaagcgctcaatcgtaccaggag

SEQ ID NO: 103150 - DNA, 327 bp, Homo Sapiens
tcggtacgccgtagcggtcacaccgggtgtcagccgggccgacatgctgaagctgcgctcacttagtgaggggccccccaaggagctgaagatccggctcatcaaggtagagagtggtgacaaggagacctttatcgcctctgaggtggaagagcggcggctgcgcatggcagacctcaccatcagccactgtgctgctgacgtcgtgcgcgccagcaggaatgccaaggtgaaagggaagtttcgagagtcctacctttcccctgcccagtctgtgaaaccgaagatcaacactgaggagaagctgccccggtgaccggctacggg

SEQ ID NO: 103151 - DNA, 494 bp, Homo Sapiens
cagcccggccaccgccgcggactttcgggctgactttgtgggctcaagttcacttgagtgtccaaggctctggtgctaatgtgatcattctgcaaacttcctgttcggtaaaatggaggctttaaaaactggacatgtaaagatctgttttaagaatcctttatttagctttaaatttctctgagattagatggctttcagtacctgaactcttggttagctggaaatggaaaaaactggtgaatctaaacaaccacattgtatagagagtctctcagggtagaagaatgactctgtctttagggcagacgttatacctgggcttgatcaagacattcatgaaataaccaaacgcaagctctttggactgggaagctccagcttctgtccaataacacagaaggctgtttcacggtgttgggaggaacaaagaaataggtttccttctctaccctgggcaggccatgccccaccctcaccccgtgaccgggcta

SEQ ID NO: 103152 - DNA, 214 bp, Homo Sapiens
cggggacttcctcatgagttccatgtgtgacctggggccaccagggtgcgcaggagccctcctgactgccccgggcatttcctgggcgtctcccaggtatctcccattcctggtctccggcaggtcacaccagccgcctcaccgagtgtggactttcctctgctgagtaaacagaaggctgtccccgtgatcgtgctaggggcgatcctctaca

SEQ ID NO: 103153 - DNA, 295 bp, Homo Sapiens
gagagcggggctctggcccatacccagagcagggggcttggcgaggacagggtgagattcaacccacacccaccctgaacgggggcagattgagggtttctgtgcttggagcaggttgtgccctccgggactccagccccagggcggtcagggccccttcctgcagccttgccacagccccctaggcctccgccccgcccaggacagataaatatttatcttgagaaagcaaaggttaggacagaagaattcgtgcaggaattccacccacttgctggcccggtgaccggctacg

SEQ ID NO: 103154 - DNA, 450 bp, Homo Sapiens
caatatagaggatccccgcaaagctcattgccagtaaaccactcatcattcagcctttgctgatctgtgcctaatggcttataccaatactttctccggagaattccttagctagcaaaagctatttcacccagggagttatgctctcacatgctgaactggccaatgactaagcgatatgaagcgagaggagtcacacaaaagtccagtcctcctgcttcaaggcagaatacactccagagacccacgtgagatcaaggctagcctcagcctgagagcccattcttgcttggctctgtcccctcccccatcatcctccttccctcactttccttctcctgagaacccccaccttgaataaaccgcacctacccaaatctcattcttgggcttccaaggaacccaagaatcagctttgctgacttgggcgatcctctacatcgtgcctgg

SEQ ID NO: 103155 - DNA, 436 bp, Homo Sapiens
actgaccctccccatgcttggggttcattagacgtgaacaggagctagaagccaagcccattcccagccaggcctctttgggaagacgcagttattaagaccaccagcagacggcatgtccattactgacccgcacaaagcaggtagaggtgcaaacctctgcccatctcaggtgcagggaaacagaggcctttgcctctatcaacatgaattctgatgtagagacctggttccatctgcgtgtgggggaaacgtttaacatcagctccaacctgggctccccaggccctcgtgcggtttggccccagttctggggtcttaggctgggctaaggtttctgggagcccatgtcccctagggtccccgcttctctgctttgttacctccgagagacttcccgtcgccatctgagggttcctctctctactgcctgggg

SEQ ID NO: 103156 - DNA, 441 bp, Homo Sapiens
  misc_feature (220)..(220): n is a, c, g, or t
  misc_feature (393)..(393): n is a, c, g, or t
ctggagcaagtgaggacgggaggggcgacccagccctcggacttccagtaacaggtctgctgggcggggctctgcttcctgctcccgggggagggaagcctgtcccgccggggatctaccctggccacccctggtcaccccaatcttccatcctcgcaatggggcgggcggaagggagtgcccatgcccacagaagacctagtctcccctgcaggtgtgntgtgtgtacgggggggcgccataatcctcgagtcctcccggcctgggggacccttctggaactccaccccgctagagctcaggctccagctggctgcaagtcctccttatcccggcatccacccccaatatctcttgggagccagaaatagccctaactcttctttaagaatnaggacttcccccgtccttcagagctccaggatcccaaactaccttgcc

SEQ ID NO: 103157 - DNA, 353 bp, Homo Sapiens
ggagacgctgaggaaggcatttgcatggaggaacagcgggagcaaaggcagagaggcgtgaaatggcgtggagagagccctagatctcagcaataaagctgcggcccaggcagggcagggaggggagtcctgatccataaaaagctgtggccatgggtgagcagaagaaaggcaggaaagggctctgcgacgccacactcagtctgcgtggctctccccagccttcgcccaggctggtactggaattgacagttacgggatcctcagcccagccctcagccataccacggccagagaatcgggcagggcctccgaagccaaactcatttctgtgtctctcagccccttctgtt

SEQ ID NO: 103158 - DNA, 389 bp, Homo Sapiens
  misc_feature (376)..(376): n is a, c, g, or t
ttcaccgtgttggctgggatgatctacatctcttgacctcgtgatccgtccgcgtaagcctcgcatagtgagccaccgtgctcggcctatgtctatgctcttaaaagatagctttgcataaccacatgcagtttcttccaactatatcccctatttcactcacatatcccttcatctaggaagtcttactcatctaagtcctggcccaacccttttcctgagtcagtcctgactttatttatcagagctctcctcataagttcttgagtggcagttcatcactgctgtctataggtatggggttgtgcagcgcatctctggagcttatcgctcatgcttgcctgaatctttactcctgttgatttttacctcctcntcgtctcctacag

SEQ ID NO: 103159 - DNA, 393 bp, Homo Sapiens
  misc_feature (22)..(22): n is a, c, g, or t
agatatcaaggagccagagganatagcagtgaaacctcacactcagtgccagaagccaaagggtcaaaagaagtggaagtcactcttgttcggaaagacaaagggcgccagaaaacaacccgatcacgccgcaagcgaaacacaaacaagaaagtggtggctcctgtagagagccatgtccctgaatccaaccaagctcaaggtgagagtcctgctgcaaatgaggggacaacagtacagcaccccgaagccccacaggaagaaaagcagagtgagaaaccccattccactcctcctcagtcatgtacttctgaccaaagcaagattccctccacagagaattcgtcccaagaaatcagtgttgaggaaaggactccaaccgcatcacccgtt

SEQ ID NO: 103160 - DNA, 534 bp, Homo Sapiens
gctggcaggccaggacactgcttagtctgctgccatgatgggccccatgaatggtggctctcaagcttctgtgctacacaggggtgtgtggttgggcgagtgtccttgttaattgatacctaattggccttggttgggaacatagccatgagtgcccctcgtgggtggggcgccagtctgtcattgacctcattgtgtcagcaccttccccccaaggaggctgaccctgccctgccagctgagactgggagacggagtgggctctgatcccagggcttccaggaaagctctggctttggagcagaagcgggttctaggacttagtgcccctcactcggtgcctgggttcctgtgtgtgtggaaagggtagggctgcaccctgtggaagagggttcagggagctctgaggacctggctcgtgctagatgctcagtcagtagtgtgttttagcagcagccggaagtgactgctttcagtatgtagtggtgagtgctagctggcacccctgcgcctgcctcccaagggtcctctaga

SEQ ID NO: 103161 - DNA, 497 bp, Homo Sapiens
acggggcctgttacggacagttgtgagagtgtggcggggcacggtgacctgctgcaggccctggggagagtcatgctgactgagcctgtggttgaaagtgtgtgactgccaccgcgggtggaattctggctcctgcatctactgttcgctgtgaccttgagtggctgtgagctcttggcctcggttttctcatctgtaaaatgagatgccttctggggtggttaagattgattgggttgacactggtagaacacttggggcagtgggttgggagtgacatcctgatctctgaagctcttccactcagacctttcaattagatctgcagcctcaggactttggacctttggggactgctgtgaacagcgagctgccccaggtgtctgggcaggcagggagtataggtgcaaagctgtggcctctctgcctgttcctccttctgttggctcaggtctgaaaatctgggtgtggcctctgcccctcctccccgtcttcca

SEQ ID NO: 103162 - DNA, 322 bp, Homo Sapiens
atcacggtgaggacgggagtgaggacgggatcacggtgaggacgggagtgaggacgggatcacggtgaggacgggagtgagcacgggatcacggtgagaacgggagtcaggacaggatcacggtgaggacgggagtcaggacgggatcacggtgaggacgggagtcaggacgggatcacggtgatgactggggtccactgaaggggacttcttctctgatgtctgaattctcaagagaatgtcagagcccagcctaagtgctagagagcacttactacaagcccattcgtgctgcgatggtcagtgtccagcgctctagggg

SEQ ID NO: 103163 - DNA, 491 bp, Homo Sapiens
  misc_feature (349)..(349): n is a, c, g, or t
gccacagcagggtgtgcgtcgaggaaccttgggttgggagtggcagggccaggcgtgtgggtgtcaggagcccaggcacaaggccccagagtcccagaggagactcagatgggccctagccctttcggtctcctgtcttgagccaaggtggatcgtagggcctggtgcagggtgggaagataacggggcagcaggcagcgggcactggctgccagccaaggtccacctgtggtggatggaggcttctttttgtcttgttgaaccatgagcctttcccctgggttccctccacttctccacagctcagagggaaattcaggaacattcggggttggcatctcggagcggnggaggagctggagctgtgcaggggcctgtccctgtgcgggctctcagagcaccctatcctggtgtctgttcctcccgcagggccctgagcaccccaatcccggaaagccgttcactgccagagggtttcccgtcttccacag

SEQ ID NO: 103164 - DNA, 224 bp, Homo Sapiens
gggaaggggggccccattttgtggccaaaattagagaacgggggaaaaatccgggccaacggaaacttcggcttcgggggccaaaggaattttctggcttaagcccccgggggggccgggttaaagggttttggccacaaaaccgggcaaattttagtttttccagaaaaaagggggtttccccaattgggccgggggggcctaaaactctggccctaggggga

SEQ ID NO: 103165 - DNA, 958 bp, Homo Sapiens
gaggaacggggctggggccggcagggtggacttgggtttgaaggacactgcctctctctgcccataactggggtttccagtttccctctcagtcctgtctcttcctggccccagctaaaggatctcatacgttgatggacatgtggggattaggccttccccaacccagagctttcccccggcagccgacactccctgtccagtgggcaccgccccccatcgcctcatccctcccatgggcagcctcatccctgtccccagctgccactccctgtccactgggcacccccacctccccatcacctctcatccttcccatgggcagcctcatccctgtccccagctcagctgcctccatcgcggttgctcccttgcagcccaagtgcatgtgaagtttctgaccctcaaaccccctgaacttgcctctcccctacttctccatgtattgctgtctccccccttcacagccagttttccccaaaaagtcacctctacggtccatctggtctcccgccccccaccggctcctcagcctgcgggcagacttcctctctccatacccaaatggaaactggctcccaccagggtcaccggcggcctccagggccttcctccccagggatacagggccagcactcctggctgacctcagcgggcattgggtttcttggctccttcttccgtgaaacgctcctccccaaagctttaggacaacacttacgggttttcccctcctttctcagatgggcacctatttcaacccggccgccccagcctcccaaataggggacctttgcaaggcggtgtcttcagcctccttcccctcggtgcctcaccactcccaagccaccatcacactccacactcaccgtctcctttcctgacccagatggggacatgtaacaagccctgcccactgtgcatccctccagaaatccactctcccgtccttgcccac

SEQ ID NO: 103166 - DNA, 281 bp, Homo Sapiens
taggctgaggaagacgggtactggtcggttctctgaggaccagggatccaagagactcaaaggaagagggggttgcgtgaagccaggctagagctggatacactgcccctccaatgggtgcagcccagagtaggcaggacaggcaggggccaccccagggcctgagccccaattaattctcattaaggataatcagactgcagataccaagatgcacctagagccaggccctgcgccagagccagggaattccatggggctcacttgaccctgatcatcag

SEQ ID NO: 103167 - DNA, 325 bp, Homo Sapiens
taggctgtggggggtggtgcccgctggtccgggtggccaagagaggctggaaggatggtgtctgctggtcagggcggcccaggaggtgctgtccaggcggagcccggggctggtgtgggtgcgccatgctcctgagaagtttctgggttgtggctttaatgtcctcctgcaataagaacgctgacacttggctgaaaggtcctcacgtctcccccagtacacttctgagatgccaggaaggcattctgaacatcaggctgattcctgggactcccctccagggtgacctcaccggagtcagcagcccccgccccgtcttccacag

SEQ ID NO: 103168 - DNA, 134 bp, Homo Sapiens
ggctagctttttaaagcctcacaagacaactttcaaacctgattagtatgtatgctgtaaaatcagatacattatatttagcttgaagtgcagagcatcgtgggtgcaaagaaagaaagatagggggagggatt

SEQ ID NO: 103169 - DNA, 340 bp, Homo Sapiens
tcatcgcaggcatacatgacttggcagatactcatggtgatacggtgaaccgtgcgtgagagaggactctacaggaggctggaaacggggcctggcgcgcgcttccctctcagtgcgaggctgactggttggactcgccgggctctactgtgggccccacgctatgtttagacgcccgacgtgtcccattttattgaactcgtcctgccccccaagtagggacgatttacctccattttctagataaggcactgggggctccgcgaggggatgtggcggactggagcccagctgcactcctgacgggactgaatgcggggctgagggaggcaacaggaag

SEQ ID NO: 103170 - DNA, 365 bp, Homo Sapiens
tcaggctgtctggaccacaatccgggtgggagattggctgcttaagtctgggtgagttacttggtgttcacatcttgcagaacaggggagttaacagcacctactgctgtaattaaatgagttcatacggtaaaacaattagagagtgagtcctcagtgcaagttaactactgctgtcaatcaatgagacccaaattgaacctttcctcgctaaaccaaccacgttctgcctctcttctttacccataataaagcaccgtgagatggagtctctgctccctcggccagtctccagcgcagtgatgctatctaggctccctgcaagctctgcctcccaggctcaaccgcatcaaccagtggggggg

SEQ ID NO: 103171 - DNA, 292 bp, Homo Sapiens
gatccccgaacgggtgatgcggttgtgatccaccgtggtcaccgccagtctgtgtctgggtcgtgatcccgtgctgtcaccgtgagtctgtgtctgggtcgtgatcccgtgctgtcaccgtgagtctgtgtctgggtcgtgatcccgtgctgtcaccgtgagtctgtgtctgggtcgcgatcccgtgctgtcaccgtgagtctgtgtctgggttgtgatccagtgatgacactgtgagtctttgtctgggttatgatccagtgctgacactgtgagatcgtgctcagctcct

SEQ ID NO: 103172 - DNA, 177 bp, Homo Sapiens
ggtacccgaacgggtgatgcggttgagatgacagctcgccattccccggaatcagtgaggctgtcagtcagccacgcttctgcagtatgcagaaacctgttcttagactccaaagccagagaaagaattctcccttctgatgcccaacaaattgagaagcaactgtgatgggcgccg

SEQ ID NO: 103173 - DNA, 501 bp, Homo Sapiens
agtgggtgcctcatgagctgagcgagatcaaaaaaattgtgattttgaagtgtcatcttctcttattctacacaacaaaaacaaaccatttctcgatcagattgtaacgtgcgccgaaaagtggatcttatatgacagccagtgacaaccagctcagtggttggaccgagaagctccaaagcacttcccaaagccaaacttgcaccaaaaaaaggtcctggtcactgtctggtggcctgtgccggtctgatccaccacaactttctgaatctccacaaaaccattacatcttgagaagtatgctcagcaaatccatgagacgctttgaaaactacaacgcctgcagccggcattggtcaacaggaagggcccaattcttctccatgacaaagcccaaccgcacgtcacgcaaccaacacttcaaaagtggaaaaattgggctgcgaagttttgcctcatccgccatattcacctgacctctcaccaaccgcatcacccgtt

SEQ ID NO: 103174 - DNA, 404 bp, Homo Sapiens
ctgcagaccctccaggctctcccgggggaaggagccccatcagggccagcactgcgccactcccaacaaagcaggcaacctagcctgccagtggagacctattttccgcctgggctccagctctagagcaaggccagtcacctcagccccaccatcaaacaccaggctccacatgggcactgcctcgctcaactgcgtggtggcgggtggcctggaacgctgctgtcatcactgcacgtggacacatcatcaacctctcagcgtgacgtgccctcgtgctttcaggtaaaacactacagagaaacttcctgttggcaggtggaccccgcactccctagggcctgatccgctccctctcttctgcttacggcactgacaggaagtatctgatgcgcactcactca

SEQ ID NO: 103175 - DNA, 952 bp, Homo Sapiens
ctggagattctgggcctgctgcctcttatcagttgctctttggggcaagatggtaatgaagaaatgggtgttattacacagacaccatataaagtctccatctctggaaccacagtaatattgacatgccctcagtatcctggatctgaaatactatggcgacacaatgataaaaacatagccggtgatgaggatgataaaaacataggcagtgatgaggatcacctgtcactgaaggaattttcagaattggagcaaagtggttattatctctgctaccccagaggaagcaaaccagaagatgcgaacttttatctctacctgaggacaagagtgtgtgagaactgcatggagatggatgtgatgtcggtggccacaattgtcatagtggacatctgcatcactgggggcttgctgctgctggtttactactggagcaagaatagaaaggccaaggccaagcctgtgacacgaggagcgggtgctggcggcaggcaaaggggacaaaacaaggagaggccaccacctgttcccaacccagactatgagcccatccggaaaggccagcgggacctgtattctggcctgaatcagagacgcatctgaccctctggagaacactgcctcccgctggcccaggtctcctctccagtccccctgcgactccctgtttcctgggctagtcttggaccccacgagagagaatcgttcctcagcctcatggtgaactcgcgccctccagcctgatcccccgctccctcctccctgccttctctgctggtacccagtcctaaaatattgctgcttcctcttcctttgaagcatcatcagtagtcacaccctcacagctggcctgccctcttgccaggatatttatttgtgctattcactcccttccctttggatgtaacttctccgttcagttctctctcctgcagggatcctctagacg

SEQ ID NO: 103176 - DNA, 445 bp, Homo Sapiens
  misc_feature (335)..(335): n is a, c, g, or t
aacgggtgatgcggttggattgaagcagatttagtgctcactctcagggaacggtggcagtgtggaggttcaccccgttcttggtgttaggtggggaaaagttggacttcaatgaggcctttccatcagcctgcaagggtggggacaggaagggagagaggtgcatttgacgagtcgggcttgttggctgatggcactgcagagtttggacatcccaggataccaggagtccagaggccagggttgggtgctgtaaggagggatgtgggcagtggggaaatatgcttttctgggattttaagtgaggaccaaggtgaggattcagtggacacttntggactggcaaaggcagttagggtttggctagggtagatataattggcattgggctaggttaggtttaaggactgggttactttaaaagtttcagattagtttagacttg

SEQ ID NO: 103177 - DNA, 350 bp, Homo Sapiens
cggtacccgaacgggtgatgcggttggaaaagtagacaagtgcagttttagccatgaaaaatgggaaacgtgaagggcttgtttcctggatgctcttgaactctgccatccctctggactgcaagtcgagctgctctcgtgcttggctcatatttatgaatggaggttagagaagtcgcttaaacgctcttcagtgcttacactccagctggctgctgacttaggaaaaacgtgaccttatggggctgccatgggtgcggggagtggtgtgggcgaagtatgttgtcatagaaaagacaacccaggggctggaggggacttagctcgtacctacaaccgcatcacccgtt

SEQ ID NO: 103178 - DNA, 586 bp, Homo Sapiens
gtggctccgcttcctcactggaaggagatggtgctcttcttttgtctttctgaattgtggccaccttcataccagtctgtcatggaacacttaagccgcttgagtgcctgctggtactcccagccctgccatgcctgagccccctgcacacaaggagccaggagtaatcagggcagaccctttagggcacggggacttctggattgtgaaattggctctctgggggccaaggccttctaacgttggtggaagtggctttggcatattgggtcggattctaggccattcattccaacctttagagacatcccagctttccctagcccagagtctgcagcccctccagcatcccacatcctccccctccctttcctcatgaaccccagtcgcgcctctgccttctcagacccctccaccatcccacaccctcctcctgcccttcctcatgaaccccagtcgcgcctctgccttctcatccctgcgcaccacacaggctcgctcgtgcccggtgagtgctgaggctgctctgcacgtggagtatggccctgtgggcaagggctgggctcttggaggtaggggagctaca

SEQ ID NO: 103179 - DNA, 421 bp, Homo Sapiens
aacgggtgatgcggttggcattcatttctcccctttcccaactgtagggatctttatctggcatctgccagaagggatggggaaccccagcttatgtttagtttatagctcattcaggagatgaacccggatagctggaatataaagagggccacagaaagataagcacccccttcacttccagaatatcctggcctttaggaaaggtgactttggcctggcttgccccaggacatgcagtgacagcccacagtcatgcctcctgcaaacattgaactgtaggcttgcactggcctacagaacaggaccgggatcttctgatcccgcagccctgcaatcgcctcttccctgccgctagagaatggccaagcagggtcttgtggtgggagcactgtgttggagatcctggctttggtcaagt

SEQ ID NO: 103180 - DNA, 461 bp, Homo Sapiens
aacgggtgatgcggttgcgccatccaaagacccaggcaagaaagacgccaggcccagggagaagctcctgggggaccgcgacctgatgatgaccagcttcgagaggatgctgtcccagaaggacctggagatcgaggagcgccacaagcggcacaaggagaggatgaagcaaatggagaagctgaggcaccggtccggagaccccaagctcaaggagaaggcgaagccggcagacgacgggcggaagaagggtctggacattcctgctaaggaaaccgccggggctggaccctccatttaaagacaaaaagctcaaagagtcgactcctattccacctgccgcggaaaataagctacacccagcatcaggtgcagactccaaagactggctggcaggccctcacatgaaagaggtcctgcctgcgtcccccaggcctgaccagagccggcccactggcgtg

SEQ ID NO: 103181 - DNA, 434 bp, Homo Sapiens
  misc_feature (395)..(395): n is a, c, g, or t
  misc_feature (421)..(421): n is a, c, g, or t
aacggctgatgcggttggggagagagattggtctcaactccaaaaagggcatgggcagaaggaaatttgtagccaaggagcagagtaaacgggattctggctaagctgacctaacgggattcttgctgaagacaggccaggctgcttagacaccacctgggggatagtagaggatgaagaatctgatcagagatctaggatgatcaaaaatacgaggatcgaggattctagctaaactgacttggcaagattatttgccaaaactgtattttacaagaaagcatacatctgggcctaggagaaggttcagaaatctgactaaagtttggccaggcaaagaatctttgtctgtgtaatttaggaatgtcccttttccttaactatgggatcatccncaccagtcactgaacatgtatgaggngctacagtaacgc

SEQ ID NO: 103182 - DNA, 424 bp, Homo Sapiens
aacgggtgatgcggttggagaaaatgatgaacggcttgaaggggtccaggctgcggcagctctcgccgtcaggttccaggacccagccctcgtagcaggagcacttcacgctgaacttgttctggtcgcacttttggctgcatttgagatgcttggcacagtagctctggatctggcaggtgtggttgtcgggccccagctccatgcccagagggcaggaacacacaatgccttcgccaggtgccactgagcagttgtggctgcagccaccgttattcagagagcactggtcacagagctcgccctcatctgagccgtcgccacagtcgtcgtgtgcctatcccacctgcttccccctgactcagtttacctgcaacaatggccgatgtatcaacatcaactggagatgcgacaatgacaatga

SEQ ID NO: 103183 - DNA, 355 bp, Homo Sapiens
  misc_feature (25)..(25): n is a, c, g, or t
  misc_feature (61)..(61): n is a, c, g, or t
ttctccaggctgcttagaagtcccnccacctggagtgcttgacgggatggcgctccttacncagtgtgaaggggcgtcttctcattgaaccccatgaagaaagtaaggcaggttctggacttggttctgcttatagctgagctggtctgtgagcctgacttgtccagggattggtaatgggccaccgcaaagctgcatagtgagcgggtccctccctcagtagacagccttgggcaagtcatttctacctcttctcacctctttttcatatatataaaatgaagagttggctgaggtgatccctaagctccctcccaggtcactctccatggtcctcacaaccgcatcacccgtt

SEQ ID NO: 103184 - DNA, 476 bp, Homo Sapiens
tgagaaggggccgatggcaagccttgctgggaagaataggagagtgacacctaaaactggggcctgtccagcaccccgcacaactgctctatgggtgggatcataccacagggaggagaaagggatccccggtctagacgggccacagcccatgggcacctttaggggaactccctctctgaggtcgtcgggggatggcagcccgcacccactggcccatggcctctgctcgagagatgccatgttggttcgtagagaggccacctggaaccatcaaccacatacatcccctcataagtgctacggctctatctcccaaattagccactctctccaccccacagcctgcctggtcccggtctgatttctcctatgtggtgagctatccgtctcactctcaaagctgcctggagccaagacccgcaacctcccatggccacagggccccacagagagagcgtccagaggctggatcc

SEQ ID NO: 103185 - DNA, 348 bp, Homo Sapiens
agttcgcagtctagccagtgaaggctcggagcagcccctcccccaaagggggctggtgtagccggacaggcggaggggctgggactaccgtacctgggggtggcacgccatacttcctctgcccgttcacctgcaccaggcggatgcctgtctccctgacccacgcctccagcgccgccttgttctctggattcaccctctcacaccacagctgagagggaaaggaaggttggaatggcggatcgccaagcgcgccccccacctctcctgtggtactggggtccctaaagccgacccccgctccggcggggctcgccggcccccaagtcgccaaccgcatcacccgtt

SEQ ID NO: 103186 - DNA, 293 bp, Homo Sapiens
aacgctgtttccaactataagccagggtaccttcctcgcatagagtatcctttgtcgtcctatcctcccagtgccctctgaatagaggccaaccaccgtccaacaggcccgtggtctggctcactaccttcacttctagttgctttccccctgccatgctcaccaccctcgagccacacctgacctttcagtgctcacatccctcttccaaccccagagtaagctccttttcctttaagatgtggcctttgtatcacctcctccaagaaccttccccaaccgcatcacccgtt

SEQ ID NO: 103187 - DNA, 288 bp, Homo Sapiens
aacgggtgatgcggttgggacgagagttgcctgtcttcagccagcgcctgtctcatatgtgggcgggactctgagcagcctggcagcgagggtatgtataaaatgcttggcctgcaccagggctagggagaggacgacaccaaggaggtcactgcgtcgtaggagagggccagcgtctgccgttacgaagagttgcaagagctgtgcctacttctgcccagataccaagaccgccagctcctggatggacatatccttgttgacatagcggtcatactgagcaggggt

SEQ ID NO: 103188 - DNA, 494 bp, Homo Sapiens
  misc_feature (471)..(471): n is a, c, g, or t
aacgggtgatgcggttgcaatgctttggccagtggcaggagctccttggggctggagccctggacaccagtgctcccccaggtctctgaggttcccagaaaggcctttgccatggctcccagggtgctattaatgaggggcagtggtacccctggccagggagcttgtttccaggatcctctaatgcgggcgcaggtggctcatgaccatctctgagggctggtttctcttaatgcaccggttaagagcaatgggcaccttaaaggggcaagcaggcagaggtcgggggtctgggccttgctgctcctggcatcatgtcctaagacccatgttctgagtgtccaggtccctcctctgtccccgttcatccttcctctgagctgtgcacctgtcccacctgacagtatgtcccacttgaaggcagctcaggggtcctgagccttcctacggggctgctgtgctgggaccttnatacgcacacacacgcgcacacg

SEQ ID NO: 103189 - DNA, 393 bp, Homo Sapiens
ggactactagagcatccccgaacgggtgatgcggttgccaggatgacatcctgggttccagcttgagcaaatggggagaggtttgttctcaacacacacacagagacaaagacaagcacaagcatggatatccattcatacataaacaaacacgcccacacaagctcacaggccaagagaaacagagacacagatacattcacaggcatacaaacattcataccttcaaatgtaccactgccgacggacacaggccaggacacacgccagccatgacacatacctgcagaggtacatatgtacacgtgaaccccagacacactcacacccgaccagaaagcatatactttgaagcacagacagagggagcagcacacagaaacacagcagaga

SEQ ID NO: 103190 - DNA, 483 bp, Homo Sapiens
ggtgcttcacgaagtcggaagagaaggaggaaaaggttggcaggttcgagagtgctaggatgtctcgccaagcccggtctgacagccagtccggtgccggattctcagtcatgatcgagatggagcccccagacaggaggtatcgccactcactctggttgattttgccctcgttcatcatgatgcgaacacacagcaggaaggcaaacatcagcttgtgcttctcaaagaggctgcggcagacgttgctgtagaggctgtaggtcaggtagcggttgatgttggagatgcgcttcttcaggttgtctgctctctctgagttggcgatgcccgagaggaagatgttgagaaaccactcaagggagtactggtacatggggtccacgttggccaggtcggacacacagaagaagaggatctgggtgcggatggccacgggtatgtactccatgcgcgtcaggtcgatgtctttctctcctcact

SEQ ID NO: 103191 - DNA, 459 bp, Homo Sapiens
aacggctgatgcggttgtgattcctgccgctccttgtccagacccaccccacgtattcctctagattccattccctgggctggaggtgaatcaggtcatcccggaggggactgtcccccaatggaagcactgaattgaccgtggacaactaaagatcgaggaggtaaggaaagagagactcagaggatctgggaagcctgtcaacagagcaccccatgcagaaagggctgcaggctgtctttggtttgggaaccagggaagaagggatttggggaaagaatcaccctctccttgcctcagtagactctgtgacttcctgaggacacagagcagagctgcgaggagggcgggcaggtctcaaacttgctggccgcactccactcttggtgtgtgttaccctaactctgacagccaaggaaagacaggagagccggccttttccatgctccccttgggccc

SEQ ID NO: 103192 - DNA, 185 bp, Homo Sapiens
aacgggtgatgcggttgaggccggttaaggctccagcgcccgcaccccgctcagggagccccggatggtggcgtcgctgtccgtgcctgctcggaggctgtcttgtcaggaccctctcccccgagcccaggccctcgtcccggcccccgggagctccgtacccaaccgcatcacccgtatcagag

SEQ ID NO: 103193 - DNA, 444 bp, Homo Sapiens
  misc_feature (369)..(369): n is a, c, g, or t
aacggctgatgcggttggagctgaggcacgtcctccaaagcagccgaggaggagggggaagatccgcaggttcccacaaggtcaaggacctgctaagcccctgcctaaggattcacctcccaggaaggtcctgccacacggcagggaggcggcagggccttcagggctggagtgcccttgtgggcccccagacctcaccccttcctcatctgtcacgtgcgagtggaagaaggtgtcacttccagttctaagaaggggaatctccactatgaccagggagggagcagatgagagtttttagtttttagtcatggaagtctagctcccatgactcagtttcccttttggtttcacctcctataaactggngaccatggtccctgcttgcccatctggtaggaagaccatcataagatgctttgaaggtgaagttgaggtcaccaa

SEQ ID NO: 103194 - DNA, 567 bp, Homo Sapiens
gcagctcagtcatgatcatgtctggcacttcttgacgtacttgccctcggccttaatgacggtgtgcaggaagtccaggtactgcacatggcgcccgtgcgtggccagcaggtgcacgaagtgctgcaacacaggctcgctgatctcggagcagagctgatagttgttcaggaagatgtgctgcatggtctctgcctccaggagccctggcgtgaggaagaggtgcaggtgtttgtgcagcagggcctggttgccggggttccctgcacagaacttctgcaggaactggtgcgtgtagcgcaggatctccatcatcttggcatcacccttgtcataggggatctgcagcaggtccagcatgaccttgtgggcatccatgttcttcagcagccgttgctgcttcttcctcatttgctccccaaccccgcacatcttgttcagcctttccaggatgcccttgacgatctggtagttctcactgcttttccccctggtgggtgcagaaagccctcctcgtccgtgggacgctctttcttgtccttggcggcgcctgcctccacctcctca

SEQ ID NO: 103195 - DNA, 397 bp, Homo Sapiens
ggctgtatcagcctatctacccaaactccacgtttctcaccttatctgctgacagatgatcagacgcgagtaatcctctccctgctccaggaagagggacacagcgactacattaatggcaacttcatccggggcgtggatggaagcctggcctacattgccacgcaaggacccttgcctcacaccctgctagacttctggagactggtctgggagtttggggtcaaggtcagcacttgggggagcggcacaatggtggggtcaacatctaagtacccactcggcagtttccctggacccctcacccaaatcaccttcctctcccctgaccctccttgtctaggtgatcctgatggcctgtcgagagatagagaatgggcgggtaggtgccctctgc

SEQ ID NO: 103196 - DNA, 686 bp, Homo Sapiens
  misc_feature (660)..(660): n is a, c, g, or t
tagtagaatgtttagtgagcctagggtgttgtgagtgtaaatcagtgcgatgagtaggggaaggagccaaagaggggtggtttaaagaaaagcttctctagagacagagatgaagctggtggcaagagtggcgagaagcccaaggaggagaagatcatccggggcattgacaagggccgggtcagggctgcagtggataagaaggaggcagggaaggatgggagaggagaggagagggcagtggccaccaagaaggaagaggagaagaaagggagtgacaggaacacaggcttgagcagggacaaggataaaaagagagaggagatgaaggaggtggccaagaaagaggatgatgagaaggtaaaaggggagcgtaggaacacagacaccagaaaagagggtgagaagatgaaaagagcaggtgggaacacagacatgaaaaaggaggatgagaaggtaaaaagaggaactgggaacacagacaccaaaaaggacgatgaaaaagtcaagaagaatgaacccttacatgaaaaggaagccaaggatgacagcaagaccaaaacacccgagaaacagacgcccagtggccccaccaagccctctgaaggaccggccaaggtggaggaggaggcagctcccagccatatttgagtgagcctnctggagagcagctgcaagaacaatga

SEQ ID NO: 103197 - DNA, 222 bp, Homo Sapiens
tgttgctgatgctcctttctaaatcacaagagccatgtgttggtgcacgctgtcctctccaccttgaatatcccctcctcattgttcaacagctgacccatcatgctcctcctcattatcactaccctacccacaggcttagtgaggctccttcctctctgccgccaggttacgccttttgcttatattcatcccagcactggccggcagggtggctcacac

SEQ ID NO: 103198 - DNA, 358 bp, Homo Sapiens
aatcgaagctcggtacccctcatgtgtgtgtgacgtgggttggacggggccagagtgtgaggcagagctagggggctgcatctctgcaccctgtgcccatggggggacctgctacccccagccctctggctacaactgcacctgccctacaggctacacaggacccacctgtagtgaggagatgacagcttgtcactcagggccatgtctcaatggcggctcctgcaaccctagccctggaggctactactgcacctgccctccaagccacacagggccccagtgccaaaccagcactgactactgtgtgtctgccccgtgcttcaatgggggtacctgtgtgaacaggcctggcacc

SEQ ID NO: 103199 - DNA, 603 bp, Homo Sapiens
aacgggtgatgcggttggcaaacgtccgaaagtgcactgacaggcagaactcaccagtcacatcaccaggatcctctccccttgcccagagaagaaagccacagcctgacccactccagatcccacatctaagcctgccacccgtgcctcctcgcctggatctaattcagaaaggcatagttagatctccctgtggcagcccaacaggttcaccaaagtcttctccttgcatggtgagaaaacaagataaaccactcccagcaccacctcctcccttaagagatcctcctccaccgccacctgaaagacctccaccaatcccaccagacaatagactgagtagacacatccatcatgtggaaagcgtgccttccagagacccgccaatgcctcttgaagcatggtgccctcgggatgtgtttgggactaatcagcttgtgggatgtcgactcctaggggagggctctccaaaacctggaatcacagcgagttcaaatgtcaatggaaggcacagtagagtgggctctgacccagtgcttatgcgcaaacacagacgtccatgatttgcccatcaagacgttgtgatacgacgcactgtgcacc

SEQ ID NO: 103200 - DNA, 281 bp, Homo Sapiens
tcctgaagcgtggcctgaagccgagctgcaccatcatccccctgatgaagaaggatcacagggacaacctggagttcttcctggccggcatcggcaggctgcacctctcaggcatcgacgccaaccccaatgccttgttcccacctgtggagttcccagctccccgaggaactcccctcatctccccactcatcaagtgggaccacagcctggcctgggacgtgccggccgccgaggacttccccaacggttcaggttccccctcaaccgcatcacccgtt

SEQ ID NO: 103201 - DNA, 470 bp, Homo Sapiens
aacgggtgatgcggttgatgaggaggaagacgaggacgaatgagagtcatctccacaagactgtgatttgcaggatgtgtgtgacaaggagatcgccactgcatgttctcgacctgtctgcctttcatcttcctccatgctctttcggcaactctggcagaccgcacagaggcatctcgcctaggagattcttgacgagctttggcatgaagtcagggggcagcttctcaccctgcaacaccagtccattttgagaagggccttcttcccagcctttgcgttcccggtgacacagcaggcagcaagtctgcacaggctggctggaggcgggggggacatgcacaattccagagattctactagaaggctgtcaagagccatgccttctggctgcaccagcctcccagagtcccctgctgcccgatgcagtgtctgcagagccaaacgcatcttccgccacgcctcatcca

SEQ ID NO: 103202 - DNA, 935 bp, Homo Sapiens
cccgggccagtcggatgtgattcctcaggtggtggggacaggggtgactcctcaggtgggggcagcagtggcatctcctcgtttaggggggcctccaactggggctcaagctggacccctgctttccctagtggttaggcttcacattgcaggggccctggttccttgggttgcatagaggtcacgtgcccaccctttggctgcccttggcatgcaacgtacagagcagtgggggtatcgccaggctctgggggtgaaaatctgctacacaccggggtatgctgctcagcaacggagcggatagtctgacctccctgggctttgtgacagcggtgacagagagagtagttctcaaaccactccgagttgggattcagttctgctgagcccgccccacaggcccggcacacccggcacgccttgcacttccaagagtgagcaggcagttcctccatgggtggttttaggcagaaagtatggtatcctttgtcacacgtctcacaaaccaacatcttagagtcattcccaggtttcctgcaggcttggcacactttgcattcagggcactgccagccagcacgtttgcgggcagtcagagcagtgtccaggcaggccccgtgatagtgatgcccacagctggtacagaagaacaggtcacacaactcccctggcccctcacacactgcacagcgagcctcctccagatatgcagccccctcactgtgctctgggcatagcagctgcagtgttttcatggataggaaggaaccgctggcagtcgcgcaggggaagtggtaaagccgtggacatccaggtgagcggcaagggatggaggcaccgagcctggtgcagtgggagcagcgctgtgagatccctgagaagatggccttgtccacaccacatagttctgggccctcctacccacaaccacctcg

SEQ ID NO: 103203 - DNA, 137 bp, Homo Sapiens
taggttctcgactcgttacaaaatcgtatgtcccatttagcagtcatagcttcgcatttaaaaaatggtcctctactctcatccagacctttggtctggaagggatatattaaagcgggacaaaagttttcacagaa

SEQ ID NO: 103204 - DNA, 517 bp, Homo Sapiens
cccctatgtctcgatccgttatagatactcagcaagcacttatgggtgtacgtgaaacagagcctctaaaactcagttagactattgtatcagggaagctatcattgcacagaaaagaatgcaataaatttcaggtcataaatcattcagcatatcttgatagaggagcaaggaaaaagctgaaggggatatcatgtgcttgaaaggacagacagaaggagggaaaggacatttacaagggaaatatgaaatccaccaaatccaagcaagccacataacttgccattttctgcacttggaaagctcttcttggttcctcatgtggcaggtgaagggattgaggacttcagatacattcatagaaactgttttcctgagtgctcagtgagaagaaggttaaaaaatcttaatttttcggctcttaaagccaagcttttatttctatgggttgagctctgtcactctacctactttccctggggaagcctgtctgctctctaacgatcgacgcacatag

SEQ ID NO: 103205 - DNA, 552 bp, Homo Sapiens
  misc_feature (119)..(127): n is a, c, g, or t
ctatgttctcggatcgttattacaaaagaaaagaacattgttctctagaaatatgaaagaaaaagaaaagaacaaggtgttactcgagcatagttttttctcaattatctgagttgtgnnnnnnnnngtaatgaatagtggagcttcctcaaaacagattctgagcgctgtcagtagttaacagtaactactgtggtggaattcctgtgtggatctattttggcactgtgttacgtaattatttttatcttaggatcagatctgaatcattcagagccaatgtcttcagggcactggtgtgactccaggtgttctcacatgcctgtctttcttctcagatcactgcccaacactgaatctcaagtgatggacctcagtgcatatgaattcggggcctatatgttttgtaacagcaaatcctaccccactggtgaaaaagtctaataacctgactgattttctattttgatgagccctcaattgagagattatattgtggtagtaggttacacctgcccaccatgtgaaaaacaacgtaacgatcgagacata

SEQ ID NO: 103206 - DNA, 673 bp, Homo Sapiens
gcctagaggatcccctatgtctcgatacgtaatgcgcactagccaggaataagcctttgggcattggtctggtctagagcttttggcacctggtcgctgggagccctaagggtctgtgcagaggccctggatgctgccatgagaggctgatgggtcgggtggtatttgggggaagtctctagctcccctcttcctgctgattcttgcagccctactgtcagttactttatatatggagagactgtgtaaaatttcattgacattaatagttcaaaaaatgttggaatgtatctgacgtagcccattaaatgctgctgaaagaatgctcatctcaaatcagattaggagggagccattaagcaggccacacatgaatagggctcttgacaatgtacacagctctttcgtattgcctaccccatttcatctacctgagaggcggataggacggatagtcccattgtacagttgaacatgaaggtttagagccactctgtggtaaagctcagatctgaactcagactttctgccttctgtggcacgggcttctttttatacctagagtcccccggaactaggtagccctgggtggctgaaagaagactctggctaggaaaagcctaagctactctgctggcagggcccctgatacccgggtggctatgcatgggtg

SEQ ID NO: 103207 - DNA, 524 bp, Homo Sapiens
  misc_feature (483)..(483): n is a, c, g, or t
tatgtactcggatcgtatatctatacgtatatatccaaagtaaatgaagtggagattggatgtcatcagtagcccattggatatatctacaagaatcagataacaaacgggtattatgggggagagatataaataggaaatcagtgagaaagaagcggtagtaacatcagtgtgggagaatctatttataatagggttaacctctggtaccgtaagggaccttaaatgagcacagaagtctggtctccaaagtgagacctaaaggaagatgatgccaaccagagcatggaggacagacgggaagttttcccctggcacaggccatcagtaatcagctgtggatatgcctatgttaattgctctggtaaactcgtggtgctgtttgggctcttctcaactagttcactttttaaaaatttaagcacctcattaaagaaacccttttagatgtggtaaagcgaaactctcactaggtatgggccnctactaagtaacgatcgagagataggggatcctctgatcgc

SEQ ID NO: 103208 - DNA, 594 bp, Homo Sapiens
  misc_feature (544)..(544): n is a, c, g, or t
tatgtctcgatcgttagcagaacgatgtgtcgtgtctcaaagcaccttttcatgcggctttcttattagctccacccagaagcccgggcttagcaaagccagtctcgcgaggcaccgtggaagtccagagtggagtgcagctgggttggattcattcctgggcttgatttctggaatcctcctagattccttcctgggtgtgagttctggaagcatgggtttcttgaggcgattatgctgtaggtactagagagaagctactgcctttgagagaagggtaattacgcaggatttgaaaggagacaggaagctgtgggtgccagaaatagaggaatctggttcttttatttgtggcaacatccagcaaggtgggaggacacctgaggggagtgccttttctggtgcaccatggaggctggtccgtaacagtgggaagctgcccatcttgcagaaggattcctctgcccaagcttggaatggccagacttcgtgggccatgtgaacatgagatgatatcttgctctgtgtggcttcctataaattnggggggagatgttgactaggaggaggctccaccattgggttttcattatc

SEQ ID NO: 103209 - DNA, 337 bp, Homo Sapiens
ctatgttctcgactcgttaagtctgatgaggaaaaatttctaaaatagtggggaaaaaatacagatggagcatcccaaatcgaaaagtgctccaaaatttaaaacatgacactcaaaggaaatactcacggggacatttcagatttctaggtccaggatgcccaaccagtataatgcaaatacaggtattccaaaatctgaaaaaaactgaaatccaaaatacctctggttccaagcatttcagataagggatactcaacgtgtatccccaaaatacactcttatcagcatagaaggatgcacatacttttttggaattacaaaaacgtgaacgtac

SEQ ID NO: 103210 - DNA, 309 bp, Homo Sapiens
tgaacggagggaacaaccccatccaaagcagacacagaccccactatatcaattgtaccattagatgtgaatggagtgaacaaccccatccaaagcagacacaagacccagctatatcaatcgaaccattagatttgaagggagtgaacaacccaataaaaagcagacacatatccagctatatcaattacatgtgaatgcagtgaacaacccaatcaaaggagacgcagacccagctatatcaatcgaaccattagatgtgcatggagtgaagaacgcaaccaaaagcagacacagaccactataacg

SEQ ID NO: 103211 - DNA, 865 bp, Homo Sapiens
cctagaggatcccctatgtctcgactcgttatacatagcccacgccagcatatcaccgtcacttacggtgggagaggaatgctgcttcccactcatgaggtttccttctgcatggggggagtgccagtccggtataacatttctgccttctctccccaactccccctggggagaaggtgaggcttctcttagtggggaggaggagagaggaatggtatgcctcactcatctcttttccctttcttcccatcttttagaatgaggctctagtcctcaatccctggagttttatagtacaagaccctcacataaggaggcttaaggaggtcaaaagctacctgttactgggtgggcaagtctgactaattctagagtttagtattgaaaaaattgtgccacatttaaatctaaaccacatttgccaaaaccagttttatcagaattaaaactgatttattttcatcatctgccacttctttgctcaagtttcctcaaactcccaaatccacaaccatgacagtaccagttctactcacataccattaagtcatcagctctgccctcaagagtttatgttttaaagtttgattttgacattctgtcacttatttcatttctctcatgcaccatgaattttctcctaccataaagtggaagagtaaaaaacccaaacccaaaaccagaattagctacccaatatctactctgactattaagaatcttgctaaaatatgctccacgtctcctaccctcatccttgtttctcagggaccaactcctagtcaccatctttccattctttagataaaggccatgtgaaatattcaggaaatattacatacactttcccacctaacgaatcgag

SEQ ID NO: 103212 - DNA, 381 bp, Homo Sapiens
  misc_feature (309)..(325): n is a, c, g, or t
tgaggatcccctatgtctcgatcgttactatgttctcgatcattagaattaaataaaagattagaaattagaatcaagtgtgcagcactgtggcaaagctctcattccccattccctcggttttcacagataccctggaaattgaacctgaaggataagaaaaggaaggcttgtactagttcatatacacagccagcactgagtccggaacttgaacccaggtctatctagaacaaaaacctatgtttctccactccgtaatgtagttctctcaggtagttctaagtgggagatacctgctcccagacnnnnnnnnnnnnnnnnnacattagctaaacttaaatgaccatatgaaatgttaccaatactaacgagtcgaga

SEQ ID NO: 103213 - DNA, 149 bp, Homo Sapiens
cagatgctaactaaaaaaacccccaaaccataaaacaaacaccaaactttttgtgatgaaaaaaccccaaccctgaaatataccaaagtggaaaataatgtaatgaacttccatgtacccatcaccccacttcacgatcgagacactag

SEQ ID NO: 103214 - DNA, 704 bp, Homo Sapiens
  misc_feature (481)..(632): n is a, c, g, or t
tatgttctcgatctgttacatcattaggcctaaacagatgcaatgccaggatgtttaaaccaagcaatcctgacatttacacaatcaggcctttctacagtcagggctcggaaatctgtgaatctaatcatagcttcatacccatggttctggaactggtttagtacccctaaaacacttcgaaactggtcagcatctatattataatatcactgtagagctaatcagtactaaccttttaagttaaagactgagttatgatctttccacaacgaagtgccccaactagacacatccacacgatttattactatcatatccataatcctatcaccatttcaattaaaaatttcaaaattcatctacccaacaaactcaacactaaaagctttggaaatatagaaacatgaaaccccgtaagaaataaaatgaacatctctttcattaccccaacaatagtagaactgcctgtagttattcnnnnnnnnnnnnnnnnnnnnnnnnnnnnnnnnnnnnnnnnnnnnnnnnnnnnnnnnnnnnnnnnnnnnnnnnnnnnnnnnnnnnnnnnnnnnnnnnnnnnnnnnnnnnnnnnnnnnnnnnnnnnnnnnnnnnnnnnnnnnnnnnnnnnnnnnatcatctatagtttctatggttagggaggggttattaatttcatgttgtataccgaatattaccgactcgag

SEQ ID NO: 103215 - DNA, 356 bp, Homo Sapiens
cctatgttctcgatccttagatccataaaaggttcatcagataacacaatcctcaagacattgtttttattctcctcagtttttagaaatgtacttaacttattcagaaatgaaactataagagtgtaaacctgagcagccataacagaattacaagcttatagcttctatttcacatctgcatactataaatatacattttttggcaacaggttctcactctgtcacagaggctggagtgcaatgggacaatcatagcatactgtagtcttgaactcctaggctcaagcatcctcttacctcagcctcctgagtagctaggactacaggcatgcaccaccatgcccagctaattt

SEQ ID NO: 103216 - DNA, 537 bp, Homo Sapiens
tatgttctcgatcggttactgcatcaggacggctatctagtatagctcatatttccgggtggtaaggctcaaaacacaggaattccactccaagagatatttggcccctcaatccctacaaagtgtagtctaaacaaacaaaagggtaataaaaaatggaaaaggaagatataaaaagaactcaatagcaggattctgactacctctggagaccacacactatcattattctgacggtcttaaatacaacaatccaatatgccccaagatggaaatctggtatcgtagggaaaacatgggctgcaactgtcagaaaagttcataatcttaaacataatttatgccattggccagtcacaaagacatttactgaacagaatttttgagccattggtaaaattaaaatgatggatcaatttgaatagcaaccttcatgatgaagaaattaggactctaggtatgaaaagcatgttcctttggtgttaataagttcaaaggagagaaacattctgatatatgcagataaaaatatggcta

SEQ ID NO: 103217 - DNA, 618 bp, Homo Sapiens
ctatgtctcgatcgtcactcattcaagggtcctgcccttcaggggaccctattaactatatcctccggctcttaatgaggcacgggggaatttacaacatttaacccaaatactttcatccaaacatatttattcaattattttggcttccatcaaagcaaaaatggcacgggacaaagttaagcagtcaagcaaagactttatcaaggctatggtaataggatagagagaccagaactcagtctgagctccactctgtggaaacaaagggtgagagggttttaaagttctgtggtgagctagaggaaaagtatgggaagatgtggagggaagtcatagaccaatggtgttggctaatggactttatctgaaagaaaaatacagttctcatatcttaatgacgaggaagtagtttggcaactgggagcaaggcattcactgaagttaggctcctaccttcggacacagaaggggaaatgtgctaatatcttccttgatgattacatgtcaaagtgtgagatataactcttttaaaaagcctcctgccatctgtaaaacctaagctccaaaaaaaaccctatgatccactaaaaggcaaatcagctctcgtatacgacg

SEQ ID NO: 103218 - DNA, 299 bp, Homo Sapiens
gctatgtctcgagcgttagagaaagtcctaagatattttataaaatcgattacaaatgcttcgtaaagttcagtcttcaggcatcggaaaaagggttaagtataccatctaaataatcccgcactactaaataatctccaaggcaggagtctaggtactgcaaagaccaagttcacagatcaccgaaaggaacccttaactcacaaacagtccctaaaactgtggtgtaaaacaggggttccaaaattcagctgcatttcagtatggtctgcagcagcttctaaaaaatcagcatctcg

SEQ ID NO: 103219 - DNA, 569 bp, Homo Sapiens
cagactgctcagcagaaaccttgcaggcaaggttagtataagacgatataaccaaagtaatgaaagtagacacctgtcagcccagaatgctatatccagctcaaggttccgtcataaatgcaggagaaataaagtcgtccccaggataagcaaacactggagggaattcatcaccactagatgaatcctaccagaattgctcaagggagttctaaatctgaaaatgaaagaacaatatttgtcatcataaaaacacatcaaggtataaaactcaattataagaaaacataccaataggaaaggactcaaatggtaccactacagataactgccaaatcaccatagccataagagaaaaggaaagaaataggaatacaccaaatcaaaaaaccacagtatgacaggtacagaacctcacataccaacatatcaataaccttaaatataagtggactaaattccacactttataaaatatatagactctatggattaaaaaatatcatccacttatatgctctctacaggaaactcactatacctgaaaagtcagcacaccagactgagtc

SEQ ID NO: 103220 - DNA, 404 bp, Homo Sapiens
tacgtctcgatcgttagaatctgaaataccaaaaataaataaagaggctagcttgtatatatagtcgaagaattttctaaactagaaaaatcttttatgtttctcaactaccttttatcttctgaagaatgacaacatgcattctactataggagaggttgtgggagaggtcgttacctttgaaatcacgtcctgcatctcatttcttggatcaaatgttccatcatcatagcgcaaatctatataacatctgtgctgggttggaatagatgtatatccagtaactacgaacatagcaaatatatattaaaatcacgcatctctcaaagggggcagatcaacagccactaactttattaaatacttattcccaaatactaaaacttttagtttaacaaaaagca

SEQ ID NO: 103221 - DNA, 131 bp, Homo Sapiens
atgactaagttctaaggaagctttaccttggttttgtagcttacgatctattaatgtaatttgactatttgaagtgaaaaaagttgattgtgtgaattaacgatcgaaatagtaacggatgcgagcacata

SEQ ID NO: 103222 - DNA, 294 bp, Homo Sapiens
tcgaggtcgagccggtaccctatgtctcgatcgttaggagagggagaatgtggtgaggtgctgtagttatgagattggattatttttccctgaaaaaaatctgctggtatcaactcaatgaaatgtgtaactccaatggtacagacaagcattcactatcctgcagggacaagccacttttagagataatagggcaatacagatcttacttaacctctcccacatctaaacactaaaactgctgaagtggcagcaaattacaacaaaaaaattactatgctaaactaaatgcca

SEQ ID NO: 103223 - DNA, 294 bp, Homo Sapiens
caggagttcaaggttacagtgaactatgatggcgccacggcactctagcctggcagcctgggtgaacagaaaaagactctcttaaaaaataaataaataaaaaagagtctggtctaaagaattctgaagcgggggtcccctgatgtatgtaaaactccaaaaattttgcgaaacaagatataacagatgaattaggacctaaaacttaaaagaaccactgattagggcaaatgccctaaatttacacacaaaggacctgcagaacagcaggaaggtctccaaagtgcttctcaa

SEQ ID NO: 103224 - DNA, 165 bp, Homo Sapiens
ctcgactcgtatctattttaataccactcctctccccatcttcctgcgtcataggagcttaccattttagtaaatcaggcaattttatcatttattattagatactaaaaatgaaaaagatgcaacatagaccaagttacatcaaggctattagaaaataactga

SEQ ID NO: 103225 - DNA, 474 bp, Homo Sapiens
tgatggtgtccacacttcatccatgtcccaacaaaggacatgaactcattcctttttatggctgcatagcataccatggtgtatatgtgccacatttactttattcatgctgtcatagatgagcattggggttggttccaagcattggctatggtgaacagtattgcaataaacatacgtgtgcatgtgtcttaacaggagaatgattcataatccgttgggtatatacccaataatgggcatggctgggtcaaatggtataacgggttctagatccttgaggaatcgccacactgttttccacaagggttgcactaattgacacgcacaccaacagtgtaaaagtgttcctatttctccacatcctctccagcatcggtggtatcctgaacttaaaatgattgccattctaactggtgtgagatggtcatctcacggtgggtaaatggccatcacggcccaaagtaattcata

SEQ ID NO: 103226 - DNA, 199 bp, Homo Sapiens
acagtatctactgctaagtttctaaaaggtcttcccaggccacctgcatcagaatcctatgggctgatagttaaaaatgaagtttcctggacaccgccccaggcctactgaatcaaaatcccactaaatttatctattgccttaataaaatagtgcttttactcttctttctttttaccctagctctctgcgttatttc

SEQ ID NO: 103227 - DNA, 254 bp, Homo Sapiens
agctggaagacccagaagttaagtgacttgacccaaggttacctagcctgttggtggcagtgctggaactagaattctggatagtgagggataaggagctattataataaaatatggtatatattccattaaatggaaataccagctcttgccgattgtgaaatgtaaaagctacctttggaatttgacaatgatagatgccactcccatataaccgatcgagaacctagctagttctcgaatcgagaacctac

SEQ ID NO: 103228 - DNA, 616 bp, Homo Sapiens
  misc_feature (379)..(527): n is a, c, g, or t
tatgtctcgaatcgtaattgatgcagttaaatcatcaccaactccaggaggcttatctcagtcctcttctcctccttctgcagttaggggcagacacctaccctctcccactcccttagcagttctgtacttacatctccaggtacttaacatctccagatggcagtgaaccattggtcatttttcttttctagcttatgtctttcatctccgtattctcagggctgggcacatggtaataacattcattgcttcgttcacttattcaagaggagctctgttaacaagttagatccatctcctattcttacagaccttataatctttttaaaaatcaattttatttcatttatttgtggagacagtctcactcggtcannnnnnnnnnnnnnnnnnnnnnnnnnnnnnnnnnnnnnnnnnnnnnnnnnnnnnnnnnnnnnnnnnnnnnnnnnnnnnnnnnnnnnnnnnnnnnnnnnnnnnnnnnnnnnnnnnnnnnnnnnnnnnnnnnnnnnnnnnnnnnnnnnnnntggggttcaccatgtgggccaggctggttcaaacttctgatctcataatctgtcgcctcggctctcaagtgtgggatacggatgagcat

SEQ ID NO: 103229 - DNA, 228 bp, Homo Sapiens
caagcctgggcaacagagaagcccactgatcactaagtagagagatgaccaagcctgggccaccgagatcctgtctccaaaccaaaacctatattgtgacccacaccaataaaacccacataccaccaaagacttccccccaaaccccaaaaatggaaaaaacttctcgatatgctgggtgtggtggctcacaacctgtaatctcagcactttgggagggtgagaccg

SEQ ID NO: 103230 - DNA, 446 bp, Homo Sapiens
  misc_feature (198)..(250): n is a, c, g, or t
aaaaatatgtatatatattatcatcactgccatgtagagaatccattataggagggccagagtggaaaccgggaaacagtgaggaagtgttgcagttgtcccgggaagaaatcatggccgcatggactaaggttgtggccctgaagatggaagagaatggttaaataggaaggcttttgagaaggttaattagatttnnnnnnnnnnnnnnnnnnnnnnnnnnnnnnnnnnnnnnnnnnnnnnnnnnnnncaccagagtgaactctgtttctaaataaataaataaatcactgttgtctgctataaatctaaagaaaggaatttttaatttcattcctggctcaggaaaatgaccggaagcaaatgaaaataaataacatgggacctaaccaatgactgcttctgcacagccagtagaaataacgatcgagacataggggatcctc

SEQ ID NO: 103231 - DNA, 422 bp, Homo Sapiens
  misc_feature (169)..(221): n is a, c, g, or t
ataggctgtgcagaagcatgtgcgttggttaggtcccatgttatttattttcattggcttccggtcattttccggagccaggaatgaaattaaaaattcctttctttagaattttagcagacaacagtgatttattaattaatttagaaacagagtttcactctggtgnnnnnnnnnnnnnnnnnnnnnnnnnnnnnnnnnnnnnnnnnnnnnnnnnnnnnaaatctaattaaccttctcaaaagccttcctatttaaccattttcttccatcttcatggccacaaccttagtccatgcggccatgatttcttcccgggacaactgcaacacttcctcactgtttcccggtttccactctggccctcctataatggattctctacatggcagggatgataatatatatacatatttattagg

SEQ ID NO: 103232 - DNA, 258 bp, Homo Sapiens
acaggatcccgtatgtctcgatctgttaagacaagtagacccatcacactcagctacccaggaacattttattttatcaagggtaacctgatcatcgtttcctcaaacaattacatttgatgctggtcttgtgatgccctgtggggacctacaaacccaaaggcaactatgcctcttcagtgcaagtaacatacgaggacatagtgaatggagcaagagacttcatcgactagagacaccaaacagcaacagcgaaca

SEQ ID NO: 103233 - DNA, 664 bp, Homo Sapiens
tatattctcgatcgttaagctacagaccgatacatgtcgaggatgatgtggatagtggtttagtatatcaggttatctttgtaacatttactaatcttttgtagatttcaaagtgacttgtttttttcttcatatccttgtccttctcaaaactgcagcgttttagacatgtgtttctcaaggttatcagctactcttcccaaggagaagctttcatagattagctcctctggttccggtgctgctcaggacatgaccctatggagttactcagtttcagagcaggctggtgggtgatacttaccttagccattcctgacagggaccttgacagtgggactcagaacactcttatgtactcgatttggagtcgctaataatgggcgaggaatttcttaattctattggcgaggttccggggcttttctagtaaggagggaaaaatgcatttctccaaagatagttctagagaagtgcaaaacaacagtggtgcaatggacagaattatggtaatcatcagagggttttccaaagtatctattctgcaggattatactcatctggttctcaagttctcagttgctctgtctcaatcattacttactttcatttaataattatttattaaacaagtgcaactacatcctagggactgtgctaggtg

SEQ ID NO: 103234 - DNA, 504 bp, Homo Sapiens
tcagaggatccgctatgtctcgatccgtgagagtactaggtcttagtggataaggtaaaactatcggtggctgtaacaagggaaggtctgacaagtttagccatggaacacctaggaagcttagtcatttatcttttcagaagagtccttcctatttggtgttctggccctttagtaagtgttattcatgtgtggagaagagagctgaagcttacacatggctaaaaatctgaactccggtaatctaatcttcctgcattggttcctaaaactggaatgacttttctcactgaatatctaatgactaataagagagaattctggtccctagtccctgaggttattggttaagtggattggtacaatcagatattcttatatatatgtttatgagccatttcctattgggaggcctttcacagtatcagtttgtatgtatcaataatgccagccaatgagttttcattttccaaataatggtaaatgtcacgatcgagcaaatag

SEQ ID NO: 103235 - DNA, 409 bp, Homo Sapiens
tatgtctcgatcgtaggtgacttacggatcaacgtataagtagtgaccccgttaacggtaggagttaattcatacgtggtaaagttctccagtatgggtattcatggatcttaattctctccttttttaaagagaaaagtggcagacctgaatatgaagaggagcttctcttcagtcatatcttaattttccatttagcctacagatgcatgaagtagagaatggacatcatagctacgggcagcctcggtagctgttaagaagagtgttcactaatgagttttatataaacaggttctctctcaatttgggattcgggtagtagtctttacaatcctgaaatgtgcatgctgcactaccccaggtataccatggacagtatggggaaaggttctaagtctagtccttt

SEQ ID NO: 103236 - DNA, 691 bp, Homo Sapiens
atgttctcgatcgtgattcacatcgccccggtgaatgtcaccttctcagagaggccccctctgaccatctatcacatcagctttaatgttctgcaccaagatttgaatgcaggtagtcatttgccatttccccccattagaagataagctccatgagagataaacgtcatcttgtctcattcacccttatttccaaggatccaccatattcaaccatcaaatgagtagaaaacttagaaagtacagatgaatatgaaaacgaaagcaaacctgaccataatgtccaccattcagcgagacccaaggtcaccacatgcctgcaagtcctcccagtctgtgttctatatacgcatatattaaacattggggatggtaatattgacagtgtggtgctctgcctttatgtcccatgaagggcgttattctaactaattttagatggagagaaaagtggcaaaatagtacaaagaactcctttccactccgggccctgcttctcctaaagtggacatcttacgtaaccatagtataatgatcaagaacaggaaattaatatggatacaatgttcttaactatactacaaaccttatttaagtttccccagtgttccattaatatcctttctctattccaggagcatatacaggatcccacatggcactgaagttgacatcttatgtaaccataata

SEQ ID NO: 103237 - DNA, 171 bp, Homo Sapiens
ggctgagatcacgggcgtgagccaccaggccgggcctcctatgactcttaattctgcagatggtcagattatttagacctcaggttgcctcttcagggtataacttaagtgatgacagctttctaaactttcaaagtcaatgaccacttaatatatgatgaaaatggggcc

SEQ ID NO: 103238 - DNA, 530 bp, Homo Sapiens
  misc_feature (64)..(65): n is a, c, g, or t
tgaccagtcatggaggcctgggagaagaaggtggagcgcatcgagaacaacccccggcggcggnnccaaggagagcaaggtgcgcgagtactacgagaagcagttccctgagatccgcaagcagcgcgagctgcaggagcgcatgcagagcagggtgggccaacggggcagtgggctgtccatgtcggccgcccgcagcgagcacgaggtgtcagagatcatcgatggcctctcagagcaggagaacctggagaagcagatgcgccagctggccgtgatcccgcccatgctgtacgacgctgaccagcagcgcatcaagttcatcaacatgaacgggcttatggccgaccccatgaaggtgtacaaagaccgccaggtcatgaacatgtggagtgagcaggagaaggagaccttccgggagaagttcatgcagcatcccaagaactttggcctgatcgcatcattcctggagaggaagacagtggctgagtgcctccttattacctagcctgactacgatcgagacatag

SEQ ID NO: 103239 - DNA, 259 bp, Homo Sapiens
atagaagaggtatgaataacagaccacattcggggagtgaaagggatttgggtaaatggcagcttcagacatgcaaaggatggtcaggagaaacaacgggaaaaactgaaaaaatctataaaggattttggtatgttagaatgtatcaaccggatcaatgagtaatgtagattcattagggtattttaagcatttaaagaacataatcggtcattattttagatattccaaacatctaaacatgacaaaggcaaacaag

SEQ ID NO: 103240 - DNA, 631 bp, Homo Sapiens
gcagactcgctgtcgctgcccttcgcttgtgtggcgacgtgcctcggcccgggccccggacccacagcagatgcccaagagagctgctccatgcgctgtggcgccctggacgggccatgttcctgccacccgacgtgctctggccttggcacctgctgcttggatttccgggacttctgcctggagatattgccctactcaggatccatgatgggcggcaaggactttgtggtgcggcacttcaagatgtccagccccacagacgccagtgtgatctgcaggtttaaggacagcatccagaccctcggccatgtggactcctccgggcaagtgcactgtgtgtcacctctgctctatgagagcggacgcatccccttcactgtgtcactggacaacggccactccttccctcgtgcggggcacctggctggttgtgaccccaaaaaagttcaatgatggagaagagcgagttggtgaacgagacgcgttgcaatactacggcaccgccaaaactcaggcaactcagcttacctggcttgtcagtcgtgccacgcgacatcacatgaatgtgggtacgaggagaaggaatgcctatcacgggtggactgacgtgtcgtctgaccctggcaaa

SEQ ID NO: 103241 - DNA, 502 bp, Homo Sapiens
gcggccgggatgacatgtcgcggtggtcagtcagtcaacattagaggagtgtaaatggttttaatgttgcttatctcgaggccagtggttgtttggctgctgggacctcagttttaaaaatcacctactttgtttttctttcacctctccactctcaccccttcattccttccctctgtagacactcctctccggcaatgcatgtttatctaattatgctcttgtttaagaaaccccagaggcgaatcttgaaacaaaccaggcatggagcctctgtggaatactcccgcttagggggagtcatgaaccattagtccaccaccattgggccaaagtcaccataacacccatcagacctccagaccagcaatgacctgagacagccatggggacaaagacacagactctgtgccctgcaccattcccatatctcccatgcccagtttcgctttaaaacccctatggtcaattggaaaaggtaagatgctcctttagacgctcg

SEQ ID NO: 103242 - DNA, 508 bp, Homo Sapiens
ccccgactagcccgacaggaagaggggtggcgtgacctgtggatgctgaggaagtgtcggtgacaggaagaggggtggtgtcacctgtggatgctgaggaaaggctggtgacaggaagaggggtggcgtgacctgtggatgctgaggaagtgtcggtgacaggaagaggggtggtgtgacctgtggatgctgaggaagtgtcggtgacaggaagaggggtggcgtgacctgtggatgctgaggaagggccggtgacaggaagaggggtggtgtcacctgtggatactgaggaagggctggtgacaggaagaggggtggcgtgacctgtggatgccgaggaaatgtcggtgccaggaagagtgggtggtgtcacctgtggatgctgaggcagtgcctggtgaccaggaagacgggtggcatgaccttgtggatgccgaggaagcgttgctgacaggacgacgggtggtgtcacctgtggaagctgaggaaggcgcggtgacaggaagat

SEQ ID NO: 103243 - DNA, 356 bp, Homo Sapiens
accaaccgtccagataacgccctgacgccatctctccggtgcagtggtccagggtcacacggtggcatttctacacggtctctccggtgcagggtccatggtcccacatggtggtttctacagactgatgccctgacaccgtctctcctgtgcagggtccagggtcccacgtggtgtttctacggatgatgccctgacgccgtctctcctgtgcagggtccagggtcccacgtggcgtttctacggatgatgacttgatgcccgtctctcctgtacagagcccagggtcccacgtggcgcttctatagatgatgccctgacgctgtctctccggtgcagggtccaggttcccacct

SEQ ID NO: 103244 - DNA, 177 bp, Homo Sapiens
gctcggtaccccttaccgtctgtctgcttctgtagaatatcagcaccatgaaactatgcaccttatttttgatcattgctgtatctctagtgcctaaaaagtgcttgagaacatagcagatgttcagtaaatgtttgtggaatgaataaaagaatatcatcactgtctttttttcat

SEQ ID NO: 103245 - DNA, 543 bp, Homo Sapiens
ctgggctgggtatggggagcccagggtgcctgtggtagagagtgtaccacagggggacagagtcattagaacaaagtatggccaggcttgagcccaggtggagcagcaaagcctggaggcccggcagtgggacctggcagtgggactccggggaaggctttatggcccctgcactgggggagagggggcagacaggagggggatgacactgaggaggaaggtggtcttgagaggctcgcagttaccaggggagcagagctcccacctgcactggggaagacccaggagatggaaggcaggccctgagcggggccatgggtcgcgggcagacacaggagatgcctctggagcttgacccagtgcctgggagccagatgccctctaacctggtcaggagctcaggcgggtagaggtctctgttgagttctgctggaatctggtgacccagaaagtctcggcgagagggctctgacgctagcacttcaccacacgtcgcaaattcttacacgggcccttggagcgcacatggaaccggagccctga

SEQ ID NO: 103246 - DNA, 596 bp, Homo Sapiens
ggtagtctggagctcgacgttcggtatcagggtcactcagctgtggccacacaacgagaaacagcgacagattcgacgcagagctccggaagtgcctgaggagcagtggttcttggaaatcgcccgtcctccgcatcacagcctctcaccagcaaagcagcctctgcccaggccctgacgggagagctgcagagggacccaggtgcctggagggcatctgacgggagggggctggacaggtgtctccctgacagacagacagggagaaccacttttcaaagtgattccgaggcagtgcgggaggacacacgttgctgtgcagtggagtggggtcgcccgtggcccccatcagagtccccgtcccccaggacaagtgcagaacctctgtggggccccctccttccacctagatagagaaaaccccttgtacaggttcccttcccggtgtcccgttgtttctctaagcccccggaaattgagtcgtaactatggcactaaccctttccatgggaaaataagctctttgtggaagtccgtaacctgttgccctgggtgaggttcagagcaggggggcggatgaaccagctgggtgtctg

SEQ ID NO: 103247 - DNA, 377 bp, Homo Sapiens
gaggtctagtgggagatcatgaaaagggcatgaatagtgtgggatttctctaagattgtggatattaattccattagactcttatgtgagtgaagacgaagacttcccctgagtaagttcagacagctgctgataacaattctacatcgattcctcaggattgaactatatattcgtgaaaacatctcaattgtaaacgtttctttcaagatggtgaattaaacagagatagcccttcaacaggtggaactcagcatatgctgagtctgaaagggaaatgatgaagttagagaaccatacaacaatggtaatgatttcagaaacatggtgttgagcagataaagcagacacaaaagagtacctatggcatgcagtca

SEQ ID NO: 103248 - DNA, 502 bp, Homo Sapiens
ctacgtggacacctcgacgtgacctggacgacgccgtaggtctccgtgcctctgtggggccaatactgatcacacttgatcctgtgacttctcctccagccgcgtcatcatgacgatggtcgccgaccgctgctcccacaccatacgccagaagtccccaaaggtctcaggcagcggcccctgcgtggcaatgtacgcgttctgacgcctggtagccgtccacgtagttgggcattgatgtaatcactgcccatgatgccttcaaggggctggaggatgacacgggagtggtcataggcgatgacgtgggcatagcggttcttcggctcgttcacttccaggttggaatgttcccatgtgaactgctgtccagggtcgatggactcatactcctgggagagcttgaggctgtcgttggccttgagccgctcggtgtgctcggccatgtctgcgatgggaattggcggggtggctaaggcatgcctggagtctggaagttaat

SEQ ID NO: 103249 - DNA, 624 bp, Homo Sapiens
tcgggagttcgagaccaacctgcccaagatggtgagactcgactctacgtaaaatcttgccatgtgtaaccacatgcacacaaacttttgtccctagcccacttcctctccattctccagaggacgatttcacacctttgcctctctctttactctcagctgctttacaccaaggagactgttccctgctttacaccaaggagactgccctttgtcaaggcccccagcaccctgcacattgctaacccagtaaccacttctcagtcctcatctaacttgaccttgtttgtcatgggagtgtggtcctcagcctacattgccaatcctttcttttctccctggccgctaagagatggagtgccccagggcttgattctcttctctgtctacactcaggccctaagagatttcctccaggcccgtggctttaatgactgtgcctatgttggtgactctttatccttcagcccgttcctttgcctggaaccccagaccggaatccccacgtaaaggtctgacggcatctcgaagttaacatgtccaacactgctacccagatttccacctaaccccagtctgctctgatcattctgggttactctgcatgatctgggatcctctaga

SEQ ID NO: 103250 - DNA, 708 bp, Homo Sapiens
ctccgatgaagggctggctggcttcgccaggctgtgtgtaggcgatcagtatgaggctgcctcatcctacctgttcccccagatctgcatgaaatatgggcgtcagcgctggaaactacggggccgaatggagggtagtggaaagcaggtgtgggacagtgaagaaaccatctttctccctctactcacggaatttctgtctattaaggtgacagaactgaagggcctggccaaccatgtggttgtgggcagtgtctcctgtgagaccaaggacctgtttgccgccctgccccaggttgtggctgtggatatcaatgaccttggtaccatcaagctcagcctggaagtcacatggagccccttcgacaaggatgaccagccctcagctgcttcttctgtcaacaaggcctccacagtcaccaagcgcttctccacctatagccagagcccaccggacacaccctcacttcgggaacaggctttctataacatgctgcgacggcaggaggagctggagaatgggacagcatggtccctgtcatctgaatcttcagacgactcatccagcccacagctctcaagcactgcccgccactcaccagcccctaggcccctggtgcagcaccccgagccccttcccatccaaggcgccttccgcaggcctgagacccccagctctgggcccttggatgaggagggggccgtggc

SEQ ID NO: 103251 - DNA, 584 bp, Homo Sapiens
gatgtgatcgatggaggtgtgggtgggactgttgagaaggtgtcggttgcctgggacgccaggctgatagtgtcagaccctctgctggttcttgtcctctgagtctgggccatccgggaaatggcggctgtctcctgaggagaggcactgggagaagttgggcttgactgtcctgtcggtctccctgcagtggaggcctcagagagggtgggatgaaaggtgccggggacgatcgaagacgccattcctgtgcttactgggatggcaccatgactggctgaggcggacagcaattcggttgttgactgggttgtgtgactgtccctggaggggtttgatgaaaaccttgtcgtctctcctgaggtggatattccttcgcttcctgaaggtgttgtgccactcgccccggatgaggaaggggtagctgtgcccgctgaggtggttcgtgaccctgaggaggccggttcgctggtccgtgtttgtccagcggcctctgtgctctcagcctggtgggtatgggtcatgctgctgctgtgtcagtgaggtgcttacgaggctgatgtccagtgtcctgcctataacgg

SEQ ID NO: 103252 - DNA, 512 bp, Homo Sapiens
gtctagaaagatacatgccagtgctgggatgagtggtaagtgacaaatgtgtggtcccgggcctcataaagttctcagagttatggagggagacagctgtaataaccacaccagtagtgagtcagtacattggtgacaagtgccatgatggaaaaacacaaggtgctctgaaagggtttaacgggtgccttggggaatgaaaagtggcctctcatggctcttagctgacaaggttttggtttcactgaggaaaaaaagcaatcagaagaaacttggttttcttccttggtctagtttggcctgcatcatccatccataccggtactgggctttccctcctgttagtggataaactgtccttgatcctctcctagcccagcccttgctccctgcattccatgccctctcaagaacttgttgaacatttacccccttctcttttacatcatcagtttctctcctggattattcctgccagcatgcaaacatgtcaccagttgcaaaagttttct

SEQ ID NO: 103253 - DNA, 372 bp, Homo Sapiens
agatgatgcagatacacccagagctgcagagaaccccagaccttcggctttgagatccagacttatggcctccaccaccgggaggagcagcgtgtggaaatggtgacctttgtctgccgagttcatgagtctagccctgcccagctggctgggctcacaccaggtggggcctgagcccaggacacccaggtctgggaaggggatatgaccttactcccaagcaaagggggtgagcaatctctcctgaaatcaattcctcttccttttccttctttgagaaggccagaaagaagaatggatagaatctgggctttggatctaggcaaatttgccatgtactgtgtgatcttgcacagccccatctactaatga

SEQ ID NO: 103254 - DNA, 315 bp, Homo Sapiens
  misc_feature (200)..(234): n is a, c, g, or t
  misc_feature (284)..(284): n is a, c, g, or t
cgtgatgctgaggtgatctagaggatcccagatgctgagagaagtagtattatggtagtcattcaacaaggtagaaatcataccaagcatgaagtcacaggaatgtcccaggagtgtgcaaccattggaactgtccatagtaaaatgggccagcttgagcaataaaagtctcctagtacccaggaaatgcttagaggttnnnnnnnnnnnnnnnnnnnnnnnnnnnnnnnnnnngacctgattaaaggaggaggctgatgtcattactctgagaaaagacaatngttttcttcaaaaggaaaaggagctaattat

SEQ ID NO: 103255 - DNA, 175 bp, Homo Sapiens
gataagggaggaaacgaaagaacaaagtagttgcagaatgggaggcaggagagaggttacaacacaggatacaccaggggaaaatagagggacatgagaataccaagactagctagattgtaaatgctttgtgaaataaaagctaactgcctaaacccttcttctagaagaggtg

SEQ ID NO: 103256 - DNA, 687 bp, Homo Sapiens
  misc_feature (399)..(525): n is a, c, g, or t
agaggatgcagagaaccctactgtcaaggaagagtgggtgcatgcttttcttgggggtgagggcaaggcaggacaagggcagaggcaatggggcaagaaatgcagaggtgttgcaccccaggattctaaaaagttagtggcagtcactaatgaacttatctctttttagctcagtggaaaaattgccagcacagaaaaaaagagaacttctctgtctatttgttgtctccaaggaccactttttggtctcagttcgtttgactcaacacggacaaaataaactacacctgacatttgcatggcagtttagagtactggccccttgaagacagtgttggaagatagttatttctattatgcttatcagaaatgttgagaccttttacttaatcattgttnnnnnnnnnnnnnnnnnnnnnnnnnnnnnnnnnnnnnnnnnnnnnnnnnnnnnnnnnnnnnnnnnnnnnnnnnnnnnnnnnnnnnnnnnnnnnnnnnnnnnnnnnnnnnnnnnnnnnnnnnnnnnnnttggataaagaaataaaaatcaacatgttgtgtaacattttatgtgctatcagtaaaattaaaatggggtaaaatgacagagtgatggggttgggaatactacaattaaatatgtagtggaccacgggaagcatcttaggaggggtatactctgcatcatct

SEQ ID NO: 103257 - DNA, 675 bp, Homo Sapiens
ggcatctcttaggcctctgtgaacatctgtgccatgtgtacaggccacttcctaacaggcccaaagaggatgtgttttcataaaagttgtaaacacatttaagaaattatctgaagctcataagccacctgatttcctaggcaaggcctctcatcacattaaccatattttacgtaatgagcagatgggcagaataaaaccagagggaggagaagtggaggaaaaggacagtaatgagtgatgaaatggaaatcacgtgattaatggaacatagattttaaaaagtaatgaagagtttatccctagggtagaaaacagggaacaacaaaaataagtaccacgttgtcaaaacagtaaaataagagagtagaacaaagaaacagagcaagacaaagaaatgctggctttaggataggccttattttaaagacacaggggatttgggaacttaccatttggcagctatttgtttaaacaaaaataaatttatgttgcctggtgtcctaaaagttacttatgacaacggtcattaatagataagagcctgcagctatccgggtacaccaacaccagccttggtgtttgttcaacatttctttctgtgggaaatgtaatttgtagcataagagttcacaagaaccctcagctccatggctccatcactaatgaaacaag

SEQ ID NO: 103258 - DNA, 502 bp, Homo Sapiens
aaacaaaaagggagtaggggtctggcaatgtggtccaggctgaacgggcctcaagtgacccaccttagcctcccaagcagctgacattaacaggcacaagccagcgcttcgggctctctatctctgtgactctgcggcggcttatatggacttaattctcaggcttctcaccccatatgcccccgtgaaattgccggagttgggggggactcagggttgaaatcatcaaagcacccaggtgggctcctaaaaaaagccctgtgaggggcttggctgggaaccatcaacagggtccagagacgactgacagactatccaggagaggaggggccagatgtgcccacatctgtggtaccgggagaccggggtcacttgacatgcagcccaggcacgacaggacaagcccgtgttcggtgacctcacagccagactcggtgggacacccgcggggacgggggctcccgggcaacaggctggcgggggtcccggaaagaatccccaa

SEQ ID NO: 103259 - DNA, 524 bp, Homo Sapiens
  misc_feature (59)..(82): n is a, c, g, or t
ccagatgatgcagagacgatgccgtaccgctgcactccagccggtgacaatgaactctnnnnnnnnnnnnnnnnnnnnnnnngaatctttgacaggtgctctcaaatgtaggttgctaagaactttggagattgtaacattggaataaagaaaaaatgtacaggactcatgaagagctaaaatgttcacaaatatcaaggaaaacaacagttaactgaatggactgaatgaatagacaactgaaataattttttgaactttttcttggaacattattgattcttgttttgtttttcagagtcaaatttttagctacttacagcatttaataattcagtaacgtatacttctgtgaataaaattttaagtatatttgtctctctcattcttcctggcttctccagaatctggaaactaattgtgagtattttaacttatggcaatatagttgtttgcctccgtgcattaagagtctgttttcttcttcaacaggatgccattggagaaactgggtgttttaccaa

SEQ ID NO: 103260 - DNA, 651 bp, Homo Sapiens
  misc_feature (556)..(556): n is a, c, g, or t
ttagagcatgagagacatcctagtcactggaccctccttccttctgcaaggtcggctcactgatattctgtctatagtcccctcagcctccaaaaagaagacctccgcctgccaaagaccctcttttaccttcttcagctctagatccacgggggcggccatcttggtgcactgtaagcgcctgcgcagtgggagttggactgaaatagggtggggaagggcgcgtcttactttgtgcgccggtctttcttctgcgcctgcgcatgagttggactaaccgggcttcttatctttctctgagaattgactcctgaaatatttgggtttcggattccgtgtcttcactacctgaccggtcaggtctggcttgctcctccgtatcttccagacatagcccaacgcgcagatttcccatgtggctttaagcagtttgccagctagcttaatatgtgctgctaaattgagatgtatgtagatgaggtcaaaccctcatcagtcgatcagtccttcagctagtcgctgtgctctcagggatgagtaagagtaagtccagaanctcaggcatgacagtttgggaaagactatttggaagcttggctgggggtgtgcttccaaaacgaacttatactttcaaaaggttccaaagaattc

SEQ ID NO: 103261 - DNA, 389 bp, Homo Sapiens
agaggcagtgcagagaccaaggcagatcataattgacattttcaggaaagagcaaagaagcctgcgtggctgcaagggagtgacctgggaggaagtagtaggtggtcagactgggggagggtgctgtccgcagggagtcatttcatgtagactcacagaccactgaatggcatttgaatgaaatgagaacaggtacttcatgtcttcccaactgctaaacctgggaggtaatattcccttaaggagtaggcttctcaaagggtaaaatctttagtactttgttttgtgctgcagaattcctacccggggcaagaatgctcacatgaagcccagaggcatggcttgaacaccactgtagatatcctggaagtagtttggtagaagaaaca

SEQ ID NO: 103262 - DNA, 539 bp, Homo Sapiens
  misc_feature (129)..(192): n is a, c, g, or t
gcggtgtctggacacgcattgcagagacggggtgtgtgtgcactttgtgcagcgacgggtgcgcgtgactccatgcgtgtgtgcagagacgggtgcgtgtggacacgcgggtgtgcagagacgggtgcnnnnnnnnnnnnnnnnnnnnnnnnnnnnnnnnnnnnnnnnnnnnnnnnnnnnnnnnnnnnnnnnggacacttgtgtgtgcagagacgggtgcgcgtgactccatgcaggtgtgcagagacgggtgcatgtggacacgcgtgtgtgcagagatggatgtgtgtggacacgcatgtgcagagacgggtgcgtgtggacacgtgtgtgtgcagagatgggtgcgcatgactccacgcgtgtgtgcagagacgggtgcgcgtgattccacgcatgtgtgtgcagagacgggtgcgtgtggacacgcgtgtgtgcagagacgggtgcgcatggctccacgcatgtgcagagacgggtgtccgtgactccacacgtgtttgcagagacgggtgcatgtgaacacgtgtgtgtgcaga

SEQ ID NO: 103263 - DNA, 626 bp, Homo Sapiens
  misc_feature (205)..(205): n is a, c, g, or t
  misc_feature (244)..(244): n is a, c, g, or t
  misc_feature (289)..(289): n is a, c, g, or t
  misc_feature (307)..(307): n is a, c, g, or t
cgcgttatctagaggatcccagatgacgcagagaatcctctggactcgtcaatctattctgtatgtccatatgcttatccttatgccagtaccacacgtgtttaattactgtaccttgtagtaagttatgaaatcaggacatatgagtcttccgacattttaaagaatgtcttccttaatttctgtatatttgtgaattttctangttatcattcgtgttacgtgatttctaagcttcattccnagtgtagtcagagataatgttttattattgacttcagtcttccanaaatttatttgagacacnttttagtgggctaacatatggcctatcctggagaatctatacttgagaagaatgtatattctgctgttattgggtggaatgccttgtatatctctcttaggtctactttataattttgttcaagtcctctgttacttatcgatcttctgtctaggtgttctgttcattattgaacgtggttcattaaaagtctccaaatatctgtaggccacagttggtggggacaaaaaagtctccaaatattttttctgcacttctgtcagaacttgcttcatgtttgggggctccttgttattgcatatgtcttttaatagcttga

SEQ ID NO: 103264 - DNA, 573 bp, Homo Sapiens
  misc_feature (451)..(520): n is a, c, g, or t
ccctttctcactcatgctttgccatctctacatctcaagggtgtgcttggcaggttggtgccctcttcagtgccggctcttcctcatgtgttttctaggccgtactacttccttgatttgagtagtcagccctatcccatttacgttctgtcttccagaaatgtatagagctctttctttcaccactggttctttttcagttctcttcattgttacagagctatggctcttttatgcctcttgtcctctcttgtgttagatcatatcttttccagagtaaatccagtctaatgtcccttattcctttcatctacacaaatatatcatacagaaatcttatagacaccttagtgcgtgagataggaaaaaagaaccgactgtcttttcctattccactctcctcacccgcaatgcttcacttctgataccaggtgtgaatgattttccttgnnnnnnnnnnnnnnnnnnnnnnnnnnnnnnnnnnnnnnnnnnnnnnnnnnnnnnnnnnnnnnnnnnnnnnattagagttaatctcacagggccctaagactgtccctattcaatgtcatcaca

SEQ ID NO: 103265 - DNA, 675 bp, Homo Sapiens
aatggaaatataagatcaaggagaaaaggaatgaagcaaagcattttttgttgttaagtaagaacttgcttgtctaagagctcccgaggagggaaaataacttgctcaagtatttttaagtgagatggtaacagctatcgccaatcgctctgtctgtccccgaacaaggaaagaaaccgactgtgtagggtcctgttgggcacctgggccactgttctctgagggctcctcctgggaaaatctggccaaagatttcagccctatgggcagttagaatctgatctctgaataaagtgactaatgggttgtccaccagcatcttggctagatttgacatggtggcttacaaggcacttttaataaaacatgttcctttcagaagggcttcagattgctacgtcctaacacgtagtcacctggtttgaaactggaacagaaatacacctcgccgaaccacctgagccaaaggtccttcactgaaccaacattcactagacagacacattctgtgacccagacctgggtgccactgagactctacccgaatggctcacaatgcatattacagagtaaagacactgactaaggttctagccttatctgcgttggaaaatttataaacaaaaaaagcaccttctctgcatcgaggcactgggggttcgtcagctatcatct

SEQ ID NO: 103266 - DNA, 774 bp, Homo Sapiens
aaccctgtttagtctcattcatcactcagcacagcctctttctgtccacttcaggcccaagtctttgccatggccccacataacgtgtaaattagcttcagggatcaaaaatctttgaaaacccagtttgctgagccttgaaggaagcctttagacccagcttcaatgaagtcacagctccctgagggtcctggtggactggaggcggcctcccaagcctgggagctgtgtgcctggatggtctcactggggtgatgacccaagctcatggctccctctcaacctctaacccttcttaacacagtcacccctggtcccctgagcactcactgaagtccctttgaaggacatttctagtctcctaggatgcctgtttcctccagctgccaccctcatttcaccagccaggtaggcaggttttctagcttcgtgctggcatagagaatccgtgccatagcagctgccaaaaggaaaggtgtgtctgtaaaggccctaactaggcggggacagtggctgctttccaagccccttccctttgtcagctccagggagaaccaaaggccagccagggggcctgtcttctattgggtcccagcatcagggtatacaatgcgctttcctccccttcttaaaatgtatcatatattaggccgacctaatactctgaaagcacatttactctgaaagcaaatgacgggaaaaaagcgagctaattgttcaagtggatttttagcatacattgactgtactttcctgagctgaggaccatcgttg

SEQ ID NO: 103267 - DNA, 241 bp, Homo Sapiens
gagagacctgggcagcaggaccctctcacctcattcctctgcagatgggggttgggggagattctcaagtgtttctcctgtctgagggtcttctcatttggagatttgaagaaagtgctaatgagaaaggttgccttgcatttgtgaagcttggggaagtcatcctaagcgggccacagcgtgcttaatttattccaattccgtaatatataaattatacgtacatgtcaggttatactgc

SEQ ID NO: 103268 - DNA, 185 bp, Homo Sapiens
agacgatgcagataacccaatatgcagaaaacccttgtgtgaaagttgataagaactttataaaggatagatcaagccaacataatctaaaaccactgaccaatcccagcaatactgaaagtgaaccaacctcatgatggtaactaatagaaagaatacagcacctcttataaacaatgctcacc

SEQ ID NO: 103269 - DNA, 331 bp, Homo Sapiens
  misc_feature (241)..(259): n is a, c, g, or t
agatgatgcagtgaaccctcataaatcatggatgagacgcaaggggacacagccactctgaaaaataaacggccgcattttatagtcagacacaaccacaacatggttgtgaccgggcagtcgaaccctcaggatcgacccaagagacatgaaactacccacacaaaggctgctatgggaacatgcacgacactcctccttcctaatagccaaaacacggccgaagggacccaccaagtannnnnnnnnnnnnnnnnnngaggacaaatacatgtaaaaaaaccaaacctgagggttgagtggggaggggactgtccccagaattttccag

SEQ ID NO: 103270 - DNA, 1034 bp, Homo Sapiens
gcggggaaacgtgccactggcttccaggaaccactgcactcagccaatgagcagaagtaaaaacactggagttgacagggccaagggaaaacagcagccctagaaccatctggggcgcaggacagtgagagagccaagtgactggcccttccctctggccagtggggttgcaaaccaaaagctgccttgaggtatagaacggggatttgcccaaagacatttgtgactgtagaattcgtaaccacaaaatgctggtgccggcccacatggcccaggtgacagtgacaacctctcaccctggaatgccccagaggaccccaaccacaacaggtggattatttcagcccaagtaattgtgtccccacacagaaactaccaatcacaacagtgtaaaataaacacatgtacatgggcagaaagcagaaaagagataaaaatcattccaaattcagcagttgaaaataaccctcatagatatttaagtccagtgcaaacaagaagacagcggagtgtgtgtgcacatgtgtgcacacctttaggtctgcactgtcaacaccagacacagtgaagcccaagcagcaagcagtccacagacgggggcgttagtgtcgggaataccaatgggtcaccctgcatcaaaacacatggagcagactgctgagccagctcaggggaagcggagagaccccaggagtgacggtgagaatgcaactcacttgtcattacacaggatatggcagatcggatttgaccaacaaaatggggaggaactgatccagatgtggaatgtgacagagaatcccttcccactgccatggaacatttataaaaataatcatacgttaatcaatgaagaaagggagccacacatttaaaaaagcagaaatcgtacaggccacttcctcagataaccattctaactagggtcaaattatacatcaggactgaaaccacaaacatataggaaataagataaagtcttttggtttttttgagacggagtctcactctgtcacccaggctggactagagtg

SEQ ID NO: 103271 - DNA, 648 bp, Homo Sapiens
  misc_feature (64)..(75): n is a, c, g, or t
cacaggaaagggaaaacaggactttaaaaatggaacaggaataaatagcagagaggaacatccnnnnnnnnnnnngttaaacagaatctaaccaggtacccattatacgatccgcattggtctgggacggtcactggagcggttctctgagcggtcttcatgtaactattaactccccgatctttctgagcctgccggtgtgaggggacagcctggtttagtcggcaaacaagcggtggctgaggactctggacaacatgagcagccatttcccagttggaggaagtcccgggggccggtgtcagattcggccaccagcatgcacagagctgaagcgtgggcgcagccatgggctagatggggtccagcccctttcccagaactgaaacgggtcccaatccatctctgggctcagcactccaggaaggctattggaggaagcaaacctataaggaactaagaacagtcatgtgtccatgattgactcactcagggtttcctccttagcacgtgaccctcaggccacccattccttggagtgggctgaaagttaatgattcgttactgccaggaacgctttatttgagcaactccttttttctcctggcattgagtcacaggtagcattcagcatggactttgagcagc

SEQ ID NO: 103272 - DNA, 345 bp, Homo Sapiens
ccccatgcacagttgacaggtaggggattagctgaggtagggtgtgccccgggaaacagtccgacatcggtgtgtggagagagacagcccgagagaacctggagagggaaacttgtaggaagggtattggatactcacccaacgggcaatgaggtgcctcaaatagtgtgaacaaaggaaggtccctccatttcctgtaggccaagtgcaggacaggggtgtccatgacaagagagcttcgggatggagttttagctgaacttggaaagaaaggagaggagaagtacagaggccagagagaagagtgagtgcctgtggggtgccagggaaccgtgcgtgcggaag

SEQ ID NO: 103273 - DNA, 599 bp, Homo Sapiens
gtacagttggctggcggctggagagggcgtggatggatggctcacaccgagaacatctttgtcacctccgagagacagtgctttggcccaaggggctaagcctggacatcccggctgggcgcctctactgggtggatgccttctacgaccgcatcgagacgatactgctcaatggcacagaccggaagatggtgtatgaaggtcctgagctgaaccacgcctttggcctgtgtcaccatggcaactacctcttctggactgagtatcggagtggcagtgtctaccgctgggaacggggtgtaggaggcgcaccccccactgtgacccttctgcgcagtgagcggccccccatctttgagatccgaatgtatgatgcccagcagcagcaagtgggcaccaacaaatgccgggtgaacaatggcggctgcagcagcctgtgcttggccacccctgggagccgccagtgcgcctgtgctgaggaccaggtgttggacgcagacggcgtcacttgcttggcgaacccatcctacgtgcctccaccccagtgccagccaggcgagtttgcctgtgccaacagccgctgcatccaggagcgctgg

SEQ ID NO: 103274 - DNA, 627 bp, Homo Sapiens
  misc_feature (352)..(363): n is a, c, g, or t
tcccatgcacagttagtgtgcaagggtgcactgagggtggggggaggggatcacctgggttccaggccatccttgctgagcatctttgagcctgccttccggtgggagcagaaaaggccagaccctgctgagttagaggctgctgggatccactgtttccacacagcgggaaggctgctgggaacaggtggcagagaagtgccatgtttgcgttgagccttgcagctcttccagctggggactggtgcttgctgaaacccaggagctgaacagtgaggaggctgtccaccttgcttggctcactgggaccaggaaagcctgtctttggttaggctcgtgtacttctgcaggnnnnnnnnnnnnggatgtgtcattggtcatgatatttgaaaaggggaggaggccgaagttgttcccatttatccagtattggaaaatatttgacccccttggctgaattcttttgcagaactactgtgtgtctgttcactaccttttcaggtttattgtttttatttttgcatgaattaagacgttttaatttctttgcagacaaggtctagatgcggagtcagagatgggactgaatggggagggatcctttgtgttctcatggttggctcgact

SEQ ID NO: 103275 - DNA, 570 bp, Homo Sapiens
ccatgcacaagtgaatttcatgacttaattgtttctggttctctccccccgatgcttgggtcttcttagctttcttactgccaccttgatcatgcttctccccccctggtgtctggatccccgtaacagtcccatttccaacacaatcctgttttccccgatccaaggcctgggtctctacactattctctttttgtacgtctcccacgttctccctcccacatgattgggtttgtgcagcatcctgacctcccacctgatcctcgtttctcccctcttccatctggatttccacatccgcatcacccttcatctgatcttgtttctcccactgtggtgtctgggtctcctcaccaatctcatctccagtctggccttgcttccccaatccttgagcctggatctcttccccatcctcctctccagcctctttcttgtccttcttctcaaatgtctgggtctccacagcatcctcacttccattcttatcctggttctcccactcaggtgtttgggtctctgcatcaattttacatcttaactgttcttggttctctcccatatgtgcct

SEQ ID NO: 103276 - DNA, 173 bp, Homo Sapiens
gaaggcagatcccagagagggagtggttaccagtgtcatgtgcagtagaggtcagggactattggttgaaatggtaggaagacattagtgctttgacacagtgtttgattcagatgtcagtgagggggagaactaaggtgtattttcatttatgtgtaaaaaacttaaccacg

SEQ ID NO: 103277 - DNA, 256 bp, Homo Sapiens
ggcaaggcagcatttgtttctgtgatgcaagtgatttggagcattggttcacatgcaaaaccattgacaaatggggatctgacaaagttgtcctcctggaatgaagtaggtggtgattgttcattgaatgaattgacagatgaaagcttggatgtaatggtgggaaatactagtgttcatggggcacatggggaaagttatcagcatagtaggctaacaaggaataatcaaaagagcaagagagacctgggcagta

SEQ ID NO: 103278 - DNA, 672 bp, Homo Sapiens
cagcggacggacgagtcctggagagggtaacagatctggtggcatggctgcagttactaaggaaaggtggattagcaaattaaccccagttctctaacagtaaatgtgttgtggtcatggtctagcattcctgacaaaatgtgccatagtgagcacgtctataacatttcaaagttctgacaaggctttctggccaccatgcttctggaagtcatgaattaagggaaagacacctaccctccactcacaaagtgacaaagcaacccaactgacccccccaccccaaaaccaagaactacagaagcaaagaaaaatgctggaggaatccagagattagagaagcaaacgaaaatgttggaggagcctagaactaggaattaactgtagagaggactaaggaaatctctgcaagtcattggagatactacagaaaccaactggcagagaaaggaatgagtttctccaaagatagatagagctgagcgttccctaagagtgggtattagaaatgactaggcaactgacaatcaggagggaaggggatacaatcgaattgtaattgaacatgtcatataatgaacaagtcatgtttacaactgaattaaagtccttggaaggctaggtccaacaagaaaactattaggtatgaaaagtggggaaagaagggacgtc

SEQ ID NO: 103279 - DNA, 143 bp, Homo Sapiens
gggggctgggatttctagggtggaggtcacctctgagggagacagagcacaggccctgggagattagaaggtcgaaggtcgccgtgttgaggtcaggggccctgaattggagccgcggcaaaggagagactcgtcatccgtga

SEQ ID NO: 103280 - DNA, 561 bp, Homo Sapiens
aggcagctgtgctgcggtcgatctagaggacccccacggacggacgagtccgggggagttaaagactccatcccacatactcctttggaaacgggtccagtgtacaacatccagtgaagagtataggatggcatagacttaccaactcaaagaagggaaggattctagaaacattatagtccaacctcctcaattcatcgttgatacacaaaggcccactaagctgtgtggttcactcagcatcacgcggctaatatgatatgaagccacactagctggtcctcagcggtgccaagaatgagagctgccttctccaaacctaaaaccaacccagggcatcattaacacctctttaaaatccataggacagtgatccaaaacttattccctaaatcataaatatcttttcataaggagtttccttggtaagggattggaccatgccattaggaataaaattttaataagagaatgtaagtttaaaccataaaatgaggagcttaggggggttcttaggcagaatctaaatatgaaattacttgaatgtcccacaaggcaaaa

SEQ ID NO: 103281 - DNA, 514 bp, Homo Sapiens
  misc_feature (254)..(301): n is a, c, g, or t
cacggacggacgagtccggggttccatctgagccatacaaagacaggctctctgttcacacaacagcttataaagctcacaggaaaagataagacaagcgtcccccagcccttatcagcacagatgactcggatgtaagagtataggtttgttttccagctttaggaaacattcaaagtgtaattgttttacagctgcttaaaggtcacaatattggcgactcagcgtgatttttgccaccgcatgaaatgtgnnnnnnnnnnnnnnnnnnnnnnnnnnnnnnnnnnnnnnnnnnnnnnnnatgagccacggcaccgggcctatctacgggttttctttggatcctattagccacagggccttggcataacggtctgagctcttttcacctagttctcttatggttttttactcaagggaagactttcatgaacttcataaaccaaataatccggtgctacctggcatatcttcaggttccttttcttagcaggactcgtcatccgtgaggact

SEQ ID NO: 103282 - DNA, 549 bp, Homo Sapiens
  misc_feature (529)..(529): n is a, c, g, or t
cccaagtacgggattacaggcgtgagccactgcgcccagccgtttcttttattttaaatgatcacagtttgaggtcatgtgttatggcagccttagtaaactcagacactccccctattctctctttccccaagaacagtcatagccaatgactgaccagagtaagagtatgtattagtccgtttttgcacagctataaagaaatacccaaggctgagtaatgtagaagaaaagaggtttaactaactcacagttccgcatggcgggggagcctcaggaaacttataatcatggcgggaggtgaaggagaagcaggtaccttcttcacaaggtggcaggagggagcgagtgcaagaacaaggaagtgccacactaaaaccatcagctctcttgagaactcactcactatcatgagaacagcatgttgggaaaaccacccccgtgatccagtcaccttgacctggtcccttcgttgacacgtggggattacaattcgagatgagattcgggtggggacacagaaccaaancatatcagagtacaaaggct

SEQ ID NO: 103283 - DNA, 768 bp, Homo Sapiens
  misc_feature (17)..(17): n is a, c, g, or t
  misc_feature (270)..(284): n is a, c, g, or t
ctagaggatcccccacnggactgactgagtcctcacgagacgaggccttaagtggaaacagaaaggtacagatcccaggtcaaggggaaggaaataagacccaactgctgctggggctggaatgtttgtgtgttcaacctagattcaacaacccgaatttcacccctaaaagacctgaacaaacaatttggataaatgcccaccaggtggcaggagtgcctcttcccttcatttctgcaattgaaattaaacatgcaccttatcccttgnnnnnnnnnnnnnnnccgttttgttttcataagctatttttatccttttcaatgttgaaaccagttgatttcacaatactactaaataacatacttaaaatacagtgccaatgtagcaagtctctaagctagtatctaggtaaaatatggcccttaccttccaggcctccaccttgatctcagttgcttttgattcttaacttgattcaccaatcttacctggaattgccttacaagtcagtcagcttctttaaactcagagtccagagctcttccttggctgtgttcctaattccagagcttcagttctgcttagagcccaacatccttgctggcggattttctcatcaagcaaaatgttccctactcttttccgtcgtgcgttcatcattttaggagcgttcttctccatgactacgaaatatttatttcttgtaagaatgttctactttatgccggacacagtgagtggctcacacctgcaattcccgccgttgcc

SEQ ID NO: 103284 - DNA, 619 bp, Homo Sapiens
acgcacggacgatatccttcagcaaatcacggaacccgagagacaaactagattcttcccatgggtatctaggattcaaccagccttattatctgactcctgggtcatgaccagtctcggttcagacacctaatatctatcgaaccccttaagttaaatcagcctccagatttcagcagaaataaatgcacagaaaaaataagcccatataattggctgtagaaggtaaaaagcaactttggatatttaggccaattacaagtaataaacattaaataaaagagactgaccaacggcaaacgggactattttcaaactggtggccaatgactatcctctaggtaagagatgaaggtgcctcacaaattcaacggtataagatgtatgtgcccagcagggtcgtgcctgaagtagccatcctgcctttctaacctatctggtcccatctatcaccccacaacatgggccactaatgctgcatcctcagtagagatgggatcgtgaactacccaaacattcattataaaggtgtaagaatcaaagaagcacgtggtcagctctgctattggcaataagggacaggttatctcaggtatcctctacaatggtatggctgtag

SEQ ID NO: 103285 - DNA, 475 bp, Homo Sapiens
  misc_feature (109)..(121): n is a, c, g, or t
agggaaagggcctggtatcccactggagaaggaagtgtcccaaggacacccgcattcctgacataagaaccaggggaacagaagtgtggcccacttaagagggaatagnnnnnnnnnnnnntaggcaaaagtgaggaaacagggaagaccatcagaggctgtagtgaaatgctcgtggtggtctgatatgaatgacaagtcctgggttcaaaagggttctgggatggatatgaatgacaggtcctggactcaaaagggttctgggctggagatacttggaagtttaggtggagacaggaggcaatgcagttaccagtggatgagatgagaacaaggaaagtgaaaagagagcccaggacagaactccagccatgctatgatctgaatgtttatgtcccctcaaaattcttatgttgaaacctaatccccgtatgatggctctgggaggtgattaggccatgagtcttccctgcct

SEQ ID NO: 103286 - DNA, 562 bp, Homo Sapiens
cacgtatacgagtcctgctcccactgcggtcacttcctaggactcagacggtcctgctcccattgcagtcacttcctaggactcagacggtcctgctaccacggcggtcacttcctaggacgtcagacagtcctgctcccactgcggtcacttcctaggactcagacggtcctgctcccactgcggtcacttcctaggactcagacggtcctgctcccactgcggtcacttcctaggactcagacggtcctgctcccactgcggtcacttcctaggactcagacggtcctgctcccactgcggtcacttcctaggactcagacggtcctgctcccactgcggtcacttcctaggactcagacggtcctgctcccactgcggtcacttcctaggactcagacggtcctgctcccactgcggtcacttcctaggactcagacggtcctgctcccactgcggtcacttcctaggactcagacggtcctgctcccactgcggtcacttcctagactcagacggtcctgctcccactgtgtcaacttgctagactcgtcaagtccgt

SEQ ID NO: 103287 - DNA, 836 bp, Homo Sapiens
ccagagctttgggagagcccctggaatttgagagtgacgccacaaccagcatagtattggacattcactggaggactgaaattcctgggttgactgaatggagagaattttctgcgcattttggtcccggtatgaccattatcccgtattcgcgcccggtatcccccggccgggcgagtcctcaaactctaagataatctctgccctggtgaagctggtaatttggttagggtgacagatcaggtatgaccataaagaacatggatttcccttaacccagccacaacagaagtcaggcatcaccggcggcgtagccattcacacagtagttacctagtttgccttacagacttcttccagtgttgctaccaagtactcaaaatagcttgtcctttttgagtataaaaagcaacatcatacccaagtcccagtacagtaatacacattaaatgccacacagcatttttgcctcggataataacagccgtattaagttgttacagacattgcctctatctcatctctggaggtggtataggattcttctggaacgaatcacagtctgggaaagcaaacccagaccccttgccccattggttcagctgcttggaaaaattccccacttaattaagatactcttcttgaaatatggagtttcagagtaggctaagcaatgaccaggccagagctttgggagaggcccttggaagttgagagtgacgccacaaccagcatagtatggaacattcagtggatgactgaaaatcctggttgactgaatggagagaatagtcgggcagtttcttcgagaaaagtcaatagcctgtgagggcgcc

SEQ ID NO: 103288 - DNA, 174 bp, Homo Sapiens
tcaaataatttgactttaacataaattagtgggtgttcccaatcattcgcctcctcaagtccactttttttcctggtgtgcacaatcaaatggttgcttttggtgatgccttggccactggaaacaagtcacctctcagatttaggagagagaactagacatcgtcagtccgtg

SEQ ID NO: 103289 - DNA, 475 bp, Homo Sapiens
ctggcaccagaatatgctgcaaagggagaagaaggaagacgtgtggtatggaatcacctatggataaggttgagaaccatgggctagatgctatggagaccaacgtatcacttactaggctttactttgtgccaggcactggattcggcattaccccatttaagcctcactaccatccttcatgttactattccacgttgccgctcaggagaaacaaaatttttttattaaattcaagtaacctgaggtcccatatttagtaagaggcagaggagttagatgtgtcaatagctaaattacatggctgtgtcctctagctggccagggactgacaacatcagtatcacctggtgactctcccaggggagatgtttttaaaaatcttttccagtaattctgtgcaacatggcatctgaaaccagtctttcagacctggaagttctttagagaccacaggactcgtcagtgtgaggac

SEQ ID NO: 103290 - DNA, 398 bp, Homo Sapiens
tgacgagtcctcagatctgagtgggcagccgaggaggaacccagaagacgccagcgatggagctctgccggggcggaatgtggccaggaggggcgggagcagtgacggcctgtccggcgctagaacgagggaccgtgctctcaggacctctggatgttcccgagtatcctgatgttccacccagaagccgccagggccatcctggagtaccgcatccgcacgctggacggggccctggagaacgcccagaacctgggctaccagggagccaagtttgcctgggagagtgcagactccggcctagaggtttgccctgaggacatttacggagtccaggaggtccacgtcaacggggccgtggtgttggccttcgagctgtactacccactagcaactgc

SEQ ID NO: 103291 - DNA, 510 bp, Homo Sapiens
cacgggacgaggccttgacattctcaatggcggaatcgctgcagcacatactggcgggcagctggggagggctcaggggatgagaagtacgggtgggccagggcagtcttggctgtgatccgctggctggggtcatactgcaggagttgcatgagcaggtccctgccctctggctccagattgggcacaatctcttccagtcccttcctggtccacttagggaagctgcccttatagtcaggcagctgggtgaccccgggccatgtgtcttcgctgggtgtccccagcatacgaaagatacgaaagagctggtcaatctcagagtcaccaggaaacagggcttttcgagtcaccatctctgcaaagatgcaaccaatgctccagatatccacagctgtggtatagaacttgctgcccaagagaatctcgggggcgcgataccacagggtcaccacctcatgggtgtaggtgcgcaggggcaccccgaaggcgcgagccaggactcgtcag

SEQ ID NO: 103292 - DNA, 677 bp, Homo Sapiens
ttcctgtaagaccagggatgtaatcattggagaggatgtggtgtcggaaacatacgtgtgaggagattctagggaatcaacaggggataaagttactgaactctcagacagttggaccttctcactcagagacttcttcctcctactacccttggcatcctttgcctccttggcaaggttagggaggctagtaggcatggtactcttggcactgggccgtctagacttcttgcccattggggtgtgcttcaggctgaggaaagatctgttgggcccacagatgacaggtgagagagcagaagtcaacacggtgcctggagggcttggggtcacattgtattcatccagaaggcgcacaatgtcatggtgcatgcgatcccgagccacatcccggggaagacgatccatatggtctgtgatgtctcgattggcaaaatggtctaacaggatcttggctgcttcatagctcccctcccgggcagcaagaaacagaggtgtctcttccttgttgtcctgcatgtctcggttggccccatttttcaacaacaaaagagttgcctccacattattgacagcagctgcccagtgaagagcagattttccatggtcatccactgcattcacatccgctgcagttgatcagttctgccaccacttccgactccccacccggtacc

SEQ ID NO: 103293 - DNA, 776 bp, Homo Sapiens
  misc_feature (603)..(670): n is a, c, g, or t
gcagctgctgctgctggtcgatctagaggtcccccacggacggacgagtccgggagtgaggtagaaccagagttaagaagacagagaagacctaaagcttatcaagcacttagcttttctcccaacactgacatacaagcacgaatgtgggagaaactcaggctgagggtcttcactgtgatgagaggctgccaaaagcaggtgagaaactggagaatcaactaggaaatttaagagagggaatgactatgttcaagttagaaatgagtactgagagcagaggtcaagggtctgacccagtgagcgtgggctaatggcctgcaggttaccgtggggtctaatgaaaacattatggaagaaagtgaacaagatgtggcctgatagaggatgcttaggtctcactatttttagggactgatatgggaggtggagatgtaacaattagattaaaaatgtggaggaggcagggggtgtgataaagacggataccatcataggctcagagatgagaagcagtacagcaagacatgaggaaaatagatgaaaagacagtcacaagaaagcagaagccctgagctttgaagacgaactgtgacaggagtnnnnnnnnnnnnnnnnnnnnnnnnnnnnnnnnnnnnnnnnnnnnnnnnnnnnnnnnnnnnnnnnnnnntaggggcaaaagaatttcaaggtgcaagcaaatagagaactatatggcatgtgaggaactcaaatgatcagagtaaggataagaggatcgtcagtcgtgaggatta

SEQ ID NO: 103294 - DNA, 643 bp, Homo Sapiens
tcgaggagtacagaagcaggtcttccccatcatgtgcgcatacaagctctgcaaggtggagttccgctactggggcatgcagtccaagatcgagaggttcatccacgacaccggactacggagggtgatggtgcgggctcaccggcaggcctggtgctggcaggacgagtggtatgggctgagcatggagaacatccgggagctggagaaggaggcacagctcatgctttcccgtaagatggcccagttcaatgaggatggtgaggaggccactgagcccctcaagcacgaagccgtctcggaccagacctctggggagcccccggagcccagcagcagcaatggggagcccctagtggggcgcgccctcaagaaacaggtggtccacatcctccaagtcgtctaaaacgtccaagcggggagcgagtccttcccgccacagcatctcagaggggaggatgcagagtattcccagggactcggatgagagctcagatgatgagtactgcgatgcgcacgaggacactgtccgacacagtaggaaatgctccccaaggacatcaccaagtggagctccaatgacctcatggtacaagatcgagagcccagagccggaagacacacaagatcgactgtccataag

SEQ ID NO: 103295 - DNA, 201 bp, Homo Sapiens
agttggaatttggcatttcgttaaaaagaaaacacaacacgagggaaaaggtagaaaatataaggagctccttgtactcatcattcaaattcaacatgtgttaactcatgacctctttataaatgtctgtgtttttatctctccctcttcccttaatgacctccttataaatttctgtggttttatctgtccctcttccct

SEQ ID NO: 103296 - DNA, 315 bp, Homo Sapiens
ggctccgagcagatacagtagcggacactaccggttgcctcgaaggatgtcaccaggtcctagggtggagggacgggacttcaggcgacaagatacaaagacaagcaggcagggagaaggagacacagacactccgggggcctcccagggggagagtcttggggctcagaggtgcccagatatccagtattggaggtaccaatctggaaggggctgcaggcttagggcaaccctgcaccccagaggacttacgggggcagctggaagctgaacaggaactcatggcgcccaggaggcagcgtcgtggtctccccg

SEQ ID NO: 103297 - DNA, 152 bp, Homo Sapiens
ctcgtccgagcagacacgggaggactatgtacatggccagttctaggcagtggcttaagagctctgcccctgcagtgccttcaactttgtctctgtttccttatcaacagaacagatagtagtaccacacttcagggtcgaataaagtaaat

SEQ ID NO: 103298 - DNA, 715 bp, Homo Sapiens
ataacagcttcttgttagcacctggttcccaaagggactcagaaaaaataaaaacatgcaaacaggaaaagattatttgacagcagatagaacaatttcatcatcacccttacctaggctactccccctcacattttcctgtcatccccaacagcccagaatattctccaatcatctgggaagtgttaagtactcagatctgtggagaaaacagatctgtggagaaaacctagctaaggtggccagtagccaaggttaatttccaaactgatatttttgcctataaatctctaataaccaattctgtttgttaaatttggtttggggagttaaattttcagtctattttgagacccaagtgattctgctcctctgtaacactgcagcaaattacttcactaatcaaggtaaacagaaccatgttaactgtcaggttttttccaaattaaaaatgcatgttttccccatgactgctaattaagaaaaccatattctaaacagtcattcgaatgtttacttggcacatctccctctggtttcttctaatttataacaaagcaagcaagtctagaatgatgagggcccagtttcaaaggcaataacctctgtaacataacctgttcataacctctctctctccatccatattccctttctttgggaaaaactccatgctgacatacaaagaaaacccagcagtatctgtaccgccgag

SEQ ID NO: 103299 - DNA, 268 bp, Homo Sapiens
acgagcatggtatctggtcctcagcctcagcatggtgtatctggtcctcagcctcagcatggtgtatctggtcctcagcctcagcatggtgtatgtgatcctcagcctcagcatggtgtatctggtcctcagcctcagcatggtgtatctgatcctcagcctcagcatggtgtatctggtcctcagcctcagcatggtgtatctggtcctcagcctcagcatggtgtatctggtcctcagcctcagcaatggtgtaatctgctcgcga

SEQ ID NO: 103300 - DNA, 378 bp, Homo Sapiens
tgtggaggcggttcaggcggaggtggctctggcggtggcggatctgacattgagctcacccagtctccagcaatcatgtctgcatctccaggggagagggtcaccatgacctgcagtgccagctcaagtatacgttacatatattggtaccaacagaagcctggatcctcccccagactcctgatttatgacacatccaacgtggctcctggagtcccttttcgcttcagtggcagtgggtctgggacctcttattctctcacaatcaaccgaatggaggctgaggatgctgccacttattactgccaggagtggagtggttatccgtacacgttcggaggggggaccaagctggagctgaacggcggccgcagactg

SEQ ID NO: 103301 - DNA, 140 bp, Homo Sapiens
gacggctcatcagcacagctctgacctgccagcctcccccacagctgcctccagcctccagagcggcttattcaggaacagaggcagatgcagtgtggagcgcagctgcgtgagggttgcgtgggtgtgtctccatggga

SEQ ID NO: 103302 - DNA, 632 bp, Homo Sapiens
  misc_feature (45)..(45): n is a, c, g, or t
gtcatcgtcgcgagcagatccgagcctgttgtccctgtgttgganattgcttggtaactatttgaatgggtgagtgaatgaccctaagatcctgcccacacatttcttcagtggccacaaggagacctgtggacagtggagaaagcatcctctgcgcagatgcctggggctgggagggcctggtggagagtgaggtgacagcttctccttctccctcccttggggtgtctctgccctcgtacttgccctccagcccccacctacacctccatggatggtgactcatgatccagaccggctctggggagttctctagaaggaaagtgatcctggcattgttggggacacctcttcttccctgtctcccttcatggagagggcaggtgtcccgggcagacagaagaccctggaatccatccgtgggaaggaatgcccccttccagccctgttctcacacggtgctcagcctttcctgcttccgcatgtggcatgaggcaggcacaggaccctccacaggaccctcagccagtcacaggaccccgacagcctctggacacctggctctctcaggatcctttgaaaatcaaaggtttttctcacagtatctggtcgcgagccgggatccttagaaa

SEQ ID NO: 103303 - DNA, 413 bp, Homo Sapiens
ctcgccgagtcagatactgggatgaggcccgagcccgggtgcctccagaattcctagtacaacgagcagtccacgccaaccccccaaccctacttttgcctgtagcccatatgctagaggttggtgaccctgacgacttggctttcctccgaaaggccttgccccgcctgcatgcctggttttcctggctccatcagagccaggcaggcccactgccactatcttaccgctggcggggacgggaccctgccttaccaaccttactgaaccccaagaccctaccctctgggctggatgactacccccgggcttcacacccttcagtaaccgagcggcacctggacctgcgatgttgggtggcactgggtgcccgtgtgctgacgcggctggcagagcatctgggtgaggctgag

SEQ ID NO: 103304 - DNA, 1007 bp, Homo Sapiens
  misc_feature (966)..(966): n is a, c, g, or t
gagatgccgcctcacatctacgccatcgcagacacggcctaccggagcatgcttcaagatcgggaggaccagtccattctatgcacaggcgagtctggagccgggaaaaccgaaaacaccaagaaggtcattcagtacctggccgtggtggcctcctcccacaagggcaagaaagacacaagtatcacgggagagctggaaaagcagcttctacaagcaaacccgattctggaggctttcggcaacgccaaaacagtgaagaacgacaactcctcacgattcggcaaattcatccgcatcaacttcgacgtcacgggttacatcgtgggagccaacattgagacctatctgctagaaaaatcacgggcaattcgccaagccagagacgagaggacattccacatcttttactacatgattgctggagccaaggagaagatgagaagtgacttgcttttggagggcttcaacaactacaccttcctctccaatggctttgtgcccatcccagcagcccaggatgatgagatgttccaggaaaccgtggaggccatggcaatcatgggtttcagcgaggaggagcagctatccatattgaaggtggtatcatcggtcctgcagcttggaaatatcgtcttcaagaaggaaagaaacacagaccaggcgtccatgccagataacacagctgctcagaaagtttgccacctcatgggaattaatgtgacagatttcaccagatccatcctcactcctcgtatcaaggttgcgcgagatgtggtacagaaagctcagacaaaagaacaggctgactttgctgtagaggctttggccaaggcaacatatgagcgccttttccgctggatactcacccgcgtgaacaaagccctggacaagacccatcggcaaggggcttccttcctggggatcctggatatagctggatttgagatctttgagtgaactccnttcgagcagctgtgcatcaactacatcagagagagctcagg

SEQ ID NO: 103305 - DNA, 557 bp, Homo Sapiens
ggtgagtgatcagcaggatctggcctccactgggtggtgggtatgggcttaaccagcatctccttctctatatccagtcccactaccagctggaactgcagtgctgcatcgactggacccatgtcactgaccccctcataggatgcaagaagccagtgtctgcctcagggaaggagatggattgggcacagatggcatgtcaccgatgtctggtgtatctgggggatttgtcccgatatcagaatgaattagctggcgtagataccgagctgctagccgagagattttactaccaagccctgtcagtagctcctcagattggaatgcccttcaatcagctgggcaccctggcaggcagcaagtactataatgtggaagccatgtattgctacctgcgctgcatccagtcagaagtgtcctttgagggagcctatgggaacctcaagcggctgtatgacaaggcagccaaaatgtaccaccaactgaagaagtgtgagactcggaaactgtctcctggcaaaaagcgatgtaaacattaaaaggttgctagtgaactt

SEQ ID NO: 103306 - DNA, 295 bp, Homo Sapiens
  misc_feature (15)..(15): n is a, c, g, or t
ggctcgccgagcagnataccaaacagtttatactagtcacttcttatggaacacagattaagcatacgttagtattttactctgtcttctgtatctgttaatctcagtcatgttgttaattcatgtctttctggactacttcctggatatttacttttcatctgtcttctagaactatcttcgtgtttactctttctccagctgtatctaatctgctgtattaaacagattcagtcactgaattttaaatttcagtcatattttcatttgtagaagtcctatttcattcttttgt

SEQ ID NO: 103307 - DNA, 373 bp, Homo Sapiens
ggctcgcgagcagatacacatattgctatctaatggggaaatgtagctatgggccataaccaaaactcacatgaaacggaggcagatggagaccaagggtgggatccagaatggagtcttttctgttattgtatttaaaagggtaatgtggccttggcatttcttcttagaaaaaaactaatttttggtgctgattggcatgtctggttcacagtttagcattgttataaaccattccattcgaaaagcactttgaaaaattgttcccgagcgatagatgggatggtttatgcaagtcatgctgaatactcctcccctcttctctttggccccctcccttccggcccccagtcggggttactcttcgcttcgg

SEQ ID NO: 103308 - DNA, 592 bp, Homo Sapiens
cgggtgtgatggtaatggtgtgggggaaatgaactgagctttaaacttgattgagtttcaggtctctgaatgaacatcccacgttgggagaagatacatttgggggctccaggactacagtagaaaagtatagagcaagcaggaaaatcttctagtaaaacttacatgcaggacaacaaaatgatgaaagatatccaaataccagataatccaccaggaaggcttttgtttaggaatttgtttcaagaggaacaagggatgagggagaaaaatccgttttatccatcagagtcagtgctataaaattgcctattaaggtaaaagaaaaatgtggagactattttactatacagagagcattaattcagatggcttagaaaagtgataccagcccaagaacagggatctaggtgagcccattgtaagtatcattgaaaacaaaacatgcccgtcaacatgtcacagaaaacgaacgaaggacaacaagaagtggatgagaatattttgttgaccttcatgggtttacagcctctgtctctaaacaaagtatggaaacaagtagagcttttattttgctttaggtgaaggtatg

SEQ ID NO: 103309 - DNA, 661 bp, Homo Sapiens
agagatcaaaggatcgtaaagactcaaatgtaactgtctcaagaatgagattcctgagatgcatcaatcattacgtagactgtgcaggtatttcgtgtgtaacatttggccgtcaattttatctcgtgcaagcggaaacactgtggagtggatagaagatagagagagaatcacatccacgtctgtgtctcatccggtcactggcctctgtaggtcctactccagggcgggtgctgactgtgcttttcccaagctgcttttggctcagttctgcttcccggggcatagaaggaggaggccatctcactcaggagctggaggggtcctatgggcaccagccttctcttcccatgtctgtggacagagtccattaggcgcagcattggcaggtgagaagcatcctcactgttactgtcgctggagggaaagtggagaggtgggtgggccacctctcaagtggtgaggataagttgaagcagctcggttagattgctgatgtgttgccacagccccatgtgtaaaaccagaagtgcagcttcccgggaaggatggcgaggacccccacctgagtcagtgttgtgtgtgcatgagagtgtacatccatctgcatgtgtgtgggtcgctgtaggcaattgtatgcactcacactctgagcgtctcc

SEQ ID NO: 103310 - DNA, 403 bp, Homo Sapiens
aacttcacaggtttgcctggggctggcagcaatccagtcaacagtggagtggctggcagcagagaaaagtgtttgccactgccttgtcagcatggagtgaatggagagtgtggctgcagatgttagagaagagttaggagagaaataggcaatacatagaggaaattattaatttagggctttggttaaggaagtgggaactaaggaagaggctaatccagtgtaacttaattcagatatgatcaatatatacaggaaatgaaacaatcagaaggcaagggagagaggcaggaccagcctgacggaagtggcatatcaagtgccagaagttaacttttctgtaccatctcataacctccttccacctcacctttcatcatttgcccttcttcatcctttgtaa

SEQ ID NO: 103311 - DNA, 394 bp, Homo Sapiens
tggtacgacagtttacaaaggatgcacgaggtggaaagtgcaggtgcaagtctcagatccacagatgtgcaacggctgcgtggaaaacaggatgggggcttctgtggaagcaccaagtggtccctgtcactggcaccttccaggcagacatcactggggatactgtagacgtcatctctctaaaatcagttctgatttgaaaactccattctatgtgaagaatgtcaataagtatttcttcactatccattagttttctgctcaacttttgttctttataatgttcaacaaattttgagcacctaagagcatagctgctagaatgaaactccctagactgtattgttttgtttgagacagggtctggctctgttgcccaggatggagtgcagcg

SEQ ID NO: 103312 - DNA, 522 bp, Homo Sapiens
acaggtctcaaggatacttacattccctggtttggtggaaatcctgggcatctgagttggaagagtgaggacaggggaggagttggggacattgagactgttggaacgtcttggaaacaatgacccactcagtgtctgaattcattttctgtcataactgccctgaaaaagtccagtgtgtttagaggcgtgttttggggatgaggaagggttggaactggttgaactggatttggaatcagagtctaggccctattgtcctgcatacctgccccatagcactacagtgaggcagctgcagggcctgatgtatttccccattctctttgctgaattgaggcaaagaaagacagtgaccagcacatatgtgtgtttgtgtttttgtaaaagcacccacatgctcatgaggctaagagtggattgtgaggacagatgggtggctgaccagggaggtaggcagagggacagagggaatgttcttctggaaaactcctcaggctcattgtgttctgcagaaggcca

SEQ ID NO: 103313 - DNA, 435 bp, Homo Sapiens
tactgggattacaggcatgagccaccatgccaggccccgcccttactccttttgaagtccaggtggttacagctgcccctggaaggggcagattgtggatgcaagccccctaacagcagaaaaaggctattgacagtgaatgagggacttccaattctagaaatagatcccgttgccttaggggtggatagtggacaaggtactaacaccaataaatgcctcaaagatttcattggcttttgaacttgcagaaacgggagtgaagtgatttctgatgtttcccttgggaaagcagaaagagacccttcctcgtacagctgcgcccatgaggaaaagttcgacaggatacatatttgatgcccatttccctagacgtgtcatcagagtggtaagtagcgaagggtacgtacgctacagaggtgctgggcgaccacg

SEQ ID NO: 103314 - DNA, 708 bp, Homo Sapiens
gacaggtctacaaggataagtgtggacaagaagatggggcttcttctcccctcagctcccagtcaggtttaccatatctcactgggaaggccacattgtcaacatttctctacccctccaactccaagttgaagaggctgaaattctggtgagtgcagctgagcagttagggctccctttctccaccaagctcccacttacagaatggaggcttcatcccatttgcagcagaatactggagccctaatcgtcctcaccccagctcactcgtagggcagaggttccactgagagaagcaagccaagaaggcaagaggctactatcccacccagcacccagagtagtgcctcagagacctttcccagggcgagagacagttcataacaaaagagagctccgaggtactctccaaaggaactgactttatttgaaacagtgtggggaagtacaggcctaaggacactttagaaaatgataacataccttaaagaacagtaactaaactgtaggccatctagttcatcagagagaatcagggaaaggtagctaagaggagccctcttcagatcagaacaaatctcaaagacttacagcaaagaatattccttcccaaatgtaatatggatcagacctgctgagcaattgatgcactggaacactcctcatattacgatagcactgcaattaatggatatttatagacctgtg

SEQ ID NO: 103315 - DNA, 360 bp, Homo Sapiens
tcaatcgaaccagtacgaagaatcaactcaaagtgtagtactaaaactacaaaactcttagtagaaaagagacgtaaatttttgtgaccttggatttttccaatggtttcttccatatgagaccaaaaagcagaagcaattcttatagataaactggacttcatcaccatttaaaactgttgcgcttcagaacaattctgcatatagccaaacctatcatttaatctgatcagttctgttcttttcccccttggagacatttgtcctagggcactccatctttccataaagaaaaccatcaaagttttagaaatatataaattaggccaggcacagtggaccacacctgtaatcctagca

SEQ ID NO: 103316 - DNA, 222 bp, Homo Sapiens
acacttagaggatcccgcacgggttgtacgaaggttacagattcgctctaactggttgggcctgatatctcgaggaggtgttagaagagagatgagcatcccaaagtgtatatctatgctccagtatgtggatgatatactagtgtcagggtaaagctgtaccaacaagtatctggcttttccatcagccttctcaagcatctctgtggagagggactatgt

SEQ ID NO: 103317 - DNA, 383 bp, Homo Sapiens
tctggagagccacttcagaagaagacatggctcaggatacgatcatctacactgacgaaagctttactcctgatttgaatatttttcaagatgtcttacacagagacactctagtgaaagccttcctggatcaggtctttcagctgaaacctggcttatctctcagaagtactttccttgcacaggttctacttgtccttcacagaaaagccttgacactaataaaatatatagaagacgatacgcagaagggaaaaaagccctttaaatctcctcggaacctgaagatagaccttgatttaacagcagagggcgatcttaacataataatggctctggctgagaaaactaaaccagcctacactctttatcctttgtaacct

SEQ ID NO: 103318 - DNA, 215 bp, Homo Sapiens
catttaacttcaaagcccatgtgcttaacattccactgtgactacagagcagagacaacatccgtgcgggaattctgttgcatgtacccaacagtaattttgcctattactttttaatgatcaaaataaacttgaaatttaaagcatcccattctaaaaagcttgtatgacttgtgaaccaaggtatattgtgattctttttgaaaaagaaatca

SEQ ID NO: 103319 - DNA, 361 bp, Homo Sapiens
tcccaaatacagctgtgcaaaatatctcttccgtattataccactaacaactaacactgttgtcattactagaggctcatccagcactggtctttctcaaaaggcacacaggcctgggagggcagtgtggttttgaaacatgccagccagctgaatgcaagttgataagcaaagataatagtgcggtgagccaacatgggggaaatgcctggaggcagtatcacagggaggttctgacaagcacaagtgaagagaaagactggagcccagaaaggaagaggaaggagagaaggaggcactcaaagagaagcagagtatgaaacaacttcacaggtttgcctggggctggcagcaatccagt

SEQ ID NO: 103320 - DNA, 479 bp, Homo Sapiens
cttcacctttggtctcagagcgagctccgtctcgattacgaataaccaaagaacaagtggggactgaacttcccaacctcctccttgctgtcttccctctctgctcagagctcctggcatgcgtcatcttacccttggtcatgtcttcccatctctgtactcctggcatgtttgacagtctgagggtcctcggacttttccactccccttcctagccccgggctgtggttgctgcctgacttcttgcctcaccacattcccccggccaaactgcatgctccgtgaccacattccacacccttcatgcctcacatcattgtcctccagcacccactctccacatagacccacgttgcctctgttgttgtatgggaaggaatgtgaagtgcggtggagggagtgtggattttggagtcaggcctggggtgaggttccagctctgacatctaccagtccttgtggcgtgccggaccagctca

SEQ ID NO: 103321 - DNA, 803 bp, Homo Sapiens
tggtcggtaccgtcacgccacaaggactccagagtagataccctggtctggtttttgtagatttaccctagagatggccctacagagcaatggaggacagctccatcttagccccgagcccttgtggggactggagtcacaggggcatggagaggtctggccagcatgccgcatgcttccctggttgggaggctgtgagcctgaagcctaggccccctgccgagggcggcctggggccactgtggaaagcgcagcagagggtggggacagggaagcaaagaggtgcctctgaggacctcccctaagcaggaccgcaggcagtaggcagagcagggcggttccagggcatccggtggtgggagagcacagtccctgcagatgctctgcggagggatggggagggcagtggaagttccctcctcctgccttgcccagccttttggggacaaggccgcgggatggtgtctgagtgtaatgacccctttgagagcttctcaagcagaccagggcaccactgatacttacgatagggcctggaggacccggggagcccctcatgccaggcggaccctgcaaaggaagccaagggaaatggatgaagaggcccaggccccatagagcccctgggattccagcagccttcctcccagcttgccagggccaaggtcaacagagggtgactgctgtcacaagcaggaccacttagctgatcttcgaacaatctttcatttggcccattcggtcatcctacaaacatttaacaagcaactattacgtaccaggcattagtctgtgggcgtgaa

SEQ ID NO: 103322 - DNA, 598 bp, Homo Sapiens
  misc_feature (535)..(535): n is a, c, g, or t
gtcacgcccacagactcccaaagtgctgggattacaggcttaagtccactgtgcccagccttagcctggccatcttctaagtgcttacaatagctcactggatccacacatggtataaaaccctatgaggcaagtgctacagtctccattgcacagatgaggaaactaacggttagatgtcaagtagctcctactgagtgttatgtaatggggaagtgggggcacgatttggagagtagacttggcgcagtctggtttcccacttctgcttactcccctgcttgccacaaagtcagtcctctgtgtgtgccacctttgtaatggctagtcaagggcctcggcttccctgaggaagtgactgttgagcggaaatcacagaggccacttgtcttcagtcatcccctcaccttggcggtgaaaagggtagagcagaggccagcttgcttcttggcagtgcctatggagaagggctgtatatagaaagtgccaggtcggggcgagggcatcttgctatttggcctcttgacttcccaanttccaggagccagaggaaccctggctccagtcaaatccagataggctgagctgacaagttagt

SEQ ID NO: 103323 - DNA, 543 bp, Homo Sapiens
tcgtcacgcccacaagactgggggtgatcccatgtgtggggagacccaccaggccctgcagggggccatggagaagctgtggagccgctttatggagctcatgcaggagagaaggtggacttgaaggagagggttgaggaactggaacattgctgcatctagctgtctggagagagacagacaccatcggggagtgggaagccagggcacggcaaagagagctgcacattggtcagaggggccccagcgtctgagtcctgtcctcctgcaggagagtacatcgcactgtaccagagccagagggcagtgcggaaggaggaggagtgcatcagcaggctggcccaggacaagggagaggtgaaggtgaagctgctggagctggcgtggcttgtggacgactgcaacaagtggcatagcagattcctggcagctgcccagaaccctgctgatgagcccactccaggggcccccgccccccagtagcttggggctactgacaagccagggtagtgagtagagtccttgtggcgtgacggtaccagc

SEQ ID NO: 103324 - DNA, 157 bp, Homo Sapiens
tcacggcccacaagactggaccacctgctctgctatatcataactgaatcttgggcatattttctaagaatttttttcttttagagacagtgtctcgctctgtcacccaggttggagttcagtggtgccatcatagctcactgcagccccgaatttc

SEQ ID NO: 103325 - DNA, 406 bp, Homo Sapiens
cggaacaaagactctagacagtgtgcgcattttctgcagcagtatagtttccaaaaaaagtttccatttcgtaatagattttcacctaaaacttgagtgtggcatcatggaaacaaggcttagcaatgactttgaaagccacgtggaaaggcagtgcgatggagtagaaatcgcatgaggtttgggagatccgagtccaggtgcttgggctgactggctgacttcatggggcggcccatctagagccccctgctctgtctcctcccttgtaaatggggatgacagtcacctccctccttgctggatgatgcggaggatgctgcagtgacacgcggttttctggaagcgccagagcgctgaggttgtctagttcactgttttccagtcctgtgggcgtacggtacca

SEQ ID NO: 103326 - DNA, 799 bp, Homo Sapiens
actccggtacccgtcacgcccacaaaggactccccatctccacccagacacctctgttctccccctcgtgtgcctttgcttatgctgtcccctgtgttcctagtgtgtctctggctatcttttaagcttccctccccaacctcattagttctgtggagcccctggaatagagctgacttctccttccctgctgctcccaggctgctcagaactttctggaaagggatgattatctgagttccagcctcaccccagcccccggactctgagtccctcatgtctgcctcccttccttctctctgaccacacagctggtacatagtcagtacagacgcagtcagtgagtggagcacggggcttctctccaggattcctgcccctttgtttatccctagtctcagctctccctactcctggtcttctgcctacatctgtgcctcttggaactgaagcctccgttcccagtggggccaggtcatgacccttgggaactctacaggatccctgcccttgggcctctccccgaagcttccagctcaatgctgaccagagcacagccatgcctgtgacagtccttggggtgacctcccttatcaggaaaaatgcagaaaacctattaataccttagccttgtgattgttaatggtcacaaaactcctttagggtcctttggactcagcacctttatggtctcactttgaattttgaacctcccacctccccccatcccccagagtaacgcggaatggtcttcccattgttcctgcggagggaaggctccgcaggtaagcacacgagg

SEQ ID NO: 103327 - DNA, 471 bp, Homo Sapiens
  misc_feature (223)..(284): n is a, c, g, or t
cctgatacgcccacaaggactgccgtccacctgcacagacgtcacatccattttctttgatttccattggcaacagcgggaaataattccaatagtgctgaagtaagcagccagtctgccttgctgagttcacctggtttccttcttcatcttcttccatctggctaaggcaaggcataaagaatagacgtatatattttaaatatagttgagtgcatgacannnnnnnnnnnnnnnnnnnnnnnnnnnnnnnnnnnnnnnnnnnnnnnnnnnnnnnnnnnnnnacagaggtttataagtgagaactttcttctgcgaggcaatgggtccccgcctgaagtccagccccctgcctcatggcgtctcctttagacactagccgatgccatggcaactctggcctttcggttttttagatatgtctcttcatgtggagggcaagatggtcagacctggaaaaacacctgtgtg

SEQ ID NO: 103328 - DNA, 558 bp, Homo Sapiens
  misc_feature (11)..(11): n is a, c, g, or t
tcgtcacgccncacaagactgggctgctctcgaggggggcgcgcccaccgctgtgtcctctctgcccagcctggcttaccaagggctacctcagtggggagatgaggttggaggaacgaaggcgaggttcctccttgctttggggagaaaagtattcaggaagtgggtgtgtgggaaacctgaagatggcgtgcacaggacacagcgtggtcggcctgggcagaagggcggctggctgtcctggagctgctgctggagcctgccctcagagtgtccctttccagtgctgtggcattctgtggcagcttccccaggtgtggtgacggtggggtcggggcctccacctgtgacagtcaggcttgagggtggacggcgtgcctctcccaggagccttccccatgtccttgccttgctgagaattgccctcccatgccgctgaggtgttaggtggtttagggccaaaaggggaaaaccacttgagtcttgtggtgtgtggtgggcagacaccacagggtggcatcacctggtggcatttccagaagctcaggcccgattcca

SEQ ID NO: 103329 - DNA, 546 bp, Homo Sapiens
gtcacgcccacaagactcactcactctattccacattgagtgacaggccagatgagagagaccatttcaccaaaaggatccaactcacagctcacagccctacctggagaacccaggatcaaagggtcaccctcaggaccaggctgaaggaaggacgcacaggagggtttacccctggcccgcttctgcggctcataccacagtccctcctcaccacaaaggccagacattctgttctgggaaacctgtctctggctgatctcccacctttcccagggccctaacctctctccccatcctctacctgccgaccaagctttttaacctcatcccctgtagtctcccacaccaaaatgccccagggagaggaaagatgagccactcctttaaagactcgccatctcttactcacttattttggtaagggctttggggagccaagaattgtcagttccctctactttgagccttctgttagcttccagtgagacagcgtggcttggtgattagttccgggggtttcattttattttgtttcctcggtag

SEQ ID NO: 103330 - DNA, 542 bp, Homo Sapiens
  misc_feature (251)..(306): n is a, c, g, or t
tcacgcccacaagactgcttgcacggaggtccttctttcctctgtacgccaacccataggcccacctccatgccacactgctaaaatatcacagagaagatgcagtacagtaagtccacacttaacattgtcaatcagttcttggagcctgtgacttaaaacaaaatgacatataccaaaaccagtattttttttctcaatgttataacaaaagctacattgaaagaaatgacgttatttgaggacctggnnnnnnnnnnnnnnnnnnnnnnnnnnnnnnnnnnnnnnnnnnnnnnnnnnnnnnnnatattacggtatagctaaatacttctgagcatttaataattccatttagctgccatatttccaggacattcaacagccatgagcactggcatgtggacctcacctagtgtaccccttaccctagtgagcagagattccattcttgggaaaaagggcagtctgtctctcagaggcttattcctcccaatcctaaggtccagggaaggaggcagagacatcaaaaactcaggactggc

SEQ ID NO: 103331 - DNA, 201 bp, Homo Sapiens
tgccctgcttcaaggctgtgctcagctggcagcctaccactgttggctcctacagggtctactcagcttttggaccaagtttatgattttctttgggtgtccctgtccaatgactgagcaagatggtggtatgagggcccagccattccatcgtttccacatttccaacacaggagtctgtgggcgtgacggtaccagctc

SEQ ID NO: 103332 - DNA, 172 bp, Homo Sapiens
agaggtgtgagccaccatacctggccctgtagaggggaggcattgatgaaggtcaagaagtcctgttagctctgccttcagaatctaccccaggtccttttagttctctccagcctcactgctggaaccctcacccaagccaccaccttgcagtcctttgttgggcgtgacg

SEQ ID NO: 103333 - DNA, 649 bp, Homo Sapiens
tcactgcccacaaggacttacagtgaccttcgcaggtcacctgtgggcacattctccctgtcttccaggtgaagtcacgacaggcagctgaggagtctttcccagtgaaaacagctaggtgaactctcatggatgaagcaccaggagggagagggcaaggctgtgctcttaggagaaaggatcactgagagaaggcaaagtcagaatgctcactgctgaccctcgcacagggactggagggaggagaatagcatcactgagagaaggcaaagtcagaatgctcactgctgaccctcgcacagggactggagggagagccagtgcagaccaagtcccagggaagaacattaagcaagagaagccaactgactttagaaagccatgtttccagatacttgtcacatgaggaaatttccagccccgtgatagaccttacatggcgtggcccagtggagcctcagacggcacagtcagagtcgggggcctgccctggacggggtcgcagtcggcagcagcgtgcagtccggcatctcccgcggatgcttttccatcccaagtgcctgcggagcgccgaggagaggagagagctgactgacgcttacgtattttcctccttcagaatccagtccttgtgggcgtacggtaccgg

SEQ ID NO: 103334 - DNA, 516 bp, Homo Sapiens
gagcgagactccatcccccctccaccacaaaaatatatctctacagttccttaggtctgaaggaacacaagttctcttcaagtgatccatgatcaaaaggatcatggctttctttaggtcacatgacacagcctcagccagtacagaggccaaggcatggggaatactccctggcgggaaggctggagcagatgcttccgtagttaaaacaggccccgagagaagtgcagctggttgccttggagcgaggacacattcttctgcaactccagtgctcatttcagcatgagcactggctcaaggaggagctgaggaggacgatggcgcgcagtgaacgttaatagagcatgcactgtttggatgcaggtgcccagcacagggacatgaaggaagtgctccaagtgaggaggtgctcaaaagggagcccctgctgtgagactgctcctgggccccaaaccctctccactcccctctccaccatgccctatccaaacctggggctaatccagccaccca

SEQ ID NO: 103335 - DNA, 458 bp, Homo Sapiens
tctgagttcccgctcacgcccactaggactgacgttggtgtggtgtgaggttccagaggacagcaggacactctcgcatactttgccaaatgaggcctgctcagaggagtaggagctgaaagatggtgccttccaccctcttgggctgtgtgcccatcagagcaggctcagcctgcaaaggccctgcattcagaggtcttgtaatctacttgttgcaggagaaagaaggtaaaaaatgatttttttaagaaaagctattttattgcagctctttcccaagagctgttctgggaatggctggtcttcatattcccagtggagaggggaacaagtggggctgggcatatatctattccggcttctagtgggatggagttggggtatagaaattaaccaggaagatgtttccaccaagcctgctgtgagtccttgtgggtaaacgggccgagctcgatata

SEQ ID NO: 103336 - DNA, 663 bp, Homo Sapiens
ttgacccacaaggacgtgatactgtcgtgaatgtaatgatcatttgtcatctgaggacactgagtgttcacttagaggtttgagcacttgtgtatttgtagtcatttctctttgtatccatgttaatgacatgcctggctcggttgccaggacacagatgtgattctcacgttaacggctcgccggctcggctgctgagatgccagtgtggttctcacgttaatggcttgccacctcggctgctgggacgccaatgtagttctcatgttaacggcacgccagctcaactgctgggatgccgatgtggttctcacgttaacggcatgccagctcagctgctgggatgctgacgcggttgttgcttcggtgacgcttgggcgtcttgccccctggcctctgctctgtgtgtgacttgactgtggggctgctccgagcccacccctgccactgggtggtggtcccacacacggggctgaggtgggcatcctcatacctgcagccctttctgcagcagctgaaggaaggaaaggtgggagcggcactcagggtgggcttaactgggactgtggctggaaaaggcagcgtggcctggtgtggtggcgtctgcagtaacgtggcctggggtgtggcggagtccgtagcatgacctggcagcgtggcagc

SEQ ID NO: 103337 - DNA, 442 bp, Homo Sapiens
tcacgcccacaggactggaccctcgcgccgcccgcgactgtggcgtctggagttgatgggagctgcagcaccaagccgggccagcctccctcccagccagtgacaacaccgcagcacctggaccccgcccacccgcttgagtcctctgcctggggccccagggatgcgcctcctcctgaaagtcccctccatcctcccttagaggaacaggctgccgccgcgcccccatcagcctccattgccctgaccttatttccacctgatggtgccagaggctgcttcccagctggtatcctgagatcctcgttcccttggtggcttggttgtttaagcctccattattgattgggggcggtggtctgggtgtgattcctgtgggggaaaccagcccgaggtgccttggctcaggcttgcctgcctgggtccttgtggcgtacggtac

SEQ ID NO: 103338 - DNA, 369 bp, Homo Sapiens
tcagtcggtaccgtcacgccacaaggactggcagcagcccatcctgctgataaacagccaagggctgcctgagggtaacttggagctgaggtggggacaaagagggccgtgtccttggtctacctcttctccatgtatgtctgtggttgggtgtctggtccctgtgggctcatgggtctgttttccagcactgtctgtctgcatacgtgcccacctgtctgtatgctagactgtgtttatctgtgagtgtgcatcagtgtgcatttgtgcatgtcagggctggtgtctctgtacttgcctattaatgcagggccagggcacatgttgtatccttgtgtgcctgtgcatcagtgctggtgtgtcagtgtg

SEQ ID NO: 103339 - DNA, 604 bp, Homo Sapiens
cagcgaggctggtccctcagaagggcctcgctcagcccgtgggctgagttcacaacactgactgcaactgctcagaagcctgtttcctatcagagagaagatgatgcggagcttagatactgggaggtgttactatacgtggtgtctggtggtcatgaaggaggggcatacgagaaaagtagagggtgtttttgcttggtttttcagaaagtttgcatgtcttgggagaagttgaaaaaagtctcatgcttacgagggcacaaaaatgaaaaccctgctcaaatgtggatgtgcatgtgcatggtggtgaaggcacgtgtacctcatgtactccagccggtacacagagaggaggtaggtggacatggcgaagtccagcttgttgatgagtgcggacacctcgggaggggggtccagcaggttgatgatagtgctgcggagctcactcagctcagcctggagggagagaaacatccgagggctcatggggcatcccccaggacaaacaggtcccagtggctggcaacatgtgttaataatgacagtgaaaagatctgccctaattggcacagagagcatggtaaaaatgagatgtgagtcttgg

SEQ ID NO: 103340 - DNA, 452 bp, Homo Sapiens
gctcggtaccgtcacgcccacaggactgggattccaggcgtgagccacacacccagcctgcaaagaaatactaaccttttctcagcactccagttgcaattgtgctgtgagaatgctcattctaaagcaattatatgagtgagtgtacagtagaataacatcagtgaataacgggtagaataagcaactaagaaacgaggagcggaaccaagcataccagcgacgagatctaaatatgaaattcaaaacagcaaagatctggactgttcaactgaaagtgacgctaattgctaggaactctttgctgctgccccaagtgtgtacttcctaatttttcacagtaaaggcctaacaacaatgaccacccagcagcaaaaagcacccatggcacctggattgtgtctctaaataccgctccccactaacggcacctggagtccttgtgggcgtat

SEQ ID NO: 103341 - DNA, 280 bp, Homo Sapiens
cccaaaccgctgggactacaggcgtgagacaccaggtccagccctcattagtctaagaaccacctgacattgctgaatatctcactaatgtgtactttctacatcattaatttttgcttttattatttcctttttcgttaggtttaatttggtgttgtttttctaatttcttgagaaagatgttcggaccactgatttctaacctttctcctttcctaatataaagaaataaatgttcctctaggcacagcttctactacatcttttaaaagttaatgtt

SEQ ID NO: 103342 - DNA, 414 bp, Homo Sapiens
  misc_feature (49)..(65): n is a, c, g, or t
tcacgccccccaggactcccgcctgggccaaaccgtgagactctgtctnnnnnnnnnnnnnnnnngagagaaatgggacctccgtcttagactgaagaattcagttctacgtgcttagcagtgaatacttttgtccaaggtactctggcaggaggaagaggcgtgtcctcttgagttcttgacttgggctctggcctgttaatatttccatgttggtgaaaccagaggcagcactctaggtgcacgaactttaggcagcgcagcctcctagtcttatggaacatctgaggcagaagaaacctgagtccaaccttttcattttatagatgaacaaacagatcctggtgggacagtgtacccaaggtcacccagccaagaggctgagcaggactgtacgtcagatccgtctacctc

SEQ ID NO: 103343 - DNA, 158 bp, Homo Sapiens
tgagccggtaccgtacgcccacaaggactccttcctcactttaaagtcaactttacatgtgatatgttttaaatttctacctgcgtatcctatctttaatattactataaagtactactaactttaaaaggctattttaggccgggcgcggtggctca

SEQ ID NO: 103344 - DNA, 410 bp, Homo Sapiens
ctgatctggaattcccattctctcttacaacggactccccaaatacggcagagataggtaagttccacacgtgtcgaaacttaaatgaacacccacaaatggctcgatcgaggtaggaaacagtcaaaaggaaaccttttctgaatttagttctgaatccaaaatacaaaacccaagtttacaagtaagatgagaaggggagagaaaggttttgactggtaacagcacacagcccccaaaatcggctttgtcaaaggcctctgggaaccaaacacctccctgctgaggcaggatggcctcatggccggaggggctgcagacaatggggccagcacacgcctgtgcacccggtcccagacccaaagccactggacgtcccccttggactcagcaggaagaactgaaatgtc

SEQ ID NO: 103345 - DNA, 762 bp, Homo Sapiens
ccgtcacgccacaaggactgggcttcacggtgtttcttgtcagcatctccgtgcaggccattgcggcaaatgcgtccacggtcatctcacatccagccagctcatggttccaacgggcttccatcaggctgtggagaacctgagggtagatggtcaggattctggaaaagttctgcagacggcttctgaaacgctggtaggcaaggtgcacccacggtaaggaaacctcttccccgggcgcttctgacgccgctttcagtttcctagtgcaggaccacagagccatctgcagaaactttaattcctcctccgttgacacacgcatggtcaagagaatgaaatccttcaagtaacactgaagaagttcctgctgcggctctccatggagctgggcaagaaacctgcccagaggagtctgctgaaagatgtccacgaacttcttgggcagtccttctgcgtctgtgatgtactgagcctggacccacagctcctccagatagtccttgattttccagctgaaagggacgttgttggaagcgttctcggaaaggttcatgtggttctgcaccacgatgtaggccatctcacctttatgtctttcattattcatcacaagaggaatgttcagaagcatcgtgtcactgaaaataaacatccaaagatctcttgcccagggcggagtatctggcctggtcagtaactctaggttgccgtctctgtcgatgaatgatatcatgctcgccagagacgacatgtatcctc

SEQ ID NO: 103346 - DNA, 413 bp, Homo Sapiens
cctaacagactggccgggacgtctttgagaaggccaccgtgcctgcgccgttcggcaagttccagggcaagacggtgaccatttggtgagatcatcaactcggaatacttcacggcagagcagcggcgtggacctgctgcggcagttccgcacgggccggatcacagtggagaagatcatcaagatcatcatcacggtggtggaggagcaggagcagaagggccggctttgctttgagggcctgcgcagcctggtgccagccgccgagctgctggagagcagggtcatcgaccgcgagctctaccagcagctgcagcgaggtgagcgctctgtgcgagacgtagccgaggtggacactgtgcggcgggctctccggggtgccaacgtcatcgcgggtgtatggctggaggagg

SEQ ID NO: 103347 - DNA, 339 bp, Homo Sapiens
ctcatcagaactggccggggactgccaaggccgtgggcgctgcgtgcagggcgtgtgtgtgtgccgggcaggcttctcaggccccgactgcagccagcgctcctgccctcgaggttgcagccagaggggacgctgtgagggtgggcgctgcgtgtgtgacccaggctacactggtgacgactgtggcatgaggagctgccctcgcggttgcagtcagagggggcgctgtgagaatgggcgctgcgtgtgtaaccccggctacactggcgaggactgtggggtgaggagctgccctcggggctgcagccagcggggacgctgcaaggacgggcgctgtct

SEQ ID NO: 103348 - DNA, 745 bp, Homo Sapiens
aggctgctggatgaggagaccagcagggccctgtcggcaccaagggccgacgccaaggcctacagtgaccccagcacaggggagccggccacgctacggcgagctccagcagcggtgccggcccgaccagctgaccgggctgagcctgctgccgctctcagaaaaggctgctcgggcccggcaggaggagctctactcagagctgcaggcccgtgagacctttgaaaagaccccggttgaggtccccgtgggtggcttcaagggcaggacggtgacggtgtgggagctcatcagctctgagtacttcactgcggagcagcggcaggagctgttgcgtcagttccgcacgggcaaggtcaccgtggagaaggtcatcaagattctcattaccatcgtggaggaggtggagaccctgcggcaggagaggctgtccttcagcggcctccgtgcccctgtgccagccagcgagctcctggcttccggggtcctcagcagagcccagtttgagcagctctaggacggcaagacgacggtcaaggacctttcggagctgggctccgtgcggacgctgctgcagggcagtggctgcctcgccggcatctacctggaggacaccaaggagaaggtgtccatctacgaggccacgcgccggggcctgctgagagccacaacggctgcgctcctgctggaggcgcaggcggccactggggtcctgccggaccccgcgcggaaccagcgcccgacg

SEQ ID NO: 103349 - DNA, 122 bp, Homo Sapiens
ggccgcccacttgcttgcaggattcaggtgagtggaggaggtatccccataaacaatgacagtccaaggaaaacaaggacgaggctagaaatagaggaacacaaagggatctgttttaggta

SEQ ID NO: 103350 - DNA, 435 bp, Homo Sapiens
gcgcaggttagcactgagctgggtcctgcagcctcgcaggcagtgggcatcatgaccgtccccaccgcaggcccagagacccagatctcctctgagaccacatggcagagcccaggcctgcctcctagccttagcgtgttaggttgggggcccctgcgccggcccccacctggccctctctcaggcatcaggcaccctcaccggggtcactgggtcactgctgagttcagcacagtcagggccatcgcagaacactcctcccagcgaatccacaggcccccagagagtctcctcacaccagaggtccctgggctggtcacctctcttctcaaggcctccatttccaaatttataagatggggtctaaacagtccctgggatcgtagtgacaggtgacgtctgtggccacacaacaacttgttacagctgttactg

SEQ ID NO: 103351 - DNA, 258 bp, Homo Sapiens
gcccctctgcggctctttggaggtgtttagcgcacgtgcctagtgcagcacaagggcacctgtctgctgtgacagttctgactgacatcatgggcttttctcaggctcagtgaccaccggcctgtgtcagtgctgctgggccgggagagctggtaacagcaccaggcagtccgtgtgtggagggacagcctcctcagtggagatgacgtgtgctgatattgtccagttttgccatactgttagacacaagtctttgtg

SEQ ID NO: 103352 - DNA, 657 bp, Homo Sapiens
cacagggcccgcaccacctccaggaagcccctctgcacggccacgtgcagtgctgtgctctgggtgctgttgatggcgtccgcccggcacccagcactcaggagcaccctggtggcctcgggctggttccccagggccgcgtagtgcagtgccgtgttgccctcgtcgtccggcaggtccacgcccgccctggcttgtagcagcagccgtatcaactccacctggcccaggtaggcagccacttgcagagcggtcctgccttggttcttggtgtccacctgctctgggcgcctccgcagcaggtccagagcccgggctgcgttacccagcgccacctccaccaccagccttcccgggtgctctgggtcactcttctgggcccgaagcttgtccagggccacgctcagtgagcttttgttctcccgggcgcgctcggccacgtccaggttggcatcctcctcgggccggtaggccaccaggcaggaggggctgaaggtccaccgctgaccagcgactgctacacgcaggttcccgtctccaaacactttcaccaccttcccgacgcggcccagggcaggggccatgtcgtccgtccactcccatgcccagcctgcaaccgcatcacccgttcggtacacgagctcgattcgtatcatt

SEQ ID NO: 103353 - DNA, 533 bp, Homo Sapiens
gagaacccccctcatagactgcgcccgacctgggcagcttcctgctgcaggacggcgtcacactgcacgacgtcaaggccctgcagctggtgtacagacggcactgcgaggcaactgtagatgtggtgatgaacctccagttccactacatcgagaagctgtggctctccttctggaactctaaggcctcctccagcgacggccccacctctcttcctgccagtgacgaagaccccgagggcgccgtcctgcccaaggacaagcttatctccctgtgtcagtgcgaccccatcctcaggtggatgaggagctgcgaccacatcctctaccaggcgctggtggagattctcatccccgacgtgctgaggccggtccccagtaccttgacacaggccatccgtaactttgccaagagcttggaaggctggttgacaaatgccatgagtgacttcccacaacaggtcatccagaccaaggtgggcgtcgtcagtgccctcgcccagacgctgcggcgctacacgtccctcaaccac

SEQ ID NO: 103354 - DNA, 335 bp, Homo Sapiens
gaatcgggatggctgggctgtagctttcggcaacctgtcgctttctggactacacttcccagaagcctctaggcccagggcactctcccgcgagaactagattgtctcttgaggagtgggcgggatcttcccgcggatttgggcaagcggccttggggctttgtgagatagctagggtcgacttgtgtggattctagtagaacggagccgaccctatccgaacaggcgtaagtgaggcggctcggagcctggcgcgacaggaactcccgacctgtgtgggctgcgtggggaacaggctaaggagcgattgtgaggagtgtgtacggttgtgactg

SEQ ID NO: 103355 - DNA, 867 bp, Homo Sapiens
ccaccggttgtactcgtggccgctctaggtctcctcagcgaccaggctggtctaggagcagaaatacccagagaagaggcaggtctaggtcagcaaggcgagggaggtcccactctagatccccagccactaggggtagatctcgttctagaacaccagcccgccggggcaggtcccgctctagaacacctgccaggcggagatcacgatccagaactcccaccaggcgtaggtctcggtctagaacaccagcccggaggggcaggtctcggtctagaacacctgctaggcgcagatctaggacccgatcaccagtacgacgcaggtctcgtagtagatcaccagccaggagaagtggcaggtcacgctctagaaccccagctagacgtggccgctcacgctccagaaccccagccagacgtggccgctcacgctctagaaccccagctagacgcagtggtcgctcacgctccagaacaccagccaggagagggaggtctcggtctaggacaccaagacgaggaagatcccgcagtagaagcttagttagacgtggaagatctcactctagaacacctcaaagaagaggcagatctggctcatcttcagagcggaaaaacaaatccagaacatctcaaagaagaagcaggtccaattcaagcccagaaatgaagaaatctcgcatttcttcaaggcggagcaggtctctctcttcaccacggtccaaagcaaaatctcgcttgtctttgaggcgcagcctttcagggtcttccccatgccctaagcaaaagtcacagacaccacccaggcgcagtcgctctggatcctcccaacctaaagctaaatctagaacgccacccagacgca

SEQ ID NO: 103356 - DNA, 561 bp, Homo Sapiens
  misc_feature (132)..(140): n is a, c, g, or t
ggatttaggtcttgattttgagttcttagtatggtaccgtgaaaatcactagtgttgaaaggaataggatcagagggggaataaaaaggcatttgatgaggctcttagtgtaacagtatgtctcactcatcnnnnnnnnnccttagcctttgaaatagacaatagccttgagccttctcggcagatggaccatgtttgtgccttagccacttaacagccattagcctaattccatcctctacagccaaattaaataataagtaaaggcctatgaaaaactggtttggaggcagtgttactgccgttcacttgacagccttctctgaagcagatgctccctctccaccctattaaactgctcctctgaataaggagctgtccacacagaagcaaagatagaggcctgcaggagagtggtctggattctggagatagggggaaaatcctgatgatgaaagatccagcttctttggaaggctgaggcgggaggatcatgaggtcaggagttcaagaacagcctggccaaaatgggggaaacccgtttttacttaaaatacaaaa

SEQ ID NO: 103357 - DNA, 415 bp, Homo Sapiens
cctctgtgcgcatttaggtggcagatgtaatagagcagaggaagtgctctgagacctatgtttgttctggccagttttaaagagaggggaagcgactctctaatctgctttgaagcaagtgggaggagggaagttgcacaggactcccaggaacctgtacacaatctgtctccttctgtgaccagctgaggctgggtggtgactgtaagccctgttcatgagacaggaggagagagccttgaagaaggaaagcctggggtgtttttctgtggtgctgagggacagggacagtaagaggttggagtaaataataccagtatgaatactaatactctgaataaggacagctgacaagcattggttgcttaatgggtgccaagcacagggctaaacattttacctactgcgccacaga

SEQ ID NO: 103358 - DNA, 541 bp, Homo Sapiens
  misc_feature (104)..(170): n is a, c, g, or t
atttaggtagtgggtcagtctttgtgctgacagtaactgcaagagagctccaggaaaaaggaaggatggcatgatgtctttgattttatgattatcctccccannnnnnnnnnnnnnnnnnnnnnnnnnnnnnnnnnnnnnnnnnnnnnnnnnnnnnnnnnnnnnnnnnngtctgtgaatgtgagggtgtctttgcagttcatgcagttacagacccctttcagatttcacaggcaacagaatgtatgttatcttcataacccaaggctttagcacaaggcctgggatttattaagcaccactctcagctgtttctgccgaatcttccataaattttaatttgtgtgggtaggtgcttatattattgtgttttatgcttaacctattttacattatgattcttatggcatagaactcacgttgcctcttcagtcacggcagcaacagtggtgaatttccatatagtatcaatgacttccttattccattttctgttcctctctcagaaactccttgccagaatacctaaatcgcacaggta

SEQ ID NO: 103359 - DNA, 625 bp, Homo Sapiens
tcctctggtcgcatttaggtcatatattacacactgacctgcgactctctgtaatgcccaagcgtaactggactagttagggacagggaagcagcgttaatgcaatttctttttgttggcttgccacaagagttattttcatggccatactttcaaggtggcctaagacaatcacctgcaaaccctgtatttacatgggcaaacatcataacttctgaagaaaccatcaccaaaaagagagcaaataaaaaggaacaaaacctggataacaaagcgtacaaactgccgaacaagaggccatagtaccaaattgaaaatggatcaaaagaagaaatttgctaaatctattattaggagggatcactgaccacatggctaaggacattttgaattactatgggagcagttatgaatgtgaaaactgcaaagaataggcatttctaaataaataagaataccataatttttttaaaatcagagaattgtcataagatgcattccagtaatgaatctaaagaccatgacactaaaaatcatatcaatgttttgctttaagaaattactaacaagattcatccagattaaaatgagaaaaataagagattcttactggagaagtttatcc

SEQ ID NO: 103360 - DNA, 212 bp, Homo Sapiens
tcggctcggacctctgtgcgcatttaggtggagtctaagtgagcacgtgtctcctttgcaaaacgcctgtgcctttaagacattctggtcaaccatgaagaatcacagatcattcctataaaagtgagtctttaactcaaaataattgtcttgcttctactttccaatgtctcgttaagaaaaaccatcgtagtctgggcgcagtggctcat

SEQ ID NO: 103361 - DNA, 335 bp, Homo Sapiens
tgagccactgtgcctggcctcatattttatttttaataaaaataataattctatctctctgcttaagtgtcttttaaaaatgtcacaaaaatcctaaaaaagatgattcataaaatagttagttgatacctctcttttgacagtgtatttctacctcatttgactgtttcttgtggatttgccttattttttcgatgagaccagaaattcccaaacatctgttttcttgcattgtcacaacagtgggaaataactccttcatattattaggtcctttaaaatggaggctcttagtttttaaaaaatctttgtagcacctaatgcgcacagaggtc

SEQ ID NO: 103362 - DNA, 601 bp, Homo Sapiens
  misc_feature (45)..(352): n is a, c, g, or t
ctagggctctccctcccgggcccgtcgaccgattcagagttttgnnnnnnnnnnnnnnnnnnnnnnnnnnnnnnnnnnnnnnnnnnnnnnnnnnnnnnnnnnnnnnnnnnnnnnnnnnnnnnnnnnnnnnnnnnnnnnnnnnnnnnnnnnnnnnnnnnnnnnnnnnnnnnnnnnnnnnnnnnnnnnnnnnnnnnnnnnnnnnnnnnnnnnnnnnnnnnnnnnnnnnnnnnnnnnnnnnnnnnnnnnnnnnnnnnnnnnnnnnnnnnnnnnnnnnnnnnnnnnnnnnnnnnnnnnnnnnnnnnnnnnnnnnnnnnnnnnnnnnnnnnnnnnnnnnnnnnnnnnnnnnnnnnnnaagaacagaactgatgtaataagtggggtaagaacaaaaagaaatatctagaatgactcctaagaattttagtttgagcatagctttgagaagggggttttaaaggagaaatcaagggagatttgggggaaaaaagagcgatttggccaatgttagatctgggataactatcagacatccaagtggatgtcaattagacaattagataaacaagtctgcagctcgaaaacgtcagatctgagctcacgg

SEQ ID NO: 103363 - DNA, 220 bp, Homo Sapiens
tgcagttagtatttttgaaagtaagaaatcgtctaatactggcaatctcatatgggtcaacttattgtggagtcaggttagacagtaatgggaaagcacttatgaaacacttcctaaggttaagccatattatacataggggaaccctattctaaccccagacaacctaccttaatagctcacttttaaatttccagaaaatgtgtaaaacctatatgcc

SEQ ID NO: 103364 - DNA, 495 bp, Homo Sapiens
tcgagtcggtacctctgtgcgcattaggtatttccagtttggggttattacaaatagcgctgctgagcactgtctagaacctagctcctggtgagcatagaggctcatttctgttatacccgttcctcacagcagcgttgctgagcacagggcgtgtgcatgttcggagtgagtgggtgctgcctgagcacctgcagcagtggttgatcctcagtcgtagttttttctgtttttaacataagatgaattgacatgaggtaacatgcacagatcttaagtggaccgctggatgaattttcacatacgtgtgcatctgtttcaccgcgcatctcttccacatatgcgtgcatccatttcaccgcggctccgatcaagacatagagcacttccagaagactccctgagacccctctccagtcatgaccccccaccctggggatgacgtctactctgacttctgacagcgtggattatttttgcctattctagaacttc

SEQ ID NO: 103365 - DNA, 178 bp, Homo Sapiens
tgtctttagaagtcagtcaattcaacccacgtagaaaaaggggattgcacagcaatcccattactggttatatacccagacaaatataaatcattctaccataaagacacacgcttgtgattgtgaatgtcactgcagcaaagacacagaatcaacctaaatgcgcacgaggtccggc

SEQ ID NO: 103366 - DNA, 191 bp, Homo Sapiens
catttaggtgtcaagactggtccaaatcttgggtcagactcacatttggagagtatcgtctccatgagagtcagaagaaaatgggcaaagtaattgaggaggcgagctacaagatttccgaagctgacactcctgaaatataaagatgaggactgagggactcactaacaaggtggctggctctccccaga

SEQ ID NO: 103367 - DNA, 363 bp, Homo Sapiens
atgagccagcgcacctggacatacaaaatttctaagctcccgtctcctcacgtgctgggtcttacccacagccattactgaagccccccgacagcctgggagactggtccccagccttgtgcagcccatctaacccagttgtgggcactggcctggacaatctccacctgagggacagggacagacccccgaccctgcccagctcactgaccatcgccaaagagtgtgggacaggatcactgatgggggaagggcaggagtccggagagccaggcaccatctccagatatctacccaggcaaccagaaagggcctgaccggtcaaccctcgccgaacccaagtgggacgccgggtacggagcc

SEQ ID NO: 103368 - DNA, 777 bp, Homo Sapiens
  misc_feature (46)..(117): n is a, c, g, or t
  misc_feature (667)..(688): n is a, c, g, or t
gcccggtaccttcccaccagcaagactacaggtgctggcaccatannnnnnnnnnnnnnnnnnnnnnnnnnnnnnnnnnnnnnnnnnnnnnnnnnnnnnnnnnnnnnnnnnnnnnnncctactttggcttcccaaagtgttgggattacttgtgtgagccacagcatccagccatgttaatgatttccaatttcatttccttgtgtttggagaatatccttttaagaatctaatcttcttaaattgcctgaggcatgttttacagtctagcatatgactatgtttcatgtttacttgagaggaaagtattctgctgttgttaggtgttgttttacagacatgaggtatacagtcagtttacagtgttgctcaagtcttctcctgccttcatctcctgcctagttgttctatccaagagaaacagtttctgttgcttagttttttcctgtgtagaggtcacacttccttgttctttccatgtcttataatctgtggttgaaaaattggacattatagataacatattgcagtagctctggaattcatgtccttggggactgatcttgtctttttggtggtttattatttttgtttagtgacttagctgaactaactgtaaagtctacttcccccatagtgtgcagcccctgtggccctgctcggatgnnnnnnnnnnnnnnnnnnnnnnggatttccatttttgttgcccaggctgacctgcattggcttgatcgccgccgccctcccaggttcaagcgattctcctgcctcagcctg

SEQ ID NO: 103369 - DNA, 421 bp, Homo Sapiens
  misc_feature (321)..(377): n is a, c, g, or t
agtctctggcagaagtgggcgagcagacagaggtagtatctgccaaccgcaagtcagcggccgacctgatcatggaatgcaagatccagagctgcaagccacactgaacaccacctcaaagagggctttttttctgcctcaagcaagggccctagttttgcagaatactgtgaatagctgcacagtgacgcttcccagctcaggttcctggatttagagctgccgtgtgctgtgtgtccccaggcaccgagggaccagatttgagagaagcctcagggttcagtgaggctggcggggagctggactgcaggagtccaggtnnnnnnnnnnnnnnnnnnnnnnnnnnnnnnnnnnnnnnnnnnnnnnnnnnnnnnnnnctaacagtcagatcttcctcttagggtcactgtaaacccctttt

SEQ ID NO: 103370 - DNA, 588 bp, Homo Sapiens
tcttgatgttcccaagctctggaaaaggggacggtaaaatcatgccagatgtggcaggggtgaagacagtgggggattgggcagagccatggtagacatcccaccgccagggatcagagatgacagggcagcaggcgtgcgggggtggagcccacatgtagatcccccgcccccgcacacagggtcaaagttagctgggatcagggatgacgggggggtgagaagaagcgtggattttatgaagagtagaagaaacagatgtttgttaagacctaacatgtgggaggcactgctgtggacaggagtgagtgagacgcagggccggtcttcatggagtttacaagctggcgggggatacagccctgtggacagataactgtcattacacgggctaaacactagcatagggggaattctaggagatacagggacccacaggtatggcaccagactatggggtcagaataagatctcaccacagaggtatgagcaaaaagaaacaggatatggtcctgttcctttcaagcttcccacaggggccaggagccccttttccagagcttggggatactctaggaatcgactatg

SEQ ID NO: 103371 - DNA, 164 bp, Homo Sapiens
aatggctctggacaaagggttgtgccaattaattaccaaacattgagcctgcaggctttgagtgggagtgttgcccccaggagccttatctcagccaattacctttcctgacagtaggagcggcttccctctcccattccctcttcacccccttttcttccttt

SEQ ID NO: 103372 - DNA, 236 bp, Homo Sapiens
aagggtcatggaaaagggtgcaatagaagagtaatcatcaggataaaagttgttggtggctgttgagctctcatgaagttgggctcagagaggttgagcgacttgctcgaggtcacacagcaagtatatgctggaggaaccgggatttgaagccgattctgcgtgaggccactttgatgtgttctgactgatgaacaaagctgccagtgtgggcagctggaggggtaccgagctcg

SEQ ID NO: 103373 - DNA, 550 bp, Homo Sapiens
gactcctagagtatcacaagctctggaaaaggggacgataggctcacttcgcaaggccgtgcctcgggtaagcataacacttgcaagggtgtgcaaggtccaacatcagtagtaagggggaagtctgcagtcctgaggtcagtgctgggtttctcgttttctgctttgtcctgagatttcgttacaagtaaacagtagatgaatttcctatgaaactaatgacgcttaagcatcaaggcaccctacttgcctgcaagggaccctaacaaagtgtgcacaaagccgttacacaaacgcccttttgtaatgggcaaaagtcagctgttttgactgtagatctaaccttgtgcctttccacttaaactgtccttccatcagactttgcatcaggtggcactggcgtggatacagccagtgtgggctaaagataagctgagtagataaactaactttgcttcaatagggtttgcagtcacatttctctgtaagttactgagagccatccagtgtagaaagggcttccaggcataaacccctttttcaaagcctt

SEQ ID NO: 103374 - DNA, 169 bp, Homo Sapiens
gcgagtgcgtgtctaggacactcactgagctgtttcccaggaccatggttgagtacaaacagcaaatgcgacatggggtggggccggctccaaaacagtcctgcatgtggcccgatgctcaggacacattctgtggccacagcagtccttgtgggcgtacggtaccgcc

SEQ ID NO: 103375 - DNA, 424 bp, Homo Sapiens
ctcggtagctgtgactagcggcttgatctggctctgatctcaggcctgaacgggcttgccggatccttcgtacctagttcccaagaccaaggcccagtagaggagaagtgcacgcgtgggcggcggtggtgctggctgtgtgcgggtgtgctgggagtggctgcagggatagcagggtgactgctccttcctgtcggcgggcaggtggatgttgctgagcagcttcgtcattaggacagagatgcccactaccttaaaaatcagaagctttttggcttctggaagctttggcaccatgttgggggctggatgccaggacgcaggggcagggctgggtttctgcaatctgagcctctctcaatatgttcctcaaccgcctggcttgggggtgcagaggctgtcttctccttagtcacagctacca

SEQ ID NO: 103376 - DNA, 278 bp, Homo Sapiens
gtgatcgggagtgtggcctactgagtgtccatgagtggatgtgactggcgctgtgtcaccccagctgggaccccgtctggcctcttgagtggggtgatgccgggcgagccacggctgttctcagaagggtatcctctcctaggccctctggggcgtcacctggaattctctgcaggccacagcacaggctgcccgagctgctgttcggtgccccttgcttgctggattgtaaacaatgtgcaggcagcagttatgccccgtgagtcacagctccagac

SEQ ID NO: 103377 - DNA, 174 bp, Homo Sapiens
acggtccgtctagtcacatagttcacccaggacagaaaaatacaggagtttcttaaggccaagaacagctttaagagacttcaaaaggtagtaggcagggagtggaggatcagcttgcaaggaaaacagaggagtgaccagagatgtaaataaaagaggttgtaccccagaagc

SEQ ID NO: 103378 - DNA, 383 bp, Homo Sapiens
ccggtatttacctatgtagcagttctgggttcggaaccctacttctctcaggaggcaggaaggatggaaggacatccctcctgcagctgaagacggcagagccccagccactgctggcagtggccgtggacacacagtgcagtgtctgagcagtgtgtgaagagactcccttactgtctgaagggcttcactcaccctacactagtgagaagccgtctgaatattgtcatggaagggaagcattcacatattaagggtaaaatcaaagtcagagcaaaatttaaagtctgctctttgcccctcaagaccctgaaagtccccagtgactgtcattccactcacctcctctcccattcactgctccccagccccatggcctctta

SEQ ID NO: 103379 - DNA, 424 bp, Homo Sapiens
gctagatgactatatcgattgagttcacatgtatacctctgcaaagactgcattcacaactatgtattggaactttagaggttatcagtatacaagcctgagtaacaaaacttagtcatccaatgtccaggctagactagtattaaaattatgtagatcagtaattcagcacaatgctggaacacattactcacatttgtctataatagaccctttactgtaatcaatggaatctttaattagataaagcaagtctaaggggagagaccttatataaaaaaagctcctatatactgaatatattatgagccctgattatgaagtgagggacaaggcttttctttttgaaataaatgatggaggacatagatatgtggtagccattcatgctacataatttagcattttattgttaatatgttag

SEQ ID NO: 103380 - DNA, 498 bp, Homo Sapiens
cctgtgattagaagttgtggctgtggctgggggggggaggtggcgaccagcgcctgtggaatgtcctcgaggtccaggtcatcgtagagaaactcgttctcctcgaagtcggggtcctgggatgagtcaacatagtactcaacgtcgtccttgatcttgcggatggcgtcaacgaggatggagtcattgtccagcatgcgcaggatggtctctagcatgcgcacgtggtagcggtgcttctcgatgtgccgcttcaagccctcaatccggtcctgcttatccttgtcgcccttcttcttgcgtgtctgcactgacagtgactccacttcactctcaaactggtccacctgcatgttgagcgtgtcgatggtattcgtgagccactggccaacctcttccttctccttctgggcaggatctaccttctgggccaggcccaggccctctttgctgtaagctttggttttggtctctcgttccacaacttctaaggttaag

SEQ ID NO: 103381 - DNA, 421 bp, Homo Sapiens
ctggtatacgtgattcgggtagcatcatttgctgttacatcagtgaatttggagatatttctctttcatgtttttataaaaccaggtcagtagtcccacaagctcaaaagtgaagaatagctcatggaagaacaaacacattttggacgagaattatggaatatctaaatatcccagagcatccttccattcacatcatttagagaaaacaggcaagcaaaagatagaagaatttgggaaaagtgacaggattgtggcatctcttgtctggcacctcagtgccagtaggaaagtagcttggaatagttaatttaagtctatttgaggaaacaacatggtgatataggggcaggagctagaaaaaaagtacaatattaagctccaaacatcaccacatgtcactaatagaaagccacggcca

SEQ ID NO: 103382 - DNA, 382 bp, Homo Sapiens
  misc_feature (215)..(273): n is a, c, g, or t
gcagtttgcacatgtgcttcacctgttctgctgaacaagcctcaggctgcaccctacctggaagatccaacagagactactgggggagcggggccatacggatgatcagcactctggagctggaatggttgggaggtatcctctaggcagcaccgccccaagactccaacactggcaacttctatccaggacccccaaggacaagggtttccacnnnnnnnnnnnnnnnnnnnnnnnnnnnnnnnnnnnnnnnnnnnnnnnnnnnnnnnnnnngttatccaagccccagcgaaatctattctccctgtgcttacagagaccctgccccgaccccaagaagcctcctttattcaatacacagcaagcagccctccacaggtca

SEQ ID NO: 103383 - DNA, 145 bp, Homo Sapiens
gtgggttgaccgtggcttgtgggttgaccgtggcttacccctgatcccacacccagccttcccctgagaatcattccccgtattcctcaactttgttctcgtctccctgttcacatgcaaaaatcctcccacatcatgccacggt

SEQ ID NO: 103384 - DNA, 310 bp, Homo Sapiens
ttgggggctccagaggacactcactgaggcagaggctcctggggatgcagcgctgacggaaccctaagaacttggctgcagctgggaagtctggcaaagatccagtggcccacatatccctgcttgtcttgtcccctcacaggaggatgtgttggctttcaaagctggaagcagagaggaagcagcagtttgaaaatggtcaaagaccaacttccctggcagtggcaagaacccagactggtcagggaaaggagggcctggggtggcctgctttctacaaacaaggaatagataagcaacaattaagtat

SEQ ID NO: 103385 - DNA, 299 bp, Homo Sapiens
ggtggcttgacacagcgtgtgtgaaactgaggaggtagtgtgtgtcactcaggatagccaggttctgttgcaataacaaccgtgcccaatctgcatgctgacaacagtcaaagggtgtgtggcactcctgcgcccatgcacagcttagggagggtggtgtgtgctccgtgtcattggcctcacgccaggactagagggaaagaaggtggtaaatgatgccctagctctaaagccaaaacaagccgcccagtcacagttgacctcaagtgaatagggaagtgtggtcttaccctgcttct

SEQ ID NO: 103386 - DNA, 259 bp, Homo Sapiens
ataattagcctcagatgtatatatcagtcaattcaccaatcgccttttgtcccacacattattcctcttccaccccgattactgacccaaacatggatctcagccctattttcttcatttccagagtagcaacagcaatacaaaaaatctagtcaaagacacatgtataataaattcagctgtactcggagaggagagtgtggaatgggggcagaggaattaaaactcaaggtcaacaatttttaaaaactcaggagac

SEQ ID NO: 103387 - DNA, 455 bp, Homo Sapiens
agctgggaggcatggaggaaacgcaacagaaatccaatctagagctgctccgcatctccctgctgctcatcgagtcgtggctggagcccgtgcggttcctcaggagtatgttcgccaacaacctggtgcatgacacatcggacagcgatgacatatcacctcactaaaggacctagaggaaggcatcacaaacgctgatggggaggctggaagacggcagccgccggactgggcagatcctcaagcagacctacagcaagtttgacacaaactcgcacaaccatgacgcactgctcaagaactacgggctgctctactgcttcaggaaggacatggacaaggtcgagacattcctgcgcatggtgcagtgccgctctgtggagggcagctgtggcttctaggtgcccgagtagcatcctgtgacccctcccagcacgagctggtacgagctcaat

SEQ ID NO: 103388 - DNA, 384 bp, Homo Sapiens
  misc_feature (234)..(234): n is a, c, g, or t
  misc_feature (242)..(242): n is a, c, g, or t
  misc_feature (254)..(254): n is a, c, g, or t
  misc_feature (296)..(296): n is a, c, g, or t
  misc_feature (336)..(336): n is a, c, g, or t
acagagggtgggggcaagaccggggtgtgggggtgcgtttggaaagcagggttaggactggaattctaaggtaccaggaaggagagacacactcaggggctcagctgggttcctggagatcaacctttggggtctgagcccctctgagagtcgagctcctttcctgcgaggccccgtctaggaggggcctcaggaaaatcggggctgcccagctggttccgcaactccccccangttctgangggaggcttcanggggattacagacggtctcaagagggaggcccagcccagtcnccggcggcccctgacaccccatcaggcctgctcaggcccnagcagcttccatgggagggacggccgacgagaccttgcctgcccgggg

SEQ ID NO: 103389 - DNA, 389 bp, Homo Sapiens
ctcaggggtggggctgggacccaggcaaccacagtttcaccaactgaaacaccgagttctctctgaaaaagccccgcgtgaaattccctctgaagagggcctgcagaggccgggccgctggctgtaaggggcccttggcggagtaggaaagtgagtttcatccaggccttttaagtagacatgggcagggttcaggaaaaccagcaaaggagggggaagcactgcaggactgaccctagcgggagccactgaacatccaggagcgacaggacgacagagcccaggaggagcggatgctgccagagaggccagcggggggctgagcttggcagtgatggagctgcagaaaggatgttacagcccccacttctcccaccaatgcctcgtgc

SEQ ID NO: 103390 - DNA, 442 bp, Homo Sapiens
tgtccgcacttgcagtggtgggtgagaactcaaccctggctaggcctggggaggccagggaggggcagagaagctgtcaggggctagaaggactccccttccctggacagcagggggtgccgggcttccctaggaaagggctctgtcctgcccctcacccagctaaggaatctgggaggagaaagcccctgggagtgggaagccagcagggaggacctgagagccaccccagcatgcatgacccaccaccaatctgacgtgggtcccacgcttaaacctgcaacccaggcctcccccacaacccccagcctggctcgcccactgcccactcatacctcctgatctaccctgaatgcaccccatactgggctctgccccaggcgctgtctcccttgtcataggtgatggcaacggcttctggctgctcaggcccaaagcacaa

SEQ ID NO: 103391 - DNA, 469 bp, Homo Sapiens
gaggatcttaaaggtggttgtgggtaggagtgctgtctgagcctgccctccgctgggcacagcgtggctgcttcaggggctaagcacacactttctgtcttctaaagggccgccacatgccaggagctcaggtgtgagcccggctctggctcttacctcatagggtcactcataggggcacagggagcagaacattgtacacagcgaggcaccacccggcttggcatctgcctcagtggacttactacctctagaaggaaatacctgagttcctctggcctcagctcctagagtgactggtgtgctgtccctgttactcttctgtcaagggtgacaactgtgtgacccatcatctgtgtgtcaaagcaaggccctgcctgggcctctgctcctgtgctgaccccaaaggcaaatgctttgctagtttccttccagttaatttcacctatgaatagatgtgtgaaaactg

SEQ ID NO: 103392 - DNA, 361 bp, Homo Sapiens
agctcggcacccatgaagcgatgaaacatattaagaaaagtgaaaaatacatattctttaaagtgcctcccttttaaggattttgtatcaacaaagcactgattgtggaattcatgtatagtcttcagaagtcacagtatataagctccgactatcaatagcagcttaacaggctctataaaacaaagcattaccaagtataggtaaaatcatacatatttgaaacttatatcattattttcctaccaatgagtgattcatcataattttcattatgccttcaaaattatccctgagagaggccagaaacccattctgctgatgaagaaactgaggtaaagatttcttcatcgctccatgg

SEQ ID NO: 103393 - DNA, 372 bp, Homo Sapiens
tggagcgatgaagaggcggcttgacaaagggcctgagatatccatccgctcccccaccccgagtgacgcgagggtaggagctagcagcctaagggttgctaagggttaaagtggacttgatcctagctgggggagggagctgaggaaggctcagatgcccagagcctccaggtatgacacaccggctctgctccacacacaactaccacaggtagggcaggcgttcacacatccagtggcaacctgcctgctcctagctgcccccacgttgggagcctctgcttggctcaccagctggcccagcagtgtcactgcctagctcaaaaccaccccaaagaggcagtgaggaaatgttttggagggttcatcgct

SEQ ID NO: 103394 - DNA, 348 bp, Homo Sapiens
gcctgccaagaatgaagcagaaagagggagtcgaagtgggaagcagaaaggagaaacagactcaatttctcaagatcatttgggagcatccagacatagatgtccccggaggttacatgctgaacttacgacctaagtctatgaatttccttttgcttaggacagctagagttacatttgtcacttaggtcacttataacaaatgtgccctatcaccactctctggaagcctgtgtgcagctcagagaccgaaatgggcataataattccccaggccaactgcagtcagcggcctccctcagagttcagagcagctgtccccctgcaaagcacttgaacattcatcgc

SEQ ID NO: 103395 - DNA, 345 bp, Homo Sapiens
atgttcaacttgcttcgctacagggacagctgctctgaactcttgagggaggtcgttaattggaaaacccttggggaattattatgcccatttcggtctctgagctgcacacaggcttccagagagtggtgatagggcacatttgttataagtgacctaagtgacaaatgtaactctagctgtcctaagcaaaaggaaattcatagacttaggtcgtaagttcagcatgtaacctccggggacatctatgtctggatgctccaaaatgatcttgagaaattgagtctgtttctcctttctgcttcccacttcgactccctctttctgcttcattcttggcaggct

SEQ ID NO: 103396 - DNA, 311 bp, Homo Sapiens
ggtttcgagtgaagttaccaactgtaacaattgcataggtttccctgtttctttcttttctccaaaaaactcatttcctcttggcaggtgttactataattcacaggtgtaatgaaaatgtaatttgggatttgaaaaagcatatcagactgcttcccagagtaccagttcttttcagctggtccatttcaacttaagaggtccatctatgcatttttgaagcttcatatttaataaatataatatttcactgctgtgtttgactattccgtttcccacactttctccttcactcgaaacccgggccagct

SEQ ID NO: 103397 - DNA, 657 bp, Homo Sapiens
  misc_feature (389)..(431): n is a, c, g, or t
ccatggaagcgatgaacggtgcatggcggcagtggtgcggggtagctggatattggcttgggtcttgaacaagtacaccaggaagctactgcaatcgaagccctgctctgccgatgtgccgccccacttatagggcgtacccagcaactcatgggcgcggtcaatgacatcgtcgatagaggccggcttgatgctttgcagcgaagagctgaaggtggcgcggggttggaaattggcctttgccgatgaaataaagcaggtcaggctgacaaggcatacacaaaaaattgatcgaagcatgatgaacgtcgcggtggaattaaacaggccgcatagcctaaagaacccgcaggtaatctcatgagctccaaatcctgatgacccgtagnnnnnnnnnnnnnnnnnnnnnnnnnnnnnnnnnnnnnnnnnnncttcatcaaactgagcggcgccatcaacgcagagtgcccttccccggtgctataaacctcggcacgcaccaaattgatacacgcgcggaaatcatccgacgccctattgagcagcatgcctgcctgactacagggaattcctactcgattccgtgattggcaagccccttgctctaagtctttcatcgctcccatggggggatacctctaggaatcggccatcacg

SEQ ID NO: 103398 - DNA, 769 bp, Homo Sapiens
ccaaacagagcaacacaagtacgcggccagcagctacctcagcctgacgcccgagcagtggaagtcctacattaagctacacgcgtgccatggatcacgcatgaaggggagcaccgtggtagaagatagtgacccctacagaatgttcatctgttcccaactcttaccccacccacgtgcagcctggagctgcatgatcccaggggaggggtctctctccccatcccaagtcatccagcctcttctcccttcactctcaaacccccatggagcgatgaatcatgagatgttctacctaaacttattaatcatatttaaagtaccccagtttgctaaggtttatctcttttaatatagcatagcacacccaagattagagttataataatgtcaatttcactctcttacatttggtatgttttcctaagtgagaaagctagcacacagagtttcatataaccattgataaatccttaggaaaatgtcaagtgctgagaaccagtaatataaatactcagtactcagtggtatcttggcaaatattgtatcttaacactctgtcacagatgttgccatatggccttcataattgacattttccttaaatccaggtaaaatatacaaatggtaaaagaaaatcacataaataataacagcctccttctaattccctcccacttctgccagtataatttcctaagggcaactttcttcctttcttcagttcgcttccagggtgaactcaggaacgctatgactgtgattacgg

SEQ ID NO: 103399 - DNA, 538 bp, Homo Sapiens
gtaagtcgtgtcggtaccccatggagcgatgaaagaggagaaattgtaagcagtttaaagaagaaaataagcaaacaaaaaactggagatttatagacatgcctgccttgccctgccattgggacactaatggctcaggtgcccctgtgatctgaggctttacaaaaaaatggaaaccaggctttgccttttacccatttgggtgggggcgggtccttaccgtatctctaaagaaaatgaattagagaaaattctacaaaacctggcaggagggttaccgtttcccccattcttaggcctatgtcaggcattaccaaacaattacttcattttttttcctgctgaatgcagacccagcctcagaatctttctcaatacagctgtactccgagcagccagtcctagtcattggtcagagttggtgcacaagagctgagggctgcagccagagagaagatgaggatcaaagcttcctgctgtgtgcctgctcttatgtcagctttctccaggtgacctggatacttcatcgctaccatgg

SEQ ID NO: 103400 - DNA, 396 bp, Homo Sapiens
gaggatccccgggtttcgagtgaagggcattatcatctgttaaaatacgatgtttggggttgacccactaaggtgattttggagcaaagatctgaaggagctgctgtagtgaggccaggtggttatctgctgggagagtgttccaggtagaaggaacacaaaccaaatactctaatgttaaaggcaggagggggcctggtgtgttcttggaaaagggctggagcagagtgagcaagaggacagtagtgagaggaagtcagagagataggagggcaagtgcaaatcacatggggattcataggctatcataaatgtgggattttaatacaagtgaaatagcattttgtacagatcattctgacttcactcgaacccggtaccgagctcgattcgatc

SEQ ID NO: 103401 - DNA, 189 bp, Homo Sapiens
  misc_feature (83)..(95): n is a, c, g, or t
ggtttcgagtgaaggatggacctgctgcccttccccggagctgtgggtcgggctgaaaattgaatgggctgtggggttgatgnnnnnnnnnnnnnctcatcccccaacctcaattctcatcatgacattttccaaacatacaagttaaaaatgagcataatgaatatctgcaaactcaacttccagagg

SEQ ID NO: 103402 - DNA, 575 bp, Homo Sapiens
cagccggtccgggttcgagtgaagcatctcttttggtccctctgtctcaggtaaatactcccaggctgtcgccagtgttactggacactgaggagagagatgagaaaagaaagtagtggccctttcctgaaggagatagagcaagacgattttccagtatttgtgtttgcagtgtaagaatttagttaagtctatgtagctgctaatgttttccagctactaaatccagttcttttccaataatcatcattaatagccctaatctaacagcaatgtgtaaaagcaagacttttgcttttgttgtcttcaaaacttccagtccaacatcactgagcacctgctctctgtcaagccctgaagagacaaagaggagccaggagctggatagaaaatctcttagaaaagaaataccatttgacccagcaatcccattactgggtatatgcccacaggaatataaatcattctgttataaaaataccttcactcgaaccctggaaggtcaggcgcgcgaccgcggcttccaggcacccgagaccgacaacgacgccgacgtcctgtcaatcctgcactgc

SEQ ID NO: 103403 - DNA, 395 bp, Homo Sapiens
gaggatccccgggtttcgagtgaagtccagatatacagacacagaatgaatacatgagcatgtctataaagtcgactgctcagtaaaaggggaaaacacacagtttatgttgctttatgatatttttaacacagatcttcaaagttacaggttaagacaacatctgctgggtacacctaccctctaaatttttataccaagtagctcacagggcctcattccatacactgtacatgacgaaacacgctgataccaggtaccatttttattggcaccacttctgcttatgaaattgataagaaaaaaagactgtcagaatataggaattttatgctccagaattcatacagaccgttttaaataacactcttcactcgaaacccggaccgactgat

SEQ ID NO: 103404 - DNA, 332 bp, Homo Sapiens
cctgctggagcggctgcctcaagcggtaacggaatattggcaggccttggcgcatggatcgtggcacacacgtcaggaacgctgggctgaatcatacgccgcagcttttgccgagcaggctttcatggcacggcaactggatgatgatttccattgctgggaatgaccctggtccagcaattggtggatgcccccgacaccgaggcgcgccagcgcgccgggggcagttgggccagcgtgcgggtaagccaattgatgtggccaggcttgcctgcagtcgcgattcccggggcacagcatatttatcgagacggcgaccccgagggtgcgcc

SEQ ID NO: 103405 - DNA, 280 bp, Homo Sapiens
aatcgagctcggtaccgggtttcgagtgaagggaggtgtgggagttagaagaaaaagtaattgtatggtggtaactaccagtaagcactcaaaaactgctcagtatactggaggaagccaattttctcccttgattcagttagtatttcctcgttcatgtttatctcgtgaagagtaaaccaacagaaaactcctttcaaaaactgaacaaagaagtacctcagactacttaacctggcagtgttctcctgttggcttcactcgaaaccggtaccgagcc

SEQ ID NO: 103406 - DNA, 228 bp, Homo Sapiens
cgcgaccgaattaaaaaataaattcatcgccacgaaaaattatgagcccgccgatttaaatgaactgctcgattttgcgcgccaaatgtatttgcgcggcgaaatcacgatttcccaataccgcgatattactcgtgaactcgaattagcaggggcttacaaaccagaacaaaaaaacgaatatgtagggctataatcgggagggtgctcccgtttttttatgtatga

SEQ ID NO: 103407 - DNA, 493 bp, Homo Sapiens
gatgaacaagcgcttaacaacaacgtgccggtgatcatcacgactttgacgaggttcgagatcatggtttcagttccctatgggctggaggcgctggggtcctctctcagtaggggatcgtagacctcaacagcgcagggaattatgaaactttgctgggtgacagcatgagttcaggttgccgccttagggcaaggcggcagggttggttgtcaggctttgactggtggccgttacagtgcgcaacctgctcctgggctcggtcaacgagtagcgaactcaactcgattaactgctgaatgcccagggcgatggcgcgttgggagtcgtcgaggtcgaacgccaaggtggcggccatttcgttggcggatgcgaggattacggcggcattggccaggagggtttcggggtcgatggtcgggtttacgaggaataggttgttgcttgggagttcaacaggcgcagcgtcgtcggatgggggcaagtgatgatg

SEQ ID NO: 103408 - DNA, 346 bp, Homo Sapiens
acatgtaatggatgttcagagaaatatgggaaacaagtatgtattaggaatatatttaaataaattatagcataatcttgtctctgacccttagtggctagtcaagtttttaaatgttctgtgtgcctcaatttccttatctgtaaaatgggataacaatagtgcataacaacctcatagggttgttgtgggaagtatataaattaatacatgctcagcacttagaacagcgcctggcttagaataagtgctcagtggtattattatcacagaatccatgtagaggaatactatacagttattaaataaaggaaagaggtaatctgtatgtactgacgtgtcgagt

SEQ ID NO: 103409 - DNA, 337 bp, Homo Sapiens
tgaaacccgcagcgaaaatgaataatgcgcagcgagaacgaataaaaaggtacgcccatgcagcgaatctacgaaccggaaaatctgatggagggcgagttgttgcagcagatgcttgccagtgaaggtatcgaggcgcacctggtggggcgccatttgctgcggcggcacgggcgagtcgccgatattcggcttgctggggctggaggtcgacaacgaccaggccgcctgcgcccgcgagagctgatcaccagcctatatcggcgcccaacccttgcccggcgacgaaccacgacagcttcaccagacgtgtacgaggggggaacctctagagacg

SEQ ID NO: 103410 - DNA, 254 bp, Homo Sapiens
cctggtcccatgagcgatgaaataacagcaataaatgagagtccatggcagttcctaaccctagtgcatgtgtcaaagagtttaatgttgtaaaatgcttgaaatttttttcagtgtgaaatcatttttcagatggaatagataaaagtcagaatttcaggcatctggcaattctttctctttgcctaataaagtattaccagttgttttagtgaagcatattcttcgttaggtaataaagaaacagtgctttc

SEQ ID NO: 103411 - DNA, 207 bp, Homo Sapiens
aagagttgttcaatgaaaaggatttccaaaataacttgtgcttcacccaatagagaaaggaggccaggaactgggcactaaggcattcccaggaagagttccagagagggagaaaacacccagcagcggcagcggcagtagcagctgtctatgaaacctagaatatccggggaaggggtcatccccaaacaggccaccttgccgata

SEQ ID NO: 103412 - DNA, 366 bp, Homo Sapiens
aacatcgagctcgctccggtgagtcgttaccacgatcggagacacgacttattagacggagggctatcacattcaaacatgaatactggatgataacacaatgccatccaattgatttaatcaatacaacatttgaagatcaagcagataaatatattttttggcgttatgcagctgacagagccaaaataacaaatgcctatggcttcatttggatatcagagctatggctcagaaaagcaagcatctactccaataaaccaatacatacaatgccaattatagatgaaagacttcaggtaattggaattgattcaaataataatcaaaaatgtatttcatggaaaatagttagagaaaacgaag

SEQ ID NO: 103413 - DNA, 671 bp, Homo Sapiens
cattaaagcattccgtccagtaatcattattatctgcttgcacccggtcataactccagcttacacagggaagagtttggcgattgttagaggaaatgtagtccaggaaattcagtgaagcaaaaggttgtgtgtgttgattctggaggaggaggagaaggcttatgggtggctcctggggttttttggttccttccacctgaggaaggaaggtggactgacacatcattaagcgcctctctgcagcctgaccaatatcagaattcttcccaaaaatatccaactcatcttcaaggaagagtcctgaattgtagcccagtttgcggttcataatcgcactaaacccacaggtacagcggtactggtcctcattggaagaatcggggatgtaaagcccgacatccgcccctttgatgttcatgttgcaggcacagatgccacagctgtccaagtttctgtctttaaagatattcatcacggaatcggagagaatcagggtaacatagaggctgtgggcttcgggaattggctgcatggtggcgggctccacagagttgaggggccgtgtagtagagggggtggaggctggtgatccttgatcggtgctatcatacttaacagaccctgacactggcagtgcccccacctctgggattcttggggggtaccgt

SEQ ID NO: 103414 - DNA, 408 bp, Homo Sapiens
gtataaacgaacaggcactgcaacactcgccttacggctctacgttgcccgccagcctgcctctaggcagcgcctcggtgaccaccaggagccccatcgagccctcagccctggagccggcgtactaccaaggtgtgtattccagacccgtcctaaacacttcctagctcccgggactggggggtttgtctggcatagccatgctggtagcaagagagaaaaaatcaacagcaaacaaaaccacacaaaccaaaccgtcaacagcataataaaatcccaacaactattgtttatttcatttttcatgcacaacctttcccccagtgcaaaagactgttactttatgattgtattcaaaattcattgtgtatattactacaaagacatacccaacccgatttttttccg

SEQ ID NO: 103415 - DNA, 636 bp, Homo Sapiens
ccgagctgtatacccggatggctctgttaccacatcatggtaacttaccatgtagcaattagaaacaatgaattagaaacacaacaatgaatggatattaaaaagatgcctgtgaaaaagaaaggaacataatgaaatatatcacacagtattacttatttaattaataatagctttccactaatcagagcacattttacaagaacacataaaaaaggattcactaaacacaacagaatgatcacctattaaaatggtgggtatagctaagaaggaaataagaaaaggccttacatggatcaatagtaatgtataataaaataagaagcaagatttacttaactctatttacttaagatataaaaacacaaagttcactttataaaaattggtcaccaaattataattgacttttgaatagcatggagaataggggcactgacacctcgagcagttgcaaatccatgtataaattgacacccaccaaacttaactaccaattgcctactgttgacttgaagccttaccagtaccataaagagttaacacacaattttgtgtgatatatgtattatgtactgtattcatacagtaaaacaaggtagaaaaaggaaaatgttattaagaaaattacaa

SEQ ID NO: 103416 - DNA, 552 bp, Homo Sapiens
tctggccgacggctgtgctgttctctgtccatgtagagtaaaataaatggaagttctgtttaatgcatcacctcggttcatattgcatttgccaagaaagtgcaattttattgaacattaggatagaattcttaactgagtaatcaatttcagtagtaagttaaaatgccttctattaatggacaactgcaaccgttaatcagagttacagtagattaacagttgtcagcatttatgctaatagcacttataaaccgtgggctcatgatttgcactttataattccatatttctcaaaacagttggtaatactttttgcttgaaggtattgattcttttgtccctttgcttgctacttggagatgtagagaaagctaaatgacattttcacggtgatgacacaatatcaccttctgcctttgcacacttggctttgtgtcaaaatagatggaaagggttcatttgttctggtgctctactgtttaatttgatctggtgtgtgactaaagcaagacaaatagtatttttaatgaaaccatttaataacctcag

SEQ ID NO: 103417 - DNA, 227 bp, Homo Sapiens
tgctgggattacaggcgtgagtcactgcacctggccaaatgattaatatctttaaagagccggttacatgcaagaagatgtctgggctttatggtggggataggaggaaagcattggaggtagttgtacaaagatgtgtgaattatagtctaggtcattgaagaagcatactgctaatggagagaaagcgtatacgtaacctctagctacaagatacaaagagtaat

SEQ ID NO: 103418 - DNA, 348 bp, Homo Sapiens
ccctcgaaacccagtatagacgttcgcctaatcaggctctggatcctcacaccaggctacccttaatggatctcctcctcatccgtgcattagactcaaattctccattctcattagtagccaacacttagtagggcaatgacttctcaggggaagggtctactgagatttgaggctcatgaggaaatgggagggtattatcagaaaattttagtgaggtaattctaatatacctagacgtatagatctctcccagggcatagaaatactgagattagaagaaacaacctggtgttgtttacagcatagagtgtgaagtataatatggtagcgtaagaaatgaggaga

SEQ ID NO: 103419 - DNA, 279 bp, Homo Sapiens
tgatttccagcagtggacagtaagtcatttatgaaatttgactgcaagcaaattattaccatgccaaactattaaaacacattatcgacttgattgacttgacaaggtctctgtcacccaatgctggagcacagcagcacaatcatggctcactgcagccttgtacctctcgggttcaggtgatcctcccacctcaacctcccaagtagctaggactataggtgcatgccatcacgtccagctaatttttgtattttcggagagactgggtttcgaggg

SEQ ID NO: 103420 - DNA, 297 bp, Homo Sapiens
aaccagtaggaagacttggcttggagtgtggctgcctggattcgaaagtgtgtcttgactccatggagtaattcttgtatgttttgcctggaattgagcagcgaatcagacacatgaggctgcctgctcccagagatgcttttcctcctgtttgagctgtatgagccccgcgagccaaggaaggattgtagagaaattaatgtgtccagagagagttgagccctacccaatgggagagtttaccagaagggtttgtggcccctcatccctggtatcatggccactgggtttcgaggg

SEQ ID NO: 103421 - DNA, 392 bp, Homo Sapiens
agggcgtgtgcagcgatgtttgccagcagccagggctgggtacacagcatgtaaagatgatgagagggcgctggttcttgttgatgccgaagggtgtgggagacactgaggcccaggggtcaaggtctgagaccactgcggggtgagcaaggtttcagttggcctagttcctgttagtgtgtgaaacattaatgtatgccacgccctgtgccagacattgagtgtgtcttgtcccacgtagagtagagcttgggatagaagtggaggattggtagatgaaatttgggtctgtcatattgatttcccagagaggtaaagacaggagagtgaatgagcaaaaattgttgggggcagacttcggggtagggccgattcagatcagccaatccaga

SEQ ID NO: 103422 - DNA, 271 bp, Homo Sapiens
ccctcgaaacccagtgtcagagcaagagcaaggtgccaacagactgcaaatgcaggagagctcacctggtctggagagtcaggagaggcctccctggcacaatggcaatgtaggctgaggaaccatacacatgaggaacgtgtgaacattgggaaggcagtggcactttggaagaattcacagaaatctatgatgttatgggatgtagggaactaggagaggactaacatgagaacaagactggaggggtaaacagactgggtttcgaggg

SEQ ID NO: 103423 - DNA, 616 bp, Homo Sapiens
gggcttactggacttctggggggcagtgtgtgggccgtcaggcagctgaggcctccagctcccagcacaggccccctcagagcagtggggcagccgatggcctatgctagataggccacagcccctgccttagctagggattgagaagaaacagacacataagatgcaatgtggtgtgtttaagttgtgttgagtttgagatactgatgggtcgttgaagtgggtctgcttagtgggcaattggatacacaagaccagaggtaagaggagaagtcctgggctggaagcaggagtggagtgggggctgaggcatagaagggatgaggtggtgtcgcataggaagagagaactggacaagaaaaagaccctgtggggcctggaatgccaggctgaggggctggaaccttgtcccaggggtactggggagccatgaaaggattgtgagcaggagggtctgggtcagctctgggtataggaagacctttctgaggccatgtaggagacaacctggaggggagagactggaggtcagggtagaggctggcatgagggatttaggagaaaagtacaaggcctaaacagagagcagaggactggggcagaaggtccaggtatg

SEQ ID NO: 103424 - DNA, 321 bp, Homo Sapiens
tcctcgaaacccagtttatatccagtggtctcttatctgctataatagaaattcaggctcaatcagaacaagatatgcaagaaggaaaaggggagaaaaactgtggcaagcagaacgtattgccccagaaaacaaccaaagatactccagcagcaaagcatgcctggatgactgagaacctgactctgggcaagttattcaatcatgccaaaggttttctcttgtctattgctaggcactgtgctgaggggagtgaccaaaatgtataagaaatggtatccgtcatgaaaaacatcatagtctccagcaaagaagcaacac

SEQ ID NO: 103425 - DNA, 317 bp, Homo Sapiens
tttatccatgatatgtgtgatgcactctgacctttttctgtttcagtaaaaatttattttgatcttagaccaaatggattccacaatgcacattttgaaaatactgctttagggcaatgtactccattgtcactggcatcttctgaaagccaaggctaaactagtttttctgcagtattagtacagctccaagaattccctggaagctagcgcaggcctgagggacagcgacaggctgctccccagtggctagtgctgggtttagcacgaggcaacagcaggctgtggagctgtgtttgcgcaacagctcgatatcg

SEQ ID NO: 103426 - DNA, 190 bp, Homo Sapiens
gaaggttcagatgtcatttacttcagaaactttcaggtactaaatacggggtagctgggaaagggcatcatctgagttagacatgagactcggcttcagcccacactgctaaggagatgactcaatgtgaaagccttgtggcctgcagctgtgtgattgtcccagggccagggcccgggggatcctctag

SEQ ID NO: 103427 - DNA, 202 bp, Homo Sapiens
cgtctcagactacttatcttatatctactcatgtgctgcttcatccaggctccaacatgtatcaaaatcacccttacacagtggcggacaggactgctagccaagtaaggatctttcttccccattaggaaagccccaggagggtagacgtcttgtctatcttgctcatcacagtattcccagggcctacccagggcccgag

SEQ ID NO: 103428 - DNA, 252 bp, Homo Sapiens
cggtcttactctcgggcctgggcctggtctgtaattcctcccggcagccctctactgtgcggcagaggctgctcttcttgggcttctcttcgtcagcaacctttccatcactgatggtaaacttggctttgtcagctggcgaggaggtgctggcatgacgcactagactctctgaaatcctgggttcactctgaaatgccgactccttcatggtagagctcatgccactgctaggagttctcttcaccaggg

SEQ ID NO: 103429 - DNA, 438 bp, Homo Sapiens
atagtagatgatatttatataatggctcaggatttttagtgtgctgtcatgcatttgtttattgtaaagtaggcagagcaactatactctttccattgtgtggatgacaaaatggttttaaaaagttttatcatttgatacacataactgtgtttagggatgaagtgtattctttcagattctatttcagttctttttcaataactcaggttttttgaaaagagttatcagcaggactgtctggatgtgacagtgaaggaggagttaaaattgatttttgaggtttcaagtcttggttctgaaagaatggtgttaccatgaacagaaatagagaatttgagacttggatttggacagatggagccttaatgaattaatgttagacatgtataatatatttaaggacctgaactcagaagcaacgtcaggcacgaggtc

SEQ ID NO: 103430 - DNA, 199 bp, Homo Sapiens
tttacatcggggtgtctaccaggcaagatagtgttacaggccaaccagctggcagccctgactcaagccaagaatgcccaaggtgcagcctgccaaggtagtaactatccatgctgcatggtgcagcagccacagcaaaaaaatccagattgtaccacaaccaccatcatcgcagccacagccccagcagccaccctcc

SEQ ID NO: 103431 - DNA, 425 bp, Homo Sapiens
ttgactcgcattcgcctgactcgaatcgctttgaaaaaattagagtgttcaaagcgatgcgaactctcgggccctgtctatctcacaaacaagagatgaatcactaactctactccgaaaagtcctgggtcctgtccactctctcttccggtggaatcagaagaaacaaagagtttcctccctgccactttgggaagtgttaaacgtctcatgaatattatagttcacagactgaaaagcaactcaagaatgcctcagtcaggttttcttctatgttccaaagagcaccaaggaaattctgggcacttgatagtgtccctgagagtaaaacatcagtattcaccaaattaccctctttgctgccaaagaacgatggggctttgataattttctccttttaaagccaaaaagataaggcatgactt

SEQ ID NO: 103432 - DNA, 221 bp, Homo Sapiens
tcattaccccgagcacctgcagccccaggaagtcctggccgtcctcgctcaccaggagcccctcttggacccatgggtccaggagctccattttcgcctggaagaccattttcaccctgtaatccaggagcacctgcttcaccctttactccatttcgtccatcgaagcctctgtgtcctttcataccagggaatccaggtatcccagctggaccttggat

SEQ ID NO: 103433 - DNA, 398 bp, Homo Sapiens
cataatcagtaaaagtatgtctataagctctaaccaaaaattttaaaaattaaaaatagcacaattctacaattctgattttaccaagaaaataaaccttttttggcacatattatcctatgaaaatggaaagctgagtcaggctgctctgcttttcacagcacaaataagcattcatgctatcagacttgggacattaactcggtgacaaaaattcactggaaaatagaatccttggaaaaatggggtcaggtgccatccactgtgaggcaatgataatgtgtgtccttcgttattagcacaaagttaggcagcacactataattttagctccatgcaactctataggaacacatgtgggtaaggcctgaaagttacaagcaagagtgaaaagaact

SEQ ID NO: 103434 - DNA, 145 bp, Homo Sapiens
cccacgcgaaccccatccattctcttacactgcctaatttgtcttgttttcctttttcatatttattttatgtttttaatgggaatatttcccacataaaataataaaacaacacccatgtgtccatctccccgattcgactcac

SEQ ID NO: 103435 - DNA, 144 bp, Homo Sapiens
tcaagttattcaagcaaaaccccaaatggctttggtaaacccaaattctagttgaggtaagcatccatcagccttcaagagggggtgccaggacaaaaggaagaggctgcgaaaccagtgcagggcgagcctccagagccgagc

SEQ ID NO: 103436 - DNA, 335 bp, Homo Sapiens
tatcgctcgctaaaaattgaactacccatttgaaacctcagaaaagcttgttaaaaaggacggctcattcagactggccaattagagtcttagtgtacttggcactgcctgatttccagcagcatctctggtcctcacccttccttccagccacaccctactttccacatcctggactttggacatgtccattgctctactgttgtgcctttttctgctcggagacgcctgtatgtaaagcctgatctatcgagcagagattcttcttcgttattctcttcataaggcactgtattcatgaccttgcgagcgatacggtacgagctgatcctccc

SEQ ID NO: 103437 - DNA, 283 bp, Homo Sapiens
  misc_feature (45)..(93): n is a, c, g, or t
atcgctcgcaaaattccagttctgttcaatattaataactagtannnnnnnnnnnnnnnnnnnnnnnnnnnnnnnnnnnnnnnnnnnnnnnnntaataaatagagcaacataatctgtactctttttaaaaattataattactgcaagatagcctgtgtaactacagctgcaagtcattgatttgtttttatttacaagcatcaatattttacaaaactgaattttgagagctgatatcattcttccttgaaaattgaagtaattatcaatactttgcgcgca

SEQ ID NO: 103438 - DNA, 234 bp, Homo Sapiens
cggtaccgtctgctcgcaaatgggtgactctttgcaacagcagcattcccacaagggtttggggaacagggagccaatactgtctgacaattctgcctagaaagtaaatgacagagtttatggcagatgaacaggtaagaaaacgaaaattttccttatcccaaggatgttctctgaattcaagtcaaaagtcctgattaagaggcttggaaaatggagaagcccatgatcttt

SEQ ID NO: 103439 - DNA, 268 bp, Homo Sapiens
  misc_feature (175)..(227): n is a, c, g, or t
aaagacagagtgagactccatctcaaaatatatatatatttccaaatattcagtttggtcttattatattgacattgttatgccacatatcactagagtgttttttatcttgcaaagctaaatctcagtacacagtaaataactaccaatcctttgtattttgtggttcttttcnnnnnnnnnnnnnnnnnnnnnnnnnnnnnnnnnnnnnnnnnnnnnnnnnnnnnccatctctgtctttttcgctggtcccttattttcgcgccat

SEQ ID NO: 103440 - DNA, 200 bp, Homo Sapiens
ggatctatggacggagacttgaggaggggattctacagtttaatcatctgtagccacagtgaactgggttaccaacctttcagcaggagctgaaggtagagcacgttcgaagactgccaagtccaggacataccttttgcagacaattacgacaaacttggctccttggctttctgccatccagtatttggcgagcgata

SEQ ID NO: 103441 - DNA, 143 bp, Homo Sapiens
ctatcgctcgccaaaggctccaaacttccagttttaaccagtatgtattgatttactaaaattagatacgccacataccatcccaaccactgccttgctgatgattcccctatagccaaagagtaccatttttctttttctat

SEQ ID NO: 103442 - DNA, 190 bp, Homo Sapiens
ctgtaaaatcacaatagtgagtaagggtgaccgcacagcaaaactgttcttctagactcatcttgcaccatagtggcagctgaaggaattgtgcaccacgatgcacccctgtagtcaggaaaggcttctaggatgcctgggagctgaacgaggtggtaaatgatggtgttggagctggagagaagtacag

SEQ ID NO: 103443 - DNA, 466 bp, Homo Sapiens
ctctaaaaggggaagaaaagtcagtcagacatttgccaccactcgccatttcctgtgctggccaggccagtgcctggaacactgaagttcagccactagctttggaccaagttcgcaggtagctaacatcttgcatctttcaacagctttagagccacattgccagctccaggcatcagctggctggcctgcagggagcattactgataatgccaccaaccatggtgtgccatccaactccaggggcaagcaagagaccctggagcttgtccttgacttaccttgggcatcttctggggctggacaggggaggcgggcaagtcttgtccaggctggcagaggtttcagaacagcacaggcctgcactgcaggctggttgcagctcacaggcacctggaggatggcaagagccaccatcctactaaatgcagtggcatattgcttgctttcaaatttgtgggtttta

SEQ ID NO: 103444 - DNA, 250 bp, Homo Sapiens
cgctcgcttaacaaccatttcagacctgaaggagatggcaaagatgagatcatcaaagactcatggtttcctgtggagataaccagaggcagaggggcggaggcagtgctggtggagtctggcatcccatgcaggacataagaagatgggctttgcgggcagagagatggaggtttggacctaagcgttgttatctataaatgtagccactgtggcaagtcattaatcttgctggcctccatttccactt

SEQ ID NO: 103445 - DNA, 553 bp, Homo Sapiens
tggacagaggtcgttgaaaagaaaacaatgagttaagtgtttacagaagctaataaaaagtaagataataaatccaaagaaatggggaaaatggaaatataagataagaacaaatcaatgaaatagtgaacaaagatcaatatgaagattaacaaaggaaaaattagttctttgaaaggagcaataagatagcaaacctttgataagactgaataagataaatcagaaaaagaataagtaaaacacatactgaaaaggagatctacgaacaagtaattttttaaatactttttaaaaatatgaacaaacatgtaacaatacatttgaaattcattaaaaaaggattaatttatatacaaggatataaaatattaaaatggcagaagaataaatggaaaacttgaatagaatgtaaaagttaaagatactgaagtggtaataaaatgtctccttcaacaaaacccttgggaaaatgatagggcaacccgcagaaagaagcaaataggcaatgcaatatgaaaagataattcacagaatagtggagaaatacaac

SEQ ID NO: 103446 - DNA, 249 bp, Homo Sapiens
tcgctcgcaaaggatcgaaagctgaatgtctaaaacctgtgttcttcttttgcgcttattaaccatccaatatttctgctatataaaatgttaatgaatcttcattgcaaaaatcaggatatcaataaaatccattcacaaagcaactttatagatggttaattggtttggcttattaatgagattatggcttttgaaatactaggaaatatttactatcaagtggaaaatactttttgcgacgcgata

SEQ ID NO: 103447 - DNA, 279 bp, Homo Sapiens
caaagaacctccaggcggcatatcctgaaatgtttgaattactgctcctcctaaaaaccctgactcaggccttccttcccgccctcccactgagcttgacgacagcatggcgtgtgtgtgcatgcgtgtgtgctcgcgtgtggtaggtgtggcaggctcctgcatcgaaggtgggagataatccagagatgaatcctctgaagaggttcgcatgacatgagggtatttcctccagtgattttgttgatcccccgatgtgctgtgttaatcacagaaaca

SEQ ID NO: 103448 - DNA, 257 bp, Homo Sapiens
ggtcggtacctactctcgtggcctggggccatagtgaaacctgagtggtatttagtgcaggcaggtggcaggcaggctgggggcctctcagaagcgtggagctggcagagagagacctgcccggggcatcggaggaaagggcgactgtgcaggaacagagtagacgaggtgggggaacctttgggtaagaagagctgagtcaggagcattgaggcagcggttttcaaacctcagaagcaacagcagggcccgagagt

SEQ ID NO: 103449 - DNA, 194 bp, Homo Sapiens
tgctaccctcagctcacacatcccctcccctcattcctgctgccccagagcctcagcatcgacagaccctctccatgtcttccttggtgtgactggggcttcttaagtcacagacttgctatgtgacccttggcaagtcgctgcacctgggcttcagaaaaatacagtgttagacggcccgagagtaggtccgc

SEQ ID NO: 103450 - DNA, 248 bp, Homo Sapiens
cccaaatccatttcactatcatattcatcgactctcctgactcgcatcgactgaatggatggagaatggtgccacagaatgaggtagggaacactagaaagccttgagtttaggagggaagatcacacactaaattggaaaacgtggaatccaaggtgcctttgagacatgtaagaagaatgtcaagtaggcagtgggtatacagctctggagcaccaagatgactaaaccgaaagaccaaatatatg

SEQ ID NO: 103451 - DNA, 278 bp, Homo Sapiens
gttgccttgacatgagagctctttctggaatgccactgtgctctttgacacattgacaagtttgatatcatcgtgtgacttgaggactaggaaatcacagctcatatgtatttatgcagaatgtgatcacaaactcatgcccctgaaaaattaagctttccatgtaggcaagacagtgattttgttcagagtaattggtatttccttctatttatgttattaatatttgacagacatattatacttcctgtgtgccagaaccacaaatatcggggtcg

SEQ ID NO: 103452 - DNA, 284 bp, Homo Sapiens
aatgactcaatttatggggaaaaaaatgacgaagcagtttagtgttcatggtaatccacgagcccgtgtttaatataaggtaacagttcagcgctgccggcccaggccgggaggcacggggcgtccgtggcatgagttcggcctggccttaccgctcaggagtttcctatcatgtccttgataagtaacttcttaaaacgcttctgtcccataattctgaaatttgctaaatcagtaagcaaatgttggttatagcatatcttcataatatgccagaaacacaa

SEQ ID NO: 103453 - DNA, 568 bp, Homo Sapiens
tcaccccgatatttgtggttctggcatagtttctaggaatgcacttcagcaataaccaggaacagtctgtactcacagacagctccttatctcaactgctaatcatggattccatttcctgggtaaacagtggtatcatctcacgcactactgcttctctgcagttccttcacactttgctgtggtttttcttttcagatgcccttaaaccatatttagggcattgtggcacagacccacctatctcctccaaccttacatttaccattaagtaggtggccatgtgacaagtcagtacagttgttcagcatcactggaggagtggattggcaatatgcaaagcggcaaaaaatggaaacgaacttatccaagagcttctaacataaacagcaatgctaagttgattcaaagcagaaatcagtaaagccacatatccctatgtgaagcaaaacagattttgaggtacatatacgacaagcctgagtaggaagttcagatgacaataactgatttactaagggattttggcagaattcttacccctgaagccagaaccacaaatatcggc

SEQ ID NO: 103454 - DNA, 267 bp, Homo Sapiens
cgtattgtgggggaggtgtatctctcttcctccatctcagggtgtcctttcttctactcagcccttttctcctgaattccaacaccaggagacaggcagtagagtacggccctctgttcaacatgcttgccttacagtgcaaacttcagatattcagatttatttaataccctttgtagaagagctactatagcatcattcagaattaagtgctgagcaaacaactattcatcctgcttgtatctattggccagaacacaagtcggt

SEQ ID NO: 103455 - DNA, 392 bp, Homo Sapiens
ccactactggctttagagagggcttgtgtcgagatgcgtctggctgatagaacttggtgaaactcgcactacagttccctcttggctgaggagccaggcatgcttaccaacctccctcagggctctagtgcctgattttatgtttttgtgcacccaaaggatgcagaaggcaggacagaccttccacctgcattatgtgtgtattcgcgtcggaactggcaaaaatggtctttttgttccactttgcccttggctgcccaagaaggctcaagtgtctggggcagaacccacaggaggtgtccagtgtgtgctaaagaatcactgggccggccgggcatggtggctcacgcctggaaccccagcactttggatgatccagctgttggtaccgg

SEQ ID NO: 103456 - DNA, 382 bp, Homo Sapiens
tggtgttatggcattctgctggttcccatttagcatatccagttaatattgcttgaaggtcagatttacatgctttctgttttacagtaccaggtaggggaaacattccccaatcagacacaatgttcagccccatgatacaatcaggtaaaagagatgcaaccacttcatatgaagtgtgttcaaatatgccaactttcataatcctattaacccttagatttttatgttctgttttcaggaacttcacccccagaccattttaccctttcttgtacaaaaagctttgggtcccttgctgccaagggttgagccaaaggactccagcccttttgtcagtagtttcccccgctattgccccacgccagaaccacaaatatcg

SEQ ID NO: 103457 - DNA, 462 bp, Homo Sapiens
ggaaaggatcctttgtacactcgaggaatcaacaaataagaaaggcatgacccaacacccaaggaatcgagaaagagctatcgactctgtcaatccatgtcctccacaactccacacaggaacatcctcgctgttacactcaggtccccccagataatcctcactgttacactcaggcccacggataatcctcacttttacgctcagggccccccggaataatcctcactgttacactcaggaccccccagataatcatcactgtaacactcaggcccccgcgataatcctcactgttacactcatactctcgggacctgcaaatgtctctctgtccaccagccaagtacagaaaagaactccagagcatcactcagcaatgggttgagctgcactgaccacactcgagtcccgtaccagccagattgaccaagctcgtagtcaagcagcaccagcaccaga

SEQ ID NO: 103458 - DNA, 573 bp, Homo Sapiens
cgatatttgtggttctggcgttgttgagtgggtacttggctggctggttgtcttgaccctggtgaagttgatgcagcgccccgtgtctcctggctgtggacgcatcacagacacacgatcatatctttcctcagtaggacccacaaggcatcgagttttcccttgattggagagtaccacttccggggggaagaaggccgacgcatattgttgttgagatttcgcggctcagggaattcatattcctgctccggcatcttgactcttgcattctttgccttttccaacttagcaccttcttctgtggagcccttttctccccaacgaacctccattcttttaatgcctccaacgcctctcccaccataataagaggcgtctaccgttggccactttttcttaggcagaccatcatcatcttcttcctcactctcctcggcagggggtggagggacctccttgataatcacagtgcagcagaggggccagaaccacaaatatccgatatttgtggttctggctttaagttcttgatgttcctgtgatatggcttctgccagcaatgaaaactgg

SEQ ID NO: 103459 - DNA, 521 bp, Homo Sapiens
agaggatcccccgatatttgtggttctggcctgtgtggcctgagatccccttcccttgcctgtcctgcctgacagccctgtgcaggccattccaaggtgccttccaactggcctcggaccacgagaggtcggagctggagattcgaggaagaagccatagctgcctcctggggctgtgcttctcaccagtggggacccctgtgatttcttttcctgcctgggaccctggcttctgcacctggacttgcaccttcggcccccacacctgggggctagcagcttcctgcggtggctggccttcgggttgcttcactggtcctgagtcctggcttcttaccttcccctctgagtcccaccgtcctgatgagtgcacagaattctgtctgctttagacactcggagagacttccatttcccatgggccttgactgcagaagattcagagtgatttggcgcaggttctgaagtgctgatcggaagagcccagcatagatttagcgttgccagaaccacaaatatcg

SEQ ID NO: 103460 - DNA, 483 bp, Homo Sapiens
cgatatttgtggttctggccaaccgattataaattggggttccccacccctttctttggttcaattaatttgctggagcggctcacagaactcagggaaacacttattacattaccggtttattataaaggatattgcaagggatacagatgaagagatgcataggacaagatgggggaaggggtgaggagattccatacctttcctggtgtgcagctgtccagaaacctccacctgttcagctatctggaagtgcgccaaacccagtccttttaagggttttatggaagctgcattatgtaggcacaactgattaaaccactggccattggaaatcagtcagcctctctgccctccttggaggttgggagatgggacagaaagtcctaaccttctaatcctcccttggtttttcagtgaccagcccctaccctgaagctacctaagtgcgccagaaccacaaatatcggggtgcgagcagac

SEQ ID NO: 103461 - DNA, 216 bp, Homo Sapiens
gtacgtccgttgattcatctgtggatctaaacacccgagagggtagagatgatgctggcatagctccgtgggctgagggaacactcaccgatctaccagaggctgggacacccaccgtggggcttgcaggaggatgatctggttaggaatctgcacagtgctggttatgagcctgtgatctccactcccttccctcctcttacagcagagacaaga

SEQ ID NO: 103462 - DNA, 352 bp, Homo Sapiens
  misc_feature (300)..(300): n is a, c, g, or t
caaaaaaaaggaggaagtgaagtaatttaatcagatatcagaggaatggagaatttttattatatatcattctaataactgaaacaatacactattagaatgtgaattttaaaagcagcaagccaaaaacctaaagagttttctactcactctcctttcttccctgtgttaatattacatggttttaatttaaattgatttttgttctaaagatgccatatattttttccatcgttcatttttgtccctgtattttccttgggtgcataggtactttcagattaagcttcaatggctcantatgagaggaagagagagcgaatgagcattcagactaccccgattcggtccg

SEQ ID NO: 103463 - DNA, 632 bp, Homo Sapiens
cgagcggactcgacatcgacagtaacactttctggccatttctagtttagattctcttcgttactgaaacttgtgagaaatattacctgtggattaattttgcacaatgttctattctcataatgacttacaaattaaactaggtttttattgaactacctcacactaattttctatgctttcccaagtaagctgttgcccggttagatccttactgagtgaattataaatgtgtgttaaatactttctagccaatgttgacacaataccagtaagtatgtaaagtatataccttacatcagtaagagacacgtgtaaaatctttgactgtatgtctggcaaaatggtgcccgttgacattattactgttttggtaagtagaaacctgctcgtgatatcggtccatttacattttacaaaaggagtaaatcttagtaaaaattttacgaagaaataaattacttttgtaggcccaatatttggtatatttttgagaagctgttaatcttttagctgaataatgaagttagactgaattacgtgtctccctggactgtgacatctattttctcattacagtttatcctggtcagcagggtgtcacacctggaaaactgagtatgatagctgac

SEQ ID NO: 103464 - DNA, 495 bp, Homo Sapiens
agcggttctgaagtgaaaacagaaggtctatgcccggacagtgccacagaggaggaagacactgcggaactcactgagtttggtatgcagaatgttgaaattcctcatcttcctcaagatttgaagttgcaaaatataacaccttggagaaagtgggaatggagggaggccaggaagctgtggtggtggagcttcagtgttcgcgggactccagggactgtcctttcctgatatcctcacacctcctcctggatgatggcatggagactagaagacagttggctataaagaaaacctctgaagatgcaagtgaatactttgaaaattacattgaagaactgaagaaacaaggatttctactaagagaacatttcacacctgaagcaacccaattagcatctgaacaattgcaagcattgcttttggaggaagtcatgaattcaagcactctgagccaagaggtgagcgatttagtagagatgccttgggcagagg

SEQ ID NO: 103465 - DNA, 332 bp, Homo Sapiens
cgtcgatactcagatcccacaaaacgacggcccgtgagggagcgttgaacatcgtcgagcgatgcccgtccagggagggatggccgagctcgattctccagaaggtagctggtgacacgagtgttgagcccacccaactagggtgacggaaatttctggggttccggcttacatccccaatatcgggtgcattcgtcgacaaggtcatttcgagagcttgcgcgttggccatgtacgcataaatgagaagcgccggcgaccagcgaaagaatttggacatcgtgaaatctctacagttgggattagcttatctgagtatcgacgtaccgact

SEQ ID NO: 103466 - DNA, 443 bp, Homo Sapiens
  misc_feature (90)..(90): n is a, c, g, or t
gtctaatgtatgcactgcaacaaatagttcatagtaatccacatctacattatttggcatatagaagcctacctgatggtggtgaggagncggaatcttatgaagatatacagctggctgtcaaaaattctcagattacaatcagcacatgtggtcaccactctgttaccagtaagaggtgaaaaataggcggaagcaatgctctttgtatgttcagtcaaagaaatcaaaggctgacttctcctggaattcaatcgccttgcatcataaatatgagtatccctgtaatgggagaaacaatgatcaatgttgccatagtacatgtaatgaacctctacaacagggctaaacataagttagacactcacatacttgctatactgaagaacatttaagacagactctcagccagtacggtgctcaagtctgtatctgagtatcgc

SEQ ID NO: 103467 - DNA, 544 bp, Homo Sapiens
cggaccgccgaggctgaaggggcaggtgaaagcaggtctgccttacttgctgttgaagcttgccgctagcagctgctctttcctcttataagggaacacgtcgatcaccttgcctggcacgaatcgcgtcctgcaggcccttccagtagtcagcgttgtacaactcgccatgcaagctcatcgaacaaccggcgctgcccggcgtcggcaaacaggaacggcgggaactcttcggggaacacatccagcgggccgatggaataccagggctcggaggccatttcatcctcgggggtgcgcggcgcgggaatatggcggaagttggcttcggtgagaaagcagatttcgtcgtagtcgtagaacaccacgcggccgtggcgggtgacgccaaagttcttcagcaacatgtcgccggggaagatattcgccgccgccagttgcttgatcgccaggctgtaatcctccaatgcttcgcgcacctgggcggggttggcgttgtcgaggtagaggttgagcggggtcatgcgtcgctcggtccagcagt

SEQ ID NO: 103468 - DNA, 276 bp, Homo Sapiens
tagatgggcgaggtgaaatccttgccttcgttggccatcaggtcggtgatggactcggtcttgccgtagcgaaagtgcgtaccgatcaagtcggaatcgttgacccagccgtcatagatgttcttgtcggactgcatctgggtttgcagcttctccaccacgtcgccttcctgcagcaggtcgtgggtcagcttgatgccggtgatttcactgaaggccttggccagcaccttggattcgtactcgtggtgatctgagtatcgacggtaccactca

SEQ ID NO: 103469 - DNA, 390 bp, Homo Sapiens
tcagccggtaccgtcgatactcagatacaagtgcgatgggctgtgacaccgacaactggccgctgttgttgtgcacgctccagcgctgcacggcgcagggctggccagcaaatcaaagcccagcggcgagcccagcaaactctgcgtctggctgtacagcaccggtacgtattcatcgcgctcggccgctggcgccaattcaccggaggtattcagttcgcggatactgaagggaatgccacgctggcgagaaatgtcctgttcaaacaggctgcgctgcgtgcgaaatatccgtggtgcccaggcataagcacgggcatgcaacaacagcggtttggcgaaaccgtcgaactcgttgcgggacacctcgccggaattgacgaagaaacg

SEQ ID NO: 103470 - DNA, 316 bp, Homo Sapiens
accttgtgctgcttgcgccaactccgagtcggtcaatctcagctggaaatcgtcgcgcatgaccacgtgataaccgccaggctcttttctcactgagcgaaaaatgtccgtaggctttgaccaaatcggtacatggctgccttgatggccgatacggtaacgcagttgccatctggcccttggcgaaagccactccagatgttgtccggcttagccccattacgctttatcgaaagacccggaatgtgtgcggcgacctctggctttggtggtagcggttcaggtatgacccgagatctaagtatcgacagtacca

SEQ ID NO: 103471 - DNA, 239 bp, Homo Sapiens
cgtcgtactcagatcacaaaacaacagatacccttaataataaaaagacattcaaatatacaataaaaacatacttaagatagctcagtgactagcatttggccttgtgaacataagaacacttagtaaataagtgaaatacttaacattttctttgtatgtcaaagacgagtgagagtcaaataacttttttcccaaaaattcaaattggtctttctgcttataaaactgcttcttga

SEQ ID NO: 103472 - DNA, 189 bp, Homo Sapiens
tgagagttgaactataaagaaggctgagcactgaagaattgacacttttgaactgtagtgttggagaagactcttaagagtccctcagacagcaaggagatcaaatcattcacttctaaaggaaatcagtcctgcatattcactggaaggactgatgctgaaactgaagctccaatacttgccacctta

SEQ ID NO: 103473 - DNA, 541 bp, Homo Sapiens
  misc_feature (517)..(517): n is a, c, g, or t
accccatggactgcagcacaccaggcttccctatcctacactctctccctgagtttgctcaaactcatggccattgagtcggtgatgccatccaaccatctcatcctctgttactcccttcccctcctgccctcaatctttcctagcatcagggtcttttccaatgagttggctctttgcatcaggtggccaaagtattgaagcttcagcttcagtatcagtccttccaatggatattcagagttgatttccttgaggattgactggtttgatctctttgctgtccaagggactttcaagagtcttttccaacaccagagttcaaaagcatcaattctttgatgctcagccttcttgatggtccatttctcacatccatacgtgactgctgggaaaaaccatagctttgactgtatcgacctttgtcagcaaagtgatgtctctgctttttaacacactgtctaggtttgccatagcttttcttcaaaggagcagcgtcttttaatttcatggctcngtcaccatctgcagtgatttcgac

SEQ ID NO: 103474 - DNA, 147 bp, Homo Sapiens
acttcacaggcatcctgttcatcgacgagatcataccatcattggcgccggtgcagcttccggtggggtgatggacgattccaacctgctcaagccactgctgtcctcgggtgatatcctgttgcattggcttgagcaggttggaag

SEQ ID NO: 103475 - DNA, 215 bp, Homo Sapiens
agtactcggtaccgtcgatactcagatagacagtgtggacggctggccggccatgctgtccttgaggttgttcaagggcgggatcttgcttgcactggtgagcatgccttgcatgttgtccaactgctcggtgtagcgacgataggcgacgatcatctgccaaggcacggcaggctcgatgcgggtttcgaaacgatcgatggccaattccatgg

SEQ ID NO: 103476 - DNA, 544 bp, Homo Sapiens
tcagatatgttagtgaccatcgggcacagccagcgctttgccggccaggggcctgtcgctatactgcgcgtcaacttcacggaccaagagccgagcgcaagtgaaccggcccacgccagtaaaaaccgataacttcttcctgctgatcttccgggcactgcgccatcgccgtgtaccgattgcattgcgcatcgccagccataacgtgatcctggtcgctctggccctggtgatctacgcctgcgtgatgggtttgcagttcaagcaggccatgcacgagcaagctgacgccctgggcgcgagcctgacaacccagactgccacttcggcgactgagttgttggtgtccaacgacatcctcagcctcaacgtgttgctcaacaacctgaccaagaacccgctcgtggcccacgccgctatctatagcgtggacaaccggatcatggccgaggccgggcaacgccagaaaaacggtctgctcggtgaggccgaaggcctgtatcagagtaatattacgttcccgatctgagtatcgaccgtccga

SEQ ID NO: 103477 - DNA, 170 bp, Homo Sapiens
cgacaccatagaatgcgtgggccatttgtatgtcttcttttgagaaatgtctgttcatatcctttgcacattttaaaattgggttgttttcttaccattgagttgtataagttccttatatattttggatattagcttcatcaaatgtatggtgtgaaaatgttctcttc

SEQ ID NO: 103478 - DNA, 231 bp, Homo Sapiens
ctgtacctgacagcatagaatggaatggacagctcagattcatttttaggagaagaaagtaaactaatgtgctcttaaagaataaaaatttattctatggtttctgtctctgatcatcaccttccattctataaaaagctcagttactgatttgctgggtcatggtcaaaattcttacctatttatttcatatcaactttaaaaaataaattacttgcattctatggttgt

SEQ ID NO: 103479 - DNA, 128 bp, Homo Sapiens
gaccatagaatgggtaggaagtaagtctgagcctgggtgggagattttggaaccctcaacccattctgtcaatactactgtgtgacacatacaggattaagttctacatttgtgcattctatgtgttg

SEQ ID NO: 103480 - DNA, 340 bp, Homo Sapiens
caaccatagaatgcagaatttgatcgtcatgaaatccagatatatgaggaggtagccaaaatgcctcccttccagagaaaaacattagtattgataggagctcaaggtgtaggccgaagaagcttgaaaaacaggttcatagtattgaatcccactagatttggaactacggtgccatttacttcacggaaaccaagggaagatgaaaaagatggccaggcatataagtttgtgtcacgatctgagatggaagcagatattaaagctggaaagtatttggaacatggggaatatgaaggaaatctctatggaaccaaaattgattcctttctatggttgt

SEQ ID NO: 103481 - DNA, 163 bp, Homo Sapiens
  misc_feature (94)..(102): n is a, c, g, or t
ccacatgtgagagtacggtcaagcagtatttacaaaaaggttaacggaacaacactctgacacatgctctgagaatactgggactgctgtttcnnnnnnnnnggttcaaacttattgtcacagcatcatcaccattctatgctgtcaggtaccggctgatcat

SEQ ID NO: 103482 - DNA, 354 bp, Homo Sapiens
  misc_feature (77)..(135): n is a, c, g, or t
acgatgctgtgctcagaacaactctgcatttgatattccacagggaaaagacactagatattacaaaaagaattccnnnnnnnnnnnnnnnnnnnnnnnnnnnnnnnnnnnnnnnnnnnnnnnnnnnnnnnnnnngggctctgagtagcctctgaagagctgggatgacaggtgttattgtgcctgatgaaatactacaaaaagaattttgaagtagggtatggcaagaataggctgtggttcatgtacataatgaccacatcagtgacgacaattcgtagcatgaacaaatgtgaactaaaggagggaaacggaacttgagacaaacagaagccttggcattactatggttgt

SEQ ID NO: 103483 - DNA, 199 bp, Homo Sapiens
cagtataagcatctgttccattgactgtccattccatttttatcatacatggtgtagtttctttaattgcttctctgttcttatgatctttctcatgcattggccataacattgtgcatgtgtgtgggtggcctttttattaaaatataacacacatgcagaagagcgaataatatgtgtgccccattctatggttagt

SEQ ID NO: 103484 - DNA, 315 bp, Homo Sapiens
  misc_feature (240)..(271): n is a, c, g, or t
atataagtctaagcaaataactgaacagaaaccaaatcataggctatcttttcatccttctttgatccagagcatttagcaaaccaacctattatttgttcagctatggtagaacaaattctaacagaacaaattcaaataaagaaatgattgggcaggaccatttgataggttaataccttttaaatatgtgggactaactaaaaactaacaagctcaaaatgccaactggatacccannnnnnnnnnnnnnnnnnnnnnnnnnnnnnnnccccccctttttgtggtggggggggacccctcaaagagtcaccc

SEQ ID NO: 103485 - DNA, 385 bp, Homo Sapiens
acaatgattatgacactgatcgaatgtcagagcaaccagatgttctagccctgtatagcagagtagggaatgtctgtcccatttgtacggaatagcagatataatacaaaataaatgaacatttattttgggctctgggcggacaaggctgggtttgaatcttgactttaccccattgggcaaattattaactgcctgagacttggtttcttagaatgtacgatggggtaatagcagaacccctttcagagtcgtaaggattattcatgaaataatccatgtaacatcacttagcactgagagttaacaaaggcaaatgttacctgaataggaggaaacagaggaagaacaacgaggtctcttttatctatgctaagctttgtct

SEQ ID NO: 103486 - DNA, 415 bp, Homo Sapiens
agcgatgtagtgctatataatctgctctattccctgagatttctcttgtgaaaaactgtccatggctttgttcttgggcatgctgagccacaaggtggaactttcccataattgactatgccgagtcactgcagcccttctgagaggctggagagaactcggtttctttttctgtggtgttttttttctacggagtatttggttaaaaatgtaggtagactttcccatcttaaacggatagcaaaaagaagaggcaaataacagaaggaactatcaaccacgtgttgtggtttccattcgtgcttattctttatgaagtgtttctgtgcatggagggaaaaaggctcgtgagaatacagctagaacccaccgtgcccacggagacacgggctgttgccgggcattctatggtggt

SEQ ID NO: 103487 - DNA, 284 bp, Homo Sapiens
atagaatggaaaagaatagagaacctagaaataaggccaaatacttacaaccaactgatccttgacaaagcatacagaaacaaaattggggaaaggacacattatctaataaatggtactgggaaaactggatagccatacgtagaagaatgaaactggatccctagctcccaccttatacaaaaatcaactcaagatggattaaatacttaaatctaaaaccaaaaaccataaaaattctagaagaaaccataggaaaacccttctgcattcatgtggcggat

SEQ ID NO: 103488 - DNA, 146 bp, Homo Sapiens
ggcggtccgaccacatagaatgcaggttccccttcctccacatcctcaccagcatttgttatttgactttttgatataagcctttttaactgaaaggagatgatacctcattgtagttttgatttgcattcctctgaagatcagtg

SEQ ID NO: 103489 - DNA, 623 bp, Homo Sapiens
tacgacacatagaagcagtcatccatgttgtccaaattactggatttcattcttttttatggctgagtggtaccccattctgtatatgttccacattttctttatccattcatctgctgatgaacacttaggttgcttccaaagcttagctattgtgaacagtgctgcaacaaacacaggattgcagatatctcttcaatatcctgatttcccttcttttgggtagataccagcagtgggattgctggatcatgtggtagctcagtttttatttttgaggaactgccaaactgttctccatagtggttgtactaatatacattctcaccaacagtgttcaagggttcccttttctccacatccttgccagcgtttgttactgccttttagatataagcgattataactgcagtgaggtaatatctcactgtagttttgatttgcatttctctgatgatcattgatgaacactttttgatatgcctgtttgccatctgtatgttgcctttcgagaaatgtctgttcaaatcttttgcccatttttaattttgattactacacctattcctaatattctggttgttaatcccttgtcagatgggtagtttgcaaatatcttctcc

SEQ ID NO: 103490 - DNA, 201 bp, Homo Sapiens
cattggaaagaacaagaatggataaaggagagtgcttaggaggctcctggagcaggaagaggtggtggcgaatagactaccggagcagtggagggtggagatggagagacgtggaaagactgaagacatatcctcgagactaaacgaacatttcgaggtgatgagatgtgtaggtgaggaagaggcaatgctaagatttca

SEQ ID NO: 103491 - DNA, 206 bp, Homo Sapiens
acagaggcagagaagtagcaaagggggtgctgggacaaaatcacagcgattcttgaataacatgggcgtgtgtgtctgctccttttagcaactataagctccagggcacagaccatcttatatgtctgtcatttactgtccccaatactcaaaaccattctgggcatgaagtcattactccaataaaaactaggtggaattttttt

SEQ ID NO: 103492 - DNA, 174 bp, Homo Sapiens
aaccatagaatgttaataaggcagggggcaaggggcacagggcagaagggagtgagatgaactaataggatatagcccgttggctctaacacagagtcacaatttccttaaaaggctcttagagaaaagaatcaaatgtggggatttgttccacccatttatgctgtcagtacc

SEQ ID NO: 103493 - DNA, 325 bp, Homo Sapiens
cagcagtgaatgctgaagtggggatctgggaagcacatcacaacatacattaccaaaaccaagctaggagcagcaaacgtgaacaagtttgctttcttctatggttggtggcttcaacgaagtcagaattatggcctggatgagtacggtgagaattccttttctttacttccagcccactacacaaagttccaatacactctgatgctgcagtctagcttgagggattctagcagggaaattgctaaagggtcccttctaggatctggttatcttcctgccttcaatgagcctgtcttctttgtacactccattctatggttgt

SEQ ID NO: 103494 - DNA, 302 bp, Homo Sapiens
catagaatgctaaatgggagtcatgcaagtctaacttcaaaaattaaggacaagagactaaacctttaaatttactgtgatctttgattttaaatgttttgatataagtgtttgctgatatattttgaagatggaagttgggacatctcaagttctagcatgctttttctttctttttctatctcgggaacttgaccacagatctcgatgtcctaatagaggcagccttattatttcctctgtccttaagcaaaaacaatacatttaataagttttgagtaacggaacattctatggttctc

SEQ ID NO: 103495 - DNA, 186 bp, Homo Sapiens
tgagccggaccgacagcatagaatgaggagggtccatatattaacaataactttctaaaaatttttaggactactaatgcctgatacttatgagtacttatatgtgtcaggcagtgtgctaaaggccttatttgcatcagctcacgtaatcctcataaccacagtaaggcataggtattattattc

SEQ ID NO: 103496 - DNA, 422 bp, Homo Sapiens
cagtgaatgccgagaactacatttgtaagtgggcaagatagcacatgccccttctctaaattcaatacatcgttgtataaagccaagaggtatgaaatgaactatttcatagccaagaaagggtgaaaaaagccacaattataggcaatccaggctctattttaagtactgcacacttgagtgtaaggggatatcagaaaggagaaaaattgctagaaatgcagtattttagccttaataacagaatcatgtctcatctcttgctgcagcgttgggaatagataacaattttatcaacaacacctgtatacatgactcacctattcacctcattcctagccacctttggttgggtgagtataaggaaaaatgaaacaaacttcttgtatgacaggaactcatgattttctatatacattttg

SEQ ID NO: 103497 - DNA, 215 bp, Homo Sapiens
tcccacctttccacgagtatggtatactgctccacactatgacacagaaatagatatgacaacacgatttaagagtgattcttacaaaactggatacaatgcaatacttgaatttaaacctaaagccattcctagggagtagtgactgtgttaatcaaatatcagggtaacttgcactgggaaaagaagtcctagctactctgaagtggaccggt

SEQ ID NO: 103498 - DNA, 233 bp, Homo Sapiens
ctatatcgctcacacctcatatcctccctactatgcctagaaggaataatactatcgctgtccattatagctactctcataaccctcaacacccactccctcttagccaatattgtgcctattgccatactagtctttgccgcctgcgaagcagcggtgggcctagccctactagtctcaatctccaacacatatgcctagactacgtacataacctaacctactctgaagtg

SEQ ID NO: 103499 - DNA, 333 bp, Homo Sapiens
  misc_feature (254)..(283): n is a, c, g, or t
tcagacaagagaaagaaataaagggcatcccaatcagtaaagaggaagtcaacctgtcactgtttgctgatgatatgatcatatacctaggaaacccgaagactcatcccaaaaattcccagaactgataaatgaatttagccaaatttctggatgccaaattaatgtacacaaatcagtagtactgctatacagcaacagctaccacagctgagaataaaatcaagaactcaatccattttacatagctgccnnnnnnnnnnnnnnnnnnnnnnnnnnnnnntacttagaaatatacctacccaggaagtgaaagatctctactctgacagt

SEQ ID NO: 103500 - DNA, 438 bp, Homo Sapiens
aaatttaaaaattgcaatgaagaaaacaataaaaattaatggtatgaaaagtttttgaaaaaataaaattgataaacctttaactagactacccaagaaaaaaagagagaagacccaaatgagtaaaatcgaaatgaaaaaggagacattacaactaattctgtagaaactctaaggctcaatagtggctactgtgagcaactgtatgccaataaataggaaaatctcgaggaaatgcttaaattcctagatacacacaaagtaccaagattgaaccatgcagcaatccaaaacctgaacagaccaacaacaagtaagaagattgaatgcataataaaaaaatctcccagtaaagaaaaacccaggacccaatggcttcactgctaaattctagccaacatttacaaaagaactaatgtcaatcctactctaaactac

SEQ ID NO: 103501 - DNA, 300 bp, Homo Sapiens
caagccaaatgccaaaagaatttacctgtcctcggatttaatccaactagaagaagcagaggtactacacagccaacacgtaccatcatttaagtccctgccaatggccgaatcaatagacatactacttttctctaaatagcctgaagacaccactaaaatacacaagcaaatcaaaaaagaaagtcttttccaagagttttaccaagaactgtaagaccttgccagtctgtttctgatccttcttttaacagacacaaatcagaagcatgagttatgagtctatctctggaagtaggt

SEQ ID NO: 103502 - DNA, 135 bp, Homo Sapiens
cactttccagagtaggttagaatctaatagtgtcccttggccattcgtgtttcttagaacactatttccgtcattctgtgttgaatgcaagtgctggttcaaatagaaagtgtggccgggtacggcgactcatac

SEQ ID NO: 103503 - DNA, 431 bp, Homo Sapiens
agagtagcacaaacaaggggaagatagtagaagaggctgaaaaaatacccagacaccagattacacaggatctattataagatttgctaagaaacagggagtcactggagggccgtgagcttgagagagatgtgaggtgactggcattttaactggatcactctggctactgtgtggggaaacaatcatacaaagcaaaatggactcgggaacactagggggctcttgcagaattcaagctaagaaaaggtggtagccagaactaaaatgataaaatagtgagaattagttatacttggagtataatttgaaggcagagataaaattttatgtgaagagacttcccttccagtttcaacaacagtaggctaaatactttataatttcatcagtacaacaggaataatactgatcagctatttcaagagcta

SEQ ID NO: 103504 - DNA, 104 bp, Homo Sapiens
tgttctcgtagaatttaaaataacaaatatgtatagtatcggaccaactccatggagataagtgatagttaccagatctgttgttcctatatactctatctctg

SEQ ID NO: 103505 - DNA, 371 bp, Homo Sapiens
  misc_feature (301)..(324): n is a, c, g, or t
cactatgcccagcctagttaccctcaaactcaaaatttcatccttttcttaactactgaagacaatttctctttataatatttactttatttgaacaaattttaagctaattataaaattaacagtggccctggagaaacacagaacacaaaggagataattaaaatcacctgcagtcccagtaccagggataactggaattaatgtctttaaaaaatgcatataagatgtgcttaccaaattctctggttagatttctcttcttcagttctcaactagggatagaaaacacttctacaannnnnnnnnnnnnnnnnnnnnnnngggaaatagaatttttgctctgtcccctacctcggaaagggggtccc

SEQ ID NO: 103506 - DNA, 210 bp, Homo Sapiens
  misc_feature (49)..(68): n is a, c, g, or t
gcccgcaaggtgtagctttaaagggtccccccccttccagagtaggggnnnnnnnnnnnnnnnnnnnngctctaaataaaattacagacatgactttcacatttgagctctccaaatatattgttatgggtttaagaaataccacacttctgtgtcacaaagagagttctaataaccagtatgttctgagaagtccatacctgctaatat

SEQ ID NO: 103507 - DNA, 227 bp, Homo Sapiens
gcagtacgagagtagaactataaaagctctgtagctactgctcagcaacatgttcaattgaggtgtttacaacaaaggatacagagaatctcctgtaagtagtctagtcacctcttgttattttaagcatttaaatatttcttgactatctggttaatttccttcctgcaaaccttaattttctaccctctgtaccttgatccttaatagaaactgtatgagcagtt

SEQ ID NO: 103508 - DNA, 621 bp, Homo Sapiens
  misc_feature (265)..(274): n is a, c, g, or t
  misc_feature (435)..(458): n is a, c, g, or t
agtagaatgaattgtcactgtatataatatggcagctcctttcaatttttccccaccatagagcttcacacatagtttacaacgattctggcaaaggtagggtatttcaacacaatgaaacataactaaataacttggaaccaaatgctgtcattcagtgaagctatattccatccccagagtaatgacgtaagtaaccttctggactgaaaatgacaaaccaaacaatgctttctgaaaatttctcattcatcattatgaaacnnnnnnnnnnccctcgtacccatctcccacacagaagttggttcccataacactcacaatttcttgtaagtgttattacttagtctaaaaggttgcaaagcacagggcatttttccatccattacaatataaactcataaactccccaagcaagtaactgaattttaccannnnnnnnnnnnnnnnnnnnnnnntcagaagtaacgccaggaacctggtctctgtaaaggtccttaaactcccatggactggccagggagcactttaccagcactggcccagactttagccaaaggcagaaaggggagggagagacatgagggaggaagacaaagaaagggaggcaaagcagacaca

SEQ ID NO: 103509 - DNA, 112 bp, Homo Sapiens
gccattcatgagttagaatattaaacattgacatttaataaaatgtttagaataggttttttctctccacttttcatactataacctctcagtgatcttggttccttccttg

SEQ ID NO: 103510 - DNA, 226 bp, Homo Sapiens
aattagtcggtaccactttcatattagcttatacccagagcactgggtgtgggaacgagatcgcgcccacctttcctagagctccagggaccgtggaggcctgaggtcatcggcctgagagaaggtacatctgcatcctccggggtaaaggcagaatattggggtctatttcggaaatccaaagaacccaattgcttgatccggcttcaagcctgggcaacgtggt

SEQ ID NO: 103511 - DNA, 317 bp, Homo Sapiens
  misc_feature (247)..(264): n is a, c, g, or t
gtagtaggtttaagaagcatgaaagcatgtttttatatcaagataaatgtgacaaaaatgatcatttacattctatgaagaataaaacattgaaattcatcttatctagaatttagaaagttatatacttacatattggcacactgaggaaataacacacgattcatgttgtcattgtttaaaaggaagatcacatttgcaaaagagcattctgaggcaggctttaggaaacaacttgcttataggnnnnnnnnnnnnnnnnnngctccttctgaaaaggtgggggaaccttcttaacagttcacacctgtgcaggc

SEQ ID NO: 103512 - DNA, 253 bp, Homo Sapiens
  misc_feature (117)..(117): n is a, c, g, or t
gtgtctgacatggtgcagctctactgccccaatatagaatttggactttccctccaataaaatcctcctcttacagtctttaaaatcatcctaccccaccgcccacaccacctgtangagacgagggtaccttcacttactttgtggtctagtttttaggcagaagggaacagctccagccaccccctgctagaatttttcattaaaataactaatctgaaataatctggaagtgtactctgaagtggtcgct

SEQ ID NO: 103513 - DNA, 429 bp, Homo Sapiens
cagagtaggcaccatcctaaggacctagaacgctacaggtcattttggctttaaagacttagtcttgccgaaactttaaattgtcaaatgactggcaaccatcaggaaaatatttcttccacacagtttattcagaaaagcctggaatgcagcacacacatagagtcagtggacacctctccagtgtaacctgtttcaaagatccctctgactaagttaaaatcctgggcttatttccatccaccactcaacatattagcaagtgtctctcccacggcccagccaccaggctaacaattaaaaccattgtttcaactgacctaacaagacacttgacaggttaaatctactaaatgcgctccaagctaaaaaagatccatttttggagtatttattttggactctgagctaatctgagactggctcgac

SEQ ID NO: 103514 - DNA, 183 bp, Homo Sapiens
tagagaaaagggttgcccgcaaaggtcaatgatatcaccctagaacattctagaatgatgaattttgagaatgagaaaccttagaacctcgtgcggttgtctgccttggaattcctgtgctgtatcctgaaattttagctgaatttggcagagattcagagatatggctttctatcctgctaa

SEQ ID NO: 103515 - DNA, 229 bp, Homo Sapiens
cagagtgtttgctgtcccagtacattgacgctggaagagatcatctcagatggttctccagtgtcaggctggagatctccagaaatggagtctactcctggggtggcttgtatgggagcctcttctgtgccctcctgagtcctagagtgttgagtcattgttgtgtacactctagcctgcgtgtggggctctgggattttcactcttaataaggaaatccgtcactcat

SEQ ID NO: 103516 - DNA, 283 bp, Homo Sapiens
ctttccagagtagcactttccagagcagaaactgccatcccaacagttggttaccacagggatgggagctagagaatgataagatgctattccaaatgccaaaattcactaaaatttaccaacttttttcttcctacagagcactcttcgtgcgacccagtcacactaggtctcgacatagaccccaggatgtgactttaagtaggatcctcccagcagttcagagctcatcatgcttatagctatactgcctgaaaaaaaacacattcctaagtttattata

SEQ ID NO: 103517 - DNA, 199 bp, Homo Sapiens
acccactactggctgaatgaatgagtgaatgaatgagcaagagtttgctcaggctgaactctgagctgccggaagcctttgtagacacccccagaacatgctggccccacctctgagctcctggtgtacctcggttctcatgagcccccgcactacagcctctgtgggccagtagtggtcgggatcctctaggcaccgg

SEQ ID NO: 103518 - DNA, 349 bp, Homo Sapiens
ggatatgagccagtcctgatctgcaggtcttcgcatgacctgtccttacattactgtgaccatggtggtataatatgcaatattttacctttaacatttgattcattgacagactatcatgtatcttatctcactttaactttttatatcccctcttacatgatctatgatcttttattctttagtctcaccaagtagatgatctttacatcttcctgtgattttgctcactttccttttcacttaattcactgacgttgtacactttggcttctgtttagctgaaaccttttagggaatgtaatttctgtatttttagtagagacggggttcaccatatgggccagta

SEQ ID NO: 103519 - DNA, 330 bp, Homo Sapiens
ccaggaagctagtacgcactgctaacataataaaatgaaaggcattgcacacagaccagtggtctgctatctgaccctttcccttcctcctcttctttttccccattttccttttgctgctcttcttccgccatcatcatcagcatcctgacatttgcatggcttcttacgattttgaaattgttttcatatgtacacatttaccggagcatcacaacagccttgtgaggaaggtcagcattgactctgattgaagatgagaaaacacacctgcaaaccagtgaactaatttacaagagtaaatggagcaggacctcaaacccaaatttc

SEQ ID NO: 103520 - DNA, 261 bp, Homo Sapiens
tgcatgtgtggaacaaaacttcgatgctgatcagtgattaggtaccttgatttggttcattatttaactaaggagatttctttcttttgtgaaaagccattctttaatcttgtaaaaatatcatttaatgggtggatgttttatctgtgatgaatgacaggttgtcgtaaaggaagaaaggtatgtggtttccagataacacttttaattctttggcaaaataaaaataacagtcgtacagagagtcaaaatcatcatgaa

SEQ ID NO: 103521 - DNA, 257 bp, Homo Sapiens
ccaggctgtgtttggccttcagggaggccctgtgccccttgacaactggcaggcaggctcccagggacagctgggagaaatctggcttctggccaggaagctttggtgagaacctgggttgcagacaggaatcttaaggtgtagccacaccaggatagagactggaacactagacaagccagaacttgacctgagctgaccagccgtgagcatgtttggaaggggcccagtagtggtcgggatcctctagaacaacc

SEQ ID NO: 103522 - DNA, 567 bp, Homo Sapiens
ctggttggaatggcatatggatgtgtgctgttttatgctgctggaagtgccccacactccatggggcccccaccacagcaaaagctaaccctccctggagagacacaccttcctcatcccggccttccggctcccagagtgtagacagacgaagagcctggttggaattacaagacgttgaggaagaaagctgttctgagagggtcagcaggggtcagccccagggacctcacgtgctgggatggttaaatgcacagtattcatcaggaggagttaaaaccatggagtatcatgcagatgtttttaaggcatatggaatatctggaaatgaaaactataatcactgaaataaaaaacccagtgagcagatgatgtagcttattagacacaacataagaaagtattggtgaattggaagttctaacaaaagagattgcctagactctggagcacagaaagaaagtgagacaggaagcctgcaggaagcggggagctgtggaggagagaatgcagcttaacaggcacctcggcagaggagagagcagggccagtaggggtaccgagctc

SEQ ID NO: 103523 - DNA, 223 bp, Homo Sapiens
cccactactggccacaaaaagaagaaaaagagatgatctttgaagacacaaatttgaaattaacattgatctctgaagatatcaagtcatattatacagtgcgacagatagaactggaaaaccttacaacccaagaaactcgagagatcttacatttccactataccacatggcctgactttggagtctctgatcaccagccagtagccactagtggtcggac

SEQ ID NO: 103524 - DNA, 242 bp, Homo Sapiens
ccagacatactgtccacaggtacactctcacctggacccaggcagcctagtccataggtacatgctctctacagggatacatcacctgacccgtgcattcatgcttaggcatagacagctgggcacctccaccaacagacacatcctcttctgccccagacagccctgaacctacgtgtactctaatcacctagcctggactctcctgtccacaggtacacccagacttggcctgtttaaga

SEQ ID NO: 103525 - DNA, 459 bp, Homo Sapiens
tatcaagagtatggcaagggcacatttacttaacatgtaatatcccttccccagaagagaagcttgagatcagagactggcttataggaataagtcgaacctagtagcgcctgatctgagggctctggtgcaggattcactcaggaatgatggcttttagggtctgagcccctgaaacttaggagaagagtgagtgcttaataatacatggtccaaacagtttagttggtctggaggcgatttggatttttgagtcttaaggggaacccggtctctaggttaatatgggcggagcttaacctcagtgggaactagaagtttgtggtttcacatgttttaagagtttgtatttttaaaaatctacagcatgttttactgccctcttggtctcgacagcagcacacttcgaaggttcaatcatgccaagcaagctcttctatatagggactagaagtggcc

SEQ ID NO: 103526 - DNA, 145 bp, Homo Sapiens
tacccccaccattaaataaaagtcttccctagaaatggtggagtcgggatagacaagatgacccacataatggctggctggtgcactcatcattatttatatgttgagtgtatgtctcctgtccaccatgggtggaggcaattta

SEQ ID NO: 103527 - DNA, 399 bp, Homo Sapiens
acgaccactctaggccacgttcttatgggttcaccagctagctagagcccccagcagcgatacagagagggtttagtcacagaccctgcttgcaaggagctcacagtctagtgaggacatcacacaaagaaatggacagtgacgaccacacgagagactcctccagtgatgggagcacgataatctggggcagatctggggtggggttagctacaggctgctaagaggaagtgattctcaaactgagtcttaatgaggccaggaggctcagggctggaattttgggttggcatatttatagaccctgaggctacaatggggcaagtttgaaaaaacccaaccctgtcatcatgactagaacaaagagtaagaggtgactagagtggccgggtaccgagc

SEQ ID NO: 103528 - DNA, 461 bp, Homo Sapiens
cctgatctcctgagccctcgatcctcttctcaaaatccaccccaaactgctggaccatctgcagcgaggcttgggttttgcgggtggggtcgtcgggccgaaagttcttgtactcctccacctccttctccagggacagcagctggctctgtagtttgctacgtagggccggcagcgactcccggatgtggttggtcagttgctgattcagcgtcttctgcagatgtggcgtgcccatgcggtcggccatgtgccggtaggccgggtgggagaggaagaacttcctctcagctgccagtgctgcacggatgtccttcttgccctcaatatccttctggctgcggttcaccacgccaatgtagcctcttctcaacgggagcaacttgttctccaagacgtccctggcgtcggtgccctcgtccatcaggtcaagcttggtgatgacaccgatggtccgtagg

SEQ ID NO: 103529 - DNA, 237 bp, Homo Sapiens
tgctctagacgatccccggccactctagtcacatctgaagagggctctggactgagcatgtacctaagtctagctctgccgggtgttatccagaaagatcagtcactgtgctttggagtccatgtcactgaagcactccttagatgaagcagaacccagatgactcttgtgtcaaggcaattccaagacaccatctcctgctcgcctgctgtataaacgaacctaacatagaacaaa

SEQ ID NO: 103530 - DNA, 194 bp, Homo Sapiens
ccactctagtcattggatatggtgcaaatacagtgattgatatttgtcaatgaaagactgtgtatcagcagagattctcctatgagcagtcaaaggcctcctgtgacttgtaccaaagcaggctgagtgtggggaagacagacaaatctcatttcattagattacatctcagtcaacagagtgaccggggatag

SEQ ID NO: 103531 - DNA, 428 bp, Homo Sapiens
ccccggtcactctagtccagcgaaaacctgggctctgtggacatcaaaacgagcaaagaaacaataaaaagttgtagtagactcactcactctatctacacaaaaagacgtctttggggcccgcatgctttccctggacagaaaccggacctcctcatcttgcaagcctgttgccctctcagaagccgtggatcgtctttcctaagtacagagttgaccttgaagttgtgaaagtggaagctcaagtggagcttacttcaaagctttggagattatctcactaaccagcattactttgcagaagtgggactaaggctcggaggctgggttgcttggaggccaagccagttccagaacccaggattttgactctgccccatttagctcaatgcagtgccgccttccttctttgactgtggactagagtg

SEQ ID NO: 103532 - DNA, 459 bp, Homo Sapiens
ggtacccgccactctagtcacatttaaaataacacttgttctaaacacttatttgcacatgactttttcagcaataaatctgctgcataaatgaagtatacctagatattaaattgtgtgttggaaaaacactatgaaactattataaaaagaactaaactaggcatcggaaatggtaagttcaagtccaactaccatcacttaatttgagttacaataaaaatcctacctgtcatattatctcataaagttattagaatacttaaataaaaatatacataaacatgttttgcaaagtgttttacattttaacattgtaccactggactaggagcagctcagtggtttcagtatcccagcaagtaaaaccttgttgggaataaaacaaactaacattggctggattttaaaaatcaatttttaggcttccagaaaattcactgatgagtagaaatcatt

SEQ ID NO: 103533 - DNA, 340 bp, Homo Sapiens
catggttgctctagtgatacagcaaatactctgcaaattctgaatgaagtcagctgatttttcccattaacagaaagaacttatggaagcacagaaaatattaaggcacaggctgcagcactacgtactacttccagtcccatacctctgtcataccccagtatcccatcgcctcagttctgagtcatgcgagagtcactaagagacaagaaataagctctctgagggcaaaagcagctgagccaagtgtggctccacctctgtcttgaaacgatactcagcacagtgtctcaaaaaaacagtaggcactccaaaaatgtttctggaccatgtacgagaa

SEQ ID NO: 103534 - DNA, 313 bp, Homo Sapiens
ttctcgtacatggtctaataaaacactggctgattctctggataatgcgaacgacccccacgatcccattgtgaacatggctactgcgctccatggccacacaggccatgtcgaatgctctgtacttctccaccggatcctgtgcggaggaaggagttccatcatttacgggctttgcattagataaatataaccactttacttctccaataagaagatattcagatattgtagtacaccgcttgctaatggcagccatttcaaaagataagaaaatggaaattaagggaaatctgttcagcaacaaagatct

SEQ ID NO: 103535 - DNA, 134 bp, Homo Sapiens
gggacagcacgcgctaacaattcccaggtctgttacccacactggaaattgttagcatgcttgtcaagggctgtagcccctgactcccctaggtgaatgtcaggatccctcccaggtagtacgtgtgtgagaga

SEQ ID NO: 103536 - DNA, 290 bp, Homo Sapiens
tgggtgagtgacatctggggcacgggtggggtctcccctcaatccctggcacgcggagttcagggccaaggtctatgacaggaaaagtcccaaaatataccacttggggcactgggaagctgcgataccatttctgtgctctcctgtagcacctcagagcccttccttgccctgaactttcccataaaaacaaatacaaagcacgatataaacaccagaaaccaccctccatggcagctggtgagacagaggatgtgaggcagctcagcaaagtgtgtgtgtgtctgtgt

SEQ ID NO: 103537 - DNA, 538 bp, Homo Sapiens
aggaggcaggacactgtggcaagtgattctgaaagcaggctagatctcatacctgctggcaggccctgcttttcccagcagcattcctgtggggcagcgtgatatgagggcagacaagaatctcatatgaaggaagaggacaggggcttgtggacccacaggggctctgggacaggcaatgtgcaagcagatgaagcctaagccgcaggggctgggccagcactgctctccagtgcaggagaggcatggtgtggacagggctggccacacagatctgacccagcaagttcctggcccctcaggcctgggtcggcttcctgtgggtgctcatcttggagccaagagctggctgtgggaatcatggtgctcaggcttcagagaggtagacacacaggcaactcgattcgtcaggcggtgaccatcagtcaatgtgaccggccggggccagcaaccaggcctcagtgtacacctgccactgctggggactttggaagaggcaggtgttggccagtgtcctgcctccaaaagatcgtctaga

SEQ ID NO: 103538 - DNA, 383 bp, Homo Sapiens
ttcgtcgaagaacaacggcagacgttaagaaatgccaaatgcaaggaccattaagaaaattctccccgaaatgaggctcctctaacaaatgatgattaaaacgctctctccttgagcagtcacattctagaaacaggacattccatgaggcaggaagagttcagttaatttgctcctgaaaaagtgtggttcagtgtttgtgtggcaatgtacgtgggcagaagaggccgctcaagctgtgtcccccctgagcaggattcaggaaagggaaaaggagttctcttcaactcagccaaggggccgtagcgatggccgatgagaggatgtagtttattaagttctttgtaaagtgtaaactataaccttaaatgtaagatgccgtt

SEQ ID NO: 103539 - DNA, 204 bp, Homo Sapiens
cagttaagagagcagctagatggctgtcccttaaatattaacttctaaattgtgctaacatgcaagtattaaggttctcctttcttgctagtacttggctcttagagattttgcttctccacatttcttcaagaatagacatctgaatggggtaacaactgtcacagagtagggtaacactgaacctgcatctgtggatatgcc

SEQ ID NO: 103540 - DNA, 281 bp, Homo Sapiens
ttgcacttcactgaaaagatagacttcatcctgcaggacaccttgtgttcccacctccaaatcccccagccttctgcacctgtgcttgtgtcttcatcgcctccccacctgcgacagtggcagaacagtccctgttcatggggaccccaacgtctgctccagatcccattctccctcacctctgaaagcatttgctccttcatctgtcacctctctctccagtgtcattacggagagtcctctgtcttaacacaaagcaaccctctctgacccacttccct

SEQ ID NO: 103541 - DNA, 136 bp, Homo Sapiens
tgtcgccagccaacaggatagcaggttatgtcacgcatctgatgaagcgaattcagagaggccccttaactcatctgttatcctgctagctgtagaaatgtatcctgttggctggcacagcgggatcctctggagt

SEQ ID NO: 103542 - DNA, 328 bp, Homo Sapiens
gaggacacagaggacatccggatagggagggtcttgtttgacttcagtgaagtgttcgagataacttcgtgtggggggatggaattgggaggagggactgctggaagaaatggatgtaggtggggtgtatgaacttctttcccaggagggagcaaattacattacccctatgtctagcaaaaaagctgacggaaaaaaggaggctactgaaaattggatggaaggctggggttctgggcacttaatcactcaccatgagggtcatcagctcctgctgtagcctgaaaaaagagtattcggggttacctgggagtccggatggtcctct

SEQ ID NO: 103543 - DNA, 394 bp, Homo Sapiens
aatgccaagacagtgaagaatgacaactcctcccgattcggcaaattcatccgcatcaactttgatgttgccgggtacatcgtgggcgacaacattgagagcctacctgctggagaagtcgcgggccatccgccaggacaagaacgagtgcagcttccacatcttctaccagctgctggggggcgctggagagcagctcaaagccgacctcctcatcgagccctgctcccactaccggttcagtgaccaacgggccgtcatcctctcccggccaggagcgggaactcttccaggagacgctggagtcgccgcgggtcctgggattcagccacgagggaatcatctccatgctgagaatggccccagcagttatccagtttggctcgtttaccat

SEQ ID NO: 103544 - DNA, 468 bp, Homo Sapiens
ggagcgtgctgaagcatgctgattgctttgcccagaacaaccacacacagcgagcgtctgctcctcaacttgggtgctggtgcctgagctgcaactgcagttgcagccttctctatagatacacaaagatttaacgttccttaaacaaaaataactgaaaggacttctagagaatatccacttgtcttataaaaggactctcagcccagagagcttctgtgccttgtcgatagtggcagagctgggatcccaatgcttctgccctgctggtttgagtcacattctccatagagcagtttgcccttcccagttctgtgttagtcagccccgttctcacttgcatcctgcctcgagtcacttgagcagcctctgggttcttccacagctccttgttctctgaaatgaggcccatcctatgcctgatgccgaggctgctcttcactcgccacgatcctaactctgggtacc

SEQ ID NO: 103545 - DNA, 418 bp, Homo Sapiens
tgctgatggcactggcaggcatcgacaccctcctgatccgagcatcctacgcccagcagcccgctgagagcagggtctctggcatcagcatggacgtggctgtgcccgaggaaaccggccaggaccccgcgctggaagtggaacagtgctcctgcccacccgggtaccgtgggcacggtcctgccaggacggtgacacaggcttacacacgcacgcccagtggcctctacctgggtacctgtgaacgctgcagctgccatggccactcagaggcctgcgagccagaaacaggtgcctgccagggctgccagcatcacacggagggccctcagtgtgagcagtgccagccagatactacgggacgcacagcggggacaccacaggactgccagctgctcagccggtaccgagctcgatt

SEQ ID NO: 103546 - DNA, 348 bp, Homo Sapiens
tccctctccaaggtaggacagacacagcagaggggaaacgatcctggggcttcttggagggaagggtagctgaatccaagccctcacccgattccagctcttgtgcgactgatactattacacctgcttcctggtccctggagggcgtgtccctcccccaggacaaaacctggagctcttccagcccaccagctcttaggcaataatctcatcttccgggatcacgcccctgacaagccaggaaaagccagctatgaccttgtactctcaagtccctggggcagggaagaggttttatttaagtgattaaaagcccaggggagcttccttgaacaaggagtgggttca

SEQ ID NO: 103547 - DNA, 168 bp, Homo Sapiens
tgatggcttcctgtttgggctgaaaggagcaaaaggaagagcaggcttcactgggcttcccgcctcccctggagcccagcggaccaaaggggtggaaaggtgacgctggggaatgcagatgtacagaaggcgacgaagctatcagagttcttccaggctccagctaca

SEQ ID NO: 103548 - DNA, 518 bp, Homo Sapiens
gactcttgaggaaaacgaccgctagtgtgtgcacaataatgcacataagatgagtcgcgacctcacaaaaatacagactgagggctgagatgcccaacacaaatgcggcaaagagagaaacctcatgccttgatggtgggaaagacttagcgttcagtctctgctgggacaagggaataagacaatgcacagctggctctctgcaacctgagaaggccagctgatccacaggccccaagttcacgtcctcgtttgcagtttcatctctttcacgatcaggggactttaggtggaagtgctgtcactggtggacgactcttccccactggattccagatcttccccactttgcccaccttcctgcaggtcatgagggccctgagctcagcactgctgctgcccctcgtggggaacgctgctgactgcatggatcgttgtgaagatgaagcgagatcatggacatcaatcactaagcacaatttcctgcacacagtagcgaacgggtaccgagctctgct

SEQ ID NO: 103549 - DNA, 237 bp, Homo Sapiens
agaaacgaccgctactgtgtgtgacacgcagccccactccctgagcccattcctggcccacggaactcctgtcccctaactgattcctcaggttagaacacggcttttcattttgcgactccagatgaatcttttaactgctgagtacagagctcctgccctaaaaaaggaaatttaatggaatttacaaaacaaggctctctaaaccacacacacagtagcgaacgggtaccgagc

SEQ ID NO: 103550 - DNA, 257 bp, Homo Sapiens
agcccgactctatgaggatccccctgtgtggttctgagatggcaaagtgacacctgtgggccagcttcctggctggaagacaccctctcctcccttccctaatcatgtccagtgctacacggcagccggagagcgctctttgttggtcccgtgagaacattcagaaacaatcatacccacccctgtagctggctgcttattgccaaggcgttgcattggctagtgtccccacacagtagcgaacgggtaccgagctc

SEQ ID NO: 103551 - DNA, 278 bp, Homo Sapiens
gaggaaaaacgctggctactgtgtggagccagaaggcgaaggcaagtaaatccttggcacaaagcaggaggaggcaggaacaagtacaagggacagtggggaggcagacgaggttctgaataacccagaacaaagagaacatgaaaccacaaaagaagaacagattaaagagaaatgggggatggggatgacagagcacccagggcagcgggtgcaggaccagcagaggtcccccgactgtccttggctgtgtgcacacagtagcgaacgggtaccga

SEQ ID NO: 103552 - DNA, 399 bp, Homo Sapiens
cgcactgaatacgatagcatttcccgctgcacatgccgatggaagacgggctcaggtgacatctgccgaggctttggctcaccagaggagtttgtagatgtcagtcatccccaagtcactaggaactagcacgcctgaggtaggtctcggaatactgttcaaatccattttactattgcggccaaagaaccctccctccagcaaggcggctcatcacatcacgttactctttagggcaaatgtaaccctcccggttttatttatcactcaggcagagtttcttaaccttttgtgagttacagatcactgaaattctggtgaaagccaggtaggcctcgccgcaggagaacacatacatggtgcacagaacacacacagtagcgaacgggtaccgagctc

SEQ ID NO: 103553 - DNA, 393 bp, Homo Sapiens
ggtttccaggacagacaaaggcttacctatgaccaagggagtatgactggattgtattgtggggacttgtaagtgaataaaacaaaaaccaaagttcttttccccaaaaaagccatgaacacaggttttgtttgtccagtttcaaatataaaattttaaatgcaggaacatgccatgctgagaatgatgaaaaactgtagtgcagtagttataagcacatgctctgcagtctaactgctaggaaaaagaccctggctctcctccttacctcttacaagctgtgcaacaatgaacgagtcactctccctcagtttcttcacaggaaagaggctagaactaaatataccaaaatgcctggcacacagtagcgaacgggtaccgagctctgctagg

SEQ ID NO: 103554 - DNA, 368 bp, Homo Sapiens
ttcgctactgtgtggagcccgttctgtgcactgcagggcttttaaaagcatccctggcctctccacccactagacacccgtcattcatactctaaggaacccaggaggattactaaataatcattatataaattgttaatctagttaagtgggaagagctctcccaaacagggtccttcctcactctgcttattttttcctcgcctaaatcaactgatagtaggaatggggaatgaagcaaaaaagtccgggttggatagggcaggagttctagaaacaagcataggctgcagctcactccaaaccggcagagtaacaagttctctcacctttgagttcatgcaccaaataagaatagaaagatatgt

SEQ ID NO: 103555 - DNA, 377 bp, Homo Sapiens
gatcgctactgtgtgctccatctccagaatgtcctgggaatcactctgtgtgtaggtttctacaacctgtgttattcgtgtctgtttgtgtgtttgttttcgcttctctgagggaggagccaagtctcatccgtgtagctccacgtgtaataaatgtgagtcgagtgaacgaatgaaagatttccccaagccttgtagtggacgtgcttggaccatggtggtccatcagtgtggcagtggagtccctgagcattgaggattgggagacgtgtgactagagaggtagaccacacaagccatgaagcatctaggggtgactgcaaactgagtgaggcaggtcttctggtcctgtgctgctccacacagtagcaccgagc

SEQ ID NO: 103556 - DNA, 266 bp, Homo Sapiens
tccagcgcataaaaatcatcactagaaacgttagacagcaggtgaatgggtgttcactgtgaattctttcaactcttctgtgtgagtacaattgttcatgataaaataatggtggtggcagggactggtactcgccagcttacatcaacctcgcatcaacttcatctcccgaactgtgttactgctcacggaacaagtcaggtctgcagactcctgggcatcaccacctttacgaacctcaaacgcagccttttcccaaagcccgc

SEQ ID NO: 103557 - DNA, 301 bp, Homo Sapiens
gctcggtacccgttcgctactgtgtggggtaaaagtaaatactgtcagaacctctgtgacagctacaagcgtgtaaaatttaagtctttctaacaaagtctttgtagtacaataccgtgatctgttgtgatcaaagggtgtcggttctttgattagaaacaacaaaagagccagcagatgatatccttggaaacgtctgtacaagcatccatctaagtgggggcatatggaggcagccacagacacatcactgtgcgaataatactcaggagcatcaggcacacagtagcgaacgggtacg

SEQ ID NO: 103558 - DNA, 347 bp, Homo Sapiens
gaaaacgccgctactgagtgctgcacgagactttacagttaggactcatgtttaagatggggccgcttgaggcctgcaagggccacgttggattactgaagcggaaagcggtctcccatgtataagaaaaagttttacaacacgaattggaagctgcttgagtccacctgaacttgaattgattgcaaagccatctgccgggaacggttttgggttcctgagccatcagccagcctttctttcccctctgatgcacgttcctcccggcctagtccgtggaggcccatcacaccagcatccgtgacgccagcttcccactaggacatccaggcaggtcgggcggggac

SEQ ID NO: 103559 - DNA, 301 bp, Homo Sapiens
ctcggtacccgttcgctactgtgtgctcagctcgtgctcccacaggtttcatggcttctcgctacacaatgccatgcctatttgaatcacactagggctattttctgggaaatgtgagctttattcaaaacagtgttttttcagagcttattctctattgaaatagtgttataaatgggagctgtgttcttagagagaccccaatggcctcatagatcataaagtaatagagaaaagttaaaataacgctttggcatgaacagctatcctcaaagataaccagtggccacacagtagcgaa

SEQ ID NO: 103560 - DNA, 327 bp, Homo Sapiens
tcggtacccgttcgctactgtgtgtttaaggctaatctggctgctaaaggcagctggaagctgcttggtcttcagctcctcttgcatgtcagtaaaagcaagacacagctggtctcaataaacagactatccacaagtgatgtttgcaaagttaaggttgggaggtggaagctccatctcctgaccatccaaagactggtggatgcctaaatccaacatattaatacaatgagtgctacagagataaccaaaggtacaatgctagaacagttacttttggttatcagaggcctgcacttgatcaagttctaggcacacagtagcgat

SEQ ID NO: 103561 - DNA, 415 bp, Homo Sapiens
tcggtacccgttcgctactgtgtggaccttggacttgtggcagctggcctgggtgctgcccctggtgaacaggaccctcccgggcactgtcccttctggctatacctcccatgccagtgcacaatgctggtctcagaataaacagatgccatctacttgactgaagaatacacacaaactagtaataccctgacttactatataaagttttattctggggaaaaaagggccccacagctaattcaaaaggtttaaaaactccactggagggttatcacaatccaagcaatttttatgttgctgagaaggaggggacagcagggtgactggccctgcgttttgcataatgactttcaatatctgagagtaagagacgtttccaccacacacagtagcgaacgggtaccgagcttgc

SEQ ID NO: 103562 - DNA, 307 bp, Homo Sapiens
acttgactcttgaggaaaaacgaccgctactgaggcggtgatctttaagattgtgaacaaaaaaaattctagacaaacaggacacaataagagaatgcgtatgaacagatttgaattccatgaggataaatgtggtagcagtatggaaggtcggtgggcagaggtgagggctccgagcacacatggtattgtgtttgtgtgaggcttctccagcccagacagtgagcttgatgctctaggacagactctgtgtcatgtagcacccagtcccggcacttggcacacagtagcggtcgtttttcctaca

SEQ ID NO: 103563 - DNA, 425 bp, Homo Sapiens
ctatatgaccccgttcgctactgtgtgccacacaccatatcaggtgctgaagattcacgggtgaaccaaaacaatttcatgcctggagagaagggaggttacagagtagctgagatgactgacattaaccagaattacaaagtgcccggctctaaaatgtgctccgggacctggaaggaattacactcactagggggaaaattctagcatggacagccagttccatcagaatcctgggatcctctgtctcctaggatctgcatgtttctcagtagatctgaagctgtttgatcacctgcaggagctggggagtctgctggaggcctgggatggagttctgggcttagtctggagagaatatgtaaacaggtgcagcctccttaaggaaacctgagaggcagcaccacacagtagcgaacgggtac

SEQ ID NO: 103564 - DNA, 431 bp, Homo Sapiens
cagctccggacccagagataggatcgcgaataatgctgctatgaagatccgatggcatgtaagtctgcgtggacctgtcttttcatttctcttgacgagatacctaggaatggaattgctgggtcatatggtaaatttctgtctaacttttaaagaagatgccaaactgctatttttatttccaaccttggcagcagtagattagaacacgggagaccctcacccaaaaatgggaggcagctctctgcagacagtgcagggaccaccagcacattaaacatgattgactcccaccatcgaatccctagctctaaaaatttaacttagagtgctgggggcactgatagacagttgtggaagaaaatccattctgcagcacaaggcaaaccccagctccccagctgcctacttcaaagccaatccaaacaaac

SEQ ID NO: 103565 - DNA, 653 bp, Homo Sapiens
  misc_feature (465)..(591): n is a, c, g, or t
caccatatgcccatcagtccggattgactagccgaaacctgacagcatgaaacgactgctgcttctaaatagaattaggcattttagaatcaccttccccttcccgcaaaaagacaacaacagaaaagccagagtgctgtctgtgtatgaacaaatcttcaatcctgggatgagattatgatccaaaacagtttgaacattttgaactttcttaaggtgctttttttacagatccatgacaattactaaaaccttccccaaataaaaaggacgtgaaaaggtaaactctgtaatggacagtttaaaattggaaatgttgttagtaaatggattttgtcaggtatatgatgttatctcatgtgtcttaaaaagaggggtgactctgatgtggggtcatgcttgaaactaagaggacgaggtccctgactctccattgcagccagctctctctggaactaatagagnnnnnnnnnnnnnnnnnnnnnnnnnnnnnnnnnnnnnnnnnnnnnnnnnnnnnnnnnnnnnnnnnnnnnnnnnnnnnnnnnnnnnnnnnnnnnnnnnnnnnnnnnnnnnnnnnnnnnnnnnnnnnnntggttttatcccaggagcaagagatacccacgtgtacggattgtctgggcgtggttttactt

SEQ ID NO: 103566 - DNA, 450 bp, Homo Sapiens
acgctcggtacgccagagatacggatcgcggctacaaacatagctacatatcacatgtgggaggcaatgacgcagagaaggaagtggaggttagtgctaatttaagaaggcctatagaatgtatgtgaaggtagctaaggaactagttagtgtattttaaaatccctattgcaagcctaacactgacctcgctagtaactcttaaggcaatcaagacggaacatgtgtttggcccccagatgcacgaatcctgccctcccctcaacctttgttcatcctaacagaccaacctggctcctgcattaatatggagtggggagaacagcaaaacaattcactgtatgtacaaaagacaattcagtgcaaacctagaaacttctcttagtcaatagtttccaattttctgagacgaggtcttgctccatcacccagaccgaaggtcagaggcct

SEQ ID NO: 103567 - DNA, 416 bp, Homo Sapiens
gccggtcggacgccagagataggatcgcggcaattataaaccttgagactcttggctctagtccatacagttaaaatgttgacacactcccaaactgcccctctgaccttcagggtctgaccgagcgacgtccttcccattgcggcaaagggccttaacggggacagaggtcacatcaagctaagaatattctgaaatacaacaacttttcctgtaatccctcaggatttagaagagaactggtaaaaaccaaaattctacagatttaaactttttaaaaagtgccctttctctgtttcccaactggtgaagtgaaaacaaactacagcctagccatacaatgctcagcagttgcaaggagcgagccaccgacgcgtgggcaacacgcgacagaactttagacactgctcaccgaa

SEQ ID NO: 103568 - DNA, 525 bp, Homo Sapiens
aggttaaaacaccgcccacgaattcctaatcctgggcattactgaatcccgagggaaaaccacctcctagatatgccatagatcaatgaaaccccgttcttagccctaaaacttaatgtaaacaccaagttggataatgttcagaaaagagaaaccagtaaaatgaggtgactcaaaacttggtcttgaggggctcaaactaggcctgtcctccacagaactccacagatagcggccattctgggaagcatggtagccagttcacggcatgccatctgccacaccggccctaagctctgtcagttgaggactcacctttgaagccactctggtgcttctgtcttcccactgaggagcaggagggatttcctgagggtggaaatggcagatgctgggtggggagagcccaagatgagggggacctaggggcagagcaacaaggattcacttgggtgacgacgacgatcagtgattctccagggtcatacgggaagaccagctaatctcaggcacgatcctaactct

SEQ ID NO: 103569 - DNA, 414 bp, Homo Sapiens
cgttgatgagggctccagagcaagaggaataagacccttcacctgcctgcttgttgccgtattgtctccagcaccctgtgctccatgggctccagctaacgaggtattcatgatatccaggtacagaaacgttcgttgcagccacaacagtgggatcagactactcaaaacaaacttaccacaggagatagtcaacaaacgggcagctcctcccacgcggccagctggctccccagccgagtcgtcatcatttctcgcatcaagcctgaacactgctgtcctggagccccatgcatccagttcactgagtgaactttggcttcctctctgtcacgtttctccaccagcctctgcatctagcaccggcattgctggtcatctttcctaaccttgctcccacgatcctaaactggg

SEQ ID NO: 103570 - DNA, 368 bp, Homo Sapiens
ctaaacgaagatgattactttaatcattaaaaaatcacaaagttggagaatttttttaaaaagagtggataccaaaatagattttaggaagatgacagcttaatagtctcttaaattgctgaagagagcaaaagaaagcttaagatctggaggataaaagttatagtcaaaaacatgctaaagaatacattaagacaaacaaaaaggaaagaggaaaaaataaactatgccttagaagttaaatcctatcataaatgaacatcatttctaaaggactatggcccacttcaacactcaaacaaaaaaatcctcattgctaaaacagcttcaacattcctttggagtttgctgttaaagaatttatcctg

SEQ ID NO: 103571 - DNA, 609 bp, Homo Sapiens
acgaagatgattacctttatcagtttacaataaaaaagttaaaaagaaatactgtgtctagggtaaggtaacagtatgcatctaatcagaggagagtgaagaggaggcgctgccttctaggtgctgtgacttctccttttcgtgattcttctccaccttggtcaacatcttccccgctatgctggaattacttcggtgttctgcggtggccatggtgaacatctgatgaactgaaattccatcggaatgcacaggaagatatagttgatcttcaaaaatgtcctttccaggaccaccatactggggaagttctttcgggtgcctgcgaatgggctgcagcctggggctgggcccgagctctagctctgtcatgccatcgccactgaaatcggttcccagatgattggtctcttcatgccccgtccatttttcggtttttctccagtgttcagaattcaaatgattgacttctggaatgtcgttattccattcaagtttactctctggacttaatgttggtcggttcaaatgcagggtttgaaggtcagctggcaaggtcaaatgaggtgttttcccaaccttatgccttgggtaatcatcttcgtttag

SEQ ID NO: 103572 - DNA, 471 bp, Homo Sapiens
ctgacgaagatgataccccacaacccagatcacattactcagagacagaaatcctctcatttagtgtgaacaggtacgctacgcaggctttcattacctataatagccttaggtcgctatagtcacatggaaacgtggagcagaaaggacggcttagagtcacgagaggcaattctctccaacattcagctctcacggcttctctcactcatgaccgcacacatgacctgcttttcccctttatctgtatttaatataaataaggtaccttaaatggatttagtatttatgtgtctgttaatacatgactatcacagaaagcccaagtcagtcttaaatttgtagagtacccaacacagaggcacttgatgaagtcatttgattgtgatggcttgcactctccaccatgcttgccccaaaatcatagctttgatactacctggtactcgacgagagctgcgtatcctcttc

SEQ ID NO: 103573 - DNA, 619 bp, Homo Sapiens
  misc_feature (568)..(568): n is a, c, g, or t
  misc_feature (601)..(601): n is a, c, g, or t
cgagctcgccccgctgtatagcacgtgtacgcacgatgctacgcacgtgatacgcacgtatatgtcccgtaaccattgactgaatagcaccttgataggatagtcgtgccggatcatgagttccatgaagtccagctacaattgattatgactgtgttagggcctttgacggccatggctgagtccaagcatccccaaaaattaaaaaataccaaatgtatgaaacctcagttatgtgtgagcatgggctgattagtcattagtccatcgagatgtcttatttaaggggaaagagtgggcgattttaggtgagatggtcctgaagtaagaaccagatgcctgttaaagttcatcaatagaaacccccacgatttatgggcccggagcgagaagagggatacctgccaagcgggttgctgagttcacgcggcatggtagttaagctcgtgatctagtggtggtgatatgcatgttgactggagttatttgacatgatatgtgctatgtacgatcaataataatatgtactatgtaatattaataataatatgtacatgcttatatgcantgggactagcaattaatgcacgacgtacatagngttatagtatagcacgac

SEQ ID NO: 103574 - DNA, 392 bp, Homo Sapiens
cttaaccttagaagttgtggcaatgtcagactatagtttctaaatacatctttcaacctctggactcatcacaggtaagtcacaaacagtccacagatcaccactagatcactcctctctggcatgaagtcactcgcctgctgatcccacactaggacaatcatcaactctcattaggaggaggcctagggaggaggcatatgcagattgctcaagacgtgaagccaagtggaagcagagtcaggattagaacccatctgtctgactcccatggaaaagcagttaataatttcctcaagtgcaaggcaccccagatcaaggagatacggaacttatgggcctttgcaaggaatgccggtagaaaaaacaaacccacaacttctaaggttaag

SEQ ID NO: 103575 - DNA, 558 bp, Homo Sapiens
taatcgagctcggcccctttgcttagaagtgtggagaaatggggggctgattctgctcaattcatcaggatgagtagaaggcacccagctctcaccctggcctgacatgtgtgtccctgagcaggttacagtcctctctgagcctctgcttcccatctggaccctgctgggcagggcttctgagctccttagcactagcaggaggggctccaggggccctccctccatggcagccaggacaggactctcaaatgaggacagcagagctcgtggggggctcccacggacccgccgtgggcccaggggaggcagagcctgagccaacagcagtggtgctgtggaccgtggatcctgagggtggcctggggcaagtaccggctgagggtccaggtgggctttgtgtacctttgggtcctggggccctggtgacttggactccaggttagagtcaagtgacaggagaaaggctggtggggccctgtgcttccgacttcatttcgagtgatggcagttcccaggaaggaatccacaacttctaaggttaagggggatcctcta

SEQ ID NO: 103576 - DNA, 432 bp, Homo Sapiens
attgcctcaggagtaaggcccaactcccgtagtcagcattactacactccagtacaatagtagtagcaggggtatttctacgtcatccgcttctaccccttaatagaaactaacaaactagggcaaactataacactatgcctaggagctatcaccaccttatttacagcactagtgtgcaatcacacacaaatgatatcaaaaaaatcgtagccttctcaacttcaagccaactaggcttgataataatgacaattcgaacacacaaaacaaataaaactacttcccacaataattgtattatcgacactaatcctacctataacaccagccctctcgtccctaaactaggaatttaggttaacacagaccaagagccttcaaagctctgagtaagtacaaagtacttaactcccggaagaagaaaatgat

SEQ ID NO: 103577 - DNA, 354 bp, Homo Sapiens
gcaccactcctctcgccgaacccatactggaagtagaagtgacacttagcaaaccggttccagaatctgagttttcttccagtcctctccaggctcccacccctttggcatctcacacagtggaaattcatgagcctaatggcatggtcccatctgaagatctggaaccagaggtggagtcaagcccagagcttgctcctcccccagcttgcccctccgaatcccctgtgcccattgctccaactgcccaacctgaggaactgctcaacggagccccctcgccaccagctgtggacttaagcccagtcagtgagccagaggagcaggccaaggaggtgacagcatcagtggcgc

SEQ ID NO: 103578 - DNA, 210 bp, Homo Sapiens
cttgaatttgcaactgaatggtaacataaggggaattaaaacctgtccatcagactgaatcaggttcaacatttgagcacatctaatattctaagatgtagattctgaaagcaggtaagctctttctcttcctgcagatactacttccacttaatgtaagaaaattcctagctttgccaggcacagtggctaacacctgtgataccagcg

SEQ ID NO: 103579 - DNA, 326 bp, Homo Sapiens
cttgaatttgcaactgaatggaggccatcaacctgggagatggtggtgctgatggatttgtggtagagtccagaaagtgaaggaaaacttaaaaggactggagtctggggtgtcattgatagaaatttagaggagttctaggtattgatagagccttagtctctaaatccctctgtcagactcttttggcagaaccatgtaaaggtgtacggtaagtcctcacataacgttgtttccttcagctttgtttcattataacattgatgagaaaaaaaattgattttgtttcccattcagttccaacccaagggggatcctcatagagc

SEQ ID NO: 103580 - DNA, 356 bp, Homo Sapiens
tgcgcgctctatgaggatccccctcgaatttgcaactgaatgggagaggggagcaatggaaggtgagccaggttctcaagactgggttatggcatgcaaggagcagcagactccaaaggagggaagccgtttaggaagactctgcccctatctggataaatgccagcaaacctaggaatcaagaggggattccagactaaagggggcaccccctccttgcagatccactaccaagtgctcaacctgtccaagaaaatgttacatagaagagactaaacaaggacgcatccaatctacacctgtacctagatctgatcaataccattcagttgcaaattcaaggggtaccgagctcg

SEQ ID NO: 103581 - DNA, 394 bp, Homo Sapiens
atatgtattttttatttccaatctttatagacccaagcttggtgaccctggagaagtccccatttcctgcagtgcccactcttccaaggccccagtcagctctgcaacatcaaggccaaaatgcaaaaacatgtcctcaacacatgggaacgtccacagacacatgccacttctctggaaaattccaactactcctaggatcccatccgaatgtaagcctgggtggtgatgaataattttgacataatttaaaatattgtatgtaatgtaccagatttttggctttaatcaactttggcagtagacagaatgaatctttatttccaagagacagcaatgagtcaaggtcattactaagcagtgggaaataaaaaatacatatcggggatcctct

SEQ ID NO: 103582 - DNA, 343 bp, Homo Sapiens
atgtccctaagaaatttcctatagttaactggggcacacaattatccaatatctgttttgtattaatagtgtgctggactatatatacaatacaaattatgccagcccttgcccaacagaattgccaacttaaaatttagcatgtacactgtgcttttgggtggccctccctccctccgtctgacctcatcttctagcgaccctaaaaactgaatcctcccccaattccactgggccaagccttaacttatattcttagaaagagggccccaaagctgatgccacccagccagttggatccagaactttcaccatgtgatgtggaaataaaaaatacatatcg

SEQ ID NO: 103583 - DNA, 223 bp, Homo Sapiens
tagaggatcccccttgaatttgcaactgaatggtttggacagcttccagagttcctgcaacttcttctttagtctttttatgagactttacttgttcttctccatacttctgaacttcctttattaattcttgtaattttctaacaagatccaagtgacaatttgctaatttctctgtagatgttttgaatacatcccattcagttgcaaattcaagggggat

SEQ ID NO: 103584 - DNA, 257 bp, Homo Sapiens
cttgaatttgcaactgaatggtgtcattagcaatgtacatggtgtcgacccaggtgttctgaagcattctgcagctgacgtgaatacggaggtctgtcctcctcttgatgatgccacctgagacagctgctgtgaggaagttggaatagtcgatggtgtcattgtctgcctgcttgaacgtgccgcagcctaagtagggaattgtgaatactcaccaggttcggcgttatctggggccgacactcgtagtatccatt

SEQ ID NO: 103585 - DNA, 386 bp, Homo Sapiens
tagaggatcccctgatttggattctgaagatgacatctcggaaatcagccagaagttgccaggtgaatacttccggtacaagggcgtccccttccctgtcggcctgtactcgctcgagagcatcagcttggcggagaacacccaagatgtgcgggacgacgacatctttatcatcacctaccccaagtcaggcacgacctggatgatcgagatcatctgcttaatcctgaaggaaggggatccatcctggatccgctccgtgcccatctgggagcgggcaccctggtgtgagaccattgtgggtgccttcagcctcccggaccagtacagccaccgcctcatgagctaccatcttcagaatccaaatcagggtaccgagctgcgaa

SEQ ID NO: 103586 - DNA, 431 bp, Homo Sapiens
cattcggctcggaccctgatttggattctgaagatgggagctcatgaggcggtggctgtactggtccgggaggctgaaggcacccacaatggtctcacaccagggtgcccgctcccagatgggcacggagcggatccaggatggatccccttccttcaggattaagcagatgatctcgatcatccaggtcgtgcctgacttggggtaggtgatgataaagatataaacaatttttcaagataaaataaaagggactgagaaggaggagaaaaagaggataggctagaaaaagatcaaaccaggagtaaggttagtgtcccaaggggaagtcaccatatcctgtactgtgctagaaagagggatccatagtttgctctgaggtttctattagccatcagaaagaggaaataaaaaatacatatcggggatcc

SEQ ID NO: 103587 - DNA, 271 bp, Homo Sapiens
tccgaccccttgaatttgcaactgaatggtggcttccactctccctgatcctgttcccgtgggagactcaactattgctattcccatcctgattcaaaaaaccagtttgctctagctgcccagacttccccacaggctgcattcttgcccatgagctcattgttttggcttctttgcctgtataagtctactgccagtgccagaggtctcagcccggggccccctaactagctggggctgcattccattcagttgcaaattcaagggggat

SEQ ID NO: 103588 - DNA, 357 bp, Homo Sapiens
aggatccaccttgggtgggaactgaatggcgggagtctgagtgtttcctggtggactacggaattgatgctacacaacagggaagtgaaggcagaaggttactcatgagaatgtcagggctggttagaagaatgaagggtgagggtggaaaagcagcctctatttaaaaggcttataagacaatcaatgtcctcagggaataatcaggtttcaaataaagtcaggagatggatggaccattcaaaacaaagttaaggatagagagatttgccagccaccttctggaagtgatagatggcgcagagtgggccaggatgtaatgaggcgaactagagtgggcgacccataaggatgggg

SEQ ID NO: 103589 - DNA, 250 bp, Homo Sapiens
cgaagctcggtaccccttgaatttgaactgaatggaatagctgggagaagcacacgaggtctgcaacatgaagggaaaggtttaaatgagcgtcaaagaaagaagcaggccaagggaaatccttggtaaacactgtcagtaagggatggaagaagagtcagggaaggcagatgcaggagaatcaagtgaaacctaggaaggagagaccatcaagaagaaagatatggctaacagtgcctatagataggcc

SEQ ID NO: 103590 - DNA, 440 bp, Homo Sapiens
tgctctatgaggatccccctcggattggcaactgaatggatggcaccgtgccagactcttctgccatccgcccttgcagctttttttctttgcggcctccatccgattcttctgctcctcctcccgtcgacttgacgttaattaacactcgggttaattgattttaaaagccgaagaattacagttaacttttcccacagggtacagacgccagccgattggcacactctgcttttcgcactggtgcaggggaacagggaaagcccgcagcaaagctagcaactgctgagggagcgttgcctgcttattggagtagagccgatagaagtcgacgtggcattgcctcatcctttacaatatatgcatccattatatattttggtaaataatcaaaacaccaccctgttttgcttcttctccgttcctttttcaaaacagga

SEQ ID NO: 103591 - DNA, 309 bp, Homo Sapiens
taatttgcaactgaatggataaacagagagagaagacacccagaggagaccgaatccatctgaaaggagtggaacgaggcacagatattcacatgaggaccctctctggcttcccaaaccatcgtcatactccaaggcttggctggaattccacatccttgacgatgtgaagccttcagacactccatactcacagggacagcttccaccccatccatcaatctaatcggagaattatttatcattacagcatcattttcatgatccaacatcacaattattctcataggaataaacataataattaca

SEQ ID NO: 103592 - DNA, 440 bp, Homo Sapiens
cggtcggcaactgcttcggatgcggtcggcaactgcttcggatgcggtcggcaactgcttcggatgcggtcggcaactgcttcggatgcggtcggcaactgcttcggatgcggtcggcaactgcttcggatgcggccggcaactgcttcggatgctgtctgcctctaccaccctaatcccaaaagacctgggctggacagagagcagctgtactgggagctaagccagctgacccacaacatcactgagctgggcccctacagcctggacagggacagtctctatgtcaatggtttcacccatcagaactctgtgcccaccaccagtactcctgggacctccacagtgtactgggcaaccactgggactccatcctccttccccggccacacagagcctggccctctcctgataccattcagttgcaaattaaaggggtc

SEQ ID NO: 103593 - DNA, 196 bp, Homo Sapiens
catctgcacctgcatccaggagacgcttggcagcatcagcccgtgagtagcgggctgcaaggtgcagggccatctcaccagtccggtctgtctgggcctggaggctggcaccctggtagaccaagtcatgtgatgatgttagcagaagagtcctctgcatcttcatcttcagaatccaaaacagggtacgagctgc

SEQ ID NO: 103594 - DNA, 381 bp, Homo Sapiens
actcgcagctcgtaccctgatttggattctgaagatgaagatggaaaattgggatttaaagtaaattaccactacatgtctcaggtgaaaaatgctaatgatgcgaacagtgctgccagagctcgccgccttgcccaggaagctgtgacactttcaacctcactgcctctgtcttcatcctctagtgtgtttgtacgctgcgatgaggagcgacttgatatcatgaaggttctaataactggtccagcggacaccccttatgcaaatggctgctttgagcttgatgcgtattttcctcaagattatcccagttcaccccctcttgagaatctagagacaactggtgcccatagcgtgcgattcaatccaaacctttataat

SEQ ID NO: 103595 - DNA, 346 bp, Homo Sapiens
ctagaggatcccctgatttggattctgaagatgaaaaaattggaaagccactagtgcagtgaaaaaagcactgaactgggagttagaagatctgtgatactagtttatcgctccttgaccctgggcaaatcacttcctttatgtgagttccacagcttcctctgctttaaatgacagccaactcaattctaatattctgagattcaatctcagaatattgagttcaatctctgaagaagaaatttcaggattactagaaaaggaagcaatttataactctcaaattctaaatacataaaaacacatattctctcagataaatcttcagaatccaaaacagggtacg

SEQ ID NO: 103596 - DNA, 435 bp, Homo Sapiens
tagcaagctcgtacccgatatgtattttttatttcctttacaaaagatcattgaattaaggcactttctttggctctactagattgttatttaaatataattcaaacagccatcgaggataactgttaataaatctaggttttctctgaagtctcccagtgtatattactgtactgatgactgacaaggaagaggttttgacaaggtccaattctgtatatttctcttaaaatatcctaggcagttcccaggataggagtatctgactcatgcctcatgctaccaggaacctttgcagcctcatcccagaaatgcagaaacacacttgttttgtctgtagaaataaagttttgatggttagatttccaggcaaaccttcaaaatcatgttaaactataatatagggaaataaaaaatacatatcgggtaccgagc

SEQ ID NO: 103597 - DNA, 342 bp, Homo Sapiens
tccaagacctcagcagtaaaagattaaatgacaccatgacagtgagactgtccacctcctcgaactcgcagagggcaacgcattaccacctgagctcccaggtccaagaaatggctgggaagatagacttgctcagagacagccacatcttccagctcttctggcgggaagccgcagagccgctgagtgagcctaaggaggaccaggaagccgcagagttgctgagtgagcccgaagaagaatcagaaaggcacatccttgagcttcaagaggtgtatgactatttgtatcagatgtttctcgttaccgcacatcttcagaatccaaatcagggtacgagct

SEQ ID NO: 103598 - DNA, 263 bp, Homo Sapiens
tggtacagtcccctaacggatacttagcatgtgatcgaagttgtttttgttttgtggtcctctttccttctgtctgaggtcttacacccggtaatagaatcagcgttgggacgagcaagtcctatgaccgctgttcactgatggcatcctgtcatcctccttccacgtctatgctctggcagtccgtaagcttggatgggaacaaaatagacgctgagttctgactgaaatttggcattttcttccattgtgatatatgaact

SEQ ID NO: 103599 - DNA, 363 bp, Homo Sapiens
ccatcaaagacaagtaatagaaacagaatgatcatctctagtagctgatacaacaggataataccatcatgcatgtgtcctgatgcctcttatacacaaaatcctagaaggtgcctccttatgatatatgcagggctcacactagggttcattctcctggaatcctgtaccaacatgctcatagagatccatagttcagtattataaatgccaatactatcatcacacagacaactcttcgctatggactaaggactttaagcctctggttctctgacacaacttcatccagctgccgcttcagtgttccattttctttcttcagttgctcgttttctgagagggcagccttcagataaaatg

SEQ ID NO: 103600 - DNA, 192 bp, Homo Sapiens
ttggttcattacttgggcgtgggcgcggacgcgagcagtgatgtaccagagcgcgtcttccacctgtcagcctttcgcacacccgcgccgcctgctgctggcattgcgtggggaagctggcctggaccagaatgtgcccagctcgaatttccctggtagccgaggctcgtctccagtcagctctagtataag

SEQ ID NO: 103601 - DNA, 869 bp, Homo Sapiens
  misc_feature (74)..(206): n is a, c, g, or t
cggagggtcttgtaacaccagctggggctggccttcttttaggagcttcagtggttctgaaaacttttatttgnnnnnnnnnnnnnnnnnnnnnnnnnnnnnnnnnnnnnnnnnnnnnnnnnnnnnnnnnnnnnnnnnnnnnnnnnnnnnnnnnnnnnnnnnnnnnnnnnnnnnnnnnnnnnnnnnnnnnnnnnnnnnnnnnnnnnttgaaaactttttcaggttcttccagggttactgggctattaaatatttctatttcattataagtcagtttttcaaagttatattatcttaattaccttttttatatgtattagtgtagagtagcattttatattttgatatcctccttatgcatagtttttcactttttattcctagtttttcgtttttaataagactttcaagaaatttattttattggccttttgaaaaaaagcagctttagataaagtaagcagttctgctttcattttataatttatttctacttttgtttcattaatcttttcctccggcatgccttggattttgttgtgttactctttttctagaggctcgcattgtgtgtctggttcacttatgatcacgcttgcctacttttaagaatggaagaggggaggtggagggtggctgcacagtcgagggtgtgaggcagtcttgctctagccccaccatgccctcagcccgctgtggccacgctggttcctcaattgctggggcgtgcagtgtctgtaagggaggctactgatgccatccgaggaagatgtaaggtttcgtgtgggcagcgagagcctagcaggcatgtggggtgcccagcaaagggtaacagtggacagttgttgcctcattccacagagttttga

SEQ ID NO: 103602 - DNA, 194 bp, Homo Sapiens
aaccatccatgcccagctcatagagggcactcaggaaatagcagctgatatttggtgagtgccctctatgagctgggcatggatggttggatggtactgcccagtaagggtggaccctggagaggcaggagcaaagctgctgacctctggctgctgtctctctccagacatccattcaacaaacatcatctttg

SEQ ID NO: 103603 - DNA, 297 bp, Homo Sapiens
ccggcaaacgctaatgaatcgcacacacagcttcctccaggtgtgaggacagcggctgctaccccagggtctcgcggagcacatgctgatttgctgccaccatgaggatgggggcagggcacctatgggtggagggaacaccacttcctacaggaagtaactgtctccctgggaggtgatgccactccagttaaacccagagtgaaggtcatttcctacaaggaaggctgaaggatggccgtcagtagtagagggagagctccttccagaagataaagagggtcccgctgaagatga

SEQ ID NO: 103604 - DNA, 247 bp, Homo Sapiens
ctggaccccagcggcagacgatgggagttcccgtcgtggcgcagtggttaacaaatccgactaggaaccatgaggttgcgggtttggtccctgcccttgctcagtgggtctagatcatacacagggccatttcatgagtgatacactccactgtcctcaataaaattggttccagtgacccaggggaaggtgtgttctgggccaaaggtgagacgatcgcatcgtctgccgctgggggatcctctag

SEQ ID NO: 103605 - DNA, 637 bp, Homo Sapiens
gggatcatttgctactccggtcatccgtgatgggcacttaggttgattccatgactttgctgttgtgactagtgctgcgataaatacacaaggctgcaccagaatctggaggtaaacagcggtaggacgtactcctcaccgtatcaagaatatgaaagagaccaggaggcctgaactatacagaagtgcacttcttttccacatagaaggtcagcagactagggcagaattagtgactgcttggcatccaggacagccttctgtggttcactcgtgtgtgcttgggtgtgacctccgtgacctgaccgtcgatggctgtcatggatgagtcacagcgtggaggagagggaaccgcaggaccgccggagaagctcagtccccagcagggcagctttctcttagaggtttcctggagttcaacacaacactggtgcttacatctcaggcccggatattgatcatgtcatcatgcctggcttccagcagcttggaaatgtctttaagctggacctgttgctggccctaaatatactcggaagagagggagagtgggcggcggggtggaaactgatctgtggcctgtgcgctgggagtcggtccagtaggaccatccggaagaagaaaatgatccggggat

SEQ ID NO: 103606 - DNA, 305 bp, Homo Sapiens
cctgctcgtgcggagagatgtatgggggcaccatgctctcctctgatagatgctgagagcatccagaaacttccagaccagcccctcacaccacagccaagatgaagcctttccagcctggagagaaacttccagaccagccctctcactacagacaggagaggcctttcccgcctggaaacttccggacaagcccctcacacaccacagccaggagaggcctttcccacctggacagaaacttccagaccagcccctctcaccacagccaggagaggcctttcccaccggaagaagaaaatgat

SEQ ID NO: 103607 - DNA, 363 bp, Homo Sapiens
tagcggtccggaatattttcttcttccggacagtagacaccctgcccgtgcagagagatgtcatgggggcacctgctctccctgatagatgctgagagcatccagaaacttccagaccagccctctcaccacacccagaagaggcctttcccatctggagagaagcttccagaccagcccttcacacaccacagccaggaggggcctttcccacctggagagaaacttccagaccagcccctcataccacagccaagaggggcctttctcacctggagagaaatttccagaccatcccctctcaccacagccaggagaggcctttcccaccggaagaagaaaatgattccggacgagctatag

SEQ ID NO: 103608 - DNA, 377 bp, Homo Sapiens
atgcggatcaaactgcagtattgctcccatggggcatgctgctcttggtatctctgcttcattctcatggttttccatgctcttttagcttggcttcctagaagatagatttcccatatgcctgtgtaatttgctggtcagattagcaataggagatcacacttctgtgataggttcctatgattctagaggattctccatcttatttgcacgctgctctgccagacttagggctattccctgacatttaaagtttctgaagcttcagctttctcccacccaaagtacacacagcacagggaggaatacatccccttaagtaaagcatctaaagtaatcaaagtagatgtattcttgaataatggtttttgtgtgtg

SEQ ID NO: 103609 - DNA, 177 bp, Homo Sapiens
ttctccggcatataacatttatcaacttatgaggtcacattaccatgataccaaaagcagatatcaacaagaaaactataaaccagtatctcaaacagatatatgtaaaaattgcaacaaaacatttacaaatagatgctggcagtttataaaaagctgaaggatgcccatgtaagc

SEQ ID NO: 103610 - DNA, 304 bp, Homo Sapiens
gtttgcttcttccgggaagccttcctcccccactagataagtcccctgcacaccctcctccattccctccattgtaggagctttggtcccaattatgtgaaatagtcccttgctggagataccctgcaagtctcatccccagcactgctctttgcacctaataagtgttcgtgactagttgccccttgctggcttagctgacccttgtgaactattccagccgtggagtcagatctgaattgtgcccatttggaagaggacctttctgagcctctctgacctgtttccggaagaagaaaatgat

SEQ ID NO: 103611 - DNA, 302 bp, Homo Sapiens
gcggtcggatcatttcttcttccgggagccttcctcccccactagagagtccctgcacacctcctccattgtaggagctttggtcccaatttatgtgaaacagtcccttgctggagataccctgcaagtctcatccccagcactgctctttgcacctaataagtgttcgtgactagttgccccttgctggcttagctgacccttgtgaactattccagccgtggagtcagatctgaattgtgcccatttggaagaggacctttctgagcctctctgacctgtttccggaagaagaaaatgat

SEQ ID NO: 103612 - DNA, 645 bp, Homo Sapiens
cataagatagtattacatgatacatattagtgtagtcgcggacttccactatgtcttagtctataggagcaggtaagccatgtgatagggggcttcgttcactgattccccctatactccgggtacacactcaaccaagcatgagcaaaaattcactttgtaattatattcgtaggagtaaatacaacattctttccacaacactttctaggactatccggaatacctcgacgatactccgattatcctgacgcatacacagcatgaaatactatttcctcaataggctcattcatctcactaacagcagtgatattaataatcttcattatctgagaagcatttgcatcaaaacgagaagtatctgcagtagaactgacaagcacaaacctagaatgactacacggatgtcctcctccctatcacacatttgaagaaccaacatatatcaacctaaaataagcataagaaaggaaggaatcgaaccctctcccactggtttcaagccaacgtcataaccactatgtctttctcgataatcgaagtattagtaaaatattacataactttgtcgaagttatattataggtgaaagccctatatgactctatggcttaccctttccacttaggctccaagacgcca

SEQ ID NO: 103613 - DNA, 604 bp, Homo Sapiens
gaggaagagggcttgacccacgccagacctcagaccggctctatcttcctggacctgaagcagggccactacctgcccttaaatgaggcagtctacactcgcatctgctcgggcgccttcgccctctgaagctgttcctctactggccacaaactctgggcctggtgggagaggccagcttgagccagacagcgctgcccaggggtggccgcctagtacacacccacctggccgagctgtacctggcacggcccatcctggactgagaaactggaacctcagaggaacccgtgcctctctgctgccttggtgcccctgtgtctgcctcctctccctgcttttcagcccttatgacatcgtggcggtgtacacccagccggatcgcccggccggtcgcgggcaaaaactgatgccaagcccggtcaagcagttggcgcttgaacacaacatccctgtgctgcaaccgccaaccctgcgcaacgccgatgcccaggcggaactggcggcgttgaagcccgacttgctggtggtagtggcttacggtttgatcctgcctcaagcggtgctggatatcctgttcggatatactccgggatcctctaag

SEQ ID NO: 103614 - DNA, 161 bp, Homo Sapiens
agtataaaccgaacaggggacaaatccaatgtctccgatgcgcttgtataggattgcttgtagtgcagctgtgttggcgtctgttctgtccgtgtcatcatccgattagcaggaatgatatgattctacgccttctcatccgataaagagttggaagagtg

SEQ ID NO: 103615 - DNA, 733 bp, Homo Sapiens
tcaactacatactgcattcacggcagcacacaatatatcaagtaaaactgggttatagcaattccccctatgtatcagcaaccgtattcacaggatgcgcgaacataaaaccaaaacatcactagcccactttctaccacaaggaacacccgccctattaattcctatgctcgtaattattgaaactattagcctatttattcaaccagtagccctagccgtacgactgacagccaacattacaggagggcacctattaattcatctaattggaggggccacattagcactactcaacatcaacactataacagcttctatcacatttactatcctcagtctattaactattcttgaatttgcagtagctctgatccaagcttatgtgtttacactgctagtaagcttatacctacacgacaatacataatgacccaccaaacacatgcataccacatagtaaatgcaagcccatgaccacttaccggagccctatcagcccctttaataacatcaggcctaactatatgattccactttaactctatactcttactatctctaggactattaaccaatactttgacaatataccaatggtgacgagacattattcgagagagcactttccaaggccaccacacatcagttgtccaaaaaggcttacgatacggtataattttatttattatttccgaggttctgttcttcactggcacgacatatacctagg

SEQ ID NO: 103616 - DNA, 199 bp, Homo Sapiens
ctgacctattacacaaacctgcaggtgaagacaggccagcggaccctcatcaaccccaagccctgtggccagttttgctgctgtgaagtgctgggctgtgagtcggaagacgccatctcttactacacacggatgaaggacaggctgctggagaggatcacataggaagtcccccgcgtcaaaggtaaggggtcgagct

SEQ ID NO: 103617 - DNA, 625 bp, Homo Sapiens
tatatgtcgtgccagccaccgcggtcatacgattaacccaaattaatagatccacggcgtagagagtgtttaagaaaaaaaaccacaatagagttaaattataactaagctgtaaaaagccctagttaaaataaaataacccacgaaagtgactctaataatcctgacacacgatagctaggacccaaactgggattagataccccactatgcctagccctaaacccaaatagttacataacaaaactattcgccagagtactactcgcaactgcctaaaactcaaaggacttggcggtgcttcacatccacctagaggagcctgttctataatcgataaaccccgatagaccttaccaacccttgccaattcagcctatataccgccatcttcagcaaaccctaaaaaggaacaatagtaagcacaatcataacacataaaaacgttaggtcaaggtgtagcttatgggttggaaagaaatgggctacattttctacataagaatacccaccatacgaaagtttttatgaaactaaaaaccaaaggaggatttagcagtaaatcaagaatagagtgcttgattgaataaggccatgaagcacgacatatactagggggtgcgag

SEQ ID NO: 103618 - DNA, 483 bp, Homo Sapiens
gtatatgtcgtgctgcagatggggaaggcagagtccagtcagagaacacagagagagaagacgtccagggtcaaggtctgggaaaaaatcaacagtgagaggctgaatagaaaagattgcataataggcaggctaagaagcagcagtagggcagcatgggtcagagacggctggaagagtctcgctcatgaagcagtcagttggttgatatcaccgagaagtcaagaagaggagaaccaaaaagtatcctttggatttggcaatatagtgtcctgcttaatctgtggggttacattcccagcctcccagtggatgcgtgaaaccatggatagtactgaaccctacatatactatgatttttagatctgataaccacgacactagtgggtgggtagcataggggcgtggatacactggaccaagggatgattcctatcccaggtgggacgaagcaggatggcacgacatatggctatggttgtt

SEQ ID NO: 103619 - DNA, 382 bp, Homo Sapiens
ccctaggatatgtcgtgccactttggtggctcccacattaactgtgacttcacaaccaagaatgagtccgaaaacactccgactctgcctttgcagtcaggatcatgagtgacagttgccataatgcagaagcacttacttggatttgaaagcttaaaccatgattgctttcagtactgctccggtacctctggctgcacgtggcaggtgcgtgtgggcacttgtgggacacagggatgggctggcacactgaccttgaagcttcagctggcagccttggcaagaaagatgtctctgcctttcagcttcccatagtaccaggcagtaagaattacaggactcaagctctgctagaaactcttaccatccctaaaaaagattt

SEQ ID NO: 103620 - DNA, 481 bp, Homo Sapiens
aacccccctagccatatgtcgtgctccacccaaccttcaatcagggaacacaaacaacagcgaagtttgccaaaagaattcgagtagcagtgagatgttctggccagggtacaggagggatgagtgaggcagaaactatcaaagaaaactcatttccccacacccaagaaggagctggatgacccaggtacagatataattttgagatgggaaaattaagggattttaaagaaacagttccagcctcaacaagaagctagagaatgtggtgctcagtgaggggttatcctacttggaggcccagctggtctcccaggttcagccaaacacggaaatctcagatcctcggatgtcatgtggggtggggcagggaagtctcacatgtcttcagccctgcacaaggccaggagggttgactggcaatcccctttcactgcatcctgcagacaaaggaattcagtgttagaaagatccaccacca

SEQ ID NO: 103621 - DNA, 392 bp, Homo Sapiens
gagcgactctagatgatccacctaggcatatgtcgtgcagcagcagtatgtcacaatatgacataccttggagagaagttagcagatgaggaagttgacaaaaatgatgagagatgcaaaatactgatagcgatagtcaagtaaaccatgaagaatttccataactgacatcagcaaagtgggaatattgtacagtgtgtgttgaagttcctgtacaacagtgtttatttgccttctgtttgtttgtaaggaatgtatttactaaaagttcttcttgctgtcaaaagaatatgtgtaagtcattagaatttattcttctgattttcttttttagagatagagtcttgccctgtcacccaggctggagtgcaatggcacgacatatacctaga

SEQ ID NO: 103622 - DNA, 467 bp, Homo Sapiens
  misc_feature (82)..(82): n is a, c, g, or t
atatgtcgtgcaaagccatcaggctggactagaagagatagttctgggccccacgctggacttgttgaagctcaggtgttcncgagacagccaaccagagagagctcatctgttcccgtcactattgctgtgcaacagattacccccaagacttcatgacttagaaggatcttctcattaggctcgcagattctacggatcttcttattaggctcgcagattctacgggtaacgttgccacaccaaagttaaaaatataataataaactacggatgaattttaagaccttccttaaacaatttcaaatttttaaagaaaattccctactagacggataatagtttatggcctcatcatagcagcaacctggtggaatcacctggtttcaatagagccgctctccactagtcagcaagcccacatgacatcaagagttgccgtaagtggagggcttagaggaccccac

SEQ ID NO: 103623 - DNA, 487 bp, Homo Sapiens
gactctagttgatccccgctagcgatatgacgggctgagtcaacttaatatggtaatctctccttccaaccttcattctagagcgattgaacgctttacagcaactgaatgattttacgtagatcttttcatctctaacctaactcagaaaataactctagccactgaaaagccaatcagcaaggggcttctaaccatgaagttccttttgcacatatgagactgcatgccaccctctgtacccggactgcctcctgctgaaagcacatatcttacttcacagatgactaaagttctgagccaatcaaaggatttaaaactaaactaactaaaatagttacaaggattaactaattttgttttctgtaaaaaatcagaagattgaagagatcaattgcttttatgttatgctctaaaccgaggaacaaagggcctgctctgattccctggcacgacatatacctaggggggatcaactagagtcggc

SEQ ID NO: 103624 - DNA, 545 bp, Homo Sapiens
actctagttgatccaccctagcatatgtcgtgagctgtggagggatacacgtgagaccccaaatcccaggtcctaacgcacacttcttcctccttctttccctggatctgtggagggagctgctgggaaccgaagagaggatggaaggaagaggtggaaggttgcttggaaggacctgtgtttggatctcccttgcttggtcgctgttgtgtggtgctgagcagatgtcccatgggacagggagggtggtgtacagcctggctcagcccaggagcctccttaagcctcacctgaatggcatctagtagctggtagggtcaggcagtggagccccccccatgctgcagacagaaacaagaaaccttacagcggtcctgctgctcctctcaggcaggcatggtgggttgatgacttgtcgctctctgtggaaccttctctttatcatgccgacctttgcattcctgcgagcttctgaagtctctggatgtaggaggaggcagtggcatatcatggactcagcacgacatatcctagggggtacgtct

SEQ ID NO: 103625 - DNA, 386 bp, Homo Sapiens
ccaggctcgagtgccgagccgagagccacccggagacgagcatcgaacacatgcgccaggtggtgcagtgcagccacgaagagggcctggtgggccggaaccaggaccagcagggacccgtcaagatgtgcctcaactacgaggtgcgtgtgctatgctgcgagacccccaaagcctgccccgtgacctacacacctgtgacagctcctagcacccctagtgggagagccaccagcccaactcagagcacctcctcttggcaggaatccaggacaaccacctttggtgacaagcagcataaccgacactacacagaccagcacaacctcatgccccgtacaagtagcacaacccagcttcaatacccagcacatccgactggcccg

SEQ ID NO: 103626 - DNA, 254 bp, Homo Sapiens
caggcaggagctcctggagctgtagcctcctcacccaaggcttccagctccttcctgtgtggggtctcagacacgcgacccacccggacgtccgtgacagtgtagcttcttcatctccggcatgacccgaatttcctcggggccccccactccctggggaacaggaagaaaatacccatttcaccctcactgatatacacagcacacaggcacctacgtacacacttgcacgacatatacctaggggggatcct

SEQ ID NO: 103627 - DNA, 377 bp, Homo Sapiens
gcgctgacatgatcgaatcgagctcggtaccgaacgggggaggcggtgtgagatgcacacactgagaactgtctgagcgataggcacgcggctgcggcatgagcttcggcacgattcttcattataagattgatgcctcgggtagcataagggagaagagatctgcctttggttctaactgtcagtcatcctcacgcccaggccggagttagaggtggcgtcccttttctctggctcaggcacccctggactagtggggatactggtggcgttcccctatctcaggccacacctggcctagctggtgttagtggtgacatccccttgtctctggcccacagaacccctccggtccacacacacactcaggtccaggt

SEQ ID NO: 103628 - DNA, 380 bp, Homo Sapiens
cgactctagttgatcccccgtgctaagtggaaattagggaaagggtcagagaaatagggatttccttttgccttcagtagtatcctcatgaacctgcgtcatggtgttgttaggtgtaattaatgaaggcttctcacaagataaaatgttattttgaggaccacgtccgtggattggaggaaaggcagatggctagctagtgacgactttattataatgctaattcaggagtatctgggtctctagtgctgaggaaaactgaattttcatgcaaagggcatctatattttcacatctgtatctttatccatctagctgtgctcttactattttgtttctacggtaatttgctatttcttttgcacgacatatcctagggc

SEQ ID NO: 103629 - DNA, 379 bp, Homo Sapiens
cagaaggagagtcagaacttgtatcaggctttaacgtagaatatgcagccggacctttcgccatattcttcatagcagaatatgccaacatcatcataataaatgcattcacagcaattctcttcctaggagcatccctcgagccacacacgccagagctatatacaatcaacttcgtactaaaaacactcgcattaacaatcaccttcctatgaatccgagcatcatacccacgattccgatacgaccaactaatacatttactatgaaaaagcttcctgcccctaacactagctctatgtatatgacacatctcactccctattataacagcaagcattcctccgcacgacatagacctagtggatcaactagagtc

SEQ ID NO: 103630 - DNA, 439 bp, Homo Sapiens
tataacataacttgcctcctcaaataaagcattaatcatctcctctgggaagcacccctcaccatcaacctccttcttcagacgggggggaatctgttctctggccccataaaactctgcgcgcatctctattttcattacctgttacttcactgatcccccaatgaaatgggacctagtttagtgcaaagactctatcttacttctgcaggttaaagactgagcacaatacctggtccataacaggcattcaacaaatgttacatgaatcaatcaatcaatctagttcaactcatggtaccaacggagaaacctctcttcgagttctcaagatcatgtggaggatcagtgatggagctagagaacccaagtctcctcactttcagctcagcacactttccaccagaacaaatcagcttttaatgagcaaagggattgt

SEQ ID NO: 103631 - DNA, 424 bp, Homo Sapiens
gactctagaggatacacgtataacataacttggttccagtgagaggtagagaatgcgcctgaaaagaggaaacctggaatcttttggtttctgggaagagagttcttagaagaggggaaatagggtaagcaagaaactgattgtgagagctcttgcagggactgtctcaatgaggtctactgggaataggaacttcaaagggcatcacccctcacgcagtcacaatttaagcttttgactggattctgtcaggatcaagaaagaggttttacttgagatgggatgggtattggtcattcctgggcaaggatcataaagaacaacctgtttgactaatgtgaacttttcatgatttaatgccatgcatgttacagtttgttcgcttagttgtttgttttttggtgaggaaccaagttatgttata

SEQ ID NO: 103632 - DNA, 360 bp, Homo Sapiens
ctctagattatccccggtataacataacttggttccatgactgccaagagcaaaccctacagacactgttgttgtccaacagccagtagaggcagaggcaggcttcttcactgtggcctggacctagctccttctctgggaacttgcagcccttgcaaaacaaacagcctcaaagtcccgtgacccaagtaactccttaaccaaaaccatcaaaacctggaccattgtgtgctagttgcagcttaagacattacacttacaacaggaactcctgaagcatctttaatcctggtctttgaatattcacaacagaaattttctctgccattctctcagggagaggagattcaaaataacact

SEQ ID NO: 103633 - DNA, 676 bp, Homo Sapiens
tatcagctcggtccttccacagcaagacttcccaccatcgatgcgctcatacttgtagccttcatagtctaagaagtcctcaagcaagtctaacattttggtcatctgcgagaagatgagcactcggtgtccttgctccttcagctttcgcagcatcttctggagcagcatgagcttcccagacgacttaataagtgccccaccctcataagccccactggggagtttgggggactccatagcagccacgggaaaaaggtatggatggttgcagcacttcttaagatccatcatgatattaagcagcgacacctggttcccaccacctcgtgaattcaaggcctcaaaatttcgagtcaggatgtatttgtagtatttcttctgcatggggcttagctccacccgaacgatgagctctgtcttggctggcatgttcttaaagacatctgccttgagtctccgcagcatgtgtggccccagcaaatcatgcagcttcttgatctggccctctttggatacgtcagcaaactcctccaggaagccctccaagttgttaaatctctctggggtgaggaagttcaggagatggaagagctcctccagattattctgcaatggggttcctgtcagcagcaacttatgatctatcttgtaaccattgagaaccctgaaaaac

SEQ ID NO: 103634 - DNA, 404 bp, Homo Sapiens
agccgctccagggaccccggataacataacttggttccatttatttctagtagaaagtttgcttgttcaaattaaggtaactgtcaactctagccacacctgtgtcctcaccgcccactgtcctgaacaaggcagcccccacacctgactatgcctaccatgctcccctctttagtcctgggaaggctattcagttttctggaggtttatgttcaaatcttgtttcctgcttggcaacatccccagaccaatgagactgagctctaagtggtctctgattcactggcacctggcatctgaaccactcacctgcacctgtcctgctaccagctatgcttccacaagtaagcaccttgctctccagctcacagggtctttaggggtaggaaccaagttatgttata

SEQ ID NO: 103635 - DNA, 392 bp, Homo Sapiens
cagctcggtaccccgatatctgtggttctggcaagctaaaaatgaatgctagtgacaaattacatattcggagaaaggctgtactagtgtcacataatttaacaagtctcagagtgtctcacacttcaaaatgatctttcactttcaggaaatgccgctggtatgaaaattctgccattatgaaattacgtgaagaatgagcccttttagagctctgggtatgtgaagttccagatcattgacatatatccacccacccaatcctctcagtaatggtgggagatagatatcagcatttcatgttacagatgacaaatctaaggcttgaagcagttaataattttcttagagtcttgtgggcatctgtcaggcagccagaaccacaaatatcg

SEQ ID NO: 103636 - DNA, 358 bp, Homo Sapiens
ttaatgatccaaagacgacacactctcctcatatgcacgcccttcctaagctgtcaagtataaagggaggaaattttctggagggatttatattttcagggtgttcaggaccctaactgctaccctcaattctgctactaccgaggggttgtcctgataatcactgaacaggactgtgggagaacctacctcaccccttcccctttccagaatcctcaaggaaacagtaaaggatcgaagtctagatgtgaaggaagtctatctttctaacaacaggcagagacagcagccttcaggcagaagagcagcttgtgcaaaggactaagctaaaagctcagcgtgggagtactcatggtgg

SEQ ID NO: 103637 - DNA, 516 bp, Homo Sapiens
tatttgtggtctggtgaggtgcagcgagctgtctgggactgaccatctgatgaaggtctcttttctggaacgtgtactctagcgggtggttggtgaccctgatgctgatgacaggttgcaatatgttgtctggagtgatcacgtgacctgttaagagccagtgaggggccgaaaactggagatgcaggtgtgctgcaagacactgcagagagggcatttacctgccccatcatccagcacaggaacagcgactgacagcgctcacccacgccaccatcaccagtcacactgggcagcacgcagcaggcagcaaagcaggagagcctgggcgagcgcacgaagggtgaggctcccaccccggggtctcctccgcccctgtgcctggtcgcagtatgaggtattacccacagaaaacgggggccagaacctgacctctagcctgccccaacctgggcacagcttctcaccacaggaaaactccaccacgcgctcagcttccacatccgtactggcgcg

SEQ ID NO: 103638 - DNA, 348 bp, Homo Sapiens
agaggatcctccgatatatgtggttctggcctggcatcttccaggtaatgagcagactaatgtctgtggtagaaaatcctattatatccaacagtgatgtagaatcaatttgattctgcctacctcccaatcttcctggcacttacttggaccttcctgagttgatttccaggatcgcccggccaggggtgtccatgcgctgaatcaccagatgatctaataccatcttctttgtggcccgttctatgatctcctcctccacagtcccctttgtaactaagcggtaaatatttaccctgtaggaaaaggaactgttatgcttaggccagaaccacaaatatcggggtg

SEQ ID NO: 103639 - DNA, 731 bp, Homo Sapiens
ctggctcctgccagttcccttgggaggacggggtggtcagtatgatggaagtgcaggggtggatacaggagttgtggagccacttgggagtatagctattgagcctggggcagcgctcaatcctttgggaactaaaccggagccagaggaaggggagaatgagtgtcgcctgctaaagaaagtcaagttgaaaagatggagtcccctgtttccacaccagcagtgctgccaatacaccttttggtgccagtggtcaacaatgacatctcatctccttgtgagcagatcatggttcgtacccgatcagttggggtcaacacatgtgatgtggctctggccacagagcctgagtgcttgggcccctgtgaacctggaactagcgtcaaccttgaaggcatcgtgtggcaggaaacagaagatgggatgttggtggtaaatgtaacgtggaggaacaagacatatgtaggtacactccttgactgcacacgacatgattgggcacccccaaggtcctgtgactccccgaccagtgacctggaaatgcgcaatggccggggtagaggcaaacgcatgcgtcccaacagtaatacacctgtcaatgagacagccacagcctctgacagcaaagggaccagtaacagcagcaaaacccgggcaggagccaatagcaaaggccgtcgcggcagaccagaattcttcagagcaccgcccacgctgccagctgctcagcg

SEQ ID NO: 103640 - DNA, 448 bp, Homo Sapiens
cccccgtggtaattgatgtgatctggctctcctagaagggaaagaacctgagaatcttctgagaaatccagcacctaccaccttgggttcagtaaacatggaccccacccatgtcataagcttggttttctgggttccctgttggttttcttgagtttggccagttgttatattccctcctcgggcctcaatttctttttggcactatgaggagctgggtctatgactgtcttgaaaggttcattcaactgtgaagcttggatggactttgtcttaaaaattctgaggaagtacagggcagtgacagcgctgctggggaaagggcagaagcaacacagagcccaaatcaagaaaacctatggccagaaccccaacttccaggttggaccctttgaccaggtccaccccccaatatcctaaatacttggggtaactgaccccacagcta

SEQ ID NO: 103641 - DNA, 639 bp, Homo Sapiens
gactatagcatacctagaccttctggcataccagaaggtccaggtactccggcatacctggacctatctggttacgttgttgcgctataggtgtcatatactttttcttgtaacttctctaattcagtgaagagataaatcacacttcataattaatggagtctgctggtttggaccaagccagagatgatctgtaataaggttactattgatctccatctcctttgtggcttcttttatcactctcctgcctcagttcattaaaagcttcttttaattagagttgtcgacactaccaacttttataactgtagaaaaaagaccagatggaatattgtgctttgggataagaataagctaaaaatgaatgaaagaaggaagggagggtggaagggagttttgggaaaggtagatgcatcctacagagtgatgatttgaaacccaaaggctgttgtttaatctgatgactggagaggtccagccaatgtttccaaaatcagtttctctgaaatcatcaaaaccattgatgagccattttgtaatggttcaagttaccaagccagtggaagtgaaaataaatgtttaaacgatacagtgtgctggacaacacatgtattatcagatgagaagctccagaaa

SEQ ID NO: 103642 - DNA, 410 bp, Homo Sapiens
taggacttcttagcgaacatgtcttcaatatcactttttagagttttacttgtctctgaagtaccaaacttaaaagaggcaggtgttggaatagaagtagacaggtagactctgtaatctcggattctgacaagcagcacattatgtagagctcccctcattaagtaccaaacatgcacagcaatcccactgtccttcctttgtagaaaaaacagatctgaaatcactgtaaataggtttaggaagatctccctggccaaattaaaatgaagcttgatgaacaaatgaagatccactttagttagcagattaagtattctgacacgcaatgcacctagatacagtaggttcatttcttactaaacaaatactaaaatcccagtgaccttctttcagaaggtccaggtatg

SEQ ID NO: 103643 - DNA, 380 bp, Homo Sapiens
tggacttctggcatacctggacttctggcatcctggaccttctggcatacctggaccttctgtggcggggacaggggatgaaggcagaggacaccctagaaatggatcagagaacagcacacaggaaggggtagcagggagctgggagggcaaaaggactcagcgggccctgagatgggcagggaggaggtgagagggaatctggtgtccttagatcactggtcattagtaggggtgggatgagagagaagaaaggaccaatgaagtagaagaaaaaccaggaaagggtagcttccaggaagatagaaaggaaatgatcagctatgtagagttaattggtggtactaacaagatcagtgtcagtgaggttttatgggcaa

SEQ ID NO: 103644 - DNA, 386 bp, Homo Sapiens
tgcacccctccctatcctcagaactcaatttccctccatcatgcggaggtgaccctctcaggtcacccacctagggcactgttcccagtccctcaaatccaacttccacctctccccctggggagcacacagagcccgcctcggtttggcataccctctttgatgaaacaatcctgtttcacacctctctgcctttgctcctgcagtgccccccaccatttacctttgtccttttacgaaagtggtttaatccctctgggctttacatttctagcctgcaaggtgggcagagttaaggaatacacgagattttagcaaatcattattgagcccttataaagtccaaaaattccattatgtcatttaactcacaccacaatcctatg

SEQ ID NO: 103645 - DNA, 250 bp, Homo Sapiens
catacctggaccttctggtaactatttctccccttgtattcagtccctaagcttcgctgactcaatctataacaatttgagactggctaatttttaaaacaggaatccatattttttgtgttcacaaggaatactttgctacaggactaaactgttctcaacacatttcgtttacaatgagagaactatacagtggtcttgagaggacttctatctctttctgtgaaaagagatagaaggtccaggtatg

SEQ ID NO: 103646 - DNA, 405 bp, Homo Sapiens
ccccatcagatgcgtcaggggccctttacggggacaaagccccaagaccatgtctactctgcagctggagatctggcactttgggaatgatcaccccactccttgaacaggttgccactaccttaagaaagatgattttctttccccatgtggatggttaagggtgtaaacctggggtatctaaacctgactacgtatactcttctgattccacaaccaaagagtgacctgggaatcagaaaaggaaactaagaagccaccaggaaaacggaaagggccttggtggtggcttgcatacacagagagaacaatgagcatacaggaacttgacggttaaagtttctatggggaaagttgaagcggcatgggaatactcaaccagaagaagtccagtatccgggccga

SEQ ID NO: 103647 - DNA, 209 bp, Homo Sapiens
ccccggatactggaccttctcaggtccagggggcattcagtgagctaatgcacaaaagatctggtccacagtgactgcttaaaaaacatccaacaagcgcctctgaacctgtctctcatactgttcattatgctcattccatctctctggtctgctagccaatgaccttcttctaaacacagcaatatttagaagaaggtccaggtatg

SEQ ID NO: 103648 - DNA, 231 bp, Homo Sapiens
catacctggaccttctggggaactcaagatcactctcggtggaacggcgctccaagatggacaggtatgccttcctgctcgacaaagctctactaatctgtaagcgcaggggagactcctatgacctcaaggactttgtaaacctgcacagcttccaggttcgggatgactcttcaggagaccgagacaacaagaaggtcaggtatgccgggatcctcagagtcaccaagc

SEQ ID NO: 103649 - DNA, 169 bp, Homo Sapiens
gtgctctagagacccggcatactgaccttctggcatacctggaccttctggcatacctggaccttctggaggctcaagcaacaaggaggtgcaggtaaagggtgcagtgcagccactgagggacagctgggaactagatggctgtagttctccagaatgtccaggtatg

SEQ ID NO: 103650 - DNA, 318 bp, Homo Sapiens
ccggcacggcttactggacttctctagctgtcttggccctcaacacttcctgtgtttgataaagacagctagagaagggctctgccgtggaccctggcagttttgcttgacttgaatgtgtgtgacagttatttaatttgttcatcattaggatggcctcagatttgcaatcagaccttgtagacactgagtcatgtattctgggcaggagatgactttgcgcgattactacctccccagcagtcatgaaaaaaagataccaccccagtggttgaaatcacaaattgaaatacctgattccaagaaggtccaggtatg

SEQ ID NO: 103651 - DNA, 593 bp, Homo Sapiens
acgggttactggacttctacccattctataactgtagacagagaaaagctcagtagcattgctgttgagtggtaggtagagcttgaatttgttgcaagctggctgactccaaggccaaaagatcatggggaatatgtatattgtttccaagaagacaaagtttccaagagcatcctacaaggtgccgttcattcttgccccaaattctccagatgtcatgagatatagaagagaaacatctttcgatgttgttctagtcagaggagacttctaataggcagagaacaagttatggaagctgttcctgaaagatgcagttgtcattgtggaaccagtctaggatattgtgtggcagctggaccacacagccattgttataaaggagagcaatatgccttgtgacccttgtattatttagggtatagtctttcagggagaaacaacttttcctctgtcctcttaggttcagtatctgggggcctgtgaattaaactaacaaaagatagattaatgagagaaaaagcgtgcggttaaagaggttccagaccttctgatactcttccgaggaagaactatcagaaggtcaaggtatg

SEQ ID NO: 103652 - DNA, 416 bp, Homo Sapiens
tggcccggttactggacttctaaattagctcactttctgccgtcactggggtttgctctggaacatgcccctgctgctgcccaggcctcaccatgccccatccacccccgtcccaccagcctcgcaggatccacttgctgtaccgtccacggtaacagtctcactaatctgggccagtgagctaattagaaggtttgagttctccagagccctcccctgcctttccaagaacagccacattttaaagggaacagtcttctgcccctttttttatgtggcctaagagaagtagatctaatgatagtgatttcatacagggtaggcttcatgcatcggttcacgacgttcaccccaatagcctaccgtgtgcatggcctggcactggaggctgccagtgcccagcagaagtccaggta

SEQ ID NO: 103653 - DNA, 461 bp, Homo Sapiens
acgggttatggacttctcttctatgtgtctgtttgactattcagaggactcttcccccttccctaacctctcctggctaactctgacccatccttcaggtctcacatgtgaacatctcttcctcctagaagccttcctggaaccctcctgcctggattagatgcccctatgctctgctttcacagtgcccccattaccaaatgcccccttatttgcctcagtgtccaattagactgagagcccaagagagcaggggcagcatctgccatgttccatttttatatctctagcaggctcagggcttgcagataataaatattagttgatgaatgaaccaagtttgttgatttctgcactgggagctcagcatcctactctccttcaaactgagtgggcagctctggctccatctggaaggttgattccagataggatggtgagaccagaaggtcaaggtatag

SEQ ID NO: 103654 - DNA, 240 bp, Homo Sapiens
gggatactggacttctcgccccactacactcctttgttcttgactagtctggagttgagataggtgtgaagggcgagaaggcttccaggctcaggtcatgaggtggatcagtttctttaagccgatgggtccagacttttcagccctgccagagaattcctaattccatctctcaggttttccagtggtaatgaaagctagccaagtttggctatgctaaccaaagaaggtccaggtatg

SEQ ID NO: 103655 - DNA, 224 bp, Homo Sapiens
accttctgagggtcctgtcagcttccggacttgcagcttccctcaatgggacctagacctagaccaaaccctttgacaaatgcccttacaatcacgacactccaaggctgcacttgcaatccttgaagatcgcctaggaggctgtgtatgacacaacccctgccttcctcaccagaaccttggtcctgtcttgggaaagtcctgccccagaaggtccaggtatg

SEQ ID NO: 103656 - DNA, 350 bp, Homo Sapiens
cacatgactcagactgggccaatcagctttcttaattcctccagcctccatgattggtccaggggtgggcatgtgaccccagaaggttccataagattcagttctgggactttagtgggagtgatagaaagagagatttttccttgctaaatcttccttgctgtgaagctataatccaggtgccaccatgtagagaccacgtgtctcagacttctgacaccatagaaggaagcaggactgcgaaaaggaaagggagagagatggggtccccatgacatcatttgacacctggacctagctgtacctgaaagtgtccttgtcctatgacttgttagttaaatgagccagca

SEQ ID NO: 103657 - DNA, 366 bp, Homo Sapiens
gtacactaggaggcttggaactcaactgtggctgaaccccagttcccaggccaacagcccagggccaagctatctccccaccccagccggagccccagaggctgccctctgcagaaccctgagcaattcccctggctggatgctacctaaacaactcctggttacctcttgctctgtaagggatcccgcctctgttttctctctctcgaacctgttttctctggcacagcagtatccccagaattccttgctctcttcaaaacatgacattgacagtctgtacaaacctccctggagcatcacccaaatgacacagtgtagttgctcgctgttcatttgtgtctctgctctctctctctagtcacg

SEQ ID NO: 103658 - DNA, 320 bp, Homo Sapiens
cgtcggcgcgctcgacgcggggatggaagtggtgaagaagttcattcagaggtgggtctccggcgcgacgtccctctgtggcctaggagccactttcctctcggatcctgtttactcagatatccacggggggctgtcgtgtaattaaatgaagactccctctatgaggaagcccctagcctactgcacggtgcccgataggaactcggacacactggacctcagcaacactgctgtttcctcaggtcccacgacccctcaggctgtaggtgccacatgtttaggactctgtcccacccctggtggtcccagagcgtcat

SEQ ID NO: 103659 - DNA, 393 bp, Homo Sapiens
caacaagaaagtcccgatccgagcggttggcgaggatgctctctgcccctgaccgactccatggggcctgagtaccagagatgaacagacaggtcctgaggagggccatggacatagggctatcaacctgttacaaggaaaccagacaatttcattagtagatgtattactgacctcccaacagttctgtacagcctcagacttcgtgagctccacaatgtctccaaggattgagccgtagaaaggggtccaatggcatccaggggtgtgcaggaagcccgtagtatacctgaaacacctccatctggggcagaaccagctcattcatcttatatgtcctgagccctgcgatgtcgtaggtccttcttcatagtacctgggaaatcttgccca

SEQ ID NO: 103660 - DNA, 443 bp, Homo Sapiens
ctggcttgtcagtctcccaagaacaggttccctgtttcctaaaattcatggaagtagttttgtaacatctactgtcaagcaggaggatactttgtttgcatctatgccacctctttgcccaatagggagtcaccctaaggttcaaagccccaaacctataacaggaggacttggagctttcacaaaagtgatcatcaaacaggaacctggtgaagcccctcacgtgcccgcaacaggagctgccagccagtcaccactcccgcagtatgtgactgtgaaagggggtcacatgatagctgtgtcccctcaaaaacaggtcataactcctggagaagggatagcccagtcagcaaaggttcagccctccaaggttgtcggggtaccagctgggtctgctttaccttcaacagtgaagcaggctgtggcgatcagtggtggccaga

SEQ ID NO: 103661 - DNA, 358 bp, Homo Sapiens
  misc_feature (51)..(51): n is a, c, g, or t
aatgccgctctatgaactccttaggccctcccaaagtgtataggattacanggcgtgagccactgtagcctggccccaatttagcaccttactgggtgctgaggctgtgagcaatagtagaatgcatgtgatccagggcctttagatgaattcatggtataatagggagcctgacacgcaggcacagagcggagggcaagtggctgtggctcccagggacaccaccctgtccagagttcagtggcagcttctcattaaaaaaagctttgagacctgaattggagtctgtctggcaggcaggtggggatggaaggggaggagtgtattctaggctgatgagatggtgtgtattgcatcc

SEQ ID NO: 103662 - DNA, 312 bp, Homo Sapiens
cctggttgctcaggtctcctggcatattgtcaatatgggcaaatctccatcctttgagggcaggtctgccttctggcaatagctccaggtcattcggaggtgaatgggggagaaccatgcaggcagagaatgggagtgtgctatctgggatcaacaatgaggaagatttaaatctgccatgactgaggatcctcagtggcacatgaactaggtccaaagctaggtccaaaggcaagtcccagaaggaactggcagctgttaagcacagctattaagccctgtgtttgggaacagtcaggatcctctagatcg

SEQ ID NO: 103663 - DNA, 212 bp, Homo Sapiens
catggcatgctcaggtctaatgggaagaagcacttctgagactgcaaaggagttccaaaatctgctccttaagcagtgagaatgctggcaaaaccatcaaaatcaactttgtcagaactctagaaattaaaggcttacaacagtctggaggagcttttttattagttaaaaaacaaatcaaaacaagaaaagctcctccagacctgactacc

SEQ ID NO: 103664 - DNA, 501 bp, Homo Sapiens
ctggccagtctctgtccccaaacctggacatactcccgacctcactggaggataaagtctggccgcttgctcagctcagtcctccaaaatgtgaccagcacttgctcagctctgtctccaaaatgtgaccagcacttgctcagctcagtcctccgaaacgtgaccagcacttgctcagctcagtctccaaaatgtgaccagcacttgctcagctcagtctccaaaacgtgaccagcacttgctcagctctgtctccaaaacgtgaccagcacttgctcagctctgtctccaaaacgtgatcagcacttgctcagctctgtctccaaaatgtgaccagcacttgctcagctctgtctccaaaatgtgaccagcacttactcagctctgcctccaaaatgtgaccagcacttactcagctcagtcctccaaaatgtgaccagcacttgctcagctcagtcctcttgaacgtgaccagcacttgctcagctcagtctcaattga

SEQ ID NO: 103665 - DNA, 554 bp, Homo Sapiens
  misc_feature (441)..(494): n is a, c, g, or t
ggacttctgaggaaggaggatggtgagacacccaggtgagtggtgccacacacaaacactaaatgccaagccagggagtgggactggaagggggcggtgaggtggtgggaggcacccacagaggcccttctgcactgtggggtctggtgtgttggaggaagatctgcacttggatgaggagatttggggatcgccagcgatccgcgtcattgaagtgatgagcatggacgtgtgacccagggacttgaacggagtcaagaagagcagggccaggagcagacagacctagagagcaagaacattcaggagcaaagcctgaggcaggagggtggtcatcaacacagatgctgcagccaggtggcccagggtcaggcggcatccccaccactcctcccggggatgacttgcacctgaaacagaggtaataaaacacagcagccnnnnnnnnnnnnnnnnnnnnnnnnnnnnnnnnnnnnnnnnnnnnnnnnnnnnnnctttagctctttgagggctagaggcccagaaggcatgtgagggagacacggagtgatgct

SEQ ID NO: 103666 - DNA, 377 bp, Homo Sapiens
cgtgaggtgtgatatgaaactctttgctaaattcttcccgcatattatgcacaggcacacaagaatagtgggcagatgagtgagattgaggccaaggtccgctacgtgaagctagcccgttctctcaagacttacggtgtctccttcttcctggtgaaggaaaaaatgaaagggaagaacaagctagtgcccaggcttctgggcatcaccaaggagtgtgtgatgcgagtggatgagaagaccaaggaagtgatccaggagtggaacctcaccaacatcaaacgctgggctgcgtctcccaaaagcttcaccctggattttggagattaccaagatggctattactcagtacagacaactgaagggaagcagattgc

SEQ ID NO: 103667 - DNA, 453 bp, Homo Sapiens
  misc_feature (60)..(84): n is a, c, g, or t
ggcgcatgctgctgcggcgtgggaaacgggggatcacagccctcagtctaaggctctcgnnnnnnnnnnnnnnnnnnnnnnnnncccagtctttgattatgtcacttatgtcattttcctgtgaatcttatctcagttcctttgtgtgaacaggcagagcacaagaatagataaatcaataattttcaggaatggatcataacattgttatttctgagaaacattcaaagtgactaattttcatgggcagatctccaggcacttttttggattggaccagagtttctcaacccactgttgatacttgggaccagaacattctctcttgtggggggaccatcctgtgtgttgtgggatcctgtcctctaaccactaggtgccagtagtgacctccagaaaaaatgctccagacatcttccaatgtctcctgttgagagaacttgctccgcaatg

SEQ ID NO: 103668 - DNA, 617 bp, Homo Sapiens
tcaagtggcacgtgcgtcttcacaagggtcgttgactggcacaagcctggggcgtagcttctccacacagaagtgcgcctgggtgcgcacccaggcgcacttcttgagtccatctcctaaatatccaagtgacctcacttctagcctatgctactaatgccaatctcttagctctagccttggccacttctcagccaacctggtggctggtcatgctcacctgctgttctctgcactccaccagccgcctttcaggccatcaggcagcctggaatccactatcagcctcaggagtctaaaaagcacatcagaccttgggtaacccttcttgtccaaactgtcaaacaaaaccctgccctgcgcttttgcacctgacttacagttagccagctgagtcctgctggccagctcccactgccagccccctttcagaatgtcacctcaccccacggtgcttcaggcagagctcatgacaggctcctcatggcctccctgcatctacctaacagcactcaccctgccctggagccgtcagtcctgccggtgggactctgcccgccgcctgcgagacgacgtgagtgtgttcacttttatacacacccagaagtgcgcctgtg

SEQ ID NO: 103669 - DNA, 303 bp, Homo Sapiens
tttgcgcactctggtccaagagattgggataaggctattcaacctgtattaggtcctactcagttgtccccaaatgtggcccagatggctacatcaaaatcacctaaggaatgtattaaaaacatgtatattcccatgacctggctcagacattttaatttactagggtttagccaaagaatctgctaaatcaaattaaccatgtaccccaggtaactactgctgtttaaaattccttcttacctcttattcctgagaagatttgagtcagcccaggcctaggcctgggcacacattatggag

SEQ ID NO: 103670 - DNA, 447 bp, Homo Sapiens
ttcggcactcagaagttcacagatatggtagccacggccaacaaccgtcagacctttgtcaactcggccatcaggtttctgcgcaaatacagctttgacggccttgaccttgactgggagtacccaggaagccaggggagccctgccgtagacaaggagcgcttcacaaccctggtacaggacttggccaatgccttccagcaggaagcccagacctcagggaaggaacgccttcttctgagtgcagtggttccagctgggcagacctatgtggatgctggatacgaggtggacaaaatcgcccagaacctggattttgtcaaccttatggcctacgacttccatggctcttgggagaaggtcacgggacataacagccccctctacaagaggcaagaagagagtggtgcagcagccagcctcaacgtggatgctgctgtgctaccg

SEQ ID NO: 103671 - DNA, 617 bp, Homo Sapiens
tgcagaagtgcgcctgggtgcagaagtgcgcctgggtgcagaagtgcgctggtgcgcacccaggcgcacttctccattcgcagctgcaggagttcctgcttggtggctctaagatcctccttgttcttctggaacatactctgccaatgccctgtctcctctgaagtctcctccagctccctctgcagccctcgcacaagggctgacatcttctgcctctcggcctccagcactgcatggtcctgggttgcatcttgcatgctcctgcggagctgctctgtgtctcgctaggtactgctgccggacatgttccacctcctggtcacgggaggctacctcctctttacagggcccccttcagggctgtcaactcccgctcccgcagcctcagctgctcctctactcgctgtttcccctccaagacctcttccagaagttcccgggtctctaacaggtccttcagtaacacctccttagcaggctcaggaccctggacatgtttcagcttgttctgcagctccatcacctgggtctccagcccatgtcgtaaatcttcaccctggtccaagaggcgcttcatgttctggagctccttgttgctctgctgggcctccccc

SEQ ID NO: 103672 - DNA, 224 bp, Homo Sapiens
actggacccaggacagaatggccagtgagtcccctaggccatttccacagaagcagacacaatctggctcaatgaacatagaagtgctgcttctaatctttgcatgtccttaggccagctggaagacaaggatccaacactcgggagctttgttcccaacgaccaatgaaatgaagagatggactcctgtcatctacagcagatgcagagtagagaagtacggt

SEQ ID NO: 103673 - DNA, 409 bp, Homo Sapiens
tttggtgtgcccctcagactgttatcttcactgctgccagtagatgattcggaacaatcttgattatcctgatgtttggactcccgggttttaatctgtgactctagctgtttctggttggagcccaaacattttactgccccagaaggtccctgaaaactgccatccttattggggtttttgctcataggttgggcttctctctgctctgctagcccagaagtttggcgacagtgttgctgctgctgagtttggccccagcagtggagggtacctgatttatggagcatattatcagctgctgccagagagctcatacccttctcaccttcttctctgctccaggtgctgctgcatgaggaggcgggtgattctggctttgtcagtctctctcggctgggcccatctc

SEQ ID NO: 103674 - DNA, 892 bp, Homo Sapiens
ccacttatgccgtgggcccaccttatgcctggggtaaaaagcaaagcaaaggggtaagataggaaaggaggcctggcggttatagaggtgctggggtaaaaagcaaagcaaaggggtaagataggaaaggaggcctggattgtttctggggcatccagggaaaggagttggcaagcagaaatgaggagccctggattcttgcacacagcagtgccccatcttggagatgccatgagcacagacagaaggtttactaggtgggcggcacagtgacttctccccagcactccacccgtttgtcagtagtgtacacgtggaggggtcaccaagatataacggcacaggcaaataagacacagttgcaaggacggcaaccagccctgcagctcatgggaaggaaagaatccttcaggtcatgatcccccaccatttgtgttggtccccctggctagtcccagttcagcccttatctccccttctcaggcaaacaggcccaggtgacacttctacaaggacactgagaaacagtgttgttgagaggctgagaggcaacctagtcaccatggatgggagaactgataaactaactgaggtatagtcacatgatgagctctatccagtaaacaaactaaatgaactatcccctgggcaagggctgaatcttaccatggtattaaatgagaatgttccataagattacatgcaaaataataaattttctctaagaacagctaaaatataaatatatactctgaaaaacacatttagatcagattcttttgcaaaattatatgaaaagaaagcagtgagagataaacccaggattcaggatgattattaccttggcctagggggtggcagaagtgcgcctgggtgcagaagtgcgcctgga

SEQ ID NO: 103675 - DNA, 499 bp, Homo Sapiens
ttaacgtcaatactcgctcattctaggacctcgactagcatcctgacacttattgacaattttgactcttcattctctctgcatgcctctagtcgttgatagcttaagactctattaaattaggtccccgtgatgcctgagtaattctaaccccaacccctggcccaaacaatctacagtcacatgttgatggtgtatggctgggcggtgttctcacttcgcttcttttgaggttggaggaatgaagacaggaaagttctcacttctactgacagggctgctatagaagaatgagctctgggactcccagcttggatctggcaaagcacgctacctttataggcactgctattcatgttggtttagttggatagcagcatgaggactggacgtatgatgggttaagttggcttctgtgggctattctgggaacacacccaacatttgtagctttaatttttctattgaaaactacctctaagttccaaataaccaaata

SEQ ID NO: 103676 - DNA, 517 bp, Homo Sapiens
ctcggggatgcgatggaacctcactacctgataagcaggcctcccagggctctagtggcaggggagccaaatgggcagtgcggagctgtgagtaggaggggtgttccgttggctgtgagcaggcagctgcttatcaggtagagagggaggccagtattcggggcagaaggtgtgccaggtgcggcggcacagcagtaagccaggcacagccagattggggcacagagaataggctggcttggttagaactaaggcttcgtgtcacagtacaggaggcttagtgccacaccgcaggagccacgtctgccagggtggagaaggcagattcactctgaatcagtggtcttaaaaagtatggtcctgggggtgccctgacccattccagaggatttgataaagtcaaaactattttcagagataccgtggttcctgcctttctttttgctgtgctgatggcacaaaagcagtggtgggtaaatgctagcccctcaacgcgaatctaggagggccccaacat

SEQ ID NO: 103677 - DNA, 151 bp, Homo Sapiens
ccgcagaggtcacagacctcaacttcagggagaattgcttcttggacatgtctagagatatggtgactcgactcttgagggagggattgtagttggtgctcccagtggaagagacatatccaatccctccctcgagagtctccgtcgaact

SEQ ID NO: 103678 - DNA, 581 bp, Homo Sapiens
gaaccctggcgtggcctgggcactttcacgcaggtatgttggtttcagcagccatgtggcaggataccgccagcctagaggggagaaatctcagcagaactctgaaggaagatgggagctgctcaaatggctccctctttgttttggtcaagaatccccactctcctctcgttgaccctgagctcccaacatcaccagcctggggcataggcagctggcctgagtgtgagtcctgatctcagcccttgctaaaatggcccaggtcttctctgccactcgtagaatgggagaagtgagggaggaagtatttgaggcagctcatgacccagagctagtgctcaattccggctagctgtttttatcaggaaaagttctgcactggccgcaatcaatttgacagactatccatacgatcatgtctttcacagatgggccattgaggctacagggtaaattcttggggatcatctcatcacacaagcagagtgggaggcaaatctgtcagaacaatcagaaaacctactacctcctagctgcacccgcacagactggagctagtgagttccatcacggtaccgacc

SEQ ID NO: 103679 - DNA, 398 bp, Homo Sapiens
gctgtaacatgactttaaaaggacacacagtcctctttctgtattatttcaaagttttggatattttttcttaacagcagacagaggcagtcggggtgaaactgtgggattctagccagagagctcaacacagagatggtgaagacagagttggtacagcagggcttttactgtccaagaccactgccccggccgtgcttccagcccaacctcatctactgggccaacccctccctccatctagaattccactctggttattaagaccacctgggcactggagtcccagggggctgggatgccacaaggcactcacctggtgctccccgtagtgtccagtcttcccgaggacatgcagcctggtgtgtacatgtaatgtgtgtagtgaggttccatcg

SEQ ID NO: 103680 - DNA, 473 bp, Homo Sapiens
agagctggttcatgttggaaataatcaccacagggagggtgtccgtctggggagaagacaggagtcacagagagggatgtgatgtttctagctgcaggtatttgttagaggaaaggagtgctaacccaccccaagaggcttctgtttatccccttcttatgccttcttccaaagctgctttctctctccttgccctccattttcactcactttcagctcctgcttcagaccctggtaggtatatttgaccgtgaagctgatgatgtgcagttcctctgtcacacctagtggcccctgggacagccaaagacatagtcatcagaaggctctttggcaagctccccctgcctcgagtcctctgtccagatctcaccttattgctgccctttcctgaaccacctgaacgttgctccaccagagtctgtgaattgaagggaaggagagaaaatgccagagtgggcaccctagtgtcc

SEQ ID NO: 103681 - DNA, 587 bp, Homo Sapiens
  misc_feature (76)..(185): n is a, c, g, or t
  misc_feature (444)..(510): n is a, c, g, or t
ggtaccgcgattgaactcactacctcagctcccaagttgctgggactacaggtgtgcaacaccaggcacagctaannnnnnnnnnnnnnnnnnnnnnnnnnnnnnnnnnnnnnnnnnnnnnnnnnnnnnnnnnnnnnnnnnnnnnnnnnnnnnnnnnnnnnnnnnnnnnnnnnnnnnnnnnnnnngtgtgagccactacgctggccctgaaaatgtaactatcagctctcaagagctggtatgagccagtccaagctggctgcagttcaccattggccagcactgagccttgttcaatcaactttatgcccccagcaaatgttcatcaccaaacccacgccaacgtgggatgaggaaggggctgccgcaggcgtggcctgggccctctactcctgcactgaacatttcatgtggtccacaaactgatgaggccactgtgacaannnnnnnnnnnnnnnnnnnnnnnnnnnnnnnnnnnnnnnnnnnnnnnnnnnnnnnnnnnnnnnnnnntaaggcctgaggacaatgtcgattcattcaactacgccctggtcacttaccagtcctgggcgtagtgagtccatcgc

SEQ ID NO: 103682 - DNA, 160 bp, Homo Sapiens
cgatggaacctcactacacaagacaactatgtgcaagacatacagtcatcagactctccacaatcaaagtgaaaggaagaattatccatgatgaacatgtgtacaaatccttcaagagagaaggggcagtcacccacgtagtgagtccatcgcggtccgg

SEQ ID NO: 103683 - DNA, 482 bp, Homo Sapiens
cactgctgcatgtaagacaccgagaatgaggccgtggagacaaacaccaactcagagtgggacctgtgcctgactcagggaactcagaacatgactcccttcactaagcgcagtcaagtaggtgctggagggcaaagagaaggaggaggtgctgatggcaagctggtcaggaaatgctccctaaagcagctagttcaaatttgtactagatgaagggcagcacatctagaagctccccagtttgggatacgagagctctgcctaaagatagggagggacacactgcaacccgacctggcagcaggcaactgtttcacccccgagactgacccatccaatgaagattattaacagagccttcagagcatccccagctccaggctgggaccctgcagatgataccaagacaaaaccagcatggtcatccttgcagggctgacaccattggggtgggagccactcctgaacaccatagatgttcc

SEQ ID NO: 103684 - DNA, 610 bp, Homo Sapiens
tagttcgacggagactctcaggaatgtgggaggtggggggaaggactggctgcaggagaacagagcatcacacagaaatgtggctctaactagctgacccacgcagcagcggcacgttcagatgctgcacacaacatgaacctcaggtcctgagccctaatcctctgatggttcattctgatcccatttgtacatcctttgtctcaacagttgctaagattgggtccacagagctgccccaggcccccagatccactgtcctcgcctcctctgccatgtcaccataatcttccaaatcttctctggctcttcctcttcttcacagaggcctgtgtggaagttaactttgccagctcatccctagcttctactattctagcaatgagccagtgaggggagaaaggggagtgccagtagtaattggtacttagatgggggaacaacttggtgtacatatatatgctatcacccccaaatcccctgccaagaccaaggcaaagcttcaaaatgtcttttctaactctcacaacactctgccagttacatggttggtttatcttgattgtttgttacattttgtgagacagagacgttgtgaactatccgtcga

SEQ ID NO: 103685 - DNA, 616 bp, Homo Sapiens
agttcgacggagactctccggagagatccaaaagcatacaatagattctaacatatcttcgatgacaaatgccactgaaacactccacgctacctggtcaaaagcaggcgttaagttcaacgatggtgaagacagaggtcagggagatcctgagggggggcaacaacgtgctcctcctcccatggcagcacccaccagaatctacaacagctggcacagccggagatgttctgcactgtcccttaccgcaaaggcaggcgggagccacgggcactttcaagtgctccatccgagttctcagacacagcctagttgaagccacagcatacaggaaaaggacccgtctgtaaatgatgcctgccaaagggctctcccagaacatagccgggcctcagggttttaatgctgccagaacattccaagtctcctatgcagaaatgttcctatcttccacctagttctgggagactggtttgaatgtacagacttgcattatcaaaatcagcactgttgctgacactaagacctccaattctgggctactttgtaggtctgggggaagccaccccttaagacaagcgttttgagacgagcctatctctggccagattgcagt

SEQ ID NO: 103686 - DNA, 145 bp, Homo Sapiens
ccttgatacgctctgtccactcacaaagcacgcccctagcctgcgaccctcaactggctggtccttctcatcgtgtaagcttctgcttgtgtcacctctcgtggtggcttacctgactgcccaccacgagagtctccgtcgaact

SEQ ID NO: 103687 - DNA, 441 bp, Homo Sapiens
acctcagttgactgagtagctgggactacaggcatgcaacaccatgactggctaatttctgaagttctgtagagacaaaatatagggttttcgtagagacaaaatggggtctccctatgttgcacaggatggtctctaactttttttaagagcatgagtatttcatatagccaaaggttttacccactgttcttaacctttatgaacatgatgtgacatgacagactatattctctgcatgaaacatgctttcttcatgtttatgccattttagggttttaataaatcaaaaaatctcagtccagtcaaagatttaaagatttaagttactagtgacattggatgtatttttctaatgtttgtggctattcgtatttcttttgtgaagaaagagaagtgttaaaattagctgtagttctggtctgctgcttctaggtgcat

SEQ ID NO: 103688 - DNA, 579 bp, Homo Sapiens
  misc_feature (429)..(522): n is a, c, g, or t
agttcgacggagactctctcttggctctttgccacagcatgctaaaggttcttatcatttttaagaaaaaaaaccatatttcaacttcataaaatctcagttttacagctacagtcctttctcttgctatcactttacttaagcttcttgagaaaattctatattcaatctaccactcctccttcaatccactgtagtcaatctttccattgatttcctatctttccactaacttcattctcaccagtcaccagtgaatgatcaattgccaagttcactgatcaattataaagtgttcaataatatgatcaataatcaattgccaactcaaacagcatctttcagagcttatttgacatctttatggcacctatcactcttgaccgctccctttaatgcattacatttttaacttgttttttgccaggnnnnnnnnnnnnnnnnnnnnnnnnnnnnnnnnnnnnnnnnnnnnnnnnnnnnnnnnnnnnnnnnnnnnnnnnnnnnnnnnnnnnnnnnnnnnnnacgcttcgctgagtagttggtgcatgtggctggagagtctccgtcgactggtaccgc

SEQ ID NO: 103689 - DNA, 355 bp, Homo Sapiens
actgcatccaacgccgcccacctgactgcatccaacgccgcaggctgtttggcaggagtggtctgtttaatgatctcccccagctgtgctcactgagtcagtgagctctgcatctgcctctctgtctgcatgttgtctgggctgtgatcaatgtgaggagtgcagattagtggggaggataaacagcatcacttcaataagacggtggagccagaggcctgttttttatcttatgatggtgtgcaagcttctctctagcaacgtaagttcactttttatgtcttttcctaagagggctattttttccaacataagttataagtgggcaacaataaagcaagagctggcacctcat

SEQ ID NO: 103690 - DNA, 228 bp, Homo Sapiens
agactgtcgacaggttgctggcagaagcagtttcagggcccggaagcctgactgcagcaggaagccgtggacggggaatgaagacaggagtgcggtggagaggaaaggacatgctctgctcctaggaaccccaagagagctgctctgtcctgacctgaaggagcagagatgaggctgagctaagagcagtacagccaggtgtggtggctcatgcctgcaaacccgata

SEQ ID NO: 103691 - DNA, 538 bp, Homo Sapiens
cattccagcgtgagggatggggtctcgatatgttgcccacgcgtctcaaactcctggcctcaagcaaacctccttacttgacctcgcaaagtgctggaattacaggcatgagccaccgcgcctggtcttcagccacatttatctaacaggaaaacacagcaactaaccaagactccgcaaaattctattcatcccactgggctccgactcaggaattgtttccaaatactggatggcccggatctcaaacaaacctttaactccacttttccgaagctctcggtcctggatgaatcctgcaaacatctgagtttccatgaagaggtccaggaagtggcgtacacttcgggaggtgtgggacttacggaatggttccctttggaaaacacgctccccacgctcagtgacagtcatgttcaaagaataatgtcctaccaactccacaaaaaacctgacaaatgcttcggacaccagagagttgagtgtcacatcttgtgaaaaattctgctcctgagtcaagatttcatttcgttcttcc

SEQ ID NO: 103692 - DNA, 396 bp, Homo Sapiens
gtaatgcaaagtcaaatgaaatagacgtgagtggatggaaagacgtaccttattctcgcataagaagacaacggcatgaagacatcacagggaatggattaaggtaaacatgcagcctggaatagctcaggagaattctggaaaagtagaataatgaggtagggcttcccttcgctattttgaagtgcagattacactatgtaaaaccattaggaactggcacgtgaatagacagatcaatagttaatagctgtattagccagaaaatggtgtaaggacaacaggctaactaaccctgtcacttgttatgctaaaattaagtctagatagagtcctccaaaataaaaataaaaagagttaggagaaaacatggggttaacacaacaacaaatcttc

SEQ ID NO: 103693 - DNA, 472 bp, Homo Sapiens
tgtcttcacctgcaggtttgtgtaatagctcaggctcttctcagtcttctttttctccttgcacaggtagatcagtttggccacgttgtagcacagctgcacatcaaccacctcacacgtgggatacgcgtcccggaagtggctctccacagtctccttcctggcatctctggggagtcctgtgatgaacagggtccgcctcacctgtccgggaaatacagcagggagagaagtcacccacaagccagtgcgccgagtatgctcagcgtgttcactacccaagctccagcctctgcaaagtaaacaacaggaaatcagaaggctacagtagtacgcactctcctgctggccgggggagccgcccataagcatgtaatatacacagcgtcttcattaccaggactgtacaaagaaaccacttcacaaaacaactctatgagcattcttgacgctgaatgaaaggtaccgagcc

SEQ ID NO: 103694 - DNA, 455 bp, Homo Sapiens
tcccaattcattccagcgtaagctcagaggtgccttgctgcttcgtgggcaggtacctgagcgtccgctgggtgcgtgtcttgcgcttctgtaggcctctgcattgagggtgcgtgcccagaggggctttgaagctttgggtgtggggtgggtgctctggaaatgtgctggctggcaggttacccttcttggaagggtatggctgagccaccttttggctccctctggccttgaacagcctcttaggcgttagacaccaagagaatgcgtccttgttaagattcccagttggagcactaggcgaggctttcgaggggagcgtcctggacatgttcaaggagaatggttggaagagaagggctcctgggctctagcgcggcctgggaagacccagagggcagtgtcagctcccgggtttcttgctgggcacggagaaggggaagctgtctttctgt

SEQ ID NO: 103695 - DNA, 756 bp, Homo Sapiens
caatgtccacagcgtatactccagcacagcttcgcagatcatgaaaagcagttggagtatatgctgagaagactctggaagattttgcatggaaataaagcaatctgatttatttaaaaaatataatctggcttttgtgtagagactatataacgtgggcaagcataaaaatctggagtaaagggtcaatttggaagttattaagtaatttaggaagagaaggtgataacttgtatcagggcagtagtggtcagggtgaatggaattgcttggcacttttcttactgtcagagtaactacgatgtatcctttttcactgtctcatccattctttgtttttcttcttttttgacccaacttcccagcactcctctgcttcctcgatctcttcactggctcatgtggaacaccccccgacccccaacccaacagcatctcatgaagatttaagctgtgttcaccataatctcctgtaaatattgcctctaccttcttgtattaattggcccacttctattgcagttcattctctcacctctctgtaggtaaacttacagtcagagtcataaatgcccaaagatacttcctatcttcctgaaaaccatgagtcttttgacggtctgtgccattttgtcatactagacgggcactctgcccttgctcttgatgtcattgtaacacttatcacaccatatgttaattgtatgctactttctaatatttatagtatattaaaacttgtacgctggagaattg

SEQ ID NO: 103696 - DNA, 277 bp, Homo Sapiens
caattcctcagcgtaacattatgcaacaagtaatggctaaaactgcaattactgtttgcatcaaccaaactaagtatagtagtgagatgaatcacaattgtttctttggatgcttattttgaataaattgacagctctatttccatttccatgagctgtgttggaaacctccttgttctcagagagaatcaattttaagtcctctctgcactttatatgcctgttgctacatagaccggctgactctgaagtatagatagagctctatgtctgagga

SEQ ID NO: 103697 - DNA, 844 bp, Homo Sapiens
  misc_feature (325)..(346): n is a, c, g, or t
caattccacagcgtaccacctaaaattcagaaatcctttccagagatctaagttctaagagcagaaattttaaaaagctaatagctttttacttctgctggtggaacaatgtagcagatgtgttttttcctgtaagtccacttaaaagtcggagtatcatacacaaagcaaacataagacttggaaaggtagagaaaaggcaaacaagttagaaaccttggaacacaaacgataaccgttgagtttcccgggttttcttttgccttatgtattccagactagataagagagaaggcagcaactcacaaatgctaatgagtgaagnnnnnnnnnnnnnnnnnnnnnntaaaagcctgctttttctagccaatgaaccaaaaaaagtagcagcctaacaggacaaaattttcagacaacaatgctctactccagccaaacaccctagaaaaatctgtggacccacctccatctgaaccagtgaaaacccatgctcaggttgtaactaagcaccccaagtgcctaccccatgactctccctgtacctcttatagcaatggggtgacccgcctcctctcgggctagggtggtatcagaggaggcctaatagagttaggacattcataaccattcattggtaaagccaccaccaactacccagagtgtaaatggagaccactagggggggcagtaattaggcatcctggcccttcccagctagggtggtatcagctgaggcctacggagagccttaactcccaccccgactgagcagtaatgaagcaccaacacaaggtcaaccgagtggacccaggacagctaacgcggctgttcaggatacgctgga

SEQ ID NO: 103698 - DNA, 578 bp, Homo Sapiens
tattcattccagtcgtgtatgattccatcatgaagacagctaaaatatctaggtgatctactttgtgttcagttttacggacagctttgcattgcatttcaatagcacaataatgcccacataccttaaaaatcaaattcaaagtgataactaaagtagaagcatgcttatgtttttagaaatatcttcatcatggaacctgcatgagaaggaatgtttaagtaaaaccaagctgccaagtaaacacttagaaaaatcattaacacaaaattctatctgaagggagatgctagaatgatttgccagttaattttagaacaggaagctgatgatcatcaaaatgagaaaagttaaactgaaagggcatcagtgaacactaaatggacctgggtttcctacaataatctccaatttctggaggtttatcatcaatgtaggtctcttaaaaagttggtaagatagccaaggtaaccaaatgatttttcacttaaacagtatctggcgtaccacctaatatttgggaaaacttagaacaaaatcagaagctattaaagcttaggtggtacgctgtggcattg

SEQ ID NO: 103699 - DNA, 167 bp, Homo Sapiens
  misc_feature (51)..(51): n is a, c, g, or t
cgacggtgttatcgatgcactggcaggactgggcagtggctacttactaanggggtatgaatgtgtcccagcatgttaagatctagtggagctggactgatacctattggccgaatgtgacctctgcctgtttcaaaggtgtttaatcctgatgtctcataaattaa

SEQ ID NO: 103700 - DNA, 285 bp, Homo Sapiens
tgtttatcgatgccacaaaatcccagcatcaacaaagatgtcttaaatatctgttaagtcctggtatttgtccccacaaccctgagctttgatcgtcaacaagaaaccgagggaatgttagcagactcgaacttcccagggctctgtcctgagccaggcttccagctctcctgaaccaccagcttgaccatttcagtgccggcgagcttagtgctgggattattggctggccttatccattggctgctcgctggggtggcatcgataaacaccggtaccgactga

SEQ ID NO: 103701 - DNA, 353 bp, Homo Sapiens
gaggatcacatgttcgtgaggatcacgatgtccgtgaggatcacgatgtccgtgaggatcacgatgtccgtgaggatcacgatgtccgtgaggatcacgatgtccgtgaggatcacgatgtccgtgaggatcacgatgtccgtgaggatcacgatgtccgtgaaggatcacgaagtccgtgaggatcacgatgtccgcgaggatcacgatgtccgtgaggatcacgatgtccgtgaggatcacgatgtccgtgaggatcacgatgtccgtgaggatcacgatgtccgtgttactattatccacaataatattacacccggacgtgagtctctctgcaaatcaccgtaactgta

SEQ ID NO: 103702 - DNA, 416 bp, Homo Sapiens
accacacacagatactctcgacacctccacgcccagcagccatcatgcccctccgctctgtgccctcagcgtccccgtcacccccggcggcctccagcaccgggctccacgcagccccacaggccttcccagtccccacaggtccccgtcctgataggtccctggagctccactggccctcaggtaaactccaagcgccacactactgtctacaaacgctggtgatctggacctgcagcccttctcgccttggtggaggcccctccccacgctctggaaagtgcctcaggccctctcagctctggtctctgcaccttccattcccctcacctagatcactcctctaccaaactcctgcacaccttccaggcctcttccctttttgccacagtccctgtgcttccccaaccatagcc

SEQ ID NO: 103703 - DNA, 712 bp, Homo Sapiens
acagtcgaggctaaccggtccatgcaaagttactctcgatacctccacgccagagcatcatgccctccgctctgtgccctcagcgtccccgtcacccccgtcggcctccagtaccgggctccacgcagccccacaggccttcccagtcccacaggtccccgtcctgataggtccctggagctccactggccctcaggtaaactccaagcgccacactactgtctacaaacgctggtgatctggacctgcagcccttctcgccttggtggaggcccctccccacgctctggaaagtgcctcaggccctctcagctctggtctctgcaccttccattcccctcacctagatcactcctctaccaaactcctgcacaccttccaggcctcttcccttttgccacagtccctgtgcttccccaaccatagccctggtcccagggagggcagagaccgtggacctccatgtgtcgcctgctgtgtggctggtgctgggtgtacagtgctcacctggtcccagaagacgtggccccagtagcattcctcacggctcccattggagaggcccccaggactgaggccatggcagatgtatcctgggccattgggctgggcagggcactgagcaggtagtagagggagcacgcaggcctggcgcagctaggccacaacacgtccaactgtgcatgggacacagggtaaagctcaatctata

SEQ ID NO: 103704 - DNA, 257 bp, Homo Sapiens
ccccgactagcccgacagcgtgcctcgcagtccccgcctgtcaaacatgctaggtgccgcaccagtcaccggtgaggatggcgccttaactccacatcactcctcagaccacccctcacctccgcccaggggcctggcttcgcacccagacctggacgctccaccaggctgggcccggcctgggccccgtcccaggccgagcgaaaattacataccaccctgggccagagcggtcagccctgtcgggctagtcgggg

SEQ ID NO: 103705 - DNA, 797 bp, Homo Sapiens
gacgctctctctgtggggctgaggtacaaagggggattgagcagcccaggagaagagagatgggggttcccttcttctcttctctcagatgcatggtggacttaggaccttgctgggctgggggtctcactgcagagatgaagctgcttctggccctagcagggctcctggccattctggccacgccccagccctctgaaggtgctgctccagctgtcctgggggaggtggacacctcgttggtgctgagctccatggaggaggccaagcagctggtggacaaggcctacaaggagcggcgggaaagcatcaagcagcggcttcgcagcggctcagccagccccatggaactcctatcctacttcaagcagccggtggcagccaccaggacggcggtgagggccgctgactacctgcacgtggctctagacctgctggagaggaagctgcggtccctgtggcgaaggccattcaatgtcactgatgtgctgacgcccgcccagctgaatgtgttgtccaagtcaagcggctgcgcctaccaggacgtgggggtgacttgcccggagcaggacaaataccgcaccatcaccgggatgtgcaacaacagacgcagccccacgctgggggcctccaaccgtgcctttgtgcgctggctgccggcggagtatgaggacggcttctctcttccctacggctggacgcccggggtcaagcgcaacggcttcccggtggctctggctcgcgcggtctccaacgagatcgtgcgcttccccacagagagagcgtcgggatcctta

SEQ ID NO: 103706 - DNA, 188 bp, Homo Sapiens
ccccgatagcccgacagataacatttagcttagaaaagagctgctagtggacttgggtagcagtaagagacaaccactttttttatcagaagataaaagatgataaataataagtcataataatcaataatggtttgtgcatttcatgtaaatctatttttgttattttataagtttttaaacagtgt

SEQ ID NO: 103707 - DNA, 337 bp, Homo Sapiens
ctgtgtcagatcccgacgctctctctgtggggccagctggccggctatatcagccactccccttcacttgtcctctactttgttgctcccttattttctcccagtcatcagtgcctttctttacttttcctaactagctcagatttcacaatcggtcctttgactctccctcttgccgtctagtctggcccaattgagctcacctttctctgtgggtcggcgcctgcatgtcctctgcagagaaggcagggcgattgcggtcaccggccttcaccgggcgtcccgttgccggcatgcctgccctgcatctcctgtctcctccccacagagagagcgt

SEQ ID NO: 103708 - DNA, 565 bp, Homo Sapiens
tcgcgacgtatatcgcaacgtgttgggatatacacgtgagccactgtcccaggcttatcattatttttgaaaactagcctcaggctgtcttaatgactaggtccagctgacctaaattgagtccacagccttgccaatttcagtttatctccaagccataatgtgtggataattactgaagtagtcatgtgggtcattgaggaatatcaggagctttcgctacagcagtggccttcaacccttagtgcgctgctagtgaaatgcaaatattgggactctgttccctgagaatcttggggtcagggaagtaaccctagagtttgcatttctaataacctctggggattctaaagcacgtggttcttagcactgaaaaacactaaaaaatataacaggtgtttgagggaggaggaggaaagaggaattcattcttggtatttatcaggcactgtcaggggccatagctccccaagaacaggaaccatgcttactcttctgtatccctagcatcagcatggttgctagcactgagtaagaatgtcagacattttgagtggatacacgt

SEQ ID NO: 103709 - DNA, 552 bp, Homo Sapiens
tcgcgaacgtgtatccagagagttgaggtgtgctgggcctgcagctcgatctccaggcgttgactgtgcgtctcagctcgatgatctccgcctggtaggactgcagctgctctgagctggataccacctgcttgttcagctcctcggtctgcgtggtgaaccattgctccacttccctgcggttggtttccaccagggcctcatactgactcctggtctcgttcagcacccgattcaggtccacagtgggagcagcatccacctccacattgaggcggtctccaagctggcagcgcagggtatagacctcctgctcatggttgctcttgaggcagagcagctcctccttcagggactccacctgggcctccaggtcggacttgcacagggtcagctcatccaggatcctgcgcagaccgttgatgtccgactccaccagctgccgcagggacagctcggtctggtacttggttctgaaatcatccgcagccagcttggcgttgtcgatctgcaccacaagcctggcattctcagacttgagtacatcctgcc

SEQ ID NO: 103710 - DNA, 448 bp, Homo Sapiens
  misc_feature (84)..(157): n is a, c, g, or t
cacggttatagaggatcccctcgcgaactgtgatgtaatgctactggaggctgaggtaggaggacgcctgaccctgggaaggtnnnnnnnnnnnnnnnnnnnnnnnnnnnnnnnnnnnnnnnnnnnnnnnnnnnnnnnnnnnnnnnnnnnnnnnnnnaatctaaaaacaattgtcttatttctaactctgaactactttctatgctttggtgacatctatggtgaaaattgaaaactagcattaacagctagaaagaagcaaaggatttttccacatgaattccatctttcttagctttgcttttatttcacagaaacagaaaataaagaaaacctaatcagttaaattactcctctctggtgtcacatcctaataaataactgttatccttatgtccttcaagaaagaaatgatactagtaggacataaggataacacgttcgcgag

SEQ ID NO: 103711 - DNA, 443 bp, Homo Sapiens
ctcgcgaacgtgttatcccaattctctcctccaaaagaatgaagagaattgggataatagaaaatgtgtatgaaagccaccagtataagcagctaatactgaacatcttgtccatcagttatatttggaatgccattgtctgacagaaaataggtgtgccagtagagctaagagtttattttcaaggctacagcagcaactcttccaggtcacacagtggattctcaataattttacctaattattgagacctccagagtattctcctctttggagagtcttctaattcctgtactctgcctcctgaactgttagtcccttctgtgaaagaaactctggagatgtgtggcaggagaggatattgataccatggccccacacatcttaatgctctaaatgtggagagaggagccttggcaggtgctttggatacacgttcgcga

SEQ ID NO: 103712 - DNA, 665 bp, Homo Sapiens
atatcctcatgacatggtgaagaaggcgcgcatgtcagatggatgagcgagaagccctcagaagttctggagcctgccatatcagtgacattctcaggggtgcagcgtatgagggcaagccagggacaagttattgcatcctgcatccttacaaggaagaaagaggcacagcattgaggcacctctgtgttttggagtcagcatgcaccgcgctagaggatacctctctgacccctttattgggtaacgggaaaactgccagctttgagtggggcccagagaaaaagagggctctgctaaagatttggattgggagatgggcttccctgctgcatagatccaatgggttaccggggggcttatttggggtaggaaggaccctatatggcatctctggcaaactccaacggaagagttgcagtacactgtcctagagttcctggacaagaccatgccttctgcagcagagaactactcgccaagtgagagcagtatcaggcacactaccagacccaggtagagaccgagcacctgctggtgggacatcagcgaccatgcgacagggtctgcccaagcgaggtgttgtcagatcctccaagtcagtaggtcagaggctcagtagcaattgatggtacaatgaaaaggaagccttgggcttgacccgc

SEQ ID NO: 103713 - DNA, 499 bp, Homo Sapiens
tcacccgaataaacccctctcttcttaaacttgggtgtctgaggcttttctctgtggcttgtcttgctacactacctcttcataagctattctccagccactccttaacctgccctttctccttgcaaattccttcaattatctgggtctctaatgtgctggccctcccaaggcacttgctcatgtcacattgtattacaattcatggtaatttaaattctgctagtcctttccttccactagaataaatattgaacagcttgcatggtagcggtgttctccagggaatatgtgccaatattacttgaagatactttctaaaacatgtcattatgtcttattgaaatagcaatgagaattggggtaactgtaaagtaataattgttttttcccttttcctctgatttccatactacctaatgtaatttatctgtgcactagctttaactacacagtccctcatattcgtaggggatatattcctagaccctcacctggc

SEQ ID NO: 103714 - DNA, 693 bp, Homo Sapiens
caagaaagagagtactgccagtgcttagcctatgttgggctgtgcgtactgaaatagaagggaacatggtgagcatgcgaggactgtgagcgccagaaagaaacccccaaaataatttcattcaatagtttcatccaaactctcccagtttgcaaatgaggaagtgacttgacaaaggccgggcaccaagttgaagcagaaccagattttggccaaggtccctggtgctcccagacttgagtgctgggccattggatcccaggcctgctgtgagggctggctctcttaggacaagggaaagggtcccatggctctcccatcatgctgaaagggttgacaccggacaagtcactgcagctttcccttgtactgctctgattctcattctactctaaggaggcacacccaccattatcctgattttatggctgaacagcccgagcttcagggtagaaactcatcctcatccacaaagccatgggaaggcttgattagaatttaccactcctgtccccagacactctgggctgttcccaccttcaggtagaactcactgcctcaaaagccaccttttactgttctttgtctgatcttctgggattgtgatgttccctgtaggaaaaatcatggacaatggcagtaaactggcgtgctggctcacacctgtaatctcagcactctgggaagccaggc

SEQ ID NO: 103715 - DNA, 623 bp, Homo Sapiens
cttcctctgaactttgggcaccctcagcgcccacccagtgaattcacccatgttatctaagactccattctgaagagggggctgcctccatgcacaaagtgattctaggaaccactgcactggataattttaaactcaaactgttttggtagatcacccgtgcccaacgcaccctgggatgaattccatcaaacctgcagagctatcaggggacacaccagatacacagccttgcacatggcctatagaatcaggtgtccaaagtgagaaaggaagcgtggaaggaggaaaccatcaggcgtgcagaggagcagctgctttcatccccagcagcgacacttccaacccgcgggcctgatggggacacctgcccacgaaccccctgcaggggacacgaggtcgccttcctctccgagtccatctttaagatggtaacagagctctgaatcgtcaccattttatcatcagatgatttcatgtcaacatggacctagaaatactgtctcaagagaaacattcctccagaacttcattcaagaggatcacaatctgcacctggctcctacagcctagattaaggacttgtccttctatacgaagcataagatacgcacaaccaagtg

SEQ ID NO: 103716 - DNA, 562 bp, Homo Sapiens
ttgtgggccactcagacggtctagggcgacggcctaggtgtaagtcgggaaaggaattttaaatgtatgtgactattttcaatttcttcctgagactgcagtggaggaaaatgtgtggggggatgagccttcctccctgcgggagtcaaaaccacaccagcgcagcgtccttgcccttgactgctctgtaaagaaggcttcttgcccttcagaacacgccgctcgctaaggtgtcactgagagcgatttttctcttctctacggaggaatacttggcataataactgaaagtacttttatgagaatcctaaagtgtagcagcagcagtgattgaaatctacatttcaattatttttctaaagtgtaactaaaaaatctgatgtttaagtgaaagtaaattatttgtctaatttccatcagggactttttgaaagtcacagaaaatgtggttagtagaattcatgaatctccacttcatcaggcagtttcctagaagataaaaggggttgaaagcctcccccaggccatatcccagatagtactcatcggggatcctctaacg

SEQ ID NO: 103717 - DNA, 577 bp, Homo Sapiens
atgagtaaatctggagccatataaaaacggcagaatatgcattctgtgctgactgccttaaaatcggattctttgaagtgtagttagtcgcttcacttattcagaaaattacacaattcttttaaggaactgcgtgccaccattaaaatcactagtgaaaggcagtgagtttgtgaatgattgactttcccagggcagtggtgcagtggaaggcactcgttacctgggcagagttagatggagcatatttcattagtcgttcaggctctgtgttctaatgtgtagattttgttttcactgtatgcgttgctggctgtatttccagtttcttctctagttaaaatatggaggaagtcacaggacatccagtttgttcttgggtactatgggacaaaatatatgacagtaaactatcagctcatcttggcaagtacttcttgctgtggaccactgaagcatatttgtaggaagggagttacattttggtgctcaggatgggagtgatgatagtttcaaagatttctattttggaagagggatctcaatgccaagattactcatcggggaccgagtcgaa

SEQ ID NO: 103718 - DNA, 481 bp, Homo Sapiens
cgatgagtaatcttggcaggcgtgagccaccatgcctggccaaattagaagtttttttaaaggtatttatgaagtcatttactaagcaaaaaataagggagacccattttcagactcaagtagaagagatatacattaatatctgttaatccttgttagctctagaagaccagttaataaagtaaatgattttattttcctttattcgtttcacaggctctctattcatatggatgatgaattgcgacatattgcacaaaattctcttcagggtttacttgttgacttctcagattggagggaagatgtactattgggctttaccaacttcctgctccgggaagtaaatgatatgcatcacacactccttgattcgtccctgaagttgctgctgcagctgctcacccagtggaaactagtcatccagacacaaggaaaagtctatgaacaagccaagatttactcatcggggtaccgagct

SEQ ID NO: 103719 - DNA, 841 bp, Homo Sapiens
cgatgagtaaaatcttgaggctttcagttcgtgtgaaaaatctgggacactcagtctgtcaaatgcgggggtgggaaggggacgcaccagtaccaaggcatggagaactggaaggaaaatatctagaaaatctgtgacatatggctgctgtagatacaggcacttgcaaatgagactgtaatgctaaacagagcctttccaaccaaataggcaaagcacatttctgaataatgggactggggagaagagtaaagtttcgccatctgaggcaacatggcccagtggaaaaaaatggatggggtttagagagcgcgccagggatgaacactacctagtctatttactggtttgtgtccctttgagcaagccacttcatctctttggacttcagttgtactcatctgtaaaatgggttcttgagtgtaaagtacttgtacatgtagcggaggggcagtgaacagcttccatgagaaccataacaattcaagacggcagctttgccagtggaattgattggtttaaaaaagagagagagaaaatttaagattttgtttgaaaattttatctgaaagtcctccatggtctacaaattggctcattatcgttcctcttgttttacaaatgagtaggagagaacctggaacaaaatctagtctggaacagtgcctttgtaaagaagcctctattgggaccaatccgcctgcaggcagtagaggaggaatcaggtttagccacagcaagagaaaaactgagttccgtaccctctgccagatcaggatgctccttggtttcgggtctaatgaacctgctatccaagattactcagtcggggatctctaga

SEQ ID NO: 103720 - DNA, 745 bp, Homo Sapiens
aaagcaaaaggtggggaaggctgggaatgctaatggttggggaagtggggaggcccaaggatgatcaaacaaagcgagtatagaaacaaacctatttggaggcaccagaatgaatatttcattacctttgcatgtcaaagcgctgtgttcagtgtctgtgcacactgtgtagagggaagtacctgattattgcccatttactcctgcttctgtccttccaaaacacccaaaactgtggcccccattggctcagtcattctatatatagagttgttcctgttaatcccccaggactctaggagaagtagactttaatcctttggtagatcccaaagcctgtgacttctaagttggtgactttcactgtcttctttggaggattctcgtcagagttagagccttactcgcagttgctcacggggctttgggtgaatcataagtaattccttttgaggcaaatcttggggaccccttatttatgctcaccagagaaatactgagagttatgcatttccattgatgggaccttcagatccagtattttttatattgatgaagaatgttaataagtggatctaattcaaaccagttgcaggtatgagtgggtaggctgtgacttatttaatgcatatcctgttttcagatggtgtctgagctaaaagaccttttttgagacacctacagggtgtagtaagaacgaaaatttgcacagcatggttctggcccagtttcctcgcggggtcct

SEQ ID NO: 103721 - DNA, 549 bp, Homo Sapiens
atgctcagcctgtatcccaatacttgggagctgagcaggaggatggcttgagcccagcagttaaagaccagctttgacaatatagtgagacccctatctctacaaaaaaatttaaaaattaactggtgtgtggcatgtacctatagtcttcgctacgcaggagactgagactagaggattgcttgagcccaggagtttgaggctgcagtgagccatatgactgtgccactgcactccagcctaggtaacagaacaagactctgtctcaaacaaacaaaaacaaagaaaccaaatttcctgatagatttgcagtacaaatgaaagaaagccccactctcctttcctgtttctgacaacctgaaatgtggaaaatataagtccactcttgggagagaagggcttttagacttctggcggcccagggtcacacaggagtaaaattagcctaaaggtcatgcagcactcaaggagcaacttctcttcctcatgcaggaagaagtacacttggcaaagatctttgccaagatttactcatcggggtacgagctc

SEQ ID NO: 103722 - DNA, 392 bp, Homo Sapiens
  misc_feature (89)..(97): n is a, c, g, or t
cgatgagtaaatcttggctgaggctgccgtgagccctgatcatgccactaccgtcccgcctggtccacaggagccagaccccgtctccnnnnnnnnngaaggtcctttcccacaatgtgttgtgtgagataggtgtctatgagatagctgatcttttattatataaactaaggtttggcaaactttcttcaagggccagatagtagatattttcagctttgtagacaagatggtctctgttgaaactgtgtgattctgtaacatgaaaatatttatagacaatttgcaaatgataggcttggctttgtcccagtaaaactttatttgcaaaatagcacgagccacattgccagtggcacaagattacgtcatcggggtactctagagcagcc

SEQ ID NO: 103723 - DNA, 551 bp, Homo Sapiens
  misc_feature (49)..(108): n is a, c, g, or t
gtgttcttgatgacccccgatgagtaaatcttgtgagacgttgggtagnnnnnnnnnnnnnnnnnnnnnnnnnnnnnnnnnnnnnnnnnnnnnnnnnnnnnnnnnnnnagaaaatggaacatagaacatttcaaacctgagaaatacataaggaaaatggaacatagaacatttcaaacctgagaaatacataaggaaatttgtagacagacactgctttctttaaaagaaagaaaacaggtgtctgcttatccctgtagccagaggatctacatcttctgggggagaaaaacaagggtggaaagtgtaattcaccaaatctcatctttcagcccccataaagacctcacaccctcctgctgctgtgggaatcaggaggattttgactaaggaaagtattttaatctcagtaacactgagacatccaacctgagaggaaagtgaggggcaatgaggcaggagttctcctttggtgtgggctcctgggagggctgttgccctgttgtgcaggaccagtagctcctcgggcaggagcttgtctctgaggaggg

SEQ ID NO: 103724 - DNA, 424 bp, Homo Sapiens
atgagtaaaattctggcaaaatttcatctcagagacacacaccctgaatgatatttggccaaatatcccaggcaccctatggtccagtcaaatgacacataaaatttaccatcataggaaggtaattactttactcaaagtctactgatttaaaggttaatctcatgtaaaaactacacagcaacatccagatgtgtttgatcaaatatccgaatactgtggcctagccaaactgacaaaaaattaaccatcaccaaaggtttcaccccataaattttctgctgttttctctctagtttacatgggattgataaactgaatcaggacctctctttatttatttatttagagatggggctttcactctgtcacccaagctgaagtacaagtggtgcaatcatagctccgtgcagcctcgaattcc

SEQ ID NO: 103725 - DNA, 620 bp, Homo Sapiens
atgagtaaaacttggcaagttcgtgtctttgcataagatagcttggggtattccgggtctttgtaattccatatgagttttaggactgttttttctatctctgtgaaggaatgtcacagaatgcagtctacatattgcatagaatctgtagattgcattgggtagcatggacattttaacaatattgattcttccaattcatgaacatgaaatatctttccattttttgaggtcttcttcaatctcttttatcagtgtttcctaattctgattatagagatctttcacatctttgatcaagttgattcctacgtatttcactttatttgtggctgttgtaaatgggattactttttgcatttccttctcagattgttcagtcagcatacaggaatgatactgattttggtatgttgattttacatcttgcaactttactaaatttgtttatcagttctaacagttttgatggcgtctctggatttttccaaatataagatcatatatctgcaaacaaggataatttgacttatcttcctgtttggatgcctttatttctttctgtggtctgattgtctagctaggactccagtactatattgacaatacagtgaaaagag

SEQ ID NO: 103726 - DNA, 519 bp, Homo Sapiens
tcagaggatccccgatgagtaaaacttggcaaatcacagtggggcaggtactctcaagccagaaatgccacaaagcagacacttttatttgacatccatgcaatgggaaaaagaactctgagcatcagataggagatcactggagagctggtgcaccagagcctacccacaatcagaagaaagtgacgggaggagacagctgattttcaacatctcatcaagcctcatgaatgccctaaatcaggggtcagcaaacgtcttctgtaataggccagacagtaaacattttaggcctggcaggctttaaactgtgcccttgtactgcgaaaccagccatcgatgatatgtaaactaacgactgtagctgagttccaacagaactttatttacaagcgttaaatgtatattttacataattttcatgtgtcatgaaacattattcttggtagattttgttttctccacccatttaaaaatatggaaactattcttggctctagggccaagatttactcatcg

SEQ ID NO: 103727 - DNA, 188 bp, Homo Sapiens
attatagagatcccccggcgtcatggctggaccggacaaatcccacggtgagccagcccaaacacaccatccatggaataaaaaaaggaactgctactccaatggtcagccctgtgagaaacgcatccttccatccagctaaaatctgcctgcgtccatcttgaatgctcaacaccagtccccatggt

SEQ ID NO: 103728 - DNA, 209 bp, Homo Sapiens
gggcggagggaaaggttcaggaaggtttcagcgtgctatcattagctcttgaggattgaataggaatttactaggggtggatgagggagaatattccaggcagatggaagagaggtagatacgaaggcacaaaggtatgtaggaaacaataagggaaattgtgtatttgctgggggagggctaaagatgaggattcaaggccaggagca

SEQ ID NO: 103729 - DNA, 142 bp, Homo Sapiens
cgaaattgagcggcgctgcatcaacgagaaggcctcattttcgatccccgtcacgcaacctgtcgtctttgaccagccagatgtgaagccgcgcacaccccacccgtatcgtgtggggctgtatatgttggcccatgatgca

SEQ ID NO: 103730 - DNA, 170 bp, Homo Sapiens
ataatacaaggttgttgttttaaaatattaaacaaataaatgatatagacttccacaactcactttctggagataaccactattgaaccactatacatgaaaatattcatgtattctcttccagggtatttttgttcctcaaacttttaattgcatcaataaatatgtgg

SEQ ID NO: 103731 - DNA, 103 bp, Homo Sapiens
cttgagtatgtgcatcccctacaagatgatcgtcttgctcctggcagagaccacgtatggatgacatctgaacagaaccttggggtgccagcattagctctgg

SEQ ID NO: 103732 - DNA, 225 bp, Homo Sapiens
tgtaagggaagctattagtctaaaaacctaaaatatttactttattgccctttcaaaaatgtttgctgactcctgatctagcaggtcaccttcattggcactgtaaactcaatctagacaataagaacttgaaaactagttagtgcctctatctgtggttttccacaggaatttttctatttaaggaaaatcttttcaggagagccctcctcatggcagccaaaa

SEQ ID NO: 103733 - DNA, 348 bp, Homo Sapiens
  misc_feature (170)..(185): n is a, c, g, or t
ggacgatgtcagcagggagaagagctgggaatggggctcgcagttcgcccacggaggatatccagaaaccgagtcgggtaggcggtggggctggttgaatatccaccctcgggtatggacaggtgtgaggagtgtctaaggagctcgggggtgacagcccagctctactnnnnnnnnnnnnnnnnttagccgggcgtggtgacacaagctgtcccctgacacagagaggcagaggcaccctctgcaggataacaagcaccctgtgcgctgctgggctttgcttgtttctctaccctgagtgaagcctggagacccttcctcaccggtgcctctgcagtgcctgggagg

SEQ ID NO: 103734 - DNA, 528 bp, Homo Sapiens
aaagcactacaaatacacacttgcaaatagtactaaaagagtatttctaaactgctctatcaaaaggaaggttcaactctgtgagttgaatgcacacatcacaaggaagtttcttggaatgcttctgtccagtttgtatgtgaacatattcccgtttccaacgaaggctcctctccactaaaaatacccacttgcagattgaacaaaaagagtgtttccaaattgctctatcaaaaggaaggttgaactctctgatttgagtgcacacatcacaaagaagtttctgagaattcaactgtctaatttttatatgaagatatagccttttccaatgaagacttcaaattactctaattagctacttgcagattctacaaaaagagtgtttcaaaactgctctatcaaaaggaaggttcaactctgtgagttgaatggacagatcacaatgaagtttctgagaattattctgtctagttttcatgtgaatatattcccgttttcaacgaaggcttcaaagcactccaaata

SEQ ID NO: 103735 - DNA, 310 bp, Homo Sapiens
tacccgcacgttaagcctgggcgaggagaaagggaggaggaaagggaagcattggcaagatatagggattctgaaggcaagcaagttcctcggagcatcctgtctctcctctgagacctcagccagggcttcccgggcagatgggagcactgccctgggagagacaccccacccgaagaggccctgccatgccagcttcccatacccgtgcgagtggcccatggccagcaagacatgctgcctgtgactctttggcaaatcaggacaccatattctctggggctctaccccactcaaggacctgcaggtc

SEQ ID NO: 103736 - DNA, 234 bp, Homo Sapiens
cgactggttgcaacatgcccccattcaaccagtgccgggacaataatggcataaccgaccctcccggtatctataagacaacgccagcaacgtaggaccagcttgggtgagcgtccgcctggggcgtggttgaagcacgccggcccaatgctcacatagttatcaaactgcgcccgccatagaagtgaccaataaacgataattgtttgaagcaaacccgctacgggccgagct

SEQ ID NO: 103737 - DNA, 156 bp, Homo Sapiens
caatgataggaaaagaaacatcattaggaggggccgtgaaggaaaacctggctttgcaggaagacagtttccacccggctctgctctggcaagcttggcgcagtctaggctcaagccggtcactaccgtctatgcctcatctttctcaactatgaa

SEQ ID NO: 103738 - DNA, 477 bp, Homo Sapiens
gcatgagttgctggttcaggagtcccaacgactaggaatcgacattcttgccgtcggggtagcccaagaggtggcgtcggtccgtcagtacggctgggacaaagatgtcatcgtccttaatccgtggcgccctggcgacgaagtagccaccggcctgttgaatgatcccaaggtcattacgacgatttcgcggcgtgaggacgtcgctgcggtgcgtgacctcgcgccgagcgcgtcgattttggtcgaagtcgagacgtcgatgcatcggcatggtgttccggccgacgaggtggcggctttagatcttgacggttttgacctgagaggctggactatccacttgccgtcgggggcatctctggacgaggcccgtgagatggctcggattgttaagcaacatccgttggcttcacgaggtatctggttttctcatctcagttgtgacgattacatcgcgttatcgaaagaactgga

SEQ ID NO: 103739 - DNA, 470 bp, Homo Sapiens
tcgctgactactgcggaagggggcggggagggttcttcaggaggtggggccgagagctgtcgcacatccagattggagacattgtaggtatagctgtgctgagtgggtggctctggggcggggctctcctgtttcaggaggctcaagatgtctagttggctcttcagggtatagccaggcaacactgcatcaaactgcttcagccaatcagggccagtgtctgggctcttgccttccagacccttttccttcccaccaggaccctcagcttcccccttctttggctcagtgcctgcccgggcggggctctctgggaacagcacctcataggagttggggatcttcatgctcagcagctccgccactgccaccatcacgccattcaggttcttggctgcagcagcagagactgtgagcatgactgacacctcacttcctttgcccttttcccaagttgtgacaggcagcag

SEQ ID NO: 103740 - DNA, 486 bp, Homo Sapiens
gtgagtggagccgacgctggggcaggaggtgtggtggggacagagatggggagtgaagatgacaatggaactgagactgtagaggacacaggactatcaaggggagaggagttgggaattggcattggagaagaggctggcccagggagtgaggatggcacgtggagaggagaagagatggtcaagggggcagctccgggggctgaagcactgacttcaggtgaaggactgtggaccagcttgagaagaggcctcaccagagtgggtgtgggcatgggggctcgagcagtacccagagtaggtgtgggtagccggccaggggttaacgtggggcgtggattcaacacagctggaagcccagagctcggaggccggggtgctggggccaatggaggaacaggagtcagtccatcccgaggggcttgtctcactacaatcttcacacgcctgtattattcaccatggttggtggcatccccagggggg

SEQ ID NO: 103741 - DNA, 253 bp, Homo Sapiens
tctatagaagacccctgtcaagtgaggcctccccagcttcccactgcagtgcctcctggacaagctgcctcagcagctctgagcactcgctggcttcgtcccccagggcctcctgcagccttctcagaccggccaggtacttgctttccacctggcagtttctggcttggaggtaggcgcacttcgtcagaaaggccttctccttctcagccacctttctccagatctttgtgacctggtggatctcggagtt

SEQ ID NO: 103742 - DNA, 410 bp, Homo Sapiens
agcaggagtcaggagatggaatcgtggaagcaggaggatgtgaggagagagtcacaagtccagggatgccggtgcctccaggagctggaaaaggcaagaagacgcatgctctcctagagcctctggaggaaccagccctgcccacattgtgatgttaacccatgaaactgaggctggacttctggcctccagaacacatttattgcaagacaataaatgtgtgttgttttcagccatgaagtttggggtaatttgttatggcagacccaggcaactcctgcaggtggcattcccgttcacacctgtgtatggtgcctgccagcacagactgtttacctactcaatggctgatttgattaggcacagtttctcaatcatgataaaaccaatcgcttggtgaattatgcgcc

SEQ ID NO: 103743 - DNA, 349 bp, Homo Sapiens
atgactacgggggaagccgcccccataatccaatcacttcccatcaggttcctcccttttgtgtgttggtatgggcagttgtgtacattgatttgtctagtataaaatgtgtattacatgattgttcagcctatattatgtatagttcaaagaactgctaaactgattttactgttacttggaaaagtttgcaggggtgtagtgaagagtgagttttgacttactttgcacactattaaggtggggaaggaatcatgttattgtacaaaaatgaaggcaatctttcccttctttaaaccttagtcctgatgtttttttaagacaacatgattccttcccccgtcgtcag

SEQ ID NO: 103744 - DNA, 560 bp, Homo Sapiens
ataaaagacacaaatattcattacatgcttaacgtgtacacaagttaattcatcacctcctactggctctgcaaacatacctctcaccattctccagtggcccaagtcggaatcctagaagtcatcttcacattttccagtggtttttactatgtctaatagggctctgggtcttctttaagatctctttagcaagcaaaagttaagatctccttaacttttgtattacctgtgtctcccagcctgcattcacaaccttccccaactgacaaggaccagattgagcacttctggctccgcaaatgtgctgtgcccttcccggacctcaggccttcacgccttctgcttatttcaaaatgcccttcagaatcccttcccctgcttacctcctacttgcccttcagaatccaactcagacataactcccgcaaagaaactgaacttaactcttgaggctgcatcaagtttgtgccttccctgcaatgatgccatagctcaggtgacttacattttctaagtttatctttatttatctggctcccataaagactaagcttttt

SEQ ID NO: 103745 - DNA, 456 bp, Homo Sapiens
ggcactagcagcgggtcgggccccgggggctgttcttggctccgctccaggcccgacactttagggaccacggagagttttgcttcacagttcccattgaaggcgccgtgggggcccgaggctttgctggttgagacagtaaaggatgggtcgaggtcatcatcggagaccctctcgtccagatcactttccgcgtcacatatgtatccagcttccagagagtgacgggaggacgcctcttttcttctccgcttattgggccattttcgggcccgatccccagggggccggccaggctctcgatcagagctgtcccctggctccccggtggccccactggagcccccccttttccgcttcccagaatgcttcagccgatgttccagtcgctctgggggctgaagagatgcatccttctgcaaggcctcgagggtggcgaagctggcgatggcgaag

SEQ ID NO: 103746 - DNA, 139 bp, Homo Sapiens
ttcttggagttgtgggggattgctttggaaaccgtgatcatcataacattagtctagcatcatagagacggtggtcataagaaaataacacccagggaggcgctaggactttcagagaaagtggtcacttacagtatat

SEQ ID NO: 103747 - DNA, 137 bp, Homo Sapiens
ctccaatcctcagtgcccctgtcatgcttctaccatggacctcacccgttgaacgaggtcctctcaatgtccatttctctctgttcctagaccccgagcgtcaaagccagcatttgcccacacccttcccccgagtc

SEQ ID NO: 103748 - DNA, 164 bp, Homo Sapiens
tggtaaaggaccactgaagttcagtgaagttcagaatttctgttaatcaaaatagtatgaattgagctggaaggacagccactgtggtggacacagcaaagggtgcagggaattccaacaagttgatgagaacaagactcatcagcagaaagacgaaagatgtg

SEQ ID NO: 103749 - DNA, 342 bp, Homo Sapiens
tcctgtatgactaaagtttggaggtgctgtgttgggtccttctgtcatttgggcacgtctaagttcagaaaaggcctgttgtagactaagggatgatgcacagtgagacaagttcattccagggctctgagctgtagaggcagcaactgtatctgttatttcactggggaaaacttttgattctcgtaatcggctttctggcacaggactcactataaaccgccttcccgcagaatgaacaacttgagttaaagaactggtaggaatgcctatttgctgtggcatggaagacacaagaattggttgtttgaactctccttccaatttctgagaacctgaaaa

SEQ ID NO: 103750 - DNA, 310 bp, Homo Sapiens
gtatggtggatcatctgatcgggtgtgtggagaacaggttcagttcatcagggcctacgctccgggaaggggcccccagctgtggctctagcaatgccgggctgtgtttgcagctgtccgagtctccatccgcctttagaaaaccagccacttcttttcataagcactgacagggcccagcccacagccacaggtgcgatcagtgcctcacgcagggcaaactgcactgaaacccatgtttcacacgccgcgcagagttgaacagtgagttcccccgaaagcccacgagcagccaggacatgccctcccc

SEQ ID NO: 103751 - DNA, 275 bp, Homo Sapiens
attcctgccaggtaccaccacggatgcactatagcttgcaacacatcaaagttataaagtacaacgatggaaaatgccacttttctctttgtgcaatgcactgtgattatgataccaaagcatattgtttatattccaacttcttacagtgttttagcaaaacatcttcccattttaacctacaacatttcctccacccttttgtcttcaacatcctaggcacagacatatccaacaccaaattcaaatgaaagacatcaagcaatattcaccat

SEQ ID NO: 103752 - DNA, 381 bp, Homo Sapiens
  misc_feature (371)..(371): n is a, c, g, or t
atgaaggcaaaagacacattaatgcagtcttcaaggagctaagaccttgatataggatgagggcagagaggaagggatgtctttggagaaacttttgatgtcttgcaggcacgagatgagttcacaagcaatcagtgctggaaggatgtgcaaaataaaagttaagagaagctgaggatatagaaggcatcctgaaagtaaaacagctgaggaccacaaagcatatcatggaaaatctgttaagcaggggaggtcaggtaggagaggaaagaatagtccctcccaaaggaagcagttaaataagtctgtgggaggtcagtggtaaaaggaagtgggagtgaagtgaacagagagtgcagctaggccttgcnccgtagtcag

SEQ ID NO: 103753 - DNA, 425 bp, Homo Sapiens
ctgactacggaggaagcaagaggtcttcaagaacaaggtttacagactaccagctgagggtattacaggacttcttagatgccaatgcttacccaaaggatgatgaatttgagcaactccctaatttactgaaccttccaacccgagtgatagtggtgtggtttcagaatgcccgacagaaggccaggaagaattatgagaatcagggagagggcaaagatggagagcggcgtgagcttacaaatgatagatacattcgaacaagcaacttgaactaccagtgcaaaaaatgtagcctggtgtttcagcgcatctttgatctcatcaagcaccagaagaagctgtgttacaaggatgaggatgaggaggggcaggacgacagccaaaatgaggattccatggatgccatggaaattctgacgcct

SEQ ID NO: 103754 - DNA, 361 bp, Homo Sapiens
tgctgagggaaacatctgtcacttcttcaagatgaataacacaccaacaccattattaatgtattcttaagtggagtttagaatccacttcattctaaccattatgacatacatatttgctgacttgatcggaccccagagacctggcactgcatggctgctgcacaaactgggtgacccctgatccccaagcatgtagcaaaaggtcaagttcacagcagcctgacaaacagcaagagaatacacccaccaaccccaatgagagagacctgacgccagtgaaggccagtgaggtgagtgatgcctgctactgctggtgggcgtgtcaggccattattttggaaagtcatcagcagggtac

SEQ ID NO: 103755 - DNA, 318 bp, Homo Sapiens
cagagccagggaaaagttgcgtctagagcagttacgttcaaaatcctctggatgggcaaggtacaaagttgaaaaggtagaggaagaagtcagtttcccctctttgctcctcgggcagccagcccttctccccagagacaagcgactgtcatcaactccgtatgtccctttcctaagatacgtgtgtgcctttcctttaaaaacacgtaccctgtgatagcatatgccacagaatcctgtgtgctgtgtttttcattgcttggagatcacactggagcgggatttctccccctccgtcggcactgttgacatctgggg

SEQ ID NO: 103756 - DNA, 359 bp, Homo Sapiens
gccccagccagcccccacctggtgctgagcagttgcagcaggccctggcacaactggacgagaaagacccctgctttgagttccggcagcagcagctcactgtgcaccgtgtgcatgtcactttcctgccccatgaaccgccacccccccggcctcacgatgccacccttgtggcccagctgtccatggaccggctgcagatgttggaagccctgtgcaggcactggcctggccccatgagcctggccttgtacctgacagacgcagaagctcagcagttcctgcatttcgtcgaggcctcaccagtgcttgctgcccggcaggacgtggcctaccatgtggtgtaccgtgaggggccc

SEQ ID NO: 103757 - DNA, 285 bp, Homo Sapiens
tataacccatacaagacgatgaggcctgcgacgccaatcgccgtccagcccagagacaccaacccggcggcaccgtcgctgtcagccttcgcgcgcgcatgcgcccgatcgagcattaatgccccacccgaaacgacggagacaatgagaacggtggccacgacggtgacgacggacaccagccctagcgaagtccaatcaatattcatgctgcagtccctccggctacggcggagcccttacggacgcccacctgggtggagtcgttaacgttcctatggtcaa

SEQ ID NO: 103758 - DNA, 192 bp, Homo Sapiens
atccccacatggacctaacagacatttatagaatattttattcaacagctgcagaatgcacagtcttctcattctccaggattgaccatatgttaggctacaaaacaagtctcaacaattttgtttaaattgaaaacatatcaggtataatttctgaccacaatggaataaaactacaaatcaaaacaaagg

SEQ ID NO: 103759 - DNA, 476 bp, Homo Sapiens
atcttgagagagctgacccataaaaagacccgccctaccattatgggaagccgcagagctcaaagtgttccagcagggcctggaaattctcttctgtttctaagattctgccatttgattctaaaattctaaggactctttattctttattgtttgctttaattaacttttgaccatgtaatacatcgacatgattcaaaatacaaaaagcacaaaaaagtatacaaagaaaggctcctcactatctttccagacagattttaagcacatgcacatgtacatatgcatttcctttttcttttttctttaaacacaaacagtcgcctactccaccctctgttccgcaccttaacagaattcttggagctccttcttcactgcattaaaacatccctgttggtatccatcccttgctcctgctccctggtctggatattccctgattccctaggcgtctagccagttccctgttgata

SEQ ID NO: 103760 - DNA, 202 bp, Homo Sapiens
tatgcgaacgccgggccccgaccggtttcctccctcgaaagttcaaactccagaacccttccagcctccacttctctctgttgggctctcatcggtttaggtggtagaaggcatatgaccataagagttctaactgtaactgactgaagatcaattgaggtggcttaccaccgaccgaccagccccagtacatggcttcaca

SEQ ID NO: 103761 - DNA, 358 bp, Homo Sapiens
tttatgagatcgccggtcttacagaaggttacacactacacgcttccatgtacataacatcctccatatgacaaaactagagatggagaacacagaagggatttgtggatgccaaggacacacgggacaatgtgtggggatgaggctcaaaaggagaatcacaaggcaggtgagttccactcggtgacgacacagttctatggcaatggcaggcgtggagatggttacaagatactacacatcagatcaccctgcgtagaatgcacacacagcgcatacagacactgaaagctgcataaggtccatagtctaacaaggtccgtagtcttaacaatagccaaccgaagccaatgccctg

SEQ ID NO: 103762 - DNA, 683 bp, Homo Sapiens
caagaacttcaagtcacagcgctggcagtcactcctcaacttcaacagccagagacgcctgctcctgacaggaactcccttgcagaacagcctcatggagctgtggtccttgatgcactttttgatgccccatgtcttccagtctcatcgcgagttcaaggagtggttctctaatcccctaactggcatgattgagggcagccaagagtataatgaaggtctagtcaaacgcctccacaaggttttgaggccttttttactgcgccgagttaaggtggatgttgagaagcagatgcccaaaaagtacgagcatgttatccgctgcaggctctccaagcgtcaacgctgtctctatgatgacttcatggcacagaccacaactaaggagacactagccacaggccatttcatgagcgtcatcaacattttgatgcagctgagaaaagtttgcaatcatccaaatctgttcgaccctcgaccggttacctcccctttcatcaccccaggcatctgcttcagcaccgcctctctggtgctaagggccacggatgtccatcccctccagcggatagacatgggtcgatttgaccttattggcctggaaggtcgtgtctctcgatatgaggcagacacatttctgccccggcaccgcctctctcgccgggtactgttagaagtggcta

SEQ ID NO: 103763 - DNA, 290 bp, Homo Sapiens
actgtaaagtctctggagtcaagtttacaagttagtctgatgagccgtcagccgcaagtgatgttaaccaacacctttgacctgtcctgtgtcgtgagggccggttactctgacctcaaggtgccactcactgtgacgtggcagttccagccagctagctctcacatcttccaccagcttattcgaatcacccacaatggcactattgaatgggggaatttcctatcccggttccaaaagaagacgaaagtgtcgcagtctttatttcgttcacaactcctagtccatga

SEQ ID NO: 103764 - DNA, 613 bp, Homo Sapiens
agatcccctgtatgcgaccgccggtcagggttctgcatcctgctgtttcggggttctgcatcccgctgtttcagggttctgcatcccgctgtttcagggtgcacgtttccttctcgggcttggctccttgggtcatgtctccagcctgacgttccaactgagaggtggtgaggcaggaaggggtgtctctgcatcaggaaagcgatagggagctcaggaaacccagtgtctctcattggctggaagagtattacacggctacctctggttgcccagatgcctggggcagggtctgtgctcgagaaaataaggctctgtgagtaagggtctcccacagccagatcaacaaggagctgtaggctgtaagtcctggttcctgactgagggaggcctaaaaagtggggctgttggggctttatatttagcacccactttttaccctctcaaattccagaccagttgagagagccgcacacactgtagataggcaagtggagatcagatacaggctctgttttagataaaagcaactggagaaagtggctgactggccaagcgggtttgctaaatcctttatcccaaattagacaaactttccaccctggtaacgagc

SEQ ID NO: 103765 - DNA, 542 bp, Homo Sapiens
ctttcaccaggtgcagacgaaaaccccagcctcgccagccttggagcacactcttatcttccctcaccagagcccggcagggccatgcagggagaaccacaaagacccagagaatcaagacattgcagccagaaggaaaacagagctcttctcctccacacagaatcccaaccaaactagagaatgctgctaaaatagctatcctttttgtttcccctaggacattaacacaagaattttatgaacaaactgggatagcatggtgtgtttaatgttcctgaactagagctgaaggtttctgtcttccccacatggcttctgagatccccaagtggcatctctctaatgacgagagaatgttctcgcagatgtgcagatgtcgggctgtaggggggccacagaagggacagagtgacttgcatttgtttattttgtaaccatgatggaaaccatgtggagctctggctgcccggtggggctggtgggcagatccaagcacagtggtgactgtctttgctggtggaagggtaccgagctcatca

SEQ ID NO: 103766 - DNA, 118 bp, Homo Sapiens
ctcttctccgccccgcgcgcctggtggatgctgcgttatttcggtgtcgagcgggtttcaattctggcaggcggattcgcaggctggcagcgcgatgaactgccgcttgggggatcta

SEQ ID NO: 103767 - DNA, 684 bp, Homo Sapiens
cacgaggcttgtcgctctccagaaggagctgggggaaggtaagcttggagcaaatcaggaatgtctttacttcctccaaggacagtgaagctgcagcaacgatgtctctcccgcctccaccctcttcagatctaagaggaaaaattggtcatctcctgtctttggggcccagggctcgcacaaatgccatctcctagtccccagccacagcggtgattcaggccatttactcagatccacgttaatgagttttttctgtcacctaattagttcacagagaactcagccttgagaggaaagaaataagaacgggttgggaaaaggcagaaggaagtcagactggcatgtcacaacaaaagatagaacccagcaccacatggggtccccccagacccagtacttcttccccggctatggggacctctgaaagcagaaagggaggtgttcaggtgcactatcccccagaacctcaggcaagcagatgaagctgggagtggggccctaaccttaaggcccaagtcagggacaggcccctgcccataactccatgttatcgcaaaaggccttggctctcactgcatttccactgaggccaaacccaccacctgccggtgggcgtcccctttcaaacagagctgggggaggaagcagatggccccaggtgaggcccatctgtccgtgccc

SEQ ID NO: 103768 - DNA, 567 bp, Homo Sapiens
ctcagcctcccgagtggctgggattataggcgtgagccaccgcgcctggctgggaagtcttttttaatggcaataaccaaatgaactctcttgaccttgctgcctctgcaggcactgccccgccccggcccttccactctagaggaaagcacctggcatttagcatctttacacacaggaaacaacagatatgctcagggacttttcctctaacttgtaaccaaggatggctgttgggctcggcagccgtcaggctgagagtgactcaacttaaaaggtttcattgttgatatctgccctgagcattcccctttggacttggagttccaggatgtcttgtgtctgtgcttcaacatatgaagccccttgttgcctgttcttaaagtagactgcattatcaacggtgtcttaaattaatagcttctctctactgactattcacttgtcacagctgacatgaaggttctcagtcctgagtgcctattaatgaagctcacagatagagtgcagaaaccctttgcaagatctgttttgccagcttgctggtgtcctggcatgaaggtctcc

SEQ ID NO: 103769 - DNA, 289 bp, Homo Sapiens
ggttgtccttagtggacaggtcctatttctaaaataacaacctaagtaatgacatctttgtgtttttgttttaacttttctggttccctgaaggaggctgtcaaggtttgaaactttttgtcgctcctctatcttcccacagcctatctccctgggagagggaccttctcttgcacctaatctctttctaccacgcagttcccgcagttcctccacgcgggtggggtctctgctttctccccacctccggtctctcctaacctgttctttccttccagcacccttcgct

SEQ ID NO: 103770 - DNA, 399 bp, Homo Sapiens
cccctgcttttgcctgtttcaggggcctggtacccttcctaacttctgaccctcagcctctttctttctaggtcctatggtggtctccttttccattcatgactcttcccctttggctagcagacgtttaaacatttcccttaggtctctcctctgcttttgctgaggttctcaggcctctaggaaggcagaaggaggattcaggattggcagagagagcacctccatatctacctttttgtctgtagagcaggaggagtggcatctggaatcgattcatggtcttagcaaccaccagctccttaaagggtctcaagttcctagactagcctgtgtgtgtgcatgtccagggtgcggtggcatgtctccataactcaaccttgcaaagaagcctcttgc

SEQ ID NO: 103771 - DNA, 333 bp, Homo Sapiens
gagagagaaggtctgatgcagctgtccctcatatggcaggactacatcctttttcaaaatttccaactattatacccctatcatacaaggtccaagctggataactagaggcatatagctatatcaaactaatcttccagtgattaatgtgtcgatcctcaagtagacagaagagacaaatattcctcttcctataggcaaatatagaagaaacaaatttaactttttcctgagctaatgagaccaaggggggtgaagtaaaaaatttccccaatcagcaacaagaacacgtaacgggaattatgactccccagtcctccaatttagcatgtg

SEQ ID NO: 103772 - DNA, 507 bp, Homo Sapiens
ccaggatgttgagagtttcattcattatcgcatgccccctaccccggccccacaatacctactgcgtgggatctgacacgtggcggctggtcaatgaatgaatgaatgaatggtcacaccatctgaggctctgcactgactagccctgaaagctggaagcaccataagtgacaagtcctacattgaggggcctctgttttaccaataagccaagacctaagctcaacaacactgaaagggtggccaatacccaggacagcctgtgggaattacacagaaagggagattcccagggactgggggcccaagctaaacactgaaaaatgcatctgtaggctcaaagaggaaaagcccatgtctgtctgtattgcccaccactctctcccagcacccagaactgccccaggacagagagcacttgacacaagttggttagattaatgaatgatttagagttcagtggtccccaacctttttggcacaagagactggttgcattgaagacaa

SEQ ID NO: 103773 - DNA, 340 bp, Homo Sapiens
gatgactctttatgctaccaccgccctgactattgggggctgggcagaactacgactgacatagtgaatcccatggcctcggaacaggcaacaacctgtggggtatgtgaagcccagaggggtatgttcgggagggagatcgcgagtgtgtgtgaaaaggggtgctgtctctaaggattggagcatgggagtgcgagacccaagttaagagtcccgagatcgcagagttaagagacctgacaactggtggtggagtgggagggcaaggcgcgatggactaggaagaggcactggtgggttggaggcgcctccgactggagcaactggaacaagatggctg

SEQ ID NO: 103774 - DNA, 649 bp, Homo Sapiens
  misc_feature (571)..(571): n is a, c, g, or t
tgggctgtgaatgagtgtgaatcagcatgagtgccgcttcctcggcccccacttcaggagaatgcacccacatccctgccatctgatgaacatggaatggtttttcttacctgggaaagaatagctggagcctccgaccacagggttttcccaaggtggggaaaccaagccgggttcttagacaagttaagtacagatgtccacaagcactgcagctggagacagtgctgagtggacgtcaggtgctgacgaccacaagacacacacgcccagcaagcgtctgatgggggtctcggatgcagataaagatggagaagtcctactctaaagaagccaggaggcccacgtggaaaatctgcctttcacactgccccatggaaggaggaatgtatttgttccagaagaaagagaggaatcatgacctggataaagcagcgagttaagaatgccagcttgacctcagaatgaaagcttctatttagtttgtttttaaaggtaggatctcactacgttgcccaggctggagggcaatggctattcacaggtgcaatcccactactgagcagcgtgngagttttgacctgctccgcttctgaccagggcaggtttacctctccttaggcgactggtggtcccctgctcccagaaa

SEQ ID NO: 103775 - DNA, 127 bp, Homo Sapiens
ctgtgacacattgttctgcgaagaaggtggaagggcgacagaggtgtgtggtcctgcaaagtaggggcccggccgatgcctccctcccccagaaactcatttatcaccttgatggttggggatcttc

SEQ ID NO: 103776 - DNA, 595 bp, Homo Sapiens
tctcttcctctacagcaatgcttatgttaggcttttcgaacaagccttcctcatgcggatccctgtgtgtgctcccgggacgggacgcgcaggcccttcggggttgtgtaggtgtcatctgaggatccagttgctcttccctgcctgaggagcctgagcttttatcagagctcaccgccctctcccacacagtctctttgatcagtatttacacaatgttaatgagaatggaaaaactccatgcttctttcttggtgtgaaagatccagcaaatgagatttctaaaacttgagttttaaaagttttcctgcagtttaggaatatcgtctactttctaataattccaagtgaattttgagtttaggagggcatgtgctttttctaagtggaaaaaattttatttggcctttattaaaaaatgggtaggttcctggtcctggtgatggtggttttaacaatatggcataagagaataagaagcctagtgatttgaatgaactggaatatttctgtggttcaaacatgatttcccatggccatcatccttacccttcccacaggtgggcactgtgagaagcgtgtctgctgatgtcaa

SEQ ID NO: 103777 - DNA, 280 bp, Homo Sapiens
caagccagatcgtcgtcgtcaccaatgtggaagccgatcacctagacaattggggtaccccgcaggcgtacttcgacggcttcgtgtcgatggcaacccgtcccgaggtgcgctacgtcgcgactaatgccgaccatccgggggcaaccgaattggcctgccgactggaaagcaccggcacagtgcgagtcgttacttacggagaatctgagcaagctgaggtcaggctcgttgaccttgacttaaatgggacgacggcttcggcgactctcgttcatgg

SEQ ID NO: 103778 - DNA, 317 bp, Homo Sapiens
aggattcccctcacccatcagtgtgaagggttggatggcttatttatgtccaaattcctgcggcaggtgttcagtgtcgtctggggtgaggttggagggaacctgcctggtgtgggagctggggtcatgatgggagagggggctgactacagggaccacacacagacagcacatttgtcctggcaggttggctggtctgccaaatgcatgtaccatctccaaaggaggtctcagggggacaaaatcttctcagaggacactactgggggtctgtgaggtggtctggggaatagcatcctttttttgagatggggtct

SEQ ID NO: 103779 - DNA, 644 bp, Homo Sapiens
attataaaataaagactaaataatcttacaagccttagaaggctcctgtaagaattgagtaatgtgactttggagagattataaaacctccctcgctaatgaaacccggggaggctttgtcatcatgatcaccctttatccccatccatgctgccggctgaccactgttccagagttccatggctttgccaggcaggaagctgatgcgaacttacaacctgtcaatgtggttttagaaagttgttctacccgcttccaatgagaagcataaacaccaggggtttcacaagccactcaggctacatggcctttggtctgagttgaaggagcctcaggggatgcatgggaaggtgccagcccacatggctgtcaatgcccagctgagcttctggcctctgcagctgggaagtggggatgttctgggaatggaggaggtgcttggcagtcctggaccaaactcagaactgggtgccccatgaaggggctctggggcacgtccttgcctgaacacttctctactctcttcctgcccttggctgggggctcaaccaggggaccttcaaagccatttcccttgagatacttacatgcaacttcaacgggcaggttagtgtcaatatctcttattagccactgtgtatctt

SEQ ID NO: 103780 - DNA, 424 bp, Homo Sapiens
gtggcgccgccgacttaaggatccccgtgtcctccccctttttgtgaggcacggggagggaggaagtgatgataggggggactggaaggccaacgctatggctgggagttggacaggagacaggtgagagtgttgtatatagcacaaagcacaaagaggtgtgtcaaagttatgcaggcaggacaatcagacgtgtcacatgaaagccaagaggacacagcaacagagacagataaaagttaaaacacctgggttcaaggctcagcccccacagctcgtttaccatatggactcaagcaagtccttttgtgtgtaataaacctcaatttccttgaaaagaaatacaaaaggatatcggtatctctgcttcttatcatgaagatggtctcaaaatcagaagaaagaatgccatccacacttgttt

SEQ ID NO: 103781 - DNA, 451 bp, Homo Sapiens
  misc_feature (46)..(84): n is a, c, g, or t
tccggtcatcccccttcggtgtacatcccccttcgtgggtaatagnnnnnnnnnnnnnnnnnnnnnnnnnnnnnnnnnnnnnnngctagagggacctgtcttcgggcctggcatggctgattctttctcatcgtacacaactacagcctttgagccctaagagaaatagcttaagagaactagctcaaaaacaataaagagaaaatagccccactattcaattgtattcaatgaatagatatagaaaactaggactggatgtggttactaattacttcaaaacaattctaattactaaaactaaaagaatgttccagaaagcgaaataacttccaaagaaacaagcagtttcaaagaaaactctaagccatttttcatcaagccatcttttaaaatgaaatatgaaagcaaatattctttttctaaattctattcagtatcattagagtga

SEQ ID NO: 103782 - DNA, 533 bp, Homo Sapiens
gtgtccatcccccttcgtgtgtccatcccccttcgagtgtccatcccccttcgtgtgtccatcccccttcgtgtgtccatcccccttcgtgtgtccatcccccttcgggtgtccatcccccttcgtgtgtccatcccccttcgtagttgagggctggggcacatcacttattttctctgagcctccgttttctcccctgtaatataacaatactcacaaaggtaagtgtgcctatggaaggagttcatttattcacgcaacagctatttattgagcatctactttgtgccagaccctgctctagacaccagagatgccgcagcaaacaaaatggagaaaagtcctttccctcgtggagcttacattctagtaaagggaagcaggcagtaaattaatcaaaaactacaatatgcaggatgtccacgcgtgaatgctatgggaaaagaacacagaggagaagacaattcgtgctagacaaagcacacatgaatttggctgtttagacttttctacaggacccattgctcatgtcc

SEQ ID NO: 103783 - DNA, 402 bp, Homo Sapiens
gggcacccgggtcattcccctttggggtggggcgggcagtttcttctataaacctcccatccaacaatagaagaaatcgtggctatggaattgcaagggcatctggagggagactggagaccggcaaagggatcctaaggaaaggaggggagggtcaatgaggaacttgagagtgttttatttggaacaaccacaaagagctgggcagggtcaggcaaaacaaaaatgtaattgaagggaaagaaagatgagactctaggctcttgaggctgcctgactgttctccctctgcctcccagaggtggtagcaaatgaaacaccaccagtccaggctgtttttcgagctgacaccaaacgattgaagctgttgaaacaggaccggcggcttcagggacagctgga

SEQ ID NO: 103784 - DNA, 324 bp, Homo Sapiens
gatctgtagatgcttgaactcaatctgtccataaatgagctcatccatctgccctcccaaacctcccaccttccttttactgagtagcaccagatcctcccacaagactgggcactgggcttgatgtttgcctctccccattcaatcaactcacagagattctcctcctcaaccgccatacaggggggcatcccccttcaagcatttacagatcattgaaggggaaaagtgagcttgaaccctgcatttgaagttcacaaaagagaaagagcacaatgaattgagttctgggagactttcccatgtggatagtaactgcaccgg

SEQ ID NO: 103785 - DNA, 121 bp, Homo Sapiens
ctcggtaccccaattacacccctagagaatacccaagagaaattttaaaaaatgtgtccacacaaaagcctttgggttatttagcagggtactgtttattttcaaatttcttgttatctag

SEQ ID NO: 103786 - DNA, 172 bp, Homo Sapiens
agctcggcacccctagtgccactactctggtgaccgaagcagcactgcgctgtcagtcctggcaatgctgtttgattcccgtcccatcggcgggtcggtgcaactagccaagagctggcacaagacatgtcggagcggctcaacattgcaaccacgttgcaaatgcatttgg

SEQ ID NO: 103787 - DNA, 135 bp, Homo Sapiens
accagaaacatgtactcgactgctcgtgggcacatctctgtcgagtgcgcctcgatgagctctgttcctgtcaaccaaaccttgaacgaggatggatctcgcatcaaagcctgggtccctggggggggcagctcg

SEQ ID NO: 103788 - DNA, 492 bp, Homo Sapiens
cacccctccactcccactcctcaaagaaccagtgggatatatattagttctgttctagattactacttatggactatttcattgctttataaaagtcgttaggctctctttctagcgtgttgaaagggttaataggggttgcttcaatggctagaaaaaggtatgcaattcaaataactgctttccaaaagaacttctaacatgtacccggtgtatatggtggtggtaataccacaggctttctgggtcaggcccactttgccacttctccatttaagcccgttacttaacctctctgtgctgtttcctcctgggtaagtgagggtgatggcagtacctcccccaaaaggttattaggaaaattaagcaggttaatactgtatatgtaaaacacattaaacaatgtctggtgcaaagttaagtgcttaataagcattagtgatgaccatgatgcagcaaaattcatttcttttttccaaaatgaaaagaaga

SEQ ID NO: 103789 - DNA, 154 bp, Homo Sapiens
tcccttgggtggcccaagcctctggtctcagcagccagacactgggttgcaataaggcagggaaaacaacctcaaattccttgaaagtctaaaccctcagccagtgctttaccagcaggttaagatctggcccaagttcagaatgggggccgag

SEQ ID NO: 103790 - DNA, 156 bp, Homo Sapiens
cctgggccatggactggtactggtccgtagcctgttaggaaccaagctgcacagcaggaggtgagaggtcagtattaccacctgagctccacctcctgtcacatcagtggtggcgttagattctcacaggaccgcgaaccctatgaggggtccgag

SEQ ID NO: 103791 - DNA, 376 bp, Homo Sapiens
catcccccttcgtctgcttggctctgtgattgggcatcctcagactcttcagactcagattcctctgatgctgaacttccacttgtttcttcctcctctgaatgttcatcttcctcatcctcactccggtcctccacagagtctgactgactgctactatcctcctgaggaggctcttccgcttccacgggcccctctggttcacagtcagagctattagcatcaacctcatcttcatcctcatcttcactgctcccagagcctggggcataggctcctgcatactgctgcaatagctcctccatggaaagctcaccttctcgagccaactcgctcagctccatggcatgatccacctccccttccacgaaggggg

SEQ ID NO: 103792 - DNA, 556 bp, Homo Sapiens
gcagcgtctcttcctggcagaggatcgtgagattcgctgacagcgaaaaagcacggcaaggggcatgttcgaagacccaaagttgggtgtgcgggggccaggacagaggctgcataaagggggtgtcccacggagtatcttgagaggattgtcatgtggtgtctgtgatgagggatcacgtgggtacctatggaagaccaaaggaaagctgggtgggaatctcaccatgtccgaggtagggaggagatgatctcgaaggagggttcggaggcatccccaggcattcccctagggaaatgtatattcactaggacaggtgggcaagcatgtacatatattcacgttcatgtggtagatagctcccaggatgcagatgcaatagggagaacagaaggaatggaggatgttggtctctattccctgtttccacgctgagaaatggggacccatgggtgtcttgtccggagttgtagaagatgatttgatctgaaaagatctgattattataaaactttggttcttatcagcagcctctggagctgtctggtcaactttc

SEQ ID NO: 103793 - DNA, 559 bp, Homo Sapiens
  misc_feature (49)..(49): n is a, c, g, or t
  misc_feature (58)..(58): n is a, c, g, or t
ctcggtacccttcctccagcaagactgaagtttcctctgatttttcaangcatgtttngaagtctccaaggaggtcaagagaagaaattgctcggtagcttgacaagtccagtgctgggttctcaaggcaaggatggaaaggggttgcccatgaaaagctagtcttggaatgagccatttccctccctgactggctggtcttcctgtttcctgttattggattccatttgtccccaggaaattcctgcactgtcagcttcctgggtttccaagtgttgccaggtgccaagctgctgtcctcgagggcactgtgctgaggattatgatagcaaactgaacaccgaatgcattggtggtggtggcaccggcagttgtagcaatttggcatcatatttctctttagcaaggcagggcagatttccccagaacaataaatgcaaggatcatggactagagctccttgaacactgcaggagtaagagcaggtcctgtggtaatcaaaatcaccacagtgtagtggcttacaacacatggaattttctagacctttgcttgcaaa

SEQ ID NO: 103794 - DNA, 1107 bp, Homo Sapiens
  misc_feature (533)..(639): n is a, c, g, or t
  misc_feature (941)..(941): n is a, c, g, or t
tctaacttcccaagctggtcatggagctctgcgcacggcaccccacatcctcgtctgctcctgtgactcctaccctggctcagcctttccctgaagttggcttgacccacactagattccagaatgagtctccaaacctccaggctgacagtccctccctagctccaaactatgctgtgaccatgacctcacacggagggccacctggccaggctctcaaggcctccatgctgtgaccatgacctcacgtggagggccacctggccaggctctcaaggcccccatgctgtgaccacaacctcacgtggagggccacctggccaggctctcaaggcctccatgctgtgaccatgacctcacgtggagggccacctggccaggcactcaaggcccccatgctgtgaccatgacctcacgtggacagccacctggccaggctctcaaggcctcttcagtctaccggtcaacctcttcgaccagaatttctccaccttggcaagactgagctctgaggcccaatggcagtggcaggnnnnnnnnnnnnnnnnnnnnnnnnnnnnnnnnnnnnnnnnnnnnnnnnnnnnnnnnnnnnnnnnnnnnnnnnnnnnnnnnnnnnnnnnnnnnnnnnnnnnnnnnnnnagacagaaccatgcgtctaaacatgagtcaagcaactcatccccacccacagcaagccaggcgcaatgtctagtgaacgaaggacactgcaggggcatggcctgaccagggccctctggcaccgcgcccagtgtggtctcaacacaggtgtctccctaagcgtttctggtgctctcaaaggagctgagtgggactgggccttgtcctggtagaccagaggctgtctagatggtctctatggtgggagcacagcgacaagctgagaaagcagggacctcagggttctgaggaagcccaggcanaggagtgaactagggggtccaggcaggagagaacaggaggaagagacacacagatggggtggagaagaggccccagaggcagtgagctgggaacagtggggagagggagaggagtgacccggaaccacagaggtgaccaacaagtagagcagaggaactggttagg

SEQ ID NO: 103795 - DNA, 391 bp, Homo Sapiens
  misc_feature (168)..(304): n is a, c, g, or t
tccatcccccttggtgtgaggtcccacaccaaacaccacagaccgatgggaaagatgctagaatggtgggcactttgtagggcatgtctggggcatgggagacactggccatctccatctggatggtagttacaccggtagagggctattgccgtggactttcattannnnnnnnnnnnnnnnnnnnnnnnnnnnnnnnnnnnnnnnnnnnnnnnnnnnnnnnnnnnnnnnnnnnnnnnnnnnnnnnnnnnnnnnnnnnnnnnnnnnnnnnnnnnnnnnnnnnnnnnnnnnnnnnnnnnnnnnnctttcaccaccatgtaagatagtggccgttggtgagccaggaagagagctcccactggagcccgatgctgccacctctagatctgcc

SEQ ID NO: 103796 - DNA, 404 bp, Homo Sapiens
tgtccatccccctttgtcaccaccacgcgtgccaggtacctgtagttcccatgtggttcagggtgaactggagaggggagagctgggtggtggcgaaaggggtgtcaggccatggagagtggcctgaggctggtggctttgtgggtggcccaccttggctggttggagttggcactaggcagagtgagctgggggaaagggccaggatgtgtttcatgatttggccttggtgggatagaaaatagccccagaatagcttgagctctcccaggcagaacggcagggtcttgtgtctggggtgtctgggtggatttcttatgggtagcggaacccaagtgccagggccaggtgctgacctctccctctggcaagtcactgcacttcatgcctcggtttcctcctcc

SEQ ID NO: 103797 - DNA, 348 bp, Homo Sapiens
ccctgagctgtcaggtgaacccgtgacacgtctcaactgaatggcacaacattcatgagaggaccataccccttctccctgtttcttgcatgaattaaggaagcagcggatttccaggatgatttcctgtcaaggttggctgcagagaattcctgccatcttggttcatgagatgagatatgacatcatcaaaggcagccaggtcccaggccgttcaatggggatcctgcattaggaagggtttgcacattaaaactgtgcctgtgccacacctctttccttcgtgtttgcatccctgccctgtgaagtaaaacagagtccaagatgcaaacacgaagggggatggac

SEQ ID NO: 103798 - DNA, 715 bp, Homo Sapiens
  misc_feature (562)..(666): n is a, c, g, or t
acgaggtatggagtcaactgagctcatctgcccctgaacgcacactctttctcctctgtggagtctctgaagtgggtaatatcctctgcttataatatgcttccccttaaacctctactctcttcctagctagctttgactcctctgtcacttgtccgcttgggcatcacctcctcatagaagacttctatgactcccgagactctcaggagcatgccaggtgaagtgctcctcccatgaatggatggagattagggagtgtgtgttattcatgcttaattcaccagtgcttagctgagtacctggcataaaatagttactgtggtggccaaagtaataacccccaccgccaccaattgctcatgtcctatgttacacagcacaattacataggaagggggaattaagagtgcagataaaattaatgttgctcatcagttgaccttaaaacaagattatcctggagtatctaggagagcccatgtaattacaagcattctttaaaactggaagagggaggcagaaggttaagaaccagagacggtgggcacaatggctcatnnnnnnnnnnnnnnnnnnnnnnnnnnnnnnnnnnnnnnnnnnnnnnnnnnnnnnnnnnnnnnnnnnnnnnnnnnnnnnnnnnnnnnnnnnnnnnnnnnnnnnnnntgttgcccagtcagtttctcttcttggattcagaagtctttgctgtgga

SEQ ID NO: 103799 - DNA, 397 bp, Homo Sapiens
acgtgtgtgtaagcacctgcctgtgccaatgtgaagggtatgagtgtgtgtgcgcacgggtgggagtaaagcctgcctgtgcctatgtgggggtataagtgtgtgtgcgcgcatggggtgtgtaagcgcctgcctgtgcctttgtgggggtataagtgtgtgtgtgagcataggtgggagtaagcctgcctgtgcctatgtggggtataagtgtgggtgtgcacatgtgtgggagtggccctacctggggtaggggagggatcctccttgcaatgaggctacaggctgcctcctggccaaagaacaggcgttccagagagcctgggaaaccagtcctgcaacaaccctaccccttcacagtaaatcagccctgcagcatggaagcaattctgatcgt

SEQ ID NO: 103800 - DNA, 380 bp, Homo Sapiens
atcccccttgggactcagtcttctccatctcagtacactgtttaactaaagccttccaatagctcaggccaaaggccacagggtcgtgcttcaccctttctctcataagcacatccaaaccataagcaaatcctatcagcaatactcagaatacgacggcttcttactgcctctcttactacccacctggtctaagccaccattctctctggcttcaattactgcatcaacctaacaggtctccctgcttccatccttgcccttacagtcaacctgaacacagcagccagagtgatcctttaaaaaccttaagccagatcccctcattcctctgctcaaaaccctccaaacacctcccttctcacaaagggggatggaca

SEQ ID NO: 103801 - DNA, 265 bp, Homo Sapiens
tcatgtataaagtggggcagaagagaaggagccagcaacgagaccagtaaggcattaccggtaaggcagagaaaagccaggagaagtataggttttggaagctaggtgaagaatatgcatcaaggaagaggaagttatggactgctgatgagctgaataagatgaagactgaacattgaccatttggttagcaatgtggagatcgtggaggtccttgtgactctgacaagatcaggttcacgaagggggatggggtgccgagcac

SEQ ID NO: 103802 - DNA, 420 bp, Homo Sapiens
gtcagctgcccatctagcttcagccccaccactcatcgaaaaaccctgagctccaagaagaggagagctgctcaacgtgcttccagagactcaccacgttcactcctctcctcctgcctccaccaccagcagagtgcttgtctgctggcatctgtctgccacagccttcaaaggctgcccgtccagtgctcagctgcacacaatatacagttcctttgtaactatcaatataggtattacataaaattccatctccaacagctctagcaataaactggcccaccaactgtggtgctctaggagtatccagtgctaattcaggtagatcattcaacaatttatcaaatgatttttccacatcagttgtgctcattactgtcccacaaaggtcagaaagaagaatagatgtcatctgtctac

SEQ ID NO: 103803 - DNA, 196 bp, Homo Sapiens
ctcggcaccccttgtgattacttgcaaaataaggcttatgcttttgaaagatcaagacttatgaaatttggctccagtatgtatgtccaacttatcttggaccttgtggtaaatgtgaccgttacacttcacctcctccccattgcaccccactctacacactatgccagaagctctttgaagaagtcaattccaa

SEQ ID NO: 103804 - DNA, 165 bp, Homo Sapiens
tttctaggtgaacacactgctctgacactaaagagctgtaagagcatagataaactgcttaagctcttcgtgtttttctcctttcaaggtgaagtggttgatgacctaatttacaggccagaactccaaacttacacgaagtggagaggaaaagccagtgcgctg

SEQ ID NO: 103805 - DNA, 608 bp, Homo Sapiens
cctgcactcctccgctggggagggggaggtggtgagttcttgttggaaactcagtacggagctttcatacgctgcgggggaacctgggaattggatgccatttttctttatttttgaacttgttcctcaggttgagaatcgttggtcttaagggattcaggaggctttcctggtcccattcccagcaaccccccagtgggttaaatcctctttctcctttctcagaggacccagaggaactgcagccccccggggccatttccactgcccccactagcttgtgagttgtcacccactcgtccctgcggggacaaaggggacctgccatacaataggtgcctaatgaatgtttctcagatgaaattgaactgccttaagtatcaggggtaagaagtagcagaggtggaatccgatcaccagcgggtgtggatggcgtgggggtggctgcctcgtaccacttcacggggggtcactcacagatggagcagcctacattctctgggccttcagcaacctctaggaggtaggaagggccaggctgttccctgctctcaaagaattccaaggctggggcaggacggtgacctcgcccccccacaaggggctgc

SEQ ID NO: 103806 - DNA, 408 bp, Homo Sapiens
ggcagaaatgcggactccactcctgcttctctgctcagtctctccatgcagtctcttcccctaacccttacattttgccccagttcctgtcagccttccagtgcactgccttgagaagattctgaggatcccacaggctccgtgggaaacagcagtaatggtttagtaatgtctacatgggtggagagtgggaggcagaagagcagggcggcagcatttctgccaggaagggtggaagactgttagagctggaatgtgctgatggatttgggaagtaggaagtcattgatgactctggtgagaacagttttaattgagggagggagacagaagccatgttttgaggctatttggagccaggagtaggaggtgagagactacttttcctaggatcttgactaggaaagg

SEQ ID NO: 103807 - DNA, 286 bp, Homo Sapiens
cggcggatgcggtccctcgcacagtagtaaacggctgtgtccccgacgctcagactgtgcatctgcaaaaacagcgtgttcctggaattgtctctggagacggtgaaacgccccttcacggagtctgtgtagtatgtaccgacatcaatgccgctaatagcggcgacccactcaagcccctgccctggagcctggcggacccaggccatggcatagtcgctaaaggtgaatcctgaggctgcacaggagagtctcagagaccccccaggctgtaccaagcctcccc

SEQ ID NO: 103808 - DNA, 127 bp, Homo Sapiens
gggtcagatggggtttaggaggctgggggcagggttctggaccacctggcagagagtaaatcacttttcactgatgcctgcccccttcactccttcccactgctcaggataaaacccacattctaaa

SEQ ID NO: 103809 - DNA, 123 bp, Homo Sapiens
tcacccacgctgccccagctcatgggctctggcacaaaggaaggtgtcagccctgtgccaaggtttccccacctgcttcccccaaatcctcaggcactgactgtctccagctggagctgggta

SEQ ID NO: 103810 - DNA, 239 bp, Homo Sapiens
catctcagctcggcacccagtagtgcggcaggaacagatcccagctgaccgagcacgtgaatccgatgaggaccgtgatggggtgagcgttgtgacggcccaccgcattaaaggtcgcgaattcgacgtcgtcgccgtgtgtggtctcgaagaaggtaattggcctgctggtaaccacacagggtcccttgttcgcgcagaccgctggtctcccgacggcctcgtagcagcgcctggat

SEQ ID NO: 103811 - DNA, 357 bp, Homo Sapiens
gggggagggagcgagagcacactcagcactccctagaatgtcactggggttctggctggagtctaaatggaatgctccttactcttcatggaatatacattcccaaggagaacgacatgcaacaagtagctcaacaagcacagctgggatgggtattccgtggacactgggtggtgaatttcttcagatagtgtgatgagcatagactgacatgggccacactgaagcttaaacctgaaggttgaaaagtcagacatgcatagaccacatagaagaatattccaaacagagtggagtacagcgtgtgcacagggctcgaagtatggaatatttggcttgttcaaaggaatgaaagga

SEQ ID NO: 103812 - DNA, 347 bp, Homo Sapiens
acactaagtcctagcagcctatgagtttgaacgttgtcaccctccagagggtttgcttaatgaggccagggattccatcattagtgtcctgaaacgcctatgacagtgcctggcccagggttgggcacttactcatgttattcacttattcatatgtgggaatgaacagttcagccagtataaaggacaggtgagtacacaccaaggagatcttcagggagagatcagctggttttcctgtgaagatgtcagcttcatccctccaccgtctccctgtgctcatggctctgttccctttccaggctgctgctgctggttctttgggtctgcagccacctcccaccccc

SEQ ID NO: 103813 - DNA, 321 bp, Homo Sapiens
tcagaagggagtcactaacccctcagtgctgtctctgtggacgctgcccaccctaggctgagatgaggcacagggtctgggtctaaacaaaatgggaaggcactggaaggtgcaatgtcataggaggaggatgtctgaatttcatttaatctcaacctctactggtgcagcatgaaagatgaggcccagagcaaaagtgtcttttcccgagatcacactgtggaccccaggcccactggagttgcattagacgttacctctcaccccttcttgtatttgttccatttctaagtgtgtgcaatatccacagggaacaaatac

SEQ ID NO: 103814 - DNA, 428 bp, Homo Sapiens
atctcagctcggcacccctgtgcaaggtgttatgccagtaaggcacatgctaataggaagaaaaacaagaaatggtccttccttccttcattcttacatttgtaccattttttttccctgtttctttctgtatgcattatctaatttgatgtgcataacaacttatgagatacaaaagaaggttgttattgaccccacatagaaaagaaaggcaagtaatttcaaaaagatcaagcatttattagaaatttctagacttagtgaggaaggaagaactaagactatgtaagatgttattatcgttacatattgattagtgtgcactgctcgtgaataccatatttttaggcctgttttcctgaaccacataatattgtcccactgtgaaacaggcattacaattttgtatttacttctaatggttctca

SEQ ID NO: 103815 - DNA, 334 bp, Homo Sapiens
agggggattacaaagatgtcgtgaacatgaaggagagcagccggcagcgcctggaggccctgagagaggctgcaataaaggaagaaacagaatatatggaacttctggcagcagaaaaacatcaagttgaagcccttaaaaatatgcaacatcaaaaccaaagtttatccatgcttgatgatattcttgaagatgtaagaaaggcagcggatcgtctggaggaagagatagaggaacatgcttttgaagacaataaatcagtcaagggggtcaactttgaggcagttctgagggtggaggaagaagaggccaattctaagcaaaatataacaaa

SEQ ID NO: 103816 - DNA, 437 bp, Homo Sapiens
cagagaggacatttctgcaccctgcccccctactaggtcaagcctgccattattatcaccccctccccagtgtcctaaactcctccttcgtggcaagcatcacattcaacatgactttgtgtgtgtgcaactatctgtttaaataaatctttatctctgacgaccaacactgtcctccttcgacatgacatcactagcgcaagccgcaatgggagcttgagggaccacgtatgatgtgcacaacactatcctgggcactggaggggaacgtgacagtgagggacccacctggtccttgggacctcacaggtttgttcatagacctatactgaaacactcatgcctgcagtggccatgacacatcatggggtacaaagtccgttctatagtgcatgtgggcctcggctactgtgcaaagcttctgcttgtaaacttcc

SEQ ID NO: 103817 - DNA, 287 bp, Homo Sapiens
tgtccatccccttcgttctcattgcctcctggtgtcccccaccaagccacaccacctcctcctcgttcattaaacacagcagctgacaaagggccccggggtgtgctgcttgtgcggcctggggtgctgctgcttcagatctgcgcagtttcttgaaacctcctcctgtcttagatcccatgttaccccacgaggccgtccttggctgtcctagttacagctgcgatcgccctctcagatccccgccccgtgtaatttctattggaaggctttcccgatgaaataac

SEQ ID NO: 103818 - DNA, 112 bp, Homo Sapiens
ctcggcaccccagcgcgatgcgtacgaagtggtggcatggtgatcccctgtgcggtaggggccgggttctcgtgtcgggggactcacacggcccggtatttccgttcatgag

SEQ ID NO: 103819 - DNA, 131 bp, Homo Sapiens
ggcttcagcaatgcacacatataacatagagaggcagggtagttctgagggttggatgattcagcagtaggactccatcaaagcctcaggtccttcccagctttccactctgccatcttcaggggaccgag

SEQ ID NO: 103820 - DNA, 144 bp, Homo Sapiens
cccagcatgtcgttcatccggcggtgcgcactgaagacgcaaccatgcttcatgaacggcaagccttccgtgtcatgcacggaaggtggaatccgcttcacaatggggcagctgtcccaatgaaaagcgaatagggtgccgagc

SEQ ID NO: 103821 - DNA, 112 bp, Homo Sapiens
gctcggtaccctagttgggtccagagcggtcataggttcctggaaaaccattccaatactgccgccccgaagggccgacatggcatggtccgaggcacctagtagctcctta

SEQ ID NO: 103822 - DNA, 128 bp, Homo Sapiens
tcgagctcggcaccccccgatagcctcggagtcatgacgctcgccgtgtaccccggaaccttcgatcccatcaccctgggtcacgtcgacatcgtgcgccgcgccctaaccgtgttcgatcggatcgt

SEQ ID NO: 103823 - DNA, 182 bp, Homo Sapiens
gctcggcaccctattggatggatgttagttacccagaaacaggcaggattagagggttgggatttacagtcctgcctgttaatctctggggaggagagagggcgtgaaggttaagttgataccaacagccagtgatttaatcaatcattgcctacttaacaaagcttccataaaaatccaaa

SEQ ID NO: 103824 - DNA, 156 bp, Homo Sapiens
attggaagcttgggtgaacacctcctaaaaccaagaatatactaccgataaggtgaaaaatccatgtaattaggggttcctgggtgctctttcggttaagtgtctgccttcgctcagctcatgatccccgggtcctgggatcgagccctagggtgc

SEQ ID NO: 103825 - DNA, 285 bp, Homo Sapiens
  misc_feature (1)..(1): n is a, c, g, or t
ngtgtgagccaccacgtccggctcctgtcaccttactttcctgtccactagcacagaacctgcacacttccgacgcgtgactctgctagttagcactgtgtattttaaagtacttttatgctcctgttgggcttcagtgtcagtgttgaaggggctagtaatttttgagctggcaatacgtttttaaagttattcttttgagtaacaaatatttactgaatgcttaccatgggtaagcctatttttcaggctgtgtgtgagatttaaaagtacacaactattcag

SEQ ID NO: 103826 - DNA, 272 bp, Homo Sapiens
tgtgcatcccccttcgtccaatctcagggtgggaaatcaagataacagttatccttgcatgattttcctccccatcacttcctttactcttttcaaatgtgttacagcagaacattctctaagtagaacatactctgcctttccccaaattgactaggaagaaggactgttcaccactgtctcctatggggaagagaaagcatcatcagtggctctgttctcgtccttccccacactatgctttccggttgccccacgtcagcctactcctc

SEQ ID NO: 103827 - DNA, 307 bp, Homo Sapiens
gaacgtgataaacatagatgagaatcctatattctacaatttttttaaatgtactgaaattattctttttgaatcctcctatttatttctgtgactcctttggcgacaaagttagaaaaaagtggaggtcagtagggagatatgaagggacgcaagtggaagcagtgagcctgggcgggtgatggagtgggagatacgtggcacaggggtcagtgagttaatctgggctcattcagagaatggaaggtgtgtgccaagaaaactggttggatagggataggtcaaggattccctcttgcattctcac

SEQ ID NO: 103828 - DNA, 429 bp, Homo Sapiens
ccttggcctgctccaagtccctgtgcagctgccgcttctcaaactccaactggctgagcttgccattggcctccgtcaccgtctggtggagggctttgttctccttctccacgtctttcatgcgggcctcactgctgacctgcgacctctcccgcagcgaccacatggctcggttgaggtggtccttttcctgctcaaggtccttgatctgcctggctttgtcagccttcagggtctccatgtcactctgcagctgctccttctctctgatcagctcctcactgagggtctccagatcttggttgctctgcttttctctctccagctgggtttgtaacttttcaatctgcagaaccaaaagacccagcccagtgcagacatcagtcctacgaagtgaaccatgatttaaaacaaaacagaaaccacccc

SEQ ID NO: 103829 - DNA, 509 bp, Homo Sapiens
ctcactgtcctccttaacattcttcagctcgatcagcaggtggtgccactccccgtcggtcacccgcaacccggacagcatcacggactccacatcggaggggccgtgggacacctcaaactggaggtagttgttcaggatctggaggcgaaagctggtgggcccaccactggtggcctccatcagaacgctgtcctccttccgggtccggaacatgagccccaggtaccagggcacagagatgatgatgttcaggtcactccaggacacgacgctctcaccgctgaagagctgggggtgaggcatggctgcggacacaggcccagggacctcaggtgtctcccgaaatcacacggccgcggacttggctgcaggggcgggggatgggcctgcaggctaggcctgggcctttttcactttaacacgaaggtgggtctgagcctcccctctgtgacgcatccagccctcacagtcagccacgtgggctccagagaagcgcaccctgggac

SEQ ID NO: 103830 - DNA, 440 bp, Homo Sapiens
agaagtgggttagctgagtggttctagcttgtggtctctcatgagattgtagacaagatttcagctgggacttcagagtcatctgaaggcttaactggggctggcaggcctgcctccaagatggctcactcacagggctggcgagcagtgctggcagttgacaggaggccacagttccttgccacacggacctctccacatgcttcttgcgtgtcctcacaacatgtcagcagctttccccagagcaagtaatccaagagatcacaaggcagaagtgacatgtctttataatcacagatgctaccctgctgttctgcagtatcctgttggttccccagtctaccctatttcagtgagggaaggcactcaccccaaatgtgccgggaatcagtgggggcattttggaggcttgccactcgctgcctgtaaatgagcatcat

SEQ ID NO: 103831 - DNA, 326 bp, Homo Sapiens
tggctcctcggcgtccctcacacgattcccacgcggccccacacccctccacacacttccgctcccatttccacaggtcctcagagtacgcggagctccagctccacagagcccccatgtggttccccacacgagcgcacactttccccaagcgattccccacacacttcccgcctgcttccccgccttctccacacagtcacattcagtttctcacaaatcctcccacagttccccacgcaattcctcatacggtttctcacatactttcccgtagctgcacagagagctctgcacggttccctcacatgattccacgtagctcc

SEQ ID NO: 103832 - DNA, 107 bp, Homo Sapiens
ctgtacctgctcccgcggccctggtgagtgttgttgtcgagccgctgcccgtaagaccagggtggctcgacgcgccgccgctgagtcgggactgttgcagtcggtgg

SEQ ID NO: 103833 - DNA, 389 bp, Homo Sapiens
gagaaaggtctcattacacaaacagacactctctcatcccaaaggaaaatgacacacatgacttaattagttatattctcttcccacccatgttcttcaaggccttaagcaccctaatttaaaatcccctaaaacaaaggaaattttcactagaaggcaaggaggccgaggctctgaccctcttaatggaggaagcttttggaaaggagccagtgagacaatgataaatggtaagggtgtcctgcaataagctctatcagtcagctctgtgacagggctacctttcaaccagtaaaatcagattccaatgcctttccaatcttgtcctgtctcctcccacctcagcctagccttcttcctctcagggtcaggaggaaagagctacgtcc

SEQ ID NO: 103834 - DNA, 453 bp, Homo Sapiens
caggagaacctctggctgttagaaagactctccgtctaagtgagccaggtgctgtgtcactctaggggcctagttctaccctgatacacaactcagctggtctgcagcctcgtccgtgtggccaccctggagccatctgaagacccccctccgccccaagcttcttgacttccttgtcggcttctcaacctcccctcgccactgcacacagaaataacagtcccttcaaaagttaccaggtcattcatctggcaagggccaactttcaggaacaaagactaaagaataaacagaaccaaacacccctgagcagccaggctggagaccacaacgcccagtgagaaagcccttccacggcggccctttacccaaagaccctgagcctcactcacggcctatggactcctagttgggaaacaattctaaaagccggtttctaggtcctcagctgct

SEQ ID NO: 103835 - DNA, 234 bp, Homo Sapiens
cactgcttcccttcattcttactagacccgagagcactgattccatggaacctgtctttttctggacatgaaggcatgtgttggctggaactacctatacagttccagctagtctactttttgccaaagtgtttttttctaactttgaacactattatagtcttaaaagagactaatgtagaaaaagctaaatagtgataccagaattaacccaaaaggagagaatcagcaaat

SEQ ID NO: 103836 - DNA, 538 bp, Homo Sapiens
  misc_feature (50)..(50): n is a, c, g, or t
  misc_feature (141)..(141): n is a, c, g, or t
tagaaataatacagagatgtaattcaagacaaagcatgttaaatgttaanacccactaagataatatagcagcaaggtgacccttcacgtgctgctcaacacagcttcagcatactatgggaacagtggcatctacaacanaatgggatattttagagtactttttaaaacactagtaagtcttcttgaaaaataatttgtaaaagcacagtatttgaattctgcaatgactaacagatataatagctctaaacaggacattatgttcctcaaattaattaatattttttcaaacaccattaatgagaaaatggtcatgtaatagatatgaaagacaaaatcaacgaagtccaaaagcgtacatgatctgtacccccattgcaatgaggtgacaaaggcagaattaaaatggattgctaaaattctatctacatgaaaatatagactgtgggacagaaaattaaaaagtatctataaatgtattgcaaaggtgcgcctatgttgaatatttaaaagacaacttagaaggttggttaga

SEQ ID NO: 103837 - DNA, 135 bp, Homo Sapiens
acttgatcaccgtgacgccctcgaagtcaccgcactgcattccttggccggacgagggagcgggcgtctcatgacgaggcccccactggctcaaccccatcattcggtgtcgatggcggccatggtcggtggggg

SEQ ID NO: 103838 - DNA, 120 bp, Homo Sapiens
tgagtgcccgtggtgccgggcacatcagggtgctctgcgcgcaactgccggtccttgagaatccaagcttggattctccgtgcgaactaatcacgaattcgtgattagttcgcgagagaa

SEQ ID NO: 103839 - DNA, 154 bp, Homo Sapiens
ataattatcaagttaatatggatcatcattggaagcgggtcgacttgccaacgaagccgctgtgcttgttggtggctgaattaaagcaggctccgagcgcagttgcattgcatcgctaagtgacagaatatataaaagccatgaaacttttcag

SEQ ID NO: 103840 - DNA, 311 bp, Homo Sapiens
agtccatcccccttcgtagatcggcagctttctggaaatacttaagggctacatcataattaacttgaactcctctcccatacaggtaggccattccaagcccactctgcccaactgggttgcccatgtcaccagctttcttaaagtagtggaaagctgtctcattactctgaggtacaatgtcacttccttccgaatacatctttcccaaaaaggccatggcatgtgaattgccagcatttgctgctaaattgaagtagtcaaatgctctctgatgattctgttctactccacgccctccgtgcaggtgc

SEQ ID NO: 103841 - DNA, 405 bp, Homo Sapiens
gagaggatcctcgaagcatgactctccgtgtgcagccattgaactgggctgcttgaccatttccagattcttctccaccttgactacctctttcaccacgaccttctccttacacgtccacctccctcttactcaagggccagtagctccttcttcagcccttccagccgggccgagatgacggcatcctccccgcggagctgctggatctggatcctgagctgggccgcctggctgtccaggccggggtccctctccacctgggtgacctccttggtcagcagatgaggctgcatggtcttcctcttgctttccagctgcacgaccttctgggctgccacttccaggtctgcctgcaggccagcccgccgcttgccctcctcctcccggggagtgatgctttga

SEQ ID NO: 103842 - DNA, 786 bp, Homo Sapiens
ccgagctcggtaccccggcaactgcttcggatgcggtagttagcagttcaccatcgggatgcggtagagttaggcagttcaccatcgggatgcggtaaagttcggcagttcaccatcgggatacggcagagttaggcagttcaccatcgggacgcggtagagttaggcagttcaccatcgggacgaggtttaggcagttcaccatcgggacgaggtaaagtttggcagttcaccatcgggatgcggcagagttagcagttcaccatcgggatgtggcagagttagcagttcaccatcgggatgtggtagagttaggcagttcaccatcgggacgaggtagagttaggcagttcaccatcgggatgcggcagagttagcagttcaccatagggatgcggtagagttcggcagttcaccatcgggatgcggtagttagcagttcaccatcgggatgcggtagagtttggcagttcaccatcgggatgcggtagagttcggcagttcaccatcgggatacggcagagttagcagttcaccatcgggacgcggtagagttaggcagttcaccatctggatgcagtagaggccgcagccttgcagacattttggaagcatctgcgccgactgtgtgcttcccgagctgcgtgtgaagctgcgtcactgccccagtggtgccccttcacagcaagccagtcaggaatcctgctcctcaagtccaggtctatgcacgtcacccaactctagacgctgggtgctacccacaaccactaacgggatggtctagag

SEQ ID NO: 103843 - DNA, 666 bp, Homo Sapiens
ggcatggggaggtcagagtctgctgtgagcccgagtctgtggacccagagctgcagccacccaaatacaactcatctcaggagctcctaaaggccgatgagccctgtcaaccccctaggcctggtgacaatggcactgcaggtcacaacccctgctggaaaggctgtgggttccacggctggctccagttacaaaggccctaggacctggcctagtagagcgtgggcatccagatgtcagagtgagggccacccagcattcctggagacagatgggtctgtcccaggctgccagataccatgggcagtggttggcaggtggctgaggtccatgtgtggcaccggtgggaagtaagagctacatccaaggtgagtcagcagatccaaaccctcagcctccctgggaactctccccaccattcccagtggagctccaaagtccatgtaagcaggcagcattctaggcctggctgagttcccaacccttctgacgtcaggtctggctgaggctctagctggtcctgttggtctagaagactcctgatgcacccacattccagggctggtgggttctaggttgtctcatcggtccaagtttagaaggttttccatctgcttatttcaggacaggctgattctagatctttccatggttcagtataggctc

SEQ ID NO: 103844 - DNA, 435 bp, Homo Sapiens
tagacgtgcacgaacacgcggaacacccgcaacaggatcttccgcaccgcctgcaggaagttcttggaaaacggagtgccaacggtggtggggaaaaggtactcgttgttcatctgcgcctcaatccagtccatcagcaggtccatgtacctgggcgcggagagtgccgtgggcttccggaacttatgctcatcctgccagcggtactcatacttggggccccccgacatgacggggcaggactgctccgtgcagccgtcgctgatggtgccgtaaatgaggttgacgcggttaaagaagtccaccacgtgaacagccacccagtcgttcaggtcctcgcccgggggcagctgcacggccagccgcaggtccagcccggcgttcagcgacgcctgcgccttcttgtgcagctcgaagcgctgggtgcccggctca

SEQ ID NO: 103845 - DNA, 498 bp, Homo Sapiens
cccccggaaactgtttcggatgaccgacggtattactcaaacgtatgccaacggtgacaacgcacccaggtggaactcagggttcctgccggcttgcgtggcaggggaggctggcccccacctggggatcacctggtctcagggtccaggcaggctccccactacatagatagggcggttaccaaaaacctctctggaaaggagacggcctgcgatggcaggctccttctacaacaagggttcctttctggaatgctgtggtcagccctcggcaatggagctttgagcagaatcctgaactccccaatcgaccactgtccacgctaaggcaccgccaactcccgtgcttcggactggggaagctcctgaccagcctctgggccctgagggctgctggctcctgtgttttcatgtttctgacccctttccaggactttgagcttcaccatctgatcctgtttttggcttttagcgaacctcacatcggtaccgagctcg

SEQ ID NO: 103846 - DNA, 460 bp, Homo Sapiens
acctaaatgaggatgaggagccagccccagctatggcccagcgccccatgcaggccctggctgttggggggccactgcccctgccccggcccggctggctcagttctccaactttgggccgagccaaccgctccctcagcacagcggctgtgagcctcatgaccccacggcggcctctgagcacctcggagaaagtgaaggtccgcacgctgagcgtggagcaaaggacccgtgaggacattgaaggcagccactggaatgagggcttgctgctggggcggccccccgaggagcctgagcagcccctcaccgagaactcgctgctggaagtcctggatggggcggtcatgatgtacaacctcagcgtacaccagcagctgggcaagatggtgggtgtctccgatgatgtcaatgaatacgctatggctctgagggacacagaggacaagctccgccggtg

SEQ ID NO: 103847 - DNA, 248 bp, Homo Sapiens
  misc_feature (82)..(91): n is a, c, g, or t
ctgcgcggaccccgggcatctgggccaggtgtgacctcatcacatggtgtgacctcacttttttttaaagaagggaatgaannnnnnnnnnaaggagggaacaaatataaaaaatcttggtcctagagtcagaaaaccaaggttcaggtcctacagttgagaccttcttagctctgtaactttgagtaatttactgtaaagagctgatgttggttccttgaagtgtaacatgggaattgtgcctatta

SEQ ID NO: 103848 - DNA, 381 bp, Homo Sapiens
ggaaacaaacccctgatgagttggccgatcgctgtgctgtaaatcctccccatatggctgattttaagccacccatggcctaacaagagtgtaataatgggagctggtacgtgccagctttagtccccaggcattcagcgggtgcttaatagatgatggttgaatgaggaggaaaggatgcacagagtgttggtcagctagatttgggagctgcgggcgatactgtaggtgagaagggctttcagggggaggcatgggagggctggaggtgaggggccaccctgcaccagccctggggtgaggcttgagggaacggagagcttctggtgtcctccccgtcctgagaccctttgcacccctgaccctgacgcgtgtagcctg

SEQ ID NO: 103849 - DNA, 518 bp, Homo Sapiens
  misc_feature (251)..(309): n is a, c, g, or t
acatttgctgaacgcttggatgactcaacactccccacccatccttgccgactactcccacttcctctgataatccacgcccttcgtccccttccaggcccttcttcgcggcatcttcccttcttccctggcccccatgtctagctcctaccccagctctaatacaattccaagcaactactggttcctgagcaccatatatcagggacgttcacaacctccccaacatggaactgtgctagtaactccannnnnnnnnnnnnnnnnnnnnnnnnnnnnnnnnnnnnnnnnnnnnnnnnnnnnnnnnnnaaaaacatgaatcaagattccctggtgggtccacagcctgactcccccttgctccacatagtcctgttatgttatgtttacatggtttgcactaaatgtgcatgtggttcctttcctaggctccctcttccggtttgtcttcttctgatctaggatcctcccgccttcgttagaacagcctattccagatgagcgacgcttcttgtcct

SEQ ID NO: 103850 - DNA, 359 bp, Homo Sapiens
ccgtgacactttgcagccaggtgctggggcgcgagagcaaggcactgcagttccgtcactccacacaatttctcactgtaaaactgacatgaagtcctccaatcttgacgtgatgccttaacgtatactgttcaattaaaaacatttcattctacgccgtttatatcacagttacatatttatatttcatatcatattaaatcataggaatgtgttaaatcactctactccacaaggaaccaaaccaaacagcatcagcaccaggttgagtccccgaaaggatctgtcagaccgatccactggcatcgactcagctcgggagctacgttcaaagaagggtgagttgcccggcaggagac

SEQ ID NO: 103851 - DNA, 645 bp, Homo Sapiens
acatggagaggagggctaggccatgtgtgggagggatctgggccctgtggatggagctacttcatgggtgacatggagaggagggctaggccatgtgtgggagggatctgggccctgtggatggagctacttcatgggtgacatggagaggagggctaggccatgtgtgggagggatctgggccctgtggatggagctacttcatgggcgacatgaagaggtgggctaggccatgtgtgggatttgtgaaactgtttataggtaagggcatcagatgagatttcagatattctaataaccacagatactgctataatgttttatttggctttagctgacgcccaatctttctatcaattcctccagaaaatcaaacatgactgttattggtgccccgacaaagacagagaaggcaaagctttgccaactgctctcagaattttaagtgtgaagtagaaggtagattctgagactaggactgaagaaaagcaaacccacacgatggtaatataaaaccctcaagcagtgcaaatggcaatcccagccactgcctgagaaggacgacttcccctctcgctgttctaccaggaccagtcctcctaagcggggactcagaaagagctaccccacgcagcatccgaaaca

SEQ ID NO: 103852 - DNA, 415 bp, Homo Sapiens
caaggtaacgtggaaggtgactgatgtaataaaggcaaagtagcaaagatagcaaggtaacaagttaacagctgtaccaatgaagcaggtgtggggtccctcaggaggttctgctcctcttacaaagtcactgtcctgattgctggtccctgactcttggttaggctgaataaagcttcctgacctcatcttttatttctcagggttgaatgtgcagagcctgcctctctcttctctactcctcttctccaggtcctctgcacctctttcttcatgaaagctcctcagtccagtcctaggcactcagggagtgcccatttctgggcccacttggataattggcatctttggagggacattctccataacagtccccaaccttatggggcagtctttttgaagtatttcttcatgg

SEQ ID NO: 103853 - DNA, 623 bp, Homo Sapiens
cggcaactgcttcggatgggcaagcattgcttggcaaaggagagcagaggaattcacaggtgaggatcaagcccatctgcccagaagagccccaaacatgaagatggcaagtgcagtgtgtcagtgtcccaacacaaagccctgagaggttcctcaattcccctgctcacagtctagaaagtactaatgcagtgagtcagtgtcccaacacaaagccctgagaggttcctcgattcccctgctcacagtctagaaagtactaatgcagtgagtcagtgtcccaacacaaagccctgagaggttcctcgattcctctgctcacagtctagaaagtactaatgcagtgtgtcagcgtcccaacacaaagccctgagaggttcctcgattcccctgctcacagtctacaaagtactaatgcagtgtgtcagcgtcccaacacaaagccctgagaggttcctcgattcccctgctcacagtctagaaagtactaatgcagtgtgtcagcgtcccaacacaaagccctgagaggttcctcgattcccctgctcacagtctagaaagtactaatgcagtgagtcagtgtcccaacacaaagccctgagaggcatccgaagcagttgccg

SEQ ID NO: 103854 - DNA, 542 bp, Homo Sapiens
cctgtagaaaccattaaccccttcagtttctaactggtggttcatttctcctcagcatttatttataatgataattataaattattcctttttatgatgtgtcgaaatctggccctaaaagcttttcctgtattgtcttatttaaccctcatacaatgctatgcagtgagttatttttgcagctaggaaaaccgaatgtctggggtcatgtgacttgtctaaggtcacagacagcaagtagtagcaccaggattcatacccagatctctcaagaaggcaaaaaaacaaattgcatacacacctaagtataacactctatattattcacccttccctcttcacaggcatcttcttgagaaagtactcactatgcttggtaatctccacctttacctctccttccctccatggctcagcatagtttacactccatagtttgccaccccatccacactttcacttccctcaccacggactatcagtgtcctatttctcaatgcacgtagacaattgtgctctctgtccccctctctctagggtta

SEQ ID NO: 103855 - DNA, 139 bp, Homo Sapiens
gacaagtgggagagccaggagcgggtgcagggccccaccgcagtgtcccagcaggccagacactcagccactgacagacccagagactgggacagagggacagagatggggagacagagacccagaaacagagggacag

SEQ ID NO: 103856 - DNA, 415 bp, Homo Sapiens
tcggatgtgtgtgtctcaaacctacagtaatcggaataaatatatagaaatattaatataaagaagagtcaagatagcaagcaattacacatttattaagtacatccaccttttgccagactctatgctgagcactttaaatgtcatcttatttatgtctcacaatgtacagtaaactgggtagggagagcttcaggaagtttgctaacatgctcaaagctgcaggcttgaatcacgtgtatttaactccaaaacctgcatgtgtttttcatcaccccaaactaattaagtaatatgaacataaacagaatgattatgcaaatttattttaaaagaagctcaagccttctaggtttatctgtgagaaaatggcaggtcccatccgaagcagttgccgcatccgaagcagttgccg

SEQ ID NO: 103857 - DNA, 372 bp, Homo Sapiens
acagtagtctccccttatcctcatccggtgtgtatacagtagtccccccttatcctcatctggtgtgtatacagtagtccccccttatcctcatctggtgtgtatacaatagtccccccttatcctcatccaatgtgtatacagtagtccccccttatcctcatcccgtgtgtgtatacagtagtccccccttatcctcatctggtgtgtatacagtagtccccccttatcctcatctggtgtgtatacaatagtccctcatcctcatcccgtgtgtatacagtagtccccccttatcctcatccggtgtgtatacagtagtcccccctttatcctcatccggtgtgtatacagtagtcccccccttatcct

SEQ ID NO: 103858 - DNA, 559 bp, Homo Sapiens
agctcggtaccccggcaactgcttcggatggttcagtcatgggaggctttggtgggaaaatggatgatgggaggcagggaaaagctaaggtatttctcctcccctctctctgttcctagaagcgtctctgccaggtaaatccagcccctgggctccaggaaccctgcctcctcccatggtccctctggcctataggcagctgcagcttcctgctgctcccattctatggatgacctcactgctacctatgtggcttctcagctttaccatcttctgtataagcagcccctggattaaatccctgcagttcaaatacttaagagtagttcccattttctgggttggacctaacaaacaacagcaggctaagttgtcatataactaaaatgtagccgctggttcaacttgatgccaagagggtttccagaagttccttactggtcctctctgtgggacaaactcttcattagacccctggtttagcagcagtcaactctagaagtcttgtaacagggcttaccttcaggagtacagaaagccaaagacaaccccttactaa

SEQ ID NO: 103859 - DNA, 180 bp, Homo Sapiens
cccggaatggcgcaacgaagataagaagcagatgtacgccaagatggctcggcagggccacagccacgtaacgaactacgtgactcgcgtcatcaagacgaaagaagacgatgcggggaacaaagaccagttccaggatgagatcatcgacgtcgagaaggacggacaggagatcgggga

SEQ ID NO: 103860 - DNA, 417 bp, Homo Sapiens
tgtgggcagagagggggcctgagagctggcgcagggggctggggcaggcccaagctcatcccctcactagccgacctcactagccgaactttctggcctttagtgtccttgtctgttaattggggcaggcagtacccaccctgtgggatgtcagaggggctggccagcaagtggacaacacatggtccctcagggcaggaggaccagagagcaggagaggagggccacgttggcagcctcaaaggccacagtgaggccccaggtctaccagatctctaacactaagaccggtgagctgggcagggggaggaagtcacatcccatggggtgaggaggaagatcaaacgtaaggaagcagagaaacatccaaatcattccttgaagaagtgtctcaataccacagggaacaaactgatt

SEQ ID NO: 103861 - DNA, 201 bp, Homo Sapiens
actctagctcggcacccggatgattaaatcaggataatcggggttatcccatcacctcaccatttattacttctaagcattgaattacagatcttacaattgttagtggctttaaactctttactttgtcaaatgagaaaaacaaggcctacagaacctaagtaacttgcctaatgattaaaactttccaggaactgcacc

SEQ ID NO: 103862 - DNA, 460 bp, Homo Sapiens
cgaaatgaccagcagatgctgggacagcagctgcccgcagactcgggaggtaggaggactggccgggcactgtgctgggccctgccctgaggagacagaccaaatgggtacaggatctcctcccgcgggctcctggcctttaaaggggtctgcccgttgggtacaaagccattctgaccatgcaggagtttgcccttctctcggtctggccatgtaaagatggcatcatcgctgtccagctctgactcggagtgcatcaggctgctacttagcaaaaagcctctctctttgatgcctgcagggaaaacaaggaatccagcatcaggagactggcctcaaggctggagccacccccacaccttaccccagcctgaggagccaaggaacagggcaagtcacaggctcctctccaggctgggaggtgcagatgggaaggaagcttccctagtccttctcccgg

SEQ ID NO: 103863 - DNA, 273 bp, Homo Sapiens
tagctcggtaccctgtaggagccgcgccccgcggcgaagcggcaggtgcgacacccgtaatcttcagaaattacccccggcggggctcctgcagttattgcttgccccagggcgccggggcgccgagcaggcggcccatggcgccgtgtacgcccagttcctccagtactttcagttccccttcggtttccaccatctcggcgatcagcggcaggtcgatgctgttggtggcgcggaaaatcgcttcgatgaacagccgcttgtcgctttcct

SEQ ID NO: 103864 - DNA, 328 bp, Homo Sapiens
gtgcacccagaagggcacagagttccacaggctcaggggtacacccagaagggcacagagttccacaggctcaggggtgcacccagaagggcacagagttccacaggctcaggcgtacactacgagcacaggactgggtgttaagcctatccaacctcactgctgggacttgcttgggtaaaacacggtttccactttcccacaagttctcaggcccagcctcacatttttccacccccaggcagggcagctctattgtgtgaataagggatcttcagcacagatggggtggggacagaggcccttgaatctaacccaggggccgagc

SEQ ID NO: 103865 - DNA, 484 bp, Homo Sapiens
tcacttaattctctgtgaattaagcatcatgatgattcttactttagaggcatggactttaagacccagcagcttacatgaattacatgggtcacacagttcataggtgatggtgtcagaagctagagtgtgcttgctctctccattccaccatgctgcttggagggattccccttagttactaccatgaatgccagcagtgctaagttggcaggtggatcctgtggggtctggatcaatttcctcatttgatgatgcactctagtgtccccctggaggaagctgggagatgggaaggggtctggatcaatttcctggtttgatgatgcactctagtgtccccctggaggaagctgggagatgggaaggggtctggatcaatttcctcgtttgatgatgcactctagtgccccgccctggaggaagctgggagatgggaaggggtctggatcaatttcctgatttgatgatgcactctagtgtc

SEQ ID NO: 103866 - DNA, 647 bp, Homo Sapiens
tcagggctggcagccggggccgtagaaccctggcgcgcaaagctcacaatgggtgccttggaagttgggtttgcacagacagcgtcccacccttgggtccttccggcaggcgttgccctgggtccctgccgcgctgcagtcacaattcacaatctggccagctggcagcacctgctccctggtgtcattggaggacgagggcgtcgggtagcagcttgggaagcccgtgaagccctcggcacaaacgtcacaccgctccccagagaagttgggccggcagtagcatcgacccgtcaggtcctcgcaggtgccatccgtgaagtcggactcgcagttgcagcggcggcagacgtggggcgagtcgaaagggtggttgggagagcggtaaaagccgggcaggcagcgctcacagttgacgccggcggtgtggtgctggcagtcgatacagacacccccaccctgataggtgccatccaggctctggctggcgcggcgccggtccacctcagggtcgtagtaacagtcggtggcatggccgtagcagttacaggactggcactcgttggcactgttggcagtcgcaggcttccacggctgctgattgaagccggggcagcagcggtcgcagtgcccccgcaggtgttgtg

SEQ ID NO: 103867 - DNA, 620 bp, Homo Sapiens
ctggagagggatcctgatgtcctagacacatggttatcttctgccctgttccccttttctgccctgggctggccccaagagaccccagaccttgctcgtttctaccccctgtcacttttggaaacgggcagcgaccttctgctgttctgggtgggccgcatggtcatgttggggacccagctcacagggcagctgcccttcagcaaggtgcttcttcatcccatggttcgggacaggcagggccggaagatgagcaagtccctggggaatgtgctggacccaagagacatcatcagtggggtggagatgcagttgctgcaggaaaagctgagaagcggaaatttggaccctgcagagctggccattgtggctgcagcacagaaaaaggactttcctcacgggatccctgagtgtgggacagatgccctgagattcacactctgctcccatggagttcaggcgggcgacttgcacctgtcagtctctgaggtccagagctgccgacatttctgcaacaagatctggaatgctcttcgctttatcctcaatgctttaggggagaaatttgtgccacagcctgctgaggagctgtctccctcctccccgatggatgcctggat

SEQ ID NO: 103868 - DNA, 584 bp, Homo Sapiens
gacggtgaaattggccatttatacataggcaaatctataaggaaattaacaatatttcacatttcttctaattaatggtctttttgtgaacatgcactgcctactaatgtcagcttatctatgatttgaatgtatagctttctaaagcgtagcaatttttttgcatatttatgtgtcctaagagagtccccccgcctcatttttccatctctcagcctcatgaaaggctacctctatctagaatttgtgacagaggaagctgagttttgtggttgattgtatcttcctggttacaatctagaactatcagagttttgcaatgatagtaacagcaatgactaacccttgcttggaataatagcctgcgcctcagatttgcattgcatcagctagtgcgcgcagaggattaacctgtcattacatcatgcttagggcagcctcaaaatgcagcaagaagtggcagtgaggagtgaacccaatgcaaggaatttgcagattacccactttcagcaggaaattttaactctaaccacttcctcactctataaagtgtgttcaatcacctcaacctcgtttacaataca

SEQ ID NO: 103869 - DNA, 327 bp, Homo Sapiens
  misc_feature (270)..(279): n is a, c, g, or t
ccccagagctaatgctacagaacggcgcatgtatcagtggagggaggaatattcacaaagcgtttcatacaagctgatcacagcaacaggttgcccagagcaacaaggaggctcttgcttccatattgaaaatgaaggtgcctcttagctcagttttggaataagtaaaggttatccacagagacgcgttctcatttttacttttacaaagttgactttggtggctctttatacgaaaatttcccctttcttctttggttcggtgtcaannnnnnnnnnagttgaagactttttaaaactttcccttcctgaacatttcaccatgag

SEQ ID NO: 103870 - DNA, 195 bp, Homo Sapiens
ctgcggaagacgtgtgaaagacgggtacgctgcggagggcaggccgggaggaggctgactgaccaggaggctaggacgggaccatggccccagacggcctcttcgagggagaagagcatgtgcagcagaaggcacggccatcagaaagctggaaggggaaagagcacggccacagcgtaggacagtgaagctgag

SEQ ID NO: 103871 - DNA, 618 bp, Homo Sapiens
taatcagctcgtaccttccacagcaagactagaccagctgtcagaacattgagaggttcatctttgtcatgcctcctgtggaggcacctcccccttccctgcatgcctgccacccacctccttggctggccccacgtcaggcagccttccaggagcaattggcctctgagctctggccccgggctcgtcctttgcaccgtattgtgtgtaacatgcgcacccagttccctgacttaagactcatccagtatgattgcggaaagttgcagacgttggcagtgctgttgcggcagctcaaggcagagggccaccgagtgctcatcttcacccagatgacccgaatgctggatgtattggagcagtttctcacctaccatggccatctctacctgcgcctggatggatctactagagttgaacagagacaggccttgatggaacggttcaatgcagacaaacgcatattctgcttcatcctttcaactcggagtgggggtgtgggcgtgaacctgacaggagcagacactgttgttttttatgacagcgactggaatcccaccatggatgctcaggcccaggaccgctgtcaccgaattgggcagacccgggatgtcccct

SEQ ID NO: 103872 - DNA, 181 bp, Homo Sapiens
cgaggatcccctcggccgccggattcctgcggcgccgattcctatcatgaccccagtggcagcaaatgaaaaggctcagattctcctcattttcacatgggatgccagccttgctttaactctgtaagtttgtgttccacagagcaaaatcacaaaagagatcatgcaataggaatcccgg

SEQ ID NO: 103873 - DNA, 492 bp, Homo Sapiens
  misc_feature (42)..(83): n is a, c, g, or t
  misc_feature (108)..(135): n is a, c, g, or t
  misc_feature (143)..(295): n is a, c, g, or t
gagaggctgaagccaaaggattgcttgaccctggaattctgnnnnnnnnnnnnnnnnnnnnnnnnnnnnnnnnnnnnnnnnnnatgacagagcgagatcctctctctnnnnnnnnnnnnnnnnnnnnnnnnnnnntgaaaggnnnnnnnnnnnnnnnnnnnnnnnnnnnnnnnnnnnnnnnnnnnnnnnnnnnnnnnnnnnnnnnnnnnnnnnnnnnnnnnnnnnnnnnnnnnnnnnnnnnnnnnnnnnnnnnnnnnnnnnnnnnnnnnnnnnnnnnnnnnnnnnnnnnnnnnnncctggtagagagtaaattgtgaattagtaactcatcccaggtctatgcaatacttgtgtccttaactactgtggcatacaggtatgggattcatttaagtgcctgataaatgctttcggacatctacatgggaacattaaattgtatttggggaagaatcactgcaaattcaagtaggcaagaataagctttgtgat

SEQ ID NO: 103874 - DNA, 275 bp, Homo Sapiens
cacgtcgcaaagttaattgggaaggctttgctctggccggagtctcccaagggaggcagtgattttgggtggtgcagagatggacacttttcttgtcagtattatacaatgatttccaaagcatattgggaaaaaaccagcccatcaaacctgtttagggagagcctaacgtaggcacttagctcaaaacaatgagatttgctgacttacttactatatggagtactacatgggtagccaaggaagggcttggcaaaagctgaaggtggggagtc

SEQ ID NO: 103875 - DNA, 419 bp, Homo Sapiens
  misc_feature (398)..(398): n is a, c, g, or t
cagagctcattacaggaaggcatggcaaaagctgaaccctgcctgccccgaggtgtgcacacaggcagagagggcctgatactagggctacgtcagagggttcctgtgcgcgcccctgcgcttgtgcccttgccctcaggtcactcagctgatcatttctggtttactttatttctctagggatggtgcaccaaaatgcgcctcctgagcccgacctatactccctgcacaggtaggagccactcacccagagatgatcaggtgcctggcccagccggctgctgtcctgtctagcctgagtctagcccaggtcttgggcgacagtgggatggatgagcaggtgcttctccgcagatctttcagggctgagggatgtgtgttgtgcttgtgtacgtggngtacagctgtcccctggcaca

SEQ ID NO: 103876 - DNA, 514 bp, Homo Sapiens
  misc_feature (56)..(112): n is a, c, g, or t
  misc_feature (136)..(243): n is a, c, g, or t
cacggatgtagagaaacgcccacgtcagcaaagttgattgaagtccactactactnnnnnnnnnnnnnnnnnnnnnnnnnnnnnnnnnnnnnnnnnnnnnnnnnnnnnnnnnttttctaagacaggctctctatcnnnnnnnnnnnnnnnnnnnnnnnnnnnnnnnnnnnnnnnnnnnnnnnnnnnnnnnnnnnnnnnnnnnnnnnnnnnnnnnnnnnnnnnnnnnnnnnnnnnnnnnnnnnngtgtgagacaccacacctagcctagtcctttctcttaaaggaagctgtgctgctcaaaaactatagcagaaatgtgttccttgtgtgagccgcttccctgtgccttccttctgagaaggtgctccccgaactcacaaggagtccgcaaattctgcaggtccttcctagttcccaccccacttctccaatgatcctctggttcctgttgtgaggatgtaaaaatgcacttgctgctgaaatgaagctgaatcagagatgatgtttttctccc

SEQ ID NO: 103877 - DNA, 581 bp, Homo Sapiens
tagtaaatgccagcataatacacttggttacttaagccaaaaccaaaaatctatgatgaagtcatctttgaccacttatttctgtcatttctcaaatcctgccctgtcagttccactttcaatacacttcttgacccctctacttctcttcctctccattcccactaccacagtctaagccacaattatcgttcacctgctgactgccactggtctaactggtctccctgtttcctctttcgcccctaaggcctggaatctataaagcagccagagagatggcacacgaaacagatcatgccctaaggctaagcccagctcctcagcctggtccacaaggaaggcctctgtaacctcattcttctgccactggtcccagcacccgccacagcggccccctgccacgtgtcaaacacatcaaacctgtgtttttctttacttgctgctcttcctgccttcagctcccttccgcagacctccgcttggctgaatactttctccaatgccccacccctcccaatcctcgtggcactcccacctctgacgttcccttgtttgctcacgtgtttactgcccgcccc

SEQ ID NO: 103878 - DNA, 574 bp, Homo Sapiens
cgagagactcaaagctgagtttcaggaggaggccaagcgccgctgggaatatgaaaatgaactgagtaaggtaagaaacaattatgatgaggagatcattagcttaaaaaaatcagtttgagaccgagatcaacatcaccaagaccaccatccacaagctcaccatgcagaaaggaagaggataccagtggctacccgggctcagatagacaatctcacccgagaaaacaggagcttatctgaagaaataaagaggctgaagaacactctaacccagaccacagagaatctcaggagggtggaagaagacatccaacagcaaaaggccactggctctgaggtgtctcagaggaaacagcagctggaggttgagctgagacaagtcactcagatgcgaacagaggagagcgtaagatataagcaatctcttgatgatgctgccaaaaccatccaggataaaaacaaggagatagaaaggttaaaacaactgatcgacaaagaaacaaatgaccggaaatgcctggaagatgaaaacgcgagattacaaagggtccagtatgacctgcagaaagca

SEQ ID NO: 103879 - DNA, 252 bp, Homo Sapiens
cgttatagaagcggctttggggattgccttatcaggacgtggggatcttgtgacagtccccgtaccagtggttggccaaggaaaagtcaagtgtgttttagctcagttgtctgacctttgggtgtatttgctctttagtaagcatccctcatatggaccacatgagttctacctgaagtcttaactgggtaagagtctgcctttttgaaacaacatgatgaggaggccattttccaaaaggtgtatcttcta

SEQ ID NO: 103880 - DNA, 276 bp, Homo Sapiens
agggtggcaacagaaaataaatgacacattcgagagggtttcactgaagggtttagtgatgtggcagtttctaaagccatagatcagatgaagaaaactaataagggctagtgtggcaccaggatagaaatatctctaccaaagcccatgccaactgggctcacgggacacaggagagaggccactcagcaaagctgtgaccaaggaggaaacacaaccaccaccagagctgcaagcaggcaaaaaggggggctgacaggcctaaggcctccagtt

SEQ ID NO: 103881 - DNA, 369 bp, Homo Sapiens
gctgcactcccacacctacatcctgaggcgtggccacctgctgtccatcacccccaacaccccagatccccggatccttctgatggcgacggctctgccgggctgttctggctcatgtgctgtgtgccctggcccgctggcactcagcttacatttgaacctcgtctttagagttaaggtcccacctgtgctgtggaccggacgtgggcctcccagtgagtggggggcatctgataggtgaggctgcttaggaagcctggcacaccctgtccctcagcagggtgggcctgggtaagtctgcccgccgcatgggagggagtgtggagagatgaagagatgagggagcccgagaaccgcatgcctcactgg

SEQ ID NO: 103882 - DNA, 332 bp, Homo Sapiens
  misc_feature (313)..(313): n is a, c, g, or t
cgatccacctggcttagcctctcaaagtgttggtataacaggagtgtgccacacaggcggacacatgaggcaagctcaccaactatgcacttaagacacgcgcgcatactgtacgtgcgccatatctcatttaacgcacctagcagaaaggaggctaggcagcgcttagtctgggatcagtcttagaatggagaggtgcttctggccaacagcacctaacactgcagctgggttttcagagagcgtggggtcctcacaggcagagcttcccatgaggagcacagagcaacagttcctgccaggcacacagtgnggaaggcctcgccaaccct

SEQ ID NO: 103883 - DNA, 353 bp, Homo Sapiens
gatatgcccgcggatcacagctagcagatcacgctgggcagaagtcaggcattagtcatcacagacagttcagggtgtctggtaaggacaggtgcaaaccatctaggtgggcagaacttggtgatgactaggaaccactgagactcagcagctgccccagtggcacccacaaatcagaggaggaggaggctgggaggacctaagggctacaggatgagctccctgcccacaagacagaagcagctccagagattttgataagcaatgtagatttcagtgcagtgtggtctatttaaaatagtagaacaaaaaggaaataaatgatgtacaattagagcagttggttagatacg

SEQ ID NO: 103884 - DNA, 385 bp, Homo Sapiens
tgtgagaatcttgaaacacggcccctagcatccagaacccctactaggttctagagcccgaatgtgcagctactgcttggaaaatcagctttaaatggacttgagctgatcaaatgaacccacaatgtagaggcaggcaagggctaatttcctacttgaaagtaggaaggacacaaggaaataattttcaaaatcaaataaaaagagaatctgacccaacaccttcattctgaaccatttgtagtgggttgtctatgatctcggggtggattctggaaatgggcacagtgaaatgcctggcaaccatctacgcatgtgaccaactaaactatccaacctcccacatcaatgccaatttaaaaatgcaaattctcatgtggcctag

SEQ ID NO: 103885 - DNA, 164 bp, Homo Sapiens
  misc_feature (50)..(50): n is a, c, g, or t
cactcggcagaccttgcactcccgcctcccctcaccagaacatctgctgngcactgagacggacaccatggtcagcctggtgcttgatgaacaaggatgtttccagacctgtgcagctgagggttcgagggtccacacctgaagtctcattaggagccagcagg

SEQ ID NO: 103886 - DNA, 407 bp, Homo Sapiens
gtactgacccaggctttaccgatctgtgggactaatctccttctgcacccagctgccagcagggaaaagaaggcaaagaatggacctcataagacactgttcaggagtggaacgtcactctgttcatcttcttggcgctcagtcatggggctctgccagctgccaggaagcaatggagcagtgtttttggccaaccttgagcagacctctgctgccctgtgctaatgctgaaagtggctgcctaatcttctgcgctttgtggactaacttccgctggccaactgtggatcataggagcttttcttgcccccctccttaaaattttagaaacccaaaggaaggacggcaattaacgctcatgaaggactcactgtcacctgaccccggccccttcagtctgatctgaa

SEQ ID NO: 103887 - DNA, 455 bp, Homo Sapiens
ttacagattctagtgagaagatgcctgtctgactaggagagcagactgcacccaggaaactgcagcccagcacagcgtgggacagggtcaaggttgagaaatacaacagaggaaaactgcagaagctcagaggaggaaggatccacacctggctggggaagggaggtacggggagcagatagcaagaatgactggcaaacgcttcctgaaggcagtgggggtggggggctcgatgatgaagtaggcaaatgtgggggctccccctctccagtggccgggggacccaagtgtagccaggtccaggcccggctggccaggcgtctcgttgcaaacacagaaccaggtctggtaaaagcacaggccctgtggggggctgggaccaagagagaggaggcagagaagcttctccaggcgcagtctaggagacaaccactacctcagctccctgtgaaatg

SEQ ID NO: 103888 - DNA, 408 bp, Homo Sapiens
  misc_feature (363)..(363): n is a, c, g, or t
  misc_feature (373)..(373): n is a, c, g, or t
gtagaaactaatgagaaatgaaggttgtgatcgtcctgttcctgcctgctgctctctccctaagttgggcttgagaaacagtttctataggagagggaggagtcctaatgtaaataccacctacacccaaggctgtatgtatttagcttaatctgatgaatcaggttgaactcgtaccttagcagtctaagcctgaacgccataaagcctttaagtccattcctggtgttcaagtgagaaggttctgggtcaggcgtggcactggttggtaaatatgtgtcaatattttgttcctttggaggtgaagctggggccattcattaatgagcccacactgctgaggttgctaaagtcatagtgcanactctgattntctttttcatggtagaaaaagcagtcactatagca

SEQ ID NO: 103889 - DNA, 243 bp, Homo Sapiens
ccgggagcccttaaccctggaaacagggagtccagtttaggaggctgattttacaattataattatagaaaagagacgacatagtgacttggattgggggcttgaggcaaagatgatgagaagtagtgtattctggatatgttttaaaggatggaccaacaagatagagagaagaagagtcaagaatgacactggcgtagggtcagcgactcactgcgtgaagccgagccctttgggaggcct

SEQ ID NO: 103890 - DNA, 409 bp, Homo Sapiens
  misc_feature (368)..(368): n is a, c, g, or t
tccttcaaaggaaaccttaaggaaaagtgtaactgctccagcgagtgaggcctgctcacccaaccaccagagccctaaagcatgttcccagaggggttccttgacagcacagtttgaaaactgctacacagcataatctgtaaggtcttctctggttctaacattgtatgattgccttctgtaaggcaaacagccttttctgtgatgaaaggacagctgggagaaacttgaaccagaccttgacagatgggtaggcttttgatctgcagagaggattccagagtcaaatagcgtgagcaaaggtgcacagacaataagcaaggcgtgtgggagggtccaggaggccaaagtagccgagggaagtcggnggaatgaaggcagtgcagcaggtgacataaggacatgctgg

SEQ ID NO: 103891 - DNA, 416 bp, Homo Sapiens
  misc_feature (360)..(360): n is a, c, g, or t
aaggcacccgctctctgggacgggggctttttcggctggtctggggtgacctctacagcgttctcaggggctgccgtgatggttgtgttgtgcgactctgccccgctgcaaggcacccgctctctgggacgggtgccccccgggttttctggaatcctgggggtgacttcccagccgtctacttgcagttggacttcccaggccgacagtggtcaggcttctgaggggtcaggccaaaatgtggagaacgtgagaggcctgtggagggttccgtgggaagggcaggacagggccacagacagtcactatccctgtgacgcccggagacagaaggtctctgcgtggctgggtttttgtggngtgaagatggacgttctgccattgggattactaccactacgacggtgtggacgtct

SEQ ID NO: 103892 - DNA, 324 bp, Homo Sapiens
ctggctccaaaaggaatctggaagcttattgggaaatggagaagcaacagcgccaccttcctcagccttgacacacacttgctcatgccctccctctttcccctacccccaagagatgcaatcataatagacggtcatgaatacctagaggacccttggaaggtttatgaaagagttttagggagtctgtgaagcctcacaactttatgcaaacatgtatgtgcctatttggaaaagagggggccacagctttaataaaactctcagaggaattcataatccacaaaatgttaagcagctttagtcaagggtaaagggctcccg

SEQ ID NO: 103893 - DNA, 240 bp, Homo Sapiens
aagtatttaaaattcagacggaagtcccagcccaccgagccagccgtgagctgcagaggccttgattgcagacacacacccctccatatttccccaagctcaagggtctccagagacagaaggaaggggttttgggctgagtctgtcaccaagaggcagcgtttgggaaaatcaaggtcagggtggaggtgtcctcagggggccaccggtgtggggcactgaggactgtaaacatgaccc

SEQ ID NO: 103894 - DNA, 427 bp, Homo Sapiens
ggagcacactcgagaagccccccaggcgccatataaccactgctacaggcagggatgtagtctgcatttgtcacgaactacagagactcacggtcagagacgtcaagagacttcgcccaaggtcacacagcaactgagtggtagaggtagtcagtccacaccctcccttcttccctctgtgctggcgctcactccctccccaacactcccctgggagcccagcaccagtccttggagtgggatgacgcagcctgcagagaagctttccttccgagcgtctggaagaacccgaggctggcacagcaccatcagcaaataaaaccatgtgacttaaaaaggtgaacgagcggacatgattaaaatacttaacacaaaacgcgaattcccgcctggtggcatgttatcagcagctgacaggaatagcctg

SEQ ID NO: 103895 - DNA, 382 bp, Homo Sapiens
agggtgaagtcctgtgacttggtactttggttctggtatgatagcagcggatggcgtattttgatagtttgggtctggtgcaatagcaagctcgtggtcacggaaggctctgtgtacaagagaatgactgtcctgagtcttaaagggtgagaataataggagagagtattccacacagggaaaaccacaggagcaaagggatagcatacagaaacagtatgatgtgcctggctctttataagctatactccatcttcttagagcctgacacaattgagctggtggcagagagagagaggaggctgcagtagctggcagagtctggtcacagaggcttgagtttttcttgaggacaggagggccctgttgaaggatattcact

SEQ ID NO: 103896 - DNA, 573 bp, Homo Sapiens
ccataatcccagcagccacagagccagtctgtgcatcctcacggtccgggaggcccacagccaccgcttgcagcctccagcctcttctggatgttctgtcagcctccgcctcctcatcctcagtttctctggcataggcctctcccagtgacgggcaaggccctgcgtctgcccctgtgcttccgtccagctcctggttctctgagacagacgcctctccctcctcagttccacatcccgcgtcctgggttggcagcccctccccgcctgcctctgggacttctgatagttcagactctcggtctccttcagcctcagcccccagggtctggcctcccgcagtctcctcctcctcccgctgctcgccatcggccgcatcctcctgagtatttcctctctccatgtcctttctcgtgcggttttcccaggctcctgggaaggcctcggaggcctcaggcctttacagacccgcgtgcctgggacctgcctccaggctcctctcctgctcctctttgctcagggccagaactcccatgagctccacctccctgcctccctttcctcatactgcct

SEQ ID NO: 103897 - DNA, 371 bp, Homo Sapiens
gaggattgtcatagtggaagaagctgcggaagtccttgaggcccataccatgcccacattgagcaaagcttgccagcacctcattttgattggggaccaccagcagctgcgccccagtgccaacgtgtatgatctggccaagaacttcaaccttgaggtgtccctttttgaacggctagtgaaagtaaacattccctttgtccgtctgaattaccagcaccgtatgtgccctgaaattgcccgccttttgaccccccacatttaccaggatctggagaatcatccatctgttcttaagtatgagaagattaagggggtgtcttccaacctcttctttgtagaacacaactttcctgaacaggaaatccaag

SEQ ID NO: 103898 - DNA, 325 bp, Homo Sapiens
gtcagaagccagaggatatgctgaaggaagcagagattgtatattatgtcagaccaaaagacccaagagaaggtcatagtccaagagaaggagcagaaagctcactcttcactaagaccataaagaatgtgctgggagaggggcaccatcatcaataataagtttggtggtggctcttctggtggttggagaggcagtcaaaggagtccactcaacaacatcatgaagatgatggagctccatgccaggagaagccaggttctggggcttcaccgctagatgccaggaggttagaggtgagggctaaaggcttaagggctgctgg

SEQ ID NO: 103899 - DNA, 445 bp, Homo Sapiens
tcatttcctgaatgggtattcttgattctaatgaaggaatgccccctgccacctgaatgcatccaaagccagctcaggagttaccagctcaagcagcagcttcgagcggacgctgctgccatgcacgggacaaactccgggaggcagtattcccccgactcaggtggcaacacagccattctcaggacctggcttagatagagagcacgtgacttctacagatcccagggttaaagccagacctagaaacctgatggctggcctgaacgggcagaggcaaacaaattgccaggaagccaccagggcagtcctgggatcaagatgcttcagcctgcctctcccgtaacaggggaggtactgagattgcaagtggagagtctcctagccagaggggtcgatttagcccaattcagcactctaaggtaaaaaagggaaactaaaccat

SEQ ID NO: 103900 - DNA, 351 bp, Homo Sapiens
tgagccaggagcctggcctaaactctgctgtttaatcctaacaacaggccttcctctgccaacacctacccccctgtcctgacttgctgagtcctataacaggtctgctttttgagccctgttactgctgctcatcactgttggcagagccagtctcagctgggcaatgcccttagcctcaggggctgggttgccttggccactggtgggggcggacttgagactctggtgcctcccatgtggaagacccaagtctctagtctgtgaagggatcctcaggatttcaaaaagtcctttgcctttgattaggggattattgctgctaccaaagtttttgggtcactttccttt

SEQ ID NO: 103901 - DNA, 496 bp, Homo Sapiens
gacagcatccctaaccagtcccttccccttgtcacctctccctggctgagccaacttgctttgcgttaactacctttctcacacatccccaagagcctacagaaaaggtctatgatcttggcttgttactaccaaatcatctcaaacctctcagcatctttacctactcagttaagtaaggaaactcacaattccttgagtagttcctgtagccctctcccagcctgaatggctcttcctggtgttgccgatgctaatcaatgactgaacacaggactgctgtctctctcatttctctgacctagctggcatatctttactttcttccctcttggcttctaatgaagacaaaactgcattgcctaattatcctttagaaagaaaaccttaacattctttaatacttgatctcttttcaatgccttctatttgtttctgtaattcagctaaaaatagttcagccattgaaaaaaatagattccaataaaacatattg

SEQ ID NO: 103902 - DNA, 389 bp, Homo Sapiens
gaggacgggagcggttaaccatcgggagggggaccagagtgccccacactaggcacgctagttcactgtcactgcacagctgactcggagcatctgtgggcttaatacaacacccgccagctaccggttctgtgggtcggggcctgaatgtaacatggctagagactgccggaactgctcagacgaacccatcaaagagtgcgggaccaacgaatgctaggacaacaacggcggctgttcccacgtctgcaatgaccttaagatcggatacgagtgcctgtgccccgacggcttccagctggtggcccagcgaagatgcgaagatatcgatgagtgtcaggatcccgacacctgcagccagctctgcgtgaacatggaggctaagggct

SEQ ID NO: 103903 - DNA, 296 bp, Homo Sapiens
cagtacatctcaatatttggcgcccttccctggtgggcataacccaaccccctagggggccctaaatgacttcttagcccttgaacactccttctaggcctgataaatggccccagacttatgcagaccagttgcatcctcaggccagcccatgcagacacttgccagccataaaagacataccccaggcctctagatggctctgaagatactcttcaggtcttgcagaccctccttcacccctgggacatatctcaagatctcaagatggccccagaaccctctaaccagaccct

SEQ ID NO: 103904 - DNA, 345 bp, Homo Sapiens
agctcggtaccccgggaagcccttaaccctttggggcagaaccaccctgccatcctgaagccaagggtggaagggaagcagtccaggccttggacacctgcccgtgcccaccagtgagcacggtcctgcccggaacaggcgggagcaggggacatgggtaactcctgcacctccttggagagcaccttcactgtgctaccccggttctctgtctcacaagcacaccattttattcctttctttaaacaatgagaaagctcaggcttagggaggtcaagtgacttgtccagggtcacttcctcctctctgagcctcagtttcctcctctataaaataggtgatagt

SEQ ID NO: 103905 - DNA, 263 bp, Homo Sapiens
  misc_feature (204)..(204): n is a, c, g, or t
acgagccactgcactcggcctgttgctttcttgaatgctgcttcctgcctccaccccacatatttccctctgtgttcttgaggcattgagtataggcaccagtaatgtcattaattgaatagctatttaggtcagatcttgatattatgttatttctgatttgtgtaaaattttacaaggttgatgtcatcattacccattctnacaggtgaggaaagtgaggcttagagattgatcagcttcttaagtttacaggctaacaa

SEQ ID NO: 103906 - DNA, 281 bp, Homo Sapiens
ccatgcactggccccgctgccagctgtgaggctcagcaccgtgggcctttgaccaagctgtcaaatttgttccccagccctagggtagtaactgtggctcacagttctgccacctccctgacacttcacagttctttttaccctttgacacctcatcaactttatacctggttaacaatccttgctattacatcctctgctcaaataactggcatggtttctgtctgttgactgacacacatatttaactcaggaacacaagaaattctgggctatccaga

SEQ ID NO: 103907 - DNA, 376 bp, Homo Sapiens
tcagtgggctgtgggttgagggtcgcttggttgggaagctctgcgcgcttcccagtggagggtccgcgacgggggttttctgatccctcatgctggcttttgatccgtgtcactgcaaggctgcccctggccccagccagcgtttcttcaggcaggtgcccagccaggtggtcgggcttgagacctttgagtctcgaggtctgttctggggaatgactgagcttgtggaggccaggaaggggttgctgggcttggagagcctctggggaggagttgtgttttgctctttgctgttttaagctgaaatgatcacaggaagggacagcatcaagagtttctttctgggacacccctcactcagctcagcggccgtgtg

SEQ ID NO: 103908 - DNA, 251 bp, Homo Sapiens
tatgtgtgaggccccctcctgggtgcggggccctgtgcaattatcatatgcccatgaagctggtccttgttgagtcctacagcctctaatcctagagacccaaaatgaattcagtcaagatgaaaaatcttagcagaccagttttcacagaaatagtcaaaagacccttccaccaaaataaaacaccaggctcatgtgacttcgcacaggattctacctgatagttaaaagtcgagtcattcctttagcag

SEQ ID NO: 103909 - DNA, 513 bp, Homo Sapiens
gcagctacctctctaaagagccctctccttttaacactggttcccagattttcccatttatctcacagcagcaggagtcacagctgggttcaatctctgcacgccaccatcaccgcccctcccccaaagttgtagaaatgttattctaaatttaaaccacacagcaccaaactaaaaatggctttaaaagaggatcaaacataccttgtgctgggctcttgttagatttcacaggcacgaatttccctttttctcagcatatgcagtcaaatgattcttaggtgatgaaacaagtatctccaggtttgcaggaaataaaagtgtctgtttttaaactgccatggggaaggggatggaggagggcagaaagagtagggagtgaagtgctgactcgcaggatacatctgggattctgagaatgtcgcccagctccaatgttagcgcatgccagattcttccccaccccttttctgatcaatgagttaggaaagtcagatgaaactagagtcagaa

SEQ ID NO: 103910 - DNA, 423 bp, Homo Sapiens
ttacactagggcttagcctatatttggaaaatgggttatccaaattatttagaagtccaaatttttattgttctacttgaagttatttattaccttattcctcctgtaactaaaactaactcatcctccatctcctccatttgttccataatgtagctaatcttatgaactaatccattaatttgttattggaagaaatatagcccatccccatcaaatcaaagtactcagtcttctatgaatcatacataagtttaaataaatttctacagacatgctgcaggccctgctgtccactggtgtgaattttagacgaggtaaaagggaagggtgggtcttgacaagctggtatcaagtacatagaggcagacaaggactctgcctttatttcaggtactgcttctgagaaaaatgaggaagtgc

SEQ ID NO: 103911 - DNA, 379 bp, Homo Sapiens
gccattacacatcctgtctctgggcgcggagctggctggaacctctcagcctaacctgccagacaacaccccctacttcctcaccctgcctcactgcattctcctgaaaccttcatccacacaatgcctcccaacctcactggctactaccgctttgtctcgcagaagaacatggaggactaccagtcaaaccctaatctcaatccaggtctggaagctgcgataatcttgagtacaatacgaactggtaatcagcaagcggggtagctcaaacagaatactggcaaatgaaatttgccttagagggccatgagaacatagtggcctctgattaataccaaagaaagaaaacatctagaataagggttaaggctcccgg

SEQ ID NO: 103912 - DNA, 354 bp, Homo Sapiens
gtatagaatgagccaagggcatctagagcaaagaggtagttccctgccccgtctccatctccctgtctgcactgtctctcccagaggtgtttgctggtgccttctttgcagttccctgtgctgtgtcatgcccgtttgctgacccagcccctgctgtgccttccccatcccagtgtgactgtcgctcttggtagttcctccgtgtttcctttgtttccttaggtgacttgtctttgccccactccctgcagtccgcagcacctgttgtctccttccctctcctcccgcttctcctcagacgtcatctgttctttctacagttgttccccctgccgcatggttaatggctcccgg

SEQ ID NO: 103913 - DNA, 430 bp, Homo Sapiens
  misc_feature (121)..(121): n is a, c, g, or t
ctcgtattcagttgccacgacctcaagctcgtgggaggcctgcacagccggccggccttggcggaggagatgcttcatctggacggcagcagatccgatgagcagcagggagtctccgtcncagacgtcaatctgcagggtctgcacggccaggtagcgggcaaagcagcgccgctcacctggcttcaggaacccagggcccaccatgtacctcagctggaagccaggagacccagcatcaaaggtgccatctctgctcacaggcactgcacgtaccaagtcttgttgattctgcccctaaacccacgggaacatgtccagtacacttgcctccaccttcactgtcccaccttggtccaagccgccaatgtgtctagcctgcactcacaccttctgctggtctcccagcctccagggttaaggcctccgg

SEQ ID NO: 103914 - DNA, 259 bp, Homo Sapiens
catcagtgtcagagtagacagggacttggtttggatgagggtgtgcgttactggggccttgatcttagtgagatggacctcgcctcattttactgtgtttcttggggctggggaagggcaggaaatgaaagaagtggtgcattttctacatatttccagtggccctcagtttttggtgttgcctttctttgcctccctgttcacatcagctgtctctcatttgccgcagagcagagcgtggtgcagacagaggcaagcc

SEQ ID NO: 103915 - DNA, 324 bp, Homo Sapiens
cagatccggggatggagggagccggagaagaggagtgagaaggccggggaggcaggccctgctgtcttcctgcaggccggcagcctgctggcagtggaggaccaagccgaccaggaaaggaaggggtcaggaggtcgggcagggccacagcagggacagacaagtccccagaagggagctgcaggcgccctcgagtccaggccccaagcctggctccggatgtccaaagagggcctaggccaggcctctggtgcggaaactgagtcacagccagacctcagggcacggcctagacgcttacgagccaggggtaagggctcacgg

SEQ ID NO: 103916 - DNA, 258 bp, Homo Sapiens
  misc_feature (34)..(35): n is a, c, g, or t
ttctccacctctttgtattccaaagctgctctgnngcagtcaaaggtcagggagataactaaaataatttactgtcactttagaaattgatttcaaatatctgaatgataccttatttattctctttaaattcaatcaacagccacttataagcctgtcaatacagagataacaaacatgatcttattctatcttattctactactagaataagaacccttcaaagagaagcagaccaatatttataaaagagatggt

SEQ ID NO: 103917 - DNA, 374 bp, Homo Sapiens
gggagaccctccagctgtggcaggaggggtccatgagggggtggtggcagctgcaggggccccactcaaggccagagctggagggataccagggttgatgacggctctgttcccactgcacggttggtccctgccctgcttcccactcttctctctgtgtagtgtggcttgacctcccatggtgtttctccgcatgtccagagatgatgcctttgctgcagatgggtatatgggcagggtctgccaagcggggaggacattgccctggctgctgtctcaggcatcactgagaacagatgtggaagccagttccccaggtgtggaggttttcttattctcctagcccctcccctgcctttctcaagaggtattgc

SEQ ID NO: 103918 - DNA, 368 bp, Homo Sapiens
  misc_feature (265)..(305): n is a, c, g, or t
ccgcaagcccttaaccctggagactgacacggcggggccactgacagaccagacgaggctcagcctcatcatcctgctcctcagaggtagcccctgcagctggaaaactgtaggactgtagctgatgggaccaaaggggctccagagccagaaccctgaccctggcccgagctccctgcagtgtaccacacgcaaggccatcccagaccaagaacggaaatccgctttttatgaggggtggcggcggagtctcgctctgtcgccnnnnnnnnnnnnnnnnnnnnnnnnnnnnnnnnnnnnnnnnnggtcagaccattatcatgactcagcctaccaagtagctgagactataggcgctcgccaccatg

SEQ ID NO: 103919 - DNA, 406 bp, Homo Sapiens
  misc_feature (380)..(380): n is a, c, g, or t
agagaagcctagcaggcatgctaacgctcaaatcaagagctctccagcagagctcatacctcctggagcctgtggatcaatgggaaagccaactagagaagaatccagtcagaaatgagagcactgccaagtaggagtcaggcagtctccgaatacagtgggtctgcagaaaacagagaggcagctgtggttggtgcaactgagaaaggcattctggcaaaggtggccctggagctgggctgggaaccatgtgtgcttggctatctggagaggaggatgggggctttgcggtagggcagaaggctaagcctagtggctggtgtgggttcccaggggtgggagtccagcccaggccaggcaagtaggattggcagggaggngagccttgtgagtgaagctgatggca

SEQ ID NO: 103920 - DNA, 160 bp, Homo Sapiens
agatcgctgcatgctgccgcgttgggttaaccatggtagcattttaccatgagaagccatagcaagatgtgccaggtgcatgctgctggaacacctggctgaggctccaacagcattttcctatgactgagggttaagcgctcgcgggggtattctatag

SEQ ID NO: 103921 - DNA, 220 bp, Homo Sapiens
  misc_feature (76)..(85): n is a, c, g, or t
gcctacagcctcctcccctctacatcacattgctcatccccaccttgacctctgctatgaacaaatggagctttcnnnnnnnnnnagagacagggtctcactctgttgcccaggtggagtacagtggtttgattgtagctcactgcagcctcgaactcctggcctcaatcgatcctcttgcctcagcatttaaagccgatggttttattagcgcgtgagc

SEQ ID NO: 103922 - DNA, 360 bp, Homo Sapiens
tacctacctctccaatgttacatcttaccactaccatcactcctcttgcattccactcagaatagcatttcatcctccaaccattctgaatttttttccctagttcctctaacatatgttccacacttctaaaccctgcatattcagttcactttgctagggatgcctcccctttcctgatcctatatctaccgtccacctggtgaatgccacttgtgacaagaccgagaccgtccctgaccagcttccgttccccattctgaataatcactccctccactatggcatcaaagactttgtatatacttaaattattgctcctatctccctacagtgtttatttacatgtcagtctcctcc

SEQ ID NO: 103923 - DNA, 245 bp, Homo Sapiens
tagtggtgcagtgtactcctgcttagcagtagccacagagctaatcgctccctgtgaccatatctctgtcgaatgtcctagacctagtccacgcatgaaagcctgtgcaatacgatctgcaagattaaatcttagctcagctcatgacgtccatagaagggcctctaagaacctcaggaaaatgaagcaagtataatccgctgatctctggggatccctgagatcctttcaaaagtccaagaggt

SEQ ID NO: 103924 - DNA, 319 bp, Homo Sapiens
ggagagtggatgggtgaccagagggagagctgataggtaaaagggagacgctcctggcttgggaagcaggagtcctaggttctggtctctcagatctactgggcagcgcgatcagaggatttatctcacactgtcctaagtgttgtcagccacaaaataactgctttggacttgatagctcttgctaatcattctctacttatttttgattttaataagtccaagtgcctgtttatgaatttacactgagacatatacttgagtttggaattctgcctctgagcagatctgtttgggaggcctctaatgctagtcactg

SEQ ID NO: 103925 - DNA, 425 bp, Homo Sapiens
  misc_feature (381)..(381): n is a, c, g, or t
  misc_feature (401)..(401): n is a, c, g, or t
  misc_feature (413)..(413): n is a, c, g, or t
gtgtaaatcaaactgttctcagctaccttatacctgaattactgagtagagcactaatggagaaaatgacatagccacgtggactggaggaagtacaaattccaaatcttcagcctcatggggctgcaggactgatgcaggatctgctcctaggcaactcattcctcaattacccattagaaaccattaagatgtacagttgctgtccttgctgtcctccccagcacttaggagcctcttagccacacttatccaggttttctttcttcctcttacactggaggttcaaggttaatcctttcacgtattctccaaattcctcttgctgctaacttctcagaaacttgcttcagcatctcctctctttcttaatactgctgnctctcacctttgtatggctntaaacttgaggngtaaggggctcc

SEQ ID NO: 103926 - DNA, 402 bp, Homo Sapiens
tgcaggatgctgagagcagtgacccttcaatattgggccccaggaacctcaccttgcccctggccctgctgataagctcatgcctgtaggccaagatctacttctgctcctgagtggctactgaccccgactggaagcactgcacataaattctgccccctcagtccacatctggcgacgatcgagcaagtaagtcatcacccaacaggctctggctgaaagcagctggcaactgcaaaccctaagagcagctgcggacatagatttgaactgaagcatagtcaagttattgtcagccctgatatcctcattgccaactatcctcatgaccaggactgttccctgctagtagccacactgctttggaggcattcccaagcaatgtccagaacatcccttctg

SEQ ID NO: 103927 - DNA, 292 bp, Homo Sapiens
atagccacatgccgttccccctcctctgaattcccagaggaatacctctctgcgtgccacccccccatgcctggcataaagacccccttgtactgttctctttctgtgtgtacacatcacatctccccagggagcctatgagcttcctggggggccaaactcagatttaccaccctcagtcttgaacccaaagcacagctgactcctgctcagctttcaaggctcatggcagccttcacctattccaggaagactactcaacctccatgaggtgtaaggactccggctaccg

SEQ ID NO: 103928 - DNA, 220 bp, Homo Sapiens
gtgggaagggcagagggagaggcgccagacactaagagccaggactggacacagggacccttcaggtcaacagctctttatcaaacacctgctgcctgctctaggccagatcctagagacgcaggctgagcaagacccgtctctgtccctgagctcttggttggatgggaggcgccccttaaccagatcatcagcacacatggtaaggagtgtgggacgg

SEQ ID NO: 103929 - DNA, 354 bp, Homo Sapiens
  misc_feature (227)..(241): n is a, c, g, or t
  misc_feature (262)..(313): n is a, c, g, or t
agcacccgccagccagtaaccatagctggaactggtcattgtctaagggtcgtgattcttaaccgttctcagccccttccacacaggcaaaagcccaaagcatttcttccttttttttccattctgaggccaccttaggtgctagtggccaggtagtgtttatagaaaatctggactctcttgagataaatatttataatttttaccttttaaaaaagagaacatcnnnnnnnnnnnnnnnaagacagttgggctctgtcannnnnnnnnnnnnnnnnnnnnnnnnnnnnnnnnnnnnnnnnnnnnnnnnnnntgggtccaagcactgttctggcctaaaccacctgagtagct

SEQ ID NO: 103930 - DNA, 238 bp, Homo Sapiens
acatatccctttgaataataccttctcttaacatcaagaaattcaaacttcagagaagctgtccacatgccccgcctctacttcatctgctactcactcttcaccctgcactagacaagccttgcccacactgacaccactgaaacagctctggccaaggataccggcagctttcttactgctaaatccaatcaccatgctaggccctcaacccacctgaggcgtaagggctcccgca

SEQ ID NO: 103931 - DNA, 511 bp, Homo Sapiens
  misc_feature (109)..(109): n is a, c, g, or t
actgtcctcttcatccatccatgtcaacaccctactcatttgtgaaggcctgggtgagaggaaactcccagtgactttcccctccctgtcactaactgtgacctctccnttcctctgaacagatattgagatcggtgtcaggagtggtggtgcaggaatcgtatgacagggattgtggggtgggggagtggaagggtgatggggtgaggactgtcctgggtttgctaagttttctgcagtgaacgtgtgctattttattttgtacttaggagaaaaatgcaaggtggggttctgttgtgtttggcttttttcagcagggtggctacctgcaattctggataggacacttccatgtctggtagattgtcccacacactgcaggacatttgctgtctcagaccccacccactcattgctggcagcaactcccagtcatgacaacagctaaagtaatgcccctcccacatttccaaatgtcctcaaggatggggggatgctattgttcccagtt

SEQ ID NO: 103932 - DNA, 268 bp, Homo Sapiens
gagtcctcaccaccccctctctgagtccacttagggagactcaggttgccagggtctcagggtcagagtcttggaggcatcttggaggtcaggaaagaaagctggtgagagggacccttcgaaagggaacgcagcctgtcctccccaagtccggccacagatgtcggcagctggggggctccttcgggtggtctggggtgacctctctccgcttcacccagagcactctcaggggctgtcgtgatgattgcctggtgggactctgtcc

SEQ ID NO: 103933 - DNA, 407 bp, Homo Sapiens
ccgcgagccgttaacccttgcgcaaagagccggcagaagacaggaggctctcctgttcatgtccataccagaccaggctacgagtgcccttccgggtagaacactgattctcaactgagcagacgctaaacttccctaaggcacttaaaaacaccaccagttctctgaaatgagaatcgccagcgattcccatttaactaggtaggggagaagcccatgcatttttttaagccctcaggcatttcggatctgcagccgccagtgaacaccgctactgcggaaccaaggcgaggctgcaggcagctggagcagaaagttctgtgccaccaccttgctgttaaggtggagccatccccgctaactacacataaggaaacgccccaaactggttccccacgggttaaggg

SEQ ID NO: 103934 - DNA, 422 bp, Homo Sapiens
  misc_feature (286)..(286): n is a, c, g, or t
gcccttaccctccgggagcccttaaccctccggaagcccttaaccctcggggagcgcacaaagacagatatgcttgcgtttcctctgcaactcggaaacagattattactctggctagagggatttaattcagtgccacagatacttactgaaagcctaccatgtgccctgccaaatatctcagcttgtttgggcaagaaactctggaccacacttggacatacagatctgacagggacaaaaggaggagcttccatacttcaaggctgtttagtaccttcttttnccgtccgttctgtcaccactcatgtccagcctttccttcaagaactctaaagcgagagattatgtctcgagtagatgctatgtccaattataagttcagggctcgcgatgctctactctagagtcgcactcagcca

SEQ ID NO: 103935 - DNA, 337 bp, Homo Sapiens
gttcgggagcccttagccctggtacataattggtaaaggcagtgtgagactcaggtgtcccctgggtagaagcaaagggatggcacatatttcggggaggggtattacatctggcaagaagtcaaactagctggggagctgtttgagacaaaggtccttccttgaccccacaaaggcaggccaggattcagggcagtctggtaaaatgagagcagcttggagagtagaaacaggccattcagcaggaacgtgttctcttgaaaaaaactcacagatgtgaaaggtcatctcatccatcccgactcgtagacttctcacccaaagaagtccccagggt

SEQ ID NO: 103936 - DNA, 303 bp, Homo Sapiens
ctctctgtcggttgtgcactggtgaagcccctaaacagtcagctgtctgttatctgcagttctttgatttactgtcatcttgaaacgtcttctgtacttaactccttgactgatgtctgtatcgtcactgattgctcttactctacacctagcctagcagcagctagaagagaaagcctttggaatcaaagcacttaattaccctcaccttttcctttctccctttcttgggaaagcatcagtcagacagcaaacataaagagacaaaaatacactccttagggttaagggctgccgtggtgt

SEQ ID NO: 103937 - DNA, 293 bp, Homo Sapiens
caagcggggacgaatgctggaaccagccagatgctcctctctggtgggagcaggctctgtgcaggccccgtagcagtgtcctagcccctgccctttcagcatgtgggttcttgtccagcgtcttagaaaattgaggttgcacaaaccgatagtgggtagtgtatgtggaggatttattgaatgatggctggcagcggatgggagttggaaaggggatgatgcgggaagaaggtgatctttccctgaagctgcaccatctgaagttagctgcatctgtctgtagtctctgatgc

SEQ ID NO: 103938 - DNA, 620 bp, Homo Sapiens
  misc_feature (518)..(518): n is a, c, g, or t
ccggcagcgattaaccctgcgctacccttatccccacgctatcccctgctgccaggaggccccgggaggcctcgggctccctcctggccggggcggccatcttcaccccggatgcctggctccccacgctcgcctcggggcccaggcagccatactccagggtctcccttgtctcctttgagtacagaggccccaggtggtcccactgaccccggtggtccaggtggccccaggggtcctgggattccttctctccctggggggcctgccagaccccgctctccactagggcctggctgacccatctctcctcgagggcctgtctgacccgggaacccaacaacaccaggagcaccgggcaggccagggaggcccagatctcccttcacacctggagggccaggaggcccaggggagcccgggaccccgactcctgtgtcacccttgaaacctttgggtcctggagcccctttctgacccatagacaggtgggagttcaggcatggcacaggcacagngagcccacacgcgagtgcagacatctggctccacagacgtgagtgcggacacacgggcgctcagaggggaaccccaacacgtccactcccgggtagagcagg

SEQ ID NO: 103939 - DNA, 373 bp, Homo Sapiens
caggaaacatggcgctctggcagaccttacgcaccaccgtcacgcagtgaatattctgtaaagccaaagactagaggtctcagggccgaaacgatcttaaggtatgatcagtaaaaaatggaggtagactacagaataaaagctcatagagcccatatagaggatccaaaagaatccacagataaattatccaaattaataagggatgaattcagtagggttgaaaaaaatgaatatcattcataatagcaccaaaaactataagactatagaaataaatatagcaaaagatatctaagaccattatgaaaagaattttaaagtgttaacataaaagatctaaataggaatgccatcagcaagatggcgaggg

SEQ ID NO: 103940 - DNA, 302 bp, Homo Sapiens
ttgagggcactgaaacacgccgcggagcaggggggcgacgacacgccgaggtgttcctcagacacctggagtgcaaaacacggtggcaaaggataacaggctaaaccatgtggcaccccttccctcttatcagcttcttgctaccatgcagaaaagtgctgaaggaggcctgccctaaggcagtagcactagagcagggatggggaggacttggtggccagatgcatgtggacatgatggaaagggaagagaagaactgtcaagattttcactatcagtggtataagccccgtagtaatatg

SEQ ID NO: 103941 - DNA, 514 bp, Homo Sapiens
aacgcgctgatagcctcccccagggtcagcaactgtaaaccaaaccccagggaaatagcaagcttcagattctgggtgacgatgacattcaaacaggcccctaaagggaggtcaaccatcatgggccccaccatccctgagccattgggataccgaggtgtgaaccaccgggcatctgcagccccttccacttgctctgggaggcgctgcctcgagctaaaacagacgtgtcctccgagaagagcattgttcctcacaggccctgggttgagcagcctccacctctgctggaatctagaacagagacccccaagagactcagcaagatggggcactgtggctcccaaaagctgtgcccccttctcgttgagaaaatggatttttctcaattttcagatgctacctgtttggaatgctgtccctgggaaggcccagcgttccaaatggttagcatctaaaagtggagaaaaatccatttttctttgatgcaaaaggcaaagaggaagggtaccga

SEQ ID NO: 103942 - DNA, 303 bp, Homo Sapiens
tgggtgacagagcaagactctgtctcaaacaaaacaaaaacagtcaatctacagccaaacccagagccaaggaacatttccgaggatcctgccattgttgggtgccttcatgcattatgtccatgaggaaggaaagagcttccctttgcaggaaactggctcaacttggcccagatctaatgctgataattggcagaaccgcttcccactacaccatgatcatgcaggtgttcccgtgagtgtgacttagctgttgggtgtgaactgagagaggagattttgagaggaggctatcagcgcgtt

SEQ ID NO: 103943 - DNA, 332 bp, Homo Sapiens
taacgcgctgatagcctcctaacgcgctgatagcctgcaacgcgctgatagcctcctaacgcgctgatagcctcctaacgcgctgatagcctcctaacgcgctgatagcctcccaaagtgctgggattacgggcgtgagccaccacgcccggtaattttgccatcttttatcaggctttctgtgtcgaggacgctacccacatagagtagaagctgaagggaagggatgtgaagtgacctcaccctcagcttctagctcatggtgtcaaggcttgtgtgatcttagacacgtctgcctcttctgagcctgtttcttcatctgtaaaacaggg

SEQ ID NO: 103944 - DNA, 256 bp, Homo Sapiens
  misc_feature (238)..(238): n is a, c, g, or t
ggtgggggggacataggtgattcttcaggtggtggggacataggcgagtcctcaggtggtggggacaggcgtgatgcctcaggtggtggggaaaggggagactcctcaggtggaggggacagaggagactcttcaaatggtgggaacagacgagatgcctccagtggtggagacatgggtgactcttcaggtggaggggacatgggtgactcctcaggtggtggagacaggcgagatngcttcaggtggcgggaag

SEQ ID NO: 103945 - DNA, 456 bp, Homo Sapiens
aacgcactgacacactcctttgtacctgagctgaagcagcaccttgtctgcggggaaaacagtactttgaccatcgacagcagtcatgcctccccagtgcataagttcaagcagcaccctgccttccaggtaacagtgtcttggccatcccaagcagacacacagtccagtacctaatctgaagcaccttactgcatcccaggaaaatggcgcctgcaccaacctaaggtcacacaccctagacctcagctgacgaggcacattaccctctggggatgcagtgccttgcctgaactgagtagctatgcaatactgggctgagctggcatgggccttcacattccagggaaacaaagcagggcatgagatgagacaccctacactacaggccaaacaactctagtactcactgtagggagctagctggataaccagctgccacggggcaggactaac

SEQ ID NO: 103946 - DNA, 516 bp, Homo Sapiens
gcacgaggcccgccgaaatgttggtaagtggtcagccaagtgggccgctcactcccggttcacccactgtgttcctgtcagtgaagcaaacatccccatttggcaggagaagaagctgccggaggtcacactgctagtgattggtggcccaggggtagggcagccttctttcctctgcagttcactgctccagaaccatctccagcctcatagctcaccgtggacagccctgcggtgtggcgctgatgtacagagtgatgccaggcgttcatctccccactgagctcctgctgagtgtttgcctggggccaggtcctccttccgggaagtcattttagctggaaagaacagggtgggggcgggtggcaagggatcagagcatgagcgtttgagggcttcgtcaggggcagtgaggagcctctaaaggactctacatttaggaatgacagagtcaaacaatttaacaaagccctaaaggtccctgccaggaaggaatgagccccatgtattaccata

SEQ ID NO: 103947 - DNA, 158 bp, Homo Sapiens
agactcttattaaagaacaacatatatagagaacagcgtgtataccaatatgctaaatatacacaaaaatacactttgtttaaaattatattgatacaatttaaatagtgtcataaatattaccgcaacttgatgttactttattttagaatatccct

SEQ ID NO: 103948 - DNA, 441 bp, Homo Sapiens
tccgcggtagtcggatgtggctgcacgaagtaggtgctcagccccacgtgtgagcccttcgggggccagtgtccctgccatgcccatgtcattggccgtgactgctcccgctgtgccaccggatactggggcttccccaactgcaggcgtgagtaccccagtccttgggcgcccagtggcagggagttggtgccagagcccaaggtggacgggtcgaccagaaagcagggtcaggagaatgttctacagcctggcagggcagcattgctgccccatctgcgggcctgggcccaggacttcagcttgcgggccatgcagaaggtttcaggcaccagcaggtggtccacagtctctgacgatgatgttgattctgagcagctgcctccatgtcaggagctgtccaaggctcagcacccggggcaggggccctgttcttgtctc

SEQ ID NO: 103949 - DNA, 385 bp, Homo Sapiens
cggggttcagctccatggcccctcaccaaggctgcctcatcagcaggaccatggccctccacgaccccgtaccctctggtagcacagggccagccatagcccctgagtgacccctggggatgtagctggccctctccagtctcagcactccccatctccactgaccccagtgctggaccctgtgagcagtggccacacacactgcaaggggagctcgcagagccacatgtatgtctcgggccctgggtcgacagagtgtgcttagacaggcttgcatgctcaggtatagccggttggccaggcttgtatgctcaggtaagccggtgtatacagagacacacacaggtgtgtgtgcacacaactgcatgacttcccacatcctgat

SEQ ID NO: 103950 - DNA, 440 bp, Homo Sapiens
gtctgcaggaggggaaggactttggggcaatgctataagacaaaataacggagggcatatgggaggtacagaggctgcgaggcccagaggtagaggggatatgggaacagaagccacgtcaaaacccgtctggaaggacaatggatccaccattccattgctaggcaaaacaagtggtgggcacagaaggagtaaaggcttagacggctggaataaaatagggaacacgtgagtcagtctgtttaggctggctctccaaaaggactcgtagagcgtccctagaacagggctgcaccaagtgccctgtctcagggtgcatgaattccttctaatgagaactgagtgctagaacttgggccaggctcaaggacggcagccaggggctgatgatagggcacaaggcagcaggatgtagatgtagtccagccacccgcacattt

SEQ ID NO: 103951 - DNA, 172 bp, Homo Sapiens
cggaccggtcagtacggatgtggtcagcaggaagccaaactcatcagggtgctcgccttgcgcccgaggctggggccgcccaagaaagatgccgggggccttacacagcatggcagtgtcgttgatcgtcgtgaatatgtcttaatcttccagccacatccgtactggcccg

SEQ ID NO: 103952 - DNA, 316 bp, Homo Sapiens
ccggtacagtacggatgtggcgaaggggaagcagatagcgctgcgctcatgctggacagcaccttcagcatcctgcagacctgggacaccatcaacctgaacagcttcttcacccagttcgagcagttttgctttgtcctgcaacagcctatgatttatgaaggacaggcacagctgtggaccgatttgcagtacagggagaaagaggtgaagagatacctgtggcaacatctgaaaaaacacgtggtaccattgccggacggaaaaagcacggactttttgcctgtggactgcccagtgaggagtaaactgaaaa

SEQ ID NO: 103953 - DNA, 117 bp, Homo Sapiens
tgagctcggtaccggtcagtacggatgtgctccaccggaagagcacccccatctcctgcacttgagacgcctctatccccaccacctgaagcatcgcccctgtccccaccatttgaa

SEQ ID NO: 103954 - DNA, 156 bp, Homo Sapiens
cgggccagtagggatgtgtggatggtaggcaagccagaaaagcataacaccttctgccaggcagaggtggatatgattttgtaattagggtgtagaattgatggtctacagggagtgcaagggtaaaaataagaccacatccgtactgcccgggag

SEQ ID NO: 103955 - DNA, 313 bp, Homo Sapiens
cgggccagtacggatgtgcgggccagtgggaaatacagagtttgaatggagacaggggtggcacctgggcagaagtggtgaccaaagggtgcaggatgtgctggtgacctgggatagaagaggagcctggtgatcccaggcctgagcgatgtgggggtgagggggaattgggaggacaaaagaagagctcaggagtgcggaagcatcagaaactttctggcagtatctgtggtcactaagtcaatcaacaaacattagcctgaagtcctcaagccatagatatcatctccacatccgtacgcccgggcccagg

SEQ ID NO: 103956 - DNA, 136 bp, Homo Sapiens
ccagaatcagattgggaaatgtcagtaaaatttgatagctggagccataataactgcaactgcctatggagaatcactgaatttcaaccagacgaattcctctccttctccgcacatccgtataaccggtgccgat

SEQ ID NO: 103957 - DNA, 316 bp, Homo Sapiens
cccgggtcagtacggatgtggtgggaagacctagagaggttatggtccaccttagcactagctctctgagctataaggcctcaggatctgtggcattccctactcactgaaaagaagggaatttaaaacatgagttccaccacccagaaatgaaacagtgttcatttccagaatccagccatatagaacttatttctcttccaactacatgtcctttcatctcatttatacatgttgactaatgtggtgccctattcctggagtgctcagcctttcatctccacatagccaaagtgtgcacatccgtactggcccg

SEQ ID NO: 103958 - DNA, 390 bp, Homo Sapiens
cgggccagtacggatgtgtaattctatgaagaatattgaaaactatgttggggagtatggacttttaacaaatatttaaaaacatcatttttttcaacaatgtacatgtatatagtttaaagagccaaatgactcatgtaggcttgaggtgaaaaacaacagcctcttgattcccttcctcccatttcctcacccaccaggggcaactactgttaacaattctatctgattctcttggtgttttatccacatttctaaataacatgtttatattgctgcttcttgatctttcagttgtaggcactacgcattagagtcatactatagatgaagatttaacaatttttcacacctccgtatggcccgcacatccgactgaccgggccaggt

SEQ ID NO: 103959 - DNA, 449 bp, Homo Sapiens
tccctctgccagcatggaaagggtagaccagaggaggccaaggctgaaggttaagagaagagttttgtcacttgatggatgagtgatgaggacacagggaccacatacaactagggagagaggcaagcagttttttcaggtgcaatagaaagactgataactggagatttggggacagaaaaaagagaggcacggagatgacaactcccaggtaccactaggatggagcacacagggacagaatctgaacaggccactcacctgtgtggaacacgtgactggctcccaacagcgcaggcagaattcccacgcctggcatcaaagctgctactatctttgcggtctcatgagctggccccacagagcacagtactggtcttctctctcagtgagcctcctccctcaccccgtgatctgaagtcccctgcacttcccacatccgtactgac

SEQ ID NO: 103960 - DNA, 373 bp, Homo Sapiens
  misc_feature (118)..(217): n is a, c, g, or t
cttggtttcactgcgagctccgcctcccaggctcaagtgattctcccacctcagcctccttgagtagttaggactatatagcattacaccacgaatggcgttattttgtccatttttnnnnnnnnnnnnnnnnnnnnnnnnnnnnnnnnnnnnnnnnnnnnnnnnnnnnnnnnnnnnnnnnnnnnnnnnnnnnnnnnnnnnnnnnnnnnnnnnnnnntatgcgttactgagccaggccgaaaccatttctaatgattttatgattcttttatcgcattaaagtacaaagatacagttgggtttttaaatagactttatcttgttagagctatcttaggtatacagcaaaatcgagcggtaagaacagaaagtt

SEQ ID NO: 103961 - DNA, 313 bp, Homo Sapiens
ccgggtcagtacggatgtggacagtagtgttcaaggagtcatctacgccagcagtaaccaatattttggcactgggaacaggtttgtggaagacacgggtgggattgggggatggtttcaggatgaaactgtctcacctcagatcatcaggcattaggatctcataaagatcatgcaacctagatccctcgcatgtacaggtcacgatagggtttgagctcctacaagaatctaatgccgcggcggatctgacaggaggcggagctcaggtggtcacgctggctggcccacccctcacatccgtactggcccg

SEQ ID NO: 103962 - DNA, 270 bp, Homo Sapiens
cgggccaggacggatgtgcgacggatgtgtagttgcaaaagtgaagcttttgttaatgaaagatttaggttagacttctgaaagaacttccagctcagggtgaaggagtcaatccaaaggaaagtcagagcatctccttctgataaaaagggcagtgtttccaggcaaggggctggattccatgacctccccgaagactcagggctacagaagggtcggcagagcccccatggcacccccagggagcccccacatccgactgacccggtc

SEQ ID NO: 103963 - DNA, 152 bp, Homo Sapiens
cgggccagtacggatgtcgggccagtaggatggttattggggggctgtgcctcttccctggcctgatctcatcactgtgggtcactccctgatggccacagccaaaccagcaaatcagtctgttcttccaccacatccgtataacccggaca

SEQ ID NO: 103964 - DNA, 328 bp, Homo Sapiens
ctcggcccggtcagtacggatgtgggtgagattcccaggtcactggagttgtgtacctaggaggattatggctgcctctgctgagtcatgcaggttgtcagggaagtgggggaaaaccggcagtcacaggtctcatccagatcccatgcaaacggaagggctggtctcactctaatcatgcctcctctaaccgccccaagtctgtttccaggcaaagggcaagactggcttgaaaacttgcctgaggctttctgcctcccagctgtgaaagaaaagggctttagtttttcccctgcatgtgaaatctgcatgctggattcacggcccg

SEQ ID NO: 103965 - DNA, 307 bp, Homo Sapiens
ttgcttgttgaccaagatctggcttgggtcctttctcctaatgggaagtcagagtgagcaagggactctgctcttggatagcttgccttctgtgcaggagataaataatcaccaaggaaatggatatgcaggcaggtaacttcagatgcagatgggtgctatgaagacagtaagctggggtgaaacacacagagtaagtgtgggagcgacctcctttcgccaggctgtgtggtcaggtgcctctctgggaggtgacatttgggatgacacctagacagcgatgcccagcttattcacatccttactg

SEQ ID NO: 103966 - DNA, 361 bp, Homo Sapiens
aaccgcccgggtagtcggatgtgcaggctgtctgggttggccactggttagggtggggtttctgggagcccggaagtcactgggtcttgtacacaggcacactgagccaaggctgtggaggctggaggaagagttggctggactttccaaggatctggaagatgactgatggctggagttgctggagtgcaggagggactggctgctgcagcgggagagagtcagacagggtgttagggcaacaggtggctcaggggctagagtcaggctccggatctggtgatctgggttcccatggctttaaaggccaaatagaacactgcataccccaccccctacagcccacatccgtactggcccg

SEQ ID NO: 103967 - DNA, 630 bp, Homo Sapiens
cgggccatcggatgtggcagagaggcgggctgcgctgcagaagcatccagtttctgtggggctgagaggaggttggggtagtgggagtacttcctggtgacttgggctgtcgctctccttctaatgaaagtcgctctggtgttttgatgagagacttaaccccaggattttgattaatcatataaaatggacaaagcacaccatctgttgaaagtaacatgagaactggagcaggaggaagagtcttttcatcactgatggtgatttccacttggttagtatagtctacgacaactcccatgggcaaggagtcatcactcttgtctgtcacaggcaattcagctcgactagaatcatccagtagccaagattcccaattaatctgatcactttgtcgagcaaggatactaacttctgttgaagccgcagatgctgccagcactaaatcccattcctcaatgtaactgaggtagtaatgatgctgtctctccgtgcagctgccataacagggctccataaagttcacaaatatctctgggtgcttttcttcttttttcggtagtagagccatcaccacatctggagacgtttccagggtcccaaccgcatcaaccgttcggggatcctcta

SEQ ID NO: 103968 - DNA, 574 bp, Homo Sapiens
tcgtacaggccgaggcgggtgaacagtgctcagtgtacagctgagagcggctcaatacacggatttagagagagagattctgcaagcggagataagagtaggctgcactcgggagagcaccgtgtgtccaagccccgtgtctcatagcctgaaccccctagacttggagaggccatctagccccaagaagatggtttggggactcccatcaggactggggaagtttggagaaggcgccccgagctctggatccccggttctgggggctctgagcacaggggaagtgatgaaagcccctccctcctcctctccctcacatcccccgtgaggcttcccagctctctgcctaggtcctccttggtctccggttcctgatacggggtgggagcccagcactgagtgatcatcaggattcctctgtaggaaagtcctctacaggtgggaaggcaccctgggccatgagctgccccgtagggagggggtgcctgccgctgacacaatctacagcctccatcccgggagaggggggcaaagacgactgtactcctgggtgcgaacggcatagagcctgcag

SEQ ID NO: 103969 - DNA, 485 bp, Homo Sapiens
gacagaaaaacgggagaatggggaggagaaggagcggcacatggagctcagcagaggagacagacagaaggaaagatggcttagagaagccagcagtctgcaaggctggggaggatggagagtggtttggggttttgggtcgggctctaaggtgatcaaatgcagaagcattacaccgtggcctggtttctttactcagcccctggggtagatcccagccccccacataggtcccttggctggaaaaggaagagggagtggtcagacgaatctgaggagtcgttggagcaggagccacggaaggagctcgcccctgagcctgaggagacctgggtagcggagatgctgtgtggcctcaagatgaagctgaagcaacagcgagtgtcacccatcctccctgagcaccacaaggacttcaacaggcagcctggtaggaggacaccccagagagcacctccaatcctgttccttcgcataaaacagga

SEQ ID NO: 103970 - DNA, 362 bp, Homo Sapiens
gagagcgagtgattggatcgacggaccgacatctgcgagagggatgttatagaagtacagccgtcctcgtaagcacgtcggcagcggtgtgtatgcactgtaggtgtcgtgtataaatgccctgtgagtggataatttctgaggtatcctattcaagtccaattcacagtaagctcctcagtccctgatggatgtataactatcgctttcacacccacctctgccagtggttctcaaaaagctaggaagacaggacagtaacggtaaaatcctgctcacagggtacaccggcaggaagaagtggagccagccagcactacgggggaagagccccacagagaggagaacgggcccgaggtgac

SEQ ID NO: 103971 - DNA, 219 bp, Homo Sapiens
cgggccagtacggatgtgatcttgtgtgactccatgctctcagagtcttgctggaaacccccctggctctcagaccctcttctgtgaaccagaagtctctatcctgccttctgctgagggtcacaggataagtatccataggtgtaactcacacaccagcactttgcaaggtgtccccccacccacacagaagagttcctctgtcccacagagggactc

SEQ ID NO: 103972 - DNA, 382 bp, Homo Sapiens
acgctctctctgtggggtgtaacccccccgtctttggagacgagatggctcttgttcagccaagaccccagactctggccacaaaatgccataatgcctgttggtatttggcaaagcactgacccgtgtcctccgtctgctcgcactggggctctctggtgtgaacacccccaacagcagccctccgccccactctgccccctgggagccctcgctggatcgtctcgttctcctgcaacagcactggcaggccagggctctcgtccatattcatcaggccgcaagtgcaatgcctgaggggatcaggctttgctactccaggcaaacctgccccatcttgtcgctttcaggacctcccacaacctggttccccacagagaga

SEQ ID NO: 103973 - DNA, 621 bp, Homo Sapiens
tcctctgtgggtgcccgggccgtatgtggcctggccggccctgacgctctctgagccctaggatcgtgtgtgagatggaggagtcgctggtgcccagcccgccgccggggcccgtggagctgtgtgtgggtgactgttcagccgacttccgcacgcagtcggagcaggtctacagctttgtgaccccaacgtttgaccaagtgagtcccagccgtgtgcccggcgtccgggggcacacggcttaccatctcaggcagctctctggatgctggcagcagggtcacagtgactgtgagggacagcgagtgccagtttgtaaggagagatgccaaggcgatcgtgtgcatctcacctctctccaccctgggccccagccaggcccccatcacacttgccattgaccgggctaacatctccagccccgggctcatctacacctacactcaggaccccaccgtcacccgccttgagcccacctggagcatcatcaatggaagcactgccatcactgtgagtgggacccacctgctgacggtccaggagccccgggtccgtgccaagtaccgcggcattgagaccaccaatgtgagtaccagctgccccgccccacagagagagcgt

SEQ ID NO: 103974 - DNA, 516 bp, Homo Sapiens
tgctctctctgtctccctgtgaggccgggcctcgggggtgcggggtctgggatgctccagtaccttgtgcgcgtgcgtttccggtggctgttggttccaggggtgtgctgtgtgacgcgcagggctaggtgcctccagcagggccttgctccgcctgtatctaaactgccccacaggatgccaactgtgtggtgagcacgcacacacacccacgctcactcgccgcctcctcgcagaggaagggtccctccaaggttgggctttcctgagaagctggcaggaatcgcgaatatgcttgaaaataataaaacctactcttctggaaataaatgctacccactcagcctccctggcggctctcctccaagcatttgtaagaacagccggatcccctagagggtaacagaggactgacgtgccccaggagagggcggccaggtgacctgagacagcctccccacgagaccgcctccccacgagaccacctccccacgagaccacctccccacagaagaa

SEQ ID NO: 103975 - DNA, 438 bp, Homo Sapiens
tagaggatccccgacgctctctctgtgggggctctgtggggagaagcagtgtgagggcctctgaagagccaggaagctggccctggttctgcagggtatgtggctgacactatagtctagctgctagggttgagaagcagggagggcctctgactgcagaggcaggaagtccaaggttgagtctccacagatctccagctgtttgagtgcaggcttctctcctcaccagaccctgggctccctgaggtcagaaattagtccccatgcctggcacatagcagacaggcaggcagtgcccattcactcttgtcctgcccctcttgtcccaatcccaccatgtcttgctgatactgcacagggcattagccttgagcgggtccgcttctctccagcccgtggccactcacttcctccccacagagagagcgtcgggtaccg

SEQ ID NO: 103976 - DNA, 302 bp, Homo Sapiens
ctctagagtatccccgcacgctctctctgtggggacagacgtgggagagggtgtgcttggtctgaactggagtttgagggaagaatttctcgagcaagtgtgaatcctgaacatgtacctgtttttcaggcaaggaaagcagaccacatggaagcagatgaaggaaaaagcagaccacgtgggagccggatgaagggaaggtttctatgaaattgaaacagcctatctgccagtgcagaaagttatttcatcctttcctgcctgcagtgagaaagggggaaatcagagccatcagagagagg

SEQ ID NO: 103977 - DNA, 292 bp, Homo Sapiens
acaatgccacatcctggggaatgagaacagatgcacaaaggacagagcagcaatgccgaaggaggcaccgaggcaggccctgaagaggagtactctgagaccgatgccccaagaggcttgaggaggatgggctcgggaaaaactgcaacaccaagaccctctctgagacacaaccccaggggcacacccacacacttgcacctgccttatctggcagaggtgaggagtggggcagggaggagcctaaagacctctctgaccctaatgccagccaaccccacagagagagcgt

SEQ ID NO: 103978 - DNA, 322 bp, Homo Sapiens
caccgacgttctctctgtgggggtgcagactgtagatgggagggcctgtgtgtggtgcagtgggtggggggcgtgggaggcattctctttaccttctcctgtccaccaccagtaggaccggtgcttccttggggctgttttttatagccagtgattatagccttgagggttatcttcttggaaatttttctcactagccctgagattaataagcttctggaaacttcaatatcattatcaagaaaaacggagacaacagtacttgacttgggcttattctcaaagttcaatgaggcagagtccgtccccacagagagagcgt

SEQ ID NO: 103979 - DNA, 213 bp, Homo Sapiens
tgagctatgacggggacacgctcagggaccgtgaaagtggctcaaggagcagcagtgggctggcctgggggtccgaacatggtcccctggcggtagggacaagtaactgtcagccaggtaaggagagaaaagaccacccccaggccaagaacacagctcctggaaaggcctagagatgcaggtgcagaggggaagcgggacccccacagagag

SEQ ID NO: 103980 - DNA, 389 bp, Homo Sapiens
acgctctctctgtggggggttcagggagggtggcatctggtgaaagggggattgagccccagggttcaccccacatcgcccttctgggttctctcaacccctgccctttccccttctcccttagggggaataggtggaggaagagttgggggaggtggtgttggtggggcagggggtgctgcttgaggattcactgcgtagccaaagacccctggtaggaagggaagggcccccgcacccttctcatcaggtaggaccatgttgagagcaaccgggagagcggccaagttactgaagttgtaagggtaggcggcaaggagctgggggccatagacgagcgggtagggctcagggtagaaagtgactttggcagcccctatcccctccat

SEQ ID NO: 103981 - DNA, 427 bp, Homo Sapiens
tgaagctggagatggggatgcatagggacatggagagggagaaggaggggaccataaagtggggtgctgcatagctgaggaccatcgaacgatggtcctcagctgttgcctctggggctgtgcttgcctgcgagccacaccaggctgcagatgacaggaaacacagtgagagctggagttgctgctgactgggtgcccctccattccagccaattccctttctgtttgatgtccgtgaacatcacccacattgccatccaggccttgagagaggagtgtctctccaggtgagtccccaaacaccagctggttagagtgacccagcaaagccttgttcgtccccactctggcttaattttccccagctctactccacctgctggctcctggagtagagctgaggaccatcgttggggtaccgagctcg

SEQ ID NO: 103982 - DNA, 638 bp, Homo Sapiens
  misc_feature (78)..(290): n is a, c, g, or t
  misc_feature (447)..(462): n is a, c, g, or t
  misc_feature (508)..(563): n is a, c, g, or t
tagagatccccaacgatggtcctcagctgatccacctgggaggcagaggttgcatgagctgagatcacaccactgtannnnnnnnnnnnnnnnnnnnnnnnnnnnnnnnnnnnnnnnnnnnnnnnnnnnnnnnnnnnnnnnnnnnnnnnnnnnnnnnnnnnnnnnnnnnnnnnnnnnnnnnnnnnnnnnnnnnnnnnnnnnnnnnnnnnnnnnnnnnnnnnnnnnnnnnnnnnnnnnnnnnnnnnnnnnnnnnnnnnnnnnnnnnnnnnnnnnnnnnnnnnnnnnnnnnncaacgatggtcctcagcttctgtaaatctgcaaatttcagaagctgagtgaaccctgagtaggataaatccaaataaattcacagcaagtcacgtcagagtcaaactaatgaaccctgaagacaaagcgtttttaaggcagtgagagaaaggcatcnnnnnnnnnnnnnnnncgttgtttcatttatgaatgacaggtctttttttgggttttggggnnnnnnnnnnnnnnnnnnnnnnnnnnnnnnnnnnnnnnnnnnnnnnnnnnnnnnnnaactcactgtagccttgatctcctgaccaagccatcctcccacctcagccccttagtagctgagacatcgatgtg

SEQ ID NO: 103983 - DNA, 430 bp, Homo Sapiens
agggatatggcacagtctatttagtcaggaaattatgactgattgctccgatgggcaaattcaatcatactttgtagtaaacttcctataaatgtcacaagtaggattcaccaatggaagtcttcttcaaaatgctaccttataacaggcaaaatatttcctaattgaaatatttgaattaatgtgctttgtattcaaagtaacaaatgagccacaaaatatgcaggtagctcatgttcaaatctaaaaaagaaagggacattcatgagctaaataacagcatgctgagcccccagaatctacacagtcctcatctcagatcacctcacagcacctaaaagaactagaaaagtatatgaaaagttacaacatggggctgggcacggtggtctgagctgaggaccatcgtgggggaacctcagaacgcaca

SEQ ID NO: 103984 - DNA, 500 bp, Homo Sapiens
aacgatggtcctcactaattactctaccccaagccccattcacagtgagtagagaatgaaaacagcataaatctgcaagagcagaaagaacaggagacagtaaataagtggtataaaaaaacttcagggaaatggaaggtggttggagtagattaattagctgagaaagtggaatataaaatatctacagaggcggataccaattccttgcatgattctagccagttcatatcacctatctctaggaagactcaggaattgaaggtgccaggtatctctgagggtgcaagcaagatgtgaagctgaaagcaggaaatggtttaaagtcagtggaaagttctatacatgcctcatcctaggcaagcagatgagtgttcttacccaacctcacaaaaaagtcaaagatttatcttgtggagaaagccagactgcctatagacccaggaatacctggtgctgtggaaggtggtaaagaaatgcccagctgaggaccatcgttg

SEQ ID NO: 103985 - DNA, 409 bp, Homo Sapiens
caacgatggtcctcagctatgggattcccacctactacacaatagtaggtgggaatcccataggtgaggtcatcagagaaggctcctccagggaggtggggctgaaggtgtttgatgggcagggagatgtccatcttcgctagatggagtagcgttcatgaaggtcctaaggctgggaacgcttggcatgttgagggacttaaagaaggccgaccttgcaacagtgcaaagtgcccagcaaggaggagatgggcacaaggtagggttatggggattactgagactcagagcatgtgggtcactaaagaccatggaaaagagtttgcattttgttactccaggcctaagagaaagccattaaagacgacttcttaaaagacaaccctgacccaggctggagtgcagtggt

SEQ ID NO: 103986 - DNA, 403 bp, Homo Sapiens
cagtgacctccaaatagatgatcttccagacgaaatggttgcctgttagtacatctggtctatacttgaaagctgcaaaaggtgattgcgtatctcttgaaataagaggaattgtgaaatagttttctcaacctgctgcatggattttgactattcaggtcgtgatctccacaagttatttaaactagaatttctcaaccagtgtattgtgttagggtgcgttacagatgtgttgagatactggtcccctcacacctctggccattcatgcagaatatagtttggatacagcatccaaactaatgacctcagatccagagcagtcttgatcatttaccccattgagccactgcacccagcctggtctgaagaatttttaaacaccacagctgagaccatcgtt

SEQ ID NO: 103987 - DNA, 273 bp, Homo Sapiens
caacgatggtcctcagctattcttgggttactctgtcataatctctgaaacttcaaatggatttacagctaaaacacaatgatttttcgaaattagaacaacaacagctcctctccaggtctccacctgcacagccctcgaacgggaacgtcagctcctccccgggtctccagctgcacggccctaaaactagaacatcagctcccgcccgggtctccagttgcaccatcctcaaactggacatcagatcccacggtctcagctgagaccata

SEQ ID NO: 103988 - DNA, 355 bp, Homo Sapiens
caacgatggtcctcagctctcagcagtcctccctcctcaacttctcaaagcactgggattatatggtgtgaaccatccatgcctgtaccagcaaaagtattctgagaaaaccttcgaggggaatgccagcccatttttatttaaaatttcccaatttctccccaacgatggtcctcagctcagccacggtgcctggccccagatgtctctcttaatgagtggctgagctgtatgtttgttttactctcagacacatggctaccccttatgccagagagcagtgctcactggtagggacgatcgtcgaagatttagtctgtgtaactagccctgctgttttagataggtagggcag

SEQ ID NO: 103989 - DNA, 400 bp, Homo Sapiens
actctagaggctcccccatcgatggtcccagcttgacaaagtcgatgataaagaaaagagtttcccaggcccctgagaaccacaggcgtttcaccaacaccttccctcacccccctccagggaggaccgcagccagctgcccacatttcccagcttagaagaggctccttaacgtcagcgatagcttcagtgtactgggaaaccagtgtggtgtctgtgggctcctcccggaggaggaccgggaacgagtgggcgcctcctgcagagcactgtcaccagcccaggtcagggtgcagctgcagtactgacggacccagggtcatttcagataacaaacttgaaagagaacttaatttcacctcagcagactgatgggctaaaactaagaaacccgtttgag

SEQ ID NO: 103990 - DNA, 223 bp, Homo Sapiens
aagatgggtcagatggacttcagggccctagtagaccaacaggcccacagtgccctggaagctgaggctcatctatgccaagcagcaacttcgggcactatccttcgcgtagtagagcctggggagaaaggaacagttagaagttacgcactgtgctttgtaggacagtgagcacagctggataagaataagaagacctggcgcctctacaggtcaaactcct

SEQ ID NO: 103991 - DNA, 317 bp, Homo Sapiens
atggccaaaaacggctactactgtaccctaccccagagatacggaatgcttccaggtgggaggtaagccagcaggtaccgggtggaaatcaccctcaagtagcagggacaggtgtgcaaaggctcagagggagcttctccagggatcagcagagctcgattgcagggtttgaggctgtcacagaggctggagaaataagcagtgccttgctaagaagtctgaatcttaacctgaagggatgcgggagctactgcaggctggtaagcaggggtagtcatgctggttggattgcagtgctagaaaaaacctagggatgg

SEQ ID NO: 103992 - DNA, 485 bp, Homo Sapiens
  misc_feature (349)..(349): n is a, c, g, or t
gtcgatggacgcagcagaagctgccaacgaagtggtcttgggacttccgtgcagcagtccagagaacctctttatcatgccgcaggacggctgttgccagggctgctggtcagcggggtgacctcccgatcgtaatagttctggtagggcaccggagcggggggctctgtgcccgtgctcttggcctggatgaaactgtcgatgtcggcgtctatgctgcagccttccagcgtcagccgcacttcctcgtagagctcatcatccttgacacactgcatggagagctggttgctgtgcacccacagggcgttgcggagaatggtcagccggtcaaactcttgcagctganaggcctcacaggtggtccggtgctcctgctcccactcagcccggaccttctccagctgcgcaatgctctgcctgtatacccgctctgcctcggtggccgagtccttgcactgcctggctttgttctgacccttctt

SEQ ID NO: 103993 - DNA, 248 bp, Homo Sapiens
aagatgggtcagatggacgcacgcccattgctgggtgtacatgagaaccagggtggtgagagctgaaaaacccatcacccagccataatcagaagatcctaggactcagagagacactggttaccccgttgagggttcccaaagagagatacatgtacttctggtgggataacgatgactttagaaggtccatggacaaacctttacattctaatagtgaaggtttgtccatctgaccatcatggtcg

SEQ ID NO: 103994 - DNA, 236 bp, Homo Sapiens
aagatgggtcagatggacactcttcccagctgggcgccgtgtagggagtgcggggtactgtggcaaactggagagcacaggcctctggaaaggaggtcacctccacccaccacccacctgtgagactgagggtataactgggtgcagaatgagggtctggaattgtatctccctatgtttttttcaataacatctagataaatattggcatcctatgcaaagtctttccactttga

SEQ ID NO: 103995 - DNA, 465 bp, Homo Sapiens
attatggcatgaatgatagatggtatgaggatgggaaagataaactgttgatgctgatattcagaaaggagtgagtgggtgagtgtgtacatccaaaacccaacgcagaacccacccacctaacctgttctttctgaccgccctgtcactggaaggtctcacagcctcctgggctcacatctagcagctgctgtgtcctagccacacctgttcctcctctcccacccccatccccagctcgcaagctctcccacctggaccaccacactgggacttgaaccttctgcctcgaggcttgtcttgtctccttcccctacactggttgcagatttcatggccctgatcatatccttctctttccatggctcctacagatgagagcccagcccctcacgaggttttcaaacccgttcaccgcactgcctcaggcactcttccaggaatgtcgtccatctaacccatctt

SEQ ID NO: 103996 - DNA, 336 bp, Homo Sapiens
gcacgggatgatgttaaaagcacggacctggtgaggatgcagcaaagtggtgagaagtataaagactaaggagggaaccagtccgtgagaaatatcttggaaattatttactgccctgtgctataattatcagtcaaggatcaatccattttgtctggtcatatctgaaatactggtactagaaatgacaatctctaaacatgtgcatacacacatgggggtatttatacggtctctactttcgttccactgacttgcctattcatgcatcaagttaccagttaaaaatactgtagggccggacacagtggcttgatcctagctgaataatctcaa

SEQ ID NO: 103997 - DNA, 402 bp, Homo Sapiens
tatgaagtctactgaaatctcaccctttctttggaagttttccttgtgctatagcatccacttcgctttctctcttttctttaatttctttggggctaagtgctagatgctggtactagttgataaatgtttcacatgggtagatcttttcaacaagataatgatggccaagtggccaaggactgcattctcttgatgtatatcctccatagtgtctgacacagtgctaagcttataaaaaacacttactgatctatgctaaagaggttgattagcctgctgtaccttcgaaatcgctaaatattgatagagtatatatttgcctagccatgagggagattctgacgatgatggaaatttaatgatgaataaaatatagggttgaatttcatttgaagctgc

SEQ ID NO: 103998 - DNA, 248 bp, Homo Sapiens
tcgagattattcagctaggaattgtgaggaattgcacctggcccagactcttattaaagtaaaacaggatgaaataggtaaaaaatgccagcagataatcaaaatattagcctaagagcccatgtgtaataccacaattcctagcaataatttgagttgagctttctcatattttcctttccatgtaaaagatactcatctcttccccttgtttaccatatccagccccactagctgaataatctcaa

SEQ ID NO: 103999 - DNA, 308 bp, Homo Sapiens
tatggctggccacatggcgcactccccttatctaggaaaaaaataccccagattagccaggagttctgcagcaggaacttcacgatgcccagctagttggtgcacgcggccagggacaggagcagttcaccgaagtagaatccaggccgaccttgggttttcttaaagaagtccccatgggccgcagcctggacgtctgctccgttctccaccaggagggtcaccagggccatgtttgcgtctctcgatggcgatgtgcagtgcggtctggcccttgtagtacctgtccgctagctgaataatctcaa

SEQ ID NO: 104000 - DNA, 555 bp, Homo Sapiens
tctaagagttatcagttataaactgttgttagttggaggaggtaggctaggtggcccatcctgtaaaataaaagtttcagctagtgaggtagggccagtagggcaatcctgctagctgaataatctcattgagattattcagctaggaggagctgaatcaccagaggacatgtaccaatgtgggtttatcttctggtgcaatcacttctaaggggagaaaactatgaagaaataagaactccagaagacaatcagatggaaagttcttcttcctgtggaaagatcgtgtcttctccttctttgctgtttcttacaacattgtaagacctggtatgtactcaagagaactgaaataaaaacaattacaagaaatttaagtcaccacgggaaaaaaaagagtactctggtttttgtttggttaaaaaccaaagaatcctatacctaaggcagacagggaaaacctacaaacacctggaggtgcctgtgtatgctgagcctggagacagaggctccaggtctgaatcctggctttgccatttactagctgaatatcta

SEQ ID NO: 104001 - DNA, 519 bp, Homo Sapiens
  misc_feature (408)..(451): n is a, c, g, or t
gtaccacaatccagcgaatctactttcttatctctcccttgttcccctaactctctcctctagttctttcactaaatagccttgtcccttttctttgagaagatgaaagccaattggcaggattcttcattttccataaaaatttctaaactcctccctgcacacatactctttctccctgcctcaacagcttgcacacatgttcccctcttctcaaacaccaggcctctgggttctgatcctgctccctccttccttctcgatggtggtgctcctgcaattctcttcccaactccagcatcaccaagctctcccttttctaaacatctctctacaataagcactttaaaatccttcagaatcttccatttaaaaattaaaaacaggccaggcatggtggctcacacnnnnnnnnnnnnnnnnnnnnnnnnnnnnnnnnnnnnnnnnnnnntgtagtatatggagattctagatccagcctagagcaacatggtgtgatcaatggttactcataatgca

SEQ ID NO: 104002 - DNA, 585 bp, Homo Sapiens
ggtacctgcatttactccatggcttagaaggctttgcatcttgaacatctggatgcagagcggtcacaggccatccccacagataggttcctacagatggggtgtgtgaccatgttctctcctcctccacacccctctggggcttacagctaccaaagcccaaaatccttcagggctcaggcctcagggctaaacagtgattcacagactttcacacttccccacacacccccgcgcatgccaactttttgtttcggtaaataaagacattcaaaagtaatgaccatctactctggccctcatttcataaaagcaaggctactttatcaccaatgtcagatgaacaatctcagaataaggctaagttctaaaattaaaatacattttatttcatgacaaactccctctacattttcctcactattctgtagacaggcactggggagcctcccacacagctagggcccctggagcacaggctgcaaagaccccaggaggtcccagaatctacctgccttaggcccagagaggggtggacgttgcccaggaccatgccgctggaacaggaaaaacgtttccagtttt

SEQ ID NO: 104003 - DNA, 397 bp, Homo Sapiens
taagaggtagaggaaggatttgaacccaggctgcaagctctgaagttctcacctggagccaagagatctgggataacaacctacattccaaggccagggatatggaaacttccagaaccatgtggaggagcagctagactgggtgcaagaagagatcaggcagggacctctgaattcaagccgctgttcttgttatccaaggggcagctcacctgtcagttgtccgcccaccccttgccaaggacgagaggacctaaggtgctaggttgggccatttccccagaggtcagagccagccaagacagcagcagtctgtcaggctagacaaatcggggtcacatggcatcttgggctttagattccgaaattatctgtggcctgtaatcatagccataag

SEQ ID NO: 104004 - DNA, 426 bp, Homo Sapiens
tgctgagattacaggtgtgagctactgcacccagcccacttttttaagtacagaaaagtaaaaataagaaagctacaatgtctcataatctcttcacctgtataaatctctttgatgttttatgtgattagaacattcaaatagcacaaaaaggtttaagataaaaaagcaagtacttcccttctcccaagtattaatctgcaaagtttaactaacctcaaacaattctatgtgtaaacatcttgtcatttatttagatagaattagttatatggacatatgtcatttgtatatattcaattaagtagaaatcatactagaatggagacttagttgctaaaggtgggattccattaagagataatgcaccactttccaagggcataagaaggagtaattcactagacaccgtaaaggacatattag

SEQ ID NO: 104005 - DNA, 542 bp, Homo Sapiens
  misc_feature (353)..(465): n is a, c, g, or t
aaatcgcacacacacttctatatatatatgccaagagtaactatattctggaattcaaaaatttgagaaattaatccaaaagtccaatgacatttaattcagtattataaagacagagctagttcccctgcccagtcaaacagcaaaggcctctacacctttccattccctttcctttatgttcatcatttccacttcatatacctcagactttttgtatttgtacaaaatatgtcattgggtgtggcactttacattaaaaaaaactgaactttattaccaaagacactgtccaggccgggcgcggtggatcatgaggtcaggagttcgagactagcctggccaatgcggtnnnnnnnnnnnnnnnnnnnnnnnnnnnnnnnnnnnnnnnnnnnnnnnnnnnnnnnnnnnnnnnnnnnnnnnnnnnnnnnnnnnnnnnnnnnnnnnnnnnnnnnnnnnnnnnnnaggttgcgtgagccagatcacaccctgaactccagcctgggcgacagagcgagacttcgttctataccgtttgaggt

SEQ ID NO: 104006 - DNA, 436 bp, Homo Sapiens
tatactatggtgtcagtgtgtatgcatacagggtcacaatagttgtacaaagtattttcttcctaggaatctgtcaatggaaagccaagggcttgctgttagtaacactgtgaggtattcccttcctgtgtattttctgtttattatcacctaatgtctgctgccactgcatatccatagccaaagaagatcacatatagcatctgtccagtatgaatactgtggctgatcacagtagctatggtaccagaatttgatccaattatcaaatccaacaattcctaccatgtcagccactaatcagagcttccaatcagaacaagaaagcttgttttcccaaactgagataacagaattctaaccaaaagcaaattattgatgcattaactagctagcaattcatataggacttttaaaaataataaaaaggtttttt

SEQ ID NO: 104007 - DNA, 309 bp, Homo Sapiens
agtgcagctaaaaccaggcgacggcgcacattatacctcggtagcaaaccagcgtgtccacacatgtcatccaggaacttaaagtaaaatgaaattaaatacaaaagacgaagaagataggtctaacatgattctagagcttcaagcccaggtaactacaagactgtagtttcattcgcatcaccagatgagagaaatcttgtgtgggaagataagaaaggaacagggagatgacacagagctggaagagagaaagaaaaaaatgaataaactaaagtgtaatatgcttcagttctgatacggttttga

SEQ ID NO: 104008 - DNA, 505 bp, Homo Sapiens
caaaccgggtagaagccaagccaggacataagtcaccagccgaggcgggaacatggttagcatgaccagcactcatcacaacgatccctagccttggtattaatggtgccaaatatagttttcaaaagcaatgtcctaccatttcccaccttctaacagtaatgatcattttgattagttactaatagaagtcccatggacttaagatctgagcaaataaagctttaatcttcttaagcatataattactggcatttgaaaaggcatgacattgtgggtaatagcgactactctcttgaaatgagactggggtgagggcacagaaagaacgtgggagaccccttttgtctttttaaaatgttgcttttctatgtaatttttgtatcctgcaagaaattaattataagaatgtgcatggtcaaagggaaagtctacccagaataattctaacgtaattggaaaatggttaacttcaaagtacttgtcaaaagagatatgcaggaga

SEQ ID NO: 104009 - DNA, 181 bp, Homo Sapiens
gtcgggcggtcctcaaacgggtagagctactgaggtggcagccattatcatcctataaagctggaaaaggttttgtatttctcaaaatcttatgactctcatcacaaatgagaccggaagaaatacaacgtttagcatggaagcattgaactgtaggcacttttgctaacctacacttttt

SEQ ID NO: 104010 - DNA, 500 bp, Homo Sapiens
ccctcaaaaccgtatcagaactgaaagaggggtcatcataacagacacatcagaaccataataatgcaaaattattaacaacctgatgtcaaaaaaatctgacaacttacatgaaacaaatttcttgaaagacacagattttttccaaaactgactcgagaagaaatagaaagcctgaatacttccataactttaaaggaactgaatgcaacatcaaactgtacacttagaataacattttattgtatgtaaattattccttaataaagttaatttaaaaggtcagaaaaaccacaggactaaactataatgtatagtgtctaggaatgcactataaaactattaaagaaacaaggaaatacacactatagaaatctggatcactctttatttgggggcaggacggagtttatgattttaacagcgcatatggaaggccctccgcagctgttaatcctgacctaggtgctacttacaagatcttccttacgaaattattc

SEQ ID NO: 104011 - DNA, 155 bp, Homo Sapiens
atgtggcttaatactctttaaacattattgtattcttatcttaaatagcatcctcatttatttttggtgtgtgttgtaaatgaccaggccgtcagttaatgaagacttgccttgcattttgttgagcaagaagatagcttctgacccggtttgag

SEQ ID NO: 104012 - DNA, 253 bp, Homo Sapiens
tccaaaccgtatcagaacccaggcctggggtttctacacattaactgctgtgcccaaaaaaagaaacaccaaggcttgaaagggcgtgttacttgcccgaagggaagaagcaggcaaaaaccataagctaattcccattccactctctggagatgcagagagcacaccctgaagagggctacgcttttcattaagcacatttctttgtttttttaattgagacagggtgttaatctgtctcactgcagcctcc

SEQ ID NO: 104013 - DNA, 283 bp, Homo Sapiens
tgtatcgtggtcctgccatttctctgtctgcggagcagccttggttactgtcggctgggcttgcccactgtgtgactatattcaccacaaccaatgggaaataagtaagaccatatttcagcatatataagatgctattgattgtaagacacatggtattttataagttgctaagacaaatctaataagatgctgatgaaattatgacatgccatcaattgtaaaatggatctccatttctgatgttaaaatatgaaaaatgtgtgtcttagaattgatgcag

SEQ ID NO: 104014 - DNA, 377 bp, Homo Sapiens
catactcagtaaaagtagcagcaaggtaattggaaatcagactttaaagcatgtttgaaaagatggcaagcatttccattggttttcatagttttttttaatgactgactccaaataagaaggatgtcttattatttagcttgacaacatctatgttaaagagactaggatctaaaccccgaagagaaattcagaaactagaaaaaaggaaatgaacccggggtgtgaagctgggaaccaaaaagagcacatttcaattcttttccgccgtaatgccacaaaaccgtaccttaaaacttctaagattacaatcttaggtaagaaaaggaaatattttcagttacaaatagacatgtctttgcgccttcattctagac

SEQ ID NO: 104015 - DNA, 332 bp, Homo Sapiens
ggtcggacctctcctacgtatctaaacatttgggtggtagacactgtggctggaggaaggcatgcattaccctgagctcatgctcatggttttcagtttagatacccttggaatttcccacagcttgtcttaggttgtgaagcagacttctaagaatctggatatcaacaaattacgagtcatatgtcacttagcgacaaggatacgttctgagaaatgtgatgtcacatgatttcgcttgtcatacatcataaagtgtacttaccgaacctagatgggacacctactatacacctaggctatatggtagagcctagatacgtagggagtcc

SEQ ID NO: 104016 - DNA, 367 bp, Homo Sapiens
ccggcctctccctacgtatctagagacaggaggggaagccaggctgggcttcagatagaggagagcagggaatgtaaacgttgagggattgggacgttttaggacttcagagtgttggtagattggggtggtggaaagggaggaatggtggctcctctcagtgttcagagatttttaaatggcatttgtgaccctggaaatagcgtcagataaaaaagtaggtagctgtgctgtatagactcagtgggagttggggacggaggtggtgcacctgcaagcaggatctcattgcatttgaactctagtctgagccaggttgttgatgtgctcagcattggactctcaggtttccttaggatacagtagg

SEQ ID NO: 104017 - DNA, 352 bp, Homo Sapiens
tctccctactgtatcctagtcactacatgagccactgcgcccagcctataatcagaaatattttatagtaagagaattagcacgatgactgaaagctcaggtagtgactaggagaacatgtttattcattcgaaaaacatttagggagcccttggagaagcagtaatagttaaggcaagacatagtccttaacagtttagttgttctaagcagaagcagtaagctcgacgtcatgaagaaaaatgatttggagaatggcacgttgtgagtgtggctgcagctggagtgtggagggccttgcatacaatttgaggtttgtactttatttcgaggtaggatcacagtagggaga

SEQ ID NO: 104018 - DNA, 244 bp, Homo Sapiens
tcctacggtatctagtgacttggacacatgggagtagggggagggcaaccccctcgtgcagttgaaaatctgtgtataacttttgacttccctgaaacttacctactaatagcctcacgttcaccagaagttttattaataatgtaaatagtcagttaacacatatttcttctatgtattatatactgtattcttacaatagagtgagctagaaaaaagaaaatgttattaagaaaatgataag

SEQ ID NO: 104019 - DNA, 277 bp, Homo Sapiens
tacggtatccgagctgctaggatcagtacctatacatggtacggcatacaggatattggctcaactgaacaaatgaaggcaaaccttggtatatgtctgaatcatcacacacttagtctatcagtatggttcaatctccgtgaggaacagattgaatggaaagcaagcaatatccttcaagaaagtgagctacatcaatatgtggggacaagtccatgaatttcaaaactatcctgacgtttctgggcatgaggccaaactcagaacaatgtttgtg

SEQ ID NO: 104020 - DNA, 387 bp, Homo Sapiens
tctccctactgtatcctagctactcaggagacagaagcaggaggattgcttgaggccaggagttcaagagcagcctgggcaacatagcaagaccttgtctcttaaaaaataaatgaatagaaatgtaaagagtaacagtcaaagctatgtataaattacatctttcaaaagactgtcctctaccagccaaaccatgagtatttcttttattgttttcaacaaggtaacttactagagaaatattaacacaagtctactgactgaaaacaatccctgtgagtatttccgtagcagggacacatgttaccccatgcttcacatgcttccctacattttctaaatgctcttgttgtcctagacatagatacgtaggagaggtaccgagcc

SEQ ID NO: 104021 - DNA, 564 bp, Homo Sapiens
agagattcaacggtgagatgtactaatataagtctgggtatccctcatccaaaccctcgagcggaggaatacaagctataaaaagtgcaaacattatattcaaccgaaaatctactctctgataggaaaactcattataattattgcataaaccagtgtaaatgtttaatgtagtaggcaggttcgggagttagagaatatagagttcactgaagtcatagctcatttatgctcttagtgggttgagtatagtgctcctctggtctaatcattatagctactatctttcccttcatttacttgggatgttaaccttcaggagtcctatgttttttcattccaggtgcttgaagtaaatcaatataaagcaaagcggctgagtttttgggcctaataatgaaaatttgccacatctgtgctttgaaaaactgtctgaagctggggagttaatgctcatttaagaggatgtatagtgaagtagcgactggtggcaacgctgaaccactcaggagaggtttgtaaaatattctgatccatcggacactcgtatatcacaccacttat

SEQ ID NO: 104022 - DNA, 747 bp, Homo Sapiens
gtggcgatctcgaggatcccctccataatgtgtgcccaggaaggcatacagctccacttctacataggtgcgcacgctgcgttctgacaggaactgcccagagatcaccgtaatggaaagggtggtggccaccaccacgtcgatgcggtccactgagaaggggttgaactgcttgtccggccggcgcatgaactcatgcttgaggagatgtccagcctagtcaattacatccagcccaccaagttcgtctccttggagttctctgcccaaaagaaccgaagttatgtcatctcgtccttcacagagctcaaggcatatgacctgctctccaaggcctcggtgcagttggtggactacaacaagcgccagatgagccgcatttaccccaagggaacccgcatggactcctccaactacatgccccagatgttctggaatgctggatgccagatggttgccctcaacttccagacgatggacttgcccatgcagcagaacatggcagtatttgagttcaacgggcagagcggctacctcctcaagcatgagttcatgcgccggccggacaagcagttcaaccccttctcagtggaccgcatcgacgtggtggtggccaccaccctttccattacggtgatctctgggcagttcctgtcagaacgcagcgtgcgcacctatgtagaagtggagctgtttggccttcctgggaccccaagaggcgctatcgaactaagctgtacctcaagc

SEQ ID NO: 104023 - DNA, 439 bp, Homo Sapiens
  misc_feature (385)..(399): n is a, c, g, or t
ggaggcgttctagaggatctaccacggcaggttgtactgtaatggcgggccaaaagggagtagcgcccatcacctagggagtaagagcaagtggttttctgggagcttaagcttcatagtatgacttttataagacttcaaggggcttgggagacagcaacaatgcatactattcctaattttctatgatggaaatgcccatgcgactggtataagagtggtttctcttcctaaatccttgggctctcaactgtgtctcacagataaatgggactactaggtcccatcatccttgaagaaaggctctatccactgtagacaacagtcctatgaaaatgaccagggaagaaacttacagacccttatgaatgtcttttatctctcnnnnnnnnnnnnnnngggaaaaagagtttcattggcaaccaagagtacacccggc

SEQ ID NO: 104024 - DNA, 195 bp, Homo Sapiens
gctcggtacccgactggataagggaaattaagatagaggctattttgttatagaatattgggttattttgttgaccctgaaccacagaagccaaataatgttctagtctagacctgataacctaaactcagaaaaaaattttaagcaacctcttaagtgtctttttatccatcctttcccagtacacctgccgtg

SEQ ID NO: 104025 - DNA, 312 bp, Homo Sapiens
ccaccggcaggttgtactgtcttcattcatggatgacgagacggaatgcagaggctcagctgtggccataagtgcagcagaagcggcatttggccaacagggcccacccggcccaccttctccaccagggaccggctctgccgactccagttcacaagcggagagggtttgacagacaagaatagcctatacccaggagactgtcaacagcggaatgactcccttctcccaagcactcctggggcctcgaagcagcaacccggcgcccacgccaatccgccggcaggactgtcagtcacgccgcgccagcta

SEQ ID NO: 104026 - DNA, 463 bp, Homo Sapiens
gcggctagaggatcccccacgggggttgtactcaggctgatcctaaaaaatcaaactcgggtgtccccggagtttctatcattcttgggtctgctgtgcagaagtggcccctttatagaaggcaggtattctccagttggctactgtgcccaccttagtacttcccttactcaggcaaccttccttggtcctggtaagtatctgagtttacaactcctatgttatagtatatttggataaaaatttcaaggttttaaagtcagcatgtattggtttataatatatagtctatagagtatataaatccctcagttatggagttgaattttagagtttagaattttttaactcttttctttatatataccacaaataattctctgcccataagaatgcctagaagcctttttaggttattcctggttatagtgggataatttacgaatatggcagacagtacaag

SEQ ID NO: 104027 - DNA, 668 bp, Homo Sapiens
aacaccacccaggcgcattcgctctggatcctcccaaactaaagctaaatctagaacgccacccagacgcagtcgctccagttcttctccgccacctaaacagaaatctaagacaccatcaagacaaagtcattccagttcatctcctcatcctaaagtgaaatctggaacaccaccgaggcaagggtccataacaagtccccaggccaatgagcaatctgtaacgccacagagacggagctgttttgaatcatcacctgaccctgagttgaaatctaggaccccttctagacatagctgctcagggtcctctcctcctagagtgaaatctagcacacctcccagacagagcccatctaggtcatcatctccacaacccaaagtgaaggcaataatatcaccaagacaaagaagccattctggctcctcttctccaagtcctagtagggtgacgtcgagaacaactccacggcgaagcagatcagtatctccctgctccaatgtggaatccagattgttgccaagatacagtcattctgggtcctcctcaccagataccaaagtgaaacctgaaacaccgccaagacaaagtcactcagggtctatttcaccataccccaaagtaaaggcccaaactccaccggggccaagtctttgctggtgggaag

SEQ ID NO: 104028 - DNA, 381 bp, Homo Sapiens
ggcggtcccaccggcaggtgtatcagactggttgcacccagaatcagcctatgttcacagtatggcatccagtcaccactcacttgatctggttttggttaatactgggaagacaagagacaaaatgttaattattatagacagtatttatcaaacaccaagctctgcctcatgcttagatttttagccagagatttaaaccctggaacttcagattaaaagtctgatgttttattaagtaagttgcccattgcagatcacaaaatagtaataatagttaaatgaatgggatattgaagctttgagagtcccctcaattagctttttgatgttttgtataactaaaagaaaaatttaagcaacagtacaacctgccggtgg

SEQ ID NO: 104029 - DNA, 710 bp, Homo Sapiens
tcgagctcggtacctgttaccactgtgcccatcaggtcggggttttgatgatgtgcctttccccatagacagtgctgggcgtggcatccactcttcccacagaaagggtagagagagtgctcttatggctgtcttaccccactgtacgggcatgggtacgtggttgatgcaaagctctgtgagtatgtcaagtagagtgttgaccgtggctcctgggcctgcagggaacgattcagcccctgaggttcaccctcaagagctaggccagctggacagccatcacagctccctctgtgcacatctgtcttcctgggaaggatggtccttgcccttgagcttgaggtgaggtccctggggtagtctgaacactggttgctactcagatgaagaactgggaatgctggggcgtgttatgatgagtggtatggaataattcacgcagagtaggtggctgctgcgcttggatgagaagccatgtctgtggacccctaggaaagggccacagttgctgtcatgagccccctcccaaaagaacctgctggagagtcacaacacctggtgtggtgctctcaaggtctccctatccaggagcagggcctccccattgagcctctcacctctgcctgggtggagagaggggtgcgtgtccactcaatgctgtacacctgtgcagcgggtggggtcaccacacagacaggacctaattctcc

SEQ ID NO: 104030 - DNA, 191 bp, Homo Sapiens
cctcagtctgctctttaagcaggagaccagcacccagcaagcagtaagcactgggcgagaagggtgcagggtgcgagagggaagacgagacatgaaggatacatcaagaacctacttctaggccgggaacacgtggctcacgccatgtaatctcagcactttagaggcctaggcaaccgcatcacccgttc

SEQ ID NO: 104031 - DNA, 324 bp, Homo Sapiens
taacagaagcaaagactaacatgtagccatgcctgtctgcgttcttccaggctaacgctgcttttaacagatggaattttcttcttaaagaatgaatcccccaggggatagtggccagctcccgtgctgaaccacagcaaggcctctgtggggccctgggcctggcatcccagatgctgtagggttttctcttaatagcacagggatcatcctggcatctcagattttcctagctttccctacccaaatatctgctgatatcacatccctggggaagtagatggttagctttggaggccctggtggattccaagtaatagctgg

SEQ ID NO: 104032 - DNA, 288 bp, Homo Sapiens
aacgggtgatgcggttggcacgggcgggcaggatggcacaagcaggtcagggtggcacgtgtgggtagggtagcacgggtaggcagggtggcttgggccacaccaggcctggagagttaacggcggtgccaggggagggtgcagaaggggcctggtcccaacaccgcccacacctctctcagggccatagccccaacgcctccccaaccaaaccaactgggcttccctcagggccatcctcactctccttcaacacccgttcggtaccgagctcgattcgaatatgca

SEQ ID NO: 104033 - DNA, 726 bp, Homo Sapiens
tgacagcatcctaaccaggagctggacagtgcacatctgccccaagagcatgagctcgtggctcaggagagccttcaggcccttgaggcccccatgggcagtcctgtgtgggcagaggaggggtgatatgagagcgagcccagggaaggacctctgggcaaaaagttcccaggccctaactgcgtctacttgctcagtcccagctctgcctgttgctctagcccacaggctccctgcggagggtctgggcttggcggaggacccagaatggcactgaggccagcattggctgtgggagttgagcaaaccctgggtgacagtcaagggagctgtggctggacatggggtgatggggtcgggatgctttgggccttgggtctctccgccagcagtgccaggagcccttgctggggaaatcaagaccagactaggatgcttctgccccaggcctgccttccattcaataacagcccatcttggcttggagttgcaatgatggctgggccagtcacttgtgacagggcatcagggccctggcagggaagaacactaggcacactggggttgtccacagccagcccgtcagcatgagatacccagtgggaaagtgagagatgcggagaggttgcagaccaggggtagttctggaggctcaagcaaccaaggagtgcagtaaaggtgcagtgcagccactaaggacagctggttctgggcacacataacccg

SEQ ID NO: 104034 - DNA, 495 bp, Homo Sapiens
tccataaggttccgcgaccgggttctctcttcatctcccatcttgagttacctatttcagttcattttgcatttgcttaaggttctttctggagtatttttctcagatgggatacctggataatatacttttctcttttcagtgactttattttaatgagttttcagacttacagaaaggtgctcttcagatggggctgtgtcactggtcaaccatcttcactgtggagtcctagtcactacgattttgtgttgcatatcatgaagattcattcaaatggtctcctcttcctttccttcataataggttacatggtctgaaagtacatccctccttctctagtacatggtattcaaagaggttgctgctgcttctccatggtcattaatcttttcatcatcttcttattcctcttagcacagttggggcataatatattatcttctatgcctggggatgggaaaatgcaggcaggtaacaagaagagagaaatca

SEQ ID NO: 104035 - DNA, 570 bp, Homo Sapiens
gagtctatagagtcgatacagcacggtatggagggttgggagaggggacattcatataacttagagactggaggcttgaggcagcccagaggccagtgcagaccctggctggcctggcgctttgctgtgacctcgtgcttgacaagtgcttgctgccttggagctgacgggctctcgtccagctcagcgtggggcacaaaaccgtgtagcttggtctaattaagagccacagatgaagtgcaccttggatgtgtttcttattatttcggatgaaaggttggcctctccagaaatcacccccaagattactgtgcctcaaacctcgctggttccagccgatagggaaatgacgttttaacgatcatgtgaaatgaaactgtaagcttgaccttattagctgcctcttcttaattagctgcttatgcaagcattctttccccccggtagatacaaatcaacaatttccaagccatcttggaaccaacccactcttctgtccccttgccaattccctagctccagggttaataaacttcacatatgctcaagagcaattgcgttcagaaatgt

SEQ ID NO: 104036 - DNA, 394 bp, Homo Sapiens
  misc_feature (80)..(172): n is a, c, g, or t
tagcctctcgagtagctagaaatttacaggcacacaccaccatccctggcatttttgggttttgtttgtttttcagaatnnnnnnnnnnnnnnnnnnnnnnnnnnnnnnnnnnnnnnnnnnnnnnnnnnnnnnnnnnnnnnnnnnnnnnnnnnnnnnnnnnnnnnnnnnnnnatgagccaccagtatttctaatatgtatgggaaatatgctgtcttcctattcctactcccccaccctctagcactgagtccaggtaggtaggcaggggggtgtctccctcctttacttcgacaccctaactaccttggggatcagaagtgactctctggaaggatgctgctgcttctcaccagaggctgacgataacgatcgagacataggtaccggctcga

SEQ ID NO: 104037 - DNA, 847 bp, Homo Sapiens
  misc_feature (57)..(219): n is a, c, g, or t
gaagccgaatatgggcacgacttacacggtctgaactccaagagcatcctgggcacnnnnnnnnnnnnnnnnnnnnnnnnnnnnnnnnnnnnnnnnnnnnnnnnnnnnnnnnnnnnnnnnnnnnnnnnnnnnnnnnnnnnnnnnnnnnnnnnnnnnnnnnnnnnnnnnnnnnnnnnnnnnnnnnnnnnnnnnnnnnnnnnnnnnnnnnnnnnnnnnnnntctgggcagtagaatgaaactctgtctgaaaaaaagatagaatcgaagaaatgattaagagtaaatatctcagtctgccaggatttataaatataaatgtcccaaactgaagttagggaggcccatttggacctgtttgatgcaccttgaattgcaatctctgtgtaattgtgttgggggcaaatttgtcagtgtcttctcttttttaattagcaattgtttttccaaattctcagtaaataatccttcatcaaatttgtcagtattattaatttacattcatttttgtctcttcaaaataccaagttggtatgtagaattcttttgtattgtaattgtggatcagaatctgctgattaacttgttaatatatttaggacctggtattcctaaagggctcattactgaacctcacactagtctttctaatatctttacaaaaaaatagaatcaataataactccaaattgtcaggtggaaaaaacagttggcttagtgaacatgaagtctttattcagatacatgcaactgtattacattcttaagaatgataattttgagaaacatttgaacagcataattactgcgaaatattactgtaacgatcgagacatagggtaccgactcg

SEQ ID NO: 104038 - DNA, 687 bp, Homo Sapiens
cgagtctcgatcgtataatgtcactagaatccagcttgtcatccactgatttaagatctcgtaatgcttcaggtaaactcttcttttaaatctttctctctttctgaatctttttccttatctgtgctgccattcttagtctttgttggtggaggtattaagtagtaatgaacagggattacatcctacgaatgtggagagagattcttagattaatatgcttaattttacatacatcaaaatcatcttcaacagctacatgtcatgtaacatgggctgcacctaagttgtactacactgtattctagattctaagggtcacaatacaccaaaaattccaatctctggtcacagtaattttctcacaaactgatgctgagtactgatacttcaaatatctcctttaaaataaaagagataagaacatacttttctccatttgagtatatttggtattcttggctttacttggcagacagatgacaaaagtacactgacctttcacattttaaatctgagaaggggatgaaataagttcaaactaagaaaagattctctaagtaaatttaaggggacgcttatgccttcattcaaacaacaggacttactgagtcccaacaacaggacttactgagttcccgcgatgggcagggtatgctagataggtaagacagacagatgtgctct

SEQ ID NO: 104039 - DNA, 774 bp, Homo Sapiens
taccatatgtctcgatcgttacctgacagtcatctatccttttctgttctgttttcttcctatcagatgtcagcatctggtctgttctttacctattctagcattacctggcacatcgcggggactcagtaagtcctgttggttggactcagtaagtcctgttggttgaatgaaggcataagcgtccccttaaatttacttagagaatcttttcttagtttgaacttatttcatccccttctcagatttaaaatgtgaaaggtcagtgtacttttgtcatctgtctgccaagtaaagccaagaataccaaatatactcaaatggagaaaagtatgttcttatctcttttattttaaaggagatatttgaagtatcagtactcagcatcagtttgtgagaaaattactgtgaccagagattggaatttttggtgtattgtgacccttagaatctagaatacagtgtagtacaacttaggtgcagcccatgttacatgacatgtagctgttgaagatgattttgatgtatgtaaaattaagcatattaatctaagaatctctctccacattcgtaggatgtaatccctgttcattactacttaatacctccaccaacaaagactaagaatggcagccaagataaggaaaaagattcagaaaaagagaaagatttaaaagaagagtttactgaagcattacgagatcttaaaattcagtggatgacaaagctggattctagtcacattataacgactcgacgacatagggtaccgga

SEQ ID NO: 104040 - DNA, 259 bp, Homo Sapiens
tatgtcctcgatggtgaaatcctctcaattgtacaggtgtcaggtgttctctaccaggactcagacggaaattagcctaaaatcagtggtaggtatgtcttgtggaatgcattaacgacaggctcctttatataaagtgacatttgttatgggccagaaagtatccaaattctaccaactacttgggagaagaaaactataaaagagccaaacaattctgttctgttaaccgctttttcaaaatttgagacaggggtct

SEQ ID NO: 104041 - DNA, 520 bp, Homo Sapiens
cagtctcgatcgtgatatggccatagacccagagtacatgaggtccaggaaatcaaggggtagaggcagggaagtggcatcatccacaatcgaggcatagtgagctacttggtgtcctgtcctttccatgcctacaaacctgaagtattagttctcggtgtcttaaagaaaactttgtgggacaacatagctatgagcatgagtgaacatttgattacagatcttacatgcaaggaaaaaagctctctggtgggccaattaagattcactctaatagggacattttataggagaagagaataattatctaaccattagatctgagatcggatccagaaagacgatagtcagggtaaaggtaacacaattctgggctggcaactggggtaccaggtgggatggtggggggagcaccagcttcttaaaacaagtttcatccactgataatttattttaagcattttgtcaggaattttcttctcgctgtgtcacccaggctctagtgtagtggtgtgagctc

SEQ ID NO: 104042 - DNA, 710 bp, Homo Sapiens
acggtcctctcaccgctctccagctcacaaccatttcctacctacagcttcatgatcttaaagtgtccattgagtctcatcccggcctttcccgccgcctccaccagaccttgaacaactccgactaacagatgagcttgctcctcgcaaaccacctctgcctgaaggtgaggtccctccacctaggcctccaccaccagaggaaaaggatgaagagttccctgagcagaaggccggggaggtgattaaccagccaatgatgatggctgccagacagctccatgatgaagctcgcaaatggtccagcaaggtaagtagtgaagcttttcttgttgagaaaggatgtcttctcggaaaggatgaaggaccatgaaagacccagaaagaagagtctatttggagtcaccctctctctctcctttggttcctgtgttgccaatagcatattcctcttcttacccgtgctttagtgagatgtttctgacacctgatggtttctccttcaagcttgcaaaagccagagtcagggtgcctgtgatttgagaagaggattcctgtcctttgtccacttagagtgccaggcgtgccttgaccttagcatttggggtcttctagaaattgcgtatctttcattggaacctgccaatgtttttagatgctacactcctaacgctcgagacatagggtccgagctcgattcgatcatgtca

SEQ ID NO: 104043 - DNA, 324 bp, Homo Sapiens
aggggtgagtgtatgtgtattacaggtctgtgtccctcaggactgggagtgatttgtgtatttctatcttctggcacatgcaccctcgtagaggatgcttaacaaaatatttgcagactaaaactaaacttattagcaatgcagtagtgaaaagctatggataaaaaagaaaagggcatgctctaagaagcccggtttaatcggtctggtctagaaaagactagcaagaaaaaggtaaatcatcaaattatgtaacacggatctattagcaagatgggaaactgtcagacatctaggtccattaactcttccggcaacttatct

SEQ ID NO: 104044 - DNA, 660 bp, Homo Sapiens
  misc_feature (96)..(271): n is a, c, g, or t
gttcattatagtggaatgacggttgtctgctcggcacggggggtgcagtggagccatctcgagtgcgactgcaaccttgcctcccgggttcaagcnnnnnnnnnnnnnnnnnnnnnnnnnnnnnnnnnnnnnnnnnnnnnnnnnnnnnnnnnnnnnnnnnnnnnnnnnnnnnnnnnnnnnnnnnnnnnnnnnnnnnnnnnnnnnnnnnnnnnnnnnnnnnnnnnnnnnnnnnnnnnnnnnnnnnnnnnnnnnnnnnnnnnnnnnnnnnnnnatgagccaccatgcctggcctctctttaaacactttttgcttacacactgcttttggaatgaaaagaacaaggagacttcagtcatatcctcctggatttgaatgctaaggagctgcgtaacatttctgaaatcttcccatgtttattaataagagaataattctacctaccttgtagggttaaaggttgagtacgatagcatggaagaatttgcccagcacctagtaggctgtcagcgcctgttacctttcctttccccaatgctccctaaagctaagttcatgggcccatcatgtagagtactgggtccacaggcggtgaattacttgtgatgctcttccaaggactgcatgaggagcgacctttcactcaaagcaccagcaaagta

SEQ ID NO: 104045 - DNA, 430 bp, Homo Sapiens
  misc_feature (326)..(365): n is a, c, g, or t
gtatgacatgatagaaccgagtggtaccctatgtcctcgatcgtgagatgagaggtaaaaagaaggctatatgttcagtgttaaaactagctacagtatgcgtgtctgacatcaatgtccataaataaaaattctagatccttatactttaacagcacaaaaagataaaaatcagttgggacttttcatctttactacagtctataaacaatcattcccaaagatagccagtcagatcattctttatgatcattaccaaccagaataaacctatgtttaatctgtgcataactgtagtcacaattaactggaaagtttataaatannnnnnnnnnnnnnnnnnnnnnnnnnnnnnnnnnnnnnnntcagtctaggagtctgagtccagcctgagaaagagagagaaattccatctttaaaaaacgagggg

SEQ ID NO: 104046 - DNA, 130 bp, Homo Sapiens
atggtagaacggatgtgtaatataaagttaacaggaaaaaatgctcacacattatgtggtgaaacttatctcacaaaagagcattaaataaaaggatagaatgacggtcaggtatggatcgagaacatag

SEQ ID NO: 104047 - DNA, 580 bp, Homo Sapiens
gatcgttagaaggaaacactttatcatgttaagtatacctcaatattgtaaatgtgcatggaagaaatctcttgttttcaagagtttttcttttgggttcacctaactatgtacctgactgctgctgtcagtagggacagtggttgggtgatggtgcttgtggccacgatagaagcagccatttattgagcacttgctatatacccaatgtgtggtcgacattattttatttcatcctcaccaaaggcctgggaagtctggtgattcccattgtcctgaggctggagaggtcggttagcttgtccaagatcacacggggcccggattagatggttattagcgagccccaagtgtatcaatagctcttcacaaagggacttctgtgggtaccctgtggaggctgggcaggggattccccatgggaacagcagacctcaggggaggtgagggctccctctgaccccatccctgctcaccttcaggccttcaggaaaaggggtgtgcagcttcctacggcactcaggacacccaccgagccttttctgcaaaaaatcacgtaacgatcgagacatagggtaac

SEQ ID NO: 104048 - DNA, 448 bp, Homo Sapiens
tcgatcgagctcggcctagtctcgatcgtaccactacacgctatcatataatcgtatctattccgaaaacagtcaatgccacacactgagacaggacctatcagcaatttaaatgatctcgggttttattactaatcaagtgtaccatgtgatatctgagggcctgaacaccttaatgcagcttctcaaagcacctgggttatatcttagagaaattactcatatttaaggaaccacagcatgttagagaagaaagggactgtaggaatcatctgggctctttggtacaaaaaagagcaaaggccacttactggagttgcatctggattggcttggaacagaagctaaaatccaaatatactagaaattctgggacttttgaaatgaaaggaaagctagcagttagtttttcatgcccttttgtgtcactacattgaaaactgtcatc

SEQ ID NO: 104049 - DNA, 177 bp, Homo Sapiens
tcgtagaacggagctgcgggcgtgtcacgcaggggacaggaccgcggtttcacgatcgccagtgactgggtcagcatctacaggtcacaccacccctctacctgtcaccgacactccctcagcatccacaggtgacaccacccctcttcctgtcaccaatgcttcctcattatccac

SEQ ID NO: 104050 - DNA, 183 bp, Homo Sapiens
cagacagatacgaatcgagccggtaccctatgtctcgatcgttactagaatgacatacagtatttacttaacatagctctgtaactgggtctctggtaaacaggcattcggtcctcccccttccaatactgtgaacccatcatctaccatctattcacccatccatccatctcatccatacat

SEQ ID NO: 104051 - DNA, 414 bp, Homo Sapiens
tcgtctattctagcatcaatgggtgatgcgcagatgtacagcataggtccaacagaaagcagcttcaaataagactcccagccgctccccagatctactgggtcagaatctgcattttaacgagacctaggatttatttacaccttacagtttgaggaccccaagtgtatagaacccacaaattctcccattctgatagacagcatagtttactttcttactttaataagctgcatcacatacctgcacactagaggaaattatacagcaataaagcataattaggttttgctcctaaatgaattaaatattagcttttacaaattgcctatcaaatcacaggagaatcaaagtgcttttttgagtccctagaaagaacagatacacaaaagtgtactacaaaagtgggatgaa

SEQ ID NO: 104052 - DNA, 250 bp, Homo Sapiens
ctttcacgaccatctgtgatccaagttaggggcaattcaaaggaggagttgaagcattatcttcctaaagagaatggaacctcacctgggaagatgaaatggactgctggggaggatagaccggtgaggaagtggggccagtattggggtagagagggtgacgtgtctgatttaggacactgttctaggactcactgggtctttggtaccatttaaacaactgtgcatgggaccggggatcctctcactc

SEQ ID NO: 104053 - DNA, 747 bp, Homo Sapiens
ttagatcgactgttacccggccccatgcacatgttgaggaaactgggggctccggcagttaggcaggttgctcggagtcacatagctagtgagtggaagagctctgacttgatcccagcctgcctgattccagaactcatgtccttagccactctgcaaatctacctctctcaaaagttccagacaggtgaaccctaacaggtgcaactgattgccagggtcagggatgaaaagtctcctgggagagcagaggcagggacccaggtctcctgggacccatcaggatgctttccatcaacgcagactttttctggggggcagcagcagtgaccgtggggctggtggcctgggctggggtgtttgactccagtcagcccatctgccaggcgggcccagtctcaccacgcctattcgctctgattcctgccaaggaccctgcctccctccttgcaggctcaggagcctccatggcccctggatgaatctcccacttgcctagcaatcagagtcctcttccccagcagccaccagaagagaggctgccttgctggtctcagggagggggccggctcaggctgttcatgtgttcattcagcaaacgtttaacatagattcagagccagggagtgtgcaaggtgccaggatccaagcacaccagcaaggcaggcacggtctgttcttcccttgtaaagctcttgtaacaggggctgggaactgtgcatgggaccggggatcctctataacgcg

SEQ ID NO: 104054 - DNA, 502 bp, Homo Sapiens
gctttgaaagggagcctggttgctctctgtgcctgccaacctgggacaccggtgcccagccttgctccttccctgggaaactgaatagacgccagggtctcacaccagccccgtgggaaaggctggggtatgtgcctgcctggtgacggtggcagccgcggaggctcgcggatcctgtcccctttgccggccacatgcttctgactcatcagaggaagaatgtggtctttttgggagagagtttttaaaaatagtccaagtcctcctctggccctgtcccactcctccccttctgaccatttcctggcatcagccccagacctctttccactctggttttggggaactgcccctttgcaacttggctgtgaatctgtttgtgaaccttactggggaggagctgtcctgggtgcaggctggtttcagaagggaggggcccagctgtggccgcctcctccccaggggcacgactagggacgagggatttctgcattcctttggc

SEQ ID NO: 104055 - DNA, 600 bp, Homo Sapiens
gtgtgatcagacagaaatgatgccatagtcccacccccagctccaaaacttggctcagagatgccctgagtgagaggcagaagggcggggctgggagtaggggagccagccaggacaggaaacaaagcagacaactcctaatctcttcccaaaggaactgacttcatttgcaacacacctagaaaagtccaaggctaagggtgttctcaaaaacactggagattgtagcaaaatgtacagtggtcccccttgatcagcaggggctgtgttccaagacctcccatgggtgactgaaactgcggataatactgaaccctatactgttttttccgatatacacatgcctatgataaattttaatttatagattagtcacaataagagattaataatagctaataatagaacaattatcacaatacactgtaataatagttatatgaatgtggtctcccaaaatatcatgttgtactgtatgcacccttcttctgatgaaggaggtaccaagtgtgacagtatgagattttatgatgctactcagaacggtgatcaacattaaaatttatcaattgtgtatttctggaattttccattatatac

SEQ ID NO: 104056 - DNA, 958 bp, Homo Sapiens
gataaatcgagctcgtgacccggccccatgcacagttcggtccatgcacagttttcagtaaatgtcaaagacccttctaactgtcacatgagtgacttcagacatgagattcttcccttccacattgcttggcacatccaaaatggggaatttgaatttacgaagcttcaggttcttaaaaaatacatctcaagttctccaaggactagcaattcgctaaatatctcccagagttccagggaagaggaccttctgcagggatggctgcagggctgctggatcctacctttgctgctgtcttctcttcatttgggttcttcttgcttcgtctcatcctgaactaaccctctccatgtgccttggcctacagattctgtgtaccaaggcagagaatgccaggatggttgtgaacattgataatgccaaactggctgccgatgacttcagggccaagtgagttcagtcggggggctggagctggggaggacctgtcctcataggctctggggcaactttccattagtttcacggagggttggaaagtgccggcagtttaaggccttccctgagttctgcattctgtttcacccttggttgctgaccctgtccttgtgcaggtacgaggcagagctggccatgcggcagctggtggaggccgacatcaatggcctgcgcaggatcctggatgatctcactctgtgcaaggctgacactggaggcccaggttgagtacctgaaggaggagctgatgtgcctcaaaaagaaccatgaggaggtgaggctggaagtcccgctgaagtggccccgggaagcagagggggaggaacgtggggtatggggttggataggcgtgggttgaaattcacaagaatgccacatgttgttttagtgactttgcccaatttatgatcttcctgagcctcctcaactgtgcatgggaccgggtacagactcgatc

SEQ ID NO: 104057 - DNA, 709 bp, Homo Sapiens
  misc_feature (70)..(147): n is a, c, g, or t
gaatccggggtccaggccaatccacgggctcccaaaggccaaatttctttaaagtcacatttccctttannnnnnnnnnnnnnnnnnnnnnnnnnnnnnnnnnnnnnnnnnnnnnnnnnnnnnnnnnnnnnnnnnnnnnnnnnnnnncgccttccaaagtactggggttacaggtatgagcacccccacagccagcccttaattgctttaggggtgagtcgacatcattagtagttgcttgaggtcaagacccacagttttaccctttttatctgtccctcctacttgtggcccatggtaaggccttgattggccaaaaccatgggttccccttgacgccacagggcactctctgtgaaaggcccaccctggagaccccacttatctccaatgtgtccctggaggctggggttggctctcttgtcacctcacttttcaaagggacagtgggagctgctcaagcaagcccatctcctgggcgctgtgcccaggacagagactagtccaacttgtggttcctttccaatcactcaatcacatttggctcttcacacctgaggttaaggacttccaacagctccacaatcctctgcaattaaacctcctgaggcccccactgtagtgtatactcactgcttccataagcagtgcacccgtgactttttaactgtgcatcggggaccgggggtcctctataatcggggtagat

SEQ ID NO: 104058 - DNA, 445 bp, Homo Sapiens
  misc_feature (323)..(371): n is a, c, g, or t
tggatggcttgatgaagaaacaagaaatctaagcttcacagttccccacacagttccccagttcctgaaagcctttcagcttgctcatgagatgaaatccaatgcctagtattgaatgagatagcccaggaatagaatctagaaagatacaaacatcctgtagaaaactgatagcaaatgctcaggcttcaagagaaaagggtccagagccgcactaacatcaaagaattttactgtgaaaacatggcttcttggccgctccacagccagtctatctgaggtgctggtgcgactttaaaacatattttgggggctggacattnnnnnnnnnnnnnnnnnnnnnnnnnnnnnnnnnnnnnnnnnnnnnnnnngtgtattggctttgagcccaggaattcacgaagagcatgggcgaattggttgtgacccagtctctacaaaccaa

SEQ ID NO: 104059 - DNA, 693 bp, Homo Sapiens
  misc_feature (637)..(637): n is a, c, g, or t
taatgggaccaagagtcaccttaggaattatgcagcacagagatgcctgatataaagaggccaatatagaatgcataatagggccaagcccctaagactctcccagaaatcagtttctagattctacagatgatgctttccatctgctttacagttgccaaagcaaatcacgtttattctaaaaacagataagggcttgctcacaccaatcaaaagcaggtttttatctactattagtaggctgcctcttcagcagagactatcgtgttccccagccaggctaactggcattaaaccacttataagtacccactaacaagctaggtaccctggggaaactggacacaaacaaagcatgggccctgttccttagcatcttgcaatgtggatggcgagaaaagatgcacatatttggagatgacttgagatggcagtgcagtcacactggcaggaaagccaggcttgtgaagcaggtctgtgagtgccggaagcactgggcagagtcagccagcgtcctgcaaatccaaccaacagaacaaaactagccagcagaggcttaagaggctgagaagctgagctgtttgtcttaggttggtagcccagggtgaatacagctatctctggccaggcatgtagnacagcacagagttgatgagatctagtccaaggggtgctctgcttgggttcaaaaac

SEQ ID NO: 104060 - DNA, 549 bp, Homo Sapiens
tcctctatggcgctttccttggtgtctgtgtctgtgggcacatctacactggcctgttccttcctgagaccaaaggcaagaccttccaagagatctccaaggaattacacagactcaactttccccaggcgggcccagggccccacgtggaggagcctggaggttatccagtcaacagaactctagtcccaaaggggtggccagagccaaagccagctactgtcctgtcctctgcttcctgccagggccctggtcctcactccctcctgcattcctcatttaaggagtgtttattgagcaccctttgtgtgcagacatggctccaggtggcttagcaatcaatggtgagcgtggtattccaggctaaaggtaattaactgacagaaaatcagttacaacataattacaggctgcttgtgacagctcatgacatgtaatcccagcactctgggagccaaggtgggaggatcaattgaggccacgagtcttgaaatcagcctgtgacatatgtgagaccccctatctctactaaaaatttaacataacttg

SEQ ID NO: 104061 - DNA, 204 bp, Homo Sapiens
ttcacagtttgacatggaagaatgtattcatgcaatccttgcaatttggttgtttgcaaaaatagctctaattcttcccatgcctgcattccaagccatatgtgatgtgactctgcagttcctcatagcaaatggtggagcctattctcccatctcttgagcctgggctggccacctgacttgatttggataaagaatgctgtg

SEQ ID NO: 104062 - DNA, 363 bp, Homo Sapiens
acacattcctgcctcgggcctgtgtgctgcttcttcctcaggcctagcctctccccactttcaggtctctccttagaggtctccccttccaagaagccgtccctcactcccttaggctggaaacgcttctaccattgtcatcccctgctgcacatttaagtagcagtgacccctgcccaacacaatatttgtctgtctccgctgcccaaaaggcagaaattttgtgtcccagttgttcactgctgtgtccccagaacctagaatggcgtcctacacatagtagggactcaatagttacgaaacatctgtgaaaaaaaggcaaactttggccaggggagatggctcacgcctgtaatcccagca

SEQ ID NO: 104063 - DNA, 267 bp, Homo Sapiens
actggtgtcccggctgaatgctgcttgagagcaatcataagtatggcatacccggctctgacatttccaatggcagttaacatttttccactttattcaaatacacatttatttgtcaaatatttgctgggtaccactctgtgctaggtattggggatacagtcatttgcatcacaaagtccctgctcagtgtaataagcactcattgagcacctacctatgtgtgaggaactgtgctaggggatagcagaaacgaacaagataggg

SEQ ID NO: 104064 - DNA, 848 bp, Homo Sapiens
attgctcacacagagcttcaggcctctgcaggtgcagacttctccctggggggtacttccacccagagcacaactccctccttcacttccttcagtctctaattgaatggtgacttttccaggaggacttcttcgggcactattgaaactagggcccggagatcctctaatcctttcccctgtcttattacctgacatatatatgtgtatgtatgtatcagctatcttacaaactagaatataagctacataacattggggacttctcttttatttaccactgcatccctagggcccagaacaagcctgcgcccataatgttgaataaactatttgttgagcaattcaagtagctcaggtgacattacagatcacacatggtgacctataacacaggcaagcacatagtaccatggagccatggatttttttctaaggaataggatggaggggacaaagctggaggctgttataatagtccgggtaagtaaagagctggtaggaaatgtgataaaatggtataaaactacacacacacattgaaccaatgtgaatttcctggttttgatactgtgctataattacataggatgcaaccactgggggaagctgggtgaagggcctcgctatactatctttgcaatttcctatgaatctataagaatttcaaaattaaaagttttgataaagtgggggagggggtgatagggatggagaggagaagagtcagcaggacttagtgactggcttgatacaaggggttgggatatgactcccaggttttgtcttgggtgacatgatgacatggggggaggagcactaactgaacagtggaaggagcagaccag

SEQ ID NO: 104065 - DNA, 554 bp, Homo Sapiens
gtgctcgcggagcagatacaggtgcaggagctgcaggtgagcccggcagctgggaaggcctcacggacaagacgagcaggttgccgatggcatggccaggacctgcggcagaaccaggaacaaaatacgcttagcgagttgcccattttgagtgagttgtgcacagacgaaactaagggtcagaagcggagagggtgcctacaagaggagtcaaagggcaaagggtgagacccttccaccggtccagctggactctagcctcagggatatcctgctcctgggggcaaaatgtgtggccctggatgggccccccctgtggggctcttgggggtgcgaggctgatccgccagagcccttccaccttggcgcctggcccaggtgctggctagcacccagtggccctgttttggccggccctgtcccccaggttacagggccagaacctggaagcagagcgcaggaccagccagatcgcgccaggcttccccggggcctccacagtgcctctgtgccacctggagccaggcccgcattctccatgggtgccgtgcctc

SEQ ID NO: 104066 - DNA, 648 bp, Homo Sapiens
cacgagaactactgggatccctaaaaacgcccctggtccggccccactctgcacccctcgatctcccaggctctttctgcagtcataccgcggacccaatgggcgccctgaacacccgtttctgggcccgtcagactgagatacattccgtaaactccgcctccacggaacgtctcgccttgcgagcaagctcgaaatccaagttcctcaggaaccccctccaaaacccacacccccagggacgcccgctttccgggatcccggccaaacgccggaccctcagtcgctccaggccccctcaccctcaaagtgtagcgccccccaaaccgagcaacctcggttcgggcccctaaaaccccgccctcctctattaagcaccgccccagctctgacaaaaccccgcctccaggtcggcaaggctcacgccttcttttcttctccgcaggggtgattcaagtccaagtgattcgggctttgtggctccaggcctcgcccacagacaggacagacccctcccatttcttcaggcaaaaggaccgagccactggggtagtaaggcccccacactcctgtttttgcaagtacatttttgtcccatcacatccaccacaggtatctgctccgcgagcacggtaccgagctcgattt

SEQ ID NO: 104067 - DNA, 664 bp, Homo Sapiens
ggatgatacacaactgccatcacctcagttcccactacggtggggaccaagggaacttctacatccatgatctcatctactgtgagtacaggtatccctacctcacaaccaacaaccatcactccctcatccgtgggcatcagtggttcattacctatgatgacagacctcacctcagtgtacacagtctctagcatgtctgcaaggccaacaactgtcattccctcatctcccactgtccagaatacagaaatctcaatctctgttagcatgacgtctgctaccactcccagtggaggaccaacttttacaagtactgagaacactccaacaagggccctcctgacaagctttccaatgacacattcattctcttcttctatgtctgaaagtagtgctgggaccactcacacagagagtatctcctcacctcgaggcaccaccagtacactccacacaacagttgaatccaccccatcacccactaccaccacctcatttaccacatccacaatgatggaaccaccttcatccactgtatcaactacaggcagaggtcagaccacctttcccagctctacagccacattcccctgagaccactacactgactctacaactgacatttctacagtatctgccccgcgagccggttcagacgctc

SEQ ID NO: 104068 - DNA, 624 bp, Homo Sapiens
aggaaagggtactaaacatcactaaccatcagggaaatgcaaatcaaaaccacaatgagagataatctcacatctgttaggatgtctctaataaaaaatatcaaaagataccaagcgttggcaaaaatgtggataaatgaaaactgtctcaaatttttggtgggaatgtaaattggtatagctactatagaaaacagtatggaggttccttacaaaactaaaaataaaacttctatataatccagcaatcccaagtctgagtatagctctgaagtcacggaaatcagtatcttaaagagatatctacactctcatgttcattggatggatgaacattggattggattttatcaatggataaaaaatgtgttatgtatgtaccatagaatattattgagtcataaaatgaaggaaatactgccattgtgatctcatagaaacagagtagaatggtggttgccatggactggagctgtgggaaataaagagatggtgggcaaagggtgcaaaccttcagtaataagatgaatacaatttgaggttctaatgtacagtgtgagaattatacttaaaaatattgttctgtatacttgaaatttgctatagagagtacatcttaagcat

SEQ ID NO: 104069 - DNA, 173 bp, Homo Sapiens
  misc_feature (173)..(173): n is a, c, g, or t
gtcgagcgtctgaccggctcgcggggcagatacacacggaaaacctagacagaagacagggaggtgaggcctggcactttttccaaaagagataaactggtgttctgcccttaacttcatgtcccagtacttttgtgtaaaataggcttttttggccaggcatggtggctcan

SEQ ID NO: 104070 - DNA, 489 bp, Homo Sapiens
ccccagacacctcgcattctgaggggaagccgctgcactccgtgggggaccccagtcggatgccctccaggagaataagtctgaagccgggctgggaagggagcggagaggcccgaaacagagcagcaggcagcgccctctgctggcagccatggagacagcgtcggctgcggggcgccctgccttctagtcctccccagctggcaggacaccgttgacaacctggggtccctgcagaagtggcccggctgtcccccaagtctccggaagctagtctgggtagggtgggaggcagtgctgtgagccacaaatgcgaagcagaggggacagatgttgggactcaaagacatgaggtagagctggccccatgggtaggtgccaccaccagagcccatgaggcttcgtgttctagaaggtggtgggttagtgccgcaatggaggtgcgtgtaccgggagggagcatgtgtcagccaggctgcgaaaatcaga

SEQ ID NO: 104071 - DNA, 400 bp, Homo Sapiens
ccacaagtacttcattatccatgacctcatatcttcacagctcagcatgttagcaagcaggtagcaatatcccccttcacagttgtctgagggacccaggcttacgaggattaagccacatgccgggtccatatagctcctatggacagggctggccaggagctgtgaaccagagtgtagatgagcctccgtatctttatatatttatctcttcattgcatctcttttcccctcaaattaatcatttcctttgtagatcacctgaagtgtaaaacaagcctaaagccaacaactattttaaatattggcagaaaagacacatgccctcaagaactgcccccagaactctaataacacaaggcctgtgaaagaaacctgggggcagtccttgtgggcctta

SEQ ID NO: 104072 - DNA, 287 bp, Homo Sapiens
tggcataagccaccgcgcccagcctgattacttttagtatacagcattctaagcatgatccatgaaagaaataattgataggccagacttcattaaaattaataaactgctttgcaaaagatactgtcaagagaatgaaaagtcacaaacaaggaaaaaatatttgcaaaagacacatttgataaaggactgttaacaaaaatatataaagaactcttaaaactcaagaataggaaaacactttcccactcaagaaggcgtggcaggtgcctggcacgtgttcatgc

SEQ ID NO: 104073 - DNA, 462 bp, Homo Sapiens
cacgccacatggactgctccagcatggagtgacagatttactttcactcctctggttggcaaaagatggaaaaaaagactatgaatggctcgcttctttttatgttttccaaagaaagcaacattggtttgcattctttgccacactgctttggtgctggaaaccggaagccagtggatgtctcatagtgtgatgagcctctgtcacctgttggatgtatactgtcagcattcatgtaccttctgttcattgtcatccagtgtgctaaccaggaagcatttgagtgtggcaagttagttaaattttcgtattcctggcatttattcacccattcgttgattgattcagtgaaacagatttactgagtcactgatatgtgctaggcacatgaggtgactaagactccactccacaaccccagatttcagtcttgtaaggcagttgatacatgagtccttgtgg

SEQ ID NO: 104074 - DNA, 478 bp, Homo Sapiens
ctccagtctatctgcggtacatgctaacagcccacagtcctccagtcctagtgccggtgatcatgctaacagcccacagccctccactcctagtgccggtgatcatgctaacagcccacagtcatccagtcctggtgctggtgatcacgctaacagcccacagtcatccagtcctagtactggtgttcacattaacagcccacagttgtccagtcttagtgctggtgttcacactatcagcccacagtcttccaatcctagtgtcggtgtaacagcccacagtcatccagacctagtgtgggtgttcacgctaacagcccacagtcggccagtcctagtgtgggtgttcacactaacagcccacagtcgtccagtcactagtgtgggtgttcacactaaaagcccacagttgtccagtcactagtgtgagtgttcactaaagcccacagtcatccagtccttgtgggtaactcggggc

SEQ ID NO: 104075 - DNA, 532 bp, Homo Sapiens
gccacaggatcgtgagatctcgtaggtctacttgtcatttttccttctgtagctctgcatttggcacatggtaaacccacgggtagactgggtttcttcattcattcaacaaacacagattatcttttattggcttctgaaatacatctaggcagacgaatgtaagagtcttacaggcatccacagtatgtgaggcacgttggctaacttaacgtacttttcgccactgagatccatttaaaaaattactggaaagtaacgttcccgtttttctatttattcattccttcaggcagaagcagagcacagaagtggttgtggctggggcttcaattagcatttcctctgtaacatgtcaagatcccaccagaagggctaaggaaggaaggaggagagagcccatccagtaaacatctagtctgagccacattccattgaaacctctgtttcagaagtgcatatgcatcgttactagtgccaagtatggtccccactttctctcttttttgcttctgaaaagagttccacaaag

SEQ ID NO: 104076 - DNA, 684 bp, Homo Sapiens
acggtgcctggcctagtgcaaataaagttttattggaacacagccacgcccactggtaaggccaaacccacgtggcttttgtgctataacaacagagttgaatggcggtgatcaaggacggtatgggcctcaaagtctaaattacttaccagctggctgttcatagaaaccttttcggatccccagcctaagtcatcgcaggctgatggcacaggtctgggcttcccagtccttgtgtggctggctcctctctccccggattgcctgttccctgctttccagaagcaggcaggtggcctgggaagaagtggaacctgcagggtgtcattctccaagccgatgctgaagatgcaatgccttcacccgcctcttctgtgctcttcatcgcacgggtgggctagagcagggaagatggactttcaggctggagcctggctttctgtggtgggatgttctgtgggtaccgagacccccttactgcatcttcagggacagaatctggcttgggttgagagtttatttggccctttctgatctgtaatcgggagagattgattgagctttcctgacacagacgtggcaaagcaaactggcagtggggcaggctttgccaaggctcgtcatggtagcggaggcctggacagagcacccgccaacagctgctgcttaaccaaggacagaatg

SEQ ID NO: 104077 - DNA, 507 bp, Homo Sapiens
  misc_feature (74)..(211): n is a, c, g, or t
ctgtttctcactcgaatcgctatactgtccttctgtttctgtttaaaaccaagaaattctgtgccctctacttnnnnnnnnnnnnnnnnnnnnnnnnnnnnnnnnnnnnnnnnnnnnnnnnnnnnnnnnnnnnnnnnnnnnnnnnnnnnnnnnnnnnnnnnnnnnnnnnnnnnnnnnnnnnnnnnnnnnnnnnnnnnnnnnnnnnnnnnnngacctggctttggcaaggcctgagcacctggcctgctttcccaggagtacagttacagcagctgatctagggaacaggtgtgggctccgtgtcacagctgctgctgagcacatctgtacccacagtgaggaggctgcagctgcagcagggcctgtcagtcactcatactctcccacggagttgggctgggggcactgaaaggcccaggggtggagagaatgtgagataaacatctcaaagagcaccaggctgccagggatgaccgcgcgaaaccgaactcgattttccgcgcccgg

SEQ ID NO: 104078 - DNA, 795 bp, Homo Sapiens
  misc_feature (747)..(747): n is a, c, g, or t
gcggcttcctggagccgtggtaggtgagggagaacctccacaatgttctagcacctacctggtcactgagctggttgtcccgaaaactgacgtctgtcagctgtggactagagaggctaagctttcaccaggtggctgacgcctcgggcagtgattttacttcctgcttacctacagagtaagcaaagatggtggggaggtacgaggtggggaaaagggcggggccaggaatctgccttgtgtaggatttaaggagagggaggagagtaccaggcatccccagctgaagacccttctcagctccaaggcctggctcaccccagcatctgcagcctccccattgtcggcaagctcctggagagggcttctgcaaaggcatccccacacttcctgctcttaaagctgagattctctatctgcccactagcctaccagagcctcagggcagtggggctccaggggacagccatcaaaatccaggtggatgggggcctccctgtgctctaggatgttggtcagggtggccaggtcggtgcaggtcagtgggaaattgtggaagggcagttgataggggaggctttgtgcggtgagactggccagctcaggctcctgtgtctcatccacacagtgacacagctctacaacctttggccctgtgagcttgcgggtggccaacttcttcaacacctgcactacagcagcctgcttggcacccacacagtcctcattgcctgcgccaggtggctnaaggaaggggcggcaggtgcaggatgccagcccacgcataagtggagg

SEQ ID NO: 104079 - DNA, 401 bp, Homo Sapiens
cctctctgttgcagagatgcagagcactcagagagccatatttctatcatcgctttcctattcgtccacctagaaccaggtgactggccgaccgagtggtgtctcttgtgtgtgtggtgcgtccaaagctgtgcaagaaatgcttctgcctaggttttctcgcgccccccccttgccttggcttttcctgcctgcttacacccccgttccctgatctgccactgggcttctgggcaggttccccgcactgtgcctatcgccggcctgtagtagctaactgggcaaatgaggggctgtgtctggaatttggagacgtctacattcaaatccttgataacactgtaatcacagcaatctgggacgctgagcacgggaggattgcgttgagtcacaggatgtat

SEQ ID NO: 104080 - DNA, 537 bp, Homo Sapiens
ccggggccatgtggcatgcccgcctctactcctgggtaggctggttgctttgagtggttcggggaagtcggtctgttgggtttctccgtggcctggcctggggttttgctttaacctctctgttgcagagatgcagagcactcagagagcctatttctatcatcgctttcctattctccacctagaaccaggtgactggccgcccgagtggtgtctcttgtgtgtgtggtgcgtccaaagctgtgcaagaaatgcttctgcctaggttttctcgcgccccccccttgccttggcttttcctgcctgcttacacccccgttccctgatctgcccctgggcttctgggcaggttccccgcactgtgcctatcgccggcctgtagtagcaaactgggcaaatgaggggctgtgtctggaatttggagacgtcacattcaaatcttaaaacactgtaatcccagcaatctgggaggctgagcggagattgcttgagtccaggagtttgagaccattctggcaaccagtggagaccgatctt

SEQ ID NO: 104081 - DNA, 197 bp, Homo Sapiens
gtacccggcctcccacattggttgccatgggctgcatgcaccctacaggccgtgggttggacaagcctgcattaggaggtagttcagcctcttgattccccttaatcctgacctaacttcaatacacacccttggggccaggcgtggtggctcacacctgtaatcccagcactttgggagataagctcctgtagagt

SEQ ID NO: 104082 - DNA, 486 bp, Homo Sapiens
tcccaggagcataagtagaagactctggtggactttgagaccgatgtcctcttcctggtgcccactcgaagattgccctagcccagcacagagccaatgccaagagtgccaagacctacgccttacctgttttcccatccctctcggatgcccgtctaccccaaatgggtgggggccgaccatgcagatgacattcagtacgttttcgggaagcccttcgccacccccacgggctaccggccccaagacaggacagtctctaaggccatgatcgcctactggaccaaccttgccaaaacaggggaccccaacatgggcgactcggctgtgcccacacactgggaaccctacactacggaaaacagcggctacctggagatcaccaagaagatgggcagcagctccatgaagcggagcctgagaaacaacttcctgcgctactggaccctcacctatctagcgctgcccacagcaccaagtgggagc

SEQ ID NO: 104083 - DNA, 558 bp, Homo Sapiens
atcatacaggatcttgcttctgggtgacctgaaccatcatgtatagacaacagggacattgtcagattccccagaacgcaaccacttctgatgagcctgaagttccagggaacacaacagaaggcttgatattgcctgatgataagtccctagacagtagctgcgagcttgagcactggggtctaatcagacactccagggggaaaggctccatacccacctgtccagagtaaacaggtatggctccatgccctggggttagacagagtcacctgaccagtgcaggcagaaaaaaggcccacagctgctccatagaaggaataggactctatcataaataagagccattgtcccccaaataataatattaaaggtaagggcaagacgctagccagtgcctgccttaggttgcctgtggttcagcctatccgtgtgctgtagtcacacccattcctgaaccggtccccatgcatcaggatgggagttgagccagaaagccccctgatgtttattgctgcttacgctgtagcccagccaccagtggagtcaggatcctgt

SEQ ID NO: 104084 - DNA, 514 bp, Homo Sapiens
ctggcctccacttggtgcgggacaagcgctgggcggatgcattctgagtcagcgctggccacgcaacctgcggccaatgctaccgtgccgtgcctgtcaggagcacatttcgcacccaccgtataccttcgcagcttccggtgtcaactcagcacatcgcagaactcattcccatatcaacgtactgttccaaaccctctatggaacaaacacaaaagtggagagagcagtgccacgagctcagcttctcggcatccacgcggtccacctactcagtagttgctgttgttttcccccgggagtgctttaaagcagagcccagttagacccccctcactcaggagtgcttctgctttctgtcacttcagcaatggggctatgcagacctgatgtcagccccagacacaggactgcaggtgggggccactcatcccatccgaggaacgggagctggagccaccccaagtcacggggcctcagcccagatggggacagaacaaaagtgatgacaacc

SEQ ID NO: 104085 - DNA, 340 bp, Homo Sapiens
  misc_feature (225)..(233): n is a, c, g, or t
tgctgccgtgggaggcaaagagagcagctgcaggagcttggctccacaaaattcacctccacaacaaacaggaccatgccttgtggctcacttgggactggcaggaggaccctaatcctatgtaggtcctatgtgcagcagggggaccgcaacaccccagcacaggggctgctgcctccacactgtgtctgcaaacagatagctccaggatctcaagtgtttcannnnnnnnncaaatccaaaaacaatttaccatccaacccatttcaaataagtgggggagcagtggcgatcccagctctaagggtttgagttgaaaaggggcaaccaacgtgggagg

SEQ ID NO: 104086 - DNA, 340 bp, Homo Sapiens
tgggttggtccattcaaagcaatcagcctaccaaggagtagaggcgggtatgcaacatggcacggggctgggagcctgggcttcgaggctcggggctgcccttgactttcccacacacggaaagcgctccagcccaggaggagcccggccacggtgtgtgcgcaagggcagtggcctcctgtttcggtccgaggagccctctctcatgggagctacagagggcagagaccacctggcctatgtcagggggcacatgtgtaccccttgtttggcagctcggcccactgtggaggtgggaacgatcgaccagccgcaaccaagtggagataagctcctgtag

SEQ ID NO: 104087 - DNA, 541 bp, Homo Sapiens
tgctttggcagcagccgtcactgccagctcctcgggggtgaggcccggtaccatgagggtggtggtgccagcttgggcctcggccattagctcttggggaagtgataactggtctacttcggactgtgtgggttggggtggctggaccaccacaattggccagcaccgcagagcccgcagactcctggcccgaagatggctcccctgtgctgctcagatccacggcggccgggagctcaagggtctgggaggctgacaggacctcggcggactcccccatcagggctgtggaaaccgactgcagaagctgccgtggcggcagctgctggcgaggacctggcgacacctggagttcctctgggggcggcacagaggggcccgggaccggtgtggactgcgtcacggtggtcacagcccgcgtcagtgtggaggacacggttgtcgtgatggcactggagctggtgatgttcacgctgtcgcctgggtgctctccacctctacctgatcgctgcaaaccaagtggagccagagatcctctaat

SEQ ID NO: 104088 - DNA, 493 bp, Homo Sapiens
  misc_feature (34)..(34): n is a, c, g, or t
tggtgatctagaggatctgggctcccacttggtngccaaggagcacatgtgtggtgcttgtctacctggtgactgtgatgcactccatgcaggccggctacctggagaaggcgcaaaagtacacggacaaggccctcatgcagctggagaagctcaagatgctggactgcagccccatcctgtcatccttccaagtgatcctgctggagcacatcatcatgtgccgccttgtcacgggtcacaaggccacggcgctgcagaaggtaaggctggaagcaggaggggcggcaaggcccaggagtttgttgggtctcagcagtgtcagacaagagactgaattcaccaagtgcatactgccaggccagcccatcctgctgtctcgctgtcggccagcgtttcacagccctgcatgggcaccactgatcagagaatctcatacaaaaaccagtggaggccgggcgcattggctcacgccgtaaacccagtgctctgg

SEQ ID NO: 104089 - DNA, 669 bp, Homo Sapiens
gatctttctccacttggttgcggtggttcggggcaggagacgacgcagcgcggagcggaaagggcggttacccaacggccttagctctcatggcgtcctccgtggtgttacctaaaaataaagttatttgtgattagaaggtaatcgcctcctggtcatgcttccgctggtcaccagtgtctgcggggcgaccccatccttgtggccagagagggcctgtggctgcgctcaaggcgggagcggtccttagcggggccctgcgggaacgcccaggccgcgctcctttcccttgctcacctggccttgaagtgaagggggaggtttaacaatgcagtgggaaccccaaagtttgtctcggccgtgctgctcacattccaaacaatgcaaaaggttgcggaaaacctcagcagttgaaaccgtgatgcatttcagcaaagaagtagctcctgtcctcgtaaaatcagtgaagttctcacggacgacctcattgagtgagttgtgaagcttgttgccttaatcagaatgatcagccagcatgcatgctctaatatgctcgtttgtcaatgatatgaacagctgcaagtggaagaagagcctttactcatagtctgttcacttgtagcacaagttggttgtgcaaccaagtgggagccgggatcctctagacca

SEQ ID NO: 104090 - DNA, 423 bp, Homo Sapiens
attagagggcttggctcccactgggttgcaaaaattagcataggcacacatctaagctccatcttacattggacacttccatgaccccacgtgggccaccccagggtcatggcccagtctggagaagtgaccctgcgaaaaagctgtgtatgcccggtaggtagacttgacccttctgtgcaagaaatttggatgtcctgcgagcacccagaatggtctaggagagagggaacaggctccagtggacatattctcttcgcccgtgtgactccctcctccatgggaagagactgggcttaaacaagcctagagcaggtctgtttaaggtctggggccctgagtaggaatctacttacccacgtcgaaggtagaatggggaagaagcactgttataaactcaacagaaagtgatactgagtccac

SEQ ID NO: 104091 - DNA, 361 bp, Homo Sapiens
ccactggttgcgcagaaacatcaaaggcaactatgatccaaatgtactttattaactttgggggcaaatcataaccaaaaacaagcctgcccacttagagagagttaggtggggaacagagggagacaacagagggttgacaggaaatcagccagaacactggtgtcagaggattctgtaataaatatgtggtaatacaggcaaagccatagaaggtggggggaaatgcaggcaagaaaaataacactgtgatataataaagaatctgcacactgtccataaggtctgcaatttaccttttattaaaaagtgtgtatgtgtgtgtatttgtatacacagtcatcaaggacatcttcactat

SEQ ID NO: 104092 - DNA, 581 bp, Homo Sapiens
cccactgtctcgtgagcgccttcccattgtcccttgtactcattgccgctataagtctcaagcatgactactcctatctgttgactcagatcaacacagtccttttccccagagaaaagcttaggcttatggtttcagcagattggtactcacaaatctatttctttagttctgtctgttcgcttccctgtcccaggctgaaccttcacctgccaactggaaatgtgtttggctatgcctcagccctttgtgaaacaatggctggtgacttcccagtatctgttctctcttccctctcatggtaatagaacctcaacttttaactaggttcatggatacccaaagtaaagactacatttaccagcatcccttgcagctaggtaccgtcatggctaactctggccaatgcgatagcagtggtagtgatgtggcagtgcaacttctgggtcatatccttaaaaggaaaggtgcatcttcccctccctactggctccagcatggatgtggtggtgaacccagttagatcaaaaggaggagcagcactccaggggcaaacacgtgggagatcagctccgtagatc

SEQ ID NO: 104093 - DNA, 528 bp, Homo Sapiens
gtcctcagcaagtattcttgtgtccagccctgttcatcatagatgaggaaactgaggcctgagttattaagtgaattatccaagatcacagagcttgtgagaagcagggccagaactagagcctgggccactcacaacgcccctgcacctggtctccctcccattgtctcatgtctgtctctggcatcttgcacacagagcctgtgcatccctagcatgaggacccagtccttacaggcacacagaacctcaatgctcctcacagcagccccccagagacccaggacaggaattcatatgcaggagttcacaggaggtcacaggtccggaggaacccctttgcctgtacatctatgacgcccgcatgtccaccctcctagtttcctatctgccttattcatctgtgagtcttaccaaaaccaggaccagaccccaggttcctttcctctcatttcccacctctttgggccatattacatcaaatgggaaatgcaagagggaggaaaaccggaagggcgcccatacagt

SEQ ID NO: 104094 - DNA, 418 bp, Homo Sapiens
ctcccactgggtgcacaacactaggaaatcaaaattgagattggggtggggacacagccaaaccatatcaggatgtaaaagagttatatcttcctttgaatttcctgtcattctctaagtttaattccctgaaaaatcatgtatattttaggtggtttgctcccttttcccatggaatccagtggtaaaagcttataatattctgtgtattaagggtagggtttccaatattcaagacctaaaaatatattggtattaagtcatcttcaagttttctttaatctctatcttgcataagaaaaaatgtgtctattcacatttcttgtaacctaagggaaacctcatctgtgcagcaagtcatcatctagaaacttcacttatctgattatttgatctgatgctggaaaaaggaaaagcc

SEQ ID NO: 104095 - DNA, 345 bp, Homo Sapiens
atccacagcagccttgaagagctcatggctgccacaaaagagtgcacatttcagacccaaatgttctattctctgaaacttccagaattctataaaaaatcatcagggaggctagaatcttctctgagaaacatttctccccaagatgaaggtaacttcaagtgcttggacccctcgtggggaaagcagtgattgtcactccccactcagcacctccctggcagatggggccagctaaatgcaacacctgctcctcttagctccagtctggtgcagggaacaactgggctctttaggcccagccccagaccaattcatccagaccccccgccaccaagtgggagc

SEQ ID NO: 104096 - DNA, 492 bp, Homo Sapiens
tgatctagaggatcccggctccatggtggacacagactggttctcctcctctaactactggcaaaaagggaagggagtacaagcatcaaagacaaatgggttagtttaggaatcaaatgctaagactgaaatccaagtgagatatgaatctatactccaaagatgaacaaaggagtgtaaataagatggggggaaaatccatgcattggatctagtgcctatattccaggtactagatgggctggatgctggggacggagatatgcaaggcaaagtcctgctctcaaataattcagaataatggaatagagaacactcaaggaaacagagatcgcaaggaggtctccctcgctataattataggttaaatttataacctatagaaaagattctttgggacttaggctcttcagcagattcttttctggtgattgctattatctcacccaacaggattaacaacctagacttaggccgggtatggtggctcat

SEQ ID NO: 104097 - DNA, 340 bp, Homo Sapiens
  misc_feature (46)..(222): n is a, c, g, or t
ccactggtgccaggagtcgtaacagcctgggcaagtgaggatatannnnnnnnnnnnnnnnnnnnnnnnnnnnnnnnnnnnnnnnnnnnnnnnnnnnnnnnnnnnnnnnnnnnnnnnnnnnnnnnnnnnnnnnnnnnnnnnnnnnnnnnnnnnnnnnnnnnnnnnnnnnnnnnnnnnnnnnnnnnnnnnnnnnnnnnnnnnnnnnnnnnnnnnnnnnnnnnntgaaataaaataaaaatccagctataagagagacatctgaaatatatgaagatgttgaaagtaaaacaatatgaagccacttatgcaaatatgcaaattcttggatgtcgggaggaga

SEQ ID NO: 104098 - DNA, 509 bp, Homo Sapiens
ccaccgcacccagctacctcatcactttctgacgggactgttacatcaatctcctaactggtttgatcctgcttgggctgtggccctgtcctctgcagaaaaaagttttcaaaacacacatttgatgatgtgtcatccctgcttaaaacccttcaagtatttcctaccaccttcatgataaagtccaaatgccctaccatgctcctacccttcccctgggagtatccacattccagtcacaccaaagtgtttcccaaggttatataatgaggtgatatcaaaggcaggaggagaacctggatcgctgaataactagctgagggttcttccctcagtcccaggtgcttcccaggctaacgttggaccacagacagaatgactaggagcacatgacactgagtcatgctcgaggtgaaaaagtcaagaccaactaagtatttaggcttgataagcttacactgtgacagccagcccgatccactaagcaccaagtggagccagatcctcta

SEQ ID NO: 104099 - DNA, 577 bp, Homo Sapiens
gctcccactggttgcctgcaggggcagtaaatactacaggaggtggagctgcctccttctggtcccactttcccctccctgtctctaggagtgaagaaatacattggtaattttctattacttctgaatacttcaaagtttgggatcagtgactgtttggtgagttacctgagtttaaaataataaaacaaccatatgcctgttctctcaatgggctgaggaatcggcattcacttatatctggcctccatgtaatcatagagacacaatccttccccttttctcacttaccccaaatggcagaagcaaccaaccatcatttctcacttacagctcttcatgtcatttttatccatgctttagaagaatctgttttcatcttttttcctatcagcctggagtgggtctggggaataaggaatgggatgaaatggtgagagtccagaggggtagagcaaagaactcactataacacagcaaggcactaatttgaaatgcctgtgagaagtagaagctgcatttgactctcatattcttattggaccaggaagggatgaagcaagtgcgaggccgggac

SEQ ID NO: 104100 - DNA, 290 bp, Homo Sapiens
  misc_feature (57)..(166): n is a, c, g, or t
agacgatccttactcccaagtagctgagatacaggtgccctccagcacgccggccgnnnnnnnnnnnnnnnnnnnnnnnnnnnnnnnnnnnnnnnnnnnnnnnnnnnnnnnnnnnnnnnnnnnnnnnnnnnnnnnnnnnnnnnnnnnnnnnnnnnnnnnnnnnnnnatgagccaccgtgcccagccaagtgcataattttaaaagaaaaataatttatgtggctcacagttggacagactataagaagtgtgtgctagcatctgcttctggtgagggcctcaggaaactt

SEQ ID NO: 104101 - DNA, 590 bp, Homo Sapiens
  misc_feature (346)..(440): n is a, c, g, or t
ggctcccactatggtagcacaagaagcttcaacacaataatatgggagaagaggttttgtaaactataaagcaccatgcacatgtgaatgctattatcattctagggtagtagttggccaagtttactaatagaacacacacttagaggtttcaatagagtctttacctaagcacattcccactgccctgagtcacattaacctacttcagatgctaacttggcagtgatttttactaaaatactgaagctgaaaaacataaagagtggttttcctatattatctctcccttggcttaaactgtgaagcaccagaacttagtgatcagacaacatgacctggaatnnnnnnnnnnnnnnnnnnnnnnnnnnnnnnnnnnnnnnnnnnnnnnnnnnnnnnnnnnnnnnnnnnnnnnnnnnnnnnnnnnnnnnnnnnnnnnnctatccaaaccagaacatttcagggtgacatggtttatcatctgaccaggacatctgagaatgaaagcaggtgatgtccatgttaatgcgaggacaacaggcatacaccagaacggtccccaggcaagtagaggaaataaggtggctcta

SEQ ID NO: 104102 - DNA, 569 bp, Homo Sapiens
ctgctcccactggttgcgggaactccccatgctcctccataaagttggagtaaggacagtgcctaccttctggggtcctgaatcactcattccccagagcacctgctctgtgcccatctactactgaggacccagcagtgacctagacttacagtccagtgggggaacacagagcagtcttcagacagtaaggccccagagtgatcagggctgagacaatggagtgcaaggggtaggggactcctgactcagcaaggaaggtcctggagggctatctggagtagggagctatctgagctgagacttggagggatgagaagcaggagaggactcctcctcccttaggccgtctctcttcaccgtgtaaacaagctgtcatggcatgctatgctcggctctgggtgccctatttgctgaacaatactggggatcccagcacggaccagatgagctctggtcccctgccctcatccagtagcagtctagagaatcagagaataatggagagtgtggcaggtgccctgaagcgaagcaacaggataccagaacacatgatggggccaggcacg

SEQ ID NO: 104103 - DNA, 522 bp, Homo Sapiens
ctggctccactggtgagctggatgatggtgccaggaggcgaacgtctcgtcctgggcaaaggtgatgttggcatagtcatgcaggcaaagatctcaggcatatcatggagtgggaggctcttgatgtaggagaggtagccgtggaggtcgtaggtaggcgggatctggtggtagatgcccgaggagctgtagcatgtgctcaggggagagcacgtcagggtagtagaagtcctccaagatgttcatgatgcagcgccggtcccagtcatcagtgacacggcccccgtaattgatctcccctgccgtgtacttgaggaccttgtaggggatgtcatcatattcgtccaggaacatcttgagctggctgatgcagatgcgcagatctccatccgtgaactcataggggatgtcgaagcccagcggcccaaacttacggcgccccagggcgtacccatggaacaagcacagagacagcagcagagacttgacctccatcaccttgcgacaggagttgaggaagcc

SEQ ID NO: 104104 - DNA, 202 bp, Homo Sapiens
gccccagccttagaattctgatgttagtatgtaagaagatgcaaatagatttatctgttaaacatacagcaacctcccagacataatgaatgtagaataatggcacagccaagggtctagaaagatccactcacacctggggacagtgcacctctagggaaccatccagttagaaattgaggcattgatggcaccagtggag

SEQ ID NO: 104105 - DNA, 448 bp, Homo Sapiens
ggtgatctagaggatcctggctcccactggttgccaggaggagtgctgagccaggaggtttaggctggcatgagccaggatggccacttgcactctggctggggaaacagagtgagactctatctcaacaaaaagaaatttggctgatcactgatctgtctcatcaccctgctggtgacatcattattggaataaatatagacccagcttggttatacaggggtcctctccttgtctccctgttaactgctgtgtactgagcagcatggggtacatagtaggtgctcattaaaaatggtggattgagtcatagtgacactgtctgggccccagggagcgtcaagactaatgggagaaacaggctcatatctagtgccctccagacaaggaagtaggggctccaaggaggatcaagggctcatccaagccactgcaaccaagtggcagg

SEQ ID NO: 104106 - DNA, 375 bp, Homo Sapiens
gcgtggcagcctgagcctgtctactcgatgctgagatagggaatctctgtggcctgtcccccaccccctgtctgagacccaggctgcactctgtccgtactcattcatccccactgccaccccctgcagccctccattgcttccacgtcgggccctgggccccacacgaggaccccagcagcgctttctccagtgggctgctgagggcgctcagccccgccccaacagctcccgccacccagacggcccccacacatggccccacaggcctcctgcccccaacgccctcttcgctttctggtccaggggccctcgatggcccttgtctgagtgtcacccccactgccaccacagtgaacggtggtgtcccagcaa

SEQ ID NO: 104107 - DNA, 472 bp, Homo Sapiens
ccagtgctttggaggggaaagactgctgtcgaggaagcagttaggtagttgtgaaaacccaggtgagggataactaggccttaccttaggtgcagccagtaatcttgcccatggcctgtaagcagagaaggtagtcctagtgtcactgaagctgttacaaagggattttttgcaaggatcccgatctttcttccttgagggtggtgtacttaatacactttgacaccagacttctaatgttagatgaagaacacagtatgtccagggatcaacatgtctgtaggctcctatcttatataggaaatggtatgaattttgtattttactccaaaatttgttctggtgcccgatttaatataaaaatttactgagcctggctgcagtggctcatgcctgtgatctcagcactttggaggctgagcaggagatttctgagcccaggagcatgagaccagcctgtcaaccaagtggg

SEQ ID NO: 104108 - DNA, 284 bp, Homo Sapiens
ctaccgatgctactccacttggttgagaatgagtgctatagctcagcttgcacatcctcacacctgactcccaaacgagaagaaagaatcaaaggctttctctttacaaggctttgatctttaattcaggaggcatctttctaagctctccagacaacatttcctgatgtctccctgggcagagctaggacagggctgcaaaggagcctgggccaataggcagctggccaagggagttaggggtgctatgtgaacctagtccagtcaagatccatcccttggca

SEQ ID NO: 104109 - DNA, 502 bp, Homo Sapiens
gtacccggcctcccacttgcttgcccatggctcggtcgccatgcgccccttttccagagttcatggagagggaggaaaaggctgtatctgcagcaaagtcagaaacagggaaaaagttagaccacatgagcttgggatgacaatgtccaaatagcacagagcttgacttgatgccaacaactgcaacctgggatcattaggaactatgtgcaaatccgacgatgagcaattgagctgataaccgagaccaagaacctacacctctctaacctcagtttcctcattggtaggaccacaccagcccagggcggtgtccacctggacttcttttcatgagagagaaataaacgtgagtcttgttgaagctactgttattttaaggttttctgttacgtgaaattgaacctagtaagccccccagtaaagcaggggttgctggttgtcacgcaggtcctcatgtgaggccgcaggctggtctggaaggtggcaccaagtgggagcc

SEQ ID NO: 104110 - DNA, 190 bp, Homo Sapiens
tccactggttgcaatgaccattcagcgttgcagacctcagcccctgtgctgtactggggactgtggcaacagtagccacaatctgggcttggggcaggcagagcatcccatggggccagtgatctcctacggaagatttgtctttgacatcaccggatctattggtaatttagggctaacaatggacctg

SEQ ID NO: 104111 - DNA, 545 bp, Homo Sapiens
cgcagtccaggtagatgagacctagaggaaggaaggaataacagcctatggggatcagggggtacttcttgaagtagggaagatttgagctgggctttgaagaacaaataggagttggccatgcaaggaggtgtgtgcacgacatactaggccaagggaactatgcaagtgaaagctcagaggttggaaagtttatgtcgtgcctgagaggtatattgtagcttggggcataccttgtgtgtgaaggagccccaagagatgaggtgggagaagccagcagtgtccagtttgtggaacagccctgaacattaggccgatggcaatagggagccacagagggttcacaccctggaaggctgttgtgcagcttggagggagatctggcccaggaaaggaccacagaagtggggggaaagagagcagaccagacagggcccctggaggtgggtggtccagtggaaggtggcaagaaagggtcctgcttttgagaaagatacacatttgaatgcaaccagtgggagactaagctcctgctagagtcactt

SEQ ID NO: 104112 - DNA, 142 bp, Homo Sapiens
gctccacttggttgccaggctagagtgcactgggtgtgatcccggctcacacaaactttcaagccatttcccaggttcaagccattctcccgccccagcctcatgagcaggtgggactacaggcatgcaccacaatacctga

SEQ ID NO: 104113 - DNA, 361 bp, Homo Sapiens
ggatccttactccacttggtgcaggtagactgcttccctgctgtgagcgacacacagtggaacgatggtccctcaagctccatcctaaaccctctgctctgtttcctatcttcttcctcacgttagtgtgagcggctgcatcacttcccctagtggggaatgccaaaacgagctcacagaccttcccctcttgtgggatatttaggtctcttgcgattctcctctatagtaaacactgtgaaaaatgtctcatttctttgtccttctgctggatttcaagaccccaaatccttcacataagttcttccaaaagcgctctcctctccagaaggaaccttttttgcaaccacacgtgggcagg

SEQ ID NO: 104114 - DNA, 370 bp, Homo Sapiens
gtacccgcaggtgtgggtagtgaagaaaccatctttctccctctactcccggaatttctgtctattaaggtgatgtctctgcccaggacggcaggccaccatggccctgtgaaccccttgtgacccccattaccctgagtcccttactcctgtgatcccctctatagctccatagccctgtgaagatatgattccatgaccttcatgatctctgtggccctgagaggaacaatctttgtgactcctaagaccatcatggcttcctgaccctgtgacctcctcatgatcttctgagcctgtgaatatttgacctcctaagctcccatgtaggctgttacctctataccgtcagtgaccctacccactacca

SEQ ID NO: 104115 - DNA, 240 bp, Homo Sapiens
atctagaggatcccgcaggtggttgtggggagagaggcagggagaccagagctggctggagcagaatgaatattgacgggagtagaggaagctgggaatattgaggggagtaggggaagtcagaggaagctggttcctctagggtgggctcttatggctagtaaggactttggctcttactttgtgtgaaaatgggagctattgcagtgtttggagttgtagaattctaaatgcatagtg

SEQ ID NO: 104116 - DNA, 559 bp, Homo Sapiens
gtgtagttggttgtggggagaagtgaaggtagcaacgcttcctcctgctcttaacttcctgcttgctaggagccctgtgtccccaagccatgaatgagacccctctggcaggcttggtggctctggtgattcaggggccaggactcccccactccatttggcaggccctagttggcaggccatgtgggcacccagggcgtgggacccagggcctccctggagggagctgctgctcagggaacagggtgagtggacacgcgcccgcagatgtcttcccacccttgcccggccagctcctgcctcagtctatgccaggaggcggataaccccgttgtctgagcccagcaggaggtggcgtttagtgggcagcaaggccaggctggtgagcgtgccgcggaagttctcagagctgagcttcgtggtggcctgcgagggtggctcaagcagggagcagacgccaatcttgttggacacggtgccagtgaccacctcgctgccgtacaggtcaaaggtgtggatggggtcggatgctgacttgtagtgatgggtgggcttctga

SEQ ID NO: 104117 - DNA, 391 bp, Homo Sapiens
cggttgtgggtgactctctggctccccaagcctccctttcctactgttatatccttaaagtgcctctgaggccaaagcctttgtggcaattgtcaaatgagtccatatgcagtgagtaccgtgttgagggaggacaaggtcaccaagagctgagaatgtttctctgactgatgagacctagatattgggtacatggaggtccccggtccctttgtgattcctgcagcctgttgcctccttgcctggaccccgcctcagctcagaaagccaattccctagattccaaaggccttcccagaccaattagcatgtccatgcagctgtcagctccctgtgcctagcctggacctcagctcatgtctaacacacaggctccctacccacaaccacc

SEQ ID NO: 104118 - DNA, 413 bp, Homo Sapiens
  misc_feature (308)..(317): n is a, c, g, or t
tgtatgttgtgggtgtgactgagtgaacttcaggtcagtggtgcaggaatagctgtcgagatgtcatggttgaggtatcttataggaatggggaaaggcaataagtgagtccagagtagaatggtgtcttgtggctaggtggttcctggtcagcaagatcagtacagaagtacagtaggatgcaaatgaagaaagtgtttgctgagaaatgtgttttatatccaccaattctcagaatcactgaaaacatttgggtaaatgccaaaactctaagagattttaggttttacaagttttgctttcccttnnnnnnnnnngttacattggcttattggccattatgatttattttacttttgtatggaaaaataagcaatggccctttttctttcttaaaattgttaattaattaa

SEQ ID NO: 104119 - DNA, 262 bp, Homo Sapiens
tggaaaaggggaaagggaagaggaagtagatagtggccacatctatcaattcagcaaaaagaacatagagaacacccattgttccttccattcagagatgaccactgctaataccttgtatatatcctcccaagcacctagtgtcatagatataaatgaacttccttatctctagcagtcaaagttgagacaagttttataacacttaaacagaaaactgcacacaatttctgtatgtaccatttagtaacacttacattcc

SEQ ID NO: 104120 - DNA, 164 bp, Homo Sapiens
aacgctctggaaaagggggacgatagccagaatgagttacagagcagcttctccttccctgcggaggagctgtgtgtggaggcagatgtggttgagagaaagatctacctccacctctgacctggaaaaggaacctgcctcagtctcagggacagcaaagccct

SEQ ID NO: 104121 - DNA, 465 bp, Homo Sapiens
tgaggtgatctagaggatcccaagctctggaaaaggggaagggaggcaggaagtaaaactgtggagaggagaggagagtaaggtgtggagaggaagggtggaacagctcttcccaggcaagcaggatgtgtggggagcagatgcctcaaccaaactgcctcctccccctagttcccaggtaattccttcctttcactgttctgtcctttctgcaatgaggcattgcaggtgtcttgtctggttctgtgtcttatctctgtgggatgggggtgtgcagtgggatctgtctgacatccgccctctgtacctccccagagtccttagccaggatggaggctgttgtgaacttgtaccaagaggtgatgaagcacgcaggtaacgacgctatccaccagccctttccttccttctttcccgggatccctggatctacggctgtcttcatttgaagggtctacagacatg

SEQ ID NO: 104122 - DNA, 235 bp, Homo Sapiens
  misc_feature (11)..(11): n is a, c, g, or t
  misc_feature (47)..(47): n is a, c, g, or t
  misc_feature (61)..(61): n is a, c, g, or t
  misc_feature (74)..(74): n is a, c, g, or t
  misc_feature (89)..(89): n is a, c, g, or t
  misc_feature (99)..(99): n is a, c, g, or t
  misc_feature (122)..(122): n is a, c, g, or t
cggaattcganggcctcggtacacccttcgttcgcaattcaatgcangtgtggagaatacnagggctgcactgntgtccccgggtggangtgtgagcangtgtgtagcactagcagccccgncacagtaggcacttcgcagcaggcatgaaaatgtgcggcttcatgatgtgtgcatgacatgatcggagaggtctcacagttagcaagggcagacctggcgatggggacctgcc

SEQ ID NO: 104123 - DNA, 452 bp, Homo Sapiens
  misc_feature (310)..(345): n is a, c, g, or t
gtgggggctgtgacacccacacacggcaggcgcagggaagagaggagatgaaatcagcctggatggccctcactctgggcctcctcttgcactattcatttcttgggcttctgattatctgctgactgggacaaaaaaagaagccaaatcctagggcatgaattctagtccattccaattttatttttgcatttctgaaatacacggattcttccaaccagaatattaatattcaaaatagcaataataaaagtattagcaacaaaacagctactttattcagtgcttacaaccacccttgagaagtcannnnnnnnnnnnnnnnnnnnnnnnnnnnnnnnnnnncttgcctgaagatacctagctaataaatggaaaaacaactgtgtctgacatccaagtgtatactttgactactacgtctctgagaaagcacttaatcctggtttaac

SEQ ID NO: 104124 - DNA, 252 bp, Homo Sapiens
aagagattgtgcccccctgtctcccaggaacagtctcgcaggcaatgccacatgaggaagctccctgctggccatggctgccctgctcacatttcctaattggacacttaacccctgtacaagcacagccttgcggccacaggggaagtccagaaacattgaggtcattgaattccggggaccaaggggttctaattttttaagtgactgatacctgtgataaaggttttcctttccctttttcgttaactc

SEQ ID NO: 104125 - DNA, 605 bp, Homo Sapiens
acggacatggagtatgatgtgaaaggaggagtatggttagtagagttttgagatgccagacgggccgatccaagatggaaagataatcaccagacaataggaaatgcaaagttgaagcttgagccaggctgaagtccttgattctggagctgtctatgagttgaacgcatacaagtggattaataaaaggataaccctcaagaagcaaatgattttagggcttcttttttcgttgaatttagacaaagaactcaagttaacaggaaaaggtggttcaccatctgaaatttggtatttaactgcattttagacccactaaaaaagctaaaaatagttgatgaagtttggagaagttatgcctgaaggttatttgggtccccgtctaaaccatgctgtctggattcacattcgctttcctattcttggattccataacataatcccatcttgtactttttagatactgatttccccacataggtacatttttgcagttgttttcctctaatgagttgtaagacagataaaatgtgaaaaattggcattaaacatcacttgggaagagtttgtttctttttagcttgaggttgtcaatcgatattact

SEQ ID NO: 104126 - DNA, 494 bp, Homo Sapiens
ggcatgtttgcctccaccttgagtggctggtaactcaccctgcagctccgaaggatctagagcaattctgccatgatgtacttacacagagggtccaggggacatcaagattcacaggtactagcacatgtgcagaacatgtttcttcaaccctctgttcacaagattcacaggggttggagggtaaacaaaggggaagggtgagagtatttccaagaggccttatttgagtctgggccacatagataaggctcccacttccgggcaaggctggtttagaactgccagaaggggatatccagtggtatgtcctgcctttctaggagctctgctgatgggcagatggttgaggatggttgtatgcatatgaaaaaccatggtgggattaaaaacaagtgcttcctttcaccaagatttcatccagatacctcttaatcacaacctctctgttccctagacgatgctagggtcccagccaagattccgtactcccc

SEQ ID NO: 104127 - DNA, 560 bp, Homo Sapiens
ggggtggggagtcggaatcctgggagtaggacctaaacacagacttatactacagaatccaggtggagaacaaacaaaaacgagaatacaagaagaaaagagaaaaagtaattagattggcagtagctgagcagtgacaggccgttcacaataacttagtctaacgggccaccaatcacgccaagcaacccccagtcctcaggccactgtgatacccacacccagcacctcctcccttgagaagggccctgagactggagagtgaacagcgctgtcctcagggctatctaaacagcatgacacagagaacggctcaagtggccacatgctctgctgggacagaaaataaaacctgcgtggcccatcgctgtcttgtctgctcaggaacttcgtggccaaattcaatgtcattgtaattactcattttgaatttctggatgaatctctcaggttttattccttaagagtcaaacactgcaacttttaaacattgaaatccaccttgaatgcttttggaaaggagcggcacaaaccttaagcgtggctggcaagctgcacta

SEQ ID NO: 104128 - DNA, 488 bp, Homo Sapiens
tctctactcccagattcccaaagcgcatagatacaggtgtgagcaaccgagcgcaggatgtgggctttgagacggctaatcagacactatgatgcgctgtcgtgcccatagccggttgatggagaatagggaaggcaagaagctaagaaaaacatctccagatgaaacacagctaataacagaataagaactaagatcaggctaattccagaggccatgtacttaacttatgtacgatgttgtcttggtgccattaatttgatattaatttcatttacctgataattaatgtttgtcagacagaaaaagtgatgcatatgagaagctgtggggccctttctgtgttggctcgtggggggccctgttcttgtcctggtccttaggtcttccgcagtgagtgcttctcaagcagtcttggtggacagaaaccttgttgtatgccagtcaatccgcttctgcatttcttcagaatatttttgcatttcctc

SEQ ID NO: 104129 - DNA, 453 bp, Homo Sapiens
tctctgctcccagattcaacaacgagttggaatcagataccctactgtatagcccttgctgcttctgagtcttgatgaattatatgttcataatatttaccgaacatttattatgaaccaaggcaatgacgatatagcagtgaacttggcatattcaaagttcatgcccttgtgaagcttatattctaagtggggagacaaaagatacctaagaactttaggagttgtggtaagcggtattgaaaaaattaatatagtggcatagagaggacagtggatacaaggagaatttaactgtcgagacagattatcaaggacagacatctgaacgaggtgacatttagaacgaggccaaagaatgagaatgagccagctgtcaaaaggtgaggcagaaccttccaggcagcttctctttctttgaggatagcacatacaaaggccctgaggtaggtc

SEQ ID NO: 104130 - DNA, 575 bp, Homo Sapiens
cctccagatcaaaacattactgtatcatatgtacttcctaaatagatcagaacccgcctttagacttactattcagttctaaggcattgtgctacatgctaaggtaaagctgagaacaaggcagccccagtacttgccactatgaaatctacagatatacctcatcttgcctatttctgataaactttcttttacgaataaagatgcaaatatttgcttccaaacagttttctcaaatatccacaacatccctggccaagatatatgactgtaaatgaacaaaaagagaaagcatgtaccaatttctaagtgatgaaagtattattactacaatctcacatttatgtagcctaatcttcaagtttaaaatatcttactagttctgactgaaccagaaaagaaatctataaatcccaggaccttatcgtacatttgggtcagggcccaccatttggcttcctggtgccagtggtaagaaaagaacattcctctctctttccctacaaaacaactcatttggttcacaggaatatggaggaaggcatataagaaagtactcagtgagctgttaggat

SEQ ID NO: 104131 - DNA, 520 bp, Homo Sapiens
ttatagctgagccaaaacaagagcaaaggagcaagtctctgtgcttctctggtgacagggtcaacgacagccacaacatcaaagtatgtctccccttccttcggcctcagtttgattgcactgtgtctgtcttcaaaaaactggtactcgattcttggatctccttttggttgcgctgacagaagagcatccaccttcattaccaagtcgcttgccacatcttcttctacccgaagctgttgaatatgagattttattttctgtcctgaggtttttaagatgatattttcgaggaggtggaaatcgtcttgattaaagagctcactatcctccagtggcccaatgatccttccattgctgatcactgccctctgtcccttcttcagcttcagaacatccctgcagtacacggcatgagacaaaatgaaatccattttggaagactcaaagacctctttaaaaagactgaaatccattcccccaacagagaactccgcaatgtcagctcctgcagccaggg

SEQ ID NO: 104132 - DNA, 451 bp, Homo Sapiens
ctgtgcaggagagagaactgcagaaggaaaccgtgtctctaaaaacaaggtccagctaaaatcagggtccagctccaccacaagcgcagctccagggctgttgagtttgcctctaccattccaagtagtctctgctccagaccaagtcccaccatctggcagtcatgtcagtccaaccacagtcatatcagggcacttccaggttctttcattgagtgccccttgaggaggctggaggagaggccaatgacatatgcacttgagactccagagtctagatttataaccactatgttacggctgccagagtggctgcaaggacacttctttcattcattcatttacaatacatgtagcatctgctgtgtgccagatgccattctaggttctagggaaacaaggcagagcccctgttttccaaggcatccacattctaggaaagactgctacc

SEQ ID NO: 104133 - DNA, 556 bp, Homo Sapiens
gcaggcctgaaatcagctcgagacatgtgggctgattacatcctgtttgtagatgcggacaacctgatcctcaaccctgacacactgagcctgctcatcgctgagaacaagacggtggtcgcccccatgctggattcccgggctgcgtactccaacttctggtgtggaatgacttcccagggctactacaagcgcacacctgcctacatccctatccgcaagcgagaccgccggggctgctttgcagttcccatggtgcactcgaccttcctgatcgacctgcggaaggcggcgtccaggaacctggtcttctacccacctcaccctgactacacctggtcctttgacgacatcatcgtccttgccttctcctgcaagcaggcagaggttcagatgtatgtgtgcaacaaggaggagtacggattcttgccagtgccattgcgcgcccacagcaccctccaggatgaggccgagagcttcatgcatgtgcagctggaggtcatggtgaagcacccgcccgcagagccctcccgcttcatctcggctccccgggcgg

SEQ ID NO: 104134 - DNA, 617 bp, Homo Sapiens
ccaggcaggttcagaaagagtgaggagggtctacagagtgatggggaaggaaaatggagaggcttggccaacggctcagagccagtgctgcaggcagcgacgcccagcctctcccctccacacatggcacctggagacaggcggggaggcggcagccggtgctcgtgtgagcgcacacacgcacgtgcacaccccgcgccatgctgcgggacacacacccagggccccaggcggtgctcctcagagatgaggtccaagaggttcctcagccaatgaacatgggccccaggccagtgtggaaaacacagccagggctgcagcttgtgggggtcacagaggtcagtccctgactcctaacttggcagagacaactggcacccgaaactcaagtcctctctgtgagcacggggctgccgcaaggcaagggaatcatgtttcaccgctgagttcccgcatccagcttggggctcagtgcactggcggtgttcagggttgctgaatgagtgagtgaataaaggaacgaggcgggaacgcttcggtgactagaaataaatgatctcaggacagaatgggcacactggcgctagacctggggttcactctgcgtttataaaact

SEQ ID NO: 104135 - DNA, 584 bp, Homo Sapiens
gaagaatctggacgactccattgatgacgacaaactgaggaaagagttctctccctatggagtaattaccagtgcgaagaagaggcgacaaaggccgtgacagagatgaacgggcgcatcgtgggcaccaagccactctacgtggcactggcccagcgcaaagaggagcggaaggccatcttgaccaaccagtacatgcagcgcctctccaccatgcggaccctgagcaaccccctcctgggctcctttcagcagccctccagctacttcctgcctgccatgccccaggtgacggcctgcccgcaactcccaccgcagccttcccccctgccccagcaaggcagagcatgaagactagagttctagggaaatggaggtttctaacttgcttctgccgaggactcattaggaagtctttgtttccctctctataaaagggagagatagtgttagtcaaatggcatttcccagtgagagaagctcgtgaatgttgtgctgaaaaagactcttaactgactccagcaagtttgggaaatgctgcgttaagcagacctacatttttccttccttccttctctctcact

SEQ ID NO: 104136 - DNA, 308 bp, Homo Sapiens
gccttgctggtgatctcatacaggatcccatgtcagatcatgaggcaggaacagatgatgcagaatacagtctatcctggattgccaaggagtgttcctgggtcatgcctccatctgggtccgtttctgaaacctgcatgtggagcttgctggctgtgggagccaggtagactgtaaatcctgcccgcctgcccacgctgctgtcatgaagctggcccaccacgtgcctcctccagaaagccggaagctaccccttgcctctgcatattgacttttcctgggcaggcaatcgggccgtacataggatg

SEQ ID NO: 104137 - DNA, 294 bp, Homo Sapiens
gggctgagcagctggcagatgctaacctgggattgtgggcgcctgctccaggctgtcagatgcccacctgggggtgtgggcgctgctccacgctgtcagatgctcacctgggggtgtgggcgctgctccagactctcagatgctcacctctggtgtgtgggcgctgctccagaccatcagatgctcaactgggggtgtgggcgctgctccaggcagtcagatgctcacctgggtgtgcagggtgctgttccaggctgtcagagactcacctgagggtgtgggtgcagctccagg

SEQ ID NO: 104138 - DNA, 745 bp, Homo Sapiens
aggactcgccccatcctatatccgtggagtgtggtggtctgtgtagtaggcggttccacgtgtagtgcccacggcaggcagaggggattggtgtaacgctgtgtagctgtagaggtgtggtgactgtgcaactctttgcgggaagggcggttgcagtcctggactggaggagggagtggctttggagctggtgactgtgggtgtggtggccgtgctggtcagcactttgggagggggagctgttcccagggtggaggacgggatggccgtggatccagtggacgcagtcgtagtggctgctgtggtcggctctgtgaggatccaggtcgtccccggagtggaggagggcgtggccgtagagctggtggctggggtactggggcagtggctgtagtcgtcacagcaaagcacacgcacgttgtagttgaagcacatgttgaacctgcctgtctggtctacgttcttgcaggtcagacccgcctccaggctgcaggtcagcacactgaacgaactggtcgaagcttacctcggggtagttctccgcccggcactctatgctctttggtgcccagcacatcttgcccccagcagccctgatgttttcaaaagtttccatgtccccgcctgcaacccctgaggttgggaagtccacagtcaaaccactcatgtccactcacacttcggttgacagcgggttgtgcctggctggtggtggtgttagtcaaagggctcagtgtcgtcagtg

SEQ ID NO: 104139 - DNA, 335 bp, Homo Sapiens
ccaccttgagcctctggttgtgggtgtggtggttgtgctgatccacactggaggcgtgagtgccgtccctgggctggaggagggggtggctgtgaagcccgtggttgtggtagtcggcactttggtagtgtgagctgttcctggggtggaggagggggtggccacagagccggtggccccggttgtggtggccgtggcggtaagcactgtggaggtgtggacagtctctggagtggaggagggtgtggctgtggacatggtggccgtgggtgtggtggtctgtgataggcgggtccaggtggtgcccacggcataagtgggggaccgagctgata

SEQ ID NO: 104140 - DNA, 551 bp, Homo Sapiens
tgagctcggtaccccacttatgcgtgggggtgctctggtcttgagctactgttatcttgcttctgcgccatggtggctgggccccgtggtgctggtgctgatcctgggagtgctggtgcgtgctggcatatggcatctactactgctgggaggagtaccgagtgctgcgggacaagggcgcctccatctcccagctgggtttcaccaccaacctcagtgcctaccagagcgtgcaggagacctggctggccgccctgatcgtgttgagcggtgcttgaagccatcctgctgctgatgctcatcttcctgacggaagcggattcgtattgccatcgccctcctgaaggaggccagcaaggctgtgggacagatgatgtctaccatgttctacccactggtcacctttgtcctcctcctcatctgcattgcctactgggccatgactgctctgtacctggctacatcggggcaaccccagtatgtgctctgggcatccaacatcagctcccccggctgtgagaagtgccaataaatacaacatgctcatcacg

SEQ ID NO: 104141 - DNA, 421 bp, Homo Sapiens
gagctcggtaccccacttatgccggggcttgtcgttaggggaacagaaatggaggttacgaaaaacatgttgcagtagagttcttctaaaagtacgcacacacatatacacacactcatacttacggattgctctgtttgtaatagtaataccaacagacaaagactccaaaaaagaaaattctaatagtattctccagatttcatcatccacctactgccccttgtggagagggaagatctcatatccttcctgatgtcaacatccacctatatgctaatgcttcccacatccatctcaagcccccatctgcgatgtcagtattgtatactgtcattgactgctgggtctccaatgcccttcctcaaaatcaacttaggtaaaatgaacattctcttcttccctcccttctgcttcaccc

SEQ ID NO: 104142 - DNA, 721 bp, Homo Sapiens
ccttctgtgggagacaggaaaagccagagggtttgtcctctggaggctccctttactgtggggtgggttccatttcagcatgtaggcttgcaaatggaatatttgatgatgcaaacttacctggccagagatgaataggcatttctgaactcacatcagataaaactagccttgatgtgaggatggatggggtatctcacagcatcaatttacaagccataaggtgagcagtgtttttgctaaggaggggatgcagcaatgctgatcttcacagtctgattaaatgacactggggctggtgggttggcttcccttcagcttcaaatgggatgctgttggccatccgttgtcttgcgccatcccaacatgtgtgtattcacgttccttctctgccacctgtttcattatgtggacattttatccccttgagaggtagatcacatctccctgccagagatggaaatcccagagtcctgggtccagtgcccacagcagccctgactcaattgtagggcttctctgtccctaaacacccaagtttctctatttgtaaatagcgcatgttggcagacttaattgatgtttgtaagatgtttctagggttcctggattaatggtggcaatgtatccaagaagtgattgaaaaggttggcaactgcttagtgagagattgaaaccttgagctctctttttttccggacgagtcagtctctgcacttca

SEQ ID NO: 104143 - DNA, 209 bp, Homo Sapiens
  misc_feature (159)..(167): n is a, c, g, or t
ccatctatgccgtggggaagatgcaaacaatacaaaatagatcaatgtgtcctcagttccattgtccttttcaaggataattactgtgagcagtttgtatgtatttctagtctctatgtttagataacagggccttatttatttattctgcaacttgcnnnnnnnnnccacttaacagtatattttggtaacttttccatgtcagtaac

SEQ ID NO: 104144 - DNA, 457 bp, Homo Sapiens
gccgtggggctgacaatcatgaacatggtggctggcctgtttcatgacacccagcattgggaaccccatccacatcaccattgtgcgcctggtcatgctggaagatgaggaggaggacctaaagatcatgcaccatgcagacaacaccctgaagagcttctgcaagtggcagaaaagcatcaacatgaagggggatgcccatcacctgcaccatgacactgccatcctgctcaccagaaaggacctgtgtgcagccatgaaccggcactgtgagaccctgggactgtcccatgtggcgggcatgtgccagccgcaccgcagctgcagcatcaacgaggacacgggcctgccgctggcacttcacatgtagcccacgagctcgggcacagttttggcattcagcatgacggaagcggcaatgactgtgagcccgttgggtaacgacctttcatcatgt

SEQ ID NO: 104145 - DNA, 311 bp, Homo Sapiens
ctatcaaaggggttcccgaccacccgagacttggcccgggcaacgctccgctccacaaactcatcatagatgtcctcctgcacgaaggtccgggagccggcacagcagcactggccctggttgaagaacagggcgaagtgggcctgttccacggcccaatccatatcggcatctgacatgatgatgttggggctcttcccccccagctccaaggtcactctcttgaggttgctgctcccagcagcaacctggattacgcggccaatctcagtggagcctgtgaatgccactttgtccaatccccagggggg

SEQ ID NO: 104146 - DNA, 513 bp, Homo Sapiens
tcgatcgagctcggtaccggtcccctggggattggtctgctttcattgcgcgtctgctctttgttcccatactacactgggttattgtggtctatccagtaagtcgatattcaaagttccaagttcctggcacgaaacgccctcttgactgtgctgtggacagagaccccatctgtaattagaccaggctggagagaagatagaaggtctctccctgtgttcctcctggaaattggtggttagtgactcacgtttatgtggcttaagcgtcaagcggatcaaagggcgtgagcctggatggcgtcctgtggggcctctccgtgaccctgcgtgggcggcctctgtctgtccgccgccggccctctgcgtccagggcgctggtgacctcccccagggggccacagtcacgaccgcacggctgcagctggcctgagacccgctccgactttcaagtccacacacgggccgggtttttccaacacagaaacgcaagtgctcccctccgcccagcaa

SEQ ID NO: 104147 - DNA, 429 bp, Homo Sapiens
tcgagctcggtaccggcccctggggattgggaggacagaggggaagaaagctgggatgcctcttggcaggacggaactgggaagtgccccagctgagttccaagtgatgcagtctcttcccagcccaagcggggagttcatggccaaaagactatgcttcaagatgaccctttggtttccatttcttctttagtaacaggtcaactcaacaagagcaaaacacaaaggctgctaccaagtgttgttgtatttcagttcctttcataggcctccgaggtggccattgactatttggggtatatatgtcatatttattttatctagagtagctggggcagccattttcaggtgtaaatggcagaggactcttcagcctgtcaagctgccagcttatctacgggttaaaaagtgctgcatccccagggggcc

SEQ ID NO: 104148 - DNA, 544 bp, Homo Sapiens
tcctgtggaattgatggagagttgggctgaaatcttctgtgcaagtgagaagccataaagggaagaaagggtcagacacttccaaatctttggattttcttagttcctcttttgtaagcctccattgttgtgtgtagtcagcagggtcccagaggcagaccaccacggaccatcttggcagtacttgtcagcagcagtgtccagctcccagggactaactcagttagtggtagctcttgttcctagtgacagagccttcctggggctgctccagtagcagccagagctcctaaggagaagcagctctgccagtcttccaagtcccaagctccatctccttcagcaacaacacaggtctccattattctttctgaagataccctttgtcccagttcctactgaatccagcagtgtttttcaatctgtgtgtttcagatgcctgagaagtcaccaaattactgcaagaacaagtgaattaatatttacataaagtatgtatgttaataagctgaataaatgttaatagttactgtacttatactct

SEQ ID NO: 104149 - DNA, 441 bp, Homo Sapiens
cccctttggaattgggccctgtggaattgggggctcacacgttaggcccctgcacctgccgcctcctggtcctgcacttgacagtgactgccccagaattggtaactcctgactcaggtggtgggcggccaagttgattgtgaaggtggcgttgccttctaaagcttggctccaggggcgctgcgcactcccaggaggctggcggcgtgcgtgtttgtgcatgttcagaagagcacgggaaggattgggtttcatcaatcggtgttttcccaggacatgaaggcgtgcttctaagggccggctcagccatgctggccagctcgcctacccaactgcaccacacagccaggagctggagagacaggaccctccttcctccctgtccccttcgtcgggctgtggggcattgccacacttcctctgacaattccacagggggcc

SEQ ID NO: 104150 - DNA, 338 bp, Homo Sapiens
cagagtagagaagggagcttcttgcctgtggtcccctggatgagagagttgcagggacaaagacaccatggagggcccagggctggcatggctagaaggggcgtcatgacacccggagaaagatggaagctccaggtaattctaggtgggcccactggttcaactggcagcaagctaaaattggaaagggatcagtgtgggagatgtcattgatttggagtcagctcctgctaaatctcagtacagtgccctccaacctggagttcattgcccatgcatatgcaagcctctcagacagtcatatccatcagtagcagacccaattccccagggggccc

SEQ ID NO: 104151 - DNA, 433 bp, Homo Sapiens
  misc_feature (278)..(366): n is a, c, g, or t
atcagctcggtaccggccctccgtggattgcccattcccatgtcacagagagaaagcaggaactcagagaggtgaagtgacttggccaagggcacacagcaaagaaggaatcaggtctgagtccaggactctgagctccgactgaggtgctctgtccccaccatcaggctctaacatctgtctcaggaatggcttggactagaacgagctctcaaatgagagggtgggaaggagagctgcctagtagctaagtccccacctccttgcccctccgtgcnnnnnnnnnnnnnnnnnnnnnnnnnnnnnnnnnnnnnnnnnnnnnnnnnnnnnnnnnnnnnnnnnnnnnnnnnnnnnnnnnnnnnnnnnggtcttgatgtcttatggaaaaccagcgtgtaatcaattccacagggggccggtaccgagctcgatt

SEQ ID NO: 104152 - DNA, 388 bp, Homo Sapiens
tgatcgagctcggtaccggccccctggggaattgtctgcccatccgaaggtgtggctggcacaggacagaacatgaacctcctagcctcaatgttccaaacccacactctccaatagccaggctctcagatgggaagcttcaaagccttgtgacagcctggctgaacctctccagcctgggcgctccctccatttcctgccccggaaaacaggcatctcactctggccaccttcacaaagcctgtatggaaagcctcaggcacccgctcctggattcctgtacgattcacaagaaagggcccgtccaaccagtcgtgctgagcaaaccccttattccccgagctctgaattgtcctttgcccaggcaaggacaacatctcagaccctt

SEQ ID NO: 104153 - DNA, 764 bp, Homo Sapiens
tagatgatgcccttcacatgcaaagacaggacaccccaagtcataaggcaagggtacaccaacatagtcgtgaaaccatatccagatcgtgactactcctactctccccgcttatgatcttgaagggagataaagatacaaggaagtcaaagcagtgacaaatataaaatgtagacatcctcagccagccacaccaaactcgctgcacataaagccctaaatggatggaagacacattttcaggttgtttgatctcactcaggcttccccacctccagtttctggacatccttttgtctgcttttggccctgatttttctccaagttatcccacggagcaggactgtcactggtagcctcggcagttgtcagtcaacctgattgctttactccagaaggccctttttacacaaaaggcctcactgaggcagaacgggctcacctttgatttgttcacctctcacatgtaaaagcagctcgtacgcctctcccgagcatggccgcactcgtggaaaactgaaacgcagtatattgggaaacaaggctttttaaagcattctctggaaggcaagatcctagcttgggttctgctcgaagaaagagctaaacagagcgagctggaacagaattagccccgagaacccagcgatggagggagagtggcaataccaatttgctggaagggatctggagagtaaacgaagaggacgcgtggattgcaaagatagaaacattcactgtgcatcattttcagtctcgctgtg

SEQ ID NO: 104154 - DNA, 425 bp, Homo Sapiens
tgatctcctctgactataagaccttaaggcgagacactcccttgtctgcacatgggagagccgctttgtcagacttaatgaaattgcttttaataagacatcagtgaaattatgtctggtttgttgtttgtttgagagcgtaaagggattgttatttattctagaaacagaataagagtctgaaccacatagaatgacacactgaagaggttttgttgtgactaccaactttgttgaggatatgaagtggctctacctagagtactgtttgaaggactgtgggtctgagatgggctctgaagagtgccacgattcgattaggtatctctcccatgggcactggagatgggagaactgctatgtgcaccttcatgcttcccaagcgtgccatagacctatctgaccatagtctttgctgtgggaag

SEQ ID NO: 104155 - DNA, 553 bp, Homo Sapiens
gctcggtacccttccaccagcaagacattcttacactgaaatgagaccactggattactatgaacactggtctaaatctaaggtgatctttgggcttataattcaggaagtatggggcttgtccttaaatttggagccatgaacctttagcttcccagtgcatttctgtatcaccagcaatatactctcaggcctgagcaaggagactgcttccctggaccctcctcaatctttttcagctcagcttttttcaacatgctcctcctcatgggataagaagtcctcagggcccaggagcatgccacagtgtgccctccaccttctaagttccactgtgggtatccagaactctatcaaaagtaagccatcctacaaaagtcaaccaatatgtgcaattctagtccagagggatggctgttcgtggtgagctgtgaacaaataggcagtctggacatgcaggctgtggtatttcccatccacacacatgtgcaatgaggatactcagcacacaagagagggccagggctgcgcagagaagggggctggtcccgaa

SEQ ID NO: 104156 - DNA, 552 bp, Homo Sapiens
acagcagacatgagagggtatctataatttctgtctctaaaatccctgttcctatctctctttttaaaaaaataaatttcattgtgtatgtttatgatatatagcatgatattataagacacacatgcatattaaaatggttactaaaatgtaacagatgaacgtatacatcatctcacatagttaccctctgcccgatgcccttggcaagaactagctataatctactcatttagcaaaattcctgaatataatacaggattattaattatagtttctcaggttgtattttaaatctttccacttgtacgtcttacatatttgctattttttgtgcaatggataatgtacttctaaaatttatatacatttatggggtacaagcgcaattttgttacatgcatcgtggtcaattcaagactttcagggtatccatcacctgaataatgtacagtgtactcattaagtattttttcctcattccctctcctcttagcccattactcgttcaagtttccattgtctatcattccactctctataccaatggtg

SEQ ID NO: 104157 - DNA, 597 bp, Homo Sapiens
  misc_feature (116)..(116): n is a, c, g, or t
ggagctcggtccttccttccagcaagacaacagcaaacctccctatgtctcaccctcttctctgatgatcctctcaccttccggctaggtttgaaattagtctccaggaccagggnctctcccctgtgaatcctgtaccacttggacaggcagtgagctaggtgtctgccctcctcactgccacttcctgccccttcctcctccctagagaaacctgctttccaagtcactcctcaatagccccctagcaacaattccctcttgcctgcaccataaatttcccctttcctggaccattcccaatgcacagaaacatccagtattttccttgggaaaatgacatgttccccgaccccactgcatccttcaactaccacccacttctttgctccacaggaaaaatcactgagatggccataccatctccatcttctttctattctcccctgacttcaatcaggcctctgaccccatccagccaccaagactgctctcgtggaagtgacaactgataacctccacgggtaatctgctcttaacttctgagacccatcaacagtactgggtcccatccccttcctaaagcactctcttccc

SEQ ID NO: 104158 - DNA, 554 bp, Homo Sapiens
  misc_feature (22)..(22): n is a, c, g, or t
cagctcggtaccttctacagcnaagacacaagcaatattcttccaaaaagtacagtcctaattttaaaagtgaggaactcgagcctaggtagacaaaatgtaacaattcttaacagttgtccagaattctttctactctcttactccccttttagtactaataccacaaatgctaagaaaaataacctctagttcatccttcaagttttctggtacttgccaaatcaataaaaataacatgtgaaatgttaatcacaaaccacctactcagacactgaaatgacacaaatacagactaagtagatgaaaaccaatcaggatagtcctcaactattctttcaatatcctttcaagttctatggtaactagatttaccagcaagagttttcttgaggaaaatactaaacacaaagcacatgcttacaattcacctgtaagcacaagttaagaataatggagaaagaacataaaataccttcataactcaaaagagctccttttccagcaactggggaaatagttgtttggggcttttccacataagatataaatca

SEQ ID NO: 104159 - DNA, 815 bp, Homo Sapiens
agctcggtacccttcctaccagcaaagacaggagtttgacatgcaagcgtaatccattcttcaagatcccattatatcattcaataatacctcagcttgtgggctgtatggcacatggaatccccactttatgtccatttgctgtgcccatcattgtacctgttgtccagtgaaatgtgttcctaaaagggcacaggtggctccttgggcagcagttatgtctaaggccacttggttttgcaacaccactttttgatctgatcaacctcattcattaacaggaggagggacactcaggtgtaattcagagcctgagcggtgtgctccgcaagagcagtaaattgtgcttctacagttttgacacctgctccagggatagtcattgccaaagggtagaaacaccagggggctcatcacattcgcaaaaactgagagcacagtgcctcccagttatacaggcatctgggcaatgtggggagaacagtagcaggtacataaggccacccccagataaaacatccactccagtttgctgataggaaaggctactgtgtcctcatagacccataagctcccaagaggcaaaaagtccactagggttccgaccttggtgaggccacttgttccacaataccttcagtgtggtgacacatgtaatgtattgcacaggccgtgacaggtacacatcctgttacaccaatgttgctctgtgcactgcaatgcctgagcattgggctaaatacatgttcccctaactagccagccccacgtcatcacgaatgctacggtccagccatgggtctatgactgggaag

SEQ ID NO: 104160 - DNA, 455 bp, Homo Sapiens
agggaccaatgcctgtggtgtgaacaatggtggctgcacccacctctgctttgccagagcctcggacttcgtatgtgcctgtcctgacgaacctgatagccagccctgctcccttgtgcctggcctggtaccaccagctcctagggctactggcatgagtgaaaagagcccagtgctacccaacacaccacctaccaccttgtattcttcaaccacccggacccgcacgtctctggaggaggtggaaggaagatgctctgaaagggatgccaggctgggcctctgtgcacgttccaatgacgctgttcctgctgctccaggggaaggacatcatatcagctacgccattggtggactcctcagtattctgctgattttggtggtgattgcagctttgatgctgtacaggtaactagtctgctgtgaagtcttgctggtgggaaggaccgagctga

SEQ ID NO: 104161 - DNA, 168 bp, Homo Sapiens
tggagtcggtaccttccaccagcaaagactaaaggacactgaaattccactgccactcgtttcctagttccaggtagaactaggaagtgccagtcaccagtttctagtttggagggaacaattcactcctgggagtagagggagaggaaaggaggagtgactcaccag

SEQ ID NO: 104162 - DNA, 310 bp, Homo Sapiens
catactcagaagtacaagacagttggagatagcgcccacatctgatcatgtacaaaacaaagtaagtttatggcttctccaaaataagcacaagcatacagagtttatccttcaaaacaggggtatttggacatttttaaattaaaattacagattggaagggatctagtacactacacctgggacaaatacttttttgtgaagtcagtaaagcctttgcgtgcaatatagcatctctatgcaatgcagcgactcctcgtctatcgctacagtaagaaaacagccacaggtcaggttttgtggctcacac

SEQ ID NO: 104163 - DNA, 449 bp, Homo Sapiens
  misc_feature (145)..(146): n is a, c, g, or t
  misc_feature (170)..(170): n is a, c, g, or t
ttccaccagcaaagacctccgaaacgaaaccagagatactgaatgatttgcctgggatgactccgctaccacttggcacagccacggtgcaaacccagttgggctggcactgaacacccagaactgtagaaatcccctcttgccnntgactcaagacgcctctgtctatnttcggaagcaatcaacttaaggtgctggcagctgataaagacttgatctctaacttctctcagatatctacatctaacttagtttgggacaagggatagcttgctggggtcagcaaactatggcttgtgggccaaattgggtctattgcctgatttttacaaataatttattgaagtgaaattcatataacattaaccatcctaaagccagcaattcagtggcacttagtacattaccagtgtacccctctatctagttccaggcacttccaacactcc

SEQ ID NO: 104164 - DNA, 451 bp, Homo Sapiens
  misc_feature (276)..(276): n is a, c, g, or t
  misc_feature (337)..(337): n is a, c, g, or t
  misc_feature (353)..(353): n is a, c, g, or t
  misc_feature (383)..(383): n is a, c, g, or t
cttccaccagcaaagacagtcattctggagaagtggcatttcaggagggacctgaagtgtaagtaggagtccagcgggcagcggagagaagggggtgacagcagaatgttcctggtgggggagtacacgctgcatggaagccagtctgagagcagggcaggccaggtgctgccacagtcaccagcgaccacgcattctaggtggctggaagcggcacggcattgtttctaacttgtgctgtgtgtccaccattgggccagtcgggggaacgggagntgtgccaagcggttggcacgggttctcaggggctcccacgtcgcggtgccacgtggtcacnttcagcatgacatcangctcgttgcattggcctgtgtgcttgccanggagcccggagggaagagacctggaaatgacacaaatgatgaccccagcaagtctgggtgtgtgtgtg

SEQ ID NO: 104165 - DNA, 498 bp, Homo Sapiens
ttcccagcaaagacagataagtaacttaatgctctagagctattggttctcaatatccttcattagctgatgaatcagctgtgacatgctgttaaaatacagattcggatttagcaggtataggttaagtcctgagcatgcaagtctagtaagcacccaggcaataacatttctgctggtctggggaccacactttgagtaacgaatcataagaaaaccttcaaattggacttgccccaagagttagaaaataggttcaagtaattttaaatccctttctttctatagccctgaatttagctttgaaatggttatttaaaagaaacagagaggggaaaaaagggaaaacgtaattgtggggaaatactttgactcacatgggtatggaatggctcacagtatttactgactgaatgaaaacttgctaatcattggtcactacaaatttgagtaaattaatcactattttcctcatttccatttaaagaacaaacaaag

SEQ ID NO: 104166 - DNA, 617 bp, Homo Sapiens
  misc_feature (577)..(577): n is a, c, g, or t
tatcagctcgtaccttccaccagcaagacagagcctgatggacaaacttgggacaaattcccgctggttctcttgcctagcagagaactgccaaggtggcatctccttcctgcctggtctgggtagaaaaccctaagctgaacccagagcagggctagaaccacagaaacatcccttattgcatctagggcaccgacagggggacagggagagtagagaatctgctcttggccaaaacttatattcttagaaacatggggtccccagcccctaagagcaaagtcttcaactcccagtgggctttcttcagcctcttggcacttgccaatcccactccaaggactacagggccaaacccagcacccacacagcacactaagaatacctccaccgaccactttccagacctcagggagtgggactcacccacgacctcagagggctcgctccagcccaggcttgtgggtggctgcgccctcaggggagggaaggctctccttccccttgtactgatcagaggccaacgtcctcataaagtcacagtggcatggtaaggccagagtgttctccctggggngctgtcctgactccacagcagggatatcttccacatttct

SEQ ID NO: 104167 - DNA, 701 bp, Homo Sapiens
ttcccaccagcaagaccacgatagctgaaggctatgctattgaacactgtaactcaacttttacgtgctaccttatagatacatttataagtcaccataacaaccacttatttttcaggaacttggggcagatcctgtcctgttcaaaccagttgagactgccaacccttcaactgggcctgtacacatgcccaagaggtggccttttgacatcagagggccaaaaactccaccctcagatcatgttaacgccaccattttctgcacatatgtcatatgaaccccaattatgactgcatttttccccactgccaatcacctttccccatgcctcagaccaccctacttctctaacctataaatctctctaagcctcatctttggggaggtgaatttgagagccattctcccatctcctcactggacagccttgtgaataattcttctctcttttgcaaaacccatgtcacagtgattgatttactgtgtgagaacagaacaaacctgggcctggctcagtaacaactgcaaaccagttgtcagacgtatcgtttgctcagcactgaaaccacatgtggaaacagcacctgcacttggaatcactagttaattaagtttacaattaatccaattgtcattctccaagatccatctgtcttctgcacaggctgagtaggtgagctaagtggagatgtgttccc

SEQ ID NO: 104168 - DNA, 435 bp, Homo Sapiens
ttcccacctgcttcaggatgtgctccagtaagtctctccctctctgctgcaacctgttactcccctccactgggtcatcttcacacagcctgcgatctctcccatcttttacaaacctttttggaaccctctaacctccaatttctttccccccattcaaagcaaagtccctcaaaagagctgttcccatttaacatctaccattctcatttgaacccattcgaaacaggtttgcgtccccacaactcctccactgaaacagctctagtcaaggccactggtggcctccatgtagctaagtacaaaggtcaagtctcttcatctttgcacttgactagccgcatcatcttggacaccttctccatgtggcttccagggctccacatcccttggttttcctcctagtgctctagcctctcctgaggcctcgatcca

SEQ ID NO: 104169 - DNA, 748 bp, Homo Sapiens
tacaccagcaaagaccgagagaggcaggcagacccataggggctcctccgcaaagatgtatttgaaattgagggcttggttggcctgggagaaccatactttggcctgctctgagttacacaagaaatgtgaacaccctcgaaatagcccagccctcatggctgagggggtgttttcagagattttcagcagggaggactccttttattgttctcactctcgcctcatgacttgtgttgaaggatttttgtctgctagacaaattgaattcattaaatgactaattaactttgctggcttgtgttttattagttgggcctacagacctggtaatccgaagctgctgatggcagaagataaccgctgcttccacatggagatgatttaattgcatcccaagcagagaaatgtgatgttacggtgaatctgagcagccttgttatttattttacccaatggagtttattggagtatgtgtgaacaaagcacagcccctgccctccaggagagttgagtcttggaggagatacagacaaggaaacagccaatcacaatacagcattacataccaggcaagcacagggttccggggtcacagccttgggaggtgggctagatgttctccttctgtccctccagacgcactctgcacctgcacccaccctgctgcatgccccaggctcactcgaaggactgtgccaaccgccctcctctgccctgtctcttccagttgagtctttgctgggaa

SEQ ID NO: 104170 - DNA, 570 bp, Homo Sapiens
ttcccggcaagacgaaggggggcctgggctccccctagggcaggcgcctctgattctctccaccgagaggcacctcccatgccggcctcttcctggggtgactcccagaaccttcttggacccatgaacatttcaatctggggtggggccttccctgggcatccaagtgatgggaatctgtccctagcccctagaactcctggagggctgggcccacctctgtctgcatcccgtccccattccccgccccgggtggcaggggctggagaggaaggagcttcaggcttgaaaaccatcaaagcaggtttcttccgagatggccagtggtcacctgagatggagcagagagcacctgtggcgggcatcttctctagaagccgcctgtgagccctacggaggccctgggcttcgtgccgtaagacagacggtgtcctgcaggtacgtgggggaaccctgtaggcagggactttgcctgctttctcagaacaggacagaggagtttggctggggcagcccgaggtgaccgggatgctgtcgccccagctctgggtcttgctggtgaaaggtacc

SEQ ID NO: 104171 - DNA, 459 bp, Homo Sapiens
ttcccagcaaagacccagccagctcctgatcagtcatccactattcagctacatccagcaacctcaccagcagtctcgccaacaacctccccagcagtctccctagtggtttctccagcagcctccccagaaatctctccagaagtttgtcccgcagcttctacagttgtctctccagcagtcttctcagtggtctctccagcttcctcagcagtcctcccagcagtctccttagaagtcccgttgacggcttcagtgacatccccaaaagcctctcccgtaacttccccagcagctgcctttccaacagcctccccagcaaataaggatgtcagcagctttctagaaaccactgctgacgtggaagagatcactggagaaggactcactgcttctggtagtggtgatgtcatgaggagacgtattgctaccccagaagaagttcgtcttcccctccaa

SEQ ID NO: 104172 - DNA, 446 bp, Homo Sapiens
atgagccaccatgcctggcctccattaaatctcatctacactttaagtgtatgggataccaagatgtgaaagacatggactgtaccttgaagaggcttgtagtctgttacacagggaactcagcagagtctgattgtgggcggttccctgacacatgaagtaaagaactatgagaccaggacagaatggtgaagctcatgctgcttgcctagttaagagtcaagccatcattcccctcatatactaagtgacttgtttttaattcatagtactttttgtttcactttataatattgtggtctttcccagttgctggtctggtgaagtgggctctgggcacctggctgtctggcttacccctcttcatacactccatgtctagcacatgtttcaggcacgtttcaggtgaggtttcttggaggggacatctgagctggacctggaaa

SEQ ID NO: 104173 - DNA, 251 bp, Homo Sapiens
ataactaactaccctgacctcagtggctccaaataacaacttgttaatatttctcacagttctgtaggttgactgggctcagatgagcagtggttagtaatctgaaggctttgttgctgacctgtctggtgagcggaccgggcaggctgggtcggttgggtgctaatcaagcaactctctccaagtggcccctctacctgggtagcttgggcttcctcatagcatggagtctcagggtggccagtcttgtt

SEQ ID NO: 104174 - DNA, 348 bp, Homo Sapiens
caagtctacataaggccgggttcccttgtttccaaggcccgcctatcgtgttagcactgactgagctcctccctggtgggcccctagaagctgttgtacttatcaagtattcttcagccctctattcttttacctactcaggaaattgccctcttattatcaagaagacctcatcaaacaagtttcttatctgactcctctctaacgagaaacccataaacctccagacaggcaccaccggacaggcagcctggtgtggggacctgggagtcccagacagaggttttcagtcctagctctaccacttgctagcaggagaagtttgctatcctcctccggatctccgat

SEQ ID NO: 104175 - DNA, 282 bp, Homo Sapiens
attcaccgtgtaatacgggggctcctgtcgcgggaaggaaacaggcagttgtctttgcctgcatggagtaaagtctagcagtgggttccagcatggcaaaccacctttcctgttcttttccttctcagggtcccctcctaaccgcaagcgtcctgctaacgagaaggcaactgatgactatcattatgagaagttcaagaaaatgaataggcggtactgagttgtgcacagtgggatgtaaatatcgccttcctctccctatatccctccgatcccctcagg

SEQ ID NO: 104176 - DNA, 473 bp, Homo Sapiens
tggtatcatccactgctgagtgtatagctggtatagatattttacatgcctgaactgttgacggatcataagctccagagcagattatgctcactgcgaatagcccatgtagaaaggcattagtaggtttggggccccacaatccttatgacctgtttgagtacaagtctgtgcacagatgactttcctgactagaccatctggcaagaggaacaacctcttcaggtgactcttgggtttggattcaatgcctccctgacgtagctactaggtatgcctcttttgaaaagattcccatttgggaatgagtcaactcaaatgcaatgactaataaggtgggaaaggcccaacaagcctctgtcaccacatggaactggtaatattcaagaatgcagccagtctggcccctagggcatctcagctttacatgaaaaagtagcagcttctccctttgagacagtctgatcttacat

SEQ ID NO: 104177 - DNA, 327 bp, Homo Sapiens
caacatctgatcccagaggaccccacgaaatgtaagtggacaggaggtagatacccatttcctacttggggcttggcataagataccaaaaattaaccaaaacgttttatttcctagcatgcaaatcaagaggttccaatcttcgtgttcactttaaggtatgcgattcatagttgtgatccaacagttcctcatgttccactcaaaaataggtatgctgcagtgatgactttcttaggacacctttggatttaccgtgaaaatgaataaattctgagctagccaccttatatttaggcattgatgatctggtcaatgtccgtccga

SEQ ID NO: 104178 - DNA, 296 bp, Homo Sapiens
cgagcacagttgacccagactggcaccagagccaccaggctggtgcgttcacatcccaccctcccgtgggacccattctgtttcctaaaaccttttaaggcatggtcgtggtgaccacattgctctgggtggtctttttcgtactctgtggcccttgcagtctggagacacaccctgacgtgcctcagatcccccctccaggcacacagctcccgccctccatcctgagccgcgccagccagggtgacctctgcagggactgcccagttgttttttaatctctttttgttctattt

SEQ ID NO: 104179 - DNA, 300 bp, Homo Sapiens
gcattctgattgatagagaaaaagacatcagttttcaaagtattttcccttcttctggttggctcctctcctgtagcttctagaacatgtagcgttaggtgtgtttggcagatgtcagctttacgagggcagagaatctgtctgttttgtttgcttcggtattcccagggcctagaatggtgtctggtttataggtactctaataaatatttgatgaatgagcgaatgaatgaatgaggcgcgtgggccccgatgaatgatttattaaaggtacacatctggtcaactgttccgctccgc

SEQ ID NO: 104180 - DNA, 437 bp, Homo Sapiens
  misc_feature (47)..(165): n is a, c, g, or t
agcatcctgagatagctggaattataggtgtgcacaccacaactagnnnnnnnnnnnnnnnnnnnnnnnnnnnnnnnnnnnnnnnnnnnnnnnnnnnnnnnnnnnnnnnnnnnnnnnnnnnnnnnnnnnnnnnnnnnnnnnnnnnnnnnnnnnnnnnnnnnnnnntacctgcctaaatggtaagtttcctaagatcttataacaagtcagtgatacctgggtctggaactgagaccagtgaatttctaattaaggatcccttttgtgctatgccacacttctgacttctacttatagatagcattttttccccattatccttagtctagtgtcattgtcttcaaatccaggaaaatgacttgttctgtaggagcagctagataaggcatcccagtacgaaagtctctaaaaatgaggacccttgtctggaggtcatg

SEQ ID NO: 104181 - DNA, 569 bp, Homo Sapiens
cagagaaaataaagccaacctccatggataccatgacgtccgttccccaatctcttccattagggcctgtgtccttatttcttgagcctttttccccttaatacagaacccaggcctcatgtcagaggcactttttcaaccacagggcattcaggcattgccagcacgtagaaaccctcaggctaagaaggggtgttgataaaatcaaaccttccagcaaacaccagtaagaagccacagcaatgtagtcatcactgtcccctgagtgctagtctcctctgcgtgtgtccagctaggattcaaacaagactggattaaggaggtgtctccaagtctcagctctttggcctggacagtaattcttaatatttttggagccactgcctctttgagagtctaatgaacactgggaacccttccccgagaaaacaaatggacacattcgaatattgcctaaaaattcagactgctcatcacccaggttagtactgacttggcctaagtccagggagagcttacacttaatgttggaaagatctaaggtaatgtgagagctgttctgtcacagt

SEQ ID NO: 104182 - DNA, 515 bp, Homo Sapiens
acagttgacccagacaactccagaggctagcagaggaaagcaggtaccatcaggtgagtacctcttctttcccatatttcatctcattgaaacctcacaacaaccgatgcaggaggcattatccccattctggaaggtgagaaaatgaaaactcagataatttcaaataatttttgtgagtttgcgaagttaacagatgtcataactgggatttgaaaccaaatgggtttaattccaccaaatgggtataattccaaagcccatgattcttccatgctagcacaatgcaggttttcctgggtgggggtaaaggatcaccttttccacaccccttccagaatctgcatactcatttcttaagtaacgccctggacacatctgagagcttttgctcccctgaccctcatgatgaactggtgtagttctctcctgaaagggtggcggtgaaacaggaaacacagagaatcaggcaggcaaataccagctctggcagcagaaatggaaatctctttctc

SEQ ID NO: 104183 - DNA, 714 bp, Homo Sapiens
acaggcctgcaccctgagacctcatcagctgccagatcccagtacaagccgaccgtctttgatttcccatctcaagatgtgttcaccgtgaagacacagattagacactgctctcgggcggtacttctgctcaatcacaatgcacaggctgacggacaagcagcggaagcacctgagcatgaagaagacagctctggtggtcagtgcctccctctccagcagccacttctccacagagcaggtgggggccgaggtgcccctcagcccaggtctcttcgccgaccaggctgaaatccttttgagcaaccactacaccagttccgagatcagggtctttggtgccccggaggttctggagaacttggaggtgaaatccgggtccccagccgtgctggcattcgcaaaggagaagtcttttgggtggcccagcttcatcacatacacggtcggcgtctcggaccccgcggctggcagccaagggcctctgtccactaccctgaccttctccagccccgtgaccaaccaagccattgccatcccagtgacagtggcttttgtgatggatcgccgtgggcccggtccttatggagccagcctcttccagcacttcctggattcctaccaggtcatgttcttcacgctcttcgccctgttggctgggacagcggtcatgtatagcctaccacactgtctgcacgacagcccaaaacggta

SEQ ID NO: 104184 - DNA, 214 bp, Homo Sapiens
aacttgatccagatatgggacgagtgcatggaggactgcaacagaggacgtgggggactgaagattggacatgaagatgtaggtattcccaggtcattcctacactgaatgccttctatccctaagtgttgtatagggatagaaaatgggtatgtatctacccctcaaaattcacccttaagattctgacccaaaacttttacatccaaaatag

SEQ ID NO: 104185 - DNA, 469 bp, Homo Sapiens
tcgacagcacattgacagaccaataacaatgtcagtattacccacaacaaagacaaatatcatcaacatagaacaataagagatattgataccctatgagcttgttacatctctgtcattatacacatggagatcaaaatccaaacaccaggaggccctcgggtaaaagagtgctggctgcctacccaacattctcccctaatgtcttagagtcagaacccctttgttattagggatagtcacgtacccagcaaataagccacatctcccagcctccattccaggtaggggtgggtggttagtgagatggaagcagaagtcattgggtggagcttttgggaaagctctttaaaagcgccctttgctcttctcccctttcctccattttcccttccctaaacacaaaataggcagctagagctccagtaaccatcttgtagcaaacctaacattggaagccacttgtcaa

SEQ ID NO: 104186 - DNA, 198 bp, Homo Sapiens
ggggccctctgcccccaggcccagccatgagtccactcagtgcctgggaataggccctgcgcagcaatctctgtcctctggctttgcctctgcctctcctccatgtctgacctggcatatgctgttctagcttagatgtcatccccctggaagtcttttctgattgccctccaggctccactgtcatcatctatccgt

SEQ ID NO: 104187 - DNA, 242 bp, Homo Sapiens
tctctgacccagagggaaataaatagaaagtagtgtgtgcttgtagcgaaggaggcatttaggttgggggttggattgcatggcatgcaagataagggttcccagtggccagtggcatttcaccctcatgttccccagtggaatttaagtgagaaatattctggcatttttcgtttgtttgtttaatatttctgaggaatctgtttattctgcacagattgcttttgttctttattttaaaa

SEQ ID NO: 104188 - DNA, 338 bp, Homo Sapiens
aaccggacacattgacccagaagggtgagcaggcctacaggtgctgggcaggcactgtcttgcaaagagcacaaaatgtgcaggtccctctggagagtgttatagtgggtagctagtcagaaagagcagggcaggagagggctccccataccccacacaccaggagtgtcaggtgaccatcaggtgatggtctggcggttgttgactgtctttctaaagtaataattggtcacacccggcaacagggaaaagccggctcctaatagatagaaaacactcgaaactggtgagcagtagtttccctataagatctcaggagttgagccagtgggctcaga

SEQ ID NO: 104189 - DNA, 181 bp, Homo Sapiens
acggtacattgaccagatgtagtcagtatctatggatcttttctctagggtagtcagatcttactcacctaaacctggctgccagtgctctggggctggggttgcacgagattgtgcagactttcatttaagatatcttcctattttcagtttcgtgcctcattcctttcgttctctgggt

SEQ ID NO: 104190 - DNA, 152 bp, Homo Sapiens
tgctgatgaaagtttacataaagaacaggcagcaaatgcgcaatgtatgaatacctggtctagagcagccagacctggtttgcaaacctagctgtgccacttagcagctggtgacatggagccagttactcagccattctaagccacaagcc

SEQ ID NO: 104191 - DNA, 267 bp, Homo Sapiens
tgaccagaaaatcagacacgcagaggacactgtccccaaactgcagaatgccatgaacttagttaggactttattccaaaggtcatagacaggctttgggtcagaggtacatggtccatgctgtgcttacaaaagtttcctctagcagtgtcttagtacattttctgttactgatagcagaatacctgaaactgggtaatttataaagaaaaggaatgtatttcatacatctgtggaggccgagaagtccaaggccaaggggctgca

SEQ ID NO: 104192 - DNA, 146 bp, Homo Sapiens
agctcaagctgagatgcgttccctctaagcccccatactgtggttgagttacattgttattctttgatgataagatctggggaatttccgtgtgctggtggacaggaaaccagcctctagagttgtctgggtcaatgtaccggtaa

SEQ ID NO: 104193 - DNA, 381 bp, Homo Sapiens
acatctgacccagaaaaggaacctactctccatgcacgtctctctggagcaatctgaagacaggatcttggcctcaggacagccatggccacaggagagcacacccctgatgaccctctgctcagaggcaaaaggaggcaagacctccaagagatgctgagagaagtgggcctggatgttgagtactggttacccaagctgcaggaacacctgggtgtgacctgtgcccaggccttacaacacctagacaaaaacaacctcatagaagctgtaatcccagacacaacatccatgggagaaagctgcttaatctgtcacactcaaaaagtctttcagcgttacaggagtctcagcctctggagttggtctgggtcaatgtga

SEQ ID NO: 104194 - DNA, 249 bp, Homo Sapiens
cggaccggcacattgaccagatactttccggtgttaaaggagactgaagatccccgcctgcggattcctgtgaaggtgtactggtaagttccatcttctcgtgtgatttttccgttgctagccgagcagcttctttaaattcctgaaacttttctgcaaatttcgaaagatgatgctcagaggagaatcccaatccataagcggtgtttgcccggctatcagcccactggccaaacttctgagatgttg

SEQ ID NO: 104195 - DNA, 447 bp, Homo Sapiens
catggaactatgagaaatgaattcatatgagttttcatagatgttgcaattctttcttcctaaaattactatgatttacatgtatggacgcagtaaatgcaaatgatttccaatcaccacgggtacgtgtactcaattacaaagtctcttaatgagcattgaaaagatttcagcattcactgaacaagacataaagcaaatgaactcttcagtgccctccccttcccacagagggctgaaagggactcactcttgttacaaagaacacggacactcctccctctcttcctcttcccagtccatccctcaccccagtttcagccaccatccaaaaagaaatcgcagcatggcccttgaagcacattgagcttaaaagtgcctagaagataaagcctaaactgcagcacgacaggcaagacctttcaaaatctggcctcgaccatcctc

SEQ ID NO: 104196 - DNA, 353 bp, Homo Sapiens
gtcccggcaacatgctgacccagagttgcctgacttataggtatgagtgatctgatagaaagtgcccacacaaacatataatgatcattttgtgtttactcaaaccttgttaatgatgcctactcctgtgctcaataaaggacaccaccttccacgttgttgctcacaccaaaatgccgcatacaaacttgatccctcctttatctttcctcgcccatctcgtaatatccattgtttctaatcgattcacacattttgttgagtgtacgttccaataatatagtccccactttcatacctgttaccgtctatgttcgacagccctctggagttgtctgggtcaactgttgctc

SEQ ID NO: 104197 - DNA, 258 bp, Homo Sapiens
  misc_feature (126)..(169): n is a, c, g, or t
gacaattacatcttcagtgtggaatgttaaacatacctttcctgaaagaaaaagaccgcctcaactaatcagaacattgtgactaagcatcaagacatacataggtgtctgggcatggcggctcannnnnnnnnnnnnnnnnnnnnnnnnnnnnnnnnnnnnnnnnnnnttgaggccaggagctcaagacctgcctggcccacatgccaaaccccatctttactcaaaatacaaaatatctggtcaactgtgccgtcc

SEQ ID NO: 104198 - DNA, 187 bp, Homo Sapiens
cagagcccatctaggtcatcatctccacaacccaaagtgaaggcaataatatcaccagacaagaagccattctggctcctcttctccagtcctagtagggtgacgtcgagaacaactccacggcgaagcagatcagtatctccctgctccgatgtggatccagattgttgccagatatatctttgct

SEQ ID NO: 104199 - DNA, 317 bp, Homo Sapiens
ggcacgttgacaagacaactctagaggctgccatacactgctgtgcacctgtttcctaacaggccatggactgtactggtttgtgggggtgggtgacccctggcgtctaaagaatgtagtcccaaatatgtataagatagggtatgactggatttcagatatttcattaaaagtaacttttccatttggtacaagactaaaaaaccaaaatggatcgctaatggttctcctgggcagccttttctgcatcccctctgcttctcaatcccatcttcccttaggcattcccagcttggagcagtgggaagagattcttc

SEQ ID NO: 104200 - DNA, 494 bp, Homo Sapiens
acccagaacacgtgggatgcaagtaatcagagtagggaaactagttagaatataattatgtgctccgcacttgggcttctctttgctcgtgctaaggacgtgctctcctatccgctgcctactacctctccctactctcctctgcaaaaagacacaagtaaaactgaggtggaggagcttggtgtactctaagtaatcattgcagtaatagatcactgcgtgactaaacgtacacccagtaggctgctgcatcgtttgtgtctctgggtcaaatacacgttgagagaagtctcatttattgttcctcgaatttgtgcaaacctgaacatatgtctatctctaagtttatgccacccctatttacttgcttttggtcctgtttcctttcttcatataacactctttatcctgtaagaggacagtttccttcgctgcagtgggaccacagactatagagaattaggacctggaaacagaatgtgcagttatagggg

SEQ ID NO: 104201 - DNA, 137 bp, Homo Sapiens
tcaaaagaaatgaacatagatattcaggaatcaacggagagatctccaacacatgagcatcgtcggataggctggaaaaaggcaagctgcaagggaactttaaaaacagacacaaagcaaaacgcggtagctcacac

SEQ ID NO: 104202 - DNA, 164 bp, Homo Sapiens
ctggggcctctaaatgtctccatcacccataaagccaagtgattttcaaaagattagccctgataataatacataaataagaccgatctccaaccaaagggaaagcaagattctacaagcaaaaataataaaagatgcagtcagccaggtgcagtgacacactg

SEQ ID NO: 104203 - DNA, 445 bp, Homo Sapiens
cgctgtggtcgtctctagcacggatccccggctttcgccatgttccccagtagtggcttcctgcacgtctacagggttgcccaacccattagttttggtcagttcatctctgttatgactgccctctcttacctctcttttggagaaccaatgatttatattctaggcattttagatcacagtaatagtttcagctagcttgtttacagttcattcccagtgctcaccacatgtgccaccatcctaagtgctttaggatcacctgtgtctttatgtactactaagtcatttgatgctcattacaacaatctttcttcttctatggaagagcacagaggaatccatagtcttagtttttcaagagttgattctgacagttcatggaaagaattaaccgattccactttgtgggttagactgatatttcataatgtgtggaacaact

SEQ ID NO: 104204 - DNA, 365 bp, Homo Sapiens
agattgacgcagtctagaggcccttccaatagccacatgtacctccagatactatgtggctggctgcctctgcctttttgggcaatctcagttccaaatattctatcatgttgtcatgccagcttttggcttgggaaatatggtcagtatgtctgtggggaaactgattctgtgtgccggccgcagaggaaggactctgggctggaggaaaggggtagggctcagcgccagtgctaggactggttgaactgtagggtgcagccctggctagtgaccacaccccatgtccagctgttgctcacagctgtccccaccaccaccctgtgcagcaggggttaacagacctcactttgtggggggaaaac

SEQ ID NO: 104205 - DNA, 395 bp, Homo Sapiens
ttgctttgagtttgatggtattcctttccatgtggctaggaaaagtgagaccatgccttgtcatcttacaccaaagcccttgaataagaacagctcagattaagctagtctgatatattcttaagacctgaccatttggatcttgacctccatctgcagcacataataagtcttttcccagtttctaccttgaacagcctttattttagtttcataatttctgtacccaggacttcaccatttccctgtatttccattgttgcatattgaggttatgcagtctgaagctcctctgaactgtttttcagaatgcctttccttctgcttcggaccatcagagcttcctagtttcctctattcccttctctacttcacatttcttttgttccccttcc

SEQ ID NO: 104206 - DNA, 283 bp, Homo Sapiens
cttccttgtcattcagatcatcaaccacttacgtccgtgccttatattttgtatatccctgttcaccagttacagggttagttaacttacgaaattcttaacatctgctattagatctttttaaagtttcaccctcaaccacctattatttagaagtgaacacagaaatttagtttccttgtgctatcccctgacccctaaaatatgctgggagttttgggatttttttcaaagtcaaatgcatggcataaagcaaaattacactactaaagaactgagtcag

SEQ ID NO: 104207 - DNA, 186 bp, Homo Sapiens
attccctaggcatctagacacagcagtatccacgtgggggctgaggtttctctgaccatggctccctgtttgctgagtttccaagtctgttgcccactgtgggagccgctgtgggaccaggggccaggtgacgcgacggatcatcggaacggatgaatgatgcgttgacaccacgcacttgatctc

SEQ ID NO: 104208 - DNA, 247 bp, Homo Sapiens
atgtgagtccgctctgttgccaggcccattccactatttttgtaatgttattggccttttctttttgtctctcttcagtttccctaatcccacttgggggaatgaggcgggggaagaattgttatttttatttctatactgattatgatactatactgtcttcaaggtaaaaaattctctaggacttcctacgttttgggttttttacatagtttctgagaaaaatactaaaaacatacttagctga

SEQ ID NO: 104209 - DNA, 329 bp, Homo Sapiens
tcagatattcgttgtggaagccaaaatcaaattgcacagctcaatatttttgtttaatcactagacacagcatcccactgaagtagaggattgtgggaaaatagtaaaagtgaggagtgaatatggggaagaaattctgtaatccactggatgttttctaggttactctggctttttcttaatttgcatactgtttggttactccaaacaaacctataacatttcaatctatcctgcaagcttcaggaaaattaaatgaaaagacacaatggaaagacttaaaccataccaatctattagagcaaattaaggagatttgttgcttggaa

SEQ ID NO: 104210 - DNA, 313 bp, Homo Sapiens
gaggtagagacacaaggtactgattctaggtcctctgccacaaagcaccactgcctcgccactttgccttggctggccttgtcagctcactggagagcacagtattgcaatggcagtatcgcaaatggtcactactaactgaattctctaagagcttgataagccctcgagaatcttcctggcccgttctctaatagtgtctgaaggaatgcctggcaatttaacaaatagtagcatgtagtgaatcactgtcgtcctaaacagtgacacatcagaaggatttcaaataacagtcttcaggcatgctcataca

SEQ ID NO: 104211 - DNA, 350 bp, Homo Sapiens
catggtcacacatgtcaagcaggagccccgggagcgggagaacagcgagtccaaagaggaggatgtagagatagacatcgaactagctcctggggatcagaccagcacgcccaaaaccaaagaactttcagaaaaggacattggaaaccagctgcacatgctaaccaacaggcacgacaagtttctggacactctccgagaggtgaacgactggagcgcgtgctcagcgctttctgttcagctgtgccacatttccacgacgctggcagagaagacgtgggtccagcttttccccagattgtggaagatcctctctgacagacagcagcatgcactcgcgggtgagataa

SEQ ID NO: 104212 - DNA, 432 bp, Homo Sapiens
  misc_feature (393)..(393): n is a, c, g, or t
ccaatgggtgcattacagcaaggtttaccttccccggcggccattccaagagactggcctcttgtggtaatagattttaaggattgtttctttattataccattacacgagaagcataagcctcaatttgccttctctatgccttctattaatcatagagaacctgtttcttgctatcaatgacaagttttacttgaaggcatgcttaacagtcctacattatgtcaccattttgtaggaagagcattaaaggagtctcaaaatatgtttcccactgcgatatcattcattttatggatgatattcttctggccactcctacagatcaaattacatcaataactcagagatgtaaagcaagatcttgttaaaccggaatcccaaaattgctcntcagagaaagtgcaaataacttccccatgctcacacacc

SEQ ID NO: 104213 - DNA, 434 bp, Homo Sapiens
  misc_feature (377)..(377): n is a, c, g, or t
  misc_feature (414)..(414): n is a, c, g, or t
tttgagctgtcgtgatggggagatcactgaccaggagcaggagactattccgactcatttttggtcattgtctcacgaattacagaagccccctttcgatcatgttttgaagccccttgtcctatcactaagataaatgaatgctggtgtttctaggtagcttctagctttatgttgctttgggtagtgtagtgattatttttatgtataagttcttaaatgctagagctctcttgtgagcatgatcaaggaatgtgctttcgccttaacaagttctatgttggagatgcaggttggaggttgatcctgaacaccttaagtggatgctttttcattctggaaggagaactgtctggaaataaaattccttatatctnatggtatttcttaaatgctgtttcaactaatggcatntggagcacgacagcccaaaa

SEQ ID NO: 104214 - DNA, 395 bp, Homo Sapiens
tacccacatccaggcatagtcacactaatacacaagtgcatacactatcatgtacaaacaggcatgcagtcacaatgtgcaaatgcgtgcagacacactaacatgtaagacatgcatagtatgtgcacacagacatgcacactaacgtacgtggacgtgcacacaggcaggtacacgtccaccggcacggtccgctgacaggcacatagcgagcacgcacacaaacagacatccgcaaagtgggactgcccggcgaacgtcacagtaaagcacgcacatggcagagccacagctgacccagaaagagatcaaggccgaccgaccaatattcgcagggcattaccagccagcccgagaactgaggcacaaagagacaagccagcccagacgcacgc

SEQ ID NO: 104215 - DNA, 296 bp, Homo Sapiens
tagctggtaccccacaactgtggccactggttctatggcaacaccctcctctagcacacagaccagtggtactcccccatcactgaccaccacggccactacgatcacggccaccggctccaccaccaacccctcctcaactccagggacaacacccatccccccagtgctgaccagcatggccaccacacccgcagccaccagctccaaagccacttcctcctccagtccaaggactgcaaccacccttccagtgctgacaagcacagccacaatccacagctacctcacccgta

SEQ ID NO: 104216 - DNA, 442 bp, Homo Sapiens
gccggccctctggcacagggcgtctgctgacagtggagagcagtggtgggggaaggggcttgaggaaggtggcacccagaggggtggagaggagatgtctgactgagggccatctgaggtcacggtgcatcctgaggacagagctgagattggatatcaacgatgtgggctcagcagccctggagtaggagctgggaaggtcagtgccttggtggcggcagggccagggcactgagagtattggcagggcacagcaggggaaagggaagagaagcagagcgtgggactgtccctctgtgctggaagagggctaacaccagccccgactctccgctctggctaggccgagggggccctctgtcctctgtgttgccctagggctcggtgacctctgtcatagcactgaccacatgctatcctgcctatgccagaggccgaccgc

SEQ ID NO: 104217 - DNA, 423 bp, Homo Sapiens
gcagggatcttgtgccaggggtctccattgaggccggtgatcagaaagtccaggttgcccaggatcttggtgcagttcacaaatccatcaatgttgctcgagtccacagtctggaagcggctcccagagcctgttccctcacaggctttgggacatagtcccccacaaggctcacacatcttgagcccatttttatctacttccatcttgtcaggaggacaggccctgacacaggatgtttgatccaccacaaagttatggggacagctggctacacaaactcctccatactgatacttggtgtggggattgggttccagctggaaagttagcttgttgtagacaagaggctgtggacagcgaggtacacaggctccactgtcattgaagtgccggcagcaaagcagcctatgcccagaggcg

SEQ ID NO: 104218 - DNA, 156 bp, Homo Sapiens
gggaagtttgggatggtcagcagtgaatggatgggagccctgagactggatgatattttagggtagggtgaataaagagaagaactcagcccctggaagtcatgcccaggtttaaggacttcagagaaaagggcactgaccggcccagtggctcat

SEQ ID NO: 104219 - DNA, 455 bp, Homo Sapiens
tatggagaaacagtgcacagcgagatgaatgagggatgggggagagatggggacggggtgagggcaccctggagggggacgcacagggccagagagagacaggagaggctgacccaagagtcaagcacacacatggctgtgtgtgggtgctggatgggtgcgggggaccctcagagacccctgggagcccagatagacaatgtggtgtagcccccatgctggggaccctactccctgcctctagcactcagaccacccgctcccaactgcaccactgccaggaccagcctggcagcgaccatgtctcacttcccctgcctattgtgtaagctgggactgggagaggccccagtgtcctctgggccccagaccagacccgaaacactgcttttggcctcccagcaaccacaccacgccaggaaccacaccgtgccagtgcccagagggccggaccg

SEQ ID NO: 104220 - DNA, 703 bp, Homo Sapiens
tgtcagatgctcacctgggattgtgggtgctgttaaaggctgtcagatgctcgcctggggttgtgggtgctgctccgttcggtcagatgctcgcctgggggcgtgtgtgctgctccatgggttcagatgctcgcctggaggtatgggtcctgctccgggaggacagatgctcacctcgaggtgtgggtgctgctccaggttgtcagatgctcaccttgggatgtgggtgctgctccagactctccgatgctcacctgtggttgtgtgtgatgctccagacaatcagattctcacctgggggtgtgggtgctgttccaggctgtcagatgctcacctgggggtgtgggtgctgctccaggctgtcagatgctcacctgtgggtgtggggtgctgctccacgatgtcagatgctcacctgtgggtatgggtgttgttccaggctgtctgatgctcacctgggggtgtgggtgctgttccaggccgtcagatgctcgcctgggggtgttggtgccgttccaggctgtcacatgcgcacctggtggtgcaggctgttgttccaggctgtcagatgctcacctgggcgtgtgggttctgttccaggctgtcagatgctcacctgtgggtgtcggtgttgctgcaaaccatcagatgctcacctgggggtgtgggtgccgacccaggctctcagatgctcgcagctgcg

SEQ ID NO: 104221 - DNA, 523 bp, Homo Sapiens
ccgggtcttctgaatcccgggctgtattcgtgtacttgtaatagtcattggaaagtcgcttggcacttcgttgacagcccttgggctactgcctttttgtggttaagggttgtctttccaggtggagaatatttctccagacccaaaacattagcttctgttttgtggcctcatgggcttagcagagatctgtatgtgagattgggtactgggaacagcttggcaagttattaacctctgcagagctcaggtttctcattttaaaaataaagacaactaccattaaaggaagatcgtgttttcaggattagacaagacaatataggtagaacacttagcactgtggctggtgctcaataattggtggttattactcttactagtaaggtaataggtgtgtattctgtttgggagttaacctgagtttactacccttttagaagatagttccatcattccgataattcataccttgtcattttgtaatatctttgtgtaaaatgtaccgcaagggatcctctca

SEQ ID NO: 104222 - DNA, 413 bp, Homo Sapiens
gttacaggcatgagcgacttgtgccaggcccgcattttgtattttcttatagattatttgtgacattttaagaacccatacatgttactaacgttttgtttttgaaattttctcttcaagtatgctattgcggcagcacctcccgagatgtgttatgtggaaccgatgtaggaaagtctgatggatttggggatttcagctgtttaaagatatgtggcaagaacttgaaatgcggtaaccatacatgttcgcaagtgtgccaccctcagccctcccagcaatgcccacggctcccccagtctggtgcgtctgttgcccctgtggccaaactcgctctcagccaattgctagaacttggaagtagtagtcggaaaacatgcatggacctgtgccttcatgtgtaaaatgtgcgg

SEQ ID NO: 104223 - DNA, 430 bp, Homo Sapiens
aagtaagagaggttagtgacttgcttaaatccacagccaattagtgacaatactgagactagaacacaggctaaaggtactttttaaagagagtgtttatcacttattaaaacagttgcttttgacaataactagtgataggataattcatcattaacttcaaccacttattgacctttgttatacacaaaatatggtttaagcattggcagtgaggtaaatacgaagacaacatctttggtggaaaggatcttaaatggagagattttaaaataaagaaaatgtggtatattcgtagctatagacatagtgacaaggatgacagacatgacttgtaagaggcgttgataggaagaaaggctgatggcagcagatgcaggactagtcccatctttgggtgctagggttgccatttcgttaacggttccta

SEQ ID NO: 104224 - DNA, 342 bp, Homo Sapiens
  misc_feature (212)..(241): n is a, c, g, or t
  misc_feature (279)..(279): n is a, c, g, or t
gaaagaaccatcttaggcctgaagcaggtatgtgatttggtcaaggtcatagagcctaataagtgataagaataggtactctcacctagccgtgctctctttcagcccatacttttcacatgtgaggtactcagatgctctatgatgataccgctagccatacgtttctgtaaaaataatgtttacttgggccggacatggtggctcatgcnnnnnnnnnnnnnnnnnnnnnnnnnnnnnntggtagatcatgaggtcaggagttcaagaccacctggncagtatggtgaagcctgtctctactaaaataccaaaaaaaattgctgggtgtaaatgtcggcc

SEQ ID NO: 104225 - DNA, 529 bp, Homo Sapiens
  misc_feature (215)..(230): n is a, c, g, or t
tctgttctatttgggaaaatatattaataaaaagaaagtcacaaataactgagcagtgcttatcgtttcccagcaagaaacctgggttcttcctttatagattcccaggatccaggataagattaaagtgatattaatacccatagccgggacaagtataattgtcaataaaaaagtctcagagtgtttccaagaaaaaaaatacacacacacannnnnnnnnnnnnnnntactctgttgagggacacaattcaaaatgattgataaactacatggtagttattttgcataaaggaactgtttgaaagtacaatatggagttcagaatcatcattttaattgatgtcacttctgttactttttgtccctagtaaagctttcatttctcagcctgacttttaccctggtttgtctttttaactttatttttcattactacttattgtgtggttgatggggtactggtgtgacttaaattagaatgtctggatcttgagacttagtgtaaaatgtcgccggagatcctcta

SEQ ID NO: 104226 - DNA, 373 bp, Homo Sapiens
cttgaggatccgtgcgcacatttacaccacaccgcccagctgcccattgtctacaccacacagcccagctgctccactgtctacaccacacagcccagctgctccactgtctacaccacacagcccagctgctccactgtctacaccacacagcccagctgctccactgtctacaccacacagcccagctgctccacagtctgtctacaccacacagcccagctgctccaccgtatgtctacaccacacagcccaagctgctccactgtctaggtgtgcgtcagccactctgcttccacaatgatgaaagtacctaacaatgacttactccaaagtatccctgtaaaatgtcggcacaggatcctcaggcagc

SEQ ID NO: 104227 - DNA, 313 bp, Homo Sapiens
gcccagaaccctgggagtgatgagtggggagcccgagacatagaagtgggcagcattgcagccaggcagggatcgcagcccggggacaaagggctctcgcctcaagaaggtttaagtagcaaagatacagctgctgttggtcagcgctggtgggcaggagggcagcccctcgttttcctgagagagggcaggaatgaggccaggcagagtggctgggctcccagtccagggcacggcaggggctccaattcagtgcccaacctggctgcccaatgctctctgtggcaagtgtcctgcctcacaggatcctcta

SEQ ID NO: 104228 - DNA, 531 bp, Homo Sapiens
agtgatgctgaggtgatctagaggatcccgggagcaggaactgtggtcatcaaatgatactattcctggtgggactgagaggtgtgtcaaattcgtgttagctcaaaatcaagccttaacagaattattaggggagatactcccaggacagaatccttgcagcggggttctgctgttacgataccaagaccaggtgctggggagactcggagagctgatcttttaaaggagggagtggaatggcaatcatttctgcttgtcctctgtttaaaattgagttttatcattgaacttcttattctttctagaatctggaatgaaaagaaatatgtttatcctcagggtcgggcagacagtgctttcctgcgacatcatcataaacaggtaacattgccccttcatctcggcagagctcaaccggaatgacaagggtctggacggcgtgctgaacaacaacagctacgagtcagacatcctgacgacttacctgccacccagaggttggccatggaccaccatgtcgaccgccag

SEQ ID NO: 104229 - DNA, 220 bp, Homo Sapiens
tcaatgagcggaggcgggaccagtgtctgtcaatgagcagaggcggggccagcgtctgtcaatgagcagaggcggagttagtgtctgtcaatgagcagaggcggggttagtgtctgtcaacgagcagaggcagggacagtctcaatgaacagaggcggggccagtgtctgtcaatgagcggaggtgggaccagtgtcctgcctccaaggatcctctagat

SEQ ID NO: 104230 - DNA, 558 bp, Homo Sapiens
ggaggcaggacactgttatggttcctagtcctgcagcagttgcctatggagggcaggcagctccagccctggggccagtggagggccagccagagccagcagcacagtcagctagtgcaagtagtcatcaactctggcaaaggagcaagaacccaggcctgctcgggccatgagccggagacactcagatgcctggcccagggcgagcatcagagggggctgctttggcaggttctgggactctaaaatggcgctgttgagggcagcacacacaggttccctctggatggggtcaagctgctggccaactgggcagctccaggggtctgagtatgccagcaggctgaaggcatcctgcagcatctctgtgtgggccaaattcttgccgtactcccggcccaactgctcactcaatgcctgcaactcgcggccaaacagaatgatcctttctgtggcagcctggttgcccccgcagagctgccgccgaggatgcctgtcatccatgctggactcatccgtctgcaggtcctcatgcttgtaggcaccattaacaatgcg

SEQ ID NO: 104231 - DNA, 229 bp, Homo Sapiens
ggccagcagggactgcccgtcagagcagggtcaattaacccatcggggagtgttattacaaggcacaatttatcgtccctggcacacattagtggtagcacagaggacatggggtcgccctgactgcatcaggagataaactggagacgtctggagaacagggtggaggggcagattacattaaaattcagacgccagtgtcctgcctcctaaggatcggtagatcaca

SEQ ID NO: 104232 - DNA, 443 bp, Homo Sapiens
gtaccctgggagcccagtacactgagtgggacaacaccgtgtgggggctgcctgcactgggtgtcccgcgggtgtccttgttgctgatggttccacctgcttgtgccaccagtgctctctgggtctcacacacaactctcttcccagcagaaggcccctcctgccctcaggcctcaagttgctgcttccgtctcggaaggccccaggagctcaatacatcctgggcgtgattcctgtgtgcctgcagaccccctcgcggctgccatctcatgcctttggtgcacctgttgcacagacctcctggtagcagggtgctgcactcaactgaatgtgccagggcctgggcgctaggacactgggctccgtccctcactgagtggagcgaactcagtgtcttggattgggtcctcagctggtggtgcagtaatcaactctcactgtgt

SEQ ID NO: 104233 - DNA, 286 bp, Homo Sapiens
  misc_feature (224)..(224): n is a, c, g, or t
tcccgtctgttgccctccctcctccccgacactttcaggattggatgcacaccacccagaaataattcccagtgagggggagcatggggcttcccacactggaaaaggccagggcaaaagtggaagttaactgaccaggaaggccaccgggcaaatatcttgtctcagaataaggttgccaccggctctttcaaagacgcacggcatgcttactcagccaggtncctgcgccctctgctgacacagggaggctgtgccgactctgaaaatccgctcccagcctcca

SEQ ID NO: 104234 - DNA, 229 bp, Homo Sapiens
tgggtgatctagcaggatcttgagattggggataaagcaaacaaaaatccttgctttggtggaacttgatattctactggaggcagttggcagtagggcactagtactctagtggtagagggtacccaaacagcagctggaggatgactgggaggcagggaggctgaactgggaggtgcagctaagagcctgtctctggtcagtcagctgacgaaagaatgagacaatc

SEQ ID NO: 104235 - DNA, 334 bp, Homo Sapiens
ccgtgggagcaggacactgagaggccaagacgggattgctggatggaaagccatagtagctaaaagacgggagagcgtacttggagtggaagccattgacggaggtcaggctgggctgtgcatagtaggagtggtaggagtacacgctgttcatgctgtaagggtcggagggccggcagttgcccagcaccgagtagctctccaccaccgcgttgccgctgtacttgaaggagctgaagtggttctgcgactccaccttgagggagggcttcaggccttgctgggacaatccacccttcagagacaggcctgggtccgaacgtaattgccctgc

SEQ ID NO: 104236 - DNA, 493 bp, Homo Sapiens
atttggtgattagaggatctgggtgaggttgccagaatgcagggtgggtggatggatttcaggaaagcaacagaggaagtggggaggaggtggctgcagctgcccacgtgagcgattatggtgtcttgggaccagatagtggctgtggaaatggagagaaatggccactaggttggtgtcaaacaaacgacactggcccagtcccacaaaggcttggtggtctctaggagccatggtcctctctggtctgggctcggtcagtggggagggtcactggcttggccttgcagggctggggtggctcaccagccccagacttgagggcatgaagcgcctgctccttgctggcatctggctctcttagctggcccgccgggcctgggcctcattaacaccagctggggctcatccccagagcgaccccagctccgggcagccggggtgtgacatcctgccctcggggcttaacaggagctctggggggggagtcgtg

SEQ ID NO: 104237 - DNA, 349 bp, Homo Sapiens
agtatctaagctgactcggtgtggtagggtcagctcactctgtactcaaagatctgtcctgggcaatgaagtatcccaggccaaacatccacaatgtgtaattaaagagcagacaggagttcatggggcaatggaggtgatggagaaacagggattgggggccaacttcattttttcctagggaaattccatataatatagacacgctgctgtatcagtgccacctgtcttcatcttctgcctgtctgctcccttctgtaggtctgggtcacccacttacagtcgtcacttattaaacatgtcactctagggcagaaccagaccaacccagggtctggccctggaagtc

SEQ ID NO: 104238 - DNA, 547 bp, Homo Sapiens
tctagaggatcccgggaggcaggacactggctgagagttgtgtgtgtccgtgtggggctgggccaggagtgggggagggctcccttgagacaagccccctcaccgccagcctggctgccgccacctgaccttgggagggagcagcgtgtgccagatgaccagagggctcccagcactcccacggcccagcggggagcatctctggggagggcggtcatgaggggaggcctggggcagcagcagagggtgggggacgtggccctggcgtcttggcgaatcctgctctggagacagggtgggcacagctctgtggtcagaggcctgggggccactgctggtgttgtgctggggcaggggatggagcaggggtgcctctgcctcttgggtgtcacctcctcccctggagcacctgagggctggcctgtgtgtctctccagtcccgcagcgtggacaagcagcatgccgtcatcaactacgaccaggacagggacgagcactgcgtgaaggccctggccagcctcaatggcgtaagtgtgagaggcctggc

SEQ ID NO: 104239 - DNA, 510 bp, Homo Sapiens
agacagctaaccactgtcccctgctgcaggagcatgcacagcggtgctatgtccgtgggctattccgcaaccttgcagcaagcacagagtgtgacctcccaggatttgctgacagcggtagatgcctgtgaggagctactacaagaaatagacatcaccccatttctccttgcattgtgtggccacacttggggtttgcctcatgcacccccaagtcctggtcctctcagccctgggcccttcagcagcagcatggaggagggtgctgaacctcgggaacgagctatcctagcttctgaatccagcatagagaccgaggacctaagcgagcctgagtttcagagcacccgtgtccctggcattccagaccctgggccagagatctctctgacagatgtctgccagctcagaggagaggccatggtgcccttcatagcgtcatccaaggagaagttcctagagatcagtcgtctccacttccgcacagtgtcctgcctcccacagtgtcaa

SEQ ID NO: 104240 - DNA, 171 bp, Homo Sapiens
gcagaggtatacaccataggcactggggcgtggcacctggtcactgtctcctcagcgggaagacttggggctggtcggggatgctgaggagacgactgaccagggtgcctggccccagtgcttgtggcccccaaaatatttcgcacagtaatatacggcaggtgtctggcc

SEQ ID NO: 104241 - DNA, 199 bp, Homo Sapiens
  misc_feature (176)..(176): n is a, c, g, or t
tgctgtgactctagaggatgcctttggaggcaggacactgtgggaggcaggacactgcagaaatggcgcgggaggctccttccagcactactggatgaaatgaggctccttaggtggaaagcagttttgttttctgaagcttttgccggccatgtgtcctgtgcctttcccagggntacctgacgcttcgaatttcgta

SEQ ID NO: 104242 - DNA, 527 bp, Homo Sapiens
tctagaggatctcggaggctggcactgagcctagtgtcgggagcaaggcggcagagtcatgcggcagccgggcgcgggcaggggacgcacgcgggaatcgagctggggtggcgccaccggagcaggaaggggacaggtcggtgcggtctaagctactccgtaaaagcagccgttgcgtgtctccgtgtgtgtgtaaggggaacaagtggagagtgagtatatgtatatatccctcactccataccaggaggaggtctcctcaccccctgcgctcttcataaattcccatgctagggtctgggtaaagctgcgaggtactttgggtgctcaaattcggagttcctcctttagaggcaagattactcacctccttggccagttgcactcctcccttccttccagactggcagtatgattaactcggtgggaagtgactgctaagtggagacggaaatcagtcaccgaactgagcaacagtcctgtgctcacttcccccaccccaaccctctgaaaactcttctctcggc

SEQ ID NO: 104243 - DNA, 287 bp, Homo Sapiens
  misc_feature (220)..(220): n is a, c, g, or t
gtctgcagctcctgcagctgctccacgtgggctcccttcaccgccaccagcactgcatccttctccctggccagacggtcgagctcctcatgcttcctcttaaatgtttcctcttccttcttcctggttagctgcacagagtgaagtttatcctctaaatcctttaccctgaagagaaacaaatatttatggaagggagcagtgagatgaaagcaagacncagcctggaatgagcagaaaaggtagaatcccccagactccagtcctgcctcccgcagatcctctag

SEQ ID NO: 104244 - DNA, 445 bp, Homo Sapiens
  misc_feature (393)..(393): n is a, c, g, or t
ctgaaattgctgcggtaggtgccgtaggcaaaatcgccgtgaaaggagcctggaggaagcggggcctcgtaggaaccggcagccacattgtggcttctgtaaatctgactctggtgcgagtgggagctgaggctgctgcggcggctggccaggctgtgtgcgctgtgcaggctccgtgccgagtgctcgctgtggacgctgcgccggtcctcctcttccccataagggtctctgtgcggatcggggtcatcgtcaaaactccccgtgaagcgaggatcgtacctccagttgttgtcacgtttctcgggcctgtccccgaaggcagagtgctctctcctgtatgcgtcatactctgcatcacaccaatacactccggtcataggtgcgggggtncctgactctagcactgtagtggtaacgatcccagtgtcctgcctcacaggga

SEQ ID NO: 104245 - DNA, 160 bp, Homo Sapiens
ggctgggccgaaagaggccactgggaggcaggaggacctgggcctggagaggctgccgaaaggcaggagcttcaactaaggatgccacagtgagacacaatctgggtctggagggtccactgtgagcatacctgccgcccacagtgtcctgcctcaaagc

SEQ ID NO: 104246 - DNA, 159 bp, Homo Sapiens
cttgttcacgtcctaagttgctcgtatgttcccggcaacgtacccggcactagaattctcaggactggtgcaggtcagcggctccgcaggggtgagctgggcgctgcctgcatctgacgagatagcagtatgttagcatctgtggtgttctgtctaccg

SEQ ID NO: 104247 - DNA, 222 bp, Homo Sapiens
aggatcccttatgaggcaggacactgggactggtgtgctctaaactgggaaggcactatctattcaagaaggcctagagtgcttcccctttcagctctaccctgttgtgagcttggtctcagagtggcctccattcccttcccattcccagtgtctgactggagcacacatgccctgtgatctcttttcctatgactctggggaggtaaggaagggataaag

SEQ ID NO: 104248 - DNA, 358 bp, Homo Sapiens
cggcaggctgtgtgaggtagagaggcacgcttacagagttggtgctcatggacacagtgtgaatggagtcactgagtggcactgtcagacatgccgttgacccgacttgcaatgtggtctgtctccatgaccacagggagctccaggccattcccatgcataggtatcacaccaccatgtactacagcgtctgctgcaaggttgttgctcacagaatccacagacagaggttcatgacttctggagccatttgggatttgggaatgctcgcctgcaacaccgtccatcgtaagctcctctgccattccatctgtcgaaattgggctggtaaccctagaaacgttctccatagtgattg

SEQ ID NO: 104249 - DNA, 288 bp, Homo Sapiens
ggccatgagaaggtgaggggggaattcacattcaaaaagtctcaagagcgactgttagcttcacacaccttctcatggcccccgtgttccccagtttcatccagagagacgccacaaggggttcacatagtgtccgtgacaaaatctcagcggagaaagacaccaaggaatctgtgaaattgtcactgggcaggtcgctcagtgaggattcaggcaatgacttgtttgcatccagcacatcttgtatatcctgggagcttataactccaggtccagtgtcctgcccta

SEQ ID NO: 104250 - DNA, 418 bp, Homo Sapiens
gacagcatcctaacaggagcagacgcgaaagccaggaagcagggctctgaaaagcaggaacctcctgggcccaccctctggggctgccatggggattgcaggatcactggggaagcaccgtgtctgggtggctgcagctgctgagctattggtattgctgtgccagaggggaggggatgaggggctctgcgaggaaggagaggagggtcccatcctcagatacagcagtgtgcagtgagaagaccccagtaccgcgtattgtagagattgaggtggggagagaggaagtcagggagaggcgcctgtggccccaggggcaactgaccacgaatccccttcccacccaagccttgtcctgacggtgtgcgtctcccagacccaggccaatgccagggccatccacaggctccggaagcag

SEQ ID NO: 104251 - DNA, 291 bp, Homo Sapiens
accctaagcatcctaaccaggtctcaactcatcaaacatttgctggaactgctgggtgctggcaagagctgcctggagtctgttaatgcgatcggctgcaaggtcttctaaaaccttggagaggcagggcaactgtctccaaacgcttcttcagttcatccttgaggtactgctcaccaataagcactgagagttcatcgcacagtgtctgagcctccttaacctcgtggtctaactgctccaagtcagatcgaatttcactggtctcttccaattgctgctgtacagccg

SEQ ID NO: 104252 - DNA, 420 bp, Homo Sapiens
ttacagaccttaagcatcctaaccaggtgaaagtgcgggaaagttgtgcatgtgtgtatattgcatgaacaatatgaaaaggaaggataatttagttcatagtagtttttcttctgaacgtatctttgggagtttaatctcctttttgattctctaatatggattagtcttgttatataatcttcaagtcttttccatgccagtacttttcaagggcaccttatgttcatatggtttttccttaccttttattcctttgtgtgtttttttggtgctgaattacaggtgattgtttcagaaattagaagaactactctggctgtttacaaagtgatgatctgaaatgcttttacttagtgcctagattttctctaacattgaatgatagtgggtcataagaagaagttgaacatactttgt

SEQ ID NO: 104253 - DNA, 234 bp, Homo Sapiens
  misc_feature (46)..(59): n is a, c, g, or t
gtcactgaccttccagcctgggcaacagagccagaccctgtttttnnnnnnnnnnnnnntttatccctgatgatagaaagctgttcacctctaggaagcacgaagccctcactgtggaggagttcagtgttgatacttgattaatgagcccatatgttaagcagagtttccttatttatgtacatagaaacaagattgattgtgctttggggtctggttaggatgcttaacagg

SEQ ID NO: 104254 - DNA, 291 bp, Homo Sapiens
agatctaagcatcctaacaggtacaccaggagtaacagtcttcatcctcagcctttgtaggaggacacagcctgggtctttagctgtttgccaaatgaggcagtctaaattcagggagctctttactgggtttattacaaagttcttatcatgtaagtctcaggacacaaaatgacattgagaatctagtttagcggggtttccaggaaagacgaagaaaggttatttaggtttctctttcatttctcttttgctacaaagggtttgggacattcagttaagaacacatta

SEQ ID NO: 104255 - DNA, 144 bp, Homo Sapiens
ttgccattactcttaagtgatactttatagagatgttagattgataattactttctatctgtattttaaagctaaaatttaattattttctagcaactcttgttgctgttaagaaatctgctgtcgggatcctctgtaccctca

SEQ ID NO: 104256 - DNA, 254 bp, Homo Sapiens
agaggtaagagaaaaccaggagagtgtggaatgtcatgaaagccaagggaagagaacaattcaagactgacagatactaataataaatgctaacatctgttaagtcccagtcatggccagacattctgctcaggactttgaatacatgattgaatttaatgttaacaactttttgaggtgggagccatttcccttttcatagacaaggaaactgtggcaaagaatggttaagcagctgactcatggtcaggtgg

SEQ ID NO: 104257 - DNA, 341 bp, Homo Sapiens
ctagcaggatctcgacaggcacctaaccaggatattagacacagattctttgactcttcaagcgcagatgtcatctggaaatatggtagaaaatgttttgacaaagtataagattaattctctttctctcaatttaagataagaaaaaatagggtgaagagagtgggcttgaaggaagccctagaaatgtattcctatattaagataaatagcaccctttgagatccacacacttgatttacaactgaagtagtggaagtggggagggctcacaagacagtgtggaagtgtgttgtcctttcgagatgaacaaagcctccagacaaggcagtcccatctgg

SEQ ID NO: 104258 - DNA, 237 bp, Homo Sapiens
atgatatcatcctgtacaatgcagctgtgtcaccatcaggaagttttcatcagccagaagatcagtgccattgttttcctcaagtttcctaaattcctctatcattctagattttatcacaggttcatgttctgtctttctcagtttgaagccatagtcaaacccactgccatcttcagggacacccagcatatcataccacagtcgggcaggccccataacgccactcagccactc

SEQ ID NO: 104259 - DNA, 232 bp, Homo Sapiens
gggctggagtaggacaggagtaggaggaaccgctctggtcatgggactgtgtgaagagagaaggatcaggaagaaaacatgagctatcatgtctgggttatacctcagcagagccgctggtggcctcccaggcatctgaatttactaatcacaaagctcaccaggtgtgcaaataaacaaatgctgttcaggataccacgccaggttctgctgttaggatgctaaccgatgc

SEQ ID NO: 104260 - DNA, 376 bp, Homo Sapiens
  misc_feature (222)..(238): n is a, c, g, or t
tggaagcatcctaaccagcctcccaaagtagtagggattacaggtgtagagccactgtgcttggcttcccctgctcctcagattcctcaggtagaaacttaagttattgatttgagcctccctttttcttaatccaaagctaaaaacttttgagtgttgcttatttacatctcataaatttggatatattggggttatgtttgcccttagattaaaggttcnnnnnnnnnnnnnnnnngaggaacgggattctcacttctgtggcctcagggctgaagtgtgcaggggcaataacccgggcctcacgtgaaacctccgccttcccaggttacaagcaattctctccataccttcagcctcccgaagttagctggga

SEQ ID NO: 104261 - DNA, 246 bp, Homo Sapiens
  misc_feature (150)..(150): n is a, c, g, or t
atctagagatcctaagatcctacagataagctgccgcagtacacagcagcagcggctggaaacatatgggaaaggagctgtgtcccgggagctgcagatgctgttggtgaaagagggtgtgcagaatgctaagaccgatgttgttgtcanactccgttcccttggatctcgtgcttagtagagggcctctttctaagtccctcttggaaaaagctggaccagagctccaggaggaattggacacag

SEQ ID NO: 104262 - DNA, 489 bp, Homo Sapiens
tgctttctgacattactggtcttgtctagaatgcatgaaaacttcccccaaaaacagctttttcagaacctattataaagatctgcaaaaacccagaagtttgcaggagtctattttatggctactattaagtttatataaattttacctgtttaatatgtctgagggtcatattaaccttaaaacaaaatttttaaagcaggctcacaaaaatttattctagtcctatcaacactcactaatgtatgtcctccctcctttagttggctattgatatcaataacaaggcttagaaatatgcaacaaccaaattgcttatagatttaaaaggtaatttcaaacattcccaatttaagtaatgtgcacttctgatgtttaatggtttctaaactaatgattgctagtttaacacgtgcctatctgctagaaaggaggtatataataatactagtgtttgggagaaaattactctcctggttaggatgcttc

SEQ ID NO: 104263 - DNA, 450 bp, Homo Sapiens
  misc_feature (209)..(227): n is a, c, g, or t
caacccacatcaaccccaaaaggttgaagaatcatctaagatatttcagatgctctatgaagaaattcactttaacacttataactgtaagactttgcacacattacaacagtgcattagtgatacaagttgtaaaatacgtttccattcctttggattttgcatatgatggttttgcatcagtcactgcaggtagattggagcaagcnnnnnnnnnnnnnnnnnnnaaacatgcattcaactagatatgattcagaatagattaatactccctttttatcattacagctagctaaaaaattgccaggcagtccacaaaacagaatttgctttaagaccaacccacagagtcagctggagactaacggcgctggggcctgctggccgggatatagtcgtgtttagctaagtggtcgagagcaaaaagaagaaagtcctggttagggatgc

SEQ ID NO: 104264 - DNA, 353 bp, Homo Sapiens
  misc_feature (200)..(200): n is a, c, g, or t
gcgaatcatatgaaataccaaacacgaggctgatatacactagaaggaagaaaacacattagagaggcaatagttttatctgggctcaacttgcaatgattactctaagtctgacattctgtaacacacatttattggtatcagattgagatttttcttgtgccaaaaaatgcccacatagatggtttttactctacatntggtgccagcacgccacatggtgcaaggactgtgatctgagataaaataagatccatttgggagctgacactaacaacaatatgtacggtccctgttctgcctgctttttcctacttaaaaatatatctctggttaggatgcttaagcgatcc

SEQ ID NO: 104265 - DNA, 246 bp, Homo Sapiens
gaaaaagaaaataaaaaccaaaccaaccacacccacagggggaaaattccctcctacttctaagcctaaaacccaaacagctgctacctcccaggttgactgctgacaaaaatacacaagggagctttggagggcaggcagggagaacaaaataataaaccaattagaaataataatgtgacagtcatggttaagctaatttgctttactaccttcatcataatattaagcatcctgtagatcgac

SEQ ID NO: 104266 - DNA, 344 bp, Homo Sapiens
cctgcactttatgtaactttcacctggaataatgcaaaggaatgggtaattgacatgcccttgacactggtgaggatttgttgcctcaaatcaacctttagtagtgctggaccacgggcaactcaaggttgaattccctgacaaaattctcgagctttctacatggagtgaaatagaatcagctggcatttggttgggataatcccagtgagggagggtgaccagactgtggttgcaggtcttgcctgtcacctctgactgccctcctttgggtgaacaatagtctgcaatttcccctaagccaggccttgggatttggacttttgaggacctggttagggatg

SEQ ID NO: 104267 - DNA, 265 bp, Homo Sapiens
  misc_feature (98)..(98): n is a, c, g, or t
ccctaaccccaccctggcgcttagatttccagtttgcgaaattcataccaatggaatccgatgtaagcaatccaccatcagctcactgatgctctctntgccttccacacttcgagaagacctgaaatgtggtgtccattcccctctttattcaaaaggggaccttcaaaaatattcacctaactaggaatttaaagaacacaagaaattgttggtatatttcacttcaggtaactgccctaaaattaaaacctccaatttatgc

SEQ ID NO: 104268 - DNA, 596 bp, Homo Sapiens
cagcatcctaaccagacacaagatccagctggcatgtgagaaacgtttcctgacatccaattcccagggacaccctcttatcacaggctctgtggctgctagaggtaaaggctcatttgggcttagaagctaatgctcttcccccagtctaaactgacttcgtatgatctcacataaatctaagcataaagccaggacaacttcttcctacctaagtcagaagagagatgatgatttataacctgggtgggggagaacagtgagccacttcaccaccttcaggatgatccaactatttcctcactctctaaggtggagaaagcgtgtagaggccacgtgctttatacgctgaaggctatttaaaggattacaaagaatgtaaagtcatctgtgatatggctttcgagttataaatgtcaatggcagttaagtctgctgctctgggaactcctccaacaacaggttgacaacagcccaagccgacggctctggaggaggctgacagacagctgctctttcggtaattattcctgagagcgccaagaggcctctccaaaggcagctaggtatattacatgctggttagggaatgctgt

SEQ ID NO: 104269 - DNA, 323 bp, Homo Sapiens
gcgacagctccctaaaccagggggtgctggggagaccagggccagaaaggaagggacttttgtctccaccaagctggggattcatgagatagcgatcctgggacatatgacacatacgcatatcctgcaacagctgcctttggtccaatgcaggcagagtcaagatcaggtctaagtcggggttagacgttaattcgatctttttccaatcgatgtgtgtgcgtcttccgtccccagattacctgcggtgtattataaaaaactattgtagttctgcgtgggcgcgaacagagaaaattaggaggaggacctatgtgtccatc

SEQ ID NO: 104270 - DNA, 215 bp, Homo Sapiens
cagctccctaaccaggttcgaggatctcagggaagagggtaagcatatcagactagcagagctgccagaactcgggctttcaaaagagaggtgccaccctctcccatgtccatgtaagtagcaaacaacccattcagactacagcaggagaatcctgagtgtagaggttcatttatgctatacataaccaaattcatcataaaaagttttccaag

SEQ ID NO: 104271 - DNA, 194 bp, Homo Sapiens
ccttctcctctttataccagggatccccaacccccaggcaacagaccagtagcagtccatggcctgttaggtactgggctgcacagctggaggtgagcaaccattacagactgagcgccgcctcctgtcagatcagtcgcgaagcattagattctcataagagcgtgaccctactgttaggatgcttcagctcc

SEQ ID NO: 104272 - DNA, 627 bp, Homo Sapiens
acagcatcccctaaccagggaaaagaatgttgccagaagaggagagtcaggctgtttcaaactctgctaagaagtgaaggatgttgcatattgagtagagtccattggggttaccagtcaggatgactcagggatcctctttggcagaagcagttccaatgaagtgggaggaggaagggaggaccagagcccaaatgagcgtgaggagtgtttaggagttgacagaaagtgtatccacttttttgagacgtttagccacgaagagggagagacatgggccagtagctggaggaggagatgaaattaagggagtgtatggagttttaaaatggaaagcttgatcctgtttaaatgctgttttatgcccctacgagggcgaggttaaacatacagaatagaggcataactgatagagccaagactcccatccaggagcgggtttcgagcggcacctctctaattcaatcccaaaggaaaagaggatacatgtgggtccaggtacatgctgaggtttggtgccaggactttggaggaggtcccatctgatggcttctatttctcctgtgaaataggaggaagacctgtctgctggttaggatgctgtcgggatcctcagagtcacccgac

SEQ ID NO: 104273 - DNA, 240 bp, Homo Sapiens
actctagcaggagctctacatccctaaccaggtccagagtgattctcttgcccattaaagtttgagaagcactaacctacatctactgagaaaacaaaatatctggatgtattgagattttgctattctatctgggcctacttaatatgtacacatgtatagggaaaccactttaaaagtacgaaagccctcagtgaggaagaggcaaactagagagacaaagtcaattagtgcttgccg

SEQ ID NO: 104274 - DNA, 338 bp, Homo Sapiens
tatcccctgcgctctctgcataacgactggaaggatgagttcaaggcacactcgagggtgaagtgtccaaactcaggttgctggctggagttccccagcatctacgggctcaagtaccattaccagcggtgccaagggggtgccatctcagatcgcctggccttcccctgccccttctgcgaggccgcattcacctctaagacccagctggagaaacaccggatctggaaccacatggaccgacccctgcctgcctccaagcctgggcccatcagcaggccggtcaccatcagccggcctgttggggtcacaagcccatcagagagagctgcaggacc

SEQ ID NO: 104275 - DNA, 136 bp, Homo Sapiens
tagtcaaagccgttcaaatagaaccgtgcacagtaatacgtggctgtgtccacagggtccatgttggtcattgtaaggaccaccaggtttttgagtgtccttggagactggtgagccttggtcatcagagagaggc

SEQ ID NO: 104276 - DNA, 660 bp, Homo Sapiens
  misc_feature (43)..(43): n is a, c, g, or t
ggtcctgcgctctctctgatgatgtcacccctcaactgactgngttaccttttttagaaaggagggaggttagctcctgggcgtgggcattcccaggacccagaacactgctgagggggtgccacctgttggcagctcccactctagtcctgctatctcagcctgctgtttgttttctctgaagtctttgcaccagccagagggcagccatctttgctgttggaactcttcttatcagaccacatttcatgtctgtggccgctcggcatctatagggataagtagtgaagggactgccatggcttgcagaatcgcaggtgtcttcttcgaccccaggtgcttcatacggttcttgctttgtgtgttctgtgatttggctgcttgggactgcttctgagagtccccatttcagtcaggctctcccagcaggagagacctgtccaagtgtgcacctactctgccaccctagcatccagtgaagccacagcagacaagagcccacagagcaaatgtctacatggactgaaactgcacactcctgctgtgccagcactcagcggccttgctgacctagggtgcagctaaaagctcattctccagagcctgagttctttggctttcctgcctaccatgtcagtcacccatcagagagagctcagg

SEQ ID NO: 104277 - DNA, 425 bp, Homo Sapiens
cagcctctctgatggtcatctaactgatcaggctctgaagagtctcagctgtgtctggaccagctgaccagaagactgggacagcaacagtactctctactccccactcacatagagagaagcctggtattttttaccaacaagagttcgcagacagtcatcaaactgaagagactcttactaaagtttcagccactcctggaccagctgaccagaagactgagataccagcagtacagtctagttcttactcacaaagagaaaagcctagtattttgtacccacaggacttagcagacagtcatctacctgaagagggtctgaaagtttcagctgttgctggaccagctgaccagaagactggcctaccaacagtaccctctagtgcatactcacacagagagaagctccttgttttctaccaa

SEQ ID NO: 104278 - DNA, 107 bp, Homo Sapiens
tcagccccggaggttgtggaaaccatgagttatgacaagccccttcactacagcctggatgacaagccagaccctccctcccaagaaaataaagctccaatttaaat

SEQ ID NO: 104279 - DNA, 576 bp, Homo Sapiens
ttcacgcagtgacgccatcccggcccctcgtaacctggtcacagagctactggaggagccgggcaggttctggcacacggcgtggcaccgcagaaggacggttccggcattcgtccacatcgtcacaggtgcactcggggcccgcgtggtacccaggatcgccgtcccaaagcacagctgtgctttggacggcgagaagtaaaatactgagcgtctcatcctcctcttcaatgggaagtgtgatggagcagggagaagggagcgagagggccagagagagcgtggatccacctgcttaccctgtgctcagcccacggcaggcctgagggtcagtgcggggcaggtgccaccccagacctggctggtttattttgccagagcggatcacagaggaagaggagttcaagccctgcctgccgggcattggaccacactgcacagaccagctatgacagactgcctgccacaaccacatgggttttatgaagtctgagagccgcagagccaggagttctcaaaaccgggcacatgtcaccgaggatgttagaacaaccccacccgccgtcccaaagcaca

SEQ ID NO: 104280 - DNA, 615 bp, Homo Sapiens
aggatcccccggtgcatgcatgtggaaggggtgtggggagcacctcagagacaaaggtgaaggaagaggggatgaaagcagcacattcagtgggagtggtgagcactctgcacctgagccagaggttatctccccatgcctccagcaggaagataaatgacttgtctcactctggtacatctgaggcatttcaggaacacattctccaaacaatcaaataattctggctacaaatgtcatcgtgatgagaaggatcaatactggttagtttcaccaaccatctatataacactctattattttcaaatgacatttgattctttagagttgtaagtttttacatttacaaagacacacaaggactagccataaaaatatagacccattgtttgtaaaatgttttcacttgtttaaaaaggtactgtgaaaaaaatgaagaaccagccagccgcggtggctcacacctgtaatccccgcacttagggagtcaaggcaggtgggtcacctgaggtcaggagttcaaggccagcctgaccaaaatggagaaaccttgtctctacttaaaatacaaattataccagcgtgtgttggcacaacatgcaccataagctcctg

SEQ ID NO: 104281 - DNA, 461 bp, Homo Sapiens
tgtggcatctgacctggggtatgtccgcatgataactcccgaacgcaggggaagggaggcttcttggggtgaatggagcttgagcaggatctggaaagggaggtacactttcgagggcctggcaagaagacagaagccgactcaggtgggcagagcagcatctccacagggccagaaaaggaagtgaggctgcggtcgtttattcccggctccctgtggtcggatgctgtgtttcattttagctgacatccctggagtggatggagccatccccatcttatggatgaggacccagatgcttgtaccatgggcttctatcgcacctttaccaggcggtgggggagggagttacacctggacctgcttgtctcctgagcccgagtgcctggcttctgtgggtgaggcggcaggccactgtgccccttgggagatctgcactgtagggagtagggtgaagaagt

SEQ ID NO: 104282 - DNA, 489 bp, Homo Sapiens
tggctaatctctagtctgcccacaccctggatgatcctaccactgtcctgattgattgggttggagaagagagagtttctcttgtatcattactcttatgattcagggaaaaatcaatttaaaaaattactgagttagaaataggttggcttattataagtataatctagaaggttttcatgatactgtcccacctctcgatggccatgtttaatagattttgtatcctggtagctagcagtagtcgttacccgtgtttgataaattattttattcctgagtaccattttgggggcttgtgggagtcagagagagtaaccaaatactcatgggaaagaaaagtagaagagataaagtgttaacgcatcatcagaaatcaaggcaaagtctttcctgtttcttacaaggccatacgatgacccctcctcttacctctgccttactgagcccattttctgatattcacataccccctcttctttttagtcc

SEQ ID NO: 104283 - DNA, 469 bp, Homo Sapiens
tctagaggatcgtttgcggtgcctttccccctgtcgaatagcatctgtgtttctggaatttcagaaacatatactgccaaacttctactgtcccatcttccagaaagggctggggtaaagggaagagtcaagaaacaggccagagctagagttcattcctatctgtcatgtgaggatgagactacaactcagacctcctgatacccatacttggaggatctccctactcccacatgagttgttctcctaattgtgttaggaataatcacagccacaaacggatgatataagaggtgtcaaacagtaaggcaggagcatctctcagaggaaaacattcactgaacctgcctagcagagctagtttatgtcatgtatcacaccattaagctttggagcaggaagggccctcagagattaccttagctcaatacccttgaggaaaaggggaccggaaaagggtaccgagctc

SEQ ID NO: 104284 - DNA, 481 bp, Homo Sapiens
  misc_feature (100)..(355): n is a, c, g, or t
acaccggaaaggcatggagacaggcaggggaggatgaagcccggatgtgggagagatttgaagactttggaaggatccatggacaggcgcagtggctcannnnnnnnnnnnnnnnnnnnnnnnnnnnnnnnnnnnnnnnnnnnnnnnnnnnnnnnnnnnnnnnnnnnnnnnnnnnnnnnnnnnnnnnnnnnnnnnnnnnnnnnnnnnnnnnnnnnnnnnnnnnnnnnnnnnnnnnnnnnnnnnnnnnnnnnnnnnnnnnnnnnnnnnnnnnnnnnnnnnnnnnnnnnnnnnnnnnnnnnnnnnnnnnnnnnnnnnnnnnnnnnnnnnnnnnnnnnnnnnnnnnnnnnnnnnnnnnttgtttccaaaaaaaagaatgacattggctgccatttaattgggtgctggggagtcagaatcgaatcagacgtagtccttatgtcacgtttcatatagaccagtggaaaggcaccgcaaaaaagat

SEQ ID NO: 104285 - DNA, 644 bp, Homo Sapiens
ctgttccttcacagcgagcttcctcaattgcctgacgggtcttggctctggcaagatcttccttatcagtcccagtgaagattttagtgacaggcctgggggtggtgcctgagaatccattggaacctagaaaaaagtccttctgtccttggtccaccttccttcctcacccaccctgagaggctgggctaagaatagatcatgagagtggtagtggccccaagtctctgtcctgggtttaggtcagccacctttcgtgaacgctggggaggcggacaaggcaactgctgcttcctctggcctaggtgagctgggacccaagtggcctggctgacaacacacccctgttgtttgaaggtagtacatggatcctggagttttgttccaagcctctgtgctgattaatgagagggaactagtgaatcctgggacatagaagggaccttaaaaatcatttggtcctctcagctctgtttgatagctgaagaaactgaggcctggaaaggtaggaggtatagtaagttaagtaagagtgaagatttgaacccgtaagagtgaagatttgaaccccggtcttttggcttaaagtaagacctttgtgcaagactattctgccgttaggaaaggcgccgcaaacagatcct

SEQ ID NO: 104286 - DNA, 395 bp, Homo Sapiens
ggggcgatctagaggatcctttgcggcgcctttcctggaccgctgacgcccgtgacccctggcaagaagagagacaaagggggcaagtggggttatatgaggcagatgctaaaaccaagggcaacaaaaaccggccacttcagtgaggagaccacagagcacctggccgccaggatgatcagaaagtaggagacctgctctgcagaggccatgaacaggctgtctggttgtggggcaggtggtatctggagctcagtcccttggggtagggacagtgctttgcaactgtgcagaaggttccatccactgagggcactgggcctgagccagcatcctgtgccagcagcaatgggtaaaacccagcccagaaaacagtggccctgctatgttaagct

SEQ ID NO: 104287 - DNA, 446 bp, Homo Sapiens
aggtcgatctcgaggattctttggcggcgcctttccattaaactaattactacacagaagtgtggctgagaatctcagaccctcaaacctttcctacagttttccccagtcaataccaaaccctacacaagtgattctccacgggtacctctggcatcgttgggcaatggaagtctccaagaggtaacccaggatcttgctctccagaggcggttctagcacatacgacactgatagcataaggagtctaataacttgtggtgtcctagctatgtgtgcttcatcatccagggagtccagtaaaagagaatttctatcatgtttaacaggaagacatatcaagaaagcaaaaatgggcttaggatgactgtgcattctcctacattaactgaatatttctgctatctgataaatttattatatgccagggaaagggcaccgcaaaa

SEQ ID NO: 104288 - DNA, 517 bp, Homo Sapiens
actaggaaacattgtttcagctttaaaagatttaaaagccggtgatatttcagaatagtgctgaaagagccctgctgttgaatgaacattgggagcaccgcatgtgggttgtggcaaaccctttatcccatgaggccctctcttctccatgcctctaagttctacagaccatcagtgccgcccctgaaatgtcctgtcttaaatagaatgccttgaaccatacctctgcatcaaaaatgtggagccgggggagctccaaggactggggattctctgtgccttcaaaatgacaagttagaagtactaaggtaaaagcagaaaagcatctgtgagggactaacttcaggtggtgcctctgacaacacagagcagtcaagttactactgtgcatttaacagggcacaccttttagctctgaaagaaccttaactttttcagtgcttctttaccagcactgtcaccactggtctttacagcgttcttaggaaaagcaccgcaaaagggatcctctagatcg

SEQ ID NO: 104289 - DNA, 138 bp, Homo Sapiens
ctacagtattcaaagtgctttctgaaccaacttaaatttgtttggatgtaagcacacagagaagtcagaaaacaggctctcagattcaagtataaagcatgggagctggaggaagcaccgcaaaagatcctctaggtc

SEQ ID NO: 104290 - DNA, 359 bp, Homo Sapiens
tttgggtgcttccctagggcgtaatatatgatgaataaagagaaaaatatccctgcctcatggagcttatgttcttgcagagagagacaaactacaaacaatacacataatacatataagttatttggtcttttgcaaggtgataaatgctacggagaataagaacagagagagggctctgtacacggagaggggcagagcagtccatggttgaacaggggtctctgaaggtgtgtgtgtagcagtgagggaaggggtggaaatgccaatggaaaggaagtcatatgtaagaagggcacagcaaaagggcttggtgtgacgtatggcatcctttcatgacaggcaagggcaccgcaaaa

SEQ ID NO: 104291 - DNA, 177 bp, Homo Sapiens
aataaagtaggagtaggtcaggtctggaggggctgagaaaagttcttggttcacagagtagggaaaatgagctaggggacaccccacgaacttgtccttgatgtatttcactgtctcaaaatcagcctgaaatacggaagtagctaacagtctcggtctgggaaaggcgccgcaata

SEQ ID NO: 104292 - DNA, 508 bp, Homo Sapiens
  misc_feature (432)..(440): n is a, c, g, or t
gaggatgcctttgcggcgctttctagggaaacaagaaaagaaacttttgtgccaggccactgggtataaagttttatgacccgaggatggaaggaaattagaaacagggatagtaaggccaacagggagaaaagcagagcaagtattcaacaatttcgttagacagtacatgtaatcagttgtagtttaacactggacatgcatgtgtgatgtaatttttgaagttatgaaagtgtaagcaaacttttgttccgaggttaccccctggatgctgtgggccaagagggatgaagcctggtgcaatgaacgaaagtaaattgctgcacagcaaggtggctcaggcctggaggtcttcacatcctctagagctggcttacgagatgctgtgttagctccagcaaaggtcactaggagtctttgggttaaatatannnnnnnnnaaatccacaaattcttgtagttcactgaacttctttaagaggaggaaagcccaactttgggtcgataa

SEQ ID NO: 104293 - DNA, 415 bp, Homo Sapiens
gagacctgtcttcgaaagtggacaagaaaggccaggggtgacctgccccagggatatgtggtaggaacagcagagtggagagagagcgcttgataaggtgccttgttgggaaacattccccacatcatggtgccatgggaaccacataagcacggtcaagtgtgcctcactcaagcactcaaggaacaagtttgcagaggtgggtcagggcaggagatgcacacgactcccagccaaccccacactctggacctggggcacctgtctaagcgcctttctcatgtaagatctcacttaaacctcccgtgaacagccctgtaacgtgggtgccatcaccgttcttcagtcttctacagaaactgacaataaggcagttaaccagggaaagcaccgcaaaagatcctctagacacagc

SEQ ID NO: 104294 - DNA, 356 bp, Homo Sapiens
gggtattatttttcagtaatctgctgacatgtatcatgttcacgggcactgttcctcagcgggacaggaccaggaatacaggggcagcagacctggagtcggcagcaagctgggggctgagctgcaaagggctcgggtaccaggagaccctaatcgcttttgtcttcagcaaacatgctgcagtgcgccctcacagcacacacctgatgcagaaacccggcctttaccctgtctgccatgtgcttggtacttgcaaggtactgagaacagagctgtaggaatgaaaagtggcacgtggagggcaaggggtcggcctcggagctattgaggaaagggcaccgcaaaagggtaccgag

SEQ ID NO: 104295 - DNA, 165 bp, Homo Sapiens
ccctttcccaaactccaaaaatgttgaatcccaaaacacagctggctcaggatttcagataaagcattgtggacctgtataatattattctaggaatcctaatttaggcaccctatacttaactttcttcctgatactctctcttacctgactccatgcatctca

SEQ ID NO: 104296 - DNA, 430 bp, Homo Sapiens
cctacaggacctctttgcggtgccttccaaatctgactagaggtgacaaactctcatcttggcaggttgttggctctcccagcgtctgacctggcgtgtttctcagtcccatcccaaggcgatgttctctaccgctagatggagcatcagacctcaagtcaagagcatcccagttcactgctgcttttggtggctctagtctgggagggaaggagagacttgaaaatgggaggatctcattggcttgctaaggatttgggatttaccttgtagtcagtggagagccattggaggagaatgtcaagggaaaaggaaattctttacttttggtttgctctacatttagtttaccatcaactctgtgatgaatctgatatgaagaaggcaggctgtgctggtctgagactagggcttaggggaaagggcaccg

SEQ ID NO: 104297 - DNA, 482 bp, Homo Sapiens
cttagttggggtctgggaccccccatcagctcaggtccctggcctttggtgacgctgtgtgtgaggccaccccattgcacgcccagtaggccacagctagtctgggccgcctcactctccctcccctgtgagctcctcctcaggcctggcctctggagttgcctccaaagtcggcagtgccttcagcctctccatctgagggcagctcagccactggatccctgctgctccccctctcctcctgggcctcctctgcctgtaccagctcttccatcctggcccggtcggccctgatccccaagtcctgcctcatctcagcctccttaccacgcaggtctacctggccctcaaagctctcccctgctcctgcctcccacagcttccctcctgcagtctggctctcagcagcctcttctgttctttcagtcccagacctggcctgtttgggaaaggcaccgcaaaaccggatcctctagatcaca

SEQ ID NO: 104298 - DNA, 639 bp, Homo Sapiens
ttgcagcctaggtacagcgtgaaaccatccctacccgttctaggcatattcagcaggtctagaaaatgatctttgcggtcccacaatacacttactgggcttctagagttaaaaggtactggtgtggccataactttggacagggcaagacacctgcagagctaagatcttgcttgactcagaagttgctgagttccatgtacagtagagagaggctacctggcttccagccacaccatagaatccacagccctgcccacaccacttgggtcatgccagctaaaaaaagatggagaacttccccagatgccccacaagtctaggaattgtttccagaccagcataagcagtggcaaggctgagggactggctatgggggatgtagcagtggacaagagcctcgctaagtgtggaaacggggaacagagggaagctggggaacttctcagaggggatgtgaggacgccctatcccgggaaggcaagaggcttcagctccagcatatgcacttcccaactatgagccaagtaggacgtcccaaccactgcaaggaggtacctgctcaagagggactgtgtccacagtgcaacctggagttaaatgagagtctgggaaaagcgccgcaaacggatcctctag

SEQ ID NO: 104299 - DNA, 215 bp, Homo Sapiens
cggagctatttgcggtgctttcatgtagtatactagaaactccccaggaaaacgctttagggttatgtgccccttaccagttcttgttccaggaatgggcaaaagctgtaataagcaccaactgcagtaggatgaatgcaaagcctccacagatgccaatgtaatgccatgctgcaaggatgggcaccagtggaaaaactgtcaaattgtgtact

SEQ ID NO: 104300 - DNA, 575 bp, Homo Sapiens
  misc_feature (164)..(164): n is a, c, g, or t
tgaggatcctttgcgggcctttcccatcaaggtcaagtgaaaaatgtgaaagaaggcattcattttaaaagcagcgtcatctcaatttatgttagcgagagcatggatagatcaagcaaaggccaaataatgggaaattttcaagctttggatgaggacactgngactacccagcccatgcaacgatatgtaaaattagaagatagagataattggatctctgtggattctgtcacatctgaaattaaacttgcaaaacttcctgatttggaatcttgatatgttcaaaatggcacatacactgtaaagattgtggccatatcagaagattatcctagaaaaaccatcactggcacagtccttatcaatgttgaagacatcaacgacaactgtcccacactgatagagcctgtgcagacaatctgtcacgatgcagagtatgtgaatgttactgcagaggacctggatggacacccaaacagtggccctttcagtttctccgtcattgacaaaccacctggcatggccgaaaaatggaacatagcacgccaagaaagtaccagtgtgctgctgca

SEQ ID NO: 104301 - DNA, 411 bp, Homo Sapiens
ggatcctgtagcatggatgatgtccaccagagcatggacagtagcttcaatatgagttagtcctggagagcaggcaggtgccaagaaggcattcttgggttgggatgcatggagtttccagaagtggttcacaagctgggtgatgaaactacagcaatctccttccaactgcttctgcggttccttcccttcatccattccttctaagcaggagaaagaaaattatcaacgatggtaaatctgagatggaatttaatttgttttaaggttaactcaggtcaaggaagcttgcctggggagggaatttcaagtggggccccaatcaatatgccaactatccctagactccagcaggcacatctaggaaaaaaacagtctgggaaagggcaccgcaaaagggtaccgagctcg

SEQ ID NO: 104302 - DNA, 418 bp, Homo Sapiens
ttttgcggtgccctttcccccaggaacacattcctgcaagccatggaggaaagaaatacttccctgtgtccttttggagagagctgggcttcggctgggctgatgtcatagctatgctcctggctgccttttagtcagaagagatgttagtgtgctgaaaaatagccaaggaggcttttttcctctgcatgggaaagaagacattgtttgtccatccgtccaagtcgttccttgcacaggattacgtgtcataacccaagcacttgtatttataagaaatgccaacatactctgattatttggcgaataaccatgctgctgtcagtatacaaacagcacatagagtataaaaacatctccatttttatcatggctgtcacagctgggaggctgtggaacaaaggatgcattgtttgag

SEQ ID NO: 104303 - DNA, 170 bp, Homo Sapiens
ttttgcggcgccttccacagcctgtctgtatatccttcgtccatttattagcactcattatgtgccagacactcttctaaatgctggagatgcagccatgtgtagacagatgaggccctatagagctcccgtagtaacagggaagccaaacaataaacacctaaggtgat

SEQ ID NO: 104304 - DNA, 410 bp, Homo Sapiens
ttttgcggtgccctttccacaaagaaaactccagatccagattgccttactggtgaattctagcaaacatttaaggaagaaataatactaatcctacataaacatttcaggaaacaggaggcagaaaccttcccaactcatgttatgaagctagaatgtcactactgaaaatgtggagaaatcgtatcaccaaagaaactacaatctagtttgtcaaaccctctgacaattcagctcctaaagtaatccctacaaaagccaggaggcatttgatcccatagaagaaactacgcagactccaagaaggtacctctccagtgtcctactagatgtggacacgaagtctaacaagacaaggagaaacattccagaaaactgagccggcgctgccaggaaagggcaccgcaaaa

SEQ ID NO: 104305 - DNA, 419 bp, Homo Sapiens
acggtgatgcatgtagtatcagtgggtgtgatgaagaaatgtttatgccaaatcaactgccttacagaatgaaagtaataagagtagctttgacaaaatgattgaagccattaaagaaagcaagaatggcaagaagattggagtgttcagcaaagacaaattccctggagagttcatgaagagctggaatgactgcctcaacaaagaaggctttgacaaaatagatatcagtgcagttgtggcatataccatcgctgtaaaggaggatggggagctcaacctaatgaagaaagcagccagcatcacttctgaagtcttcaacaaattcttcaaggaaagagtcatggaaatagttgatgcagatgagaaagttcgacacagcaaactggctgagtctgtggaaagggcaccgcacaagg

SEQ ID NO: 104306 - DNA, 442 bp, Homo Sapiens
  misc_feature (196)..(275): n is a, c, g, or t
  misc_feature (290)..(392): n is a, c, g, or t
ggagcttattgtggctgcctttcccttctcatgctagtcaggaaccctggagctggagagcacttagggagcactaaaactcatctccacttctatataagatgctacctaaatatccaggagagatgttcatttactcttaattaattcattcattcaacaaatgtattcagtattgagtagactgtggcagtcnnnnnnnnnnnnnnnnnnnnnnnnnnnnnnnnnnnnnnnnnnnnnnnnnnnnnnnnnnnnnnnnnnnnnnnnnnnnnnnnttctctctaaaaaannnnnnnnnnnnnnnnnnnnnnnnnnnnnnnnnnnnnnnnnnnnnnnnnnnnnnnnnnnnnnnnnnnnnnnnnnnnnnnnnnnnnnnnnnnnnnnnnnnnnnngcacttactattgatatttgcagacattggtaggaaagggcaccgcaaaa

SEQ ID NO: 104307 - DNA, 276 bp, Homo Sapiens
tgaccgctcctgtgctcatgctcatggactacaggcgcacacaatgccagttatttttctattttagtagagaggggttgccatgttgacaggctgtcttgaactcctgactcaggcgatccgcccgcttgaactcccaaagtgctggattacaggtgtgagccactgtgcccggcacctaaacaacatagttttgatataggtaagcatacagcatatatcttgatgctaatttcaggtaatttagctctaagaacaggaaagggcaccgaaggt

SEQ ID NO: 104308 - DNA, 318 bp, Homo Sapiens
cggcgctctagaggatcctcccctggtatgtggtaggtgccaacaaccatttgctgagttaacacacattgaatgaaggcgagagctgggcaccccaggtaattccaaaccataggtgacccaaagtggaactagagaccctggattcgggctttcagacacaggttatagacccagggaggggacgcctgggtcctgggagaagatgtcaggagcagcatcttcccagagatgaggtggaacatgcagttccaggaaccagccaccaggtggcgaagtggctctgcccagggtggggataccagggggggtaccgag

SEQ ID NO: 104309 - DNA, 248 bp, Homo Sapiens
cccctgggctactctgacacacctgggtcccactgccgcccctttctcactggccttcccttgctgccctcagagctttgccagagtctgtgagcaggtgacagagcaggcctgggacccctgttgtggggatgacaacagccatgtatcaggtggtgccgtgtgccgggcagtgaggagggaatcgtttgtgcaggttggctggaggagcctctgacggggtgggataccagggaaggatcctctag

SEQ ID NO: 104310 - DNA, 336 bp, Homo Sapiens
tatgcatgaggaacgtcactattgatgaatctcttggacacattgtaactgaagtgtccacaaggtatcagtgattttgtcccagaggcaggtgaaaatgtggaatggtggtgcatggcgtagatcaccttctcagttgatgctgtacaagctgaagcaatggatatgaatggaacaaattgctcagcagtttcttataactctaactttctgtgacctgagttcaactatctctagtatacctgaataatatataagtcggtatcgtggcctaatatggggggaggccatctctgatttctcacactcggttctatttctaacggtattcgctac

SEQ ID NO: 104311 - DNA, 480 bp, Homo Sapiens
ctggttagacgagcacagagacagctctattccaaagttggttctaggagatgactccaagagctcaaagtcatctaattattgaaaagtggcctaattcctagaaaataactccaaaggaatatttcaaatgtttgatagcctgtggcaatgccatgtcttgctgagttttttacacagataagcacaccttggaatacacagataaatctttaagaaatcttagtatatacactacattgtcaaactctgatctaagctctaaaacaaataataaagctcagagagaattacctagccagatgcacttaggttggaaaggctgctttaattggtcaacctaccctttaaatgtagaagttgtgattttataaacatgaccatattttttaacaaagaataaaagattagaatagaaaaaaagcatatgataacacccagattcagcattatatccacacagacctgatgctcctcatt

SEQ ID NO: 104312 - DNA, 491 bp, Homo Sapiens
gtgggtgatctagaggatcccgtggatgaggaacgtcactagagaaatgtcagcaccaattctgttcaagtgtgatcaggtcaaagtgtgtgctagagcacaggggagttctgaaccaggattgcccccgacaggtcactcagctctatgtgccagcatccagacatgtgtggaggttccggcggatggggaggataggcccgctgcagtccaccctggacggtgagttctctaggacacagggttactgaggtatgaattacatgctgtcaaattcactcctttaatctacagatctgttatttttcataaacttatacagccatgtcactcccagcaggagctaccatgtagaaaagtttcatcacccacaaaattgcctctagctccattgcggccacctcttcagcagccacccatttctgttttgtcctgtcactttgccttttgcaaaagggctccaaagggaaccatgctgtgtagtctggtcg

SEQ ID NO: 104313 - DNA, 333 bp, Homo Sapiens
aggagcgtaatgaggacgtactggggtgaggaacgttatgggatgaggaagtactggagttaactggatagtttcataaaattttttaaaaacaaattaaaggctgtacatgattttactttattgaacgaatcacaaacagtaatattaagaacatacaattaaactttatagtttatttcctactcactgtttagggatactttcatctattattgcaatatgactcttacaatttcaaggtccatagggcaatatctttataggaatgactgtactaaacatatttgtgttccctagcactgcatctaaattcctacttgtcagccgtac

SEQ ID NO: 104314 - DNA, 243 bp, Homo Sapiens
  misc_feature (15)..(15): n is a, c, g, or t
tctagaggatcttgngatgaggaagtactgggtgaggtgacattaaatttgcagcagttctggagcaaatgtagattagttagtgcaggcaggttatcacacaaggatctgacatgagatagtcggtgtttgtatgaacttgagcacatctgttaaaactttctaggtccacgtttcctcactctgtaaacacttggggccgaggtgacagtggctcaccgccttgtaactcccacgcacctt

SEQ ID NO: 104315 - DNA, 300 bp, Homo Sapiens
tgattagaggatcggtggatgaggaacgtactagatttaaaaaatgatcacatcattaattacgtgtaaagagatcagattaccaaaatgtaggtgaatgatgagaaaagtcagtaggagcaaaagcaataaatactcttctcccatttgctaccacttacttttgaagttgcttcttgtaggtaggtaccaagaaaataaagaggtcatattaaagagacatcaccaggaatcatgagtagcaatttcaaaccataaaatctgacttaaaaaaagcgtacttcatgaaaacacaccaag

SEQ ID NO: 104316 - DNA, 140 bp, Homo Sapiens
aaagaaaggagtcttctgcggggaactagatggccaggtgtctaggagggcttttcctggtgggagggttggcttgagtaagtgaagcctcatcgcccgggtgctgttgagcttaaagaaccagtagatggatcccattc

SEQ ID NO: 104317 - DNA, 288 bp, Homo Sapiens
  misc_feature (94)..(107): n is a, c, g, or t
tgcctgacccacgagggcggaggtttcacatgagctgagaattggggcactgcacttcaaccctgggcgacagaatgagactcggtctcagagnnnnnnnnnnnnnngagctgcttcacatataaatgtctataggctagtagcctggccctttaatgtttaatttgaatagatatatctgttttccgtgaattatcttgaaagttttaaacagaatgacctcatagtttttaataaagaatattatttacctaaaatgtgctagtagcatcttgcccagccagtgca

SEQ ID NO: 104318 - DNA, 327 bp, Homo Sapiens
  misc_feature (274)..(274): n is a, c, g, or t
acagcaaagttaatacatgtacattggctcctgcatgtgaaatctcctgctactaagagaatgcgggagagaagaggtctgaataaataataccgtgtgccactgccaccatctggaaccctgcacgcttactgcggtgtctcactctcatctggccaatgttttcagtccagaaaagatctgatttcccagccattgcactccggcctggagacagagcgagaccttgtctcaaagaaaaccaaaaccaagtgcagactctgagccccagcanccttgccatcctcaggtatacacgtgtcctgctagcactgggctacactgcag

SEQ ID NO: 104319 - DNA, 464 bp, Homo Sapiens
cgagctttcggagtgcatggctcacacgtgagtgttacaggaggcttctgtatccttgctggctattgataggggaccttggttactctccatgtaggcctccccatagagctgcttgtggtgtcctcacaacatggctgctggtatcccccagagcaagtgatctgagagggagagcaaggagaaagccacaatgcctattatgacctagtctcagaagtcacactatcagttccaccacttttactcatagaactgagtcactaagtctagctcacactaggaagggaagggatttaggcttcacttcttgaagggagggtataccaaagaatttgtggacatattttaacagaaaattttctaattcaaataattacaagacctctatcaagacaactctggccaggcgtgatggctcctctggccggagtgcaatggctcatgcctgtacatcccaggca

SEQ ID NO: 104320 - DNA, 148 bp, Homo Sapiens
ccggagtgcaatggctggccggagtgcaatgcctggccggagtgcaatggctggccggagtgcaatggctggccggagtgcaatggctggccggagtgcaatggctgggcttggactgggcctagagagctttgttatttttattttt

SEQ ID NO: 104321 - DNA, 558 bp, Homo Sapiens
aatggctggcttccaggaagtatagctcaggaagcggtggccaagaaagtagtggtctttcttgcccatgaaaatattactggagcagaggaggcgctccacagccagccactggacacagctgagccacaagcccacctcctacccagcagctccaggttccccgcagaccccccccagagaaaaaccttgagaacccagcacagtggacactgcagggcatccaggtggcacttggacactctgggcactgggcttgagctgacaggaagctcccagggttgcagtggctcccacagccctacaagacctatctgccctcggctggctctactcggctggctctactccgggttcttttctctcctctcccttgggaggtgtttgctggccgcccagggacagagcatctttagaggacaaagggctactatcccggactcagggaaaaaggccagtgtctttgccgtgacagtgttttaaccccattgtcccacaaactgagcaggatgcagtcatcacagccattggcactccggacgggtacgaagctccaat

SEQ ID NO: 104322 - DNA, 500 bp, Homo Sapiens
cgtgactctgaggatctttgcggagtgcatggctggatccaaaaccacaaaatcagcctcctggagtttcctcctcctctctgcgggtggaaaccccaagtcagctcaagcgcctggcattccgtggaaaatgtgtgtctttattgtccatggcaaggcaccaacagccgttctgaacaggatgctgactcacatctgccgagacacactgactgcacaaagaaaatggatttcattttgtgtttgcatgaaggtctcggcgagagtgggggttgacttggaaaacaaaggaaaactgtccagatcctctccttaactagattatggggaagaccacgacttgacttgactaagataactgagcataccagtatcaaagctgagaagaaatcatctttactaaaagaaggtcagaggcatgccacaaagagaggacaatgccacagagctatgggtgtgtacacgtggacgtagttcatttattataataatagtaacct

SEQ ID NO: 104323 - DNA, 70 bp, Homo Sapiens
  misc_feature (14)..(15): n is a, c, g, or t
gtcagctgtctgannctcctactcagtgatctgccacctgcctccagtgtgggatacagatgagccatga

SEQ ID NO: 104324 - DNA, 253 bp, Homo Sapiens
atcacagcatcaggtgggtatgttactggcacttagcattcggacatggtccccagaggctctgtggacagaggtgccctgcagttcctttgggaattgcagaagactactggaacttccacccaatgaagctggtcatgacccttctgctgtcggctgcccaaactgcagtcatgtcattgggttgaggctgtcgagtcctccattttaggtgtaacagatgtggggagagggagggggatggagcacccat

SEQ ID NO: 104325 - DNA, 287 bp, Homo Sapiens
tacccatgggtgctccatccgcccctggtgatgaggtgggtgttggcaggaaaatatgaaagggtcttctgaccatggcttacagagggcttggtgctggggggcctggagttgtggaaagggtgaagggaagagttggtcccatattcccagatggcagagtggaaacagaagcactcggcccctgagcagccttcgccgtctttacagtgaacacagtcctcaaaccaatactgggaaggattcgaatcctggatgggtgattgtcctgctcgtgtagactgaca

SEQ ID NO: 104326 - DNA, 264 bp, Homo Sapiens
aaaacccatgggtgctccatcccccctatgacgaaagaaaaaaatggatgttggagaaggaagacatggtgagtgacgggaccacaggaagaagtcgtgaccttcatccttgcccttatgtcctggggcaagtcgtggaagcttctagagcctctgtgttcttatctctggaatgagggtgtacagcaccttctaggaagattaggagactgatgtgcttgagagtaacctccgacagaccgactcagcacttgaggggtatga

SEQ ID NO: 104327 - DNA, 246 bp, Homo Sapiens
agtttgtcatccccacagcatgctaggttactatttgcctctaccccattccacaggccaagggctcaggatcacctatgatccagcaagatcagcctcacccactataccccacacagcccatggttggcagaacccctcctacaccctgaactctgacacagagaggcagccctggcccaatgtcaccagcacccattcctctcgctgccaatgacagtggggggatgcgagcacccatggata

SEQ ID NO: 104328 - DNA, 641 bp, Homo Sapiens
ggaccatatgtgcccagaacctgtgtgtttgtctagtgtgtctgcatgtgtgtgtactggaggcagcgcgtaatcatggaggtgcttccacaagatctcagaaaaactcaaaagaatgttctaggatcttagggatgggttttcccaaagactcaactcttcccttttaagctgggtcctctgatgccacatgcagaattgctggaatatttgcctccttccgggcgttagaaaacagttgtgttttcattccttgaacactttggtcacttagagcctgagccaagacctaagcaccaataccacattggactcaactcatggaaacacaagcagagtccagtggtagaggccagccctgggatccaggagtagcctcaggtccaaggagagagtccaggctactcctgagcttggaattcacactcttccccctcaaagggaatagttcccaatggccctgggtgctgtgtcatctgggtgtttgtcctcctggtcttccctgtgatgagagactgccatggccatccaacaatcctaaaggtccccaagtcctaatatgtgaggatgcagggagcagggaaggcagaagatactctagaccgcagtgtcgttctgggcacacagagatcctctagatc

SEQ ID NO: 104329 - DNA, 216 bp, Homo Sapiens
ctgtgtgcactggactgcggcaaacacagcacacctccaggaacaggagtaaacaaaagttggtaggctggtgccagcctggccctggttggaaatatatgctcagctcctgactcccggggtaggaggtgggagtttcccactctttagccgggcctgaaacaaagggtcaggagacccagggaacaggaacaccagaacctgcagccacaccag

SEQ ID NO: 104330 - DNA, 254 bp, Homo Sapiens
gcagaggtgggcctggaggaggtgtggggcagggcctctcaactctgtctgatagggagcataccttgaattcctagtccatccagacgggtccttcagtagtccatgtttagatgtagtgccgatgtcattgctaggagctttctgaaacactttcactgtgcttaccttgcagaccatgcactcagtggcccggtgctggtgcttctgggttcatgtcagaaatttctctgactttcactcacagtgagatg

SEQ ID NO: 104331 - DNA, 309 bp, Homo Sapiens
ccgttagtgccagaactgggtctggacacagtaccatcaggactctggttaggggctaaactatcctctacacacacagcagaacattaaatgcccgtcttcttgtgggctgcagtcagacccagagaagaggcaacagctgtaagaggatgcacatgacaccgccggggctagagggttggggacatctcatgggaccctgggcgatggggggtctgtggggccctcacgtgagactctgtggtaacaggagggaaatcttgaggacccttcaatgagacccttgtgtgacttggggtgtgggttctt

SEQ ID NO: 104332 - DNA, 702 bp, Homo Sapiens
aggacctttgtgtgccccagaacccaggaagtggttttctatacaagttaaaaactgaggttcatattgagagttggatcatgggttcctgtggactctatgggatagggtgtgaggtcatggattgttgtgcagggcaacatcagggatcattgtcaacaatgaaggcaagaggttccacacacagtcagggtccttgaagaggttgaggacagggatttctgtaaagacagagctgggtccatggtttactactcagattattgtgagtgaggtgtttttaaaatgctacctggaggacaggactgcagcagtgtgagtacaaaggtgttcctgtctgaggtcaagacaggattcgtatagggagactgaggcttgtgtggatggtcaggacaagggttcctgtccagggtgtgcaggggcttccttacagcttagtccagatgtccctagctggggttaggcagaggttcctcctattcagggtaagcgctggcattcctgtacaggatcaggatgggtttcctgtcgataattagatgaagggctcccctagagcttcagagctagtcttctgtaccaggctgggggagctatacttatgggggtgagcctcggggctcctggaacaagtgggccagcatatgtccagcacagttctgggcacacagaagatcctgtagagtcaccccgcagcaccct

SEQ ID NO: 104333 - DNA, 176 bp, Homo Sapiens
agactacacgtgcgtgccaccatgcctggcacacattcatttttcattatctgtgtctgtatgtgcccagaggtacagataacactaaaatgaaaagaggtggcagagaacaggaagagaaagaaaccagaggagccgatatccttaaatgccgtggctcctaaggactgccagca

SEQ ID NO: 104334 - DNA, 548 bp, Homo Sapiens
agaacgaaccagagcagtattagaagcctgcaatgataaacactttctctgctgaatctaccacccaaccccatttccttgaggacctgagagccttctctttgcaatgcaaacattcagggagctcactcctgatcttcccagtccctgtcgaaagagtagagcctgacttcagtgggttcttcctgcggtctaatgcatggcttcctgtcctaaagataagaggagtttgtttctgccccaggtgagccaggatgaagacatccaggtggtctagtcacatgaaccaagcactctccccatagaccacagtgtttcccttggcacacctggcctatgaaacgtcatacaggctcttgtttcagggatgtgagtccactccacgctggactatttcccctattgcaatcatattactgaataaatctgtcctactgctctaaccagggtcagttttgtttatcttcaactggaacggagaacacttctttacttttagaactcaattactttttccatttatttgtttccaacttttattttaggtt

SEQ ID NO: 104335 - DNA, 595 bp, Homo Sapiens
  misc_feature (449)..(508): n is a, c, g, or t
tcatctagagcatcccctgtgtgccagaactggagtgggggatcaaataccagagataaaggctgagagacagacagagagggacagtgagagcagaggctagagaggtggaaatgtacaagtagaaagaagaggcccagagtgaggcagaaggagagatgggaacctaacagaagcaaggaggctctgagtgtgagacacagcgcagacataaacagagagggggagacagacagcacgggaggcagctgcgctggggcctaggggtcagcaccgggaaccaaactgggcacttccagccacgaaaaggggcctgcaagctggcctccggcaaggggaggactttcaccttgggccctgcggtggagacagagcctaaggcagagagagagggggagaaagggagagacagccaggcagagcactggaaacacgggagcgggggtagnnnnnnnnnnnnnnnnnnnnnnnnnnnnnnnnnnnnnnnnnnnnnnnnnnnnnnnnnnnnccgacggcaggacgacaagggtgggagagaatgagaaagggaaccccagaaacagtgggggtgacaggtgtctggactgaactagac

SEQ ID NO: 104336 - DNA, 584 bp, Homo Sapiens
acctgtgtgtgtcttgcgctctcttccgtgttcattttcggcttctccccttgtctgtcctggcagtctaacagcccctcattgttcccccagcctctccttctcaggcctgtctacactttccttcctggctgctaagatcccaaaatttgactgtacacattacccctggagaagtcatcatccatagtctgaggcagtgctgggagttgtagtccctcactcctgatgaggagaaacccctgcagcccggagtgcatgtgttgtgcatttatattcacttccaatccatcttggtggtgccaagggtcatagtaactgagggaactgagggtctctcagcatagaggcagtccctggcattcagttgccctcacccccatcccctagccctgcatctcagcagggggtggtatctaactctcatcccactacctacaacttccgtcttatccactaactcctgcactaatgatcattccctactctccagaaggaatggcttcacccgtccccagacccaaagggtctcaacagtacctacatgctggagaaagacattccctgggcgtaccgacgctcga

SEQ ID NO: 104337 - DNA, 519 bp, Homo Sapiens
cttttgtgccccagaaccctaccactgatgattatgtatagtgtctactctttatttttaatttctttatttcaatgtgcagcacacagtgaatacatctattctttgcattacccgtcttgaaaggcaggataacatttgcctcatcttccgttatacctctccatgactttttctcagaataatatatggctctatagttatatctgctaaaactatttttttgataataaaagaaactgttagagcctagagacctgaacttatttacagagactatctgctctgtcttctctcacctaccattaattatctctttctgctgttatttctatcttttgcagtttgaaaatcattttccttcctagaaaaggcagaagtgaaatatgagctaagcagtgtgcctttctaacacctgctagccttacaatattttctctaagcactgagtgttatccttcttacgccgaaagaagcaaatgatctcttagttgtccccctacatgtctttttcttttt

SEQ ID NO: 104338 - DNA, 598 bp, Homo Sapiens
atctagaggatccttgtgtgcccagaactgagaagaagagatctagtgggggaaggggagggaaagtgtctggagagacaagttgggatctggtattgggtttctgtcactgtctcttctccctccaaagtcaactaatactcagacaataaggcttaatgaccctgttagaggggaaaggtctatgcttcaggagaggatgctgtagagtggtaggcaaccatcattcctcttctgaatatagtggtcattgcattatgggccttcattgaattatagaaccatcaggaggatgagatccaaaccaagctggatggaaaccacatggatgaggccccagagagtgaggacgccatacaaatgtaatcactgagctgtctgaatcatcttgagaaaattctacaagtctgtatacatctgacttccccatcagttacacactttgaaaggaaagctctagggagaagagtaccatttgcttccccaatgctaggagaggaaggtgatgagaccgagattactaactaaattatttcctgtgacttcttagacaagctgtactcgcaaggtatgacgcttgcatatggggacgcgcaaa

SEQ ID NO: 104339 - DNA, 388 bp, Homo Sapiens
tccttgtgtgcccccagaaccggttactgctcccaatctgcccattttgaggaaatgaaaccacctattgcaaccagttacgcggcaaaaaaaacttaagattggattcctcgttggcgtcggtgcacctcaatcagcacgtttttggcttcaaacaagtgaaatatataagcaatccaactgcatctcaccaccttcatctaaactgtcacttctcaggctgggcgcagtggctcacagcctgtatatcccagcactttgagaggggtgagccaccacacccggtccaatagtgtcaaagttacttgaaaacgctaccagccaaactgaactggtttcttgctgaaaattcactaggattgttcgcgtgtattcgctgcacacagga

SEQ ID NO: 104340 - DNA, 229 bp, Homo Sapiens
ccagggatgtttctcagcaatatctggctggattcactcttggctctgcctctcctgtgctgcctgtcctggcctggctgagtgctgcaggggtcaggggtcaggtgtagctcattccagagtgtgaactgggaacacaagctttggcctcatgctggctcttcaacatcagccatttccttatccttgctcagcctccagctttctatccctgctcaacaagtgattc

SEQ ID NO: 104341 - DNA, 207 bp, Homo Sapiens
tacttcccttcctcccctccatgacactcgctgcatttcataagcagcgatttattattatcacagaataataaataccctgcagtagacacttttaagaatcggagacatcacgattctgcagagattgtgataacatttatttaagctggcattctcatttttcttaattggcatggctcacgcaagagtcctcctctggcactt

SEQ ID NO: 104342 - DNA, 283 bp, Homo Sapiens
cagtgtagctgaaacagaggtgaaatactgaaggtaagcaaatacgaatggcgaagtggcctggaaaacaaacgccatattgacagttgatgaagagatcaagccttggaacagaacgaggtgaggtggctgaaactgaggcactcacctccaacacaaaaggaggctagcataggtcccttctagggagggaggatggatggcaatgatcccagctcaggcagaagcaatcgtaaatccttgttgtcgaaaagtatccctaaagcagtctctcaggataagc

SEQ ID NO: 104343 - DNA, 297 bp, Homo Sapiens
gcactttaggatgtattctcagcctgaggacttctcgtctgtaccagctactctgcaacacacccacatttcagctggagtcgttcgaagctccccggagtcaccaccaatctcaccaattacactcaattactctccagtctctctcatgtcttcaccagccctcagggactctcccggtctgtccagctactctccaacaaaccccagatttcagctgccagcagcttccttgctccccgggaactcacaccaaacctcaccaactttcacctcaacttacgtctcccgctctcc

SEQ ID NO: 104344 - DNA, 270 bp, Homo Sapiens
ttctcagcaagaaacgtgaggattaggcacagggcaaaagcaatctcagagaagtcatcaaagcccaggggctgcacggagacttcagctgccatgtctttgaggactcggaacccacagcgcaatccctggtccactggaggatggactgttccccccttcaggccggggccaagagtgagctgctaacacggcatccaagaatggcccagctggtaggatccttgctttcccctatctgctggacccaaaactaatctcaacaggccc

SEQ ID NO: 104345 - DNA, 579 bp, Homo Sapiens
tgatctagaggatccttactgtgcccaaacacaactttccaaaacccttccattacagttgttcattacaccattccctcactcaaaaacctgaatgtctccttaggacacacagggtggcatgcaatcaccaaaagggctaagactttcacaatctcaaccattgttcctctccacctctatctcctactgttcaggatacattccctggtatggctaaggacatctccttgtctctctggaaagccatgttcattcccacctcacagactatctcaacagcgtcagcctccagtcctggtgactgatccctgcccacaactcccttctctgactccaacagaactatttctgcacctcgcactttgacagttaccattccctctcttggcgtctgatttcacatgctgacatccttctgtcccctctatgagggcagaagccctggagggagggaatcatctcttacaccttctgtctcctctctccccgagacaggtatgagcctctgctcctctgctccactttgtaaattatcccacctgttactttcttctcctcttgtctttgggaacaggt

SEQ ID NO: 104346 - DNA, 332 bp, Homo Sapiens
ggggtggtggctcaagcctgtagttccaggtacttcaggagattggcgcactgcaacagagtgaaaaaacctatctcgaggtttaaaagaagatgggaggagacaaaagttctggttcttaattaaataactatactgttgaatcaggcaaaaatacttacaaaatgtagaaactgagactccaaataagataaaccaggtttacaagtcactgtatcagcttggaggattcactgtcctcattcatttcatccattggcccataaggaacattatgttcttgctgtggcttctcagtggtatgtattataatagacggtgtgtgtttggga

SEQ ID NO: 104347 - DNA, 384 bp, Homo Sapiens
catgccaacacacatatatatgtgcatgcctatgaagtccttaaactcagggactatgcctatttgtttctctattgataaatgtgatatctagtgtgtggcagagctcacaaccgtgtactaaatgagcacatacttccttctaaaattctggtcgtgtccccctcatcagttgcagtctttgcagggcttggaaagcactgctccttcaggagagggctttgtcctcgtgccccctcccccagggtcatgtcctgagtgtgtgagcctactcagaggactggcccacactaaatccatgggcaggacccatgtgggcaagctgtgggaagccacatggtattattcctctcatcattcgaaaatagaggccagcttaatgtg

SEQ ID NO: 104348 - DNA, 593 bp, Homo Sapiens
cacctgttccccaaacacacacacacggcaacataatattcctgggggtcccagccctgaccaggaagaagctggacaggtggtggagaagaaggctgcaatccctcccacaatcccactctgcaagacagaagggtgagcagcattctttcctgctgcaagaggaagttggaagctccatccccagaacagatctcgatgggaggacatagaggaaggagctttctatcccctttctcagaggggacaggaaccagcaaagtgtagttttggcttgaaggagcaatggggaggggacttcagcaggatgaacagacttatgggtccaggggtaaatccatcgacctctttcccgtggagcaggaagttgctccacgggaaagatgtcagatgttggttgagacatcgtgcaaagtgcttgagtgccaggtgcccaaggatctggcgggtctgactggagcctccactctcactgactgtttgcctccagcttgtaggagagctcgaagaggaggttctggttgtcgatgacctgaaactggcgcacataggccttggtctgcaggtgtttgggaacagtcggatcctctaat

SEQ ID NO: 104349 - DNA, 504 bp, Homo Sapiens
cccgtatatccataacatcactaaatcataagaaatgtctacgagtataaatggcaatgacggttcttaaacactagcaagtgtaagattcaccagagaagcctgtcaacagcgcagatcactggactccacctgccaagtctggggcctagaaatgtgcccatcagcaagcacctcaagggattctcttgcagacggtctgcctctgagaaactcccacctggtctaagacccacaggcaatgctaatacaacacgtccacacacacgcttacacttctaaaccttacacttcacctccgactttcctatcccagacaacactgcctgaggtgaacaacactgccaccaccagatgcagctgcacctctgttccctcacctgttccttttcaaacaccagactcttattagttcaataaagatgattaaatgttagaactaaagactcaaaagcttcgatgatgccatcttaagacctcttaaaaatgtgaaaggatgccttc

SEQ ID NO: 104350 - DNA, 406 bp, Homo Sapiens
tctgctccactttgtaaattatcccacctgttactttcttctcctcttgtctttgggccctagcgggtgagttactcgtccacaggcataatgtacttcaaaacttagtactccaagtcccttcaccaatctcgtttttcctttatctgatatactccctctccagcatctccactaactcaggcagccactgcacattaacttgaacgtaaactcctaaatcacttccacctagtcctaggcttcctgaagcctggggtctcttcggtgcctctcccacctcccagagggcctggcaccgtgctgagagcacagcagctccctgacaggacctgtggagttgaacttaatgccatgtttcatgtgtttcgagtgtttgggacaggaaaagatcggagagcactta

SEQ ID NO: 104351 - DNA, 460 bp, Homo Sapiens
aagtgactctagcaggatcttaactgttcccaaacaccaactgttcccgctcaccaaactgtgatgggagaaggcaggtgaaatgatggttggatgccactgcaagctgccttttctgtgtgggctcttggtctagtgtacatggggccccatggcacactcgagttttacctaggaaggcttcagctgttcattttcgtttgcaaatcctccgtggagacccagggagagactgcaggagttgcttcttatttcttgaccagggtttccgctcccatcaccgtggcttttcggggagccttgctggtgtgttcctgggatggctgtggcctgccactgtgtcctcttacacaggagtcagccctggatgagacctgcagccctgtggccttggactcccacctttcccccaggctgggtccctcaggcatgggcctttcccccagtgttcccttaggca

SEQ ID NO: 104352 - DNA, 583 bp, Homo Sapiens
atcttgaaacatcatgcagcactgctcataatatttgagtcaccataatgtgatctgtctacatatgtagctgtttgtattcatggtgattaaatagttgggtgctagacatgcccttagcgagcagctcatgagagcagattttgcctgtttcttccaaaatctggattcagtgacatcgtgttggtagcttgaaactgaccgtggtgagaatatttacaccatggaaagtggcaaatgctactaataaggatgattgttttagttttcattttgtaattttcagagttggtttaccaatatgatgtctgtattaaaatatatgtaatgctgctttcaaaatgttaagtattatgagaatacattaacaaaactctggcgaattttttgtcttatgtttcttgaatccaaacctataagtaggtgcaaacattagacgatttcattttgggcttctgatacactcctgtccgagaagtgacctttgaaaatgtgtactattttattgtcaattatgttttctttaaaaaaaatttatgacatattaacttgcgaattatgtgtttgggaacagtaaggcatc

SEQ ID NO: 104353 - DNA, 441 bp, Homo Sapiens
  misc_feature (67)..(169): n is a, c, g, or t
caggctggtctttaactactgactcgtgatccacctgtatcccaataacaacaccctggctaattannnnnnnnnnnnnnnnnnnnnnnnnnnnnnnnnnnnnnnnnnnnnnnnnnnnnnnnnnnnnnnnnnnnnnnnnnnnnnnnnnnnnnnnnnnnnnnnnnnnnnnaacaggcatgagccaacagcaaggtattacattatttttcgttgtatatttgacaggtaacagataacgatcatttatatggtgcattcttgctgcaacacatgactgttgatcttcatgtaatgaatttctctaggaagatacaggcctatgttaggtaagggcaactgtggaatagattacataggcatagctaagatagaatgggtgtgattttcagccaattagctgtaattcctcctcttctctgtccactgatgtcaactccagtg

SEQ ID NO: 104354 - DNA, 424 bp, Homo Sapiens
  misc_feature (319)..(354): n is a, c, g, or t
aatgtaacaactggatgtttacgcagcaccactcacaatcccccaaaaccagaaaatcaaatgagacggctaggctcatcctaagagacagttcactgcagccatttcaacctattatatttggtattatgttacagcttgcatactgtacaaggagggagagaaaatggagccaaatgacttcaaccaatcttacttactattctatgtattccaggtatccgctcgaaatatataaagcatacagcagacacgaaataaattttttaaatgaatgcaggaagatacagaaggtaagcagtaagcagcacctgttccnnnnnnnnnnnnnnnnnnnnnnnnnnnnnnnnnnnnaacaaaactggaattctctgcatatggcttatagatcctctataccctatatcctgcccctgatacccta

SEQ ID NO: 104355 - DNA, 320 bp, Homo Sapiens
aggtaaaagcaattactgctgctctgagaaggcatgcaggctccagaaatgacaagagatgaagataaacaagcaaccaacagagaccaaaatctgagctcaagattcaaaggtccgcaaattcccagggagcagaaatgcctgtggtccctaggggtctctgaaacgcagataacaagaaactgcccttgaaggccaatctatgagggaaaaaggaacctacaatcatgggcttttgagttcccacgtggtctttaagaaaaactgggcacgttctcctgtgggcaaagggtcaataccgtacttgaagaaaggaacca

SEQ ID NO: 104356 - DNA, 172 bp, Homo Sapiens
tgctctagaggatcctcactgttcccaaacacatacaagggcatgaagttaacatttatcctgcctcagaaaagttctgttaacttgaaactatttgctctctattgagtagagaagcattcaaataaattcatatagagtagagaagcactcaaataaattcatatagtta

SEQ ID NO: 104357 - DNA, 416 bp, Homo Sapiens
caggatctttaactgtcccaaacaccatatgacacataaccagaagagaatccacgaactgaaagacaccagagggaatatccatcaggaaacaggaaagacaaacagatgacggagtttcaagaggttgaacgtcaggctctcggggtccctggaggagcaggaacggggcagaaacaacactggaagaaacatgatgaaggcctcaagccacagatccaagaggcctcaaactctaaacaggctgaggatacatgtcagcccatcagagcacaagcaccaaaaaccaagggctcctgctcagaaccctacggctgcccatgcccagaagacagaacgtagttcgcaaaagttgcagggacaaaatactgttcaaccttaaaatcttacacacctaaggggaaaaaaaggtcctt

SEQ ID NO: 104358 - DNA, 328 bp, Homo Sapiens
  misc_feature (302)..(303): n is a, c, g, or t
agcttcactgttcccaaacacccacaacgtgcatcaacatctgggaagccaagcaggaatctcactgacgtctctcacacacctcagctggcactctgcccccactgctggctctggagcaagcagagtgccaacaagtcagaccactgatttctgtgctccagccttctggacggtaacacataaactgcccaccatgctcttctttcccagaactgaagcccaaactctgggccaggcttcacagcaaactgaaccaccaagccgagcaagcaccctgagcatgtgagcccgtcccttcnngcattctagttaggcgcaacggatg

SEQ ID NO: 104359 - DNA, 413 bp, Homo Sapiens
  misc_feature (395)..(395): n is a, c, g, or t
cttcaccgtcccaaacacatacaagtctatcttaacaactatgctgtgcattaaattcatcatttccttcctgcttttaaccacaagatgtaggacagaattttattataaagattcaataagatagtacacatatcaagtggacaaaccaagcacctagatgcccctcagacgtctataaatctgctatgctactaaaagatgcctaaaagatcatggcctccttacttgtccctctagaaacagaagcctgatgaccatttagagcccttcagatgtctagcaaaaagcaccaataaactatctttttctacaaaatactgtaaattttatttatttttgatacagagtctcactctgttgcccctgctggagtgcagtgatgcaatcatggnctcactacaaacctctaa

SEQ ID NO: 104360 - DNA, 586 bp, Homo Sapiens
ctcccctgttcccaaacaccggagcacacttttcagctgaggcagaggccagcttccccttgtttgagcatctcagccatcacacactgttggacactcatgctttttgcatctgcataaaaggatgtacccatgttttcctaaataccatccctggattgtcctgtgtgatttcagagtagtctggttattcccacagaattgtcctggattttaatagttgaagaaagtgaagggtgcttgggaattgctaaggtcatcatggggtcctgaggctgtctgaacgcagcaggcagggcaggttttcctgcatggaattgtctgcaggttttgaactggttgtgccctggataccatctactttctgcccaggaaaccacactgaagaggggatgctgcttgtgggagactcagcattcagtgaaatctgcacccttatggtggacgttgcagctgatctccacaacagttagtctctcttcttccaaggagaacacatatggttcctagtaagagatctcaggccatagctggatgtgatcagtgcaaggatgatctcattccccttgcagtgactggttccaga

SEQ ID NO: 104361 - DNA, 535 bp, Homo Sapiens
gatctctcctgttcccaaacacactagcccctgataatccggccacatagcactcagagcctgactgccaaacaccgttaagagaatgctttcattctgcgaatcattagtaacttacaaaagcaaaactacactactttcattattaaggatctaagaggtattttacattgaatattcttacttcttttaagccagcaactaaaaaacttcacatcagttgaacaatattccaaataagcatggcttccaccagtcacagaggctgatggatcagatcacaactggaccccgtctatggtccacagctgtcaggatagggatcgtggagagggtacaaggagaggttagggtaaaacacagattactcaagcacacatcaaactgctctgaatgggactgatgtccggagtgggagggcaggaaggagcagtctcctgggctccctagggtctacgtggagtacgaagacttgagaaccactactcaagatcctcttctctggcagcagacagctctgctgggcactgtggcg

SEQ ID NO: 104362 - DNA, 478 bp, Homo Sapiens
agttccttccgttcaatcttgccagtgatggtttttggcagctctgagacaaactccaccttccttgggtacttgtatgggtctgtcactgacttgacatgctgctgcagttccttggtcagctgatccttgtcatgggacaggaactgtgggttcaggacaataaaggccttcaccacctcccctcgaatcgggtctgggctgcccaccacggctgactccgccaccgctgggtgctccaccaaagcgctttcaacctctgcaggcccgatgcgatacccagaggcattaatgatgtcatcactcctccccaggaaacaaatgtagccctcttcatccatctttcctctgtccccagtgttgtagaagtccccacattccactttagctgtcttctctgggtcaccctcatagcacatgaagaggctcacaggcctgacaggtttgattctgatcctattttccttctgttttggac

SEQ ID NO: 104363 - DNA, 535 bp, Homo Sapiens
catgaccagcctggcccactcttgggttctattcagtgaagattgtcagtgaagagtagacatttgcctgtataccacgtctgcattccttcctcagcaacagaatagcccttcacattgactaaagtgtaaagaaggcctctggcatccaagtcctttgcctccgttttgtccctgcagcctccataatccacttcttgttctctctgtgaagctcagttgaagttcccttcctctgattctgaccctcctcagcggctaaccttttttcaagacaaaagtcaccctaccctgcctctgggaaacccttcaaaccggcaaccaacagcttccagtgccaaaaccaggactaatttgcctcagcgtgataaacaacttgaacaccaactggcattaatcaccatggtaggattgcccctcttcccttcaagggtagccccacctggggacccatgaaaggacccaaatataaggaaagcacctgagaataattctgcctatctcttgtccctctgggaaagtgcctagagagtag

SEQ ID NO: 104364 - DNA, 514 bp, Homo Sapiens
  misc_feature (153)..(401): n is a, c, g, or t
  misc_feature (416)..(443): n is a, c, g, or t
cacctgttccccaaacactcttactatgggaatataaatatggcaattaggacttagagcaatcgtcaggtcaaaggagttttatcagcagcaaccacaaagagattccgttttcaaagaggctatagaaattggctgggtgtgatggctcannnnnnnnnnnnnnnnnnnnnnnnnnnnnnnnnnnnnnnnnnnnnnnnnnnnnnnnnnnnnnnnnnnnnnnnnnnnnnnnnnnnnnnnnnnnnnnnnnnnnnnnnnnnnnnnnnnnnnnnnnnnnnnnnnnnnnnnnnnnnnnnnnnnnnnnnnnnnnnnnnnnnnnnnnnnnnnnnnnnnnnnnnnnnnnnnnnnnnnnnnnnnnnnnnnnnnnnnnnnnnnnnnnnnnnnnnnnnnnnnnnnnnnnngagactttgtctccnnnnnnnnnnnnnnnnnnnnnnnnnnnnttgctgaagatttgtgatttttcacaatacaattttagtagtcagatatagaagtgtttgggtacaggtga

SEQ ID NO: 104365 - DNA, 599 bp, Homo Sapiens
gcgggtgactctagcaggatctctcactgttcccaaacactccttcgaacaatgcacatctgagaactgaatgtattttcactactgtggctgcaagcaagtcaggcagaatcagactctttgccaagggaacttgtggtcttgctgcagtgccacctccgggacccccctacgaattcagtgcttcccaagagtcaccaatgacaggagatttcattctgggcactcctgaatgaatcacaggagcggcttctgcaaggaagtggtggggacacaaatgtacaagcgtggcattttctggattcctgtgaattcattctgtagggaagacagtgccaatgcatgcaaatgaatgcagatcgacaagcctggaaaagccttaattcagcagagcacacacaattgatttctcatttcttcaaggcggtccctgctctgctaagaaacggagactggaggagggaaaggactcggctctgggaggctgtgcaaaagactcagattctcaagcagggtggtttgacctccacttttcattcttgcagcacttacacgggatgcggaatattagtttgcattcagtggcctgcttagtggta

SEQ ID NO: 104366 - DNA, 269 bp, Homo Sapiens
aggctttcccatctaaagtcatgcgtaactaagagggaggggaaatgaaccaagcgaaagtatatagagtagccgtgacatgtgcattattgtctagacgtggacattggcctgcaacaggcataacatgaaactccagagggaatttggattgataggaatgttcacataaacaccagcagtggctaactgttacacaacattcaaagtattcgagagaactgcctggagacagagagcgagggtccacagacacattagcaccatac

SEQ ID NO: 104367 - DNA, 498 bp, Homo Sapiens
ccaaacactagccaccatgagtatagggctagccctttgctctgcccgttgctcagacaagttacttggggttccagtttgataagaaaagacttcctgtggaggaatctgaagggaaggaggaggagctggcccattcctgcctgggaggttgtggaagaaggaagatggccagagctttgtgtccactgcaagccctctggcttctggagtgggtgctgctgctcttgggaccttgtgctgcccctccagcctgggccttgaacctggacccagtgcagctcaccttctatgcaggccccaatggcagccagtttggattttcactggacttccacaaggacagccatgggaggtgagccgtaagggaagttggggtattgggagagagcaggacccctccccatcactgcttctgggggcttcgagtttcccatttgcgatagcagttgagcaaggtgacttgtggggcctattcaggttgatttcttgtccaga

SEQ ID NO: 104368 - DNA, 513 bp, Homo Sapiens
tgcatcctacattgaggatgcagtcatcgtcaatctcatcagcactgtcttcatcagacacctcgccttcctccgcatcctcgctgatgttggctgggagcttcttccccttcacgaggatcttgcccttgagcatctgtggagaggggagtgtggtggcatcttcactgctcactgatgacaggtccagcttgtccccaaggatgtcagtcagatactgggccattttcttctgctggatgacactgcagtggttttcgatggacaggatcactgggtactcattcttgatgaaggcatatttgttgatggtttcaatgacgtctttgaagaggatcttggaagtcagagtgtagccatggtgcacaatgggctccccgtcggggccatcccagcagttcacctccacgcagcgggagccaggctgcaggagcccagcatatatgttcacccgtgactgggacatgagctggtcacccccgaggtaggtgtttggggcacacgtggggtaca

SEQ ID NO: 104369 - DNA, 269 bp, Homo Sapiens
cgatgtagaggatccttacctgtacccaaacacacacacaggcaagagaaaaccaaaaactatgtcccatatcccccatatctgtacccaccaaatacagataatagaaaagattagtgctaactggcatcctaatactatctgaacttaaaatgcaaatttaggctggagtcccaggctctgacctcaccatcccataaaatacaacatcatcttgtgtgggataaaaatctctacctttcatccttctgttattattttatttttta

SEQ ID NO: 104370 - DNA, 381 bp, Homo Sapiens
cacctgttccccgaacaccattagagcacctggtatgtagtaaacctctgatcactgctcttgtcagaggcacgggacatgtttccatgtgcacccagcctgttctcaaatggattctgtgagggcagaatagatcctcttcatcacccaaggcaggctgggctctttctcctggcccctcattggttcattcggcagctgtttatttagaacctgccgtgtgctagggcagatctgggatacagctgtggacaagggaggatgaggtgtctgttttcatagagcttttggggagaccagaattaaacaatagtcatacaagaaatcacaacatagatcatgtgagtgtatgggaacaggaaaggctcggtgagtcacccg

SEQ ID NO: 104371 - DNA, 365 bp, Homo Sapiens
cactgtccggagcagtagggaaaacattttaagaaaaatactaataaatctaatcctctccaaaagggctaaattagtgcactcttctagcaggatctgaagcccaagaaataaagtgccagccgcaattctctttcacaacagcagggtaagaacgagagtctttgttcaatctttctccacttctgactcagtcacttactcagcagggtttatccatttcactacttcaactttcttcccaaacttcttctggcctcctccagcagtttctctttcccaacatccaaattctgttcattttccataacccattagcaaaaatagaagcatgaggccttagccaaacaaatccaagaaagtct

SEQ ID NO: 104372 - DNA, 363 bp, Homo Sapiens
tgtgcgtacatgtggttaccctgctgagtctggatttatgatctgggcaaggagattggcactacctctttcctatcttctcacagcctactattcagttccactttagacacacaaagttgaggccgagctggcaggctgagcatgaggagcaggagtgagggagcaggaacagtgatgcctcatgcccaccctgccaagaggggaaaccagcaatgcagaaatggtccccttacccgtttcctggacagaggaatgtctcctttccttgaagtctcctgcaaaagctaaaaactaaaaattcctggcaggttgtggtggttcataccggtaatcccacgcacttatgggaggctggttttt

SEQ ID NO: 104373 - DNA, 529 bp, Homo Sapiens
gaggctagaggatcctcaactgttcacattcaaagctgacagtgtctcagagaacgaaggaacctttatcttggagcctttcagcccgcccagctggtccttgtcattcaggccccacacaaacaccttggctcttatcgtagctgctgattgcccagcagccttctttctaatgaggcttccgctgttgcctttctcatcctcctcctcttcattatccgaagctaagaaaggaactgcagccaaatcttcctcttctgcacggatccgtcccagcaggatgagaccatggattttacaatcgattcctgagctcctgcactgctttatagcaatttcaatatacctgtgatactctgtgcagtcattcagaaggggcactgtggtgtcagaagggttaatattgattgtctttagttcaataaggttattcagagaatttccacctgacactacaaccagggacggcatgtagctactgtcagcaggatctacgatcatttttaatctatgaacaagaacatctggg

SEQ ID NO: 104374 - DNA, 507 bp, Homo Sapiens
taactcccctttccttgcctatactgccacagggcttcctggcccctccgtggcccgcttggcaccagcatccttgcggcagaagctcctggctggtctgtctccctcagcaaacgaagtccctcggcagcaggagtaacaccaggctcacctttgcacacgccccagggcctcatgtgcaaacagagcgcatcccataactgcttgttccatttaattctcttcctcactgtgcacgtgtgtgaatgattaagcattttaaaggtacaccgtatctttgaaggaattaacttccaagaacacagcacattctctcacgacaaaacccagctaggtgacaccctcttattcccccgatcccaaaagcttggctgtgggaacatgaccacacagccctatccttccagaaacggcctcatttgtttaaggccttacctacaactctccctacccaacctgtgtaaaagaaatgcaatcagtgtttgggaacaggtaaggatcgtctag

SEQ ID NO: 104375 - DNA, 495 bp, Homo Sapiens
gacctctactgttcccaaacacaaaacacatttcaaagatgggtacaacattggtgaaacatctaccccaacctctattttcagccaaaatgcttctgaaaggaacagctgatgagcaaccacaattctgaaccattttgagcaactctccgtaagtctgaagcaatgtaactaatgtccctaatcatggaaggatcagcaacaagagaaccaaaaaattcctcagaaacaagtctccccctacccccgccttctaagaaacaaagtaagaacattgtctccagtatggaacgggccttccagagtaaagtcctgttatatatcccataaacagtcaattgaaagcaacactttgttcctgtagaaaaaaaatgccacccacagaatcagtgaagcttacaaattgccacccacccatcatgcctacatgtccttcggcctttacaaagactaggctagtcagactgtgctccagtgagctctggcagttccggt

SEQ ID NO: 104376 - DNA, 421 bp, Homo Sapiens
cagatatgcactgcttccagcatggacagcagagcaagactccatctatagtaaataataaactaaaaagtccttccttcaatctgaccatgggccttcctgcttccctttcaactctcacttctcaggaaagatgcaaagtataatggtggccactgaggtcccttaacctttccagagcccccacttgttctgcttggagaaaagccagagcagagatgacctcgcagctgtcagaggatatgaaaaaaatgggcagaaaccgcagcaagaactgaagtcagagttcaggaagggcttcctgaccgcacgggatgtgagagaatggcaatgtgcaacaaaggaagttaaggaacctctgcccagtgcatgaggacagaaagaataccgtgagacctgtgtttgggaacagtatagtccg

SEQ ID NO: 104377 - DNA, 201 bp, Homo Sapiens
aaaacacacacatctgtgggagggagattctcctgcagtctgggactttctcccgcagagggcaggaacaggtggcccaagggagagcaattcaggcaatttgtgtagatccaggaaggccatgcctctggtctcccgagagcctagtacatcacccccatggggagtcaggcccctttcacagtgttaggggaacaggtg

SEQ ID NO: 104378 - DNA, 188 bp, Homo Sapiens
ccttactgttcccaaacaccactgttccttgggggcacccccacactctaccagccatgctgctgaaagtcagatcctcaagctgccatcagtgcacaaggcagcacagaggcgctcagtaactgtggctgcaatctggcatccgctgcagcattttgaccttatacacaagttttggcgaacaggtt

SEQ ID NO: 104379 - DNA, 381 bp, Homo Sapiens
ttcactcatctaggttgaagaatttctcgctagatcaggcagtctgtcatagggggtcccacactgtctgagtggccaccttcccagcacaattccttccagagggaactggctggttctatgactgaggcctcagagagtcggggctgaaatggtgctggcgctgctctctgtgctgggaaatccacacggcttttcctacaagactgttctggcaggtcctctgttgtccctgatcccccagggtgcatcagatgacttcaggagcccatccgatgccctgggcttcctccatgagcattcatgtcacctgagcttgtgacagctgtaacctggctgcctcctgcatcagactgtgaattcccccaaggtcagggattt

SEQ ID NO: 104380 - DNA, 414 bp, Homo Sapiens
taagatccctcggagagaatgtggagagagatgagagggtgtgtgttgtgtaccatacgttttctgcacatggcatgaagaaatgtgaggggcgctgccttgcatggaagggcagccttgtcacattattctaatggggagccctaaactaagcctgctgaactgtttggagaggaccttgacgcaggcagtctggagggaactgtaggtttccccgttaaagaagaattgtaaagcagcccttatgggatgggcaggagtgacctggggccaaaagcccagcagaacaagcagcccgaaatggggctaagagtagaacccctctcctcattacccccacacagtgattagcgtggagcagcttgttcccccccatcgggccggctgcccgaactctgctgtgcaccatgagcc

SEQ ID NO: 104381 - DNA, 435 bp, Homo Sapiens
gttggaggtgtgagagctggactgacttctgcttagcttctttgtgtcatctgggcttcatttaacagtttatcactgtaggaactcagggttttagcttttcttggcagatcttcctttatcactgtctggagggcagattcagatgcactggcagccctgttggctgcgtcctcggccgctttgatggcattgaggatgttctcgtaggcggtggcggcatccacagcacagcgcaccagctcatccccgctggcgtttctcttgatctcttccagctgctttgccagctcttgtaaggaccgcgcgtgcttttctgcctcctccacaagggatgttttgccagcagatctggaaagttctcttacttcgtcacttagttcttgtcttgcttcatttaaactggcagctaatttttcatattccttctggcta

SEQ ID NO: 104382 - DNA, 519 bp, Homo Sapiens
gtcactctagaggatcttgcaggagagagaactggagagctacttgtgaggagatgatggcataggtgaacagggaggcatgggcctcactccgtgccaggaagaagagcggacagtgtgggagctggaactgggaagaagcctaaccggggcgtgggcttaaatggtcccatccctctgcatggtaaatgcgcctgacagcaatcacttaggcacaccctgagaatggccctgtatggcagcggcacctgcatggggttcagggcttccaagctaacgaaactcagcatgagcgccaactggacatccgtcccttatctactgaggaacatctgagcagcttccccgccctgctgccaccactgcatgcacagggggtctggactgtttgttttggggtatgtgaaggctgccaggtggagattgtcggggaggtgccaagtggacatgctattggtatataaactgcatgccttttgaaagcgggtgtggttctcccactcagcccgctgccacttg

SEQ ID NO: 104383 - DNA, 164 bp, Homo Sapiens
gtgcaggagagagaactgcagcaaaacacaacacagacaaacctctaaaaaataaagaacatctcaaaacaaagattgaaagtcatgccagagacatgaagcacaccacgtacagggaacaagcttaaaaattatagcaggaccagcccatgctacatggtgag

SEQ ID NO: 104384 - DNA, 246 bp, Homo Sapiens
gcccgtttgaatgttgacgggatgaacatatataagcaatgacggcagcaataaactcaacaggagcaggaaagcgagggtatcctacaaagtccagcgtaccataaacgcaagcctcaacgcagcgacgagcacgagagcggtcagtagcaatccaaactttgttactcgtcagaaaatcgaaatcatcttcggttaaatccaaaacggcagaagcctgaatgagcttaatacggggggtttcct

SEQ ID NO: 104385 - DNA, 618 bp, Homo Sapiens
tggggtgactctagaggatctccctaacgacgtatggtcagttccatcaacatcatagccagatgcccagagattagagcgcatgacaagtaaaggacggttgtcagcgtcataagaggttttacctccaaatgaagaaataacatcacggtaacgctgcatgaagtaatcacgttcttggtcagtatgcaaattagcataagcagcttgcagacccataatgtcaatagatgtggtagaagtcgtcatttggcgagaaagctcagtctcaggaggaagcggagcagtccaaatgtttttgagatggcagcaacggaaaccataacgagcatcatcttgattaagctcattagggttagcctcggtacggtcaggcatccacggcgctttaaaatagttgttatagatattcaaataaccctgaaacaaatgcttagggattttattggtatcagggttaatcgtgccaagaaaagcggcatggtcaatataaccagtagtgttaacagtcgggagaggagtggcattaacaccatccttcatgaacttaatccactgttcaccataaacgtgacgatgagggacataaaagtaaaatgtctacagtagaagtcaata

SEQ ID NO: 104386 - DNA, 296 bp, Homo Sapiens
atcatagcagatgccataaggcatgaaagtaaaggaggtgtcagcgtcataagagggtttacctcccaatgaagaaataacatcacggtaacgctgcatgaagtaatcacgttcttggtcagtatgcaaattagcataagcagctatgcagacccataatgtcaatagatgtggtagaagtcgtcatttggcgagaaagctcagtctcaggaggaagcggagcagtccaaatgtttttgagatggcagcaacggaaaccataacgagcatcatcttgattaagctcattagggtta

SEQ ID NO: 104387 - DNA, 483 bp, Homo Sapiens
ctctagagatctgctcatcaggtaggacattagagcttgtatgcagatttaataccagcatcacccatgcctacagtattgttatcggtagcaagcacatcaccttgaatgccaccggaggcggctttttgaccgcctccaaacaatttagacatggcgccaccagcaagagcagaagcaataccgccagcaatagcaccaaacataaatcacctcacttaagtggctggagacaaataatctctttaataacctgattcagcgaaaccaatccgcggcatttagtagcggtaaagttagaccaaaccatgaaaccaacataaacattattgcccggcgtacggggaaggacgtcaatagtcacacagtccttgacggtataataaccaccatcatggcgaccattcaaaggataaacatcataggcagtcgggagggaagtcggaaccgaaaagaagacttcaaagggaaccaaacaggcaa

SEQ ID NO: 104388 - DNA, 281 bp, Homo Sapiens
cctccagcaatcttgaacactcatccttaatacctttctcttttggggtaattatactcatcgcgaatatccttaagagggcgttcagcagccagcttgcggcaaaactgcgtaaccgtcttctcgttctctaaaaaccatttttcgtccctctcggggcggtggtctatagtgttattaatatcaagttgggggagcacattgtagcattgtgccaattcatccattaacttctcagtaacagatacaaactcatcacgaacgtcagaagcagccttatg

SEQ ID NO: 104389 - DNA, 322 bp, Homo Sapiens
ctgcttcatcatggaaggcgctgaatttactgaaaacattattaatggcgtcgagcgtccggttaaagccgctgaattgttcgctgtttaccttgcgtgtacccgcaggaaacactgacgttcttactgacgcagaagaaaacgtgcgtcaaaaattacgtgcagaaggagtgatgtaatgtcctaaaggtaaaacaacgttctggcgctacgcccttggtacgtccgcagcccgttgcgaggtactaaaggcaagcgtaagaggcgctccgtctttggtatagtaggtggtcaccaattttaattgcaggggccttcggga

SEQ ID NO: 104390 - DNA, 642 bp, Homo Sapiens
ccgaaaataaaggcggaacaatggtaaaccccttggcagggacctggcgcgcttcgcttgggcaacccctcagcggcaaaaaagtaaaatttttaccgcttcggcggtataacctcacactcaatcgtgtatcacgaagtcatgagtgaatcgcgagtggtcggcagattgcgataaacggtcacattaaatttaacctgactattccactgcaacaactgaacggactggaaacactggtcataatcatggtggcgaataagtacgcgttcttgcaaatcaccagaaggcggttcctgaatgaatgggaagccttcaagaaggtgataagcaggagaaacatacgaaggcgcataacgataccactgaccctcagcaatcttaaacttcttagacgaatcaccagaacggaaaacatccttcatagaaatttcacgcggcggcaagttgccatacaaaacagggtcgccagcaatatcggtataagtcaaagcacctttagcgttaaggtactgaatctctttagtcgcagtaggcggaaaacgaacaagcgcaagagtaaacatagtgccatgctcaggaacaaagaacgcggcacagaatgttatagtctgtgacacgaccagaacttgagatcctcta

SEQ ID NO: 104391 - DNA, 287 bp, Homo Sapiens
gactctacaggatctgtccattagctgtaccatactcaggcacacaaaaatactgatagcagtcggcgtgtgaatcattagccttgcgaccctcggcagcaagaaccatacgaccaatatcacgaaaatagtcacgcaaagcattgggattatcataaaacgcctctaatcggtcgtcagccaacgtgagagtgtcaaaaacgataaaccaaccatcagcatgagcctgtcgcatgcattcatcaaacgctgaatagtaaagcctctacgcgatttcatagtggagg

SEQ ID NO: 104392 - DNA, 630 bp, Homo Sapiens
atccgtacaagcggtctggaaacgtacggatgttctagtaacttgactcatgatttcttacctattagtggttgaacagcatcggactcagatagtaatccacgctcttttaaaatgtcaacaagagaatctctaccatgaacaaaatgtgactcatatctaaaccagtccttgacgaacgtgccaagcatattaagccacttctcctcatccaacgcgtcagtttttgacagaatcgttagttgatggcgaaaggtcgcaaagtaagagcttctcgagctgcgcaaggataggtcgaattttctcattttccgccagcagtccacttcgatttaattcgtaaacaagcagtagtaattcctgctttatcaagataatttttcgactcatcagaaatatccgaaagtgttaacttctgcgtcatggaagcgataaaactctgcaggttggatacgccaatcatttttatcgaagcgcgcataaatttgagcagatttgtcgtcacaggttgcgccgccaaaacgtcggctacagtaacttttcccagcctcaatctcatctctctttttgcgtgctgcttcaatatctggttgaacggggtccggtcgtaaaccagcctggtaagttgga

SEQ ID NO: 104393 - DNA, 296 bp, Homo Sapiens
ggttgcagaaaaaaacgagattgctccattgcactgccagcctggggtgacatagagctatactccaaataaataaataaataaatgaaagagcgagcaagcgagcgagcagtggtccccaacacttatgcaccaaatagtcccacatttgtgtctgcatcattgatgtattgcctgtgaaccttccttgttggtgtagtttgctcaggctgttgtctagaagctgtctttagtgagtaagaggaagtgccatctagtcttcatacatgtagtgttcttggtagcccttaaactaa

SEQ ID NO: 104394 - DNA, 230 bp, Homo Sapiens
tatgggctacccaagccttcagtagaaacactacagagaattagaggctgcaagaaagggagatgaacatctacctcttgactaggtagagcctgcctccagactggagaattgaaaagatagaaagtggcctggagcagcctaaagcagagggatcagggaagaaggtattaatggaaacagctcacacttcacatggcaaggatttgtgaatatcttttttttctttg

SEQ ID NO: 104395 - DNA, 223 bp, Homo Sapiens
ggtcagtacagtaagtcatgggccatgctcaagctgttttttggtttatagccaagaagctgcgtcaagtgaagttgacatttattatgtcagacactagtagggtcttgaataccttctcatttaggctgcacacctctgcatactagagaggtagctctgcccttctttcaaaaaggaagcaccagaatgccaatgggttatgagggtagccctaataccg

SEQ ID NO: 104396 - DNA, 642 bp, Homo Sapiens
gacaggattgagctccactgagtggggtgagcccagcacagccccaccttctggctctgctctcctgttggggacttgttctcaccaggatccagactggatattgaaggagcaaaaagaatcacacagaacaggcaacatggaccagaggtgggggtgaaggtgggcctgcaatgtcaaacaggaggctgtgggagatcacaaacgtttcctacggaggaagtgatgtcagaacaaagacctcaggaagaaaggctgcttgtcacttgcagctgagaggccagggagttctaggcagagggccagcccacatggaagaccttgaaggcaggagcaaccttgtgctccaggaaaaggaaaggggcctgtgtgactggagcagagggggctgggaggacacaggaaggagatggcgtctgagaggtcctgagggtgcagatcacgcacggagaggtcttcaaacattctttctcccataacgtcaaaaaaatttatgaaaccatgtatttcctcacctgttttaagtaaatgcttaattttttcttcatttacaaagtaacacacttacaacatagtatcttgcatattttaaacatgacaagaagttcagctgagccccaggaagtacaggtagcccttaaa

SEQ ID NO: 104397 - DNA, 225 bp, Homo Sapiens
gttagtttagggctaccactgggaccaagagagtgcatgtgtagcaggtagtccgtgggaacaaaacagtgcatgtgtggcgagttagagtgcgtgtgtagcaggtagcccaggagactaagagagtgcatgcatggcaggttagagtgcatgtgtagcaggcaagccacaggagtaagacagtgcatgtgtggcgggttagagtgcgctgtgtcgcgggtagcc

SEQ ID NO: 104398 - DNA, 220 bp, Homo Sapiens
atcgctaagttagacaatttggaaaaatgcagcaaatacagcgatttacgcaaaaaacaagcacaactttataagccaatcaccagtacacttagcactagtctgtgatttccttctagtctgtttttgtggaggctagaagtccaaaatcaaggtgtcattagggttggttccctctggaggctctgagggagactgttctgtgcctctctccgagcct

SEQ ID NO: 104399 - DNA, 473 bp, Homo Sapiens
  misc_feature (299)..(389): n is a, c, g, or t
gagcgtccgggacgaggcgaggcccgtgcagacccgatggcaccgcacactcacgccccacacacggatgggacctgggctcagcccagctaccagcagctcacatgtggggtgtggggacctcgccgtccccatgtcccaagcagccaacgctggcacgggtgagcatctgtgactctgggaatacccgtgccaggcaggccacgttatcccgaaccaacttaactgcctatcaacaggaagctcatacatcaccgcggcccgtctctccctgtgacgtgcagcctcagcctcctgcnnnnnnnnnnnnnnnnnnnnnnnnnnnnnnnnnnnnnnnnnnnnnnnnnnnnnnnnnnnnnnnnnnnnnnnnnnnnnnnnnnnnnnnnnnnacttaaaaatacacatggatcaaagaagacatcatacttgaaatgagagggtagccctaaactaaggatggtctagagtcgacc

SEQ ID NO: 104400 - DNA, 420 bp, Homo Sapiens
ctagaggatcccgtaagtttagggctaccgcagttaagggctagtgaacccaggttgggataacaaatgagacaagagtcgtgagaaaaggctgaggtccaacttccaattgaagaggttttctagcctccctggaaatccttaaataccaagggccccacaccccagtggccttgtggatcacagcgggcgtcctgtgcagggaagtacacggggactgagtgtgtatggtagaactgtaggcgggacaggagctttgtgacgatgtgaggtatattctctggacaggtcatgtctttcttcagggtcccgatcaatatcaaagagccagagggtcttggttggtgggtctgatgagggtatctcagaaacattgtatcgagatggtggagggaaccagtaaccacagcctgggtagcc

SEQ ID NO: 104401 - DNA, 254 bp, Homo Sapiens
ttatgggctacccgcagttaggtatggtcacgtgacagtgaggtgtggccatgtgactgaattctggtcaatgaatgaaatacgtacaggagtgacatatgccacttacaggagtggctcataaaactttccacaattgttccttcaggctcttttctctttctgactagctggctactgtaactagtaggcctagataatccccaggacaacctcagaagcgacgtcgtcggccaggcatggtggctcatgcc

SEQ ID NO: 104402 - DNA, 402 bp, Homo Sapiens
  misc_feature (80)..(171): n is a, c, g, or t
gctctaagatccgagttagggtaccagtagctggatcggcatgcacacacaacaagtaattttgtattttagtagagaannnnnnnnnnnnnnnnnnnnnnnnnnnnnnnnnnnnnnnnnnnnnnnnnnnnnnnnnnnnnnnnnnnnnnnnnnnnnnnnnnnnnnnnnnnngacgcaccatgagaagccctattcattaattcttaatcacacctgtccttagtccttaatcatataaacatatatgtttaacacattagatattacataaggtgatattcacatttctgccatgtaatgtaatcacattatctaggaattaggatgtggacacatccttttggggggtcatcagtcaatccactacaccacaattacagtatcattgtttcatggccctta

SEQ ID NO: 104403 - DNA, 486 bp, Homo Sapiens
tacctgggtgctctcagtttgaataaagcatttcttgcttgtgtgtattaatttagatcctcctccttgctcatttcatatttaaaactctcccattattgacataacaacatctctaaagcaattactttgtgattttcttttttatgtgacacagaattgtgaccaaagggggagtaaaccgcaaatctgattaactctgaagtgacaacactcccacatttcatgcacctgctggaacaatcaaatgatggagaagagggagggcagaaagcaggagtgcctttcaacaggaggcccgagggaaggtcgctgtgggtcactgacaggcaggcagacacccacagagaaatctgtgccagcatgtctagacatggcaggaaatgctctgggccatatggaatagatgatattgccacaatccaaggagggtgtctgaatgccgtctccatctattttcgttctcaaacaaagttgtactccctg

SEQ ID NO: 104404 - DNA, 449 bp, Homo Sapiens
atgattagggctaccagaattgaaacacaagttacaggagatcagtcttcctgggtgaccaatcttcttaggtggaactgatgctcattacattataatgctaactatttaaccatctcctaactcctgacattggcctttgtcagcatgacactaggacaaatgaccattaattcctatagcaggaaaatagaccttgcctttatatatcatattacgtaaaaattgcaacaatattattacatgctaactaatgtaaggtaatggttactaacttgggttgaatggggaatctaatgagagttctagattaactccagaaaaatgaacatgtgcacattccacatgatacagcaaacactttcgggaagtcttcatttagacccagcataaagacccttgatctaaggtgcaatctggtcaagtcactgatttaaatgaagaatgaa

SEQ ID NO: 104405 - DNA, 488 bp, Homo Sapiens
cagtttaagggctacccatttccagcagggccatgaggagctgagccggctgtcccagtatcgaaaggagctgggcgcccaggtggggccccagggcacagcaggtggtagagggaggttagggactcctaactggggggccttggacatctgagatgcccttcctgtgcccagttgcaccagctggtcttgaattcagcacgagagaagagggacatggagcagagacaagtgctgctgaaacagaaggtgaggggccaggtgcggtggcccacgaccgtcatcccaacatgttgggaggctgaggtgggaagattgcttgaggcctggagttcaagattagcctaggcatcgtagtgaaactccatctctacagaaaattttaaaattagctggtgtgctggcatgcacctctagttctagctactcaggagctgagtgggagattgctgagccaggattagactcgtgagctatgatcacacact

SEQ ID NO: 104406 - DNA, 239 bp, Homo Sapiens
tagaggatccgtaggttaagggctacctgtttcagactatttcttctggaatattgcatgaactgtcaatctcaagctttctgggagactgtaaaaactcaaggtatagagagggtaaaggaaaggggccttaaataaggaaagagaaatggtcacataggtttcagagtctgaaaaccaaaacagaagccctaaggtaacagagagaatagcttcagaaatgggtagcccttaaactg

SEQ ID NO: 104407 - DNA, 398 bp, Homo Sapiens
  misc_feature (148)..(149): n is a, c, g, or t
  misc_feature (178)..(178): n is a, c, g, or t
  misc_feature (292)..(324): n is a, c, g, or t
atggatgctctctttctggaactgtggctgttggagcagacccattccaggtcccatctgtccggagttgtgtatgtcaagtccggctcagtctttatttccaacactagccgtggtcctgtgcagtcaagctctcagctaagtgttnntagggcttgtctgtcagaaatggttatanctgtgggcaaaagaagatctgacagctcctatataccttatcttactgaattcttaaactttgaaccagttcttccacttactgacttgttaccactgctgactttctgaaaannnnnnnnnnnnnnnnnnnnnnnnnnnnnnnnnccagtaggggattagaatgtttagtcttacttagtaagaaaaatattgtatttttaatcattcatagtgctggt

SEQ ID NO: 104408 - DNA, 334 bp, Homo Sapiens
aagttatgggctaccgcaggcttgggcctgctgaagggtggggctgggcttccggtctgagtctaccatgtgtgtcatacccaggagctggctgctcttcgtgccgcaggcgggatgctctaggtgcctgttcgtaacgtggtctgctgtcgtaagacagaggggctggctcttcaaaacgtggaaagtaccctcgttctgaggactcttcgggatgctgtctggagtcaaggtcttgagagtgctgattatcaaaaggtggccgagaatgggtagggccggttggtcatccataatatgaccacgtgttcttccatcacatggggacgcgaat

SEQ ID NO: 104409 - DNA, 420 bp, Homo Sapiens
ctgcgaggtgacaggaggtccaggaaaggtgctgtgaatgctgcagtgtggcggggaggtctctcacatgtccctaacaagtatactgacccggctcttatcacaggccaggatcaacctcaagctgttcactctaccgggtggattgtttcaatagctaaaagggaggggaaagaacaccatgtcgacaccatactattacagaagagcctatgtctcccccctcctcaaccccttctgcctaacgcttagttaccattgtaagcaggtcacagtgacataatgttcacagtcctcaacgtttgtggcagggaggggagaacaaacaggtgtctatgaccctgactggcatcagccataccaaggctgacagagcttcctgccacccccacacacaccctatccgcatacggtatcact

SEQ ID NO: 104410 - DNA, 396 bp, Homo Sapiens
  misc_feature (338)..(338): n is a, c, g, or t
ttagggctaccctgtgctaatatatgaggtagaggtgtgcacaccaccacaatgcctgggatctaaatcttcagatattaacgtttgaggctatggagctgtttccctgaatcacacacgagaaagcagtcaacatgggtgggccaaatgtggccaagatgagagagccagaagtgttggccttagagcagagcctctgtgtgtgagacattagaaggccagagccggggaggtgccggcgcagccactgccttccggtgggccggacggaaagcttggtcttatgctagattcagaagcactgacagaatggaggttgacactttttagaggactanggaagggatcatttgtgctccttgcagcttattgcgtgatagctttagagccaaagac

SEQ ID NO: 104411 - DNA, 602 bp, Homo Sapiens
gcgagtatctggacaagcagagacatcaagtatgagtggtaagaccaccaccaccaattccaagagagaggagaagctaatcaatgtgaccagcacactgagaatcaacacaacaactaatgagatatttctactgcgacttttaggagattagatcctgaggaaaaccatacagctgaattggtcatcccagaactaactctggcacatcctccaaatgaaaggactcacttggtaattctgggagccatcttattatgccttggtgtagcactgacattcatcttccgtttaagaaaaggtagtatttccttaattgcagtggtctccactgggggtgaggaaggggtgagaattggatcatggctgcaaggaaacccgacttaacctctgcaaggtggtgcaaaggcattccactgttcaacagcaattatattgaagctgagtgggatcactgggtgaagatgaagcgtaaggggtgaggggcaagagaatgggtatggatggaggtagaagatgcagcgtcatacagacctgatctatcatgaaaataacacagattacagaagagaagagttaaatgccgtcattttcagttgcat

SEQ ID NO: 104412 - DNA, 431 bp, Homo Sapiens
  misc_feature (61)..(61): n is a, c, g, or t
tctagaggatcctgtaagttagggctaccagtgttaggagctcctctaaggatggaggatntgtggagggctcagacactggcttttccagaaggggattttcttcagcacccaagtcagaagtcccaataccttcaaagctagatagctctggtccttccagtccatctggcccttccagtcccaggggcctgaactccataggggctgtttcagtgacctcctcaaggggtggctcagtcacagactccagctctactcccagggcctctaggtgtagtgtgcagctgccctcctccacctctgctgggctgggactgccacccaggtcacccccatggggagcctcactgccctcctgtcttccagtgttgacctcctcactcatctctggcagggcctggtccaagctggggtccaccacagtccca

SEQ ID NO: 104413 - DNA, 403 bp, Homo Sapiens
acagctactcagaagtctgaggcacaagaattgcttgaaggttggattttttaaaaacttttaaaaatgaatgttttaaagacccctcacacttgaggcactcgcatttctgagaaggtagggagagatatgatctccagtacaatgaagagattacgagggattttggagatgcatagaccttgccagtctgaatgtggctttgccactttctaactgagcaaactttggctaagtcttacctgacctgttgttgtaaggtgctagaacgacagagaaagtccagtagaggcgtggtataaaagagaaaaagcatgcctgtgtagggctctgagccatgaatggagcagacaggactggaagttgctctgggtagagcctcactgagtagctgagggggatc

SEQ ID NO: 104414 - DNA, 183 bp, Homo Sapiens
agtgctggttggggttgctctgatatagcagccctggtgtagtttcttcatttcaggaagactgacagttgttttgcttcttccttaaagcattgcaacagctacagtctaaaatgcttctttaccaaggatatttacagaaaagactctgaccagagatcgagaccatcctagccaacatcg

SEQ ID NO: 104415 - DNA, 383 bp, Homo Sapiens
gaaagctcgctcgtggtagaagctagcagccatatgagaaatccaactaccatgagaccaccatagcttgaggaagtccagcctcaccacatgaagagaatgtctgggacagaaaatatatggccagtccccaaaaattctacctattctattctatcccagctgaagttctaaacatgtgaacagaaagttactaacactgagtaatagtcttttaaatgagtaacaatgaggcaaaatgggaagatacacaggaaagagtgtaacagtttccatatactggaaagagtataacatctccagcgttttctggagagcagtgttaaaatgtatatgaaactccttgcaatttacctagccttttaaaaaaatattcagcatcg

SEQ ID NO: 104416 - DNA, 166 bp, Homo Sapiens
tgggtaggtgacctccaaagatttttctcttaatgactactttaggtaacttgtatcacagactaacatggtccagaggagagccaggaatcagctagaaatcaggagccttatacccaaagaaatatatactcatttacgtctatttcttttactcagcatatct

SEQ ID NO: 104417 - DNA, 1128 bp, Homo Sapiens
  misc_feature (860)..(910): n is a, c, g, or t
tctgttgaatcaaggtgaatatgctagagagtaatgaaggctgatgaatattaggcatagaggtaatggagaatttggaacaccactgctccataggaattatctactgggtgttacttagtgaaaatgaaattttacaatagagatattgtaaaaatgggtgtttgaggaggatcgtctttgaaaaattatctactgggtgttactgaaaatgaaaattttacaatacggatattgtaaaaatggagtttgaggaggagcaccttagaaactttatacaagatggggatcctgggagcaaggaaattggaaaaaaaagaattacagtaacctgggcctcagatctacatgaaaagctataatgggatgagagaaatgggagatcaagcctcaaggagaaaactgattaaaaactggactgacagcaagtttttggacatggagaatggagagcagaaaaagataactccaaggctggggtaaaaatataaaggtggtgacacttttcagggcaaaggaattacgcaatgaggcctgtttaaaaagaaaacgggggctggggatatatggtgatgaatcctgttttcaaatatcaagttgtacaggtacctgtggaaaattccaaaagtcacaaactgacccacagggtgggaaaaatgaagtcattcgaatacaaatagtaggtataaacaatcaaaatggataaataggagtatagaaaatgaagtgaataaaagacagggagattattctcagtggagaagaggagaaaggggagtgggtggaaagatcaactaaaaaaagaaagacagatattagagaaaaaggatcccacaagccaaaggagggagaattcaacnnnnnnnnnnnnnnnnnnnnnnnnnnnnnnnnnnnnnnnnnnnnnnnnnnnggccttattatttgtccactggtgagtctaagaacatttcactggaatgctaagtatgaaagccagtaaaaagaagttttaagaacagattaatgaaaaaggggggttgaaaaatcaaagatatgtttgaaaaaccatgaacaatagaggagaaacagaatggtagttggaaatgggcaatgaggatgaaagcatttcacattttatgctgtagccaa

SEQ ID NO: 104418 - DNA, 954 bp, Homo Sapiens
actttgtacaaaaaagttggtattgattgggtgagatagaattccatggaatttcattgccaaaccagtgaagtgctaattttgacatttgtaccagctaacgtagctgtgaagaaacacaccaatacacttctaaggacagcatagaccaagatctaggtttcatatggatgaatttattcttccctttgaggcaagacaagaaggaaagaaagtattgggaataatgctgccctcccatcctcaagggccagtgggaactctaatattgattgggtgagatacaattccatggaattttaccactgaaccagtggagggctaattttgtcatttgtaccagttaactaacttgggaggaaacagaacaacacactcctgagattggttttcacagaattccatggactttaactgctgaaccaatgatgcactgattttgtcacttgtaccagctaacgcatctgggaggcaacaaaacaatactctcctgaggttaatgtggaccaaaaactagatttcatataaaagagtttattccttctacttgaggtgtgacatgaaggaaagtaatggaaataattctgccctcccattctcaagggccagggggaattcaaatattgaacggaagtgattttggaattgcatggaattctcactgccatcccaaagaaatgctgatcttgtcactcttacctgtttcattccctgggggcagaacaaaaggacgcactccaaagatcggcatgaaccaagaactgggtttcatataaaatattttattctgtcctcttgagatgtgacatgagaaaagtattgagaatacttctatcacctcatcttcaagaatccgtagaattctcccatggtggactttacggttaacctgaacaggtcttggaaaaaggactttaaacattctcctgttctgtggaatagtatacttttttc

SEQ ID NO: 104419 - DNA, 378 bp, Homo Sapiens
acgccgcgtggatccggcttactaaaagccagataacagtatgcgtatttgcgcgctgatttttgcggtataagaatatatactgatatgtatacccgaagtatgtcaaaaagaggtatgctatgaagcagcgtattacagtgacagttgacagcgacagctatcagttgctcaaggcatatatgatgtcaatatctccggtctggtaagcacaaccatgcagaatgaagcccgtcgtctgcgtgccgaacgctggaaagcggaaaatcaggaagggatggctgaggtcgcccggtttattgaaatgaacggctcttttgctgacgagaacaggggctggtgaaatgcagtttaaggtttacactttgtacaaagttg

SEQ ID NO: 104420 - DNA, 776 bp, Homo Sapiens
ttgggttacttttgatggtattggagtagctgctgtgtgtcacgggctgacccagaggaggaagaagctggattcagggctcccgtgattacccgaatacttcactccccgagaggccgtcgccaagaccccctcgcgcattcctgaacccctccccccgctgttgcttgtacagaggcgggacctgaaaagaggctgctccctgaccccaccctgtcctctcctaccacgagttccctggatacccccctgcctggaaatggcccccctcagcctggcgccccttcttcttcacaccttgtaaaagaagagggtcctgagccgtggtccgggggtccagaccctgatgtcccatgcactgatgatgcccgctcaacctgaaacaaagactgggtcatctggcatcccgaacaggaaccagagcgcaagcgaaagaacggcccagcccctaacatgctgggccacgagctttgccgtgtctgtggggacaaggcctccggcttccactacaacgtgctctgctgcgaaagctgcaagggcttcttcctgcgcaatgtggtccgtggtggggccaggcgctatgcctgccggagtgtctgaacttgcccgatggacgctttcatgtttgcgcaagtgccatcaatgccggctgctcaagtgcacagaagcttggatgagggagcactgcgtcctttctgaagaacagatccggaagaccaagattcagaatctacatgcagcaagagtcacagtcacagtcgcagtcacctgtgggg

SEQ ID NO: 104421 - DNA, 349 bp, Homo Sapiens
tccctgacagttttgccacttgtgggtgaccattgctagaacccagaaccttcactgggactgcagaattctcgtcttctgtctcatcagaaggacatttagtggctggaattctctcagaccttccctttatcccttagggtaagtcaggttaccctgaagtgcgttcatactagaaaggcagcataagcacttaattatttccctttaatgatcaatttttggagtaagaatgtcctggcaccctccagtggtgccaaaggactgggagttcctcacaccactgcacttacccttcccgcttccctactcatgttacgagcttaatgctttcatgtatacagtctgt

SEQ ID NO: 104422 - DNA, 951 bp, Homo Sapiens
tacagtagcatgtgtgaggtgtggatgatataagatatgtaagctctgtgcttcagcagaacaagagtagaataattaactcttcctagtggattcaagaaaggtggcgttgtctgactacagactctatgcccagagccaatcctcttcaacactttacaaaacagtaacaccctgttctgagttcctagaaatatcatcctttattctctacactccctgctaatgctctggaaaaccccactatccccagctcctctgacctgaagttgcgctgagagcagagtcatttttgtaagatgtgacaatcaagaatgttctggttaaaaaaaatagatctctccaacattgatttggagaacccaaaactgagtgaccacatgtcccaagtctgaacaggacaggctcagattacacctgtcgttcctgcataattgaagcacataccattgtagacagcaaataataggcttgctctacacatagcatttctagcaccctttcttttttgagattggaggaaaaggaagtagtgggaaggtttaatagttcatagtttgctgatattctcagaaaaaccatgaagggattgaaattgttccaagttccccattgtaactttcccatcttacccaatgcaaggcaacaagtaccaaatgcttgcttacccacagttccatatccactacactcaaaactttgatacaatcatgtttttttaatttctaaagtatgtatttaatctcccagaatatttatggtgacaagttaacagataagtaaatcctggctcctgtgcacaggagagaaggcccttttcccttgctgacttgccgcctcatgggagccactccctcttaggtggctctttggagttgcagcgctgccctgcttttgtctggtcactggagtaacccaacagtgcgactgtcgactccatggcaggcccaa

SEQ ID NO: 104423 - DNA, 506 bp, Homo Sapiens
actttgtacaaaaaagttggaaatcatcgctgttgctttagatcacggattattttgctaataatgctaaggatgaagctgtgatcttattatcacctgaatcgggaggtgtggacactttaagcagttccactttccttctaattccccatccccatgcctttgctaaagctgtcccttttgctctaacacccttcctggaccttcctaccctagctgggctaagtgtttctcctcagcgttcccacttgtttcaaacatagcacttaccacttgtactaaaattacttgccttcttaattagatatgaacaaccctccccaactccagtatgggccttctgtcaataataatacgatatgacagctaccatttattaagggcctcctgtatgaaagaccttaggctaagcatgttttaaatgttatttaatcttcacaatctctgaaaaaaatgaagaaatcaacgtgcttttcttactacctctacccctaagccattattac

SEQ ID NO: 104424 - DNA, 731 bp, Homo Sapiens
ctttgtacaaaaaagttggattatttatttctctaacaaagtgatccgtagtctgcaaccttaggctctgacaggcaaagcccatttcttagctctggggatggcttgcagggtctccacctctgtccactttggtgtcctctttctcccttcggctccccacctccatcccccgagcccacacacagcggggtgaagctgtcggggagactcgtgggcaaccaaatgcaggcaccctctgaagagacgccgagaaggccctgcattcgatccgggaggacatagaaagatgccatgaagttctattgggtgcagcaagccgttccccacgcacactccccgtgatacctgcccagagaagcagaagcagtttcgagggctgttgacacaggcagagcggggaaacgcgcccaagaattgggctgccactggtatgggtcccaagtcacattcaataagctgcccaccgctttctgggggacagcagtggtggttctaggtctcatctttccagagcgacgaggataaaagttcctgcccaggactgtgtgcgagggggtcccgcactgctgcaaactctcagcggaggcagagaggctttgctgtttctggagagaggaagcattggcagaggcagtctccgggctgtgaggaatccaccctcatgccttagtgtgggtacgtcaggtcccagcatcagcgggccatttcctcagttgcatgaatggagg

SEQ ID NO: 104425 - DNA, 846 bp, Homo Sapiens
ttggttcatatacaaatacagggacagtactacaacctctataaagtttgtatttcagaggttaacttataggttgattagttggagcccaattactatttcccataaaatacaattttctaagtgccaattagggtgaacaactcactatcaagtgctttaagttttactaagtggtgatagtaccattcgattctatataatcacaattgttagtattttcatttacccattatgaagaaaataagtttaatgtaacttgaagtatcaaaaatacatccacatggtggcgtgtgttaagttgggggtaaatattcttcgggaattgcggtctgttagcttgctcctaccgctattcttttgcagtagagggaaacctattactcccttactttctgaattgatgagcaaaaagtggggaaaaggacttgcagatttgagggttgcagtccctgttgtatgtaaggaccatcttaagttggatactgtattaaaagccagagttttgctgcaaaatggcagctataacagcatccaaagtagaatctctctcagaagagaatcctttcgattcactctgacatcttaggctgagagaaaagaaacactcagaaatattcaggagccaaaagagacaaaaatattttccaaactgattaacagacaaaaatgtgtaacagagccatacctaggaattggagtcagaagtgagtgaggcctgggtgatgaggtctgtgtgtttcacccagaacatggagtgtacagtttagtattagaaggtcaggaagaaaggatcccctggagcagtgcttttaaactttcctgtgcatccatgtcccctgggga

SEQ ID NO: 104426 - DNA, 935 bp, Homo Sapiens
  misc_feature (114)..(139): n is a, c, g, or t
cagtgcgtttaagaagcacggggtgcgccgccacatggcagcaacaatggcatactaatctgtagcagatgaagaaaatttggcaaactcacattgtacaagacacaaagcttnnnnnnnnnnnnnnnnnnnnnnnnnntctgcattaactattctttttcaaactattgcaaacaaagtggaactcaaccttaaatttaatcttctgcaacaaagtaaaatttaaaaagccaacttcccttagttagggtgccagaaaaatcaaattactggaaaatgctttcctaacaacagaaaatatactttttccttctataaatttaacttctgatttctaaaatttcgctttatttaaacgaatatccacatcagcattaataattaactagctcatatagcatgatcatcatctcagttctttaagacatgaatttttaattggggtttcaaggatgaaaagacaactagaatattccctaaaattttatgtgtatgtgcactttcttaggaagagattctcaatttttcagattctcaagggacccctgacctttaaaaagtaaagaactactactttaagggctaggtgtgttattttatttatctttatgtaattatcacaatgacaagcacaaagtaaagtatatgattaatggataaaactacaatttgaattttccaaacctacattttgtcttttattactttatttcttgcatatctttatcagcgtaatcaaatcccgacactactggttaaactgttcaaatcttagtatactaaaaatactctgccaatttttaaagtactttaaaactaaaaaataataatgtattacccaaggctatataattatcacatgacatgtttgtctgaattcctttattttgttgttaggagaaaggaataaaaatgaaaagcaaaatagtcaccaa

SEQ ID NO: 104427 - DNA, 933 bp, Homo Sapiens
ttggggcaacagtgggtactggagaatgaattaactggatgaatattacagtaaatcagtactaattaaaacttgctgggcaggcaggagagactagacggatttgagatatacaaacctcccttatttatccctattccaatcgtataatagatctgtgtttgaggacttcacctcgcttattacaataagaactattgaatcttatagagtttcagtaaagttgagaaataacaaaatccaaagcaaagtagaacatctttcagaaagccatgtgaatctctattgattggattaaattattggcgtctggtaccattgatctcaaaagtagagatatagggtgtatcttagctatataaaggaactctaaaccatttaaatgctatactgtaaagatggagacaattagctcatgtgtcaaaaactcagatattactgaaattcatctttaagcaaagcatacattcattttctagttgatgattggcattggcctgcagtaaattaggacagtgatttttaacttgtatttggggtagtgagcatgcagacaggtcacaaataggaagggaatatataatttgaaaatgcatagattggctccaggtccagccagaaaaggagagaacctcaaagaagatggggattggctgtataccctctaaagaggcacattatagacttaagaggtcggagtgtggagaagacgtgagattttcatatttatcaaagaagatatggtttttaaaagactgataaatatggcattaagcagctgagttataaaatgagtctagagaggtggtacctgtagttgagtactgtatgtacctctgggaacaaacatatttcttcctgttcttgctagtttcagagaggaggagtgaaaagagcaatcaacagcaaattctgcgtggtggtttgctgtga

SEQ ID NO: 104428 - DNA, 400 bp, Homo Sapiens
tgaaatacagggaagggaacgattgagaggaagggcacggtcgagtgctcagaggggcaagaatgacaagagtccgctgttttcagcataaggaggtcagctggtgacttggtgaggatgattttaatggagtaatggggttcaaaatccaactgcagtatttcaaagagtgaacgagaggcaagggaagtggagacaatgacagccctttcagaaagtttggcagtggtagggagtacataatcactgggggaaaaacagaaggaaagacacatttttaaaagaagtcagaataggtattagaataagaaaataaactgcagagacaagtataaggttctgggaagcggccaatagttaggagaagtgcgtgaggtgagaatgcccccctagttgatcg

SEQ ID NO: 104429 - DNA, 770 bp, Homo Sapiens
  misc_feature (49)..(65): n is a, c, g, or t
gggaaatctgctcttttcttattgatttacaccggttctcacagggacnnnnnnnnnnnnnnnnngccaaggttggtgatttgtgaacatcactataacaattcctttcaaaaagcaaaaatgtactgtatttcatatatgtctctatcattctgtagttaaaaaattcaaactcagctcatattctaatttttaaatagcagaatcagaatcagaatcctcagattttatcatcctgaggctcttggcatctaatagcaacatgcactgaagtccatgttatagtaagagctgaaaatcatcctcccactataacaggaacaaaagtgtggggaaagaggaagagagaaagcaatacttttcctgggatgaaagcctctacagcacaaggcctgattagtaaatggaaattctggatagtctctgaatagaatccttttccacctttcaaataatttacagcttaatgtccgctaaatttagtaacttctcccatttgtccatggcaaggagattcttggctggctttccatggtcattacagaccttctcatagatccctgaaatatgatgtggccatcaaaatgtcagcacttacctgctgcccacattgtggacacatggaccagttcacaggtcagtgactgataacatgaggaaacaagaccagcttcagatctaattcaagaatagatacctgaccatccccatgttctcaataatataagctaataataatggccaattccttccaacttttttgtacaaag

SEQ ID NO: 104430 - DNA, 935 bp, Homo Sapiens
ttgggtccttcaaacacgtggaggaggcggggaagatggtttctcttgtctttggggggcaggcagagggtgcacatgcacttcatctgtatcacacgcagccaccaacacagccgcgtaaggcagcggtccccagtctttatggcaccagagactgctttcatggaagacaatttttccacagaccagtgaggggtaagaaggatggctccaggatgagtcaactgcattgcatttattgtgccctttatttctattattattacattgtaatatataatgaaataattacacagctcaccaaaatatagaatcctcattatggtgggagccctcagcttgtcttcctgcaactagactgtcccatctagcggtgatgggagacagtgacagatcgtcaggcattagattctcataaggaacacgcaacctagatccctcgcacgtgcagctcacaacagggtttgtgctcctgtgagaatctagtgccaccgcagatctgaaaagaggtggggctcaggcagcagtgctcactagctcactgcacacctcctgccggacacggactggaactggtccagcctgggagttggggacccctgatgtaaggaatagtcagaggctaacatgcacacaggcacgggaaatggacaggacctgcccaggctgcatgagggctggattgtgtggccctggaatgatgtcccaccctctcctatcgcggtttgcaggtctagggaactcagtctcctggaatgggtcagtgtatcatcagtcatcctccctgtgtctttaaccagttttatttctgcttgcattttactgatgttttcttcttcttctcctttttgcttttttggtcagaaattatccagcaagctttcattaacgtggccaaaaaacattttggcgaattttcaaccttaaccaaactg

SEQ ID NO: 104431 - DNA, 468 bp, Homo Sapiens
actttgtacaaaaaagttggcgtgcaagggcaggaggcaggggcctgacgtgtttggattgaggttgcaggaggggcccctggctgcttcagggagaataatttggaggcgagcggggaggtgagaggaagctgtgcggtgcaggatggcgtggctgtggaggtggagaacgttgggccacgctaggagtcttgaaagaggagccaaaaggacttgctgagagccgccgcagctggtgaatgacggtgccatgactgaggtggtcgaaagggagtatttaaggggaaatcaggcattccgttttgaccaaattaagctggagatgcctgtggaacattccagccaggctgcatcacgtcacactgaccttcagcattgcccacagtccatcttcccccaggacctgaggattttgcgtccggctccctcctcgcccaggacccccaagctcccagcacgcttctgatt

SEQ ID NO: 104432 - DNA, 607 bp, Homo Sapiens
tccatgcatgaaaataatatctgaatagcactttataatatgaaaagcacatttacatacattatctgttaccaatgcatcattgttaggataagccctctgagttatacatatggatttgcattgttttaacattcaattcaccaaggattaagcttttattttttgccaagaaaacctatatggatatctcaaaatgctgtgtagatcctgaaagatttaaaaatgaattccatataactagtgtaagagatgtgggagataaacagttactctcacacattattggtatgagtgtaagatattgatgtacattttgaaaggtgatttgttaatatttgtgaaaattaaattgacatgcattgtgtctcagaattttaaccaccagaaaattttcctatggaaacatagtcacaattacacgaagagttatgcataggggtgttcattgcccctctatttatcatggtgaaaaactggtaacttaaattttcatctatggggaaatgactaaactgtaacagttccataattggaatactatctacccattaagaggaatggggtagctgcatacagcatgtgctgaatgaaaagataagggaca

SEQ ID NO: 104433 - DNA, 145 bp, Homo Sapiens
aaaaaagttggtgacactaaatggtaaaaaggtaaagtttgagttgggacccattttgtaagacattcaggctataaacaaggtaataaatcacactcttccagttctactcccaatttaattggtttacagttcggtggctgtc

SEQ ID NO: 104434 - DNA, 929 bp, Homo Sapiens
aactttgtacaaaaaagttggatttcatgtcaccccaccatgttttataatggctttgaagtcatttgaacgtttctagagtcgtctggggcctagagacctgaactcattttactggatgagttagcctttccttctgtgttaaacctcaaaccttaatttgtctattctgtgttacattataaatgttttccctgagcatcaaaggatcatccaaattttctccattatgttgtaaaccacaaaactatcttctaaagtgttttgagctgtaatttagaataatcctctactgtcctttcaagaatgtccagaatactctgaagatgtatcacacaaggaaatctcttgtgattttatctgaaagcttcacctttgattcatgccatatagtgacttactgtaatactgcttccttttgagtcttgccatttctgctctctggagtagaaaggcttaccaggctttactttgtctaagtttgataacctaaaataaaggttgccttgataattttacctagctatcagactgactaggagtaggttctgtcctttcctcatctactgttttggtgccttggcagaacttttccttggtttcattacttagtatacccttttgttgattatgtgtctttagctcgttggtgacctagttatcctggttaccattcctttgctatttttcattacaaatccccccttaacctgccagccaatcccagttttggttgggaaagctatgagtacacaatgtttacctaaactttggcttttgtatgtagtttctgtactcttttgcttcctgggccctacgttaggagctcctgatttagctgcctgggttttgatgtgtacttaagtaactaggtaagttaaggttaaattcctggttttccataagtttgccctggctcatctccattt

SEQ ID NO: 104435 - DNA, 384 bp, Homo Sapiens
caaacctggaacaatctggggtaagaacatttcagaaggaaggaaaaacaaatgcaaagactcatagacagaagtttgtcatgcatgatagaggaacaacaaaggagggtatggtggctagactggagtgagcaagggaggaaagtggtggtatgggtctagacagcatcaatggtatgggaggtttggagggccttgcaggccattgtaaggaccttggcatttacttggagtatgatgaaaagccgttgctgtgtttcagctgttagcaatattactctagatgctatgctgagactagactgtagggggttaacgatggaagcagagacacgtaagaggctgttgcagtaatctaagtgagaggtgctggtggcttagacc

SEQ ID NO: 104436 - DNA, 306 bp, Homo Sapiens
aaaaaacctttatgtgcacttaattgcagtacattaatgccttatgaatttattttaacttaaaacacaaatatcttactggtcttttgaggcagggtccagaacttttctttgctcatagatctgtggaatagagctctgtatttatcatttgtgcataaaccactgatgatgcataatctatactttttcagtttggtttctttaaaaaggagccagaagtagagaatcctggtaaaggaattgtagtgcagcatcctttgacacgcttttattttcttctccctctagtgtcaatctttataa

SEQ ID NO: 104437 - DNA, 986 bp, Homo Sapiens
  misc_feature (760)..(769): n is a, c, g, or t
ctttgtacaaaaaagttggcagagtgacagcagggcaaaacacaaagtttagttggtaaagccatgttgtaatataaatatctcatttccaaacttgttaagacagaggattttccttatgactacttaatatttaatattaatgtggaaagaaatagggagtaaaatatctcaaggaagccctatgccaaagtgttgactaattctagaaccagggaccctattcaaatacacacatccttgttaaagaaccttgctttaaattttatcagctaaaatctttagtgttatttttaactaaatggtttctaccatataaaaatagaggaacatttaagaattggaattagagcattcctaagtgtcaatgccctcccatcatcagagaccagtgggaacagatctgtagttgtacaactcatgttgatcaccaagttgcagaaagggaggacacacgtgtaactggggatgttttagtcagagggtgttgggaagaacttacaggatttgtgcttgtgttaggtaattgtgcacaaggtgtaagaaaatgttattttgttgtaggttaaatccaatcaggaagtgggaataattctatgattttacatattaccattatctagaaggtgggaagaacagaaggaaattaaggctgtaattaataaagaatcactagtcacttgtattagctagaagtaaaaggactacctggtcatttttgtagttgctcaattaccttgtttctgtctatgctcagacnnnnnnnnnngaccagagtggtgtatttttcgtggttttctccccctacttcattatggtcacagtcttaaatcttgtgtgatgtcgctctgctatgtgactgctcttcagaagaatgtcatggcttatgtatgcacaccaggccaattcttcataatcccaaggcctaacttttaggacaagtgtatttccttgatgtcagggctatttggtttttcttttctttt

SEQ ID NO: 104438 - DNA, 537 bp, Homo Sapiens
ataacactcaaaacagctcagaggggctgctgtggacagtagggcgggtactgataccagatgcaacgctcttgtatcacttcgaaccctgagagcgcgccaacagcacacgaggtggtgtggagcaacaagaggttttaatgagcgcctgggtgcagacgggctgaggcctaaaatggcatcagccggaagtgaggacggggcaggggttttatagttctctgtaaacaggaagtgtcccagtctgacgtgactgctgcgtagtacctggacggcctccctctcagtcttcagagggtatgtgtctcccagccagctctcttcctgcttatgctatcttgctgacgcacgctgctggagcaagtggccttgcaccttgggactgggcctgaggagggaggaagttattcattcccttaaactttcggccccgggggagaatctttcacccagcattttgaaaggctgagcgggaggatcacttgagccaggagttcaagaccagtctggcaacatagcgaaaccctgtcttcactt

SEQ ID NO: 104439 - DNA, 795 bp, Homo Sapiens
agagatggggtctcactctgtcactcaggctacagtgcaggggcatcataactcactgtagccttgaactcctttgctcaagtgatcctcccacctgagtcactgggattataggctgagccaccactagtgttttgacagacttttttgaatacctagagcttccctccaccatcccccaaaaaagagtagacagaaaggaggacaaccaccttctcccagtctttgcagaatggctgtgttgggggacactgtggttgcttagccctgctgtttacaactctactgtagcctcatttcctgcttgtgctgagccgaaagttcagctaaagggtcttttcagatcttttctgagcatgcttcctgccctgggcatatatgcatgactttctaaattcctaaccttagtataagtggacattgttgaatgcccaaatttccaaaagaaactttctcccagcttttcctctcaggctgttggtgtgtctgtttgcttcaactgaaatcttttgccccaggtggctgcagattatttgccttacaagttttttgagcaataccctctgaagagacacctctctgccctgttccaagttagggaaagcaaagaccaatgtcttgtgtcagtcctttaggtaacccgcagctcaaaacaggcaaacgcaattctttcaaatttcttcctctggaagcagggactaaggagtaggttcccagactgagatgcaggctgctgtcttcagactgccactggggaagggaagagagagggcaagtcaaatgctgcaagctttt

SEQ ID NO: 104440 - DNA, 952 bp, Homo Sapiens
ttggatggggagggcctgggattactggcatcacaaaccccactgcctgcaggctgcatgatctcctgggcatggttggcggcactgccccgggcatgaggaggcagcaggcatgtgtggatcacggacagtgctggggtcgagggggttggtgacggtgtgacaccccttcccctgagtggctgggtgttactgtcaattctcccaagtgctgtgcttcagtggtcgtggcagtctggtgctgcctctgcccaactggcaggcgacccttattcctgagtccctgctgacttggtgtcctaggtttattcctcctatacttgttaacttgtacagttaacaagcctttgacaccacacaccctcgcctcagctttccaaccccctagtaataacaacatcaggactccctgagtatcctccaccatatgttttcctggagtaactcataaaaggccctcttttcgttccatttcatgcttgggtttttcatgcgaacctgtcattattagtttttccgcattgcctagagttgcccaaccccataataagaatacgtaggtggcgtgccccattcttgcaggtgtccacttcctgctccagtctgagggggttggctaggctgctgctctctctccatgtggggttggctaggctgctgctctctctccacgttgctgtgggctcgcatcctctccctggttccctgggggagcttcttatggagggagcatgtgagagatctgaggccctgcagtttgggagttattttcattctcccctaacacttgttggatactttggctgggtatagaattaaagggtttcgaaagcagtgtttcagagtcttccattctctggggcatcagagtgtcatttgcccctgtgcattctggagtccaccttgcactttattgggtctcatctaggtccttggctttgcgcttcagccc

SEQ ID NO: 104441 - DNA, 875 bp, Homo Sapiens
acaaaaaagttagggcaagcttctatctgcacctgctctcaatcctgctctcaccatgagcctccgcctgcagagctcctctgccagctatggaggtggtttcgggggtggctcttgccagctgggaggaggccgtggtgtctctacctgttcaactcggtttgtgtctgggggatcagctgggggctatggaggcggcgtgagctgtggttttggtggaggggctggtagtggctttggaggtggctatggaggtggccttggaggtggctatggaggtggccttggaggtggctttggtgggggttttgctggtggctttgttgactttggtgcttgtgatggcggcctcctcactggcaatgagaagatcaccatgcagaacctcaacgaccgcctggcttcctacctggagaaggtgcgcgccctggaggaggccaacgctgacctggaggtgaagatccgtgactggcacctgaagcagagcccagctagccctgagcgggactacagcccctactacaagaccattgaagagctccgggacaagatcctgaccgccaccattgaaaacaaccgggtcatcctggagattgacaatgccaggctggctgtggacgacttcaggctcaagtatgagaatgagctggccctgcgccagagcgtggaggccgacatcaacggcctgcgccgggtgctggatgagctcactctgtctaagactgacctggagatgcagatcgagagcctgaatgaagagctagcctacatgaagaagacccatgaagaggagatgatgaatttagcaaccaggtggtcggccaggtcaacgtggagatggatgccaccccaggcattgacctgacccgcgtgct

SEQ ID NO: 104442 - DNA, 1030 bp, Homo Sapiens
tacaaaaaagttggcttggctgtctggtttcaccaggaactctacccaaaagaggaaacagcaaggagaacatttgctttgtttgtaggagggaagtggtcgagctacaaacaaatctttaggcatctgaggaattgctaagtttctaatttcatatggttgctgacaaggaggtgcagacaaggaccctcttgctttcctcactatggatagtctgttgcctccatctagattctcttatttcaaaaaatatcctctccatgcaattaggagatatttatcgacgctgagaaaccaaagagccgaagaacaggttgcacgttttcaaaaaatacctaatggtgaaaatgagacaatgattcctgtattgacatcaaaaaaagcaagtgaattaccagtcagtgaagttgcaagcattctccaagctgatcttcagaatggtctaaacaaatgtgaagttagtcataggcgagcctttcatggctggaatgagtttgatattagtgaagatgagccactgtggaagaagtatatttctcagtttaaaaatccccttattatgctgcttctggcttctgcagtcatcagtgttttaatgcatcagtttgatgatgccgtcagtatcactgtggcaatacttatcgttgttacagttgcctttgttcaggaatatcgttcagaaaaatctcttgaagaattgagtaaacttgtgccaccagaatgccattgtgtgcgtgaaggaaaattggagcatacacttgcccgagacttggttccaggtgatacagtttgcctttctgttggggatagagttcctgctgacttacgcttgtttgaggctgtggatctttccattgatgagtccagcttgacaggtgagacaacgccttgttctaagtgacagctcctcagccagctgcaactaatgagatcttgcatcgagaagtaacattgcctttatgggaacactggtcagatgtggcaaagcaaaggtgttgtcattggaacagagaaattctgaatttgggga

SEQ ID NO: 104443 - DNA, 901 bp, Homo Sapiens
ccattttgagcttcgtgtatgttttgttttcaatcttatttaggatctcaagccatttttggtttttctcatattcattgacttttaaatccactgttgcaatcatgtctttaattaagcaaagcgctttgcgtaagtctttatgttcctcagttctttcctttgtgtactgcaatatcctttccaccaagacagggtattttgtaatacgctgagtgaccaacagaatgcattctggaattcctcggcgtcgagccaaaagattactatttcggagcttaaaaaatatatacttttatgtacacaaattctacctgtatttacttttcaggtgtgaatgtaacaatacaaagaatctgcaacagtacaattttatgcagacttaacattcattgctatcaattaaaacgatgcattatcactaatttaaattgcatactttgtcataaatttcagtaccccaactctccatgattttaagaagtttcaagttactgatgtatttgtagttaatttcaaaagaagttccaatacttctaagtgcctcgatttatgaatagcaaaatttttgaaaaataatcataaatcaaagtcaactttgaacatcagtttgcagtttaccatttgttttcccaacaggtcttcctccacatttgttattattcattataactcttagagttccctctaatcaggacaactttttttctaaaaatatcaaagtattcctcatagtattcaagtcctcaacacacatttatgtggtaaaaaagggaagagaatctggtagcattcttaacatggcagataaaaatttagaatccaggaaactttataagacaaatttcttcaacaaataaatcagaagaagaaaaaaggggtgggataacattcaaaccaa

SEQ ID NO: 104444 - DNA, 891 bp, Homo Sapiens
ctttgtacaaaaaagttggtttcaaagccagctgaaggaaagaggaagtgctagagagagcccccttcagtgtgcttctgacttttacggacttggcttgttagaaggctgaaagatgatggcaggaatgaaaatccagcttgtatgcatgctactcctggctttcagctcctggagtctgtgctcagattcagaagaggaaatgaaagcattagaagcagatttcttgaccaatatgcatacatcaaagattagtaaagcacatgttccctcttggaagatgactctgctaaatgtttgcagtcttgtaaataatttgaacagcccagctgaggaaacaggagaagttcatgaagaggagcttgttgcaagaaggaaacttcctactgctttagatggctttagcttggaagcaatgttgacaatataccagctccacaaaatctgtcacagcagggcttttcaacactgggagttaatccaggaagatattcttgatactggaaatgacaaaaatggaaaggaagaagtcataaagagaaaaattccttatattctgaaacggcagctgtatgagaataaacccagaagaccctacatactcaaaagagattcttactattactgagagaataaatcatttatttacatgtgattgtgattcatcatcccttaattaaatatcaaattatatttgtgtgaaaatgtgacaacacacttatctgtctcttctacaattgtggtttattgaatgtgatttttctgcactaatataaattagactaagtgttttcaaataaatctaaatcttcagcatgatgtgttgtgtatatttggagtagatattattaagtcacctgtataatgttttgtaattttgcaaacatatct

SEQ ID NO: 104445 - DNA, 888 bp, Homo Sapiens
ttggctctcacatcctgtctgtctgggtcttcctctctctctacgtgtctcttgctcagtctctatctctttttattgacccttctctgactctcgatctctcatagttgtctcttatctctgggtctctcaggctgtgcctctatgacctgtgcctcagcccttatttaatgtgtttctctccctgtctcttggtccctggggctctttctctcctgttgtctctcgctgtctctgtcttactcagtgtctgtttttctttcgtgacttctccctctctttctgactctgggccccactcaatctgtttctctcacgcacactttgtctctggggcacccaggccttccctgccatgcgacctgtcagtgtctggcagtggagcccctgggggctgctgctgtgcctgctgtgcagttcgtgcttggggtctccgtccccttccacgggccctgagaagaaggccgggagccaggggcttcggttccggctggctggcttccccaggaagccctacgagggccgcgtggagatacagcgagctggtgaatggggcaccatctgcgatgatgacttcacgctgcaggctgcccacatcctctgccgggagctgggcttcacagaggccacaggctggacccacagtgccaaatatggccctggaacaggccgcatctggctggacaacttgagctgcagtgggaccgagcagagtgtgactgaatgtgcctcccggggctgggggaacagtgactgtacgcacgatgaggatgctggggtcatctgcaaagaccagcgcctccctggcttctcggactccaatgtcattgaagtaaaccatcacctgcagtggaaggaggtgcgaattcgacccgccgttgggtgggg

SEQ ID NO: 104446 - DNA, 605 bp, Homo Sapiens
ctcaaaacaaaacaaaacaagttctgctcttgaaatgattatcctaagaataagcagaatgaaaaggtgaaatgagtttcgaggtctaaatgccaaggatacagttcaggagttttgtacccctccctgccttatgcatgaagcttttttgtggggaattcttttaattactggaagcatacacgcagctgatggcattcttcaatctcacaattgaaggttacaccttcacgcctagtgcttggtcaatgtggacaaaagaagccacgttctggaaatgttgaagatgccacgggccatttccacacgtttcagcctaggaaggtggtcgtcttttggtaacatctagatagaaaaaacgaggcacttgaatcctaaatcttatgttgatatgcaatccaaaaatagcatatattgaagatttttatatacttcaacattttccgtggaaagcctttatattcttagttataggcaagagcccaagatttctgagattccacagccaaatcatcagtgaaatagaaagaaaaaaacactcttactggaagccacatgcaagagaccggtgacagtgtcaggaaagaccgccatttctatttttt

SEQ ID NO: 104447 - DNA, 927 bp, Homo Sapiens
ttggcacgatggcaagaaccagccaagcaaaacatacccagcctttctggaaccagatgagacattcattgtccctgactccttcctggtagccctggacatggacgacgggactctgagcttcattgtggatggacagtacatgggagtggcttttcggggactcaagggcaaaaaactgtatcctgtagtgagtgccgtctggggccactgtgagatccgaatgcgctacttgaacggactcgatcccgagccgctgccgctcatggatttgtgccgtcgctcggtgcgcctggccctggggagggagcgcctgggggagatccacacgctgccgctgccggcttccctcaaggcctacctcctctaccagtgacgttcgccatcataccgccagcgcgacagccacctggtgccaactcactgagccgcctgccgctggggccgccgcaccctgcaccttggaccggcatccgtagccatggacagaggtccctggtcttccctcatcctccgtggctgcctccatgggacaaggaccgattccaacacaggctcctctttcccccttcccgacatcagcagaaggcagcatccctgcatgccgtccatatacaacccctctttgaaaaaagacacagagaataaactcctacgaaagccctacattgagctccaatctgctcggggtgggacgggtgcttcccacacctctgggagaaggctgcagccacctgggggtcccagggtggtgggggtggcagtggtaccacagctctgagagcagataccaggggtactaagagtgcttagacaagggctggtgcccggcccagggtgcccagcggggccatgccatggcagataaagctcagacgtcaaaaactcaccatggaccccaaggcagaaccaagaactgtctgcagg

SEQ ID NO: 104448 - DNA, 926 bp, Homo Sapiens
  misc_feature (193)..(201): n is a, c, g, or t
  misc_feature (214)..(278): n is a, c, g, or t
  misc_feature (289)..(475): n is a, c, g, or t
ttggctccctctaagaaaagaaaaaacaaggaaagtgcacacatcctaggtgtacaagtcgtcgcaaaacacatgcgtggcgagctgccacccaggagaaacagaacatggccagccctctggaagtcttccctcctgctcctatcaactcctccctccccttctgaggcttccactggcctaacttcctccnnnnnnnnngagacacggtctnnnnnnnnnnnnnnnnnnnnnnnnnnnnnnnnnnnnnnnnnnnnnnnnnnnnnnnnnnnnnnnnngctcaagcagnnnnnnnnnnnnnnnnnnnnnnnnnnnnnnnnnnnnnnnnnnnnnnnnnnnnnnnnnnnnnnnnnnnnnnnnnnnnnnnnnnnnnnnnnnnnnnnnnnnnnnnnnnnnnnnnnnnnnnnnnnnnnnnnnnnnnnnnnnnnnnnnnnnnnnnnnnnnnnnnnnnnnnnnnnnnnnnnnnnnnnnnnnnactgtcctcacttccaacaccacgggtcccttttgcctggttgaatataattgcagctgtaccctaggatcatcaggggccacccgagtctgtgtcagtccgtactgtcacatggccacagactatctcatggctgggacagtcacagtttattcccccaggcccttgggactgaaagaatccaagatctggatctcctctatagcgcccagaaccacagccaccgtcctgaagcacacggccttcacacgtttctacacgaagggagttttctgtcctgcttccttggacacagcaataatcagggagcagttgtcttgacctatgatgagggggtgaccggccatccctgggcatgggatggggagtgtgggtgggggctggctgtgggggctccgcgcctggatgtgatgttgaaatttgtgttgctttaaccgcctttactttctga

SEQ ID NO: 104449 - DNA, 929 bp, Homo Sapiens
caacttttgtacaaaaaagttggcactgtgaaagctactacttctgaatcctaatggctgtttttacatctcttcctcattctttaactcttaactggatgactgatgaaaatataacttaaaccatccaggggccttttcacatgtttcttttctcttgccccacctatttgtatttatttctgttcttctgtggaatggtactagccaggtagtaccgtggtggcatggtattagtagccatagtggtagcagattaatactgttaacgttttctcaggaagctggactctctgactttgatatctgtagtctctattaactgctgtcaaacgcctacgggtgttttttcaaatcttaacttgtcagtatcgctgaacttagaaaaaaacctttgtgggtattactgaaatatgaaagggaaggaagtatattaaaagtctcaaattgtttgaaatgtgacattacgaggtgttccttctggctcctataggatggacactccacagctgaccttgactgaactccgggtccttcttgagcagatgggcagcctgccctgtgccatgcatcagattggggatgtcaaggtaaggaggggcctggaaaggtggaattcttgttaacagcaaatactcaggaagtctgacatgtcaggaaaacttgagaacctaattattctaaacaaccttctcataataacaggttctttcctggaagtggcggagatatgtgttcccataccatctctgtgtgtacagcatgcaagaaatatccttccagactgaaataattaaaaactctaaactgggcctacataagacactggctcttgggaatggggtggagaggactgattggttggttggttgatttccctccagacaccagagtctagaaagcttactagatggatagattgtattaaa

SEQ ID NO: 104450 - DNA, 831 bp, Homo Sapiens
tcatttgtaaatttggattaaagtgtttattatgataatcaattaagaaaatctcttaacacttcatacatacagagaacttatcattaagttaaaactggcaattaatgcacctttatatatatttttaaatgaaaactaatactattcatgatgtttattttatatcaaatatatgcccagggcatgctactttaaaaatccgaggaatctccaacaaggtgctggattaaaatcagatttcgtgcttgaagtggaagaaaaatgaagttgtttatggataagagagtgagaatgtgtatcctcaagtacgttaagatgatttaactgaaagatggctttaggtttttcttgaagaattaggaaagtaccatccccacagattcagcatactcttcaggtactagataaaggtgaaggaagtcatggaattaaaatgacttagcaactccccagggaacttgtggggagaatgaggtggttagaaaggtgagaatgcacaaagacagctctgggttgggtaccaacagtttgcttggtagaaagaaaccagtgtaggaaaggagacgccaccagacatcttcaacagacaagattctttctgcctttttcaaaagatgctctctgcagcagtaagactatagatagagttgattggaatatcatgtgacccagtatgctactgctaggcataattatcaaaattcatttttctcattaaatattgttaattgctcgccacataaagagaagctagagctcaccagtcttggtggtgtcctagaacttcctctaaagcagtcttggggaagctggatcatcaaatcttta

SEQ ID NO: 104451 - DNA, 899 bp, Homo Sapiens
ttggcgaaagccggcgcttgagatccaggcaagtgaatccagccaggcagttttcccttcagcacctcggacagaacacgcagtaaaaaatggctccgatcaccaccagccgggaagaatttgatgaaatccccacagtggtggggatcttcagtgcatttggcctggtcttcacagtctctctctttgcatggatctgctgtcagagaaaatcatccaagtctaacaagactcctccatacaagtttgtgcatgtgcttaagggagttgatatttaccctgaaaacctaaatagcaaaaagaagtttggagcagatgataaaaatgaagtaaagaataagccagctgtgccaaagaattcattgcatctggatcttgaaaagagagatctcaatggcaattttcccaaaaccaacctcaaacctggcagtccttctgatctggagaatgcaaccccgaagctctttttagaaggggaaaaagagtcagtttcccctgagagtttaaagtccagcacttcccttacttcagaagagaaacaagagaagctgggaactctcttcttctccttagaatacaacttcgagagaaaagcatttgtggtcaatatcaaggaagcccgtggcttgccagccatggatgagcagtcgatgacctctgacccatatatcaaaatgacgatcctcccagagaagaagcataaagtgaaaactagagtgctgagaaaaaccttggatccagcttttgatgagacctttacattctatgggataccctacacccaaatccaagaattggccttgcacttcacaattttgagttttgacaggttttcaagagatgatatcattggggaagttctaattcctctctcgggaattgaattatctgaaggaaaa

SEQ ID NO: 104452 - DNA, 876 bp, Homo Sapiens
ttggagatttctgaaaatatactaatgataaagcatagattggttctttggttcatatgtttttaaaattctctcaatctatgatacccagaagaatgcaagtggactgttgtttctttttataaatttatgtacaagcaatttccaaaatagatttgaagaagcatattctgtaatttgatttcctagggatagttgattcacatccctaccatttttagcctatgtgaaactttccaggcagtgtgaatctatcacctcttaaaaaaggagttcctgaaaattctgtccatggaatcatttcattgctaaaaattaaaggaataggcttaagtaggtaagattagcacaaagggaagcaacagtatttcccttctaggggcttaaggatttctggagaaaaaaagagttcccaacacatttcagtgaaaatgatttactgatcatctaaaatgttgtatggcagtgaaaatgggttgctagaattggaaaatgtcatttgcaaatgtttaagtagtattttttgtgttcacagaattcttcaacattgtgtgaagatgagactttctttaagccataactatcgtatatgctgctggaaaatggtacctgggataaatgatagcaatatactgcctttggttttgaaagagtcactcatacccagtgtgggaagatttcttgcctactctgatgacaaagtacatgctatctttttagatggcattactctaaccctaaattggaaattcagctctcctattgagaagagacaggtaaatcaaggtcttacttagttggtgtaagttaacttttcctgatggacaagagcagttattcagattgaacaccctgaaccatatgaaagatatgtga

SEQ ID NO: 104453 - DNA, 844 bp, Homo Sapiens
taactcagggtatgaccaagtctcccttgtctgacaggccttattaagaatgagtgtggtagtgagtagctctaagacagcccccagggatcccagtctcctggtgctcacacccttgagagttcctctgctcctgagtgtggatgaaaacctgtgacttccttctaaccatcagaatccagcaaagaccgcgggatgtcacttccatgattacactgcacaaggttgtaactgctgtcttgttagactctccactgccttcttggtttacatgctttgatgaaggaagtggccatgttgaggaggttcacgtggaaacaaactgaaggtggccttcagcagatggacagctaccaactaaggccctcaatccatcagctggagggaaccaaatcccaacaaccacatgagcttggaaagcatgtccttcctcactcaaagaggaagcccagccctggccatcaccttgactccagccttgagaccccagccctggctaccatcttgactgcggccatgcaaagatcttgaagcagaggacctagctcagccatgtctgaattcttcatccgcagaaaccatgagattataaatgtgtgttgggtaagtcactaattttgcagttacctttaaatattgtgcttacctttacatatttaaaattaatttttaaaaatacaattagttctaattaatcagtattaaaacatcccctgcccaagtctaacaagactttaagcttgcattttacttttctcttacttcttgaccatctctttcctgttgttgaaattatcaaattttaatgtgtatgatttttaagtacacatctcccctctattct

SEQ ID NO: 104454 - DNA, 966 bp, Homo Sapiens
ttgggccctgtcccagctcaaatagctataactgtaccaaagacatggaagaaaccaaaagatcggacccgaaccactgaagagatgttagaggcagaattggagcttaaagctgaagaggagctttccattgacaaagtacttgaatctgaacaagataaaatgagccaggggtttcatcctgaaagagacccctctgacctaaaaaaagtgaaagctgtggaagaaaatggagaagaagctgagccagtacgtaatggtgctgagagtgtttctgagggtgaaggaatagatgctaattcaggctccacagatagttctggtgatggggttacatttccatttaaaccagaatcctggaagcctactgatactgaaggtaagaagcagtatgacagggagtttctgctggacttccagttcatgcctgcctgtatacaaaaaccagagggcctgcctcctatcagtgatgtggttcttgacaagatcaaccaacccaaattgccaatgcgaactctggatcctcgaattttgcctcgaggaccagactttacaccagcctttgctgattttggaaggcagacacctggtggaagaggcgtacctttgttgaatgttgggtcacgaagatctcaacctggccaaagaagagaacccagaaagatcatcacagtttctgtaaaagaagatgtacacctgaaaaaggcagaaaatgcctggaagccaagccaaaaacgagacagccaagccgatgatcccgaaaacattaaaacccaggagctttttagaaaagttcgaagtatcttaaataaattgacaccacagatgttcaatcaactgatgaagcaagtgtcagacttactgttgacacagaggagcggctgaaaggagttattgacctggtctttgagaagctattgatgaacccagtttctctgtggcttacgcaacatgtgtcgatgtcta

SEQ ID NO: 104455 - DNA, 263 bp, Homo Sapiens
tcccaggtttccgagtgcagggagggtctcaggatgggcggtatgtccttgccctgctgagcgaggggtagtgggcaggatggagagaggagagattaaatgaggcagcagacctcatgaaggagagccggaggggcaggggcttagctcaactgggctggctgtggttggccctgcccaggagccagctgcctttccagggctgccccactctgctgcctcagcctactgccatttgtgcagtcttactctgctggcagctc

SEQ ID NO: 104456 - DNA, 595 bp, Homo Sapiens
gaagatataataattataaacatgtatgtacctaataacagcaccaaaatacatgaagcaaaatctgacagaaatgaagagagacaactcaacaatactagttggagacttaatatcccactttcaatattagaacaatcgtataagttgtctaggactgtcgtaacaaagaaccacaaactggatggcttaaacaacacagatatattgtcttactgttctggagcctccatgtttgaaatcaaggcattgacaggttttggttccttctgagggctctgagggaaggatctgttccaggcctctctccttggcttgtagatggctgtcttctcactgtctcatcacataatctcccttctatatgcacatatctctgtgcaaacgtcccctttttatagggacatcagtcatattgactcctaagtcctcattttaacactgttaactctgtacagaccctctctccaaataagcctcactctgagtatggaaattagaccccaacatatctctttgagttggggggacactactcaacactgaagtgtttatgggatgtcgaggaaattatgcctccacctatgctcataca

SEQ ID NO: 104457 - DNA, 931 bp, Homo Sapiens
  misc_feature (710)..(726): n is a, c, g, or t
gtacaaaaaagttggggacattgtgttagtctgttttgagctgctataacagaataccacagactgggtaatttataaagaacaggaatttgtttcctcacaggtctggaagtcaggaaatccaagatgaaggcactggcaggttcagttatctggtgaaggtctggtctttttgcttccaagatggcagtttgactgttgcgtattgaggagcgggggaagaatgctgtgtgctcatataacagaaggcagaaggacaaaaagggatgactccctctttgaagcccttttataagggcatctaatcccattcacaagacaggagcccttgtggcctaatcaccttttaaaggccctacctcttaatactgtcacattagcaacacctaagttttggaggagacacattcaaaccatagcaggtgtaaaagacaagcatttaatcagactgtttgtcagtcgataatttttccttccctgcaggagacatgtctatgagtggctgggagacctgtttaattctgggatatagaattaagatggccatctgcctgcaaagtagagataagctgcattctccgaaatcaactttgttcatgataaaagtaacattctggcctccatatgccatattctttattgttaatttcttaaacagttaacaaattggttagagaagaggcaggctatctattgccccatcctctacnnnnnnnnnnnnnnnnnaaactaaatacctaatcgttatattgttattcttttgactattattgctctccttaacacatataaaattagaccaaactgacatgatcatatttttaaaaataccgatatttcttttcttgaaagggaaacagaaaaagggaaaatggccttaaatggtctacttatccataactagaattaaaaatcccagtctttgtggctg

SEQ ID NO: 104458 - DNA, 508 bp, Homo Sapiens
ttggtctcatgcaattttcgttatcactattgagtgcagcgaggtgggcctcgatggtgaaaaccacatccgtgtaggaaaattgaaccttgtagatcttgctggcagcgaacggcaagccaagaccggcgcacaaggggagagattaaaagaagctaccaagatcaacctctccctttccgctttgggtaatgtcatctctgctctagtggacggcaaaagcactcacattccatatcgggactcaaagcttaccaggctcctccaagattcccttggtggcaatgccaagactgtgatggtggccaacgtggggcctgcctcttacaacgtagaagagactctgaccactctgcgatatgccaaccgtgccaaaaacattaagaacaaaccaagggtcaatgaggaccccaaggatgccctccttcgagaattccaggaagagattgctcggctcaaggcccagctggaaaaacggtccattggtaggaggaagaggcgagagaag

SEQ ID NO: 104459 - DNA, 963 bp, Homo Sapiens
actttgtacaaaaaagttgggatgggtgtcacaacccgcatttgaacttgcaggcgagctgccccgagcctttctggggaagaactccaggcgtgcggacgcaacagccgagaacattaggtgttgtggacaggagctgggaccaagatcttcggccagccccgcatcctcccgcatcttccagcaccgtcccgcaccctccgcatccttccccgggccaccacgcttcctatgtgacccgcctgggcaacgccgaacccagtcgcgcagcgctgcagtgaattttccccccaaactgcaataagccgccttccaaggccaagatgttcataaatataaagagcatcttatggatgtgttcaaccttaatagtaacccatgcgctacataaagtcaaagtgggaaaaagcccaccggtgaggggctccctctctggaaaagtcagcctaccttgtcatttttcaacgatgcctactttgccacccagttacaacaccagtgaatttctccgcatcaaatggtctaagattgaagtggacaaaaatggaaaagatttgaaagagactactgtccttgtggcccaaaatggaaatatcaagattggtcaggactacaaagggagagtgtctgtgcccacacatcccgaggctgtgggcgatgcctccctcactgtggtcaagctgctggcaagtgatgcgggtctttaccgctgtgacgtcatgtacgggattgaagacacacaagacacggtgtcactgactgtggatggggttgtgtttcactacagggcggcaaccagcaagtacacactgaattttgaggctgctcagaaagcttgtttggacgttggggcagtcatagcaactccagagcagctctttgctgcctatgaagatggatttgagcagtgtgacgcaaggctggctggctgatcagactgtcagatatcccatccgggctccc

SEQ ID NO: 104460 - DNA, 789 bp, Homo Sapiens
gaatccaaaggctaaacatgatgaatagacacaagcgagctcattctctacggtttagcatgtatggcgctatttgggagtgtaaatagagtagataccttttcacattataatattggcctgcatgattcaagtattcaaactgatatgttttggggaaaacaaagtggaaaatgtgcagagaatagctgttcccacaggcggcccctggctgcaggcggcgagccccacttagtgctcctttcccttgcgtctgaggtcccggtcggtgagtctgcatctacactgttacatggactctccacccccacccaggtggtcaacagaaagaaaagcgttaatgggagatgggctgctaattcctcgggggtcgctgctgcttgggggaccccacaggcttgtggaataatgcggggtcccccagagtgaagtgccgtgaaggtctccacagttagttcccgacagcccagcaccattccagtgattgagatcggtccggctggagaatgagtgggaacagtcgagggagcccagccggctctggctggacccgagagactgccagccgggagaaggggtcagagactggctttgtgcaaagaaacgactgatctcctcttcactggcaaactcagcaagaatagtagtgttccccagtacacacatgtgcagagacttttgtgccttcactacctcttcttttgaactgtagcggaccagagcatttccgtgagggaggttcaggtggaatgtgatcagcgggccgtgctgcatgcacagagtgcccaa

SEQ ID NO: 104461 - DNA, 910 bp, Homo Sapiens
  misc_feature (624)..(666): n is a, c, g, or t
actttgtacaaaaaagttggcacatggttgcacacacaaaagacatgccatttacatgcgaaacctgtggaaaatcattcaaacgcagtatgtcactcaaggtgcactccttgcagcattctggagagaagccctttagatgcgagaactgtgacgaaaggtttcagtacaagtaccagctacgctcccacatgagcattcatattgggcacaaacagttcatgtgccagtggtgtggcaaggatttcaacatgaagcagtacttcgacgaacacatgaaaacacacactggagagaaaccctttatctgtgaaatctgtggcaaaagcttcaccagccgccccaacatgaagagacaccgcagaactcacacaggcgagaagccctatccatgtgatgtgtgtggccagcggttccgcttctcgaacatgcttaaggcccacaaggagaagtgctttcgggtgaccagccccgtgaatgtgccacctgctgtccagatcccacttacaacttccccagccaccccagttccttctgtggtgaacacagccacaaccccaacccctccaatcaatatgaatcctgtaagcactcttccccctcggcccatcccccaccccttcnnnnnnnnnnnnnnnnnnnnnnnnnnnnnnnnnnnnnnnnnnnttcccatccctccagtccctcacctcccgccacctccagctctctttaagagtgagcctttaaatcatagaggccagagtgaggacaactttctgcggcacctggcagagaagaacagttcagcacagcatcattaacatccgtctccttagtgtgttctccaggagacacgtccccatgtgtgagcgtgcacagagggagtcggtgagcatttcctttagttctcagactctcctccgcctct

SEQ ID NO: 104462 - DNA, 836 bp, Homo Sapiens
ttgggccgagatgcgggtcatggcgccccgaaccctcatcctgctgctctcgggagccctggccctgaccgagacctgggccggctcccactccatgaggtatttctacaccgctgtgtcccggcccggccgcggggagccccacttcatcgcagtgggctacgtggacgacacgcagttcgtgcggttcgacagcgacgccgcgagtccgagaggggagccgcgggcgccgtgggtggagcaggaggggccggagtattgggaccgggagacacagaagtacaagcgccaggcacagactgaccgagtgagcctgcggaacctgcgcggctactacaaccagagcgaggccgggtctcacatcatccagaggatgtatggctgcgacgtggggcccgacgggcgcctcctccgcgggtatgaccagtacgcctacgacggcaaggattacatcgccctgaacgaggatctgcgctcctggaccgccgcggacacggcggctcagatcacccagcgcaagtgggaggcggcccgtgaggcggagcagctgagagcctacctggagggcctgtgcgtggagtggctccgcagatacctgaagaatgggaaggagacgctgcagcgcgcggaacacccaaagacacacgtgacccaccatcccgtctctgaccatgaggccaccctgaggtgctgggccctgggcttctaccctgcggagatcacactgacctggcagtgggatggggaggaccaaactccatgacactgagcttgtggagaccagggccagcaggagatgggaacccttccagaagtgggccagctgtggtggtgcc

SEQ ID NO: 104463 - DNA, 942 bp, Homo Sapiens
actttgtacaaaaaagttggccgagatgcgggtcacggcaccccgaaccgtcctcctgctgctctggggggcagtggccctgaccgagacctgggccggctcccactccatgaggtatttctacaccgccatgtcccggcccggccgcggggagccccgcttcatcgcagtgggctacgtggacgacacccagttcgtgaggttcgacagcgacgccgcgagtccgaggatggcgccccgggcgccatggatagagcaggaggggccggagtattgggacggggagacacggaacatgaaggcctccgcgcagacttaccgagagaacctgcggatcgcgctccgctactacaaccagagcgaggccgggtctcacatcatccaggtgatgtatggctgcgacgtggggccggacgggcgcctcctccgcgggcatgaccagtccgcctacgacggcaaggattacatcgccctgaacgaggacctgagctcctggaccgcggcggacacggcggctcagatcacccagcgcaagtgggaggcggcccgtgtggcggagcagctgagagcctacctggagggcctgtgcgtggagtggctccgcagatacctggagaacgggaaggagacgctgcagcgcgcggaccccccaaagacacatgtgacccaccaccccatctctgaccatgaggccaccctgaggtgctgggccctgggcttctaccctgcggagatcacactgacctggcagcgggatggcgaggaccaaactcaggacaccgagcttgtggagaccagaccagcaagagatagaaccttccagaagtgggcagctgtggtggtgccttctggagaaagagcagagatacacatgccatgtacagcatgaggggctgccaaaccccctcaccctgagatgggagccatcttcccaatccaccg

SEQ ID NO: 104464 - DNA, 746 bp, Homo Sapiens
ctttgtacaaaaaagttggcgagcagacaaaccctcatcgcagataacgtgaaggactggagcaaggtcgtcctggcctatgagcctgtgtgggccattggtactggcaagactgcaacaccccaacaggcccaggaagtacacgagaagctccgaggatggctgaagtccaacgtctctgatgcggtggctcagagcacccgtatcatttatggaggctctgtgactggggcaacctgcaaggagctggccagccagcctgatgtggatggcttccttgtgggtggtgcttccctcaagcccgaattcgtggacatcatcaatgccaaacaatgagccccatccatcttccctacccttcctgccaagccagggactaagcagcccagaagcccagtaactgccctttccctgcatatgcttctgatggtgtcatctgctccttcctgtggcctcatccaaactgtatcttcctttactgtttatatcttcaccctgtaatggttgggaccaggccaatcccttctccacttactataatggttggaactaaacgtcaccaaggtggcttctccttggctgagagatggaaggcgtggtgggatttgctcctgggttccctaggccctagtgagggcagaagagaaaccatcctctcccttcttacaccgtgaggccaagatcccctcagaaggcatgagtgctgccctctcccaggtgcccgtgcctctgtgctgtgtatgtga

SEQ ID NO: 104465 - DNA, 947 bp, Homo Sapiens
ttgggaccttggcagcgcctcggctccagcgccatggcgccctccaggaagttcttcgttgggggaaactggaagatgaacgggcggaagcagagtctgggggagctcatcggcactctgaacgcggccaaggtgccggccgacaccgaggtggtttgtgctccccctactgcctatatcgacttcgcccggcagaagctagatcccaagattgctgtggctgcgcagaactgctacaaagtgactaatggggcttttactggggagatcagccctggcatgatcaaagactgcggagccacgtgggtggtcctggggcactcagagagaaggcatgtctttggggagtcagatgagctgattgggcagaaagtggcccatgctctggcagagggactcggagtaatcgcctgcattggggagaagctagatgaaagggaagctggcatcactgagaaggttgttttcgagcagacaaaggtcatcgcagataacgtgaaggactggagcaaggtcgtcctggcctatgagcctgtgtgggccattggtactggcaagactgcaacaccccaacaggcccaggaagtacacgagaagctccgaggatggctgaagtccaacgtctctgatgcggtggctcagagcacccgtatcatttatggaggctctgtgactggggcaacctgcaaggagctggccagccagcctgatgtggatggcttccttgtgggtggtgcttccctcaagcccgaattcgtggacatcatcaatgccaaacaatgagccccatccatcttccctacccttcctgccaagccagggactaagcagcccagaagcccagtaactgccctttccctgcatatgcttctgatggtgtcatctgctccttcctgtgggcctcatcccaaactgtatcttcctttactgtttatatcttcaccctg

SEQ ID NO: 104466 - DNA, 967 bp, Homo Sapiens
tacaaaaaagttggcgcgtccgccccgcgagcacagagcctcgcctttgccgatccgccgcccgtccacacccgccgccagctcaccatggatgatgatatcgccgcgctcgtcgtcgacaacggctccggcatgtgcaaggccggcttcgcgggcgacgatgccccccgggccgtcttcccctccatcgtggggcgccccaggcaccagggcgtgatggtgggcatgggtcagaaggattcctatgtgggcgacgaggcccagagcaagagaggcatcctcaccctgaagtaccccatcgagcacggcatcgtcaccaactgggacgacatggagaaaatctggcaccacaccttctacaatgagctgcgtgtggctcccgaggagcaccccgtgctgctgaccgaggcccccctgaaccccaaggccaaccgcgagaagatgacccagatcatgtttgagaccttcaacaccccagccatgtacgttgctatccaggctgtgctatccctgtacgcctctggccgtaccactggcatcgtgatggactccggtgacggggtcacccacactgtgcccatctacgaggggtatgccctcccccatgccatcctgcgtctggacctggctggccgggacctgactgactacctcatgaagatcctcaccgagcgcggctacagcttcaccaccacggccgagcgggaaatcgtgcgtgacattaaggagaagctgtgctacgtcgccctggacttcgagcaagagatggccacggctgcttccagctcctccctggagaagagctacgagctgcctgacggccaggtcatcaccattggcaatgagcggttccgctgccctgaggcactcttccagccttccttcctgggcatggagtcctgtggcatccacgaaactaccttcaactccatcatgaagtgtgacgtggacatccgcaaagacctgt

SEQ ID NO: 104467 - DNA, 1138 bp, Homo Sapiens
ccaactttgtacaaaaaagttggcgccgcgctgcgtcattgacaatggctccggcatgtgcaaagctggttttgctggggacgacgctccccgagccgtgtttccttccatcgtcgggcgccccagacaccagggcgtcatggtgggcatgggccagaaggactcctacgtgggcgacgaggcccagagcaagcgtggcatcctgaccctgaagtaccccattgagcatggcatcgtcaccaactgggacgacatggagaagatctggcaccacaccttctacaacgagctgcgcgtggccccggaggagcacccagtgctgctgaccgaggcccccctgaaccccaaggccaacagagagaagatgactcagattatgtttgagaccttcaacaccccggccatgtacgtggccatccaggccgtgctgtccctctacgcctctgggcgcaccactggcattgtcatggactctggagacggggtcacccacacggtgcccatctacgagggctacgccctcccccacgccatcctgcgtctggacctggctggccgggacctgaccgactacctcatgaagatcctcactgagcgaggctacagcttcaccaccacggccgagcgggaaatcgtgcgcgacatcaaggagaagctgtgctacgtcgccctggacttcgagcaggagatggccaccgccgcatcctcctcttctctggagaagagctacgagctgcccgatggccaggtcatcaccattggcaatgagcggttccggtgtccggaggcgctgttccagccttccttcctgggtatggaatcttgcggcatccacgagaccaccttcaactccatcatgaagtgtgacgtggacatccgcaaagacctgtacgccaacacggtgctgtcgggcggcaccaccatgtatccgggcattgccgacaggatgcagaaagagatcaccgccctggcgcccagcaccatgaagatcaagatcatcgcacccccagagcgcaagtactcggtgtggatcggtggctccatcctgacctcactgtccaccttccagcagatgtggaatagcaagcagagtacgacgagtcgggcccctccatcgtccaccgcaaatgcttctaaa

SEQ ID NO: 104468 - DNA, 1037 bp, Homo Sapiens
actttgtacaaaaaagttggcctcaccctgaagtaccccatcgagcacggcatcgtcaccaactgggacgacatggagaaaatctggcaccacaccttctacaatgagctgcgtgtggctcccgaggagcaccccgtgctgctgaccgaggcccccctgaaccccaaggccaaccgcgagaagatgacccagatcatgtttgagaccttcaacaccccagccatgtacgttgctatccaggctgtgctatccctgtacgcctctggccgtaccactggcatcgtgatggactccggtgacggggtcacccacactgtgcccatctacgaggggtatgccctcccccatgccatcctgcgtctggacctggctggccgggacctgactgactacctcatgaagatcctcaccgagcgcggctacagcttcaccaccacggccgagcgggaaatcgtgcgtgacattaaggagaagctgtgctacgtcgccctggacttcgagcaagagatggccacggctgcttccagctcctccctggagaagagctacgagctgcctgacggccaggtcatcaccattggcaatgagcggttccgctgccctgaggcactcttccagccttccttcctgggcatggagtcctgtggcatccacgaaactaccttcaactccatcatgaagtgtgacgtggacatccgcaaagacctgtacgccaacacagtgctgtctggcggcaccaccatgtaccctggcattgccgacaggatgcagaaggagatcactgccctggcacccagcacaatgaagatcaagatcattgctcctcctgagcgcaagtactccgtgtggatcggcggctccatcctggcctcgctgtccaccttccagcagatgtggatcagcaagcaggagtatgacgagtccggcccctccatcgtccaccgcaaatgcttctaggcggactatgacttagttgcgttacaccctttcttgacaaaacctaacttgcgcagaaaacaagatgagattggcatggc

SEQ ID NO: 104469 - DNA, 681 bp, Homo Sapiens
  misc_feature (402)..(441): n is a, c, g, or t
ctttgtacaaaaaagttggcttcaactccatcaccgtgaagtgtgacgtggacatccgcaaagacctgtacgccaacacagtgctgtctggcggcaccaccatgtaccctggcattgccgacaggatgcagaaggagatcactgccctggcacccagcacaatgaagatcaagatcattgctcctcctgagcgcaagtactccgtgtggatcggcggctccatcctggcctcgctgtccaccttccagcagatgtggatcaacaagcaggagtatgacgagtccggcccctccatcgtccaccgcaaatgcttctaggcggactatgacttagttgcgttacaccctttcttgacaaaacctaacttgcgcaaaaaacaagatgagattggcatggctttannnnnnnnnnnnnnnnnnnnnnnnnnnnnnnnnnnnnnnnggcttgactcaggatttaaaaactggaacggtgaaggtgacagcagtcggttggagcgagcatcccccaaagttcacaatgtggccgaggactttgattgcacattgttgtttttttaaaaatctttccaaatatgaaatgcgttgatacaggaagtcccttgccatcctaaaagccaccccacttcactctaaagagaatggcccagtcatctccccagtccccacaggagaagtgata

SEQ ID NO: 104470 - DNA, 937 bp, Homo Sapiens
cacttcatgatggagttgaaggtggtctcgtggatgccgcaagattccatacccaggaaggaaggctggaacagcgcctccggacaccggaaccgctcattgccaatggtgatgacctggccatcgggcagctcgtagctcttctccagagaagaggaggatgcggcggtggccatctcctgctcgaagtccagggcgacgtagcacagcttctccttgatgtcgcgcacgatttcccgctcggccgtggtggtgaagctgtagcctcgctcagtgaggatcttcatgaggtagtcggtcaggtcccggccagccaggtccagacgcaggatggcgtgggggagggcgtagccctcgtagatgggcaccgtgtgggtgaccccgtctccagagtccatgacaatgccagtggtgcgcccagaggcgtagagggacagcacggcctggatggccacgtacatggccggggtgttgaaggtctcaaacataatctgagtcatcttctctctgttggccttggggttcaggggggcctcggtcagcagcactgggtgctcctccggggccacgcgcagctcgttgtagaaggtgtggtgccagatcttctccatgtcgtcccagttggtgacgatgccatgctcaatggggtacttcagggtcaggatgccacgcttgctctgggcctcgtcgcccacgtaggagtccttctggcccatgcccaccatgacgccctggtgtctggggcgcccgacgatggaaggaaacacggctcggggagcgtcgtccccagcaaaaccagctttgcacatgccggagccattgtcaatgaccagcgcggcgatctcttcttccattgcgaccggcagagaaacgcgacggcggagcggcggaagaacagagtgcgagagttggcccaacttttttgtacaaagttggc

SEQ ID NO: 104471 - DNA, 903 bp, Homo Sapiens
ttgggtcgcggttcttgtttgtggatcgctgtgatcgtcacttgacaatgcagatcttcgtgaagactctgactggtaagaccatcaccctcgaggttgagcccagtgacaccatcgagaatgtcaaggcaaagatccaagataaggaaggcatccctcctgaccagcagaggctgatctttgctggaaaacagctggaagatgggcgcaccctgtctgactacaacatccagaaagagtccaccctgcacctggtgctccgtctcagaggtgggatgcaaatcttcgtgaagacactcactggcaagaccatcacccttgaggtggagcccagtgacaccatcgagaacgtcaaagcaaagatccaggacaaggaaggcattcctcctgaccagcagaggttgatctttgccggaaagcagctggaagatgggcgcaccctgtctgactacaacatccagaaagagtctaccctgcacctggtgctccgtctcagaggtgggatgcagatcttcgtgaagaccctgactggtaagaccatcaccctcgaggtggagcccagtgacaccatcgagaatgtcaaggcaaagatccaagataaggaaggcattcctcctgatcagcagaggttgatctttgccggaaaacagctggaagatggtcgtaccctgtctgactacaacatccagaaagagtccaccttgcacctggtactccgtctcagaggtgggatgcaaatcttcgtgaagacactcactggcaagaccatcacccttgaggtcgagcccagtgacactatcgagaacgtcaaagcaaagatccaagacaaggaaggcattcctcctgaccagcagagttgatctttgccggaaagcaactggaagatgggcgcaccctgtctga

SEQ ID NO: 104472 - DNA, 875 bp, Homo Sapiens
tacaaaaaagttgggttgggagcttgtttgtgtccctgtgggtggacgtggttggtgattggcaggatcctggtatccgctaacaggtcaaaatgcagatcttcgtgaaaacccttaccggcaagaccatcacccttgaggtggagcccagtgacaccatcgaaaatgtgaaggccaagatccaggataaggaaggcattccccccgaccagcagaggctcatctttgcaggcaagcagctggaagatggccgtactctttctgactacaacatccagaaggagtcgaccctgcacctggtcctgcgtctgagaggtggtatgcagatcttcgtgaagaccctgaccggcaagaccatcaccctggaagtggagcccagtgacaccatcgaaaatgtgaaggccaagatccaggataaagaaggcatccctcccgaccagcagaggctcatctttgcaggcaagcagctggaagatggccgcactctttctgactacaacatccagaaggagtcgaccctgcacctggtcctgcgtctgagaggtggtatgcagatcttcgtgaagaccctgaccggcaagaccatcactctggaggtggagcccagtgacaccatcgaaaaatgtgaaggccaagatccaagataaagaaggcatcccccccgaccagcagaggctcatctttgcaggcaagcagctggaagatggccgcactctttctgactacaacatccagaaagagtcgacccctgcaccctggtcctgcgcctgaggggtggctgttaattcttcagtcatggcattcgcagtgcccaatgatggcattactctgcacaatagccattgccccaacttaagtttagaaattacaagttt

SEQ ID NO: 104473 - DNA, 752 bp, Homo Sapiens
ctttaaaaaagccaactttgtacaaaaaagttgggtcgaaatgccccatgaagctttgagtgaagctcttcctggggacaatgtgggcttcaatgtcaagaatgtgtctgtcaaggatgttcgtcgtggcaacgttgctggtgacagcaaaaatgacccaccaatggaagcagctggcttcactgctcaggtgattatcctgaaccatccaggccaaataagcgccggctatgcccctgtattggattgccacacggctcacattgcatgcaagtttgctgagctgaaggaaaagattgatcgccgttctggtaaaaagctggaagatggccctaaattcttgaagtctggtgatgctgccattgttgatatggttcctggcaagcccatgtgtgttgagagcttctcaaactatccacctttgggtcgctttgctgttcgtgatatgagacagacagttgcggtgggtgtcatcaaagcagtggacaagaaggctgctggagctggcaaggtcaccaagtctgcccagaaagctcagaaggctaaatgaatattatccctaatacctgccaccccactcttaatcagtggtggaagaacggtctcagaactgtttgtttcaattggccatttaagtttaatagtaaaagactggttaatgataacaatgcatcgtaaaaccttcagaaggataaggagaatgttttgtgagaccactttggttttcttttattgcatgtggcaagttttta

SEQ ID NO: 104474 - DNA, 1278 bp, Homo Sapiens
actttgtacaaaaaagttggcgggtttgccgccagaacacaggtgtcgtgaaaactacccctaaaagccaaaatgggaaaggaaaagactcatatcaacattgtcgtcattggacacgtagattcgggcaagtccaccactactggccatctgatctataaatgcggtggcatcgacaaaagaaccattgaaaaatttgagaaggaggctgctgagatgggaaagggctccttcaagtatgcctgggtcttggataaactgaaagctgagcgtgaacgtggtatcaccattgatatctccttgtggaaatttgagaccagcaagtactatgtgactatcattgatgccccaggacacagagactttatcaaaaacatgattacagggacatctcaggctgactgtgctgtcctgattgttgctgctggtgttggtgaatttgaagctggtatctccaagaatgggcagacccgagagcatgcccttctggcttacacactgggtgtgaaacaactaattgtcggtgttaacaaaatggattccactgagccaccctacagccagaagagatatgaggaaattgttaaggaagtcagcacttacattaagaaaattggctacaaccccgacacagtagcatttgtgccaatttctggttggaatggtgacaacatgctggagccaagtgctaacatgccttggttcaagggatggaaagtcacccgtaaggatggcaatgccagtggaaccacgctgcttgaggctctggactgcatcctaccaccaactcgtccaactgacaagcccttgcgcctgcctctccaggatgtctacaaaattggtggtattggtactgttcctgttggccgagtggagactggtgttctcaaacccggtatggtggtcacctttgctccagtcaacgttacaacggaagtaaaatctgtcgaaatgcaccatgaagctttgagtgaagctcttcctggggacaatgtgggcttcaatgtcaagaatgtgtctgtcaaggatgttcgtcgtggcaacgttgctggtgacagcaaaaatgacccaccaatggaagcagctggcttcactgctcagtgattatcctgaaccatccaggccaaataagcgccggctatgcccctgtattggattgccacacggctcacattgcatgcaagtttgctgagctgaagaaaagattgatcgccgttctggtaaaaagctgggagatggccctaaattcttgaagtctggtgatgctgccattgttga

SEQ ID NO: 104475 - DNA, 580 bp, Homo Sapiens
ttgtacaaaaaagttgggattgccacagccttcaaaaatgcatgcaagtttgctgagctgaaggaaaagattgatcgccgttctggtaaaaagctggaagatggccctaaattcttgaagtctggtgatgctgccattgttgatatggttcctggcaagcccatgtgtgttgagagcttctcagactatccacctttgggtcgctttgctgttcgtgatatgagacagacagttgcggtgggtgtcatcaaagcagtggacaagaaggctgctggagctggcaaggtcaccaagtctgcccagaaagctcagaaggctaaatgaatattatccctaatacctgccaccccactcttaatcagtggtggaagaacggtctcagaactgtttgtttcaattggccatttaagtttaatagtaaaagactggttaatgataacaatgcatcgtaaaaccttcagaaggaaaggagaatgttttgtggaccactttggttttcttttttgcgtgtggcagttttaagttattagtttttagaatcagtactttttaatggaaacacttgaccaaaaatttgtca

SEQ ID NO: 104476 - DNA, 952 bp, Homo Sapiens
ccaactttgtacaaaaaagttggcagtatctgtgggtacccggagcacggagatctcgccggctttacgttcacctcggtgtctgcagcaccctccgcttcctctcctaggcgacgagacccagtggctagaagttcaccatgtctattctcaagatccatgccagggagatctttgactctcgcgggaatcccactgttgaggttgatctcttcacctcaaaaggtctcttcagagctgctgtgcccagtggtgcttcaactggtatctatgaggccctagagctccgggacaatgataagactcgctatatggggaagggtgtctcaaaggctgttgagcacatcaataaaactattgcgcctgccctggttagcaagaaactgaacgtcacagaacaagagaagattgacaaactgatgatcgagatggatggaacagaaaataaatctaagtttggtgcgaacgccattctgggggtgtcccttgccgtctgcaaagctggtgccgttgagaagggggtccccctgtaccgccacatcgctgacttggctggcaactctgaagtcatcctgccagtcccggcgttcaatgtcatcaatggcggttctcatgctggcaacaagctggccatgcaggagttcatgatcctcccagtcggtgcagcaaacttcagggaagccatgcgcattggagcagaggtttaccacaacctgaagaatgtcatcaaggagaaatatgggaaagatgccaccaatgtgggggatgaagcgggtttgctcccaacatcctggagaataaagaagcctggagctgctgaagactgctattgggaaagctggctacactgataaggtggtcatcggcatggacgtagcggcctccgagttcttcagtctgggaagtatgacctggacttcaagtctcccgatgaccccagcaagtacatctc

SEQ ID NO: 104477 - DNA, 903 bp, Homo Sapiens
ttggagagaagatctgggcccgggagatcctggactcccgcgggaaccccacagtggaggtggatctctatactgccaaaggtcttttccgggctgcagtgcccagtggagcctctacgggcatctatgaggccctggagctgagggatggagacaaacagcgttacttaggcaaaggtgtcctgaaggcagtggaccacatcaactccaccatcgcgccagccctcatcagctcaggtctctctgtggtggagcaagagaaactggacaacctgatgctggagttggatgggactgagaacaaatccaagtttggggccaatgccatcctgggtgtgtctctggccgtgtgtaaggcaggggcagctgagcgggaactgcccctgtatcgccacattgctcagctggccgggaactcagacctcatcctgcctgtgccggccttcaacgtgatcaatggtggctctcatgctggcaacaagctggccatgcaggagttcatgatcctcccagtgggagctgagagctttcgggatgccatgcgactaggtgcagaggtctaccatacactcaagggagtcatcaaggacaaatacggcaaggatgccaccaatgtgggggatgaaggtggctttgcccccaatatcctggagaacagtgaagccttggagctggtgaaggaagccatcgacaagctggctacacggaaaaagatcgttattggcatggatgttgctgcctcagagttttatcgtgatggcaaatatgacttggaacttcaagtctcccactgatcctttcccgatacatcactggggacagctgggggcactctaccaggactttgtcaggactatcctgtggtctccattgaggacccatttgaccaggatgattgggctg

SEQ ID NO: 104478 - DNA, 1454 bp, Homo Sapiens
ttggctctccagcacctcccaacccactagtgcctggttctcttgctccaccaggaacaagccaccatgtctcgccagtcaagtgtgtccttccggagcgggggcagtcgtagcttcagcaccgcctctgccatcaccccgtctgtctcccgcaccagcttcacctccgtgtcccggtccgggggtggcggtggtggtggcttcggcagggtcagccttgcgggtgcttgtggagtgggtggctatggcagccggagcctctacaacctggggggctccaagaggatatccatcagcactagtggtggcagcttcaggaaccggtttggtgctggtgctggaggcggctatggctttggaggtggtgccggtagtggatttggtttcggcggtggagctggtggtggctttgggcttggtggcggagctggctttggaggtggcttcggtggccctggctttcctgtctgccctcctggaggtatccaagaggtcactgtcaaccagagtctcctgactcccctcaacctgcaaatcgaccccagcatccagagggtgaggaccgaggagcgcgagcagatcaagaccctcaacaataagtttgcctccttcatcgacaaggtgcggttcctggagcagcagaacaaggttctggaaacaaagtggaccctgctgcaggagcagggcaccaagactgtgaggcagaacctggagccgttgttcgagcagtacatcaacaacctcaggaggcagctggacagcatcgtgggggaacggggccgcctggactcagagctgagaaacatgcaggacctggtggaagacttcaagaacaagtatgaggatgaaatcaacaagcgtaccactgctgagaatgagtttgtgatgctgaagaaggatgtagatgctgcctacatgaacaaggtggagctggaggccaaggttgatgcactgatggatgagattaacttcatgaagatgttctttgatgcggagctgtcccagatgcagacgcatgtctctgacacctcagtggtcctctccatggacaacaaccgcaacctggacctggatagcatcatcgctgaggtcaaggcccagtatgaggagattgccaaccgcagccggacagaagccgagtcctggtatcagaccaagtatgaggagctgcagcagacagctggccggcatggcgatgacctccgcaacaccaagcatgagatctctgagatgaaccggatgatccagaggctgagagccgagattgacaatgtcaagaaacagtgcgccaatctgcagaacgccattgcggatgccgagcagcgtggggagctggccctcaaggatgccaggaacaagctggccgagctggagagccctgcagaaagccaagcaagacatggcccggctgctgcgtgagtaccaggagctcatgaacaccaagctggccctgg

SEQ ID NO: 104479 - DNA, 950 bp, Homo Sapiens
ggggctccctgggaaccaaagaatgtggttctgcaatgggcttggtctagactactctccagaaaaggataaaacatggcttgagcaactgcctagaagaggcaatctccatgggctgggttgctgcacttggaaggcagtgacttgcagcaggttcttagctcttgaagctcttccgggaggaggaggtggtggagacaaatttgacgctggagctgctacccccgccactgccaaagcccacccccagccctcggccactgcttgcactgaagccagagccccccacactgagcccaccacctaggccgacacccccactgctgctggagtagtagcttccactgctacctccggcaagacctccaccgaggccgccgccaagacctccaccgaggccaccgccatagccactgccactgccatatccagaggaaacactgcttgtgacaacagagatgttgactggtccaactccttctccactgagtctgcattcctcgccctccagcagcttgcggtaagtggcgatctccacgtccagggccagcttggtgttcatgagctcctggtactcacgcagcagccgggccatgtcctgcttggccttctgcagggcctcctccagctcggccagcttgttcctggcatccttgagggccagctccccacgctgctcggcatccgcaatggcgttctgcagattggcgcactgtttcttgacattgtcaatctcggctctcagcctctggatcatccggttcatctcagagatctcatgcttggtgttgcggaggtcatcgccatgccggccagctgtctgctgcagctcctcatacttggtctgataccaggactcggcttctgtccggctgcggttggcaatctcctcatactgggccttgacctcagcgatgatgctatccaggtcccaacttttttgtacaaag

SEQ ID NO: 104480 - DNA, 1214 bp, Homo Sapiens
ggtactcacgcagctgccgcgccatgtcctgcttggcccgctgcagggcggctccagctcggacaacttggcgttggcatcttaatggccagctctccacgctgctcggcatctgcaatggcggctccagggaagccctctggcctttgaggccctcaatctcagcctggagccggctgatgttccggttcatctcagagatctcagtctttgtgcgccgcaggtcatccccgtgcttcccagccaggctctgcagctcctcatacttgatctggtacatgctctcagcctcagcccggctgcggttggcaatatcctcgtactgtgccttgacctcagcaatgatgctgtccatgtccagggagcggctgttgtccatggacagcaccacagatgtgtccgagatctgggactgcagctcccggatctcctcttcatatagctgcctgaggaagttgatctcgtcggtcagcccttccaggcgagactccagctctaccttgttcatgtaagcttcatccacatccttcttgatgaggacaaattcgttctccatctctgtacgcttattgatctcatcctcatacttgttcttgaagtcctccaccagcccctgcatgttgccaagctccgcctccagcttcagcttctcctggcccagagtctccagctgccgcctaaggttgttgatgtagctctcgaacatgttgtccatgttgcttcgagccgtcttctgctgctgcaggaggctccacttggtctccagcatcttgttctgctgctccaggaaccgtaccttgtctatgaaggaggcaaacttgttgttgagggtcttgatctgctccttctcctgggtgcgcacggcctggatgttggggtccacctccaggacaagggggctcagcaggctctggttgaccgtaactgcggtgatgcctcccatgccgctggccccaccatagccgccgcccaggccaccgcgaaagttgctgctgcccactcgggagaagctcgaggagctgatgcgggaaccgggcccactcgtgtaggagcggctgctgaaggcccgggggccagaggtggacaccttgtaggacttctgggtcaccctgatggacatggtagaggcaggagtggaggcaggcgggccgaaccaggcggagatcctagaaggagcggagaagctgcttcttggtgaggagggcggccgccaa

SEQ ID NO: 104481 - DNA, 824 bp, Homo Sapiens
ccaggtgggctgaggggtaggtctgagcctcagggtgggtctcctttttcccaatggttaccgtgcatagcggccttcttcctaggctctggggcagcgcaggaggggtaggctgggaggggctgcccgcagctgttcacttgggcaggacgtcagaggactcagacaccagcttcccatcacgtgtctcgatcttcttcacaaccacggccctggaggagctggtgcggctgaaggagctggagcccgcgccagagccaaagctggagcccaggctgtagctgaggccggggcttgtgaggcccccataggccgagctcagaccacctgcatagccgctggtggtcttcgtatgaatactcatgttctgcatcccagactccagccggctctcctcgccctccagcagcttcctgtaggtggcgatctcgatgtccagggccagcttgacgttcatcagctcctggtactcacgcagctgccgcgccatgtcctgcttggcccgctgcagggcggcctccagctcggacaacttggcgttggcatccttaatggccagctctccacgctgctcggcatctgcaatggcggcctccagggaagccctctggcctttgaggccctcaatctcagcctggagccggctgatgttccggttcatctcagagatctcagtctttgtgcgccgcaggtcatccccgtgcttcccagccaggctctgcagctcctcatacttgatctggtacatgctctcagcctcagcccggctgcggttggcaatatccttttaagggtgtgccttgaccccaacttttttgtacaaa

SEQ ID NO: 104482 - DNA, 952 bp, Homo Sapiens
actttgtacaaaaaagttggcacactctcctcagctctctcatctcctggaaccatggccagcacatccaccaccatcaggagccacagcagcagccgccggggtttcagtgccaactcagccaggctccctggggtcagccgctctggcttcagcagcgtctccgtgtcccgctccaggggcagtggtggcctgggtggtgcatgtggaggagctggctttggcagccgcagtctgtatggcctggggggctccaagaggatctccattggagggggcagctgtgccatcagtggcggctatggcagcagagccggaggcagctatggctttggtggcgccgggagtggatttggtttcggtggtggagccggcattggctttggtctgggtggtggagccggccttgctggtggctttgggggccctggcttccctgtgtgcccccctggaggcatccaagaggtcaccgtcaaccagagtctcctgactcccctcaacctgcaaatcgatcccaccatccagcgggtgcgggctgaggagcgtgaacagatcaagaccctcaacaacaagtttgcctccttcatcgacaaggtgcggttcctggagcagcagaacaaggttctggaaacaaagtggaccctgctgcaggagcagggcaccaagactgtgaggcagaacctggagccgttgttcgagcagtacatcaacaacctcagaggcagctggacagcattgtcggggaacggggccgcctggactcagagctcagaggcatgcaggacctggtggaggacttcaagaacaaatatgaggatgaaatcaacaagcgcacagcagcagaaaatgaatttgtgactctgaagaaggatgtggatgctgcctacatgaacagttgaactgcaagccaaggcagacactctcacagacgagatcaacttctgagagcctg

SEQ ID NO: 104483 - DNA, 1515 bp, Homo Sapiens
ttggcccggtcacttttggttacaggacgtggcagctggttggacgaggggagctggtgggcagggtttgatcccagggcctgggcaacggaggtgtagctggcagcagcgggcaggtgaggaccccatctgccgggcaggtgagtcccttccctccccaggcctcgcttccccagccttctgaaagaaggaggtttaggggatcgagggctggcggggagaagcagacaccctcccagcagaggggcaggatgggggcaggagagttagcaaaggtgacatcttctcggggggagccgagactgcgcaaggctggggggctatgggcccgttccaggcagaaagagcaagagggcagggagggagcacaggggtggccagcgtagggtccagcacgtggggtggtaccccaggcctgggtcagacagggacaaggcaggggacacaggacagaggggtccccagctgccacctcacccaccgcaattcatttagtagcaggcacaggggcagctccggcacggctttctcaggcctatgccggagcctcgagggctggagagcgggaagacaggcagtgctcggggagttgcagcaggacatcaccaggagggcgaagcggccacgggaggggggccccgggacattgcgcagcaaggaggctgcaggggctcggcctgcgggcgccggtcccacgaggcactgcggcccagggtctggtgcggagagggcccacagtggacttggtgacgctgtgtgccctcaccgctcagcccctggggctggcttggcagacagtacagcatccaggggagtcaagggcatggggcgagaccagactaggcgaggcgggcggggcggagtgaatgagctctcaggagggaggatggtgcaggcaggggtgaggagcgcagcgggcggcgagcgggaggcactggcctccagagcccgtggccaaggcgggcctcgcgggcggcgacggagccgggatcggtgcctcagcgttcgggctggagacgaggccaggtctccagctggggtggacgtgcccaccagctgccgaaggccaagacgccaggtccggtggacgtgacaagcaggacatgatggtccggtgtgacggcgaggacagaggaggcgcgtccggccttcctgaacaccttaggctggtggggctgcggcaagaagcgggtctgtttctttacttcctccacggagtcggcacactatggctgccctctgggctcccagaacccacaacatgaaagaaatggtgctacccagctcaagcctgggcctttgaatccggacacaaaaccctctagcttggaaatgaatatgctgcactttacaaccactgcactacctgactcaggaatcggctctcgaaggtgaagcgagaggaaccagacctcatcagcccaacatcaagacaccatcgggaacagcagcgcccgcagcactcaccccggcaccggcgactcctccttcagggcaccccctgcggcggacggt

SEQ ID NO: 104484 - DNA, 862 bp, Homo Sapiens
ctttgtacaaaaaagttggccgaggggcaaccatggggaagatggggtgctggaggagagcttgtgggagccaaggagcaccttggacatctggagtctggcaggagtgatgacgggtggaggggctagctcgaggcagagcccgtggccaaggcgggcctcgcgggcggcgacggagccgggatcggtgcctcagcgttcgggctggagacgaggccaggtctccagctggggtggacgtgcccaccagctgccgaaggccaagacgccaggtccggtggacgtgacaagcaggacatgacatggtccggtgtgacggcgaggacagaggaggcgcgtccggccttcctgaacaccttaggctggtggggctgcggcaagaagcgggtctgtttctttacttcctccacggagtcggcacactatggctgccctctgggctcccagaacccacaacatgaaagaaatggtgctacccagctcaagcctgggcctttgaatccggacacaaaaccctctagcttggaaatgaatatgctgcactttacaaccactgcactacctgactcaggaatcggctctcgaaggtgaagcgagaggaaccagacctcatcagcccaacatcaaagacaccatcggaacagcagcgcccgcagcacccaccccgcaccggcgactccatcttcacggccaccccctgcggcggacggttgaccaccagccaccacatcatcccagagctgaactcctccagcgggatgacgccgtccccaccacctccctcttcttctttttcatccttctgtcactttgtttctgaacctttcctgtctttccttttttctgagaaattcaaatcctc

SEQ ID NO: 104485 - DNA, 959 bp, Homo Sapiens
ttggaaatttatgttcgtcgagctcagaaaaaggtggaacggcagacggaacttaagcgcaaatttgaacagatgaaacaagataggatcaccagataccagggtgttaatctttatgtgaaaaatcttgatgatggtattgatgatgaacgtctccggaaagagttttctccatttggtacaatcactagtgcaaaggttatgatggagggtggtcgcagcaaagggtttggttttgtatgtttctcctccccagaagaagccactaaagcagttacagaaatgaacggtagaattgtggccacaaagccattgtatgtagctttagctcagcgcaaagaagagcgccaggctcacctcactaaccagtatatgcagagaatggcaagtgtacgagctgttcccaaccctgtaatcaacccctaccagccagcacctccttcaggttacttcatggcagctatcccacagactcagaaccgtgctgcatactatcctcctagccaaattgctcaactaagaccaagtcctcgctggactgctcagggtgccagacctcatccattccaaaatatgcccggtgctatccgcccagctgctcctagaccaccatttagtactatgagaccagcttcttcacaggttccacgagtcatgtcaacacagcgtgttgctaacacatcaacacagacaatgggtccacgtcctgcagctgcagccgctgcagctactcctgctgtccgcaccgttccacagtataaatatgctgcaggagttcgcaatcctcagcaacatcttaatgcacagccacaagttacaatgcaacagcctgctgttcatgtacaaggtcaggaacctttgactgcttccatgttggcatctgcccctcctcaagagcaaaagcaaatgttgggtgaacggctgtttcctcttattcaagccatgcaccctactcttgc

SEQ ID NO: 104486 - DNA, 780 bp, Homo Sapiens
actttgtacaaaaaagttggcagctatcccacagactcagaaccgtgctgcatactatcctcctagccaaattgctcaactaagaccaagtcctcgctggactgctcagggtgccagacctcatccattccaaaatatgcccggtgctatccgcccagctgctcctagaccaccatttagtactatgagaccagcttcttcacaggttccacgagtcatgtcaacacagcgtgttgctaacacatcaacacagacaatgggtccacgtcctgcagctgcagccgctgcagctactcctgctgtccgcaccgttccacagtataaatatgctgcaggagttcgcaatcctcagcaacatcttaatgcacagccacaagttacaatgcaacagcctgctgttcatgtacaaggtcaggaacctttgactgcttccatgttggcatctgcccctcctcaagagcaaaagcaaatgttgggtgaacggctgtttcctcttattcaagccatgcaccctactcttgctggtaaaatcactggcatgttgttggagattgataattcagaacttcttcatatgctcgagtctccagagtcactccgttctaaggttgatgaagctgtagctgtactacaagcccaccaagctaaagaggctgcccagaaagcagttaacagtgccaccggtgttccaactgtttaaaattgatcagggaccatgaaaagaaacttgtgcttcaccgaagaaaaatatctaaacatcgaaaaacttaaatattatgg

SEQ ID NO: 104487 - DNA, 931 bp, Homo Sapiens
ttggcttacatcgaccgcctaagagtcgcgctgtaagaagcaacaacctctcctcttcgtctccgccatcagctcggcagtcgcgaagcagcaaccatgcgtgagtgcatctccatccacgttggccaggctggtgtccagattggcaatgcctgctgggagctctactgcctggaacacggcatccagcccgatggccagatgccaagtgacaagaccattgggggaggagatgattccttcaacaccttcttcagtgagacgggggctggcaagcatgtgccccgggcagtgtttgtagacttggaacccacagtcattgatgaagttcgcactggcacctaccgccagctcttccaccctgagcaacttatcacaggcaaagaagatgctgccaataactatgcccgagggcactacaccattggcaaggagatcattgacctcgtgttggaccgaattcgcaagctggccgaccagtgcacgggtctccagggcttcttggttttccacagctttggtgggggaactggttctgggttcacctcgctgctcatggaacgtctctcagttgattatggcaagaagtccaagctggagttctctatttacccggcgccccaggtttccacagctgtagttgagccctacaactccatcctcaccacccacaccaccctggagcactctgattgtgccttcatggtagacaatgaggccatctatgacatctgtcgtagaaacctcgatattgagcgtccaacctatactaacctgaataggttaatagtcaaattgtgtcctccatcactgcttccctgagatttgatggagccctgaatgttgacctgacagaattccagaccaacctggtgccctatccccgcatccacttccctctggccacatatgcccctgtcatctctgctga

SEQ ID NO: 104488 - DNA, 1475 bp, Homo Sapiens
tttgtacaaaaaagttggcctcgactcttagcttgtcggggacggtaaccgggacccggtgtctgctcctgtcgccttcgcctcctaatccctagccactatgcgtgagtgcatctccatccacgttggccaggctggtgtccagattggcaatgcctgctgggagctctactgcctggaacacggcatccagcccgatggccagatgccaagtgacaagaccattgggggaggagatgactccttcaacaccttcttcagtgagacgggcgctggcaagcacgtgccccgggctgtgtttgtagacttggaacccacagtcattgatgaagttcgcactggcacctaccgccagctcttccaccctgagcagctcatcacaggcaaggaagatgctgccaataactatgcccgagggcactacaccattggcaaggagatcattgaccttgtgttggaccgaattcgcaagctggctgaccagtgcaccggtcttcagggcttcttggttttccacagctttggtgggggaactggttctgggttcacctccctgctcatggaacgtctctcagttgattatggcaagaagtccaagctggagttctccatttacccagcaccccaggtttccacagctgtagttgagccctacaactccatcctcaccacccacaccaccctggagcactctgattgtgccttcatggtagacaatgaggccatctatgacatctgtcgtagaaacctcgatatcgagcgcccaacctacactaaccttaaccgccttattagccagattgtgtcctccatcactgcttccctgagatttgatggagccctgaatgttgacctgacagaattccagaccaacctggtgccctacccccgcatccacttccctctggccacatatgcccctgtcatctctgctgagaaagcctaccatgaacagctttctgtagcagagatcaccaatgcttgctttgagccagccaaccagatggtgaaatgtgaccctcgccatggtaaatacatggcttgctgcctgttgtaccgtggtgacgtggttcccaaagatgtcaatgctgccattgccaccatcaaaaccaagcgcaccatccagtttgtggattggtgccccactggcttcaaggttggcatcaactaccagcctcccactgtggtgcctggtggagacctggccaaggtacagagagctgtgtgcatgctgagcaacaccacagccattgctgaggcctgggctcgcctggaccacaagtttgacctgatgtatgccaaacgtgcctttgttcactggtacgttggggaggggatggaggaaggtgagttttcagaggcccgtgaagacatggctgcccttgagaaggattatgaggaggttggtgtggattctgttgaaggagagggtgaggaagaaggagaggaatactaatattccattcctttggccc

SEQ ID NO: 104489 - DNA, 899 bp, Homo Sapiens
actttgtacaaaaaagttggcaacaacctctcctcttcgtctccgccatcagctcggcagtcgcgaagcagcaaccatgcgtgagtgcatctccatccacgttggccaggctggtgtccagattggcaatgcctgctgggagctctactgcctggaacacggcatccagcccgatggccagatgccaagtgacaagaccattgggggaggagatgattccttcaacaccttcttcagtgagacgggggctggcaagcatgtgccccgggcagtgtttgtagacttggaacccacagtcattgatgaagttcgcactggcacctaccgccagctcttccaccctgagcaacttatcacaggcaaagaagatgctgccaataactatgcccgagggcactacaccattggcaaggagatcattgacctcgtgttggaccgaattcgcaagctggccgaccagtgcacgggtctccagggcttcttggttttccacagctttggtgggggaactggttctgggttcacctcgctgctcatggaacgtctctcagttgattatggcaagaagtccaagctggagttctctatttacccggcgccccaggtttccacagctgtagttgagccctacaactccatcctcaccacccacaccaccctggagcactctgattgtgccttcatggtagacaatgaggccatctatgacatctgtcgtagaaacctcgatattgagcgtccaacctatactaacctgaataggttaataggtcaaattgtgtcctccatcactgcttccctgagatttgatggacccctgaatgttgacctgacagaattcagaccaacctggtgccctatccccgcatccactttccctctggccacatatgcccctg

SEQ ID NO: 104490 - DNA, 910 bp, Homo Sapiens
ttggccaagcacctggaggctctgtgtgtgggtcgctgatttcttggagcctgaaaagaacaggagcagcgactggacccagagccatgtggctgtgccctctggccctcaacctcatcttgatggcagcctctggtgctgcgtgcgaagtgaaggacgtttgtgttggaagccctggtatccccggcactcctggatcccacggcctgccaggcagggacgggagagatggtgtcaaaggagaccctggccctccaggccccatgggtccgcctggagaaacaccatgtcctcctgggaataatgggctgcctggagcccctggtgtccctggagagcgtggagagaagggggagcctggcgagagaggccctccagggcttccagctcatctagatgaggagctccaagccacactccacgacttcagacatcaaatcctgcagacaaggggagccctcagtctgcagggctccataatgacagtaggagagaaggtcttctccagcaatgggcagtccatcacttttgatgccattcaggaggcatgtgccagagcaggcggccgcattgctgtcccaaggaatccagaggaaaatgaggccattgcaagcttcgtgaagaagtacaacacatatgcctatgtaggcctgactgagggtcccagccctggagacttccgctactcagatgggacccctgtaaactacaccaactggtaccgaggggagcctgcagtcggggaaaagagcagtgtgtggagatgtacacagatgggcagtggaatgacaggaactgcctgtactcccgactgaccatctgtgagttctgagaaggcatttaagccatgggacagggaggatcctgtctggccttcagtttccatccccaggatccacttggtctgtga

SEQ ID NO: 104491 - DNA, 926 bp, Homo Sapiens
gaattctgttgaaagggagttctagcatctcacagaccaagtggagcttcaggatggaggccggaaggccagagagcgtcctccctgtcccatggcctaaatgcctctcagaactcacagatggtcagtcgggagtacaggcagttcctgtcattccactgcccatctgtgtacatctccacacactgctcttttccccgacatgcgggctcccctcggtaccagttggtgtagtttacaggggtcccgtctgagtagcggaagtctccagggctgggaccctcagtcaggcctacataggcatatgtgttgtacttcttcacgaagcttgcaatggcctcattttcctctggattccttgggacagcaatgcggccgcctgctctggcacatgcctcctgaatggcatcaaaagtgatggactgcccattgctggagaagaccttctctcctaccgtcattatggagccctgcagactgagggctccccttgtctgcaggatttgatgtctaaagtcgtggagtgtggcttggagctcctcatctagatgagctggaagccctggagggcccctctcgccaggctcccccttctctccacactctccagggataccaggggctccaggcagcccatcatttccaggaggacatggcatttctccaggcggacccatggggcctggagggccagggtctcctttgagaccatctctcccgtccctgcctggcaggccgtgggatccaggagtgccggggataccagggcttccaacacaaacgtccttcacttcgcacgcagcaccagaggctgccatcaagatgaggttgagggccagagggcacagccacatggctctgggtccagtcgctgctcccacacacagagcctccagctgcttgggtcccaacttttttgtacaaag

SEQ ID NO: 104492 - DNA, 926 bp, Homo Sapiens
ttggcagagacccaagcacctggaggctctgtgtgtgggtgagtttagccacatcccctaggtgttctccagcttgaggatcgcaggcagagaggaccagcccagcagccacaggcctgaccaaggcccaggttgggaaggagggcaactccccattttccactgggaggtgtttcacagcatggtcaacatggatgacctacaaagaccctcatgctttgatatcttccttggccagatccatccctaccagggactcagcagggcctaagcagggggagtgggagaacagaccccaagaggaaggaagacctcatcactgactgtgagagggtcatcaccccccgatgatcaccttgaagggtccaggctgtgggccctattcatctcttttcattctcaggtcgctgatttcttggagcctgaaaagaaggtaactgggcatatgagggacagatggagtgagtcagtgagtgagtgacctcatccttcctcctaacagcctgggagggacagggcaggttttctgcagagcatggaagattcagctgaaatcagagaggtgaagccagtttcccagggtaacatagtgaggcactgaaagaaaggagactgcactggagcccaggtccctgggctccccacagctccttactcttcctcctcctcagcagccttgagaccccacaacctccagccggaggcctgaagcatgaggccatgccaggtgccagatgatgcttggaattttcccgggagcttcgggtcttcccagcactctggtctcgcccgccctgcctctcagctctgcccagcttcctgagtcctgacagagcacagtgggggagatgttggcagaagtggcagatgggctcacggccatccctccggcagaagcagcgactggacccagagccatgtggctg

SEQ ID NO: 104493 - DNA, 1165 bp, Homo Sapiens
taatggccaactttgtacaaaaaagttggccccctccccccgagcgccgctccggctgcaccgcgctcgctccgagtttcaggctcgtgctaagctagcgccgtcgtcgtctcccttcagtcgccatcatgattatctaccgggacctcatcagccacgatgagatgttctccgacatctacaagatccgggagatcgcggacgggttgtgcctggaggtggaggggaagatggtcagtaggacagaaggtaacattgatgactcgctcattggtggaaatgcctccgctgaaggccccgagggcgaaggtaccgaaagcacagtaatcactggtgtcgatattgtcatgaaccatcacctgcaggaaacaagtttcacaaaagaagcctacaagaagtacatcaaagattacatgaaatcaatcaaagggaaacttgaagaacagagaccagaaagagtaaaaccttttatgacaggggctgcagaacaaatcaagcacatccttgctaatttcaaaaactaccagttctttattggtgaaaacatgaatccagatggcatggttgctctattggactaccgtgaggatggtgtgaccccatatatgattttctttaaggatggtttagaaatggaaaaatgttaacaaatgtggcaattattttggatctatcacctgtcatcataactggcttctgcttgtcatccacacaacaccaggacttaagacaaatgggactgatgtcatcttgagctcttcatttattttgactgtgatttatttggagtggaggcattgtttttaagaaaaacatgtcatgtaggttgtctaaaaataaaatgcatttaaactcatttgagagaatgccttttagtttaatgcatatttaaactaaattgatcctgtagtgttcctggagaagctagagcctgattgtaggctactactcatcaattaacttctacagtggagactacttctgggactggaatataaaaaagaatcaaaggttctgattttgagttgcaataaagggaaagaccatgctcatagcagtgccaacatctgaagtgtggagccttacccatttcatcacctacaacggaagtagttaactggaagagattaccaagagaataaaaagagactcattcagtggaagc

SEQ ID NO: 104494 - DNA, 797 bp, Homo Sapiens
gagcaatgctttccttataaaagccaactttgtacaaaaaagttggcgagcgccgctcccggctgcaccgcgctcgctccgagtttcaggctcgtgctaagctagcgccgtcgtcgtctcccttcagtcgccatcatgattatctaccgggacctcatcagccacgatgagatgttctccgacatctacaagatccgggagatcgcggacgggttgtgcctggaggtggaggggaagatggtcagtaggacagaaggtaacattgatgactcgctcattggtggaaatgcctccgctgaaggccccgagggcgaaggtaccgaaagcacagtaatcactggtgtcgatattgtcatgaaccatcacctgcaggaaacaagtttcacaaaagaagcctacaagaagtacatcaaagattacatgaaatcaatcaaagggaaacttgaagaacagagaccagaaagagtaaaaccttttatgacaggggctgcagaacaaatcaagcacatccttgctaatttcaaaaactaccagttctttattggtgaaaacatgaatccagatggcatggttgctctattggactaccgtgaggatggtgtgaccccatatatgattttctttaaggatggtttagaaatggaaaaatgttaacaaatgtggcaattatttttggatctattcaactgtcatcataactggcttctgcttgtcatccacacaacaccaaggacttaacacaaaggggactgatgtcatcttgagctcttccatttattttgactgtgaatttattt

SEQ ID NO: 104495 - DNA, 879 bp, Homo Sapiens
caacacaaaggtactcttgggcaggtgagcgaaggggtccttggcttgggctcagcagccagcgcctgctcacattcatccatctcctcctcaggagcaggggcagccgctttttctcctccttccgctcagcctggggcttctgcttctcttcccgtgaacccttctctttccgtggtgtgtcctttttaggttgggtctctgcaaactttttagcatcaaactgggccatcttctcacacagtttcacttcgcccaagacagcccggaactggggctggttaatgcaggtgaggaaccagcggttggtattgggaaaggcctggcggaaagaaggctctagaacctgcttatagagccacaacagggtgcagacaactgtgatgtcagccaatgtcactcgttcgcccaccagaaaagtcctcgtcttcaagtaagcatccagcagccccagaattcgcctcacttcctcctttgcattctcagtggcctgtttgttgtggtgcatgatgcccaaggtggggaacacccaggtactggctgggggcactatatcggaatcagcaaagctcacccactgcaccacctgggctgctgcctctggagtacttccccgcagctcctcattgctcacatagtaggcaatggcgttgctctcaaacacacagaatccatcatcaccctcaaatgctgggaccttgccggcaggaaatttgcggagaaattcaggggtgcggttggtttggccaaaatggaagtggggtggtgcggagagcacgcggacctgagccccgctgtactgagcagcgatgagagccttgaaggccctccagttttcaggatacgtgtacagggtcccagccgccatggtgattccaa

SEQ ID NO: 104496 - DNA, 1190 bp, Homo Sapiens
tacaaaaaattggggctgggaccctgtacacgtatcctgaaaactggagggccttcaaggctctcatcgctgctcagtacagcggggctcaggtccgcgtgctctccgcaccaccccacttccattttggccaaaccaaccgcacccctgaatttctccgcaaatttcctgccggcaaggtcccagcatttgagggtgatgatggattctgtgtgtttgagagcaacgccattgcctactatgtgagcaatgaggagctgcggggaagtactccagaggcagcagcccaggtggtgcagtgggtgagctttgctgattccgatatagtgcccccagccagtacctgggtgttccccaccttgggcatcatgcaccacaacaaacaggccactgagaatgcaaaggaggaagtgaggcgaattctggggctgctggatgcttacttgaagacgaggacttttctggtgggcgaacgagtgacattggctgacatcacagttgtctgcaccctgttgtggctctataagcaggttctagagccttctttccgccaggcctttcccaataccaaccgctggttcctcacctgcattaaccagccccagttccgggctgtcttgggcgaagtgaaactgtgtgagaagatggcccagtttgatgctaaaaagtttgcagagacccaacctaaaaaggacacaccacggaaagagaagggttcacgggaagagaagcagaagccccaggctgagcggaaggaggagaaaaaggcggctgcccctgctcctgaggaggagatggatgaatgtgagcaggcgctggctgctgagcccaaggccaaggaccccttcgctcacctgcccaagagtacctttgtgttggatgaatttaagcgcaagtactccaatgaggacacactctctgtggcactgccatatttctgggagcactttgataaggacggctggtccctgtggtactcagagtatcgcttccctgaagaactcactcagaccttcatgagctgcaatctcatcactggaatgttccagcgactggacaagctgaggaagaatgccttcgccagtgtcatcctttttggaaccaacaatagcagctccatttctggagtctggggtcttccgaggccaagagcttgccttttctgctgagtccaaattggcgggtggact

SEQ ID NO: 104497 - DNA, 857 bp, Homo Sapiens
tttgtacaaaaaagttgggaccagcaccatggcggttggcaagaacaagcgccttacgaaaggcggcaaaaagggagccaagaagaaagtggttgatccattttctaagaaagattggtatgatgtgaaagcacctgctatgttcaatataagaaatattggaaagacgctcgtcaccaggacccaaggaaccaaaattgcatctgatggtctcaagggtcgtgtgtttgaagtgagtcttgctgatttgcagaatgatgaagttgcatttagaaaattcaagctgattactgaagatgttcagggtaaaaactgcctgactaacttccatggcatggatcttacccgtgacaaaatgtgttccatggtcaaaaaatggcagacaatgattgaagctcacgttgatgtcaagactaccgatggttacttgcttcgtctgttctgtgttggttttactaaaaaacgcaacaatcagatacggaagacctcttatgctcagcaccaacaggtccgccaaatccggaagaagatgatggaaatcatgacccgagaggtgcagacaaatgacttgaaagaagtggtcaataaattgattccagacagcattggaaaagacatagaaaaggcttgccaatctatttatcctctccatgatgtcttcgttagaaaagtaaaaatgctgaagaagcccaagtttgaattgggaaagctcatggagcttcatggtgaagcagtagttctggaaaagccactggggactagacagtgctaaagttgaacgagctgatggatatgaacacccatccaagaattctggttaaagttcagacttcaaatagtgccaaataaaaattgct

SEQ ID NO: 104498 - DNA, 856 bp, Homo Sapiens
ctttgtacaaaaaagttggatggcggttggcaagaacaagcgccttacgaaaggcggcaaaaagggagccaagaagaaagtggttgatccattttctaagaaagattggtatgatgtgaaagcacctgctatgttcaatataagaaatattggaaagacgctcgtcaccaggacccaaggaaccaaaattgcatctgatggtctcaagggtcgtgtgtttgaagtgagtcttgctgatttgcagaatgatgaagttgcatttagaaaattcaagctgattactgaagatgttcagggtaaaaactgcctgactaacttccatggcatggatcttacccgtgacaaaatgtgttccatggtcaaaaaatggcagacaatgattgaagctcacgttgatgtcaagactaccgatggttacttgcttcgtctgttctgtgttggttttactaaaaaacgcaacaatcagatacggaagacctcttatgctcagcaccaacaggtccgccaaatccggaagaagatgatggaaatcatgacccgagaggtgcagacaaatgacttgaaagaagtggtcaataaattgattccagacagcattggaaaagacatagaaaaggcttgccaatctatttatcctctccatgatgtcttcgttagaaaagtaaaaatgctgaagaagcccaagtttgaattgggaaagctcatggagcttcatggtgaacgcagtagttctggaaaagccactggggacgagacagtgctaaagttgaacgagctgatggatatgaaccaccagtccaagaatctgtttaaagttcagacttcaaatagtggcaaataaaaagtgctatttgtg

SEQ ID NO: 104499 - DNA, 1158 bp, Homo Sapiens
ttggagcaacacctatagtgggaggcacagtgatgcttttgatatctggggccaagggacaatggtcaccgtgtcttcagcctccaccaagggcccatcggtcttccccctggcaccctcctccaagagcacctctgggggcacagcggccctgggctgcctggtcaaggactacttccccgaaccggtgacggtgtcgtggaactcaggcgccctgaccagcggcgtgcacaccttcccggctgtcctacagtcctcaggactctactccctcagcagcgtggtgaccgtgccctccagcagcttgggcacccagacctacatctgcaacgtgaatcacaagcccagcaacaccaaggtggacaagagagttgagcccaaatcttgtgacaaaactcacacatgcccaccgtgcccagcacctgaactcctggggggaccgtcagtcttcctcttccccccaaaacccaaggacaccctcatgatctcccggacccctgaggtcacatgcgtggtggtggacgtgagccacgaagaccctgaggtcaagttcaactggtacgtggacggcgtggaggtgcataatgccaagacaaagccgcgggaggagcagtacaacagcacgtaccgtgtggtcagcgtcctcaccgtcctgcaccaggactggctgaatggcaaggagtacaagtgcaaggtctccaacaaagccctcccagcccccatcgagaaaaccatctccaaagccaaagggcagccccgagaaccacaggtgtacaccctgcccccatcccgggaggagatgaccaagaaccaggtcagcctgacctgcctggtcaaaggcttctatcccagcgacatcgccgtggagtgggagagcaatgggcagccggagaacaactacaagaccacgcctcccgtgctggactccgacggctccttcttcctctatagcaagctcaccgtggacaagagcaggtggcagcatgggaacgtcttctcatgctccgtgatgcatgatgctctgcacaaccactacacgcaaaagagcctctccctgtccctcgggtaaatgagtgcgacggcccggcaagcccccgctccccgggctctcgcggtcgcacgaggatgctttggcacgtaccccgtctacatactttc

SEQ ID NO: 104500 - DNA, 897 bp, Homo Sapiens
ttgggaggagcccagcactagaagtcggcggtgtttccattcggtgatcagcactgaacacagaggactcaccatggagtttgggctgagctgggttttcctcgttgctcttttaagaggtgtccagtgtcaggtgcacctggtggagtctgggggaggcgtggtccagcctgacaggtccctgagactctcctgtgcagcgtctggattcaccatcagtagctatggcatgcactgggtccgccaggctcccggcaaggggctggaatgggtggcatttttgtatgatgggaggaataaattttatgcagactccgtgaagagccgattcaccatctccagagacacttccaagaacactctgtatctgcaattgaacagcctgagagccgcggacacggctgtatattactgtgcgagagatgtctatagcagctcgtccggtccattttactactactactacggtatggacgtctggggccaagggaccacggtcaccgtctcctcaccctccaccaagggcccatcggtcttccccctggcaccctcctccaagagcacctctgggggcacagcggccctgggctgcctggtcaaggactacttccccgaaccggtgacggtgtcgtggaactcaggcgccctgaccagcggcgtgcacaccttcccggctgtcctacagtcctcaggactctactccctcagcagcgtggtgaccgtgccctccagcagcttgggcacccagacctacatctgcaacgtgaatcacaagcccagcaacaccaaggtggacaagagagttgagcccaaatcttgtgacaaaactcacacatgcccaccgtgcccagcacctgaactcctggggggaccgtcagtcttcctcttccccccaaa

SEQ ID NO: 104501 - DNA, 972 bp, Homo Sapiens
aattgatgagcaatgctttctttaaaagggccaactttgtacaaaaaagttgggaattttttacgctgcagaagatcataagtaaacaagatgacttgatgacagtgaaaactaatgaaactggatatcaggaagcaatagtgaaagaacctgaaattaacacaactcttcagatgcgtttctttggaaaaagaggacaaagaaaacttcattataaagaatttcgaagatttatggaaaatttacaaacagagattcaagaaatggaattccttcagttttctaaaggtttgagtttcatgagaaaagaagactttgcagagtggctactttttttcactaacactgaaaataaagatatttattggaaaaatgtgagagagaagttgtcagcaggagagagcattagtttggatgaattcaagtcattttgccattttacaacccacttggaagactttgctattgccatgcagatgttcagtttagctcatcgtcctgtcagactagcggagtttaagagagctgtgaaagtagcaacaggacaagaactctcaaacaatattttggacactgtctttaagatctttgatttggatggtgatgaatgtcttagtcatgaagagtttcttggggtgttaaaaaacagaatgcatcgaggtttatgggtaccacaacatcagagtatacaagaatactggaagtgtgtgaagaaagaaagcattaaaggagtaaaagaagtctggaaacaagctggaaaaggtcttttttaataaaagatataatagtatggcaattatattgttcccaaatgtcaaatttgtgattttttagaagtacttgctatttatcttcttaagtcttcattgatattctgtgtgaaataagcatgtcttgtacttgctttctgattcctaattttattaaagaacctaagtagaaagaaagtaagtataaaaatagatattggga

SEQ ID NO: 104502 - DNA, 982 bp, Homo Sapiens
aattgatgagcaatgctttctttaaaagggccaactttgtacaaaaaagttggagaaaaagtaacttaaacaagcagctgtttccctggaaaaggcagctgcttaatgagcagggaataaatgaaatgtcctccagctcaacactcccaataataatgtccaacagtttgcaaagcccttcacaggcagggtttctcctggtcccctcccagtcccagggaggaaactgaagctcagagagagacctcgagtggatcattgtggaggaacctggctgagctgcccctaggctcatccctgtgtaccctggtcattgactggcttgttcattctccccatggactctgacttcttgagggcagcgtgtttctgctacaatagggacaatgtaagggaccagagcacacagtaactaatgtcttacaggatctcccccaagctcatggctttgagcatcatccctattctgacaactttcaagtctgtcatttcagttcaggttctgccctgagctgtggcggtcgtaacacaaacatccacctttctcacccagcatctccacttggatgtttgacaggtcaaacttaatgtgcttctgaaccaaactcctggcttcctctccaccctccacccccacccaaatctgcttctcctatatctttcccattttggttagcagtaactccatccttcctgttgcttggaccaagccttgagtcatccttgactcctctctctttcacacttgacatgaaatcctttaggaaatcttgccagcttctaaatatacccagaacctggccccaccctagtgtctgcatcactaccaccatggtccaagccactcatcccatctcacctggattgttgcaatggctggcagctggcctcccagcccccctgcagtctgttttccatactgcagtcagagggatcctattaaacgtcagttaaatcaaggcactcctctgcttaaacccta

SEQ ID NO: 104503 - DNA, 970 bp, Homo Sapiens
taaaggccaactttgtacaaaaaagttggctctcagctctcggcgcacggcccagcttccttcaaaatgtctactgttcacgaaatcctgtgcaagctcagcttggagggtgatcactctacacccccaagtgcatatgggtctgtcaaagcctatactaactttgatgctgagcgggatgctttgaacattgaaacagccatcaagaccaaaggtgtggatgaggtcaccattgtcaacattttgaccaaccgcagcaatgcacagagacaggatattgccttcgcctaccagagaaggaccaaaaaggaacttgcatcagcactgaagtcagccttatctggccacctggagacggtgattttgggcctattgaagacacctgctcagtatgacgcttctgagctaaaagcttccatgaaggggctgggaaccgacgaggactctctcattgagatcatctgctccagaaccaaccaggagctgcaggaaattaacagagtctacaaggaaatgtacaagactgatctggagaaggacattatttcggacacatctggtgacttccgcaagctgatggttgccctggcaaagggtagaagagcagaggatggctctgtcattgattatgaactgattgaccaagatgctcgggatctctatgacgctggagtgaagaggaaaggaactgatgttcccaagtggatcagcatcatgaccgagcggagcgtgccccacctccagaaagtatttgataggtacaagagttacagcccttatgacatgttggaaagcatcagaaagaggttaaaggagacctggaaaatgctttcctgaacctggttcagtgcattcagaacaagcccctgtattttgctgatcggctgtatgactccatgaagggcaaggggacgcgagataaggtcctgatcaaaatcatggtctccgcatgaagtggacatgttgaaaa

SEQ ID NO: 104504 - DNA, 940 bp, Homo Sapiens
gcaaaatacaggggcttgttctgaatgcactgaaccaggttcaggaaagcattttccaggtctcctttacctctttctgatgctttccaacatgtcataagggctgtaactcttgtacctatcaaatactttctggaggtggggcacgctccgctcggtcatgatgctgatccacttgggaacatcagttcctttcctcttcactccagcgtcatagagatcccgagcatcttggtcaatcagttcataatcaatgacagagccatcctctgctcttctaccctttgccagggcaaccatcagcttgcggaagtcaccagatgtgtccgaaataatgtccttctccagatcagtcttgtacatttccttgtagactctgttaatttcctgcagctcctggttggttctggagcagatgatctcaatgagagagtcctcgtcggttcccagccccttcatggaagcttttagctcagaagcgtcatactgagcaggtgtcttcaataggcccaaaatcaccgtctccaggtggccagataaggctgacttcagtgctgatgcaagttcctttttggtccttctctggtaggcgaaggcaatatcctgtctctgtgcattgctgcggttggtcaaaatgttgacaatggtgacctcatccacacctttggtcttgatggctgtttcaatgttcaaagcatcccgctcagcatcaaagttagtataggctttgacagacccatatgcacttgggggtgtagagtgatcaccctccaagctgagcttgcacaggatttcgtgaacagtagacattttgaaggaagcttcctgaggccaatgtgttcaaccaagcgggaaactctccgggtagagtgaaatccgaagttgctatgctacccaacttttttgtacaaagttggctatatataggaaaagcattgct

SEQ ID NO: 104505 - DNA, 741 bp, Homo Sapiens
  misc_feature (358)..(400): n is a, c, g, or t
ttgggtgccccagcacggtggtgcccaagccaaccctgtgactgacatgtacgattcactcctttgagtctttggatgccaactcagccccctgacctggaggcagccggccaaggcctctagggaagagccccccactgcagacatgacccgagtaactttctgctgatgaacaaatctgcaccccacttcagacctcggtgggcattcacaccaccccccatgccaccggctccactttccccttttattaatacattcacccagataatcattaaaattaacatgtgccaggtcttaggatgtgtcttggggtgggcacagtacccggtgactcttggggatatttatttatttnnnnnnnnnnnnnnnnnnnnnnnnnnnnnnnnnnnnnnnnnnncttgttgctgtcacaattattaccatctctccagctagcaaaattactaccagagccgttactacacacaaaggctattgaccgagcacataccatgtgccacacaccttgacaaaatcttttaatacagtttattatgtactattcaatctttacacaatgtcacgggaccagtattgtttacccaattttttataaggacactgaagcttagaggagtgaaatgttttgagtgttatttcagagagcaaatggcaaagactggatcccaaacccatcttcctggacctgaagttcatgctcccagccaccccacccctgagctgaataaatatgattta

SEQ ID NO: 104506 - DNA, 905 bp, Homo Sapiens
  misc_feature (610)..(652): n is a, c, g, or t
ttggcttggggtagaaggatcctccaaagtcacacagagtgcctgcctcctggtcccctcagctctgcctctgcagcccactgcctgcccagtgccatcaggatgagcagtcccggccaagcataatgacagagagaggcagatttcagggaagccctgactgtgtggagctaaggacacagtatagattctctggcactctgaggtctctgtggcaggcctggtcaggctctccaggtggtcagagggcccagtggtgccccagcacggtggtgcccaagccaaccctgtgactgacatgtacgattcactcctttgagtctttggatgccaactcagccccctgacctggaggcagccggccaaggcctctagggaagagccccccactgcagacatgacccgagtaactttctgctgatgaacaaatctgcaccccacttcagacctcggtgggcattcacaccaccccccatgccaccggctccactttccccttttattaatacattcacccagataatcattaaaattaacatgtgccaggtcttaggatgtgtcttggggtgggcacagtacccggtgactcttggggatatttatttatttnnnnnnnnnnnnnnnnnnnnnnnnnnnnnnnnnnnnnnnnnnncttgttgctgtcacaattattaccatctctccagctagcaaaattactaccagagccgttactacacacaaaagctattgaccgagcacataccatgtgccacacaccttgacaaaatcttttaatacagtttattatgtactattcaatctttacacaatgtcacgggaccagtattgtttacccaattttttataagacactgaagcttagagagtgaaatgttttgagtgttatttcagaaagcaaatgg

SEQ ID NO: 104507 - DNA, 873 bp, Homo Sapiens
  misc_feature (705)..(713): n is a, c, g, or t
acaaaaaagttggctgcaccccaggcagccactcttagccttggccttcgacatgagatggagccctccttattccccatctggtccagttccttcacttacagatggcagcagtgaggtcttggggtagaaggaccctccaaagtcacacaaagtgcctgcctcctggtcccctcagctctctctctgcaacccagtgccatcaggatgagcaatcctggccaagcataatgacagagagaggcagacttcggggaagccctgactgtgcagagctaaggacacagtggagattctctggcactctgaggtctctgcggcaggcctggtcaggctctccatgaggttagaaggccaggtagtgttccagcagggtggtggccaagccaaccccatgattgatgtgtacgattcactcctttgagtctttgaatggcaactcagccccctgacctgaagacagccagcctaggcctctagggtgacctagagccgccttcagatgtgacccgagtaactttcaactgatgaacaaatctgcaccctacttcagatttcagtgggcattcacatcaccccccacaccactggctctgctttctcctttcattaatccattcacccagatatttcattaaaattatcacgtgccaggtcttaggatatgtcgtggggtgggcaaggtaatcagtgacagttgaagannnnnnnnncccagagcttatgtcttcatctgtgaaatgggaataagatacttgttgctgtcacagttattaccatccccccagctaccaaaattactaacagaactgttactatacacagaggctattgactgagcacctatcatttgccaagaaccctgacagcact

SEQ ID NO: 104508 - DNA, 908 bp, Homo Sapiens
ctttgtacaaaaaagttggcccagagggaaccatggaaaccccagcgcagcttctcttcctcctgctactctggctcccagaaactaccggggacattgtgttgacgcagtctccaggcaccctgtctttgtctccaggggaaagagccaccctctcttgcagggccagtcagagtgttaccagcacctacttagcctggtaccagcagaagcctggccaggctcccaggctcctcatctatgatgcgtctaacagggccactggcgtcccagacaggttcagtggcagtgggtctgggacagacttcactctcaccatcaacagactggagcctgaagattttgcaatatattattgtcaacagtatggtagcccatttccgggactcactttcggcggagggaccaaggtggagatcaaacgaactgtggctgcaccatctgtcttcatcttcccgccatctgatgagcagttgaaatctggaactgcctctgttgtgtgcctgctgaataacttctatcccagagaggccaaagtacagtggaaggtggataacgccctccaatcgggtaactcccaggagagtgtcacagagcaggacagcaaggacagcacctacagcctcagcagcaccctgacgctgagcaaagcagactacgagaaacacaaagtctacgcctgcgaagtcacccatcagggcctgagctcgcccgtcacaaagagcttcaacaggggagagtgttagagggagaagtgcccccacctgctcctcagttccagcctgaccccctcccatcctttggcctctgaccctttttccacaggggacctacccctattgcggtcctccagctcatctttcacctcacccccctcttctccctgagctttatttatgctaatgttg

SEQ ID NO: 104509 - DNA, 826 bp, Homo Sapiens
cccctgtgaaaaaagggtcagaggccaagggatgggagggggtcaggctggaaatgaggagcaggtgggggcacttctccctctaacactctcccctgttgaagctctttgtgacgggcgagctcaggccctgatgggtgactttcgcaggcgtagactttgtgtttctcgtagtctgctttgctcagcgtcagggtgctgctgaggctgtaggtgctgtccttgctgtcctgctctgtgacactctcctgggagttacccgattggagggcgttatccaccttccactgtactttggcctctctgggatagaagttattcagcaggcacacaacagaggcagttccagatttcaactgctcatcagatggcgggaagatgaagacagatggtgcagccacagttcgtttgatctccaccttggtccctccgccgaaagtgagcgggatattgtaactctgttgacagtagtaatttgcaaaatcttcaggttgcagactgctgatggtgagagtgaaatctgtcccagatccactgccactgaaccttgatgggaccccactttgcaaagtggatgtagcatagatcaggagcttaggggctttccctggtctctgctgataccaatttaaagagttgctaatgctctgacttgcccggcaagtgagggtgactctgtctcctacagatgcagacagggaggatggagactgggtcatctggatgtcacatctggcacctcggagccagagtagcaggagccccaggagctgagcggggaccctcatgtccaggctgtgtcctgacccaacttttttgtacaaag

SEQ ID NO: 104510 - DNA, 804 bp, Homo Sapiens
caaagtatgggagggggtccaggctggaattgagtagcatgtgggggcatttctcccctctaacactctccccttgttgaagctctttgtgacgggcgagctcaggccctgatggggtgacttcgcaggcgtagactttgtgtttctcgtagtctgctttgctcagcgtcagggtgctgctgaggctgtaggtgctgtccttgctgtcctgctctgtgacactctcctgggagttacccgattggagggcgttatccaccttccactgtactttggcctctctgggatagaagttattcagcaggcacacaacagaggcagttccagatttcaactgctcatcagatggcgggaagatgaagacagatggtgcagccacagttcgtttaatctccagtcgggtcccttggccgaaggtgatcggaggaggccacttactatactgctgacagtaataaactgcaaaatcttcagactgcaggctgctgatggtgagagtgaagtctgtcccagacccactgccactgaacctggctggaataccagtggccctggtggatgcaccatagatgaggagcctgggagcctggccaggtttctgctggtaccaggctaagttgctggtaactccctgactggccctgcaggagagggtggctctttcccctggagacacagacagggtggctggagactgcgtcatcactatttctccagtggaatctgggagccagagtagcaggaggaagagaagctgcgctggggcttccatggttccgtctgggccaacttttttgtacaaag

SEQ ID NO: 104511 - DNA, 973 bp, Homo Sapiens
aacaaattgatgagcaatgcttttcttataagtagccaactttgtacaaaaaagttggcccagagggaaccatggaaaccccagcgcagcttctcttcctcctgctactctggctcccagataccaccggagaaattgtgttgacgcagtctccaggcatcctgtctttgtctccaggggaaagagtcaccctctcctgcagggccagtcagagtgttagcggcaggtacttagcctggtaccagcagaaacctggccaggctcccaggctcctcatctatggtgcatctaacagggccactggcatcccagacaggttcagtggcagtgggtctgggacagacttcactctcaccatcagcagactggagcctgaagattttgcagtgtattcctgtcagcagtatggtgggtcacctctcactttcggcggagggaccaaggtggagatcaaacgaactgtggctgcaccatctgtcttcatcttcccgccatctgatgagcagttgaaatctggaactgcctctgttgtgtgcctgctgaataacttctatcccagagaggccaaagtacagtggaaggtggataacgccctccaatcgggtaactcccaggagagtgtcacagagcaggacagcaaggacagcacctacagcctcagcagcaccctgacgctgagcaaagcagactacgagaaacacaaagtctacgcctgcgaagtcacccatcaggcctgagctcgcccgtcacaaagagcttcacagggggagagtgttagagggagaagtgcccccacctgctcctcagttccagcctgaccccctcccatccctttggcctctgacccttttttcacaggggacttacccatattgcgggtcctacagctcaactttcactcacacccctcctcctccttggctgtatataaggcaatgttagaagagaatgataaaataagtgatccgtgcaa

SEQ ID NO: 104512 - DNA, 790 bp, Homo Sapiens
actttgtacaaaaaagttggcagacggaaccctggaagccccagcgcagcttctcttcctcctgctactctggctcccagataccactggagaaatagtgatgacgcagtctccagccaccctgtctgtgtctccaggggaaagagccaccctctcctgcagggccagtcagagtgttagcagcaacttagcctggtaccagcagaaacctggccaggctcccaggctcctcatctatggtgcatccaccagggccactggtatcccagccaggttcagtggcagtgggtctgggacagagttcactctcaccatcagcagcctgcagtctgaagattttgcagtttattactgtcagcagtataataactggcctccggccctcactttcggcggagggaccaaagtggagatcaaacgaactgtggctgcaccatctgtcttcatcttcccgccatctgatgagcagttgaaatctggaactgcctctgttgtgtgcctgctgaataacttctatcccagagaggccaaagtacagtggaaggtggataacgccctccaatcgggtaactcccaggagagtgtcacagagcaggacagcaaggacagcacctacagcctcagcagcaccctgacgctgagcaaagcagactacgagaaacacaaagtctacgcctgcgaagtcacccatcaaggcctgagctcgcccgtcacaaagagcttcaaaggggagagtgttagagggagaagtgcccccacctgctcctcagttccagcctgaccccctccc

SEQ ID NO: 104513 - DNA, 1196 bp, Homo Sapiens
  misc_feature (641)..(691): n is a, c, g, or t
  misc_feature (1065)..(1073): n is a, c, g, or t
ttggcgaacagctgaggaagctcttcattggagggttgagctttgaaacaactgatgagagcctgaggagccattttgagcaatggggaacgctcacggactgtgtggtaatgagagatccaaacaccaagcgctccaggggctttgggtttgtcacatatgccactgtggaggaggtggatgcagctatgaatgcaaggccacacaaggtggatggaagagttgtggaaccaaagagagctgtctccagagaagattctcaaagaccaggtgcccacttaactgtgaaaaagatatttgttggtggcattaaagaagacactgaagaacatcacctaagagattattttgaacagtatggaaaaattgaagtgattgaaatcatgactgaccgaggcagtggcaagaaaaggggctttgcctttgtaacctttgacgaccatgactccgtggataagattgtcattcagaaataccatactgtgaatggccacaactgtgaagttagaaaagccctgtcaaagcaagagatggctagtgcttcatccagccaaagaggtcgaagtggttctggaaactttggtggtggtcgtggaggtggtttcggtgggaatgacaacttcggtcgtggaggaaacttnnnnnnnnnnnnnnnnnnnnnnnnnnnnnnnnnnnnnnnnnnnnnnnnnnncagtggggatggctataatggatttggtaatgatggaagcaattttggaggtggtggaagctacaatgattttgggaattacaacaatcagtcttcaaattttggacccatgaagggaggaaattttggaggcagaagctctggcccctatggcggtggaggccaatactttgcaaaaccacgaaaccaaggtggctatggcggttccagcagcagcagtagctatggcagtggcacaagattttaattaggaaacaaagcttatcaggagacgagagcccgagaagtgacacggaatctacaggttacaacagatttgtgaactccgccaagcccattggtggcagggcctagctgctacaaagaagacccgnnnnnnnnnaaatactcctgtgtatgggcaacaaactccaggactgaatttgtgactaattgtataacaggttatttcagtttctgttctctgcaaagtgcaaagcattccaaccaacggttttaatgtaga

SEQ ID NO: 104514 - DNA, 366 bp, Homo Sapiens
ctttgtacaaaaaagttggagcaattttggaacgtggtggaagctacaatgattttgggaattacaacaatcagtcttcaaattttggacccatgaagggaggaaattttggaggcagaagctctggcccctatggcggtggaggccaatactttgcaaaaccacgaaaccaaggtggctatggcggttccagcagcagcagtagctatggcagtggcagaagattttaattaaggaggagtctgctactagtcttatcagctcttaaaaacagaaactcatctgtccaagttcgtggcagaaaggaacgtccttgagaagacctttattttagccactgtacttcgttatctctgccatgcagtt

SEQ ID NO: 104515 - DNA, 956 bp, Homo Sapiens
ttgggtcctgttctccagcatggtgtgtctgaagctccctggaggctcctgcatggcagctctgacagtgacactgatggtgctgagctccccactggctttggctggggacacccaaccacgtttcctgtggcagggtaagtataagtgtcatttcttcaacgggacggagcgggtgcagttcctggaaagactcttctataaccaggaggagttcgtgcgcttcgacagcgacgtgggggagtaccgggcggtgacggagctagggcggcctgtcgccgagtcctggaacagccagaaggacatcctggaggacaggcggggccaggtggacaccgtgtgcagacacaactacggggttggtgagagcttcacagtgcagcggcgagtccatcctgaggtgactgtgtatcctgccaagactcagcccctgcagcaccacaacctcctggtctgctctgtgagtggtttctatccaggcagcattgaagtcaggtggttccggaacggccaggaagagaaggctggggtggtgtccacaggcctgatccagaatggagactggaccttccagaccctggtgatgctggaaacagttcctcggagtggagaagtttacacctgccaagtggagcacccaagtgtgatgagccctctcacagtggaatggagagcacggtctgaatctgcacagagcaagatgctgagtggagtcgggggctttgtgctgggcctgctcttccttggggccgggctattcatctacttcaagaatcagaaagggcactctggacttcacccaacaggactcctgagctgaagtgcaaatgaccacattcaaggaggaaccttctgccccaactttgcatgatgaaaagctttcctgcttggctcttattcttccacaagaaaggactttctcaggccctgattgctaccggttcatcaactctgca

SEQ ID NO: 104516 - DNA, 676 bp, Homo Sapiens
gtgcactccattgcaccgtgagaagggctcatcatgcttggatgctccacttggcaggtgtaaacctctccactccgaggaactgtttccagcatcaccagggtctggaaggtccagtctccattctggatcaggcctgtggacaccaccccagccttctcttcttggccgttccggaaccacctgacttcaatgctgcctggatagaaaccattcacagagcagaccaggaggttgtggtgctgcaggggctgggtctttgaaggatacacagtcaccttaggttggactcgccgctgcactgtgaagctctccacaaccccgtagttgtatctgcagtaggtgtccacctcggcccgcctccgctccaggaggtccttctggctgttccagtactcagcgtcaggccgccccagctccgtcaccgcctggtactcccccaggtcactgttgtagcgcgcgtactcctcttggttatagatgtatctgatcaggttccacactcgctccgtcccattgaggaaatgacactcacacttagcctgctccaagaaacgtggttgggtgtccccagccaaagccagtggggagctcagcaccgtcaatgtcactgtcagcgctgccatacaggagcctccagggggcttcagacacaccccaacttttttgtacaaag

SEQ ID NO: 104517 - DNA, 899 bp, Homo Sapiens
ttggcaaaacaccaaatggcggatgacgccggtgcagcgggggggcccgggggccctggtggccctgggatggggaaccgcggtggcttccgcggaggtttcggcagtggcatccggggccggggtcgcggccgtggacggggccggggccgaggccgcggagctcgcggaggcaaggccgaggataaggagtggatgcccgtcaccaagttgggccgcttggtcaaggacatgaagatcaagtccctggatctcttctccctgcccattaaggaatcagagatcattgatttcttcctgggggcctctctcaaggatgaggttttgaagattatgccagtgcagaagcagacccgtgccggccagcgcaccaggttcaaggcatttgttgctatcggggactacaatggccacgtcggtctgggtgttaagtgctccaaggaggtggccaccgccatccgtggggccatcatcctggccaagctctccatcgtccccgtgcgcagaggctactgggggaacaagatcggcaagccccacactgtcccttgcaaggtgacaggccgctgcggctctgtgctggtacgcctcatccctgcacccaggggcactggcatcgtctccgcacctgtgcctaagaagctgctcatgatggctggtatcgatgactgctacacctcagcccggggctgcactgccaccctgggcaacttcgcccaggccacctttgatgccatttctaagacctacagctacctgacccccgacctctggaaggagactgtattcaccaagtctccctatcaagagttcactgaccacctcgtcaagacccacacccagagtctcccgtgcagcggactcaagctccagctgtgggctacaacataagggttttt

SEQ ID NO: 104518 - DNA, 848 bp, Homo Sapiens
ctttgtacaaaaaagttggcaaaacaccaaatggccgatgacgccggtgcagcgggggggcccgggggccctggtggccctgggatggggaaccgcggtggcttccgcggaggtttcggcagtggcatccggggccggggtcgcggccgtggacggggccggggccgaggccgcggagctcgcggaggcaaggccgaggataaggagtggatgcccgtcaccaagttgggccgcttggtcaaggacatgaagatcaagtccctggaggagatctatctcttctccctgcctattaaggaatcagagatcattgatttcttcctgggggcctctctcaaggatgaggttttgaagattatgccagtgcagaagcagacccgtgccggccagcgcaccaggttcaaggcatttgttgctatcggggactacaatggccacgtcggtctgggtgttaagtgctccaaggaggtggccaccgccatccgtggggccatcatcctggccaagctctccatcgtccccgtgcgcagaggctactgggggaacaagatcggcaagccccacactgtcccttgcaaggtgacaggccgctgcggctctgtgctggtacgcctcatccctgcacccaggggcactggcatcgtctccgcacctgtgcctaagaagctgctcatgatggctggtatcgatgactgctacacctcagcccggggctgcactgccaccctgggcaacttcgccaaggccacctttgatgccatttctaagacctacagctacctgacccccgacctctgggaaggagactgtattccccaagtctccctatcaggagttcactgaccacc

SEQ ID NO: 104519 - DNA, 945 bp, Homo Sapiens
actttgtacaaaaaagttggctcttccacccttctcctgtgtgcctgcctcctgccgccgccaccatgaccacctccatccgccagttcacctcctccagctccatcaagggctcctccggcctggggggcggctcgtcccgcacctcctgccggctgtctggcggcctgggtgccggctcctgcaggctgggatctgctggcggcctgggcagcaccctcgggggtagcagctactccagctgctacagctttggctctggtggtggctatggcagcagctttgggggtgttgatgggctgctggctggaggtgagaaggccaccatgcagaacctcaatgaccgcctggcctcctacctggacaaggtgcgtgccctggaggaggccaacactgagctggaggtgaagatccgtgactggtaccagaggcaggccccggggcccgcccgtgactacagccagtactacaggacaattgaggagctgcagaacaagatcctcacagccaccgtggacaatgccaacatcctgctacagattgacaatgcccgtctggctgctgatgacttccgcaccaagtttgagacagagcaggccctgcgcctgagtgtggaggccgacatcaatggcctgcgcagggtgctggatgagctgaccctggccagagccgacctggagatgcagattgagaacctcaaggaggagctggcctacctgaagaagaaccacgaggaggagatgaacgccctgcgaggccaggtgggtggtgagatcaatgtggagatggacgctgccccaggcgtggacctgagccgcatcctcaacgagatgcgtgaccagtatgagaagatggcagagaagaaccgcaaggatgccgaggattggttcttcagcaagacagaaggactgaaccgcgaaggtggccaccaacagtgagctggtg

SEQ ID NO: 104520 - DNA, 900 bp, Homo Sapiens
tcccggttcaattcttcagtccggctggtgaacaggcttcagcatcctttcggttctgctcggccatgacatcatattggcttcgcatgtcactcaggatcttggcgagatcggtgcccggagcggaatccacctccacactgacctggcctcccactggcccctcagcgtactgatttcctcctcatggttcttcttcaggtaggccagctcttccttcaggccttcgatctgcatctccaggtcggtcctggccagggtcagctcatccagcaccctgcgcaggccgttgatgtcggcctccacgctcatgcgcagagcctgttccgtctcaaacttggttcggaagtcatctgcagccagacgggcgttgtcgatctgcaggacaatcctggagttctcaatggtggcaccaagaatcttgtcccgcaggtcctggatggtcgtgtagtagtggctgtagtcgcgggagggcccaggcccctgcttctggtaccagtcgcggatcttcacctctagctcgccgttggccgcctccagggcgcgcaccttgtccaggtaggaggccaggcggtcgttgaggttctgcatggttagcttctcgttgcccgccagcagcccgtcggacgcggtcaggacgccgccgtagccgccgccgtagccccccgaggaggacgaggacacaaagcgggcggaggacacggatacgccgcggccgccggagcccccgtgaatgctgggcgcgcgaaaagcgacccccggcccaaaacgcacggagccgccgcccaggcctccgaaggacgacgtggccgacgactggcgatagctgtaggaagtcatggcgaggcggagcacggacggagcaaccctggtctcagaagctgcgccaacttttttgta

SEQ ID NO: 104521 - DNA, 875 bp, Homo Sapiens; identical to SEQ ID NO: 104441

SEQ ID NO: 104522 - DNA, 897 bp, Homo Sapiens
ccggttcaattcttcagtccggctggtgaaccaggcttcagcatctttccggttctgctcggccatgacatcatattggcttcgcatgtcactcaggatcttggcgagatcggtgcccggagcggaatccacctccacactgacctggcctcccacttggcccctcagcgtactgatttcctcgtcatggtttttcttcaggtaggccagctcttctttcaggccttcgatctgcatctccaggtcggtcctggccagggtcagctcatccagcaccctgcgcaggccgttgatgtcggcctccacgctcatgcgcagagcctgttccgtctcaaacttggttcggaagtcatctgcagccagacgggcattgtcgatctgcaggacaatcctggagttctcaatggtggcaccaagaatcttgtcccgcaggtcctggatggtcgtgtagtagtggctgtagtcgcgggagggcccaggcccctgcttctggtaccagtcgcggatcttcacctctagctcgccgttggccgcctccagggcgcgcaccttgtccaggtaggaggccaggcggtcgttgaggttctgcatggttagcttctcgttgcccgccagcagcccgtcggacgcggtcaggacgccgccgtagccgccgccgtaggcccccgaggaggacgaggacacaaagcgggcggaggacacggatacgccgcggccgccggagcccccgtgaatgctgggcgcgcgaaaggcgacccccggcccaaaacgcacggagccgccgcccaggcctccgaaggacgacgtggccgacgactggcgatagctgtaggaagtcatggcgaggcggagcacggacggagcaaccctgggcccaacttttttgtacaaagtttt

SEQ ID NO: 104523 - DNA, 945 bp, Homo Sapiens
aaaacgctgaagatgactgctttcactgaggtcaaggattgtaatattgccagctttgtaaagtcattaaagcagaagtttcttcagtgatcttctctctaagaaacatcatcacctccatgtgccttacagaggccccctgcgttctgctgcattgctttgcgcactcccttgatgatgaagatggtcccaataatgatgcccaccagacccacagtcaggcccagggcacacaccacattctctgtagtctctgggagagggcttggagcatcaaactcccagtgcttgagaagaggctcatccaagccccagtgctccaccctgcagtcgtaaacgtcctcagttgagggcaggaaggggagatagtggaacttgcggaaaaggtggtcttccctgggcaggaagactgtctctgacactcctgtggtgacaggttttccatttcgaagccacgtgacattgaccactggtggggtgaacttgtcgatgaaacagatgaggacgttgggctctctcagttccacagggctgttcgtgagcacagttacctctggaggtacattggtgatcggagtatagttggagcgctttgtcatgatttccaggttggctttgtccacagctatgttggccaatgcaccttgagcctcaaagctggcaaatcgtccaaattcttcaagccgccagaccgtctccttctttgccatatccacatggaaaatctcatcaccatcaaagtcaaacataaactcgcctgattggtcaggattcagatagaactcggcctggatgatcacatgttcttctttgatagcccatgattcctgagcgctcatcagcacagctatgatgaaaaatcctagcacagggactccacttatggccattttcttcttgggcgctctgttgggagtcagtagagctcggccaacttttttgtac

SEQ ID NO: 104524 - DNA, 957 bp, Homo Sapiens
ccaactttgtacaaaaaagttggagaaaatggccataagtggagtccctgtgctaggatttttcatcatagctgtgctgatgagcgctcaggaatcatgggctatcaaagaagaacatgtgatcatccaggccgagttctatctgaatcctgaccaatcaggcgagtttatgtttgactttgatggtgatgagattttccatgtggatatggcaaagaaggagacggtctggcggcttgaagaatttggacgatttgccagctttgaggctcaaggtgcattggccaacatagctgtggacaaagccaacctggaaatcatgacaaagcgctccaactatactccgatcaccaatgacaagttcaccccaccagtggtcaatgtcacgtggcttcgaaatggaaaacctgtcaccacaggagtgtcagagacagtcttcctgcccagggaagaccaccttttccgcaagttccactatctccccttcctgccctcaactgaggacgtttacgactgcagggtggagcactggggcttggatgagcctcttctcaagcactgggagtttgatgctccaagccctctcccagagactacagagaatgtggtgtgtgccctgggcctgactgtgggtctggtgggcatcattattgggaccatcttcatcatcaagggagtgcgcaaaagcaatgcagcagaacgcagggggcctctgtaggcacatggaggtgatgatgtttcttagagagaagatcactgaagaaacttctgctttaatgactttacaaagctggcaatattacaatccttgacctcagtgaaagcagtcatcttcagcgttttccagccctatagccaccccaagtgtggttatgcctcctcaattgctccgtactctaacatctagctgggcttccctgtccattgcctttctgtatcaattttcctccatttccc

SEQ ID NO: 104525 - DNA, 989 bp, Homo Sapiens
tttgtacaaaaaagttggacctgttccgtggcaccctggacccagtagagaaagcccttcgagatgccaaactagacaagtcacagattcatgatattgtcctggttggtggttctactcgtatccccaagattcagaagcttctccaagacttcttcaatggaaaagaactgaataagagcatcaaccctgatgaagctgttgcttatggtgcagctgtccaggcagccatcttgtctggagacaagtctgagaatgttcaagatttgctgctcttggatgtcactcctctttcccttggtattgaaactgctggtggagtcatgactgtcctcatcaagcgtaataccaccattcctaccaagcagacacagaccttcactacctattctgacaaccagcctggtgtgcttattcaggtttatgaaggcgagcgtgccatgacaaaggataacaacctgcttggcaagtttgaactcacaggcatacctcctgcaccccgaggtgttcctcagattgaagtcacttttgacattgatgccaatggtatactcaatgtctctgctgtggacaagagtacgggaaaagagaacaagattactatcactaatgacaagggccgtttgagcaaggaagacattgaacgtatggtccaggaagctgagaagtacaaagctgaagatgagaagcagagggacaaggtgtcatccaagaattcacttgagtcctatgccttcaacatgaaagcaactgttgaagatgagaaacttcaaggcaagattaacgatgaggacaaacagaagattctggacaagtgtaatgaaattatcaactggcttgataagaatcagactgctgaggaaggaagaatttgaacatcaacagaaagagctgggagaagtttgcaaccccatcatcacaaagctgtaccagagtgcagaaggcatgccaggaggaatgcctgggggatttcctggtggtggagctcc

SEQ ID NO: 104526 - DNA, 940 bp, Homo Sapiens
ctttgtacaaaaaagttggcagcgtcaggctaccaaagatgctggaactattgctggtctcaatgtacttagaattattaatgagccaactgctgctgctattgcttacggcttagacaaaaaggttggagcagaaagaaacgtgctcatctttgacctgggaggtggcacttttgatgtgtcaatcctcactattgaggatggaatctttgaggtcaagtctacagctggagacacccacttgggtggagaagattttgacaaccgaatggtcaaccattttattgctgagtttaagcgcaagcataagaaggacatcagtgagaacaagagagctgtaagacgcctccgtactgcttgtgaacgtgctaagcgtaccctctcttccagcacccaggccagtattgagatcgattctctctatgaaggaatcgacttctatacctccattacccgtgcccgatttgaagaactgaatgctgacctgttccgtggcaccctggacccagtagagaaagcccttcgagatgccaaactagacaagtcacagattcatgatattgtcctggttggtggttctactcgtatccccaagattcagaagcttctccaagacttcttcaatggaaaagaactgaataagagcatcaaccctgatgaagctgttgcttatggtgcagctgtccaggcagccatcttgtctggagacaagtctgagaatgttcaagatttgctgctcttggatgtcactcctctttcccttggtattgaaactgctggtggagtcatgactgtcctcatcaagcgtaataccaccattcctaccaagcagacacagaccttcactacctattctgacacccagcctggtgtgcttattcagtttatgaaggcgagcgtgccatgacaaaagataacaacctgcttggcaagtttgaac

SEQ ID NO: 104527 - DNA, 535 bp, Homo Sapiens
actttgtacaaaaaagttggagctgaacagggaggagtctgtgcagtttctgacacttgttgttgaacatggctaaatacaatgggtatcgctgagactaagttgtagaaattaacaaatgtgctgcttggttaaaatggctacactcatctgactcattctttattctattttagttggtttgtatcttgcctaaggtgcgtagtccaactcttggtattaccctcctaatagtcatactagtagtcatactccctggtgtagtgtattctctaaaagctttaaatgtctgcatgcagccagccatcaaatagtgaatggtctctctttggctggaattacaaaactcagagaaatgtgtcatcaggggaacatcataacccatgaaggataaaagccccaaatggtggtaactgataatagcactaatgctttaagatttggtcacactctcacctaggtgagcgcattgagccagtggtgctaaatgctacatactccaactgaaatgttaaggaagaagatagatccaatt

SEQ ID NO: 104528 - DNA, 919 bp, Homo Sapiens
actttgtacaaaaaagttgggtcacgatgatcacagtctctggaagtgctcctgtcctctcagctgtggccaccgtcggcatcacgattggagtgctggccagggtggctctgatatagcagccctggtgtattttcgatatttcaggaagactggcagattggaccagaccctgaattcttctagctcctccaatcccattttatcccatggaaccactaaaaacaaggtctgctctgctcctgaagccctatatgctggagatggacaactcaatgaaaatttaaagggaaaaccctcaggcctgaggtgtgtgccactcagagacttcacctaactagagacagtcaaactgcaaaccatggtgagaaattgacgacttcacactatggacagcttttcccaagatgtcaaaacaagactcctcatcatgataaggctcttacccccttttaatttgtccttgcttatgcctgcctctttcgcttggcaggatgatgctgtcattagtatttcacaagaagtagcttcagagggtaacttaacagagtgtcagatctatcttgtcaatcccaacgttttacataaaataagagatcctttagtgcacccagtgactgacattagcagcatctttaacacagccgtgtgttcaaatgtacagtggtccttttcagagttggacttctagactcacctgttctcactccctgttttaattcaacccagccatgcaatgccaaataatagaattgctccctaccagctgaacagggaggagtctgtgcagtttctgacacttgttgttgaacatggctaaatacaatgggtatcgctgagactaagttgtagaaattaacaaatgtgctgcttggttaaaatggctacactcatctgactcattctttattctatttta

SEQ ID NO: 104529 - DNA, 1561 bp, Homo Sapiens
caagatagaggcagcaaacacaaattctgagggagaggaaaggggcagttgagtaagacggctaagggaactgagaagcctgaggtgatgggggctctgccttaggcctcctcttcggcctcctcaccgaaatcctcctcctcttctgcggtggcatcctggtactgctgatactcagagacgaggtcgttcatgttgctctcagcctcggtgaactccatctcgtccatgccctcgcctgtgtaccagtggaggaaggccttccggcggaacatggcagtgaactgctccgagatgcgcttgaagagctcctggatggctgtgctattgccaatgaaggtgactgccatcttgaggccacgaggtgggatgtcacagacggctgtcttgacattgttggggatccattccacaaagtagctgctgttcttgttctgcacgttaagcatctgctcatcgacctccttcatggacatccgaccacggaagacagcagccacggtgaggtatcggccgtggcgggggtcacaggcagccatcatgttcttggcatcgaagacctgctgggtgagttccggcactgtgagagctcgatactgctggcttccacggctggtgagaggggcaaagccaggcataaagaaatggagacgtgggaaggggaccatgttgactgccaacttgcggaggtcagcattgagctggccagggaaacggaggcaggtggtgacaccactcatggtggctgagacaaggtggttcagatccccgtaggttggtgtggtcagcttcagagtgcggaagcagatatcatagagggcctcgttgtcaatgcaataggtctcatcagtattctctaccaactgatggacggagagggtggcattgtagggctcgaccacggtgtcagacactttgggtgaaggcaccacactgaaggtattcatgatgcgatcagggtattcttctcggatcttgctgataaggagagtgcccattccagagcctgtgcccccgcccagtgagtgggtcagctggaagccctgcaggcagtcacagctctctgcctccttccgtaccacatccaggacagaatcaaccagctcggcgccctctgtgtagtggcctttggcccagttgttacctgccccagactgaccaaatacaaagttgtctggtctaaagatctggccaaaaggacctgagcgaacagagtccatggtcccaggttctagatccaccaggatggcacgaggaacatatttgccacctgtggcttcattgtagtacacagagatgcggtccagctgcaggtcgctgtccccgtggtaggtgccggtggggtcgatgccatgttcatcactgatcacctcccagaacttggcaccgatctggttgccacactgaccagcctggatgtgcacgatttccctcatggttaaaatttaatttttttgctcgcctcaaggtatgtatggggcaagaaaataagtaattttttttctccgcaggtcgcaggctggaaggttggaatgcgccccagaggctggagcagcgccaa

SEQ ID NO: 104530 - DNA, 885 bp, Homo Sapiens
ctttgtacaaaaaagttggcgctcttctgccagctgtttgtctacttcctcctgcttccccgccgccgccgccgccatcatgagggaaatcgtgcacttgcaggccgggcagtgcggcaaccaaatcggcgccaagttttgggaggtgatcagcgatgagcacggcatcgaccccacgggcacctaccacggggacagcgacctgcagctggaacgcatcaacgtgtactacaatgaggccaccggcggcaagtacgtgccccgcgccgtgctcgtggatctggagcccggcaccatggactccgtgcgctcggggcccttcgggcagatcttccggccggacaacttcgttttcggtcagagtggtgctgggaacaactgggccaaggggcactacacagaaggcgcggagctggtggactcggtgctggatgttgtgagaaaggaggctgagagctgtgactgcctgcagggtttccagctgacccactccctgggtggggggactgggtctgggatgggtaccctcctcatcagcaagatccgggaggagtacccagacaggatcatgaacacgtttagtgtggtgccttcgcccaaagtgtcagacacagtggtggagccctacaacgccaccctctcagtccaccagctcgtagaaaacacagacgagacctactgcattgataacgaagctctctacgacatttgcttcagaaccctaaagctgaccacgcccacctatggtgacctgaaccacctggtgtctgctaccatgagtggggtcaccacctgcctgcgcttcccaagccagctcaatgctgaccttgcggagctggctgtgaacatggtcccgtttccccggctgcacttcttcaagcccgg

SEQ ID NO: 104531 - DNA, 968 bp, Homo Sapiens
gcaggcagccatcatgttcttggcattcaaacatttgttgtgtgagttcgggcacggtcagcgcccggtactgctggctgccccgggctgttcagtggggcaaagccgggcatgaagaagtgcagccggggaaacgggacccatgttcacagccagcttccgcaggtcagcattgagctggcctgggaagcgcaggcaggtggtgaccccactcatggtagcagacaccaggtggttcaggtcaccataggtgggcgtggtcagctttagggttctgaagcaaatgtcgtagagagcttcgttatcaatgcagtaggtctcgtctgtgttttctacgagctggtggactgagagggtggcgttgtagggctccaccactgtgtctgacactttgggcgaaggcaccacactaaacgtgttcatgatcctgtctgggtactcctcccggatcttgctgatgaggagggtacccatcccagacccagtccccccacccagggagtgggtcagctggaaaccctgcaggcagtcacagctctcagcctcctttctcacaacatccagcaccgagtccaccagctccgcgccttctgtgtagtgccccttggcccagttgttcccagcaccactctgaccgaaaacgaagttgtccggccggaagatctgcccgaagggccccgagcgcacggagtccatggtgccgggctccagatccacgagcacggcgcggggcacgtacttgccgccggtggcctcattgtagtacacgttgatgcgttccagctgcaggtcgctgtccccgtggtaggtgcccgtggggtcgatgccgtgctcatcgctgatcacctcccaaaacttggcgccgatttggttgccgcactgcccggcctgcaagtgcacgatttccctcatgatggcggcggcggcggcggggaagcaggaggaagtccaacttttttgtacaaagt

SEQ ID NO: 104532 - DNA, 797 bp, Homo Sapiens
aagttgggggagcagcacgcccgtcaaagctgaagggcaaggaggaggagctacaggatgtacgggatcagctcgagcaggcccaggaggagcgggactgccacctgaagaccattagcagcctgaagcaggaggtgaaggacacagtggatgggcagaggatcctggagaagaagggcagtgctgcgctcaaggacctcaagcggcagctgcatttggagcggaaacgggcagataagctgcaggagcgactgcaggacatcctcactaacagcaagagccgctcaggccttgaggagctggttctctcagagatgaactcaccaagccggacccagacaggggacagcagtagcatctcctccttcagctaccgggagatcttgcgggaaaaggagagctcggctgttccagccaggtccttatccagcagccctcaagcccagccccctcggccagcagagctgtcagatgaggaagtggctgagctctttcagcggctggcagagacacagcaggagaaatggatgctggaggagaaggtgaagcacctggaagtgagcagtgcttccatggcagaggacctctgccggaagagcgccatcattgagacctacgtcatggacagccggatcggtcagtgtcccctccccggccctcagccctggtccagccttcacctggccctccctctccattctgtgctgcggcttctctcctctcctctcggaactcagcgaagctactgacaagaccatggcctgtgggaggggagaacaggaaagcactgtctcttg

SEQ ID NO: 104533 - DNA, 887 bp, Homo Sapiens
gagttgtttctggaaggagagctcatgcagagatgaagacagaagcccctgggaagccaggaccagaagaggagaaatcccctgcccctcctcaggatccccactcctggtgggccctgcctaagacaggatcattaacactaaccatcaggcctctagcccctttaatgtccagtctcccaagctatttgattttggctccagccctcatttttccaccacagcccaagggaatagcatcctagggggtaggaaggggaggaggtgggtgcagcctgcaggtctttagctggtttctcctggctctaggtctgggtcaggaggccccacgcactccttgctgagccgcacaatttcctgggacagaacttccatatccttgtgcaagtgcatattcttggtgagctgctcctccagcatgttctgcagcttcttgttcatctcccgaaggttctcgtcgcctggcttcactaggtctctcaggacgctgcccagcccgctgcggtctgtgtggcctgctgccacagacacatcgatccggctgtccatgacgtaggtctcaatgatggcgctcttccggcagaggtcctctgccatggaagcactgctcacttccaggtgcttcaccttctcctccagcatccatttctcctgctgtgtctctgccagccgctgaaagagctcagccacttcctcatctgacagctctgctggccgagggggctgggcttgagggctgctggataaggacctggctggaacagccgagctctccttttcccgcaagatctcccggtagctgaaggaggagatgctactgctgtcccctgtctgggtccggcttggtgagttcatctctgagagaaccagctccaacttttttgtac

SEQ ID NO: 104534 - DNA, 907 bp, Homo Sapiens
ggaaagctgcagagttattgaaccacttggtcacttttccctgtgagtcccaacaacttggcccccaggtagagctgaatggtgtcacccttgatggcaggatacagaaggtcaaacttccagacggtcaatgctgagggaaatgggcaccttcaccagctgcaggaggtctgcatacatgccattgaaggaagcctcgatcacgggacacagctggtttttcactagattgggcagggatggcactaggaggttcatgacctgcttagctaaggcgttcaccaggaaggagagcttatgcagcagttggatgcgcaggctcccatggctggtggcacagtcactgaggaccaggcgggtggggccacttgcactggtgtccatgcggatggtggcttgggcctcagtcgtcatgtggaactccacgatggtcttgaccaggggcgtgttgaatccagccaccatgtccagggggatcttgactagcagctcctggtcattggccgagggcttcacctgcagctggaggatgttagctgtgatgaccttcagccagatgatgtgcttcaggacggtgttcaccaggctgcccagcacagggatgcctccggctggcttttcccgcatggcactgagcagcggcagctgctgcaggatgctggtggcgttgtggtccttcagctcctgtgtcagcttttctttgatgacttttgggccgaggatgagaactgcagtgggactgagggtggcttggatcaaggtggctgccagcaaaccacagagaagggtgaaggtccacgggccggccatcttcccaggtgtcagagggcagcaagtgcaggatgccagacctgggcacgctggagtcctcggcccgctcctctcctccaacttttttgtacaaagt

SEQ ID NO: 104535 - DNA, 918 bp, Homo Sapiens
actttgtacaaaaaagttgggacacctgggaagatggccggcccgtggaccttcacccttctctgtggtttgctggcagccaccttgatccaagccaccctcagtcccactgcagttctcatcctcggcccaaaagtcatcaaagaaaagctgacacaggagctgaaggaccacaacgccaccagcatcctgcagcagctgccgctgctcagtgccatgcgggaaaagccagccggaggcatccctgtgctgggcagcctggtgaacaccgtcctgaagcacatcatctggctgaaggtcatcacagctaacatcctccagctgcaggtgaagccctcggccaatgaccaggagctgctagtcaagatccccctggacatggtggctggattcaacacgcccctggtcaagaccatcgtggagttccacatgacgactgaggcccaagccaccatccgcatggacaccagtgcaagtggccccacccgcctggtcctcagtgactgtgccaccagccatgggagcctgcgcatccaactgctgcataagctctccttcctggtgaacgccttagctaagcaggtcatgaacctcctagtgccatccctgcccaatctagtgaaaaaccagctgtgtcccgtgatcgaggcttccttcaatggcatgtatgcagacctcctgcagctggtgaaggtgcccatttccctcagcattgaccgtctggagtttgaccttctgtatcctgccatcaagggtgacaccattcagctctacctggggggcaaggttgttggactcacagggaaaggtgaccagtggttcaataactctgcagcttccctgacaatgcccaccctgggacaacatcccgttcagcctcatcgtgagtcaagacgtggtgaaaagctgcatggctgc

SEQ ID NO: 104536 - DNA, 758 bp, Homo Sapiens
caaaagtgcttttacatctttgactgagagacatatattgatccaaggagaatctccctgtagaatcttctagcttaaatatccgggaaggctcccacctggctcccacattcctgaaggcagggccaccatcttatgtgaaagtggggagatcacattagctacgcgtatgcagggggttcagatggacaccacacagcatccctgacacagaagctgatttaccctaggagggaagaggtctaccacgtggggtctggttcttgcttgatctgagagcttccatcagtctcttttatttctatcaacagaaacaaaacggtaccgattaattattttgcagacctgctcagtgataaatccattcgtaccaaactatttactaagatatggtttaataagaaggacaagacaccaaacatcaaaagagcttcagagagacatctctttagcaatacattcaaaattttgttacttatgttttcaaagtaacatacatcttctggcttacatgcatttaaaggacacacgttaggttatctaggttatgtagcagagtcattcacggagaatttaccaagtcatctgggggaaatggagcaaaagcagctatgcgtcatcactcaacagcataacctgcaaatccaattcacccagaagaaagagagcaaaaccaccacccagttctagtgaaatagtttaaatgcacaatcctttgtcctgataaaaaagtcttggctgggcaaggtggctcgcgc

SEQ ID NO: 104537 - DNA, 899 bp, Homo Sapiens
ttggcccgacccagactaacggttctaacgttcccttcaagccacgagggagagagttttcctttgaggcctggaatgccaaaatcacggacctaaaacagaaagttgaaaatctcttcaatgagaaatgtggggaagctcttggccttaaacaagctgtgaaggtgccgttcgcgttatttgagtctttcccggaagacttttatgtggaaggcttacctgagggtgtgccattccgaagaccatcgacttttggcattccgaggctggagaagatactcagaaacaaagccaaaattaagttcatcattaaaaagcccgaaatgtttgagacggcgattaaggagagcacctcctctaagagccctcccagaaaaataaattcatcacccaatgttaatactactgcatcaggtgttgaagaccttaacatcattcaggtgacaattccagatgatgataatgaaagactctcgaaagttgaaaaagctagacagctaagagaacaagtgaatgacctctttagtcggaaatttggtgaagctattggtatgggttttcctgtgaaagttccctacaggaaaatcacaattaaccctggctgtgtggtggttgatggcatgcccccgggggtgtccttcaaagcccccagctacctggaaatcagctccatgagaaggatcttagactctgccgagtttatcaaattcacggtcattagaccatttccaggacttgtgattaataaccagctggttgatcagagtgagtcagaaggccccgtgatacaagaatcagctgaaccaagccagtttggaagttccagccacagaagaaataaaagagactgatggaagctctcagatcaagcaagaaccagaccccacgtggtagacctc

SEQ ID NO: 104538 - DNA, 903 bp, Homo Sapiens
ccattctccaggatctggacgcgcctttgtctgcagagggggcaagtgacgggggcgccctttctttccccacccttgccccgagcgctttgggtcgcgggcggctcgcagccctgggcaggagcgctccccgcccggagtccgctccggatgttgagagcagccacgggccactcccgcctacctgggcttgctggggccgcggctcctgctctccccccgacgcgggctccagctccgggtcagcctcctcggcacagacctgttggtctccttggccaggatcttcctgggcctgggacgcctcctcaggatctgaagcctcagtctccctgagcctctcctgaggggcctcatcaatggtgagcctgggctctggcccctcttccttctctttcacagcagcctcagcctccctgtcgtggcctggagcctggtctcccctggtgctcttcttcctgcgcatagacgctcggacaaggtcagagccgaagtgggcattgtggtgccgctgggagcgtgcttcctggaaccagtcccctgtcaggatcttcagctgcccagggtctgccactgaggcccggagcttgctgacccgcccctcctccagctggcgcaggcgggcatctcgttggaggacgccagcaatggcctcctgctcctcctctgtcaggaagctgaggtccaacagtccttcagtctcaggctttggcccatgcgccatggggagggagggcagagcccaaagcccctcttgcgatgggtggcccctctggggcatcagctggggctgtgccccagctgggcacacggagcttcctgtaggggtccagtatgggaggacaccttcgcaggtggctccagctcccctggcagccgccaacttttttgtacaaagttggc

SEQ ID NO: 104539 - DNA, 930 bp, Homo Sapiens
caatgcttttttataatgccaactttgtacaaaaaagttggcggctcttctcccggtccctgaaactcggctgccaggggagctggagccacctgcgaaggtgtcctcccatactggacccctacaggaagctccgtgtgcccagctggggcacagccccagctgatgccccagaggggccacccatcgcaagaggggctttgggctctgccctccctccccatggcgcatgggccaaagcctgagactgaaggactgttggacctcagcttcctgacagaggaggagcaggaggccattgctggcgtcctccaacgagatgcccgcctgcgccagctggaggaggggcgggtcagcaagctccgggcctcagtggcagaccctgggcagctgaagatcctgacaggggactggttccaggaagcacgctcccagcggcaccacaatgcccacttcggctctgaccttgtccgagcgtctatgcgcaggaagaagagcaccaggggagaccaggctccaggccacgacagggaggctgaggctgctgtgaaagagaaggaagaggggccagagcccaggctcaccattgatgaggcccctcaggagaggctcagggagactgagggacctgatttcccatcgccttctgtccccctaaaggcttcagatcctgaggaggcgtcccaggcccaggaagatcctggccaaggagaccaacaggtctgtgccgaggaggctgacccggagctggagcccgcgtcggggggagagcacgagccgcggccccagcaagcccaggtaggcgggagtggcccgtggctgctctcaacatccggagcggactccgggcggggagcgctcctgcccagggctgcgagccgcccgcgacccaaggcgctcggggcaggggtggggaaagaagggcgcccc

SEQ ID NO: 104540 - DNA, 1068 bp, Homo Sapiens; identical to SEQ ID NO: 67985
  misc_feature (130)..(130): n is a, c, g, or t
  misc_feature (151)..(151): n is a, c, g, or t
  misc_feature (175)..(604): n is a, c, g, or t

SEQ ID NO: 104541 - DNA, 698 bp, Homo Sapiens; identical to SEQ ID NO: 67986

SEQ ID NO: 104542 - DNA, 1334 bp, Homo Sapiens; identical to SEQ ID NO: 67987
  misc_feature (1214)..(1253): n is a, c, g, or t

SEQ ID NO: 104543 - DNA, 533 bp, Homo Sapiens; identical to SEQ ID NO: 67988

SEQ ID NO: 104544 - DNA, 1007 bp, Homo Sapiens; identical to SEQ ID NO: 67989
  misc_feature (56)..(56): n is a, c, g, or t
  misc_feature (181)..(181): n is a, c, g, or t
  misc_feature (196)..(196): n is a, c, g, or t

SEQ ID NO: 104545 - DNA, 2044 bp, Homo Sapiens; identical to SEQ ID NO: 67990
  misc_feature (69)..(103): n is a, c, g, or t
  misc_feature (1554)..(1554): n is a, c, g, or t
  misc_feature (1690)..(1690): n is a, c, g, or t
  misc_feature (1918)..(1918): n is a, c, g, or t

SEQ ID NO: 104546 - DNA, 1099 bp, Homo Sapiens; identical to SEQ ID NO: 67991

SEQ ID NO: 104547 - DNA, 1502 bp, Homo Sapiens; identical to SEQ ID NO: 67992

SEQ ID NO: 104548 - DNA, 760 bp, Homo Sapiens; identical to SEQ ID NO: 67993
  misc_feature (41)..(83): n is a, c, g, or t
  misc_feature (87)..(121): n is a, c, g, or t

SEQ ID NO: 104549 - DNA, 887 bp, Homo Sapiens; identical to SEQ ID NO: 67994
  misc_feature (52)..(61): n is a, c, g, or t

SEQ ID NO: 104550 - DNA, 1701 bp, Homo Sapiens; identical to SEQ ID NO: 67995
  misc_feature (767)..(767): n is a, c, g, or t
  misc_feature (945)..(1004): n is a, c, g, or t
  misc_feature (1351)..(1351): n is a, c, g, or t
  misc_feature (1358)..(1358): n is a, c, g, or t
  misc_feature (1455)..(1455): n is a, c, g, or t
  misc_feature (1472)..(1472): n is a, c, g, or t

SEQ ID NO: 104551 - DNA, 1093 bp, Homo Sapiens; identical to SEQ ID NO: 67996
  misc_feature (1028)..(1036): n is a, c, g, or t

SEQ ID NO: 104552 - DNA, 1556 bp, Homo Sapiens; identical to SEQ ID NO: 67999
  misc_feature (323)..(340): n is a, c, g, or t
  misc_feature (667)..(696): n is a, c, g, or t

SEQ ID NO: 104553 - DNA, 457 bp, Homo Sapiens; identical to SEQ ID NO: 68000
  misc_feature (325)..(354): n is a, c, g, or t

SEQ ID NO: 104554 - DNA, 1042 bp, Homo Sapiens; identical to SEQ ID NO: 68002
  misc_feature (61)..(61): n is a, c, g, or t
  misc_feature (148)..(148): n is a, c, g, or t
  misc_feature (189)..(270): n is a, c, g, or t
  misc_feature (572)..(584): n is a, c, g, or t

SEQ ID NO: 104555 - DNA, 238 bp, Homo Sapiens; identical to SEQ ID NO: 68003

SEQ ID NO: 104556 - DNA, 788 bp, Homo Sapiens; identical to SEQ ID NO: 68005
  misc_feature (70)..(104): n is a, c, g, or t

SEQ ID NO: 104557 - DNA, 909 bp, Homo Sapiens; identical to SEQ ID NO: 68006
  misc_feature (631)..(631): n is a, c, g, or t
  misc_feature (656)..(656): n is a, c, g, or t
  misc_feature (818)..(828): n is a, c, g, or t

SEQ ID NO: 104558 - DNA, 684 bp, Homo Sapiens; identical to SEQ ID NO: 68008
  misc_feature (51)..(51): n is a, c, g, or t
  misc_feature (244)..(277): n is a, c, g, or t

SEQ ID NO: 104559 - DNA, 1460 bp, Homo Sapiens; identical to SEQ ID NO: 68009
  misc_feature (80)..(114): n is a, c, g, or t
  misc_feature (153)..(512): n is a, c, g, or t
  misc_feature (1066)..(1086): n is a, c, g, or t
  misc_feature (1232)..(1232): n is a, c, g, or t

SEQ ID NO: 104560 - DNA, 459 bp, Homo Sapiens; identical to SEQ ID NO: 68010

SEQ ID NO: 104561 - DNA, 1067 bp, Homo Sapiens; identical to SEQ ID NO: 68011
  misc_feature (786)..(809): n is a, c, g, or t

SEQ ID NO: 104562 - DNA, 847 bp, Homo Sapiens; identical to SEQ ID NO: 68012

SEQ ID NO: 104563 - DNA, 853 bp, Homo Sapiens; identical to SEQ ID NO: 68013

SEQ ID NO: 104564 - DNA, 2886 bp, Homo Sapiens; identical to SEQ ID NO: 68014
  misc_feature (1578)..(1601): n is a, c, g, or t

SEQ ID NO: 104565 - DNA, 1347 bp, Homo Sapiens; identical to SEQ ID NO: 68015
  misc_feature (46)..(80): n is a, c, g, or t
  misc_feature (562)..(607): n is a, c, g, or t

SEQ ID NO: 104566 - DNA, 1141 bp, Homo Sapiens; identical to SEQ ID NO: 68016

SEQ ID NO: 104567 - DNA, 1849 bp, Homo Sapiens; identical to SEQ ID NO: 68021
  misc_feature (1586)..(1586): n is a, c, g, or t
  misc_feature (1588)..(1588): n is a, c, g, or t
  misc_feature (1590)..(1593): n is a, c, g, or t
  misc_feature (1595)..(1596): n is a, c, g, or t
  misc_feature (1598)..(1598): n is a, c, g, or t
  misc_feature (1600)..(1600): n is a, c, g, or t
  misc_feature (1604)..(1606): n is a, c, g, or t

SEQ ID NO: 104568 - DNA, 1144 bp, Homo Sapiens; identical to SEQ ID NO: 68022
  misc_feature (921)..(921): n is a, c, g, or t
  misc_feature (942)..(950): n is a, c, g, or t

SEQ ID NO: 104569 - DNA, 1003 bp, Homo Sapiens; identical to SEQ ID NO: 68023

SEQ ID NO: 104570 - DNA, 799 bp, Homo Sapiens; identical to SEQ ID NO: 68024
  misc_feature (616)..(617): n is a, c, g, or t
  misc_feature (763)..(763): n is a, c, g, or t

SEQ ID NO: 104571 - DNA, 1023 bp, Homo Sapiens; identical to SEQ ID NO: 68025

SEQ ID NO: 104572 - DNA, 543 bp, Homo Sapiens; identical to SEQ ID NO: 68026

SEQ ID NO: 104573 - DNA, 1318 bp, Homo Sapiens; identical to SEQ ID NO: 68029

SEQ ID NO: 104574 - DNA, 1828 bp, Homo Sapiens; identical to SEQ ID NO: 68030
  misc_feature (1303)..(1329): n is a, c, g, or t
  misc_feature (1798)..(1798): n is a, c, g, or t

SEQ ID NO: 104575 - DNA, 517 bp, Homo Sapiens; identical to SEQ ID NO: 68031

SEQ ID NO: 104576 - DNA, 1000 bp, Homo Sapiens; identical to SEQ ID NO: 68032
  misc_feature (923)..(923): n is a, c, g, or t
  misc_feature (956)..(956): n is a, c, g, or t

SEQ ID NO: 104577 - DNA, 490 bp, Homo Sapiens; identical to SEQ ID NO: 68033

SEQ ID NO: 104578 - DNA, 464 bp, Homo Sapiens; identical to SEQ ID NO: 68034

SEQ ID NO: 104579 - DNA, 1479 bp, Homo Sapiens; identical to SEQ ID NO: 68035

SEQ ID NO: 104580 - DNA, 725 bp, Homo Sapiens; identical to SEQ ID NO: 68036

SEQ ID NO: 104581 - DNA, 762 bp, Homo Sapiens; identical to SEQ ID NO: 68037

SEQ ID NO: 104582 - DNA, 727 bp, Homo Sapiens; identical to SEQ ID NO: 68038
  misc_feature (389)..(497): n is a, c, g, or t
  misc_feature (548)..(661): n is a, c, g, or t

SEQ ID NO: 104583 - DNA, 1042 bp, Homo Sapiens; identical to SEQ ID NO: 68039
  misc_feature (117)..(493): n is a, c, g, or t
  misc_feature (502)..(502): n is a, c, g, or t

SEQ ID NO: 104584 - DNA, 511 bp, Homo Sapiens; identical to SEQ ID NO: 68040

SEQ ID NO: 104585 - DNA, 2694 bp, Homo Sapiens; identical to SEQ ID NO: 68041
  misc_feature (163)..(178): n is a, c, g, or t
  misc_feature (693)..(721): n is a, c, g, or t
  misc_feature (832)..(844): n is a, c, g, or t
  misc_feature (1107)..(1152): n is a, c, g, or t

SEQ ID NO: 104586 - DNA, 1420 bp, Homo Sapiens; identical to SEQ ID NO: 68042
  misc_feature (120)..(120): n is a, c, g, or t

SEQ ID NO: 104587 - DNA, 1343 bp, Homo Sapiens; identical to SEQ ID NO: 68044
  misc_feature (52)..(441): n is a, c, g, or t
  misc_feature (483)..(499): n is a, c, g, or t
  misc_feature (1281)..(1291): n is a, c, g, or t

SEQ ID NO: 104588 - DNA, 260 bp, Homo Sapiens; identical to SEQ ID NO: 68045

SEQ ID NO: 104589 - DNA, 895 bp, Homo Sapiens; identical to SEQ ID NO: 68048
  misc_feature (56)..(94): n is a, c, g, or t
  misc_feature (98)..(132): n is a, c, g, or t
  misc_feature (423)..(432): n is a, c, g, or t

SEQ ID NO: 104590 - DNA, 966 bp, Homo Sapiens; identical to SEQ ID NO: 68049

SEQ ID NO: 104591 - DNA, 1459 bp, Homo Sapiens; identical to SEQ ID NO: 68050
  misc_feature (419)..(474): n is a, c, g, or t

SEQ ID NO: 104592 - DNA, 1861 bp, Homo Sapiens; identical to SEQ ID NO: 68051
  misc_feature (1764)..(1768): n is a, c, g, or t
  misc_feature (1774)..(1774): n is a, c, g, or t
  misc_feature (1794)..(1794): n is a, c, g, or t

SEQ ID NO: 104593 - DNA, 1312 bp, Homo Sapiens; identical to SEQ ID NO: 68052
  misc_feature (950)..(1204): n is a, c, g, or t
  misc_feature (1213)..(1245): n is a, c, g, or t

SEQ ID NO: 104594 - DNA, 788 bp, Homo Sapiens; identical to SEQ ID NO: 68055
  misc_feature (583)..(602): n is a, c, g, or t

SEQ ID NO: 104595 - DNA, 1375 bp, Homo Sapiens; identical to SEQ ID NO: 68056

SEQ ID NO: 104596 - DNA, 369 bp, Homo Sapiens; identical to SEQ ID NO: 68057

SEQ ID NO: 104597 - DNA, 925 bp, Homo Sapiens; identical to SEQ ID NO: 68058

SEQ ID NO: 104598 - DNA, 829 bp, Homo Sapiens; identical to SEQ ID NO: 68062

SEQ ID NO: 104599 - DNA, 1088 bp, Homo Sapiens; identical to SEQ ID NO: 68063
  misc_feature (75)..(92): n is a, c, g, or t

SEQ ID NO: 104600 - DNA, 969 bp, Homo Sapiens; identical to SEQ ID NO: 68064
  misc_feature (126)..(144): n is a, c, g, or t

SEQ ID NO: 104601 - DNA, 1015 bp, Homo Sapiens; identical to SEQ ID NO: 68065
  misc_feature (13)..(13): n is a, c, g, or t

SEQ ID NO: 104602 - DNA, 2815 bp, Homo Sapiens; identical to SEQ ID NO: 68066
  misc_feature (2300)..(2300): n is a, c, g, or t

SEQ ID NO: 104603 - DNA, 907 bp, Homo Sapiens; identical to SEQ ID NO: 68071
  misc_feature (661)..(714): n is a, c, g, or t
  misc_feature (716)..(735): n is a, c, g, or t
  misc_feature (737)..(757): n is a, c, g, or t
  misc_feature (764)..(779): n is a, c, g, or t

SEQ ID NO: 104604 - DNA, 684 bp, Homo Sapiens; identical to SEQ ID NO: 68072
  misc_feature (557)..(567): n is a, c, g, or t

SEQ ID NO: 104605 - DNA, 603 bp, Homo Sapiens; identical to SEQ ID NO: 68073

SEQ ID NO: 104606 - DNA, 135 bp, Homo Sapiens; identical to SEQ ID NO: 68074

SEQ ID NO: 104607 - DNA, 1146 bp, Homo Sapiens; identical to SEQ ID NO: 68075
  misc_feature (1001)..(1001): n is a, c, g, or t

SEQ ID NO: 104608 - DNA, 670 bp, Homo Sapiens; identical to SEQ ID NO: 68076

SEQ ID NO: 104609 - DNA, 1033 bp, Homo Sapiens; identical to SEQ ID NO: 68077
  misc_feature (136)..(136): n is a, c, g, or t
  misc_feature (140)..(140): n is a, c, g, or t
  misc_feature (185)..(185): n is a, c, g, or t
  misc_feature (211)..(211): n is a, c, g, or t

SEQ ID NO: 104610 - DNA, 2284 bp, Homo Sapiens; identical to SEQ ID NO: 68078

SEQ ID NO: 104611 - DNA, 528 bp, Homo Sapiens; identical to SEQ ID NO: 68079
  misc_feature (431)..(444): n is a, c, g, or t

SEQ ID NO: 104612 - DNA, 2172 bp, Homo Sapiens; identical to SEQ ID NO: 68080
  misc_feature (351)..(393): n is a, c, g, or t
  misc_feature (1744)..(1744): n is a, c, g, or t
  misc_feature (1806)..(1816): n is a, c, g, or t
  misc_feature (2027)..(2039): n is a, c, g, or t
  misc_feature (2122)..(2130): n is a, c, g, or t
  misc_feature (2134)..(2134): n is a, c, g, or t

SEQ ID NO: 104613 - DNA, 784 bp, Homo Sapiens; identical to SEQ ID NO: 68081
  misc_feature (724)..(732): n is a, c, g, or t

SEQ ID NO: 104614 - DNA, 989 bp, Homo Sapiens; identical to SEQ ID NO: 68082
  misc_feature (229)..(229): n is a, c, g, or t
  misc_feature (323)..(388): n is a, c, g, or t

SEQ ID NO: 104615 - DNA, 930 bp, Homo Sapiens; identical to SEQ ID NO: 68083
  misc_feature (764)..(834): n is a, c, g, or t

SEQ ID NO: 104616 - DNA, 1536 bp, Homo Sapiens; identical to SEQ ID NO: 68084
  misc_feature (14)..(14): n is a, c, g, or t
  misc_feature (83)..(84): n is a, c, g, or t
  misc_feature (108)..(108): n is a, c, g, or t
  misc_feature (147)..(147): n is a, c, g, or t
  misc_feature (226)..(227): n is a, c, g, or t
  misc_feature (996)..(1052): n is a, c, g, or t
  misc_feature (1095)..(1110): n is a, c, g, or t
  misc_feature (1221)..(1231): n is a, c, g, or t

SEQ ID NO: 104617 - DNA, 436 bp, Homo Sapiens; identical to SEQ ID NO: 68085

SEQ ID NO: 104618 - DNA, 750 bp, Homo Sapiens; identical to SEQ ID NO: 68086
  misc_feature (46)..(46): n is a, c, g, or t

SEQ ID NO: 104619 - DNA, 1053 bp, Homo Sapiens; identical to SEQ ID NO: 68087
  misc_feature (98)..(98): n is a, c, g, or t
  misc_feature (219)..(219): n is a, c, g, or t
  misc_feature (320)..(320): n is a, c, g, or t

SEQ ID NO: 104620 - DNA, 1017 bp, Homo Sapiens; identical to SEQ ID NO: 68088

SEQ ID NO: 104621 - DNA, 902 bp, Homo Sapiens; identical to SEQ ID NO: 68089

SEQ ID NO: 104622 - DNA, 2362 bp, Homo Sapiens; identical to SEQ ID NO: 68098
  misc_feature (2265)..(2267): n is a, c, g, or t
  misc_feature (2269)..(2272): n is a, c, g, or t

SEQ ID NO: 104623 - DNA, 1026 bp, Homo Sapiens; identical to SEQ ID NO: 68099

SEQ ID NO: 104624 - DNA, 881 bp, Homo Sapiens; identical to SEQ ID NO: 15366
  misc_feature (631)..(650): n is a, c, g, or t

SEQ ID NO: 104625 - DNA, 818 bp, Homo Sapiens; identical to SEQ ID NO: 15367
  misc_feature (676)..(722): n is a, c, g, or t
  misc_feature (770)..(770): n is a, c, g, or t

SEQ ID NO: 104626 - DNA, 617 bp, Homo Sapiens; identical to SEQ ID NO: 68107

SEQ ID NO: 104627 - DNA, 897 bp, Homo Sapiens; identical to SEQ ID NO: 68108
  misc_feature (82)..(82): n is a, c, g, or t
  misc_feature (774)..(839): n is a, c, g, or t

SEQ ID NO: 104628 - DNA, 2793 bp, Homo Sapiens; identical to SEQ ID NO: 68110
  misc_feature (144)..(154): n is a, c, g, or t
  misc_feature (435)..(444): n is a, c, g, or t
  misc_feature (524)..(545): n is a, c, g, or t
  misc_feature (711)..(711): n is a, c, g, or t
  misc_feature (972)..(986): n is a, c, g, or t
  misc_feature (1026)..(1035): n is a, c, g, or t

SEQ ID NO: 104629 - DNA, 917 bp, Homo Sapiens; identical to SEQ ID NO: 68111

SEQ ID NO: 104630 - DNA, 507 bp, Homo Sapiens; identical to SEQ ID NO: 68112

SEQ ID NO: 104631 - DNA, 815 bp, Homo Sapiens; identical to SEQ ID NO: 68115
  misc_feature (674)..(729): n is a, c, g, or t

SEQ ID NO: 104632 - DNA, 1225 bp, Homo Sapiens; identical to SEQ ID NO: 68116
  misc_feature (70)..(106): n is a, c, g, or t

SEQ ID NO: 104633 - DNA, 1323 bp, Homo Sapiens; identical to SEQ ID NO: 68117
  misc_feature (99)..(99): n is a, c, g, or t
  misc_feature (518)..(564): n is a, c, g, or t

SEQ ID NO: 104634 - DNA, 985 bp, Homo Sapiens; identical to SEQ ID NO: 68118
  misc_feature (19)..(19): n is a, c, g, or t
  misc_feature (43)..(43): n is a, c, g, or t
  misc_feature (63)..(63): n is a, c, g, or t

SEQ ID NO: 104635 - DNA, 1320 bp, Homo Sapiens; identical to SEQ ID NO: 68119
  misc_feature (1302)..(1302): n is a, c, g, or t

SEQ ID NO: 104636 - DNA, 820 bp, Homo Sapiens; identical to SEQ ID NO: 68120

SEQ ID NO: 104637 - DNA, 1085 bp, Homo Sapiens; identical to SEQ ID NO: 68121
  misc_feature (1011)..(1045): n is a, c, g, or t

SEQ ID NO: 104638 - DNA, 973 bp, Homo Sapiens; identical to SEQ ID NO: 68122

SEQ ID NO: 104639 - DNA, 502 bp, Homo Sapiens; identical to SEQ ID NO: 68123

SEQ ID NO: 104640 - DNA, 3548 bp, Homo Sapiens; identical to SEQ ID NO: 68124

SEQ ID NO: 104641 - DNA, 1360 bp, Homo Sapiens; identical to SEQ ID NO: 68130
  misc_feature (79)..(79): n is a, c, g, or t
  misc_feature (687)..(718): n is a, c, g, or t
  misc_feature (1300)..(1319): n is a, c, g, or t

SEQ ID NO: 104642 - DNA, 932 bp, Homo Sapiens; identical to SEQ ID NO: 68131

SEQ ID NO: 104643 - DNA, 526 bp, Homo Sapiens; identical to SEQ ID NO: 68132
  misc_feature (42)..(50): n is a, c, g, or t

SEQ ID NO: 104644 - DNA, 1108 bp, Homo Sapiens; identical to SEQ ID NO: 68134
  misc_feature (513)..(523): n is a, c, g, or t
  misc_feature (592)..(626): n is a, c, g, or t
  misc_feature (829)..(829): n is a, c, g, or t
  misc_feature (832)..(832): n is a, c, g, or t

SEQ ID NO: 104645 - DNA, 1413 bp, Homo Sapiens; identical to SEQ ID NO: 68135
  misc_feature (583)..(612): n is a, c, g, or t
  misc_feature (1228)..(1238): n is a, c, g, or t
  misc_feature (1308)..(1342): n is a, c, g, or t

SEQ ID NO: 104646 - DNA, 467 bp, Homo Sapiens; identical to SEQ ID NO: 68143

SEQ ID NO: 104647 - DNA, 2655 bp, Homo Sapiens; identical to SEQ ID NO: 68144

SEQ ID NO: 104648 - DNA, 1241 bp, Homo Sapiens; identical to SEQ ID NO: 68145
  misc_feature (1125)..(1125): n is a, c, g, or t

SEQ ID NO: 104649 - DNA, 763 bp, Homo Sapiens; identical to SEQ ID NO: 68149
  misc_feature (59)..(59): n is a, c, g, or t

SEQ ID NO: 104650 - DNA, 802 bp, Homo Sapiens; identical to SEQ ID NO: 68150

SEQ ID NO: 104651 - DNA, 765 bp, Homo Sapiens; identical to SEQ ID NO: 68151

SEQ ID NO: 104652 - DNA, 871 bp, Homo Sapiens; identical to SEQ ID NO: 68152

SEQ ID NO: 104653 - DNA, 1732 bp, Homo Sapiens; identical to SEQ ID NO: 68155
  misc_feature (1339)..(1371): n is a, c, g, or t

SEQ ID NO: 104654 - DNA, 550 bp, Homo Sapiens; identical to SEQ ID NO: 68156
  misc_feature (321)..(382): n is a, c, g, or t
  misc_feature (491)..(491): n is a, c, g, or t
  misc_feature (502)..(502): n is a, c, g, or t
  misc_feature (528)..(528): n is a, c, g, or t

SEQ ID NO: 104655 - DNA, 744 bp, Homo Sapiens; identical to SEQ ID NO: 68158
  misc_feature (14)..(14): n is a, c, g, or t
  misc_feature (28)..(28): n is a, c, g, or t
  misc_feature (511)..(525): n is a, c, g, or t

SEQ ID NO: 104656 - DNA, 923 bp, Homo Sapiens; identical to SEQ ID NO: 68159
  misc_feature (219)..(233): n is a, c, g, or t

SEQ ID NO: 104657 - DNA, 1558 bp, Homo Sapiens; identical to SEQ ID NO: 68161
  misc_feature (876)..(897): n is a, c, g, or t
  misc_feature (930)..(1454): n is a, c, g, or t
  misc_feature (1468)..(1469): n is a, c, g, or t

SEQ ID NO: 104658 - DNA, 554 bp, Homo Sapiens; identical to SEQ ID NO: 68162

SEQ ID NO: 104659 - DNA, 454 bp, Homo Sapiens; identical to SEQ ID NO: 68163

SEQ ID NO: 104660 - DNA, 631 bp, Homo Sapiens; identical to SEQ ID NO: 68167
  misc_feature (56)..(64): n is a, c, g, or t
  misc_feature (228)..(249): n is a, c, g, or t
  misc_feature (336)..(336): n is a, c, g, or t

SEQ ID NO: 104661 - DNA, 393 bp, Homo Sapiens; identical to SEQ ID NO: 68168
  misc_feature (236)..(297): n is a, c, g, or t

SEQ ID NO: 104662 - DNA, 686 bp, Homo Sapiens; identical to SEQ ID NO: 68173
  misc_feature (39)..(39): n is a, c, g, or t

SEQ ID NO: 104663 - DNA, 585 bp, Homo Sapiens; identical to SEQ ID NO: 68174

SEQ ID NO: 104664 - DNA, 555 bp, Homo Sapiens; identical to SEQ ID NO: 68176

SEQ ID NO: 104665 - DNA, 1685 bp, Homo Sapiens; identical to SEQ ID NO: 68177

SEQ ID NO: 104666 - DNA, 1178 bp, Homo Sapiens; identical to SEQ ID NO: 68178
  misc_feature (82)..(112): n is a, c, g, or t

SEQ ID NO: 104667 - DNA, 509 bp, Homo Sapiens; identical to SEQ ID NO: 68179

SEQ ID NO: 104668 - DNA, 781 bp, Homo Sapiens; identical to SEQ ID NO: 68180

SEQ ID NO: 104669 - DNA, 725 bp, Homo Sapiens; identical to SEQ ID NO: 68181
  misc_feature (16)..(16): n is a, c, g, or t

SEQ ID NO: 104670 - DNA, 2968 bp, Homo Sapiens; identical to SEQ ID NO: 68182
  misc_feature (171)..(217): n is a, c, g, or t

SEQ ID NO: 104671 - DNA, 686 bp, Homo Sapiens; identical to SEQ ID NO: 68183

SEQ ID NO: 104672 - DNA, 936 bp, Homo Sapiens; identical to SEQ ID NO: 68184
  misc_feature (463)..(547): n is a, c, g, or t
  misc_feature (562)..(571): n is a, c, g, or t

SEQ ID NO: 104673 - DNA, 785 bp, Homo Sapiens; identical to SEQ ID NO: 68185
  misc_feature (75)..(116): n is a, c, g, or t

SEQ ID NO: 104674 - DNA, 677 bp, Homo Sapiens; identical to SEQ ID NO: 68186
  misc_feature (101)..(113): n is a, c, g, or t

SEQ ID NO: 104675 - DNA, 973 bp, Homo Sapiens; identical to SEQ ID NO: 68187
  misc_feature (371)..(412): n is a, c, g, or t

SEQ ID NO: 104676 - DNA, 1278 bp, Homo Sapiens; identical to SEQ ID NO: 68188

SEQ ID NO: 104677 - DNA, 941 bp, Homo Sapiens; identical to SEQ ID NO: 68189
  misc_feature (314)..(336): n is a, c, g, or t
  misc_feature (825)..(837): n is a, c, g, or t

SEQ ID NO: 104678 - DNA, 490 bp, Homo Sapiens; identical to SEQ ID NO: 68193

SEQ ID NO: 104679 - DNA, 1372 bp, Homo Sapiens; identical to SEQ ID NO: 68194
  misc_feature (340)..(376): n is a, c, g, or t
  misc_feature (385)..(397): n is a, c, g, or t

SEQ ID NO: 104680 - DNA, 1485 bp, Homo Sapiens; identical to SEQ ID NO: 68195

SEQ ID NO: 104681 - DNA, 994 bp, Homo Sapiens; identical to SEQ ID NO: 68196
  misc_feature (102)..(365): n is a, c, g, or t

SEQ ID NO: 104682 - DNA, 438 bp, Homo Sapiens; identical to SEQ ID NO: 68197

SEQ ID NO: 104683 - DNA, 2802 bp, Homo Sapiens; identical to SEQ ID NO: 68200
  misc_feature (41)..(58): n is a, c, g, or t
  misc_feature (997)..(1032): n is a, c, g, or t

SEQ ID NO: 104684 - DNA, 428 bp, Homo Sapiens; identical to SEQ ID NO: 68201
  misc_feature (25)..(25): n is a, c, g, or t

SEQ ID NO: 104685 - DNA, 2353 bp, Homo Sapiens; identical to SEQ ID NO: 68202
  misc_feature (2154)..(2200): n is a, c, g, or t

SEQ ID NO: 104686 - DNA, 1024 bp, Homo Sapiens; identical to SEQ ID NO: 68203
  misc_feature (86)..(86): n is a, c, g, or t
  misc_feature (95)..(466): n is a, c, g, or t
  misc_feature (484)..(507): n is a, c, g, or t
  misc_feature (722)..(767): n is a, c, g, or t

SEQ ID NO: 104687 - DNA, 1839 bp, Homo Sapiens; identical to SEQ ID NO: 68204
  misc_feature (68)..(106): n is a, c, g, or t
  misc_feature (110)..(144): n is a, c, g, or t

SEQ ID NO: 104688 - DNA, 1002 bp, Homo Sapiens; identical to SEQ ID NO: 68205
  misc_feature (84)..(118): n is a, c, g, or t

SEQ ID NO: 104689 - DNA, 1079 bp, Homo Sapiens; identical to SEQ ID NO: 68206

SEQ ID NO: 104690 - DNA, 604 bp, Homo Sapiens; identical to SEQ ID NO: 68207
  misc_feature (475)..(510): n is a, c, g, or t

SEQ ID NO: 104691 - DNA, 936 bp, Homo Sapiens; identical to SEQ ID NO: 68208
  misc_feature (817)..(817): n is a, c, g, or t

SEQ ID NO: 104692 - DNA, 672 bp, Homo Sapiens; identical to SEQ ID NO: 68209

SEQ ID NO: 104693 - DNA, 473 bp, Homo Sapiens; identical to SEQ ID NO: 68210
  misc_feature (113)..(121): n is a, c, g, or t

SEQ ID NO: 104694 - DNA, 1810 bp, Homo Sapiens; identical to SEQ ID NO: 68211
  misc_feature (67)..(75): n is a, c, g, or t
  misc_feature (116)..(155): n is a, c, g, or t
  misc_feature (197)..(256): n is a, c, g, or t
  misc_feature (331)..(449): n is a, c, g, or t
  misc_feature (453)..(453): n is a, c, g, or t
  misc_feature (455)..(557): n is a, c, g, or t
  misc_feature (563)..(566): n is a, c, g, or t
  misc_feature (571)..(788): n is a, c, g, or t
  misc_feature (1687)..(1721): n is a, c, g, or t
  misc_feature (1727)..(1769): n is a, c, g, or t

SEQ ID NO: 104695 - DNA, 1211 bp, Homo Sapiens; identical to SEQ ID NO: 68212

SEQ ID NO: 104696 - DNA, 687 bp, Homo Sapiens; identical to SEQ ID NO: 68213
  misc_feature (42)..(72): n is a, c, g, or t

SEQ ID NO: 104697 - DNA, 962 bp, Homo Sapiens; identical to SEQ ID NO: 68214

SEQ ID NO: 104698 - DNA, 1279 bp, Homo Sapiens; identical to SEQ ID NO: 68216
  misc_feature (73)..(73): n is a, c, g, or t
  misc_feature (102)..(102): n is a, c, g, or t
  misc_feature (224)..(225): n is a, c, g, or t
  misc_feature (233)..(275): n is a, c, g, or t

SEQ ID NO: 104699 - DNA, 983 bp, Homo Sapiens; identical to SEQ ID NO: 68217
  misc_feature (830)..(839): n is a, c, g, or t
  misc_feature (843)..(885): n is a, c, g, or t

SEQ ID NO: 104700 - DNA, 523 bp, Homo Sapiens; identical to SEQ ID NO: 68219

SEQ ID NO: 104701 - DNA, 887 bp, Homo Sapiens; identical to SEQ ID NO: 68220
  misc_feature (580)..(580): n is a, c, g, or t
  misc_feature (585)..(585): n is a, c, g, or t
  misc_feature (587)..(587): n is a, c, g, or t
  misc_feature (589)..(589): n is a, c, g, or t
  misc_feature (591)..(591): n is a, c, g, or t
  misc_feature (594)..(594): n is a, c, g, or t
  misc_feature (596)..(599): n is a, c, g, or t
  misc_feature (601)..(602): n is a, c, g, or t
  misc_feature (605)..(608): n is a, c, g, or t
  misc_feature (762)..(770): n is a, c, g, or t

SEQ ID NO: 104702 - DNA, 1120 bp, Homo Sapiens; identical to SEQ ID NO: 68221
  misc_feature (582)..(582): n is a, c, g, or t
  misc_feature (619)..(682): n is a, c, g, or t
  misc_feature (733)..(734): n is a, c, g, or t
  misc_feature (765)..(765): n is a, c, g, or t
  misc_feature (773)..(773): n is a, c, g, or t
  misc_feature (801)..(803): n is a, c, g, or t
  misc_feature (907)..(910): n is a, c, g, or t
  misc_feature (954)..(954): n is a, c, g, or t
  misc_feature (983)..(983): n is a, c, g, or t
  misc_feature (991)..(991): n is a, c, g, or t
  misc_feature (1034)..(1034): n is a, c, g, or t
  misc_feature (1066)..(1066): n is a, c, g, or t
  misc_feature (1068)..(1068): n is a, c, g, or t
  misc_feature (1070)..(1070): n is a, c, g, or t
  misc_feature (1073)..(1075): n is a, c, g, or t
  misc_feature (1091)..(1091): n is a, c, g, or t

SEQ ID NO: 104703 - DNA, 1000 bp, Homo Sapiens; identical to SEQ ID NO: 68223
  misc_feature (25)..(25): n is a, c, g, or t
  misc_feature (89)..(89): n is a, c, g, or t
  misc_feature (100)..(100): n is a, c, g, or t
  misc_feature (105)..(105): n is a, c, g, or t
  misc_feature (219)..(219): n is a, c, g, or t
  misc_feature (400)..(400): n is a, c, g, or t

SEQ ID NO: 104704 - DNA, 1322 bp, Homo Sapiens; identical to SEQ ID NO: 68224
  misc_feature (40)..(40): n is a, c, g, or t
  misc_feature (93)..(93): n is a, c, g, or t
  misc_feature (135)..(135): n is a, c, g, or t
  misc_feature (152)..(152): n is a, c, g, or t
  misc_feature (276)..(276): n is a, c, g, or t
  misc_feature (304)..(304): n is a, c, g, or t
  misc_feature (312)..(312): n is a, c, g, or t

SEQ ID NO: 104705 - DNA, 2036 bp, Homo Sapiens; identical to SEQ ID NO: 68227
  misc_feature (44)..(78): n is a, c, g, or t
  misc_feature (617)..(626): n is a, c, g, or t
  misc_feature (1312)..(1326): n is a, c, g, or t

SEQ ID NO: 104706 - DNA, 814 bp, Homo Sapiens; identical to SEQ ID NO: 68228
  misc_feature (741)..(741): n is a, c, g, or t

SEQ ID NO: 104707 - DNA, 1000 bp, Homo Sapiens; identical to SEQ ID NO: 68229

SEQ ID NO: 104708 - DNA, 803 bp, Homo Sapiens; identical to SEQ ID NO: 68230

SEQ ID NO: 104709 - DNA, 796 bp, Homo Sapiens; identical to SEQ ID NO: 68232
  misc_feature (509)..(509): n is a, c, g, or t
  misc_feature (558)..(558): n is a, c, g, or t

SEQ ID NO: 104710 - DNA, 1745 bp, Homo Sapiens; identical to SEQ ID NO: 68233
  misc_feature (1110)..(1156): n is a, c, g, or t
  misc_feature (1394)..(1417): n is a, c, g, or t
  misc_feature (1716)..(1716): n is a, c, g, or t

SEQ ID NO: 104711 - DNA, 481 bp, Homo Sapiens; identical to SEQ ID NO: 68234
  misc_feature (66)..(74): n is a, c, g, or t

SEQ ID NO: 104712 - DNA, 2600 bp, Homo Sapiens; identical to SEQ ID NO: 68235
  misc_feature (2266)..(2266): n is a, c, g, or t
  misc_feature (2314)..(2430): n is a, c, g, or t

SEQ ID NO: 104713 - DNA, 511 bp, Homo Sapiens; identical to SEQ ID NO: 68236

SEQ ID NO: 104714 - DNA, 943 bp, Homo Sapiens; identical to SEQ ID NO: 68237
  misc_feature (91)..(129): n is a, c, g, or t
  misc_feature (132)..(166): n is a, c, g, or t
  misc_feature (265)..(273): n is a, c, g, or t
  misc_feature (420)..(420): n is a, c, g, or t
  misc_feature (773)..(807): n is a, c, g, or t

SEQ ID NO: 104715 - DNA, 1089 bp, Homo Sapiens; identical to SEQ ID NO: 68238
  misc_feature (21)..(21): n is a, c, g, or t
  misc_feature (413)..(421): n is a, c, g, or t
  misc_feature (518)..(569): n is a, c, g, or t
  misc_feature (918)..(952): n is a, c, g, or t

SEQ ID NO: 104716 - DNA, 801 bp, Homo Sapiens; identical to SEQ ID NO: 68240

SEQ ID NO: 104717 - DNA, 952 bp, Homo Sapiens; identical to SEQ ID NO: 68241

SEQ ID NO: 104718 - DNA, 948 bp, Homo Sapiens; identical to SEQ ID NO: 68242

SEQ ID NO: 104719 - DNA, 969 bp, Homo Sapiens; identical to SEQ ID NO: 68243
  misc_feature (83)..(117): n is a, c, g, or t

SEQ ID NO: 104720 - DNA, 1086 bp, Homo Sapiens; identical to SEQ ID NO: 68244
  misc_feature (648)..(648): n is a, c, g, or t
  misc_feature (866)..(869): n is a, c, g, or t
  misc_feature (871)..(879): n is a, c, g, or t
  misc_feature (881)..(883): n is a, c, g, or t

SEQ ID NO: 104721 - DNA, 557 bp, Homo Sapiens; identical to SEQ ID NO: 68245
  misc_feature (436)..(480): n is a, c, g, or t

SEQ ID NO: 104722 - DNA, 1112 bp, Homo Sapiens; identical to SEQ ID NO: 68246
  misc_feature (431)..(467): n is a, c, g, or t

SEQ ID NO: 104723 - DNA, 744 bp, Homo Sapiens; identical to SEQ ID NO: 68249
  misc_feature (651)..(666): n is a, c, g, or t

SEQ ID NO: 104724 - DNA, 181 bp, Homo Sapiens; identical to SEQ ID NO: 68250
  misc_feature (21)..(21): n is a, c, g, or t
  misc_feature (140)..(140): n is a, c, g, or t
  misc_feature (152)..(152): n is a, c, g, or t
  misc_feature (159)..(159): n is a, c, g, or t

SEQ ID NO: 104725 - DNA, 2920 bp, Homo Sapiens; identical to SEQ ID NO: 68254
  misc_feature (2099)..(2099): n is a, c, g, or t

SEQ ID NO: 104726 - DNA, 2807 bp, Homo Sapiens; identical to SEQ ID NO: 68255
  misc_feature (1721)..(1745): n is a, c, g, or t
  misc_feature (2368)..(2513): n is a, c, g, or t
  misc_feature (2521)..(2536): n is a, c, g, or t
  misc_feature (2554)..(2605): n is a, c, g, or t
  misc_feature (2612)..(2738): n is a, c, g, or t

SEQ ID NO: 104727 - DNA, 1029 bp, Homo Sapiens; identical to SEQ ID NO: 68256
  misc_feature (461)..(933): n is a, c, g, or t
  misc_feature (938)..(938): n is a, c, g, or t
  misc_feature (977)..(977): n is a, c, g, or t
  misc_feature (995)..(995): n is a, c, g, or t

SEQ ID NO: 104728 - DNA, 2952 bp, Homo Sapiens; identical to SEQ ID NO: 68257
  misc_feature (1045)..(1070): n is a, c, g, or t

SEQ ID NO: 104729 - DNA, 580 bp, Homo Sapiens; identical to SEQ ID NO: 68260

SEQ ID NO: 104730 - DNA, 176 bp, Homo Sapiens; identical to SEQ ID NO: 68261

SEQ ID NO: 104731 - DNA, 1013 bp, Homo Sapiens; identical to SEQ ID NO: 68262

SEQ ID NO: 104732 - DNA, 1164 bp, Homo Sapiens; identical to SEQ ID NO: 68263
  misc_feature (548)..(548): n is a, c, g, or t
  misc_feature (595)..(595): n is a, c, g, or t

SEQ ID NO: 104733 - DNA, 1049 bp, Homo Sapiens; identical to SEQ ID NO: 68265

SEQ ID NO: 104734 - DNA, 1384 bp, Homo Sapiens; identical to SEQ ID NO: 68266
  misc_feature (20)..(20): n is a, c, g, or t

SEQ ID NO: 104735 - DNA, 970 bp, Homo Sapiens; identical to SEQ ID NO: 68267
  misc_feature (72)..(72): n is a, c, g, or t

SEQ ID NO: 104736 - DNA, 948 bp, Homo Sapiens; identical to SEQ ID NO: 68268

SEQ ID NO: 104737 - DNA, 2298 bp, Homo Sapiens; identical to SEQ ID NO: 68269
  misc_feature (1451)..(1539): n is a, c, g, or t
  misc_feature (2166)..(2166): n is a, c, g, or t

SEQ ID NO: 104738 - DNA, 916 bp, Homo Sapiens; identical to SEQ ID NO: 68270

SEQ ID NO: 104739 - DNA, 1906 bp, Homo Sapiens; identical to SEQ ID NO: 68271
  misc_feature (1367)..(1429): n is a, c, g, or t
  misc_feature (1706)..(1719): n is a, c, g, or t

SEQ ID NO: 104740 - DNA, 710 bp, Homo Sapiens; identical to SEQ ID NO: 68272
  misc_feature (627)..(656): n is a, c, g, or t

SEQ ID NO: 104741 - DNA, 421 bp, Homo Sapiens; identical to SEQ ID NO: 68274
  misc_feature (84)..(147): n is a, c, g, or t

SEQ ID NO: 104742 - DNA, 1069 bp, Homo Sapiens; identical to SEQ ID NO: 68275
  misc_feature (43)..(43): n is a, c, g, or t
  misc_feature (133)..(133): n is a, c, g, or t
  misc_feature (296)..(296): n is a, c, g, or t

SEQ ID NO: 104743 - DNA, 1596 bp, Homo Sapiens; identical to SEQ ID NO: 68276
  misc_feature (41)..(75): n is a, c, g, or t
  misc_feature (305)..(305): n is a, c, g, or t
  misc_feature (683)..(722): n is a, c, g, or t
  misc_feature (1130)..(1143): n is a, c, g, or t

SEQ ID NO: 104744 - DNA, 1059 bp, Homo Sapiens; identical to SEQ ID NO: 68277
  misc_feature (95)..(145): n is a, c, g, or t
  misc_feature (225)..(307): n is a, c, g, or t
  misc_feature (456)..(535): n is a, c, g, or t
  misc_feature (779)..(828): n is a, c, g, or t

SEQ ID NO: 104745 - DNA, 1293 bp, Homo Sapiens; identical to SEQ ID NO: 68278
  misc_feature (40)..(40): n is a, c, g, or t

SEQ ID NO: 104746 - DNA, 1636 bp, Homo Sapiens; identical to SEQ ID NO: 68279
  misc_feature (818)..(827): n is a, c, g, or t

SEQ ID NO: 104747 - DNA, 1029 bp, Homo Sapiens; identical to SEQ ID NO: 68283
  misc_feature (296)..(317): n is a, c, g, or t

SEQ ID NO: 104748 - DNA, 2191 bp, Homo Sapiens; identical to SEQ ID NO: 68284
  misc_feature (1703)..(1724): n is a, c, g, or t
  misc_feature (1859)..(1891): n is a, c, g, or t

SEQ ID NO: 104749 - DNA, 1002 bp, Homo Sapiens; identical to SEQ ID NO: 68285

SEQ ID NO: 104750 - DNA, 975 bp, Homo Sapiens; identical to SEQ ID NO: 68290
  misc_feature (161)..(219): n is a, c, g, or t

SEQ ID NO: 104751 - DNA, 947 bp, Homo Sapiens; identical to SEQ ID NO: 68291

SEQ ID NO: 104752 - DNA, 754 bp, Homo Sapiens; identical to SEQ ID NO: 68292
  misc_feature (573)..(588): n is a, c, g, or t

SEQ ID NO: 104753 - DNA, 1032 bp, Homo Sapiens; identical to SEQ ID NO: 68293
  misc_feature (41)..(42): n is a, c, g, or t
  misc_feature (54)..(54): n is a, c, g, or t
  misc_feature (65)..(65): n is a, c, g, or t
  misc_feature (71)..(71): n is a, c, g, or t
  misc_feature (73)..(73): n is a, c, g, or t
  misc_feature (78)..(78): n is a, c, g, or t
  misc_feature (156)..(156): n is a, c, g, or t
  misc_feature (178)..(178): n is a, c, g, or t
  misc_feature (208)..(208): n is a, c, g, or t
  misc_feature (512)..(522): n is a, c, g, or t

SEQ ID NO: 104754 - DNA, 815 bp, Homo Sapiens; identical to SEQ ID NO: 68294
  misc_feature (60)..(75): n is a, c, g, or t
  misc_feature (537)..(575): n is a, c, g, or t

SEQ ID NO: 104755 - DNA, 2779 bp, Homo Sapiens; identical to SEQ ID NO: 68296
  misc_feature (75)..(144): n is a, c, g, or t
  misc_feature (2038)..(2050): n is a, c, g, or t
  misc_feature (2729)..(2738): n is a, c, g, or t

SEQ ID NO: 104756 - DNA, 396 bp, Homo Sapiens; identical to SEQ ID NO: 68297

SEQ ID NO: 104757 - DNA, 1564 bp, Homo Sapiens; identical to SEQ ID NO: 68300
  misc_feature (18)..(18): n is a, c, g, or t
  misc_feature (664)..(680): n is a, c, g, or t

SEQ ID NO: 104758 - DNA, 2619 bp, Homo Sapiens; identical to SEQ ID NO: 68301
  misc_feature (83)..(117): n is a, c, g, or t
  misc_feature (168)..(173): n is a, c, g, or t
  misc_feature (2558)..(2575): n is a, c, g, or t

SEQ ID NO: 104759 - DNA, 1096 bp, Homo Sapiens; identical to SEQ ID NO: 68302
  misc_feature (43)..(84): n is a, c, g, or t
  misc_feature (88)..(122): n is a, c, g, or t

SEQ ID NO: 104760 - DNA, 849 bp, Homo Sapiens; identical to SEQ ID NO: 68304
  misc_feature (80)..(139): n is a, c, g, or t

SEQ ID NO: 104761 - DNA, 1580 bp, Homo Sapiens; identical to SEQ ID NO: 68305
  misc_feature (57)..(57): n is a, c, g, or t
  misc_feature (61)..(61): n is a, c, g, or t

SEQ ID NO: 104762 - DNA, 749 bp, Homo Sapiens; identical to SEQ ID NO: 68306

SEQ ID NO: 104763 - DNA, 1019 bp, Homo Sapiens; identical to SEQ ID NO: 68307
  misc_feature (77)..(78): n is a, c, g, or t
  misc_feature (119)..(119): n is a, c, g, or t
  misc_feature (130)..(130): n is a, c, g, or t
  misc_feature (224)..(224): n is a, c, g, or t
  misc_feature (252)..(252): n is a, c, g, or t
  misc_feature (267)..(267): n is a, c, g, or t
  misc_feature (285)..(285): n is a, c, g, or t
  misc_feature (300)..(300): n is a, c, g, or t
  misc_feature (323)..(323): n is a, c, g, or t
  misc_feature (335)..(335): n is a, c, g, or t
  misc_feature (445)..(445): n is a, c, g, or t
  misc_feature (457)..(457): n is a, c, g, or t
  misc_feature (473)..(481): n is a, c, g, or t
  misc_feature (941)..(941): n is a, c, g, or t

SEQ ID NO: 104764 - DNA, 887 bp, Homo Sapiens; identical to SEQ ID NO: 68308
  misc_feature (21)..(21): n is a, c, g, or t
  misc_feature (34)..(34): n is a, c, g, or t

SEQ ID NO: 104765 - DNA, 426 bp, Homo Sapiens; identical to SEQ ID NO: 68309
  misc_feature (348)..(357): n is a, c, g, or t

SEQ ID NO: 104766 - DNA, 413 bp, Homo Sapiens; identical to SEQ ID NO: 68314
  misc_feature (134)..(147): n is a, c, g, or t

SEQ ID NO: 104767 - DNA, 892 bp, Homo Sapiens; identical to SEQ ID NO: 68315
  misc_feature (382)..(391): n is a, c, g, or t
  misc_feature (459)..(468): n is a, c, g, or t
  misc_feature (621)..(677): n is a, c, g, or t

SEQ ID NO: 104768 - DNA, 681 bp, Homo Sapiens; identical to SEQ ID NO: 68319

SEQ ID NO: 104769 - DNA, 550 bp, Homo Sapiens; identical to SEQ ID NO: 68320

SEQ ID NO: 104770 - DNA, 971 bp, Homo Sapiens; identical to SEQ ID NO: 68321

SEQ ID NO: 104771 - DNA, 878 bp, Homo Sapiens; identical to SEQ ID NO: 68322

SEQ ID NO: 104772 - DNA, 3714 bp, Homo Sapiens; identical to SEQ ID NO: 68323
  misc_feature (40)..(40): n is a, c, g, or t
  misc_feature (2933)..(2996): n is a, c, g, or t
  misc_feature (3544)..(3544): n is a, c, g, or t

SEQ ID NO: 104773 - DNA, 475 bp, Homo Sapiens; identical to SEQ ID NO: 68324
  misc_feature (13)..(13): n is a, c, g, or t
  misc_feature (22)..(22): n is a, c, g, or t
  misc_feature (36)..(36): n is a, c, g, or t
  misc_feature (75)..(75): n is a, c, g, or t
  misc_feature (130)..(130): n is a, c, g, or t
  misc_feature (194)..(194): n is a, c, g, or t

SEQ ID NO: 104774 - DNA, 1810 bp, Homo Sapiens; identical to SEQ ID NO: 68327
  misc_feature (134)..(134): n is a, c, g, or t
  misc_feature (137)..(137): n is a, c, g, or t
  misc_feature (164)..(164): n is a, c, g, or t
  misc_feature (179)..(179): n is a, c, g, or t
  misc_feature (338)..(338): n is a, c, g, or t

SEQ ID NO: 104775 - DNA, 1318 bp, Homo Sapiens; identical to SEQ ID NO: 68328

SEQ ID NO: 104776 - DNA, 1408 bp, Homo Sapiens; identical to SEQ ID NO: 68335
  misc_feature (601)..(601): n is a, c, g, or t
  misc_feature (633)..(633): n is a, c, g, or t
  misc_feature (636)..(636): n is a, c, g, or t
  misc_feature (686)..(686): n is a, c, g, or t

SEQ ID NO: 104777 - DNA, 981 bp, Homo Sapiens; identical to SEQ ID NO: 68336

SEQ ID NO: 104778 - DNA, 1823 bp, Homo Sapiens; identical to SEQ ID NO: 68337
  misc_feature (1295)..(1355): n is a, c, g, or t

SEQ ID NO: 104779 - DNA, 804 bp, Homo Sapiens; identical to SEQ ID NO: 68338

SEQ ID NO: 104780 - DNA, 807 bp, Homo Sapiens; identical to SEQ ID NO: 68341

SEQ ID NO: 104781 - DNA, 380 bp, Homo Sapiens; identical to SEQ ID NO: 68342
  misc_feature (307)..(307): n is a, c, g, or t
  misc_feature (348)..(348): n is a, c, g, or t

SEQ ID NO: 104782 - DNA, 854 bp, Homo Sapiens; identical to SEQ ID NO: 68346

SEQ ID NO: 104783 - DNA, 1003 bp, Homo Sapiens; identical to SEQ ID NO: 68347
  misc_feature (85)..(85): n is a, c, g, or t
  misc_feature (128)..(128): n is a, c, g, or t
  misc_feature (194)..(194): n is a, c, g, or t
  misc_feature (230)..(230): n is a, c, g, or t
  misc_feature (243)..(243): n is a, c, g, or t
  misc_feature (249)..(249): n is a, c, g, or t

SEQ ID NO: 104784 - DNA, 1384 bp, Homo Sapiens; identical to SEQ ID NO: 68348
  misc_feature (982)..(983): n is a, c, g, or t
  misc_feature (985)..(985): n is a, c, g, or t
  misc_feature (987)..(1094): n is a, c, g, or t
  misc_feature (1096)..(1097): n is a, c, g, or t
  misc_feature (1099)..(1103): n is a, c, g, or t
  misc_feature (1106)..(1221): n is a, c, g, or t
  misc_feature (1225)..(1228): n is a, c, g, or t
  misc_feature (1276)..(1319): n is a, c, g, or t

SEQ ID NO: 104785 - DNA, 1170 bp, Homo Sapiens; identical to SEQ ID NO: 68349
  misc_feature (77)..(94): n is a, c, g, or t
  misc_feature (1144)..(1144): n is a, c, g, or t

SEQ ID NO: 104786 - DNA, 1031 bp, Homo Sapiens; identical to SEQ ID NO: 68350

SEQ ID NO: 104787 - DNA, 1375 bp, Homo Sapiens; identical to SEQ ID NO: 68351

SEQ ID NO: 104788 - DNA, 1144 bp, Homo Sapiens; identical to SEQ ID NO: 68352

SEQ ID NO: 104789 - DNA, 1367 bp, Homo Sapiens; identical to SEQ ID NO: 68353

SEQ ID NO: 104790 - DNA, 936 bp, Homo Sapiens; identical to SEQ ID NO: 68354

SEQ ID NO: 104791 - DNA, 2041 bp, Homo Sapiens; identical to SEQ ID NO: 68355
  misc_feature (1627)..(1772): n is a, c, g, or t
  misc_feature (1918)..(1972): n is a, c, g, or t
  misc_feature (2009)..(2009): n is a, c, g, or t

SEQ ID NO: 104792 - DNA, 603 bp, Homo Sapiens; identical to SEQ ID NO: 68358
  misc_feature (227)..(239): n is a, c, g, or t
  misc_feature (435)..(435): n is a, c, g, or t
  misc_feature (542)..(542): n is a, c, g, or t
  misc_feature (553)..(553): n is a, c, g, or t

SEQ ID NO: 104793 - DNA, 2708 bp, Homo Sapiens; identical to SEQ ID NO: 68359
  misc_feature (68)..(102): n is a, c, g, or t
  misc_feature (1895)..(1906): n is a, c, g, or t
  misc_feature (2452)..(2518): n is a, c, g, or t
  misc_feature (2611)..(2657): n is a, c, g, or t

SEQ ID NO: 104794 - DNA, 1004 bp, Homo Sapiens; identical to SEQ ID NO: 68360

SEQ ID NO: 104795 - DNA, 1025 bp, Homo Sapiens; identical to SEQ ID NO: 68367

SEQ ID NO: 104796 - DNA, 711 bp, Homo Sapiens; identical to SEQ ID NO: 68368

SEQ ID NO: 104797 - DNA, 886 bp, Homo Sapiens; identical to SEQ ID NO: 68370
  misc_feature (38)..(38): n is a, c, g, or t
  misc_feature (51)..(51): n is a, c, g, or t

SEQ ID NO: 104798 - DNA, 1281 bp, Homo Sapiens; identical to SEQ ID NO: 68371

SEQ ID NO: 104799 - DNA, 904 bp, Homo Sapiens; identical to SEQ ID NO: 68372

SEQ ID NO: 104800 - DNA, 1178 bp, Homo Sapiens; identical to SEQ ID NO: 68374
  misc_feature (96)..(124): n is a, c, g, or t
  misc_feature (993)..(993): n is a, c, g, or t
  misc_feature (1040)..(1040): n is a, c, g, or t
  misc_feature (1063)..(1063): n is a, c, g, or t
  misc_feature (1120)..(1120): n is a, c, g, or t
  misc_feature (1134)..(1134): n is a, c, g, or t

SEQ ID NO: 104801 - DNA, 2184 bp, Homo Sapiens; identical to SEQ ID NO: 68375
  misc_feature (1147)..(1175): n is a, c, g, or t
  misc_feature (1177)..(1177): n is a, c, g, or t
  misc_feature (1955)..(1955): n is a, c, g, or t
  misc_feature (1967)..(1967): n is a, c, g, or t
  misc_feature (1982)..(1983): n is a, c, g, or t
  misc_feature (2028)..(2028): n is a, c, g, or t
  misc_feature (2056)..(2056): n is a, c, g, or t
  misc_feature (2116)..(2116): n is a, c, g, or t

SEQ ID NO: 104802 - DNA, 448 bp, Homo Sapiens; identical to SEQ ID NO: 68376
  misc_feature (249)..(278): n is a, c, g, or t
  misc_feature (311)..(311): n is a, c, g, or t

SEQ ID NO: 104803 - DNA, 1218 bp, Homo Sapiens; identical to SEQ ID NO: 68377

SEQ ID NO: 104804 - DNA, 1379 bp, Homo Sapiens; identical to SEQ ID NO: 68378

SEQ ID NO: 104805 - DNA, 1053 bp, Homo Sapiens; identical to SEQ ID NO: 68379
  misc_feature (973)..(973): n is a, c, g, or t
  misc_feature (1027)..(1028): n is a, c, g, or t

SEQ ID NO: 104806 - DNA, 908 bp, Homo Sapiens; identical to SEQ ID NO: 68380
  misc_feature (256)..(267): n is a, c, g, or t
  misc_feature (405)..(439): n is a, c, g, or t
  misc_feature (616)..(629): n is a, c, g, or t
  misc_feature (856)..(856): n is a, c, g, or t

SEQ ID NO: 104807 - DNA, 1502 bp, Homo Sapiens; identical to SEQ ID NO: 68386
  misc_feature (204)..(205): n is a, c, g, or t
  misc_feature (212)..(212): n is a, c, g, or t
  misc_feature (219)..(219): n is a, c, g, or t
  misc_feature (237)..(237): n is a, c, g, or t
  misc_feature (252)..(252): n is a, c, g, or t
  misc_feature (261)..(261): n is a, c, g, or t

SEQ ID NO: 104808 - DNA, 1792 bp, Homo Sapiens; identical to SEQ ID NO: 68387
  misc_feature (1575)..(1578): n is a, c, g, or t
  misc_feature (1581)..(1582): n is a, c, g, or t

SEQ ID NO: 104809 - DNA, 429 bp, Homo Sapiens; identical to SEQ ID NO: 68388

SEQ ID NO: 104810 - DNA, 1438 bp, Homo Sapiens; identical to SEQ ID NO: 68389
  misc_feature (1371)..(1396): n is a, c, g, or t

SEQ ID NO: 104811 - DNA, 950 bp, Homo Sapiens; identical to SEQ ID NO: 68394
  misc_feature (91)..(125): n is a, c, g, or t

SEQ ID NO: 104812 - DNA, 935 bp, Homo Sapiens; identical to SEQ ID NO: 68395
  misc_feature (43)..(85): n is a, c, g, or t
  misc_feature (89)..(123): n is a, c, g, or t

SEQ ID NO: 104813 - DNA, 1700 bp, Homo Sapiens; identical to SEQ ID NO: 68396
  misc_feature (62)..(100): n is a, c, g, or t
  misc_feature (104)..(138): n is a, c, g, or t
  misc_feature (1564)..(1564): n is a, c, g, or t
  misc_feature (1566)..(1574): n is a, c, g, or t
  misc_feature (1579)..(1579): n is a, c, g, or t
  misc_feature (1581)..(1582): n is a, c, g, or t
  misc_feature (1590)..(1591): n is a, c, g, or t
  misc_feature (1680)..(1680): n is a, c, g, or t

SEQ ID NO: 104814 - DNA, 719 bp, Homo Sapiens; identical to SEQ ID NO: 68402

SEQ ID NO: 104815 - DNA, 1057 bp, Homo Sapiens; identical to SEQ ID NO: 68403
  misc_feature (547)..(629): n is a, c, g, or t
  misc_feature (658)..(703): n is a, c, g, or t
  misc_feature (705)..(705): n is a, c, g, or t

SEQ ID NO: 104816 - DNA, 1658 bp, Homo Sapiens; identical to SEQ ID NO: 68409
  misc_feature (828)..(858): n is a, c, g, or t
  misc_feature (1577)..(1598): n is a, c, g, or t

SEQ ID NO: 104817 - DNA, 630 bp, Homo Sapiens; identical to SEQ ID NO: 68410
  misc_feature (87)..(118): n is a, c, g, or t
  misc_feature (457)..(508): n is a, c, g, or t

SEQ ID NO: 104818 - DNA, 832 bp, Homo Sapiens; identical to SEQ ID NO: 68411
  misc_feature (355)..(406): n is a, c, g, or t
  misc_feature (745)..(767): n is a, c, g, or t

SEQ ID NO: 104819 - DNA, 519 bp, Homo Sapiens; identical to SEQ ID NO: 68412
  misc_feature (104)..(155): n is a, c, g, or t
  misc_feature (498)..(498): n is a, c, g, or t

SEQ ID NO: 104820 - DNA, 907 bp, Homo Sapiens; identical to SEQ ID NO: 68413

SEQ ID NO: 104821 - DNA, 469 bp, Homo Sapiens; identical to SEQ ID NO: 68414

SEQ ID NO: 104822 - DNA, 1863 bp, Homo Sapiens; identical to SEQ ID NO: 68415
  misc_feature (1771)..(1788): n is a, c, g, or t

SEQ ID NO: 104823 - DNA, 785 bp, Homo Sapiens; identical to SEQ ID NO: 68416
  misc_feature (71)..(98): n is a, c, g, or t
  misc_feature (118)..(142): n is a, c, g, or t

SEQ ID NO: 104824 - DNA, 1843 bp, Homo Sapiens; identical to SEQ ID NO: 68417
  misc_feature (93)..(164): n is a, c, g, or t
  misc_feature (765)..(786): n is a, c, g, or t
  misc_feature (1052)..(1082): n is a, c, g, or t
  misc_feature (1550)..(1565): n is a, c, g, or t
  misc_feature (1588)..(1687): n is a, c, g, or t
  misc_feature (1689)..(1690): n is a, c, g, or t
  misc_feature (1694)..(1695): n is a, c, g, or t
  misc_feature (1706)..(1720): n is a, c, g, or t

SEQ ID NO: 104825 - DNA, 657 bp, Homo Sapiens; identical to SEQ ID NO: 68419

SEQ ID NO: 104826 - DNA, 2007 bp, Homo Sapiens; identical to SEQ ID NO: 68420
  misc_feature (1505)..(1611): n is a, c, g, or t
  misc_feature (1623)..(1686): n is a, c, g, or t
  misc_feature (1702)..(1782): n is a, c, g, or t

SEQ ID NO: 104827 - DNA, 1127 bp, Homo Sapiens; identical to SEQ ID NO: 68422
  misc_feature (543)..(553): n is a, c, g, or t

SEQ ID NO: 104828 - DNA, 1096 bp, Homo Sapiens; identical to SEQ ID NO: 68423

SEQ ID NO: 104829 - DNA, 785 bp, Homo Sapiens; identical to SEQ ID NO: 68426
  misc_feature (28)..(28): n is a, c, g, or t
  misc_feature (40)..(40): n is a, c, g, or t

SEQ ID NO: 104830 - DNA, 465 bp, Homo Sapiens; identical to SEQ ID NO: 68427

SEQ ID NO: 104831 - DNA, 587 bp, Homo Sapiens; identical to SEQ ID NO: 68428

SEQ ID NO: 104832 - DNA, 2253 bp, Homo Sapiens; identical to SEQ ID NO: 68433
  misc_feature (2082)..(2082): n is a, c, g, or t
  misc_feature (2207)..(2207): n is a, c, g, or t

SEQ ID NO: 104833 - DNA, 914 bp, Homo Sapiens; identical to SEQ ID NO: 68434
  misc_feature (74)..(108): n is a, c, g, or t

SEQ ID NO: 104834 - DNA, 1024 bp, Homo Sapiens; identical to SEQ ID NO: 68435

SEQ ID NO: 104835 - DNA, 901 bp, Homo Sapiens; identical to SEQ ID NO: 68436

SEQ ID NO: 104836 - DNA, 662 bp, Homo Sapiens; identical to SEQ ID NO: 68438
  misc_feature (489)..(503): n is a, c, g, or t

SEQ ID NO: 104837 - DNA, 510 bp, Homo Sapiens; identical to SEQ ID NO: 68439

SEQ ID NO: 104838 - DNA, 717 bp, Homo Sapiens; identical to SEQ ID NO: 68448
  misc_feature (20)..(20): n is a, c, g, or t

SEQ ID NO: 104839 - DNA, 524 bp, Homo Sapiens; identical to SEQ ID NO: 68449

SEQ ID NO: 104840 - DNA, 545 bp, Homo Sapiens; identical to SEQ ID NO: 68450

SEQ ID NO: 104841 - DNA, 1675 bp, Homo Sapiens; identical to SEQ ID NO: 68451
  misc_feature (77)..(111): n is a, c, g, or t

SEQ ID NO: 104842 - DNA, 991 bp, Homo Sapiens; identical to SEQ ID NO: 68452
  misc_feature (85)..(116): n is a, c, g, or t

SEQ ID NO: 104843 - DNA, 705 bp, Homo Sapiens; identical to SEQ ID NO: 68454

SEQ ID NO: 104844 - DNA, 437 bp, Homo Sapiens; identical to SEQ ID NO: 68455
  misc_feature (365)..(365): n is a, c, g, or t

SEQ ID NO: 104845 - DNA, 470 bp, Homo Sapiens; identical to SEQ ID NO: 68456
  misc_feature (103)..(103): n is a, c, g, or t

SEQ ID NO: 104846 - DNA, 827 bp, Homo Sapiens; identical to SEQ ID NO: 6119
  misc_feature (708)..(712): n is a, c, g, or t
  misc_feature (714)..(722): n is a, c, g, or t
  misc_feature (729)..(730): n is a, c, g, or t
  misc_feature (733)..(733): n is a, c, g, or t

SEQ ID NO: 104847 - DNA, 693 bp, Homo Sapiens; identical to SEQ ID NO: 68460

SEQ ID NO: 104848 - DNA, 698 bp, Homo Sapiens; identical to SEQ ID NO: 68461

SEQ ID NO: 104849 - DNA, 553 bp, Homo Sapiens; identical to SEQ ID NO: 68462
  misc_feature (114)..(124): n is a, c, g, or t

SEQ ID NO: 104850 - DNA, 379 bp, Homo Sapiens; identical to SEQ ID NO: 68463

SEQ ID NO: 104851 - DNA, 741 bp, Homo Sapiens; identical to SEQ ID NO: 68467
  misc_feature (116)..(116): n is a, c, g, or t
  misc_feature (663)..(663): n is a, c, g, or t
  misc_feature (681)..(681): n is a, c, g, or t

SEQ ID NO: 104852 - DNA, 661 bp, Homo Sapiens; identical to SEQ ID NO: 68468

SEQ ID NO: 104853 - DNA, 1091 bp, Homo Sapiens; identical to SEQ ID NO: 68469
  misc_feature (515)..(537): n is a, c, g, or t
  misc_feature (763)..(763): n is a, c, g, or t
  misc_feature (876)..(876): n is a, c, g, or t
  misc_feature (966)..(966): n is a, c, g, or t

SEQ ID NO: 104854 - DNA, 1113 bp, Homo Sapiens; identical to SEQ ID NO: 68470

SEQ ID NO: 104855 - DNA, 2162 bp, Homo Sapiens; identical to SEQ ID NO: 68471
  misc_feature (1886)..(1986): n is a, c, g, or t

SEQ ID NO: 104856 - DNA, 1209 bp, Homo Sapiens; identical to SEQ ID NO: 68472

SEQ ID NO: 104857 - DNA, 947 bp, Homo Sapiens; identical to SEQ ID NO: 68473

SEQ ID NO: 104858 - DNA, 574 bp, Homo Sapiens; identical to SEQ ID NO: 68474
  misc_feature (75)..(75): n is a, c, g, or t

SEQ ID NO: 104859 - DNA, 1981 bp, Homo Sapiens; identical to SEQ ID NO: 68476

SEQ ID NO: 104860 - DNA, 451 bp, Homo Sapiens; identical to SEQ ID NO: 68477
  misc_feature (61)..(61): n is a, c, g, or t

SEQ ID NO: 104861 - DNA, 590 bp, Homo Sapiens; identical to SEQ ID NO: 68478

SEQ ID NO: 104862 - DNA, 1236 bp, Homo Sapiens; identical to SEQ ID NO: 68483

SEQ ID NO: 104863 - DNA, 1299 bp, Homo Sapiens; identical to SEQ ID NO: 68484
  misc_feature (65)..(102): n is a, c, g, or t
  misc_feature (106)..(140): n is a, c, g, or t

SEQ ID NO: 104864 - DNA, 984 bp, Homo Sapiens; identical to SEQ ID NO: 68485

SEQ ID NO: 104865 - DNA, 2757 bp, Homo Sapiens; identical to SEQ ID NO: 68486
  misc_feature (132)..(175): n is a, c, g, or t
  misc_feature (2299)..(2318): n is a, c, g, or t

SEQ ID NO: 104866 - DNA, 958 bp, Homo Sapiens; identical to SEQ ID NO: 68487
  misc_feature (151)..(151): n is a, c, g, or t
  misc_feature (162)..(174): n is a, c, g, or t
  misc_feature (629)..(637): n is a, c, g, or t

SEQ ID NO: 104867 - DNA, 441 bp, Homo Sapiens; identical to SEQ ID NO: 68488

SEQ ID NO: 104868 - DNA, 417 bp, Homo Sapiens; identical to SEQ ID NO: 68489

SEQ ID NO: 104869 - DNA, 706 bp, Homo Sapiens; identical to SEQ ID NO: 68490

SEQ ID NO: 104870 - DNA, 746 bp, Homo Sapiens; identical to SEQ ID NO: 68491

SEQ ID NO: 104871 - DNA, 651 bp, Homo Sapiens; identical to SEQ ID NO: 68492

SEQ ID NO: 104872 - DNA, 1569 bp, Homo Sapiens; identical to SEQ ID NO: 68493
  misc_feature (1488)..(1488): n is a, c, g, or t
  misc_feature (1514)..(1514): n is a, c, g, or t
  misc_feature (1534)..(1534): n is a, c, g, or t

SEQ ID NO: 104873 - DNA, 1728 bp, Homo Sapiens; identical to SEQ ID NO: 68494
  misc_feature (1693)..(1693): n is a, c, g, or t

SEQ ID NO: 104874 - DNA, 1322 bp, Homo Sapiens; identical to SEQ ID NO: 68499
  misc_feature (55)..(55): n is a, c, g, or t
  misc_feature (68)..(68): n is a, c, g, or t
  misc_feature (106)..(106): n is a, c, g, or t
  misc_feature (211)..(211): n is a, c, g, or t
  misc_feature (221)..(221): n is a, c, g, or t
  misc_feature (1142)..(1142): n is a, c, g, or t
  misc_feature (1168)..(1187): n is a, c, g, or t

SEQ ID NO: 104875 - DNA, 1322 bp, Homo Sapiens; identical to SEQ ID NO: 68500
  misc_feature (42)..(83): n is a, c, g, or t
  misc_feature (87)..(121): n is a, c, g, or t
  misc_feature (1213)..(1213): n is a, c, g, or t
  misc_feature (1243)..(1243): n is a, c, g, or t

SEQ ID NO: 104876 - DNA, 1161 bp, Homo Sapiens; identical to SEQ ID NO: 68501
  misc_feature (81)..(115): n is a, c, g, or t

SEQ ID NO: 104877 - DNA, 1048 bp, Homo Sapiens; identical to SEQ ID NO: 68502
  misc_feature (51)..(51): n is a, c, g, or t
  misc_feature (82)..(120): n is a, c, g, or t
  misc_feature (123)..(157): n is a, c, g, or t

SEQ ID NO: 104878 - DNA, 901 bp, Homo Sapiens; identical to SEQ ID NO: 68503

SEQ ID NO: 104879 - DNA, 893 bp, Homo Sapiens; identical to SEQ ID NO: 68504
  misc_feature (823)..(823): n is a, c, g, or t

SEQ ID NO: 104880 - DNA, 827 bp, Homo Sapiens; identical to SEQ ID NO: 68505
  misc_feature (52)..(142): n is a, c, g, or t

SEQ ID NO: 104881 - DNA, 1500 bp, Homo Sapiens; identical to SEQ ID NO: 68506
  misc_feature (323)..(370): n is a, c, g, or t
  misc_feature (1442)..(1459): n is a, c, g, or t

SEQ ID NO: 104882 - DNA, 1120 bp, Homo Sapiens; identical to SEQ ID NO: 68508
  misc_feature (106)..(129): n is a, c, g, or t
  misc_feature (131)..(254): n is a, c, g, or t
  misc_feature (271)..(397): n is a, c, g, or t

SEQ ID NO: 104883 - DNA, 648 bp, Homo Sapiens; identical to SEQ ID NO: 68509
  misc_feature (473)..(473): n is a, c, g, or t
  misc_feature (478)..(478): n is a, c, g, or t
  misc_feature (526)..(526): n is a, c, g, or t
  misc_feature (556)..(556): n is a, c, g, or t

SEQ ID NO: 104884 - DNA, 1401 bp, Homo Sapiens; identical to SEQ ID NO: 68511

SEQ ID NO: 104885 - DNA, 469 bp, Homo Sapiens; identical to SEQ ID NO: 68512

SEQ ID NO: 104886 - DNA, 879 bp, Homo Sapiens; identical to SEQ ID NO: 68516
  misc_feature (367)..(377): n is a, c, g, or t
  misc_feature (524)..(524): n is a, c, g, or t

SEQ ID NO: 104887 - DNA, 1676 bp, Homo Sapiens; identical to SEQ ID NO: 68517
  misc_feature (1255)..(1295): n is a, c, g, or t
  misc_feature (1374)..(1407): n is a, c, g, or t
  misc_feature (1455)..(1463): n is a, c, g, or t

SEQ ID NO: 104888 - DNA, 1196 bp, Homo Sapiens; identical to SEQ ID NO: 68518
  misc_feature (284)..(318): n is a, c, g, or t
  misc_feature (365)..(373): n is a, c, g, or t
  misc_feature (586)..(712): n is a, c, g, or t
  misc_feature (777)..(840): n is a, c, g, or t

SEQ ID NO: 104889 - DNA, 923 bp, Homo Sapiens; identical to SEQ ID NO: 68523
  misc_feature (838)..(861): n is a, c, g, or t

SEQ ID NO: 104890 - DNA, 560 bp, Homo Sapiens; identical to SEQ ID NO: 68524
  misc_feature (185)..(195): n is a, c, g, or t
  misc_feature (258)..(281): n is a, c, g, or t

SEQ ID NO: 104891 - DNA, 948 bp, Homo Sapiens; identical to SEQ ID NO: 68526

SEQ ID NO: 104892 - DNA, 904 bp, Homo Sapiens; identical to SEQ ID NO: 68527
  misc_feature (733)..(733): n is a, c, g, or t
  misc_feature (808)..(808): n is a, c, g, or t
  misc_feature (823)..(825): n is a, c, g, or t
  misc_feature (827)..(828): n is a, c, g, or t
  misc_feature (830)..(833): n is a, c, g, or t
  misc_feature (835)..(835): n is a, c, g, or t
  misc_feature (837)..(839): n is a, c, g, or t
  misc_feature (841)..(848): n is a, c, g, or t

SEQ ID NO: 104893 - DNA, 1414 bp, Homo Sapiens; identical to SEQ ID NO: 68530
  misc_feature (58)..(99): n is a, c, g, or t
  misc_feature (1155)..(1204): n is a, c, g, or t
  misc_feature (1332)..(1368): n is a, c, g, or t

SEQ ID NO: 104894 - DNA, 1020 bp, Homo Sapiens; identical to SEQ ID NO: 68531
  misc_feature (41)..(41): n is a, c, g, or t
  misc_feature (120)..(120): n is a, c, g, or t
  misc_feature (167)..(167): n is a, c, g, or t
  misc_feature (246)..(246): n is a, c, g, or t
  misc_feature (250)..(250): n is a, c, g, or t
  misc_feature (752)..(802): n is a, c, g, or t
  misc_feature (930)..(966): n is a, c, g, or t

SEQ ID NO: 104895 - DNA, 342 bp, Homo Sapiens; identical to SEQ ID NO: 68532
  misc_feature (94)..(143): n is a, c, g, or t
  misc_feature (261)..(297): n is a, c, g, or t

SEQ ID NO: 104896 - DNA, 1620 bp, Homo Sapiens; identical to SEQ ID NO: 68534

SEQ ID NO: 104897 - DNA, 778 bp, Homo Sapiens; identical to SEQ ID NO: 68535

SEQ ID NO: 104898 - DNA, 652 bp, Homo Sapiens; identical to SEQ ID NO: 68536

SEQ ID NO: 104899 - DNA, 1087 bp, Homo Sapiens; identical to SEQ ID NO: 68537

SEQ ID NO: 104900 - DNA, 452 bp, Homo Sapiens; identical to SEQ ID NO: 68538

SEQ ID NO: 104901 - DNA, 1014 bp, Homo Sapiens; identical to SEQ ID NO: 68540
  misc_feature (166)..(166): n is a, c, g, or t
  misc_feature (249)..(250): n is a, c, g, or t
  misc_feature (256)..(476): n is a, c, g, or t
  misc_feature (498)..(515): n is a, c, g, or t
  misc_feature (689)..(739): n is a, c, g, or t

SEQ ID NO: 104902 - DNA, 622 bp, Homo Sapiens; identical to SEQ ID NO: 68541
  misc_feature (557)..(557): n is a, c, g, or t
  misc_feature (567)..(567): n is a, c, g, or t
  misc_feature (578)..(578): n is a, c, g, or t
  misc_feature (599)..(599): n is a, c, g, or t
  misc_feature (604)..(604): n is a, c, g, or t

SEQ ID NO: 104903 - DNA, 1095 bp, Homo Sapiens; identical to SEQ ID NO: 68542

SEQ ID NO: 104904 - DNA, 1217 bp, Homo Sapiens; identical to SEQ ID NO: 68543
  misc_feature (78)..(112): n is a, c, g, or t

SEQ ID NO: 104905 - DNA, 1036 bp, Homo Sapiens; identical to SEQ ID NO: 68544
  misc_feature (88)..(122): n is a, c, g, or t

SEQ ID NO: 104906 - DNA, 1782 bp, Homo Sapiens; identical to SEQ ID NO: 68545

SEQ ID NO: 104907 - DNA, 395 bp, Homo Sapiens; identical to SEQ ID NO: 68549

SEQ ID NO: 104908 - DNA, 620 bp, Homo Sapiens; identical to SEQ ID NO: 68550
  misc_feature (14)..(14): n is a, c, g, or t

SEQ ID NO: 104909 - DNA, 962 bp, Homo Sapiens; identical to SEQ ID NO: 68553

SEQ ID NO: 104910 - DNA, 1882 bp, Homo Sapiens; identical to SEQ ID NO: 68554
  misc_feature (1821)..(1821): n is a, c, g, or t

SEQ ID NO: 104911 - DNA, 1826 bp, Homo Sapiens; identical to SEQ ID NO: 68555
  misc_feature (1637)..(1687): n is a, c, g, or t

SEQ ID NO: 104912 - DNA, 1335 bp, Homo Sapiens; identical to SEQ ID NO: 68561
  misc_feature (98)..(135): n is a, c, g, or t
  misc_feature (1168)..(1168): n is a, c, g, or t
  misc_feature (1245)..(1245): n is a, c, g, or t
  misc_feature (1258)..(1258): n is a, c, g, or t
  misc_feature (1276)..(1276): n is a, c, g, or t
  misc_feature (1292)..(1292): n is a, c, g, or t

SEQ ID NO: 104913 - DNA, 1782 bp, Homo Sapiens; identical to SEQ ID NO: 68562

SEQ ID NO: 104914 - DNA, 1788 bp, Homo Sapiens; identical to SEQ ID NO: 68563
  misc_feature (150)..(150): n is a, c, g, or t
  misc_feature (154)..(154): n is a, c, g, or t
  misc_feature (306)..(306): n is a, c, g, or t

SEQ ID NO: 104915 - DNA, 866 bp, Homo Sapiens; identical to SEQ ID NO: 68564
  misc_feature (433)..(476): n is a, c, g, or t

SEQ ID NO: 104916 - DNA, 1785 bp, Homo Sapiens; identical to SEQ ID NO: 68565
  misc_feature (76)..(110): n is a, c, g, or t
  misc_feature (1493)..(1539): n is a, c, g, or t

SEQ ID NO: 104917 - DNA, 951 bp, Homo Sapiens; identical to SEQ ID NO: 68566

SEQ ID NO: 104918 - DNA, 593 bp, Homo Sapiens; identical to SEQ ID NO: 68567

SEQ ID NO: 104919 - DNA, 1163 bp, Homo Sapiens; identical to SEQ ID NO: 68572
  misc_feature (844)..(844): n is a, c, g, or t
  misc_feature (981)..(981): n is a, c, g, or t

SEQ ID NO: 104920 - DNA, 1465 bp, Homo Sapiens; identical to SEQ ID NO: 68573
  misc_feature (514)..(514): n is a, c, g, or t

SEQ ID NO: 104921 - DNA, 1176 bp, Homo Sapiens; identical to SEQ ID NO: 68575

SEQ ID NO: 104922 - DNA, 1044 bp, Homo Sapiens; identical to SEQ ID NO: 68576

SEQ ID NO: 104923 - DNA, 2143 bp, Homo Sapiens; identical to SEQ ID NO: 68584
  misc_feature (1942)..(1954): n is a, c, g, or t

SEQ ID NO: 104924 - DNA, 1022 bp, Homo Sapiens; identical to SEQ ID NO: 68585
  misc_feature (818)..(828): n is a, c, g, or t

SEQ ID NO: 104925 - DNA, 709 bp, Homo Sapiens; identical to SEQ ID NO: 68586
  misc_feature (611)..(645): n is a, c, g, or t

SEQ ID NO: 104926 - DNA, 775 bp, Homo Sapiens; identical to SEQ ID NO: 68587
  misc_feature (84)..(118): n is a, c, g, or t

SEQ ID NO: 104927 - DNA, 1037 bp, Homo Sapiens; identical to SEQ ID NO: 68588
  misc_feature (631)..(641): n is a, c, g, or t
  misc_feature (982)..(996): n is a, c, g, or t

SEQ ID NO: 104928 - DNA, 679 bp, Homo Sapiens; identical to SEQ ID NO: 68589

SEQ ID NO: 104929 - DNA, 1404 bp, Homo Sapiens; identical to SEQ ID NO: 68590

SEQ ID NO: 104930 - DNA, 654 bp, Homo Sapiens; identical to SEQ ID NO: 68591

SEQ ID NO: 104931 - DNA, 783 bp, Homo Sapiens; identical to SEQ ID NO: 68592
  misc_feature (46)..(88): n is a, c, g, or t
  misc_feature (92)..(126): n is a, c, g, or t
  misc_feature (234)..(316): n is a, c, g, or t

SEQ ID NO: 104932 - DNA, 1005 bp, Homo Sapiens; identical to SEQ ID NO: 68593

SEQ ID NO: 104933 - DNA, 1204 bp, Homo Sapiens; identical to SEQ ID NO: 68594

SEQ ID NO: 104934 - DNA, 368 bp, Homo Sapiens; identical to SEQ ID NO: 68595

SEQ ID NO: 104935 - DNA, 686 bp, Homo Sapiens; identical to SEQ ID NO: 68596
  misc_feature (471)..(471): n is a, c, g, or t
  misc_feature (632)..(644): n is a, c, g, or t

SEQ ID NO: 104936 - DNA, 1248 bp, Homo Sapiens; identical to SEQ ID NO: 68599
  misc_feature (100)..(134): n is a, c, g, or t

SEQ ID NO: 104937 - DNA, 731 bp, Homo Sapiens; identical to SEQ ID NO: 68600

SEQ ID NO: 104938 - DNA, 682 bp, Homo Sapiens; identical to SEQ ID NO: 68601

SEQ ID NO: 104939 - DNA, 1190 bp, Homo Sapiens; identical to SEQ ID NO: 68603

SEQ ID NO: 104940 - DNA, 2402 bp, Homo Sapiens; identical to SEQ ID NO: 68604
  misc_feature (2322)..(2322): n is a, c, g, or t
  misc_feature (2331)..(2331): n is a, c, g, or t

SEQ ID NO: 104941 - DNA, 825 bp, Homo Sapiens; identical to SEQ ID NO: 68605

SEQ ID NO: 104942 - DNA, 2761 bp, Homo Sapiens; identical to SEQ ID NO: 68606
  misc_feature (2203)..(2294): n is a, c, g, or t
  misc_feature (2390)..(2398): n is a, c, g, or t
  misc_feature (2456)..(2486): n is a, c, g, or t
  misc_feature (2602)..(2615): n is a, c, g, or t

SEQ ID NO: 104943 - DNA, 854 bp, Homo Sapiens; identical to SEQ ID NO: 68608

SEQ ID NO: 104944 - DNA, 848 bp, Homo Sapiens; identical to SEQ ID NO: 68609
  misc_feature (26)..(26): n is a, c, g, or t

SEQ ID NO: 104945 - DNA, 2705 bp, Homo Sapiens; identical to SEQ ID NO: 68610
  misc_feature (2590)..(2590): n is a, c, g, or t
  misc_feature (2597)..(2597): n is a, c, g, or t

SEQ ID NO: 104946 - DNA, 1136 bp, Homo Sapiens; identical to SEQ ID NO: 68611

SEQ ID NO: 104947 - DNA, 1740 bp, Homo Sapiens; identical to SEQ ID NO: 68612
  misc_feature (1318)..(1466): n is a, c, g, or t
  misc_feature (1502)..(1515): n is a, c, g, or t
  misc_feature (1531)..(1539): n is a, c, g, or t
  misc_feature (1581)..(1590): n is a, c, g, or t
  misc_feature (1634)..(1671): n is a, c, g, or t

SEQ ID NO: 104948 - DNA, 951 bp, Homo Sapiens; identical to SEQ ID NO: 68613

SEQ ID NO: 104949 - DNA, 1883 bp, Homo Sapiens; identical to SEQ ID NO: 68618
  misc_feature (78)..(112): n is a, c, g, or t

SEQ ID NO: 104950 - DNA, 2133 bp, Homo Sapiens; identical to SEQ ID NO: 68619
  misc_feature (2075)..(2083): n is a, c, g, or t

SEQ ID NO: 104951 - DNA, 2047 bp, Homo Sapiens; identical to SEQ ID NO: 68621
  misc_feature (150)..(425): n is a, c, g, or t

SEQ ID NO: 104952 - DNA, 1036 bp, Homo Sapiens; identical to SEQ ID NO: 68622
  misc_feature (95)..(362): n is a, c, g, or t

SEQ ID NO: 104953 - DNA, 683 bp, Homo Sapiens; identical to SEQ ID NO: 68625
  misc_feature (594)..(594): n is a, c, g, or t
  misc_feature (627)..(627): n is a, c, g, or t
  misc_feature (660)..(660): n is a, c, g, or t

SEQ ID NO: 104954 - DNA, 540 bp, Homo Sapiens; identical to SEQ ID NO: 68626
  misc_feature (368)..(428): n is a, c, g, or t

SEQ ID NO: 104955 - DNA, 646 bp, Homo Sapiens; identical to SEQ ID NO: 68627

SEQ ID NO: 104956 - DNA, 1205 bp, Homo Sapiens; identical to SEQ ID NO: 68628

SEQ ID NO: 104957 - DNA, 960 bp, Homo Sapiens; identical to SEQ ID NO: 68629

SEQ ID NO: 104958 - DNA, 731 bp, Homo Sapiens; identical to SEQ ID NO: 68630
  misc_feature (176)..(176): n is a, c, g, or t

SEQ ID NO: 104959 - DNA, 1693 bp, Homo Sapiens; identical to SEQ ID NO: 68631
  misc_feature (225)..(276): n is a, c, g, or t
  misc_feature (956)..(971): n is a, c, g, or t
  misc_feature (1224)..(1239): n is a, c, g, or t
  misc_feature (1415)..(1477): n is a, c, g, or t

SEQ ID NO: 104960 - DNA, 593 bp, Homo Sapiens; identical to SEQ ID NO: 68632
  misc_feature (122)..(137): n is a, c, g, or t
  misc_feature (307)..(375): n is a, c, g, or t

SEQ ID NO: 104961 - DNA, 642 bp, Homo Sapiens; identical to SEQ ID NO: 68633

SEQ ID NO: 104962 - DNA, 363 bp, Homo Sapiens; identical to SEQ ID NO: 68634
  misc_feature (269)..(284): n is a, c, g, or t
  misc_feature (333)..(333): n is a, c, g, or t

SEQ ID NO: 104963 - DNA, 787 bp, Homo Sapiens; identical to SEQ ID NO: 68635

SEQ ID NO: 104964 - DNA, 1006 bp, Homo Sapiens; identical to SEQ ID NO: 68636

SEQ ID NO: 104965 - DNA, 1039 bp, Homo Sapiens; identical to SEQ ID NO: 68637
  misc_feature (772)..(772): n is a, c, g, or t
  misc_feature (787)..(787): n is a, c, g, or t
  misc_feature (1009)..(1009): n is a, c, g, or t

SEQ ID NO: 104966 - DNA, 1063 bp, Homo Sapiens; identical to SEQ ID NO: 68638
  misc_feature (159)..(826): n is a, c, g, or t

SEQ ID NO: 104967 - DNA, 1333 bp, Homo Sapiens; identical to SEQ ID NO: 68639

SEQ ID NO: 104968 - DNA, 1831 bp, Homo Sapiens; identical to SEQ ID NO: 68640
  misc_feature (655)..(668): n is a, c, g, or t
  misc_feature (1281)..(1300): n is a, c, g, or t
  misc_feature (1331)..(1748): n is a, c, g, or t
  misc_feature (1750)..(1750): n is a, c, g, or t

SEQ ID NO: 104969 - DNA, 2071 bp, Homo Sapiens; identical to SEQ ID NO: 68641
  misc_feature (2038)..(2038): n is a, c, g, or t

SEQ ID NO: 104970 - DNA, 955 bp, Homo Sapiens; identical to SEQ ID NO: 68642
  misc_feature (172)..(172): n is a, c, g, or t
  misc_feature (202)..(202): n is a, c, g, or t
  misc_feature (222)..(222): n is a, c, g, or t

SEQ ID NO: 104971 - DNA, 938 bp, Homo Sapiens; identical to SEQ ID NO: 68643

SEQ ID NO: 104972 - DNA, 509 bp, Homo Sapiens; identical to SEQ ID NO: 68644
  misc_feature (58)..(58): n is a, c, g, or t

SEQ ID NO: 104973 - DNA, 2845 bp, Homo Sapiens; identical to SEQ ID NO: 68645

SEQ ID NO: 104974 - DNA, 1179 bp, Homo Sapiens; identical to SEQ ID NO: 68646

SEQ ID NO: 104975 - DNA, 1031 bp, Homo Sapiens; identical to SEQ ID NO: 68647

SEQ ID NO: 104976 - DNA, 1080 bp, Homo Sapiens; identical to SEQ ID NO: 68648
  misc_feature (316)..(325): n is a, c, g, or t

SEQ ID NO: 104977 - DNA, 596 bp, Homo Sapiens; identical to SEQ ID NO: 68651

SEQ ID NO: 104978 - DNA, 2394 bp, Homo Sapiens; identical to SEQ ID NO: 68652

SEQ ID NO: 104979 - DNA, 627 bp, Homo Sapiens; identical to SEQ ID NO: 68653

SEQ ID NO: 104980 - DNA, 1064 bp, Homo Sapiens; identical to SEQ ID NO: 68654
  misc_feature (955)..(986): n is a, c, g, or t

SEQ ID NO: 104981 - DNA, 1222 bp, Homo Sapiens; identical to SEQ ID NO: 68657
  misc_feature (275)..(321): n is a, c, g, or t

SEQ ID NO: 104982 - DNA, 1412 bp, Homo Sapiens; identical to SEQ ID NO: 68658
  misc_feature (143)..(213): n is a, c, g, or t
  misc_feature (777)..(827): n is a, c, g, or t
  misc_feature (1191)..(1249): n is a, c, g, or t

SEQ ID NO: 104983 - DNA, 997 bp, Homo Sapiens; identical to SEQ ID NO: 68659
  misc_feature (82)..(116): n is a, c, g, or t
  misc_feature (633)..(643): n is a, c, g, or t
  misc_feature (984)..(984): n is a, c, g, or t

SEQ ID NO: 104984 - DNA, 943 bp, Homo Sapiens; identical to SEQ ID NO: 68660
  misc_feature (105)..(139): n is a, c, g, or t

SEQ ID NO: 104985 - DNA, 1728 bp, Homo Sapiens; identical to SEQ ID NO: 68661
  misc_feature (524)..(534): n is a, c, g, or t
  misc_feature (1425)..(1433): n is a, c, g, or t
  misc_feature (1641)..(1650): n is a, c, g, or t

SEQ ID NO: 104986 - DNA, 1179 bp, Homo Sapiens; identical to SEQ ID NO: 68666

SEQ ID NO: 104987 - DNA, 1077 bp, Homo Sapiens; identical to SEQ ID NO: 68667

SEQ ID NO: 104988 - DNA, 689 bp, Homo Sapiens; identical to SEQ ID NO: 68671

SEQ ID NO: 104989 - DNA, 565 bp, Homo Sapiens; identical to SEQ ID NO: 68672

SEQ ID NO: 104990 - DNA, 1474 bp, Homo Sapiens; identical to SEQ ID NO: 68677
  misc_feature (953)..(1096): n is a, c, g, or t
  misc_feature (1146)..(1160): n is a, c, g, or t
  misc_feature (1186)..(1194): n is a, c, g, or t
  misc_feature (1360)..(1368): n is a, c, g, or t

SEQ ID NO: 104991 - DNA, 931 bp, Homo Sapiens; identical to SEQ ID NO: 68678
  misc_feature (123)..(449): n is a, c, g, or t
  misc_feature (816)..(850): n is a, c, g, or t
  misc_feature (894)..(894): n is a, c, g, or t

SEQ ID NO: 104992 - DNA, 1057 bp, Homo Sapiens; identical to SEQ ID NO: 68679
  misc_feature (84)..(118): n is a, c, g, or t
  misc_feature (525)..(825): n is a, c, g, or t

SEQ ID NO: 104993 - DNA, 922 bp, Homo Sapiens; identical to SEQ ID NO: 68680
  misc_feature (111)..(432): n is a, c, g, or t
  misc_feature (813)..(847): n is a, c, g, or t

SEQ ID NO: 104994 - DNA, 706 bp, Homo Sapiens; identical to SEQ ID NO: 68681
  misc_feature (54)..(375): n is a, c, g, or t

SEQ ID NO: 104995 - DNA, 588 bp, Homo Sapiens; identical to SEQ ID NO: 68685

SEQ ID NO: 104996 - DNA, 3431 bp, Homo Sapiens; identical to SEQ ID NO: 68686

SEQ ID NO: 104997 - DNA, 783 bp, Homo Sapiens; identical to SEQ ID NO: 68687
  misc_feature (601)..(601): n is a, c, g, or t
  misc_feature (700)..(700): n is a, c, g, or t

SEQ ID NO: 104998 - DNA, 993 bp, Homo Sapiens; identical to SEQ ID NO: 68688

SEQ ID NO: 104999 - DNA, 689 bp, Homo Sapiens; identical to SEQ ID NO: 68689

SEQ ID NO: 105000 - DNA, 513 bp, Homo Sapiens; identical to SEQ ID NO: 68690
  misc_feature (354)..(398): n is a, c, g, or t

SEQ ID NO: 105001 - DNA, 2957 bp, Homo Sapiens; identical to SEQ ID NO: 68691
  misc_feature (2454)..(2469): n is a, c, g, or t
  misc_feature (2793)..(2817): n is a, c, g, or t

SEQ ID NO: 105002 - DNA, 585 bp, Homo Sapiens; identical to SEQ ID NO: 68694

SEQ ID NO: 105003 - DNA, 2180 bp, Homo Sapiens; identical to SEQ ID NO: 68695

SEQ ID NO: 105004 - DNA, 546 bp, Homo Sapiens; identical to SEQ ID NO: 68696

SEQ ID NO: 105005 - DNA, 1927 bp, Homo Sapiens; identical to SEQ ID NO: 68699
  misc_feature (27)..(27): n is a, c, g, or t
  misc_feature (106)..(106): n is a, c, g, or t

SEQ ID NO: 105006 - DNA, 587 bp, Homo Sapiens; identical to SEQ ID NO: 68700
  misc_feature (187)..(187): n is a, c, g, or t
  misc_feature (467)..(467): n is a, c, g, or t
  misc_feature (533)..(533): n is a, c, g, or t

SEQ ID NO: 105007 - DNA, 699 bp, Homo Sapiens; identical to SEQ ID NO: 68707
  misc_feature (487)..(487): n is a, c, g, or t

SEQ ID NO: 105008 - DNA, 1464 bp, Homo Sapiens; identical to SEQ ID NO: 68708

SEQ ID NO: 105009 - DNA, 1000 bp, Homo Sapiens; identical to SEQ ID NO: 68709

SEQ ID NO: 105010 - DNA, 924 bp, Homo Sapiens; identical to SEQ ID NO: 68710

SEQ ID NO: 105011 - DNA, 710 bp, Homo Sapiens; identical to SEQ ID NO: 68715

SEQ ID NO: 105012 - DNA, 1054 bp, Homo Sapiens; identical to SEQ ID NO: 68716
  misc_feature (606)..(979): n is a, c, g, or t
  misc_feature (984)..(984): n is a, c, g, or t
  misc_feature (1000)..(1000): n is a, c, g, or t

SEQ ID NO: 105013 - DNA, 1924 bp, Homo Sapiens; identical to SEQ ID NO: 68717

SEQ ID NO: 105014 - DNA, 845 bp, Homo Sapiens; identical to SEQ ID NO: 68718

SEQ ID NO: 105015 - DNA, 608 bp, Homo Sapiens; identical to SEQ ID NO: 68719
  misc_feature (38)..(38): n is a, c, g, or t

SEQ ID NO: 105016 - DNA, 561 bp, Homo Sapiens; identical to SEQ ID NO: 68720

SEQ ID NO: 105017 - DNA, 921 bp, Homo Sapiens; identical to SEQ ID NO: 68723
  misc_feature (43)..(77): n is a, c, g, or t

SEQ ID NO: 105018 - DNA, 1013 bp, Homo Sapiens; identical to SEQ ID NO: 68724
  misc_feature (15)..(15): n is a, c, g, or t
  misc_feature (25)..(25): n is a, c, g, or t
  misc_feature (35)..(35): n is a, c, g, or t
  misc_feature (56)..(56): n is a, c, g, or t
  misc_feature (87)..(87): n is a, c, g, or t
  misc_feature (139)..(139): n is a, c, g, or t

SEQ ID NO: 105019 - DNA, 1000 bp, Homo Sapiens; identical to SEQ ID NO: 68725

SEQ ID NO: 105020 - DNA, 792 bp, Homo Sapiens; identical to SEQ ID NO: 68730

SEQ ID NO: 105021 - DNA, 1201 bp, Homo Sapiens; identical to SEQ ID NO: 68731
  misc_feature (90)..(124): n is a, c, g, or t

SEQ ID NO: 105022 - DNA, 868 bp, Homo Sapiens; identical to SEQ ID NO: 68732

SEQ ID NO: 105023 - DNA, 993 bp, Homo Sapiens; identical to SEQ ID NO: 68737
  misc_feature (200)..(200): n is a, c, g, or t
  misc_feature (892)..(892): n is a, c, g, or t

SEQ ID NO: 105024 - DNA, 2574 bp, Homo Sapiens; identical to SEQ ID NO: 68738
  misc_feature (2018)..(2139): n is a, c, g, or t
  misc_feature (2147)..(2161): n is a, c, g, or t
  misc_feature (2236)..(2299): n is a, c, g, or t
  misc_feature (2402)..(2413): n is a, c, g, or t

SEQ ID NO: 105025 - DNA, 564 bp, Homo Sapiens; identical to SEQ ID NO: 68739

SEQ ID NO: 105026 - DNA, 706 bp, Homo Sapiens; identical to SEQ ID NO: 68742
  misc_feature (93)..(93): n is a, c, g, or t
  misc_feature (437)..(497): n is a, c, g, or t

SEQ ID NO: 105027 - DNA, 1014 bp, Homo Sapiens; identical to SEQ ID NO: 68743
  misc_feature (751)..(807): n is a, c, g, or t

SEQ ID NO: 105028 - DNA, 410 bp, Homo Sapiens; identical to SEQ ID NO: 68744
  misc_feature (146)..(178): n is a, c, g, or t

SEQ ID NO: 105029 - DNA, 1600 bp, Homo Sapiens; identical to SEQ ID NO: 68749
  misc_feature (225)..(288): n is a, c, g, or t

SEQ ID NO: 105030 - DNA, 992 bp, Homo Sapiens; identical to SEQ ID NO: 68750

SEQ ID NO: 105031 - DNA, 794 bp, Homo Sapiens; identical to SEQ ID NO: 68751

SEQ ID NO: 105032 - DNA, 1642 bp, Homo Sapiens; identical to SEQ ID NO: 68752

SEQ ID NO: 105033 - DNA, 2130 bp, Homo Sapiens; identical to SEQ ID NO: 68753

SEQ ID NO: 105034 - DNA, 1080 bp, Homo Sapiens; identical to SEQ ID NO: 68754
  misc_feature (869)..(896): n is a, c, g, or t

SEQ ID NO: 105035 - DNA, 912 bp, Homo Sapiens; identical to SEQ ID NO: 68755

SEQ ID NO: 105036 - DNA, 1043 bp, Homo Sapiens; identical to SEQ ID NO: 68756
  misc_feature (630)..(630): n is a, c, g, or t
  misc_feature (700)..(700): n is a, c, g, or t

SEQ ID NO: 105037 - DNA, 1055 bp, Homo Sapiens; identical to SEQ ID NO: 68757

SEQ ID NO: 105038 - DNA, 2052 bp, Homo Sapiens; identical to SEQ ID NO: 68758
  misc_feature (1489)..(1500): n is a, c, g, or t
  misc_feature (1841)..(1841): n is a, c, g, or t
  misc_feature (1877)..(1892): n is a, c, g, or t

SEQ ID NO: 105039 - DNA, 1618 bp, Homo Sapiens; identical to SEQ ID NO: 68759
  misc_feature (18)..(18): n is a, c, g, or t
  misc_feature (936)..(948): n is a, c, g, or t

SEQ ID NO: 105040 - DNA, 1051 bp, Homo Sapiens; identical to SEQ ID NO: 68761
  misc_feature (36)..(36): n is a, c, g, or t
  misc_feature (38)..(38): n is a, c, g, or t
  misc_feature (44)..(44): n is a, c, g, or t
  misc_feature (49)..(49): n is a, c, g, or t
  misc_feature (92)..(92): n is a, c, g, or t
  misc_feature (117)..(117): n is a, c, g, or t
  misc_feature (157)..(157): n is a, c, g, or t
  misc_feature (160)..(160): n is a, c, g, or t
  misc_feature (168)..(168): n is a, c, g, or t

SEQ ID NO: 105041 - DNA, 1411 bp, Homo Sapiens; identical to SEQ ID NO: 68762

SEQ ID NO: 105042 - DNA, 3327 bp, Homo Sapiens; identical to SEQ ID NO: 68765
  misc_feature (83)..(191): n is a, c, g, or t

SEQ ID NO: 105043 - DNA, 915 bp, Homo Sapiens; identical to SEQ ID NO: 68766
  misc_feature (77)..(185): n is a, c, g, or t
  misc_feature (836)..(836): n is a, c, g, or t

SEQ ID NO: 105044 - DNA, 1764 bp, Homo Sapiens; identical to SEQ ID NO: 68767
  misc_feature (1684)..(1694): n is a, c, g, or t
  misc_feature (1697)..(1725): n is a, c, g, or t

SEQ ID NO: 105045 - DNA, 930 bp, Homo Sapiens; identical to SEQ ID NO: 68768

SEQ ID NO: 105046 - DNA, 956 bp, Homo Sapiens; identical to SEQ ID NO: 68769
  misc_feature (20)..(21): n is a, c, g, or t

SEQ ID NO: 105047 - DNA, 1098 bp, Homo Sapiens; identical to SEQ ID NO: 68770
  misc_feature (689)..(689): n is a, c, g, or t
  misc_feature (844)..(844): n is a, c, g, or t
  misc_feature (925)..(925): n is a, c, g, or t

SEQ ID NO: 105048 - DNA, 1072 bp, Homo Sapiens; identical to SEQ ID NO: 68771
  misc_feature (873)..(873): n is a, c, g, or t
  misc_feature (913)..(913): n is a, c, g, or t
  misc_feature (951)..(951): n is a, c, g, or t
  misc_feature (956)..(956): n is a, c, g, or t
  misc_feature (960)..(960): n is a, c, g, or t
  misc_feature (995)..(995): n is a, c, g, or t
  misc_feature (1014)..(1015): n is a, c, g, or t
  misc_feature (1028)..(1028): n is a, c, g, or t
  misc_feature (1034)..(1034): n is a, c, g, or t

SEQ ID NO: 105049 - DNA, 762 bp, Homo Sapiens; identical to SEQ ID NO: 68772

SEQ ID NO: 105050 - DNA, 1108 bp, Homo Sapiens; identical to SEQ ID NO: 68773
  misc_feature (97)..(131): n is a, c, g, or t
  misc_feature (1032)..(1032): n is a, c, g, or t
  misc_feature (1040)..(1040): n is a, c, g, or t
  misc_feature (1084)..(1084): n is a, c, g, or t

SEQ ID NO: 105051 - DNA, 4439 bp, Homo Sapiens; identical to SEQ ID NO: 68774
  misc_feature (1824)..(1856): n is a, c, g, or t
  misc_feature (4018)..(4048): n is a, c, g, or t
  misc_feature (4264)..(4273): n is a, c, g, or t

SEQ ID NO: 105052 - DNA, 862 bp, Homo Sapiens; identical to SEQ ID NO: 68776
  misc_feature (831)..(831): n is a, c, g, or t
  misc_feature (839)..(839): n is a, c, g, or t

SEQ ID NO: 105053 - DNA, 1728 bp, Homo Sapiens; identical to SEQ ID NO: 68777
  misc_feature (1086)..(1117): n is a, c, g, or t
  misc_feature (1121)..(1121): n is a, c, g, or t
  misc_feature (1124)..(1124): n is a, c, g, or t

SEQ ID NO: 105054 - DNA, 1010 bp, Homo Sapiens; identical to SEQ ID NO: 68778
  misc_feature (58)..(58): n is a, c, g, or t

SEQ ID NO: 105055 - DNA, 846 bp, Homo Sapiens; identical to SEQ ID NO: 68779
  misc_feature (141)..(141): n is a, c, g, or t

SEQ ID NO: 105056 - DNA, 923 bp, Homo Sapiens; identical to SEQ ID NO: 68780

SEQ ID NO: 105057 - DNA, 612 bp, Homo Sapiens; identical to SEQ ID NO: 68783

SEQ ID NO: 105058 - DNA, 474 bp, Homo Sapiens; identical to SEQ ID NO: 68784
  misc_feature (375)..(375): n is a, c, g, or t

SEQ ID NO: 105059 - DNA, 1283 bp, Homo Sapiens; identical to SEQ ID NO: 68785

SEQ ID NO: 105060 - DNA, 1217 bp, Homo Sapiens; identical to SEQ ID NO: 68787

SEQ ID NO: 105061 - DNA, 766 bp, Homo Sapiens; identical to SEQ ID NO: 68788

SEQ ID NO: 105062 - DNA, 1817 bp, Homo Sapiens; identical to SEQ ID NO: 68790
  misc_feature (1552)..(1552): n is a, c, g, or t
  misc_feature (1621)..(1676): n is a, c, g, or t

SEQ ID NO: 105063 - DNA, 635 bp, Homo Sapiens; identical to SEQ ID NO: 68791
  misc_feature (455)..(494): n is a, c, g, or t

SEQ ID NO: 105064 - DNA, 439 bp, Homo Sapiens; identical to SEQ ID NO: 68792

SEQ ID NO: 105065 - DNA, 1355 bp, Homo Sapiens; identical to SEQ ID NO: 68794

SEQ ID NO: 105066 - DNA, 476 bp, Homo Sapiens; identical to SEQ ID NO: 68795

SEQ ID NO: 105067 - DNA, 1215 bp, Homo Sapiens; identical to SEQ ID NO: 68801
  misc_feature (85)..(110): n is a, c, g, or t
  misc_feature (226)..(495): n is a, c, g, or t
  misc_feature (718)..(728): n is a, c, g, or t

SEQ ID NO: 105068 - DNA, 2143 bp, Homo Sapiens; identical to SEQ ID NO: 68802
  misc_feature (1625)..(1627): n is a, c, g, or t

SEQ ID NO: 105069 - DNA, 1754 bp, Homo Sapiens; identical to SEQ ID NO: 68803
  misc_feature (71)..(106): n is a, c, g, or t
  misc_feature (138)..(165): n is a, c, g, or t
  misc_feature (295)..(311): n is a, c, g, or t
  misc_feature (333)..(345): n is a, c, g, or t
  misc_feature (401)..(425): n is a, c, g, or t

SEQ ID NO: 105070 - DNA, 234 bp, Homo Sapiens; identical to SEQ ID NO: 68804
  misc_feature (130)..(146): n is a, c, g, or t
  misc_feature (168)..(180): n is a, c, g, or t

SEQ ID NO: 105071 - DNA, 1283 bp, Homo Sapiens; identical to SEQ ID NO: 68805
  misc_feature (488)..(578): n is a, c, g, or t

SEQ ID NO: 105072 - DNA, 917 bp, Homo Sapiens; identical to SEQ ID NO: 68806
  misc_feature (67)..(157): n is a, c, g, or t
  misc_feature (206)..(206): n is a, c, g, or t
  misc_feature (699)..(761): n is a, c, g, or t

SEQ ID NO: 105073 - DNA, 884 bp, Homo Sapiens; identical to SEQ ID NO: 68807
  misc_feature (37)..(37): n is a, c, g, or t
  misc_feature (74)..(158): n is a, c, g, or t

SEQ ID NO: 105074 - DNA, 1739 bp, Homo Sapiens; identical to SEQ ID NO: 68808
  misc_feature (42)..(42): n is a, c, g, or t
  misc_feature (76)..(76): n is a, c, g, or t
  misc_feature (135)..(135): n is a, c, g, or t
  misc_feature (165)..(165): n is a, c, g, or t
  misc_feature (167)..(167): n is a, c, g, or t
  misc_feature (171)..(171): n is a, c, g, or t
  misc_feature (187)..(187): n is a, c, g, or t
  misc_feature (189)..(189): n is a, c, g, or t
  misc_feature (198)..(199): n is a, c, g, or t
  misc_feature (214)..(214): n is a, c, g, or t
  misc_feature (217)..(217): n is a, c, g, or t
  misc_feature (221)..(222): n is a, c, g, or t
  misc_feature (670)..(683): n is a, c, g, or t
  misc_feature (996)..(1041): n is a, c, g, or t
  misc_feature (1059)..(1120): n is a, c, g, or t
  misc_feature (1396)..(1404): n is a, c, g, or t
  misc_feature (1442)..(1451): n is a, c, g, or t

SEQ ID NO: 105075 - DNA, 1799 bp, Homo Sapiens; identical to SEQ ID NO: 68809
  misc_feature (44)..(44): n is a, c, g, or t
  misc_feature (83)..(83): n is a, c, g, or t
  misc_feature (1287)..(1341): n is a, c, g, or t
  misc_feature (1583)..(1633): n is a, c, g, or t

SEQ ID NO: 105076 - DNA, 762 bp, Homo Sapiens; identical to SEQ ID NO: 68815

SEQ ID NO: 105077 - DNA, 1667 bp, Homo Sapiens; identical to SEQ ID NO: 68816

SEQ ID NO: 105078 - DNA, 931 bp, Homo Sapiens; identical to SEQ ID NO: 68817
  misc_feature (478)..(532): n is a, c, g, or t

SEQ ID NO: 105079 - DNA, 1720 bp, Homo Sapiens; identical to SEQ ID NO: 68818
  misc_feature (77)..(85): n is a, c, g, or t
  misc_feature (94)..(94): n is a, c, g, or t
  misc_feature (180)..(180): n is a, c, g, or t
  misc_feature (552)..(552): n is a, c, g, or t

SEQ ID NO: 105080 - DNA, 857 bp, Homo Sapiens; identical to SEQ ID NO: 68819

SEQ ID NO: 105081 - DNA, 2187 bp, Homo Sapiens; identical to SEQ ID NO: 68822
  misc_feature (1205)..(1205): n is a, c, g, or t
  misc_feature (2069)..(2095): n is a, c, g, or t

SEQ ID NO: 105082 - DNA, 1616 bp, Homo Sapiens; identical to SEQ ID NO: 68823
  misc_feature (1290)..(1319): n is a, c, g, or t
  misc_feature (1366)..(1434): n is a, c, g, or t
  misc_feature (1488)..(1552): n is a, c, g, or t

SEQ ID NO: 105083 - DNA, 925 bp, Homo Sapiens; identical to SEQ ID NO: 68824

SEQ ID NO: 105084 - DNA, 2257 bp, Homo Sapiens; identical to SEQ ID NO: 68825
  misc_feature (2050)..(2058): n is a, c, g, or t

SEQ ID NO: 105085 - DNA, 346 bp, Homo Sapiens; identical to SEQ ID NO: 68827

SEQ ID NO: 105086 - DNA, 1155 bp, Homo Sapiens; identical to SEQ ID NO: 68828
  misc_feature (12)..(12): n is a, c, g, or t
  misc_feature (115)..(115): n is a, c, g, or t

SEQ ID NO: 105087 - DNA, 2719 bp, Homo Sapiens; identical to SEQ ID NO: 68830

SEQ ID NO: 105088 - DNA, 733 bp, Homo Sapiens; identical to SEQ ID NO: 68831

SEQ ID NO: 105089 - DNA, 1283 bp, Homo Sapiens; identical to SEQ ID NO: 68832
  misc_feature (44)..(44): n is a, c, g, or t
  misc_feature (81)..(115): n is a, c, g, or t

SEQ ID NO: 105090 - DNA, 802 bp, Homo Sapiens; identical to SEQ ID NO: 68833
  misc_feature (395)..(395): n is a, c, g, or t

SEQ ID NO: 105091 - DNA, 1152 bp, Homo Sapiens; identical to SEQ ID NO: 68834

SEQ ID NO: 105092 - DNA, 1132 bp, Homo Sapiens; identical to SEQ ID NO: 68835
  misc_feature (28)..(28): n is a, c, g, or t
  misc_feature (201)..(201): n is a, c, g, or t

SEQ ID NO: 105093 - DNA, 1405 bp, Homo Sapiens; identical to SEQ ID NO: 68840
  misc_feature (1143)..(1143): n is a, c, g, or t
  misc_feature (1290)..(1314): n is a, c, g, or t

SEQ ID NO: 105094 - DNA, 1011 bp, Homo Sapiens; identical to SEQ ID NO: 68841

SEQ ID NO: 105095 - DNA, 1045 bp, Homo Sapiens; identical to SEQ ID NO: 68842
  misc_feature (110)..(144): n is a, c, g, or t
  misc_feature (631)..(631): n is a, c, g, or t

SEQ ID NO: 105096 - DNA, 830 bp, Homo Sapiens; identical to SEQ ID NO: 4124
  misc_feature (747)..(747): n is a, c, g, or t
  misc_feature (749)..(749): n is a, c, g, or t
  misc_feature (752)..(752): n is a, c, g, or t
  misc_feature (754)..(754): n is a, c, g, or t
  misc_feature (761)..(765): n is a, c, g, or t
  misc_feature (768)..(772): n is a, c, g, or t

SEQ ID NO: 105097 - DNA, 699 bp, Homo Sapiens; identical to SEQ ID NO: 68848

SEQ ID NO: 105098 - DNA, 1784 bp, Homo Sapiens; identical to SEQ ID NO: 68849
  misc_feature (138)..(138): n is a, c, g, or t

SEQ ID NO: 105099 - DNA, 1053 bp, Homo Sapiens; identical to SEQ ID NO: 68850
  misc_feature (871)..(871): n is a, c, g, or t
  misc_feature (969)..(969): n is a, c, g, or t
  misc_feature (1024)..(1024): n is a, c, g, or t

SEQ ID NO: 105100 - DNA, 960 bp, Homo Sapiens; identical to SEQ ID NO: 68851

SEQ ID NO: 105101 - DNA, 2626 bp, Homo Sapiens; identical to SEQ ID NO: 68859

SEQ ID NO: 105102 - DNA, 1138 bp, Homo Sapiens; identical to SEQ ID NO: 68860

SEQ ID NO: 105103 - DNA, 1353 bp, Homo Sapiens; identical to SEQ ID NO: 68862
  misc_feature (41)..(81): n is a, c, g, or t
  misc_feature (84)..(118): n is a, c, g, or t

SEQ ID NO: 105104 - DNA, 1645 bp, Homo Sapiens; identical to SEQ ID NO: 68863
  misc_feature (327)..(327): n is a, c, g, or t
  misc_feature (407)..(467): n is a, c, g, or t

SEQ ID NO: 105105 - DNA, 993 bp, Homo Sapiens; identical to SEQ ID NO: 68864
  misc_feature (42)..(76): n is a, c, g, or t

SEQ ID NO: 105106 - DNA, 772 bp, Homo Sapiens; identical to SEQ ID NO: 68865

SEQ ID NO: 105107 - DNA, 919 bp, Homo Sapiens; identical to SEQ ID NO: 68866

SEQ ID NO: 105108 - DNA, 1125 bp, Homo Sapiens; identical to SEQ ID NO: 68868

SEQ ID NO: 105109 - DNA, 931 bp, Homo Sapiens; identical to SEQ ID NO: 68869
  misc_feature (888)..(888): n is a, c, g, or t
  misc_feature (919)..(919): n is a, c, g, or t

SEQ ID NO: 105110 - DNA, 1006 bp, Homo Sapiens; identical to SEQ ID NO: 68870
  misc_feature (57)..(57): n is a, c, g, or t
  misc_feature (77)..(77): n is a, c, g, or t
  misc_feature (79)..(79): n is a, c, g, or t
  misc_feature (88)..(88): n is a, c, g, or t
  misc_feature (114)..(114): n is a, c, g, or t
  misc_feature (121)..(121): n is a, c, g, or t
  misc_feature (138)..(138): n is a, c, g, or t
  misc_feature (162)..(162): n is a, c, g, or t
  misc_feature (171)..(171): n is a, c, g, or t
  misc_feature (243)..(243): n is a, c, g, or t

SEQ ID NO: 105111 - DNA, 526 bp, Homo Sapiens; identical to SEQ ID NO: 68871

SEQ ID NO: 105112 - DNA, 1400 bp, Homo Sapiens; identical to SEQ ID NO: 68872
  misc_feature (1214)..(1261): n is a, c, g, or t

SEQ ID NO: 105113 - DNA, 833 bp, Homo Sapiens; identical to SEQ ID NO: 68873

SEQ ID NO: 105114 - DNA, 1090 bp, Homo Sapiens; identical to SEQ ID NO: 68874
  misc_feature (125)..(125): n is a, c, g, or t
  misc_feature (671)..(738): n is a, c, g, or t

SEQ ID NO: 105115 - DNA, 853 bp, Homo Sapiens; identical to SEQ ID NO: 68875

SEQ ID NO: 105116 - DNA, 939 bp, Homo Sapiens; identical to SEQ ID NO: 68876
  misc_feature (216)..(225): n is a, c, g, or t
  misc_feature (514)..(522): n is a, c, g, or t

SEQ ID NO: 105117 - DNA, 376 bp, Homo Sapiens; identical to SEQ ID NO: 68877

SEQ ID NO: 105118 - DNA, 800 bp, Homo Sapiens; identical to SEQ ID NO: 68879
  misc_feature (87)..(121): n is a, c, g, or t

SEQ ID NO: 105119 - DNA, 1240 bp, Homo Sapiens; identical to SEQ ID NO: 68880

SEQ ID NO: 105120 - DNA, 1318 bp, Homo Sapiens; identical to SEQ ID NO: 68881

SEQ ID NO: 105121 - DNA, 467 bp, Homo Sapiens; identical to SEQ ID NO: 68882

SEQ ID NO: 105122 - DNA, 651 bp, Homo Sapiens; identical to SEQ ID NO: 68883
  misc_feature (153)..(175): n is a, c, g, or t
  misc_feature (248)..(283): n is a, c, g, or t

SEQ ID NO: 105123 - DNA, 494 bp, Homo Sapiens; identical to SEQ ID NO: 68884

SEQ ID NO: 105124 - DNA, 829 bp, Homo Sapiens; identical to SEQ ID NO: 68885
  misc_feature (369)..(403): n is a, c, g, or t
  misc_feature (476)..(498): n is a, c, g, or t
  misc_feature (764)..(777): n is a, c, g, or t

SEQ ID NO: 105125 - DNA, 917 bp, Homo Sapiens; identical to SEQ ID NO: 68886
  misc_feature (61)..(83): n is a, c, g, or t
  misc_feature (559)..(581): n is a, c, g, or t
  misc_feature (847)..(865): n is a, c, g, or t

SEQ ID NO: 105126 - DNA, 1168 bp, Homo Sapiens; identical to SEQ ID NO: 68890
  misc_feature (48)..(80): n is a, c, g, or t

SEQ ID NO: 105127 - DNA, 1407 bp, Homo Sapiens; identical to SEQ ID NO: 68891
  misc_feature (606)..(638): n is a, c, g, or t

SEQ ID NO: 105128 - DNA, 732 bp, Homo Sapiens; identical to SEQ ID NO: 68900
  misc_feature (503)..(503): n is a, c, g, or t

SEQ ID NO: 105129 - DNA, 1129 bp, Homo Sapiens; identical to SEQ ID NO: 68901
  misc_feature (18)..(18): n is a, c, g, or t
  misc_feature (32)..(32): n is a, c, g, or t
  misc_feature (101)..(101): n is a, c, g, or t
  misc_feature (287)..(287): n is a, c, g, or t
  misc_feature (790)..(800): n is a, c, g, or t
  misc_feature (1030)..(1049): n is a, c, g, or t
  misc_feature (1100)..(1100): n is a, c, g, or t

SEQ ID NO: 105130 - DNA, 690 bp, Homo Sapiens; identical to SEQ ID NO: 68902

SEQ ID NO: 105131 - DNA, 1265 bp, Homo Sapiens; identical to SEQ ID NO: 68903
  misc_feature (1158)..(1158): n is a, c, g, or t
  misc_feature (1167)..(1167): n is a, c, g, or t
  misc_feature (1179)..(1179): n is a, c, g, or t
  misc_feature (1199)..(1199): n is a, c, g, or t
  misc_feature (1211)..(1211): n is a, c, g, or t
  misc_feature (1223)..(1223): n is a, c, g, or t
  misc_feature (1239)..(1239): n is a, c, g, or t
  misc_feature (1249)..(1249): n is a, c, g, or t

SEQ ID NO: 105132 - DNA, 500 bp, Homo Sapiens; identical to SEQ ID NO: 68906
  misc_feature (243)..(274): n is a, c, g, or t

SEQ ID NO: 105133 - DNA, 2319 bp, Homo Sapiens; identical to SEQ ID NO: 68907
  misc_feature (1861)..(1871): n is a, c, g, or t
  misc_feature (1983)..(1983): n is a, c, g, or t

SEQ ID NO: 105134 - DNA, 1100 bp, Homo Sapiens; identical to SEQ ID NO: 68908

SEQ ID NO: 105135 - DNA, 974 bp, Homo Sapiens; identical to SEQ ID NO: 68909

SEQ ID NO: 105136 - DNA, 1068 bp, Homo Sapiens; identical to SEQ ID NO: 68910

SEQ ID NO: 105137 - DNA, 360 bp, Homo Sapiens; identical to SEQ ID NO: 68911

SEQ ID NO: 105138 - DNA, 1077 bp, Homo Sapiens; identical to SEQ ID NO: 68915
  misc_feature (498)..(515): n is a, c, g, or t
  misc_feature (545)..(940): n is a, c, g, or t

SEQ ID NO: 105139 - DNA, 2759 bp, Homo Sapiens; identical to SEQ ID NO: 68916
  misc_feature (2134)..(2158): n is a, c, g, or t
  misc_feature (2172)..(2172): n is a, c, g, or t
  misc_feature (2214)..(2614): n is a, c, g, or t
  misc_feature (2617)..(2617): n is a, c, g, or t
  misc_feature (2626)..(2627): n is a, c, g, or t

SEQ ID NO: 105140 - DNA, 960 bp, Homo Sapiens; identical to SEQ ID NO: 68917
  misc_feature (77)..(111): n is a, c, g, or t

SEQ ID NO: 105141 - DNA, 959 bp, Homo Sapiens; identical to SEQ ID NO: 68918

SEQ ID NO: 105142 - DNA, 1313 bp, Homo Sapiens; identical to SEQ ID NO: 68919

SEQ ID NO: 105143 - DNA, 807 bp, Homo Sapiens; identical to SEQ ID NO: 68920
  misc_feature (605)..(608): n is a, c, g, or t
  misc_feature (611)..(612): n is a, c, g, or t
  misc_feature (615)..(617): n is a, c, g, or t
  misc_feature (620)..(620): n is a, c, g, or t
  misc_feature (624)..(626): n is a, c, g, or t
  misc_feature (628)..(633): n is a, c, g, or t

SEQ ID NO: 105144 - DNA, 1386 bp, Homo Sapiens; identical to SEQ ID NO: 68922
  misc_feature (933)..(942): n is a, c, g, or t
  misc_feature (1249)..(1258): n is a, c, g, or t
  misc_feature (1280)..(1341): n is a, c, g, or t

SEQ ID NO: 105145 - DNA, 1244 bp, Homo Sapiens; identical to SEQ ID NO: 68923
  misc_feature (117)..(130): n is a, c, g, or t
  misc_feature (428)..(436): n is a, c, g, or t
  misc_feature (921)..(954): n is a, c, g, or t

SEQ ID NO: 105146 - DNA, 727 bp, Homo Sapiens; identical to SEQ ID NO: 68927
  misc_feature (118)..(118): n is a, c, g, or t
  misc_feature (128)..(128): n is a, c, g, or t

SEQ ID NO: 105147 - DNA, 1431 bp, Homo Sapiens; identical to SEQ ID NO: 68928
  misc_feature (132)..(236): n is a, c, g, or t
  misc_feature (260)..(279): n is a, c, g, or t

SEQ ID NO: 105148 - DNA, 1176 bp, Homo Sapiens; identical to SEQ ID NO: 68934
  misc_feature (1007)..(1007): n is a, c, g, or t

SEQ ID NO: 105149 - DNA, 1047 bp, Homo Sapiens; identical to SEQ ID NO: 68935
  misc_feature (788)..(815): n is a, c, g, or t
  misc_feature (1004)..(1004): n is a, c, g, or t
  misc_feature (1023)..(1023): n is a, c, g, or t
  misc_feature (1025)..(1025): n is a, c, g, or t

SEQ ID NO: 105150 - DNA, 625 bp, Homo Sapiens; identical to SEQ ID NO: 68936

SEQ ID NO: 105151 - DNA, 699 bp, Homo Sapiens; identical to SEQ ID NO: 68937
  misc_feature (28)..(28): n is a, c, g, or t
  misc_feature (69)..(69): n is a, c, g, or t
  misc_feature (99)..(99): n is a, c, g, or t
  misc_feature (147)..(147): n is a, c, g, or t

SEQ ID NO: 105152 - DNA, 573 bp, Homo Sapiens; identical to SEQ ID NO: 68938
  misc_feature (11)..(11): n is a, c, g, or t

SEQ ID NO: 105153 - DNA, 942 bp, Homo Sapiens; identical to SEQ ID NO: 68943

SEQ ID NO: 105154 - DNA, 1035 bp, Homo Sapiens; identical to SEQ ID NO: 68944
  misc_feature (513)..(569): n is a, c, g, or t

SEQ ID NO: 105155 - DNA, 487 bp, Homo Sapiens; identical to SEQ ID NO: 68945

SEQ ID NO: 105156 - DNA, 1010 bp, Homo Sapiens; identical to SEQ ID NO: 68946

SEQ ID NO: 105157 - DNA, 1926 bp, Homo Sapiens; identical to SEQ ID NO: 68947

SEQ ID NO: 105158 - DNA, 943 bp, Homo Sapiens; identical to SEQ ID NO: 68948
  misc_feature (771)..(771): n is a, c, g, or t

SEQ ID NO: 105159 - DNA, 1005 bp, Homo Sapiens; identical to SEQ ID NO: 68949
  misc_feature (592)..(592): n is a, c, g, or t

SEQ ID NO: 105160 - DNA, 528 bp, Homo Sapiens; identical to SEQ ID NO: 68951

SEQ ID NO: 105161 - DNA, 2198 bp, Homo Sapiens; identical to SEQ ID NO: 68952
  misc_feature (1982)..(2072): n is a, c, g, or t
  misc_feature (2107)..(2117): n is a, c, g, or t

SEQ ID NO: 105162 - DNA, 641 bp, Homo Sapiens; identical to SEQ ID NO: 68953

SEQ ID NO: 105163 - DNA, 1287 bp, Homo Sapiens; identical to SEQ ID NO: 68954
  misc_feature (84)..(84): n is a, c, g, or t
  misc_feature (108)..(535): n is a, c, g, or t
  misc_feature (964)..(1025): n is a, c, g, or t
  misc_feature (1147)..(1201): n is a, c, g, or t

SEQ ID NO: 105164 - DNA, 996 bp, Homo Sapiens; identical to SEQ ID NO: 68957

SEQ ID NO: 105165 - DNA, 1406 bp, Homo Sapiens; identical to SEQ ID NO: 68958

SEQ ID NO: 105166 - DNA, 411 bp, Homo Sapiens; identical to SEQ ID NO: 68959

SEQ ID NO: 105167 - DNA, 1962 bp, Homo Sapiens; identical to SEQ ID NO: 68962
  misc_feature (1702)..(1739): n is a, c, g, or t
  misc_feature (1825)..(1833): n is a, c, g, or t

SEQ ID NO: 105168 - DNA, 1031 bp, Homo Sapiens; identical to SEQ ID NO: 68963

SEQ ID NO: 105169 - DNA, 1182 bp, Homo Sapiens; identical to SEQ ID NO: 68967

SEQ ID NO: 105170 - DNA, 1620 bp, Homo Sapiens; identical to SEQ ID NO: 68968
  misc_feature (1520)..(1532): n is a, c, g, or t
  misc_feature (1534)..(1535): n is a, c, g, or t
  misc_feature (1538)..(1540): n is a, c, g, or t
  misc_feature (1543)..(1547): n is a, c, g, or t

SEQ ID NO: 105171 - DNA, 1203 bp, Homo Sapiens; identical to SEQ ID NO: 68971
  misc_feature (119)..(119): n is a, c, g, or t
  misc_feature (296)..(297): n is a, c, g, or t

SEQ ID NO: 105172 - DNA, 1105 bp, Homo Sapiens; identical to SEQ ID NO: 68972
  misc_feature (1069)..(1069): n is a, c, g, or t

SEQ ID NO: 105173 - DNA, 1350 bp, Homo Sapiens; identical to SEQ ID NO: 68973
  misc_feature (1233)..(1233): n is a, c, g, or t

SEQ ID NO: 105174 - DNA, 1086 bp, Homo Sapiens; identical to SEQ ID NO: 68974
  misc_feature (468)..(611): n is a, c, g, or t
  misc_feature (615)..(629): n is a, c, g, or t

SEQ ID NO: 105175 - DNA, 1064 bp, Homo Sapiens; identical to SEQ ID NO: 68975
  misc_feature (562)..(562): n is a, c, g, or t
  misc_feature (654)..(654): n is a, c, g, or t
  misc_feature (764)..(764): n is a, c, g, or t
  misc_feature (774)..(774): n is a, c, g, or t
  misc_feature (827)..(827): n is a, c, g, or t
  misc_feature (867)..(867): n is a, c, g, or t

SEQ ID NO: 105176 - DNA, 960 bp, Homo Sapiens; identical to SEQ ID NO: 68976

SEQ ID NO: 105177 - DNA, 1317 bp, Homo Sapiens; identical to SEQ ID NO: 68982
  misc_feature (80)..(114): n is a, c, g, or t
  misc_feature (194)..(215): n is a, c, g, or t
  misc_feature (555)..(566): n is a, c, g, or t

SEQ ID NO: 105178 - DNA, 562 bp, Homo Sapiens; identical to SEQ ID NO: 68983
  misc_feature (353)..(377): n is a, c, g, or t
  misc_feature (457)..(491): n is a, c, g, or t

SEQ ID NO: 105179 - DNA, 903 bp, Homo Sapiens; identical to SEQ ID NO: 68984
  misc_feature (43)..(82): n is a, c, g, or t
  misc_feature (85)..(119): n is a, c, g, or t

SEQ ID NO: 105180 - DNA, 856 bp, Homo Sapiens; identical to SEQ ID NO: 68987
  misc_feature (238)..(265): n is a, c, g, or t

SEQ ID NO: 105181 - DNA, 1133 bp, Homo Sapiens; identical to SEQ ID NO: 68988

SEQ ID NO: 105182 - DNA, 1193 bp, Homo Sapiens; identical to SEQ ID NO: 68991

SEQ ID NO: 105183 - DNA, 2777 bp, Homo Sapiens; identical to SEQ ID NO: 68992
  misc_feature (1974)..(2066): n is a, c, g, or t
  misc_feature (2072)..(2072): n is a, c, g, or t
  misc_feature (2086)..(2130): n is a, c, g, or t
  misc_feature (2141)..(2156): n is a, c, g, or t
  misc_feature (2254)..(2284): n is a, c, g, or t
  misc_feature (2304)..(2313): n is a, c, g, or t
  misc_feature (2351)..(2383): n is a, c, g, or t
  misc_feature (2678)..(2678): n is a, c, g, or t
  misc_feature (2696)..(2696): n is a, c, g, or t

SEQ ID NO: 105184 - DNA, 1373 bp, Homo Sapiens; identical to SEQ ID NO: 68993

SEQ ID NO: 105185 - DNA, 648 bp, Homo Sapiens; identical to SEQ ID NO: 69002
  misc_feature (451)..(465): n is a, c, g, or t

SEQ ID NO: 105186 - DNA, 1262 bp, Homo Sapiens; identical to SEQ ID NO: 69003
  misc_feature (1065)..(1079): n is a, c, g, or t

SEQ ID NO: 105187 - DNA, 1328 bp, Homo Sapiens; identical to SEQ ID NO: 69006

SEQ ID NO: 105188 - DNA, 889 bp, Homo Sapiens; identical to SEQ ID NO: 69007

SEQ ID NO: 105189 - DNA, 1227 bp, Homo Sapiens; identical to SEQ ID NO: 69008
  misc_feature (29)..(29): n is a, c, g, or t
  misc_feature (45)..(45): n is a, c, g, or t
  misc_feature (54)..(54): n is a, c, g, or t
  misc_feature (1084)..(1084): n is a, c, g, or t
  misc_feature (1102)..(1102): n is a, c, g, or t
  misc_feature (1105)..(1105): n is a, c, g, or t
  misc_feature (1153)..(1153): n is a, c, g, or t
  misc_feature (1170)..(1170): n is a, c, g, or t
  misc_feature (1217)..(1217): n is a, c, g, or t

SEQ ID NO: 105190 - DNA, 603 bp, Homo Sapiens; identical to SEQ ID NO: 69013
  misc_feature (14)..(14): n is a, c, g, or t
  misc_feature (35)..(35): n is a, c, g, or t

SEQ ID NO: 105191 - DNA, 2018 bp, Homo Sapiens; identical to SEQ ID NO: 69014
  misc_feature (746)..(829): n is a, c, g, or t
  misc_feature (1363)..(1403): n is a, c, g, or t
  misc_feature (1406)..(1406): n is a, c, g, or t
  misc_feature (1714)..(1745): n is a, c, g, or t
  misc_feature (1929)..(1966): n is a, c, g, or t

SEQ ID NO: 105192 - DNA, 767 bp, Homo Sapiens; identical to SEQ ID NO: 69015
  misc_feature (59)..(90): n is a, c, g, or t
  misc_feature (370)..(438): n is a, c, g, or t
  misc_feature (519)..(527): n is a, c, g, or t

SEQ ID NO: 105193 - DNA, 597 bp, Homo Sapiens; identical to SEQ ID NO: 69016
  misc_feature (488)..(544): n is a, c, g, or t
  misc_feature (586)..(586): n is a, c, g, or t

SEQ ID NO: 105194 - DNA, 1459 bp, Homo Sapiens; identical to SEQ ID NO: 69017
  misc_feature (99)..(178): n is a, c, g, or t
  misc_feature (1096)..(1116): n is a, c, g, or t
  misc_feature (1139)..(1277): n is a, c, g, or t
  misc_feature (1296)..(1375): n is a, c, g, or t
  misc_feature (1409)..(1410): n is a, c, g, or t

SEQ ID NO: 105195 - DNA, 971 bp, Homo Sapiens; identical to SEQ ID NO: 69018
  misc_feature (775)..(775): n is a, c, g, or t

SEQ ID NO: 105196 - DNA, 1039 bp, Homo Sapiens; identical to SEQ ID NO: 69019
  misc_feature (45)..(63): n is a, c, g, or t
  misc_feature (928)..(989): n is a, c, g, or t

SEQ ID NO: 105197 - DNA, 873 bp, Homo Sapiens; identical to SEQ ID NO: 69026
  misc_feature (805)..(820): n is a, c, g, or t

SEQ ID NO: 105198 - DNA, 409 bp, Homo Sapiens; identical to SEQ ID NO: 69027
  misc_feature (135)..(150): n is a, c, g, or t

SEQ ID NO: 105199 - DNA, 801 bp, Homo Sapiens; identical to SEQ ID NO: 69028

SEQ ID NO: 105200 - DNA, 2284 bp, Homo Sapiens; identical to SEQ ID NO: 69029
  misc_feature (79)..(113): n is a, c, g, or t
  misc_feature (1011)..(1019): n is a, c, g, or t
  misc_feature (1444)..(1453): n is a, c, g, or t

SEQ ID NO: 105201 - DNA, 1117 bp, Homo Sapiens; identical to SEQ ID NO: 69030
  misc_feature (752)..(752): n is a, c, g, or t

SEQ ID NO: 105202 - DNA, 2061 bp, Homo Sapiens; identical to SEQ ID NO: 69031

SEQ ID NO: 105203 - DNA, 1310 bp, Homo Sapiens; identical to SEQ ID NO: 69036
  misc_feature (69)..(298): n is a, c, g, or t

SEQ ID NO: 105204 - DNA, 990 bp, Homo Sapiens; identical to SEQ ID NO: 69037
  misc_feature (81)..(115): n is a, c, g, or t

SEQ ID NO: 105205 - DNA, 1077 bp, Homo Sapiens; identical to SEQ ID NO: 69041
  misc_feature (534)..(618): n is a, c, g, or t
  misc_feature (630)..(693): n is a, c, g, or t

SEQ ID NO: 105206 - DNA, 1238 bp, Homo Sapiens; identical to SEQ ID NO: 69042
  misc_feature (257)..(328): n is a, c, g, or t
  misc_feature (358)..(410): n is a, c, g, or t
  misc_feature (987)..(989): n is a, c, g, or t
  misc_feature (991)..(991): n is a, c, g, or t
  misc_feature (1046)..(1102): n is a, c, g, or t
  misc_feature (1126)..(1167): n is a, c, g, or t

SEQ ID NO: 105207 - DNA, 882 bp, Homo Sapiens; identical to SEQ ID NO: 69045

SEQ ID NO: 105208 - DNA, 806 bp, Homo Sapiens; identical to SEQ ID NO: 69046

SEQ ID NO: 105209 - DNA, 770 bp, Homo Sapiens; identical to SEQ ID NO: 69047
  misc_feature (708)..(709): n is a, c, g, or t
  misc_feature (732)..(732): n is a, c, g, or t

SEQ ID NO: 105210 - DNA, 2105 bp, Homo Sapiens; identical to SEQ ID NO: 69048
  misc_feature (871)..(880): n is a, c, g, or t
  misc_feature (1100)..(1110): n is a, c, g, or t
  misc_feature (1615)..(1652): n is a, c, g, or t
  misc_feature (1778)..(1800): n is a, c, g, or t

SEQ ID NO: 105211 - DNA, 1116 bp, Homo Sapiens; identical to SEQ ID NO: 69049
  misc_feature (148)..(337): n is a, c, g, or t
  misc_feature (414)..(460): n is a, c, g, or t
  misc_feature (1026)..(1042): n is a, c, g, or t

SEQ ID NO: 105212 - DNA, 1061 bp, Homo Sapiens; identical to SEQ ID NO: 69050

SEQ ID NO: 105213 - DNA, 759 bp, Homo Sapiens; identical to SEQ ID NO: 69051
  misc_feature (350)..(350): n is a, c, g, or t
  misc_feature (360)..(397): n is a, c, g, or t
  misc_feature (541)..(541): n is a, c, g, or t
  misc_feature (629)..(649): n is a, c, g, or t

SEQ ID NO: 105214 - DNA, 569 bp, Homo Sapiens; identical to SEQ ID NO: 69058

SEQ ID NO: 105215 - DNA, 1558 bp, Homo Sapiens; identical to SEQ ID NO: 69059
  misc_feature (1238)..(1246): n is a, c, g, or t
  misc_feature (1366)..(1366): n is a, c, g, or t
  misc_feature (1371)..(1371): n is a, c, g, or t
  misc_feature (1373)..(1376): n is a, c, g, or t
  misc_feature (1379)..(1379): n is a, c, g, or t
  misc_feature (1381)..(1385): n is a, c, g, or t
  misc_feature (1391)..(1391): n is a, c, g, or t

SEQ ID NO: 105216 - DNA, 717 bp, Homo Sapiens; identical to SEQ ID NO: 69065

SEQ ID NO: 105217 - DNA, 442 bp, Homo Sapiens; identical to SEQ ID NO: 69066
  misc_feature (31)..(31): n is a, c, g, or t
  misc_feature (299)..(299): n is a, c, g, or t
  misc_feature (304)..(304): n is a, c, g, or t
  misc_feature (420)..(420): n is a, c, g, or t

SEQ ID NO: 105218 - DNA, 1038 bp, Homo Sapiens; identical to SEQ ID NO: 69067
  misc_feature (181)..(181): n is a, c, g, or t
  misc_feature (190)..(190): n is a, c, g, or t
  misc_feature (233)..(233): n is a, c, g, or t

SEQ ID NO: 105219 - DNA, 1350 bp, Homo Sapiens; identical to SEQ ID NO: 69068
  misc_feature (1195)..(1195): n is a, c, g, or t
  misc_feature (1305)..(1305): n is a, c, g, or t
  misc_feature (1322)..(1322): n is a, c, g, or t

SEQ ID NO: 105220 - DNA, 902 bp, Homo Sapiens; identical to SEQ ID NO: 69069

SEQ ID NO: 105221 - DNA, 941 bp, Homo Sapiens; identical to SEQ ID NO: 69074
  misc_feature (337)..(394): n is a, c, g, or t
  misc_feature (399)..(448): n is a, c, g, or t
  misc_feature (609)..(686): n is a, c, g, or t

SEQ ID NO: 105222 - DNA, 941 bp, Homo Sapiens; identical to SEQ ID NO: 69075
  misc_feature (250)..(327): n is a, c, g, or t
  misc_feature (494)..(537): n is a, c, g, or t
  misc_feature (542)..(564): n is a, c, g, or t

SEQ ID NO: 105223 - DNA, 470 bp, Homo Sapiens; identical to SEQ ID NO: 69076
  misc_feature (137)..(214): n is a, c, g, or t

SEQ ID NO: 105224 - DNA, 611 bp, Homo Sapiens; identical to SEQ ID NO: 69083

SEQ ID NO: 105225 - DNA, 1546 bp, Homo Sapiens; identical to SEQ ID NO: 69084
  misc_feature (122)..(131): n is a, c, g, or t

SEQ ID NO: 105226 - DNA, 679 bp, Homo Sapiens; identical to SEQ ID NO: 69086

SEQ ID NO: 105227 - DNA, 729 bp, Homo Sapiens; identical to SEQ ID NO: 69087

SEQ ID NO: 105228 - DNA, 999 bp, Homo Sapiens; identical to SEQ ID NO: 69090

SEQ ID NO: 105229 - DNA, 2231 bp, Homo Sapiens; identical to SEQ ID NO: 69091

SEQ ID NO: 105230 - DNA, 584 bp, Homo Sapiens; identical to SEQ ID NO: 69092

SEQ ID NO: 105231 - DNA, 2259 bp, Homo Sapiens; identical to SEQ ID NO: 69093

SEQ ID NO: 105232 - DNA, 951 bp, Homo Sapiens; identical to SEQ ID NO: 69094
  misc_feature (729)..(729): n is a, c, g, or t
  misc_feature (756)..(757): n is a, c, g, or t
  misc_feature (767)..(767): n is a, c, g, or t
  misc_feature (837)..(837): n is a, c, g, or t

SEQ ID NO: 105233 - DNA, 4216 bp, Homo Sapiens; identical to SEQ ID NO: 69095
  misc_feature (70)..(125): n is a, c, g, or t
  misc_feature (1742)..(1756): n is a, c, g, or t
  misc_feature (2156)..(2165): n is a, c, g, or t
  misc_feature (3201)..(3215): n is a, c, g, or t
  misc_feature (3840)..(3840): n is a, c, g, or t
  misc_feature (3931)..(3931): n is a, c, g, or t
  misc_feature (3938)..(3938): n is a, c, g, or t
  misc_feature (3951)..(3951): n is a, c, g, or t
  misc_feature (3994)..(3994): n is a, c, g, or t
  misc_feature (4042)..(4042): n is a, c, g, or t
  misc_feature (4049)..(4049): n is a, c, g, or t
  misc_feature (4205)..(4205): n is a, c, g, or t

SEQ ID NO: 105234 - DNA, 1555 bp, Homo Sapiens; identical to SEQ ID NO: 69096

SEQ ID NO: 105235 - DNA, 1550 bp, Homo Sapiens; identical to SEQ ID NO: 69097
  misc_feature (1025)..(1151): n is a, c, g, or t
  misc_feature (1159)..(1174): n is a, c, g, or t
  misc_feature (1214)..(1268): n is a, c, g, or t
  misc_feature (1284)..(1379): n is a, c, g, or t
  misc_feature (1394)..(1404): n is a, c, g, or t

SEQ ID NO: 105236 - DNA, 1553 bp, Homo Sapiens; identical to SEQ ID NO: 69099
  misc_feature (47)..(81): n is a, c, g, or t
  misc_feature (409)..(461): n is a, c, g, or t
  misc_feature (839)..(861): n is a, c, g, or t

SEQ ID NO: 105237 - DNA, 1806 bp, Homo Sapiens; identical to SEQ ID NO: 69100
  misc_feature (1082)..(1106): n is a, c, g, or t
  misc_feature (1538)..(1745): n is a, c, g, or t

SEQ ID NO: 105238 - DNA, 1343 bp, Homo Sapiens; identical to SEQ ID NO: 69102
  misc_feature (60)..(92): n is a, c, g, or t
  misc_feature (358)..(379): n is a, c, g, or t
  misc_feature (419)..(439): n is a, c, g, or t
  misc_feature (649)..(711): n is a, c, g, or t
  misc_feature (1006)..(1104): n is a, c, g, or t

SEQ ID NO: 105239 - DNA, 987 bp, Homo Sapiens; identical to SEQ ID NO: 69103
  misc_feature (549)..(569): n is a, c, g, or t
  misc_feature (609)..(629): n is a, c, g, or t
  misc_feature (895)..(927): n is a, c, g, or t

SEQ ID NO: 105240 - DNA, 1103 bp, Homo Sapiens; identical to SEQ ID NO: 69106

SEQ ID NO: 105241 - DNA, 1994 bp, Homo Sapiens; identical to SEQ ID NO: 69107
  misc_feature (1554)..(1563): n is a, c, g, or t
  misc_feature (1870)..(1877): n is a, c, g, or t
  misc_feature (1879)..(1885): n is a, c, g, or t
  misc_feature (1887)..(1888): n is a, c, g, or t
  misc_feature (1891)..(1901): n is a, c, g, or t

SEQ ID NO: 105242 - DNA, 1446 bp, Homo Sapiens; identical to SEQ ID NO: 69108
  misc_feature (49)..(88): n is a, c, g, or t
  misc_feature (92)..(126): n is a, c, g, or t
  misc_feature (1270)..(1270): n is a, c, g, or t
  misc_feature (1280)..(1280): n is a, c, g, or t
  misc_feature (1283)..(1284): n is a, c, g, or t
  misc_feature (1286)..(1286): n is a, c, g, or t

SEQ ID NO: 105243 - DNA, 1504 bp, Homo Sapiens; identical to SEQ ID NO: 69109

SEQ ID NO: 105244 - DNA, 2413 bp, Homo Sapiens; identical to SEQ ID NO: 69110
  misc_feature (2278)..(2316): n is a, c, g, or t

SEQ ID NO: 105245 - DNA, 1066 bp, Homo Sapiens; identical to SEQ ID NO: 69111
  misc_feature (990)..(990): n is a, c, g, or t

SEQ ID NO: 105246 - DNA, 2295 bp, Homo Sapiens; identical to SEQ ID NO: 69117
  misc_feature (1868)..(1868): n is a, c, g, or t
  misc_feature (2239)..(2239): n is a, c, g, or t

SEQ ID NO: 105247 - DNA, 849 bp, Homo Sapiens; identical to SEQ ID NO: 69118

SEQ ID NO: 105248 - DNA, 673 bp, Homo Sapiens; identical to SEQ ID NO: 69121
  misc_feature (569)..(607): n is a, c, g, or t

SEQ ID NO: 105249 - DNA, 1042 bp, Homo Sapiens; identical to SEQ ID NO: 69122
  misc_feature (597)..(597): n is a, c, g, or t

SEQ ID NO: 105250 - DNA, 993 bp, Homo Sapiens; identical to SEQ ID NO: 69127
  misc_feature (42)..(82): n is a, c, g, or t
  misc_feature (86)..(120): n is a, c, g, or t

SEQ ID NO: 105251 - DNA, 1082 bp, Homo Sapiens; identical to SEQ ID NO: 69128
  misc_feature (888)..(892): n is a, c, g, or t
  misc_feature (894)..(905): n is a, c, g, or t
  misc_feature (907)..(912): n is a, c, g, or t
  misc_feature (914)..(915): n is a, c, g, or t
  misc_feature (954)..(954): n is a, c, g, or t

SEQ ID NO: 105252 - DNA, 692 bp, Homo Sapiens; identical to SEQ ID NO: 69131

SEQ ID NO: 105253 - DNA, 717 bp, Homo Sapiens; identical to SEQ ID NO: 69132

SEQ ID NO: 105254 - DNA, 1360 bp, Homo Sapiens; identical to SEQ ID NO: 69133

SEQ ID NO: 105255 - DNA, 1291 bp, Homo Sapiens; identical to SEQ ID NO: 69135

SEQ ID NO: 105256 - DNA, 864 bp, Homo Sapiens; identical to SEQ ID NO: 69136

SEQ ID NO: 105257 - DNA, 723 bp, Homo Sapiens; identical to SEQ ID NO: 69140
  misc_feature (183)..(242): n is a, c, g, or t
  misc_feature (272)..(272): n is a, c, g, or t
  misc_feature (358)..(358): n is a, c, g, or t
  misc_feature (630)..(645): n is a, c, g, or t

SEQ ID NO: 105258 - DNA, 983 bp, Homo Sapiens; identical to SEQ ID NO: 69141
  misc_feature (29)..(29): n is a, c, g, or t
  misc_feature (668)..(668): n is a, c, g, or t
  misc_feature (799)..(880): n is a, c, g, or t

SEQ ID NO: 105259 - DNA, 703 bp, Homo Sapiens; identical to SEQ ID NO: 69144
  misc_feature (87)..(87): n is a, c, g, or t
  misc_feature (418)..(472): n is a, c, g, or t

SEQ ID NO: 105260 - DNA, 1630 bp, Homo Sapiens; identical to SEQ ID NO: 69145

SEQ ID NO: 105261 - DNA, 2834 bp, Homo Sapiens; identical to SEQ ID NO: 69149
  misc_feature (1856)..(1939): n is a, c, g, or t
  misc_feature (2087)..(2236): n is a, c, g, or t
  misc_feature (2471)..(2479): n is a, c, g, or t

SEQ ID NO: 105262 - DNA, 391 bp, Homo Sapiens; identical to SEQ ID NO: 69150

SEQ ID NO: 105263 - DNA, 1128 bp, Homo Sapiens; identical to SEQ ID NO: 69155
  misc_feature (63)..(63): n is a, c, g, or t
  misc_feature (466)..(525): n is a, c, g, or t

SEQ ID NO: 105264 - DNA, 365 bp, Homo Sapiens; identical to SEQ ID NO: 69156

SEQ ID NO: 105265 - DNA, 2510 bp, Homo Sapiens; identical to SEQ ID NO: 69160
  misc_feature (1965)..(2030): n is a, c, g, or t
  misc_feature (2057)..(2093): n is a, c, g, or t

SEQ ID NO: 105266 - DNA, 150 bp, Homo Sapiens; identical to SEQ ID NO: 69161

SEQ ID NO: 105267 - DNA, 1529 bp, Homo Sapiens; identical to SEQ ID NO: 69162
  misc_feature (522)..(522): n is a, c, g, or t
  misc_feature (1381)..(1381): n is a, c, g, or t

SEQ ID NO: 105268 - DNA, 2066 bp, Homo Sapiens; identical to SEQ ID NO: 69165
  misc_feature (1701)..(1762): n is a, c, g, or t

SEQ ID NO: 105269 - DNA, 1112 bp, Homo Sapiens; identical to SEQ ID NO: 69166
  misc_feature (103)..(103): n is a, c, g, or t
  misc_feature (175)..(175): n is a, c, g, or t
  misc_feature (226)..(226): n is a, c, g, or t
  misc_feature (421)..(421): n is a, c, g, or t
  misc_feature (701)..(701): n is a, c, g, or t
  misc_feature (733)..(790): n is a, c, g, or t
  misc_feature (1019)..(1037): n is a, c, g, or t

SEQ ID NO: 105270 - DNA, 743 bp, Homo Sapiens; identical to SEQ ID NO: 69167

SEQ ID NO: 105271 - DNA, 711 bp, Homo Sapiens; identical to SEQ ID NO: 69168
  misc_feature (502)..(511): n is a, c, g, or t

SEQ ID NO: 105272 - DNA, 1087 bp, Homo Sapiens; identical to SEQ ID NO: 69169
  misc_feature (46)..(46): n is a, c, g, or t
  misc_feature (333)..(333): n is a, c, g, or t

SEQ ID NO: 105273 - DNA, 761 bp, Homo Sapiens; identical to SEQ ID NO: 69170
  misc_feature (34)..(34): n is a, c, g, or t
  misc_feature (49)..(49): n is a, c, g, or t

SEQ ID NO: 105274 - DNA, 1224 bp, Homo Sapiens; identical to SEQ ID NO: 69172
  misc_feature (335)..(377): n is a, c, g, or t

SEQ ID NO: 105275 - DNA, 460 bp, Homo Sapiens; identical to SEQ ID NO: 69173
  misc_feature (341)..(341): n is a, c, g, or t

SEQ ID NO: 105276 - DNA, 436 bp, Homo Sapiens; identical to SEQ ID NO: 69174
  misc_feature (57)..(57): n is a, c, g, or t
  misc_feature (71)..(89): n is a, c, g, or t
  misc_feature (100)..(100): n is a, c, g, or t

SEQ ID NO: 105277 - DNA, 800 bp, Homo Sapiens; identical to SEQ ID NO: 69178
  misc_feature (111)..(124): n is a, c, g, or t
  misc_feature (134)..(245): n is a, c, g, or t
  misc_feature (247)..(258): n is a, c, g, or t
  misc_feature (524)..(586): n is a, c, g, or t

SEQ ID NO: 105278 - DNA, 2126 bp, Homo Sapiens; identical to SEQ ID NO: 69179
  misc_feature (1585)..(1610): n is a, c, g, or t
  misc_feature (1975)..(2003): n is a, c, g, or t

SEQ ID NO: 105279 - DNA, 637 bp, Homo Sapiens; identical to SEQ ID NO: 69180
  misc_feature (44)..(98): n is a, c, g, or t
  misc_feature (292)..(301): n is a, c, g, or t
  misc_feature (498)..(578): n is a, c, g, or t

SEQ ID NO: 105280 - DNA, 1057 bp, Homo Sapiens; identical to SEQ ID NO: 69181
  misc_feature (102)..(130): n is a, c, g, or t
  misc_feature (495)..(522): n is a, c, g, or t

SEQ ID NO: 105281 - DNA, 964 bp, Homo Sapiens; identical to SEQ ID NO: 69182

SEQ ID NO: 105282 - DNA, 986 bp, Homo Sapiens; identical to SEQ ID NO: 69183

SEQ ID NO: 105283 - DNA, 1078 bp, Homo Sapiens; identical to SEQ ID NO: 69184

SEQ ID NO: 105284 - DNA, 931 bp, Homo Sapiens; identical to SEQ ID NO: 69190
  misc_feature (236)..(236): n is a, c, g, or t

SEQ ID NO: 105285 - DNA, 863 bp, Homo Sapiens; identical to SEQ ID NO: 69191
  misc_feature (431)..(431): n is a, c, g, or t

SEQ ID NO: 105286 - DNA, 915 bp, Homo Sapiens; identical to SEQ ID NO: 69192
  misc_feature (790)..(799): n is a, c, g, or t
  misc_feature (801)..(806): n is a, c, g, or t
  misc_feature (812)..(814): n is a, c, g, or t
  misc_feature (816)..(816): n is a, c, g, or t
  misc_feature (818)..(818): n is a, c, g, or t
  misc_feature (890)..(890): n is a, c, g, or t

SEQ ID NO: 105287 - DNA, 816 bp, Homo Sapiens; identical to SEQ ID NO: 69193
  misc_feature (442)..(490): n is a, c, g, or t

SEQ ID NO: 105288 - DNA, 804 bp, Homo Sapiens; identical to SEQ ID NO: 69194
  misc_feature (180)..(228): n is a, c, g, or t
  misc_feature (236)..(278): n is a, c, g, or t
  misc_feature (710)..(713): n is a, c, g, or t
  misc_feature (716)..(718): n is a, c, g, or t
  misc_feature (720)..(720): n is a, c, g, or t
  misc_feature (723)..(723): n is a, c, g, or t
  misc_feature (726)..(728): n is a, c, g, or t
  misc_feature (755)..(756): n is a, c, g, or t
  misc_feature (758)..(758): n is a, c, g, or t

SEQ ID NO: 105289 - DNA, 1442 bp, Homo Sapiens; identical to SEQ ID NO: 69195
  misc_feature (1272)..(1325): n is a, c, g, or t

SEQ ID NO: 105290 - DNA, 367 bp, Homo Sapiens; identical to SEQ ID NO: 69196

SEQ ID NO: 105291 - DNA, 931 bp, Homo Sapiens; identical to SEQ ID NO: 69198
  misc_feature (879)..(888): n is a, c, g, or t

SEQ ID NO: 105292 - DNA, 606 bp, Homo Sapiens; identical to SEQ ID NO: 69199

SEQ ID NO: 105293 - DNA, 711 bp, Homo Sapiens; identical to SEQ ID NO: 69202
  misc_feature (690)..(690): n is a, c, g, or t

SEQ ID NO: 105294 - DNA, 782 bp, Homo Sapiens; identical to SEQ ID NO: 69203

SEQ ID NO: 105295 - DNA, 1180 bp, Homo Sapiens; identical to SEQ ID NO: 69204

SEQ ID NO: 105296 - DNA, 940 bp, Homo Sapiens; identical to SEQ ID NO: 69205
  misc_feature (38)..(38): n is a, c, g, or t
  misc_feature (82)..(116): n is a, c, g, or t

SEQ ID NO: 105297 - DNA, 1705 bp, Homo Sapiens; identical to SEQ ID NO: 69206
  misc_feature (112)..(112): n is a, c, g, or t
  misc_feature (118)..(118): n is a, c, g, or t
  misc_feature (181)..(181): n is a, c, g, or t
  misc_feature (194)..(195): n is a, c, g, or t
  misc_feature (197)..(197): n is a, c, g, or t

SEQ ID NO: 105298 - DNA, 1635 bp, Homo Sapiens; identical to SEQ ID NO: 69207
  misc_feature (36)..(36): n is a, c, g, or t
  misc_feature (44)..(44): n is a, c, g, or t
  misc_feature (65)..(116): n is a, c, g, or t
  misc_feature (120)..(154): n is a, c, g, or t

SEQ ID NO: 105299 - DNA, 1023 bp, Homo Sapiens; identical to SEQ ID NO: 69208
  misc_feature (802)..(810): n is a, c, g, or t
  misc_feature (812)..(812): n is a, c, g, or t

SEQ ID NO: 105300 - DNA, 920 bp, Homo Sapiens; identical to SEQ ID NO: 69209

SEQ ID NO: 105301 - DNA, 984 bp, Homo Sapiens; identical to SEQ ID NO: 69210
  misc_feature (58)..(272): n is a, c, g, or t
  misc_feature (276)..(276): n is a, c, g, or t
  misc_feature (284)..(284): n is a, c, g, or t

SEQ ID NO: 105302 - DNA, 489 bp, Homo Sapiens; identical to SEQ ID NO: 69215

SEQ ID NO: 105303 - DNA, 1242 bp, Homo Sapiens; identical to SEQ ID NO: 69216
  misc_feature (87)..(87): n is a, c, g, or t
  misc_feature (90)..(90): n is a, c, g, or t
  misc_feature (124)..(124): n is a, c, g, or t
  misc_feature (126)..(126): n is a, c, g, or t
  misc_feature (135)..(135): n is a, c, g, or t
  misc_feature (151)..(151): n is a, c, g, or t
  misc_feature (155)..(155): n is a, c, g, or t

SEQ ID NO: 105304 - DNA, 853 bp, Homo Sapiens; identical to SEQ ID NO: 69217

SEQ ID NO: 105305 - DNA, 960 bp, Homo Sapiens; identical to SEQ ID NO: 69218
  misc_feature (588)..(606): n is a, c, g, or t
  misc_feature (682)..(703): n is a, c, g, or t

SEQ ID NO: 105306 - DNA, 1074 bp, Homo Sapiens; identical to SEQ ID NO: 69219
  misc_feature (68)..(468): n is a, c, g, or t
  misc_feature (486)..(502): n is a, c, g, or t
  misc_feature (578)..(600): n is a, c, g, or t

SEQ ID NO: 105307 - DNA, 694 bp, Homo Sapiens; identical to SEQ ID NO: 69223
  misc_feature (87)..(87): n is a, c, g, or t

SEQ ID NO: 105308 - DNA, 1428 bp, Homo Sapiens; identical to SEQ ID NO: 69224

SEQ ID NO: 105309 - DNA, 1304 bp, Homo Sapiens; identical to SEQ ID NO: 69231
  misc_feature (51)..(63): n is a, c, g, or t
  misc_feature (1030)..(1134): n is a, c, g, or t

SEQ ID NO: 105310 - DNA, 446 bp, Homo Sapiens; identical to SEQ ID NO: 69232
  misc_feature (156)..(308): n is a, c, g, or t

SEQ ID NO: 105311 - DNA, 805 bp, Homo Sapiens; identical to SEQ ID NO: 69233
  misc_feature (60)..(60): n is a, c, g, or t
  misc_feature (206)..(216): n is a, c, g, or t

SEQ ID NO: 105312 - DNA, 338 bp, Homo Sapiens; identical to SEQ ID NO: 69234

SEQ ID NO: 105313 - DNA, 1777 bp, Homo Sapiens; identical to SEQ ID NO: 69235

SEQ ID NO: 105314 - DNA, 1023 bp, Homo Sapiens; identical to SEQ ID NO: 69237
  misc_feature (44)..(437): n is a, c, g, or t

SEQ ID NO: 105315 - DNA, 1858 bp, Homo Sapiens; identical to SEQ ID NO: 69238
  misc_feature (1181)..(1773): n is a, c, g, or t

SEQ ID NO: 105316 - DNA, 958 bp, Homo Sapiens; identical to SEQ ID NO: 69239
  misc_feature (84)..(118): n is a, c, g, or t

SEQ ID NO: 105317 - DNA, 1049 bp, Homo Sapiens; identical to SEQ ID NO: 69240
  misc_feature (933)..(967): n is a, c, g, or t
  misc_feature (970)..(1008): n is a, c, g, or t

SEQ ID NO: 105318 - DNA, 934 bp, Homo Sapiens; identical to SEQ ID NO: 69241
  misc_feature (760)..(760): n is a, c, g, or t

SEQ ID NO: 105319 - DNA, 1135 bp, Homo Sapiens; identical to SEQ ID NO: 69242
  misc_feature (75)..(94): n is a, c, g, or t
  misc_feature (173)..(223): n is a, c, g, or t
  misc_feature (456)..(481): n is a, c, g, or t
  misc_feature (526)..(896): n is a, c, g, or t
  misc_feature (919)..(919): n is a, c, g, or t

SEQ ID NO: 105320 - DNA, 1111 bp, Homo Sapiens; identical to SEQ ID NO: 69243
  misc_feature (561)..(578): n is a, c, g, or t
  misc_feature (625)..(862): n is a, c, g, or t

SEQ ID NO: 105321 - DNA, 1254 bp, Homo Sapiens; identical to SEQ ID NO: 69244
  misc_feature (757)..(827): n is a, c, g, or t
  misc_feature (1113)..(1201): n is a, c, g, or t

SEQ ID NO: 105322 - DNA, 837 bp, Homo Sapiens; identical to SEQ ID NO: 69245

SEQ ID NO: 105323 - DNA, 553 bp, Homo Sapiens; identical to SEQ ID NO: 69246

SEQ ID NO: 105324 - DNA, 1310 bp, Homo Sapiens; identical to SEQ ID NO: 69247
  misc_feature (23)..(23): n is a, c, g, or t
  misc_feature (1245)..(1265): n is a, c, g, or t

SEQ ID NO: 105325 - DNA, 1099 bp, Homo Sapiens; identical to SEQ ID NO: 69248
  misc_feature (61)..(87): n is a, c, g, or t
  misc_feature (110)..(130): n is a, c, g, or t
  misc_feature (251)..(917): n is a, c, g, or t
  misc_feature (1052)..(1052): n is a, c, g, or t
  misc_feature (1061)..(1061): n is a, c, g, or t

SEQ ID NO: 105326 - DNA, 1429 bp, Homo Sapiens; identical to SEQ ID NO: 69249
  misc_feature (152)..(172): n is a, c, g, or t
  misc_feature (783)..(783): n is a, c, g, or t
  misc_feature (1117)..(1155): n is a, c, g, or t

SEQ ID NO: 105327 - DNA, 227 bp, Homo Sapiens; identical to SEQ ID NO: 69250

SEQ ID NO: 105328 - DNA, 600 bp, Homo Sapiens; identical to SEQ ID NO: 69251

SEQ ID NO: 105329 - DNA, 1344 bp, Homo Sapiens; identical to SEQ ID NO: 69252

SEQ ID NO: 105330 - DNA, 648 bp, Homo Sapiens; identical to SEQ ID NO: 69253

SEQ ID NO: 105331 - DNA, 1479 bp, Homo Sapiens; identical to SEQ ID NO: 69254
  misc_feature (1285)..(1320): n is a, c, g, or t

SEQ ID NO: 105332 - DNA, 1211 bp, Homo Sapiens; identical to SEQ ID NO: 69255
  misc_feature (499)..(533): n is a, c, g, or t
  misc_feature (701)..(716): n is a, c, g, or t
  misc_feature (978)..(1041): n is a, c, g, or t

SEQ ID NO: 105333 - DNA, 121 bp, Homo Sapiens; identical to SEQ ID NO: 69256

SEQ ID NO: 105334 - DNA, 1218 bp, Homo Sapiens; identical to SEQ ID NO: 69257

SEQ ID NO: 105335 - DNA, 2890 bp, Homo Sapiens; identical to SEQ ID NO: 69258

SEQ ID NO: 105336 - DNA, 756 bp, Homo Sapiens; identical to SEQ ID NO: 69266
  misc_feature (16)..(16): n is a, c, g, or t
  misc_feature (24)..(24): n is a, c, g, or t
  misc_feature (507)..(539): n is a, c, g, or t

SEQ ID NO: 105337 - DNA, 549 bp, Homo Sapiens; identical to SEQ ID NO: 69267
  misc_feature (303)..(335): n is a, c, g, or t

SEQ ID NO: 105338 - DNA, 1034 bp, Homo Sapiens; identical to SEQ ID NO: 69268

SEQ ID NO: 105339 - DNA, 1926 bp, Homo Sapiens; identical to SEQ ID NO: 69269

SEQ ID NO: 105340 - DNA, 512 bp, Homo Sapiens; identical to SEQ ID NO: 69270

SEQ ID NO: 105341 - DNA, 1547 bp, Homo Sapiens; identical to SEQ ID NO: 69271
  misc_feature (81)..(117): n is a, c, g, or t
  misc_feature (907)..(907): n is a, c, g, or t
  misc_feature (1153)..(1168): n is a, c, g, or t
  misc_feature (1231)..(1334): n is a, c, g, or t

SEQ ID NO: 105342 - DNA, 893 bp, Homo Sapiens; identical to SEQ ID NO: 69272

SEQ ID NO: 105343 - DNA, 1394 bp, Homo Sapiens; identical to SEQ ID NO: 69273
  misc_feature (134)..(162): n is a, c, g, or t
  misc_feature (1084)..(1111): n is a, c, g, or t
  misc_feature (1176)..(1190): n is a, c, g, or t
  misc_feature (1313)..(1321): n is a, c, g, or t

SEQ ID NO: 105344 - DNA, 990 bp, Homo Sapiens; identical to SEQ ID NO: 69274
  misc_feature (129)..(129): n is a, c, g, or t
  misc_feature (152)..(152): n is a, c, g, or t
  misc_feature (155)..(155): n is a, c, g, or t
  misc_feature (211)..(211): n is a, c, g, or t
  misc_feature (278)..(278): n is a, c, g, or t
  misc_feature (301)..(301): n is a, c, g, or t
  misc_feature (316)..(316): n is a, c, g, or t
  misc_feature (670)..(697): n is a, c, g, or t
  misc_feature (762)..(776): n is a, c, g, or t
  misc_feature (899)..(907): n is a, c, g, or t

SEQ ID NO: 105345 - DNA, 636 bp, Homo Sapiens; identical to SEQ ID NO: 69282

SEQ ID NO: 105346 - DNA, 1320 bp, Homo Sapiens; identical to SEQ ID NO: 69283
  misc_feature (68)..(142): n is a, c, g, or t
  misc_feature (260)..(315): n is a, c, g, or t
  misc_feature (1144)..(1203): n is a, c, g, or t

SEQ ID NO: 105347 - DNA, 352 bp, Homo Sapiens; identical to SEQ ID NO: 69284

SEQ ID NO: 105348 - DNA, 866 bp, Homo Sapiens; identical to SEQ ID NO: 69287

SEQ ID NO: 105349 - DNA, 1296 bp, Homo Sapiens; identical to SEQ ID NO: 69288
  misc_feature (54)..(101): n is a, c, g, or t
  misc_feature (189)..(249): n is a, c, g, or t

SEQ ID NO: 105350 - DNA, 1743 bp, Homo Sapiens; identical to SEQ ID NO: 69294

SEQ ID NO: 105351 - DNA, 992 bp, Homo Sapiens; identical to SEQ ID NO: 69295

SEQ ID NO: 105352 - DNA, 685 bp, Homo Sapiens; identical to SEQ ID NO: 69296

SEQ ID NO: 105353 - DNA, 1151 bp, Homo Sapiens; identical to SEQ ID NO: 69297
  misc_feature (23)..(23): n is a, c, g, or t
  misc_feature (65)..(67): n is a, c, g, or t
  misc_feature (74)..(74): n is a, c, g, or t
  misc_feature (85)..(85): n is a, c, g, or t
  misc_feature (96)..(96): n is a, c, g, or t
  misc_feature (106)..(106): n is a, c, g, or t
  misc_feature (110)..(110): n is a, c, g, or t
  misc_feature (115)..(115): n is a, c, g, or t
  misc_feature (119)..(119): n is a, c, g, or t
  misc_feature (136)..(136): n is a, c, g, or t
  misc_feature (157)..(157): n is a, c, g, or t
  misc_feature (169)..(169): n is a, c, g, or t
  misc_feature (172)..(172): n is a, c, g, or t
  misc_feature (174)..(174): n is a, c, g, or t
  misc_feature (226)..(227): n is a, c, g, or t

SEQ ID NO: 105354 - DNA, 1307 bp, Homo Sapiens; identical to SEQ ID NO: 69298
  misc_feature (659)..(667): n is a, c, g, or t
  misc_feature (725)..(774): n is a, c, g, or t
  misc_feature (910)..(935): n is a, c, g, or t
  misc_feature (1080)..(1094): n is a, c, g, or t
  misc_feature (1127)..(1136): n is a, c, g, or t

SEQ ID NO: 105355 - DNA, 617 bp, Homo Sapiens; identical to SEQ ID NO: 69299

SEQ ID NO: 105356 - DNA, 1018 bp, Homo Sapiens; identical to SEQ ID NO: 69301

SEQ ID NO: 105357 - DNA, 2416 bp, Homo Sapiens; identical to SEQ ID NO: 69302
  misc_feature (1538)..(1538): n is a, c, g, or t

SEQ ID NO: 105358 - DNA, 1727 bp, Homo Sapiens; identical to SEQ ID NO: 69305

SEQ ID NO: 105359 - DNA, 1433 bp, Homo Sapiens; identical to SEQ ID NO: 69306

SEQ ID NO: 105360 - DNA, 583 bp, Homo Sapiens; identical to SEQ ID NO: 69307

SEQ ID NO: 105361 - DNA, 611 bp, Homo Sapiens; identical to SEQ ID NO: 69308

SEQ ID NO: 105362 - DNA, 1028 bp, Homo Sapiens; identical to SEQ ID NO: 69309
  misc_feature (186)..(199): n is a, c, g, or t
  misc_feature (624)..(634): n is a, c, g, or t

SEQ ID NO: 105363 - DNA, 979 bp, Homo Sapiens; identical to SEQ ID NO: 69310
  misc_feature (313)..(323): n is a, c, g, or t
  misc_feature (748)..(761): n is a, c, g, or t

SEQ ID NO: 105364 - DNA, 2006 bp, Homo Sapiens; identical to SEQ ID NO: 69314
  misc_feature (1526)..(1604): n is a, c, g, or t

SEQ ID NO: 105365 - DNA, 1070 bp, Homo Sapiens; identical to SEQ ID NO: 69315
  misc_feature (561)..(561): n is a, c, g, or t
  misc_feature (568)..(568): n is a, c, g, or t
  misc_feature (617)..(617): n is a, c, g, or t

SEQ ID NO: 105366 - DNA, 740 bp, Homo Sapiens; identical to SEQ ID NO: 69316
  misc_feature (57)..(69): n is a, c, g, or t
  misc_feature (249)..(539): n is a, c, g, or t
  misc_feature (625)..(685): n is a, c, g, or t

SEQ ID NO: 105367 - DNA, 685 bp, Homo Sapiens; identical to SEQ ID NO: 69317
  misc_feature (86)..(146): n is a, c, g, or t
  misc_feature (574)..(598): n is a, c, g, or t

SEQ ID NO: 105368 - DNA, 682 bp, Homo Sapiens; identical to SEQ ID NO: 69323

SEQ ID NO: 105369 - DNA, 2049 bp, Homo Sapiens; identical to SEQ ID NO: 69324
  misc_feature (300)..(435): n is a, c, g, or t
  misc_feature (961)..(969): n is a, c, g, or t

SEQ ID NO: 105370 - DNA, 518 bp, Homo Sapiens; identical to SEQ ID NO: 69325
  misc_feature (11)..(11): n is a, c, g, or t
  misc_feature (28)..(28): n is a, c, g, or t

SEQ ID NO: 105371 - DNA, 496 bp, Homo Sapiens; identical to SEQ ID NO: 69326
  misc_feature (56)..(56): n is a, c, g, or t
  misc_feature (271)..(271): n is a, c, g, or t
  misc_feature (331)..(331): n is a, c, g, or t
  misc_feature (386)..(386): n is a, c, g, or t
  misc_feature (402)..(402): n is a, c, g, or t
  misc_feature (439)..(439): n is a, c, g, or t
  misc_feature (457)..(457): n is a, c, g, or t
  misc_feature (472)..(472): n is a, c, g, or t

SEQ ID NO: 105372 - DNA, 1806 bp, Homo Sapiens; identical to SEQ ID NO: 69327
  misc_feature (569)..(578): n is a, c, g, or t
  misc_feature (851)..(864): n is a, c, g, or t
  misc_feature (872)..(914): n is a, c, g, or t
  misc_feature (1053)..(1327): n is a, c, g, or t
  misc_feature (1609)..(1609): n is a, c, g, or t
  misc_feature (1780)..(1780): n is a, c, g, or t

SEQ ID NO: 105373 - DNA, 1037 bp, Homo Sapiens; identical to SEQ ID NO: 69328
  misc_feature (41)..(41): n is a, c, g, or t
  misc_feature (84)..(85): n is a, c, g, or t
  misc_feature (107)..(107): n is a, c, g, or t
  misc_feature (123)..(123): n is a, c, g, or t
  misc_feature (252)..(252): n is a, c, g, or t
  misc_feature (294)..(294): n is a, c, g, or t

SEQ ID NO: 105374 - DNA, 1036 bp, Homo Sapiens; identical to SEQ ID NO: 69329

SEQ ID NO: 105375 - DNA, 519 bp, Homo Sapiens; identical to SEQ ID NO: 69330

SEQ ID NO: 105376 - DNA, 690 bp, Homo Sapiens; identical to SEQ ID NO: 69336
  misc_feature (276)..(372): n is a, c, g, or t

SEQ ID NO: 105377 - DNA, 647 bp, Homo Sapiens; identical to SEQ ID NO: 69337
  misc_feature (233)..(329): n is a, c, g, or t

SEQ ID NO: 105378 - DNA, 1017 bp, Homo Sapiens; identical to SEQ ID NO: 69338

SEQ ID NO: 105379 - DNA, 1630 bp, Homo Sapiens; identical to SEQ ID NO: 69339
  misc_feature (52)..(93): n is a, c, g, or t
  misc_feature (97)..(131): n is a, c, g, or t

SEQ ID NO: 105380 - DNA, 1174 bp, Homo Sapiens; identical to SEQ ID NO: 69340
  misc_feature (64)..(65): n is a, c, g, or t
  misc_feature (822)..(836): n is a, c, g, or t
  misc_feature (1034)..(1045): n is a, c, g, or t

SEQ ID NO: 105381 - DNA, 645 bp, Homo Sapiens; identical to SEQ ID NO: 69341
  misc_feature (590)..(603): n is a, c, g, or t

SEQ ID NO: 105382 - DNA, 1013 bp, Homo Sapiens; identical to SEQ ID NO: 69342
  misc_feature (33)..(33): n is a, c, g, or t
  misc_feature (55)..(55): n is a, c, g, or t
  misc_feature (71)..(71): n is a, c, g, or t
  misc_feature (93)..(93): n is a, c, g, or t
  misc_feature (116)..(116): n is a, c, g, or t
  misc_feature (121)..(121): n is a, c, g, or t
  misc_feature (149)..(149): n is a, c, g, or t
  misc_feature (171)..(171): n is a, c, g, or t
  misc_feature (207)..(207): n is a, c, g, or t
  misc_feature (234)..(234): n is a, c, g, or t
  misc_feature (258)..(258): n is a, c, g, or t
  misc_feature (370)..(370): n is a, c, g, or t
  misc_feature (528)..(528): n is a, c, g, or t
  misc_feature (827)..(827): n is a, c, g, or t

SEQ ID NO: 105383 - DNA, 1036 bp, Homo Sapiens; identical to SEQ ID NO: 69343
  misc_feature (100)..(100): n is a, c, g, or t
  misc_feature (482)..(509): n is a, c, g, or t
  misc_feature (707)..(720): n is a, c, g, or t
  misc_feature (850)..(861): n is a, c, g, or t
  misc_feature (946)..(958): n is a, c, g, or t

SEQ ID NO: 105384 - DNA, 1542 bp, Homo Sapiens; identical to SEQ ID NO: 69344
  misc_feature (216)..(229): n is a, c, g, or t

SEQ ID NO: 105385 - DNA, 832 bp, Homo Sapiens; identical to SEQ ID NO: 69345

SEQ ID NO: 105386 - DNA, 857 bp, Homo Sapiens; identical to SEQ ID NO: 69347
  misc_feature (141)..(141): n is a, c, g, or t

SEQ ID NO: 105387 - DNA, 816 bp, Homo Sapiens; identical to SEQ ID NO: 69348

SEQ ID NO: 105388 - DNA, 963 bp, Homo Sapiens; identical to SEQ ID NO: 69352

SEQ ID NO: 105389 - DNA, 1483 bp, Homo Sapiens; identical to SEQ ID NO: 69353

SEQ ID NO: 105390 - DNA, 1001 bp, Homo Sapiens; identical to SEQ ID NO: 69354

SEQ ID NO: 105391 - DNA, 1564 bp, Homo Sapiens; identical to SEQ ID NO: 69356
  misc_feature (365)..(393): n is a, c, g, or t
  misc_feature (473)..(487): n is a, c, g, or t

SEQ ID NO: 105392 - DNA, 373 bp, Homo Sapiens; identical to SEQ ID NO: 69357
  misc_feature (157)..(157): n is a, c, g, or t
  misc_feature (293)..(327): n is a, c, g, or t

SEQ ID NO: 105393 - DNA, 465 bp, Homo Sapiens; identical to SEQ ID NO: 69358
  misc_feature (363)..(398): n is a, c, g, or t

SEQ ID NO: 105394 - DNA, 1052 bp, Homo Sapiens; identical to SEQ ID NO: 69362

SEQ ID NO: 105395 - DNA, 882 bp, Homo Sapiens; identical to SEQ ID NO: 69363

SEQ ID NO: 105396 - DNA, 1507 bp, Homo Sapiens; identical to SEQ ID NO: 69364

SEQ ID NO: 105397 - DNA, 962 bp, Homo Sapiens; identical to SEQ ID NO: 69365

SEQ ID NO: 105398 - DNA, 635 bp, Homo Sapiens; identical to SEQ ID NO: 69370
  misc_feature (85)..(108): n is a, c, g, or t

SEQ ID NO: 105399 - DNA, 2713 bp, Homo Sapiens; identical to SEQ ID NO: 69371
  misc_feature (350)..(359): n is a, c, g, or t
  misc_feature (361)..(370): n is a, c, g, or t
  misc_feature (373)..(374): n is a, c, g, or t
  misc_feature (466)..(489): n is a, c, g, or t
  misc_feature (984)..(1048): n is a, c, g, or t
  misc_feature (1819)..(1876): n is a, c, g, or t

SEQ ID NO: 105400 - DNA, 1258 bp, Homo Sapiens; identical to SEQ ID NO: 69372
  misc_feature (602)..(672): n is a, c, g, or t
  misc_feature (831)..(851): n is a, c, g, or t
  misc_feature (1157)..(1180): n is a, c, g, or t

SEQ ID NO: 105401 - DNA, 1332 bp, Homo Sapiens; identical to SEQ ID NO: 69385
  misc_feature (1007)..(1068): n is a, c, g, or t

SEQ ID NO: 105402 - DNA, 1095 bp, Homo Sapiens; identical to SEQ ID NO: 69386

SEQ ID NO: 105403 - DNA, 1493 bp, Homo Sapiens; identical to SEQ ID NO: 69389
  misc_feature (174)..(174): n is a, c, g, or t
  misc_feature (535)..(545): n is a, c, g, or t
  misc_feature (807)..(922): n is a, c, g, or t
  misc_feature (1365)..(1430): n is a, c, g, or t

SEQ ID NO: 105404 - DNA, 785 bp, Homo Sapiens; identical to SEQ ID NO: 69390
  misc_feature (534)..(550): n is a, c, g, or t
  misc_feature (597)..(667): n is a, c, g, or t
  misc_feature (681)..(689): n is a, c, g, or t

SEQ ID NO: 105405 - DNA, 1134 bp, Homo Sapiens; identical to SEQ ID NO: 69395
  misc_feature (36)..(36): n is a, c, g, or t
  misc_feature (55)..(55): n is a, c, g, or t
  misc_feature (80)..(114): n is a, c, g, or t

SEQ ID NO: 105406 - DNA, 850 bp, Homo Sapiens; identical to SEQ ID NO: 69396
  misc_feature (553)..(553): n is a, c, g, or t
  misc_feature (578)..(578): n is a, c, g, or t

SEQ ID NO: 105407 - DNA, 1211 bp, Homo Sapiens; identical to SEQ ID NO: 69397
  misc_feature (89)..(113): n is a, c, g, or t
  misc_feature (657)..(676): n is a, c, g, or t
  misc_feature (1061)..(1125): n is a, c, g, or t

SEQ ID NO: 105408 - DNA, 1621 bp, Homo Sapiens; identical to SEQ ID NO: 69398
  misc_feature (1079)..(1092): n is a, c, g, or t

SEQ ID NO: 105409 - DNA, 1008 bp, Homo Sapiens; identical to SEQ ID NO: 69400
  misc_feature (43)..(77): n is a, c, g, or t
  misc_feature (859)..(859): n is a, c, g, or t
  misc_feature (870)..(870): n is a, c, g, or t
  misc_feature (880)..(880): n is a, c, g, or t

SEQ ID NO: 105410 - DNA, 1739 bp, Homo Sapiens; identical to SEQ ID NO: 69401
  misc_feature (517)..(517): n is a, c, g, or t
  misc_feature (1219)..(1227): n is a, c, g, or t

SEQ ID NO: 105411 - DNA, 661 bp, Homo Sapiens; identical to SEQ ID NO: 69402
  misc_feature (94)..(94): n is a, c, g, or t
  misc_feature (101)..(101): n is a, c, g, or t
  misc_feature (136)..(136): n is a, c, g, or t
  misc_feature (146)..(146): n is a, c, g, or t

SEQ ID NO: 105412 - DNA, 1450 bp, Homo Sapiens; identical to SEQ ID NO: 69403
  misc_feature (860)..(870): n is a, c, g, or t
  misc_feature (1295)..(1295): n is a, c, g, or t
  misc_feature (1409)..(1409): n is a, c, g, or t

SEQ ID NO: 105413 - DNA, 1210 bp, Homo Sapiens; identical to SEQ ID NO: 69404
  misc_feature (113)..(134): n is a, c, g, or t
  misc_feature (205)..(213): n is a, c, g, or t
  misc_feature (402)..(436): n is a, c, g, or t

SEQ ID NO: 105414 - DNA, 445 bp, Homo Sapiens; identical to SEQ ID NO: 69405

SEQ ID NO: 105415 - DNA, 549 bp, Homo Sapiens; identical to SEQ ID NO: 69406

SEQ ID NO: 105416 - DNA, 1356 bp, Homo Sapiens; identical to SEQ ID NO: 69407
  misc_feature (793)..(793): n is a, c, g, or t
  misc_feature (835)..(835): n is a, c, g, or t
  misc_feature (1279)..(1296): n is a, c, g, or t

SEQ ID NO: 105417 - DNA, 987 bp, Homo Sapiens; identical to SEQ ID NO: 69418

SEQ ID NO: 105418 - DNA, 2352 bp, Homo Sapiens; identical to SEQ ID NO: 69419

SEQ ID NO: 105419 - DNA, 371 bp, Homo Sapiens; identical to SEQ ID NO: 69420

SEQ ID NO: 105420 - DNA, 1001 bp, Homo Sapiens; identical to SEQ ID NO: 69421
  misc_feature (166)..(166): n is a, c, g, or t
  misc_feature (593)..(633): n is a, c, g, or t

SEQ ID NO: 105421 - DNA, 1765 bp, Homo Sapiens; identical to SEQ ID NO: 69422
  misc_feature (39)..(39): n is a, c, g, or t
  misc_feature (87)..(87): n is a, c, g, or t
  misc_feature (179)..(386): n is a, c, g, or t
  misc_feature (1698)..(1711): n is a, c, g, or t

SEQ ID NO: 105422 - DNA, 1031 bp, Homo Sapiens; identical to SEQ ID NO: 69423
  misc_feature (18)..(18): n is a, c, g, or t
  misc_feature (26)..(26): n is a, c, g, or t
  misc_feature (81)..(81): n is a, c, g, or t
  misc_feature (122)..(122): n is a, c, g, or t
  misc_feature (137)..(137): n is a, c, g, or t
  misc_feature (191)..(191): n is a, c, g, or t
  misc_feature (204)..(204): n is a, c, g, or t
  misc_feature (208)..(208): n is a, c, g, or t
  misc_feature (267)..(267): n is a, c, g, or t
  misc_feature (448)..(448): n is a, c, g, or t
  misc_feature (521)..(568): n is a, c, g, or t
  misc_feature (961)..(974): n is a, c, g, or t

SEQ ID NO: 105423 - DNA, 895 bp, Homo Sapiens; identical to SEQ ID NO: 69426

SEQ ID NO: 105424 - DNA, 2037 bp, Homo Sapiens; identical to SEQ ID NO: 69427
  misc_feature (780)..(798): n is a, c, g, or t
  misc_feature (1276)..(1309): n is a, c, g, or t

SEQ ID NO: 105425 - DNA, 1399 bp, Homo Sapiens; identical to SEQ ID NO: 69432

SEQ ID NO: 105426 - DNA, 1156 bp, Homo Sapiens; identical to SEQ ID NO: 69433

SEQ ID NO: 105427 - DNA, 754 bp, Homo Sapiens; identical to SEQ ID NO: 69434
  misc_feature (667)..(685): n is a, c, g, or t
  misc_feature (690)..(690): n is a, c, g, or t

SEQ ID NO: 105428 - DNA, 1177 bp, Homo Sapiens; identical to SEQ ID NO: 69435
  misc_feature (998)..(998): n is a, c, g, or t

SEQ ID NO: 105429 - DNA, 749 bp, Homo Sapiens; identical to SEQ ID NO: 69440

SEQ ID NO: 105430 - DNA, 1233 bp, Homo Sapiens; identical to SEQ ID NO: 69441

SEQ ID NO: 105431 - DNA, 968 bp, Homo Sapiens; identical to SEQ ID NO: 69442
  misc_feature (739)..(739): n is a, c, g, or t

SEQ ID NO: 105432 - DNA, 1048 bp, Homo Sapiens; identical to SEQ ID NO: 69443
  misc_feature (976)..(986): n is a, c, g, or t

SEQ ID NO: 105433 - DNA, 830 bp, Homo Sapiens; identical to SEQ ID NO: 69444

SEQ ID NO: 105434 - DNA, 2529 bp, Homo Sapiens; identical to SEQ ID NO: 69445

SEQ ID NO: 105435 - DNA, 540 bp, Homo Sapiens; identical to SEQ ID NO: 69446

SEQ ID NO: 105436 - DNA, 504 bp, Homo Sapiens; identical to SEQ ID NO: 69447

SEQ ID NO: 105437 - DNA, 714 bp, Homo Sapiens; identical to SEQ ID NO: 69448

SEQ ID NO: 105438 - DNA, 989 bp, Homo Sapiens; identical to SEQ ID NO: 69449
  misc_feature (812)..(812): n is a, c, g, or t
  misc_feature (814)..(814): n is a, c, g, or t
  misc_feature (907)..(907): n is a, c, g, or t
  misc_feature (962)..(962): n is a, c, g, or t

SEQ ID NO: 105439 - DNA, 1041 bp, Homo Sapiens; identical to SEQ ID NO: 69450
  misc_feature (87)..(87): n is a, c, g, or t
  misc_feature (89)..(89): n is a, c, g, or t
  misc_feature (202)..(463): n is a, c, g, or t
  misc_feature (511)..(528): n is a, c, g, or t

SEQ ID NO: 105440 - DNA, 1418 bp, Homo Sapiens; identical to SEQ ID NO: 69451

SEQ ID NO: 105441 - DNA, 1828 bp, Homo Sapiens; identical to SEQ ID NO: 69457
  misc_feature (295)..(374): n is a, c, g, or t

SEQ ID NO: 105442 - DNA, 445 bp, Homo Sapiens; identical to SEQ ID NO: 69458
  misc_feature (14)..(14): n is a, c, g, or t
  misc_feature (25)..(25): n is a, c, g, or t
  misc_feature (31)..(31): n is a, c, g, or t
  misc_feature (67)..(67): n is a, c, g, or t
  misc_feature (78)..(78): n is a, c, g, or t
  misc_feature (129)..(129): n is a, c, g, or t
  misc_feature (322)..(322): n is a, c, g, or t
  misc_feature (379)..(379): n is a, c, g, or t
  misc_feature (382)..(382): n is a, c, g, or t

SEQ ID NO: 105443 - DNA, 850 bp, Homo Sapiens; identical to SEQ ID NO: 69459

SEQ ID NO: 105444 - DNA, 810 bp, Homo Sapiens; identical to SEQ ID NO: 69460
  misc_feature (44)..(85): n is a, c, g, or t
  misc_feature (89)..(123): n is a, c, g, or t
  misc_feature (499)..(499): n is a, c, g, or t

SEQ ID NO: 105445 - DNA, 779 bp, Homo Sapiens; identical to SEQ ID NO: 69461
  misc_feature (91)..(125): n is a, c, g, or t

SEQ ID NO: 105446 - DNA, 2081 bp, Homo Sapiens; identical to SEQ ID NO: 69462
  misc_feature (1381)..(1448): n is a, c, g, or t
  misc_feature (1620)..(1650): n is a, c, g, or t

SEQ ID NO: 105447 - DNA, 1309 bp, Homo Sapiens; identical to SEQ ID NO: 69474
  misc_feature (586)..(605): n is a, c, g, or t
  misc_feature (941)..(962): n is a, c, g, or t

SEQ ID NO: 105448 - DNA, 1039 bp, Homo Sapiens; identical to SEQ ID NO: 69475
  misc_feature (32)..(32): n is a, c, g, or t
  misc_feature (39)..(40): n is a, c, g, or t

SEQ ID NO: 105449 - DNA, 1593 bp, Homo Sapiens; identical to SEQ ID NO: 69478
  misc_feature (76)..(110): n is a, c, g, or t
  misc_feature (1071)..(1071): n is a, c, g, or t

SEQ ID NO: 105450 - DNA, 1855 bp, Homo Sapiens; identical to SEQ ID NO: 69479
  misc_feature (1579)..(1579): n is a, c, g, or t

SEQ ID NO: 105451 - DNA, 1041 bp, Homo Sapiens; identical to SEQ ID NO: 69480

SEQ ID NO: 105452 - DNA, 1796 bp, Homo Sapiens; identical to SEQ ID NO: 69481
  misc_feature (1744)..(1762): n is a, c, g, or t
  misc_feature (1796)..(1796): n is a, c, g, or t

SEQ ID NO: 105453 - DNA, 665 bp, Homo Sapiens; identical to SEQ ID NO: 69483

SEQ ID NO: 105454 - DNA, 543 bp, Homo Sapiens; identical to SEQ ID NO: 69484

SEQ ID NO: 105455 - DNA, 541 bp, Homo Sapiens; identical to SEQ ID NO: 69485

SEQ ID NO: 105456 - DNA, 2186 bp, Homo Sapiens; identical to SEQ ID NO: 69488

SEQ ID NO: 105457 - DNA, 914 bp, Homo Sapiens; identical to SEQ ID NO: 69489

SEQ ID NO: 105458 - DNA, 577 bp, Homo Sapiens; identical to SEQ ID NO: 69490

SEQ ID NO: 105459 - DNA, 731 bp, Homo Sapiens; identical to SEQ ID NO: 69491

SEQ ID NO: 105460 - DNA, 1472 bp, Homo Sapiens; identical to SEQ ID NO: 69492
  misc_feature (789)..(807): n is a, c, g, or t
  misc_feature (858)..(1330): n is a, c, g, or t
  misc_feature (1347)..(1347): n is a, c, g, or t

SEQ ID NO: 105461 - DNA, 1315 bp, Homo Sapiens; identical to SEQ ID NO: 69493

SEQ ID NO: 105462 - DNA, 1104 bp, Homo Sapiens; identical to SEQ ID NO: 69494
  misc_feature (152)..(258): n is a, c, g, or t

SEQ ID NO: 105463 - DNA, 967 bp, Homo Sapiens; identical to SEQ ID NO: 69500
  misc_feature (87)..(87): n is a, c, g, or t
  misc_feature (124)..(602): n is a, c, g, or t
  misc_feature (832)..(842): n is a, c, g, or t

SEQ ID NO: 105464 - DNA, 1394 bp, Homo Sapiens; identical to SEQ ID NO: 69501

SEQ ID NO: 105465 - DNA, 581 bp, Homo Sapiens; identical to SEQ ID NO: 69504

SEQ ID NO: 105466 - DNA, 767 bp, Homo Sapiens; identical to SEQ ID NO: 69505
  misc_feature (87)..(121): n is a, c, g, or t

SEQ ID NO: 105467 - DNA, 785 bp, Homo Sapiens; identical to SEQ ID NO: 69506

SEQ ID NO: 105468 - DNA, 580 bp, Homo Sapiens; identical to SEQ ID NO: 69507
  misc_feature (461)..(461): n is a, c, g, or t
  misc_feature (491)..(491): n is a, c, g, or t
  misc_feature (520)..(520): n is a, c, g, or t
  misc_feature (544)..(544): n is a, c, g, or t
  misc_feature (561)..(561): n is a, c, g, or t

SEQ ID NO: 105469 - DNA, 1043 bp, Homo Sapiens; identical to SEQ ID NO: 69512
  misc_feature (69)..(70): n is a, c, g, or t
  misc_feature (188)..(188): n is a, c, g, or t
  misc_feature (199)..(199): n is a, c, g, or t
  misc_feature (249)..(250): n is a, c, g, or t
  misc_feature (253)..(371): n is a, c, g, or t
  misc_feature (410)..(410): n is a, c, g, or t

SEQ ID NO: 105470 - DNA, 1375 bp, Homo Sapiens; identical to SEQ ID NO: 69513
  misc_feature (65)..(99): n is a, c, g, or t
  misc_feature (916)..(955): n is a, c, g, or t

SEQ ID NO: 105471 - DNA, 775 bp, Homo Sapiens; identical to SEQ ID NO: 69514
  misc_feature (19)..(19): n is a, c, g, or t

SEQ ID NO: 105472 - DNA, 724 bp, Homo Sapiens; identical to SEQ ID NO: 69515
  misc_feature (544)..(602): n is a, c, g, or t
  misc_feature (646)..(675): n is a, c, g, or t

SEQ ID NO: 105473 - DNA, 984 bp, Homo Sapiens; identical to SEQ ID NO: 69517
  misc_feature (86)..(86): n is a, c, g, or t
  misc_feature (102)..(102): n is a, c, g, or t
  misc_feature (136)..(136): n is a, c, g, or t

SEQ ID NO: 105474 - DNA, 1067 bp, Homo Sapiens; identical to SEQ ID NO: 69518
  misc_feature (874)..(874): n is a, c, g, or t
  misc_feature (993)..(993): n is a, c, g, or t
  misc_feature (995)..(995): n is a, c, g, or t

SEQ ID NO: 105475 - DNA, 424 bp, Homo Sapiens; identical to SEQ ID NO: 69519

SEQ ID NO: 105476 - DNA, 1047 bp, Homo Sapiens; identical to SEQ ID NO: 69520

SEQ ID NO: 105477 - DNA, 555 bp, Homo Sapiens; identical to SEQ ID NO: 69523

SEQ ID NO: 105478 - DNA, 730 bp, Homo Sapiens; identical to SEQ ID NO: 69524

SEQ ID NO: 105479 - DNA, 380 bp, Homo Sapiens; identical to SEQ ID NO: 69526
  misc_feature (176)..(176): n is a, c, g, or t
  misc_feature (287)..(303): n is a, c, g, or t
  misc_feature (309)..(309): n is a, c, g, or t

SEQ ID NO: 105480 - DNA, 2116 bp, Homo Sapiens; identical to SEQ ID NO: 69527
  misc_feature (1875)..(1875): n is a, c, g, or t
  misc_feature (1960)..(2020): n is a, c, g, or t

SEQ ID NO: 105481 - DNA, 1900 bp, Homo Sapiens; identical to SEQ ID NO: 69529
  misc_feature (1646)..(1826): n is a, c, g, or t
  misc_feature (1830)..(1831): n is a, c, g, or t
  misc_feature (1833)..(1849): n is a, c, g, or t

SEQ ID NO: 105482 - DNA, 1097 bp, Homo Sapiens; identical to SEQ ID NO: 69530

SEQ ID NO: 105483 - DNA, 420 bp, Homo Sapiens; identical to SEQ ID NO: 69534

SEQ ID NO: 105484 - DNA, 4224 bp, Homo Sapiens; identical to SEQ ID NO: 69535

SEQ ID NO: 105485 - DNA, 1414 bp, Homo Sapiens; identical to SEQ ID NO: 69536
  misc_feature (420)..(436): n is a, c, g, or t
  misc_feature (1281)..(1304): n is a, c, g, or t

SEQ ID NO: 105486 - DNA, 403 bp, Homo Sapiens; identical to SEQ ID NO: 69537

SEQ ID NO: 105487 - DNA, 1520 bp, Homo Sapiens; identical to SEQ ID NO: 69539

SEQ ID NO: 105488 - DNA, 987 bp, Homo Sapiens; identical to SEQ ID NO: 69540

SEQ ID NO: 105489 - DNA, 811 bp, Homo Sapiens; identical to SEQ ID NO: 69543

SEQ ID NO: 105490 - DNA, 2066 bp, Homo Sapiens; identical to SEQ ID NO: 69544
  misc_feature (1165)..(1165): n is a, c, g, or t

SEQ ID NO: 105491 - DNA, 1156 bp, Homo Sapiens; identical to SEQ ID NO: 69545
  misc_feature (78)..(112): n is a, c, g, or t

SEQ ID NO: 105492 - DNA, 1082 bp, Homo Sapiens; identical to SEQ ID NO: 69546

SEQ ID NO: 105493 - DNA, 743 bp, Homo Sapiens; identical to SEQ ID NO: 69550
  misc_feature (56)..(74): n is a, c, g, or t

SEQ ID NO: 105494 - DNA, 923 bp, Homo Sapiens; identical to SEQ ID NO: 69551
  misc_feature (29)..(29): n is a, c, g, or t
  misc_feature (77)..(111): n is a, c, g, or t

SEQ ID NO: 105495 - DNA, 984 bp, Homo Sapiens; identical to SEQ ID NO: 69552

SEQ ID NO: 105496 - DNA, 1114 bp, Homo Sapiens; identical to SEQ ID NO: 69553
  misc_feature (89)..(98): n is a, c, g, or t
  misc_feature (129)..(141): n is a, c, g, or t
  misc_feature (241)..(241): n is a, c, g, or t

SEQ ID NO: 105497 - DNA, 1268 bp, Homo Sapiens; identical to SEQ ID NO: 69554

SEQ ID NO: 105498 - DNA, 1053 bp, Homo Sapiens; identical to SEQ ID NO: 69555

SEQ ID NO: 105499 - DNA, 1093 bp, Homo Sapiens; identical to SEQ ID NO: 69563

SEQ ID NO: 105500 - DNA, 932 bp, Homo Sapiens; identical to SEQ ID NO: 69564
  misc_feature (83)..(117): n is a, c, g, or t

SEQ ID NO: 105501 - DNA, 886 bp, Homo Sapiens; identical to SEQ ID NO: 69565
  misc_feature (78)..(112): n is a, c, g, or t
  misc_feature (765)..(774): n is a, c, g, or t
  misc_feature (776)..(781): n is a, c, g, or t
  misc_feature (786)..(790): n is a, c, g, or t
  misc_feature (792)..(792): n is a, c, g, or t
  misc_feature (796)..(796): n is a, c, g, or t
  misc_feature (798)..(799): n is a, c, g, or t
  misc_feature (801)..(801): n is a, c, g, or t
  misc_feature (805)..(805): n is a, c, g, or t

SEQ ID NO: 105502 - DNA, 1369 bp, Homo Sapiens; identical to SEQ ID NO: 69566
  misc_feature (1301)..(1301): n is a, c, g, or t

SEQ ID NO: 105503 - DNA, 902 bp, Homo Sapiens; identical to SEQ ID NO: 69567
  misc_feature (557)..(568): n is a, c, g, or t
  misc_feature (570)..(571): n is a, c, g, or t
  misc_feature (573)..(573): n is a, c, g, or t
  misc_feature (576)..(578): n is a, c, g, or t
  misc_feature (594)..(594): n is a, c, g, or t
  misc_feature (608)..(617): n is a, c, g, or t
  misc_feature (619)..(636): n is a, c, g, or t

SEQ ID NO: 105504 - DNA, 946 bp, Homo Sapiens; identical to SEQ ID NO: 69570
  misc_feature (97)..(138): n is a, c, g, or t
  misc_feature (907)..(907): n is a, c, g, or t

SEQ ID NO: 105505 - DNA, 1194 bp, Homo Sapiens; identical to SEQ ID NO: 69571
  misc_feature (559)..(559): n is a, c, g, or t

SEQ ID NO: 105506 - DNA, 1854 bp, Homo Sapiens; identical to SEQ ID NO: 69572

SEQ ID NO: 105507 - DNA, 730 bp, Homo Sapiens; identical to SEQ ID NO: 69573

SEQ ID NO: 105508 - DNA, 1473 bp, Homo Sapiens; identical to SEQ ID NO: 69578
  misc_feature (40)..(40): n is a, c, g, or t
  misc_feature (684)..(782): n is a, c, g, or t

SEQ ID NO: 105509 - DNA, 2288 bp, Homo Sapiens; identical to SEQ ID NO: 69579
  misc_feature (1514)..(1514): n is a, c, g, or t

SEQ ID NO: 105510 - DNA, 2303 bp, Homo Sapiens; identical to SEQ ID NO: 69580

SEQ ID NO: 105511 - DNA, 988 bp, Homo Sapiens; identical to SEQ ID NO: 69582

SEQ ID NO: 105512 - DNA, 836 bp, Homo Sapiens; identical to SEQ ID NO: 69583
  misc_feature (34)..(34): n is a, c, g, or t

SEQ ID NO: 105513 - DNA, 749 bp, Homo Sapiens; identical to SEQ ID NO: 69584
  misc_feature (85)..(85): n is a, c, g, or t

SEQ ID NO: 105514 - DNA, 928 bp, Homo Sapiens; identical to SEQ ID NO: 69585

SEQ ID NO: 105515 - DNA, 1010 bp, Homo Sapiens; identical to SEQ ID NO: 69586
  misc_feature (860)..(872): n is a, c, g, or t

SEQ ID NO: 105516 - DNA, 907 bp, Homo Sapiens; identical to SEQ ID NO: 69587

SEQ ID NO: 105517 - DNA, 1690 bp, Homo Sapiens; identical to SEQ ID NO: 69588
  misc_feature (1466)..(1476): n is a, c, g, or t

SEQ ID NO: 105518 - DNA, 819 bp, Homo Sapiens; identical to SEQ ID NO: 69589
  misc_feature (19)..(19): n is a, c, g, or t

SEQ ID NO: 105519 - DNA, 1019 bp, Homo Sapiens; identical to SEQ ID NO: 69590
  misc_feature (900)..(900): n is a, c, g, or t
  misc_feature (921)..(921): n is a, c, g, or t

SEQ ID NO: 105520 - DNA, 965 bp, Homo Sapiens; identical to SEQ ID NO: 69591
  misc_feature (471)..(471): n is a, c, g, or t
  misc_feature (931)..(931): n is a, c, g, or t

SEQ ID NO: 105521 - DNA, 816 bp, Homo Sapiens; identical to SEQ ID NO: 69592

SEQ ID NO: 105522 - DNA, 809 bp, Homo Sapiens; identical to SEQ ID NO: 69593

SEQ ID NO: 105523 - DNA, 677 bp, Homo Sapiens; identical to SEQ ID NO: 69595

SEQ ID NO: 105524 - DNA, 2446 bp, Homo Sapiens; identical to SEQ ID NO: 69596
  misc_feature (1171)..(1171): n is a, c, g, or t
  misc_feature (2214)..(2315): n is a, c, g, or t
  misc_feature (2324)..(2336): n is a, c, g, or t

SEQ ID NO: 105525 - DNA, 1139 bp, Homo Sapiens; identical to SEQ ID NO: 69600

SEQ ID NO: 105526 - DNA, 2450 bp, Homo Sapiens; identical to SEQ ID NO: 69601
  misc_feature (28)..(28): n is a, c, g, or t

SEQ ID NO: 105527 - DNA, 850 bp, Homo Sapiens; identical to SEQ ID NO: 69602

SEQ ID NO: 105528 - DNA, 817 bp, Homo Sapiens; identical to SEQ ID NO: 69603

SEQ ID NO: 105529 - DNA, 1792 bp, Homo Sapiens; identical to SEQ ID NO: 69606
  misc_feature (43)..(77): n is a, c, g, or t
  misc_feature (1313)..(1313): n is a, c, g, or t
  misc_feature (1665)..(1701): n is a, c, g, or t

SEQ ID NO: 105530 - DNA, 635 bp, Homo Sapiens; identical to SEQ ID NO: 69607

SEQ ID NO: 105531 - DNA, 1597 bp, Homo Sapiens; identical to SEQ ID NO: 69610

SEQ ID NO: 105532 - DNA, 990 bp, Homo Sapiens; identical to SEQ ID NO: 69611
  misc_feature (871)..(930): n is a, c, g, or t

SEQ ID NO: 105533 - DNA, 1634 bp, Homo Sapiens; identical to SEQ ID NO: 69612
  misc_feature (1570)..(1588): n is a, c, g, or t

SEQ ID NO: 105534 - DNA, 717 bp, Homo Sapiens; identical to SEQ ID NO: 69613
  misc_feature (41)..(57): n is a, c, g, or t
  misc_feature (224)..(256): n is a, c, g, or t

SEQ ID NO: 105535 - DNA, 1108 bp, Homo Sapiens; identical to SEQ ID NO: 69614
  misc_feature (326)..(360): n is a, c, g, or t

SEQ ID NO: 105536 - DNA, 990 bp, Homo Sapiens; identical to SEQ ID NO: 69615

SEQ ID NO: 105537 - DNA, 463 bp, Homo Sapiens; identical to SEQ ID NO: 69624
  misc_feature (45)..(45): n is a, c, g, or t
  misc_feature (86)..(86): n is a, c, g, or t
  misc_feature (120)..(120): n is a, c, g, or t
  misc_feature (126)..(126): n is a, c, g, or t

SEQ ID NO: 105538 - DNA, 2223 bp, Homo Sapiens; identical to SEQ ID NO: 69625

SEQ ID NO: 105539 - DNA, 433 bp, Homo Sapiens; identical to SEQ ID NO: 69626

SEQ ID NO: 105540 - DNA, 416 bp, Homo Sapiens; identical to SEQ ID NO: 69627

SEQ ID NO: 105541 - DNA, 475 bp, Homo Sapiens; identical to SEQ ID NO: 69628

SEQ ID NO: 105542 - DNA, 1914 bp, Homo Sapiens; identical to SEQ ID NO: 69629

SEQ ID NO: 105543 - DNA, 2156 bp, Homo Sapiens; identical to SEQ ID NO: 69630
  misc_feature (1185)..(1208): n is a, c, g, or t
  misc_feature (1259)..(1267): n is a, c, g, or t
  misc_feature (1526)..(1526): n is a, c, g, or t
  misc_feature (1562)..(1562): n is a, c, g, or t
  misc_feature (1591)..(1591): n is a, c, g, or t
  misc_feature (1620)..(1620): n is a, c, g, or t
  misc_feature (1678)..(1678): n is a, c, g, or t
  misc_feature (1697)..(1698): n is a, c, g, or t
  misc_feature (1720)..(1720): n is a, c, g, or t
  misc_feature (1806)..(1806): n is a, c, g, or t
  misc_feature (1814)..(1814): n is a, c, g, or t
  misc_feature (1852)..(1852): n is a, c, g, or t
  misc_feature (1924)..(1924): n is a, c, g, or t
  misc_feature (1936)..(1936): n is a, c, g, or t
  misc_feature (1942)..(1942): n is a, c, g, or t
  misc_feature (1955)..(1973): n is a, c, g, or t
  misc_feature (1978)..(1980): n is a, c, g, or t
  misc_feature (2034)..(2034): n is a, c, g, or t
  misc_feature (2059)..(2060): n is a, c, g, or t

SEQ ID NO: 105544 - DNA, 354 bp, Homo Sapiens; identical to SEQ ID NO: 69636

SEQ ID NO: 105545 - DNA, 1811 bp, Homo Sapiens; identical to SEQ ID NO: 69637

SEQ ID NO: 105546 - DNA, 515 bp, Homo Sapiens; identical to SEQ ID NO: 69638

SEQ ID NO: 105547 - DNA, 1479 bp, Homo Sapiens; identical to SEQ ID NO: 69645
  misc_feature (1187)..(1213): n is a, c, g, or t
  misc_feature (1263)..(1300): n is a, c, g, or t

SEQ ID NO: 105548 - DNA, 1594 bp, Homo Sapiens; identical to SEQ ID NO: 69646
  misc_feature (734)..(753): n is a, c, g, or t
  misc_feature (1061)..(1063): n is a, c, g, or t
  misc_feature (1245)..(1287): n is a, c, g, or t
  misc_feature (1330)..(1356): n is a, c, g, or t

SEQ ID NO: 105549 - DNA, 507 bp, Homo Sapiens; identical to SEQ ID NO: 69647
  misc_feature (140)..(151): n is a, c, g, or t
  misc_feature (182)..(218): n is a, c, g, or t
  misc_feature (267)..(293): n is a, c, g, or t

SEQ ID NO: 105550 - DNA, 647 bp, Homo Sapiens; identical to SEQ ID NO: 69648

SEQ ID NO: 105551 - DNA, 556 bp, Homo Sapiens; identical to SEQ ID NO: 69649

SEQ ID NO: 105552 - DNA, 1570 bp, Homo Sapiens; identical to SEQ ID NO: 69650
  misc_feature (1365)..(1394): n is a, c, g, or t

SEQ ID NO: 105553 - DNA, 438 bp, Homo Sapiens; identical to SEQ ID NO: 69651
  misc_feature (34)..(34): n is a, c, g, or t
  misc_feature (50)..(50): n is a, c, g, or t
  misc_feature (54)..(85): n is a, c, g, or t
  misc_feature (329)..(358): n is a, c, g, or t

SEQ ID NO: 105554 - DNA, 865 bp, Homo Sapiens; identical to SEQ ID NO: 69652

SEQ ID NO: 105555 - DNA, 2705 bp, Homo Sapiens; identical to SEQ ID NO: 69653
  misc_feature (2009)..(2112): n is a, c, g, or t
  misc_feature (2119)..(2174): n is a, c, g, or t
  misc_feature (2356)..(2371): n is a, c, g, or t

SEQ ID NO: 105556 - DNA, 2277 bp, Homo Sapiens; identical to SEQ ID NO: 69654

SEQ ID NO: 105557 - DNA, 526 bp, Homo Sapiens; identical to SEQ ID NO: 69655

SEQ ID NO: 105558 - DNA, 2973 bp, Homo Sapiens; identical to SEQ ID NO: 69656

SEQ ID NO: 105559 - DNA, 1298 bp, Homo Sapiens; identical to SEQ ID NO: 69657

SEQ ID NO: 105560 - DNA, 1663 bp, Homo Sapiens; identical to SEQ ID NO: 69660
  misc_feature (99)..(100): n is a, c, g, or t
  misc_feature (119)..(167): n is a, c, g, or t
  misc_feature (462)..(471): n is a, c, g, or t
  misc_feature (1648)..(1648): n is a, c, g, or t

SEQ ID NO: 105561 - DNA, 1869 bp, Homo Sapiens; identical to SEQ ID NO: 69661
  misc_feature (293)..(302): n is a, c, g, or t

SEQ ID NO: 105562 - DNA, 2250 bp, Homo Sapiens; identical to SEQ ID NO: 69662

SEQ ID NO: 105563 - DNA, 926 bp, Homo Sapiens; identical to SEQ ID NO: 69663
  misc_feature (800)..(800): n is a, c, g, or t
  misc_feature (807)..(807): n is a, c, g, or t
  misc_feature (863)..(864): n is a, c, g, or t

SEQ ID NO: 105564 - DNA, 999 bp, Homo Sapiens; identical to SEQ ID NO: 69664

SEQ ID NO: 105565 - DNA, 801 bp, Homo Sapiens; identical to SEQ ID NO: 69670
  misc_feature (328)..(389): n is a, c, g, or t

SEQ ID NO: 105566 - DNA, 626 bp, Homo Sapiens; identical to SEQ ID NO: 69671

SEQ ID NO: 105567 - DNA, 1335 bp, Homo Sapiens; identical to SEQ ID NO: 69672
  misc_feature (64)..(64): n is a, c, g, or t
  misc_feature (1188)..(1210): n is a, c, g, or t

SEQ ID NO: 105568 - DNA, 2060 bp, Homo Sapiens; identical to SEQ ID NO: 69673
  misc_feature (1826)..(1826): n is a, c, g, or t
  misc_feature (1911)..(1911): n is a, c, g, or t
  misc_feature (1924)..(1924): n is a, c, g, or t
  misc_feature (1938)..(1938): n is a, c, g, or t
  misc_feature (2002)..(2002): n is a, c, g, or t
  misc_feature (2009)..(2009): n is a, c, g, or t
  misc_feature (2042)..(2042): n is a, c, g, or t

SEQ ID NO: 105569 - DNA, 303 bp, Homo Sapiens; identical to SEQ ID NO: 69674
  misc_feature (158)..(180): n is a, c, g, or t

SEQ ID NO: 105570 - DNA, 1077 bp, Homo Sapiens; identical to SEQ ID NO: 69675
  misc_feature (267)..(275): n is a, c, g, or t
  misc_feature (498)..(651): n is a, c, g, or t

SEQ ID NO: 105571 - DNA, 680 bp, Homo Sapiens; identical to SEQ ID NO: 69676

SEQ ID NO: 105572 - DNA, 840 bp, Homo Sapiens; identical to SEQ ID NO: 69680
  misc_feature (69)..(69): n is a, c, g, or t

SEQ ID NO: 105573 - DNA, 494 bp, Homo Sapiens; identical to SEQ ID NO: 69681

SEQ ID NO: 105574 - DNA, 587 bp, Homo Sapiens; identical to SEQ ID NO: 69685
  misc_feature (14)..(14): n is a, c, g, or t
  misc_feature (23)..(23): n is a, c, g, or t

SEQ ID NO: 105575 - DNA, 1367 bp, Homo Sapiens; identical to SEQ ID NO: 69686
  misc_feature (99)..(157): n is a, c, g, or t
  misc_feature (281)..(281): n is a, c, g, or t
  misc_feature (564)..(592): n is a, c, g, or t
  misc_feature (751)..(761): n is a, c, g, or t
  misc_feature (1008)..(1008): n is a, c, g, or t
  misc_feature (1255)..(1255): n is a, c, g, or t
  misc_feature (1353)..(1353): n is a, c, g, or t

SEQ ID NO: 105576 - DNA, 713 bp, Homo Sapiens; identical to SEQ ID NO: 69689

SEQ ID NO: 105577 - DNA, 986 bp, Homo Sapiens; identical to SEQ ID NO: 69690
  misc_feature (34)..(34): n is a, c, g, or t
  misc_feature (58)..(58): n is a, c, g, or t
  misc_feature (74)..(74): n is a, c, g, or t
  misc_feature (148)..(150): n is a, c, g, or t
  misc_feature (161)..(161): n is a, c, g, or t
  misc_feature (204)..(204): n is a, c, g, or t
  misc_feature (219)..(219): n is a, c, g, or t
  misc_feature (264)..(264): n is a, c, g, or t
  misc_feature (615)..(647): n is a, c, g, or t

SEQ ID NO: 105578 - DNA, 1180 bp, Homo Sapiens; identical to SEQ ID NO: 69691
  misc_feature (68)..(68): n is a, c, g, or t
  misc_feature (88)..(88): n is a, c, g, or t
  misc_feature (92)..(92): n is a, c, g, or t
  misc_feature (104)..(104): n is a, c, g, or t

SEQ ID NO: 105579 - DNA, 485 bp, Homo Sapiens; identical to SEQ ID NO: 69692
  misc_feature (109)..(157): n is a, c, g, or t

SEQ ID NO: 105580 - DNA, 704 bp, Homo Sapiens; identical to SEQ ID NO: 69693
  misc_feature (31)..(31): n is a, c, g, or t
  misc_feature (74)..(74): n is a, c, g, or t
  misc_feature (95)..(95): n is a, c, g, or t

SEQ ID NO: 105581 - DNA, 1042 bp, Homo Sapiens; identical to SEQ ID NO: 69694
  misc_feature (199)..(199): n is a, c, g, or t
  misc_feature (214)..(214): n is a, c, g, or t
  misc_feature (219)..(219): n is a, c, g, or t
  misc_feature (237)..(237): n is a, c, g, or t
  misc_feature (288)..(288): n is a, c, g, or t
  misc_feature (308)..(308): n is a, c, g, or t

SEQ ID NO: 105582 - DNA, 829 bp, Homo Sapiens; identical to SEQ ID NO: 69697

SEQ ID NO: 105583 - DNA, 997 bp, Homo Sapiens; identical to SEQ ID NO: 69698
  misc_feature (81)..(115): n is a, c, g, or t
  misc_feature (607)..(669): n is a, c, g, or t
  misc_feature (904)..(941): n is a, c, g, or t

SEQ ID NO: 105584 - DNA, 1530 bp, Homo Sapiens; identical to SEQ ID NO: 69707
  misc_feature (989)..(1032): n is a, c, g, or t
  misc_feature (1275)..(1284): n is a, c, g, or t

SEQ ID NO: 105585 - DNA, 1010 bp, Homo Sapiens; identical to SEQ ID NO: 69708

SEQ ID NO: 105586 - DNA, 1192 bp, Homo Sapiens; identical to SEQ ID NO: 69709
  misc_feature (87)..(121): n is a, c, g, or t
  misc_feature (971)..(1127): n is a, c, g, or t
  misc_feature (1135)..(1149): n is a, c, g, or t

SEQ ID NO: 105587 - DNA, 963 bp, Homo Sapiens; identical to SEQ ID NO: 69710
  misc_feature (80)..(114): n is a, c, g, or t
  misc_feature (641)..(685): n is a, c, g, or t
  misc_feature (851)..(851): n is a, c, g, or t

SEQ ID NO: 105588 - DNA, 1003 bp, Homo Sapiens; identical to SEQ ID NO: 69712
  misc_feature (891)..(925): n is a, c, g, or t

SEQ ID NO: 105589 - DNA, 904 bp, Homo Sapiens; identical to SEQ ID NO: 69713
  misc_feature (573)..(573): n is a, c, g, or t

SEQ ID NO: 105590 - DNA, 1066 bp, Homo Sapiens; identical to SEQ ID NO: 69714
  misc_feature (26)..(26): n is a, c, g, or t

SEQ ID NO: 105591 - DNA, 1064 bp, Homo Sapiens; identical to SEQ ID NO: 69715

SEQ ID NO: 105592 - DNA, 1468 bp, Homo Sapiens; identical to SEQ ID NO: 69716
  misc_feature (1248)..(1256): n is a, c, g, or t
  misc_feature (1289)..(1292): n is a, c, g, or t
  misc_feature (1294)..(1294): n is a, c, g, or t
  misc_feature (1307)..(1341): n is a, c, g, or t
  misc_feature (1435)..(1435): n is a, c, g, or t

SEQ ID NO: 105593 - DNA, 945 bp, Homo Sapiens; identical to SEQ ID NO: 69723
  misc_feature (46)..(84): n is a, c, g, or t
  misc_feature (88)..(122): n is a, c, g, or t

SEQ ID NO: 105594 - DNA, 1063 bp, Homo Sapiens; identical to SEQ ID NO: 69724

SEQ ID NO: 105595 - DNA, 1239 bp, Homo Sapiens; identical to SEQ ID NO: 69725

SEQ ID NO: 105596 - DNA, 1082 bp, Homo Sapiens; identical to SEQ ID NO: 69726

SEQ ID NO: 105597 - DNA, 480 bp, Homo Sapiens; identical to SEQ ID NO: 69730
  misc_feature (314)..(315): n is a, c, g, or t
  misc_feature (437)..(437): n is a, c, g, or t

SEQ ID NO: 105598 - DNA, 946 bp, Homo Sapiens; identical to SEQ ID NO: 69731

SEQ ID NO: 105599 - DNA, 469 bp, Homo Sapiens; identical to SEQ ID NO: 69732

SEQ ID NO: 105600 - DNA, 464 bp, Homo Sapiens; identical to SEQ ID NO: 69733

SEQ ID NO: 105601 - DNA, 560 bp, Homo Sapiens; identical to SEQ ID NO: 69748

SEQ ID NO: 105602 - DNA, 1884 bp, Homo Sapiens; identical to SEQ ID NO: 69749
  misc_feature (199)..(199): n is a, c, g, or t
  misc_feature (274)..(284): n is a, c, g, or t
  misc_feature (316)..(316): n is a, c, g, or t
  misc_feature (322)..(322): n is a, c, g, or t
  misc_feature (715)..(725): n is a, c, g, or t
  misc_feature (800)..(814): n is a, c, g, or t
  misc_feature (889)..(890): n is a, c, g, or t
  misc_feature (960)..(1026): n is a, c, g, or t
  misc_feature (1028)..(1029): n is a, c, g, or t
  misc_feature (1063)..(1073): n is a, c, g, or t

SEQ ID NO: 105603 - DNA, 472 bp, Homo Sapiens; identical to SEQ ID NO: 69753

SEQ ID NO: 105604 - DNA, 808 bp, Homo Sapiens; identical to SEQ ID NO: 69754

SEQ ID NO: 105605 - DNA, 532 bp, Homo Sapiens; identical to SEQ ID NO: 69755

SEQ ID NO: 105606 - DNA, 1535 bp, Homo Sapiens; identical to SEQ ID NO: 69756
  misc_feature (1448)..(1448): n is a, c, g, or t

SEQ ID NO: 105607 - DNA, 841 bp, Homo Sapiens; identical to SEQ ID NO: 69757

SEQ ID NO: 105608 - DNA, 774 bp, Homo Sapiens; identical to SEQ ID NO: 69758
  misc_feature (514)..(529): n is a, c, g, or t
  misc_feature (531)..(622): n is a, c, g, or t
  misc_feature (626)..(637): n is a, c, g, or t
  misc_feature (683)..(691): n is a, c, g, or t

SEQ ID NO: 105609 - DNA, 1265 bp, Homo Sapiens; identical to SEQ ID NO: 69762

SEQ ID NO: 105610 - DNA, 1051 bp, Homo Sapiens; identical to SEQ ID NO: 69763
  misc_feature (42)..(82): n is a, c, g, or t
  misc_feature (86)..(120): n is a, c, g, or t

SEQ ID NO: 105611 - DNA, 1686 bp, Homo Sapiens; identical to SEQ ID NO: 69764
  misc_feature (79)..(114): n is a, c, g, or t
  misc_feature (1505)..(1505): n is a, c, g, or t

SEQ ID NO: 105612 - DNA, 649 bp, Homo Sapiens; identical to SEQ ID NO: 69765

SEQ ID NO: 105613 - DNA, 432 bp, Homo Sapiens; identical to SEQ ID NO: 69766

SEQ ID NO: 105614 - DNA, 511 bp, Homo Sapiens; identical to SEQ ID NO: 69767

SEQ ID NO: 105615 - DNA, 475 bp, Homo Sapiens; identical to SEQ ID NO: 69769

SEQ ID NO: 105616 - DNA, 1199 bp, Homo Sapiens; identical to SEQ ID NO: 69770
  misc_feature (1090)..(1124): n is a, c, g, or t

SEQ ID NO: 105617 - DNA, 995 bp, Homo Sapiens; identical to SEQ ID NO: 69772
  misc_feature (970)..(970): n is a, c, g, or t

SEQ ID NO: 105618 - DNA, 991 bp, Homo Sapiens; identical to SEQ ID NO: 69773
  misc_feature (46)..(76): n is a, c, g, or t
  misc_feature (834)..(834): n is a, c, g, or t

SEQ ID NO: 105619 - DNA, 1737 bp, Homo Sapiens; identical to SEQ ID NO: 69775

SEQ ID NO: 105620 - DNA, 617 bp, Homo Sapiens; identical to SEQ ID NO: 69776
  misc_feature (453)..(453): n is a, c, g, or t
  misc_feature (534)..(534): n is a, c, g, or t

SEQ ID NO: 105621 - DNA, 705 bp, Homo Sapiens; identical to SEQ ID NO: 69777
  misc_feature (666)..(666): n is a, c, g, or t

SEQ ID NO: 105622 - DNA, 907 bp, Homo Sapiens; identical to SEQ ID NO: 69778
  misc_feature (22)..(23): n is a, c, g, or t

SEQ ID NO: 105623 - DNA, 587 bp, Homo Sapiens; identical to SEQ ID NO: 69786

SEQ ID NO: 105624 - DNA, 1044 bp, Homo Sapiens; identical to SEQ ID NO: 69787
  misc_feature (881)..(905): n is a, c, g, or t

SEQ ID NO: 105625 - DNA, 836 bp, Homo Sapiens; identical to SEQ ID NO: 69792
  misc_feature (443)..(481): n is a, c, g, or t

SEQ ID NO: 105626 - DNA, 1024 bp, Homo Sapiens; identical to SEQ ID NO: 69793
  misc_feature (257)..(320): n is a, c, g, or t

SEQ ID NO: 105627 - DNA, 1038 bp, Homo Sapiens; identical to SEQ ID NO: 69799

SEQ ID NO: 105628 - DNA, 1354 bp, Homo Sapiens; identical to SEQ ID NO: 69800

SEQ ID NO: 105629 - DNA, 2155 bp, Homo Sapiens; identical to SEQ ID NO: 69806
  misc_feature (41)..(75): n is a, c, g, or t
  misc_feature (1897)..(1906): n is a, c, g, or t
  misc_feature (2061)..(2080): n is a, c, g, or t

SEQ ID NO: 105630 - DNA, 797 bp, Homo Sapiens; identical to SEQ ID NO: 69807
  misc_feature (131)..(131): n is a, c, g, or t
  misc_feature (270)..(281): n is a, c, g, or t
  misc_feature (447)..(461): n is a, c, g, or t
  misc_feature (611)..(622): n is a, c, g, or t

SEQ ID NO: 105631 - DNA, 509 bp, Homo Sapiens; identical to SEQ ID NO: 69808

SEQ ID NO: 105632 - DNA, 798 bp, Homo Sapiens; identical to SEQ ID NO: 69809
  misc_feature (519)..(549): n is a, c, g, or t

SEQ ID NO: 105633 - DNA, 1266 bp, Homo Sapiens; identical to SEQ ID NO: 69810
  misc_feature (177)..(207): n is a, c, g, or t
  misc_feature (1202)..(1203): n is a, c, g, or t

SEQ ID NO: 105634 - DNA, 1847 bp, Homo Sapiens; identical to SEQ ID NO: 69812
  misc_feature (257)..(274): n is a, c, g, or t
  misc_feature (977)..(994): n is a, c, g, or t
  misc_feature (1145)..(1145): n is a, c, g, or t

SEQ ID NO: 105635 - DNA, 577 bp, Homo Sapiens; identical to SEQ ID NO: 69813

SEQ ID NO: 105636 - DNA, 1548 bp, Homo Sapiens; identical to SEQ ID NO: 69815

SEQ ID NO: 105637 - DNA, 2112 bp, Homo Sapiens; identical to SEQ ID NO: 69816

SEQ ID NO: 105638 - DNA, 1642 bp, Homo Sapiens; identical to SEQ ID NO: 69817

SEQ ID NO: 105639 - DNA, 2053 bp, Homo Sapiens; identical to SEQ ID NO: 69818

SEQ ID NO: 105640 - DNA, 797 bp, Homo Sapiens; identical to SEQ ID NO: 69819

SEQ ID NO: 105641 - DNA, 1113 bp, Homo Sapiens; identical to SEQ ID NO: 69820

SEQ ID NO: 105642 - DNA, 649 bp, Homo Sapiens; identical to SEQ ID NO: 69821

SEQ ID NO: 105643 - DNA, 673 bp, Homo Sapiens; identical to SEQ ID NO: 69822
  misc_feature (146)..(146): n is a, c, g, or t

SEQ ID NO: 105644 - DNA, 1806 bp, Homo Sapiens; identical to SEQ ID NO: 69823

SEQ ID NO: 105645 - DNA, 1201 bp, Homo Sapiens; identical to SEQ ID NO: 69824
  misc_feature (1073)..(1073): n is a, c, g, or t
  misc_feature (1118)..(1118): n is a, c, g, or t

SEQ ID NO: 105646 - DNA, 233 bp, Homo Sapiens; identical to SEQ ID NO: 69825

SEQ ID NO: 105647 - DNA, 412 bp, Homo Sapiens; identical to SEQ ID NO: 69826

SEQ ID NO: 105648 - DNA, 296 bp, Homo Sapiens; identical to SEQ ID NO: 69828

SEQ ID NO: 105649 - DNA, 967 bp, Homo Sapiens; identical to SEQ ID NO: 69829
  misc_feature (723)..(741): n is a, c, g, or t

SEQ ID NO: 105650 - DNA, 1252 bp, Homo Sapiens; identical to SEQ ID NO: 69830

SEQ ID NO: 105651 - DNA, 1798 bp, Homo Sapiens; identical to SEQ ID NO: 69831

SEQ ID NO: 105652 - DNA, 377 bp, Homo Sapiens; identical to SEQ ID NO: 69832

SEQ ID NO: 105653 - DNA, 2039 bp, Homo Sapiens; identical to SEQ ID NO: 69833

SEQ ID NO: 105654 - DNA, 1302 bp, Homo Sapiens; identical to SEQ ID NO: 69834
  misc_feature (1086)..(1086): n is a, c, g, or t

SEQ ID NO: 105655 - DNA, 2824 bp, Homo Sapiens; identical to SEQ ID NO: 69836

SEQ ID NO: 105656 - DNA, 1247 bp, Homo Sapiens; identical to SEQ ID NO: 69837
  misc_feature (566)..(624): n is a, c, g, or t
  misc_feature (1006)..(1113): n is a, c, g, or t

SEQ ID NO: 105657 - DNA, 1034 bp, Homo Sapiens; identical to SEQ ID NO: 69841
  misc_feature (509)..(510): n is a, c, g, or t
  misc_feature (512)..(635): n is a, c, g, or t
  misc_feature (638)..(640): n is a, c, g, or t
  misc_feature (654)..(667): n is a, c, g, or t
  misc_feature (695)..(742): n is a, c, g, or t
  misc_feature (828)..(840): n is a, c, g, or t
  misc_feature (848)..(856): n is a, c, g, or t

SEQ ID NO: 105658 - DNA, 711 bp, Homo Sapiens; identical to SEQ ID NO: 69842

SEQ ID NO: 105659 - DNA, 1409 bp, Homo Sapiens; identical to SEQ ID NO: 69843
  misc_feature (44)..(78): n is a, c, g, or t
  misc_feature (865)..(894): n is a, c, g, or t

SEQ ID NO: 105660 - DNA, 903 bp, Homo Sapiens; identical to SEQ ID NO: 69844
  misc_feature (36)..(36): n is a, c, g, or t
  misc_feature (79)..(113): n is a, c, g, or t

SEQ ID NO: 105661 - DNA, 2160 bp, Homo Sapiens; identical to SEQ ID NO: 69845
  misc_feature (44)..(78): n is a, c, g, or t

SEQ ID NO: 105662 - DNA, 947 bp, Homo Sapiens; identical to SEQ ID NO: 69846

SEQ ID NO: 105663 - DNA, 1264 bp, Homo Sapiens; identical to SEQ ID NO: 69847

SEQ ID NO: 105664 - DNA, 827 bp, Homo Sapiens; identical to SEQ ID NO: 69848
  misc_feature (14)..(14): n is a, c, g, or t
  misc_feature (132)..(132): n is a, c, g, or t
  misc_feature (146)..(146): n is a, c, g, or t

SEQ ID NO: 105665 - DNA, 1590 bp, Homo Sapiens; identical to SEQ ID NO: 69853
  misc_feature (135)..(216): n is a, c, g, or t

SEQ ID NO: 105666 - DNA, 461 bp, Homo Sapiens; identical to SEQ ID NO: 69854
  misc_feature (244)..(348): n is a, c, g, or t

SEQ ID NO: 105667 - DNA, 1183 bp, Homo Sapiens; identical to SEQ ID NO: 69859
  misc_feature (472)..(498): n is a, c, g, or t
  misc_feature (959)..(1050): n is a, c, g, or t
  misc_feature (1056)..(1056): n is a, c, g, or t

SEQ ID NO: 105668 - DNA, 2611 bp, Homo Sapiens; identical to SEQ ID NO: 69860
  misc_feature (143)..(645): n is a, c, g, or t
  misc_feature (921)..(929): n is a, c, g, or t
  misc_feature (1963)..(2015): n is a, c, g, or t
  misc_feature (2153)..(2161): n is a, c, g, or t
  misc_feature (2454)..(2454): n is a, c, g, or t

SEQ ID NO: 105669 - DNA, 908 bp, Homo Sapiens; identical to SEQ ID NO: 69861

SEQ ID NO: 105670 - DNA, 680 bp, Homo Sapiens; identical to SEQ ID NO: 69863

SEQ ID NO: 105671 - DNA, 1064 bp, Homo Sapiens; identical to SEQ ID NO: 69864
  misc_feature (76)..(110): n is a, c, g, or t
  misc_feature (315)..(315): n is a, c, g, or t

SEQ ID NO: 105672 - DNA, 2322 bp, Homo Sapiens; identical to SEQ ID NO: 69866
  misc_feature (1581)..(1594): n is a, c, g, or t
  misc_feature (2267)..(2281): n is a, c, g, or t

SEQ ID NO: 105673 - DNA, 1468 bp, Homo Sapiens; identical to SEQ ID NO: 69867
  misc_feature (92)..(92): n is a, c, g, or t
  misc_feature (150)..(150): n is a, c, g, or t
  misc_feature (157)..(157): n is a, c, g, or t
  misc_feature (162)..(162): n is a, c, g, or t
  misc_feature (212)..(212): n is a, c, g, or t
  misc_feature (243)..(243): n is a, c, g, or t
  misc_feature (284)..(284): n is a, c, g, or t
  misc_feature (1005)..(1017): n is a, c, g, or t
  misc_feature (1099)..(1132): n is a, c, g, or t

SEQ ID NO: 105674 - DNA, 842 bp, Homo Sapiens; identical to SEQ ID NO: 69868

SEQ ID NO: 105675 - DNA, 906 bp, Homo Sapiens; identical to SEQ ID NO: 69869

SEQ ID NO: 105676 - DNA, 2332 bp, Homo Sapiens; identical to SEQ ID NO: 69872
  misc_feature (138)..(184): n is a, c, g, or t
  misc_feature (1455)..(1464): n is a, c, g, or t

SEQ ID NO: 105677 - DNA, 400 bp, Homo Sapiens; identical to SEQ ID NO: 69873
  misc_feature (139)..(165): n is a, c, g, or t

SEQ ID NO: 105678 - DNA, 417 bp, Homo Sapiens; identical to SEQ ID NO: 69874

SEQ ID NO: 105679 - DNA, 721 bp, Homo Sapiens; identical to SEQ ID NO: 69878
  misc_feature (16)..(16): n is a, c, g, or t

SEQ ID NO: 105680 - DNA, 707 bp, Homo Sapiens; identical to SEQ ID NO: 69879

SEQ ID NO: 105681 - DNA, 2496 bp, Homo Sapiens; identical to SEQ ID NO: 69884
  misc_feature (586)..(599): n is a, c, g, or t

SEQ ID NO: 105682 - DNA, 737 bp, Homo Sapiens; identical to SEQ ID NO: 69885
  misc_feature (48)..(48): n is a, c, g, or t

SEQ ID NO: 105683 - DNA, 1030 bp, Homo Sapiens; identical to SEQ ID NO: 69886

SEQ ID NO: 105684 - DNA, 1055 bp, Homo Sapiens; identical to SEQ ID NO: 69888

SEQ ID NO: 105685 - DNA, 1220 bp, Homo Sapiens; identical to SEQ ID NO: 69889
  misc_feature (80)..(114): n is a, c, g, or t

SEQ ID NO: 105686 - DNA, 1116 bp, Homo Sapiens; identical to SEQ ID NO: 69890
  misc_feature (352)..(379): n is a, c, g, or t

SEQ ID NO: 105687 - DNA, 1013 bp, Homo Sapiens; identical to SEQ ID NO: 69891

SEQ ID NO: 105688 - DNA, 1033 bp, Homo Sapiens; identical to SEQ ID NO: 69892
  misc_feature (75)..(109): n is a, c, g, or t

SEQ ID NO: 105689 - DNA, 977 bp, Homo Sapiens; identical to SEQ ID NO: 69893
  misc_feature (39)..(39): n is a, c, g, or t
  misc_feature (157)..(157): n is a, c, g, or t
  misc_feature (165)..(165): n is a, c, g, or t

SEQ ID NO: 105690 - DNA, 706 bp, Homo Sapiens; identical to SEQ ID NO: 69894

SEQ ID NO: 105691 - DNA, 1430 bp, Homo Sapiens; identical to SEQ ID NO: 69900
  misc_feature (839)..(839): n is a, c, g, or t

SEQ ID NO: 105692 - DNA, 183 bp, Homo Sapiens; identical to SEQ ID NO: 69901

SEQ ID NO: 105693 - DNA, 1700 bp, Homo Sapiens; identical to SEQ ID NO: 69902
  misc_feature (483)..(496): n is a, c, g, or t
  misc_feature (1591)..(1625): n is a, c, g, or t

SEQ ID NO: 105694 - DNA, 421 bp, Homo Sapiens; identical to SEQ ID NO: 69903

SEQ ID NO: 105695 - DNA, 1292 bp, Homo Sapiens; identical to SEQ ID NO: 69904
  misc_feature (41)..(82): n is a, c, g, or t
  misc_feature (86)..(120): n is a, c, g, or t

SEQ ID NO: 105696 - DNA, 1365 bp, Homo Sapiens; identical to SEQ ID NO: 69905
  misc_feature (179)..(179): n is a, c, g, or t
  misc_feature (199)..(200): n is a, c, g, or t
  misc_feature (362)..(362): n is a, c, g, or t
  misc_feature (547)..(585): n is a, c, g, or t
  misc_feature (1052)..(1069): n is a, c, g, or t

SEQ ID NO: 105697 - DNA, 421 bp, Homo Sapiens; identical to SEQ ID NO: 69906
  misc_feature (48)..(48): n is a, c, g, or t

SEQ ID NO: 105698 - DNA, 748 bp, Homo Sapiens; identical to SEQ ID NO: 69907
  misc_feature (640)..(640): n is a, c, g, or t

SEQ ID NO: 105699 - DNA, 2581 bp, Homo Sapiens; identical to SEQ ID NO: 69909
  misc_feature (1486)..(1563): n is a, c, g, or t
  misc_feature (2507)..(2520): n is a, c, g, or t

SEQ ID NO: 105700 - DNA, 504 bp, Homo Sapiens; identical to SEQ ID NO: 69910
  misc_feature (433)..(448): n is a, c, g, or t

SEQ ID NO: 105701 - DNA, 632 bp, Homo Sapiens; identical to SEQ ID NO: 69911
  misc_feature (378)..(450): n is a, c, g, or t
  misc_feature (566)..(579): n is a, c, g, or t

SEQ ID NO: 105702 - DNA, 798 bp, Homo Sapiens; identical to SEQ ID NO: 69912

SEQ ID NO: 105703 - DNA, 962 bp, Homo Sapiens; identical to SEQ ID NO: 69913
  misc_feature (161)..(211): n is a, c, g, or t

SEQ ID NO: 105704 - DNA, 488 bp, Homo Sapiens; identical to SEQ ID NO: 69914
  misc_feature (417)..(430): n is a, c, g, or t

SEQ ID NO: 105705 - DNA, 2165 bp, Homo Sapiens; identical to SEQ ID NO: 69915
  misc_feature (1646)..(1658): n is a, c, g, or t
  misc_feature (1772)..(1825): n is a, c, g, or t

SEQ ID NO: 105706 - DNA, 520 bp, Homo Sapiens; identical to SEQ ID NO: 69916

SEQ ID NO: 105707 - DNA, 829 bp, Homo Sapiens; identical to SEQ ID NO: 69917
  misc_feature (94)..(142): n is a, c, g, or t
  misc_feature (532)..(752): n is a, c, g, or t
  misc_feature (764)..(783): n is a, c, g, or t

SEQ ID NO: 105708 - DNA, 1183 bp, Homo Sapiens; identical to SEQ ID NO: 69918
  misc_feature (55)..(55): n is a, c, g, or t
  misc_feature (69)..(100): n is a, c, g, or t
  misc_feature (103)..(137): n is a, c, g, or t

SEQ ID NO: 105709 - DNA, 781 bp, Homo Sapiens; identical to SEQ ID NO: 69919

SEQ ID NO: 105710 - DNA, 998 bp, Homo Sapiens; identical to SEQ ID NO: 69920
  misc_feature (29)..(29): n is a, c, g, or t
  misc_feature (167)..(167): n is a, c, g, or t
  misc_feature (220)..(220): n is a, c, g, or t
  misc_feature (226)..(226): n is a, c, g, or t
  misc_feature (250)..(250): n is a, c, g, or t
  misc_feature (266)..(266): n is a, c, g, or t
  misc_feature (295)..(295): n is a, c, g, or t

SEQ ID NO: 105711 - DNA, 2005 bp, Homo Sapiens; identical to SEQ ID NO: 69921

SEQ ID NO: 105712 - DNA, 988 bp, Homo Sapiens; identical to SEQ ID NO: 69925

SEQ ID NO: 105713 - DNA, 1928 bp, Homo Sapiens; identical to SEQ ID NO: 69926
  misc_feature (368)..(382): n is a, c, g, or t
  misc_feature (1166)..(1240): n is a, c, g, or t

SEQ ID NO: 105714 - DNA, 953 bp, Homo Sapiens; identical to SEQ ID NO: 69927
  misc_feature (343)..(357): n is a, c, g, or t

SEQ ID NO: 105715 - DNA, 2005 bp, Homo Sapiens; identical to SEQ ID NO: 69930
  misc_feature (1579)..(1588): n is a, c, g, or t
  misc_feature (1851)..(1863): n is a, c, g, or t
  misc_feature (1924)..(1947): n is a, c, g, or t

SEQ ID NO: 105716 - DNA, 1050 bp, Homo Sapiens; identical to SEQ ID NO: 69931
  misc_feature (78)..(112): n is a, c, g, or t

SEQ ID NO: 105717 - DNA, 2966 bp, Homo Sapiens; identical to SEQ ID NO: 69935
  misc_feature (16)..(16): n is a, c, g, or t
  misc_feature (23)..(23): n is a, c, g, or t
  misc_feature (39)..(39): n is a, c, g, or t
  misc_feature (42)..(42): n is a, c, g, or t
  misc_feature (53)..(53): n is a, c, g, or t
  misc_feature (56)..(56): n is a, c, g, or t
  misc_feature (58)..(58): n is a, c, g, or t
  misc_feature (69)..(69): n is a, c, g, or t
  misc_feature (86)..(86): n is a, c, g, or t
  misc_feature (91)..(91): n is a, c, g, or t
  misc_feature (97)..(97): n is a, c, g, or t
  misc_feature (101)..(101): n is a, c, g, or t
  misc_feature (108)..(108): n is a, c, g, or t
  misc_feature (126)..(126): n is a, c, g, or t
  misc_feature (155)..(155): n is a, c, g, or t
  misc_feature (161)..(161): n is a, c, g, or t
  misc_feature (947)..(962): n is a, c, g, or t
  misc_feature (1857)..(1870): n is a, c, g, or t
  misc_feature (2206)..(2214): n is a, c, g, or t
  misc_feature (2453)..(2466): n is a, c, g, or t
  misc_feature (2478)..(2535): n is a, c, g, or t

SEQ ID NO: 105718 - DNA, 2072 bp, Homo Sapiens; identical to SEQ ID NO: 69936
  misc_feature (44)..(52): n is a, c, g, or t
  misc_feature (290)..(354): n is a, c, g, or t

SEQ ID NO: 105719 - DNA, 2751 bp, Homo Sapiens; identical to SEQ ID NO: 69941
  misc_feature (175)..(184): n is a, c, g, or t
  misc_feature (762)..(792): n is a, c, g, or t

SEQ ID NO: 105720 - DNA, 877 bp, Homo Sapiens; identical to SEQ ID NO: 69942

SEQ ID NO: 105721 - DNA, 1203 bp, Homo Sapiens; identical to SEQ ID NO: 69944
  misc_feature (1057)..(1131): n is a, c, g, or t

SEQ ID NO: 105722 - DNA, 1014 bp, Homo Sapiens; identical to SEQ ID NO: 69945

SEQ ID NO: 105723 - DNA, 1283 bp, Homo Sapiens; identical to SEQ ID NO: 69946
  misc_feature (25)..(25): n is a, c, g, or t
  misc_feature (46)..(46): n is a, c, g, or t
  misc_feature (87)..(87): n is a, c, g, or t
  misc_feature (100)..(100): n is a, c, g, or t
  misc_feature (108)..(109): n is a, c, g, or t
  misc_feature (125)..(125): n is a, c, g, or t
  misc_feature (137)..(137): n is a, c, g, or t
  misc_feature (149)..(149): n is a, c, g, or t
  misc_feature (156)..(158): n is a, c, g, or t
  misc_feature (169)..(169): n is a, c, g, or t
  misc_feature (172)..(172): n is a, c, g, or t
  misc_feature (176)..(176): n is a, c, g, or t
  misc_feature (182)..(182): n is a, c, g, or t
  misc_feature (209)..(209): n is a, c, g, or t
  misc_feature (211)..(211): n is a, c, g, or t

SEQ ID NO: 105724 - DNA, 950 bp, Homo Sapiens; identical to SEQ ID NO: 69947
  misc_feature (48)..(60): n is a, c, g, or t
  misc_feature (939)..(939): n is a, c, g, or t

SEQ ID NO: 105725 - DNA, 625 bp, Homo Sapiens; identical to SEQ ID NO: 69948
  misc_feature (304)..(304): n is a, c, g, or t

SEQ ID NO: 105726 - DNA, 626 bp, Homo Sapiens; identical to SEQ ID NO: 69949

SEQ ID NO: 105727 - DNA, 884 bp, Homo Sapiens; identical to SEQ ID NO: 69950

SEQ ID NO: 105728 - DNA, 1892 bp, Homo Sapiens; identical to SEQ ID NO: 69951
  misc_feature (371)..(371): n is a, c, g, or t
  misc_feature (1744)..(1744): n is a, c, g, or t
  misc_feature (1771)..(1771): n is a, c, g, or t
  misc_feature (1776)..(1776): n is a, c, g, or t
  misc_feature (1784)..(1784): n is a, c, g, or t
  misc_feature (1844)..(1844): n is a, c, g, or t

SEQ ID NO: 105729 - DNA, 1029 bp, Homo Sapiens; identical to SEQ ID NO: 69952

SEQ ID NO: 105730 - DNA, 808 bp, Homo Sapiens; identical to SEQ ID NO: 69953

SEQ ID NO: 105731 - DNA, 807 bp, Homo Sapiens; identical to SEQ ID NO: 69954
  misc_feature (685)..(693): n is a, c, g, or t
  misc_feature (773)..(773): n is a, c, g, or t

SEQ ID NO: 105732 - DNA, 545 bp, Homo Sapiens; identical to SEQ ID NO: 69955

SEQ ID NO: 105733 - DNA, 1008 bp, Homo Sapiens; identical to SEQ ID NO: 69956
  misc_feature (33)..(33): n is a, c, g, or t
  misc_feature (437)..(451): n is a, c, g, or t
  misc_feature (460)..(476): n is a, c, g, or t

SEQ ID NO: 105734 - DNA, 594 bp, Homo Sapiens; identical to SEQ ID NO: 69957
  misc_feature (101)..(169): n is a, c, g, or t
  misc_feature (202)..(228): n is a, c, g, or t

SEQ ID NO: 105735 - DNA, 765 bp, Homo Sapiens; identical to SEQ ID NO: 69958
  misc_feature (513)..(580): n is a, c, g, or t
  misc_feature (612)..(638): n is a, c, g, or t

SEQ ID NO: 105736 - DNA, 585 bp, Homo Sapiens; identical to SEQ ID NO: 69961
  misc_feature (60)..(84): n is a, c, g, or t
  misc_feature (122)..(122): n is a, c, g, or t
  misc_feature (310)..(358): n is a, c, g, or t

SEQ ID NO: 105737 - DNA, 961 bp, Homo Sapiens; identical to SEQ ID NO: 69962
  misc_feature (266)..(284): n is a, c, g, or t

SEQ ID NO: 105738 - DNA, 795 bp, Homo Sapiens; identical to SEQ ID NO: 69963
  misc_feature (65)..(83): n is a, c, g, or t
  misc_feature (583)..(590): n is a, c, g, or t
  misc_feature (593)..(594): n is a, c, g, or t
  misc_feature (601)..(601): n is a, c, g, or t
  misc_feature (659)..(659): n is a, c, g, or t

SEQ ID NO: 105739 - DNA, 1046 bp, Homo Sapiens; identical to SEQ ID NO: 69964
  misc_feature (288)..(288): n is a, c, g, or t
  misc_feature (299)..(316): n is a, c, g, or t
  misc_feature (542)..(589): n is a, c, g, or t
  misc_feature (815)..(866): n is a, c, g, or t
  misc_feature (868)..(869): n is a, c, g, or t
  misc_feature (874)..(876): n is a, c, g, or t
  misc_feature (880)..(882): n is a, c, g, or t
  misc_feature (884)..(884): n is a, c, g, or t
  misc_feature (887)..(889): n is a, c, g, or t
  misc_feature (892)..(892): n is a, c, g, or t
  misc_feature (895)..(901): n is a, c, g, or t

SEQ ID NO: 105740 - DNA, 2359 bp, Homo Sapiens; identical to SEQ ID NO: 69966
  misc_feature (1888)..(1919): n is a, c, g, or t

SEQ ID NO: 105741 - DNA, 1110 bp, Homo Sapiens; identical to SEQ ID NO: 69967

SEQ ID NO: 105742 - DNA, 1388 bp, Homo Sapiens; identical to SEQ ID NO: 69970
  misc_feature (83)..(117): n is a, c, g, or t

SEQ ID NO: 105743 - DNA, 594 bp, Homo Sapiens; identical to SEQ ID NO: 69971

SEQ ID NO: 105744 - DNA, 930 bp, Homo Sapiens; identical to SEQ ID NO: 69976

SEQ ID NO: 105745 - DNA, 2018 bp, Homo Sapiens; identical to SEQ ID NO: 69977

SEQ ID NO: 105746 - DNA, 1042 bp, Homo Sapiens; identical to SEQ ID NO: 69980

SEQ ID NO: 105747 - DNA, 874 bp, Homo Sapiens; identical to SEQ ID NO: 69981

SEQ ID NO: 105748 - DNA, 675 bp, Homo Sapiens; identical to SEQ ID NO: 69982
  misc_feature (650)..(650): n is a, c, g, or t

SEQ ID NO: 105749 - DNA, 1013 bp, Homo Sapiens; identical to SEQ ID NO: 69983
  misc_feature (221)..(337): n is a, c, g, or t
  misc_feature (929)..(955): n is a, c, g, or t

SEQ ID NO: 105750 - DNA, 657 bp, Homo Sapiens; identical to SEQ ID NO: 69986
  misc_feature (106)..(144): n is a, c, g, or t

SEQ ID NO: 105751 - DNA, 1132 bp, Homo Sapiens; identical to SEQ ID NO: 69987
  misc_feature (373)..(411): n is a, c, g, or t
  misc_feature (923)..(927): n is a, c, g, or t
  misc_feature (929)..(935): n is a, c, g, or t
  misc_feature (937)..(938): n is a, c, g, or t
  misc_feature (940)..(940): n is a, c, g, or t
  misc_feature (945)..(945): n is a, c, g, or t

SEQ ID NO: 105752 - DNA, 1629 bp, Homo Sapiens; identical to SEQ ID NO: 69988

SEQ ID NO: 105753 - DNA, 1473 bp, Homo Sapiens; identical to SEQ ID NO: 69989

SEQ ID NO: 105754 - DNA, 476 bp, Homo Sapiens; identical to SEQ ID NO: 69990

SEQ ID NO: 105755 - DNA, 654 bp, Homo Sapiens; identical to SEQ ID NO: 69993

SEQ ID NO: 105756 - DNA, 812 bp, Homo Sapiens; identical to SEQ ID NO: 69994
  misc_feature (79)..(113): n is a, c, g, or t

SEQ ID NO: 105757 - DNA, 567 bp, Homo Sapiens; identical to SEQ ID NO: 69998

SEQ ID NO: 105758 - DNA, 1318 bp, Homo Sapiens; identical to SEQ ID NO: 69999

SEQ ID NO: 105759 - DNA, 794 bp, Homo Sapiens; identical to SEQ ID NO: 70000

SEQ ID NO: 105760 - DNA, 910 bp, Homo Sapiens; identical to SEQ ID NO: 70001

SEQ ID NO: 105761 - DNA, 1900 bp, Homo Sapiens; identical to SEQ ID NO: 70006
  misc_feature (1356)..(1356): n is a, c, g, or t

SEQ ID NO: 105762 - DNA, 969 bp, Homo Sapiens; identical to SEQ ID NO: 70007
  misc_feature (67)..(67): n is a, c, g, or t
  misc_feature (105)..(105): n is a, c, g, or t
  misc_feature (249)..(249): n is a, c, g, or t

SEQ ID NO: 105763 - DNA, 1126 bp, Homo Sapiens; identical to SEQ ID NO: 70011
  misc_feature (214)..(214): n is a, c, g, or t
  misc_feature (770)..(808): n is a, c, g, or t

SEQ ID NO: 105764 - DNA, 1606 bp, Homo Sapiens; identical to SEQ ID NO: 70012
  misc_feature (1497)..(1531): n is a, c, g, or t

SEQ ID NO: 105765 - DNA, 394 bp, Homo Sapiens; identical to SEQ ID NO: 70013
  misc_feature (309)..(347): n is a, c, g, or t

SEQ ID NO: 105766 - DNA, 2090 bp, Homo Sapiens; identical to SEQ ID NO: 70016
  misc_feature (1509)..(1523): n is a, c, g, or t

SEQ ID NO: 105767 - DNA, 434 bp, Homo Sapiens; identical to SEQ ID NO: 70017

SEQ ID NO: 105768 - DNA, 1062 bp, Homo Sapiens; identical to SEQ ID NO: 70022

SEQ ID NO: 105769 - DNA, 3010 bp, Homo Sapiens; identical to SEQ ID NO: 70023
  misc_feature (130)..(181): n is a, c, g, or t

SEQ ID NO: 105770 - DNA, 978 bp, Homo Sapiens; identical to SEQ ID NO: 70024

SEQ ID NO: 105771 - DNA, 1283 bp, Homo Sapiens; identical to SEQ ID NO: 70029
  misc_feature (736)..(805): n is a, c, g, or t
  misc_feature (981)..(989): n is a, c, g, or t
  misc_feature (1107)..(1170): n is a, c, g, or t

SEQ ID NO: 105772 - DNA, 592 bp, Homo Sapiens; identical to SEQ ID NO: 70030
  misc_feature (64)..(79): n is a, c, g, or t
  misc_feature (98)..(358): n is a, c, g, or t

SEQ ID NO: 105773 - DNA, 1061 bp, Homo Sapiens; identical to SEQ ID NO: 70031
  misc_feature (90)..(90): n is a, c, g, or t
  misc_feature (95)..(95): n is a, c, g, or t
  misc_feature (114)..(114): n is a, c, g, or t
  misc_feature (119)..(119): n is a, c, g, or t
  misc_feature (147)..(147): n is a, c, g, or t
  misc_feature (150)..(150): n is a, c, g, or t
  misc_feature (154)..(154): n is a, c, g, or t
  misc_feature (222)..(222): n is a, c, g, or t
  misc_feature (579)..(579): n is a, c, g, or t

SEQ ID NO: 105774 - DNA, 2267 bp, Homo Sapiens; identical to SEQ ID NO: 70032
  misc_feature (1292)..(1292): n is a, c, g, or t
  misc_feature (1967)..(1981): n is a, c, g, or t
  misc_feature (2201)..(2215): n is a, c, g, or t

SEQ ID NO: 105775 - DNA, 913 bp, Homo Sapiens; identical to SEQ ID NO: 70037
  misc_feature (72)..(89): n is a, c, g, or t

SEQ ID NO: 105776 - DNA, 1046 bp, Homo Sapiens; identical to SEQ ID NO: 70038
  misc_feature (76)..(95): n is a, c, g, or t
  misc_feature (824)..(846): n is a, c, g, or t
  misc_feature (917)..(930): n is a, c, g, or t
  misc_feature (954)..(963): n is a, c, g, or t

SEQ ID NO: 105777 - DNA, 505 bp, Homo Sapiens; identical to SEQ ID NO: 70039

SEQ ID NO: 105778 - DNA, 817 bp, Homo Sapiens; identical to SEQ ID NO: 70043
  misc_feature (63)..(63): n is a, c, g, or t
  misc_feature (81)..(81): n is a, c, g, or t
  misc_feature (88)..(88): n is a, c, g, or t

SEQ ID NO: 105779 - DNA, 1415 bp, Homo Sapiens; identical to SEQ ID NO: 70044
  misc_feature (1372)..(1372): n is a, c, g, or t

SEQ ID NO: 105780 - DNA, 738 bp, Homo Sapiens; identical to SEQ ID NO: 70052
  misc_feature (18)..(18): n is a, c, g, or t
  misc_feature (43)..(43): n is a, c, g, or t
  misc_feature (104)..(162): n is a, c, g, or t

SEQ ID NO: 105781 - DNA, 883 bp, Homo Sapiens; identical to SEQ ID NO: 70053

SEQ ID NO: 105782 - DNA, 741 bp, Homo Sapiens; identical to SEQ ID NO: 70056

SEQ ID NO: 105783 - DNA, 902 bp, Homo Sapiens; identical to SEQ ID NO: 70057

SEQ ID NO: 105784 - DNA, 847 bp, Homo Sapiens; identical to SEQ ID NO: 70058
  misc_feature (755)..(780): n is a, c, g, or t

SEQ ID NO: 105785 - DNA, 962 bp, Homo Sapiens; identical to SEQ ID NO: 70059

SEQ ID NO: 105786 - DNA, 1223 bp, Homo Sapiens; identical to SEQ ID NO: 70060
  misc_feature (363)..(411): n is a, c, g, or t

SEQ ID NO: 105787 - DNA, 2917 bp, Homo Sapiens; identical to SEQ ID NO: 70062
  misc_feature (1953)..(1995): n is a, c, g, or t

SEQ ID NO: 105788 - DNA, 689 bp, Homo Sapiens; identical to SEQ ID NO: 70063
  misc_feature (107)..(107): n is a, c, g, or t
  misc_feature (114)..(115): n is a, c, g, or t
  misc_feature (117)..(117): n is a, c, g, or t
  misc_feature (223)..(223): n is a, c, g, or t
  misc_feature (229)..(230): n is a, c, g, or t
  misc_feature (235)..(236): n is a, c, g, or t

SEQ ID NO: 105789 - DNA, 563 bp, Homo Sapiens; identical to SEQ ID NO: 70067
  misc_feature (41)..(102): n is a, c, g, or t
  misc_feature (299)..(299): n is a, c, g, or t

SEQ ID NO: 105790 - DNA, 475 bp, Homo Sapiens; identical to SEQ ID NO: 70068
  misc_feature (36)..(36): n is a, c, g, or t
  misc_feature (356)..(356): n is a, c, g, or t

SEQ ID NO: 105791 - DNA, 1123 bp, Homo Sapiens; identical to SEQ ID NO: 70069

SEQ ID NO: 105792 - DNA, 696 bp, Homo Sapiens; identical to SEQ ID NO: 70070

SEQ ID NO: 105793 - DNA, 1420 bp, Homo Sapiens; identical to SEQ ID NO: 70077
  misc_feature (507)..(518): n is a, c, g, or t
  misc_feature (869)..(878): n is a, c, g, or t
  misc_feature (1152)..(1152): n is a, c, g, or t

SEQ ID NO: 105794 - DNA, 1128 bp, Homo Sapiens; identical to SEQ ID NO: 70078

SEQ ID NO: 105795 - DNA, 1071 bp, Homo Sapiens; identical to SEQ ID NO: 70084

SEQ ID NO: 105796 - DNA, 598 bp, Homo Sapiens; identical to SEQ ID NO: 70085
  misc_feature (29)..(29): n is a, c, g, or t

SEQ ID NO: 105797 - DNA, 556 bp, Homo Sapiens; identical to SEQ ID NO: 70086

SEQ ID NO: 105798 - DNA, 931 bp, Homo Sapiens; identical to SEQ ID NO: 70087

SEQ ID NO: 105799 - DNA, 906 bp, Homo Sapiens; identical to SEQ ID NO: 70088

SEQ ID NO: 105800 - DNA, 679 bp, Homo Sapiens; identical to SEQ ID NO: 70090
  misc_feature (174)..(183): n is a, c, g, or t
  misc_feature (405)..(450): n is a, c, g, or t

SEQ ID NO: 105801 - DNA, 1762 bp, Homo Sapiens; identical to SEQ ID NO: 70091
  misc_feature (124)..(124): n is a, c, g, or t
  misc_feature (151)..(159): n is a, c, g, or t
  misc_feature (409)..(424): n is a, c, g, or t
  misc_feature (599)..(616): n is a, c, g, or t
  misc_feature (624)..(624): n is a, c, g, or t
  misc_feature (855)..(892): n is a, c, g, or t
  misc_feature (1298)..(1310): n is a, c, g, or t
  misc_feature (1652)..(1686): n is a, c, g, or t

SEQ ID NO: 105802 - DNA, 1839 bp, Homo Sapiens; identical to SEQ ID NO: 70092
  misc_feature (1727)..(1745): n is a, c, g, or t

SEQ ID NO: 105803 - DNA, 1085 bp, Homo Sapiens; identical to SEQ ID NO: 70093

SEQ ID NO: 105804 - DNA, 776 bp, Homo Sapiens; identical to SEQ ID NO: 70094
  misc_feature (597)..(656): n is a, c, g, or t

SEQ ID NO: 105805 - DNA, 981 bp, Homo Sapiens; identical to SEQ ID NO: 70095
  misc_feature (579)..(643): n is a, c, g, or t

SEQ ID NO: 105806 - DNA, 955 bp, Homo Sapiens; identical to SEQ ID NO: 70096
  misc_feature (450)..(529): n is a, c, g, or t
  misc_feature (645)..(645): n is a, c, g, or t
  misc_feature (691)..(691): n is a, c, g, or t
  misc_feature (724)..(724): n is a, c, g, or t

SEQ ID NO: 105807 - DNA, 627 bp, Homo Sapiens; identical to SEQ ID NO: 70097
  misc_feature (71)..(161): n is a, c, g, or t
  misc_feature (168)..(266): n is a, c, g, or t

SEQ ID NO: 105808 - DNA, 710 bp, Homo Sapiens; identical to SEQ ID NO: 70098
  misc_feature (400)..(469): n is a, c, g, or t
  misc_feature (505)..(596): n is a, c, g, or t

SEQ ID NO: 105809 - DNA, 1320 bp, Homo Sapiens; identical to SEQ ID NO: 70101
  misc_feature (78)..(112): n is a, c, g, or t

SEQ ID NO: 105810 - DNA, 1059 bp, Homo Sapiens; identical to SEQ ID NO: 70102

SEQ ID NO: 105811 - DNA, 2103 bp, Homo Sapiens; identical to SEQ ID NO: 70111
  misc_feature (1360)..(1394): n is a, c, g, or t

SEQ ID NO: 105812 - DNA, 1345 bp, Homo Sapiens; identical to SEQ ID NO: 70112
  misc_feature (1133)..(1188): n is a, c, g, or t

SEQ ID NO: 105813 - DNA, 957 bp, Homo Sapiens; identical to SEQ ID NO: 70113

SEQ ID NO: 105814 - DNA, 1311 bp, Homo Sapiens; identical to SEQ ID NO: 70117
  misc_feature (45)..(147): n is a, c, g, or t
  misc_feature (220)..(267): n is a, c, g, or t
  misc_feature (1151)..(1151): n is a, c, g, or t

SEQ ID NO: 105815 - DNA, 1026 bp, Homo Sapiens; identical to SEQ ID NO: 70118

SEQ ID NO: 105816 - DNA, 1441 bp, Homo Sapiens; identical to SEQ ID NO: 70119
  misc_feature (42)..(84): n is a, c, g, or t
  misc_feature (87)..(121): n is a, c, g, or t

SEQ ID NO: 105817 - DNA, 797 bp, Homo Sapiens; identical to SEQ ID NO: 70120

SEQ ID NO: 105818 - DNA, 1008 bp, Homo Sapiens; identical to SEQ ID NO: 70121
  misc_feature (95)..(129): n is a, c, g, or t

SEQ ID NO: 105819 - DNA, 1840 bp, Homo Sapiens; identical to SEQ ID NO: 70122
  misc_feature (69)..(69): n is a, c, g, or t

SEQ ID NO: 105820 - DNA, 147 bp, Homo Sapiens; identical to SEQ ID NO: 70123

SEQ ID NO: 105821 - DNA, 782 bp, Homo Sapiens; identical to SEQ ID NO: 70124
  misc_feature (71)..(71): n is a, c, g, or t

SEQ ID NO: 105822 - DNA, 532 bp, Homo Sapiens; identical to SEQ ID NO: 70125
  misc_feature (15)..(15): n is a, c, g, or t

SEQ ID NO: 105823 - DNA, 1170 bp, Homo Sapiens; identical to SEQ ID NO: 70129
  misc_feature (78)..(112): n is a, c, g, or t
  misc_feature (1038)..(1048): n is a, c, g, or t
  misc_feature (1093)..(1113): n is a, c, g, or t

SEQ ID NO: 105824 - DNA, 467 bp, Homo Sapiens; identical to SEQ ID NO: 70130
  misc_feature (22)..(22): n is a, c, g, or t

SEQ ID NO: 105825 - DNA, 944 bp, Homo Sapiens; identical to SEQ ID NO: 70131
  misc_feature (82)..(82): n is a, c, g, or t
  misc_feature (93)..(93): n is a, c, g, or t
  misc_feature (95)..(95): n is a, c, g, or t
  misc_feature (101)..(102): n is a, c, g, or t

SEQ ID NO: 105826 - DNA, 1277 bp, Homo Sapiens; identical to SEQ ID NO: 70132
  misc_feature (78)..(112): n is a, c, g, or t

SEQ ID NO: 105827 - DNA, 888 bp, Homo Sapiens; identical to SEQ ID NO: 70133
  misc_feature (744)..(744): n is a, c, g, or t

SEQ ID NO: 105828 - DNA, 1032 bp, Homo Sapiens; identical to SEQ ID NO: 70138
  misc_feature (30)..(30): n is a, c, g, or t
  misc_feature (39)..(39): n is a, c, g, or t
  misc_feature (54)..(54): n is a, c, g, or t
  misc_feature (63)..(437): n is a, c, g, or t

SEQ ID NO: 105829 - DNA, 353 bp, Homo Sapiens; identical to SEQ ID NO: 70139

SEQ ID NO: 105830 - DNA, 991 bp, Homo Sapiens; identical to SEQ ID NO: 70150
  misc_feature (867)..(924): n is a, c, g, or t

SEQ ID NO: 105831 - DNA, 587 bp, Homo Sapiens; identical to SEQ ID NO: 70151

SEQ ID NO: 105832 - DNA, 1087 bp, Homo Sapiens; identical to SEQ ID NO: 70152

SEQ ID NO: 105833 - DNA, 1602 bp, Homo Sapiens; identical to SEQ ID NO: 70153
  misc_feature (51)..(93): n is a, c, g, or t
  misc_feature (96)..(130): n is a, c, g, or t
  misc_feature (1288)..(1299): n is a, c, g, or t

SEQ ID NO: 105834 - DNA, 976 bp, Homo Sapiens; identical to SEQ ID NO: 70154
  misc_feature (79)..(113): n is a, c, g, or t

SEQ ID NO: 105835 - DNA, 997 bp, Homo Sapiens; identical to SEQ ID NO: 70155
  misc_feature (82)..(116): n is a, c, g, or t
  misc_feature (878)..(878): n is a, c, g, or t
  misc_feature (908)..(908): n is a, c, g, or t
  misc_feature (950)..(950): n is a, c, g, or t

SEQ ID NO: 105836 - DNA, 2020 bp, Homo Sapiens; identical to SEQ ID NO: 70163
  misc_feature (1369)..(1377): n is a, c, g, or t
  misc_feature (1669)..(1775): n is a, c, g, or t
  misc_feature (1818)..(1920): n is a, c, g, or t
  misc_feature (1941)..(1961): n is a, c, g, or t

SEQ ID NO: 105837 - DNA, 1341 bp, Homo Sapiens; identical to SEQ ID NO: 70164
  misc_feature (1180)..(1202): n is a, c, g, or t
  misc_feature (1204)..(1208): n is a, c, g, or t

SEQ ID NO: 105838 - DNA, 2893 bp, Homo Sapiens; identical to SEQ ID NO: 70166
  misc_feature (2667)..(2667): n is a, c, g, or t
  misc_feature (2708)..(2708): n is a, c, g, or t
  misc_feature (2714)..(2714): n is a, c, g, or t
  misc_feature (2732)..(2732): n is a, c, g, or t
  misc_feature (2764)..(2764): n is a, c, g, or t
  misc_feature (2766)..(2766): n is a, c, g, or t
  misc_feature (2801)..(2801): n is a, c, g, or t
  misc_feature (2805)..(2805): n is a, c, g, or t

SEQ ID NO: 105839 - DNA, 502 bp, Homo Sapiens; identical to SEQ ID NO: 70167

SEQ ID NO: 105840 - DNA, 2279 bp, Homo Sapiens; identical to SEQ ID NO: 70168
  misc_feature (238)..(238): n is a, c, g, or t
  misc_feature (1130)..(1138): n is a, c, g, or t
  misc_feature (1607)..(1637): n is a, c, g, or t
  misc_feature (1755)..(1755): n is a, c, g, or t

SEQ ID NO: 105841 - DNA, 1305 bp, Homo Sapiens; identical to SEQ ID NO: 70169

SEQ ID NO: 105842 - DNA, 684 bp, Homo Sapiens; identical to SEQ ID NO: 70170
  misc_feature (164)..(164): n is a, c, g, or t

SEQ ID NO: 105843 - DNA, 1471 bp, Homo Sapiens; identical to SEQ ID NO: 70173
  misc_feature (1360)..(1394): n is a, c, g, or t

SEQ ID NO: 105844 - DNA, 985 bp, Homo Sapiens; identical to SEQ ID NO: 70174

SEQ ID NO: 105845 - DNA, 829 bp, Homo Sapiens; identical to SEQ ID NO: 70175
  misc_feature (793)..(793): n is a, c, g, or t

SEQ ID NO: 105846 - DNA, 647 bp, Homo Sapiens; identical to SEQ ID NO: 70176

SEQ ID NO: 105847 - DNA, 1403 bp, Homo Sapiens; identical to SEQ ID NO: 70179
  misc_feature (61)..(103): n is a, c, g, or t
  misc_feature (107)..(141): n is a, c, g, or t

SEQ ID NO: 105848 - DNA, 1052 bp, Homo Sapiens; identical to SEQ ID NO: 70180
  misc_feature (77)..(111): n is a, c, g, or t

SEQ ID NO: 105849 - DNA, 1041 bp, Homo Sapiens; identical to SEQ ID NO: 70181
  misc_feature (27)..(27): n is a, c, g, or t
  misc_feature (34)..(34): n is a, c, g, or t
  misc_feature (102)..(102): n is a, c, g, or t
  misc_feature (161)..(161): n is a, c, g, or t
  misc_feature (170)..(170): n is a, c, g, or t
  misc_feature (175)..(175): n is a, c, g, or t
  misc_feature (211)..(211): n is a, c, g, or t
  misc_feature (235)..(235): n is a, c, g, or t
  misc_feature (362)..(362): n is a, c, g, or t

SEQ ID NO: 105850 - DNA, 638 bp, Homo Sapiens; identical to SEQ ID NO: 70182

SEQ ID NO: 105851 - DNA, 1450 bp, Homo Sapiens; identical to SEQ ID NO: 70183
  misc_feature (1437)..(1437): n is a, c, g, or t

SEQ ID NO: 105852 - DNA, 444 bp, Homo Sapiens; identical to SEQ ID NO: 70184
  misc_feature (328)..(328): n is a, c, g, or t

SEQ ID NO: 105853 - DNA, 835 bp, Homo Sapiens; identical to SEQ ID NO: 70185
  misc_feature (279)..(308): n is a, c, g, or t
  misc_feature (619)..(728): n is a, c, g, or t

SEQ ID NO: 105854 - DNA, 675 bp, Homo Sapiens; identical to SEQ ID NO: 70193
  misc_feature (347)..(361): n is a, c, g, or t
  misc_feature (427)..(473): n is a, c, g, or t

SEQ ID NO: 105855 - DNA, 469 bp, Homo Sapiens; identical to SEQ ID NO: 70194
  misc_feature (160)..(174): n is a, c, g, or t

SEQ ID NO: 105856 - DNA, 705 bp, Homo Sapiens; identical to SEQ ID NO: 70195
  misc_feature (33)..(33): n is a, c, g, or t
  misc_feature (45)..(45): n is a, c, g, or t
  misc_feature (156)..(219): n is a, c, g, or t

SEQ ID NO: 105857 - DNA, 1050 bp, Homo Sapiens; identical to SEQ ID NO: 70196
  misc_feature (18)..(18): n is a, c, g, or t
  misc_feature (35)..(35): n is a, c, g, or t
  misc_feature (75)..(75): n is a, c, g, or t
  misc_feature (106)..(106): n is a, c, g, or t
  misc_feature (115)..(115): n is a, c, g, or t
  misc_feature (119)..(119): n is a, c, g, or t
  misc_feature (126)..(126): n is a, c, g, or t
  misc_feature (141)..(141): n is a, c, g, or t
  misc_feature (153)..(153): n is a, c, g, or t
  misc_feature (162)..(162): n is a, c, g, or t
  misc_feature (165)..(165): n is a, c, g, or t
  misc_feature (186)..(186): n is a, c, g, or t
  misc_feature (195)..(195): n is a, c, g, or t
  misc_feature (197)..(197): n is a, c, g, or t
  misc_feature (204)..(204): n is a, c, g, or t
  misc_feature (213)..(213): n is a, c, g, or t
  misc_feature (218)..(220): n is a, c, g, or t
  misc_feature (239)..(249): n is a, c, g, or t

SEQ ID NO: 105858 - DNA, 1253 bp, Homo Sapiens; identical to SEQ ID NO: 70197
  misc_feature (23)..(23): n is a, c, g, or t
  misc_feature (966)..(1029): n is a, c, g, or t

SEQ ID NO: 105859 - DNA, 334 bp, Homo Sapiens; identical to SEQ ID NO: 70198

SEQ ID NO: 105860 - DNA, 2246 bp, Homo Sapiens; identical to SEQ ID NO: 70205
  misc_feature (56)..(57): n is a, c, g, or t
  misc_feature (62)..(535): n is a, c, g, or t
  misc_feature (857)..(880): n is a, c, g, or t

SEQ ID NO: 105861 - DNA, 813 bp, Homo Sapiens; identical to SEQ ID NO: 70206

SEQ ID NO: 105862 - DNA, 2070 bp, Homo Sapiens; identical to SEQ ID NO: 70216
  misc_feature (86)..(120): n is a, c, g, or t
  misc_feature (1566)..(1689): n is a, c, g, or t
  misc_feature (1697)..(1714): n is a, c, g, or t
  misc_feature (1720)..(1739): n is a, c, g, or t
  misc_feature (1754)..(1833): n is a, c, g, or t
  misc_feature (1839)..(1899): n is a, c, g, or t
  misc_feature (1935)..(1945): n is a, c, g, or t
  misc_feature (1957)..(1970): n is a, c, g, or t

SEQ ID NO: 105863 - DNA, 1013 bp, Homo Sapiens; identical to SEQ ID NO: 70217

SEQ ID NO: 105864 - DNA, 3648 bp, Homo Sapiens; identical to SEQ ID NO: 70218
  misc_feature (2934)..(3057): n is a, c, g, or t
  misc_feature (3117)..(3181): n is a, c, g, or t
  misc_feature (3194)..(3207): n is a, c, g, or t

SEQ ID NO: 105865 - DNA, 377 bp, Homo Sapiens; identical to SEQ ID NO: 70219
  misc_feature (78)..(112): n is a, c, g, or t

SEQ ID NO: 105866 - DNA, 1687 bp, Homo Sapiens; identical to SEQ ID NO: 70220
  misc_feature (49)..(62): n is a, c, g, or t
  misc_feature (811)..(886): n is a, c, g, or t
  misc_feature (913)..(913): n is a, c, g, or t
  misc_feature (932)..(932): n is a, c, g, or t
  misc_feature (947)..(962): n is a, c, g, or t
  misc_feature (988)..(997): n is a, c, g, or t
  misc_feature (1139)..(1145): n is a, c, g, or t
  misc_feature (1147)..(1147): n is a, c, g, or t
  misc_feature (1149)..(1149): n is a, c, g, or t
  misc_feature (1153)..(1153): n is a, c, g, or t
  misc_feature (1156)..(1157): n is a, c, g, or t
  misc_feature (1159)..(1159): n is a, c, g, or t
  misc_feature (1163)..(1163): n is a, c, g, or t
  misc_feature (1174)..(1174): n is a, c, g, or t
  misc_feature (1178)..(1179): n is a, c, g, or t
  misc_feature (1554)..(1554): n is a, c, g, or t

SEQ ID NO: 105867 - DNA, 153 bp, Homo Sapiens; identical to SEQ ID NO: 70221

SEQ ID NO: 105868 - DNA, 812 bp, Homo Sapiens; identical to SEQ ID NO: 70226
  misc_feature (710)..(723): n is a, c, g, or t

SEQ ID NO: 105869 - DNA, 1151 bp, Homo Sapiens; identical to SEQ ID NO: 70227
  misc_feature (74)..(108): n is a, c, g, or t

SEQ ID NO: 105870 - DNA, 1758 bp, Homo Sapiens; identical to SEQ ID NO: 70228

SEQ ID NO: 105871 - DNA, 1169 bp, Homo Sapiens; identical to SEQ ID NO: 70229
  misc_feature (1067)..(1067): n is a, c, g, or t
  misc_feature (1092)..(1092): n is a, c, g, or t

SEQ ID NO: 105872 - DNA, 568 bp, Homo Sapiens; identical to SEQ ID NO: 70230

SEQ ID NO: 105873 - DNA, 531 bp, Homo Sapiens; identical to SEQ ID NO: 70231

SEQ ID NO: 105874 - DNA, 191 bp, Homo Sapiens; identical to SEQ ID NO: 70232

SEQ ID NO: 105875 - DNA, 561 bp, Homo Sapiens; identical to SEQ ID NO: 70233

SEQ ID NO: 105876 - DNA, 601 bp, Homo Sapiens; identical to SEQ ID NO: 70237
  misc_feature (76)..(150): n is a, c, g, or t

SEQ ID NO: 105877 - DNA, 654 bp, Homo Sapiens; identical to SEQ ID NO: 70238
  misc_feature (47)..(47): n is a, c, g, or t

SEQ ID NO: 105878 - DNA, 1065 bp, Homo Sapiens; identical to SEQ ID NO: 70239
  misc_feature (34)..(34): n is a, c, g, or t
  misc_feature (73)..(135): n is a, c, g, or t
  misc_feature (140)..(142): n is a, c, g, or t
  misc_feature (155)..(156): n is a, c, g, or t
  misc_feature (161)..(161): n is a, c, g, or t
  misc_feature (166)..(166): n is a, c, g, or t
  misc_feature (174)..(174): n is a, c, g, or t
  misc_feature (195)..(195): n is a, c, g, or t
  misc_feature (1002)..(1024): n is a, c, g, or t

SEQ ID NO: 105879 - DNA, 1656 bp, Homo Sapiens; identical to SEQ ID NO: 70240
  misc_feature (1132)..(1140): n is a, c, g, or t
  misc_feature (1456)..(1456): n is a, c, g, or t
  misc_feature (1600)..(1600): n is a, c, g, or t

SEQ ID NO: 105880 - DNA, 865 bp, Homo Sapiens; identical to SEQ ID NO: 70241
  misc_feature (119)..(119): n is a, c, g, or t
  misc_feature (395)..(408): n is a, c, g, or t

SEQ ID NO: 105881 - DNA, 1671 bp, Homo Sapiens; identical to SEQ ID NO: 70242
  misc_feature (1596)..(1627): n is a, c, g, or t

SEQ ID NO: 105882 - DNA, 465 bp, Homo Sapiens; identical to SEQ ID NO: 70243

SEQ ID NO: 105883 - DNA, 1096 bp, Homo Sapiens; identical to SEQ ID NO: 70254

SEQ ID NO: 105884 - DNA, 920 bp, Homo Sapiens; identical to SEQ ID NO: 70255
  misc_feature (712)..(712): n is a, c, g, or t
  misc_feature (718)..(718): n is a, c, g, or t

SEQ ID NO: 105885 - DNA, 1708 bp, Homo Sapiens; identical to SEQ ID NO: 70256
  misc_feature (74)..(108): n is a, c, g, or t
  misc_feature (1270)..(1503): n is a, c, g, or t
  misc_feature (1519)..(1527): n is a, c, g, or t
  misc_feature (1563)..(1575): n is a, c, g, or t

SEQ ID NO: 105886 - DNA, 1332 bp, Homo Sapiens; identical to SEQ ID NO: 70258
  misc_feature (48)..(82): n is a, c, g, or t

SEQ ID NO: 105887 - DNA, 735 bp, Homo Sapiens; identical to SEQ ID NO: 70259
  misc_feature (109)..(109): n is a, c, g, or t

SEQ ID NO: 105888 - DNA, 683 bp, Homo Sapiens; identical to SEQ ID NO: 70260

SEQ ID NO: 105889 - DNA, 699 bp, Homo Sapiens; identical to SEQ ID NO: 70262
  misc_feature (262)..(341): n is a, c, g, or t
  misc_feature (504)..(516): n is a, c, g, or t
  misc_feature (544)..(552): n is a, c, g, or t

SEQ ID NO: 105890 - DNA, 657 bp, Homo Sapiens; identical to SEQ ID NO: 70263
  misc_feature (202)..(302): n is a, c, g, or t
  misc_feature (461)..(473): n is a, c, g, or t
  misc_feature (501)..(510): n is a, c, g, or t

SEQ ID NO: 105891 - DNA, 1456 bp, Homo Sapiens; identical to SEQ ID NO: 70264
  misc_feature (165)..(284): n is a, c, g, or t

SEQ ID NO: 105892 - DNA, 956 bp, Homo Sapiens; identical to SEQ ID NO: 70265
  misc_feature (122)..(150): n is a, c, g, or t
  misc_feature (687)..(718): n is a, c, g, or t
  misc_feature (823)..(823): n is a, c, g, or t
  misc_feature (854)..(854): n is a, c, g, or t
  misc_feature (868)..(868): n is a, c, g, or t
  misc_feature (919)..(919): n is a, c, g, or t

SEQ ID NO: 105893 - DNA, 501 bp, Homo Sapiens; identical to SEQ ID NO: 70266
  misc_feature (53)..(86): n is a, c, g, or t

SEQ ID NO: 105894 - DNA, 959 bp, Homo Sapiens; identical to SEQ ID NO: 70267
  misc_feature (77)..(111): n is a, c, g, or t

SEQ ID NO: 105895 - DNA, 788 bp, Homo Sapiens; identical to SEQ ID NO: 70268

SEQ ID NO: 105896 - DNA, 1306 bp, Homo Sapiens; identical to SEQ ID NO: 70269

SEQ ID NO: 105897 - DNA, 701 bp, Homo Sapiens; identical to SEQ ID NO: 70275

SEQ ID NO: 105898 - DNA, 819 bp, Homo Sapiens; identical to SEQ ID NO: 70276

SEQ ID NO: 105899 - DNA, 1152 bp, Homo Sapiens; identical to SEQ ID NO: 70277

SEQ ID NO: 105900 - DNA, 427 bp, Homo Sapiens; identical to SEQ ID NO: 70278

SEQ ID NO: 105901 - DNA, 963 bp, Homo Sapiens; identical to SEQ ID NO: 70289
  misc_feature (670)..(670): n is a, c, g, or t

SEQ ID NO: 105902 - DNA, 388 bp, Homo Sapiens; identical to SEQ ID NO: 70290

SEQ ID NO: 105903 - DNA, 3198 bp, Homo Sapiens; identical to SEQ ID NO: 70291
  misc_feature (197)..(197): n is a, c, g, or t

SEQ ID NO: 105904 - DNA, 459 bp, Homo Sapiens; identical to SEQ ID NO: 70292

SEQ ID NO: 105905 - DNA, 1307 bp, Homo Sapiens; identical to SEQ ID NO: 70293

SEQ ID NO: 105906 - DNA, 299 bp, Homo Sapiens; identical to SEQ ID NO: 70294

SEQ ID NO: 105907 - DNA, 362 bp, Homo Sapiens; identical to SEQ ID NO: 70295

SEQ ID NO: 105908 - DNA, 470 bp, Homo Sapiens; identical to SEQ ID NO: 70296

SEQ ID NO: 105909 - DNA, 798 bp, Homo Sapiens; identical to SEQ ID NO: 70297

SEQ ID NO: 105910 - DNA, 489 bp, Homo Sapiens; identical to SEQ ID NO: 70298
  misc_feature (11)..(11): n is a, c, g, or t

SEQ ID NO: 105911 - DNA, 1358 bp, Homo Sapiens; identical to SEQ ID NO: 70300
  misc_feature (1053)..(1067): n is a, c, g, or t

SEQ ID NO: 105912 - DNA, 1439 bp, Homo Sapiens; identical to SEQ ID NO: 70301

SEQ ID NO: 105913 - DNA, 2376 bp, Homo Sapiens; identical to SEQ ID NO: 70302
  misc_feature (2130)..(2130): n is a, c, g, or t
  misc_feature (2133)..(2164): n is a, c, g, or t
  misc_feature (2168)..(2193): n is a, c, g, or t
  misc_feature (2195)..(2206): n is a, c, g, or t
  misc_feature (2208)..(2230): n is a, c, g, or t
  misc_feature (2232)..(2233): n is a, c, g, or t
  misc_feature (2235)..(2257): n is a, c, g, or t
  misc_feature (2259)..(2273): n is a, c, g, or t
  misc_feature (2275)..(2275): n is a, c, g, or t
  misc_feature (2277)..(2299): n is a, c, g, or t
  misc_feature (2301)..(2310): n is a, c, g, or t

SEQ ID NO: 105914 - DNA, 971 bp, Homo Sapiens; identical to SEQ ID NO: 70305

SEQ ID NO: 105915 - DNA, 909 bp, Homo Sapiens; identical to SEQ ID NO: 70306
  misc_feature (43)..(83): n is a, c, g, or t
  misc_feature (87)..(121): n is a, c, g, or t

SEQ ID NO: 105916 - DNA, 1140 bp, Homo Sapiens; identical to SEQ ID NO: 70307
  misc_feature (1019)..(1053): n is a, c, g, or t
  misc_feature (1057)..(1097): n is a, c, g, or t

SEQ ID NO: 105917 - DNA, 1041 bp, Homo Sapiens; identical to SEQ ID NO: 70308
  misc_feature (51)..(85): n is a, c, g, or t
  misc_feature (779)..(779): n is a, c, g, or t

SEQ ID NO: 105918 - DNA, 1169 bp, Homo Sapiens; identical to SEQ ID NO: 70309

SEQ ID NO: 105919 - DNA, 492 bp, Homo Sapiens; identical to SEQ ID NO: 70311

SEQ ID NO: 105920 - DNA, 1458 bp, Homo Sapiens; identical to SEQ ID NO: 70312
  misc_feature (365)..(388): n is a, c, g, or t
  misc_feature (1431)..(1431): n is a, c, g, or t
  misc_feature (1435)..(1435): n is a, c, g, or t

SEQ ID NO: 105921 - DNA, 3038 bp, Homo Sapiens; identical to SEQ ID NO: 70313

SEQ ID NO: 105922 - DNA, 1141 bp, Homo Sapiens; identical to SEQ ID NO: 70316
  misc_feature (637)..(663): n is a, c, g, or t
  misc_feature (667)..(707): n is a, c, g, or t

SEQ ID NO: 105923 - DNA, 1098 bp, Homo Sapiens; identical to SEQ ID NO: 70317
  misc_feature (110)..(139): n is a, c, g, or t
  misc_feature (143)..(187): n is a, c, g, or t
  misc_feature (628)..(682): n is a, c, g, or t

SEQ ID NO: 105924 - DNA, 417 bp, Homo Sapiens; identical to SEQ ID NO: 70318

SEQ ID NO: 105925 - DNA, 920 bp, Homo Sapiens; identical to SEQ ID NO: 70319
  misc_feature (409)..(438): n is a, c, g, or t
  misc_feature (442)..(486): n is a, c, g, or t

SEQ ID NO: 105926 - DNA, 280 bp, Homo Sapiens; identical to SEQ ID NO: 70320

SEQ ID NO: 105927 - DNA, 1789 bp, Homo Sapiens; identical to SEQ ID NO: 70321
  misc_feature (64)..(98): n is a, c, g, or t

SEQ ID NO: 105928 - DNA, 889 bp, Homo Sapiens; identical to SEQ ID NO: 70322

SEQ ID NO: 105929 - DNA, 1100 bp, Homo Sapiens; identical to SEQ ID NO: 70323
  misc_feature (912)..(912): n is a, c, g, or t
  misc_feature (957)..(957): n is a, c, g, or t

SEQ ID NO: 105930 - DNA, 918 bp, Homo Sapiens; identical to SEQ ID NO: 70324
  misc_feature (762)..(762): n is a, c, g, or t
  misc_feature (764)..(764): n is a, c, g, or t

SEQ ID NO: 105931 - DNA, 1086 bp, Homo Sapiens; identical to SEQ ID NO: 70325

SEQ ID NO: 105932 - DNA, 1025 bp, Homo Sapiens; identical to SEQ ID NO: 70326
  misc_feature (13)..(13): n is a, c, g, or t
  misc_feature (47)..(125): n is a, c, g, or t
  misc_feature (531)..(533): n is a, c, g, or t

SEQ ID NO: 105933 - DNA, 878 bp, Homo Sapiens; identical to SEQ ID NO: 70327

SEQ ID NO: 105934 - DNA, 608 bp, Homo Sapiens; identical to SEQ ID NO: 70333

SEQ ID NO: 105935 - DNA, 1432 bp, Homo Sapiens; identical to SEQ ID NO: 70334

SEQ ID NO: 105936 - DNA, 1007 bp, Homo Sapiens; identical to SEQ ID NO: 70336
  misc_feature (18)..(18): n is a, c, g, or t
  misc_feature (84)..(84): n is a, c, g, or t
  misc_feature (103)..(103): n is a, c, g, or t
  misc_feature (735)..(749): n is a, c, g, or t
  misc_feature (822)..(837): n is a, c, g, or t
  misc_feature (859)..(867): n is a, c, g, or t

SEQ ID NO: 105937 - DNA, 1724 bp, Homo Sapiens; identical to SEQ ID NO: 70337
  misc_feature (921)..(936): n is a, c, g, or t
  misc_feature (1009)..(1024): n is a, c, g, or t
  misc_feature (1046)..(1055): n is a, c, g, or t
  misc_feature (1195)..(1205): n is a, c, g, or t

SEQ ID NO: 105938 - DNA, 2673 bp, Homo Sapiens; identical to SEQ ID NO: 70344

SEQ ID NO: 105939 - DNA, 659 bp, Homo Sapiens; identical to SEQ ID NO: 70345
  misc_feature (47)..(47): n is a, c, g, or t
  misc_feature (464)..(549): n is a, c, g, or t

SEQ ID NO: 105940 - DNA, 846 bp, Homo Sapiens; identical to SEQ ID NO: 70347
  misc_feature (48)..(48): n is a, c, g, or t

SEQ ID NO: 105941 - DNA, 904 bp, Homo Sapiens; identical to SEQ ID NO: 70348

SEQ ID NO: 105942 - DNA, 1039 bp, Homo Sapiens; identical to SEQ ID NO: 70349
  misc_feature (43)..(83): n is a, c, g, or t
  misc_feature (87)..(121): n is a, c, g, or t

SEQ ID NO: 105943 - DNA, 1862 bp, Homo Sapiens; identical to SEQ ID NO: 70350
  misc_feature (1347)..(1378): n is a, c, g, or t
  misc_feature (1381)..(1386): n is a, c, g, or t
  misc_feature (1397)..(1397): n is a, c, g, or t

SEQ ID NO: 105944 - DNA, 1113 bp, Homo Sapiens; identical to SEQ ID NO: 70351
  misc_feature (116)..(116): n is a, c, g, or t

SEQ ID NO: 105945 - DNA, 941 bp, Homo Sapiens; identical to SEQ ID NO: 70352

SEQ ID NO: 105946 - DNA, 830 bp, Homo Sapiens; identical to SEQ ID NO: 70353

SEQ ID NO: 105947 - DNA, 1286 bp, Homo Sapiens; identical to SEQ ID NO: 70354

SEQ ID NO: 105948 - DNA, 1554 bp, Homo Sapiens; identical to SEQ ID NO: 70355
  misc_feature (1255)..(1255): n is a, c, g, or t
  misc_feature (1261)..(1261): n is a, c, g, or t
  misc_feature (1291)..(1303): n is a, c, g, or t
  misc_feature (1413)..(1421): n is a, c, g, or t
  misc_feature (1445)..(1445): n is a, c, g, or t

SEQ ID NO: 105949 - DNA, 1280 bp, Homo Sapiens; identical to SEQ ID NO: 70356

SEQ ID NO: 105950 - DNA, 1393 bp, Homo Sapiens; identical to SEQ ID NO: 70357
  misc_feature (18)..(18): n is a, c, g, or t

SEQ ID NO: 105951 - DNA, 557 bp, Homo Sapiens; identical to SEQ ID NO: 70361

SEQ ID NO: 105952 - DNA, 877 bp, Homo Sapiens; identical to SEQ ID NO: 70362
  misc_feature (843)..(843): n is a, c, g, or t

SEQ ID NO: 105953 - DNA, 3108 bp, Homo Sapiens; identical to SEQ ID NO: 70363

SEQ ID NO: 105954 - DNA, 857 bp, Homo Sapiens; identical to SEQ ID NO: 70366
  misc_feature (713)..(713): n is a, c, g, or t

SEQ ID NO: 105955 - DNA, 2367 bp, Homo Sapiens; identical to SEQ ID NO: 70367

SEQ ID NO: 105956 - DNA, 1857 bp, Homo Sapiens; identical to SEQ ID NO: 70368

SEQ ID NO: 105957 - DNA, 908 bp, Homo Sapiens; identical to SEQ ID NO: 70369

SEQ ID NO: 105958 - DNA, 1882 bp, Homo Sapiens; identical to SEQ ID NO: 70370

SEQ ID NO: 105959 - DNA, 1136 bp, Homo Sapiens; identical to SEQ ID NO: 70371
  misc_feature (921)..(945): n is a, c, g, or t

SEQ ID NO: 105960 - DNA, 703 bp, Homo Sapiens; identical to SEQ ID NO: 70372
  misc_feature (27)..(27): n is a, c, g, or t

SEQ ID NO: 105961 - DNA, 727 bp, Homo Sapiens; identical to SEQ ID NO: 70373

SEQ ID NO: 105962 - DNA, 754 bp, Homo Sapiens; identical to SEQ ID NO: 70374
  misc_feature (714)..(714): n is a, c, g, or t

SEQ ID NO: 105963 - DNA, 751 bp, Homo Sapiens; identical to SEQ ID NO: 70375

SEQ ID NO: 105964 - DNA, 1045 bp, Homo Sapiens; identical to SEQ ID NO: 70376
  misc_feature (36)..(36): n is a, c, g, or t
  misc_feature (38)..(38): n is a, c, g, or t
  misc_feature (69)..(70): n is a, c, g, or t
  misc_feature (98)..(98): n is a, c, g, or t
  misc_feature (110)..(481): n is a, c, g, or t

SEQ ID NO: 105965 - DNA, 1666 bp, Homo Sapiens; identical to SEQ ID NO: 70377

SEQ ID NO: 105966 - DNA, 537 bp, Homo Sapiens; identical to SEQ ID NO: 70378

SEQ ID NO: 105967 - DNA, 983 bp, Homo Sapiens; identical to SEQ ID NO: 70379
  misc_feature (301)..(301): n is a, c, g, or t
  misc_feature (304)..(304): n is a, c, g, or t

SEQ ID NO: 105968 - DNA, 1535 bp, Homo Sapiens; identical to SEQ ID NO: 70380

SEQ ID NO: 105969 - DNA, 1388 bp, Homo Sapiens; identical to SEQ ID NO: 70381
  misc_feature (53)..(74): n is a, c, g, or t
  misc_feature (1229)..(1239): n is a, c, g, or t

SEQ ID NO: 105970 - DNA, 1362 bp, Homo Sapiens; identical to SEQ ID NO: 70382
  misc_feature (1051)..(1051): n is a, c, g, or t
  misc_feature (1233)..(1296): n is a, c, g, or t

SEQ ID NO: 105971 - DNA, 885 bp, Homo Sapiens; identical to SEQ ID NO: 70384

SEQ ID NO: 105972 - DNA, 952 bp, Homo Sapiens; identical to SEQ ID NO: 70385

SEQ ID NO: 105973 - DNA, 954 bp, Homo Sapiens; identical to SEQ ID NO: 70386

SEQ ID NO: 105974 - DNA, 739 bp, Homo Sapiens; identical to SEQ ID NO: 70387

SEQ ID NO: 105975 - DNA, 2699 bp, Homo Sapiens; identical to SEQ ID NO: 70388
  misc_feature (2314)..(2314): n is a, c, g, or t
  misc_feature (2324)..(2324): n is a, c, g, or t
  misc_feature (2425)..(2425): n is a, c, g, or t
  misc_feature (2574)..(2574): n is a, c, g, or t

SEQ ID NO: 105976 - DNA, 493 bp, Homo Sapiens; identical to SEQ ID NO: 70389

SEQ ID NO: 105977 - DNA, 724 bp, Homo Sapiens; identical to SEQ ID NO: 70390

SEQ ID NO: 105978 - DNA, 1330 bp, Homo Sapiens; identical to SEQ ID NO: 70397
  misc_feature (1226)..(1260): n is a, c, g, or t

SEQ ID NO: 105979 - DNA, 907 bp, Homo Sapiens; identical to SEQ ID NO: 70398

SEQ ID NO: 105980 - DNA, 1020 bp, Homo Sapiens; identical to SEQ ID NO: 70399
  misc_feature (948)..(970): n is a, c, g, or t

SEQ ID NO: 105981 - DNA, 1149 bp, Homo Sapiens; identical to SEQ ID NO: 70400

SEQ ID NO: 105982 - DNA, 934 bp, Homo Sapiens; identical to SEQ ID NO: 70401

SEQ ID NO: 105983 - DNA, 1198 bp, Homo Sapiens; identical to SEQ ID NO: 70402
  misc_feature (1012)..(1074): n is a, c, g, or t

SEQ ID NO: 105984 - DNA, 1704 bp, Homo Sapiens; identical to SEQ ID NO: 70403
  misc_feature (355)..(401): n is a, c, g, or t

SEQ ID NO: 105985 - DNA, 890 bp, Homo Sapiens; identical to SEQ ID NO: 70405

SEQ ID NO: 105986 - DNA, 1316 bp, Homo Sapiens; identical to SEQ ID NO: 70406

SEQ ID NO: 105987 - DNA, 1149 bp, Homo Sapiens; identical to SEQ ID NO: 70407
  misc_feature (899)..(936): n is a, c, g, or t

SEQ ID NO: 105988 - DNA, 444 bp, Homo Sapiens; identical to SEQ ID NO: 70408

SEQ ID NO: 105989 - DNA, 702 bp, Homo Sapiens; identical to SEQ ID NO: 70409
  misc_feature (66)..(104): n is a, c, g, or t
  misc_feature (579)..(613): n is a, c, g, or t
  misc_feature (617)..(660): n is a, c, g, or t

SEQ ID NO: 105990 - DNA, 1196 bp, Homo Sapiens; identical to SEQ ID NO: 70410

SEQ ID NO: 105991 - DNA, 862 bp, Homo Sapiens; identical to SEQ ID NO: 70411

SEQ ID NO: 105992 - DNA, 1084 bp, Homo Sapiens; identical to SEQ ID NO: 70412
  misc_feature (934)..(934): n is a, c, g, or t
  misc_feature (973)..(973): n is a, c, g, or t

SEQ ID NO: 105993 - DNA, 1416 bp, Homo Sapiens; identical to SEQ ID NO: 70413

SEQ ID NO: 105994 - DNA, 981 bp, Homo Sapiens; identical to SEQ ID NO: 70414
  misc_feature (246)..(246): n is a, c, g, or t
  misc_feature (378)..(413): n is a, c, g, or t

SEQ ID NO: 105995 - DNA, 446 bp, Homo Sapiens; identical to SEQ ID NO: 70415

SEQ ID NO: 105996 - DNA, 1073 bp, Homo Sapiens; identical to SEQ ID NO: 70416
  misc_feature (205)..(205): n is a, c, g, or t

SEQ ID NO: 105997 - DNA, 999 bp, Homo Sapiens; identical to SEQ ID NO: 70420
  misc_feature (109)..(151): n is a, c, g, or t
  misc_feature (272)..(353): n is a, c, g, or t
  misc_feature (904)..(904): n is a, c, g, or t

SEQ ID NO: 105998 - DNA, 512 bp, Homo Sapiens; identical to SEQ ID NO: 70421
  misc_feature (148)..(224): n is a, c, g, or t
  misc_feature (365)..(365): n is a, c, g, or t
  misc_feature (429)..(429): n is a, c, g, or t

SEQ ID NO: 105999 - DNA, 463 bp, Homo Sapiens; identical to SEQ ID NO: 70422
  misc_feature (79)..(79): n is a, c, g, or t
  misc_feature (83)..(174): n is a, c, g, or t

SEQ ID NO: 106000 - DNA, 1171 bp, Homo Sapiens; identical to SEQ ID NO: 70423
  misc_feature (14)..(14): n is a, c, g, or t
  misc_feature (38)..(38): n is a, c, g, or t
  misc_feature (89)..(89): n is a, c, g, or t
  misc_feature (97)..(110): n is a, c, g, or t
  misc_feature (942)..(942): n is a, c, g, or t

SEQ ID NO: 106001 - DNA, 2473 bp, Homo Sapiens; identical to SEQ ID NO: 70424
  misc_feature (449)..(449): n is a, c, g, or t
  misc_feature (603)..(603): n is a, c, g, or t
  misc_feature (628)..(628): n is a, c, g, or t
  misc_feature (1982)..(1995): n is a, c, g, or t

SEQ ID NO: 106002 - DNA, 1839 bp, Homo Sapiens; identical to SEQ ID NO: 70427

SEQ ID NO: 106003 - DNA, 955 bp, Homo Sapiens; identical to SEQ ID NO: 70428

SEQ ID NO: 106004 - DNA, 669 bp, Homo Sapiens; identical to SEQ ID NO: 70429

SEQ ID NO: 106005 - DNA, 1154 bp, Homo Sapiens; identical to SEQ ID NO: 70430

SEQ ID NO: 106006 - DNA, 1169 bp, Homo Sapiens; identical to SEQ ID NO: 70431

SEQ ID NO: 106007 - DNA, 924 bp, Homo Sapiens; identical to SEQ ID NO: 70432

SEQ ID NO: 106008 - DNA, 1543 bp, Homo Sapiens; identical to SEQ ID NO: 70433

SEQ ID NO: 106009 - DNA, 1978 bp, Homo Sapiens; identical to SEQ ID NO: 70434
  misc_feature (718)..(728): n is a, c, g, or t
  misc_feature (1308)..(1359): n is a, c, g, or t

SEQ ID NO: 106010 - DNA, 513 bp, Homo Sapiens; identical to SEQ ID NO: 70435

SEQ ID NO: 106011 - DNA, 634 bp, Homo Sapiens; identical to SEQ ID NO: 70440
  misc_feature (54)..(146): n is a, c, g, or t

SEQ ID NO: 106012 - DNA, 1411 bp, Homo Sapiens; identical to SEQ ID NO: 70441
  misc_feature (229)..(229): n is a, c, g, or t
  misc_feature (1389)..(1389): n is a, c, g, or t

SEQ ID NO: 106013 - DNA, 1241 bp, Homo Sapiens; identical to SEQ ID NO: 70442
  misc_feature (511)..(511): n is a, c, g, or t
  misc_feature (1152)..(1183): n is a, c, g, or t

SEQ ID NO: 106014 - DNA, 1533 bp, Homo Sapiens; identical to SEQ ID NO: 70443
  misc_feature (1256)..(1285): n is a, c, g, or t

SEQ ID NO: 106015 - DNA, 1368 bp, Homo Sapiens; identical to SEQ ID NO: 70444

SEQ ID NO: 106016 - DNA, 1080 bp, Homo Sapiens; identical to SEQ ID NO: 70445
  misc_feature (804)..(804): n is a, c, g, or t

SEQ ID NO: 106017 - DNA, 1387 bp, Homo Sapiens; identical to SEQ ID NO: 70446
  misc_feature (307)..(398): n is a, c, g, or t

SEQ ID NO: 106018 - DNA, 421 bp, Homo Sapiens; identical to SEQ ID NO: 70447

SEQ ID NO: 106019 - DNA, 1839 bp, Homo Sapiens; identical to SEQ ID NO: 70457
  misc_feature (1803)..(1803): n is a, c, g, or t

SEQ ID NO: 106020 - DNA, 958 bp, Homo Sapiens; identical to SEQ ID NO: 70458
  misc_feature (918)..(918): n is a, c, g, or t

SEQ ID NO: 106021 - DNA, 1603 bp, Homo Sapiens; identical to SEQ ID NO: 70459
  misc_feature (1320)..(1320): n is a, c, g, or t

SEQ ID NO: 106022 - DNA, 1313 bp, Homo Sapiens; identical to SEQ ID NO: 70460
  misc_feature (51)..(51): n is a, c, g, or t
  misc_feature (121)..(121): n is a, c, g, or t
  misc_feature (154)..(154): n is a, c, g, or t
  misc_feature (157)..(157): n is a, c, g, or t

SEQ ID NO: 106023 - DNA, 734 bp, Homo Sapiens; identical to SEQ ID NO: 70461
  misc_feature (114)..(122): n is a, c, g, or t

SEQ ID NO: 106024 - DNA, 1565 bp, Homo Sapiens; identical to SEQ ID NO: 70462

SEQ ID NO: 106025 - DNA, 1145 bp, Homo Sapiens; identical to SEQ ID NO: 70463
  misc_feature (432)..(432): n is a, c, g, or t
  misc_feature (916)..(982): n is a, c, g, or t

SEQ ID NO: 106026 - DNA, 1332 bp, Homo Sapiens; identical to SEQ ID NO: 70464
  misc_feature (171)..(237): n is a, c, g, or t
  misc_feature (1249)..(1266): n is a, c, g, or t

SEQ ID NO: 106027 - DNA, 786 bp, Homo Sapiens; identical to SEQ ID NO: 70465
  misc_feature (164)..(230): n is a, c, g, or t
  misc_feature (666)..(666): n is a, c, g, or t

SEQ ID NO: 106028 - DNA, 738 bp, Homo Sapiens; identical to SEQ ID NO: 70466
  misc_feature (177)..(243): n is a, c, g, or t

SEQ ID NO: 106029 - DNA, 1254 bp, Homo Sapiens; identical to SEQ ID NO: 70467

SEQ ID NO: 106030 - DNA, 1129 bp, Homo Sapiens; identical to SEQ ID NO: 70468
  misc_feature (177)..(243): n is a, c, g, or t

SEQ ID NO: 106031 - DNA, 2581 bp, Homo Sapiens; identical to SEQ ID NO: 70470
  misc_feature (1640)..(1729): n is a, c, g, or t
  misc_feature (1823)..(1823): n is a, c, g, or t
  misc_feature (1887)..(1896): n is a, c, g, or t
  misc_feature (2045)..(2045): n is a, c, g, or t

SEQ ID NO: 106032 - DNA, 987 bp, Homo Sapiens; identical to SEQ ID NO: 70471

SEQ ID NO: 106033 - DNA, 806 bp, Homo Sapiens; identical to SEQ ID NO: 70472

SEQ ID NO: 106034 - DNA, 2160 bp, Homo Sapiens; identical to SEQ ID NO: 70473

SEQ ID NO: 106035 - DNA, 857 bp, Homo Sapiens; identical to SEQ ID NO: 70474
  misc_feature (686)..(686): n is a, c, g, or t
  misc_feature (779)..(780): n is a, c, g, or t
  misc_feature (789)..(789): n is a, c, g, or t

SEQ ID NO: 106036 - DNA, 958 bp, Homo Sapiens; identical to SEQ ID NO: 70475
  misc_feature (14)..(14): n is a, c, g, or t
  misc_feature (125)..(125): n is a, c, g, or t
  misc_feature (132)..(132): n is a, c, g, or t
  misc_feature (139)..(139): n is a, c, g, or t
  misc_feature (220)..(220): n is a, c, g, or t
  misc_feature (252)..(252): n is a, c, g, or t
  misc_feature (667)..(700): n is a, c, g, or t

SEQ ID NO: 106037 - DNA, 3491 bp, Homo Sapiens; identical to SEQ ID NO: 70476
  misc_feature (2393)..(2420): n is a, c, g, or t
  misc_feature (2445)..(2461): n is a, c, g, or t
  misc_feature (3069)..(3070): n is a, c, g, or t
  misc_feature (3073)..(3073): n is a, c, g, or t
  misc_feature (3077)..(3080): n is a, c, g, or t
  misc_feature (3086)..(3087): n is a, c, g, or t
  misc_feature (3089)..(3089): n is a, c, g, or t
  misc_feature (3104)..(3105): n is a, c, g, or t
  misc_feature (3108)..(3108): n is a, c, g, or t
  misc_feature (3119)..(3120): n is a, c, g, or t
  misc_feature (3151)..(3151): n is a, c, g, or t
  misc_feature (3163)..(3163): n is a, c, g, or t
  misc_feature (3186)..(3187): n is a, c, g, or t
  misc_feature (3209)..(3209): n is a, c, g, or t
  misc_feature (3405)..(3405): n is a, c, g, or t
  misc_feature (3416)..(3416): n is a, c, g, or t

SEQ ID NO: 106038 - DNA, 581 bp, Homo Sapiens; identical to SEQ ID NO: 70477
  misc_feature (132)..(272): n is a, c, g, or t

SEQ ID NO: 106039 - DNA, 2120 bp, Homo Sapiens; identical to SEQ ID NO: 70478

SEQ ID NO: 106040 - DNA, 1615 bp, Homo Sapiens; identical to SEQ ID NO: 70482
  misc_feature (673)..(689): n is a, c, g, or t
  misc_feature (1183)..(1277): n is a, c, g, or t
  misc_feature (1523)..(1557): n is a, c, g, or t

SEQ ID NO: 106041 - DNA, 500 bp, Homo Sapiens; identical to SEQ ID NO: 70483
  misc_feature (60)..(155): n is a, c, g, or t
  misc_feature (401)..(435): n is a, c, g, or t

SEQ ID NO: 106042 - DNA, 487 bp, Homo Sapiens; identical to SEQ ID NO: 70484
  misc_feature (45)..(139): n is a, c, g, or t
  misc_feature (385)..(397): n is a, c, g, or t

SEQ ID NO: 106043 - DNA, 3174 bp, Homo Sapiens; identical to SEQ ID NO: 70485
  misc_feature (2957)..(2967): n is a, c, g, or t

SEQ ID NO: 106044 - DNA, 3735 bp, Homo Sapiens; identical to SEQ ID NO: 70486
  misc_feature (3119)..(3154): n is a, c, g, or t
  misc_feature (3307)..(3315): n is a, c, g, or t
  misc_feature (3533)..(3541): n is a, c, g, or t

SEQ ID NO: 106045 - DNA, 1101 bp, Homo Sapiens; identical to SEQ ID NO: 70487
  misc_feature (153)..(220): n is a, c, g, or t

SEQ ID NO: 106046 - DNA, 797 bp, Homo Sapiens; identical to SEQ ID NO: 70488
  misc_feature (721)..(721): n is a, c, g, or t

SEQ ID NO: 106047 - DNA, 918 bp, Homo Sapiens; identical to SEQ ID NO: 70489
  misc_feature (721)..(721): n is a, c, g, or t

SEQ ID NO: 106048 - DNA, 1039 bp, Homo Sapiens; identical to SEQ ID NO: 70490
  misc_feature (193)..(248): n is a, c, g, or t
  misc_feature (773)..(781): n is a, c, g, or t

SEQ ID NO: 106049 - DNA, 770 bp, Homo Sapiens; identical to SEQ ID NO: 70491
  misc_feature (35)..(35): n is a, c, g, or t
  misc_feature (89)..(89): n is a, c, g, or t
  misc_feature (109)..(109): n is a, c, g, or t
  misc_feature (148)..(148): n is a, c, g, or t
  misc_feature (158)..(158): n is a, c, g, or t
  misc_feature (213)..(248): n is a, c, g, or t
  misc_feature (394)..(394): n is a, c, g, or t

SEQ ID NO: 106050 - DNA, 1029 bp, Homo Sapiens; identical to SEQ ID NO: 70493

SEQ ID NO: 106051 - DNA, 2827 bp, Homo Sapiens; identical to SEQ ID NO: 70494

SEQ ID NO: 106052 - DNA, 887 bp, Homo Sapiens; identical to SEQ ID NO: 70495
  misc_feature (135)..(135): n is a, c, g, or t
  misc_feature (594)..(681): n is a, c, g, or t
  misc_feature (727)..(739): n is a, c, g, or t

SEQ ID NO: 106053 - DNA, 1068 bp, Homo Sapiens; identical to SEQ ID NO: 70496

SEQ ID NO: 106054 - DNA, 727 bp, Homo Sapiens; identical to SEQ ID NO: 70500

SEQ ID NO: 106055 - DNA, 1687 bp, Homo Sapiens; identical to SEQ ID NO: 70501
  misc_feature (425)..(451): n is a, c, g, or t

SEQ ID NO: 106056 - DNA, 720 bp, Homo Sapiens; identical to SEQ ID NO: 70502
  misc_feature (73)..(73): n is a, c, g, or t
  misc_feature (447)..(473): n is a, c, g, or t

SEQ ID NO: 106057 - DNA, 948 bp, Homo Sapiens; identical to SEQ ID NO: 70503
  misc_feature (63)..(89): n is a, c, g, or t

SEQ ID NO: 106058 - DNA, 1760 bp, Homo Sapiens; identical to SEQ ID NO: 70504
  misc_feature (147)..(181): n is a, c, g, or t

SEQ ID NO: 106059 - DNA, 1515 bp, Homo Sapiens; identical to SEQ ID NO: 70505
  misc_feature (352)..(432): n is a, c, g, or t

SEQ ID NO: 106060 - DNA, 1148 bp, Homo Sapiens; identical to SEQ ID NO: 70506
  misc_feature (270)..(278): n is a, c, g, or t
  misc_feature (1066)..(1080): n is a, c, g, or t

SEQ ID NO: 106061 - DNA, 979 bp, Homo Sapiens; identical to SEQ ID NO: 70507
  misc_feature (489)..(498): n is a, c, g, or t

SEQ ID NO: 106062 - DNA, 583 bp, Homo Sapiens; identical to SEQ ID NO: 70510

SEQ ID NO: 106063 - DNA, 1758 bp, Homo Sapiens; identical to SEQ ID NO: 70511
  misc_feature (1302)..(1311): n is a, c, g, or t
  misc_feature (1586)..(1595): n is a, c, g, or t

SEQ ID NO: 106064 - DNA, 1372 bp, Homo Sapiens; identical to SEQ ID NO: 70512
  misc_feature (201)..(220): n is a, c, g, or t
  misc_feature (1076)..(1084): n is a, c, g, or t

SEQ ID NO: 106065 - DNA, 891 bp, Homo Sapiens; identical to SEQ ID NO: 70513
  misc_feature (225)..(244): n is a, c, g, or t
  misc_feature (599)..(612): n is a, c, g, or t

SEQ ID NO: 106066 - DNA, 914 bp, Homo Sapiens; identical to SEQ ID NO: 70514

SEQ ID NO: 106067 - DNA, 1043 bp, Homo Sapiens; identical to SEQ ID NO: 70515

SEQ ID NO: 106068 - DNA, 1230 bp, Homo Sapiens; identical to SEQ ID NO: 70523
  misc_feature (113)..(113): n is a, c, g, or t

SEQ ID NO: 106069 - DNA, 720 bp, Homo Sapiens; identical to SEQ ID NO: 70524

SEQ ID NO: 106070 - DNA, 2351 bp, Homo Sapiens; identical to SEQ ID NO: 70525

SEQ ID NO: 106071 - DNA, 1036 bp, Homo Sapiens; identical to SEQ ID NO: 70531
  misc_feature (59)..(59): n is a, c, g, or t
  misc_feature (120)..(508): n is a, c, g, or t
  misc_feature (531)..(540): n is a, c, g, or t

SEQ ID NO: 106072 - DNA, 1470 bp, Homo Sapiens; identical to SEQ ID NO: 70532

SEQ ID NO: 106073 - DNA, 1073 bp, Homo Sapiens; identical to SEQ ID NO: 70533
  misc_feature (990)..(1024): n is a, c, g, or t

SEQ ID NO: 106074 - DNA, 1828 bp, Homo Sapiens; identical to SEQ ID NO: 70534
  misc_feature (79)..(114): n is a, c, g, or t
  misc_feature (1182)..(1191): n is a, c, g, or t
  misc_feature (1763)..(1772): n is a, c, g, or t

SEQ ID NO: 106075 - DNA, 806 bp, Homo Sapiens; identical to SEQ ID NO: 70535
  misc_feature (150)..(156): n is a, c, g, or t
  misc_feature (158)..(166): n is a, c, g, or t
  misc_feature (168)..(174): n is a, c, g, or t
  misc_feature (178)..(179): n is a, c, g, or t
  misc_feature (182)..(183): n is a, c, g, or t
  misc_feature (185)..(207): n is a, c, g, or t
  misc_feature (209)..(222): n is a, c, g, or t
  misc_feature (225)..(229): n is a, c, g, or t
  misc_feature (231)..(231): n is a, c, g, or t
  misc_feature (253)..(266): n is a, c, g, or t

SEQ ID NO: 106076 - DNA, 1015 bp, Homo Sapiens; identical to SEQ ID NO: 70539
  misc_feature (60)..(79): n is a, c, g, or t

SEQ ID NO: 106077 - DNA, 2017 bp, Homo Sapiens; identical to SEQ ID NO: 70540

SEQ ID NO: 106078 - DNA, 1195 bp, Homo Sapiens; identical to SEQ ID NO: 70549
  misc_feature (94)..(107): n is a, c, g, or t

SEQ ID NO: 106079 - DNA, 933 bp, Homo Sapiens; identical to SEQ ID NO: 70550
  misc_feature (666)..(700): n is a, c, g, or t

SEQ ID NO: 106080 - DNA, 1071 bp, Homo Sapiens; identical to SEQ ID NO: 70562
  misc_feature (770)..(918): n is a, c, g, or t
  misc_feature (988)..(1022): n is a, c, g, or t

SEQ ID NO: 106081 - DNA, 1785 bp, Homo Sapiens; identical to SEQ ID NO: 70563
  misc_feature (1730)..(1738): n is a, c, g, or t

SEQ ID NO: 106082 - DNA, 1099 bp, Homo Sapiens; identical to SEQ ID NO: 70572
  misc_feature (15)..(15): n is a, c, g, or t
  misc_feature (26)..(26): n is a, c, g, or t
  misc_feature (168)..(262): n is a, c, g, or t
  misc_feature (266)..(373): n is a, c, g, or t

SEQ ID NO: 106083 - DNA, 1292 bp, Homo Sapiens; identical to SEQ ID NO: 70573
  misc_feature (62)..(80): n is a, c, g, or t
  misc_feature (85)..(100): n is a, c, g, or t

SEQ ID NO: 106084 - DNA, 567 bp, Homo Sapiens; identical to SEQ ID NO: 70574
  misc_feature (184)..(247): n is a, c, g, or t

SEQ ID NO: 106085 - DNA, 623 bp, Homo Sapiens; identical to SEQ ID NO: 70583
  misc_feature (44)..(81): n is a, c, g, or t

SEQ ID NO: 106086 - DNA, 1815 bp, Homo Sapiens; identical to SEQ ID NO: 70584
  misc_feature (1190)..(1198): n is a, c, g, or t
  misc_feature (1248)..(1271): n is a, c, g, or t

SEQ ID NO: 106087 - DNA, 740 bp, Homo Sapiens; identical to SEQ ID NO: 70586
  misc_feature (257)..(257): n is a, c, g, or t
  misc_feature (506)..(535): n is a, c, g, or t

SEQ ID NO: 106088 - DNA, 303 bp, Homo Sapiens; identical to SEQ ID NO: 70587
  misc_feature (69)..(98): n is a, c, g, or t

SEQ ID NO: 106089 - DNA, 2002 bp, Homo Sapiens; identical to SEQ ID NO: 70588
  misc_feature (1930)..(1941): n is a, c, g, or t

SEQ ID NO: 106090 - DNA, 1316 bp, Homo Sapiens; identical to SEQ ID NO: 70589

SEQ ID NO: 106091 - DNA, 2132 bp, Homo Sapiens; identical to SEQ ID NO: 70590

SEQ ID NO: 106092 - DNA, 1142 bp, Homo Sapiens; identical to SEQ ID NO: 70595
  misc_feature (42)..(88): n is a, c, g, or t

SEQ ID NO: 106093 - DNA, 726 bp, Homo Sapiens; identical to SEQ ID NO: 70596
  misc_feature (552)..(573): n is a, c, g, or t

SEQ ID NO: 106094 - DNA, 1357 bp, Homo Sapiens; identical to SEQ ID NO: 70598
  misc_feature (89)..(123): n is a, c, g, or t

SEQ ID NO: 106095 - DNA, 990 bp, Homo Sapiens; identical to SEQ ID NO: 70599
  misc_feature (210)..(218): n is a, c, g, or t
  misc_feature (343)..(351): n is a, c, g, or t
  misc_feature (396)..(413): n is a, c, g, or t
  misc_feature (492)..(517): n is a, c, g, or t

SEQ ID NO: 106096 - DNA, 890 bp, Homo Sapiens; identical to SEQ ID NO: 70600
  misc_feature (87)..(142): n is a, c, g, or t
  misc_feature (144)..(194): n is a, c, g, or t

SEQ ID NO: 106097 - DNA, 1081 bp, Homo Sapiens; identical to SEQ ID NO: 70601

SEQ ID NO: 106098 - DNA, 732 bp, Homo Sapiens; identical to SEQ ID NO: 70602

SEQ ID NO: 106099 - DNA, 1974 bp, Homo Sapiens; identical to SEQ ID NO: 70604
  misc_feature (192)..(209): n is a, c, g, or t
  misc_feature (490)..(507): n is a, c, g, or t
  misc_feature (610)..(632): n is a, c, g, or t
  misc_feature (636)..(680): n is a, c, g, or t
  misc_feature (1607)..(1672): n is a, c, g, or t

SEQ ID NO: 106100 - DNA, 342 bp, Homo Sapiens; identical to SEQ ID NO: 70605

SEQ ID NO: 106101 - DNA, 660 bp, Homo Sapiens; identical to SEQ ID NO: 70606
  misc_feature (59)..(59): n is a, c, g, or t
  misc_feature (532)..(544): n is a, c, g, or t

SEQ ID NO: 106102 - DNA, 1023 bp, Homo Sapiens; identical to SEQ ID NO: 70607
  misc_feature (118)..(119): n is a, c, g, or t
  misc_feature (133)..(281): n is a, c, g, or t
  misc_feature (896)..(909): n is a, c, g, or t

SEQ ID NO: 106103 - DNA, 1425 bp, Homo Sapiens; identical to SEQ ID NO: 70608

SEQ ID NO: 106104 - DNA, 1309 bp, Homo Sapiens; identical to SEQ ID NO: 70609

SEQ ID NO: 106105 - DNA, 1351 bp, Homo Sapiens; identical to SEQ ID NO: 70611

SEQ ID NO: 106106 - DNA, 791 bp, Homo Sapiens; identical to SEQ ID NO: 70612
  misc_feature (80)..(114): n is a, c, g, or t

SEQ ID NO: 106107 - DNA, 698 bp, Homo Sapiens; identical to SEQ ID NO: 70613

SEQ ID NO: 106108 - DNA, 1049 bp, Homo Sapiens; identical to SEQ ID NO: 70614

SEQ ID NO: 106109 - DNA, 917 bp, Homo Sapiens; identical to SEQ ID NO: 70615

SEQ ID NO: 106110 - DNA, 973 bp, Homo Sapiens; identical to SEQ ID NO: 70616
  misc_feature (508)..(593): n is a, c, g, or t

SEQ ID NO: 106111 - DNA, 855 bp, Homo Sapiens; identical to SEQ ID NO: 70617

SEQ ID NO: 106112 - DNA, 1924 bp, Homo Sapiens; identical to SEQ ID NO: 70618

SEQ ID NO: 106113 - DNA, 1503 bp, Homo Sapiens; identical to SEQ ID NO: 70619

SEQ ID NO: 106114 - DNA, 515 bp, Homo Sapiens; identical to SEQ ID NO: 70620

SEQ ID NO: 106115 - DNA, 539 bp, Homo Sapiens; identical to SEQ ID NO: 70621
  misc_feature (62)..(193): n is a, c, g, or t

SEQ ID NO: 106116 - DNA, 406 bp, Homo Sapiens; identical to SEQ ID NO: 70622

SEQ ID NO: 106117 - DNA, 369 bp, Homo Sapiens; identical to SEQ ID NO: 70623

SEQ ID NO: 106118 - DNA, 660 bp, Homo Sapiens; identical to SEQ ID NO: 70624
  misc_feature (56)..(74): n is a, c, g, or t
  misc_feature (599)..(599): n is a, c, g, or t

SEQ ID NO: 106119 - DNA, 991 bp, Homo Sapiens; identical to SEQ ID NO: 70625
  misc_feature (14)..(14): n is a, c, g, or t
  misc_feature (919)..(936): n is a, c, g, or t

SEQ ID NO: 106120 - DNA, 426 bp, Homo Sapiens; identical to SEQ ID NO: 70626

SEQ ID NO: 106121 - DNA, 827 bp, Homo Sapiens; identical to SEQ ID NO: 70627
  misc_feature (544)..(561): n is a, c, g, or t

SEQ ID NO: 106122 - DNA, 688 bp, Homo Sapiens; identical to SEQ ID NO: 70628
  misc_feature (123)..(123): n is a, c, g, or t
  misc_feature (159)..(159): n is a, c, g, or t
  misc_feature (615)..(632): n is a, c, g, or t

SEQ ID NO: 106123 - DNA, 680 bp, Homo Sapiens; identical to SEQ ID NO: 70630
  misc_feature (12)..(12): n is a, c, g, or t
  misc_feature (106)..(106): n is a, c, g, or t

SEQ ID NO: 106124 - DNA, 755 bp, Homo Sapiens; identical to SEQ ID NO: 70631

SEQ ID NO: 106125 - DNA, 576 bp, Homo Sapiens; identical to SEQ ID NO: 70632

SEQ ID NO: 106126 - DNA, 839 bp, Homo Sapiens; identical to SEQ ID NO: 3590

SEQ ID NO: 106127 - DNA, 665 bp, Homo Sapiens; identical to SEQ ID NO: 70634
  misc_feature (189)..(270): n is a, c, g, or t
  misc_feature (530)..(530): n is a, c, g, or t

SEQ ID NO: 106128 - DNA, 1040 bp, Homo Sapiens; identical to SEQ ID NO: 70635
  misc_feature (58)..(110): n is a, c, g, or t
  misc_feature (793)..(848): n is a, c, g, or t

SEQ ID NO: 106129 - DNA, 210 bp, Homo Sapiens; identical to SEQ ID NO: 70636

SEQ ID NO: 106130 - DNA, 606 bp, Homo Sapiens; identical to SEQ ID NO: 70637

SEQ ID NO: 106131 - DNA, 598 bp, Homo Sapiens; identical to SEQ ID NO: 70638

SEQ ID NO: 106132 - DNA, 1114 bp, Homo Sapiens; identical to SEQ ID NO: 70639
  misc_feature (28)..(28): n is a, c, g, or t

SEQ ID NO: 106133 - DNA, 670 bp, Homo Sapiens; identical to SEQ ID NO: 70640
  misc_feature (20)..(20): n is a, c, g, or t
  misc_feature (32)..(32): n is a, c, g, or t
  misc_feature (73)..(73): n is a, c, g, or t

SEQ ID NO: 106134 - DNA, 818 bp, Homo Sapiens; identical to SEQ ID NO: 70645

SEQ ID NO: 106135 - DNA, 735 bp, Homo Sapiens; identical to SEQ ID NO: 70646

SEQ ID NO: 106136 - DNA, 1017 bp, Homo Sapiens; identical to SEQ ID NO: 70647
  misc_feature (33)..(33): n is a, c, g, or t

SEQ ID NO: 106137 - DNA, 1020 bp, Homo Sapiens; identical to SEQ ID NO: 70654

SEQ ID NO: 106138 - DNA, 1640 bp, Homo Sapiens; identical to SEQ ID NO: 70655

SEQ ID NO: 106139 - DNA, 865 bp, Homo Sapiens; identical to SEQ ID NO: 70656

SEQ ID NO: 106140 - DNA, 699 bp, Homo Sapiens; identical to SEQ ID NO: 70660
  misc_feature (81)..(185): n is a, c, g, or t

SEQ ID NO: 106141 - DNA, 1622 bp, Homo Sapiens; identical to SEQ ID NO: 70661
  misc_feature (1107)..(1352): n is a, c, g, or t

SEQ ID NO: 106142 - DNA, 727 bp, Homo Sapiens; identical to SEQ ID NO: 70662
  misc_feature (33)..(33): n is a, c, g, or t
  misc_feature (64)..(64): n is a, c, g, or t
  misc_feature (92)..(92): n is a, c, g, or t
  misc_feature (100)..(100): n is a, c, g, or t

SEQ ID NO: 106143 - DNA, 815 bp, Homo Sapiens; identical to SEQ ID NO: 70663

SEQ ID NO: 106144 - DNA, 1104 bp, Homo Sapiens; identical to SEQ ID NO: 70664
  misc_feature (374)..(674): n is a, c, g, or t
  misc_feature (858)..(858): n is a, c, g, or t
  misc_feature (989)..(989): n is a, c, g, or t
  misc_feature (1043)..(1043): n is a, c, g, or t
  misc_feature (1068)..(1068): n is a, c, g, or t

SEQ ID NO: 106145 - DNA, 1066 bp, Homo Sapiens; identical to SEQ ID NO: 70672
  misc_feature (53)..(53): n is a, c, g, or t
  misc_feature (62)..(62): n is a, c, g, or t
  misc_feature (74)..(74): n is a, c, g, or t
  misc_feature (623)..(623): n is a, c, g, or t
  misc_feature (951)..(985): n is a, c, g, or t

SEQ ID NO: 106146 - DNA, 1175 bp, Homo Sapiens; identical to SEQ ID NO: 70673
  misc_feature (78)..(112): n is a, c, g, or t

SEQ ID NO: 106147 - DNA, 1161 bp, Homo Sapiens; identical to SEQ ID NO: 70674
  misc_feature (44)..(78): n is a, c, g, or t

SEQ ID NO: 106148 - DNA, 1024 bp, Homo Sapiens; identical to SEQ ID NO: 70675
  misc_feature (42)..(81): n is a, c, g, or t
  misc_feature (85)..(119): n is a, c, g, or t

SEQ ID NO: 106149 - DNA, 1268 bp, Homo Sapiens; identical to SEQ ID NO: 70679
  misc_feature (79)..(113): n is a, c, g, or t

SEQ ID NO: 106150 - DNA, 918 bp, Homo Sapiens; identical to SEQ ID NO: 70680
  misc_feature (869)..(869): n is a, c, g, or t

SEQ ID NO: 106151 - DNA, 1500 bp, Homo Sapiens; identical to SEQ ID NO: 70684

SEQ ID NO: 106152 - DNA, 1248 bp, Homo Sapiens; identical to SEQ ID NO: 70685

SEQ ID NO: 106153 - DNA, 1680 bp, Homo Sapiens; identical to SEQ ID NO: 70686

SEQ ID NO: 106154 - DNA, 737 bp, Homo Sapiens; identical to SEQ ID NO: 70687
  misc_feature (37)..(37): n is a, c, g, or t
  misc_feature (60)..(68): n is a, c, g, or t

SEQ ID NO: 106155 - DNA, 694 bp, Homo Sapiens; identical to SEQ ID NO: 70688
  misc_feature (90)..(138): n is a, c, g, or t

SEQ ID NO: 106156 - DNA, 563 bp, Homo Sapiens; identical to SEQ ID NO: 70689
  misc_feature (42)..(42): n is a, c, g, or t
  misc_feature (45)..(45): n is a, c, g, or t
  misc_feature (86)..(86): n is a, c, g, or t
  misc_feature (137)..(137): n is a, c, g, or t

SEQ ID NO: 106157 - DNA, 1735 bp, Homo Sapiens; identical to SEQ ID NO: 70690
  misc_feature (1512)..(1662): n is a, c, g, or t
  misc_feature (1665)..(1665): n is a, c, g, or t
  misc_feature (1677)..(1690): n is a, c, g, or t

SEQ ID NO: 106158 - DNA, 1007 bp, Homo Sapiens; identical to SEQ ID NO: 70691
  misc_feature (852)..(852): n is a, c, g, or t
  misc_feature (875)..(876): n is a, c, g, or t
  misc_feature (880)..(880): n is a, c, g, or t
  misc_feature (961)..(961): n is a, c, g, or t

SEQ ID NO: 106159 - DNA, 1528 bp, Homo Sapiens; identical to SEQ ID NO: 70695
  misc_feature (862)..(873): n is a, c, g, or t

SEQ ID NO: 106160 - DNA, 1004 bp, Homo Sapiens; identical to SEQ ID NO: 70696

SEQ ID NO: 106161 - DNA, 1009 bp, Homo Sapiens; identical to SEQ ID NO: 70697

SEQ ID NO: 106162 - DNA, 1226 bp, Homo Sapiens; identical to SEQ ID NO: 70699
  misc_feature (78)..(112): n is a, c, g, or t

SEQ ID NO: 106163 - DNA, 962 bp, Homo Sapiens; identical to SEQ ID NO: 70700

SEQ ID NO: 106164 - DNA, 1893 bp, Homo Sapiens; identical to SEQ ID NO: 70701
  misc_feature (1176)..(1286): n is a, c, g, or t
  misc_feature (1387)..(1395): n is a, c, g, or t
  misc_feature (1845)..(1845): n is a, c, g, or t

SEQ ID NO: 106165 - DNA, 922 bp, Homo Sapiens; identical to SEQ ID NO: 70702

SEQ ID NO: 106166 - DNA, 1053 bp, Homo Sapiens; identical to SEQ ID NO: 70704
  misc_feature (84)..(118): n is a, c, g, or t

SEQ ID NO: 106167 - DNA, 484 bp, Homo Sapiens; identical to SEQ ID NO: 70705

SEQ ID NO: 106168 - DNA, 513 bp, Homo Sapiens; identical to SEQ ID NO: 70707
  misc_feature (27)..(27): n is a, c, g, or t
  misc_feature (85)..(85): n is a, c, g, or t

SEQ ID NO: 106169 - DNA, 922 bp, Homo Sapiens; identical to SEQ ID NO: 70708

SEQ ID NO: 106170 - DNA, 582 bp, Homo Sapiens; identical to SEQ ID NO: 70709

SEQ ID NO: 106171 - DNA, 819 bp, Homo Sapiens; identical to SEQ ID NO: 70710
  misc_feature (405)..(498): n is a, c, g, or t

SEQ ID NO: 106172 - DNA, 648 bp, Homo Sapiens; identical to SEQ ID NO: 70711
  misc_feature (159)..(203): n is a, c, g, or t

SEQ ID NO: 106173 - DNA, 747 bp, Homo Sapiens; identical to SEQ ID NO: 70712
  misc_feature (484)..(528): n is a, c, g, or t

SEQ ID NO: 106174 - DNA, 973 bp, Homo Sapiens; identical to SEQ ID NO: 70715
  misc_feature (69)..(103): n is a, c, g, or t

SEQ ID NO: 106175 - DNA, 1453 bp, Homo Sapiens; identical to SEQ ID NO: 70716
  misc_feature (42)..(74): n is a, c, g, or t

SEQ ID NO: 106176 - DNA, 1093 bp, Homo Sapiens; identical to SEQ ID NO: 70717
  misc_feature (82)..(116): n is a, c, g, or t
  misc_feature (891)..(891): n is a, c, g, or t
  misc_feature (922)..(922): n is a, c, g, or t

SEQ ID NO: 106177 - DNA, 1002 bp, Homo Sapiens; identical to SEQ ID NO: 70718
  misc_feature (892)..(926): n is a, c, g, or t

SEQ ID NO: 106178 - DNA, 1123 bp, Homo Sapiens; identical to SEQ ID NO: 70719
  misc_feature (86)..(120): n is a, c, g, or t

SEQ ID NO: 106179 - DNA, 899 bp, Homo Sapiens; identical to SEQ ID NO: 70720
  misc_feature (77)..(111): n is a, c, g, or t

SEQ ID NO: 106180 - DNA, 925 bp, Homo Sapiens; identical to SEQ ID NO: 70721
  misc_feature (84)..(118): n is a, c, g, or t

SEQ ID NO: 106181 - DNA, 796 bp, Homo Sapiens; identical to SEQ ID NO: 70722

SEQ ID NO: 106182 - DNA, 1761 bp, Homo Sapiens; identical to SEQ ID NO: 70725

SEQ ID NO: 106183 - DNA, 1138 bp, Homo Sapiens; identical to SEQ ID NO: 70726
  misc_feature (81)..(124): n is a, c, g, or t
  misc_feature (322)..(341): n is a, c, g, or t
  misc_feature (374)..(1021): n is a, c, g, or t
  misc_feature (1035)..(1035): n is a, c, g, or t

SEQ ID NO: 106184 - DNA, 621 bp, Homo Sapiens; identical to SEQ ID NO: 70727

SEQ ID NO: 106185 - DNA, 763 bp, Homo Sapiens; identical to SEQ ID NO: 70728

SEQ ID NO: 106186 - DNA, 1004 bp, Homo Sapiens; identical to SEQ ID NO: 70729

SEQ ID NO: 106187 - DNA, 927 bp, Homo Sapiens; identical to SEQ ID NO: 70730

SEQ ID NO: 106188 - DNA, 1305 bp, Homo Sapiens; identical to SEQ ID NO: 70731
  misc_feature (65)..(106): n is a, c, g, or t
  misc_feature (110)..(144): n is a, c, g, or t

SEQ ID NO: 106189 - DNA, 1035 bp, Homo Sapiens; identical to SEQ ID NO: 70732

SEQ ID NO: 106190 - DNA, 725 bp, Homo Sapiens; identical to SEQ ID NO: 70733

SEQ ID NO: 106191 - DNA, 736 bp, Homo Sapiens; identical to SEQ ID NO: 70734
  misc_feature (76)..(76): n is a, c, g, or t
  misc_feature (566)..(566): n is a, c, g, or t

SEQ ID NO: 106192 - DNA, 1955 bp, Homo Sapiens; identical to SEQ ID NO: 70735
  misc_feature (1117)..(1135): n is a, c, g, or t

SEQ ID NO: 106193 - DNA, 804 bp, Homo Sapiens; identical to SEQ ID NO: 70737
  misc_feature (201)..(201): n is a, c, g, or t

SEQ ID NO: 106194 - DNA, 1238 bp, Homo Sapiens; identical to SEQ ID NO: 70738

SEQ ID NO: 106195 - DNA, 812 bp, Homo Sapiens; identical to SEQ ID NO: 70739

SEQ ID NO: 106196 - DNA, 926 bp, Homo Sapiens; identical to SEQ ID NO: 70740

SEQ ID NO: 106197 - DNA, 1898 bp, Homo Sapiens; identical to SEQ ID NO: 70741

SEQ ID NO: 106198 - DNA, 170 bp, Homo Sapiens; identical to SEQ ID NO: 70742

SEQ ID NO: 106199 - DNA, 2622 bp, Homo Sapiens; identical to SEQ ID NO: 70743
  misc_feature (689)..(689): n is a, c, g, or t
  misc_feature (2112)..(2236): n is a, c, g, or t
  misc_feature (2244)..(2257): n is a, c, g, or t
  misc_feature (2282)..(2471): n is a, c, g, or t
  misc_feature (2504)..(2513): n is a, c, g, or t
  misc_feature (2530)..(2538): n is a, c, g, or t

SEQ ID NO: 106200 - DNA, 740 bp, Homo Sapiens; identical to SEQ ID NO: 70746
  misc_feature (50)..(50): n is a, c, g, or t
  misc_feature (410)..(440): n is a, c, g, or t

SEQ ID NO: 106201 - DNA, 1003 bp, Homo Sapiens; identical to SEQ ID NO: 70747
  misc_feature (63)..(93): n is a, c, g, or t
  misc_feature (397)..(464): n is a, c, g, or t
  misc_feature (753)..(761): n is a, c, g, or t

SEQ ID NO: 106202 - DNA, 345 bp, Homo Sapiens; identical to SEQ ID NO: 70748
  misc_feature (216)..(224): n is a, c, g, or t

SEQ ID NO: 106203 - DNA, 963 bp, Homo Sapiens; identical to SEQ ID NO: 70749

SEQ ID NO: 106204 - DNA, 1116 bp, Homo Sapiens; identical to SEQ ID NO: 70750

SEQ ID NO: 106205 - DNA, 1896 bp, Homo Sapiens; identical to SEQ ID NO: 70751

SEQ ID NO: 106206 - DNA, 1062 bp, Homo Sapiens; identical to SEQ ID NO: 70752
  misc_feature (941)..(953): n is a, c, g, or t

SEQ ID NO: 106207 - DNA, 446 bp, Homo Sapiens; identical to SEQ ID NO: 70753
  misc_feature (48)..(48): n is a, c, g, or t
  misc_feature (408)..(408): n is a, c, g, or t
  misc_feature (424)..(424): n is a, c, g, or t

SEQ ID NO: 106208 - DNA, 185 bp, Homo Sapiens; identical to SEQ ID NO: 70754

SEQ ID NO: 106209 - DNA, 879 bp, Homo Sapiens; identical to SEQ ID NO: 70755

SEQ ID NO: 106210 - DNA, 772 bp, Homo Sapiens; identical to SEQ ID NO: 70759

SEQ ID NO: 106211 - DNA, 1147 bp, Homo Sapiens; identical to SEQ ID NO: 70760
  misc_feature (114)..(133): n is a, c, g, or t
  misc_feature (638)..(700): n is a, c, g, or t

SEQ ID NO: 106212 - DNA, 1023 bp, Homo Sapiens; identical to SEQ ID NO: 70761

SEQ ID NO: 106213 - DNA, 2195 bp, Homo Sapiens; identical to SEQ ID NO: 70762
  misc_feature (777)..(796): n is a, c, g, or t
  misc_feature (1857)..(2015): n is a, c, g, or t
  misc_feature (2018)..(2018): n is a, c, g, or t
  misc_feature (2021)..(2023): n is a, c, g, or t
  misc_feature (2025)..(2030): n is a, c, g, or t
  misc_feature (2039)..(2055): n is a, c, g, or t

SEQ ID NO: 106214 - DNA, 914 bp, Homo Sapiens; identical to SEQ ID NO: 70765

SEQ ID NO: 106215 - DNA, 1343 bp, Homo Sapiens; identical to SEQ ID NO: 70766
  misc_feature (73)..(141): n is a, c, g, or t
  misc_feature (732)..(785): n is a, c, g, or t
  misc_feature (925)..(938): n is a, c, g, or t

SEQ ID NO: 106216 - DNA, 892 bp, Homo Sapiens; identical to SEQ ID NO: 70767
  misc_feature (228)..(286): n is a, c, g, or t
  misc_feature (417)..(474): n is a, c, g, or t
  misc_feature (513)..(592): n is a, c, g, or t

SEQ ID NO: 106217 - DNA, 679 bp, Homo Sapiens; identical to SEQ ID NO: 70768
  misc_feature (19)..(19): n is a, c, g, or t

SEQ ID NO: 106218 - DNA, 583 bp, Homo Sapiens; identical to SEQ ID NO: 70769

SEQ ID NO: 106219 - DNA, 2185 bp, Homo Sapiens; identical to SEQ ID NO: 70770

SEQ ID NO: 106220 - DNA, 528 bp, Homo Sapiens; identical to SEQ ID NO: 70771

SEQ ID NO: 106221 - DNA, 876 bp, Homo Sapiens; identical to SEQ ID NO: 70772
  misc_feature (803)..(803): n is a, c, g, or t

SEQ ID NO: 106222 - DNA, 1848 bp, Homo Sapiens; identical to SEQ ID NO: 70773
  misc_feature (1084)..(1100): n is a, c, g, or t
  misc_feature (1118)..(1693): n is a, c, g, or t
  misc_feature (1797)..(1797): n is a, c, g, or t

SEQ ID NO: 106223 - DNA, 930 bp, Homo Sapiens; identical to SEQ ID NO: 70774
  misc_feature (916)..(916): n is a, c, g, or t

SEQ ID NO: 106224 - DNA, 692 bp, Homo Sapiens; identical to SEQ ID NO: 70776
  misc_feature (65)..(65): n is a, c, g, or t
  misc_feature (176)..(176): n is a, c, g, or t

SEQ ID NO: 106225 - DNA, 1232 bp, Homo Sapiens; identical to SEQ ID NO: 70777

SEQ ID NO: 106226 - DNA, 501 bp, Homo Sapiens; identical to SEQ ID NO: 70779

SEQ ID NO: 106227 - DNA, 1327 bp, Homo Sapiens; identical to SEQ ID NO: 70780
  misc_feature (91)..(120): n is a, c, g, or t
  misc_feature (811)..(848): n is a, c, g, or t
  misc_feature (882)..(890): n is a, c, g, or t
  misc_feature (1105)..(1114): n is a, c, g, or t

SEQ ID NO: 106228 - DNA, 1212 bp, Homo Sapiens; identical to SEQ ID NO: 70781
  misc_feature (43)..(77): n is a, c, g, or t

SEQ ID NO: 106229 - DNA, 572 bp, Homo Sapiens; identical to SEQ ID NO: 70782

SEQ ID NO: 106230 - DNA, 1583 bp, Homo Sapiens; identical to SEQ ID NO: 70783
  misc_feature (980)..(1009): n is a, c, g, or t
  misc_feature (1420)..(1420): n is a, c, g, or t
  misc_feature (1459)..(1459): n is a, c, g, or t

SEQ ID NO: 106231 - DNA, 868 bp, Homo Sapiens; identical to SEQ ID NO: 70784

SEQ ID NO: 106232 - DNA, 532 bp, Homo Sapiens; identical to SEQ ID NO: 70785
  misc_feature (330)..(330): n is a, c, g, or t
  misc_feature (496)..(496): n is a, c, g, or t

SEQ ID NO: 106233 - DNA, 693 bp, Homo Sapiens; identical to SEQ ID NO: 70788
  misc_feature (175)..(185): n is a, c, g, or t
  misc_feature (228)..(249): n is a, c, g, or t
  misc_feature (456)..(506): n is a, c, g, or t

SEQ ID NO: 106234 - DNA, 1128 bp, Homo Sapiens; identical to SEQ ID NO: 70789
  misc_feature (834)..(855): n is a, c, g, or t
  misc_feature (898)..(907): n is a, c, g, or t
  misc_feature (1022)..(1056): n is a, c, g, or t

SEQ ID NO: 106235 - DNA, 1847 bp, Homo Sapiens; identical to SEQ ID NO: 70792

SEQ ID NO: 106236 - DNA, 549 bp, Homo Sapiens; identical to SEQ ID NO: 70793

SEQ ID NO: 106237 - DNA, 990 bp, Homo Sapiens; identical to SEQ ID NO: 70794
  misc_feature (376)..(384): n is a, c, g, or t

SEQ ID NO: 106238 - DNA, 771 bp, Homo Sapiens; identical to SEQ ID NO: 70796

SEQ ID NO: 106239 - DNA, 1164 bp, Homo Sapiens; identical to SEQ ID NO: 70797
  misc_feature (922)..(930): n is a, c, g, or t

SEQ ID NO: 106240 - DNA, 932 bp, Homo Sapiens; identical to SEQ ID NO: 70798

SEQ ID NO: 106241 - DNA, 1523 bp, Homo Sapiens; identical to SEQ ID NO: 70799

SEQ ID NO: 106242 - DNA, 569 bp, Homo Sapiens; identical to SEQ ID NO: 70801

SEQ ID NO: 106243 - DNA, 1065 bp, Homo Sapiens; identical to SEQ ID NO: 70802

SEQ ID NO: 106244 - DNA, 849 bp, Homo Sapiens; identical to SEQ ID NO: 70803
  misc_feature (355)..(392): n is a, c, g, or t
  misc_feature (612)..(671): n is a, c, g, or t
  misc_feature (758)..(768): n is a, c, g, or t

SEQ ID NO: 106245 - DNA, 1209 bp, Homo Sapiens; identical to SEQ ID NO: 70804

SEQ ID NO: 106246 - DNA, 939 bp, Homo Sapiens; identical to SEQ ID NO: 70805
  misc_feature (549)..(550): n is a, c, g, or t
  misc_feature (653)..(653): n is a, c, g, or t

SEQ ID NO: 106247 - DNA, 795 bp, Homo Sapiens; identical to SEQ ID NO: 70806

SEQ ID NO: 106248 - DNA, 580 bp, Homo Sapiens; identical to SEQ ID NO: 70807

SEQ ID NO: 106249 - DNA, 1099 bp, Homo Sapiens; identical to SEQ ID NO: 70808
  misc_feature (48)..(48): n is a, c, g, or t
  misc_feature (79)..(79): n is a, c, g, or t
  misc_feature (131)..(131): n is a, c, g, or t

SEQ ID NO: 106250 - DNA, 623 bp, Homo Sapiens; identical to SEQ ID NO: 70809
  misc_feature (71)..(83): n is a, c, g, or t

SEQ ID NO: 106251 - DNA, 680 bp, Homo Sapiens; identical to SEQ ID NO: 70810
  misc_feature (121)..(133): n is a, c, g, or t

SEQ ID NO: 106252 - DNA, 567 bp, Homo Sapiens; identical to SEQ ID NO: 70812

SEQ ID NO: 106253 - DNA, 1116 bp, Homo Sapiens; identical to SEQ ID NO: 70813
  misc_feature (912)..(927): n is a, c, g, or t
  misc_feature (930)..(939): n is a, c, g, or t
  misc_feature (960)..(960): n is a, c, g, or t

SEQ ID NO: 106254 - DNA, 1572 bp, Homo Sapiens; identical to SEQ ID NO: 70814

SEQ ID NO: 106255 - DNA, 659 bp, Homo Sapiens; identical to SEQ ID NO: 70815
  misc_feature (19)..(19): n is a, c, g, or t
  misc_feature (104)..(104): n is a, c, g, or t

SEQ ID NO: 106256 - DNA, 936 bp, Homo Sapiens; identical to SEQ ID NO: 70816

SEQ ID NO: 106257 - DNA, 649 bp, Homo Sapiens; identical to SEQ ID NO: 70818

SEQ ID NO: 106258 - DNA, 674 bp, Homo Sapiens; identical to SEQ ID NO: 70819

SEQ ID NO: 106259 - DNA, 778 bp, Homo Sapiens; identical to SEQ ID NO: 70820

SEQ ID NO: 106260 - DNA, 1111 bp, Homo Sapiens; identical to SEQ ID NO: 70823
  misc_feature (79)..(79): n is a, c, g, or t
  misc_feature (81)..(81): n is a, c, g, or t
  misc_feature (207)..(207): n is a, c, g, or t

SEQ ID NO: 106261 - DNA, 1940 bp, Homo Sapiens; identical to SEQ ID NO: 70824

SEQ ID NO: 106262 - DNA, 1152 bp, Homo Sapiens; identical to SEQ ID NO: 70825

SEQ ID NO: 106263 - DNA, 1190 bp, Homo Sapiens; identical to SEQ ID NO: 70826

SEQ ID NO: 106264 - DNA, 905 bp, Homo Sapiens; identical to SEQ ID NO: 70827
  misc_feature (748)..(748): n is a, c, g, or t

SEQ ID NO: 106265 - DNA, 962 bp, Homo Sapiens; identical to SEQ ID NO: 70828
  misc_feature (645)..(645): n is a, c, g, or t
  misc_feature (741)..(741): n is a, c, g, or t
  misc_feature (749)..(749): n is a, c, g, or t
  misc_feature (765)..(765): n is a, c, g, or t
  misc_feature (768)..(768): n is a, c, g, or t
  misc_feature (771)..(771): n is a, c, g, or t
  misc_feature (777)..(777): n is a, c, g, or t
  misc_feature (795)..(795): n is a, c, g, or t
  misc_feature (798)..(798): n is a, c, g, or t

SEQ ID NO: 106266 - DNA, 1086 bp, Homo Sapiens; identical to SEQ ID NO: 70829
  misc_feature (43)..(82): n is a, c, g, or t
  misc_feature (86)..(120): n is a, c, g, or t
  misc_feature (971)..(979): n is a, c, g, or t

SEQ ID NO: 106267 - DNA, 1475 bp, Homo Sapiens; identical to SEQ ID NO: 70830
  misc_feature (76)..(110): n is a, c, g, or t
  misc_feature (1248)..(1256): n is a, c, g, or t

SEQ ID NO: 106268 - DNA, 1124 bp, Homo Sapiens; identical to SEQ ID NO: 70831

SEQ ID NO: 106269 - DNA, 1497 bp, Homo Sapiens; identical to SEQ ID NO: 70832
  misc_feature (775)..(827): n is a, c, g, or t
  misc_feature (1280)..(1280): n is a, c, g, or t

SEQ ID NO: 106270 - DNA, 859 bp, Homo Sapiens; identical to SEQ ID NO: 70833
  misc_feature (173)..(205): n is a, c, g, or t

SEQ ID NO: 106271 - DNA, 1643 bp, Homo Sapiens; identical to SEQ ID NO: 70834

SEQ ID NO: 106272 - DNA, 1545 bp, Homo Sapiens; identical to SEQ ID NO: 70835
  misc_feature (403)..(450): n is a, c, g, or t
  misc_feature (1135)..(1267): n is a, c, g, or t
  misc_feature (1278)..(1324): n is a, c, g, or t
  misc_feature (1349)..(1484): n is a, c, g, or t

SEQ ID NO: 106273 - DNA, 972 bp, Homo Sapiens; identical to SEQ ID NO: 70836

SEQ ID NO: 106274 - DNA, 815 bp, Homo Sapiens; identical to SEQ ID NO: 70837

SEQ ID NO: 106275 - DNA, 2450 bp, Homo Sapiens; identical to SEQ ID NO: 70838

SEQ ID NO: 106276 - DNA, 913 bp, Homo Sapiens; identical to SEQ ID NO: 70839

SEQ ID NO: 106277 - DNA, 725 bp, Homo Sapiens; identical to SEQ ID NO: 70840

SEQ ID NO: 106278 - DNA, 1221 bp, Homo Sapiens; identical to SEQ ID NO: 70842

SEQ ID NO: 106279 - DNA, 114 bp, Homo Sapiens; identical to SEQ ID NO: 70843

SEQ ID NO: 106280 - DNA, 1066 bp, Homo Sapiens; identical to SEQ ID NO: 70844
  misc_feature (218)..(218): n is a, c, g, or t

SEQ ID NO: 106281 - DNA, 1290 bp, Homo Sapiens; identical to SEQ ID NO: 70845
  misc_feature (61)..(71): n is a, c, g, or t
  misc_feature (154)..(154): n is a, c, g, or t
  misc_feature (163)..(165): n is a, c, g, or t
  misc_feature (249)..(249): n is a, c, g, or t
  misc_feature (263)..(263): n is a, c, g, or t
  misc_feature (289)..(327): n is a, c, g, or t

SEQ ID NO: 106282 - DNA, 1915 bp, Homo Sapiens; identical to SEQ ID NO: 70846
  misc_feature (1769)..(1769): n is a, c, g, or t

SEQ ID NO: 106283 - DNA, 1245 bp, Homo Sapiens; identical to SEQ ID NO: 70855
  misc_feature (100)..(216): n is a, c, g, or t

SEQ ID NO: 106284 - DNA, 1332 bp, Homo Sapiens; identical to SEQ ID NO: 70856
  misc_feature (457)..(465): n is a, c, g, or t
  misc_feature (657)..(716): n is a, c, g, or t
  misc_feature (1203)..(1231): n is a, c, g, or t
  misc_feature (1290)..(1290): n is a, c, g, or t

SEQ ID NO: 106285 - DNA, 1530 bp, Homo Sapiens; identical to SEQ ID NO: 70861
  misc_feature (1193)..(1225): n is a, c, g, or t

SEQ ID NO: 106286 - DNA, 446 bp, Homo Sapiens; identical to SEQ ID NO: 70862
  misc_feature (99)..(145): n is a, c, g, or t

SEQ ID NO: 106287 - DNA, 491 bp, Homo Sapiens; identical to SEQ ID NO: 70863
  misc_feature (138)..(183): n is a, c, g, or t

SEQ ID NO: 106288 - DNA, 420 bp, Homo Sapiens; identical to SEQ ID NO: 70864
  misc_feature (70)..(125): n is a, c, g, or t

SEQ ID NO: 106289 - DNA, 570 bp, Homo Sapiens; identical to SEQ ID NO: 70865
  misc_feature (64)..(64): n is a, c, g, or t
  misc_feature (69)..(69): n is a, c, g, or t
  misc_feature (80)..(91): n is a, c, g, or t

SEQ ID NO: 106290 - DNA, 468 bp, Homo Sapiens; identical to SEQ ID NO: 70866
  misc_feature (117)..(177): n is a, c, g, or t

SEQ ID NO: 106291 - DNA, 423 bp, Homo Sapiens; identical to SEQ ID NO: 70867

SEQ ID NO: 106292 - DNA, 1079 bp, Homo Sapiens; identical to SEQ ID NO: 70868

SEQ ID NO: 106293 - DNA, 945 bp, Homo Sapiens; identical to SEQ ID NO: 70869
  misc_feature (598)..(655): n is a, c, g, or t

SEQ ID NO: 106294 - DNA, 998 bp, Homo Sapiens; identical to SEQ ID NO: 70870
  misc_feature (205)..(217): n is a, c, g, or t

SEQ ID NO: 106295 - DNA, 497 bp, Homo Sapiens; identical to SEQ ID NO: 70871
  misc_feature (161)..(207): n is a, c, g, or t

SEQ ID NO: 106296 - DNA, 1015 bp, Homo Sapiens; identical to SEQ ID NO: 70872

SEQ ID NO: 106297 - DNA, 895 bp, Homo Sapiens; identical to SEQ ID NO: 70873

SEQ ID NO: 106298 - DNA, 1029 bp, Homo Sapiens; identical to SEQ ID NO: 70874
  misc_feature (898)..(913): n is a, c, g, or t

SEQ ID NO: 106299 - DNA, 975 bp, Homo Sapiens; identical to SEQ ID NO: 70875

SEQ ID NO: 106300 - DNA, 392 bp, Homo Sapiens; identical to SEQ ID NO: 70876
  misc_feature (114)..(167): n is a, c, g, or t

SEQ ID NO: 106301 - DNA, 497 bp, Homo Sapiens; identical to SEQ ID NO: 70877
  misc_feature (153)..(200): n is a, c, g, or t

SEQ ID NO: 106302 - DNA, 601 bp, Homo Sapiens; identical to SEQ ID NO: 70878
  misc_feature (227)..(279): n is a, c, g, or t

SEQ ID NO: 106303 - DNA, 1159 bp, Homo Sapiens; identical to SEQ ID NO: 70879
  misc_feature (943)..(991): n is a, c, g, or t

SEQ ID NO: 106304 - DNA, 281 bp, Homo Sapiens; identical to SEQ ID NO: 70880

SEQ ID NO: 106305 - DNA, 592 bp, Homo Sapiens; identical to SEQ ID NO: 70881
  misc_feature (580)..(580): n is a, c, g, or t

SEQ ID NO: 106306 - DNA, 1087 bp, Homo Sapiens; identical to SEQ ID NO: 70883
  misc_feature (91)..(92): n is a, c, g, or t
  misc_feature (108)..(110): n is a, c, g, or t
  misc_feature (165)..(165): n is a, c, g, or t
  misc_feature (175)..(175): n is a, c, g, or t
  misc_feature (182)..(182): n is a, c, g, or t
  misc_feature (1009)..(1027): n is a, c, g, or t

SEQ ID NO: 106307 - DNA, 341 bp, Homo Sapiens; identical to SEQ ID NO: 70884
  misc_feature (23)..(23): n is a, c, g, or t
  misc_feature (46)..(46): n is a, c, g, or t
  misc_feature (135)..(135): n is a, c, g, or t

SEQ ID NO: 106308 - DNA, 606 bp, Homo Sapiens; identical to SEQ ID NO: 70885

SEQ ID NO: 106309 - DNA, 1794 bp, Homo Sapiens; identical to SEQ ID NO: 70888
  misc_feature (1719)..(1731): n is a, c, g, or t

SEQ ID NO: 106310 - DNA, 1367 bp, Homo Sapiens; identical to SEQ ID NO: 70889
  misc_feature (1062)..(1062): n is a, c, g, or t
  misc_feature (1153)..(1153): n is a, c, g, or t
  misc_feature (1215)..(1215): n is a, c, g, or t

SEQ ID NO: 106311 - DNA, 614 bp, Homo Sapiens; identical to SEQ ID NO: 70890
  misc_feature (105)..(168): n is a, c, g, or t

SEQ ID NO: 106312 - DNA, 1023 bp, Homo Sapiens; identical to SEQ ID NO: 70891

SEQ ID NO: 106313 - DNA, 1158 bp, Homo Sapiens; identical to SEQ ID NO: 70892

SEQ ID NO: 106314 - DNA, 613 bp, Homo Sapiens; identical to SEQ ID NO: 70893

SEQ ID NO: 106315 - DNA, 672 bp, Homo Sapiens; identical to SEQ ID NO: 70903

SEQ ID NO: 106316 - DNA, 1623 bp, Homo Sapiens; identical to SEQ ID NO: 70904
  misc_feature (78)..(112): n is a, c, g, or t
  misc_feature (1461)..(1561): n is a, c, g, or t
  misc_feature (1567)..(1577): n is a, c, g, or t

SEQ ID NO: 106317 - DNA, 549 bp, Homo Sapiens; identical to SEQ ID NO: 70905

SEQ ID NO: 106318 - DNA, 1077 bp, Homo Sapiens; identical to SEQ ID NO: 70907

SEQ ID NO: 106319 - DNA, 960 bp, Homo Sapiens; identical to SEQ ID NO: 70908

SEQ ID NO: 106320 - DNA, 945 bp, Homo Sapiens; identical to SEQ ID NO: 70909
  misc_feature (468)..(481): n is a, c, g, or t
  misc_feature (483)..(621): n is a, c, g, or t
  misc_feature (623)..(640): n is a, c, g, or t

SEQ ID NO: 106321 - DNA, 758 bp, Homo Sapiens; identical to SEQ ID NO: 70920

SEQ ID NO: 106322 - DNA, 733 bp, Homo Sapiens; identical to SEQ ID NO: 70921

SEQ ID NO: 106323 - DNA, 1078 bp, Homo Sapiens; identical to SEQ ID NO: 70922
  misc_feature (985)..(985): n is a, c, g, or t

SEQ ID NO: 106324 - DNA, 1340 bp, Homo Sapiens; identical to SEQ ID NO: 70923

SEQ ID NO: 106325 - DNA, 947 bp, Homo Sapiens; identical to SEQ ID NO: 70924
  misc_feature (710)..(710): n is a, c, g, or t

SEQ ID NO: 106326 - DNA, 452 bp, Homo Sapiens; identical to SEQ ID NO: 70925

SEQ ID NO: 106327 - DNA, 1626 bp, Homo Sapiens; identical to SEQ ID NO: 70926
  misc_feature (1431)..(1522): n is a, c, g, or t

SEQ ID NO: 106328 - DNA, 969 bp, Homo Sapiens; identical to SEQ ID NO: 70927
  misc_feature (831)..(831): n is a, c, g, or t

SEQ ID NO: 106329 - DNA, 910 bp, Homo Sapiens; identical to SEQ ID NO: 70928
  misc_feature (682)..(682): n is a, c, g, or t

SEQ ID NO: 106330 - DNA, 1659 bp, Homo Sapiens; identical to SEQ ID NO: 70929

SEQ ID NO: 106331 - DNA, 805 bp, Homo Sapiens; identical to SEQ ID NO: 70936

SEQ ID NO: 106332 - DNA, 1280 bp, Homo Sapiens; identical to SEQ ID NO: 70937
  misc_feature (86)..(120): n is a, c, g, or t
  misc_feature (697)..(780): n is a, c, g, or t
  misc_feature (888)..(939): n is a, c, g, or t
  misc_feature (962)..(981): n is a, c, g, or t
  misc_feature (1192)..(1220): n is a, c, g, or t

SEQ ID NO: 106333 - DNA, 2182 bp, Homo Sapiens; identical to SEQ ID NO: 70938
  misc_feature (71)..(105): n is a, c, g, or t
  misc_feature (1688)..(1771): n is a, c, g, or t
  misc_feature (1879)..(1930): n is a, c, g, or t
  misc_feature (1953)..(1972): n is a, c, g, or t

SEQ ID NO: 106334 - DNA, 973 bp, Homo Sapiens; identical to SEQ ID NO: 70941

SEQ ID NO: 106335 - DNA, 1109 bp, Homo Sapiens; identical to SEQ ID NO: 70942
  misc_feature (809)..(817): n is a, c, g, or t
  misc_feature (1018)..(1026): n is a, c, g, or t

SEQ ID NO: 106336 - DNA, 1297 bp, Homo Sapiens; identical to SEQ ID NO: 70944

SEQ ID NO: 106337 - DNA, 992 bp, Homo Sapiens; identical to SEQ ID NO: 70945

SEQ ID NO: 106338 - DNA, 1281 bp, Homo Sapiens; identical to SEQ ID NO: 70947
  misc_feature (906)..(963): n is a, c, g, or t
  misc_feature (1077)..(1077): n is a, c, g, or t

SEQ ID NO: 106339 - DNA, 869 bp, Homo Sapiens; identical to SEQ ID NO: 70948

SEQ ID NO: 106340 - DNA, 847 bp, Homo Sapiens; identical to SEQ ID NO: 70949

SEQ ID NO: 106341 - DNA, 1031 bp, Homo Sapiens; identical to SEQ ID NO: 70950

SEQ ID NO: 106342 - DNA, 507 bp, Homo Sapiens; identical to SEQ ID NO: 70952
  misc_feature (477)..(477): n is a, c, g, or t

SEQ ID NO: 106343 - DNA, 803 bp, Homo Sapiens; identical to SEQ ID NO: 70953
  misc_feature (615)..(616): n is a, c, g, or t
  misc_feature (621)..(621): n is a, c, g, or t
  misc_feature (623)..(624): n is a, c, g, or t
  misc_feature (630)..(631): n is a, c, g, or t

SEQ ID NO: 106344 - DNA, 944 bp, Homo Sapiens; identical to SEQ ID NO: 70956
  misc_feature (70)..(104): n is a, c, g, or t
  misc_feature (152)..(161): n is a, c, g, or t

SEQ ID NO: 106345 - DNA, 2008 bp, Homo Sapiens; identical to SEQ ID NO: 70957
  misc_feature (47)..(85): n is a, c, g, or t
  misc_feature (89)..(123): n is a, c, g, or t
  misc_feature (1452)..(1541): n is a, c, g, or t
  misc_feature (1701)..(1711): n is a, c, g, or t
  misc_feature (1842)..(1854): n is a, c, g, or t
  misc_feature (1927)..(1927): n is a, c, g, or t

SEQ ID NO: 106346 - DNA, 892 bp, Homo Sapiens; identical to SEQ ID NO: 70958

SEQ ID NO: 106347 - DNA, 844 bp, Homo Sapiens; identical to SEQ ID NO: 70959

SEQ ID NO: 106348 - DNA, 711 bp, Homo Sapiens; identical to SEQ ID NO: 70960
  misc_feature (139)..(139): n is a, c, g, or t

SEQ ID NO: 106349 - DNA, 1176 bp, Homo Sapiens; identical to SEQ ID NO: 70961

SEQ ID NO: 106350 - DNA, 930 bp, Homo Sapiens; identical to SEQ ID NO: 70962

SEQ ID NO: 106351 - DNA, 1175 bp, Homo Sapiens; identical to SEQ ID NO: 70966
  misc_feature (78)..(112): n is a, c, g, or t

SEQ ID NO: 106352 - DNA, 273 bp, Homo Sapiens; identical to SEQ ID NO: 70967

SEQ ID NO: 106353 - DNA, 1009 bp, Homo Sapiens; identical to SEQ ID NO: 70968

SEQ ID NO: 106354 - DNA, 1323 bp, Homo Sapiens; identical to SEQ ID NO: 70973

SEQ ID NO: 106355 - DNA, 821 bp, Homo Sapiens; identical to SEQ ID NO: 70974

SEQ ID NO: 106356 - DNA, 366 bp, Homo Sapiens; identical to SEQ ID NO: 70975

SEQ ID NO: 106357 - DNA, 1297 bp, Homo Sapiens; identical to SEQ ID NO: 70977
  misc_feature (1189)..(1231): n is a, c, g, or t

SEQ ID NO: 106358 - DNA, 455 bp, Homo Sapiens; identical to SEQ ID NO: 70978
  misc_feature (353)..(395): n is a, c, g, or t

SEQ ID NO: 106359 - DNA, 344 bp, Homo Sapiens; identical to SEQ ID NO: 70979

SEQ ID NO: 106360 - DNA, 611 bp, Homo Sapiens; identical to SEQ ID NO: 70981

SEQ ID NO: 106361 - DNA, 1234 bp, Homo Sapiens; identical to SEQ ID NO: 70982

SEQ ID NO: 106362 - DNA, 527 bp, Homo Sapiens; identical to SEQ ID NO: 70983
  misc_feature (17)..(17): n is a, c, g, or t
  misc_feature (82)..(128): n is a, c, g, or t

SEQ ID NO: 106363 - DNA, 821 bp, Homo Sapiens; identical to SEQ ID NO: 70984
  misc_feature (85)..(157): n is a, c, g, or t

SEQ ID NO: 106364 - DNA, 621 bp, Homo Sapiens; identical to SEQ ID NO: 70987
  misc_feature (420)..(454): n is a, c, g, or t

SEQ ID NO: 106365 - DNA, 748 bp, Homo Sapiens; identical to SEQ ID NO: 70988
  misc_feature (101)..(101): n is a, c, g, or t
  misc_feature (524)..(586): n is a, c, g, or t

SEQ ID NO: 106366 - DNA, 847 bp, Homo Sapiens; identical to SEQ ID NO: 70991
  misc_feature (42)..(83): n is a, c, g, or t
  misc_feature (87)..(121): n is a, c, g, or t

SEQ ID NO: 106367 - DNA, 919 bp, Homo Sapiens; identical to SEQ ID NO: 70992
  misc_feature (729)..(735): n is a, c, g, or t
  misc_feature (737)..(741): n is a, c, g, or t
  misc_feature (743)..(743): n is a, c, g, or t
  misc_feature (746)..(747): n is a, c, g, or t
  misc_feature (750)..(750): n is a, c, g, or t
  misc_feature (753)..(755): n is a, c, g, or t

SEQ ID NO: 106368 - DNA, 1925 bp, Homo Sapiens; identical to SEQ ID NO: 70996

SEQ ID NO: 106369 - DNA, 1187 bp, Homo Sapiens; identical to SEQ ID NO: 70997

SEQ ID NO: 106370 - DNA, 1334 bp, Homo Sapiens; identical to SEQ ID NO: 70998

SEQ ID NO: 106371 - DNA, 1004 bp, Homo Sapiens; identical to SEQ ID NO: 70999

SEQ ID NO: 106372 - DNA, 853 bp, Homo Sapiens; identical to SEQ ID NO: 71007
  misc_feature (121)..(151): n is a, c, g, or t
  misc_feature (153)..(262): n is a, c, g, or t
  misc_feature (285)..(411): n is a, c, g, or t

SEQ ID NO: 106373 - DNA, 507 bp, Homo Sapiens; identical to SEQ ID NO: 71008
  misc_feature (48)..(71): n is a, c, g, or t

SEQ ID NO: 106374 - DNA, 573 bp, Homo Sapiens; identical to SEQ ID NO: 71010
  misc_feature (14)..(14): n is a, c, g, or t
  misc_feature (50)..(50): n is a, c, g, or t
  misc_feature (117)..(117): n is a, c, g, or t
  misc_feature (176)..(177): n is a, c, g, or t
  misc_feature (179)..(179): n is a, c, g, or t
  misc_feature (181)..(181): n is a, c, g, or t
  misc_feature (269)..(269): n is a, c, g, or t

SEQ ID NO: 106375 - DNA, 949 bp, Homo Sapiens; identical to SEQ ID NO: 71011
  misc_feature (440)..(459): n is a, c, g, or t
  misc_feature (854)..(879): n is a, c, g, or t

SEQ ID NO: 106376 - DNA, 930 bp, Homo Sapiens; identical to SEQ ID NO: 71012

SEQ ID NO: 106377 - DNA, 1137 bp, Homo Sapiens; identical to SEQ ID NO: 71016

SEQ ID NO: 106378 - DNA, 233 bp, Homo Sapiens; identical to SEQ ID NO: 71017

SEQ ID NO: 106379 - DNA, 905 bp, Homo Sapiens; identical to SEQ ID NO: 71019
  misc_feature (493)..(530): n is a, c, g, or t

SEQ ID NO: 106380 - DNA, 1894 bp, Homo Sapiens; identical to SEQ ID NO: 71020
  misc_feature (1478)..(1519): n is a, c, g, or t
  misc_feature (1769)..(1828): n is a, c, g, or t

SEQ ID NO: 106381 - DNA, 1155 bp, Homo Sapiens; identical to SEQ ID NO: 71021
  misc_feature (125)..(159): n is a, c, g, or t

SEQ ID NO: 106382 - DNA, 1644 bp, Homo Sapiens; identical to SEQ ID NO: 71022
  misc_feature (1560)..(1582): n is a, c, g, or t

SEQ ID NO: 106383 - DNA, 1222 bp, Homo Sapiens; identical to SEQ ID NO: 71023

SEQ ID NO: 106384 - DNA, 953 bp, Homo Sapiens; identical to SEQ ID NO: 71024
  misc_feature (35)..(35): n is a, c, g, or t
  misc_feature (150)..(150): n is a, c, g, or t
  misc_feature (161)..(161): n is a, c, g, or t
  misc_feature (186)..(186): n is a, c, g, or t
  misc_feature (190)..(190): n is a, c, g, or t

SEQ ID NO: 106385 - DNA, 934 bp, Homo Sapiens; identical to SEQ ID NO: 71025

SEQ ID NO: 106386 - DNA, 665 bp, Homo Sapiens; identical to SEQ ID NO: 71026
  misc_feature (549)..(606): n is a, c, g, or t

SEQ ID NO: 106387 - DNA, 937 bp, Homo Sapiens; identical to SEQ ID NO: 71027
  misc_feature (899)..(899): n is a, c, g, or t

SEQ ID NO: 106388 - DNA, 800 bp, Homo Sapiens; identical to SEQ ID NO: 15515
  misc_feature (579)..(579): n is a, c, g, or t
  misc_feature (582)..(582): n is a, c, g, or t
  misc_feature (586)..(639): n is a, c, g, or t
  misc_feature (647)..(647): n is a, c, g, or t

SEQ ID NO: 106389 - DNA, 1031 bp, Homo Sapiens; identical to SEQ ID NO: 71030
  misc_feature (122)..(122): n is a, c, g, or t
  misc_feature (212)..(212): n is a, c, g, or t
  misc_feature (267)..(267): n is a, c, g, or t
  misc_feature (273)..(273): n is a, c, g, or t
  misc_feature (940)..(969): n is a, c, g, or t

SEQ ID NO: 106390 - DNA, 600 bp, Homo Sapiens; identical to SEQ ID NO: 71031

SEQ ID NO: 106391 - DNA, 2866 bp, Homo Sapiens; identical to SEQ ID NO: 71032
  misc_feature (2781)..(2799): n is a, c, g, or t

SEQ ID NO: 106392 - DNA, 1452 bp, Homo Sapiens; identical to SEQ ID NO: 71033

SEQ ID NO: 106393 - DNA, 1134 bp, Homo Sapiens; identical to SEQ ID NO: 71034

SEQ ID NO: 106394 - DNA, 456 bp, Homo Sapiens; identical to SEQ ID NO: 71035

SEQ ID NO: 106395 - DNA, 2892 bp, Homo Sapiens; identical to SEQ ID NO: 71037
  misc_feature (1938)..(2003): n is a, c, g, or t
  misc_feature (2038)..(2078): n is a, c, g, or t

SEQ ID NO: 106396 - DNA, 940 bp, Homo Sapiens; identical to SEQ ID NO: 71038

SEQ ID NO: 106397 - DNA, 916 bp, Homo Sapiens; identical to SEQ ID NO: 71039

SEQ ID NO: 106398 - DNA, 269 bp, Homo Sapiens; identical to SEQ ID NO: 71040

SEQ ID NO: 106399 - DNA, 987 bp, Homo Sapiens; identical to SEQ ID NO: 71042
  misc_feature (14)..(14): n is a, c, g, or t
  misc_feature (73)..(73): n is a, c, g, or t
  misc_feature (82)..(82): n is a, c, g, or t
  misc_feature (92)..(92): n is a, c, g, or t
  misc_feature (118)..(118): n is a, c, g, or t
  misc_feature (130)..(130): n is a, c, g, or t
  misc_feature (141)..(141): n is a, c, g, or t
  misc_feature (171)..(171): n is a, c, g, or t
  misc_feature (200)..(200): n is a, c, g, or t
  misc_feature (351)..(351): n is a, c, g, or t

SEQ ID NO: 106400 - DNA, 574 bp, Homo Sapiens; identical to SEQ ID NO: 71043

SEQ ID NO: 106401 - DNA, 685 bp, Homo Sapiens; identical to SEQ ID NO: 71044

SEQ ID NO: 106402 - DNA, 1096 bp, Homo Sapiens; identical to SEQ ID NO: 71048
  misc_feature (826)..(961): n is a, c, g, or t
  misc_feature (973)..(984): n is a, c, g, or t
  misc_feature (1011)..(1020): n is a, c, g, or t

SEQ ID NO: 106403 - DNA, 797 bp, Homo Sapiens; identical to SEQ ID NO: 71049
  misc_feature (516)..(524): n is a, c, g, or t

SEQ ID NO: 106404 - DNA, 599 bp, Homo Sapiens; identical to SEQ ID NO: 71053

SEQ ID NO: 106405 - DNA, 1275 bp, Homo Sapiens; identical to SEQ ID NO: 71054

SEQ ID NO: 106406 - DNA, 1282 bp, Homo Sapiens; identical to SEQ ID NO: 71058
  misc_feature (41)..(41): n is a, c, g, or t
  misc_feature (115)..(115): n is a, c, g, or t
  misc_feature (148)..(148): n is a, c, g, or t
  misc_feature (1046)..(1067): n is a, c, g, or t
  misc_feature (1069)..(1070): n is a, c, g, or t
  misc_feature (1072)..(1074): n is a, c, g, or t
  misc_feature (1076)..(1088): n is a, c, g, or t
  misc_feature (1094)..(1094): n is a, c, g, or t
  misc_feature (1107)..(1123): n is a, c, g, or t
  misc_feature (1130)..(1130): n is a, c, g, or t

SEQ ID NO: 106407 - DNA, 1037 bp, Homo Sapiens; identical to SEQ ID NO: 71059
  misc_feature (82)..(116): n is a, c, g, or t

SEQ ID NO: 106408 - DNA, 1096 bp, Homo Sapiens; identical to SEQ ID NO: 71060
  misc_feature (85)..(85): n is a, c, g, or t

SEQ ID NO: 106409 - DNA, 1016 bp, Homo Sapiens; identical to SEQ ID NO: 71061
  misc_feature (742)..(742): n is a, c, g, or t

SEQ ID NO: 106410 - DNA, 1789 bp, Homo Sapiens; identical to SEQ ID NO: 71064
  misc_feature (1692)..(1720): n is a, c, g, or t

SEQ ID NO: 106411 - DNA, 1975 bp, Homo Sapiens; identical to SEQ ID NO: 71065
  misc_feature (459)..(487): n is a, c, g, or t
  misc_feature (610)..(624): n is a, c, g, or t
  misc_feature (1051)..(1078): n is a, c, g, or t
  misc_feature (1485)..(1579): n is a, c, g, or t
  misc_feature (1783)..(1829): n is a, c, g, or t

SEQ ID NO: 106412 - DNA, 852 bp, Homo Sapiens; identical to SEQ ID NO: 71068

SEQ ID NO: 106413 - DNA, 1090 bp, Homo Sapiens; identical to SEQ ID NO: 71069
  misc_feature (409)..(424): n is a, c, g, or t

SEQ ID NO: 106414 - DNA, 444 bp, Homo Sapiens; identical to SEQ ID NO: 71070

SEQ ID NO: 106415 - DNA, 1481 bp, Homo Sapiens; identical to SEQ ID NO: 71071
  misc_feature (41)..(85): n is a, c, g, or t
  misc_feature (89)..(123): n is a, c, g, or t

SEQ ID NO: 106416 - DNA, 1396 bp, Homo Sapiens; identical to SEQ ID NO: 71073
  misc_feature (1095)..(1169): n is a, c, g, or t
  misc_feature (1175)..(1205): n is a, c, g, or t
  misc_feature (1282)..(1282): n is a, c, g, or t

SEQ ID NO: 106417 - DNA, 868 bp, Homo Sapiens; identical to SEQ ID NO: 71074
  misc_feature (800)..(800): n is a, c, g, or t

SEQ ID NO: 106418 - DNA, 986 bp, Homo Sapiens; identical to SEQ ID NO: 71075
  misc_feature (917)..(917): n is a, c, g, or t

SEQ ID NO: 106419 - DNA, 892 bp, Homo Sapiens; identical to SEQ ID NO: 71076
  misc_feature (763)..(763): n is a, c, g, or t

SEQ ID NO: 106420 - DNA, 874 bp, Homo Sapiens; identical to SEQ ID NO: 71077

SEQ ID NO: 106421 - DNA, 871 bp, Homo Sapiens; identical to SEQ ID NO: 71078

SEQ ID NO: 106422 - DNA, 3521 bp, Homo Sapiens; identical to SEQ ID NO: 71079
  misc_feature (2860)..(3290): n is a, c, g, or t
  misc_feature (3313)..(3313): n is a, c, g, or t
  misc_feature (3335)..(3335): n is a, c, g, or t
  misc_feature (3337)..(3337): n is a, c, g, or t
  misc_feature (3363)..(3363): n is a, c, g, or t
  misc_feature (3394)..(3394): n is a, c, g, or t
  misc_feature (3396)..(3396): n is a, c, g, or t
  misc_feature (3451)..(3451): n is a, c, g, or t
  misc_feature (3456)..(3456): n is a, c, g, or t

SEQ ID NO: 106423 - DNA, 653 bp, Homo Sapiens; identical to SEQ ID NO: 71080
  misc_feature (83)..(91): n is a, c, g, or t
  misc_feature (122)..(214): n is a, c, g, or t

SEQ ID NO: 106424 - DNA, 407 bp, Homo Sapiens; identical to SEQ ID NO: 71081
  misc_feature (316)..(316): n is a, c, g, or t
  misc_feature (321)..(321): n is a, c, g, or t

SEQ ID NO: 106425 - DNA, 1115 bp, Homo Sapiens; identical to SEQ ID NO: 71082
  misc_feature (159)..(184): n is a, c, g, or t

SEQ ID NO: 106426 - DNA, 2874 bp, Homo Sapiens; identical to SEQ ID NO: 71083

SEQ ID NO: 106427 - DNA, 1383 bp, Homo Sapiens; identical to SEQ ID NO: 71085
  misc_feature (905)..(1044): n is a, c, g, or t
  misc_feature (1055)..(1067): n is a, c, g, or t
  misc_feature (1178)..(1186): n is a, c, g, or t

SEQ ID NO: 106428 - DNA, 767 bp, Homo Sapiens; identical to SEQ ID NO: 71086

SEQ ID NO: 106429 - DNA, 1657 bp, Homo Sapiens; identical to SEQ ID NO: 71087
  misc_feature (1502)..(1502): n is a, c, g, or t

SEQ ID NO: 106430 - DNA, 1149 bp, Homo Sapiens; identical to SEQ ID NO: 71088
  misc_feature (1067)..(1090): n is a, c, g, or t
  misc_feature (1113)..(1113): n is a, c, g, or t

SEQ ID NO: 106431 - DNA, 940 bp, Homo Sapiens; identical to SEQ ID NO: 71089

SEQ ID NO: 106432 - DNA, 1070 bp, Homo Sapiens; identical to SEQ ID NO: 71090
  misc_feature (59)..(148): n is a, c, g, or t

SEQ ID NO: 106433 - DNA, 924 bp, Homo Sapiens; identical to SEQ ID NO: 71093

SEQ ID NO: 106434 - DNA, 1367 bp, Homo Sapiens; identical to SEQ ID NO: 71094
  misc_feature (1349)..(1349): n is a, c, g, or t

SEQ ID NO: 106435 - DNA, 948 bp, Homo Sapiens; identical to SEQ ID NO: 71095
  misc_feature (26)..(26): n is a, c, g, or t

SEQ ID NO: 106436 - DNA, 2062 bp, Homo Sapiens; identical to SEQ ID NO: 71096
  misc_feature (2013)..(2013): n is a, c, g, or t

SEQ ID NO: 106437 - DNA, 424 bp, Homo Sapiens; identical to SEQ ID NO: 71099
  misc_feature (71)..(280): n is a, c, g, or t

SEQ ID NO: 106438 - DNA, 496 bp, Homo Sapiens; identical to SEQ ID NO: 71100
  misc_feature (139)..(351): n is a, c, g, or t

SEQ ID NO: 106439 - DNA, 1212 bp, Homo Sapiens; identical to SEQ ID NO: 71104
  misc_feature (841)..(841): n is a, c, g, or t
  misc_feature (843)..(843): n is a, c, g, or t

SEQ ID NO: 106440 - DNA, 975 bp, Homo Sapiens; identical to SEQ ID NO: 71105
  misc_feature (846)..(864): n is a, c, g, or t
  misc_feature (866)..(873): n is a, c, g, or t

SEQ ID NO: 106441 - DNA, 1442 bp, Homo Sapiens; identical to SEQ ID NO: 71106
  misc_feature (1104)..(1126): n is a, c, g, or t
  misc_feature (1274)..(1333): n is a, c, g, or t

SEQ ID NO: 106442 - DNA, 494 bp, Homo Sapiens; identical to SEQ ID NO: 71107
  misc_feature (299)..(336): n is a, c, g, or t

SEQ ID NO: 106443 - DNA, 1111 bp, Homo Sapiens; identical to SEQ ID NO: 71108

SEQ ID NO: 106444 - DNA, 968 bp, Homo Sapiens; identical to SEQ ID NO: 4150

SEQ ID NO: 106445 - DNA, 716 bp, Homo Sapiens; identical to SEQ ID NO: 71112
  misc_feature (267)..(295): n is a, c, g, or t
  misc_feature (483)..(541): n is a, c, g, or t

SEQ ID NO: 106446 - DNA, 1779 bp, Homo Sapiens; identical to SEQ ID NO: 71113
  misc_feature (208)..(235): n is a, c, g, or t
  misc_feature (421)..(478): n is a, c, g, or t
  misc_feature (1396)..(1592): n is a, c, g, or t
  misc_feature (1594)..(1602): n is a, c, g, or t
  misc_feature (1653)..(1718): n is a, c, g, or t

SEQ ID NO: 106447 - DNA, 895 bp, Homo Sapiens; identical to SEQ ID NO: 71117
  misc_feature (1)..(1): n is a, c, g, or t

SEQ ID NO: 106448 - DNA, 1701 bp, Homo Sapiens; identical to SEQ ID NO: 71118
  misc_feature (45)..(45): n is a, c, g, or t
  misc_feature (88)..(88): n is a, c, g, or t
  misc_feature (93)..(93): n is a, c, g, or t
  misc_feature (122)..(122): n is a, c, g, or t
  misc_feature (203)..(203): n is a, c, g, or t
  misc_feature (295)..(295): n is a, c, g, or t
  misc_feature (1033)..(1183): n is a, c, g, or t
  misc_feature (1185)..(1186): n is a, c, g, or t
  misc_feature (1188)..(1192): n is a, c, g, or t
  misc_feature (1207)..(1217): n is a, c, g, or t
  misc_feature (1262)..(1352): n is a, c, g, or t
  misc_feature (1360)..(1452): n is a, c, g, or t
  misc_feature (1484)..(1499): n is a, c, g, or t
  misc_feature (1517)..(1529): n is a, c, g, or t
  misc_feature (1550)..(1590): n is a, c, g, or t

SEQ ID NO: 106449 - DNA, 957 bp, Homo Sapiens; identical to SEQ ID NO: 71119
  misc_feature (880)..(914): n is a, c, g, or t

SEQ ID NO: 106450 - DNA, 1306 bp, Homo Sapiens; identical to SEQ ID NO: 71120
  misc_feature (41)..(75): n is a, c, g, or t

SEQ ID NO: 106451 - DNA, 891 bp, Homo Sapiens; identical to SEQ ID NO: 71121
  misc_feature (91)..(125): n is a, c, g, or t

SEQ ID NO: 106452 - DNA, 1565 bp, Homo Sapiens; identical to SEQ ID NO: 71122
  misc_feature (76)..(110): n is a, c, g, or t

SEQ ID NO: 106453 - DNA, 975 bp, Homo Sapiens; identical to SEQ ID NO: 71123
  misc_feature (49)..(91): n is a, c, g, or t
  misc_feature (95)..(129): n is a, c, g, or t

SEQ ID NO: 106454 - DNA, 981 bp, Homo Sapiens; identical to SEQ ID NO: 71124
  misc_feature (79)..(113): n is a, c, g, or t

SEQ ID NO: 106455 - DNA, 1605 bp, Homo Sapiens; identical to SEQ ID NO: 71130
  misc_feature (652)..(652): n is a, c, g, or t
  misc_feature (808)..(808): n is a, c, g, or t
  misc_feature (888)..(888): n is a, c, g, or t
  misc_feature (962)..(962): n is a, c, g, or t

SEQ ID NO: 106456 - DNA, 1203 bp, Homo Sapiens; identical to SEQ ID NO: 71131

SEQ ID NO: 106457 - DNA, 493 bp, Homo Sapiens; identical to SEQ ID NO: 71133
  misc_feature (113)..(140): n is a, c, g, or t

SEQ ID NO: 106458 - DNA, 564 bp, Homo Sapiens; identical to SEQ ID NO: 71134
  misc_feature (201)..(262): n is a, c, g, or t

SEQ ID NO: 106459 - DNA, 478 bp, Homo Sapiens; identical to SEQ ID NO: 71135
  misc_feature (103)..(128): n is a, c, g, or t
  misc_feature (213)..(254): n is a, c, g, or t

SEQ ID NO: 106460 - DNA, 699 bp, Homo Sapiens; identical to SEQ ID NO: 71136
  misc_feature (70)..(70): n is a, c, g, or t
  misc_feature (100)..(100): n is a, c, g, or t
  misc_feature (331)..(355): n is a, c, g, or t
  misc_feature (431)..(483): n is a, c, g, or t

SEQ ID NO: 106461 - DNA, 2220 bp, Homo Sapiens; identical to SEQ ID NO: 71138
  misc_feature (1379)..(1387): n is a, c, g, or t
  misc_feature (1699)..(1708): n is a, c, g, or t
  misc_feature (1737)..(1737): n is a, c, g, or t

SEQ ID NO: 106462 - DNA, 1049 bp, Homo Sapiens; identical to SEQ ID NO: 71139

SEQ ID NO: 106463 - DNA, 1350 bp, Homo Sapiens; identical to SEQ ID NO: 71141
  misc_feature (1)..(1): n is a, c, g, or t
  misc_feature (27)..(55): n is a, c, g, or t

SEQ ID NO: 106464 - DNA, 685 bp, Homo Sapiens; identical to SEQ ID NO: 71142

SEQ ID NO: 106465 - DNA, 1677 bp, Homo Sapiens; identical to SEQ ID NO: 71143
  misc_feature (1455)..(1464): n is a, c, g, or t

SEQ ID NO: 106466 - DNA, 454 bp, Homo Sapiens; identical to SEQ ID NO: 71144

SEQ ID NO: 106467 - DNA, 1761 bp, Homo Sapiens; identical to SEQ ID NO: 71149

SEQ ID NO: 106468 - DNA, 650 bp, Homo Sapiens; identical to SEQ ID NO: 71150
  misc_feature (60)..(117): n is a, c, g, or t
  misc_feature (450)..(458): n is a, c, g, or t

SEQ ID NO: 106469 - DNA, 1148 bp, Homo Sapiens; identical to SEQ ID NO: 71151
  misc_feature (1047)..(1047): n is a, c, g, or t

SEQ ID NO: 106470 - DNA, 476 bp, Homo Sapiens; identical to SEQ ID NO: 71154

SEQ ID NO: 106471 - DNA, 1208 bp, Homo Sapiens; identical to SEQ ID NO: 71155

SEQ ID NO: 106472 - DNA, 614 bp, Homo Sapiens; identical to SEQ ID NO: 71156

SEQ ID NO: 106473 - DNA, 1102 bp, Homo Sapiens; identical to SEQ ID NO: 71159
  misc_feature (41)..(83): n is a, c, g, or t
  misc_feature (87)..(121): n is a, c, g, or t
  misc_feature (968)..(968): n is a, c, g, or t
  misc_feature (974)..(975): n is a, c, g, or t

SEQ ID NO: 106474 - DNA, 997 bp, Homo Sapiens; identical to SEQ ID NO: 71160
  misc_feature (81)..(115): n is a, c, g, or t

SEQ ID NO: 106475 - DNA, 1111 bp, Homo Sapiens; identical to SEQ ID NO: 71161
  misc_feature (51)..(90): n is a, c, g, or t
  misc_feature (94)..(128): n is a, c, g, or t

SEQ ID NO: 106476 - DNA, 894 bp, Homo Sapiens; identical to SEQ ID NO: 71162

SEQ ID NO: 106477 - DNA, 1651 bp, Homo Sapiens; identical to SEQ ID NO: 71163

SEQ ID NO: 106478 - DNA, 783 bp, Homo Sapiens; identical to SEQ ID NO: 71166
  misc_feature (11)..(11): n is a, c, g, or t
  misc_feature (94)..(94): n is a, c, g, or t
  misc_feature (100)..(100): n is a, c, g, or t
  misc_feature (136)..(136): n is a, c, g, or t

SEQ ID NO: 106479 - DNA, 816 bp, Homo Sapiens; identical to SEQ ID NO: 71167

SEQ ID NO: 106480 - DNA, 1088 bp, Homo Sapiens; identical to SEQ ID NO: 71169

SEQ ID NO: 106481 - DNA, 1192 bp, Homo Sapiens; identical to SEQ ID NO: 71170
  misc_feature (1125)..(1125): n is a, c, g, or t

SEQ ID NO: 106482 - DNA, 455 bp, Homo Sapiens; identical to SEQ ID NO: 71171

SEQ ID NO: 106483 - DNA, 687 bp, Homo Sapiens; identical to SEQ ID NO: 71172

SEQ ID NO: 106484 - DNA, 846 bp, Homo Sapiens; identical to SEQ ID NO: 71173

SEQ ID NO: 106485 - DNA, 1385 bp, Homo Sapiens; identical to SEQ ID NO: 71174
  misc_feature (1252)..(1288): n is a, c, g, or t

SEQ ID NO: 106486 - DNA, 529 bp, Homo Sapiens; identical to SEQ ID NO: 71175

SEQ ID NO: 106487 - DNA, 1447 bp, Homo Sapiens; identical to SEQ ID NO: 71176
  misc_feature (19)..(19): n is a, c, g, or t

SEQ ID NO: 106488 - DNA, 941 bp, Homo Sapiens; identical to SEQ ID NO: 71177
  misc_feature (861)..(861): n is a, c, g, or t

SEQ ID NO: 106489 - DNA, 993 bp, Homo Sapiens; identical to SEQ ID NO: 71178
  misc_feature (882)..(882): n is a, c, g, or t

SEQ ID NO: 106490 - DNA, 1334 bp, Homo Sapiens; identical to SEQ ID NO: 71180
  misc_feature (1276)..(1294): n is a, c, g, or t

SEQ ID NO: 106491 - DNA, 566 bp, Homo Sapiens; identical to SEQ ID NO: 71181
  misc_feature (46)..(46): n is a, c, g, or t

SEQ ID NO: 106492 - DNA, 1125 bp, Homo Sapiens; identical to SEQ ID NO: 71182

SEQ ID NO: 106493 - DNA, 870 bp, Homo Sapiens; identical to SEQ ID NO: 71183
  misc_feature (41)..(75): n is a, c, g, or t

SEQ ID NO: 106494 - DNA, 943 bp, Homo Sapiens; identical to SEQ ID NO: 71184

SEQ ID NO: 106495 - DNA, 1012 bp, Homo Sapiens; identical to SEQ ID NO: 71185

SEQ ID NO: 106496 - DNA, 960 bp, Homo Sapiens; identical to SEQ ID NO: 71186

SEQ ID NO: 106497 - DNA, 1083 bp, Homo Sapiens; identical to SEQ ID NO: 71187
  misc_feature (1032)..(1032): n is a, c, g, or t

SEQ ID NO: 106498 - DNA, 977 bp, Homo Sapiens; identical to SEQ ID NO: 71192
  misc_feature (119)..(119): n is a, c, g, or t
  misc_feature (133)..(133): n is a, c, g, or t
  misc_feature (193)..(193): n is a, c, g, or t
  misc_feature (306)..(306): n is a, c, g, or t

SEQ ID NO: 106499 - DNA, 1753 bp, Homo Sapiens; identical to SEQ ID NO: 71193
  misc_feature (12)..(12): n is a, c, g, or t

SEQ ID NO: 106500 - DNA, 1183 bp, Homo Sapiens; identical to SEQ ID NO: 71194

SEQ ID NO: 106501 - DNA, 1130 bp, Homo Sapiens; identical to SEQ ID NO: 71195

SEQ ID NO: 106502 - DNA, 1236 bp, Homo Sapiens; identical to SEQ ID NO: 71198
  misc_feature (48)..(48): n is a, c, g, or t
  misc_feature (66)..(67): n is a, c, g, or t
  misc_feature (123)..(123): n is a, c, g, or t
  misc_feature (126)..(126): n is a, c, g, or t
  misc_feature (153)..(154): n is a, c, g, or t
  misc_feature (167)..(167): n is a, c, g, or t
  misc_feature (200)..(200): n is a, c, g, or t
  misc_feature (944)..(955): n is a, c, g, or t

SEQ ID NO: 106503 - DNA, 485 bp, Homo Sapiens; identical to SEQ ID NO: 71199
  misc_feature (398)..(408): n is a, c, g, or t

SEQ ID NO: 106504 - DNA, 1270 bp, Homo Sapiens; identical to SEQ ID NO: 71204
  misc_feature (1085)..(1180): n is a, c, g, or t

SEQ ID NO: 106505 - DNA, 1103 bp, Homo Sapiens; identical to SEQ ID NO: 71205
  misc_feature (962)..(962): n is a, c, g, or t

SEQ ID NO: 106506 - DNA, 588 bp, Homo Sapiens; identical to SEQ ID NO: 71206
  misc_feature (91)..(186): n is a, c, g, or t
  misc_feature (525)..(525): n is a, c, g, or t

SEQ ID NO: 106507 - DNA, 448 bp, Homo Sapiens; identical to SEQ ID NO: 71207
  misc_feature (26)..(26): n is a, c, g, or t
  misc_feature (259)..(354): n is a, c, g, or t

SEQ ID NO: 106508 - DNA, 919 bp, Homo Sapiens; identical to SEQ ID NO: 71208

SEQ ID NO: 106509 - DNA, 1981 bp, Homo Sapiens; identical to SEQ ID NO: 71212
  misc_feature (1691)..(1691): n is a, c, g, or t
  misc_feature (1714)..(1773): n is a, c, g, or t
  misc_feature (1811)..(1829): n is a, c, g, or t

SEQ ID NO: 106510 - DNA, 1670 bp, Homo Sapiens; identical to SEQ ID NO: 71213

SEQ ID NO: 106511 - DNA, 672 bp, Homo Sapiens; identical to SEQ ID NO: 71214
  misc_feature (172)..(203): n is a, c, g, or t
  misc_feature (269)..(287): n is a, c, g, or t

SEQ ID NO: 106512 - DNA, 2702 bp, Homo Sapiens; identical to SEQ ID NO: 71215
  misc_feature (2312)..(2330): n is a, c, g, or t
  misc_feature (2357)..(2361): n is a, c, g, or t
  misc_feature (2363)..(2363): n is a, c, g, or t
  misc_feature (2365)..(2378): n is a, c, g, or t
  misc_feature (2380)..(2381): n is a, c, g, or t
  misc_feature (2383)..(2387): n is a, c, g, or t
  misc_feature (2389)..(2452): n is a, c, g, or t
  misc_feature (2459)..(2513): n is a, c, g, or t
  misc_feature (2642)..(2650): n is a, c, g, or t

SEQ ID NO: 106513 - DNA, 1044 bp, Homo Sapiens; identical to SEQ ID NO: 71216
  misc_feature (358)..(379): n is a, c, g, or t
  misc_feature (428)..(428): n is a, c, g, or t

SEQ ID NO: 106514 - DNA, 731 bp, Homo Sapiens; identical to SEQ ID NO: 71217
  misc_feature (220)..(241): n is a, c, g, or t

SEQ ID NO: 106515 - DNA, 741 bp, Homo Sapiens; identical to SEQ ID NO: 71218

SEQ ID NO: 106516 - DNA, 960 bp, Homo Sapiens; identical to SEQ ID NO: 71219

SEQ ID NO: 106517 - DNA, 865 bp, Homo Sapiens; identical to SEQ ID NO: 71220

SEQ ID NO: 106518 - DNA, 796 bp, Homo Sapiens; identical to SEQ ID NO: 71227
  misc_feature (44)..(44): n is a, c, g, or t

SEQ ID NO: 106519 - DNA, 1342 bp, Homo Sapiens; identical to SEQ ID NO: 71228
  misc_feature (100)..(100): n is a, c, g, or t
  misc_feature (120)..(120): n is a, c, g, or t
  misc_feature (147)..(147): n is a, c, g, or t
  misc_feature (1291)..(1291): n is a, c, g, or t

SEQ ID NO: 106520 - DNA, 415 bp, Homo Sapiens; identical to SEQ ID NO: 71230
  misc_feature (123)..(304): n is a, c, g, or t

SEQ ID NO: 106521 - DNA, 1645 bp, Homo Sapiens; identical to SEQ ID NO: 71231
  misc_feature (1359)..(1540): n is a, c, g, or t

SEQ ID NO: 106522 - DNA, 494 bp, Homo Sapiens; identical to SEQ ID NO: 71232
  misc_feature (194)..(194): n is a, c, g, or t
  misc_feature (207)..(387): n is a, c, g, or t

SEQ ID NO: 106523 - DNA, 698 bp, Homo Sapiens; identical to SEQ ID NO: 71240

SEQ ID NO: 106524 - DNA, 611 bp, Homo Sapiens; identical to SEQ ID NO: 71241

SEQ ID NO: 106525 - DNA, 974 bp, Homo Sapiens; identical to SEQ ID NO: 71242
  misc_feature (45)..(86): n is a, c, g, or t
  misc_feature (90)..(124): n is a, c, g, or t

SEQ ID NO: 106526 - DNA, 2496 bp, Homo Sapiens; identical to SEQ ID NO: 71243
  misc_feature (1995)..(2005): n is a, c, g, or t

SEQ ID NO: 106527 - DNA, 1035 bp, Homo Sapiens; identical to SEQ ID NO: 71247

SEQ ID NO: 106528 - DNA, 1686 bp, Homo Sapiens; identical to SEQ ID NO: 71248

SEQ ID NO: 106529 - DNA, 983 bp, Homo Sapiens; identical to SEQ ID NO: 71249

SEQ ID NO: 106530 - DNA, 1232 bp, Homo Sapiens; identical to SEQ ID NO: 71251

SEQ ID NO: 106531 - DNA, 2046 bp, Homo Sapiens; identical to SEQ ID NO: 71252

SEQ ID NO: 106532 - DNA, 1152 bp, Homo Sapiens; identical to SEQ ID NO: 71253
  misc_feature (1089)..(1089): n is a, c, g, or t

SEQ ID NO: 106533 - DNA, 681 bp, Homo Sapiens; identical to SEQ ID NO: 71260

SEQ ID NO: 106534 - DNA, 2128 bp, Homo Sapiens; identical to SEQ ID NO: 71261

SEQ ID NO: 106535 - DNA, 641 bp, Homo Sapiens; identical to SEQ ID NO: 71262

SEQ ID NO: 106536 - DNA, 747 bp, Homo Sapiens; identical to SEQ ID NO: 71264

SEQ ID NO: 106537 - DNA, 808 bp, Homo Sapiens; identical to SEQ ID NO: 71265

SEQ ID NO: 106538 - DNA, 302 bp, Homo Sapiens; identical to SEQ ID NO: 71267

SEQ ID NO: 106539 - DNA, 1657 bp, Homo Sapiens; identical to SEQ ID NO: 71268
  misc_feature (82)..(116): n is a, c, g, or t

SEQ ID NO: 106540 - DNA, 1018 bp, Homo Sapiens; identical to SEQ ID NO: 71269

SEQ ID NO: 106541 - DNA, 1111 bp, Homo Sapiens; identical to SEQ ID NO: 71270
  misc_feature (83)..(117): n is a, c, g, or t

SEQ ID NO: 106542 - DNA, 1283 bp, Homo Sapiens; identical to SEQ ID NO: 71271

SEQ ID NO: 106543 - DNA, 921 bp, Homo Sapiens; identical to SEQ ID NO: 71272

SEQ ID NO: 106544 - DNA, 2418 bp, Homo Sapiens; identical to SEQ ID NO: 71273
  misc_feature (1440)..(1453): n is a, c, g, or t
  misc_feature (1468)..(1470): n is a, c, g, or t
  misc_feature (1513)..(1521): n is a, c, g, or t
  misc_feature (2095)..(2159): n is a, c, g, or t
  misc_feature (2245)..(2245): n is a, c, g, or t
  misc_feature (2263)..(2272): n is a, c, g, or t

SEQ ID NO: 106545 - DNA, 3141 bp, Homo Sapiens; identical to SEQ ID NO: 71275

SEQ ID NO: 106546 - DNA, 1037 bp, Homo Sapiens; identical to SEQ ID NO: 71276
  misc_feature (42)..(76): n is a, c, g, or t

SEQ ID NO: 106547 - DNA, 1472 bp, Homo Sapiens; identical to SEQ ID NO: 71280

SEQ ID NO: 106548 - DNA, 1406 bp, Homo Sapiens; identical to SEQ ID NO: 71281
  misc_feature (1167)..(1176): n is a, c, g, or t
  misc_feature (1310)..(1363): n is a, c, g, or t

SEQ ID NO: 106549 - DNA, 783 bp, Homo Sapiens; identical to SEQ ID NO: 71282

SEQ ID NO: 106550 - DNA, 1184 bp, Homo Sapiens; identical to SEQ ID NO: 71283

SEQ ID NO: 106551 - DNA, 968 bp, Homo Sapiens; identical to SEQ ID NO: 71284

SEQ ID NO: 106552 - DNA, 790 bp, Homo Sapiens; identical to SEQ ID NO: 71285

SEQ ID NO: 106553 - DNA, 1260 bp, Homo Sapiens; identical to SEQ ID NO: 71286

SEQ ID NO: 106554 - DNA, 2058 bp, Homo Sapiens; identical to SEQ ID NO: 71287

SEQ ID NO: 106555 - DNA, 1223 bp, Homo Sapiens; identical to SEQ ID NO: 71292
  misc_feature (54)..(54): n is a, c, g, or t
  misc_feature (71)..(71): n is a, c, g, or t
  misc_feature (140)..(140): n is a, c, g, or t
  misc_feature (942)..(950): n is a, c, g, or t

SEQ ID NO: 106556 - DNA, 1355 bp, Homo Sapiens; identical to SEQ ID NO: 71293

SEQ ID NO: 106557 - DNA, 1123 bp, Homo Sapiens; identical to SEQ ID NO: 71294

SEQ ID NO: 106558 - DNA, 1213 bp, Homo Sapiens; identical to SEQ ID NO: 71298
  misc_feature (726)..(735): n is a, c, g, or t

SEQ ID NO: 106559 - DNA, 1517 bp, Homo Sapiens; identical to SEQ ID NO: 71299
  misc_feature (1332)..(1332): n is a, c, g, or t
  misc_feature (1335)..(1354): n is a, c, g, or t

SEQ ID NO: 106560 - DNA, 1365 bp, Homo Sapiens; identical to SEQ ID NO: 71301

SEQ ID NO: 106561 - DNA, 874 bp, Homo Sapiens; identical to SEQ ID NO: 71302
  misc_feature (496)..(496): n is a, c, g, or t

SEQ ID NO: 106562 - DNA, 885 bp, Homo Sapiens; identical to SEQ ID NO: 71303

SEQ ID NO: 106563 - DNA, 993 bp, Homo Sapiens; identical to SEQ ID NO: 71304

SEQ ID NO: 106564 - DNA, 1127 bp, Homo Sapiens; identical to SEQ ID NO: 71307
  misc_feature (993)..(1012): n is a, c, g, or t
  misc_feature (1098)..(1098): n is a, c, g, or t

SEQ ID NO: 106565 - DNA, 936 bp, Homo Sapiens; identical to SEQ ID NO: 71308

SEQ ID NO: 106566 - DNA, 376 bp, Homo Sapiens; identical to SEQ ID NO: 71309

SEQ ID NO: 106567 - DNA, 386 bp, Homo Sapiens; identical to SEQ ID NO: 71310

SEQ ID NO: 106568 - DNA, 875 bp, Homo Sapiens; identical to SEQ ID NO: 71314
  misc_feature (298)..(341): n is a, c, g, or t
  misc_feature (778)..(824): n is a, c, g, or t

SEQ ID NO: 106569 - DNA, 674 bp, Homo Sapiens; identical to SEQ ID NO: 71315
  misc_feature (22)..(22): n is a, c, g, or t
  misc_feature (66)..(66): n is a, c, g, or t
  misc_feature (98)..(141): n is a, c, g, or t
  misc_feature (577)..(624): n is a, c, g, or t

SEQ ID NO: 106570 - DNA, 1284 bp, Homo Sapiens; identical to SEQ ID NO: 71318

SEQ ID NO: 106571 - DNA, 545 bp, Homo Sapiens; identical to SEQ ID NO: 71319

SEQ ID NO: 106572 - DNA, 798 bp, Homo Sapiens; identical to SEQ ID NO: 71321

SEQ ID NO: 106573 - DNA, 963 bp, Homo Sapiens; identical to SEQ ID NO: 71322
  misc_feature (793)..(793): n is a, c, g, or t
  misc_feature (805)..(826): n is a, c, g, or t
  misc_feature (860)..(860): n is a, c, g, or t
  misc_feature (874)..(874): n is a, c, g, or t

SEQ ID NO: 106574 - DNA, 836 bp, Homo Sapiens; identical to SEQ ID NO: 71324

SEQ ID NO: 106575 - DNA, 1055 bp, Homo Sapiens; identical to SEQ ID NO: 71325
  misc_feature (979)..(990): n is a, c, g, or t

SEQ ID NO: 106576 - DNA, 1959 bp, Homo Sapiens; identical to SEQ ID NO: 71326
  misc_feature (652)..(662): n is a, c, g, or t
  misc_feature (1804)..(1861): n is a, c, g, or t

SEQ ID NO: 106577 - DNA, 751 bp, Homo Sapiens; identical to SEQ ID NO: 71328

SEQ ID NO: 106578 - DNA, 1149 bp, Homo Sapiens; identical to SEQ ID NO: 71329
  misc_feature (397)..(446): n is a, c, g, or t

SEQ ID NO: 106579 - DNA, 1756 bp, Homo Sapiens; identical to SEQ ID NO: 71330
  misc_feature (796)..(796): n is a, c, g, or t

SEQ ID NO: 106580 - DNA, 1109 bp, Homo Sapiens; identical to SEQ ID NO: 71331
  misc_feature (824)..(824): n is a, c, g, or t

SEQ ID NO: 106581 - DNA, 2055 bp, Homo Sapiens; identical to SEQ ID NO: 71340
  misc_feature (1689)..(1763): n is a, c, g, or t

SEQ ID NO: 106582 - DNA, 416 bp, Homo Sapiens; identical to SEQ ID NO: 71341
  misc_feature (146)..(146): n is a, c, g, or t

SEQ ID NO: 106583 - DNA, 777 bp, Homo Sapiens; identical to SEQ ID NO: 71342

SEQ ID NO: 106584 - DNA, 847 bp, Homo Sapiens; identical to SEQ ID NO: 71343
  misc_feature (747)..(787): n is a, c, g, or t

SEQ ID NO: 106585 - DNA, 1094 bp, Homo Sapiens; identical to SEQ ID NO: 71344
  misc_feature (44)..(78): n is a, c, g, or t

SEQ ID NO: 106586 - DNA, 943 bp, Homo Sapiens; identical to SEQ ID NO: 71345
  misc_feature (398)..(433): n is a, c, g, or t

SEQ ID NO: 106587 - DNA, 1844 bp, Homo Sapiens; identical to SEQ ID NO: 71346
  misc_feature (48)..(49): n is a, c, g, or t

SEQ ID NO: 106588 - DNA, 697 bp, Homo Sapiens; identical to SEQ ID NO: 71347

SEQ ID NO: 106589 - DNA, 589 bp, Homo Sapiens; identical to SEQ ID NO: 71350

SEQ ID NO: 106590 - DNA, 1228 bp, Homo Sapiens; identical to SEQ ID NO: 71351

SEQ ID NO: 106591 - DNA, 1012 bp, Homo Sapiens; identical to SEQ ID NO: 71353

SEQ ID NO: 106592 - DNA, 1397 bp, Homo Sapiens; identical to SEQ ID NO: 71354

SEQ ID NO: 106593 - DNA, 710 bp, Homo Sapiens; identical to SEQ ID NO: 71361
  misc_feature (408)..(452): n is a, c, g, or t

SEQ ID NO: 106594 - DNA, 517 bp, Homo Sapiens; identical to SEQ ID NO: 71362
  misc_feature (213)..(256): n is a, c, g, or t

SEQ ID NO: 106595 - DNA, 447 bp, Homo Sapiens; identical to SEQ ID NO: 71363
  misc_feature (140)..(191): n is a, c, g, or t

SEQ ID NO: 106596 - DNA, 1026 bp, Homo Sapiens; identical to SEQ ID NO: 71367

SEQ ID NO: 106597 - DNA, 989 bp, Homo Sapiens; identical to SEQ ID NO: 71368

SEQ ID NO: 106598 - DNA, 1762 bp, Homo Sapiens; identical to SEQ ID NO: 71369

SEQ ID NO: 106599 - DNA, 1789 bp, Homo Sapiens; identical to SEQ ID NO: 71374

SEQ ID NO: 106600 - DNA, 202 bp, Homo Sapiens; identical to SEQ ID NO: 71375

SEQ ID NO: 106601 - DNA, 1469 bp, Homo Sapiens; identical to SEQ ID NO: 71376
  misc_feature (80)..(114): n is a, c, g, or t
  misc_feature (1101)..(1124): n is a, c, g, or t
  misc_feature (1126)..(1136): n is a, c, g, or t
  misc_feature (1139)..(1165): n is a, c, g, or t

SEQ ID NO: 106602 - DNA, 451 bp, Homo Sapiens; identical to SEQ ID NO: 71377

SEQ ID NO: 106603 - DNA, 1251 bp, Homo Sapiens; identical to SEQ ID NO: 71378
  misc_feature (366)..(421): n is a, c, g, or t
  misc_feature (936)..(971): n is a, c, g, or t

SEQ ID NO: 106604 - DNA, 1170 bp, Homo Sapiens; identical to SEQ ID NO: 71379
  misc_feature (61)..(83): n is a, c, g, or t

SEQ ID NO: 106605 - DNA, 986 bp, Homo Sapiens; identical to SEQ ID NO: 71380
  misc_feature (180)..(234): n is a, c, g, or t
  misc_feature (673)..(673): n is a, c, g, or t
  misc_feature (698)..(698): n is a, c, g, or t
  misc_feature (729)..(729): n is a, c, g, or t
  misc_feature (731)..(731): n is a, c, g, or t
  misc_feature (773)..(773): n is a, c, g, or t
  misc_feature (801)..(801): n is a, c, g, or t
  misc_feature (907)..(907): n is a, c, g, or t
  misc_feature (966)..(966): n is a, c, g, or t

SEQ ID NO: 106606 - DNA, 1168 bp, Homo Sapiens; identical to SEQ ID NO: 71381
  misc_feature (68)..(95): n is a, c, g, or t
  misc_feature (436)..(448): n is a, c, g, or t
  misc_feature (553)..(592): n is a, c, g, or t

SEQ ID NO: 106607 - DNA, 720 bp, Homo Sapiens; identical to SEQ ID NO: 71382
  misc_feature (578)..(633): n is a, c, g, or t
  misc_feature (679)..(679): n is a, c, g, or t

SEQ ID NO: 106608 - DNA, 545 bp, Homo Sapiens; identical to SEQ ID NO: 71383
  misc_feature (204)..(214): n is a, c, g, or t
  misc_feature (292)..(353): n is a, c, g, or t

SEQ ID NO: 106609 - DNA, 882 bp, Homo Sapiens; identical to SEQ ID NO: 71385

SEQ ID NO: 106610 - DNA, 1015 bp, Homo Sapiens; identical to SEQ ID NO: 71386

SEQ ID NO: 106611 - DNA, 1271 bp, Homo Sapiens; identical to SEQ ID NO: 71387

SEQ ID NO: 106612 - DNA, 460 bp, Homo Sapiens; identical to SEQ ID NO: 71388

SEQ ID NO: 106613 - DNA, 3438 bp, Homo Sapiens; identical to SEQ ID NO: 71389

SEQ ID NO: 106614 - DNA, 1384 bp, Homo Sapiens; identical to SEQ ID NO: 71390

SEQ ID NO: 106615 - DNA, 1476 bp, Homo Sapiens; identical to SEQ ID NO: 71391

SEQ ID NO: 106616 - DNA, 926 bp, Homo Sapiens; identical to SEQ ID NO: 71393
  misc_feature (663)..(718): n is a, c, g, or t

SEQ ID NO: 106617 - DNA, 2037 bp, Homo Sapiens; identical to SEQ ID NO: 71394

SEQ ID NO: 106618 - DNA, 1044 bp, Homo Sapiens; identical to SEQ ID NO: 71395

SEQ ID NO: 106619 - DNA, 1035 bp, Homo Sapiens; identical to SEQ ID NO: 71398
  misc_feature (25)..(26): n is a, c, g, or t
  misc_feature (56)..(57): n is a, c, g, or t
  misc_feature (60)..(61): n is a, c, g, or t
  misc_feature (77)..(77): n is a, c, g, or t
  misc_feature (80)..(80): n is a, c, g, or t
  misc_feature (88)..(89): n is a, c, g, or t
  misc_feature (191)..(191): n is a, c, g, or t

SEQ ID NO: 106620 - DNA, 2108 bp, Homo Sapiens; identical to SEQ ID NO: 71399

SEQ ID NO: 106621 - DNA, 1208 bp, Homo Sapiens; identical to SEQ ID NO: 71400
  misc_feature (721)..(733): n is a, c, g, or t
  misc_feature (738)..(754): n is a, c, g, or t

SEQ ID NO: 106622 - DNA, 921 bp, Homo Sapiens; identical to SEQ ID NO: 71402
  misc_feature (413)..(425): n is a, c, g, or t

SEQ ID NO: 106623 - DNA, 927 bp, Homo Sapiens; identical to SEQ ID NO: 71403
  misc_feature (43)..(81): n is a, c, g, or t
  misc_feature (86)..(120): n is a, c, g, or t

SEQ ID NO: 106624 - DNA, 788 bp, Homo Sapiens; identical to SEQ ID NO: 71404

SEQ ID NO: 106625 - DNA, 2707 bp, Homo Sapiens; identical to SEQ ID NO: 71405
  misc_feature (1294)..(1309): n is a, c, g, or t
  misc_feature (1695)..(1700): n is a, c, g, or t
  misc_feature (1702)..(1752): n is a, c, g, or t
  misc_feature (1763)..(1769): n is a, c, g, or t
  misc_feature (1772)..(1772): n is a, c, g, or t
  misc_feature (1774)..(1774): n is a, c, g, or t
  misc_feature (1776)..(1776): n is a, c, g, or t
  misc_feature (1779)..(1780): n is a, c, g, or t
  misc_feature (1782)..(1783): n is a, c, g, or t
  misc_feature (1788)..(1894): n is a, c, g, or t
  misc_feature (1924)..(1936): n is a, c, g, or t
  misc_feature (2104)..(2104): n is a, c, g, or t
  misc_feature (2107)..(2107): n is a, c, g, or t
  misc_feature (2296)..(2296): n is a, c, g, or t
  misc_feature (2343)..(2343): n is a, c, g, or t
  misc_feature (2346)..(2346): n is a, c, g, or t
  misc_feature (2348)..(2348): n is a, c, g, or t
  misc_feature (2352)..(2352): n is a, c, g, or t
  misc_feature (2359)..(2360): n is a, c, g, or t
  misc_feature (2364)..(2365): n is a, c, g, or t
  misc_feature (2370)..(2370): n is a, c, g, or t
  misc_feature (2427)..(2427): n is a, c, g, or t

SEQ ID NO: 106626 - DNA, 889 bp, Homo Sapiens; identical to SEQ ID NO: 71406
  misc_feature (849)..(849): n is a, c, g, or t

SEQ ID NO: 106627 - DNA, 1733 bp, Homo Sapiens; identical to SEQ ID NO: 71407
  misc_feature (771)..(806): n is a, c, g, or t

SEQ ID NO: 106628 - DNA, 1293 bp, Homo Sapiens; identical to SEQ ID NO: 71411
  misc_feature (755)..(827): n is a, c, g, or t
  misc_feature (1213)..(1235): n is a, c, g, or t

SEQ ID NO: 106629 - DNA, 684 bp, Homo Sapiens; identical to SEQ ID NO: 71412
  misc_feature (407)..(425): n is a, c, g, or t
  misc_feature (429)..(429): n is a, c, g, or t

SEQ ID NO: 106630 - DNA, 1184 bp, Homo Sapiens; identical to SEQ ID NO: 71413
  misc_feature (447)..(447): n is a, c, g, or t
  misc_feature (705)..(768): n is a, c, g, or t
  misc_feature (770)..(820): n is a, c, g, or t

SEQ ID NO: 106631 - DNA, 1234 bp, Homo Sapiens; identical to SEQ ID NO: 71414

SEQ ID NO: 106632 - DNA, 1090 bp, Homo Sapiens; identical to SEQ ID NO: 71415
  misc_feature (803)..(803): n is a, c, g, or t
  misc_feature (1041)..(1041): n is a, c, g, or t

SEQ ID NO: 106633 - DNA, 1224 bp, Homo Sapiens; identical to SEQ ID NO: 71418

SEQ ID NO: 106634 - DNA, 2170 bp, Homo Sapiens; identical to SEQ ID NO: 71419
  misc_feature (135)..(143): n is a, c, g, or t

SEQ ID NO: 106635 - DNA, 902 bp, Homo Sapiens; identical to SEQ ID NO: 71420

SEQ ID NO: 106636 - DNA, 1344 bp, Homo Sapiens; identical to SEQ ID NO: 71421
  misc_feature (166)..(188): n is a, c, g, or t

SEQ ID NO: 106637 - DNA, 804 bp, Homo Sapiens; identical to SEQ ID NO: 71422
  misc_feature (46)..(46): n is a, c, g, or t
  misc_feature (121)..(121): n is a, c, g, or t
  misc_feature (173)..(173): n is a, c, g, or t
  misc_feature (245)..(245): n is a, c, g, or t

SEQ ID NO: 106638 - DNA, 2054 bp, Homo Sapiens; identical to SEQ ID NO: 71435

SEQ ID NO: 106639 - DNA, 785 bp, Homo Sapiens; identical to SEQ ID NO: 71436

SEQ ID NO: 106640 - DNA, 823 bp, Homo Sapiens; identical to SEQ ID NO: 71437

SEQ ID NO: 106641 - DNA, 923 bp, Homo Sapiens; identical to SEQ ID NO: 71438

SEQ ID NO: 106642 - DNA, 1242 bp, Homo Sapiens; identical to SEQ ID NO: 71441

SEQ ID NO: 106643 - DNA, 919 bp, Homo Sapiens; identical to SEQ ID NO: 71442

SEQ ID NO: 106644 - DNA, 1106 bp, Homo Sapiens; identical to SEQ ID NO: 71443

SEQ ID NO: 106645 - DNA, 905 bp, Homo Sapiens; identical to SEQ ID NO: 71444

SEQ ID NO: 106646 - DNA, 877 bp, Homo Sapiens; identical to SEQ ID NO: 71449
  misc_feature (850)..(850): n is a, c, g, or t

SEQ ID NO: 106647 - DNA, 197 bp, Homo Sapiens; identical to SEQ ID NO: 71450

SEQ ID NO: 106648 - DNA, 743 bp, Homo Sapiens; identical to SEQ ID NO: 71456
  misc_feature (54)..(55): n is a, c, g, or t
  misc_feature (62)..(127): n is a, c, g, or t
  misc_feature (608)..(617): n is a, c, g, or t

SEQ ID NO: 106649 - DNA, 1129 bp, Homo Sapiens; identical to SEQ ID NO: 71457
  misc_feature (288)..(334): n is a, c, g, or t

SEQ ID NO: 106650 - DNA, 338 bp, Homo Sapiens; identical to SEQ ID NO: 71458

SEQ ID NO: 106651 - DNA, 482 bp, Homo Sapiens; identical to SEQ ID NO: 71459

SEQ ID NO: 106652 - DNA, 1002 bp, Homo Sapiens; identical to SEQ ID NO: 71460
  misc_feature (12)..(12): n is a, c, g, or t
  misc_feature (99)..(99): n is a, c, g, or t

SEQ ID NO: 106653 - DNA, 538 bp, Homo Sapiens; identical to SEQ ID NO: 71461

SEQ ID NO: 106654 - DNA, 800 bp, Homo Sapiens; identical to SEQ ID NO: 71462
  misc_feature (390)..(630): n is a, c, g, or t
  misc_feature (743)..(743): n is a, c, g, or t

SEQ ID NO: 106655 - DNA, 367 bp, Homo Sapiens; identical to SEQ ID NO: 71463

SEQ ID NO: 106656 - DNA, 701 bp, Homo Sapiens; identical to SEQ ID NO: 71466

SEQ ID NO: 106657 - DNA, 1128 bp, Homo Sapiens; identical to SEQ ID NO: 71467

SEQ ID NO: 106658 - DNA, 899 bp, Homo Sapiens; identical to SEQ ID NO: 71468

SEQ ID NO: 106659 - DNA, 2173 bp, Homo Sapiens; identical to SEQ ID NO: 71479

SEQ ID NO: 106660 - DNA, 971 bp, Homo Sapiens; identical to SEQ ID NO: 71480

SEQ ID NO: 106661 - DNA, 868 bp, Homo Sapiens; identical to SEQ ID NO: 71483

SEQ ID NO: 106662 - DNA, 450 bp, Homo Sapiens; identical to SEQ ID NO: 71484

SEQ ID NO: 106663 - DNA, 815 bp, Homo Sapiens; identical to SEQ ID NO: 71485
  misc_feature (634)..(634): n is a, c, g, or t
  misc_feature (673)..(673): n is a, c, g, or t
  misc_feature (703)..(703): n is a, c, g, or t
  misc_feature (711)..(727): n is a, c, g, or t
  misc_feature (729)..(739): n is a, c, g, or t

SEQ ID NO: 106664 - DNA, 836 bp, Homo Sapiens; identical to SEQ ID NO: 71486

SEQ ID NO: 106665 - DNA, 1075 bp, Homo Sapiens; identical to SEQ ID NO: 71487

SEQ ID NO: 106666 - DNA, 919 bp, Homo Sapiens; identical to SEQ ID NO: 71489

SEQ ID NO: 106667 - DNA, 1718 bp, Homo Sapiens; identical to SEQ ID NO: 71490

SEQ ID NO: 106668 - DNA, 2170 bp, Homo Sapiens; identical to SEQ ID NO: 71494
  misc_feature (72)..(106): n is a, c, g, or t
  misc_feature (1166)..(1166): n is a, c, g, or t

SEQ ID NO: 106669 - DNA, 916 bp, Homo Sapiens; identical to SEQ ID NO: 71495

SEQ ID NO: 106670 - DNA, 1125 bp, Homo Sapiens; identical to SEQ ID NO: 71497
  misc_feature (88)..(122): n is a, c, g, or t
  misc_feature (825)..(848): n is a, c, g, or t

SEQ ID NO: 106671 - DNA, 958 bp, Homo Sapiens; identical to SEQ ID NO: 71498

SEQ ID NO: 106672 - DNA, 1983 bp, Homo Sapiens; identical to SEQ ID NO: 71499

SEQ ID NO: 106673 - DNA, 1893 bp, Homo Sapiens; identical to SEQ ID NO: 71505

SEQ ID NO: 106674 - DNA, 1282 bp, Homo Sapiens; identical to SEQ ID NO: 71506
  misc_feature (481)..(499): n is a, c, g, or t

SEQ ID NO: 106675 - DNA, 1945 bp, Homo Sapiens; identical to SEQ ID NO: 71507
  misc_feature (1343)..(1389): n is a, c, g, or t

SEQ ID NO: 106676 - DNA, 904 bp, Homo Sapiens; identical to SEQ ID NO: 71508
  misc_feature (146)..(199): n is a, c, g, or t

SEQ ID NO: 106677 - DNA, 1888 bp, Homo Sapiens; identical to SEQ ID NO: 71509
  misc_feature (601)..(666): n is a, c, g, or t

SEQ ID NO: 106678 - DNA, 1483 bp, Homo Sapiens; identical to SEQ ID NO: 71510
  misc_feature (119)..(162): n is a, c, g, or t
  misc_feature (1356)..(1376): n is a, c, g, or t

SEQ ID NO: 106679 - DNA, 597 bp, Homo Sapiens; identical to SEQ ID NO: 71511
  misc_feature (45)..(45): n is a, c, g, or t

SEQ ID NO: 106680 - DNA, 1559 bp, Homo Sapiens; identical to SEQ ID NO: 71514
  misc_feature (1186)..(1194): n is a, c, g, or t
  misc_feature (1248)..(1265): n is a, c, g, or t

SEQ ID NO: 106681 - DNA, 1073 bp, Homo Sapiens; identical to SEQ ID NO: 71515
  misc_feature (950)..(960): n is a, c, g, or t
  misc_feature (1024)..(1024): n is a, c, g, or t

SEQ ID NO: 106682 - DNA, 967 bp, Homo Sapiens; identical to SEQ ID NO: 71516

SEQ ID NO: 106683 - DNA, 889 bp, Homo Sapiens; identical to SEQ ID NO: 71517

SEQ ID NO: 106684 - DNA, 935 bp, Homo Sapiens; identical to SEQ ID NO: 71518

SEQ ID NO: 106685 - DNA, 736 bp, Homo Sapiens; identical to SEQ ID NO: 71527
  misc_feature (89)..(89): n is a, c, g, or t
  misc_feature (95)..(128): n is a, c, g, or t
  misc_feature (675)..(689): n is a, c, g, or t

SEQ ID NO: 106686 - DNA, 752 bp, Homo Sapiens; identical to SEQ ID NO: 71528

SEQ ID NO: 106687 - DNA, 247 bp, Homo Sapiens; identical to SEQ ID NO: 71529

SEQ ID NO: 106688 - DNA, 1942 bp, Homo Sapiens; identical to SEQ ID NO: 71534

SEQ ID NO: 106689 - DNA, 1365 bp, Homo Sapiens; identical to SEQ ID NO: 71535

SEQ ID NO: 106690 - DNA, 598 bp, Homo Sapiens; identical to SEQ ID NO: 71537

SEQ ID NO: 106691 - DNA, 1075 bp, Homo Sapiens; identical to SEQ ID NO: 71538
  misc_feature (65)..(65): n is a, c, g, or t
  misc_feature (108)..(108): n is a, c, g, or t
  misc_feature (121)..(121): n is a, c, g, or t
  misc_feature (1014)..(1033): n is a, c, g, or t

SEQ ID NO: 106692 - DNA, 879 bp, Homo Sapiens; identical to SEQ ID NO: 71542
  misc_feature (201)..(210): n is a, c, g, or t

SEQ ID NO: 106693 - DNA, 1146 bp, Homo Sapiens; identical to SEQ ID NO: 71543
  misc_feature (47)..(85): n is a, c, g, or t
  misc_feature (89)..(123): n is a, c, g, or t

SEQ ID NO: 106694 - DNA, 497 bp, Homo Sapiens; identical to SEQ ID NO: 71544
  misc_feature (24)..(24): n is a, c, g, or t
  misc_feature (75)..(75): n is a, c, g, or t
  misc_feature (399)..(399): n is a, c, g, or t

SEQ ID NO: 106695 - DNA, 2693 bp, Homo Sapiens; identical to SEQ ID NO: 71545

SEQ ID NO: 106696 - DNA, 877 bp, Homo Sapiens; identical to SEQ ID NO: 71549

SEQ ID NO: 106697 - DNA, 1042 bp, Homo Sapiens; identical to SEQ ID NO: 71550
  misc_feature (854)..(854): n is a, c, g, or t
  misc_feature (856)..(861): n is a, c, g, or t

SEQ ID NO: 106698 - DNA, 944 bp, Homo Sapiens; identical to SEQ ID NO: 71553
  misc_feature (800)..(800): n is a, c, g, or t
  misc_feature (812)..(812): n is a, c, g, or t

SEQ ID NO: 106699 - DNA, 1141 bp, Homo Sapiens; identical to SEQ ID NO: 71554
  misc_feature (121)..(121): n is a, c, g, or t
  misc_feature (131)..(131): n is a, c, g, or t
  misc_feature (150)..(150): n is a, c, g, or t
  misc_feature (244)..(244): n is a, c, g, or t
  misc_feature (259)..(259): n is a, c, g, or t
  misc_feature (678)..(727): n is a, c, g, or t

SEQ ID NO: 106700 - DNA, 1269 bp, Homo Sapiens; identical to SEQ ID NO: 71558
  misc_feature (127)..(434): n is a, c, g, or t

SEQ ID NO: 106701 - DNA, 925 bp, Homo Sapiens; identical to SEQ ID NO: 71559

SEQ ID NO: 106702 - DNA, 670 bp, Homo Sapiens; identical to SEQ ID NO: 71562

SEQ ID NO: 106703 - DNA, 921 bp, Homo Sapiens; identical to SEQ ID NO: 71563
  misc_feature (51)..(89): n is a, c, g, or t
  misc_feature (93)..(127): n is a, c, g, or t
  misc_feature (643)..(652): n is a, c, g, or t
  misc_feature (763)..(816): n is a, c, g, or t

SEQ ID NO: 106704 - DNA, 1108 bp, Homo Sapiens; identical to SEQ ID NO: 71564
  misc_feature (629)..(637): n is a, c, g, or t

SEQ ID NO: 106705 - DNA, 791 bp, Homo Sapiens; identical to SEQ ID NO: 71565
  misc_feature (566)..(570): n is a, c, g, or t
  misc_feature (573)..(575): n is a, c, g, or t
  misc_feature (577)..(581): n is a, c, g, or t
  misc_feature (584)..(584): n is a, c, g, or t
  misc_feature (586)..(586): n is a, c, g, or t
  misc_feature (739)..(748): n is a, c, g, or t

SEQ ID NO: 106706 - DNA, 917 bp, Homo Sapiens; identical to SEQ ID NO: 71566
  misc_feature (456)..(464): n is a, c, g, or t
  misc_feature (682)..(691): n is a, c, g, or t

SEQ ID NO: 106707 - DNA, 802 bp, Homo Sapiens; identical to SEQ ID NO: 71567
  misc_feature (565)..(668): n is a, c, g, or t
  misc_feature (670)..(696): n is a, c, g, or t
  misc_feature (699)..(699): n is a, c, g, or t
  misc_feature (701)..(708): n is a, c, g, or t
  misc_feature (710)..(733): n is a, c, g, or t
  misc_feature (735)..(735): n is a, c, g, or t
  misc_feature (744)..(762): n is a, c, g, or t

SEQ ID NO: 106708 - DNA, 1225 bp, Homo Sapiens; identical to SEQ ID NO: 71571
  misc_feature (726)..(726): n is a, c, g, or t

SEQ ID NO: 106709 - DNA, 1141 bp, Homo Sapiens; identical to SEQ ID NO: 71572
  misc_feature (43)..(43): n is a, c, g, or t
  misc_feature (55)..(55): n is a, c, g, or t
  misc_feature (156)..(175): n is a, c, g, or t
  misc_feature (211)..(245): n is a, c, g, or t
  misc_feature (673)..(707): n is a, c, g, or t

SEQ ID NO: 106710 - DNA, 637 bp, Homo Sapiens; identical to SEQ ID NO: 71573
  misc_feature (118)..(137): n is a, c, g, or t
  misc_feature (173)..(206): n is a, c, g, or t

SEQ ID NO: 106711 - DNA, 875 bp, Homo Sapiens; identical to SEQ ID NO: 71574

SEQ ID NO: 106712 - DNA, 566 bp, Homo Sapiens; identical to SEQ ID NO: 71575

SEQ ID NO: 106713 - DNA, 787 bp, Homo Sapiens; identical to SEQ ID NO: 71576

SEQ ID NO: 106714 - DNA, 999 bp, Homo Sapiens; identical to SEQ ID NO: 71577
  misc_feature (685)..(685): n is a, c, g, or t
  misc_feature (864)..(864): n is a, c, g, or t

SEQ ID NO: 106715 - DNA, 705 bp, Homo Sapiens; identical to SEQ ID NO: 71580
  misc_feature (251)..(367): n is a, c, g, or t

SEQ ID NO: 106716 - DNA, 729 bp, Homo Sapiens; identical to SEQ ID NO: 71581
  misc_feature (274)..(390): n is a, c, g, or t

SEQ ID NO: 106717 - DNA, 517 bp, Homo Sapiens; identical to SEQ ID NO: 71582

SEQ ID NO: 106718 - DNA, 1000 bp, Homo Sapiens; identical to SEQ ID NO: 71583

SEQ ID NO: 106719 - DNA, 853 bp, Homo Sapiens; identical to SEQ ID NO: 71586

SEQ ID NO: 106720 - DNA, 1439 bp, Homo Sapiens; identical to SEQ ID NO: 71587
  misc_feature (229)..(229): n is a, c, g, or t

SEQ ID NO: 106721 - DNA, 1848 bp, Homo Sapiens; identical to SEQ ID NO: 71590
  misc_feature (275)..(275): n is a, c, g, or t
  misc_feature (378)..(386): n is a, c, g, or t
  misc_feature (478)..(488): n is a, c, g, or t
  misc_feature (505)..(563): n is a, c, g, or t
  misc_feature (617)..(637): n is a, c, g, or t
  misc_feature (652)..(652): n is a, c, g, or t
  misc_feature (658)..(674): n is a, c, g, or t
  misc_feature (690)..(691): n is a, c, g, or t
  misc_feature (693)..(693): n is a, c, g, or t
  misc_feature (696)..(814): n is a, c, g, or t
  misc_feature (1579)..(1579): n is a, c, g, or t
  misc_feature (1604)..(1604): n is a, c, g, or t
  misc_feature (1637)..(1637): n is a, c, g, or t
  misc_feature (1676)..(1676): n is a, c, g, or t
  misc_feature (1684)..(1684): n is a, c, g, or t
  misc_feature (1744)..(1744): n is a, c, g, or t
  misc_feature (1748)..(1748): n is a, c, g, or t

SEQ ID NO: 106722 - DNA, 918 bp, Homo Sapiens; identical to SEQ ID NO: 71591

SEQ ID NO: 106723 - DNA, 834 bp, Homo Sapiens; identical to SEQ ID NO: 71592

SEQ ID NO: 106724 - DNA, 1230 bp, Homo Sapiens; identical to SEQ ID NO: 71593
  misc_feature (81)..(115): n is a, c, g, or t

SEQ ID NO: 106725 - DNA, 1082 bp, Homo Sapiens; identical to SEQ ID NO: 71594

SEQ ID NO: 106726 - DNA, 1184 bp, Homo Sapiens; identical to SEQ ID NO: 71595

SEQ ID NO: 106727 - DNA, 1295 bp, Homo Sapiens; identical to SEQ ID NO: 71596
  misc_feature (1249)..(1249): n is a, c, g, or t

SEQ ID NO: 106728 - DNA, 1090 bp, Homo Sapiens; identical to SEQ ID NO: 71597
  misc_feature (880)..(880): n is a, c, g, or t

SEQ ID NO: 106729 - DNA, 496 bp, Homo Sapiens; identical to SEQ ID NO: 71598
  misc_feature (36)..(36): n is a, c, g, or t
  misc_feature (66)..(66): n is a, c, g, or t

SEQ ID NO: 106730 - DNA, 780 bp, Homo Sapiens; identical to SEQ ID NO: 71599
  misc_feature (38)..(38): n is a, c, g, or t
  misc_feature (69)..(189): n is a, c, g, or t

SEQ ID NO: 106731 - DNA, 640 bp, Homo Sapiens; identical to SEQ ID NO: 71601
  misc_feature (153)..(186): n is a, c, g, or t

SEQ ID NO: 106732 - DNA, 1303 bp, Homo Sapiens; identical to SEQ ID NO: 71602

SEQ ID NO: 106733 - DNA, 967 bp, Homo Sapiens; identical to SEQ ID NO: 71603

SEQ ID NO: 106734 - DNA, 927 bp, Homo Sapiens; identical to SEQ ID NO: 71604
  misc_feature (353)..(372): n is a, c, g, or t
  misc_feature (818)..(852): n is a, c, g, or t

SEQ ID NO: 106735 - DNA, 997 bp, Homo Sapiens; identical to SEQ ID NO: 71605
  misc_feature (859)..(867): n is a, c, g, or t

SEQ ID NO: 106736 - DNA, 240 bp, Homo Sapiens; identical to SEQ ID NO: 71606

SEQ ID NO: 106737 - DNA, 1100 bp, Homo Sapiens; identical to SEQ ID NO: 71607
  misc_feature (25)..(25): n is a, c, g, or t
  misc_feature (164)..(164): n is a, c, g, or t
  misc_feature (971)..(971): n is a, c, g, or t
  misc_feature (1025)..(1043): n is a, c, g, or t

SEQ ID NO: 106738 - DNA, 510 bp, Homo Sapiens; identical to SEQ ID NO: 71608
  misc_feature (185)..(185): n is a, c, g, or t

SEQ ID NO: 106739 - DNA, 1667 bp, Homo Sapiens; identical to SEQ ID NO: 71609
  misc_feature (106)..(106): n is a, c, g, or t
  misc_feature (111)..(111): n is a, c, g, or t

SEQ ID NO: 106740 - DNA, 1057 bp, Homo Sapiens; identical to SEQ ID NO: 71626
  misc_feature (105)..(105): n is a, c, g, or t
  misc_feature (149)..(149): n is a, c, g, or t
  misc_feature (187)..(187): n is a, c, g, or t
  misc_feature (217)..(217): n is a, c, g, or t
  misc_feature (219)..(219): n is a, c, g, or t
  misc_feature (223)..(223): n is a, c, g, or t
  misc_feature (241)..(241): n is a, c, g, or t

SEQ ID NO: 106741 - DNA, 1389 bp, Homo Sapiens; identical to SEQ ID NO: 71627

SEQ ID NO: 106742 - DNA, 1828 bp, Homo Sapiens; identical to SEQ ID NO: 71628

SEQ ID NO: 106743 - DNA, 1072 bp, Homo Sapiens; identical to SEQ ID NO: 71629
  misc_feature (605)..(615): n is a, c, g, or t
  misc_feature (921)..(931): n is a, c, g, or t

SEQ ID NO: 106744 - DNA, 1104 bp, Homo Sapiens; identical to SEQ ID NO: 71640
  misc_feature (1104)..(1104): n is a, c, g, or t

SEQ ID NO: 106745 - DNA, 1006 bp, Homo Sapiens; identical to SEQ ID NO: 71641

SEQ ID NO: 106746 - DNA, 1365 bp, Homo Sapiens; identical to SEQ ID NO: 71642

SEQ ID NO: 106747 - DNA, 1004 bp, Homo Sapiens; identical to SEQ ID NO: 71643
  misc_feature (92)..(92): n is a, c, g, or t
  misc_feature (130)..(130): n is a, c, g, or t
  misc_feature (188)..(188): n is a, c, g, or t
  misc_feature (234)..(234): n is a, c, g, or t
  misc_feature (268)..(268): n is a, c, g, or t
  misc_feature (308)..(308): n is a, c, g, or t
  misc_feature (351)..(351): n is a, c, g, or t
  misc_feature (447)..(447): n is a, c, g, or t

SEQ ID NO: 106748 - DNA, 948 bp, Homo Sapiens; identical to SEQ ID NO: 71644

SEQ ID NO: 106749 - DNA, 3059 bp, Homo Sapiens; identical to SEQ ID NO: 71646
  misc_feature (1137)..(1177): n is a, c, g, or t

SEQ ID NO: 106750 - DNA, 1208 bp, Homo Sapiens; identical to SEQ ID NO: 71647

SEQ ID NO: 106751 - DNA, 1733 bp, Homo Sapiens; identical to SEQ ID NO: 71648
  misc_feature (1673)..(1690): n is a, c, g, or t

SEQ ID NO: 106752 - DNA, 489 bp, Homo Sapiens; identical to SEQ ID NO: 71649

SEQ ID NO: 106753 - DNA, 2244 bp, Homo Sapiens; identical to SEQ ID NO: 71650
  misc_feature (292)..(389): n is a, c, g, or t

SEQ ID NO: 106754 - DNA, 572 bp, Homo Sapiens; identical to SEQ ID NO: 71651

SEQ ID NO: 106755 - DNA, 1192 bp, Homo Sapiens; identical to SEQ ID NO: 71652
  misc_feature (76)..(110): n is a, c, g, or t
  misc_feature (614)..(783): n is a, c, g, or t
  misc_feature (791)..(807): n is a, c, g, or t
  misc_feature (845)..(926): n is a, c, g, or t
  misc_feature (1105)..(1113): n is a, c, g, or t

SEQ ID NO: 106756 - DNA, 531 bp, Homo Sapiens; identical to SEQ ID NO: 71653

SEQ ID NO: 106757 - DNA, 592 bp, Homo Sapiens; identical to SEQ ID NO: 71654
  misc_feature (470)..(470): n is a, c, g, or t

SEQ ID NO: 106758 - DNA, 901 bp, Homo Sapiens; identical to SEQ ID NO: 71655

SEQ ID NO: 106759 - DNA, 1804 bp, Homo Sapiens; identical to SEQ ID NO: 71656
  misc_feature (38)..(38): n is a, c, g, or t
  misc_feature (64)..(64): n is a, c, g, or t
  misc_feature (69)..(69): n is a, c, g, or t
  misc_feature (90)..(145): n is a, c, g, or t
  misc_feature (150)..(150): n is a, c, g, or t
  misc_feature (153)..(153): n is a, c, g, or t
  misc_feature (162)..(163): n is a, c, g, or t
  misc_feature (212)..(212): n is a, c, g, or t
  misc_feature (218)..(218): n is a, c, g, or t
  misc_feature (1052)..(1071): n is a, c, g, or t
  misc_feature (1277)..(1277): n is a, c, g, or t

SEQ ID NO: 106760 - DNA, 895 bp, Homo Sapiens; identical to SEQ ID NO: 71657

SEQ ID NO: 106761 - DNA, 1330 bp, Homo Sapiens; identical to SEQ ID NO: 71663

SEQ ID NO: 106762 - DNA, 1012 bp, Homo Sapiens; identical to SEQ ID NO: 71664
  misc_feature (772)..(793): n is a, c, g, or t
  misc_feature (795)..(820): n is a, c, g, or t
  misc_feature (822)..(822): n is a, c, g, or t
  misc_feature (824)..(835): n is a, c, g, or t
  misc_feature (841)..(845): n is a, c, g, or t
  misc_feature (850)..(852): n is a, c, g, or t
  misc_feature (854)..(859): n is a, c, g, or t
  misc_feature (861)..(864): n is a, c, g, or t
  misc_feature (866)..(867): n is a, c, g, or t
  misc_feature (869)..(871): n is a, c, g, or t
  misc_feature (887)..(888): n is a, c, g, or t

SEQ ID NO: 106763 - DNA, 1334 bp, Homo Sapiens; identical to SEQ ID NO: 71665

SEQ ID NO: 106764 - DNA, 462 bp, Homo Sapiens; identical to SEQ ID NO: 71666

SEQ ID NO: 106765 - DNA, 522 bp, Homo Sapiens; identical to SEQ ID NO: 71667

SEQ ID NO: 106766 - DNA, 576 bp, Homo Sapiens; identical to SEQ ID NO: 71668
  misc_feature (184)..(234): n is a, c, g, or t

SEQ ID NO: 106767 - DNA, 1414 bp, Homo Sapiens; identical to SEQ ID NO: 71669
  misc_feature (1020)..(1070): n is a, c, g, or t

SEQ ID NO: 106768 - DNA, 999 bp, Homo Sapiens; identical to SEQ ID NO: 71670
  misc_feature (80)..(114): n is a, c, g, or t

SEQ ID NO: 106769 - DNA, 967 bp, Homo Sapiens; identical to SEQ ID NO: 71672
  misc_feature (763)..(782): n is a, c, g, or t

SEQ ID NO: 106770 - DNA, 979 bp, Homo Sapiens; identical to SEQ ID NO: 71673
  misc_feature (866)..(881): n is a, c, g, or t

SEQ ID NO: 106771 - DNA, 850 bp, Homo Sapiens; identical to SEQ ID NO: 71675
  misc_feature (188)..(188): n is a, c, g, or t
  misc_feature (290)..(290): n is a, c, g, or t

SEQ ID NO: 106772 - DNA, 808 bp, Homo Sapiens; identical to SEQ ID NO: 71676
  misc_feature (115)..(115): n is a, c, g, or t
  misc_feature (347)..(347): n is a, c, g, or t
  misc_feature (635)..(684): n is a, c, g, or t

SEQ ID NO: 106773 - DNA, 842 bp, Homo Sapiens; identical to SEQ ID NO: 71677
  misc_feature (150)..(174): n is a, c, g, or t
  misc_feature (588)..(653): n is a, c, g, or t

SEQ ID NO: 106774 - DNA, 942 bp, Homo Sapiens; identical to SEQ ID NO: 71678
  misc_feature (528)..(553): n is a, c, g, or t
  misc_feature (792)..(805): n is a, c, g, or t

SEQ ID NO: 106775 - DNA, 825 bp, Homo Sapiens; identical to SEQ ID NO: 71680

SEQ ID NO: 106776 - DNA, 1037 bp, Homo Sapiens; identical to SEQ ID NO: 71681

SEQ ID NO: 106777 - DNA, 2128 bp, Homo Sapiens; identical to SEQ ID NO: 71683
  misc_feature (25)..(25): n is a, c, g, or t
  misc_feature (76)..(76): n is a, c, g, or t
  misc_feature (1021)..(1031): n is a, c, g, or t

SEQ ID NO: 106778 - DNA, 734 bp, Homo Sapiens; identical to SEQ ID NO: 71684
  misc_feature (23)..(23): n is a, c, g, or t
  misc_feature (100)..(101): n is a, c, g, or t
  misc_feature (127)..(127): n is a, c, g, or t
  misc_feature (167)..(167): n is a, c, g, or t
  misc_feature (211)..(211): n is a, c, g, or t

SEQ ID NO: 106779 - DNA, 1212 bp, Homo Sapiens; identical to SEQ ID NO: 71685

SEQ ID NO: 106780 - DNA, 1077 bp, Homo Sapiens; identical to SEQ ID NO: 71686

SEQ ID NO: 106781 - DNA, 978 bp, Homo Sapiens; identical to SEQ ID NO: 71687

SEQ ID NO: 106782 - DNA, 921 bp, Homo Sapiens; identical to SEQ ID NO: 71688
  misc_feature (295)..(295): n is a, c, g, or t

SEQ ID NO: 106783 - DNA, 1872 bp, Homo Sapiens; identical to SEQ ID NO: 71692

SEQ ID NO: 106784 - DNA, 616 bp, Homo Sapiens; identical to SEQ ID NO: 71693

SEQ ID NO: 106785 - DNA, 2046 bp, Homo Sapiens; identical to SEQ ID NO: 71694

SEQ ID NO: 106786 - DNA, 1005 bp, Homo Sapiens; identical to SEQ ID NO: 71695

SEQ ID NO: 106787 - DNA, 1019 bp, Homo Sapiens; identical to SEQ ID NO: 71696
  misc_feature (760)..(760): n is a, c, g, or t
  misc_feature (813)..(813): n is a, c, g, or t
  misc_feature (826)..(827): n is a, c, g, or t

SEQ ID NO: 106788 - DNA, 2092 bp, Homo Sapiens; identical to SEQ ID NO: 71700
  misc_feature (1815)..(1824): n is a, c, g, or t
  misc_feature (1902)..(1914): n is a, c, g, or t

SEQ ID NO: 106789 - DNA, 451 bp, Homo Sapiens; identical to SEQ ID NO: 71701

SEQ ID NO: 106790 - DNA, 1339 bp, Homo Sapiens; identical to SEQ ID NO: 71702
  misc_feature (41)..(75): n is a, c, g, or t

SEQ ID NO: 106791 - DNA, 460 bp, Homo Sapiens; identical to SEQ ID NO: 71706

SEQ ID NO: 106792 - DNA, 1244 bp, Homo Sapiens; identical to SEQ ID NO: 71707
  misc_feature (848)..(905): n is a, c, g, or t

SEQ ID NO: 106793 - DNA, 1214 bp, Homo Sapiens; identical to SEQ ID NO: 71712
  misc_feature (117)..(141): n is a, c, g, or t
  misc_feature (193)..(207): n is a, c, g, or t
  misc_feature (480)..(488): n is a, c, g, or t
  misc_feature (625)..(642): n is a, c, g, or t
  misc_feature (690)..(1164): n is a, c, g, or t

SEQ ID NO: 106794 - DNA, 741 bp, Homo Sapiens; identical to SEQ ID NO: 71713
  misc_feature (123)..(147): n is a, c, g, or t
  misc_feature (199)..(213): n is a, c, g, or t
  misc_feature (647)..(664): n is a, c, g, or t
  misc_feature (723)..(723): n is a, c, g, or t

SEQ ID NO: 106795 - DNA, 1486 bp, Homo Sapiens; identical to SEQ ID NO: 71714

SEQ ID NO: 106796 - DNA, 523 bp, Homo Sapiens; identical to SEQ ID NO: 71715

SEQ ID NO: 106797 - DNA, 851 bp, Homo Sapiens; identical to SEQ ID NO: 71716

SEQ ID NO: 106798 - DNA, 1987 bp, Homo Sapiens; identical to SEQ ID NO: 71717
  misc_feature (1050)..(1051): n is a, c, g, or t
  misc_feature (1056)..(1057): n is a, c, g, or t
  misc_feature (1234)..(1244): n is a, c, g, or t
  misc_feature (1434)..(1469): n is a, c, g, or t
  misc_feature (1537)..(1545): n is a, c, g, or t
  misc_feature (1554)..(1562): n is a, c, g, or t
  misc_feature (1670)..(1670): n is a, c, g, or t
  misc_feature (1799)..(1799): n is a, c, g, or t

SEQ ID NO: 106799 - DNA, 696 bp, Homo Sapiens; identical to SEQ ID NO: 71718
  misc_feature (34)..(34): n is a, c, g, or t

SEQ ID NO: 106800 - DNA, 3305 bp, Homo Sapiens; identical to SEQ ID NO: 71719
  misc_feature (2279)..(2350): n is a, c, g, or t
  misc_feature (2352)..(2434): n is a, c, g, or t
  misc_feature (3191)..(3234): n is a, c, g, or t

SEQ ID NO: 106801 - DNA, 1870 bp, Homo Sapiens; identical to SEQ ID NO: 71720

SEQ ID NO: 106802 - DNA, 478 bp, Homo Sapiens; identical to SEQ ID NO: 71721

SEQ ID NO: 106803 - DNA, 1752 bp, Homo Sapiens; identical to SEQ ID NO: 71723
  misc_feature (149)..(167): n is a, c, g, or t
  misc_feature (418)..(445): n is a, c, g, or t
  misc_feature (1174)..(1202): n is a, c, g, or t

SEQ ID NO: 106804 - DNA, 926 bp, Homo Sapiens; identical to SEQ ID NO: 71724
  misc_feature (266)..(284): n is a, c, g, or t

SEQ ID NO: 106805 - DNA, 1298 bp, Homo Sapiens; identical to SEQ ID NO: 71730
  misc_feature (92)..(93): n is a, c, g, or t
  misc_feature (217)..(217): n is a, c, g, or t
  misc_feature (227)..(227): n is a, c, g, or t
  misc_feature (239)..(239): n is a, c, g, or t
  misc_feature (262)..(262): n is a, c, g, or t
  misc_feature (275)..(275): n is a, c, g, or t
  misc_feature (1184)..(1194): n is a, c, g, or t

SEQ ID NO: 106806 - DNA, 813 bp, Homo Sapiens; identical to SEQ ID NO: 71731

SEQ ID NO: 106807 - DNA, 2980 bp, Homo Sapiens; identical to SEQ ID NO: 71732

SEQ ID NO: 106808 - DNA, 701 bp, Homo Sapiens; identical to SEQ ID NO: 71733

SEQ ID NO: 106809 - DNA, 614 bp, Homo Sapiens; identical to SEQ ID NO: 71734

SEQ ID NO: 106810 - DNA, 975 bp, Homo Sapiens; identical to SEQ ID NO: 71736
  misc_feature (91)..(151): n is a, c, g, or t
  misc_feature (856)..(856): n is a, c, g, or t

SEQ ID NO: 106811 - DNA, 2573 bp, Homo Sapiens; identical to SEQ ID NO: 71737

SEQ ID NO: 106812 - DNA, 472 bp, Homo Sapiens; identical to SEQ ID NO: 71740

SEQ ID NO: 106813 - DNA, 1121 bp, Homo Sapiens; identical to SEQ ID NO: 71741
  misc_feature (582)..(745): n is a, c, g, or t

SEQ ID NO: 106814 - DNA, 1223 bp, Homo Sapiens; identical to SEQ ID NO: 71744
  misc_feature (694)..(735): n is a, c, g, or t
  misc_feature (1058)..(1107): n is a, c, g, or t

SEQ ID NO: 106815 - DNA, 2559 bp, Homo Sapiens; identical to SEQ ID NO: 71745
  misc_feature (120)..(120): n is a, c, g, or t
  misc_feature (133)..(133): n is a, c, g, or t
  misc_feature (148)..(148): n is a, c, g, or t
  misc_feature (157)..(157): n is a, c, g, or t
  misc_feature (181)..(182): n is a, c, g, or t
  misc_feature (189)..(189): n is a, c, g, or t
  misc_feature (191)..(191): n is a, c, g, or t
  misc_feature (198)..(198): n is a, c, g, or t
  misc_feature (204)..(204): n is a, c, g, or t
  misc_feature (210)..(210): n is a, c, g, or t
  misc_feature (216)..(216): n is a, c, g, or t
  misc_feature (263)..(263): n is a, c, g, or t
  misc_feature (508)..(549): n is a, c, g, or t
  misc_feature (1921)..(2349): n is a, c, g, or t
  misc_feature (2371)..(2371): n is a, c, g, or t
  misc_feature (2391)..(2391): n is a, c, g, or t
  misc_feature (2393)..(2393): n is a, c, g, or t
  misc_feature (2406)..(2406): n is a, c, g, or t

SEQ ID NO: 106816 - DNA, 928 bp, Homo Sapiens; identical to SEQ ID NO: 71746
  misc_feature (275)..(275): n is a, c, g, or t

SEQ ID NO: 106817 - DNA, 1476 bp, Homo Sapiens; identical to SEQ ID NO: 71747
  misc_feature (61)..(61): n is a, c, g, or t
  misc_feature (81)..(81): n is a, c, g, or t
  misc_feature (94)..(94): n is a, c, g, or t
  misc_feature (117)..(117): n is a, c, g, or t
  misc_feature (140)..(141): n is a, c, g, or t
  misc_feature (148)..(149): n is a, c, g, or t
  misc_feature (154)..(154): n is a, c, g, or t
  misc_feature (156)..(156): n is a, c, g, or t
  misc_feature (164)..(164): n is a, c, g, or t
  misc_feature (166)..(166): n is a, c, g, or t
  misc_feature (182)..(183): n is a, c, g, or t
  misc_feature (192)..(567): n is a, c, g, or t
  misc_feature (1011)..(1022): n is a, c, g, or t
  misc_feature (1064)..(1084): n is a, c, g, or t
  misc_feature (1137)..(1154): n is a, c, g, or t
  misc_feature (1186)..(1201): n is a, c, g, or t
  misc_feature (1315)..(1346): n is a, c, g, or t

SEQ ID NO: 106818 - DNA, 1397 bp, Homo Sapiens; identical to SEQ ID NO: 71748
  misc_feature (1082)..(1082): n is a, c, g, or t
  misc_feature (1162)..(1162): n is a, c, g, or t
  misc_feature (1275)..(1275): n is a, c, g, or t
  misc_feature (1362)..(1362): n is a, c, g, or t

SEQ ID NO: 106819 - DNA, 3237 bp, Homo Sapiens; identical to SEQ ID NO: 71749

SEQ ID NO: 106820 - DNA, 1044 bp, Homo Sapiens; identical to SEQ ID NO: 71758

SEQ ID NO: 106821 - DNA, 859 bp, Homo Sapiens; identical to SEQ ID NO: 71759

SEQ ID NO: 106822 - DNA, 825 bp, Homo Sapiens; identical to SEQ ID NO: 71760

SEQ ID NO: 106823 - DNA, 1917 bp, Homo Sapiens; identical to SEQ ID NO: 71761
  misc_feature (93)..(121): n is a, c, g, or t
  misc_feature (709)..(709): n is a, c, g, or t
  misc_feature (1817)..(1817): n is a, c, g, or t

SEQ ID NO: 106824 - DNA, 350 bp, Homo Sapiens; identical to SEQ ID NO: 71762

SEQ ID NO: 106825 - DNA, 1090 bp, Homo Sapiens; identical to SEQ ID NO: 71763
  misc_feature (75)..(109): n is a, c, g, or t
  misc_feature (944)..(990): n is a, c, g, or t

SEQ ID NO: 106826 - DNA, 754 bp, Homo Sapiens; identical to SEQ ID NO: 71764
  misc_feature (161)..(187): n is a, c, g, or t

SEQ ID NO: 106827 - DNA, 967 bp, Homo Sapiens; identical to SEQ ID NO: 71767
  misc_feature (73)..(73): n is a, c, g, or t
  misc_feature (178)..(178): n is a, c, g, or t
  misc_feature (180)..(180): n is a, c, g, or t
  misc_feature (329)..(329): n is a, c, g, or t

SEQ ID NO: 106828 - DNA, 1245 bp, Homo Sapiens; identical to SEQ ID NO: 71768
  misc_feature (42)..(84): n is a, c, g, or t
  misc_feature (88)..(122): n is a, c, g, or t

SEQ ID NO: 106829 - DNA, 1264 bp, Homo Sapiens; identical to SEQ ID NO: 71769
  misc_feature (543)..(543): n is a, c, g, or t
  misc_feature (545)..(545): n is a, c, g, or t
  misc_feature (577)..(577): n is a, c, g, or t
  misc_feature (1117)..(1118): n is a, c, g, or t
  misc_feature (1126)..(1127): n is a, c, g, or t
  misc_feature (1141)..(1141): n is a, c, g, or t

SEQ ID NO: 106830 - DNA, 963 bp, Homo Sapiens; identical to SEQ ID NO: 71770

SEQ ID NO: 106831 - DNA, 686 bp, Homo Sapiens; identical to SEQ ID NO: 71772
  misc_feature (183)..(235): n is a, c, g, or t

SEQ ID NO: 106832 - DNA, 668 bp, Homo Sapiens; identical to SEQ ID NO: 71773
  misc_feature (174)..(226): n is a, c, g, or t

SEQ ID NO: 106833 - DNA, 759 bp, Homo Sapiens; identical to SEQ ID NO: 71774
  misc_feature (277)..(329): n is a, c, g, or t

SEQ ID NO: 106834 - DNA, 490 bp, Homo Sapiens; identical to SEQ ID NO: 71775

SEQ ID NO: 106835 - DNA, 974 bp, Homo Sapiens; identical to SEQ ID NO: 71776
  misc_feature (23)..(23): n is a, c, g, or t
  misc_feature (40)..(40): n is a, c, g, or t
  misc_feature (49)..(49): n is a, c, g, or t
  misc_feature (66)..(66): n is a, c, g, or t
  misc_feature (107)..(107): n is a, c, g, or t
  misc_feature (176)..(176): n is a, c, g, or t

SEQ ID NO: 106836 - DNA, 1386 bp, Homo Sapiens; identical to SEQ ID NO: 71777
  misc_feature (1042)..(1065): n is a, c, g, or t
  misc_feature (1085)..(1085): n is a, c, g, or t
  misc_feature (1242)..(1242): n is a, c, g, or t

SEQ ID NO: 106837 - DNA, 1111 bp, Homo Sapiens; identical to SEQ ID NO: 71778
  misc_feature (86)..(120): n is a, c, g, or t

SEQ ID NO: 106838 - DNA, 761 bp, Homo Sapiens; identical to SEQ ID NO: 71779

SEQ ID NO: 106839 - DNA, 821 bp, Homo Sapiens; identical to SEQ ID NO: 71780
  misc_feature (612)..(628): n is a, c, g, or t

SEQ ID NO: 106840 - DNA, 629 bp, Homo Sapiens; identical to SEQ ID NO: 71783

SEQ ID NO: 106841 - DNA, 910 bp, Homo Sapiens; identical to SEQ ID NO: 71784

SEQ ID NO: 106842 - DNA, 974 bp, Homo Sapiens; identical to SEQ ID NO: 71785
  misc_feature (60)..(68): n is a, c, g, or t

SEQ ID NO: 106843 - DNA, 1051 bp, Homo Sapiens; identical to SEQ ID NO: 71787

SEQ ID NO: 106844 - DNA, 378 bp, Homo Sapiens; identical to SEQ ID NO: 71788

SEQ ID NO: 106845 - DNA, 930 bp, Homo Sapiens; identical to SEQ ID NO: 71789
  misc_feature (785)..(785): n is a, c, g, or t

SEQ ID NO: 106846 - DNA, 492 bp, Homo Sapiens; identical to SEQ ID NO: 71793

SEQ ID NO: 106847 - DNA, 2060 bp, Homo Sapiens; identical to SEQ ID NO: 71794

SEQ ID NO: 106848 - DNA, 1945 bp, Homo Sapiens; identical to SEQ ID NO: 71795
  misc_feature (1491)..(1491): n is a, c, g, or t
  misc_feature (1493)..(1502): n is a, c, g, or t
  misc_feature (1723)..(1731): n is a, c, g, or t

SEQ ID NO: 106849 - DNA, 1020 bp, Homo Sapiens; identical to SEQ ID NO: 71796

SEQ ID NO: 106850 - DNA, 989 bp, Homo Sapiens; identical to SEQ ID NO: 71797
  misc_feature (74)..(297): n is a, c, g, or t

SEQ ID NO: 106851 - DNA, 320 bp, Homo Sapiens; identical to SEQ ID NO: 71798

SEQ ID NO: 106852 - DNA, 883 bp, Homo Sapiens; identical to SEQ ID NO: 71799

SEQ ID NO: 106853 - DNA, 1621 bp, Homo Sapiens; identical to SEQ ID NO: 71800
  misc_feature (1325)..(1393): n is a, c, g, or t

SEQ ID NO: 106854 - DNA, 754 bp, Homo Sapiens; identical to SEQ ID NO: 71806
  misc_feature (45)..(45): n is a, c, g, or t
  misc_feature (565)..(601): n is a, c, g, or t

SEQ ID NO: 106855 - DNA, 811 bp, Homo Sapiens; identical to SEQ ID NO: 71807
  misc_feature (747)..(766): n is a, c, g, or t

SEQ ID NO: 106856 - DNA, 837 bp, Homo Sapiens; identical to SEQ ID NO: 71808

SEQ ID NO: 106857 - DNA, 2837 bp, Homo Sapiens; identical to SEQ ID NO: 71811
  misc_feature (1019)..(1019): n is a, c, g, or t

SEQ ID NO: 106858 - DNA, 919 bp, Homo Sapiens; identical to SEQ ID NO: 71812

SEQ ID NO: 106859 - DNA, 1235 bp, Homo Sapiens; identical to SEQ ID NO: 71814
  misc_feature (111)..(156): n is a, c, g, or t

SEQ ID NO: 106860 - DNA, 1122 bp, Homo Sapiens; identical to SEQ ID NO: 71815
  misc_feature (1013)..(1029): n is a, c, g, or t
  misc_feature (1031)..(1075): n is a, c, g, or t

SEQ ID NO: 106861 - DNA, 1526 bp, Homo Sapiens; identical to SEQ ID NO: 71825
  misc_feature (97)..(475): n is a, c, g, or t
  misc_feature (494)..(521): n is a, c, g, or t
  misc_feature (755)..(1045): n is a, c, g, or t
  misc_feature (1084)..(1442): n is a, c, g, or t

SEQ ID NO: 106862 - DNA, 1089 bp, Homo Sapiens; identical to SEQ ID NO: 71826

SEQ ID NO: 106863 - DNA, 2651 bp, Homo Sapiens; identical to SEQ ID NO: 71827

SEQ ID NO: 106864 - DNA, 153 bp, Homo Sapiens; identical to SEQ ID NO: 71828

SEQ ID NO: 106865 - DNA, 1709 bp, Homo Sapiens; identical to SEQ ID NO: 71830
  misc_feature (1107)..(1123): n is a, c, g, or t

SEQ ID NO: 106866 - DNA, 1551 bp, Homo Sapiens; identical to SEQ ID NO: 71831

SEQ ID NO: 106867 - DNA, 899 bp, Homo Sapiens; identical to SEQ ID NO: 71832

SEQ ID NO: 106868 - DNA, 1017 bp, Homo Sapiens; identical to SEQ ID NO: 71833

SEQ ID NO: 106869 - DNA, 1049 bp, Homo Sapiens; identical to SEQ ID NO: 71837
  misc_feature (129)..(129): n is a, c, g, or t
  misc_feature (138)..(138): n is a, c, g, or t
  misc_feature (149)..(149): n is a, c, g, or t
  misc_feature (181)..(182): n is a, c, g, or t
  misc_feature (185)..(763): n is a, c, g, or t
  misc_feature (793)..(808): n is a, c, g, or t
  misc_feature (930)..(946): n is a, c, g, or t

SEQ ID NO: 106870 - DNA, 2290 bp, Homo Sapiens; identical to SEQ ID NO: 71838
  misc_feature (2049)..(2061): n is a, c, g, or t

SEQ ID NO: 106871 - DNA, 611 bp, Homo Sapiens; identical to SEQ ID NO: 71839

SEQ ID NO: 106872 - DNA, 991 bp, Homo Sapiens; identical to SEQ ID NO: 71840
  misc_feature (107)..(136): n is a, c, g, or t
  misc_feature (139)..(173): n is a, c, g, or t
  misc_feature (788)..(789): n is a, c, g, or t
  misc_feature (795)..(795): n is a, c, g, or t
  misc_feature (810)..(810): n is a, c, g, or t
  misc_feature (812)..(812): n is a, c, g, or t

SEQ ID NO: 106873 - DNA, 1388 bp, Homo Sapiens; identical to SEQ ID NO: 71841
  misc_feature (41)..(81): n is a, c, g, or t
  misc_feature (85)..(119): n is a, c, g, or t
  misc_feature (707)..(739): n is a, c, g, or t
  misc_feature (876)..(876): n is a, c, g, or t
  misc_feature (929)..(929): n is a, c, g, or t
  misc_feature (938)..(938): n is a, c, g, or t
  misc_feature (1064)..(1064): n is a, c, g, or t
  misc_feature (1104)..(1104): n is a, c, g, or t
  misc_feature (1217)..(1217): n is a, c, g, or t
  misc_feature (1219)..(1219): n is a, c, g, or t
  misc_feature (1255)..(1255): n is a, c, g, or t
  misc_feature (1295)..(1295): n is a, c, g, or t
  misc_feature (1335)..(1345): n is a, c, g, or t

SEQ ID NO: 106874 - DNA, 1371 bp, Homo Sapiens; identical to SEQ ID NO: 71842

SEQ ID NO: 106875 - DNA, 1124 bp, Homo Sapiens; identical to SEQ ID NO: 71843
  misc_feature (988)..(988): n is a, c, g, or t

SEQ ID NO: 106876 - DNA, 841 bp, Homo Sapiens; identical to SEQ ID NO: 71844

SEQ ID NO: 106877 - DNA, 998 bp, Homo Sapiens; identical to SEQ ID NO: 71848
  misc_feature (55)..(55): n is a, c, g, or t
  misc_feature (59)..(59): n is a, c, g, or t
  misc_feature (248)..(248): n is a, c, g, or t
  misc_feature (272)..(272): n is a, c, g, or t
  misc_feature (306)..(306): n is a, c, g, or t

SEQ ID NO: 106878 - DNA, 469 bp, Homo Sapiens; identical to SEQ ID NO: 71849

SEQ ID NO: 106879 - DNA, 581 bp, Homo Sapiens; identical to SEQ ID NO: 71850
  misc_feature (346)..(346): n is a, c, g, or t
  misc_feature (484)..(484): n is a, c, g, or t
  misc_feature (523)..(523): n is a, c, g, or t
  misc_feature (532)..(532): n is a, c, g, or t
  misc_feature (545)..(545): n is a, c, g, or t
  misc_feature (566)..(566): n is a, c, g, or t

SEQ ID NO: 106880 - DNA, 852 bp, Homo Sapiens; identical to SEQ ID NO: 71851

SEQ ID NO: 106881 - DNA, 453 bp, Homo Sapiens; identical to SEQ ID NO: 71852
  misc_feature (374)..(393): n is a, c, g, or t

SEQ ID NO: 106882 - DNA, 1062 bp, Homo Sapiens; identical to SEQ ID NO: 71853
  misc_feature (12)..(12): n is a, c, g, or t
  misc_feature (266)..(286): n is a, c, g, or t
  misc_feature (373)..(855): n is a, c, g, or t
  misc_feature (1006)..(1006): n is a, c, g, or t

SEQ ID NO: 106883 - DNA, 1105 bp, Homo Sapiens; identical to SEQ ID NO: 71854
  misc_feature (1023)..(1046): n is a, c, g, or t

SEQ ID NO: 106884 - DNA, 341 bp, Homo Sapiens; identical to SEQ ID NO: 71855
  misc_feature (135)..(180): n is a, c, g, or t
  misc_feature (231)..(251): n is a, c, g, or t

SEQ ID NO: 106885 - DNA, 940 bp, Homo Sapiens; identical to SEQ ID NO: 71856
  misc_feature (38)..(38): n is a, c, g, or t
  misc_feature (45)..(45): n is a, c, g, or t
  misc_feature (549)..(608): n is a, c, g, or t
  misc_feature (749)..(789): n is a, c, g, or t
  misc_feature (839)..(859): n is a, c, g, or t

SEQ ID NO: 106886 - DNA, 935 bp, Homo Sapiens; identical to SEQ ID NO: 71859

SEQ ID NO: 106887 - DNA, 452 bp, Homo Sapiens; identical to SEQ ID NO: 71860

SEQ ID NO: 106888 - DNA, 687 bp, Homo Sapiens; identical to SEQ ID NO: 71863

SEQ ID NO: 106889 - DNA, 3540 bp, Homo Sapiens; identical to SEQ ID NO: 71864
  misc_feature (70)..(112): n is a, c, g, or t
  misc_feature (115)..(149): n is a, c, g, or t

SEQ ID NO: 106890 - DNA, 1177 bp, Homo Sapiens; identical to SEQ ID NO: 71867
  misc_feature (784)..(837): n is a, c, g, or t
  misc_feature (875)..(905): n is a, c, g, or t

SEQ ID NO: 106891 - DNA, 884 bp, Homo Sapiens; identical to SEQ ID NO: 71868
  misc_feature (70)..(122): n is a, c, g, or t
  misc_feature (160)..(190): n is a, c, g, or t
  misc_feature (382)..(416): n is a, c, g, or t

SEQ ID NO: 106892 - DNA, 1040 bp, Homo Sapiens; identical to SEQ ID NO: 71869
  misc_feature (174)..(174): n is a, c, g, or t

SEQ ID NO: 106893 - DNA, 1156 bp, Homo Sapiens; identical to SEQ ID NO: 71870

SEQ ID NO: 106894 - DNA, 1254 bp, Homo Sapiens; identical to SEQ ID NO: 71874
  misc_feature (89)..(123): n is a, c, g, or t
  misc_feature (1129)..(1176): n is a, c, g, or t

SEQ ID NO: 106895 - DNA, 1404 bp, Homo Sapiens; identical to SEQ ID NO: 71875
  misc_feature (41)..(80): n is a, c, g, or t
  misc_feature (84)..(118): n is a, c, g, or t

SEQ ID NO: 106896 - DNA, 1177 bp, Homo Sapiens; identical to SEQ ID NO: 71877

SEQ ID NO: 106897 - DNA, 712 bp, Homo Sapiens; identical to SEQ ID NO: 71878
  misc_feature (76)..(76): n is a, c, g, or t
  misc_feature (109)..(109): n is a, c, g, or t
  misc_feature (128)..(128): n is a, c, g, or t
  misc_feature (616)..(616): n is a, c, g, or t

SEQ ID NO: 106898 - DNA, 901 bp, Homo Sapiens; identical to SEQ ID NO: 71879

SEQ ID NO: 106899 - DNA, 852 bp, Homo Sapiens; identical to SEQ ID NO: 71880

SEQ ID NO: 106900 - DNA, 850 bp, Homo Sapiens; identical to SEQ ID NO: 71881
  misc_feature (697)..(697): n is a, c, g, or t
  misc_feature (749)..(749): n is a, c, g, or t

SEQ ID NO: 106901 - DNA, 1033 bp, Homo Sapiens; identical to SEQ ID NO: 71882

SEQ ID NO: 106902 - DNA, 3238 bp, Homo Sapiens; identical to SEQ ID NO: 71883
  misc_feature (2550)..(2559): n is a, c, g, or t

SEQ ID NO: 106903 - DNA, 1079 bp, Homo Sapiens; identical to SEQ ID NO: 71884
  misc_feature (64)..(103): n is a, c, g, or t
  misc_feature (926)..(926): n is a, c, g, or t

SEQ ID NO: 106904 - DNA, 880 bp, Homo Sapiens; identical to SEQ ID NO: 71885

SEQ ID NO: 106905 - DNA, 1169 bp, Homo Sapiens; identical to SEQ ID NO: 71886

SEQ ID NO: 106906 - DNA, 1030 bp, Homo Sapiens; identical to SEQ ID NO: 71887

SEQ ID NO: 106907 - DNA, 854 bp, Homo Sapiens; identical to SEQ ID NO: 71888
  misc_feature (76)..(169): n is a, c, g, or t
  misc_feature (202)..(297): n is a, c, g, or t
  misc_feature (300)..(388): n is a, c, g, or t

SEQ ID NO: 106908 - DNA, 902 bp, Homo Sapiens; identical to SEQ ID NO: 71889

SEQ ID NO: 106909 - DNA, 891 bp, Homo Sapiens; identical to SEQ ID NO: 71890

SEQ ID NO: 106910 - DNA, 783 bp, Homo Sapiens; identical to SEQ ID NO: 71891

SEQ ID NO: 106911 - DNA, 1073 bp, Homo Sapiens; identical to SEQ ID NO: 71892
  misc_feature (972)..(1011): n is a, c, g, or t

SEQ ID NO: 106912 - DNA, 1080 bp, Homo Sapiens; identical to SEQ ID NO: 71893

SEQ ID NO: 106913 - DNA, 899 bp, Homo Sapiens; identical to SEQ ID NO: 71894

SEQ ID NO: 106914 - DNA, 888 bp, Homo Sapiens; identical to SEQ ID NO: 71895
  misc_feature (737)..(737): n is a, c, g, or t
  misc_feature (745)..(745): n is a, c, g, or t
  misc_feature (795)..(795): n is a, c, g, or t

SEQ ID NO: 106915 - DNA, 1338 bp, Homo Sapiens; identical to SEQ ID NO: 71896

SEQ ID NO: 106916 - DNA, 927 bp, Homo Sapiens; identical to SEQ ID NO: 71897

SEQ ID NO: 106917 - DNA, 902 bp, Homo Sapiens; identical to SEQ ID NO: 71898
  misc_feature (109)..(109): n is a, c, g, or t

SEQ ID NO: 106918 - DNA, 692 bp, Homo Sapiens; identical to SEQ ID NO: 71899

SEQ ID NO: 106919 - DNA, 1176 bp, Homo Sapiens; identical to SEQ ID NO: 71900
  misc_feature (74)..(108): n is a, c, g, or t
  misc_feature (928)..(929): n is a, c, g, or t
  misc_feature (932)..(932): n is a, c, g, or t
  misc_feature (953)..(955): n is a, c, g, or t
  misc_feature (1045)..(1045): n is a, c, g, or t
  misc_feature (1113)..(1113): n is a, c, g, or t

SEQ ID NO: 106920 - DNA, 1949 bp, Homo Sapiens; identical to SEQ ID NO: 71901
  misc_feature (16)..(16): n is a, c, g, or t
  misc_feature (82)..(116): n is a, c, g, or t
  misc_feature (1665)..(1819): n is a, c, g, or t
  misc_feature (1829)..(1843): n is a, c, g, or t
  misc_feature (1891)..(1908): n is a, c, g, or t

SEQ ID NO: 106921 - DNA, 825 bp, Homo Sapiens; identical to SEQ ID NO: 71902
  misc_feature (778)..(784): n is a, c, g, or t
  misc_feature (789)..(789): n is a, c, g, or t
  misc_feature (801)..(801): n is a, c, g, or t
  misc_feature (811)..(811): n is a, c, g, or t

SEQ ID NO: 106922 - DNA, 689 bp, Homo Sapiens; identical to SEQ ID NO: 71904
  misc_feature (14)..(14): n is a, c, g, or t

SEQ ID NO: 106923 - DNA, 939 bp, Homo Sapiens; identical to SEQ ID NO: 71905
  misc_feature (525)..(545): n is a, c, g, or t
  misc_feature (554)..(592): n is a, c, g, or t
  misc_feature (639)..(711): n is a, c, g, or t
  misc_feature (724)..(724): n is a, c, g, or t
  misc_feature (766)..(842): n is a, c, g, or t

SEQ ID NO: 106924 - DNA, 3466 bp, Homo Sapiens; identical to SEQ ID NO: 71908

SEQ ID NO: 106925 - DNA, 1547 bp, Homo Sapiens; identical to SEQ ID NO: 71909
  misc_feature (1066)..(1094): n is a, c, g, or t
  misc_feature (1316)..(1325): n is a, c, g, or t

SEQ ID NO: 106926 - DNA, 581 bp, Homo Sapiens; identical to SEQ ID NO: 71910

SEQ ID NO: 106927 - DNA, 575 bp, Homo Sapiens; identical to SEQ ID NO: 71911

SEQ ID NO: 106928 - DNA, 1669 bp, Homo Sapiens; identical to SEQ ID NO: 71915
  misc_feature (84)..(125): n is a, c, g, or t

SEQ ID NO: 106929 - DNA, 1084 bp, Homo Sapiens; identical to SEQ ID NO: 71916
  misc_feature (919)..(937): n is a, c, g, or t

SEQ ID NO: 106930 - DNA, 1524 bp, Homo Sapiens; identical to SEQ ID NO: 71920

SEQ ID NO: 106931 - DNA, 896 bp, Homo Sapiens; identical to SEQ ID NO: 71921

SEQ ID NO: 106932 - DNA, 1233 bp, Homo Sapiens; identical to SEQ ID NO: 71926

SEQ ID NO: 106933 - DNA, 586 bp, Homo Sapiens; identical to SEQ ID NO: 71927

SEQ ID NO: 106934 - DNA, 391 bp, Homo Sapiens; identical to SEQ ID NO: 71928

SEQ ID NO: 106935 - DNA, 1215 bp, Homo Sapiens; identical to SEQ ID NO: 71929
  misc_feature (60)..(60): n is a, c, g, or t
  misc_feature (170)..(211): n is a, c, g, or t

SEQ ID NO: 106936 - DNA, 1478 bp, Homo Sapiens; identical to SEQ ID NO: 71930

SEQ ID NO: 106937 - DNA, 1028 bp, Homo Sapiens; identical to SEQ ID NO: 71931
  misc_feature (276)..(316): n is a, c, g, or t

SEQ ID NO: 106938 - DNA, 1277 bp, Homo Sapiens; identical to SEQ ID NO: 71934
  misc_feature (660)..(699): n is a, c, g, or t
  misc_feature (797)..(851): n is a, c, g, or t

SEQ ID NO: 106939 - DNA, 1538 bp, Homo Sapiens; identical to SEQ ID NO: 71935
  misc_feature (1221)..(1242): n is a, c, g, or t

SEQ ID NO: 106940 - DNA, 399 bp, Homo Sapiens; identical to SEQ ID NO: 71936

SEQ ID NO: 106941 - DNA, 1092 bp, Homo Sapiens; identical to SEQ ID NO: 71938
  misc_feature (58)..(58): n is a, c, g, or t
  misc_feature (100)..(100): n is a, c, g, or t
  misc_feature (148)..(148): n is a, c, g, or t
  misc_feature (167)..(167): n is a, c, g, or t
  misc_feature (175)..(175): n is a, c, g, or t
  misc_feature (177)..(177): n is a, c, g, or t
  misc_feature (182)..(182): n is a, c, g, or t
  misc_feature (303)..(303): n is a, c, g, or t
  misc_feature (379)..(379): n is a, c, g, or t
  misc_feature (403)..(403): n is a, c, g, or t
  misc_feature (982)..(1023): n is a, c, g, or t
  misc_feature (1061)..(1062): n is a, c, g, or t

SEQ ID NO: 106942 - DNA, 818 bp, Homo Sapiens; identical to SEQ ID NO: 71939
  misc_feature (728)..(728): n is a, c, g, or t

SEQ ID NO: 106943 - DNA, 1110 bp, Homo Sapiens; identical to SEQ ID NO: 71940
  misc_feature (75)..(109): n is a, c, g, or t

SEQ ID NO: 106944 - DNA, 1160 bp, Homo Sapiens; identical to SEQ ID NO: 71941

SEQ ID NO: 106945 - DNA, 1111 bp, Homo Sapiens; identical to SEQ ID NO: 71942

SEQ ID NO: 106946 - DNA, 1067 bp, Homo Sapiens; identical to SEQ ID NO: 71946
  misc_feature (65)..(65): n is a, c, g, or t
  misc_feature (133)..(133): n is a, c, g, or t
  misc_feature (146)..(146): n is a, c, g, or t
  misc_feature (206)..(206): n is a, c, g, or t
  misc_feature (229)..(229): n is a, c, g, or t
  misc_feature (284)..(284): n is a, c, g, or t

SEQ ID NO: 106947 - DNA, 1013 bp, Homo Sapiens; identical to SEQ ID NO: 71947
  misc_feature (171)..(171): n is a, c, g, or t
  misc_feature (186)..(187): n is a, c, g, or t
  misc_feature (213)..(213): n is a, c, g, or t
  misc_feature (226)..(226): n is a, c, g, or t
  misc_feature (238)..(240): n is a, c, g, or t
  misc_feature (265)..(265): n is a, c, g, or t

SEQ ID NO: 106948 - DNA, 994 bp, Homo Sapiens; identical to SEQ ID NO: 71948

SEQ ID NO: 106949 - DNA, 380 bp, Homo Sapiens; identical to SEQ ID NO: 71949

SEQ ID NO: 106950 - DNA, 580 bp, Homo Sapiens; identical to SEQ ID NO: 71952
  misc_feature (285)..(316): n is a, c, g, or t

SEQ ID NO: 106951 - DNA, 485 bp, Homo Sapiens; identical to SEQ ID NO: 71953
  misc_feature (94)..(94): n is a, c, g, or t
  misc_feature (158)..(221): n is a, c, g, or t

SEQ ID NO: 106952 - DNA, 406 bp, Homo Sapiens; identical to SEQ ID NO: 71954
  misc_feature (57)..(136): n is a, c, g, or t

SEQ ID NO: 106953 - DNA, 2184 bp, Homo Sapiens; identical to SEQ ID NO: 71955
  misc_feature (1876)..(1906): n is a, c, g, or t
  misc_feature (1908)..(1908): n is a, c, g, or t
  misc_feature (1910)..(1930): n is a, c, g, or t
  misc_feature (1932)..(1935): n is a, c, g, or t
  misc_feature (1937)..(1939): n is a, c, g, or t
  misc_feature (1941)..(1943): n is a, c, g, or t
  misc_feature (1950)..(1951): n is a, c, g, or t
  misc_feature (1953)..(1953): n is a, c, g, or t
  misc_feature (1997)..(1998): n is a, c, g, or t
  misc_feature (2004)..(2004): n is a, c, g, or t
  misc_feature (2060)..(2081): n is a, c, g, or t

SEQ ID NO: 106954 - DNA, 1025 bp, Homo Sapiens; identical to SEQ ID NO: 71956
  misc_feature (961)..(961): n is a, c, g, or t
  misc_feature (964)..(964): n is a, c, g, or t

SEQ ID NO: 106955 - DNA, 1108 bp, Homo Sapiens; identical to SEQ ID NO: 71961

SEQ ID NO: 106956 - DNA, 478 bp, Homo Sapiens; identical to SEQ ID NO: 71962
  misc_feature (442)..(442): n is a, c, g, or t

SEQ ID NO: 106957 - DNA, 1370 bp, Homo Sapiens; identical to SEQ ID NO: 71964
  misc_feature (131)..(131): n is a, c, g, or t
  misc_feature (159)..(159): n is a, c, g, or t
  misc_feature (189)..(189): n is a, c, g, or t
  misc_feature (1035)..(1226): n is a, c, g, or t
  misc_feature (1235)..(1249): n is a, c, g, or t
  misc_feature (1280)..(1288): n is a, c, g, or t

SEQ ID NO: 106958 - DNA, 1984 bp, Homo Sapiens; identical to SEQ ID NO: 71965

SEQ ID NO: 106959 - DNA, 566 bp, Homo Sapiens; identical to SEQ ID NO: 71973

SEQ ID NO: 106960 - DNA, 716 bp, Homo Sapiens; identical to SEQ ID NO: 71974
  misc_feature (82)..(82): n is a, c, g, or t
  misc_feature (112)..(112): n is a, c, g, or t

SEQ ID NO: 106961 - DNA, 676 bp, Homo Sapiens; identical to SEQ ID NO: 71975

SEQ ID NO: 106962 - DNA, 812 bp, Homo Sapiens; identical to SEQ ID NO: 71977
  misc_feature (16)..(16): n is a, c, g, or t
  misc_feature (683)..(695): n is a, c, g, or t

SEQ ID NO: 106963 - DNA, 1525 bp, Homo Sapiens; identical to SEQ ID NO: 71978
  misc_feature (57)..(57): n is a, c, g, or t
  misc_feature (117)..(117): n is a, c, g, or t
  misc_feature (182)..(184): n is a, c, g, or t
  misc_feature (382)..(382): n is a, c, g, or t
  misc_feature (1163)..(1177): n is a, c, g, or t

SEQ ID NO: 106964 - DNA, 862 bp, Homo Sapiens; identical to SEQ ID NO: 71980

SEQ ID NO: 106965 - DNA, 1055 bp, Homo Sapiens; identical to SEQ ID NO: 71981
  misc_feature (24)..(24): n is a, c, g, or t
  misc_feature (49)..(49): n is a, c, g, or t
  misc_feature (61)..(61): n is a, c, g, or t
  misc_feature (65)..(65): n is a, c, g, or t
  misc_feature (82)..(83): n is a, c, g, or t
  misc_feature (87)..(87): n is a, c, g, or t
  misc_feature (93)..(93): n is a, c, g, or t
  misc_feature (123)..(123): n is a, c, g, or t
  misc_feature (152)..(152): n is a, c, g, or t
  misc_feature (170)..(170): n is a, c, g, or t
  misc_feature (183)..(183): n is a, c, g, or t
  misc_feature (207)..(207): n is a, c, g, or t
  misc_feature (246)..(246): n is a, c, g, or t
  misc_feature (259)..(259): n is a, c, g, or t
  misc_feature (266)..(266): n is a, c, g, or t
  misc_feature (280)..(280): n is a, c, g, or t
  misc_feature (340)..(450): n is a, c, g, or t

SEQ ID NO: 106966 - DNA, 1038 bp, Homo Sapiens; identical to SEQ ID NO: 71982
  misc_feature (173)..(173): n is a, c, g, or t
  misc_feature (218)..(218): n is a, c, g, or t
  misc_feature (271)..(271): n is a, c, g, or t
  misc_feature (278)..(278): n is a, c, g, or t

SEQ ID NO: 106967 - DNA, 880 bp, Homo Sapiens; identical to SEQ ID NO: 71983

SEQ ID NO: 106968 - DNA, 988 bp, Homo Sapiens; identical to SEQ ID NO: 71984

SEQ ID NO: 106969 - DNA, 991 bp, Homo Sapiens; identical to SEQ ID NO: 71985
  misc_feature (41)..(51): n is a, c, g, or t

SEQ ID NO: 106970 - DNA, 1053 bp, Homo Sapiens; identical to SEQ ID NO: 71986

SEQ ID NO: 106971 - DNA, 908 bp, Homo Sapiens; identical to SEQ ID NO: 71987

SEQ ID NO: 106972 - DNA, 859 bp, Homo Sapiens; identical to SEQ ID NO: 71988

SEQ ID NO: 106973 - DNA, 1313 bp, Homo Sapiens; identical to SEQ ID NO: 71989

SEQ ID NO: 106974 - DNA, 2219 bp, Homo Sapiens; identical to SEQ ID NO: 71990
  misc_feature (1567)..(1728): n is a, c, g, or t
  misc_feature (1739)..(1752): n is a, c, g, or t
  misc_feature (1854)..(1909): n is a, c, g, or t
  misc_feature (1912)..(1970): n is a, c, g, or t
  misc_feature (1986)..(1996): n is a, c, g, or t

SEQ ID NO: 106975 - DNA, 1022 bp, Homo Sapiens; identical to SEQ ID NO: 71991
  misc_feature (908)..(908): n is a, c, g, or t

SEQ ID NO: 106976 - DNA, 1288 bp, Homo Sapiens; identical to SEQ ID NO: 71992

SEQ ID NO: 106977 - DNA, 851 bp, Homo Sapiens; identical to SEQ ID NO: 71993

SEQ ID NO: 106978 - DNA, 880 bp, Homo Sapiens; identical to SEQ ID NO: 71994

SEQ ID NO: 106979 - DNA, 1842 bp, Homo Sapiens; identical to SEQ ID NO: 71995

SEQ ID NO: 106980 - DNA, 722 bp, Homo Sapiens; identical to SEQ ID NO: 71998
  misc_feature (31)..(31): n is a, c, g, or t

SEQ ID NO: 106981 - DNA, 667 bp, Homo Sapiens; identical to SEQ ID NO: 71999

SEQ ID NO: 106982 - DNA, 826 bp, Homo Sapiens; identical to SEQ ID NO: 72000

SEQ ID NO: 106983 - DNA, 1416 bp, Homo Sapiens; identical to SEQ ID NO: 72001
  misc_feature (72)..(106): n is a, c, g, or t
  misc_feature (1177)..(1177): n is a, c, g, or t
  misc_feature (1365)..(1365): n is a, c, g, or t

SEQ ID NO: 106984 - DNA, 1178 bp, Homo Sapiens; identical to SEQ ID NO: 72002
  misc_feature (49)..(49): n is a, c, g, or t
  misc_feature (100)..(100): n is a, c, g, or t
  misc_feature (238)..(460): n is a, c, g, or t
  misc_feature (1088)..(1124): n is a, c, g, or t

SEQ ID NO: 106985 - DNA, 1287 bp, Homo Sapiens; identical to SEQ ID NO: 72003
  misc_feature (1235)..(1235): n is a, c, g, or t

SEQ ID NO: 106986 - DNA, 635 bp, Homo Sapiens; identical to SEQ ID NO: 72005

SEQ ID NO: 106987 - DNA, 1407 bp, Homo Sapiens; identical to SEQ ID NO: 72006
  misc_feature (947)..(977): n is a, c, g, or t
  misc_feature (1263)..(1263): n is a, c, g, or t
  misc_feature (1318)..(1326): n is a, c, g, or t

SEQ ID NO: 106988 - DNA, 875 bp, Homo Sapiens; identical to SEQ ID NO: 72007
  misc_feature (211)..(232): n is a, c, g, or t
  misc_feature (799)..(808): n is a, c, g, or t

SEQ ID NO: 106989 - DNA, 372 bp, Homo Sapiens; identical to SEQ ID NO: 72008
  misc_feature (165)..(188): n is a, c, g, or t

SEQ ID NO: 106990 - DNA, 1656 bp, Homo Sapiens; identical to SEQ ID NO: 72009
  misc_feature (1049)..(1079): n is a, c, g, or t

SEQ ID NO: 106991 - DNA, 1074 bp, Homo Sapiens; identical to SEQ ID NO: 72010
  misc_feature (986)..(1004): n is a, c, g, or t
  misc_feature (1017)..(1030): n is a, c, g, or t

SEQ ID NO: 106992 - DNA, 1063 bp, Homo Sapiens; identical to SEQ ID NO: 72011

SEQ ID NO: 106993 - DNA, 1225 bp, Homo Sapiens; identical to SEQ ID NO: 72012
  misc_feature (13)..(13): n is a, c, g, or t
  misc_feature (57)..(57): n is a, c, g, or t
  misc_feature (101)..(101): n is a, c, g, or t
  misc_feature (104)..(104): n is a, c, g, or t
  misc_feature (160)..(160): n is a, c, g, or t
  misc_feature (166)..(166): n is a, c, g, or t
  misc_feature (197)..(197): n is a, c, g, or t
  misc_feature (248)..(248): n is a, c, g, or t
  misc_feature (281)..(281): n is a, c, g, or t
  misc_feature (969)..(1083): n is a, c, g, or t

SEQ ID NO: 106994 - DNA, 812 bp, Homo Sapiens; identical to SEQ ID NO: 72013

SEQ ID NO: 106995 - DNA, 1025 bp, Homo Sapiens; identical to SEQ ID NO: 72014

SEQ ID NO: 106996 - DNA, 812 bp, Homo Sapiens; identical to SEQ ID NO: 72017

SEQ ID NO: 106997 - DNA, 1356 bp, Homo Sapiens; identical to SEQ ID NO: 72018
  misc_feature (84)..(138): n is a, c, g, or t
  misc_feature (194)..(194): n is a, c, g, or t
  misc_feature (196)..(223): n is a, c, g, or t
  misc_feature (225)..(225): n is a, c, g, or t
  misc_feature (229)..(338): n is a, c, g, or t
  misc_feature (350)..(376): n is a, c, g, or t

SEQ ID NO: 106998 - DNA, 1049 bp, Homo Sapiens; identical to SEQ ID NO: 72021
  misc_feature (20)..(20): n is a, c, g, or t
  misc_feature (47)..(48): n is a, c, g, or t
  misc_feature (50)..(50): n is a, c, g, or t
  misc_feature (81)..(82): n is a, c, g, or t
  misc_feature (84)..(84): n is a, c, g, or t
  misc_feature (93)..(93): n is a, c, g, or t
  misc_feature (109)..(109): n is a, c, g, or t
  misc_feature (113)..(113): n is a, c, g, or t
  misc_feature (117)..(117): n is a, c, g, or t
  misc_feature (141)..(141): n is a, c, g, or t
  misc_feature (173)..(173): n is a, c, g, or t
  misc_feature (232)..(232): n is a, c, g, or t
  misc_feature (239)..(239): n is a, c, g, or t

SEQ ID NO: 106999 - DNA, 854 bp, Homo Sapiens; identical to SEQ ID NO: 72022

SEQ ID NO: 107000 - DNA, 1514 bp, Homo Sapiens; identical to SEQ ID NO: 72023

SEQ ID NO: 107001 - DNA, 1497 bp, Homo Sapiens; identical to SEQ ID NO: 72025
  misc_feature (83)..(117): n is a, c, g, or t

SEQ ID NO: 107002 - DNA, 1282 bp, Homo Sapiens; identical to SEQ ID NO: 72026

SEQ ID NO: 107003 - DNA, 416 bp, Homo Sapiens; identical to SEQ ID NO: 72032

SEQ ID NO: 107004 - DNA, 1085 bp, Homo Sapiens; identical to SEQ ID NO: 72033

SEQ ID NO: 107005 - DNA, 905 bp, Homo Sapiens; identical to SEQ ID NO: 72034

SEQ ID NO: 107006 - DNA, 748 bp, Homo Sapiens; identical to SEQ ID NO: 72038

SEQ ID NO: 107007 - DNA, 955 bp, Homo Sapiens; identical to SEQ ID NO: 72039
  misc_feature (196)..(196): n is a, c, g, or t
  misc_feature (506)..(506): n is a, c, g, or t
  misc_feature (511)..(512): n is a, c, g, or t
  misc_feature (519)..(529): n is a, c, g, or t

SEQ ID NO: 107008 - DNA, 859 bp, Homo Sapiens; identical to SEQ ID NO: 72040

SEQ ID NO: 107009 - DNA, 3269 bp, Homo Sapiens; identical to SEQ ID NO: 72041

SEQ ID NO: 107010 - DNA, 947 bp, Homo Sapiens; identical to SEQ ID NO: 72042

SEQ ID NO: 107011 - DNA, 1728 bp, Homo Sapiens; identical to SEQ ID NO: 72043

SEQ ID NO: 107012 - DNA, 915 bp, Homo Sapiens; identical to SEQ ID NO: 72044
  misc_feature (89)..(121): n is a, c, g, or t

SEQ ID NO: 107013 - DNA, 800 bp, Homo Sapiens; identical to SEQ ID NO: 72045

SEQ ID NO: 107014 - DNA, 959 bp, Homo Sapiens; identical to SEQ ID NO: 72046
  misc_feature (809)..(809): n is a, c, g, or t

SEQ ID NO: 107015 - DNA, 1202 bp, Homo Sapiens; identical to SEQ ID NO: 72047

SEQ ID NO: 107016 - DNA, 2115 bp, Homo Sapiens; identical to SEQ ID NO: 72048

SEQ ID NO: 107017 - DNA, 929 bp, Homo Sapiens; identical to SEQ ID NO: 72049
  misc_feature (878)..(878): n is a, c, g, or t
  misc_feature (880)..(881): n is a, c, g, or t
  misc_feature (889)..(889): n is a, c, g, or t

SEQ ID NO: 107018 - DNA, 864 bp, Homo Sapiens; identical to SEQ ID NO: 72050

SEQ ID NO: 107019 - DNA, 805 bp, Homo Sapiens; identical to SEQ ID NO: 72051
  misc_feature (625)..(625): n is a, c, g, or t
  misc_feature (733)..(733): n is a, c, g, or t
  misc_feature (745)..(745): n is a, c, g, or t
  misc_feature (752)..(752): n is a, c, g, or t

SEQ ID NO: 107020 - DNA, 1431 bp, Homo Sapiens; identical to SEQ ID NO: 72053
  misc_feature (13)..(13): n is a, c, g, or t
  misc_feature (214)..(214): n is a, c, g, or t
  misc_feature (1321)..(1363): n is a, c, g, or t

SEQ ID NO: 107021 - DNA, 663 bp, Homo Sapiens; identical to SEQ ID NO: 72054
  misc_feature (13)..(13): n is a, c, g, or t
  misc_feature (553)..(595): n is a, c, g, or t

SEQ ID NO: 107022 - DNA, 484 bp, Homo Sapiens; identical to SEQ ID NO: 72055

SEQ ID NO: 107023 - DNA, 496 bp, Homo Sapiens; identical to SEQ ID NO: 72056
  misc_feature (382)..(424): n is a, c, g, or t

SEQ ID NO: 107024 - DNA, 788 bp, Homo Sapiens; identical to SEQ ID NO: 72057

SEQ ID NO: 107025 - DNA, 746 bp, Homo Sapiens; identical to SEQ ID NO: 72062

SEQ ID NO: 107026 - DNA, 1232 bp, Homo Sapiens; identical to SEQ ID NO: 72063
  misc_feature (489)..(529): n is a, c, g, or t

SEQ ID NO: 107027 - DNA, 742 bp, Homo Sapiens; identical to SEQ ID NO: 72064

SEQ ID NO: 107028 - DNA, 743 bp, Homo Sapiens; identical to SEQ ID NO: 72065

SEQ ID NO: 107029 - DNA, 1185 bp, Homo Sapiens; identical to SEQ ID NO: 72066
  misc_feature (242)..(322): n is a, c, g, or t

SEQ ID NO: 107030 - DNA, 1024 bp, Homo Sapiens; identical to SEQ ID NO: 72067

SEQ ID NO: 107031 - DNA, 1246 bp, Homo Sapiens; identical to SEQ ID NO: 72068

SEQ ID NO: 107032 - DNA, 955 bp, Homo Sapiens; identical to SEQ ID NO: 72069

SEQ ID NO: 107033 - DNA, 1491 bp, Homo Sapiens; identical to SEQ ID NO: 72070
  misc_feature (665)..(696): n is a, c, g, or t

SEQ ID NO: 107034 - DNA, 451 bp, Homo Sapiens; identical to SEQ ID NO: 72071

SEQ ID NO: 107035 - DNA, 1795 bp, Homo Sapiens; identical to SEQ ID NO: 72072
  misc_feature (1518)..(1555): n is a, c, g, or t
  misc_feature (1681)..(1755): n is a, c, g, or t

SEQ ID NO: 107036 - DNA, 1076 bp, Homo Sapiens; identical to SEQ ID NO: 72073

SEQ ID NO: 107037 - DNA, 426 bp, Homo Sapiens; identical to SEQ ID NO: 72074

SEQ ID NO: 107038 - DNA, 575 bp, Homo Sapiens; identical to SEQ ID NO: 72075

SEQ ID NO: 107039 - DNA, 1950 bp, Homo Sapiens; identical to SEQ ID NO: 72078

SEQ ID NO: 107040 - DNA, 956 bp, Homo Sapiens; identical to SEQ ID NO: 72079

SEQ ID NO: 107041 - DNA, 840 bp, Homo Sapiens; identical to SEQ ID NO: 72080
  misc_feature (604)..(604): n is a, c, g, or t
  misc_feature (612)..(612): n is a, c, g, or t
  misc_feature (630)..(630): n is a, c, g, or t
  misc_feature (675)..(675): n is a, c, g, or t
  misc_feature (814)..(814): n is a, c, g, or t

SEQ ID NO: 107042 - DNA, 1417 bp, Homo Sapiens; identical to SEQ ID NO: 72081
  misc_feature (452)..(490): n is a, c, g, or t

SEQ ID NO: 107043 - DNA, 1382 bp, Homo Sapiens; identical to SEQ ID NO: 72083
  misc_feature (621)..(629): n is a, c, g, or t

SEQ ID NO: 107044 - DNA, 1280 bp, Homo Sapiens; identical to SEQ ID NO: 72084

SEQ ID NO: 107045 - DNA, 913 bp, Homo Sapiens; identical to SEQ ID NO: 72085

SEQ ID NO: 107046 - DNA, 138 bp, Homo Sapiens; identical to SEQ ID NO: 72087

SEQ ID NO: 107047 - DNA, 456 bp, Homo Sapiens; identical to SEQ ID NO: 72088
  misc_feature (325)..(355): n is a, c, g, or t

SEQ ID NO: 107048 - DNA, 1955 bp, Homo Sapiens; identical to SEQ ID NO: 72089
  misc_feature (1088)..(1115): n is a, c, g, or t
  misc_feature (1256)..(1267): n is a, c, g, or t
  misc_feature (1706)..(1719): n is a, c, g, or t
  misc_feature (1833)..(1890): n is a, c, g, or t

SEQ ID NO: 107049 - DNA, 561 bp, Homo Sapiens; identical to SEQ ID NO: 72090

SEQ ID NO: 107050 - DNA, 705 bp, Homo Sapiens; identical to SEQ ID NO: 72091
  misc_feature (109)..(122): n is a, c, g, or t
  misc_feature (131)..(250): n is a, c, g, or t

SEQ ID NO: 107051 - DNA, 541 bp, Homo Sapiens; identical to SEQ ID NO: 72093

SEQ ID NO: 107052 - DNA, 539 bp, Homo Sapiens; identical to SEQ ID NO: 72094
  misc_feature (315)..(315): n is a, c, g, or t

SEQ ID NO: 107053 - DNA, 1555 bp, Homo Sapiens; identical to SEQ ID NO: 72096

SEQ ID NO: 107054 - DNA, 1775 bp, Homo Sapiens; identical to SEQ ID NO: 72097
  misc_feature (1114)..(1264): n is a, c, g, or t
  misc_feature (1272)..(1286): n is a, c, g, or t
  misc_feature (1312)..(1330): n is a, c, g, or t
  misc_feature (1415)..(1427): n is a, c, g, or t
  misc_feature (1471)..(1490): n is a, c, g, or t
  misc_feature (1525)..(1572): n is a, c, g, or t
  misc_feature (1648)..(1658): n is a, c, g, or t
  misc_feature (1687)..(1695): n is a, c, g, or t

SEQ ID NO: 107055 - DNA, 466 bp, Homo Sapiens; identical to SEQ ID NO: 72098

SEQ ID NO: 107056 - DNA, 878 bp, Homo Sapiens; identical to SEQ ID NO: 72099

SEQ ID NO: 107057 - DNA, 1485 bp, Homo Sapiens; identical to SEQ ID NO: 72100
  misc_feature (755)..(784): n is a, c, g, or t
  misc_feature (910)..(976): n is a, c, g, or t

SEQ ID NO: 107058 - DNA, 2039 bp, Homo Sapiens; identical to SEQ ID NO: 72101

SEQ ID NO: 107059 - DNA, 720 bp, Homo Sapiens; identical to SEQ ID NO: 72102
  misc_feature (28)..(28): n is a, c, g, or t
  misc_feature (67)..(121): n is a, c, g, or t

SEQ ID NO: 107060 - DNA, 129 bp, Homo Sapiens; identical to SEQ ID NO: 72103

SEQ ID NO: 107061 - DNA, 1152 bp, Homo Sapiens; identical to SEQ ID NO: 72109

SEQ ID NO: 107062 - DNA, 854 bp, Homo Sapiens; identical to SEQ ID NO: 72110
  misc_feature (740)..(767): n is a, c, g, or t
  misc_feature (773)..(773): n is a, c, g, or t
  misc_feature (832)..(832): n is a, c, g, or t

SEQ ID NO: 107063 - DNA, 508 bp, Homo Sapiens; identical to SEQ ID NO: 72115
  misc_feature (182)..(217): n is a, c, g, or t
  misc_feature (415)..(447): n is a, c, g, or t

SEQ ID NO: 107064 - DNA, 2792 bp, Homo Sapiens; identical to SEQ ID NO: 72116
  misc_feature (2445)..(2492): n is a, c, g, or t
  misc_feature (2674)..(2707): n is a, c, g, or t

SEQ ID NO: 107065 - DNA, 1128 bp, Homo Sapiens; identical to SEQ ID NO: 72117
  misc_feature (1012)..(1013): n is a, c, g, or t

SEQ ID NO: 107066 - DNA, 854 bp, Homo Sapiens; identical to SEQ ID NO: 72118

SEQ ID NO: 107067 - DNA, 885 bp, Homo Sapiens; identical to SEQ ID NO: 72119

SEQ ID NO: 107068 - DNA, 1383 bp, Homo Sapiens; identical to SEQ ID NO: 72120

SEQ ID NO: 107069 - DNA, 1410 bp, Homo Sapiens; identical to SEQ ID NO: 72121
  misc_feature (80)..(89): n is a, c, g, or t
  misc_feature (147)..(183): n is a, c, g, or t

SEQ ID NO: 107070 - DNA, 863 bp, Homo Sapiens; identical to SEQ ID NO: 72122
  misc_feature (250)..(250): n is a, c, g, or t

SEQ ID NO: 107071 - DNA, 767 bp, Homo Sapiens; identical to SEQ ID NO: 72123
  misc_feature (66)..(66): n is a, c, g, or t
  misc_feature (95)..(95): n is a, c, g, or t
  misc_feature (101)..(101): n is a, c, g, or t
  misc_feature (109)..(110): n is a, c, g, or t
  misc_feature (118)..(118): n is a, c, g, or t

SEQ ID NO: 107072 - DNA, 796 bp, Homo Sapiens; identical to SEQ ID NO: 72124

SEQ ID NO: 107073 - DNA, 2053 bp, Homo Sapiens; identical to SEQ ID NO: 72126
  misc_feature (1991)..(2013): n is a, c, g, or t

SEQ ID NO: 107074 - DNA, 2051 bp, Homo Sapiens; identical to SEQ ID NO: 72127

SEQ ID NO: 107075 - DNA, 505 bp, Homo Sapiens; identical to SEQ ID NO: 72128
  misc_feature (331)..(345): n is a, c, g, or t

SEQ ID NO: 107076 - DNA, 494 bp, Homo Sapiens; identical to SEQ ID NO: 72129
  misc_feature (20)..(20): n is a, c, g, or t
  misc_feature (52)..(52): n is a, c, g, or t
  misc_feature (171)..(171): n is a, c, g, or t
  misc_feature (208)..(208): n is a, c, g, or t
  misc_feature (318)..(332): n is a, c, g, or t

SEQ ID NO: 107077 - DNA, 1763 bp, Homo Sapiens; identical to SEQ ID NO: 72132
  misc_feature (129)..(221): n is a, c, g, or t
  misc_feature (1587)..(1602): n is a, c, g, or t

SEQ ID NO: 107078 - DNA, 933 bp, Homo Sapiens; identical to SEQ ID NO: 72133
  misc_feature (573)..(595): n is a, c, g, or t
  misc_feature (775)..(783): n is a, c, g, or t
  misc_feature (810)..(811): n is a, c, g, or t
  misc_feature (822)..(822): n is a, c, g, or t
  misc_feature (824)..(824): n is a, c, g, or t

SEQ ID NO: 107079 - DNA, 511 bp, Homo Sapiens; identical to SEQ ID NO: 72134
  misc_feature (308)..(320): n is a, c, g, or t

SEQ ID NO: 107080 - DNA, 821 bp, Homo Sapiens; identical to SEQ ID NO: 72136
  misc_feature (653)..(672): n is a, c, g, or t
  misc_feature (674)..(678): n is a, c, g, or t
  misc_feature (680)..(680): n is a, c, g, or t

SEQ ID NO: 107081 - DNA, 1130 bp, Homo Sapiens; identical to SEQ ID NO: 72137
  misc_feature (700)..(713): n is a, c, g, or t
  misc_feature (823)..(823): n is a, c, g, or t
  misc_feature (879)..(879): n is a, c, g, or t
  misc_feature (938)..(938): n is a, c, g, or t
  misc_feature (1005)..(1005): n is a, c, g, or t
  misc_feature (1020)..(1020): n is a, c, g, or t
  misc_feature (1057)..(1057): n is a, c, g, or t
  misc_feature (1066)..(1066): n is a, c, g, or t

SEQ ID NO: 107082 - DNA, 1048 bp, Homo Sapiens; identical to SEQ ID NO: 72138

SEQ ID NO: 107083 - DNA, 1652 bp, Homo Sapiens; identical to SEQ ID NO: 3364
  misc_feature (1400)..(1543): n is a, c, g, or t
  misc_feature (1551)..(1551): n is a, c, g, or t
  misc_feature (1582)..(1582): n is a, c, g, or t
  misc_feature (1584)..(1584): n is a, c, g, or t
  misc_feature (1588)..(1600): n is a, c, g, or t

SEQ ID NO: 107084 - DNA, 560 bp, Homo Sapiens; identical to SEQ ID NO: 72142
  misc_feature (402)..(435): n is a, c, g, or t

SEQ ID NO: 107085 - DNA, 409 bp, Homo Sapiens; identical to SEQ ID NO: 72143
  misc_feature (128)..(161): n is a, c, g, or t

SEQ ID NO: 107086 - DNA, 2023 bp, Homo Sapiens; identical to SEQ ID NO: 72144

SEQ ID NO: 107087 - DNA, 514 bp, Homo Sapiens; identical to SEQ ID NO: 72145

SEQ ID NO: 107088 - DNA, 2951 bp, Homo Sapiens; identical to SEQ ID NO: 72148
  misc_feature (691)..(722): n is a, c, g, or t
  misc_feature (2735)..(2746): n is a, c, g, or t
  misc_feature (2880)..(2890): n is a, c, g, or t

SEQ ID NO: 107089 - DNA, 822 bp, Homo Sapiens; identical to SEQ ID NO: 72149
  misc_feature (718)..(734): n is a, c, g, or t

SEQ ID NO: 107090 - DNA, 2057 bp, Homo Sapiens; identical to SEQ ID NO: 72150

SEQ ID NO: 107091 - DNA, 1668 bp, Homo Sapiens; identical to SEQ ID NO: 72151

SEQ ID NO: 107092 - DNA, 754 bp, Homo Sapiens; identical to SEQ ID NO: 72152
  misc_feature (232)..(302): n is a, c, g, or t
  misc_feature (721)..(721): n is a, c, g, or t
  misc_feature (739)..(739): n is a, c, g, or t

SEQ ID NO: 107093 - DNA, 1169 bp, Homo Sapiens; identical to SEQ ID NO: 72153
  misc_feature (154)..(224): n is a, c, g, or t

SEQ ID NO: 107094 - DNA, 1470 bp, Homo Sapiens; identical to SEQ ID NO: 72154
  misc_feature (1142)..(1196): n is a, c, g, or t

SEQ ID NO: 107095 - DNA, 1107 bp, Homo Sapiens; identical to SEQ ID NO: 72155
  misc_feature (11)..(11): n is a, c, g, or t
  misc_feature (32)..(32): n is a, c, g, or t
  misc_feature (40)..(40): n is a, c, g, or t
  misc_feature (91)..(91): n is a, c, g, or t
  misc_feature (109)..(109): n is a, c, g, or t
  misc_feature (133)..(133): n is a, c, g, or t
  misc_feature (182)..(182): n is a, c, g, or t

SEQ ID NO: 107096 - DNA, 1710 bp, Homo Sapiens; identical to SEQ ID NO: 72156
  misc_feature (72)..(122): n is a, c, g, or t
  misc_feature (379)..(469): n is a, c, g, or t
  misc_feature (513)..(535): n is a, c, g, or t
  misc_feature (671)..(733): n is a, c, g, or t
  misc_feature (1598)..(1598): n is a, c, g, or t
  misc_feature (1627)..(1627): n is a, c, g, or t

SEQ ID NO: 107097 - DNA, 2298 bp, Homo Sapiens; identical to SEQ ID NO: 72157
  misc_feature (426)..(514): n is a, c, g, or t
  misc_feature (548)..(582): n is a, c, g, or t

SEQ ID NO: 107098 - DNA, 882 bp, Homo Sapiens; identical to SEQ ID NO: 72158

SEQ ID NO: 107099 - DNA, 1003 bp, Homo Sapiens; identical to SEQ ID NO: 72163

SEQ ID NO: 107100 - DNA, 1070 bp, Homo Sapiens; identical to SEQ ID NO: 72164

SEQ ID NO: 107101 - DNA, 437 bp, Homo Sapiens; identical to SEQ ID NO: 72166

SEQ ID NO: 107102 - DNA, 2033 bp, Homo Sapiens; identical to SEQ ID NO: 72167
  misc_feature (601)..(646): n is a, c, g, or t
  misc_feature (1955)..(1964): n is a, c, g, or t

SEQ ID NO: 107103 - DNA, 785 bp, Homo Sapiens; identical to SEQ ID NO: 72172
  misc_feature (80)..(80): n is a, c, g, or t

SEQ ID NO: 107104 - DNA, 627 bp, Homo Sapiens; identical to SEQ ID NO: 72173

SEQ ID NO: 107105 - DNA, 2044 bp, Homo Sapiens; identical to SEQ ID NO: 72174

SEQ ID NO: 107106 - DNA, 381 bp, Homo Sapiens; identical to SEQ ID NO: 72175

SEQ ID NO: 107107 - DNA, 703 bp, Homo Sapiens; identical to SEQ ID NO: 72176

SEQ ID NO: 107108 - DNA, 289 bp, Homo Sapiens; identical to SEQ ID NO: 72177

SEQ ID NO: 107109 - DNA, 375 bp, Homo Sapiens; identical to SEQ ID NO: 72178

SEQ ID NO: 107110 - DNA, 447 bp, Homo Sapiens; identical to SEQ ID NO: 72182

SEQ ID NO: 107111 - DNA, 1731 bp, Homo Sapiens; identical to SEQ ID NO: 72183
  misc_feature (15)..(15): n is a, c, g, or t

SEQ ID NO: 107112 - DNA, 1486 bp, Homo Sapiens; identical to SEQ ID NO: 72184
  misc_feature (1020)..(1050): n is a, c, g, or t
  misc_feature (1052)..(1059): n is a, c, g, or t
  misc_feature (1061)..(1093): n is a, c, g, or t
  misc_feature (1095)..(1096): n is a, c, g, or t
  misc_feature (1098)..(1105): n is a, c, g, or t
  misc_feature (1107)..(1110): n is a, c, g, or t
  misc_feature (1112)..(1113): n is a, c, g, or t
  misc_feature (1115)..(1119): n is a, c, g, or t
  misc_feature (1124)..(1125): n is a, c, g, or t
  misc_feature (1127)..(1215): n is a, c, g, or t

SEQ ID NO: 107113 - DNA, 819 bp, Homo Sapiens; identical to SEQ ID NO: 72185
  misc_feature (738)..(738): n is a, c, g, or t

SEQ ID NO: 107114 - DNA, 904 bp, Homo Sapiens; identical to SEQ ID NO: 72186

SEQ ID NO: 107115 - DNA, 592 bp, Homo Sapiens; identical to SEQ ID NO: 72195
  misc_feature (44)..(44): n is a, c, g, or t

SEQ ID NO: 107116 - DNA, 990 bp, Homo Sapiens; identical to SEQ ID NO: 72196
  misc_feature (130)..(130): n is a, c, g, or t
  misc_feature (133)..(133): n is a, c, g, or t
  misc_feature (168)..(168): n is a, c, g, or t
  misc_feature (189)..(189): n is a, c, g, or t
  misc_feature (228)..(228): n is a, c, g, or t
  misc_feature (255)..(256): n is a, c, g, or t
  misc_feature (293)..(293): n is a, c, g, or t

SEQ ID NO: 107117 - DNA, 449 bp, Homo Sapiens; identical to SEQ ID NO: 72197

SEQ ID NO: 107118 - DNA, 981 bp, Homo Sapiens; identical to SEQ ID NO: 72198
  misc_feature (516)..(516): n is a, c, g, or t
  misc_feature (518)..(518): n is a, c, g, or t
  misc_feature (523)..(524): n is a, c, g, or t
  misc_feature (529)..(529): n is a, c, g, or t
  misc_feature (531)..(531): n is a, c, g, or t
  misc_feature (533)..(534): n is a, c, g, or t

SEQ ID NO: 107119 - DNA, 534 bp, Homo Sapiens; identical to SEQ ID NO: 72200

SEQ ID NO: 107120 - DNA, 553 bp, Homo Sapiens; identical to SEQ ID NO: 72201

SEQ ID NO: 107121 - DNA, 1136 bp, Homo Sapiens; identical to SEQ ID NO: 72203

SEQ ID NO: 107122 - DNA, 959 bp, Homo Sapiens; identical to SEQ ID NO: 72204

SEQ ID NO: 107123 - DNA, 1017 bp, Homo Sapiens; identical to SEQ ID NO: 72205
  misc_feature (737)..(737): n is a, c, g, or t

SEQ ID NO: 107124 - DNA, 1451 bp, Homo Sapiens; identical to SEQ ID NO: 72206
  misc_feature (1401)..(1411): n is a, c, g, or t

SEQ ID NO: 107125 - DNA, 1358 bp, Homo Sapiens; identical to SEQ ID NO: 72207

SEQ ID NO: 107126 - DNA, 939 bp, Homo Sapiens; identical to SEQ ID NO: 72209

SEQ ID NO: 107127 - DNA, 507 bp, Homo Sapiens; identical to SEQ ID NO: 72210

SEQ ID NO: 107128 - DNA, 917 bp, Homo Sapiens; identical to SEQ ID NO: 72213

SEQ ID NO: 107129 - DNA, 675 bp, Homo Sapiens; identical to SEQ ID NO: 72214

SEQ ID NO: 107130 - DNA, 971 bp, Homo Sapiens; identical to SEQ ID NO: 72216

SEQ ID NO: 107131 - DNA, 1433 bp, Homo Sapiens; identical to SEQ ID NO: 72217

SEQ ID NO: 107132 - DNA, 295 bp, Homo Sapiens; identical to SEQ ID NO: 72218

SEQ ID NO: 107133 - DNA, 489 bp, Homo Sapiens; identical to SEQ ID NO: 72220

SEQ ID NO: 107134 - DNA, 472 bp, Homo Sapiens; identical to SEQ ID NO: 72221

SEQ ID NO: 107135 - DNA, 1165 bp, Homo Sapiens; identical to SEQ ID NO: 72222

SEQ ID NO: 107136 - DNA, 1626 bp, Homo Sapiens; identical to SEQ ID NO: 72225
  misc_feature (1121)..(1223): n is a, c, g, or t
  misc_feature (1356)..(1366): n is a, c, g, or t
  misc_feature (1467)..(1475): n is a, c, g, or t

SEQ ID NO: 107137 - DNA, 1079 bp, Homo Sapiens; identical to SEQ ID NO: 72226

SEQ ID NO: 107138 - DNA, 1011 bp, Homo Sapiens; identical to SEQ ID NO: 72227
  misc_feature (47)..(175): n is a, c, g, or t
  misc_feature (228)..(285): n is a, c, g, or t

SEQ ID NO: 107139 - DNA, 2408 bp, Homo Sapiens; identical to SEQ ID NO: 72229
  misc_feature (2285)..(2313): n is a, c, g, or t

SEQ ID NO: 107140 - DNA, 486 bp, Homo Sapiens; identical to SEQ ID NO: 72230
  misc_feature (382)..(382): n is a, c, g, or t

SEQ ID NO: 107141 - DNA, 3517 bp, Homo Sapiens; identical to SEQ ID NO: 72231
  misc_feature (86)..(120): n is a, c, g, or t
  misc_feature (3391)..(3415): n is a, c, g, or t

SEQ ID NO: 107142 - DNA, 1128 bp, Homo Sapiens; identical to SEQ ID NO: 72233
  misc_feature (84)..(134): n is a, c, g, or t

SEQ ID NO: 107143 - DNA, 539 bp, Homo Sapiens; identical to SEQ ID NO: 72234
  misc_feature (73)..(81): n is a, c, g, or t
  misc_feature (271)..(313): n is a, c, g, or t

SEQ ID NO: 107144 - DNA, 1005 bp, Homo Sapiens; identical to SEQ ID NO: 72236
  misc_feature (24)..(24): n is a, c, g, or t
  misc_feature (30)..(30): n is a, c, g, or t
  misc_feature (36)..(36): n is a, c, g, or t
  misc_feature (42)..(42): n is a, c, g, or t
  misc_feature (46)..(46): n is a, c, g, or t
  misc_feature (59)..(59): n is a, c, g, or t
  misc_feature (866)..(866): n is a, c, g, or t

SEQ ID NO: 107145 - DNA, 1117 bp, Homo Sapiens; identical to SEQ ID NO: 72237
  misc_feature (903)..(903): n is a, c, g, or t
  misc_feature (905)..(906): n is a, c, g, or t
  misc_feature (909)..(910): n is a, c, g, or t
  misc_feature (931)..(933): n is a, c, g, or t

SEQ ID NO: 107146 - DNA, 751 bp, Homo Sapiens; identical to SEQ ID NO: 72238
  misc_feature (684)..(684): n is a, c, g, or t

SEQ ID NO: 107147 - DNA, 452 bp, Homo Sapiens; identical to SEQ ID NO: 72239
  misc_feature (129)..(181): n is a, c, g, or t

SEQ ID NO: 107148 - DNA, 1744 bp, Homo Sapiens; identical to SEQ ID NO: 72240

SEQ ID NO: 107149 - DNA, 1693 bp, Homo Sapiens; identical to SEQ ID NO: 72241

SEQ ID NO: 107150 - DNA, 1146 bp, Homo Sapiens; identical to SEQ ID NO: 72242
  misc_feature (65)..(126): n is a, c, g, or t
  misc_feature (128)..(144): n is a, c, g, or t

SEQ ID NO: 107151 - DNA, 1142 bp, Homo Sapiens; identical to SEQ ID NO: 72247

SEQ ID NO: 107152 - DNA, 1836 bp, Homo Sapiens; identical to SEQ ID NO: 72248

SEQ ID NO: 107153 - DNA, 1137 bp, Homo Sapiens; identical to SEQ ID NO: 72249
  misc_feature (43)..(81): n is a, c, g, or t
  misc_feature (85)..(119): n is a, c, g, or t
  misc_feature (1137)..(1137): n is a, c, g, or t

SEQ ID NO: 107154 - DNA, 436 bp, Homo Sapiens; identical to SEQ ID NO: 72250

SEQ ID NO: 107155 - DNA, 736 bp, Homo Sapiens; identical to SEQ ID NO: 72251
  misc_feature (15)..(15): n is a, c, g, or t
  misc_feature (93)..(109): n is a, c, g, or t

SEQ ID NO: 107156 - DNA, 1008 bp, Homo Sapiens; identical to SEQ ID NO: 72252
  misc_feature (53)..(53): n is a, c, g, or t
  misc_feature (129)..(655): n is a, c, g, or t
  misc_feature (686)..(694): n is a, c, g, or t

SEQ ID NO: 107157 - DNA, 1013 bp, Homo Sapiens; identical to SEQ ID NO: 72253
  misc_feature (137)..(137): n is a, c, g, or t
  misc_feature (150)..(252): n is a, c, g, or t
  misc_feature (256)..(659): n is a, c, g, or t
  misc_feature (702)..(719): n is a, c, g, or t

SEQ ID NO: 107158 - DNA, 1394 bp, Homo Sapiens; identical to SEQ ID NO: 72257

SEQ ID NO: 107159 - DNA, 1524 bp, Homo Sapiens; identical to SEQ ID NO: 72258
  misc_feature (1201)..(1201): n is a, c, g, or t
  misc_feature (1266)..(1266): n is a, c, g, or t
  misc_feature (1279)..(1279): n is a, c, g, or t

SEQ ID NO: 107160 - DNA, 673 bp, Homo Sapiens; identical to SEQ ID NO: 72259
  misc_feature (90)..(90): n is a, c, g, or t
  misc_feature (128)..(128): n is a, c, g, or t

SEQ ID NO: 107161 - DNA, 510 bp, Homo Sapiens; identical to SEQ ID NO: 72260
  misc_feature (493)..(493): n is a, c, g, or t

SEQ ID NO: 107162 - DNA, 2854 bp, Homo Sapiens; identical to SEQ ID NO: 72261
  misc_feature (257)..(257): n is a, c, g, or t
  misc_feature (1939)..(1950): n is a, c, g, or t

SEQ ID NO: 107163 - DNA, 947 bp, Homo Sapiens; identical to SEQ ID NO: 72262

SEQ ID NO: 107164 - DNA, 901 bp, Homo Sapiens; identical to SEQ ID NO: 72264

SEQ ID NO: 107165 - DNA, 1003 bp, Homo Sapiens; identical to SEQ ID NO: 72265

SEQ ID NO: 107166 - DNA, 1672 bp, Homo Sapiens; identical to SEQ ID NO: 72266
  misc_feature (1110)..(1118): n is a, c, g, or t
  misc_feature (1136)..(1185): n is a, c, g, or t

SEQ ID NO: 107167 - DNA, 594 bp, Homo Sapiens; identical to SEQ ID NO: 72270

SEQ ID NO: 107168 - DNA, 893 bp, Homo Sapiens; identical to SEQ ID NO: 72271
  misc_feature (13)..(13): n is a, c, g, or t
  misc_feature (832)..(848): n is a, c, g, or t

SEQ ID NO: 107169 - DNA, 1100 bp, Homo Sapiens; identical to SEQ ID NO: 72272
  misc_feature (19)..(19): n is a, c, g, or t
  misc_feature (159)..(159): n is a, c, g, or t
  misc_feature (856)..(895): n is a, c, g, or t

SEQ ID NO: 107170 - DNA, 506 bp, Homo Sapiens; identical to SEQ ID NO: 72274

SEQ ID NO: 107171 - DNA, 1593 bp, Homo Sapiens; identical to SEQ ID NO: 72275

SEQ ID NO: 107172 - DNA, 1026 bp, Homo Sapiens; identical to SEQ ID NO: 72276

SEQ ID NO: 107173 - DNA, 308 bp, Homo Sapiens; identical to SEQ ID NO: 72277

SEQ ID NO: 107174 - DNA, 1509 bp, Homo Sapiens; identical to SEQ ID NO: 72280

SEQ ID NO: 107175 - DNA, 1539 bp, Homo Sapiens; identical to SEQ ID NO: 72281

SEQ ID NO: 107176 - DNA, 487 bp, Homo Sapiens; identical to SEQ ID NO: 72282

SEQ ID NO: 107177 - DNA, 895 bp, Homo Sapiens; identical to SEQ ID NO: 72283

SEQ ID NO: 107178 - DNA, 1068 bp, Homo Sapiens; identical to SEQ ID NO: 72284
  misc_feature (1014)..(1023): n is a, c, g, or t

SEQ ID NO: 107179 - DNA, 919 bp, Homo Sapiens; identical to SEQ ID NO: 72285

SEQ ID NO: 107180 - DNA, 1066 bp, Homo Sapiens; identical to SEQ ID NO: 72286
  misc_feature (368)..(486): n is a, c, g, or t

SEQ ID NO: 107181 - DNA, 902 bp, Homo Sapiens; identical to SEQ ID NO: 72287
  misc_feature (54)..(84): n is a, c, g, or t

SEQ ID NO: 107182 - DNA, 583 bp, Homo Sapiens; identical to SEQ ID NO: 72288

SEQ ID NO: 107183 - DNA, 937 bp, Homo Sapiens; identical to SEQ ID NO: 72289

SEQ ID NO: 107184 - DNA, 2542 bp, Homo Sapiens; identical to SEQ ID NO: 72290
  misc_feature (1145)..(1145): n is a, c, g, or t
  misc_feature (1898)..(1942): n is a, c, g, or t

SEQ ID NO: 107185 - DNA, 788 bp, Homo Sapiens; identical to SEQ ID NO: 72291
  misc_feature (706)..(706): n is a, c, g, or t
  misc_feature (723)..(723): n is a, c, g, or t
  misc_feature (735)..(737): n is a, c, g, or t

SEQ ID NO: 107186 - DNA, 887 bp, Homo Sapiens; identical to SEQ ID NO: 72293
  misc_feature (334)..(351): n is a, c, g, or t
  misc_feature (423)..(509): n is a, c, g, or t
  misc_feature (649)..(738): n is a, c, g, or t
  misc_feature (789)..(827): n is a, c, g, or t

SEQ ID NO: 107187 - DNA, 799 bp, Homo Sapiens; identical to SEQ ID NO: 72294
  misc_feature (309)..(402): n is a, c, g, or t

SEQ ID NO: 107188 - DNA, 611 bp, Homo Sapiens; identical to SEQ ID NO: 72295
  misc_feature (104)..(120): n is a, c, g, or t
  misc_feature (221)..(274): n is a, c, g, or t
  misc_feature (440)..(506): n is a, c, g, or t

SEQ ID NO: 107189 - DNA, 720 bp, Homo Sapiens; identical to SEQ ID NO: 72296
  misc_feature (135)..(163): n is a, c, g, or t
  misc_feature (235)..(319): n is a, c, g, or t
  misc_feature (483)..(549): n is a, c, g, or t
  misc_feature (601)..(638): n is a, c, g, or t

SEQ ID NO: 107190 - DNA, 457 bp, Homo Sapiens; identical to SEQ ID NO: 72297
  misc_feature (282)..(318): n is a, c, g, or t

SEQ ID NO: 107191 - DNA, 1713 bp, Homo Sapiens; identical to SEQ ID NO: 72298

SEQ ID NO: 107192 - DNA, 913 bp, Homo Sapiens; identical to SEQ ID NO: 72299

SEQ ID NO: 107193 - DNA, 745 bp, Homo Sapiens; identical to SEQ ID NO: 72302

SEQ ID NO: 107194 - DNA, 1432 bp, Homo Sapiens; identical to SEQ ID NO: 72303

SEQ ID NO: 107195 - DNA, 732 bp, Homo Sapiens; identical to SEQ ID NO: 72310
  misc_feature (341)..(353): n is a, c, g, or t

SEQ ID NO: 107196 - DNA, 1318 bp, Homo Sapiens; identical to SEQ ID NO: 72311
  misc_feature (1253)..(1269): n is a, c, g, or t

SEQ ID NO: 107197 - DNA, 496 bp, Homo Sapiens; identical to SEQ ID NO: 72312
  misc_feature (431)..(447): n is a, c, g, or t

SEQ ID NO: 107198 - DNA, 1006 bp, Homo Sapiens; identical to SEQ ID NO: 72314

SEQ ID NO: 107199 - DNA, 742 bp, Homo Sapiens; identical to SEQ ID NO: 72315

SEQ ID NO: 107200 - DNA, 1025 bp, Homo Sapiens; identical to SEQ ID NO: 72316

SEQ ID NO: 107201 - DNA, 486 bp, Homo Sapiens; identical to SEQ ID NO: 72317

SEQ ID NO: 107202 - DNA, 812 bp, Homo Sapiens; identical to SEQ ID NO: 72318

SEQ ID NO: 107203 - DNA, 1617 bp, Homo Sapiens; identical to SEQ ID NO: 72319
  misc_feature (277)..(293): n is a, c, g, or t
  misc_feature (295)..(535): n is a, c, g, or t
  misc_feature (581)..(619): n is a, c, g, or t

SEQ ID NO: 107204 - DNA, 1237 bp, Homo Sapiens; identical to SEQ ID NO: 72320
  misc_feature (55)..(55): n is a, c, g, or t
  misc_feature (97)..(97): n is a, c, g, or t
  misc_feature (832)..(1101): n is a, c, g, or t
  misc_feature (1103)..(1124): n is a, c, g, or t

SEQ ID NO: 107205 - DNA, 640 bp, Homo Sapiens; identical to SEQ ID NO: 72321
  misc_feature (16)..(16): n is a, c, g, or t
  misc_feature (38)..(38): n is a, c, g, or t
  misc_feature (54)..(62): n is a, c, g, or t
  misc_feature (239)..(239): n is a, c, g, or t

SEQ ID NO: 107206 - DNA, 662 bp, Homo Sapiens; identical to SEQ ID NO: 72322
  misc_feature (276)..(292): n is a, c, g, or t
  misc_feature (294)..(550): n is a, c, g, or t
  misc_feature (580)..(618): n is a, c, g, or t

SEQ ID NO: 107207 - DNA, 373 bp, Homo Sapiens; identical to SEQ ID NO: 72325

SEQ ID NO: 107208 - DNA, 1057 bp, Homo Sapiens; identical to SEQ ID NO: 72326
  misc_feature (104)..(138): n is a, c, g, or t
  misc_feature (872)..(873): n is a, c, g, or t
  misc_feature (879)..(879): n is a, c, g, or t

SEQ ID NO: 107209 - DNA, 867 bp, Homo Sapiens; identical to SEQ ID NO: 72327
  misc_feature (779)..(779): n is a, c, g, or t
  misc_feature (783)..(783): n is a, c, g, or t
  misc_feature (785)..(789): n is a, c, g, or t

SEQ ID NO: 107210 - DNA, 1928 bp, Homo Sapiens; identical to SEQ ID NO: 72335
  misc_feature (1079)..(1079): n is a, c, g, or t

SEQ ID NO: 107211 - DNA, 531 bp, Homo Sapiens; identical to SEQ ID NO: 72336

SEQ ID NO: 107212 - DNA, 2544 bp, Homo Sapiens; identical to SEQ ID NO: 72339
  misc_feature (1167)..(1230): n is a, c, g, or t
  misc_feature (1332)..(1390): n is a, c, g, or t

SEQ ID NO: 107213 - DNA, 789 bp, Homo Sapiens; identical to SEQ ID NO: 72340
  misc_feature (630)..(693): n is a, c, g, or t

SEQ ID NO: 107214 - DNA, 1631 bp, Homo Sapiens; identical to SEQ ID NO: 72343
  misc_feature (949)..(959): n is a, c, g, or t
  misc_feature (1077)..(1077): n is a, c, g, or t
  misc_feature (1318)..(1318): n is a, c, g, or t
  misc_feature (1329)..(1329): n is a, c, g, or t
  misc_feature (1339)..(1339): n is a, c, g, or t
  misc_feature (1355)..(1355): n is a, c, g, or t
  misc_feature (1413)..(1413): n is a, c, g, or t
  misc_feature (1465)..(1465): n is a, c, g, or t
  misc_feature (1517)..(1517): n is a, c, g, or t

SEQ ID NO: 107215 - DNA, 783 bp, Homo Sapiens; identical to SEQ ID NO: 72344
  misc_feature (465)..(503): n is a, c, g, or t

SEQ ID NO: 107216 - DNA, 1986 bp, Homo Sapiens; identical to SEQ ID NO: 72347

SEQ ID NO: 107217 - DNA, 861 bp, Homo Sapiens; identical to SEQ ID NO: 72348
  misc_feature (810)..(810): n is a, c, g, or t

SEQ ID NO: 107218 - DNA, 1322 bp, Homo Sapiens; identical to SEQ ID NO: 72350

SEQ ID NO: 107219 - DNA, 292 bp, Homo Sapiens; identical to SEQ ID NO: 72351
  misc_feature (143)..(151): n is a, c, g, or t

SEQ ID NO: 107220 - DNA, 2123 bp, Homo Sapiens; identical to SEQ ID NO: 72352

SEQ ID NO: 107221 - DNA, 616 bp, Homo Sapiens; identical to SEQ ID NO: 72353
  misc_feature (185)..(185): n is a, c, g, or t
  misc_feature (187)..(188): n is a, c, g, or t
  misc_feature (194)..(194): n is a, c, g, or t

SEQ ID NO: 107222 - DNA, 589 bp, Homo Sapiens; identical to SEQ ID NO: 72356
  misc_feature (62)..(62): n is a, c, g, or t
  misc_feature (114)..(209): n is a, c, g, or t
  misc_feature (219)..(243): n is a, c, g, or t

SEQ ID NO: 107223 - DNA, 725 bp, Homo Sapiens; identical to SEQ ID NO: 72357
  misc_feature (254)..(349): n is a, c, g, or t
  misc_feature (359)..(383): n is a, c, g, or t

SEQ ID NO: 107224 - DNA, 1457 bp, Homo Sapiens; identical to SEQ ID NO: 72358

SEQ ID NO: 107225 - DNA, 1559 bp, Homo Sapiens; identical to SEQ ID NO: 72359
  misc_feature (1198)..(1222): n is a, c, g, or t

SEQ ID NO: 107226 - DNA, 1734 bp, Homo Sapiens; identical to SEQ ID NO: 72360
  misc_feature (499)..(500): n is a, c, g, or t

SEQ ID NO: 107227 - DNA, 885 bp, Homo Sapiens; identical to SEQ ID NO: 72361

SEQ ID NO: 107228 - DNA, 1499 bp, Homo Sapiens; identical to SEQ ID NO: 72365
  misc_feature (1308)..(1416): n is a, c, g, or t

SEQ ID NO: 107229 - DNA, 622 bp, Homo Sapiens; identical to SEQ ID NO: 72366
  misc_feature (433)..(539): n is a, c, g, or t

SEQ ID NO: 107230 - DNA, 580 bp, Homo Sapiens; identical to SEQ ID NO: 72374
  misc_feature (141)..(176): n is a, c, g, or t

SEQ ID NO: 107231 - DNA, 595 bp, Homo Sapiens; identical to SEQ ID NO: 72375

SEQ ID NO: 107232 - DNA, 3523 bp, Homo Sapiens; identical to SEQ ID NO: 72376
  misc_feature (1403)..(1417): n is a, c, g, or t
  misc_feature (3348)..(3348): n is a, c, g, or t
  misc_feature (3353)..(3353): n is a, c, g, or t
  misc_feature (3357)..(3357): n is a, c, g, or t
  misc_feature (3365)..(3365): n is a, c, g, or t

SEQ ID NO: 107233 - DNA, 444 bp, Homo Sapiens; identical to SEQ ID NO: 72377

SEQ ID NO: 107234 - DNA, 1621 bp, Homo Sapiens; identical to SEQ ID NO: 72381

SEQ ID NO: 107235 - DNA, 1419 bp, Homo Sapiens; identical to SEQ ID NO: 72382

SEQ ID NO: 107236 - DNA, 1038 bp, Homo Sapiens; identical to SEQ ID NO: 72385

SEQ ID NO: 107237 - DNA, 1024 bp, Homo Sapiens; identical to SEQ ID NO: 72386
  misc_feature (35)..(35): n is a, c, g, or t
  misc_feature (48)..(48): n is a, c, g, or t
  misc_feature (185)..(185): n is a, c, g, or t
  misc_feature (420)..(421): n is a, c, g, or t

SEQ ID NO: 107238 - DNA, 1163 bp, Homo Sapiens; identical to SEQ ID NO: 72387
  misc_feature (1101)..(1101): n is a, c, g, or t

SEQ ID NO: 107239 - DNA, 719 bp, Homo Sapiens; identical to SEQ ID NO: 72389
  misc_feature (35)..(35): n is a, c, g, or t
  misc_feature (66)..(67): n is a, c, g, or t
  misc_feature (92)..(92): n is a, c, g, or t

SEQ ID NO: 107240 - DNA, 1118 bp, Homo Sapiens; identical to SEQ ID NO: 72390
  misc_feature (988)..(996): n is a, c, g, or t

SEQ ID NO: 107241 - DNA, 710 bp, Homo Sapiens; identical to SEQ ID NO: 72391
  misc_feature (238)..(238): n is a, c, g, or t

SEQ ID NO: 107242 - DNA, 1241 bp, Homo Sapiens; identical to SEQ ID NO: 72392
  misc_feature (600)..(600): n is a, c, g, or t

SEQ ID NO: 107243 - DNA, 871 bp, Homo Sapiens; identical to SEQ ID NO: 72395

SEQ ID NO: 107244 - DNA, 2279 bp, Homo Sapiens; identical to SEQ ID NO: 72396
  misc_feature (1321)..(1436): n is a, c, g, or t
  misc_feature (1440)..(1440): n is a, c, g, or t
  misc_feature (1598)..(1608): n is a, c, g, or t
  misc_feature (1994)..(1994): n is a, c, g, or t
  misc_feature (2058)..(2058): n is a, c, g, or t

SEQ ID NO: 107245 - DNA, 861 bp, Homo Sapiens; identical to SEQ ID NO: 72397
  misc_feature (255)..(446): n is a, c, g, or t
  misc_feature (449)..(531): n is a, c, g, or t
  misc_feature (631)..(641): n is a, c, g, or t

SEQ ID NO: 107246 - DNA, 1251 bp, Homo Sapiens; identical to SEQ ID NO: 72398
  misc_feature (597)..(624): n is a, c, g, or t

SEQ ID NO: 107247 - DNA, 1094 bp, Homo Sapiens; identical to SEQ ID NO: 72399

SEQ ID NO: 107248 - DNA, 1432 bp, Homo Sapiens; identical to SEQ ID NO: 72400
  misc_feature (46)..(56): n is a, c, g, or t
  misc_feature (93)..(93): n is a, c, g, or t

SEQ ID NO: 107249 - DNA, 284 bp, Homo Sapiens; identical to SEQ ID NO: 72401

SEQ ID NO: 107250 - DNA, 667 bp, Homo Sapiens; identical to SEQ ID NO: 72405
  misc_feature (290)..(569): n is a, c, g, or t
  misc_feature (572)..(572): n is a, c, g, or t

SEQ ID NO: 107251 - DNA, 948 bp, Homo Sapiens; identical to SEQ ID NO: 72406
  misc_feature (646)..(673): n is a, c, g, or t

SEQ ID NO: 107252 - DNA, 1175 bp, Homo Sapiens; identical to SEQ ID NO: 72410
  misc_feature (1090)..(1101): n is a, c, g, or t

SEQ ID NO: 107253 - DNA, 654 bp, Homo Sapiens; identical to SEQ ID NO: 72411
  misc_feature (572)..(583): n is a, c, g, or t

SEQ ID NO: 107254 - DNA, 1142 bp, Homo Sapiens; identical to SEQ ID NO: 72412
  misc_feature (940)..(940): n is a, c, g, or t

SEQ ID NO: 107255 - DNA, 836 bp, Homo Sapiens; identical to SEQ ID NO: 72413
  misc_feature (136)..(187): n is a, c, g, or t
  misc_feature (476)..(563): n is a, c, g, or t
  misc_feature (630)..(630): n is a, c, g, or t
  misc_feature (826)..(826): n is a, c, g, or t

SEQ ID NO: 107256 - DNA, 944 bp, Homo Sapiens; identical to SEQ ID NO: 72414

SEQ ID NO: 107257 - DNA, 1609 bp, Homo Sapiens; identical to SEQ ID NO: 72417
  misc_feature (437)..(445): n is a, c, g, or t
  misc_feature (717)..(737): n is a, c, g, or t
  misc_feature (845)..(1043): n is a, c, g, or t
  misc_feature (1447)..(1447): n is a, c, g, or t

SEQ ID NO: 107258 - DNA, 700 bp, Homo Sapiens; identical to SEQ ID NO: 72418
  misc_feature (78)..(133): n is a, c, g, or t
  misc_feature (417)..(417): n is a, c, g, or t

SEQ ID NO: 107259 - DNA, 1150 bp, Homo Sapiens; identical to SEQ ID NO: 72419
  misc_feature (820)..(875): n is a, c, g, or t

SEQ ID NO: 107260 - DNA, 632 bp, Homo Sapiens; identical to SEQ ID NO: 72422
  misc_feature (51)..(51): n is a, c, g, or t
  misc_feature (57)..(114): n is a, c, g, or t

SEQ ID NO: 107261 - DNA, 912 bp, Homo Sapiens; identical to SEQ ID NO: 72423
  misc_feature (860)..(860): n is a, c, g, or t

SEQ ID NO: 107262 - DNA, 378 bp, Homo Sapiens; identical to SEQ ID NO: 72424

SEQ ID NO: 107263 - DNA, 1243 bp, Homo Sapiens; identical to SEQ ID NO: 72425
  misc_feature (636)..(680): n is a, c, g, or t

SEQ ID NO: 107264 - DNA, 925 bp, Homo Sapiens; identical to SEQ ID NO: 72426

SEQ ID NO: 107265 - DNA, 695 bp, Homo Sapiens; identical to SEQ ID NO: 72427
  misc_feature (73)..(73): n is a, c, g, or t
  misc_feature (129)..(181): n is a, c, g, or t
  misc_feature (590)..(613): n is a, c, g, or t

SEQ ID NO: 107266 - DNA, 1010 bp, Homo Sapiens; identical to SEQ ID NO: 72428
  misc_feature (523)..(569): n is a, c, g, or t

SEQ ID NO: 107267 - DNA, 1051 bp, Homo Sapiens; identical to SEQ ID NO: 72429
  misc_feature (25)..(25): n is a, c, g, or t
  misc_feature (602)..(658): n is a, c, g, or t
  misc_feature (667)..(667): n is a, c, g, or t
  misc_feature (698)..(698): n is a, c, g, or t
  misc_feature (717)..(717): n is a, c, g, or t

SEQ ID NO: 107268 - DNA, 1066 bp, Homo Sapiens; identical to SEQ ID NO: 72430
  misc_feature (400)..(458): n is a, c, g, or t
  misc_feature (1054)..(1054): n is a, c, g, or t

SEQ ID NO: 107269 - DNA, 1560 bp, Homo Sapiens; identical to SEQ ID NO: 72431
  misc_feature (1448)..(1482): n is a, c, g, or t

SEQ ID NO: 107270 - DNA, 1011 bp, Homo Sapiens; identical to SEQ ID NO: 72432
  misc_feature (46)..(84): n is a, c, g, or t
  misc_feature (88)..(122): n is a, c, g, or t

SEQ ID NO: 107271 - DNA, 1276 bp, Homo Sapiens; identical to SEQ ID NO: 72433
  misc_feature (83)..(117): n is a, c, g, or t

SEQ ID NO: 107272 - DNA, 1893 bp, Homo Sapiens; identical to SEQ ID NO: 72438
  misc_feature (1815)..(1834): n is a, c, g, or t

SEQ ID NO: 107273 - DNA, 1004 bp, Homo Sapiens; identical to SEQ ID NO: 72439
  misc_feature (744)..(744): n is a, c, g, or t
  misc_feature (851)..(851): n is a, c, g, or t
  misc_feature (864)..(865): n is a, c, g, or t
  misc_feature (920)..(920): n is a, c, g, or t
  misc_feature (973)..(973): n is a, c, g, or t
  misc_feature (978)..(978): n is a, c, g, or t

SEQ ID NO: 107274 - DNA, 1222 bp, Homo Sapiens; identical to SEQ ID NO: 72440
  misc_feature (22)..(22): n is a, c, g, or t

SEQ ID NO: 107275 - DNA, 2183 bp, Homo Sapiens; identical to SEQ ID NO: 72441

SEQ ID NO: 107276 - DNA, 1521 bp, Homo Sapiens; identical to SEQ ID NO: 72442
  misc_feature (1057)..(1057): n is a, c, g, or t
  misc_feature (1405)..(1420): n is a, c, g, or t

SEQ ID NO: 107277 - DNA, 735 bp, Homo Sapiens; identical to SEQ ID NO: 72450
  misc_feature (647)..(647): n is a, c, g, or t

SEQ ID NO: 107278 - DNA, 976 bp, Homo Sapiens; identical to SEQ ID NO: 72451
  misc_feature (190)..(190): n is a, c, g, or t
  misc_feature (232)..(232): n is a, c, g, or t

SEQ ID NO: 107279 - DNA, 1413 bp, Homo Sapiens; identical to SEQ ID NO: 72453
  misc_feature (457)..(458): n is a, c, g, or t
  misc_feature (665)..(671): n is a, c, g, or t
  misc_feature (674)..(674): n is a, c, g, or t
  misc_feature (697)..(749): n is a, c, g, or t
  misc_feature (790)..(790): n is a, c, g, or t
  misc_feature (795)..(810): n is a, c, g, or t
  misc_feature (812)..(812): n is a, c, g, or t
  misc_feature (826)..(839): n is a, c, g, or t
  misc_feature (968)..(988): n is a, c, g, or t
  misc_feature (997)..(1005): n is a, c, g, or t
  misc_feature (1080)..(1088): n is a, c, g, or t
  misc_feature (1278)..(1278): n is a, c, g, or t
  misc_feature (1307)..(1322): n is a, c, g, or t

SEQ ID NO: 107280 - DNA, 709 bp, Homo Sapiens; identical to SEQ ID NO: 72454
  misc_feature (625)..(663): n is a, c, g, or t

SEQ ID NO: 107281 - DNA, 712 bp, Homo Sapiens; identical to SEQ ID NO: 72455

SEQ ID NO: 107282 - DNA, 1479 bp, Homo Sapiens; identical to SEQ ID NO: 72456

SEQ ID NO: 107283 - DNA, 1070 bp, Homo Sapiens; identical to SEQ ID NO: 72457
  misc_feature (25)..(25): n is a, c, g, or t
  misc_feature (48)..(49): n is a, c, g, or t
  misc_feature (52)..(52): n is a, c, g, or t
  misc_feature (55)..(55): n is a, c, g, or t
  misc_feature (65)..(65): n is a, c, g, or t
  misc_feature (67)..(67): n is a, c, g, or t
  misc_feature (69)..(69): n is a, c, g, or t
  misc_feature (78)..(78): n is a, c, g, or t
  misc_feature (83)..(84): n is a, c, g, or t
  misc_feature (87)..(87): n is a, c, g, or t
  misc_feature (89)..(89): n is a, c, g, or t
  misc_feature (97)..(98): n is a, c, g, or t
  misc_feature (106)..(106): n is a, c, g, or t
  misc_feature (128)..(128): n is a, c, g, or t
  misc_feature (172)..(172): n is a, c, g, or t
  misc_feature (187)..(187): n is a, c, g, or t
  misc_feature (259)..(259): n is a, c, g, or t
  misc_feature (277)..(277): n is a, c, g, or t
  misc_feature (346)..(347): n is a, c, g, or t

SEQ ID NO: 107284 - DNA, 914 bp, Homo Sapiens; identical to SEQ ID NO: 72458
  misc_feature (236)..(250): n is a, c, g, or t

SEQ ID NO: 107285 - DNA, 848 bp, Homo Sapiens; identical to SEQ ID NO: 72460

SEQ ID NO: 107286 - DNA, 907 bp, Homo Sapiens; identical to SEQ ID NO: 72461
  misc_feature (799)..(799): n is a, c, g, or t

SEQ ID NO: 107287 - DNA, 1088 bp, Homo Sapiens; identical to SEQ ID NO: 72462

SEQ ID NO: 107288 - DNA, 489 bp, Homo Sapiens; identical to SEQ ID NO: 72463

SEQ ID NO: 107289 - DNA, 646 bp, Homo Sapiens; identical to SEQ ID NO: 72465
  misc_feature (615)..(615): n is a, c, g, or t

SEQ ID NO: 107290 - DNA, 432 bp, Homo Sapiens; identical to SEQ ID NO: 72466

SEQ ID NO: 107291 - DNA, 674 bp, Homo Sapiens; identical to SEQ ID NO: 72467
  misc_feature (49)..(49): n is a, c, g, or t
  misc_feature (79)..(79): n is a, c, g, or t
  misc_feature (92)..(92): n is a, c, g, or t

SEQ ID NO: 107292 - DNA, 753 bp, Homo Sapiens; identical to SEQ ID NO: 72468

SEQ ID NO: 107293 - DNA, 904 bp, Homo Sapiens; identical to SEQ ID NO: 72469

SEQ ID NO: 107294 - DNA, 579 bp, Homo Sapiens; identical to SEQ ID NO: 72471

SEQ ID NO: 107295 - DNA, 508 bp, Homo Sapiens; identical to SEQ ID NO: 72472
  misc_feature (40)..(40): n is a, c, g, or t
  misc_feature (44)..(44): n is a, c, g, or t
  misc_feature (48)..(48): n is a, c, g, or t
  misc_feature (51)..(51): n is a, c, g, or t
  misc_feature (70)..(70): n is a, c, g, or t
  misc_feature (117)..(117): n is a, c, g, or t
  misc_feature (126)..(127): n is a, c, g, or t
  misc_feature (268)..(297): n is a, c, g, or t

SEQ ID NO: 107296 - DNA, 585 bp, Homo Sapiens; identical to SEQ ID NO: 72473
  misc_feature (83)..(169): n is a, c, g, or t
  misc_feature (285)..(334): n is a, c, g, or t

SEQ ID NO: 107297 - DNA, 573 bp, Homo Sapiens; identical to SEQ ID NO: 72474
  misc_feature (84)..(170): n is a, c, g, or t
  misc_feature (286)..(335): n is a, c, g, or t

SEQ ID NO: 107298 - DNA, 1869 bp, Homo Sapiens; identical to SEQ ID NO: 72476
  misc_feature (12)..(12): n is a, c, g, or t
  misc_feature (155)..(155): n is a, c, g, or t
  misc_feature (160)..(160): n is a, c, g, or t
  misc_feature (181)..(340): n is a, c, g, or t
  misc_feature (525)..(549): n is a, c, g, or t
  misc_feature (1014)..(1032): n is a, c, g, or t
  misc_feature (1074)..(1699): n is a, c, g, or t
  misc_feature (1746)..(1746): n is a, c, g, or t

SEQ ID NO: 107299 - DNA, 1059 bp, Homo Sapiens; identical to SEQ ID NO: 72477

SEQ ID NO: 107300 - DNA, 1386 bp, Homo Sapiens; identical to SEQ ID NO: 72478
  misc_feature (677)..(735): n is a, c, g, or t

SEQ ID NO: 107301 - DNA, 984 bp, Homo Sapiens; identical to SEQ ID NO: 72479
  misc_feature (847)..(855): n is a, c, g, or t

SEQ ID NO: 107302 - DNA, 708 bp, Homo Sapiens; identical to SEQ ID NO: 72482

SEQ ID NO: 107303 - DNA, 937 bp, Homo Sapiens; identical to SEQ ID NO: 72483

SEQ ID NO: 107304 - DNA, 695 bp, Homo Sapiens; identical to SEQ ID NO: 72484

SEQ ID NO: 107305 - DNA, 1261 bp, Homo Sapiens; identical to SEQ ID NO: 72486
  misc_feature (75)..(75): n is a, c, g, or t

SEQ ID NO: 107306 - DNA, 1119 bp, Homo Sapiens; identical to SEQ ID NO: 72487
  misc_feature (816)..(816): n is a, c, g, or t

SEQ ID NO: 107307 - DNA, 1171 bp, Homo Sapiens; identical to SEQ ID NO: 72491
  misc_feature (1110)..(1130): n is a, c, g, or t

SEQ ID NO: 107308 - DNA, 1151 bp, Homo Sapiens; identical to SEQ ID NO: 72492
  misc_feature (42)..(86): n is a, c, g, or t
  misc_feature (90)..(124): n is a, c, g, or t

SEQ ID NO: 107309 - DNA, 948 bp, Homo Sapiens; identical to SEQ ID NO: 72493
  misc_feature (741)..(741): n is a, c, g, or t
  misc_feature (840)..(840): n is a, c, g, or t
  misc_feature (892)..(892): n is a, c, g, or t
  misc_feature (900)..(900): n is a, c, g, or t

SEQ ID NO: 107310 - DNA, 754 bp, Homo Sapiens; identical to SEQ ID NO: 72500
  misc_feature (15)..(15): n is a, c, g, or t
  misc_feature (23)..(23): n is a, c, g, or t

SEQ ID NO: 107311 - DNA, 685 bp, Homo Sapiens; identical to SEQ ID NO: 72501

SEQ ID NO: 107312 - DNA, 1379 bp, Homo Sapiens; identical to SEQ ID NO: 72502

SEQ ID NO: 107313 - DNA, 511 bp, Homo Sapiens; identical to SEQ ID NO: 72503

SEQ ID NO: 107314 - DNA, 1122 bp, Homo Sapiens; identical to SEQ ID NO: 72508

SEQ ID NO: 107315 - DNA, 962 bp, Homo Sapiens; identical to SEQ ID NO: 72509
  misc_feature (510)..(510): n is a, c, g, or t

SEQ ID NO: 107316 - DNA, 925 bp, Homo Sapiens; identical to SEQ ID NO: 72510
  misc_feature (815)..(815): n is a, c, g, or t

SEQ ID NO: 107317 - DNA, 2194 bp, Homo Sapiens; identical to SEQ ID NO: 72511
  misc_feature (1628)..(1658): n is a, c, g, or t
  misc_feature (1900)..(1900): n is a, c, g, or t
  misc_feature (2046)..(2054): n is a, c, g, or t

SEQ ID NO: 107318 - DNA, 2869 bp, Homo Sapiens; identical to SEQ ID NO: 72520
  misc_feature (2786)..(2810): n is a, c, g, or t

SEQ ID NO: 107319 - DNA, 890 bp, Homo Sapiens; identical to SEQ ID NO: 72521
  misc_feature (11)..(11): n is a, c, g, or t
  misc_feature (103)..(103): n is a, c, g, or t
  misc_feature (172)..(172): n is a, c, g, or t
  misc_feature (192)..(192): n is a, c, g, or t

SEQ ID NO: 107320 - DNA, 1142 bp, Homo Sapiens; identical to SEQ ID NO: 72522

SEQ ID NO: 107321 - DNA, 657 bp, Homo Sapiens; identical to SEQ ID NO: 72523
  misc_feature (28)..(28): n is a, c, g, or t

SEQ ID NO: 107322 - DNA, 990 bp, Homo Sapiens; identical to SEQ ID NO: 72524

SEQ ID NO: 107323 - DNA, 591 bp, Homo Sapiens; identical to SEQ ID NO: 72527
  misc_feature (354)..(409): n is a, c, g, or t

SEQ ID NO: 107324 - DNA, 684 bp, Homo Sapiens; identical to SEQ ID NO: 72528
  misc_feature (26)..(26): n is a, c, g, or t
  misc_feature (360)..(445): n is a, c, g, or t

SEQ ID NO: 107325 - DNA, 2070 bp, Homo Sapiens; identical to SEQ ID NO: 72529
  misc_feature (1833)..(1889): n is a, c, g, or t

SEQ ID NO: 107326 - DNA, 1648 bp, Homo Sapiens; identical to SEQ ID NO: 72533
  misc_feature (71)..(88): n is a, c, g, or t

SEQ ID NO: 107327 - DNA, 925 bp, Homo Sapiens; identical to SEQ ID NO: 72534

SEQ ID NO: 107328 - DNA, 1816 bp, Homo Sapiens; identical to SEQ ID NO: 72535
  misc_feature (1711)..(1711): n is a, c, g, or t
  misc_feature (1793)..(1794): n is a, c, g, or t

SEQ ID NO: 107329 - DNA, 950 bp, Homo Sapiens; identical to SEQ ID NO: 72545

SEQ ID NO: 107330 - DNA, 1289 bp, Homo Sapiens; identical to SEQ ID NO: 72546
  misc_feature (1163)..(1181): n is a, c, g, or t
  misc_feature (1206)..(1245): n is a, c, g, or t
  misc_feature (1269)..(1269): n is a, c, g, or t

SEQ ID NO: 107331 - DNA, 719 bp, Homo Sapiens; identical to SEQ ID NO: 72547

SEQ ID NO: 107332 - DNA, 777 bp, Homo Sapiens; identical to SEQ ID NO: 72548

SEQ ID NO: 107333 - DNA, 640 bp, Homo Sapiens; identical to SEQ ID NO: 72556

SEQ ID NO: 107334 - DNA, 965 bp, Homo Sapiens; identical to SEQ ID NO: 72557
  misc_feature (859)..(878): n is a, c, g, or t
  misc_feature (880)..(884): n is a, c, g, or t

SEQ ID NO: 107335 - DNA, 1019 bp, Homo Sapiens; identical to SEQ ID NO: 72558
  misc_feature (983)..(983): n is a, c, g, or t
  misc_feature (989)..(989): n is a, c, g, or t

SEQ ID NO: 107336 - DNA, 170 bp, Homo Sapiens; identical to SEQ ID NO: 72562

SEQ ID NO: 107337 - DNA, 1395 bp, Homo Sapiens; identical to SEQ ID NO: 72563

SEQ ID NO: 107338 - DNA, 893 bp, Homo Sapiens; identical to SEQ ID NO: 72564

SEQ ID NO: 107339 - DNA, 266 bp, Homo Sapiens; identical to SEQ ID NO: 72569

SEQ ID NO: 107340 - DNA, 802 bp, Homo Sapiens; identical to SEQ ID NO: 72570

SEQ ID NO: 107341 - DNA, 836 bp, Homo Sapiens; identical to SEQ ID NO: 72571

SEQ ID NO: 107342 - DNA, 687 bp, Homo Sapiens; identical to SEQ ID NO: 72574

SEQ ID NO: 107343 - DNA, 717 bp, Homo Sapiens; identical to SEQ ID NO: 72575

SEQ ID NO: 107344 - DNA, 610 bp, Homo Sapiens; identical to SEQ ID NO: 72576

SEQ ID NO: 107345 - DNA, 734 bp, Homo Sapiens; identical to SEQ ID NO: 72577

SEQ ID NO: 107346 - DNA, 1327 bp, Homo Sapiens; identical to SEQ ID NO: 72578

SEQ ID NO: 107347 - DNA, 674 bp, Homo Sapiens; identical to SEQ ID NO: 72579
  misc_feature (37)..(37): n is a, c, g, or t

SEQ ID NO: 107348 - DNA, 1592 bp, Homo Sapiens; identical to SEQ ID NO: 72583

SEQ ID NO: 107349 - DNA, 1473 bp, Homo Sapiens; identical to SEQ ID NO: 72584
  misc_feature (1303)..(1303): n is a, c, g, or t
  misc_feature (1308)..(1309): n is a, c, g, or t
  misc_feature (1355)..(1355): n is a, c, g, or t
  misc_feature (1362)..(1362): n is a, c, g, or t
  misc_feature (1440)..(1441): n is a, c, g, or t

SEQ ID NO: 107350 - DNA, 868 bp, Homo Sapiens; identical to SEQ ID NO: 72585
  misc_feature (65)..(65): n is a, c, g, or t

SEQ ID NO: 107351 - DNA, 1162 bp, Homo Sapiens; identical to SEQ ID NO: 72588

SEQ ID NO: 107352 - DNA, 1939 bp, Homo Sapiens; identical to SEQ ID NO: 72589
  misc_feature (1650)..(1699): n is a, c, g, or t
  misc_feature (1708)..(1747): n is a, c, g, or t

SEQ ID NO: 107353 - DNA, 877 bp, Homo Sapiens; identical to SEQ ID NO: 72602
  misc_feature (42)..(42): n is a, c, g, or t
  misc_feature (80)..(121): n is a, c, g, or t
  misc_feature (432)..(504): n is a, c, g, or t

SEQ ID NO: 107354 - DNA, 1493 bp, Homo Sapiens; identical to SEQ ID NO: 72603
  misc_feature (794)..(824): n is a, c, g, or t
  misc_feature (950)..(1009): n is a, c, g, or t
  misc_feature (1030)..(1030): n is a, c, g, or t

SEQ ID NO: 107355 - DNA, 974 bp, Homo Sapiens; identical to SEQ ID NO: 72604
  misc_feature (608)..(668): n is a, c, g, or t

SEQ ID NO: 107356 - DNA, 1446 bp, Homo Sapiens; identical to SEQ ID NO: 72605
  misc_feature (768)..(840): n is a, c, g, or t
  misc_feature (943)..(946): n is a, c, g, or t
  misc_feature (948)..(957): n is a, c, g, or t
  misc_feature (961)..(965): n is a, c, g, or t
  misc_feature (969)..(1006): n is a, c, g, or t
  misc_feature (1009)..(1010): n is a, c, g, or t
  misc_feature (1170)..(1196): n is a, c, g, or t
  misc_feature (1373)..(1373): n is a, c, g, or t

SEQ ID NO: 107357 - DNA, 2265 bp, Homo Sapiens; identical to SEQ ID NO: 72606
  misc_feature (545)..(603): n is a, c, g, or t
  misc_feature (701)..(731): n is a, c, g, or t
  misc_feature (822)..(888): n is a, c, g, or t
  misc_feature (2085)..(2085): n is a, c, g, or t
  misc_feature (2098)..(2098): n is a, c, g, or t
  misc_feature (2135)..(2136): n is a, c, g, or t
  misc_feature (2207)..(2208): n is a, c, g, or t
  misc_feature (2232)..(2232): n is a, c, g, or t

SEQ ID NO: 107358 - DNA, 1003 bp, Homo Sapiens; identical to SEQ ID NO: 72607
  misc_feature (711)..(772): n is a, c, g, or t
  misc_feature (873)..(873): n is a, c, g, or t
  misc_feature (878)..(943): n is a, c, g, or t
  misc_feature (970)..(971): n is a, c, g, or t

SEQ ID NO: 107359 - DNA, 1233 bp, Homo Sapiens; identical to SEQ ID NO: 72608
  misc_feature (96)..(96): n is a, c, g, or t
  misc_feature (301)..(301): n is a, c, g, or t
  misc_feature (532)..(582): n is a, c, g, or t
  misc_feature (894)..(966): n is a, c, g, or t
  misc_feature (1074)..(1092): n is a, c, g, or t
  misc_feature (1094)..(1096): n is a, c, g, or t
  misc_feature (1098)..(1098): n is a, c, g, or t
  misc_feature (1101)..(1101): n is a, c, g, or t
  misc_feature (1104)..(1104): n is a, c, g, or t
  misc_feature (1106)..(1106): n is a, c, g, or t
  misc_feature (1109)..(1109): n is a, c, g, or t
  misc_feature (1111)..(1111): n is a, c, g, or t
  misc_feature (1119)..(1119): n is a, c, g, or t
  misc_feature (1124)..(1125): n is a, c, g, or t
  misc_feature (1133)..(1133): n is a, c, g, or t
  misc_feature (1138)..(1138): n is a, c, g, or t
  misc_feature (1143)..(1144): n is a, c, g, or t
  misc_feature (1147)..(1147): n is a, c, g, or t
  misc_feature (1150)..(1150): n is a, c, g, or t
  misc_feature (1152)..(1152): n is a, c, g, or t
  misc_feature (1163)..(1163): n is a, c, g, or t

SEQ ID NO: 107360 - DNA, 881 bp, Homo Sapiens; identical to SEQ ID NO: 72609
  misc_feature (99)..(191): n is a, c, g, or t
  misc_feature (346)..(405): n is a, c, g, or t
  misc_feature (729)..(729): n is a, c, g, or t

SEQ ID NO: 107361 - DNA, 1480 bp, Homo Sapiens; identical to SEQ ID NO: 72616
  misc_feature (147)..(188): n is a, c, g, or t

SEQ ID NO: 107362 - DNA, 333 bp, Homo Sapiens; identical to SEQ ID NO: 72617
  misc_feature (155)..(196): n is a, c, g, or t

SEQ ID NO: 107363 - DNA, 1035 bp, Homo Sapiens; identical to SEQ ID NO: 72619
  misc_feature (66)..(592): n is a, c, g, or t

SEQ ID NO: 107364 - DNA, 984 bp, Homo Sapiens; identical to SEQ ID NO: 72620
  misc_feature (74)..(83): n is a, c, g, or t
  misc_feature (526)..(539): n is a, c, g, or t

SEQ ID NO: 107365 - DNA, 2667 bp, Homo Sapiens; identical to SEQ ID NO: 72621
  misc_feature (235)..(282): n is a, c, g, or t

SEQ ID NO: 107366 - DNA, 428 bp, Homo Sapiens; identical to SEQ ID NO: 72622

SEQ ID NO: 107367 - DNA, 776 bp, Homo Sapiens; identical to SEQ ID NO: 72623

SEQ ID NO: 107368 - DNA, 795 bp, Homo Sapiens; identical to SEQ ID NO: 72624

SEQ ID NO: 107369 - DNA, 873 bp, Homo Sapiens; identical to SEQ ID NO: 72625
  misc_feature (389)..(445): n is a, c, g, or t
  misc_feature (685)..(685): n is a, c, g, or t
  misc_feature (721)..(721): n is a, c, g, or t
  misc_feature (748)..(748): n is a, c, g, or t

SEQ ID NO: 107370 - DNA, 879 bp, Homo Sapiens; identical to SEQ ID NO: 72626

SEQ ID NO: 107371 - DNA, 1083 bp, Homo Sapiens; identical to SEQ ID NO: 72627
  misc_feature (94)..(94): n is a, c, g, or t

SEQ ID NO: 107372 - DNA, 2152 bp, Homo Sapiens; identical to SEQ ID NO: 72628
  misc_feature (1390)..(1401): n is a, c, g, or t
  misc_feature (1603)..(1613): n is a, c, g, or t
  misc_feature (1836)..(1844): n is a, c, g, or t
  misc_feature (1954)..(1954): n is a, c, g, or t

SEQ ID NO: 107373 - DNA, 1412 bp, Homo Sapiens; identical to SEQ ID NO: 72638

SEQ ID NO: 107374 - DNA, 980 bp, Homo Sapiens; identical to SEQ ID NO: 72639
  misc_feature (908)..(908): n is a, c, g, or t

SEQ ID NO: 107375 - DNA, 1223 bp, Homo Sapiens; identical to SEQ ID NO: 72640

SEQ ID NO: 107376 - DNA, 2297 bp, Homo Sapiens; identical to SEQ ID NO: 72641
  misc_feature (1969)..(1998): n is a, c, g, or t
  misc_feature (2260)..(2260): n is a, c, g, or t

SEQ ID NO: 107377 - DNA, 791 bp, Homo Sapiens; identical to SEQ ID NO: 72642
  misc_feature (718)..(736): n is a, c, g, or t

SEQ ID NO: 107378 - DNA, 1496 bp, Homo Sapiens; identical to SEQ ID NO: 72643
  misc_feature (769)..(780): n is a, c, g, or t
  misc_feature (969)..(1044): n is a, c, g, or t
  misc_feature (1324)..(1380): n is a, c, g, or t

SEQ ID NO: 107379 - DNA, 421 bp, Homo Sapiens; identical to SEQ ID NO: 72644
  misc_feature (117)..(173): n is a, c, g, or t

SEQ ID NO: 107380 - DNA, 2231 bp, Homo Sapiens; identical to SEQ ID NO: 72645
  misc_feature (148)..(156): n is a, c, g, or t
  misc_feature (185)..(274): n is a, c, g, or t
  misc_feature (708)..(747): n is a, c, g, or t
  misc_feature (1433)..(1444): n is a, c, g, or t
  misc_feature (1635)..(1710): n is a, c, g, or t

SEQ ID NO: 107381 - DNA, 495 bp, Homo Sapiens; identical to SEQ ID NO: 72646
  misc_feature (117)..(173): n is a, c, g, or t
  misc_feature (458)..(458): n is a, c, g, or t
  misc_feature (461)..(461): n is a, c, g, or t
  misc_feature (464)..(464): n is a, c, g, or t

SEQ ID NO: 107382 - DNA, 255 bp, Homo Sapiens; identical to SEQ ID NO: 72647
  misc_feature (81)..(137): n is a, c, g, or t

SEQ ID NO: 107383 - DNA, 439 bp, Homo Sapiens; identical to SEQ ID NO: 72648
  misc_feature (117)..(173): n is a, c, g, or t

SEQ ID NO: 107384 - DNA, 416 bp, Homo Sapiens; identical to SEQ ID NO: 72649
  misc_feature (117)..(173): n is a, c, g, or t

SEQ ID NO: 107385 - DNA, 1487 bp, Homo Sapiens; identical to SEQ ID NO: 72650
  misc_feature (259)..(326): n is a, c, g, or t
  misc_feature (942)..(969): n is a, c, g, or t

SEQ ID NO: 107386 - DNA, 569 bp, Homo Sapiens; identical to SEQ ID NO: 72651
  misc_feature (471)..(517): n is a, c, g, or t

SEQ ID NO: 107387 - DNA, 223 bp, Homo Sapiens; identical to SEQ ID NO: 72652

SEQ ID NO: 107388 - DNA, 405 bp, Homo Sapiens; identical to SEQ ID NO: 72653

SEQ ID NO: 107389 - DNA, 452 bp, Homo Sapiens; identical to SEQ ID NO: 72654
  misc_feature (280)..(336): n is a, c, g, or t

SEQ ID NO: 107390 - DNA, 1082 bp, Homo Sapiens; identical to SEQ ID NO: 72657
  misc_feature (1001)..(1036): n is a, c, g, or t

SEQ ID NO: 107391 - DNA, 2190 bp, Homo Sapiens; identical to SEQ ID NO: 72658
  misc_feature (1391)..(1405): n is a, c, g, or t
  misc_feature (2010)..(2128): n is a, c, g, or t

SEQ ID NO: 107392 - DNA, 276 bp, Homo Sapiens; identical to SEQ ID NO: 72659

SEQ ID NO: 107393 - DNA, 1057 bp, Homo Sapiens; identical to SEQ ID NO: 72663
  misc_feature (23)..(23): n is a, c, g, or t
  misc_feature (92)..(92): n is a, c, g, or t
  misc_feature (106)..(106): n is a, c, g, or t
  misc_feature (164)..(164): n is a, c, g, or t
  misc_feature (179)..(179): n is a, c, g, or t
  misc_feature (250)..(250): n is a, c, g, or t
  misc_feature (253)..(253): n is a, c, g, or t
  misc_feature (314)..(315): n is a, c, g, or t
  misc_feature (334)..(334): n is a, c, g, or t
  misc_feature (810)..(848): n is a, c, g, or t

SEQ ID NO: 107394 - DNA, 1347 bp, Homo Sapiens; identical to SEQ ID NO: 72664
  misc_feature (1229)..(1246): n is a, c, g, or t

SEQ ID NO: 107395 - DNA, 1295 bp, Homo Sapiens; identical to SEQ ID NO: 72665
  misc_feature (19)..(19): n is a, c, g, or t
  misc_feature (118)..(118): n is a, c, g, or t
  misc_feature (120)..(120): n is a, c, g, or t
  misc_feature (122)..(122): n is a, c, g, or t
  misc_feature (129)..(130): n is a, c, g, or t
  misc_feature (137)..(137): n is a, c, g, or t
  misc_feature (144)..(144): n is a, c, g, or t
  misc_feature (154)..(155): n is a, c, g, or t
  misc_feature (186)..(186): n is a, c, g, or t
  misc_feature (206)..(206): n is a, c, g, or t
  misc_feature (259)..(259): n is a, c, g, or t
  misc_feature (910)..(921): n is a, c, g, or t

SEQ ID NO: 107396 - DNA, 959 bp, Homo Sapiens; identical to SEQ ID NO: 72666

SEQ ID NO: 107397 - DNA, 780 bp, Homo Sapiens; identical to SEQ ID NO: 72667
  misc_feature (763)..(763): n is a, c, g, or t

SEQ ID NO: 107398 - DNA, 604 bp, Homo Sapiens; identical to SEQ ID NO: 72668
  misc_feature (377)..(415): n is a, c, g, or t

SEQ ID NO: 107399 - DNA, 927 bp, Homo Sapiens; identical to SEQ ID NO: 72669
  misc_feature (679)..(717): n is a, c, g, or t

SEQ ID NO: 107400 - DNA, 1006 bp, Homo Sapiens; identical to SEQ ID NO: 72671
  misc_feature (79)..(79): n is a, c, g, or t
  misc_feature (111)..(112): n is a, c, g, or t
  misc_feature (117)..(117): n is a, c, g, or t

SEQ ID NO: 107401 - DNA, 723 bp, Homo Sapiens; identical to SEQ ID NO: 72672

SEQ ID NO: 107402 - DNA, 1149 bp, Homo Sapiens; identical to SEQ ID NO: 72673
  misc_feature (350)..(488): n is a, c, g, or t

SEQ ID NO: 107403 - DNA, 1430 bp, Homo Sapiens; identical to SEQ ID NO: 72674
  misc_feature (979)..(1020): n is a, c, g, or t
  misc_feature (1065)..(1092): n is a, c, g, or t

SEQ ID NO: 107404 - DNA, 456 bp, Homo Sapiens; identical to SEQ ID NO: 72685

SEQ ID NO: 107405 - DNA, 1082 bp, Homo Sapiens; identical to SEQ ID NO: 72686

SEQ ID NO: 107406 - DNA, 1462 bp, Homo Sapiens; identical to SEQ ID NO: 72688
  misc_feature (83)..(117): n is a, c, g, or t

SEQ ID NO: 107407 - DNA, 950 bp, Homo Sapiens; identical to SEQ ID NO: 72689
  misc_feature (610)..(619): n is a, c, g, or t

SEQ ID NO: 107408 - DNA, 844 bp, Homo Sapiens; identical to SEQ ID NO: 72691

SEQ ID NO: 107409 - DNA, 1100 bp, Homo Sapiens; identical to SEQ ID NO: 72692
  misc_feature (75)..(75): n is a, c, g, or t
  misc_feature (111)..(111): n is a, c, g, or t
  misc_feature (133)..(133): n is a, c, g, or t
  misc_feature (145)..(146): n is a, c, g, or t
  misc_feature (217)..(217): n is a, c, g, or t
  misc_feature (234)..(234): n is a, c, g, or t
  misc_feature (249)..(249): n is a, c, g, or t
  misc_feature (277)..(277): n is a, c, g, or t
  misc_feature (342)..(342): n is a, c, g, or t
  misc_feature (345)..(346): n is a, c, g, or t
  misc_feature (376)..(376): n is a, c, g, or t
  misc_feature (394)..(394): n is a, c, g, or t

SEQ ID NO: 107410 - DNA, 792 bp, Homo Sapiens; identical to SEQ ID NO: 72693

SEQ ID NO: 107411 - DNA, 1872 bp, Homo Sapiens; identical to SEQ ID NO: 72694
  misc_feature (106)..(116): n is a, c, g, or t
  misc_feature (1814)..(1831): n is a, c, g, or t

SEQ ID NO: 107412 - DNA, 1020 bp, Homo Sapiens; identical to SEQ ID NO: 72695

SEQ ID NO: 107413 - DNA, 2855 bp, Homo Sapiens; identical to SEQ ID NO: 72696
  misc_feature (1787)..(1805): n is a, c, g, or t
  misc_feature (2208)..(2218): n is a, c, g, or t
  misc_feature (2725)..(2725): n is a, c, g, or t

SEQ ID NO: 107414 - DNA, 1053 bp, Homo Sapiens; identical to SEQ ID NO: 72697

SEQ ID NO: 107415 - DNA, 794 bp, Homo Sapiens; identical to SEQ ID NO: 72698

SEQ ID NO: 107416 - DNA, 854 bp, Homo Sapiens; identical to SEQ ID NO: 72699

SEQ ID NO: 107417 - DNA, 1054 bp, Homo Sapiens; identical to SEQ ID NO: 72700

SEQ ID NO: 107418 - DNA, 609 bp, Homo Sapiens; identical to SEQ ID NO: 72704

SEQ ID NO: 107419 - DNA, 1026 bp, Homo Sapiens; identical to SEQ ID NO: 72705
  misc_feature (26)..(26): n is a, c, g, or t
  misc_feature (31)..(31): n is a, c, g, or t
  misc_feature (62)..(62): n is a, c, g, or t
  misc_feature (87)..(87): n is a, c, g, or t
  misc_feature (127)..(127): n is a, c, g, or t
  misc_feature (132)..(132): n is a, c, g, or t
  misc_feature (135)..(135): n is a, c, g, or t
  misc_feature (153)..(153): n is a, c, g, or t
  misc_feature (189)..(189): n is a, c, g, or t
  misc_feature (196)..(196): n is a, c, g, or t
  misc_feature (217)..(217): n is a, c, g, or t
  misc_feature (241)..(241): n is a, c, g, or t

SEQ ID NO: 107420 - DNA, 1219 bp, Homo Sapiens; identical to SEQ ID NO: 72711
  misc_feature (805)..(813): n is a, c, g, or t
  misc_feature (815)..(816): n is a, c, g, or t
  misc_feature (987)..(995): n is a, c, g, or t
  misc_feature (1024)..(1033): n is a, c, g, or t
  misc_feature (1080)..(1129): n is a, c, g, or t

SEQ ID NO: 107421 - DNA, 192 bp, Homo Sapiens; identical to SEQ ID NO: 72712
  misc_feature (97)..(146): n is a, c, g, or t

SEQ ID NO: 107422 - DNA, 1115 bp, Homo Sapiens; identical to SEQ ID NO: 72713

SEQ ID NO: 107423 - DNA, 619 bp, Homo Sapiens; identical to SEQ ID NO: 72714

SEQ ID NO: 107424 - DNA, 532 bp, Homo Sapiens; identical to SEQ ID NO: 72715
  misc_feature (520)..(520): n is a, c, g, or t

SEQ ID NO: 107425 - DNA, 468 bp, Homo Sapiens; identical to SEQ ID NO: 72716

SEQ ID NO: 107426 - DNA, 1724 bp, Homo Sapiens; identical to SEQ ID NO: 72718
  misc_feature (756)..(832): n is a, c, g, or t
  misc_feature (839)..(840): n is a, c, g, or t
  misc_feature (842)..(843): n is a, c, g, or t
  misc_feature (845)..(846): n is a, c, g, or t
  misc_feature (875)..(875): n is a, c, g, or t

SEQ ID NO: 107427 - DNA, 1877 bp, Homo Sapiens; identical to SEQ ID NO: 72719

SEQ ID NO: 107428 - DNA, 816 bp, Homo Sapiens; identical to SEQ ID NO: 72720

SEQ ID NO: 107429 - DNA, 671 bp, Homo Sapiens; identical to SEQ ID NO: 72722
  misc_feature (50)..(50): n is a, c, g, or t
  misc_feature (70)..(70): n is a, c, g, or t
  misc_feature (92)..(92): n is a, c, g, or t
  misc_feature (145)..(189): n is a, c, g, or t

SEQ ID NO: 107430 - DNA, 2125 bp, Homo Sapiens; identical to SEQ ID NO: 72723
  misc_feature (79)..(113): n is a, c, g, or t

SEQ ID NO: 107431 - DNA, 625 bp, Homo Sapiens; identical to SEQ ID NO: 72724
  misc_feature (51)..(98): n is a, c, g, or t

SEQ ID NO: 107432 - DNA, 2395 bp, Homo Sapiens; identical to SEQ ID NO: 72727
  misc_feature (1902)..(2150): n is a, c, g, or t

SEQ ID NO: 107433 - DNA, 1113 bp, Homo Sapiens; identical to SEQ ID NO: 72728
  misc_feature (863)..(863): n is a, c, g, or t
  misc_feature (899)..(899): n is a, c, g, or t
  misc_feature (1049)..(1059): n is a, c, g, or t

SEQ ID NO: 107434 - DNA, 1825 bp, Homo Sapiens; identical to SEQ ID NO: 72729

SEQ ID NO: 107435 - DNA, 1204 bp, Homo Sapiens; identical to SEQ ID NO: 72730

SEQ ID NO: 107436 - DNA, 1093 bp, Homo Sapiens; identical to SEQ ID NO: 72731

SEQ ID NO: 107437 - DNA, 969 bp, Homo Sapiens; identical to SEQ ID NO: 72732

SEQ ID NO: 107438 - DNA, 2171 bp, Homo Sapiens; identical to SEQ ID NO: 72733
  misc_feature (28)..(28): n is a, c, g, or t
  misc_feature (46)..(46): n is a, c, g, or t
  misc_feature (49)..(50): n is a, c, g, or t
  misc_feature (55)..(429): n is a, c, g, or t
  misc_feature (1102)..(1110): n is a, c, g, or t

SEQ ID NO: 107439 - DNA, 1159 bp, Homo Sapiens; identical to SEQ ID NO: 72734

SEQ ID NO: 107440 - DNA, 982 bp, Homo Sapiens; identical to SEQ ID NO: 72735
  misc_feature (905)..(905): n is a, c, g, or t

SEQ ID NO: 107441 - DNA, 1111 bp, Homo Sapiens; identical to SEQ ID NO: 72736
  misc_feature (771)..(771): n is a, c, g, or t
  misc_feature (773)..(773): n is a, c, g, or t
  misc_feature (777)..(777): n is a, c, g, or t
  misc_feature (785)..(809): n is a, c, g, or t
  misc_feature (811)..(812): n is a, c, g, or t
  misc_feature (815)..(815): n is a, c, g, or t
  misc_feature (817)..(817): n is a, c, g, or t
  misc_feature (823)..(825): n is a, c, g, or t
  misc_feature (827)..(829): n is a, c, g, or t
  misc_feature (831)..(841): n is a, c, g, or t
  misc_feature (846)..(846): n is a, c, g, or t
  misc_feature (851)..(852): n is a, c, g, or t
  misc_feature (871)..(872): n is a, c, g, or t

SEQ ID NO: 107442 - DNA, 1153 bp, Homo Sapiens; identical to SEQ ID NO: 72737

SEQ ID NO: 107443 - DNA, 2236 bp, Homo Sapiens; identical to SEQ ID NO: 72738
  misc_feature (1601)..(1645): n is a, c, g, or t
  misc_feature (1888)..(1900): n is a, c, g, or t
  misc_feature (1984)..(2046): n is a, c, g, or t
  misc_feature (2125)..(2125): n is a, c, g, or t
  misc_feature (2221)..(2221): n is a, c, g, or t

SEQ ID NO: 107444 - DNA, 910 bp, Homo Sapiens; identical to SEQ ID NO: 72739

SEQ ID NO: 107445 - DNA, 1070 bp, Homo Sapiens; identical to SEQ ID NO: 72741
  misc_feature (925)..(959): n is a, c, g, or t
  misc_feature (963)..(1014): n is a, c, g, or t

SEQ ID NO: 107446 - DNA, 957 bp, Homo Sapiens; identical to SEQ ID NO: 72742

SEQ ID NO: 107447 - DNA, 894 bp, Homo Sapiens; identical to SEQ ID NO: 72743
  misc_feature (52)..(52): n is a, c, g, or t
  misc_feature (68)..(68): n is a, c, g, or t
  misc_feature (113)..(113): n is a, c, g, or t

SEQ ID NO: 107448 - DNA, 1277 bp, Homo Sapiens; identical to SEQ ID NO: 72744

SEQ ID NO: 107449 - DNA, 858 bp, Homo Sapiens; identical to SEQ ID NO: 72745
  misc_feature (760)..(760): n is a, c, g, or t

SEQ ID NO: 107450 - DNA, 1052 bp, Homo Sapiens; identical to SEQ ID NO: 72746

SEQ ID NO: 107451 - DNA, 973 bp, Homo Sapiens; identical to SEQ ID NO: 72747

SEQ ID NO: 107452 - DNA, 969 bp, Homo Sapiens; identical to SEQ ID NO: 72748

SEQ ID NO: 107453 - DNA, 867 bp, Homo Sapiens; identical to SEQ ID NO: 72749

SEQ ID NO: 107454 - DNA, 932 bp, Homo Sapiens; identical to SEQ ID NO: 72750

SEQ ID NO: 107455 - DNA, 1229 bp, Homo Sapiens; identical to SEQ ID NO: 72752

SEQ ID NO: 107456 - DNA, 2617 bp, Homo Sapiens; identical to SEQ ID NO: 72753
  misc_feature (2093)..(2093): n is a, c, g, or t
  misc_feature (2116)..(2116): n is a, c, g, or t
  misc_feature (2167)..(2167): n is a, c, g, or t
  misc_feature (2256)..(2256): n is a, c, g, or t
  misc_feature (2376)..(2376): n is a, c, g, or t
  misc_feature (2379)..(2379): n is a, c, g, or t
  misc_feature (2409)..(2409): n is a, c, g, or t
  misc_feature (2511)..(2511): n is a, c, g, or t
  misc_feature (2576)..(2576): n is a, c, g, or t

SEQ ID NO: 107457 - DNA, 663 bp, Homo Sapiens; identical to SEQ ID NO: 72758
  misc_feature (63)..(116): n is a, c, g, or t

SEQ ID NO: 107458 - DNA, 953 bp, Homo Sapiens; identical to SEQ ID NO: 72759
  misc_feature (731)..(784): n is a, c, g, or t
  misc_feature (842)..(842): n is a, c, g, or t
  misc_feature (877)..(877): n is a, c, g, or t

SEQ ID NO: 107459 - DNA, 670 bp, Homo Sapiens; identical to SEQ ID NO: 72763

SEQ ID NO: 107460 - DNA, 730 bp, Homo Sapiens; identical to SEQ ID NO: 72764

SEQ ID NO: 107461 - DNA, 1435 bp, Homo Sapiens; identical to SEQ ID NO: 72765
  misc_feature (21)..(21): n is a, c, g, or t
  misc_feature (90)..(115): n is a, c, g, or t

SEQ ID NO: 107462 - DNA, 1931 bp, Homo Sapiens; identical to SEQ ID NO: 72766

SEQ ID NO: 107463 - DNA, 907 bp, Homo Sapiens; identical to SEQ ID NO: 72767

SEQ ID NO: 107464 - DNA, 1458 bp, Homo Sapiens; identical to SEQ ID NO: 72768

SEQ ID NO: 107465 - DNA, 1118 bp, Homo Sapiens; identical to SEQ ID NO: 72769

SEQ ID NO: 107466 - DNA, 856 bp, Homo Sapiens; identical to SEQ ID NO: 72770

SEQ ID NO: 107467 - DNA, 1380 bp, Homo Sapiens; identical to SEQ ID NO: 72771

SEQ ID NO: 107468 - DNA, 1054 bp, Homo Sapiens; identical to SEQ ID NO: 72773
  misc_feature (43)..(43): n is a, c, g, or t
  misc_feature (98)..(98): n is a, c, g, or t
  misc_feature (301)..(301): n is a, c, g, or t
  misc_feature (993)..(1014): n is a, c, g, or t

SEQ ID NO: 107469 - DNA, 993 bp, Homo Sapiens; identical to SEQ ID NO: 72774
  misc_feature (38)..(38): n is a, c, g, or t
  misc_feature (146)..(146): n is a, c, g, or t
  misc_feature (156)..(156): n is a, c, g, or t
  misc_feature (268)..(268): n is a, c, g, or t

SEQ ID NO: 107470 - DNA, 728 bp, Homo Sapiens; identical to SEQ ID NO: 72775

SEQ ID NO: 107471 - DNA, 1486 bp, Homo Sapiens; identical to SEQ ID NO: 72776
  misc_feature (1404)..(1418): n is a, c, g, or t

SEQ ID NO: 107472 - DNA, 681 bp, Homo Sapiens; identical to SEQ ID NO: 72777

SEQ ID NO: 107473 - DNA, 1243 bp, Homo Sapiens; identical to SEQ ID NO: 72778

SEQ ID NO: 107474 - DNA, 1006 bp, Homo Sapiens; identical to SEQ ID NO: 72779

SEQ ID NO: 107475 - DNA, 747 bp, Homo Sapiens; identical to SEQ ID NO: 72785
  misc_feature (61)..(61): n is a, c, g, or t

SEQ ID NO: 107476 - DNA, 792 bp, Homo Sapiens; identical to SEQ ID NO: 14924

SEQ ID NO: 107477 - DNA, 613 bp, Homo Sapiens; identical to SEQ ID NO: 72790
  misc_feature (217)..(217): n is a, c, g, or t

SEQ ID NO: 107478 - DNA, 948 bp, Homo Sapiens; identical to SEQ ID NO: 72791

SEQ ID NO: 107479 - DNA, 1064 bp, Homo Sapiens; identical to SEQ ID NO: 72797
  misc_feature (938)..(974): n is a, c, g, or t

SEQ ID NO: 107480 - DNA, 577 bp, Homo Sapiens; identical to SEQ ID NO: 72798

SEQ ID NO: 107481 - DNA, 581 bp, Homo Sapiens; identical to SEQ ID NO: 72800

SEQ ID NO: 107482 - DNA, 430 bp, Homo Sapiens; identical to SEQ ID NO: 72801

SEQ ID NO: 107483 - DNA, 464 bp, Homo Sapiens; identical to SEQ ID NO: 72803
  misc_feature (29)..(29): n is a, c, g, or t
  misc_feature (43)..(43): n is a, c, g, or t

SEQ ID NO: 107484 - DNA, 485 bp, Homo Sapiens; identical to SEQ ID NO: 72804
  misc_feature (452)..(452): n is a, c, g, or t

SEQ ID NO: 107485 - DNA, 638 bp, Homo Sapiens; identical to SEQ ID NO: 72805
  misc_feature (46)..(46): n is a, c, g, or t
  misc_feature (301)..(301): n is a, c, g, or t
  misc_feature (428)..(428): n is a, c, g, or t
  misc_feature (512)..(512): n is a, c, g, or t

SEQ ID NO: 107486 - DNA, 1820 bp, Homo Sapiens; identical to SEQ ID NO: 72806

SEQ ID NO: 107487 - DNA, 1490 bp, Homo Sapiens; identical to SEQ ID NO: 72807

SEQ ID NO: 107488 - DNA, 962 bp, Homo Sapiens; identical to SEQ ID NO: 72808
  misc_feature (55)..(55): n is a, c, g, or t
  misc_feature (661)..(770): n is a, c, g, or t
  misc_feature (818)..(860): n is a, c, g, or t

SEQ ID NO: 107489 - DNA, 716 bp, Homo Sapiens; identical to SEQ ID NO: 72809
  misc_feature (411)..(520): n is a, c, g, or t
  misc_feature (568)..(622): n is a, c, g, or t

SEQ ID NO: 107490 - DNA, 1546 bp, Homo Sapiens; identical to SEQ ID NO: 72810
  misc_feature (1251)..(1286): n is a, c, g, or t
  misc_feature (1327)..(1442): n is a, c, g, or t

SEQ ID NO: 107491 - DNA, 1081 bp, Homo Sapiens; identical to SEQ ID NO: 72811
  misc_feature (610)..(621): n is a, c, g, or t
  misc_feature (695)..(718): n is a, c, g, or t
  misc_feature (817)..(817): n is a, c, g, or t
  misc_feature (1006)..(1019): n is a, c, g, or t

SEQ ID NO: 107492 - DNA, 459 bp, Homo Sapiens; identical to SEQ ID NO: 72812
  misc_feature (70)..(93): n is a, c, g, or t

SEQ ID NO: 107493 - DNA, 974 bp, Homo Sapiens; identical to SEQ ID NO: 72814
  misc_feature (181)..(181): n is a, c, g, or t
  misc_feature (334)..(334): n is a, c, g, or t
  misc_feature (350)..(350): n is a, c, g, or t
  misc_feature (371)..(371): n is a, c, g, or t
  misc_feature (856)..(896): n is a, c, g, or t

SEQ ID NO: 107494 - DNA, 2509 bp, Homo Sapiens; identical to SEQ ID NO: 72815
  misc_feature (2301)..(2321): n is a, c, g, or t

SEQ ID NO: 107495 - DNA, 1381 bp, Homo Sapiens; identical to SEQ ID NO: 72816

SEQ ID NO: 107496 - DNA, 1067 bp, Homo Sapiens; identical to SEQ ID NO: 72817

SEQ ID NO: 107497 - DNA, 951 bp, Homo Sapiens; identical to SEQ ID NO: 72818
  misc_feature (266)..(266): n is a, c, g, or t
  misc_feature (269)..(275): n is a, c, g, or t
  misc_feature (279)..(279): n is a, c, g, or t
  misc_feature (281)..(281): n is a, c, g, or t
  misc_feature (577)..(577): n is a, c, g, or t
  misc_feature (835)..(835): n is a, c, g, or t

SEQ ID NO: 107498 - DNA, 950 bp, Homo Sapiens; identical to SEQ ID NO: 72819
  misc_feature (758)..(758): n is a, c, g, or t

SEQ ID NO: 107499 - DNA, 1268 bp, Homo Sapiens; identical to SEQ ID NO: 72820

SEQ ID NO: 107500 - DNA, 536 bp, Homo Sapiens; identical to SEQ ID NO: 72821

SEQ ID NO: 107501 - DNA, 3052 bp, Homo Sapiens; identical to SEQ ID NO: 72823

SEQ ID NO: 107502 - DNA, 914 bp, Homo Sapiens; identical to SEQ ID NO: 72824

SEQ ID NO: 107503 - DNA, 1268 bp, Homo Sapiens; identical to SEQ ID NO: 72825
  misc_feature (1112)..(1169): n is a, c, g, or t

SEQ ID NO: 107504 - DNA, 469 bp, Homo Sapiens; identical to SEQ ID NO: 72826
  misc_feature (50)..(62): n is a, c, g, or t
  misc_feature (162)..(219): n is a, c, g, or t
  misc_feature (441)..(441): n is a, c, g, or t

SEQ ID NO: 107505 - DNA, 374 bp, Homo Sapiens; identical to SEQ ID NO: 72827
  misc_feature (100)..(157): n is a, c, g, or t

SEQ ID NO: 107506 - DNA, 930 bp, Homo Sapiens; identical to SEQ ID NO: 72828

SEQ ID NO: 107507 - DNA, 1780 bp, Homo Sapiens; identical to SEQ ID NO: 72829

SEQ ID NO: 107508 - DNA, 1034 bp, Homo Sapiens; identical to SEQ ID NO: 72830

SEQ ID NO: 107509 - DNA, 2083 bp, Homo Sapiens; identical to SEQ ID NO: 72831
  misc_feature (1993)..(2016): n is a, c, g, or t

SEQ ID NO: 107510 - DNA, 816 bp, Homo Sapiens; identical to SEQ ID NO: 72832

SEQ ID NO: 107511 - DNA, 772 bp, Homo Sapiens; identical to SEQ ID NO: 72833
  misc_feature (213)..(213): n is a, c, g, or t
  misc_feature (624)..(624): n is a, c, g, or t

SEQ ID NO: 107512 - DNA, 1633 bp, Homo Sapiens; identical to SEQ ID NO: 72834
  misc_feature (1334)..(1343): n is a, c, g, or t

SEQ ID NO: 107513 - DNA, 894 bp, Homo Sapiens; identical to SEQ ID NO: 72835
  misc_feature (701)..(701): n is a, c, g, or t
  misc_feature (737)..(737): n is a, c, g, or t
  misc_feature (743)..(743): n is a, c, g, or t
  misc_feature (802)..(802): n is a, c, g, or t

SEQ ID NO: 107514 - DNA, 919 bp, Homo Sapiens; identical to SEQ ID NO: 72836
  misc_feature (670)..(683): n is a, c, g, or t

SEQ ID NO: 107515 - DNA, 629 bp, Homo Sapiens; identical to SEQ ID NO: 72837

SEQ ID NO: 107516 - DNA, 665 bp, Homo Sapiens; identical to SEQ ID NO: 72839
  misc_feature (15)..(15): n is a, c, g, or t
  misc_feature (125)..(125): n is a, c, g, or t

SEQ ID NO: 107517 - DNA, 1029 bp, Homo Sapiens; identical to SEQ ID NO: 72840
  misc_feature (585)..(597): n is a, c, g, or t
  misc_feature (932)..(932): n is a, c, g, or t

SEQ ID NO: 107518 - DNA, 1699 bp, Homo Sapiens; identical to SEQ ID NO: 72843

SEQ ID NO: 107519 - DNA, 676 bp, Homo Sapiens; identical to SEQ ID NO: 72844
  misc_feature (15)..(15): n is a, c, g, or t
  misc_feature (67)..(67): n is a, c, g, or t
  misc_feature (127)..(127): n is a, c, g, or t
  misc_feature (203)..(203): n is a, c, g, or t
  misc_feature (274)..(274): n is a, c, g, or t

SEQ ID NO: 107520 - DNA, 2326 bp, Homo Sapiens; identical to SEQ ID NO: 72847

SEQ ID NO: 107521 - DNA, 1625 bp, Homo Sapiens; identical to SEQ ID NO: 72848
  misc_feature (1593)..(1594): n is a, c, g, or t
  misc_feature (1597)..(1597): n is a, c, g, or t

SEQ ID NO: 107522 - DNA, 1701 bp, Homo Sapiens; identical to SEQ ID NO: 72856

SEQ ID NO: 107523 - DNA, 915 bp, Homo Sapiens; identical to SEQ ID NO: 72857
  misc_feature (886)..(886): n is a, c, g, or t

SEQ ID NO: 107524 - DNA, 1701 bp, Homo Sapiens; identical to SEQ ID NO: 72858

SEQ ID NO: 107525 - DNA, 1567 bp, Homo Sapiens; identical to SEQ ID NO: 72859
  misc_feature (914)..(927): n is a, c, g, or t

SEQ ID NO: 107526 - DNA, 518 bp, Homo Sapiens; identical to SEQ ID NO: 72860

SEQ ID NO: 107527 - DNA, 447 bp, Homo Sapiens; identical to SEQ ID NO: 72861

SEQ ID NO: 107528 - DNA, 1313 bp, Homo Sapiens; identical to SEQ ID NO: 72870

SEQ ID NO: 107529 - DNA, 967 bp, Homo Sapiens; identical to SEQ ID NO: 72871
  misc_feature (206)..(206): n is a, c, g, or t

SEQ ID NO: 107530 - DNA, 1194 bp, Homo Sapiens; identical to SEQ ID NO: 72878
  misc_feature (176)..(196): n is a, c, g, or t
  misc_feature (944)..(962): n is a, c, g, or t
  misc_feature (1168)..(1168): n is a, c, g, or t

SEQ ID NO: 107531 - DNA, 471 bp, Homo Sapiens; identical to SEQ ID NO: 72879
  misc_feature (98)..(138): n is a, c, g, or t

SEQ ID NO: 107532 - DNA, 1213 bp, Homo Sapiens; identical to SEQ ID NO: 72884

SEQ ID NO: 107533 - DNA, 986 bp, Homo Sapiens; identical to SEQ ID NO: 72885

SEQ ID NO: 107534 - DNA, 471 bp, Homo Sapiens; identical to SEQ ID NO: 72886

SEQ ID NO: 107535 - DNA, 651 bp, Homo Sapiens; identical to SEQ ID NO: 72887

SEQ ID NO: 107536 - DNA, 1037 bp, Homo Sapiens; identical to SEQ ID NO: 72888
  misc_feature (996)..(996): n is a, c, g, or t

SEQ ID NO: 107537 - DNA, 711 bp, Homo Sapiens; identical to SEQ ID NO: 72889
  misc_feature (18)..(18): n is a, c, g, or t
  misc_feature (27)..(27): n is a, c, g, or t
  misc_feature (64)..(64): n is a, c, g, or t
  misc_feature (124)..(124): n is a, c, g, or t

SEQ ID NO: 107538 - DNA, 978 bp, Homo Sapiens; identical to SEQ ID NO: 72890

SEQ ID NO: 107539 - DNA, 823 bp, Homo Sapiens; identical to SEQ ID NO: 72891

SEQ ID NO: 107540 - DNA, 1198 bp, Homo Sapiens; identical to SEQ ID NO: 72892
  misc_feature (595)..(706): n is a, c, g, or t
  misc_feature (825)..(854): n is a, c, g, or t
  misc_feature (963)..(963): n is a, c, g, or t

SEQ ID NO: 107541 - DNA, 841 bp, Homo Sapiens; identical to SEQ ID NO: 72893

SEQ ID NO: 107542 - DNA, 925 bp, Homo Sapiens; identical to SEQ ID NO: 15808

SEQ ID NO: 107543 - DNA, 1211 bp, Homo Sapiens; identical to SEQ ID NO: 72895
  misc_feature (1183)..(1183): n is a, c, g, or t

SEQ ID NO: 107544 - DNA, 1251 bp, Homo Sapiens; identical to SEQ ID NO: 72897
  misc_feature (282)..(296): n is a, c, g, or t
  misc_feature (317)..(368): n is a, c, g, or t
  misc_feature (432)..(573): n is a, c, g, or t

SEQ ID NO: 107545 - DNA, 924 bp, Homo Sapiens; identical to SEQ ID NO: 72898
  misc_feature (859)..(860): n is a, c, g, or t

SEQ ID NO: 107546 - DNA, 1321 bp, Homo Sapiens; identical to SEQ ID NO: 72899
  misc_feature (765)..(765): n is a, c, g, or t
  misc_feature (768)..(889): n is a, c, g, or t
  misc_feature (953)..(1004): n is a, c, g, or t
  misc_feature (1025)..(1039): n is a, c, g, or t

SEQ ID NO: 107547 - DNA, 1986 bp, Homo Sapiens; identical to SEQ ID NO: 72900
  misc_feature (1212)..(1220): n is a, c, g, or t
  misc_feature (1843)..(1843): n is a, c, g, or t
  misc_feature (1941)..(1941): n is a, c, g, or t

SEQ ID NO: 107548 - DNA, 882 bp, Homo Sapiens; identical to SEQ ID NO: 72901

SEQ ID NO: 107549 - DNA, 983 bp, Homo Sapiens; identical to SEQ ID NO: 72911
  misc_feature (672)..(672): n is a, c, g, or t
  misc_feature (801)..(801): n is a, c, g, or t
  misc_feature (901)..(901): n is a, c, g, or t
  misc_feature (903)..(903): n is a, c, g, or t

SEQ ID NO: 107550 - DNA, 1039 bp, Homo Sapiens; identical to SEQ ID NO: 72912

SEQ ID NO: 107551 - DNA, 1006 bp, Homo Sapiens; identical to SEQ ID NO: 72930
  misc_feature (39)..(39): n is a, c, g, or t
  misc_feature (154)..(154): n is a, c, g, or t
  misc_feature (272)..(272): n is a, c, g, or t

SEQ ID NO: 107552 - DNA, 1169 bp, Homo Sapiens; identical to SEQ ID NO: 72931
  misc_feature (68)..(102): n is a, c, g, or t

SEQ ID NO: 107553 - DNA, 1372 bp, Homo Sapiens; identical to SEQ ID NO: 72933

SEQ ID NO: 107554 - DNA, 980 bp, Homo Sapiens; identical to SEQ ID NO: 72934

SEQ ID NO: 107555 - DNA, 1094 bp, Homo Sapiens; identical to SEQ ID NO: 72935
  misc_feature (937)..(937): n is a, c, g, or t
  misc_feature (943)..(945): n is a, c, g, or t

SEQ ID NO: 107556 - DNA, 891 bp, Homo Sapiens; identical to SEQ ID NO: 72936

SEQ ID NO: 107557 - DNA, 1118 bp, Homo Sapiens; identical to SEQ ID NO: 72937
  misc_feature (294)..(294): n is a, c, g, or t

SEQ ID NO: 107558 - DNA, 931 bp, Homo Sapiens; identical to SEQ ID NO: 72938

SEQ ID NO: 107559 - DNA, 1085 bp, Homo Sapiens; identical to SEQ ID NO: 72939

SEQ ID NO: 107560 - DNA, 1260 bp, Homo Sapiens; identical to SEQ ID NO: 72941
  misc_feature (80)..(114): n is a, c, g, or t

SEQ ID NO: 107561 - DNA, 824 bp, Homo Sapiens; identical to SEQ ID NO: 72942

SEQ ID NO: 107562 - DNA, 1012 bp, Homo Sapiens; identical to SEQ ID NO: 72945
  misc_feature (41)..(83): n is a, c, g, or t
  misc_feature (87)..(121): n is a, c, g, or t

SEQ ID NO: 107563 - DNA, 1018 bp, Homo Sapiens; identical to SEQ ID NO: 72946
  misc_feature (42)..(71): n is a, c, g, or t
  misc_feature (75)..(109): n is a, c, g, or t

SEQ ID NO: 107564 - DNA, 782 bp, Homo Sapiens; identical to SEQ ID NO: 72947
  misc_feature (454)..(454): n is a, c, g, or t
  misc_feature (599)..(613): n is a, c, g, or t

SEQ ID NO: 107565 - DNA, 617 bp, Homo Sapiens; identical to SEQ ID NO: 72949
  misc_feature (178)..(240): n is a, c, g, or t

SEQ ID NO: 107566 - DNA, 341 bp, Homo Sapiens; identical to SEQ ID NO: 72950

SEQ ID NO: 107567 - DNA, 1173 bp, Homo Sapiens; identical to SEQ ID NO: 72954
  misc_feature (777)..(777): n is a, c, g, or t
  misc_feature (779)..(843): n is a, c, g, or t
  misc_feature (873)..(991): n is a, c, g, or t
  misc_feature (1080)..(1089): n is a, c, g, or t

SEQ ID NO: 107568 - DNA, 951 bp, Homo Sapiens; identical to SEQ ID NO: 72955
  misc_feature (870)..(870): n is a, c, g, or t
  misc_feature (873)..(903): n is a, c, g, or t

SEQ ID NO: 107569 - DNA, 655 bp, Homo Sapiens; identical to SEQ ID NO: 72956
  misc_feature (376)..(376): n is a, c, g, or t

SEQ ID NO: 107570 - DNA, 715 bp, Homo Sapiens; identical to SEQ ID NO: 72958
  misc_feature (84)..(84): n is a, c, g, or t

SEQ ID NO: 107571 - DNA, 560 bp, Homo Sapiens; identical to SEQ ID NO: 72959
  misc_feature (119)..(129): n is a, c, g, or t

SEQ ID NO: 107572 - DNA, 1013 bp, Homo Sapiens; identical to SEQ ID NO: 72964
  misc_feature (78)..(78): n is a, c, g, or t
  misc_feature (88)..(88): n is a, c, g, or t
  misc_feature (177)..(177): n is a, c, g, or t
  misc_feature (251)..(251): n is a, c, g, or t
  misc_feature (254)..(254): n is a, c, g, or t
  misc_feature (268)..(268): n is a, c, g, or t
  misc_feature (297)..(297): n is a, c, g, or t
  misc_feature (307)..(307): n is a, c, g, or t
  misc_feature (321)..(322): n is a, c, g, or t

SEQ ID NO: 107573 - DNA, 512 bp, Homo Sapiens; identical to SEQ ID NO: 72965
  misc_feature (410)..(434): n is a, c, g, or t

SEQ ID NO: 107574 - DNA, 927 bp, Homo Sapiens; identical to SEQ ID NO: 72977
  misc_feature (745)..(791): n is a, c, g, or t
  misc_feature (797)..(797): n is a, c, g, or t

SEQ ID NO: 107575 - DNA, 963 bp, Homo Sapiens; identical to SEQ ID NO: 72978
  misc_feature (728)..(738): n is a, c, g, or t

SEQ ID NO: 107576 - DNA, 1963 bp, Homo Sapiens; identical to SEQ ID NO: 72979
  misc_feature (899)..(909): n is a, c, g, or t
  misc_feature (1759)..(1759): n is a, c, g, or t
  misc_feature (1861)..(1861): n is a, c, g, or t

SEQ ID NO: 107577 - DNA, 820 bp, Homo Sapiens; identical to SEQ ID NO: 72980

SEQ ID NO: 107578 - DNA, 1202 bp, Homo Sapiens; identical to SEQ ID NO: 72981

SEQ ID NO: 107579 - DNA, 961 bp, Homo Sapiens; identical to SEQ ID NO: 72982

SEQ ID NO: 107580 - DNA, 343 bp, Homo Sapiens; identical to SEQ ID NO: 72983
  misc_feature (240)..(240): n is a, c, g, or t
  misc_feature (246)..(246): n is a, c, g, or t
  misc_feature (265)..(265): n is a, c, g, or t
  misc_feature (301)..(301): n is a, c, g, or t
  misc_feature (321)..(321): n is a, c, g, or t

SEQ ID NO: 107581 - DNA, 1541 bp, Homo Sapiens; identical to SEQ ID NO: 72984

SEQ ID NO: 107582 - DNA, 877 bp, Homo Sapiens; identical to SEQ ID NO: 72985
  misc_feature (784)..(784): n is a, c, g, or t

SEQ ID NO: 107583 - DNA, 1152 bp, Homo Sapiens; identical to SEQ ID NO: 72986
  misc_feature (912)..(912): n is a, c, g, or t

SEQ ID NO: 107584 - DNA, 779 bp, Homo Sapiens; identical to SEQ ID NO: 72987

SEQ ID NO: 107585 - DNA, 898 bp, Homo Sapiens; identical to SEQ ID NO: 72988
  misc_feature (26)..(26): n is a, c, g, or t
  misc_feature (35)..(35): n is a, c, g, or t
  misc_feature (37)..(37): n is a, c, g, or t
  misc_feature (63)..(63): n is a, c, g, or t
  misc_feature (66)..(66): n is a, c, g, or t
  misc_feature (776)..(838): n is a, c, g, or t

SEQ ID NO: 107586 - DNA, 994 bp, Homo Sapiens; identical to SEQ ID NO: 72989
  misc_feature (51)..(51): n is a, c, g, or t

SEQ ID NO: 107587 - DNA, 533 bp, Homo Sapiens; identical to SEQ ID NO: 72990

SEQ ID NO: 107588 - DNA, 755 bp, Homo Sapiens; identical to SEQ ID NO: 72991

SEQ ID NO: 107589 - DNA, 718 bp, Homo Sapiens; identical to SEQ ID NO: 72995
  misc_feature (50)..(50): n is a, c, g, or t
  misc_feature (238)..(238): n is a, c, g, or t

SEQ ID NO: 107590 - DNA, 923 bp, Homo Sapiens; identical to SEQ ID NO: 72996
  misc_feature (131)..(168): n is a, c, g, or t

SEQ ID NO: 107591 - DNA, 610 bp, Homo Sapiens; identical to SEQ ID NO: 73000
  misc_feature (53)..(53): n is a, c, g, or t

SEQ ID NO: 107592 - DNA, 650 bp, Homo Sapiens; identical to SEQ ID NO: 73001

SEQ ID NO: 107593 - DNA, 1144 bp, Homo Sapiens; identical to SEQ ID NO: 73002

SEQ ID NO: 107594 - DNA, 1012 bp, Homo Sapiens; identical to SEQ ID NO: 73012
  misc_feature (47)..(47): n is a, c, g, or t
  misc_feature (108)..(108): n is a, c, g, or t
  misc_feature (119)..(119): n is a, c, g, or t
  misc_feature (121)..(122): n is a, c, g, or t
  misc_feature (207)..(207): n is a, c, g, or t
  misc_feature (220)..(220): n is a, c, g, or t
  misc_feature (231)..(231): n is a, c, g, or t
  misc_feature (262)..(262): n is a, c, g, or t

SEQ ID NO: 107595 - DNA, 200 bp, Homo Sapiens; identical to SEQ ID NO: 73013

SEQ ID NO: 107596 - DNA, 804 bp, Homo Sapiens; identical to SEQ ID NO: 73016
  misc_feature (202)..(211): n is a, c, g, or t

SEQ ID NO: 107597 - DNA, 807 bp, Homo Sapiens; identical to SEQ ID NO: 73017

SEQ ID NO: 107598 - DNA, 1087 bp, Homo Sapiens; identical to SEQ ID NO: 73018
  misc_feature (808)..(976): n is a, c, g, or t
  misc_feature (984)..(1001): n is a, c, g, or t

SEQ ID NO: 107599 - DNA, 460 bp, Homo Sapiens; identical to SEQ ID NO: 73024

SEQ ID NO: 107600 - DNA, 820 bp, Homo Sapiens; identical to SEQ ID NO: 73025

SEQ ID NO: 107601 - DNA, 1006 bp, Homo Sapiens; identical to SEQ ID NO: 73027
  misc_feature (56)..(56): n is a, c, g, or t
  misc_feature (85)..(85): n is a, c, g, or t
  misc_feature (140)..(140): n is a, c, g, or t
  misc_feature (164)..(165): n is a, c, g, or t
  misc_feature (186)..(186): n is a, c, g, or t
  misc_feature (191)..(191): n is a, c, g, or t
  misc_feature (249)..(249): n is a, c, g, or t
  misc_feature (286)..(286): n is a, c, g, or t

SEQ ID NO: 107602 - DNA, 2156 bp, Homo Sapiens; identical to SEQ ID NO: 73028

SEQ ID NO: 107603 - DNA, 1229 bp, Homo Sapiens; identical to SEQ ID NO: 73033
  misc_feature (502)..(531): n is a, c, g, or t

SEQ ID NO: 107604 - DNA, 1367 bp, Homo Sapiens; identical to SEQ ID NO: 73034
  misc_feature (1246)..(1292): n is a, c, g, or t

SEQ ID NO: 107605 - DNA, 608 bp, Homo Sapiens; identical to SEQ ID NO: 73037

SEQ ID NO: 107606 - DNA, 1605 bp, Homo Sapiens; identical to SEQ ID NO: 73038
  misc_feature (593)..(606): n is a, c, g, or t
  misc_feature (1298)..(1325): n is a, c, g, or t

SEQ ID NO: 107607 - DNA, 624 bp, Homo Sapiens; identical to SEQ ID NO: 73039

SEQ ID NO: 107608 - DNA, 984 bp, Homo Sapiens; identical to SEQ ID NO: 73040

SEQ ID NO: 107609 - DNA, 889 bp, Homo Sapiens; identical to SEQ ID NO: 73043
  misc_feature (707)..(707): n is a, c, g, or t
  misc_feature (741)..(741): n is a, c, g, or t
  misc_feature (781)..(781): n is a, c, g, or t

SEQ ID NO: 107610 - DNA, 1219 bp, Homo Sapiens; identical to SEQ ID NO: 73044
  misc_feature (1063)..(1063): n is a, c, g, or t

SEQ ID NO: 107611 - DNA, 3216 bp, Homo Sapiens; identical to SEQ ID NO: 73046
  misc_feature (354)..(376): n is a, c, g, or t

SEQ ID NO: 107612 - DNA, 646 bp, Homo Sapiens; identical to SEQ ID NO: 73047
  misc_feature (419)..(441): n is a, c, g, or t

SEQ ID NO: 107613 - DNA, 772 bp, Homo Sapiens; identical to SEQ ID NO: 73048
  misc_feature (11)..(11): n is a, c, g, or t
  misc_feature (335)..(357): n is a, c, g, or t

SEQ ID NO: 107614 - DNA, 683 bp, Homo Sapiens; identical to SEQ ID NO: 73049
  misc_feature (110)..(118): n is a, c, g, or t
  misc_feature (267)..(300): n is a, c, g, or t
  misc_feature (379)..(391): n is a, c, g, or t

SEQ ID NO: 107615 - DNA, 440 bp, Homo Sapiens; identical to SEQ ID NO: 73050
  misc_feature (110)..(118): n is a, c, g, or t
  misc_feature (267)..(300): n is a, c, g, or t
  misc_feature (379)..(391): n is a, c, g, or t

SEQ ID NO: 107616 - DNA, 730 bp, Homo Sapiens; identical to SEQ ID NO: 73051

SEQ ID NO: 107617 - DNA, 655 bp, Homo Sapiens; identical to SEQ ID NO: 73052

SEQ ID NO: 107618 - DNA, 1760 bp, Homo Sapiens; identical to SEQ ID NO: 73053

SEQ ID NO: 107619 - DNA, 1534 bp, Homo Sapiens; identical to SEQ ID NO: 73055
  misc_feature (1252)..(1283): n is a, c, g, or t

SEQ ID NO: 107620 - DNA, 1225 bp, Homo Sapiens; identical to SEQ ID NO: 73056

SEQ ID NO: 107621 - DNA, 473 bp, Homo Sapiens; identical to SEQ ID NO: 73057
  misc_feature (230)..(287): n is a, c, g, or t
  misc_feature (426)..(426): n is a, c, g, or t

SEQ ID NO: 107622 - DNA, 1767 bp, Homo Sapiens; identical to SEQ ID NO: 73059

SEQ ID NO: 107623 - DNA, 1040 bp, Homo Sapiens; identical to SEQ ID NO: 73060
  misc_feature (98)..(213): n is a, c, g, or t
  misc_feature (909)..(928): n is a, c, g, or t

SEQ ID NO: 107624 - DNA, 1792 bp, Homo Sapiens; identical to SEQ ID NO: 73061
  misc_feature (1718)..(1735): n is a, c, g, or t

SEQ ID NO: 107625 - DNA, 1201 bp, Homo Sapiens; identical to SEQ ID NO: 73062

SEQ ID NO: 107626 - DNA, 975 bp, Homo Sapiens; identical to SEQ ID NO: 73063

SEQ ID NO: 107627 - DNA, 979 bp, Homo Sapiens; identical to SEQ ID NO: 73064
  misc_feature (775)..(775): n is a, c, g, or t

SEQ ID NO: 107628 - DNA, 1332 bp, Homo Sapiens; identical to SEQ ID NO: 73065
  misc_feature (106)..(221): n is a, c, g, or t

SEQ ID NO: 107629 - DNA, 718 bp, Homo Sapiens; identical to SEQ ID NO: 73066

SEQ ID NO: 107630 - DNA, 985 bp, Homo Sapiens; identical to SEQ ID NO: 73067
  misc_feature (451)..(485): n is a, c, g, or t
  misc_feature (865)..(899): n is a, c, g, or t

SEQ ID NO: 107631 - DNA, 1485 bp, Homo Sapiens; identical to SEQ ID NO: 73068

SEQ ID NO: 107632 - DNA, 906 bp, Homo Sapiens; identical to SEQ ID NO: 73069
  misc_feature (77)..(111): n is a, c, g, or t

SEQ ID NO: 107633 - DNA, 509 bp, Homo Sapiens; identical to SEQ ID NO: 73070

SEQ ID NO: 107634 - DNA, 1101 bp, Homo Sapiens; identical to SEQ ID NO: 73071
  misc_feature (716)..(759): n is a, c, g, or t

SEQ ID NO: 107635 - DNA, 1729 bp, Homo Sapiens; identical to SEQ ID NO: 73072
  misc_feature (34)..(34): n is a, c, g, or t
  misc_feature (1535)..(1547): n is a, c, g, or t
  misc_feature (1549)..(1550): n is a, c, g, or t
  misc_feature (1552)..(1552): n is a, c, g, or t
  misc_feature (1556)..(1557): n is a, c, g, or t
  misc_feature (1559)..(1561): n is a, c, g, or t
  misc_feature (1564)..(1564): n is a, c, g, or t
  misc_feature (1569)..(1570): n is a, c, g, or t
  misc_feature (1574)..(1574): n is a, c, g, or t
  misc_feature (1578)..(1578): n is a, c, g, or t
  misc_feature (1580)..(1580): n is a, c, g, or t
  misc_feature (1582)..(1582): n is a, c, g, or t

SEQ ID NO: 107636 - DNA, 1515 bp, Homo Sapiens; identical to SEQ ID NO: 73074
  misc_feature (83)..(83): n is a, c, g, or t
  misc_feature (85)..(85): n is a, c, g, or t
  misc_feature (107)..(107): n is a, c, g, or t
  misc_feature (132)..(132): n is a, c, g, or t
  misc_feature (185)..(186): n is a, c, g, or t
  misc_feature (244)..(245): n is a, c, g, or t
  misc_feature (259)..(260): n is a, c, g, or t
  misc_feature (269)..(270): n is a, c, g, or t
  misc_feature (273)..(273): n is a, c, g, or t
  misc_feature (349)..(349): n is a, c, g, or t

SEQ ID NO: 107637 - DNA, 987 bp, Homo Sapiens; identical to SEQ ID NO: 73075
  misc_feature (33)..(33): n is a, c, g, or t
  misc_feature (74)..(75): n is a, c, g, or t
  misc_feature (107)..(107): n is a, c, g, or t
  misc_feature (164)..(164): n is a, c, g, or t
  misc_feature (253)..(253): n is a, c, g, or t

SEQ ID NO: 107638 - DNA, 1125 bp, Homo Sapiens; identical to SEQ ID NO: 73076
  misc_feature (980)..(980): n is a, c, g, or t

SEQ ID NO: 107639 - DNA, 937 bp, Homo Sapiens; identical to SEQ ID NO: 73077

SEQ ID NO: 107640 - DNA, 1076 bp, Homo Sapiens; identical to SEQ ID NO: 73078
  misc_feature (731)..(731): n is a, c, g, or t

SEQ ID NO: 107641 - DNA, 1152 bp, Homo Sapiens; identical to SEQ ID NO: 73079
  misc_feature (203)..(256): n is a, c, g, or t

SEQ ID NO: 107642 - DNA, 1910 bp, Homo Sapiens; identical to SEQ ID NO: 73080
  misc_feature (1290)..(1352): n is a, c, g, or t

SEQ ID NO: 107643 - DNA, 1307 bp, Homo Sapiens; identical to SEQ ID NO: 73081
  misc_feature (1161)..(1165): n is a, c, g, or t
  misc_feature (1168)..(1168): n is a, c, g, or t
  misc_feature (1170)..(1172): n is a, c, g, or t
  misc_feature (1209)..(1217): n is a, c, g, or t

SEQ ID NO: 107644 - DNA, 748 bp, Homo Sapiens; identical to SEQ ID NO: 73082
  misc_feature (646)..(663): n is a, c, g, or t
  misc_feature (694)..(694): n is a, c, g, or t

SEQ ID NO: 107645 - DNA, 836 bp, Homo Sapiens; identical to SEQ ID NO: 73084
  misc_feature (203)..(203): n is a, c, g, or t
  misc_feature (231)..(308): n is a, c, g, or t

SEQ ID NO: 107646 - DNA, 312 bp, Homo Sapiens; identical to SEQ ID NO: 73085

SEQ ID NO: 107647 - DNA, 1320 bp, Homo Sapiens; identical to SEQ ID NO: 73087
  misc_feature (1224)..(1224): n is a, c, g, or t

SEQ ID NO: 107648 - DNA, 1094 bp, Homo Sapiens; identical to SEQ ID NO: 73088
  misc_feature (1019)..(1022): n is a, c, g, or t
  misc_feature (1024)..(1025): n is a, c, g, or t
  misc_feature (1027)..(1029): n is a, c, g, or t
  misc_feature (1034)..(1035): n is a, c, g, or t
  misc_feature (1038)..(1038): n is a, c, g, or t

SEQ ID NO: 107649 - DNA, 1821 bp, Homo Sapiens; identical to SEQ ID NO: 73099

SEQ ID NO: 107650 - DNA, 1344 bp, Homo Sapiens; identical to SEQ ID NO: 73100

SEQ ID NO: 107651 - DNA, 650 bp, Homo Sapiens; identical to SEQ ID NO: 73105

SEQ ID NO: 107652 - DNA, 976 bp, Homo Sapiens; identical to SEQ ID NO: 73106

SEQ ID NO: 107653 - DNA, 690 bp, Homo Sapiens; identical to SEQ ID NO: 73107

SEQ ID NO: 107654 - DNA, 1712 bp, Homo Sapiens; identical to SEQ ID NO: 73108
  misc_feature (155)..(169): n is a, c, g, or t
  misc_feature (330)..(331): n is a, c, g, or t
  misc_feature (462)..(478): n is a, c, g, or t
  misc_feature (1648)..(1648): n is a, c, g, or t

SEQ ID NO: 107655 - DNA, 1755 bp, Homo Sapiens; identical to SEQ ID NO: 73112
  misc_feature (54)..(92): n is a, c, g, or t
  misc_feature (95)..(129): n is a, c, g, or t
  misc_feature (222)..(251): n is a, c, g, or t

SEQ ID NO: 107656 - DNA, 2872 bp, Homo Sapiens; identical to SEQ ID NO: 73113
  misc_feature (1607)..(1718): n is a, c, g, or t
  misc_feature (1824)..(1881): n is a, c, g, or t
  misc_feature (2205)..(2268): n is a, c, g, or t

SEQ ID NO: 107657 - DNA, 972 bp, Homo Sapiens; identical to SEQ ID NO: 73114

SEQ ID NO: 107658 - DNA, 749 bp, Homo Sapiens; identical to SEQ ID NO: 73116

SEQ ID NO: 107659 - DNA, 489 bp, Homo Sapiens; identical to SEQ ID NO: 73117

SEQ ID NO: 107660 - DNA, 1402 bp, Homo Sapiens; identical to SEQ ID NO: 73119

SEQ ID NO: 107661 - DNA, 815 bp, Homo Sapiens; identical to SEQ ID NO: 73120

SEQ ID NO: 107662 - DNA, 2146 bp, Homo Sapiens; identical to SEQ ID NO: 73121
  misc_feature (1912)..(1912): n is a, c, g, or t
  misc_feature (2070)..(2070): n is a, c, g, or t

SEQ ID NO: 107663 - DNA, 556 bp, Homo Sapiens; identical to SEQ ID NO: 73122

SEQ ID NO: 107664 - DNA, 630 bp, Homo Sapiens; identical to SEQ ID NO: 73123

SEQ ID NO: 107665 - DNA, 1497 bp, Homo Sapiens; identical to SEQ ID NO: 73125
  misc_feature (41)..(93): n is a, c, g, or t
  misc_feature (699)..(715): n is a, c, g, or t
  misc_feature (751)..(761): n is a, c, g, or t
  misc_feature (913)..(913): n is a, c, g, or t
  misc_feature (955)..(955): n is a, c, g, or t
  misc_feature (992)..(992): n is a, c, g, or t

SEQ ID NO: 107666 - DNA, 686 bp, Homo Sapiens; identical to SEQ ID NO: 73126

SEQ ID NO: 107667 - DNA, 474 bp, Homo Sapiens; identical to SEQ ID NO: 73127

SEQ ID NO: 107668 - DNA, 879 bp, Homo Sapiens; identical to SEQ ID NO: 73130

SEQ ID NO: 107669 - DNA, 1166 bp, Homo Sapiens; identical to SEQ ID NO: 73131

SEQ ID NO: 107670 - DNA, 695 bp, Homo Sapiens; identical to SEQ ID NO: 73137

SEQ ID NO: 107671 - DNA, 780 bp, Homo Sapiens; identical to SEQ ID NO: 73138
  misc_feature (34)..(34): n is a, c, g, or t

SEQ ID NO: 107672 - DNA, 556 bp, Homo Sapiens; identical to SEQ ID NO: 73139

SEQ ID NO: 107673 - DNA, 764 bp, Homo Sapiens; identical to SEQ ID NO: 73140
  misc_feature (147)..(189): n is a, c, g, or t
  misc_feature (363)..(398): n is a, c, g, or t

SEQ ID NO: 107674 - DNA, 449 bp, Homo Sapiens; identical to SEQ ID NO: 73141
  misc_feature (52)..(87): n is a, c, g, or t

SEQ ID NO: 107675 - DNA, 1053 bp, Homo Sapiens; identical to SEQ ID NO: 73145
  misc_feature (53)..(53): n is a, c, g, or t
  misc_feature (55)..(55): n is a, c, g, or t
  misc_feature (89)..(90): n is a, c, g, or t
  misc_feature (117)..(117): n is a, c, g, or t
  misc_feature (152)..(152): n is a, c, g, or t
  misc_feature (157)..(157): n is a, c, g, or t
  misc_feature (231)..(231): n is a, c, g, or t
  misc_feature (262)..(262): n is a, c, g, or t
  misc_feature (265)..(265): n is a, c, g, or t

SEQ ID NO: 107676 - DNA, 787 bp, Homo Sapiens; identical to SEQ ID NO: 73146

SEQ ID NO: 107677 - DNA, 755 bp, Homo Sapiens; identical to SEQ ID NO: 73147

SEQ ID NO: 107678 - DNA, 2309 bp, Homo Sapiens; identical to SEQ ID NO: 73149
  misc_feature (111)..(205): n is a, c, g, or t

SEQ ID NO: 107679 - DNA, 722 bp, Homo Sapiens; identical to SEQ ID NO: 73150

SEQ ID NO: 107680 - DNA, 1008 bp, Homo Sapiens; identical to SEQ ID NO: 73151

SEQ ID NO: 107681 - DNA, 1053 bp, Homo Sapiens; identical to SEQ ID NO: 73152

SEQ ID NO: 107682 - DNA, 895 bp, Homo Sapiens; identical to SEQ ID NO: 73153

SEQ ID NO: 107683 - DNA, 497 bp, Homo Sapiens; identical to SEQ ID NO: 73154

SEQ ID NO: 107684 - DNA, 799 bp, Homo Sapiens; identical to SEQ ID NO: 73155
  misc_feature (746)..(754): n is a, c, g, or t

SEQ ID NO: 107685 - DNA, 803 bp, Homo Sapiens; identical to SEQ ID NO: 73156

SEQ ID NO: 107686 - DNA, 1101 bp, Homo Sapiens; identical to SEQ ID NO: 73161

SEQ ID NO: 107687 - DNA, 850 bp, Homo Sapiens; identical to SEQ ID NO: 73162
  misc_feature (63)..(97): n is a, c, g, or t

SEQ ID NO: 107688 - DNA, 1084 bp, Homo Sapiens; identical to SEQ ID NO: 73163

SEQ ID NO: 107689 - DNA, 1152 bp, Homo Sapiens; identical to SEQ ID NO: 73164

SEQ ID NO: 107690 - DNA, 2993 bp, Homo Sapiens; identical to SEQ ID NO: 73165
  misc_feature (1992)..(1992): n is a, c, g, or t
  misc_feature (2851)..(2890): n is a, c, g, or t
  misc_feature (2899)..(2930): n is a, c, g, or t

SEQ ID NO: 107691 - DNA, 901 bp, Homo Sapiens; identical to SEQ ID NO: 73166

SEQ ID NO: 107692 - DNA, 1166 bp, Homo Sapiens; identical to SEQ ID NO: 73172
  misc_feature (112)..(112): n is a, c, g, or t
  misc_feature (137)..(137): n is a, c, g, or t
  misc_feature (160)..(160): n is a, c, g, or t

SEQ ID NO: 107693 - DNA, 1151 bp, Homo Sapiens; identical to SEQ ID NO: 73173
  misc_feature (884)..(919): n is a, c, g, or t
  misc_feature (1005)..(1005): n is a, c, g, or t
  misc_feature (1044)..(1067): n is a, c, g, or t

SEQ ID NO: 107694 - DNA, 2032 bp, Homo Sapiens; identical to SEQ ID NO: 73174
  misc_feature (81)..(115): n is a, c, g, or t

SEQ ID NO: 107695 - DNA, 690 bp, Homo Sapiens; identical to SEQ ID NO: 73175
  misc_feature (44)..(78): n is a, c, g, or t

SEQ ID NO: 107696 - DNA, 2251 bp, Homo Sapiens; identical to SEQ ID NO: 73176
  misc_feature (2098)..(2137): n is a, c, g, or t

SEQ ID NO: 107697 - DNA, 1065 bp, Homo Sapiens; identical to SEQ ID NO: 73177
  misc_feature (939)..(939): n is a, c, g, or t
  misc_feature (997)..(997): n is a, c, g, or t
  misc_feature (1009)..(1009): n is a, c, g, or t

SEQ ID NO: 107698 - DNA, 693 bp, Homo Sapiens; identical to SEQ ID NO: 73181
  misc_feature (36)..(36): n is a, c, g, or t
  misc_feature (547)..(606): n is a, c, g, or t

SEQ ID NO: 107699 - DNA, 1075 bp, Homo Sapiens; identical to SEQ ID NO: 73182
  misc_feature (12)..(12): n is a, c, g, or t
  misc_feature (29)..(29): n is a, c, g, or t
  misc_feature (33)..(33): n is a, c, g, or t
  misc_feature (302)..(302): n is a, c, g, or t
  misc_feature (360)..(360): n is a, c, g, or t
  misc_feature (744)..(805): n is a, c, g, or t

SEQ ID NO: 107700 - DNA, 915 bp, Homo Sapiens; identical to SEQ ID NO: 73189

SEQ ID NO: 107701 - DNA, 1342 bp, Homo Sapiens; identical to SEQ ID NO: 73190
  misc_feature (1022)..(1067): n is a, c, g, or t
  misc_feature (1320)..(1320): n is a, c, g, or t

SEQ ID NO: 107702 - DNA, 851 bp, Homo Sapiens; identical to SEQ ID NO: 73191
  misc_feature (467)..(526): n is a, c, g, or t

SEQ ID NO: 107703 - DNA, 1323 bp, Homo Sapiens; identical to SEQ ID NO: 73192
  misc_feature (1199)..(1274): n is a, c, g, or t

SEQ ID NO: 107704 - DNA, 867 bp, Homo Sapiens; identical to SEQ ID NO: 73193
  misc_feature (706)..(780): n is a, c, g, or t

SEQ ID NO: 107705 - DNA, 988 bp, Homo Sapiens; identical to SEQ ID NO: 73194

SEQ ID NO: 107706 - DNA, 799 bp, Homo Sapiens; identical to SEQ ID NO: 73195

SEQ ID NO: 107707 - DNA, 499 bp, Homo Sapiens; identical to SEQ ID NO: 73196
  misc_feature (12)..(12): n is a, c, g, or t
  misc_feature (348)..(382): n is a, c, g, or t

SEQ ID NO: 107708 - DNA, 585 bp, Homo Sapiens; identical to SEQ ID NO: 73197
  misc_feature (427)..(489): n is a, c, g, or t

SEQ ID NO: 107709 - DNA, 703 bp, Homo Sapiens; identical to SEQ ID NO: 73200
  misc_feature (619)..(619): n is a, c, g, or t
  misc_feature (630)..(630): n is a, c, g, or t

SEQ ID NO: 107710 - DNA, 745 bp, Homo Sapiens; identical to SEQ ID NO: 73201

SEQ ID NO: 107711 - DNA, 747 bp, Homo Sapiens; identical to SEQ ID NO: 73209

SEQ ID NO: 107712 - DNA, 1367 bp, Homo Sapiens; identical to SEQ ID NO: 73210
  misc_feature (55)..(55): n is a, c, g, or t

SEQ ID NO: 107713 - DNA, 1894 bp, Homo Sapiens; identical to SEQ ID NO: 73211
  misc_feature (1580)..(1640): n is a, c, g, or t

SEQ ID NO: 107714 - DNA, 520 bp, Homo Sapiens; identical to SEQ ID NO: 73212
  misc_feature (203)..(246): n is a, c, g, or t

SEQ ID NO: 107715 - DNA, 682 bp, Homo Sapiens; identical to SEQ ID NO: 73213
  misc_feature (231)..(315): n is a, c, g, or t
  misc_feature (372)..(424): n is a, c, g, or t

SEQ ID NO: 107716 - DNA, 520 bp, Homo Sapiens; identical to SEQ ID NO: 73214
  misc_feature (199)..(286): n is a, c, g, or t

SEQ ID NO: 107717 - DNA, 387 bp, Homo Sapiens; identical to SEQ ID NO: 73215
  misc_feature (66)..(153): n is a, c, g, or t

SEQ ID NO: 107718 - DNA, 1497 bp, Homo Sapiens; identical to SEQ ID NO: 73218

SEQ ID NO: 107719 - DNA, 1040 bp, Homo Sapiens; identical to SEQ ID NO: 73219
  misc_feature (696)..(696): n is a, c, g, or t

SEQ ID NO: 107720 - DNA, 857 bp, Homo Sapiens; identical to SEQ ID NO: 73220

SEQ ID NO: 107721 - DNA, 1407 bp, Homo Sapiens; identical to SEQ ID NO: 73222

SEQ ID NO: 107722 - DNA, 176 bp, Homo Sapiens; identical to SEQ ID NO: 73223

SEQ ID NO: 107723 - DNA, 1272 bp, Homo Sapiens; identical to SEQ ID NO: 73224

SEQ ID NO: 107724 - DNA, 1274 bp, Homo Sapiens; identical to SEQ ID NO: 73225

SEQ ID NO: 107725 - DNA, 802 bp, Homo Sapiens; identical to SEQ ID NO: 73226

SEQ ID NO: 107726 - DNA, 688 bp, Homo Sapiens; identical to SEQ ID NO: 73230

SEQ ID NO: 107727 - DNA, 801 bp, Homo Sapiens; identical to SEQ ID NO: 73231
  misc_feature (656)..(708): n is a, c, g, or t

SEQ ID NO: 107728 - DNA, 2049 bp, Homo Sapiens; identical to SEQ ID NO: 73234

SEQ ID NO: 107729 - DNA, 960 bp, Homo Sapiens; identical to SEQ ID NO: 73235

SEQ ID NO: 107730 - DNA, 1032 bp, Homo Sapiens; identical to SEQ ID NO: 73236

SEQ ID NO: 107731 - DNA, 1343 bp, Homo Sapiens; identical to SEQ ID NO: 73246
  misc_feature (169)..(169): n is a, c, g, or t
  misc_feature (171)..(171): n is a, c, g, or t
  misc_feature (181)..(181): n is a, c, g, or t
  misc_feature (205)..(205): n is a, c, g, or t
  misc_feature (232)..(232): n is a, c, g, or t
  misc_feature (235)..(235): n is a, c, g, or t
  misc_feature (243)..(243): n is a, c, g, or t
  misc_feature (251)..(253): n is a, c, g, or t
  misc_feature (1068)..(1068): n is a, c, g, or t
  misc_feature (1117)..(1117): n is a, c, g, or t
  misc_feature (1131)..(1131): n is a, c, g, or t
  misc_feature (1158)..(1158): n is a, c, g, or t
  misc_feature (1174)..(1174): n is a, c, g, or t
  misc_feature (1200)..(1200): n is a, c, g, or t
  misc_feature (1239)..(1239): n is a, c, g, or t
  misc_feature (1251)..(1251): n is a, c, g, or t

SEQ ID NO: 107732 - DNA, 1678 bp, Homo Sapiens; identical to SEQ ID NO: 73247

SEQ ID NO: 107733 - DNA, 1912 bp, Homo Sapiens; identical to SEQ ID NO: 73248
  misc_feature (61)..(103): n is a, c, g, or t
  misc_feature (107)..(141): n is a, c, g, or t
  misc_feature (1807)..(1807): n is a, c, g, or t

SEQ ID NO: 107734 - DNA, 988 bp, Homo Sapiens; identical to SEQ ID NO: 73252
  misc_feature (57)..(57): n is a, c, g, or t
  misc_feature (129)..(129): n is a, c, g, or t
  misc_feature (131)..(131): n is a, c, g, or t
  misc_feature (133)..(134): n is a, c, g, or t
  misc_feature (158)..(160): n is a, c, g, or t
  misc_feature (182)..(183): n is a, c, g, or t
  misc_feature (192)..(192): n is a, c, g, or t
  misc_feature (203)..(203): n is a, c, g, or t
  misc_feature (234)..(234): n is a, c, g, or t
  misc_feature (250)..(250): n is a, c, g, or t

SEQ ID NO: 107735 - DNA, 742 bp, Homo Sapiens; identical to SEQ ID NO: 73253
  misc_feature (116)..(116): n is a, c, g, or t
  misc_feature (616)..(675): n is a, c, g, or t

SEQ ID NO: 107736 - DNA, 475 bp, Homo Sapiens; identical to SEQ ID NO: 73254
  misc_feature (54)..(54): n is a, c, g, or t
  misc_feature (75)..(75): n is a, c, g, or t

SEQ ID NO: 107737 - DNA, 1210 bp, Homo Sapiens; identical to SEQ ID NO: 73255

SEQ ID NO: 107738 - DNA, 1327 bp, Homo Sapiens; identical to SEQ ID NO: 73262
  misc_feature (1059)..(1059): n is a, c, g, or t
  misc_feature (1096)..(1096): n is a, c, g, or t
  misc_feature (1150)..(1151): n is a, c, g, or t
  misc_feature (1188)..(1188): n is a, c, g, or t
  misc_feature (1205)..(1206): n is a, c, g, or t
  misc_feature (1272)..(1272): n is a, c, g, or t
  misc_feature (1274)..(1274): n is a, c, g, or t

SEQ ID NO: 107739 - DNA, 540 bp, Homo Sapiens; identical to SEQ ID NO: 73263

SEQ ID NO: 107740 - DNA, 1329 bp, Homo Sapiens; identical to SEQ ID NO: 73264

SEQ ID NO: 107741 - DNA, 1187 bp, Homo Sapiens; identical to SEQ ID NO: 73265
  misc_feature (867)..(885): n is a, c, g, or t
  misc_feature (1074)..(1108): n is a, c, g, or t

SEQ ID NO: 107742 - DNA, 1059 bp, Homo Sapiens; identical to SEQ ID NO: 73266

SEQ ID NO: 107743 - DNA, 931 bp, Homo Sapiens; identical to SEQ ID NO: 73267

SEQ ID NO: 107744 - DNA, 1339 bp, Homo Sapiens; identical to SEQ ID NO: 73268
  misc_feature (51)..(62): n is a, c, g, or t

SEQ ID NO: 107745 - DNA, 2423 bp, Homo Sapiens; identical to SEQ ID NO: 73277
  misc_feature (1793)..(1807): n is a, c, g, or t

SEQ ID NO: 107746 - DNA, 971 bp, Homo Sapiens; identical to SEQ ID NO: 73278

SEQ ID NO: 107747 - DNA, 1339 bp, Homo Sapiens; identical to SEQ ID NO: 73280
  misc_feature (505)..(505): n is a, c, g, or t
  misc_feature (743)..(815): n is a, c, g, or t

SEQ ID NO: 107748 - DNA, 1245 bp, Homo Sapiens; identical to SEQ ID NO: 73281
  misc_feature (746)..(765): n is a, c, g, or t
  misc_feature (974)..(974): n is a, c, g, or t
  misc_feature (985)..(985): n is a, c, g, or t
  misc_feature (1001)..(1001): n is a, c, g, or t
  misc_feature (1035)..(1035): n is a, c, g, or t
  misc_feature (1046)..(1046): n is a, c, g, or t
  misc_feature (1207)..(1207): n is a, c, g, or t

SEQ ID NO: 107749 - DNA, 1905 bp, Homo Sapiens; identical to SEQ ID NO: 73282

SEQ ID NO: 107750 - DNA, 1428 bp, Homo Sapiens; identical to SEQ ID NO: 73283
  misc_feature (843)..(862): n is a, c, g, or t

SEQ ID NO: 107751 - DNA, 813 bp, Homo Sapiens; identical to SEQ ID NO: 73290
  misc_feature (1)..(1): n is a, c, g, or t

SEQ ID NO: 107752 - DNA, 1306 bp, Homo Sapiens; identical to SEQ ID NO: 73291
  misc_feature (767)..(906): n is a, c, g, or t
  misc_feature (909)..(972): n is a, c, g, or t
  misc_feature (1052)..(1082): n is a, c, g, or t

SEQ ID NO: 107753 - DNA, 673 bp, Homo Sapiens; identical to SEQ ID NO: 73296
  misc_feature (212)..(239): n is a, c, g, or t

SEQ ID NO: 107754 - DNA, 437 bp, Homo Sapiens; identical to SEQ ID NO: 73297
  misc_feature (140)..(152): n is a, c, g, or t
  misc_feature (220)..(247): n is a, c, g, or t

SEQ ID NO: 107755 - DNA, 888 bp, Homo Sapiens; identical to SEQ ID NO: 73298
  misc_feature (808)..(835): n is a, c, g, or t

SEQ ID NO: 107756 - DNA, 899 bp, Homo Sapiens; identical to SEQ ID NO: 73299

SEQ ID NO: 107757 - DNA, 1089 bp, Homo Sapiens; identical to SEQ ID NO: 73302
  misc_feature (58)..(58): n is a, c, g, or t
  misc_feature (70)..(70): n is a, c, g, or t
  misc_feature (73)..(74): n is a, c, g, or t
  misc_feature (82)..(82): n is a, c, g, or t
  misc_feature (92)..(92): n is a, c, g, or t
  misc_feature (107)..(107): n is a, c, g, or t
  misc_feature (149)..(149): n is a, c, g, or t
  misc_feature (159)..(160): n is a, c, g, or t
  misc_feature (173)..(173): n is a, c, g, or t
  misc_feature (181)..(181): n is a, c, g, or t
  misc_feature (192)..(192): n is a, c, g, or t
  misc_feature (231)..(231): n is a, c, g, or t
  misc_feature (246)..(246): n is a, c, g, or t
  misc_feature (251)..(251): n is a, c, g, or t
  misc_feature (339)..(339): n is a, c, g, or t

SEQ ID NO: 107758 - DNA, 770 bp, Homo Sapiens; identical to SEQ ID NO: 73303

SEQ ID NO: 107759 - DNA, 813 bp, Homo Sapiens; identical to SEQ ID NO: 73304

SEQ ID NO: 107760 - DNA, 1464 bp, Homo Sapiens; identical to SEQ ID NO: 73305
  misc_feature (1363)..(1393): n is a, c, g, or t

SEQ ID NO: 107761 - DNA, 1031 bp, Homo Sapiens; identical to SEQ ID NO: 73306

SEQ ID NO: 107762 - DNA, 1175 bp, Homo Sapiens; identical to SEQ ID NO: 73313
  misc_feature (130)..(130): n is a, c, g, or t

SEQ ID NO: 107763 - DNA, 914 bp, Homo Sapiens; identical to SEQ ID NO: 73314

SEQ ID NO: 107764 - DNA, 679 bp, Homo Sapiens; identical to SEQ ID NO: 73321
  misc_feature (468)..(526): n is a, c, g, or t

SEQ ID NO: 107765 - DNA, 1245 bp, Homo Sapiens; identical to SEQ ID NO: 73322
  misc_feature (730)..(768): n is a, c, g, or t

SEQ ID NO: 107766 - DNA, 2789 bp, Homo Sapiens; identical to SEQ ID NO: 73325
  misc_feature (2632)..(2634): n is a, c, g, or t

SEQ ID NO: 107767 - DNA, 1897 bp, Homo Sapiens; identical to SEQ ID NO: 73326
  misc_feature (543)..(543): n is a, c, g, or t
  misc_feature (1116)..(1174): n is a, c, g, or t
  misc_feature (1231)..(1271): n is a, c, g, or t
  misc_feature (1282)..(1292): n is a, c, g, or t
  misc_feature (1378)..(1435): n is a, c, g, or t
  misc_feature (1634)..(1667): n is a, c, g, or t
  misc_feature (1698)..(1760): n is a, c, g, or t
  misc_feature (1783)..(1808): n is a, c, g, or t

SEQ ID NO: 107768 - DNA, 1676 bp, Homo Sapiens; identical to SEQ ID NO: 73327
  misc_feature (160)..(266): n is a, c, g, or t

SEQ ID NO: 107769 - DNA, 1026 bp, Homo Sapiens; identical to SEQ ID NO: 73328
  misc_feature (882)..(882): n is a, c, g, or t
  misc_feature (968)..(968): n is a, c, g, or t
  misc_feature (971)..(973): n is a, c, g, or t

SEQ ID NO: 107770 - DNA, 1052 bp, Homo Sapiens; identical to SEQ ID NO: 73329
  misc_feature (875)..(875): n is a, c, g, or t

SEQ ID NO: 107771 - DNA, 1462 bp, Homo Sapiens; identical to SEQ ID NO: 73330
  misc_feature (532)..(547): n is a, c, g, or t

SEQ ID NO: 107772 - DNA, 1674 bp, Homo Sapiens; identical to SEQ ID NO: 73333
  misc_feature (1139)..(1188): n is a, c, g, or t

SEQ ID NO: 107773 - DNA, 1053 bp, Homo Sapiens; identical to SEQ ID NO: 73334
  misc_feature (595)..(595): n is a, c, g, or t
  misc_feature (627)..(627): n is a, c, g, or t
  misc_feature (636)..(652): n is a, c, g, or t
  misc_feature (683)..(861): n is a, c, g, or t
  misc_feature (887)..(887): n is a, c, g, or t

SEQ ID NO: 107774 - DNA, 1578 bp, Homo Sapiens; identical to SEQ ID NO: 73335

SEQ ID NO: 107775 - DNA, 565 bp, Homo Sapiens; identical to SEQ ID NO: 73336

SEQ ID NO: 107776 - DNA, 821 bp, Homo Sapiens; identical to SEQ ID NO: 73337
  misc_feature (581)..(581): n is a, c, g, or t
  misc_feature (684)..(684): n is a, c, g, or t
  misc_feature (723)..(723): n is a, c, g, or t

SEQ ID NO: 107777 - DNA, 497 bp, Homo Sapiens; identical to SEQ ID NO: 73338

SEQ ID NO: 107778 - DNA, 1586 bp, Homo Sapiens; identical to SEQ ID NO: 73339
  misc_feature (539)..(597): n is a, c, g, or t
  misc_feature (1356)..(1369): n is a, c, g, or t

SEQ ID NO: 107779 - DNA, 1127 bp, Homo Sapiens; identical to SEQ ID NO: 73344

SEQ ID NO: 107780 - DNA, 626 bp, Homo Sapiens; identical to SEQ ID NO: 73345

SEQ ID NO: 107781 - DNA, 715 bp, Homo Sapiens; identical to SEQ ID NO: 73346
  misc_feature (43)..(43): n is a, c, g, or t
  misc_feature (104)..(104): n is a, c, g, or t
  misc_feature (153)..(153): n is a, c, g, or t

SEQ ID NO: 107782 - DNA, 1100 bp, Homo Sapiens; identical to SEQ ID NO: 73347
  misc_feature (950)..(966): n is a, c, g, or t
  misc_feature (1007)..(1007): n is a, c, g, or t

SEQ ID NO: 107783 - DNA, 926 bp, Homo Sapiens; identical to SEQ ID NO: 73348

SEQ ID NO: 107784 - DNA, 947 bp, Homo Sapiens; identical to SEQ ID NO: 73349
  misc_feature (756)..(808): n is a, c, g, or t

SEQ ID NO: 107785 - DNA, 1829 bp, Homo Sapiens; identical to SEQ ID NO: 73352
  misc_feature (1193)..(1211): n is a, c, g, or t
  misc_feature (1229)..(1761): n is a, c, g, or t
  misc_feature (1774)..(1774): n is a, c, g, or t
  misc_feature (1781)..(1781): n is a, c, g, or t

SEQ ID NO: 107786 - DNA, 928 bp, Homo Sapiens; identical to SEQ ID NO: 73353
  misc_feature (821)..(821): n is a, c, g, or t
  misc_feature (857)..(867): n is a, c, g, or t

SEQ ID NO: 107787 - DNA, 457 bp, Homo Sapiens; identical to SEQ ID NO: 73354

SEQ ID NO: 107788 - DNA, 1042 bp, Homo Sapiens; identical to SEQ ID NO: 73359

SEQ ID NO: 107789 - DNA, 1049 bp, Homo Sapiens; identical to SEQ ID NO: 73360

SEQ ID NO: 107790 - DNA, 935 bp, Homo Sapiens; identical to SEQ ID NO: 73361

SEQ ID NO: 107791 - DNA, 649 bp, Homo Sapiens; identical to SEQ ID NO: 73364

SEQ ID NO: 107792 - DNA, 786 bp, Homo Sapiens; identical to SEQ ID NO: 73365

SEQ ID NO: 107793 - DNA, 1022 bp, Homo Sapiens; identical to SEQ ID NO: 73366
  misc_feature (43)..(43): n is a, c, g, or t
  misc_feature (57)..(57): n is a, c, g, or t
  misc_feature (117)..(117): n is a, c, g, or t
  misc_feature (157)..(157): n is a, c, g, or t
  misc_feature (160)..(160): n is a, c, g, or t
  misc_feature (179)..(179): n is a, c, g, or t
  misc_feature (182)..(183): n is a, c, g, or t
  misc_feature (188)..(188): n is a, c, g, or t
  misc_feature (198)..(199): n is a, c, g, or t
  misc_feature (224)..(224): n is a, c, g, or t

SEQ ID NO: 107794 - DNA, 1083 bp, Homo Sapiens; identical to SEQ ID NO: 73367

SEQ ID NO: 107795 - DNA, 464 bp, Homo Sapiens; identical to SEQ ID NO: 73368

SEQ ID NO: 107796 - DNA, 514 bp, Homo Sapiens; identical to SEQ ID NO: 73369

SEQ ID NO: 107797 - DNA, 695 bp, Homo Sapiens; identical to SEQ ID NO: 73371
  misc_feature (72)..(72): n is a, c, g, or t
  misc_feature (103)..(135): n is a, c, g, or t

SEQ ID NO: 107798 - DNA, 1036 bp, Homo Sapiens; identical to SEQ ID NO: 73372

SEQ ID NO: 107799 - DNA, 1768 bp, Homo Sapiens; identical to SEQ ID NO: 73373
  misc_feature (1651)..(1683): n is a, c, g, or t

SEQ ID NO: 107800 - DNA, 1467 bp, Homo Sapiens; identical to SEQ ID NO: 73374
  misc_feature (928)..(957): n is a, c, g, or t

SEQ ID NO: 107801 - DNA, 977 bp, Homo Sapiens; identical to SEQ ID NO: 73375

SEQ ID NO: 107802 - DNA, 1133 bp, Homo Sapiens; identical to SEQ ID NO: 73381

SEQ ID NO: 107803 - DNA, 951 bp, Homo Sapiens; identical to SEQ ID NO: 73382

SEQ ID NO: 107804 - DNA, 1383 bp, Homo Sapiens; identical to SEQ ID NO: 73386
  misc_feature (653)..(653): n is a, c, g, or t

SEQ ID NO: 107805 - DNA, 477 bp, Homo Sapiens; identical to SEQ ID NO: 73387

SEQ ID NO: 107806 - DNA, 547 bp, Homo Sapiens; identical to SEQ ID NO: 73388
  misc_feature (425)..(425): n is a, c, g, or t

SEQ ID NO: 107807 - DNA, 746 bp, Homo Sapiens; identical to SEQ ID NO: 73390
  misc_feature (91)..(130): n is a, c, g, or t

SEQ ID NO: 107808 - DNA, 554 bp, Homo Sapiens; identical to SEQ ID NO: 73391
  misc_feature (37)..(37): n is a, c, g, or t
  misc_feature (422)..(461): n is a, c, g, or t

SEQ ID NO: 107809 - DNA, 2317 bp, Homo Sapiens; identical to SEQ ID NO: 73399

SEQ ID NO: 107810 - DNA, 508 bp, Homo Sapiens; identical to SEQ ID NO: 73400
  misc_feature (68)..(68): n is a, c, g, or t

SEQ ID NO: 107811 - DNA, 410 bp, Homo Sapiens; identical to SEQ ID NO: 73408

SEQ ID NO: 107812 - DNA, 877 bp, Homo Sapiens; identical to SEQ ID NO: 73409
  misc_feature (783)..(783): n is a, c, g, or t

SEQ ID NO: 107813 - DNA, 1512 bp, Homo Sapiens; identical to SEQ ID NO: 73410

SEQ ID NO: 107814 - DNA, 689 bp, Homo Sapiens; identical to SEQ ID NO: 73414
  misc_feature (36)..(36): n is a, c, g, or t
  misc_feature (649)..(649): n is a, c, g, or t

SEQ ID NO: 107815 - DNA, 1272 bp, Homo Sapiens; identical to SEQ ID NO: 73415

SEQ ID NO: 107816 - DNA, 724 bp, Homo Sapiens; identical to SEQ ID NO: 73417
  misc_feature (23)..(23): n is a, c, g, or t

SEQ ID NO: 107817 - DNA, 914 bp, Homo Sapiens; identical to SEQ ID NO: 73418

SEQ ID NO: 107818 - DNA, 614 bp, Homo Sapiens; identical to SEQ ID NO: 73421
  misc_feature (52)..(52): n is a, c, g, or t

SEQ ID NO: 107819 - DNA, 2293 bp, Homo Sapiens; identical to SEQ ID NO: 73422

SEQ ID NO: 107820 - DNA, 1444 bp, Homo Sapiens; identical to SEQ ID NO: 73427
  misc_feature (79)..(145): n is a, c, g, or t
  misc_feature (1361)..(1371): n is a, c, g, or t

SEQ ID NO: 107821 - DNA, 704 bp, Homo Sapiens; identical to SEQ ID NO: 73428
  misc_feature (100)..(114): n is a, c, g, or t
  misc_feature (251)..(260): n is a, c, g, or t

SEQ ID NO: 107822 - DNA, 3032 bp, Homo Sapiens; identical to SEQ ID NO: 73431
  misc_feature (22)..(22): n is a, c, g, or t
  misc_feature (48)..(48): n is a, c, g, or t
  misc_feature (51)..(51): n is a, c, g, or t
  misc_feature (101)..(101): n is a, c, g, or t
  misc_feature (103)..(103): n is a, c, g, or t
  misc_feature (109)..(110): n is a, c, g, or t
  misc_feature (120)..(121): n is a, c, g, or t
  misc_feature (123)..(123): n is a, c, g, or t
  misc_feature (131)..(131): n is a, c, g, or t
  misc_feature (147)..(147): n is a, c, g, or t
  misc_feature (160)..(160): n is a, c, g, or t
  misc_feature (163)..(163): n is a, c, g, or t
  misc_feature (168)..(168): n is a, c, g, or t
  misc_feature (193)..(193): n is a, c, g, or t
  misc_feature (225)..(225): n is a, c, g, or t

SEQ ID NO: 107823 - DNA, 1070 bp, Homo Sapiens; identical to SEQ ID NO: 73432

SEQ ID NO: 107824 - DNA, 1212 bp, Homo Sapiens; identical to SEQ ID NO: 73433
  misc_feature (1030)..(1040): n is a, c, g, or t

SEQ ID NO: 107825 - DNA, 948 bp, Homo Sapiens; identical to SEQ ID NO: 73434
  misc_feature (322)..(323): n is a, c, g, or t

SEQ ID NO: 107826 - DNA, 2376 bp, Homo Sapiens; identical to SEQ ID NO: 73436
  misc_feature (1853)..(1853): n is a, c, g, or t
  misc_feature (2090)..(2312): n is a, c, g, or t

SEQ ID NO: 107827 - DNA, 1140 bp, Homo Sapiens; identical to SEQ ID NO: 73437
  misc_feature (95)..(95): n is a, c, g, or t

SEQ ID NO: 107828 - DNA, 4034 bp, Homo Sapiens; identical to SEQ ID NO: 73440
  misc_feature (3922)..(3956): n is a, c, g, or t

SEQ ID NO: 107829 - DNA, 946 bp, Homo Sapiens; identical to SEQ ID NO: 73441
  misc_feature (830)..(865): n is a, c, g, or t

SEQ ID NO: 107830 - DNA, 786 bp, Homo Sapiens; identical to SEQ ID NO: 73442

SEQ ID NO: 107831 - DNA, 1004 bp, Homo Sapiens; identical to SEQ ID NO: 73443

SEQ ID NO: 107832 - DNA, 1699 bp, Homo Sapiens; identical to SEQ ID NO: 73448
  misc_feature (1489)..(1489): n is a, c, g, or t
  misc_feature (1652)..(1652): n is a, c, g, or t

SEQ ID NO: 107833 - DNA, 580 bp, Homo Sapiens; identical to SEQ ID NO: 73449
  misc_feature (307)..(307): n is a, c, g, or t
  misc_feature (320)..(320): n is a, c, g, or t

SEQ ID NO: 107834 - DNA, 1163 bp, Homo Sapiens; identical to SEQ ID NO: 73450

SEQ ID NO: 107835 - DNA, 1126 bp, Homo Sapiens; identical to SEQ ID NO: 73451

SEQ ID NO: 107836 - DNA, 1068 bp, Homo Sapiens; identical to SEQ ID NO: 73452
  misc_feature (147)..(147): n is a, c, g, or t
  misc_feature (988)..(1009): n is a, c, g, or t

SEQ ID NO: 107837 - DNA, 1526 bp, Homo Sapiens; identical to SEQ ID NO: 73453
  misc_feature (1433)..(1462): n is a, c, g, or t

SEQ ID NO: 107838 - DNA, 1029 bp, Homo Sapiens; identical to SEQ ID NO: 73454
  misc_feature (70)..(70): n is a, c, g, or t
  misc_feature (82)..(82): n is a, c, g, or t
  misc_feature (258)..(259): n is a, c, g, or t
  misc_feature (271)..(271): n is a, c, g, or t
  misc_feature (280)..(280): n is a, c, g, or t
  misc_feature (305)..(305): n is a, c, g, or t

SEQ ID NO: 107839 - DNA, 1146 bp, Homo Sapiens; identical to SEQ ID NO: 73455

SEQ ID NO: 107840 - DNA, 964 bp, Homo Sapiens; identical to SEQ ID NO: 73456
  misc_feature (34)..(34): n is a, c, g, or t

SEQ ID NO: 107841 - DNA, 761 bp, Homo Sapiens; identical to SEQ ID NO: 73457

SEQ ID NO: 107842 - DNA, 944 bp, Homo Sapiens; identical to SEQ ID NO: 73458

SEQ ID NO: 107843 - DNA, 782 bp, Homo Sapiens; identical to SEQ ID NO: 73460

SEQ ID NO: 107844 - DNA, 1280 bp, Homo Sapiens; identical to SEQ ID NO: 73461

SEQ ID NO: 107845 - DNA, 2282 bp, Homo Sapiens; identical to SEQ ID NO: 73466
  misc_feature (2223)..(2242): n is a, c, g, or t

SEQ ID NO: 107846 - DNA, 1240 bp, Homo Sapiens; identical to SEQ ID NO: 73467
  misc_feature (589)..(590): n is a, c, g, or t
  misc_feature (592)..(599): n is a, c, g, or t
  misc_feature (601)..(603): n is a, c, g, or t
  misc_feature (606)..(607): n is a, c, g, or t
  misc_feature (792)..(804): n is a, c, g, or t
  misc_feature (814)..(822): n is a, c, g, or t
  misc_feature (1038)..(1046): n is a, c, g, or t

SEQ ID NO: 107847 - DNA, 274 bp, Homo Sapiens; identical to SEQ ID NO: 73468

SEQ ID NO: 107848 - DNA, 490 bp, Homo Sapiens; identical to SEQ ID NO: 73470

SEQ ID NO: 107849 - DNA, 853 bp, Homo Sapiens; identical to SEQ ID NO: 73471
  misc_feature (581)..(594): n is a, c, g, or t
  misc_feature (724)..(736): n is a, c, g, or t

SEQ ID NO: 107850 - DNA, 462 bp, Homo Sapiens; identical to SEQ ID NO: 73472

SEQ ID NO: 107851 - DNA, 1770 bp, Homo Sapiens; identical to SEQ ID NO: 73473
  misc_feature (116)..(128): n is a, c, g, or t
  misc_feature (133)..(133): n is a, c, g, or t
  misc_feature (256)..(268): n is a, c, g, or t

SEQ ID NO: 107852 - DNA, 1279 bp, Homo Sapiens; identical to SEQ ID NO: 73475

SEQ ID NO: 107853 - DNA, 518 bp, Homo Sapiens; identical to SEQ ID NO: 73476

SEQ ID NO: 107854 - DNA, 554 bp, Homo Sapiens; identical to SEQ ID NO: 73477
  misc_feature (116)..(124): n is a, c, g, or t
  misc_feature (330)..(376): n is a, c, g, or t

SEQ ID NO: 107855 - DNA, 1220 bp, Homo Sapiens; identical to SEQ ID NO: 73478
  misc_feature (785)..(793): n is a, c, g, or t
  misc_feature (806)..(806): n is a, c, g, or t
  misc_feature (814)..(814): n is a, c, g, or t
  misc_feature (831)..(839): n is a, c, g, or t
  misc_feature (1045)..(1095): n is a, c, g, or t

SEQ ID NO: 107856 - DNA, 967 bp, Homo Sapiens; identical to SEQ ID NO: 73489

SEQ ID NO: 107857 - DNA, 1000 bp, Homo Sapiens; identical to SEQ ID NO: 73490
  misc_feature (97)..(174): n is a, c, g, or t

SEQ ID NO: 107858 - DNA, 483 bp, Homo Sapiens; identical to SEQ ID NO: 73491

SEQ ID NO: 107859 - DNA, 876 bp, Homo Sapiens; identical to SEQ ID NO: 73493

SEQ ID NO: 107860 - DNA, 2708 bp, Homo Sapiens; identical to SEQ ID NO: 73494

SEQ ID NO: 107861 - DNA, 1046 bp, Homo Sapiens; identical to SEQ ID NO: 73496
  misc_feature (93)..(204): n is a, c, g, or t
  misc_feature (333)..(333): n is a, c, g, or t

SEQ ID NO: 107862 - DNA, 1372 bp, Homo Sapiens; identical to SEQ ID NO: 73497

SEQ ID NO: 107863 - DNA, 1070 bp, Homo Sapiens; identical to SEQ ID NO: 73499

SEQ ID NO: 107864 - DNA, 1067 bp, Homo Sapiens; identical to SEQ ID NO: 73500
  misc_feature (1041)..(1041): n is a, c, g, or t

SEQ ID NO: 107865 - DNA, 1598 bp, Homo Sapiens; identical to SEQ ID NO: 73501
  misc_feature (386)..(386): n is a, c, g, or t

SEQ ID NO: 107866 - DNA, 3181 bp, Homo Sapiens; identical to SEQ ID NO: 73503

SEQ ID NO: 107867 - DNA, 998 bp, Homo Sapiens; identical to SEQ ID NO: 73504
  misc_feature (291)..(291): n is a, c, g, or t

SEQ ID NO: 107868 - DNA, 1268 bp, Homo Sapiens; identical to SEQ ID NO: 73506
  misc_feature (227)..(227): n is a, c, g, or t
  misc_feature (299)..(299): n is a, c, g, or t
  misc_feature (302)..(302): n is a, c, g, or t
  misc_feature (329)..(329): n is a, c, g, or t
  misc_feature (719)..(1022): n is a, c, g, or t

SEQ ID NO: 107869 - DNA, 1006 bp, Homo Sapiens; identical to SEQ ID NO: 73507

SEQ ID NO: 107870 - DNA, 1945 bp, Homo Sapiens; identical to SEQ ID NO: 73513

SEQ ID NO: 107871 - DNA, 491 bp, Homo Sapiens; identical to SEQ ID NO: 73514

SEQ ID NO: 107872 - DNA, 1732 bp, Homo Sapiens; identical to SEQ ID NO: 73515

SEQ ID NO: 107873 - DNA, 576 bp, Homo Sapiens; identical to SEQ ID NO: 73516
  misc_feature (126)..(143): n is a, c, g, or t
  misc_feature (228)..(343): n is a, c, g, or t

SEQ ID NO: 107874 - DNA, 1164 bp, Homo Sapiens; identical to SEQ ID NO: 73524

SEQ ID NO: 107875 - DNA, 992 bp, Homo Sapiens; identical to SEQ ID NO: 73525

SEQ ID NO: 107876 - DNA, 1418 bp, Homo Sapiens; identical to SEQ ID NO: 73527
  misc_feature (48)..(87): n is a, c, g, or t
  misc_feature (91)..(125): n is a, c, g, or t
  misc_feature (704)..(819): n is a, c, g, or t

SEQ ID NO: 107877 - DNA, 753 bp, Homo Sapiens; identical to SEQ ID NO: 73528

SEQ ID NO: 107878 - DNA, 610 bp, Homo Sapiens; identical to SEQ ID NO: 73529
  misc_feature (386)..(423): n is a, c, g, or t

SEQ ID NO: 107879 - DNA, 1078 bp, Homo Sapiens; identical to SEQ ID NO: 73530
  misc_feature (835)..(849): n is a, c, g, or t

SEQ ID NO: 107880 - DNA, 1067 bp, Homo Sapiens; identical to SEQ ID NO: 73531
  misc_feature (918)..(976): n is a, c, g, or t

SEQ ID NO: 107881 - DNA, 687 bp, Homo Sapiens; identical to SEQ ID NO: 73532
  misc_feature (510)..(518): n is a, c, g, or t

SEQ ID NO: 107882 - DNA, 2543 bp, Homo Sapiens; identical to SEQ ID NO: 73533
  misc_feature (2213)..(2213): n is a, c, g, or t
  misc_feature (2249)..(2306): n is a, c, g, or t

SEQ ID NO: 107883 - DNA, 463 bp, Homo Sapiens; identical to SEQ ID NO: 73534
  misc_feature (334)..(334): n is a, c, g, or t
  misc_feature (341)..(341): n is a, c, g, or t
  misc_feature (364)..(364): n is a, c, g, or t

SEQ ID NO: 107884 - DNA, 771 bp, Homo Sapiens; identical to SEQ ID NO: 73537

SEQ ID NO: 107885 - DNA, 408 bp, Homo Sapiens; identical to SEQ ID NO: 73538

SEQ ID NO: 107886 - DNA, 657 bp, Homo Sapiens; identical to SEQ ID NO: 73539

SEQ ID NO: 107887 - DNA, 698 bp, Homo Sapiens; identical to SEQ ID NO: 73541
  misc_feature (46)..(46): n is a, c, g, or t

SEQ ID NO: 107888 - DNA, 907 bp, Homo Sapiens; identical to SEQ ID NO: 73542

SEQ ID NO: 107889 - DNA, 2107 bp, Homo Sapiens; identical to SEQ ID NO: 73543

SEQ ID NO: 107890 - DNA, 3097 bp, Homo Sapiens; identical to SEQ ID NO: 73544
  misc_feature (3021)..(3021): n is a, c, g, or t
  misc_feature (3049)..(3049): n is a, c, g, or t
  misc_feature (3059)..(3059): n is a, c, g, or t

SEQ ID NO: 107891 - DNA, 537 bp, Homo Sapiens; identical to SEQ ID NO: 73545

SEQ ID NO: 107892 - DNA, 1641 bp, Homo Sapiens; identical to SEQ ID NO: 73549
  misc_feature (83)..(117): n is a, c, g, or t

SEQ ID NO: 107893 - DNA, 705 bp, Homo Sapiens; identical to SEQ ID NO: 73550

SEQ ID NO: 107894 - DNA, 532 bp, Homo Sapiens; identical to SEQ ID NO: 73557

SEQ ID NO: 107895 - DNA, 652 bp, Homo Sapiens; identical to SEQ ID NO: 73558

SEQ ID NO: 107896 - DNA, 827 bp, Homo Sapiens; identical to SEQ ID NO: 73560
  misc_feature (749)..(765): n is a, c, g, or t
  misc_feature (768)..(768): n is a, c, g, or t
  misc_feature (770)..(770): n is a, c, g, or t
  misc_feature (772)..(775): n is a, c, g, or t

SEQ ID NO: 107897 - DNA, 860 bp, Homo Sapiens; identical to SEQ ID NO: 73561
  misc_feature (688)..(705): n is a, c, g, or t
  misc_feature (709)..(713): n is a, c, g, or t

SEQ ID NO: 107898 - DNA, 560 bp, Homo Sapiens; identical to SEQ ID NO: 73562

SEQ ID NO: 107899 - DNA, 1233 bp, Homo Sapiens; identical to SEQ ID NO: 73564

SEQ ID NO: 107900 - DNA, 2126 bp, Homo Sapiens; identical to SEQ ID NO: 73565

SEQ ID NO: 107901 - DNA, 996 bp, Homo Sapiens; identical to SEQ ID NO: 73566
  misc_feature (878)..(912): n is a, c, g, or t

SEQ ID NO: 107902 - DNA, 1037 bp, Homo Sapiens; identical to SEQ ID NO: 73579
  misc_feature (14)..(14): n is a, c, g, or t
  misc_feature (55)..(55): n is a, c, g, or t
  misc_feature (80)..(80): n is a, c, g, or t
  misc_feature (121)..(121): n is a, c, g, or t
  misc_feature (253)..(253): n is a, c, g, or t
  misc_feature (269)..(269): n is a, c, g, or t
  misc_feature (305)..(305): n is a, c, g, or t

SEQ ID NO: 107903 - DNA, 1534 bp, Homo Sapiens; identical to SEQ ID NO: 73580

SEQ ID NO: 107904 - DNA, 941 bp, Homo Sapiens; identical to SEQ ID NO: 73587

SEQ ID NO: 107905 - DNA, 979 bp, Homo Sapiens; identical to SEQ ID NO: 73588

SEQ ID NO: 107906 - DNA, 875 bp, Homo Sapiens; identical to SEQ ID NO: 73589

SEQ ID NO: 107907 - DNA, 518 bp, Homo Sapiens; identical to SEQ ID NO: 73590

SEQ ID NO: 107908 - DNA, 971 bp, Homo Sapiens; identical to SEQ ID NO: 73591

SEQ ID NO: 107909 - DNA, 892 bp, Homo Sapiens; identical to SEQ ID NO: 73592

SEQ ID NO: 107910 - DNA, 762 bp, Homo Sapiens; identical to SEQ ID NO: 73593

SEQ ID NO: 107911 - DNA, 1072 bp, Homo Sapiens; identical to SEQ ID NO: 73594
  misc_feature (1013)..(1015): n is a, c, g, or t

SEQ ID NO: 107912 - DNA, 1409 bp, Homo Sapiens; identical to SEQ ID NO: 73596
  misc_feature (69)..(160): n is a, c, g, or t

SEQ ID NO: 107913 - DNA, 456 bp, Homo Sapiens; identical to SEQ ID NO: 73597

SEQ ID NO: 107914 - DNA, 1418 bp, Homo Sapiens; identical to SEQ ID NO: 73599
  misc_feature (53)..(53): n is a, c, g, or t

SEQ ID NO: 107915 - DNA, 1129 bp, Homo Sapiens; identical to SEQ ID NO: 73600

SEQ ID NO: 107916 - DNA, 874 bp, Homo Sapiens; identical to SEQ ID NO: 73601

SEQ ID NO: 107917 - DNA, 1010 bp, Homo Sapiens; identical to SEQ ID NO: 73603

SEQ ID NO: 107918 - DNA, 522 bp, Homo Sapiens; identical to SEQ ID NO: 73604
  misc_feature (414)..(414): n is a, c, g, or t

SEQ ID NO: 107919 - DNA, 902 bp, Homo Sapiens; identical to SEQ ID NO: 73615

SEQ ID NO: 107920 - DNA, 1024 bp, Homo Sapiens; identical to SEQ ID NO: 73616

SEQ ID NO: 107921 - DNA, 1406 bp, Homo Sapiens; identical to SEQ ID NO: 73624

SEQ ID NO: 107922 - DNA, 1002 bp, Homo Sapiens; identical to SEQ ID NO: 73625
  misc_feature (988)..(988): n is a, c, g, or t

SEQ ID NO: 107923 - DNA, 1297 bp, Homo Sapiens; identical to SEQ ID NO: 73627
  misc_feature (60)..(60): n is a, c, g, or t
  misc_feature (81)..(168): n is a, c, g, or t
  misc_feature (170)..(171): n is a, c, g, or t
  misc_feature (174)..(174): n is a, c, g, or t
  misc_feature (180)..(180): n is a, c, g, or t
  misc_feature (184)..(184): n is a, c, g, or t
  misc_feature (1011)..(1121): n is a, c, g, or t
  misc_feature (1125)..(1125): n is a, c, g, or t
  misc_feature (1133)..(1133): n is a, c, g, or t
  misc_feature (1138)..(1140): n is a, c, g, or t
  misc_feature (1142)..(1187): n is a, c, g, or t

SEQ ID NO: 107924 - DNA, 1294 bp, Homo Sapiens; identical to SEQ ID NO: 73628
  misc_feature (30)..(30): n is a, c, g, or t

SEQ ID NO: 107925 - DNA, 2385 bp, Homo Sapiens; identical to SEQ ID NO: 73634
  misc_feature (41)..(75): n is a, c, g, or t
  misc_feature (999)..(1071): n is a, c, g, or t
  misc_feature (1916)..(1971): n is a, c, g, or t
  misc_feature (1998)..(2023): n is a, c, g, or t
  misc_feature (2219)..(2237): n is a, c, g, or t

SEQ ID NO: 107926 - DNA, 684 bp, Homo Sapiens; identical to SEQ ID NO: 73635
  misc_feature (221)..(261): n is a, c, g, or t
  misc_feature (302)..(327): n is a, c, g, or t
  misc_feature (407)..(470): n is a, c, g, or t
  misc_feature (523)..(541): n is a, c, g, or t

SEQ ID NO: 107927 - DNA, 2806 bp, Homo Sapiens; identical to SEQ ID NO: 73645
  misc_feature (163)..(222): n is a, c, g, or t

SEQ ID NO: 107928 - DNA, 571 bp, Homo Sapiens; identical to SEQ ID NO: 73646

SEQ ID NO: 107929 - DNA, 1173 bp, Homo Sapiens; identical to SEQ ID NO: 73647
  misc_feature (683)..(718): n is a, c, g, or t
  misc_feature (793)..(813): n is a, c, g, or t
  misc_feature (979)..(979): n is a, c, g, or t
  misc_feature (1061)..(1071): n is a, c, g, or t

SEQ ID NO: 107930 - DNA, 632 bp, Homo Sapiens; identical to SEQ ID NO: 73648
  misc_feature (336)..(378): n is a, c, g, or t
  misc_feature (446)..(466): n is a, c, g, or t

SEQ ID NO: 107931 - DNA, 1281 bp, Homo Sapiens; identical to SEQ ID NO: 73657

SEQ ID NO: 107932 - DNA, 936 bp, Homo Sapiens; identical to SEQ ID NO: 73658

SEQ ID NO: 107933 - DNA, 696 bp, Homo Sapiens; identical to SEQ ID NO: 73659

SEQ ID NO: 107934 - DNA, 1048 bp, Homo Sapiens; identical to SEQ ID NO: 73660

SEQ ID NO: 107935 - DNA, 829 bp, Homo Sapiens; identical to SEQ ID NO: 73662

SEQ ID NO: 107936 - DNA, 2613 bp, Homo Sapiens; identical to SEQ ID NO: 73663

SEQ ID NO: 107937 - DNA, 1171 bp, Homo Sapiens; identical to SEQ ID NO: 73664

SEQ ID NO: 107938 - DNA, 1425 bp, Homo Sapiens; identical to SEQ ID NO: 73668

SEQ ID NO: 107939 - DNA, 1229 bp, Homo Sapiens; identical to SEQ ID NO: 73669
  misc_feature (1148)..(1148): n is a, c, g, or t
  misc_feature (1169)..(1187): n is a, c, g, or t

SEQ ID NO: 107940 - DNA, 2646 bp, Homo Sapiens; identical to SEQ ID NO: 73670

SEQ ID NO: 107941 - DNA, 1015 bp, Homo Sapiens; identical to SEQ ID NO: 73671
  misc_feature (996)..(996): n is a, c, g, or t

SEQ ID NO: 107942 - DNA, 1481 bp, Homo Sapiens; identical to SEQ ID NO: 73674

SEQ ID NO: 107943 - DNA, 926 bp, Homo Sapiens; identical to SEQ ID NO: 73675

SEQ ID NO: 107944 - DNA, 696 bp, Homo Sapiens; identical to SEQ ID NO: 73678
  misc_feature (675)..(675): n is a, c, g, or t

SEQ ID NO: 107945 - DNA, 1166 bp, Homo Sapiens; identical to SEQ ID NO: 73679

SEQ ID NO: 107946 - DNA, 510 bp, Homo Sapiens; identical to SEQ ID NO: 73680

SEQ ID NO: 107947 - DNA, 1403 bp, Homo Sapiens; identical to SEQ ID NO: 73688

SEQ ID NO: 107948 - DNA, 1045 bp, Homo Sapiens; identical to SEQ ID NO: 73689
  misc_feature (25)..(25): n is a, c, g, or t
  misc_feature (37)..(38): n is a, c, g, or t
  misc_feature (61)..(62): n is a, c, g, or t
  misc_feature (67)..(67): n is a, c, g, or t
  misc_feature (70)..(70): n is a, c, g, or t
  misc_feature (109)..(109): n is a, c, g, or t
  misc_feature (159)..(159): n is a, c, g, or t
  misc_feature (178)..(178): n is a, c, g, or t
  misc_feature (184)..(184): n is a, c, g, or t
  misc_feature (187)..(187): n is a, c, g, or t
  misc_feature (211)..(211): n is a, c, g, or t
  misc_feature (248)..(248): n is a, c, g, or t
  misc_feature (271)..(271): n is a, c, g, or t
  misc_feature (329)..(329): n is a, c, g, or t
  misc_feature (374)..(374): n is a, c, g, or t
  misc_feature (377)..(377): n is a, c, g, or t

SEQ ID NO: 107949 - DNA, 789 bp, Homo Sapiens; identical to SEQ ID NO: 73690

SEQ ID NO: 107950 - DNA, 1096 bp, Homo Sapiens; identical to SEQ ID NO: 73701

SEQ ID NO: 107951 - DNA, 798 bp, Homo Sapiens; identical to SEQ ID NO: 73702

SEQ ID NO: 107952 - DNA, 2218 bp, Homo Sapiens; identical to SEQ ID NO: 73703
  misc_feature (472)..(472): n is a, c, g, or t
  misc_feature (1997)..(2040): n is a, c, g, or t

SEQ ID NO: 107953 - DNA, 695 bp, Homo Sapiens; identical to SEQ ID NO: 73704
  misc_feature (14)..(14): n is a, c, g, or t
  misc_feature (467)..(520): n is a, c, g, or t

SEQ ID NO: 107954 - DNA, 1109 bp, Homo Sapiens; identical to SEQ ID NO: 73705
  misc_feature (902)..(921): n is a, c, g, or t

SEQ ID NO: 107955 - DNA, 674 bp, Homo Sapiens; identical to SEQ ID NO: 73708

SEQ ID NO: 107956 - DNA, 445 bp, Homo Sapiens; identical to SEQ ID NO: 73709

SEQ ID NO: 107957 - DNA, 526 bp, Homo Sapiens; identical to SEQ ID NO: 73710

SEQ ID NO: 107958 - DNA, 736 bp, Homo Sapiens; identical to SEQ ID NO: 73711

SEQ ID NO: 107959 - DNA, 528 bp, Homo Sapiens; identical to SEQ ID NO: 73712

SEQ ID NO: 107960 - DNA, 1043 bp, Homo Sapiens; identical to SEQ ID NO: 73714
  misc_feature (146)..(146): n is a, c, g, or t
  misc_feature (183)..(397): n is a, c, g, or t

SEQ ID NO: 107961 - DNA, 1453 bp, Homo Sapiens; identical to SEQ ID NO: 73715
  misc_feature (1368)..(1391): n is a, c, g, or t

SEQ ID NO: 107962 - DNA, 984 bp, Homo Sapiens; identical to SEQ ID NO: 73720
  misc_feature (102)..(136): n is a, c, g, or t
  misc_feature (250)..(259): n is a, c, g, or t
  misc_feature (464)..(490): n is a, c, g, or t
  misc_feature (641)..(679): n is a, c, g, or t
  misc_feature (913)..(922): n is a, c, g, or t

SEQ ID NO: 107963 - DNA, 1011 bp, Homo Sapiens; identical to SEQ ID NO: 73721
  misc_feature (62)..(71): n is a, c, g, or t
  misc_feature (305)..(343): n is a, c, g, or t
  misc_feature (494)..(520): n is a, c, g, or t
  misc_feature (725)..(735): n is a, c, g, or t
  misc_feature (849)..(883): n is a, c, g, or t

SEQ ID NO: 107964 - DNA, 956 bp, Homo Sapiens; identical to SEQ ID NO: 73722
  misc_feature (121)..(131): n is a, c, g, or t
  misc_feature (809)..(843): n is a, c, g, or t

SEQ ID NO: 107965 - DNA, 1538 bp, Homo Sapiens; identical to SEQ ID NO: 73723
  misc_feature (42)..(42): n is a, c, g, or t
  misc_feature (52)..(52): n is a, c, g, or t
  misc_feature (54)..(54): n is a, c, g, or t
  misc_feature (57)..(57): n is a, c, g, or t
  misc_feature (105)..(105): n is a, c, g, or t
  misc_feature (107)..(107): n is a, c, g, or t
  misc_feature (165)..(165): n is a, c, g, or t
  misc_feature (245)..(245): n is a, c, g, or t
  misc_feature (277)..(277): n is a, c, g, or t
  misc_feature (1024)..(1246): n is a, c, g, or t
  misc_feature (1416)..(1416): n is a, c, g, or t

SEQ ID NO: 107966 - DNA, 2088 bp, Homo Sapiens; identical to SEQ ID NO: 73724

SEQ ID NO: 107967 - DNA, 302 bp, Homo Sapiens; identical to SEQ ID NO: 73725

SEQ ID NO: 107968 - DNA, 1218 bp, Homo Sapiens; identical to SEQ ID NO: 73728
  misc_feature (929)..(938): n is a, c, g, or t

SEQ ID NO: 107969 - DNA, 572 bp, Homo Sapiens; identical to SEQ ID NO: 73729
  misc_feature (33)..(33): n is a, c, g, or t
  misc_feature (44)..(44): n is a, c, g, or t

SEQ ID NO: 107970 - DNA, 872 bp, Homo Sapiens; identical to SEQ ID NO: 73730

SEQ ID NO: 107971 - DNA, 2326 bp, Homo Sapiens; identical to SEQ ID NO: 73731
  misc_feature (2136)..(2136): n is a, c, g, or t

SEQ ID NO: 107972 - DNA, 1806 bp, Homo Sapiens; identical to SEQ ID NO: 73735

SEQ ID NO: 107973 - DNA, 1835 bp, Homo Sapiens; identical to SEQ ID NO: 73736
  misc_feature (505)..(533): n is a, c, g, or t

SEQ ID NO: 107974 - DNA, 710 bp, Homo Sapiens; identical to SEQ ID NO: 73737
  misc_feature (19)..(19): n is a, c, g, or t
  misc_feature (61)..(61): n is a, c, g, or t
  misc_feature (110)..(110): n is a, c, g, or t
  misc_feature (159)..(217): n is a, c, g, or t

SEQ ID NO: 107975 - DNA, 1055 bp, Homo Sapiens; identical to SEQ ID NO: 73738
  misc_feature (227)..(336): n is a, c, g, or t
  misc_feature (988)..(988): n is a, c, g, or t
  misc_feature (996)..(996): n is a, c, g, or t
  misc_feature (1028)..(1028): n is a, c, g, or t

SEQ ID NO: 107976 - DNA, 708 bp, Homo Sapiens; identical to SEQ ID NO: 73739
  misc_feature (56)..(56): n is a, c, g, or t
  misc_feature (416)..(459): n is a, c, g, or t

SEQ ID NO: 107977 - DNA, 1433 bp, Homo Sapiens; identical to SEQ ID NO: 73740
  misc_feature (68)..(102): n is a, c, g, or t
  misc_feature (1202)..(1245): n is a, c, g, or t

SEQ ID NO: 107978 - DNA, 924 bp, Homo Sapiens; identical to SEQ ID NO: 73745

SEQ ID NO: 107979 - DNA, 681 bp, Homo Sapiens; identical to SEQ ID NO: 73746

SEQ ID NO: 107980 - DNA, 1639 bp, Homo Sapiens; identical to SEQ ID NO: 73747
  misc_feature (143)..(156): n is a, c, g, or t

SEQ ID NO: 107981 - DNA, 1651 bp, Homo Sapiens; identical to SEQ ID NO: 73749

SEQ ID NO: 107982 - DNA, 906 bp, Homo Sapiens; identical to SEQ ID NO: 73750
  misc_feature (25)..(25): n is a, c, g, or t

SEQ ID NO: 107983 - DNA, 1079 bp, Homo Sapiens; identical to SEQ ID NO: 73751
  misc_feature (363)..(363): n is a, c, g, or t
  misc_feature (420)..(420): n is a, c, g, or t

SEQ ID NO: 107984 - DNA, 2413 bp, Homo Sapiens; identical to SEQ ID NO: 73752
  misc_feature (2336)..(2348): n is a, c, g, or t

SEQ ID NO: 107985 - DNA, 470 bp, Homo Sapiens; identical to SEQ ID NO: 73753

SEQ ID NO: 107986 - DNA, 1027 bp, Homo Sapiens; identical to SEQ ID NO: 73754

SEQ ID NO: 107987 - DNA, 1052 bp, Homo Sapiens; identical to SEQ ID NO: 73755
  misc_feature (25)..(25): n is a, c, g, or t
  misc_feature (61)..(61): n is a, c, g, or t
  misc_feature (67)..(67): n is a, c, g, or t
  misc_feature (103)..(103): n is a, c, g, or t
  misc_feature (126)..(126): n is a, c, g, or t
  misc_feature (140)..(140): n is a, c, g, or t
  misc_feature (146)..(146): n is a, c, g, or t
  misc_feature (195)..(195): n is a, c, g, or t
  misc_feature (206)..(206): n is a, c, g, or t
  misc_feature (265)..(265): n is a, c, g, or t
  misc_feature (288)..(288): n is a, c, g, or t
  misc_feature (296)..(296): n is a, c, g, or t
  misc_feature (363)..(363): n is a, c, g, or t
  misc_feature (395)..(395): n is a, c, g, or t

SEQ ID NO: 107988 - DNA, 795 bp, Homo Sapiens; identical to SEQ ID NO: 73756

SEQ ID NO: 107989 - DNA, 888 bp, Homo Sapiens; identical to SEQ ID NO: 73762
  misc_feature (461)..(513): n is a, c, g, or t

SEQ ID NO: 107990 - DNA, 1134 bp, Homo Sapiens; identical to SEQ ID NO: 73763
  misc_feature (149)..(195): n is a, c, g, or t

SEQ ID NO: 107991 - DNA, 639 bp, Homo Sapiens; identical to SEQ ID NO: 73764
  misc_feature (510)..(510): n is a, c, g, or t

SEQ ID NO: 107992 - DNA, 2104 bp, Homo Sapiens; identical to SEQ ID NO: 73765

SEQ ID NO: 107993 - DNA, 1105 bp, Homo Sapiens; identical to SEQ ID NO: 73766

SEQ ID NO: 107994 - DNA, 1285 bp, Homo Sapiens; identical to SEQ ID NO: 73767
  misc_feature (134)..(192): n is a, c, g, or t

SEQ ID NO: 107995 - DNA, 686 bp, Homo Sapiens; identical to SEQ ID NO: 73768
  misc_feature (226)..(275): n is a, c, g, or t
  misc_feature (353)..(408): n is a, c, g, or t

SEQ ID NO: 107996 - DNA, 1413 bp, Homo Sapiens; identical to SEQ ID NO: 73773
  misc_feature (79)..(113): n is a, c, g, or t
  misc_feature (1278)..(1301): n is a, c, g, or t

SEQ ID NO: 107997 - DNA, 1560 bp, Homo Sapiens; identical to SEQ ID NO: 73774
  misc_feature (84)..(118): n is a, c, g, or t
  misc_feature (1495)..(1495): n is a, c, g, or t

SEQ ID NO: 107998 - DNA, 714 bp, Homo Sapiens; identical to SEQ ID NO: 73775

SEQ ID NO: 107999 - DNA, 580 bp, Homo Sapiens; identical to SEQ ID NO: 73776
  misc_feature (62)..(123): n is a, c, g, or t
  misc_feature (403)..(411): n is a, c, g, or t

SEQ ID NO: 108000 - DNA, 928 bp, Homo Sapiens; identical to SEQ ID NO: 73777
  misc_feature (856)..(864): n is a, c, g, or t

SEQ ID NO: 108001 - DNA, 945 bp, Homo Sapiens; identical to SEQ ID NO: 73778

SEQ ID NO: 108002 - DNA, 1016 bp, Homo Sapiens; identical to SEQ ID NO: 73781

SEQ ID NO: 108003 - DNA, 2278 bp, Homo Sapiens; identical to SEQ ID NO: 73782
  misc_feature (1754)..(1754): n is a, c, g, or t

SEQ ID NO: 108004 - DNA, 1124 bp, Homo Sapiens; identical to SEQ ID NO: 73783

SEQ ID NO: 108005 - DNA, 2884 bp, Homo Sapiens; identical to SEQ ID NO: 73784
  misc_feature (2111)..(2128): n is a, c, g, or t
  misc_feature (2161)..(2738): n is a, c, g, or t
  misc_feature (2846)..(2846): n is a, c, g, or t

SEQ ID NO: 108006 - DNA, 1046 bp, Homo Sapiens; identical to SEQ ID NO: 73785

SEQ ID NO: 108007 - DNA, 1080 bp, Homo Sapiens; identical to SEQ ID NO: 73788
  misc_feature (730)..(730): n is a, c, g, or t
  misc_feature (739)..(739): n is a, c, g, or t
  misc_feature (765)..(765): n is a, c, g, or t
  misc_feature (783)..(783): n is a, c, g, or t
  misc_feature (848)..(848): n is a, c, g, or t
  misc_feature (902)..(902): n is a, c, g, or t
  misc_feature (939)..(939): n is a, c, g, or t
  misc_feature (956)..(956): n is a, c, g, or t
  misc_feature (977)..(977): n is a, c, g, or t
  misc_feature (985)..(985): n is a, c, g, or t
  misc_feature (991)..(992): n is a, c, g, or t
  misc_feature (1003)..(1004): n is a, c, g, or t
  misc_feature (1012)..(1012): n is a, c, g, or t
  misc_feature (1014)..(1014): n is a, c, g, or t
  misc_feature (1022)..(1022): n is a, c, g, or t
  misc_feature (1026)..(1026): n is a, c, g, or t
  misc_feature (1032)..(1032): n is a, c, g, or t
  misc_feature (1038)..(1039): n is a, c, g, or t
  misc_feature (1055)..(1055): n is a, c, g, or t

SEQ ID NO: 108008 - DNA, 660 bp, Homo Sapiens; identical to SEQ ID NO: 73789

SEQ ID NO: 108009 - DNA, 1268 bp, Homo Sapiens; identical to SEQ ID NO: 73790
  misc_feature (42)..(81): n is a, c, g, or t
  misc_feature (85)..(119): n is a, c, g, or t
  misc_feature (905)..(905): n is a, c, g, or t

SEQ ID NO: 108010 - DNA, 889 bp, Homo Sapiens; identical to SEQ ID NO: 73791

SEQ ID NO: 108011 - DNA, 204 bp, Homo Sapiens; identical to SEQ ID NO: 73793
  misc_feature (76)..(90): n is a, c, g, or t

SEQ ID NO: 108012 - DNA, 616 bp, Homo Sapiens; identical to SEQ ID NO: 73794
  misc_feature (87)..(103): n is a, c, g, or t
  misc_feature (499)..(512): n is a, c, g, or t

SEQ ID NO: 108013 - DNA, 2473 bp, Homo Sapiens; identical to SEQ ID NO: 73797
  misc_feature (64)..(64): n is a, c, g, or t
  misc_feature (1829)..(1863): n is a, c, g, or t

SEQ ID NO: 108014 - DNA, 579 bp, Homo Sapiens; identical to SEQ ID NO: 73798

SEQ ID NO: 108015 - DNA, 2111 bp, Homo Sapiens; identical to SEQ ID NO: 73800
  misc_feature (1368)..(1464): n is a, c, g, or t
  misc_feature (1604)..(1612): n is a, c, g, or t
  misc_feature (1886)..(1895): n is a, c, g, or t

SEQ ID NO: 108016 - DNA, 1004 bp, Homo Sapiens; identical to SEQ ID NO: 73801
  misc_feature (80)..(80): n is a, c, g, or t
  misc_feature (91)..(91): n is a, c, g, or t

SEQ ID NO: 108017 - DNA, 849 bp, Homo Sapiens; identical to SEQ ID NO: 73806
  misc_feature (58)..(88): n is a, c, g, or t
  misc_feature (650)..(650): n is a, c, g, or t
  misc_feature (815)..(815): n is a, c, g, or t
  misc_feature (818)..(818): n is a, c, g, or t
  misc_feature (820)..(820): n is a, c, g, or t

SEQ ID NO: 108018 - DNA, 1058 bp, Homo Sapiens; identical to SEQ ID NO: 73807

SEQ ID NO: 108019 - DNA, 1657 bp, Homo Sapiens; identical to SEQ ID NO: 73810

SEQ ID NO: 108020 - DNA, 598 bp, Homo Sapiens; identical to SEQ ID NO: 73811
  misc_feature (380)..(436): n is a, c, g, or t
  misc_feature (467)..(467): n is a, c, g, or t

SEQ ID NO: 108021 - DNA, 599 bp, Homo Sapiens; identical to SEQ ID NO: 73815
  misc_feature (195)..(318): n is a, c, g, or t

SEQ ID NO: 108022 - DNA, 481 bp, Homo Sapiens; identical to SEQ ID NO: 73816
  misc_feature (222)..(222): n is a, c, g, or t

SEQ ID NO: 108023 - DNA, 1123 bp, Homo Sapiens; identical to SEQ ID NO: 73817
  misc_feature (195)..(432): n is a, c, g, or t
  misc_feature (659)..(767): n is a, c, g, or t

SEQ ID NO: 108024 - DNA, 777 bp, Homo Sapiens; identical to SEQ ID NO: 6156
  misc_feature (230)..(338): n is a, c, g, or t
  misc_feature (413)..(650): n is a, c, g, or t

SEQ ID NO: 108025 - DNA, 636 bp, Homo Sapiens; identical to SEQ ID NO: 73820

SEQ ID NO: 108026 - DNA, 1405 bp, Homo Sapiens; identical to SEQ ID NO: 73821
  misc_feature (665)..(665): n is a, c, g, or t
  misc_feature (758)..(772): n is a, c, g, or t
  misc_feature (1072)..(1094): n is a, c, g, or t

SEQ ID NO: 108027 - DNA, 862 bp, Homo Sapiens; identical to SEQ ID NO: 73822
  misc_feature (224)..(224): n is a, c, g, or t
  misc_feature (607)..(625): n is a, c, g, or t

SEQ ID NO: 108028 - DNA, 753 bp, Homo Sapiens; identical to SEQ ID NO: 73823
  misc_feature (161)..(179): n is a, c, g, or t

SEQ ID NO: 108029 - DNA, 481 bp, Homo Sapiens; identical to SEQ ID NO: 73826

SEQ ID NO: 108030 - DNA, 972 bp, Homo Sapiens; identical to SEQ ID NO: 73827
  misc_feature (734)..(752): n is a, c, g, or t

SEQ ID NO: 108031 - DNA, 1623 bp, Homo Sapiens; identical to SEQ ID NO: 73831

SEQ ID NO: 108032 - DNA, 796 bp, Homo Sapiens; identical to SEQ ID NO: 73832

SEQ ID NO: 108033 - DNA, 1678 bp, Homo Sapiens; identical to SEQ ID NO: 73833

SEQ ID NO: 108034 - DNA, 1395 bp, Homo Sapiens; identical to SEQ ID NO: 73834
  misc_feature (42)..(42): n is a, c, g, or t
  misc_feature (193)..(256): n is a, c, g, or t

SEQ ID NO: 108035 - DNA, 1379 bp, Homo Sapiens; identical to SEQ ID NO: 73835
  misc_feature (1130)..(1153): n is a, c, g, or t

SEQ ID NO: 108036 - DNA, 733 bp, Homo Sapiens; identical to SEQ ID NO: 73836
  misc_feature (653)..(674): n is a, c, g, or t

SEQ ID NO: 108037 - DNA, 1077 bp, Homo Sapiens; identical to SEQ ID NO: 73840

SEQ ID NO: 108038 - DNA, 927 bp, Homo Sapiens; identical to SEQ ID NO: 73841

SEQ ID NO: 108039 - DNA, 744 bp, Homo Sapiens; identical to SEQ ID NO: 73843
  misc_feature (11)..(11): n is a, c, g, or t
  misc_feature (61)..(61): n is a, c, g, or t

SEQ ID NO: 108040 - DNA, 1990 bp, Homo Sapiens; identical to SEQ ID NO: 73844

SEQ ID NO: 108041 - DNA, 1496 bp, Homo Sapiens; identical to SEQ ID NO: 73845
  misc_feature (795)..(795): n is a, c, g, or t
  misc_feature (798)..(798): n is a, c, g, or t
  misc_feature (993)..(993): n is a, c, g, or t
  misc_feature (1347)..(1371): n is a, c, g, or t

SEQ ID NO: 108042 - DNA, 1082 bp, Homo Sapiens; identical to SEQ ID NO: 73846
  misc_feature (67)..(67): n is a, c, g, or t
  misc_feature (83)..(83): n is a, c, g, or t
  misc_feature (158)..(158): n is a, c, g, or t
  misc_feature (173)..(173): n is a, c, g, or t
  misc_feature (228)..(228): n is a, c, g, or t
  misc_feature (248)..(248): n is a, c, g, or t
  misc_feature (307)..(307): n is a, c, g, or t
  misc_feature (1018)..(1037): n is a, c, g, or t

SEQ ID NO: 108043 - DNA, 788 bp, Homo Sapiens; identical to SEQ ID NO: 73847

SEQ ID NO: 108044 - DNA, 726 bp, Homo Sapiens; identical to SEQ ID NO: 73848
  misc_feature (93)..(93): n is a, c, g, or t
  misc_feature (96)..(96): n is a, c, g, or t

SEQ ID NO: 108045 - DNA, 1092 bp, Homo Sapiens; identical to SEQ ID NO: 73849

SEQ ID NO: 108046 - DNA, 755 bp, Homo Sapiens; identical to SEQ ID NO: 73850
  misc_feature (18)..(18): n is a, c, g, or t
  misc_feature (135)..(135): n is a, c, g, or t
  misc_feature (199)..(199): n is a, c, g, or t

SEQ ID NO: 108047 - DNA, 984 bp, Homo Sapiens; identical to SEQ ID NO: 73851
  misc_feature (95)..(174): n is a, c, g, or t

SEQ ID NO: 108048 - DNA, 669 bp, Homo Sapiens; identical to SEQ ID NO: 73852
  misc_feature (282)..(333): n is a, c, g, or t

SEQ ID NO: 108049 - DNA, 536 bp, Homo Sapiens; identical to SEQ ID NO: 73853

SEQ ID NO: 108050 - DNA, 639 bp, Homo Sapiens; identical to SEQ ID NO: 73854
  misc_feature (20)..(20): n is a, c, g, or t

SEQ ID NO: 108051 - DNA, 1049 bp, Homo Sapiens; identical to SEQ ID NO: 73857
  misc_feature (476)..(526): n is a, c, g, or t
  misc_feature (949)..(949): n is a, c, g, or t
  misc_feature (964)..(964): n is a, c, g, or t

SEQ ID NO: 108052 - DNA, 1086 bp, Homo Sapiens; identical to SEQ ID NO: 73858
  misc_feature (836)..(900): n is a, c, g, or t

SEQ ID NO: 108053 - DNA, 511 bp, Homo Sapiens; identical to SEQ ID NO: 73866

SEQ ID NO: 108054 - DNA, 624 bp, Homo Sapiens; identical to SEQ ID NO: 73867
  misc_feature (36)..(36): n is a, c, g, or t
  misc_feature (43)..(43): n is a, c, g, or t
  misc_feature (88)..(88): n is a, c, g, or t
  misc_feature (108)..(108): n is a, c, g, or t

SEQ ID NO: 108055 - DNA, 2950 bp, Homo Sapiens; identical to SEQ ID NO: 73873
  misc_feature (2042)..(2138): n is a, c, g, or t
  misc_feature (2545)..(2573): n is a, c, g, or t
  misc_feature (2688)..(2726): n is a, c, g, or t
  misc_feature (2760)..(2760): n is a, c, g, or t
  misc_feature (2824)..(2837): n is a, c, g, or t

SEQ ID NO: 108056 - DNA, 1146 bp, Homo Sapiens; identical to SEQ ID NO: 73874
  misc_feature (22)..(22): n is a, c, g, or t
  misc_feature (45)..(45): n is a, c, g, or t
  misc_feature (1091)..(1099): n is a, c, g, or t

SEQ ID NO: 108057 - DNA, 1066 bp, Homo Sapiens; identical to SEQ ID NO: 73875

SEQ ID NO: 108058 - DNA, 969 bp, Homo Sapiens; identical to SEQ ID NO: 73876

SEQ ID NO: 108059 - DNA, 892 bp, Homo Sapiens; identical to SEQ ID NO: 73877

SEQ ID NO: 108060 - DNA, 574 bp, Homo Sapiens; identical to SEQ ID NO: 73879

SEQ ID NO: 108061 - DNA, 765 bp, Homo Sapiens; identical to SEQ ID NO: 73880

SEQ ID NO: 108062 - DNA, 1010 bp, Homo Sapiens; identical to SEQ ID NO: 73881

SEQ ID NO: 108063 - DNA, 997 bp, Homo Sapiens; identical to SEQ ID NO: 73882
  misc_feature (533)..(550): n is a, c, g, or t
  misc_feature (557)..(577): n is a, c, g, or t
  misc_feature (689)..(787): n is a, c, g, or t
  misc_feature (824)..(824): n is a, c, g, or t
  misc_feature (941)..(950): n is a, c, g, or t

SEQ ID NO: 108064 - DNA, 1832 bp, Homo Sapiens; identical to SEQ ID NO: 73886
  misc_feature (1697)..(1729): n is a, c, g, or t
  misc_feature (1771)..(1788): n is a, c, g, or t

SEQ ID NO: 108065 - DNA, 944 bp, Homo Sapiens; identical to SEQ ID NO: 73887
  misc_feature (12)..(12): n is a, c, g, or t
  misc_feature (151)..(151): n is a, c, g, or t

SEQ ID NO: 108066 - DNA, 2294 bp, Homo Sapiens; identical to SEQ ID NO: 73888
  misc_feature (12)..(12): n is a, c, g, or t
  misc_feature (135)..(182): n is a, c, g, or t
  misc_feature (2239)..(2239): n is a, c, g, or t
  misc_feature (2243)..(2243): n is a, c, g, or t

SEQ ID NO: 108067 - DNA, 990 bp, Homo Sapiens; identical to SEQ ID NO: 73889
  misc_feature (881)..(897): n is a, c, g, or t

SEQ ID NO: 108068 - DNA, 619 bp, Homo Sapiens; identical to SEQ ID NO: 73890

SEQ ID NO: 108069 - DNA, 1017 bp, Homo Sapiens; identical to SEQ ID NO: 73891

SEQ ID NO: 108070 - DNA, 2046 bp, Homo Sapiens; identical to SEQ ID NO: 73892
  misc_feature (1673)..(1996): n is a, c, g, or t
  misc_feature (2020)..(2021): n is a, c, g, or t

SEQ ID NO: 108071 - DNA, 915 bp, Homo Sapiens; identical to SEQ ID NO: 73895

SEQ ID NO: 108072 - DNA, 974 bp, Homo Sapiens; identical to SEQ ID NO: 73896

SEQ ID NO: 108073 - DNA, 1509 bp, Homo Sapiens; identical to SEQ ID NO: 73897

SEQ ID NO: 108074 - DNA, 391 bp, Homo Sapiens; identical to SEQ ID NO: 73898

SEQ ID NO: 108075 - DNA, 1043 bp, Homo Sapiens; identical to SEQ ID NO: 73904

SEQ ID NO: 108076 - DNA, 1745 bp, Homo Sapiens; identical to SEQ ID NO: 73905
  misc_feature (1400)..(1414): n is a, c, g, or t
  misc_feature (1510)..(1549): n is a, c, g, or t
  misc_feature (1557)..(1600): n is a, c, g, or t

SEQ ID NO: 108077 - DNA, 412 bp, Homo Sapiens; identical to SEQ ID NO: 73906
  misc_feature (18)..(18): n is a, c, g, or t
  misc_feature (112)..(112): n is a, c, g, or t

SEQ ID NO: 108078 - DNA, 1102 bp, Homo Sapiens; identical to SEQ ID NO: 73907

SEQ ID NO: 108079 - DNA, 2030 bp, Homo Sapiens; identical to SEQ ID NO: 73912

SEQ ID NO: 108080 - DNA, 272 bp, Homo Sapiens; identical to SEQ ID NO: 73913

SEQ ID NO: 108081 - DNA, 1389 bp, Homo Sapiens; identical to SEQ ID NO: 73920
  misc_feature (290)..(315): n is a, c, g, or t
  misc_feature (336)..(381): n is a, c, g, or t
  misc_feature (887)..(924): n is a, c, g, or t
  misc_feature (926)..(942): n is a, c, g, or t

SEQ ID NO: 108082 - DNA, 666 bp, Homo Sapiens; identical to SEQ ID NO: 73921
  misc_feature (159)..(196): n is a, c, g, or t
  misc_feature (198)..(214): n is a, c, g, or t

SEQ ID NO: 108083 - DNA, 1801 bp, Homo Sapiens; identical to SEQ ID NO: 73924

SEQ ID NO: 108084 - DNA, 987 bp, Homo Sapiens; identical to SEQ ID NO: 73925

SEQ ID NO: 108085 - DNA, 972 bp, Homo Sapiens; identical to SEQ ID NO: 73926
  misc_feature (847)..(847): n is a, c, g, or t

SEQ ID NO: 108086 - DNA, 1231 bp, Homo Sapiens; identical to SEQ ID NO: 73927
  misc_feature (969)..(1131): n is a, c, g, or t
  misc_feature (1148)..(1156): n is a, c, g, or t

SEQ ID NO: 108087 - DNA, 1010 bp, Homo Sapiens; identical to SEQ ID NO: 73928
  misc_feature (799)..(799): n is a, c, g, or t
  misc_feature (812)..(813): n is a, c, g, or t
  misc_feature (830)..(830): n is a, c, g, or t
  misc_feature (933)..(933): n is a, c, g, or t

SEQ ID NO: 108088 - DNA, 2397 bp, Homo Sapiens; identical to SEQ ID NO: 73929

SEQ ID NO: 108089 - DNA, 725 bp, Homo Sapiens; identical to SEQ ID NO: 73931
  misc_feature (413)..(413): n is a, c, g, or t

SEQ ID NO: 108090 - DNA, 628 bp, Homo Sapiens; identical to SEQ ID NO: 73932

SEQ ID NO: 108091 - DNA, 981 bp, Homo Sapiens; identical to SEQ ID NO: 73936

SEQ ID NO: 108092 - DNA, 812 bp, Homo Sapiens; identical to SEQ ID NO: 73937

SEQ ID NO: 108093 - DNA, 1079 bp, Homo Sapiens; identical to SEQ ID NO: 73938
  misc_feature (293)..(302): n is a, c, g, or t

SEQ ID NO: 108094 - DNA, 1236 bp, Homo Sapiens; identical to SEQ ID NO: 73939

SEQ ID NO: 108095 - DNA, 802 bp, Homo Sapiens; identical to SEQ ID NO: 73940

SEQ ID NO: 108096 - DNA, 1442 bp, Homo Sapiens; identical to SEQ ID NO: 73941

SEQ ID NO: 108097 - DNA, 802 bp, Homo Sapiens; identical to SEQ ID NO: 73944
  misc_feature (106)..(106): n is a, c, g, or t

SEQ ID NO: 108098 - DNA, 942 bp, Homo Sapiens; identical to SEQ ID NO: 73945

SEQ ID NO: 108099 - DNA, 1234 bp, Homo Sapiens; identical to SEQ ID NO: 73946
  misc_feature (762)..(762): n is a, c, g, or t
  misc_feature (1080)..(1080): n is a, c, g, or t
  misc_feature (1091)..(1091): n is a, c, g, or t

SEQ ID NO: 108100 - DNA, 1673 bp, Homo Sapiens; identical to SEQ ID NO: 73947

SEQ ID NO: 108101 - DNA, 1150 bp, Homo Sapiens; identical to SEQ ID NO: 73948
  misc_feature (27)..(27): n is a, c, g, or t
  misc_feature (37)..(37): n is a, c, g, or t
  misc_feature (55)..(55): n is a, c, g, or t
  misc_feature (93)..(94): n is a, c, g, or t
  misc_feature (113)..(113): n is a, c, g, or t

SEQ ID NO: 108102 - DNA, 1132 bp, Homo Sapiens; identical to SEQ ID NO: 73949

SEQ ID NO: 108103 - DNA, 1559 bp, Homo Sapiens; identical to SEQ ID NO: 73954

SEQ ID NO: 108104 - DNA, 1228 bp, Homo Sapiens; identical to SEQ ID NO: 73955

SEQ ID NO: 108105 - DNA, 1717 bp, Homo Sapiens; identical to SEQ ID NO: 73956

SEQ ID NO: 108106 - DNA, 770 bp, Homo Sapiens; identical to SEQ ID NO: 73957

SEQ ID NO: 108107 - DNA, 591 bp, Homo Sapiens; identical to SEQ ID NO: 73964

SEQ ID NO: 108108 - DNA, 1068 bp, Homo Sapiens; identical to SEQ ID NO: 73965
  misc_feature (291)..(291): n is a, c, g, or t

SEQ ID NO: 108109 - DNA, 2781 bp, Homo Sapiens; identical to SEQ ID NO: 73967

SEQ ID NO: 108110 - DNA, 914 bp, Homo Sapiens; identical to SEQ ID NO: 73968

SEQ ID NO: 108111 - DNA, 1008 bp, Homo Sapiens; identical to SEQ ID NO: 73969
  misc_feature (125)..(125): n is a, c, g, or t
  misc_feature (187)..(187): n is a, c, g, or t

SEQ ID NO: 108112 - DNA, 797 bp, Homo Sapiens; identical to SEQ ID NO: 73973

SEQ ID NO: 108113 - DNA, 1146 bp, Homo Sapiens; identical to SEQ ID NO: 73974

SEQ ID NO: 108114 - DNA, 1031 bp, Homo Sapiens; identical to SEQ ID NO: 73976
  misc_feature (843)..(843): n is a, c, g, or t

SEQ ID NO: 108115 - DNA, 1455 bp, Homo Sapiens; identical to SEQ ID NO: 73977
  misc_feature (886)..(1011): n is a, c, g, or t

SEQ ID NO: 108116 - DNA, 2520 bp, Homo Sapiens; identical to SEQ ID NO: 73978
  misc_feature (1903)..(1925): n is a, c, g, or t
  misc_feature (2081)..(2107): n is a, c, g, or t
  misc_feature (2213)..(2221): n is a, c, g, or t
  misc_feature (2267)..(2286): n is a, c, g, or t

SEQ ID NO: 108117 - DNA, 1043 bp, Homo Sapiens; identical to SEQ ID NO: 73979

SEQ ID NO: 108118 - DNA, 1111 bp, Homo Sapiens; identical to SEQ ID NO: 73980

SEQ ID NO: 108119 - DNA, 1317 bp, Homo Sapiens; identical to SEQ ID NO: 73989

SEQ ID NO: 108120 - DNA, 481 bp, Homo Sapiens; identical to SEQ ID NO: 73990
  misc_feature (464)..(464): n is a, c, g, or t

SEQ ID NO: 108121 - DNA, 1015 bp, Homo Sapiens; identical to SEQ ID NO: 73991
  misc_feature (113)..(113): n is a, c, g, or t
  misc_feature (293)..(293): n is a, c, g, or t

SEQ ID NO: 108122 - DNA, 1716 bp, Homo Sapiens; identical to SEQ ID NO: 73992
  misc_feature (1411)..(1411): n is a, c, g, or t

SEQ ID NO: 108123 - DNA, 661 bp, Homo Sapiens; identical to SEQ ID NO: 73994
  misc_feature (356)..(389): n is a, c, g, or t
  misc_feature (453)..(471): n is a, c, g, or t

SEQ ID NO: 108124 - DNA, 1158 bp, Homo Sapiens; identical to SEQ ID NO: 73995
  misc_feature (100)..(101): n is a, c, g, or t
  misc_feature (151)..(151): n is a, c, g, or t
  misc_feature (463)..(463): n is a, c, g, or t
  misc_feature (946)..(964): n is a, c, g, or t

SEQ ID NO: 108125 - DNA, 742 bp, Homo Sapiens; identical to SEQ ID NO: 73996

SEQ ID NO: 108126 - DNA, 1169 bp, Homo Sapiens; identical to SEQ ID NO: 73997
  misc_feature (43)..(83): n is a, c, g, or t
  misc_feature (87)..(121): n is a, c, g, or t
  misc_feature (961)..(968): n is a, c, g, or t
  misc_feature (970)..(971): n is a, c, g, or t
  misc_feature (973)..(989): n is a, c, g, or t
  misc_feature (1017)..(1017): n is a, c, g, or t

SEQ ID NO: 108127 - DNA, 1074 bp, Homo Sapiens; identical to SEQ ID NO: 73998
  misc_feature (66)..(66): n is a, c, g, or t
  misc_feature (212)..(419): n is a, c, g, or t
  misc_feature (444)..(459): n is a, c, g, or t
  misc_feature (461)..(461): n is a, c, g, or t

SEQ ID NO: 108128 - DNA, 528 bp, Homo Sapiens; identical to SEQ ID NO: 73999

SEQ ID NO: 108129 - DNA, 2343 bp, Homo Sapiens; identical to SEQ ID NO: 74001
  misc_feature (1954)..(1954): n is a, c, g, or t

SEQ ID NO: 108130 - DNA, 498 bp, Homo Sapiens; identical to SEQ ID NO: 74002

SEQ ID NO: 108131 - DNA, 691 bp, Homo Sapiens; identical to SEQ ID NO: 74005

SEQ ID NO: 108132 - DNA, 452 bp, Homo Sapiens; identical to SEQ ID NO: 74006

SEQ ID NO: 108133 - DNA, 1539 bp, Homo Sapiens; identical to SEQ ID NO: 74010

SEQ ID NO: 108134 - DNA, 979 bp, Homo Sapiens; identical to SEQ ID NO: 74011

SEQ ID NO: 108135 - DNA, 565 bp, Homo Sapiens; identical to SEQ ID NO: 74015

SEQ ID NO: 108136 - DNA, 1395 bp, Homo Sapiens; identical to SEQ ID NO: 74016
  misc_feature (285)..(337): n is a, c, g, or t

SEQ ID NO: 108137 - DNA, 1288 bp, Homo Sapiens; identical to SEQ ID NO: 74017

SEQ ID NO: 108138 - DNA, 2062 bp, Homo Sapiens; identical to SEQ ID NO: 74018

SEQ ID NO: 108139 - DNA, 2473 bp, Homo Sapiens; identical to SEQ ID NO: 74020
  misc_feature (1496)..(1506): n is a, c, g, or t

SEQ ID NO: 108140 - DNA, 543 bp, Homo Sapiens; identical to SEQ ID NO: 74021

SEQ ID NO: 108141 - DNA, 516 bp, Homo Sapiens; identical to SEQ ID NO: 74027

SEQ ID NO: 108142 - DNA, 1181 bp, Homo Sapiens; identical to SEQ ID NO: 74028

SEQ ID NO: 108143 - DNA, 1104 bp, Homo Sapiens; identical to SEQ ID NO: 74030
  misc_feature (88)..(150): n is a, c, g, or t
  misc_feature (190)..(245): n is a, c, g, or t

SEQ ID NO: 108144 - DNA, 1096 bp, Homo Sapiens; identical to SEQ ID NO: 74031
  misc_feature (44)..(83): n is a, c, g, or t
  misc_feature (87)..(121): n is a, c, g, or t

SEQ ID NO: 108145 - DNA, 947 bp, Homo Sapiens; identical to SEQ ID NO: 74032

SEQ ID NO: 108146 - DNA, 2354 bp, Homo Sapiens; identical to SEQ ID NO: 74033
  misc_feature (2010)..(2072): n is a, c, g, or t
  misc_feature (2112)..(2167): n is a, c, g, or t

SEQ ID NO: 108147 - DNA, 1162 bp, Homo Sapiens; identical to SEQ ID NO: 74034
  misc_feature (18)..(18): n is a, c, g, or t

SEQ ID NO: 108148 - DNA, 1025 bp, Homo Sapiens; identical to SEQ ID NO: 74035
  misc_feature (554)..(554): n is a, c, g, or t

SEQ ID NO: 108149 - DNA, 2270 bp, Homo Sapiens; identical to SEQ ID NO: 74037
  misc_feature (86)..(86): n is a, c, g, or t
  misc_feature (150)..(150): n is a, c, g, or t
  misc_feature (181)..(181): n is a, c, g, or t
  misc_feature (209)..(209): n is a, c, g, or t
  misc_feature (216)..(216): n is a, c, g, or t
  misc_feature (229)..(229): n is a, c, g, or t
  misc_feature (254)..(254): n is a, c, g, or t
  misc_feature (274)..(274): n is a, c, g, or t
  misc_feature (1025)..(1067): n is a, c, g, or t

SEQ ID NO: 108150 - DNA, 975 bp, Homo Sapiens; identical to SEQ ID NO: 74038
  misc_feature (80)..(80): n is a, c, g, or t

SEQ ID NO: 108151 - DNA, 1163 bp, Homo Sapiens; identical to SEQ ID NO: 74040

SEQ ID NO: 108152 - DNA, 414 bp, Homo Sapiens; identical to SEQ ID NO: 74041
  misc_feature (56)..(56): n is a, c, g, or t

SEQ ID NO: 108153 - DNA, 410 bp, Homo Sapiens; identical to SEQ ID NO: 74042

SEQ ID NO: 108154 - DNA, 784 bp, Homo Sapiens; identical to SEQ ID NO: 74044
  misc_feature (46)..(46): n is a, c, g, or t

SEQ ID NO: 108155 - DNA, 1388 bp, Homo Sapiens; identical to SEQ ID NO: 74045
  misc_feature (19)..(19): n is a, c, g, or t
  misc_feature (46)..(46): n is a, c, g, or t

SEQ ID NO: 108156 - DNA, 849 bp, Homo Sapiens; identical to SEQ ID NO: 74049
  misc_feature (724)..(762): n is a, c, g, or t
  misc_feature (781)..(804): n is a, c, g, or t

SEQ ID NO: 108157 - DNA, 1509 bp, Homo Sapiens; identical to SEQ ID NO: 74050

SEQ ID NO: 108158 - DNA, 949 bp, Homo Sapiens; identical to SEQ ID NO: 74051
  misc_feature (204)..(227): n is a, c, g, or t
  misc_feature (388)..(410): n is a, c, g, or t
  misc_feature (426)..(477): n is a, c, g, or t

SEQ ID NO: 108159 - DNA, 406 bp, Homo Sapiens; identical to SEQ ID NO: 74052

SEQ ID NO: 108160 - DNA, 641 bp, Homo Sapiens; identical to SEQ ID NO: 74053

SEQ ID NO: 108161 - DNA, 1602 bp, Homo Sapiens; identical to SEQ ID NO: 74054
  misc_feature (1146)..(1182): n is a, c, g, or t
  misc_feature (1201)..(1223): n is a, c, g, or t
  misc_feature (1351)..(1408): n is a, c, g, or t

SEQ ID NO: 108162 - DNA, 1921 bp, Homo Sapiens; identical to SEQ ID NO: 74057
  misc_feature (127)..(143): n is a, c, g, or t
  misc_feature (1814)..(1848): n is a, c, g, or t

SEQ ID NO: 108163 - DNA, 575 bp, Homo Sapiens; identical to SEQ ID NO: 74058
  misc_feature (62)..(62): n is a, c, g, or t

SEQ ID NO: 108164 - DNA, 801 bp, Homo Sapiens; identical to SEQ ID NO: 74066

SEQ ID NO: 108165 - DNA, 905 bp, Homo Sapiens; identical to SEQ ID NO: 74067
  misc_feature (789)..(793): n is a, c, g, or t
  misc_feature (795)..(803): n is a, c, g, or t
  misc_feature (806)..(809): n is a, c, g, or t

SEQ ID NO: 108166 - DNA, 817 bp, Homo Sapiens; identical to SEQ ID NO: 74070
  misc_feature (737)..(770): n is a, c, g, or t

SEQ ID NO: 108167 - DNA, 1431 bp, Homo Sapiens; identical to SEQ ID NO: 74071
  misc_feature (851)..(930): n is a, c, g, or t

SEQ ID NO: 108168 - DNA, 752 bp, Homo Sapiens; identical to SEQ ID NO: 74072

SEQ ID NO: 108169 - DNA, 1642 bp, Homo Sapiens; identical to SEQ ID NO: 74073
  misc_feature (91)..(125): n is a, c, g, or t
  misc_feature (683)..(701): n is a, c, g, or t

SEQ ID NO: 108170 - DNA, 692 bp, Homo Sapiens; identical to SEQ ID NO: 74074
  misc_feature (96)..(130): n is a, c, g, or t
  misc_feature (662)..(662): n is a, c, g, or t

SEQ ID NO: 108171 - DNA, 968 bp, Homo Sapiens; identical to SEQ ID NO: 74075

SEQ ID NO: 108172 - DNA, 2971 bp, Homo Sapiens; identical to SEQ ID NO: 74076

SEQ ID NO: 108173 - DNA, 363 bp, Homo Sapiens; identical to SEQ ID NO: 74077

SEQ ID NO: 108174 - DNA, 1224 bp, Homo Sapiens; identical to SEQ ID NO: 74078

SEQ ID NO: 108175 - DNA, 395 bp, Homo Sapiens; identical to SEQ ID NO: 74079

SEQ ID NO: 108176 - DNA, 621 bp, Homo Sapiens; identical to SEQ ID NO: 74083
  misc_feature (73)..(73): n is a, c, g, or t

SEQ ID NO: 108177 - DNA, 851 bp, Homo Sapiens; identical to SEQ ID NO: 74084

SEQ ID NO: 108178 - DNA, 1822 bp, Homo Sapiens; identical to SEQ ID NO: 74085
  misc_feature (921)..(921): n is a, c, g, or t

SEQ ID NO: 108179 - DNA, 1036 bp, Homo Sapiens; identical to SEQ ID NO: 74086

SEQ ID NO: 108180 - DNA, 1333 bp, Homo Sapiens; identical to SEQ ID NO: 74087
  misc_feature (874)..(874): n is a, c, g, or t
  misc_feature (1136)..(1136): n is a, c, g, or t
  misc_feature (1148)..(1201): n is a, c, g, or t

SEQ ID NO: 108181 - DNA, 895 bp, Homo Sapiens; identical to SEQ ID NO: 74088

SEQ ID NO: 108182 - DNA, 1356 bp, Homo Sapiens; identical to SEQ ID NO: 74093
  misc_feature (808)..(946): n is a, c, g, or t
  misc_feature (956)..(970): n is a, c, g, or t
  misc_feature (1014)..(1063): n is a, c, g, or t
  misc_feature (1081)..(1089): n is a, c, g, or t
  misc_feature (1191)..(1199): n is a, c, g, or t
  misc_feature (1240)..(1248): n is a, c, g, or t

SEQ ID NO: 108183 - DNA, 840 bp, Homo Sapiens; identical to SEQ ID NO: 74094

SEQ ID NO: 108184 - DNA, 799 bp, Homo Sapiens; identical to SEQ ID NO: 74095

SEQ ID NO: 108185 - DNA, 1047 bp, Homo Sapiens; identical to SEQ ID NO: 74096
  misc_feature (817)..(817): n is a, c, g, or t
  misc_feature (957)..(957): n is a, c, g, or t
  misc_feature (993)..(993): n is a, c, g, or t
  misc_feature (998)..(998): n is a, c, g, or t
  misc_feature (1007)..(1007): n is a, c, g, or t
  misc_feature (1017)..(1017): n is a, c, g, or t
  misc_feature (1036)..(1036): n is a, c, g, or t

SEQ ID NO: 108186 - DNA, 1253 bp, Homo Sapiens; identical to SEQ ID NO: 74097
  misc_feature (84)..(118): n is a, c, g, or t
  misc_feature (1167)..(1185): n is a, c, g, or t

SEQ ID NO: 108187 - DNA, 415 bp, Homo Sapiens; identical to SEQ ID NO: 74098

SEQ ID NO: 108188 - DNA, 2132 bp, Homo Sapiens; identical to SEQ ID NO: 74099

SEQ ID NO: 108189 - DNA, 1475 bp, Homo Sapiens; identical to SEQ ID NO: 74100

SEQ ID NO: 108190 - DNA, 1465 bp, Homo Sapiens; identical to SEQ ID NO: 74102
  misc_feature (1335)..(1347): n is a, c, g, or t

SEQ ID NO: 108191 - DNA, 575 bp, Homo Sapiens; identical to SEQ ID NO: 74103
  misc_feature (494)..(506): n is a, c, g, or t

SEQ ID NO: 108192 - DNA, 1049 bp, Homo Sapiens; identical to SEQ ID NO: 74104
  misc_feature (86)..(86): n is a, c, g, or t
  misc_feature (98)..(98): n is a, c, g, or t
  misc_feature (121)..(121): n is a, c, g, or t
  misc_feature (126)..(126): n is a, c, g, or t
  misc_feature (136)..(136): n is a, c, g, or t
  misc_feature (144)..(144): n is a, c, g, or t
  misc_feature (155)..(155): n is a, c, g, or t
  misc_feature (177)..(177): n is a, c, g, or t
  misc_feature (190)..(190): n is a, c, g, or t
  misc_feature (201)..(201): n is a, c, g, or t
  misc_feature (216)..(216): n is a, c, g, or t
  misc_feature (219)..(219): n is a, c, g, or t
  misc_feature (234)..(234): n is a, c, g, or t
  misc_feature (238)..(238): n is a, c, g, or t
  misc_feature (241)..(241): n is a, c, g, or t
  misc_feature (245)..(245): n is a, c, g, or t
  misc_feature (257)..(257): n is a, c, g, or t
  misc_feature (267)..(267): n is a, c, g, or t
  misc_feature (299)..(299): n is a, c, g, or t
  misc_feature (302)..(302): n is a, c, g, or t
  misc_feature (327)..(327): n is a, c, g, or t

SEQ ID NO: 108193 - DNA, 427 bp, Homo Sapiens; identical to SEQ ID NO: 74105
  misc_feature (80)..(80): n is a, c, g, or t

SEQ ID NO: 108194 - DNA, 1238 bp, Homo Sapiens; identical to SEQ ID NO: 74106

SEQ ID NO: 108195 - DNA, 1151 bp, Homo Sapiens; identical to SEQ ID NO: 74107

SEQ ID NO: 108196 - DNA, 1044 bp, Homo Sapiens; identical to SEQ ID NO: 74115
  misc_feature (288)..(288): n is a, c, g, or t
  misc_feature (331)..(332): n is a, c, g, or t

SEQ ID NO: 108197 - DNA, 936 bp, Homo Sapiens; identical to SEQ ID NO: 74116
  misc_feature (53)..(53): n is a, c, g, or t

SEQ ID NO: 108198 - DNA, 479 bp, Homo Sapiens; identical to SEQ ID NO: 74117

SEQ ID NO: 108199 - DNA, 781 bp, Homo Sapiens; identical to SEQ ID NO: 74119

SEQ ID NO: 108200 - DNA, 619 bp, Homo Sapiens; identical to SEQ ID NO: 74120
  misc_feature (176)..(186): n is a, c, g, or t
  misc_feature (269)..(337): n is a, c, g, or t
  misc_feature (609)..(609): n is a, c, g, or t

SEQ ID NO: 108201 - DNA, 678 bp, Homo Sapiens; identical to SEQ ID NO: 74121

SEQ ID NO: 108202 - DNA, 943 bp, Homo Sapiens; identical to SEQ ID NO: 74122
  misc_feature (33)..(33): n is a, c, g, or t

SEQ ID NO: 108203 - DNA, 953 bp, Homo Sapiens; identical to SEQ ID NO: 74124
  misc_feature (705)..(818): n is a, c, g, or t

SEQ ID NO: 108204 - DNA, 1118 bp, Homo Sapiens; identical to SEQ ID NO: 74125
  misc_feature (719)..(719): n is a, c, g, or t
  misc_feature (1022)..(1022): n is a, c, g, or t

SEQ ID NO: 108205 - DNA, 839 bp, Homo Sapiens; identical to SEQ ID NO: 74126
  misc_feature (727)..(753): n is a, c, g, or t
  misc_feature (756)..(758): n is a, c, g, or t
  misc_feature (760)..(768): n is a, c, g, or t
  misc_feature (772)..(774): n is a, c, g, or t
  misc_feature (776)..(782): n is a, c, g, or t

SEQ ID NO: 108206 - DNA, 926 bp, Homo Sapiens; identical to SEQ ID NO: 74127
  misc_feature (781)..(808): n is a, c, g, or t

SEQ ID NO: 108207 - DNA, 1182 bp, Homo Sapiens; identical to SEQ ID NO: 74130
  misc_feature (123)..(123): n is a, c, g, or t
  misc_feature (138)..(138): n is a, c, g, or t
  misc_feature (174)..(174): n is a, c, g, or t
  misc_feature (471)..(603): n is a, c, g, or t
  misc_feature (843)..(887): n is a, c, g, or t
  misc_feature (1032)..(1083): n is a, c, g, or t

SEQ ID NO: 108208 - DNA, 1342 bp, Homo Sapiens; identical to SEQ ID NO: 74131
  misc_feature (720)..(766): n is a, c, g, or t
  misc_feature (911)..(962): n is a, c, g, or t
  misc_feature (1049)..(1103): n is a, c, g, or t

SEQ ID NO: 108209 - DNA, 751 bp, Homo Sapiens; identical to SEQ ID NO: 74138
  misc_feature (20)..(20): n is a, c, g, or t

SEQ ID NO: 108210 - DNA, 449 bp, Homo Sapiens; identical to SEQ ID NO: 74139

SEQ ID NO: 108211 - DNA, 1238 bp, Homo Sapiens; identical to SEQ ID NO: 74140
  misc_feature (76)..(108): n is a, c, g, or t
  misc_feature (149)..(186): n is a, c, g, or t
  misc_feature (637)..(825): n is a, c, g, or t
  misc_feature (829)..(837): n is a, c, g, or t
  misc_feature (849)..(858): n is a, c, g, or t
  misc_feature (887)..(977): n is a, c, g, or t
  misc_feature (1041)..(1041): n is a, c, g, or t
  misc_feature (1071)..(1081): n is a, c, g, or t

SEQ ID NO: 108212 - DNA, 587 bp, Homo Sapiens; identical to SEQ ID NO: 74141

SEQ ID NO: 108213 - DNA, 1838 bp, Homo Sapiens; identical to SEQ ID NO: 74142

SEQ ID NO: 108214 - DNA, 1344 bp, Homo Sapiens; identical to SEQ ID NO: 74143

SEQ ID NO: 108215 - DNA, 969 bp, Homo Sapiens; identical to SEQ ID NO: 74144
  misc_feature (48)..(96): n is a, c, g, or t

SEQ ID NO: 108216 - DNA, 2298 bp, Homo Sapiens; identical to SEQ ID NO: 74145

SEQ ID NO: 108217 - DNA, 603 bp, Homo Sapiens; identical to SEQ ID NO: 74146
  misc_feature (587)..(587): n is a, c, g, or t

SEQ ID NO: 108218 - DNA, 448 bp, Homo Sapiens; identical to SEQ ID NO: 74147

SEQ ID NO: 108219 - DNA, 961 bp, Homo Sapiens; identical to SEQ ID NO: 74149
  misc_feature (440)..(463): n is a, c, g, or t

SEQ ID NO: 108220 - DNA, 1313 bp, Homo Sapiens; identical to SEQ ID NO: 74150
  misc_feature (1221)..(1243): n is a, c, g, or t

SEQ ID NO: 108221 - DNA, 728 bp, Homo Sapiens; identical to SEQ ID NO: 74155

SEQ ID NO: 108222 - DNA, 1092 bp, Homo Sapiens; identical to SEQ ID NO: 74156

SEQ ID NO: 108223 - DNA, 347 bp, Homo Sapiens; identical to SEQ ID NO: 74157

SEQ ID NO: 108224 - DNA, 996 bp, Homo Sapiens; identical to SEQ ID NO: 74165
  misc_feature (100)..(100): n is a, c, g, or t
  misc_feature (148)..(148): n is a, c, g, or t
  misc_feature (155)..(155): n is a, c, g, or t

SEQ ID NO: 108225 - DNA, 3735 bp, Homo Sapiens; identical to SEQ ID NO: 74166

SEQ ID NO: 108226 - DNA, 1445 bp, Homo Sapiens; identical to SEQ ID NO: 74167

SEQ ID NO: 108227 - DNA, 1373 bp, Homo Sapiens; identical to SEQ ID NO: 74168
  misc_feature (738)..(803): n is a, c, g, or t

SEQ ID NO: 108228 - DNA, 1237 bp, Homo Sapiens; identical to SEQ ID NO: 74171
  misc_feature (1196)..(1196): n is a, c, g, or t

SEQ ID NO: 108229 - DNA, 900 bp, Homo Sapiens; identical to SEQ ID NO: 74172

SEQ ID NO: 108230 - DNA, 1143 bp, Homo Sapiens; identical to SEQ ID NO: 74174
  misc_feature (622)..(634): n is a, c, g, or t
  misc_feature (958)..(968): n is a, c, g, or t

SEQ ID NO: 108231 - DNA, 2613 bp, Homo Sapiens; identical to SEQ ID NO: 74175
  misc_feature (2066)..(2108): n is a, c, g, or t

SEQ ID NO: 108232 - DNA, 1457 bp, Homo Sapiens; identical to SEQ ID NO: 74176
  misc_feature (81)..(143): n is a, c, g, or t
  misc_feature (305)..(327): n is a, c, g, or t

SEQ ID NO: 108233 - DNA, 142 bp, Homo Sapiens; identical to SEQ ID NO: 74177

SEQ ID NO: 108234 - DNA, 1569 bp, Homo Sapiens; identical to SEQ ID NO: 74183

SEQ ID NO: 108235 - DNA, 1021 bp, Homo Sapiens; identical to SEQ ID NO: 74184
  misc_feature (112)..(120): n is a, c, g, or t

SEQ ID NO: 108236 - DNA, 1623 bp, Homo Sapiens; identical to SEQ ID NO: 74192
  misc_feature (792)..(792): n is a, c, g, or t
  misc_feature (1496)..(1568): n is a, c, g, or t

SEQ ID NO: 108237 - DNA, 945 bp, Homo Sapiens; identical to SEQ ID NO: 74193

SEQ ID NO: 108238 - DNA, 819 bp, Homo Sapiens; identical to SEQ ID NO: 74194

SEQ ID NO: 108239 - DNA, 612 bp, Homo Sapiens; identical to SEQ ID NO: 74197

SEQ ID NO: 108240 - DNA, 960 bp, Homo Sapiens; identical to SEQ ID NO: 74198

SEQ ID NO: 108241 - DNA, 1358 bp, Homo Sapiens; identical to SEQ ID NO: 74199

SEQ ID NO: 108242 - DNA, 1238 bp, Homo Sapiens; identical to SEQ ID NO: 74200

SEQ ID NO: 108243 - DNA, 2278 bp, Homo Sapiens; identical to SEQ ID NO: 74201

SEQ ID NO: 108244 - DNA, 1131 bp, Homo Sapiens; identical to SEQ ID NO: 74203
  misc_feature (43)..(84): n is a, c, g, or t
  misc_feature (88)..(122): n is a, c, g, or t

SEQ ID NO: 108245 - DNA, 1153 bp, Homo Sapiens; identical to SEQ ID NO: 74204

SEQ ID NO: 108246 - DNA, 807 bp, Homo Sapiens; identical to SEQ ID NO: 74205

SEQ ID NO: 108247 - DNA, 820 bp, Homo Sapiens; identical to SEQ ID NO: 74206
  misc_feature (731)..(731): n is a, c, g, or t

SEQ ID NO: 108248 - DNA, 797 bp, Homo Sapiens; identical to SEQ ID NO: 74207
  misc_feature (779)..(779): n is a, c, g, or t

SEQ ID NO: 108249 - DNA, 858 bp, Homo Sapiens; identical to SEQ ID NO: 74208

SEQ ID NO: 108250 - DNA, 742 bp, Homo Sapiens; identical to SEQ ID NO: 74209

SEQ ID NO: 108251 - DNA, 571 bp, Homo Sapiens; identical to SEQ ID NO: 74210

SEQ ID NO: 108252 - DNA, 484 bp, Homo Sapiens; identical to SEQ ID NO: 74211
  misc_feature (298)..(316): n is a, c, g, or t

SEQ ID NO: 108253 - DNA, 524 bp, Homo Sapiens; identical to SEQ ID NO: 74212

SEQ ID NO: 108254 - DNA, 558 bp, Homo Sapiens; identical to SEQ ID NO: 74213

SEQ ID NO: 108255 - DNA, 511 bp, Homo Sapiens; identical to SEQ ID NO: 74214

SEQ ID NO: 108256 - DNA, 889 bp, Homo Sapiens; identical to SEQ ID NO: 74221

SEQ ID NO: 108257 - DNA, 505 bp, Homo Sapiens; identical to SEQ ID NO: 74222
  misc_feature (20)..(20): n is a, c, g, or t
  misc_feature (30)..(30): n is a, c, g, or t
  misc_feature (57)..(57): n is a, c, g, or t
  misc_feature (66)..(66): n is a, c, g, or t
  misc_feature (81)..(81): n is a, c, g, or t
  misc_feature (92)..(92): n is a, c, g, or t
  misc_feature (99)..(99): n is a, c, g, or t
  misc_feature (140)..(141): n is a, c, g, or t

SEQ ID NO: 108258 - DNA, 1314 bp, Homo Sapiens; identical to SEQ ID NO: 74223
  misc_feature (1268)..(1268): n is a, c, g, or t

SEQ ID NO: 108259 - DNA, 1337 bp, Homo Sapiens; identical to SEQ ID NO: 74224

SEQ ID NO: 108260 - DNA, 655 bp, Homo Sapiens; identical to SEQ ID NO: 74225
  misc_feature (152)..(210): n is a, c, g, or t

SEQ ID NO: 108261 - DNA, 1085 bp, Homo Sapiens; identical to SEQ ID NO: 74226

SEQ ID NO: 108262 - DNA, 707 bp, Homo Sapiens; identical to SEQ ID NO: 74227

SEQ ID NO: 108263 - DNA, 1986 bp, Homo Sapiens; identical to SEQ ID NO: 74228
  misc_feature (65)..(97): n is a, c, g, or t
  misc_feature (230)..(230): n is a, c, g, or t
  misc_feature (783)..(783): n is a, c, g, or t
  misc_feature (835)..(835): n is a, c, g, or t
  misc_feature (1719)..(1782): n is a, c, g, or t

SEQ ID NO: 108264 - DNA, 427 bp, Homo Sapiens; identical to SEQ ID NO: 74229

SEQ ID NO: 108265 - DNA, 2538 bp, Homo Sapiens; identical to SEQ ID NO: 74232
  misc_feature (1123)..(1123): n is a, c, g, or t

SEQ ID NO: 108266 - DNA, 913 bp, Homo Sapiens; identical to SEQ ID NO: 74233

SEQ ID NO: 108267 - DNA, 555 bp, Homo Sapiens; identical to SEQ ID NO: 74235

SEQ ID NO: 108268 - DNA, 842 bp, Homo Sapiens; identical to SEQ ID NO: 74236
  misc_feature (766)..(799): n is a, c, g, or t

SEQ ID NO: 108269 - DNA, 608 bp, Homo Sapiens; identical to SEQ ID NO: 74240
  misc_feature (490)..(538): n is a, c, g, or t

SEQ ID NO: 108270 - DNA, 1397 bp, Homo Sapiens; identical to SEQ ID NO: 74241
  misc_feature (23)..(23): n is a, c, g, or t
  misc_feature (25)..(25): n is a, c, g, or t
  misc_feature (84)..(118): n is a, c, g, or t
  misc_feature (1128)..(1172): n is a, c, g, or t
  misc_feature (1339)..(1339): n is a, c, g, or t
  misc_feature (1367)..(1368): n is a, c, g, or t

SEQ ID NO: 108271 - DNA, 1111 bp, Homo Sapiens; identical to SEQ ID NO: 74242
  misc_feature (532)..(579): n is a, c, g, or t

SEQ ID NO: 108272 - DNA, 760 bp, Homo Sapiens; identical to SEQ ID NO: 74243
  misc_feature (51)..(212): n is a, c, g, or t
  misc_feature (529)..(626): n is a, c, g, or t

SEQ ID NO: 108273 - DNA, 775 bp, Homo Sapiens; identical to SEQ ID NO: 74244
  misc_feature (354)..(406): n is a, c, g, or t
  misc_feature (565)..(609): n is a, c, g, or t

SEQ ID NO: 108274 - DNA, 2037 bp, Homo Sapiens; identical to SEQ ID NO: 74245
  misc_feature (450)..(496): n is a, c, g, or t
  misc_feature (1610)..(1771): n is a, c, g, or t

SEQ ID NO: 108275 - DNA, 798 bp, Homo Sapiens; identical to SEQ ID NO: 74246
  misc_feature (162)..(188): n is a, c, g, or t
  misc_feature (523)..(531): n is a, c, g, or t

SEQ ID NO: 108276 - DNA, 460 bp, Homo Sapiens; identical to SEQ ID NO: 74247
  misc_feature (56)..(82): n is a, c, g, or t

SEQ ID NO: 108277 - DNA, 1375 bp, Homo Sapiens; identical to SEQ ID NO: 74251
  misc_feature (1236)..(1236): n is a, c, g, or t

SEQ ID NO: 108278 - DNA, 473 bp, Homo Sapiens; identical to SEQ ID NO: 74252
  misc_feature (444)..(444): n is a, c, g, or t

SEQ ID NO: 108279 - DNA, 1419 bp, Homo Sapiens; identical to SEQ ID NO: 74254

SEQ ID NO: 108280 - DNA, 1373 bp, Homo Sapiens; identical to SEQ ID NO: 74255

SEQ ID NO: 108281 - DNA, 1047 bp, Homo Sapiens; identical to SEQ ID NO: 74258
  misc_feature (155)..(155): n is a, c, g, or t
  misc_feature (168)..(168): n is a, c, g, or t
  misc_feature (205)..(205): n is a, c, g, or t
  misc_feature (212)..(212): n is a, c, g, or t

SEQ ID NO: 108282 - DNA, 639 bp, Homo Sapiens; identical to SEQ ID NO: 74259

SEQ ID NO: 108283 - DNA, 847 bp, Homo Sapiens; identical to SEQ ID NO: 74260

SEQ ID NO: 108284 - DNA, 1344 bp, Homo Sapiens; identical to SEQ ID NO: 74261
  misc_feature (81)..(115): n is a, c, g, or t
  misc_feature (321)..(378): n is a, c, g, or t

SEQ ID NO: 108285 - DNA, 1025 bp, Homo Sapiens; identical to SEQ ID NO: 74263

SEQ ID NO: 108286 - DNA, 1525 bp, Homo Sapiens; identical to SEQ ID NO: 74264
  misc_feature (1140)..(1140): n is a, c, g, or t
  misc_feature (1372)..(1372): n is a, c, g, or t

SEQ ID NO: 108287 - DNA, 2616 bp, Homo Sapiens; identical to SEQ ID NO: 74265
  misc_feature (2186)..(2186): n is a, c, g, or t

SEQ ID NO: 108288 - DNA, 656 bp, Homo Sapiens; identical to SEQ ID NO: 74271

SEQ ID NO: 108289 - DNA, 1092 bp, Homo Sapiens; identical to SEQ ID NO: 74272
  misc_feature (44)..(61): n is a, c, g, or t
  misc_feature (108)..(108): n is a, c, g, or t
  misc_feature (282)..(985): n is a, c, g, or t

SEQ ID NO: 108290 - DNA, 845 bp, Homo Sapiens; identical to SEQ ID NO: 74273
  misc_feature (542)..(554): n is a, c, g, or t
  misc_feature (556)..(557): n is a, c, g, or t
  misc_feature (613)..(625): n is a, c, g, or t
  misc_feature (676)..(676): n is a, c, g, or t
  misc_feature (681)..(682): n is a, c, g, or t
  misc_feature (684)..(684): n is a, c, g, or t
  misc_feature (698)..(712): n is a, c, g, or t
  misc_feature (719)..(741): n is a, c, g, or t

SEQ ID NO: 108291 - DNA, 556 bp, Homo Sapiens; identical to SEQ ID NO: 74274

SEQ ID NO: 108292 - DNA, 778 bp, Homo Sapiens; identical to SEQ ID NO: 74278

SEQ ID NO: 108293 - DNA, 730 bp, Homo Sapiens; identical to SEQ ID NO: 74279

SEQ ID NO: 108294 - DNA, 868 bp, Homo Sapiens; identical to SEQ ID NO: 74289

SEQ ID NO: 108295 - DNA, 919 bp, Homo Sapiens; identical to SEQ ID NO: 74290

SEQ ID NO: 108296 - DNA, 1134 bp, Homo Sapiens; identical to SEQ ID NO: 74291

SEQ ID NO: 108297 - DNA, 2050 bp, Homo Sapiens; identical to SEQ ID NO: 74292

SEQ ID NO: 108298 - DNA, 1082 bp, Homo Sapiens; identical to SEQ ID NO: 74293
  misc_feature (656)..(713): n is a, c, g, or t
  misc_feature (909)..(918): n is a, c, g, or t

SEQ ID NO: 108299 - DNA, 554 bp, Homo Sapiens; identical to SEQ ID NO: 74294

SEQ ID NO: 108300 - DNA, 1455 bp, Homo Sapiens; identical to SEQ ID NO: 74297

SEQ ID NO: 108301 - DNA, 1193 bp, Homo Sapiens; identical to SEQ ID NO: 74298

SEQ ID NO: 108302 - DNA, 838 bp, Homo Sapiens; identical to SEQ ID NO: 74299

SEQ ID NO: 108303 - DNA, 953 bp, Homo Sapiens; identical to SEQ ID NO: 74300

SEQ ID NO: 108304 - DNA, 879 bp, Homo Sapiens; identical to SEQ ID NO: 74301

SEQ ID NO: 108305 - DNA, 938 bp, Homo Sapiens; identical to SEQ ID NO: 74303
  misc_feature (84)..(118): n is a, c, g, or t

SEQ ID NO: 108306 - DNA, 1079 bp, Homo Sapiens; identical to SEQ ID NO: 74304

SEQ ID NO: 108307 - DNA, 664 bp, Homo Sapiens; identical to SEQ ID NO: 74310

SEQ ID NO: 108308 - DNA, 1804 bp, Homo Sapiens; identical to SEQ ID NO: 74311

SEQ ID NO: 108309 - DNA, 2373 bp, Homo Sapiens; identical to SEQ ID NO: 74313

SEQ ID NO: 108310 - DNA, 1567 bp, Homo Sapiens; identical to SEQ ID NO: 74314

SEQ ID NO: 108311 - DNA, 1538 bp, Homo Sapiens; identical to SEQ ID NO: 74315

SEQ ID NO: 108312 - DNA, 989 bp, Homo Sapiens; identical to SEQ ID NO: 74316
  misc_feature (693)..(693): n is a, c, g, or t

SEQ ID NO: 108313 - DNA, 1004 bp, Homo Sapiens; identical to SEQ ID NO: 74320
  misc_feature (63)..(63): n is a, c, g, or t
  misc_feature (74)..(74): n is a, c, g, or t
  misc_feature (79)..(79): n is a, c, g, or t
  misc_feature (103)..(103): n is a, c, g, or t
  misc_feature (111)..(111): n is a, c, g, or t
  misc_feature (119)..(120): n is a, c, g, or t
  misc_feature (122)..(122): n is a, c, g, or t
  misc_feature (216)..(216): n is a, c, g, or t
  misc_feature (272)..(272): n is a, c, g, or t

SEQ ID NO: 108314 - DNA, 1045 bp, Homo Sapiens; identical to SEQ ID NO: 74321
  misc_feature (21)..(22): n is a, c, g, or t

SEQ ID NO: 108315 - DNA, 1244 bp, Homo Sapiens; identical to SEQ ID NO: 74322
  misc_feature (159)..(168): n is a, c, g, or t

SEQ ID NO: 108316 - DNA, 789 bp, Homo Sapiens; identical to SEQ ID NO: 74323
  misc_feature (478)..(478): n is a, c, g, or t
  misc_feature (623)..(623): n is a, c, g, or t
  misc_feature (742)..(742): n is a, c, g, or t

SEQ ID NO: 108317 - DNA, 636 bp, Homo Sapiens; identical to SEQ ID NO: 74328

SEQ ID NO: 108318 - DNA, 765 bp, Homo Sapiens; identical to SEQ ID NO: 74329
  misc_feature (186)..(186): n is a, c, g, or t

SEQ ID NO: 108319 - DNA, 1447 bp, Homo Sapiens; identical to SEQ ID NO: 74330

SEQ ID NO: 108320 - DNA, 1248 bp, Homo Sapiens; identical to SEQ ID NO: 74331
  misc_feature (718)..(766): n is a, c, g, or t

SEQ ID NO: 108321 - DNA, 1016 bp, Homo Sapiens; identical to SEQ ID NO: 74332
  misc_feature (834)..(877): n is a, c, g, or t

SEQ ID NO: 108322 - DNA, 444 bp, Homo Sapiens; identical to SEQ ID NO: 74333
  misc_feature (45)..(45): n is a, c, g, or t
  misc_feature (237)..(237): n is a, c, g, or t

SEQ ID NO: 108323 - DNA, 940 bp, Homo Sapiens; identical to SEQ ID NO: 74334
  misc_feature (837)..(837): n is a, c, g, or t
  misc_feature (895)..(895): n is a, c, g, or t
  misc_feature (898)..(898): n is a, c, g, or t

SEQ ID NO: 108324 - DNA, 1339 bp, Homo Sapiens; identical to SEQ ID NO: 74335
  misc_feature (1083)..(1126): n is a, c, g, or t

SEQ ID NO: 108325 - DNA, 1195 bp, Homo Sapiens; identical to SEQ ID NO: 74336
  misc_feature (933)..(976): n is a, c, g, or t

SEQ ID NO: 108326 - DNA, 944 bp, Homo Sapiens; identical to SEQ ID NO: 74337
  misc_feature (521)..(549): n is a, c, g, or t

SEQ ID NO: 108327 - DNA, 1492 bp, Homo Sapiens; identical to SEQ ID NO: 74338

SEQ ID NO: 108328 - DNA, 916 bp, Homo Sapiens; identical to SEQ ID NO: 74339

SEQ ID NO: 108329 - DNA, 1147 bp, Homo Sapiens; identical to SEQ ID NO: 74343
  misc_feature (262)..(262): n is a, c, g, or t
  misc_feature (860)..(875): n is a, c, g, or t

SEQ ID NO: 108330 - DNA, 947 bp, Homo Sapiens; identical to SEQ ID NO: 74344
  misc_feature (208)..(216): n is a, c, g, or t

SEQ ID NO: 108331 - DNA, 478 bp, Homo Sapiens; identical to SEQ ID NO: 74345

SEQ ID NO: 108332 - DNA, 491 bp, Homo Sapiens; identical to SEQ ID NO: 74346

SEQ ID NO: 108333 - DNA, 1012 bp, Homo Sapiens; identical to SEQ ID NO: 74347

SEQ ID NO: 108334 - DNA, 934 bp, Homo Sapiens; identical to SEQ ID NO: 74348
  misc_feature (855)..(855): n is a, c, g, or t
  misc_feature (881)..(881): n is a, c, g, or t

SEQ ID NO: 108335 - DNA, 1345 bp, Homo Sapiens; identical to SEQ ID NO: 74349

SEQ ID NO: 108336 - DNA, 1931 bp, Homo Sapiens; identical to SEQ ID NO: 74357
  misc_feature (1389)..(1430): n is a, c, g, or t
  misc_feature (1646)..(1679): n is a, c, g, or t

SEQ ID NO: 108337 - DNA, 864 bp, Homo Sapiens; identical to SEQ ID NO: 74358

SEQ ID NO: 108338 - DNA, 702 bp, Homo Sapiens; identical to SEQ ID NO: 74363

SEQ ID NO: 108339 - DNA, 1017 bp, Homo Sapiens; identical to SEQ ID NO: 74364

SEQ ID NO: 108340 - DNA, 878 bp, Homo Sapiens; identical to SEQ ID NO: 74371

SEQ ID NO: 108341 - DNA, 1029 bp, Homo Sapiens; identical to SEQ ID NO: 74372

SEQ ID NO: 108342 - DNA, 2133 bp, Homo Sapiens; identical to SEQ ID NO: 74373

SEQ ID NO: 108343 - DNA, 478 bp, Homo Sapiens; identical to SEQ ID NO: 74374

SEQ ID NO: 108344 - DNA, 1018 bp, Homo Sapiens; identical to SEQ ID NO: 74375
  misc_feature (650)..(650): n is a, c, g, or t

SEQ ID NO: 108345 - DNA, 687 bp, Homo Sapiens; identical to SEQ ID NO: 74382
  misc_feature (52)..(52): n is a, c, g, or t
  misc_feature (229)..(288): n is a, c, g, or t

SEQ ID NO: 108346 - DNA, 1175 bp, Homo Sapiens; identical to SEQ ID NO: 74383

SEQ ID NO: 108347 - DNA, 1439 bp, Homo Sapiens; identical to SEQ ID NO: 74386

SEQ ID NO: 108348 - DNA, 1032 bp, Homo Sapiens; identical to SEQ ID NO: 74387

SEQ ID NO: 108349 - DNA, 1536 bp, Homo Sapiens; identical to SEQ ID NO: 74390
  misc_feature (970)..(994): n is a, c, g, or t

SEQ ID NO: 108350 - DNA, 834 bp, Homo Sapiens; identical to SEQ ID NO: 74391

SEQ ID NO: 108351 - DNA, 765 bp, Homo Sapiens; identical to SEQ ID NO: 74394
  misc_feature (645)..(645): n is a, c, g, or t

SEQ ID NO: 108352 - DNA, 862 bp, Homo Sapiens; identical to SEQ ID NO: 74395
  misc_feature (42)..(81): n is a, c, g, or t
  misc_feature (85)..(119): n is a, c, g, or t

SEQ ID NO: 108353 - DNA, 1326 bp, Homo Sapiens; identical to SEQ ID NO: 74396
  misc_feature (687)..(696): n is a, c, g, or t
  misc_feature (763)..(796): n is a, c, g, or t
  misc_feature (1103)..(1150): n is a, c, g, or t

SEQ ID NO: 108354 - DNA, 742 bp, Homo Sapiens; identical to SEQ ID NO: 74397

SEQ ID NO: 108355 - DNA, 531 bp, Homo Sapiens; identical to SEQ ID NO: 74400

SEQ ID NO: 108356 - DNA, 687 bp, Homo Sapiens; identical to SEQ ID NO: 74401

SEQ ID NO: 108357 - DNA, 745 bp, Homo Sapiens; identical to SEQ ID NO: 74402

SEQ ID NO: 108358 - DNA, 2364 bp, Homo Sapiens; identical to SEQ ID NO: 74403
  misc_feature (43)..(81): n is a, c, g, or t
  misc_feature (84)..(118): n is a, c, g, or t
  misc_feature (1563)..(1573): n is a, c, g, or t
  misc_feature (1728)..(1737): n is a, c, g, or t

SEQ ID NO: 108359 - DNA, 1041 bp, Homo Sapiens; identical to SEQ ID NO: 74407
  misc_feature (72)..(72): n is a, c, g, or t
  misc_feature (188)..(188): n is a, c, g, or t
  misc_feature (273)..(273): n is a, c, g, or t
  misc_feature (284)..(284): n is a, c, g, or t
  misc_feature (725)..(735): n is a, c, g, or t

SEQ ID NO: 108360 - DNA, 2194 bp, Homo Sapiens; identical to SEQ ID NO: 74408

SEQ ID NO: 108361 - DNA, 1752 bp, Homo Sapiens; identical to SEQ ID NO: 74411
  misc_feature (61)..(86): n is a, c, g, or t

SEQ ID NO: 108362 - DNA, 953 bp, Homo Sapiens; identical to SEQ ID NO: 74412

SEQ ID NO: 108363 - DNA, 919 bp, Homo Sapiens; identical to SEQ ID NO: 74413

SEQ ID NO: 108364 - DNA, 960 bp, Homo Sapiens; identical to SEQ ID NO: 74414

SEQ ID NO: 108365 - DNA, 670 bp, Homo Sapiens; identical to SEQ ID NO: 74434
  misc_feature (28)..(28): n is a, c, g, or t

SEQ ID NO: 108366 - DNA, 2630 bp, Homo Sapiens; identical to SEQ ID NO: 74435

SEQ ID NO: 108367 - DNA, 1016 bp, Homo Sapiens; identical to SEQ ID NO: 74436
  misc_feature (957)..(957): n is a, c, g, or t

SEQ ID NO: 108368 - DNA, 985 bp, Homo Sapiens; identical to SEQ ID NO: 74437

SEQ ID NO: 108369 - DNA, 531 bp, Homo Sapiens; identical to SEQ ID NO: 74438
  misc_feature (446)..(446): n is a, c, g, or t

SEQ ID NO: 108370 - DNA, 1646 bp, Homo Sapiens; identical to SEQ ID NO: 74439

SEQ ID NO: 108371 - DNA, 474 bp, Homo Sapiens; identical to SEQ ID NO: 74440

SEQ ID NO: 108372 - DNA, 1301 bp, Homo Sapiens; identical to SEQ ID NO: 74442
  misc_feature (1220)..(1220): n is a, c, g, or t

SEQ ID NO: 108373 - DNA, 900 bp, Homo Sapiens; identical to SEQ ID NO: 74443

SEQ ID NO: 108374 - DNA, 3431 bp, Homo Sapiens; identical to SEQ ID NO: 74444
  misc_feature (59)..(59): n is a, c, g, or t
  misc_feature (2016)..(2016): n is a, c, g, or t
  misc_feature (2018)..(2018): n is a, c, g, or t

SEQ ID NO: 108375 - DNA, 643 bp, Homo Sapiens; identical to SEQ ID NO: 74448

SEQ ID NO: 108376 - DNA, 488 bp, Homo Sapiens; identical to SEQ ID NO: 74449
  misc_feature (65)..(65): n is a, c, g, or t
  misc_feature (441)..(441): n is a, c, g, or t

SEQ ID NO: 108377 - DNA, 1313 bp, Homo Sapiens; identical to SEQ ID NO: 74450
  misc_feature (1118)..(1127): n is a, c, g, or t
  misc_feature (1129)..(1146): n is a, c, g, or t
  misc_feature (1238)..(1238): n is a, c, g, or t

SEQ ID NO: 108378 - DNA, 356 bp, Homo Sapiens; identical to SEQ ID NO: 74453

SEQ ID NO: 108379 - DNA, 490 bp, Homo Sapiens; identical to SEQ ID NO: 74454

SEQ ID NO: 108380 - DNA, 1543 bp, Homo Sapiens; identical to SEQ ID NO: 74455
  misc_feature (1119)..(1144): n is a, c, g, or t

SEQ ID NO: 108381 - DNA, 507 bp, Homo Sapiens; identical to SEQ ID NO: 74456

SEQ ID NO: 108382 - DNA, 562 bp, Homo Sapiens; identical to SEQ ID NO: 74457

SEQ ID NO: 108383 - DNA, 1598 bp, Homo Sapiens; identical to SEQ ID NO: 74458

SEQ ID NO: 108384 - DNA, 1285 bp, Homo Sapiens; identical to SEQ ID NO: 74460
  misc_feature (1129)..(1129): n is a, c, g, or t
  misc_feature (1135)..(1135): n is a, c, g, or t
  misc_feature (1144)..(1145): n is a, c, g, or t
  misc_feature (1147)..(1149): n is a, c, g, or t

SEQ ID NO: 108385 - DNA, 2067 bp, Homo Sapiens; identical to SEQ ID NO: 74461
  misc_feature (1854)..(1854): n is a, c, g, or t

SEQ ID NO: 108386 - DNA, 1283 bp, Homo Sapiens; identical to SEQ ID NO: 74463
  misc_feature (659)..(786): n is a, c, g, or t
  misc_feature (794)..(810): n is a, c, g, or t
  misc_feature (933)..(957): n is a, c, g, or t
  misc_feature (998)..(1032): n is a, c, g, or t

SEQ ID NO: 108387 - DNA, 1205 bp, Homo Sapiens; identical to SEQ ID NO: 74464
  misc_feature (652)..(819): n is a, c, g, or t
  misc_feature (835)..(1047): n is a, c, g, or t
  misc_feature (1064)..(1076): n is a, c, g, or t
  misc_feature (1119)..(1141): n is a, c, g, or t
  misc_feature (1144)..(1154): n is a, c, g, or t

SEQ ID NO: 108388 - DNA, 1326 bp, Homo Sapiens; identical to SEQ ID NO: 74466
  misc_feature (55)..(55): n is a, c, g, or t
  misc_feature (74)..(108): n is a, c, g, or t
  misc_feature (805)..(814): n is a, c, g, or t
  misc_feature (963)..(977): n is a, c, g, or t
  misc_feature (1051)..(1071): n is a, c, g, or t

SEQ ID NO: 108389 - DNA, 893 bp, Homo Sapiens; identical to SEQ ID NO: 74467

SEQ ID NO: 108390 - DNA, 881 bp, Homo Sapiens; identical to SEQ ID NO: 74468
  misc_feature (827)..(827): n is a, c, g, or t

SEQ ID NO: 108391 - DNA, 877 bp, Homo Sapiens; identical to SEQ ID NO: 74470
  misc_feature (42)..(80): n is a, c, g, or t
  misc_feature (84)..(118): n is a, c, g, or t
  misc_feature (696)..(725): n is a, c, g, or t

SEQ ID NO: 108392 - DNA, 837 bp, Homo Sapiens; identical to SEQ ID NO: 74471

SEQ ID NO: 108393 - DNA, 663 bp, Homo Sapiens; identical to SEQ ID NO: 74473

SEQ ID NO: 108394 - DNA, 1680 bp, Homo Sapiens; identical to SEQ ID NO: 74474

SEQ ID NO: 108395 - DNA, 1015 bp, Homo Sapiens; identical to SEQ ID NO: 74476
  misc_feature (46)..(46): n is a, c, g, or t

SEQ ID NO: 108396 - DNA, 2599 bp, Homo Sapiens; identical to SEQ ID NO: 74477
  misc_feature (2178)..(2196): n is a, c, g, or t
  misc_feature (2198)..(2202): n is a, c, g, or t
  misc_feature (2204)..(2205): n is a, c, g, or t
  misc_feature (2207)..(2207): n is a, c, g, or t
  misc_feature (2209)..(2323): n is a, c, g, or t
  misc_feature (2331)..(2373): n is a, c, g, or t
  misc_feature (2397)..(2493): n is a, c, g, or t

SEQ ID NO: 108397 - DNA, 2004 bp, Homo Sapiens; identical to SEQ ID NO: 74478
  misc_feature (1229)..(1229): n is a, c, g, or t

SEQ ID NO: 108398 - DNA, 656 bp, Homo Sapiens; identical to SEQ ID NO: 74479
  misc_feature (611)..(611): n is a, c, g, or t

SEQ ID NO: 108399 - DNA, 586 bp, Homo Sapiens; identical to SEQ ID NO: 74481

SEQ ID NO: 108400 - DNA, 1316 bp, Homo Sapiens; identical to SEQ ID NO: 74482
  misc_feature (49)..(87): n is a, c, g, or t
  misc_feature (91)..(125): n is a, c, g, or t

SEQ ID NO: 108401 - DNA, 1340 bp, Homo Sapiens; identical to SEQ ID NO: 74484
  misc_feature (35)..(35): n is a, c, g, or t
  misc_feature (58)..(58): n is a, c, g, or t
  misc_feature (142)..(142): n is a, c, g, or t
  misc_feature (196)..(241): n is a, c, g, or t

SEQ ID NO: 108402 - DNA, 783 bp, Homo Sapiens; identical to SEQ ID NO: 74485

SEQ ID NO: 108403 - DNA, 827 bp, Homo Sapiens; identical to SEQ ID NO: 74486
  misc_feature (649)..(691): n is a, c, g, or t

SEQ ID NO: 108404 - DNA, 837 bp, Homo Sapiens; identical to SEQ ID NO: 74488

SEQ ID NO: 108405 - DNA, 840 bp, Homo Sapiens; identical to SEQ ID NO: 74489
  misc_feature (609)..(636): n is a, c, g, or t
  misc_feature (758)..(758): n is a, c, g, or t

SEQ ID NO: 108406 - DNA, 866 bp, Homo Sapiens; identical to SEQ ID NO: 74490
  misc_feature (231)..(231): n is a, c, g, or t
  misc_feature (564)..(592): n is a, c, g, or t
  misc_feature (714)..(729): n is a, c, g, or t
  misc_feature (814)..(814): n is a, c, g, or t

SEQ ID NO: 108407 - DNA, 1454 bp, Homo Sapiens; identical to SEQ ID NO: 74491
  misc_feature (555)..(583): n is a, c, g, or t
  misc_feature (815)..(942): n is a, c, g, or t
  misc_feature (1210)..(1210): n is a, c, g, or t

SEQ ID NO: 108408 - DNA, 993 bp, Homo Sapiens; identical to SEQ ID NO: 74493

SEQ ID NO: 108409 - DNA, 910 bp, Homo Sapiens; identical to SEQ ID NO: 74494
  misc_feature (747)..(785): n is a, c, g, or t

SEQ ID NO: 108410 - DNA, 1100 bp, Homo Sapiens; identical to SEQ ID NO: 74495
  misc_feature (36)..(36): n is a, c, g, or t
  misc_feature (75)..(92): n is a, c, g, or t
  misc_feature (993)..(993): n is a, c, g, or t
  misc_feature (1021)..(1021): n is a, c, g, or t

SEQ ID NO: 108411 - DNA, 3219 bp, Homo Sapiens; identical to SEQ ID NO: 74496
  misc_feature (2833)..(2848): n is a, c, g, or t

SEQ ID NO: 108412 - DNA, 1313 bp, Homo Sapiens; identical to SEQ ID NO: 74497

SEQ ID NO: 108413 - DNA, 545 bp, Homo Sapiens; identical to SEQ ID NO: 74498
  misc_feature (461)..(461): n is a, c, g, or t
  misc_feature (463)..(463): n is a, c, g, or t
  misc_feature (506)..(506): n is a, c, g, or t

SEQ ID NO: 108414 - DNA, 974 bp, Homo Sapiens; identical to SEQ ID NO: 74499

SEQ ID NO: 108415 - DNA, 1885 bp, Homo Sapiens; identical to SEQ ID NO: 74500

SEQ ID NO: 108416 - DNA, 1213 bp, Homo Sapiens; identical to SEQ ID NO: 74501
  misc_feature (513)..(521): n is a, c, g, or t
  misc_feature (863)..(863): n is a, c, g, or t
  misc_feature (1153)..(1162): n is a, c, g, or t

SEQ ID NO: 108417 - DNA, 994 bp, Homo Sapiens; identical to SEQ ID NO: 74511
  misc_feature (845)..(845): n is a, c, g, or t

SEQ ID NO: 108418 - DNA, 1217 bp, Homo Sapiens; identical to SEQ ID NO: 74512
  misc_feature (800)..(903): n is a, c, g, or t
  misc_feature (905)..(916): n is a, c, g, or t
  misc_feature (918)..(964): n is a, c, g, or t
  misc_feature (970)..(973): n is a, c, g, or t
  misc_feature (979)..(979): n is a, c, g, or t
  misc_feature (988)..(988): n is a, c, g, or t
  misc_feature (1002)..(1120): n is a, c, g, or t

SEQ ID NO: 108419 - DNA, 727 bp, Homo Sapiens; identical to SEQ ID NO: 74523

SEQ ID NO: 108420 - DNA, 893 bp, Homo Sapiens; identical to SEQ ID NO: 74524
  misc_feature (42)..(84): n is a, c, g, or t
  misc_feature (87)..(121): n is a, c, g, or t

SEQ ID NO: 108421 - DNA, 1219 bp, Homo Sapiens; identical to SEQ ID NO: 74525
  misc_feature (1152)..(1152): n is a, c, g, or t

SEQ ID NO: 108422 - DNA, 1337 bp, Homo Sapiens; identical to SEQ ID NO: 74526

SEQ ID NO: 108423 - DNA, 784 bp, Homo Sapiens; identical to SEQ ID NO: 74532
  misc_feature (614)..(660): n is a, c, g, or t

SEQ ID NO: 108424 - DNA, 492 bp, Homo Sapiens; identical to SEQ ID NO: 74533

SEQ ID NO: 108425 - DNA, 1300 bp, Homo Sapiens; identical to SEQ ID NO: 74534
  misc_feature (276)..(290): n is a, c, g, or t
  misc_feature (537)..(537): n is a, c, g, or t

SEQ ID NO: 108426 - DNA, 676 bp, Homo Sapiens; identical to SEQ ID NO: 74535
  misc_feature (406)..(406): n is a, c, g, or t

SEQ ID NO: 108427 - DNA, 444 bp, Homo Sapiens; identical to SEQ ID NO: 74536

SEQ ID NO: 108428 - DNA, 1295 bp, Homo Sapiens; identical to SEQ ID NO: 74539

SEQ ID NO: 108429 - DNA, 1081 bp, Homo Sapiens; identical to SEQ ID NO: 74540

SEQ ID NO: 108430 - DNA, 786 bp, Homo Sapiens; identical to SEQ ID NO: 74541
  misc_feature (707)..(725): n is a, c, g, or t

SEQ ID NO: 108431 - DNA, 778 bp, Homo Sapiens; identical to SEQ ID NO: 74545
  misc_feature (459)..(528): n is a, c, g, or t

SEQ ID NO: 108432 - DNA, 937 bp, Homo Sapiens; identical to SEQ ID NO: 74546

SEQ ID NO: 108433 - DNA, 444 bp, Homo Sapiens; identical to SEQ ID NO: 74547

SEQ ID NO: 108434 - DNA, 901 bp, Homo Sapiens; identical to SEQ ID NO: 74549
  misc_feature (718)..(733): n is a, c, g, or t
  misc_feature (802)..(816): n is a, c, g, or t

SEQ ID NO: 108435 - DNA, 506 bp, Homo Sapiens; identical to SEQ ID NO: 74550

SEQ ID NO: 108436 - DNA, 1001 bp, Homo Sapiens; identical to SEQ ID NO: 74551

SEQ ID NO: 108437 - DNA, 1536 bp, Homo Sapiens; identical to SEQ ID NO: 74552

SEQ ID NO: 108438 - DNA, 1280 bp, Homo Sapiens; identical to SEQ ID NO: 74553
  misc_feature (1213)..(1213): n is a, c, g, or t

SEQ ID NO: 108439 - DNA, 1990 bp, Homo Sapiens; identical to SEQ ID NO: 74554
  misc_feature (225)..(269): n is a, c, g, or t
  misc_feature (1785)..(1890): n is a, c, g, or t
  misc_feature (1893)..(1897): n is a, c, g, or t
  misc_feature (1900)..(1923): n is a, c, g, or t
  misc_feature (1926)..(1927): n is a, c, g, or t
  misc_feature (1930)..(1944): n is a, c, g, or t

SEQ ID NO: 108440 - DNA, 859 bp, Homo Sapiens; identical to SEQ ID NO: 74562
  misc_feature (41)..(83): n is a, c, g, or t
  misc_feature (87)..(121): n is a, c, g, or t

SEQ ID NO: 108441 - DNA, 560 bp, Homo Sapiens; identical to SEQ ID NO: 74563
  misc_feature (360)..(360): n is a, c, g, or t
  misc_feature (374)..(374): n is a, c, g, or t
  misc_feature (408)..(408): n is a, c, g, or t

SEQ ID NO: 108442 - DNA, 813 bp, Homo Sapiens; identical to SEQ ID NO: 74564

SEQ ID NO: 108443 - DNA, 831 bp, Homo Sapiens; identical to SEQ ID NO: 74565

SEQ ID NO: 108444 - DNA, 999 bp, Homo Sapiens; identical to SEQ ID NO: 74566

SEQ ID NO: 108445 - DNA, 2438 bp, Homo Sapiens; identical to SEQ ID NO: 74567
  misc_feature (1403)..(1437): n is a, c, g, or t
  misc_feature (1648)..(1659): n is a, c, g, or t
  misc_feature (1883)..(1951): n is a, c, g, or t

SEQ ID NO: 108446 - DNA, 751 bp, Homo Sapiens; identical to SEQ ID NO: 74568
  misc_feature (480)..(480): n is a, c, g, or t
  misc_feature (504)..(504): n is a, c, g, or t

SEQ ID NO: 108447 - DNA, 1636 bp, Homo Sapiens; identical to SEQ ID NO: 74569
  misc_feature (188)..(213): n is a, c, g, or t
  misc_feature (1448)..(1448): n is a, c, g, or t
  misc_feature (1471)..(1471): n is a, c, g, or t

SEQ ID NO: 108448 - DNA, 864 bp, Homo Sapiens; identical to SEQ ID NO: 74570

SEQ ID NO: 108449 - DNA, 2002 bp, Homo Sapiens; identical to SEQ ID NO: 74571

SEQ ID NO: 108450 - DNA, 835 bp, Homo Sapiens; identical to SEQ ID NO: 74572

SEQ ID NO: 108451 - DNA, 1157 bp, Homo Sapiens; identical to SEQ ID NO: 74575

SEQ ID NO: 108452 - DNA, 824 bp, Homo Sapiens; identical to SEQ ID NO: 74576

SEQ ID NO: 108453 - DNA, 821 bp, Homo Sapiens; identical to SEQ ID NO: 74582
  misc_feature (33)..(33): n is a, c, g, or t
  misc_feature (58)..(58): n is a, c, g, or t
  misc_feature (136)..(136): n is a, c, g, or t

SEQ ID NO: 108454 - DNA, 1385 bp, Homo Sapiens; identical to SEQ ID NO: 74583

SEQ ID NO: 108455 - DNA, 680 bp, Homo Sapiens; identical to SEQ ID NO: 74585
  misc_feature (155)..(217): n is a, c, g, or t
  misc_feature (586)..(596): n is a, c, g, or t

SEQ ID NO: 108456 - DNA, 1523 bp, Homo Sapiens; identical to SEQ ID NO: 74586
  misc_feature (1188)..(1188): n is a, c, g, or t
  misc_feature (1205)..(1205): n is a, c, g, or t
  misc_feature (1229)..(1229): n is a, c, g, or t
  misc_feature (1330)..(1386): n is a, c, g, or t

SEQ ID NO: 108457 - DNA, 1087 bp, Homo Sapiens; identical to SEQ ID NO: 74587
  misc_feature (86)..(130): n is a, c, g, or t
  misc_feature (235)..(272): n is a, c, g, or t

SEQ ID NO: 108458 - DNA, 1236 bp, Homo Sapiens; identical to SEQ ID NO: 74588
  misc_feature (691)..(751): n is a, c, g, or t

SEQ ID NO: 108459 - DNA, 711 bp, Homo Sapiens; identical to SEQ ID NO: 74589
  misc_feature (79)..(89): n is a, c, g, or t

SEQ ID NO: 108460 - DNA, 532 bp, Homo Sapiens; identical to SEQ ID NO: 74590
  misc_feature (343)..(404): n is a, c, g, or t

SEQ ID NO: 108461 - DNA, 2953 bp, Homo Sapiens; identical to SEQ ID NO: 74594
  misc_feature (209)..(210): n is a, c, g, or t
  misc_feature (216)..(795): n is a, c, g, or t
  misc_feature (826)..(845): n is a, c, g, or t
  misc_feature (988)..(1003): n is a, c, g, or t

SEQ ID NO: 108462 - DNA, 795 bp, Homo Sapiens; identical to SEQ ID NO: 74595

SEQ ID NO: 108463 - DNA, 633 bp, Homo Sapiens; identical to SEQ ID NO: 74601
  misc_feature (366)..(398): n is a, c, g, or t

SEQ ID NO: 108464 - DNA, 1025 bp, Homo Sapiens; identical to SEQ ID NO: 74602
  misc_feature (329)..(351): n is a, c, g, or t
  misc_feature (413)..(430): n is a, c, g, or t

SEQ ID NO: 108465 - DNA, 727 bp, Homo Sapiens; identical to SEQ ID NO: 74607

SEQ ID NO: 108466 - DNA, 946 bp, Homo Sapiens; identical to SEQ ID NO: 74608

SEQ ID NO: 108467 - DNA, 845 bp, Homo Sapiens; identical to SEQ ID NO: 74609

SEQ ID NO: 108468 - DNA, 746 bp, Homo Sapiens; identical to SEQ ID NO: 74613
  misc_feature (17)..(17): n is a, c, g, or t

SEQ ID NO: 108469 - DNA, 1338 bp, Homo Sapiens; identical to SEQ ID NO: 74614

SEQ ID NO: 108470 - DNA, 1027 bp, Homo Sapiens; identical to SEQ ID NO: 74615
  misc_feature (123)..(131): n is a, c, g, or t
  misc_feature (940)..(940): n is a, c, g, or t

SEQ ID NO: 108471 - DNA, 714 bp, Homo Sapiens; identical to SEQ ID NO: 74617

SEQ ID NO: 108472 - DNA, 1244 bp, Homo Sapiens; identical to SEQ ID NO: 74618
  misc_feature (901)..(920): n is a, c, g, or t

SEQ ID NO: 108473 - DNA, 906 bp, Homo Sapiens; identical to SEQ ID NO: 74619

SEQ ID NO: 108474 - DNA, 972 bp, Homo Sapiens; identical to SEQ ID NO: 74621
  misc_feature (911)..(911): n is a, c, g, or t

SEQ ID NO: 108475 - DNA, 2547 bp, Homo Sapiens; identical to SEQ ID NO: 74622
  misc_feature (2296)..(2298): n is a, c, g, or t
  misc_feature (2300)..(2301): n is a, c, g, or t
  misc_feature (2305)..(2305): n is a, c, g, or t
  misc_feature (2307)..(2307): n is a, c, g, or t
  misc_feature (2321)..(2321): n is a, c, g, or t

SEQ ID NO: 108476 - DNA, 1316 bp, Homo Sapiens; identical to SEQ ID NO: 74623
  misc_feature (1216)..(1216): n is a, c, g, or t

SEQ ID NO: 108477 - DNA, 2774 bp, Homo Sapiens; identical to SEQ ID NO: 74629
  misc_feature (250)..(289): n is a, c, g, or t

SEQ ID NO: 108478 - DNA, 776 bp, Homo Sapiens; identical to SEQ ID NO: 74630
  misc_feature (281)..(322): n is a, c, g, or t

SEQ ID NO: 108479 - DNA, 778 bp, Homo Sapiens; identical to SEQ ID NO: 74631
  misc_feature (300)..(341): n is a, c, g, or t

SEQ ID NO: 108480 - DNA, 627 bp, Homo Sapiens; identical to SEQ ID NO: 74633

SEQ ID NO: 108481 - DNA, 848 bp, Homo Sapiens; identical to SEQ ID NO: 74634
  misc_feature (138)..(138): n is a, c, g, or t
  misc_feature (278)..(286): n is a, c, g, or t
  misc_feature (424)..(433): n is a, c, g, or t
  misc_feature (658)..(688): n is a, c, g, or t
  misc_feature (718)..(732): n is a, c, g, or t

SEQ ID NO: 108482 - DNA, 883 bp, Homo Sapiens; identical to SEQ ID NO: 74635
  misc_feature (227)..(236): n is a, c, g, or t
  misc_feature (461)..(491): n is a, c, g, or t
  misc_feature (521)..(535): n is a, c, g, or t
  misc_feature (645)..(743): n is a, c, g, or t
  misc_feature (759)..(771): n is a, c, g, or t

SEQ ID NO: 108483 - DNA, 765 bp, Homo Sapiens; identical to SEQ ID NO: 74636

SEQ ID NO: 108484 - DNA, 527 bp, Homo Sapiens; identical to SEQ ID NO: 74637
  misc_feature (103)..(103): n is a, c, g, or t
  misc_feature (517)..(517): n is a, c, g, or t

SEQ ID NO: 108485 - DNA, 1154 bp, Homo Sapiens; identical to SEQ ID NO: 74639

SEQ ID NO: 108486 - DNA, 1653 bp, Homo Sapiens; identical to SEQ ID NO: 74640
  misc_feature (659)..(715): n is a, c, g, or t
  misc_feature (1570)..(1579): n is a, c, g, or t

SEQ ID NO: 108487 - DNA, 483 bp, Homo Sapiens; identical to SEQ ID NO: 74654
  misc_feature (49)..(49): n is a, c, g, or t
  misc_feature (59)..(59): n is a, c, g, or t

SEQ ID NO: 108488 - DNA, 928 bp, Homo Sapiens; identical to SEQ ID NO: 74655

SEQ ID NO: 108489 - DNA, 957 bp, Homo Sapiens; identical to SEQ ID NO: 74656

SEQ ID NO: 108490 - DNA, 1034 bp, Homo Sapiens; identical to SEQ ID NO: 74657
  misc_feature (637)..(649): n is a, c, g, or t
  misc_feature (722)..(748): n is a, c, g, or t

SEQ ID NO: 108491 - DNA, 713 bp, Homo Sapiens; identical to SEQ ID NO: 74662

SEQ ID NO: 108492 - DNA, 891 bp, Homo Sapiens; identical to SEQ ID NO: 74663

SEQ ID NO: 108493 - DNA, 516 bp, Homo Sapiens; identical to SEQ ID NO: 74664

SEQ ID NO: 108494 - DNA, 547 bp, Homo Sapiens; identical to SEQ ID NO: 74665

SEQ ID NO: 108495 - DNA, 1102 bp, Homo Sapiens; identical to SEQ ID NO: 74667

SEQ ID NO: 108496 - DNA, 1026 bp, Homo Sapiens; identical to SEQ ID NO: 74668

SEQ ID NO: 108497 - DNA, 1143 bp, Homo Sapiens; identical to SEQ ID NO: 74669

SEQ ID NO: 108498 - DNA, 1001 bp, Homo Sapiens; identical to SEQ ID NO: 74670
  misc_feature (967)..(967): n is a, c, g, or t

SEQ ID NO: 108499 - DNA, 1407 bp, Homo Sapiens; identical to SEQ ID NO: 74671
  misc_feature (28)..(28): n is a, c, g, or t

SEQ ID NO: 108500 - DNA, 662 bp, Homo Sapiens; identical to SEQ ID NO: 74672
  misc_feature (392)..(400): n is a, c, g, or t

SEQ ID NO: 108501 - DNA, 550 bp, Homo Sapiens; identical to SEQ ID NO: 74673
  misc_feature (87)..(146): n is a, c, g, or t

SEQ ID NO: 108502 - DNA, 2226 bp, Homo Sapiens; identical to SEQ ID NO: 74674
  misc_feature (1870)..(1887): n is a, c, g, or t
  misc_feature (1982)..(2041): n is a, c, g, or t

SEQ ID NO: 108503 - DNA, 387 bp, Homo Sapiens; identical to SEQ ID NO: 74678

SEQ ID NO: 108504 - DNA, 1298 bp, Homo Sapiens; identical to SEQ ID NO: 74679

SEQ ID NO: 108505 - DNA, 769 bp, Homo Sapiens; identical to SEQ ID NO: 74680
  misc_feature (159)..(270): n is a, c, g, or t

SEQ ID NO: 108506 - DNA, 395 bp, Homo Sapiens; identical to SEQ ID NO: 74681

SEQ ID NO: 108507 - DNA, 917 bp, Homo Sapiens; identical to SEQ ID NO: 74682

SEQ ID NO: 108508 - DNA, 927 bp, Homo Sapiens; identical to SEQ ID NO: 74683

SEQ ID NO: 108509 - DNA, 1061 bp, Homo Sapiens; identical to SEQ ID NO: 74684
  misc_feature (40)..(41): n is a, c, g, or t
  misc_feature (145)..(573): n is a, c, g, or t
  misc_feature (992)..(1018): n is a, c, g, or t

SEQ ID NO: 108510 - DNA, 682 bp, Homo Sapiens; identical to SEQ ID NO: 74685

SEQ ID NO: 108511 - DNA, 2657 bp, Homo Sapiens; identical to SEQ ID NO: 74686

SEQ ID NO: 108512 - DNA, 1002 bp, Homo Sapiens; identical to SEQ ID NO: 74687
  misc_feature (429)..(429): n is a, c, g, or t

SEQ ID NO: 108513 - DNA, 799 bp, Homo Sapiens; identical to SEQ ID NO: 74691
  misc_feature (113)..(113): n is a, c, g, or t

SEQ ID NO: 108514 - DNA, 924 bp, Homo Sapiens; identical to SEQ ID NO: 74692

SEQ ID NO: 108515 - DNA, 1610 bp, Homo Sapiens; identical to SEQ ID NO: 74695

SEQ ID NO: 108516 - DNA, 909 bp, Homo Sapiens; identical to SEQ ID NO: 74696

SEQ ID NO: 108517 - DNA, 1258 bp, Homo Sapiens; identical to SEQ ID NO: 74697
  misc_feature (226)..(226): n is a, c, g, or t
  misc_feature (745)..(745): n is a, c, g, or t

SEQ ID NO: 108518 - DNA, 934 bp, Homo Sapiens; identical to SEQ ID NO: 74698

SEQ ID NO: 108519 - DNA, 1135 bp, Homo Sapiens; identical to SEQ ID NO: 74699

SEQ ID NO: 108520 - DNA, 1177 bp, Homo Sapiens; identical to SEQ ID NO: 74701

SEQ ID NO: 108521 - DNA, 1316 bp, Homo Sapiens; identical to SEQ ID NO: 74702
  misc_feature (1066)..(1066): n is a, c, g, or t
  misc_feature (1145)..(1145): n is a, c, g, or t
  misc_feature (1191)..(1191): n is a, c, g, or t
  misc_feature (1261)..(1262): n is a, c, g, or t

SEQ ID NO: 108522 - DNA, 1067 bp, Homo Sapiens; identical to SEQ ID NO: 74708
  misc_feature (44)..(44): n is a, c, g, or t
  misc_feature (108)..(108): n is a, c, g, or t
  misc_feature (160)..(160): n is a, c, g, or t
  misc_feature (995)..(1014): n is a, c, g, or t

SEQ ID NO: 108523 - DNA, 617 bp, Homo Sapiens; identical to SEQ ID NO: 74709
  misc_feature (61)..(61): n is a, c, g, or t

SEQ ID NO: 108524 - DNA, 681 bp, Homo Sapiens; identical to SEQ ID NO: 74712
  misc_feature (212)..(384): n is a, c, g, or t
  misc_feature (392)..(451): n is a, c, g, or t

SEQ ID NO: 108525 - DNA, 1181 bp, Homo Sapiens; identical to SEQ ID NO: 74713
  misc_feature (725)..(897): n is a, c, g, or t
  misc_feature (905)..(964): n is a, c, g, or t

SEQ ID NO: 108526 - DNA, 717 bp, Homo Sapiens; identical to SEQ ID NO: 74720

SEQ ID NO: 108527 - DNA, 946 bp, Homo Sapiens; identical to SEQ ID NO: 74721
  misc_feature (500)..(500): n is a, c, g, or t

SEQ ID NO: 108528 - DNA, 1030 bp, Homo Sapiens; identical to SEQ ID NO: 74723

SEQ ID NO: 108529 - DNA, 1839 bp, Homo Sapiens; identical to SEQ ID NO: 74724

SEQ ID NO: 108530 - DNA, 1178 bp, Homo Sapiens; identical to SEQ ID NO: 74727
  misc_feature (35)..(35): n is a, c, g, or t
  misc_feature (41)..(41): n is a, c, g, or t
  misc_feature (133)..(134): n is a, c, g, or t
  misc_feature (139)..(139): n is a, c, g, or t
  misc_feature (144)..(144): n is a, c, g, or t
  misc_feature (334)..(334): n is a, c, g, or t
  misc_feature (974)..(1064): n is a, c, g, or t

SEQ ID NO: 108531 - DNA, 446 bp, Homo Sapiens; identical to SEQ ID NO: 74728

SEQ ID NO: 108532 - DNA, 1059 bp, Homo Sapiens; identical to SEQ ID NO: 74729

SEQ ID NO: 108533 - DNA, 869 bp, Homo Sapiens; identical to SEQ ID NO: 74730

SEQ ID NO: 108534 - DNA, 1655 bp, Homo Sapiens; identical to SEQ ID NO: 74731
  misc_feature (659)..(714): n is a, c, g, or t

SEQ ID NO: 108535 - DNA, 1054 bp, Homo Sapiens; identical to SEQ ID NO: 74733

SEQ ID NO: 108536 - DNA, 1033 bp, Homo Sapiens; identical to SEQ ID NO: 74734
  misc_feature (47)..(47): n is a, c, g, or t
  misc_feature (125)..(125): n is a, c, g, or t
  misc_feature (154)..(154): n is a, c, g, or t
  misc_feature (162)..(162): n is a, c, g, or t
  misc_feature (181)..(181): n is a, c, g, or t
  misc_feature (186)..(186): n is a, c, g, or t

SEQ ID NO: 108537 - DNA, 936 bp, Homo Sapiens; identical to SEQ ID NO: 74737
  misc_feature (551)..(611): n is a, c, g, or t
  misc_feature (615)..(616): n is a, c, g, or t
  misc_feature (618)..(652): n is a, c, g, or t
  misc_feature (703)..(711): n is a, c, g, or t
  misc_feature (870)..(879): n is a, c, g, or t

SEQ ID NO: 108538 - DNA, 1076 bp, Homo Sapiens; identical to SEQ ID NO: 74738
  misc_feature (579)..(662): n is a, c, g, or t
  misc_feature (678)..(686): n is a, c, g, or t

SEQ ID NO: 108539 - DNA, 846 bp, Homo Sapiens; identical to SEQ ID NO: 74740

SEQ ID NO: 108540 - DNA, 570 bp, Homo Sapiens; identical to SEQ ID NO: 74741

SEQ ID NO: 108541 - DNA, 749 bp, Homo Sapiens; identical to SEQ ID NO: 74747

SEQ ID NO: 108542 - DNA, 1182 bp, Homo Sapiens; identical to SEQ ID NO: 74748
  misc_feature (161)..(161): n is a, c, g, or t
  misc_feature (205)..(205): n is a, c, g, or t

SEQ ID NO: 108543 - DNA, 773 bp, Homo Sapiens; identical to SEQ ID NO: 74750
  misc_feature (486)..(544): n is a, c, g, or t

SEQ ID NO: 108544 - DNA, 1121 bp, Homo Sapiens; identical to SEQ ID NO: 74751
  misc_feature (840)..(848): n is a, c, g, or t

SEQ ID NO: 108545 - DNA, 929 bp, Homo Sapiens; identical to SEQ ID NO: 74765

SEQ ID NO: 108546 - DNA, 913 bp, Homo Sapiens; identical to SEQ ID NO: 74766

SEQ ID NO: 108547 - DNA, 865 bp, Homo Sapiens; identical to SEQ ID NO: 74767

SEQ ID NO: 108548 - DNA, 3171 bp, Homo Sapiens; identical to SEQ ID NO: 74768
  misc_feature (148)..(175): n is a, c, g, or t

SEQ ID NO: 108549 - DNA, 2231 bp, Homo Sapiens; identical to SEQ ID NO: 74770
  misc_feature (1326)..(1326): n is a, c, g, or t
  misc_feature (1370)..(1370): n is a, c, g, or t

SEQ ID NO: 108550 - DNA, 767 bp, Homo Sapiens; identical to SEQ ID NO: 74771

SEQ ID NO: 108551 - DNA, 692 bp, Homo Sapiens; identical to SEQ ID NO: 74773

SEQ ID NO: 108552 - DNA, 729 bp, Homo Sapiens; identical to SEQ ID NO: 74774
  misc_feature (62)..(62): n is a, c, g, or t

SEQ ID NO: 108553 - DNA, 688 bp, Homo Sapiens; identical to SEQ ID NO: 74775

SEQ ID NO: 108554 - DNA, 1179 bp, Homo Sapiens; identical to SEQ ID NO: 74776
  misc_feature (77)..(111): n is a, c, g, or t

SEQ ID NO: 108555 - DNA, 1002 bp, Homo Sapiens; identical to SEQ ID NO: 74785
  misc_feature (211)..(212): n is a, c, g, or t
  misc_feature (215)..(215): n is a, c, g, or t

SEQ ID NO: 108556 - DNA, 1709 bp, Homo Sapiens; identical to SEQ ID NO: 74786
  misc_feature (48)..(48): n is a, c, g, or t

SEQ ID NO: 108557 - DNA, 629 bp, Homo Sapiens; identical to SEQ ID NO: 74792

SEQ ID NO: 108558 - DNA, 1289 bp, Homo Sapiens; identical to SEQ ID NO: 74793

SEQ ID NO: 108559 - DNA, 855 bp, Homo Sapiens; identical to SEQ ID NO: 74794
  misc_feature (276)..(276): n is a, c, g, or t

SEQ ID NO: 108560 - DNA, 1728 bp, Homo Sapiens; identical to SEQ ID NO: 74796
  misc_feature (1444)..(1484): n is a, c, g, or t
  misc_feature (1595)..(1595): n is a, c, g, or t
  misc_feature (1683)..(1683): n is a, c, g, or t

SEQ ID NO: 108561 - DNA, 564 bp, Homo Sapiens; identical to SEQ ID NO: 74797
  misc_feature (88)..(126): n is a, c, g, or t

SEQ ID NO: 108562 - DNA, 1490 bp, Homo Sapiens; identical to SEQ ID NO: 74806

SEQ ID NO: 108563 - DNA, 1411 bp, Homo Sapiens; identical to SEQ ID NO: 74807

SEQ ID NO: 108564 - DNA, 947 bp, Homo Sapiens; identical to SEQ ID NO: 74809

SEQ ID NO: 108565 - DNA, 691 bp, Homo Sapiens; identical to SEQ ID NO: 74810
  misc_feature (245)..(294): n is a, c, g, or t

SEQ ID NO: 108566 - DNA, 1105 bp, Homo Sapiens; identical to SEQ ID NO: 74811

SEQ ID NO: 108567 - DNA, 677 bp, Homo Sapiens; identical to SEQ ID NO: 74812

SEQ ID NO: 108568 - DNA, 458 bp, Homo Sapiens; identical to SEQ ID NO: 74813

SEQ ID NO: 108569 - DNA, 1009 bp, Homo Sapiens; identical to SEQ ID NO: 74814
  misc_feature (886)..(886): n is a, c, g, or t
  misc_feature (928)..(928): n is a, c, g, or t
  misc_feature (948)..(948): n is a, c, g, or t

SEQ ID NO: 108570 - DNA, 425 bp, Homo Sapiens; identical to SEQ ID NO: 74821
  misc_feature (163)..(282): n is a, c, g, or t

SEQ ID NO: 108571 - DNA, 1202 bp, Homo Sapiens; identical to SEQ ID NO: 74822

SEQ ID NO: 108572 - DNA, 1586 bp, Homo Sapiens; identical to SEQ ID NO: 74823

SEQ ID NO: 108573 - DNA, 1047 bp, Homo Sapiens; identical to SEQ ID NO: 74824

SEQ ID NO: 108574 - DNA, 1032 bp, Homo Sapiens; identical to SEQ ID NO: 74825
  misc_feature (472)..(472): n is a, c, g, or t

SEQ ID NO: 108575 - DNA, 1462 bp, Homo Sapiens; identical to SEQ ID NO: 74826
  misc_feature (131)..(223): n is a, c, g, or t
  misc_feature (226)..(284): n is a, c, g, or t

SEQ ID NO: 108576 - DNA, 1889 bp, Homo Sapiens; identical to SEQ ID NO: 74827
  misc_feature (15)..(15): n is a, c, g, or t
  misc_feature (1779)..(1779): n is a, c, g, or t
  misc_feature (1794)..(1795): n is a, c, g, or t
  misc_feature (1813)..(1814): n is a, c, g, or t
  misc_feature (1852)..(1852): n is a, c, g, or t
  misc_feature (1860)..(1860): n is a, c, g, or t

SEQ ID NO: 108577 - DNA, 1408 bp, Homo Sapiens; identical to SEQ ID NO: 74829
  misc_feature (1289)..(1323): n is a, c, g, or t

SEQ ID NO: 108578 - DNA, 423 bp, Homo Sapiens; identical to SEQ ID NO: 74830
  misc_feature (43)..(77): n is a, c, g, or t

SEQ ID NO: 108579 - DNA, 769 bp, Homo Sapiens; identical to SEQ ID NO: 74831
  misc_feature (690)..(724): n is a, c, g, or t

SEQ ID NO: 108580 - DNA, 1403 bp, Homo Sapiens; identical to SEQ ID NO: 74833

SEQ ID NO: 108581 - DNA, 939 bp, Homo Sapiens; identical to SEQ ID NO: 74834
  misc_feature (640)..(640): n is a, c, g, or t
  misc_feature (759)..(759): n is a, c, g, or t

SEQ ID NO: 108582 - DNA, 911 bp, Homo Sapiens; identical to SEQ ID NO: 74835
  misc_feature (749)..(749): n is a, c, g, or t
  misc_feature (793)..(793): n is a, c, g, or t
  misc_feature (869)..(870): n is a, c, g, or t

SEQ ID NO: 108583 - DNA, 2285 bp, Homo Sapiens; identical to SEQ ID NO: 74838
  misc_feature (547)..(567): n is a, c, g, or t

SEQ ID NO: 108584 - DNA, 1045 bp, Homo Sapiens; identical to SEQ ID NO: 74839
  misc_feature (555)..(575): n is a, c, g, or t

SEQ ID NO: 108585 - DNA, 1051 bp, Homo Sapiens; identical to SEQ ID NO: 74840

SEQ ID NO: 108586 - DNA, 1181 bp, Homo Sapiens; identical to SEQ ID NO: 74843
  misc_feature (22)..(22): n is a, c, g, or t
  misc_feature (78)..(112): n is a, c, g, or t

SEQ ID NO: 108587 - DNA, 1115 bp, Homo Sapiens; identical to SEQ ID NO: 74844
  misc_feature (926)..(935): n is a, c, g, or t
  misc_feature (1038)..(1048): n is a, c, g, or t

SEQ ID NO: 108588 - DNA, 965 bp, Homo Sapiens; identical to SEQ ID NO: 74845

SEQ ID NO: 108589 - DNA, 1301 bp, Homo Sapiens; identical to SEQ ID NO: 74846
  misc_feature (1153)..(1161): n is a, c, g, or t

SEQ ID NO: 108590 - DNA, 731 bp, Homo Sapiens; identical to SEQ ID NO: 74848

SEQ ID NO: 108591 - DNA, 964 bp, Homo Sapiens; identical to SEQ ID NO: 74849
  misc_feature (196)..(256): n is a, c, g, or t

SEQ ID NO: 108592 - DNA, 981 bp, Homo Sapiens; identical to SEQ ID NO: 74850
  misc_feature (335)..(335): n is a, c, g, or t
  misc_feature (392)..(392): n is a, c, g, or t
  misc_feature (447)..(447): n is a, c, g, or t

SEQ ID NO: 108593 - DNA, 844 bp, Homo Sapiens; identical to SEQ ID NO: 74851

SEQ ID NO: 108594 - DNA, 925 bp, Homo Sapiens; identical to SEQ ID NO: 74852

SEQ ID NO: 108595 - DNA, 912 bp, Homo Sapiens; identical to SEQ ID NO: 74853

SEQ ID NO: 108596 - DNA, 895 bp, Homo Sapiens; identical to SEQ ID NO: 74854
  misc_feature (81)..(100): n is a, c, g, or t
  misc_feature (325)..(362): n is a, c, g, or t
  misc_feature (466)..(498): n is a, c, g, or t

SEQ ID NO: 108597 - DNA, 1159 bp, Homo Sapiens; identical to SEQ ID NO: 74855
  misc_feature (126)..(464): n is a, c, g, or t
  misc_feature (1060)..(1080): n is a, c, g, or t

SEQ ID NO: 108598 - DNA, 1496 bp, Homo Sapiens; identical to SEQ ID NO: 74856
  misc_feature (1379)..(1432): n is a, c, g, or t

SEQ ID NO: 108599 - DNA, 451 bp, Homo Sapiens; identical to SEQ ID NO: 74857

SEQ ID NO: 108600 - DNA, 1708 bp, Homo Sapiens; identical to SEQ ID NO: 74859

SEQ ID NO: 108601 - DNA, 1093 bp, Homo Sapiens; identical to SEQ ID NO: 74860
  misc_feature (977)..(977): n is a, c, g, or t

SEQ ID NO: 108602 - DNA, 1077 bp, Homo Sapiens; identical to SEQ ID NO: 74861

SEQ ID NO: 108603 - DNA, 1290 bp, Homo Sapiens; identical to SEQ ID NO: 74862

SEQ ID NO: 108604 - DNA, 1246 bp, Homo Sapiens; identical to SEQ ID NO: 74863

SEQ ID NO: 108605 - DNA, 659 bp, Homo Sapiens; identical to SEQ ID NO: 74868
  misc_feature (15)..(15): n is a, c, g, or t
  misc_feature (66)..(66): n is a, c, g, or t

SEQ ID NO: 108606 - DNA, 692 bp, Homo Sapiens; identical to SEQ ID NO: 74869

SEQ ID NO: 108607 - DNA, 1383 bp, Homo Sapiens; identical to SEQ ID NO: 74870
  misc_feature (865)..(928): n is a, c, g, or t
  misc_feature (1250)..(1311): n is a, c, g, or t

SEQ ID NO: 108608 - DNA, 776 bp, Homo Sapiens; identical to SEQ ID NO: 74871
  misc_feature (740)..(740): n is a, c, g, or t
  misc_feature (746)..(746): n is a, c, g, or t

SEQ ID NO: 108609 - DNA, 1239 bp, Homo Sapiens; identical to SEQ ID NO: 74872
  misc_feature (501)..(640): n is a, c, g, or t
  misc_feature (738)..(798): n is a, c, g, or t

SEQ ID NO: 108610 - DNA, 806 bp, Homo Sapiens; identical to SEQ ID NO: 74873

SEQ ID NO: 108611 - DNA, 571 bp, Homo Sapiens; identical to SEQ ID NO: 74874

SEQ ID NO: 108612 - DNA, 924 bp, Homo Sapiens; identical to SEQ ID NO: 74875

SEQ ID NO: 108613 - DNA, 690 bp, Homo Sapiens; identical to SEQ ID NO: 74888
  misc_feature (40)..(40): n is a, c, g, or t

SEQ ID NO: 108614 - DNA, 481 bp, Homo Sapiens; identical to SEQ ID NO: 74889
  misc_feature (393)..(393): n is a, c, g, or t

SEQ ID NO: 108615 - DNA, 408 bp, Homo Sapiens; identical to SEQ ID NO: 74893

SEQ ID NO: 108616 - DNA, 1705 bp, Homo Sapiens; identical to SEQ ID NO: 74894

SEQ ID NO: 108617 - DNA, 1128 bp, Homo Sapiens; identical to SEQ ID NO: 74896
  misc_feature (69)..(103): n is a, c, g, or t
  misc_feature (986)..(1045): n is a, c, g, or t

SEQ ID NO: 108618 - DNA, 943 bp, Homo Sapiens; identical to SEQ ID NO: 74897
  misc_feature (250)..(283): n is a, c, g, or t
  misc_feature (738)..(758): n is a, c, g, or t
  misc_feature (790)..(790): n is a, c, g, or t

SEQ ID NO: 108619 - DNA, 1019 bp, Homo Sapiens; identical to SEQ ID NO: 74899

SEQ ID NO: 108620 - DNA, 1001 bp, Homo Sapiens; identical to SEQ ID NO: 74900

SEQ ID NO: 108621 - DNA, 957 bp, Homo Sapiens; identical to SEQ ID NO: 74902
  misc_feature (365)..(365): n is a, c, g, or t
  misc_feature (369)..(369): n is a, c, g, or t

SEQ ID NO: 108622 - DNA, 532 bp, Homo Sapiens; identical to SEQ ID NO: 74903

SEQ ID NO: 108623 - DNA, 2788 bp, Homo Sapiens; identical to SEQ ID NO: 74906
  misc_feature (46)..(46): n is a, c, g, or t
  misc_feature (122)..(122): n is a, c, g, or t
  misc_feature (2711)..(2711): n is a, c, g, or t

SEQ ID NO: 108624 - DNA, 664 bp, Homo Sapiens; identical to SEQ ID NO: 74907

SEQ ID NO: 108625 - DNA, 991 bp, Homo Sapiens; identical to SEQ ID NO: 74908
  misc_feature (805)..(818): n is a, c, g, or t

SEQ ID NO: 108626 - DNA, 436 bp, Homo Sapiens; identical to SEQ ID NO: 74909

SEQ ID NO: 108627 - DNA, 696 bp, Homo Sapiens; identical to SEQ ID NO: 74911
  misc_feature (239)..(239): n is a, c, g, or t

SEQ ID NO: 108628 - DNA, 691 bp, Homo Sapiens; identical to SEQ ID NO: 74912

SEQ ID NO: 108629 - DNA, 1320 bp, Homo Sapiens; identical to SEQ ID NO: 74920

SEQ ID NO: 108630 - DNA, 917 bp, Homo Sapiens; identical to SEQ ID NO: 74921

SEQ ID NO: 108631 - DNA, 686 bp, Homo Sapiens; identical to SEQ ID NO: 74922
  misc_feature (391)..(399): n is a, c, g, or t

SEQ ID NO: 108632 - DNA, 3155 bp, Homo Sapiens; identical to SEQ ID NO: 74923

SEQ ID NO: 108633 - DNA, 628 bp, Homo Sapiens; identical to SEQ ID NO: 74926
  misc_feature (33)..(33): n is a, c, g, or t

SEQ ID NO: 108634 - DNA, 803 bp, Homo Sapiens; identical to SEQ ID NO: 74927

SEQ ID NO: 108635 - DNA, 357 bp, Homo Sapiens; identical to SEQ ID NO: 74928

SEQ ID NO: 108636 - DNA, 1072 bp, Homo Sapiens; identical to SEQ ID NO: 74933
  misc_feature (526)..(586): n is a, c, g, or t
  misc_feature (712)..(714): n is a, c, g, or t

SEQ ID NO: 108637 - DNA, 627 bp, Homo Sapiens; identical to SEQ ID NO: 74934

SEQ ID NO: 108638 - DNA, 1474 bp, Homo Sapiens; identical to SEQ ID NO: 74935
  misc_feature (41)..(75): n is a, c, g, or t

SEQ ID NO: 108639 - DNA, 1381 bp, Homo Sapiens; identical to SEQ ID NO: 74936
  misc_feature (132)..(132): n is a, c, g, or t
  misc_feature (152)..(152): n is a, c, g, or t
  misc_feature (178)..(178): n is a, c, g, or t
  misc_feature (213)..(213): n is a, c, g, or t
  misc_feature (220)..(220): n is a, c, g, or t
  misc_feature (240)..(240): n is a, c, g, or t
  misc_feature (251)..(251): n is a, c, g, or t
  misc_feature (258)..(258): n is a, c, g, or t
  misc_feature (293)..(293): n is a, c, g, or t
  misc_feature (302)..(302): n is a, c, g, or t
  misc_feature (320)..(320): n is a, c, g, or t
  misc_feature (325)..(325): n is a, c, g, or t

SEQ ID NO: 108640 - DNA, 951 bp, Homo Sapiens; identical to SEQ ID NO: 74937
  misc_feature (384)..(507): n is a, c, g, or t
  misc_feature (804)..(804): n is a, c, g, or t

SEQ ID NO: 108641 - DNA, 786 bp, Homo Sapiens; identical to SEQ ID NO: 74938

SEQ ID NO: 108642 - DNA, 1015 bp, Homo Sapiens; identical to SEQ ID NO: 74939
  misc_feature (49)..(89): n is a, c, g, or t
  misc_feature (93)..(127): n is a, c, g, or t

SEQ ID NO: 108643 - DNA, 1113 bp, Homo Sapiens; identical to SEQ ID NO: 74940

SEQ ID NO: 108644 - DNA, 631 bp, Homo Sapiens; identical to SEQ ID NO: 74941

SEQ ID NO: 108645 - DNA, 902 bp, Homo Sapiens; identical to SEQ ID NO: 74942

SEQ ID NO: 108646 - DNA, 498 bp, Homo Sapiens; identical to SEQ ID NO: 74943

SEQ ID NO: 108647 - DNA, 1299 bp, Homo Sapiens; identical to SEQ ID NO: 74944

SEQ ID NO: 108648 - DNA, 1075 bp, Homo Sapiens; identical to SEQ ID NO: 74946
  misc_feature (232)..(232): n is a, c, g, or t
  misc_feature (242)..(242): n is a, c, g, or t
  misc_feature (981)..(1015): n is a, c, g, or t

SEQ ID NO: 108649 - DNA, 819 bp, Homo Sapiens; identical to SEQ ID NO: 74947
  misc_feature (791)..(791): n is a, c, g, or t

SEQ ID NO: 108650 - DNA, 939 bp, Homo Sapiens; identical to SEQ ID NO: 74948

SEQ ID NO: 108651 - DNA, 712 bp, Homo Sapiens; identical to SEQ ID NO: 74950
  misc_feature (22)..(22): n is a, c, g, or t

SEQ ID NO: 108652 - DNA, 1075 bp, Homo Sapiens; identical to SEQ ID NO: 74951
  misc_feature (843)..(843): n is a, c, g, or t
  misc_feature (1013)..(1013): n is a, c, g, or t

SEQ ID NO: 108653 - DNA, 864 bp, Homo Sapiens; identical to SEQ ID NO: 74952

SEQ ID NO: 108654 - DNA, 805 bp, Homo Sapiens; identical to SEQ ID NO: 74953

SEQ ID NO: 108655 - DNA, 519 bp, Homo Sapiens; identical to SEQ ID NO: 74955

SEQ ID NO: 108656 - DNA, 1296 bp, Homo Sapiens; identical to SEQ ID NO: 74956

SEQ ID NO: 108657 - DNA, 1007 bp, Homo Sapiens; identical to SEQ ID NO: 74962

SEQ ID NO: 108658 - DNA, 1108 bp, Homo Sapiens; identical to SEQ ID NO: 74963
  misc_feature (960)..(960): n is a, c, g, or t

SEQ ID NO: 108659 - DNA, 917 bp, Homo Sapiens; identical to SEQ ID NO: 74964

SEQ ID NO: 108660 - DNA, 1169 bp, Homo Sapiens; identical to SEQ ID NO: 74965

SEQ ID NO: 108661 - DNA, 1264 bp, Homo Sapiens; identical to SEQ ID NO: 74973
  misc_feature (43)..(77): n is a, c, g, or t
  misc_feature (1200)..(1220): n is a, c, g, or t

SEQ ID NO: 108662 - DNA, 562 bp, Homo Sapiens; identical to SEQ ID NO: 74974

SEQ ID NO: 108663 - DNA, 927 bp, Homo Sapiens; identical to SEQ ID NO: 74975

SEQ ID NO: 108664 - DNA, 1790 bp, Homo Sapiens; identical to SEQ ID NO: 74976
  misc_feature (66)..(66): n is a, c, g, or t
  misc_feature (203)..(377): n is a, c, g, or t

SEQ ID NO: 108665 - DNA, 586 bp, Homo Sapiens; identical to SEQ ID NO: 74977

SEQ ID NO: 108666 - DNA, 558 bp, Homo Sapiens; identical to SEQ ID NO: 74983
  misc_feature (440)..(494): n is a, c, g, or t

SEQ ID NO: 108667 - DNA, 1008 bp, Homo Sapiens; identical to SEQ ID NO: 74984

SEQ ID NO: 108668 - DNA, 1867 bp, Homo Sapiens; identical to SEQ ID NO: 74989

SEQ ID NO: 108669 - DNA, 1208 bp, Homo Sapiens; identical to SEQ ID NO: 74990
  misc_feature (44)..(78): n is a, c, g, or t
  misc_feature (931)..(931): n is a, c, g, or t
  misc_feature (1049)..(1049): n is a, c, g, or t
  misc_feature (1103)..(1103): n is a, c, g, or t
  misc_feature (1125)..(1125): n is a, c, g, or t
  misc_feature (1144)..(1144): n is a, c, g, or t
  misc_feature (1191)..(1191): n is a, c, g, or t

SEQ ID NO: 108670 - DNA, 636 bp, Homo Sapiens; identical to SEQ ID NO: 74992
  misc_feature (29)..(29): n is a, c, g, or t
  misc_feature (97)..(97): n is a, c, g, or t

SEQ ID NO: 108671 - DNA, 3392 bp, Homo Sapiens; identical to SEQ ID NO: 74993
  misc_feature (3032)..(3092): n is a, c, g, or t
  misc_feature (3127)..(3142): n is a, c, g, or t
  misc_feature (3155)..(3163): n is a, c, g, or t
  misc_feature (3294)..(3303): n is a, c, g, or t

SEQ ID NO: 108672 - DNA, 882 bp, Homo Sapiens; identical to SEQ ID NO: 74994
  misc_feature (410)..(410): n is a, c, g, or t
  misc_feature (421)..(421): n is a, c, g, or t
  misc_feature (446)..(446): n is a, c, g, or t
  misc_feature (453)..(454): n is a, c, g, or t
  misc_feature (503)..(503): n is a, c, g, or t
  misc_feature (539)..(539): n is a, c, g, or t
  misc_feature (546)..(546): n is a, c, g, or t
  misc_feature (754)..(773): n is a, c, g, or t

SEQ ID NO: 108673 - DNA, 508 bp, Homo Sapiens; identical to SEQ ID NO: 74995
  misc_feature (143)..(143): n is a, c, g, or t

SEQ ID NO: 108674 - DNA, 1024 bp, Homo Sapiens; identical to SEQ ID NO: 74996
  misc_feature (876)..(905): n is a, c, g, or t

SEQ ID NO: 108675 - DNA, 1375 bp, Homo Sapiens; identical to SEQ ID NO: 74997

SEQ ID NO: 108676 - DNA, 1216 bp, Homo Sapiens; identical to SEQ ID NO: 74998

SEQ ID NO: 108677 - DNA, 701 bp, Homo Sapiens; identical to SEQ ID NO: 75008
  misc_feature (65)..(148): n is a, c, g, or t

SEQ ID NO: 108678 - DNA, 1199 bp, Homo Sapiens; identical to SEQ ID NO: 75009

SEQ ID NO: 108679 - DNA, 568 bp, Homo Sapiens; identical to SEQ ID NO: 75010

SEQ ID NO: 108680 - DNA, 1159 bp, Homo Sapiens; identical to SEQ ID NO: 75011

SEQ ID NO: 108681 - DNA, 607 bp, Homo Sapiens; identical to SEQ ID NO: 75012
  misc_feature (16)..(16): n is a, c, g, or t
  misc_feature (93)..(93): n is a, c, g, or t

SEQ ID NO: 108682 - DNA, 1407 bp, Homo Sapiens; identical to SEQ ID NO: 75013

SEQ ID NO: 108683 - DNA, 856 bp, Homo Sapiens; identical to SEQ ID NO: 75014

SEQ ID NO: 108684 - DNA, 1647 bp, Homo Sapiens; identical to SEQ ID NO: 75016
  misc_feature (775)..(775): n is a, c, g, or t

SEQ ID NO: 108685 - DNA, 1058 bp, Homo Sapiens; identical to SEQ ID NO: 75017
  misc_feature (702)..(702): n is a, c, g, or t
  misc_feature (769)..(769): n is a, c, g, or t
  misc_feature (953)..(953): n is a, c, g, or t

SEQ ID NO: 108686 - DNA, 1297 bp, Homo Sapiens; identical to SEQ ID NO: 75018
  misc_feature (79)..(113): n is a, c, g, or t

SEQ ID NO: 108687 - DNA, 709 bp, Homo Sapiens; identical to SEQ ID NO: 75019

SEQ ID NO: 108688 - DNA, 2449 bp, Homo Sapiens; identical to SEQ ID NO: 75044

SEQ ID NO: 108689 - DNA, 2201 bp, Homo Sapiens; identical to SEQ ID NO: 75045
  misc_feature (28)..(29): n is a, c, g, or t
  misc_feature (1249)..(1249): n is a, c, g, or t
  misc_feature (2123)..(2141): n is a, c, g, or t

SEQ ID NO: 108690 - DNA, 626 bp, Homo Sapiens; identical to SEQ ID NO: 75047

SEQ ID NO: 108691 - DNA, 443 bp, Homo Sapiens; identical to SEQ ID NO: 75048

SEQ ID NO: 108692 - DNA, 479 bp, Homo Sapiens; identical to SEQ ID NO: 75049

SEQ ID NO: 108693 - DNA, 574 bp, Homo Sapiens; identical to SEQ ID NO: 75051

SEQ ID NO: 108694 - DNA, 761 bp, Homo Sapiens; identical to SEQ ID NO: 75052

SEQ ID NO: 108695 - DNA, 1154 bp, Homo Sapiens; identical to SEQ ID NO: 75053

SEQ ID NO: 108696 - DNA, 2467 bp, Homo Sapiens; identical to SEQ ID NO: 75054
  misc_feature (1816)..(1949): n is a, c, g, or t
  misc_feature (2435)..(2435): n is a, c, g, or t

SEQ ID NO: 108697 - DNA, 502 bp, Homo Sapiens; identical to SEQ ID NO: 75055
  misc_feature (447)..(447): n is a, c, g, or t
  misc_feature (483)..(483): n is a, c, g, or t

SEQ ID NO: 108698 - DNA, 1041 bp, Homo Sapiens; identical to SEQ ID NO: 75056
  misc_feature (895)..(954): n is a, c, g, or t

SEQ ID NO: 108699 - DNA, 1880 bp, Homo Sapiens; identical to SEQ ID NO: 75060

SEQ ID NO: 108700 - DNA, 774 bp, Homo Sapiens; identical to SEQ ID NO: 75061

SEQ ID NO: 108701 - DNA, 1327 bp, Homo Sapiens; identical to SEQ ID NO: 75064
  misc_feature (617)..(726): n is a, c, g, or t
  misc_feature (735)..(748): n is a, c, g, or t
  misc_feature (774)..(783): n is a, c, g, or t
  misc_feature (786)..(827): n is a, c, g, or t
  misc_feature (859)..(956): n is a, c, g, or t
  misc_feature (1089)..(1134): n is a, c, g, or t
  misc_feature (1181)..(1191): n is a, c, g, or t

SEQ ID NO: 108702 - DNA, 1131 bp, Homo Sapiens; identical to SEQ ID NO: 75065

SEQ ID NO: 108703 - DNA, 942 bp, Homo Sapiens; identical to SEQ ID NO: 75066

SEQ ID NO: 108704 - DNA, 1485 bp, Homo Sapiens; identical to SEQ ID NO: 75067
  misc_feature (166)..(166): n is a, c, g, or t

SEQ ID NO: 108705 - DNA, 971 bp, Homo Sapiens; identical to SEQ ID NO: 75068

SEQ ID NO: 108706 - DNA, 1360 bp, Homo Sapiens; identical to SEQ ID NO: 75069

SEQ ID NO: 108707 - DNA, 867 bp, Homo Sapiens; identical to SEQ ID NO: 75070

SEQ ID NO: 108708 - DNA, 861 bp, Homo Sapiens; identical to SEQ ID NO: 75071

SEQ ID NO: 108709 - DNA, 1272 bp, Homo Sapiens; identical to SEQ ID NO: 75074
  misc_feature (72)..(104): n is a, c, g, or t
  misc_feature (1023)..(1049): n is a, c, g, or t
  misc_feature (1097)..(1100): n is a, c, g, or t
  misc_feature (1102)..(1103): n is a, c, g, or t
  misc_feature (1105)..(1196): n is a, c, g, or t

SEQ ID NO: 108710 - DNA, 701 bp, Homo Sapiens; identical to SEQ ID NO: 75075

SEQ ID NO: 108711 - DNA, 1373 bp, Homo Sapiens; identical to SEQ ID NO: 75076
  misc_feature (962)..(994): n is a, c, g, or t

SEQ ID NO: 108712 - DNA, 1183 bp, Homo Sapiens; identical to SEQ ID NO: 75084
  misc_feature (476)..(476): n is a, c, g, or t
  misc_feature (643)..(684): n is a, c, g, or t

SEQ ID NO: 108713 - DNA, 2508 bp, Homo Sapiens; identical to SEQ ID NO: 75085
  misc_feature (1234)..(1242): n is a, c, g, or t

SEQ ID NO: 108714 - DNA, 1634 bp, Homo Sapiens; identical to SEQ ID NO: 75088

SEQ ID NO: 108715 - DNA, 740 bp, Homo Sapiens; identical to SEQ ID NO: 75089

SEQ ID NO: 108716 - DNA, 586 bp, Homo Sapiens; identical to SEQ ID NO: 75090

SEQ ID NO: 108717 - DNA, 1068 bp, Homo Sapiens; identical to SEQ ID NO: 75092
  misc_feature (968)..(1026): n is a, c, g, or t

SEQ ID NO: 108718 - DNA, 955 bp, Homo Sapiens; identical to SEQ ID NO: 75093
  misc_feature (540)..(607): n is a, c, g, or t

SEQ ID NO: 108719 - DNA, 805 bp, Homo Sapiens; identical to SEQ ID NO: 75095
  misc_feature (658)..(658): n is a, c, g, or t
  misc_feature (661)..(679): n is a, c, g, or t
  misc_feature (681)..(685): n is a, c, g, or t

SEQ ID NO: 108720 - DNA, 1209 bp, Homo Sapiens; identical to SEQ ID NO: 75096
  misc_feature (632)..(632): n is a, c, g, or t

SEQ ID NO: 108721 - DNA, 656 bp, Homo Sapiens; identical to SEQ ID NO: 75097

SEQ ID NO: 108722 - DNA, 565 bp, Homo Sapiens; identical to SEQ ID NO: 75098

SEQ ID NO: 108723 - DNA, 777 bp, Homo Sapiens; identical to SEQ ID NO: 75099
  misc_feature (596)..(610): n is a, c, g, or t

SEQ ID NO: 108724 - DNA, 1026 bp, Homo Sapiens; identical to SEQ ID NO: 75100
  misc_feature (56)..(107): n is a, c, g, or t
  misc_feature (111)..(145): n is a, c, g, or t

SEQ ID NO: 108725 - DNA, 645 bp, Homo Sapiens; identical to SEQ ID NO: 75101

SEQ ID NO: 108726 - DNA, 885 bp, Homo Sapiens; identical to SEQ ID NO: 75104

SEQ ID NO: 108727 - DNA, 957 bp, Homo Sapiens; identical to SEQ ID NO: 75105

SEQ ID NO: 108728 - DNA, 870 bp, Homo Sapiens; identical to SEQ ID NO: 75106

SEQ ID NO: 108729 - DNA, 1176 bp, Homo Sapiens; identical to SEQ ID NO: 75107

SEQ ID NO: 108730 - DNA, 1000 bp, Homo Sapiens; identical to SEQ ID NO: 75108
  misc_feature (55)..(55): n is a, c, g, or t
  misc_feature (57)..(57): n is a, c, g, or t
  misc_feature (61)..(61): n is a, c, g, or t
  misc_feature (124)..(124): n is a, c, g, or t
  misc_feature (138)..(138): n is a, c, g, or t
  misc_feature (180)..(180): n is a, c, g, or t
  misc_feature (216)..(216): n is a, c, g, or t
  misc_feature (263)..(264): n is a, c, g, or t
  misc_feature (268)..(268): n is a, c, g, or t
  misc_feature (274)..(274): n is a, c, g, or t
  misc_feature (277)..(277): n is a, c, g, or t
  misc_feature (303)..(303): n is a, c, g, or t
  misc_feature (315)..(315): n is a, c, g, or t

SEQ ID NO: 108731 - DNA, 995 bp, Homo Sapiens; identical to SEQ ID NO: 75112
  misc_feature (63)..(63): n is a, c, g, or t
  misc_feature (121)..(121): n is a, c, g, or t
  misc_feature (159)..(159): n is a, c, g, or t
  misc_feature (200)..(200): n is a, c, g, or t
  misc_feature (233)..(233): n is a, c, g, or t
  misc_feature (266)..(266): n is a, c, g, or t
  misc_feature (326)..(326): n is a, c, g, or t

SEQ ID NO: 108732 - DNA, 1194 bp, Homo Sapiens; identical to SEQ ID NO: 75113

SEQ ID NO: 108733 - DNA, 2054 bp, Homo Sapiens; identical to SEQ ID NO: 75114

SEQ ID NO: 108734 - DNA, 893 bp, Homo Sapiens; identical to SEQ ID NO: 75115
  misc_feature (774)..(774): n is a, c, g, or t
  misc_feature (796)..(796): n is a, c, g, or t
  misc_feature (864)..(864): n is a, c, g, or t

SEQ ID NO: 108735 - DNA, 2035 bp, Homo Sapiens; identical to SEQ ID NO: 75116
  misc_feature (1894)..(1894): n is a, c, g, or t
  misc_feature (1905)..(1905): n is a, c, g, or t
  misc_feature (1950)..(1965): n is a, c, g, or t
  misc_feature (2006)..(2006): n is a, c, g, or t

SEQ ID NO: 108736 - DNA, 754 bp, Homo Sapiens; identical to SEQ ID NO: 75117
  misc_feature (49)..(49): n is a, c, g, or t
  misc_feature (77)..(111): n is a, c, g, or t

SEQ ID NO: 108737 - DNA, 1006 bp, Homo Sapiens; identical to SEQ ID NO: 75122
  misc_feature (103)..(103): n is a, c, g, or t
  misc_feature (107)..(107): n is a, c, g, or t

SEQ ID NO: 108738 - DNA, 1293 bp, Homo Sapiens; identical to SEQ ID NO: 75123
  misc_feature (1109)..(1109): n is a, c, g, or t

SEQ ID NO: 108739 - DNA, 673 bp, Homo Sapiens; identical to SEQ ID NO: 75130

SEQ ID NO: 108740 - DNA, 1572 bp, Homo Sapiens; identical to SEQ ID NO: 75131

SEQ ID NO: 108741 - DNA, 1306 bp, Homo Sapiens; identical to SEQ ID NO: 75132
  misc_feature (44)..(78): n is a, c, g, or t

SEQ ID NO: 108742 - DNA, 539 bp, Homo Sapiens; identical to SEQ ID NO: 75133

SEQ ID NO: 108743 - DNA, 1388 bp, Homo Sapiens; identical to SEQ ID NO: 75134

SEQ ID NO: 108744 - DNA, 555 bp, Homo Sapiens; identical to SEQ ID NO: 75135
  misc_feature (91)..(91): n is a, c, g, or t
  misc_feature (121)..(121): n is a, c, g, or t
  misc_feature (152)..(152): n is a, c, g, or t

SEQ ID NO: 108745 - DNA, 1497 bp, Homo Sapiens; identical to SEQ ID NO: 75145
  misc_feature (119)..(154): n is a, c, g, or t
  misc_feature (840)..(844): n is a, c, g, or t
  misc_feature (846)..(846): n is a, c, g, or t
  misc_feature (849)..(851): n is a, c, g, or t
  misc_feature (853)..(856): n is a, c, g, or t
  misc_feature (859)..(860): n is a, c, g, or t
  misc_feature (863)..(865): n is a, c, g, or t
  misc_feature (1033)..(1044): n is a, c, g, or t
  misc_feature (1191)..(1205): n is a, c, g, or t
  misc_feature (1312)..(1312): n is a, c, g, or t
  misc_feature (1405)..(1405): n is a, c, g, or t

SEQ ID NO: 108746 - DNA, 1835 bp, Homo Sapiens; identical to SEQ ID NO: 75146
  misc_feature (353)..(353): n is a, c, g, or t
  misc_feature (655)..(690): n is a, c, g, or t

SEQ ID NO: 108747 - DNA, 756 bp, Homo Sapiens; identical to SEQ ID NO: 75147
  misc_feature (28)..(28): n is a, c, g, or t

SEQ ID NO: 108748 - DNA, 696 bp, Homo Sapiens; identical to SEQ ID NO: 75148

SEQ ID NO: 108749 - DNA, 466 bp, Homo Sapiens; identical to SEQ ID NO: 75149

SEQ ID NO: 108750 - DNA, 1150 bp, Homo Sapiens; identical to SEQ ID NO: 75151
  misc_feature (445)..(445): n is a, c, g, or t
  misc_feature (449)..(501): n is a, c, g, or t
  misc_feature (855)..(912): n is a, c, g, or t

SEQ ID NO: 108751 - DNA, 1005 bp, Homo Sapiens; identical to SEQ ID NO: 75152
  misc_feature (769)..(789): n is a, c, g, or t
  misc_feature (958)..(958): n is a, c, g, or t

SEQ ID NO: 108752 - DNA, 945 bp, Homo Sapiens; identical to SEQ ID NO: 75153

SEQ ID NO: 108753 - DNA, 1065 bp, Homo Sapiens; identical to SEQ ID NO: 75154

SEQ ID NO: 108754 - DNA, 1050 bp, Homo Sapiens; identical to SEQ ID NO: 75155

SEQ ID NO: 108755 - DNA, 1105 bp, Homo Sapiens; identical to SEQ ID NO: 75156
  misc_feature (954)..(1009): n is a, c, g, or t

SEQ ID NO: 108756 - DNA, 756 bp, Homo Sapiens; identical to SEQ ID NO: 75157
  misc_feature (50)..(94): n is a, c, g, or t

SEQ ID NO: 108757 - DNA, 1532 bp, Homo Sapiens; identical to SEQ ID NO: 75158
  misc_feature (225)..(269): n is a, c, g, or t

SEQ ID NO: 108758 - DNA, 1072 bp, Homo Sapiens; identical to SEQ ID NO: 75159
  misc_feature (970)..(971): n is a, c, g, or t

SEQ ID NO: 108759 - DNA, 396 bp, Homo Sapiens; identical to SEQ ID NO: 75160

SEQ ID NO: 108760 - DNA, 1062 bp, Homo Sapiens; identical to SEQ ID NO: 75163

SEQ ID NO: 108761 - DNA, 1020 bp, Homo Sapiens; identical to SEQ ID NO: 75164

SEQ ID NO: 108762 - DNA, 915 bp, Homo Sapiens; identical to SEQ ID NO: 75165
  misc_feature (128)..(128): n is a, c, g, or t

SEQ ID NO: 108763 - DNA, 1095 bp, Homo Sapiens; identical to SEQ ID NO: 75166
  misc_feature (837)..(837): n is a, c, g, or t
  misc_feature (844)..(895): n is a, c, g, or t

SEQ ID NO: 108764 - DNA, 2256 bp, Homo Sapiens; identical to SEQ ID NO: 75170
  misc_feature (1428)..(1465): n is a, c, g, or t
  misc_feature (2141)..(2141): n is a, c, g, or t

SEQ ID NO: 108765 - DNA, 2031 bp, Homo Sapiens; identical to SEQ ID NO: 75171

SEQ ID NO: 108766 - DNA, 336 bp, Homo Sapiens; identical to SEQ ID NO: 75172

SEQ ID NO: 108767 - DNA, 653 bp, Homo Sapiens; identical to SEQ ID NO: 75178

SEQ ID NO: 108768 - DNA, 984 bp, Homo Sapiens; identical to SEQ ID NO: 75179

SEQ ID NO: 108769 - DNA, 723 bp, Homo Sapiens; identical to SEQ ID NO: 75181
  misc_feature (21)..(21): n is a, c, g, or t

SEQ ID NO: 108770 - DNA, 495 bp, Homo Sapiens; identical to SEQ ID NO: 75182
  misc_feature (18)..(18): n is a, c, g, or t

SEQ ID NO: 108771 - DNA, 1330 bp, Homo Sapiens; identical to SEQ ID NO: 75183

SEQ ID NO: 108772 - DNA, 1167 bp, Homo Sapiens; identical to SEQ ID NO: 75184
  misc_feature (1000)..(1000): n is a, c, g, or t

SEQ ID NO: 108773 - DNA, 1592 bp, Homo Sapiens; identical to SEQ ID NO: 75185
  misc_feature (1355)..(1378): n is a, c, g, or t

SEQ ID NO: 108774 - DNA, 1007 bp, Homo Sapiens; identical to SEQ ID NO: 75186

SEQ ID NO: 108775 - DNA, 3315 bp, Homo Sapiens; identical to SEQ ID NO: 75191
  misc_feature (2176)..(2176): n is a, c, g, or t
  misc_feature (2180)..(2220): n is a, c, g, or t
  misc_feature (2223)..(2230): n is a, c, g, or t
  misc_feature (2232)..(2242): n is a, c, g, or t
  misc_feature (2244)..(2284): n is a, c, g, or t
  misc_feature (2286)..(2324): n is a, c, g, or t
  misc_feature (2326)..(2346): n is a, c, g, or t
  misc_feature (2348)..(2348): n is a, c, g, or t
  misc_feature (2350)..(2357): n is a, c, g, or t
  misc_feature (2359)..(3018): n is a, c, g, or t
  misc_feature (3089)..(3089): n is a, c, g, or t
  misc_feature (3219)..(3275): n is a, c, g, or t

SEQ ID NO: 108776 - DNA, 403 bp, Homo Sapiens; identical to SEQ ID NO: 75192

SEQ ID NO: 108777 - DNA, 981 bp, Homo Sapiens; identical to SEQ ID NO: 75194

SEQ ID NO: 108778 - DNA, 3879 bp, Homo Sapiens; identical to SEQ ID NO: 75195
  misc_feature (3353)..(3367): n is a, c, g, or t
  misc_feature (3385)..(3399): n is a, c, g, or t

SEQ ID NO: 108779 - DNA, 971 bp, Homo Sapiens; identical to SEQ ID NO: 75196
  misc_feature (636)..(636): n is a, c, g, or t
  misc_feature (740)..(740): n is a, c, g, or t
  misc_feature (763)..(776): n is a, c, g, or t

SEQ ID NO: 108780 - DNA, 2512 bp, Homo Sapiens; identical to SEQ ID NO: 75201

SEQ ID NO: 108781 - DNA, 1020 bp, Homo Sapiens; identical to SEQ ID NO: 75202

SEQ ID NO: 108782 - DNA, 1635 bp, Homo Sapiens; identical to SEQ ID NO: 75203
  misc_feature (101)..(101): n is a, c, g, or t
  misc_feature (121)..(121): n is a, c, g, or t
  misc_feature (298)..(298): n is a, c, g, or t

SEQ ID NO: 108783 - DNA, 947 bp, Homo Sapiens; identical to SEQ ID NO: 75204

SEQ ID NO: 108784 - DNA, 842 bp, Homo Sapiens; identical to SEQ ID NO: 75210
  misc_feature (750)..(784): n is a, c, g, or t

SEQ ID NO: 108785 - DNA, 488 bp, Homo Sapiens; identical to SEQ ID NO: 75211

SEQ ID NO: 108786 - DNA, 491 bp, Homo Sapiens; identical to SEQ ID NO: 75212

SEQ ID NO: 108787 - DNA, 1864 bp, Homo Sapiens; identical to SEQ ID NO: 75213
  misc_feature (1524)..(1561): n is a, c, g, or t
  misc_feature (1724)..(1770): n is a, c, g, or t

SEQ ID NO: 108788 - DNA, 1253 bp, Homo Sapiens; identical to SEQ ID NO: 75214

SEQ ID NO: 108789 - DNA, 562 bp, Homo Sapiens; identical to SEQ ID NO: 75215
  misc_feature (19)..(19): n is a, c, g, or t

SEQ ID NO: 108790 - DNA, 1288 bp, Homo Sapiens; identical to SEQ ID NO: 75216

SEQ ID NO: 108791 - DNA, 1036 bp, Homo Sapiens; identical to SEQ ID NO: 75217

SEQ ID NO: 108792 - DNA, 1245 bp, Homo Sapiens; identical to SEQ ID NO: 75221
  misc_feature (1165)..(1184): n is a, c, g, or t

SEQ ID NO: 108793 - DNA, 1154 bp, Homo Sapiens; identical to SEQ ID NO: 75222
  misc_feature (79)..(113): n is a, c, g, or t

SEQ ID NO: 108794 - DNA, 600 bp, Homo Sapiens; identical to SEQ ID NO: 75229
  misc_feature (461)..(511): n is a, c, g, or t

SEQ ID NO: 108795 - DNA, 317 bp, Homo Sapiens; identical to SEQ ID NO: 75230
  misc_feature (105)..(142): n is a, c, g, or t

SEQ ID NO: 108796 - DNA, 886 bp, Homo Sapiens; identical to SEQ ID NO: 75233

SEQ ID NO: 108797 - DNA, 819 bp, Homo Sapiens; identical to SEQ ID NO: 75234

SEQ ID NO: 108798 - DNA, 700 bp, Homo Sapiens; identical to SEQ ID NO: 75236

SEQ ID NO: 108799 - DNA, 1305 bp, Homo Sapiens; identical to SEQ ID NO: 75237

SEQ ID NO: 108800 - DNA, 384 bp, Homo Sapiens; identical to SEQ ID NO: 75238
  misc_feature (41)..(41): n is a, c, g, or t
  misc_feature (71)..(71): n is a, c, g, or t

SEQ ID NO: 108801 - DNA, 1174 bp, Homo Sapiens; identical to SEQ ID NO: 75243

SEQ ID NO: 108802 - DNA, 2117 bp, Homo Sapiens; identical to SEQ ID NO: 75244
  misc_feature (836)..(836): n is a, c, g, or t
  misc_feature (1891)..(1985): n is a, c, g, or t

SEQ ID NO: 108803 - DNA, 800 bp, Homo Sapiens; identical to SEQ ID NO: 75245

SEQ ID NO: 108804 - DNA, 455 bp, Homo Sapiens; identical to SEQ ID NO: 75246

SEQ ID NO: 108805 - DNA, 1051 bp, Homo Sapiens; identical to SEQ ID NO: 75250
  misc_feature (38)..(38): n is a, c, g, or t
  misc_feature (125)..(126): n is a, c, g, or t
  misc_feature (143)..(143): n is a, c, g, or t
  misc_feature (149)..(149): n is a, c, g, or t
  misc_feature (174)..(174): n is a, c, g, or t
  misc_feature (179)..(179): n is a, c, g, or t
  misc_feature (274)..(274): n is a, c, g, or t

SEQ ID NO: 108806 - DNA, 1086 bp, Homo Sapiens; identical to SEQ ID NO: 75251
  misc_feature (890)..(890): n is a, c, g, or t

SEQ ID NO: 108807 - DNA, 659 bp, Homo Sapiens; identical to SEQ ID NO: 75259
  misc_feature (182)..(232): n is a, c, g, or t

SEQ ID NO: 108808 - DNA, 1168 bp, Homo Sapiens; identical to SEQ ID NO: 75260
  misc_feature (801)..(801): n is a, c, g, or t
  misc_feature (1027)..(1027): n is a, c, g, or t
  misc_feature (1114)..(1114): n is a, c, g, or t

SEQ ID NO: 108809 - DNA, 535 bp, Homo Sapiens; identical to SEQ ID NO: 75261

SEQ ID NO: 108810 - DNA, 955 bp, Homo Sapiens; identical to SEQ ID NO: 75263

SEQ ID NO: 108811 - DNA, 868 bp, Homo Sapiens; identical to SEQ ID NO: 75264

SEQ ID NO: 108812 - DNA, 722 bp, Homo Sapiens; identical to SEQ ID NO: 75265

SEQ ID NO: 108813 - DNA, 649 bp, Homo Sapiens; identical to SEQ ID NO: 75275
  misc_feature (303)..(323): n is a, c, g, or t
  misc_feature (330)..(330): n is a, c, g, or t
  misc_feature (564)..(564): n is a, c, g, or t

SEQ ID NO: 108814 - DNA, 632 bp, Homo Sapiens; identical to SEQ ID NO: 75276
  misc_feature (284)..(331): n is a, c, g, or t

SEQ ID NO: 108815 - DNA, 340 bp, Homo Sapiens; identical to SEQ ID NO: 75277

SEQ ID NO: 108816 - DNA, 1819 bp, Homo Sapiens; identical to SEQ ID NO: 75278
  misc_feature (1350)..(1350): n is a, c, g, or t
  misc_feature (1462)..(1511): n is a, c, g, or t

SEQ ID NO: 108817 - DNA, 478 bp, Homo Sapiens; identical to SEQ ID NO: 75284
  misc_feature (420)..(428): n is a, c, g, or t

SEQ ID NO: 108818 - DNA, 553 bp, Homo Sapiens; identical to SEQ ID NO: 75285
  misc_feature (73)..(73): n is a, c, g, or t

SEQ ID NO: 108819 - DNA, 1700 bp, Homo Sapiens; identical to SEQ ID NO: 75287

SEQ ID NO: 108820 - DNA, 415 bp, Homo Sapiens; identical to SEQ ID NO: 75288

SEQ ID NO: 108821 - DNA, 636 bp, Homo Sapiens; identical to SEQ ID NO: 75292
  misc_feature (367)..(405): n is a, c, g, or t

SEQ ID NO: 108822 - DNA, 1557 bp, Homo Sapiens; identical to SEQ ID NO: 75293
  misc_feature (147)..(147): n is a, c, g, or t
  misc_feature (876)..(876): n is a, c, g, or t
  misc_feature (1299)..(1300): n is a, c, g, or t
  misc_feature (1306)..(1455): n is a, c, g, or t
  misc_feature (1465)..(1480): n is a, c, g, or t

SEQ ID NO: 108823 - DNA, 1265 bp, Homo Sapiens; identical to SEQ ID NO: 75294

SEQ ID NO: 108824 - DNA, 319 bp, Homo Sapiens; identical to SEQ ID NO: 75295

SEQ ID NO: 108825 - DNA, 1568 bp, Homo Sapiens; identical to SEQ ID NO: 75298

SEQ ID NO: 108826 - DNA, 983 bp, Homo Sapiens; identical to SEQ ID NO: 75299

SEQ ID NO: 108827 - DNA, 718 bp, Homo Sapiens; identical to SEQ ID NO: 75300

SEQ ID NO: 108828 - DNA, 1010 bp, Homo Sapiens; identical to SEQ ID NO: 75303

SEQ ID NO: 108829 - DNA, 989 bp, Homo Sapiens; identical to SEQ ID NO: 75304
  misc_feature (211)..(419): n is a, c, g, or t

SEQ ID NO: 108830 - DNA, 934 bp, Homo Sapiens; identical to SEQ ID NO: 75306
  misc_feature (710)..(836): n is a, c, g, or t
  misc_feature (886)..(886): n is a, c, g, or t

SEQ ID NO: 108831 - DNA, 727 bp, Homo Sapiens; identical to SEQ ID NO: 75307
  misc_feature (443)..(449): n is a, c, g, or t
  misc_feature (454)..(454): n is a, c, g, or t
  misc_feature (456)..(540): n is a, c, g, or t
  misc_feature (569)..(569): n is a, c, g, or t

SEQ ID NO: 108832 - DNA, 1328 bp, Homo Sapiens; identical to SEQ ID NO: 75309
  misc_feature (1197)..(1245): n is a, c, g, or t

SEQ ID NO: 108833 - DNA, 777 bp, Homo Sapiens; identical to SEQ ID NO: 75310
  misc_feature (268)..(268): n is a, c, g, or t

SEQ ID NO: 108834 - DNA, 1080 bp, Homo Sapiens; identical to SEQ ID NO: 75311

SEQ ID NO: 108835 - DNA, 1077 bp, Homo Sapiens; identical to SEQ ID NO: 75312

SEQ ID NO: 108836 - DNA, 713 bp, Homo Sapiens; identical to SEQ ID NO: 75321

SEQ ID NO: 108837 - DNA, 996 bp, Homo Sapiens; identical to SEQ ID NO: 75322
  misc_feature (143)..(143): n is a, c, g, or t
  misc_feature (168)..(168): n is a, c, g, or t
  misc_feature (191)..(191): n is a, c, g, or t
  misc_feature (215)..(586): n is a, c, g, or t

SEQ ID NO: 108838 - DNA, 653 bp, Homo Sapiens; identical to SEQ ID NO: 75325

SEQ ID NO: 108839 - DNA, 1029 bp, Homo Sapiens; identical to SEQ ID NO: 75326

SEQ ID NO: 108840 - DNA, 537 bp, Homo Sapiens; identical to SEQ ID NO: 75335

SEQ ID NO: 108841 - DNA, 689 bp, Homo Sapiens; identical to SEQ ID NO: 75336
  misc_feature (100)..(100): n is a, c, g, or t

SEQ ID NO: 108842 - DNA, 836 bp, Homo Sapiens; identical to SEQ ID NO: 75337
  misc_feature (193)..(252): n is a, c, g, or t
  misc_feature (700)..(702): n is a, c, g, or t
  misc_feature (712)..(712): n is a, c, g, or t

SEQ ID NO: 108843 - DNA, 1303 bp, Homo Sapiens; identical to SEQ ID NO: 75338
  misc_feature (859)..(876): n is a, c, g, or t
  misc_feature (1227)..(1245): n is a, c, g, or t

SEQ ID NO: 108844 - DNA, 880 bp, Homo Sapiens; identical to SEQ ID NO: 75339

SEQ ID NO: 108845 - DNA, 1226 bp, Homo Sapiens; identical to SEQ ID NO: 75341
  misc_feature (13)..(13): n is a, c, g, or t
  misc_feature (76)..(76): n is a, c, g, or t
  misc_feature (122)..(122): n is a, c, g, or t
  misc_feature (143)..(143): n is a, c, g, or t
  misc_feature (210)..(210): n is a, c, g, or t
  misc_feature (412)..(412): n is a, c, g, or t
  misc_feature (1042)..(1135): n is a, c, g, or t

SEQ ID NO: 108846 - DNA, 547 bp, Homo Sapiens; identical to SEQ ID NO: 75342
  misc_feature (154)..(229): n is a, c, g, or t
  misc_feature (533)..(533): n is a, c, g, or t

SEQ ID NO: 108847 - DNA, 1059 bp, Homo Sapiens; identical to SEQ ID NO: 75345
  misc_feature (700)..(700): n is a, c, g, or t
  misc_feature (736)..(736): n is a, c, g, or t
  misc_feature (754)..(754): n is a, c, g, or t
  misc_feature (768)..(770): n is a, c, g, or t
  misc_feature (854)..(854): n is a, c, g, or t
  misc_feature (961)..(961): n is a, c, g, or t
  misc_feature (1006)..(1006): n is a, c, g, or t
  misc_feature (1028)..(1028): n is a, c, g, or t

SEQ ID NO: 108848 - DNA, 3336 bp, Homo Sapiens; identical to SEQ ID NO: 75346

SEQ ID NO: 108849 - DNA, 1471 bp, Homo Sapiens; identical to SEQ ID NO: 75347

SEQ ID NO: 108850 - DNA, 2521 bp, Homo Sapiens; identical to SEQ ID NO: 75348
  misc_feature (1507)..(1530): n is a, c, g, or t
  misc_feature (1787)..(1787): n is a, c, g, or t
  misc_feature (1906)..(1941): n is a, c, g, or t
  misc_feature (2003)..(2087): n is a, c, g, or t
  misc_feature (2272)..(2272): n is a, c, g, or t
  misc_feature (2277)..(2285): n is a, c, g, or t
  misc_feature (2373)..(2373): n is a, c, g, or t
  misc_feature (2486)..(2486): n is a, c, g, or t

SEQ ID NO: 108851 - DNA, 559 bp, Homo Sapiens; identical to SEQ ID NO: 75349

SEQ ID NO: 108852 - DNA, 1394 bp, Homo Sapiens; identical to SEQ ID NO: 75356
  misc_feature (43)..(81): n is a, c, g, or t
  misc_feature (84)..(118): n is a, c, g, or t
  misc_feature (928)..(944): n is a, c, g, or t

SEQ ID NO: 108853 - DNA, 800 bp, Homo Sapiens; identical to SEQ ID NO: 75357

SEQ ID NO: 108854 - DNA, 819 bp, Homo Sapiens; identical to SEQ ID NO: 75358
  misc_feature (579)..(579): n is a, c, g, or t

SEQ ID NO: 108855 - DNA, 815 bp, Homo Sapiens; identical to SEQ ID NO: 75360

SEQ ID NO: 108856 - DNA, 761 bp, Homo Sapiens; identical to SEQ ID NO: 75361
  misc_feature (75)..(75): n is a, c, g, or t

SEQ ID NO: 108857 - DNA, 993 bp, Homo Sapiens; identical to SEQ ID NO: 75362
  misc_feature (41)..(41): n is a, c, g, or t
  misc_feature (71)..(71): n is a, c, g, or t
  misc_feature (102)..(102): n is a, c, g, or t
  misc_feature (136)..(136): n is a, c, g, or t
  misc_feature (160)..(160): n is a, c, g, or t
  misc_feature (262)..(262): n is a, c, g, or t
  misc_feature (290)..(290): n is a, c, g, or t
  misc_feature (299)..(300): n is a, c, g, or t

SEQ ID NO: 108858 - DNA, 970 bp, Homo Sapiens; identical to SEQ ID NO: 75363
  misc_feature (145)..(145): n is a, c, g, or t
  misc_feature (213)..(213): n is a, c, g, or t
  misc_feature (281)..(281): n is a, c, g, or t

SEQ ID NO: 108859 - DNA, 980 bp, Homo Sapiens; identical to SEQ ID NO: 75364
  misc_feature (44)..(44): n is a, c, g, or t
  misc_feature (95)..(95): n is a, c, g, or t
  misc_feature (124)..(124): n is a, c, g, or t
  misc_feature (160)..(161): n is a, c, g, or t
  misc_feature (164)..(164): n is a, c, g, or t
  misc_feature (239)..(239): n is a, c, g, or t
  misc_feature (279)..(279): n is a, c, g, or t

SEQ ID NO: 108860 - DNA, 1001 bp, Homo Sapiens; identical to SEQ ID NO: 75365
  misc_feature (298)..(298): n is a, c, g, or t

SEQ ID NO: 108861 - DNA, 1362 bp, Homo Sapiens; identical to SEQ ID NO: 75366
  misc_feature (135)..(135): n is a, c, g, or t
  misc_feature (362)..(558): n is a, c, g, or t

SEQ ID NO: 108862 - DNA, 835 bp, Homo Sapiens; identical to SEQ ID NO: 75370
  misc_feature (112)..(112): n is a, c, g, or t

SEQ ID NO: 108863 - DNA, 432 bp, Homo Sapiens; identical to SEQ ID NO: 75371

SEQ ID NO: 108864 - DNA, 362 bp, Homo Sapiens; identical to SEQ ID NO: 75372

SEQ ID NO: 108865 - DNA, 364 bp, Homo Sapiens; identical to SEQ ID NO: 75373

SEQ ID NO: 108866 - DNA, 185 bp, Homo Sapiens; identical to SEQ ID NO: 75375

SEQ ID NO: 108867 - DNA, 449 bp, Homo Sapiens; identical to SEQ ID NO: 75376

SEQ ID NO: 108868 - DNA, 462 bp, Homo Sapiens; identical to SEQ ID NO: 75377

SEQ ID NO: 108869 - DNA, 747 bp, Homo Sapiens; identical to SEQ ID NO: 75378
  misc_feature (80)..(80): n is a, c, g, or t
  misc_feature (261)..(261): n is a, c, g, or t

SEQ ID NO: 108870 - DNA, 744 bp, Homo Sapiens; identical to SEQ ID NO: 75379

SEQ ID NO: 108871 - DNA, 1646 bp, Homo Sapiens; identical to SEQ ID NO: 75380
  misc_feature (820)..(820): n is a, c, g, or t
  misc_feature (1169)..(1218): n is a, c, g, or t

SEQ ID NO: 108872 - DNA, 1163 bp, Homo Sapiens; identical to SEQ ID NO: 75381

SEQ ID NO: 108873 - DNA, 910 bp, Homo Sapiens; identical to SEQ ID NO: 75382

SEQ ID NO: 108874 - DNA, 2532 bp, Homo Sapiens; identical to SEQ ID NO: 75383
  misc_feature (1378)..(1515): n is a, c, g, or t
  misc_feature (1517)..(1517): n is a, c, g, or t
  misc_feature (1521)..(1522): n is a, c, g, or t
  misc_feature (1558)..(1567): n is a, c, g, or t
  misc_feature (1624)..(1650): n is a, c, g, or t
  misc_feature (1911)..(1921): n is a, c, g, or t
  misc_feature (1944)..(1944): n is a, c, g, or t
  misc_feature (2237)..(2237): n is a, c, g, or t
  misc_feature (2259)..(2259): n is a, c, g, or t
  misc_feature (2267)..(2267): n is a, c, g, or t

SEQ ID NO: 108875 - DNA, 1044 bp, Homo Sapiens; identical to SEQ ID NO: 75384

SEQ ID NO: 108876 - DNA, 1285 bp, Homo Sapiens; identical to SEQ ID NO: 75386

SEQ ID NO: 108877 - DNA, 846 bp, Homo Sapiens; identical to SEQ ID NO: 75387

SEQ ID NO: 108878 - DNA, 1148 bp, Homo Sapiens; identical to SEQ ID NO: 75390

SEQ ID NO: 108879 - DNA, 977 bp, Homo Sapiens; identical to SEQ ID NO: 75391

SEQ ID NO: 108880 - DNA, 2549 bp, Homo Sapiens; identical to SEQ ID NO: 75392
  misc_feature (684)..(809): n is a, c, g, or t

SEQ ID NO: 108881 - DNA, 983 bp, Homo Sapiens; identical to SEQ ID NO: 75393
  misc_feature (66)..(66): n is a, c, g, or t
  misc_feature (155)..(155): n is a, c, g, or t
  misc_feature (172)..(172): n is a, c, g, or t
  misc_feature (206)..(206): n is a, c, g, or t
  misc_feature (212)..(212): n is a, c, g, or t
  misc_feature (246)..(246): n is a, c, g, or t
  misc_feature (256)..(256): n is a, c, g, or t
  misc_feature (309)..(309): n is a, c, g, or t

SEQ ID NO: 108882 - DNA, 823 bp, Homo Sapiens; identical to SEQ ID NO: 75394

SEQ ID NO: 108883 - DNA, 849 bp, Homo Sapiens; identical to SEQ ID NO: 75396

SEQ ID NO: 108884 - DNA, 1380 bp, Homo Sapiens; identical to SEQ ID NO: 75397

SEQ ID NO: 108885 - DNA, 707 bp, Homo Sapiens; identical to SEQ ID NO: 75403
  misc_feature (342)..(395): n is a, c, g, or t
  misc_feature (460)..(507): n is a, c, g, or t

SEQ ID NO: 108886 - DNA, 1029 bp, Homo Sapiens; identical to SEQ ID NO: 75404
  misc_feature (59)..(59): n is a, c, g, or t
  misc_feature (61)..(61): n is a, c, g, or t
  misc_feature (102)..(102): n is a, c, g, or t
  misc_feature (140)..(140): n is a, c, g, or t
  misc_feature (174)..(174): n is a, c, g, or t
  misc_feature (176)..(176): n is a, c, g, or t
  misc_feature (179)..(179): n is a, c, g, or t
  misc_feature (183)..(183): n is a, c, g, or t
  misc_feature (187)..(188): n is a, c, g, or t
  misc_feature (196)..(196): n is a, c, g, or t
  misc_feature (207)..(207): n is a, c, g, or t
  misc_feature (275)..(276): n is a, c, g, or t
  misc_feature (283)..(284): n is a, c, g, or t
  misc_feature (519)..(566): n is a, c, g, or t
  misc_feature (622)..(671): n is a, c, g, or t

SEQ ID NO: 108887 - DNA, 1245 bp, Homo Sapiens; identical to SEQ ID NO: 75405
  misc_feature (768)..(821): n is a, c, g, or t
  misc_feature (1164)..(1183): n is a, c, g, or t

SEQ ID NO: 108888 - DNA, 1187 bp, Homo Sapiens; identical to SEQ ID NO: 75406
  misc_feature (282)..(282): n is a, c, g, or t
  misc_feature (390)..(390): n is a, c, g, or t
  misc_feature (462)..(511): n is a, c, g, or t
  misc_feature (1001)..(1049): n is a, c, g, or t

SEQ ID NO: 108889 - DNA, 929 bp, Homo Sapiens; identical to SEQ ID NO: 75408
  misc_feature (13)..(13): n is a, c, g, or t
  misc_feature (158)..(158): n is a, c, g, or t
  misc_feature (210)..(210): n is a, c, g, or t
  misc_feature (287)..(327): n is a, c, g, or t
  misc_feature (437)..(524): n is a, c, g, or t

SEQ ID NO: 108890 - DNA, 845 bp, Homo Sapiens; identical to SEQ ID NO: 75409
  misc_feature (428)..(468): n is a, c, g, or t
  misc_feature (578)..(665): n is a, c, g, or t

SEQ ID NO: 108891 - DNA, 785 bp, Homo Sapiens; identical to SEQ ID NO: 75412

SEQ ID NO: 108892 - DNA, 880 bp, Homo Sapiens; identical to SEQ ID NO: 75413
  misc_feature (46)..(80): n is a, c, g, or t

SEQ ID NO: 108893 - DNA, 1003 bp, Homo Sapiens; identical to SEQ ID NO: 75414

SEQ ID NO: 108894 - DNA, 689 bp, Homo Sapiens; identical to SEQ ID NO: 75415
  misc_feature (307)..(307): n is a, c, g, or t

SEQ ID NO: 108895 - DNA, 800 bp, Homo Sapiens; identical to SEQ ID NO: 75416
  misc_feature (677)..(677): n is a, c, g, or t
  misc_feature (681)..(687): n is a, c, g, or t
  misc_feature (689)..(693): n is a, c, g, or t
  misc_feature (695)..(700): n is a, c, g, or t
  misc_feature (703)..(704): n is a, c, g, or t
  misc_feature (706)..(711): n is a, c, g, or t

SEQ ID NO: 108896 - DNA, 735 bp, Homo Sapiens; identical to SEQ ID NO: 75419
  misc_feature (33)..(33): n is a, c, g, or t

SEQ ID NO: 108897 - DNA, 1209 bp, Homo Sapiens; identical to SEQ ID NO: 75420
  misc_feature (1052)..(1052): n is a, c, g, or t

SEQ ID NO: 108898 - DNA, 1107 bp, Homo Sapiens; identical to SEQ ID NO: 75421
  misc_feature (907)..(907): n is a, c, g, or t
  misc_feature (990)..(990): n is a, c, g, or t

SEQ ID NO: 108899 - DNA, 969 bp, Homo Sapiens; identical to SEQ ID NO: 75422
  misc_feature (916)..(916): n is a, c, g, or t
  misc_feature (927)..(927): n is a, c, g, or t
  misc_feature (959)..(959): n is a, c, g, or t

SEQ ID NO: 108900 - DNA, 702 bp, Homo Sapiens; identical to SEQ ID NO: 75423

SEQ ID NO: 108901 - DNA, 899 bp, Homo Sapiens; identical to SEQ ID NO: 75424
  misc_feature (655)..(657): n is a, c, g, or t
  misc_feature (659)..(665): n is a, c, g, or t
  misc_feature (667)..(680): n is a, c, g, or t
  misc_feature (682)..(689): n is a, c, g, or t
  misc_feature (691)..(725): n is a, c, g, or t
  misc_feature (729)..(730): n is a, c, g, or t
  misc_feature (735)..(736): n is a, c, g, or t
  misc_feature (738)..(738): n is a, c, g, or t
  misc_feature (745)..(745): n is a, c, g, or t
  misc_feature (750)..(762): n is a, c, g, or t
  misc_feature (772)..(789): n is a, c, g, or t
  misc_feature (819)..(855): n is a, c, g, or t

SEQ ID NO: 108902 - DNA, 1077 bp, Homo Sapiens; identical to SEQ ID NO: 75425
  misc_feature (161)..(181): n is a, c, g, or t

SEQ ID NO: 108903 - DNA, 262 bp, Homo Sapiens; identical to SEQ ID NO: 75445

SEQ ID NO: 108904 - DNA, 1991 bp, Homo Sapiens; identical to SEQ ID NO: 75446
  misc_feature (547)..(547): n is a, c, g, or t

SEQ ID NO: 108905 - DNA, 1500 bp, Homo Sapiens; identical to SEQ ID NO: 75448

SEQ ID NO: 108906 - DNA, 354 bp, Homo Sapiens; identical to SEQ ID NO: 75449

SEQ ID NO: 108907 - DNA, 1074 bp, Homo Sapiens; identical to SEQ ID NO: 75450
  misc_feature (732)..(751): n is a, c, g, or t

SEQ ID NO: 108908 - DNA, 1892 bp, Homo Sapiens; identical to SEQ ID NO: 75451

SEQ ID NO: 108909 - DNA, 956 bp, Homo Sapiens; identical to SEQ ID NO: 75452
  misc_feature (828)..(860): n is a, c, g, or t

SEQ ID NO: 108910 - DNA, 519 bp, Homo Sapiens; identical to SEQ ID NO: 75458

SEQ ID NO: 108911 - DNA, 510 bp, Homo Sapiens; identical to SEQ ID NO: 75459
  misc_feature (53)..(53): n is a, c, g, or t

SEQ ID NO: 108912 - DNA, 2018 bp, Homo Sapiens; identical to SEQ ID NO: 75460
  misc_feature (1814)..(1822): n is a, c, g, or t

SEQ ID NO: 108913 - DNA, 1046 bp, Homo Sapiens; identical to SEQ ID NO: 75461

SEQ ID NO: 108914 - DNA, 420 bp, Homo Sapiens; identical to SEQ ID NO: 75462

SEQ ID NO: 108915 - DNA, 368 bp, Homo Sapiens; identical to SEQ ID NO: 75463

SEQ ID NO: 108916 - DNA, 3010 bp, Homo Sapiens; identical to SEQ ID NO: 75470
  misc_feature (2277)..(2359): n is a, c, g, or t
  misc_feature (2394)..(2403): n is a, c, g, or t
  misc_feature (2521)..(2522): n is a, c, g, or t

SEQ ID NO: 108917 - DNA, 338 bp, Homo Sapiens; identical to SEQ ID NO: 75471

SEQ ID NO: 108918 - DNA, 412 bp, Homo Sapiens; identical to SEQ ID NO: 75472

SEQ ID NO: 108919 - DNA, 3206 bp, Homo Sapiens; identical to SEQ ID NO: 75473

SEQ ID NO: 108920 - DNA, 1441 bp, Homo Sapiens; identical to SEQ ID NO: 75474

SEQ ID NO: 108921 - DNA, 975 bp, Homo Sapiens; identical to SEQ ID NO: 75476
  misc_feature (400)..(441): n is a, c, g, or t
  misc_feature (729)..(821): n is a, c, g, or t

SEQ ID NO: 108922 - DNA, 1794 bp, Homo Sapiens; identical to SEQ ID NO: 75477
  misc_feature (721)..(733): n is a, c, g, or t
  misc_feature (1629)..(1715): n is a, c, g, or t

SEQ ID NO: 108923 - DNA, 1626 bp, Homo Sapiens; identical to SEQ ID NO: 75482
  misc_feature (86)..(120): n is a, c, g, or t

SEQ ID NO: 108924 - DNA, 820 bp, Homo Sapiens; identical to SEQ ID NO: 75483

SEQ ID NO: 108925 - DNA, 269 bp, Homo Sapiens; identical to SEQ ID NO: 75484

SEQ ID NO: 108926 - DNA, 673 bp, Homo Sapiens; identical to SEQ ID NO: 75486

SEQ ID NO: 108927 - DNA, 943 bp, Homo Sapiens; identical to SEQ ID NO: 75487

SEQ ID NO: 108928 - DNA, 792 bp, Homo Sapiens; identical to SEQ ID NO: 75488

SEQ ID NO: 108929 - DNA, 1009 bp, Homo Sapiens; identical to SEQ ID NO: 75489

SEQ ID NO: 108930 - DNA, 923 bp, Homo Sapiens; identical to SEQ ID NO: 75490

SEQ ID NO: 108931 - DNA, 893 bp, Homo Sapiens; identical to SEQ ID NO: 75491
  misc_feature (101)..(101): n is a, c, g, or t

SEQ ID NO: 108932 - DNA, 975 bp, Homo Sapiens; identical to SEQ ID NO: 75492

SEQ ID NO: 108933 - DNA, 1631 bp, Homo Sapiens; identical to SEQ ID NO: 75493

SEQ ID NO: 108934 - DNA, 752 bp, Homo Sapiens; identical to SEQ ID NO: 75494

SEQ ID NO: 108935 - DNA, 939 bp, Homo Sapiens; identical to SEQ ID NO: 75495

SEQ ID NO: 108936 - DNA, 789 bp, Homo Sapiens; identical to SEQ ID NO: 75496

SEQ ID NO: 108937 - DNA, 794 bp, Homo Sapiens; identical to SEQ ID NO: 75497
  misc_feature (96)..(127): n is a, c, g, or t
  misc_feature (178)..(276): n is a, c, g, or t

SEQ ID NO: 108938 - DNA, 1240 bp, Homo Sapiens; identical to SEQ ID NO: 75499
  misc_feature (22)..(22): n is a, c, g, or t

SEQ ID NO: 108939 - DNA, 813 bp, Homo Sapiens; identical to SEQ ID NO: 75500
  misc_feature (779)..(779): n is a, c, g, or t
  misc_feature (781)..(781): n is a, c, g, or t

SEQ ID NO: 108940 - DNA, 985 bp, Homo Sapiens; identical to SEQ ID NO: 75510

SEQ ID NO: 108941 - DNA, 629 bp, Homo Sapiens; identical to SEQ ID NO: 75511

SEQ ID NO: 108942 - DNA, 1088 bp, Homo Sapiens; identical to SEQ ID NO: 75517

SEQ ID NO: 108943 - DNA, 859 bp, Homo Sapiens; identical to SEQ ID NO: 75518
  misc_feature (21)..(21): n is a, c, g, or t

SEQ ID NO: 108944 - DNA, 2337 bp, Homo Sapiens; identical to SEQ ID NO: 75526
  misc_feature (1833)..(1930): n is a, c, g, or t

SEQ ID NO: 108945 - DNA, 1537 bp, Homo Sapiens; identical to SEQ ID NO: 75527

SEQ ID NO: 108946 - DNA, 885 bp, Homo Sapiens; identical to SEQ ID NO: 75528

SEQ ID NO: 108947 - DNA, 1251 bp, Homo Sapiens; identical to SEQ ID NO: 75529
  misc_feature (27)..(27): n is a, c, g, or t
  misc_feature (41)..(41): n is a, c, g, or t
  misc_feature (53)..(453): n is a, c, g, or t

SEQ ID NO: 108948 - DNA, 2460 bp, Homo Sapiens; identical to SEQ ID NO: 75531

SEQ ID NO: 108949 - DNA, 836 bp, Homo Sapiens; identical to SEQ ID NO: 75532

SEQ ID NO: 108950 - DNA, 1042 bp, Homo Sapiens; identical to SEQ ID NO: 75533
  misc_feature (15)..(15): n is a, c, g, or t
  misc_feature (55)..(55): n is a, c, g, or t
  misc_feature (145)..(145): n is a, c, g, or t
  misc_feature (169)..(169): n is a, c, g, or t
  misc_feature (209)..(209): n is a, c, g, or t
  misc_feature (223)..(223): n is a, c, g, or t
  misc_feature (976)..(986): n is a, c, g, or t

SEQ ID NO: 108951 - DNA, 1048 bp, Homo Sapiens; identical to SEQ ID NO: 75534

SEQ ID NO: 108952 - DNA, 1233 bp, Homo Sapiens; identical to SEQ ID NO: 75537

SEQ ID NO: 108953 - DNA, 568 bp, Homo Sapiens; identical to SEQ ID NO: 75538

SEQ ID NO: 108954 - DNA, 1741 bp, Homo Sapiens; identical to SEQ ID NO: 75542

SEQ ID NO: 108955 - DNA, 1358 bp, Homo Sapiens; identical to SEQ ID NO: 75543
  misc_feature (16)..(16): n is a, c, g, or t
  misc_feature (1260)..(1260): n is a, c, g, or t

SEQ ID NO: 108956 - DNA, 677 bp, Homo Sapiens; identical to SEQ ID NO: 75544
  misc_feature (574)..(574): n is a, c, g, or t

SEQ ID NO: 108957 - DNA, 1858 bp, Homo Sapiens; identical to SEQ ID NO: 75545

SEQ ID NO: 108958 - DNA, 2400 bp, Homo Sapiens; identical to SEQ ID NO: 75551
  misc_feature (244)..(254): n is a, c, g, or t

SEQ ID NO: 108959 - DNA, 1927 bp, Homo Sapiens; identical to SEQ ID NO: 75552

SEQ ID NO: 108960 - DNA, 1116 bp, Homo Sapiens; identical to SEQ ID NO: 75553

SEQ ID NO: 108961 - DNA, 4330 bp, Homo Sapiens; identical to SEQ ID NO: 75558
  misc_feature (81)..(115): n is a, c, g, or t

SEQ ID NO: 108962 - DNA, 1208 bp, Homo Sapiens; identical to SEQ ID NO: 75559

SEQ ID NO: 108963 - DNA, 935 bp, Homo Sapiens; identical to SEQ ID NO: 75560

SEQ ID NO: 108964 - DNA, 807 bp, Homo Sapiens; identical to SEQ ID NO: 75563
  misc_feature (534)..(551): n is a, c, g, or t

SEQ ID NO: 108965 - DNA, 1549 bp, Homo Sapiens; identical to SEQ ID NO: 75564
  misc_feature (1071)..(1137): n is a, c, g, or t

SEQ ID NO: 108966 - DNA, 686 bp, Homo Sapiens; identical to SEQ ID NO: 75566

SEQ ID NO: 108967 - DNA, 466 bp, Homo Sapiens; identical to SEQ ID NO: 75567

SEQ ID NO: 108968 - DNA, 880 bp, Homo Sapiens; identical to SEQ ID NO: 75568
  misc_feature (41)..(82): n is a, c, g, or t
  misc_feature (86)..(120): n is a, c, g, or t

SEQ ID NO: 108969 - DNA, 430 bp, Homo Sapiens; identical to SEQ ID NO: 75569

SEQ ID NO: 108970 - DNA, 1916 bp, Homo Sapiens; identical to SEQ ID NO: 75570

SEQ ID NO: 108971 - DNA, 1015 bp, Homo Sapiens; identical to SEQ ID NO: 75571

SEQ ID NO: 108972 - DNA, 1108 bp, Homo Sapiens; identical to SEQ ID NO: 75577
  misc_feature (927)..(927): n is a, c, g, or t

SEQ ID NO: 108973 - DNA, 622 bp, Homo Sapiens; identical to SEQ ID NO: 75578

SEQ ID NO: 108974 - DNA, 1317 bp, Homo Sapiens; identical to SEQ ID NO: 75579
  misc_feature (882)..(882): n is a, c, g, or t
  misc_feature (934)..(934): n is a, c, g, or t

SEQ ID NO: 108975 - DNA, 396 bp, Homo Sapiens; identical to SEQ ID NO: 75580

SEQ ID NO: 108976 - DNA, 1006 bp, Homo Sapiens; identical to SEQ ID NO: 75582
  misc_feature (51)..(51): n is a, c, g, or t
  misc_feature (160)..(160): n is a, c, g, or t
  misc_feature (168)..(168): n is a, c, g, or t
  misc_feature (170)..(373): n is a, c, g, or t
  misc_feature (411)..(411): n is a, c, g, or t

SEQ ID NO: 108977 - DNA, 925 bp, Homo Sapiens; identical to SEQ ID NO: 75583
  misc_feature (462)..(490): n is a, c, g, or t
  misc_feature (809)..(818): n is a, c, g, or t

SEQ ID NO: 108978 - DNA, 1009 bp, Homo Sapiens; identical to SEQ ID NO: 75584
  misc_feature (496)..(522): n is a, c, g, or t
  misc_feature (769)..(769): n is a, c, g, or t
  misc_feature (873)..(873): n is a, c, g, or t

SEQ ID NO: 108979 - DNA, 1155 bp, Homo Sapiens; identical to SEQ ID NO: 75590

SEQ ID NO: 108980 - DNA, 992 bp, Homo Sapiens; identical to SEQ ID NO: 75591
  misc_feature (928)..(928): n is a, c, g, or t

SEQ ID NO: 108981 - DNA, 942 bp, Homo Sapiens; identical to SEQ ID NO: 75592

SEQ ID NO: 108982 - DNA, 977 bp, Homo Sapiens; identical to SEQ ID NO: 75593
  misc_feature (622)..(622): n is a, c, g, or t
  misc_feature (931)..(931): n is a, c, g, or t

SEQ ID NO: 108983 - DNA, 1033 bp, Homo Sapiens; identical to SEQ ID NO: 75594

SEQ ID NO: 108984 - DNA, 883 bp, Homo Sapiens; identical to SEQ ID NO: 75596

SEQ ID NO: 108985 - DNA, 1136 bp, Homo Sapiens; identical to SEQ ID NO: 75597
  misc_feature (1047)..(1073): n is a, c, g, or t
  misc_feature (1075)..(1075): n is a, c, g, or t

SEQ ID NO: 108986 - DNA, 1600 bp, Homo Sapiens; identical to SEQ ID NO: 75598

SEQ ID NO: 108987 - DNA, 540 bp, Homo Sapiens; identical to SEQ ID NO: 75599
  misc_feature (122)..(172): n is a, c, g, or t

SEQ ID NO: 108988 - DNA, 1000 bp, Homo Sapiens; identical to SEQ ID NO: 75600
  misc_feature (46)..(46): n is a, c, g, or t
  misc_feature (128)..(128): n is a, c, g, or t
  misc_feature (159)..(159): n is a, c, g, or t
  misc_feature (179)..(179): n is a, c, g, or t
  misc_feature (181)..(181): n is a, c, g, or t
  misc_feature (188)..(188): n is a, c, g, or t
  misc_feature (263)..(263): n is a, c, g, or t

SEQ ID NO: 108989 - DNA, 362 bp, Homo Sapiens; identical to SEQ ID NO: 75601

SEQ ID NO: 108990 - DNA, 2531 bp, Homo Sapiens; identical to SEQ ID NO: 75602

SEQ ID NO: 108991 - DNA, 1187 bp, Homo Sapiens; identical to SEQ ID NO: 75607

SEQ ID NO: 108992 - DNA, 742 bp, Homo Sapiens; identical to SEQ ID NO: 75608

SEQ ID NO: 108993 - DNA, 1091 bp, Homo Sapiens; identical to SEQ ID NO: 75609

SEQ ID NO: 108994 - DNA, 1273 bp, Homo Sapiens; identical to SEQ ID NO: 75610
  misc_feature (805)..(813): n is a, c, g, or t

SEQ ID NO: 108995 - DNA, 902 bp, Homo Sapiens; identical to SEQ ID NO: 75611

SEQ ID NO: 108996 - DNA, 1574 bp, Homo Sapiens; identical to SEQ ID NO: 75612
  misc_feature (1498)..(1498): n is a, c, g, or t

SEQ ID NO: 108997 - DNA, 1074 bp, Homo Sapiens; identical to SEQ ID NO: 75613

SEQ ID NO: 108998 - DNA, 687 bp, Homo Sapiens; identical to SEQ ID NO: 75614

SEQ ID NO: 108999 - DNA, 1712 bp, Homo Sapiens; identical to SEQ ID NO: 75615
  misc_feature (160)..(210): n is a, c, g, or t
  misc_feature (591)..(616): n is a, c, g, or t
  misc_feature (655)..(665): n is a, c, g, or t
  misc_feature (1062)..(1476): n is a, c, g, or t
  misc_feature (1489)..(1489): n is a, c, g, or t
  misc_feature (1514)..(1514): n is a, c, g, or t
  misc_feature (1576)..(1576): n is a, c, g, or t
  misc_feature (1591)..(1591): n is a, c, g, or t
  misc_feature (1594)..(1594): n is a, c, g, or t
  misc_feature (1655)..(1655): n is a, c, g, or t
  misc_feature (1663)..(1663): n is a, c, g, or t

SEQ ID NO: 109000 - DNA, 1068 bp, Homo Sapiens; identical to SEQ ID NO: 75616
  misc_feature (27)..(27): n is a, c, g, or t
  misc_feature (38)..(38): n is a, c, g, or t
  misc_feature (55)..(55): n is a, c, g, or t
  misc_feature (77)..(77): n is a, c, g, or t
  misc_feature (92)..(92): n is a, c, g, or t
  misc_feature (137)..(570): n is a, c, g, or t

SEQ ID NO: 109001 - DNA, 1938 bp, Homo Sapiens; identical to SEQ ID NO: 75618
  misc_feature (285)..(285): n is a, c, g, or t
  misc_feature (785)..(785): n is a, c, g, or t
  misc_feature (796)..(796): n is a, c, g, or t

SEQ ID NO: 109002 - DNA, 1077 bp, Homo Sapiens; identical to SEQ ID NO: 75619

SEQ ID NO: 109003 - DNA, 1319 bp, Homo Sapiens; identical to SEQ ID NO: 75621
  misc_feature (141)..(181): n is a, c, g, or t
  misc_feature (211)..(225): n is a, c, g, or t

SEQ ID NO: 109004 - DNA, 530 bp, Homo Sapiens; identical to SEQ ID NO: 75622
  misc_feature (244)..(304): n is a, c, g, or t

SEQ ID NO: 109005 - DNA, 918 bp, Homo Sapiens; identical to SEQ ID NO: 75624

SEQ ID NO: 109006 - DNA, 880 bp, Homo Sapiens; identical to SEQ ID NO: 75625

SEQ ID NO: 109007 - DNA, 556 bp, Homo Sapiens; identical to SEQ ID NO: 75627
  misc_feature (255)..(271): n is a, c, g, or t

SEQ ID NO: 109008 - DNA, 1000 bp, Homo Sapiens; identical to SEQ ID NO: 75628
  misc_feature (52)..(104): n is a, c, g, or t
  misc_feature (185)..(203): n is a, c, g, or t

SEQ ID NO: 109009 - DNA, 977 bp, Homo Sapiens; identical to SEQ ID NO: 75629
  misc_feature (811)..(811): n is a, c, g, or t
  misc_feature (852)..(852): n is a, c, g, or t
  misc_feature (873)..(873): n is a, c, g, or t
  misc_feature (959)..(959): n is a, c, g, or t

SEQ ID NO: 109010 - DNA, 1361 bp, Homo Sapiens; identical to SEQ ID NO: 75630

SEQ ID NO: 109011 - DNA, 2564 bp, Homo Sapiens; identical to SEQ ID NO: 75631
  misc_feature (1908)..(1975): n is a, c, g, or t
  misc_feature (1996)..(2074): n is a, c, g, or t

SEQ ID NO: 109012 - DNA, 1574 bp, Homo Sapiens; identical to SEQ ID NO: 75632
  misc_feature (163)..(384): n is a, c, g, or t
  misc_feature (395)..(395): n is a, c, g, or t
  misc_feature (1012)..(1027): n is a, c, g, or t

SEQ ID NO: 109013 - DNA, 1001 bp, Homo Sapiens; identical to SEQ ID NO: 75633
  misc_feature (808)..(824): n is a, c, g, or t

SEQ ID NO: 109014 - DNA, 1063 bp, Homo Sapiens; identical to SEQ ID NO: 75634
  misc_feature (873)..(887): n is a, c, g, or t

SEQ ID NO: 109015 - DNA, 1538 bp, Homo Sapiens; identical to SEQ ID NO: 75638

SEQ ID NO: 109016 - DNA, 524 bp, Homo Sapiens; identical to SEQ ID NO: 75639

SEQ ID NO: 109017 - DNA, 921 bp, Homo Sapiens; identical to SEQ ID NO: 75640

SEQ ID NO: 109018 - DNA, 919 bp, Homo Sapiens; identical to SEQ ID NO: 75641

SEQ ID NO: 109019 - DNA, 846 bp, Homo Sapiens; identical to SEQ ID NO: 75643

SEQ ID NO: 109020 - DNA, 619 bp, Homo Sapiens; identical to SEQ ID NO: 75644
  misc_feature (232)..(232): n is a, c, g, or t
  misc_feature (260)..(260): n is a, c, g, or t
  misc_feature (277)..(277): n is a, c, g, or t
  misc_feature (316)..(350): n is a, c, g, or t

SEQ ID NO: 109021 - DNA, 901 bp, Homo Sapiens; identical to SEQ ID NO: 75645

SEQ ID NO: 109022 - DNA, 2108 bp, Homo Sapiens; identical to SEQ ID NO: 75646
  misc_feature (690)..(708): n is a, c, g, or t
  misc_feature (715)..(743): n is a, c, g, or t

SEQ ID NO: 109023 - DNA, 628 bp, Homo Sapiens; identical to SEQ ID NO: 75647

SEQ ID NO: 109024 - DNA, 1224 bp, Homo Sapiens; identical to SEQ ID NO: 75648
  misc_feature (150)..(193): n is a, c, g, or t

SEQ ID NO: 109025 - DNA, 1030 bp, Homo Sapiens; identical to SEQ ID NO: 75649
  misc_feature (31)..(31): n is a, c, g, or t

SEQ ID NO: 109026 - DNA, 780 bp, Homo Sapiens; identical to SEQ ID NO: 75650
  misc_feature (553)..(553): n is a, c, g, or t

SEQ ID NO: 109027 - DNA, 536 bp, Homo Sapiens; identical to SEQ ID NO: 75651

SEQ ID NO: 109028 - DNA, 492 bp, Homo Sapiens; identical to SEQ ID NO: 75652

SEQ ID NO: 109029 - DNA, 1527 bp, Homo Sapiens; identical to SEQ ID NO: 75658
  misc_feature (67)..(67): n is a, c, g, or t
  misc_feature (125)..(125): n is a, c, g, or t
  misc_feature (143)..(143): n is a, c, g, or t
  misc_feature (1417)..(1417): n is a, c, g, or t

SEQ ID NO: 109030 - DNA, 1270 bp, Homo Sapiens; identical to SEQ ID NO: 75659
  misc_feature (1160)..(1202): n is a, c, g, or t
  misc_feature (1209)..(1219): n is a, c, g, or t

SEQ ID NO: 109031 - DNA, 1199 bp, Homo Sapiens; identical to SEQ ID NO: 75660
  misc_feature (1109)..(1151): n is a, c, g, or t

SEQ ID NO: 109032 - DNA, 1433 bp, Homo Sapiens; identical to SEQ ID NO: 75661
  misc_feature (18)..(18): n is a, c, g, or t
  misc_feature (1230)..(1230): n is a, c, g, or t

SEQ ID NO: 109033 - DNA, 546 bp, Homo Sapiens; identical to SEQ ID NO: 75663

SEQ ID NO: 109034 - DNA, 777 bp, Homo Sapiens; identical to SEQ ID NO: 75664
  misc_feature (691)..(704): n is a, c, g, or t

SEQ ID NO: 109035 - DNA, 1541 bp, Homo Sapiens; identical to SEQ ID NO: 75665
  misc_feature (481)..(544): n is a, c, g, or t
  misc_feature (685)..(698): n is a, c, g, or t
  misc_feature (1429)..(1468): n is a, c, g, or t

SEQ ID NO: 109036 - DNA, 2111 bp, Homo Sapiens; identical to SEQ ID NO: 75679

SEQ ID NO: 109037 - DNA, 830 bp, Homo Sapiens; identical to SEQ ID NO: 75680

SEQ ID NO: 109038 - DNA, 611 bp, Homo Sapiens; identical to SEQ ID NO: 75682

SEQ ID NO: 109039 - DNA, 944 bp, Homo Sapiens; identical to SEQ ID NO: 75683
  misc_feature (528)..(528): n is a, c, g, or t
  misc_feature (665)..(723): n is a, c, g, or t
  misc_feature (764)..(776): n is a, c, g, or t
  misc_feature (827)..(827): n is a, c, g, or t
  misc_feature (861)..(862): n is a, c, g, or t
  misc_feature (919)..(919): n is a, c, g, or t
  misc_feature (921)..(921): n is a, c, g, or t

SEQ ID NO: 109040 - DNA, 1808 bp, Homo Sapiens; identical to SEQ ID NO: 75684

SEQ ID NO: 109041 - DNA, 613 bp, Homo Sapiens; identical to SEQ ID NO: 75686

SEQ ID NO: 109042 - DNA, 487 bp, Homo Sapiens; identical to SEQ ID NO: 75687
  misc_feature (138)..(187): n is a, c, g, or t

SEQ ID NO: 109043 - DNA, 2779 bp, Homo Sapiens; identical to SEQ ID NO: 75689

SEQ ID NO: 109044 - DNA, 794 bp, Homo Sapiens; identical to SEQ ID NO: 75690

SEQ ID NO: 109045 - DNA, 1298 bp, Homo Sapiens; identical to SEQ ID NO: 75691
  misc_feature (28)..(28): n is a, c, g, or t

SEQ ID NO: 109046 - DNA, 462 bp, Homo Sapiens; identical to SEQ ID NO: 75697
  misc_feature (388)..(389): n is a, c, g, or t

SEQ ID NO: 109047 - DNA, 2228 bp, Homo Sapiens; identical to SEQ ID NO: 75698
  misc_feature (1880)..(1880): n is a, c, g, or t
  misc_feature (1973)..(1974): n is a, c, g, or t
  misc_feature (2159)..(2172): n is a, c, g, or t

SEQ ID NO: 109048 - DNA, 654 bp, Homo Sapiens; identical to SEQ ID NO: 75699
  misc_feature (14)..(14): n is a, c, g, or t

SEQ ID NO: 109049 - DNA, 2359 bp, Homo Sapiens; identical to SEQ ID NO: 75700
  misc_feature (61)..(78): n is a, c, g, or t
  misc_feature (396)..(396): n is a, c, g, or t
  misc_feature (1534)..(1643): n is a, c, g, or t
  misc_feature (1708)..(1727): n is a, c, g, or t
  misc_feature (1747)..(1790): n is a, c, g, or t
  misc_feature (1815)..(1860): n is a, c, g, or t
  misc_feature (1928)..(1936): n is a, c, g, or t

SEQ ID NO: 109050 - DNA, 903 bp, Homo Sapiens; identical to SEQ ID NO: 75701
  misc_feature (154)..(240): n is a, c, g, or t
  misc_feature (432)..(541): n is a, c, g, or t
  misc_feature (550)..(563): n is a, c, g, or t
  misc_feature (588)..(598): n is a, c, g, or t
  misc_feature (602)..(767): n is a, c, g, or t
  misc_feature (783)..(792): n is a, c, g, or t

SEQ ID NO: 109051 - DNA, 1449 bp, Homo Sapiens; identical to SEQ ID NO: 75703
  misc_feature (1102)..(1115): n is a, c, g, or t

SEQ ID NO: 109052 - DNA, 1438 bp, Homo Sapiens; identical to SEQ ID NO: 75704
  misc_feature (49)..(49): n is a, c, g, or t

SEQ ID NO: 109053 - DNA, 1073 bp, Homo Sapiens; identical to SEQ ID NO: 75707
  misc_feature (52)..(52): n is a, c, g, or t
  misc_feature (112)..(203): n is a, c, g, or t
  misc_feature (216)..(322): n is a, c, g, or t
  misc_feature (1005)..(1029): n is a, c, g, or t

SEQ ID NO: 109054 - DNA, 1323 bp, Homo Sapiens; identical to SEQ ID NO: 75708

SEQ ID NO: 109055 - DNA, 1194 bp, Homo Sapiens; identical to SEQ ID NO: 75710
  misc_feature (227)..(280): n is a, c, g, or t

SEQ ID NO: 109056 - DNA, 1371 bp, Homo Sapiens; identical to SEQ ID NO: 75711

SEQ ID NO: 109057 - DNA, 729 bp, Homo Sapiens; identical to SEQ ID NO: 75712

SEQ ID NO: 109058 - DNA, 1043 bp, Homo Sapiens; identical to SEQ ID NO: 75713
  misc_feature (82)..(116): n is a, c, g, or t
  misc_feature (513)..(575): n is a, c, g, or t
  misc_feature (626)..(660): n is a, c, g, or t
  misc_feature (707)..(960): n is a, c, g, or t

SEQ ID NO: 109059 - DNA, 1275 bp, Homo Sapiens; identical to SEQ ID NO: 75725
  misc_feature (169)..(189): n is a, c, g, or t
  misc_feature (409)..(417): n is a, c, g, or t
  misc_feature (1251)..(1251): n is a, c, g, or t

SEQ ID NO: 109060 - DNA, 588 bp, Homo Sapiens; identical to SEQ ID NO: 75726
  misc_feature (195)..(195): n is a, c, g, or t

SEQ ID NO: 109061 - DNA, 1302 bp, Homo Sapiens; identical to SEQ ID NO: 75727
  misc_feature (786)..(847): n is a, c, g, or t
  misc_feature (867)..(875): n is a, c, g, or t
  misc_feature (1093)..(1103): n is a, c, g, or t

SEQ ID NO: 109062 - DNA, 844 bp, Homo Sapiens; identical to SEQ ID NO: 75728

SEQ ID NO: 109063 - DNA, 931 bp, Homo Sapiens; identical to SEQ ID NO: 75730

SEQ ID NO: 109064 - DNA, 1061 bp, Homo Sapiens; identical to SEQ ID NO: 75731

SEQ ID NO: 109065 - DNA, 1676 bp, Homo Sapiens; identical to SEQ ID NO: 75732
  misc_feature (1416)..(1529): n is a, c, g, or t

SEQ ID NO: 109066 - DNA, 966 bp, Homo Sapiens; identical to SEQ ID NO: 75740
  misc_feature (80)..(114): n is a, c, g, or t

SEQ ID NO: 109067 - DNA, 997 bp, Homo Sapiens; identical to SEQ ID NO: 75741
  misc_feature (730)..(738): n is a, c, g, or t

SEQ ID NO: 109068 - DNA, 1816 bp, Homo Sapiens; identical to SEQ ID NO: 75742
  misc_feature (1755)..(1774): n is a, c, g, or t

SEQ ID NO: 109069 - DNA, 3249 bp, Homo Sapiens; identical to SEQ ID NO: 75743
  misc_feature (2977)..(3072): n is a, c, g, or t

SEQ ID NO: 109070 - DNA, 856 bp, Homo Sapiens; identical to SEQ ID NO: 75744

SEQ ID NO: 109071 - DNA, 1806 bp, Homo Sapiens; identical to SEQ ID NO: 75748

SEQ ID NO: 109072 - DNA, 608 bp, Homo Sapiens; identical to SEQ ID NO: 75749
  misc_feature (18)..(18): n is a, c, g, or t

SEQ ID NO: 109073 - DNA, 778 bp, Homo Sapiens; identical to SEQ ID NO: 75755

SEQ ID NO: 109074 - DNA, 983 bp, Homo Sapiens; identical to SEQ ID NO: 75756
  misc_feature (114)..(114): n is a, c, g, or t
  misc_feature (180)..(180): n is a, c, g, or t
  misc_feature (197)..(197): n is a, c, g, or t
  misc_feature (208)..(208): n is a, c, g, or t
  misc_feature (218)..(218): n is a, c, g, or t
  misc_feature (269)..(269): n is a, c, g, or t
  misc_feature (283)..(283): n is a, c, g, or t
  misc_feature (321)..(321): n is a, c, g, or t
  misc_feature (505)..(505): n is a, c, g, or t
  misc_feature (530)..(530): n is a, c, g, or t

SEQ ID NO: 109075 - DNA, 1449 bp, Homo Sapiens; identical to SEQ ID NO: 75766
  misc_feature (1166)..(1190): n is a, c, g, or t

SEQ ID NO: 109076 - DNA, 830 bp, Homo Sapiens; identical to SEQ ID NO: 75767
  misc_feature (338)..(354): n is a, c, g, or t
  misc_feature (392)..(578): n is a, c, g, or t

SEQ ID NO: 109077 - DNA, 1099 bp, Homo Sapiens; identical to SEQ ID NO: 75768

SEQ ID NO: 109078 - DNA, 1125 bp, Homo Sapiens; identical to SEQ ID NO: 75769
  misc_feature (959)..(959): n is a, c, g, or t

SEQ ID NO: 109079 - DNA, 2818 bp, Homo Sapiens; identical to SEQ ID NO: 75773
  misc_feature (984)..(984): n is a, c, g, or t

SEQ ID NO: 109080 - DNA, 1277 bp, Homo Sapiens; identical to SEQ ID NO: 75774
  misc_feature (83)..(117): n is a, c, g, or t

SEQ ID NO: 109081 - DNA, 966 bp, Homo Sapiens; identical to SEQ ID NO: 75777
  misc_feature (12)..(20): n is a, c, g, or t
  misc_feature (698)..(698): n is a, c, g, or t
  misc_feature (737)..(737): n is a, c, g, or t

SEQ ID NO: 109082 - DNA, 1005 bp, Homo Sapiens; identical to SEQ ID NO: 75778
  misc_feature (109)..(109): n is a, c, g, or t
  misc_feature (119)..(119): n is a, c, g, or t
  misc_feature (126)..(126): n is a, c, g, or t
  misc_feature (159)..(159): n is a, c, g, or t
  misc_feature (177)..(177): n is a, c, g, or t
  misc_feature (217)..(217): n is a, c, g, or t
  misc_feature (229)..(229): n is a, c, g, or t
  misc_feature (272)..(272): n is a, c, g, or t
  misc_feature (280)..(327): n is a, c, g, or t

SEQ ID NO: 109083 - DNA, 1007 bp, Homo Sapiens; identical to SEQ ID NO: 75779

SEQ ID NO: 109084 - DNA, 1936 bp, Homo Sapiens; identical to SEQ ID NO: 75785

SEQ ID NO: 109085 - DNA, 1403 bp, Homo Sapiens; identical to SEQ ID NO: 75786
  misc_feature (40)..(40): n is a, c, g, or t
  misc_feature (1104)..(1207): n is a, c, g, or t
  misc_feature (1241)..(1242): n is a, c, g, or t
  misc_feature (1301)..(1339): n is a, c, g, or t

SEQ ID NO: 109086 - DNA, 1461 bp, Homo Sapiens; identical to SEQ ID NO: 75787

SEQ ID NO: 109087 - DNA, 1435 bp, Homo Sapiens; identical to SEQ ID NO: 75788
  misc_feature (1160)..(1160): n is a, c, g, or t
  misc_feature (1168)..(1168): n is a, c, g, or t
  misc_feature (1300)..(1300): n is a, c, g, or t
  misc_feature (1324)..(1324): n is a, c, g, or t

SEQ ID NO: 109088 - DNA, 1450 bp, Homo Sapiens; identical to SEQ ID NO: 75789

SEQ ID NO: 109089 - DNA, 383 bp, Homo Sapiens; identical to SEQ ID NO: 75790

SEQ ID NO: 109090 - DNA, 1375 bp, Homo Sapiens; identical to SEQ ID NO: 75800
  misc_feature (1335)..(1335): n is a, c, g, or t

SEQ ID NO: 109091 - DNA, 1417 bp, Homo Sapiens; identical to SEQ ID NO: 75801
  misc_feature (51)..(51): n is a, c, g, or t
  misc_feature (53)..(53): n is a, c, g, or t
  misc_feature (210)..(210): n is a, c, g, or t
  misc_feature (242)..(242): n is a, c, g, or t

SEQ ID NO: 109092 - DNA, 456 bp, Homo Sapiens; identical to SEQ ID NO: 75802
  misc_feature (347)..(400): n is a, c, g, or t
  misc_feature (437)..(437): n is a, c, g, or t

SEQ ID NO: 109093 - DNA, 470 bp, Homo Sapiens; identical to SEQ ID NO: 75803

SEQ ID NO: 109094 - DNA, 1119 bp, Homo Sapiens; identical to SEQ ID NO: 75804
  misc_feature (615)..(616): n is a, c, g, or t
  misc_feature (697)..(872): n is a, c, g, or t
  misc_feature (888)..(902): n is a, c, g, or t

SEQ ID NO: 109095 - DNA, 948 bp, Homo Sapiens; identical to SEQ ID NO: 75805

SEQ ID NO: 109096 - DNA, 1700 bp, Homo Sapiens; identical to SEQ ID NO: 75808
  misc_feature (1470)..(1470): n is a, c, g, or t
  misc_feature (1477)..(1477): n is a, c, g, or t

SEQ ID NO: 109097 - DNA, 896 bp, Homo Sapiens; identical to SEQ ID NO: 75809

SEQ ID NO: 109098 - DNA, 791 bp, Homo Sapiens; identical to SEQ ID NO: 75810

SEQ ID NO: 109099 - DNA, 1390 bp, Homo Sapiens; identical to SEQ ID NO: 75821
  misc_feature (79)..(113): n is a, c, g, or t
  misc_feature (1205)..(1223): n is a, c, g, or t

SEQ ID NO: 109100 - DNA, 780 bp, Homo Sapiens; identical to SEQ ID NO: 75822

SEQ ID NO: 109101 - DNA, 724 bp, Homo Sapiens; identical to SEQ ID NO: 75823

SEQ ID NO: 109102 - DNA, 644 bp, Homo Sapiens; identical to SEQ ID NO: 75824
  misc_feature (158)..(158): n is a, c, g, or t

SEQ ID NO: 109103 - DNA, 991 bp, Homo Sapiens; identical to SEQ ID NO: 75825
  misc_feature (49)..(49): n is a, c, g, or t
  misc_feature (98)..(98): n is a, c, g, or t
  misc_feature (110)..(110): n is a, c, g, or t
  misc_feature (197)..(197): n is a, c, g, or t
  misc_feature (203)..(203): n is a, c, g, or t
  misc_feature (248)..(248): n is a, c, g, or t
  misc_feature (251)..(251): n is a, c, g, or t
  misc_feature (254)..(254): n is a, c, g, or t
  misc_feature (351)..(351): n is a, c, g, or t
  misc_feature (363)..(363): n is a, c, g, or t
  misc_feature (368)..(405): n is a, c, g, or t
  misc_feature (572)..(572): n is a, c, g, or t

SEQ ID NO: 109104 - DNA, 1528 bp, Homo Sapiens; identical to SEQ ID NO: 75826

SEQ ID NO: 109105 - DNA, 908 bp, Homo Sapiens; identical to SEQ ID NO: 75831

SEQ ID NO: 109106 - DNA, 896 bp, Homo Sapiens; identical to SEQ ID NO: 75832

SEQ ID NO: 109107 - DNA, 423 bp, Homo Sapiens; identical to SEQ ID NO: 75839

SEQ ID NO: 109108 - DNA, 1981 bp, Homo Sapiens; identical to SEQ ID NO: 75840
  misc_feature (1720)..(1845): n is a, c, g, or t
  misc_feature (1856)..(1868): n is a, c, g, or t
  misc_feature (1909)..(1929): n is a, c, g, or t

SEQ ID NO: 109109 - DNA, 1171 bp, Homo Sapiens; identical to SEQ ID NO: 75854
  misc_feature (888)..(947): n is a, c, g, or t

SEQ ID NO: 109110 - DNA, 836 bp, Homo Sapiens; identical to SEQ ID NO: 75855
  misc_feature (408)..(436): n is a, c, g, or t

SEQ ID NO: 109111 - DNA, 1198 bp, Homo Sapiens; identical to SEQ ID NO: 75856
  misc_feature (91)..(91): n is a, c, g, or t
  misc_feature (117)..(118): n is a, c, g, or t
  misc_feature (127)..(127): n is a, c, g, or t
  misc_feature (156)..(156): n is a, c, g, or t
  misc_feature (159)..(159): n is a, c, g, or t
  misc_feature (171)..(171): n is a, c, g, or t
  misc_feature (284)..(284): n is a, c, g, or t

SEQ ID NO: 109112 - DNA, 899 bp, Homo Sapiens; identical to SEQ ID NO: 75857
  misc_feature (79)..(80): n is a, c, g, or t
  misc_feature (86)..(86): n is a, c, g, or t
  misc_feature (89)..(89): n is a, c, g, or t
  misc_feature (91)..(91): n is a, c, g, or t
  misc_feature (247)..(247): n is a, c, g, or t
  misc_feature (402)..(402): n is a, c, g, or t
  misc_feature (459)..(518): n is a, c, g, or t
  misc_feature (555)..(555): n is a, c, g, or t

SEQ ID NO: 109113 - DNA, 631 bp, Homo Sapiens; identical to SEQ ID NO: 75860
  misc_feature (245)..(245): n is a, c, g, or t
  misc_feature (289)..(289): n is a, c, g, or t
  misc_feature (511)..(511): n is a, c, g, or t
  misc_feature (523)..(523): n is a, c, g, or t

SEQ ID NO: 109114 - DNA, 3749 bp, Homo Sapiens; identical to SEQ ID NO: 75861

SEQ ID NO: 109115 - DNA, 1058 bp, Homo Sapiens; identical to SEQ ID NO: 75864

SEQ ID NO: 109116 - DNA, 1078 bp, Homo Sapiens; identical to SEQ ID NO: 75865

SEQ ID NO: 109117 - DNA, 882 bp, Homo Sapiens; identical to SEQ ID NO: 75866

SEQ ID NO: 109118 - DNA, 1706 bp, Homo Sapiens; identical to SEQ ID NO: 75867

SEQ ID NO: 109119 - DNA, 258 bp, Homo Sapiens; identical to SEQ ID NO: 75868

SEQ ID NO: 109120 - DNA, 560 bp, Homo Sapiens; identical to SEQ ID NO: 75870
  misc_feature (411)..(411): n is a, c, g, or t

SEQ ID NO: 109121 - DNA, 1423 bp, Homo Sapiens; identical to SEQ ID NO: 75871

SEQ ID NO: 109122 - DNA, 1533 bp, Homo Sapiens; identical to SEQ ID NO: 75872

SEQ ID NO: 109123 - DNA, 822 bp, Homo Sapiens; identical to SEQ ID NO: 75873

SEQ ID NO: 109124 - DNA, 1393 bp, Homo Sapiens; identical to SEQ ID NO: 75874

SEQ ID NO: 109125 - DNA, 664 bp, Homo Sapiens; identical to SEQ ID NO: 75875

SEQ ID NO: 109126 - DNA, 1143 bp, Homo Sapiens; identical to SEQ ID NO: 75884
  misc_feature (134)..(159): n is a, c, g, or t

SEQ ID NO: 109127 - DNA, 847 bp, Homo Sapiens; identical to SEQ ID NO: 75885
  misc_feature (485)..(490): n is a, c, g, or t
  misc_feature (492)..(551): n is a, c, g, or t
  misc_feature (554)..(582): n is a, c, g, or t

SEQ ID NO: 109128 - DNA, 1962 bp, Homo Sapiens; identical to SEQ ID NO: 75888

SEQ ID NO: 109129 - DNA, 758 bp, Homo Sapiens; identical to SEQ ID NO: 75889
  misc_feature (74)..(74): n is a, c, g, or t
  misc_feature (121)..(121): n is a, c, g, or t

SEQ ID NO: 109130 - DNA, 1054 bp, Homo Sapiens; identical to SEQ ID NO: 75890
  misc_feature (158)..(158): n is a, c, g, or t
  misc_feature (196)..(196): n is a, c, g, or t
  misc_feature (201)..(201): n is a, c, g, or t
  misc_feature (228)..(228): n is a, c, g, or t
  misc_feature (946)..(1012): n is a, c, g, or t

SEQ ID NO: 109131 - DNA, 657 bp, Homo Sapiens; identical to SEQ ID NO: 75904

SEQ ID NO: 109132 - DNA, 812 bp, Homo Sapiens; identical to SEQ ID NO: 75905

SEQ ID NO: 109133 - DNA, 1403 bp, Homo Sapiens; identical to SEQ ID NO: 75908
  misc_feature (1344)..(1362): n is a, c, g, or t
  misc_feature (1383)..(1383): n is a, c, g, or t

SEQ ID NO: 109134 - DNA, 628 bp, Homo Sapiens; identical to SEQ ID NO: 75909

SEQ ID NO: 109135 - DNA, 999 bp, Homo Sapiens; identical to SEQ ID NO: 75911
  misc_feature (777)..(840): n is a, c, g, or t

SEQ ID NO: 109136 - DNA, 774 bp, Homo Sapiens; identical to SEQ ID NO: 75912

SEQ ID NO: 109137 - DNA, 1641 bp, Homo Sapiens; identical to SEQ ID NO: 75916
  misc_feature (1228)..(1528): n is a, c, g, or t

SEQ ID NO: 109138 - DNA, 935 bp, Homo Sapiens; identical to SEQ ID NO: 75917

SEQ ID NO: 109139 - DNA, 1419 bp, Homo Sapiens; identical to SEQ ID NO: 75921
  misc_feature (111)..(111): n is a, c, g, or t
  misc_feature (698)..(730): n is a, c, g, or t
  misc_feature (732)..(780): n is a, c, g, or t
  misc_feature (836)..(845): n is a, c, g, or t
  misc_feature (885)..(900): n is a, c, g, or t
  misc_feature (942)..(950): n is a, c, g, or t
  misc_feature (991)..(1002): n is a, c, g, or t
  misc_feature (1193)..(1193): n is a, c, g, or t
  misc_feature (1387)..(1387): n is a, c, g, or t

SEQ ID NO: 109140 - DNA, 2466 bp, Homo Sapiens; identical to SEQ ID NO: 75922

SEQ ID NO: 109141 - DNA, 895 bp, Homo Sapiens; identical to SEQ ID NO: 75923

SEQ ID NO: 109142 - DNA, 837 bp, Homo Sapiens; identical to SEQ ID NO: 75928

SEQ ID NO: 109143 - DNA, 454 bp, Homo Sapiens; identical to SEQ ID NO: 75929

SEQ ID NO: 109144 - DNA, 739 bp, Homo Sapiens; identical to SEQ ID NO: 75932

SEQ ID NO: 109145 - DNA, 948 bp, Homo Sapiens; identical to SEQ ID NO: 75933
  misc_feature (157)..(157): n is a, c, g, or t

SEQ ID NO: 109146 - DNA, 1310 bp, Homo Sapiens; identical to SEQ ID NO: 75934
  misc_feature (944)..(1036): n is a, c, g, or t
  misc_feature (1059)..(1168): n is a, c, g, or t

SEQ ID NO: 109147 - DNA, 336 bp, Homo Sapiens; identical to SEQ ID NO: 75937

SEQ ID NO: 109148 - DNA, 908 bp, Homo Sapiens; identical to SEQ ID NO: 75938

SEQ ID NO: 109149 - DNA, 1202 bp, Homo Sapiens; identical to SEQ ID NO: 75940
  misc_feature (40)..(40): n is a, c, g, or t
  misc_feature (43)..(77): n is a, c, g, or t

SEQ ID NO: 109150 - DNA, 1123 bp, Homo Sapiens; identical to SEQ ID NO: 75941

SEQ ID NO: 109151 - DNA, 570 bp, Homo Sapiens; identical to SEQ ID NO: 75945

SEQ ID NO: 109152 - DNA, 1048 bp, Homo Sapiens; identical to SEQ ID NO: 75946
  misc_feature (530)..(605): n is a, c, g, or t

SEQ ID NO: 109153 - DNA, 419 bp, Homo Sapiens; identical to SEQ ID NO: 75947

SEQ ID NO: 109154 - DNA, 553 bp, Homo Sapiens; identical to SEQ ID NO: 75948
  misc_feature (34)..(34): n is a, c, g, or t
  misc_feature (112)..(112): n is a, c, g, or t

SEQ ID NO: 109155 - DNA, 863 bp, Homo Sapiens; identical to SEQ ID NO: 75950
  misc_feature (79)..(113): n is a, c, g, or t

SEQ ID NO: 109156 - DNA, 1195 bp, Homo Sapiens; identical to SEQ ID NO: 75951
  misc_feature (44)..(78): n is a, c, g, or t

SEQ ID NO: 109157 - DNA, 1308 bp, Homo Sapiens; identical to SEQ ID NO: 75952
  misc_feature (69)..(103): n is a, c, g, or t
  misc_feature (865)..(873): n is a, c, g, or t
  misc_feature (1188)..(1188): n is a, c, g, or t
  misc_feature (1202)..(1202): n is a, c, g, or t

SEQ ID NO: 109158 - DNA, 558 bp, Homo Sapiens; identical to SEQ ID NO: 75954
  misc_feature (95)..(95): n is a, c, g, or t

SEQ ID NO: 109159 - DNA, 671 bp, Homo Sapiens; identical to SEQ ID NO: 75955
  misc_feature (34)..(34): n is a, c, g, or t
  misc_feature (54)..(54): n is a, c, g, or t
  misc_feature (57)..(57): n is a, c, g, or t
  misc_feature (89)..(89): n is a, c, g, or t
  misc_feature (93)..(93): n is a, c, g, or t

SEQ ID NO: 109160 - DNA, 665 bp, Homo Sapiens; identical to SEQ ID NO: 75956

SEQ ID NO: 109161 - DNA, 1533 bp, Homo Sapiens; identical to SEQ ID NO: 75959
  misc_feature (33)..(33): n is a, c, g, or t
  misc_feature (57)..(57): n is a, c, g, or t
  misc_feature (80)..(80): n is a, c, g, or t
  misc_feature (101)..(101): n is a, c, g, or t
  misc_feature (111)..(111): n is a, c, g, or t
  misc_feature (114)..(114): n is a, c, g, or t
  misc_feature (203)..(203): n is a, c, g, or t
  misc_feature (210)..(210): n is a, c, g, or t

SEQ ID NO: 109162 - DNA, 1094 bp, Homo Sapiens; identical to SEQ ID NO: 75960

SEQ ID NO: 109163 - DNA, 961 bp, Homo Sapiens; identical to SEQ ID NO: 75961
  misc_feature (812)..(812): n is a, c, g, or t
  misc_feature (842)..(842): n is a, c, g, or t
  misc_feature (897)..(898): n is a, c, g, or t
  misc_feature (911)..(919): n is a, c, g, or t

SEQ ID NO: 109164 - DNA, 1117 bp, Homo Sapiens; identical to SEQ ID NO: 75963

SEQ ID NO: 109165 - DNA, 508 bp, Homo Sapiens; identical to SEQ ID NO: 75964
  misc_feature (135)..(135): n is a, c, g, or t

SEQ ID NO: 109166 - DNA, 2042 bp, Homo Sapiens; identical to SEQ ID NO: 75965

SEQ ID NO: 109167 - DNA, 847 bp, Homo Sapiens; identical to SEQ ID NO: 75966

SEQ ID NO: 109168 - DNA, 889 bp, Homo Sapiens; identical to SEQ ID NO: 75969

SEQ ID NO: 109169 - DNA, 715 bp, Homo Sapiens; identical to SEQ ID NO: 75970

SEQ ID NO: 109170 - DNA, 448 bp, Homo Sapiens; identical to SEQ ID NO: 75971
  misc_feature (25)..(25): n is a, c, g, or t

SEQ ID NO: 109171 - DNA, 559 bp, Homo Sapiens; identical to SEQ ID NO: 75972

SEQ ID NO: 109172 - DNA, 1303 bp, Homo Sapiens; identical to SEQ ID NO: 75974
  misc_feature (33)..(33): n is a, c, g, or t
  misc_feature (48)..(49): n is a, c, g, or t
  misc_feature (57)..(57): n is a, c, g, or t
  misc_feature (63)..(63): n is a, c, g, or t
  misc_feature (84)..(84): n is a, c, g, or t
  misc_feature (143)..(144): n is a, c, g, or t
  misc_feature (180)..(180): n is a, c, g, or t

SEQ ID NO: 109173 - DNA, 881 bp, Homo Sapiens; identical to SEQ ID NO: 75975
  misc_feature (868)..(868): n is a, c, g, or t

SEQ ID NO: 109174 - DNA, 1039 bp, Homo Sapiens; identical to SEQ ID NO: 75976

SEQ ID NO: 109175 - DNA, 1062 bp, Homo Sapiens; identical to SEQ ID NO: 75977

SEQ ID NO: 109176 - DNA, 967 bp, Homo Sapiens; identical to SEQ ID NO: 75978

SEQ ID NO: 109177 - DNA, 550 bp, Homo Sapiens; identical to SEQ ID NO: 75980

SEQ ID NO: 109178 - DNA, 1248 bp, Homo Sapiens; identical to SEQ ID NO: 75981
  misc_feature (79)..(113): n is a, c, g, or t

SEQ ID NO: 109179 - DNA, 511 bp, Homo Sapiens; identical to SEQ ID NO: 75982

SEQ ID NO: 109180 - DNA, 1215 bp, Homo Sapiens; identical to SEQ ID NO: 75986
  misc_feature (1049)..(1049): n is a, c, g, or t
  misc_feature (1072)..(1072): n is a, c, g, or t
  misc_feature (1098)..(1098): n is a, c, g, or t
  misc_feature (1114)..(1114): n is a, c, g, or t
  misc_feature (1143)..(1143): n is a, c, g, or t
  misc_feature (1168)..(1168): n is a, c, g, or t
  misc_feature (1197)..(1197): n is a, c, g, or t

SEQ ID NO: 109181 - DNA, 1240 bp, Homo Sapiens; identical to SEQ ID NO: 75987

SEQ ID NO: 109182 - DNA, 682 bp, Homo Sapiens; identical to SEQ ID NO: 75993

SEQ ID NO: 109183 - DNA, 918 bp, Homo Sapiens; identical to SEQ ID NO: 75994

SEQ ID NO: 109184 - DNA, 1032 bp, Homo Sapiens; identical to SEQ ID NO: 75998

SEQ ID NO: 109185 - DNA, 1450 bp, Homo Sapiens; identical to SEQ ID NO: 75999

SEQ ID NO: 109186 - DNA, 663 bp, Homo Sapiens; identical to SEQ ID NO: 76001
  misc_feature (524)..(536): n is a, c, g, or t

SEQ ID NO: 109187 - DNA, 1010 bp, Homo Sapiens; identical to SEQ ID NO: 76002
  misc_feature (50)..(59): n is a, c, g, or t
  misc_feature (100)..(134): n is a, c, g, or t

SEQ ID NO: 109188 - DNA, 561 bp, Homo Sapiens; identical to SEQ ID NO: 76003
  misc_feature (499)..(508): n is a, c, g, or t

SEQ ID NO: 109189 - DNA, 790 bp, Homo Sapiens; identical to SEQ ID NO: 76004

SEQ ID NO: 109190 - DNA, 841 bp, Homo Sapiens; identical to SEQ ID NO: 76005

SEQ ID NO: 109191 - DNA, 1130 bp, Homo Sapiens; identical to SEQ ID NO: 76006

SEQ ID NO: 109192 - DNA, 1462 bp, Homo Sapiens; identical to SEQ ID NO: 76007
  misc_feature (1306)..(1306): n is a, c, g, or t

SEQ ID NO: 109193 - DNA, 956 bp, Homo Sapiens; identical to SEQ ID NO: 76008

SEQ ID NO: 109194 - DNA, 1315 bp, Homo Sapiens; identical to SEQ ID NO: 76009
  misc_feature (1275)..(1275): n is a, c, g, or t

SEQ ID NO: 109195 - DNA, 321 bp, Homo Sapiens; identical to SEQ ID NO: 76011
  misc_feature (203)..(253): n is a, c, g, or t

SEQ ID NO: 109196 - DNA, 903 bp, Homo Sapiens; identical to SEQ ID NO: 76012
  misc_feature (62)..(101): n is a, c, g, or t
  misc_feature (302)..(352): n is a, c, g, or t

SEQ ID NO: 109197 - DNA, 2446 bp, Homo Sapiens; identical to SEQ ID NO: 76024
  misc_feature (840)..(875): n is a, c, g, or t
  misc_feature (1809)..(1835): n is a, c, g, or t
  misc_feature (1848)..(1848): n is a, c, g, or t
  misc_feature (1904)..(1904): n is a, c, g, or t
  misc_feature (2181)..(2181): n is a, c, g, or t

SEQ ID NO: 109198 - DNA, 1322 bp, Homo Sapiens; identical to SEQ ID NO: 76025
  misc_feature (562)..(598): n is a, c, g, or t
  misc_feature (604)..(604): n is a, c, g, or t
  misc_feature (834)..(847): n is a, c, g, or t

SEQ ID NO: 109199 - DNA, 716 bp, Homo Sapiens; identical to SEQ ID NO: 76026
  misc_feature (685)..(685): n is a, c, g, or t

SEQ ID NO: 109200 - DNA, 1007 bp, Homo Sapiens; identical to SEQ ID NO: 76027

SEQ ID NO: 109201 - DNA, 601 bp, Homo Sapiens; identical to SEQ ID NO: 76028

SEQ ID NO: 109202 - DNA, 1641 bp, Homo Sapiens; identical to SEQ ID NO: 76033
  misc_feature (159)..(210): n is a, c, g, or t

SEQ ID NO: 109203 - DNA, 425 bp, Homo Sapiens; identical to SEQ ID NO: 76034
  misc_feature (252)..(252): n is a, c, g, or t

SEQ ID NO: 109204 - DNA, 1786 bp, Homo Sapiens; identical to SEQ ID NO: 76037
  misc_feature (27)..(27): n is a, c, g, or t
  misc_feature (130)..(130): n is a, c, g, or t
  misc_feature (151)..(151): n is a, c, g, or t
  misc_feature (153)..(153): n is a, c, g, or t
  misc_feature (178)..(178): n is a, c, g, or t
  misc_feature (180)..(180): n is a, c, g, or t
  misc_feature (190)..(190): n is a, c, g, or t
  misc_feature (196)..(197): n is a, c, g, or t
  misc_feature (207)..(207): n is a, c, g, or t
  misc_feature (261)..(261): n is a, c, g, or t
  misc_feature (284)..(285): n is a, c, g, or t
  misc_feature (987)..(987): n is a, c, g, or t
  misc_feature (1000)..(1000): n is a, c, g, or t
  misc_feature (1003)..(1003): n is a, c, g, or t
  misc_feature (1037)..(1037): n is a, c, g, or t
  misc_feature (1117)..(1117): n is a, c, g, or t
  misc_feature (1177)..(1177): n is a, c, g, or t
  misc_feature (1216)..(1254): n is a, c, g, or t
  misc_feature (1292)..(1309): n is a, c, g, or t
  misc_feature (1319)..(1319): n is a, c, g, or t
  misc_feature (1340)..(1348): n is a, c, g, or t
  misc_feature (1401)..(1401): n is a, c, g, or t
  misc_feature (1406)..(1406): n is a, c, g, or t
  misc_feature (1411)..(1411): n is a, c, g, or t
  misc_feature (1413)..(1421): n is a, c, g, or t
  misc_feature (1425)..(1434): n is a, c, g, or t
  misc_feature (1448)..(1485): n is a, c, g, or t
  misc_feature (1529)..(1533): n is a, c, g, or t
  misc_feature (1535)..(1535): n is a, c, g, or t
  misc_feature (1592)..(1592): n is a, c, g, or t
  misc_feature (1677)..(1677): n is a, c, g, or t

SEQ ID NO: 109205 - DNA, 1078 bp, Homo Sapiens; identical to SEQ ID NO: 76038

SEQ ID NO: 109206 - DNA, 683 bp, Homo Sapiens; identical to SEQ ID NO: 76040
  misc_feature (355)..(398): n is a, c, g, or t
  misc_feature (550)..(563): n is a, c, g, or t

SEQ ID NO: 109207 - DNA, 514 bp, Homo Sapiens; identical to SEQ ID NO: 76041
  misc_feature (360)..(398): n is a, c, g, or t

SEQ ID NO: 109208 - DNA, 526 bp, Homo Sapiens; identical to SEQ ID NO: 76042
  misc_feature (354)..(396): n is a, c, g, or t

SEQ ID NO: 109209 - DNA, 807 bp, Homo Sapiens; identical to SEQ ID NO: 76043

SEQ ID NO: 109210 - DNA, 478 bp, Homo Sapiens; identical to SEQ ID NO: 76044
  misc_feature (355)..(398): n is a, c, g, or t

SEQ ID NO: 109211 - DNA, 475 bp, Homo Sapiens; identical to SEQ ID NO: 76051
  misc_feature (475)..(475): n is a, c, g, or t

SEQ ID NO: 109212 - DNA, 1889 bp, Homo Sapiens; identical to SEQ ID NO: 76052
  misc_feature (638)..(668): n is a, c, g, or t

SEQ ID NO: 109213 - DNA, 1286 bp, Homo Sapiens; identical to SEQ ID NO: 76053

SEQ ID NO: 109214 - DNA, 120 bp, Homo Sapiens; identical to SEQ ID NO: 76054

SEQ ID NO: 109215 - DNA, 672 bp, Homo Sapiens; identical to SEQ ID NO: 76057

SEQ ID NO: 109216 - DNA, 805 bp, Homo Sapiens; identical to SEQ ID NO: 76058

SEQ ID NO: 109217 - DNA, 1401 bp, Homo Sapiens; identical to SEQ ID NO: 76062
  misc_feature (63)..(63): n is a, c, g, or t
  misc_feature (97)..(97): n is a, c, g, or t
  misc_feature (125)..(125): n is a, c, g, or t
  misc_feature (156)..(156): n is a, c, g, or t
  misc_feature (1300)..(1308): n is a, c, g, or t
  misc_feature (1338)..(1351): n is a, c, g, or t

SEQ ID NO: 109218 - DNA, 908 bp, Homo Sapiens; identical to SEQ ID NO: 76063

SEQ ID NO: 109219 - DNA, 2852 bp, Homo Sapiens; identical to SEQ ID NO: 76069
  misc_feature (2318)..(2381): n is a, c, g, or t

SEQ ID NO: 109220 - DNA, 1028 bp, Homo Sapiens; identical to SEQ ID NO: 76070
  misc_feature (241)..(241): n is a, c, g, or t
  misc_feature (256)..(256): n is a, c, g, or t
  misc_feature (513)..(553): n is a, c, g, or t

SEQ ID NO: 109221 - DNA, 426 bp, Homo Sapiens; identical to SEQ ID NO: 76071

SEQ ID NO: 109222 - DNA, 1046 bp, Homo Sapiens; identical to SEQ ID NO: 76077
  misc_feature (57)..(57): n is a, c, g, or t
  misc_feature (92)..(92): n is a, c, g, or t
  misc_feature (550)..(571): n is a, c, g, or t

SEQ ID NO: 109223 - DNA, 1287 bp, Homo Sapiens; identical to SEQ ID NO: 76078

SEQ ID NO: 109224 - DNA, 2190 bp, Homo Sapiens; identical to SEQ ID NO: 76079

SEQ ID NO: 109225 - DNA, 337 bp, Homo Sapiens; identical to SEQ ID NO: 76080

SEQ ID NO: 109226 - DNA, 786 bp, Homo Sapiens; identical to SEQ ID NO: 76081

SEQ ID NO: 109227 - DNA, 1164 bp, Homo Sapiens; identical to SEQ ID NO: 76082

SEQ ID NO: 109228 - DNA, 1160 bp, Homo Sapiens; identical to SEQ ID NO: 76083

SEQ ID NO: 109229 - DNA, 898 bp, Homo Sapiens; identical to SEQ ID NO: 76088
  misc_feature (848)..(848): n is a, c, g, or t
  misc_feature (879)..(879): n is a, c, g, or t

SEQ ID NO: 109230 - DNA, 3009 bp, Homo Sapiens; identical to SEQ ID NO: 76089
  misc_feature (744)..(766): n is a, c, g, or t
  misc_feature (1303)..(1315): n is a, c, g, or t
  misc_feature (1953)..(1975): n is a, c, g, or t

SEQ ID NO: 109231 - DNA, 664 bp, Homo Sapiens; identical to SEQ ID NO: 76090
  misc_feature (45)..(45): n is a, c, g, or t
  misc_feature (244)..(244): n is a, c, g, or t

SEQ ID NO: 109232 - DNA, 1199 bp, Homo Sapiens; identical to SEQ ID NO: 76091
  misc_feature (686)..(700): n is a, c, g, or t
  misc_feature (766)..(823): n is a, c, g, or t
  misc_feature (924)..(934): n is a, c, g, or t
  misc_feature (948)..(966): n is a, c, g, or t

SEQ ID NO: 109233 - DNA, 1958 bp, Homo Sapiens; identical to SEQ ID NO: 76093

SEQ ID NO: 109234 - DNA, 1041 bp, Homo Sapiens; identical to SEQ ID NO: 76094
  misc_feature (85)..(85): n is a, c, g, or t
  misc_feature (92)..(93): n is a, c, g, or t
  misc_feature (167)..(167): n is a, c, g, or t
  misc_feature (179)..(179): n is a, c, g, or t
  misc_feature (223)..(223): n is a, c, g, or t
  misc_feature (225)..(225): n is a, c, g, or t
  misc_feature (233)..(233): n is a, c, g, or t
  misc_feature (273)..(273): n is a, c, g, or t
  misc_feature (292)..(292): n is a, c, g, or t
  misc_feature (613)..(699): n is a, c, g, or t

SEQ ID NO: 109235 - DNA, 787 bp, Homo Sapiens; identical to SEQ ID NO: 76100

SEQ ID NO: 109236 - DNA, 381 bp, Homo Sapiens; identical to SEQ ID NO: 76101

SEQ ID NO: 109237 - DNA, 1725 bp, Homo Sapiens; identical to SEQ ID NO: 76109

SEQ ID NO: 109238 - DNA, 986 bp, Homo Sapiens; identical to SEQ ID NO: 76110

SEQ ID NO: 109239 - DNA, 1429 bp, Homo Sapiens; identical to SEQ ID NO: 76114

SEQ ID NO: 109240 - DNA, 1495 bp, Homo Sapiens; identical to SEQ ID NO: 76115
  misc_feature (1423)..(1423): n is a, c, g, or t
  misc_feature (1449)..(1449): n is a, c, g, or t

SEQ ID NO: 109241 - DNA, 867 bp, Homo Sapiens; identical to SEQ ID NO: 76116

SEQ ID NO: 109242 - DNA, 1500 bp, Homo Sapiens; identical to SEQ ID NO: 76117
  misc_feature (65)..(126): n is a, c, g, or t

SEQ ID NO: 109243 - DNA, 882 bp, Homo Sapiens; identical to SEQ ID NO: 76118

SEQ ID NO: 109244 - DNA, 882 bp, Homo Sapiens; identical to SEQ ID NO: 76119
  misc_feature (737)..(737): n is a, c, g, or t
  misc_feature (850)..(850): n is a, c, g, or t

SEQ ID NO: 109245 - DNA, 1565 bp, Homo Sapiens; identical to SEQ ID NO: 76120
  misc_feature (1237)..(1238): n is a, c, g, or t

SEQ ID NO: 109246 - DNA, 1284 bp, Homo Sapiens; identical to SEQ ID NO: 76123

SEQ ID NO: 109247 - DNA, 840 bp, Homo Sapiens; identical to SEQ ID NO: 76124

SEQ ID NO: 109248 - DNA, 1846 bp, Homo Sapiens; identical to SEQ ID NO: 76129

SEQ ID NO: 109249 - DNA, 859 bp, Homo Sapiens; identical to SEQ ID NO: 76130

SEQ ID NO: 109250 - DNA, 2150 bp, Homo Sapiens; identical to SEQ ID NO: 76131

SEQ ID NO: 109251 - DNA, 901 bp, Homo Sapiens; identical to SEQ ID NO: 76132
  misc_feature (250)..(281): n is a, c, g, or t

SEQ ID NO: 109252 - DNA, 534 bp, Homo Sapiens; identical to SEQ ID NO: 76133

SEQ ID NO: 109253 - DNA, 152 bp, Homo Sapiens; identical to SEQ ID NO: 76134

SEQ ID NO: 109254 - DNA, 1491 bp, Homo Sapiens; identical to SEQ ID NO: 76136
  misc_feature (753)..(753): n is a, c, g, or t

SEQ ID NO: 109255 - DNA, 1570 bp, Homo Sapiens; identical to SEQ ID NO: 76137

SEQ ID NO: 109256 - DNA, 1017 bp, Homo Sapiens; identical to SEQ ID NO: 76138
  misc_feature (193)..(193): n is a, c, g, or t

SEQ ID NO: 109257 - DNA, 1093 bp, Homo Sapiens; identical to SEQ ID NO: 76146
  misc_feature (893)..(924): n is a, c, g, or t

SEQ ID NO: 109258 - DNA, 1711 bp, Homo Sapiens; identical to SEQ ID NO: 76147
  misc_feature (741)..(741): n is a, c, g, or t
  misc_feature (836)..(836): n is a, c, g, or t
  misc_feature (957)..(957): n is a, c, g, or t

SEQ ID NO: 109259 - DNA, 1897 bp, Homo Sapiens; identical to SEQ ID NO: 76148

SEQ ID NO: 109260 - DNA, 902 bp, Homo Sapiens; identical to SEQ ID NO: 76149

SEQ ID NO: 109261 - DNA, 1509 bp, Homo Sapiens; identical to SEQ ID NO: 76151

SEQ ID NO: 109262 - DNA, 874 bp, Homo Sapiens; identical to SEQ ID NO: 76152

SEQ ID NO: 109263 - DNA, 945 bp, Homo Sapiens; identical to SEQ ID NO: 76153

SEQ ID NO: 109264 - DNA, 866 bp, Homo Sapiens; identical to SEQ ID NO: 76154
  misc_feature (706)..(718): n is a, c, g, or t

SEQ ID NO: 109265 - DNA, 1250 bp, Homo Sapiens; identical to SEQ ID NO: 76155

SEQ ID NO: 109266 - DNA, 967 bp, Homo Sapiens; identical to SEQ ID NO: 76156

SEQ ID NO: 109267 - DNA, 983 bp, Homo Sapiens; identical to SEQ ID NO: 76157

SEQ ID NO: 109268 - DNA, 1595 bp, Homo Sapiens; identical to SEQ ID NO: 76163
  misc_feature (1532)..(1552): n is a, c, g, or t

SEQ ID NO: 109269 - DNA, 818 bp, Homo Sapiens; identical to SEQ ID NO: 76164

SEQ ID NO: 109270 - DNA, 974 bp, Homo Sapiens; identical to SEQ ID NO: 76168
  misc_feature (75)..(109): n is a, c, g, or t

SEQ ID NO: 109271 - DNA, 1719 bp, Homo Sapiens; identical to SEQ ID NO: 76169
  misc_feature (1699)..(1699): n is a, c, g, or t

SEQ ID NO: 109272 - DNA, 1177 bp, Homo Sapiens; identical to SEQ ID NO: 76170
  misc_feature (472)..(569): n is a, c, g, or t
  misc_feature (610)..(693): n is a, c, g, or t
  misc_feature (929)..(991): n is a, c, g, or t

SEQ ID NO: 109273 - DNA, 1218 bp, Homo Sapiens; identical to SEQ ID NO: 76177
  misc_feature (50)..(103): n is a, c, g, or t
  misc_feature (1058)..(1110): n is a, c, g, or t
  misc_feature (1158)..(1172): n is a, c, g, or t

SEQ ID NO: 109274 - DNA, 1726 bp, Homo Sapiens; identical to SEQ ID NO: 76178
  misc_feature (1145)..(1200): n is a, c, g, or t
  misc_feature (1653)..(1653): n is a, c, g, or t

SEQ ID NO: 109275 - DNA, 1104 bp, Homo Sapiens; identical to SEQ ID NO: 76183
  misc_feature (100)..(100): n is a, c, g, or t
  misc_feature (905)..(913): n is a, c, g, or t

SEQ ID NO: 109276 - DNA, 777 bp, Homo Sapiens; identical to SEQ ID NO: 76184

SEQ ID NO: 109277 - DNA, 550 bp, Homo Sapiens; identical to SEQ ID NO: 76185

SEQ ID NO: 109278 - DNA, 648 bp, Homo Sapiens; identical to SEQ ID NO: 76186

SEQ ID NO: 109279 - DNA, 1312 bp, Homo Sapiens; identical to SEQ ID NO: 76187

SEQ ID NO: 109280 - DNA, 1592 bp, Homo Sapiens; identical to SEQ ID NO: 76192

SEQ ID NO: 109281 - DNA, 509 bp, Homo Sapiens; identical to SEQ ID NO: 76193

SEQ ID NO: 109282 - DNA, 1673 bp, Homo Sapiens; identical to SEQ ID NO: 76194

SEQ ID NO: 109283 - DNA, 1110 bp, Homo Sapiens; identical to SEQ ID NO: 76195
  misc_feature (760)..(812): n is a, c, g, or t

SEQ ID NO: 109284 - DNA, 690 bp, Homo Sapiens; identical to SEQ ID NO: 76201

SEQ ID NO: 109285 - DNA, 1289 bp, Homo Sapiens; identical to SEQ ID NO: 76202

SEQ ID NO: 109286 - DNA, 1114 bp, Homo Sapiens; identical to SEQ ID NO: 76203

SEQ ID NO: 109287 - DNA, 1318 bp, Homo Sapiens; identical to SEQ ID NO: 76204

SEQ ID NO: 109288 - DNA, 689 bp, Homo Sapiens; identical to SEQ ID NO: 76205

SEQ ID NO: 109289 - DNA, 671 bp, Homo Sapiens; identical to SEQ ID NO: 76206

SEQ ID NO: 109290 - DNA, 3088 bp, Homo Sapiens; identical to SEQ ID NO: 76207
  misc_feature (1939)..(1973): n is a, c, g, or t
  misc_feature (3070)..(3070): n is a, c, g, or t

SEQ ID NO: 109291 - DNA, 960 bp, Homo Sapiens; identical to SEQ ID NO: 76208

SEQ ID NO: 109292 - DNA, 1098 bp, Homo Sapiens; identical to SEQ ID NO: 76210
  misc_feature (124)..(201): n is a, c, g, or t
  misc_feature (952)..(960): n is a, c, g, or t

SEQ ID NO: 109293 - DNA, 1271 bp, Homo Sapiens; identical to SEQ ID NO: 76211

SEQ ID NO: 109294 - DNA, 1651 bp, Homo Sapiens; identical to SEQ ID NO: 76213

SEQ ID NO: 109295 - DNA, 309 bp, Homo Sapiens; identical to SEQ ID NO: 76214

SEQ ID NO: 109296 - DNA, 1137 bp, Homo Sapiens; identical to SEQ ID NO: 76215
  misc_feature (982)..(982): n is a, c, g, or t

SEQ ID NO: 109297 - DNA, 365 bp, Homo Sapiens; identical to SEQ ID NO: 76216

SEQ ID NO: 109298 - DNA, 1451 bp, Homo Sapiens; identical to SEQ ID NO: 76217

SEQ ID NO: 109299 - DNA, 852 bp, Homo Sapiens; identical to SEQ ID NO: 76218

SEQ ID NO: 109300 - DNA, 1644 bp, Homo Sapiens; identical to SEQ ID NO: 76219
  misc_feature (1421)..(1421): n is a, c, g, or t

SEQ ID NO: 109301 - DNA, 1290 bp, Homo Sapiens; identical to SEQ ID NO: 76220

SEQ ID NO: 109302 - DNA, 1103 bp, Homo Sapiens; identical to SEQ ID NO: 76221

SEQ ID NO: 109303 - DNA, 812 bp, Homo Sapiens; identical to SEQ ID NO: 76222

SEQ ID NO: 109304 - DNA, 1551 bp, Homo Sapiens; identical to SEQ ID NO: 76223
  misc_feature (42)..(42): n is a, c, g, or t
  misc_feature (69)..(69): n is a, c, g, or t
  misc_feature (112)..(112): n is a, c, g, or t
  misc_feature (179)..(179): n is a, c, g, or t

SEQ ID NO: 109305 - DNA, 688 bp, Homo Sapiens; identical to SEQ ID NO: 76224
  misc_feature (17)..(17): n is a, c, g, or t

SEQ ID NO: 109306 - DNA, 678 bp, Homo Sapiens; identical to SEQ ID NO: 76232
  misc_feature (546)..(569): n is a, c, g, or t

SEQ ID NO: 109307 - DNA, 1118 bp, Homo Sapiens; identical to SEQ ID NO: 76233
  misc_feature (243)..(243): n is a, c, g, or t
  misc_feature (245)..(245): n is a, c, g, or t
  misc_feature (917)..(940): n is a, c, g, or t
  misc_feature (1050)..(1069): n is a, c, g, or t

SEQ ID NO: 109308 - DNA, 508 bp, Homo Sapiens; identical to SEQ ID NO: 76235
  misc_feature (96)..(106): n is a, c, g, or t

SEQ ID NO: 109309 - DNA, 1425 bp, Homo Sapiens; identical to SEQ ID NO: 76236

SEQ ID NO: 109310 - DNA, 1903 bp, Homo Sapiens; identical to SEQ ID NO: 76237
  misc_feature (1151)..(1152): n is a, c, g, or t

SEQ ID NO: 109311 - DNA, 778 bp, Homo Sapiens; identical to SEQ ID NO: 76238
  misc_feature (27)..(27): n is a, c, g, or t
  misc_feature (38)..(38): n is a, c, g, or t
  misc_feature (193)..(252): n is a, c, g, or t
  misc_feature (710)..(710): n is a, c, g, or t
  misc_feature (730)..(730): n is a, c, g, or t

SEQ ID NO: 109312 - DNA, 1048 bp, Homo Sapiens; identical to SEQ ID NO: 76239

SEQ ID NO: 109313 - DNA, 563 bp, Homo Sapiens; identical to SEQ ID NO: 76240

SEQ ID NO: 109314 - DNA, 945 bp, Homo Sapiens; identical to SEQ ID NO: 76242

SEQ ID NO: 109315 - DNA, 377 bp, Homo Sapiens; identical to SEQ ID NO: 76243

SEQ ID NO: 109316 - DNA, 1474 bp, Homo Sapiens; identical to SEQ ID NO: 76247

SEQ ID NO: 109317 - DNA, 396 bp, Homo Sapiens; identical to SEQ ID NO: 76248

SEQ ID NO: 109318 - DNA, 1110 bp, Homo Sapiens; identical to SEQ ID NO: 76249
  misc_feature (853)..(853): n is a, c, g, or t

SEQ ID NO: 109319 - DNA, 930 bp, Homo Sapiens; identical to SEQ ID NO: 76259
  misc_feature (75)..(178): n is a, c, g, or t
  misc_feature (289)..(297): n is a, c, g, or t

SEQ ID NO: 109320 - DNA, 485 bp, Homo Sapiens; identical to SEQ ID NO: 76260
  misc_feature (190)..(235): n is a, c, g, or t
  misc_feature (309)..(411): n is a, c, g, or t

SEQ ID NO: 109321 - DNA, 2138 bp, Homo Sapiens; identical to SEQ ID NO: 76262

SEQ ID NO: 109322 - DNA, 508 bp, Homo Sapiens; identical to SEQ ID NO: 76263

SEQ ID NO: 109323 - DNA, 997 bp, Homo Sapiens; identical to SEQ ID NO: 76264
  misc_feature (773)..(822): n is a, c, g, or t

SEQ ID NO: 109324 - DNA, 896 bp, Homo Sapiens; identical to SEQ ID NO: 76265

SEQ ID NO: 109325 - DNA, 1239 bp, Homo Sapiens; identical to SEQ ID NO: 76268

SEQ ID NO: 109326 - DNA, 1043 bp, Homo Sapiens; identical to SEQ ID NO: 76269
  misc_feature (801)..(801): n is a, c, g, or t

SEQ ID NO: 109327 - DNA, 1597 bp, Homo Sapiens; identical to SEQ ID NO: 76270

SEQ ID NO: 109328 - DNA, 1294 bp, Homo Sapiens; identical to SEQ ID NO: 76271

SEQ ID NO: 109329 - DNA, 1015 bp, Homo Sapiens; identical to SEQ ID NO: 76272

SEQ ID NO: 109330 - DNA, 1181 bp, Homo Sapiens; identical to SEQ ID NO: 76273

SEQ ID NO: 109331 - DNA, 1005 bp, Homo Sapiens; identical to SEQ ID NO: 76274
  misc_feature (971)..(971): n is a, c, g, or t

SEQ ID NO: 109332 - DNA, 873 bp, Homo Sapiens; identical to SEQ ID NO: 76275
  misc_feature (745)..(745): n is a, c, g, or t
  misc_feature (825)..(825): n is a, c, g, or t
  misc_feature (844)..(844): n is a, c, g, or t

SEQ ID NO: 109333 - DNA, 1585 bp, Homo Sapiens; identical to SEQ ID NO: 76276

SEQ ID NO: 109334 - DNA, 520 bp, Homo Sapiens; identical to SEQ ID NO: 76277

SEQ ID NO: 109335 - DNA, 1358 bp, Homo Sapiens; identical to SEQ ID NO: 76282
  misc_feature (1081)..(1134): n is a, c, g, or t

SEQ ID NO: 109336 - DNA, 2107 bp, Homo Sapiens; identical to SEQ ID NO: 76283
  misc_feature (893)..(925): n is a, c, g, or t
  misc_feature (1860)..(1938): n is a, c, g, or t

SEQ ID NO: 109337 - DNA, 690 bp, Homo Sapiens; identical to SEQ ID NO: 76284
  misc_feature (184)..(245): n is a, c, g, or t

SEQ ID NO: 109338 - DNA, 695 bp, Homo Sapiens; identical to SEQ ID NO: 76285
  misc_feature (577)..(633): n is a, c, g, or t

SEQ ID NO: 109339 - DNA, 399 bp, Homo Sapiens; identical to SEQ ID NO: 76286
  misc_feature (306)..(346): n is a, c, g, or t

SEQ ID NO: 109340 - DNA, 1474 bp, Homo Sapiens; identical to SEQ ID NO: 76287
  misc_feature (360)..(433): n is a, c, g, or t
  misc_feature (448)..(496): n is a, c, g, or t
  misc_feature (703)..(733): n is a, c, g, or t
  misc_feature (747)..(770): n is a, c, g, or t

SEQ ID NO: 109341 - DNA, 1271 bp, Homo Sapiens; identical to SEQ ID NO: 76288
  misc_feature (967)..(1026): n is a, c, g, or t

SEQ ID NO: 109342 - DNA, 446 bp, Homo Sapiens; identical to SEQ ID NO: 76289
  misc_feature (65)..(121): n is a, c, g, or t

SEQ ID NO: 109343 - DNA, 553 bp, Homo Sapiens; identical to SEQ ID NO: 76290
  misc_feature (214)..(254): n is a, c, g, or t

SEQ ID NO: 109344 - DNA, 415 bp, Homo Sapiens; identical to SEQ ID NO: 76291

SEQ ID NO: 109345 - DNA, 688 bp, Homo Sapiens; identical to SEQ ID NO: 76292
  misc_feature (265)..(281): n is a, c, g, or t

SEQ ID NO: 109346 - DNA, 920 bp, Homo Sapiens; identical to SEQ ID NO: 76294
  misc_feature (129)..(129): n is a, c, g, or t

SEQ ID NO: 109347 - DNA, 551 bp, Homo Sapiens; identical to SEQ ID NO: 76295

SEQ ID NO: 109348 - DNA, 1013 bp, Homo Sapiens; identical to SEQ ID NO: 76296
  misc_feature (349)..(364): n is a, c, g, or t
  misc_feature (545)..(929): n is a, c, g, or t
  misc_feature (932)..(932): n is a, c, g, or t
  misc_feature (951)..(951): n is a, c, g, or t
  misc_feature (959)..(960): n is a, c, g, or t
  misc_feature (990)..(990): n is a, c, g, or t

SEQ ID NO: 109349 - DNA, 948 bp, Homo Sapiens; identical to SEQ ID NO: 76297
  misc_feature (142)..(158): n is a, c, g, or t
  misc_feature (247)..(247): n is a, c, g, or t

SEQ ID NO: 109350 - DNA, 1028 bp, Homo Sapiens; identical to SEQ ID NO: 76301
  misc_feature (955)..(963): n is a, c, g, or t

SEQ ID NO: 109351 - DNA, 1849 bp, Homo Sapiens; identical to SEQ ID NO: 76302
  misc_feature (74)..(74): n is a, c, g, or t
  misc_feature (246)..(246): n is a, c, g, or t
  misc_feature (248)..(248): n is a, c, g, or t
  misc_feature (274)..(274): n is a, c, g, or t
  misc_feature (311)..(311): n is a, c, g, or t
  misc_feature (360)..(360): n is a, c, g, or t
  misc_feature (571)..(571): n is a, c, g, or t
  misc_feature (576)..(576): n is a, c, g, or t
  misc_feature (616)..(616): n is a, c, g, or t
  misc_feature (619)..(619): n is a, c, g, or t
  misc_feature (621)..(621): n is a, c, g, or t
  misc_feature (663)..(663): n is a, c, g, or t
  misc_feature (689)..(689): n is a, c, g, or t
  misc_feature (700)..(700): n is a, c, g, or t
  misc_feature (747)..(747): n is a, c, g, or t
  misc_feature (766)..(766): n is a, c, g, or t
  misc_feature (792)..(792): n is a, c, g, or t
  misc_feature (851)..(851): n is a, c, g, or t

SEQ ID NO: 109352 - DNA, 673 bp, Homo Sapiens; identical to SEQ ID NO: 76313
  misc_feature (23)..(23): n is a, c, g, or t
  misc_feature (30)..(30): n is a, c, g, or t
  misc_feature (33)..(33): n is a, c, g, or t

SEQ ID NO: 109353 - DNA, 583 bp, Homo Sapiens; identical to SEQ ID NO: 76314

SEQ ID NO: 109354 - DNA, 678 bp, Homo Sapiens; identical to SEQ ID NO: 76315

SEQ ID NO: 109355 - DNA, 1267 bp, Homo Sapiens; identical to SEQ ID NO: 76321
  misc_feature (47)..(111): n is a, c, g, or t

SEQ ID NO: 109356 - DNA, 1946 bp, Homo Sapiens; identical to SEQ ID NO: 76322
  misc_feature (1292)..(1355): n is a, c, g, or t
  misc_feature (1930)..(1930): n is a, c, g, or t

SEQ ID NO: 109357 - DNA, 1232 bp, Homo Sapiens; identical to SEQ ID NO: 76326
  misc_feature (1152)..(1172): n is a, c, g, or t

SEQ ID NO: 109358 - DNA, 1255 bp, Homo Sapiens; identical to SEQ ID NO: 76327
  misc_feature (100)..(158): n is a, c, g, or t

SEQ ID NO: 109359 - DNA, 908 bp, Homo Sapiens; identical to SEQ ID NO: 76329
  misc_feature (587)..(599): n is a, c, g, or t

SEQ ID NO: 109360 - DNA, 989 bp, Homo Sapiens; identical to SEQ ID NO: 76330
  misc_feature (537)..(549): n is a, c, g, or t

SEQ ID NO: 109361 - DNA, 1006 bp, Homo Sapiens; identical to SEQ ID NO: 76331
  misc_feature (880)..(901): n is a, c, g, or t

SEQ ID NO: 109362 - DNA, 602 bp, Homo Sapiens; identical to SEQ ID NO: 76332
  misc_feature (428)..(438): n is a, c, g, or t

SEQ ID NO: 109363 - DNA, 611 bp, Homo Sapiens; identical to SEQ ID NO: 76333
  misc_feature (514)..(535): n is a, c, g, or t

SEQ ID NO: 109364 - DNA, 759 bp, Homo Sapiens; identical to SEQ ID NO: 76334
  misc_feature (24)..(24): n is a, c, g, or t
  misc_feature (48)..(48): n is a, c, g, or t
  misc_feature (282)..(303): n is a, c, g, or t
  misc_feature (384)..(424): n is a, c, g, or t

SEQ ID NO: 109365 - DNA, 398 bp, Homo Sapiens; identical to SEQ ID NO: 76335
  misc_feature (100)..(127): n is a, c, g, or t

SEQ ID NO: 109366 - DNA, 712 bp, Homo Sapiens; identical to SEQ ID NO: 76336
  misc_feature (100)..(100): n is a, c, g, or t
  misc_feature (422)..(422): n is a, c, g, or t
  misc_feature (426)..(426): n is a, c, g, or t
  misc_feature (428)..(428): n is a, c, g, or t

SEQ ID NO: 109367 - DNA, 1200 bp, Homo Sapiens; identical to SEQ ID NO: 76337
  misc_feature (1092)..(1100): n is a, c, g, or t

SEQ ID NO: 109368 - DNA, 1230 bp, Homo Sapiens; identical to SEQ ID NO: 76344

SEQ ID NO: 109369 - DNA, 783 bp, Homo Sapiens; identical to SEQ ID NO: 76345

SEQ ID NO: 109370 - DNA, 2278 bp, Homo Sapiens; identical to SEQ ID NO: 76347
  misc_feature (84)..(118): n is a, c, g, or t
  misc_feature (1308)..(1321): n is a, c, g, or t

SEQ ID NO: 109371 - DNA, 879 bp, Homo Sapiens; identical to SEQ ID NO: 76348

SEQ ID NO: 109372 - DNA, 1200 bp, Homo Sapiens; identical to SEQ ID NO: 76357
  misc_feature (83)..(83): n is a, c, g, or t

SEQ ID NO: 109373 - DNA, 547 bp, Homo Sapiens; identical to SEQ ID NO: 76358

SEQ ID NO: 109374 - DNA, 580 bp, Homo Sapiens; identical to SEQ ID NO: 76361
  misc_feature (129)..(129): n is a, c, g, or t
  misc_feature (161)..(161): n is a, c, g, or t

SEQ ID NO: 109375 - DNA, 2925 bp, Homo Sapiens; identical to SEQ ID NO: 76362
  misc_feature (688)..(688): n is a, c, g, or t
  misc_feature (2724)..(2724): n is a, c, g, or t
  misc_feature (2731)..(2731): n is a, c, g, or t
  misc_feature (2770)..(2770): n is a, c, g, or t
  misc_feature (2832)..(2832): n is a, c, g, or t
  misc_feature (2883)..(2883): n is a, c, g, or t

SEQ ID NO: 109376 - DNA, 910 bp, Homo Sapiens; identical to SEQ ID NO: 76363

SEQ ID NO: 109377 - DNA, 1044 bp, Homo Sapiens; identical to SEQ ID NO: 76364

SEQ ID NO: 109378 - DNA, 1290 bp, Homo Sapiens; identical to SEQ ID NO: 76365
  misc_feature (798)..(889): n is a, c, g, or t
  misc_feature (1085)..(1097): n is a, c, g, or t

SEQ ID NO: 109379 - DNA, 1994 bp, Homo Sapiens; identical to SEQ ID NO: 76368
  misc_feature (100)..(185): n is a, c, g, or t
  misc_feature (1091)..(1180): n is a, c, g, or t

SEQ ID NO: 109380 - DNA, 944 bp, Homo Sapiens; identical to SEQ ID NO: 76369
  misc_feature (71)..(123): n is a, c, g, or t
  misc_feature (173)..(224): n is a, c, g, or t
  misc_feature (359)..(416): n is a, c, g, or t

SEQ ID NO: 109381 - DNA, 1203 bp, Homo Sapiens; identical to SEQ ID NO: 76377
  misc_feature (193)..(243): n is a, c, g, or t

SEQ ID NO: 109382 - DNA, 589 bp, Homo Sapiens; identical to SEQ ID NO: 76378

SEQ ID NO: 109383 - DNA, 1185 bp, Homo Sapiens; identical to SEQ ID NO: 76381

SEQ ID NO: 109384 - DNA, 1006 bp, Homo Sapiens; identical to SEQ ID NO: 76382

SEQ ID NO: 109385 - DNA, 1018 bp, Homo Sapiens; identical to SEQ ID NO: 76393
  misc_feature (915)..(915): n is a, c, g, or t
  misc_feature (973)..(973): n is a, c, g, or t

SEQ ID NO: 109386 - DNA, 1016 bp, Homo Sapiens; identical to SEQ ID NO: 76394

SEQ ID NO: 109387 - DNA, 664 bp, Homo Sapiens; identical to SEQ ID NO: 76400

SEQ ID NO: 109388 - DNA, 493 bp, Homo Sapiens; identical to SEQ ID NO: 76401

SEQ ID NO: 109389 - DNA, 703 bp, Homo Sapiens; identical to SEQ ID NO: 76402

SEQ ID NO: 109390 - DNA, 392 bp, Homo Sapiens; identical to SEQ ID NO: 76403
  misc_feature (75)..(136): n is a, c, g, or t

SEQ ID NO: 109391 - DNA, 747 bp, Homo Sapiens; identical to SEQ ID NO: 76409

SEQ ID NO: 109392 - DNA, 1028 bp, Homo Sapiens; identical to SEQ ID NO: 76410
  misc_feature (30)..(30): n is a, c, g, or t
  misc_feature (44)..(44): n is a, c, g, or t
  misc_feature (51)..(138): n is a, c, g, or t
  misc_feature (140)..(141): n is a, c, g, or t
  misc_feature (182)..(182): n is a, c, g, or t
  misc_feature (199)..(199): n is a, c, g, or t
  misc_feature (203)..(203): n is a, c, g, or t
  misc_feature (209)..(209): n is a, c, g, or t
  misc_feature (222)..(222): n is a, c, g, or t
  misc_feature (228)..(228): n is a, c, g, or t
  misc_feature (249)..(249): n is a, c, g, or t

SEQ ID NO: 109393 - DNA, 574 bp, Homo Sapiens; identical to SEQ ID NO: 76419
  misc_feature (68)..(118): n is a, c, g, or t

SEQ ID NO: 109394 - DNA, 436 bp, Homo Sapiens; identical to SEQ ID NO: 76420
  misc_feature (45)..(117): n is a, c, g, or t

SEQ ID NO: 109395 - DNA, 513 bp, Homo Sapiens; identical to SEQ ID NO: 76421
  misc_feature (243)..(293): n is a, c, g, or t

SEQ ID NO: 109396 - DNA, 1024 bp, Homo Sapiens; identical to SEQ ID NO: 76422
  misc_feature (934)..(974): n is a, c, g, or t

SEQ ID NO: 109397 - DNA, 2687 bp, Homo Sapiens; identical to SEQ ID NO: 76423
  misc_feature (92)..(154): n is a, c, g, or t

SEQ ID NO: 109398 - DNA, 1171 bp, Homo Sapiens; identical to SEQ ID NO: 76425

SEQ ID NO: 109399 - DNA, 1009 bp, Homo Sapiens; identical to SEQ ID NO: 76426
  misc_feature (75)..(109): n is a, c, g, or t

SEQ ID NO: 109400 - DNA, 1784 bp, Homo Sapiens; identical to SEQ ID NO: 76427
  misc_feature (27)..(27): n is a, c, g, or t
  misc_feature (42)..(42): n is a, c, g, or t
  misc_feature (88)..(88): n is a, c, g, or t
  misc_feature (155)..(155): n is a, c, g, or t
  misc_feature (166)..(166): n is a, c, g, or t
  misc_feature (194)..(194): n is a, c, g, or t
  misc_feature (216)..(216): n is a, c, g, or t
  misc_feature (257)..(257): n is a, c, g, or t
  misc_feature (329)..(329): n is a, c, g, or t
  misc_feature (1138)..(1156): n is a, c, g, or t

SEQ ID NO: 109401 - DNA, 566 bp, Homo Sapiens; identical to SEQ ID NO: 76428

SEQ ID NO: 109402 - DNA, 1571 bp, Homo Sapiens; identical to SEQ ID NO: 76432

SEQ ID NO: 109403 - DNA, 701 bp, Homo Sapiens; identical to SEQ ID NO: 76433

SEQ ID NO: 109404 - DNA, 1192 bp, Homo Sapiens; identical to SEQ ID NO: 76435

SEQ ID NO: 109405 - DNA, 1562 bp, Homo Sapiens; identical to SEQ ID NO: 76436

SEQ ID NO: 109406 - DNA, 828 bp, Homo Sapiens; identical to SEQ ID NO: 76444

SEQ ID NO: 109407 - DNA, 1955 bp, Homo Sapiens; identical to SEQ ID NO: 76445

SEQ ID NO: 109408 - DNA, 1479 bp, Homo Sapiens; identical to SEQ ID NO: 76453
  misc_feature (556)..(623): n is a, c, g, or t
  misc_feature (1272)..(1314): n is a, c, g, or t

SEQ ID NO: 109409 - DNA, 512 bp, Homo Sapiens; identical to SEQ ID NO: 76454
  misc_feature (199)..(211): n is a, c, g, or t

SEQ ID NO: 109410 - DNA, 693 bp, Homo Sapiens; identical to SEQ ID NO: 76456

SEQ ID NO: 109411 - DNA, 860 bp, Homo Sapiens; identical to SEQ ID NO: 76457

SEQ ID NO: 109412 - DNA, 1200 bp, Homo Sapiens; identical to SEQ ID NO: 76468

SEQ ID NO: 109413 - DNA, 983 bp, Homo Sapiens; identical to SEQ ID NO: 76469
  misc_feature (73)..(73): n is a, c, g, or t
  misc_feature (848)..(848): n is a, c, g, or t
  misc_feature (857)..(857): n is a, c, g, or t
  misc_feature (861)..(861): n is a, c, g, or t
  misc_feature (872)..(872): n is a, c, g, or t
  misc_feature (969)..(969): n is a, c, g, or t

SEQ ID NO: 109414 - DNA, 1570 bp, Homo Sapiens; identical to SEQ ID NO: 76474
  misc_feature (500)..(500): n is a, c, g, or t

SEQ ID NO: 109415 - DNA, 1034 bp, Homo Sapiens; identical to SEQ ID NO: 76475

SEQ ID NO: 109416 - DNA, 925 bp, Homo Sapiens; identical to SEQ ID NO: 76479
  misc_feature (786)..(786): n is a, c, g, or t
  misc_feature (789)..(789): n is a, c, g, or t
  misc_feature (863)..(863): n is a, c, g, or t

SEQ ID NO: 109417 - DNA, 908 bp, Homo Sapiens; identical to SEQ ID NO: 76480
  misc_feature (59)..(61): n is a, c, g, or t

SEQ ID NO: 109418 - DNA, 1305 bp, Homo Sapiens; identical to SEQ ID NO: 76483
  misc_feature (609)..(744): n is a, c, g, or t

SEQ ID NO: 109419 - DNA, 1243 bp, Homo Sapiens; identical to SEQ ID NO: 76484
  misc_feature (850)..(871): n is a, c, g, or t

SEQ ID NO: 109420 - DNA, 771 bp, Homo Sapiens; identical to SEQ ID NO: 76488

SEQ ID NO: 109421 - DNA, 929 bp, Homo Sapiens; identical to SEQ ID NO: 76489

SEQ ID NO: 109422 - DNA, 612 bp, Homo Sapiens; identical to SEQ ID NO: 76490
  misc_feature (15)..(15): n is a, c, g, or t
  misc_feature (49)..(49): n is a, c, g, or t

SEQ ID NO: 109423 - DNA, 727 bp, Homo Sapiens; identical to SEQ ID NO: 76491

SEQ ID NO: 109424 - DNA, 1286 bp, Homo Sapiens; identical to SEQ ID NO: 76492
  misc_feature (41)..(75): n is a, c, g, or t

SEQ ID NO: 109425 - DNA, 1072 bp, Homo Sapiens; identical to SEQ ID NO: 76493

SEQ ID NO: 109426 - DNA, 531 bp, Homo Sapiens; identical to SEQ ID NO: 76494
  misc_feature (31)..(31): n is a, c, g, or t
  misc_feature (36)..(36): n is a, c, g, or t
  misc_feature (105)..(105): n is a, c, g, or t

SEQ ID NO: 109427 - DNA, 775 bp, Homo Sapiens; identical to SEQ ID NO: 76500

SEQ ID NO: 109428 - DNA, 845 bp, Homo Sapiens; identical to SEQ ID NO: 76501
  misc_feature (519)..(536): n is a, c, g, or t
  misc_feature (671)..(691): n is a, c, g, or t
  misc_feature (699)..(733): n is a, c, g, or t
  misc_feature (736)..(799): n is a, c, g, or t

SEQ ID NO: 109429 - DNA, 1356 bp, Homo Sapiens; identical to SEQ ID NO: 76505
  misc_feature (1280)..(1296): n is a, c, g, or t

SEQ ID NO: 109430 - DNA, 1659 bp, Homo Sapiens; identical to SEQ ID NO: 76506
  misc_feature (19)..(19): n is a, c, g, or t
  misc_feature (100)..(134): n is a, c, g, or t

SEQ ID NO: 109431 - DNA, 863 bp, Homo Sapiens; identical to SEQ ID NO: 76507

SEQ ID NO: 109432 - DNA, 980 bp, Homo Sapiens; identical to SEQ ID NO: 76508
  misc_feature (106)..(106): n is a, c, g, or t
  misc_feature (116)..(117): n is a, c, g, or t
  misc_feature (123)..(536): n is a, c, g, or t

SEQ ID NO: 109433 - DNA, 2027 bp, Homo Sapiens; identical to SEQ ID NO: 76509

SEQ ID NO: 109434 - DNA, 1311 bp, Homo Sapiens; identical to SEQ ID NO: 76511
  misc_feature (1020)..(1029): n is a, c, g, or t
  misc_feature (1043)..(1043): n is a, c, g, or t

SEQ ID NO: 109435 - DNA, 990 bp, Homo Sapiens; identical to SEQ ID NO: 76512

SEQ ID NO: 109436 - DNA, 639 bp, Homo Sapiens; identical to SEQ ID NO: 76515
  misc_feature (37)..(37): n is a, c, g, or t
  misc_feature (121)..(121): n is a, c, g, or t

SEQ ID NO: 109437 - DNA, 663 bp, Homo Sapiens; identical to SEQ ID NO: 76516

SEQ ID NO: 109438 - DNA, 964 bp, Homo Sapiens; identical to SEQ ID NO: 76519
  misc_feature (648)..(648): n is a, c, g, or t
  misc_feature (680)..(680): n is a, c, g, or t

SEQ ID NO: 109439 - DNA, 2565 bp, Homo Sapiens; identical to SEQ ID NO: 76520
  misc_feature (1774)..(1832): n is a, c, g, or t
  misc_feature (2109)..(2137): n is a, c, g, or t

SEQ ID NO: 109440 - DNA, 1296 bp, Homo Sapiens; identical to SEQ ID NO: 76521

SEQ ID NO: 109441 - DNA, 627 bp, Homo Sapiens; identical to SEQ ID NO: 76522

SEQ ID NO: 109442 - DNA, 688 bp, Homo Sapiens; identical to SEQ ID NO: 76525
  misc_feature (246)..(264): n is a, c, g, or t

SEQ ID NO: 109443 - DNA, 1560 bp, Homo Sapiens; identical to SEQ ID NO: 76526
  misc_feature (74)..(108): n is a, c, g, or t
  misc_feature (1141)..(1149): n is a, c, g, or t

SEQ ID NO: 109444 - DNA, 815 bp, Homo Sapiens; identical to SEQ ID NO: 76527
  misc_feature (656)..(656): n is a, c, g, or t

SEQ ID NO: 109445 - DNA, 768 bp, Homo Sapiens; identical to SEQ ID NO: 76528

SEQ ID NO: 109446 - DNA, 700 bp, Homo Sapiens; identical to SEQ ID NO: 76529

SEQ ID NO: 109447 - DNA, 803 bp, Homo Sapiens; identical to SEQ ID NO: 76530
  misc_feature (39)..(39): n is a, c, g, or t

SEQ ID NO: 109448 - DNA, 693 bp, Homo Sapiens; identical to SEQ ID NO: 76537
  misc_feature (54)..(54): n is a, c, g, or t
  misc_feature (94)..(94): n is a, c, g, or t
  misc_feature (609)..(617): n is a, c, g, or t

SEQ ID NO: 109449 - DNA, 1602 bp, Homo Sapiens; identical to SEQ ID NO: 76538

SEQ ID NO: 109450 - DNA, 1079 bp, Homo Sapiens; identical to SEQ ID NO: 76539
  misc_feature (140)..(140): n is a, c, g, or t
  misc_feature (267)..(276): n is a, c, g, or t
  misc_feature (413)..(443): n is a, c, g, or t

SEQ ID NO: 109451 - DNA, 1112 bp, Homo Sapiens; identical to SEQ ID NO: 76541
  misc_feature (1010)..(1044): n is a, c, g, or t

SEQ ID NO: 109452 - DNA, 1018 bp, Homo Sapiens; identical to SEQ ID NO: 76542

SEQ ID NO: 109453 - DNA, 1476 bp, Homo Sapiens; identical to SEQ ID NO: 76543
  misc_feature (320)..(320): n is a, c, g, or t
  misc_feature (1346)..(1360): n is a, c, g, or t
  misc_feature (1365)..(1428): n is a, c, g, or t

SEQ ID NO: 109454 - DNA, 1966 bp, Homo Sapiens; identical to SEQ ID NO: 76544
  misc_feature (1528)..(1547): n is a, c, g, or t

SEQ ID NO: 109455 - DNA, 1438 bp, Homo Sapiens; identical to SEQ ID NO: 76547

SEQ ID NO: 109456 - DNA, 1072 bp, Homo Sapiens; identical to SEQ ID NO: 76548
  misc_feature (170)..(170): n is a, c, g, or t
  misc_feature (209)..(209): n is a, c, g, or t
  misc_feature (297)..(297): n is a, c, g, or t
  misc_feature (325)..(325): n is a, c, g, or t
  misc_feature (343)..(343): n is a, c, g, or t
  misc_feature (356)..(356): n is a, c, g, or t
  misc_feature (369)..(370): n is a, c, g, or t
  misc_feature (376)..(376): n is a, c, g, or t
  misc_feature (393)..(393): n is a, c, g, or t
  misc_feature (422)..(422): n is a, c, g, or t

SEQ ID NO: 109457 - DNA, 958 bp, Homo Sapiens; identical to SEQ ID NO: 76554
  misc_feature (472)..(484): n is a, c, g, or t
  misc_feature (581)..(758): n is a, c, g, or t
  misc_feature (770)..(770): n is a, c, g, or t
  misc_feature (786)..(786): n is a, c, g, or t
  misc_feature (898)..(898): n is a, c, g, or t

SEQ ID NO: 109458 - DNA, 2790 bp, Homo Sapiens; identical to SEQ ID NO: 76555
  misc_feature (162)..(216): n is a, c, g, or t
  misc_feature (2612)..(2658): n is a, c, g, or t
  misc_feature (2664)..(2676): n is a, c, g, or t

SEQ ID NO: 109459 - DNA, 1070 bp, Homo Sapiens; identical to SEQ ID NO: 76558
  misc_feature (29)..(29): n is a, c, g, or t
  misc_feature (84)..(84): n is a, c, g, or t
  misc_feature (112)..(112): n is a, c, g, or t
  misc_feature (134)..(134): n is a, c, g, or t
  misc_feature (140)..(141): n is a, c, g, or t
  misc_feature (143)..(143): n is a, c, g, or t
  misc_feature (148)..(148): n is a, c, g, or t
  misc_feature (150)..(150): n is a, c, g, or t
  misc_feature (153)..(153): n is a, c, g, or t
  misc_feature (159)..(562): n is a, c, g, or t
  misc_feature (836)..(854): n is a, c, g, or t

SEQ ID NO: 109460 - DNA, 1738 bp, Homo Sapiens; identical to SEQ ID NO: 76559
  misc_feature (1269)..(1280): n is a, c, g, or t

SEQ ID NO: 109461 - DNA, 961 bp, Homo Sapiens; identical to SEQ ID NO: 76565
  misc_feature (71)..(71): n is a, c, g, or t
  misc_feature (86)..(86): n is a, c, g, or t
  misc_feature (99)..(99): n is a, c, g, or t

SEQ ID NO: 109462 - DNA, 425 bp, Homo Sapiens; identical to SEQ ID NO: 76566

SEQ ID NO: 109463 - DNA, 1129 bp, Homo Sapiens; identical to SEQ ID NO: 76571

SEQ ID NO: 109464 - DNA, 1550 bp, Homo Sapiens; identical to SEQ ID NO: 76572
  misc_feature (241)..(264): n is a, c, g, or t

SEQ ID NO: 109465 - DNA, 814 bp, Homo Sapiens; identical to SEQ ID NO: 76573

SEQ ID NO: 109466 - DNA, 3485 bp, Homo Sapiens; identical to SEQ ID NO: 76574

SEQ ID NO: 109467 - DNA, 1057 bp, Homo Sapiens; identical to SEQ ID NO: 76575
  misc_feature (872)..(882): n is a, c, g, or t

SEQ ID NO: 109468 - DNA, 596 bp, Homo Sapiens; identical to SEQ ID NO: 76577

SEQ ID NO: 109469 - DNA, 1168 bp, Homo Sapiens; identical to SEQ ID NO: 76578
  misc_feature (69)..(120): n is a, c, g, or t

SEQ ID NO: 109470 - DNA, 2192 bp, Homo Sapiens; identical to SEQ ID NO: 76579
  misc_feature (356)..(408): n is a, c, g, or t

SEQ ID NO: 109471 - DNA, 965 bp, Homo Sapiens; identical to SEQ ID NO: 76587
  misc_feature (884)..(884): n is a, c, g, or t

SEQ ID NO: 109472 - DNA, 2166 bp, Homo Sapiens; identical to SEQ ID NO: 76588

SEQ ID NO: 109473 - DNA, 558 bp, Homo Sapiens; identical to SEQ ID NO: 76589
  misc_feature (37)..(37): n is a, c, g, or t
  misc_feature (62)..(181): n is a, c, g, or t

SEQ ID NO: 109474 - DNA, 576 bp, Homo Sapiens; identical to SEQ ID NO: 76590
  misc_feature (132)..(349): n is a, c, g, or t

SEQ ID NO: 109475 - DNA, 697 bp, Homo Sapiens; identical to SEQ ID NO: 76604
  misc_feature (19)..(19): n is a, c, g, or t
  misc_feature (85)..(125): n is a, c, g, or t

SEQ ID NO: 109476 - DNA, 1248 bp, Homo Sapiens; identical to SEQ ID NO: 76605

SEQ ID NO: 109477 - DNA, 1188 bp, Homo Sapiens; identical to SEQ ID NO: 76608
  misc_feature (42)..(76): n is a, c, g, or t
  misc_feature (930)..(982): n is a, c, g, or t

SEQ ID NO: 109478 - DNA, 892 bp, Homo Sapiens; identical to SEQ ID NO: 76609
  misc_feature (370)..(404): n is a, c, g, or t
  misc_feature (595)..(669): n is a, c, g, or t
  misc_feature (784)..(849): n is a, c, g, or t

SEQ ID NO: 109479 - DNA, 537 bp, Homo Sapiens; identical to SEQ ID NO: 76610
  misc_feature (517)..(517): n is a, c, g, or t

SEQ ID NO: 109480 - DNA, 1056 bp, Homo Sapiens; identical to SEQ ID NO: 76615
  misc_feature (993)..(1013): n is a, c, g, or t
  misc_feature (1036)..(1036): n is a, c, g, or t

SEQ ID NO: 109481 - DNA, 433 bp, Homo Sapiens; identical to SEQ ID NO: 76616

SEQ ID NO: 109482 - DNA, 707 bp, Homo Sapiens; identical to SEQ ID NO: 76622
  misc_feature (440)..(527): n is a, c, g, or t
  misc_feature (665)..(665): n is a, c, g, or t
  misc_feature (676)..(676): n is a, c, g, or t

SEQ ID NO: 109483 - DNA, 518 bp, Homo Sapiens; identical to SEQ ID NO: 76623

SEQ ID NO: 109484 - DNA, 1555 bp, Homo Sapiens; identical to SEQ ID NO: 76624

SEQ ID NO: 109485 - DNA, 1145 bp, Homo Sapiens; identical to SEQ ID NO: 76625
  misc_feature (43)..(77): n is a, c, g, or t

SEQ ID NO: 109486 - DNA, 870 bp, Homo Sapiens; identical to SEQ ID NO: 76626

SEQ ID NO: 109487 - DNA, 1042 bp, Homo Sapiens; identical to SEQ ID NO: 76627
  misc_feature (16)..(16): n is a, c, g, or t
  misc_feature (21)..(21): n is a, c, g, or t
  misc_feature (65)..(65): n is a, c, g, or t
  misc_feature (80)..(80): n is a, c, g, or t
  misc_feature (155)..(155): n is a, c, g, or t
  misc_feature (169)..(170): n is a, c, g, or t
  misc_feature (181)..(181): n is a, c, g, or t
  misc_feature (186)..(186): n is a, c, g, or t
  misc_feature (191)..(191): n is a, c, g, or t
  misc_feature (205)..(205): n is a, c, g, or t
  misc_feature (241)..(241): n is a, c, g, or t
  misc_feature (248)..(248): n is a, c, g, or t
  misc_feature (251)..(251): n is a, c, g, or t
  misc_feature (284)..(284): n is a, c, g, or t
  misc_feature (312)..(312): n is a, c, g, or t
  misc_feature (461)..(461): n is a, c, g, or t

SEQ ID NO: 109488 - DNA, 738 bp, Homo Sapiens; identical to SEQ ID NO: 76628
  misc_feature (45)..(45): n is a, c, g, or t

SEQ ID NO: 109489 - DNA, 1696 bp, Homo Sapiens; identical to SEQ ID NO: 76629

SEQ ID NO: 109490 - DNA, 1127 bp, Homo Sapiens; identical to SEQ ID NO: 76630

SEQ ID NO: 109491 - DNA, 884 bp, Homo Sapiens; identical to SEQ ID NO: 76631

SEQ ID NO: 109492 - DNA, 671 bp, Homo Sapiens; identical to SEQ ID NO: 76640
  misc_feature (614)..(614): n is a, c, g, or t
  misc_feature (643)..(643): n is a, c, g, or t
  misc_feature (661)..(661): n is a, c, g, or t

SEQ ID NO: 109493 - DNA, 786 bp, Homo Sapiens; identical to SEQ ID NO: 76641

SEQ ID NO: 109494 - DNA, 1470 bp, Homo Sapiens; identical to SEQ ID NO: 76646

SEQ ID NO: 109495 - DNA, 582 bp, Homo Sapiens; identical to SEQ ID NO: 76647
  misc_feature (362)..(371): n is a, c, g, or t

SEQ ID NO: 109496 - DNA, 1284 bp, Homo Sapiens; identical to SEQ ID NO: 76654

SEQ ID NO: 109497 - DNA, 1113 bp, Homo Sapiens; identical to SEQ ID NO: 76655
  misc_feature (418)..(418): n is a, c, g, or t
  misc_feature (420)..(435): n is a, c, g, or t
  misc_feature (448)..(505): n is a, c, g, or t
  misc_feature (1070)..(1070): n is a, c, g, or t

SEQ ID NO: 109498 - DNA, 695 bp, Homo Sapiens; identical to SEQ ID NO: 76656

SEQ ID NO: 109499 - DNA, 887 bp, Homo Sapiens; identical to SEQ ID NO: 76657
  misc_feature (78)..(112): n is a, c, g, or t

SEQ ID NO: 109500 - DNA, 1217 bp, Homo Sapiens; identical to SEQ ID NO: 76658

SEQ ID NO: 109501 - DNA, 1614 bp, Homo Sapiens; identical to SEQ ID NO: 76659

SEQ ID NO: 109502 - DNA, 836 bp, Homo Sapiens; identical to SEQ ID NO: 76660
  misc_feature (638)..(638): n is a, c, g, or t

SEQ ID NO: 109503 - DNA, 2476 bp, Homo Sapiens; identical to SEQ ID NO: 76662

SEQ ID NO: 109504 - DNA, 599 bp, Homo Sapiens; identical to SEQ ID NO: 76663

SEQ ID NO: 109505 - DNA, 1545 bp, Homo Sapiens; identical to SEQ ID NO: 76664

SEQ ID NO: 109506 - DNA, 609 bp, Homo Sapiens; identical to SEQ ID NO: 76665

SEQ ID NO: 109507 - DNA, 2238 bp, Homo Sapiens; identical to SEQ ID NO: 76667
  misc_feature (426)..(484): n is a, c, g, or t
  misc_feature (960)..(1066): n is a, c, g, or t
  misc_feature (1227)..(1227): n is a, c, g, or t
  misc_feature (1237)..(1237): n is a, c, g, or t
  misc_feature (1844)..(1945): n is a, c, g, or t

SEQ ID NO: 109508 - DNA, 667 bp, Homo Sapiens; identical to SEQ ID NO: 76668

SEQ ID NO: 109509 - DNA, 3272 bp, Homo Sapiens; identical to SEQ ID NO: 76671
  misc_feature (123)..(123): n is a, c, g, or t
  misc_feature (571)..(621): n is a, c, g, or t
  misc_feature (780)..(790): n is a, c, g, or t
  misc_feature (2300)..(2308): n is a, c, g, or t

SEQ ID NO: 109510 - DNA, 949 bp, Homo Sapiens; identical to SEQ ID NO: 76672
  misc_feature (197)..(197): n is a, c, g, or t
  misc_feature (245)..(255): n is a, c, g, or t

SEQ ID NO: 109511 - DNA, 1368 bp, Homo Sapiens; identical to SEQ ID NO: 76675
  misc_feature (86)..(142): n is a, c, g, or t
  misc_feature (756)..(756): n is a, c, g, or t
  misc_feature (1296)..(1296): n is a, c, g, or t
  misc_feature (1304)..(1304): n is a, c, g, or t
  misc_feature (1330)..(1330): n is a, c, g, or t

SEQ ID NO: 109512 - DNA, 364 bp, Homo Sapiens; identical to SEQ ID NO: 76676

SEQ ID NO: 109513 - DNA, 1184 bp, Homo Sapiens; identical to SEQ ID NO: 76677

SEQ ID NO: 109514 - DNA, 844 bp, Homo Sapiens; identical to SEQ ID NO: 76678
  misc_feature (333)..(381): n is a, c, g, or t
  misc_feature (387)..(434): n is a, c, g, or t
  misc_feature (606)..(615): n is a, c, g, or t

SEQ ID NO: 109515 - DNA, 311 bp, Homo Sapiens; identical to SEQ ID NO: 76686

SEQ ID NO: 109516 - DNA, 1329 bp, Homo Sapiens; identical to SEQ ID NO: 76687
  misc_feature (22)..(22): n is a, c, g, or t
  misc_feature (78)..(112): n is a, c, g, or t

SEQ ID NO: 109517 - DNA, 972 bp, Homo Sapiens; identical to SEQ ID NO: 76688

SEQ ID NO: 109518 - DNA, 1119 bp, Homo Sapiens; identical to SEQ ID NO: 76690
  misc_feature (1025)..(1076): n is a, c, g, or t

SEQ ID NO: 109519 - DNA, 530 bp, Homo Sapiens; identical to SEQ ID NO: 76691

SEQ ID NO: 109520 - DNA, 1559 bp, Homo Sapiens; identical to SEQ ID NO: 76692

SEQ ID NO: 109521 - DNA, 1262 bp, Homo Sapiens; identical to SEQ ID NO: 76693

SEQ ID NO: 109522 - DNA, 757 bp, Homo Sapiens; identical to SEQ ID NO: 76696

SEQ ID NO: 109523 - DNA, 512 bp, Homo Sapiens; identical to SEQ ID NO: 76697

SEQ ID NO: 109524 - DNA, 712 bp, Homo Sapiens; identical to SEQ ID NO: 76704

SEQ ID NO: 109525 - DNA, 945 bp, Homo Sapiens; identical to SEQ ID NO: 76705

SEQ ID NO: 109526 - DNA, 1015 bp, Homo Sapiens; identical to SEQ ID NO: 76706
  misc_feature (109)..(363): n is a, c, g, or t

SEQ ID NO: 109527 - DNA, 1871 bp, Homo Sapiens; identical to SEQ ID NO: 76707
  misc_feature (1781)..(1796): n is a, c, g, or t

SEQ ID NO: 109528 - DNA, 1301 bp, Homo Sapiens; identical to SEQ ID NO: 76708

SEQ ID NO: 109529 - DNA, 2221 bp, Homo Sapiens; identical to SEQ ID NO: 76712
  misc_feature (1403)..(1431): n is a, c, g, or t
  misc_feature (2036)..(2083): n is a, c, g, or t

SEQ ID NO: 109530 - DNA, 470 bp, Homo Sapiens; identical to SEQ ID NO: 76713
  misc_feature (284)..(328): n is a, c, g, or t

SEQ ID NO: 109531 - DNA, 705 bp, Homo Sapiens; identical to SEQ ID NO: 76714

SEQ ID NO: 109532 - DNA, 2133 bp, Homo Sapiens; identical to SEQ ID NO: 76717
  misc_feature (344)..(344): n is a, c, g, or t
  misc_feature (630)..(643): n is a, c, g, or t
  misc_feature (1410)..(1424): n is a, c, g, or t

SEQ ID NO: 109533 - DNA, 938 bp, Homo Sapiens; identical to SEQ ID NO: 76718
  misc_feature (467)..(467): n is a, c, g, or t
  misc_feature (473)..(473): n is a, c, g, or t
  misc_feature (585)..(585): n is a, c, g, or t

SEQ ID NO: 109534 - DNA, 923 bp, Homo Sapiens; identical to SEQ ID NO: 76719

SEQ ID NO: 109535 - DNA, 368 bp, Homo Sapiens; identical to SEQ ID NO: 76720

SEQ ID NO: 109536 - DNA, 989 bp, Homo Sapiens; identical to SEQ ID NO: 76721

SEQ ID NO: 109537 - DNA, 1079 bp, Homo Sapiens; identical to SEQ ID NO: 76722

SEQ ID NO: 109538 - DNA, 1362 bp, Homo Sapiens; identical to SEQ ID NO: 76723
  misc_feature (1103)..(1151): n is a, c, g, or t
  misc_feature (1166)..(1169): n is a, c, g, or t
  misc_feature (1233)..(1249): n is a, c, g, or t

SEQ ID NO: 109539 - DNA, 915 bp, Homo Sapiens; identical to SEQ ID NO: 76724
  misc_feature (659)..(659): n is a, c, g, or t

SEQ ID NO: 109540 - DNA, 1007 bp, Homo Sapiens; identical to SEQ ID NO: 76725
  misc_feature (757)..(757): n is a, c, g, or t
  misc_feature (823)..(823): n is a, c, g, or t
  misc_feature (915)..(915): n is a, c, g, or t
  misc_feature (971)..(971): n is a, c, g, or t

SEQ ID NO: 109541 - DNA, 854 bp, Homo Sapiens; identical to SEQ ID NO: 76726
  misc_feature (682)..(682): n is a, c, g, or t

SEQ ID NO: 109542 - DNA, 480 bp, Homo Sapiens; identical to SEQ ID NO: 76738

SEQ ID NO: 109543 - DNA, 930 bp, Homo Sapiens; identical to SEQ ID NO: 76739
  misc_feature (79)..(113): n is a, c, g, or t

SEQ ID NO: 109544 - DNA, 393 bp, Homo Sapiens; identical to SEQ ID NO: 76740

SEQ ID NO: 109545 - DNA, 786 bp, Homo Sapiens; identical to SEQ ID NO: 76745

SEQ ID NO: 109546 - DNA, 809 bp, Homo Sapiens; identical to SEQ ID NO: 76746
  misc_feature (671)..(671): n is a, c, g, or t
  misc_feature (762)..(762): n is a, c, g, or t
  misc_feature (764)..(764): n is a, c, g, or t

SEQ ID NO: 109547 - DNA, 1649 bp, Homo Sapiens; identical to SEQ ID NO: 76759

SEQ ID NO: 109548 - DNA, 512 bp, Homo Sapiens; identical to SEQ ID NO: 76760

SEQ ID NO: 109549 - DNA, 997 bp, Homo Sapiens; identical to SEQ ID NO: 76766
  misc_feature (917)..(917): n is a, c, g, or t

SEQ ID NO: 109550 - DNA, 715 bp, Homo Sapiens; identical to SEQ ID NO: 76767

SEQ ID NO: 109551 - DNA, 1784 bp, Homo Sapiens; identical to SEQ ID NO: 76768
  misc_feature (1435)..(1486): n is a, c, g, or t
  misc_feature (1499)..(1721): n is a, c, g, or t

SEQ ID NO: 109552 - DNA, 1484 bp, Homo Sapiens; identical to SEQ ID NO: 76771
  misc_feature (1081)..(1097): n is a, c, g, or t

SEQ ID NO: 109553 - DNA, 766 bp, Homo Sapiens; identical to SEQ ID NO: 76772
  misc_feature (619)..(619): n is a, c, g, or t
  misc_feature (644)..(644): n is a, c, g, or t
  misc_feature (672)..(672): n is a, c, g, or t
  misc_feature (698)..(698): n is a, c, g, or t

SEQ ID NO: 109554 - DNA, 1815 bp, Homo Sapiens; identical to SEQ ID NO: 76776

SEQ ID NO: 109555 - DNA, 684 bp, Homo Sapiens; identical to SEQ ID NO: 76777

SEQ ID NO: 109556 - DNA, 1046 bp, Homo Sapiens; identical to SEQ ID NO: 76779
  misc_feature (140)..(140): n is a, c, g, or t
  misc_feature (223)..(223): n is a, c, g, or t
  misc_feature (273)..(273): n is a, c, g, or t

SEQ ID NO: 109557 - DNA, 1283 bp, Homo Sapiens; identical to SEQ ID NO: 76780
  misc_feature (855)..(968): n is a, c, g, or t
  misc_feature (976)..(995): n is a, c, g, or t
  misc_feature (1078)..(1087): n is a, c, g, or t

SEQ ID NO: 109558 - DNA, 853 bp, Homo Sapiens; identical to SEQ ID NO: 76781

SEQ ID NO: 109559 - DNA, 813 bp, Homo Sapiens; identical to SEQ ID NO: 76788

SEQ ID NO: 109560 - DNA, 539 bp, Homo Sapiens; identical to SEQ ID NO: 76789

SEQ ID NO: 109561 - DNA, 456 bp, Homo Sapiens; identical to SEQ ID NO: 76790

SEQ ID NO: 109562 - DNA, 1048 bp, Homo Sapiens; identical to SEQ ID NO: 76799
  misc_feature (937)..(971): n is a, c, g, or t

SEQ ID NO: 109563 - DNA, 826 bp, Homo Sapiens; identical to SEQ ID NO: 76800

SEQ ID NO: 109564 - DNA, 603 bp, Homo Sapiens; identical to SEQ ID NO: 76801

SEQ ID NO: 109565 - DNA, 711 bp, Homo Sapiens; identical to SEQ ID NO: 76804

SEQ ID NO: 109566 - DNA, 1642 bp, Homo Sapiens; identical to SEQ ID NO: 76805

SEQ ID NO: 109567 - DNA, 988 bp, Homo Sapiens; identical to SEQ ID NO: 76814
  misc_feature (837)..(849): n is a, c, g, or t

SEQ ID NO: 109568 - DNA, 229 bp, Homo Sapiens; identical to SEQ ID NO: 76815

SEQ ID NO: 109569 - DNA, 1040 bp, Homo Sapiens; identical to SEQ ID NO: 76819
  misc_feature (74)..(74): n is a, c, g, or t
  misc_feature (83)..(84): n is a, c, g, or t
  misc_feature (100)..(100): n is a, c, g, or t
  misc_feature (138)..(138): n is a, c, g, or t
  misc_feature (198)..(198): n is a, c, g, or t
  misc_feature (224)..(224): n is a, c, g, or t
  misc_feature (749)..(787): n is a, c, g, or t

SEQ ID NO: 109570 - DNA, 371 bp, Homo Sapiens; identical to SEQ ID NO: 76820
  misc_feature (79)..(79): n is a, c, g, or t
  misc_feature (81)..(119): n is a, c, g, or t

SEQ ID NO: 109571 - DNA, 764 bp, Homo Sapiens; identical to SEQ ID NO: 76822
  misc_feature (597)..(597): n is a, c, g, or t
  misc_feature (665)..(665): n is a, c, g, or t

SEQ ID NO: 109572 - DNA, 1173 bp, Homo Sapiens; identical to SEQ ID NO: 76823

SEQ ID NO: 109573 - DNA, 987 bp, Homo Sapiens; identical to SEQ ID NO: 76824
  misc_feature (25)..(25): n is a, c, g, or t
  misc_feature (49)..(49): n is a, c, g, or t
  misc_feature (68)..(119): n is a, c, g, or t
  misc_feature (123)..(157): n is a, c, g, or t
  misc_feature (852)..(881): n is a, c, g, or t
  misc_feature (888)..(903): n is a, c, g, or t
  misc_feature (908)..(914): n is a, c, g, or t

SEQ ID NO: 109574 - DNA, 1556 bp, Homo Sapiens; identical to SEQ ID NO: 76825
  misc_feature (87)..(320): n is a, c, g, or t
  misc_feature (1513)..(1513): n is a, c, g, or t

SEQ ID NO: 109575 - DNA, 554 bp, Homo Sapiens; identical to SEQ ID NO: 76826

SEQ ID NO: 109576 - DNA, 197 bp, Homo Sapiens; identical to SEQ ID NO: 76827

SEQ ID NO: 109577 - DNA, 1024 bp, Homo Sapiens; identical to SEQ ID NO: 76828
  misc_feature (484)..(497): n is a, c, g, or t

SEQ ID NO: 109578 - DNA, 1672 bp, Homo Sapiens; identical to SEQ ID NO: 76829
  misc_feature (1448)..(1460): n is a, c, g, or t

SEQ ID NO: 109579 - DNA, 1461 bp, Homo Sapiens; identical to SEQ ID NO: 76835
  misc_feature (924)..(924): n is a, c, g, or t

SEQ ID NO: 109580 - DNA, 510 bp, Homo Sapiens; identical to SEQ ID NO: 76836

SEQ ID NO: 109581 - DNA, 540 bp, Homo Sapiens; identical to SEQ ID NO: 76844

SEQ ID NO: 109582 - DNA, 973 bp, Homo Sapiens; identical to SEQ ID NO: 76845

SEQ ID NO: 109583 - DNA, 631 bp, Homo Sapiens; identical to SEQ ID NO: 76850

SEQ ID NO: 109584 - DNA, 517 bp, Homo Sapiens; identical to SEQ ID NO: 76851
  misc_feature (220)..(237): n is a, c, g, or t

SEQ ID NO: 109585 - DNA, 2066 bp, Homo Sapiens; identical to SEQ ID NO: 76852

SEQ ID NO: 109586 - DNA, 994 bp, Homo Sapiens; identical to SEQ ID NO: 76853

SEQ ID NO: 109587 - DNA, 754 bp, Homo Sapiens; identical to SEQ ID NO: 76863

SEQ ID NO: 109588 - DNA, 1166 bp, Homo Sapiens; identical to SEQ ID NO: 76864

SEQ ID NO: 109589 - DNA, 464 bp, Homo Sapiens; identical to SEQ ID NO: 76868

SEQ ID NO: 109590 - DNA, 862 bp, Homo Sapiens; identical to SEQ ID NO: 76869

SEQ ID NO: 109591 - DNA, 2260 bp, Homo Sapiens; identical to SEQ ID NO: 76870
  misc_feature (78)..(112): n is a, c, g, or t
  misc_feature (1196)..(1208): n is a, c, g, or t
  misc_feature (1816)..(1824): n is a, c, g, or t
  misc_feature (1835)..(2055): n is a, c, g, or t

SEQ ID NO: 109592 - DNA, 1138 bp, Homo Sapiens; identical to SEQ ID NO: 76871
  misc_feature (77)..(111): n is a, c, g, or t
  misc_feature (587)..(595): n is a, c, g, or t
  misc_feature (606)..(826): n is a, c, g, or t
  misc_feature (947)..(947): n is a, c, g, or t
  misc_feature (1062)..(1074): n is a, c, g, or t
  misc_feature (1076)..(1092): n is a, c, g, or t

SEQ ID NO: 109593 - DNA, 960 bp, Homo Sapiens; identical to SEQ ID NO: 76872
  misc_feature (294)..(322): n is a, c, g, or t
  misc_feature (424)..(434): n is a, c, g, or t
  misc_feature (471)..(484): n is a, c, g, or t
  misc_feature (497)..(519): n is a, c, g, or t
  misc_feature (813)..(813): n is a, c, g, or t
  misc_feature (863)..(863): n is a, c, g, or t
  misc_feature (924)..(924): n is a, c, g, or t

SEQ ID NO: 109594 - DNA, 1036 bp, Homo Sapiens; identical to SEQ ID NO: 76875
  misc_feature (974)..(984): n is a, c, g, or t

SEQ ID NO: 109595 - DNA, 819 bp, Homo Sapiens; identical to SEQ ID NO: 76876
  misc_feature (56)..(56): n is a, c, g, or t
  misc_feature (125)..(125): n is a, c, g, or t
  misc_feature (129)..(129): n is a, c, g, or t

SEQ ID NO: 109596 - DNA, 2487 bp, Homo Sapiens; identical to SEQ ID NO: 76878
  misc_feature (2240)..(2240): n is a, c, g, or t
  misc_feature (2417)..(2417): n is a, c, g, or t

SEQ ID NO: 109597 - DNA, 1349 bp, Homo Sapiens; identical to SEQ ID NO: 76879
  misc_feature (79)..(113): n is a, c, g, or t

SEQ ID NO: 109598 - DNA, 1784 bp, Homo Sapiens; identical to SEQ ID NO: 76880
  misc_feature (83)..(117): n is a, c, g, or t
  misc_feature (1205)..(1205): n is a, c, g, or t
  misc_feature (1208)..(1313): n is a, c, g, or t
  misc_feature (1634)..(1642): n is a, c, g, or t

SEQ ID NO: 109599 - DNA, 1141 bp, Homo Sapiens; identical to SEQ ID NO: 76881
  misc_feature (86)..(120): n is a, c, g, or t

SEQ ID NO: 109600 - DNA, 1464 bp, Homo Sapiens; identical to SEQ ID NO: 76882
  misc_feature (1400)..(1423): n is a, c, g, or t

SEQ ID NO: 109601 - DNA, 1025 bp, Homo Sapiens; identical to SEQ ID NO: 76883

SEQ ID NO: 109602 - DNA, 1097 bp, Homo Sapiens; identical to SEQ ID NO: 76884

SEQ ID NO: 109603 - DNA, 1712 bp, Homo Sapiens; identical to SEQ ID NO: 76885
  misc_feature (81)..(115): n is a, c, g, or t
  misc_feature (1089)..(1092): n is a, c, g, or t
  misc_feature (1094)..(1166): n is a, c, g, or t
  misc_feature (1171)..(1181): n is a, c, g, or t

SEQ ID NO: 109604 - DNA, 1055 bp, Homo Sapiens; identical to SEQ ID NO: 76886
  misc_feature (85)..(119): n is a, c, g, or t

SEQ ID NO: 109605 - DNA, 887 bp, Homo Sapiens; identical to SEQ ID NO: 76887
  misc_feature (859)..(859): n is a, c, g, or t

SEQ ID NO: 109606 - DNA, 1037 bp, Homo Sapiens; identical to SEQ ID NO: 76908

SEQ ID NO: 109607 - DNA, 1397 bp, Homo Sapiens; identical to SEQ ID NO: 76909
  misc_feature (137)..(137): n is a, c, g, or t

SEQ ID NO: 109608 - DNA, 919 bp, Homo Sapiens; identical to SEQ ID NO: 76912
  misc_feature (842)..(842): n is a, c, g, or t

SEQ ID NO: 109609 - DNA, 764 bp, Homo Sapiens; identical to SEQ ID NO: 76913
  misc_feature (594)..(717): n is a, c, g, or t

SEQ ID NO: 109610 - DNA, 855 bp, Homo Sapiens; identical to SEQ ID NO: 76914

SEQ ID NO: 109611 - DNA, 831 bp, Homo Sapiens; identical to SEQ ID NO: 76917
  misc_feature (512)..(540): n is a, c, g, or t

SEQ ID NO: 109612 - DNA, 721 bp, Homo Sapiens; identical to SEQ ID NO: 76918
  misc_feature (1)..(1): n is a, c, g, or t

SEQ ID NO: 109613 - DNA, 912 bp, Homo Sapiens; identical to SEQ ID NO: 76922

SEQ ID NO: 109614 - DNA, 1581 bp, Homo Sapiens; identical to SEQ ID NO: 76923

SEQ ID NO: 109615 - DNA, 1030 bp, Homo Sapiens; identical to SEQ ID NO: 76925
  misc_feature (143)..(143): n is a, c, g, or t

SEQ ID NO: 109616 - DNA, 1230 bp, Homo Sapiens; identical to SEQ ID NO: 76926
  misc_feature (1199)..(1199): n is a, c, g, or t

SEQ ID NO: 109617 - DNA, 773 bp, Homo Sapiens; identical to SEQ ID NO: 76927
  misc_feature (722)..(722): n is a, c, g, or t
  misc_feature (758)..(758): n is a, c, g, or t

SEQ ID NO: 109618 - DNA, 1698 bp, Homo Sapiens; identical to SEQ ID NO: 76932

SEQ ID NO: 109619 - DNA, 1460 bp, Homo Sapiens; identical to SEQ ID NO: 76933

SEQ ID NO: 109620 - DNA, 467 bp, Homo Sapiens; identical to SEQ ID NO: 76934

SEQ ID NO: 109621 - DNA, 347 bp, Homo Sapiens; identical to SEQ ID NO: 76935

SEQ ID NO: 109622 - DNA, 359 bp, Homo Sapiens; identical to SEQ ID NO: 76936

SEQ ID NO: 109623 - DNA, 483 bp, Homo Sapiens; identical to SEQ ID NO: 76937

SEQ ID NO: 109624 - DNA, 1455 bp, Homo Sapiens; identical to SEQ ID NO: 76941

SEQ ID NO: 109625 - DNA, 1380 bp, Homo Sapiens; identical to SEQ ID NO: 76942

SEQ ID NO: 109626 - DNA, 1070 bp, Homo Sapiens; identical to SEQ ID NO: 76948

SEQ ID NO: 109627 - DNA, 1030 bp, Homo Sapiens; identical to SEQ ID NO: 76949

SEQ ID NO: 109628 - DNA, 780 bp, Homo Sapiens; identical to SEQ ID NO: 76950

SEQ ID NO: 109629 - DNA, 957 bp, Homo Sapiens; identical to SEQ ID NO: 76975

SEQ ID NO: 109630 - DNA, 907 bp, Homo Sapiens; identical to SEQ ID NO: 76976
  misc_feature (126)..(166): n is a, c, g, or t

SEQ ID NO: 109631 - DNA, 921 bp, Homo Sapiens; identical to SEQ ID NO: 76977
  misc_feature (596)..(659): n is a, c, g, or t
  misc_feature (756)..(818): n is a, c, g, or t

SEQ ID NO: 109632 - DNA, 1109 bp, Homo Sapiens; identical to SEQ ID NO: 76978

SEQ ID NO: 109633 - DNA, 976 bp, Homo Sapiens; identical to SEQ ID NO: 76979
  misc_feature (644)..(657): n is a, c, g, or t

SEQ ID NO: 109634 - DNA, 1347 bp, Homo Sapiens; identical to SEQ ID NO: 76981
  misc_feature (1124)..(1187): n is a, c, g, or t

SEQ ID NO: 109635 - DNA, 1281 bp, Homo Sapiens; identical to SEQ ID NO: 76982
  misc_feature (59)..(110): n is a, c, g, or t
  misc_feature (648)..(683): n is a, c, g, or t
  misc_feature (732)..(742): n is a, c, g, or t

SEQ ID NO: 109636 - DNA, 728 bp, Homo Sapiens; identical to SEQ ID NO: 76983
  misc_feature (650)..(660): n is a, c, g, or t

SEQ ID NO: 109637 - DNA, 1007 bp, Homo Sapiens; identical to SEQ ID NO: 76996
  misc_feature (684)..(736): n is a, c, g, or t

SEQ ID NO: 109638 - DNA, 1345 bp, Homo Sapiens; identical to SEQ ID NO: 76997
  misc_feature (676)..(711): n is a, c, g, or t
  misc_feature (756)..(1293): n is a, c, g, or t
  misc_feature (1304)..(1304): n is a, c, g, or t

SEQ ID NO: 109639 - DNA, 250 bp, Homo Sapiens; identical to SEQ ID NO: 76998

SEQ ID NO: 109640 - DNA, 1177 bp, Homo Sapiens; identical to SEQ ID NO: 77003
  misc_feature (278)..(302): n is a, c, g, or t
  misc_feature (1019)..(1060): n is a, c, g, or t

SEQ ID NO: 109641 - DNA, 709 bp, Homo Sapiens; identical to SEQ ID NO: 77004
  misc_feature (320)..(336): n is a, c, g, or t

SEQ ID NO: 109642 - DNA, 969 bp, Homo Sapiens; identical to SEQ ID NO: 77006

SEQ ID NO: 109643 - DNA, 1011 bp, Homo Sapiens; identical to SEQ ID NO: 77007

SEQ ID NO: 109644 - DNA, 1113 bp, Homo Sapiens; identical to SEQ ID NO: 77008
  misc_feature (1014)..(1027): n is a, c, g, or t

SEQ ID NO: 109645 - DNA, 1085 bp, Homo Sapiens; identical to SEQ ID NO: 77017
  misc_feature (66)..(67): n is a, c, g, or t
  misc_feature (134)..(134): n is a, c, g, or t
  misc_feature (231)..(232): n is a, c, g, or t
  misc_feature (241)..(241): n is a, c, g, or t
  misc_feature (249)..(249): n is a, c, g, or t

SEQ ID NO: 109646 - DNA, 1331 bp, Homo Sapiens; identical to SEQ ID NO: 77018
  misc_feature (120)..(120): n is a, c, g, or t

SEQ ID NO: 109647 - DNA, 739 bp, Homo Sapiens; identical to SEQ ID NO: 77019
  misc_feature (679)..(689): n is a, c, g, or t

SEQ ID NO: 109648 - DNA, 591 bp, Homo Sapiens; identical to SEQ ID NO: 77020
  misc_feature (526)..(536): n is a, c, g, or t

SEQ ID NO: 109649 - DNA, 1308 bp, Homo Sapiens; identical to SEQ ID NO: 77021
  misc_feature (38)..(38): n is a, c, g, or t
  misc_feature (94)..(94): n is a, c, g, or t
  misc_feature (140)..(140): n is a, c, g, or t

SEQ ID NO: 109650 - DNA, 459 bp, Homo Sapiens; identical to SEQ ID NO: 77026

SEQ ID NO: 109651 - DNA, 419 bp, Homo Sapiens; identical to SEQ ID NO: 77027

SEQ ID NO: 109652 - DNA, 915 bp, Homo Sapiens; identical to SEQ ID NO: 77053
  misc_feature (92)..(228): n is a, c, g, or t
  misc_feature (736)..(737): n is a, c, g, or t

SEQ ID NO: 109653 - DNA, 192 bp, Homo Sapiens; identical to SEQ ID NO: 77054
  misc_feature (51)..(64): n is a, c, g, or t

SEQ ID NO: 109654 - DNA, 1001 bp, Homo Sapiens; identical to SEQ ID NO: 77062
  misc_feature (514)..(531): n is a, c, g, or t
  misc_feature (556)..(867): n is a, c, g, or t

SEQ ID NO: 109655 - DNA, 1061 bp, Homo Sapiens; identical to SEQ ID NO: 77063
  misc_feature (520)..(615): n is a, c, g, or t

SEQ ID NO: 109656 - DNA, 1065 bp, Homo Sapiens; identical to SEQ ID NO: 77068
  misc_feature (30)..(30): n is a, c, g, or t
  misc_feature (90)..(313): n is a, c, g, or t
  misc_feature (692)..(692): n is a, c, g, or t
  misc_feature (999)..(1017): n is a, c, g, or t

SEQ ID NO: 109657 - DNA, 1769 bp, Homo Sapiens; identical to SEQ ID NO: 77069
  misc_feature (1413)..(1422): n is a, c, g, or t

SEQ ID NO: 109658 - DNA, 776 bp, Homo Sapiens; identical to SEQ ID NO: 77074

SEQ ID NO: 109659 - DNA, 624 bp, Homo Sapiens; identical to SEQ ID NO: 77075

SEQ ID NO: 109660 - DNA, 1799 bp, Homo Sapiens; identical to SEQ ID NO: 77078

SEQ ID NO: 109661 - DNA, 407 bp, Homo Sapiens; identical to SEQ ID NO: 77079

SEQ ID NO: 109662 - DNA, 1560 bp, Homo Sapiens; identical to SEQ ID NO: 77080

SEQ ID NO: 109663 - DNA, 513 bp, Homo Sapiens; identical to SEQ ID NO: 77081

SEQ ID NO: 109664 - DNA, 923 bp, Homo Sapiens; identical to SEQ ID NO: 77097

SEQ ID NO: 109665 - DNA, 653 bp, Homo Sapiens; identical to SEQ ID NO: 77098

SEQ ID NO: 109666 - DNA, 854 bp, Homo Sapiens; identical to SEQ ID NO: 77100

SEQ ID NO: 109667 - DNA, 486 bp, Homo Sapiens; identical to SEQ ID NO: 77101

SEQ ID NO: 109668 - DNA, 1057 bp, Homo Sapiens; identical to SEQ ID NO: 77103
  misc_feature (47)..(47): n is a, c, g, or t
  misc_feature (105)..(105): n is a, c, g, or t
  misc_feature (186)..(186): n is a, c, g, or t
  misc_feature (248)..(248): n is a, c, g, or t
  misc_feature (273)..(273): n is a, c, g, or t
  misc_feature (336)..(336): n is a, c, g, or t

SEQ ID NO: 109669 - DNA, 447 bp, Homo Sapiens; identical to SEQ ID NO: 77104
  misc_feature (380)..(380): n is a, c, g, or t

SEQ ID NO: 109670 - DNA, 1125 bp, Homo Sapiens; identical to SEQ ID NO: 77105
  misc_feature (90)..(90): n is a, c, g, or t
  misc_feature (191)..(191): n is a, c, g, or t

SEQ ID NO: 109671 - DNA, 1157 bp, Homo Sapiens; identical to SEQ ID NO: 77106
  misc_feature (74)..(74): n is a, c, g, or t

SEQ ID NO: 109672 - DNA, 527 bp, Homo Sapiens; identical to SEQ ID NO: 77116

SEQ ID NO: 109673 - DNA, 766 bp, Homo Sapiens; identical to SEQ ID NO: 77117
  misc_feature (69)..(85): n is a, c, g, or t
  misc_feature (349)..(361): n is a, c, g, or t

SEQ ID NO: 109674 - DNA, 462 bp, Homo Sapiens; identical to SEQ ID NO: 77118
  misc_feature (138)..(171): n is a, c, g, or t

SEQ ID NO: 109675 - DNA, 2056 bp, Homo Sapiens; identical to SEQ ID NO: 77122
  misc_feature (265)..(265): n is a, c, g, or t
  misc_feature (340)..(340): n is a, c, g, or t
  misc_feature (673)..(712): n is a, c, g, or t
  misc_feature (734)..(736): n is a, c, g, or t
  misc_feature (1003)..(1015): n is a, c, g, or t
  misc_feature (1268)..(1276): n is a, c, g, or t
  misc_feature (1765)..(1815): n is a, c, g, or t
  misc_feature (1974)..(1998): n is a, c, g, or t

SEQ ID NO: 109676 - DNA, 827 bp, Homo Sapiens; identical to SEQ ID NO: 77123
  misc_feature (62)..(62): n is a, c, g, or t
  misc_feature (305)..(317): n is a, c, g, or t
  misc_feature (356)..(389): n is a, c, g, or t
  misc_feature (571)..(579): n is a, c, g, or t

SEQ ID NO: 109677 - DNA, 1408 bp, Homo Sapiens; identical to SEQ ID NO: 77124
  misc_feature (121)..(121): n is a, c, g, or t
  misc_feature (182)..(251): n is a, c, g, or t
  misc_feature (1001)..(1023): n is a, c, g, or t

SEQ ID NO: 109678 - DNA, 774 bp, Homo Sapiens; identical to SEQ ID NO: 77125
  misc_feature (154)..(224): n is a, c, g, or t
  misc_feature (440)..(450): n is a, c, g, or t

SEQ ID NO: 109679 - DNA, 2421 bp, Homo Sapiens; identical to SEQ ID NO: 77131

SEQ ID NO: 109680 - DNA, 1170 bp, Homo Sapiens; identical to SEQ ID NO: 77132

SEQ ID NO: 109681 - DNA, 1294 bp, Homo Sapiens; identical to SEQ ID NO: 77133

SEQ ID NO: 109682 - DNA, 899 bp, Homo Sapiens; identical to SEQ ID NO: 77134
  misc_feature (211)..(211): n is a, c, g, or t

SEQ ID NO: 109683 - DNA, 2064 bp, Homo Sapiens; identical to SEQ ID NO: 77135

SEQ ID NO: 109684 - DNA, 650 bp, Homo Sapiens; identical to SEQ ID NO: 77136

SEQ ID NO: 109685 - DNA, 1435 bp, Homo Sapiens; identical to SEQ ID NO: 77137

SEQ ID NO: 109686 - DNA, 1156 bp, Homo Sapiens; identical to SEQ ID NO: 77138

SEQ ID NO: 109687 - DNA, 1375 bp, Homo Sapiens; identical to SEQ ID NO: 77139

SEQ ID NO: 109688 - DNA, 849 bp, Homo Sapiens; identical to SEQ ID NO: 77140

SEQ ID NO: 109689 - DNA, 2672 bp, Homo Sapiens; identical to SEQ ID NO: 77141

SEQ ID NO: 109690 - DNA, 1298 bp, Homo Sapiens; identical to SEQ ID NO: 77144
  misc_feature (1166)..(1190): n is a, c, g, or t

SEQ ID NO: 109691 - DNA, 787 bp, Homo Sapiens; identical to SEQ ID NO: 77145
  misc_feature (487)..(656): n is a, c, g, or t

SEQ ID NO: 109692 - DNA, 336 bp, Homo Sapiens; identical to SEQ ID NO: 77147
  misc_feature (114)..(134): n is a, c, g, or t
  misc_feature (157)..(208): n is a, c, g, or t

SEQ ID NO: 109693 - DNA, 498 bp, Homo Sapiens; identical to SEQ ID NO: 77148
  misc_feature (73)..(93): n is a, c, g, or t
  misc_feature (116)..(167): n is a, c, g, or t

SEQ ID NO: 109694 - DNA, 828 bp, Homo Sapiens; identical to SEQ ID NO: 77154

SEQ ID NO: 109695 - DNA, 1207 bp, Homo Sapiens; identical to SEQ ID NO: 77155

SEQ ID NO: 109696 - DNA, 530 bp, Homo Sapiens; identical to SEQ ID NO: 77156

SEQ ID NO: 109697 - DNA, 615 bp, Homo Sapiens; identical to SEQ ID NO: 77157

SEQ ID NO: 109698 - DNA, 830 bp, Homo Sapiens; identical to SEQ ID NO: 77158

SEQ ID NO: 109699 - DNA, 1911 bp, Homo Sapiens; identical to SEQ ID NO: 77162
  misc_feature (357)..(397): n is a, c, g, or t
  misc_feature (613)..(622): n is a, c, g, or t

SEQ ID NO: 109700 - DNA, 758 bp, Homo Sapiens; identical to SEQ ID NO: 77163
  misc_feature (62)..(102): n is a, c, g, or t

SEQ ID NO: 109701 - DNA, 1227 bp, Homo Sapiens; identical to SEQ ID NO: 77174
  misc_feature (603)..(789): n is a, c, g, or t

SEQ ID NO: 109702 - DNA, 678 bp, Homo Sapiens; identical to SEQ ID NO: 77175

SEQ ID NO: 109703 - DNA, 668 bp, Homo Sapiens; identical to SEQ ID NO: 77176

SEQ ID NO: 109704 - DNA, 378 bp, Homo Sapiens; identical to SEQ ID NO: 77177
  misc_feature (132)..(140): n is a, c, g, or t

SEQ ID NO: 109705 - DNA, 1701 bp, Homo Sapiens; identical to SEQ ID NO: 77183
  misc_feature (113)..(113): n is a, c, g, or t
  misc_feature (439)..(439): n is a, c, g, or t
  misc_feature (450)..(450): n is a, c, g, or t
  misc_feature (1600)..(1600): n is a, c, g, or t

SEQ ID NO: 109706 - DNA, 663 bp, Homo Sapiens; identical to SEQ ID NO: 77184

SEQ ID NO: 109707 - DNA, 772 bp, Homo Sapiens; identical to SEQ ID NO: 77185

SEQ ID NO: 109708 - DNA, 530 bp, Homo Sapiens; identical to SEQ ID NO: 77186

SEQ ID NO: 109709 - DNA, 1366 bp, Homo Sapiens; identical to SEQ ID NO: 77188
  misc_feature (83)..(142): n is a, c, g, or t

SEQ ID NO: 109710 - DNA, 807 bp, Homo Sapiens; identical to SEQ ID NO: 77189
  misc_feature (61)..(78): n is a, c, g, or t

SEQ ID NO: 109711 - DNA, 425 bp, Homo Sapiens; identical to SEQ ID NO: 77192

SEQ ID NO: 109712 - DNA, 2198 bp, Homo Sapiens; identical to SEQ ID NO: 77193

SEQ ID NO: 109713 - DNA, 816 bp, Homo Sapiens; identical to SEQ ID NO: 77194
  misc_feature (36)..(36): n is a, c, g, or t
  misc_feature (73)..(73): n is a, c, g, or t
  misc_feature (220)..(220): n is a, c, g, or t
  misc_feature (231)..(231): n is a, c, g, or t

SEQ ID NO: 109714 - DNA, 767 bp, Homo Sapiens; identical to SEQ ID NO: 77199

SEQ ID NO: 109715 - DNA, 1023 bp, Homo Sapiens; identical to SEQ ID NO: 77200
  misc_feature (338)..(357): n is a, c, g, or t

SEQ ID NO: 109716 - DNA, 1093 bp, Homo Sapiens; identical to SEQ ID NO: 77206
  misc_feature (95)..(95): n is a, c, g, or t
  misc_feature (103)..(103): n is a, c, g, or t
  misc_feature (122)..(122): n is a, c, g, or t
  misc_feature (131)..(131): n is a, c, g, or t
  misc_feature (193)..(193): n is a, c, g, or t
  misc_feature (248)..(248): n is a, c, g, or t
  misc_feature (265)..(265): n is a, c, g, or t
  misc_feature (313)..(313): n is a, c, g, or t
  misc_feature (356)..(356): n is a, c, g, or t
  misc_feature (359)..(359): n is a, c, g, or t

SEQ ID NO: 109717 - DNA, 1143 bp, Homo Sapiens; identical to SEQ ID NO: 77207

SEQ ID NO: 109718 - DNA, 979 bp, Homo Sapiens; identical to SEQ ID NO: 77208

SEQ ID NO: 109719 - DNA, 1038 bp, Homo Sapiens; identical to SEQ ID NO: 77209
  misc_feature (481)..(541): n is a, c, g, or t
  misc_feature (778)..(823): n is a, c, g, or t
  misc_feature (833)..(910): n is a, c, g, or t

SEQ ID NO: 109720 - DNA, 416 bp, Homo Sapiens; identical to SEQ ID NO: 77212
  misc_feature (263)..(324): n is a, c, g, or t

SEQ ID NO: 109721 - DNA, 950 bp, Homo Sapiens; identical to SEQ ID NO: 77213
  misc_feature (152)..(152): n is a, c, g, or t
  misc_feature (298)..(298): n is a, c, g, or t
  misc_feature (552)..(560): n is a, c, g, or t
  misc_feature (666)..(755): n is a, c, g, or t
  misc_feature (826)..(885): n is a, c, g, or t

SEQ ID NO: 109722 - DNA, 1245 bp, Homo Sapiens; identical to SEQ ID NO: 77214
  misc_feature (31)..(31): n is a, c, g, or t
  misc_feature (106)..(140): n is a, c, g, or t

SEQ ID NO: 109723 - DNA, 1029 bp, Homo Sapiens; identical to SEQ ID NO: 77215
  misc_feature (55)..(55): n is a, c, g, or t
  misc_feature (89)..(89): n is a, c, g, or t
  misc_feature (98)..(98): n is a, c, g, or t
  misc_feature (115)..(115): n is a, c, g, or t
  misc_feature (178)..(178): n is a, c, g, or t
  misc_feature (228)..(228): n is a, c, g, or t
  misc_feature (258)..(258): n is a, c, g, or t

SEQ ID NO: 109724 - DNA, 995 bp, Homo Sapiens; identical to SEQ ID NO: 77216
  misc_feature (83)..(117): n is a, c, g, or t
  misc_feature (766)..(766): n is a, c, g, or t

SEQ ID NO: 109725 - DNA, 930 bp, Homo Sapiens; identical to SEQ ID NO: 77217

SEQ ID NO: 109726 - DNA, 1156 bp, Homo Sapiens; identical to SEQ ID NO: 77218
  misc_feature (1027)..(1030): n is a, c, g, or t
  misc_feature (1032)..(1032): n is a, c, g, or t
  misc_feature (1034)..(1034): n is a, c, g, or t
  misc_feature (1132)..(1132): n is a, c, g, or t

SEQ ID NO: 109727 - DNA, 875 bp, Homo Sapiens; identical to SEQ ID NO: 77219

SEQ ID NO: 109728 - DNA, 851 bp, Homo Sapiens; identical to SEQ ID NO: 77220
  misc_feature (257)..(318): n is a, c, g, or t

SEQ ID NO: 109729 - DNA, 720 bp, Homo Sapiens; identical to SEQ ID NO: 77221
  misc_feature (161)..(161): n is a, c, g, or t

SEQ ID NO: 109730 - DNA, 740 bp, Homo Sapiens; identical to SEQ ID NO: 77222

SEQ ID NO: 109731 - DNA, 1109 bp, Homo Sapiens; identical to SEQ ID NO: 77223

SEQ ID NO: 109732 - DNA, 702 bp, Homo Sapiens; identical to SEQ ID NO: 77225

SEQ ID NO: 109733 - DNA, 2086 bp, Homo Sapiens; identical to SEQ ID NO: 77226
  misc_feature (1146)..(1157): n is a, c, g, or t

SEQ ID NO: 109734 - DNA, 917 bp, Homo Sapiens; identical to SEQ ID NO: 77227

SEQ ID NO: 109735 - DNA, 701 bp, Homo Sapiens; identical to SEQ ID NO: 77233
  misc_feature (552)..(552): n is a, c, g, or t

SEQ ID NO: 109736 - DNA, 655 bp, Homo Sapiens; identical to SEQ ID NO: 77234

SEQ ID NO: 109737 - DNA, 453 bp, Homo Sapiens; identical to SEQ ID NO: 77235

SEQ ID NO: 109738 - DNA, 1067 bp, Homo Sapiens; identical to SEQ ID NO: 77246

SEQ ID NO: 109739 - DNA, 686 bp, Homo Sapiens; identical to SEQ ID NO: 77247

SEQ ID NO: 109740 - DNA, 1386 bp, Homo Sapiens; identical to SEQ ID NO: 77248
  misc_feature (86)..(120): n is a, c, g, or t

SEQ ID NO: 109741 - DNA, 1253 bp, Homo Sapiens; identical to SEQ ID NO: 77249

SEQ ID NO: 109742 - DNA, 394 bp, Homo Sapiens; identical to SEQ ID NO: 77250

SEQ ID NO: 109743 - DNA, 767 bp, Homo Sapiens; identical to SEQ ID NO: 77251
  misc_feature (69)..(96): n is a, c, g, or t
  misc_feature (646)..(646): n is a, c, g, or t

SEQ ID NO: 109744 - DNA, 2329 bp, Homo Sapiens; identical to SEQ ID NO: 77252

SEQ ID NO: 109745 - DNA, 1158 bp, Homo Sapiens; identical to SEQ ID NO: 77253

SEQ ID NO: 109746 - DNA, 1157 bp, Homo Sapiens; identical to SEQ ID NO: 77254
  misc_feature (1082)..(1101): n is a, c, g, or t

SEQ ID NO: 109747 - DNA, 584 bp, Homo Sapiens; identical to SEQ ID NO: 77255

SEQ ID NO: 109748 - DNA, 1581 bp, Homo Sapiens; identical to SEQ ID NO: 77256
  misc_feature (918)..(1047): n is a, c, g, or t
  misc_feature (1055)..(1211): n is a, c, g, or t
  misc_feature (1215)..(1224): n is a, c, g, or t
  misc_feature (1270)..(1378): n is a, c, g, or t
  misc_feature (1382)..(1460): n is a, c, g, or t

SEQ ID NO: 109749 - DNA, 691 bp, Homo Sapiens; identical to SEQ ID NO: 77265

SEQ ID NO: 109750 - DNA, 369 bp, Homo Sapiens; identical to SEQ ID NO: 77266

SEQ ID NO: 109751 - DNA, 390 bp, Homo Sapiens; identical to SEQ ID NO: 77271
  misc_feature (91)..(133): n is a, c, g, or t

SEQ ID NO: 109752 - DNA, 844 bp, Homo Sapiens; identical to SEQ ID NO: 77272
  misc_feature (57)..(107): n is a, c, g, or t
  misc_feature (184)..(195): n is a, c, g, or t
  misc_feature (368)..(390): n is a, c, g, or t

SEQ ID NO: 109753 - DNA, 757 bp, Homo Sapiens; identical to SEQ ID NO: 77274

SEQ ID NO: 109754 - DNA, 802 bp, Homo Sapiens; identical to SEQ ID NO: 77275

SEQ ID NO: 109755 - DNA, 1040 bp, Homo Sapiens; identical to SEQ ID NO: 77276
  misc_feature (78)..(112): n is a, c, g, or t
  misc_feature (803)..(829): n is a, c, g, or t

SEQ ID NO: 109756 - DNA, 909 bp, Homo Sapiens; identical to SEQ ID NO: 77277

SEQ ID NO: 109757 - DNA, 2469 bp, Homo Sapiens; identical to SEQ ID NO: 77278
  misc_feature (1022)..(1042): n is a, c, g, or t
  misc_feature (1665)..(1707): n is a, c, g, or t
  misc_feature (1814)..(1885): n is a, c, g, or t
  misc_feature (2040)..(2040): n is a, c, g, or t
  misc_feature (2423)..(2423): n is a, c, g, or t
  misc_feature (2427)..(2427): n is a, c, g, or t

SEQ ID NO: 109758 - DNA, 1212 bp, Homo Sapiens; identical to SEQ ID NO: 77280
  misc_feature (1061)..(1061): n is a, c, g, or t
  misc_feature (1063)..(1064): n is a, c, g, or t
  misc_feature (1077)..(1077): n is a, c, g, or t

SEQ ID NO: 109759 - DNA, 2040 bp, Homo Sapiens; identical to SEQ ID NO: 77281
  misc_feature (1830)..(1831): n is a, c, g, or t
  misc_feature (1906)..(1906): n is a, c, g, or t
  misc_feature (2001)..(2001): n is a, c, g, or t

SEQ ID NO: 109760 - DNA, 1752 bp, Homo Sapiens; identical to SEQ ID NO: 77285
  misc_feature (1461)..(1472): n is a, c, g, or t
  misc_feature (1517)..(1534): n is a, c, g, or t
  misc_feature (1543)..(1581): n is a, c, g, or t
  misc_feature (1628)..(1700): n is a, c, g, or t

SEQ ID NO: 109761 - DNA, 746 bp, Homo Sapiens; identical to SEQ ID NO: 77286

SEQ ID NO: 109762 - DNA, 1079 bp, Homo Sapiens; identical to SEQ ID NO: 77287

SEQ ID NO: 109763 - DNA, 1127 bp, Homo Sapiens; identical to SEQ ID NO: 77288

SEQ ID NO: 109764 - DNA, 1086 bp, Homo Sapiens; identical to SEQ ID NO: 77300

SEQ ID NO: 109765 - DNA, 1174 bp, Homo Sapiens; identical to SEQ ID NO: 77301

SEQ ID NO: 109766 - DNA, 1400 bp, Homo Sapiens; identical to SEQ ID NO: 77302
  misc_feature (1366)..(1366): n is a, c, g, or t

SEQ ID NO: 109767 - DNA, 414 bp, Homo Sapiens; identical to SEQ ID NO: 77304
  misc_feature (132)..(165): n is a, c, g, or t

SEQ ID NO: 109768 - DNA, 2590 bp, Homo Sapiens; identical to SEQ ID NO: 77305

SEQ ID NO: 109769 - DNA, 1924 bp, Homo Sapiens; identical to SEQ ID NO: 77307

SEQ ID NO: 109770 - DNA, 729 bp, Homo Sapiens; identical to SEQ ID NO: 77308

SEQ ID NO: 109771 - DNA, 1045 bp, Homo Sapiens; identical to SEQ ID NO: 77309

SEQ ID NO: 109772 - DNA, 400 bp, Homo Sapiens; identical to SEQ ID NO: 77311

SEQ ID NO: 109773 - DNA, 402 bp, Homo Sapiens; identical to SEQ ID NO: 77312

SEQ ID NO: 109774 - DNA, 1328 bp, Homo Sapiens; identical to SEQ ID NO: 77313

SEQ ID NO: 109775 - DNA, 1470 bp, Homo Sapiens; identical to SEQ ID NO: 77314

SEQ ID NO: 109776 - DNA, 799 bp, Homo Sapiens; identical to SEQ ID NO: 77315

SEQ ID NO: 109777 - DNA, 1319 bp, Homo Sapiens; identical to SEQ ID NO: 77319
  misc_feature (1088)..(1192): n is a, c, g, or t
  misc_feature (1194)..(1199): n is a, c, g, or t

SEQ ID NO: 109778 - DNA, 1108 bp, Homo Sapiens; identical to SEQ ID NO: 77320

SEQ ID NO: 109779 - DNA, 224 bp, Homo Sapiens; identical to SEQ ID NO: 77321

SEQ ID NO: 109780 - DNA, 1241 bp, Homo Sapiens; identical to SEQ ID NO: 77322
  misc_feature (81)..(81): n is a, c, g, or t
  misc_feature (90)..(90): n is a, c, g, or t

SEQ ID NO: 109781 - DNA, 1097 bp, Homo Sapiens; identical to SEQ ID NO: 77323
  misc_feature (69)..(103): n is a, c, g, or t

SEQ ID NO: 109782 - DNA, 1418 bp, Homo Sapiens; identical to SEQ ID NO: 77324
  misc_feature (76)..(110): n is a, c, g, or t

SEQ ID NO: 109783 - DNA, 997 bp, Homo Sapiens; identical to SEQ ID NO: 77325

SEQ ID NO: 109784 - DNA, 841 bp, Homo Sapiens; identical to SEQ ID NO: 77326

SEQ ID NO: 109785 - DNA, 1278 bp, Homo Sapiens; identical to SEQ ID NO: 77329

SEQ ID NO: 109786 - DNA, 441 bp, Homo Sapiens; identical to SEQ ID NO: 77330

SEQ ID NO: 109787 - DNA, 1155 bp, Homo Sapiens; identical to SEQ ID NO: 77331
  misc_feature (596)..(596): n is a, c, g, or t

SEQ ID NO: 109788 - DNA, 695 bp, Homo Sapiens; identical to SEQ ID NO: 77333

SEQ ID NO: 109789 - DNA, 171 bp, Homo Sapiens; identical to SEQ ID NO: 77334

SEQ ID NO: 109790 - DNA, 2348 bp, Homo Sapiens; identical to SEQ ID NO: 77339

SEQ ID NO: 109791 - DNA, 1754 bp, Homo Sapiens; identical to SEQ ID NO: 77340

SEQ ID NO: 109792 - DNA, 1070 bp, Homo Sapiens; identical to SEQ ID NO: 77342

SEQ ID NO: 109793 - DNA, 855 bp, Homo Sapiens; identical to SEQ ID NO: 77343

SEQ ID NO: 109794 - DNA, 451 bp, Homo Sapiens; identical to SEQ ID NO: 77345

SEQ ID NO: 109795 - DNA, 2198 bp, Homo Sapiens; identical to SEQ ID NO: 77346
  misc_feature (1399)..(1399): n is a, c, g, or t
  misc_feature (1436)..(1436): n is a, c, g, or t
  misc_feature (1461)..(1461): n is a, c, g, or t
  misc_feature (1470)..(1470): n is a, c, g, or t

SEQ ID NO: 109796 - DNA, 917 bp, Homo Sapiens; identical to SEQ ID NO: 77361
  misc_feature (397)..(438): n is a, c, g, or t

SEQ ID NO: 109797 - DNA, 1022 bp, Homo Sapiens; identical to SEQ ID NO: 77362
  misc_feature (129)..(170): n is a, c, g, or t
  misc_feature (741)..(742): n is a, c, g, or t
  misc_feature (765)..(765): n is a, c, g, or t
  misc_feature (767)..(767): n is a, c, g, or t
  misc_feature (771)..(771): n is a, c, g, or t
  misc_feature (776)..(776): n is a, c, g, or t
  misc_feature (812)..(812): n is a, c, g, or t
  misc_feature (840)..(840): n is a, c, g, or t
  misc_feature (844)..(844): n is a, c, g, or t
  misc_feature (860)..(860): n is a, c, g, or t

SEQ ID NO: 109798 - DNA, 665 bp, Homo Sapiens; identical to SEQ ID NO: 77368

SEQ ID NO: 109799 - DNA, 631 bp, Homo Sapiens; identical to SEQ ID NO: 77369

SEQ ID NO: 109800 - DNA, 507 bp, Homo Sapiens; identical to SEQ ID NO: 77376

SEQ ID NO: 109801 - DNA, 1091 bp, Homo Sapiens; identical to SEQ ID NO: 77377
  misc_feature (702)..(702): n is a, c, g, or t

SEQ ID NO: 109802 - DNA, 688 bp, Homo Sapiens; identical to SEQ ID NO: 77380
  misc_feature (367)..(426): n is a, c, g, or t
  misc_feature (540)..(580): n is a, c, g, or t

SEQ ID NO: 109803 - DNA, 1041 bp, Homo Sapiens; identical to SEQ ID NO: 77381
  misc_feature (84)..(84): n is a, c, g, or t
  misc_feature (86)..(86): n is a, c, g, or t
  misc_feature (220)..(220): n is a, c, g, or t
  misc_feature (223)..(224): n is a, c, g, or t
  misc_feature (289)..(289): n is a, c, g, or t
  misc_feature (320)..(320): n is a, c, g, or t
  misc_feature (560)..(619): n is a, c, g, or t
  misc_feature (728)..(938): n is a, c, g, or t

SEQ ID NO: 109804 - DNA, 1364 bp, Homo Sapiens; identical to SEQ ID NO: 77383
  misc_feature (1205)..(1264): n is a, c, g, or t

SEQ ID NO: 109805 - DNA, 656 bp, Homo Sapiens; identical to SEQ ID NO: 77384
  misc_feature (50)..(50): n is a, c, g, or t

SEQ ID NO: 109806 - DNA, 972 bp, Homo Sapiens; identical to SEQ ID NO: 77385

SEQ ID NO: 109807 - DNA, 456 bp, Homo Sapiens; identical to SEQ ID NO: 77386
  misc_feature (213)..(213): n is a, c, g, or t
  misc_feature (235)..(284): n is a, c, g, or t

SEQ ID NO: 109808 - DNA, 818 bp, Homo Sapiens; identical to SEQ ID NO: 77397

SEQ ID NO: 109809 - DNA, 463 bp, Homo Sapiens; identical to SEQ ID NO: 77398

SEQ ID NO: 109810 - DNA, 1184 bp, Homo Sapiens; identical to SEQ ID NO: 77407
  misc_feature (582)..(612): n is a, c, g, or t

SEQ ID NO: 109811 - DNA, 460 bp, Homo Sapiens; identical to SEQ ID NO: 77408

SEQ ID NO: 109812 - DNA, 526 bp, Homo Sapiens; identical to SEQ ID NO: 77409

SEQ ID NO: 109813 - DNA, 483 bp, Homo Sapiens; identical to SEQ ID NO: 77410

SEQ ID NO: 109814 - DNA, 1520 bp, Homo Sapiens; identical to SEQ ID NO: 77411
  misc_feature (927)..(957): n is a, c, g, or t

SEQ ID NO: 109815 - DNA, 1015 bp, Homo Sapiens; identical to SEQ ID NO: 77413

SEQ ID NO: 109816 - DNA, 1492 bp, Homo Sapiens; identical to SEQ ID NO: 77414

SEQ ID NO: 109817 - DNA, 1027 bp, Homo Sapiens; identical to SEQ ID NO: 77415

SEQ ID NO: 109818 - DNA, 755 bp, Homo Sapiens; identical to SEQ ID NO: 77416
  misc_feature (41)..(82): n is a, c, g, or t
  misc_feature (85)..(119): n is a, c, g, or t

SEQ ID NO: 109819 - DNA, 981 bp, Homo Sapiens; identical to SEQ ID NO: 77417
  misc_feature (661)..(661): n is a, c, g, or t
  misc_feature (672)..(672): n is a, c, g, or t
  misc_feature (878)..(887): n is a, c, g, or t

SEQ ID NO: 109820 - DNA, 658 bp, Homo Sapiens; identical to SEQ ID NO: 77423
  misc_feature (116)..(116): n is a, c, g, or t

SEQ ID NO: 109821 - DNA, 1605 bp, Homo Sapiens; identical to SEQ ID NO: 77424
  misc_feature (81)..(115): n is a, c, g, or t
  misc_feature (1342)..(1486): n is a, c, g, or t
  misc_feature (1493)..(1508): n is a, c, g, or t

SEQ ID NO: 109822 - DNA, 984 bp, Homo Sapiens; identical to SEQ ID NO: 77425

SEQ ID NO: 109823 - DNA, 1058 bp, Homo Sapiens; identical to SEQ ID NO: 77426
  misc_feature (56)..(56): n is a, c, g, or t
  misc_feature (202)..(409): n is a, c, g, or t

SEQ ID NO: 109824 - DNA, 514 bp, Homo Sapiens; identical to SEQ ID NO: 77427

SEQ ID NO: 109825 - DNA, 1788 bp, Homo Sapiens; identical to SEQ ID NO: 77429

SEQ ID NO: 109826 - DNA, 1219 bp, Homo Sapiens; identical to SEQ ID NO: 77430

SEQ ID NO: 109827 - DNA, 708 bp, Homo Sapiens; identical to SEQ ID NO: 77432

SEQ ID NO: 109828 - DNA, 438 bp, Homo Sapiens; identical to SEQ ID NO: 77433

SEQ ID NO: 109829 - DNA, 994 bp, Homo Sapiens; identical to SEQ ID NO: 77434
  misc_feature (822)..(822): n is a, c, g, or t

SEQ ID NO: 109830 - DNA, 694 bp, Homo Sapiens; identical to SEQ ID NO: 77439

SEQ ID NO: 109831 - DNA, 611 bp, Homo Sapiens; identical to SEQ ID NO: 77440

SEQ ID NO: 109832 - DNA, 1048 bp, Homo Sapiens; identical to SEQ ID NO: 77442
  misc_feature (925)..(925): n is a, c, g, or t

SEQ ID NO: 109833 - DNA, 2224 bp, Homo Sapiens; identical to SEQ ID NO: 77443

SEQ ID NO: 109834 - DNA, 852 bp, Homo Sapiens; identical to SEQ ID NO: 77444

SEQ ID NO: 109835 - DNA, 367 bp, Homo Sapiens; identical to SEQ ID NO: 77445

SEQ ID NO: 109836 - DNA, 249 bp, Homo Sapiens; identical to SEQ ID NO: 77449

SEQ ID NO: 109837 - DNA, 1971 bp, Homo Sapiens; identical to SEQ ID NO: 77450
  misc_feature (76)..(108): n is a, c, g, or t
  misc_feature (783)..(838): n is a, c, g, or t

SEQ ID NO: 109838 - DNA, 540 bp, Homo Sapiens; identical to SEQ ID NO: 77458

SEQ ID NO: 109839 - DNA, 453 bp, Homo Sapiens; identical to SEQ ID NO: 77459

SEQ ID NO: 109840 - DNA, 724 bp, Homo Sapiens; identical to SEQ ID NO: 77460
  misc_feature (440)..(440): n is a, c, g, or t

SEQ ID NO: 109841 - DNA, 1545 bp, Homo Sapiens; identical to SEQ ID NO: 77462
  misc_feature (151)..(187): n is a, c, g, or t
  misc_feature (378)..(378): n is a, c, g, or t
  misc_feature (381)..(381): n is a, c, g, or t
  misc_feature (394)..(414): n is a, c, g, or t

SEQ ID NO: 109842 - DNA, 933 bp, Homo Sapiens; identical to SEQ ID NO: 77463
  misc_feature (131)..(170): n is a, c, g, or t
  misc_feature (827)..(827): n is a, c, g, or t

SEQ ID NO: 109843 - DNA, 1158 bp, Homo Sapiens; identical to SEQ ID NO: 77467
  misc_feature (1025)..(1025): n is a, c, g, or t
  misc_feature (1041)..(1042): n is a, c, g, or t
  misc_feature (1045)..(1047): n is a, c, g, or t
  misc_feature (1067)..(1067): n is a, c, g, or t

SEQ ID NO: 109844 - DNA, 1210 bp, Homo Sapiens; identical to SEQ ID NO: 77468
  misc_feature (85)..(98): n is a, c, g, or t

SEQ ID NO: 109845 - DNA, 967 bp, Homo Sapiens; identical to SEQ ID NO: 77470
  misc_feature (453)..(464): n is a, c, g, or t

SEQ ID NO: 109846 - DNA, 1273 bp, Homo Sapiens; identical to SEQ ID NO: 77471
  misc_feature (19)..(19): n is a, c, g, or t
  misc_feature (27)..(27): n is a, c, g, or t

SEQ ID NO: 109847 - DNA, 914 bp, Homo Sapiens; identical to SEQ ID NO: 77472
  misc_feature (763)..(763): n is a, c, g, or t
  misc_feature (774)..(774): n is a, c, g, or t
  misc_feature (865)..(865): n is a, c, g, or t

SEQ ID NO: 109848 - DNA, 1822 bp, Homo Sapiens; identical to SEQ ID NO: 77473
  misc_feature (288)..(339): n is a, c, g, or t
  misc_feature (477)..(477): n is a, c, g, or t

SEQ ID NO: 109849 - DNA, 521 bp, Homo Sapiens; identical to SEQ ID NO: 77474
  misc_feature (13)..(13): n is a, c, g, or t
  misc_feature (23)..(23): n is a, c, g, or t
  misc_feature (184)..(184): n is a, c, g, or t

SEQ ID NO: 109850 - DNA, 528 bp, Homo Sapiens; identical to SEQ ID NO: 77475

SEQ ID NO: 109851 - DNA, 944 bp, Homo Sapiens; identical to SEQ ID NO: 77477

SEQ ID NO: 109852 - DNA, 859 bp, Homo Sapiens; identical to SEQ ID NO: 77478
  misc_feature (548)..(567): n is a, c, g, or t
  misc_feature (569)..(579): n is a, c, g, or t
  misc_feature (581)..(588): n is a, c, g, or t
  misc_feature (590)..(605): n is a, c, g, or t
  misc_feature (607)..(612): n is a, c, g, or t
  misc_feature (614)..(619): n is a, c, g, or t
  misc_feature (623)..(626): n is a, c, g, or t
  misc_feature (629)..(701): n is a, c, g, or t
  misc_feature (708)..(708): n is a, c, g, or t
  misc_feature (710)..(711): n is a, c, g, or t
  misc_feature (715)..(716): n is a, c, g, or t
  misc_feature (734)..(734): n is a, c, g, or t
  misc_feature (736)..(736): n is a, c, g, or t

SEQ ID NO: 109853 - DNA, 479 bp, Homo Sapiens; identical to SEQ ID NO: 77479

SEQ ID NO: 109854 - DNA, 1189 bp, Homo Sapiens; identical to SEQ ID NO: 77485
  misc_feature (36)..(36): n is a, c, g, or t
  misc_feature (39)..(39): n is a, c, g, or t
  misc_feature (93)..(93): n is a, c, g, or t
  misc_feature (96)..(96): n is a, c, g, or t
  misc_feature (113)..(113): n is a, c, g, or t
  misc_feature (147)..(147): n is a, c, g, or t
  misc_feature (171)..(171): n is a, c, g, or t
  misc_feature (235)..(235): n is a, c, g, or t
  misc_feature (242)..(242): n is a, c, g, or t
  misc_feature (261)..(261): n is a, c, g, or t
  misc_feature (268)..(268): n is a, c, g, or t
  misc_feature (271)..(271): n is a, c, g, or t
  misc_feature (280)..(280): n is a, c, g, or t
  misc_feature (338)..(338): n is a, c, g, or t
  misc_feature (355)..(355): n is a, c, g, or t
  misc_feature (384)..(384): n is a, c, g, or t
  misc_feature (468)..(646): n is a, c, g, or t
  misc_feature (1143)..(1143): n is a, c, g, or t

SEQ ID NO: 109855 - DNA, 1107 bp, Homo Sapiens; identical to SEQ ID NO: 77486
  misc_feature (50)..(51): n is a, c, g, or t
  misc_feature (62)..(62): n is a, c, g, or t
  misc_feature (144)..(144): n is a, c, g, or t
  misc_feature (202)..(203): n is a, c, g, or t
  misc_feature (207)..(207): n is a, c, g, or t
  misc_feature (354)..(387): n is a, c, g, or t
  misc_feature (1009)..(1034): n is a, c, g, or t

SEQ ID NO: 109856 - DNA, 895 bp, Homo Sapiens; identical to SEQ ID NO: 77487
  misc_feature (804)..(822): n is a, c, g, or t

SEQ ID NO: 109857 - DNA, 687 bp, Homo Sapiens; identical to SEQ ID NO: 77494
  misc_feature (94)..(197): n is a, c, g, or t
  misc_feature (344)..(363): n is a, c, g, or t

SEQ ID NO: 109858 - DNA, 1382 bp, Homo Sapiens; identical to SEQ ID NO: 77495
  misc_feature (267)..(267): n is a, c, g, or t
  misc_feature (322)..(337): n is a, c, g, or t
  misc_feature (397)..(397): n is a, c, g, or t
  misc_feature (410)..(410): n is a, c, g, or t
  misc_feature (1007)..(1015): n is a, c, g, or t
  misc_feature (1091)..(1109): n is a, c, g, or t
  misc_feature (1154)..(1179): n is a, c, g, or t

SEQ ID NO: 109859 - DNA, 663 bp, Homo Sapiens; identical to SEQ ID NO: 77496
  misc_feature (66)..(169): n is a, c, g, or t
  misc_feature (313)..(330): n is a, c, g, or t

SEQ ID NO: 109860 - DNA, 540 bp, Homo Sapiens; identical to SEQ ID NO: 77497
  misc_feature (75)..(75): n is a, c, g, or t

SEQ ID NO: 109861 - DNA, 611 bp, Homo Sapiens; identical to SEQ ID NO: 77498
  misc_feature (131)..(131): n is a, c, g, or t

SEQ ID NO: 109862 - DNA, 2271 bp, Homo Sapiens; identical to SEQ ID NO: 77499
  misc_feature (779)..(797): n is a, c, g, or t
  misc_feature (1239)..(1290): n is a, c, g, or t

SEQ ID NO: 109863 - DNA, 1229 bp, Homo Sapiens; identical to SEQ ID NO: 77500
  misc_feature (1176)..(1176): n is a, c, g, or t

SEQ ID NO: 109864 - DNA, 658 bp, Homo Sapiens; identical to SEQ ID NO: 77503

SEQ ID NO: 109865 - DNA, 1402 bp, Homo Sapiens; identical to SEQ ID NO: 77504

SEQ ID NO: 109866 - DNA, 852 bp, Homo Sapiens; identical to SEQ ID NO: 77505

SEQ ID NO: 109867 - DNA, 1465 bp, Homo Sapiens; identical to SEQ ID NO: 77506
  misc_feature (38)..(38): n is a, c, g, or t
  misc_feature (42)..(80): n is a, c, g, or t
  misc_feature (83)..(117): n is a, c, g, or t

SEQ ID NO: 109868 - DNA, 779 bp, Homo Sapiens; identical to SEQ ID NO: 77507
  misc_feature (505)..(555): n is a, c, g, or t

SEQ ID NO: 109869 - DNA, 1540 bp, Homo Sapiens; identical to SEQ ID NO: 77508
  misc_feature (201)..(211): n is a, c, g, or t
  misc_feature (1279)..(1279): n is a, c, g, or t

SEQ ID NO: 109870 - DNA, 1378 bp, Homo Sapiens; identical to SEQ ID NO: 77509
  misc_feature (80)..(114): n is a, c, g, or t

SEQ ID NO: 109871 - DNA, 865 bp, Homo Sapiens; identical to SEQ ID NO: 77516

SEQ ID NO: 109872 - DNA, 1850 bp, Homo Sapiens; identical to SEQ ID NO: 77517
  misc_feature (963)..(963): n is a, c, g, or t
  misc_feature (999)..(999): n is a, c, g, or t
  misc_feature (1007)..(1007): n is a, c, g, or t

SEQ ID NO: 109873 - DNA, 957 bp, Homo Sapiens; identical to SEQ ID NO: 77518

SEQ ID NO: 109874 - DNA, 1046 bp, Homo Sapiens; identical to SEQ ID NO: 77519
  misc_feature (45)..(45): n is a, c, g, or t
  misc_feature (47)..(47): n is a, c, g, or t
  misc_feature (80)..(80): n is a, c, g, or t
  misc_feature (89)..(89): n is a, c, g, or t
  misc_feature (104)..(104): n is a, c, g, or t
  misc_feature (139)..(139): n is a, c, g, or t
  misc_feature (151)..(151): n is a, c, g, or t
  misc_feature (155)..(155): n is a, c, g, or t

SEQ ID NO: 109875 - DNA, 518 bp, Homo Sapiens; identical to SEQ ID NO: 77520

SEQ ID NO: 109876 - DNA, 2464 bp, Homo Sapiens; identical to SEQ ID NO: 77522

SEQ ID NO: 109877 - DNA, 977 bp, Homo Sapiens; identical to SEQ ID NO: 77523

SEQ ID NO: 109878 - DNA, 804 bp, Homo Sapiens; identical to SEQ ID NO: 77524

SEQ ID NO: 109879 - DNA, 972 bp, Homo Sapiens; identical to SEQ ID NO: 77525

SEQ ID NO: 109880 - DNA, 705 bp, Homo Sapiens; identical to SEQ ID NO: 77538
  misc_feature (33)..(33): n is a, c, g, or t
  misc_feature (229)..(261): n is a, c, g, or t

SEQ ID NO: 109881 - DNA, 764 bp, Homo Sapiens; identical to SEQ ID NO: 77539
  misc_feature (34)..(34): n is a, c, g, or t

SEQ ID NO: 109882 - DNA, 726 bp, Homo Sapiens; identical to SEQ ID NO: 77544

SEQ ID NO: 109883 - DNA, 1557 bp, Homo Sapiens; identical to SEQ ID NO: 77545
  misc_feature (1279)..(1310): n is a, c, g, or t
  misc_feature (1443)..(1443): n is a, c, g, or t
  misc_feature (1464)..(1464): n is a, c, g, or t

SEQ ID NO: 109884 - DNA, 3510 bp, Homo Sapiens; identical to SEQ ID NO: 77547

SEQ ID NO: 109885 - DNA, 1096 bp, Homo Sapiens; identical to SEQ ID NO: 77548

SEQ ID NO: 109886 - DNA, 646 bp, Homo Sapiens; identical to SEQ ID NO: 77549

SEQ ID NO: 109887 - DNA, 1881 bp, Homo Sapiens; identical to SEQ ID NO: 77552

SEQ ID NO: 109888 - DNA, 880 bp, Homo Sapiens; identical to SEQ ID NO: 77553
  misc_feature (22)..(22): n is a, c, g, or t
  misc_feature (783)..(783): n is a, c, g, or t
  misc_feature (797)..(797): n is a, c, g, or t
  misc_feature (800)..(800): n is a, c, g, or t

SEQ ID NO: 109889 - DNA, 699 bp, Homo Sapiens; identical to SEQ ID NO: 77555
  misc_feature (502)..(557): n is a, c, g, or t

SEQ ID NO: 109890 - DNA, 1305 bp, Homo Sapiens; identical to SEQ ID NO: 77556

SEQ ID NO: 109891 - DNA, 1583 bp, Homo Sapiens; identical to SEQ ID NO: 77557
  misc_feature (74)..(108): n is a, c, g, or t
  misc_feature (267)..(267): n is a, c, g, or t
  misc_feature (335)..(335): n is a, c, g, or t
  misc_feature (554)..(554): n is a, c, g, or t

SEQ ID NO: 109892 - DNA, 415 bp, Homo Sapiens; identical to SEQ ID NO: 77558
  misc_feature (218)..(276): n is a, c, g, or t

SEQ ID NO: 109893 - DNA, 1385 bp, Homo Sapiens; identical to SEQ ID NO: 77560
  misc_feature (50)..(276): n is a, c, g, or t
  misc_feature (291)..(291): n is a, c, g, or t
  misc_feature (301)..(406): n is a, c, g, or t
  misc_feature (506)..(516): n is a, c, g, or t
  misc_feature (1089)..(1135): n is a, c, g, or t
  misc_feature (1137)..(1158): n is a, c, g, or t
  misc_feature (1160)..(1160): n is a, c, g, or t
  misc_feature (1162)..(1167): n is a, c, g, or t
  misc_feature (1169)..(1217): n is a, c, g, or t
  misc_feature (1219)..(1234): n is a, c, g, or t
  misc_feature (1236)..(1237): n is a, c, g, or t

SEQ ID NO: 109894 - DNA, 664 bp, Homo Sapiens; identical to SEQ ID NO: 77561
  misc_feature (26)..(26): n is a, c, g, or t
  misc_feature (82)..(82): n is a, c, g, or t

SEQ ID NO: 109895 - DNA, 726 bp, Homo Sapiens; identical to SEQ ID NO: 77562
  misc_feature (72)..(85): n is a, c, g, or t

SEQ ID NO: 109896 - DNA, 1268 bp, Homo Sapiens; identical to SEQ ID NO: 77563

SEQ ID NO: 109897 - DNA, 427 bp, Homo Sapiens; identical to SEQ ID NO: 77564
  misc_feature (366)..(366): n is a, c, g, or t

SEQ ID NO: 109898 - DNA, 809 bp, Homo Sapiens; identical to SEQ ID NO: 77567

SEQ ID NO: 109899 - DNA, 1041 bp, Homo Sapiens; identical to SEQ ID NO: 77568
  misc_feature (46)..(46): n is a, c, g, or t
  misc_feature (86)..(86): n is a, c, g, or t
  misc_feature (194)..(194): n is a, c, g, or t
  misc_feature (258)..(258): n is a, c, g, or t
  misc_feature (269)..(269): n is a, c, g, or t
  misc_feature (530)..(599): n is a, c, g, or t

SEQ ID NO: 109900 - DNA, 961 bp, Homo Sapiens; identical to SEQ ID NO: 77569

SEQ ID NO: 109901 - DNA, 979 bp, Homo Sapiens; identical to SEQ ID NO: 77572
  misc_feature (28)..(28): n is a, c, g, or t
  misc_feature (90)..(90): n is a, c, g, or t
  misc_feature (94)..(94): n is a, c, g, or t
  misc_feature (116)..(116): n is a, c, g, or t
  misc_feature (137)..(137): n is a, c, g, or t
  misc_feature (150)..(150): n is a, c, g, or t
  misc_feature (157)..(157): n is a, c, g, or t
  misc_feature (160)..(160): n is a, c, g, or t
  misc_feature (178)..(178): n is a, c, g, or t
  misc_feature (183)..(183): n is a, c, g, or t
  misc_feature (204)..(204): n is a, c, g, or t
  misc_feature (213)..(213): n is a, c, g, or t
  misc_feature (233)..(233): n is a, c, g, or t
  misc_feature (263)..(263): n is a, c, g, or t
  misc_feature (269)..(269): n is a, c, g, or t
  misc_feature (280)..(280): n is a, c, g, or t
  misc_feature (292)..(292): n is a, c, g, or t

SEQ ID NO: 109902 - DNA, 663 bp, Homo Sapiens; identical to SEQ ID NO: 77573
  misc_feature (94)..(94): n is a, c, g, or t

SEQ ID NO: 109903 - DNA, 653 bp, Homo Sapiens; identical to SEQ ID NO: 77574

SEQ ID NO: 109904 - DNA, 467 bp, Homo Sapiens; identical to SEQ ID NO: 77575
  misc_feature (18)..(18): n is a, c, g, or t
  misc_feature (348)..(348): n is a, c, g, or t
  misc_feature (366)..(366): n is a, c, g, or t
  misc_feature (397)..(397): n is a, c, g, or t
  misc_feature (417)..(417): n is a, c, g, or t
  misc_feature (429)..(429): n is a, c, g, or t
  misc_feature (441)..(441): n is a, c, g, or t
  misc_feature (450)..(450): n is a, c, g, or t

SEQ ID NO: 109905 - DNA, 452 bp, Homo Sapiens; identical to SEQ ID NO: 77576
  misc_feature (65)..(65): n is a, c, g, or t
  misc_feature (422)..(422): n is a, c, g, or t

SEQ ID NO: 109906 - DNA, 1030 bp, Homo Sapiens; identical to SEQ ID NO: 77577
  misc_feature (43)..(84): n is a, c, g, or t
  misc_feature (87)..(121): n is a, c, g, or t

SEQ ID NO: 109907 - DNA, 901 bp, Homo Sapiens; identical to SEQ ID NO: 77578

SEQ ID NO: 109908 - DNA, 1360 bp, Homo Sapiens; identical to SEQ ID NO: 77579
  misc_feature (79)..(87): n is a, c, g, or t
  misc_feature (1289)..(1317): n is a, c, g, or t

SEQ ID NO: 109909 - DNA, 699 bp, Homo Sapiens; identical to SEQ ID NO: 77583
  misc_feature (24)..(24): n is a, c, g, or t
  misc_feature (82)..(82): n is a, c, g, or t
  misc_feature (586)..(622): n is a, c, g, or t

SEQ ID NO: 109910 - DNA, 238 bp, Homo Sapiens; identical to SEQ ID NO: 77584

SEQ ID NO: 109911 - DNA, 958 bp, Homo Sapiens; identical to SEQ ID NO: 77585

SEQ ID NO: 109912 - DNA, 949 bp, Homo Sapiens; identical to SEQ ID NO: 77586

SEQ ID NO: 109913 - DNA, 602 bp, Homo Sapiens; identical to SEQ ID NO: 77587
  misc_feature (79)..(79): n is a, c, g, or t
  misc_feature (90)..(90): n is a, c, g, or t
  misc_feature (99)..(99): n is a, c, g, or t

SEQ ID NO: 109914 - DNA, 863 bp, Homo Sapiens; identical to SEQ ID NO: 77590

SEQ ID NO: 109915 - DNA, 885 bp, Homo Sapiens; identical to SEQ ID NO: 77591
  misc_feature (236)..(236): n is a, c, g, or t
  misc_feature (699)..(712): n is a, c, g, or t

SEQ ID NO: 109916 - DNA, 953 bp, Homo Sapiens; identical to SEQ ID NO: 77592
  misc_feature (65)..(116): n is a, c, g, or t

SEQ ID NO: 109917 - DNA, 912 bp, Homo Sapiens; identical to SEQ ID NO: 77593

SEQ ID NO: 109918 - DNA, 1655 bp, Homo Sapiens; identical to SEQ ID NO: 77596

SEQ ID NO: 109919 - DNA, 901 bp, Homo Sapiens; identical to SEQ ID NO: 77597

SEQ ID NO: 109920 - DNA, 824 bp, Homo Sapiens; identical to SEQ ID NO: 77607
  misc_feature (651)..(699): n is a, c, g, or t
  misc_feature (736)..(759): n is a, c, g, or t

SEQ ID NO: 109921 - DNA, 713 bp, Homo Sapiens; identical to SEQ ID NO: 77608
  misc_feature (267)..(267): n is a, c, g, or t
  misc_feature (580)..(661): n is a, c, g, or t

SEQ ID NO: 109922 - DNA, 1684 bp, Homo Sapiens; identical to SEQ ID NO: 77609
  misc_feature (1527)..(1550): n is a, c, g, or t
  misc_feature (1586)..(1635): n is a, c, g, or t

SEQ ID NO: 109923 - DNA, 860 bp, Homo Sapiens; identical to SEQ ID NO: 77610

SEQ ID NO: 109924 - DNA, 933 bp, Homo Sapiens; identical to SEQ ID NO: 77611
  misc_feature (783)..(785): n is a, c, g, or t
  misc_feature (788)..(788): n is a, c, g, or t
  misc_feature (795)..(797): n is a, c, g, or t
  misc_feature (799)..(839): n is a, c, g, or t
  misc_feature (843)..(843): n is a, c, g, or t

SEQ ID NO: 109925 - DNA, 1049 bp, Homo Sapiens; identical to SEQ ID NO: 77617
  misc_feature (193)..(193): n is a, c, g, or t

SEQ ID NO: 109926 - DNA, 1633 bp, Homo Sapiens; identical to SEQ ID NO: 77618

SEQ ID NO: 109927 - DNA, 1158 bp, Homo Sapiens; identical to SEQ ID NO: 77619

SEQ ID NO: 109928 - DNA, 613 bp, Homo Sapiens; identical to SEQ ID NO: 77620

SEQ ID NO: 109929 - DNA, 1348 bp, Homo Sapiens; identical to SEQ ID NO: 77631

SEQ ID NO: 109930 - DNA, 1422 bp, Homo Sapiens; identical to SEQ ID NO: 77632

SEQ ID NO: 109931 - DNA, 2135 bp, Homo Sapiens; identical to SEQ ID NO: 77634
  misc_feature (1827)..(1828): n is a, c, g, or t
  misc_feature (1832)..(1835): n is a, c, g, or t
  misc_feature (1839)..(1850): n is a, c, g, or t
  misc_feature (1852)..(1853): n is a, c, g, or t

SEQ ID NO: 109932 - DNA, 836 bp, Homo Sapiens; identical to SEQ ID NO: 77635
  misc_feature (96)..(135): n is a, c, g, or t
  misc_feature (138)..(172): n is a, c, g, or t

SEQ ID NO: 109933 - DNA, 983 bp, Homo Sapiens; identical to SEQ ID NO: 77638
  misc_feature (76)..(76): n is a, c, g, or t
  misc_feature (102)..(102): n is a, c, g, or t
  misc_feature (164)..(164): n is a, c, g, or t
  misc_feature (214)..(214): n is a, c, g, or t

SEQ ID NO: 109934 - DNA, 862 bp, Homo Sapiens; identical to SEQ ID NO: 77639

SEQ ID NO: 109935 - DNA, 1199 bp, Homo Sapiens; identical to SEQ ID NO: 77640
  misc_feature (1034)..(1065): n is a, c, g, or t

SEQ ID NO: 109936 - DNA, 999 bp, Homo Sapiens; identical to SEQ ID NO: 77641
  misc_feature (54)..(114): n is a, c, g, or t
  misc_feature (574)..(592): n is a, c, g, or t
  misc_feature (720)..(720): n is a, c, g, or t
  misc_feature (771)..(771): n is a, c, g, or t

SEQ ID NO: 109937 - DNA, 928 bp, Homo Sapiens; identical to SEQ ID NO: 77642

SEQ ID NO: 109938 - DNA, 1062 bp, Homo Sapiens; identical to SEQ ID NO: 77649
  misc_feature (1006)..(1006): n is a, c, g, or t
  misc_feature (1018)..(1018): n is a, c, g, or t

SEQ ID NO: 109939 - DNA, 574 bp, Homo Sapiens; identical to SEQ ID NO: 77650
  misc_feature (193)..(283): n is a, c, g, or t
  misc_feature (341)..(341): n is a, c, g, or t
  misc_feature (471)..(471): n is a, c, g, or t

SEQ ID NO: 109940 - DNA, 1113 bp, Homo Sapiens; identical to SEQ ID NO: 77651

SEQ ID NO: 109941 - DNA, 1694 bp, Homo Sapiens; identical to SEQ ID NO: 77652
  misc_feature (1400)..(1463): n is a, c, g, or t

SEQ ID NO: 109942 - DNA, 414 bp, Homo Sapiens; identical to SEQ ID NO: 77653

SEQ ID NO: 109943 - DNA, 562 bp, Homo Sapiens; identical to SEQ ID NO: 77654
  misc_feature (103)..(182): n is a, c, g, or t

SEQ ID NO: 109944 - DNA, 765 bp, Homo Sapiens; identical to SEQ ID NO: 77655
  misc_feature (44)..(44): n is a, c, g, or t

SEQ ID NO: 109945 - DNA, 744 bp, Homo Sapiens; identical to SEQ ID NO: 77656
  misc_feature (81)..(81): n is a, c, g, or t
  misc_feature (191)..(191): n is a, c, g, or t
  misc_feature (209)..(209): n is a, c, g, or t

SEQ ID NO: 109946 - DNA, 952 bp, Homo Sapiens; identical to SEQ ID NO: 77660
  misc_feature (556)..(604): n is a, c, g, or t

SEQ ID NO: 109947 - DNA, 569 bp, Homo Sapiens; identical to SEQ ID NO: 77661

SEQ ID NO: 109948 - DNA, 767 bp, Homo Sapiens; identical to SEQ ID NO: 77674

SEQ ID NO: 109949 - DNA, 865 bp, Homo Sapiens; identical to SEQ ID NO: 77675

SEQ ID NO: 109950 - DNA, 725 bp, Homo Sapiens; identical to SEQ ID NO: 77688
  misc_feature (677)..(677): n is a, c, g, or t
  misc_feature (704)..(704): n is a, c, g, or t

SEQ ID NO: 109951 - DNA, 1043 bp, Homo Sapiens; identical to SEQ ID NO: 77689

SEQ ID NO: 109952 - DNA, 2890 bp, Homo Sapiens; identical to SEQ ID NO: 77690
  misc_feature (2639)..(2763): n is a, c, g, or t
  misc_feature (2765)..(2765): n is a, c, g, or t
  misc_feature (2772)..(2788): n is a, c, g, or t
  misc_feature (2792)..(2822): n is a, c, g, or t
  misc_feature (2825)..(2825): n is a, c, g, or t
  misc_feature (2828)..(2844): n is a, c, g, or t

SEQ ID NO: 109953 - DNA, 972 bp, Homo Sapiens; identical to SEQ ID NO: 77691

SEQ ID NO: 109954 - DNA, 776 bp, Homo Sapiens; identical to SEQ ID NO: 77692

SEQ ID NO: 109955 - DNA, 857 bp, Homo Sapiens; identical to SEQ ID NO: 77693
  misc_feature (657)..(657): n is a, c, g, or t

SEQ ID NO: 109956 - DNA, 779 bp, Homo Sapiens; identical to SEQ ID NO: 77694

SEQ ID NO: 109957 - DNA, 968 bp, Homo Sapiens; identical to SEQ ID NO: 77695

SEQ ID NO: 109958 - DNA, 1427 bp, Homo Sapiens; identical to SEQ ID NO: 77697

SEQ ID NO: 109959 - DNA, 918 bp, Homo Sapiens; identical to SEQ ID NO: 77698

SEQ ID NO: 109960 - DNA, 631 bp, Homo Sapiens; identical to SEQ ID NO: 77705

SEQ ID NO: 109961 - DNA, 489 bp, Homo Sapiens; identical to SEQ ID NO: 77706

SEQ ID NO: 109962 - DNA, 829 bp, Homo Sapiens; identical to SEQ ID NO: 77714

SEQ ID NO: 109963 - DNA, 934 bp, Homo Sapiens; identical to SEQ ID NO: 77715
  misc_feature (121)..(155): n is a, c, g, or t

SEQ ID NO: 109964 - DNA, 988 bp, Homo Sapiens; identical to SEQ ID NO: 77720
  misc_feature (158)..(158): n is a, c, g, or t

SEQ ID NO: 109965 - DNA, 862 bp, Homo Sapiens; identical to SEQ ID NO: 77721

SEQ ID NO: 109966 - DNA, 602 bp, Homo Sapiens; identical to SEQ ID NO: 77724

SEQ ID NO: 109967 - DNA, 2433 bp, Homo Sapiens; identical to SEQ ID NO: 77725
  misc_feature (1581)..(1582): n is a, c, g, or t

SEQ ID NO: 109968 - DNA, 1380 bp, Homo Sapiens; identical to SEQ ID NO: 77732
  misc_feature (769)..(889): n is a, c, g, or t
  misc_feature (906)..(966): n is a, c, g, or t
  misc_feature (971)..(1122): n is a, c, g, or t
  misc_feature (1134)..(1145): n is a, c, g, or t
  misc_feature (1162)..(1286): n is a, c, g, or t

SEQ ID NO: 109969 - DNA, 1288 bp, Homo Sapiens; identical to SEQ ID NO: 77733
  misc_feature (1116)..(1116): n is a, c, g, or t
  misc_feature (1272)..(1272): n is a, c, g, or t

SEQ ID NO: 109970 - DNA, 922 bp, Homo Sapiens; identical to SEQ ID NO: 77736

SEQ ID NO: 109971 - DNA, 1142 bp, Homo Sapiens; identical to SEQ ID NO: 77737
  misc_feature (456)..(456): n is a, c, g, or t

SEQ ID NO: 109972 - DNA, 1065 bp, Homo Sapiens; identical to SEQ ID NO: 77739

SEQ ID NO: 109973 - DNA, 1061 bp, Homo Sapiens; identical to SEQ ID NO: 77740

SEQ ID NO: 109974 - DNA, 689 bp, Homo Sapiens; identical to SEQ ID NO: 77741
  misc_feature (190)..(283): n is a, c, g, or t
  misc_feature (398)..(398): n is a, c, g, or t

SEQ ID NO: 109975 - DNA, 1187 bp, Homo Sapiens; identical to SEQ ID NO: 77742
  misc_feature (75)..(75): n is a, c, g, or t

SEQ ID NO: 109976 - DNA, 1135 bp, Homo Sapiens; identical to SEQ ID NO: 77744
  misc_feature (60)..(60): n is a, c, g, or t
  misc_feature (103)..(103): n is a, c, g, or t
  misc_feature (175)..(175): n is a, c, g, or t
  misc_feature (182)..(182): n is a, c, g, or t
  misc_feature (186)..(186): n is a, c, g, or t
  misc_feature (220)..(220): n is a, c, g, or t
  misc_feature (248)..(248): n is a, c, g, or t
  misc_feature (291)..(291): n is a, c, g, or t
  misc_feature (297)..(297): n is a, c, g, or t
  misc_feature (301)..(301): n is a, c, g, or t
  misc_feature (1042)..(1061): n is a, c, g, or t

SEQ ID NO: 109977 - DNA, 1365 bp, Homo Sapiens; identical to SEQ ID NO: 77745

SEQ ID NO: 109978 - DNA, 710 bp, Homo Sapiens; identical to SEQ ID NO: 77747
  misc_feature (419)..(466): n is a, c, g, or t

SEQ ID NO: 109979 - DNA, 555 bp, Homo Sapiens; identical to SEQ ID NO: 77748
  misc_feature (425)..(425): n is a, c, g, or t
  misc_feature (440)..(440): n is a, c, g, or t
  misc_feature (458)..(458): n is a, c, g, or t
  misc_feature (482)..(482): n is a, c, g, or t
  misc_feature (523)..(523): n is a, c, g, or t
  misc_feature (532)..(532): n is a, c, g, or t
  misc_feature (539)..(539): n is a, c, g, or t

SEQ ID NO: 109980 - DNA, 419 bp, Homo Sapiens; identical to SEQ ID NO: 77749
  misc_feature (254)..(301): n is a, c, g, or t
  misc_feature (399)..(399): n is a, c, g, or t

SEQ ID NO: 109981 - DNA, 1161 bp, Homo Sapiens; identical to SEQ ID NO: 77750

SEQ ID NO: 109982 - DNA, 1976 bp, Homo Sapiens; identical to SEQ ID NO: 77751
  misc_feature (403)..(427): n is a, c, g, or t
  misc_feature (593)..(593): n is a, c, g, or t

SEQ ID NO: 109983 - DNA, 212 bp, Homo Sapiens; identical to SEQ ID NO: 77752

SEQ ID NO: 109984 - DNA, 624 bp, Homo Sapiens; identical to SEQ ID NO: 77753

SEQ ID NO: 109985 - DNA, 1664 bp, Homo Sapiens; identical to SEQ ID NO: 77754
  misc_feature (536)..(562): n is a, c, g, or t
  misc_feature (883)..(921): n is a, c, g, or t
  misc_feature (1163)..(1186): n is a, c, g, or t
  misc_feature (1645)..(1653): n is a, c, g, or t

SEQ ID NO: 109986 - DNA, 397 bp, Homo Sapiens; identical to SEQ ID NO: 77755
  misc_feature (74)..(98): n is a, c, g, or t

SEQ ID NO: 109987 - DNA, 2788 bp, Homo Sapiens; identical to SEQ ID NO: 77756
  misc_feature (2702)..(2731): n is a, c, g, or t

SEQ ID NO: 109988 - DNA, 713 bp, Homo Sapiens; identical to SEQ ID NO: 77757

SEQ ID NO: 109989 - DNA, 1142 bp, Homo Sapiens; identical to SEQ ID NO: 77770

SEQ ID NO: 109990 - DNA, 1656 bp, Homo Sapiens; identical to SEQ ID NO: 77771
  misc_feature (1179)..(1216): n is a, c, g, or t

SEQ ID NO: 109991 - DNA, 751 bp, Homo Sapiens; identical to SEQ ID NO: 77776
  misc_feature (77)..(140): n is a, c, g, or t

SEQ ID NO: 109992 - DNA, 542 bp, Homo Sapiens; identical to SEQ ID NO: 77777

SEQ ID NO: 109993 - DNA, 1386 bp, Homo Sapiens; identical to SEQ ID NO: 77778

SEQ ID NO: 109994 - DNA, 3126 bp, Homo Sapiens; identical to SEQ ID NO: 77779
  misc_feature (2506)..(2807): n is a, c, g, or t

SEQ ID NO: 109995 - DNA, 1540 bp, Homo Sapiens; identical to SEQ ID NO: 77780

SEQ ID NO: 109996 - DNA, 606 bp, Homo Sapiens; identical to SEQ ID NO: 77782
  misc_feature (65)..(114): n is a, c, g, or t

SEQ ID NO: 109997 - DNA, 997 bp, Homo Sapiens; identical to SEQ ID NO: 77783
  misc_feature (60)..(244): n is a, c, g, or t
  misc_feature (258)..(258): n is a, c, g, or t
  misc_feature (294)..(295): n is a, c, g, or t
  misc_feature (307)..(307): n is a, c, g, or t

SEQ ID NO: 109998 - DNA, 1787 bp, Homo Sapiens; identical to SEQ ID NO: 77794
  misc_feature (751)..(763): n is a, c, g, or t
  misc_feature (776)..(784): n is a, c, g, or t
  misc_feature (912)..(920): n is a, c, g, or t
  misc_feature (1501)..(1501): n is a, c, g, or t
  misc_feature (1519)..(1520): n is a, c, g, or t
  misc_feature (1563)..(1563): n is a, c, g, or t
  misc_feature (1606)..(1606): n is a, c, g, or t
  misc_feature (1756)..(1756): n is a, c, g, or t

SEQ ID NO: 109999 - DNA, 854 bp, Homo Sapiens; identical to SEQ ID NO: 77795
  misc_feature (56)..(56): n is a, c, g, or t
  misc_feature (152)..(161): n is a, c, g, or t
  misc_feature (163)..(166): n is a, c, g, or t
  misc_feature (168)..(168): n is a, c, g, or t
  misc_feature (174)..(175): n is a, c, g, or t
  misc_feature (180)..(180): n is a, c, g, or t
  misc_feature (182)..(182): n is a, c, g, or t
  misc_feature (728)..(728): n is a, c, g, or t

SEQ ID NO: 110000 - DNA, 1251 bp, Homo Sapiens; identical to SEQ ID NO: 77798
  misc_feature (57)..(91): n is a, c, g, or t

SEQ ID NO: 110001 - DNA, 1175 bp, Homo Sapiens; identical to SEQ ID NO: 77799

SEQ ID NO: 110002 - DNA, 1165 bp, Homo Sapiens; identical to SEQ ID NO: 77800
  misc_feature (80)..(81): n is a, c, g, or t
  misc_feature (86)..(87): n is a, c, g, or t
  misc_feature (90)..(90): n is a, c, g, or t
  misc_feature (93)..(93): n is a, c, g, or t
  misc_feature (95)..(96): n is a, c, g, or t
  misc_feature (98)..(98): n is a, c, g, or t
  misc_feature (105)..(105): n is a, c, g, or t
  misc_feature (107)..(107): n is a, c, g, or t
  misc_feature (112)..(112): n is a, c, g, or t
  misc_feature (156)..(156): n is a, c, g, or t
  misc_feature (158)..(159): n is a, c, g, or t
  misc_feature (175)..(175): n is a, c, g, or t
  misc_feature (185)..(185): n is a, c, g, or t
  misc_feature (187)..(187): n is a, c, g, or t
  misc_feature (198)..(198): n is a, c, g, or t
  misc_feature (207)..(207): n is a, c, g, or t
  misc_feature (213)..(213): n is a, c, g, or t
  misc_feature (221)..(221): n is a, c, g, or t
  misc_feature (228)..(228): n is a, c, g, or t
  misc_feature (230)..(232): n is a, c, g, or t
  misc_feature (248)..(248): n is a, c, g, or t
  misc_feature (250)..(252): n is a, c, g, or t
  misc_feature (284)..(284): n is a, c, g, or t
  misc_feature (288)..(288): n is a, c, g, or t
  misc_feature (291)..(291): n is a, c, g, or t
  misc_feature (294)..(295): n is a, c, g, or t
  misc_feature (298)..(306): n is a, c, g, or t

SEQ ID NO: 110003 - DNA, 2394 bp, Homo Sapiens; identical to SEQ ID NO: 77802
  misc_feature (2291)..(2308): n is a, c, g, or t

SEQ ID NO: 110004 - DNA, 444 bp, Homo Sapiens; identical to SEQ ID NO: 77803

SEQ ID NO: 110005 - DNA, 596 bp, Homo Sapiens; identical to SEQ ID NO: 77809
  misc_feature (485)..(485): n is a, c, g, or t

SEQ ID NO: 110006 - DNA, 844 bp, Homo Sapiens; identical to SEQ ID NO: 77810
  misc_feature (636)..(636): n is a, c, g, or t
  misc_feature (801)..(802): n is a, c, g, or t

SEQ ID NO: 110007 - DNA, 1309 bp, Homo Sapiens; identical to SEQ ID NO: 77813

SEQ ID NO: 110008 - DNA, 1143 bp, Homo Sapiens; identical to SEQ ID NO: 77814
  misc_feature (837)..(876): n is a, c, g, or t

SEQ ID NO: 110009 - DNA, 332 bp, Homo Sapiens; identical to SEQ ID NO: 77815

SEQ ID NO: 110010 - DNA, 746 bp, Homo Sapiens; identical to SEQ ID NO: 77816
  misc_feature (227)..(242): n is a, c, g, or t

SEQ ID NO: 110011 - DNA, 609 bp, Homo Sapiens; identical to SEQ ID NO: 77817

SEQ ID NO: 110012 - DNA, 1010 bp, Homo Sapiens; identical to SEQ ID NO: 77818

SEQ ID NO: 110013 - DNA, 164 bp, Homo Sapiens; identical to SEQ ID NO: 77821
  misc_feature (153)..(153): n is a, c, g, or t

SEQ ID NO: 110014 - DNA, 948 bp, Homo Sapiens; identical to SEQ ID NO: 77822

SEQ ID NO: 110015 - DNA, 172 bp, Homo Sapiens; identical to SEQ ID NO: 77823

SEQ ID NO: 110016 - DNA, 688 bp, Homo Sapiens; identical to SEQ ID NO: 77826
  misc_feature (36)..(36): n is a, c, g, or t

SEQ ID NO: 110017 - DNA, 524 bp, Homo Sapiens; identical to SEQ ID NO: 77827

SEQ ID NO: 110018 - DNA, 1981 bp, Homo Sapiens; identical to SEQ ID NO: 77830
  misc_feature (1415)..(1509): n is a, c, g, or t
  misc_feature (1592)..(1655): n is a, c, g, or t

SEQ ID NO: 110019 - DNA, 818 bp, Homo Sapiens; identical to SEQ ID NO: 77831

SEQ ID NO: 110020 - DNA, 1060 bp, Homo Sapiens; identical to SEQ ID NO: 77844
  misc_feature (53)..(83): n is a, c, g, or t
  misc_feature (867)..(883): n is a, c, g, or t

SEQ ID NO: 110021 - DNA, 1941 bp, Homo Sapiens; identical to SEQ ID NO: 77845
  misc_feature (154)..(170): n is a, c, g, or t
  misc_feature (195)..(422): n is a, c, g, or t
  misc_feature (1146)..(1160): n is a, c, g, or t
  misc_feature (1530)..(1556): n is a, c, g, or t
  misc_feature (1570)..(1634): n is a, c, g, or t

SEQ ID NO: 110022 - DNA, 1031 bp, Homo Sapiens; identical to SEQ ID NO: 77846
  misc_feature (860)..(874): n is a, c, g, or t
  misc_feature (936)..(936): n is a, c, g, or t
  misc_feature (990)..(990): n is a, c, g, or t

SEQ ID NO: 110023 - DNA, 2858 bp, Homo Sapiens; identical to SEQ ID NO: 77848
  misc_feature (93)..(93): n is a, c, g, or t
  misc_feature (129)..(187): n is a, c, g, or t
  misc_feature (241)..(241): n is a, c, g, or t

SEQ ID NO: 110024 - DNA, 441 bp, Homo Sapiens; identical to SEQ ID NO: 77849
  misc_feature (382)..(390): n is a, c, g, or t

SEQ ID NO: 110025 - DNA, 949 bp, Homo Sapiens; identical to SEQ ID NO: 77855

SEQ ID NO: 110026 - DNA, 1354 bp, Homo Sapiens; identical to SEQ ID NO: 77856
  misc_feature (1297)..(1297): n is a, c, g, or t

SEQ ID NO: 110027 - DNA, 905 bp, Homo Sapiens; identical to SEQ ID NO: 77857
  misc_feature (79)..(113): n is a, c, g, or t

SEQ ID NO: 110028 - DNA, 1173 bp, Homo Sapiens; identical to SEQ ID NO: 77858

SEQ ID NO: 110029 - DNA, 803 bp, Homo Sapiens; identical to SEQ ID NO: 77874
  misc_feature (77)..(91): n is a, c, g, or t
  misc_feature (687)..(687): n is a, c, g, or t
  misc_feature (765)..(765): n is a, c, g, or t
  misc_feature (786)..(786): n is a, c, g, or t

SEQ ID NO: 110030 - DNA, 413 bp, Homo Sapiens; identical to SEQ ID NO: 77875

SEQ ID NO: 110031 - DNA, 981 bp, Homo Sapiens; identical to SEQ ID NO: 77882
  misc_feature (16)..(16): n is a, c, g, or t
  misc_feature (21)..(21): n is a, c, g, or t
  misc_feature (37)..(37): n is a, c, g, or t
  misc_feature (81)..(81): n is a, c, g, or t
  misc_feature (83)..(83): n is a, c, g, or t
  misc_feature (88)..(88): n is a, c, g, or t
  misc_feature (124)..(124): n is a, c, g, or t
  misc_feature (172)..(172): n is a, c, g, or t
  misc_feature (210)..(210): n is a, c, g, or t
  misc_feature (226)..(226): n is a, c, g, or t
  misc_feature (235)..(235): n is a, c, g, or t
  misc_feature (264)..(264): n is a, c, g, or t
  misc_feature (313)..(313): n is a, c, g, or t

SEQ ID NO: 110032 - DNA, 555 bp, Homo Sapiens; identical to SEQ ID NO: 77883

SEQ ID NO: 110033 - DNA, 931 bp, Homo Sapiens; identical to SEQ ID NO: 77884
  misc_feature (904)..(904): n is a, c, g, or t

SEQ ID NO: 110034 - DNA, 1900 bp, Homo Sapiens; identical to SEQ ID NO: 77885
  misc_feature (1414)..(1532): n is a, c, g, or t
  misc_feature (1729)..(1846): n is a, c, g, or t

SEQ ID NO: 110035 - DNA, 281 bp, Homo Sapiens; identical to SEQ ID NO: 77886

SEQ ID NO: 110036 - DNA, 507 bp, Homo Sapiens; identical to SEQ ID NO: 77888

SEQ ID NO: 110037 - DNA, 926 bp, Homo Sapiens; identical to SEQ ID NO: 77889
  misc_feature (644)..(683): n is a, c, g, or t
  misc_feature (826)..(826): n is a, c, g, or t

SEQ ID NO: 110038 - DNA, 580 bp, Homo Sapiens; identical to SEQ ID NO: 5048

SEQ ID NO: 110039 - DNA, 1001 bp, Homo Sapiens; identical to SEQ ID NO: 77892

SEQ ID NO: 110040 - DNA, 2205 bp, Homo Sapiens; identical to SEQ ID NO: 77893
  misc_feature (2081)..(2081): n is a, c, g, or t
  misc_feature (2139)..(2139): n is a, c, g, or t

SEQ ID NO: 110041 - DNA, 1142 bp, Homo Sapiens; identical to SEQ ID NO: 77894
  misc_feature (349)..(436): n is a, c, g, or t

SEQ ID NO: 110042 - DNA, 1501 bp, Homo Sapiens; identical to SEQ ID NO: 77915

SEQ ID NO: 110043 - DNA, 1197 bp, Homo Sapiens; identical to SEQ ID NO: 77916
  misc_feature (101)..(101): n is a, c, g, or t
  misc_feature (135)..(135): n is a, c, g, or t
  misc_feature (143)..(143): n is a, c, g, or t
  misc_feature (158)..(158): n is a, c, g, or t

SEQ ID NO: 110044 - DNA, 1090 bp, Homo Sapiens; identical to SEQ ID NO: 77923
  misc_feature (917)..(995): n is a, c, g, or t

SEQ ID NO: 110045 - DNA, 3191 bp, Homo Sapiens; identical to SEQ ID NO: 77924
  misc_feature (126)..(206): n is a, c, g, or t

SEQ ID NO: 110046 - DNA, 1202 bp, Homo Sapiens; identical to SEQ ID NO: 77928
  misc_feature (117)..(215): n is a, c, g, or t
  misc_feature (219)..(219): n is a, c, g, or t
  misc_feature (232)..(232): n is a, c, g, or t
  misc_feature (240)..(240): n is a, c, g, or t
  misc_feature (260)..(260): n is a, c, g, or t
  misc_feature (284)..(284): n is a, c, g, or t
  misc_feature (289)..(289): n is a, c, g, or t
  misc_feature (320)..(320): n is a, c, g, or t

SEQ ID NO: 110047 - DNA, 1070 bp, Homo Sapiens; identical to SEQ ID NO: 77929
  misc_feature (125)..(244): n is a, c, g, or t
  misc_feature (496)..(505): n is a, c, g, or t

SEQ ID NO: 110048 - DNA, 883 bp, Homo Sapiens; identical to SEQ ID NO: 77930
  misc_feature (598)..(598): n is a, c, g, or t

SEQ ID NO: 110049 - DNA, 2558 bp, Homo Sapiens; identical to SEQ ID NO: 77931
  misc_feature (73)..(111): n is a, c, g, or t
  misc_feature (889)..(901): n is a, c, g, or t

SEQ ID NO: 110050 - DNA, 674 bp, Homo Sapiens; identical to SEQ ID NO: 77932

SEQ ID NO: 110051 - DNA, 1022 bp, Homo Sapiens; identical to SEQ ID NO: 77933
  misc_feature (133)..(333): n is a, c, g, or t
  misc_feature (545)..(545): n is a, c, g, or t

SEQ ID NO: 110052 - DNA, 1027 bp, Homo Sapiens; identical to SEQ ID NO: 77934
  misc_feature (751)..(751): n is a, c, g, or t
  misc_feature (859)..(859): n is a, c, g, or t
  misc_feature (883)..(883): n is a, c, g, or t
  misc_feature (978)..(978): n is a, c, g, or t

SEQ ID NO: 110053 - DNA, 624 bp, Homo Sapiens; identical to SEQ ID NO: 77935

SEQ ID NO: 110054 - DNA, 667 bp, Homo Sapiens; identical to SEQ ID NO: 77936
  misc_feature (84)..(118): n is a, c, g, or t

SEQ ID NO: 110055 - DNA, 934 bp, Homo Sapiens; identical to SEQ ID NO: 77937
  misc_feature (58)..(58): n is a, c, g, or t
  misc_feature (83)..(117): n is a, c, g, or t

SEQ ID NO: 110056 - DNA, 1307 bp, Homo Sapiens; identical to SEQ ID NO: 77940

SEQ ID NO: 110057 - DNA, 747 bp, Homo Sapiens; identical to SEQ ID NO: 77941
  misc_feature (708)..(708): n is a, c, g, or t

SEQ ID NO: 110058 - DNA, 816 bp, Homo Sapiens; identical to SEQ ID NO: 77950

SEQ ID NO: 110059 - DNA, 1347 bp, Homo Sapiens; identical to SEQ ID NO: 77951

SEQ ID NO: 110060 - DNA, 1075 bp, Homo Sapiens; identical to SEQ ID NO: 77952
  misc_feature (551)..(947): n is a, c, g, or t
  misc_feature (1003)..(1033): n is a, c, g, or t

SEQ ID NO: 110061 - DNA, 2020 bp, Homo Sapiens; identical to SEQ ID NO: 77966
  misc_feature (79)..(113): n is a, c, g, or t

SEQ ID NO: 110062 - DNA, 997 bp, Homo Sapiens; identical to SEQ ID NO: 77967
  misc_feature (156)..(156): n is a, c, g, or t
  misc_feature (783)..(792): n is a, c, g, or t

SEQ ID NO: 110063 - DNA, 736 bp, Homo Sapiens; identical to SEQ ID NO: 77969

SEQ ID NO: 110064 - DNA, 1088 bp, Homo Sapiens; identical to SEQ ID NO: 77970

SEQ ID NO: 110065 - DNA, 936 bp, Homo Sapiens; identical to SEQ ID NO: 77971

SEQ ID NO: 110066 - DNA, 1199 bp, Homo Sapiens; identical to SEQ ID NO: 77972
  misc_feature (49)..(50): n is a, c, g, or t

SEQ ID NO: 110067 - DNA, 1010 bp, Homo Sapiens; identical to SEQ ID NO: 77973
  misc_feature (952)..(952): n is a, c, g, or t

SEQ ID NO: 110068 - DNA, 989 bp, Homo Sapiens; identical to SEQ ID NO: 77974
  misc_feature (165)..(165): n is a, c, g, or t
  misc_feature (297)..(366): n is a, c, g, or t

SEQ ID NO: 110069 - DNA, 2069 bp, Homo Sapiens; identical to SEQ ID NO: 77975
  misc_feature (399)..(408): n is a, c, g, or t
  misc_feature (1289)..(1318): n is a, c, g, or t
  misc_feature (1378)..(1427): n is a, c, g, or t
  misc_feature (1605)..(1613): n is a, c, g, or t
  misc_feature (1636)..(1645): n is a, c, g, or t
  misc_feature (1895)..(1895): n is a, c, g, or t
  misc_feature (1915)..(1916): n is a, c, g, or t
  misc_feature (1918)..(1918): n is a, c, g, or t
  misc_feature (1921)..(1921): n is a, c, g, or t
  misc_feature (1988)..(1988): n is a, c, g, or t

SEQ ID NO: 110070 - DNA, 750 bp, Homo Sapiens; identical to SEQ ID NO: 77976
  misc_feature (76)..(119): n is a, c, g, or t
  misc_feature (307)..(307): n is a, c, g, or t
  misc_feature (330)..(339): n is a, c, g, or t

SEQ ID NO: 110071 - DNA, 930 bp, Homo Sapiens; identical to SEQ ID NO: 77979

SEQ ID NO: 110072 - DNA, 450 bp, Homo Sapiens; identical to SEQ ID NO: 77980

SEQ ID NO: 110073 - DNA, 895 bp, Homo Sapiens; identical to SEQ ID NO: 77982

SEQ ID NO: 110074 - DNA, 1873 bp, Homo Sapiens; identical to SEQ ID NO: 77983

SEQ ID NO: 110075 - DNA, 1588 bp, Homo Sapiens; identical to SEQ ID NO: 77984

SEQ ID NO: 110076 - DNA, 528 bp, Homo Sapiens; identical to SEQ ID NO: 77985

SEQ ID NO: 110077 - DNA, 701 bp, Homo Sapiens; identical to SEQ ID NO: 77992

SEQ ID NO: 110078 - DNA, 595 bp, Homo Sapiens; identical to SEQ ID NO: 77993
  misc_feature (56)..(56): n is a, c, g, or t

SEQ ID NO: 110079 - DNA, 751 bp, Homo Sapiens; identical to SEQ ID NO: 77998

SEQ ID NO: 110080 - DNA, 412 bp, Homo Sapiens; identical to SEQ ID NO: 77999

SEQ ID NO: 110081 - DNA, 773 bp, Homo Sapiens; identical to SEQ ID NO: 78002
  misc_feature (16)..(16): n is a, c, g, or t

SEQ ID NO: 110082 - DNA, 579 bp, Homo Sapiens; identical to SEQ ID NO: 78003

SEQ ID NO: 110083 - DNA, 508 bp, Homo Sapiens; identical to SEQ ID NO: 78016
  misc_feature (411)..(411): n is a, c, g, or t

SEQ ID NO: 110084 - DNA, 513 bp, Homo Sapiens; identical to SEQ ID NO: 78017
  misc_feature (257)..(308): n is a, c, g, or t
  misc_feature (349)..(349): n is a, c, g, or t
  misc_feature (355)..(356): n is a, c, g, or t
  misc_feature (358)..(358): n is a, c, g, or t
  misc_feature (363)..(363): n is a, c, g, or t
  misc_feature (372)..(372): n is a, c, g, or t

SEQ ID NO: 110085 - DNA, 1605 bp, Homo Sapiens; identical to SEQ ID NO: 78021
  misc_feature (18)..(18): n is a, c, g, or t
  misc_feature (279)..(279): n is a, c, g, or t

SEQ ID NO: 110086 - DNA, 1196 bp, Homo Sapiens; identical to SEQ ID NO: 78022

SEQ ID NO: 110087 - DNA, 1353 bp, Homo Sapiens; identical to SEQ ID NO: 78026

SEQ ID NO: 110088 - DNA, 981 bp, Homo Sapiens; identical to SEQ ID NO: 78027

SEQ ID NO: 110089 - DNA, 454 bp, Homo Sapiens; identical to SEQ ID NO: 78029

SEQ ID NO: 110090 - DNA, 443 bp, Homo Sapiens; identical to SEQ ID NO: 78030

SEQ ID NO: 110091 - DNA, 639 bp, Homo Sapiens; identical to SEQ ID NO: 78031

SEQ ID NO: 110092 - DNA, 331 bp, Homo Sapiens; identical to SEQ ID NO: 78032

SEQ ID NO: 110093 - DNA, 1922 bp, Homo Sapiens; identical to SEQ ID NO: 78033

SEQ ID NO: 110094 - DNA, 1470 bp, Homo Sapiens; identical to SEQ ID NO: 78034

SEQ ID NO: 110095 - DNA, 1075 bp, Homo Sapiens; identical to SEQ ID NO: 78035
  misc_feature (889)..(933): n is a, c, g, or t

SEQ ID NO: 110096 - DNA, 504 bp, Homo Sapiens; identical to SEQ ID NO: 78049

SEQ ID NO: 110097 - DNA, 1021 bp, Homo Sapiens; identical to SEQ ID NO: 78050

SEQ ID NO: 110098 - DNA, 348 bp, Homo Sapiens; identical to SEQ ID NO: 78054
  misc_feature (335)..(335): n is a, c, g, or t

SEQ ID NO: 110099 - DNA, 465 bp, Homo Sapiens; identical to SEQ ID NO: 78055
  misc_feature (48)..(48): n is a, c, g, or t
  misc_feature (73)..(73): n is a, c, g, or t

SEQ ID NO: 110100 - DNA, 1290 bp, Homo Sapiens; identical to SEQ ID NO: 78067
  misc_feature (71)..(71): n is a, c, g, or t
  misc_feature (454)..(518): n is a, c, g, or t
  misc_feature (574)..(677): n is a, c, g, or t
  misc_feature (764)..(812): n is a, c, g, or t

SEQ ID NO: 110101 - DNA, 967 bp, Homo Sapiens; identical to SEQ ID NO: 78068

SEQ ID NO: 110102 - DNA, 690 bp, Homo Sapiens; identical to SEQ ID NO: 78069

SEQ ID NO: 110103 - DNA, 601 bp, Homo Sapiens; identical to SEQ ID NO: 78070
  misc_feature (510)..(510): n is a, c, g, or t

SEQ ID NO: 110104 - DNA, 986 bp, Homo Sapiens; identical to SEQ ID NO: 78071
  misc_feature (39)..(39): n is a, c, g, or t
  misc_feature (78)..(78): n is a, c, g, or t
  misc_feature (106)..(106): n is a, c, g, or t

SEQ ID NO: 110105 - DNA, 939 bp, Homo Sapiens; identical to SEQ ID NO: 78072
  misc_feature (820)..(831): n is a, c, g, or t

SEQ ID NO: 110106 - DNA, 898 bp, Homo Sapiens; identical to SEQ ID NO: 78073

SEQ ID NO: 110107 - DNA, 1205 bp, Homo Sapiens; identical to SEQ ID NO: 78078
  misc_feature (958)..(1008): n is a, c, g, or t

SEQ ID NO: 110108 - DNA, 489 bp, Homo Sapiens; identical to SEQ ID NO: 78079

SEQ ID NO: 110109 - DNA, 925 bp, Homo Sapiens; identical to SEQ ID NO: 78089

SEQ ID NO: 110110 - DNA, 419 bp, Homo Sapiens; identical to SEQ ID NO: 78090

SEQ ID NO: 110111 - DNA, 1016 bp, Homo Sapiens; identical to SEQ ID NO: 78091
  misc_feature (963)..(963): n is a, c, g, or t

SEQ ID NO: 110112 - DNA, 889 bp, Homo Sapiens; identical to SEQ ID NO: 78092
  misc_feature (42)..(42): n is a, c, g, or t
  misc_feature (105)..(105): n is a, c, g, or t
  misc_feature (122)..(122): n is a, c, g, or t
  misc_feature (185)..(185): n is a, c, g, or t
  misc_feature (236)..(236): n is a, c, g, or t
  misc_feature (284)..(284): n is a, c, g, or t
  misc_feature (289)..(289): n is a, c, g, or t
  misc_feature (374)..(374): n is a, c, g, or t
  misc_feature (392)..(392): n is a, c, g, or t

SEQ ID NO: 110113 - DNA, 1154 bp, Homo Sapiens; identical to SEQ ID NO: 78104

SEQ ID NO: 110114 - DNA, 972 bp, Homo Sapiens; identical to SEQ ID NO: 78105

SEQ ID NO: 110115 - DNA, 843 bp, Homo Sapiens; identical to SEQ ID NO: 78106
  misc_feature (537)..(537): n is a, c, g, or t
  misc_feature (644)..(644): n is a, c, g, or t

SEQ ID NO: 110116 - DNA, 976 bp, Homo Sapiens; identical to SEQ ID NO: 78109

SEQ ID NO: 110117 - DNA, 1801 bp, Homo Sapiens; identical to SEQ ID NO: 78110
  misc_feature (896)..(935): n is a, c, g, or t
  misc_feature (953)..(1083): n is a, c, g, or t

SEQ ID NO: 110118 - DNA, 921 bp, Homo Sapiens; identical to SEQ ID NO: 78111

SEQ ID NO: 110119 - DNA, 706 bp, Homo Sapiens; identical to SEQ ID NO: 78117
  misc_feature (15)..(15): n is a, c, g, or t
  misc_feature (32)..(32): n is a, c, g, or t
  misc_feature (93)..(93): n is a, c, g, or t

SEQ ID NO: 110120 - DNA, 495 bp, Homo Sapiens; identical to SEQ ID NO: 78118

SEQ ID NO: 110121 - DNA, 473 bp, Homo Sapiens; identical to SEQ ID NO: 78123
  misc_feature (37)..(37): n is a, c, g, or t

SEQ ID NO: 110122 - DNA, 1535 bp, Homo Sapiens; identical to SEQ ID NO: 78124

SEQ ID NO: 110123 - DNA, 532 bp, Homo Sapiens; identical to SEQ ID NO: 78125

SEQ ID NO: 110124 - DNA, 1234 bp, Homo Sapiens; identical to SEQ ID NO: 78127
  misc_feature (434)..(434): n is a, c, g, or t
  misc_feature (476)..(524): n is a, c, g, or t

SEQ ID NO: 110125 - DNA, 1324 bp, Homo Sapiens; identical to SEQ ID NO: 78128

SEQ ID NO: 110126 - DNA, 1858 bp, Homo Sapiens; identical to SEQ ID NO: 78129
  misc_feature (526)..(555): n is a, c, g, or t
  misc_feature (564)..(818): n is a, c, g, or t

SEQ ID NO: 110127 - DNA, 971 bp, Homo Sapiens; identical to SEQ ID NO: 78131
  misc_feature (933)..(933): n is a, c, g, or t
  misc_feature (948)..(948): n is a, c, g, or t

SEQ ID NO: 110128 - DNA, 1876 bp, Homo Sapiens; identical to SEQ ID NO: 78132
  misc_feature (1100)..(1158): n is a, c, g, or t
  misc_feature (1162)..(1162): n is a, c, g, or t
  misc_feature (1164)..(1164): n is a, c, g, or t
  misc_feature (1674)..(1687): n is a, c, g, or t

SEQ ID NO: 110129 - DNA, 1406 bp, Homo Sapiens; identical to SEQ ID NO: 78142

SEQ ID NO: 110130 - DNA, 960 bp, Homo Sapiens; identical to SEQ ID NO: 78143

SEQ ID NO: 110131 - DNA, 922 bp, Homo Sapiens; identical to SEQ ID NO: 78146
  misc_feature (23)..(23): n is a, c, g, or t
  misc_feature (802)..(802): n is a, c, g, or t

SEQ ID NO: 110132 - DNA, 1916 bp, Homo Sapiens; identical to SEQ ID NO: 78147
  misc_feature (63)..(63): n is a, c, g, or t

SEQ ID NO: 110133 - DNA, 1277 bp, Homo Sapiens; identical to SEQ ID NO: 78148

SEQ ID NO: 110134 - DNA, 838 bp, Homo Sapiens; identical to SEQ ID NO: 78149

SEQ ID NO: 110135 - DNA, 384 bp, Homo Sapiens; identical to SEQ ID NO: 78150

SEQ ID NO: 110136 - DNA, 854 bp, Homo Sapiens; identical to SEQ ID NO: 78151

SEQ ID NO: 110137 - DNA, 516 bp, Homo Sapiens; identical to SEQ ID NO: 78152
  misc_feature (42)..(42): n is a, c, g, or t

SEQ ID NO: 110138 - DNA, 973 bp, Homo Sapiens; identical to SEQ ID NO: 78158
  misc_feature (64)..(64): n is a, c, g, or t
  misc_feature (640)..(671): n is a, c, g, or t

SEQ ID NO: 110139 - DNA, 2058 bp, Homo Sapiens; identical to SEQ ID NO: 78159
  misc_feature (1518)..(1674): n is a, c, g, or t

SEQ ID NO: 110140 - DNA, 502 bp, Homo Sapiens; identical to SEQ ID NO: 78160
  misc_feature (24)..(24): n is a, c, g, or t
  misc_feature (153)..(195): n is a, c, g, or t

SEQ ID NO: 110141 - DNA, 1073 bp, Homo Sapiens; identical to SEQ ID NO: 78161
  misc_feature (18)..(18): n is a, c, g, or t
  misc_feature (26)..(26): n is a, c, g, or t
  misc_feature (39)..(39): n is a, c, g, or t
  misc_feature (124)..(124): n is a, c, g, or t
  misc_feature (131)..(131): n is a, c, g, or t
  misc_feature (164)..(164): n is a, c, g, or t
  misc_feature (205)..(205): n is a, c, g, or t
  misc_feature (207)..(207): n is a, c, g, or t
  misc_feature (239)..(239): n is a, c, g, or t
  misc_feature (251)..(253): n is a, c, g, or t
  misc_feature (296)..(296): n is a, c, g, or t
  misc_feature (993)..(1014): n is a, c, g, or t

SEQ ID NO: 110142 - DNA, 1277 bp, Homo Sapiens; identical to SEQ ID NO: 78162

SEQ ID NO: 110143 - DNA, 1175 bp, Homo Sapiens; identical to SEQ ID NO: 78171

SEQ ID NO: 110144 - DNA, 1046 bp, Homo Sapiens; identical to SEQ ID NO: 78172

SEQ ID NO: 110145 - DNA, 699 bp, Homo Sapiens; identical to SEQ ID NO: 78175
  misc_feature (17)..(17): n is a, c, g, or t
  misc_feature (114)..(114): n is a, c, g, or t
  misc_feature (146)..(146): n is a, c, g, or t
  misc_feature (206)..(262): n is a, c, g, or t

SEQ ID NO: 110146 - DNA, 611 bp, Homo Sapiens; identical to SEQ ID NO: 78176

SEQ ID NO: 110147 - DNA, 559 bp, Homo Sapiens; identical to SEQ ID NO: 78177

SEQ ID NO: 110148 - DNA, 1011 bp, Homo Sapiens; identical to SEQ ID NO: 78181
  misc_feature (201)..(201): n is a, c, g, or t

SEQ ID NO: 110149 - DNA, 591 bp, Homo Sapiens; identical to SEQ ID NO: 78182
  misc_feature (110)..(110): n is a, c, g, or t
  misc_feature (145)..(145): n is a, c, g, or t

SEQ ID NO: 110150 - DNA, 1136 bp, Homo Sapiens; identical to SEQ ID NO: 78197

SEQ ID NO: 110151 - DNA, 699 bp, Homo Sapiens; identical to SEQ ID NO: 78198

SEQ ID NO: 110152 - DNA, 1021 bp, Homo Sapiens; identical to SEQ ID NO: 78199
  misc_feature (685)..(778): n is a, c, g, or t
  misc_feature (835)..(874): n is a, c, g, or t

SEQ ID NO: 110153 - DNA, 1266 bp, Homo Sapiens; identical to SEQ ID NO: 78200
  misc_feature (1085)..(1085): n is a, c, g, or t
  misc_feature (1099)..(1099): n is a, c, g, or t
  misc_feature (1104)..(1104): n is a, c, g, or t
  misc_feature (1107)..(1107): n is a, c, g, or t

SEQ ID NO: 110154 - DNA, 1927 bp, Homo Sapiens; identical to SEQ ID NO: 78201
  misc_feature (1857)..(1857): n is a, c, g, or t

SEQ ID NO: 110155 - DNA, 528 bp, Homo Sapiens; identical to SEQ ID NO: 78202

SEQ ID NO: 110156 - DNA, 364 bp, Homo Sapiens; identical to SEQ ID NO: 78212

SEQ ID NO: 110157 - DNA, 1858 bp, Homo Sapiens; identical to SEQ ID NO: 78213
  misc_feature (85)..(119): n is a, c, g, or t

SEQ ID NO: 110158 - DNA, 1033 bp, Homo Sapiens; identical to SEQ ID NO: 78218
  misc_feature (104)..(119): n is a, c, g, or t
  misc_feature (138)..(174): n is a, c, g, or t

SEQ ID NO: 110159 - DNA, 658 bp, Homo Sapiens; identical to SEQ ID NO: 78219
  misc_feature (118)..(229): n is a, c, g, or t

SEQ ID NO: 110160 - DNA, 609 bp, Homo Sapiens; identical to SEQ ID NO: 78220
  misc_feature (68)..(179): n is a, c, g, or t

SEQ ID NO: 110161 - DNA, 592 bp, Homo Sapiens; identical to SEQ ID NO: 78221
  misc_feature (14)..(14): n is a, c, g, or t
  misc_feature (55)..(55): n is a, c, g, or t
  misc_feature (73)..(73): n is a, c, g, or t
  misc_feature (86)..(161): n is a, c, g, or t

SEQ ID NO: 110162 - DNA, 852 bp, Homo Sapiens; identical to SEQ ID NO: 78222
  misc_feature (22)..(22): n is a, c, g, or t
  misc_feature (36)..(36): n is a, c, g, or t
  misc_feature (86)..(86): n is a, c, g, or t
  misc_feature (99)..(308): n is a, c, g, or t
  misc_feature (519)..(519): n is a, c, g, or t
  misc_feature (596)..(684): n is a, c, g, or t
  misc_feature (687)..(712): n is a, c, g, or t
  misc_feature (726)..(744): n is a, c, g, or t

SEQ ID NO: 110163 - DNA, 807 bp, Homo Sapiens; identical to SEQ ID NO: 78223
  misc_feature (41)..(87): n is a, c, g, or t

SEQ ID NO: 110164 - DNA, 1183 bp, Homo Sapiens; identical to SEQ ID NO: 78224
  misc_feature (830)..(830): n is a, c, g, or t
  misc_feature (1033)..(1093): n is a, c, g, or t

SEQ ID NO: 110165 - DNA, 576 bp, Homo Sapiens; identical to SEQ ID NO: 78225

SEQ ID NO: 110166 - DNA, 1305 bp, Homo Sapiens; identical to SEQ ID NO: 78231
  misc_feature (608)..(608): n is a, c, g, or t

SEQ ID NO: 110167 - DNA, 1065 bp, Homo Sapiens; identical to SEQ ID NO: 78232

SEQ ID NO: 110168 - DNA, 657 bp, Homo Sapiens; identical to SEQ ID NO: 78238

SEQ ID NO: 110169 - DNA, 1000 bp, Homo Sapiens; identical to SEQ ID NO: 78239

SEQ ID NO: 110170 - DNA, 1070 bp, Homo Sapiens; identical to SEQ ID NO: 78241
  misc_feature (905)..(952): n is a, c, g, or t

SEQ ID NO: 110171 - DNA, 581 bp, Homo Sapiens; identical to SEQ ID NO: 78242
  misc_feature (122)..(169): n is a, c, g, or t

SEQ ID NO: 110172 - DNA, 657 bp, Homo Sapiens; identical to SEQ ID NO: 78260
  misc_feature (64)..(76): n is a, c, g, or t
  misc_feature (556)..(570): n is a, c, g, or t

SEQ ID NO: 110173 - DNA, 303 bp, Homo Sapiens; identical to SEQ ID NO: 78261
  misc_feature (209)..(223): n is a, c, g, or t

SEQ ID NO: 110174 - DNA, 2245 bp, Homo Sapiens; identical to SEQ ID NO: 78266

SEQ ID NO: 110175 - DNA, 1252 bp, Homo Sapiens; identical to SEQ ID NO: 78267
  misc_feature (76)..(110): n is a, c, g, or t
  misc_feature (819)..(819): n is a, c, g, or t

SEQ ID NO: 110176 - DNA, 1728 bp, Homo Sapiens; identical to SEQ ID NO: 78280
  misc_feature (62)..(93): n is a, c, g, or t

SEQ ID NO: 110177 - DNA, 883 bp, Homo Sapiens; identical to SEQ ID NO: 78281

SEQ ID NO: 110178 - DNA, 980 bp, Homo Sapiens; identical to SEQ ID NO: 78282

SEQ ID NO: 110179 - DNA, 1028 bp, Homo Sapiens; identical to SEQ ID NO: 78287
  misc_feature (159)..(160): n is a, c, g, or t
  misc_feature (175)..(176): n is a, c, g, or t
  misc_feature (180)..(180): n is a, c, g, or t

SEQ ID NO: 110180 - DNA, 543 bp, Homo Sapiens; identical to SEQ ID NO: 78288
  misc_feature (532)..(532): n is a, c, g, or t

SEQ ID NO: 110181 - DNA, 1313 bp, Homo Sapiens; identical to SEQ ID NO: 78289

SEQ ID NO: 110182 - DNA, 251 bp, Homo Sapiens; identical to SEQ ID NO: 78290

SEQ ID NO: 110183 - DNA, 1114 bp, Homo Sapiens; identical to SEQ ID NO: 78291
  misc_feature (43)..(81): n is a, c, g, or t
  misc_feature (83)..(118): n is a, c, g, or t
  misc_feature (874)..(874): n is a, c, g, or t
  misc_feature (983)..(983): n is a, c, g, or t

SEQ ID NO: 110184 - DNA, 713 bp, Homo Sapiens; identical to SEQ ID NO: 78292

SEQ ID NO: 110185 - DNA, 2002 bp, Homo Sapiens; identical to SEQ ID NO: 78293
  misc_feature (1420)..(1433): n is a, c, g, or t
  misc_feature (1841)..(1849): n is a, c, g, or t

SEQ ID NO: 110186 - DNA, 1060 bp, Homo Sapiens; identical to SEQ ID NO: 78296
  misc_feature (867)..(867): n is a, c, g, or t

SEQ ID NO: 110187 - DNA, 678 bp, Homo Sapiens; identical to SEQ ID NO: 78297
  misc_feature (119)..(119): n is a, c, g, or t

SEQ ID NO: 110188 - DNA, 1247 bp, Homo Sapiens; identical to SEQ ID NO: 78301
  misc_feature (211)..(211): n is a, c, g, or t
  misc_feature (320)..(345): n is a, c, g, or t

SEQ ID NO: 110189 - DNA, 1257 bp, Homo Sapiens; identical to SEQ ID NO: 78302
  misc_feature (345)..(370): n is a, c, g, or t

SEQ ID NO: 110190 - DNA, 1002 bp, Homo Sapiens; identical to SEQ ID NO: 78303
  misc_feature (659)..(684): n is a, c, g, or t

SEQ ID NO: 110191 - DNA, 1117 bp, Homo Sapiens; identical to SEQ ID NO: 78319

SEQ ID NO: 110192 - DNA, 1506 bp, Homo Sapiens; identical to SEQ ID NO: 78320
  misc_feature (1232)..(1232): n is a, c, g, or t
  misc_feature (1373)..(1373): n is a, c, g, or t
  misc_feature (1399)..(1399): n is a, c, g, or t
  misc_feature (1412)..(1412): n is a, c, g, or t
  misc_feature (1468)..(1468): n is a, c, g, or t

SEQ ID NO: 110193 - DNA, 1206 bp, Homo Sapiens; identical to SEQ ID NO: 78321

SEQ ID NO: 110194 - DNA, 455 bp, Homo Sapiens; identical to SEQ ID NO: 78322

SEQ ID NO: 110195 - DNA, 1758 bp, Homo Sapiens; identical to SEQ ID NO: 78323

SEQ ID NO: 110196 - DNA, 1325 bp, Homo Sapiens; identical to SEQ ID NO: 78324
  misc_feature (196)..(197): n is a, c, g, or t
  misc_feature (205)..(208): n is a, c, g, or t
  misc_feature (215)..(215): n is a, c, g, or t
  misc_feature (225)..(233): n is a, c, g, or t
  misc_feature (241)..(242): n is a, c, g, or t
  misc_feature (257)..(270): n is a, c, g, or t
  misc_feature (290)..(290): n is a, c, g, or t
  misc_feature (386)..(396): n is a, c, g, or t
  misc_feature (425)..(426): n is a, c, g, or t
  misc_feature (428)..(428): n is a, c, g, or t
  misc_feature (436)..(436): n is a, c, g, or t

SEQ ID NO: 110197 - DNA, 364 bp, Homo Sapiens; identical to SEQ ID NO: 78325

SEQ ID NO: 110198 - DNA, 1825 bp, Homo Sapiens; identical to SEQ ID NO: 78326
  misc_feature (1431)..(1560): n is a, c, g, or t
  misc_feature (1774)..(1774): n is a, c, g, or t

SEQ ID NO: 110199 - DNA, 725 bp, Homo Sapiens; identical to SEQ ID NO: 78327
  misc_feature (97)..(97): n is a, c, g, or t
  misc_feature (175)..(293): n is a, c, g, or t

SEQ ID NO: 110200 - DNA, 867 bp, Homo Sapiens; identical to SEQ ID NO: 78359
  misc_feature (248)..(248): n is a, c, g, or t
  misc_feature (756)..(790): n is a, c, g, or t

SEQ ID NO: 110201 - DNA, 2080 bp, Homo Sapiens; identical to SEQ ID NO: 78360
  misc_feature (1448)..(1572): n is a, c, g, or t
  misc_feature (1617)..(1625): n is a, c, g, or t
  misc_feature (1644)..(1697): n is a, c, g, or t
  misc_feature (1741)..(1749): n is a, c, g, or t
  misc_feature (1766)..(1890): n is a, c, g, or t
  misc_feature (2005)..(2015): n is a, c, g, or t

SEQ ID NO: 110202 - DNA, 1036 bp, Homo Sapiens; identical to SEQ ID NO: 78364
  misc_feature (29)..(29): n is a, c, g, or t
  misc_feature (67)..(67): n is a, c, g, or t
  misc_feature (155)..(155): n is a, c, g, or t
  misc_feature (268)..(268): n is a, c, g, or t
  misc_feature (293)..(293): n is a, c, g, or t
  misc_feature (309)..(309): n is a, c, g, or t
  misc_feature (333)..(333): n is a, c, g, or t

SEQ ID NO: 110203 - DNA, 1025 bp, Homo Sapiens; identical to SEQ ID NO: 78365
  misc_feature (740)..(740): n is a, c, g, or t
  misc_feature (836)..(836): n is a, c, g, or t
  misc_feature (882)..(882): n is a, c, g, or t
  misc_feature (982)..(982): n is a, c, g, or t

SEQ ID NO: 110204 - DNA, 798 bp, Homo Sapiens; identical to SEQ ID NO: 78366
  misc_feature (67)..(96): n is a, c, g, or t

SEQ ID NO: 110205 - DNA, 1306 bp, Homo Sapiens; identical to SEQ ID NO: 78378

SEQ ID NO: 110206 - DNA, 842 bp, Homo Sapiens; identical to SEQ ID NO: 78379
  misc_feature (321)..(336): n is a, c, g, or t

SEQ ID NO: 110207 - DNA, 738 bp, Homo Sapiens; identical to SEQ ID NO: 78380

SEQ ID NO: 110208 - DNA, 1000 bp, Homo Sapiens; identical to SEQ ID NO: 78381
  misc_feature (72)..(111): n is a, c, g, or t
  misc_feature (114)..(148): n is a, c, g, or t

SEQ ID NO: 110209 - DNA, 1489 bp, Homo Sapiens; identical to SEQ ID NO: 78382
  misc_feature (42)..(76): n is a, c, g, or t

SEQ ID NO: 110210 - DNA, 953 bp, Homo Sapiens; identical to SEQ ID NO: 78383
  misc_feature (743)..(746): n is a, c, g, or t
  misc_feature (748)..(748): n is a, c, g, or t
  misc_feature (750)..(751): n is a, c, g, or t
  misc_feature (754)..(754): n is a, c, g, or t
  misc_feature (756)..(757): n is a, c, g, or t
  misc_feature (760)..(760): n is a, c, g, or t
  misc_feature (789)..(789): n is a, c, g, or t
  misc_feature (843)..(843): n is a, c, g, or t
  misc_feature (856)..(900): n is a, c, g, or t

SEQ ID NO: 110211 - DNA, 731 bp, Homo Sapiens; identical to SEQ ID NO: 78384

SEQ ID NO: 110212 - DNA, 719 bp, Homo Sapiens; identical to SEQ ID NO: 78387

SEQ ID NO: 110213 - DNA, 1014 bp, Homo Sapiens; identical to SEQ ID NO: 78388

SEQ ID NO: 110214 - DNA, 1565 bp, Homo Sapiens; identical to SEQ ID NO: 78392

SEQ ID NO: 110215 - DNA, 897 bp, Homo Sapiens; identical to SEQ ID NO: 78393

SEQ ID NO: 110216 - DNA, 1263 bp, Homo Sapiens; identical to SEQ ID NO: 78394
  misc_feature (164)..(172): n is a, c, g, or t
  misc_feature (174)..(185): n is a, c, g, or t

SEQ ID NO: 110217 - DNA, 875 bp, Homo Sapiens; identical to SEQ ID NO: 78395

SEQ ID NO: 110218 - DNA, 1534 bp, Homo Sapiens; identical to SEQ ID NO: 78403
  misc_feature (229)..(229): n is a, c, g, or t
  misc_feature (263)..(263): n is a, c, g, or t
  misc_feature (323)..(810): n is a, c, g, or t
  misc_feature (860)..(889): n is a, c, g, or t
  misc_feature (1021)..(1125): n is a, c, g, or t
  misc_feature (1177)..(1253): n is a, c, g, or t
  misc_feature (1289)..(1388): n is a, c, g, or t
  misc_feature (1463)..(1471): n is a, c, g, or t

SEQ ID NO: 110219 - DNA, 860 bp, Homo Sapiens; identical to SEQ ID NO: 78404
  misc_feature (755)..(776): n is a, c, g, or t

SEQ ID NO: 110220 - DNA, 1352 bp, Homo Sapiens; identical to SEQ ID NO: 78407
  misc_feature (12)..(12): n is a, c, g, or t
  misc_feature (242)..(242): n is a, c, g, or t
  misc_feature (824)..(824): n is a, c, g, or t
  misc_feature (856)..(897): n is a, c, g, or t

SEQ ID NO: 110221 - DNA, 1026 bp, Homo Sapiens; identical to SEQ ID NO: 78408
  misc_feature (160)..(160): n is a, c, g, or t
  misc_feature (169)..(169): n is a, c, g, or t
  misc_feature (172)..(172): n is a, c, g, or t
  misc_feature (193)..(194): n is a, c, g, or t
  misc_feature (207)..(207): n is a, c, g, or t
  misc_feature (214)..(214): n is a, c, g, or t
  misc_feature (231)..(231): n is a, c, g, or t
  misc_feature (237)..(237): n is a, c, g, or t

SEQ ID NO: 110222 - DNA, 978 bp, Homo Sapiens; identical to SEQ ID NO: 78415
  misc_feature (51)..(51): n is a, c, g, or t
  misc_feature (60)..(60): n is a, c, g, or t
  misc_feature (69)..(69): n is a, c, g, or t
  misc_feature (119)..(119): n is a, c, g, or t
  misc_feature (168)..(168): n is a, c, g, or t
  misc_feature (206)..(207): n is a, c, g, or t
  misc_feature (248)..(248): n is a, c, g, or t

SEQ ID NO: 110223 - DNA, 1477 bp, Homo Sapiens; identical to SEQ ID NO: 78416

SEQ ID NO: 110224 - DNA, 466 bp, Homo Sapiens; identical to SEQ ID NO: 78420
  misc_feature (54)..(89): n is a, c, g, or t

SEQ ID NO: 110225 - DNA, 629 bp, Homo Sapiens; identical to SEQ ID NO: 78421
  misc_feature (29)..(29): n is a, c, g, or t

SEQ ID NO: 110226 - DNA, 706 bp, Homo Sapiens; identical to SEQ ID NO: 78422
  misc_feature (618)..(653): n is a, c, g, or t

SEQ ID NO: 110227 - DNA, 1495 bp, Homo Sapiens; identical to SEQ ID NO: 78425
  misc_feature (87)..(87): n is a, c, g, or t
  misc_feature (95)..(95): n is a, c, g, or t
  misc_feature (104)..(104): n is a, c, g, or t
  misc_feature (112)..(113): n is a, c, g, or t
  misc_feature (124)..(124): n is a, c, g, or t
  misc_feature (1047)..(1059): n is a, c, g, or t
  misc_feature (1416)..(1435): n is a, c, g, or t

SEQ ID NO: 110228 - DNA, 1225 bp, Homo Sapiens; identical to SEQ ID NO: 78426
  misc_feature (154)..(165): n is a, c, g, or t

SEQ ID NO: 110229 - DNA, 520 bp, Homo Sapiens; identical to SEQ ID NO: 78427

SEQ ID NO: 110230 - DNA, 1120 bp, Homo Sapiens; identical to SEQ ID NO: 78431
  misc_feature (68)..(91): n is a, c, g, or t
  misc_feature (562)..(571): n is a, c, g, or t
  misc_feature (758)..(919): n is a, c, g, or t
  misc_feature (924)..(924): n is a, c, g, or t
  misc_feature (982)..(982): n is a, c, g, or t
  misc_feature (1033)..(1033): n is a, c, g, or t
  misc_feature (1052)..(1052): n is a, c, g, or t
  misc_feature (1104)..(1104): n is a, c, g, or t

SEQ ID NO: 110231 - DNA, 3715 bp, Homo Sapiens; identical to SEQ ID NO: 78432
  misc_feature (2694)..(2712): n is a, c, g, or t
  misc_feature (3239)..(3249): n is a, c, g, or t

SEQ ID NO: 110232 - DNA, 1273 bp, Homo Sapiens; identical to SEQ ID NO: 78434

SEQ ID NO: 110233 - DNA, 736 bp, Homo Sapiens; identical to SEQ ID NO: 78435

SEQ ID NO: 110234 - DNA, 1017 bp, Homo Sapiens; identical to SEQ ID NO: 78436

SEQ ID NO: 110235 - DNA, 1432 bp, Homo Sapiens; identical to SEQ ID NO: 78437
  misc_feature (1291)..(1291): n is a, c, g, or t

SEQ ID NO: 110236 - DNA, 827 bp, Homo Sapiens; identical to SEQ ID NO: 78438

SEQ ID NO: 110237 - DNA, 377 bp, Homo Sapiens; identical to SEQ ID NO: 78439

SEQ ID NO: 110238 - DNA, 1353 bp, Homo Sapiens; identical to SEQ ID NO: 78441

SEQ ID NO: 110239 - DNA, 1798 bp, Homo Sapiens; identical to SEQ ID NO: 78442

SEQ ID NO: 110240 - DNA, 1014 bp, Homo Sapiens; identical to SEQ ID NO: 78447

SEQ ID NO: 110241 - DNA, 998 bp, Homo Sapiens; identical to SEQ ID NO: 78448

SEQ ID NO: 110242 - DNA, 1831 bp, Homo Sapiens; identical to SEQ ID NO: 78452

SEQ ID NO: 110243 - DNA, 944 bp, Homo Sapiens; identical to SEQ ID NO: 78453

SEQ ID NO: 110244 - DNA, 969 bp, Homo Sapiens; identical to SEQ ID NO: 78454

SEQ ID NO: 110245 - DNA, 868 bp, Homo Sapiens; identical to SEQ ID NO: 78455
  misc_feature (321)..(321): n is a, c, g, or t
  misc_feature (612)..(612): n is a, c, g, or t
  misc_feature (819)..(819): n is a, c, g, or t
  misc_feature (844)..(844): n is a, c, g, or t

SEQ ID NO: 110246 - DNA, 1059 bp, Homo Sapiens; identical to SEQ ID NO: 78456
  misc_feature (103)..(137): n is a, c, g, or t

SEQ ID NO: 110247 - DNA, 1344 bp, Homo Sapiens; identical to SEQ ID NO: 78460
  misc_feature (654)..(654): n is a, c, g, or t

SEQ ID NO: 110248 - DNA, 925 bp, Homo Sapiens; identical to SEQ ID NO: 78461

SEQ ID NO: 110249 - DNA, 2123 bp, Homo Sapiens; identical to SEQ ID NO: 78469
  misc_feature (1154)..(1192): n is a, c, g, or t

SEQ ID NO: 110250 - DNA, 881 bp, Homo Sapiens; identical to SEQ ID NO: 78470

SEQ ID NO: 110251 - DNA, 1574 bp, Homo Sapiens; identical to SEQ ID NO: 78475
  misc_feature (1493)..(1527): n is a, c, g, or t

SEQ ID NO: 110252 - DNA, 558 bp, Homo Sapiens; identical to SEQ ID NO: 78476
  misc_feature (11)..(11): n is a, c, g, or t
  misc_feature (73)..(89): n is a, c, g, or t

SEQ ID NO: 110253 - DNA, 745 bp, Homo Sapiens; identical to SEQ ID NO: 78479

SEQ ID NO: 110254 - DNA, 367 bp, Homo Sapiens; identical to SEQ ID NO: 78480

SEQ ID NO: 110255 - DNA, 602 bp, Homo Sapiens; identical to SEQ ID NO: 78481
  misc_feature (602)..(602): n is a, c, g, or t

SEQ ID NO: 110256 - DNA, 397 bp, Homo Sapiens; identical to SEQ ID NO: 78482
  misc_feature (42)..(42): n is a, c, g, or t
  misc_feature (44)..(44): n is a, c, g, or t

SEQ ID NO: 110257 - DNA, 1451 bp, Homo Sapiens; identical to SEQ ID NO: 78492

SEQ ID NO: 110258 - DNA, 942 bp, Homo Sapiens; identical to SEQ ID NO: 78493

SEQ ID NO: 110259 - DNA, 1024 bp, Homo Sapiens; identical to SEQ ID NO: 78502
  misc_feature (65)..(65): n is a, c, g, or t
  misc_feature (110)..(110): n is a, c, g, or t
  misc_feature (178)..(178): n is a, c, g, or t
  misc_feature (238)..(238): n is a, c, g, or t

SEQ ID NO: 110260 - DNA, 1173 bp, Homo Sapiens; identical to SEQ ID NO: 78503

SEQ ID NO: 110261 - DNA, 554 bp, Homo Sapiens; identical to SEQ ID NO: 78506

SEQ ID NO: 110262 - DNA, 1286 bp, Homo Sapiens; identical to SEQ ID NO: 78507

SEQ ID NO: 110263 - DNA, 660 bp, Homo Sapiens; identical to SEQ ID NO: 78508

SEQ ID NO: 110264 - DNA, 556 bp, Homo Sapiens; identical to SEQ ID NO: 78509

SEQ ID NO: 110265 - DNA, 1242 bp, Homo Sapiens; identical to SEQ ID NO: 78515
  misc_feature (41)..(87): n is a, c, g, or t
  misc_feature (91)..(125): n is a, c, g, or t
  misc_feature (1066)..(1192): n is a, c, g, or t

SEQ ID NO: 110266 - DNA, 581 bp, Homo Sapiens; identical to SEQ ID NO: 78516
  misc_feature (371)..(371): n is a, c, g, or t
  misc_feature (418)..(418): n is a, c, g, or t
  misc_feature (504)..(504): n is a, c, g, or t
  misc_feature (519)..(519): n is a, c, g, or t

SEQ ID NO: 110267 - DNA, 938 bp, Homo Sapiens; identical to SEQ ID NO: 78529
  misc_feature (707)..(707): n is a, c, g, or t
  misc_feature (710)..(710): n is a, c, g, or t
  misc_feature (764)..(764): n is a, c, g, or t
  misc_feature (805)..(805): n is a, c, g, or t
  misc_feature (872)..(874): n is a, c, g, or t

SEQ ID NO: 110268 - DNA, 917 bp, Homo Sapiens; identical to SEQ ID NO: 78530
  misc_feature (737)..(737): n is a, c, g, or t

SEQ ID NO: 110269 - DNA, 1393 bp, Homo Sapiens; identical to SEQ ID NO: 78531

SEQ ID NO: 110270 - DNA, 1083 bp, Homo Sapiens; identical to SEQ ID NO: 78532
  misc_feature (353)..(452): n is a, c, g, or t
  misc_feature (461)..(640): n is a, c, g, or t

SEQ ID NO: 110271 - DNA, 1030 bp, Homo Sapiens; identical to SEQ ID NO: 78533
  misc_feature (793)..(793): n is a, c, g, or t

SEQ ID NO: 110272 - DNA, 1201 bp, Homo Sapiens; identical to SEQ ID NO: 78546
  misc_feature (938)..(988): n is a, c, g, or t

SEQ ID NO: 110273 - DNA, 591 bp, Homo Sapiens; identical to SEQ ID NO: 78547
  misc_feature (41)..(41): n is a, c, g, or t
  misc_feature (143)..(193): n is a, c, g, or t
  misc_feature (476)..(484): n is a, c, g, or t

SEQ ID NO: 110274 - DNA, 1516 bp, Homo Sapiens; identical to SEQ ID NO: 78554
  misc_feature (1456)..(1474): n is a, c, g, or t

SEQ ID NO: 110275 - DNA, 856 bp, Homo Sapiens; identical to SEQ ID NO: 78555

SEQ ID NO: 110276 - DNA, 678 bp, Homo Sapiens; identical to SEQ ID NO: 78558

SEQ ID NO: 110277 - DNA, 1394 bp, Homo Sapiens; identical to SEQ ID NO: 78559
  misc_feature (332)..(341): n is a, c, g, or t
  misc_feature (1009)..(1162): n is a, c, g, or t
  misc_feature (1253)..(1253): n is a, c, g, or t

SEQ ID NO: 110278 - DNA, 1291 bp, Homo Sapiens; identical to SEQ ID NO: 78571
  misc_feature (861)..(1116): n is a, c, g, or t
  misc_feature (1124)..(1157): n is a, c, g, or t

SEQ ID NO: 110279 - DNA, 693 bp, Homo Sapiens; identical to SEQ ID NO: 78572

SEQ ID NO: 110280 - DNA, 834 bp, Homo Sapiens; identical to SEQ ID NO: 78573

SEQ ID NO: 110281 - DNA, 819 bp, Homo Sapiens; identical to SEQ ID NO: 78574

SEQ ID NO: 110282 - DNA, 937 bp, Homo Sapiens; identical to SEQ ID NO: 78575

SEQ ID NO: 110283 - DNA, 1119 bp, Homo Sapiens; identical to SEQ ID NO: 78579

SEQ ID NO: 110284 - DNA, 1027 bp, Homo Sapiens; identical to SEQ ID NO: 78580
  misc_feature (71)..(71): n is a, c, g, or t
  misc_feature (112)..(112): n is a, c, g, or t
  misc_feature (137)..(137): n is a, c, g, or t
  misc_feature (164)..(164): n is a, c, g, or t
  misc_feature (208)..(208): n is a, c, g, or t
  misc_feature (277)..(277): n is a, c, g, or t
  misc_feature (373)..(373): n is a, c, g, or t

SEQ ID NO: 110285 - DNA, 962 bp, Homo Sapiens; identical to SEQ ID NO: 78581
  misc_feature (216)..(216): n is a, c, g, or t

SEQ ID NO: 110286 - DNA, 509 bp, Homo Sapiens; identical to SEQ ID NO: 78582

SEQ ID NO: 110287 - DNA, 126 bp, Homo Sapiens; identical to SEQ ID NO: 78583

SEQ ID NO: 110288 - DNA, 721 bp, Homo Sapiens; identical to SEQ ID NO: 78587

SEQ ID NO: 110289 - DNA, 652 bp, Homo Sapiens; identical to SEQ ID NO: 78588
  misc_feature (603)..(603): n is a, c, g, or t
  misc_feature (620)..(620): n is a, c, g, or t

SEQ ID NO: 110290 - DNA, 511 bp, Homo Sapiens; identical to SEQ ID NO: 78604

SEQ ID NO: 110291 - DNA, 683 bp, Homo Sapiens; identical to SEQ ID NO: 78605

SEQ ID NO: 110292 - DNA, 961 bp, Homo Sapiens; identical to SEQ ID NO: 78607
  misc_feature (599)..(599): n is a, c, g, or t
  misc_feature (744)..(744): n is a, c, g, or t
  misc_feature (796)..(796): n is a, c, g, or t
  misc_feature (805)..(805): n is a, c, g, or t
  misc_feature (852)..(852): n is a, c, g, or t

SEQ ID NO: 110293 - DNA, 1641 bp, Homo Sapiens; identical to SEQ ID NO: 78608
  misc_feature (768)..(817): n is a, c, g, or t

SEQ ID NO: 110294 - DNA, 1086 bp, Homo Sapiens; identical to SEQ ID NO: 78618
  misc_feature (42)..(42): n is a, c, g, or t
  misc_feature (72)..(72): n is a, c, g, or t
  misc_feature (109)..(109): n is a, c, g, or t
  misc_feature (350)..(350): n is a, c, g, or t
  misc_feature (359)..(359): n is a, c, g, or t

SEQ ID NO: 110295 - DNA, 1956 bp, Homo Sapiens; identical to SEQ ID NO: 78619
  misc_feature (1115)..(1115): n is a, c, g, or t

SEQ ID NO: 110296 - DNA, 1251 bp, Homo Sapiens; identical to SEQ ID NO: 78620

SEQ ID NO: 110297 - DNA, 962 bp, Homo Sapiens; identical to SEQ ID NO: 78621

SEQ ID NO: 110298 - DNA, 870 bp, Homo Sapiens; identical to SEQ ID NO: 78623
  misc_feature (38)..(38): n is a, c, g, or t
  misc_feature (710)..(723): n is a, c, g, or t

SEQ ID NO: 110299 - DNA, 703 bp, Homo Sapiens; identical to SEQ ID NO: 78624
  misc_feature (362)..(374): n is a, c, g, or t
  misc_feature (536)..(565): n is a, c, g, or t

SEQ ID NO: 110300 - DNA, 642 bp, Homo Sapiens; identical to SEQ ID NO: 78626
  misc_feature (376)..(423): n is a, c, g, or t

SEQ ID NO: 110301 - DNA, 432 bp, Homo Sapiens; identical to SEQ ID NO: 78627

SEQ ID NO: 110302 - DNA, 909 bp, Homo Sapiens; identical to SEQ ID NO: 78628

SEQ ID NO: 110303 - DNA, 818 bp, Homo Sapiens; identical to SEQ ID NO: 78630

SEQ ID NO: 110304 - DNA, 583 bp, Homo Sapiens; identical to SEQ ID NO: 78631

SEQ ID NO: 110305 - DNA, 1675 bp, Homo Sapiens; identical to SEQ ID NO: 78636

SEQ ID NO: 110306 - DNA, 949 bp, Homo Sapiens; identical to SEQ ID NO: 78637

SEQ ID NO: 110307 - DNA, 821 bp, Homo Sapiens; identical to SEQ ID NO: 78638

SEQ ID NO: 110308 - DNA, 911 bp, Homo Sapiens; identical to SEQ ID NO: 78647

SEQ ID NO: 110309 - DNA, 626 bp, Homo Sapiens; identical to SEQ ID NO: 78648

SEQ ID NO: 110310 - DNA, 2028 bp, Homo Sapiens; identical to SEQ ID NO: 78649
  misc_feature (1943)..(1943): n is a, c, g, or t
  misc_feature (1946)..(1946): n is a, c, g, or t
  misc_feature (1949)..(1952): n is a, c, g, or t
  misc_feature (1956)..(1956): n is a, c, g, or t
  misc_feature (1960)..(1965): n is a, c, g, or t

SEQ ID NO: 110311 - DNA, 1037 bp, Homo Sapiens; identical to SEQ ID NO: 78651

SEQ ID NO: 110312 - DNA, 1205 bp, Homo Sapiens; identical to SEQ ID NO: 78652
  misc_feature (1031)..(1031): n is a, c, g, or t

SEQ ID NO: 110313 - DNA, 830 bp, Homo Sapiens; identical to SEQ ID NO: 78654
  misc_feature (29)..(29): n is a, c, g, or t
  misc_feature (549)..(647): n is a, c, g, or t

SEQ ID NO: 110314 - DNA, 965 bp, Homo Sapiens; identical to SEQ ID NO: 78655
  misc_feature (165)..(165): n is a, c, g, or t

SEQ ID NO: 110315 - DNA, 880 bp, Homo Sapiens; identical to SEQ ID NO: 78656

SEQ ID NO: 110316 - DNA, 1164 bp, Homo Sapiens; identical to SEQ ID NO: 78658
  misc_feature (107)..(107): n is a, c, g, or t
  misc_feature (166)..(166): n is a, c, g, or t
  misc_feature (262)..(262): n is a, c, g, or t

SEQ ID NO: 110317 - DNA, 1622 bp, Homo Sapiens; identical to SEQ ID NO: 78659

SEQ ID NO: 110318 - DNA, 1157 bp, Homo Sapiens; identical to SEQ ID NO: 78661
  misc_feature (51)..(52): n is a, c, g, or t

SEQ ID NO: 110319 - DNA, 510 bp, Homo Sapiens; identical to SEQ ID NO: 78662

SEQ ID NO: 110320 - DNA, 1021 bp, Homo Sapiens; identical to SEQ ID NO: 78665
  misc_feature (56)..(56): n is a, c, g, or t
  misc_feature (879)..(956): n is a, c, g, or t

SEQ ID NO: 110321 - DNA, 795 bp, Homo Sapiens; identical to SEQ ID NO: 78666
  misc_feature (93)..(93): n is a, c, g, or t
  misc_feature (105)..(105): n is a, c, g, or t
  misc_feature (132)..(132): n is a, c, g, or t

SEQ ID NO: 110322 - DNA, 1706 bp, Homo Sapiens; identical to SEQ ID NO: 78679
  misc_feature (57)..(57): n is a, c, g, or t
  misc_feature (79)..(79): n is a, c, g, or t

SEQ ID NO: 110323 - DNA, 516 bp, Homo Sapiens; identical to SEQ ID NO: 78680

SEQ ID NO: 110324 - DNA, 683 bp, Homo Sapiens; identical to SEQ ID NO: 78681

SEQ ID NO: 110325 - DNA, 517 bp, Homo Sapiens; identical to SEQ ID NO: 78682

SEQ ID NO: 110326 - DNA, 1033 bp, Homo Sapiens; identical to SEQ ID NO: 78683

SEQ ID NO: 110327 - DNA, 1123 bp, Homo Sapiens; identical to SEQ ID NO: 78684

SEQ ID NO: 110328 - DNA, 927 bp, Homo Sapiens; identical to SEQ ID NO: 78685

SEQ ID NO: 110329 - DNA, 160 bp, Homo Sapiens; identical to SEQ ID NO: 78686

SEQ ID NO: 110330 - DNA, 2276 bp, Homo Sapiens; identical to SEQ ID NO: 78700
  misc_feature (38)..(38): n is a, c, g, or t
  misc_feature (57)..(57): n is a, c, g, or t
  misc_feature (64)..(64): n is a, c, g, or t
  misc_feature (71)..(71): n is a, c, g, or t
  misc_feature (79)..(79): n is a, c, g, or t
  misc_feature (100)..(100): n is a, c, g, or t
  misc_feature (109)..(163): n is a, c, g, or t
  misc_feature (166)..(166): n is a, c, g, or t
  misc_feature (178)..(179): n is a, c, g, or t
  misc_feature (187)..(189): n is a, c, g, or t
  misc_feature (197)..(197): n is a, c, g, or t
  misc_feature (220)..(221): n is a, c, g, or t
  misc_feature (241)..(242): n is a, c, g, or t
  misc_feature (312)..(312): n is a, c, g, or t
  misc_feature (314)..(314): n is a, c, g, or t
  misc_feature (329)..(329): n is a, c, g, or t
  misc_feature (359)..(359): n is a, c, g, or t
  misc_feature (902)..(925): n is a, c, g, or t
  misc_feature (1258)..(1288): n is a, c, g, or t

SEQ ID NO: 110331 - DNA, 718 bp, Homo Sapiens; identical to SEQ ID NO: 78701
  misc_feature (65)..(110): n is a, c, g, or t
  misc_feature (639)..(662): n is a, c, g, or t

SEQ ID NO: 110332 - DNA, 158 bp, Homo Sapiens; identical to SEQ ID NO: 78702

SEQ ID NO: 110333 - DNA, 480 bp, Homo Sapiens; identical to SEQ ID NO: 78703
  misc_feature (75)..(143): n is a, c, g, or t

SEQ ID NO: 110334 - DNA, 1684 bp, Homo Sapiens; identical to SEQ ID NO: 78707

SEQ ID NO: 110335 - DNA, 1032 bp, Homo Sapiens; identical to SEQ ID NO: 78708
  misc_feature (757)..(757): n is a, c, g, or t

SEQ ID NO: 110336 - DNA, 1042 bp, Homo Sapiens; identical to SEQ ID NO: 78709

SEQ ID NO: 110337 - DNA, 1000 bp, Homo Sapiens; identical to SEQ ID NO: 78710

SEQ ID NO: 110338 - DNA, 1319 bp, Homo Sapiens; identical to SEQ ID NO: 78711
  misc_feature (914)..(914): n is a, c, g, or t
  misc_feature (932)..(932): n is a, c, g, or t
  misc_feature (982)..(982): n is a, c, g, or t

SEQ ID NO: 110339 - DNA, 1117 bp, Homo Sapiens; identical to SEQ ID NO: 78720
  misc_feature (50)..(71): n is a, c, g, or t
  misc_feature (79)..(198): n is a, c, g, or t
  misc_feature (997)..(1048): n is a, c, g, or t

SEQ ID NO: 110340 - DNA, 1073 bp, Homo Sapiens; identical to SEQ ID NO: 78721
  misc_feature (109)..(172): n is a, c, g, or t

SEQ ID NO: 110341 - DNA, 1102 bp, Homo Sapiens; identical to SEQ ID NO: 78726
  misc_feature (410)..(613): n is a, c, g, or t
  misc_feature (693)..(705): n is a, c, g, or t
  misc_feature (1022)..(1042): n is a, c, g, or t

SEQ ID NO: 110342 - DNA, 760 bp, Homo Sapiens; identical to SEQ ID NO: 78727
  misc_feature (95)..(107): n is a, c, g, or t
  misc_feature (480)..(495): n is a, c, g, or t

SEQ ID NO: 110343 - DNA, 1164 bp, Homo Sapiens; identical to SEQ ID NO: 78732

SEQ ID NO: 110344 - DNA, 968 bp, Homo Sapiens; identical to SEQ ID NO: 78733
  misc_feature (108)..(224): n is a, c, g, or t
  misc_feature (248)..(248): n is a, c, g, or t
  misc_feature (260)..(260): n is a, c, g, or t
  misc_feature (322)..(322): n is a, c, g, or t

SEQ ID NO: 110345 - DNA, 1098 bp, Homo Sapiens; identical to SEQ ID NO: 78734
  misc_feature (41)..(75): n is a, c, g, or t

SEQ ID NO: 110346 - DNA, 845 bp, Homo Sapiens; identical to SEQ ID NO: 78735
  misc_feature (306)..(352): n is a, c, g, or t

SEQ ID NO: 110347 - DNA, 1598 bp, Homo Sapiens; identical to SEQ ID NO: 78737
  misc_feature (27)..(27): n is a, c, g, or t
  misc_feature (70)..(70): n is a, c, g, or t
  misc_feature (181)..(181): n is a, c, g, or t
  misc_feature (230)..(230): n is a, c, g, or t
  misc_feature (1431)..(1439): n is a, c, g, or t
  misc_feature (1536)..(1544): n is a, c, g, or t

SEQ ID NO: 110348 - DNA, 797 bp, Homo Sapiens; identical to SEQ ID NO: 78738

SEQ ID NO: 110349 - DNA, 1173 bp, Homo Sapiens; identical to SEQ ID NO: 78739

SEQ ID NO: 110350 - DNA, 1013 bp, Homo Sapiens; identical to SEQ ID NO: 78741
  misc_feature (54)..(54): n is a, c, g, or t
  misc_feature (108)..(108): n is a, c, g, or t
  misc_feature (167)..(167): n is a, c, g, or t
  misc_feature (195)..(195): n is a, c, g, or t
  misc_feature (231)..(231): n is a, c, g, or t

SEQ ID NO: 110351 - DNA, 1457 bp, Homo Sapiens; identical to SEQ ID NO: 78742

SEQ ID NO: 110352 - DNA, 1468 bp, Homo Sapiens; identical to SEQ ID NO: 78743

SEQ ID NO: 110353 - DNA, 742 bp, Homo Sapiens; identical to SEQ ID NO: 78747
  misc_feature (41)..(41): n is a, c, g, or t
  misc_feature (426)..(484): n is a, c, g, or t

SEQ ID NO: 110354 - DNA, 516 bp, Homo Sapiens; identical to SEQ ID NO: 78748

SEQ ID NO: 110355 - DNA, 887 bp, Homo Sapiens; identical to SEQ ID NO: 78756
  misc_feature (712)..(712): n is a, c, g, or t

SEQ ID NO: 110356 - DNA, 1933 bp, Homo Sapiens; identical to SEQ ID NO: 78757

SEQ ID NO: 110357 - DNA, 1420 bp, Homo Sapiens; identical to SEQ ID NO: 78758
  misc_feature (1305)..(1339): n is a, c, g, or t

SEQ ID NO: 110358 - DNA, 1060 bp, Homo Sapiens; identical to SEQ ID NO: 78772
  misc_feature (981)..(1000): n is a, c, g, or t

SEQ ID NO: 110359 - DNA, 1036 bp, Homo Sapiens; identical to SEQ ID NO: 78773

SEQ ID NO: 110360 - DNA, 692 bp, Homo Sapiens; identical to SEQ ID NO: 78776
  misc_feature (36)..(36): n is a, c, g, or t
  misc_feature (73)..(73): n is a, c, g, or t
  misc_feature (127)..(127): n is a, c, g, or t

SEQ ID NO: 110361 - DNA, 902 bp, Homo Sapiens; identical to SEQ ID NO: 78777

SEQ ID NO: 110362 - DNA, 1294 bp, Homo Sapiens; identical to SEQ ID NO: 78779
  misc_feature (1251)..(1251): n is a, c, g, or t

SEQ ID NO: 110363 - DNA, 2765 bp, Homo Sapiens; identical to SEQ ID NO: 78780
  misc_feature (2162)..(2217): n is a, c, g, or t
  misc_feature (2483)..(2491): n is a, c, g, or t

SEQ ID NO: 110364 - DNA, 1332 bp, Homo Sapiens; identical to SEQ ID NO: 78798
  misc_feature (1034)..(1163): n is a, c, g, or t
  misc_feature (1172)..(1190): n is a, c, g, or t

SEQ ID NO: 110365 - DNA, 877 bp, Homo Sapiens; identical to SEQ ID NO: 78799

SEQ ID NO: 110366 - DNA, 1126 bp, Homo Sapiens; identical to SEQ ID NO: 78824
